United States Patent Application Publication US 2026/0226133 A1 - sequence listing, part 2

SEQ ID NO: 2355 - DNA, 2232 bp, synthetic construct
  source 1..2232: mol_type = other DNA
atggccttaccagtgaccgccttgctcctgccgctggccttgctgctccacgccgccaggccggaattcgatggcggcattacacagagccccaagtacctgttcagaaaagagggccagaacgtcaccctgagctgcgagcagaacctgaaccacgacgccatgtactggtacagacaggacccaggccagggcctgagactgatctactactcttgggctcagggcgacttccagaagggcgatattgccgagggctacagcgtgtccagagagaagaaagagtcctttccactgaccgtgacaagcgcccagaagaaccctaccgccttctacctgtgtgccagctcttggggagccccttacgagcagtatttcggccctggcaccagactgacagttctcgaggacctgaagaacgtgttcccacctgaggtggccgtgttcgagcctagcgaggccgagatcagccacacccagaaagccaccctcgtgtgcctggctaccggcttctaccccgaccatgtggaactgtcttggtgggtcaacggcaaagaggtgcacagcggcgtgtctaccgacccccagccactgaaagaacagcccgccctgaacgacagccggtactgcctgagcagcagactgagagtgtccgccaccttctggcagaacccccggaaccacttcagatgccaggtgcagttctacggcctgagcgagaacgacgagtggacccaggacagagccaagcccgtgacccagatcgtgtctgccgaagcctggggcagagccgattgcggatccctgggagagcctcagctgtgctatatcctggacgccatcctgtttctgtacggcatcgtgctgaccctgctgtactgcaggagtaagaggagcaggctcctgcacagtgactacatgaacatgactccacgccgccccggacccacccgcaagcattaccagccctatgccccaccacgcgacttcgcagcctatcgctcccggctgaagatccaagtgcggaaggccgccatcaccagctacgagaaatccgacggcgtgtacaccggcctgagcaccagaaatcaagagacatacgagacactgaagcacgaaaagcctccacaaagggccaagcgatctggatctggagcaacaaacttctcactactcaaacaagcaggtgacgtggaggagaatcccgggcctactagtatggactggatttggcgcatccttttccttgtcggcgctgctaccggcgcgcattccttcgaacaacaaggcgaagaagatccccaggctctgagcatccaagagggcgagaatgccaccatgaactgctcctacaagaccagcatcaacaacctccagtggtacaggcagaacagcggcagaggactggtgcacctgatcctgatccggtccaacgagagagagaagcactccggcagactgagagtgaccctggacaccagcaagaagtccagcagcctgctgattaccgccagcagagccgccgatacagccagctacttttgtgccaccgacggcgatacccctctggtgtttggcaagggcacaagactgagcgtgatcgccaatacgcgtatccagaaccctgatcctgccgtgtaccagctgcgggatagcaagagcagcgacaagagcgtgtgtctgttcaccgacttcgacagccagaccaacgtgtcccagagcaaggactccgacgtgtacatcaccgataagaccgtgctggacatgcggagcatggacttcaagagcaactccgccgtggcctggtccaacaagtccgatttcgcctgcgccaacgccttcaacaacagcattatccccgaggacacattcttcccaagccccgagagcagctgcggtaccctcggagaaccacagctctgttacattctggatgctatcctgttcctctatgggatcgtcctgacactcctgtattgcaggagcaagcggtcacggctgctccacagcgattacatgaatatgacaccacgaagaccgggtcctactcgcaaacactaccaaccctacgcacctccccgcgactttgcagcgtaccgatctagactcaaaattcaagttcgcaaagccgccattacctcttacgagaagagtgatggggtgtacacaggactgtctacccggaatcaagaaacctacgaaaccctcaaacatgagaagccacctcagtaa

SEQ ID NO: 2356 - DNA, 1986 bp, synthetic construct
  source 1..1986: mol_type = other DNA
atggccttaccagtgaccgccttgctcctgccgctggccttgctgctccacgccgccaggccggaattcgatggcggcattacacagagccccaagtacctgttcagaaaagagggccagaacgtcaccctgagctgcgagcagaacctgaaccacgacgccatgtactggtacagacaggacccaggccagggcctgagactgatctactactcttgggctcagggcgacttccagaagggcgatattgccgagggctacagcgtgtccagagagaagaaagagtcctttccactgaccgtgacaagcgcccagaagaaccctaccgccttctacctgtgtgccagctcttggggagccccttacgagcagtatttcggccctggcaccagactgacagttctcgaggacctgaagaacgtgttcccacctgaggtggccgtgttcgagcctagcgaggccgagatcagccacacccagaaagccaccctcgtgtgcctggctaccggcttctaccccgaccatgtggaactgtcttggtgggtcaacggcaaagaggtgcacagcggcgtgtctaccgacccccagccactgaaagaacagcccgccctgaacgacagccggtactgcctgagcagcagactgagagtgtccgccaccttctggcagaacccccggaaccacttcagatgccaggtgcagttctacggcctgagcgagaacgacgagtggacccaggacagagccaagcccgtgacccagatcgtgtctgccgaagcctggggcagagccgattgcggatccctgggagagcctcagctgagctatatcctggacgccatcctgtttctgtacggcatcgtgctgaccctgctgtactgccggctgaagatccaagtgcggaaggccgccatcaccagctacgagaaatccgacggcgtgtacaccggcctgagcaccagaaatcaagagacatacgagacactgaagcacgaaaagcctccacaaagggccaagcgatctggatctggagcaacaaacttctcactactcaaacaagcaggtgacgtggaggagaatcccgggcctactagtatggactggatttggcgcatccttttccttgtcggcgctgctaccggcgcgcattccttcgaacaacaaggcgaagaagatccccaggctctgagcatccaagagggcgagaatgccaccatgaactgctcctacaagaccagcatcaacaacctccagtggtacaggcagaacagcggcagaggactggtgcacctgatcctgatccggtccaacgagagagagaagcactccggcagactgagagtgaccctggacaccagcaagaagtccagcagcctgctgattaccgccagcagagccgccgatacagccagctacttttgtgccaccgacggcgatacccctctggtgtttggcaagggcacaagactgagcgtgatcgccaatacgcgtatccagaaccctgatcctgccgtgtaccagctgcgggatagcaagagcagcgacaagagcgtgtgtctgttcaccgacttcgacagccagaccaacgtgtcccagagcaaggactccgacgtgtacatcaccgataagaccgtgctggacatgcggagcatggacttcaagagcaactccgccgtggcctggtccaacaagtccgatttcgcctgcgccaacgccttcaacaacagcattatccccgaggacacattcttcccaagccccgagagcagctgcggtaccctcggagaaccacagctctcttacattctggatgctatcctgttcctctatgggatcgtcctgacactcctgtattgcagactcaaaattcaagttcgcaaagccgccattacctcttacgagaagagtgatggggtgtacacaggactgtctacccggaatcaagaaacctacgaaaccctcaaacatgagaagccacctcagtaa

SEQ ID NO: 2357 - DNA, 2094 bp, synthetic construct
  source 1..2094: mol_type = other DNA
atggccttaccagtgaccgccttgctcctgccgctggccttgctgctccacgccgccaggccggaattcgatggcggcattacacagagccccaagtacctgttcagaaaagagggccagaacgtcaccctgagctgcgagcagaacctgaaccacgacgccatgtactggtacagacaggacccaggccagggcctgagactgatctactactcttgggctcagggcgacttccagaagggcgatattgccgagggctacagcgtgtccagagagaagaaagagtcctttccactgaccgtgacaagcgcccagaagaaccctaccgccttctacctgtgtgccagctcttggggagccccttacgagcagtatttcggccctggcaccagactgacagttctcgaggacctgaagaacgtgttcccacctgaggtggccgtgttcgagcctagcgaggccgagatcagccacacccagaaagccaccctcgtgtgcctggctaccggcttctaccccgaccatgtggaactgtcttggtgggtcaacggcaaagaggtgcacagcggcgtgtctaccgacccccagccactgaaagaacagcccgccctgaacgacagccggtactgcctgagcagcagactgagagtgtccgccaccttctggcagaacccccggaaccacttcagatgccaggtgcagttctacggcctgagcgagaacgacgagtggacccaggacagagccaagcccgtgacccagatcgtgtctgccgaagcctggggcagagccgattgcggatcccaggctcagagcgattgcagctgtagcacagtgtctccaggcgtgctggccggaattgtgatgggcgatctggtgctgacagtgctgattgccctggccgtgtacttcctgggtagactggtgcctagaggaagaggcgctgccgaagccgccacaagaaagcagagaatcaccgagacagagagcccctaccaagagctgcaaggccagagaagcgacgtgtacagcgacctgaatacccagcggccttactacaaaagggccaagcgatctggatctggagcaacaaacttctcactactcaaacaagcaggtgacgtggaggagaatcccgggcctactagtatggactggatttggcgcatccttttccttgtcggcgctgctaccggcgcgcattccttcgaacaacaaggcgaagaagatccccaggctctgagcatccaagagggcgagaatgccaccatgaactgctcctacaagaccagcatcaacaacctccagtggtacaggcagaacagcggcagaggactggtgcacctgatcctgatccggtccaacgagagagagaagcactccggcagactgagagtgaccctggacaccagcaagaagtccagcagcctgctgattaccgccagcagagccgccgatacagccagctacttttgtgccaccgacggcgatacccctctggtgtttggcaagggcacaagactgagcgtgatcgccaatacgcgtatccagaaccctgatcctgccgtgtaccagctgcgggatagcaagagcagcgacaagagcgtgtgtctgttcaccgacttcgacagccagaccaacgtgtcccagagcaaggactccgacgtgtacatcaccgataagaccgtgctggacatgcggagcatggacttcaagagcaactccgccgtggcctggtccaacaagtccgatttcgcctgcgccaacgccttcaacaacagcattatccccgaggacacattcttcccaagccccgagagcagctgcggtacccaggctcagagcgattgcagctctagcacagtgtctccaggcgtgctggccggaattgtgatgggcgatctggtgctgacagtgctgattgccctggccgtgtacttcctgggtagactggtgcctagaggaagaggcgctgccgaagccgccacaagaaagcagagaatcaccgagacagagagcccctaccaagagctgcaaggccagagaagcgacgtgtacagcgacctgaatacccagcggccttactacaaataa

SEQ ID NO: 2358 - DNA, 2220 bp, synthetic construct
  source 1..2220: mol_type = other DNA
atggccttaccagtgaccgccttgctcctgccgctggccttgctgctccacgccgccaggccggaattcgatggcggcattacacagagccccaagtacctgttcagaaaagagggccagaacgtcaccctgagctgcgagcagaacctgaaccacgacgccatgtactggtacagacaggacccaggccagggcctgagactgatctactactcttgggctcagggcgacttccagaagggcgatattgccgagggctacagcgtgtccagagagaagaaagagtcctttccactgaccgtgacaagcgcccagaagaaccctaccgccttctacctgtgtgccagctcttggggagccccttacgagcagtatttcggccctggcaccagactgacagttctcgaggacctgaagaacgtgttcccacctgaggtggccgtgttcgagcctagcgaggccgagatcagccacacccagaaagccaccctcgtgtgcctggctaccggcttctaccccgaccatgtggaactgtcttggtgggtcaacggcaaagaggtgcacagcggcgtgtctaccgacccccagccactgaaagaacagcccgccctgaacgacagccggtactgcctgagcagcagactgagagtgtccgccaccttctggcagaacccccggaaccacttcagatgccaggtgcagttctacggcctgagcgagaacgacgagtggacccaggacagagccaagcccgtgacccagatcgtgtctgccgaagcctggggcagagccgattgcggatcccaggctcagagcgattgcagctgtagcacagtgtctccaggcgtgctggccggaattgtgatgggcgatctggtgctgacagtgctgattgccctggccgtgtacttcctgggtagactggtgcctagaggaagaggcgctgccgaagccgccacaagaaagcagagaatcaccgagacagagagcccctaccaagagctgcaaggccagagaagcgacgtgtacagcgacctgaatacccagcggccttactacaaaagggccaagcgatctggatctggagcaacaaacttctcactactcaaacaagcaggtgacgtggaggagaatcccgggcctactagtatggactggatttggcgcatccttttccttgtcggcgctgctaccggcgcgcattccttcgaacaacaaggcgaagaagatccccaggctctgagcatccaagagggcgagaatgccaccatgaactgctcctacaagaccagcatcaacaacctccagtggtacaggcagaacagcggcagaggactggtgcacctgatcctgatccggtccaacgagagagagaagcactccggcagactgagagtgaccctggacaccagcaagaagtccagcagcctgctgattaccgccagcagagccgccgatacagccagctacttttgtgccaccgacggcgatacccctctggtgtttggcaagggcacaagactgagcgtgatcgccaatacgcgtatccagaaccctgatcctgccgtgtaccagctgcgggatagcaagagcagcgacaagagcgtgtgtctgttcaccgacttcgacagccagaccaacgtgtcccagagcaaggactccgacgtgtacatcaccgataagaccgtgctggacatgcggagcatggacttcaagagcaactccgccgtggcctggtccaacaagtccgatttcgcctgcgccaacgccttcaacaacagcattatccccgaggacacattcttcccaagccccgagagcagctgcggtacccaggctcagagcgattgcagctgtagcacagtgtctccaggcgtgctggccggaattgtgatgggcgatctggtgctgacagtgctgattgccctggccgtgtacttcctgggtagactggtgcctagaggaagaggcgctgccgaagccgccacaagaaagcagagaatcaccgagacagagagcccctaccaagagctgcaaggccagagaagcgacgtgtacagcgacctgaatacccagaaacggggcagaaagaaactcctgtatatattcaaacaaccatttatgagaccagtacaaactactcaagaggaagatggctgtagctgccgatttccagaagaagaagaaggaggatgtgaactgcggccttactacaaataa

SEQ ID NO: 2359 - DNA, 2217 bp, synthetic construct
  source 1..2217: mol_type = other DNA
atggccttaccagtgaccgccttgctcctgccgctggccttgctgctccacgccgccaggccggaattcgatggcggcattacacagagccccaagtacctgttcagaaaagagggccagaacgtcaccctgagctgcgagcagaacctgaaccacgacgccatgtactggtacagacaggacccaggccagggcctgagactgatctactactcttgggctcagggcgacttccagaagggcgatattgccgagggctacagcgtgtccagagagaagaaagagtcctttccactgaccgtgacaagcgcccagaagaaccctaccgccttctacctgtgtgccagctcttggggagccccttacgagcagtatttcggccctggcaccagactgacagttctcgaggacctgaagaacgtgttcccacctgaggtggccgtgttcgagcctagcgaggccgagatcagccacacccagaaagccaccctcgtgtgcctggctaccggcttctaccccgaccatgtggaactgtcttggtgggtcaacggcaaagaggtgcacagcggcgtgtctaccgacccccagccactgaaagaacagcccgccctgaacgacagccggtactgcctgagcagcagactgagagtgtccgccaccttctggcagaacccccggaaccacttcagatgccaggtgcagttctacggcctgagcgagaacgacgagtggacccaggacagagccaagcccgtgacccagatcgtgtctgccgaagcctggggcagagccgattgcggatcccaggctcagagcgattgcagctgtagcacagtgtctccaggcgtgctggccggaattgtgatgggcgatctggtgctgacagtgctgattgccctggccgtgtacttcctgggtagactggtgcctagaggaagaggcgctgccgaagccgccacaagaaagcagagaatcaccgagacagagagcccctaccaagagctgcaaggccagagaagcgacgtgtacagcgacctgaatacccagcggccttactacaaaagggccaagcgatctggatctggagcaacaaacttctcactactcaaacaagcaggtgacgtggaggagaatcccgggcctactagtatggactggatttggcgcatccttttccttgtcggcgctgctaccggcgcgcattccttcgaacaacaaggcgaagaagatccccaggctctgagcatccaagagggcgagaatgccaccatgaactgctcctacaagaccagcatcaacaacctccagtggtacaggcagaacagcggcagaggactggtgcacctgatcctgatccggtccaacgagagagagaagcactccggcagactgagagtgaccctggacaccagcaagaagtccagcagcctgctgattaccgccagcagagccgccgatacagccagctacttttgtgccaccgacggcgatacccctctggtgtttggcaagggcacaagactgagcgtgatcgccaatacgcgtatccagaaccctgatcctgccgtgtaccagctgcgggatagcaagagcagcgacaagagcgtgtgtctgttcaccgacttcgacagccagaccaacgtgtcccagagcaaggactccgacgtgtacatcaccgataagaccgtgctggacatgcggagcatggacttcaagagcaactccgccgtggcctggtccaacaagtccgatttcgcctgcgccaacgccttcaacaacagcattatccccgaggacacattcttcccaagccccgagagcagctgcggtacccaggctcagagcgattgcagctgtagcacagtgtctccaggcgtgctggccggaattgtgatgggcgatctggtgctgacagtgctgattgccctggccgtgtacttcctgggtagactggtgcctagaggaagaggcgctgccgaagccgccacaagaaagcagagaatcaccgagacagagagcccctaccaagagctgcaaggccagagaagcgacgtgtacagcgacctgaatacccagaggagcaagcggtcacggctgctccacagcgattacatgaatatgacaccacgaagaccgggtcctactcgcaaacactaccaaccctacgcacctccccgcgactttgcagcgtaccgatctcggccttactacaaataa

SEQ ID NO: 2360 - DNA, 2202 bp, synthetic construct
  source 1..2202: mol_type = other DNA
atggccttaccagtgaccgccttgctcctgccgctggccttgctgctccacgccgccaggccggaattcgatggcggcattacacagagccccaagtacctgttcagaaaagagggccagaacgtcaccctgagctgcgagcagaacctgaaccacgacgccatgtactggtacagacaggacccaggccagggcctgagactgatctactactcttgggctcagggcgacttccagaagggcgatattgccgagggctacagcgtgtccagagagaagaaagagtcctttccactgaccgtgacaagcgcccagaagaaccctaccgccttctacctgtgtgccagctcttggggagccccttacgagcagtatttcggccctggcaccagactgacagttctcgaggacctgaagaacgtgttcccacctgaggtggccgtgttcgagcctagcgaggccgagatcagccacacccagaaagccaccctcgtgtgcctggctaccggcttctaccccgaccatgtggaactgtcttggtgggtcaacggcaaagaggtgcacagcggcgtgtctaccgacccccagccactgaaagaacagcccgccctgaacgacagccggtactgcctgagcagcagactgagagtgtccgccaccttctggcagaacccccggaaccacttcagatgccaggtgcagttctacggcctgagcgagaacgacgagtggacccaggacagagccaagcccgtgacccagatcgtgtctgccgaagcctggggcagagccgattgcggatcccaggctcagagcgattgcagctgtagcacagtgtctccaggcgtgctggccggaattgtgatgggcgatctggtgctgacagtgctgattgccctggccgtgtacttcctgggtagactggtgcctagaggaagaggcgctgccgaagccgccacaagaaagcagagaatcaccgagacagagagcccctaccaagagctgcaaggccagagaagcgacgtgtacagcgacctgaatacccagcggccttactacaaaagggccaagcgatctggatctggagcaacaaacttctcactactcaaacaagcaggtgacgtggaggagaatcccgggcctactagtatggactggatttggcgcatccttttccttgtcggcgctgctaccggcgcgcattccttcgaacaacaaggcgaagaagatccccaggctctgagcatccaagagggcgagaatgccaccatgaactgctcctacaagaccagcatcaacaacctccagtggtacaggcagaacagcggcagaggactggtgcacctgatcctgatccggtccaacgagagagagaagcactccggcagactgagagtgaccctggacaccagcaagaagtccagcagcctgctgattaccgccagcagagccgccgatacagccagctacttttgtgccaccgacggcgatacccctctggtgtttggcaagggcacaagactgagcgtgatcgccaatacgcgtatccagaaccctgatcctgccgtgtaccagctgcgggatagcaagagcagcgacaagagcgtgtgtctgttcaccgacttcgacagccagaccaacgtgtcccagagcaaggactccgacgtgtacatcaccgataagaccgtgctggacatgcggagcatggacttcaagagcaactccgccgtggcctggtccaacaagtccgatttcgcctgcgccaacgccttcaacaacagcattatccccgaggacacattcttcccaagccccgagagcagctgcggtacccaggctcagagcgattgcagctgtagcacagtgtctccaggcgtgctggccggaattgtgatgggcgatctggtgctgacagtgctgattgccctggccgtgtacttcctgggtagactggtgcctagaggaagaggcgctgccgaagccgccacaagaaagcagagaatcaccgagacagagagcccctaccaagagctgcaaggccagagaagcgacgtgtacagcgacctgaatacccagagggaccaaagactgcctcctgacgctcacaaacctccaggcggaggcagcttcagaacccctatccaagaggaacaggctgacgcccacagcaccctggcaaaaattcggccttactacaaataa

SEQ ID NO: 2361 - DNA, 2454 bp, synthetic construct
  source 1..2454: mol_type = other DNA
atggccttaccagtgaccgccttgctcctgccgctggccttgctgctccacgccgccaggccggaattcgatggcggcattacacagagccccaagtacctgttcagaaaagagggccagaacgtcaccctgagctgcgagcagaacctgaaccacgacgccatgtactggtacagacaggacccaggccagggcctgagactgatctactactcttgggctcagggcgacttccagaagggcgatattgccgagggctacagcgtgtccagagagaagaaagagtcctttccactgaccgtgacaagcgcccagaagaaccctaccgccttctacctgtgtgccagctcttggggagccccttacgagcagtatttcggccctggcaccagactgacagttctcgaggacctgaagaacgtgttcccacctgaggtggccgtgttcgagcctagcgaggccgagatcagccacacccagaaagccaccctcgtgtgcctggctaccggcttctaccccgaccatgtggaactgtcttggtgggtcaacggcaaagaggtgcacagcggcgtgtctaccgacccccagccactgaaagaacagcccgccctgaacgacagccggtactgcctgagcagcagactgagagtgtccgccaccttctggcagaacccccggaaccacttcagatgccaggtgcagttctacggcctgagcgagaacgacgagtggacccaggacagagccaagcccgtgacccagatcgtgtctgccgaagcctggggcagagccgattgcggatcccaggctcagagcgattgcagctgtagcacagtgtctccaggcgtgctggccggaattgtgatgggcgatctggtgctgacagtgctgattgccctggccgtgtacttcctgggtagactggtgcctagaggaagaggcgctgccgaagccgccacaagaaagcagagaatcaccgagacagagagcccctaccaagagctgcaaggccagagaagcgacgtgtacagcgacctgaatacccagcggccttactacaaaagggccaagcgatctggatctggagcaacaaacttctcactactcaaacaagcaggtgacgtggaggagaatcccgggcctactagtatggactggatttggcgcatccttttccttgtcggcgctgctaccggcgcgcattccttcgaacaacaaggcgaagaagatccccaggctctgagcatccaagagggcgagaatgccaccatgaactgctcctacaagaccagcatcaacaacctccagtggtacaggcagaacagcggcagaggactggtgcacctgatcctgatccggtccaacgagagagagaagcactccggcagactgagagtgaccctggacaccagcaagaagtccagcagcctgctgattaccgccagcagagccgccgatacagccagctacttttgtgccaccgacggcgatacccctctggtgtttggcaagggcacaagactgagcgtgatcgccaatacgcgtatccagaaccctgatcctgccgtgtaccagctgcgggatagcaagagcagcgacaagagcgtgtgtctgttcaccgacttcgacagccagaccaacgtgtcccagagcaaggactccgacgtgtacatcaccgataagaccgtgctggacatgcggagcatggacttcaagagcaactccgccgtggcctggtccaacaagtccgatttcgcctgcgccaacgccttcaacaacagcattatccccgaggacacattcttcccaagccccgagagcagctgcggtacccaggctcagagcgattgcagctgtagcacagtgtctccaggcgtgctggccggaattgtgatgggcgatctggtgctgacagtgctgattgccctggccgtgtacttcctgggtagactggtgcctagaggaagaggcgctgccgaagccgccacaagaaagcagagaatcaccgagacagagagcccctaccaagagctgcaaggccagagaagcgacgtgtacagcgacctgaatacccagtggcggcggaagcggaaagagaagcagtctgagacaagccccaaagagttcctgaccatctacgaggacgtgaaggacctgaaaacccggcggaaccacgaacaagagcagacctttcctggcggaggcagcaccatctacagcatgatccagagccagagcagcgcccctacaagccaagagcctgcctacacactgtactccctgatccagcctagcagaaagagcggcagccggaagagaaatcacagccccagcttcaacagcacgatctacgaagtgatcggcaagagccagccaaaggctcagaaccctgccagactgagccggaaagagctggaaaacttcgacgtgtacagccggccttactacaaataa

SEQ ID NO: 2362 - DNA, 2730 bp, synthetic construct
  source 1..2730: mol_type = other DNA
atggccttaccagtgaccgccttgctcctgccgctggccttgctgctccacgccgccaggccggaattcgatggcggcattacacagagccccaagtacctgttcagaaaagagggccagaacgtcaccctgagctgcgagcagaacctgaaccacgacgccatgtactggtacagacaggacccaggccagggcctgagactgatctactactcttgggctcagggcgacttccagaagggcgatattgccgagggctacagcgtgtccagagagaagaaagagtcctttccactgaccgtgacaagcgcccagaagaaccctaccgccttctacctgtgtgccagctcttggggagccccttacgagcagtatttcggccctggcaccagactgacagttctcgaggacctgaagaacgtgttcccacctgaggtggccgtgttcgagcctagcgaggccgagatcagccacacccagaaagccaccctcgtgtgcctggctaccggcttctaccccgaccatgtggaactgtcttggtgggtcaacggcaaagaggtgcacagcggcgtgtctaccgacccccagccactgaaagaacagcccgccctgaacgacagccggtactgcctgagcagcagactgagagtgtccgccaccttctggcagaacccccggaaccacttcagatgccaggtgcagttctacggcctgagcgagaacgacgagtggacccaggacagagccaagcccgtgacccagatcgtgtctgccgaagcctggggcagagccgattgcggatcccaggctcagagcgattgcagctgtagcacagtgtctccaggcgtgctggccggaattgtgatgggcgatctggtgctgacagtgctgattgccctggccgtgtacttcctgggtagactggtgcctagaggaagaggcgctgccgaagccgccacaagaaagcagagaatcaccgagacagagagcccctaccaagagctgcaaggccagagaagcgacgtgtacagcgacctgaatacccagagagtgaagttcagcagaagcgccgacgcccctgcctaccagcagggacagaaccaactgtacaacgagctgaacctgggcagacgggaagagtacgacgtgctggacaagcggagaggcagggaccctgagatgggcggaaagccccagcggagaaagaacccccaggaaggactgtataacgaactccagaaagacaagatggccgaagcctacagcgagatcggcatgaagggcgagcggagaagaggcaagggccacgatggcctgtaccagggcctgagcaccgccaccaaggacacctatgacgccctgcacatgcaggccctgcctccaagaagggccaagcgatctggatctggagcaacaaacttctcactactcaaacaagcaggtgacgtggaggagaatcccgggcctactagtatggactggatttggcgcatccttttccttgtcggcgctgctaccggcgcgcattccttcgaacaacaaggcgaagaagatccccaggctctgagcatccaagagggcgagaatgccaccatgaactgctcctacaagaccagcatcaacaacctccagtggtacaggcagaacagcggcagaggactggtgcacctgatcctgatccggtccaacgagagagagaagcactccggcagactgagagtgaccctggacaccagcaagaagtccagcagcctgctgattaccgccagcagagccgccgatacagccagctacttttgtgccaccgacggcgatacccctctggtgtttggcaagggcacaagactgagcgtgatcgccaatacgcgtatccagaaccctgatcctgccgtgtaccagctgcgggatagcaagagcagcgacaagagcgtgtgtctgttcaccgacttcgacagccagaccaacgtgtcccagagcaaggactccgacgtgtacatcaccgataagaccgtgctggacatgcggagcatggacttcaagagcaactccgccgtggcctggtccaacaagtccgatttcgcctgcgccaacgccttcaacaacagcattatccccgaggacacattcttcccaagccccgagagcagctgcggtaccacaacgccgggcgaaaggagttccttgccggccttttaccccggcacaagcggaagctgtagtgggtgtggaagcctcagcctcccacttcttgcgggcctcgtcgcggcagatgcagtagcttcacttcttattgtaggcgcggtatttctctgtgctcgaccaaggaggtcacccgctcaggaggatggtaaggtgtatataaatatgccaggacgcggaagctctagacgggttaagttttccagatccgcagacgcacccgcttaccaacaagggcagaaccaactctacaatgaacttaatttggggcggagggaagagtacgacgttctggacaaaaggaggggacgagatcccgagatgggcggaaagcctcagcgaaggaagaatccgcaagaggggctttataacgaactccagaaagataaaatggcagaagcctatagtgagattgggatgaagggagaaaggaggaggggtaaaggtcacgatgggttgtaccaaggattgagcacagccactaaagatacctatgatgcgctccacatgcaggccctgccgccaagataa

SEQ ID NO: 2363 - DNA, 2508 bp, synthetic construct
  source 1..2508: mol_type = other DNA
atggccttaccagtgaccgccttgctcctgccgctggccttgctgctccacgccgccaggccggaattcgatggcggcattacacagagccccaagtacctgttcagaaaagagggccagaacgtcaccctgagctgcgagcagaacctgaaccacgacgccatgtactggtacagacaggacccaggccagggcctgagactgatctactactcttgggctcagggcgacttccagaagggcgatattgccgagggctacagcgtgtccagagagaagaaagagtcctttccactgaccgtgacaagcgcccagaagaaccctaccgccttctacctgtgtgccagctcttggggagccccttacgagcagtatttcggccctggcaccagactgacagttctcgaggacctgaagaacgtgttcccacctgaggtggccgtgttcgagcctagcgaggccgagatcagccacacccagaaagccaccctcgtgtgcctggctaccggcttctaccccgaccatgtggaactgtcttggtgggtcaacggcaaagaggtgcacagcggcgtgtctaccgacccccagccactgaaagaacagcccgccctgaacgacagccggtactgcctgagcagcagactgagagtgtccgccaccttctggcagaacccccggaaccacttcagatgccaggtgcagttctacggcctgagcgagaacgacgagtggacccaggacagagccaagcccgtgacccagatcgtgtctgccgaagcctggggcagagccgattgcggatcccaggctcagagcgattgcagctgtagcacagtgtctccaggcgtgctggccggaattgtgatgggcgatctggtgctgacagtgctgattgccctggccgtgtacttcctgggtagactggtgcctagaggaagaggcgctgccgaagccgccacaagaaagcagagaatcaccgagacagagagcccctaccaagagctgcaaggccagagaagcgacgtgtacagcgacctgaatacccagagagtgaagttcagcagaagcgccgacgcccctgcctaccagcagggacagaaccaactgtacaacgagctgaacctgggcagacgggaagagtacgacgtgctggacaagcggagaggcagggaccctgagatgggcggaaagccccagcggagaaagaacccccaggaaggactgtataacgaactccagaaagacaagatggccgaagcctacagcgagatcggcatgaagggcgagcggagaagaggcaagggccacgatggcctgtaccagggcctgagcaccgccaccaaggacacctatgacgccctgcacatgcaggccctgcctccaagaagggccaagcgatctggatctggagcaacaaacttctcactactcaaacaagcaggtgacgtggaggagaatcccgggcctactagtatggactggatttggcgcatccttttccttgtcggcgctgctaccggcgcgcattccttcgaacaacaaggcgaagaagatccccaggctctgagcatccaagagggcgagaatgccaccatgaactgctcctacaagaccagcatcaacaacctccagtggtacaggcagaacagcggcagaggactggtgcacctgatcctgatccggtccaacgagagagagaagcactccggcagactgagagtgaccctggacaccagcaagaagtccagcagcctgctgattaccgccagcagagccgccgatacagccagctacttttgtgccaccgacggcgatacccctctggtgtttggcaagggcacaagactgagcgtgatcgccaatacgcgtatccagaaccctgatcctgccgtgtaccagctgcgggatagcaagagcagcgacaagagcgtgtgtctgttcaccgacttcgacagccagaccaacgtgtcccagagcaaggactccgacgtgtacatcaccgataagaccgtgctggacatgcggagcatggacttcaagagcaactccgccgtggcctggtccaacaagtccgatttcgcctgcgccaacgccttcaacaacagcattatccccgaggacacattcttcccaagccccgagagcagctgcggtaccacaacgccgggcgaaaggagttccttgccggccttttaccccggcacaagcggaagctgtagtgggtgtggaagcctcagcctcccacttcttgcgggcctcgtcgcggcagatgcagtagcttcacttcttattgtaggcgcggtatttaagagaggccggaagaagctgctgtacatcttcaagcagcctttcatgcggcccgtgcagaccacccaggaagaggacggctgctcctgccggttccccgaggaagaagaaggcggctgcgagctgctctgtgctcgaccaaggaggtcacccgctcaggaggatggtaaggtgtatataaatatgccaggacgcggataa

SEQ ID NO: 2364 - DNA, 2505 bp, synthetic construct
  source 1..2505: mol_type = other DNA
atggccttaccagtgaccgccttgctcctgccgctggccttgctgctccacgccgccaggccggaattcgatggcggcattacacagagccccaagtacctgttcagaaaagagggccagaacgtcaccctgagctgcgagcagaacctgaaccacgacgccatgtactggtacagacaggacccaggccagggcctgagactgatctactactcttgggctcagggcgacttccagaagggcgatattgccgagggctacagcgtgtccagagagaagaaagagtcctttccactgaccgtgacaagcgcccagaagaaccctaccgccttctacctgtgtgccagctcttggggagccccttacgagcagtatttcggccctggcaccagactgacagttctcgaggacctgaagaacgtgttcccacctgaggtggccgtgttcgagcctagcgaggccgagatcagccacacccagaaagccaccctcgtgtgcctggctaccggcttctaccccgaccatgtggaactgtcttggtgggtcaacggcaaagaggtgcacagcggcgtgtctaccgacccccagccactgaaagaacagcccgccctgaacgacagccggtactgcctgagcagcagactgagagtgtccgccaccttctggcagaacccccggaaccacttcagatgccaggtgcagttctacggcctgagcgagaacgacgagtggacccaggacagagccaagcccgtgacccagatcgtgtctgccgaagcctggggcagagccgattgcggatcccaggctcagagcgattgcagctgtagcacagtgtctccaggcgtgctggccggaattgtgatgggcgatctggtgctgacagtgctgattgccctggccgtgtacttcctgggtagactggtgcctagaggaagaggcgctgccgaagccgccacaagaaagcagagaatcaccgagacagagagcccctaccaagagctgcaaggccagagaagcgacgtgtacagcgacctgaatacccagagagtgaagttcagcagaagcgccgacgcccctgcctaccagcagggacagaaccaactgtacaacgagctgaacctgggcagacgggaagagtacgacgtgctggacaagcggagaggcagggaccctgagatgggcggaaagccccagcggagaaagaacccccaggaaggactgtataacgaactccagaaagacaagatggccgaagcctacagcgagatcggcatgaagggcgagcggagaagaggcaagggccacgatggcctgtaccagggcctgagcaccgccaccaaggacacctatgacgccctgcacatgcaggccctgcctccaagaagggccaagcgatctggatctggagcaacaaacttctcactactcaaacaagcaggtgacgtggaggagaatcccgggcctactagtatggactggatttggcgcatccttttccttgtcggcgctgctaccggcgcgcattccttcgaacaacaaggcgaagaagatccccaggctctgagcatccaagagggcgagaatgccaccatgaactgctcctacaagaccagcatcaacaacctccagtggtacaggcagaacagcggcagaggactggtgcacctgatcctgatccggtccaacgagagagagaagcactccggcagactgagagtgaccctggacaccagcaagaagtccagcagcctgctgattaccgccagcagagccgccgatacagccagctacttttgtgccaccgacggcgatacccctctggtgtttggcaagggcacaagactgagcgtgatcgccaatacgcgtatccagaaccctgatcctgccgtgtaccagctgcgggatagcaagagcagcgacaagagcgtgtgtctgttcaccgacttcgacagccagaccaacgtgtcccagagcaaggactccgacgtgtacatcaccgataagaccgtgctggacatgcggagcatggacttcaagagcaactccgccgtggcctggtccaacaagtccgatttcgcctgcgccaacgccttcaacaacagcattatccccgaggacacattcttcccaagccccgagagcagctgcggtaccacaacgccgggcgaaaggagttccttgccggccttttaccccggcacaagcggaagctgtagtgggtgtggaagcctcagcctcccacttcttgcgggcctcgtcgcggcagatgcagtagcttcacttcttattgtaggcgcggtatttaggagcaagcggtcacggctgctccacagcgattacatgaatatgacaccacgaagaccgggtcctactcgcaaacactaccaaccctacgcacctccccgcgactttgcagcgtaccgatctctctgtgctcgaccaaggaggtcacccgctcaggaggatggtaaggtgtatataaatatgccaggacgcggataa

SEQ ID NO: 2365 - DNA, 3240 bp, synthetic construct
  source 1..3240: mol_type = other DNA
atggccttaccagtgaccgccttgctcctgccgctggccttgctgctccacgccgccaggccggaattcgatggcggcattacacagagccccaagtacctgttcagaaaagagggccagaacgtcaccctgagctgcgagcagaacctgaaccacgacgccatgtactggtacagacaggacccaggccagggcctgagactgatctactactcttgggctcagggcgacttccagaagggcgatattgccgagggctacagcgtgtccagagagaagaaagagtcctttccactgaccgtgacaagcgcccagaagaaccctaccgccttctacctgtgtgccagctcttggggagccccttacgagcagtatttcggccctggcaccagactgacagttctcgaggacctgaagaacgtgttcccacctgaggtggccgtgttcgagcctagcgaggccgagatcagccacacccagaaagccaccctcgtgtgcctggctaccggcttctaccccgaccatgtggaactgtcttggtgggtcaacggcaaagaggtgcacagcggcgtgtctaccgacccccagccactgaaagaacagcccgccctgaacgacagccggtactgcctgagcagcagactgagagtgtccgccaccttctggcagaacccccggaaccacttcagatgccaggtgcagttctacggcctgagcgagaacgacgagtggacccaggacagagccaagcccgtgacccagatcgtgtctgccgaagcctggggcagagccgattgcggatcccagagcttcggcctgctggaccccaagctgtgctacctgctggatggcatcctgttcatctacggcgtgatcctgaccgccctgttcctgagagtgaagttcagcagaagcgccgacgcccctgcctaccagcagggacagaaccaactgtacaacgagctgaacctgggcagacgggaagagtacgacgtgctggacaagcggagaggcagggaccctgagatgggcggaaagccccagcggagaaagaacccccaggaaggactgtataacgaactccagaaagacaagatggccgaagcctacagcgagatcggcatgaagggcgagcggagaagaggcaagggccacgatggcctgtaccagggcctgagcaccgccaccaaggacacctatgacgccctgcacatgcaggccctgcctccaagaagggccaagcgatctggatctggagcaacaaacttctcactactcaaacaagcaggtgacgtggaggagaatcccgggcctactagtatggactggatttggcgcatccttttccttgtcggcgctgctaccggcgcgcattccttcgaacaacaaggcgaagaagatccccaggctctgagcatccaagagggcgagaatgccaccatgaactgctcctacaagaccagcatcaacaacctccagtggtacaggcagaacagcggcagaggactggtgcacctgatcctgatccggtccaacgagagagagaagcactccggcagactgagagtgaccctggacaccagcaagaagtccagcagcctgctgattaccgccagcagagccgccgatacagccagctacttttgtgccaccgacggcgatacccctctggtgtttggcaagggcacaagactgagcgtgatcgccaatacgcgtatccagaaccctgatcctgccgtgtaccagctgcgggatagcaagagcagcgacaagagcgtgtgtctgttcaccgacttcgacagccagaccaacgtgtcccagagcaaggactccgacgtgtacatcaccgataagaccgtgctggacatgcggagcatggacttcaagagcaactccgccgtggcctggtccaacaagtccgatttcgcctgcgccaacgccttcaacaacagcattatccccgaggacacattcttcccaagccccgagagcagctgcggtacccagagttttgggttgttggaccctaaattgtgctatctgttggacggaatcctgttcatttacggagtgatcctgaccgcattgttcctgcgggttaagttttccagatccgcagacgcacccgcttaccaacaagggcagaaccaactctacaatgaacttaatttggggcggagggaagagtacgacgttctggacaaaaggaggggacgagatcccgagatgggcggaaagcctcagcgaaggaagaatccgcaagaggggctttataacgaactccagaaagataaaatggcagaagcctatagtgagattgggatgaagggagaaaggaggaggggtaaaggtcacgatgggttgtaccaaggattgagcacagccactaaagatacctatgatgcgctccacatgcaggccctgccgccaagacgcgccaagagaagcggatctggcgtgaagcagaccctgaatttcgacctgctgaagctggctggcgacgtggaatccaacccaggcccttctagaggccatatggctctgcctgtgacagctctgctgctgcctctggcactgctgcttcatgctgctagacctagccagtttagagtgtcccctctggacagaacctggaacctgggcgagacagtggaactgaagtgccaggtgctgctgagcaaccctacaagcggctgctcctggctgtttcagcctagaggtgcagccgcctctcctacctttctgctgtacctgagccagaacaagcccaaggccgccgaaggactggacacccagagattcagcggcaagagactgggcgacaccttcgtgctgaccctgagcgacttcagaagagagaacgagggctactacttctgtagcgccctgagcaacagcatcatgtacttcagccacttcgtgcccgtgtttctgcccgccaagcctacaacaacccctgctcctagacctcctacaccagctcctacaatcgccagccagcctctgtctctcagacccgaagcctgtagacctgctgctggcggagctgtgcataccagaggactggatttcgcctgcgacatctacatctgggctcctctggctggcacatgtggcgtgctgctgctgtccctggtcatcaccctgtactgcaaccaccggaacaggcggagagtgtgcaagtgccctagacctgtggtcaagagcggcgacaagcctagcctgagcgccagatatgtt

SEQ ID NO: 2366 - DNA, 2463 bp, synthetic construct
  source 1..2463: mol_type = other DNA
atggccttaccagtgaccgccttgctcctgccgctggccttgctgctccacgccgccaggccggaattcgatggcggcattacacagagccccaagtacctgttcagaaaagagggccagaacgtcaccctgagctgcgagcagaacctgaaccacgacgccatgtactggtacagacaggacccaggccagggcctgagactgatctactactcttgggctcagggcgacttccagaagggcgatattgccgagggctacagcgtgtccagagagaagaaagagtcctttccactgaccgtgacaagcgcccagaagaaccctaccgccttctacctgtgtgccagctcttggggagccccttacgagcagtatttcggccctggcaccagactgacagttctcgaggacctgaagaacgtgttcccacctgaggtggccgtgttcgagcctagcgaggccgagatcagccacacccagaaagccaccctcgtgtgcctggctaccggcttctaccccgaccatgtggaactgtcttggtgggtcaacggcaaagaggtgcacagcggcgtgtctaccgacccccagccactgaaagaacagcccgccctgaacgacagccggtactgcctgagcagcagactgagagtgtccgccaccttctggcagaacccccggaaccacttcagatgccaggtgcagttctacggcctgagcgagaacgacgagtggacccaggacagagccaagcccgtgacccagatcgtgtctgccgaagcctggggcagagccgattgcggatcccagagcttcggcctgctggaccccaagctgtgctacctgctggatggcatcctgttcatctacggcgtgatcctgaccgccctgttcctgagagtgaagttcagcagaagcgccgacgcccctgcctaccagcagggacagaaccaactgtacaacgagctgaacctgggcagacgggaagagtacgacgtgctggacaagcggagaggcagggaccctgagatgggcggaaagccccagcggagaaagaacccccaggaaggactgtataacgaactccagaaagacaagatggccgaagcctacagcgagatcggcatgaagggcgagcggagaagaggcaagggccacgatggcctgtaccagggcctgagcaccgccaccaaggacacctatgacgccctgcacatgcaggccctgcctccaagaagggccaagcgatctggatctggagcaacaaacttctcactactcaaacaagcaggtgacgtggaggagaatcccgggcctactagtatggactggatttggcgcatccttttccttgtcggcgctgctaccggcgcgcattccttcgaacaacaaggcgaagaagatccccaggctctgagcatccaagagggcgagaatgccaccatgaactgctcctacaagaccagcatcaacaacctccagtggtacaggcagaacagcggcagaggactggtgcacctgatcctgatccggtccaacgagagagagaagcactccggcagactgagagtgaccctggacaccagcaagaagtccagcagcctgctgattaccgccagcagagccgccgatacagccagctacttttgtgccaccgacggcgatacccctctggtgtttggcaagggcacaagactgagcgtgatcgccaatacgcgtgcctctacaaagggaccctccgtgtttcctctggctcccagcagcaagtctacaagcggaggaacagccgctctgggctgcctggtcaaggattactttcccgagcctgtgaccgtgtcctggaatagcggagcactgacaagcggcgtgcacacctttccagccgtgctgcaaagcagcggcctgtactctctgagcagcgtggtcacagtgcctagctctagcctgggcacccagacctacatctgcaatgtgaaccacaagcctagcaacaccaaggtggacaagagagtggaacccaagagctgtggtacccagagttttgggttgttggaccctaaattgagctatctgttggacggaatcctgttcatttacggagtgatcctgaccgcattgttcctgcgggttaagttttccagatccgcagacgcacccgcttaccaacaagggcagaaccaactctacaatgaacttaatttggggcggagggaagagtacgacgttctggacaaaaggaggggacgagatcccgagatgggcggaaagcctcagcgaaggaagaatccgcaagaggggctttataacgaactccagaaagataaaatggcagaagcctatagtgagattgggatgaagggagaaaggaggaggggtaaaggtcacgatgggttgtaccaaggattgagcacagccactaaagatacctatgatgcgctccacatgcaggccctgccgccaagataa

SEQ ID NO: 2367 - DNA, 2436 bp, synthetic construct
  source 1..2436: mol_type = other DNA
atggccttaccagtgaccgccttgctcctgccgctggccttgctgctccacgccgccaggccggaattcgatggcggcattacacagagccccaagtacctgttcagaaaagagggccagaacgtcaccctgagctgcgagcagaacctgaaccacgacgccatgtactggtacagacaggacccaggccagggcctgagactgatctactactcttgggctcagggcgacttccagaagggcgatattgccgagggctacagcgtgtccagagagaagaaagagtcctttccactgaccgtgacaagcgcccagaagaaccctaccgccttctacctgtgtgccagctcttggggagccccttacgagcagtatttcggccctggcaccagactgacagttctcgaggacctgaagaacgtgttcccacctgaggtggccgtgttcgagcctagcgaggccgagatcagccacacccagaaagccaccctcgtgtgcctggctaccggcttctaccccgaccatgtggaactgtcttggtgggtcaacggcaaagaggtgcacagcggcgtgtctaccgacccccagccactgaaagaacagcccgccctgaacgacagccggtactgcctgagcagcagactgagagtgtccgccaccttctggcagaacccccggaaccacttcagatgccaggtgcagttctacggcctgagcgagaacgacgagtggacccaggacagagccaagcccgtgacccagatcgtgtctgccgaagcctggggcagagccgattgcggatcccagagcttcggcctgctggaccccaagctgtgctacctgctggatggcatcctgttcatctacggcgtgatcctgaccgccctgttcctgagagtgaagttcagcagaagcgccgacgcccctgcctaccagcagggacagaaccaactgtacaacgagctgaacctgggcagacgggaagagtacgacgtgctggacaagcggagaggcagggaccctgagatgggcggaaagccccagcggagaaagaacccccaggaaggactgtataacgaactccagaaagacaagatggccgaagcctacagcgagatcggcatgaagggcgagcggagaagaggcaagggccacgatggcctgtaccagggcctgagcaccgccaccaaggacacctatgacgccctgcacatgcaggccctgcctccaagaagggccaagcgatctggatctggagcaacaaacttctcactactcaaacaagcaggtgacgtggaggagaatcccgggcctactagtatggactggatttggcgcatccttttccttgtcggcgctgctaccggcgcgcattccttcgaacaacaaggcgaagaagatccccaggctctgagcatccaagagggcgagaatgccaccatgaactgctcctacaagaccagcatcaacaacctccagtggtacaggcagaacagcggcagaggactggtgcacctgatcctgatccggtccaacgagagagagaagcactccggcagactgagagtgaccctggacaccagcaagaagtccagcagcctgctgattaccgccagcagagccgccgatacagccagctacttttgtgccaccgacggcgatacccctctggtgtttggcaagggcacaagactgagcgtgatcgccaatacgcgtatccagaaccctgatcctgccgtgtaccagctgcgggatagcaagagcagcgacaagagcgtgtgtctgttcaccgacttcgacagccagaccaacgtgtcccagagcaaggactccgacgtgtacatcaccgataagaccgtgctggacatgcggagcatggacttcaagagcaactccgccgtggcctggtccaacaagtccgatttcgcctgcgccaacgccttcaacaacagcattatccccgaggacacattcttcccaagccccgagagcagctgcggtacccagagttttgggttgttggaccctaaattgagctatctgttggacggaatcctgttcatttacggagtgatcctgaccgcattgttcctgcgggttaagttttccagatccgcagacgcacccgcttaccaacaagggcagaaccaactctacaatgaacttaatttggggcggagggaagagtacgacgttctggacaaaaggaggggacgagatcccgagatgggcggaaagcctcagcgaaggaagaatccgcaagaggggctttataacgaactccagaaagataaaatggcagaagcctatagtgagattgggatgaagggagaaaggaggaggggtaaaggtcacgatgggttgtaccaaggattgagcacagccactaaagatacctatgatgcgctccacatgcaggccctgccgccaagataa

SEQ ID NO: 2368 - DNA, 2943 bp, synthetic construct
  source 1..2943: mol_type = other DNA
atggccttaccagtgaccgccttgctcctgccgctggccttgctgctccacgccgccaggccggaattcgatggcggcattacacagagccccaagtacctgttcagaaaagagggccagaacgtcaccctgagctgcgagcagaacctgaaccacgacgccatgtactggtacagacaggacccaggccagggcctgagactgatctactactcttgggctcagggcgacttccagaagggcgatattgccgagggctacagcgtgtccagagagaagaaagagtcctttccactgaccgtgacaagcgcccagaagaaccctaccgccttctacctgtgtgccagctcttggggagccccttacgagcagtatttcggccctggcaccagactgacagttctcgagggacagcctaaggccaatcctaccgtgacactgttccctccaagcagcgaagaactccaggccaacaaggccacacttgtgtgcctgatctccgacttctaccctggggctgtgacagtggcttggaaggccgatggatctcctgtgaaagccggcgtggaaaccaccaagccatccaagcagagcaacaacaaatacgccgccagctcctacctgagcctgacacctgagcagtggaagtcccacagatcctacagctgccaagtgacccacgaaggcagcaccgtggaaaagacagtggcccctacagagtgcagcggatccctgggagagcctcagctgtgctatatcctggacgccatcctgtttctgtacggcatcgtgctgaccctgctgtactgccggctgaagatccaagtgcggaaggccgccatcaccagctacgagaaatccgacggcgtgtacaccggcctgagcaccagaaatcaagagacatacgagacactgaagcacgaaaagcctccacaaagggccaagcgatctggatctggagcaacaaacttctcactactcaaacaagcaggtgacgtggaggagaatcccgggcctactagtatggactggatttggcgcatccttttccttgtcggcgctgctaccggcgcgcattccttcgaacaacaaggcgaagaagatccccaggctctgagcatccaagagggcgagaatgccaccatgaactgctcctacaagaccagcatcaacaacctccagtggtacaggcagaacagcggcagaggactggtgcacctgatcctgatccggtccaacgagagagagaagcactccggcagactgagagtgaccctggacaccagcaagaagtccagcagcctgctgattaccgccagcagagccgccgatacagccagctacttttgtgccaccgacggcgatacccctctggtgtttggcaagggcacaagactgagcgtgatcgccaatacgcgtatccagaaccctgatcctgccgtgtaccagctgcgggatagcaagagcagcgacaagagcgtgtgtctgttcaccgacttcgacagccagaccaacgtgtcccagagcaaggactccgacgtgtacatcaccgataagaccgtgctggacatgcggagcatggacttcaagagcaactccgccgtggcctggtccaacaagtccgatttcgcctgcgccaacgccttcaacaacagcattatccccgaggacacattcttcccaagccccgagagcagctgcggtacccagagttttgggttgttggaccctaaattgtgctatctgttggacggaatcctgttcatttacggagtgatcctgaccgcattgttcctgcgggttaagttttccagatccgcagacgcacccgcttaccaacaagggcagaaccaactctacaatgaacttaatttggggcggagggaagagtacgacgttctggacaaaaggaggggacgagatcccgagatgggcggaaagcctcagcgaaggaagaatccgcaagaggggctttataacgaactccagaaagataaaatggcagaagcctatagtgagattgggatgaagggagaaaggaggaggggtaaaggtcacgatgggttgtaccaaggattgagcacagccactaaagatacctatgatgcgctccacatgcaggccctgccgccaagacgcgccaagagaagcggatctggcgtgaagcagaccctgaatttcgacctgctgaagctggctggcgacgtggaatccaacccaggcccttctagaggccatatggctctgcctgtgacagctctgctgctgcctctggcactgctgcttcatgctgctagacctagccagtttagagtgtcccctctggacagaacctggaacctgggcgagacagtggaactgaagtgccaggtgctgctgagcaaccctacaagcggctgctcctggctgtttcagcctagaggtgcagccgcctctcctacctttctgctgtacctgagccagaacaagcccaaggccgccgaaggactggacacccagagattcagcggcaagagactgggcgacaccttcgtgctgaccctgagcgacttcagaagagagaacgagggctactacttctgtagcgccctgagcaacagcatcatgtacttcagccacttcgtgcccgtgtttctgcccgccaagcctacaacaacccctgctcctagacctcctacaccagctcctacaatcgccagccagcctctgtctctcagacccgaagcctgtagacctgctgctggcggagctgtgcataccagaggactggatttcgcctgcgacatctacatctgggctcctctggctggcacatgtggcgtgctgctgctgtccctggtcatcaccctgtactgcaaccaccggaacaggcggagagtgtgcaagtgccctagacctgtggtcaagagcggcgacaagcctagcctgagcgccagatatgtt

SEQ ID NO: 2369 - DNA, 2238 bp, synthetic construct
  source 1..2238: mol_type = other DNA
atggccttaccagtgaccgccttgctcctgccgctggccttgctgctccacgccgccaggccggaattcgatggcggcattacacagagccccaagtacctgttcagaaaagagggccagaacgtcaccctgagctgcgagcagaacctgaaccacgacgccatgtactggtacagacaggacccaggccagggcctgagactgatctactactcttgggctcagggcgacttccagaagggcgatattgccgagggctacagcgtgtccagagagaagaaagagtcctttccactgaccgtgacaagcgcccagaagaaccctaccgccttctacctgtgtgccagctcttggggagccccttacgagcagtatttcggccctggcaccagactgacagttctcgaggacctgaagaacgtgttcccacctgaggtggccgtgttcgagcctagcgaggccgagatcagccacacccagaaagccaccctcgtgtgcctggctaccggcttctaccccgaccatgtggaactgtcttggtgggtcaacggcaaagaggtgcacagcggcgtgtctaccgacccccagccactgaaagaacagcccgccctgaacgacagccggtactgcctgagcagcagactgagagtgtccgccaccttctggcagaacccccggaaccacttcagatgccaggtgcagttctacggcctgagcgagaacgacgagtggacccaggacagagccaagcccgtgacccagatcgtgtctgccgaagcctggggcagagccgattgcggatcccagagcttcggcctgctggaccccaagctgtgctacctgctggatggcatcctgttcatctacggcgtgatcctgaccgccctgttcctgagagtgaagttcagcagaagcgccgacgcccctgcctaccagcagggacagaaccaactgtacaacgagctgaacctgggcagacgggaagagtacgacgtgctggacaagcggagaggcagggaccctgagatgggcggaaagccccagcggagaaagaacccccaggaaggactgtataacgaactccagaaagacaagatggccgaagcctacagcgagatcggcatgaagggcgagcggagaagaggcaagggccacgatggcctgtaccagggcctgagcaccgccaccaaggacacctatgacgccctgcacatgcaggccctgcctccaagaagggccaagcgatctggatctggagcaacaaacttctcactactcaaacaagcaggtgacgtggaggagaatcccgggcctactagtatggactggatttggcgcatccttttccttgtcggcgctgctaccggcgcgcattccttcgaacaacaaggcgaagaagatccccaggctctgagcatccaagagggcgagaatgccaccatgaactgctcctacaagaccagcatcaacaacctccagtggtacaggcagaacagcggcagaggactggtgcacctgatcctgatccggtccaacgagagagagaagcactccggcagactgagagtgaccctggacaccagcaagaagtccagcagcctgctgattaccgccagcagagccgccgatacagccagctacttttgtgccaccgacggcgatacccctctggtgtttggcaagggcacaagactgagcgtgatcgccaatacgcgtgcctctacaaagggaccctccgtgtttcctctggctcccagcagcaagtctacaagcggaggaacagccgctctgggctgcctggtcaaggattactttcccgagcctgtgaccgtgtcctggaatagcggagcactgacaagcggcgtgcacacctttccagccgtgctgcaaagcagcggcctgtactctctgagcagcgtggtcacagtgcctagctctagcctgggcacccagacctacatctgcaatgtgaaccacaagcctagcaacaccaaggtggacaagagagtggaacccaagagctgtggtaccctcggagaaccacagctctgttacattctggatgctatcctgttcctctatgggatcgtcctgacactcctgtattgcagactcaaaattcaagttcgcaaagccgccattacctcttacgagaagagtgatggggtgtacacaggactgtctacccggaatcaagaaacctacgaaaccctcaaacatgagaagccacctcagtaa

SEQ ID NO: 2370 - DNA, 2238 bp, synthetic construct; identical to SEQ ID NO: 2369
  source 1..2238: mol_type = other DNA

SEQ ID NO: 2371 - DNA, 2211 bp, synthetic construct
  source 1..2211: mol_type = other DNA
atggccttaccagtgaccgccttgctcctgccgctggccttgctgctccacgccgccaggccggaattcgatggcggcattacacagagccccaagtacctgttcagaaaagagggccagaacgtcaccctgagctgcgagcagaacctgaaccacgacgccatgtactggtacagacaggacccaggccagggcctgagactgatctactactcttgggctcagggcgacttccagaagggcgatattgccgagggctacagcgtgtccagagagaagaaagagtcctttccactgaccgtgacaagcgcccagaagaaccctaccgccttctacctgtgtgccagctcttggggagccccttacgagcagtatttcggccctggcaccagactgacagttctcgaggacctgaagaacgtgttcccacctgaggtggccgtgttcgagcctagcgaggccgagatcagccacacccagaaagccaccctcgtgtgcctggctaccggcttctaccccgaccatgtggaactgtcttggtgggtcaacggcaaagaggtgcacagcggcgtgtctaccgacccccagccactgaaagaacagcccgccctgaacgacagccggtactgcctgagcagcagactgagagtgtccgccaccttctggcagaacccccggaaccacttcagatgccaggtgcagttctacggcctgagcgagaacgacgagtggacccaggacagagccaagcccgtgacccagatcgtgtctgccgaagcctggggcagagccgattgcggatcccagagcttcggcctgctggaccccaagctgtgctacctgctggatggcatcctgttcatctacggcgtgatcctgaccgccctgttcctgagagtgaagttcagcagaagcgccgacgcccctgcctaccagcagggacagaaccaactgtacaacgagctgaacctgggcagacgggaagagtacgacgtgctggacaagcggagaggcagggaccctgagatgggcggaaagccccagcggagaaagaacccccaggaaggactgtataacgaactccagaaagacaagatggccgaagcctacagcgagatcggcatgaagggcgagcggagaagaggcaagggccacgatggcctgtaccagggcctgagcaccgccaccaaggacacctatgacgccctgcacatgcaggccctgcctccaagaagggccaagcgatctggatctggagcaacaaacttctcactactcaaacaagcaggtgacgtggaggagaatcccgggcctactagtatggactggatttggcgcatccttttccttgtcggcgctgctaccggcgcgcattccttcgaacaacaaggcgaagaagatccccaggctctgagcatccaagagggcgagaatgccaccatgaactgctcctacaagaccagcatcaacaacctccagtggtacaggcagaacagcggcagaggactggtgcacctgatcctgatccggtccaacgagagagagaagcactccggcagactgagagtgaccctggacaccagcaagaagtccagcagcctgctgattaccgccagcagagccgccgatacagccagctacttttgtgccaccgacggcgatacccctctggtgtttggcaagggcacaagactgagcgtgatcgccaatacgcgtatccagaaccctgatcctgccgtgtaccagctgcgggatagcaagagcagcgacaagagcgtgtgtctgttcaccgacttcgacagccagaccaacgtgtcccagagcaaggactccgacgtgtacatcaccgataagaccgtgctggacatgcggagcatggacttcaagagcaactccgccgtggcctggtccaacaagtccgatttcgcctgcgccaacgccttcaacaacagcattatccccgaggacacattcttcccaagccccgagagcagctgcggtaccctcggagaaccacagctctgttacattctggatgctatcctgttcctctatgggatcgtcctgacactcctgtattgcagactcaaaattcaagttcgcaaagccgccattacctcttacgagaagagtgatggggtgtacacaggactgtctacccggaatcaagaaacctacgaaaccctcaaacatgagaagccacctcagtaa

SEQ ID NO: 2372 - DNA, 2955 bp, synthetic construct
  source 1..2955: mol_type = other DNA
atggccttaccagtgaccgccttgctcctgccgctggccttgctgctccacgccgccaggccggaattcgatggcggcattacacagagccccaagtacctgttcagaaaagagggccagaacgtcaccctgagctgcgagcagaacctgaaccacgacgccatgtactggtacagacaggacccaggccagggcctgagactgatctactactcttgggctcagggcgacttccagaagggcgatattgccgagggctacagcgtgtccagagagaagaaagagtcctttccactgaccgtgacaagcgcccagaagaaccctaccgccttctacctgtgtgccagctcttggggagccccttacgagcagtatttcggccctggcaccagactgacagttctcgagggacagcctaaggccaatcctaccgtgacactgttccctccaagcagcgaagaactccaggccaacaaggccacacttgtgtgcctgatctccgacttctaccctggggctgtgacagtggcttggaaggccgatggatctcctgtgaaagccggcgtggaaaccaccaagccatccaagcagagcaacaacaaatacgccgccagctcctacctgagcctgacacctgagcagtggaagtcccacagatcctacagctgccaagtgacccacgaaggcagcaccgtggaaaagacagtggcccctacagagtgcagcacaacacctggcgagagaagtagcctgcctgccttctatcctggcaccagcggctcttgttctggctgtggatctctgagcctgcctctgctggctggactggttgctgctgatgctgtggcctctctgctgattgtgggagccgtgttcctgtgcgccagacctagaagaagccccgctcaagaggacggcaaggtgtacatcaacatgcccggcagaggaagggccaagcgatctggatctggagcaacaaacttctcactactcaaacaagcaggtgacgtggaggagaatcccgggcctactagtatggactggatttggcgcatccttttccttgtcggcgctgctaccggcgcgcattccttcgaacaacaaggcgaagaagatccccaggctctgagcatccaagagggcgagaatgccaccatgaactgctcctacaagaccagcatcaacaacctccagtggtacaggcagaacagcggcagaggactggtgcacctgatcctgatccggtccaacgagagagagaagcactccggcagactgagagtgaccctggacaccagcaagaagtccagcagcctgctgattaccgccagcagagccgccgatacagccagctacttttgtgccaccgacggcgatacccctctggtgtttggcaagggcacaagactgagcgtgatcgccaatacgcgtatccagaaccctgatcctgccgtgtaccagctgcgggatagcaagagcagcgacaagagcgtgtgtctgttcaccgacttcgacagccagaccaacgtgtcccagagcaaggactccgacgtgtacatcaccgataagaccgtgctggacatgcggagcatggacttcaagagcaactccgccgtggcctggtccaacaagtccgatttcgcctgcgccaacgccttcaacaacagcattatccccgaggacacattcttcccaagccccgagagcagctgcggtacccagagttttgggttgttggaccctaaattgtgctatctgttggacggaatcctgttcatttacggagtgatcctgaccgcattgttcctgcgggttaagttttccagatccgcagacgcacccgcttaccaacaagggcagaaccaactctacaatgaacttaatttggggcggagggaagagtacgacgttctggacaaaaggaggggacgagatcccgagatgggcggaaagcctcagcgaaggaagaatccgcaagaggggctttataacgaactccagaaagataaaatggcagaagcctatagtgagattgggatgaagggagaaaggaggaggggtaaaggtcacgatgggttgtaccaaggattgagcacagccactaaagatacctatgatgcgctccacatgcaggccctgccgccaagacgcgccaagagaagcggatctggcgtgaagcagaccctgaatttcgacctgctgaagctggctggcgacgtggaatccaacccaggcccttctagaggccatatggctctgcctgtgacagctctgctgctgcctctggcactgctgcttcatgctgctagacctagccagtttagagtgtcccctctggacagaacctggaacctgggcgagacagtggaactgaagtgccaggtgctgctgagcaaccctacaagcggctgctcctggctgtttcagcctagaggtgcagccgcctctcctacctttctgctgtacctgagccagaacaagcccaaggccgccgaaggactggacacccagagattcagcggcaagagactgggcgacaccttcgtgctgaccctgagcgacttcagaagagagaacgagggctactacttctgtagcgccctgagcaacagcatcatgtacttcagccacttcgtgcccgtgtttctgcccgccaagcctacaacaacccctgctcctagacctcctacaccagctcctacaatcgccagccagcctctgtctctcagacccgaagcctgtagacctgctgctggcggagctgtgcataccagaggactggatttcgcctgcgacatctacatctgggctcctctggctggcacatgtggcgtgctgctgctgtccctggtcatcaccctgtactgcaaccaccggaacaggcggagagtgtgcaagtgccctagacctgtggtcaagagcggcgacaagcctagcctgagcgccagatatgtt

SEQ ID NO: 2373 - DNA, 3054 bp, synthetic construct
  source 1..3054: mol_type = other DNA
atggccttaccagtgaccgccttgctcctgccgctggccttgctgctccacgccgccaggccggaattcgatggcggcattacacagagccccaagtacctgttcagaaaagagggccagaacgtcaccctgagctgcgagcagaacctgaaccacgacgccatgtactggtacagacaggacccaggccagggcctgagactgatctactactcttgggctcagggcgacttccagaagggcgatattgccgagggctacagcgtgtccagagagaagaaagagtcctttccactgaccgtgacaagcgcccagaagaaccctaccgccttctacctgtgtgccagctcttggggagccccttacgagcagtatttcggccctggcaccagactgacagttctcgaggacctgaagaacgtgttcccacctgaggtggccgtgttcgagcctagcgaggccgagatcagccacacccagaaagccaccctcgtgtgcctggctaccggcttctaccccgaccatgtggaactgtcttggtgggtcaacggcaaagaggtgcacagcggcgtgtctaccgacccccagccactgaaagaacagcccgccctgaacgacagccggtactgcctgagcagcagactgagagtgtccgccaccttctggcagaacccccggaaccacttcagatgccaggtgcagttctacggcctgagcgagaacgacgagtggacccaggacagagccaagcccgtgacccagatcgtgtctgccgaagcctggggcagagccgattgcggatcccagagcttcggcctgctggaccccaagctgtgctacctgctggatggcatcctgttcatctacggcgtgatcctgaccgccctgttcctgagagtgaagttcagcagaagcgccgacgcccctgcctaccagcagggacagaaccaactgtacaacgagctgaacctgggcagacgggaagagtacgacgtgctggacaagcggagaggcagggaccctgagatgggcggaaagccccagcggagaaagaacccccaggaaggactgtataacgaactccagaaagacaagatggccgaagcctacagcgagatcggcatgaagggcgagcggagaagaggcaagggccacgatggcctgtaccagggcctgagcaccgccaccaaggacacctatgacgccctgcacatgcaggccctgcctccaagaagggccaagcgatctggatctggagcaacaaacttctcactactcaaacaagcaggtgacgtggaggagaatcccgggcctactagtatggactggatttggcgcatccttttccttgtcggcgctgctaccggcgcgcattccttcgaacaacaaggcgaagaagatccccaggctctgagcatccaagagggcgagaatgccaccatgaactgctcctacaagaccagcatcaacaacctccagtggtacaggcagaacagcggcagaggactggtgcacctgatcctgatccggtccaacgagagagagaagcactccggcagactgagagtgaccctggacaccagcaagaagtccagcagcctgctgattaccgccagcagagccgccgatacagccagctacttttgtgccaccgacggcgatacccctctggtgtttggcaagggcacaagactgagcgtgatcgccaatacgcgtgcctctacaaagggaccctccgtgtttcctctggctcccagcagcaagtctacaagcggaggaacagccgctctgggctgcctggtcaaggattactttcccgagcctgtgaccgtgtcctggaatagcggagcactgacaagcggcgtgcacacctttccagccgtgctgcaaagcagcggcctgtactctctgagcagcgtggtcacagtgcctagctctagcctgggcacccagacctacatctgcaatgtgaaccacaagcctagcaacaccaaggtggacaagagagtggaacccaagagctgtacaacgccgggcgaaaggagttccttgccggccttttaccccggcacaagcggaagctgtagtgggtgtggaagcctcagcctcccacttcttgcgggcctcgtcgcggcagatgcagtagcttcacttcttattgtaggcgcggtatttctctgtgctcgaccaaggaggtcacccgctcaggaggatggtaaggtgtatataaatatgccaggacgcggacgcgccaagagaagcggatctggcgtgaagcagaccctgaatttcgacctgctgaagctggctggcgacgtggaatccaacccaggcccttctagaggccatatggctctgcctgtgacagctctgctgctgcctctggcactgctgcttcatgctgctagacctagccagtttagagtgtcccctctggacagaacctggaacctgggcgagacagtggaactgaagtgccaggtgctgctgagcaaccctacaagcggctgctcctggctgtttcagcctagaggtgcagccgcctctcctacctttctgctgtacctgagccagaacaagcccaaggccgccgaaggactggacacccagagattcagcggcaagagactgggcgacaccttcgtgctgaccctgagcgacttcagaagagagaacgagggctactacttctgtagcgccctgagcaacagcatcatgtacttcagccacttcgtgcccgtgtttctgcccgccaagcctacaacaacccctgctcctagacctcctacaccagctcctacaatcgccagccagcctctgtctctcagacccgaagcctgtagacctgctgctggcggagctgtgcataccagaggactggatttcgcctgcgacatctacatctgggctcctctggctggcacatgtggcgtgctgctgctgtccctggtcatcaccctgtactgcaaccaccggaacaggcggagagtgtgcaagtgccctagacctgtggtcaagagcggcgacaagcctagcctgagcgccagatatgtt

SEQ ID NO: 2374 - DNA, 2790 bp, synthetic construct
  source 1..2790: mol_type = other DNA
atggccttaccagtgaccgccttgctcctgccgctggccttgctgctccacgccgccaggccggatggcggcattacacagagccccaagtacctgttcagaaaagagggccagaacgtcaccctgagctgcgagcagaacctgaaccacgacgccatgtactggtacagacaggacccaggccagggcctgagactgatctactactcttgggctcagggcgacttccagaagggcgatattgccgagggctacagcgtgtccagagagaagaaagagtcctttccactgaccgtgacaagcgcccagaagaaccctaccgccttctacctgtgtgccagctcttggggagccccttacgagcagtatttcggccctggcaccagactgacagttctcgagctgtgggtttcacagcctccagagatcagaaccctggaaggcagcagcgccttcctgccttgcagcttcaatgcctctcagggcagactggctatcggcagcgtgacctggttcagagatgaggtggtgcccggcaaagaagtgcggaacggcacccctgagtttagaggaaggctggcccctctggcctccagcagatttctgcacgatcaccaggccgagctgcacatcagagatgtgcgaggacacgacgccagcatctacgtgtgcagagtggaagtgctcggcctcggagttggcacaggcaatggaacaagactggtggtggaaaaagagcaccctcagctcggagccggaacagtgctgcttctgagagccggcttttacgccgtgtcctttctgtctgtggccgtgggcagcaccgtgtactatcagggcaagtgcctgacctggaagggacctagaaggcaactgcctgctgtggtgcctgctcctttgcctcctccatgtggaagctctgcccatctgctgccacctgttccaggcggaagggccaagcgatctggatctggagcaacaaacttctcactactcaaacaagcaggtgacgtggaggagaatcccgggcctactagtatggactggatttggcgcatccttttccttgtcggcgctgctaccggcgcgcattccttcgaacaacaaggcgaagaagatccccaggctctgagcatccaagagggcgagaatgccaccatgaactgctcctacaagaccagcatcaacaacctccagtggtacaggcagaacagcggcagaggactggtgcacctgatcctgatccggtccaacgagagagagaagcactccggcagactgagagtgaccctggacaccagcaagaagtccagcagcctgctgattaccgccagcagagccgccgatacagccagctacttttgtgccaccgacggcgatacccctctggtgtttggcaagggcacaagactgagcgtgatcgccaatacgcgtctgtgggtgtcccagccacctgaaattcggacactggaaggctcctccgcctttctgccctgtagctttaacgccagccaggggagactcgccatcggctctgtgacatggttccgggatgaagtcgtccctggaaaagaagttcgcaacggaacaccagagttcagaggcagactcgccccactggcaagctccagattcctgcatgaccatcaggctgaactgcacattagggacgtgcggggccacgatgcctccatctatgtgtgtcgggtcgaagtgcttggactcggcgtcggaactggaaacggcactaggctggtggtcgagaaagaacatccacagcttggcgctggcaccgtcctgttgcttagagccggattctatgccgtcagcttcctgtccgtggctgtggggtctacagtgtattaccagggaaaatgtctcacctggaaaggccccagacgccagcttccagctgttgttcctgctccactgccaccaccttgtggctcctctgctcacttgcttccaccagtgcctggcggacgcgccaagagaagcggatctggcgtgaagcagaccctgaatttcgacctgctgaagctggctggcgacgtggaatccaacccaggcccttctagaggccatatggctctgcctgtgacagctctgctgctgcctctggcactgctgcttcatgctgctagacctagccagtttagagtgtcccctctggacagaacctggaacctgggcgagacagtggaactgaagtgccaggtgctgctgagcaaccctacaagcggctgctcctggctgtttcagcctagaggtgcagccgcctctcctacctttctgctgtacctgagccagaacaagcccaaggccgccgaaggactggacacccagagattcagcggcaagagactgggcgacaccttcgtgctgaccctgagcgacttcagaagagagaacgagggctactacttctgtagcgccctgagcaacagcatcatgtacttcagccacttcgtgcccgtgtttctgcccgccaagcctacaacaacccctgctcctagacctcctacaccagctcctacaatcgccagccagcctctgtctctcagacccgaagcctgtagacctgctgctggcggagctgtgcataccagaggactggatttcgcctgcgacatctacatctgggctcctctggctggcacatgtggcgtgctgctgctgtccctggtcatcaccctgtactgcaaccaccggaacaggcggagagtgtgcaagtgccctagacctgtggtcaagagcggcgacaagcctagcctgagcgccagatatgtt

SEQ ID NO: 2375 - DNA, 3195 bp, synthetic construct
  source 1..3195: mol_type = other DNA
atggccttaccagtgaccgccttgctcctgccgctggccttgctgctccacgccgccaggccggaattcgatggcggcattacacagagccccaagtacctgttcagaaaagagggccagaacgtcaccctgagctgcgagcagaacctgaaccacgacgccatgtactggtacagacaggacccaggccagggcctgagactgatctactactcttgggctcagggcgacttccagaagggcgatattgccgagggctacagcgtgtccagagagaagaaagagtcctttccactgaccgtgacaagcgcccagaagaaccctaccgccttctacctgtgtgccagctcttggggagccccttacgagcagtatttcggccctggcaccagactgacagttctcgagggacagcctaaggccaatcctaccgtgacactgttccctccaagcagcgaagaactccaggccaacaaggccacacttgtgtgcctgatctccgacttctaccctggggctgtgacagtggcttggaaggccgatggatctcctgtgaaagccggcgtggaaaccaccaagccatccaagcagagcaacaacaaatacgccgccagctcctacctgagcctgacacctgagcagtggaagtcccacagatcctacagctgccaagtgacccacgaaggcagcaccgtggaaaagacagtggcccctacagagtgcagcggatcccagagcttcggcctgctggaccccaagctgtgctacctgctggatggcatcctgttcatctacggcgtgatcctgaccgccctgttcctgagagtgaagttcagcagaagcgccgacgcccctgcctaccagcagggacagaaccaactgtacaacgagctgaacctgggcagacgggaagagtacgacgtgctggacaagcggagaggcagggaccctgagatgggcggaaagccccagcggagaaagaacccccaggaaggactgtataacgaactccagaaagacaagatggccgaagcctacagcgagatcggcatgaagggcgagcggagaagaggcaagggccacgatggcctgtaccagggcctgagcaccgccaccaaggacacctatgacgccctgcacatgcaggccctgcctccaagaagggccaagcgatctggatctggagcaacaaacttctcactactcaaacaagcaggtgacgtggaggagaatcccgggcctactagtatggactggatttggcgcatccttttccttgtcggcgctgctaccggcgcgcattccttcgaacaacaaggcgaagaagatccccaggctctgagcatccaagagggcgagaatgccaccatgaactgctcctacaagaccagcatcaacaacctccagtggtacaggcagaacagcggcagaggactggtgcacctgatcctgatccggtccaacgagagagagaagcactccggcagactgagagtgaccctggacaccagcaagaagtccagcagcctgctgattaccgccagcagagccgccgatacagccagctacttttgtgccaccgacggcgatacccctctggtgtttggcaagggcacaagactgagcgtgatcgccaatacgcgtgcctctacaaagggaccctccgtgtttcctctggctcccagcagcaagtctacaagcggaggaacagccgctctgggctgcctggtcaaggattactttcccgagcctgtgaccgtgtcctggaatagcggagcactgacaagcggcgtgcacacctttccagccgtgctgcaaagcagcggcctgtactctctgagcagcgtggtcacagtgcctagctctagcctgggcacccagacctacatctgcaatgtgaaccacaagcctagcaacaccaaggtggacaagagagtggaacccaagagctgtggtacccagagttttgggttgttggaccctaaattgtgctatctgttggacggaatcctgttcatttacggagtgatcctgaccgcattgttcctgcgggttaagttttccagatccgcagacgcacccgcttaccaacaagggcagaaccaactctacaatgaacttaatttggggcggagggaagagtacgacgttctggacaaaaggaggggacgagatcccgagatgggcggaaagcctcagcgaaggaagaatccgcaagaggggctttataacgaactccagaaagataaaatggcagaagcctatagtgagattgggatgaagggagaaaggaggaggggtaaaggtcacgatgggttgtaccaaggattgagcacagccactaaagatacctatgatgcgctccacatgcaggccctgccgccaagacgcgccaagagaagcggatctggcgtgaagcagaccctgaatttcgacctgctgaagctggctggcgacgtggaatccaacccaggcccttctagaggccatatggctctgcctgtgacagctctgctgctgcctctggcactgctgcttcatgctgctagacctagccagtttagagtgtcccctctggacagaacctggaacctgggcgagacagtggaactgaagtgccaggtgctgctgagcaaccctacaagcggctgctcctggctgtttcagcctagaggtgcagccgcctctcctacctttctgctgtacctgagccagaacaagcccaaggccgccgaaggactggacacccagagattcagcggcaagagactgggcgacaccttcgtgctgaccctgagcgacttcagaagagagaacgagggctactacttctgtagcgccctgagcaacagcatcatgtacttcagccacttcgtgcccgtgtttctgcccgccaagcctacaacaacccctgctcctagacctcctacaccagctcctacaatcgccagccagcctctgtctctcagacccgaagcctgtagacctgctgctggcggagctgtgcataccagaggactggatttcgcctgcgacatctacatctgggctcctctggctggcacatgtggcgtgctgctgctgtccctggtcatcaccctgtactgcaaccaccggaacaggcggagagtgtgcaagtgccctagacctgtggtcaagagcggcgacaagcctagcctgagcgccagatatgtt

SEQ ID NO: 2376 - DNA, 3249 bp, synthetic construct
  source 1..3249: mol_type = other DNA
atggccttaccagtgaccgccttgctcctgccgctggccttgctgctccacgccgccaggccggaattcgatggcggcattacacagagccccaagtacctgttcagaaaagagggccagaacgtcaccctgagctgcgagcagaacctgaaccacgacgccatgtactggtacagacaggacccaggccagggcctgagactgatctactactcttgggctcagggcgacttccagaagggcgatattgccgagggctacagcgtgtccagagagaagaaagagtcctttccactgaccgtgacaagcgcccagaagaaccctaccgccttctacctgtgtgccagctcttggggagccccttacgagcagtatttcggccctggcaccagactgacagttctcgagggacagcctaaggccaatcctaccgtgacactgttccctccaagcagcgaagaactccaggccaacaaggccacacttgtgtgcctgatctccgacttctaccctggggctgtgacagtggcttggaaggccgatggatctcctgtgaaagccggcgtggaaaccaccaagccatccaagcagagcaacaacaaatacgccgccagctcctacctgagcctgacacctgagcagtggaagtcccacagatcctacagctgccaagtgacccacgaaggcagcaccgtggaaaagacagtggcccctacagagtgcagcggatcccagagcttcggcctgctggaccccaagctgtgctacctgctggatggcatcctgttcatctacggcgtgatcctgaccgccctgttcctgagagtgaagttcagcagaagcgccgacgcccctgcctaccagcagggacagaaccaactgtacaacgagctgaacctgggcagacgggaagagtacgacgtgctggacaagcggagaggcagggaccctgagatgggcggaaagccccagcggagaaagaacccccaggaaggactgtataacgaactccagaaagacaagatggccgaagcctacagcgagatcggcatgaagggcgagcggagaagaggcaagggccacgatggcctgtaccagggcctgagcaccgccaccaaggacacctatgacgccctgcacatgcaggccctgcctccaagaagggccaagcgatctggatctggagcaacaaacttctcactactcaaacaagcaggtgacgtggaggagaatcccgggcctactagtatggactggatttggcgcatccttttccttgtcggcgctgctaccggcgcgcattccttcgaacaacaaggcgaagaagatccccaggctctgagcatccaagagggcgagaatgccaccatgaactgctcctacaagaccagcatcaacaacctccagtggtacaggcagaacagcggcagaggactggtgcacctgatcctgatccggtccaacgagagagagaagcactccggcagactgagagtgaccctggacaccagcaagaagtccagcagcctgctgattaccgccagcagagccgccgatacagccagctacttttgtgccaccgacggcgatacccctctggtgtttggcaagggcacaagactgagcgtgatcgccaatacgcgtgcgtctcccacttctccgaaagttttccccctttccctctgtagcacacaacctgatggaaatgtggtcatcgcatgtctggtacaaggattctttccacaagagccattgagcgttacatggtcagagagcgggcagggagttaccgctaggaatttcccaccctcacaggatgcgagtggtgatctttataccacatcatcacaactcacgttgccagccactcagtgcctcgctggaaagtcagtaacatgccatgtcaaacattacactaatccctcacaagatgttaccgtgccttgcccagtaccttctacgccgcccaccccgtctccatctactccacccacgccatcacctagtggtacccagagttttgggttgttggaccctaaattgtgctatctgttggacggaatcctgttcatttacggagtgatcctgaccgcattgttcctgcgggttaagttttccagatccgcagacgcacccgcttaccaacaagggcagaaccaactctacaatgaacttaatttggggcggagggaagagtacgacgttctggacaaaaggaggggacgagatcccgagatgggcggaaagcctcagcgaaggaagaatccgcaagaggggctttataacgaactccagaaagataaaatggcagaagcctatagtgagattgggatgaagggagaaaggaggaggggtaaaggtcacgatgggttgtaccaaggattgagcacagccactaaagatacctatgatgcgctccacatgcaggccctgccgccaagacgcgccaagagaagcggatctggcgtgaagcagaccctgaatttcgacctgctgaagctggctggcgacgtggaatccaacccaggcccttctagaggccatatggctctgcctgtgacagctctgctgctgcctctggcactgctgcttcatgctgctagacctagccagtttagagtgtcccctctggacagaacctggaacctgggcgagacagtggaactgaagtgccaggtgctgctgagcaaccctacaagcggctgctcctggctgtttcagcctagaggtgcagccgcctctcctacctttctgctgtacctgagccagaacaagcccaaggccgccgaaggactggacacccagagattcagcggcaagagactgggcgacaccttcgtgctgaccctgagcgacttcagaagagagaacgagggctactacttctgtagcgccctgagcaacagcatcatgtacttcagccacttcgtgcccgtgtttctgcccgccaagcctacaacaacccctgctcctagacctcctacaccagctcctacaatcgccagccagcctctgtctctcagacccgaagcctgtagacctgctgctggcggagctgtgcataccagaggactggatttcgcctgcgacatctacatctgggctcctctggctggcacatgtggcgtgctgctgctgtccctggtcatcaccctgtactgcaaccaccggaacaggcggagagtgtgcaagtgccctagacctgtggtcaagagcggcgacaagcctagcctgagcgccagatatgtt

SEQ ID NO: 2377 - DNA, 3192 bp, synthetic construct
  source 1..3192: mol_type = other DNA
atggccttaccagtgaccgccttgctcctgccgctggccttgctgctccacgccgccaggccggaattcgatggcggcattacacagagccccaagtacctgttcagaaaagagggccagaacgtcaccctgagctgcgagcagaacctgaaccacgacgccatgtactggtacagacaggacccaggccagggcctgagactgatctactactcttgggctcagggcgacttccagaagggcgatattgccgagggctacagcgtgtccagagagaagaaagagtcctttccactgaccgtgacaagcgcccagaagaaccctaccgccttctacctgtgtgccagctcttggggagccccttacgagcagtatttcggccctggcaccagactgacagttctcgagggacagcctaaggccaatcctaccgtgacactgttccctccaagcagcgaagaactccaggccaacaaggccacacttgtgtgcctgatctccgacttctaccctggggctgtgacagtggcttggaaggccgatggatctcctgtgaaagccggcgtggaaaccaccaagccatccaagcagagcaacaacaaatacgccgccagctcctacctgagcctgacacctgagcagtggaagtcccacagatcctacagctgccaagtgacccacgaaggcagcaccgtggaaaagacagtggcccctacagagtgcagcggatcccagagcttcggcctgctggaccccaagctgtgctacctgctggatggcatcctgttcatctacggcgtgatcctgaccgccctgttcctgagagtgaagttcagcagaagcgccgacgcccctgcctaccagcagggacagaaccaactgtacaacgagctgaacctgggcagacgggaagagtacgacgtgctggacaagcggagaggcagggaccctgagatgggcggaaagccccagcggagaaagaacccccaggaaggactgtataacgaactccagaaagacaagatggccgaagcctacagcgagatcggcatgaagggcgagcggagaagaggcaagggccacgatggcctgtaccagggcctgagcaccgccaccaaggacacctatgacgccctgcacatgcaggccctgcctccaagaagggccaagcgatctggatctggagcaacaaacttctcactactcaaacaagcaggtgacgtggaggagaatcccgggcctactagtatggactggatttggcgcatccttttccttgtcggcgctgctaccggcgcgcattccttcgaacaacaaggcgaagaagatccccaggctctgagcatccaagagggcgagaatgccaccatgaactgctcctacaagaccagcatcaacaacctccagtggtacaggcagaacagcggcagaggactggtgcacctgatcctgatccggtccaacgagagagagaagcactccggcagactgagagtgaccctggacaccagcaagaagtccagcagcctgctgattaccgccagcagagccgccgatacagccagctacttttgtgccaccgacggcgatacccctctggtgtttggcaagggcacaagactgagcgtgatcgccaatacgcgtgcctccacgaagggaccatctgttttccctcttgccccctgctcacggtcaacgtctgaatccacggcagccctgggctgcctcgttaaggactactttccagagccggtaacagtctcctggaacagtggagcccttacatcaggtgttcacactttccctgccgtcttgcaaagtagcggactgtacagccttagttccgttgttacggttccttctagcaacttcggtacacagacatatacttgtaacgtagatcataagcctagcaacaccaaggtggacaaaaccgtagagagaaagtgtggtacccagagttttgggttgttggaccctaaattgtgctatctgttggacggaatcctgttcatttacggagtgatcctgaccgcattgttcctgcgggttaagttttccagatccgcagacgcacccgcttaccaacaagggcagaaccaactctacaatgaacttaatttggggcggagggaagagtacgacgttctggacaaaaggaggggacgagatcccgagatgggcggaaagcctcagcgaaggaagaatccgcaagaggggctttataacgaactccagaaagataaaatggcagaagcctatagtgagattgggatgaagggagaaaggaggaggggtaaaggtcacgatgggttgtaccaaggattgagcacagccactaaagatacctatgatgcgctccacatgcaggccctgccgccaagacgcgccaagagaagcggatctggcgtgaagcagaccctgaatttcgacctgctgaagctggctggcgacgtggaatccaacccaggcccttctagaggccatatggctctgcctgtgacagctctgctgctgcctctggcactgctgcttcatgctgctagacctagccagtttagagtgtcccctctggacagaacctggaacctgggcgagacagtggaactgaagtgccaggtgctgctgagcaaccctacaagcggctgctcctggctgtttcagcctagaggtgcagccgcctctcctacctttctgctgtacctgagccagaacaagcccaaggccgccgaaggactggacacccagagattcagcggcaagagactgggcgacaccttcgtgctgaccctgagcgacttcagaagagagaacgagggctactacttctgtagcgccctgagcaacagcatcatgtacttcagccacttcgtgcccgtgtttctgcccgccaagcctacaacaacccctgctcctagacctcctacaccagctcctacaatcgccagccagcctctgtctctcagacccgaagcctgtagacctgctgctggcggagctgtgcataccagaggactggatttcgcctgcgacatctacatctgggctcctctggctggcacatgtggcgtgctgctgctgtccctggtcatcaccctgtactgcaaccaccggaacaggcggagagtgtgcaagtgccctagacctgtggtcaagagcggcgacaagcctagcctgagcgccagatatgtt

SEQ ID NO: 2378 - DNA, 3357 bp, synthetic construct
  source 1..3357: mol_type = other DNA
atggccttaccagtgaccgccttgctcctgccgctggccttgctgctccacgccgccaggccggatggcggcattacacagagccccaagtacctgttcagaaaagagggccagaacgtcaccctgagctgcgagcagaacctgaaccacgacgccatgtactggtacagacaggacccaggccagggcctgagactgatctactactcttgggctcagggcgacttccagaagggcgatattgccgagggctacagcgtgtccagagagaagaaagagtcctttccactgaccgtgacaagcgcccagaagaaccctaccgccttctacctgtgtgccagctcttggggagccccttacgagcagtatttcggccctggcaccagactgacagttctcgagggacagcctaaggccaatcctaccgtgacactgttccctccaagcagcgaagaactccaggccaacaaggccacacttgtgtgcctgatctccgacttctaccctggggctgtgacagtggcttggaaggccgatggatctcctgtgaaagccggcgtggaaaccaccaagccatccaagcagagcaacaacaaatacgccgccagctcctacctgagcctgacacctgagcagtggaagtcccacagatcctacagctgccaagtgacccacgaaggcagcaccgtggaaaagacagtggcccctacagagtgcagcggatcccagagcttcggcctgctggaccccaagctgtgctacctgctggatggcatcctgttcatctacggcgtgatcctgaccgccctgttcctgagagtgaagttcagcagaagcgccgacgcccctgcctaccagcagggacagaaccaactgtacaacgagctgaacctgggcagacgggaagagtacgacgtgctggacaagcggagaggcagggaccctgagatgggcggaaagccccagcggagaaagaacccccaggaaggactgtataacgaactccagaaagacaagatggccgaagcctacagcgagatcggcatgaagggcgagcggagaagaggcaagggccacgatggcctgtaccagggcctgagcaccgccaccaaggacacctatgacgccctgcacatgcaggccctgcctccaagaagggccaagcgatctggatctggagcaacaaacttctcactactcaaacaagcaggtgacgtggaggagaatcccgggcctactagtatggactggatttggcgcatccttttccttgtcggcgctgctaccggcgcgcattccttcgaacaacaaggcgaagaagatccccaggctctgagcatccaagagggcgagaatgccaccatgaactgctcctacaagaccagcatcaacaacctccagtggtacaggcagaacagcggcagaggactggtgcacctgatcctgatccggtccaacgagagagagaagcactccggcagactgagagtgaccctggacaccagcaagaagtccagcagcctgctgattaccgccagcagagccgccgatacagccagctacttttgtgccaccgacggcgatacccctctggtgtttggcaagggcacaagactgagcgtgatcgccaatacgcgtgctccgacaaaggcgccagacgtttttcctattatttcaggatgtcggcatccgaaagataattccccagttgttctggcgtgtcttatcacgggctaccatcctacatctgttaccgttacgtggtatatgggtacgcaaagccaacctcagcggacttttccagagatccaacggcgagattcatattatatgacatccagtcagttgagtacaccgctgcaacagtggcggcaaggtgagtataagtgtgtggtccaacacacagccagtaaaagtaagaaagagatattccggtggcctgaaagcccgaaggcacaagcatcttctgttccgacggcgcaaccgcaagctgaaggaagtcttgcaaaagcaaccacagcacccgcgacaacacgaaacacaggacgcggaggcgaggaaaagaaaaaagaaaaggaaaaggaagagcaagaggagagggaaactaagacccccggtacccagagttttgggttgttggaccctaaattgtgctatctgttggacggaatcctgttcatttacggagtgatcctgaccgcattgttcctgcgggttaagttttccagatccgcagacgcacccgcttaccaacaagggcagaaccaactctacaatgaacttaatttggggcggagggaagagtacgacgttctggacaaaaggaggggacgagatcccgagatgggcggaaagcctcagcgaaggaagaatccgcaagaggggctttataacgaactccagaaagataaaatggcagaagcctatagtgagattgggatgaagggagaaaggaggaggggtaaaggtcacgatgggttgtaccaaggattgagcacagccactaaagatacctatgatgcgctccacatgcaggccctgccgccaagacgcgccaagagaagcggatctggcgtgaagcagaccctgaatttcgacctgctgaagctggctggcgacgtggaatccaacccaggcccttctagaggccatatggctctgcctgtgacagctctgctgctgcctctggcactgctgcttcatgctgctagacctagccagtttagagtgtcccctctggacagaacctggaacctgggcgagacagtggaactgaagtgccaggtgctgctgagcaaccctacaagcggctgctcctggctgtttcagcctagaggtgcagccgcctctcctacctttctgctgtacctgagccagaacaagcccaaggccgccgaaggactggacacccagagattcagcggcaagagactgggcgacaccttcgtgctgaccctgagcgacttcagaagagagaacgagggctactacttctgtagcgccctgagcaacagcatcatgtacttcagccacttcgtgcccgtgtttctgcccgccaagcctacaacaacccctgctcctagacctcctacaccagctcctacaatcgccagccagcctctgtctctcagacccgaagcctgtagacctgctgctggcggagctgtgcataccagaggactggatttcgcctgcgacatctacatctgggctcctctggctggcacatgtggcgtgctgctgctgtccctggtcatcaccctgtactgcaaccaccggaacaggcggagagtgtgcaagtgccctagacctgtggtcaagagcggcgacaagcctagcctgagcgccagatatgtt

SEQ ID NO: 2379 - DNA, 3183 bp, synthetic construct
  source 1..3183: mol_type = other DNA
atggccttaccagtgaccgccttgctcctgccgctggccttgctgctccacgccgccaggccggatggcggcattacacagagccccaagtacctgttcagaaaagagggccagaacgtcaccctgagctgcgagcagaacctgaaccacgacgccatgtactggtacagacaggacccaggccagggcctgagactgatctactactcttgggctcagggcgacttccagaagggcgatattgccgagggctacagcgtgtccagagagaagaaagagtcctttccactgaccgtgacaagcgcccagaagaaccctaccgccttctacctgtgtgccagctcttggggagccccttacgagcagtatttcggccctggcaccagactgacagttctcgagggacagcctaaggccaatcctaccgtgacactgttccctccaagcagcgaagaactccaggccaacaaggccacacttgtgtgcctgatctccgacttctaccctggggctgtgacagtggcttggaaggccgatggatctcctgtgaaagccggcgtggaaaccaccaagccatccaagcagagcaacaacaaatacgccgccagctcctacctgagcctgacacctgagcagtggaagtcccacagatcctacagctgccaagtgacccacgaaggcagcaccgtggaaaagacagtggcccctacagagtgcagcggatcccagagcttcggcctgctggaccccaagctgtgctacctgctggatggcatcctgttcatctacggcgtgatcctgaccgccctgttcctgagagtgaagttcagcagaagcgccgacgcccctgcctaccagcagggacagaaccaactgtacaacgagctgaacctgggcagacgggaagagtacgacgtgctggacaagcggagaggcagggaccctgagatgggcggaaagccccagcggagaaagaacccccaggaaggactgtataacgaactccagaaagacaagatggccgaagcctacagcgagatcggcatgaagggcgagcggagaagaggcaagggccacgatggcctgtaccagggcctgagcaccgccaccaaggacacctatgacgccctgcacatgcaggccctgcctccaagaagggccaagcgatctggatctggagcaacaaacttctcactactcaaacaagcaggtgacgtggaggagaatcccgggcctactagtatggactggatttggcgcatccttttccttgtcggcgctgctaccggcgcgcattccttcgaacaacaaggcgaagaagatccccaggctctgagcatccaagagggcgagaatgccaccatgaactgctcctacaagaccagcatcaacaacctccagtggtacaggcagaacagcggcagaggactggtgcacctgatcctgatccggtccaacgagagagagaagcactccggcagactgagagtgaccctggacaccagcaagaagtccagcagcctgctgattaccgccagcagagccgccgatacagccagctacttttgtgccaccgacggcgatacccctctggtgtttggcaagggcacaagactgagcgtgatcgccaatacgcgtgcctcaacgaaagggcctagcgtcttccccctggcgccgtgctcacgatccacaagcgaatccaccgccgctctcggatgcctcgtaaaggattatttccctgaaccagtcacggtgtcatggaacagcggtgcccttaccagcggcgtccatacctttcctgctgtgctccagtccagcggactttatagtctcagctctgtcgtgaccgtcccttcctctaattttggcacccagacttacacgtgcaacgtcgatcataagcccagtaacaccaaggtagacaagacggtggaacgaaagggtacccagagttttgggttgttggaccctaaattgtgctatctgttggacggaatcctgttcatttacggagtgatcctgaccgcattgttcctgcgggttaagttttccagatccgcagacgcacccgcttaccaacaagggcagaaccaactctacaatgaacttaatttggggcggagggaagagtacgacgttctggacaaaaggaggggacgagatcccgagatgggcggaaagcctcagcgaaggaagaatccgcaagaggggctttataacgaactccagaaagataaaatggcagaagcctatagtgagattgggatgaagggagaaaggaggaggggtaaaggtcacgatgggttgtaccaaggattgagcacagccactaaagatacctatgatgcgctccacatgcaggccctgccgccaagacgcgccaagagaagcggatctggcgtgaagcagaccctgaatttcgacctgctgaagctggctggcgacgtggaatccaacccaggcccttctagaggccatatggctctgcctgtgacagctctgctgctgcctctggcactgctgcttcatgctgctagacctagccagtttagagtgtcccctctggacagaacctggaacctgggcgagacagtggaactgaagtgccaggtgctgctgagcaaccctacaagcggctgctcctggctgtttcagcctagaggtgcagccgcctctcctacctttctgctgtacctgagccagaacaagcccaaggccgccgaaggactggacacccagagattcagcggcaagagactgggcgacaccttcgtgctgaccctgagcgacttcagaagagagaacgagggctactacttctgtagcgccctgagcaacagcatcatgtacttcagccacttcgtgcccgtgtttctgcccgccaagcctacaacaacccctgctcctagacctcctacaccagctcctacaatcgccagccagcctctgtctctcagacccgaagcctgtagacctgctgctggcggagctgtgcataccagaggactggatttcgcctgcgacatctacatctgggctcctctggctggcacatgtggcgtgctgctgctgtccctggtcatcaccctgtactgcaaccaccggaacaggcggagagtgtgcaagtgccctagacctgtggtcaagagcggcgacaagcctagcctgagcgccagatatgtt

SEQ ID NO: 2380 - DNA, 3204 bp, synthetic construct
  source 1..3204: mol_type = other DNA
atggccttaccagtgaccgccttgctcctgccgctggccttgctgctccacgccgccaggccggatggcggcattacacagagccccaagtacctgttcagaaaagagggccagaacgtcaccctgagctgcgagcagaacctgaaccacgacgccatgtactggtacagacaggacccaggccagggcctgagactgatctactactcttgggctcagggcgacttccagaagggcgatattgccgagggctacagcgtgtccagagagaagaaagagtcctttccactgaccgtgacaagcgcccagaagaaccctaccgccttctacctgtgtgccagctcttggggagccccttacgagcagtatttcggccctggcaccagactgacagttctcgagggacagcctaaggccaatcctaccgtgacactgttccctccaagcagcgaagaactccaggccaacaaggccacacttgtgtgcctgatctccgacttctaccctggggctgtgacagtggcttggaaggccgatggatctcctgtgaaagccggcgtggaaaccaccaagccatccaagcagagcaacaacaaatacgccgccagctcctacctgagcctgacacctgagcagtggaagtcccacagatcctacagctgccaagtgacccacgaaggcagcaccgtggaaaagacagtggcccctacagagtgcagcggatcccagagcttcggcctgctggaccccaagctgtgctacctgctggatggcatcctgttcatctacggcgtgatcctgaccgccctgttcctgagagtgaagttcagcagaagcgccgacgcccctgcctaccagcagggacagaaccaactgtacaacgagctgaacctgggcagacgggaagagtacgacgtgctggacaagcggagaggcagggaccctgagatgggcggaaagccccagcggagaaagaacccccaggaaggactgtataacgaactccagaaagacaagatggccgaagcctacagcgagatcggcatgaagggcgagcggagaagaggcaagggccacgatggcctgtaccagggcctgagcaccgccaccaaggacacctatgacgccctgcacatgcaggccctgcctccaagaagggccaagcgatctggatctggagcaacaaacttctcactactcaaacaagcaggtgacgtggaggagaatcccgggcctactagtatggactggatttggcgcatccttttccttgtcggcgctgctaccggcgcgcattccttcgaacaacaaggcgaagaagatccccaggctctgagcatccaagagggcgagaatgccaccatgaactgctcctacaagaccagcatcaacaacctccagtggtacaggcagaacagcggcagaggactggtgcacctgatcctgatccggtccaacgagagagagaagcactccggcagactgagagtgaccctggacaccagcaagaagtccagcagcctgctgattaccgccagcagagccgccgatacagccagctacttttgtgccaccgacggcgatacccctctggtgtttggcaagggcacaagactgagcgtgatcgccaatacgcgtgcgtcacctacgtccccaaaagtgttcccgctgtcactcgattccactccacaggacggtaacgtggtggttgcctgcctggtacaaggtttctttcctcaagaaccactctctgtgacgtggtctgaaagtggtcagaatgttacagcacggaacttcccaccgagtcaagatgcgagtggggatctctatacgacatccagtcaactcacactgcccgcaacacaatgccccgatggcaaatctgttacctgccatgtgaaacattacaccaatccatcccaggatgtgacagtaccttgtccggttccgccccctcccccgggtacccagagttttgggttgttggaccctaaattgtgctatctgttggacggaatcctgttcatttacggagtgatcctgaccgcattgttcctgcgggttaagttttccagatccgcagacgcacccgcttaccaacaagggcagaaccaactctacaatgaacttaatttggggcggagggaagagtacgacgttctggacaaaaggaggggacgagatcccgagatgggcggaaagcctcagcgaaggaagaatccgcaagaggggctttataacgaactccagaaagataaaatggcagaagcctatagtgagattgggatgaagggagaaaggaggaggggtaaaggtcacgatgggttgtaccaaggattgagcacagccactaaagatacctatgatgcgctccacatgcaggccctgccgccaagacgcgccaagagaagcggatctggcgtgaagcagaccctgaatttcgacctgctgaagctggctggcgacgtggaatccaacccaggcccttctagaggccatatggctctgcctgtgacagctctgctgctgcctctggcactgctgcttcatgctgctagacctagccagtttagagtgtcccctctggacagaacctggaacctgggcgagacagtggaactgaagtgccaggtgctgctgagcaaccctacaagcggctgctcctggctgtttcagcctagaggtgcagccgcctctcctacctttctgctgtacctgagccagaacaagcccaaggccgccgaaggactggacacccagagattcagcggcaagagactgggcgacaccttcgtgctgaccctgagcgacttcagaagagagaacgagggctactacttctgtagcgccctgagcaacagcatcatgtacttcagccacttcgtgcccgtgtttctgcccgccaagcctacaacaacccctgctcctagacctcctacaccagctcctacaatcgccagccagcctctgtctctcagacccgaagcctgtagacctgctgctggcggagctgtgcataccagaggactggatttcgcctgcgacatctacatctgggctcctctggctggcacatgtggcgtgctgctgctgtccctggtcatcaccctgtactgcaaccaccggaacaggcggagagtgtgcaagtgccctagacctgtggtcaagagcggcgacaagcctagcctgagcgccagatatgtt

SEQ ID NO: 2381 - DNA, 3189 bp, synthetic construct
  source 1..3189: mol_type = other DNA
atggccttaccagtgaccgccttgctcctgccgctggccttgctgctccacgccgccaggccggatggcggcattacacagagccccaagtacctgttcagaaaagagggccagaacgtcaccctgagctgcgagcagaacctgaaccacgacgccatgtactggtacagacaggacccaggccagggcctgagactgatctactactcttgggctcagggcgacttccagaagggcgatattgccgagggctacagcgtgtccagagagaagaaagagtcctttccactgaccgtgacaagcgcccagaagaaccctaccgccttctacctgtgtgccagctcttggggagccccttacgagcagtatttcggccctggcaccagactgacagttctcgagggacagcctaaggccaatcctaccgtgacactgttccctccaagcagcgaagaactccaggccaacaaggccacacttgtgtgcctgatctccgacttctaccctggggctgtgacagtggcttggaaggccgatggatctcctgtgaaagccggcgtggaaaccaccaagccatccaagcagagcaacaacaaatacgccgccagctcctacctgagcctgacacctgagcagtggaagtcccacagatcctacagctgccaagtgacccacgaaggcagcaccgtggaaaagacagtggcccctacagagtgcagcggatcccagagcttcggcctgctggaccccaagctgtgctacctgctggatggcatcctgttcatctacggcgtgatcctgaccgccctgttcctgagagtgaagttcagcagaagcgccgacgcccctgcctaccagcagggacagaaccaactgtacaacgagctgaacctgggcagacgggaagagtacgacgtgctggacaagcggagaggcagggaccctgagatgggcggaaagccccagcggagaaagaacccccaggaaggactgtataacgaactccagaaagacaagatggccgaagcctacagcgagatcggcatgaagggcgagcggagaagaggcaagggccacgatggcctgtaccagggcctgagcaccgccaccaaggacacctatgacgccctgcacatgcaggccctgcctccaagaagggccaagcgatctggatctggagcaacaaacttctcactactcaaacaagcaggtgacgtggaggagaatcccgggcctactagtatggactggatttggcgcatccttttccttgtcggcgctgctaccggcgcgcattccttcgaacaacaaggcgaagaagatccccaggctctgagcatccaagagggcgagaatgccaccatgaactgctcctacaagaccagcatcaacaacctccagtggtacaggcagaacagcggcagaggactggtgcacctgatcctgatccggtccaacgagagagagaagcactccggcagactgagagtgaccctggacaccagcaagaagtccagcagcctgctgattaccgccagcagagccgccgatacagccagctacttttgtgccaccgacggcgatacccctctggtgtttggcaagggcacaagactgagcgtgatcgccaatacgcgtgctagtacccagtcaccttctgttttcccgcttactagatgctgcaagaacataccatccaatgccacttctgtcacactgggctgtcttgctacaggttattttcctgagccggtgatggtcacttgggataccggtagcctgaatggaactacaatgacgctgcctgccacgacgctcacattgagtgggcattacgcgacaattagtcttttgacggtaagcggagcttgggctaagcagatgttcacttgcagagtagcgcacactccctctagtactgactgggttgacaacaaaaccttttctggtacccagagttttgggttgttggaccctaaattgtgctatctgttggacggaatcctgttcatttacggagtgatcctgaccgcattgttcctgcgggttaagttttccagatccgcagacgcacccgcttaccaacaagggcagaaccaactctacaatgaacttaatttggggcggagggaagagtacgacgttctggacaaaaggaggggacgagatcccgagatgggcggaaagcctcagcgaaggaagaatccgcaagaggggctttataacgaactccagaaagataaaatggcagaagcctatagtgagattgggatgaagggagaaaggaggaggggtaaaggtcacgatgggttgtaccaaggattgagcacagccactaaagatacctatgatgcgctccacatgcaggccctgccgccaagacgcgccaagagaagcggatctggcgtgaagcagaccctgaatttcgacctgctgaagctggctggcgacgtggaatccaacccaggcccttctagaggccatatggctctgcctgtgacagctctgctgctgcctctggcactgctgcttcatgctgctagacctagccagtttagagtgtcccctctggacagaacctggaacctgggcgagacagtggaactgaagtgccaggtgctgctgagcaaccctacaagcggctgctcctggctgtttcagcctagaggtgcagccgcctctcctacctttctgctgtacctgagccagaacaagcccaaggccgccgaaggactggacacccagagattcagcggcaagagactgggcgacaccttcgtgctgaccctgagcgacttcagaagagagaacgagggctactacttctgtagcgccctgagcaacagcatcatgtacttcagccacttcgtgcccgtgtttctgcccgccaagcctacaacaacccctgctcctagacctcctacaccagctcctacaatcgccagccagcctctgtctctcagacccgaagcctgtagacctgctgctggcggagctgtgcataccagaggactggatttcgcctgcgacatctacatctgggctcctctggctggcacatgtggcgtgctgctgctgtccctggtcatcaccctgtactgcaaccaccggaacaggcggagagtgtgcaagtgccctagacctgtggtcaagagcggcgacaagcctagcctgagcgccagatatgtt

SEQ ID NO: 2382 - DNA, 3189 bp, synthetic construct
  source 1..3189: mol_type = other DNA
atggccttaccagtgaccgccttgctcctgccgctggccttgctgctccacgccgccaggccggatggcggcattacacagagccccaagtacctgttcagaaaagagggccagaacgtcaccctgagctgcgagcagaacctgaaccacgacgccatgtactggtacagacaggacccaggccagggcctgagactgatctactactcttgggctcagggcgacttccagaagggcgatattgccgagggctacagcgtgtccagagagaagaaagagtcctttccactgaccgtgacaagcgcccagaagaaccctaccgccttctacctgtgtgccagctcttggggagccccttacgagcagtatttcggccctggcaccagactgacagttctcgagggacagcctaaggccaatcctaccgtgacactgttccctccaagcagcgaagaactccaggccaacaaggccacacttgtgtgcctgatctccgacttctaccctggggctgtgacagtggcttggaaggccgatggatctcctgtgaaagccggcgtggaaaccaccaagccatccaagcagagcaacaacaaatacgccgccagctcctacctgagcctgacacctgagcagtggaagtcccacagatcctacagctgccaagtgacccacgaaggcagcaccgtggaaaagacagtggcccctacagagtgcagcggatcccagagcttcggcctgctggaccccaagctgtgctacctgctggatggcatcctgttcatctacggcgtgatcctgaccgccctgttcctgagagtgaagttcagcagaagcgccgacgcccctgcctaccagcagggacagaaccaactgtacaacgagctgaacctgggcagacgggaagagtacgacgtgctggacaagcggagaggcagggaccctgagatgggcggaaagccccagcggagaaagaacccccaggaaggactgtataacgaactccagaaagacaagatggccgaagcctacagcgagatcggcatgaagggcgagcggagaagaggcaagggccacgatggcctgtaccagggcctgagcaccgccaccaaggacacctatgacgccctgcacatgcaggccctgcctccaagaagggccaagcgatctggatctggagcaacaaacttctcactactcaaacaagcaggtgacgtggaggagaatcccgggcctactagtatggactggatttggcgcatccttttccttgtcggcgctgctaccggcgcgcattccttcgaacaacaaggcgaagaagatccccaggctctgagcatccaagagggcgagaatgccaccatgaactgctcctacaagaccagcatcaacaacctccagtggtacaggcagaacagcggcagaggactggtgcacctgatcctgatccggtccaacgagagagagaagcactccggcagactgagagtgaccctggacaccagcaagaagtccagcagcctgctgattaccgccagcagagccgccgatacagccagctacttttgtgccaccgacggcgatacccctctggtgtttggcaagggcacaagactgagcgtgatcgccaatacgcgtgcgtccactaagggtccgtcagtcttcccgctggcgccctgttcccgcagcacgagtgaatctaccgccgcccttgggtgcttggtaaaagactattttcctgagcccgttacagtatcatggaacagcggggctctgactagcggggtgcatacgttccctgcggttctgcaatctagcggactgtattctctctccagtgttgtgaccgtgccaagctccagcctcggtactaaaacttatacatgtaatgtggatcataaaccttcaaataccaaggttgacaaaagggtagagagtaagtacggtggtacccagagttttgggttgttggaccctaaattgtgctatctgttggacggaatcctgttcatttacggagtgatcctgaccgcattgttcctgcgggttaagttttccagatccgcagacgcacccgcttaccaacaagggcagaaccaactctacaatgaacttaatttggggcggagggaagagtacgacgttctggacaaaaggaggggacgagatcccgagatgggcggaaagcctcagcgaaggaagaatccgcaagaggggctttataacgaactccagaaagataaaatggcagaagcctatagtgagattgggatgaagggagaaaggaggaggggtaaaggtcacgatgggttgtaccaaggattgagcacagccactaaagatacctatgatgcgctccacatgcaggccctgccgccaagacgcgccaagagaagcggatctggcgtgaagcagaccctgaatttcgacctgctgaagctggctggcgacgtggaatccaacccaggcccttctagaggccatatggctctgcctgtgacagctctgctgctgcctctggcactgctgcttcatgctgctagacctagccagtttagagtgtcccctctggacagaacctggaacctgggcgagacagtggaactgaagtgccaggtgctgctgagcaaccctacaagcggctgctcctggctgtttcagcctagaggtgcagccgcctctcctacctttctgctgtacctgagccagaacaagcccaaggccgccgaaggactggacacccagagattcagcggcaagagactgggcgacaccttcgtgctgaccctgagcgacttcagaagagagaacgagggctactacttctgtagcgccctgagcaacagcatcatgtacttcagccacttcgtgcccgtgtttctgcccgccaagcctacaacaacccctgctcctagacctcctacaccagctcctacaatcgccagccagcctctgtctctcagacccgaagcctgtagacctgctgctggcggagctgtgcataccagaggactggatttcgcctgcgacatctacatctgggctcctctggctggcacatgtggcgtgctgctgctgtccctggtcatcaccctgtactgcaaccaccggaacaggcggagagtgtgcaagtgccctagacctgtggtcaagagcggcgacaagcctagcctgagcgccagatatgtt

SEQ ID NO: 2383 - DNA, 3189 bp, synthetic construct
  source 1..3189: mol_type = other DNA
atggccttaccagtgaccgccttgctcctgccgctggccttgctgctccacgccgccaggccggatggcggcattacacagagccccaagtacctgttcagaaaagagggccagaacgtcaccctgagctgcgagcagaacctgaaccacgacgccatgtactggtacagacaggacccaggccagggcctgagactgatctactactcttgggctcagggcgacttccagaagggcgatattgccgagggctacagcgtgtccagagagaagaaagagtcctttccactgaccgtgacaagcgcccagaagaaccctaccgccttctacctgtgtgccagctcttggggagccccttacgagcagtatttcggccctggcaccagactgacagttctcgagggacagcctaaggccaatcctaccgtgacactgttccctccaagcagcgaagaactccaggccaacaaggccacacttgtgtgcctgatctccgacttctaccctggggctgtgacagtggcttggaaggccgatggatctcctgtgaaagccggcgtggaaaccaccaagccatccaagcagagcaacaacaaatacgccgccagctcctacctgagcctgacacctgagcagtggaagtcccacagatcctacagctgccaagtgacccacgaaggcagcaccgtggaaaagacagtggcccctacagagtgcagcggatcccagagcttcggcctgctggaccccaagctgtgctacctgctggatggcatcctgttcatctacggcgtgatcctgaccgccctgttcctgagagtgaagttcagcagaagcgccgacgcccctgcctaccagcagggacagaaccaactgtacaacgagctgaacctgggcagacgggaagagtacgacgtgctggacaagcggagaggcagggaccctgagatgggcggaaagccccagcggagaaagaacccccaggaaggactgtataacgaactccagaaagacaagatggccgaagcctacagcgagatcggcatgaagggcgagcggagaagaggcaagggccacgatggcctgtaccagggcctgagcaccgccaccaaggacacctatgacgccctgcacatgcaggccctgcctccaagaagggccaagcgatctggatctggagcaacaaacttctcactactcaaacaagcaggtgacgtggaggagaatcccgggcctactagtatggactggatttggcgcatccttttccttgtcggcgctgctaccggcgcgcattccttcgaacaacaaggcgaagaagatccccaggctctgagcatccaagagggcgagaatgccaccatgaactgctcctacaagaccagcatcaacaacctccagtggtacaggcagaacagcggcagaggactggtgcacctgatcctgatccggtccaacgagagagagaagcactccggcagactgagagtgaccctggacaccagcaagaagtccagcagcctgctgattaccgccagcagagccgccgatacagccagctacttttgtgccaccgacggcgatacccctctggtgtttggcaagggcacaagactgagcgtgatcgccaatacgcgtgcaagtacaaagggacccagtgttttcccgctcgccccctgttcacgatcaacgagtgagtccactgcggctctcggatgcctcgtcaaagactacttccccgagccggtgactgttagttggaactctggggctcttacttcaggcgtacacacattccccgccgtgcttcagtcaagtgggctctactcacttagcagtgtggtaacggttccctctagcaactttggcacccaaacatatacttgcaacgtcgatcacaagccgtcaaataccaaagttgacaagaccgttgaaaggaaatgttgtggtacccagagttttgggttgttggaccctaaattgtgctatctgttggacggaatcctgttcatttacggagtgatcctgaccgcattgttcctgcgggttaagttttccagatccgcagacgcacccgcttaccaacaagggcagaaccaactctacaatgaacttaatttggggcggagggaagagtacgacgttctggacaaaaggaggggacgagatcccgagatgggcggaaagcctcagcgaaggaagaatccgcaagaggggctttataacgaactccagaaagataaaatggcagaagcctatagtgagattgggatgaagggagaaaggaggaggggtaaaggtcacgatgggttgtaccaaggattgagcacagccactaaagatacctatgatgcgctccacatgcaggccctgccgccaagacgcgccaagagaagcggatctggcgtgaagcagaccctgaatttcgacctgctgaagctggctggcgacgtggaatccaacccaggcccttctagaggccatatggctctgcctgtgacagctctgctgctgcctctggcactgctgcttcatgctgctagacctagccagtttagagtgtcccctctggacagaacctggaacctgggcgagacagtggaactgaagtgccaggtgctgctgagcaaccctacaagcggctgctcctggctgtttcagcctagaggtgcagccgcctctcctacctttctgctgtacctgagccagaacaagcccaaggccgccgaaggactggacacccagagattcagcggcaagagactgggcgacaccttcgtgctgaccctgagcgacttcagaagagagaacgagggctactacttctgtagcgccctgagcaacagcatcatgtacttcagccacttcgtgcccgtgtttctgcccgccaagcctacaacaacccctgctcctagacctcctacaccagctcctacaatcgccagccagcctctgtctctcagacccgaagcctgtagacctgctgctggcggagctgtgcataccagaggactggatttcgcctgcgacatctacatctgggctcctctggctggcacatgtggcgtgctgctgctgtccctggtcatcaccctgtactgcaaccaccggaacaggcggagagtgtgcaagtgccctagacctgtggtcaagagcggcgacaagcctagcctgagcgccagatatgtt

SEQ ID NO: 2384 - DNA, 3234 bp, synthetic construct
  source 1..3234: mol_type = other DNA
atggccttaccagtgaccgccttgctcctgccgctggccttgctgctccacgccgccaggccggatggcggcattacacagagccccaagtacctgttcagaaaagagggccagaacgtcaccctgagctgcgagcagaacctgaaccacgacgccatgtactggtacagacaggacccaggccagggcctgagactgatctactactcttgggctcagggcgacttccagaagggcgatattgccgagggctacagcgtgtccagagagaagaaagagtcctttccactgaccgtgacaagcgcccagaagaaccctaccgccttctacctgtgtgccagctcttggggagccccttacgagcagtatttcggccctggcaccagactgacagttctcgaggacctgaagaacgtgttcccacctgaggtggccgtgttcgagcctagcgaggccgagatcagccacacccagaaagccaccctcgtgtgcctggctaccggcttctaccccgaccatgtggaactgtcttggtgggtcaacggcaaagaggtgcacagcggcgtgtctaccgacccccagccactgaaagaacagcccgccctgaacgacagccggtactgcctgagcagcagactgagagtgtccgccaccttctggcagaacccccggaaccacttcagatgccaggtgcagttctacggcctgagcgagaacgacgagtggacccaggacagagccaagcccgtgacccagatcgtgtctgccgaagcctggggcagagccgattgcggatcccagagcttcggcctgctggaccccaagctgtgctacctgctggatggcatcctgttcatctacggcgtgatcctgaccgccctgttcctgagagtgaagttcagcagaagcgccgacgcccctgcctaccagcagggacagaaccaactgtacaacgagctgaacctgggcagacgggaagagtacgacgtgctggacaagcggagaggcagggaccctgagatgggcggaaagccccagcggagaaagaacccccaggaaggactgtataacgaactccagaaagacaagatggccgaagcctacagcgagatcggcatgaagggcgagcggagaagaggcaagggccacgatggcctgtaccagggcctgagcaccgccaccaaggacacctatgacgccctgcacatgcaggccctgcctccaagaagggccaagcgatctggatctggagcaacaaacttctcactactcaaacaagcaggtgacgtggaggagaatcccgggcctactagtatggactggatttggcgcatccttttccttgtcggcgctgctaccggcgcgcattccttcgaacaacaaggcgaagaagatccccaggctctgagcatccaagagggcgagaatgccaccatgaactgctcctacaagaccagcatcaacaacctccagtggtacaggcagaacagcggcagaggactggtgcacctgatcctgatccggtccaacgagagagagaagcactccggcagactgagagtgaccctggacaccagcaagaagtccagcagcctgctgattaccgccagcagagccgccgatacagccagctacttttgtgccaccgacggcgatacccctctggtgtttggcaagggcacaagactgagcgtgatcgccaatacgcgtatccagaaccctgatcctgccgtgtaccagctgcgggatagcaagagcagcgacaagagcgtgtgtctgttcaccgacttcgacagccagaccaacgtgtcccagagcaaggactccgacgtgtacatcaccgataagaccgtgctggacatgcggagcatggacttcaagagcaactccgccgtggcctggtccaacaagtccgatttcgcctgcgccaacgccttcaacaacagcattatccccgaggacacattcttcccaagccccgagagcagctgcggtacccagagttttgggttgttggaccctaaattgtgctatctgttggacggaatcctgttcatttacggagtgatcctgaccgcattgttcctgcgggttaagttttccagatccgcagacgcacccgcttaccaacaagggcagaaccaactctacaatgaacttaatttggggcggagggaagagtacgacgttctggacaaaaggaggggacgagatcccgagatgggcggaaagcctcagcgaaggaagaatccgcaagaggggctttataacgaactccagaaagataaaatggcagaagcctatagtgagattgggatgaagggagaaaggaggaggggtaaaggtcacgatgggttgtaccaaggattgagcacagccactaaagatacctatgatgcgctccacatgcaggccctgccgccaagacgcgccaagagaagcggatctggcgtgaagcagaccctgaatttcgacctgctgaagctggctggcgacgtggaatccaacccaggcccttctagaggccatatggctctgcctgtgacagctctgctgctgcctctggcactgctgcttcatgctgctagacctagccagtttagagtgtcccctctggacagaacctggaacctgggcgagacagtggaactgaagtgccaggtgctgctgagcaaccctacaagcggctgctcctggctgtttcagcctagaggtgcagccgcctctcctacctttctgctgtacctgagccagaacaagcccaaggccgccgaaggactggacacccagagattcagcggcaagagactgggcgacaccttcgtgctgaccctgagcgacttcagaagagagaacgagggctactacttctgtagcgccctgagcaacagcatcatgtacttcagccacttcgtgcccgtgtttctgcccgccaagcctacaacaacccctgctcctagacctcctacaccagctcctacaatcgccagccagcctctgtctctcagacccgaagcctgtagacctgctgctggcggagctgtgcataccagaggactggatttcgcctgcgacatctacatctgggctcctctggctggcacatgtggcgtgctgctgctgtccctggtcatcaccctgtactgcaaccaccggaacaggcggagagtgtgcaagtgccctagacctgtggtcaagagcggcgacaagcctagcctgagcgccagatatgtt

SEQ ID NO: 2385 - DNA, 3234 bp, synthetic construct
  source 1..3234: mol_type = other DNA
atggccttaccagtgaccgccttgctcctgccgctggccttgctgctccacgccgccaggccggatggcggcattacacagagccccaagtacctgttcagaaaagagggccagaacgtcaccctgagctgcgagcagaacctgaaccacgacgccatgtactggtacagacaggacccaggccagggcctgagactgatctactactcttgggctcagggcgacttccagaagggcgatattgccgagggctacagcgtgtccagagagaagaaagagtcctttccactgaccgtgacaagcgcccagaagaaccctaccgccttctacctgtgtgccagctcttggggagccccttacgagcagtatttcggccctggcaccagactgacagttctcgaggacctgaagaacgtgttcccacctgaggtggccgtgttcgagcctagcaaggccgagatcgcccacacccagaaagccaccctcgtgtgcctggctaccggcttctaccccgaccatgtggaactgtcttggtgggtcaacggcaaagaggtgcacagcggcgtgtgtaccgacccccagccactgaaagaacagcccgccctgaacgacagccggtactgcctgagcagcagactgagagtgtccgccaccttctggcagaacccccggaaccacttcagatgccaggtgcagttctacggcctgagcgagaacgacgagtggacccaggacagagccaagcccgtgacccagatcgtgtctgccgaagcctggggcagagccgattgcggatcccagagcttcggcctgctggaccccaagctgtgctacctgctggatggcatcctgttcatctacggcgtgatcctgaccgccctgttcctgagagtgaagttcagcagaagcgccgacgcccctgcctaccagcagggacagaaccaactgtacaacgagctgaacctgggcagacgggaagagtacgacgtgctggacaagcggagaggcagggaccctgagatgggcggaaagccccagcggagaaagaacccccaggaaggactgtataacgaactccagaaagacaagatggccgaagcctacagcgagatcggcatgaagggcgagcggagaagaggcaagggccacgatggcctgtaccagggcctgagcaccgccaccaaggacacctatgacgccctgcacatgcaggccctgcctccaagaagggccaagcgatctggatctggagcaacaaacttctcactactcaaacaagcaggtgacgtggaggagaatcccgggcctactagtatggactggatttggcgcatccttttccttgtcggcgctgctaccggcgcgcattccttcgaacaacaaggcgaagaagatccccaggctctgagcatccaagagggcgagaatgccaccatgaactgctcctacaagaccagcatcaacaacctccagtggtacaggcagaacagcggcagaggactggtgcacctgatcctgatccggtccaacgagagagagaagcactccggcagactgagagtgaccctggacaccagcaagaagtccagcagcctgctgattaccgccagcagagccgccgatacagccagctacttttgtgccaccgacggcgatacccctctggtgtttggcaagggcacaagactgagcgtgatcgccaatacgcgtatccagaaccctgatcctgccgtgtaccagctgcgggatagcaagagcagcgacaagagcgtgtgtctgttcaccgacttcgacagccagaccaacgtgtcccagagcaaggactccgacgtgtacatcaccgataagtgcgtgctggacatgcggagcatggacttcaagagcaactccgccgtggcctggtccaacaagtccgatttcgcctgcgccaacgccttcaacaacagcattatccccgaggacacattcttcccaagcagcgacgtgccctgcggtacccagagttttgggttgttggaccctaaattgtgctatctgttggacggaatcctgttcatttacggagtgatcctgaccgcattgttcctgcgggttaagttttccagatccgcagacgcacccgcttaccaacaagggcagaaccaactctacaatgaacttaatttggggcggagggaagagtacgacgttctggacaaaaggaggggacgagatcccgagatgggcggaaagcctcagcgaaggaagaatccgcaagaggggctttataacgaactccagaaagataaaatggcagaagcctatagtgagattgggatgaagggagaaaggaggaggggtaaaggtcacgatgggttgtaccaaggattgagcacagccactaaagatacctatgatgcgctccacatgcaggccctgccgccaagacgcgccaagagaagcggatctggcgtgaagcagaccctgaatttcgacctgctgaagctggctggcgacgtggaatccaacccaggcccttctagaggccatatggctctgcctgtgacagctctgctgctgcctctggcactgctgcttcatgctgctagacctagccagtttagagtgtcccctctggacagaacctggaacctgggcgagacagtggaactgaagtgccaggtgctgctgagcaaccctacaagcggctgctcctggctgtttcagcctagaggtgcagccgcctctcctacctttctgctgtacctgagccagaacaagcccaaggccgccgaaggactggacacccagagattcagcggcaagagactgggcgacaccttcgtgctgaccctgagcgacttcagaagagagaacgagggctactacttctgtagcgccctgagcaacagcatcatgtacttcagccacttcgtgcccgtgtttctgcccgccaagcctacaacaacccctgctcctagacctcctacaccagctcctacaatcgccagccagcctctgtctctcagacccgaagcctgtagacctgctgctggcggagctgtgcataccagaggactggatttcgcctgcgacatctacatctgggctcctctggctggcacatgtggcgtgctgctgctgtccctggtcatcaccctgtactgcaaccaccggaacaggcggagagtgtgcaagtgccctagacctgtggtcaagagcggcgacaagcctagcctgagcgccagatatgtt

SEQ ID NO: 2386 - DNA, 2427 bp, synthetic construct
  source 1..2427: mol_type = other DNA
atggccttaccagtgaccgccttgctcctgccgctggccttgctgctccacgccgccaggccggatggcggcattacacagagccccaagtacctgttcagaaaagagggccagaacgtcaccctgagctgcgagcagaacctgaaccacgacgccatgtactggtacagacaggacccaggccagggcctgagactgatctactactcttgggctcagggcgacttccagaagggcgatattgccgagggctacagcgtgtccagagagaagaaagagtcctttccactgaccgtgacaagcgcccagaagaaccctaccgccttctacctgtgtgccagctcttggggagccccttacgagcagtatttcggccctggcaccagactgacagttctcgaggacctgaagaacgtgttcccacctgaggtggccgtgttcgagcctagcgaggccgagatcagccacacccagaaagccaccctcgtgtgcctggctaccggcttctaccccgaccatgtggaactgtcttggtgggtcaacggcaaagaggtgcacagcggcgtgtgtaccgacccccagccactgaaagaacagcccgccctgaacgacagccggtactgcctgagcagcagactgagagtgtccgccaccttctggcagaacccccggaaccacttcagatgccaggtgcagttctacggcctgagcgagaacgacgagtggacccaggacagagccaagcccgtgacccagatcgtgtctgccgaagcctggggcagagccgattgcggatcccagagcttcggcctgctggaccccaagctgtgctacctgctggatggcatcctgttcatctacggcgtgatcctgaccgccctgttcctgagagtgaagttcagcagaagcgccgacgcccctgcctaccagcagggacagaaccaactgtacaacgagctgaacctgggcagacgggaagagtacgacgtgctggacaagcggagaggcagggaccctgagatgggcggaaagccccagcggagaaagaacccccaggaaggactgtataacgaactccagaaagacaagatggccgaagcctacagcgagatcggcatgaagggcgagcggagaagaggcaagggccacgatggcctgtaccagggcctgagcaccgccaccaaggacacctatgacgccctgcacatgcaggccctgcctccaagaagggccaagcgatctggatctggagcaacaaacttctcactactcaaacaagcaggtgacgtggaggagaatcccgggcctactagtatggactggatttggcgcatccttttccttgtcggcgctgctaccggcgcgcattccttcgaacaacaaggcgaagaagatccccaggctctgagcatccaagagggcgagaatgccaccatgaactgctcctacaagaccagcatcaacaacctccagtggtacaggcagaacagcggcagaggactggtgcacctgatcctgatccggtccaacgagagagagaagcactccggcagactgagagtgaccctggacaccagcaagaagtccagcagcctgctgattaccgccagcagagccgccgatacagccagctacttttgtgccaccgacggcgatacccctctggtgtttggcaagggcacaagactgagcgtgatcgccaatacgcgtatccagaaccctgatcctgccgtgtaccagctgcgggatagcaagagcagcgacaagagcgtgtgtctgttcaccgacttcgacagccagaccaacgtgtcccagagcaaggactccgacgtgtacatcaccgataagtgcgtgctggacatgcggagcatggacttcaagagcaactccgccgtggcctggtccaacaagtccgatttcgcctgcgccaacgccttcaacaacagcattatccccgaggacacattcttcccaagccccgagagcagctgcggtacccagagttttgggttgttggaccctaaattgtgctatctgttggacggaatcctgttcatttacggagtgatcctgaccgcattgttcctgcgggttaagttttccagatccgcagacgcacccgcttaccaacaagggcagaaccaactctacaatgaacttaatttggggcggagggaagagtacgacgttctggacaaaaggaggggacgagatcccgagatgggcggaaagcctcagcgaaggaagaatccgcaagaggggctttataacgaactccagaaagataaaatggcagaagcctatagtgagattgggatgaagggagaaaggaggaggggtaaaggtcacgatgggttgtaccaaggattgagcacagccactaaagatacctatgatgcgctccacatgcaggccctgccgccaaga

SEQ ID NO: 2387 - DNA, 2550 bp, synthetic construct
  source 1..2550: mol_type = other DNA
atggccttaccagtgaccgccttgctcctgccgctggccttgctgctccacgccgccaggccggatggcggcattacacagagccccaagtacctgttcagaaaagagggccagaacgtcaccctgagctgcgagcagaacctgaaccacgacgccatgtactggtacagacaggacccaggccagggcctgagactgatctactactcttgggctcagggcgacttccagaagggcgatattgccgagggctacagcgtgtccagagagaagaaagagtcctttccactgaccgtgacaagcgcccagaagaaccctaccgccttctacctgtgtgccagctcttggggagccccttacgagcagtatttcggccctggcaccagactgacagttctcgagcagagcttcggcctgctggaccccaagctgtgctacctgctggatggcatcctgttcatctacggcgtgatcctgaccgccctgttcctgagagtgaagttcagcagaagcgccgacgcccctgcctaccagcagggacagaaccaactgtacaacgagctgaacctgggcagacgggaagagtacgacgtgctggacaagcggagaggcagggaccctgagatgggcggaaagccccagcggagaaagaacccccaggaaggactgtataacgaactccagaaagacaagatggccgaagcctacagcgagatcggcatgaagggcgagcggagaagaggcaagggccacgatggcctgtaccagggcctgagcaccgccaccaaggacacctatgacgccctgcacatgcaggccctgcctccaagaagggccaagcgatctggatctggagcaacaaacttctcactactcaaacaagcaggtgacgtggaggagaatcccgggcctactagtatggactggatttggcgcatccttttccttgtcggcgctgctaccggcgcgcattccttcgaacaacaaggcgaagaagatccccaggctctgagcatccaagagggcgagaatgccaccatgaactgctcctacaagaccagcatcaacaacctccagtggtacaggcagaacagcggcagaggactggtgcacctgatcctgatccggtccaacgagagagagaagcactccggcagactgagagtgaccctggacaccagcaagaagtccagcagcctgctgattaccgccagcagagccgccgatacagccagctacttttgtgccaccgacggcgatacccctctggtgtttggcaagggcacaagactgagcgtgatcgccaatacgcgtcagagttttgggttgttggaccctaaattgtgctatctgttggacggaatcctgttcatttacggagtgatcctgaccgcattgttcctgcgggttaagttttccagatccgcagacgcacccgcttaccaacaagggcagaaccaactctacaatgaacttaatttggggcggagggaagagtacgacgttctggacaaaaggaggggacgagatcccgagatgggcggaaagcctcagcgaaggaagaatccgcaagaggggctttataacgaactccagaaagataaaatggcagaagcctatagtgagattgggatgaagggagaaaggaggaggggtaaaggtcacgatgggttgtaccaaggattgagcacagccactaaagatacctatgatgcgctccacatgcaggccctgccgccaagacgcgccaagagaagcggatctggcgtgaagcagaccctgaatttcgacctgctgaagctggctggcgacgtggaatccaacccaggcccttctagaggccatatggctctgcctgtgacagctctgctgctgcctctggcactgctgcttcatgctgctagacctagccagtttagagtgtcccctctggacagaacctggaacctgggcgagacagtggaactgaagtgccaggtgctgctgagcaaccctacaagcggctgctcctggctgtttcagcctagaggtgcagccgcctctcctacctttctgctgtacctgagccagaacaagcccaaggccgccgaaggactggacacccagagattcagcggcaagagactgggcgacaccttcgtgctgaccctgagcgacttcagaagagagaacgagggctactacttctgtagcgccctgagcaacagcatcatgtacttcagccacttcgtgcccgtgtttctgcccgccaagcctacaacaacccctgctcctagacctcctacaccagctcctacaatcgccagccagcctctgtctctcagacccgaagcctgtagacctgctgctggcggagctgtgcataccagaggactggatttcgcctgcgacatctacatctgggctcctctggctggcacatgtggcgtgctgctgctgtccctggtcatcaccctgtactgcaaccaccggaacaggcggagagtgtgcaagtgccctagacctgtggtcaagagcggcgacaagcctagcctgagcgccagatatgtt

SEQ ID NO: 2388 - DNA, 2550 bp, synthetic construct
  source 1..2550: mol_type = other DNA
atggccttaccagtgaccgccttgctcctgccgctggccttgctgctccacgccgccaggccggatggcggcattacacagagccccaagtacctgttcagaaaagagggccagaacgtcaccctgagctgcgagcagaacctgaaccacgacgccatgtactggtacagacaggacccaggccagggcctgagactgatctactactcttgggctcagggcgacttccagaagggcgatattgccgagggctacagcgtgtccagagagaagaaagagtcctttccactgaccgtgacaagcgcccagaagaaccctaccgccttctacctgtgtgccagctcttggggagccccttacgagcagtatttcggccctggcaccagactgacagttctcgaggacctgaagaacgtgttcccacctgaggtggccgtgttcgagcctagcgaggccgagatcagccacacccagaaagccaccctcgtgtgcctggctaccggcttctaccccgaccatgtggaactgtcttggtgggtcaacggcaaagaggtgcacagcggcgtgtgtaccgacccccagccactgaaagaacagcccgccctgaacgacagccggtactgcctgagcagcagactgagagtgtccgccaccttctggcagaacccccggaaccacttcagatgccaggtgcagttctacggcctgagcgagaacgacgagtggacccaggacagagccaagcccgtgacccagatcgtgtctgccgaagcctggggcagagccgattgcggatcccagagcttcggcctgctggaccccaagctgtgctacctgctggatggcatcctgttcatctacggcgtgatcctgaccgccctgttcctgaggagtaagaggagcaggctcctgcacagtgactacatgaacatgactccacgccgccccggacccacccgcaagcattaccagccctatgccccaccacgcgacttcgcagcctatcgctccagagtgaagttcagcagaagcgccgacgcccctgcctaccagcagggacagaaccaactgtacaacgagctgaacctgggcagacgggaagagtacgacgtgctggacaagcggagaggcagggaccctgagatgggcggaaagccccagcggagaaagaacccccaggaaggactgtataacgaactccagaaagacaagatggccgaagcctacagcgagatcggcatgaagggcgagcggagaagaggcaagggccacgatggcctgtaccagggcctgagcaccgccaccaaggacacctatgacgccctgcacatgcaggccctgcctccaagaagggccaagcgatctggatctggagcaacaaacttctcactactcaaacaagcaggtgacgtggaggagaatcccgggcctactagtatggactggatttggcgcatccttttccttgtcggcgctgctaccggcgcgcattccttcgaacaacaaggcgaagaagatccccaggctctgagcatccaagagggcgagaatgccaccatgaactgctcctacaagaccagcatcaacaacctccagtggtacaggcagaacagcggcagaggactggtgcacctgatcctgatccggtccaacgagagagagaagcactccggcagactgagagtgaccctggacaccagcaagaagtccagcagcctgctgattaccgccagcagagccgccgatacagccagctacttttgtgccaccgacggcgatacccctctggtgtttggcaagggcacaagactgagcgtgatcgccaatacgcgtatccagaaccctgatcctgccgtgtaccagctgcgggatagcaagagcagcgacaagagcgtgtgtctgttcaccgacttcgacagccagaccaacgtgtcccagagcaaggactccgacgtgtacatcaccgataagtgcgtgctggacatgcggagcatggacttcaagagcaactccgccgtggcctggtccaacaagtccgatttcgcctgcgccaacgccttcaacaacagcattatccccgaggacacattcttcccaagccccgagagcagctgcggtacccagagttttgggttgttggaccctaaattgtgctatctgttggacggaatcctgttcatttacggagtgatcctgaccgcattgttcctgcgggttaagttttccagatccgcagacgcacccgcttaccaacaagggcagaaccaactctacaatgaacttaatttggggcggagggaagagtacgacgttctggacaaaaggaggggacgagatcccgagatgggcggaaagcctcagcgaaggaagaatccgcaagaggggctttataacgaactccagaaagataaaatggcagaagcctatagtgagattgggatgaagggagaaaggaggaggggtaaaggtcacgatgggttgtaccaaggattgagcacagccactaaagatacctatgatgcgctccacatgcaggccctgccgccaaga

SEQ ID NO: 2389 - DNA, 2673 bp, synthetic construct
  source 1..2673: mol_type = other DNA
atggccttaccagtgaccgccttgctcctgccgctggccttgctgctccacgccgccaggccggatggcggcattacacagagccccaagtacctgttcagaaaagagggccagaacgtcaccctgagctgcgagcagaacctgaaccacgacgccatgtactggtacagacaggacccaggccagggcctgagactgatctactactcttgggctcagggcgacttccagaagggcgatattgccgagggctacagcgtgtccagagagaagaaagagtcctttccactgaccgtgacaagcgcccagaagaaccctaccgccttctacctgtgtgccagctcttggggagccccttacgagcagtatttcggccctggcaccagactgacagttctcgaggacctgaagaacgtgttcccacctgaggtggccgtgttcgagcctagcgaggccgagatcagccacacccagaaagccaccctcgtgtgcctggctaccggcttctaccccgaccatgtggaactgtcttggtgggtcaacggcaaagaggtgcacagcggcgtgtgtaccgacccccagccactgaaagaacagcccgccctgaacgacagccggtactgcctgagcagcagactgagagtgtccgccaccttctggcagaacccccggaaccacttcagatgccaggtgcagttctacggcctgagcgagaacgacgagtggacccaggacagagccaagcccgtgacccagatcgtgtctgccgaagcctggggcagagccgattgcggatcccagagcttcggcctgctggaccccaagctgtgctacctgctggatggcatcctgttcatctacggcgtgatcctgaccgccctgttcctgaggagtaagaggagcaggctcctgcacagtgactacatgaacatgactccacgccgccccggacccacccgcaagcattaccagccctatgccccaccacgcgacttcgcagcctatcgctccagagtgaagttcagcagaagcgccgacgcccctgcctaccagcagggacagaaccaactgtacaacgagctgaacctgggcagacgggaagagtacgacgtgctggacaagcggagaggcagggaccctgagatgggcggaaagccccagcggagaaagaacccccaggaaggactgtataacgaactccagaaagacaagatggccgaagcctacagcgagatcggcatgaagggcgagcggagaagaggcaagggccacgatggcctgtaccagggcctgagcaccgccaccaaggacacctatgacgccctgcacatgcaggccctgcctccaagaagggccaagcgatctggatctggagcaacaaacttctcactactcaaacaagcaggtgacgtggaggagaatcccgggcctactagtatggactggatttggcgcatccttttccttgtcggcgctgctaccggcgcgcattccttcgaacaacaaggcgaagaagatccccaggctctgagcatccaagagggcgagaatgccaccatgaactgctcctacaagaccagcatcaacaacctccagtggtacaggcagaacagcggcagaggactggtgcacctgatcctgatccggtccaacgagagagagaagcactccggcagactgagagtgaccctggacaccagcaagaagtccagcagcctgctgattaccgccagcagagccgccgatacagccagctacttttgtgccaccgacggcgatacccctctggtgtttggcaagggcacaagactgagcgtgatcgccaatacgcgtatccagaaccctgatcctgccgtgtaccagctgcgggatagcaagagcagcgacaagagcgtgtgtctgttcaccgacttcgacagccagaccaacgtgtcccagagcaaggactccgacgtgtacatcaccgataagtgcgtgctggacatgcggagcatggacttcaagagcaactccgccgtggcctggtccaacaagtccgatttcgcctgcgccaacgccttcaacaacagcattatccccgaggacacattcttcccaagccccgagagcagctgcggtacccagagttttgggttgttggaccctaaattgtgctatctgttggacggaatcctgttcatttacggagtgatcctgaccgcattgttcctgaggagcaagcggtcacggctgctccacagcgattacatgaatatgacaccacgaagaccgggtcctactcgcaaacactaccaaccctacgcacctccccgcgactttgcagcgtaccgatctcgggttaagttttccagatccgcagacgcacccgcttaccaacaagggcagaaccaactctacaatgaacttaatttggggcggagggaagagtacgacgttctggacaaaaggaggggacgagatcccgagatgggcggaaagcctcagcgaaggaagaatccgcaagaggggctttataacgaactccagaaagataaaatggcagaagcctatagtgagattgggatgaagggagaaaggaggaggggtaaaggtcacgatgggttgtaccaaggattgagcacagccactaaagatacctatgatgcgctccacatgcaggccctgccgccaaga

SEQ ID NO: 2390 - DNA, 2427 bp, synthetic construct
  source 1..2427: mol_type = other DNA
atggccttaccagtgaccgccttgctcctgccgctggccttgctgctccacgccgccaggccggatggcggcattacacagagccccaagtacctgttcagaaaagagggccagaacgtcaccctgagctgcgagcagaacctgaaccacgacgccatgtactggtacagacaggacccaggccagggcctgagactgatctactactcttgggctcagggcgacttccagaagggcgatattgccgagggctacagcgtgtccagagagaagaaagagtcctttccactgaccgtgacaagcgcccagaagaaccctaccgccttctacctgtgtgccagctcttggggagccccttacgagcagtatttcggccctggcaccagactgacagttctcgaggacctgaagaacgtgttcccacctgaggtggccgtgttcgagcctagcgaggccgagatcagccacacccagaaagccaccctcgtgtgcctggctaccggcttctaccccgaccatgtggaactgtcttggtgggtcaacggcaaagaggtgcacagcggcgtgtctaccgacccccagccactgaaagaacagcccgccctgaacgacagccggtactgcctgagcagcagactgagagtgtccgccaccttctggcagaacccccggaaccacttcagatgccaggtgcagttctacggcctgagcgagaacgacgagtggacccaggacagagccaagcccgtgacccagatcgtgtctgccgaagcctggggcagagccgattgcggatcccagagcttcggcctgctggaccccaagctgtgctacctgctggatggcatcctgttcatctacggcgtgatcctgaccgccctgttcctgagagtgaagttcagcagaagcgccgacgcccctgcctaccagcagggacagaaccaactgtacaacgagctgaacctgggcagacgggaagagtacgacgtgctggacaagcggagaggcagggaccctgagatgggcggaaagccccagcggagaaagaacccccaggaaggactgtataacgaactccagaaagacaagatggccgaagcctacagcgagatcggcatgaagggcgagcggagaagaggcaagggccacgatggcctgtaccagggcctgagcaccgccaccaaggacacctatgacgccctgcacatgcaggccctgcctccaagaagggccaagcgatctggatctggagcaacaaacttctcactactcaaacaagcaggtgacgtggaggagaatcccgggcctactagtatggactggatttggcgcatccttttccttgtcggcgctgctaccggcgcgcattccttcgaacaacaaggcgaagaagatccccaggctctgagcatccaagagggcgagaatgccaccatgaactgctcctacaagaccagcatcaacaacctccagtggtacaggcagaacagcggcagaggactggtgcacctgatcctgatccggtccaacgagagagagaagcactccggcagactgagagtgaccctggacaccagcaagaagtccagcagcctgctgattaccgccagcagagccgccgatacagccagctacttttgtgccaccgacggcgatacccctctggtgtttggcaagggcacaagactgagcgtgatcgccaatacgcgtatccagaaccctgatcctgccgtgtaccagctgcgggatagcaagagcagcgacaagagcgtgtgtctgttcaccgacttcgacagccagaccaacgtgtcccagagcaaggactccgacgtgtacatcaccgataagaccgtgctggacatgcggagcatggacttcaagagcaactccgccgtggcctggtccaacaagtccgatttcgcctgcgccaacgccttcaacaacagcattatccccgaggacacattcttcccaagccccgagagcagctgcggtacccagagttttgggttgttggaccctaaattgtgctatctgttggacggaatcctgttcatttacggagtgatcctgaccgcattgttcctgcgggttaagttttccagatccgcagacgcacccgcttaccaacaagggcagaaccaactctacaatgaacttaatttggggcggagggaagagtacgacgttctggacaaaaggaggggacgagatcccgagatgggcggaaagcctcagcgaaggaagaatccgcaagaggggctttataacgaactccagaaagataaaatggcagaagcctatagtgagattgggatgaagggagaaaggaggaggggtaaaggtcacgatgggttgtaccaaggattgagcacagccactaaagatacctatgatgcgctccacatgcaggccctgccgccaaga

SEQ ID NO: 2391 - DNA, 3159 bp, synthetic construct
  source 1..3159: mol_type = other DNA
atggccttaccagtgaccgccttgctcctgccgctggccttgctgctccacgccgccaggccggatggcggcattacacagagccccaagtacctgttcagaaaagagggccagaacgtcaccctgagctgcgagcagaacctgaaccacgacgccatgtactggtacagacaggacccaggccagggcctgagactgatctactactcttgggctcagggcgacttccagaagggcgatattgccgagggctacagcgtgtccagagagaagaaagagtcctttccactgaccgtgacaagcgcccagaagaaccctaccgccttctacctgtgtgccagctcttggggagccccttacgagcagtatttcggccctggcaccagactgacagttctcgaggacaagcagctggacgccgacgtgtcccccaagcctaccatcttcctgccctctatcgccgagacaaagctccagaaggccggcacctacctgtgcctgctggaaaagttcttcccagatgtgattaagatccactggcaggaaaagaagtccaacaccatcctgggcagccaggaaggcaacaccatgaagaccaacgacacctacatgaagttcagctggctgaccgtgcccgagaagtccctggacaaagaacacagatgcatcgtgcggcacgaaaacaacaagaacggcgtggaccaggaaatcatcttcccacccatcaagaccgatgtgattacaggatcccagagcttcggcctgctggaccccaagctgtgctacctgctggatggcatcctgttcatctacggcgtgatcctgaccgccctgttcctgagagtgaagttcagcagaagcgccgacgcccctgcctaccagcagggacagaaccaactgtacaacgagctgaacctgggcagacgggaagagtacgacgtgctggacaagcggagaggcagggaccctgagatgggcggaaagccccagcggagaaagaacccccaggaaggactgtataacgaactccagaaagacaagatggccgaagcctacagcgagatcggcatgaagggcgagcggagaagaggcaagggccacgatggcctgtaccagggcctgagcaccgccaccaaggacacctatgacgccctgcacatgcaggccctgcctccaagaagggccaagcgatctggatctggagcaacaaacttctcactactcaaacaagcaggtgacgtggaggagaatcccgggcctactagtatggactggatttggcgcatccttttccttgtcggcgctgctaccggcgcgcattccttcgaacaacaaggcgaagaagatccccaggctctgagcatccaagagggcgagaatgccaccatgaactgctcctacaagaccagcatcaacaacctccagtggtacaggcagaacagcggcagaggactggtgcacctgatcctgatccggtccaacgagagagagaagcactccggcagactgagagtgaccctggacaccagcaagaagtccagcagcctgctgattaccgccagcagagccgccgatacagccagctacttttgtgccaccgacggcgatacccctctggtgtttggcaagggcacaagactgagcgtgatcgccaatacgcgtagccagcctcacaccaagcccagcgtgttcgtgatgaagaacggcaccaacgtggcctgcctcgtgaaagagttctaccccaaggacatcaggatcaacctggtgtccagcaagaagatcaccgagttcgaccccgccatcgtgatctcccccagcggcaagtacaacgccgtgaagctggggaagtacgaggacagcaacagcgtgacctgctccgtgcagcacgacaacaagaccgtgcacagcaccgactttggtacccagagttttgggttgttggaccctaaattgtgctatctgttggacggaatcctgttcatttacggagtgatcctgaccgcattgttcctgcgggttaagttttccagatccgcagacgcacccgcttaccaacaagggcagaaccaactctacaatgaacttaatttggggcggagggaagagtacgacgttctggacaaaaggaggggacgagatcccgagatgggcggaaagcctcagcgaaggaagaatccgcaagaggggctttataacgaactccagaaagataaaatggcagaagcctatagtgagattgggatgaagggagaaaggaggaggggtaaaggtcacgatgggttgtaccaaggattgagcacagccactaaagatacctatgatgcgctccacatgcaggccctgccgccaagacgcgccaagagaagcggatctggcgtgaagcagaccctgaatttcgacctgctgaagctggctggcgacgtggaatccaacccaggcccttctagaggccatatggctctgcctgtgacagctctgctgctgcctctggcactgctgcttcatgctgctagacctagccagtttagagtgtcccctctggacagaacctggaacctgggcgagacagtggaactgaagtgccaggtgctgctgagcaaccctacaagcggctgctcctggctgtttcagcctagaggtgcagccgcctctcctacctttctgctgtacctgagccagaacaagcccaaggccgccgaaggactggacacccagagattcagcggcaagagactgggcgacaccttcgtgctgaccctgagcgacttcagaagagagaacgagggctactacttctgtagcgccctgagcaacagcatcatgtacttcagccacttcgtgcccgtgtttctgcccgccaagcctacaacaacccctgctcctagacctcctacaccagctcctacaatcgccagccagcctctgtctctcagacccgaagcctgtagacctgctgctggcggagctgtgcataccagaggactggatttcgcctgcgacatctacatctgggctcctctggctggcacatgtggcgtgctgctgctgtccctggtcatcaccctgtactgcaaccaccggaacaggcggagagtgtgcaagtgccctagacctgtggtcaagagcggcgacaagcctagcctgagcgccagatatgtt

SEQ ID NO: 2392 - DNA, 2763 bp, synthetic construct
  source 1..2763: mol_type = other DNA
atggccttaccagtgaccgccttgctcctgccgctggccttgctgctccacgccgccaggccggatggcggcattacacagagccccaagtacctgttcagaaaagagggccagaacgtcaccctgagctgcgagcagaacctgaaccacgacgccatgtactggtacagacaggacccaggccagggcctgagactgatctactactcttgggctcagggcgacttccagaagggcgatattgccgagggctacagcgtgtccagagagaagaaagagtcctttccactgaccgtgacaagcgcccagaagaaccctaccgccttctacctgtgtgccagctcttggggagccccttacgagcagtatttcggccctggcaccagactgacagttctcgagggacagcctaaggccaatcctaccgtgacactgttccctccaagcagcgaagaactccaggccaacaaggccacacttgtgtgcctgatctccgacttctaccctggggctgtgacagtggcttggaaggccgatggatctcctgtgaaagccggcgtggaaaccaccaagccatccaagcagagcaacaacaaatacgccgccagctcctacctgagcctgacacctgagcagtggaagtcccacagatcctacagctgccaagtgacccacgaaggcagcaccgtggaaaagacagtggcccctacagagtgcagcacaacacctggcgagagaagtagcctgcctgccttctatcctggcaccagcggctcttgttctggctgtggatctctgagcctgcctctgctggctggactggttgctgctgatgctgtggcctctctgctgattgtgggagccgtgttcctgtgcgccagacctagaagaagccccgctcaagaggacggcaaggtgtacatcaacatgcccggcagaggaagggccaagcgatctggatctggagcaacaaacttctcactactcaaacaagcaggtgacgtggaggagaatcccgggcctactagtatggactggatttggcgcatccttttccttgtcggcgctgctaccggcgcgcattccttcgaacaacaaggcgaagaagatccccaggctctgagcatccaagagggcgagaatgccaccatgaactgctcctacaagaccagcatcaacaacctccagtggtacaggcagaacagcggcagaggactggtgcacctgatcctgatccggtccaacgagagagagaagcactccggcagactgagagtgaccctggacaccagcaagaagtccagcagcctgctgattaccgccagcagagccgccgatacagccagctacttttgtgccaccgacggcgatacccctctggtgtttggcaagggcacaagactgagcgtgatcgccaatacgcgtgcctctacaaagggaccctccgtgtttcctctggctcccagcagcaagtctacaagcggaggaacagccgctctgggctgcctggtcaaggattactttcccgagcctgtgaccgtgtcctggaatagcggagcactgacaagcggcgtgcacacctttccagccgtgctgcaaagcagcggcctgtactctctgagcagcgtggtcacagtgcctagctctagcctgggcacccagacctacatctgcaatgtgaaccacaagcctagcaacaccaaggtggacaagagagtggaacccaagagctgtacaacgccgggcgaaaggagttccttgccggccttttaccccggcacaagcggaagctgtagtgggtgtggaagcctcagcctcccacttcttgcgggcctcgtcgcggcagatgcagtagcttcacttcttattgtaggcgcggtatttctctgtgctcgaccaaggaggtcacccgctcaggaggatggtaaggtgtatataaatatgccaggacgcggacgcgccaagagaagcggatctggcgtgaagcagaccctgaatttcgacctgctgaagctggctggcgacgtggaatccaacccaggcccttctagaggccatatggctctgcctgtgacagctctgctgctgcctctggcactgctgcttcatgctgctagacctagccagtttagagtgtcccctctggacagaacctggaacctgggcgagacagtggaactgaagtgccaggtgctgctgagcaaccctacaagcggctgctcctggctgtttcagcctagaggtgcagccgcctctcctacctttctgctgtacctgagccagaacaagcccaaggccgccgaaggactggacacccagagattcagcggcaagagactgggcgacaccttcgtgctgaccctgagcgacttcagaagagagaacgagggctactacttctgtagcgccctgagcaacagcatcatgtacttcagccacttcgtgcccgtgtttctgcccgccaagcctacaacaacccctgctcctagacctcctacaccagctcctacaatcgccagccagcctctgtctctcagacccgaagcctgtagacctgctgctggcggagctgtgcataccagaggactggatttcgcctgcgacatctacatctgggctcctctggctggcacatgtggcgtgctgctgctgtccctggtcatcaccctgtactgcaaccaccggaacaggcggagagtgtgcaagtgccctagacctgtggtcaagagcggcgacaagcctagcctgagcgccagatatgtt

SEQ ID NO: 2393 - DNA, 2250 bp, synthetic construct
  source 1..2250: mol_type = other DNA
atggccttaccagtgaccgccttgctcctgccgctggccttgctgctccacgccgccaggccggatggcggcattacacagagccccaagtacctgttcagaaaagagggccagaacgtcaccctgagctgcgagcagaacctgaaccacgacgccatgtactggtacagacaggacccaggccagggcctgagactgatctactactcttgggctcagggcgacttccagaagggcgatattgccgagggctacagcgtgtccagagagaagaaagagtcctttccactgaccgtgacaagcgcccagaagaaccctaccgccttctacctgtgtgccagctcttggggagccccttacgagcagtatttcggccctggcaccagactgacagttctcgagggcgacatcgagaacaccagtctggcccctgaggaccctacctttcctgccgatacctggggcacctacctgctgaccacagagacaggactccagaaagatcacgccctgtgggaccacacagcccagaacctgctgagaatgggcctcgcctttctggtgctggttgccctcgtgtggttcctggtggaagattggctgagccggaagcggacaagagagagagccagcagagcctctacctgggagggaagaagaaggctgaacacccagacacttagggccaagcgatctggatctggagcaacaaacttctcactactcaaacaagcaggtgacgtggaggagaatcccgggcctactagtatggactggatttggcgcatccttttccttgtcggcgctgctaccggcgcgcattccttcgaacaacaaggcgaagaagatccccaggctctgagcatccaagagggcgagaatgccaccatgaactgctcctacaagaccagcatcaacaacctccagtggtacaggcagaacagcggcagaggactggtgcacctgatcctgatccggtccaacgagagagagaagcactccggcagactgagagtgaccctggacaccagcaagaagtccagcagcctgctgattaccgccagcagagccgccgatacagccagctacttttgtgccaccgacggcgatacccctctggtgtttggcaagggcacaagactgagcgtgatcgccaatacgcgtggcgatattgagaatacctctctggccccagaagatcctacattccccgccgacacatggggaacatatctgctgacaaccgaaaccgggctgcaaaaggaccatgctctgtgggatcataccgctcagaatctgcttcggatggggcttgcattcctggtcctggtggctcttgtctggtttctggtcgaggactggctgtcccggaagagaaccagagaaagagcttccagggccagcacctgggaaggcagacgcagactgaatactcagaccctgcgcgccaagagaagcggatctggcgtgaagcagaccctgaatttcgacctgctgaagctggctggcgacgtggaatccaacccaggcccttctagaggccatatggctctgcctgtgacagctctgctgctgcctctggcactgctgcttcatgctgctagacctagccagtttagagtgtcccctctggacagaacctggaacctgggcgagacagtggaactgaagtgccaggtgctgctgagcaaccctacaagcggctgctcctggctgtttcagcctagaggtgcagccgcctctcctacctttctgctgtacctgagccagaacaagcccaaggccgccgaaggactggacacccagagattcagcggcaagagactgggcgacaccttcgtgctgaccctgagcgacttcagaagagagaacgagggctactacttctgtagcgccctgagcaacagcatcatgtacttcagccacttcgtgcccgtgtttctgcccgccaagcctacaacaacccctgctcctagacctcctacaccagctcctacaatcgccagccagcctctgtctctcagacccgaagcctgtagacctgctgctggcggagctgtgcataccagaggactggatttcgcctgcgacatctacatctgggctcctctggctggcacatgtggcgtgctgctgctgtccctggtcatcaccctgtactgcaaccaccggaacaggcggagagtgtgcaagtgccctagacctgtggtcaagagcggcgacaagcctagcctgagcgccagatatgtt

SEQ ID NO: 2394 - DNA, 2082 bp, synthetic construct
  source 1..2082: mol_type = other DNA
atggccttaccagtgaccgccttgctcctgccgctggccttgctgctccacgccgccaggccggatggcggcattacacagagccccaagtacctgttcagaaaagagggccagaacgtcaccctgagctgcgagcagaacctgaaccacgacgccatgtactggtacagacaggacccaggccagggcctgagactgatctactactcttgggctcagggcgacttccagaagggcgatattgccgagggctacagcgtgtccagagagaagaaagagtcctttccactgaccgtgacaagcgcccagaagaaccctaccgccttctacctgtgtgccagctcttggggagccccttacgagcagtatttcggccctggcaccagactgacagttctcgagatcactcaaggtttggcagtgtcaaccatctcatcattctttccacctggctaccaagtgtccttctgcctggtcatggtgctgctgttcgccgtggataccggcctgtacttcagcgtcaagaccaacatccggtccagcaccagagactggaaggaccacaagttcaagtggcggaaggaccctcaggacaagagggccaagcgatctggatctggagcaacaaacttctcactactcaaacaagcaggtgacgtggaggagaatcccgggcctactagtatggactggatttggcgcatccttttccttgtcggcgctgctaccggcgcgcattccttcgaacaacaaggcgaagaagatccccaggctctgagcatccaagagggcgagaatgccaccatgaactgctcctacaagaccagcatcaacaacctccagtggtacaggcagaacagcggcagaggactggtgcacctgatcctgatccggtccaacgagagagagaagcactccggcagactgagagtgaccctggacaccagcaagaagtccagcagcctgctgattaccgccagcagagccgccgatacagccagctacttttgtgccaccgacggcgatacccctctggtgtttggcaagggcacaagactgagcgtgatcgccaatacgcgtatcacccagggcctggccgtgtctaccatcagcagctttttcccacccggctaccaggtgtccttctgcctcgtgatggtgctgctgttcgccgtggacaccggcctgtacttcagcgtgaaaacaaacatccggtccagcaccagagactggaaggaccacaagttcaagtggcggaaggacccccaggacaagcgcgccaagagaagcggatctggcgtgaagcagaccctgaatttcgacctgctgaagctggctggcgacgtggaatccaacccaggcccttctagaggccatatggctctgcctgtgacagctctgctgctgcctctggcactgctgcttcatgctgctagacctagccagtttagagtgtcccctctggacagaacctggaacctgggcgagacagtggaactgaagtgccaggtgctgctgagcaaccctacaagcggctgctcctggctgtttcagcctagaggtgcagccgcctctcctacctttctgctgtacctgagccagaacaagcccaaggccgccgaaggactggacacccagagattcagcggcaagagactgggcgacaccttcgtgctgaccctgagcgacttcagaagagagaacgagggctactacttctgtagcgccctgagcaacagcatcatgtacttcagccacttcgtgcccgtgtttctgcccgccaagcctacaacaacccctgctcctagacctcctacaccagctcctacaatcgccagccagcctctgtctctcagacccgaagcctgtagacctgctgctggcggagctgtgcataccagaggactggatttcgcctgcgacatctacatctgggctcctctggctggcacatgtggcgtgctgctgctgtccctggtcatcaccctgtactgcaaccaccggaacaggcggagagtgtgcaagtgccctagacctgtggtcaagagcggcgacaagcctagcctgagcgccagatatgtt

SEQ ID NO: 2395 - DNA, 2406 bp, synthetic construct
  source 1..2406: mol_type = other DNA
atggccttaccagtgaccgccttgctcctgccgctggccttgctgctccacgccgccaggccgaatgctggcgtgacccagacacctaagttccgggtgctgaaaaccggccagagcatgacactgctgtgcgcccaggacatgaaccatgagtacatgtattggtacagacaggaccccggcatgggcctgagactgatccactattctggctggggcaaagacaccgccaagggcgaagttcccgatggctacaacgtgtcccggctgaagaagcagaacttcctgctgggcctcgaaagcgccgctccatctcagaccagcgtgtacttctgcgccagcaaagttggcccaggccagcacaatagccctctgcactttggcaacggcaccagactgacagtgacaggacagcctaaggccaatcctaccgtgacactgttccctccaagcagcgaagaactccaggccaacaaggccacacttgtgtgcctgatctccgacttctaccctggggctgtgacagtggcttggaaggccgatggatctcctgtgaaagccggcgtggaaaccaccaagccatccaagcagagcaacaacaaatacgccgccagctcctacctgagcctgacacctgagcagtggaagtcccacagatcctacagctgccaagtgacccacgaaggcagcaccgtggaaaagacagtggcccctacagagtgcagcggatcccagagcttcggcctgctggaccccaagctgtgctacctgctggatggcatcctgttcatctacggcgtgatcctgaccgccctgttcctgagagtgaagttcagcagaagcgccgacgcccctgcctaccagcagggacagaaccaactgtacaacgagctgaacctgggcagacgggaagagtacgacgtgctggacaagcggagaggcagggaccctgagatgggcggaaagccccagcggagaaagaacccccaggaaggactgtataacgaactccagaaagacaagatggccgaagcctacagcgagatcggcatgaagggcgagcggagaagaggcaagggccacgatggcctgtaccagggcctgagcaccgccaccaaggacacctatgacgccctgcacatgcaggccctgcctccaagaagggccaagcgatctggatctggagcaacaaacttctcactactcaaacaagcaggtgacgtggaggagaatcccgggcctactagtatggactggatttggcgcatccttttccttgtcggcgctgctaccggcgcgcattccttcgaagctcagaaagtgacacaggcccagaccgagatcagcgtggtggaaaaagaagatgtgaccctggactgcgtgtacgagacaagggacaccgcctactacctgttctggtacaagcagcctcctagcggcgagctggtgttcctgattagacagccttggtggggcagcagcagaggcatcagcggcagatacagctggaacttccagaagtccaccagcagcttcaacttcaccatcaccgccagccaggtggtggatagcgccgtgtacttttgtgccatgagcgtgcccgatagcagaggccactaccagttcaccttcggcaagggcacaaagctgagcgtgatccctgcctctacaaagggaccctccgtgtttcctctggctcccagcagcaagtctacaagcggaggaacagccgctctgggctgcctggtcaaggattactttcccgagcctgtgaccgtgtcctggaatagcggagcactgacaagcggcgtgcacacctttccagccgtgctgcaaagcagcggcctgtactctctgagcagcgtggtcacagtgcctagctctagcctgggcacccagacctacatctgcaatgtgaaccacaagcctagcaacaccaaggtggacaagagagtggaacccaagagctgtggtacccagagttttgggttgttggaccctaaattgtgctatctgttggacggaatcctgttcatttacggagtgatcctgaccgcattgttcctgcgggttaagttttccagatccgcagacgcacccgcttaccaacaagggcagaaccaactctacaatgaacttaatttggggcggagggaagagtacgacgttctggacaaaaggaggggacgagatcccgagatgggcggaaagcctcagcgaaggaagaatccgcaagaggggctttataacgaactccagaaagataaaatggcagaagcctatagtgagattgggatgaagggagaaaggaggaggggtaaaggtcacgatgggttgtaccaaggattgagcacagccactaaagatacctatgatgcgctccacatgcaggccctgccgccaaga

SEQ ID NO: 2396 - DNA, 1704 bp, synthetic construct
  source 1..1704: mol_type = other DNA
atggccttaccagtgaccgccttgctcctgccgctggccttgctgctccacgccgccaggccgaatgctggcgtgacccagacacctaagttccgggtgctgaaaaccggccagagcatgacactgctgtgcgcccaggacatgaaccatgagtacatgtattggtacagacaggaccccggcatgggcctgagactgatccactattctggctggggcaaagacaccgccaagggcgaagttcccgatggctacaacgtgtcccggctgaagaagcagaacttcctgctgggcctcgaaagcgccgctccatctcagaccagcgtgtacttctgcgccagcaaagttggcccaggccagcacaatagccctctgcactttggcaacggcaccagactgacagtgacactcgagcagagcttcggcctgctggaccccaagctgtgctacctgctggatggcatcctgttcatctacggcgtgatcctgaccgccctgttcctgagagtgaagttcagcagaagcgccgacgcccctgcctaccagcagggacagaaccaactgtacaacgagctgaacctgggcagacgggaagagtacgacgtgctggacaagcggagaggcagggaccctgagatgggcggaaagccccagcggagaaagaacccccaggaaggactgtataacgaactccagaaagacaagatggccgaagcctacagcgagatcggcatgaagggcgagcggagaagaggcaagggccacgatggcctgtaccagggcctgagcaccgccaccaaggacacctatgacgccctgcacatgcaggccctgcctccaagaagggccaagcgatctggatctggagcaacaaacttctcactactcaaacaagcaggtgacgtggaggagaatcccgggcctactagtatggactggatttggcgcatccttttccttgtcggcgctgctaccggcgcgcattccttcgaagctcagaaagtgacacaggcccagaccgagatcagcgtggtggaaaaagaagatgtgaccctggactgcgtgtacgagacaagggacaccgcctactacctgttctggtacaagcagcctcctagcggcgagctggtgttcctgattagacagccttggtggggcagcagcagaggcatcagcggcagatacagctggaacttccagaagtccaccagcagcttcaacttcaccatcaccgccagccaggtggtggatagcgccgtgtacttttgtgccatgagcgtgcccgatagcagaggccactaccagttcaccttcggcaagggcacaaagctgagcgtgatccctacgcgtcagagttttgggttgttggaccctaaattgtgctatctgttggacggaatcctgttcatttacggagtgatcctgaccgcattgttcctgcgggttaagttttccagatccgcagacgcacccgcttaccaacaagggcagaaccaactctacaatgaacttaatttggggcggagggaagagtacgacgttctggacaaaaggaggggacgagatcccgagatgggcggaaagcctcagcgaaggaagaatccgcaagaggggctttataacgaactccagaaagataaaatggcagaagcctatagtgagattgggatgaagggagaaaggaggaggggtaaaggtcacgat

SEQ ID NO: 2397 - DNA, 2856 bp, synthetic construct
  source 1..2856: mol_type = other DNA
atggccttaccagtgaccgccttgctcctgccgctggccttgctgctccacgccgccaggccgaatgctggcgtgacccagacacctaagttccgggtgctgaaaaccggccagagcatgacactgctgtgcgcccaggacatgaaccatgagtacatgtattggtacagacaggaccccggcatgggcctgagactgatccactattctggctggggcaaagacaccgccaagggcgaagttcccgatggctacaacgtgtcccggctgaagaagcagaacttcctgctgggcctcgaaagcgccgctccatctcagaccagcgtgtacttctgcgccagcaaagttggcccaggccagcacaatagccctctgcactttggcaacggcaccagactgacagtgacactcgagacaacacctggcgagagaagtagcctgcctgccttctatcctggcaccagcggctcttgttctggctgtggatctctgagcctgcctctgctggctggactggttgctgctgatgctgtggcctctctgctgattgtgggagccgtgttcctgtgcgccagacctagaagaagccccgctcaagaggacggcaaggtgtacatcaacatgcccggcagaggaagcactagtagagtgaagttcagcagaagcgccgacgcccctgcctaccagcagggacagaaccaactgtacaacgagctgaacctgggcagacgggaagagtacgacgtgctggacaagcggagaggcagggaccctgagatgggcggaaagccccagcggagaaagaacccccaggaaggactgtataacgaactccagaaagacaagatggccgaagcctacagcgagatcggcatgaagggcgagcggagaagaggcaagggccacgatggcctgtaccagggcctgagcaccgccaccaaggacacctatgacgccctgcacatgcaggccctgcctccaagaagggccaagcgatctggatctggagcaacaaacttctcactactcaaacaagcaggtgacgtggaggagaatcccgggcctatggactggatttggcgcatccttttccttgtcggcgctgctaccggcgcgcattccttcgaagctcagaaagtgacacaggcccagaccgagatcagcgtggtggaaaaagaagatgtgaccctggactgcgtgtacgagacaagggacaccgcctactacctgttctggtacaagcagcctcctagcggcgagctggtgttcctgattagacagccttggtggggcagcagcagaggcatcagcggcagatacagctggaacttccagaagtccaccagcagcttcaacttcaccatcaccgccagccaggtggtggatagcgccgtgtacttttgtgccatgagcgtgcccgatagcagaggccactaccagttcaccttcggcaagggcacaaagctgagcgtgatccctacgcgtacaacgccgggcgaaaggagttccttgccggccttttaccccggcacaagcggaagctgtagtgggtgtggaagcctcagcctcccacttcttgcgggcctcgtcgcggcagatgcagtagcttcacttcttattgtaggcgcggtatttctctgtgctcgaccaaggaggtcacccgctcaggaggatggtaaggtgtatataaatatgccaggacgcggaagctctagacgggttaagttttccagatccgcagacgcacccgcttaccaacaagggcagaaccaactctacaatgaacttaatttggggcggagggaagagtacgacgttctggacaaaaggaggggacgagatcccgagatgggcggaaagcctcagcgaaggaagaatccgcaagaggggctttataacgaactccagaaagataaaatggcagaagcctatagtgagattgggatgaagggagaaaggaggaggggtaaaggtcacgatgggttgtaccaaggattgagcacagccactaaagatacctatgatgcgctccacatgcaggccctgccgccaagacgcgccaagagaagcggatctggcgtgaagcagaccctgaatttcgacctgctgaagctggctggcgacgtggaatccaacccaggccctggccatatggctctgcctgtgacagctctgctgctgcctctggcactgctgcttcatgctgctagacctagccagtttagagtgtcccctctggacagaacctggaacctgggcgagacagtggaactgaagtgccaggtgctgctgagcaaccctacaagcggctgctcctggctgtttcagcctagaggtgcagccgcctctcctacctttctgctgtacctgagccagaacaagcccaaggccgccgaaggactggacacccagagattcagcggcaagagactgggcgacaccttcgtgctgaccctgagcgacttcagaagagagaacgagggctactacttctgtagcgccctgagcaacagcatcatgtacttcagccacttcgtgcccgtgtttctgcccgccaagcctacaacaacccctgctcctagacctcctacaccagctcctacaatcgccagccagcctctgtctctcagacccgaagcctgtagacctgctgctggcggagctgtgcataccagaggactggatttcgcctgcgacatctacatctgggctcctctggctggcacatgtggcgtgctgctgctgtccctggtcatcaccctgtactgcaaccaccggaacaggcggagagtgtgcaagtgccctagacctgtggtcaagagcggcgacaagcctagcctgagcgccagatatgtt

SEQ ID NO: 2398 - DNA, 2856 bp, synthetic construct; identical to SEQ ID NO: 2397
  source 1..2856: mol_type = other DNA

SEQ ID NO: 2399 - DNA, 3354 bp, synthetic construct
  source 1..3354: mol_type = other DNA
atggccttaccagtgaccgccttgctcctgccgctggccttgctgctccacgccgccaggccgaatgctggcgtgacccagacacctaagttccgggtgctgaaaaccggccagagcatgacactgctgtgcgcccaggacatgaaccatgagtacatgtattggtacagacaggaccccggcatgggcctgagactgatccactattctggctggggcaaagacaccgccaagggcgaagttcccgatggctacaacgtgtcccggctgaagaagcagaacttcctgctgggcctcgaaagcgccgctccatctcagaccagcgtgtacttctgcgccagcaaagttggcccaggccagcacaatagccctctgcactttggcaacggcaccagactgacagtgacactcgagggacagcctaaggccaatcctaccgtgacactgttccctccaagcagcgaagaactccaggccaacaaggccacacttgtgtgcctgatctccgacttctaccctggggctgtgacagtggcttggaaggccgatggatctcctgtgaaagccggcgtggaaaccaccaagccatccaagcagagcaacaacaaatacgccgccagctcctacctgagcctgacacctgagcagtggaagtcccacagatcctacagctgccaagtgacccacgaaggcagcaccgtggaaaagacagtggcccctacagagtgcagcggatccacaacacctggcgagagaagtagcctgcctgccttctatcctggcaccagcggctcttgttctggctgtggatctctgagcctgcctctgctggctggactggttgctgctgatgctgtggcctctctgctgattgtgggagccgtgttcctgtgcgccagacctagaagaagccccgctcaagaggacggcaaggtgtacatcaacatgcccggcagaggaagcactagtagagtgaagttcagcagaagcgccgacgcccctgcctaccagcagggacagaaccaactgtacaacgagctgaacctgggcagacgggaagagtacgacgtgctggacaagcggagaggcagggaccctgagatgggcggaaagccccagcggagaaagaacccccaggaaggactgtataacgaactccagaaagacaagatggccgaagcctacagcgagatcggcatgaagggcgagcggagaagaggcaagggccacgatggcctgtaccagggcctgagcaccgccaccaaggacacctatgacgccctgcacatgcaggccctgcctccaagaagggccaagcgatctggatctggagcaacaaacttctcactactcaaacaagcaggtgacgtggaggagaatcccgggcctatggactggatttggcgcatccttttccttgtcggcgctgctaccggcgcgcattccttcgaagctcagaaagtgacacaggcccagaccgagatcagcgtggtggaaaaagaagatgtgaccctggactgcgtgtacgagacaagggacaccgcctactacctgttctggtacaagcagcctcctagcggcgagctggtgttcctgattagacagccttggtggggcagcagcagaggcatcagcggcagatacagctggaacttccagaagtccaccagcagcttcaacttcaccatcaccgccagccaggtggtggatagcgccgtgtacttttgtgccatgagcgtgcccgatagcagaggccactaccagttcaccttcggcaagggcacaaagctgagcgtgatccctacgcgtgcctctacaaagggaccctccgtgtttcctctggctcccagcagcaagtctacaagcggaggaacagccgctctgggctgcctggtcaaggattactttcccgagcctgtgaccgtgtcctggaatagcggagcactgacaagcggcgtgcacacctttccagccgtgctgcaaagcagcggcctgtactctctgagcagcgtggtcacagtgcctagctctagcctgggcacccagacctacatctgcaatgtgaaccacaagcctagcaacaccaaggtggacaagagagtggaacccaagagctgtggtaccacaacgccgggcgaaaggagttccttgccggccttttaccccggcacaagcggaagctgtagtgggtgtggaagcctcagcctcccacttcttgcgggcctcgtcgcggcagatgcagtagcttcacttcttattgtaggcgcggtatttctctgtgctcgaccaaggaggtcacccgctcaggaggatggtaaggtgtatataaatatgccaggacgcggaagctctagacgggttaagttttccagatccgcagacgcacccgcttaccaacaagggcagaaccaactctacaatgaacttaatttggggcggagggaagagtacgacgttctggacaaaaggaggggacgagatcccgagatgggcggaaagcctcagcgaaggaagaatccgcaagaggggctttataacgaactccagaaagataaaatggcagaagcctatagtgagattgggatgaagggagaaaggaggaggggtaaaggtcacgatgggttgtaccaaggattgagcacagccactaaagatacctatgatgcgctccacatgcaggccctgccgccaagacgcgccaagagaagcggatctggcgtgaagcagaccctgaatttcgacctgctgaagctggctggcgacgtggaatccaacccaggccctggccatatggctacctacgaggtgctgtgcgaggtggcaagaaagctgggcaccgacgacagagaagtggtgctgttcctgctgaacgtgttcatccctcagcctacactggcccagctgatcggtgcactgagagccctgaaagaggaaggccggctgacctttcctctgctggccgaatgcctgttcagagccggaagaagggatctgctgcgggacctgctgcatctggaccccagatttctggaaagacacctggccggcaccatgagctacttcagcccttaccagctgaccgtgctgcacgttgacggcgaactgtgcgccagagatattcggagcctgatcttcctgagcaaggacaccatcggcagccggtctacccctcagacatttctgcactgggtgtactgcatggaaaacctggacctgctcggccccacagatgtggatgccctgatgtccatgctgagaagcctgagcagagtggacctccagagacaggtgcagacactgatgggactgcacctgagcggacctagccacagccagcactacagacacacccct

SEQ ID NO: 2400 - DNA, 3513 bp, synthetic construct
  source 1..3513: mol_type = other DNA
atggccttaccagtgaccgccttgctcctgccgctggccttgctgctccacgccgccaggccgaatgctggcgtgacccagacacctaagttccgggtgctgaaaaccggccagagcatgacactgctgtgcgcccaggacatgaaccatgagtacatgtattggtacagacaggaccccggcatgggcctgagactgatccactattctggctggggcaaagacaccgccaagggcgaagttcccgatggctacaacgtgtcccggctgaagaagcagaacttcctgctgggcctcgaaagcgccgctccatctcagaccagcgtgtacttctgcgccagcaaagttggcccaggccagcacaatagccctctgcactttggcaacggcaccagactgacagtgacactcgagggacagcctaaggccaatcctaccgtgacactgttccctccaagcagcgaagaactccaggccaacaaggccacacttgtgtgcctgatctccgacttctaccctggggctgtgacagtggcttggaaggccgatggatctcctgtgaaagccggcgtggaaaccaccaagccatccaagcagagcaacaacaaatacgccgccagctcctacctgagcctgacacctgagcagtggaagtcccacagatcctacagctgccaagtgacccacgaaggcagcaccgtggaaaagacagtggcccctacagagtgcagcggatccacaacacctggcgagagaagtagcctgcctgccttctatcctggcaccagcggctcttgttctggctgtggatctctgagcctgcctctgctggctggactggttgctgctgatgctgtggcctctctgctgattgtgggagccgtgttcctgtgcgccagacctagaagaagccccgctcaagaggacggcaaggtgtacatcaacatgcccggcagaggaagcactagtagagtgaagttcagcagaagcgccgacgcccctgcctaccagcagggacagaaccaactgtacaacgagctgaacctgggcagacgggaagagtacgacgtgctggacaagcggagaggcagggaccctgagatgggcggaaagccccagcggagaaagaacccccaggaaggactgtataacgaactccagaaagacaagatggccgaagcctacagcgagatcggcatgaagggcgagcggagaagaggcaagggccacgatggcctgtaccagggcctgagcaccgccaccaaggacacctatgacgccctgcacatgcaggccctgcctccaagaagggccaagcgatctggatctggagcaacaaacttctcactactcaaacaagcaggtgacgtggaggagaatcccgggcctatggactggatttggcgcatccttttccttgtcggcgctgctaccggcgcgcattccttcgaagctcagaaagtgacacaggcccagaccgagatcagcgtggtggaaaaagaagatgtgaccctggactgcgtgtacgagacaagggacaccgcctactacctgttctggtacaagcagcctcctagcggcgagctggtgttcctgattagacagccttggtggggcagcagcagaggcatcagcggcagatacagctggaacttccagaagtccaccagcagcttcaacttcaccatcaccgccagccaggtggtggatagcgccgtgtacttttgtgccatgagcgtgcccgatagcagaggccactaccagttcaccttcggcaagggcacaaagctgagcgtgatccctacgcgtgcctctacaaagggaccctccgtgtttcctctggctcccagcagcaagtctacaagcggaggaacagccgctctgggctgcctggtcaaggattactttcccgagcctgtgaccgtgtcctggaatagcggagcactgacaagcggcgtgcacacctttccagccgtgctgcaaagcagcggcctgtactctctgagcagcgtggtcacagtgcctagctctagcctgggcacccagacctacatctgcaatgtgaaccacaagcctagcaacaccaaggtggacaagagagtggaacccaagagctgtggtaccacaacgccgggcgaaaggagttccttgccggccttttaccccggcacaagcggaagctgtagtgggtgtggaagcctcagcctcccacttcttgcgggcctcgtcgcggcagatgcagtagcttcacttcttattgtaggcgcggtatttctctgtgctcgaccaaggaggtcacccgctcaggaggatggtaaggtgtatataaatatgccaggacgcggaagctctagacgggttaagttttccagatccgcagacgcacccgcttaccaacaagggcagaaccaactctacaatgaacttaatttggggcggagggaagagtacgacgttctggacaaaaggaggggacgagatcccgagatgggcggaaagcctcagcgaaggaagaatccgcaagaggggctttataacgaactccagaaagataaaatggcagaagcctatagtgagattgggatgaagggagaaaggaggaggggtaaaggtcacgatgggttgtaccaaggattgagcacagccactaaagatacctatgatgcgctccacatgcaggccctgccgccaagacgcgccaagagaagcggatctggcgtgaagcagaccctgaatttcgacctgctgaagctggctggcgacgtggaatccaacccaggccctggccatatgtccgactccaaggaggtccctagccttccatttttgcgacacttgctcgaagagttggacagccatgaggacagcttgctgctgtttctgtgtcacgacgcggccccgggctgcacgacggtcacgcaagctttgtgctcgcttagccaacagcgcaagctgaccctcgcggctctggtcgagatgctctacgtgctgcagcgtatggatcttctcaagagccgcttcgggctcagcaaggagggggccgagcaattgctgggcacaagctttctcacgcgctaccgcaagctcatggtttgcgtgggtgaggagctcgactcgagcgagctacgcgctctacgcttgttcgcgtgcaacctgaatccgagcctgagcacggcgctttctgagagcagccgctttgtcgagcttgtactcgcgcttgaaaacgtaggactcgtctcgccatcgagtgtttccgtgcttgcggacatgttgcgcactcttcggcgcctcgatttgtgccagcagcttgttgagtacgaacaacaagagcaagccaggtaccgttactgttacgcggcctcgccctcattgccagttcgtacgttacgtcgggggcacggcgcgagtgaacacgagcagctgtgcatgcccgtgcaagaatcctctgacagccccgagctgctgcgcacgcccgtacaagaatcctccagcgacagccccgagcaaacgact

SEQ ID NO: 2401 - DNA, 3495 bp, synthetic construct
  source 1..3495: mol_type = other DNA
atggccttaccagtgaccgccttgctcctgccgctggccttgctgctccacgccgccaggccgaatgctggcgtgacccagacacctaagttccgggtgctgaaaaccggccagagcatgacactgctgtgcgcccaggacatgaaccatgagtacatgtattggtacagacaggaccccggcatgggcctgagactgatccactattctggctggggcaaagacaccgccaagggcgaagttcccgatggctacaacgtgtcccggctgaagaagcagaacttcctgctgggcctcgaaagcgccgctccatctcagaccagcgtgtacttctgcgccagcaaagttggcccaggccagcacaatagccctctgcactttggcaacggcaccagactgacagtgacactcgagggacagcctaaggccaatcctaccgtgacactgttccctccaagcagcgaagaactccaggccaacaaggccacacttgtgtgcctgatctccgacttctaccctggggctgtgacagtggcttggaaggccgatggatctcctgtgaaagccggcgtggaaaccaccaagccatccaagcagagcaacaacaaatacgccgccagctcctacctgagcctgacacctgagcagtggaagtcccacagatcctacagctgccaagtgacccacgaaggcagcaccgtggaaaagacagtggcccctacagagtgcagcggatccacaacacctggcgagagaagtagcctgcctgccttctatcctggcaccagcggctcttgttctggctgtggatctctgagcctgcctctgctggctggactggttgctgctgatgctgtggcctctctgctgattgtgggagccgtgttcctgtgcgccagacctagaagaagccccgctcaagaggacggcaaggtgtacatcaacatgcccggcagaggaagcactagtagagtgaagttcagcagaagcgccgacgcccctgcctaccagcagggacagaaccaactgtacaacgagctgaacctgggcagacgggaagagtacgacgtgctggacaagcggagaggcagggaccctgagatgggcggaaagccccagcggagaaagaacccccaggaaggactgtataacgaactccagaaagacaagatggccgaagcctacagcgagatcggcatgaagggcgagcggagaagaggcaagggccacgatggcctgtaccagggcctgagcaccgccaccaaggacacctatgacgccctgcacatgcaggccctgcctccaagaagggccaagcgatctggatctggagcaacaaacttctcactactcaaacaagcaggtgacgtggaggagaatcccgggcctatggactggatttggcgcatccttttccttgtcggcgctgctaccggcgcgcattccttcgaagctcagaaagtgacacaggcccagaccgagatcagcgtggtggaaaaagaagatgtgaccctggactgcgtgtacgagacaagggacaccgcctactacctgttctggtacaagcagcctcctagcggcgagctggtgttcctgattagacagccttggtggggcagcagcagaggcatcagcggcagatacagctggaacttccagaagtccaccagcagcttcaacttcaccatcaccgccagccaggtggtggatagcgccgtgtacttttgtgccatgagcgtgcccgatagcagaggccactaccagttcaccttcggcaagggcacaaagctgagcgtgatccctacgcgtgcctctacaaagggaccctccgtgtttcctctggctcccagcagcaagtctacaagcggaggaacagccgctctgggctgcctggtcaaggattactttcccgagcctgtgaccgtgtcctggaatagcggagcactgacaagcggcgtgcacacctttccagccgtgctgcaaagcagcggcctgtactctctgagcagcgtggtcacagtgcctagctctagcctgggcacccagacctacatctgcaatgtgaaccacaagcctagcaacaccaaggtggacaagagagtggaacccaagagctgtggtaccacaacgccgggcgaaaggagttccttgccggccttttaccccggcacaagcggaagctgtagtgggtgtggaagcctcagcctcccacttcttgcgggcctcgtcgcggcagatgcagtagcttcacttcttattgtaggcgcggtatttctctgtgctcgaccaaggaggtcacccgctcaggaggatggtaaggtgtatataaatatgccaggacgcggaagctctagacgggttaagttttccagatccgcagacgcacccgcttaccaacaagggcagaaccaactctacaatgaacttaatttggggcggagggaagagtacgacgttctggacaaaaggaggggacgagatcccgagatgggcggaaagcctcagcgaaggaagaatccgcaagaggggctttataacgaactccagaaagataaaatggcagaagcctatagtgagattgggatgaagggagaaaggaggaggggtaaaggtcacgatgggttgtaccaaggattgagcacagccactaaagatacctatgatgcgctccacatgcaggccctgccgccaagacgcgccaagagaagcggatctggcgtgaagcagaccctgaatttcgacctgctgaagctggctggcgacgtggaatccaacccaggccctggccatatggctctgcctgtgacagctctgctgctgcctctggcactgctgcttcatgctgctagacctagccagtttagagtgtcccctctggacagaacctggaacctgggcgagacagtggaactgaagtgccaggtgctgctgagcaaccctacaagcggctgctcctggctgtttcagcctagaggtgcagccgcctctcctacctttctgctgtacctgagccagaacaagcccaaggccgccgaaggactggacacccagagattcagcggcaagagactgggcgacaccttcgtgctgaccctgagcgacttcagaagagagaacgagggctactacttctgtagcgccctgagcaacagcatcatgtacttcagccacttcgtgcccgtgtttctgcccgccaagcctacaacaacccctgctcctagacctcctacaccagctcctacaatcgccagccagcctctgtctctcagacccgaagcctgtagacctgctgctggcggagctgtgcataccagaggactggatttcgcctgcgacatctacatctgggctcctctggctggcacatgtggcgtgctgctgctgtccctggtcatcaccctgtactgcaaccaccggaacaggcggagagtgtgcaagtgccctagacctgtggtcaagagcggcgacaagcctagcctgagcgccagatatgtt

SEQ ID NO: 2402 - DNA, 3906 bp, synthetic construct
  source 1..3906: mol_type = other DNA
atggccttaccagtgaccgccttgctcctgccgctggccttgctgctccacgccgccaggccggaagtgcagctggttgaatctggcggaggactggttcaggctggcggatctctgagactgtcttgtgccgccagcggcagaacctttagcatgggctggtttagacaggcccctggcaaagagagagagttcgtcgccgccatcacatactctggcggcagcccttactacgccgactctgtgaagggcagattcaccatcagccgggacaacgccaagaacaccgtgtacctccagatgaacagcctgaagcctgaggacaccgccgtgtactactgcgccgccaatccaacatacggcagcgactggaacgccgagaattggggccagggaacccaagtgacagtgtctagcggtaccggcggaggcggatctggcggcggaggtagcggtggcggaggatctgaattcaatgctggcgtgacccagacacctaagttccgggtgctgaaaaccggccagagcatgacactgctgtgcgcccaggacatgaaccatgagtacatgtattggtacagacaggaccccggcatgggcctgagactgatccactattctggctggggcaaagacaccgccaagggcgaagttcccgatggctacaacgtgtcccggctgaagaagcagaacttcctgctgggcctcgaaagcgccgctccatctcagaccagcgtgtacttctgcgccagcaaagttggcccaggccagcacaatagccctctgcactttggcaacggcaccagactgacagtgacactcgagggacagcctaaggccaatcctaccgtgacactgttccctccaagcagcgaagaactccaggccaacaaggccacacttgtgtgcctgatctccgacttctaccctggggctgtgacagtggcttggaaggccgatggatctcctgtgaaagccggcgtggaaaccaccaagccatccaagcagagcaacaacaaatacgccgccagctcctacctgagcctgacacctgagcagtggaagtcccacagatcctacagctgccaagtgacccacgaaggcagcaccgtggaaaagacagtggcccctacagagtgcagcggatccacaacacctggcgagagaagtagcctgcctgccttctatcctggcaccagcggctcttgttctggctgtggatctctgagcctgcctctgctggctggactggttgctgctgatgctgtggcctctctgctgattgtgggagccgtgttcctgtgcgccagacctagaagaagccccgctcaagaggacggcaaggtgtacatcaacatgcccggcagaggaagcactagtagagtgaagttcagcagaagcgccgacgcccctgcctaccagcagggacagaaccaactgtacaacgagctgaacctgggcagacgggaagagtacgacgtgctggacaagcggagaggcagggaccctgagatgggcggaaagccccagcggagaaagaacccccaggaaggactgtataacgaactccagaaagacaagatggccgaagcctacagcgagatcggcatgaagggcgagcggagaagaggcaagggccacgatggcctgtaccagggcctgagcaccgccaccaaggacacctatgacgccctgcacatgcaggccctgcctccaagaagggccaagcgatctggatctggagcaacaaacttctcactactcaaacaagcaggtgacgtggaggagaatcccgggcctatggactggatttggcgcatccttttccttgtcggcgctgctaccggcgcgcattccttcgaagctcagaaagtgacacaggcccagaccgagatcagcgtggtggaaaaagaagatgtgaccctggactgcgtgtacgagacaagggacaccgcctactacctgttctggtacaagcagcctcctagcggcgagctggtgttcctgattagacagccttggtggggcagcagcagaggcatcagcggcagatacagctggaacttccagaagtccaccagcagcttcaacttcaccatcaccgccagccaggtggtggatagcgccgtgtacttttgtgccatgagcgtgcccgatagcagaggccactaccagttcaccttcggcaagggcacaaagctgagcgtgatccctacgcgtgcctctacaaagggaccctccgtgtttcctctggctcccagcagcaagtctacaagcggaggaacagccgctctgggctgcctggtcaaggattactttcccgagcctgtgaccgtgtcctggaatagcggagcactgacaagcggcgtgcacacctttccagccgtgctgcaaagcagcggcctgtactctctgagcagcgtggtcacagtgcctagctctagcctgggcacccagacctacatctgcaatgtgaaccacaagcctagcaacaccaaggtggacaagagagtggaacccaagagctgtggtaccacaacgccgggcgaaaggagttccttgccggccttttaccccggcacaagcggaagctgtagtgggtgtggaagcctcagcctcccacttcttgcgggcctcgtcgcggcagatgcagtagcttcacttcttattgtaggcgcggtatttctctgtgctcgaccaaggaggtcacccgctcaggaggatggtaaggtgtatataaatatgccaggacgcggaagctctagacgggttaagttttccagatccgcagacgcacccgcttaccaacaagggcagaaccaactctacaatgaacttaatttggggcggagggaagagtacgacgttctggacaaaaggaggggacgagatcccgagatgggcggaaagcctcagcgaaggaagaatccgcaagaggggctttataacgaactccagaaagataaaatggcagaagcctatagtgagattgggatgaagggagaaaggaggaggggtaaaggtcacgatgggttgtaccaaggattgagcacagccactaaagatacctatgatgcgctccacatgcaggccctgccgccaagacgcgccaagagaagcggatctggcgtgaagcagaccctgaatttcgacctgctgaagctggctggcgacgtggaatccaacccaggccctggccatatggctctgcctgtgacagctctgctgctgcctctggcactgctgcttcatgctgctagacctagccagtttagagtgtcccctctggacagaacctggaacctgggcgagacagtggaactgaagtgccaggtgctgctgagcaaccctacaagcggctgctcctggctgtttcagcctagaggtgcagccgcctctcctacctttctgctgtacctgagccagaacaagcccaaggccgccgaaggactggacacccagagattcagcggcaagagactgggcgacaccttcgtgctgaccctgagcgacttcagaagagagaacgagggctactacttctgtagcgccctgagcaacagcatcatgtacttcagccacttcgtgcccgtgtttctgcccgccaagcctacaacaacccctgctcctagacctcctacaccagctcctacaatcgccagccagcctctgtctctcagacccgaagcctgtagacctgctgctggcggagctgtgcataccagaggactggatttcgcctgcgacatctacatctgggctcctctggctggcacatgtggcgtgctgctgctgtccctggtcatcaccctgtactgcaaccaccggaacaggcggagagtgtgcaagtgccctagacctgtggtcaagagcggcgacaagcctagcctgagcgccagatatgtt

SEQ ID NO: 2403 - DNA, 4317 bp, synthetic construct
  source 1..4317: mol_type = other DNA
atggccttaccagtgaccgccttgctcctgccgctggccttgctgctccacgccgccaggccggaagtgcagctggttgaatctggcggaggactggttcaggctggcggatctctgagactgtcttgtgccgccagcggcagaacctttagcatgggctggtttagacaggcccctggcaaagagagagagttcgtcgccgccatcacatactctggcggcagcccttactacgccgactctgtgaagggcagattcaccatcagccgggacaacgccaagaacaccgtgtacctccagatgaacagcctgaagcctgaggacaccgccgtgtactactgcgccgccaatccaacatacggcagcgactggaacgccgagaattggggccagggaacccaagtgacagtgtctagcggtaccggcggaggcggatctggcggcggaggtagcggtggcggaggatctgaattcaatgctggcgtgacccagacacctaagttccgggtgctgaaaaccggccagagcatgacactgctgtgcgcccaggacatgaaccatgagtacatgtattggtacagacaggaccccggcatgggcctgagactgatccactattctggctggggcaaagacaccgccaagggcgaagttcccgatggctacaacgtgtcccggctgaagaagcagaacttcctgctgggcctcgaaagcgccgctccatctcagaccagcgtgtacttctgcgccagcaaagttggcccaggccagcacaatagccctctgcactttggcaacggcaccagactgacagtgacactcgagggacagcctaaggccaatcctaccgtgacactgttccctccaagcagcgaagaactccaggccaacaaggccacacttgtgtgcctgatctccgacttctaccctggggctgtgacagtggcttggaaggccgatggatctcctgtgaaagccggcgtggaaaccaccaagccatccaagcagagcaacaacaaatacgccgccagctcctacctgagcctgacacctgagcagtggaagtcccacagatcctacagctgccaagtgacccacgaaggcagcaccgtggaaaagacagtggcccctacagagtgcagcggatccacaacacctggcgagagaagtagcctgcctgccttctatcctggcaccagcggctcttgttctggctgtggatctctgagcctgcctctgctggctggactggttgctgctgatgctgtggcctctctgctgattgtgggagccgtgttcctgtgcgccagacctagaagaagccccgctcaagaggacggcaaggtgtacatcaacatgcccggcagaggaagcactagtagagtgaagttcagcagaagcgccgacgcccctgcctaccagcagggacagaaccaactgtacaacgagctgaacctgggcagacgggaagagtacgacgtgctggacaagcggagaggcagggaccctgagatgggcggaaagccccagcggagaaagaacccccaggaaggactgtataacgaactccagaaagacaagatggccgaagcctacagcgagatcggcatgaagggcgagcggagaagaggcaagggccacgatggcctgtaccagggcctgagcaccgccaccaaggacacctatgacgccctgcacatgcaggccctgcctccaagaagggccaagcgatctggatctggagcaacaaacttctcactactcaaacaagcaggtgacgtggaggagaatcccgggcctatggactggatttggcgcatccttttccttgtcggcgctgctaccggcgcgcattccgggcccgaagtgcaactggttgaatccggtggcggcctggtgcaagcaggcggatctctcagacttagctgtgccgcctccggcagaaccttcacaatgggatggtttaggcaggctccagggaaagagagagagttcgtcgccgccatctctctgtctcccacactggcctactacgccgactctgtgaaaggccggttcaccatctccagagataatgccaagaacaccgtggtgctgcaaatgaactctctgaaacccgaggatacagccctgtactattgtgccgctgaccggaagtccgtgatgagcatcagacccgattactggggacagggcacacaagtcacagtgtcctctggatccggcggcggaggatctggcggaggcggatctgggggcggaggctctttcgaagctcagaaagtgacacaggcccagaccgagatcagcgtggtggaaaaagaagatgtgaccctggactgcgtgtacgagacaagggacaccgcctactacctgttctggtacaagcagcctcctagcggcgagctggtgttcctgattagacagccttggtggggcagcagcagaggcatcagcggcagatacagctggaacttccagaagtccaccagcagcttcaacttcaccatcaccgccagccaggtggtggatagcgccgtgtacttttgtgccatgagcgtgcccgatagcagaggccactaccagttcaccttcggcaagggcacaaagctgagcgtgatccctacgcgtgcctctacaaagggaccctccgtgtttcctctggctcccagcagcaagtctacaagcggaggaacagccgctctgggctgcctggtcaaggattactttcccgagcctgtgaccgtgtcctggaatagcggagcactgacaagcggcgtgcacacctttccagccgtgctgcaaagcagcggcctgtactctctgagcagcgtggtcacagtgcctagctctagcctgggcacccagacctacatctgcaatgtgaaccacaagcctagcaacaccaaggtggacaagagagtggaacccaagagctgtggtaccacaacgccgggcgaaaggagttccttgccggccttttaccccggcacaagcggaagctgtagtgggtgtggaagcctcagcctcccacttcttgcgggcctcgtcgcggcagatgcagtagcttcacttcttattgtaggcgcggtatttctctgtgctcgaccaaggaggtcacccgctcaggaggatggtaaggtgtatataaatatgccaggacgcggaagctctagacgggttaagttttccagatccgcagacgcacccgcttaccaacaagggcagaaccaactctacaatgaacttaatttggggcggagggaagagtacgacgttctggacaaaaggaggggacgagatcccgagatgggcggaaagcctcagcgaaggaagaatccgcaagaggggctttataacgaactccagaaagataaaatggcagaagcctatagtgagattgggatgaagggagaaaggaggaggggtaaaggtcacgatgggttgtaccaaggattgagcacagccactaaagatacctatgatgcgctccacatgcaggccctgccgccaagacgcgccaagagaagcggatctggcgtgaagcagaccctgaatttcgacctgctgaagctggctggcgacgtggaatccaacccaggccctggccatatggctctgcctgtgacagctctgctgctgcctctggcactgctgcttcatgctgctagacctagccagtttagagtgtcccctctggacagaacctggaacctgggcgagacagtggaactgaagtgccaggtgctgctgagcaaccctacaagcggctgctcctggctgtttcagcctagaggtgcagccgcctctcctacctttctgctgtacctgagccagaacaagcccaaggccgccgaaggactggacacccagagattcagcggcaagagactgggcgacaccttcgtgctgaccctgagcgacttcagaagagagaacgagggctactacttctgtagcgccctgagcaacagcatcatgtacttcagccacttcgtgcccgtgtttctgcccgccaagcctacaacaacccctgctcctagacctcctacaccagctcctacaatcgccagccagcctctgtctctcagacccgaagcctgtagacctgctgctggcggagctgtgcataccagaggactggatttcgcctgcgacatctacatctgggctcctctggctggcacatgtggcgtgctgctgctgtccctggtcatcaccctgtactgcaaccaccggaacaggcggagagtgtgcaagtgccctagacctgtggtcaagagcggcgacaagcctagcctgagcgccagatatgtt

SEQ ID NO: 2404 - DNA, 2472 bp, synthetic construct
  source 1..2472: mol_type = other DNA
atggccttaccagtgaccgccttgctcctgccgctggccttgctgctccacgccgccaggccggaattcaatgctggcgtgacccagacacctaagttccgggtgctgaaaaccggccagagcatgacactgctgtgcgcccaggacatgaaccatgagtacatgtattggtacagacaggaccccggcatgggcctgagactgatccactattctggctggggcaaagacaccgccaagggcgaagttcccgatggctacaacgtgtcccggctgaagaagcagaacttcctgctgggcctcgaaagcgccgctccatctcagaccagcgtgtacttctgcgccagcaaagttggcccaggccagcacaatagccctctgcactttggcaacggcaccagactgacagtgacactcgaggacctgaagaacgtgttcccacctgaggtggccgtgttcgagcctagcgaggccgagatcagccacacccagaaagccaccctcgtgtgcctggctaccggcttctaccccgaccatgtggaactgtcttggtgggtcaacggcaaagaggtgcacagcggcgtgtctaccgacccccagccactgaaagaacagcccgccctgaacgacagccggtactgcctgagcagcagactgagagtgtccgccaccttctggcagaacccccggaaccacttcagatgccaggtgcagttctacggcctgagcgagaacgacgagtggacccaggacagagccaagcccgtgacccagatcgtgtctgccgaagcctggggcagagccgattgcggatcccagagcttcggcctgctggaccccaagctgtgctacctgctggatggcatcctgttcatctacggcgtgatcctgaccgccctgttcctgagagtgaagttcagcagaagcgccgacgcccctgcctaccagcagggacagaaccaactgtacaacgagctgaacctgggcagacgggaagagtacgacgtgctggacaagcggagaggcagggaccctgagatgggcggaaagccccagcggagaaagaacccccaggaaggactgtataacgaactccagaaagacaagatggccgaagcctacagcgagatcggcatgaagggcgagcggagaagaggcaagggccacgatggcctgtaccagggcctgagcaccgccaccaaggacacctatgacgccctgcacatgcaggccctgcctccaagaagggccaagcgatctggatctggagcaacaaacttctcactactcaaacaagcaggtgacgtggaggagaatcccgggcctactagtatggactggatttggcgcatccttttccttgtcggcgctgctaccggcgcgcattccttcgaagctcagaaagtgacacaggcccagaccgagatcagcgtggtggaaaaagaagatgtgaccctggactgcgtgtacgagacaagggacaccgcctactacctgttctggtacaagcagcctcctagcggcgagctggtgttcctgattagacagccttggtggggcagcagcagaggcatcagcggcagatacagctggaacttccagaagtccaccagcagcttcaacttcaccatcaccgccagccaggtggtggatagcgccgtgtacttttgtgccatgagcgtgcccgatagcagaggccactaccagttcaccttcggcaagggcacaaagctgagcgtgatccctacgcgtatccagaaccctgatcctgccgtgtaccagctgcgggatagcaagagcagcgacaagagcgtgtgtctgttcaccgacttcgacagccagaccaacgtgtcccagagcaaggactccgacgtgtacatcaccgataagaccgtgctggacatgcggagcatggacttcaagagcaactccgccgtggcctggtccaacaagtccgatttcgcctgcgccaacgccttcaacaacagcattatccccgaggacacattcttcccaagccccgagagcagctgcggtacccagagttttgggttgttggaccctaaattgtgctatctgttggacggaatcctgttcatttacggagtgatcctgaccgcattgttcctgcgggttaagttttccagatccgcagacgcacccgcttaccaacaagggcagaaccaactctacaatgaacttaatttggggcggagggaagagtacgacgttctggacaaaaggaggggacgagatcccgagatgggcggaaagcctcagcgaaggaagaatccgcaagaggggctttataacgaactccagaaagataaaatggcagaagcctatagtgagattgggatgaagggagaaaggaggaggggtaaaggtcacgatgggttgtaccaaggattgagcacagccactaaagatacctatgatgcgctccacatgcaggccctgccgccaagataa

SEQ ID NO: 2405 - DNA, 2598 bp, synthetic construct
  source 1..2598: mol_type = other DNA
atggccttaccagtgaccgccttgctcctgccgctggccttgctgctccacgccgccaggccggaattcaatgctggcgtgacccagacacctaagttccgggtgctgaaaaccggccagagcatgacactgctgtgcgcccaggacatgaaccatgagtacatgtattggtacagacaggaccccggcatgggcctgagactgatccactattctggctggggcaaagacaccgccaagggcgaagttcccgatggctacaacgtgtcccggctgaagaagcagaacttcctgctgggcctcgaaagcgccgctccatctcagaccagcgtgtacttctgcgccagcaaagttggcccaggccagcacaatagccctctgcactttggcaacggcaccagactgacagtgacactcgaggacctgaagaacgtgttcccacctgaggtggccgtgttcgagcctagcgaggccgagatcagccacacccagaaagccaccctcgtgtgcctggctaccggcttctaccccgaccatgtggaactgtcttggtgggtcaacggcaaagaggtgcacagcggcgtgtctaccgacccccagccactgaaagaacagcccgccctgaacgacagccggtactgcctgagcagcagactgagagtgtccgccaccttctggcagaacccccggaaccacttcagatgccaggtgcagttctacggcctgagcgagaacgacgagtggacccaggacagagccaagcccgtgacccagatcgtgtctgccgaagcctggggcagagccgattgcggatcccagagcttcggcctgctggaccccaagctgtgctacctgctggatggcatcctgttcatctacggcgtgatcctgaccgccctgttcctgagagtgaagttcagcagaagcgccgacgcccctgcctaccagcagggacagaaccaactgtacaacgagctgaacctgggcagacgggaagagtacgacgtgctggacaagcggagaggcagggaccctgagatgggcggaaagccccagcggagaaagaacccccaggaaggactgtataacgaactccagaaagacaagatggccgaagcctacagcgagatcggcatgaagggcgagcggagaagaggcaagggccacgatggcctgtaccagggcctgagcaccgccaccaaggacacctatgacgccctgcacatgcaggccctgcctccaagaagggccaagcgatctggatctggagcaacaaacttctcactactcaaacaagcaggtgacgtggaggagaatcccgggcctactagtatggactggatttggcgcatccttttccttgtcggcgctgctaccggcgcgcattccttcgaagctcagaaagtgacacaggcccagaccgagatcagcgtggtggaaaaagaagatgtgaccctggactgcgtgtacgagacaagggacaccgcctactacctgttctggtacaagcagcctcctagcggcgagctggtgttcctgattagacagccttggtggggcagcagcagaggcatcagcggcagatacagctggaacttccagaagtccaccagcagcttcaacttcaccatcaccgccagccaggtggtggatagcgccgtgtacttttgtgccatgagcgtgcccgatagcagaggccactaccagttcaccttcggcaagggcacaaagctgagcgtgatccctacgcgtatccagaaccctgatcctgccgtgtaccagctgcgggatagcaagagcagcgacaagagcgtgtgtctgttcaccgacttcgacagccagaccaacgtgtcccagagcaaggactccgacgtgtacatcaccgataagaccgtgctggacatgcggagcatggacttcaagagcaactccgccgtggcctggtccaacaagtccgatttcgcctgcgccaacgccttcaacaacagcattatccccgaggacacattcttcccaagccccgagagcagctgcggtacccagagcttcggcctgctggaccccaagctgtgctacctgctggatggcatcctgttcatctacggcgtgatcctgaccgccctgttcctgaaacggggcagaaagaaactcctgtatatattcaaacaaccatttatgagaccagtacaaactactcaagaggaagatggctgtagctgccgatttccagaagaagaagaaggaggatgtgaactgagagtgaagttcagcagaagcgccgacgcccctgcctaccagcagggacagaaccaactgtacaacgagctgaacctgggcagacgggaagagtacgacgtgctggacaagcggagaggcagggaccctgagatgggcggaaagccccagcggagaaagaacccccaggaaggactgtataacgaactccagaaagacaagatggccgaagcctacagcgagatcggcatgaagggcgagcggagaagaggcaagggccacgatggcctgtaccagggcctgagcaccgccaccaaggacacctatgacgccctgcacatgcaggccctgcctccaagataa

SEQ ID NO: 2406 - DNA, 2595 bp, synthetic construct
  source 1..2595: mol_type = other DNA
atggccttaccagtgaccgccttgctcctgccgctggccttgctgctccacgccgccaggccggaattcaatgctggcgtgacccagacacctaagttccgggtgctgaaaaccggccagagcatgacactgctgtgcgcccaggacatgaaccatgagtacatgtattggtacagacaggaccccggcatgggcctgagactgatccactattctggctggggcaaagacaccgccaagggcgaagttcccgatggctacaacgtgtcccggctgaagaagcagaacttcctgctgggcctcgaaagcgccgctccatctcagaccagcgtgtacttctgcgccagcaaagttggcccaggccagcacaatagccctctgcactttggcaacggcaccagactgacagtgacactcgaggacctgaagaacgtgttcccacctgaggtggccgtgttcgagcctagcgaggccgagatcagccacacccagaaagccaccctcgtgtgcctggctaccggcttctaccccgaccatgtggaactgtcttggtgggtcaacggcaaagaggtgcacagcggcgtgtctaccgacccccagccactgaaagaacagcccgccctgaacgacagccggtactgcctgagcagcagactgagagtgtccgccaccttctggcagaacccccggaaccacttcagatgccaggtgcagttctacggcctgagcgagaacgacgagtggacccaggacagagccaagcccgtgacccagatcgtgtctgccgaagcctggggcagagccgattgcggatcccagagcttcggcctgctggaccccaagctgtgctacctgctggatggcatcctgttcatctacggcgtgatcctgaccgccctgttcctgagagtgaagttcagcagaagcgccgacgcccctgcctaccagcagggacagaaccaactgtacaacgagctgaacctgggcagacgggaagagtacgacgtgctggacaagcggagaggcagggaccctgagatgggcggaaagccccagcggagaaagaacccccaggaaggactgtataacgaactccagaaagacaagatggccgaagcctacagcgagatcggcatgaagggcgagcggagaagaggcaagggccacgatggcctgtaccagggcctgagcaccgccaccaaggacacctatgacgccctgcacatgcaggccctgcctccaagaagggccaagcgatctggatctggagcaacaaacttctcactactcaaacaagcaggtgacgtggaggagaatcccgggcctactagtatggactggatttggcgcatccttttccttgtcggcgctgctaccggcgcgcattccttcgaagctcagaaagtgacacaggcccagaccgagatcagcgtggtggaaaaagaagatgtgaccctggactgcgtgtacgagacaagggacaccgcctactacctgttctggtacaagcagcctcctagcggcgagctggtgttcctgattagacagccttggtggggcagcagcagaggcatcagcggcagatacagctggaacttccagaagtccaccagcagcttcaacttcaccatcaccgccagccaggtggtggatagcgccgtgtacttttgtgccatgagcgtgcccgatagcagaggccactaccagttcaccttcggcaagggcacaaagctgagcgtgatccctacgcgtatccagaaccctgatcctgccgtgtaccagctgcgggatagcaagagcagcgacaagagcgtgtgtctgttcaccgacttcgacagccagaccaacgtgtcccagagcaaggactccgacgtgtacatcaccgataagaccgtgctggacatgcggagcatggacttcaagagcaactccgccgtggcctggtccaacaagtccgatttcgcctgcgccaacgccttcaacaacagcattatccccgaggacacattcttcccaagccccgagagcagctgcggtacccagagcttcggcctgctggaccccaagctgtgctacctgctggatggcatcctgttcatctacggcgtgatcctgaccgccctgttcctgaggagtaagaggagcaggctcctgcacagtgactacatgaacatgactccacgccgccccggacccacccgcaagcattaccagccctatgccccaccacgcgacttcgcagcctatcgctccagagtgaagttcagcagaagcgccgacgcccctgcctaccagcagggacagaaccaactgtacaacgagctgaacctgggcagacgggaagagtacgacgtgctggacaagcggagaggcagggaccctgagatgggcggaaagccccagcggagaaagaacccccaggaaggactgtataacgaactccagaaagacaagatggccgaagcctacagcgagatcggcatgaagggcgagcggagaagaggcaagggccacgatggcctgtaccagggcctgagcaccgccaccaaggacacctatgacgccctgcacatgcaggccctgcctccaagataa

SEQ ID NO: 2407 - DNA, 2580 bp, synthetic construct
  source 1..2580: mol_type = other DNA
atggccttaccagtgaccgccttgctcctgccgctggccttgctgctccacgccgccaggccggaattcaatgctggcgtgacccagacacctaagttccgggtgctgaaaaccggccagagcatgacactgctgtgcgcccaggacatgaaccatgagtacatgtattggtacagacaggaccccggcatgggcctgagactgatccactattctggctggggcaaagacaccgccaagggcgaagttcccgatggctacaacgtgtcccggctgaagaagcagaacttcctgctgggcctcgaaagcgccgctccatctcagaccagcgtgtacttctgcgccagcaaagttggcccaggccagcacaatagccctctgcactttggcaacggcaccagactgacagtgacactcgaggacctgaagaacgtgttcccacctgaggtggccgtgttcgagcctagcgaggccgagatcagccacacccagaaagccaccctcgtgtgcctggctaccggcttctaccccgaccatgtggaactgtcttggtgggtcaacggcaaagaggtgcacagcggcgtgtctaccgacccccagccactgaaagaacagcccgccctgaacgacagccggtactgcctgagcagcagactgagagtgtccgccaccttctggcagaacccccggaaccacttcagatgccaggtgcagttctacggcctgagcgagaacgacgagtggacccaggacagagccaagcccgtgacccagatcgtgtctgccgaagcctggggcagagccgattgcggatcccagagcttcggcctgctggaccccaagctgtgctacctgctggatggcatcctgttcatctacggcgtgatcctgaccgccctgttcctgagagtgaagttcagcagaagcgccgacgcccctgcctaccagcagggacagaaccaactgtacaacgagctgaacctgggcagacgggaagagtacgacgtgctggacaagcggagaggcagggaccctgagatgggcggaaagccccagcggagaaagaacccccaggaaggactgtataacgaactccagaaagacaagatggccgaagcctacagcgagatcggcatgaagggcgagcggagaagaggcaagggccacgatggcctgtaccagggcctgagcaccgccaccaaggacacctatgacgccctgcacatgcaggccctgcctccaagaagggccaagcgatctggatctggagcaacaaacttctcactactcaaacaagcaggtgacgtggaggagaatcccgggcctactagtatggactggatttggcgcatccttttccttgtcggcgctgctaccggcgcgcattccttcgaagctcagaaagtgacacaggcccagaccgagatcagcgtggtggaaaaagaagatgtgaccctggactgcgtgtacgagacaagggacaccgcctactacctgttctggtacaagcagcctcctagcggcgagctggtgttcctgattagacagccttggtggggcagcagcagaggcatcagcggcagatacagctggaacttccagaagtccaccagcagcttcaacttcaccatcaccgccagccaggtggtggatagcgccgtgtacttttgtgccatgagcgtgcccgatagcagaggccactaccagttcaccttcggcaagggcacaaagctgagcgtgatccctacgcgtatccagaaccctgatcctgccgtgtaccagctgcgggatagcaagagcagcgacaagagcgtgtgtctgttcaccgacttcgacagccagaccaacgtgtcccagagcaaggactccgacgtgtacatcaccgataagaccgtgctggacatgcggagcatggacttcaagagcaactccgccgtggcctggtccaacaagtccgatttcgcctgcgccaacgccttcaacaacagcattatccccgaggacacattcttcccaagccccgagagcagctgcggtacccagagcttcggcctgctggaccccaagctgtgctacctgctggatggcatcctgttcatctacggcgtgatcctgaccgccctgttcctgagggaccaaagactgcctcctgacgctcacaaacctccaggcggaggcagcttcagaacccctatccaagaggaacaggctgacgcccacagcaccctggcaaaaattagagtgaagttcagcagaagcgccgacgcccctgcctaccagcagggacagaaccaactgtacaacgagctgaacctgggcagacgggaagagtacgacgtgctggacaagcggagaggcagggaccctgagatgggcggaaagccccagcggagaaagaacccccaggaaggactgtataacgaactccagaaagacaagatggccgaagcctacagcgagatcggcatgaagggcgagcggagaagaggcaagggccacgatggcctgtaccagggcctgagcaccgccaccaaggacacctatgacgccctgcacatgcaggccctgcctccaagataa

SEQ ID NO: 2408 - DNA, 2832 bp, synthetic construct
  source 1..2832: mol_type = other DNA
atggccttaccagtgaccgccttgctcctgccgctggccttgctgctccacgccgccaggccggaattcaatgctggcgtgacccagacacctaagttccgggtgctgaaaaccggccagagcatgacactgctgtgcgcccaggacatgaaccatgagtacatgtattggtacagacaggaccccggcatgggcctgagactgatccactattctggctggggcaaagacaccgccaagggcgaagttcccgatggctacaacgtgtcccggctgaagaagcagaacttcctgctgggcctcgaaagcgccgctccatctcagaccagcgtgtacttctgcgccagcaaagttggcccaggccagcacaatagccctctgcactttggcaacggcaccagactgacagtgacactcgaggacctgaagaacgtgttcccacctgaggtggccgtgttcgagcctagcgaggccgagatcagccacacccagaaagccaccctcgtgtgcctggctaccggcttctaccccgaccatgtggaactgtcttggtgggtcaacggcaaagaggtgcacagcggcgtgtctaccgacccccagccactgaaagaacagcccgccctgaacgacagccggtactgcctgagcagcagactgagagtgtccgccaccttctggcagaacccccggaaccacttcagatgccaggtgcagttctacggcctgagcgagaacgacgagtggacccaggacagagccaagcccgtgacccagatcgtgtctgccgaagcctggggcagagccgattgcggatcccagagcttcggcctgctggaccccaagctgtgctacctgctggatggcatcctgttcatctacggcgtgatcctgaccgccctgttcctgagagtgaagttcagcagaagcgccgacgcccctgcctaccagcagggacagaaccaactgtacaacgagctgaacctgggcagacgggaagagtacgacgtgctggacaagcggagaggcagggaccctgagatgggcggaaagccccagcggagaaagaacccccaggaaggactgtataacgaactccagaaagacaagatggccgaagcctacagcgagatcggcatgaagggcgagcggagaagaggcaagggccacgatggcctgtaccagggcctgagcaccgccaccaaggacacctatgacgccctgcacatgcaggccctgcctccaagaagggccaagcgatctggatctggagcaacaaacttctcactactcaaacaagcaggtgacgtggaggagaatcccgggcctactagtatggactggatttggcgcatccttttccttgtcggcgctgctaccggcgcgcattccttcgaagctcagaaagtgacacaggcccagaccgagatcagcgtggtggaaaaagaagatgtgaccctggactgcgtgtacgagacaagggacaccgcctactacctgttctggtacaagcagcctcctagcggcgagctggtgttcctgattagacagccttggtggggcagcagcagaggcatcagcggcagatacagctggaacttccagaagtccaccagcagcttcaacttcaccatcaccgccagccaggtggtggatagcgccgtgtacttttgtgccatgagcgtgcccgatagcagaggccactaccagttcaccttcggcaagggcacaaagctgagcgtgatccctacgcgtatccagaaccctgatcctgccgtgtaccagctgcgggatagcaagagcagcgacaagagcgtgtgtctgttcaccgacttcgacagccagaccaacgtgtcccagagcaaggactccgacgtgtacatcaccgataagaccgtgctggacatgcggagcatggacttcaagagcaactccgccgtggcctggtccaacaagtccgatttcgcctgcgccaacgccttcaacaacagcattatccccgaggacacattcttcccaagccccgagagcagctgcggtacccagagcttcggcctgctggaccccaagctgtgctacctgctggatggcatcctgttcatctacggcgtgatcctgaccgccctgttcctgtggcggcggaagcggaaagagaagcagtctgagacaagccccaaagagttcctgaccatctacgaggacgtgaaggacctgaaaacccggcggaaccacgaacaagagcagacctttcctggcggaggcagcaccatctacagcatgatccagagccagagcagcgcccctacaagccaagagcctgcctacacactgtactccctgatccagcctagcagaaagagcggcagccggaagagaaatcacagccccagcttcaacagcacgatctacgaagtgatcggcaagagccagccaaaggctcagaaccctgccagactgagccggaaagagctggaaaacttcgacgtgtacagcagagtgaagttcagcagaagcgccgacgcccctgcctaccagcagggacagaaccaactgtacaacgagctgaacctgggcagacgggaagagtacgacgtgctggacaagcggagaggcagggaccctgagatgggcggaaagccccagcggagaaagaacccccaggaaggactgtataacgaactccagaaagacaagatggccgaagcctacagcgagatcggcatgaagggcgagcggagaagaggcaagggccacgatggcctgtaccagggcctgagcaccgccaccaaggacacctatgacgccctgcacatgcaggccctgcctccaagataa

SEQ ID NO: 2409 - DNA, 2721 bp, synthetic construct
  source 1..2721: mol_type = other DNA
atggccttaccagtgaccgccttgctcctgccgctggccttgctgctccacgccgccaggccggaattcaatgctggcgtgacccagacacctaagttccgggtgctgaaaaccggccagagcatgacactgctgtgcgcccaggacatgaaccatgagtacatgtattggtacagacaggaccccggcatgggcctgagactgatccactattctggctggggcaaagacaccgccaagggcgaagttcccgatggctacaacgtgtcccggctgaagaagcagaacttcctgctgggcctcgaaagcgccgctccatctcagaccagcgtgtacttctgcgccagcaaagttggcccaggccagcacaatagccctctgcactttggcaacggcaccagactgacagtgacactcgaggacctgaagaacgtgttcccacctgaggtggccgtgttcgagcctagcgaggccgagatcagccacacccagaaagccaccctcgtgtgcctggctaccggcttctaccccgaccatgtggaactgtcttggtgggtcaacggcaaagaggtgcacagcggcgtgtctaccgacccccagccactgaaagaacagcccgccctgaacgacagccggtactgcctgagcagcagactgagagtgtccgccaccttctggcagaacccccggaaccacttcagatgccaggtgcagttctacggcctgagcgagaacgacgagtggacccaggacagagccaagcccgtgacccagatcgtgtctgccgaagcctggggcagagccgattgcggatcccagagcttcggcctgctggaccccaagctgtgctacctgctggatggcatcctgttcatctacggcgtgatcctgaccgccctgttcctgaggagtaagaggagcaggctcctgcacagtgactacatgaacatgactccacgccgccccggacccacccgcaagcattaccagccctatgccccaccacgcgacttcgcagcctatcgctccagagtgaagttcagcagaagcgccgacgcccctgcctaccagcagggacagaaccaactgtacaacgagctgaacctgggcagacgggaagagtacgacgtgctggacaagcggagaggcagggaccctgagatgggcggaaagccccagcggagaaagaacccccaggaaggactgtataacgaactccagaaagacaagatggccgaagcctacagcgagatcggcatgaagggcgagcggagaagaggcaagggccacgatggcctgtaccagggcctgagcaccgccaccaaggacacctatgacgccctgcacatgcaggccctgcctccaagaagggccaagcgatctggatctggagcaacaaacttctcactactcaaacaagcaggtgacgtggaggagaatcccgggcctactagtatggactggatttggcgcatccttttccttgtcggcgctgctaccggcgcgcattccttcgaagctcagaaagtgacacaggcccagaccgagatcagcgtggtggaaaaagaagatgtgaccctggactgcgtgtacgagacaagggacaccgcctactacctgttctggtacaagcagcctcctagcggcgagctggtgttcctgattagacagccttggtggggcagcagcagaggcatcagcggcagatacagctggaacttccagaagtccaccagcagcttcaacttcaccatcaccgccagccaggtggtggatagcgccgtgtacttttgtgccatgagcgtgcccgatagcagaggccactaccagttcaccttcggcaagggcacaaagctgagcgtgatccctacgcgtatccagaaccctgatcctgccgtgtaccagctgcgggatagcaagagcagcgacaagagcgtgtgtctgttcaccgacttcgacagccagaccaacgtgtcccagagcaaggactccgacgtgtacatcaccgataagaccgtgctggacatgcggagcatggacttcaagagcaactccgccgtggcctggtccaacaagtccgatttcgcctgcgccaacgccttcaacaacagcattatccccgaggacacattcttcccaagccccgagagcagctgcggtacccagagcttcggcctgctggaccccaagctgtgctacctgctggatggcatcctgttcatctacggcgtgatcctgaccgccctgttcctgaaacggggcagaaagaaactcctgtatatattcaaacaaccatttatgagaccagtacaaactactcaagaggaagatggctgtagctgccgatttccagaagaagaagaaggaggatgtgaactgagagtgaagttcagcagaagcgccgacgcccctgcctaccagcagggacagaaccaactgtacaacgagctgaacctgggcagacgggaagagtacgacgtgctggacaagcggagaggcagggaccctgagatgggcggaaagccccagcggagaaagaacccccaggaaggactgtataacgaactccagaaagacaagatggccgaagcctacagcgagatcggcatgaagggcgagcggagaagaggcaagggccacgatggcctgtaccagggcctgagcaccgccaccaaggacacctatgacgccctgcacatgcaggccctgcctccaagataa

SEQ ID NO: 2410 - DNA, 2718 bp, synthetic construct
  source 1..2718: mol_type = other DNA
atggccttaccagtgaccgccttgctcctgccgctggccttgctgctccacgccgccaggccggaattcaatgctggcgtgacccagacacctaagttccgggtgctgaaaaccggccagagcatgacactgctgtgcgcccaggacatgaaccatgagtacatgtattggtacagacaggaccccggcatgggcctgagactgatccactattctggctggggcaaagacaccgccaagggcgaagttcccgatggctacaacgtgtcccggctgaagaagcagaacttcctgctgggcctcgaaagcgccgctccatctcagaccagcgtgtacttctgcgccagcaaagttggcccaggccagcacaatagccctctgcactttggcaacggcaccagactgacagtgacactcgaggacctgaagaacgtgttcccacctgaggtggccgtgttcgagcctagcgaggccgagatcagccacacccagaaagccaccctcgtgtgcctggctaccggcttctaccccgaccatgtggaactgtcttggtgggtcaacggcaaagaggtgcacagcggcgtgtctaccgacccccagccactgaaagaacagcccgccctgaacgacagccggtactgcctgagcagcagactgagagtgtccgccaccttctggcagaacccccggaaccacttcagatgccaggtgcagttctacggcctgagcgagaacgacgagtggacccaggacagagccaagcccgtgacccagatcgtgtctgccgaagcctggggcagagccgattgcggatcccagagcttcggcctgctggaccccaagctgtgctacctgctggatggcatcctgttcatctacggcgtgatcctgaccgccctgttcctgaggagtaagaggagcaggctcctgcacagtgactacatgaacatgactccacgccgccccggacccacccgcaagcattaccagccctatgccccaccacgcgacttcgcagcctatcgctccagagtgaagttcagcagaagcgccgacgcccctgcctaccagcagggacagaaccaactgtacaacgagctgaacctgggcagacgggaagagtacgacgtgctggacaagcggagaggcagggaccctgagatgggcggaaagccccagcggagaaagaacccccaggaaggactgtataacgaactccagaaagacaagatggccgaagcctacagcgagatcggcatgaagggcgagcggagaagaggcaagggccacgatggcctgtaccagggcctgagcaccgccaccaaggacacctatgacgccctgcacatgcaggccctgcctccaagaagggccaagcgatctggatctggagcaacaaacttctcactactcaaacaagcaggtgacgtggaggagaatcccgggcctactagtatggactggatttggcgcatccttttccttgtcggcgctgctaccggcgcgcattccttcgaagctcagaaagtgacacaggcccagaccgagatcagcgtggtggaaaaagaagatgtgaccctggactgcgtgtacgagacaagggacaccgcctactacctgttctggtacaagcagcctcctagcggcgagctggtgttcctgattagacagccttggtggggcagcagcagaggcatcagcggcagatacagctggaacttccagaagtccaccagcagcttcaacttcaccatcaccgccagccaggtggtggatagcgccgtgtacttttgtgccatgagcgtgcccgatagcagaggccactaccagttcaccttcggcaagggcacaaagctgagcgtgatccctacgcgtatccagaaccctgatcctgccgtgtaccagctgcgggatagcaagagcagcgacaagagcgtgtgtctgttcaccgacttcgacagccagaccaacgtgtcccagagcaaggactccgacgtgtacatcaccgataagaccgtgctggacatgcggagcatggacttcaagagcaactccgccgtggcctggtccaacaagtccgatttcgcctgcgccaacgccttcaacaacagcattatccccgaggacacattcttcccaagccccgagagcagctgcggtacccagagttttgggttgttggaccctaaattgtgctatctgttggacggaatcctgttcatttacggagtgatcctgaccgcattgttcctgaggagcaagcggtcacggctgctccacagcgattacatgaatatgacaccacgaagaccgggtcctactcgcaaacactaccaaccctacgcacctccccgcgactttgcagcgtaccgatctcgggttaagttttccagatccgcagacgcacccgcttaccaacaagggcagaaccaactctacaatgaacttaatttggggcggagggaagagtacgacgttctggacaaaaggaggggacgagatcccgagatgggcggaaagcctcagcgaaggaagaatccgcaagaggggctttataacgaactccagaaagataaaatggcagaagcctatagtgagattgggatgaagggagaaaggaggaggggtaaaggtcacgatgggttgtaccaaggattgagcacagccactaaagatacctatgatgcgctccacatgcaggccctgccgccaagataa

SEQ ID NO: 2411 - DNA, 2721 bp, synthetic construct
  source 1..2721: mol_type = other DNA
atggccttaccagtgaccgccttgctcctgccgctggccttgctgctccacgccgccaggccggaattcaatgctggcgtgacccagacacctaagttccgggtgctgaaaaccggccagagcatgacactgctgtgcgcccaggacatgaaccatgagtacatgtattggtacagacaggaccccggcatgggcctgagactgatccactattctggctggggcaaagacaccgccaagggcgaagttcccgatggctacaacgtgtcccggctgaagaagcagaacttcctgctgggcctcgaaagcgccgctccatctcagaccagcgtgtacttctgcgccagcaaagttggcccaggccagcacaatagccctctgcactttggcaacggcaccagactgacagtgacactcgaggacctgaagaacgtgttcccacctgaggtggccgtgttcgagcctagcgaggccgagatcagccacacccagaaagccaccctcgtgtgcctggctaccggcttctaccccgaccatgtggaactgtcttggtgggtcaacggcaaagaggtgcacagcggcgtgtctaccgacccccagccactgaaagaacagcccgccctgaacgacagccggtactgcctgagcagcagactgagagtgtccgccaccttctggcagaacccccggaaccacttcagatgccaggtgcagttctacggcctgagcgagaacgacgagtggacccaggacagagccaagcccgtgacccagatcgtgtctgccgaagcctggggcagagccgattgcggatcccagagcttcggcctgctggaccccaagctgtgctacctgctggatggcatcctgttcatctacggcgtgatcctgaccgccctgttcctgaggagtaagaggagcaggctcctgcacagtgactacatgaacatgactccacgccgccccggacccacccgcaagcattaccagccctatgccccaccacgcgacttcgcagcctatcgctccagagtgaagttcagcagaagcgccgacgcccctgcctaccagcagggacagaaccaactgtacaacgagctgaacctgggcagacgggaagagtacgacgtgctggacaagcggagaggcagggaccctgagatgggcggaaagccccagcggagaaagaacccccaggaaggactgtataacgaactccagaaagacaagatggccgaagcctacagcgagatcggcatgaagggcgagcggagaagaggcaagggccacgatggcctgtaccagggcctgagcaccgccaccaaggacacctatgacgccctgcacatgcaggccctgcctccaagaagggccaagcgatctggatctggagcaacaaacttctcactactcaaacaagcaggtgacgtggaggagaatcccgggcctactagtatggactggatttggcgcatccttttccttgtcggcgctgctaccggcgcgcattccttcgaagctcagaaagtgacacaggcccagaccgagatcagcgtggtggaaaaagaagatgtgaccctggactgcgtgtacgagacaagggacaccgcctactacctgttctggtacaagcagcctcctagcggcgagctggtgttcctgattagacagccttggtggggcagcagcagaggcatcagcggcagatacagctggaacttccagaagtccaccagcagcttcaacttcaccatcaccgccagccaggtggtggatagcgccgtgtacttttgtgccatgagcgtgcccgatagcagaggccactaccagttcaccttcggcaagggcacaaagctgagcgtgatccctacgcgtatccagaaccctgatcctgccgtgtaccagctgcgggatagcaagagcagcgacaagagcgtgtgtctgttcaccgacttcgacagccagaccaacgtgtcccagagcaaggactccgacgtgtacatcaccgataagaccgtgctggacatgcggagcatggacttcaagagcaactccgccgtggcctggtccaacaagtccgatttcgcctgcgccaacgccttcaacaacagcattatccccgaggacacattcttcccaagccccgagagcagctgcggtacccagagttttgggttgttggaccctaaattgtgctatctgttggacggaatcctgttcatttacggagtgatcctgaccgcattgttcctgaagagaggccggaagaagctgctgtacatcttcaagcagcctttcatgcggcccgtgcagaccacccaggaagaggacggctgctcctgccggttccccgaggaagaagaaggcggctgcgagctgcgggttaagttttccagatccgcagacgcacccgcttaccaacaagggcagaaccaactctacaatgaacttaatttggggcggagggaagagtacgacgttctggacaaaaggaggggacgagatcccgagatgggcggaaagcctcagcgaaggaagaatccgcaagaggggctttataacgaactccagaaagataaaatggcagaagcctatagtgagattgggatgaagggagaaaggaggaggggtaaaggtcacgatgggttgtaccaaggattgagcacagccactaaagatacctatgatgcgctccacatgcaggccctgccgccaagataa

SEQ ID NO: 2412 - DNA, 2472 bp, synthetic construct
  source 1..2472: mol_type = other DNA
atggccttaccagtgaccgccttgctcctgccgctggccttgctgctccacgccgccaggccggaattcaatgctggcgtgacccagacacctaagttccgggtgctgaaaaccggccagagcatgacactgctgtgcgcccaggacatgaaccatgagtacatgtattggtacagacaggaccccggcatgggcctgagactgatccactattctggctggggcaaagacaccgccaagggcgaagttcccgatggctacaacgtgtcccggctgaagaagcagaacttcctgctgggcctcgaaagcgccgctccatctcagaccagcgtgtacttctgcgccagcaaagttggcccaggccagcacaatagccctctgcactttggcaacggcaccagactgacagtgacactcgaggacctgaagaacgtgttcccacctgaggtggccgtgttcgagcctagcgaggccgagatcagccacacccagaaagccaccctcgtgtgcctggctaccggcttctaccccgaccatgtggaactgtcttggtgggtcaacggcaaagaggtgcacagcggcgtgtctaccgacccccagccactgaaagaacagcccgccctgaacgacagccggtactgcctgagcagcagactgagagtgtccgccaccttctggcagaacccccggaaccacttcagatgccaggtgcagttctacggcctgagcgagaacgacgagtggacccaggacagagccaagcccgtgacccagatcgtgtctgccgaagcctggggcagagccgattgcggatcccagagcttcggcctgctggaccccaagctgtgctacctgctggatggcatcctgttcatctacggcgtgatcctgaccgccctgttcctgagagtgaagttcagcagaagcgccgacgcccctgcctaccagcagggacagaaccaactgtacaacgagctgaacctgggcagacgggaagagtacgacgtgctggacaagcggagaggcagggaccctgagatgggcggaaagccccagcggagaaagaacccccaggaaggactgttcaacgaactccagaaagacaagatggccgaagccttcagcgagatcggcatgaagggcgagcggagaagaggcaagggccacgatggcctgttccagggcctgagcaccgccaccaaggacaccttcgacgccctgcacatgcaggccctgcctccaagaagggccaagcgatctggatctggagcaacaaacttctcactactcaaacaagcaggtgacgtggaggagaatcccgggcctactagtatggactggatttggcgcatccttttccttgtcggcgctgctaccggcgcgcattccttcgaagctcagaaagtgacacaggcccagaccgagatcagcgtggtggaaaaagaagatgtgaccctggactgcgtgtacgagacaagggacaccgcctactacctgttctggtacaagcagcctcctagcggcgagctggtgttcctgattagacagccttggtggggcagcagcagaggcatcagcggcagatacagctggaacttccagaagtccaccagcagcttcaacttcaccatcaccgccagccaggtggtggatagcgccgtgtacttttgtgccatgagcgtgcccgatagcagaggccactaccagttcaccttcggcaagggcacaaagctgagcgtgatccctacgcgtatccagaaccctgatcctgccgtgtaccagctgcgggatagcaagagcagcgacaagagcgtgtgtctgttcaccgacttcgacagccagaccaacgtgtcccagagcaaggactccgacgtgtacatcaccgataagaccgtgctggacatgcggagcatggacttcaagagcaactccgccgtggcctggtccaacaagtccgatttcgcctgcgccaacgccttcaacaacagcattatccccgaggacacattcttcccaagccccgagagcagctgcggtacccagagttttgggttgttggaccctaaattgtgctatctgttggacggaatcctgttcatttacggagtgatcctgaccgcattgttcctgcgggttaagttttccagatccgcagacgcacccgcttaccaacaagggcagaaccaactctacaatgaacttaatttggggcggagggaagagtacgacgttctggacaaaaggaggggacgagatcccgagatgggcggaaagcctcagcgaaggaagaatccgcaagaggggctttataacgaactccagaaagataaaatggcagaagcctatagtgagattgggatgaagggagaaaggaggaggggtaaaggtcacgatgggttgtaccaaggattgagcacagccactaaagatacctatgatgcgctccacatgcaggccctgccgccaagataa

SEQ ID NO: 2413 - DNA, 2472 bp, synthetic construct
  source 1..2472: mol_type = other DNA
atggccttaccagtgaccgccttgctcctgccgctggccttgctgctccacgccgccaggccggaattcaatgctggcgtgacccagacacctaagttccgggtgctgaaaaccggccagagcatgacactgctgtgcgcccaggacatgaaccatgagtacatgtattggtacagacaggaccccggcatgggcctgagactgatccactattctggctggggcaaagacaccgccaagggcgaagttcccgatggctacaacgtgtcccggctgaagaagcagaacttcctgctgggcctcgaaagcgccgctccatctcagaccagcgtgtacttctgcgccagcaaagttggcccaggccagcacaatagccctctgcactttggcaacggcaccagactgacagtgacactcgaggacctgaagaacgtgttcccacctgaggtggccgtgttcgagcctagcgaggccgagatcagccacacccagaaagccaccctcgtgtgcctggctaccggcttctaccccgaccatgtggaactgtcttggtgggtcaacggcaaagaggtgcacagcggcgtgtctaccgacccccagccactgaaagaacagcccgccctgaacgacagccggtactgcctgagcagcagactgagagtgtccgccaccttctggcagaacccccggaaccacttcagatgccaggtgcagttctacggcctgagcgagaacgacgagtggacccaggacagagccaagcccgtgacccagatcgtgtctgccgaagcctggggcagagccgattgcggatcccagagcttcggcctgctggaccccaagctgtgctacctgctggatggcatcctgttcatctacggcgtgatcctgaccgccctgttcctgagagtgaagttcagcagaagcgccgacgcccctgcctaccagcagggacagaaccaactgtacaacgagctgaacctgggcagacgggaagagtacgacgtgctggacaagcggagaggcagggaccctgagatgggcggaaagccccagcggagaaagaacccccaggaaggactgttcaacgaactccagaaagacaagatggccgaagccttcagcgagatcggcatgaagggcgagcggagaagaggcaagggccacgatggcctgttccagggcctgagcaccgccaccaaggacaccttcgacgccctgcacatgcaggccctgcctccaagaagggccaagcgatctggatctggagcaacaaacttctcactactcaaacaagcaggtgacgtggaggagaatcccgggcctactagtatggactggatttggcgcatccttttccttgtcggcgctgctaccggcgcgcattccttcgaagctcagaaagtgacacaggcccagaccgagatcagcgtggtggaaaaagaagatgtgaccctggactgcgtgtacgagacaagggacaccgcctactacctgttctggtacaagcagcctcctagcggcgagctggtgttcctgattagacagccttggtggggcagcagcagaggcatcagcggcagatacagctggaacttccagaagtccaccagcagcttcaacttcaccatcaccgccagccaggtggtggatagcgccgtgtacttttgtgccatgagcgtgcccgatagcagaggccactaccagttcaccttcggcaagggcacaaagctgagcgtgatccctacgcgtatccagaaccctgatcctgccgtgtaccagctgcgggatagcaagagcagcgacaagagcgtgtgtctgttcaccgacttcgacagccagaccaacgtgtcccagagcaaggactccgacgtgtacatcaccgataagaccgtgctggacatgcggagcatggacttcaagagcaactccgccgtggcctggtccaacaagtccgatttcgcctgcgccaacgccttcaacaacagcattatccccgaggacacattcttcccaagccccgagagcagctgcggtacccagagcttcggcctgctggaccccaagctgtgctacctgctggatggcatcctgttcatctacggcgtgatcctgaccgccctgttcctgagagtgaagttcagcagaagcgccgacgcccctgcctaccagcagggacagaaccaactgtacaacgagctgaacctgggcagacgggaagagtacgacgtgctggacaagcggagaggcagggaccctgagatgggcggaaagccccagcggagaaagaacccccaggaaggactgtataacgaactccagaaagacaagatggccgaagcctacagcgagatcggcatgaagggcgagcggagaagaggcaagggccacgatggcctgtaccagggcctgagcaccgccaccaaggacacctatgacgccctgcacatgcaggccctgcctccaagataa

SEQ ID NO: 2414 - DNA, 2598 bp, synthetic construct
  source 1..2598: mol_type = other DNA
atggccttaccagtgaccgccttgctcctgccgctggccttgctgctccacgccgccaggccggaattcaatgctggcgtgacccagacacctaagttccgggtgctgaaaaccggccagagcatgacactgctgtgcgcccaggacatgaaccatgagtacatgtattggtacagacaggaccccggcatgggcctgagactgatccactattctggctggggcaaagacaccgccaagggcgaagttcccgatggctacaacgtgtcccggctgaagaagcagaacttcctgctgggcctcgaaagcgccgctccatctcagaccagcgtgtacttctgcgccagcaaagttggcccaggccagcacaatagccctctgcactttggcaacggcaccagactgacagtgacactcgaggacctgaagaacgtgttcccacctgaggtggccgtgttcgagcctagcgaggccgagatcagccacacccagaaagccaccctcgtgtgcctggctaccggcttctaccccgaccatgtggaactgtcttggtgggtcaacggcaaagaggtgcacagcggcgtgtctaccgacccccagccactgaaagaacagcccgccctgaacgacagccggtactgcctgagcagcagactgagagtgtccgccaccttctggcagaacccccggaaccacttcagatgccaggtgcagttctacggcctgagcgagaacgacgagtggacccaggacagagccaagcccgtgacccagatcgtgtctgccgaagcctggggcagagccgattgcggatcccagagcttcggcctgctggaccccaagctgtgctacctgctggatggcatcctgttcatctacggcgtgatcctgaccgccctgttcctgagagtgaagttcagcagaagcgccgacgcccctgcctaccagcagggacagaaccaactgtacaacgagctgaacctgggcagacgggaagagtacgacgtgctggacaagcggagaggcagggaccctgagatgggcggaaagccccagcggagaaagaacccccaggaaggactgttcaacgaactccagaaagacaagatggccgaagccttcagcgagatcggcatgaagggcgagcggagaagaggcaagggccacgatggcctgttccagggcctgagcaccgccaccaaggacaccttcgacgccctgcacatgcaggccctgcctccaagaagggccaagcgatctggatctggagcaacaaacttctcactactcaaacaagcaggtgacgtggaggagaatcccgggcctactagtatggactggatttggcgcatccttttccttgtcggcgctgctaccggcgcgcattccttcgaagctcagaaagtgacacaggcccagaccgagatcagcgtggtggaaaaagaagatgtgaccctggactgcgtgtacgagacaagggacaccgcctactacctgttctggtacaagcagcctcctagcggcgagctggtgttcctgattagacagccttggtggggcagcagcagaggcatcagcggcagatacagctggaacttccagaagtccaccagcagcttcaacttcaccatcaccgccagccaggtggtggatagcgccgtgtacttttgtgccatgagcgtgcccgatagcagaggccactaccagttcaccttcggcaagggcacaaagctgagcgtgatccctacgcgtatccagaaccctgatcctgccgtgtaccagctgcgggatagcaagagcagcgacaagagcgtgtgtctgttcaccgacttcgacagccagaccaacgtgtcccagagcaaggactccgacgtgtacatcaccgataagaccgtgctggacatgcggagcatggacttcaagagcaactccgccgtggcctggtccaacaagtccgatttcgcctgcgccaacgccttcaacaacagcattatccccgaggacacattcttcccaagccccgagagcagctgcggtacccagagcttcggcctgctggaccccaagctgtgctacctgctggatggcatcctgttcatctacggcgtgatcctgaccgccctgttcctgaaacggggcagaaagaaactcctgtatatattcaaacaaccatttatgagaccagtacaaactactcaagaggaagatggctgtagctgccgatttccagaagaagaagaaggaggatgtgaactgagagtgaagttcagcagaagcgccgacgcccctgcctaccagcagggacagaaccaactgtacaacgagctgaacctgggcagacgggaagagtacgacgtgctggacaagcggagaggcagggaccctgagatgggcggaaagccccagcggagaaagaacccccaggaaggactgtataacgaactccagaaagacaagatggccgaagcctacagcgagatcggcatgaagggcgagcggagaagaggcaagggccacgatggcctgtaccagggcctgagcaccgccaccaaggacacctatgacgccctgcacatgcaggccctgcctccaagataa

SEQ ID NO: 2415 - DNA, 2595 bp, synthetic construct
  source 1..2595: mol_type = other DNA
atggccttaccagtgaccgccttgctcctgccgctggccttgctgctccacgccgccaggccggaattcaatgctggcgtgacccagacacctaagttccgggtgctgaaaaccggccagagcatgacactgctgtgcgcccaggacatgaaccatgagtacatgtattggtacagacaggaccccggcatgggcctgagactgatccactattctggctggggcaaagacaccgccaagggcgaagttcccgatggctacaacgtgtcccggctgaagaagcagaacttcctgctgggcctcgaaagcgccgctccatctcagaccagcgtgtacttctgcgccagcaaagttggcccaggccagcacaatagccctctgcactttggcaacggcaccagactgacagtgacactcgaggacctgaagaacgtgttcccacctgaggtggccgtgttcgagcctagcgaggccgagatcagccacacccagaaagccaccctcgtgtgcctggctaccggcttctaccccgaccatgtggaactgtcttggtgggtcaacggcaaagaggtgcacagcggcgtgtctaccgacccccagccactgaaagaacagcccgccctgaacgacagccggtactgcctgagcagcagactgagagtgtccgccaccttctggcagaacccccggaaccacttcagatgccaggtgcagttctacggcctgagcgagaacgacgagtggacccaggacagagccaagcccgtgacccagatcgtgtctgccgaagcctggggcagagccgattgcggatcccagagcttcggcctgctggaccccaagctgtgctacctgctggatggcatcctgttcatctacggcgtgatcctgaccgccctgttcctgagagtgaagttcagcagaagcgccgacgcccctgcctaccagcagggacagaaccaactgtacaacgagctgaacctgggcagacgggaagagtacgacgtgctggacaagcggagaggcagggaccctgagatgggcggaaagccccagcggagaaagaacccccaggaaggactgttcaacgaactccagaaagacaagatggccgaagccttcagcgagatcggcatgaagggcgagcggagaagaggcaagggccacgatggcctgttccagggcctgagcaccgccaccaaggacaccttcgacgccctgcacatgcaggccctgcctccaagaagggccaagcgatctggatctggagcaacaaacttctcactactcaaacaagcaggtgacgtggaggagaatcccgggcctactagtatggactggatttggcgcatccttttccttgtcggcgctgctaccggcgcgcattccttcgaagctcagaaagtgacacaggcccagaccgagatcagcgtggtggaaaaagaagatgtgaccctggactgcgtgtacgagacaagggacaccgcctactacctgttctggtacaagcagcctcctagcggcgagctggtgttcctgattagacagccttggtggggcagcagcagaggcatcagcggcagatacagctggaacttccagaagtccaccagcagcttcaacttcaccatcaccgccagccaggtggtggatagcgccgtgtacttttgtgccatgagcgtgcccgatagcagaggccactaccagttcaccttcggcaagggcacaaagctgagcgtgatccctacgcgtatccagaaccctgatcctgccgtgtaccagctgcgggatagcaagagcagcgacaagagcgtgtgtctgttcaccgacttcgacagccagaccaacgtgtcccagagcaaggactccgacgtgtacatcaccgataagaccgtgctggacatgcggagcatggacttcaagagcaactccgccgtggcctggtccaacaagtccgatttcgcctgcgccaacgccttcaacaacagcattatccccgaggacacattcttcccaagccccgagagcagctgcggtacccagagcttcggcctgctggaccccaagctgtgctacctgctggatggcatcctgttcatctacggcgtgatcctgaccgccctgttcctgaggagtaagaggagcaggctcctgcacagtgactacatgaacatgactccacgccgccccggacccacccgcaagcattaccagccctatgccccaccacgcgacttcgcagcctatcgctccagagtgaagttcagcagaagcgccgacgcccctgcctaccagcagggacagaaccaactgtacaacgagctgaacctgggcagacgggaagagtacgacgtgctggacaagcggagaggcagggaccctgagatgggcggaaagccccagcggagaaagaacccccaggaaggactgtataacgaactccagaaagacaagatggccgaagcctacagcgagatcggcatgaagggcgagcggagaagaggcaagggccacgatggcctgtaccagggcctgagcaccgccaccaaggacacctatgacgccctgcacatgcaggccctgcctccaagataa

SEQ ID NO: 2416 - DNA, 2580 bp, synthetic construct
  source 1..2580: mol_type = other DNA
atggccttaccagtgaccgccttgctcctgccgctggccttgctgctccacgccgccaggccggaattcaatgctggcgtgacccagacacctaagttccgggtgctgaaaaccggccagagcatgacactgctgtgcgcccaggacatgaaccatgagtacatgtattggtacagacaggaccccggcatgggcctgagactgatccactattctggctggggcaaagacaccgccaagggcgaagttcccgatggctacaacgtgtcccggctgaagaagcagaacttcctgctgggcctcgaaagcgccgctccatctcagaccagcgtgtacttctgcgccagcaaagttggcccaggccagcacaatagccctctgcactttggcaacggcaccagactgacagtgacactcgaggacctgaagaacgtgttcccacctgaggtggccgtgttcgagcctagcgaggccgagatcagccacacccagaaagccaccctcgtgtgcctggctaccggcttctaccccgaccatgtggaactgtcttggtgggtcaacggcaaagaggtgcacagcggcgtgtctaccgacccccagccactgaaagaacagcccgccctgaacgacagccggtactgcctgagcagcagactgagagtgtccgccaccttctggcagaacccccggaaccacttcagatgccaggtgcagttctacggcctgagcgagaacgacgagtggacccaggacagagccaagcccgtgacccagatcgtgtctgccgaagcctggggcagagccgattgcggatcccagagcttcggcctgctggaccccaagctgtgctacctgctggatggcatcctgttcatctacggcgtgatcctgaccgccctgttcctgagagtgaagttcagcagaagcgccgacgcccctgcctaccagcagggacagaaccaactgtacaacgagctgaacctgggcagacgggaagagtacgacgtgctggacaagcggagaggcagggaccctgagatgggcggaaagccccagcggagaaagaacccccaggaaggactgttcaacgaactccagaaagacaagatggccgaagccttcagcgagatcggcatgaagggcgagcggagaagaggcaagggccacgatggcctgttccagggcctgagcaccgccaccaaggacaccttcgacgccctgcacatgcaggccctgcctccaagaagggccaagcgatctggatctggagcaacaaacttctcactactcaaacaagcaggtgacgtggaggagaatcccgggcctactagtatggactggatttggcgcatccttttccttgtcggcgctgctaccggcgcgcattccttcgaagctcagaaagtgacacaggcccagaccgagatcagcgtggtggaaaaagaagatgtgaccctggactgcgtgtacgagacaagggacaccgcctactacctgttctggtacaagcagcctcctagcggcgagctggtgttcctgattagacagccttggtggggcagcagcagaggcatcagcggcagatacagctggaacttccagaagtccaccagcagcttcaacttcaccatcaccgccagccaggtggtggatagcgccgtgtacttttgtgccatgagcgtgcccgatagcagaggccactaccagttcaccttcggcaagggcacaaagctgagcgtgatccctacgcgtatccagaaccctgatcctgccgtgtaccagctgcgggatagcaagagcagcgacaagagcgtgtgtctgttcaccgacttcgacagccagaccaacgtgtcccagagcaaggactccgacgtgtacatcaccgataagaccgtgctggacatgcggagcatggacttcaagagcaactccgccgtggcctggtccaacaagtccgatttcgcctgcgccaacgccttcaacaacagcattatccccgaggacacattcttcccaagccccgagagcagctgcggtacccagagcttcggcctgctggaccccaagctgtgctacctgctggatggcatcctgttcatctacggcgtgatcctgaccgccctgttcctgagggaccaaagactgcctcctgacgctcacaaacctccaggcggaggcagcttcagaacccctatccaagaggaacaggctgacgcccacagcaccctggcaaaaattagagtgaagttcagcagaagcgccgacgcccctgcctaccagcagggacagaaccaactgtacaacgagctgaacctgggcagacgggaagagtacgacgtgctggacaagcggagaggcagggaccctgagatgggcggaaagccccagcggagaaagaacccccaggaaggactgtataacgaactccagaaagacaagatggccgaagcctacagcgagatcggcatgaagggcgagcggagaagaggcaagggccacgatggcctgtaccagggcctgagcaccgccaccaaggacacctatgacgccctgcacatgcaggccctgcctccaagataa

SEQ ID NO: 2417 - DNA, 2832 bp, synthetic construct
  source 1..2832: mol_type = other DNA
atggccttaccagtgaccgccttgctcctgccgctggccttgctgctccacgccgccaggccggaattcaatgctggcgtgacccagacacctaagttccgggtgctgaaaaccggccagagcatgacactgctgtgcgcccaggacatgaaccatgagtacatgtattggtacagacaggaccccggcatgggcctgagactgatccactattctggctggggcaaagacaccgccaagggcgaagttcccgatggctacaacgtgtcccggctgaagaagcagaacttcctgctgggcctcgaaagcgccgctccatctcagaccagcgtgtacttctgcgccagcaaagttggcccaggccagcacaatagccctctgcactttggcaacggcaccagactgacagtgacactcgaggacctgaagaacgtgttcccacctgaggtggccgtgttcgagcctagcgaggccgagatcagccacacccagaaagccaccctcgtgtgcctggctaccggcttctaccccgaccatgtggaactgtcttggtgggtcaacggcaaagaggtgcacagcggcgtgtctaccgacccccagccactgaaagaacagcccgccctgaacgacagccggtactgcctgagcagcagactgagagtgtccgccaccttctggcagaacccccggaaccacttcagatgccaggtgcagttctacggcctgagcgagaacgacgagtggacccaggacagagccaagcccgtgacccagatcgtgtctgccgaagcctggggcagagccgattgcggatcccagagcttcggcctgctggaccccaagctgtgctacctgctggatggcatcctgttcatctacggcgtgatcctgaccgccctgttcctgagagtgaagttcagcagaagcgccgacgcccctgcctaccagcagggacagaaccaactgtacaacgagctgaacctgggcagacgggaagagtacgacgtgctggacaagcggagaggcagggaccctgagatgggcggaaagccccagcggagaaagaacccccaggaaggactgttcaacgaactccagaaagacaagatggccgaagccttcagcgagatcggcatgaagggcgagcggagaagaggcaagggccacgatggcctgttccagggcctgagcaccgccaccaaggacaccttcgacgccctgcacatgcaggccctgcctccaagaagggccaagcgatctggatctggagcaacaaacttctcactactcaaacaagcaggtgacgtggaggagaatcccgggcctactagtatggactggatttggcgcatccttttccttgtcggcgctgctaccggcgcgcattccttcgaagctcagaaagtgacacaggcccagaccgagatcagcgtggtggaaaaagaagatgtgaccctggactgcgtgtacgagacaagggacaccgcctactacctgttctggtacaagcagcctcctagcggcgagctggtgttcctgattagacagccttggtggggcagcagcagaggcatcagcggcagatacagctggaacttccagaagtccaccagcagcttcaacttcaccatcaccgccagccaggtggtggatagcgccgtgtacttttgtgccatgagcgtgcccgatagcagaggccactaccagttcaccttcggcaagggcacaaagctgagcgtgatccctacgcgtatccagaaccctgatcctgccgtgtaccagctgcgggatagcaagagcagcgacaagagcgtgtgtctgttcaccgacttcgacagccagaccaacgtgtcccagagcaaggactccgacgtgtacatcaccgataagaccgtgctggacatgcggagcatggacttcaagagcaactccgccgtggcctggtccaacaagtccgatttcgcctgcgccaacgccttcaacaacagcattatccccgaggacacattcttcccaagccccgagagcagctgcggtacccagagcttcggcctgctggaccccaagctgtgctacctgctggatggcatcctgttcatctacggcgtgatcctgaccgccctgttcctgtggcggcggaagcggaaagagaagcagtctgagacaagccccaaagagttcctgaccatctacgaggacgtgaaggacctgaaaacccggcggaaccacgaacaagagcagacctttcctggcggaggcagcaccatctacagcatgatccagagccagagcagcgcccctacaagccaagagcctgcctacacactgtactccctgatccagcctagcagaaagagcggcagccggaagagaaatcacagccccagcttcaacagcacgatctacgaagtgatcggcaagagccagccaaaggctcagaaccctgccagactgagccggaaagagctggaaaacttcgacgtgtacagcagagtgaagttcagcagaagcgccgacgcccctgcctaccagcagggacagaaccaactgtacaacgagctgaacctgggcagacgggaagagtacgacgtgctggacaagcggagaggcagggaccctgagatgggcggaaagccccagcggagaaagaacccccaggaaggactgtataacgaactccagaaagacaagatggccgaagcctacagcgagatcggcatgaagggcgagcggagaagaggcaagggccacgatggcctgtaccagggcctgagcaccgccaccaaggacacctatgacgccctgcacatgcaggccctgcctccaagataa

SEQ ID NO: 2418 - DNA, 2595 bp, synthetic construct
  source 1..2595: mol_type = other DNA
atggccttaccagtgaccgccttgctcctgccgctggccttgctgctccacgccgccaggccggaattcaatgctggcgtgacccagacacctaagttccgggtgctgaaaaccggccagagcatgacactgctgtgcgcccaggacatgaaccatgagtacatgtattggtacagacaggaccccggcatgggcctgagactgatccactattctggctggggcaaagacaccgccaagggcgaagttcccgatggctacaacgtgtcccggctgaagaagcagaacttcctgctgggcctcgaaagcgccgctccatctcagaccagcgtgtacttctgcgccagcaaagttggcccaggccagcacaatagccctctgcactttggcaacggcaccagactgacagtgacactcgaggacctgaagaacgtgttcccacctgaggtggccgtgttcgagcctagcgaggccgagatcagccacacccagaaagccaccctcgtgtgcctggctaccggcttctaccccgaccatgtggaactgtcttggtgggtcaacggcaaagaggtgcacagcggcgtgtctaccgacccccagccactgaaagaacagcccgccctgaacgacagccggtactgcctgagcagcagactgagagtgtccgccaccttctggcagaacccccggaaccacttcagatgccaggtgcagttctacggcctgagcgagaacgacgagtggacccaggacagagccaagcccgtgacccagatcgtgtctgccgaagcctggggcagagccgattgcggatcccagagcttcggcctgctggaccccaagctgtgctacctgctggatggcatcctgttcatctacggcgtgatcctgaccgccctgttcctgagagtgaagttcagcagaagcgccgacgcccctgcctaccagcagggacagaaccaactgtacaacgagctgaacctgggcagacgggaagagtacgacgtgctggacaagcggagaggcagggaccctgagatgggcggaaagccccagcggagaaagaacccccaggaaggactgttcaacgaactccagaaagacaagatggccgaagccttcagcgagatcggcatgaagggcgagcggagaagaggcaagggccacgatggcctgttccagggcctgagcaccgccaccaaggacaccttcgacgccctgcacatgcaggccctgcctccaagaagggccaagcgatctggatctggagcaacaaacttctcactactcaaacaagcaggtgacgtggaggagaatcccgggcctactagtatggactggatttggcgcatccttttccttgtcggcgctgctaccggcgcgcattccttcgaagctcagaaagtgacacaggcccagaccgagatcagcgtggtggaaaaagaagatgtgaccctggactgcgtgtacgagacaagggacaccgcctactacctgttctggtacaagcagcctcctagcggcgagctggtgttcctgattagacagccttggtggggcagcagcagaggcatcagcggcagatacagctggaacttccagaagtccaccagcagcttcaacttcaccatcaccgccagccaggtggtggatagcgccgtgtacttttgtgccatgagcgtgcccgatagcagaggccactaccagttcaccttcggcaagggcacaaagctgagcgtgatccctacgcgtatccagaaccctgatcctgccgtgtaccagctgcgggatagcaagagcagcgacaagagcgtgtgtctgttcaccgacttcgacagccagaccaacgtgtcccagagcaaggactccgacgtgtacatcaccgataagaccgtgctggacatgcggagcatggacttcaagagcaactccgccgtggcctggtccaacaagtccgatttcgcctgcgccaacgccttcaacaacagcattatccccgaggacacattcttcccaagccccgagagcagctgcggtacccagagttttgggttgttggaccctaaattgtgctatctgttggacggaatcctgttcatttacggagtgatcctgaccgcattgttcctgaggagcaagcggtcacggctgctccacagcgattacatgaatatgacaccacgaagaccgggtcctactcgcaaacactaccaaccctacgcacctccccgcgactttgcagcgtaccgatctcgggttaagttttccagatccgcagacgcacccgcttaccaacaagggcagaaccaactctacaatgaacttaatttggggcggagggaagagtacgacgttctggacaaaaggaggggacgagatcccgagatgggcggaaagcctcagcgaaggaagaatccgcaagaggggctttataacgaactccagaaagataaaatggcagaagcctatagtgagattgggatgaagggagaaaggaggaggggtaaaggtcacgatgggttgtaccaaggattgagcacagccactaaagatacctatgatgcgctccacatgcaggccctgccgccaagataa

SEQ ID NO: 2419 - DNA, 2598 bp, synthetic construct
  source 1..2598: mol_type = other DNA
atggccttaccagtgaccgccttgctcctgccgctggccttgctgctccacgccgccaggccggaattcaatgctggcgtgacccagacacctaagttccgggtgctgaaaaccggccagagcatgacactgctgtgcgcccaggacatgaaccatgagtacatgtattggtacagacaggaccccggcatgggcctgagactgatccactattctggctggggcaaagacaccgccaagggcgaagttcccgatggctacaacgtgtcccggctgaagaagcagaacttcctgctgggcctcgaaagcgccgctccatctcagaccagcgtgtacttctgcgccagcaaagttggcccaggccagcacaatagccctctgcactttggcaacggcaccagactgacagtgacactcgaggacctgaagaacgtgttcccacctgaggtggccgtgttcgagcctagcgaggccgagatcagccacacccagaaagccaccctcgtgtgcctggctaccggcttctaccccgaccatgtggaactgtcttggtgggtcaacggcaaagaggtgcacagcggcgtgtctaccgacccccagccactgaaagaacagcccgccctgaacgacagccggtactgcctgagcagcagactgagagtgtccgccaccttctggcagaacccccggaaccacttcagatgccaggtgcagttctacggcctgagcgagaacgacgagtggacccaggacagagccaagcccgtgacccagatcgtgtctgccgaagcctggggcagagccgattgcggatcccagagcttcggcctgctggaccccaagctgtgctacctgctggatggcatcctgttcatctacggcgtgatcctgaccgccctgttcctgagagtgaagttcagcagaagcgccgacgcccctgcctaccagcagggacagaaccaactgtacaacgagctgaacctgggcagacgggaagagtacgacgtgctggacaagcggagaggcagggaccctgagatgggcggaaagccccagcggagaaagaacccccaggaaggactgttcaacgaactccagaaagacaagatggccgaagccttcagcgagatcggcatgaagggcgagcggagaagaggcaagggccacgatggcctgttccagggcctgagcaccgccaccaaggacaccttcgacgccctgcacatgcaggccctgcctccaagaagggccaagcgatctggatctggagcaacaaacttctcactactcaaacaagcaggtgacgtggaggagaatcccgggcctactagtatggactggatttggcgcatccttttccttgtcggcgctgctaccggcgcgcattccttcgaagctcagaaagtgacacaggcccagaccgagatcagcgtggtggaaaaagaagatgtgaccctggactgcgtgtacgagacaagggacaccgcctactacctgttctggtacaagcagcctcctagcggcgagctggtgttcctgattagacagccttggtggggcagcagcagaggcatcagcggcagatacagctggaacttccagaagtccaccagcagcttcaacttcaccatcaccgccagccaggtggtggatagcgccgtgtacttttgtgccatgagcgtgcccgatagcagaggccactaccagttcaccttcggcaagggcacaaagctgagcgtgatccctacgcgtatccagaaccctgatcctgccgtgtaccagctgcgggatagcaagagcagcgacaagagcgtgtgtctgttcaccgacttcgacagccagaccaacgtgtcccagagcaaggactccgacgtgtacatcaccgataagaccgtgctggacatgcggagcatggacttcaagagcaactccgccgtggcctggtccaacaagtccgatttcgcctgcgccaacgccttcaacaacagcattatccccgaggacacattcttcccaagccccgagagcagctgcggtacccagagttttgggttgttggaccctaaattgtgctatctgttggacggaatcctgttcatttacggagtgatcctgaccgcattgttcctgaagagaggccggaagaagctgctgtacatcttcaagcagcctttcatgcggcccgtgcagaccacccaggaagaggacggctgctcctgccggttccccgaggaagaagaaggcggctgcgagctgcgggttaagttttccagatccgcagacgcacccgcttaccaacaagggcagaaccaactctacaatgaacttaatttggggcggagggaagagtacgacgttctggacaaaaggaggggacgagatcccgagatgggcggaaagcctcagcgaaggaagaatccgcaagaggggctttataacgaactccagaaagataaaatggcagaagcctatagtgagattgggatgaagggagaaaggaggaggggtaaaggtcacgatgggttgtaccaaggattgagcacagccactaaagatacctatgatgcgctccacatgcaggccctgccgccaagataa

SEQ ID NO: 2420 - DNA, 2472 bp, synthetic construct
  source 1..2472: mol_type = other DNA
atggccttaccagtgaccgccttgctcctgccgctggccttgctgctccacgccgccaggccggaattcaatgctggcgtgacccagacacctaagttccgggtgctgaaaaccggccagagcatgacactgctgtgcgcccaggacatgaaccatgagtacatgtattggtacagacaggaccccggcatgggcctgagactgatccactattctggctggggcaaagacaccgccaagggcgaagttcccgatggctacaacgtgtcccggctgaagaagcagaacttcctgctgggcctcgaaagcgccgctccatctcagaccagcgtgtacttctgcgccagcaaagttggcccaggccagcacaatagccctctgcactttggcaacggcaccagactgacagtgacactcgaggacctgaagaacgtgttcccacctgaggtggccgtgttcgagcctagcgaggccgagatcagccacacccagaaagccaccctcgtgtgcctggctaccggcttctaccccgaccatgtggaactgtcttggtgggtcaacggcaaagaggtgcacagcggcgtgtctaccgacccccagccactgaaagaacagcccgccctgaacgacagccggtactgcctgagcagcagactgagagtgtccgccaccttctggcagaacccccggaaccacttcagatgccaggtgcagttctacggcctgagcgagaacgacgagtggacccaggacagagccaagcccgtgacccagatcgtgtctgccgaagcctggggcagagccgattgcggatcccagagcttcggcctgctggaccccaagctgtgctacctgctggatggcatcctgttcatctacggcgtgatcctgaccgccctgttcctgagagtgaagttcagcagaagcgccgacgcccctgcctaccagcagggacagaaccaactgtacaacgagctgaacctgggcagacgggaagagtacgacgtgctggacaagcggagaggcagggaccctgagatgggcggaaagccccagcggagaaagaacccccaggaaggactgttcaacgaactccagaaagacaagatggccgaagccttcagcgagatcggcatgaagggcgagcggagaagaggcaagggccacgatggcctgttccagggcctgagcaccgccaccaaggacaccttcgacgccctgcacatgcaggccctgcctccaagaagggccaagcgatctggatctggagcaacaaacttctcactactcaaacaagcaggtgacgtggaggagaatcccgggcctactagtatggactggatttggcgcatccttttccttgtcggcgctgctaccggcgcgcattccttcgaagctcagaaagtgacacaggcccagaccgagatcagcgtggtggaaaaagaagatgtgaccctggactgcgtgtacgagacaagggacaccgcctactacctgttctggtacaagcagcctcctagcggcgagctggtgttcctgattagacagccttggtggggcagcagcagaggcatcagcggcagatacagctggaacttccagaagtccaccagcagcttcaacttcaccatcaccgccagccaggtggtggatagcgccgtgtacttttgtgccatgagcgtgcccgatagcagaggccactaccagttcaccttcggcaagggcacaaagctgagcgtgatccctacgcgtatccagaaccctgatcctgccgtgtaccagctgcgggatagcaagagcagcgacaagagcgtgtgtctgttcaccgacttcgacagccagaccaacgtgtcccagagcaaggactccgacgtgtacatcaccgataagaccgtgctggacatgcggagcatggacttcaagagcaactccgccgtggcctggtccaacaagtccgatttcgcctgcgccaacgccttcaacaacagcattatccccgaggacacattcttcccaagccccgagagcagctgcggtacccagagcttcggcctgctggaccccaagctgagctacctgctggatggcatcctgttcatctacggcgtgatcctgaccgccctgttcctgagagtgaagttcagcagaagcgccgacgcccctgcctaccagcagggacagaaccaactgtacaacgagctgaacctgggcagacgggaagagtacgacgtgctggacaagcggagaggcagggaccctgagatgggcggaaagccccagcggagaaagaacccccaggaaggactgtataacgaactccagaaagacaagatggccgaagcctacagcgagatcggcatgaagggcgagcggagaagaggcaagggccacgatggcctgtaccagggcctgagcaccgccaccaaggacacctatgacgccctgcacatgcaggccctgcctccaagataa

SEQ ID NO: 2421 - DNA, 2472 bp, synthetic construct
  source 1..2472: mol_type = other DNA
atggccttaccagtgaccgccttgctcctgccgctggccttgctgctccacgccgccaggccggaattcaatgctggcgtgacccagacacctaagttccgggtgctgaaaaccggccagagcatgacactgctgtgcgcccaggacatgaaccatgagtacatgtattggtacagacaggaccccggcatgggcctgagactgatccactattctggctggggcaaagacaccgccaagggcgaagttcccgatggctacaacgtgtcccggctgaagaagcagaacttcctgctgggcctcgaaagcgccgctccatctcagaccagcgtgtacttctgcgccagcaaagttggcccaggccagcacaatagccctctgcactttggcaacggcaccagactgacagtgacactcgaggacctgaagaacgtgttcccacctgaggtggccgtgttcgagcctagcgaggccgagatcagccacacccagaaagccaccctcgtgtgcctggctaccggcttctaccccgaccatgtggaactgtcttggtgggtcaacggcaaagaggtgcacagcggcgtgtctaccgacccccagccactgaaagaacagcccgccctgaacgacagccggtactgcctgagcagcagactgagagtgtccgccaccttctggcagaacccccggaaccacttcagatgccaggtgcagttctacggcctgagcgagaacgacgagtggacccaggacagagccaagcccgtgacccagatcgtgtctgccgaagcctggggcagagccgattgcggatcccagagcttcggcctgctggaccccaagctgtgctacctgctggatggcatcctgttcatctacggcgtgatcctgaccgccctgttcctgagagtgaagttcagcagaagcgccgacgcccctgcctaccagcagggacagaaccaactgtacaacgagctgaacctgggcagacgggaagagtacgacgtgctggacaagcggagaggcagggaccctgagatgggcggaaagccccagcggagaaagaacccccaggaaggactgttcaacgaactccagaaagacaagatggccgaagccttcagcgagatcggcatgaagggcgagcggagaagaggcaagggccacgatggcctgttccagggcctgagcaccgccaccaaggacaccttcgacgccctgcacatgcaggccctgcctccaagaagggccaagcgatctggatctggagcaacaaacttctcactactcaaacaagcaggtgacgtggaggagaatcccgggcctactagtatggactggatttggcgcatccttttccttgtcggcgctgctaccggcgcgcattccttcgaagctcagaaagtgacacaggcccagaccgagatcagcgtggtggaaaaagaagatgtgaccctggactgcgtgtacgagacaagggacaccgcctactacctgttctggtacaagcagcctcctagcggcgagctggtgttcctgattagacagccttggtggggcagcagcagaggcatcagcggcagatacagctggaacttccagaagtccaccagcagcttcaacttcaccatcaccgccagccaggtggtggatagcgccgtgtacttttgtgccatgagcgtgcccgatagcagaggccactaccagttcaccttcggcaagggcacaaagctgagcgtgatccctacgcgtatccagaaccctgatcctgccgtgtaccagctgcgggatagcaagagcagcgacaagagcgtgtgtctgttcaccgacttcgacagccagaccaacgtgtcccagagcaaggactccgacgtgtacatcaccgataagaccgtgctggacatgcggagcatggacttcaagagcaactccgccgtggcctggtccaacaagtccgatttcgcctgcgccaacgccttcaacaacagcattatccccgaggacacattcttcccaagccccgagagcagctgcggtacccagagttttgggttgttggaccctaaattgagctatctgttggacggaatcctgttcatttacggagtgatcctgaccgcattgttcctgcgggttaagttttccagatccgcagacgcacccgcttaccaacaagggcagaaccaactctacaatgaacttaatttggggcggagggaagagtacgacgttctggacaaaaggaggggacgagatcccgagatgggcggaaagcctcagcgaaggaagaatccgcaagaggggctttataacgaactccagaaagataaaatggcagaagcctatagtgagattgggatgaagggagaaaggaggaggggtaaaggtcacgatgggttgtaccaaggattgagcacagccactaaagatacctatgatgcgctccacatgcaggccctgccgccaagataa

SEQ ID NO: 2422 - DNA, 2472 bp, synthetic construct
  source 1..2472: mol_type = other DNA
atggccttaccagtgaccgccttgctcctgccgctggccttgctgctccacgccgccaggccggaattcaatgctggcgtgacccagacacctaagttccgggtgctgaaaaccggccagagcatgacactgctgtgcgcccaggacatgaaccatgagtacatgtattggtacagacaggaccccggcatgggcctgagactgatccactattctggctggggcaaagacaccgccaagggcgaagttcccgatggctacaacgtgtcccggctgaagaagcagaacttcctgctgggcctcgaaagcgccgctccatctcagaccagcgtgtacttctgcgccagcaaagttggcccaggccagcacaatagccctctgcactttggcaacggcaccagactgacagtgacactcgaggacctgaagaacgtgttcccacctgaggtggccgtgttcgagcctagcgaggccgagatcagccacacccagaaagccaccctcgtgtgcctggctaccggcttctaccccgaccatgtggaactgtcttggtgggtcaacggcaaagaggtgcacagcggcgtgtctaccgacccccagccactgaaagaacagcccgccctgaacgacagccggtactgcctgagcagcagactgagagtgtccgccaccttctggcagaacccccggaaccacttcagatgccaggtgcagttctacggcctgagcgagaacgacgagtggacccaggacagagccaagcccgtgacccagatcgtgtctgccgaagcctggggcagagccgattgcggatcccagagcttcggcctgctggaccccaagctgagctacctgctggatggcatcctgttcatctacggcgtgatcctgaccgccctgttcctgagagtgaagttcagcagaagcgccgacgcccctgcctaccagcagggacagaaccaactgtacaacgagctgaacctgggcagacgggaagagtacgacgtgctggacaagcggagaggcagggaccctgagatgggcggaaagccccagcggagaaagaacccccaggaaggactgtataacgaactccagaaagacaagatggccgaagcctacagcgagatcggcatgaagggcgagcggagaagaggcaagggccacgatggcctgtaccagggcctgagcaccgccaccaaggacacctatgacgccctgcacatgcaggccctgcctccaagaagggccaagcgatctggatctggagcaacaaacttctcactactcaaacaagcaggtgacgtggaggagaatcccgggcctactagtatggactggatttggcgcatccttttccttgtcggcgctgctaccggcgcgcattccttcgaagctcagaaagtgacacaggcccagaccgagatcagcgtggtggaaaaagaagatgtgaccctggactgcgtgtacgagacaagggacaccgcctactacctgttctggtacaagcagcctcctagcggcgagctggtgttcctgattagacagccttggtggggcagcagcagaggcatcagcggcagatacagctggaacttccagaagtccaccagcagcttcaacttcaccatcaccgccagccaggtggtggatagcgccgtgtacttttgtgccatgagcgtgcccgatagcagaggccactaccagttcaccttcggcaagggcacaaagctgagcgtgatccctacgcgtatccagaaccctgatcctgccgtgtaccagctgcgggatagcaagagcagcgacaagagcgtgtgtctgttcaccgacttcgacagccagaccaacgtgtcccagagcaaggactccgacgtgtacatcaccgataagaccgtgctggacatgcggagcatggacttcaagagcaactccgccgtggcctggtccaacaagtccgatttcgcctgcgccaacgccttcaacaacagcattatccccgaggacacattcttcccaagccccgagagcagctgcggtacccagagttttgggttgttggaccctaaattgagctatctgttggacggaatcctgttcatttacggagtgatcctgaccgcattgttcctgcgggttaagttttccagatccgcagacgcacccgcttaccaacaagggcagaaccaactctacaatgaacttaatttggggcggagggaagagtacgacgttctggacaaaaggaggggacgagatcccgagatgggcggaaagcctcagcgaaggaagaatccgcaagaggggctttataacgaactccagaaagataaaatggcagaagcctatagtgagattgggatgaagggagaaaggaggaggggtaaaggtcacgatgggttgtaccaaggattgagcacagccactaaagatacctatgatgcgctccacatgcaggccctgccgccaagataa

SEQ ID NO: 2423 - DNA, 2184 bp, synthetic construct
  source 1..2184: mol_type = other DNA
atggccttaccagtgaccgccttgctcctgccgctggccttgctgctccacgccgccaggccggaattcaatgctggcgtgacccagacacctaagttccgggtgctgaaaaccggccagagcatgacactgctgtgcgcccaggacatgaaccatgagtacatgtattggtacagacaggaccccggcatgggcctgagactgatccactattctggctggggcaaagacaccgccaagggcgaagttcccgatggctacaacgtgtcccggctgaagaagcagaacttcctgctgggcctcgaaagcgccgctccatctcagaccagcgtgtacttctgcgccagcaaagttggcccaggccagcacaatagccctctgcactttggcaacggcaccagactgacagtgacactcgaggacctgaagaacgtgttcccacctgaggtggccgtgttcgagcctagcgaggccgagatcagccacacccagaaagccaccctcgtgtgcctggctaccggcttctaccccgaccatgtggaactgtcttggtgggtcaacggcaaagaggtgcacagcggcgtgtctaccgacccccagccactgaaagaacagcccgccctgaacgacagccggtactgcctgagcagcagactgagagtgtccgccaccttctggcagaacccccggaaccacttcagatgccaggtgcagttctacggcctgagcgagaacgacgagtggacccaggacagagccaagcccgtgacccagatcgtgtctgccgaagcctggggcagagccgattgcggatccacaacacctggcgagagaagtagcctgcctgccttctatcctggcaccagcggctcttgttctggctgtggatctctgagcctgcctctgctggctggactggttgctgctgatgctgtggcctctctgctgattgtgggagccgtgttcctgtgcgccagacctagaagaagccccgctcaagaggacggcaaggtgtacatcaacatgcccggcagaggaagggccaagcgatctggatctggagcaacaaacttctcactactcaaacaagcaggtgacgtggaggagaatcccgggcctactagtatggactggatttggcgcatccttttccttgtcggcgctgctaccggcgcgcattccttcgaagctcagaaagtgacacaggcccagaccgagatcagcgtggtggaaaaagaagatgtgaccctggactgcgtgtacgagacaagggacaccgcctactacctgttctggtacaagcagcctcctagcggcgagctggtgttcctgattagacagccttggtggggcagcagcagaggcatcagcggcagatacagctggaacttccagaagtccaccagcagcttcaacttcaccatcaccgccagccaggtggtggatagcgccgtgtacttttgtgccatgagcgtgcccgatagcagaggccactaccagttcaccttcggcaagggcacaaagctgagcgtgatccctacgcgtatccagaaccctgatcctgccgtgtaccagctgcgggatagcaagagcagcgacaagagcgtgtgtctgttcaccgacttcgacagccagaccaacgtgtcccagagcaaggactccgacgtgtacatcaccgataagaccgtgctggacatgcggagcatggacttcaagagcaactccgccgtggcctggtccaacaagtccgatttcgcctgcgccaacgccttcaacaacagcattatccccgaggacacattcttcccaagccccgagagcagctgcggtaccacaacacctggcgagagaagtagcctgcctgccttctatcctggcaccagcggctcttgttctggctgtggatctctgagcctgcctctgctggctggactggttgctgctgatgctgtggcctctctgctgattgtgggagccgtgttcaaacggggcagaaagaaactcctgtatatattcaaacaaccatttatgagaccagtacaaactactcaagaggaagatggctgtagctgccgatttccagaagaagaagaaggaggatgtgaactgctgtgcgccagacctagaagaagccccgctcaagaggacggcaaggtgtacatcaacatgcccggcagaggataa

SEQ ID NO: 2424 - DNA, 2181 bp, synthetic construct
  source 1..2181: mol_type = other DNA
atggccttaccagtgaccgccttgctcctgccgctggccttgctgctccacgccgccaggccggaattcaatgctggcgtgacccagacacctaagttccgggtgctgaaaaccggccagagcatgacactgctgtgcgcccaggacatgaaccatgagtacatgtattggtacagacaggaccccggcatgggcctgagactgatccactattctggctggggcaaagacaccgccaagggcgaagttcccgatggctacaacgtgtcccggctgaagaagcagaacttcctgctgggcctcgaaagcgccgctccatctcagaccagcgtgtacttctgcgccagcaaagttggcccaggccagcacaatagccctctgcactttggcaacggcaccagactgacagtgacactcgaggacctgaagaacgtgttcccacctgaggtggccgtgttcgagcctagcgaggccgagatcagccacacccagaaagccaccctcgtgtgcctggctaccggcttctaccccgaccatgtggaactgtcttggtgggtcaacggcaaagaggtgcacagcggcgtgtctaccgacccccagccactgaaagaacagcccgccctgaacgacagccggtactgcctgagcagcagactgagagtgtccgccaccttctggcagaacccccggaaccacttcagatgccaggtgcagttctacggcctgagcgagaacgacgagtggacccaggacagagccaagcccgtgacccagatcgtgtctgccgaagcctggggcagagccgattgcggatccacaacacctggcgagagaagtagcctgcctgccttctatcctggcaccagcggctcttgttctggctgtggatctctgagcctgcctctgctggctggactggttgctgctgatgctgtggcctctctgctgattgtgggagccgtgttcctgtgcgccagacctagaagaagccccgctcaagaggacggcaaggtgtacatcaacatgcccggcagaggaagggccaagcgatctggatctggagcaacaaacttctcactactcaaacaagcaggtgacgtggaggagaatcccgggcctactagtatggactggatttggcgcatccttttccttgtcggcgctgctaccggcgcgcattccttcgaagctcagaaagtgacacaggcccagaccgagatcagcgtggtggaaaaagaagatgtgaccctggactgcgtgtacgagacaagggacaccgcctactacctgttctggtacaagcagcctcctagcggcgagctggtgttcctgattagacagccttggtggggcagcagcagaggcatcagcggcagatacagctggaacttccagaagtccaccagcagcttcaacttcaccatcaccgccagccaggtggtggatagcgccgtgtacttttgtgccatgagcgtgcccgatagcagaggccactaccagttcaccttcggcaagggcacaaagctgagcgtgatccctacgcgtatccagaaccctgatcctgccgtgtaccagctgcgggatagcaagagcagcgacaagagcgtgtgtctgttcaccgacttcgacagccagaccaacgtgtcccagagcaaggactccgacgtgtacatcaccgataagaccgtgctggacatgcggagcatggacttcaagagcaactccgccgtggcctggtccaacaagtccgatttcgcctgcgccaacgccttcaacaacagcattatccccgaggacacattcttcccaagccccgagagcagctgcggtaccacaacacctggcgagagaagtagcctgcctgccttctatcctggcaccagcggctcttgttctggctgtggatctctgagcctgcctctgctggctggactggttgctgctgatgctgtggcctctctgctgattgtgggagccgtgttcaggagtaagaggagcaggctcctgcacagtgactacatgaacatgactccacgccgccccggacccacccgcaagcattaccagccctatgccccaccacgcgacttcgcagcctatcgctccctgtgcgccagacctagaagaagccccgctcaagaggacggcaaggtgtacatcaacatgcccggcagaggataa

SEQ ID NO: 2425 - DNA, 2166 bp, synthetic construct
  source 1..2166: mol_type = other DNA
atggccttaccagtgaccgccttgctcctgccgctggccttgctgctccacgccgccaggccggaattcaatgctggcgtgacccagacacctaagttccgggtgctgaaaaccggccagagcatgacactgctgtgcgcccaggacatgaaccatgagtacatgtattggtacagacaggaccccggcatgggcctgagactgatccactattctggctggggcaaagacaccgccaagggcgaagttcccgatggctacaacgtgtcccggctgaagaagcagaacttcctgctgggcctcgaaagcgccgctccatctcagaccagcgtgtacttctgcgccagcaaagttggcccaggccagcacaatagccctctgcactttggcaacggcaccagactgacagtgacactcgaggacctgaagaacgtgttcccacctgaggtggccgtgttcgagcctagcgaggccgagatcagccacacccagaaagccaccctcgtgtgcctggctaccggcttctaccccgaccatgtggaactgtcttggtgggtcaacggcaaagaggtgcacagcggcgtgtctaccgacccccagccactgaaagaacagcccgccctgaacgacagccggtactgcctgagcagcagactgagagtgtccgccaccttctggcagaacccccggaaccacttcagatgccaggtgcagttctacggcctgagcgagaacgacgagtggacccaggacagagccaagcccgtgacccagatcgtgtctgccgaagcctggggcagagccgattgcggatccacaacacctggcgagagaagtagcctgcctgccttctatcctggcaccagcggctcttgttctggctgtggatctctgagcctgcctctgctggctggactggttgctgctgatgctgtggcctctctgctgattgtgggagccgtgttcctgtgcgccagacctagaagaagccccgctcaagaggacggcaaggtgtacatcaacatgcccggcagaggaagggccaagcgatctggatctggagcaacaaacttctcactactcaaacaagcaggtgacgtggaggagaatcccgggcctactagtatggactggatttggcgcatccttttccttgtcggcgctgctaccggcgcgcattccttcgaagctcagaaagtgacacaggcccagaccgagatcagcgtggtggaaaaagaagatgtgaccctggactgcgtgtacgagacaagggacaccgcctactacctgttctggtacaagcagcctcctagcggcgagctggtgttcctgattagacagccttggtggggcagcagcagaggcatcagcggcagatacagctggaacttccagaagtccaccagcagcttcaacttcaccatcaccgccagccaggtggtggatagcgccgtgtacttttgtgccatgagcgtgcccgatagcagaggccactaccagttcaccttcggcaagggcacaaagctgagcgtgatccctacgcgtatccagaaccctgatcctgccgtgtaccagctgcgggatagcaagagcagcgacaagagcgtgtgtctgttcaccgacttcgacagccagaccaacgtgtcccagagcaaggactccgacgtgtacatcaccgataagaccgtgctggacatgcggagcatggacttcaagagcaactccgccgtggcctggtccaacaagtccgatttcgcctgcgccaacgccttcaacaacagcattatccccgaggacacattcttcccaagccccgagagcagctgcggtaccacaacacctggcgagagaagtagcctgcctgccttctatcctggcaccagcggctcttgttctggctgtggatctctgagcctgcctctgctggctggactggttgctgctgatgctgtggcctctctgctgattgtgggagccgtgttcagggaccaaagactgcctcctgacgctcacaaacctccaggcggaggcagcttcagaacccctatccaagaggaacaggctgacgcccacagcaccctggcaaaaattctgtgcgccagacctagaagaagccccgctcaagaggacggcaaggtgtacatcaacatgcccggcagaggataa

SEQ ID NO: 2426 - DNA, 2418 bp, synthetic construct
  source 1..2418: mol_type = other DNA
atggccttaccagtgaccgccttgctcctgccgctggccttgctgctccacgccgccaggccggaattcaatgctggcgtgacccagacacctaagttccgggtgctgaaaaccggccagagcatgacactgctgtgcgcccaggacatgaaccatgagtacatgtattggtacagacaggaccccggcatgggcctgagactgatccactattctggctggggcaaagacaccgccaagggcgaagttcccgatggctacaacgtgtcccggctgaagaagcagaacttcctgctgggcctcgaaagcgccgctccatctcagaccagcgtgtacttctgcgccagcaaagttggcccaggccagcacaatagccctctgcactttggcaacggcaccagactgacagtgacactcgaggacctgaagaacgtgttcccacctgaggtggccgtgttcgagcctagcgaggccgagatcagccacacccagaaagccaccctcgtgtgcctggctaccggcttctaccccgaccatgtggaactgtcttggtgggtcaacggcaaagaggtgcacagcggcgtgtctaccgacccccagccactgaaagaacagcccgccctgaacgacagccggtactgcctgagcagcagactgagagtgtccgccaccttctggcagaacccccggaaccacttcagatgccaggtgcagttctacggcctgagcgagaacgacgagtggacccaggacagagccaagcccgtgacccagatcgtgtctgccgaagcctggggcagagccgattgcggatccacaacacctggcgagagaagtagcctgcctgccttctatcctggcaccagcggctcttgttctggctgtggatctctgagcctgcctctgctggctggactggttgctgctgatgctgtggcctctctgctgattgtgggagccgtgttcctgtgcgccagacctagaagaagccccgctcaagaggacggcaaggtgtacatcaacatgcccggcagaggaagggccaagcgatctggatctggagcaacaaacttctcactactcaaacaagcaggtgacgtggaggagaatcccgggcctactagtatggactggatttggcgcatccttttccttgtcggcgctgctaccggcgcgcattccttcgaagctcagaaagtgacacaggcccagaccgagatcagcgtggtggaaaaagaagatgtgaccctggactgcgtgtacgagacaagggacaccgcctactacctgttctggtacaagcagcctcctagcggcgagctggtgttcctgattagacagccttggtggggcagcagcagaggcatcagcggcagatacagctggaacttccagaagtccaccagcagcttcaacttcaccatcaccgccagccaggtggtggatagcgccgtgtacttttgtgccatgagcgtgcccgatagcagaggccactaccagttcaccttcggcaagggcacaaagctgagcgtgatccctacgcgtatccagaaccctgatcctgccgtgtaccagctgcgggatagcaagagcagcgacaagagcgtgtgtctgttcaccgacttcgacagccagaccaacgtgtcccagagcaaggactccgacgtgtacatcaccgataagaccgtgctggacatgcggagcatggacttcaagagcaactccgccgtggcctggtccaacaagtccgatttcgcctgcgccaacgccttcaacaacagcattatccccgaggacacattcttcccaagccccgagagcagctgcggtaccacaacacctggcgagagaagtagcctgcctgccttctatcctggcaccagcggctcttgttctggctgtggatctctgagcctgcctctgctggctggactggttgctgctgatgctgtggcctctctgctgattgtgggagccgtgttctggcggcggaagcggaaagagaagcagtctgagacaagccccaaagagttcctgaccatctacgaggacgtgaaggacctgaaaacccggcggaaccacgaacaagagcagacctttcctggcggaggcagcaccatctacagcatgatccagagccagagcagcgcccctacaagccaagagcctgcctacacactgtactccctgatccagcctagcagaaagagcggcagccggaagagaaatcacagccccagcttcaacagcacgatctacgaagtgatcggcaagagccagccaaaggctcagaaccctgccagactgagccggaaagagctggaaaacttcgacgtgtacagcctgtgcgccagacctagaagaagccccgctcaagaggacggcaaggtgtacatcaacatgcccggcagaggataa

SEQ ID NO: 2427 - DNA, 2271 bp, synthetic construct
  source 1..2271: mol_type = other DNA
atggccttaccagtgaccgccttgctcctgccgctggccttgctgctccacgccgccaggccggaattcaatgctggcgtgacccagacacctaagttccgggtgctgaaaaccggccagagcatgacactgctgtgcgcccaggacatgaaccatgagtacatgtattggtacagacaggaccccggcatgggcctgagactgatccactattctggctggggcaaagacaccgccaagggcgaagttcccgatggctacaacgtgtcccggctgaagaagcagaacttcctgctgggcctcgaaagcgccgctccatctcagaccagcgtgtacttctgcgccagcaaagttggcccaggccagcacaatagccctctgcactttggcaacggcaccagactgacagtgacactcgaggacctgaagaacgtgttcccacctgaggtggccgtgttcgagcctagcgaggccgagatcagccacacccagaaagccaccctcgtgtgcctggctaccggcttctaccccgaccatgtggaactgtcttggtgggtcaacggcaaagaggtgcacagcggcgtgtctaccgacccccagccactgaaagaacagcccgccctgaacgacagccggtactgcctgagcagcagactgagagtgtccgccaccttctggcagaacccccggaaccacttcagatgccaggtgcagttctacggcctgagcgagaacgacgagtggacccaggacagagccaagcccgtgacccagatcgtgtctgccgaagcctggggcagagccgattgcggatccctgggagagcctcagctgtgctatatcctggacgccatcctgtttctgtacggcatcgtgctgaccctgctgtactgcaaacggggcagaaagaaactcctgtatatattcaaacaaccatttatgagaccagtacaaactactcaagaggaagatggctgtagctgccgatttccagaagaagaagaaggaggatgtgaactgcggctgaagatccaagtgcggaaggccgccatcaccagctacgagaaatccgacggcgtgtacaccggcctgagcaccagaaatcaagagacatacgagacactgaagcacgaaaagcctccacaaagggccaagcgatctggatctggagcaacaaacttctcactactcaaacaagcaggtgacgtggaggagaatcccgggcctactagtatggactggatttggcgcatccttttccttgtcggcgctgctaccggcgcgcattccttcgaagctcagaaagtgacacaggcccagaccgagatcagcgtggtggaaaaagaagatgtgaccctggactgcgtgtacgagacaagggacaccgcctactacctgttctggtacaagcagcctcctagcggcgagctggtgttcctgattagacagccttggtggggcagcagcagaggcatcagcggcagatacagctggaacttccagaagtccaccagcagcttcaacttcaccatcaccgccagccaggtggtggatagcgccgtgtacttttgtgccatgagcgtgcccgatagcagaggccactaccagttcaccttcggcaagggcacaaagctgagcgtgatccctacgcgtatccagaaccctgatcctgccgtgtaccagctgcgggatagcaagagcagcgacaagagcgtgtgtctgttcaccgacttcgacagccagaccaacgtgtcccagagcaaggactccgacgtgtacatcaccgataagaccgtgctggacatgcggagcatggacttcaagagcaactccgccgtggcctggtccaacaagtccgatttcgcctgcgccaacgccttcaacaacagcattatccccgaggacacattcttcccaagccccgagagcagctgcggtaccctgggagagcctcagctgtgctatatcctggacgccatcctgtttctgtacggcatcgtgctgaccctgctgtactgcaggagtaagaggagcaggctcctgcacagtgactacatgaacatgactccacgccgccccggacccacccgcaagcattaccagccctatgccccaccacgcgacttcgcagcctatcgctcccggctgaagatccaagtgcggaaggccgccatcaccagctacgagaaatccgacggcgtgtacaccggcctgagcaccagaaatcaagagacatacgagacactgaagcacgaaaagcctccacaataa

SEQ ID NO: 2428 - DNA, 2256 bp, synthetic construct
  source 1..2256: mol_type = other DNA
atggccttaccagtgaccgccttgctcctgccgctggccttgctgctccacgccgccaggccggaattcaatgctggcgtgacccagacacctaagttccgggtgctgaaaaccggccagagcatgacactgctgtgcgcccaggacatgaaccatgagtacatgtattggtacagacaggaccccggcatgggcctgagactgatccactattctggctggggcaaagacaccgccaagggcgaagttcccgatggctacaacgtgtcccggctgaagaagcagaacttcctgctgggcctcgaaagcgccgctccatctcagaccagcgtgtacttctgcgccagcaaagttggcccaggccagcacaatagccctctgcactttggcaacggcaccagactgacagtgacactcgaggacctgaagaacgtgttcccacctgaggtggccgtgttcgagcctagcgaggccgagatcagccacacccagaaagccaccctcgtgtgcctggctaccggcttctaccccgaccatgtggaactgtcttggtgggtcaacggcaaagaggtgcacagcggcgtgtctaccgacccccagccactgaaagaacagcccgccctgaacgacagccggtactgcctgagcagcagactgagagtgtccgccaccttctggcagaacccccggaaccacttcagatgccaggtgcagttctacggcctgagcgagaacgacgagtggacccaggacagagccaagcccgtgacccagatcgtgtctgccgaagcctggggcagagccgattgcggatccctgggagagcctcagctgtgctatatcctggacgccatcctgtttctgtacggcatcgtgctgaccctgctgtactgcaaacggggcagaaagaaactcctgtatatattcaaacaaccatttatgagaccagtacaaactactcaagaggaagatggctgtagctgccgatttccagaagaagaagaaggaggatgtgaactgcggctgaagatccaagtgcggaaggccgccatcaccagctacgagaaatccgacggcgtgtacaccggcctgagcaccagaaatcaagagacatacgagacactgaagcacgaaaagcctccacaaagggccaagcgatctggatctggagcaacaaacttctcactactcaaacaagcaggtgacgtggaggagaatcccgggcctactagtatggactggatttggcgcatccttttccttgtcggcgctgctaccggcgcgcattccttcgaagctcagaaagtgacacaggcccagaccgagatcagcgtggtggaaaaagaagatgtgaccctggactgcgtgtacgagacaagggacaccgcctactacctgttctggtacaagcagcctcctagcggcgagctggtgttcctgattagacagccttggtggggcagcagcagaggcatcagcggcagatacagctggaacttccagaagtccaccagcagcttcaacttcaccatcaccgccagccaggtggtggatagcgccgtgtacttttgtgccatgagcgtgcccgatagcagaggccactaccagttcaccttcggcaagggcacaaagctgagcgtgatccctacgcgtatccagaaccctgatcctgccgtgtaccagctgcgggatagcaagagcagcgacaagagcgtgtgtctgttcaccgacttcgacagccagaccaacgtgtcccagagcaaggactccgacgtgtacatcaccgataagaccgtgctggacatgcggagcatggacttcaagagcaactccgccgtggcctggtccaacaagtccgatttcgcctgcgccaacgccttcaacaacagcattatccccgaggacacattcttcccaagccccgagagcagctgcggtaccctgggagagcctcagctgtgctatatcctggacgccatcctgtttctgtacggcatcgtgctgaccctgctgtactgcagggaccaaagactgcctcctgacgctcacaaacctccaggcggaggcagcttcagaacccctatccaagaggaacaggctgacgcccacagcaccctggcaaaaattcggctgaagatccaagtgcggaaggccgccatcaccagctacgagaaatccgacggcgtgtacaccggcctgagcaccagaaatcaagagacatacgagacactgaagcacgaaaagcctccacaataa

SEQ ID NO: 2429 - DNA, 2508 bp, synthetic construct
  source 1..2508: mol_type = other DNA
atggccttaccagtgaccgccttgctcctgccgctggccttgctgctccacgccgccaggccggaattcaatgctggcgtgacccagacacctaagttccgggtgctgaaaaccggccagagcatgacactgctgtgcgcccaggacatgaaccatgagtacatgtattggtacagacaggaccccggcatgggcctgagactgatccactattctggctggggcaaagacaccgccaagggcgaagttcccgatggctacaacgtgtcccggctgaagaagcagaacttcctgctgggcctcgaaagcgccgctccatctcagaccagcgtgtacttctgcgccagcaaagttggcccaggccagcacaatagccctctgcactttggcaacggcaccagactgacagtgacactcgaggacctgaagaacgtgttcccacctgaggtggccgtgttcgagcctagcgaggccgagatcagccacacccagaaagccaccctcgtgtgcctggctaccggcttctaccccgaccatgtggaactgtcttggtgggtcaacggcaaagaggtgcacagcggcgtgtctaccgacccccagccactgaaagaacagcccgccctgaacgacagccggtactgcctgagcagcagactgagagtgtccgccaccttctggcagaacccccggaaccacttcagatgccaggtgcagttctacggcctgagcgagaacgacgagtggacccaggacagagccaagcccgtgacccagatcgtgtctgccgaagcctggggcagagccgattgcggatccctgggagagcctcagctgtgctatatcctggacgccatcctgtttctgtacggcatcgtgctgaccctgctgtactgcaaacggggcagaaagaaactcctgtatatattcaaacaaccatttatgagaccagtacaaactactcaagaggaagatggctgtagctgccgatttccagaagaagaagaaggaggatgtgaactgcggctgaagatccaagtgcggaaggccgccatcaccagctacgagaaatccgacggcgtgtacaccggcctgagcaccagaaatcaagagacatacgagacactgaagcacgaaaagcctccacaaagggccaagcgatctggatctggagcaacaaacttctcactactcaaacaagcaggtgacgtggaggagaatcccgggcctactagtatggactggatttggcgcatccttttccttgtcggcgctgctaccggcgcgcattccttcgaagctcagaaagtgacacaggcccagaccgagatcagcgtggtggaaaaagaagatgtgaccctggactgcgtgtacgagacaagggacaccgcctactacctgttctggtacaagcagcctcctagcggcgagctggtgttcctgattagacagccttggtggggcagcagcagaggcatcagcggcagatacagctggaacttccagaagtccaccagcagcttcaacttcaccatcaccgccagccaggtggtggatagcgccgtgtacttttgtgccatgagcgtgcccgatagcagaggccactaccagttcaccttcggcaagggcacaaagctgagcgtgatccctacgcgtatccagaaccctgatcctgccgtgtaccagctgcgggatagcaagagcagcgacaagagcgtgtgtctgttcaccgacttcgacagccagaccaacgtgtcccagagcaaggactccgacgtgtacatcaccgataagaccgtgctggacatgcggagcatggacttcaagagcaactccgccgtggcctggtccaacaagtccgatttcgcctgcgccaacgccttcaacaacagcattatccccgaggacacattcttcccaagccccgagagcagctgcggtaccctgggagagcctcagctgtgctatatcctggacgccatcctgtttctgtacggcatcgtgctgaccctgctgtactgctggcggcggaagcggaaagagaagcagtctgagacaagccccaaagagttcctgaccatctacgaggacgtgaaggacctgaaaacccggcggaaccacgaacaagagcagacctttcctggcggaggcagcaccatctacagcatgatccagagccagagcagcgcccctacaagccaagagcctgcctacacactgtactccctgatccagcctagcagaaagagcggcagccggaagagaaatcacagccccagcttcaacagcacgatctacgaagtgatcggcaagagccagccaaaggctcagaaccctgccagactgagccggaaagagctggaaaacttcgacgtgtacagccggctgaagatccaagtgcggaaggccgccatcaccagctacgagaaatccgacggcgtgtacaccggcctgagcaccagaaatcaagagacatacgagacactgaagcacgaaaagcctccacaataa

SEQ ID NO: 2430 - DNA, 2274 bp, synthetic construct
  source 1..2274: mol_type = other DNA
atggccttaccagtgaccgccttgctcctgccgctggccttgctgctccacgccgccaggccggaattcaatgctggcgtgacccagacacctaagttccgggtgctgaaaaccggccagagcatgacactgctgtgcgcccaggacatgaaccatgagtacatgtattggtacagacaggaccccggcatgggcctgagactgatccactattctggctggggcaaagacaccgccaagggcgaagttcccgatggctacaacgtgtcccggctgaagaagcagaacttcctgctgggcctcgaaagcgccgctccatctcagaccagcgtgtacttctgcgccagcaaagttggcccaggccagcacaatagccctctgcactttggcaacggcaccagactgacagtgacactcgaggacctgaagaacgtgttcccacctgaggtggccgtgttcgagcctagcgaggccgagatcagccacacccagaaagccaccctcgtgtgcctggctaccggcttctaccccgaccatgtggaactgtcttggtgggtcaacggcaaagaggtgcacagcggcgtgtctaccgacccccagccactgaaagaacagcccgccctgaacgacagccggtactgcctgagcagcagactgagagtgtccgccaccttctggcagaacccccggaaccacttcagatgccaggtgcagttctacggcctgagcgagaacgacgagtggacccaggacagagccaagcccgtgacccagatcgtgtctgccgaagcctggggcagagccgattgcggatccctgggagagcctcagctgtgctatatcctggacgccatcctgtttctgtacggcatcgtgctgaccctgctgtactgcaaacggggcagaaagaaactcctgtatatattcaaacaaccatttatgagaccagtacaaactactcaagaggaagatggctgtagctgccgatttccagaagaagaagaaggaggatgtgaactgcggctgaagatccaagtgcggaaggccgccatcaccagctacgagaaatccgacggcgtgtacaccggcctgagcaccagaaatcaagagacatacgagacactgaagcacgaaaagcctccacaaagggccaagcgatctggatctggagcaacaaacttctcactactcaaacaagcaggtgacgtggaggagaatcccgggcctactagtatggactggatttggcgcatccttttccttgtcggcgctgctaccggcgcgcattccttcgaagctcagaaagtgacacaggcccagaccgagatcagcgtggtggaaaaagaagatgtgaccctggactgcgtgtacgagacaagggacaccgcctactacctgttctggtacaagcagcctcctagcggcgagctggtgttcctgattagacagccttggtggggcagcagcagaggcatcagcggcagatacagctggaacttccagaagtccaccagcagcttcaacttcaccatcaccgccagccaggtggtggatagcgccgtgtacttttgtgccatgagcgtgcccgatagcagaggccactaccagttcaccttcggcaagggcacaaagctgagcgtgatccctacgcgtatccagaaccctgatcctgccgtgtaccagctgcgggatagcaagagcagcgacaagagcgtgtgtctgttcaccgacttcgacagccagaccaacgtgtcccagagcaaggactccgacgtgtacatcaccgataagaccgtgctggacatgcggagcatggacttcaagagcaactccgccgtggcctggtccaacaagtccgatttcgcctgcgccaacgccttcaacaacagcattatccccgaggacacattcttcccaagccccgagagcagctgcggtaccctcggagaaccacagctctgttacattctggatgctatcctgttcctctatgggatcgtcctgacactcctgtattgcaagagaggccggaagaagctgctgtacatcttcaagcagcctttcatgcggcccgtgcagaccacccaggaagaggacggctgctcctgccggttccccgaggaagaagaaggcggctgcgagctgagactcaaaattcaagttcgcaaagccgccattacctcttacgagaagagtgatggggtgtacacaggactgtctacccggaatcaagaaacctacgaaaccctcaaacatgagaagccacctcagtaa

SEQ ID NO: 2431 - DNA, 2271 bp, synthetic construct
  source 1..2271: mol_type = other DNA
atggccttaccagtgaccgccttgctcctgccgctggccttgctgctccacgccgccaggccggaattcaatgctggcgtgacccagacacctaagttccgggtgctgaaaaccggccagagcatgacactgctgtgcgcccaggacatgaaccatgagtacatgtattggtacagacaggaccccggcatgggcctgagactgatccactattctggctggggcaaagacaccgccaagggcgaagttcccgatggctacaacgtgtcccggctgaagaagcagaacttcctgctgggcctcgaaagcgccgctccatctcagaccagcgtgtacttctgcgccagcaaagttggcccaggccagcacaatagccctctgcactttggcaacggcaccagactgacagtgacactcgaggacctgaagaacgtgttcccacctgaggtggccgtgttcgagcctagcgaggccgagatcagccacacccagaaagccaccctcgtgtgcctggctaccggcttctaccccgaccatgtggaactgtcttggtgggtcaacggcaaagaggtgcacagcggcgtgtctaccgacccccagccactgaaagaacagcccgccctgaacgacagccggtactgcctgagcagcagactgagagtgtccgccaccttctggcagaacccccggaaccacttcagatgccaggtgcagttctacggcctgagcgagaacgacgagtggacccaggacagagccaagcccgtgacccagatcgtgtctgccgaagcctggggcagagccgattgcggatccctgggagagcctcagctgtgctatatcctggacgccatcctgtttctgtacggcatcgtgctgaccctgctgtactgcaaacggggcagaaagaaactcctgtatatattcaaacaaccatttatgagaccagtacaaactactcaagaggaagatggctgtagctgccgatttccagaagaagaagaaggaggatgtgaactgcggctgaagatccaagtgcggaaggccgccatcaccagctacgagaaatccgacggcgtgtacaccggcctgagcaccagaaatcaagagacatacgagacactgaagcacgaaaagcctccacaaagggccaagcgatctggatctggagcaacaaacttctcactactcaaacaagcaggtgacgtggaggagaatcccgggcctactagtatggactggatttggcgcatccttttccttgtcggcgctgctaccggcgcgcattccttcgaagctcagaaagtgacacaggcccagaccgagatcagcgtggtggaaaaagaagatgtgaccctggactgcgtgtacgagacaagggacaccgcctactacctgttctggtacaagcagcctcctagcggcgagctggtgttcctgattagacagccttggtggggcagcagcagaggcatcagcggcagatacagctggaacttccagaagtccaccagcagcttcaacttcaccatcaccgccagccaggtggtggatagcgccgtgtacttttgtgccatgagcgtgcccgatagcagaggccactaccagttcaccttcggcaagggcacaaagctgagcgtgatccctacgcgtatccagaaccctgatcctgccgtgtaccagctgcgggatagcaagagcagcgacaagagcgtgtgtctgttcaccgacttcgacagccagaccaacgtgtcccagagcaaggactccgacgtgtacatcaccgataagaccgtgctggacatgcggagcatggacttcaagagcaactccgccgtggcctggtccaacaagtccgatttcgcctgcgccaacgccttcaacaacagcattatccccgaggacacattcttcccaagccccgagagcagctgcggtaccctcggagaaccacagctctgttacattctggatgctatcctgttcctctatgggatcgtcctgacactcctgtattgcaggagcaagcggtcacggctgctccacagcgattacatgaatatgacaccacgaagaccgggtcctactcgcaaacactaccaaccctacgcacctccccgcgactttgcagcgtaccgatctagactcaaaattcaagttcgcaaagccgccattacctcttacgagaagagtgatggggtgtacacaggactgtctacccggaatcaagaaacctacgaaaccctcaaacatgagaagccacctcagtaa

SEQ ID NO: 2432 - DNA, 2268 bp, synthetic construct
  source 1..2268: mol_type = other DNA
atggccttaccagtgaccgccttgctcctgccgctggccttgctgctccacgccgccaggccggaattcaatgctggcgtgacccagacacctaagttccgggtgctgaaaaccggccagagcatgacactgctgtgcgcccaggacatgaaccatgagtacatgtattggtacagacaggaccccggcatgggcctgagactgatccactattctggctggggcaaagacaccgccaagggcgaagttcccgatggctacaacgtgtcccggctgaagaagcagaacttcctgctgggcctcgaaagcgccgctccatctcagaccagcgtgtacttctgcgccagcaaagttggcccaggccagcacaatagccctctgcactttggcaacggcaccagactgacagtgacactcgaggacctgaagaacgtgttcccacctgaggtggccgtgttcgagcctagcgaggccgagatcagccacacccagaaagccaccctcgtgtgcctggctaccggcttctaccccgaccatgtggaactgtcttggtgggtcaacggcaaagaggtgcacagcggcgtgtctaccgacccccagccactgaaagaacagcccgccctgaacgacagccggtactgcctgagcagcagactgagagtgtccgccaccttctggcagaacccccggaaccacttcagatgccaggtgcagttctacggcctgagcgagaacgacgagtggacccaggacagagccaagcccgtgacccagatcgtgtctgccgaagcctggggcagagccgattgcggatccctgggagagcctcagctgtgctatatcctggacgccatcctgtttctgtacggcatcgtgctgaccctgctgtactgcaggagtaagaggagcaggctcctgcacagtgactacatgaacatgactccacgccgccccggacccacccgcaagcattaccagccctatgccccaccacgcgacttcgcagcctatcgctcccggctgaagatccaagtgcggaaggccgccatcaccagctacgagaaatccgacggcgtgtacaccggcctgagcaccagaaatcaagagacatacgagacactgaagcacgaaaagcctccacaaagggccaagcgatctggatctggagcaacaaacttctcactactcaaacaagcaggtgacgtggaggagaatcccgggcctactagtatggactggatttggcgcatccttttccttgtcggcgctgctaccggcgcgcattccttcgaagctcagaaagtgacacaggcccagaccgagatcagcgtggtggaaaaagaagatgtgaccctggactgcgtgtacgagacaagggacaccgcctactacctgttctggtacaagcagcctcctagcggcgagctggtgttcctgattagacagccttggtggggcagcagcagaggcatcagcggcagatacagctggaacttccagaagtccaccagcagcttcaacttcaccatcaccgccagccaggtggtggatagcgccgtgtacttttgtgccatgagcgtgcccgatagcagaggccactaccagttcaccttcggcaagggcacaaagctgagcgtgatccctacgcgtatccagaaccctgatcctgccgtgtaccagctgcgggatagcaagagcagcgacaagagcgtgtgtctgttcaccgacttcgacagccagaccaacgtgtcccagagcaaggactccgacgtgtacatcaccgataagaccgtgctggacatgcggagcatggacttcaagagcaactccgccgtggcctggtccaacaagtccgatttcgcctgcgccaacgccttcaacaacagcattatccccgaggacacattcttcccaagccccgagagcagctgcggtaccctcggagaaccacagctctgttacattctggatgctatcctgttcctctatgggatcgtcctgacactcctgtattgcaggagcaagcggtcacggctgctccacagcgattacatgaatatgacaccacgaagaccgggtcctactcgcaaacactaccaaccctacgcacctccccgcgactttgcagcgtaccgatctagactcaaaattcaagttcgcaaagccgccattacctcttacgagaagagtgatggggtgtacacaggactgtctacccggaatcaagaaacctacgaaaccctcaaacatgagaagccacctcagtaa

SEQ ID NO: 2433 - DNA, 2022 bp, synthetic construct
  source 1..2022: mol_type = other DNA
atggccttaccagtgaccgccttgctcctgccgctggccttgctgctccacgccgccaggccggaattcaatgctggcgtgacccagacacctaagttccgggtgctgaaaaccggccagagcatgacactgctgtgcgcccaggacatgaaccatgagtacatgtattggtacagacaggaccccggcatgggcctgagactgatccactattctggctggggcaaagacaccgccaagggcgaagttcccgatggctacaacgtgtcccggctgaagaagcagaacttcctgctgggcctcgaaagcgccgctccatctcagaccagcgtgtacttctgcgccagcaaagttggcccaggccagcacaatagccctctgcactttggcaacggcaccagactgacagtgacactcgaggacctgaagaacgtgttcccacctgaggtggccgtgttcgagcctagcgaggccgagatcagccacacccagaaagccaccctcgtgtgcctggctaccggcttctaccccgaccatgtggaactgtcttggtgggtcaacggcaaagaggtgcacagcggcgtgtctaccgacccccagccactgaaagaacagcccgccctgaacgacagccggtactgcctgagcagcagactgagagtgtccgccaccttctggcagaacccccggaaccacttcagatgccaggtgcagttctacggcctgagcgagaacgacgagtggacccaggacagagccaagcccgtgacccagatcgtgtctgccgaagcctggggcagagccgattgcggatccctgggagagcctcagctgagctatatcctggacgccatcctgtttctgtacggcatcgtgctgaccctgctgtactgccggctgaagatccaagtgcggaaggccgccatcaccagctacgagaaatccgacggcgtgtacaccggcctgagcaccagaaatcaagagacatacgagacactgaagcacgaaaagcctccacaaagggccaagcgatctggatctggagcaacaaacttctcactactcaaacaagcaggtgacgtggaggagaatcccgggcctactagtatggactggatttggcgcatccttttccttgtcggcgctgctaccggcgcgcattccttcgaagctcagaaagtgacacaggcccagaccgagatcagcgtggtggaaaaagaagatgtgaccctggactgcgtgtacgagacaagggacaccgcctactacctgttctggtacaagcagcctcctagcggcgagctggtgttcctgattagacagccttggtggggcagcagcagaggcatcagcggcagatacagctggaacttccagaagtccaccagcagcttcaacttcaccatcaccgccagccaggtggtggatagcgccgtgtacttttgtgccatgagcgtgcccgatagcagaggccactaccagttcaccttcggcaagggcacaaagctgagcgtgatccctacgcgtatccagaaccctgatcctgccgtgtaccagctgcgggatagcaagagcagcgacaagagcgtgtgtctgttcaccgacttcgacagccagaccaacgtgtcccagagcaaggactccgacgtgtacatcaccgataagaccgtgctggacatgcggagcatggacttcaagagcaactccgccgtggcctggtccaacaagtccgatttcgcctgcgccaacgccttcaacaacagcattatccccgaggacacattcttcccaagccccgagagcagctgcggtaccctcggagaaccacagctctcttacattctggatgctatcctgttcctctatgggatcgtcctgacactcctgtattgcagactcaaaattcaagttcgcaaagccgccattacctcttacgagaagagtgatggggtgtacacaggactgtctacccggaatcaagaaacctacgaaaccctcaaacatgagaagccacctcagtaa

SEQ ID NO: 2434 - DNA, 2130 bp, synthetic construct
  source 1..2130: mol_type = other DNA
atggccttaccagtgaccgccttgctcctgccgctggccttgctgctccacgccgccaggccggaattcaatgctggcgtgacccagacacctaagttccgggtgctgaaaaccggccagagcatgacactgctgtgcgcccaggacatgaaccatgagtacatgtattggtacagacaggaccccggcatgggcctgagactgatccactattctggctggggcaaagacaccgccaagggcgaagttcccgatggctacaacgtgtcccggctgaagaagcagaacttcctgctgggcctcgaaagcgccgctccatctcagaccagcgtgtacttctgcgccagcaaagttggcccaggccagcacaatagccctctgcactttggcaacggcaccagactgacagtgacactcgaggacctgaagaacgtgttcccacctgaggtggccgtgttcgagcctagcgaggccgagatcagccacacccagaaagccaccctcgtgtgcctggctaccggcttctaccccgaccatgtggaactgtcttggtgggtcaacggcaaagaggtgcacagcggcgtgtctaccgacccccagccactgaaagaacagcccgccctgaacgacagccggtactgcctgagcagcagactgagagtgtccgccaccttctggcagaacccccggaaccacttcagatgccaggtgcagttctacggcctgagcgagaacgacgagtggacccaggacagagccaagcccgtgacccagatcgtgtctgccgaagcctggggcagagccgattgcggatcccaggctcagagcgattgcagctgtagcacagtgtctccaggcgtgctggccggaattgtgatgggcgatctggtgctgacagtgctgattgccctggccgtgtacttcctgggtagactggtgcctagaggaagaggcgctgccgaagccgccacaagaaagcagagaatcaccgagacagagagcccctaccaagagctgcaaggccagagaagcgacgtgtacagcgacctgaatacccagcggccttactacaaaagggccaagcgatctggatctggagcaacaaacttctcactactcaaacaagcaggtgacgtggaggagaatcccgggcctactagtatggactggatttggcgcatccttttccttgtcggcgctgctaccggcgcgcattccttcgaagctcagaaagtgacacaggcccagaccgagatcagcgtggtggaaaaagaagatgtgaccctggactgcgtgtacgagacaagggacaccgcctactacctgttctggtacaagcagcctcctagcggcgagctggtgttcctgattagacagccttggtggggcagcagcagaggcatcagcggcagatacagctggaacttccagaagtccaccagcagcttcaacttcaccatcaccgccagccaggtggtggatagcgccgtgtacttttgtgccatgagcgtgcccgatagcagaggccactaccagttcaccttcggcaagggcacaaagctgagcgtgatccctacgcgtatccagaaccctgatcctgccgtgtaccagctgcgggatagcaagagcagcgacaagagcgtgtgtctgttcaccgacttcgacagccagaccaacgtgtcccagagcaaggactccgacgtgtacatcaccgataagaccgtgctggacatgcggagcatggacttcaagagcaactccgccgtggcctggtccaacaagtccgatttcgcctgcgccaacgccttcaacaacagcattatccccgaggacacattcttcccaagccccgagagcagctgcggtacccaggctcagagcgattgcagctctagcacagtgtctccaggcgtgctggccggaattgtgatgggcgatctggtgctgacagtgctgattgccctggccgtgtacttcctgggtagactggtgcctagaggaagaggcgctgccgaagccgccacaagaaagcagagaatcaccgagacagagagcccctaccaagagctgcaaggccagagaagcgacgtgtacagcgacctgaatacccagcggccttactacaaataa

SEQ ID NO: 2435 - DNA, 2256 bp, synthetic construct
  source 1..2256: mol_type = other DNA
atggccttaccagtgaccgccttgctcctgccgctggccttgctgctccacgccgccaggccggaattcaatgctggcgtgacccagacacctaagttccgggtgctgaaaaccggccagagcatgacactgctgtgcgcccaggacatgaaccatgagtacatgtattggtacagacaggaccccggcatgggcctgagactgatccactattctggctggggcaaagacaccgccaagggcgaagttcccgatggctacaacgtgtcccggctgaagaagcagaacttcctgctgggcctcgaaagcgccgctccatctcagaccagcgtgtacttctgcgccagcaaagttggcccaggccagcacaatagccctctgcactttggcaacggcaccagactgacagtgacactcgaggacctgaagaacgtgttcccacctgaggtggccgtgttcgagcctagcgaggccgagatcagccacacccagaaagccaccctcgtgtgcctggctaccggcttctaccccgaccatgtggaactgtcttggtgggtcaacggcaaagaggtgcacagcggcgtgtctaccgacccccagccactgaaagaacagcccgccctgaacgacagccggtactgcctgagcagcagactgagagtgtccgccaccttctggcagaacccccggaaccacttcagatgccaggtgcagttctacggcctgagcgagaacgacgagtggacccaggacagagccaagcccgtgacccagatcgtgtctgccgaagcctggggcagagccgattgcggatcccaggctcagagcgattgcagctgtagcacagtgtctccaggcgtgctggccggaattgtgatgggcgatctggtgctgacagtgctgattgccctggccgtgtacttcctgggtagactggtgcctagaggaagaggcgctgccgaagccgccacaagaaagcagagaatcaccgagacagagagcccctaccaagagctgcaaggccagagaagcgacgtgtacagcgacctgaatacccagcggccttactacaaaagggccaagcgatctggatctggagcaacaaacttctcactactcaaacaagcaggtgacgtggaggagaatcccgggcctactagtatggactggatttggcgcatccttttccttgtcggcgctgctaccggcgcgcattccttcgaagctcagaaagtgacacaggcccagaccgagatcagcgtggtggaaaaagaagatgtgaccctggactgcgtgtacgagacaagggacaccgcctactacctgttctggtacaagcagcctcctagcggcgagctggtgttcctgattagacagccttggtggggcagcagcagaggcatcagcggcagatacagctggaacttccagaagtccaccagcagcttcaacttcaccatcaccgccagccaggtggtggatagcgccgtgtacttttgtgccatgagcgtgcccgatagcagaggccactaccagttcaccttcggcaagggcacaaagctgagcgtgatccctacgcgtatccagaaccctgatcctgccgtgtaccagctgcgggatagcaagagcagcgacaagagcgtgtgtctgttcaccgacttcgacagccagaccaacgtgtcccagagcaaggactccgacgtgtacatcaccgataagaccgtgctggacatgcggagcatggacttcaagagcaactccgccgtggcctggtccaacaagtccgatttcgcctgcgccaacgccttcaacaacagcattatccccgaggacacattcttcccaagccccgagagcagctgcggtacccaggctcagagcgattgcagctgtagcacagtgtctccaggcgtgctggccggaattgtgatgggcgatctggtgctgacagtgctgattgccctggccgtgtacttcctgggtagactggtgcctagaggaagaggcgctgccgaagccgccacaagaaagcagagaatcaccgagacagagagcccctaccaagagctgcaaggccagagaagcgacgtgtacagcgacctgaatacccagaaacggggcagaaagaaactcctgtatatattcaaacaaccatttatgagaccagtacaaactactcaagaggaagatggctgtagctgccgatttccagaagaagaagaaggaggatgtgaactgcggccttactacaaataa

SEQ ID NO: 2436 - DNA, 2253 bp, synthetic construct
  source 1..2253: mol_type = other DNA
atggccttaccagtgaccgccttgctcctgccgctggccttgctgctccacgccgccaggccggaattcaatgctggcgtgacccagacacctaagttccgggtgctgaaaaccggccagagcatgacactgctgtgcgcccaggacatgaaccatgagtacatgtattggtacagacaggaccccggcatgggcctgagactgatccactattctggctggggcaaagacaccgccaagggcgaagttcccgatggctacaacgtgtcccggctgaagaagcagaacttcctgctgggcctcgaaagcgccgctccatctcagaccagcgtgtacttctgcgccagcaaagttggcccaggccagcacaatagccctctgcactttggcaacggcaccagactgacagtgacactcgaggacctgaagaacgtgttcccacctgaggtggccgtgttcgagcctagcgaggccgagatcagccacacccagaaagccaccctcgtgtgcctggctaccggcttctaccccgaccatgtggaactgtcttggtgggtcaacggcaaagaggtgcacagcggcgtgtctaccgacccccagccactgaaagaacagcccgccctgaacgacagccggtactgcctgagcagcagactgagagtgtccgccaccttctggcagaacccccggaaccacttcagatgccaggtgcagttctacggcctgagcgagaacgacgagtggacccaggacagagccaagcccgtgacccagatcgtgtctgccgaagcctggggcagagccgattgcggatcccaggctcagagcgattgcagctgtagcacagtgtctccaggcgtgctggccggaattgtgatgggcgatctggtgctgacagtgctgattgccctggccgtgtacttcctgggtagactggtgcctagaggaagaggcgctgccgaagccgccacaagaaagcagagaatcaccgagacagagagcccctaccaagagctgcaaggccagagaagcgacgtgtacagcgacctgaatacccagcggccttactacaaaagggccaagcgatctggatctggagcaacaaacttctcactactcaaacaagcaggtgacgtggaggagaatcccgggcctactagtatggactggatttggcgcatccttttccttgtcggcgctgctaccggcgcgcattccttcgaagctcagaaagtgacacaggcccagaccgagatcagcgtggtggaaaaagaagatgtgaccctggactgcgtgtacgagacaagggacaccgcctactacctgttctggtacaagcagcctcctagcggcgagctggtgttcctgattagacagccttggtggggcagcagcagaggcatcagcggcagatacagctggaacttccagaagtccaccagcagcttcaacttcaccatcaccgccagccaggtggtggatagcgccgtgtacttttgtgccatgagcgtgcccgatagcagaggccactaccagttcaccttcggcaagggcacaaagctgagcgtgatccctacgcgtatccagaaccctgatcctgccgtgtaccagctgcgggatagcaagagcagcgacaagagcgtgtgtctgttcaccgacttcgacagccagaccaacgtgtcccagagcaaggactccgacgtgtacatcaccgataagaccgtgctggacatgcggagcatggacttcaagagcaactccgccgtggcctggtccaacaagtccgatttcgcctgcgccaacgccttcaacaacagcattatccccgaggacacattcttcccaagccccgagagcagctgcggtacccaggctcagagcgattgcagctgtagcacagtgtctccaggcgtgctggccggaattgtgatgggcgatctggtgctgacagtgctgattgccctggccgtgtacttcctgggtagactggtgcctagaggaagaggcgctgccgaagccgccacaagaaagcagagaatcaccgagacagagagcccctaccaagagctgcaaggccagagaagcgacgtgtacagcgacctgaatacccagaggagcaagcggtcacggctgctccacagcgattacatgaatatgacaccacgaagaccgggtcctactcgcaaacactaccaaccctacgcacctccccgcgactttgcagcgtaccgatctcggccttactacaaataa

SEQ ID NO: 2437 - DNA, 2238 bp, synthetic construct
  source 1..2238: mol_type = other DNA
atggccttaccagtgaccgccttgctcctgccgctggccttgctgctccacgccgccaggccggaattcaatgctggcgtgacccagacacctaagttccgggtgctgaaaaccggccagagcatgacactgctgtgcgcccaggacatgaaccatgagtacatgtattggtacagacaggaccccggcatgggcctgagactgatccactattctggctggggcaaagacaccgccaagggcgaagttcccgatggctacaacgtgtcccggctgaagaagcagaacttcctgctgggcctcgaaagcgccgctccatctcagaccagcgtgtacttctgcgccagcaaagttggcccaggccagcacaatagccctctgcactttggcaacggcaccagactgacagtgacactcgaggacctgaagaacgtgttcccacctgaggtggccgtgttcgagcctagcgaggccgagatcagccacacccagaaagccaccctcgtgtgcctggctaccggcttctaccccgaccatgtggaactgtcttggtgggtcaacggcaaagaggtgcacagcggcgtgtctaccgacccccagccactgaaagaacagcccgccctgaacgacagccggtactgcctgagcagcagactgagagtgtccgccaccttctggcagaacccccggaaccacttcagatgccaggtgcagttctacggcctgagcgagaacgacgagtggacccaggacagagccaagcccgtgacccagatcgtgtctgccgaagcctggggcagagccgattgcggatcccaggctcagagcgattgcagctgtagcacagtgtctccaggcgtgctggccggaattgtgatgggcgatctggtgctgacagtgctgattgccctggccgtgtacttcctgggtagactggtgcctagaggaagaggcgctgccgaagccgccacaagaaagcagagaatcaccgagacagagagcccctaccaagagctgcaaggccagagaagcgacgtgtacagcgacctgaatacccagcggccttactacaaaagggccaagcgatctggatctggagcaacaaacttctcactactcaaacaagcaggtgacgtggaggagaatcccgggcctactagtatggactggatttggcgcatccttttccttgtcggcgctgctaccggcgcgcattccttcgaagctcagaaagtgacacaggcccagaccgagatcagcgtggtggaaaaagaagatgtgaccctggactgcgtgtacgagacaagggacaccgcctactacctgttctggtacaagcagcctcctagcggcgagctggtgttcctgattagacagccttggtggggcagcagcagaggcatcagcggcagatacagctggaacttccagaagtccaccagcagcttcaacttcaccatcaccgccagccaggtggtggatagcgccgtgtacttttgtgccatgagcgtgcccgatagcagaggccactaccagttcaccttcggcaagggcacaaagctgagcgtgatccctacgcgtatccagaaccctgatcctgccgtgtaccagctgcgggatagcaagagcagcgacaagagcgtgtgtctgttcaccgacttcgacagccagaccaacgtgtcccagagcaaggactccgacgtgtacatcaccgataagaccgtgctggacatgcggagcatggacttcaagagcaactccgccgtggcctggtccaacaagtccgatttcgcctgcgccaacgccttcaacaacagcattatccccgaggacacattcttcccaagccccgagagcagctgcggtacccaggctcagagcgattgcagctgtagcacagtgtctccaggcgtgctggccggaattgtgatgggcgatctggtgctgacagtgctgattgccctggccgtgtacttcctgggtagactggtgcctagaggaagaggcgctgccgaagccgccacaagaaagcagagaatcaccgagacagagagcccctaccaagagctgcaaggccagagaagcgacgtgtacagcgacctgaatacccagagggaccaaagactgcctcctgacgctcacaaacctccaggcggaggcagcttcagaacccctatccaagaggaacaggctgacgcccacagcaccctggcaaaaattcggccttactacaaataa

SEQ ID NO: 2438 - DNA, 2490 bp, synthetic construct
  source 1..2490: mol_type = other DNA
atggccttaccagtgaccgccttgctcctgccgctggccttgctgctccacgccgccaggccggaattcaatgctggcgtgacccagacacctaagttccgggtgctgaaaaccggccagagcatgacactgctgtgcgcccaggacatgaaccatgagtacatgtattggtacagacaggaccccggcatgggcctgagactgatccactattctggctggggcaaagacaccgccaagggcgaagttcccgatggctacaacgtgtcccggctgaagaagcagaacttcctgctgggcctcgaaagcgccgctccatctcagaccagcgtgtacttctgcgccagcaaagttggcccaggccagcacaatagccctctgcactttggcaacggcaccagactgacagtgacactcgaggacctgaagaacgtgttcccacctgaggtggccgtgttcgagcctagcgaggccgagatcagccacacccagaaagccaccctcgtgtgcctggctaccggcttctaccccgaccatgtggaactgtcttggtgggtcaacggcaaagaggtgcacagcggcgtgtctaccgacccccagccactgaaagaacagcccgccctgaacgacagccggtactgcctgagcagcagactgagagtgtccgccaccttctggcagaacccccggaaccacttcagatgccaggtgcagttctacggcctgagcgagaacgacgagtggacccaggacagagccaagcccgtgacccagatcgtgtctgccgaagcctggggcagagccgattgcggatcccaggctcagagcgattgcagctgtagcacagtgtctccaggcgtgctggccggaattgtgatgggcgatctggtgctgacagtgctgattgccctggccgtgtacttcctgggtagactggtgcctagaggaagaggcgctgccgaagccgccacaagaaagcagagaatcaccgagacagagagcccctaccaagagctgcaaggccagagaagcgacgtgtacagcgacctgaatacccagcggccttactacaaaagggccaagcgatctggatctggagcaacaaacttctcactactcaaacaagcaggtgacgtggaggagaatcccgggcctactagtatggactggatttggcgcatccttttccttgtcggcgctgctaccggcgcgcattccttcgaagctcagaaagtgacacaggcccagaccgagatcagcgtggtggaaaaagaagatgtgaccctggactgcgtgtacgagacaagggacaccgcctactacctgttctggtacaagcagcctcctagcggcgagctggtgttcctgattagacagccttggtggggcagcagcagaggcatcagcggcagatacagctggaacttccagaagtccaccagcagcttcaacttcaccatcaccgccagccaggtggtggatagcgccgtgtacttttgtgccatgagcgtgcccgatagcagaggccactaccagttcaccttcggcaagggcacaaagctgagcgtgatccctacgcgtatccagaaccctgatcctgccgtgtaccagctgcgggatagcaagagcagcgacaagagcgtgtgtctgttcaccgacttcgacagccagaccaacgtgtcccagagcaaggactccgacgtgtacatcaccgataagaccgtgctggacatgcggagcatggacttcaagagcaactccgccgtggcctggtccaacaagtccgatttcgcctgcgccaacgccttcaacaacagcattatccccgaggacacattcttcccaagccccgagagcagctgcggtacccaggctcagagcgattgcagctgtagcacagtgtctccaggcgtgctggccggaattgtgatgggcgatctggtgctgacagtgctgattgccctggccgtgtacttcctgggtagactggtgcctagaggaagaggcgctgccgaagccgccacaagaaagcagagaatcaccgagacagagagcccctaccaagagctgcaaggccagagaagcgacgtgtacagcgacctgaatacccagtggcggcggaagcggaaagagaagcagtctgagacaagccccaaagagttcctgaccatctacgaggacgtgaaggacctgaaaacccggcggaaccacgaacaagagcagacctttcctggcggaggcagcaccatctacagcatgatccagagccagagcagcgcccctacaagccaagagcctgcctacacactgtactccctgatccagcctagcagaaagagcggcagccggaagagaaatcacagccccagcttcaacagcacgatctacgaagtgatcggcaagagccagccaaaggctcagaaccctgccagactgagccggaaagagctggaaaacttcgacgtgtacagccggccttactacaaataa

SEQ ID NO: 2439 - DNA, 2766 bp, synthetic construct
  source 1..2766: mol_type = other DNA
atggccttaccagtgaccgccttgctcctgccgctggccttgctgctccacgccgccaggccggaattcaatgctggcgtgacccagacacctaagttccgggtgctgaaaaccggccagagcatgacactgctgtgcgcccaggacatgaaccatgagtacatgtattggtacagacaggaccccggcatgggcctgagactgatccactattctggctggggcaaagacaccgccaagggcgaagttcccgatggctacaacgtgtcccggctgaagaagcagaacttcctgctgggcctcgaaagcgccgctccatctcagaccagcgtgtacttctgcgccagcaaagttggcccaggccagcacaatagccctctgcactttggcaacggcaccagactgacagtgacactcgaggacctgaagaacgtgttcccacctgaggtggccgtgttcgagcctagcgaggccgagatcagccacacccagaaagccaccctcgtgtgcctggctaccggcttctaccccgaccatgtggaactgtcttggtgggtcaacggcaaagaggtgcacagcggcgtgtctaccgacccccagccactgaaagaacagcccgccctgaacgacagccggtactgcctgagcagcagactgagagtgtccgccaccttctggcagaacccccggaaccacttcagatgccaggtgcagttctacggcctgagcgagaacgacgagtggacccaggacagagccaagcccgtgacccagatcgtgtctgccgaagcctggggcagagccgattgcggatcccaggctcagagcgattgcagctgtagcacagtgtctccaggcgtgctggccggaattgtgatgggcgatctggtgctgacagtgctgattgccctggccgtgtacttcctgggtagactggtgcctagaggaagaggcgctgccgaagccgccacaagaaagcagagaatcaccgagacagagagcccctaccaagagctgcaaggccagagaagcgacgtgtacagcgacctgaatacccagagagtgaagttcagcagaagcgccgacgcccctgcctaccagcagggacagaaccaactgtacaacgagctgaacctgggcagacgggaagagtacgacgtgctggacaagcggagaggcagggaccctgagatgggcggaaagccccagcggagaaagaacccccaggaaggactgtataacgaactccagaaagacaagatggccgaagcctacagcgagatcggcatgaagggcgagcggagaagaggcaagggccacgatggcctgtaccagggcctgagcaccgccaccaaggacacctatgacgccctgcacatgcaggccctgcctccaagaagggccaagcgatctggatctggagcaacaaacttctcactactcaaacaagcaggtgacgtggaggagaatcccgggcctactagtatggactggatttggcgcatccttttccttgtcggcgctgctaccggcgcgcattccttcgaagctcagaaagtgacacaggcccagaccgagatcagcgtggtggaaaaagaagatgtgaccctggactgcgtgtacgagacaagggacaccgcctactacctgttctggtacaagcagcctcctagcggcgagctggtgttcctgattagacagccttggtggggcagcagcagaggcatcagcggcagatacagctggaacttccagaagtccaccagcagcttcaacttcaccatcaccgccagccaggtggtggatagcgccgtgtacttttgtgccatgagcgtgcccgatagcagaggccactaccagttcaccttcggcaagggcacaaagctgagcgtgatccctacgcgtatccagaaccctgatcctgccgtgtaccagctgcgggatagcaagagcagcgacaagagcgtgtgtctgttcaccgacttcgacagccagaccaacgtgtcccagagcaaggactccgacgtgtacatcaccgataagaccgtgctggacatgcggagcatggacttcaagagcaactccgccgtggcctggtccaacaagtccgatttcgcctgcgccaacgccttcaacaacagcattatccccgaggacacattcttcccaagccccgagagcagctgcggtaccacaacgccgggcgaaaggagttccttgccggccttttaccccggcacaagcggaagctgtagtgggtgtggaagcctcagcctcccacttcttgcgggcctcgtcgcggcagatgcagtagcttcacttcttattgtaggcgcggtatttctctgtgctcgaccaaggaggtcacccgctcaggaggatggtaaggtgtatataaatatgccaggacgcggaagctctagacgggttaagttttccagatccgcagacgcacccgcttaccaacaagggcagaaccaactctacaatgaacttaatttggggcggagggaagagtacgacgttctggacaaaaggaggggacgagatcccgagatgggcggaaagcctcagcgaaggaagaatccgcaagaggggctttataacgaactccagaaagataaaatggcagaagcctatagtgagattgggatgaagggagaaaggaggaggggtaaaggtcacgatgggttgtaccaaggattgagcacagccactaaagatacctatgatgcgctccacatgcaggccctgccgccaagataa

SEQ ID NO: 2440 - DNA, 2544 bp, synthetic construct
  source 1..2544: mol_type = other DNA
atggccttaccagtgaccgccttgctcctgccgctggccttgctgctccacgccgccaggccggaattcaatgctggcgtgacccagacacctaagttccgggtgctgaaaaccggccagagcatgacactgctgtgcgcccaggacatgaaccatgagtacatgtattggtacagacaggaccccggcatgggcctgagactgatccactattctggctggggcaaagacaccgccaagggcgaagttcccgatggctacaacgtgtcccggctgaagaagcagaacttcctgctgggcctcgaaagcgccgctccatctcagaccagcgtgtacttctgcgccagcaaagttggcccaggccagcacaatagccctctgcactttggcaacggcaccagactgacagtgacactcgaggacctgaagaacgtgttcccacctgaggtggccgtgttcgagcctagcgaggccgagatcagccacacccagaaagccaccctcgtgtgcctggctaccggcttctaccccgaccatgtggaactgtcttggtgggtcaacggcaaagaggtgcacagcggcgtgtctaccgacccccagccactgaaagaacagcccgccctgaacgacagccggtactgcctgagcagcagactgagagtgtccgccaccttctggcagaacccccggaaccacttcagatgccaggtgcagttctacggcctgagcgagaacgacgagtggacccaggacagagccaagcccgtgacccagatcgtgtctgccgaagcctggggcagagccgattgcggatcccaggctcagagcgattgcagctgtagcacagtgtctccaggcgtgctggccggaattgtgatgggcgatctggtgctgacagtgctgattgccctggccgtgtacttcctgggtagactggtgcctagaggaagaggcgctgccgaagccgccacaagaaagcagagaatcaccgagacagagagcccctaccaagagctgcaaggccagagaagcgacgtgtacagcgacctgaatacccagagagtgaagttcagcagaagcgccgacgcccctgcctaccagcagggacagaaccaactgtacaacgagctgaacctgggcagacgggaagagtacgacgtgctggacaagcggagaggcagggaccctgagatgggcggaaagccccagcggagaaagaacccccaggaaggactgtataacgaactccagaaagacaagatggccgaagcctacagcgagatcggcatgaagggcgagcggagaagaggcaagggccacgatggcctgtaccagggcctgagcaccgccaccaaggacacctatgacgccctgcacatgcaggccctgcctccaagaagggccaagcgatctggatctggagcaacaaacttctcactactcaaacaagcaggtgacgtggaggagaatcccgggcctactagtatggactggatttggcgcatccttttccttgtcggcgctgctaccggcgcgcattccttcgaagctcagaaagtgacacaggcccagaccgagatcagcgtggtggaaaaagaagatgtgaccctggactgcgtgtacgagacaagggacaccgcctactacctgttctggtacaagcagcctcctagcggcgagctggtgttcctgattagacagccttggtggggcagcagcagaggcatcagcggcagatacagctggaacttccagaagtccaccagcagcttcaacttcaccatcaccgccagccaggtggtggatagcgccgtgtacttttgtgccatgagcgtgcccgatagcagaggccactaccagttcaccttcggcaagggcacaaagctgagcgtgatccctacgcgtatccagaaccctgatcctgccgtgtaccagctgcgggatagcaagagcagcgacaagagcgtgtgtctgttcaccgacttcgacagccagaccaacgtgtcccagagcaaggactccgacgtgtacatcaccgataagaccgtgctggacatgcggagcatggacttcaagagcaactccgccgtggcctggtccaacaagtccgatttcgcctgcgccaacgccttcaacaacagcattatccccgaggacacattcttcccaagccccgagagcagctgcggtaccacaacgccgggcgaaaggagttccttgccggccttttaccccggcacaagcggaagctgtagtgggtgtggaagcctcagcctcccacttcttgcgggcctcgtcgcggcagatgcagtagcttcacttcttattgtaggcgcggtatttaagagaggccggaagaagctgctgtacatcttcaagcagcctttcatgcggcccgtgcagaccacccaggaagaggacggctgctcctgccggttccccgaggaagaagaaggcggctgcgagctgctctgtgctcgaccaaggaggtcacccgctcaggaggatggtaaggtgtatataaatatgccaggacgcggataa

SEQ ID NO: 2441 - DNA, 2541 bp, synthetic construct
  source 1..2541: mol_type = other DNA
atggccttaccagtgaccgccttgctcctgccgctggccttgctgctccacgccgccaggccggaattcaatgctggcgtgacccagacacctaagttccgggtgctgaaaaccggccagagcatgacactgctgtgcgcccaggacatgaaccatgagtacatgtattggtacagacaggaccccggcatgggcctgagactgatccactattctggctggggcaaagacaccgccaagggcgaagttcccgatggctacaacgtgtcccggctgaagaagcagaacttcctgctgggcctcgaaagcgccgctccatctcagaccagcgtgtacttctgcgccagcaaagttggcccaggccagcacaatagccctctgcactttggcaacggcaccagactgacagtgacactcgaggacctgaagaacgtgttcccacctgaggtggccgtgttcgagcctagcgaggccgagatcagccacacccagaaagccaccctcgtgtgcctggctaccggcttctaccccgaccatgtggaactgtcttggtgggtcaacggcaaagaggtgcacagcggcgtgtctaccgacccccagccactgaaagaacagcccgccctgaacgacagccggtactgcctgagcagcagactgagagtgtccgccaccttctggcagaacccccggaaccacttcagatgccaggtgcagttctacggcctgagcgagaacgacgagtggacccaggacagagccaagcccgtgacccagatcgtgtctgccgaagcctggggcagagccgattgcggatcccaggctcagagcgattgcagctgtagcacagtgtctccaggcgtgctggccggaattgtgatgggcgatctggtgctgacagtgctgattgccctggccgtgtacttcctgggtagactggtgcctagaggaagaggcgctgccgaagccgccacaagaaagcagagaatcaccgagacagagagcccctaccaagagctgcaaggccagagaagcgacgtgtacagcgacctgaatacccagagagtgaagttcagcagaagcgccgacgcccctgcctaccagcagggacagaaccaactgtacaacgagctgaacctgggcagacgggaagagtacgacgtgctggacaagcggagaggcagggaccctgagatgggcggaaagccccagcggagaaagaacccccaggaaggactgtataacgaactccagaaagacaagatggccgaagcctacagcgagatcggcatgaagggcgagcggagaagaggcaagggccacgatggcctgtaccagggcctgagcaccgccaccaaggacacctatgacgccctgcacatgcaggccctgcctccaagaagggccaagcgatctggatctggagcaacaaacttctcactactcaaacaagcaggtgacgtggaggagaatcccgggcctactagtatggactggatttggcgcatccttttccttgtcggcgctgctaccggcgcgcattccttcgaagctcagaaagtgacacaggcccagaccgagatcagcgtggtggaaaaagaagatgtgaccctggactgcgtgtacgagacaagggacaccgcctactacctgttctggtacaagcagcctcctagcggcgagctggtgttcctgattagacagccttggtggggcagcagcagaggcatcagcggcagatacagctggaacttccagaagtccaccagcagcttcaacttcaccatcaccgccagccaggtggtggatagcgccgtgtacttttgtgccatgagcgtgcccgatagcagaggccactaccagttcaccttcggcaagggcacaaagctgagcgtgatccctacgcgtatccagaaccctgatcctgccgtgtaccagctgcgggatagcaagagcagcgacaagagcgtgtgtctgttcaccgacttcgacagccagaccaacgtgtcccagagcaaggactccgacgtgtacatcaccgataagaccgtgctggacatgcggagcatggacttcaagagcaactccgccgtggcctggtccaacaagtccgatttcgcctgcgccaacgccttcaacaacagcattatccccgaggacacattcttcccaagccccgagagcagctgcggtaccacaacgccgggcgaaaggagttccttgccggccttttaccccggcacaagcggaagctgtagtgggtgtggaagcctcagcctcccacttcttgcgggcctcgtcgcggcagatgcagtagcttcacttcttattgtaggcgcggtatttaggagcaagcggtcacggctgctccacagcgattacatgaatatgacaccacgaagaccgggtcctactcgcaaacactaccaaccctacgcacctccccgcgactttgcagcgtaccgatctctctgtgctcgaccaaggaggtcacccgctcaggaggatggtaaggtgtatataaatatgccaggacgcggataa

SEQ ID NO: 2442 - DNA, 3276 bp, synthetic construct
  source 1..3276: mol_type = other DNA
atggccttaccagtgaccgccttgctcctgccgctggccttgctgctccacgccgccaggccggaattcaatgctggcgtgacccagacacctaagttccgggtgctgaaaaccggccagagcatgacactgctgtgcgcccaggacatgaaccatgagtacatgtattggtacagacaggaccccggcatgggcctgagactgatccactattctggctggggcaaagacaccgccaagggcgaagttcccgatggctacaacgtgtcccggctgaagaagcagaacttcctgctgggcctcgaaagcgccgctccatctcagaccagcgtgtacttctgcgccagcaaagttggcccaggccagcacaatagccctctgcactttggcaacggcaccagactgacagtgacactcgaggacctgaagaacgtgttcccacctgaggtggccgtgttcgagcctagcgaggccgagatcagccacacccagaaagccaccctcgtgtgcctggctaccggcttctaccccgaccatgtggaactgtcttggtgggtcaacggcaaagaggtgcacagcggcgtgtctaccgacccccagccactgaaagaacagcccgccctgaacgacagccggtactgcctgagcagcagactgagagtgtccgccaccttctggcagaacccccggaaccacttcagatgccaggtgcagttctacggcctgagcgagaacgacgagtggacccaggacagagccaagcccgtgacccagatcgtgtctgccgaagcctggggcagagccgattgcggatcccagagcttcggcctgctggaccccaagctgtgctacctgctggatggcatcctgttcatctacggcgtgatcctgaccgccctgttcctgagagtgaagttcagcagaagcgccgacgcccctgcctaccagcagggacagaaccaactgtacaacgagctgaacctgggcagacgggaagagtacgacgtgctggacaagcggagaggcagggaccctgagatgggcggaaagccccagcggagaaagaacccccaggaaggactgtataacgaactccagaaagacaagatggccgaagcctacagcgagatcggcatgaagggcgagcggagaagaggcaagggccacgatggcctgtaccagggcctgagcaccgccaccaaggacacctatgacgccctgcacatgcaggccctgcctccaagaagggccaagcgatctggatctggagcaacaaacttctcactactcaaacaagcaggtgacgtggaggagaatcccgggcctactagtatggactggatttggcgcatccttttccttgtcggcgctgctaccggcgcgcattccttcgaagctcagaaagtgacacaggcccagaccgagatcagcgtggtggaaaaagaagatgtgaccctggactgcgtgtacgagacaagggacaccgcctactacctgttctggtacaagcagcctcctagcggcgagctggtgttcctgattagacagccttggtggggcagcagcagaggcatcagcggcagatacagctggaacttccagaagtccaccagcagcttcaacttcaccatcaccgccagccaggtggtggatagcgccgtgtacttttgtgccatgagcgtgcccgatagcagaggccactaccagttcaccttcggcaagggcacaaagctgagcgtgatccctacgcgtatccagaaccctgatcctgccgtgtaccagctgcgggatagcaagagcagcgacaagagcgtgtgtctgttcaccgacttcgacagccagaccaacgtgtcccagagcaaggactccgacgtgtacatcaccgataagaccgtgctggacatgcggagcatggacttcaagagcaactccgccgtggcctggtccaacaagtccgatttcgcctgcgccaacgccttcaacaacagcattatccccgaggacacattcttcccaagccccgagagcagctgcggtacccagagttttgggttgttggaccctaaattgtgctatctgttggacggaatcctgttcatttacggagtgatcctgaccgcattgttcctgcgggttaagttttccagatccgcagacgcacccgcttaccaacaagggcagaaccaactctacaatgaacttaatttggggcggagggaagagtacgacgttctggacaaaaggaggggacgagatcccgagatgggcggaaagcctcagcgaaggaagaatccgcaagaggggctttataacgaactccagaaagataaaatggcagaagcctatagtgagattgggatgaagggagaaaggaggaggggtaaaggtcacgatgggttgtaccaaggattgagcacagccactaaagatacctatgatgcgctccacatgcaggccctgccgccaagacgcgccaagagaagcggatctggcgtgaagcagaccctgaatttcgacctgctgaagctggctggcgacgtggaatccaacccaggcccttctagaggccatatggctctgcctgtgacagctctgctgctgcctctggcactgctgcttcatgctgctagacctagccagtttagagtgtcccctctggacagaacctggaacctgggcgagacagtggaactgaagtgccaggtgctgctgagcaaccctacaagcggctgctcctggctgtttcagcctagaggtgcagccgcctctcctacctttctgctgtacctgagccagaacaagcccaaggccgccgaaggactggacacccagagattcagcggcaagagactgggcgacaccttcgtgctgaccctgagcgacttcagaagagagaacgagggctactacttctgtagcgccctgagcaacagcatcatgtacttcagccacttcgtgcccgtgtttctgcccgccaagcctacaacaacccctgctcctagacctcctacaccagctcctacaatcgccagccagcctctgtctctcagacccgaagcctgtagacctgctgctggcggagctgtgcataccagaggactggatttcgcctgcgacatctacatctgggctcctctggctggcacatgtggcgtgctgctgctgtccctggtcatcaccctgtactgcaaccaccggaacaggcggagagtgtgcaagtgccctagacctgtggtcaagagcggcgacaagcctagcctgagcgccagatatgtt

SEQ ID NO: 2443 - DNA, 2499 bp, synthetic construct
  source 1..2499: mol_type = other DNA
atggccttaccagtgaccgccttgctcctgccgctggccttgctgctccacgccgccaggccggaattcaatgctggcgtgacccagacacctaagttccgggtgctgaaaaccggccagagcatgacactgctgtgcgcccaggacatgaaccatgagtacatgtattggtacagacaggaccccggcatgggcctgagactgatccactattctggctggggcaaagacaccgccaagggcgaagttcccgatggctacaacgtgtcccggctgaagaagcagaacttcctgctgggcctcgaaagcgccgctccatctcagaccagcgtgtacttctgcgccagcaaagttggcccaggccagcacaatagccctctgcactttggcaacggcaccagactgacagtgacactcgaggacctgaagaacgtgttcccacctgaggtggccgtgttcgagcctagcgaggccgagatcagccacacccagaaagccaccctcgtgtgcctggctaccggcttctaccccgaccatgtggaactgtcttggtgggtcaacggcaaagaggtgcacagcggcgtgtctaccgacccccagccactgaaagaacagcccgccctgaacgacagccggtactgcctgagcagcagactgagagtgtccgccaccttctggcagaacccccggaaccacttcagatgccaggtgcagttctacggcctgagcgagaacgacgagtggacccaggacagagccaagcccgtgacccagatcgtgtctgccgaagcctggggcagagccgattgcggatcccagagcttcggcctgctggaccccaagctgtgctacctgctggatggcatcctgttcatctacggcgtgatcctgaccgccctgttcctgagagtgaagttcagcagaagcgccgacgcccctgcctaccagcagggacagaaccaactgtacaacgagctgaacctgggcagacgggaagagtacgacgtgctggacaagcggagaggcagggaccctgagatgggcggaaagccccagcggagaaagaacccccaggaaggactgtataacgaactccagaaagacaagatggccgaagcctacagcgagatcggcatgaagggcgagcggagaagaggcaagggccacgatggcctgtaccagggcctgagcaccgccaccaaggacacctatgacgccctgcacatgcaggccctgcctccaagaagggccaagcgatctggatctggagcaacaaacttctcactactcaaacaagcaggtgacgtggaggagaatcccgggcctactagtatggactggatttggcgcatccttttccttgtcggcgctgctaccggcgcgcattccttcgaagctcagaaagtgacacaggcccagaccgagatcagcgtggtggaaaaagaagatgtgaccctggactgcgtgtacgagacaagggacaccgcctactacctgttctggtacaagcagcctcctagcggcgagctggtgttcctgattagacagccttggtggggcagcagcagaggcatcagcggcagatacagctggaacttccagaagtccaccagcagcttcaacttcaccatcaccgccagccaggtggtggatagcgccgtgtacttttgtgccatgagcgtgcccgatagcagaggccactaccagttcaccttcggcaagggcacaaagctgagcgtgatccctacgcgtgcctctacaaagggaccctccgtgtttcctctggctcccagcagcaagtctacaagcggaggaacagccgctctgggctgcctggtcaaggattactttcccgagcctgtgaccgtgtcctggaatagcggagcactgacaagcggcgtgcacacctttccagccgtgctgcaaagcagcggcctgtactctctgagcagcgtggtcacagtgcctagctctagcctgggcacccagacctacatctgcaatgtgaaccacaagcctagcaacaccaaggtggacaagagagtggaacccaagagctgtggtacccagagttttgggttgttggaccctaaattgagctatctgttggacggaatcctgttcatttacggagtgatcctgaccgcattgttcctgcgggttaagttttccagatccgcagacgcacccgcttaccaacaagggcagaaccaactctacaatgaacttaatttggggcggagggaagagtacgacgttctggacaaaaggaggggacgagatcccgagatgggcggaaagcctcagcgaaggaagaatccgcaagaggggctttataacgaactccagaaagataaaatggcagaagcctatagtgagattgggatgaagggagaaaggaggaggggtaaaggtcacgatgggttgtaccaaggattgagcacagccactaaagatacctatgatgcgctccacatgcaggccctgccgccaagataa

SEQ ID NO: 2444 - DNA, 2472 bp, synthetic construct
  source 1..2472: mol_type = other DNA
atggccttaccagtgaccgccttgctcctgccgctggccttgctgctccacgccgccaggccggaattcaatgctggcgtgacccagacacctaagttccgggtgctgaaaaccggccagagcatgacactgctgtgcgcccaggacatgaaccatgagtacatgtattggtacagacaggaccccggcatgggcctgagactgatccactattctggctggggcaaagacaccgccaagggcgaagttcccgatggctacaacgtgtcccggctgaagaagcagaacttcctgctgggcctcgaaagcgccgctccatctcagaccagcgtgtacttctgcgccagcaaagttggcccaggccagcacaatagccctctgcactttggcaacggcaccagactgacagtgacactcgaggacctgaagaacgtgttcccacctgaggtggccgtgttcgagcctagcgaggccgagatcagccacacccagaaagccaccctcgtgtgcctggctaccggcttctaccccgaccatgtggaactgtcttggtgggtcaacggcaaagaggtgcacagcggcgtgtctaccgacccccagccactgaaagaacagcccgccctgaacgacagccggtactgcctgagcagcagactgagagtgtccgccaccttctggcagaacccccggaaccacttcagatgccaggtgcagttctacggcctgagcgagaacgacgagtggacccaggacagagccaagcccgtgacccagatcgtgtctgccgaagcctggggcagagccgattgcggatcccagagcttcggcctgctggaccccaagctgtgctacctgctggatggcatcctgttcatctacggcgtgatcctgaccgccctgttcctgagagtgaagttcagcagaagcgccgacgcccctgcctaccagcagggacagaaccaactgtacaacgagctgaacctgggcagacgggaagagtacgacgtgctggacaagcggagaggcagggaccctgagatgggcggaaagccccagcggagaaagaacccccaggaaggactgtataacgaactccagaaagacaagatggccgaagcctacagcgagatcggcatgaagggcgagcggagaagaggcaagggccacgatggcctgtaccagggcctgagcaccgccaccaaggacacctatgacgccctgcacatgcaggccctgcctccaagaagggccaagcgatctggatctggagcaacaaacttctcactactcaaacaagcaggtgacgtggaggagaatcccgggcctactagtatggactggatttggcgcatccttttccttgtcggcgctgctaccggcgcgcattccttcgaagctcagaaagtgacacaggcccagaccgagatcagcgtggtggaaaaagaagatgtgaccctggactgcgtgtacgagacaagggacaccgcctactacctgttctggtacaagcagcctcctagcggcgagctggtgttcctgattagacagccttggtggggcagcagcagaggcatcagcggcagatacagctggaacttccagaagtccaccagcagcttcaacttcaccatcaccgccagccaggtggtggatagcgccgtgtacttttgtgccatgagcgtgcccgatagcagaggccactaccagttcaccttcggcaagggcacaaagctgagcgtgatccctacgcgtatccagaaccctgatcctgccgtgtaccagctgcgggatagcaagagcagcgacaagagcgtgtgtctgttcaccgacttcgacagccagaccaacgtgtcccagagcaaggactccgacgtgtacatcaccgataagaccgtgctggacatgcggagcatggacttcaagagcaactccgccgtggcctggtccaacaagtccgatttcgcctgcgccaacgccttcaacaacagcattatccccgaggacacattcttcccaagccccgagagcagctgcggtacccagagttttgggttgttggaccctaaattgagctatctgttggacggaatcctgttcatttacggagtgatcctgaccgcattgttcctgcgggttaagttttccagatccgcagacgcacccgcttaccaacaagggcagaaccaactctacaatgaacttaatttggggcggagggaagagtacgacgttctggacaaaaggaggggacgagatcccgagatgggcggaaagcctcagcgaaggaagaatccgcaagaggggctttataacgaactccagaaagataaaatggcagaagcctatagtgagattgggatgaagggagaaaggaggaggggtaaaggtcacgatgggttgtaccaaggattgagcacagccactaaagatacctatgatgcgctccacatgcaggccctgccgccaagataa

SEQ ID NO: 2445 - DNA, 2979 bp, synthetic construct
  source 1..2979: mol_type = other DNA
atggccttaccagtgaccgccttgctcctgccgctggccttgctgctccacgccgccaggccggaattcaatgctggcgtgacccagacacctaagttccgggtgctgaaaaccggccagagcatgacactgctgtgcgcccaggacatgaaccatgagtacatgtattggtacagacaggaccccggcatgggcctgagactgatccactattctggctggggcaaagacaccgccaagggcgaagttcccgatggctacaacgtgtcccggctgaagaagcagaacttcctgctgggcctcgaaagcgccgctccatctcagaccagcgtgtacttctgcgccagcaaagttggcccaggccagcacaatagccctctgcactttggcaacggcaccagactgacagtgacactcgagggacagcctaaggccaatcctaccgtgacactgttccctccaagcagcgaagaactccaggccaacaaggccacacttgtgtgcctgatctccgacttctaccctggggctgtgacagtggcttggaaggccgatggatctcctgtgaaagccggcgtggaaaccaccaagccatccaagcagagcaacaacaaatacgccgccagctcctacctgagcctgacacctgagcagtggaagtcccacagatcctacagctgccaagtgacccacgaaggcagcaccgtggaaaagacagtggcccctacagagtgcagcggatccctgggagagcctcagctgtgctatatcctggacgccatcctgtttctgtacggcatcgtgctgaccctgctgtactgccggctgaagatccaagtgcggaaggccgccatcaccagctacgagaaatccgacggcgtgtacaccggcctgagcaccagaaatcaagagacatacgagacactgaagcacgaaaagcctccacaaagggccaagcgatctggatctggagcaacaaacttctcactactcaaacaagcaggtgacgtggaggagaatcccgggcctactagtatggactggatttggcgcatccttttccttgtcggcgctgctaccggcgcgcattccttcgaagctcagaaagtgacacaggcccagaccgagatcagcgtggtggaaaaagaagatgtgaccctggactgcgtgtacgagacaagggacaccgcctactacctgttctggtacaagcagcctcctagcggcgagctggtgttcctgattagacagccttggtggggcagcagcagaggcatcagcggcagatacagctggaacttccagaagtccaccagcagcttcaacttcaccatcaccgccagccaggtggtggatagcgccgtgtacttttgtgccatgagcgtgcccgatagcagaggccactaccagttcaccttcggcaagggcacaaagctgagcgtgatccctacgcgtatccagaaccctgatcctgccgtgtaccagctgcgggatagcaagagcagcgacaagagcgtgtgtctgttcaccgacttcgacagccagaccaacgtgtcccagagcaaggactccgacgtgtacatcaccgataagaccgtgctggacatgcggagcatggacttcaagagcaactccgccgtggcctggtccaacaagtccgatttcgcctgcgccaacgccttcaacaacagcattatccccgaggacacattcttcccaagccccgagagcagctgcggtacccagagttttgggttgttggaccctaaattgtgctatctgttggacggaatcctgttcatttacggagtgatcctgaccgcattgttcctgcgggttaagttttccagatccgcagacgcacccgcttaccaacaagggcagaaccaactctacaatgaacttaatttggggcggagggaagagtacgacgttctggacaaaaggaggggacgagatcccgagatgggcggaaagcctcagcgaaggaagaatccgcaagaggggctttataacgaactccagaaagataaaatggcagaagcctatagtgagattgggatgaagggagaaaggaggaggggtaaaggtcacgatgggttgtaccaaggattgagcacagccactaaagatacctatgatgcgctccacatgcaggccctgccgccaagacgcgccaagagaagcggatctggcgtgaagcagaccctgaatttcgacctgctgaagctggctggcgacgtggaatccaacccaggcccttctagaggccatatggctctgcctgtgacagctctgctgctgcctctggcactgctgcttcatgctgctagacctagccagtttagagtgtcccctctggacagaacctggaacctgggcgagacagtggaactgaagtgccaggtgctgctgagcaaccctacaagcggctgctcctggctgtttcagcctagaggtgcagccgcctctcctacctttctgctgtacctgagccagaacaagcccaaggccgccgaaggactggacacccagagattcagcggcaagagactgggcgacaccttcgtgctgaccctgagcgacttcagaagagagaacgagggctactacttctgtagcgccctgagcaacagcatcatgtacttcagccacttcgtgcccgtgtttctgcccgccaagcctacaacaacccctgctcctagacctcctacaccagctcctacaatcgccagccagcctctgtctctcagacccgaagcctgtagacctgctgctggcggagctgtgcataccagaggactggatttcgcctgcgacatctacatctgggctcctctggctggcacatgtggcgtgctgctgctgtccctggtcatcaccctgtactgcaaccaccggaacaggcggagagtgtgcaagtgccctagacctgtggtcaagagcggcgacaagcctagcctgagcgccagatatgtt

SEQ ID NO: 2446 - DNA, 2274 bp, synthetic construct
  source 1..2274: mol_type = other DNA
atggccttaccagtgaccgccttgctcctgccgctggccttgctgctccacgccgccaggccggaattcaatgctggcgtgacccagacacctaagttccgggtgctgaaaaccggccagagcatgacactgctgtgcgcccaggacatgaaccatgagtacatgtattggtacagacaggaccccggcatgggcctgagactgatccactattctggctggggcaaagacaccgccaagggcgaagttcccgatggctacaacgtgtcccggctgaagaagcagaacttcctgctgggcctcgaaagcgccgctccatctcagaccagcgtgtacttctgcgccagcaaagttggcccaggccagcacaatagccctctgcactttggcaacggcaccagactgacagtgacactcgaggacctgaagaacgtgttcccacctgaggtggccgtgttcgagcctagcgaggccgagatcagccacacccagaaagccaccctcgtgtgcctggctaccggcttctaccccgaccatgtggaactgtcttggtgggtcaacggcaaagaggtgcacagcggcgtgtctaccgacccccagccactgaaagaacagcccgccctgaacgacagccggtactgcctgagcagcagactgagagtgtccgccaccttctggcagaacccccggaaccacttcagatgccaggtgcagttctacggcctgagcgagaacgacgagtggacccaggacagagccaagcccgtgacccagatcgtgtctgccgaagcctggggcagagccgattgcggatcccagagcttcggcctgctggaccccaagctgtgctacctgctggatggcatcctgttcatctacggcgtgatcctgaccgccctgttcctgagagtgaagttcagcagaagcgccgacgcccctgcctaccagcagggacagaaccaactgtacaacgagctgaacctgggcagacgggaagagtacgacgtgctggacaagcggagaggcagggaccctgagatgggcggaaagccccagcggagaaagaacccccaggaaggactgtataacgaactccagaaagacaagatggccgaagcctacagcgagatcggcatgaagggcgagcggagaagaggcaagggccacgatggcctgtaccagggcctgagcaccgccaccaaggacacctatgacgccctgcacatgcaggccctgcctccaagaagggccaagcgatctggatctggagcaacaaacttctcactactcaaacaagcaggtgacgtggaggagaatcccgggcctactagtatggactggatttggcgcatccttttccttgtcggcgctgctaccggcgcgcattccttcgaagctcagaaagtgacacaggcccagaccgagatcagcgtggtggaaaaagaagatgtgaccctggactgcgtgtacgagacaagggacaccgcctactacctgttctggtacaagcagcctcctagcggcgagctggtgttcctgattagacagccttggtggggcagcagcagaggcatcagcggcagatacagctggaacttccagaagtccaccagcagcttcaacttcaccatcaccgccagccaggtggtggatagcgccgtgtacttttgtgccatgagcgtgcccgatagcagaggccactaccagttcaccttcggcaagggcacaaagctgagcgtgatccctacgcgtgcctctacaaagggaccctccgtgtttcctctggctcccagcagcaagtctacaagcggaggaacagccgctctgggctgcctggtcaaggattactttcccgagcctgtgaccgtgtcctggaatagcggagcactgacaagcggcgtgcacacctttccagccgtgctgcaaagcagcggcctgtactctctgagcagcgtggtcacagtgcctagctctagcctgggcacccagacctacatctgcaatgtgaaccacaagcctagcaacaccaaggtggacaagagagtggaacccaagagctgtggtaccctcggagaaccacagctctgttacattctggatgctatcctgttcctctatgggatcgtcctgacactcctgtattgcagactcaaaattcaagttcgcaaagccgccattacctcttacgagaagagtgatggggtgtacacaggactgtctacccggaatcaagaaacctacgaaaccctcaaacatgagaagccacctcagtaa

SEQ ID NO: 2447 - DNA, 2274 bp, synthetic construct; identical to SEQ ID NO: 2446
  source 1..2274: mol_type = other DNA

SEQ ID NO: 2448 - DNA, 2247 bp, synthetic construct
  source 1..2247: mol_type = other DNA
atggccttaccagtgaccgccttgctcctgccgctggccttgctgctccacgccgccaggccggaattcaatgctggcgtgacccagacacctaagttccgggtgctgaaaaccggccagagcatgacactgctgtgcgcccaggacatgaaccatgagtacatgtattggtacagacaggaccccggcatgggcctgagactgatccactattctggctggggcaaagacaccgccaagggcgaagttcccgatggctacaacgtgtcccggctgaagaagcagaacttcctgctgggcctcgaaagcgccgctccatctcagaccagcgtgtacttctgcgccagcaaagttggcccaggccagcacaatagccctctgcactttggcaacggcaccagactgacagtgacactcgaggacctgaagaacgtgttcccacctgaggtggccgtgttcgagcctagcgaggccgagatcagccacacccagaaagccaccctcgtgtgcctggctaccggcttctaccccgaccatgtggaactgtcttggtgggtcaacggcaaagaggtgcacagcggcgtgtctaccgacccccagccactgaaagaacagcccgccctgaacgacagccggtactgcctgagcagcagactgagagtgtccgccaccttctggcagaacccccggaaccacttcagatgccaggtgcagttctacggcctgagcgagaacgacgagtggacccaggacagagccaagcccgtgacccagatcgtgtctgccgaagcctggggcagagccgattgcggatcccagagcttcggcctgctggaccccaagctgtgctacctgctggatggcatcctgttcatctacggcgtgatcctgaccgccctgttcctgagagtgaagttcagcagaagcgccgacgcccctgcctaccagcagggacagaaccaactgtacaacgagctgaacctgggcagacgggaagagtacgacgtgctggacaagcggagaggcagggaccctgagatgggcggaaagccccagcggagaaagaacccccaggaaggactgtataacgaactccagaaagacaagatggccgaagcctacagcgagatcggcatgaagggcgagcggagaagaggcaagggccacgatggcctgtaccagggcctgagcaccgccaccaaggacacctatgacgccctgcacatgcaggccctgcctccaagaagggccaagcgatctggatctggagcaacaaacttctcactactcaaacaagcaggtgacgtggaggagaatcccgggcctactagtatggactggatttggcgcatccttttccttgtcggcgctgctaccggcgcgcattccttcgaagctcagaaagtgacacaggcccagaccgagatcagcgtggtggaaaaagaagatgtgaccctggactgcgtgtacgagacaagggacaccgcctactacctgttctggtacaagcagcctcctagcggcgagctggtgttcctgattagacagccttggtggggcagcagcagaggcatcagcggcagatacagctggaacttccagaagtccaccagcagcttcaacttcaccatcaccgccagccaggtggtggatagcgccgtgtacttttgtgccatgagcgtgcccgatagcagaggccactaccagttcaccttcggcaagggcacaaagctgagcgtgatccctacgcgtatccagaaccctgatcctgccgtgtaccagctgcgggatagcaagagcagcgacaagagcgtgtgtctgttcaccgacttcgacagccagaccaacgtgtcccagagcaaggactccgacgtgtacatcaccgataagaccgtgctggacatgcggagcatggacttcaagagcaactccgccgtggcctggtccaacaagtccgatttcgcctgcgccaacgccttcaacaacagcattatccccgaggacacattcttcccaagccccgagagcagctgcggtaccctcggagaaccacagctctgttacattctggatgctatcctgttcctctatgggatcgtcctgacactcctgtattgcagactcaaaattcaagttcgcaaagccgccattacctcttacgagaagagtgatggggtgtacacaggactgtctacccggaatcaagaaacctacgaaaccctcaaacatgagaagccacctcagtaa

SEQ ID NO: 2449 - DNA, 2991 bp, synthetic construct
  source 1..2991: mol_type = other DNA
atggccttaccagtgaccgccttgctcctgccgctggccttgctgctccacgccgccaggccggaattcaatgctggcgtgacccagacacctaagttccgggtgctgaaaaccggccagagcatgacactgctgtgcgcccaggacatgaaccatgagtacatgtattggtacagacaggaccccggcatgggcctgagactgatccactattctggctggggcaaagacaccgccaagggcgaagttcccgatggctacaacgtgtcccggctgaagaagcagaacttcctgctgggcctcgaaagcgccgctccatctcagaccagcgtgtacttctgcgccagcaaagttggcccaggccagcacaatagccctctgcactttggcaacggcaccagactgacagtgacactcgagggacagcctaaggccaatcctaccgtgacactgttccctccaagcagcgaagaactccaggccaacaaggccacacttgtgtgcctgatctccgacttctaccctggggctgtgacagtggcttggaaggccgatggatctcctgtgaaagccggcgtggaaaccaccaagccatccaagcagagcaacaacaaatacgccgccagctcctacctgagcctgacacctgagcagtggaagtcccacagatcctacagctgccaagtgacccacgaaggcagcaccgtggaaaagacagtggcccctacagagtgcagcacaacacctggcgagagaagtagcctgcctgccttctatcctggcaccagcggctcttgttctggctgtggatctctgagcctgcctctgctggctggactggttgctgctgatgctgtggcctctctgctgattgtgggagccgtgttcctgtgcgccagacctagaagaagccccgctcaagaggacggcaaggtgtacatcaacatgcccggcagaggaagggccaagcgatctggatctggagcaacaaacttctcactactcaaacaagcaggtgacgtggaggagaatcccgggcctactagtatggactggatttggcgcatccttttccttgtcggcgctgctaccggcgcgcattccttcgaagctcagaaagtgacacaggcccagaccgagatcagcgtggtggaaaaagaagatgtgaccctggactgcgtgtacgagacaagggacaccgcctactacctgttctggtacaagcagcctcctagcggcgagctggtgttcctgattagacagccttggtggggcagcagcagaggcatcagcggcagatacagctggaacttccagaagtccaccagcagcttcaacttcaccatcaccgccagccaggtggtggatagcgccgtgtacttttgtgccatgagcgtgcccgatagcagaggccactaccagttcaccttcggcaagggcacaaagctgagcgtgatccctacgcgtatccagaaccctgatcctgccgtgtaccagctgcgggatagcaagagcagcgacaagagcgtgtgtctgttcaccgacttcgacagccagaccaacgtgtcccagagcaaggactccgacgtgtacatcaccgataagaccgtgctggacatgcggagcatggacttcaagagcaactccgccgtggcctggtccaacaagtccgatttcgcctgcgccaacgccttcaacaacagcattatccccgaggacacattcttcccaagccccgagagcagctgcggtacccagagttttgggttgttggaccctaaattgtgctatctgttggacggaatcctgttcatttacggagtgatcctgaccgcattgttcctgcgggttaagttttccagatccgcagacgcacccgcttaccaacaagggcagaaccaactctacaatgaacttaatttggggcggagggaagagtacgacgttctggacaaaaggaggggacgagatcccgagatgggcggaaagcctcagcgaaggaagaatccgcaagaggggctttataacgaactccagaaagataaaatggcagaagcctatagtgagattgggatgaagggagaaaggaggaggggtaaaggtcacgatgggttgtaccaaggattgagcacagccactaaagatacctatgatgcgctccacatgcaggccctgccgccaagacgcgccaagagaagcggatctggcgtgaagcagaccctgaatttcgacctgctgaagctggctggcgacgtggaatccaacccaggcccttctagaggccatatggctctgcctgtgacagctctgctgctgcctctggcactgctgcttcatgctgctagacctagccagtttagagtgtcccctctggacagaacctggaacctgggcgagacagtggaactgaagtgccaggtgctgctgagcaaccctacaagcggctgctcctggctgtttcagcctagaggtgcagccgcctctcctacctttctgctgtacctgagccagaacaagcccaaggccgccgaaggactggacacccagagattcagcggcaagagactgggcgacaccttcgtgctgaccctgagcgacttcagaagagagaacgagggctactacttctgtagcgccctgagcaacagcatcatgtacttcagccacttcgtgcccgtgtttctgcccgccaagcctacaacaacccctgctcctagacctcctacaccagctcctacaatcgccagccagcctctgtctctcagacccgaagcctgtagacctgctgctggcggagctgtgcataccagaggactggatttcgcctgcgacatctacatctgggctcctctggctggcacatgtggcgtgctgctgctgtccctggtcatcaccctgtactgcaaccaccggaacaggcggagagtgtgcaagtgccctagacctgtggtcaagagcggcgacaagcctagcctgagcgccagatatgtt

SEQ ID NO: 2450 - DNA, 3090 bp, synthetic construct
  source 1..3090: mol_type = other DNA
atggccttaccagtgaccgccttgctcctgccgctggccttgctgctccacgccgccaggccggaattcaatgctggcgtgacccagacacctaagttccgggtgctgaaaaccggccagagcatgacactgctgtgcgcccaggacatgaaccatgagtacatgtattggtacagacaggaccccggcatgggcctgagactgatccactattctggctggggcaaagacaccgccaagggcgaagttcccgatggctacaacgtgtcccggctgaagaagcagaacttcctgctgggcctcgaaagcgccgctccatctcagaccagcgtgtacttctgcgccagcaaagttggcccaggccagcacaatagccctctgcactttggcaacggcaccagactgacagtgacactcgaggacctgaagaacgtgttcccacctgaggtggccgtgttcgagcctagcgaggccgagatcagccacacccagaaagccaccctcgtgtgcctggctaccggcttctaccccgaccatgtggaactgtcttggtgggtcaacggcaaagaggtgcacagcggcgtgtctaccgacccccagccactgaaagaacagcccgccctgaacgacagccggtactgcctgagcagcagactgagagtgtccgccaccttctggcagaacccccggaaccacttcagatgccaggtgcagttctacggcctgagcgagaacgacgagtggacccaggacagagccaagcccgtgacccagatcgtgtctgccgaagcctggggcagagccgattgcggatcccagagcttcggcctgctggaccccaagctgtgctacctgctggatggcatcctgttcatctacggcgtgatcctgaccgccctgttcctgagagtgaagttcagcagaagcgccgacgcccctgcctaccagcagggacagaaccaactgtacaacgagctgaacctgggcagacgggaagagtacgacgtgctggacaagcggagaggcagggaccctgagatgggcggaaagccccagcggagaaagaacccccaggaaggactgtataacgaactccagaaagacaagatggccgaagcctacagcgagatcggcatgaagggcgagcggagaagaggcaagggccacgatggcctgtaccagggcctgagcaccgccaccaaggacacctatgacgccctgcacatgcaggccctgcctccaagaagggccaagcgatctggatctggagcaacaaacttctcactactcaaacaagcaggtgacgtggaggagaatcccgggcctactagtatggactggatttggcgcatccttttccttgtcggcgctgctaccggcgcgcattccttcgaagctcagaaagtgacacaggcccagaccgagatcagcgtggtggaaaaagaagatgtgaccctggactgcgtgtacgagacaagggacaccgcctactacctgttctggtacaagcagcctcctagcggcgagctggtgttcctgattagacagccttggtggggcagcagcagaggcatcagcggcagatacagctggaacttccagaagtccaccagcagcttcaacttcaccatcaccgccagccaggtggtggatagcgccgtgtacttttgtgccatgagcgtgcccgatagcagaggccactaccagttcaccttcggcaagggcacaaagctgagcgtgatccctacgcgtgcctctacaaagggaccctccgtgtttcctctggctcccagcagcaagtctacaagcggaggaacagccgctctgggctgcctggtcaaggattactttcccgagcctgtgaccgtgtcctggaatagcggagcactgacaagcggcgtgcacacctttccagccgtgctgcaaagcagcggcctgtactctctgagcagcgtggtcacagtgcctagctctagcctgggcacccagacctacatctgcaatgtgaaccacaagcctagcaacaccaaggtggacaagagagtggaacccaagagctgtacaacgccgggcgaaaggagttccttgccggccttttaccccggcacaagcggaagctgtagtgggtgtggaagcctcagcctcccacttcttgcgggcctcgtcgcggcagatgcagtagcttcacttcttattgtaggcgcggtatttctctgtgctcgaccaaggaggtcacccgctcaggaggatggtaaggtgtatataaatatgccaggacgcggacgcgccaagagaagcggatctggcgtgaagcagaccctgaatttcgacctgctgaagctggctggcgacgtggaatccaacccaggcccttctagaggccatatggctctgcctgtgacagctctgctgctgcctctggcactgctgcttcatgctgctagacctagccagtttagagtgtcccctctggacagaacctggaacctgggcgagacagtggaactgaagtgccaggtgctgctgagcaaccctacaagcggctgctcctggctgtttcagcctagaggtgcagccgcctctcctacctttctgctgtacctgagccagaacaagcccaaggccgccgaaggactggacacccagagattcagcggcaagagactgggcgacaccttcgtgctgaccctgagcgacttcagaagagagaacgagggctactacttctgtagcgccctgagcaacagcatcatgtacttcagccacttcgtgcccgtgtttctgcccgccaagcctacaacaacccctgctcctagacctcctacaccagctcctacaatcgccagccagcctctgtctctcagacccgaagcctgtagacctgctgctggcggagctgtgcataccagaggactggatttcgcctgcgacatctacatctgggctcctctggctggcacatgtggcgtgctgctgctgtccctggtcatcaccctgtactgcaaccaccggaacaggcggagagtgtgcaagtgccctagacctgtggtcaagagcggcgacaagcctagcctgagcgccagatatgtt

SEQ ID NO: 2451 - DNA, 2826 bp, synthetic construct
  source 1..2826: mol_type = other DNA
atggccttaccagtgaccgccttgctcctgccgctggccttgctgctccacgccgccaggccgaatgctggcgtgacccagacacctaagttccgggtgctgaaaaccggccagagcatgacactgctgtgcgcccaggacatgaaccatgagtacatgtattggtacagacaggaccccggcatgggcctgagactgatccactattctggctggggcaaagacaccgccaagggcgaagttcccgatggctacaacgtgtcccggctgaagaagcagaacttcctgctgggcctcgaaagcgccgctccatctcagaccagcgtgtacttctgcgccagcaaagttggcccaggccagcacaatagccctctgcactttggcaacggcaccagactgacagtgacactcgagctgtgggtttcacagcctccagagatcagaaccctggaaggcagcagcgccttcctgccttgcagcttcaatgcctctcagggcagactggctatcggcagcgtgacctggttcagagatgaggtggtgcccggcaaagaagtgcggaacggcacccctgagtttagaggaaggctggcccctctggcctccagcagatttctgcacgatcaccaggccgagctgcacatcagagatgtgcgaggacacgacgccagcatctacgtgtgcagagtggaagtgctcggcctcggagttggcacaggcaatggaacaagactggtggtggaaaaagagcaccctcagctcggagccggaacagtgctgcttctgagagccggcttttacgccgtgtcctttctgtctgtggccgtgggcagcaccgtgtactatcagggcaagtgcctgacctggaagggacctagaaggcaactgcctgctgtggtgcctgctcctttgcctcctccatgtggaagctctgcccatctgctgccacctgttccaggcggaagggccaagcgatctggatctggagcaacaaacttctcactactcaaacaagcaggtgacgtggaggagaatcccgggcctactagtatggactggatttggcgcatccttttccttgtcggcgctgctaccggcgcgcattccttcgaagctcagaaagtgacacaggcccagaccgagatcagcgtggtggaaaaagaagatgtgaccctggactgcgtgtacgagacaagggacaccgcctactacctgttctggtacaagcagcctcctagcggcgagctggtgttcctgattagacagccttggtggggcagcagcagaggcatcagcggcagatacagctggaacttccagaagtccaccagcagcttcaacttcaccatcaccgccagccaggtggtggatagcgccgtgtacttttgtgccatgagcgtgcccgatagcagaggccactaccagttcaccttcggcaagggcacaaagctgagcgtgatccctacgcgtctgtgggtgtcccagccacctgaaattcggacactggaaggctcctccgcctttctgccctgtagctttaacgccagccaggggagactcgccatcggctctgtgacatggttccgggatgaagtcgtccctggaaaagaagttcgcaacggaacaccagagttcagaggcagactcgccccactggcaagctccagattcctgcatgaccatcaggctgaactgcacattagggacgtgcggggccacgatgcctccatctatgtgtgtcgggtcgaagtgcttggactcggcgtcggaactggaaacggcactaggctggtggtcgagaaagaacatccacagcttggcgctggcaccgtcctgttgcttagagccggattctatgccgtcagcttcctgtccgtggctgtggggtctacagtgtattaccagggaaaatgtctcacctggaaaggccccagacgccagcttccagctgttgttcctgctccactgccaccaccttgtggctcctctgctcacttgcttccaccagtgcctggcggacgcgccaagagaagcggatctggcgtgaagcagaccctgaatttcgacctgctgaagctggctggcgacgtggaatccaacccaggcccttctagaggccatatggctctgcctgtgacagctctgctgctgcctctggcactgctgcttcatgctgctagacctagccagtttagagtgtcccctctggacagaacctggaacctgggcgagacagtggaactgaagtgccaggtgctgctgagcaaccctacaagcggctgctcctggctgtttcagcctagaggtgcagccgcctctcctacctttctgctgtacctgagccagaacaagcccaaggccgccgaaggactggacacccagagattcagcggcaagagactgggcgacaccttcgtgctgaccctgagcgacttcagaagagagaacgagggctactacttctgtagcgccctgagcaacagcatcatgtacttcagccacttcgtgcccgtgtttctgcccgccaagcctacaacaacccctgctcctagacctcctacaccagctcctacaatcgccagccagcctctgtctctcagacccgaagcctgtagacctgctgctggcggagctgtgcataccagaggactggatttcgcctgcgacatctacatctgggctcctctggctggcacatgtggcgtgctgctgctgtccctggtcatcaccctgtactgcaaccaccggaacaggcggagagtgtgcaagtgccctagacctgtggtcaagagcggcgacaagcctagcctgagcgccagatatgtt

SEQ ID NO: 2452 - DNA, 3225 bp, synthetic construct
  source 1..3225: mol_type = other DNA
atggccttaccagtgaccgccttgctcctgccgctggccttgctgctccacgccgccaggccgaatgctggcgtgacccagacacctaagttccgggtgctgaaaaccggccagagcatgacactgctgtgcgcccaggacatgaaccatgagtacatgtattggtacagacaggaccccggcatgggcctgagactgatccactattctggctggggcaaagacaccgccaagggcgaagttcccgatggctacaacgtgtcccggctgaagaagcagaacttcctgctgggcctcgaaagcgccgctccatctcagaccagcgtgtacttctgcgccagcaaagttggcccaggccagcacaatagccctctgcactttggcaacggcaccagactgacagtgacactcgagggacagcctaaggccaatcctaccgtgacactgttccctccaagcagcgaagaactccaggccaacaaggccacacttgtgtgcctgatctccgacttctaccctggggctgtgacagtggcttggaaggccgatggatctcctgtgaaagccggcgtggaaaccaccaagccatccaagcagagcaacaacaaatacgccgccagctcctacctgagcctgacacctgagcagtggaagtcccacagatcctacagctgccaagtgacccacgaaggcagcaccgtggaaaagacagtggcccctacagagtgcagcggatcccagagcttcggcctgctggaccccaagctgtgctacctgctggatggcatcctgttcatctacggcgtgatcctgaccgccctgttcctgagagtgaagttcagcagaagcgccgacgcccctgcctaccagcagggacagaaccaactgtacaacgagctgaacctgggcagacgggaagagtacgacgtgctggacaagcggagaggcagggaccctgagatgggcggaaagccccagcggagaaagaacccccaggaaggactgtataacgaactccagaaagacaagatggccgaagcctacagcgagatcggcatgaagggcgagcggagaagaggcaagggccacgatggcctgtaccagggcctgagcaccgccaccaaggacacctatgacgccctgcacatgcaggccctgcctccaagaagggccaagcgatctggatctggagcaacaaacttctcactactcaaacaagcaggtgacgtggaggagaatcccgggcctactagtatggactggatttggcgcatccttttccttgtcggcgctgctaccggcgcgcattccttcgaagctcagaaagtgacacaggcccagaccgagatcagcgtggtggaaaaagaagatgtgaccctggactgcgtgtacgagacaagggacaccgcctactacctgttctggtacaagcagcctcctagcggcgagctggtgttcctgattagacagccttggtggggcagcagcagaggcatcagcggcagatacagctggaacttccagaagtccaccagcagcttcaacttcaccatcaccgccagccaggtggtggatagcgccgtgtacttttgtgccatgagcgtgcccgatagcagaggccactaccagttcaccttcggcaagggcacaaagctgagcgtgatccctacgcgtgcctctacaaagggaccctccgtgtttcctctggctcccagcagcaagtctacaagcggaggaacagccgctctgggctgcctggtcaaggattactttcccgagcctgtgaccgtgtcctggaatagcggagcactgacaagcggcgtgcacacctttccagccgtgctgcaaagcagcggcctgtactctctgagcagcgtggtcacagtgcctagctctagcctgggcacccagacctacatctgcaatgtgaaccacaagcctagcaacaccaaggtggacaagagagtggaacccaagagctgtggtacccagagttttgggttgttggaccctaaattgtgctatctgttggacggaatcctgttcatttacggagtgatcctgaccgcattgttcctgcgggttaagttttccagatccgcagacgcacccgcttaccaacaagggcagaaccaactctacaatgaacttaatttggggcggagggaagagtacgacgttctggacaaaaggaggggacgagatcccgagatgggcggaaagcctcagcgaaggaagaatccgcaagaggggctttataacgaactccagaaagataaaatggcagaagcctatagtgagattgggatgaagggagaaaggaggaggggtaaaggtcacgatgggttgtaccaaggattgagcacagccactaaagatacctatgatgcgctccacatgcaggccctgccgccaagacgcgccaagagaagcggatctggcgtgaagcagaccctgaatttcgacctgctgaagctggctggcgacgtggaatccaacccaggcccttctagaggccatatggctctgcctgtgacagctctgctgctgcctctggcactgctgcttcatgctgctagacctagccagtttagagtgtcccctctggacagaacctggaacctgggcgagacagtggaactgaagtgccaggtgctgctgagcaaccctacaagcggctgctcctggctgtttcagcctagaggtgcagccgcctctcctacctttctgctgtacctgagccagaacaagcccaaggccgccgaaggactggacacccagagattcagcggcaagagactgggcgacaccttcgtgctgaccctgagcgacttcagaagagagaacgagggctactacttctgtagcgccctgagcaacagcatcatgtacttcagccacttcgtgcccgtgtttctgcccgccaagcctacaacaacccctgctcctagacctcctacaccagctcctacaatcgccagccagcctctgtctctcagacccgaagcctgtagacctgctgctggcggagctgtgcataccagaggactggatttcgcctgcgacatctacatctgggctcctctggctggcacatgtggcgtgctgctgctgtccctggtcatcaccctgtactgcaaccaccggaacaggcggagagtgtgcaagtgccctagacctgtggtcaagagcggcgacaagcctagcctgagcgccagatatgtt

SEQ ID NO: 2453 - DNA, 3279 bp, synthetic construct
  source 1..3279: mol_type = other DNA
atggccttaccagtgaccgccttgctcctgccgctggccttgctgctccacgccgccaggccgaatgctggcgtgacccagacacctaagttccgggtgctgaaaaccggccagagcatgacactgctgtgcgcccaggacatgaaccatgagtacatgtattggtacagacaggaccccggcatgggcctgagactgatccactattctggctggggcaaagacaccgccaagggcgaagttcccgatggctacaacgtgtcccggctgaagaagcagaacttcctgctgggcctcgaaagcgccgctccatctcagaccagcgtgtacttctgcgccagcaaagttggcccaggccagcacaatagccctctgcactttggcaacggcaccagactgacagtgacactcgagggacagcctaaggccaatcctaccgtgacactgttccctccaagcagcgaagaactccaggccaacaaggccacacttgtgtgcctgatctccgacttctaccctggggctgtgacagtggcttggaaggccgatggatctcctgtgaaagccggcgtggaaaccaccaagccatccaagcagagcaacaacaaatacgccgccagctcctacctgagcctgacacctgagcagtggaagtcccacagatcctacagctgccaagtgacccacgaaggcagcaccgtggaaaagacagtggcccctacagagtgcagcggatcccagagcttcggcctgctggaccccaagctgtgctacctgctggatggcatcctgttcatctacggcgtgatcctgaccgccctgttcctgagagtgaagttcagcagaagcgccgacgcccctgcctaccagcagggacagaaccaactgtacaacgagctgaacctgggcagacgggaagagtacgacgtgctggacaagcggagaggcagggaccctgagatgggcggaaagccccagcggagaaagaacccccaggaaggactgtataacgaactccagaaagacaagatggccgaagcctacagcgagatcggcatgaagggcgagcggagaagaggcaagggccacgatggcctgtaccagggcctgagcaccgccaccaaggacacctatgacgccctgcacatgcaggccctgcctccaagaagggccaagcgatctggatctggagcaacaaacttctcactactcaaacaagcaggtgacgtggaggagaatcccgggcctactagtatggactggatttggcgcatccttttccttgtcggcgctgctaccggcgcgcattccttcgaagctcagaaagtgacacaggcccagaccgagatcagcgtggtggaaaaagaagatgtgaccctggactgcgtgtacgagacaagggacaccgcctactacctgttctggtacaagcagcctcctagcggcgagctggtgttcctgattagacagccttggtggggcagcagcagaggcatcagcggcagatacagctggaacttccagaagtccaccagcagcttcaacttcaccatcaccgccagccaggtggtggatagcgccgtgtacttttgtgccatgagcgtgcccgatagcagaggccactaccagttcaccttcggcaagggcacaaagctgagcgtgatccctacgcgtgcgtctcccacttctccgaaagttttccccctttccctctgtagcacacaacctgatggaaatgtggtcatcgcatgtctggtacaaggattctttccacaagagccattgagcgttacatggtcagagagcgggcagggagttaccgctaggaatttcccaccctcacaggatgcgagtggtgatctttataccacatcatcacaactcacgttgccagccactcagtgcctcgctggaaagtcagtaacatgccatgtcaaacattacactaatccctcacaagatgttaccgtgccttgcccagtaccttctacgccgcccaccccgtctccatctactccacccacgccatcacctagtggtacccagagttttgggttgttggaccctaaattgtgctatctgttggacggaatcctgttcatttacggagtgatcctgaccgcattgttcctgcgggttaagttttccagatccgcagacgcacccgcttaccaacaagggcagaaccaactctacaatgaacttaatttggggcggagggaagagtacgacgttctggacaaaaggaggggacgagatcccgagatgggcggaaagcctcagcgaaggaagaatccgcaagaggggctttataacgaactccagaaagataaaatggcagaagcctatagtgagattgggatgaagggagaaaggaggaggggtaaaggtcacgatgggttgtaccaaggattgagcacagccactaaagatacctatgatgcgctccacatgcaggccctgccgccaagacgcgccaagagaagcggatctggcgtgaagcagaccctgaatttcgacctgctgaagctggctggcgacgtggaatccaacccaggcccttctagaggccatatggctctgcctgtgacagctctgctgctgcctctggcactgctgcttcatgctgctagacctagccagtttagagtgtcccctctggacagaacctggaacctgggcgagacagtggaactgaagtgccaggtgctgctgagcaaccctacaagcggctgctcctggctgtttcagcctagaggtgcagccgcctctcctacctttctgctgtacctgagccagaacaagcccaaggccgccgaaggactggacacccagagattcagcggcaagagactgggcgacaccttcgtgctgaccctgagcgacttcagaagagagaacgagggctactacttctgtagcgccctgagcaacagcatcatgtacttcagccacttcgtgcccgtgtttctgcccgccaagcctacaacaacccctgctcctagacctcctacaccagctcctacaatcgccagccagcctctgtctctcagacccgaagcctgtagacctgctgctggcggagctgtgcataccagaggactggatttcgcctgcgacatctacatctgggctcctctggctggcacatgtggcgtgctgctgctgtccctggtcatcaccctgtactgcaaccaccggaacaggcggagagtgtgcaagtgccctagacctgtggtcaagagcggcgacaagcctagcctgagcgccagatatgtt

SEQ ID NO: 2454 - DNA, 3222 bp, synthetic construct
  source 1..3222: mol_type = other DNA
atggccttaccagtgaccgccttgctcctgccgctggccttgctgctccacgccgccaggccgaatgctggcgtgacccagacacctaagttccgggtgctgaaaaccggccagagcatgacactgctgtgcgcccaggacatgaaccatgagtacatgtattggtacagacaggaccccggcatgggcctgagactgatccactattctggctggggcaaagacaccgccaagggcgaagttcccgatggctacaacgtgtcccggctgaagaagcagaacttcctgctgggcctcgaaagcgccgctccatctcagaccagcgtgtacttctgcgccagcaaagttggcccaggccagcacaatagccctctgcactttggcaacggcaccagactgacagtgacactcgagggacagcctaaggccaatcctaccgtgacactgttccctccaagcagcgaagaactccaggccaacaaggccacacttgtgtgcctgatctccgacttctaccctggggctgtgacagtggcttggaaggccgatggatctcctgtgaaagccggcgtggaaaccaccaagccatccaagcagagcaacaacaaatacgccgccagctcctacctgagcctgacacctgagcagtggaagtcccacagatcctacagctgccaagtgacccacgaaggcagcaccgtggaaaagacagtggcccctacagagtgcagcggatcccagagcttcggcctgctggaccccaagctgtgctacctgctggatggcatcctgttcatctacggcgtgatcctgaccgccctgttcctgagagtgaagttcagcagaagcgccgacgcccctgcctaccagcagggacagaaccaactgtacaacgagctgaacctgggcagacgggaagagtacgacgtgctggacaagcggagaggcagggaccctgagatgggcggaaagccccagcggagaaagaacccccaggaaggactgtataacgaactccagaaagacaagatggccgaagcctacagcgagatcggcatgaagggcgagcggagaagaggcaagggccacgatggcctgtaccagggcctgagcaccgccaccaaggacacctatgacgccctgcacatgcaggccctgcctccaagaagggccaagcgatctggatctggagcaacaaacttctcactactcaaacaagcaggtgacgtggaggagaatcccgggcctactagtatggactggatttggcgcatccttttccttgtcggcgctgctaccggcgcgcattccttcgaagctcagaaagtgacacaggcccagaccgagatcagcgtggtggaaaaagaagatgtgaccctggactgcgtgtacgagacaagggacaccgcctactacctgttctggtacaagcagcctcctagcggcgagctggtgttcctgattagacagccttggtggggcagcagcagaggcatcagcggcagatacagctggaacttccagaagtccaccagcagcttcaacttcaccatcaccgccagccaggtggtggatagcgccgtgtacttttgtgccatgagcgtgcccgatagcagaggccactaccagttcaccttcggcaagggcacaaagctgagcgtgatccctacgcgtgcctccacgaagggaccatctgttttccctcttgccccctgctcacggtcaacgtctgaatccacggcagccctgggctgcctcgttaaggactactttccagagccggtaacagtctcctggaacagtggagcccttacatcaggtgttcacactttccctgccgtcttgcaaagtagcggactgtacagccttagttccgttgttacggttccttctagcaacttcggtacacagacatatacttgtaacgtagatcataagcctagcaacaccaaggtggacaaaaccgtagagagaaagtgtggtacccagagttttgggttgttggaccctaaattgtgctatctgttggacggaatcctgttcatttacggagtgatcctgaccgcattgttcctgcgggttaagttttccagatccgcagacgcacccgcttaccaacaagggcagaaccaactctacaatgaacttaatttggggcggagggaagagtacgacgttctggacaaaaggaggggacgagatcccgagatgggcggaaagcctcagcgaaggaagaatccgcaagaggggctttataacgaactccagaaagataaaatggcagaagcctatagtgagattgggatgaagggagaaaggaggaggggtaaaggtcacgatgggttgtaccaaggattgagcacagccactaaagatacctatgatgcgctccacatgcaggccctgccgccaagacgcgccaagagaagcggatctggcgtgaagcagaccctgaatttcgacctgctgaagctggctggcgacgtggaatccaacccaggcccttctagaggccatatggctctgcctgtgacagctctgctgctgcctctggcactgctgcttcatgctgctagacctagccagtttagagtgtcccctctggacagaacctggaacctgggcgagacagtggaactgaagtgccaggtgctgctgagcaaccctacaagcggctgctcctggctgtttcagcctagaggtgcagccgcctctcctacctttctgctgtacctgagccagaacaagcccaaggccgccgaaggactggacacccagagattcagcggcaagagactgggcgacaccttcgtgctgaccctgagcgacttcagaagagagaacgagggctactacttctgtagcgccctgagcaacagcatcatgtacttcagccacttcgtgcccgtgtttctgcccgccaagcctacaacaacccctgctcctagacctcctacaccagctcctacaatcgccagccagcctctgtctctcagacccgaagcctgtagacctgctgctggcggagctgtgcataccagaggactggatttcgcctgcgacatctacatctgggctcctctggctggcacatgtggcgtgctgctgctgtccctggtcatcaccctgtactgcaaccaccggaacaggcggagagtgtgcaagtgccctagacctgtggtcaagagcggcgacaagcctagcctgagcgccagatatgtt

SEQ ID NO: 2455 - DNA, 3393 bp, synthetic construct
  source 1..3393: mol_type = other DNA
atggccttaccagtgaccgccttgctcctgccgctggccttgctgctccacgccgccaggccgaatgctggcgtgacccagacacctaagttccgggtgctgaaaaccggccagagcatgacactgctgtgcgcccaggacatgaaccatgagtacatgtattggtacagacaggaccccggcatgggcctgagactgatccactattctggctggggcaaagacaccgccaagggcgaagttcccgatggctacaacgtgtcccggctgaagaagcagaacttcctgctgggcctcgaaagcgccgctccatctcagaccagcgtgtacttctgcgccagcaaagttggcccaggccagcacaatagccctctgcactttggcaacggcaccagactgacagtgacactcgagggacagcctaaggccaatcctaccgtgacactgttccctccaagcagcgaagaactccaggccaacaaggccacacttgtgtgcctgatctccgacttctaccctggggctgtgacagtggcttggaaggccgatggatctcctgtgaaagccggcgtggaaaccaccaagccatccaagcagagcaacaacaaatacgccgccagctcctacctgagcctgacacctgagcagtggaagtcccacagatcctacagctgccaagtgacccacgaaggcagcaccgtggaaaagacagtggcccctacagagtgcagcggatcccagagcttcggcctgctggaccccaagctgtgctacctgctggatggcatcctgttcatctacggcgtgatcctgaccgccctgttcctgagagtgaagttcagcagaagcgccgacgcccctgcctaccagcagggacagaaccaactgtacaacgagctgaacctgggcagacgggaagagtacgacgtgctggacaagcggagaggcagggaccctgagatgggcggaaagccccagcggagaaagaacccccaggaaggactgtataacgaactccagaaagacaagatggccgaagcctacagcgagatcggcatgaagggcgagcggagaagaggcaagggccacgatggcctgtaccagggcctgagcaccgccaccaaggacacctatgacgccctgcacatgcaggccctgcctccaagaagggccaagcgatctggatctggagcaacaaacttctcactactcaaacaagcaggtgacgtggaggagaatcccgggcctactagtatggactggatttggcgcatccttttccttgtcggcgctgctaccggcgcgcattccttcgaagctcagaaagtgacacaggcccagaccgagatcagcgtggtggaaaaagaagatgtgaccctggactgcgtgtacgagacaagggacaccgcctactacctgttctggtacaagcagcctcctagcggcgagctggtgttcctgattagacagccttggtggggcagcagcagaggcatcagcggcagatacagctggaacttccagaagtccaccagcagcttcaacttcaccatcaccgccagccaggtggtggatagcgccgtgtacttttgtgccatgagcgtgcccgatagcagaggccactaccagttcaccttcggcaagggcacaaagctgagcgtgatccctacgcgtgctccgacaaaggcgccagacgtttttcctattatttcaggatgtcggcatccgaaagataattccccagttgttctggcgtgtcttatcacgggctaccatcctacatctgttaccgttacgtggtatatgggtacgcaaagccaacctcagcggacttttccagagatccaacggcgagattcatattatatgacatccagtcagttgagtacaccgctgcaacagtggcggcaaggtgagtataagtgtgtggtccaacacacagccagtaaaagtaagaaagagatattccggtggcctgaaagcccgaaggcacaagcatcttctgttccgacggcgcaaccgcaagctgaaggaagtcttgcaaaagcaaccacagcacccgcgacaacacgaaacacaggacgcggaggcgaggaaaagaaaaaagaaaaggaaaaggaagagcaagaggagagggaaactaagacccccggtacccagagttttgggttgttggaccctaaattgtgctatctgttggacggaatcctgttcatttacggagtgatcctgaccgcattgttcctgcgggttaagttttccagatccgcagacgcacccgcttaccaacaagggcagaaccaactctacaatgaacttaatttggggcggagggaagagtacgacgttctggacaaaaggaggggacgagatcccgagatgggcggaaagcctcagcgaaggaagaatccgcaagaggggctttataacgaactccagaaagataaaatggcagaagcctatagtgagattgggatgaagggagaaaggaggaggggtaaaggtcacgatgggttgtaccaaggattgagcacagccactaaagatacctatgatgcgctccacatgcaggccctgccgccaagacgcgccaagagaagcggatctggcgtgaagcagaccctgaatttcgacctgctgaagctggctggcgacgtggaatccaacccaggcccttctagaggccatatggctctgcctgtgacagctctgctgctgcctctggcactgctgcttcatgctgctagacctagccagtttagagtgtcccctctggacagaacctggaacctgggcgagacagtggaactgaagtgccaggtgctgctgagcaaccctacaagcggctgctcctggctgtttcagcctagaggtgcagccgcctctcctacctttctgctgtacctgagccagaacaagcccaaggccgccgaaggactggacacccagagattcagcggcaagagactgggcgacaccttcgtgctgaccctgagcgacttcagaagagagaacgagggctactacttctgtagcgccctgagcaacagcatcatgtacttcagccacttcgtgcccgtgtttctgcccgccaagcctacaacaacccctgctcctagacctcctacaccagctcctacaatcgccagccagcctctgtctctcagacccgaagcctgtagacctgctgctggcggagctgtgcataccagaggactggatttcgcctgcgacatctacatctgggctcctctggctggcacatgtggcgtgctgctgctgtccctggtcatcaccctgtactgcaaccaccggaacaggcggagagtgtgcaagtgccctagacctgtggtcaagagcggcgacaagcctagcctgagcgccagatatgtt

SEQ ID NO: 2456 - DNA, 3219 bp, synthetic construct
  source 1..3219: mol_type = other DNA
atggccttaccagtgaccgccttgctcctgccgctggccttgctgctccacgccgccaggccgaatgctggcgtgacccagacacctaagttccgggtgctgaaaaccggccagagcatgacactgctgtgcgcccaggacatgaaccatgagtacatgtattggtacagacaggaccccggcatgggcctgagactgatccactattctggctggggcaaagacaccgccaagggcgaagttcccgatggctacaacgtgtcccggctgaagaagcagaacttcctgctgggcctcgaaagcgccgctccatctcagaccagcgtgtacttctgcgccagcaaagttggcccaggccagcacaatagccctctgcactttggcaacggcaccagactgacagtgacactcgagggacagcctaaggccaatcctaccgtgacactgttccctccaagcagcgaagaactccaggccaacaaggccacacttgtgtgcctgatctccgacttctaccctggggctgtgacagtggcttggaaggccgatggatctcctgtgaaagccggcgtggaaaccaccaagccatccaagcagagcaacaacaaatacgccgccagctcctacctgagcctgacacctgagcagtggaagtcccacagatcctacagctgccaagtgacccacgaaggcagcaccgtggaaaagacagtggcccctacagagtgcagcggatcccagagcttcggcctgctggaccccaagctgtgctacctgctggatggcatcctgttcatctacggcgtgatcctgaccgccctgttcctgagagtgaagttcagcagaagcgccgacgcccctgcctaccagcagggacagaaccaactgtacaacgagctgaacctgggcagacgggaagagtacgacgtgctggacaagcggagaggcagggaccctgagatgggcggaaagccccagcggagaaagaacccccaggaaggactgtataacgaactccagaaagacaagatggccgaagcctacagcgagatcggcatgaagggcgagcggagaagaggcaagggccacgatggcctgtaccagggcctgagcaccgccaccaaggacacctatgacgccctgcacatgcaggccctgcctccaagaagggccaagcgatctggatctggagcaacaaacttctcactactcaaacaagcaggtgacgtggaggagaatcccgggcctactagtatggactggatttggcgcatccttttccttgtcggcgctgctaccggcgcgcattccttcgaagctcagaaagtgacacaggcccagaccgagatcagcgtggtggaaaaagaagatgtgaccctggactgcgtgtacgagacaagggacaccgcctactacctgttctggtacaagcagcctcctagcggcgagctggtgttcctgattagacagccttggtggggcagcagcagaggcatcagcggcagatacagctggaacttccagaagtccaccagcagcttcaacttcaccatcaccgccagccaggtggtggatagcgccgtgtacttttgtgccatgagcgtgcccgatagcagaggccactaccagttcaccttcggcaagggcacaaagctgagcgtgatccctacgcgtgcctcaacgaaagggcctagcgtcttccccctggcgccgtgctcacgatccacaagcgaatccaccgccgctctcggatgcctcgtaaaggattatttccctgaaccagtcacggtgtcatggaacagcggtgcccttaccagcggcgtccatacctttcctgctgtgctccagtccagcggactttatagtctcagctctgtcgtgaccgtcccttcctctaattttggcacccagacttacacgtgcaacgtcgatcataagcccagtaacaccaaggtagacaagacggtggaacgaaagggtacccagagttttgggttgttggaccctaaattgtgctatctgttggacggaatcctgttcatttacggagtgatcctgaccgcattgttcctgcgggttaagttttccagatccgcagacgcacccgcttaccaacaagggcagaaccaactctacaatgaacttaatttggggcggagggaagagtacgacgttctggacaaaaggaggggacgagatcccgagatgggcggaaagcctcagcgaaggaagaatccgcaagaggggctttataacgaactccagaaagataaaatggcagaagcctatagtgagattgggatgaagggagaaaggaggaggggtaaaggtcacgatgggttgtaccaaggattgagcacagccactaaagatacctatgatgcgctccacatgcaggccctgccgccaagacgcgccaagagaagcggatctggcgtgaagcagaccctgaatttcgacctgctgaagctggctggcgacgtggaatccaacccaggcccttctagaggccatatggctctgcctgtgacagctctgctgctgcctctggcactgctgcttcatgctgctagacctagccagtttagagtgtcccctctggacagaacctggaacctgggcgagacagtggaactgaagtgccaggtgctgctgagcaaccctacaagcggctgctcctggctgtttcagcctagaggtgcagccgcctctcctacctttctgctgtacctgagccagaacaagcccaaggccgccgaaggactggacacccagagattcagcggcaagagactgggcgacaccttcgtgctgaccctgagcgacttcagaagagagaacgagggctactacttctgtagcgccctgagcaacagcatcatgtacttcagccacttcgtgcccgtgtttctgcccgccaagcctacaacaacccctgctcctagacctcctacaccagctcctacaatcgccagccagcctctgtctctcagacccgaagcctgtagacctgctgctggcggagctgtgcataccagaggactggatttcgcctgcgacatctacatctgggctcctctggctggcacatgtggcgtgctgctgctgtccctggtcatcaccctgtactgcaaccaccggaacaggcggagagtgtgcaagtgccctagacctgtggtcaagagcggcgacaagcctagcctgagcgccagatatgtt

SEQ ID NO: 2457 - DNA, 3240 bp, synthetic construct
  source 1..3240: mol_type = other DNA
atggccttaccagtgaccgccttgctcctgccgctggccttgctgctccacgccgccaggccgaatgctggcgtgacccagacacctaagttccgggtgctgaaaaccggccagagcatgacactgctgtgcgcccaggacatgaaccatgagtacatgtattggtacagacaggaccccggcatgggcctgagactgatccactattctggctggggcaaagacaccgccaagggcgaagttcccgatggctacaacgtgtcccggctgaagaagcagaacttcctgctgggcctcgaaagcgccgctccatctcagaccagcgtgtacttctgcgccagcaaagttggcccaggccagcacaatagccctctgcactttggcaacggcaccagactgacagtgacactcgagggacagcctaaggccaatcctaccgtgacactgttccctccaagcagcgaagaactccaggccaacaaggccacacttgtgtgcctgatctccgacttctaccctggggctgtgacagtggcttggaaggccgatggatctcctgtgaaagccggcgtggaaaccaccaagccatccaagcagagcaacaacaaatacgccgccagctcctacctgagcctgacacctgagcagtggaagtcccacagatcctacagctgccaagtgacccacgaaggcagcaccgtggaaaagacagtggcccctacagagtgcagcggatcccagagcttcggcctgctggaccccaagctgtgctacctgctggatggcatcctgttcatctacggcgtgatcctgaccgccctgttcctgagagtgaagttcagcagaagcgccgacgcccctgcctaccagcagggacagaaccaactgtacaacgagctgaacctgggcagacgggaagagtacgacgtgctggacaagcggagaggcagggaccctgagatgggcggaaagccccagcggagaaagaacccccaggaaggactgtataacgaactccagaaagacaagatggccgaagcctacagcgagatcggcatgaagggcgagcggagaagaggcaagggccacgatggcctgtaccagggcctgagcaccgccaccaaggacacctatgacgccctgcacatgcaggccctgcctccaagaagggccaagcgatctggatctggagcaacaaacttctcactactcaaacaagcaggtgacgtggaggagaatcccgggcctactagtatggactggatttggcgcatccttttccttgtcggcgctgctaccggcgcgcattccttcgaagctcagaaagtgacacaggcccagaccgagatcagcgtggtggaaaaagaagatgtgaccctggactgcgtgtacgagacaagggacaccgcctactacctgttctggtacaagcagcctcctagcggcgagctggtgttcctgattagacagccttggtggggcagcagcagaggcatcagcggcagatacagctggaacttccagaagtccaccagcagcttcaacttcaccatcaccgccagccaggtggtggatagcgccgtgtacttttgtgccatgagcgtgcccgatagcagaggccactaccagttcaccttcggcaagggcacaaagctgagcgtgatccctacgcgtgcgtcacctacgtccccaaaagtgttcccgctgtcactcgattccactccacaggacggtaacgtggtggttgcctgcctggtacaaggtttctttcctcaagaaccactctctgtgacgtggtctgaaagtggtcagaatgttacagcacggaacttcccaccgagtcaagatgcgagtggggatctctatacgacatccagtcaactcacactgcccgcaacacaatgccccgatggcaaatctgttacctgccatgtgaaacattacaccaatccatcccaggatgtgacagtaccttgtccggttccgccccctcccccgggtacccagagttttgggttgttggaccctaaattgtgctatctgttggacggaatcctgttcatttacggagtgatcctgaccgcattgttcctgcgggttaagttttccagatccgcagacgcacccgcttaccaacaagggcagaaccaactctacaatgaacttaatttggggcggagggaagagtacgacgttctggacaaaaggaggggacgagatcccgagatgggcggaaagcctcagcgaaggaagaatccgcaagaggggctttataacgaactccagaaagataaaatggcagaagcctatagtgagattgggatgaagggagaaaggaggaggggtaaaggtcacgatgggttgtaccaaggattgagcacagccactaaagatacctatgatgcgctccacatgcaggccctgccgccaagacgcgccaagagaagcggatctggcgtgaagcagaccctgaatttcgacctgctgaagctggctggcgacgtggaatccaacccaggcccttctagaggccatatggctctgcctgtgacagctctgctgctgcctctggcactgctgcttcatgctgctagacctagccagtttagagtgtcccctctggacagaacctggaacctgggcgagacagtggaactgaagtgccaggtgctgctgagcaaccctacaagcggctgctcctggctgtttcagcctagaggtgcagccgcctctcctacctttctgctgtacctgagccagaacaagcccaaggccgccgaaggactggacacccagagattcagcggcaagagactgggcgacaccttcgtgctgaccctgagcgacttcagaagagagaacgagggctactacttctgtagcgccctgagcaacagcatcatgtacttcagccacttcgtgcccgtgtttctgcccgccaagcctacaacaacccctgctcctagacctcctacaccagctcctacaatcgccagccagcctctgtctctcagacccgaagcctgtagacctgctgctggcggagctgtgcataccagaggactggatttcgcctgcgacatctacatctgggctcctctggctggcacatgtggcgtgctgctgctgtccctggtcatcaccctgtactgcaaccaccggaacaggcggagagtgtgcaagtgccctagacctgtggtcaagagcggcgacaagcctagcctgagcgccagatatgtt

SEQ ID NO: 2458 - DNA, 3225 bp, synthetic construct
  source 1..3225: mol_type = other DNA
atggccttaccagtgaccgccttgctcctgccgctggccttgctgctccacgccgccaggccgaatgctggcgtgacccagacacctaagttccgggtgctgaaaaccggccagagcatgacactgctgtgcgcccaggacatgaaccatgagtacatgtattggtacagacaggaccccggcatgggcctgagactgatccactattctggctggggcaaagacaccgccaagggcgaagttcccgatggctacaacgtgtcccggctgaagaagcagaacttcctgctgggcctcgaaagcgccgctccatctcagaccagcgtgtacttctgcgccagcaaagttggcccaggccagcacaatagccctctgcactttggcaacggcaccagactgacagtgacactcgagggacagcctaaggccaatcctaccgtgacactgttccctccaagcagcgaagaactccaggccaacaaggccacacttgtgtgcctgatctccgacttctaccctggggctgtgacagtggcttggaaggccgatggatctcctgtgaaagccggcgtggaaaccaccaagccatccaagcagagcaacaacaaatacgccgccagctcctacctgagcctgacacctgagcagtggaagtcccacagatcctacagctgccaagtgacccacgaaggcagcaccgtggaaaagacagtggcccctacagagtgcagcggatcccagagcttcggcctgctggaccccaagctgtgctacctgctggatggcatcctgttcatctacggcgtgatcctgaccgccctgttcctgagagtgaagttcagcagaagcgccgacgcccctgcctaccagcagggacagaaccaactgtacaacgagctgaacctgggcagacgggaagagtacgacgtgctggacaagcggagaggcagggaccctgagatgggcggaaagccccagcggagaaagaacccccaggaaggactgtataacgaactccagaaagacaagatggccgaagcctacagcgagatcggcatgaagggcgagcggagaagaggcaagggccacgatggcctgtaccagggcctgagcaccgccaccaaggacacctatgacgccctgcacatgcaggccctgcctccaagaagggccaagcgatctggatctggagcaacaaacttctcactactcaaacaagcaggtgacgtggaggagaatcccgggcctactagtatggactggatttggcgcatccttttccttgtcggcgctgctaccggcgcgcattccttcgaagctcagaaagtgacacaggcccagaccgagatcagcgtggtggaaaaagaagatgtgaccctggactgcgtgtacgagacaagggacaccgcctactacctgttctggtacaagcagcctcctagcggcgagctggtgttcctgattagacagccttggtggggcagcagcagaggcatcagcggcagatacagctggaacttccagaagtccaccagcagcttcaacttcaccatcaccgccagccaggtggtggatagcgccgtgtacttttgtgccatgagcgtgcccgatagcagaggccactaccagttcaccttcggcaagggcacaaagctgagcgtgatccctacgcgtgctagtacccagtcaccttctgttttcccgcttactagatgctgcaagaacataccatccaatgccacttctgtcacactgggctgtcttgctacaggttattttcctgagccggtgatggtcacttgggataccggtagcctgaatggaactacaatgacgctgcctgccacgacgctcacattgagtgggcattacgcgacaattagtcttttgacggtaagcggagcttgggctaagcagatgttcacttgcagagtagcgcacactccctctagtactgactgggttgacaacaaaaccttttctggtacccagagttttgggttgttggaccctaaattgtgctatctgttggacggaatcctgttcatttacggagtgatcctgaccgcattgttcctgcgggttaagttttccagatccgcagacgcacccgcttaccaacaagggcagaaccaactctacaatgaacttaatttggggcggagggaagagtacgacgttctggacaaaaggaggggacgagatcccgagatgggcggaaagcctcagcgaaggaagaatccgcaagaggggctttataacgaactccagaaagataaaatggcagaagcctatagtgagattgggatgaagggagaaaggaggaggggtaaaggtcacgatgggttgtaccaaggattgagcacagccactaaagatacctatgatgcgctccacatgcaggccctgccgccaagacgcgccaagagaagcggatctggcgtgaagcagaccctgaatttcgacctgctgaagctggctggcgacgtggaatccaacccaggcccttctagaggccatatggctctgcctgtgacagctctgctgctgcctctggcactgctgcttcatgctgctagacctagccagtttagagtgtcccctctggacagaacctggaacctgggcgagacagtggaactgaagtgccaggtgctgctgagcaaccctacaagcggctgctcctggctgtttcagcctagaggtgcagccgcctctcctacctttctgctgtacctgagccagaacaagcccaaggccgccgaaggactggacacccagagattcagcggcaagagactgggcgacaccttcgtgctgaccctgagcgacttcagaagagagaacgagggctactacttctgtagcgccctgagcaacagcatcatgtacttcagccacttcgtgcccgtgtttctgcccgccaagcctacaacaacccctgctcctagacctcctacaccagctcctacaatcgccagccagcctctgtctctcagacccgaagcctgtagacctgctgctggcggagctgtgcataccagaggactggatttcgcctgcgacatctacatctgggctcctctggctggcacatgtggcgtgctgctgctgtccctggtcatcaccctgtactgcaaccaccggaacaggcggagagtgtgcaagtgccctagacctgtggtcaagagcggcgacaagcctagcctgagcgccagatatgtt

SEQ ID NO: 2459 - DNA, 3225 bp, synthetic construct
  source 1..3225: mol_type = other DNA
atggccttaccagtgaccgccttgctcctgccgctggccttgctgctccacgccgccaggccgaatgctggcgtgacccagacacctaagttccgggtgctgaaaaccggccagagcatgacactgctgtgcgcccaggacatgaaccatgagtacatgtattggtacagacaggaccccggcatgggcctgagactgatccactattctggctggggcaaagacaccgccaagggcgaagttcccgatggctacaacgtgtcccggctgaagaagcagaacttcctgctgggcctcgaaagcgccgctccatctcagaccagcgtgtacttctgcgccagcaaagttggcccaggccagcacaatagccctctgcactttggcaacggcaccagactgacagtgacactcgagggacagcctaaggccaatcctaccgtgacactgttccctccaagcagcgaagaactccaggccaacaaggccacacttgtgtgcctgatctccgacttctaccctggggctgtgacagtggcttggaaggccgatggatctcctgtgaaagccggcgtggaaaccaccaagccatccaagcagagcaacaacaaatacgccgccagctcctacctgagcctgacacctgagcagtggaagtcccacagatcctacagctgccaagtgacccacgaaggcagcaccgtggaaaagacagtggcccctacagagtgcagcggatcccagagcttcggcctgctggaccccaagctgtgctacctgctggatggcatcctgttcatctacggcgtgatcctgaccgccctgttcctgagagtgaagttcagcagaagcgccgacgcccctgcctaccagcagggacagaaccaactgtacaacgagctgaacctgggcagacgggaagagtacgacgtgctggacaagcggagaggcagggaccctgagatgggcggaaagccccagcggagaaagaacccccaggaaggactgtataacgaactccagaaagacaagatggccgaagcctacagcgagatcggcatgaagggcgagcggagaagaggcaagggccacgatggcctgtaccagggcctgagcaccgccaccaaggacacctatgacgccctgcacatgcaggccctgcctccaagaagggccaagcgatctggatctggagcaacaaacttctcactactcaaacaagcaggtgacgtggaggagaatcccgggcctactagtatggactggatttggcgcatccttttccttgtcggcgctgctaccggcgcgcattccttcgaagctcagaaagtgacacaggcccagaccgagatcagcgtggtggaaaaagaagatgtgaccctggactgcgtgtacgagacaagggacaccgcctactacctgttctggtacaagcagcctcctagcggcgagctggtgttcctgattagacagccttggtggggcagcagcagaggcatcagcggcagatacagctggaacttccagaagtccaccagcagcttcaacttcaccatcaccgccagccaggtggtggatagcgccgtgtacttttgtgccatgagcgtgcccgatagcagaggccactaccagttcaccttcggcaagggcacaaagctgagcgtgatccctacgcgtgcgtccactaagggtccgtcagtcttcccgctggcgccctgttcccgcagcacgagtgaatctaccgccgcccttgggtgcttggtaaaagactattttcctgagcccgttacagtatcatggaacagcggggctctgactagcggggtgcatacgttccctgcggttctgcaatctagcggactgtattctctctccagtgttgtgaccgtgccaagctccagcctcggtactaaaacttatacatgtaatgtggatcataaaccttcaaataccaaggttgacaaaagggtagagagtaagtacggtggtacccagagttttgggttgttggaccctaaattgtgctatctgttggacggaatcctgttcatttacggagtgatcctgaccgcattgttcctgcgggttaagttttccagatccgcagacgcacccgcttaccaacaagggcagaaccaactctacaatgaacttaatttggggcggagggaagagtacgacgttctggacaaaaggaggggacgagatcccgagatgggcggaaagcctcagcgaaggaagaatccgcaagaggggctttataacgaactccagaaagataaaatggcagaagcctatagtgagattgggatgaagggagaaaggaggaggggtaaaggtcacgatgggttgtaccaaggattgagcacagccactaaagatacctatgatgcgctccacatgcaggccctgccgccaagacgcgccaagagaagcggatctggcgtgaagcagaccctgaatttcgacctgctgaagctggctggcgacgtggaatccaacccaggcccttctagaggccatatggctctgcctgtgacagctctgctgctgcctctggcactgctgcttcatgctgctagacctagccagtttagagtgtcccctctggacagaacctggaacctgggcgagacagtggaactgaagtgccaggtgctgctgagcaaccctacaagcggctgctcctggctgtttcagcctagaggtgcagccgcctctcctacctttctgctgtacctgagccagaacaagcccaaggccgccgaaggactggacacccagagattcagcggcaagagactgggcgacaccttcgtgctgaccctgagcgacttcagaagagagaacgagggctactacttctgtagcgccctgagcaacagcatcatgtacttcagccacttcgtgcccgtgtttctgcccgccaagcctacaacaacccctgctcctagacctcctacaccagctcctacaatcgccagccagcctctgtctctcagacccgaagcctgtagacctgctgctggcggagctgtgcataccagaggactggatttcgcctgcgacatctacatctgggctcctctggctggcacatgtggcgtgctgctgctgtccctggtcatcaccctgtactgcaaccaccggaacaggcggagagtgtgcaagtgccctagacctgtggtcaagagcggcgacaagcctagcctgagcgccagatatgtt

SEQ ID NO: 2460 - DNA, 3225 bp, synthetic construct
  source 1..3225: mol_type = other DNA
atggccttaccagtgaccgccttgctcctgccgctggccttgctgctccacgccgccaggccgaatgctggcgtgacccagacacctaagttccgggtgctgaaaaccggccagagcatgacactgctgtgcgcccaggacatgaaccatgagtacatgtattggtacagacaggaccccggcatgggcctgagactgatccactattctggctggggcaaagacaccgccaagggcgaagttcccgatggctacaacgtgtcccggctgaagaagcagaacttcctgctgggcctcgaaagcgccgctccatctcagaccagcgtgtacttctgcgccagcaaagttggcccaggccagcacaatagccctctgcactttggcaacggcaccagactgacagtgacactcgagggacagcctaaggccaatcctaccgtgacactgttccctccaagcagcgaagaactccaggccaacaaggccacacttgtgtgcctgatctccgacttctaccctggggctgtgacagtggcttggaaggccgatggatctcctgtgaaagccggcgtggaaaccaccaagccatccaagcagagcaacaacaaatacgccgccagctcctacctgagcctgacacctgagcagtggaagtcccacagatcctacagctgccaagtgacccacgaaggcagcaccgtggaaaagacagtggcccctacagagtgcagcggatcccagagcttcggcctgctggaccccaagctgtgctacctgctggatggcatcctgttcatctacggcgtgatcctgaccgccctgttcctgagagtgaagttcagcagaagcgccgacgcccctgcctaccagcagggacagaaccaactgtacaacgagctgaacctgggcagacgggaagagtacgacgtgctggacaagcggagaggcagggaccctgagatgggcggaaagccccagcggagaaagaacccccaggaaggactgtataacgaactccagaaagacaagatggccgaagcctacagcgagatcggcatgaagggcgagcggagaagaggcaagggccacgatggcctgtaccagggcctgagcaccgccaccaaggacacctatgacgccctgcacatgcaggccctgcctccaagaagggccaagcgatctggatctggagcaacaaacttctcactactcaaacaagcaggtgacgtggaggagaatcccgggcctactagtatggactggatttggcgcatccttttccttgtcggcgctgctaccggcgcgcattccttcgaagctcagaaagtgacacaggcccagaccgagatcagcgtggtggaaaaagaagatgtgaccctggactgcgtgtacgagacaagggacaccgcctactacctgttctggtacaagcagcctcctagcggcgagctggtgttcctgattagacagccttggtggggcagcagcagaggcatcagcggcagatacagctggaacttccagaagtccaccagcagcttcaacttcaccatcaccgccagccaggtggtggatagcgccgtgtacttttgtgccatgagcgtgcccgatagcagaggccactaccagttcaccttcggcaagggcacaaagctgagcgtgatccctacgcgtgcaagtacaaagggacccagtgttttcccgctcgccccctgttcacgatcaacgagtgagtccactgcggctctcggatgcctcgtcaaagactacttccccgagccggtgactgttagttggaactctggggctcttacttcaggcgtacacacattccccgccgtgcttcagtcaagtgggctctactcacttagcagtgtggtaacggttccctctagcaactttggcacccaaacatatacttgcaacgtcgatcacaagccgtcaaataccaaagttgacaagaccgttgaaaggaaatgttgtggtacccagagttttgggttgttggaccctaaattgtgctatctgttggacggaatcctgttcatttacggagtgatcctgaccgcattgttcctgcgggttaagttttccagatccgcagacgcacccgcttaccaacaagggcagaaccaactctacaatgaacttaatttggggcggagggaagagtacgacgttctggacaaaaggaggggacgagatcccgagatgggcggaaagcctcagcgaaggaagaatccgcaagaggggctttataacgaactccagaaagataaaatggcagaagcctatagtgagattgggatgaagggagaaaggaggaggggtaaaggtcacgatgggttgtaccaaggattgagcacagccactaaagatacctatgatgcgctccacatgcaggccctgccgccaagacgcgccaagagaagcggatctggcgtgaagcagaccctgaatttcgacctgctgaagctggctggcgacgtggaatccaacccaggcccttctagaggccatatggctctgcctgtgacagctctgctgctgcctctggcactgctgcttcatgctgctagacctagccagtttagagtgtcccctctggacagaacctggaacctgggcgagacagtggaactgaagtgccaggtgctgctgagcaaccctacaagcggctgctcctggctgtttcagcctagaggtgcagccgcctctcctacctttctgctgtacctgagccagaacaagcccaaggccgccgaaggactggacacccagagattcagcggcaagagactgggcgacaccttcgtgctgaccctgagcgacttcagaagagagaacgagggctactacttctgtagcgccctgagcaacagcatcatgtacttcagccacttcgtgcccgtgtttctgcccgccaagcctacaacaacccctgctcctagacctcctacaccagctcctacaatcgccagccagcctctgtctctcagacccgaagcctgtagacctgctgctggcggagctgtgcataccagaggactggatttcgcctgcgacatctacatctgggctcctctggctggcacatgtggcgtgctgctgctgtccctggtcatcaccctgtactgcaaccaccggaacaggcggagagtgtgcaagtgccctagacctgtggtcaagagcggcgacaagcctagcctgagcgccagatatgtt

SEQ ID NO: 2461 - DNA, 3270 bp, synthetic construct
  source 1..3270: mol_type = other DNA
atggccttaccagtgaccgccttgctcctgccgctggccttgctgctccacgccgccaggccgaatgctggcgtgacccagacacctaagttccgggtgctgaaaaccggccagagcatgacactgctgtgcgcccaggacatgaaccatgagtacatgtattggtacagacaggaccccggcatgggcctgagactgatccactattctggctggggcaaagacaccgccaagggcgaagttcccgatggctacaacgtgtcccggctgaagaagcagaacttcctgctgggcctcgaaagcgccgctccatctcagaccagcgtgtacttctgcgccagcaaagttggcccaggccagcacaatagccctctgcactttggcaacggcaccagactgacagtgacactcgaggacctgaagaacgtgttcccacctgaggtggccgtgttcgagcctagcgaggccgagatcagccacacccagaaagccaccctcgtgtgcctggctaccggcttctaccccgaccatgtggaactgtcttggtgggtcaacggcaaagaggtgcacagcggcgtgtctaccgacccccagccactgaaagaacagcccgccctgaacgacagccggtactgcctgagcagcagactgagagtgtccgccaccttctggcagaacccccggaaccacttcagatgccaggtgcagttctacggcctgagcgagaacgacgagtggacccaggacagagccaagcccgtgacccagatcgtgtctgccgaagcctggggcagagccgattgcggatcccagagcttcggcctgctggaccccaagctgtgctacctgctggatggcatcctgttcatctacggcgtgatcctgaccgccctgttcctgagagtgaagttcagcagaagcgccgacgcccctgcctaccagcagggacagaaccaactgtacaacgagctgaacctgggcagacgggaagagtacgacgtgctggacaagcggagaggcagggaccctgagatgggcggaaagccccagcggagaaagaacccccaggaaggactgtataacgaactccagaaagacaagatggccgaagcctacagcgagatcggcatgaagggcgagcggagaagaggcaagggccacgatggcctgtaccagggcctgagcaccgccaccaaggacacctatgacgccctgcacatgcaggccctgcctccaagaagggccaagcgatctggatctggagcaacaaacttctcactactcaaacaagcaggtgacgtggaggagaatcccgggcctactagtatggactggatttggcgcatccttttccttgtcggcgctgctaccggcgcgcattccttcgaagctcagaaagtgacacaggcccagaccgagatcagcgtggtggaaaaagaagatgtgaccctggactgcgtgtacgagacaagggacaccgcctactacctgttctggtacaagcagcctcctagcggcgagctggtgttcctgattagacagccttggtggggcagcagcagaggcatcagcggcagatacagctggaacttccagaagtccaccagcagcttcaacttcaccatcaccgccagccaggtggtggatagcgccgtgtacttttgtgccatgagcgtgcccgatagcagaggccactaccagttcaccttcggcaagggcacaaagctgagcgtgatccctacgcgtatccagaaccctgatcctgccgtgtaccagctgcgggatagcaagagcagcgacaagagcgtgtgtctgttcaccgacttcgacagccagaccaacgtgtcccagagcaaggactccgacgtgtacatcaccgataagaccgtgctggacatgcggagcatggacttcaagagcaactccgccgtggcctggtccaacaagtccgatttcgcctgcgccaacgccttcaacaacagcattatccccgaggacacattcttcccaagccccgagagcagctgcggtacccagagttttgggttgttggaccctaaattgtgctatctgttggacggaatcctgttcatttacggagtgatcctgaccgcattgttcctgcgggttaagttttccagatccgcagacgcacccgcttaccaacaagggcagaaccaactctacaatgaacttaatttggggcggagggaagagtacgacgttctggacaaaaggaggggacgagatcccgagatgggcggaaagcctcagcgaaggaagaatccgcaagaggggctttataacgaactccagaaagataaaatggcagaagcctatagtgagattgggatgaagggagaaaggaggaggggtaaaggtcacgatgggttgtaccaaggattgagcacagccactaaagatacctatgatgcgctccacatgcaggccctgccgccaagacgcgccaagagaagcggatctggcgtgaagcagaccctgaatttcgacctgctgaagctggctggcgacgtggaatccaacccaggcccttctagaggccatatggctctgcctgtgacagctctgctgctgcctctggcactgctgcttcatgctgctagacctagccagtttagagtgtcccctctggacagaacctggaacctgggcgagacagtggaactgaagtgccaggtgctgctgagcaaccctacaagcggctgctcctggctgtttcagcctagaggtgcagccgcctctcctacctttctgctgtacctgagccagaacaagcccaaggccgccgaaggactggacacccagagattcagcggcaagagactgggcgacaccttcgtgctgaccctgagcgacttcagaagagagaacgagggctactacttctgtagcgccctgagcaacagcatcatgtacttcagccacttcgtgcccgtgtttctgcccgccaagcctacaacaacccctgctcctagacctcctacaccagctcctacaatcgccagccagcctctgtctctcagacccgaagcctgtagacctgctgctggcggagctgtgcataccagaggactggatttcgcctgcgacatctacatctgggctcctctggctggcacatgtggcgtgctgctgctgtccctggtcatcaccctgtactgcaaccaccggaacaggcggagagtgtgcaagtgccctagacctgtggtcaagagcggcgacaagcctagcctgagcgccagatatgtt

SEQ ID NO: 2462 - DNA, 3270 bp, synthetic construct
  source 1..3270: mol_type = other DNA
atggccttaccagtgaccgccttgctcctgccgctggccttgctgctccacgccgccaggccgaatgctggcgtgacccagacacctaagttccgggtgctgaaaaccggccagagcatgacactgctgtgcgcccaggacatgaaccatgagtacatgtattggtacagacaggaccccggcatgggcctgagactgatccactattctggctggggcaaagacaccgccaagggcgaagttcccgatggctacaacgtgtcccggctgaagaagcagaacttcctgctgggcctcgaaagcgccgctccatctcagaccagcgtgtacttctgcgccagcaaagttggcccaggccagcacaatagccctctgcactttggcaacggcaccagactgacagtgacactcgaggacctgaagaacgtgttcccacctgaggtggccgtgttcgagcctagcaaggccgagatcgcccacacccagaaagccaccctcgtgtgcctggctaccggcttctaccccgaccatgtggaactgtcttggtgggtcaacggcaaagaggtgcacagcggcgtgtgtaccgacccccagccactgaaagaacagcccgccctgaacgacagccggtactgcctgagcagcagactgagagtgtccgccaccttctggcagaacccccggaaccacttcagatgccaggtgcagttctacggcctgagcgagaacgacgagtggacccaggacagagccaagcccgtgacccagatcgtgtctgccgaagcctggggcagagccgattgcggatcccagagcttcggcctgctggaccccaagctgtgctacctgctggatggcatcctgttcatctacggcgtgatcctgaccgccctgttcctgagagtgaagttcagcagaagcgccgacgcccctgcctaccagcagggacagaaccaactgtacaacgagctgaacctgggcagacgggaagagtacgacgtgctggacaagcggagaggcagggaccctgagatgggcggaaagccccagcggagaaagaacccccaggaaggactgtataacgaactccagaaagacaagatggccgaagcctacagcgagatcggcatgaagggcgagcggagaagaggcaagggccacgatggcctgtaccagggcctgagcaccgccaccaaggacacctatgacgccctgcacatgcaggccctgcctccaagaagggccaagcgatctggatctggagcaacaaacttctcactactcaaacaagcaggtgacgtggaggagaatcccgggcctactagtatggactggatttggcgcatccttttccttgtcggcgctgctaccggcgcgcattccttcgaagctcagaaagtgacacaggcccagaccgagatcagcgtggtggaaaaagaagatgtgaccctggactgcgtgtacgagacaagggacaccgcctactacctgttctggtacaagcagcctcctagcggcgagctggtgttcctgattagacagccttggtggggcagcagcagaggcatcagcggcagatacagctggaacttccagaagtccaccagcagcttcaacttcaccatcaccgccagccaggtggtggatagcgccgtgtacttttgtgccatgagcgtgcccgatagcagaggccactaccagttcaccttcggcaagggcacaaagctgagcgtgatccctacgcgtatccagaaccctgatcctgccgtgtaccagctgcgggatagcaagagcagcgacaagagcgtgtgtctgttcaccgacttcgacagccagaccaacgtgtcccagagcaaggactccgacgtgtacatcaccgataagtgcgtgctggacatgcggagcatggacttcaagagcaactccgccgtggcctggtccaacaagtccgatttcgcctgcgccaacgccttcaacaacagcattatccccgaggacacattcttcccaagcagcgacgtgccctgcggtacccagagttttgggttgttggaccctaaattgtgctatctgttggacggaatcctgttcatttacggagtgatcctgaccgcattgttcctgcgggttaagttttccagatccgcagacgcacccgcttaccaacaagggcagaaccaactctacaatgaacttaatttggggcggagggaagagtacgacgttctggacaaaaggaggggacgagatcccgagatgggcggaaagcctcagcgaaggaagaatccgcaagaggggctttataacgaactccagaaagataaaatggcagaagcctatagtgagattgggatgaagggagaaaggaggaggggtaaaggtcacgatgggttgtaccaaggattgagcacagccactaaagatacctatgatgcgctccacatgcaggccctgccgccaagacgcgccaagagaagcggatctggcgtgaagcagaccctgaatttcgacctgctgaagctggctggcgacgtggaatccaacccaggcccttctagaggccatatggctctgcctgtgacagctctgctgctgcctctggcactgctgcttcatgctgctagacctagccagtttagagtgtcccctctggacagaacctggaacctgggcgagacagtggaactgaagtgccaggtgctgctgagcaaccctacaagcggctgctcctggctgtttcagcctagaggtgcagccgcctctcctacctttctgctgtacctgagccagaacaagcccaaggccgccgaaggactggacacccagagattcagcggcaagagactgggcgacaccttcgtgctgaccctgagcgacttcagaagagagaacgagggctactacttctgtagcgccctgagcaacagcatcatgtacttcagccacttcgtgcccgtgtttctgcccgccaagcctacaacaacccctgctcctagacctcctacaccagctcctacaatcgccagccagcctctgtctctcagacccgaagcctgtagacctgctgctggcggagctgtgcataccagaggactggatttcgcctgcgacatctacatctgggctcctctggctggcacatgtggcgtgctgctgctgtccctggtcatcaccctgtactgcaaccaccggaacaggcggagagtgtgcaagtgccctagacctgtggtcaagagcggcgacaagcctagcctgagcgccagatatgtt

SEQ ID NO: 2463 - DNA, 2463 bp, synthetic construct
  source 1..2463: mol_type = other DNA
atggccttaccagtgaccgccttgctcctgccgctggccttgctgctccacgccgccaggccgaatgctggcgtgacccagacacctaagttccgggtgctgaaaaccggccagagcatgacactgctgtgcgcccaggacatgaaccatgagtacatgtattggtacagacaggaccccggcatgggcctgagactgatccactattctggctggggcaaagacaccgccaagggcgaagttcccgatggctacaacgtgtcccggctgaagaagcagaacttcctgctgggcctcgaaagcgccgctccatctcagaccagcgtgtacttctgcgccagcaaagttggcccaggccagcacaatagccctctgcactttggcaacggcaccagactgacagtgacactcgaggacctgaagaacgtgttcccacctgaggtggccgtgttcgagcctagcgaggccgagatcagccacacccagaaagccaccctcgtgtgcctggctaccggcttctaccccgaccatgtggaactgtcttggtgggtcaacggcaaagaggtgcacagcggcgtgtgtaccgacccccagccactgaaagaacagcccgccctgaacgacagccggtactgcctgagcagcagactgagagtgtccgccaccttctggcagaacccccggaaccacttcagatgccaggtgcagttctacggcctgagcgagaacgacgagtggacccaggacagagccaagcccgtgacccagatcgtgtctgccgaagcctggggcagagccgattgcggatcccagagcttcggcctgctggaccccaagctgtgctacctgctggatggcatcctgttcatctacggcgtgatcctgaccgccctgttcctgagagtgaagttcagcagaagcgccgacgcccctgcctaccagcagggacagaaccaactgtacaacgagctgaacctgggcagacgggaagagtacgacgtgctggacaagcggagaggcagggaccctgagatgggcggaaagccccagcggagaaagaacccccaggaaggactgtataacgaactccagaaagacaagatggccgaagcctacagcgagatcggcatgaagggcgagcggagaagaggcaagggccacgatggcctgtaccagggcctgagcaccgccaccaaggacacctatgacgccctgcacatgcaggccctgcctccaagaagggccaagcgatctggatctggagcaacaaacttctcactactcaaacaagcaggtgacgtggaggagaatcccgggcctactagtatggactggatttggcgcatccttttccttgtcggcgctgctaccggcgcgcattccttcgaagctcagaaagtgacacaggcccagaccgagatcagcgtggtggaaaaagaagatgtgaccctggactgcgtgtacgagacaagggacaccgcctactacctgttctggtacaagcagcctcctagcggcgagctggtgttcctgattagacagccttggtggggcagcagcagaggcatcagcggcagatacagctggaacttccagaagtccaccagcagcttcaacttcaccatcaccgccagccaggtggtggatagcgccgtgtacttttgtgccatgagcgtgcccgatagcagaggccactaccagttcaccttcggcaagggcacaaagctgagcgtgatccctacgcgtatccagaaccctgatcctgccgtgtaccagctgcgggatagcaagagcagcgacaagagcgtgtgtctgttcaccgacttcgacagccagaccaacgtgtcccagagcaaggactccgacgtgtacatcaccgataagtgcgtgctggacatgcggagcatggacttcaagagcaactccgccgtggcctggtccaacaagtccgatttcgcctgcgccaacgccttcaacaacagcattatccccgaggacacattcttcccaagccccgagagcagctgcggtacccagagttttgggttgttggaccctaaattgtgctatctgttggacggaatcctgttcatttacggagtgatcctgaccgcattgttcctgcgggttaagttttccagatccgcagacgcacccgcttaccaacaagggcagaaccaactctacaatgaacttaatttggggcggagggaagagtacgacgttctggacaaaaggaggggacgagatcccgagatgggcggaaagcctcagcgaaggaagaatccgcaagaggggctttataacgaactccagaaagataaaatggcagaagcctatagtgagattgggatgaagggagaaaggaggaggggtaaaggtcacgatgggttgtaccaaggattgagcacagccactaaagatacctatgatgcgctccacatgcaggccctgccgccaaga

SEQ ID NO: 2464 - DNA, 2586 bp, synthetic construct
  source 1..2586: mol_type = other DNA
atggccttaccagtgaccgccttgctcctgccgctggccttgctgctccacgccgccaggccgaatgctggcgtgacccagacacctaagttccgggtgctgaaaaccggccagagcatgacactgctgtgcgcccaggacatgaaccatgagtacatgtattggtacagacaggaccccggcatgggcctgagactgatccactattctggctggggcaaagacaccgccaagggcgaagttcccgatggctacaacgtgtcccggctgaagaagcagaacttcctgctgggcctcgaaagcgccgctccatctcagaccagcgtgtacttctgcgccagcaaagttggcccaggccagcacaatagccctctgcactttggcaacggcaccagactgacagtgacactcgagcagagcttcggcctgctggaccccaagctgtgctacctgctggatggcatcctgttcatctacggcgtgatcctgaccgccctgttcctgagagtgaagttcagcagaagcgccgacgcccctgcctaccagcagggacagaaccaactgtacaacgagctgaacctgggcagacgggaagagtacgacgtgctggacaagcggagaggcagggaccctgagatgggcggaaagccccagcggagaaagaacccccaggaaggactgtataacgaactccagaaagacaagatggccgaagcctacagcgagatcggcatgaagggcgagcggagaagaggcaagggccacgatggcctgtaccagggcctgagcaccgccaccaaggacacctatgacgccctgcacatgcaggccctgcctccaagaagggccaagcgatctggatctggagcaacaaacttctcactactcaaacaagcaggtgacgtggaggagaatcccgggcctactagtatggactggatttggcgcatccttttccttgtcggcgctgctaccggcgcgcattccttcgaagctcagaaagtgacacaggcccagaccgagatcagcgtggtggaaaaagaagatgtgaccctggactgcgtgtacgagacaagggacaccgcctactacctgttctggtacaagcagcctcctagcggcgagctggtgttcctgattagacagccttggtggggcagcagcagaggcatcagcggcagatacagctggaacttccagaagtccaccagcagcttcaacttcaccatcaccgccagccaggtggtggatagcgccgtgtacttttgtgccatgagcgtgcccgatagcagaggccactaccagttcaccttcggcaagggcacaaagctgagcgtgatccctacgcgtcagagttttgggttgttggaccctaaattgtgctatctgttggacggaatcctgttcatttacggagtgatcctgaccgcattgttcctgcgggttaagttttccagatccgcagacgcacccgcttaccaacaagggcagaaccaactctacaatgaacttaatttggggcggagggaagagtacgacgttctggacaaaaggaggggacgagatcccgagatgggcggaaagcctcagcgaaggaagaatccgcaagaggggctttataacgaactccagaaagataaaatggcagaagcctatagtgagattgggatgaagggagaaaggaggaggggtaaaggtcacgatgggttgtaccaaggattgagcacagccactaaagatacctatgatgcgctccacatgcaggccctgccgccaagacgcgccaagagaagcggatctggcgtgaagcagaccctgaatttcgacctgctgaagctggctggcgacgtggaatccaacccaggcccttctagaggccatatggctctgcctgtgacagctctgctgctgcctctggcactgctgcttcatgctgctagacctagccagtttagagtgtcccctctggacagaacctggaacctgggcgagacagtggaactgaagtgccaggtgctgctgagcaaccctacaagcggctgctcctggctgtttcagcctagaggtgcagccgcctctcctacctttctgctgtacctgagccagaacaagcccaaggccgccgaaggactggacacccagagattcagcggcaagagactgggcgacaccttcgtgctgaccctgagcgacttcagaagagagaacgagggctactacttctgtagcgccctgagcaacagcatcatgtacttcagccacttcgtgcccgtgtttctgcccgccaagcctacaacaacccctgctcctagacctcctacaccagctcctacaatcgccagccagcctctgtctctcagacccgaagcctgtagacctgctgctggcggagctgtgcataccagaggactggatttcgcctgcgacatctacatctgggctcctctggctggcacatgtggcgtgctgctgctgtccctggtcatcaccctgtactgcaaccaccggaacaggcggagagtgtgcaagtgccctagacctgtggtcaagagcggcgacaagcctagcctgagcgccagatatgtt

SEQ ID NO: 2465 - DNA, 2586 bp, synthetic construct
  source 1..2586: mol_type = other DNA
atggccttaccagtgaccgccttgctcctgccgctggccttgctgctccacgccgccaggccgaatgctggcgtgacccagacacctaagttccgggtgctgaaaaccggccagagcatgacactgctgtgcgcccaggacatgaaccatgagtacatgtattggtacagacaggaccccggcatgggcctgagactgatccactattctggctggggcaaagacaccgccaagggcgaagttcccgatggctacaacgtgtcccggctgaagaagcagaacttcctgctgggcctcgaaagcgccgctccatctcagaccagcgtgtacttctgcgccagcaaagttggcccaggccagcacaatagccctctgcactttggcaacggcaccagactgacagtgacactcgaggacctgaagaacgtgttcccacctgaggtggccgtgttcgagcctagcgaggccgagatcagccacacccagaaagccaccctcgtgtgcctggctaccggcttctaccccgaccatgtggaactgtcttggtgggtcaacggcaaagaggtgcacagcggcgtgtgtaccgacccccagccactgaaagaacagcccgccctgaacgacagccggtactgcctgagcagcagactgagagtgtccgccaccttctggcagaacccccggaaccacttcagatgccaggtgcagttctacggcctgagcgagaacgacgagtggacccaggacagagccaagcccgtgacccagatcgtgtctgccgaagcctggggcagagccgattgcggatcccagagcttcggcctgctggaccccaagctgtgctacctgctggatggcatcctgttcatctacggcgtgatcctgaccgccctgttcctgaggagtaagaggagcaggctcctgcacagtgactacatgaacatgactccacgccgccccggacccacccgcaagcattaccagccctatgccccaccacgcgacttcgcagcctatcgctccagagtgaagttcagcagaagcgccgacgcccctgcctaccagcagggacagaaccaactgtacaacgagctgaacctgggcagacgggaagagtacgacgtgctggacaagcggagaggcagggaccctgagatgggcggaaagccccagcggagaaagaacccccaggaaggactgtataacgaactccagaaagacaagatggccgaagcctacagcgagatcggcatgaagggcgagcggagaagaggcaagggccacgatggcctgtaccagggcctgagcaccgccaccaaggacacctatgacgccctgcacatgcaggccctgcctccaagaagggccaagcgatctggatctggagcaacaaacttctcactactcaaacaagcaggtgacgtggaggagaatcccgggcctactagtatggactggatttggcgcatccttttccttgtcggcgctgctaccggcgcgcattccttcgaagctcagaaagtgacacaggcccagaccgagatcagcgtggtggaaaaagaagatgtgaccctggactgcgtgtacgagacaagggacaccgcctactacctgttctggtacaagcagcctcctagcggcgagctggtgttcctgattagacagccttggtggggcagcagcagaggcatcagcggcagatacagctggaacttccagaagtccaccagcagcttcaacttcaccatcaccgccagccaggtggtggatagcgccgtgtacttttgtgccatgagcgtgcccgatagcagaggccactaccagttcaccttcggcaagggcacaaagctgagcgtgatccctacgcgtatccagaaccctgatcctgccgtgtaccagctgcgggatagcaagagcagcgacaagagcgtgtgtctgttcaccgacttcgacagccagaccaacgtgtcccagagcaaggactccgacgtgtacatcaccgataagtgcgtgctggacatgcggagcatggacttcaagagcaactccgccgtggcctggtccaacaagtccgatttcgcctgcgccaacgccttcaacaacagcattatccccgaggacacattcttcccaagccccgagagcagctgcggtacccagagttttgggttgttggaccctaaattgtgctatctgttggacggaatcctgttcatttacggagtgatcctgaccgcattgttcctgcgggttaagttttccagatccgcagacgcacccgcttaccaacaagggcagaaccaactctacaatgaacttaatttggggcggagggaagagtacgacgttctggacaaaaggaggggacgagatcccgagatgggcggaaagcctcagcgaaggaagaatccgcaagaggggctttataacgaactccagaaagataaaatggcagaagcctatagtgagattgggatgaagggagaaaggaggaggggtaaaggtcacgatgggttgtaccaaggattgagcacagccactaaagatacctatgatgcgctccacatgcaggccctgccgccaaga

SEQ ID NO: 2466 - DNA, 2709 bp, synthetic construct
  source 1..2709: mol_type = other DNA
atggccttaccagtgaccgccttgctcctgccgctggccttgctgctccacgccgccaggccgaatgctggcgtgacccagacacctaagttccgggtgctgaaaaccggccagagcatgacactgctgtgcgcccaggacatgaaccatgagtacatgtattggtacagacaggaccccggcatgggcctgagactgatccactattctggctggggcaaagacaccgccaagggcgaagttcccgatggctacaacgtgtcccggctgaagaagcagaacttcctgctgggcctcgaaagcgccgctccatctcagaccagcgtgtacttctgcgccagcaaagttggcccaggccagcacaatagccctctgcactttggcaacggcaccagactgacagtgacactcgaggacctgaagaacgtgttcccacctgaggtggccgtgttcgagcctagcgaggccgagatcagccacacccagaaagccaccctcgtgtgcctggctaccggcttctaccccgaccatgtggaactgtcttggtgggtcaacggcaaagaggtgcacagcggcgtgtgtaccgacccccagccactgaaagaacagcccgccctgaacgacagccggtactgcctgagcagcagactgagagtgtccgccaccttctggcagaacccccggaaccacttcagatgccaggtgcagttctacggcctgagcgagaacgacgagtggacccaggacagagccaagcccgtgacccagatcgtgtctgccgaagcctggggcagagccgattgcggatcccagagcttcggcctgctggaccccaagctgtgctacctgctggatggcatcctgttcatctacggcgtgatcctgaccgccctgttcctgaggagtaagaggagcaggctcctgcacagtgactacatgaacatgactccacgccgccccggacccacccgcaagcattaccagccctatgccccaccacgcgacttcgcagcctatcgctccagagtgaagttcagcagaagcgccgacgcccctgcctaccagcagggacagaaccaactgtacaacgagctgaacctgggcagacgggaagagtacgacgtgctggacaagcggagaggcagggaccctgagatgggcggaaagccccagcggagaaagaacccccaggaaggactgtataacgaactccagaaagacaagatggccgaagcctacagcgagatcggcatgaagggcgagcggagaagaggcaagggccacgatggcctgtaccagggcctgagcaccgccaccaaggacacctatgacgccctgcacatgcaggccctgcctccaagaagggccaagcgatctggatctggagcaacaaacttctcactactcaaacaagcaggtgacgtggaggagaatcccgggcctactagtatggactggatttggcgcatccttttccttgtcggcgctgctaccggcgcgcattccttcgaagctcagaaagtgacacaggcccagaccgagatcagcgtggtggaaaaagaagatgtgaccctggactgcgtgtacgagacaagggacaccgcctactacctgttctggtacaagcagcctcctagcggcgagctggtgttcctgattagacagccttggtggggcagcagcagaggcatcagcggcagatacagctggaacttccagaagtccaccagcagcttcaacttcaccatcaccgccagccaggtggtggatagcgccgtgtacttttgtgccatgagcgtgcccgatagcagaggccactaccagttcaccttcggcaagggcacaaagctgagcgtgatccctacgcgtatccagaaccctgatcctgccgtgtaccagctgcgggatagcaagagcagcgacaagagcgtgtgtctgttcaccgacttcgacagccagaccaacgtgtcccagagcaaggactccgacgtgtacatcaccgataagtgcgtgctggacatgcggagcatggacttcaagagcaactccgccgtggcctggtccaacaagtccgatttcgcctgcgccaacgccttcaacaacagcattatccccgaggacacattcttcccaagccccgagagcagctgcggtacccagagttttgggttgttggaccctaaattgtgctatctgttggacggaatcctgttcatttacggagtgatcctgaccgcattgttcctgaggagcaagcggtcacggctgctccacagcgattacatgaatatgacaccacgaagaccgggtcctactcgcaaacactaccaaccctacgcacctccccgcgactttgcagcgtaccgatctcgggttaagttttccagatccgcagacgcacccgcttaccaacaagggcagaaccaactctacaatgaacttaatttggggcggagggaagagtacgacgttctggacaaaaggaggggacgagatcccgagatgggcggaaagcctcagcgaaggaagaatccgcaagaggggctttataacgaactccagaaagataaaatggcagaagcctatagtgagattgggatgaagggagaaaggaggaggggtaaaggtcacgatgggttgtaccaaggattgagcacagccactaaagatacctatgatgcgctccacatgcaggccctgccgccaaga

SEQ ID NO: 2467 - DNA, 2463 bp, synthetic construct
  source 1..2463: mol_type = other DNA
atggccttaccagtgaccgccttgctcctgccgctggccttgctgctccacgccgccaggccgaatgctggcgtgacccagacacctaagttccgggtgctgaaaaccggccagagcatgacactgctgtgcgcccaggacatgaaccatgagtacatgtattggtacagacaggaccccggcatgggcctgagactgatccactattctggctggggcaaagacaccgccaagggcgaagttcccgatggctacaacgtgtcccggctgaagaagcagaacttcctgctgggcctcgaaagcgccgctccatctcagaccagcgtgtacttctgcgccagcaaagttggcccaggccagcacaatagccctctgcactttggcaacggcaccagactgacagtgacactcgaggacctgaagaacgtgttcccacctgaggtggccgtgttcgagcctagcgaggccgagatcagccacacccagaaagccaccctcgtgtgcctggctaccggcttctaccccgaccatgtggaactgtcttggtgggtcaacggcaaagaggtgcacagcggcgtgtctaccgacccccagccactgaaagaacagcccgccctgaacgacagccggtactgcctgagcagcagactgagagtgtccgccaccttctggcagaacccccggaaccacttcagatgccaggtgcagttctacggcctgagcgagaacgacgagtggacccaggacagagccaagcccgtgacccagatcgtgtctgccgaagcctggggcagagccgattgcggatcccagagcttcggcctgctggaccccaagctgtgctacctgctggatggcatcctgttcatctacggcgtgatcctgaccgccctgttcctgagagtgaagttcagcagaagcgccgacgcccctgcctaccagcagggacagaaccaactgtacaacgagctgaacctgggcagacgggaagagtacgacgtgctggacaagcggagaggcagggaccctgagatgggcggaaagccccagcggagaaagaacccccaggaaggactgtataacgaactccagaaagacaagatggccgaagcctacagcgagatcggcatgaagggcgagcggagaagaggcaagggccacgatggcctgtaccagggcctgagcaccgccaccaaggacacctatgacgccctgcacatgcaggccctgcctccaagaagggccaagcgatctggatctggagcaacaaacttctcactactcaaacaagcaggtgacgtggaggagaatcccgggcctactagtatggactggatttggcgcatccttttccttgtcggcgctgctaccggcgcgcattccttcgaagctcagaaagtgacacaggcccagaccgagatcagcgtggtggaaaaagaagatgtgaccctggactgcgtgtacgagacaagggacaccgcctactacctgttctggtacaagcagcctcctagcggcgagctggtgttcctgattagacagccttggtggggcagcagcagaggcatcagcggcagatacagctggaacttccagaagtccaccagcagcttcaacttcaccatcaccgccagccaggtggtggatagcgccgtgtacttttgtgccatgagcgtgcccgatagcagaggccactaccagttcaccttcggcaagggcacaaagctgagcgtgatccctacgcgtatccagaaccctgatcctgccgtgtaccagctgcgggatagcaagagcagcgacaagagcgtgtgtctgttcaccgacttcgacagccagaccaacgtgtcccagagcaaggactccgacgtgtacatcaccgataagaccgtgctggacatgcggagcatggacttcaagagcaactccgccgtggcctggtccaacaagtccgatttcgcctgcgccaacgccttcaacaacagcattatccccgaggacacattcttcccaagccccgagagcagctgcggtacccagagttttgggttgttggaccctaaattgtgctatctgttggacggaatcctgttcatttacggagtgatcctgaccgcattgttcctgcgggttaagttttccagatccgcagacgcacccgcttaccaacaagggcagaaccaactctacaatgaacttaatttggggcggagggaagagtacgacgttctggacaaaaggaggggacgagatcccgagatgggcggaaagcctcagcgaaggaagaatccgcaagaggggctttataacgaactccagaaagataaaatggcagaagcctatagtgagattgggatgaagggagaaaggaggaggggtaaaggtcacgatgggttgtaccaaggattgagcacagccactaaagatacctatgatgcgctccacatgcaggccctgccgccaaga

SEQ ID NO: 2468 - DNA, 3195 bp, synthetic construct
  source 1..3195: mol_type = other DNA
atggccttaccagtgaccgccttgctcctgccgctggccttgctgctccacgccgccaggccgaatgctggcgtgacccagacacctaagttccgggtgctgaaaaccggccagagcatgacactgctgtgcgcccaggacatgaaccatgagtacatgtattggtacagacaggaccccggcatgggcctgagactgatccactattctggctggggcaaagacaccgccaagggcgaagttcccgatggctacaacgtgtcccggctgaagaagcagaacttcctgctgggcctcgaaagcgccgctccatctcagaccagcgtgtacttctgcgccagcaaagttggcccaggccagcacaatagccctctgcactttggcaacggcaccagactgacagtgacactcgaggacaagcagctggacgccgacgtgtcccccaagcctaccatcttcctgccctctatcgccgagacaaagctccagaaggccggcacctacctgtgcctgctggaaaagttcttcccagatgtgattaagatccactggcaggaaaagaagtccaacaccatcctgggcagccaggaaggcaacaccatgaagaccaacgacacctacatgaagttcagctggctgaccgtgcccgagaagtccctggacaaagaacacagatgcatcgtgcggcacgaaaacaacaagaacggcgtggaccaggaaatcatcttcccacccatcaagaccgatgtgattacaggatcccagagcttcggcctgctggaccccaagctgtgctacctgctggatggcatcctgttcatctacggcgtgatcctgaccgccctgttcctgagagtgaagttcagcagaagcgccgacgcccctgcctaccagcagggacagaaccaactgtacaacgagctgaacctgggcagacgggaagagtacgacgtgctggacaagcggagaggcagggaccctgagatgggcggaaagccccagcggagaaagaacccccaggaaggactgtataacgaactccagaaagacaagatggccgaagcctacagcgagatcggcatgaagggcgagcggagaagaggcaagggccacgatggcctgtaccagggcctgagcaccgccaccaaggacacctatgacgccctgcacatgcaggccctgcctccaagaagggccaagcgatctggatctggagcaacaaacttctcactactcaaacaagcaggtgacgtggaggagaatcccgggcctactagtatggactggatttggcgcatccttttccttgtcggcgctgctaccggcgcgcattccttcgaagctcagaaagtgacacaggcccagaccgagatcagcgtggtggaaaaagaagatgtgaccctggactgcgtgtacgagacaagggacaccgcctactacctgttctggtacaagcagcctcctagcggcgagctggtgttcctgattagacagccttggtggggcagcagcagaggcatcagcggcagatacagctggaacttccagaagtccaccagcagcttcaacttcaccatcaccgccagccaggtggtggatagcgccgtgtacttttgtgccatgagcgtgcccgatagcagaggccactaccagttcaccttcggcaagggcacaaagctgagcgtgatccctacgcgtagccagcctcacaccaagcccagcgtgttcgtgatgaagaacggcaccaacgtggcctgcctcgtgaaagagttctaccccaaggacatcaggatcaacctggtgtccagcaagaagatcaccgagttcgaccccgccatcgtgatctcccccagcggcaagtacaacgccgtgaagctggggaagtacgaggacagcaacagcgtgacctgctccgtgcagcacgacaacaagaccgtgcacagcaccgactttggtacccagagttttgggttgttggaccctaaattgtgctatctgttggacggaatcctgttcatttacggagtgatcctgaccgcattgttcctgcgggttaagttttccagatccgcagacgcacccgcttaccaacaagggcagaaccaactctacaatgaacttaatttggggcggagggaagagtacgacgttctggacaaaaggaggggacgagatcccgagatgggcggaaagcctcagcgaaggaagaatccgcaagaggggctttataacgaactccagaaagataaaatggcagaagcctatagtgagattgggatgaagggagaaaggaggaggggtaaaggtcacgatgggttgtaccaaggattgagcacagccactaaagatacctatgatgcgctccacatgcaggccctgccgccaagacgcgccaagagaagcggatctggcgtgaagcagaccctgaatttcgacctgctgaagctggctggcgacgtggaatccaacccaggcccttctagaggccatatggctctgcctgtgacagctctgctgctgcctctggcactgctgcttcatgctgctagacctagccagtttagagtgtcccctctggacagaacctggaacctgggcgagacagtggaactgaagtgccaggtgctgctgagcaaccctacaagcggctgctcctggctgtttcagcctagaggtgcagccgcctctcctacctttctgctgtacctgagccagaacaagcccaaggccgccgaaggactggacacccagagattcagcggcaagagactgggcgacaccttcgtgctgaccctgagcgacttcagaagagagaacgagggctactacttctgtagcgccctgagcaacagcatcatgtacttcagccacttcgtgcccgtgtttctgcccgccaagcctacaacaacccctgctcctagacctcctacaccagctcctacaatcgccagccagcctctgtctctcagacccgaagcctgtagacctgctgctggcggagctgtgcataccagaggactggatttcgcctgcgacatctacatctgggctcctctggctggcacatgtggcgtgctgctgctgtccctggtcatcaccctgtactgcaaccaccggaacaggcggagagtgtgcaagtgccctagacctgtggtcaagagcggcgacaagcctagcctgagcgccagatatgtt

SEQ ID NO: 2469 - DNA, 2799 bp, synthetic construct
  source 1..2799: mol_type = other DNA
atggccttaccagtgaccgccttgctcctgccgctggccttgctgctccacgccgccaggccgaatgctggcgtgacccagacacctaagttccgggtgctgaaaaccggccagagcatgacactgctgtgcgcccaggacatgaaccatgagtacatgtattggtacagacaggaccccggcatgggcctgagactgatccactattctggctggggcaaagacaccgccaagggcgaagttcccgatggctacaacgtgtcccggctgaagaagcagaacttcctgctgggcctcgaaagcgccgctccatctcagaccagcgtgtacttctgcgccagcaaagttggcccaggccagcacaatagccctctgcactttggcaacggcaccagactgacagtgacactcgagggacagcctaaggccaatcctaccgtgacactgttccctccaagcagcgaagaactccaggccaacaaggccacacttgtgtgcctgatctccgacttctaccctggggctgtgacagtggcttggaaggccgatggatctcctgtgaaagccggcgtggaaaccaccaagccatccaagcagagcaacaacaaatacgccgccagctcctacctgagcctgacacctgagcagtggaagtcccacagatcctacagctgccaagtgacccacgaaggcagcaccgtggaaaagacagtggcccctacagagtgcagcacaacacctggcgagagaagtagcctgcctgccttctatcctggcaccagcggctcttgttctggctgtggatctctgagcctgcctctgctggctggactggttgctgctgatgctgtggcctctctgctgattgtgggagccgtgttcctgtgcgccagacctagaagaagccccgctcaagaggacggcaaggtgtacatcaacatgcccggcagaggaagggccaagcgatctggatctggagcaacaaacttctcactactcaaacaagcaggtgacgtggaggagaatcccgggcctactagtatggactggatttggcgcatccttttccttgtcggcgctgctaccggcgcgcattccttcgaagctcagaaagtgacacaggcccagaccgagatcagcgtggtggaaaaagaagatgtgaccctggactgcgtgtacgagacaagggacaccgcctactacctgttctggtacaagcagcctcctagcggcgagctggtgttcctgattagacagccttggtggggcagcagcagaggcatcagcggcagatacagctggaacttccagaagtccaccagcagcttcaacttcaccatcaccgccagccaggtggtggatagcgccgtgtacttttgtgccatgagcgtgcccgatagcagaggccactaccagttcaccttcggcaagggcacaaagctgagcgtgatccctacgcgtgcctctacaaagggaccctccgtgtttcctctggctcccagcagcaagtctacaagcggaggaacagccgctctgggctgcctggtcaaggattactttcccgagcctgtgaccgtgtcctggaatagcggagcactgacaagcggcgtgcacacctttccagccgtgctgcaaagcagcggcctgtactctctgagcagcgtggtcacagtgcctagctctagcctgggcacccagacctacatctgcaatgtgaaccacaagcctagcaacaccaaggtggacaagagagtggaacccaagagctgtacaacgccgggcgaaaggagttccttgccggccttttaccccggcacaagcggaagctgtagtgggtgtggaagcctcagcctcccacttcttgcgggcctcgtcgcggcagatgcagtagcttcacttcttattgtaggcgcggtatttctctgtgctcgaccaaggaggtcacccgctcaggaggatggtaaggtgtatataaatatgccaggacgcggacgcgccaagagaagcggatctggcgtgaagcagaccctgaatttcgacctgctgaagctggctggcgacgtggaatccaacccaggcccttctagaggccatatggctctgcctgtgacagctctgctgctgcctctggcactgctgcttcatgctgctagacctagccagtttagagtgtcccctctggacagaacctggaacctgggcgagacagtggaactgaagtgccaggtgctgctgagcaaccctacaagcggctgctcctggctgtttcagcctagaggtgcagccgcctctcctacctttctgctgtacctgagccagaacaagcccaaggccgccgaaggactggacacccagagattcagcggcaagagactgggcgacaccttcgtgctgaccctgagcgacttcagaagagagaacgagggctactacttctgtagcgccctgagcaacagcatcatgtacttcagccacttcgtgcccgtgtttctgcccgccaagcctacaacaacccctgctcctagacctcctacaccagctcctacaatcgccagccagcctctgtctctcagacccgaagcctgtagacctgctgctggcggagctgtgcataccagaggactggatttcgcctgcgacatctacatctgggctcctctggctggcacatgtggcgtgctgctgctgtccctggtcatcaccctgtactgcaaccaccggaacaggcggagagtgtgcaagtgccctagacctgtggtcaagagcggcgacaagcctagcctgagcgccagatatgtt

SEQ ID NO: 2470 - DNA, 2286 bp, synthetic construct
  source 1..2286: mol_type = other DNA
atggccttaccagtgaccgccttgctcctgccgctggccttgctgctccacgccgccaggccgaatgctggcgtgacccagacacctaagttccgggtgctgaaaaccggccagagcatgacactgctgtgcgcccaggacatgaaccatgagtacatgtattggtacagacaggaccccggcatgggcctgagactgatccactattctggctggggcaaagacaccgccaagggcgaagttcccgatggctacaacgtgtcccggctgaagaagcagaacttcctgctgggcctcgaaagcgccgctccatctcagaccagcgtgtacttctgcgccagcaaagttggcccaggccagcacaatagccctctgcactttggcaacggcaccagactgacagtgacactcgagggcgacatcgagaacaccagtctggcccctgaggaccctacctttcctgccgatacctggggcacctacctgctgaccacagagacaggactccagaaagatcacgccctgtgggaccacacagcccagaacctgctgagaatgggcctcgcctttctggtgctggttgccctcgtgtggttcctggtggaagattggctgagccggaagcggacaagagagagagccagcagagcctctacctgggagggaagaagaaggctgaacacccagacacttagggccaagcgatctggatctggagcaacaaacttctcactactcaaacaagcaggtgacgtggaggagaatcccgggcctactagtatggactggatttggcgcatccttttccttgtcggcgctgctaccggcgcgcattccttcgaagctcagaaagtgacacaggcccagaccgagatcagcgtggtggaaaaagaagatgtgaccctggactgcgtgtacgagacaagggacaccgcctactacctgttctggtacaagcagcctcctagcggcgagctggtgttcctgattagacagccttggtggggcagcagcagaggcatcagcggcagatacagctggaacttccagaagtccaccagcagcttcaacttcaccatcaccgccagccaggtggtggatagcgccgtgtacttttgtgccatgagcgtgcccgatagcagaggccactaccagttcaccttcggcaagggcacaaagctgagcgtgatccctacgcgtggcgatattgagaatacctctctggccccagaagatcctacattccccgccgacacatggggaacatatctgctgacaaccgaaaccgggctgcaaaaggaccatgctctgtgggatcataccgctcagaatctgcttcggatggggcttgcattcctggtcctggtggctcttgtctggtttctggtcgaggactggctgtcccggaagagaaccagagaaagagcttccagggccagcacctgggaaggcagacgcagactgaatactcagaccctgcgcgccaagagaagcggatctggcgtgaagcagaccctgaatttcgacctgctgaagctggctggcgacgtggaatccaacccaggcccttctagaggccatatggctctgcctgtgacagctctgctgctgcctctggcactgctgcttcatgctgctagacctagccagtttagagtgtcccctctggacagaacctggaacctgggcgagacagtggaactgaagtgccaggtgctgctgagcaaccctacaagcggctgctcctggctgtttcagcctagaggtgcagccgcctctcctacctttctgctgtacctgagccagaacaagcccaaggccgccgaaggactggacacccagagattcagcggcaagagactgggcgacaccttcgtgctgaccctgagcgacttcagaagagagaacgagggctactacttctgtagcgccctgagcaacagcatcatgtacttcagccacttcgtgcccgtgtttctgcccgccaagcctacaacaacccctgctcctagacctcctacaccagctcctacaatcgccagccagcctctgtctctcagacccgaagcctgtagacctgctgctggcggagctgtgcataccagaggactggatttcgcctgcgacatctacatctgggctcctctggctggcacatgtggcgtgctgctgctgtccctggtcatcaccctgtactgcaaccaccggaacaggcggagagtgtgcaagtgccctagacctgtggtcaagagcggcgacaagcctagcctgagcgccagatatgtt

SEQ ID NO: 2471 - DNA, 2118 bp, synthetic construct
  source 1..2118: mol_type = other DNA
atggccttaccagtgaccgccttgctcctgccgctggccttgctgctccacgccgccaggccgaatgctggcgtgacccagacacctaagttccgggtgctgaaaaccggccagagcatgacactgctgtgcgcccaggacatgaaccatgagtacatgtattggtacagacaggaccccggcatgggcctgagactgatccactattctggctggggcaaagacaccgccaagggcgaagttcccgatggctacaacgtgtcccggctgaagaagcagaacttcctgctgggcctcgaaagcgccgctccatctcagaccagcgtgtacttctgcgccagcaaagttggcccaggccagcacaatagccctctgcactttggcaacggcaccagactgacagtgacactcgagatcactcaaggtttggcagtgtcaaccatctcatcattctttccacctggctaccaagtgtccttctgcctggtcatggtgctgctgttcgccgtggataccggcctgtacttcagcgtcaagaccaacatccggtccagcaccagagactggaaggaccacaagttcaagtggcggaaggaccctcaggacaagagggccaagcgatctggatctggagcaacaaacttctcactactcaaacaagcaggtgacgtggaggagaatcccgggcctactagtatggactggatttggcgcatccttttccttgtcggcgctgctaccggcgcgcattccttcgaagctcagaaagtgacacaggcccagaccgagatcagcgtggtggaaaaagaagatgtgaccctggactgcgtgtacgagacaagggacaccgcctactacctgttctggtacaagcagcctcctagcggcgagctggtgttcctgattagacagccttggtggggcagcagcagaggcatcagcggcagatacagctggaacttccagaagtccaccagcagcttcaacttcaccatcaccgccagccaggtggtggatagcgccgtgtacttttgtgccatgagcgtgcccgatagcagaggccactaccagttcaccttcggcaagggcacaaagctgagcgtgatccctacgcgtatcacccagggcctggccgtgtctaccatcagcagctttttcccacccggctaccaggtgtccttctgcctcgtgatggtgctgctgttcgccgtggacaccggcctgtacttcagcgtgaaaacaaacatccggtccagcaccagagactggaaggaccacaagttcaagtggcggaaggacccccaggacaagcgcgccaagagaagcggatctggcgtgaagcagaccctgaatttcgacctgctgaagctggctggcgacgtggaatccaacccaggcccttctagaggccatatggctctgcctgtgacagctctgctgctgcctctggcactgctgcttcatgctgctagacctagccagtttagagtgtcccctctggacagaacctggaacctgggcgagacagtggaactgaagtgccaggtgctgctgagcaaccctacaagcggctgctcctggctgtttcagcctagaggtgcagccgcctctcctacctttctgctgtacctgagccagaacaagcccaaggccgccgaaggactggacacccagagattcagcggcaagagactgggcgacaccttcgtgctgaccctgagcgacttcagaagagagaacgagggctactacttctgtagcgccctgagcaacagcatcatgtacttcagccacttcgtgcccgtgtttctgcccgccaagcctacaacaacccctgctcctagacctcctacaccagctcctacaatcgccagccagcctctgtctctcagacccgaagcctgtagacctgctgctggcggagctgtgcataccagaggactggatttcgcctgcgacatctacatctgggctcctctggctggcacatgtggcgtgctgctgctgtccctggtcatcaccctgtactgcaaccaccggaacaggcggagagtgtgcaagtgccctagacctgtggtcaagagcggcgacaagcctagcctgagcgccagatatgtt

SEQ ID NO: 2472 - DNA, 2370 bp, synthetic construct
  source 1..2370: mol_type = other DNA
atggccttaccagtgaccgccttgctcctgccgctggccttgctgctccacgccgccaggccgggcattacacagagccccaagtacctgttcagaaaagagggccagaacgtcaccctgagctgcgagcagaacctgaaccacgacgccatgtactggtacagacaggacccaggccagggcctgagactgatctactacagccagatcgtgaacgacttccagaagggcgacattgccgagggctacagcgtgtccagagagaagaaagagtcctttccactgaccgtgacaagcgcccagaagaaccctaccgccttctacctgtgtgccagctctcctggcgctctgtacgagcagtatttcggccctggcaccagactgacagttacaggacagcctaaggccaatcctaccgtgacactgttccctccaagcagcgaagaactccaggccaacaaggccacacttgtgtgcctgatctccgacttctaccctggggctgtgacagtggcttggaaggccgatggatctcctgtgaaagccggcgtggaaaccaccaagccatccaagcagagcaacaacaaatacgccgccagctcctacctgagcctgacacctgagcagtggaagtcccacagatcctacagctgccaagtgacccacgaaggcagcaccgtggaaaagacagtggcccctacagagtgcagcggatcccagagcttcggcctgctggaccccaagctgtgctacctgctggatggcatcctgttcatctacggcgtgatcctgaccgccctgttcctgagagtgaagttcagcagaagcgccgacgcccctgcctaccagcagggacagaaccaactgtacaacgagctgaacctgggcagacgggaagagtacgacgtgctggacaagcggagaggcagggaccctgagatgggcggaaagccccagcggagaaagaacccccaggaaggactgtataacgaactccagaaagacaagatggccgaagcctacagcgagatcggcatgaagggcgagcggagaagaggcaagggccacgatggcctgtaccagggcctgagcaccgccaccaaggacacctatgacgccctgcacatgcaggccctgcctccaagaagggccaagcgatctggatctggagcaacaaacttctcactactcaaacaagcaggtgacgtggaggagaatcccgggcctactagtatggactggatttggcgcatccttttccttgtcggcgctgctaccggcgcgcattccttcgaagaaaatgtggaacagcaccccagcacactgagcgtgcaagagggcgatagcgccgtgattaagtgcacctacagcgacagcgccagcaactacttcccctggtacaagcaagagctgggcaaaagaccccagctcatcatcgacatccggtccaacgtgggcgagaagaaggaccagagaatcgccgtgacactgaacaagaccgccaagcacttcagcctgcacatcaccgagacacagcctgaggattccgccgtgtacttttgtgccgccaccgaggactaccagctgatttggggagccggcaccaagctgattatcaagcctgacgcctctacaaagggaccctccgtgtttcctctggctcccagcagcaagtctacaagcggaggaacagccgctctgggctgcctggtcaaggattactttcccgagcctgtgaccgtgtcctggaatagcggagcactgacaagcggcgtgcacacctttccagccgtgctgcaaagcagcggcctgtactctctgagcagcgtggtcacagtgcctagctctagcctgggcacccagacctacatctgcaatgtgaaccacaagcctagcaacaccaaggtggacaagagagtggaacccaagagctgtggtacccagagttttgggttgttggaccctaaattgtgctatctgttggacggaatcctgttcatttacggagtgatcctgaccgcattgttcctgcgggttaagttttccagatccgcagacgcacccgcttaccaacaagggcagaaccaactctacaatgaacttaatttggggcggagggaagagtacgacgttctggacaaaaggaggggacgagatcccgagatgggcggaaagcctcagcgaaggaagaatccgcaagaggggctttataacgaactccagaaagataaaatggcagaagcctatagtgagattgggatgaagggagaaaggaggaggggtaaaggtcacgatgggttgtaccaaggattgagcacagccactaaagatacctatgatgcgctccacatgcaggccctgccgccaaga

SEQ ID NO: 2473 - DNA, 1668 bp, synthetic construct
  source 1..1668: mol_type = other DNA
atggccttaccagtgaccgccttgctcctgccgctggccttgctgctccacgccgccaggccgggcattacacagagccccaagtacctgttcagaaaagagggccagaacgtcaccctgagctgcgagcagaacctgaaccacgacgccatgtactggtacagacaggacccaggccagggcctgagactgatctactacagccagatcgtgaacgacttccagaagggcgacattgccgagggctacagcgtgtccagagagaagaaagagtcctttccactgaccgtgacaagcgcccagaagaaccctaccgccttctacctgtgtgccagctctcctggcgctctgtacgagcagtatttcggccctggcaccagactgacagttacactcgagcagagcttcggcctgctggaccccaagctgtgctacctgctggatggcatcctgttcatctacggcgtgatcctgaccgccctgttcctgagagtgaagttcagcagaagcgccgacgcccctgcctaccagcagggacagaaccaactgtacaacgagctgaacctgggcagacgggaagagtacgacgtgctggacaagcggagaggcagggaccctgagatgggcggaaagccccagcggagaaagaacccccaggaaggactgtataacgaactccagaaagacaagatggccgaagcctacagcgagatcggcatgaagggcgagcggagaagaggcaagggccacgatggcctgtaccagggcctgagcaccgccaccaaggacacctatgacgccctgcacatgcaggccctgcctccaagaagggccaagcgatctggatctggagcaacaaacttctcactactcaaacaagcaggtgacgtggaggagaatcccgggcctactagtatggactggatttggcgcatccttttccttgtcggcgctgctaccggcgcgcattccttcgaagaaaatgtggaacagcaccccagcacactgagcgtgcaagagggcgatagcgccgtgattaagtgcacctacagcgacagcgccagcaactacttcccctggtacaagcaagagctgggcaaaagaccccagctcatcatcgacatccggtccaacgtgggcgagaagaaggaccagagaatcgccgtgacactgaacaagaccgccaagcacttcagcctgcacatcaccgagacacagcctgaggattccgccgtgtacttttgtgccgccaccgaggactaccagctgatttggggagccggcaccaagctgattatcaagcctgacacgcgtcagagttttgggttgttggaccctaaattgtgctatctgttggacggaatcctgttcatttacggagtgatcctgaccgcattgttcctgcgggttaagttttccagatccgcagacgcacccgcttaccaacaagggcagaaccaactctacaatgaacttaatttggggcggagggaagagtacgacgttctggacaaaaggaggggacgagatcccgagatgggcggaaagcctcagcgaaggaagaatccgcaagaggggctttataacgaactccagaaagataaaatggcagaagcctatagtgagattgggatgaagggagaaaggaggaggggtaaaggtcacgat

SEQ ID NO: 2474 - DNA, 2820 bp, synthetic construct
  source 1..2820: mol_type = other DNA
atggccttaccagtgaccgccttgctcctgccgctggccttgctgctccacgccgccaggccgggcattacacagagccccaagtacctgttcagaaaagagggccagaacgtcaccctgagctgcgagcagaacctgaaccacgacgccatgtactggtacagacaggacccaggccagggcctgagactgatctactacagccagatcgtgaacgacttccagaagggcgacattgccgagggctacagcgtgtccagagagaagaaagagtcctttccactgaccgtgacaagcgcccagaagaaccctaccgccttctacctgtgtgccagctctcctggcgctctgtacgagcagtatttcggccctggcaccagactgacagttacactcgagacaacacctggcgagagaagtagcctgcctgccttctatcctggcaccagcggctcttgttctggctgtggatctctgagcctgcctctgctggctggactggttgctgctgatgctgtggcctctctgctgattgtgggagccgtgttcctgtgcgccagacctagaagaagccccgctcaagaggacggcaaggtgtacatcaacatgcccggcagaggaagcactagtagagtgaagttcagcagaagcgccgacgcccctgcctaccagcagggacagaaccaactgtacaacgagctgaacctgggcagacgggaagagtacgacgtgctggacaagcggagaggcagggaccctgagatgggcggaaagccccagcggagaaagaacccccaggaaggactgtataacgaactccagaaagacaagatggccgaagcctacagcgagatcggcatgaagggcgagcggagaagaggcaagggccacgatggcctgtaccagggcctgagcaccgccaccaaggacacctatgacgccctgcacatgcaggccctgcctccaagaagggccaagcgatctggatctggagcaacaaacttctcactactcaaacaagcaggtgacgtggaggagaatcccgggcctatggactggatttggcgcatccttttccttgtcggcgctgctaccggcgcgcattccttcgaagaaaatgtggaacagcaccccagcacactgagcgtgcaagagggcgatagcgccgtgattaagtgcacctacagcgacagcgccagcaactacttcccctggtacaagcaagagctgggcaaaagaccccagctcatcatcgacatccggtccaacgtgggcgagaagaaggaccagagaatcgccgtgacactgaacaagaccgccaagcacttcagcctgcacatcaccgagacacagcctgaggattccgccgtgtacttttgtgccgccaccgaggactaccagctgatttggggagccggcaccaagctgattatcaagcctgacacgcgtacaacgccgggcgaaaggagttccttgccggccttttaccccggcacaagcggaagctgtagtgggtgtggaagcctcagcctcccacttcttgcgggcctcgtcgcggcagatgcagtagcttcacttcttattgtaggcgcggtatttctctgtgctcgaccaaggaggtcacccgctcaggaggatggtaaggtgtatataaatatgccaggacgcggaagctctagacgggttaagttttccagatccgcagacgcacccgcttaccaacaagggcagaaccaactctacaatgaacttaatttggggcggagggaagagtacgacgttctggacaaaaggaggggacgagatcccgagatgggcggaaagcctcagcgaaggaagaatccgcaagaggggctttataacgaactccagaaagataaaatggcagaagcctatagtgagattgggatgaagggagaaaggaggaggggtaaaggtcacgatgggttgtaccaaggattgagcacagccactaaagatacctatgatgcgctccacatgcaggccctgccgccaagacgcgccaagagaagcggatctggcgtgaagcagaccctgaatttcgacctgctgaagctggctggcgacgtggaatccaacccaggccctggccatatggctctgcctgtgacagctctgctgctgcctctggcactgctgcttcatgctgctagacctagccagtttagagtgtcccctctggacagaacctggaacctgggcgagacagtggaactgaagtgccaggtgctgctgagcaaccctacaagcggctgctcctggctgtttcagcctagaggtgcagccgcctctcctacctttctgctgtacctgagccagaacaagcccaaggccgccgaaggactggacacccagagattcagcggcaagagactgggcgacaccttcgtgctgaccctgagcgacttcagaagagagaacgagggctactacttctgtagcgccctgagcaacagcatcatgtacttcagccacttcgtgcccgtgtttctgcccgccaagcctacaacaacccctgctcctagacctcctacaccagctcctacaatcgccagccagcctctgtctctcagacccgaagcctgtagacctgctgctggcggagctgtgcataccagaggactggatttcgcctgcgacatctacatctgggctcctctggctggcacatgtggcgtgctgctgctgtccctggtcatcaccctgtactgcaaccaccggaacaggcggagagtgtgcaagtgccctagacctgtggtcaagagcggcgacaagcctagcctgagcgccagatatgtt

SEQ ID NO: 2475 - DNA, 2820 bp, synthetic construct; identical to SEQ ID NO: 2474
  source 1..2820: mol_type = other DNA

SEQ ID NO: 2476 - DNA, 3318 bp, synthetic construct
  source 1..3318: mol_type = other DNA
atggccttaccagtgaccgccttgctcctgccgctggccttgctgctccacgccgccaggccgggcattacacagagccccaagtacctgttcagaaaagagggccagaacgtcaccctgagctgcgagcagaacctgaaccacgacgccatgtactggtacagacaggacccaggccagggcctgagactgatctactacagccagatcgtgaacgacttccagaagggcgacattgccgagggctacagcgtgtccagagagaagaaagagtcctttccactgaccgtgacaagcgcccagaagaaccctaccgccttctacctgtgtgccagctctcctggcgctctgtacgagcagtatttcggccctggcaccagactgacagttacactcgagggacagcctaaggccaatcctaccgtgacactgttccctccaagcagcgaagaactccaggccaacaaggccacacttgtgtgcctgatctccgacttctaccctggggctgtgacagtggcttggaaggccgatggatctcctgtgaaagccggcgtggaaaccaccaagccatccaagcagagcaacaacaaatacgccgccagctcctacctgagcctgacacctgagcagtggaagtcccacagatcctacagctgccaagtgacccacgaaggcagcaccgtggaaaagacagtggcccctacagagtgcagcggatccacaacacctggcgagagaagtagcctgcctgccttctatcctggcaccagcggctcttgttctggctgtggatctctgagcctgcctctgctggctggactggttgctgctgatgctgtggcctctctgctgattgtgggagccgtgttcctgtgcgccagacctagaagaagccccgctcaagaggacggcaaggtgtacatcaacatgcccggcagaggaagcactagtagagtgaagttcagcagaagcgccgacgcccctgcctaccagcagggacagaaccaactgtacaacgagctgaacctgggcagacgggaagagtacgacgtgctggacaagcggagaggcagggaccctgagatgggcggaaagccccagcggagaaagaacccccaggaaggactgtataacgaactccagaaagacaagatggccgaagcctacagcgagatcggcatgaagggcgagcggagaagaggcaagggccacgatggcctgtaccagggcctgagcaccgccaccaaggacacctatgacgccctgcacatgcaggccctgcctccaagaagggccaagcgatctggatctggagcaacaaacttctcactactcaaacaagcaggtgacgtggaggagaatcccgggcctatggactggatttggcgcatccttttccttgtcggcgctgctaccggcgcgcattccttcgaagaaaatgtggaacagcaccccagcacactgagcgtgcaagagggcgatagcgccgtgattaagtgcacctacagcgacagcgccagcaactacttcccctggtacaagcaagagctgggcaaaagaccccagctcatcatcgacatccggtccaacgtgggcgagaagaaggaccagagaatcgccgtgacactgaacaagaccgccaagcacttcagcctgcacatcaccgagacacagcctgaggattccgccgtgtacttttgtgccgccaccgaggactaccagctgatttggggagccggcaccaagctgattatcaagcctgacacgcgtgcctctacaaagggaccctccgtgtttcctctggctcccagcagcaagtctacaagcggaggaacagccgctctgggctgcctggtcaaggattactttcccgagcctgtgaccgtgtcctggaatagcggagcactgacaagcggcgtgcacacctttccagccgtgctgcaaagcagcggcctgtactctctgagcagcgtggtcacagtgcctagctctagcctgggcacccagacctacatctgcaatgtgaaccacaagcctagcaacaccaaggtggacaagagagtggaacccaagagctgtggtaccacaacgccgggcgaaaggagttccttgccggccttttaccccggcacaagcggaagctgtagtgggtgtggaagcctcagcctcccacttcttgcgggcctcgtcgcggcagatgcagtagcttcacttcttattgtaggcgcggtatttctctgtgctcgaccaaggaggtcacccgctcaggaggatggtaaggtgtatataaatatgccaggacgcggaagctctagacgggttaagttttccagatccgcagacgcacccgcttaccaacaagggcagaaccaactctacaatgaacttaatttggggcggagggaagagtacgacgttctggacaaaaggaggggacgagatcccgagatgggcggaaagcctcagcgaaggaagaatccgcaagaggggctttataacgaactccagaaagataaaatggcagaagcctatagtgagattgggatgaagggagaaaggaggaggggtaaaggtcacgatgggttgtaccaaggattgagcacagccactaaagatacctatgatgcgctccacatgcaggccctgccgccaagacgcgccaagagaagcggatctggcgtgaagcagaccctgaatttcgacctgctgaagctggctggcgacgtggaatccaacccaggccctggccatatggctacctacgaggtgctgtgcgaggtggcaagaaagctgggcaccgacgacagagaagtggtgctgttcctgctgaacgtgttcatccctcagcctacactggcccagctgatcggtgcactgagagccctgaaagaggaaggccggctgacctttcctctgctggccgaatgcctgttcagagccggaagaagggatctgctgcgggacctgctgcatctggaccccagatttctggaaagacacctggccggcaccatgagctacttcagcccttaccagctgaccgtgctgcacgttgacggcgaactgtgcgccagagatattcggagcctgatcttcctgagcaaggacaccatcggcagccggtctacccctcagacatttctgcactgggtgtactgcatggaaaacctggacctgctcggccccacagatgtggatgccctgatgtccatgctgagaagcctgagcagagtggacctccagagacaggtgcagacactgatgggactgcacctgagcggacctagccacagccagcactacagacacacccct

SEQ ID NO: 2477 - DNA, 3477 bp, synthetic construct
  source 1..3477: mol_type = other DNA
atggccttaccagtgaccgccttgctcctgccgctggccttgctgctccacgccgccaggccgggcattacacagagccccaagtacctgttcagaaaagagggccagaacgtcaccctgagctgcgagcagaacctgaaccacgacgccatgtactggtacagacaggacccaggccagggcctgagactgatctactacagccagatcgtgaacgacttccagaagggcgacattgccgagggctacagcgtgtccagagagaagaaagagtcctttccactgaccgtgacaagcgcccagaagaaccctaccgccttctacctgtgtgccagctctcctggcgctctgtacgagcagtatttcggccctggcaccagactgacagttacactcgagggacagcctaaggccaatcctaccgtgacactgttccctccaagcagcgaagaactccaggccaacaaggccacacttgtgtgcctgatctccgacttctaccctggggctgtgacagtggcttggaaggccgatggatctcctgtgaaagccggcgtggaaaccaccaagccatccaagcagagcaacaacaaatacgccgccagctcctacctgagcctgacacctgagcagtggaagtcccacagatcctacagctgccaagtgacccacgaaggcagcaccgtggaaaagacagtggcccctacagagtgcagcggatccacaacacctggcgagagaagtagcctgcctgccttctatcctggcaccagcggctcttgttctggctgtggatctctgagcctgcctctgctggctggactggttgctgctgatgctgtggcctctctgctgattgtgggagccgtgttcctgtgcgccagacctagaagaagccccgctcaagaggacggcaaggtgtacatcaacatgcccggcagaggaagcactagtagagtgaagttcagcagaagcgccgacgcccctgcctaccagcagggacagaaccaactgtacaacgagctgaacctgggcagacgggaagagtacgacgtgctggacaagcggagaggcagggaccctgagatgggcggaaagccccagcggagaaagaacccccaggaaggactgtataacgaactccagaaagacaagatggccgaagcctacagcgagatcggcatgaagggcgagcggagaagaggcaagggccacgatggcctgtaccagggcctgagcaccgccaccaaggacacctatgacgccctgcacatgcaggccctgcctccaagaagggccaagcgatctggatctggagcaacaaacttctcactactcaaacaagcaggtgacgtggaggagaatcccgggcctatggactggatttggcgcatccttttccttgtcggcgctgctaccggcgcgcattccttcgaagaaaatgtggaacagcaccccagcacactgagcgtgcaagagggcgatagcgccgtgattaagtgcacctacagcgacagcgccagcaactacttcccctggtacaagcaagagctgggcaaaagaccccagctcatcatcgacatccggtccaacgtgggcgagaagaaggaccagagaatcgccgtgacactgaacaagaccgccaagcacttcagcctgcacatcaccgagacacagcctgaggattccgccgtgtacttttgtgccgccaccgaggactaccagctgatttggggagccggcaccaagctgattatcaagcctgacacgcgtgcctctacaaagggaccctccgtgtttcctctggctcccagcagcaagtctacaagcggaggaacagccgctctgggctgcctggtcaaggattactttcccgagcctgtgaccgtgtcctggaatagcggagcactgacaagcggcgtgcacacctttccagccgtgctgcaaagcagcggcctgtactctctgagcagcgtggtcacagtgcctagctctagcctgggcacccagacctacatctgcaatgtgaaccacaagcctagcaacaccaaggtggacaagagagtggaacccaagagctgtggtaccacaacgccgggcgaaaggagttccttgccggccttttaccccggcacaagcggaagctgtagtgggtgtggaagcctcagcctcccacttcttgcgggcctcgtcgcggcagatgcagtagcttcacttcttattgtaggcgcggtatttctctgtgctcgaccaaggaggtcacccgctcaggaggatggtaaggtgtatataaatatgccaggacgcggaagctctagacgggttaagttttccagatccgcagacgcacccgcttaccaacaagggcagaaccaactctacaatgaacttaatttggggcggagggaagagtacgacgttctggacaaaaggaggggacgagatcccgagatgggcggaaagcctcagcgaaggaagaatccgcaagaggggctttataacgaactccagaaagataaaatggcagaagcctatagtgagattgggatgaagggagaaaggaggaggggtaaaggtcacgatgggttgtaccaaggattgagcacagccactaaagatacctatgatgcgctccacatgcaggccctgccgccaagacgcgccaagagaagcggatctggcgtgaagcagaccctgaatttcgacctgctgaagctggctggcgacgtggaatccaacccaggccctggccatatgtccgactccaaggaggtccctagccttccatttttgcgacacttgctcgaagagttggacagccatgaggacagcttgctgctgtttctgtgtcacgacgcggccccgggctgcacgacggtcacgcaagctttgtgctcgcttagccaacagcgcaagctgaccctcgcggctctggtcgagatgctctacgtgctgcagcgtatggatcttctcaagagccgcttcgggctcagcaaggagggggccgagcaattgctgggcacaagctttctcacgcgctaccgcaagctcatggtttgcgtgggtgaggagctcgactcgagcgagctacgcgctctacgcttgttcgcgtgcaacctgaatccgagcctgagcacggcgctttctgagagcagccgctttgtcgagcttgtactcgcgcttgaaaacgtaggactcgtctcgccatcgagtgtttccgtgcttgcggacatgttgcgcactcttcggcgcctcgatttgtgccagcagcttgttgagtacgaacaacaagagcaagccaggtaccgttactgttacgcggcctcgccctcattgccagttcgtacgttacgtcgggggcacggcgcgagtgaacacgagcagctgtgcatgcccgtgcaagaatcctctgacagccccgagctgctgcgcacgcccgtacaagaatcctccagcgacagccccgagcaaacgact

SEQ ID NO: 2478 - DNA, 3459 bp, synthetic construct
  source 1..3459: mol_type = other DNA
atggccttaccagtgaccgccttgctcctgccgctggccttgctgctccacgccgccaggccgggcattacacagagccccaagtacctgttcagaaaagagggccagaacgtcaccctgagctgcgagcagaacctgaaccacgacgccatgtactggtacagacaggacccaggccagggcctgagactgatctactacagccagatcgtgaacgacttccagaagggcgacattgccgagggctacagcgtgtccagagagaagaaagagtcctttccactgaccgtgacaagcgcccagaagaaccctaccgccttctacctgtgtgccagctctcctggcgctctgtacgagcagtatttcggccctggcaccagactgacagttacactcgagggacagcctaaggccaatcctaccgtgacactgttccctccaagcagcgaagaactccaggccaacaaggccacacttgtgtgcctgatctccgacttctaccctggggctgtgacagtggcttggaaggccgatggatctcctgtgaaagccggcgtggaaaccaccaagccatccaagcagagcaacaacaaatacgccgccagctcctacctgagcctgacacctgagcagtggaagtcccacagatcctacagctgccaagtgacccacgaaggcagcaccgtggaaaagacagtggcccctacagagtgcagcggatccacaacacctggcgagagaagtagcctgcctgccttctatcctggcaccagcggctcttgttctggctgtggatctctgagcctgcctctgctggctggactggttgctgctgatgctgtggcctctctgctgattgtgggagccgtgttcctgtgcgccagacctagaagaagccccgctcaagaggacggcaaggtgtacatcaacatgcccggcagaggaagcactagtagagtgaagttcagcagaagcgccgacgcccctgcctaccagcagggacagaaccaactgtacaacgagctgaacctgggcagacgggaagagtacgacgtgctggacaagcggagaggcagggaccctgagatgggcggaaagccccagcggagaaagaacccccaggaaggactgtataacgaactccagaaagacaagatggccgaagcctacagcgagatcggcatgaagggcgagcggagaagaggcaagggccacgatggcctgtaccagggcctgagcaccgccaccaaggacacctatgacgccctgcacatgcaggccctgcctccaagaagggccaagcgatctggatctggagcaacaaacttctcactactcaaacaagcaggtgacgtggaggagaatcccgggcctatggactggatttggcgcatccttttccttgtcggcgctgctaccggcgcgcattccttcgaagaaaatgtggaacagcaccccagcacactgagcgtgcaagagggcgatagcgccgtgattaagtgcacctacagcgacagcgccagcaactacttcccctggtacaagcaagagctgggcaaaagaccccagctcatcatcgacatccggtccaacgtgggcgagaagaaggaccagagaatcgccgtgacactgaacaagaccgccaagcacttcagcctgcacatcaccgagacacagcctgaggattccgccgtgtacttttgtgccgccaccgaggactaccagctgatttggggagccggcaccaagctgattatcaagcctgacacgcgtgcctctacaaagggaccctccgtgtttcctctggctcccagcagcaagtctacaagcggaggaacagccgctctgggctgcctggtcaaggattactttcccgagcctgtgaccgtgtcctggaatagcggagcactgacaagcggcgtgcacacctttccagccgtgctgcaaagcagcggcctgtactctctgagcagcgtggtcacagtgcctagctctagcctgggcacccagacctacatctgcaatgtgaaccacaagcctagcaacaccaaggtggacaagagagtggaacccaagagctgtggtaccacaacgccgggcgaaaggagttccttgccggccttttaccccggcacaagcggaagctgtagtgggtgtggaagcctcagcctcccacttcttgcgggcctcgtcgcggcagatgcagtagcttcacttcttattgtaggcgcggtatttctctgtgctcgaccaaggaggtcacccgctcaggaggatggtaaggtgtatataaatatgccaggacgcggaagctctagacgggttaagttttccagatccgcagacgcacccgcttaccaacaagggcagaaccaactctacaatgaacttaatttggggcggagggaagagtacgacgttctggacaaaaggaggggacgagatcccgagatgggcggaaagcctcagcgaaggaagaatccgcaagaggggctttataacgaactccagaaagataaaatggcagaagcctatagtgagattgggatgaagggagaaaggaggaggggtaaaggtcacgatgggttgtaccaaggattgagcacagccactaaagatacctatgatgcgctccacatgcaggccctgccgccaagacgcgccaagagaagcggatctggcgtgaagcagaccctgaatttcgacctgctgaagctggctggcgacgtggaatccaacccaggccctggccatatggctctgcctgtgacagctctgctgctgcctctggcactgctgcttcatgctgctagacctagccagtttagagtgtcccctctggacagaacctggaacctgggcgagacagtggaactgaagtgccaggtgctgctgagcaaccctacaagcggctgctcctggctgtttcagcctagaggtgcagccgcctctcctacctttctgctgtacctgagccagaacaagcccaaggccgccgaaggactggacacccagagattcagcggcaagagactgggcgacaccttcgtgctgaccctgagcgacttcagaagagagaacgagggctactacttctgtagcgccctgagcaacagcatcatgtacttcagccacttcgtgcccgtgtttctgcccgccaagcctacaacaacccctgctcctagacctcctacaccagctcctacaatcgccagccagcctctgtctctcagacccgaagcctgtagacctgctgctggcggagctgtgcataccagaggactggatttcgcctgcgacatctacatctgggctcctctggctggcacatgtggcgtgctgctgctgtccctggtcatcaccctgtactgcaaccaccggaacaggcggagagtgtgcaagtgccctagacctgtggtcaagagcggcgacaagcctagcctgagcgccagatatgtt

SEQ ID NO: 2479 - DNA, 3870 bp, synthetic construct
  source 1..3870: mol_type = other DNA
atggccttaccagtgaccgccttgctcctgccgctggccttgctgctccacgccgccaggccggaagtgcagctggttgaatctggcggaggactggttcaggctggcggatctctgagactgtcttgtgccgccagcggcagaacctttagcatgggctggtttagacaggcccctggcaaagagagagagttcgtcgccgccatcacatactctggcggcagcccttactacgccgactctgtgaagggcagattcaccatcagccgggacaacgccaagaacaccgtgtacctccagatgaacagcctgaagcctgaggacaccgccgtgtactactgcgccgccaatccaacatacggcagcgactggaacgccgagaattggggccagggaacccaagtgacagtgtctagcggtaccggcggaggcggatctggcggcggaggtagcggtggcggaggatctgaattcggcattacacagagccccaagtacctgttcagaaaagagggccagaacgtcaccctgagctgcgagcagaacctgaaccacgacgccatgtactggtacagacaggacccaggccagggcctgagactgatctactacagccagatcgtgaacgacttccagaagggcgacattgccgagggctacagcgtgtccagagagaagaaagagtcctttccactgaccgtgacaagcgcccagaagaaccctaccgccttctacctgtgtgccagctctcctggcgctctgtacgagcagtatttcggccctggcaccagactgacagttacactcgagggacagcctaaggccaatcctaccgtgacactgttccctccaagcagcgaagaactccaggccaacaaggccacacttgtgtgcctgatctccgacttctaccctggggctgtgacagtggcttggaaggccgatggatctcctgtgaaagccggcgtggaaaccaccaagccatccaagcagagcaacaacaaatacgccgccagctcctacctgagcctgacacctgagcagtggaagtcccacagatcctacagctgccaagtgacccacgaaggcagcaccgtggaaaagacagtggcccctacagagtgcagcggatccacaacacctggcgagagaagtagcctgcctgccttctatcctggcaccagcggctcttgttctggctgtggatctctgagcctgcctctgctggctggactggttgctgctgatgctgtggcctctctgctgattgtgggagccgtgttcctgtgcgccagacctagaagaagccccgctcaagaggacggcaaggtgtacatcaacatgcccggcagaggaagcactagtagagtgaagttcagcagaagcgccgacgcccctgcctaccagcagggacagaaccaactgtacaacgagctgaacctgggcagacgggaagagtacgacgtgctggacaagcggagaggcagggaccctgagatgggcggaaagccccagcggagaaagaacccccaggaaggactgtataacgaactccagaaagacaagatggccgaagcctacagcgagatcggcatgaagggcgagcggagaagaggcaagggccacgatggcctgtaccagggcctgagcaccgccaccaaggacacctatgacgccctgcacatgcaggccctgcctccaagaagggccaagcgatctggatctggagcaacaaacttctcactactcaaacaagcaggtgacgtggaggagaatcccgggcctatggactggatttggcgcatccttttccttgtcggcgctgctaccggcgcgcattccttcgaagaaaatgtggaacagcaccccagcacactgagcgtgcaagagggcgatagcgccgtgattaagtgcacctacagcgacagcgccagcaactacttcccctggtacaagcaagagctgggcaaaagaccccagctcatcatcgacatccggtccaacgtgggcgagaagaaggaccagagaatcgccgtgacactgaacaagaccgccaagcacttcagcctgcacatcaccgagacacagcctgaggattccgccgtgtacttttgtgccgccaccgaggactaccagctgatttggggagccggcaccaagctgattatcaagcctgacacgcgtgcctctacaaagggaccctccgtgtttcctctggctcccagcagcaagtctacaagcggaggaacagccgctctgggctgcctggtcaaggattactttcccgagcctgtgaccgtgtcctggaatagcggagcactgacaagcggcgtgcacacctttccagccgtgctgcaaagcagcggcctgtactctctgagcagcgtggtcacagtgcctagctctagcctgggcacccagacctacatctgcaatgtgaaccacaagcctagcaacaccaaggtggacaagagagtggaacccaagagctgtggtaccacaacgccgggcgaaaggagttccttgccggccttttaccccggcacaagcggaagctgtagtgggtgtggaagcctcagcctcccacttcttgcgggcctcgtcgcggcagatgcagtagcttcacttcttattgtaggcgcggtatttctctgtgctcgaccaaggaggtcacccgctcaggaggatggtaaggtgtatataaatatgccaggacgcggaagctctagacgggttaagttttccagatccgcagacgcacccgcttaccaacaagggcagaaccaactctacaatgaacttaatttggggcggagggaagagtacgacgttctggacaaaaggaggggacgagatcccgagatgggcggaaagcctcagcgaaggaagaatccgcaagaggggctttataacgaactccagaaagataaaatggcagaagcctatagtgagattgggatgaagggagaaaggaggaggggtaaaggtcacgatgggttgtaccaaggattgagcacagccactaaagatacctatgatgcgctccacatgcaggccctgccgccaagacgcgccaagagaagcggatctggcgtgaagcagaccctgaatttcgacctgctgaagctggctggcgacgtggaatccaacccaggccctggccatatggctctgcctgtgacagctctgctgctgcctctggcactgctgcttcatgctgctagacctagccagtttagagtgtcccctctggacagaacctggaacctgggcgagacagtggaactgaagtgccaggtgctgctgagcaaccctacaagcggctgctcctggctgtttcagcctagaggtgcagccgcctctcctacctttctgctgtacctgagccagaacaagcccaaggccgccgaaggactggacacccagagattcagcggcaagagactgggcgacaccttcgtgctgaccctgagcgacttcagaagagagaacgagggctactacttctgtagcgccctgagcaacagcatcatgtacttcagccacttcgtgcccgtgtttctgcccgccaagcctacaacaacccctgctcctagacctcctacaccagctcctacaatcgccagccagcctctgtctctcagacccgaagcctgtagacctgctgctggcggagctgtgcataccagaggactggatttcgcctgcgacatctacatctgggctcctctggctggcacatgtggcgtgctgctgctgtccctggtcatcaccctgtactgcaaccaccggaacaggcggagagtgtgcaagtgccctagacctgtggtcaagagcggcgacaagcctagcctgagcgccagatatgtt

SEQ ID NO: 2480 - DNA, 4281 bp, synthetic construct
  source 1..4281: mol_type = other DNA
atggccttaccagtgaccgccttgctcctgccgctggccttgctgctccacgccgccaggccggaagtgcagctggttgaatctggcggaggactggttcaggctggcggatctctgagactgtcttgtgccgccagcggcagaacctttagcatgggctggtttagacaggcccctggcaaagagagagagttcgtcgccgccatcacatactctggcggcagcccttactacgccgactctgtgaagggcagattcaccatcagccgggacaacgccaagaacaccgtgtacctccagatgaacagcctgaagcctgaggacaccgccgtgtactactgcgccgccaatccaacatacggcagcgactggaacgccgagaattggggccagggaacccaagtgacagtgtctagcggtaccggcggaggcggatctggcggcggaggtagcggtggcggaggatctgaattcggcattacacagagccccaagtacctgttcagaaaagagggccagaacgtcaccctgagctgcgagcagaacctgaaccacgacgccatgtactggtacagacaggacccaggccagggcctgagactgatctactacagccagatcgtgaacgacttccagaagggcgacattgccgagggctacagcgtgtccagagagaagaaagagtcctttccactgaccgtgacaagcgcccagaagaaccctaccgccttctacctgtgtgccagctctcctggcgctctgtacgagcagtatttcggccctggcaccagactgacagttacactcgagggacagcctaaggccaatcctaccgtgacactgttccctccaagcagcgaagaactccaggccaacaaggccacacttgtgtgcctgatctccgacttctaccctggggctgtgacagtggcttggaaggccgatggatctcctgtgaaagccggcgtggaaaccaccaagccatccaagcagagcaacaacaaatacgccgccagctcctacctgagcctgacacctgagcagtggaagtcccacagatcctacagctgccaagtgacccacgaaggcagcaccgtggaaaagacagtggcccctacagagtgcagcggatccacaacacctggcgagagaagtagcctgcctgccttctatcctggcaccagcggctcttgttctggctgtggatctctgagcctgcctctgctggctggactggttgctgctgatgctgtggcctctctgctgattgtgggagccgtgttcctgtgcgccagacctagaagaagccccgctcaagaggacggcaaggtgtacatcaacatgcccggcagaggaagcactagtagagtgaagttcagcagaagcgccgacgcccctgcctaccagcagggacagaaccaactgtacaacgagctgaacctgggcagacgggaagagtacgacgtgctggacaagcggagaggcagggaccctgagatgggcggaaagccccagcggagaaagaacccccaggaaggactgtataacgaactccagaaagacaagatggccgaagcctacagcgagatcggcatgaagggcgagcggagaagaggcaagggccacgatggcctgtaccagggcctgagcaccgccaccaaggacacctatgacgccctgcacatgcaggccctgcctccaagaagggccaagcgatctggatctggagcaacaaacttctcactactcaaacaagcaggtgacgtggaggagaatcccgggcctatggactggatttggcgcatccttttccttgtcggcgctgctaccggcgcgcattccgggcccgaagtgcaactggttgaatccggtggcggcctggtgcaagcaggcggatctctcagacttagctgtgccgcctccggcagaaccttcacaatgggatggtttaggcaggctccagggaaagagagagagttcgtcgccgccatctctctgtctcccacactggcctactacgccgactctgtgaaaggccggttcaccatctccagagataatgccaagaacaccgtggtgctgcaaatgaactctctgaaacccgaggatacagccctgtactattgtgccgctgaccggaagtccgtgatgagcatcagacccgattactggggacagggcacacaagtcacagtgtcctctggatccggcggcggaggatctggcggaggcggatctgggggcggaggctctttcgaagaaaatgtggaacagcaccccagcacactgagcgtgcaagagggcgatagcgccgtgattaagtgcacctacagcgacagcgccagcaactacttcccctggtacaagcaagagctgggcaaaagaccccagctcatcatcgacatccggtccaacgtgggcgagaagaaggaccagagaatcgccgtgacactgaacaagaccgccaagcacttcagcctgcacatcaccgagacacagcctgaggattccgccgtgtacttttgtgccgccaccgaggactaccagctgatttggggagccggcaccaagctgattatcaagcctgacacgcgtgcctctacaaagggaccctccgtgtttcctctggctcccagcagcaagtctacaagcggaggaacagccgctctgggctgcctggtcaaggattactttcccgagcctgtgaccgtgtcctggaatagcggagcactgacaagcggcgtgcacacctttccagccgtgctgcaaagcagcggcctgtactctctgagcagcgtggtcacagtgcctagctctagcctgggcacccagacctacatctgcaatgtgaaccacaagcctagcaacaccaaggtggacaagagagtggaacccaagagctgtggtaccacaacgccgggcgaaaggagttccttgccggccttttaccccggcacaagcggaagctgtagtgggtgtggaagcctcagcctcccacttcttgcgggcctcgtcgcggcagatgcagtagcttcacttcttattgtaggcgcggtatttctctgtgctcgaccaaggaggtcacccgctcaggaggatggtaaggtgtatataaatatgccaggacgcggaagctctagacgggttaagttttccagatccgcagacgcacccgcttaccaacaagggcagaaccaactctacaatgaacttaatttggggcggagggaagagtacgacgttctggacaaaaggaggggacgagatcccgagatgggcggaaagcctcagcgaaggaagaatccgcaagaggggctttataacgaactccagaaagataaaatggcagaagcctatagtgagattgggatgaagggagaaaggaggaggggtaaaggtcacgatgggttgtaccaaggattgagcacagccactaaagatacctatgatgcgctccacatgcaggccctgccgccaagacgcgccaagagaagcggatctggcgtgaagcagaccctgaatttcgacctgctgaagctggctggcgacgtggaatccaacccaggccctggccatatggctctgcctgtgacagctctgctgctgcctctggcactgctgcttcatgctgctagacctagccagtttagagtgtcccctctggacagaacctggaacctgggcgagacagtggaactgaagtgccaggtgctgctgagcaaccctacaagcggctgctcctggctgtttcagcctagaggtgcagccgcctctcctacctttctgctgtacctgagccagaacaagcccaaggccgccgaaggactggacacccagagattcagcggcaagagactgggcgacaccttcgtgctgaccctgagcgacttcagaagagagaacgagggctactacttctgtagcgccctgagcaacagcatcatgtacttcagccacttcgtgcccgtgtttctgcccgccaagcctacaacaacccctgctcctagacctcctacaccagctcctacaatcgccagccagcctctgtctctcagacccgaagcctgtagacctgctgctggcggagctgtgcataccagaggactggatttcgcctgcgacatctacatctgggctcctctggctggcacatgtggcgtgctgctgctgtccctggtcatcaccctgtactgcaaccaccggaacaggcggagagtgtgcaagtgccctagacctgtggtcaagagcggcgacaagcctagcctgagcgccagatatgtt

SEQ ID NO: 2481 - DNA, 2436 bp, synthetic construct
  source 1..2436: mol_type = other DNA
atggccttaccagtgaccgccttgctcctgccgctggccttgctgctccacgccgccaggccggaattcggcattacacagagccccaagtacctgttcagaaaagagggccagaacgtcaccctgagctgcgagcagaacctgaaccacgacgccatgtactggtacagacaggacccaggccagggcctgagactgatctactacagccagatcgtgaacgacttccagaagggcgacattgccgagggctacagcgtgtccagagagaagaaagagtcctttccactgaccgtgacaagcgcccagaagaaccctaccgccttctacctgtgtgccagctctcctggcgctctgtacgagcagtatttcggccctggcaccagactgacagttacactcgaggacctgaagaacgtgttcccacctgaggtggccgtgttcgagcctagcgaggccgagatcagccacacccagaaagccaccctcgtgtgcctggctaccggcttctaccccgaccatgtggaactgtcttggtgggtcaacggcaaagaggtgcacagcggcgtgtctaccgacccccagccactgaaagaacagcccgccctgaacgacagccggtactgcctgagcagcagactgagagtgtccgccaccttctggcagaacccccggaaccacttcagatgccaggtgcagttctacggcctgagcgagaacgacgagtggacccaggacagagccaagcccgtgacccagatcgtgtctgccgaagcctggggcagagccgattgcggatcccagagcttcggcctgctggaccccaagctgtgctacctgctggatggcatcctgttcatctacggcgtgatcctgaccgccctgttcctgagagtgaagttcagcagaagcgccgacgcccctgcctaccagcagggacagaaccaactgtacaacgagctgaacctgggcagacgggaagagtacgacgtgctggacaagcggagaggcagggaccctgagatgggcggaaagccccagcggagaaagaacccccaggaaggactgtataacgaactccagaaagacaagatggccgaagcctacagcgagatcggcatgaagggcgagcggagaagaggcaagggccacgatggcctgtaccagggcctgagcaccgccaccaaggacacctatgacgccctgcacatgcaggccctgcctccaagaagggccaagcgatctggatctggagcaacaaacttctcactactcaaacaagcaggtgacgtggaggagaatcccgggcctactagtatggactggatttggcgcatccttttccttgtcggcgctgctaccggcgcgcattccttcgaagaaaatgtggaacagcaccccagcacactgagcgtgcaagagggcgatagcgccgtgattaagtgcacctacagcgacagcgccagcaactacttcccctggtacaagcaagagctgggcaaaagaccccagctcatcatcgacatccggtccaacgtgggcgagaagaaggaccagagaatcgccgtgacactgaacaagaccgccaagcacttcagcctgcacatcaccgagacacagcctgaggattccgccgtgtacttttgtgccgccaccgaggactaccagctgatttggggagccggcaccaagctgattatcaagcctgacacgcgtatccagaaccctgatcctgccgtgtaccagctgcgggatagcaagagcagcgacaagagcgtgtgtctgttcaccgacttcgacagccagaccaacgtgtcccagagcaaggactccgacgtgtacatcaccgataagaccgtgctggacatgcggagcatggacttcaagagcaactccgccgtggcctggtccaacaagtccgatttcgcctgcgccaacgccttcaacaacagcattatccccgaggacacattcttcccaagccccgagagcagctgcggtacccagagttttgggttgttggaccctaaattgtgctatctgttggacggaatcctgttcatttacggagtgatcctgaccgcattgttcctgcgggttaagttttccagatccgcagacgcacccgcttaccaacaagggcagaaccaactctacaatgaacttaatttggggcggagggaagagtacgacgttctggacaaaaggaggggacgagatcccgagatgggcggaaagcctcagcgaaggaagaatccgcaagaggggctttataacgaactccagaaagataaaatggcagaagcctatagtgagattgggatgaagggagaaaggaggaggggtaaaggtcacgatgggttgtaccaaggattgagcacagccactaaagatacctatgatgcgctccacatgcaggccctgccgccaagataa

SEQ ID NO: 2482 - DNA, 2562 bp, synthetic construct
  source 1..2562: mol_type = other DNA
atggccttaccagtgaccgccttgctcctgccgctggccttgctgctccacgccgccaggccggaattcggcattacacagagccccaagtacctgttcagaaaagagggccagaacgtcaccctgagctgcgagcagaacctgaaccacgacgccatgtactggtacagacaggacccaggccagggcctgagactgatctactacagccagatcgtgaacgacttccagaagggcgacattgccgagggctacagcgtgtccagagagaagaaagagtcctttccactgaccgtgacaagcgcccagaagaaccctaccgccttctacctgtgtgccagctctcctggcgctctgtacgagcagtatttcggccctggcaccagactgacagttacactcgaggacctgaagaacgtgttcccacctgaggtggccgtgttcgagcctagcgaggccgagatcagccacacccagaaagccaccctcgtgtgcctggctaccggcttctaccccgaccatgtggaactgtcttggtgggtcaacggcaaagaggtgcacagcggcgtgtctaccgacccccagccactgaaagaacagcccgccctgaacgacagccggtactgcctgagcagcagactgagagtgtccgccaccttctggcagaacccccggaaccacttcagatgccaggtgcagttctacggcctgagcgagaacgacgagtggacccaggacagagccaagcccgtgacccagatcgtgtctgccgaagcctggggcagagccgattgcggatcccagagcttcggcctgctggaccccaagctgtgctacctgctggatggcatcctgttcatctacggcgtgatcctgaccgccctgttcctgagagtgaagttcagcagaagcgccgacgcccctgcctaccagcagggacagaaccaactgtacaacgagctgaacctgggcagacgggaagagtacgacgtgctggacaagcggagaggcagggaccctgagatgggcggaaagccccagcggagaaagaacccccaggaaggactgtataacgaactccagaaagacaagatggccgaagcctacagcgagatcggcatgaagggcgagcggagaagaggcaagggccacgatggcctgtaccagggcctgagcaccgccaccaaggacacctatgacgccctgcacatgcaggccctgcctccaagaagggccaagcgatctggatctggagcaacaaacttctcactactcaaacaagcaggtgacgtggaggagaatcccgggcctactagtatggactggatttggcgcatccttttccttgtcggcgctgctaccggcgcgcattccttcgaagaaaatgtggaacagcaccccagcacactgagcgtgcaagagggcgatagcgccgtgattaagtgcacctacagcgacagcgccagcaactacttcccctggtacaagcaagagctgggcaaaagaccccagctcatcatcgacatccggtccaacgtgggcgagaagaaggaccagagaatcgccgtgacactgaacaagaccgccaagcacttcagcctgcacatcaccgagacacagcctgaggattccgccgtgtacttttgtgccgccaccgaggactaccagctgatttggggagccggcaccaagctgattatcaagcctgacacgcgtatccagaaccctgatcctgccgtgtaccagctgcgggatagcaagagcagcgacaagagcgtgtgtctgttcaccgacttcgacagccagaccaacgtgtcccagagcaaggactccgacgtgtacatcaccgataagaccgtgctggacatgcggagcatggacttcaagagcaactccgccgtggcctggtccaacaagtccgatttcgcctgcgccaacgccttcaacaacagcattatccccgaggacacattcttcccaagccccgagagcagctgcggtacccagagcttcggcctgctggaccccaagctgtgctacctgctggatggcatcctgttcatctacggcgtgatcctgaccgccctgttcctgaaacggggcagaaagaaactcctgtatatattcaaacaaccatttatgagaccagtacaaactactcaagaggaagatggctgtagctgccgatttccagaagaagaagaaggaggatgtgaactgagagtgaagttcagcagaagcgccgacgcccctgcctaccagcagggacagaaccaactgtacaacgagctgaacctgggcagacgggaagagtacgacgtgctggacaagcggagaggcagggaccctgagatgggcggaaagccccagcggagaaagaacccccaggaaggactgtataacgaactccagaaagacaagatggccgaagcctacagcgagatcggcatgaagggcgagcggagaagaggcaagggccacgatggcctgtaccagggcctgagcaccgccaccaaggacacctatgacgccctgcacatgcaggccctgcctccaagataa

SEQ ID NO: 2483 - DNA, 2559 bp, synthetic construct
  source 1..2559: mol_type = other DNA
atggccttaccagtgaccgccttgctcctgccgctggccttgctgctccacgccgccaggccggaattcggcattacacagagccccaagtacctgttcagaaaagagggccagaacgtcaccctgagctgcgagcagaacctgaaccacgacgccatgtactggtacagacaggacccaggccagggcctgagactgatctactacagccagatcgtgaacgacttccagaagggcgacattgccgagggctacagcgtgtccagagagaagaaagagtcctttccactgaccgtgacaagcgcccagaagaaccctaccgccttctacctgtgtgccagctctcctggcgctctgtacgagcagtatttcggccctggcaccagactgacagttacactcgaggacctgaagaacgtgttcccacctgaggtggccgtgttcgagcctagcgaggccgagatcagccacacccagaaagccaccctcgtgtgcctggctaccggcttctaccccgaccatgtggaactgtcttggtgggtcaacggcaaagaggtgcacagcggcgtgtctaccgacccccagccactgaaagaacagcccgccctgaacgacagccggtactgcctgagcagcagactgagagtgtccgccaccttctggcagaacccccggaaccacttcagatgccaggtgcagttctacggcctgagcgagaacgacgagtggacccaggacagagccaagcccgtgacccagatcgtgtctgccgaagcctggggcagagccgattgcggatcccagagcttcggcctgctggaccccaagctgtgctacctgctggatggcatcctgttcatctacggcgtgatcctgaccgccctgttcctgagagtgaagttcagcagaagcgccgacgcccctgcctaccagcagggacagaaccaactgtacaacgagctgaacctgggcagacgggaagagtacgacgtgctggacaagcggagaggcagggaccctgagatgggcggaaagccccagcggagaaagaacccccaggaaggactgtataacgaactccagaaagacaagatggccgaagcctacagcgagatcggcatgaagggcgagcggagaagaggcaagggccacgatggcctgtaccagggcctgagcaccgccaccaaggacacctatgacgccctgcacatgcaggccctgcctccaagaagggccaagcgatctggatctggagcaacaaacttctcactactcaaacaagcaggtgacgtggaggagaatcccgggcctactagtatggactggatttggcgcatccttttccttgtcggcgctgctaccggcgcgcattccttcgaagaaaatgtggaacagcaccccagcacactgagcgtgcaagagggcgatagcgccgtgattaagtgcacctacagcgacagcgccagcaactacttcccctggtacaagcaagagctgggcaaaagaccccagctcatcatcgacatccggtccaacgtgggcgagaagaaggaccagagaatcgccgtgacactgaacaagaccgccaagcacttcagcctgcacatcaccgagacacagcctgaggattccgccgtgtacttttgtgccgccaccgaggactaccagctgatttggggagccggcaccaagctgattatcaagcctgacacgcgtatccagaaccctgatcctgccgtgtaccagctgcgggatagcaagagcagcgacaagagcgtgtgtctgttcaccgacttcgacagccagaccaacgtgtcccagagcaaggactccgacgtgtacatcaccgataagaccgtgctggacatgcggagcatggacttcaagagcaactccgccgtggcctggtccaacaagtccgatttcgcctgcgccaacgccttcaacaacagcattatccccgaggacacattcttcccaagccccgagagcagctgcggtacccagagcttcggcctgctggaccccaagctgtgctacctgctggatggcatcctgttcatctacggcgtgatcctgaccgccctgttcctgaggagtaagaggagcaggctcctgcacagtgactacatgaacatgactccacgccgccccggacccacccgcaagcattaccagccctatgccccaccacgcgacttcgcagcctatcgctccagagtgaagttcagcagaagcgccgacgcccctgcctaccagcagggacagaaccaactgtacaacgagctgaacctgggcagacgggaagagtacgacgtgctggacaagcggagaggcagggaccctgagatgggcggaaagccccagcggagaaagaacccccaggaaggactgtataacgaactccagaaagacaagatggccgaagcctacagcgagatcggcatgaagggcgagcggagaagaggcaagggccacgatggcctgtaccagggcctgagcaccgccaccaaggacacctatgacgccctgcacatgcaggccctgcctccaagataa

SEQ ID NO: 2484 - DNA, 2544 bp, synthetic construct
  source 1..2544: mol_type = other DNA
atggccttaccagtgaccgccttgctcctgccgctggccttgctgctccacgccgccaggccggaattcggcattacacagagccccaagtacctgttcagaaaagagggccagaacgtcaccctgagctgcgagcagaacctgaaccacgacgccatgtactggtacagacaggacccaggccagggcctgagactgatctactacagccagatcgtgaacgacttccagaagggcgacattgccgagggctacagcgtgtccagagagaagaaagagtcctttccactgaccgtgacaagcgcccagaagaaccctaccgccttctacctgtgtgccagctctcctggcgctctgtacgagcagtatttcggccctggcaccagactgacagttacactcgaggacctgaagaacgtgttcccacctgaggtggccgtgttcgagcctagcgaggccgagatcagccacacccagaaagccaccctcgtgtgcctggctaccggcttctaccccgaccatgtggaactgtcttggtgggtcaacggcaaagaggtgcacagcggcgtgtctaccgacccccagccactgaaagaacagcccgccctgaacgacagccggtactgcctgagcagcagactgagagtgtccgccaccttctggcagaacccccggaaccacttcagatgccaggtgcagttctacggcctgagcgagaacgacgagtggacccaggacagagccaagcccgtgacccagatcgtgtctgccgaagcctggggcagagccgattgcggatcccagagcttcggcctgctggaccccaagctgtgctacctgctggatggcatcctgttcatctacggcgtgatcctgaccgccctgttcctgagagtgaagttcagcagaagcgccgacgcccctgcctaccagcagggacagaaccaactgtacaacgagctgaacctgggcagacgggaagagtacgacgtgctggacaagcggagaggcagggaccctgagatgggcggaaagccccagcggagaaagaacccccaggaaggactgtataacgaactccagaaagacaagatggccgaagcctacagcgagatcggcatgaagggcgagcggagaagaggcaagggccacgatggcctgtaccagggcctgagcaccgccaccaaggacacctatgacgccctgcacatgcaggccctgcctccaagaagggccaagcgatctggatctggagcaacaaacttctcactactcaaacaagcaggtgacgtggaggagaatcccgggcctactagtatggactggatttggcgcatccttttccttgtcggcgctgctaccggcgcgcattccttcgaagaaaatgtggaacagcaccccagcacactgagcgtgcaagagggcgatagcgccgtgattaagtgcacctacagcgacagcgccagcaactacttcccctggtacaagcaagagctgggcaaaagaccccagctcatcatcgacatccggtccaacgtgggcgagaagaaggaccagagaatcgccgtgacactgaacaagaccgccaagcacttcagcctgcacatcaccgagacacagcctgaggattccgccgtgtacttttgtgccgccaccgaggactaccagctgatttggggagccggcaccaagctgattatcaagcctgacacgcgtatccagaaccctgatcctgccgtgtaccagctgcgggatagcaagagcagcgacaagagcgtgtgtctgttcaccgacttcgacagccagaccaacgtgtcccagagcaaggactccgacgtgtacatcaccgataagaccgtgctggacatgcggagcatggacttcaagagcaactccgccgtggcctggtccaacaagtccgatttcgcctgcgccaacgccttcaacaacagcattatccccgaggacacattcttcccaagccccgagagcagctgcggtacccagagcttcggcctgctggaccccaagctgtgctacctgctggatggcatcctgttcatctacggcgtgatcctgaccgccctgttcctgagggaccaaagactgcctcctgacgctcacaaacctccaggcggaggcagcttcagaacccctatccaagaggaacaggctgacgcccacagcaccctggcaaaaattagagtgaagttcagcagaagcgccgacgcccctgcctaccagcagggacagaaccaactgtacaacgagctgaacctgggcagacgggaagagtacgacgtgctggacaagcggagaggcagggaccctgagatgggcggaaagccccagcggagaaagaacccccaggaaggactgtataacgaactccagaaagacaagatggccgaagcctacagcgagatcggcatgaagggcgagcggagaagaggcaagggccacgatggcctgtaccagggcctgagcaccgccaccaaggacacctatgacgccctgcacatgcaggccctgcctccaagataa

SEQ ID NO: 2485 - DNA, 2796 bp, synthetic construct
  source 1..2796: mol_type = other DNA
atggccttaccagtgaccgccttgctcctgccgctggccttgctgctccacgccgccaggccggaattcggcattacacagagccccaagtacctgttcagaaaagagggccagaacgtcaccctgagctgcgagcagaacctgaaccacgacgccatgtactggtacagacaggacccaggccagggcctgagactgatctactacagccagatcgtgaacgacttccagaagggcgacattgccgagggctacagcgtgtccagagagaagaaagagtcctttccactgaccgtgacaagcgcccagaagaaccctaccgccttctacctgtgtgccagctctcctggcgctctgtacgagcagtatttcggccctggcaccagactgacagttacactcgaggacctgaagaacgtgttcccacctgaggtggccgtgttcgagcctagcgaggccgagatcagccacacccagaaagccaccctcgtgtgcctggctaccggcttctaccccgaccatgtggaactgtcttggtgggtcaacggcaaagaggtgcacagcggcgtgtctaccgacccccagccactgaaagaacagcccgccctgaacgacagccggtactgcctgagcagcagactgagagtgtccgccaccttctggcagaacccccggaaccacttcagatgccaggtgcagttctacggcctgagcgagaacgacgagtggacccaggacagagccaagcccgtgacccagatcgtgtctgccgaagcctggggcagagccgattgcggatcccagagcttcggcctgctggaccccaagctgtgctacctgctggatggcatcctgttcatctacggcgtgatcctgaccgccctgttcctgagagtgaagttcagcagaagcgccgacgcccctgcctaccagcagggacagaaccaactgtacaacgagctgaacctgggcagacgggaagagtacgacgtgctggacaagcggagaggcagggaccctgagatgggcggaaagccccagcggagaaagaacccccaggaaggactgtataacgaactccagaaagacaagatggccgaagcctacagcgagatcggcatgaagggcgagcggagaagaggcaagggccacgatggcctgtaccagggcctgagcaccgccaccaaggacacctatgacgccctgcacatgcaggccctgcctccaagaagggccaagcgatctggatctggagcaacaaacttctcactactcaaacaagcaggtgacgtggaggagaatcccgggcctactagtatggactggatttggcgcatccttttccttgtcggcgctgctaccggcgcgcattccttcgaagaaaatgtggaacagcaccccagcacactgagcgtgcaagagggcgatagcgccgtgattaagtgcacctacagcgacagcgccagcaactacttcccctggtacaagcaagagctgggcaaaagaccccagctcatcatcgacatccggtccaacgtgggcgagaagaaggaccagagaatcgccgtgacactgaacaagaccgccaagcacttcagcctgcacatcaccgagacacagcctgaggattccgccgtgtacttttgtgccgccaccgaggactaccagctgatttggggagccggcaccaagctgattatcaagcctgacacgcgtatccagaaccctgatcctgccgtgtaccagctgcgggatagcaagagcagcgacaagagcgtgtgtctgttcaccgacttcgacagccagaccaacgtgtcccagagcaaggactccgacgtgtacatcaccgataagaccgtgctggacatgcggagcatggacttcaagagcaactccgccgtggcctggtccaacaagtccgatttcgcctgcgccaacgccttcaacaacagcattatccccgaggacacattcttcccaagccccgagagcagctgcggtacccagagcttcggcctgctggaccccaagctgtgctacctgctggatggcatcctgttcatctacggcgtgatcctgaccgccctgttcctgtggcggcggaagcggaaagagaagcagtctgagacaagccccaaagagttcctgaccatctacgaggacgtgaaggacctgaaaacccggcggaaccacgaacaagagcagacctttcctggcggaggcagcaccatctacagcatgatccagagccagagcagcgcccctacaagccaagagcctgcctacacactgtactccctgatccagcctagcagaaagagcggcagccggaagagaaatcacagccccagcttcaacagcacgatctacgaagtgatcggcaagagccagccaaaggctcagaaccctgccagactgagccggaaagagctggaaaacttcgacgtgtacagcagagtgaagttcagcagaagcgccgacgcccctgcctaccagcagggacagaaccaactgtacaacgagctgaacctgggcagacgggaagagtacgacgtgctggacaagcggagaggcagggaccctgagatgggcggaaagccccagcggagaaagaacccccaggaaggactgtataacgaactccagaaagacaagatggccgaagcctacagcgagatcggcatgaagggcgagcggagaagaggcaagggccacgatggcctgtaccagggcctgagcaccgccaccaaggacacctatgacgccctgcacatgcaggccctgcctccaagataa

SEQ ID NO: 2486 - DNA, 2685 bp, synthetic construct
  source 1..2685: mol_type = other DNA
atggccttaccagtgaccgccttgctcctgccgctggccttgctgctccacgccgccaggccggaattcggcattacacagagccccaagtacctgttcagaaaagagggccagaacgtcaccctgagctgcgagcagaacctgaaccacgacgccatgtactggtacagacaggacccaggccagggcctgagactgatctactacagccagatcgtgaacgacttccagaagggcgacattgccgagggctacagcgtgtccagagagaagaaagagtcctttccactgaccgtgacaagcgcccagaagaaccctaccgccttctacctgtgtgccagctctcctggcgctctgtacgagcagtatttcggccctggcaccagactgacagttacactcgaggacctgaagaacgtgttcccacctgaggtggccgtgttcgagcctagcgaggccgagatcagccacacccagaaagccaccctcgtgtgcctggctaccggcttctaccccgaccatgtggaactgtcttggtgggtcaacggcaaagaggtgcacagcggcgtgtctaccgacccccagccactgaaagaacagcccgccctgaacgacagccggtactgcctgagcagcagactgagagtgtccgccaccttctggcagaacccccggaaccacttcagatgccaggtgcagttctacggcctgagcgagaacgacgagtggacccaggacagagccaagcccgtgacccagatcgtgtctgccgaagcctggggcagagccgattgcggatcccagagcttcggcctgctggaccccaagctgtgctacctgctggatggcatcctgttcatctacggcgtgatcctgaccgccctgttcctgaggagtaagaggagcaggctcctgcacagtgactacatgaacatgactccacgccgccccggacccacccgcaagcattaccagccctatgccccaccacgcgacttcgcagcctatcgctccagagtgaagttcagcagaagcgccgacgcccctgcctaccagcagggacagaaccaactgtacaacgagctgaacctgggcagacgggaagagtacgacgtgctggacaagcggagaggcagggaccctgagatgggcggaaagccccagcggagaaagaacccccaggaaggactgtataacgaactccagaaagacaagatggccgaagcctacagcgagatcggcatgaagggcgagcggagaagaggcaagggccacgatggcctgtaccagggcctgagcaccgccaccaaggacacctatgacgccctgcacatgcaggccctgcctccaagaagggccaagcgatctggatctggagcaacaaacttctcactactcaaacaagcaggtgacgtggaggagaatcccgggcctactagtatggactggatttggcgcatccttttccttgtcggcgctgctaccggcgcgcattccttcgaagaaaatgtggaacagcaccccagcacactgagcgtgcaagagggcgatagcgccgtgattaagtgcacctacagcgacagcgccagcaactacttcccctggtacaagcaagagctgggcaaaagaccccagctcatcatcgacatccggtccaacgtgggcgagaagaaggaccagagaatcgccgtgacactgaacaagaccgccaagcacttcagcctgcacatcaccgagacacagcctgaggattccgccgtgtacttttgtgccgccaccgaggactaccagctgatttggggagccggcaccaagctgattatcaagcctgacacgcgtatccagaaccctgatcctgccgtgtaccagctgcgggatagcaagagcagcgacaagagcgtgtgtctgttcaccgacttcgacagccagaccaacgtgtcccagagcaaggactccgacgtgtacatcaccgataagaccgtgctggacatgcggagcatggacttcaagagcaactccgccgtggcctggtccaacaagtccgatttcgcctgcgccaacgccttcaacaacagcattatccccgaggacacattcttcccaagccccgagagcagctgcggtacccagagcttcggcctgctggaccccaagctgtgctacctgctggatggcatcctgttcatctacggcgtgatcctgaccgccctgttcctgaaacggggcagaaagaaactcctgtatatattcaaacaaccatttatgagaccagtacaaactactcaagaggaagatggctgtagctgccgatttccagaagaagaagaaggaggatgtgaactgagagtgaagttcagcagaagcgccgacgcccctgcctaccagcagggacagaaccaactgtacaacgagctgaacctgggcagacgggaagagtacgacgtgctggacaagcggagaggcagggaccctgagatgggcggaaagccccagcggagaaagaacccccaggaaggactgtataacgaactccagaaagacaagatggccgaagcctacagcgagatcggcatgaagggcgagcggagaagaggcaagggccacgatggcctgtaccagggcctgagcaccgccaccaaggacacctatgacgccctgcacatgcaggccctgcctccaagataa

SEQ ID NO: 2487 - DNA, 2682 bp, synthetic construct
  source 1..2682: mol_type = other DNA
atggccttaccagtgaccgccttgctcctgccgctggccttgctgctccacgccgccaggccggaattcggcattacacagagccccaagtacctgttcagaaaagagggccagaacgtcaccctgagctgcgagcagaacctgaaccacgacgccatgtactggtacagacaggacccaggccagggcctgagactgatctactacagccagatcgtgaacgacttccagaagggcgacattgccgagggctacagcgtgtccagagagaagaaagagtcctttccactgaccgtgacaagcgcccagaagaaccctaccgccttctacctgtgtgccagctctcctggcgctctgtacgagcagtatttcggccctggcaccagactgacagttacactcgaggacctgaagaacgtgttcccacctgaggtggccgtgttcgagcctagcgaggccgagatcagccacacccagaaagccaccctcgtgtgcctggctaccggcttctaccccgaccatgtggaactgtcttggtgggtcaacggcaaagaggtgcacagcggcgtgtctaccgacccccagccactgaaagaacagcccgccctgaacgacagccggtactgcctgagcagcagactgagagtgtccgccaccttctggcagaacccccggaaccacttcagatgccaggtgcagttctacggcctgagcgagaacgacgagtggacccaggacagagccaagcccgtgacccagatcgtgtctgccgaagcctggggcagagccgattgcggatcccagagcttcggcctgctggaccccaagctgtgctacctgctggatggcatcctgttcatctacggcgtgatcctgaccgccctgttcctgaggagtaagaggagcaggctcctgcacagtgactacatgaacatgactccacgccgccccggacccacccgcaagcattaccagccctatgccccaccacgcgacttcgcagcctatcgctccagagtgaagttcagcagaagcgccgacgcccctgcctaccagcagggacagaaccaactgtacaacgagctgaacctgggcagacgggaagagtacgacgtgctggacaagcggagaggcagggaccctgagatgggcggaaagccccagcggagaaagaacccccaggaaggactgtataacgaactccagaaagacaagatggccgaagcctacagcgagatcggcatgaagggcgagcggagaagaggcaagggccacgatggcctgtaccagggcctgagcaccgccaccaaggacacctatgacgccctgcacatgcaggccctgcctccaagaagggccaagcgatctggatctggagcaacaaacttctcactactcaaacaagcaggtgacgtggaggagaatcccgggcctactagtatggactggatttggcgcatccttttccttgtcggcgctgctaccggcgcgcattccttcgaagaaaatgtggaacagcaccccagcacactgagcgtgcaagagggcgatagcgccgtgattaagtgcacctacagcgacagcgccagcaactacttcccctggtacaagcaagagctgggcaaaagaccccagctcatcatcgacatccggtccaacgtgggcgagaagaaggaccagagaatcgccgtgacactgaacaagaccgccaagcacttcagcctgcacatcaccgagacacagcctgaggattccgccgtgtacttttgtgccgccaccgaggactaccagctgatttggggagccggcaccaagctgattatcaagcctgacacgcgtatccagaaccctgatcctgccgtgtaccagctgcgggatagcaagagcagcgacaagagcgtgtgtctgttcaccgacttcgacagccagaccaacgtgtcccagagcaaggactccgacgtgtacatcaccgataagaccgtgctggacatgcggagcatggacttcaagagcaactccgccgtggcctggtccaacaagtccgatttcgcctgcgccaacgccttcaacaacagcattatccccgaggacacattcttcccaagccccgagagcagctgcggtacccagagttttgggttgttggaccctaaattgtgctatctgttggacggaatcctgttcatttacggagtgatcctgaccgcattgttcctgaggagcaagcggtcacggctgctccacagcgattacatgaatatgacaccacgaagaccgggtcctactcgcaaacactaccaaccctacgcacctccccgcgactttgcagcgtaccgatctcgggttaagttttccagatccgcagacgcacccgcttaccaacaagggcagaaccaactctacaatgaacttaatttggggcggagggaagagtacgacgttctggacaaaaggaggggacgagatcccgagatgggcggaaagcctcagcgaaggaagaatccgcaagaggggctttataacgaactccagaaagataaaatggcagaagcctatagtgagattgggatgaagggagaaaggaggaggggtaaaggtcacgatgggttgtaccaaggattgagcacagccactaaagatacctatgatgcgctccacatgcaggccctgccgccaagataa

SEQ ID NO: 2488 - DNA, 2685 bp, synthetic construct
  source 1..2685: mol_type = other DNA
atggccttaccagtgaccgccttgctcctgccgctggccttgctgctccacgccgccaggccggaattcggcattacacagagccccaagtacctgttcagaaaagagggccagaacgtcaccctgagctgcgagcagaacctgaaccacgacgccatgtactggtacagacaggacccaggccagggcctgagactgatctactacagccagatcgtgaacgacttccagaagggcgacattgccgagggctacagcgtgtccagagagaagaaagagtcctttccactgaccgtgacaagcgcccagaagaaccctaccgccttctacctgtgtgccagctctcctggcgctctgtacgagcagtatttcggccctggcaccagactgacagttacactcgaggacctgaagaacgtgttcccacctgaggtggccgtgttcgagcctagcgaggccgagatcagccacacccagaaagccaccctcgtgtgcctggctaccggcttctaccccgaccatgtggaactgtcttggtgggtcaacggcaaagaggtgcacagcggcgtgtctaccgacccccagccactgaaagaacagcccgccctgaacgacagccggtactgcctgagcagcagactgagagtgtccgccaccttctggcagaacccccggaaccacttcagatgccaggtgcagttctacggcctgagcgagaacgacgagtggacccaggacagagccaagcccgtgacccagatcgtgtctgccgaagcctggggcagagccgattgcggatcccagagcttcggcctgctggaccccaagctgtgctacctgctggatggcatcctgttcatctacggcgtgatcctgaccgccctgttcctgaggagtaagaggagcaggctcctgcacagtgactacatgaacatgactccacgccgccccggacccacccgcaagcattaccagccctatgccccaccacgcgacttcgcagcctatcgctccagagtgaagttcagcagaagcgccgacgcccctgcctaccagcagggacagaaccaactgtacaacgagctgaacctgggcagacgggaagagtacgacgtgctggacaagcggagaggcagggaccctgagatgggcggaaagccccagcggagaaagaacccccaggaaggactgtataacgaactccagaaagacaagatggccgaagcctacagcgagatcggcatgaagggcgagcggagaagaggcaagggccacgatggcctgtaccagggcctgagcaccgccaccaaggacacctatgacgccctgcacatgcaggccctgcctccaagaagggccaagcgatctggatctggagcaacaaacttctcactactcaaacaagcaggtgacgtggaggagaatcccgggcctactagtatggactggatttggcgcatccttttccttgtcggcgctgctaccggcgcgcattccttcgaagaaaatgtggaacagcaccccagcacactgagcgtgcaagagggcgatagcgccgtgattaagtgcacctacagcgacagcgccagcaactacttcccctggtacaagcaagagctgggcaaaagaccccagctcatcatcgacatccggtccaacgtgggcgagaagaaggaccagagaatcgccgtgacactgaacaagaccgccaagcacttcagcctgcacatcaccgagacacagcctgaggattccgccgtgtacttttgtgccgccaccgaggactaccagctgatttggggagccggcaccaagctgattatcaagcctgacacgcgtatccagaaccctgatcctgccgtgtaccagctgcgggatagcaagagcagcgacaagagcgtgtgtctgttcaccgacttcgacagccagaccaacgtgtcccagagcaaggactccgacgtgtacatcaccgataagaccgtgctggacatgcggagcatggacttcaagagcaactccgccgtggcctggtccaacaagtccgatttcgcctgcgccaacgccttcaacaacagcattatccccgaggacacattcttcccaagccccgagagcagctgcggtacccagagttttgggttgttggaccctaaattgtgctatctgttggacggaatcctgttcatttacggagtgatcctgaccgcattgttcctgaagagaggccggaagaagctgctgtacatcttcaagcagcctttcatgcggcccgtgcagaccacccaggaagaggacggctgctcctgccggttccccgaggaagaagaaggcggctgcgagctgcgggttaagttttccagatccgcagacgcacccgcttaccaacaagggcagaaccaactctacaatgaacttaatttggggcggagggaagagtacgacgttctggacaaaaggaggggacgagatcccgagatgggcggaaagcctcagcgaaggaagaatccgcaagaggggctttataacgaactccagaaagataaaatggcagaagcctatagtgagattgggatgaagggagaaaggaggaggggtaaaggtcacgatgggttgtaccaaggattgagcacagccactaaagatacctatgatgcgctccacatgcaggccctgccgccaagataa

SEQ ID NO: 2489 - DNA, 2436 bp, synthetic construct
  source 1..2436: mol_type = other DNA
atggccttaccagtgaccgccttgctcctgccgctggccttgctgctccacgccgccaggccggaattcggcattacacagagccccaagtacctgttcagaaaagagggccagaacgtcaccctgagctgcgagcagaacctgaaccacgacgccatgtactggtacagacaggacccaggccagggcctgagactgatctactacagccagatcgtgaacgacttccagaagggcgacattgccgagggctacagcgtgtccagagagaagaaagagtcctttccactgaccgtgacaagcgcccagaagaaccctaccgccttctacctgtgtgccagctctcctggcgctctgtacgagcagtatttcggccctggcaccagactgacagttacactcgaggacctgaagaacgtgttcccacctgaggtggccgtgttcgagcctagcgaggccgagatcagccacacccagaaagccaccctcgtgtgcctggctaccggcttctaccccgaccatgtggaactgtcttggtgggtcaacggcaaagaggtgcacagcggcgtgtctaccgacccccagccactgaaagaacagcccgccctgaacgacagccggtactgcctgagcagcagactgagagtgtccgccaccttctggcagaacccccggaaccacttcagatgccaggtgcagttctacggcctgagcgagaacgacgagtggacccaggacagagccaagcccgtgacccagatcgtgtctgccgaagcctggggcagagccgattgcggatcccagagcttcggcctgctggaccccaagctgtgctacctgctggatggcatcctgttcatctacggcgtgatcctgaccgccctgttcctgagagtgaagttcagcagaagcgccgacgcccctgcctaccagcagggacagaaccaactgtacaacgagctgaacctgggcagacgggaagagtacgacgtgctggacaagcggagaggcagggaccctgagatgggcggaaagccccagcggagaaagaacccccaggaaggactgttcaacgaactccagaaagacaagatggccgaagccttcagcgagatcggcatgaagggcgagcggagaagaggcaagggccacgatggcctgttccagggcctgagcaccgccaccaaggacaccttcgacgccctgcacatgcaggccctgcctccaagaagggccaagcgatctggatctggagcaacaaacttctcactactcaaacaagcaggtgacgtggaggagaatcccgggcctactagtatggactggatttggcgcatccttttccttgtcggcgctgctaccggcgcgcattccttcgaagaaaatgtggaacagcaccccagcacactgagcgtgcaagagggcgatagcgccgtgattaagtgcacctacagcgacagcgccagcaactacttcccctggtacaagcaagagctgggcaaaagaccccagctcatcatcgacatccggtccaacgtgggcgagaagaaggaccagagaatcgccgtgacactgaacaagaccgccaagcacttcagcctgcacatcaccgagacacagcctgaggattccgccgtgtacttttgtgccgccaccgaggactaccagctgatttggggagccggcaccaagctgattatcaagcctgacacgcgtatccagaaccctgatcctgccgtgtaccagctgcgggatagcaagagcagcgacaagagcgtgtgtctgttcaccgacttcgacagccagaccaacgtgtcccagagcaaggactccgacgtgtacatcaccgataagaccgtgctggacatgcggagcatggacttcaagagcaactccgccgtggcctggtccaacaagtccgatttcgcctgcgccaacgccttcaacaacagcattatccccgaggacacattcttcccaagccccgagagcagctgcggtacccagagttttgggttgttggaccctaaattgtgctatctgttggacggaatcctgttcatttacggagtgatcctgaccgcattgttcctgcgggttaagttttccagatccgcagacgcacccgcttaccaacaagggcagaaccaactctacaatgaacttaatttggggcggagggaagagtacgacgttctggacaaaaggaggggacgagatcccgagatgggcggaaagcctcagcgaaggaagaatccgcaagaggggctttataacgaactccagaaagataaaatggcagaagcctatagtgagattgggatgaagggagaaaggaggaggggtaaaggtcacgatgggttgtaccaaggattgagcacagccactaaagatacctatgatgcgctccacatgcaggccctgccgccaagataa

SEQ ID NO: 2490 - DNA, 2436 bp, synthetic construct
  source 1..2436: mol_type = other DNA
atggccttaccagtgaccgccttgctcctgccgctggccttgctgctccacgccgccaggccggaattcggcattacacagagccccaagtacctgttcagaaaagagggccagaacgtcaccctgagctgcgagcagaacctgaaccacgacgccatgtactggtacagacaggacccaggccagggcctgagactgatctactacagccagatcgtgaacgacttccagaagggcgacattgccgagggctacagcgtgtccagagagaagaaagagtcctttccactgaccgtgacaagcgcccagaagaaccctaccgccttctacctgtgtgccagctctcctggcgctctgtacgagcagtatttcggccctggcaccagactgacagttacactcgaggacctgaagaacgtgttcccacctgaggtggccgtgttcgagcctagcgaggccgagatcagccacacccagaaagccaccctcgtgtgcctggctaccggcttctaccccgaccatgtggaactgtcttggtgggtcaacggcaaagaggtgcacagcggcgtgtctaccgacccccagccactgaaagaacagcccgccctgaacgacagccggtactgcctgagcagcagactgagagtgtccgccaccttctggcagaacccccggaaccacttcagatgccaggtgcagttctacggcctgagcgagaacgacgagtggacccaggacagagccaagcccgtgacccagatcgtgtctgccgaagcctggggcagagccgattgcggatcccagagcttcggcctgctggaccccaagctgtgctacctgctggatggcatcctgttcatctacggcgtgatcctgaccgccctgttcctgagagtgaagttcagcagaagcgccgacgcccctgcctaccagcagggacagaaccaactgtacaacgagctgaacctgggcagacgggaagagtacgacgtgctggacaagcggagaggcagggaccctgagatgggcggaaagccccagcggagaaagaacccccaggaaggactgttcaacgaactccagaaagacaagatggccgaagccttcagcgagatcggcatgaagggcgagcggagaagaggcaagggccacgatggcctgttccagggcctgagcaccgccaccaaggacaccttcgacgccctgcacatgcaggccctgcctccaagaagggccaagcgatctggatctggagcaacaaacttctcactactcaaacaagcaggtgacgtggaggagaatcccgggcctactagtatggactggatttggcgcatccttttccttgtcggcgctgctaccggcgcgcattccttcgaagaaaatgtggaacagcaccccagcacactgagcgtgcaagagggcgatagcgccgtgattaagtgcacctacagcgacagcgccagcaactacttcccctggtacaagcaagagctgggcaaaagaccccagctcatcatcgacatccggtccaacgtgggcgagaagaaggaccagagaatcgccgtgacactgaacaagaccgccaagcacttcagcctgcacatcaccgagacacagcctgaggattccgccgtgtacttttgtgccgccaccgaggactaccagctgatttggggagccggcaccaagctgattatcaagcctgacacgcgtatccagaaccctgatcctgccgtgtaccagctgcgggatagcaagagcagcgacaagagcgtgtgtctgttcaccgacttcgacagccagaccaacgtgtcccagagcaaggactccgacgtgtacatcaccgataagaccgtgctggacatgcggagcatggacttcaagagcaactccgccgtggcctggtccaacaagtccgatttcgcctgcgccaacgccttcaacaacagcattatccccgaggacacattcttcccaagccccgagagcagctgcggtacccagagcttcggcctgctggaccccaagctgtgctacctgctggatggcatcctgttcatctacggcgtgatcctgaccgccctgttcctgagagtgaagttcagcagaagcgccgacgcccctgcctaccagcagggacagaaccaactgtacaacgagctgaacctgggcagacgggaagagtacgacgtgctggacaagcggagaggcagggaccctgagatgggcggaaagccccagcggagaaagaacccccaggaaggactgtataacgaactccagaaagacaagatggccgaagcctacagcgagatcggcatgaagggcgagcggagaagaggcaagggccacgatggcctgtaccagggcctgagcaccgccaccaaggacacctatgacgccctgcacatgcaggccctgcctccaagataa

SEQ ID NO: 2491 - DNA, 2562 bp, synthetic construct
  source 1..2562: mol_type = other DNA
atggccttaccagtgaccgccttgctcctgccgctggccttgctgctccacgccgccaggccggaattcggcattacacagagccccaagtacctgttcagaaaagagggccagaacgtcaccctgagctgcgagcagaacctgaaccacgacgccatgtactggtacagacaggacccaggccagggcctgagactgatctactacagccagatcgtgaacgacttccagaagggcgacattgccgagggctacagcgtgtccagagagaagaaagagtcctttccactgaccgtgacaagcgcccagaagaaccctaccgccttctacctgtgtgccagctctcctggcgctctgtacgagcagtatttcggccctggcaccagactgacagttacactcgaggacctgaagaacgtgttcccacctgaggtggccgtgttcgagcctagcgaggccgagatcagccacacccagaaagccaccctcgtgtgcctggctaccggcttctaccccgaccatgtggaactgtcttggtgggtcaacggcaaagaggtgcacagcggcgtgtctaccgacccccagccactgaaagaacagcccgccctgaacgacagccggtactgcctgagcagcagactgagagtgtccgccaccttctggcagaacccccggaaccacttcagatgccaggtgcagttctacggcctgagcgagaacgacgagtggacccaggacagagccaagcccgtgacccagatcgtgtctgccgaagcctggggcagagccgattgcggatcccagagcttcggcctgctggaccccaagctgtgctacctgctggatggcatcctgttcatctacggcgtgatcctgaccgccctgttcctgagagtgaagttcagcagaagcgccgacgcccctgcctaccagcagggacagaaccaactgtacaacgagctgaacctgggcagacgggaagagtacgacgtgctggacaagcggagaggcagggaccctgagatgggcggaaagccccagcggagaaagaacccccaggaaggactgttcaacgaactccagaaagacaagatggccgaagccttcagcgagatcggcatgaagggcgagcggagaagaggcaagggccacgatggcctgttccagggcctgagcaccgccaccaaggacaccttcgacgccctgcacatgcaggccctgcctccaagaagggccaagcgatctggatctggagcaacaaacttctcactactcaaacaagcaggtgacgtggaggagaatcccgggcctactagtatggactggatttggcgcatccttttccttgtcggcgctgctaccggcgcgcattccttcgaagaaaatgtggaacagcaccccagcacactgagcgtgcaagagggcgatagcgccgtgattaagtgcacctacagcgacagcgccagcaactacttcccctggtacaagcaagagctgggcaaaagaccccagctcatcatcgacatccggtccaacgtgggcgagaagaaggaccagagaatcgccgtgacactgaacaagaccgccaagcacttcagcctgcacatcaccgagacacagcctgaggattccgccgtgtacttttgtgccgccaccgaggactaccagctgatttggggagccggcaccaagctgattatcaagcctgacacgcgtatccagaaccctgatcctgccgtgtaccagctgcgggatagcaagagcagcgacaagagcgtgtgtctgttcaccgacttcgacagccagaccaacgtgtcccagagcaaggactccgacgtgtacatcaccgataagaccgtgctggacatgcggagcatggacttcaagagcaactccgccgtggcctggtccaacaagtccgatttcgcctgcgccaacgccttcaacaacagcattatccccgaggacacattcttcccaagccccgagagcagctgcggtacccagagcttcggcctgctggaccccaagctgtgctacctgctggatggcatcctgttcatctacggcgtgatcctgaccgccctgttcctgaaacggggcagaaagaaactcctgtatatattcaaacaaccatttatgagaccagtacaaactactcaagaggaagatggctgtagctgccgatttccagaagaagaagaaggaggatgtgaactgagagtgaagttcagcagaagcgccgacgcccctgcctaccagcagggacagaaccaactgtacaacgagctgaacctgggcagacgggaagagtacgacgtgctggacaagcggagaggcagggaccctgagatgggcggaaagccccagcggagaaagaacccccaggaaggactgtataacgaactccagaaagacaagatggccgaagcctacagcgagatcggcatgaagggcgagcggagaagaggcaagggccacgatggcctgtaccagggcctgagcaccgccaccaaggacacctatgacgccctgcacatgcaggccctgcctccaagataa

SEQ ID NO: 2492 - DNA, 2559 bp, synthetic construct
  source 1..2559: mol_type = other DNA
atggccttaccagtgaccgccttgctcctgccgctggccttgctgctccacgccgccaggccggaattcggcattacacagagccccaagtacctgttcagaaaagagggccagaacgtcaccctgagctgcgagcagaacctgaaccacgacgccatgtactggtacagacaggacccaggccagggcctgagactgatctactacagccagatcgtgaacgacttccagaagggcgacattgccgagggctacagcgtgtccagagagaagaaagagtcctttccactgaccgtgacaagcgcccagaagaaccctaccgccttctacctgtgtgccagctctcctggcgctctgtacgagcagtatttcggccctggcaccagactgacagttacactcgaggacctgaagaacgtgttcccacctgaggtggccgtgttcgagcctagcgaggccgagatcagccacacccagaaagccaccctcgtgtgcctggctaccggcttctaccccgaccatgtggaactgtcttggtgggtcaacggcaaagaggtgcacagcggcgtgtctaccgacccccagccactgaaagaacagcccgccctgaacgacagccggtactgcctgagcagcagactgagagtgtccgccaccttctggcagaacccccggaaccacttcagatgccaggtgcagttctacggcctgagcgagaacgacgagtggacccaggacagagccaagcccgtgacccagatcgtgtctgccgaagcctggggcagagccgattgcggatcccagagcttcggcctgctggaccccaagctgtgctacctgctggatggcatcctgttcatctacggcgtgatcctgaccgccctgttcctgagagtgaagttcagcagaagcgccgacgcccctgcctaccagcagggacagaaccaactgtacaacgagctgaacctgggcagacgggaagagtacgacgtgctggacaagcggagaggcagggaccctgagatgggcggaaagccccagcggagaaagaacccccaggaaggactgttcaacgaactccagaaagacaagatggccgaagccttcagcgagatcggcatgaagggcgagcggagaagaggcaagggccacgatggcctgttccagggcctgagcaccgccaccaaggacaccttcgacgccctgcacatgcaggccctgcctccaagaagggccaagcgatctggatctggagcaacaaacttctcactactcaaacaagcaggtgacgtggaggagaatcccgggcctactagtatggactggatttggcgcatccttttccttgtcggcgctgctaccggcgcgcattccttcgaagaaaatgtggaacagcaccccagcacactgagcgtgcaagagggcgatagcgccgtgattaagtgcacctacagcgacagcgccagcaactacttcccctggtacaagcaagagctgggcaaaagaccccagctcatcatcgacatccggtccaacgtgggcgagaagaaggaccagagaatcgccgtgacactgaacaagaccgccaagcacttcagcctgcacatcaccgagacacagcctgaggattccgccgtgtacttttgtgccgccaccgaggactaccagctgatttggggagccggcaccaagctgattatcaagcctgacacgcgtatccagaaccctgatcctgccgtgtaccagctgcgggatagcaagagcagcgacaagagcgtgtgtctgttcaccgacttcgacagccagaccaacgtgtcccagagcaaggactccgacgtgtacatcaccgataagaccgtgctggacatgcggagcatggacttcaagagcaactccgccgtggcctggtccaacaagtccgatttcgcctgcgccaacgccttcaacaacagcattatccccgaggacacattcttcccaagccccgagagcagctgcggtacccagagcttcggcctgctggaccccaagctgtgctacctgctggatggcatcctgttcatctacggcgtgatcctgaccgccctgttcctgaggagtaagaggagcaggctcctgcacagtgactacatgaacatgactccacgccgccccggacccacccgcaagcattaccagccctatgccccaccacgcgacttcgcagcctatcgctccagagtgaagttcagcagaagcgccgacgcccctgcctaccagcagggacagaaccaactgtacaacgagctgaacctgggcagacgggaagagtacgacgtgctggacaagcggagaggcagggaccctgagatgggcggaaagccccagcggagaaagaacccccaggaaggactgtataacgaactccagaaagacaagatggccgaagcctacagcgagatcggcatgaagggcgagcggagaagaggcaagggccacgatggcctgtaccagggcctgagcaccgccaccaaggacacctatgacgccctgcacatgcaggccctgcctccaagataa

SEQ ID NO: 2493 - DNA, 2544 bp, synthetic construct
  source 1..2544: mol_type = other DNA
atggccttaccagtgaccgccttgctcctgccgctggccttgctgctccacgccgccaggccggaattcggcattacacagagccccaagtacctgttcagaaaagagggccagaacgtcaccctgagctgcgagcagaacctgaaccacgacgccatgtactggtacagacaggacccaggccagggcctgagactgatctactacagccagatcgtgaacgacttccagaagggcgacattgccgagggctacagcgtgtccagagagaagaaagagtcctttccactgaccgtgacaagcgcccagaagaaccctaccgccttctacctgtgtgccagctctcctggcgctctgtacgagcagtatttcggccctggcaccagactgacagttacactcgaggacctgaagaacgtgttcccacctgaggtggccgtgttcgagcctagcgaggccgagatcagccacacccagaaagccaccctcgtgtgcctggctaccggcttctaccccgaccatgtggaactgtcttggtgggtcaacggcaaagaggtgcacagcggcgtgtctaccgacccccagccactgaaagaacagcccgccctgaacgacagccggtactgcctgagcagcagactgagagtgtccgccaccttctggcagaacccccggaaccacttcagatgccaggtgcagttctacggcctgagcgagaacgacgagtggacccaggacagagccaagcccgtgacccagatcgtgtctgccgaagcctggggcagagccgattgcggatcccagagcttcggcctgctggaccccaagctgtgctacctgctggatggcatcctgttcatctacggcgtgatcctgaccgccctgttcctgagagtgaagttcagcagaagcgccgacgcccctgcctaccagcagggacagaaccaactgtacaacgagctgaacctgggcagacgggaagagtacgacgtgctggacaagcggagaggcagggaccctgagatgggcggaaagccccagcggagaaagaacccccaggaaggactgttcaacgaactccagaaagacaagatggccgaagccttcagcgagatcggcatgaagggcgagcggagaagaggcaagggccacgatggcctgttccagggcctgagcaccgccaccaaggacaccttcgacgccctgcacatgcaggccctgcctccaagaagggccaagcgatctggatctggagcaacaaacttctcactactcaaacaagcaggtgacgtggaggagaatcccgggcctactagtatggactggatttggcgcatccttttccttgtcggcgctgctaccggcgcgcattccttcgaagaaaatgtggaacagcaccccagcacactgagcgtgcaagagggcgatagcgccgtgattaagtgcacctacagcgacagcgccagcaactacttcccctggtacaagcaagagctgggcaaaagaccccagctcatcatcgacatccggtccaacgtgggcgagaagaaggaccagagaatcgccgtgacactgaacaagaccgccaagcacttcagcctgcacatcaccgagacacagcctgaggattccgccgtgtacttttgtgccgccaccgaggactaccagctgatttggggagccggcaccaagctgattatcaagcctgacacgcgtatccagaaccctgatcctgccgtgtaccagctgcgggatagcaagagcagcgacaagagcgtgtgtctgttcaccgacttcgacagccagaccaacgtgtcccagagcaaggactccgacgtgtacatcaccgataagaccgtgctggacatgcggagcatggacttcaagagcaactccgccgtggcctggtccaacaagtccgatttcgcctgcgccaacgccttcaacaacagcattatccccgaggacacattcttcccaagccccgagagcagctgcggtacccagagcttcggcctgctggaccccaagctgtgctacctgctggatggcatcctgttcatctacggcgtgatcctgaccgccctgttcctgagggaccaaagactgcctcctgacgctcacaaacctccaggcggaggcagcttcagaacccctatccaagaggaacaggctgacgcccacagcaccctggcaaaaattagagtgaagttcagcagaagcgccgacgcccctgcctaccagcagggacagaaccaactgtacaacgagctgaacctgggcagacgggaagagtacgacgtgctggacaagcggagaggcagggaccctgagatgggcggaaagccccagcggagaaagaacccccaggaaggactgtataacgaactccagaaagacaagatggccgaagcctacagcgagatcggcatgaagggcgagcggagaagaggcaagggccacgatggcctgtaccagggcctgagcaccgccaccaaggacacctatgacgccctgcacatgcaggccctgcctccaagataa

SEQ ID NO: 2494 - DNA, 2796 bp, synthetic construct
  source 1..2796: mol_type = other DNA
atggccttaccagtgaccgccttgctcctgccgctggccttgctgctccacgccgccaggccggaattcggcattacacagagccccaagtacctgttcagaaaagagggccagaacgtcaccctgagctgcgagcagaacctgaaccacgacgccatgtactggtacagacaggacccaggccagggcctgagactgatctactacagccagatcgtgaacgacttccagaagggcgacattgccgagggctacagcgtgtccagagagaagaaagagtcctttccactgaccgtgacaagcgcccagaagaaccctaccgccttctacctgtgtgccagctctcctggcgctctgtacgagcagtatttcggccctggcaccagactgacagttacactcgaggacctgaagaacgtgttcccacctgaggtggccgtgttcgagcctagcgaggccgagatcagccacacccagaaagccaccctcgtgtgcctggctaccggcttctaccccgaccatgtggaactgtcttggtgggtcaacggcaaagaggtgcacagcggcgtgtctaccgacccccagccactgaaagaacagcccgccctgaacgacagccggtactgcctgagcagcagactgagagtgtccgccaccttctggcagaacccccggaaccacttcagatgccaggtgcagttctacggcctgagcgagaacgacgagtggacccaggacagagccaagcccgtgacccagatcgtgtctgccgaagcctggggcagagccgattgcggatcccagagcttcggcctgctggaccccaagctgtgctacctgctggatggcatcctgttcatctacggcgtgatcctgaccgccctgttcctgagagtgaagttcagcagaagcgccgacgcccctgcctaccagcagggacagaaccaactgtacaacgagctgaacctgggcagacgggaagagtacgacgtgctggacaagcggagaggcagggaccctgagatgggcggaaagccccagcggagaaagaacccccaggaaggactgttcaacgaactccagaaagacaagatggccgaagccttcagcgagatcggcatgaagggcgagcggagaagaggcaagggccacgatggcctgttccagggcctgagcaccgccaccaaggacaccttcgacgccctgcacatgcaggccctgcctccaagaagggccaagcgatctggatctggagcaacaaacttctcactactcaaacaagcaggtgacgtggaggagaatcccgggcctactagtatggactggatttggcgcatccttttccttgtcggcgctgctaccggcgcgcattccttcgaagaaaatgtggaacagcaccccagcacactgagcgtgcaagagggcgatagcgccgtgattaagtgcacctacagcgacagcgccagcaactacttcccctggtacaagcaagagctgggcaaaagaccccagctcatcatcgacatccggtccaacgtgggcgagaagaaggaccagagaatcgccgtgacactgaacaagaccgccaagcacttcagcctgcacatcaccgagacacagcctgaggattccgccgtgtacttttgtgccgccaccgaggactaccagctgatttggggagccggcaccaagctgattatcaagcctgacacgcgtatccagaaccctgatcctgccgtgtaccagctgcgggatagcaagagcagcgacaagagcgtgtgtctgttcaccgacttcgacagccagaccaacgtgtcccagagcaaggactccgacgtgtacatcaccgataagaccgtgctggacatgcggagcatggacttcaagagcaactccgccgtggcctggtccaacaagtccgatttcgcctgcgccaacgccttcaacaacagcattatccccgaggacacattcttcccaagccccgagagcagctgcggtacccagagcttcggcctgctggaccccaagctgtgctacctgctggatggcatcctgttcatctacggcgtgatcctgaccgccctgttcctgtggcggcggaagcggaaagagaagcagtctgagacaagccccaaagagttcctgaccatctacgaggacgtgaaggacctgaaaacccggcggaaccacgaacaagagcagacctttcctggcggaggcagcaccatctacagcatgatccagagccagagcagcgcccctacaagccaagagcctgcctacacactgtactccctgatccagcctagcagaaagagcggcagccggaagagaaatcacagccccagcttcaacagcacgatctacgaagtgatcggcaagagccagccaaaggctcagaaccctgccagactgagccggaaagagctggaaaacttcgacgtgtacagcagagtgaagttcagcagaagcgccgacgcccctgcctaccagcagggacagaaccaactgtacaacgagctgaacctgggcagacgggaagagtacgacgtgctggacaagcggagaggcagggaccctgagatgggcggaaagccccagcggagaaagaacccccaggaaggactgtataacgaactccagaaagacaagatggccgaagcctacagcgagatcggcatgaagggcgagcggagaagaggcaagggccacgatggcctgtaccagggcctgagcaccgccaccaaggacacctatgacgccctgcacatgcaggccctgcctccaagataa

SEQ ID NO: 2495 - DNA, 2559 bp, synthetic construct
  source 1..2559: mol_type = other DNA
atggccttaccagtgaccgccttgctcctgccgctggccttgctgctccacgccgccaggccggaattcggcattacacagagccccaagtacctgttcagaaaagagggccagaacgtcaccctgagctgcgagcagaacctgaaccacgacgccatgtactggtacagacaggacccaggccagggcctgagactgatctactacagccagatcgtgaacgacttccagaagggcgacattgccgagggctacagcgtgtccagagagaagaaagagtcctttccactgaccgtgacaagcgcccagaagaaccctaccgccttctacctgtgtgccagctctcctggcgctctgtacgagcagtatttcggccctggcaccagactgacagttacactcgaggacctgaagaacgtgttcccacctgaggtggccgtgttcgagcctagcgaggccgagatcagccacacccagaaagccaccctcgtgtgcctggctaccggcttctaccccgaccatgtggaactgtcttggtgggtcaacggcaaagaggtgcacagcggcgtgtctaccgacccccagccactgaaagaacagcccgccctgaacgacagccggtactgcctgagcagcagactgagagtgtccgccaccttctggcagaacccccggaaccacttcagatgccaggtgcagttctacggcctgagcgagaacgacgagtggacccaggacagagccaagcccgtgacccagatcgtgtctgccgaagcctggggcagagccgattgcggatcccagagcttcggcctgctggaccccaagctgtgctacctgctggatggcatcctgttcatctacggcgtgatcctgaccgccctgttcctgagagtgaagttcagcagaagcgccgacgcccctgcctaccagcagggacagaaccaactgtacaacgagctgaacctgggcagacgggaagagtacgacgtgctggacaagcggagaggcagggaccctgagatgggcggaaagccccagcggagaaagaacccccaggaaggactgttcaacgaactccagaaagacaagatggccgaagccttcagcgagatcggcatgaagggcgagcggagaagaggcaagggccacgatggcctgttccagggcctgagcaccgccaccaaggacaccttcgacgccctgcacatgcaggccctgcctccaagaagggccaagcgatctggatctggagcaacaaacttctcactactcaaacaagcaggtgacgtggaggagaatcccgggcctactagtatggactggatttggcgcatccttttccttgtcggcgctgctaccggcgcgcattccttcgaagaaaatgtggaacagcaccccagcacactgagcgtgcaagagggcgatagcgccgtgattaagtgcacctacagcgacagcgccagcaactacttcccctggtacaagcaagagctgggcaaaagaccccagctcatcatcgacatccggtccaacgtgggcgagaagaaggaccagagaatcgccgtgacactgaacaagaccgccaagcacttcagcctgcacatcaccgagacacagcctgaggattccgccgtgtacttttgtgccgccaccgaggactaccagctgatttggggagccggcaccaagctgattatcaagcctgacacgcgtatccagaaccctgatcctgccgtgtaccagctgcgggatagcaagagcagcgacaagagcgtgtgtctgttcaccgacttcgacagccagaccaacgtgtcccagagcaaggactccgacgtgtacatcaccgataagaccgtgctggacatgcggagcatggacttcaagagcaactccgccgtggcctggtccaacaagtccgatttcgcctgcgccaacgccttcaacaacagcattatccccgaggacacattcttcccaagccccgagagcagctgcggtacccagagttttgggttgttggaccctaaattgtgctatctgttggacggaatcctgttcatttacggagtgatcctgaccgcattgttcctgaggagcaagcggtcacggctgctccacagcgattacatgaatatgacaccacgaagaccgggtcctactcgcaaacactaccaaccctacgcacctccccgcgactttgcagcgtaccgatctcgggttaagttttccagatccgcagacgcacccgcttaccaacaagggcagaaccaactctacaatgaacttaatttggggcggagggaagagtacgacgttctggacaaaaggaggggacgagatcccgagatgggcggaaagcctcagcgaaggaagaatccgcaagaggggctttataacgaactccagaaagataaaatggcagaagcctatagtgagattgggatgaagggagaaaggaggaggggtaaaggtcacgatgggttgtaccaaggattgagcacagccactaaagatacctatgatgcgctccacatgcaggccctgccgccaagataa

SEQ ID NO: 2496 - DNA, 2562 bp, synthetic construct
  source 1..2562: mol_type = other DNA
atggccttaccagtgaccgccttgctcctgccgctggccttgctgctccacgccgccaggccggaattcggcattacacagagccccaagtacctgttcagaaaagagggccagaacgtcaccctgagctgcgagcagaacctgaaccacgacgccatgtactggtacagacaggacccaggccagggcctgagactgatctactacagccagatcgtgaacgacttccagaagggcgacattgccgagggctacagcgtgtccagagagaagaaagagtcctttccactgaccgtgacaagcgcccagaagaaccctaccgccttctacctgtgtgccagctctcctggcgctctgtacgagcagtatttcggccctggcaccagactgacagttacactcgaggacctgaagaacgtgttcccacctgaggtggccgtgttcgagcctagcgaggccgagatcagccacacccagaaagccaccctcgtgtgcctggctaccggcttctaccccgaccatgtggaactgtcttggtgggtcaacggcaaagaggtgcacagcggcgtgtctaccgacccccagccactgaaagaacagcccgccctgaacgacagccggtactgcctgagcagcagactgagagtgtccgccaccttctggcagaacccccggaaccacttcagatgccaggtgcagttctacggcctgagcgagaacgacgagtggacccaggacagagccaagcccgtgacccagatcgtgtctgccgaagcctggggcagagccgattgcggatcccagagcttcggcctgctggaccccaagctgtgctacctgctggatggcatcctgttcatctacggcgtgatcctgaccgccctgttcctgagagtgaagttcagcagaagcgccgacgcccctgcctaccagcagggacagaaccaactgtacaacgagctgaacctgggcagacgggaagagtacgacgtgctggacaagcggagaggcagggaccctgagatgggcggaaagccccagcggagaaagaacccccaggaaggactgttcaacgaactccagaaagacaagatggccgaagccttcagcgagatcggcatgaagggcgagcggagaagaggcaagggccacgatggcctgttccagggcctgagcaccgccaccaaggacaccttcgacgccctgcacatgcaggccctgcctccaagaagggccaagcgatctggatctggagcaacaaacttctcactactcaaacaagcaggtgacgtggaggagaatcccgggcctactagtatggactggatttggcgcatccttttccttgtcggcgctgctaccggcgcgcattccttcgaagaaaatgtggaacagcaccccagcacactgagcgtgcaagagggcgatagcgccgtgattaagtgcacctacagcgacagcgccagcaactacttcccctggtacaagcaagagctgggcaaaagaccccagctcatcatcgacatccggtccaacgtgggcgagaagaaggaccagagaatcgccgtgacactgaacaagaccgccaagcacttcagcctgcacatcaccgagacacagcctgaggattccgccgtgtacttttgtgccgccaccgaggactaccagctgatttggggagccggcaccaagctgattatcaagcctgacacgcgtatccagaaccctgatcctgccgtgtaccagctgcgggatagcaagagcagcgacaagagcgtgtgtctgttcaccgacttcgacagccagaccaacgtgtcccagagcaaggactccgacgtgtacatcaccgataagaccgtgctggacatgcggagcatggacttcaagagcaactccgccgtggcctggtccaacaagtccgatttcgcctgcgccaacgccttcaacaacagcattatccccgaggacacattcttcccaagccccgagagcagctgcggtacccagagttttgggttgttggaccctaaattgtgctatctgttggacggaatcctgttcatttacggagtgatcctgaccgcattgttcctgaagagaggccggaagaagctgctgtacatcttcaagcagcctttcatgcggcccgtgcagaccacccaggaagaggacggctgctcctgccggttccccgaggaagaagaaggcggctgcgagctgcgggttaagttttccagatccgcagacgcacccgcttaccaacaagggcagaaccaactctacaatgaacttaatttggggcggagggaagagtacgacgttctggacaaaaggaggggacgagatcccgagatgggcggaaagcctcagcgaaggaagaatccgcaagaggggctttataacgaactccagaaagataaaatggcagaagcctatagtgagattgggatgaagggagaaaggaggaggggtaaaggtcacgatgggttgtaccaaggattgagcacagccactaaagatacctatgatgcgctccacatgcaggccctgccgccaagataa

SEQ ID NO: 2497 - DNA, 2436 bp, synthetic construct
  source 1..2436: mol_type = other DNA
atggccttaccagtgaccgccttgctcctgccgctggccttgctgctccacgccgccaggccggaattcggcattacacagagccccaagtacctgttcagaaaagagggccagaacgtcaccctgagctgcgagcagaacctgaaccacgacgccatgtactggtacagacaggacccaggccagggcctgagactgatctactacagccagatcgtgaacgacttccagaagggcgacattgccgagggctacagcgtgtccagagagaagaaagagtcctttccactgaccgtgacaagcgcccagaagaaccctaccgccttctacctgtgtgccagctctcctggcgctctgtacgagcagtatttcggccctggcaccagactgacagttacactcgaggacctgaagaacgtgttcccacctgaggtggccgtgttcgagcctagcgaggccgagatcagccacacccagaaagccaccctcgtgtgcctggctaccggcttctaccccgaccatgtggaactgtcttggtgggtcaacggcaaagaggtgcacagcggcgtgtctaccgacccccagccactgaaagaacagcccgccctgaacgacagccggtactgcctgagcagcagactgagagtgtccgccaccttctggcagaacccccggaaccacttcagatgccaggtgcagttctacggcctgagcgagaacgacgagtggacccaggacagagccaagcccgtgacccagatcgtgtctgccgaagcctggggcagagccgattgcggatcccagagcttcggcctgctggaccccaagctgtgctacctgctggatggcatcctgttcatctacggcgtgatcctgaccgccctgttcctgagagtgaagttcagcagaagcgccgacgcccctgcctaccagcagggacagaaccaactgtacaacgagctgaacctgggcagacgggaagagtacgacgtgctggacaagcggagaggcagggaccctgagatgggcggaaagccccagcggagaaagaacccccaggaaggactgttcaacgaactccagaaagacaagatggccgaagccttcagcgagatcggcatgaagggcgagcggagaagaggcaagggccacgatggcctgttccagggcctgagcaccgccaccaaggacaccttcgacgccctgcacatgcaggccctgcctccaagaagggccaagcgatctggatctggagcaacaaacttctcactactcaaacaagcaggtgacgtggaggagaatcccgggcctactagtatggactggatttggcgcatccttttccttgtcggcgctgctaccggcgcgcattccttcgaagaaaatgtggaacagcaccccagcacactgagcgtgcaagagggcgatagcgccgtgattaagtgcacctacagcgacagcgccagcaactacttcccctggtacaagcaagagctgggcaaaagaccccagctcatcatcgacatccggtccaacgtgggcgagaagaaggaccagagaatcgccgtgacactgaacaagaccgccaagcacttcagcctgcacatcaccgagacacagcctgaggattccgccgtgtacttttgtgccgccaccgaggactaccagctgatttggggagccggcaccaagctgattatcaagcctgacacgcgtatccagaaccctgatcctgccgtgtaccagctgcgggatagcaagagcagcgacaagagcgtgtgtctgttcaccgacttcgacagccagaccaacgtgtcccagagcaaggactccgacgtgtacatcaccgataagaccgtgctggacatgcggagcatggacttcaagagcaactccgccgtggcctggtccaacaagtccgatttcgcctgcgccaacgccttcaacaacagcattatccccgaggacacattcttcccaagccccgagagcagctgcggtacccagagcttcggcctgctggaccccaagctgagctacctgctggatggcatcctgttcatctacggcgtgatcctgaccgccctgttcctgagagtgaagttcagcagaagcgccgacgcccctgcctaccagcagggacagaaccaactgtacaacgagctgaacctgggcagacgggaagagtacgacgtgctggacaagcggagaggcagggaccctgagatgggcggaaagccccagcggagaaagaacccccaggaaggactgtataacgaactccagaaagacaagatggccgaagcctacagcgagatcggcatgaagggcgagcggagaagaggcaagggccacgatggcctgtaccagggcctgagcaccgccaccaaggacacctatgacgccctgcacatgcaggccctgcctccaagataa

SEQ ID NO: 2498 - DNA, 2436 bp, synthetic construct
  source 1..2436: mol_type = other DNA
atggccttaccagtgaccgccttgctcctgccgctggccttgctgctccacgccgccaggccggaattcggcattacacagagccccaagtacctgttcagaaaagagggccagaacgtcaccctgagctgcgagcagaacctgaaccacgacgccatgtactggtacagacaggacccaggccagggcctgagactgatctactacagccagatcgtgaacgacttccagaagggcgacattgccgagggctacagcgtgtccagagagaagaaagagtcctttccactgaccgtgacaagcgcccagaagaaccctaccgccttctacctgtgtgccagctctcctggcgctctgtacgagcagtatttcggccctggcaccagactgacagttacactcgaggacctgaagaacgtgttcccacctgaggtggccgtgttcgagcctagcgaggccgagatcagccacacccagaaagccaccctcgtgtgcctggctaccggcttctaccccgaccatgtggaactgtcttggtgggtcaacggcaaagaggtgcacagcggcgtgtctaccgacccccagccactgaaagaacagcccgccctgaacgacagccggtactgcctgagcagcagactgagagtgtccgccaccttctggcagaacccccggaaccacttcagatgccaggtgcagttctacggcctgagcgagaacgacgagtggacccaggacagagccaagcccgtgacccagatcgtgtctgccgaagcctggggcagagccgattgcggatcccagagcttcggcctgctggaccccaagctgtgctacctgctggatggcatcctgttcatctacggcgtgatcctgaccgccctgttcctgagagtgaagttcagcagaagcgccgacgcccctgcctaccagcagggacagaaccaactgtacaacgagctgaacctgggcagacgggaagagtacgacgtgctggacaagcggagaggcagggaccctgagatgggcggaaagccccagcggagaaagaacccccaggaaggactgttcaacgaactccagaaagacaagatggccgaagccttcagcgagatcggcatgaagggcgagcggagaagaggcaagggccacgatggcctgttccagggcctgagcaccgccaccaaggacaccttcgacgccctgcacatgcaggccctgcctccaagaagggccaagcgatctggatctggagcaacaaacttctcactactcaaacaagcaggtgacgtggaggagaatcccgggcctactagtatggactggatttggcgcatccttttccttgtcggcgctgctaccggcgcgcattccttcgaagaaaatgtggaacagcaccccagcacactgagcgtgcaagagggcgatagcgccgtgattaagtgcacctacagcgacagcgccagcaactacttcccctggtacaagcaagagctgggcaaaagaccccagctcatcatcgacatccggtccaacgtgggcgagaagaaggaccagagaatcgccgtgacactgaacaagaccgccaagcacttcagcctgcacatcaccgagacacagcctgaggattccgccgtgtacttttgtgccgccaccgaggactaccagctgatttggggagccggcaccaagctgattatcaagcctgacacgcgtatccagaaccctgatcctgccgtgtaccagctgcgggatagcaagagcagcgacaagagcgtgtgtctgttcaccgacttcgacagccagaccaacgtgtcccagagcaaggactccgacgtgtacatcaccgataagaccgtgctggacatgcggagcatggacttcaagagcaactccgccgtggcctggtccaacaagtccgatttcgcctgcgccaacgccttcaacaacagcattatccccgaggacacattcttcccaagccccgagagcagctgcggtacccagagttttgggttgttggaccctaaattgagctatctgttggacggaatcctgttcatttacggagtgatcctgaccgcattgttcctgcgggttaagttttccagatccgcagacgcacccgcttaccaacaagggcagaaccaactctacaatgaacttaatttggggcggagggaagagtacgacgttctggacaaaaggaggggacgagatcccgagatgggcggaaagcctcagcgaaggaagaatccgcaagaggggctttataacgaactccagaaagataaaatggcagaagcctatagtgagattgggatgaagggagaaaggaggaggggtaaaggtcacgatgggttgtaccaaggattgagcacagccactaaagatacctatgatgcgctccacatgcaggccctgccgccaagataa

SEQ ID NO: 2499 - DNA, 2436 bp, synthetic construct
  source 1..2436: mol_type = other DNA
atggccttaccagtgaccgccttgctcctgccgctggccttgctgctccacgccgccaggccggaattcggcattacacagagccccaagtacctgttcagaaaagagggccagaacgtcaccctgagctgcgagcagaacctgaaccacgacgccatgtactggtacagacaggacccaggccagggcctgagactgatctactacagccagatcgtgaacgacttccagaagggcgacattgccgagggctacagcgtgtccagagagaagaaagagtcctttccactgaccgtgacaagcgcccagaagaaccctaccgccttctacctgtgtgccagctctcctggcgctctgtacgagcagtatttcggccctggcaccagactgacagttacactcgaggacctgaagaacgtgttcccacctgaggtggccgtgttcgagcctagcgaggccgagatcagccacacccagaaagccaccctcgtgtgcctggctaccggcttctaccccgaccatgtggaactgtcttggtgggtcaacggcaaagaggtgcacagcggcgtgtctaccgacccccagccactgaaagaacagcccgccctgaacgacagccggtactgcctgagcagcagactgagagtgtccgccaccttctggcagaacccccggaaccacttcagatgccaggtgcagttctacggcctgagcgagaacgacgagtggacccaggacagagccaagcccgtgacccagatcgtgtctgccgaagcctggggcagagccgattgcggatcccagagcttcggcctgctggaccccaagctgagctacctgctggatggcatcctgttcatctacggcgtgatcctgaccgccctgttcctgagagtgaagttcagcagaagcgccgacgcccctgcctaccagcagggacagaaccaactgtacaacgagctgaacctgggcagacgggaagagtacgacgtgctggacaagcggagaggcagggaccctgagatgggcggaaagccccagcggagaaagaacccccaggaaggactgtataacgaactccagaaagacaagatggccgaagcctacagcgagatcggcatgaagggcgagcggagaagaggcaagggccacgatggcctgtaccagggcctgagcaccgccaccaaggacacctatgacgccctgcacatgcaggccctgcctccaagaagggccaagcgatctggatctggagcaacaaacttctcactactcaaacaagcaggtgacgtggaggagaatcccgggcctactagtatggactggatttggcgcatccttttccttgtcggcgctgctaccggcgcgcattccttcgaagaaaatgtggaacagcaccccagcacactgagcgtgcaagagggcgatagcgccgtgattaagtgcacctacagcgacagcgccagcaactacttcccctggtacaagcaagagctgggcaaaagaccccagctcatcatcgacatccggtccaacgtgggcgagaagaaggaccagagaatcgccgtgacactgaacaagaccgccaagcacttcagcctgcacatcaccgagacacagcctgaggattccgccgtgtacttttgtgccgccaccgaggactaccagctgatttggggagccggcaccaagctgattatcaagcctgacacgcgtatccagaaccctgatcctgccgtgtaccagctgcgggatagcaagagcagcgacaagagcgtgtgtctgttcaccgacttcgacagccagaccaacgtgtcccagagcaaggactccgacgtgtacatcaccgataagaccgtgctggacatgcggagcatggacttcaagagcaactccgccgtggcctggtccaacaagtccgatttcgcctgcgccaacgccttcaacaacagcattatccccgaggacacattcttcccaagccccgagagcagctgcggtacccagagttttgggttgttggaccctaaattgagctatctgttggacggaatcctgttcatttacggagtgatcctgaccgcattgttcctgcgggttaagttttccagatccgcagacgcacccgcttaccaacaagggcagaaccaactctacaatgaacttaatttggggcggagggaagagtacgacgttctggacaaaaggaggggacgagatcccgagatgggcggaaagcctcagcgaaggaagaatccgcaagaggggctttataacgaactccagaaagataaaatggcagaagcctatagtgagattgggatgaagggagaaaggaggaggggtaaaggtcacgatgggttgtaccaaggattgagcacagccactaaagatacctatgatgcgctccacatgcaggccctgccgccaagataa

SEQ ID NO: 2500 - DNA, 2148 bp, synthetic construct
  source 1..2148: mol_type = other DNA
atggccttaccagtgaccgccttgctcctgccgctggccttgctgctccacgccgccaggccggaattcggcattacacagagccccaagtacctgttcagaaaagagggccagaacgtcaccctgagctgcgagcagaacctgaaccacgacgccatgtactggtacagacaggacccaggccagggcctgagactgatctactacagccagatcgtgaacgacttccagaagggcgacattgccgagggctacagcgtgtccagagagaagaaagagtcctttccactgaccgtgacaagcgcccagaagaaccctaccgccttctacctgtgtgccagctctcctggcgctctgtacgagcagtatttcggccctggcaccagactgacagttacactcgaggacctgaagaacgtgttcccacctgaggtggccgtgttcgagcctagcgaggccgagatcagccacacccagaaagccaccctcgtgtgcctggctaccggcttctaccccgaccatgtggaactgtcttggtgggtcaacggcaaagaggtgcacagcggcgtgtctaccgacccccagccactgaaagaacagcccgccctgaacgacagccggtactgcctgagcagcagactgagagtgtccgccaccttctggcagaacccccggaaccacttcagatgccaggtgcagttctacggcctgagcgagaacgacgagtggacccaggacagagccaagcccgtgacccagatcgtgtctgccgaagcctggggcagagccgattgcggatccacaacacctggcgagagaagtagcctgcctgccttctatcctggcaccagcggctcttgttctggctgtggatctctgagcctgcctctgctggctggactggttgctgctgatgctgtggcctctctgctgattgtgggagccgtgttcctgtgcgccagacctagaagaagccccgctcaagaggacggcaaggtgtacatcaacatgcccggcagaggaagggccaagcgatctggatctggagcaacaaacttctcactactcaaacaagcaggtgacgtggaggagaatcccgggcctactagtatggactggatttggcgcatccttttccttgtcggcgctgctaccggcgcgcattccttcgaagaaaatgtggaacagcaccccagcacactgagcgtgcaagagggcgatagcgccgtgattaagtgcacctacagcgacagcgccagcaactacttcccctggtacaagcaagagctgggcaaaagaccccagctcatcatcgacatccggtccaacgtgggcgagaagaaggaccagagaatcgccgtgacactgaacaagaccgccaagcacttcagcctgcacatcaccgagacacagcctgaggattccgccgtgtacttttgtgccgccaccgaggactaccagctgatttggggagccggcaccaagctgattatcaagcctgacacgcgtatccagaaccctgatcctgccgtgtaccagctgcgggatagcaagagcagcgacaagagcgtgtgtctgttcaccgacttcgacagccagaccaacgtgtcccagagcaaggactccgacgtgtacatcaccgataagaccgtgctggacatgcggagcatggacttcaagagcaactccgccgtggcctggtccaacaagtccgatttcgcctgcgccaacgccttcaacaacagcattatccccgaggacacattcttcccaagccccgagagcagctgcggtaccacaacacctggcgagagaagtagcctgcctgccttctatcctggcaccagcggctcttgttctggctgtggatctctgagcctgcctctgctggctggactggttgctgctgatgctgtggcctctctgctgattgtgggagccgtgttcaaacggggcagaaagaaactcctgtatatattcaaacaaccatttatgagaccagtacaaactactcaagaggaagatggctgtagctgccgatttccagaagaagaagaaggaggatgtgaactgctgtgcgccagacctagaagaagccccgctcaagaggacggcaaggtgtacatcaacatgcccggcagaggataa

SEQ ID NO: 2501 - DNA, 2145 bp, synthetic construct
  source 1..2145: mol_type = other DNA
atggccttaccagtgaccgccttgctcctgccgctggccttgctgctccacgccgccaggccggaattcggcattacacagagccccaagtacctgttcagaaaagagggccagaacgtcaccctgagctgcgagcagaacctgaaccacgacgccatgtactggtacagacaggacccaggccagggcctgagactgatctactacagccagatcgtgaacgacttccagaagggcgacattgccgagggctacagcgtgtccagagagaagaaagagtcctttccactgaccgtgacaagcgcccagaagaaccctaccgccttctacctgtgtgccagctctcctggcgctctgtacgagcagtatttcggccctggcaccagactgacagttacactcgaggacctgaagaacgtgttcccacctgaggtggccgtgttcgagcctagcgaggccgagatcagccacacccagaaagccaccctcgtgtgcctggctaccggcttctaccccgaccatgtggaactgtcttggtgggtcaacggcaaagaggtgcacagcggcgtgtctaccgacccccagccactgaaagaacagcccgccctgaacgacagccggtactgcctgagcagcagactgagagtgtccgccaccttctggcagaacccccggaaccacttcagatgccaggtgcagttctacggcctgagcgagaacgacgagtggacccaggacagagccaagcccgtgacccagatcgtgtctgccgaagcctggggcagagccgattgcggatccacaacacctggcgagagaagtagcctgcctgccttctatcctggcaccagcggctcttgttctggctgtggatctctgagcctgcctctgctggctggactggttgctgctgatgctgtggcctctctgctgattgtgggagccgtgttcctgtgcgccagacctagaagaagccccgctcaagaggacggcaaggtgtacatcaacatgcccggcagaggaagggccaagcgatctggatctggagcaacaaacttctcactactcaaacaagcaggtgacgtggaggagaatcccgggcctactagtatggactggatttggcgcatccttttccttgtcggcgctgctaccggcgcgcattccttcgaagaaaatgtggaacagcaccccagcacactgagcgtgcaagagggcgatagcgccgtgattaagtgcacctacagcgacagcgccagcaactacttcccctggtacaagcaagagctgggcaaaagaccccagctcatcatcgacatccggtccaacgtgggcgagaagaaggaccagagaatcgccgtgacactgaacaagaccgccaagcacttcagcctgcacatcaccgagacacagcctgaggattccgccgtgtacttttgtgccgccaccgaggactaccagctgatttggggagccggcaccaagctgattatcaagcctgacacgcgtatccagaaccctgatcctgccgtgtaccagctgcgggatagcaagagcagcgacaagagcgtgtgtctgttcaccgacttcgacagccagaccaacgtgtcccagagcaaggactccgacgtgtacatcaccgataagaccgtgctggacatgcggagcatggacttcaagagcaactccgccgtggcctggtccaacaagtccgatttcgcctgcgccaacgccttcaacaacagcattatccccgaggacacattcttcccaagccccgagagcagctgcggtaccacaacacctggcgagagaagtagcctgcctgccttctatcctggcaccagcggctcttgttctggctgtggatctctgagcctgcctctgctggctggactggttgctgctgatgctgtggcctctctgctgattgtgggagccgtgttcaggagtaagaggagcaggctcctgcacagtgactacatgaacatgactccacgccgccccggacccacccgcaagcattaccagccctatgccccaccacgcgacttcgcagcctatcgctccctgtgcgccagacctagaagaagccccgctcaagaggacggcaaggtgtacatcaacatgcccggcagaggataa

SEQ ID NO: 2502 - DNA, 2130 bp, synthetic construct
  source 1..2130: mol_type = other DNA
atggccttaccagtgaccgccttgctcctgccgctggccttgctgctccacgccgccaggccggaattcggcattacacagagccccaagtacctgttcagaaaagagggccagaacgtcaccctgagctgcgagcagaacctgaaccacgacgccatgtactggtacagacaggacccaggccagggcctgagactgatctactacagccagatcgtgaacgacttccagaagggcgacattgccgagggctacagcgtgtccagagagaagaaagagtcctttccactgaccgtgacaagcgcccagaagaaccctaccgccttctacctgtgtgccagctctcctggcgctctgtacgagcagtatttcggccctggcaccagactgacagttacactcgaggacctgaagaacgtgttcccacctgaggtggccgtgttcgagcctagcgaggccgagatcagccacacccagaaagccaccctcgtgtgcctggctaccggcttctaccccgaccatgtggaactgtcttggtgggtcaacggcaaagaggtgcacagcggcgtgtctaccgacccccagccactgaaagaacagcccgccctgaacgacagccggtactgcctgagcagcagactgagagtgtccgccaccttctggcagaacccccggaaccacttcagatgccaggtgcagttctacggcctgagcgagaacgacgagtggacccaggacagagccaagcccgtgacccagatcgtgtctgccgaagcctggggcagagccgattgcggatccacaacacctggcgagagaagtagcctgcctgccttctatcctggcaccagcggctcttgttctggctgtggatctctgagcctgcctctgctggctggactggttgctgctgatgctgtggcctctctgctgattgtgggagccgtgttcctgtgcgccagacctagaagaagccccgctcaagaggacggcaaggtgtacatcaacatgcccggcagaggaagggccaagcgatctggatctggagcaacaaacttctcactactcaaacaagcaggtgacgtggaggagaatcccgggcctactagtatggactggatttggcgcatccttttccttgtcggcgctgctaccggcgcgcattccttcgaagaaaatgtggaacagcaccccagcacactgagcgtgcaagagggcgatagcgccgtgattaagtgcacctacagcgacagcgccagcaactacttcccctggtacaagcaagagctgggcaaaagaccccagctcatcatcgacatccggtccaacgtgggcgagaagaaggaccagagaatcgccgtgacactgaacaagaccgccaagcacttcagcctgcacatcaccgagacacagcctgaggattccgccgtgtacttttgtgccgccaccgaggactaccagctgatttggggagccggcaccaagctgattatcaagcctgacacgcgtatccagaaccctgatcctgccgtgtaccagctgcgggatagcaagagcagcgacaagagcgtgtgtctgttcaccgacttcgacagccagaccaacgtgtcccagagcaaggactccgacgtgtacatcaccgataagaccgtgctggacatgcggagcatggacttcaagagcaactccgccgtggcctggtccaacaagtccgatttcgcctgcgccaacgccttcaacaacagcattatccccgaggacacattcttcccaagccccgagagcagctgcggtaccacaacacctggcgagagaagtagcctgcctgccttctatcctggcaccagcggctcttgttctggctgtggatctctgagcctgcctctgctggctggactggttgctgctgatgctgtggcctctctgctgattgtgggagccgtgttcagggaccaaagactgcctcctgacgctcacaaacctccaggcggaggcagcttcagaacccctatccaagaggaacaggctgacgcccacagcaccctggcaaaaattctgtgcgccagacctagaagaagccccgctcaagaggacggcaaggtgtacatcaacatgcccggcagaggataa

SEQ ID NO: 2503 - DNA, 2382 bp, synthetic construct
  source 1..2382: mol_type = other DNA
atggccttaccagtgaccgccttgctcctgccgctggccttgctgctccacgccgccaggccggaattcggcattacacagagccccaagtacctgttcagaaaagagggccagaacgtcaccctgagctgcgagcagaacctgaaccacgacgccatgtactggtacagacaggacccaggccagggcctgagactgatctactacagccagatcgtgaacgacttccagaagggcgacattgccgagggctacagcgtgtccagagagaagaaagagtcctttccactgaccgtgacaagcgcccagaagaaccctaccgccttctacctgtgtgccagctctcctggcgctctgtacgagcagtatttcggccctggcaccagactgacagttacactcgaggacctgaagaacgtgttcccacctgaggtggccgtgttcgagcctagcgaggccgagatcagccacacccagaaagccaccctcgtgtgcctggctaccggcttctaccccgaccatgtggaactgtcttggtgggtcaacggcaaagaggtgcacagcggcgtgtctaccgacccccagccactgaaagaacagcccgccctgaacgacagccggtactgcctgagcagcagactgagagtgtccgccaccttctggcagaacccccggaaccacttcagatgccaggtgcagttctacggcctgagcgagaacgacgagtggacccaggacagagccaagcccgtgacccagatcgtgtctgccgaagcctggggcagagccgattgcggatccacaacacctggcgagagaagtagcctgcctgccttctatcctggcaccagcggctcttgttctggctgtggatctctgagcctgcctctgctggctggactggttgctgctgatgctgtggcctctctgctgattgtgggagccgtgttcctgtgcgccagacctagaagaagccccgctcaagaggacggcaaggtgtacatcaacatgcccggcagaggaagggccaagcgatctggatctggagcaacaaacttctcactactcaaacaagcaggtgacgtggaggagaatcccgggcctactagtatggactggatttggcgcatccttttccttgtcggcgctgctaccggcgcgcattccttcgaagaaaatgtggaacagcaccccagcacactgagcgtgcaagagggcgatagcgccgtgattaagtgcacctacagcgacagcgccagcaactacttcccctggtacaagcaagagctgggcaaaagaccccagctcatcatcgacatccggtccaacgtgggcgagaagaaggaccagagaatcgccgtgacactgaacaagaccgccaagcacttcagcctgcacatcaccgagacacagcctgaggattccgccgtgtacttttgtgccgccaccgaggactaccagctgatttggggagccggcaccaagctgattatcaagcctgacacgcgtatccagaaccctgatcctgccgtgtaccagctgcgggatagcaagagcagcgacaagagcgtgtgtctgttcaccgacttcgacagccagaccaacgtgtcccagagcaaggactccgacgtgtacatcaccgataagaccgtgctggacatgcggagcatggacttcaagagcaactccgccgtggcctggtccaacaagtccgatttcgcctgcgccaacgccttcaacaacagcattatccccgaggacacattcttcccaagccccgagagcagctgcggtaccacaacacctggcgagagaagtagcctgcctgccttctatcctggcaccagcggctcttgttctggctgtggatctctgagcctgcctctgctggctggactggttgctgctgatgctgtggcctctctgctgattgtgggagccgtgttctggcggcggaagcggaaagagaagcagtctgagacaagccccaaagagttcctgaccatctacgaggacgtgaaggacctgaaaacccggcggaaccacgaacaagagcagacctttcctggcggaggcagcaccatctacagcatgatccagagccagagcagcgcccctacaagccaagagcctgcctacacactgtactccctgatccagcctagcagaaagagcggcagccggaagagaaatcacagccccagcttcaacagcacgatctacgaagtgatcggcaagagccagccaaaggctcagaaccctgccagactgagccggaaagagctggaaaacttcgacgtgtacagcctgtgcgccagacctagaagaagccccgctcaagaggacggcaaggtgtacatcaacatgcccggcagaggataa

SEQ ID NO: 2504 - DNA, 2235 bp, synthetic construct
  source 1..2235: mol_type = other DNA
atggccttaccagtgaccgccttgctcctgccgctggccttgctgctccacgccgccaggccggaattcggcattacacagagccccaagtacctgttcagaaaagagggccagaacgtcaccctgagctgcgagcagaacctgaaccacgacgccatgtactggtacagacaggacccaggccagggcctgagactgatctactacagccagatcgtgaacgacttccagaagggcgacattgccgagggctacagcgtgtccagagagaagaaagagtcctttccactgaccgtgacaagcgcccagaagaaccctaccgccttctacctgtgtgccagctctcctggcgctctgtacgagcagtatttcggccctggcaccagactgacagttacactcgaggacctgaagaacgtgttcccacctgaggtggccgtgttcgagcctagcgaggccgagatcagccacacccagaaagccaccctcgtgtgcctggctaccggcttctaccccgaccatgtggaactgtcttggtgggtcaacggcaaagaggtgcacagcggcgtgtctaccgacccccagccactgaaagaacagcccgccctgaacgacagccggtactgcctgagcagcagactgagagtgtccgccaccttctggcagaacccccggaaccacttcagatgccaggtgcagttctacggcctgagcgagaacgacgagtggacccaggacagagccaagcccgtgacccagatcgtgtctgccgaagcctggggcagagccgattgcggatccctgggagagcctcagctgtgctatatcctggacgccatcctgtttctgtacggcatcgtgctgaccctgctgtactgcaaacggggcagaaagaaactcctgtatatattcaaacaaccatttatgagaccagtacaaactactcaagaggaagatggctgtagctgccgatttccagaagaagaagaaggaggatgtgaactgcggctgaagatccaagtgcggaaggccgccatcaccagctacgagaaatccgacggcgtgtacaccggcctgagcaccagaaatcaagagacatacgagacactgaagcacgaaaagcctccacaaagggccaagcgatctggatctggagcaacaaacttctcactactcaaacaagcaggtgacgtggaggagaatcccgggcctactagtatggactggatttggcgcatccttttccttgtcggcgctgctaccggcgcgcattccttcgaagaaaatgtggaacagcaccccagcacactgagcgtgcaagagggcgatagcgccgtgattaagtgcacctacagcgacagcgccagcaactacttcccctggtacaagcaagagctgggcaaaagaccccagctcatcatcgacatccggtccaacgtgggcgagaagaaggaccagagaatcgccgtgacactgaacaagaccgccaagcacttcagcctgcacatcaccgagacacagcctgaggattccgccgtgtacttttgtgccgccaccgaggactaccagctgatttggggagccggcaccaagctgattatcaagcctgacacgcgtatccagaaccctgatcctgccgtgtaccagctgcgggatagcaagagcagcgacaagagcgtgtgtctgttcaccgacttcgacagccagaccaacgtgtcccagagcaaggactccgacgtgtacatcaccgataagaccgtgctggacatgcggagcatggacttcaagagcaactccgccgtggcctggtccaacaagtccgatttcgcctgcgccaacgccttcaacaacagcattatccccgaggacacattcttcccaagccccgagagcagctgcggtaccctgggagagcctcagctgtgctatatcctggacgccatcctgtttctgtacggcatcgtgctgaccctgctgtactgcaggagtaagaggagcaggctcctgcacagtgactacatgaacatgactccacgccgccccggacccacccgcaagcattaccagccctatgccccaccacgcgacttcgcagcctatcgctcccggctgaagatccaagtgcggaaggccgccatcaccagctacgagaaatccgacggcgtgtacaccggcctgagcaccagaaatcaagagacatacgagacactgaagcacgaaaagcctccacaataa

SEQ ID NO: 2505 - DNA, 2220 bp, synthetic construct
  source 1..2220: mol_type = other DNA
atggccttaccagtgaccgccttgctcctgccgctggccttgctgctccacgccgccaggccggaattcggcattacacagagccccaagtacctgttcagaaaagagggccagaacgtcaccctgagctgcgagcagaacctgaaccacgacgccatgtactggtacagacaggacccaggccagggcctgagactgatctactacagccagatcgtgaacgacttccagaagggcgacattgccgagggctacagcgtgtccagagagaagaaagagtcctttccactgaccgtgacaagcgcccagaagaaccctaccgccttctacctgtgtgccagctctcctggcgctctgtacgagcagtatttcggccctggcaccagactgacagttacactcgaggacctgaagaacgtgttcccacctgaggtggccgtgttcgagcctagcgaggccgagatcagccacacccagaaagccaccctcgtgtgcctggctaccggcttctaccccgaccatgtggaactgtcttggtgggtcaacggcaaagaggtgcacagcggcgtgtctaccgacccccagccactgaaagaacagcccgccctgaacgacagccggtactgcctgagcagcagactgagagtgtccgccaccttctggcagaacccccggaaccacttcagatgccaggtgcagttctacggcctgagcgagaacgacgagtggacccaggacagagccaagcccgtgacccagatcgtgtctgccgaagcctggggcagagccgattgcggatccctgggagagcctcagctgtgctatatcctggacgccatcctgtttctgtacggcatcgtgctgaccctgctgtactgcaaacggggcagaaagaaactcctgtatatattcaaacaaccatttatgagaccagtacaaactactcaagaggaagatggctgtagctgccgatttccagaagaagaagaaggaggatgtgaactgcggctgaagatccaagtgcggaaggccgccatcaccagctacgagaaatccgacggcgtgtacaccggcctgagcaccagaaatcaagagacatacgagacactgaagcacgaaaagcctccacaaagggccaagcgatctggatctggagcaacaaacttctcactactcaaacaagcaggtgacgtggaggagaatcccgggcctactagtatggactggatttggcgcatccttttccttgtcggcgctgctaccggcgcgcattccttcgaagaaaatgtggaacagcaccccagcacactgagcgtgcaagagggcgatagcgccgtgattaagtgcacctacagcgacagcgccagcaactacttcccctggtacaagcaagagctgggcaaaagaccccagctcatcatcgacatccggtccaacgtgggcgagaagaaggaccagagaatcgccgtgacactgaacaagaccgccaagcacttcagcctgcacatcaccgagacacagcctgaggattccgccgtgtacttttgtgccgccaccgaggactaccagctgatttggggagccggcaccaagctgattatcaagcctgacacgcgtatccagaaccctgatcctgccgtgtaccagctgcgggatagcaagagcagcgacaagagcgtgtgtctgttcaccgacttcgacagccagaccaacgtgtcccagagcaaggactccgacgtgtacatcaccgataagaccgtgctggacatgcggagcatggacttcaagagcaactccgccgtggcctggtccaacaagtccgatttcgcctgcgccaacgccttcaacaacagcattatccccgaggacacattcttcccaagccccgagagcagctgcggtaccctgggagagcctcagctgtgctatatcctggacgccatcctgtttctgtacggcatcgtgctgaccctgctgtactgcagggaccaaagactgcctcctgacgctcacaaacctccaggcggaggcagcttcagaacccctatccaagaggaacaggctgacgcccacagcaccctggcaaaaattcggctgaagatccaagtgcggaaggccgccatcaccagctacgagaaatccgacggcgtgtacaccggcctgagcaccagaaatcaagagacatacgagacactgaagcacgaaaagcctccacaataa

SEQ ID NO: 2506 - DNA, 2472 bp, synthetic construct
  source 1..2472: mol_type = other DNA
atggccttaccagtgaccgccttgctcctgccgctggccttgctgctccacgccgccaggccggaattcggcattacacagagccccaagtacctgttcagaaaagagggccagaacgtcaccctgagctgcgagcagaacctgaaccacgacgccatgtactggtacagacaggacccaggccagggcctgagactgatctactacagccagatcgtgaacgacttccagaagggcgacattgccgagggctacagcgtgtccagagagaagaaagagtcctttccactgaccgtgacaagcgcccagaagaaccctaccgccttctacctgtgtgccagctctcctggcgctctgtacgagcagtatttcggccctggcaccagactgacagttacactcgaggacctgaagaacgtgttcccacctgaggtggccgtgttcgagcctagcgaggccgagatcagccacacccagaaagccaccctcgtgtgcctggctaccggcttctaccccgaccatgtggaactgtcttggtgggtcaacggcaaagaggtgcacagcggcgtgtctaccgacccccagccactgaaagaacagcccgccctgaacgacagccggtactgcctgagcagcagactgagagtgtccgccaccttctggcagaacccccggaaccacttcagatgccaggtgcagttctacggcctgagcgagaacgacgagtggacccaggacagagccaagcccgtgacccagatcgtgtctgccgaagcctggggcagagccgattgcggatccctgggagagcctcagctgtgctatatcctggacgccatcctgtttctgtacggcatcgtgctgaccctgctgtactgcaaacggggcagaaagaaactcctgtatatattcaaacaaccatttatgagaccagtacaaactactcaagaggaagatggctgtagctgccgatttccagaagaagaagaaggaggatgtgaactgcggctgaagatccaagtgcggaaggccgccatcaccagctacgagaaatccgacggcgtgtacaccggcctgagcaccagaaatcaagagacatacgagacactgaagcacgaaaagcctccacaaagggccaagcgatctggatctggagcaacaaacttctcactactcaaacaagcaggtgacgtggaggagaatcccgggcctactagtatggactggatttggcgcatccttttccttgtcggcgctgctaccggcgcgcattccttcgaagaaaatgtggaacagcaccccagcacactgagcgtgcaagagggcgatagcgccgtgattaagtgcacctacagcgacagcgccagcaactacttcccctggtacaagcaagagctgggcaaaagaccccagctcatcatcgacatccggtccaacgtgggcgagaagaaggaccagagaatcgccgtgacactgaacaagaccgccaagcacttcagcctgcacatcaccgagacacagcctgaggattccgccgtgtacttttgtgccgccaccgaggactaccagctgatttggggagccggcaccaagctgattatcaagcctgacacgcgtatccagaaccctgatcctgccgtgtaccagctgcgggatagcaagagcagcgacaagagcgtgtgtctgttcaccgacttcgacagccagaccaacgtgtcccagagcaaggactccgacgtgtacatcaccgataagaccgtgctggacatgcggagcatggacttcaagagcaactccgccgtggcctggtccaacaagtccgatttcgcctgcgccaacgccttcaacaacagcattatccccgaggacacattcttcccaagccccgagagcagctgcggtaccctgggagagcctcagctgtgctatatcctggacgccatcctgtttctgtacggcatcgtgctgaccctgctgtactgctggcggcggaagcggaaagagaagcagtctgagacaagccccaaagagttcctgaccatctacgaggacgtgaaggacctgaaaacccggcggaaccacgaacaagagcagacctttcctggcggaggcagcaccatctacagcatgatccagagccagagcagcgcccctacaagccaagagcctgcctacacactgtactccctgatccagcctagcagaaagagcggcagccggaagagaaatcacagccccagcttcaacagcacgatctacgaagtgatcggcaagagccagccaaaggctcagaaccctgccagactgagccggaaagagctggaaaacttcgacgtgtacagccggctgaagatccaagtgcggaaggccgccatcaccagctacgagaaatccgacggcgtgtacaccggcctgagcaccagaaatcaagagacatacgagacactgaagcacgaaaagcctccacaataa

SEQ ID NO: 2507 - DNA, 2238 bp, synthetic construct
  source 1..2238: mol_type = other DNA
atggccttaccagtgaccgccttgctcctgccgctggccttgctgctccacgccgccaggccggaattcggcattacacagagccccaagtacctgttcagaaaagagggccagaacgtcaccctgagctgcgagcagaacctgaaccacgacgccatgtactggtacagacaggacccaggccagggcctgagactgatctactacagccagatcgtgaacgacttccagaagggcgacattgccgagggctacagcgtgtccagagagaagaaagagtcctttccactgaccgtgacaagcgcccagaagaaccctaccgccttctacctgtgtgccagctctcctggcgctctgtacgagcagtatttcggccctggcaccagactgacagttacactcgaggacctgaagaacgtgttcccacctgaggtggccgtgttcgagcctagcgaggccgagatcagccacacccagaaagccaccctcgtgtgcctggctaccggcttctaccccgaccatgtggaactgtcttggtgggtcaacggcaaagaggtgcacagcggcgtgtctaccgacccccagccactgaaagaacagcccgccctgaacgacagccggtactgcctgagcagcagactgagagtgtccgccaccttctggcagaacccccggaaccacttcagatgccaggtgcagttctacggcctgagcgagaacgacgagtggacccaggacagagccaagcccgtgacccagatcgtgtctgccgaagcctggggcagagccgattgcggatccctgggagagcctcagctgtgctatatcctggacgccatcctgtttctgtacggcatcgtgctgaccctgctgtactgcaaacggggcagaaagaaactcctgtatatattcaaacaaccatttatgagaccagtacaaactactcaagaggaagatggctgtagctgccgatttccagaagaagaagaaggaggatgtgaactgcggctgaagatccaagtgcggaaggccgccatcaccagctacgagaaatccgacggcgtgtacaccggcctgagcaccagaaatcaagagacatacgagacactgaagcacgaaaagcctccacaaagggccaagcgatctggatctggagcaacaaacttctcactactcaaacaagcaggtgacgtggaggagaatcccgggcctactagtatggactggatttggcgcatccttttccttgtcggcgctgctaccggcgcgcattccttcgaagaaaatgtggaacagcaccccagcacactgagcgtgcaagagggcgatagcgccgtgattaagtgcacctacagcgacagcgccagcaactacttcccctggtacaagcaagagctgggcaaaagaccccagctcatcatcgacatccggtccaacgtgggcgagaagaaggaccagagaatcgccgtgacactgaacaagaccgccaagcacttcagcctgcacatcaccgagacacagcctgaggattccgccgtgtacttttgtgccgccaccgaggactaccagctgatttggggagccggcaccaagctgattatcaagcctgacacgcgtatccagaaccctgatcctgccgtgtaccagctgcgggatagcaagagcagcgacaagagcgtgtgtctgttcaccgacttcgacagccagaccaacgtgtcccagagcaaggactccgacgtgtacatcaccgataagaccgtgctggacatgcggagcatggacttcaagagcaactccgccgtggcctggtccaacaagtccgatttcgcctgcgccaacgccttcaacaacagcattatccccgaggacacattcttcccaagccccgagagcagctgcggtaccctcggagaaccacagctctgttacattctggatgctatcctgttcctctatgggatcgtcctgacactcctgtattgcaagagaggccggaagaagctgctgtacatcttcaagcagcctttcatgcggcccgtgcagaccacccaggaagaggacggctgctcctgccggttccccgaggaagaagaaggcggctgcgagctgagactcaaaattcaagttcgcaaagccgccattacctcttacgagaagagtgatggggtgtacacaggactgtctacccggaatcaagaaacctacgaaaccctcaaacatgagaagccacctcagtaa

SEQ ID NO: 2508 - DNA, 2235 bp, synthetic construct
  source 1..2235: mol_type = other DNA
atggccttaccagtgaccgccttgctcctgccgctggccttgctgctccacgccgccaggccggaattcggcattacacagagccccaagtacctgttcagaaaagagggccagaacgtcaccctgagctgcgagcagaacctgaaccacgacgccatgtactggtacagacaggacccaggccagggcctgagactgatctactacagccagatcgtgaacgacttccagaagggcgacattgccgagggctacagcgtgtccagagagaagaaagagtcctttccactgaccgtgacaagcgcccagaagaaccctaccgccttctacctgtgtgccagctctcctggcgctctgtacgagcagtatttcggccctggcaccagactgacagttacactcgaggacctgaagaacgtgttcccacctgaggtggccgtgttcgagcctagcgaggccgagatcagccacacccagaaagccaccctcgtgtgcctggctaccggcttctaccccgaccatgtggaactgtcttggtgggtcaacggcaaagaggtgcacagcggcgtgtctaccgacccccagccactgaaagaacagcccgccctgaacgacagccggtactgcctgagcagcagactgagagtgtccgccaccttctggcagaacccccggaaccacttcagatgccaggtgcagttctacggcctgagcgagaacgacgagtggacccaggacagagccaagcccgtgacccagatcgtgtctgccgaagcctggggcagagccgattgcggatccctgggagagcctcagctgtgctatatcctggacgccatcctgtttctgtacggcatcgtgctgaccctgctgtactgcaaacggggcagaaagaaactcctgtatatattcaaacaaccatttatgagaccagtacaaactactcaagaggaagatggctgtagctgccgatttccagaagaagaagaaggaggatgtgaactgcggctgaagatccaagtgcggaaggccgccatcaccagctacgagaaatccgacggcgtgtacaccggcctgagcaccagaaatcaagagacatacgagacactgaagcacgaaaagcctccacaaagggccaagcgatctggatctggagcaacaaacttctcactactcaaacaagcaggtgacgtggaggagaatcccgggcctactagtatggactggatttggcgcatccttttccttgtcggcgctgctaccggcgcgcattccttcgaagaaaatgtggaacagcaccccagcacactgagcgtgcaagagggcgatagcgccgtgattaagtgcacctacagcgacagcgccagcaactacttcccctggtacaagcaagagctgggcaaaagaccccagctcatcatcgacatccggtccaacgtgggcgagaagaaggaccagagaatcgccgtgacactgaacaagaccgccaagcacttcagcctgcacatcaccgagacacagcctgaggattccgccgtgtacttttgtgccgccaccgaggactaccagctgatttggggagccggcaccaagctgattatcaagcctgacacgcgtatccagaaccctgatcctgccgtgtaccagctgcgggatagcaagagcagcgacaagagcgtgtgtctgttcaccgacttcgacagccagaccaacgtgtcccagagcaaggactccgacgtgtacatcaccgataagaccgtgctggacatgcggagcatggacttcaagagcaactccgccgtggcctggtccaacaagtccgatttcgcctgcgccaacgccttcaacaacagcattatccccgaggacacattcttcccaagccccgagagcagctgcggtaccctcggagaaccacagctctgttacattctggatgctatcctgttcctctatgggatcgtcctgacactcctgtattgcaggagcaagcggtcacggctgctccacagcgattacatgaatatgacaccacgaagaccgggtcctactcgcaaacactaccaaccctacgcacctccccgcgactttgcagcgtaccgatctagactcaaaattcaagttcgcaaagccgccattacctcttacgagaagagtgatggggtgtacacaggactgtctacccggaatcaagaaacctacgaaaccctcaaacatgagaagccacctcagtaa

SEQ ID NO: 2509 - DNA, 2232 bp, synthetic construct
  source 1..2232: mol_type = other DNA
atggccttaccagtgaccgccttgctcctgccgctggccttgctgctccacgccgccaggccggaattcggcattacacagagccccaagtacctgttcagaaaagagggccagaacgtcaccctgagctgcgagcagaacctgaaccacgacgccatgtactggtacagacaggacccaggccagggcctgagactgatctactacagccagatcgtgaacgacttccagaagggcgacattgccgagggctacagcgtgtccagagagaagaaagagtcctttccactgaccgtgacaagcgcccagaagaaccctaccgccttctacctgtgtgccagctctcctggcgctctgtacgagcagtatttcggccctggcaccagactgacagttacactcgaggacctgaagaacgtgttcccacctgaggtggccgtgttcgagcctagcgaggccgagatcagccacacccagaaagccaccctcgtgtgcctggctaccggcttctaccccgaccatgtggaactgtcttggtgggtcaacggcaaagaggtgcacagcggcgtgtctaccgacccccagccactgaaagaacagcccgccctgaacgacagccggtactgcctgagcagcagactgagagtgtccgccaccttctggcagaacccccggaaccacttcagatgccaggtgcagttctacggcctgagcgagaacgacgagtggacccaggacagagccaagcccgtgacccagatcgtgtctgccgaagcctggggcagagccgattgcggatccctgggagagcctcagctgtgctatatcctggacgccatcctgtttctgtacggcatcgtgctgaccctgctgtactgcaggagtaagaggagcaggctcctgcacagtgactacatgaacatgactccacgccgccccggacccacccgcaagcattaccagccctatgccccaccacgcgacttcgcagcctatcgctcccggctgaagatccaagtgcggaaggccgccatcaccagctacgagaaatccgacggcgtgtacaccggcctgagcaccagaaatcaagagacatacgagacactgaagcacgaaaagcctccacaaagggccaagcgatctggatctggagcaacaaacttctcactactcaaacaagcaggtgacgtggaggagaatcccgggcctactagtatggactggatttggcgcatccttttccttgtcggcgctgctaccggcgcgcattccttcgaagaaaatgtggaacagcaccccagcacactgagcgtgcaagagggcgatagcgccgtgattaagtgcacctacagcgacagcgccagcaactacttcccctggtacaagcaagagctgggcaaaagaccccagctcatcatcgacatccggtccaacgtgggcgagaagaaggaccagagaatcgccgtgacactgaacaagaccgccaagcacttcagcctgcacatcaccgagacacagcctgaggattccgccgtgtacttttgtgccgccaccgaggactaccagctgatttggggagccggcaccaagctgattatcaagcctgacacgcgtatccagaaccctgatcctgccgtgtaccagctgcgggatagcaagagcagcgacaagagcgtgtgtctgttcaccgacttcgacagccagaccaacgtgtcccagagcaaggactccgacgtgtacatcaccgataagaccgtgctggacatgcggagcatggacttcaagagcaactccgccgtggcctggtccaacaagtccgatttcgcctgcgccaacgccttcaacaacagcattatccccgaggacacattcttcccaagccccgagagcagctgcggtaccctcggagaaccacagctctgttacattctggatgctatcctgttcctctatgggatcgtcctgacactcctgtattgcaggagcaagcggtcacggctgctccacagcgattacatgaatatgacaccacgaagaccgggtcctactcgcaaacactaccaaccctacgcacctccccgcgactttgcagcgtaccgatctagactcaaaattcaagttcgcaaagccgccattacctcttacgagaagagtgatggggtgtacacaggactgtctacccggaatcaagaaacctacgaaaccctcaaacatgagaagccacctcagtaa

SEQ ID NO: 2510 - DNA, 1986 bp, synthetic construct
  source 1..1986: mol_type = other DNA
atggccttaccagtgaccgccttgctcctgccgctggccttgctgctccacgccgccaggccggaattcggcattacacagagccccaagtacctgttcagaaaagagggccagaacgtcaccctgagctgcgagcagaacctgaaccacgacgccatgtactggtacagacaggacccaggccagggcctgagactgatctactacagccagatcgtgaacgacttccagaagggcgacattgccgagggctacagcgtgtccagagagaagaaagagtcctttccactgaccgtgacaagcgcccagaagaaccctaccgccttctacctgtgtgccagctctcctggcgctctgtacgagcagtatttcggccctggcaccagactgacagttacactcgaggacctgaagaacgtgttcccacctgaggtggccgtgttcgagcctagcgaggccgagatcagccacacccagaaagccaccctcgtgtgcctggctaccggcttctaccccgaccatgtggaactgtcttggtgggtcaacggcaaagaggtgcacagcggcgtgtctaccgacccccagccactgaaagaacagcccgccctgaacgacagccggtactgcctgagcagcagactgagagtgtccgccaccttctggcagaacccccggaaccacttcagatgccaggtgcagttctacggcctgagcgagaacgacgagtggacccaggacagagccaagcccgtgacccagatcgtgtctgccgaagcctggggcagagccgattgcggatccctgggagagcctcagctgagctatatcctggacgccatcctgtttctgtacggcatcgtgctgaccctgctgtactgccggctgaagatccaagtgcggaaggccgccatcaccagctacgagaaatccgacggcgtgtacaccggcctgagcaccagaaatcaagagacatacgagacactgaagcacgaaaagcctccacaaagggccaagcgatctggatctggagcaacaaacttctcactactcaaacaagcaggtgacgtggaggagaatcccgggcctactagtatggactggatttggcgcatccttttccttgtcggcgctgctaccggcgcgcattccttcgaagaaaatgtggaacagcaccccagcacactgagcgtgcaagagggcgatagcgccgtgattaagtgcacctacagcgacagcgccagcaactacttcccctggtacaagcaagagctgggcaaaagaccccagctcatcatcgacatccggtccaacgtgggcgagaagaaggaccagagaatcgccgtgacactgaacaagaccgccaagcacttcagcctgcacatcaccgagacacagcctgaggattccgccgtgtacttttgtgccgccaccgaggactaccagctgatttggggagccggcaccaagctgattatcaagcctgacacgcgtatccagaaccctgatcctgccgtgtaccagctgcgggatagcaagagcagcgacaagagcgtgtgtctgttcaccgacttcgacagccagaccaacgtgtcccagagcaaggactccgacgtgtacatcaccgataagaccgtgctggacatgcggagcatggacttcaagagcaactccgccgtggcctggtccaacaagtccgatttcgcctgcgccaacgccttcaacaacagcattatccccgaggacacattcttcccaagccccgagagcagctgcggtaccctcggagaaccacagctctcttacattctggatgctatcctgttcctctatgggatcgtcctgacactcctgtattgcagactcaaaattcaagttcgcaaagccgccattacctcttacgagaagagtgatggggtgtacacaggactgtctacccggaatcaagaaacctacgaaaccctcaaacatgagaagccacctcagtaa

SEQ ID NO: 2511 - DNA, 2094 bp, synthetic construct
  source 1..2094: mol_type = other DNA
atggccttaccagtgaccgccttgctcctgccgctggccttgctgctccacgccgccaggccggaattcggcattacacagagccccaagtacctgttcagaaaagagggccagaacgtcaccctgagctgcgagcagaacctgaaccacgacgccatgtactggtacagacaggacccaggccagggcctgagactgatctactacagccagatcgtgaacgacttccagaagggcgacattgccgagggctacagcgtgtccagagagaagaaagagtcctttccactgaccgtgacaagcgcccagaagaaccctaccgccttctacctgtgtgccagctctcctggcgctctgtacgagcagtatttcggccctggcaccagactgacagttacactcgaggacctgaagaacgtgttcccacctgaggtggccgtgttcgagcctagcgaggccgagatcagccacacccagaaagccaccctcgtgtgcctggctaccggcttctaccccgaccatgtggaactgtcttggtgggtcaacggcaaagaggtgcacagcggcgtgtctaccgacccccagccactgaaagaacagcccgccctgaacgacagccggtactgcctgagcagcagactgagagtgtccgccaccttctggcagaacccccggaaccacttcagatgccaggtgcagttctacggcctgagcgagaacgacgagtggacccaggacagagccaagcccgtgacccagatcgtgtctgccgaagcctggggcagagccgattgcggatcccaggctcagagcgattgcagctgtagcacagtgtctccaggcgtgctggccggaattgtgatgggcgatctggtgctgacagtgctgattgccctggccgtgtacttcctgggtagactggtgcctagaggaagaggcgctgccgaagccgccacaagaaagcagagaatcaccgagacagagagcccctaccaagagctgcaaggccagagaagcgacgtgtacagcgacctgaatacccagcggccttactacaaaagggccaagcgatctggatctggagcaacaaacttctcactactcaaacaagcaggtgacgtggaggagaatcccgggcctactagtatggactggatttggcgcatccttttccttgtcggcgctgctaccggcgcgcattccttcgaagaaaatgtggaacagcaccccagcacactgagcgtgcaagagggcgatagcgccgtgattaagtgcacctacagcgacagcgccagcaactacttcccctggtacaagcaagagctgggcaaaagaccccagctcatcatcgacatccggtccaacgtgggcgagaagaaggaccagagaatcgccgtgacactgaacaagaccgccaagcacttcagcctgcacatcaccgagacacagcctgaggattccgccgtgtacttttgtgccgccaccgaggactaccagctgatttggggagccggcaccaagctgattatcaagcctgacacgcgtatccagaaccctgatcctgccgtgtaccagctgcgggatagcaagagcagcgacaagagcgtgtgtctgttcaccgacttcgacagccagaccaacgtgtcccagagcaaggactccgacgtgtacatcaccgataagaccgtgctggacatgcggagcatggacttcaagagcaactccgccgtggcctggtccaacaagtccgatttcgcctgcgccaacgccttcaacaacagcattatccccgaggacacattcttcccaagccccgagagcagctgcggtacccaggctcagagcgattgcagctctagcacagtgtctccaggcgtgctggccggaattgtgatgggcgatctggtgctgacagtgctgattgccctggccgtgtacttcctgggtagactggtgcctagaggaagaggcgctgccgaagccgccacaagaaagcagagaatcaccgagacagagagcccctaccaagagctgcaaggccagagaagcgacgtgtacagcgacctgaatacccagcggccttactacaaataa

SEQ ID NO: 2512 - DNA, 2220 bp, synthetic construct
  source 1..2220: mol_type = other DNA
atggccttaccagtgaccgccttgctcctgccgctggccttgctgctccacgccgccaggccggaattcggcattacacagagccccaagtacctgttcagaaaagagggccagaacgtcaccctgagctgcgagcagaacctgaaccacgacgccatgtactggtacagacaggacccaggccagggcctgagactgatctactacagccagatcgtgaacgacttccagaagggcgacattgccgagggctacagcgtgtccagagagaagaaagagtcctttccactgaccgtgacaagcgcccagaagaaccctaccgccttctacctgtgtgccagctctcctggcgctctgtacgagcagtatttcggccctggcaccagactgacagttacactcgaggacctgaagaacgtgttcccacctgaggtggccgtgttcgagcctagcgaggccgagatcagccacacccagaaagccaccctcgtgtgcctggctaccggcttctaccccgaccatgtggaactgtcttggtgggtcaacggcaaagaggtgcacagcggcgtgtctaccgacccccagccactgaaagaacagcccgccctgaacgacagccggtactgcctgagcagcagactgagagtgtccgccaccttctggcagaacccccggaaccacttcagatgccaggtgcagttctacggcctgagcgagaacgacgagtggacccaggacagagccaagcccgtgacccagatcgtgtctgccgaagcctggggcagagccgattgcggatcccaggctcagagcgattgcagctgtagcacagtgtctccaggcgtgctggccggaattgtgatgggcgatctggtgctgacagtgctgattgccctggccgtgtacttcctgggtagactggtgcctagaggaagaggcgctgccgaagccgccacaagaaagcagagaatcaccgagacagagagcccctaccaagagctgcaaggccagagaagcgacgtgtacagcgacctgaatacccagcggccttactacaaaagggccaagcgatctggatctggagcaacaaacttctcactactcaaacaagcaggtgacgtggaggagaatcccgggcctactagtatggactggatttggcgcatccttttccttgtcggcgctgctaccggcgcgcattccttcgaagaaaatgtggaacagcaccccagcacactgagcgtgcaagagggcgatagcgccgtgattaagtgcacctacagcgacagcgccagcaactacttcccctggtacaagcaagagctgggcaaaagaccccagctcatcatcgacatccggtccaacgtgggcgagaagaaggaccagagaatcgccgtgacactgaacaagaccgccaagcacttcagcctgcacatcaccgagacacagcctgaggattccgccgtgtacttttgtgccgccaccgaggactaccagctgatttggggagccggcaccaagctgattatcaagcctgacacgcgtatccagaaccctgatcctgccgtgtaccagctgcgggatagcaagagcagcgacaagagcgtgtgtctgttcaccgacttcgacagccagaccaacgtgtcccagagcaaggactccgacgtgtacatcaccgataagaccgtgctggacatgcggagcatggacttcaagagcaactccgccgtggcctggtccaacaagtccgatttcgcctgcgccaacgccttcaacaacagcattatccccgaggacacattcttcccaagccccgagagcagctgcggtacccaggctcagagcgattgcagctgtagcacagtgtctccaggcgtgctggccggaattgtgatgggcgatctggtgctgacagtgctgattgccctggccgtgtacttcctgggtagactggtgcctagaggaagaggcgctgccgaagccgccacaagaaagcagagaatcaccgagacagagagcccctaccaagagctgcaaggccagagaagcgacgtgtacagcgacctgaatacccagaaacggggcagaaagaaactcctgtatatattcaaacaaccatttatgagaccagtacaaactactcaagaggaagatggctgtagctgccgatttccagaagaagaagaaggaggatgtgaactgcggccttactacaaataa

SEQ ID NO: 2513 - DNA, 2217 bp, synthetic construct
  source 1..2217: mol_type = other DNA
atggccttaccagtgaccgccttgctcctgccgctggccttgctgctccacgccgccaggccggaattcggcattacacagagccccaagtacctgttcagaaaagagggccagaacgtcaccctgagctgcgagcagaacctgaaccacgacgccatgtactggtacagacaggacccaggccagggcctgagactgatctactacagccagatcgtgaacgacttccagaagggcgacattgccgagggctacagcgtgtccagagagaagaaagagtcctttccactgaccgtgacaagcgcccagaagaaccctaccgccttctacctgtgtgccagctctcctggcgctctgtacgagcagtatttcggccctggcaccagactgacagttacactcgaggacctgaagaacgtgttcccacctgaggtggccgtgttcgagcctagcgaggccgagatcagccacacccagaaagccaccctcgtgtgcctggctaccggcttctaccccgaccatgtggaactgtcttggtgggtcaacggcaaagaggtgcacagcggcgtgtctaccgacccccagccactgaaagaacagcccgccctgaacgacagccggtactgcctgagcagcagactgagagtgtccgccaccttctggcagaacccccggaaccacttcagatgccaggtgcagttctacggcctgagcgagaacgacgagtggacccaggacagagccaagcccgtgacccagatcgtgtctgccgaagcctggggcagagccgattgcggatcccaggctcagagcgattgcagctgtagcacagtgtctccaggcgtgctggccggaattgtgatgggcgatctggtgctgacagtgctgattgccctggccgtgtacttcctgggtagactggtgcctagaggaagaggcgctgccgaagccgccacaagaaagcagagaatcaccgagacagagagcccctaccaagagctgcaaggccagagaagcgacgtgtacagcgacctgaatacccagcggccttactacaaaagggccaagcgatctggatctggagcaacaaacttctcactactcaaacaagcaggtgacgtggaggagaatcccgggcctactagtatggactggatttggcgcatccttttccttgtcggcgctgctaccggcgcgcattccttcgaagaaaatgtggaacagcaccccagcacactgagcgtgcaagagggcgatagcgccgtgattaagtgcacctacagcgacagcgccagcaactacttcccctggtacaagcaagagctgggcaaaagaccccagctcatcatcgacatccggtccaacgtgggcgagaagaaggaccagagaatcgccgtgacactgaacaagaccgccaagcacttcagcctgcacatcaccgagacacagcctgaggattccgccgtgtacttttgtgccgccaccgaggactaccagctgatttggggagccggcaccaagctgattatcaagcctgacacgcgtatccagaaccctgatcctgccgtgtaccagctgcgggatagcaagagcagcgacaagagcgtgtgtctgttcaccgacttcgacagccagaccaacgtgtcccagagcaaggactccgacgtgtacatcaccgataagaccgtgctggacatgcggagcatggacttcaagagcaactccgccgtggcctggtccaacaagtccgatttcgcctgcgccaacgccttcaacaacagcattatccccgaggacacattcttcccaagccccgagagcagctgcggtacccaggctcagagcgattgcagctgtagcacagtgtctccaggcgtgctggccggaattgtgatgggcgatctggtgctgacagtgctgattgccctggccgtgtacttcctgggtagactggtgcctagaggaagaggcgctgccgaagccgccacaagaaagcagagaatcaccgagacagagagcccctaccaagagctgcaaggccagagaagcgacgtgtacagcgacctgaatacccagaggagcaagcggtcacggctgctccacagcgattacatgaatatgacaccacgaagaccgggtcctactcgcaaacactaccaaccctacgcacctccccgcgactttgcagcgtaccgatctcggccttactacaaataa

SEQ ID NO: 2514 - DNA, 2202 bp, synthetic construct
  source 1..2202: mol_type = other DNA
atggccttaccagtgaccgccttgctcctgccgctggccttgctgctccacgccgccaggccggaattcggcattacacagagccccaagtacctgttcagaaaagagggccagaacgtcaccctgagctgcgagcagaacctgaaccacgacgccatgtactggtacagacaggacccaggccagggcctgagactgatctactacagccagatcgtgaacgacttccagaagggcgacattgccgagggctacagcgtgtccagagagaagaaagagtcctttccactgaccgtgacaagcgcccagaagaaccctaccgccttctacctgtgtgccagctctcctggcgctctgtacgagcagtatttcggccctggcaccagactgacagttacactcgaggacctgaagaacgtgttcccacctgaggtggccgtgttcgagcctagcgaggccgagatcagccacacccagaaagccaccctcgtgtgcctggctaccggcttctaccccgaccatgtggaactgtcttggtgggtcaacggcaaagaggtgcacagcggcgtgtctaccgacccccagccactgaaagaacagcccgccctgaacgacagccggtactgcctgagcagcagactgagagtgtccgccaccttctggcagaacccccggaaccacttcagatgccaggtgcagttctacggcctgagcgagaacgacgagtggacccaggacagagccaagcccgtgacccagatcgtgtctgccgaagcctggggcagagccgattgcggatcccaggctcagagcgattgcagctgtagcacagtgtctccaggcgtgctggccggaattgtgatgggcgatctggtgctgacagtgctgattgccctggccgtgtacttcctgggtagactggtgcctagaggaagaggcgctgccgaagccgccacaagaaagcagagaatcaccgagacagagagcccctaccaagagctgcaaggccagagaagcgacgtgtacagcgacctgaatacccagcggccttactacaaaagggccaagcgatctggatctggagcaacaaacttctcactactcaaacaagcaggtgacgtggaggagaatcccgggcctactagtatggactggatttggcgcatccttttccttgtcggcgctgctaccggcgcgcattccttcgaagaaaatgtggaacagcaccccagcacactgagcgtgcaagagggcgatagcgccgtgattaagtgcacctacagcgacagcgccagcaactacttcccctggtacaagcaagagctgggcaaaagaccccagctcatcatcgacatccggtccaacgtgggcgagaagaaggaccagagaatcgccgtgacactgaacaagaccgccaagcacttcagcctgcacatcaccgagacacagcctgaggattccgccgtgtacttttgtgccgccaccgaggactaccagctgatttggggagccggcaccaagctgattatcaagcctgacacgcgtatccagaaccctgatcctgccgtgtaccagctgcgggatagcaagagcagcgacaagagcgtgtgtctgttcaccgacttcgacagccagaccaacgtgtcccagagcaaggactccgacgtgtacatcaccgataagaccgtgctggacatgcggagcatggacttcaagagcaactccgccgtggcctggtccaacaagtccgatttcgcctgcgccaacgccttcaacaacagcattatccccgaggacacattcttcccaagccccgagagcagctgcggtacccaggctcagagcgattgcagctgtagcacagtgtctccaggcgtgctggccggaattgtgatgggcgatctggtgctgacagtgctgattgccctggccgtgtacttcctgggtagactggtgcctagaggaagaggcgctgccgaagccgccacaagaaagcagagaatcaccgagacagagagcccctaccaagagctgcaaggccagagaagcgacgtgtacagcgacctgaatacccagagggaccaaagactgcctcctgacgctcacaaacctccaggcggaggcagcttcagaacccctatccaagaggaacaggctgacgcccacagcaccctggcaaaaattcggccttactacaaataa

SEQ ID NO: 2515 - DNA, 2454 bp, synthetic construct
  source 1..2454: mol_type = other DNA
atggccttaccagtgaccgccttgctcctgccgctggccttgctgctccacgccgccaggccggaattcggcattacacagagccccaagtacctgttcagaaaagagggccagaacgtcaccctgagctgcgagcagaacctgaaccacgacgccatgtactggtacagacaggacccaggccagggcctgagactgatctactacagccagatcgtgaacgacttccagaagggcgacattgccgagggctacagcgtgtccagagagaagaaagagtcctttccactgaccgtgacaagcgcccagaagaaccctaccgccttctacctgtgtgccagctctcctggcgctctgtacgagcagtatttcggccctggcaccagactgacagttacactcgaggacctgaagaacgtgttcccacctgaggtggccgtgttcgagcctagcgaggccgagatcagccacacccagaaagccaccctcgtgtgcctggctaccggcttctaccccgaccatgtggaactgtcttggtgggtcaacggcaaagaggtgcacagcggcgtgtctaccgacccccagccactgaaagaacagcccgccctgaacgacagccggtactgcctgagcagcagactgagagtgtccgccaccttctggcagaacccccggaaccacttcagatgccaggtgcagttctacggcctgagcgagaacgacgagtggacccaggacagagccaagcccgtgacccagatcgtgtctgccgaagcctggggcagagccgattgcggatcccaggctcagagcgattgcagctgtagcacagtgtctccaggcgtgctggccggaattgtgatgggcgatctggtgctgacagtgctgattgccctggccgtgtacttcctgggtagactggtgcctagaggaagaggcgctgccgaagccgccacaagaaagcagagaatcaccgagacagagagcccctaccaagagctgcaaggccagagaagcgacgtgtacagcgacctgaatacccagcggccttactacaaaagggccaagcgatctggatctggagcaacaaacttctcactactcaaacaagcaggtgacgtggaggagaatcccgggcctactagtatggactggatttggcgcatccttttccttgtcggcgctgctaccggcgcgcattccttcgaagaaaatgtggaacagcaccccagcacactgagcgtgcaagagggcgatagcgccgtgattaagtgcacctacagcgacagcgccagcaactacttcccctggtacaagcaagagctgggcaaaagaccccagctcatcatcgacatccggtccaacgtgggcgagaagaaggaccagagaatcgccgtgacactgaacaagaccgccaagcacttcagcctgcacatcaccgagacacagcctgaggattccgccgtgtacttttgtgccgccaccgaggactaccagctgatttggggagccggcaccaagctgattatcaagcctgacacgcgtatccagaaccctgatcctgccgtgtaccagctgcgggatagcaagagcagcgacaagagcgtgtgtctgttcaccgacttcgacagccagaccaacgtgtcccagagcaaggactccgacgtgtacatcaccgataagaccgtgctggacatgcggagcatggacttcaagagcaactccgccgtggcctggtccaacaagtccgatttcgcctgcgccaacgccttcaacaacagcattatccccgaggacacattcttcccaagccccgagagcagctgcggtacccaggctcagagcgattgcagctgtagcacagtgtctccaggcgtgctggccggaattgtgatgggcgatctggtgctgacagtgctgattgccctggccgtgtacttcctgggtagactggtgcctagaggaagaggcgctgccgaagccgccacaagaaagcagagaatcaccgagacagagagcccctaccaagagctgcaaggccagagaagcgacgtgtacagcgacctgaatacccagtggcggcggaagcggaaagagaagcagtctgagacaagccccaaagagttcctgaccatctacgaggacgtgaaggacctgaaaacccggcggaaccacgaacaagagcagacctttcctggcggaggcagcaccatctacagcatgatccagagccagagcagcgcccctacaagccaagagcctgcctacacactgtactccctgatccagcctagcagaaagagcggcagccggaagagaaatcacagccccagcttcaacagcacgatctacgaagtgatcggcaagagccagccaaaggctcagaaccctgccagactgagccggaaagagctggaaaacttcgacgtgtacagccggccttactacaaataa

SEQ ID NO: 2516 - DNA, 2730 bp, synthetic construct
  source 1..2730: mol_type = other DNA
atggccttaccagtgaccgccttgctcctgccgctggccttgctgctccacgccgccaggccggaattcggcattacacagagccccaagtacctgttcagaaaagagggccagaacgtcaccctgagctgcgagcagaacctgaaccacgacgccatgtactggtacagacaggacccaggccagggcctgagactgatctactacagccagatcgtgaacgacttccagaagggcgacattgccgagggctacagcgtgtccagagagaagaaagagtcctttccactgaccgtgacaagcgcccagaagaaccctaccgccttctacctgtgtgccagctctcctggcgctctgtacgagcagtatttcggccctggcaccagactgacagttacactcgaggacctgaagaacgtgttcccacctgaggtggccgtgttcgagcctagcgaggccgagatcagccacacccagaaagccaccctcgtgtgcctggctaccggcttctaccccgaccatgtggaactgtcttggtgggtcaacggcaaagaggtgcacagcggcgtgtctaccgacccccagccactgaaagaacagcccgccctgaacgacagccggtactgcctgagcagcagactgagagtgtccgccaccttctggcagaacccccggaaccacttcagatgccaggtgcagttctacggcctgagcgagaacgacgagtggacccaggacagagccaagcccgtgacccagatcgtgtctgccgaagcctggggcagagccgattgcggatcccaggctcagagcgattgcagctgtagcacagtgtctccaggcgtgctggccggaattgtgatgggcgatctggtgctgacagtgctgattgccctggccgtgtacttcctgggtagactggtgcctagaggaagaggcgctgccgaagccgccacaagaaagcagagaatcaccgagacagagagcccctaccaagagctgcaaggccagagaagcgacgtgtacagcgacctgaatacccagagagtgaagttcagcagaagcgccgacgcccctgcctaccagcagggacagaaccaactgtacaacgagctgaacctgggcagacgggaagagtacgacgtgctggacaagcggagaggcagggaccctgagatgggcggaaagccccagcggagaaagaacccccaggaaggactgtataacgaactccagaaagacaagatggccgaagcctacagcgagatcggcatgaagggcgagcggagaagaggcaagggccacgatggcctgtaccagggcctgagcaccgccaccaaggacacctatgacgccctgcacatgcaggccctgcctccaagaagggccaagcgatctggatctggagcaacaaacttctcactactcaaacaagcaggtgacgtggaggagaatcccgggcctactagtatggactggatttggcgcatccttttccttgtcggcgctgctaccggcgcgcattccttcgaagaaaatgtggaacagcaccccagcacactgagcgtgcaagagggcgatagcgccgtgattaagtgcacctacagcgacagcgccagcaactacttcccctggtacaagcaagagctgggcaaaagaccccagctcatcatcgacatccggtccaacgtgggcgagaagaaggaccagagaatcgccgtgacactgaacaagaccgccaagcacttcagcctgcacatcaccgagacacagcctgaggattccgccgtgtacttttgtgccgccaccgaggactaccagctgatttggggagccggcaccaagctgattatcaagcctgacacgcgtatccagaaccctgatcctgccgtgtaccagctgcgggatagcaagagcagcgacaagagcgtgtgtctgttcaccgacttcgacagccagaccaacgtgtcccagagcaaggactccgacgtgtacatcaccgataagaccgtgctggacatgcggagcatggacttcaagagcaactccgccgtggcctggtccaacaagtccgatttcgcctgcgccaacgccttcaacaacagcattatccccgaggacacattcttcccaagccccgagagcagctgcggtaccacaacgccgggcgaaaggagttccttgccggccttttaccccggcacaagcggaagctgtagtgggtgtggaagcctcagcctcccacttcttgcgggcctcgtcgcggcagatgcagtagcttcacttcttattgtaggcgcggtatttctctgtgctcgaccaaggaggtcacccgctcaggaggatggtaaggtgtatataaatatgccaggacgcggaagctctagacgggttaagttttccagatccgcagacgcacccgcttaccaacaagggcagaaccaactctacaatgaacttaatttggggcggagggaagagtacgacgttctggacaaaaggaggggacgagatcccgagatgggcggaaagcctcagcgaaggaagaatccgcaagaggggctttataacgaactccagaaagataaaatggcagaagcctatagtgagattgggatgaagggagaaaggaggaggggtaaaggtcacgatgggttgtaccaaggattgagcacagccactaaagatacctatgatgcgctccacatgcaggccctgccgccaagataa

SEQ ID NO: 2517 - DNA, 2508 bp, synthetic construct
  source 1..2508: mol_type = other DNA
atggccttaccagtgaccgccttgctcctgccgctggccttgctgctccacgccgccaggccggaattcggcattacacagagccccaagtacctgttcagaaaagagggccagaacgtcaccctgagctgcgagcagaacctgaaccacgacgccatgtactggtacagacaggacccaggccagggcctgagactgatctactacagccagatcgtgaacgacttccagaagggcgacattgccgagggctacagcgtgtccagagagaagaaagagtcctttccactgaccgtgacaagcgcccagaagaaccctaccgccttctacctgtgtgccagctctcctggcgctctgtacgagcagtatttcggccctggcaccagactgacagttacactcgaggacctgaagaacgtgttcccacctgaggtggccgtgttcgagcctagcgaggccgagatcagccacacccagaaagccaccctcgtgtgcctggctaccggcttctaccccgaccatgtggaactgtcttggtgggtcaacggcaaagaggtgcacagcggcgtgtctaccgacccccagccactgaaagaacagcccgccctgaacgacagccggtactgcctgagcagcagactgagagtgtccgccaccttctggcagaacccccggaaccacttcagatgccaggtgcagttctacggcctgagcgagaacgacgagtggacccaggacagagccaagcccgtgacccagatcgtgtctgccgaagcctggggcagagccgattgcggatcccaggctcagagcgattgcagctgtagcacagtgtctccaggcgtgctggccggaattgtgatgggcgatctggtgctgacagtgctgattgccctggccgtgtacttcctgggtagactggtgcctagaggaagaggcgctgccgaagccgccacaagaaagcagagaatcaccgagacagagagcccctaccaagagctgcaaggccagagaagcgacgtgtacagcgacctgaatacccagagagtgaagttcagcagaagcgccgacgcccctgcctaccagcagggacagaaccaactgtacaacgagctgaacctgggcagacgggaagagtacgacgtgctggacaagcggagaggcagggaccctgagatgggcggaaagccccagcggagaaagaacccccaggaaggactgtataacgaactccagaaagacaagatggccgaagcctacagcgagatcggcatgaagggcgagcggagaagaggcaagggccacgatggcctgtaccagggcctgagcaccgccaccaaggacacctatgacgccctgcacatgcaggccctgcctccaagaagggccaagcgatctggatctggagcaacaaacttctcactactcaaacaagcaggtgacgtggaggagaatcccgggcctactagtatggactggatttggcgcatccttttccttgtcggcgctgctaccggcgcgcattccttcgaagaaaatgtggaacagcaccccagcacactgagcgtgcaagagggcgatagcgccgtgattaagtgcacctacagcgacagcgccagcaactacttcccctggtacaagcaagagctgggcaaaagaccccagctcatcatcgacatccggtccaacgtgggcgagaagaaggaccagagaatcgccgtgacactgaacaagaccgccaagcacttcagcctgcacatcaccgagacacagcctgaggattccgccgtgtacttttgtgccgccaccgaggactaccagctgatttggggagccggcaccaagctgattatcaagcctgacacgcgtatccagaaccctgatcctgccgtgtaccagctgcgggatagcaagagcagcgacaagagcgtgtgtctgttcaccgacttcgacagccagaccaacgtgtcccagagcaaggactccgacgtgtacatcaccgataagaccgtgctggacatgcggagcatggacttcaagagcaactccgccgtggcctggtccaacaagtccgatttcgcctgcgccaacgccttcaacaacagcattatccccgaggacacattcttcccaagccccgagagcagctgcggtaccacaacgccgggcgaaaggagttccttgccggccttttaccccggcacaagcggaagctgtagtgggtgtggaagcctcagcctcccacttcttgcgggcctcgtcgcggcagatgcagtagcttcacttcttattgtaggcgcggtatttaagagaggccggaagaagctgctgtacatcttcaagcagcctttcatgcggcccgtgcagaccacccaggaagaggacggctgctcctgccggttccccgaggaagaagaaggcggctgcgagctgctctgtgctcgaccaaggaggtcacccgctcaggaggatggtaaggtgtatataaatatgccaggacgcggataa

SEQ ID NO: 2518 - DNA, 2505 bp, synthetic construct
  source 1..2505: mol_type = other DNA
atggccttaccagtgaccgccttgctcctgccgctggccttgctgctccacgccgccaggccggaattcggcattacacagagccccaagtacctgttcagaaaagagggccagaacgtcaccctgagctgcgagcagaacctgaaccacgacgccatgtactggtacagacaggacccaggccagggcctgagactgatctactacagccagatcgtgaacgacttccagaagggcgacattgccgagggctacagcgtgtccagagagaagaaagagtcctttccactgaccgtgacaagcgcccagaagaaccctaccgccttctacctgtgtgccagctctcctggcgctctgtacgagcagtatttcggccctggcaccagactgacagttacactcgaggacctgaagaacgtgttcccacctgaggtggccgtgttcgagcctagcgaggccgagatcagccacacccagaaagccaccctcgtgtgcctggctaccggcttctaccccgaccatgtggaactgtcttggtgggtcaacggcaaagaggtgcacagcggcgtgtctaccgacccccagccactgaaagaacagcccgccctgaacgacagccggtactgcctgagcagcagactgagagtgtccgccaccttctggcagaacccccggaaccacttcagatgccaggtgcagttctacggcctgagcgagaacgacgagtggacccaggacagagccaagcccgtgacccagatcgtgtctgccgaagcctggggcagagccgattgcggatcccaggctcagagcgattgcagctgtagcacagtgtctccaggcgtgctggccggaattgtgatgggcgatctggtgctgacagtgctgattgccctggccgtgtacttcctgggtagactggtgcctagaggaagaggcgctgccgaagccgccacaagaaagcagagaatcaccgagacagagagcccctaccaagagctgcaaggccagagaagcgacgtgtacagcgacctgaatacccagagagtgaagttcagcagaagcgccgacgcccctgcctaccagcagggacagaaccaactgtacaacgagctgaacctgggcagacgggaagagtacgacgtgctggacaagcggagaggcagggaccctgagatgggcggaaagccccagcggagaaagaacccccaggaaggactgtataacgaactccagaaagacaagatggccgaagcctacagcgagatcggcatgaagggcgagcggagaagaggcaagggccacgatggcctgtaccagggcctgagcaccgccaccaaggacacctatgacgccctgcacatgcaggccctgcctccaagaagggccaagcgatctggatctggagcaacaaacttctcactactcaaacaagcaggtgacgtggaggagaatcccgggcctactagtatggactggatttggcgcatccttttccttgtcggcgctgctaccggcgcgcattccttcgaagaaaatgtggaacagcaccccagcacactgagcgtgcaagagggcgatagcgccgtgattaagtgcacctacagcgacagcgccagcaactacttcccctggtacaagcaagagctgggcaaaagaccccagctcatcatcgacatccggtccaacgtgggcgagaagaaggaccagagaatcgccgtgacactgaacaagaccgccaagcacttcagcctgcacatcaccgagacacagcctgaggattccgccgtgtacttttgtgccgccaccgaggactaccagctgatttggggagccggcaccaagctgattatcaagcctgacacgcgtatccagaaccctgatcctgccgtgtaccagctgcgggatagcaagagcagcgacaagagcgtgtgtctgttcaccgacttcgacagccagaccaacgtgtcccagagcaaggactccgacgtgtacatcaccgataagaccgtgctggacatgcggagcatggacttcaagagcaactccgccgtggcctggtccaacaagtccgatttcgcctgcgccaacgccttcaacaacagcattatccccgaggacacattcttcccaagccccgagagcagctgcggtaccacaacgccgggcgaaaggagttccttgccggccttttaccccggcacaagcggaagctgtagtgggtgtggaagcctcagcctcccacttcttgcgggcctcgtcgcggcagatgcagtagcttcacttcttattgtaggcgcggtatttaggagcaagcggtcacggctgctccacagcgattacatgaatatgacaccacgaagaccgggtcctactcgcaaacactaccaaccctacgcacctccccgcgactttgcagcgtaccgatctctctgtgctcgaccaaggaggtcacccgctcaggaggatggtaaggtgtatataaatatgccaggacgcggataa

SEQ ID NO: 2519 - DNA, 3240 bp, synthetic construct
  source 1..3240: mol_type = other DNA
atggccttaccagtgaccgccttgctcctgccgctggccttgctgctccacgccgccaggccggaattcggcattacacagagccccaagtacctgttcagaaaagagggccagaacgtcaccctgagctgcgagcagaacctgaaccacgacgccatgtactggtacagacaggacccaggccagggcctgagactgatctactacagccagatcgtgaacgacttccagaagggcgacattgccgagggctacagcgtgtccagagagaagaaagagtcctttccactgaccgtgacaagcgcccagaagaaccctaccgccttctacctgtgtgccagctctcctggcgctctgtacgagcagtatttcggccctggcaccagactgacagttacactcgaggacctgaagaacgtgttcccacctgaggtggccgtgttcgagcctagcgaggccgagatcagccacacccagaaagccaccctcgtgtgcctggctaccggcttctaccccgaccatgtggaactgtcttggtgggtcaacggcaaagaggtgcacagcggcgtgtctaccgacccccagccactgaaagaacagcccgccctgaacgacagccggtactgcctgagcagcagactgagagtgtccgccaccttctggcagaacccccggaaccacttcagatgccaggtgcagttctacggcctgagcgagaacgacgagtggacccaggacagagccaagcccgtgacccagatcgtgtctgccgaagcctggggcagagccgattgcggatcccagagcttcggcctgctggaccccaagctgtgctacctgctggatggcatcctgttcatctacggcgtgatcctgaccgccctgttcctgagagtgaagttcagcagaagcgccgacgcccctgcctaccagcagggacagaaccaactgtacaacgagctgaacctgggcagacgggaagagtacgacgtgctggacaagcggagaggcagggaccctgagatgggcggaaagccccagcggagaaagaacccccaggaaggactgtataacgaactccagaaagacaagatggccgaagcctacagcgagatcggcatgaagggcgagcggagaagaggcaagggccacgatggcctgtaccagggcctgagcaccgccaccaaggacacctatgacgccctgcacatgcaggccctgcctccaagaagggccaagcgatctggatctggagcaacaaacttctcactactcaaacaagcaggtgacgtggaggagaatcccgggcctactagtatggactggatttggcgcatccttttccttgtcggcgctgctaccggcgcgcattccttcgaagaaaatgtggaacagcaccccagcacactgagcgtgcaagagggcgatagcgccgtgattaagtgcacctacagcgacagcgccagcaactacttcccctggtacaagcaagagctgggcaaaagaccccagctcatcatcgacatccggtccaacgtgggcgagaagaaggaccagagaatcgccgtgacactgaacaagaccgccaagcacttcagcctgcacatcaccgagacacagcctgaggattccgccgtgtacttttgtgccgccaccgaggactaccagctgatttggggagccggcaccaagctgattatcaagcctgacacgcgtatccagaaccctgatcctgccgtgtaccagctgcgggatagcaagagcagcgacaagagcgtgtgtctgttcaccgacttcgacagccagaccaacgtgtcccagagcaaggactccgacgtgtacatcaccgataagaccgtgctggacatgcggagcatggacttcaagagcaactccgccgtggcctggtccaacaagtccgatttcgcctgcgccaacgccttcaacaacagcattatccccgaggacacattcttcccaagccccgagagcagctgcggtacccagagttttgggttgttggaccctaaattgtgctatctgttggacggaatcctgttcatttacggagtgatcctgaccgcattgttcctgcgggttaagttttccagatccgcagacgcacccgcttaccaacaagggcagaaccaactctacaatgaacttaatttggggcggagggaagagtacgacgttctggacaaaaggaggggacgagatcccgagatgggcggaaagcctcagcgaaggaagaatccgcaagaggggctttataacgaactccagaaagataaaatggcagaagcctatagtgagattgggatgaagggagaaaggaggaggggtaaaggtcacgatgggttgtaccaaggattgagcacagccactaaagatacctatgatgcgctccacatgcaggccctgccgccaagacgcgccaagagaagcggatctggcgtgaagcagaccctgaatttcgacctgctgaagctggctggcgacgtggaatccaacccaggcccttctagaggccatatggctctgcctgtgacagctctgctgctgcctctggcactgctgcttcatgctgctagacctagccagtttagagtgtcccctctggacagaacctggaacctgggcgagacagtggaactgaagtgccaggtgctgctgagcaaccctacaagcggctgctcctggctgtttcagcctagaggtgcagccgcctctcctacctttctgctgtacctgagccagaacaagcccaaggccgccgaaggactggacacccagagattcagcggcaagagactgggcgacaccttcgtgctgaccctgagcgacttcagaagagagaacgagggctactacttctgtagcgccctgagcaacagcatcatgtacttcagccacttcgtgcccgtgtttctgcccgccaagcctacaacaacccctgctcctagacctcctacaccagctcctacaatcgccagccagcctctgtctctcagacccgaagcctgtagacctgctgctggcggagctgtgcataccagaggactggatttcgcctgcgacatctacatctgggctcctctggctggcacatgtggcgtgctgctgctgtccctggtcatcaccctgtactgcaaccaccggaacaggcggagagtgtgcaagtgccctagacctgtggtcaagagcggcgacaagcctagcctgagcgccagatatgtt

SEQ ID NO: 2520 - DNA, 2463 bp, synthetic construct
  source 1..2463: mol_type = other DNA
atggccttaccagtgaccgccttgctcctgccgctggccttgctgctccacgccgccaggccggaattcggcattacacagagccccaagtacctgttcagaaaagagggccagaacgtcaccctgagctgcgagcagaacctgaaccacgacgccatgtactggtacagacaggacccaggccagggcctgagactgatctactacagccagatcgtgaacgacttccagaagggcgacattgccgagggctacagcgtgtccagagagaagaaagagtcctttccactgaccgtgacaagcgcccagaagaaccctaccgccttctacctgtgtgccagctctcctggcgctctgtacgagcagtatttcggccctggcaccagactgacagttacactcgaggacctgaagaacgtgttcccacctgaggtggccgtgttcgagcctagcgaggccgagatcagccacacccagaaagccaccctcgtgtgcctggctaccggcttctaccccgaccatgtggaactgtcttggtgggtcaacggcaaagaggtgcacagcggcgtgtctaccgacccccagccactgaaagaacagcccgccctgaacgacagccggtactgcctgagcagcagactgagagtgtccgccaccttctggcagaacccccggaaccacttcagatgccaggtgcagttctacggcctgagcgagaacgacgagtggacccaggacagagccaagcccgtgacccagatcgtgtctgccgaagcctggggcagagccgattgcggatcccagagcttcggcctgctggaccccaagctgtgctacctgctggatggcatcctgttcatctacggcgtgatcctgaccgccctgttcctgagagtgaagttcagcagaagcgccgacgcccctgcctaccagcagggacagaaccaactgtacaacgagctgaacctgggcagacgggaagagtacgacgtgctggacaagcggagaggcagggaccctgagatgggcggaaagccccagcggagaaagaacccccaggaaggactgtataacgaactccagaaagacaagatggccgaagcctacagcgagatcggcatgaagggcgagcggagaagaggcaagggccacgatggcctgtaccagggcctgagcaccgccaccaaggacacctatgacgccctgcacatgcaggccctgcctccaagaagggccaagcgatctggatctggagcaacaaacttctcactactcaaacaagcaggtgacgtggaggagaatcccgggcctactagtatggactggatttggcgcatccttttccttgtcggcgctgctaccggcgcgcattccttcgaagaaaatgtggaacagcaccccagcacactgagcgtgcaagagggcgatagcgccgtgattaagtgcacctacagcgacagcgccagcaactacttcccctggtacaagcaagagctgggcaaaagaccccagctcatcatcgacatccggtccaacgtgggcgagaagaaggaccagagaatcgccgtgacactgaacaagaccgccaagcacttcagcctgcacatcaccgagacacagcctgaggattccgccgtgtacttttgtgccgccaccgaggactaccagctgatttggggagccggcaccaagctgattatcaagcctgacacgcgtgcctctacaaagggaccctccgtgtttcctctggctcccagcagcaagtctacaagcggaggaacagccgctctgggctgcctggtcaaggattactttcccgagcctgtgaccgtgtcctggaatagcggagcactgacaagcggcgtgcacacctttccagccgtgctgcaaagcagcggcctgtactctctgagcagcgtggtcacagtgcctagctctagcctgggcacccagacctacatctgcaatgtgaaccacaagcctagcaacaccaaggtggacaagagagtggaacccaagagctgtggtacccagagttttgggttgttggaccctaaattgagctatctgttggacggaatcctgttcatttacggagtgatcctgaccgcattgttcctgcgggttaagttttccagatccgcagacgcacccgcttaccaacaagggcagaaccaactctacaatgaacttaatttggggcggagggaagagtacgacgttctggacaaaaggaggggacgagatcccgagatgggcggaaagcctcagcgaaggaagaatccgcaagaggggctttataacgaactccagaaagataaaatggcagaagcctatagtgagattgggatgaagggagaaaggaggaggggtaaaggtcacgatgggttgtaccaaggattgagcacagccactaaagatacctatgatgcgctccacatgcaggccctgccgccaagataa

SEQ ID NO: 2521 - DNA, 2436 bp, synthetic construct
  source 1..2436: mol_type = other DNA
atggccttaccagtgaccgccttgctcctgccgctggccttgctgctccacgccgccaggccggaattcggcattacacagagccccaagtacctgttcagaaaagagggccagaacgtcaccctgagctgcgagcagaacctgaaccacgacgccatgtactggtacagacaggacccaggccagggcctgagactgatctactacagccagatcgtgaacgacttccagaagggcgacattgccgagggctacagcgtgtccagagagaagaaagagtcctttccactgaccgtgacaagcgcccagaagaaccctaccgccttctacctgtgtgccagctctcctggcgctctgtacgagcagtatttcggccctggcaccagactgacagttacactcgaggacctgaagaacgtgttcccacctgaggtggccgtgttcgagcctagcgaggccgagatcagccacacccagaaagccaccctcgtgtgcctggctaccggcttctaccccgaccatgtggaactgtcttggtgggtcaacggcaaagaggtgcacagcggcgtgtctaccgacccccagccactgaaagaacagcccgccctgaacgacagccggtactgcctgagcagcagactgagagtgtccgccaccttctggcagaacccccggaaccacttcagatgccaggtgcagttctacggcctgagcgagaacgacgagtggacccaggacagagccaagcccgtgacccagatcgtgtctgccgaagcctggggcagagccgattgcggatcccagagcttcggcctgctggaccccaagctgtgctacctgctggatggcatcctgttcatctacggcgtgatcctgaccgccctgttcctgagagtgaagttcagcagaagcgccgacgcccctgcctaccagcagggacagaaccaactgtacaacgagctgaacctgggcagacgggaagagtacgacgtgctggacaagcggagaggcagggaccctgagatgggcggaaagccccagcggagaaagaacccccaggaaggactgtataacgaactccagaaagacaagatggccgaagcctacagcgagatcggcatgaagggcgagcggagaagaggcaagggccacgatggcctgtaccagggcctgagcaccgccaccaaggacacctatgacgccctgcacatgcaggccctgcctccaagaagggccaagcgatctggatctggagcaacaaacttctcactactcaaacaagcaggtgacgtggaggagaatcccgggcctactagtatggactggatttggcgcatccttttccttgtcggcgctgctaccggcgcgcattccttcgaagaaaatgtggaacagcaccccagcacactgagcgtgcaagagggcgatagcgccgtgattaagtgcacctacagcgacagcgccagcaactacttcccctggtacaagcaagagctgggcaaaagaccccagctcatcatcgacatccggtccaacgtgggcgagaagaaggaccagagaatcgccgtgacactgaacaagaccgccaagcacttcagcctgcacatcaccgagacacagcctgaggattccgccgtgtacttttgtgccgccaccgaggactaccagctgatttggggagccggcaccaagctgattatcaagcctgacacgcgtatccagaaccctgatcctgccgtgtaccagctgcgggatagcaagagcagcgacaagagcgtgtgtctgttcaccgacttcgacagccagaccaacgtgtcccagagcaaggactccgacgtgtacatcaccgataagaccgtgctggacatgcggagcatggacttcaagagcaactccgccgtggcctggtccaacaagtccgatttcgcctgcgccaacgccttcaacaacagcattatccccgaggacacattcttcccaagccccgagagcagctgcggtacccagagttttgggttgttggaccctaaattgagctatctgttggacggaatcctgttcatttacggagtgatcctgaccgcattgttcctgcgggttaagttttccagatccgcagacgcacccgcttaccaacaagggcagaaccaactctacaatgaacttaatttggggcggagggaagagtacgacgttctggacaaaaggaggggacgagatcccgagatgggcggaaagcctcagcgaaggaagaatccgcaagaggggctttataacgaactccagaaagataaaatggcagaagcctatagtgagattgggatgaagggagaaaggaggaggggtaaaggtcacgatgggttgtaccaaggattgagcacagccactaaagatacctatgatgcgctccacatgcaggccctgccgccaagataa

SEQ ID NO: 2522 - DNA, 2943 bp, synthetic construct
  source 1..2943: mol_type = other DNA
atggccttaccagtgaccgccttgctcctgccgctggccttgctgctccacgccgccaggccggaattcggcattacacagagccccaagtacctgttcagaaaagagggccagaacgtcaccctgagctgcgagcagaacctgaaccacgacgccatgtactggtacagacaggacccaggccagggcctgagactgatctactacagccagatcgtgaacgacttccagaagggcgacattgccgagggctacagcgtgtccagagagaagaaagagtcctttccactgaccgtgacaagcgcccagaagaaccctaccgccttctacctgtgtgccagctctcctggcgctctgtacgagcagtatttcggccctggcaccagactgacagttacactcgagggacagcctaaggccaatcctaccgtgacactgttccctccaagcagcgaagaactccaggccaacaaggccacacttgtgtgcctgatctccgacttctaccctggggctgtgacagtggcttggaaggccgatggatctcctgtgaaagccggcgtggaaaccaccaagccatccaagcagagcaacaacaaatacgccgccagctcctacctgagcctgacacctgagcagtggaagtcccacagatcctacagctgccaagtgacccacgaaggcagcaccgtggaaaagacagtggcccctacagagtgcagcggatccctgggagagcctcagctgtgctatatcctggacgccatcctgtttctgtacggcatcgtgctgaccctgctgtactgccggctgaagatccaagtgcggaaggccgccatcaccagctacgagaaatccgacggcgtgtacaccggcctgagcaccagaaatcaagagacatacgagacactgaagcacgaaaagcctccacaaagggccaagcgatctggatctggagcaacaaacttctcactactcaaacaagcaggtgacgtggaggagaatcccgggcctactagtatggactggatttggcgcatccttttccttgtcggcgctgctaccggcgcgcattccttcgaagaaaatgtggaacagcaccccagcacactgagcgtgcaagagggcgatagcgccgtgattaagtgcacctacagcgacagcgccagcaactacttcccctggtacaagcaagagctgggcaaaagaccccagctcatcatcgacatccggtccaacgtgggcgagaagaaggaccagagaatcgccgtgacactgaacaagaccgccaagcacttcagcctgcacatcaccgagacacagcctgaggattccgccgtgtacttttgtgccgccaccgaggactaccagctgatttggggagccggcaccaagctgattatcaagcctgacacgcgtatccagaaccctgatcctgccgtgtaccagctgcgggatagcaagagcagcgacaagagcgtgtgtctgttcaccgacttcgacagccagaccaacgtgtcccagagcaaggactccgacgtgtacatcaccgataagaccgtgctggacatgcggagcatggacttcaagagcaactccgccgtggcctggtccaacaagtccgatttcgcctgcgccaacgccttcaacaacagcattatccccgaggacacattcttcccaagccccgagagcagctgcggtacccagagttttgggttgttggaccctaaattgtgctatctgttggacggaatcctgttcatttacggagtgatcctgaccgcattgttcctgcgggttaagttttccagatccgcagacgcacccgcttaccaacaagggcagaaccaactctacaatgaacttaatttggggcggagggaagagtacgacgttctggacaaaaggaggggacgagatcccgagatgggcggaaagcctcagcgaaggaagaatccgcaagaggggctttataacgaactccagaaagataaaatggcagaagcctatagtgagattgggatgaagggagaaaggaggaggggtaaaggtcacgatgggttgtaccaaggattgagcacagccactaaagatacctatgatgcgctccacatgcaggccctgccgccaagacgcgccaagagaagcggatctggcgtgaagcagaccctgaatttcgacctgctgaagctggctggcgacgtggaatccaacccaggcccttctagaggccatatggctctgcctgtgacagctctgctgctgcctctggcactgctgcttcatgctgctagacctagccagtttagagtgtcccctctggacagaacctggaacctgggcgagacagtggaactgaagtgccaggtgctgctgagcaaccctacaagcggctgctcctggctgtttcagcctagaggtgcagccgcctctcctacctttctgctgtacctgagccagaacaagcccaaggccgccgaaggactggacacccagagattcagcggcaagagactgggcgacaccttcgtgctgaccctgagcgacttcagaagagagaacgagggctactacttctgtagcgccctgagcaacagcatcatgtacttcagccacttcgtgcccgtgtttctgcccgccaagcctacaacaacccctgctcctagacctcctacaccagctcctacaatcgccagccagcctctgtctctcagacccgaagcctgtagacctgctgctggcggagctgtgcataccagaggactggatttcgcctgcgacatctacatctgggctcctctggctggcacatgtggcgtgctgctgctgtccctggtcatcaccctgtactgcaaccaccggaacaggcggagagtgtgcaagtgccctagacctgtggtcaagagcggcgacaagcctagcctgagcgccagatatgtt

SEQ ID NO: 2523 - DNA, 2238 bp, synthetic construct
  source 1..2238: mol_type = other DNA
atggccttaccagtgaccgccttgctcctgccgctggccttgctgctccacgccgccaggccggaattcggcattacacagagccccaagtacctgttcagaaaagagggccagaacgtcaccctgagctgcgagcagaacctgaaccacgacgccatgtactggtacagacaggacccaggccagggcctgagactgatctactacagccagatcgtgaacgacttccagaagggcgacattgccgagggctacagcgtgtccagagagaagaaagagtcctttccactgaccgtgacaagcgcccagaagaaccctaccgccttctacctgtgtgccagctctcctggcgctctgtacgagcagtatttcggccctggcaccagactgacagttacactcgaggacctgaagaacgtgttcccacctgaggtggccgtgttcgagcctagcgaggccgagatcagccacacccagaaagccaccctcgtgtgcctggctaccggcttctaccccgaccatgtggaactgtcttggtgggtcaacggcaaagaggtgcacagcggcgtgtctaccgacccccagccactgaaagaacagcccgccctgaacgacagccggtactgcctgagcagcagactgagagtgtccgccaccttctggcagaacccccggaaccacttcagatgccaggtgcagttctacggcctgagcgagaacgacgagtggacccaggacagagccaagcccgtgacccagatcgtgtctgccgaagcctggggcagagccgattgcggatcccagagcttcggcctgctggaccccaagctgtgctacctgctggatggcatcctgttcatctacggcgtgatcctgaccgccctgttcctgagagtgaagttcagcagaagcgccgacgcccctgcctaccagcagggacagaaccaactgtacaacgagctgaacctgggcagacgggaagagtacgacgtgctggacaagcggagaggcagggaccctgagatgggcggaaagccccagcggagaaagaacccccaggaaggactgtataacgaactccagaaagacaagatggccgaagcctacagcgagatcggcatgaagggcgagcggagaagaggcaagggccacgatggcctgtaccagggcctgagcaccgccaccaaggacacctatgacgccctgcacatgcaggccctgcctccaagaagggccaagcgatctggatctggagcaacaaacttctcactactcaaacaagcaggtgacgtggaggagaatcccgggcctactagtatggactggatttggcgcatccttttccttgtcggcgctgctaccggcgcgcattccttcgaagaaaatgtggaacagcaccccagcacactgagcgtgcaagagggcgatagcgccgtgattaagtgcacctacagcgacagcgccagcaactacttcccctggtacaagcaagagctgggcaaaagaccccagctcatcatcgacatccggtccaacgtgggcgagaagaaggaccagagaatcgccgtgacactgaacaagaccgccaagcacttcagcctgcacatcaccgagacacagcctgaggattccgccgtgtacttttgtgccgccaccgaggactaccagctgatttggggagccggcaccaagctgattatcaagcctgacacgcgtgcctctacaaagggaccctccgtgtttcctctggctcccagcagcaagtctacaagcggaggaacagccgctctgggctgcctggtcaaggattactttcccgagcctgtgaccgtgtcctggaatagcggagcactgacaagcggcgtgcacacctttccagccgtgctgcaaagcagcggcctgtactctctgagcagcgtggtcacagtgcctagctctagcctgggcacccagacctacatctgcaatgtgaaccacaagcctagcaacaccaaggtggacaagagagtggaacccaagagctgtggtaccctcggagaaccacagctctgttacattctggatgctatcctgttcctctatgggatcgtcctgacactcctgtattgcagactcaaaattcaagttcgcaaagccgccattacctcttacgagaagagtgatggggtgtacacaggactgtctacccggaatcaagaaacctacgaaaccctcaaacatgagaagccacctcagtaa

SEQ ID NO: 2524 - DNA, 2238 bp, synthetic construct; identical to SEQ ID NO: 2523
  source 1..2238: mol_type = other DNA

SEQ ID NO: 2525 - DNA, 2211 bp, synthetic construct
  source 1..2211: mol_type = other DNA
atggccttaccagtgaccgccttgctcctgccgctggccttgctgctccacgccgccaggccggaattcggcattacacagagccccaagtacctgttcagaaaagagggccagaacgtcaccctgagctgcgagcagaacctgaaccacgacgccatgtactggtacagacaggacccaggccagggcctgagactgatctactacagccagatcgtgaacgacttccagaagggcgacattgccgagggctacagcgtgtccagagagaagaaagagtcctttccactgaccgtgacaagcgcccagaagaaccctaccgccttctacctgtgtgccagctctcctggcgctctgtacgagcagtatttcggccctggcaccagactgacagttacactcgaggacctgaagaacgtgttcccacctgaggtggccgtgttcgagcctagcgaggccgagatcagccacacccagaaagccaccctcgtgtgcctggctaccggcttctaccccgaccatgtggaactgtcttggtgggtcaacggcaaagaggtgcacagcggcgtgtctaccgacccccagccactgaaagaacagcccgccctgaacgacagccggtactgcctgagcagcagactgagagtgtccgccaccttctggcagaacccccggaaccacttcagatgccaggtgcagttctacggcctgagcgagaacgacgagtggacccaggacagagccaagcccgtgacccagatcgtgtctgccgaagcctggggcagagccgattgcggatcccagagcttcggcctgctggaccccaagctgtgctacctgctggatggcatcctgttcatctacggcgtgatcctgaccgccctgttcctgagagtgaagttcagcagaagcgccgacgcccctgcctaccagcagggacagaaccaactgtacaacgagctgaacctgggcagacgggaagagtacgacgtgctggacaagcggagaggcagggaccctgagatgggcggaaagccccagcggagaaagaacccccaggaaggactgtataacgaactccagaaagacaagatggccgaagcctacagcgagatcggcatgaagggcgagcggagaagaggcaagggccacgatggcctgtaccagggcctgagcaccgccaccaaggacacctatgacgccctgcacatgcaggccctgcctccaagaagggccaagcgatctggatctggagcaacaaacttctcactactcaaacaagcaggtgacgtggaggagaatcccgggcctactagtatggactggatttggcgcatccttttccttgtcggcgctgctaccggcgcgcattccttcgaagaaaatgtggaacagcaccccagcacactgagcgtgcaagagggcgatagcgccgtgattaagtgcacctacagcgacagcgccagcaactacttcccctggtacaagcaagagctgggcaaaagaccccagctcatcatcgacatccggtccaacgtgggcgagaagaaggaccagagaatcgccgtgacactgaacaagaccgccaagcacttcagcctgcacatcaccgagacacagcctgaggattccgccgtgtacttttgtgccgccaccgaggactaccagctgatttggggagccggcaccaagctgattatcaagcctgacacgcgtatccagaaccctgatcctgccgtgtaccagctgcgggatagcaagagcagcgacaagagcgtgtgtctgttcaccgacttcgacagccagaccaacgtgtcccagagcaaggactccgacgtgtacatcaccgataagaccgtgctggacatgcggagcatggacttcaagagcaactccgccgtggcctggtccaacaagtccgatttcgcctgcgccaacgccttcaacaacagcattatccccgaggacacattcttcccaagccccgagagcagctgcggtaccctcggagaaccacagctctgttacattctggatgctatcctgttcctctatgggatcgtcctgacactcctgtattgcagactcaaaattcaagttcgcaaagccgccattacctcttacgagaagagtgatggggtgtacacaggactgtctacccggaatcaagaaacctacgaaaccctcaaacatgagaagccacctcagtaa

SEQ ID NO: 2526 - DNA, 2955 bp, synthetic construct
  source 1..2955: mol_type = other DNA
atggccttaccagtgaccgccttgctcctgccgctggccttgctgctccacgccgccaggccggaattcggcattacacagagccccaagtacctgttcagaaaagagggccagaacgtcaccctgagctgcgagcagaacctgaaccacgacgccatgtactggtacagacaggacccaggccagggcctgagactgatctactacagccagatcgtgaacgacttccagaagggcgacattgccgagggctacagcgtgtccagagagaagaaagagtcctttccactgaccgtgacaagcgcccagaagaaccctaccgccttctacctgtgtgccagctctcctggcgctctgtacgagcagtatttcggccctggcaccagactgacagttacactcgagggacagcctaaggccaatcctaccgtgacactgttccctccaagcagcgaagaactccaggccaacaaggccacacttgtgtgcctgatctccgacttctaccctggggctgtgacagtggcttggaaggccgatggatctcctgtgaaagccggcgtggaaaccaccaagccatccaagcagagcaacaacaaatacgccgccagctcctacctgagcctgacacctgagcagtggaagtcccacagatcctacagctgccaagtgacccacgaaggcagcaccgtggaaaagacagtggcccctacagagtgcagcacaacacctggcgagagaagtagcctgcctgccttctatcctggcaccagcggctcttgttctggctgtggatctctgagcctgcctctgctggctggactggttgctgctgatgctgtggcctctctgctgattgtgggagccgtgttcctgtgcgccagacctagaagaagccccgctcaagaggacggcaaggtgtacatcaacatgcccggcagaggaagggccaagcgatctggatctggagcaacaaacttctcactactcaaacaagcaggtgacgtggaggagaatcccgggcctactagtatggactggatttggcgcatccttttccttgtcggcgctgctaccggcgcgcattccttcgaagaaaatgtggaacagcaccccagcacactgagcgtgcaagagggcgatagcgccgtgattaagtgcacctacagcgacagcgccagcaactacttcccctggtacaagcaagagctgggcaaaagaccccagctcatcatcgacatccggtccaacgtgggcgagaagaaggaccagagaatcgccgtgacactgaacaagaccgccaagcacttcagcctgcacatcaccgagacacagcctgaggattccgccgtgtacttttgtgccgccaccgaggactaccagctgatttggggagccggcaccaagctgattatcaagcctgacacgcgtatccagaaccctgatcctgccgtgtaccagctgcgggatagcaagagcagcgacaagagcgtgtgtctgttcaccgacttcgacagccagaccaacgtgtcccagagcaaggactccgacgtgtacatcaccgataagaccgtgctggacatgcggagcatggacttcaagagcaactccgccgtggcctggtccaacaagtccgatttcgcctgcgccaacgccttcaacaacagcattatccccgaggacacattcttcccaagccccgagagcagctgcggtacccagagttttgggttgttggaccctaaattgtgctatctgttggacggaatcctgttcatttacggagtgatcctgaccgcattgttcctgcgggttaagttttccagatccgcagacgcacccgcttaccaacaagggcagaaccaactctacaatgaacttaatttggggcggagggaagagtacgacgttctggacaaaaggaggggacgagatcccgagatgggcggaaagcctcagcgaaggaagaatccgcaagaggggctttataacgaactccagaaagataaaatggcagaagcctatagtgagattgggatgaagggagaaaggaggaggggtaaaggtcacgatgggttgtaccaaggattgagcacagccactaaagatacctatgatgcgctccacatgcaggccctgccgccaagacgcgccaagagaagcggatctggcgtgaagcagaccctgaatttcgacctgctgaagctggctggcgacgtggaatccaacccaggcccttctagaggccatatggctctgcctgtgacagctctgctgctgcctctggcactgctgcttcatgctgctagacctagccagtttagagtgtcccctctggacagaacctggaacctgggcgagacagtggaactgaagtgccaggtgctgctgagcaaccctacaagcggctgctcctggctgtttcagcctagaggtgcagccgcctctcctacctttctgctgtacctgagccagaacaagcccaaggccgccgaaggactggacacccagagattcagcggcaagagactgggcgacaccttcgtgctgaccctgagcgacttcagaagagagaacgagggctactacttctgtagcgccctgagcaacagcatcatgtacttcagccacttcgtgcccgtgtttctgcccgccaagcctacaacaacccctgctcctagacctcctacaccagctcctacaatcgccagccagcctctgtctctcagacccgaagcctgtagacctgctgctggcggagctgtgcataccagaggactggatttcgcctgcgacatctacatctgggctcctctggctggcacatgtggcgtgctgctgctgtccctggtcatcaccctgtactgcaaccaccggaacaggcggagagtgtgcaagtgccctagacctgtggtcaagagcggcgacaagcctagcctgagcgccagatatgtt

SEQ ID NO: 2527 - DNA, 3054 bp, synthetic construct
  source 1..3054: mol_type = other DNA
atggccttaccagtgaccgccttgctcctgccgctggccttgctgctccacgccgccaggccggaattcggcattacacagagccccaagtacctgttcagaaaagagggccagaacgtcaccctgagctgcgagcagaacctgaaccacgacgccatgtactggtacagacaggacccaggccagggcctgagactgatctactacagccagatcgtgaacgacttccagaagggcgacattgccgagggctacagcgtgtccagagagaagaaagagtcctttccactgaccgtgacaagcgcccagaagaaccctaccgccttctacctgtgtgccagctctcctggcgctctgtacgagcagtatttcggccctggcaccagactgacagttacactcgaggacctgaagaacgtgttcccacctgaggtggccgtgttcgagcctagcgaggccgagatcagccacacccagaaagccaccctcgtgtgcctggctaccggcttctaccccgaccatgtggaactgtcttggtgggtcaacggcaaagaggtgcacagcggcgtgtctaccgacccccagccactgaaagaacagcccgccctgaacgacagccggtactgcctgagcagcagactgagagtgtccgccaccttctggcagaacccccggaaccacttcagatgccaggtgcagttctacggcctgagcgagaacgacgagtggacccaggacagagccaagcccgtgacccagatcgtgtctgccgaagcctggggcagagccgattgcggatcccagagcttcggcctgctggaccccaagctgtgctacctgctggatggcatcctgttcatctacggcgtgatcctgaccgccctgttcctgagagtgaagttcagcagaagcgccgacgcccctgcctaccagcagggacagaaccaactgtacaacgagctgaacctgggcagacgggaagagtacgacgtgctggacaagcggagaggcagggaccctgagatgggcggaaagccccagcggagaaagaacccccaggaaggactgtataacgaactccagaaagacaagatggccgaagcctacagcgagatcggcatgaagggcgagcggagaagaggcaagggccacgatggcctgtaccagggcctgagcaccgccaccaaggacacctatgacgccctgcacatgcaggccctgcctccaagaagggccaagcgatctggatctggagcaacaaacttctcactactcaaacaagcaggtgacgtggaggagaatcccgggcctactagtatggactggatttggcgcatccttttccttgtcggcgctgctaccggcgcgcattccttcgaagaaaatgtggaacagcaccccagcacactgagcgtgcaagagggcgatagcgccgtgattaagtgcacctacagcgacagcgccagcaactacttcccctggtacaagcaagagctgggcaaaagaccccagctcatcatcgacatccggtccaacgtgggcgagaagaaggaccagagaatcgccgtgacactgaacaagaccgccaagcacttcagcctgcacatcaccgagacacagcctgaggattccgccgtgtacttttgtgccgccaccgaggactaccagctgatttggggagccggcaccaagctgattatcaagcctgacacgcgtgcctctacaaagggaccctccgtgtttcctctggctcccagcagcaagtctacaagcggaggaacagccgctctgggctgcctggtcaaggattactttcccgagcctgtgaccgtgtcctggaatagcggagcactgacaagcggcgtgcacacctttccagccgtgctgcaaagcagcggcctgtactctctgagcagcgtggtcacagtgcctagctctagcctgggcacccagacctacatctgcaatgtgaaccacaagcctagcaacaccaaggtggacaagagagtggaacccaagagctgtacaacgccgggcgaaaggagttccttgccggccttttaccccggcacaagcggaagctgtagtgggtgtggaagcctcagcctcccacttcttgcgggcctcgtcgcggcagatgcagtagcttcacttcttattgtaggcgcggtatttctctgtgctcgaccaaggaggtcacccgctcaggaggatggtaaggtgtatataaatatgccaggacgcggacgcgccaagagaagcggatctggcgtgaagcagaccctgaatttcgacctgctgaagctggctggcgacgtggaatccaacccaggcccttctagaggccatatggctctgcctgtgacagctctgctgctgcctctggcactgctgcttcatgctgctagacctagccagtttagagtgtcccctctggacagaacctggaacctgggcgagacagtggaactgaagtgccaggtgctgctgagcaaccctacaagcggctgctcctggctgtttcagcctagaggtgcagccgcctctcctacctttctgctgtacctgagccagaacaagcccaaggccgccgaaggactggacacccagagattcagcggcaagagactgggcgacaccttcgtgctgaccctgagcgacttcagaagagagaacgagggctactacttctgtagcgccctgagcaacagcatcatgtacttcagccacttcgtgcccgtgtttctgcccgccaagcctacaacaacccctgctcctagacctcctacaccagctcctacaatcgccagccagcctctgtctctcagacccgaagcctgtagacctgctgctggcggagctgtgcataccagaggactggatttcgcctgcgacatctacatctgggctcctctggctggcacatgtggcgtgctgctgctgtccctggtcatcaccctgtactgcaaccaccggaacaggcggagagtgtgcaagtgccctagacctgtggtcaagagcggcgacaagcctagcctgagcgccagatatgtt

SEQ ID NO: 2528 - DNA, 2790 bp, synthetic construct
  source 1..2790: mol_type = other DNA
atggccttaccagtgaccgccttgctcctgccgctggccttgctgctccacgccgccaggccgggcattacacagagccccaagtacctgttcagaaaagagggccagaacgtcaccctgagctgcgagcagaacctgaaccacgacgccatgtactggtacagacaggacccaggccagggcctgagactgatctactacagccagatcgtgaacgacttccagaagggcgacattgccgagggctacagcgtgtccagagagaagaaagagtcctttccactgaccgtgacaagcgcccagaagaaccctaccgccttctacctgtgtgccagctctcctggcgctctgtacgagcagtatttcggccctggcaccagactgacagttacactcgagctgtgggtttcacagcctccagagatcagaaccctggaaggcagcagcgccttcctgccttgcagcttcaatgcctctcagggcagactggctatcggcagcgtgacctggttcagagatgaggtggtgcccggcaaagaagtgcggaacggcacccctgagtttagaggaaggctggcccctctggcctccagcagatttctgcacgatcaccaggccgagctgcacatcagagatgtgcgaggacacgacgccagcatctacgtgtgcagagtggaagtgctcggcctcggagttggcacaggcaatggaacaagactggtggtggaaaaagagcaccctcagctcggagccggaacagtgctgcttctgagagccggcttttacgccgtgtcctttctgtctgtggccgtgggcagcaccgtgtactatcagggcaagtgcctgacctggaagggacctagaaggcaactgcctgctgtggtgcctgctcctttgcctcctccatgtggaagctctgcccatctgctgccacctgttccaggcggaagggccaagcgatctggatctggagcaacaaacttctcactactcaaacaagcaggtgacgtggaggagaatcccgggcctactagtatggactggatttggcgcatccttttccttgtcggcgctgctaccggcgcgcattccttcgaagaaaatgtggaacagcaccccagcacactgagcgtgcaagagggcgatagcgccgtgattaagtgcacctacagcgacagcgccagcaactacttcccctggtacaagcaagagctgggcaaaagaccccagctcatcatcgacatccggtccaacgtgggcgagaagaaggaccagagaatcgccgtgacactgaacaagaccgccaagcacttcagcctgcacatcaccgagacacagcctgaggattccgccgtgtacttttgtgccgccaccgaggactaccagctgatttggggagccggcaccaagctgattatcaagcctgacacgcgtctgtgggtgtcccagccacctgaaattcggacactggaaggctcctccgcctttctgccctgtagctttaacgccagccaggggagactcgccatcggctctgtgacatggttccgggatgaagtcgtccctggaaaagaagttcgcaacggaacaccagagttcagaggcagactcgccccactggcaagctccagattcctgcatgaccatcaggctgaactgcacattagggacgtgcggggccacgatgcctccatctatgtgtgtcgggtcgaagtgcttggactcggcgtcggaactggaaacggcactaggctggtggtcgagaaagaacatccacagcttggcgctggcaccgtcctgttgcttagagccggattctatgccgtcagcttcctgtccgtggctgtggggtctacagtgtattaccagggaaaatgtctcacctggaaaggccccagacgccagcttccagctgttgttcctgctccactgccaccaccttgtggctcctctgctcacttgcttccaccagtgcctggcggacgcgccaagagaagcggatctggcgtgaagcagaccctgaatttcgacctgctgaagctggctggcgacgtggaatccaacccaggcccttctagaggccatatggctctgcctgtgacagctctgctgctgcctctggcactgctgcttcatgctgctagacctagccagtttagagtgtcccctctggacagaacctggaacctgggcgagacagtggaactgaagtgccaggtgctgctgagcaaccctacaagcggctgctcctggctgtttcagcctagaggtgcagccgcctctcctacctttctgctgtacctgagccagaacaagcccaaggccgccgaaggactggacacccagagattcagcggcaagagactgggcgacaccttcgtgctgaccctgagcgacttcagaagagagaacgagggctactacttctgtagcgccctgagcaacagcatcatgtacttcagccacttcgtgcccgtgtttctgcccgccaagcctacaacaacccctgctcctagacctcctacaccagctcctacaatcgccagccagcctctgtctctcagacccgaagcctgtagacctgctgctggcggagctgtgcataccagaggactggatttcgcctgcgacatctacatctgggctcctctggctggcacatgtggcgtgctgctgctgtccctggtcatcaccctgtactgcaaccaccggaacaggcggagagtgtgcaagtgccctagacctgtggtcaagagcggcgacaagcctagcctgagcgccagatatgtt

SEQ ID NO: 2529 - DNA, 3195 bp, synthetic construct
  source 1..3195: mol_type = other DNA
atggccttaccagtgaccgccttgctcctgccgctggccttgctgctccacgccgccaggccggaattcggcattacacagagccccaagtacctgttcagaaaagagggccagaacgtcaccctgagctgcgagcagaacctgaaccacgacgccatgtactggtacagacaggacccaggccagggcctgagactgatctactacagccagatcgtgaacgacttccagaagggcgacattgccgagggctacagcgtgtccagagagaagaaagagtcctttccactgaccgtgacaagcgcccagaagaaccctaccgccttctacctgtgtgccagctctcctggcgctctgtacgagcagtatttcggccctggcaccagactgacagttacactcgagggacagcctaaggccaatcctaccgtgacactgttccctccaagcagcgaagaactccaggccaacaaggccacacttgtgtgcctgatctccgacttctaccctggggctgtgacagtggcttggaaggccgatggatctcctgtgaaagccggcgtggaaaccaccaagccatccaagcagagcaacaacaaatacgccgccagctcctacctgagcctgacacctgagcagtggaagtcccacagatcctacagctgccaagtgacccacgaaggcagcaccgtggaaaagacagtggcccctacagagtgcagcggatcccagagcttcggcctgctggaccccaagctgtgctacctgctggatggcatcctgttcatctacggcgtgatcctgaccgccctgttcctgagagtgaagttcagcagaagcgccgacgcccctgcctaccagcagggacagaaccaactgtacaacgagctgaacctgggcagacgggaagagtacgacgtgctggacaagcggagaggcagggaccctgagatgggcggaaagccccagcggagaaagaacccccaggaaggactgtataacgaactccagaaagacaagatggccgaagcctacagcgagatcggcatgaagggcgagcggagaagaggcaagggccacgatggcctgtaccagggcctgagcaccgccaccaaggacacctatgacgccctgcacatgcaggccctgcctccaagaagggccaagcgatctggatctggagcaacaaacttctcactactcaaacaagcaggtgacgtggaggagaatcccgggcctactagtatggactggatttggcgcatccttttccttgtcggcgctgctaccggcgcgcattccttcgaagaaaatgtggaacagcaccccagcacactgagcgtgcaagagggcgatagcgccgtgattaagtgcacctacagcgacagcgccagcaactacttcccctggtacaagcaagagctgggcaaaagaccccagctcatcatcgacatccggtccaacgtgggcgagaagaaggaccagagaatcgccgtgacactgaacaagaccgccaagcacttcagcctgcacatcaccgagacacagcctgaggattccgccgtgtacttttgtgccgccaccgaggactaccagctgatttggggagccggcaccaagctgattatcaagcctgacacgcgtgcctctacaaagggaccctccgtgtttcctctggctcccagcagcaagtctacaagcggaggaacagccgctctgggctgcctggtcaaggattactttcccgagcctgtgaccgtgtcctggaatagcggagcactgacaagcggcgtgcacacctttccagccgtgctgcaaagcagcggcctgtactctctgagcagcgtggtcacagtgcctagctctagcctgggcacccagacctacatctgcaatgtgaaccacaagcctagcaacaccaaggtggacaagagagtggaacccaagagctgtggtacccagagttttgggttgttggaccctaaattgtgctatctgttggacggaatcctgttcatttacggagtgatcctgaccgcattgttcctgcgggttaagttttccagatccgcagacgcacccgcttaccaacaagggcagaaccaactctacaatgaacttaatttggggcggagggaagagtacgacgttctggacaaaaggaggggacgagatcccgagatgggcggaaagcctcagcgaaggaagaatccgcaagaggggctttataacgaactccagaaagataaaatggcagaagcctatagtgagattgggatgaagggagaaaggaggaggggtaaaggtcacgatgggttgtaccaaggattgagcacagccactaaagatacctatgatgcgctccacatgcaggccctgccgccaagacgcgccaagagaagcggatctggcgtgaagcagaccctgaatttcgacctgctgaagctggctggcgacgtggaatccaacccaggcccttctagaggccatatggctctgcctgtgacagctctgctgctgcctctggcactgctgcttcatgctgctagacctagccagtttagagtgtcccctctggacagaacctggaacctgggcgagacagtggaactgaagtgccaggtgctgctgagcaaccctacaagcggctgctcctggctgtttcagcctagaggtgcagccgcctctcctacctttctgctgtacctgagccagaacaagcccaaggccgccgaaggactggacacccagagattcagcggcaagagactgggcgacaccttcgtgctgaccctgagcgacttcagaagagagaacgagggctactacttctgtagcgccctgagcaacagcatcatgtacttcagccacttcgtgcccgtgtttctgcccgccaagcctacaacaacccctgctcctagacctcctacaccagctcctacaatcgccagccagcctctgtctctcagacccgaagcctgtagacctgctgctggcggagctgtgcataccagaggactggatttcgcctgcgacatctacatctgggctcctctggctggcacatgtggcgtgctgctgctgtccctggtcatcaccctgtactgcaaccaccggaacaggcggagagtgtgcaagtgccctagacctgtggtcaagagcggcgacaagcctagcctgagcgccagatatgtt

SEQ ID NO: 2530 - DNA, 3249 bp, synthetic construct
  source 1..3249: mol_type = other DNA
atggccttaccagtgaccgccttgctcctgccgctggccttgctgctccacgccgccaggccggaattcggcattacacagagccccaagtacctgttcagaaaagagggccagaacgtcaccctgagctgcgagcagaacctgaaccacgacgccatgtactggtacagacaggacccaggccagggcctgagactgatctactacagccagatcgtgaacgacttccagaagggcgacattgccgagggctacagcgtgtccagagagaagaaagagtcctttccactgaccgtgacaagcgcccagaagaaccctaccgccttctacctgtgtgccagctctcctggcgctctgtacgagcagtatttcggccctggcaccagactgacagttacactcgagggacagcctaaggccaatcctaccgtgacactgttccctccaagcagcgaagaactccaggccaacaaggccacacttgtgtgcctgatctccgacttctaccctggggctgtgacagtggcttggaaggccgatggatctcctgtgaaagccggcgtggaaaccaccaagccatccaagcagagcaacaacaaatacgccgccagctcctacctgagcctgacacctgagcagtggaagtcccacagatcctacagctgccaagtgacccacgaaggcagcaccgtggaaaagacagtggcccctacagagtgcagcggatcccagagcttcggcctgctggaccccaagctgtgctacctgctggatggcatcctgttcatctacggcgtgatcctgaccgccctgttcctgagagtgaagttcagcagaagcgccgacgcccctgcctaccagcagggacagaaccaactgtacaacgagctgaacctgggcagacgggaagagtacgacgtgctggacaagcggagaggcagggaccctgagatgggcggaaagccccagcggagaaagaacccccaggaaggactgtataacgaactccagaaagacaagatggccgaagcctacagcgagatcggcatgaagggcgagcggagaagaggcaagggccacgatggcctgtaccagggcctgagcaccgccaccaaggacacctatgacgccctgcacatgcaggccctgcctccaagaagggccaagcgatctggatctggagcaacaaacttctcactactcaaacaagcaggtgacgtggaggagaatcccgggcctactagtatggactggatttggcgcatccttttccttgtcggcgctgctaccggcgcgcattccttcgaagaaaatgtggaacagcaccccagcacactgagcgtgcaagagggcgatagcgccgtgattaagtgcacctacagcgacagcgccagcaactacttcccctggtacaagcaagagctgggcaaaagaccccagctcatcatcgacatccggtccaacgtgggcgagaagaaggaccagagaatcgccgtgacactgaacaagaccgccaagcacttcagcctgcacatcaccgagacacagcctgaggattccgccgtgtacttttgtgccgccaccgaggactaccagctgatttggggagccggcaccaagctgattatcaagcctgacacgcgtgcgtctcccacttctccgaaagttttccccctttccctctgtagcacacaacctgatggaaatgtggtcatcgcatgtctggtacaaggattctttccacaagagccattgagcgttacatggtcagagagcgggcagggagttaccgctaggaatttcccaccctcacaggatgcgagtggtgatctttataccacatcatcacaactcacgttgccagccactcagtgcctcgctggaaagtcagtaacatgccatgtcaaacattacactaatccctcacaagatgttaccgtgccttgcccagtaccttctacgccgcccaccccgtctccatctactccacccacgccatcacctagtggtacccagagttttgggttgttggaccctaaattgtgctatctgttggacggaatcctgttcatttacggagtgatcctgaccgcattgttcctgcgggttaagttttccagatccgcagacgcacccgcttaccaacaagggcagaaccaactctacaatgaacttaatttggggcggagggaagagtacgacgttctggacaaaaggaggggacgagatcccgagatgggcggaaagcctcagcgaaggaagaatccgcaagaggggctttataacgaactccagaaagataaaatggcagaagcctatagtgagattgggatgaagggagaaaggaggaggggtaaaggtcacgatgggttgtaccaaggattgagcacagccactaaagatacctatgatgcgctccacatgcaggccctgccgccaagacgcgccaagagaagcggatctggcgtgaagcagaccctgaatttcgacctgctgaagctggctggcgacgtggaatccaacccaggcccttctagaggccatatggctctgcctgtgacagctctgctgctgcctctggcactgctgcttcatgctgctagacctagccagtttagagtgtcccctctggacagaacctggaacctgggcgagacagtggaactgaagtgccaggtgctgctgagcaaccctacaagcggctgctcctggctgtttcagcctagaggtgcagccgcctctcctacctttctgctgtacctgagccagaacaagcccaaggccgccgaaggactggacacccagagattcagcggcaagagactgggcgacaccttcgtgctgaccctgagcgacttcagaagagagaacgagggctactacttctgtagcgccctgagcaacagcatcatgtacttcagccacttcgtgcccgtgtttctgcccgccaagcctacaacaacccctgctcctagacctcctacaccagctcctacaatcgccagccagcctctgtctctcagacccgaagcctgtagacctgctgctggcggagctgtgcataccagaggactggatttcgcctgcgacatctacatctgggctcctctggctggcacatgtggcgtgctgctgctgtccctggtcatcaccctgtactgcaaccaccggaacaggcggagagtgtgcaagtgccctagacctgtggtcaagagcggcgacaagcctagcctgagcgccagatatgtt

SEQ ID NO: 2531 - DNA, 3192 bp, synthetic construct
  source 1..3192: mol_type = other DNA
atggccttaccagtgaccgccttgctcctgccgctggccttgctgctccacgccgccaggccggaattcggcattacacagagccccaagtacctgttcagaaaagagggccagaacgtcaccctgagctgcgagcagaacctgaaccacgacgccatgtactggtacagacaggacccaggccagggcctgagactgatctactacagccagatcgtgaacgacttccagaagggcgacattgccgagggctacagcgtgtccagagagaagaaagagtcctttccactgaccgtgacaagcgcccagaagaaccctaccgccttctacctgtgtgccagctctcctggcgctctgtacgagcagtatttcggccctggcaccagactgacagttacactcgagggacagcctaaggccaatcctaccgtgacactgttccctccaagcagcgaagaactccaggccaacaaggccacacttgtgtgcctgatctccgacttctaccctggggctgtgacagtggcttggaaggccgatggatctcctgtgaaagccggcgtggaaaccaccaagccatccaagcagagcaacaacaaatacgccgccagctcctacctgagcctgacacctgagcagtggaagtcccacagatcctacagctgccaagtgacccacgaaggcagcaccgtggaaaagacagtggcccctacagagtgcagcggatcccagagcttcggcctgctggaccccaagctgtgctacctgctggatggcatcctgttcatctacggcgtgatcctgaccgccctgttcctgagagtgaagttcagcagaagcgccgacgcccctgcctaccagcagggacagaaccaactgtacaacgagctgaacctgggcagacgggaagagtacgacgtgctggacaagcggagaggcagggaccctgagatgggcggaaagccccagcggagaaagaacccccaggaaggactgtataacgaactccagaaagacaagatggccgaagcctacagcgagatcggcatgaagggcgagcggagaagaggcaagggccacgatggcctgtaccagggcctgagcaccgccaccaaggacacctatgacgccctgcacatgcaggccctgcctccaagaagggccaagcgatctggatctggagcaacaaacttctcactactcaaacaagcaggtgacgtggaggagaatcccgggcctactagtatggactggatttggcgcatccttttccttgtcggcgctgctaccggcgcgcattccttcgaagaaaatgtggaacagcaccccagcacactgagcgtgcaagagggcgatagcgccgtgattaagtgcacctacagcgacagcgccagcaactacttcccctggtacaagcaagagctgggcaaaagaccccagctcatcatcgacatccggtccaacgtgggcgagaagaaggaccagagaatcgccgtgacactgaacaagaccgccaagcacttcagcctgcacatcaccgagacacagcctgaggattccgccgtgtacttttgtgccgccaccgaggactaccagctgatttggggagccggcaccaagctgattatcaagcctgacacgcgtgcctccacgaagggaccatctgttttccctcttgccccctgctcacggtcaacgtctgaatccacggcagccctgggctgcctcgttaaggactactttccagagccggtaacagtctcctggaacagtggagcccttacatcaggtgttcacactttccctgccgtcttgcaaagtagcggactgtacagccttagttccgttgttacggttccttctagcaacttcggtacacagacatatacttgtaacgtagatcataagcctagcaacaccaaggtggacaaaaccgtagagagaaagtgtggtacccagagttttgggttgttggaccctaaattgtgctatctgttggacggaatcctgttcatttacggagtgatcctgaccgcattgttcctgcgggttaagttttccagatccgcagacgcacccgcttaccaacaagggcagaaccaactctacaatgaacttaatttggggcggagggaagagtacgacgttctggacaaaaggaggggacgagatcccgagatgggcggaaagcctcagcgaaggaagaatccgcaagaggggctttataacgaactccagaaagataaaatggcagaagcctatagtgagattgggatgaagggagaaaggaggaggggtaaaggtcacgatgggttgtaccaaggattgagcacagccactaaagatacctatgatgcgctccacatgcaggccctgccgccaagacgcgccaagagaagcggatctggcgtgaagcagaccctgaatttcgacctgctgaagctggctggcgacgtggaatccaacccaggcccttctagaggccatatggctctgcctgtgacagctctgctgctgcctctggcactgctgcttcatgctgctagacctagccagtttagagtgtcccctctggacagaacctggaacctgggcgagacagtggaactgaagtgccaggtgctgctgagcaaccctacaagcggctgctcctggctgtttcagcctagaggtgcagccgcctctcctacctttctgctgtacctgagccagaacaagcccaaggccgccgaaggactggacacccagagattcagcggcaagagactgggcgacaccttcgtgctgaccctgagcgacttcagaagagagaacgagggctactacttctgtagcgccctgagcaacagcatcatgtacttcagccacttcgtgcccgtgtttctgcccgccaagcctacaacaacccctgctcctagacctcctacaccagctcctacaatcgccagccagcctctgtctctcagacccgaagcctgtagacctgctgctggcggagctgtgcataccagaggactggatttcgcctgcgacatctacatctgggctcctctggctggcacatgtggcgtgctgctgctgtccctggtcatcaccctgtactgcaaccaccggaacaggcggagagtgtgcaagtgccctagacctgtggtcaagagcggcgacaagcctagcctgagcgccagatatgtt

SEQ ID NO: 2532 - DNA, 3357 bp, synthetic construct
  source 1..3357: mol_type = other DNA
atggccttaccagtgaccgccttgctcctgccgctggccttgctgctccacgccgccaggccgggcattacacagagccccaagtacctgttcagaaaagagggccagaacgtcaccctgagctgcgagcagaacctgaaccacgacgccatgtactggtacagacaggacccaggccagggcctgagactgatctactacagccagatcgtgaacgacttccagaagggcgacattgccgagggctacagcgtgtccagagagaagaaagagtcctttccactgaccgtgacaagcgcccagaagaaccctaccgccttctacctgtgtgccagctctcctggcgctctgtacgagcagtatttcggccctggcaccagactgacagttacactcgagggacagcctaaggccaatcctaccgtgacactgttccctccaagcagcgaagaactccaggccaacaaggccacacttgtgtgcctgatctccgacttctaccctggggctgtgacagtggcttggaaggccgatggatctcctgtgaaagccggcgtggaaaccaccaagccatccaagcagagcaacaacaaatacgccgccagctcctacctgagcctgacacctgagcagtggaagtcccacagatcctacagctgccaagtgacccacgaaggcagcaccgtggaaaagacagtggcccctacagagtgcagcggatcccagagcttcggcctgctggaccccaagctgtgctacctgctggatggcatcctgttcatctacggcgtgatcctgaccgccctgttcctgagagtgaagttcagcagaagcgccgacgcccctgcctaccagcagggacagaaccaactgtacaacgagctgaacctgggcagacgggaagagtacgacgtgctggacaagcggagaggcagggaccctgagatgggcggaaagccccagcggagaaagaacccccaggaaggactgtataacgaactccagaaagacaagatggccgaagcctacagcgagatcggcatgaagggcgagcggagaagaggcaagggccacgatggcctgtaccagggcctgagcaccgccaccaaggacacctatgacgccctgcacatgcaggccctgcctccaagaagggccaagcgatctggatctggagcaacaaacttctcactactcaaacaagcaggtgacgtggaggagaatcccgggcctactagtatggactggatttggcgcatccttttccttgtcggcgctgctaccggcgcgcattccttcgaagaaaatgtggaacagcaccccagcacactgagcgtgcaagagggcgatagcgccgtgattaagtgcacctacagcgacagcgccagcaactacttcccctggtacaagcaagagctgggcaaaagaccccagctcatcatcgacatccggtccaacgtgggcgagaagaaggaccagagaatcgccgtgacactgaacaagaccgccaagcacttcagcctgcacatcaccgagacacagcctgaggattccgccgtgtacttttgtgccgccaccgaggactaccagctgatttggggagccggcaccaagctgattatcaagcctgacacgcgtgctccgacaaaggcgccagacgtttttcctattatttcaggatgtcggcatccgaaagataattccccagttgttctggcgtgtcttatcacgggctaccatcctacatctgttaccgttacgtggtatatgggtacgcaaagccaacctcagcggacttttccagagatccaacggcgagattcatattatatgacatccagtcagttgagtacaccgctgcaacagtggcggcaaggtgagtataagtgtgtggtccaacacacagccagtaaaagtaagaaagagatattccggtggcctgaaagcccgaaggcacaagcatcttctgttccgacggcgcaaccgcaagctgaaggaagtcttgcaaaagcaaccacagcacccgcgacaacacgaaacacaggacgcggaggcgaggaaaagaaaaaagaaaaggaaaaggaagagcaagaggagagggaaactaagacccccggtacccagagttttgggttgttggaccctaaattgtgctatctgttggacggaatcctgttcatttacggagtgatcctgaccgcattgttcctgcgggttaagttttccagatccgcagacgcacccgcttaccaacaagggcagaaccaactctacaatgaacttaatttggggcggagggaagagtacgacgttctggacaaaaggaggggacgagatcccgagatgggcggaaagcctcagcgaaggaagaatccgcaagaggggctttataacgaactccagaaagataaaatggcagaagcctatagtgagattgggatgaagggagaaaggaggaggggtaaaggtcacgatgggttgtaccaaggattgagcacagccactaaagatacctatgatgcgctccacatgcaggccctgccgccaagacgcgccaagagaagcggatctggcgtgaagcagaccctgaatttcgacctgctgaagctggctggcgacgtggaatccaacccaggcccttctagaggccatatggctctgcctgtgacagctctgctgctgcctctggcactgctgcttcatgctgctagacctagccagtttagagtgtcccctctggacagaacctggaacctgggcgagacagtggaactgaagtgccaggtgctgctgagcaaccctacaagcggctgctcctggctgtttcagcctagaggtgcagccgcctctcctacctttctgctgtacctgagccagaacaagcccaaggccgccgaaggactggacacccagagattcagcggcaagagactgggcgacaccttcgtgctgaccctgagcgacttcagaagagagaacgagggctactacttctgtagcgccctgagcaacagcatcatgtacttcagccacttcgtgcccgtgtttctgcccgccaagcctacaacaacccctgctcctagacctcctacaccagctcctacaatcgccagccagcctctgtctctcagacccgaagcctgtagacctgctgctggcggagctgtgcataccagaggactggatttcgcctgcgacatctacatctgggctcctctggctggcacatgtggcgtgctgctgctgtccctggtcatcaccctgtactgcaaccaccggaacaggcggagagtgtgcaagtgccctagacctgtggtcaagagcggcgacaagcctagcctgagcgccagatatgtt

SEQ ID NO: 2533 - DNA, 3183 bp, synthetic construct
  source 1..3183: mol_type = other DNA
atggccttaccagtgaccgccttgctcctgccgctggccttgctgctccacgccgccaggccgggcattacacagagccccaagtacctgttcagaaaagagggccagaacgtcaccctgagctgcgagcagaacctgaaccacgacgccatgtactggtacagacaggacccaggccagggcctgagactgatctactacagccagatcgtgaacgacttccagaagggcgacattgccgagggctacagcgtgtccagagagaagaaagagtcctttccactgaccgtgacaagcgcccagaagaaccctaccgccttctacctgtgtgccagctctcctggcgctctgtacgagcagtatttcggccctggcaccagactgacagttacactcgagggacagcctaaggccaatcctaccgtgacactgttccctccaagcagcgaagaactccaggccaacaaggccacacttgtgtgcctgatctccgacttctaccctggggctgtgacagtggcttggaaggccgatggatctcctgtgaaagccggcgtggaaaccaccaagccatccaagcagagcaacaacaaatacgccgccagctcctacctgagcctgacacctgagcagtggaagtcccacagatcctacagctgccaagtgacccacgaaggcagcaccgtggaaaagacagtggcccctacagagtgcagcggatcccagagcttcggcctgctggaccccaagctgtgctacctgctggatggcatcctgttcatctacggcgtgatcctgaccgccctgttcctgagagtgaagttcagcagaagcgccgacgcccctgcctaccagcagggacagaaccaactgtacaacgagctgaacctgggcagacgggaagagtacgacgtgctggacaagcggagaggcagggaccctgagatgggcggaaagccccagcggagaaagaacccccaggaaggactgtataacgaactccagaaagacaagatggccgaagcctacagcgagatcggcatgaagggcgagcggagaagaggcaagggccacgatggcctgtaccagggcctgagcaccgccaccaaggacacctatgacgccctgcacatgcaggccctgcctccaagaagggccaagcgatctggatctggagcaacaaacttctcactactcaaacaagcaggtgacgtggaggagaatcccgggcctactagtatggactggatttggcgcatccttttccttgtcggcgctgctaccggcgcgcattccttcgaagaaaatgtggaacagcaccccagcacactgagcgtgcaagagggcgatagcgccgtgattaagtgcacctacagcgacagcgccagcaactacttcccctggtacaagcaagagctgggcaaaagaccccagctcatcatcgacatccggtccaacgtgggcgagaagaaggaccagagaatcgccgtgacactgaacaagaccgccaagcacttcagcctgcacatcaccgagacacagcctgaggattccgccgtgtacttttgtgccgccaccgaggactaccagctgatttggggagccggcaccaagctgattatcaagcctgacacgcgtgcctcaacgaaagggcctagcgtcttccccctggcgccgtgctcacgatccacaagcgaatccaccgccgctctcggatgcctcgtaaaggattatttccctgaaccagtcacggtgtcatggaacagcggtgcccttaccagcggcgtccatacctttcctgctgtgctccagtccagcggactttatagtctcagctctgtcgtgaccgtcccttcctctaattttggcacccagacttacacgtgcaacgtcgatcataagcccagtaacaccaaggtagacaagacggtggaacgaaagggtacccagagttttgggttgttggaccctaaattgtgctatctgttggacggaatcctgttcatttacggagtgatcctgaccgcattgttcctgcgggttaagttttccagatccgcagacgcacccgcttaccaacaagggcagaaccaactctacaatgaacttaatttggggcggagggaagagtacgacgttctggacaaaaggaggggacgagatcccgagatgggcggaaagcctcagcgaaggaagaatccgcaagaggggctttataacgaactccagaaagataaaatggcagaagcctatagtgagattgggatgaagggagaaaggaggaggggtaaaggtcacgatgggttgtaccaaggattgagcacagccactaaagatacctatgatgcgctccacatgcaggccctgccgccaagacgcgccaagagaagcggatctggcgtgaagcagaccctgaatttcgacctgctgaagctggctggcgacgtggaatccaacccaggcccttctagaggccatatggctctgcctgtgacagctctgctgctgcctctggcactgctgcttcatgctgctagacctagccagtttagagtgtcccctctggacagaacctggaacctgggcgagacagtggaactgaagtgccaggtgctgctgagcaaccctacaagcggctgctcctggctgtttcagcctagaggtgcagccgcctctcctacctttctgctgtacctgagccagaacaagcccaaggccgccgaaggactggacacccagagattcagcggcaagagactgggcgacaccttcgtgctgaccctgagcgacttcagaagagagaacgagggctactacttctgtagcgccctgagcaacagcatcatgtacttcagccacttcgtgcccgtgtttctgcccgccaagcctacaacaacccctgctcctagacctcctacaccagctcctacaatcgccagccagcctctgtctctcagacccgaagcctgtagacctgctgctggcggagctgtgcataccagaggactggatttcgcctgcgacatctacatctgggctcctctggctggcacatgtggcgtgctgctgctgtccctggtcatcaccctgtactgcaaccaccggaacaggcggagagtgtgcaagtgccctagacctgtggtcaagagcggcgacaagcctagcctgagcgccagatatgtt

SEQ ID NO: 2534 - DNA, 3204 bp, synthetic construct
  source 1..3204: mol_type = other DNA
atggccttaccagtgaccgccttgctcctgccgctggccttgctgctccacgccgccaggccgggcattacacagagccccaagtacctgttcagaaaagagggccagaacgtcaccctgagctgcgagcagaacctgaaccacgacgccatgtactggtacagacaggacccaggccagggcctgagactgatctactacagccagatcgtgaacgacttccagaagggcgacattgccgagggctacagcgtgtccagagagaagaaagagtcctttccactgaccgtgacaagcgcccagaagaaccctaccgccttctacctgtgtgccagctctcctggcgctctgtacgagcagtatttcggccctggcaccagactgacagttacactcgagggacagcctaaggccaatcctaccgtgacactgttccctccaagcagcgaagaactccaggccaacaaggccacacttgtgtgcctgatctccgacttctaccctggggctgtgacagtggcttggaaggccgatggatctcctgtgaaagccggcgtggaaaccaccaagccatccaagcagagcaacaacaaatacgccgccagctcctacctgagcctgacacctgagcagtggaagtcccacagatcctacagctgccaagtgacccacgaaggcagcaccgtggaaaagacagtggcccctacagagtgcagcggatcccagagcttcggcctgctggaccccaagctgtgctacctgctggatggcatcctgttcatctacggcgtgatcctgaccgccctgttcctgagagtgaagttcagcagaagcgccgacgcccctgcctaccagcagggacagaaccaactgtacaacgagctgaacctgggcagacgggaagagtacgacgtgctggacaagcggagaggcagggaccctgagatgggcggaaagccccagcggagaaagaacccccaggaaggactgtataacgaactccagaaagacaagatggccgaagcctacagcgagatcggcatgaagggcgagcggagaagaggcaagggccacgatggcctgtaccagggcctgagcaccgccaccaaggacacctatgacgccctgcacatgcaggccctgcctccaagaagggccaagcgatctggatctggagcaacaaacttctcactactcaaacaagcaggtgacgtggaggagaatcccgggcctactagtatggactggatttggcgcatccttttccttgtcggcgctgctaccggcgcgcattccttcgaagaaaatgtggaacagcaccccagcacactgagcgtgcaagagggcgatagcgccgtgattaagtgcacctacagcgacagcgccagcaactacttcccctggtacaagcaagagctgggcaaaagaccccagctcatcatcgacatccggtccaacgtgggcgagaagaaggaccagagaatcgccgtgacactgaacaagaccgccaagcacttcagcctgcacatcaccgagacacagcctgaggattccgccgtgtacttttgtgccgccaccgaggactaccagctgatttggggagccggcaccaagctgattatcaagcctgacacgcgtgcgtcacctacgtccccaaaagtgttcccgctgtcactcgattccactccacaggacggtaacgtggtggttgcctgcctggtacaaggtttctttcctcaagaaccactctctgtgacgtggtctgaaagtggtcagaatgttacagcacggaacttcccaccgagtcaagatgcgagtggggatctctatacgacatccagtcaactcacactgcccgcaacacaatgccccgatggcaaatctgttacctgccatgtgaaacattacaccaatccatcccaggatgtgacagtaccttgtccggttccgccccctcccccgggtacccagagttttgggttgttggaccctaaattgtgctatctgttggacggaatcctgttcatttacggagtgatcctgaccgcattgttcctgcgggttaagttttccagatccgcagacgcacccgcttaccaacaagggcagaaccaactctacaatgaacttaatttggggcggagggaagagtacgacgttctggacaaaaggaggggacgagatcccgagatgggcggaaagcctcagcgaaggaagaatccgcaagaggggctttataacgaactccagaaagataaaatggcagaagcctatagtgagattgggatgaagggagaaaggaggaggggtaaaggtcacgatgggttgtaccaaggattgagcacagccactaaagatacctatgatgcgctccacatgcaggccctgccgccaagacgcgccaagagaagcggatctggcgtgaagcagaccctgaatttcgacctgctgaagctggctggcgacgtggaatccaacccaggcccttctagaggccatatggctctgcctgtgacagctctgctgctgcctctggcactgctgcttcatgctgctagacctagccagtttagagtgtcccctctggacagaacctggaacctgggcgagacagtggaactgaagtgccaggtgctgctgagcaaccctacaagcggctgctcctggctgtttcagcctagaggtgcagccgcctctcctacctttctgctgtacctgagccagaacaagcccaaggccgccgaaggactggacacccagagattcagcggcaagagactgggcgacaccttcgtgctgaccctgagcgacttcagaagagagaacgagggctactacttctgtagcgccctgagcaacagcatcatgtacttcagccacttcgtgcccgtgtttctgcccgccaagcctacaacaacccctgctcctagacctcctacaccagctcctacaatcgccagccagcctctgtctctcagacccgaagcctgtagacctgctgctggcggagctgtgcataccagaggactggatttcgcctgcgacatctacatctgggctcctctggctggcacatgtggcgtgctgctgctgtccctggtcatcaccctgtactgcaaccaccggaacaggcggagagtgtgcaagtgccctagacctgtggtcaagagcggcgacaagcctagcctgagcgccagatatgtt

SEQ ID NO: 2535 - DNA, 3189 bp, synthetic construct
  source 1..3189: mol_type = other DNA
atggccttaccagtgaccgccttgctcctgccgctggccttgctgctccacgccgccaggccgggcattacacagagccccaagtacctgttcagaaaagagggccagaacgtcaccctgagctgcgagcagaacctgaaccacgacgccatgtactggtacagacaggacccaggccagggcctgagactgatctactacagccagatcgtgaacgacttccagaagggcgacattgccgagggctacagcgtgtccagagagaagaaagagtcctttccactgaccgtgacaagcgcccagaagaaccctaccgccttctacctgtgtgccagctctcctggcgctctgtacgagcagtatttcggccctggcaccagactgacagttacactcgagggacagcctaaggccaatcctaccgtgacactgttccctccaagcagcgaagaactccaggccaacaaggccacacttgtgtgcctgatctccgacttctaccctggggctgtgacagtggcttggaaggccgatggatctcctgtgaaagccggcgtggaaaccaccaagccatccaagcagagcaacaacaaatacgccgccagctcctacctgagcctgacacctgagcagtggaagtcccacagatcctacagctgccaagtgacccacgaaggcagcaccgtggaaaagacagtggcccctacagagtgcagcggatcccagagcttcggcctgctggaccccaagctgtgctacctgctggatggcatcctgttcatctacggcgtgatcctgaccgccctgttcctgagagtgaagttcagcagaagcgccgacgcccctgcctaccagcagggacagaaccaactgtacaacgagctgaacctgggcagacgggaagagtacgacgtgctggacaagcggagaggcagggaccctgagatgggcggaaagccccagcggagaaagaacccccaggaaggactgtataacgaactccagaaagacaagatggccgaagcctacagcgagatcggcatgaagggcgagcggagaagaggcaagggccacgatggcctgtaccagggcctgagcaccgccaccaaggacacctatgacgccctgcacatgcaggccctgcctccaagaagggccaagcgatctggatctggagcaacaaacttctcactactcaaacaagcaggtgacgtggaggagaatcccgggcctactagtatggactggatttggcgcatccttttccttgtcggcgctgctaccggcgcgcattccttcgaagaaaatgtggaacagcaccccagcacactgagcgtgcaagagggcgatagcgccgtgattaagtgcacctacagcgacagcgccagcaactacttcccctggtacaagcaagagctgggcaaaagaccccagctcatcatcgacatccggtccaacgtgggcgagaagaaggaccagagaatcgccgtgacactgaacaagaccgccaagcacttcagcctgcacatcaccgagacacagcctgaggattccgccgtgtacttttgtgccgccaccgaggactaccagctgatttggggagccggcaccaagctgattatcaagcctgacacgcgtgctagtacccagtcaccttctgttttcccgcttactagatgctgcaagaacataccatccaatgccacttctgtcacactgggctgtcttgctacaggttattttcctgagccggtgatggtcacttgggataccggtagcctgaatggaactacaatgacgctgcctgccacgacgctcacattgagtgggcattacgcgacaattagtcttttgacggtaagcggagcttgggctaagcagatgttcacttgcagagtagcgcacactccctctagtactgactgggttgacaacaaaaccttttctggtacccagagttttgggttgttggaccctaaattgtgctatctgttggacggaatcctgttcatttacggagtgatcctgaccgcattgttcctgcgggttaagttttccagatccgcagacgcacccgcttaccaacaagggcagaaccaactctacaatgaacttaatttggggcggagggaagagtacgacgttctggacaaaaggaggggacgagatcccgagatgggcggaaagcctcagcgaaggaagaatccgcaagaggggctttataacgaactccagaaagataaaatggcagaagcctatagtgagattgggatgaagggagaaaggaggaggggtaaaggtcacgatgggttgtaccaaggattgagcacagccactaaagatacctatgatgcgctccacatgcaggccctgccgccaagacgcgccaagagaagcggatctggcgtgaagcagaccctgaatttcgacctgctgaagctggctggcgacgtggaatccaacccaggcccttctagaggccatatggctctgcctgtgacagctctgctgctgcctctggcactgctgcttcatgctgctagacctagccagtttagagtgtcccctctggacagaacctggaacctgggcgagacagtggaactgaagtgccaggtgctgctgagcaaccctacaagcggctgctcctggctgtttcagcctagaggtgcagccgcctctcctacctttctgctgtacctgagccagaacaagcccaaggccgccgaaggactggacacccagagattcagcggcaagagactgggcgacaccttcgtgctgaccctgagcgacttcagaagagagaacgagggctactacttctgtagcgccctgagcaacagcatcatgtacttcagccacttcgtgcccgtgtttctgcccgccaagcctacaacaacccctgctcctagacctcctacaccagctcctacaatcgccagccagcctctgtctctcagacccgaagcctgtagacctgctgctggcggagctgtgcataccagaggactggatttcgcctgcgacatctacatctgggctcctctggctggcacatgtggcgtgctgctgctgtccctggtcatcaccctgtactgcaaccaccggaacaggcggagagtgtgcaagtgccctagacctgtggtcaagagcggcgacaagcctagcctgagcgccagatatgtt

SEQ ID NO: 2536 - DNA, 3189 bp, synthetic construct
  source 1..3189: mol_type = other DNA
atggccttaccagtgaccgccttgctcctgccgctggccttgctgctccacgccgccaggccgggcattacacagagccccaagtacctgttcagaaaagagggccagaacgtcaccctgagctgcgagcagaacctgaaccacgacgccatgtactggtacagacaggacccaggccagggcctgagactgatctactacagccagatcgtgaacgacttccagaagggcgacattgccgagggctacagcgtgtccagagagaagaaagagtcctttccactgaccgtgacaagcgcccagaagaaccctaccgccttctacctgtgtgccagctctcctggcgctctgtacgagcagtatttcggccctggcaccagactgacagttacactcgagggacagcctaaggccaatcctaccgtgacactgttccctccaagcagcgaagaactccaggccaacaaggccacacttgtgtgcctgatctccgacttctaccctggggctgtgacagtggcttggaaggccgatggatctcctgtgaaagccggcgtggaaaccaccaagccatccaagcagagcaacaacaaatacgccgccagctcctacctgagcctgacacctgagcagtggaagtcccacagatcctacagctgccaagtgacccacgaaggcagcaccgtggaaaagacagtggcccctacagagtgcagcggatcccagagcttcggcctgctggaccccaagctgtgctacctgctggatggcatcctgttcatctacggcgtgatcctgaccgccctgttcctgagagtgaagttcagcagaagcgccgacgcccctgcctaccagcagggacagaaccaactgtacaacgagctgaacctgggcagacgggaagagtacgacgtgctggacaagcggagaggcagggaccctgagatgggcggaaagccccagcggagaaagaacccccaggaaggactgtataacgaactccagaaagacaagatggccgaagcctacagcgagatcggcatgaagggcgagcggagaagaggcaagggccacgatggcctgtaccagggcctgagcaccgccaccaaggacacctatgacgccctgcacatgcaggccctgcctccaagaagggccaagcgatctggatctggagcaacaaacttctcactactcaaacaagcaggtgacgtggaggagaatcccgggcctactagtatggactggatttggcgcatccttttccttgtcggcgctgctaccggcgcgcattccttcgaagaaaatgtggaacagcaccccagcacactgagcgtgcaagagggcgatagcgccgtgattaagtgcacctacagcgacagcgccagcaactacttcccctggtacaagcaagagctgggcaaaagaccccagctcatcatcgacatccggtccaacgtgggcgagaagaaggaccagagaatcgccgtgacactgaacaagaccgccaagcacttcagcctgcacatcaccgagacacagcctgaggattccgccgtgtacttttgtgccgccaccgaggactaccagctgatttggggagccggcaccaagctgattatcaagcctgacacgcgtgcgtccactaagggtccgtcagtcttcccgctggcgccctgttcccgcagcacgagtgaatctaccgccgcccttgggtgcttggtaaaagactattttcctgagcccgttacagtatcatggaacagcggggctctgactagcggggtgcatacgttccctgcggttctgcaatctagcggactgtattctctctccagtgttgtgaccgtgccaagctccagcctcggtactaaaacttatacatgtaatgtggatcataaaccttcaaataccaaggttgacaaaagggtagagagtaagtacggtggtacccagagttttgggttgttggaccctaaattgtgctatctgttggacggaatcctgttcatttacggagtgatcctgaccgcattgttcctgcgggttaagttttccagatccgcagacgcacccgcttaccaacaagggcagaaccaactctacaatgaacttaatttggggcggagggaagagtacgacgttctggacaaaaggaggggacgagatcccgagatgggcggaaagcctcagcgaaggaagaatccgcaagaggggctttataacgaactccagaaagataaaatggcagaagcctatagtgagattgggatgaagggagaaaggaggaggggtaaaggtcacgatgggttgtaccaaggattgagcacagccactaaagatacctatgatgcgctccacatgcaggccctgccgccaagacgcgccaagagaagcggatctggcgtgaagcagaccctgaatttcgacctgctgaagctggctggcgacgtggaatccaacccaggcccttctagaggccatatggctctgcctgtgacagctctgctgctgcctctggcactgctgcttcatgctgctagacctagccagtttagagtgtcccctctggacagaacctggaacctgggcgagacagtggaactgaagtgccaggtgctgctgagcaaccctacaagcggctgctcctggctgtttcagcctagaggtgcagccgcctctcctacctttctgctgtacctgagccagaacaagcccaaggccgccgaaggactggacacccagagattcagcggcaagagactgggcgacaccttcgtgctgaccctgagcgacttcagaagagagaacgagggctactacttctgtagcgccctgagcaacagcatcatgtacttcagccacttcgtgcccgtgtttctgcccgccaagcctacaacaacccctgctcctagacctcctacaccagctcctacaatcgccagccagcctctgtctctcagacccgaagcctgtagacctgctgctggcggagctgtgcataccagaggactggatttcgcctgcgacatctacatctgggctcctctggctggcacatgtggcgtgctgctgctgtccctggtcatcaccctgtactgcaaccaccggaacaggcggagagtgtgcaagtgccctagacctgtggtcaagagcggcgacaagcctagcctgagcgccagatatgtt

SEQ ID NO: 2537 - DNA, 3189 bp, synthetic construct
  source 1..3189: mol_type = other DNA
atggccttaccagtgaccgccttgctcctgccgctggccttgctgctccacgccgccaggccgggcattacacagagccccaagtacctgttcagaaaagagggccagaacgtcaccctgagctgcgagcagaacctgaaccacgacgccatgtactggtacagacaggacccaggccagggcctgagactgatctactacagccagatcgtgaacgacttccagaagggcgacattgccgagggctacagcgtgtccagagagaagaaagagtcctttccactgaccgtgacaagcgcccagaagaaccctaccgccttctacctgtgtgccagctctcctggcgctctgtacgagcagtatttcggccctggcaccagactgacagttacactcgagggacagcctaaggccaatcctaccgtgacactgttccctccaagcagcgaagaactccaggccaacaaggccacacttgtgtgcctgatctccgacttctaccctggggctgtgacagtggcttggaaggccgatggatctcctgtgaaagccggcgtggaaaccaccaagccatccaagcagagcaacaacaaatacgccgccagctcctacctgagcctgacacctgagcagtggaagtcccacagatcctacagctgccaagtgacccacgaaggcagcaccgtggaaaagacagtggcccctacagagtgcagcggatcccagagcttcggcctgctggaccccaagctgtgctacctgctggatggcatcctgttcatctacggcgtgatcctgaccgccctgttcctgagagtgaagttcagcagaagcgccgacgcccctgcctaccagcagggacagaaccaactgtacaacgagctgaacctgggcagacgggaagagtacgacgtgctggacaagcggagaggcagggaccctgagatgggcggaaagccccagcggagaaagaacccccaggaaggactgtataacgaactccagaaagacaagatggccgaagcctacagcgagatcggcatgaagggcgagcggagaagaggcaagggccacgatggcctgtaccagggcctgagcaccgccaccaaggacacctatgacgccctgcacatgcaggccctgcctccaagaagggccaagcgatctggatctggagcaacaaacttctcactactcaaacaagcaggtgacgtggaggagaatcccgggcctactagtatggactggatttggcgcatccttttccttgtcggcgctgctaccggcgcgcattccttcgaagaaaatgtggaacagcaccccagcacactgagcgtgcaagagggcgatagcgccgtgattaagtgcacctacagcgacagcgccagcaactacttcccctggtacaagcaagagctgggcaaaagaccccagctcatcatcgacatccggtccaacgtgggcgagaagaaggaccagagaatcgccgtgacactgaacaagaccgccaagcacttcagcctgcacatcaccgagacacagcctgaggattccgccgtgtacttttgtgccgccaccgaggactaccagctgatttggggagccggcaccaagctgattatcaagcctgacacgcgtgcaagtacaaagggacccagtgttttcccgctcgccccctgttcacgatcaacgagtgagtccactgcggctctcggatgcctcgtcaaagactacttccccgagccggtgactgttagttggaactctggggctcttacttcaggcgtacacacattccccgccgtgcttcagtcaagtgggctctactcacttagcagtgtggtaacggttccctctagcaactttggcacccaaacatatacttgcaacgtcgatcacaagccgtcaaataccaaagttgacaagaccgttgaaaggaaatgttgtggtacccagagttttgggttgttggaccctaaattgtgctatctgttggacggaatcctgttcatttacggagtgatcctgaccgcattgttcctgcgggttaagttttccagatccgcagacgcacccgcttaccaacaagggcagaaccaactctacaatgaacttaatttggggcggagggaagagtacgacgttctggacaaaaggaggggacgagatcccgagatgggcggaaagcctcagcgaaggaagaatccgcaagaggggctttataacgaactccagaaagataaaatggcagaagcctatagtgagattgggatgaagggagaaaggaggaggggtaaaggtcacgatgggttgtaccaaggattgagcacagccactaaagatacctatgatgcgctccacatgcaggccctgccgccaagacgcgccaagagaagcggatctggcgtgaagcagaccctgaatttcgacctgctgaagctggctggcgacgtggaatccaacccaggcccttctagaggccatatggctctgcctgtgacagctctgctgctgcctctggcactgctgcttcatgctgctagacctagccagtttagagtgtcccctctggacagaacctggaacctgggcgagacagtggaactgaagtgccaggtgctgctgagcaaccctacaagcggctgctcctggctgtttcagcctagaggtgcagccgcctctcctacctttctgctgtacctgagccagaacaagcccaaggccgccgaaggactggacacccagagattcagcggcaagagactgggcgacaccttcgtgctgaccctgagcgacttcagaagagagaacgagggctactacttctgtagcgccctgagcaacagcatcatgtacttcagccacttcgtgcccgtgtttctgcccgccaagcctacaacaacccctgctcctagacctcctacaccagctcctacaatcgccagccagcctctgtctctcagacccgaagcctgtagacctgctgctggcggagctgtgcataccagaggactggatttcgcctgcgacatctacatctgggctcctctggctggcacatgtggcgtgctgctgctgtccctggtcatcaccctgtactgcaaccaccggaacaggcggagagtgtgcaagtgccctagacctgtggtcaagagcggcgacaagcctagcctgagcgccagatatgtt

SEQ ID NO: 2538 - DNA, 3234 bp, synthetic construct
  source 1..3234: mol_type = other DNA
atggccttaccagtgaccgccttgctcctgccgctggccttgctgctccacgccgccaggccgggcattacacagagccccaagtacctgttcagaaaagagggccagaacgtcaccctgagctgcgagcagaacctgaaccacgacgccatgtactggtacagacaggacccaggccagggcctgagactgatctactacagccagatcgtgaacgacttccagaagggcgacattgccgagggctacagcgtgtccagagagaagaaagagtcctttccactgaccgtgacaagcgcccagaagaaccctaccgccttctacctgtgtgccagctctcctggcgctctgtacgagcagtatttcggccctggcaccagactgacagttacactcgaggacctgaagaacgtgttcccacctgaggtggccgtgttcgagcctagcgaggccgagatcagccacacccagaaagccaccctcgtgtgcctggctaccggcttctaccccgaccatgtggaactgtcttggtgggtcaacggcaaagaggtgcacagcggcgtgtctaccgacccccagccactgaaagaacagcccgccctgaacgacagccggtactgcctgagcagcagactgagagtgtccgccaccttctggcagaacccccggaaccacttcagatgccaggtgcagttctacggcctgagcgagaacgacgagtggacccaggacagagccaagcccgtgacccagatcgtgtctgccgaagcctggggcagagccgattgcggatcccagagcttcggcctgctggaccccaagctgtgctacctgctggatggcatcctgttcatctacggcgtgatcctgaccgccctgttcctgagagtgaagttcagcagaagcgccgacgcccctgcctaccagcagggacagaaccaactgtacaacgagctgaacctgggcagacgggaagagtacgacgtgctggacaagcggagaggcagggaccctgagatgggcggaaagccccagcggagaaagaacccccaggaaggactgtataacgaactccagaaagacaagatggccgaagcctacagcgagatcggcatgaagggcgagcggagaagaggcaagggccacgatggcctgtaccagggcctgagcaccgccaccaaggacacctatgacgccctgcacatgcaggccctgcctccaagaagggccaagcgatctggatctggagcaacaaacttctcactactcaaacaagcaggtgacgtggaggagaatcccgggcctactagtatggactggatttggcgcatccttttccttgtcggcgctgctaccggcgcgcattccttcgaagaaaatgtggaacagcaccccagcacactgagcgtgcaagagggcgatagcgccgtgattaagtgcacctacagcgacagcgccagcaactacttcccctggtacaagcaagagctgggcaaaagaccccagctcatcatcgacatccggtccaacgtgggcgagaagaaggaccagagaatcgccgtgacactgaacaagaccgccaagcacttcagcctgcacatcaccgagacacagcctgaggattccgccgtgtacttttgtgccgccaccgaggactaccagctgatttggggagccggcaccaagctgattatcaagcctgacacgcgtatccagaaccctgatcctgccgtgtaccagctgcgggatagcaagagcagcgacaagagcgtgtgtctgttcaccgacttcgacagccagaccaacgtgtcccagagcaaggactccgacgtgtacatcaccgataagaccgtgctggacatgcggagcatggacttcaagagcaactccgccgtggcctggtccaacaagtccgatttcgcctgcgccaacgccttcaacaacagcattatccccgaggacacattcttcccaagccccgagagcagctgcggtacccagagttttgggttgttggaccctaaattgtgctatctgttggacggaatcctgttcatttacggagtgatcctgaccgcattgttcctgcgggttaagttttccagatccgcagacgcacccgcttaccaacaagggcagaaccaactctacaatgaacttaatttggggcggagggaagagtacgacgttctggacaaaaggaggggacgagatcccgagatgggcggaaagcctcagcgaaggaagaatccgcaagaggggctttataacgaactccagaaagataaaatggcagaagcctatagtgagattgggatgaagggagaaaggaggaggggtaaaggtcacgatgggttgtaccaaggattgagcacagccactaaagatacctatgatgcgctccacatgcaggccctgccgccaagacgcgccaagagaagcggatctggcgtgaagcagaccctgaatttcgacctgctgaagctggctggcgacgtggaatccaacccaggcccttctagaggccatatggctctgcctgtgacagctctgctgctgcctctggcactgctgcttcatgctgctagacctagccagtttagagtgtcccctctggacagaacctggaacctgggcgagacagtggaactgaagtgccaggtgctgctgagcaaccctacaagcggctgctcctggctgtttcagcctagaggtgcagccgcctctcctacctttctgctgtacctgagccagaacaagcccaaggccgccgaaggactggacacccagagattcagcggcaagagactgggcgacaccttcgtgctgaccctgagcgacttcagaagagagaacgagggctactacttctgtagcgccctgagcaacagcatcatgtacttcagccacttcgtgcccgtgtttctgcccgccaagcctacaacaacccctgctcctagacctcctacaccagctcctacaatcgccagccagcctctgtctctcagacccgaagcctgtagacctgctgctggcggagctgtgcataccagaggactggatttcgcctgcgacatctacatctgggctcctctggctggcacatgtggcgtgctgctgctgtccctggtcatcaccctgtactgcaaccaccggaacaggcggagagtgtgcaagtgccctagacctgtggtcaagagcggcgacaagcctagcctgagcgccagatatgtt

SEQ ID NO: 2539 - DNA, 3234 bp, synthetic construct
  source 1..3234: mol_type = other DNA
atggccttaccagtgaccgccttgctcctgccgctggccttgctgctccacgccgccaggccgggcattacacagagccccaagtacctgttcagaaaagagggccagaacgtcaccctgagctgcgagcagaacctgaaccacgacgccatgtactggtacagacaggacccaggccagggcctgagactgatctactacagccagatcgtgaacgacttccagaagggcgacattgccgagggctacagcgtgtccagagagaagaaagagtcctttccactgaccgtgacaagcgcccagaagaaccctaccgccttctacctgtgtgccagctctcctggcgctctgtacgagcagtatttcggccctggcaccagactgacagttacactcgaggacctgaagaacgtgttcccacctgaggtggccgtgttcgagcctagcaaggccgagatcgcccacacccagaaagccaccctcgtgtgcctggctaccggcttctaccccgaccatgtggaactgtcttggtgggtcaacggcaaagaggtgcacagcggcgtgtgtaccgacccccagccactgaaagaacagcccgccctgaacgacagccggtactgcctgagcagcagactgagagtgtccgccaccttctggcagaacccccggaaccacttcagatgccaggtgcagttctacggcctgagcgagaacgacgagtggacccaggacagagccaagcccgtgacccagatcgtgtctgccgaagcctggggcagagccgattgcggatcccagagcttcggcctgctggaccccaagctgtgctacctgctggatggcatcctgttcatctacggcgtgatcctgaccgccctgttcctgagagtgaagttcagcagaagcgccgacgcccctgcctaccagcagggacagaaccaactgtacaacgagctgaacctgggcagacgggaagagtacgacgtgctggacaagcggagaggcagggaccctgagatgggcggaaagccccagcggagaaagaacccccaggaaggactgtataacgaactccagaaagacaagatggccgaagcctacagcgagatcggcatgaagggcgagcggagaagaggcaagggccacgatggcctgtaccagggcctgagcaccgccaccaaggacacctatgacgccctgcacatgcaggccctgcctccaagaagggccaagcgatctggatctggagcaacaaacttctcactactcaaacaagcaggtgacgtggaggagaatcccgggcctactagtatggactggatttggcgcatccttttccttgtcggcgctgctaccggcgcgcattccttcgaagaaaatgtggaacagcaccccagcacactgagcgtgcaagagggcgatagcgccgtgattaagtgcacctacagcgacagcgccagcaactacttcccctggtacaagcaagagctgggcaaaagaccccagctcatcatcgacatccggtccaacgtgggcgagaagaaggaccagagaatcgccgtgacactgaacaagaccgccaagcacttcagcctgcacatcaccgagacacagcctgaggattccgccgtgtacttttgtgccgccaccgaggactaccagctgatttggggagccggcaccaagctgattatcaagcctgacacgcgtatccagaaccctgatcctgccgtgtaccagctgcgggatagcaagagcagcgacaagagcgtgtgtctgttcaccgacttcgacagccagaccaacgtgtcccagagcaaggactccgacgtgtacatcaccgataagtgcgtgctggacatgcggagcatggacttcaagagcaactccgccgtggcctggtccaacaagtccgatttcgcctgcgccaacgccttcaacaacagcattatccccgaggacacattcttcccaagcagcgacgtgccctgcggtacccagagttttgggttgttggaccctaaattgtgctatctgttggacggaatcctgttcatttacggagtgatcctgaccgcattgttcctgcgggttaagttttccagatccgcagacgcacccgcttaccaacaagggcagaaccaactctacaatgaacttaatttggggcggagggaagagtacgacgttctggacaaaaggaggggacgagatcccgagatgggcggaaagcctcagcgaaggaagaatccgcaagaggggctttataacgaactccagaaagataaaatggcagaagcctatagtgagattgggatgaagggagaaaggaggaggggtaaaggtcacgatgggttgtaccaaggattgagcacagccactaaagatacctatgatgcgctccacatgcaggccctgccgccaagacgcgccaagagaagcggatctggcgtgaagcagaccctgaatttcgacctgctgaagctggctggcgacgtggaatccaacccaggcccttctagaggccatatggctctgcctgtgacagctctgctgctgcctctggcactgctgcttcatgctgctagacctagccagtttagagtgtcccctctggacagaacctggaacctgggcgagacagtggaactgaagtgccaggtgctgctgagcaaccctacaagcggctgctcctggctgtttcagcctagaggtgcagccgcctctcctacctttctgctgtacctgagccagaacaagcccaaggccgccgaaggactggacacccagagattcagcggcaagagactgggcgacaccttcgtgctgaccctgagcgacttcagaagagagaacgagggctactacttctgtagcgccctgagcaacagcatcatgtacttcagccacttcgtgcccgtgtttctgcccgccaagcctacaacaacccctgctcctagacctcctacaccagctcctacaatcgccagccagcctctgtctctcagacccgaagcctgtagacctgctgctggcggagctgtgcataccagaggactggatttcgcctgcgacatctacatctgggctcctctggctggcacatgtggcgtgctgctgctgtccctggtcatcaccctgtactgcaaccaccggaacaggcggagagtgtgcaagtgccctagacctgtggtcaagagcggcgacaagcctagcctgagcgccagatatgtt

SEQ ID NO: 2540 - DNA, 2427 bp, synthetic construct
  source 1..2427: mol_type = other DNA
atggccttaccagtgaccgccttgctcctgccgctggccttgctgctccacgccgccaggccgggcattacacagagccccaagtacctgttcagaaaagagggccagaacgtcaccctgagctgcgagcagaacctgaaccacgacgccatgtactggtacagacaggacccaggccagggcctgagactgatctactacagccagatcgtgaacgacttccagaagggcgacattgccgagggctacagcgtgtccagagagaagaaagagtcctttccactgaccgtgacaagcgcccagaagaaccctaccgccttctacctgtgtgccagctctcctggcgctctgtacgagcagtatttcggccctggcaccagactgacagttacactcgaggacctgaagaacgtgttcccacctgaggtggccgtgttcgagcctagcgaggccgagatcagccacacccagaaagccaccctcgtgtgcctggctaccggcttctaccccgaccatgtggaactgtcttggtgggtcaacggcaaagaggtgcacagcggcgtgtgtaccgacccccagccactgaaagaacagcccgccctgaacgacagccggtactgcctgagcagcagactgagagtgtccgccaccttctggcagaacccccggaaccacttcagatgccaggtgcagttctacggcctgagcgagaacgacgagtggacccaggacagagccaagcccgtgacccagatcgtgtctgccgaagcctggggcagagccgattgcggatcccagagcttcggcctgctggaccccaagctgtgctacctgctggatggcatcctgttcatctacggcgtgatcctgaccgccctgttcctgagagtgaagttcagcagaagcgccgacgcccctgcctaccagcagggacagaaccaactgtacaacgagctgaacctgggcagacgggaagagtacgacgtgctggacaagcggagaggcagggaccctgagatgggcggaaagccccagcggagaaagaacccccaggaaggactgtataacgaactccagaaagacaagatggccgaagcctacagcgagatcggcatgaagggcgagcggagaagaggcaagggccacgatggcctgtaccagggcctgagcaccgccaccaaggacacctatgacgccctgcacatgcaggccctgcctccaagaagggccaagcgatctggatctggagcaacaaacttctcactactcaaacaagcaggtgacgtggaggagaatcccgggcctactagtatggactggatttggcgcatccttttccttgtcggcgctgctaccggcgcgcattccttcgaagaaaatgtggaacagcaccccagcacactgagcgtgcaagagggcgatagcgccgtgattaagtgcacctacagcgacagcgccagcaactacttcccctggtacaagcaagagctgggcaaaagaccccagctcatcatcgacatccggtccaacgtgggcgagaagaaggaccagagaatcgccgtgacactgaacaagaccgccaagcacttcagcctgcacatcaccgagacacagcctgaggattccgccgtgtacttttgtgccgccaccgaggactaccagctgatttggggagccggcaccaagctgattatcaagcctgacacgcgtatccagaaccctgatcctgccgtgtaccagctgcgggatagcaagagcagcgacaagagcgtgtgtctgttcaccgacttcgacagccagaccaacgtgtcccagagcaaggactccgacgtgtacatcaccgataagtgcgtgctggacatgcggagcatggacttcaagagcaactccgccgtggcctggtccaacaagtccgatttcgcctgcgccaacgccttcaacaacagcattatccccgaggacacattcttcccaagccccgagagcagctgcggtacccagagttttgggttgttggaccctaaattgtgctatctgttggacggaatcctgttcatttacggagtgatcctgaccgcattgttcctgcgggttaagttttccagatccgcagacgcacccgcttaccaacaagggcagaaccaactctacaatgaacttaatttggggcggagggaagagtacgacgttctggacaaaaggaggggacgagatcccgagatgggcggaaagcctcagcgaaggaagaatccgcaagaggggctttataacgaactccagaaagataaaatggcagaagcctatagtgagattgggatgaagggagaaaggaggaggggtaaaggtcacgatgggttgtaccaaggattgagcacagccactaaagatacctatgatgcgctccacatgcaggccctgccgccaaga

SEQ ID NO: 2541 - DNA, 2550 bp, synthetic construct
  source 1..2550: mol_type = other DNA
atggccttaccagtgaccgccttgctcctgccgctggccttgctgctccacgccgccaggccgggcattacacagagccccaagtacctgttcagaaaagagggccagaacgtcaccctgagctgcgagcagaacctgaaccacgacgccatgtactggtacagacaggacccaggccagggcctgagactgatctactacagccagatcgtgaacgacttccagaagggcgacattgccgagggctacagcgtgtccagagagaagaaagagtcctttccactgaccgtgacaagcgcccagaagaaccctaccgccttctacctgtgtgccagctctcctggcgctctgtacgagcagtatttcggccctggcaccagactgacagttacactcgagcagagcttcggcctgctggaccccaagctgtgctacctgctggatggcatcctgttcatctacggcgtgatcctgaccgccctgttcctgagagtgaagttcagcagaagcgccgacgcccctgcctaccagcagggacagaaccaactgtacaacgagctgaacctgggcagacgggaagagtacgacgtgctggacaagcggagaggcagggaccctgagatgggcggaaagccccagcggagaaagaacccccaggaaggactgtataacgaactccagaaagacaagatggccgaagcctacagcgagatcggcatgaagggcgagcggagaagaggcaagggccacgatggcctgtaccagggcctgagcaccgccaccaaggacacctatgacgccctgcacatgcaggccctgcctccaagaagggccaagcgatctggatctggagcaacaaacttctcactactcaaacaagcaggtgacgtggaggagaatcccgggcctactagtatggactggatttggcgcatccttttccttgtcggcgctgctaccggcgcgcattccttcgaagaaaatgtggaacagcaccccagcacactgagcgtgcaagagggcgatagcgccgtgattaagtgcacctacagcgacagcgccagcaactacttcccctggtacaagcaagagctgggcaaaagaccccagctcatcatcgacatccggtccaacgtgggcgagaagaaggaccagagaatcgccgtgacactgaacaagaccgccaagcacttcagcctgcacatcaccgagacacagcctgaggattccgccgtgtacttttgtgccgccaccgaggactaccagctgatttggggagccggcaccaagctgattatcaagcctgacacgcgtcagagttttgggttgttggaccctaaattgtgctatctgttggacggaatcctgttcatttacggagtgatcctgaccgcattgttcctgcgggttaagttttccagatccgcagacgcacccgcttaccaacaagggcagaaccaactctacaatgaacttaatttggggcggagggaagagtacgacgttctggacaaaaggaggggacgagatcccgagatgggcggaaagcctcagcgaaggaagaatccgcaagaggggctttataacgaactccagaaagataaaatggcagaagcctatagtgagattgggatgaagggagaaaggaggaggggtaaaggtcacgatgggttgtaccaaggattgagcacagccactaaagatacctatgatgcgctccacatgcaggccctgccgccaagacgcgccaagagaagcggatctggcgtgaagcagaccctgaatttcgacctgctgaagctggctggcgacgtggaatccaacccaggcccttctagaggccatatggctctgcctgtgacagctctgctgctgcctctggcactgctgcttcatgctgctagacctagccagtttagagtgtcccctctggacagaacctggaacctgggcgagacagtggaactgaagtgccaggtgctgctgagcaaccctacaagcggctgctcctggctgtttcagcctagaggtgcagccgcctctcctacctttctgctgtacctgagccagaacaagcccaaggccgccgaaggactggacacccagagattcagcggcaagagactgggcgacaccttcgtgctgaccctgagcgacttcagaagagagaacgagggctactacttctgtagcgccctgagcaacagcatcatgtacttcagccacttcgtgcccgtgtttctgcccgccaagcctacaacaacccctgctcctagacctcctacaccagctcctacaatcgccagccagcctctgtctctcagacccgaagcctgtagacctgctgctggcggagctgtgcataccagaggactggatttcgcctgcgacatctacatctgggctcctctggctggcacatgtggcgtgctgctgctgtccctggtcatcaccctgtactgcaaccaccggaacaggcggagagtgtgcaagtgccctagacctgtggtcaagagcggcgacaagcctagcctgagcgccagatatgtt

SEQ ID NO: 2542 - DNA, 2550 bp, synthetic construct
  source 1..2550: mol_type = other DNA
atggccttaccagtgaccgccttgctcctgccgctggccttgctgctccacgccgccaggccgggcattacacagagccccaagtacctgttcagaaaagagggccagaacgtcaccctgagctgcgagcagaacctgaaccacgacgccatgtactggtacagacaggacccaggccagggcctgagactgatctactacagccagatcgtgaacgacttccagaagggcgacattgccgagggctacagcgtgtccagagagaagaaagagtcctttccactgaccgtgacaagcgcccagaagaaccctaccgccttctacctgtgtgccagctctcctggcgctctgtacgagcagtatttcggccctggcaccagactgacagttacactcgaggacctgaagaacgtgttcccacctgaggtggccgtgttcgagcctagcgaggccgagatcagccacacccagaaagccaccctcgtgtgcctggctaccggcttctaccccgaccatgtggaactgtcttggtgggtcaacggcaaagaggtgcacagcggcgtgtgtaccgacccccagccactgaaagaacagcccgccctgaacgacagccggtactgcctgagcagcagactgagagtgtccgccaccttctggcagaacccccggaaccacttcagatgccaggtgcagttctacggcctgagcgagaacgacgagtggacccaggacagagccaagcccgtgacccagatcgtgtctgccgaagcctggggcagagccgattgcggatcccagagcttcggcctgctggaccccaagctgtgctacctgctggatggcatcctgttcatctacggcgtgatcctgaccgccctgttcctgaggagtaagaggagcaggctcctgcacagtgactacatgaacatgactccacgccgccccggacccacccgcaagcattaccagccctatgccccaccacgcgacttcgcagcctatcgctccagagtgaagttcagcagaagcgccgacgcccctgcctaccagcagggacagaaccaactgtacaacgagctgaacctgggcagacgggaagagtacgacgtgctggacaagcggagaggcagggaccctgagatgggcggaaagccccagcggagaaagaacccccaggaaggactgtataacgaactccagaaagacaagatggccgaagcctacagcgagatcggcatgaagggcgagcggagaagaggcaagggccacgatggcctgtaccagggcctgagcaccgccaccaaggacacctatgacgccctgcacatgcaggccctgcctccaagaagggccaagcgatctggatctggagcaacaaacttctcactactcaaacaagcaggtgacgtggaggagaatcccgggcctactagtatggactggatttggcgcatccttttccttgtcggcgctgctaccggcgcgcattccttcgaagaaaatgtggaacagcaccccagcacactgagcgtgcaagagggcgatagcgccgtgattaagtgcacctacagcgacagcgccagcaactacttcccctggtacaagcaagagctgggcaaaagaccccagctcatcatcgacatccggtccaacgtgggcgagaagaaggaccagagaatcgccgtgacactgaacaagaccgccaagcacttcagcctgcacatcaccgagacacagcctgaggattccgccgtgtacttttgtgccgccaccgaggactaccagctgatttggggagccggcaccaagctgattatcaagcctgacacgcgtatccagaaccctgatcctgccgtgtaccagctgcgggatagcaagagcagcgacaagagcgtgtgtctgttcaccgacttcgacagccagaccaacgtgtcccagagcaaggactccgacgtgtacatcaccgataagtgcgtgctggacatgcggagcatggacttcaagagcaactccgccgtggcctggtccaacaagtccgatttcgcctgcgccaacgccttcaacaacagcattatccccgaggacacattcttcccaagccccgagagcagctgcggtacccagagttttgggttgttggaccctaaattgtgctatctgttggacggaatcctgttcatttacggagtgatcctgaccgcattgttcctgcgggttaagttttccagatccgcagacgcacccgcttaccaacaagggcagaaccaactctacaatgaacttaatttggggcggagggaagagtacgacgttctggacaaaaggaggggacgagatcccgagatgggcggaaagcctcagcgaaggaagaatccgcaagaggggctttataacgaactccagaaagataaaatggcagaagcctatagtgagattgggatgaagggagaaaggaggaggggtaaaggtcacgatgggttgtaccaaggattgagcacagccactaaagatacctatgatgcgctccacatgcaggccctgccgccaaga

SEQ ID NO: 2543 - DNA, 2673 bp, synthetic construct
  source 1..2673: mol_type = other DNA
atggccttaccagtgaccgccttgctcctgccgctggccttgctgctccacgccgccaggccgggcattacacagagccccaagtacctgttcagaaaagagggccagaacgtcaccctgagctgcgagcagaacctgaaccacgacgccatgtactggtacagacaggacccaggccagggcctgagactgatctactacagccagatcgtgaacgacttccagaagggcgacattgccgagggctacagcgtgtccagagagaagaaagagtcctttccactgaccgtgacaagcgcccagaagaaccctaccgccttctacctgtgtgccagctctcctggcgctctgtacgagcagtatttcggccctggcaccagactgacagttacactcgaggacctgaagaacgtgttcccacctgaggtggccgtgttcgagcctagcgaggccgagatcagccacacccagaaagccaccctcgtgtgcctggctaccggcttctaccccgaccatgtggaactgtcttggtgggtcaacggcaaagaggtgcacagcggcgtgtgtaccgacccccagccactgaaagaacagcccgccctgaacgacagccggtactgcctgagcagcagactgagagtgtccgccaccttctggcagaacccccggaaccacttcagatgccaggtgcagttctacggcctgagcgagaacgacgagtggacccaggacagagccaagcccgtgacccagatcgtgtctgccgaagcctggggcagagccgattgcggatcccagagcttcggcctgctggaccccaagctgtgctacctgctggatggcatcctgttcatctacggcgtgatcctgaccgccctgttcctgaggagtaagaggagcaggctcctgcacagtgactacatgaacatgactccacgccgccccggacccacccgcaagcattaccagccctatgccccaccacgcgacttcgcagcctatcgctccagagtgaagttcagcagaagcgccgacgcccctgcctaccagcagggacagaaccaactgtacaacgagctgaacctgggcagacgggaagagtacgacgtgctggacaagcggagaggcagggaccctgagatgggcggaaagccccagcggagaaagaacccccaggaaggactgtataacgaactccagaaagacaagatggccgaagcctacagcgagatcggcatgaagggcgagcggagaagaggcaagggccacgatggcctgtaccagggcctgagcaccgccaccaaggacacctatgacgccctgcacatgcaggccctgcctccaagaagggccaagcgatctggatctggagcaacaaacttctcactactcaaacaagcaggtgacgtggaggagaatcccgggcctactagtatggactggatttggcgcatccttttccttgtcggcgctgctaccggcgcgcattccttcgaagaaaatgtggaacagcaccccagcacactgagcgtgcaagagggcgatagcgccgtgattaagtgcacctacagcgacagcgccagcaactacttcccctggtacaagcaagagctgggcaaaagaccccagctcatcatcgacatccggtccaacgtgggcgagaagaaggaccagagaatcgccgtgacactgaacaagaccgccaagcacttcagcctgcacatcaccgagacacagcctgaggattccgccgtgtacttttgtgccgccaccgaggactaccagctgatttggggagccggcaccaagctgattatcaagcctgacacgcgtatccagaaccctgatcctgccgtgtaccagctgcgggatagcaagagcagcgacaagagcgtgtgtctgttcaccgacttcgacagccagaccaacgtgtcccagagcaaggactccgacgtgtacatcaccgataagtgcgtgctggacatgcggagcatggacttcaagagcaactccgccgtggcctggtccaacaagtccgatttcgcctgcgccaacgccttcaacaacagcattatccccgaggacacattcttcccaagccccgagagcagctgcggtacccagagttttgggttgttggaccctaaattgtgctatctgttggacggaatcctgttcatttacggagtgatcctgaccgcattgttcctgaggagcaagcggtcacggctgctccacagcgattacatgaatatgacaccacgaagaccgggtcctactcgcaaacactaccaaccctacgcacctccccgcgactttgcagcgtaccgatctcgggttaagttttccagatccgcagacgcacccgcttaccaacaagggcagaaccaactctacaatgaacttaatttggggcggagggaagagtacgacgttctggacaaaaggaggggacgagatcccgagatgggcggaaagcctcagcgaaggaagaatccgcaagaggggctttataacgaactccagaaagataaaatggcagaagcctatagtgagattgggatgaagggagaaaggaggaggggtaaaggtcacgatgggttgtaccaaggattgagcacagccactaaagatacctatgatgcgctccacatgcaggccctgccgccaaga

SEQ ID NO: 2544 - DNA, 2427 bp, synthetic construct
  source 1..2427: mol_type = other DNA
atggccttaccagtgaccgccttgctcctgccgctggccttgctgctccacgccgccaggccgggcattacacagagccccaagtacctgttcagaaaagagggccagaacgtcaccctgagctgcgagcagaacctgaaccacgacgccatgtactggtacagacaggacccaggccagggcctgagactgatctactacagccagatcgtgaacgacttccagaagggcgacattgccgagggctacagcgtgtccagagagaagaaagagtcctttccactgaccgtgacaagcgcccagaagaaccctaccgccttctacctgtgtgccagctctcctggcgctctgtacgagcagtatttcggccctggcaccagactgacagttacactcgaggacctgaagaacgtgttcccacctgaggtggccgtgttcgagcctagcgaggccgagatcagccacacccagaaagccaccctcgtgtgcctggctaccggcttctaccccgaccatgtggaactgtcttggtgggtcaacggcaaagaggtgcacagcggcgtgtctaccgacccccagccactgaaagaacagcccgccctgaacgacagccggtactgcctgagcagcagactgagagtgtccgccaccttctggcagaacccccggaaccacttcagatgccaggtgcagttctacggcctgagcgagaacgacgagtggacccaggacagagccaagcccgtgacccagatcgtgtctgccgaagcctggggcagagccgattgcggatcccagagcttcggcctgctggaccccaagctgtgctacctgctggatggcatcctgttcatctacggcgtgatcctgaccgccctgttcctgagagtgaagttcagcagaagcgccgacgcccctgcctaccagcagggacagaaccaactgtacaacgagctgaacctgggcagacgggaagagtacgacgtgctggacaagcggagaggcagggaccctgagatgggcggaaagccccagcggagaaagaacccccaggaaggactgtataacgaactccagaaagacaagatggccgaagcctacagcgagatcggcatgaagggcgagcggagaagaggcaagggccacgatggcctgtaccagggcctgagcaccgccaccaaggacacctatgacgccctgcacatgcaggccctgcctccaagaagggccaagcgatctggatctggagcaacaaacttctcactactcaaacaagcaggtgacgtggaggagaatcccgggcctactagtatggactggatttggcgcatccttttccttgtcggcgctgctaccggcgcgcattccttcgaagaaaatgtggaacagcaccccagcacactgagcgtgcaagagggcgatagcgccgtgattaagtgcacctacagcgacagcgccagcaactacttcccctggtacaagcaagagctgggcaaaagaccccagctcatcatcgacatccggtccaacgtgggcgagaagaaggaccagagaatcgccgtgacactgaacaagaccgccaagcacttcagcctgcacatcaccgagacacagcctgaggattccgccgtgtacttttgtgccgccaccgaggactaccagctgatttggggagccggcaccaagctgattatcaagcctgacacgcgtatccagaaccctgatcctgccgtgtaccagctgcgggatagcaagagcagcgacaagagcgtgtgtctgttcaccgacttcgacagccagaccaacgtgtcccagagcaaggactccgacgtgtacatcaccgataagaccgtgctggacatgcggagcatggacttcaagagcaactccgccgtggcctggtccaacaagtccgatttcgcctgcgccaacgccttcaacaacagcattatccccgaggacacattcttcccaagccccgagagcagctgcggtacccagagttttgggttgttggaccctaaattgtgctatctgttggacggaatcctgttcatttacggagtgatcctgaccgcattgttcctgcgggttaagttttccagatccgcagacgcacccgcttaccaacaagggcagaaccaactctacaatgaacttaatttggggcggagggaagagtacgacgttctggacaaaaggaggggacgagatcccgagatgggcggaaagcctcagcgaaggaagaatccgcaagaggggctttataacgaactccagaaagataaaatggcagaagcctatagtgagattgggatgaagggagaaaggaggaggggtaaaggtcacgatgggttgtaccaaggattgagcacagccactaaagatacctatgatgcgctccacatgcaggccctgccgccaaga

SEQ ID NO: 2545 - DNA, 3159 bp, synthetic construct
  source 1..3159: mol_type = other DNA
atggccttaccagtgaccgccttgctcctgccgctggccttgctgctccacgccgccaggccgggcattacacagagccccaagtacctgttcagaaaagagggccagaacgtcaccctgagctgcgagcagaacctgaaccacgacgccatgtactggtacagacaggacccaggccagggcctgagactgatctactacagccagatcgtgaacgacttccagaagggcgacattgccgagggctacagcgtgtccagagagaagaaagagtcctttccactgaccgtgacaagcgcccagaagaaccctaccgccttctacctgtgtgccagctctcctggcgctctgtacgagcagtatttcggccctggcaccagactgacagttacactcgaggacaagcagctggacgccgacgtgtcccccaagcctaccatcttcctgccctctatcgccgagacaaagctccagaaggccggcacctacctgtgcctgctggaaaagttcttcccagatgtgattaagatccactggcaggaaaagaagtccaacaccatcctgggcagccaggaaggcaacaccatgaagaccaacgacacctacatgaagttcagctggctgaccgtgcccgagaagtccctggacaaagaacacagatgcatcgtgcggcacgaaaacaacaagaacggcgtggaccaggaaatcatcttcccacccatcaagaccgatgtgattacaggatcccagagcttcggcctgctggaccccaagctgtgctacctgctggatggcatcctgttcatctacggcgtgatcctgaccgccctgttcctgagagtgaagttcagcagaagcgccgacgcccctgcctaccagcagggacagaaccaactgtacaacgagctgaacctgggcagacgggaagagtacgacgtgctggacaagcggagaggcagggaccctgagatgggcggaaagccccagcggagaaagaacccccaggaaggactgtataacgaactccagaaagacaagatggccgaagcctacagcgagatcggcatgaagggcgagcggagaagaggcaagggccacgatggcctgtaccagggcctgagcaccgccaccaaggacacctatgacgccctgcacatgcaggccctgcctccaagaagggccaagcgatctggatctggagcaacaaacttctcactactcaaacaagcaggtgacgtggaggagaatcccgggcctactagtatggactggatttggcgcatccttttccttgtcggcgctgctaccggcgcgcattccttcgaagaaaatgtggaacagcaccccagcacactgagcgtgcaagagggcgatagcgccgtgattaagtgcacctacagcgacagcgccagcaactacttcccctggtacaagcaagagctgggcaaaagaccccagctcatcatcgacatccggtccaacgtgggcgagaagaaggaccagagaatcgccgtgacactgaacaagaccgccaagcacttcagcctgcacatcaccgagacacagcctgaggattccgccgtgtacttttgtgccgccaccgaggactaccagctgatttggggagccggcaccaagctgattatcaagcctgacacgcgtagccagcctcacaccaagcccagcgtgttcgtgatgaagaacggcaccaacgtggcctgcctcgtgaaagagttctaccccaaggacatcaggatcaacctggtgtccagcaagaagatcaccgagttcgaccccgccatcgtgatctcccccagcggcaagtacaacgccgtgaagctggggaagtacgaggacagcaacagcgtgacctgctccgtgcagcacgacaacaagaccgtgcacagcaccgactttggtacccagagttttgggttgttggaccctaaattgtgctatctgttggacggaatcctgttcatttacggagtgatcctgaccgcattgttcctgcgggttaagttttccagatccgcagacgcacccgcttaccaacaagggcagaaccaactctacaatgaacttaatttggggcggagggaagagtacgacgttctggacaaaaggaggggacgagatcccgagatgggcggaaagcctcagcgaaggaagaatccgcaagaggggctttataacgaactccagaaagataaaatggcagaagcctatagtgagattgggatgaagggagaaaggaggaggggtaaaggtcacgatgggttgtaccaaggattgagcacagccactaaagatacctatgatgcgctccacatgcaggccctgccgccaagacgcgccaagagaagcggatctggcgtgaagcagaccctgaatttcgacctgctgaagctggctggcgacgtggaatccaacccaggcccttctagaggccatatggctctgcctgtgacagctctgctgctgcctctggcactgctgcttcatgctgctagacctagccagtttagagtgtcccctctggacagaacctggaacctgggcgagacagtggaactgaagtgccaggtgctgctgagcaaccctacaagcggctgctcctggctgtttcagcctagaggtgcagccgcctctcctacctttctgctgtacctgagccagaacaagcccaaggccgccgaaggactggacacccagagattcagcggcaagagactgggcgacaccttcgtgctgaccctgagcgacttcagaagagagaacgagggctactacttctgtagcgccctgagcaacagcatcatgtacttcagccacttcgtgcccgtgtttctgcccgccaagcctacaacaacccctgctcctagacctcctacaccagctcctacaatcgccagccagcctctgtctctcagacccgaagcctgtagacctgctgctggcggagctgtgcataccagaggactggatttcgcctgcgacatctacatctgggctcctctggctggcacatgtggcgtgctgctgctgtccctggtcatcaccctgtactgcaaccaccggaacaggcggagagtgtgcaagtgccctagacctgtggtcaagagcggcgacaagcctagcctgagcgccagatatgtt

SEQ ID NO: 2546 - DNA, 2763 bp, synthetic construct
  source 1..2763: mol_type = other DNA
atggccttaccagtgaccgccttgctcctgccgctggccttgctgctccacgccgccaggccgggcattacacagagccccaagtacctgttcagaaaagagggccagaacgtcaccctgagctgcgagcagaacctgaaccacgacgccatgtactggtacagacaggacccaggccagggcctgagactgatctactacagccagatcgtgaacgacttccagaagggcgacattgccgagggctacagcgtgtccagagagaagaaagagtcctttccactgaccgtgacaagcgcccagaagaaccctaccgccttctacctgtgtgccagctctcctggcgctctgtacgagcagtatttcggccctggcaccagactgacagttacactcgagggacagcctaaggccaatcctaccgtgacactgttccctccaagcagcgaagaactccaggccaacaaggccacacttgtgtgcctgatctccgacttctaccctggggctgtgacagtggcttggaaggccgatggatctcctgtgaaagccggcgtggaaaccaccaagccatccaagcagagcaacaacaaatacgccgccagctcctacctgagcctgacacctgagcagtggaagtcccacagatcctacagctgccaagtgacccacgaaggcagcaccgtggaaaagacagtggcccctacagagtgcagcacaacacctggcgagagaagtagcctgcctgccttctatcctggcaccagcggctcttgttctggctgtggatctctgagcctgcctctgctggctggactggttgctgctgatgctgtggcctctctgctgattgtgggagccgtgttcctgtgcgccagacctagaagaagccccgctcaagaggacggcaaggtgtacatcaacatgcccggcagaggaagggccaagcgatctggatctggagcaacaaacttctcactactcaaacaagcaggtgacgtggaggagaatcccgggcctactagtatggactggatttggcgcatccttttccttgtcggcgctgctaccggcgcgcattccttcgaagaaaatgtggaacagcaccccagcacactgagcgtgcaagagggcgatagcgccgtgattaagtgcacctacagcgacagcgccagcaactacttcccctggtacaagcaagagctgggcaaaagaccccagctcatcatcgacatccggtccaacgtgggcgagaagaaggaccagagaatcgccgtgacactgaacaagaccgccaagcacttcagcctgcacatcaccgagacacagcctgaggattccgccgtgtacttttgtgccgccaccgaggactaccagctgatttggggagccggcaccaagctgattatcaagcctgacacgcgtgcctctacaaagggaccctccgtgtttcctctggctcccagcagcaagtctacaagcggaggaacagccgctctgggctgcctggtcaaggattactttcccgagcctgtgaccgtgtcctggaatagcggagcactgacaagcggcgtgcacacctttccagccgtgctgcaaagcagcggcctgtactctctgagcagcgtggtcacagtgcctagctctagcctgggcacccagacctacatctgcaatgtgaaccacaagcctagcaacaccaaggtggacaagagagtggaacccaagagctgtacaacgccgggcgaaaggagttccttgccggccttttaccccggcacaagcggaagctgtagtgggtgtggaagcctcagcctcccacttcttgcgggcctcgtcgcggcagatgcagtagcttcacttcttattgtaggcgcggtatttctctgtgctcgaccaaggaggtcacccgctcaggaggatggtaaggtgtatataaatatgccaggacgcggacgcgccaagagaagcggatctggcgtgaagcagaccctgaatttcgacctgctgaagctggctggcgacgtggaatccaacccaggcccttctagaggccatatggctctgcctgtgacagctctgctgctgcctctggcactgctgcttcatgctgctagacctagccagtttagagtgtcccctctggacagaacctggaacctgggcgagacagtggaactgaagtgccaggtgctgctgagcaaccctacaagcggctgctcctggctgtttcagcctagaggtgcagccgcctctcctacctttctgctgtacctgagccagaacaagcccaaggccgccgaaggactggacacccagagattcagcggcaagagactgggcgacaccttcgtgctgaccctgagcgacttcagaagagagaacgagggctactacttctgtagcgccctgagcaacagcatcatgtacttcagccacttcgtgcccgtgtttctgcccgccaagcctacaacaacccctgctcctagacctcctacaccagctcctacaatcgccagccagcctctgtctctcagacccgaagcctgtagacctgctgctggcggagctgtgcataccagaggactggatttcgcctgcgacatctacatctgggctcctctggctggcacatgtggcgtgctgctgctgtccctggtcatcaccctgtactgcaaccaccggaacaggcggagagtgtgcaagtgccctagacctgtggtcaagagcggcgacaagcctagcctgagcgccagatatgtt

SEQ ID NO: 2547 - DNA, 2250 bp, synthetic construct
  source 1..2250: mol_type = other DNA
atggccttaccagtgaccgccttgctcctgccgctggccttgctgctccacgccgccaggccgggcattacacagagccccaagtacctgttcagaaaagagggccagaacgtcaccctgagctgcgagcagaacctgaaccacgacgccatgtactggtacagacaggacccaggccagggcctgagactgatctactacagccagatcgtgaacgacttccagaagggcgacattgccgagggctacagcgtgtccagagagaagaaagagtcctttccactgaccgtgacaagcgcccagaagaaccctaccgccttctacctgtgtgccagctctcctggcgctctgtacgagcagtatttcggccctggcaccagactgacagttacactcgagggcgacatcgagaacaccagtctggcccctgaggaccctacctttcctgccgatacctggggcacctacctgctgaccacagagacaggactccagaaagatcacgccctgtgggaccacacagcccagaacctgctgagaatgggcctcgcctttctggtgctggttgccctcgtgtggttcctggtggaagattggctgagccggaagcggacaagagagagagccagcagagcctctacctgggagggaagaagaaggctgaacacccagacacttagggccaagcgatctggatctggagcaacaaacttctcactactcaaacaagcaggtgacgtggaggagaatcccgggcctactagtatggactggatttggcgcatccttttccttgtcggcgctgctaccggcgcgcattccttcgaagaaaatgtggaacagcaccccagcacactgagcgtgcaagagggcgatagcgccgtgattaagtgcacctacagcgacagcgccagcaactacttcccctggtacaagcaagagctgggcaaaagaccccagctcatcatcgacatccggtccaacgtgggcgagaagaaggaccagagaatcgccgtgacactgaacaagaccgccaagcacttcagcctgcacatcaccgagacacagcctgaggattccgccgtgtacttttgtgccgccaccgaggactaccagctgatttggggagccggcaccaagctgattatcaagcctgacacgcgtggcgatattgagaatacctctctggccccagaagatcctacattccccgccgacacatggggaacatatctgctgacaaccgaaaccgggctgcaaaaggaccatgctctgtgggatcataccgctcagaatctgcttcggatggggcttgcattcctggtcctggtggctcttgtctggtttctggtcgaggactggctgtcccggaagagaaccagagaaagagcttccagggccagcacctgggaaggcagacgcagactgaatactcagaccctgcgcgccaagagaagcggatctggcgtgaagcagaccctgaatttcgacctgctgaagctggctggcgacgtggaatccaacccaggcccttctagaggccatatggctctgcctgtgacagctctgctgctgcctctggcactgctgcttcatgctgctagacctagccagtttagagtgtcccctctggacagaacctggaacctgggcgagacagtggaactgaagtgccaggtgctgctgagcaaccctacaagcggctgctcctggctgtttcagcctagaggtgcagccgcctctcctacctttctgctgtacctgagccagaacaagcccaaggccgccgaaggactggacacccagagattcagcggcaagagactgggcgacaccttcgtgctgaccctgagcgacttcagaagagagaacgagggctactacttctgtagcgccctgagcaacagcatcatgtacttcagccacttcgtgcccgtgtttctgcccgccaagcctacaacaacccctgctcctagacctcctacaccagctcctacaatcgccagccagcctctgtctctcagacccgaagcctgtagacctgctgctggcggagctgtgcataccagaggactggatttcgcctgcgacatctacatctgggctcctctggctggcacatgtggcgtgctgctgctgtccctggtcatcaccctgtactgcaaccaccggaacaggcggagagtgtgcaagtgccctagacctgtggtcaagagcggcgacaagcctagcctgagcgccagatatgtt

SEQ ID NO: 2548 - DNA, 2082 bp, synthetic construct
  source 1..2082: mol_type = other DNA
atggccttaccagtgaccgccttgctcctgccgctggccttgctgctccacgccgccaggccgggcattacacagagccccaagtacctgttcagaaaagagggccagaacgtcaccctgagctgcgagcagaacctgaaccacgacgccatgtactggtacagacaggacccaggccagggcctgagactgatctactacagccagatcgtgaacgacttccagaagggcgacattgccgagggctacagcgtgtccagagagaagaaagagtcctttccactgaccgtgacaagcgcccagaagaaccctaccgccttctacctgtgtgccagctctcctggcgctctgtacgagcagtatttcggccctggcaccagactgacagttacactcgagatcactcaaggtttggcagtgtcaaccatctcatcattctttccacctggctaccaagtgtccttctgcctggtcatggtgctgctgttcgccgtggataccggcctgtacttcagcgtcaagaccaacatccggtccagcaccagagactggaaggaccacaagttcaagtggcggaaggaccctcaggacaagagggccaagcgatctggatctggagcaacaaacttctcactactcaaacaagcaggtgacgtggaggagaatcccgggcctactagtatggactggatttggcgcatccttttccttgtcggcgctgctaccggcgcgcattccttcgaagaaaatgtggaacagcaccccagcacactgagcgtgcaagagggcgatagcgccgtgattaagtgcacctacagcgacagcgccagcaactacttcccctggtacaagcaagagctgggcaaaagaccccagctcatcatcgacatccggtccaacgtgggcgagaagaaggaccagagaatcgccgtgacactgaacaagaccgccaagcacttcagcctgcacatcaccgagacacagcctgaggattccgccgtgtacttttgtgccgccaccgaggactaccagctgatttggggagccggcaccaagctgattatcaagcctgacacgcgtatcacccagggcctggccgtgtctaccatcagcagctttttcccacccggctaccaggtgtccttctgcctcgtgatggtgctgctgttcgccgtggacaccggcctgtacttcagcgtgaaaacaaacatccggtccagcaccagagactggaaggaccacaagttcaagtggcggaaggacccccaggacaagcgcgccaagagaagcggatctggcgtgaagcagaccctgaatttcgacctgctgaagctggctggcgacgtggaatccaacccaggcccttctagaggccatatggctctgcctgtgacagctctgctgctgcctctggcactgctgcttcatgctgctagacctagccagtttagagtgtcccctctggacagaacctggaacctgggcgagacagtggaactgaagtgccaggtgctgctgagcaaccctacaagcggctgctcctggctgtttcagcctagaggtgcagccgcctctcctacctttctgctgtacctgagccagaacaagcccaaggccgccgaaggactggacacccagagattcagcggcaagagactgggcgacaccttcgtgctgaccctgagcgacttcagaagagagaacgagggctactacttctgtagcgccctgagcaacagcatcatgtacttcagccacttcgtgcccgtgtttctgcccgccaagcctacaacaacccctgctcctagacctcctacaccagctcctacaatcgccagccagcctctgtctctcagacccgaagcctgtagacctgctgctggcggagctgtgcataccagaggactggatttcgcctgcgacatctacatctgggctcctctggctggcacatgtggcgtgctgctgctgtccctggtcatcaccctgtactgcaaccaccggaacaggcggagagtgtgcaagtgccctagacctgtggtcaagagcggcgacaagcctagcctgagcgccagatatgtt

SEQ ID NO: 2549 - DNA, 2388 bp, synthetic construct
  source 1..2388: mol_type = other DNA
atggccttaccagtgaccgccttgctcctgccgctggccttgctgctccacgccgccaggccgggcgttacccagacacctaagttccgggtgctgaaaaccggccagagcatgacactgctgtgcgcccaggacatgaaccacgagtacatgtattggtacagacaggaccccggcatgggcctgagactgatccactattctgtcggcgagggcaccacagccaaaggcgaagttcctgacggctacaacgtgtcccggctgaagaagcagaacttcctgctgggcctcgaaagcgccgctccatctcagaccagcgtgtacttctgtgccagccggggctaccacagactgaacaacgagcagttcttcggccctggcaccagactgacagttggacagcctaaggccaatcctaccgtgacactgttccctccaagcagcgaagaactccaggccaacaaggccacacttgtgtgcctgatctccgacttctaccctggggctgtgacagtggcttggaaggccgatggatctcctgtgaaagccggcgtggaaaccaccaagccatccaagcagagcaacaacaaatacgccgccagctcctacctgagcctgacacctgagcagtggaagtcccacagatcctacagctgccaagtgacccacgaaggcagcaccgtggaaaagacagtggcccctacagagtgcagcggatcccagagcttcggcctgctggaccccaagctgtgctacctgctggatggcatcctgttcatctacggcgtgatcctgaccgccctgttcctgagagtgaagttcagcagaagcgccgacgcccctgcctaccagcagggacagaaccaactgtacaacgagctgaacctgggcagacgggaagagtacgacgtgctggacaagcggagaggcagggaccctgagatgggcggaaagccccagcggagaaagaacccccaggaaggactgtataacgaactccagaaagacaagatggccgaagcctacagcgagatcggcatgaagggcgagcggagaagaggcaagggccacgatggcctgtaccagggcctgagcaccgccaccaaggacacctatgacgccctgcacatgcaggccctgcctccaagaagggccaagcgatctggatctggagcaacaaacttctcactactcaaacaagcaggtgacgtggaggagaatcccgggcctactagtatggactggatttggcgcatccttttccttgtcggcgctgctaccggcgcgcattccttcgaacagagaaaagaggtggaacaggaccctggacctttcaacgttccagagggcgctaccgtggccttcaactgcacctacagcaatagcgccagccagagcttcttctggtatcggcaggactgccggaaagaacccaagctgctgatgagcgtgtacagcagcggcaacgaggacggcagattcacagcccagctgaacagagccagccagtacatctctctgctgatccgggacagcaagctgagcgatagcgccacctatctgtgcgtggtcaagcctgatcctggcgctggaagctaccagctgacatttggcaagggcaccaagctgtctgtgatccccaatgcctctacaaagggaccctccgtgtttcctctggctcccagcagcaagtctacaagcggaggaacagccgctctgggctgcctggtcaaggattactttcccgagcctgtgaccgtgtcctggaatagcggagcactgacaagcggcgtgcacacctttccagccgtgctgcaaagcagcggcctgtactctctgagcagcgtggtcacagtgcctagctctagcctgggcacccagacctacatctgcaatgtgaaccacaagcctagcaacaccaaggtggacaagagagtggaacccaagagctgtggtacccagagttttgggttgttggaccctaaattgtgctatctgttggacggaatcctgttcatttacggagtgatcctgaccgcattgttcctgcgggttaagttttccagatccgcagacgcacccgcttaccaacaagggcagaaccaactctacaatgaacttaatttggggcggagggaagagtacgacgttctggacaaaaggaggggacgagatcccgagatgggcggaaagcctcagcgaaggaagaatccgcaagaggggctttataacgaactccagaaagataaaatggcagaagcctatagtgagattgggatgaagggagaaaggaggaggggtaaaggtcacgatgggttgtaccaaggattgagcacagccactaaagatacctatgatgcgctccacatgcaggccctgccgccaaga

SEQ ID NO: 2550 - DNA, 1686 bp, synthetic construct
  source 1..1686: mol_type = other DNA
atggccttaccagtgaccgccttgctcctgccgctggccttgctgctccacgccgccaggccgggcgttacccagacacctaagttccgggtgctgaaaaccggccagagcatgacactgctgtgcgcccaggacatgaaccacgagtacatgtattggtacagacaggaccccggcatgggcctgagactgatccactattctgtcggcgagggcaccacagccaaaggcgaagttcctgacggctacaacgtgtcccggctgaagaagcagaacttcctgctgggcctcgaaagcgccgctccatctcagaccagcgtgtacttctgtgccagccggggctaccacagactgaacaacgagcagttcttcggccctggcaccagactgacagttctcgagcagagcttcggcctgctggaccccaagctgtgctacctgctggatggcatcctgttcatctacggcgtgatcctgaccgccctgttcctgagagtgaagttcagcagaagcgccgacgcccctgcctaccagcagggacagaaccaactgtacaacgagctgaacctgggcagacgggaagagtacgacgtgctggacaagcggagaggcagggaccctgagatgggcggaaagccccagcggagaaagaacccccaggaaggactgtataacgaactccagaaagacaagatggccgaagcctacagcgagatcggcatgaagggcgagcggagaagaggcaagggccacgatggcctgtaccagggcctgagcaccgccaccaaggacacctatgacgccctgcacatgcaggccctgcctccaagaagggccaagcgatctggatctggagcaacaaacttctcactactcaaacaagcaggtgacgtggaggagaatcccgggcctactagtatggactggatttggcgcatccttttccttgtcggcgctgctaccggcgcgcattccttcgaacagagaaaagaggtggaacaggaccctggacctttcaacgttccagagggcgctaccgtggccttcaactgcacctacagcaatagcgccagccagagcttcttctggtatcggcaggactgccggaaagaacccaagctgctgatgagcgtgtacagcagcggcaacgaggacggcagattcacagcccagctgaacagagccagccagtacatctctctgctgatccgggacagcaagctgagcgatagcgccacctatctgtgcgtggtcaagcctgatcctggcgctggaagctaccagctgacatttggcaagggcaccaagctgtctgtgatccccaatacgcgtcagagttttgggttgttggaccctaaattgtgctatctgttggacggaatcctgttcatttacggagtgatcctgaccgcattgttcctgcgggttaagttttccagatccgcagacgcacccgcttaccaacaagggcagaaccaactctacaatgaacttaatttggggcggagggaagagtacgacgttctggacaaaaggaggggacgagatcccgagatgggcggaaagcctcagcgaaggaagaatccgcaagaggggctttataacgaactccagaaagataaaatggcagaagcctatagtgagattgggatgaagggagaaaggaggaggggtaaaggtcacgat

SEQ ID NO: 2551 - DNA, 2838 bp, synthetic construct
  source 1..2838: mol_type = other DNA
atggccttaccagtgaccgccttgctcctgccgctggccttgctgctccacgccgccaggccgggcgttacccagacacctaagttccgggtgctgaaaaccggccagagcatgacactgctgtgcgcccaggacatgaaccacgagtacatgtattggtacagacaggaccccggcatgggcctgagactgatccactattctgtcggcgagggcaccacagccaaaggcgaagttcctgacggctacaacgtgtcccggctgaagaagcagaacttcctgctgggcctcgaaagcgccgctccatctcagaccagcgtgtacttctgtgccagccggggctaccacagactgaacaacgagcagttcttcggccctggcaccagactgacagttctcgagacaacacctggcgagagaagtagcctgcctgccttctatcctggcaccagcggctcttgttctggctgtggatctctgagcctgcctctgctggctggactggttgctgctgatgctgtggcctctctgctgattgtgggagccgtgttcctgtgcgccagacctagaagaagccccgctcaagaggacggcaaggtgtacatcaacatgcccggcagaggaagcactagtagagtgaagttcagcagaagcgccgacgcccctgcctaccagcagggacagaaccaactgtacaacgagctgaacctgggcagacgggaagagtacgacgtgctggacaagcggagaggcagggaccctgagatgggcggaaagccccagcggagaaagaacccccaggaaggactgtataacgaactccagaaagacaagatggccgaagcctacagcgagatcggcatgaagggcgagcggagaagaggcaagggccacgatggcctgtaccagggcctgagcaccgccaccaaggacacctatgacgccctgcacatgcaggccctgcctccaagaagggccaagcgatctggatctggagcaacaaacttctcactactcaaacaagcaggtgacgtggaggagaatcccgggcctatggactggatttggcgcatccttttccttgtcggcgctgctaccggcgcgcattccttcgaacagagaaaagaggtggaacaggaccctggacctttcaacgttccagagggcgctaccgtggccttcaactgcacctacagcaatagcgccagccagagcttcttctggtatcggcaggactgccggaaagaacccaagctgctgatgagcgtgtacagcagcggcaacgaggacggcagattcacagcccagctgaacagagccagccagtacatctctctgctgatccgggacagcaagctgagcgatagcgccacctatctgtgcgtggtcaagcctgatcctggcgctggaagctaccagctgacatttggcaagggcaccaagctgtctgtgatccccaatacgcgtacaacgccgggcgaaaggagttccttgccggccttttaccccggcacaagcggaagctgtagtgggtgtggaagcctcagcctcccacttcttgcgggcctcgtcgcggcagatgcagtagcttcacttcttattgtaggcgcggtatttctctgtgctcgaccaaggaggtcacccgctcaggaggatggtaaggtgtatataaatatgccaggacgcggaagctctagacgggttaagttttccagatccgcagacgcacccgcttaccaacaagggcagaaccaactctacaatgaacttaatttggggcggagggaagagtacgacgttctggacaaaaggaggggacgagatcccgagatgggcggaaagcctcagcgaaggaagaatccgcaagaggggctttataacgaactccagaaagataaaatggcagaagcctatagtgagattgggatgaagggagaaaggaggaggggtaaaggtcacgatgggttgtaccaaggattgagcacagccactaaagatacctatgatgcgctccacatgcaggccctgccgccaagacgcgccaagagaagcggatctggcgtgaagcagaccctgaatttcgacctgctgaagctggctggcgacgtggaatccaacccaggccctggccatatggctctgcctgtgacagctctgctgctgcctctggcactgctgcttcatgctgctagacctagccagtttagagtgtcccctctggacagaacctggaacctgggcgagacagtggaactgaagtgccaggtgctgctgagcaaccctacaagcggctgctcctggctgtttcagcctagaggtgcagccgcctctcctacctttctgctgtacctgagccagaacaagcccaaggccgccgaaggactggacacccagagattcagcggcaagagactgggcgacaccttcgtgctgaccctgagcgacttcagaagagagaacgagggctactacttctgtagcgccctgagcaacagcatcatgtacttcagccacttcgtgcccgtgtttctgcccgccaagcctacaacaacccctgctcctagacctcctacaccagctcctacaatcgccagccagcctctgtctctcagacccgaagcctgtagacctgctgctggcggagctgtgcataccagaggactggatttcgcctgcgacatctacatctgggctcctctggctggcacatgtggcgtgctgctgctgtccctggtcatcaccctgtactgcaaccaccggaacaggcggagagtgtgcaagtgccctagacctgtggtcaagagcggcgacaagcctagcctgagcgccagatatgtt

SEQ ID NO: 2552 - DNA, 2838 bp, synthetic construct; identical to SEQ ID NO: 2551
  source 1..2838: mol_type = other DNA

SEQ ID NO: 2553 - DNA, 3336 bp, synthetic construct
  source 1..3336: mol_type = other DNA
atggccttaccagtgaccgccttgctcctgccgctggccttgctgctccacgccgccaggccgggcgttacccagacacctaagttccgggtgctgaaaaccggccagagcatgacactgctgtgcgcccaggacatgaaccacgagtacatgtattggtacagacaggaccccggcatgggcctgagactgatccactattctgtcggcgagggcaccacagccaaaggcgaagttcctgacggctacaacgtgtcccggctgaagaagcagaacttcctgctgggcctcgaaagcgccgctccatctcagaccagcgtgtacttctgtgccagccggggctaccacagactgaacaacgagcagttcttcggccctggcaccagactgacagttctcgagggacagcctaaggccaatcctaccgtgacactgttccctccaagcagcgaagaactccaggccaacaaggccacacttgtgtgcctgatctccgacttctaccctggggctgtgacagtggcttggaaggccgatggatctcctgtgaaagccggcgtggaaaccaccaagccatccaagcagagcaacaacaaatacgccgccagctcctacctgagcctgacacctgagcagtggaagtcccacagatcctacagctgccaagtgacccacgaaggcagcaccgtggaaaagacagtggcccctacagagtgcagcggatccacaacacctggcgagagaagtagcctgcctgccttctatcctggcaccagcggctcttgttctggctgtggatctctgagcctgcctctgctggctggactggttgctgctgatgctgtggcctctctgctgattgtgggagccgtgttcctgtgcgccagacctagaagaagccccgctcaagaggacggcaaggtgtacatcaacatgcccggcagaggaagcactagtagagtgaagttcagcagaagcgccgacgcccctgcctaccagcagggacagaaccaactgtacaacgagctgaacctgggcagacgggaagagtacgacgtgctggacaagcggagaggcagggaccctgagatgggcggaaagccccagcggagaaagaacccccaggaaggactgtataacgaactccagaaagacaagatggccgaagcctacagcgagatcggcatgaagggcgagcggagaagaggcaagggccacgatggcctgtaccagggcctgagcaccgccaccaaggacacctatgacgccctgcacatgcaggccctgcctccaagaagggccaagcgatctggatctggagcaacaaacttctcactactcaaacaagcaggtgacgtggaggagaatcccgggcctatggactggatttggcgcatccttttccttgtcggcgctgctaccggcgcgcattccttcgaacagagaaaagaggtggaacaggaccctggacctttcaacgttccagagggcgctaccgtggccttcaactgcacctacagcaatagcgccagccagagcttcttctggtatcggcaggactgccggaaagaacccaagctgctgatgagcgtgtacagcagcggcaacgaggacggcagattcacagcccagctgaacagagccagccagtacatctctctgctgatccgggacagcaagctgagcgatagcgccacctatctgtgcgtggtcaagcctgatcctggcgctggaagctaccagctgacatttggcaagggcaccaagctgtctgtgatccccaatacgcgtgcctctacaaagggaccctccgtgtttcctctggctcccagcagcaagtctacaagcggaggaacagccgctctgggctgcctggtcaaggattactttcccgagcctgtgaccgtgtcctggaatagcggagcactgacaagcggcgtgcacacctttccagccgtgctgcaaagcagcggcctgtactctctgagcagcgtggtcacagtgcctagctctagcctgggcacccagacctacatctgcaatgtgaaccacaagcctagcaacaccaaggtggacaagagagtggaacccaagagctgtggtaccacaacgccgggcgaaaggagttccttgccggccttttaccccggcacaagcggaagctgtagtgggtgtggaagcctcagcctcccacttcttgcgggcctcgtcgcggcagatgcagtagcttcacttcttattgtaggcgcggtatttctctgtgctcgaccaaggaggtcacccgctcaggaggatggtaaggtgtatataaatatgccaggacgcggaagctctagacgggttaagttttccagatccgcagacgcacccgcttaccaacaagggcagaaccaactctacaatgaacttaatttggggcggagggaagagtacgacgttctggacaaaaggaggggacgagatcccgagatgggcggaaagcctcagcgaaggaagaatccgcaagaggggctttataacgaactccagaaagataaaatggcagaagcctatagtgagattgggatgaagggagaaaggaggaggggtaaaggtcacgatgggttgtaccaaggattgagcacagccactaaagatacctatgatgcgctccacatgcaggccctgccgccaagacgcgccaagagaagcggatctggcgtgaagcagaccctgaatttcgacctgctgaagctggctggcgacgtggaatccaacccaggccctggccatatggctacctacgaggtgctgtgcgaggtggcaagaaagctgggcaccgacgacagagaagtggtgctgttcctgctgaacgtgttcatccctcagcctacactggcccagctgatcggtgcactgagagccctgaaagaggaaggccggctgacctttcctctgctggccgaatgcctgttcagagccggaagaagggatctgctgcgggacctgctgcatctggaccccagatttctggaaagacacctggccggcaccatgagctacttcagcccttaccagctgaccgtgctgcacgttgacggcgaactgtgcgccagagatattcggagcctgatcttcctgagcaaggacaccatcggcagccggtctacccctcagacatttctgcactgggtgtactgcatggaaaacctggacctgctcggccccacagatgtggatgccctgatgtccatgctgagaagcctgagcagagtggacctccagagacaggtgcagacactgatgggactgcacctgagcggacctagccacagccagcactacagacacacccct

SEQ ID NO: 2554 - DNA, 3495 bp, synthetic construct
  source 1..3495: mol_type = other DNA
atggccttaccagtgaccgccttgctcctgccgctggccttgctgctccacgccgccaggccgggcgttacccagacacctaagttccgggtgctgaaaaccggccagagcatgacactgctgtgcgcccaggacatgaaccacgagtacatgtattggtacagacaggaccccggcatgggcctgagactgatccactattctgtcggcgagggcaccacagccaaaggcgaagttcctgacggctacaacgtgtcccggctgaagaagcagaacttcctgctgggcctcgaaagcgccgctccatctcagaccagcgtgtacttctgtgccagccggggctaccacagactgaacaacgagcagttcttcggccctggcaccagactgacagttctcgagggacagcctaaggccaatcctaccgtgacactgttccctccaagcagcgaagaactccaggccaacaaggccacacttgtgtgcctgatctccgacttctaccctggggctgtgacagtggcttggaaggccgatggatctcctgtgaaagccggcgtggaaaccaccaagccatccaagcagagcaacaacaaatacgccgccagctcctacctgagcctgacacctgagcagtggaagtcccacagatcctacagctgccaagtgacccacgaaggcagcaccgtggaaaagacagtggcccctacagagtgcagcggatccacaacacctggcgagagaagtagcctgcctgccttctatcctggcaccagcggctcttgttctggctgtggatctctgagcctgcctctgctggctggactggttgctgctgatgctgtggcctctctgctgattgtgggagccgtgttcctgtgcgccagacctagaagaagccccgctcaagaggacggcaaggtgtacatcaacatgcccggcagaggaagcactagtagagtgaagttcagcagaagcgccgacgcccctgcctaccagcagggacagaaccaactgtacaacgagctgaacctgggcagacgggaagagtacgacgtgctggacaagcggagaggcagggaccctgagatgggcggaaagccccagcggagaaagaacccccaggaaggactgtataacgaactccagaaagacaagatggccgaagcctacagcgagatcggcatgaagggcgagcggagaagaggcaagggccacgatggcctgtaccagggcctgagcaccgccaccaaggacacctatgacgccctgcacatgcaggccctgcctccaagaagggccaagcgatctggatctggagcaacaaacttctcactactcaaacaagcaggtgacgtggaggagaatcccgggcctatggactggatttggcgcatccttttccttgtcggcgctgctaccggcgcgcattccttcgaacagagaaaagaggtggaacaggaccctggacctttcaacgttccagagggcgctaccgtggccttcaactgcacctacagcaatagcgccagccagagcttcttctggtatcggcaggactgccggaaagaacccaagctgctgatgagcgtgtacagcagcggcaacgaggacggcagattcacagcccagctgaacagagccagccagtacatctctctgctgatccgggacagcaagctgagcgatagcgccacctatctgtgcgtggtcaagcctgatcctggcgctggaagctaccagctgacatttggcaagggcaccaagctgtctgtgatccccaatacgcgtgcctctacaaagggaccctccgtgtttcctctggctcccagcagcaagtctacaagcggaggaacagccgctctgggctgcctggtcaaggattactttcccgagcctgtgaccgtgtcctggaatagcggagcactgacaagcggcgtgcacacctttccagccgtgctgcaaagcagcggcctgtactctctgagcagcgtggtcacagtgcctagctctagcctgggcacccagacctacatctgcaatgtgaaccacaagcctagcaacaccaaggtggacaagagagtggaacccaagagctgtggtaccacaacgccgggcgaaaggagttccttgccggccttttaccccggcacaagcggaagctgtagtgggtgtggaagcctcagcctcccacttcttgcgggcctcgtcgcggcagatgcagtagcttcacttcttattgtaggcgcggtatttctctgtgctcgaccaaggaggtcacccgctcaggaggatggtaaggtgtatataaatatgccaggacgcggaagctctagacgggttaagttttccagatccgcagacgcacccgcttaccaacaagggcagaaccaactctacaatgaacttaatttggggcggagggaagagtacgacgttctggacaaaaggaggggacgagatcccgagatgggcggaaagcctcagcgaaggaagaatccgcaagaggggctttataacgaactccagaaagataaaatggcagaagcctatagtgagattgggatgaagggagaaaggaggaggggtaaaggtcacgatgggttgtaccaaggattgagcacagccactaaagatacctatgatgcgctccacatgcaggccctgccgccaagacgcgccaagagaagcggatctggcgtgaagcagaccctgaatttcgacctgctgaagctggctggcgacgtggaatccaacccaggccctggccatatgtccgactccaaggaggtccctagccttccatttttgcgacacttgctcgaagagttggacagccatgaggacagcttgctgctgtttctgtgtcacgacgcggccccgggctgcacgacggtcacgcaagctttgtgctcgcttagccaacagcgcaagctgaccctcgcggctctggtcgagatgctctacgtgctgcagcgtatggatcttctcaagagccgcttcgggctcagcaaggagggggccgagcaattgctgggcacaagctttctcacgcgctaccgcaagctcatggtttgcgtgggtgaggagctcgactcgagcgagctacgcgctctacgcttgttcgcgtgcaacctgaatccgagcctgagcacggcgctttctgagagcagccgctttgtcgagcttgtactcgcgcttgaaaacgtaggactcgtctcgccatcgagtgtttccgtgcttgcggacatgttgcgcactcttcggcgcctcgatttgtgccagcagcttgttgagtacgaacaacaagagcaagccaggtaccgttactgttacgcggcctcgccctcattgccagttcgtacgttacgtcgggggcacggcgcgagtgaacacgagcagctgtgcatgcccgtgcaagaatcctctgacagccccgagctgctgcgcacgcccgtacaagaatcctccagcgacagccccgagcaaacgact

SEQ ID NO: 2555 - DNA, 3477 bp, synthetic construct
  source 1..3477: mol_type = other DNA
atggccttaccagtgaccgccttgctcctgccgctggccttgctgctccacgccgccaggccgggcgttacccagacacctaagttccgggtgctgaaaaccggccagagcatgacactgctgtgcgcccaggacatgaaccacgagtacatgtattggtacagacaggaccccggcatgggcctgagactgatccactattctgtcggcgagggcaccacagccaaaggcgaagttcctgacggctacaacgtgtcccggctgaagaagcagaacttcctgctgggcctcgaaagcgccgctccatctcagaccagcgtgtacttctgtgccagccggggctaccacagactgaacaacgagcagttcttcggccctggcaccagactgacagttctcgagggacagcctaaggccaatcctaccgtgacactgttccctccaagcagcgaagaactccaggccaacaaggccacacttgtgtgcctgatctccgacttctaccctggggctgtgacagtggcttggaaggccgatggatctcctgtgaaagccggcgtggaaaccaccaagccatccaagcagagcaacaacaaatacgccgccagctcctacctgagcctgacacctgagcagtggaagtcccacagatcctacagctgccaagtgacccacgaaggcagcaccgtggaaaagacagtggcccctacagagtgcagcggatccacaacacctggcgagagaagtagcctgcctgccttctatcctggcaccagcggctcttgttctggctgtggatctctgagcctgcctctgctggctggactggttgctgctgatgctgtggcctctctgctgattgtgggagccgtgttcctgtgcgccagacctagaagaagccccgctcaagaggacggcaaggtgtacatcaacatgcccggcagaggaagcactagtagagtgaagttcagcagaagcgccgacgcccctgcctaccagcagggacagaaccaactgtacaacgagctgaacctgggcagacgggaagagtacgacgtgctggacaagcggagaggcagggaccctgagatgggcggaaagccccagcggagaaagaacccccaggaaggactgtataacgaactccagaaagacaagatggccgaagcctacagcgagatcggcatgaagggcgagcggagaagaggcaagggccacgatggcctgtaccagggcctgagcaccgccaccaaggacacctatgacgccctgcacatgcaggccctgcctccaagaagggccaagcgatctggatctggagcaacaaacttctcactactcaaacaagcaggtgacgtggaggagaatcccgggcctatggactggatttggcgcatccttttccttgtcggcgctgctaccggcgcgcattccttcgaacagagaaaagaggtggaacaggaccctggacctttcaacgttccagagggcgctaccgtggccttcaactgcacctacagcaatagcgccagccagagcttcttctggtatcggcaggactgccggaaagaacccaagctgctgatgagcgtgtacagcagcggcaacgaggacggcagattcacagcccagctgaacagagccagccagtacatctctctgctgatccgggacagcaagctgagcgatagcgccacctatctgtgcgtggtcaagcctgatcctggcgctggaagctaccagctgacatttggcaagggcaccaagctgtctgtgatccccaatacgcgtgcctctacaaagggaccctccgtgtttcctctggctcccagcagcaagtctacaagcggaggaacagccgctctgggctgcctggtcaaggattactttcccgagcctgtgaccgtgtcctggaatagcggagcactgacaagcggcgtgcacacctttccagccgtgctgcaaagcagcggcctgtactctctgagcagcgtggtcacagtgcctagctctagcctgggcacccagacctacatctgcaatgtgaaccacaagcctagcaacaccaaggtggacaagagagtggaacccaagagctgtggtaccacaacgccgggcgaaaggagttccttgccggccttttaccccggcacaagcggaagctgtagtgggtgtggaagcctcagcctcccacttcttgcgggcctcgtcgcggcagatgcagtagcttcacttcttattgtaggcgcggtatttctctgtgctcgaccaaggaggtcacccgctcaggaggatggtaaggtgtatataaatatgccaggacgcggaagctctagacgggttaagttttccagatccgcagacgcacccgcttaccaacaagggcagaaccaactctacaatgaacttaatttggggcggagggaagagtacgacgttctggacaaaaggaggggacgagatcccgagatgggcggaaagcctcagcgaaggaagaatccgcaagaggggctttataacgaactccagaaagataaaatggcagaagcctatagtgagattgggatgaagggagaaaggaggaggggtaaaggtcacgatgggttgtaccaaggattgagcacagccactaaagatacctatgatgcgctccacatgcaggccctgccgccaagacgcgccaagagaagcggatctggcgtgaagcagaccctgaatttcgacctgctgaagctggctggcgacgtggaatccaacccaggccctggccatatggctctgcctgtgacagctctgctgctgcctctggcactgctgcttcatgctgctagacctagccagtttagagtgtcccctctggacagaacctggaacctgggcgagacagtggaactgaagtgccaggtgctgctgagcaaccctacaagcggctgctcctggctgtttcagcctagaggtgcagccgcctctcctacctttctgctgtacctgagccagaacaagcccaaggccgccgaaggactggacacccagagattcagcggcaagagactgggcgacaccttcgtgctgaccctgagcgacttcagaagagagaacgagggctactacttctgtagcgccctgagcaacagcatcatgtacttcagccacttcgtgcccgtgtttctgcccgccaagcctacaacaacccctgctcctagacctcctacaccagctcctacaatcgccagccagcctctgtctctcagacccgaagcctgtagacctgctgctggcggagctgtgcataccagaggactggatttcgcctgcgacatctacatctgggctcctctggctggcacatgtggcgtgctgctgctgtccctggtcatcaccctgtactgcaaccaccggaacaggcggagagtgtgcaagtgccctagacctgtggtcaagagcggcgacaagcctagcctgagcgccagatatgtt

SEQ ID NO: 2556 - DNA, 3888 bp, synthetic construct
  source 1..3888: mol_type = other DNA
atggccttaccagtgaccgccttgctcctgccgctggccttgctgctccacgccgccaggccggaagtgcagctggttgaatctggcggaggactggttcaggctggcggatctctgagactgtcttgtgccgccagcggcagaacctttagcatgggctggtttagacaggcccctggcaaagagagagagttcgtcgccgccatcacatactctggcggcagcccttactacgccgactctgtgaagggcagattcaccatcagccgggacaacgccaagaacaccgtgtacctccagatgaacagcctgaagcctgaggacaccgccgtgtactactgcgccgccaatccaacatacggcagcgactggaacgccgagaattggggccagggaacccaagtgacagtgtctagcggtaccggcggaggcggatctggcggcggaggtagcggtggcggaggatctgaattcggcgttacccagacacctaagttccgggtgctgaaaaccggccagagcatgacactgctgtgcgcccaggacatgaaccacgagtacatgtattggtacagacaggaccccggcatgggcctgagactgatccactattctgtcggcgagggcaccacagccaaaggcgaagttcctgacggctacaacgtgtcccggctgaagaagcagaacttcctgctgggcctcgaaagcgccgctccatctcagaccagcgtgtacttctgtgccagccggggctaccacagactgaacaacgagcagttcttcggccctggcaccagactgacagttctcgagggacagcctaaggccaatcctaccgtgacactgttccctccaagcagcgaagaactccaggccaacaaggccacacttgtgtgcctgatctccgacttctaccctggggctgtgacagtggcttggaaggccgatggatctcctgtgaaagccggcgtggaaaccaccaagccatccaagcagagcaacaacaaatacgccgccagctcctacctgagcctgacacctgagcagtggaagtcccacagatcctacagctgccaagtgacccacgaaggcagcaccgtggaaaagacagtggcccctacagagtgcagcggatccacaacacctggcgagagaagtagcctgcctgccttctatcctggcaccagcggctcttgttctggctgtggatctctgagcctgcctctgctggctggactggttgctgctgatgctgtggcctctctgctgattgtgggagccgtgttcctgtgcgccagacctagaagaagccccgctcaagaggacggcaaggtgtacatcaacatgcccggcagaggaagcactagtagagtgaagttcagcagaagcgccgacgcccctgcctaccagcagggacagaaccaactgtacaacgagctgaacctgggcagacgggaagagtacgacgtgctggacaagcggagaggcagggaccctgagatgggcggaaagccccagcggagaaagaacccccaggaaggactgtataacgaactccagaaagacaagatggccgaagcctacagcgagatcggcatgaagggcgagcggagaagaggcaagggccacgatggcctgtaccagggcctgagcaccgccaccaaggacacctatgacgccctgcacatgcaggccctgcctccaagaagggccaagcgatctggatctggagcaacaaacttctcactactcaaacaagcaggtgacgtggaggagaatcccgggcctatggactggatttggcgcatccttttccttgtcggcgctgctaccggcgcgcattccttcgaacagagaaaagaggtggaacaggaccctggacctttcaacgttccagagggcgctaccgtggccttcaactgcacctacagcaatagcgccagccagagcttcttctggtatcggcaggactgccggaaagaacccaagctgctgatgagcgtgtacagcagcggcaacgaggacggcagattcacagcccagctgaacagagccagccagtacatctctctgctgatccgggacagcaagctgagcgatagcgccacctatctgtgcgtggtcaagcctgatcctggcgctggaagctaccagctgacatttggcaagggcaccaagctgtctgtgatccccaatacgcgtgcctctacaaagggaccctccgtgtttcctctggctcccagcagcaagtctacaagcggaggaacagccgctctgggctgcctggtcaaggattactttcccgagcctgtgaccgtgtcctggaatagcggagcactgacaagcggcgtgcacacctttccagccgtgctgcaaagcagcggcctgtactctctgagcagcgtggtcacagtgcctagctctagcctgggcacccagacctacatctgcaatgtgaaccacaagcctagcaacaccaaggtggacaagagagtggaacccaagagctgtggtaccacaacgccgggcgaaaggagttccttgccggccttttaccccggcacaagcggaagctgtagtgggtgtggaagcctcagcctcccacttcttgcgggcctcgtcgcggcagatgcagtagcttcacttcttattgtaggcgcggtatttctctgtgctcgaccaaggaggtcacccgctcaggaggatggtaaggtgtatataaatatgccaggacgcggaagctctagacgggttaagttttccagatccgcagacgcacccgcttaccaacaagggcagaaccaactctacaatgaacttaatttggggcggagggaagagtacgacgttctggacaaaaggaggggacgagatcccgagatgggcggaaagcctcagcgaaggaagaatccgcaagaggggctttataacgaactccagaaagataaaatggcagaagcctatagtgagattgggatgaagggagaaaggaggaggggtaaaggtcacgatgggttgtaccaaggattgagcacagccactaaagatacctatgatgcgctccacatgcaggccctgccgccaagacgcgccaagagaagcggatctggcgtgaagcagaccctgaatttcgacctgctgaagctggctggcgacgtggaatccaacccaggccctggccatatggctctgcctgtgacagctctgctgctgcctctggcactgctgcttcatgctgctagacctagccagtttagagtgtcccctctggacagaacctggaacctgggcgagacagtggaactgaagtgccaggtgctgctgagcaaccctacaagcggctgctcctggctgtttcagcctagaggtgcagccgcctctcctacctttctgctgtacctgagccagaacaagcccaaggccgccgaaggactggacacccagagattcagcggcaagagactgggcgacaccttcgtgctgaccctgagcgacttcagaagagagaacgagggctactacttctgtagcgccctgagcaacagcatcatgtacttcagccacttcgtgcccgtgtttctgcccgccaagcctacaacaacccctgctcctagacctcctacaccagctcctacaatcgccagccagcctctgtctctcagacccgaagcctgtagacctgctgctggcggagctgtgcataccagaggactggatttcgcctgcgacatctacatctgggctcctctggctggcacatgtggcgtgctgctgctgtccctggtcatcaccctgtactgcaaccaccggaacaggcggagagtgtgcaagtgccctagacctgtggtcaagagcggcgacaagcctagcctgagcgccagatatgtt

SEQ ID NO: 2557 - DNA, 4299 bp, synthetic construct
  source 1..4299: mol_type = other DNA
atggccttaccagtgaccgccttgctcctgccgctggccttgctgctccacgccgccaggccggaagtgcagctggttgaatctggcggaggactggttcaggctggcggatctctgagactgtcttgtgccgccagcggcagaacctttagcatgggctggtttagacaggcccctggcaaagagagagagttcgtcgccgccatcacatactctggcggcagcccttactacgccgactctgtgaagggcagattcaccatcagccgggacaacgccaagaacaccgtgtacctccagatgaacagcctgaagcctgaggacaccgccgtgtactactgcgccgccaatccaacatacggcagcgactggaacgccgagaattggggccagggaacccaagtgacagtgtctagcggtaccggcggaggcggatctggcggcggaggtagcggtggcggaggatctgaattcggcgttacccagacacctaagttccgggtgctgaaaaccggccagagcatgacactgctgtgcgcccaggacatgaaccacgagtacatgtattggtacagacaggaccccggcatgggcctgagactgatccactattctgtcggcgagggcaccacagccaaaggcgaagttcctgacggctacaacgtgtcccggctgaagaagcagaacttcctgctgggcctcgaaagcgccgctccatctcagaccagcgtgtacttctgtgccagccggggctaccacagactgaacaacgagcagttcttcggccctggcaccagactgacagttctcgagggacagcctaaggccaatcctaccgtgacactgttccctccaagcagcgaagaactccaggccaacaaggccacacttgtgtgcctgatctccgacttctaccctggggctgtgacagtggcttggaaggccgatggatctcctgtgaaagccggcgtggaaaccaccaagccatccaagcagagcaacaacaaatacgccgccagctcctacctgagcctgacacctgagcagtggaagtcccacagatcctacagctgccaagtgacccacgaaggcagcaccgtggaaaagacagtggcccctacagagtgcagcggatccacaacacctggcgagagaagtagcctgcctgccttctatcctggcaccagcggctcttgttctggctgtggatctctgagcctgcctctgctggctggactggttgctgctgatgctgtggcctctctgctgattgtgggagccgtgttcctgtgcgccagacctagaagaagccccgctcaagaggacggcaaggtgtacatcaacatgcccggcagaggaagcactagtagagtgaagttcagcagaagcgccgacgcccctgcctaccagcagggacagaaccaactgtacaacgagctgaacctgggcagacgggaagagtacgacgtgctggacaagcggagaggcagggaccctgagatgggcggaaagccccagcggagaaagaacccccaggaaggactgtataacgaactccagaaagacaagatggccgaagcctacagcgagatcggcatgaagggcgagcggagaagaggcaagggccacgatggcctgtaccagggcctgagcaccgccaccaaggacacctatgacgccctgcacatgcaggccctgcctccaagaagggccaagcgatctggatctggagcaacaaacttctcactactcaaacaagcaggtgacgtggaggagaatcccgggcctatggactggatttggcgcatccttttccttgtcggcgctgctaccggcgcgcattccgggcccgaagtgcaactggttgaatccggtggcggcctggtgcaagcaggcggatctctcagacttagctgtgccgcctccggcagaaccttcacaatgggatggtttaggcaggctccagggaaagagagagagttcgtcgccgccatctctctgtctcccacactggcctactacgccgactctgtgaaaggccggttcaccatctccagagataatgccaagaacaccgtggtgctgcaaatgaactctctgaaacccgaggatacagccctgtactattgtgccgctgaccggaagtccgtgatgagcatcagacccgattactggggacagggcacacaagtcacagtgtcctctggatccggcggcggaggatctggcggaggcggatctgggggcggaggctctttcgaacagagaaaagaggtggaacaggaccctggacctttcaacgttccagagggcgctaccgtggccttcaactgcacctacagcaatagcgccagccagagcttcttctggtatcggcaggactgccggaaagaacccaagctgctgatgagcgtgtacagcagcggcaacgaggacggcagattcacagcccagctgaacagagccagccagtacatctctctgctgatccgggacagcaagctgagcgatagcgccacctatctgtgcgtggtcaagcctgatcctggcgctggaagctaccagctgacatttggcaagggcaccaagctgtctgtgatccccaatacgcgtgcctctacaaagggaccctccgtgtttcctctggctcccagcagcaagtctacaagcggaggaacagccgctctgggctgcctggtcaaggattactttcccgagcctgtgaccgtgtcctggaatagcggagcactgacaagcggcgtgcacacctttccagccgtgctgcaaagcagcggcctgtactctctgagcagcgtggtcacagtgcctagctctagcctgggcacccagacctacatctgcaatgtgaaccacaagcctagcaacaccaaggtggacaagagagtggaacccaagagctgtggtaccacaacgccgggcgaaaggagttccttgccggccttttaccccggcacaagcggaagctgtagtgggtgtggaagcctcagcctcccacttcttgcgggcctcgtcgcggcagatgcagtagcttcacttcttattgtaggcgcggtatttctctgtgctcgaccaaggaggtcacccgctcaggaggatggtaaggtgtatataaatatgccaggacgcggaagctctagacgggttaagttttccagatccgcagacgcacccgcttaccaacaagggcagaaccaactctacaatgaacttaatttggggcggagggaagagtacgacgttctggacaaaaggaggggacgagatcccgagatgggcggaaagcctcagcgaaggaagaatccgcaagaggggctttataacgaactccagaaagataaaatggcagaagcctatagtgagattgggatgaagggagaaaggaggaggggtaaaggtcacgatgggttgtaccaaggattgagcacagccactaaagatacctatgatgcgctccacatgcaggccctgccgccaagacgcgccaagagaagcggatctggcgtgaagcagaccctgaatttcgacctgctgaagctggctggcgacgtggaatccaacccaggccctggccatatggctctgcctgtgacagctctgctgctgcctctggcactgctgcttcatgctgctagacctagccagtttagagtgtcccctctggacagaacctggaacctgggcgagacagtggaactgaagtgccaggtgctgctgagcaaccctacaagcggctgctcctggctgtttcagcctagaggtgcagccgcctctcctacctttctgctgtacctgagccagaacaagcccaaggccgccgaaggactggacacccagagattcagcggcaagagactgggcgacaccttcgtgctgaccctgagcgacttcagaagagagaacgagggctactacttctgtagcgccctgagcaacagcatcatgtacttcagccacttcgtgcccgtgtttctgcccgccaagcctacaacaacccctgctcctagacctcctacaccagctcctacaatcgccagccagcctctgtctctcagacccgaagcctgtagacctgctgctggcggagctgtgcataccagaggactggatttcgcctgcgacatctacatctgggctcctctggctggcacatgtggcgtgctgctgctgtccctggtcatcaccctgtactgcaaccaccggaacaggcggagagtgtgcaagtgccctagacctgtggtcaagagcggcgacaagcctagcctgagcgccagatatgtt

SEQ ID NO: 2558 - DNA, 2454 bp, synthetic construct
  source 1..2454: mol_type = other DNA
atggccttaccagtgaccgccttgctcctgccgctggccttgctgctccacgccgccaggccggaattcggcgttacccagacacctaagttccgggtgctgaaaaccggccagagcatgacactgctgtgcgcccaggacatgaaccacgagtacatgtattggtacagacaggaccccggcatgggcctgagactgatccactattctgtcggcgagggcaccacagccaaaggcgaagttcctgacggctacaacgtgtcccggctgaagaagcagaacttcctgctgggcctcgaaagcgccgctccatctcagaccagcgtgtacttctgtgccagccggggctaccacagactgaacaacgagcagttcttcggccctggcaccagactgacagttctcgaggacctgaagaacgtgttcccacctgaggtggccgtgttcgagcctagcgaggccgagatcagccacacccagaaagccaccctcgtgtgcctggctaccggcttctaccccgaccatgtggaactgtcttggtgggtcaacggcaaagaggtgcacagcggcgtgtctaccgacccccagccactgaaagaacagcccgccctgaacgacagccggtactgcctgagcagcagactgagagtgtccgccaccttctggcagaacccccggaaccacttcagatgccaggtgcagttctacggcctgagcgagaacgacgagtggacccaggacagagccaagcccgtgacccagatcgtgtctgccgaagcctggggcagagccgattgcggatcccagagcttcggcctgctggaccccaagctgtgctacctgctggatggcatcctgttcatctacggcgtgatcctgaccgccctgttcctgagagtgaagttcagcagaagcgccgacgcccctgcctaccagcagggacagaaccaactgtacaacgagctgaacctgggcagacgggaagagtacgacgtgctggacaagcggagaggcagggaccctgagatgggcggaaagccccagcggagaaagaacccccaggaaggactgtataacgaactccagaaagacaagatggccgaagcctacagcgagatcggcatgaagggcgagcggagaagaggcaagggccacgatggcctgtaccagggcctgagcaccgccaccaaggacacctatgacgccctgcacatgcaggccctgcctccaagaagggccaagcgatctggatctggagcaacaaacttctcactactcaaacaagcaggtgacgtggaggagaatcccgggcctactagtatggactggatttggcgcatccttttccttgtcggcgctgctaccggcgcgcattccttcgaacagagaaaagaggtggaacaggaccctggacctttcaacgttccagagggcgctaccgtggccttcaactgcacctacagcaatagcgccagccagagcttcttctggtatcggcaggactgccggaaagaacccaagctgctgatgagcgtgtacagcagcggcaacgaggacggcagattcacagcccagctgaacagagccagccagtacatctctctgctgatccgggacagcaagctgagcgatagcgccacctatctgtgcgtggtcaagcctgatcctggcgctggaagctaccagctgacatttggcaagggcaccaagctgtctgtgatccccaatacgcgtatccagaaccctgatcctgccgtgtaccagctgcgggatagcaagagcagcgacaagagcgtgtgtctgttcaccgacttcgacagccagaccaacgtgtcccagagcaaggactccgacgtgtacatcaccgataagaccgtgctggacatgcggagcatggacttcaagagcaactccgccgtggcctggtccaacaagtccgatttcgcctgcgccaacgccttcaacaacagcattatccccgaggacacattcttcccaagccccgagagcagctgcggtacccagagttttgggttgttggaccctaaattgtgctatctgttggacggaatcctgttcatttacggagtgatcctgaccgcattgttcctgcgggttaagttttccagatccgcagacgcacccgcttaccaacaagggcagaaccaactctacaatgaacttaatttggggcggagggaagagtacgacgttctggacaaaaggaggggacgagatcccgagatgggcggaaagcctcagcgaaggaagaatccgcaagaggggctttataacgaactccagaaagataaaatggcagaagcctatagtgagattgggatgaagggagaaaggaggaggggtaaaggtcacgatgggttgtaccaaggattgagcacagccactaaagatacctatgatgcgctccacatgcaggccctgccgccaagataa

SEQ ID NO: 2559 - DNA, 2580 bp, synthetic construct
  source 1..2580: mol_type = other DNA
atggccttaccagtgaccgccttgctcctgccgctggccttgctgctccacgccgccaggccggaattcggcgttacccagacacctaagttccgggtgctgaaaaccggccagagcatgacactgctgtgcgcccaggacatgaaccacgagtacatgtattggtacagacaggaccccggcatgggcctgagactgatccactattctgtcggcgagggcaccacagccaaaggcgaagttcctgacggctacaacgtgtcccggctgaagaagcagaacttcctgctgggcctcgaaagcgccgctccatctcagaccagcgtgtacttctgtgccagccggggctaccacagactgaacaacgagcagttcttcggccctggcaccagactgacagttctcgaggacctgaagaacgtgttcccacctgaggtggccgtgttcgagcctagcgaggccgagatcagccacacccagaaagccaccctcgtgtgcctggctaccggcttctaccccgaccatgtggaactgtcttggtgggtcaacggcaaagaggtgcacagcggcgtgtctaccgacccccagccactgaaagaacagcccgccctgaacgacagccggtactgcctgagcagcagactgagagtgtccgccaccttctggcagaacccccggaaccacttcagatgccaggtgcagttctacggcctgagcgagaacgacgagtggacccaggacagagccaagcccgtgacccagatcgtgtctgccgaagcctggggcagagccgattgcggatcccagagcttcggcctgctggaccccaagctgtgctacctgctggatggcatcctgttcatctacggcgtgatcctgaccgccctgttcctgagagtgaagttcagcagaagcgccgacgcccctgcctaccagcagggacagaaccaactgtacaacgagctgaacctgggcagacgggaagagtacgacgtgctggacaagcggagaggcagggaccctgagatgggcggaaagccccagcggagaaagaacccccaggaaggactgtataacgaactccagaaagacaagatggccgaagcctacagcgagatcggcatgaagggcgagcggagaagaggcaagggccacgatggcctgtaccagggcctgagcaccgccaccaaggacacctatgacgccctgcacatgcaggccctgcctccaagaagggccaagcgatctggatctggagcaacaaacttctcactactcaaacaagcaggtgacgtggaggagaatcccgggcctactagtatggactggatttggcgcatccttttccttgtcggcgctgctaccggcgcgcattccttcgaacagagaaaagaggtggaacaggaccctggacctttcaacgttccagagggcgctaccgtggccttcaactgcacctacagcaatagcgccagccagagcttcttctggtatcggcaggactgccggaaagaacccaagctgctgatgagcgtgtacagcagcggcaacgaggacggcagattcacagcccagctgaacagagccagccagtacatctctctgctgatccgggacagcaagctgagcgatagcgccacctatctgtgcgtggtcaagcctgatcctggcgctggaagctaccagctgacatttggcaagggcaccaagctgtctgtgatccccaatacgcgtatccagaaccctgatcctgccgtgtaccagctgcgggatagcaagagcagcgacaagagcgtgtgtctgttcaccgacttcgacagccagaccaacgtgtcccagagcaaggactccgacgtgtacatcaccgataagaccgtgctggacatgcggagcatggacttcaagagcaactccgccgtggcctggtccaacaagtccgatttcgcctgcgccaacgccttcaacaacagcattatccccgaggacacattcttcccaagccccgagagcagctgcggtacccagagcttcggcctgctggaccccaagctgtgctacctgctggatggcatcctgttcatctacggcgtgatcctgaccgccctgttcctgaaacggggcagaaagaaactcctgtatatattcaaacaaccatttatgagaccagtacaaactactcaagaggaagatggctgtagctgccgatttccagaagaagaagaaggaggatgtgaactgagagtgaagttcagcagaagcgccgacgcccctgcctaccagcagggacagaaccaactgtacaacgagctgaacctgggcagacgggaagagtacgacgtgctggacaagcggagaggcagggaccctgagatgggcggaaagccccagcggagaaagaacccccaggaaggactgtataacgaactccagaaagacaagatggccgaagcctacagcgagatcggcatgaagggcgagcggagaagaggcaagggccacgatggcctgtaccagggcctgagcaccgccaccaaggacacctatgacgccctgcacatgcaggccctgcctccaagataa

SEQ ID NO: 2560 - DNA, 2577 bp, synthetic construct
  source 1..2577: mol_type = other DNA
atggccttaccagtgaccgccttgctcctgccgctggccttgctgctccacgccgccaggccggaattcggcgttacccagacacctaagttccgggtgctgaaaaccggccagagcatgacactgctgtgcgcccaggacatgaaccacgagtacatgtattggtacagacaggaccccggcatgggcctgagactgatccactattctgtcggcgagggcaccacagccaaaggcgaagttcctgacggctacaacgtgtcccggctgaagaagcagaacttcctgctgggcctcgaaagcgccgctccatctcagaccagcgtgtacttctgtgccagccggggctaccacagactgaacaacgagcagttcttcggccctggcaccagactgacagttctcgaggacctgaagaacgtgttcccacctgaggtggccgtgttcgagcctagcgaggccgagatcagccacacccagaaagccaccctcgtgtgcctggctaccggcttctaccccgaccatgtggaactgtcttggtgggtcaacggcaaagaggtgcacagcggcgtgtctaccgacccccagccactgaaagaacagcccgccctgaacgacagccggtactgcctgagcagcagactgagagtgtccgccaccttctggcagaacccccggaaccacttcagatgccaggtgcagttctacggcctgagcgagaacgacgagtggacccaggacagagccaagcccgtgacccagatcgtgtctgccgaagcctggggcagagccgattgcggatcccagagcttcggcctgctggaccccaagctgtgctacctgctggatggcatcctgttcatctacggcgtgatcctgaccgccctgttcctgagagtgaagttcagcagaagcgccgacgcccctgcctaccagcagggacagaaccaactgtacaacgagctgaacctgggcagacgggaagagtacgacgtgctggacaagcggagaggcagggaccctgagatgggcggaaagccccagcggagaaagaacccccaggaaggactgtataacgaactccagaaagacaagatggccgaagcctacagcgagatcggcatgaagggcgagcggagaagaggcaagggccacgatggcctgtaccagggcctgagcaccgccaccaaggacacctatgacgccctgcacatgcaggccctgcctccaagaagggccaagcgatctggatctggagcaacaaacttctcactactcaaacaagcaggtgacgtggaggagaatcccgggcctactagtatggactggatttggcgcatccttttccttgtcggcgctgctaccggcgcgcattccttcgaacagagaaaagaggtggaacaggaccctggacctttcaacgttccagagggcgctaccgtggccttcaactgcacctacagcaatagcgccagccagagcttcttctggtatcggcaggactgccggaaagaacccaagctgctgatgagcgtgtacagcagcggcaacgaggacggcagattcacagcccagctgaacagagccagccagtacatctctctgctgatccgggacagcaagctgagcgatagcgccacctatctgtgcgtggtcaagcctgatcctggcgctggaagctaccagctgacatttggcaagggcaccaagctgtctgtgatccccaatacgcgtatccagaaccctgatcctgccgtgtaccagctgcgggatagcaagagcagcgacaagagcgtgtgtctgttcaccgacttcgacagccagaccaacgtgtcccagagcaaggactccgacgtgtacatcaccgataagaccgtgctggacatgcggagcatggacttcaagagcaactccgccgtggcctggtccaacaagtccgatttcgcctgcgccaacgccttcaacaacagcattatccccgaggacacattcttcccaagccccgagagcagctgcggtacccagagcttcggcctgctggaccccaagctgtgctacctgctggatggcatcctgttcatctacggcgtgatcctgaccgccctgttcctgaggagtaagaggagcaggctcctgcacagtgactacatgaacatgactccacgccgccccggacccacccgcaagcattaccagccctatgccccaccacgcgacttcgcagcctatcgctccagagtgaagttcagcagaagcgccgacgcccctgcctaccagcagggacagaaccaactgtacaacgagctgaacctgggcagacgggaagagtacgacgtgctggacaagcggagaggcagggaccctgagatgggcggaaagccccagcggagaaagaacccccaggaaggactgtataacgaactccagaaagacaagatggccgaagcctacagcgagatcggcatgaagggcgagcggagaagaggcaagggccacgatggcctgtaccagggcctgagcaccgccaccaaggacacctatgacgccctgcacatgcaggccctgcctccaagataa

SEQ ID NO: 2561 - DNA, 2562 bp, synthetic construct
  source 1..2562: mol_type = other DNA
atggccttaccagtgaccgccttgctcctgccgctggccttgctgctccacgccgccaggccggaattcggcgttacccagacacctaagttccgggtgctgaaaaccggccagagcatgacactgctgtgcgcccaggacatgaaccacgagtacatgtattggtacagacaggaccccggcatgggcctgagactgatccactattctgtcggcgagggcaccacagccaaaggcgaagttcctgacggctacaacgtgtcccggctgaagaagcagaacttcctgctgggcctcgaaagcgccgctccatctcagaccagcgtgtacttctgtgccagccggggctaccacagactgaacaacgagcagttcttcggccctggcaccagactgacagttctcgaggacctgaagaacgtgttcccacctgaggtggccgtgttcgagcctagcgaggccgagatcagccacacccagaaagccaccctcgtgtgcctggctaccggcttctaccccgaccatgtggaactgtcttggtgggtcaacggcaaagaggtgcacagcggcgtgtctaccgacccccagccactgaaagaacagcccgccctgaacgacagccggtactgcctgagcagcagactgagagtgtccgccaccttctggcagaacccccggaaccacttcagatgccaggtgcagttctacggcctgagcgagaacgacgagtggacccaggacagagccaagcccgtgacccagatcgtgtctgccgaagcctggggcagagccgattgcggatcccagagcttcggcctgctggaccccaagctgtgctacctgctggatggcatcctgttcatctacggcgtgatcctgaccgccctgttcctgagagtgaagttcagcagaagcgccgacgcccctgcctaccagcagggacagaaccaactgtacaacgagctgaacctgggcagacgggaagagtacgacgtgctggacaagcggagaggcagggaccctgagatgggcggaaagccccagcggagaaagaacccccaggaaggactgtataacgaactccagaaagacaagatggccgaagcctacagcgagatcggcatgaagggcgagcggagaagaggcaagggccacgatggcctgtaccagggcctgagcaccgccaccaaggacacctatgacgccctgcacatgcaggccctgcctccaagaagggccaagcgatctggatctggagcaacaaacttctcactactcaaacaagcaggtgacgtggaggagaatcccgggcctactagtatggactggatttggcgcatccttttccttgtcggcgctgctaccggcgcgcattccttcgaacagagaaaagaggtggaacaggaccctggacctttcaacgttccagagggcgctaccgtggccttcaactgcacctacagcaatagcgccagccagagcttcttctggtatcggcaggactgccggaaagaacccaagctgctgatgagcgtgtacagcagcggcaacgaggacggcagattcacagcccagctgaacagagccagccagtacatctctctgctgatccgggacagcaagctgagcgatagcgccacctatctgtgcgtggtcaagcctgatcctggcgctggaagctaccagctgacatttggcaagggcaccaagctgtctgtgatccccaatacgcgtatccagaaccctgatcctgccgtgtaccagctgcgggatagcaagagcagcgacaagagcgtgtgtctgttcaccgacttcgacagccagaccaacgtgtcccagagcaaggactccgacgtgtacatcaccgataagaccgtgctggacatgcggagcatggacttcaagagcaactccgccgtggcctggtccaacaagtccgatttcgcctgcgccaacgccttcaacaacagcattatccccgaggacacattcttcccaagccccgagagcagctgcggtacccagagcttcggcctgctggaccccaagctgtgctacctgctggatggcatcctgttcatctacggcgtgatcctgaccgccctgttcctgagggaccaaagactgcctcctgacgctcacaaacctccaggcggaggcagcttcagaacccctatccaagaggaacaggctgacgcccacagcaccctggcaaaaattagagtgaagttcagcagaagcgccgacgcccctgcctaccagcagggacagaaccaactgtacaacgagctgaacctgggcagacgggaagagtacgacgtgctggacaagcggagaggcagggaccctgagatgggcggaaagccccagcggagaaagaacccccaggaaggactgtataacgaactccagaaagacaagatggccgaagcctacagcgagatcggcatgaagggcgagcggagaagaggcaagggccacgatggcctgtaccagggcctgagcaccgccaccaaggacacctatgacgccctgcacatgcaggccctgcctccaagataa

SEQ ID NO: 2562 - DNA, 2814 bp, synthetic construct
  source 1..2814: mol_type = other DNA
atggccttaccagtgaccgccttgctcctgccgctggccttgctgctccacgccgccaggccggaattcggcgttacccagacacctaagttccgggtgctgaaaaccggccagagcatgacactgctgtgcgcccaggacatgaaccacgagtacatgtattggtacagacaggaccccggcatgggcctgagactgatccactattctgtcggcgagggcaccacagccaaaggcgaagttcctgacggctacaacgtgtcccggctgaagaagcagaacttcctgctgggcctcgaaagcgccgctccatctcagaccagcgtgtacttctgtgccagccggggctaccacagactgaacaacgagcagttcttcggccctggcaccagactgacagttctcgaggacctgaagaacgtgttcccacctgaggtggccgtgttcgagcctagcgaggccgagatcagccacacccagaaagccaccctcgtgtgcctggctaccggcttctaccccgaccatgtggaactgtcttggtgggtcaacggcaaagaggtgcacagcggcgtgtctaccgacccccagccactgaaagaacagcccgccctgaacgacagccggtactgcctgagcagcagactgagagtgtccgccaccttctggcagaacccccggaaccacttcagatgccaggtgcagttctacggcctgagcgagaacgacgagtggacccaggacagagccaagcccgtgacccagatcgtgtctgccgaagcctggggcagagccgattgcggatcccagagcttcggcctgctggaccccaagctgtgctacctgctggatggcatcctgttcatctacggcgtgatcctgaccgccctgttcctgagagtgaagttcagcagaagcgccgacgcccctgcctaccagcagggacagaaccaactgtacaacgagctgaacctgggcagacgggaagagtacgacgtgctggacaagcggagaggcagggaccctgagatgggcggaaagccccagcggagaaagaacccccaggaaggactgtataacgaactccagaaagacaagatggccgaagcctacagcgagatcggcatgaagggcgagcggagaagaggcaagggccacgatggcctgtaccagggcctgagcaccgccaccaaggacacctatgacgccctgcacatgcaggccctgcctccaagaagggccaagcgatctggatctggagcaacaaacttctcactactcaaacaagcaggtgacgtggaggagaatcccgggcctactagtatggactggatttggcgcatccttttccttgtcggcgctgctaccggcgcgcattccttcgaacagagaaaagaggtggaacaggaccctggacctttcaacgttccagagggcgctaccgtggccttcaactgcacctacagcaatagcgccagccagagcttcttctggtatcggcaggactgccggaaagaacccaagctgctgatgagcgtgtacagcagcggcaacgaggacggcagattcacagcccagctgaacagagccagccagtacatctctctgctgatccgggacagcaagctgagcgatagcgccacctatctgtgcgtggtcaagcctgatcctggcgctggaagctaccagctgacatttggcaagggcaccaagctgtctgtgatccccaatacgcgtatccagaaccctgatcctgccgtgtaccagctgcgggatagcaagagcagcgacaagagcgtgtgtctgttcaccgacttcgacagccagaccaacgtgtcccagagcaaggactccgacgtgtacatcaccgataagaccgtgctggacatgcggagcatggacttcaagagcaactccgccgtggcctggtccaacaagtccgatttcgcctgcgccaacgccttcaacaacagcattatccccgaggacacattcttcccaagccccgagagcagctgcggtacccagagcttcggcctgctggaccccaagctgtgctacctgctggatggcatcctgttcatctacggcgtgatcctgaccgccctgttcctgtggcggcggaagcggaaagagaagcagtctgagacaagccccaaagagttcctgaccatctacgaggacgtgaaggacctgaaaacccggcggaaccacgaacaagagcagacctttcctggcggaggcagcaccatctacagcatgatccagagccagagcagcgcccctacaagccaagagcctgcctacacactgtactccctgatccagcctagcagaaagagcggcagccggaagagaaatcacagccccagcttcaacagcacgatctacgaagtgatcggcaagagccagccaaaggctcagaaccctgccagactgagccggaaagagctggaaaacttcgacgtgtacagcagagtgaagttcagcagaagcgccgacgcccctgcctaccagcagggacagaaccaactgtacaacgagctgaacctgggcagacgggaagagtacgacgtgctggacaagcggagaggcagggaccctgagatgggcggaaagccccagcggagaaagaacccccaggaaggactgtataacgaactccagaaagacaagatggccgaagcctacagcgagatcggcatgaagggcgagcggagaagaggcaagggccacgatggcctgtaccagggcctgagcaccgccaccaaggacacctatgacgccctgcacatgcaggccctgcctccaagataa

SEQ ID NO: 2563 - DNA, 2703 bp, synthetic construct
  source 1..2703: mol_type = other DNA
atggccttaccagtgaccgccttgctcctgccgctggccttgctgctccacgccgccaggccggaattcggcgttacccagacacctaagttccgggtgctgaaaaccggccagagcatgacactgctgtgcgcccaggacatgaaccacgagtacatgtattggtacagacaggaccccggcatgggcctgagactgatccactattctgtcggcgagggcaccacagccaaaggcgaagttcctgacggctacaacgtgtcccggctgaagaagcagaacttcctgctgggcctcgaaagcgccgctccatctcagaccagcgtgtacttctgtgccagccggggctaccacagactgaacaacgagcagttcttcggccctggcaccagactgacagttctcgaggacctgaagaacgtgttcccacctgaggtggccgtgttcgagcctagcgaggccgagatcagccacacccagaaagccaccctcgtgtgcctggctaccggcttctaccccgaccatgtggaactgtcttggtgggtcaacggcaaagaggtgcacagcggcgtgtctaccgacccccagccactgaaagaacagcccgccctgaacgacagccggtactgcctgagcagcagactgagagtgtccgccaccttctggcagaacccccggaaccacttcagatgccaggtgcagttctacggcctgagcgagaacgacgagtggacccaggacagagccaagcccgtgacccagatcgtgtctgccgaagcctggggcagagccgattgcggatcccagagcttcggcctgctggaccccaagctgtgctacctgctggatggcatcctgttcatctacggcgtgatcctgaccgccctgttcctgaggagtaagaggagcaggctcctgcacagtgactacatgaacatgactccacgccgccccggacccacccgcaagcattaccagccctatgccccaccacgcgacttcgcagcctatcgctccagagtgaagttcagcagaagcgccgacgcccctgcctaccagcagggacagaaccaactgtacaacgagctgaacctgggcagacgggaagagtacgacgtgctggacaagcggagaggcagggaccctgagatgggcggaaagccccagcggagaaagaacccccaggaaggactgtataacgaactccagaaagacaagatggccgaagcctacagcgagatcggcatgaagggcgagcggagaagaggcaagggccacgatggcctgtaccagggcctgagcaccgccaccaaggacacctatgacgccctgcacatgcaggccctgcctccaagaagggccaagcgatctggatctggagcaacaaacttctcactactcaaacaagcaggtgacgtggaggagaatcccgggcctactagtatggactggatttggcgcatccttttccttgtcggcgctgctaccggcgcgcattccttcgaacagagaaaagaggtggaacaggaccctggacctttcaacgttccagagggcgctaccgtggccttcaactgcacctacagcaatagcgccagccagagcttcttctggtatcggcaggactgccggaaagaacccaagctgctgatgagcgtgtacagcagcggcaacgaggacggcagattcacagcccagctgaacagagccagccagtacatctctctgctgatccgggacagcaagctgagcgatagcgccacctatctgtgcgtggtcaagcctgatcctggcgctggaagctaccagctgacatttggcaagggcaccaagctgtctgtgatccccaatacgcgtatccagaaccctgatcctgccgtgtaccagctgcgggatagcaagagcagcgacaagagcgtgtgtctgttcaccgacttcgacagccagaccaacgtgtcccagagcaaggactccgacgtgtacatcaccgataagaccgtgctggacatgcggagcatggacttcaagagcaactccgccgtggcctggtccaacaagtccgatttcgcctgcgccaacgccttcaacaacagcattatccccgaggacacattcttcccaagccccgagagcagctgcggtacccagagcttcggcctgctggaccccaagctgtgctacctgctggatggcatcctgttcatctacggcgtgatcctgaccgccctgttcctgaaacggggcagaaagaaactcctgtatatattcaaacaaccatttatgagaccagtacaaactactcaagaggaagatggctgtagctgccgatttccagaagaagaagaaggaggatgtgaactgagagtgaagttcagcagaagcgccgacgcccctgcctaccagcagggacagaaccaactgtacaacgagctgaacctgggcagacgggaagagtacgacgtgctggacaagcggagaggcagggaccctgagatgggcggaaagccccagcggagaaagaacccccaggaaggactgtataacgaactccagaaagacaagatggccgaagcctacagcgagatcggcatgaagggcgagcggagaagaggcaagggccacgatggcctgtaccagggcctgagcaccgccaccaaggacacctatgacgccctgcacatgcaggccctgcctccaagataa

SEQ ID NO: 2564 - DNA, 2700 bp, synthetic construct
  source 1..2700: mol_type = other DNA
atggccttaccagtgaccgccttgctcctgccgctggccttgctgctccacgccgccaggccggaattcggcgttacccagacacctaagttccgggtgctgaaaaccggccagagcatgacactgctgtgcgcccaggacatgaaccacgagtacatgtattggtacagacaggaccccggcatgggcctgagactgatccactattctgtcggcgagggcaccacagccaaaggcgaagttcctgacggctacaacgtgtcccggctgaagaagcagaacttcctgctgggcctcgaaagcgccgctccatctcagaccagcgtgtacttctgtgccagccggggctaccacagactgaacaacgagcagttcttcggccctggcaccagactgacagttctcgaggacctgaagaacgtgttcccacctgaggtggccgtgttcgagcctagcgaggccgagatcagccacacccagaaagccaccctcgtgtgcctggctaccggcttctaccccgaccatgtggaactgtcttggtgggtcaacggcaaagaggtgcacagcggcgtgtctaccgacccccagccactgaaagaacagcccgccctgaacgacagccggtactgcctgagcagcagactgagagtgtccgccaccttctggcagaacccccggaaccacttcagatgccaggtgcagttctacggcctgagcgagaacgacgagtggacccaggacagagccaagcccgtgacccagatcgtgtctgccgaagcctggggcagagccgattgcggatcccagagcttcggcctgctggaccccaagctgtgctacctgctggatggcatcctgttcatctacggcgtgatcctgaccgccctgttcctgaggagtaagaggagcaggctcctgcacagtgactacatgaacatgactccacgccgccccggacccacccgcaagcattaccagccctatgccccaccacgcgacttcgcagcctatcgctccagagtgaagttcagcagaagcgccgacgcccctgcctaccagcagggacagaaccaactgtacaacgagctgaacctgggcagacgggaagagtacgacgtgctggacaagcggagaggcagggaccctgagatgggcggaaagccccagcggagaaagaacccccaggaaggactgtataacgaactccagaaagacaagatggccgaagcctacagcgagatcggcatgaagggcgagcggagaagaggcaagggccacgatggcctgtaccagggcctgagcaccgccaccaaggacacctatgacgccctgcacatgcaggccctgcctccaagaagggccaagcgatctggatctggagcaacaaacttctcactactcaaacaagcaggtgacgtggaggagaatcccgggcctactagtatggactggatttggcgcatccttttccttgtcggcgctgctaccggcgcgcattccttcgaacagagaaaagaggtggaacaggaccctggacctttcaacgttccagagggcgctaccgtggccttcaactgcacctacagcaatagcgccagccagagcttcttctggtatcggcaggactgccggaaagaacccaagctgctgatgagcgtgtacagcagcggcaacgaggacggcagattcacagcccagctgaacagagccagccagtacatctctctgctgatccgggacagcaagctgagcgatagcgccacctatctgtgcgtggtcaagcctgatcctggcgctggaagctaccagctgacatttggcaagggcaccaagctgtctgtgatccccaatacgcgtatccagaaccctgatcctgccgtgtaccagctgcgggatagcaagagcagcgacaagagcgtgtgtctgttcaccgacttcgacagccagaccaacgtgtcccagagcaaggactccgacgtgtacatcaccgataagaccgtgctggacatgcggagcatggacttcaagagcaactccgccgtggcctggtccaacaagtccgatttcgcctgcgccaacgccttcaacaacagcattatccccgaggacacattcttcccaagccccgagagcagctgcggtacccagagttttgggttgttggaccctaaattgtgctatctgttggacggaatcctgttcatttacggagtgatcctgaccgcattgttcctgaggagcaagcggtcacggctgctccacagcgattacatgaatatgacaccacgaagaccgggtcctactcgcaaacactaccaaccctacgcacctccccgcgactttgcagcgtaccgatctcgggttaagttttccagatccgcagacgcacccgcttaccaacaagggcagaaccaactctacaatgaacttaatttggggcggagggaagagtacgacgttctggacaaaaggaggggacgagatcccgagatgggcggaaagcctcagcgaaggaagaatccgcaagaggggctttataacgaactccagaaagataaaatggcagaagcctatagtgagattgggatgaagggagaaaggaggaggggtaaaggtcacgatgggttgtaccaaggattgagcacagccactaaagatacctatgatgcgctccacatgcaggccctgccgccaagataa

SEQ ID NO: 2565 - DNA, 2703 bp, synthetic construct
  source 1..2703: mol_type = other DNA
atggccttaccagtgaccgccttgctcctgccgctggccttgctgctccacgccgccaggccggaattcggcgttacccagacacctaagttccgggtgctgaaaaccggccagagcatgacactgctgtgcgcccaggacatgaaccacgagtacatgtattggtacagacaggaccccggcatgggcctgagactgatccactattctgtcggcgagggcaccacagccaaaggcgaagttcctgacggctacaacgtgtcccggctgaagaagcagaacttcctgctgggcctcgaaagcgccgctccatctcagaccagcgtgtacttctgtgccagccggggctaccacagactgaacaacgagcagttcttcggccctggcaccagactgacagttctcgaggacctgaagaacgtgttcccacctgaggtggccgtgttcgagcctagcgaggccgagatcagccacacccagaaagccaccctcgtgtgcctggctaccggcttctaccccgaccatgtggaactgtcttggtgggtcaacggcaaagaggtgcacagcggcgtgtctaccgacccccagccactgaaagaacagcccgccctgaacgacagccggtactgcctgagcagcagactgagagtgtccgccaccttctggcagaacccccggaaccacttcagatgccaggtgcagttctacggcctgagcgagaacgacgagtggacccaggacagagccaagcccgtgacccagatcgtgtctgccgaagcctggggcagagccgattgcggatcccagagcttcggcctgctggaccccaagctgtgctacctgctggatggcatcctgttcatctacggcgtgatcctgaccgccctgttcctgaggagtaagaggagcaggctcctgcacagtgactacatgaacatgactccacgccgccccggacccacccgcaagcattaccagccctatgccccaccacgcgacttcgcagcctatcgctccagagtgaagttcagcagaagcgccgacgcccctgcctaccagcagggacagaaccaactgtacaacgagctgaacctgggcagacgggaagagtacgacgtgctggacaagcggagaggcagggaccctgagatgggcggaaagccccagcggagaaagaacccccaggaaggactgtataacgaactccagaaagacaagatggccgaagcctacagcgagatcggcatgaagggcgagcggagaagaggcaagggccacgatggcctgtaccagggcctgagcaccgccaccaaggacacctatgacgccctgcacatgcaggccctgcctccaagaagggccaagcgatctggatctggagcaacaaacttctcactactcaaacaagcaggtgacgtggaggagaatcccgggcctactagtatggactggatttggcgcatccttttccttgtcggcgctgctaccggcgcgcattccttcgaacagagaaaagaggtggaacaggaccctggacctttcaacgttccagagggcgctaccgtggccttcaactgcacctacagcaatagcgccagccagagcttcttctggtatcggcaggactgccggaaagaacccaagctgctgatgagcgtgtacagcagcggcaacgaggacggcagattcacagcccagctgaacagagccagccagtacatctctctgctgatccgggacagcaagctgagcgatagcgccacctatctgtgcgtggtcaagcctgatcctggcgctggaagctaccagctgacatttggcaagggcaccaagctgtctgtgatccccaatacgcgtatccagaaccctgatcctgccgtgtaccagctgcgggatagcaagagcagcgacaagagcgtgtgtctgttcaccgacttcgacagccagaccaacgtgtcccagagcaaggactccgacgtgtacatcaccgataagaccgtgctggacatgcggagcatggacttcaagagcaactccgccgtggcctggtccaacaagtccgatttcgcctgcgccaacgccttcaacaacagcattatccccgaggacacattcttcccaagccccgagagcagctgcggtacccagagttttgggttgttggaccctaaattgtgctatctgttggacggaatcctgttcatttacggagtgatcctgaccgcattgttcctgaagagaggccggaagaagctgctgtacatcttcaagcagcctttcatgcggcccgtgcagaccacccaggaagaggacggctgctcctgccggttccccgaggaagaagaaggcggctgcgagctgcgggttaagttttccagatccgcagacgcacccgcttaccaacaagggcagaaccaactctacaatgaacttaatttggggcggagggaagagtacgacgttctggacaaaaggaggggacgagatcccgagatgggcggaaagcctcagcgaaggaagaatccgcaagaggggctttataacgaactccagaaagataaaatggcagaagcctatagtgagattgggatgaagggagaaaggaggaggggtaaaggtcacgatgggttgtaccaaggattgagcacagccactaaagatacctatgatgcgctccacatgcaggccctgccgccaagataa

SEQ ID NO: 2566 - DNA, 2454 bp, synthetic construct
  source 1..2454: mol_type = other DNA
atggccttaccagtgaccgccttgctcctgccgctggccttgctgctccacgccgccaggccggaattcggcgttacccagacacctaagttccgggtgctgaaaaccggccagagcatgacactgctgtgcgcccaggacatgaaccacgagtacatgtattggtacagacaggaccccggcatgggcctgagactgatccactattctgtcggcgagggcaccacagccaaaggcgaagttcctgacggctacaacgtgtcccggctgaagaagcagaacttcctgctgggcctcgaaagcgccgctccatctcagaccagcgtgtacttctgtgccagccggggctaccacagactgaacaacgagcagttcttcggccctggcaccagactgacagttctcgaggacctgaagaacgtgttcccacctgaggtggccgtgttcgagcctagcgaggccgagatcagccacacccagaaagccaccctcgtgtgcctggctaccggcttctaccccgaccatgtggaactgtcttggtgggtcaacggcaaagaggtgcacagcggcgtgtctaccgacccccagccactgaaagaacagcccgccctgaacgacagccggtactgcctgagcagcagactgagagtgtccgccaccttctggcagaacccccggaaccacttcagatgccaggtgcagttctacggcctgagcgagaacgacgagtggacccaggacagagccaagcccgtgacccagatcgtgtctgccgaagcctggggcagagccgattgcggatcccagagcttcggcctgctggaccccaagctgtgctacctgctggatggcatcctgttcatctacggcgtgatcctgaccgccctgttcctgagagtgaagttcagcagaagcgccgacgcccctgcctaccagcagggacagaaccaactgtacaacgagctgaacctgggcagacgggaagagtacgacgtgctggacaagcggagaggcagggaccctgagatgggcggaaagccccagcggagaaagaacccccaggaaggactgttcaacgaactccagaaagacaagatggccgaagccttcagcgagatcggcatgaagggcgagcggagaagaggcaagggccacgatggcctgttccagggcctgagcaccgccaccaaggacaccttcgacgccctgcacatgcaggccctgcctccaagaagggccaagcgatctggatctggagcaacaaacttctcactactcaaacaagcaggtgacgtggaggagaatcccgggcctactagtatggactggatttggcgcatccttttccttgtcggcgctgctaccggcgcgcattccttcgaacagagaaaagaggtggaacaggaccctggacctttcaacgttccagagggcgctaccgtggccttcaactgcacctacagcaatagcgccagccagagcttcttctggtatcggcaggactgccggaaagaacccaagctgctgatgagcgtgtacagcagcggcaacgaggacggcagattcacagcccagctgaacagagccagccagtacatctctctgctgatccgggacagcaagctgagcgatagcgccacctatctgtgcgtggtcaagcctgatcctggcgctggaagctaccagctgacatttggcaagggcaccaagctgtctgtgatccccaatacgcgtatccagaaccctgatcctgccgtgtaccagctgcgggatagcaagagcagcgacaagagcgtgtgtctgttcaccgacttcgacagccagaccaacgtgtcccagagcaaggactccgacgtgtacatcaccgataagaccgtgctggacatgcggagcatggacttcaagagcaactccgccgtggcctggtccaacaagtccgatttcgcctgcgccaacgccttcaacaacagcattatccccgaggacacattcttcccaagccccgagagcagctgcggtacccagagttttgggttgttggaccctaaattgtgctatctgttggacggaatcctgttcatttacggagtgatcctgaccgcattgttcctgcgggttaagttttccagatccgcagacgcacccgcttaccaacaagggcagaaccaactctacaatgaacttaatttggggcggagggaagagtacgacgttctggacaaaaggaggggacgagatcccgagatgggcggaaagcctcagcgaaggaagaatccgcaagaggggctttataacgaactccagaaagataaaatggcagaagcctatagtgagattgggatgaagggagaaaggaggaggggtaaaggtcacgatgggttgtaccaaggattgagcacagccactaaagatacctatgatgcgctccacatgcaggccctgccgccaagataa

SEQ ID NO: 2567 - DNA, 2454 bp, synthetic construct
  source 1..2454: mol_type = other DNA
atggccttaccagtgaccgccttgctcctgccgctggccttgctgctccacgccgccaggccggaattcggcgttacccagacacctaagttccgggtgctgaaaaccggccagagcatgacactgctgtgcgcccaggacatgaaccacgagtacatgtattggtacagacaggaccccggcatgggcctgagactgatccactattctgtcggcgagggcaccacagccaaaggcgaagttcctgacggctacaacgtgtcccggctgaagaagcagaacttcctgctgggcctcgaaagcgccgctccatctcagaccagcgtgtacttctgtgccagccggggctaccacagactgaacaacgagcagttcttcggccctggcaccagactgacagttctcgaggacctgaagaacgtgttcccacctgaggtggccgtgttcgagcctagcgaggccgagatcagccacacccagaaagccaccctcgtgtgcctggctaccggcttctaccccgaccatgtggaactgtcttggtgggtcaacggcaaagaggtgcacagcggcgtgtctaccgacccccagccactgaaagaacagcccgccctgaacgacagccggtactgcctgagcagcagactgagagtgtccgccaccttctggcagaacccccggaaccacttcagatgccaggtgcagttctacggcctgagcgagaacgacgagtggacccaggacagagccaagcccgtgacccagatcgtgtctgccgaagcctggggcagagccgattgcggatcccagagcttcggcctgctggaccccaagctgtgctacctgctggatggcatcctgttcatctacggcgtgatcctgaccgccctgttcctgagagtgaagttcagcagaagcgccgacgcccctgcctaccagcagggacagaaccaactgtacaacgagctgaacctgggcagacgggaagagtacgacgtgctggacaagcggagaggcagggaccctgagatgggcggaaagccccagcggagaaagaacccccaggaaggactgttcaacgaactccagaaagacaagatggccgaagccttcagcgagatcggcatgaagggcgagcggagaagaggcaagggccacgatggcctgttccagggcctgagcaccgccaccaaggacaccttcgacgccctgcacatgcaggccctgcctccaagaagggccaagcgatctggatctggagcaacaaacttctcactactcaaacaagcaggtgacgtggaggagaatcccgggcctactagtatggactggatttggcgcatccttttccttgtcggcgctgctaccggcgcgcattccttcgaacagagaaaagaggtggaacaggaccctggacctttcaacgttccagagggcgctaccgtggccttcaactgcacctacagcaatagcgccagccagagcttcttctggtatcggcaggactgccggaaagaacccaagctgctgatgagcgtgtacagcagcggcaacgaggacggcagattcacagcccagctgaacagagccagccagtacatctctctgctgatccgggacagcaagctgagcgatagcgccacctatctgtgcgtggtcaagcctgatcctggcgctggaagctaccagctgacatttggcaagggcaccaagctgtctgtgatccccaatacgcgtatccagaaccctgatcctgccgtgtaccagctgcgggatagcaagagcagcgacaagagcgtgtgtctgttcaccgacttcgacagccagaccaacgtgtcccagagcaaggactccgacgtgtacatcaccgataagaccgtgctggacatgcggagcatggacttcaagagcaactccgccgtggcctggtccaacaagtccgatttcgcctgcgccaacgccttcaacaacagcattatccccgaggacacattcttcccaagccccgagagcagctgcggtacccagagcttcggcctgctggaccccaagctgtgctacctgctggatggcatcctgttcatctacggcgtgatcctgaccgccctgttcctgagagtgaagttcagcagaagcgccgacgcccctgcctaccagcagggacagaaccaactgtacaacgagctgaacctgggcagacgggaagagtacgacgtgctggacaagcggagaggcagggaccctgagatgggcggaaagccccagcggagaaagaacccccaggaaggactgtataacgaactccagaaagacaagatggccgaagcctacagcgagatcggcatgaagggcgagcggagaagaggcaagggccacgatggcctgtaccagggcctgagcaccgccaccaaggacacctatgacgccctgcacatgcaggccctgcctccaagataa

SEQ ID NO: 2568 - DNA, 2580 bp, synthetic construct
  source 1..2580: mol_type = other DNA
atggccttaccagtgaccgccttgctcctgccgctggccttgctgctccacgccgccaggccggaattcggcgttacccagacacctaagttccgggtgctgaaaaccggccagagcatgacactgctgtgcgcccaggacatgaaccacgagtacatgtattggtacagacaggaccccggcatgggcctgagactgatccactattctgtcggcgagggcaccacagccaaaggcgaagttcctgacggctacaacgtgtcccggctgaagaagcagaacttcctgctgggcctcgaaagcgccgctccatctcagaccagcgtgtacttctgtgccagccggggctaccacagactgaacaacgagcagttcttcggccctggcaccagactgacagttctcgaggacctgaagaacgtgttcccacctgaggtggccgtgttcgagcctagcgaggccgagatcagccacacccagaaagccaccctcgtgtgcctggctaccggcttctaccccgaccatgtggaactgtcttggtgggtcaacggcaaagaggtgcacagcggcgtgtctaccgacccccagccactgaaagaacagcccgccctgaacgacagccggtactgcctgagcagcagactgagagtgtccgccaccttctggcagaacccccggaaccacttcagatgccaggtgcagttctacggcctgagcgagaacgacgagtggacccaggacagagccaagcccgtgacccagatcgtgtctgccgaagcctggggcagagccgattgcggatcccagagcttcggcctgctggaccccaagctgtgctacctgctggatggcatcctgttcatctacggcgtgatcctgaccgccctgttcctgagagtgaagttcagcagaagcgccgacgcccctgcctaccagcagggacagaaccaactgtacaacgagctgaacctgggcagacgggaagagtacgacgtgctggacaagcggagaggcagggaccctgagatgggcggaaagccccagcggagaaagaacccccaggaaggactgttcaacgaactccagaaagacaagatggccgaagccttcagcgagatcggcatgaagggcgagcggagaagaggcaagggccacgatggcctgttccagggcctgagcaccgccaccaaggacaccttcgacgccctgcacatgcaggccctgcctccaagaagggccaagcgatctggatctggagcaacaaacttctcactactcaaacaagcaggtgacgtggaggagaatcccgggcctactagtatggactggatttggcgcatccttttccttgtcggcgctgctaccggcgcgcattccttcgaacagagaaaagaggtggaacaggaccctggacctttcaacgttccagagggcgctaccgtggccttcaactgcacctacagcaatagcgccagccagagcttcttctggtatcggcaggactgccggaaagaacccaagctgctgatgagcgtgtacagcagcggcaacgaggacggcagattcacagcccagctgaacagagccagccagtacatctctctgctgatccgggacagcaagctgagcgatagcgccacctatctgtgcgtggtcaagcctgatcctggcgctggaagctaccagctgacatttggcaagggcaccaagctgtctgtgatccccaatacgcgtatccagaaccctgatcctgccgtgtaccagctgcgggatagcaagagcagcgacaagagcgtgtgtctgttcaccgacttcgacagccagaccaacgtgtcccagagcaaggactccgacgtgtacatcaccgataagaccgtgctggacatgcggagcatggacttcaagagcaactccgccgtggcctggtccaacaagtccgatttcgcctgcgccaacgccttcaacaacagcattatccccgaggacacattcttcccaagccccgagagcagctgcggtacccagagcttcggcctgctggaccccaagctgtgctacctgctggatggcatcctgttcatctacggcgtgatcctgaccgccctgttcctgaaacggggcagaaagaaactcctgtatatattcaaacaaccatttatgagaccagtacaaactactcaagaggaagatggctgtagctgccgatttccagaagaagaagaaggaggatgtgaactgagagtgaagttcagcagaagcgccgacgcccctgcctaccagcagggacagaaccaactgtacaacgagctgaacctgggcagacgggaagagtacgacgtgctggacaagcggagaggcagggaccctgagatgggcggaaagccccagcggagaaagaacccccaggaaggactgtataacgaactccagaaagacaagatggccgaagcctacagcgagatcggcatgaagggcgagcggagaagaggcaagggccacgatggcctgtaccagggcctgagcaccgccaccaaggacacctatgacgccctgcacatgcaggccctgcctccaagataa

SEQ ID NO: 2569 - DNA, 2577 bp, synthetic construct
  source 1..2577: mol_type = other DNA
atggccttaccagtgaccgccttgctcctgccgctggccttgctgctccacgccgccaggccggaattcggcgttacccagacacctaagttccgggtgctgaaaaccggccagagcatgacactgctgtgcgcccaggacatgaaccacgagtacatgtattggtacagacaggaccccggcatgggcctgagactgatccactattctgtcggcgagggcaccacagccaaaggcgaagttcctgacggctacaacgtgtcccggctgaagaagcagaacttcctgctgggcctcgaaagcgccgctccatctcagaccagcgtgtacttctgtgccagccggggctaccacagactgaacaacgagcagttcttcggccctggcaccagactgacagttctcgaggacctgaagaacgtgttcccacctgaggtggccgtgttcgagcctagcgaggccgagatcagccacacccagaaagccaccctcgtgtgcctggctaccggcttctaccccgaccatgtggaactgtcttggtgggtcaacggcaaagaggtgcacagcggcgtgtctaccgacccccagccactgaaagaacagcccgccctgaacgacagccggtactgcctgagcagcagactgagagtgtccgccaccttctggcagaacccccggaaccacttcagatgccaggtgcagttctacggcctgagcgagaacgacgagtggacccaggacagagccaagcccgtgacccagatcgtgtctgccgaagcctggggcagagccgattgcggatcccagagcttcggcctgctggaccccaagctgtgctacctgctggatggcatcctgttcatctacggcgtgatcctgaccgccctgttcctgagagtgaagttcagcagaagcgccgacgcccctgcctaccagcagggacagaaccaactgtacaacgagctgaacctgggcagacgggaagagtacgacgtgctggacaagcggagaggcagggaccctgagatgggcggaaagccccagcggagaaagaacccccaggaaggactgttcaacgaactccagaaagacaagatggccgaagccttcagcgagatcggcatgaagggcgagcggagaagaggcaagggccacgatggcctgttccagggcctgagcaccgccaccaaggacaccttcgacgccctgcacatgcaggccctgcctccaagaagggccaagcgatctggatctggagcaacaaacttctcactactcaaacaagcaggtgacgtggaggagaatcccgggcctactagtatggactggatttggcgcatccttttccttgtcggcgctgctaccggcgcgcattccttcgaacagagaaaagaggtggaacaggaccctggacctttcaacgttccagagggcgctaccgtggccttcaactgcacctacagcaatagcgccagccagagcttcttctggtatcggcaggactgccggaaagaacccaagctgctgatgagcgtgtacagcagcggcaacgaggacggcagattcacagcccagctgaacagagccagccagtacatctctctgctgatccgggacagcaagctgagcgatagcgccacctatctgtgcgtggtcaagcctgatcctggcgctggaagctaccagctgacatttggcaagggcaccaagctgtctgtgatccccaatacgcgtatccagaaccctgatcctgccgtgtaccagctgcgggatagcaagagcagcgacaagagcgtgtgtctgttcaccgacttcgacagccagaccaacgtgtcccagagcaaggactccgacgtgtacatcaccgataagaccgtgctggacatgcggagcatggacttcaagagcaactccgccgtggcctggtccaacaagtccgatttcgcctgcgccaacgccttcaacaacagcattatccccgaggacacattcttcccaagccccgagagcagctgcggtacccagagcttcggcctgctggaccccaagctgtgctacctgctggatggcatcctgttcatctacggcgtgatcctgaccgccctgttcctgaggagtaagaggagcaggctcctgcacagtgactacatgaacatgactccacgccgccccggacccacccgcaagcattaccagccctatgccccaccacgcgacttcgcagcctatcgctccagagtgaagttcagcagaagcgccgacgcccctgcctaccagcagggacagaaccaactgtacaacgagctgaacctgggcagacgggaagagtacgacgtgctggacaagcggagaggcagggaccctgagatgggcggaaagccccagcggagaaagaacccccaggaaggactgtataacgaactccagaaagacaagatggccgaagcctacagcgagatcggcatgaagggcgagcggagaagaggcaagggccacgatggcctgtaccagggcctgagcaccgccaccaaggacacctatgacgccctgcacatgcaggccctgcctccaagataa

SEQ ID NO: 2570 - DNA, 2562 bp, synthetic construct
  source 1..2562: mol_type = other DNA
atggccttaccagtgaccgccttgctcctgccgctggccttgctgctccacgccgccaggccggaattcggcgttacccagacacctaagttccgggtgctgaaaaccggccagagcatgacactgctgtgcgcccaggacatgaaccacgagtacatgtattggtacagacaggaccccggcatgggcctgagactgatccactattctgtcggcgagggcaccacagccaaaggcgaagttcctgacggctacaacgtgtcccggctgaagaagcagaacttcctgctgggcctcgaaagcgccgctccatctcagaccagcgtgtacttctgtgccagccggggctaccacagactgaacaacgagcagttcttcggccctggcaccagactgacagttctcgaggacctgaagaacgtgttcccacctgaggtggccgtgttcgagcctagcgaggccgagatcagccacacccagaaagccaccctcgtgtgcctggctaccggcttctaccccgaccatgtggaactgtcttggtgggtcaacggcaaagaggtgcacagcggcgtgtctaccgacccccagccactgaaagaacagcccgccctgaacgacagccggtactgcctgagcagcagactgagagtgtccgccaccttctggcagaacccccggaaccacttcagatgccaggtgcagttctacggcctgagcgagaacgacgagtggacccaggacagagccaagcccgtgacccagatcgtgtctgccgaagcctggggcagagccgattgcggatcccagagcttcggcctgctggaccccaagctgtgctacctgctggatggcatcctgttcatctacggcgtgatcctgaccgccctgttcctgagagtgaagttcagcagaagcgccgacgcccctgcctaccagcagggacagaaccaactgtacaacgagctgaacctgggcagacgggaagagtacgacgtgctggacaagcggagaggcagggaccctgagatgggcggaaagccccagcggagaaagaacccccaggaaggactgttcaacgaactccagaaagacaagatggccgaagccttcagcgagatcggcatgaagggcgagcggagaagaggcaagggccacgatggcctgttccagggcctgagcaccgccaccaaggacaccttcgacgccctgcacatgcaggccctgcctccaagaagggccaagcgatctggatctggagcaacaaacttctcactactcaaacaagcaggtgacgtggaggagaatcccgggcctactagtatggactggatttggcgcatccttttccttgtcggcgctgctaccggcgcgcattccttcgaacagagaaaagaggtggaacaggaccctggacctttcaacgttccagagggcgctaccgtggccttcaactgcacctacagcaatagcgccagccagagcttcttctggtatcggcaggactgccggaaagaacccaagctgctgatgagcgtgtacagcagcggcaacgaggacggcagattcacagcccagctgaacagagccagccagtacatctctctgctgatccgggacagcaagctgagcgatagcgccacctatctgtgcgtggtcaagcctgatcctggcgctggaagctaccagctgacatttggcaagggcaccaagctgtctgtgatccccaatacgcgtatccagaaccctgatcctgccgtgtaccagctgcgggatagcaagagcagcgacaagagcgtgtgtctgttcaccgacttcgacagccagaccaacgtgtcccagagcaaggactccgacgtgtacatcaccgataagaccgtgctggacatgcggagcatggacttcaagagcaactccgccgtggcctggtccaacaagtccgatttcgcctgcgccaacgccttcaacaacagcattatccccgaggacacattcttcccaagccccgagagcagctgcggtacccagagcttcggcctgctggaccccaagctgtgctacctgctggatggcatcctgttcatctacggcgtgatcctgaccgccctgttcctgagggaccaaagactgcctcctgacgctcacaaacctccaggcggaggcagcttcagaacccctatccaagaggaacaggctgacgcccacagcaccctggcaaaaattagagtgaagttcagcagaagcgccgacgcccctgcctaccagcagggacagaaccaactgtacaacgagctgaacctgggcagacgggaagagtacgacgtgctggacaagcggagaggcagggaccctgagatgggcggaaagccccagcggagaaagaacccccaggaaggactgtataacgaactccagaaagacaagatggccgaagcctacagcgagatcggcatgaagggcgagcggagaagaggcaagggccacgatggcctgtaccagggcctgagcaccgccaccaaggacacctatgacgccctgcacatgcaggccctgcctccaagataa

SEQ ID NO: 2571 - DNA, 2814 bp, synthetic construct
  source 1..2814: mol_type = other DNA
atggccttaccagtgaccgccttgctcctgccgctggccttgctgctccacgccgccaggccggaattcggcgttacccagacacctaagttccgggtgctgaaaaccggccagagcatgacactgctgtgcgcccaggacatgaaccacgagtacatgtattggtacagacaggaccccggcatgggcctgagactgatccactattctgtcggcgagggcaccacagccaaaggcgaagttcctgacggctacaacgtgtcccggctgaagaagcagaacttcctgctgggcctcgaaagcgccgctccatctcagaccagcgtgtacttctgtgccagccggggctaccacagactgaacaacgagcagttcttcggccctggcaccagactgacagttctcgaggacctgaagaacgtgttcccacctgaggtggccgtgttcgagcctagcgaggccgagatcagccacacccagaaagccaccctcgtgtgcctggctaccggcttctaccccgaccatgtggaactgtcttggtgggtcaacggcaaagaggtgcacagcggcgtgtctaccgacccccagccactgaaagaacagcccgccctgaacgacagccggtactgcctgagcagcagactgagagtgtccgccaccttctggcagaacccccggaaccacttcagatgccaggtgcagttctacggcctgagcgagaacgacgagtggacccaggacagagccaagcccgtgacccagatcgtgtctgccgaagcctggggcagagccgattgcggatcccagagcttcggcctgctggaccccaagctgtgctacctgctggatggcatcctgttcatctacggcgtgatcctgaccgccctgttcctgagagtgaagttcagcagaagcgccgacgcccctgcctaccagcagggacagaaccaactgtacaacgagctgaacctgggcagacgggaagagtacgacgtgctggacaagcggagaggcagggaccctgagatgggcggaaagccccagcggagaaagaacccccaggaaggactgttcaacgaactccagaaagacaagatggccgaagccttcagcgagatcggcatgaagggcgagcggagaagaggcaagggccacgatggcctgttccagggcctgagcaccgccaccaaggacaccttcgacgccctgcacatgcaggccctgcctccaagaagggccaagcgatctggatctggagcaacaaacttctcactactcaaacaagcaggtgacgtggaggagaatcccgggcctactagtatggactggatttggcgcatccttttccttgtcggcgctgctaccggcgcgcattccttcgaacagagaaaagaggtggaacaggaccctggacctttcaacgttccagagggcgctaccgtggccttcaactgcacctacagcaatagcgccagccagagcttcttctggtatcggcaggactgccggaaagaacccaagctgctgatgagcgtgtacagcagcggcaacgaggacggcagattcacagcccagctgaacagagccagccagtacatctctctgctgatccgggacagcaagctgagcgatagcgccacctatctgtgcgtggtcaagcctgatcctggcgctggaagctaccagctgacatttggcaagggcaccaagctgtctgtgatccccaatacgcgtatccagaaccctgatcctgccgtgtaccagctgcgggatagcaagagcagcgacaagagcgtgtgtctgttcaccgacttcgacagccagaccaacgtgtcccagagcaaggactccgacgtgtacatcaccgataagaccgtgctggacatgcggagcatggacttcaagagcaactccgccgtggcctggtccaacaagtccgatttcgcctgcgccaacgccttcaacaacagcattatccccgaggacacattcttcccaagccccgagagcagctgcggtacccagagcttcggcctgctggaccccaagctgtgctacctgctggatggcatcctgttcatctacggcgtgatcctgaccgccctgttcctgtggcggcggaagcggaaagagaagcagtctgagacaagccccaaagagttcctgaccatctacgaggacgtgaaggacctgaaaacccggcggaaccacgaacaagagcagacctttcctggcggaggcagcaccatctacagcatgatccagagccagagcagcgcccctacaagccaagagcctgcctacacactgtactccctgatccagcctagcagaaagagcggcagccggaagagaaatcacagccccagcttcaacagcacgatctacgaagtgatcggcaagagccagccaaaggctcagaaccctgccagactgagccggaaagagctggaaaacttcgacgtgtacagcagagtgaagttcagcagaagcgccgacgcccctgcctaccagcagggacagaaccaactgtacaacgagctgaacctgggcagacgggaagagtacgacgtgctggacaagcggagaggcagggaccctgagatgggcggaaagccccagcggagaaagaacccccaggaaggactgtataacgaactccagaaagacaagatggccgaagcctacagcgagatcggcatgaagggcgagcggagaagaggcaagggccacgatggcctgtaccagggcctgagcaccgccaccaaggacacctatgacgccctgcacatgcaggccctgcctccaagataa

SEQ ID NO: 2572 - DNA, 2577 bp, synthetic construct
  source 1..2577: mol_type = other DNA
atggccttaccagtgaccgccttgctcctgccgctggccttgctgctccacgccgccaggccggaattcggcgttacccagacacctaagttccgggtgctgaaaaccggccagagcatgacactgctgtgcgcccaggacatgaaccacgagtacatgtattggtacagacaggaccccggcatgggcctgagactgatccactattctgtcggcgagggcaccacagccaaaggcgaagttcctgacggctacaacgtgtcccggctgaagaagcagaacttcctgctgggcctcgaaagcgccgctccatctcagaccagcgtgtacttctgtgccagccggggctaccacagactgaacaacgagcagttcttcggccctggcaccagactgacagttctcgaggacctgaagaacgtgttcccacctgaggtggccgtgttcgagcctagcgaggccgagatcagccacacccagaaagccaccctcgtgtgcctggctaccggcttctaccccgaccatgtggaactgtcttggtgggtcaacggcaaagaggtgcacagcggcgtgtctaccgacccccagccactgaaagaacagcccgccctgaacgacagccggtactgcctgagcagcagactgagagtgtccgccaccttctggcagaacccccggaaccacttcagatgccaggtgcagttctacggcctgagcgagaacgacgagtggacccaggacagagccaagcccgtgacccagatcgtgtctgccgaagcctggggcagagccgattgcggatcccagagcttcggcctgctggaccccaagctgtgctacctgctggatggcatcctgttcatctacggcgtgatcctgaccgccctgttcctgagagtgaagttcagcagaagcgccgacgcccctgcctaccagcagggacagaaccaactgtacaacgagctgaacctgggcagacgggaagagtacgacgtgctggacaagcggagaggcagggaccctgagatgggcggaaagccccagcggagaaagaacccccaggaaggactgttcaacgaactccagaaagacaagatggccgaagccttcagcgagatcggcatgaagggcgagcggagaagaggcaagggccacgatggcctgttccagggcctgagcaccgccaccaaggacaccttcgacgccctgcacatgcaggccctgcctccaagaagggccaagcgatctggatctggagcaacaaacttctcactactcaaacaagcaggtgacgtggaggagaatcccgggcctactagtatggactggatttggcgcatccttttccttgtcggcgctgctaccggcgcgcattccttcgaacagagaaaagaggtggaacaggaccctggacctttcaacgttccagagggcgctaccgtggccttcaactgcacctacagcaatagcgccagccagagcttcttctggtatcggcaggactgccggaaagaacccaagctgctgatgagcgtgtacagcagcggcaacgaggacggcagattcacagcccagctgaacagagccagccagtacatctctctgctgatccgggacagcaagctgagcgatagcgccacctatctgtgcgtggtcaagcctgatcctggcgctggaagctaccagctgacatttggcaagggcaccaagctgtctgtgatccccaatacgcgtatccagaaccctgatcctgccgtgtaccagctgcgggatagcaagagcagcgacaagagcgtgtgtctgttcaccgacttcgacagccagaccaacgtgtcccagagcaaggactccgacgtgtacatcaccgataagaccgtgctggacatgcggagcatggacttcaagagcaactccgccgtggcctggtccaacaagtccgatttcgcctgcgccaacgccttcaacaacagcattatccccgaggacacattcttcccaagccccgagagcagctgcggtacccagagttttgggttgttggaccctaaattgtgctatctgttggacggaatcctgttcatttacggagtgatcctgaccgcattgttcctgaggagcaagcggtcacggctgctccacagcgattacatgaatatgacaccacgaagaccgggtcctactcgcaaacactaccaaccctacgcacctccccgcgactttgcagcgtaccgatctcgggttaagttttccagatccgcagacgcacccgcttaccaacaagggcagaaccaactctacaatgaacttaatttggggcggagggaagagtacgacgttctggacaaaaggaggggacgagatcccgagatgggcggaaagcctcagcgaaggaagaatccgcaagaggggctttataacgaactccagaaagataaaatggcagaagcctatagtgagattgggatgaagggagaaaggaggaggggtaaaggtcacgatgggttgtaccaaggattgagcacagccactaaagatacctatgatgcgctccacatgcaggccctgccgccaagataa

SEQ ID NO: 2573 - DNA, 2580 bp, synthetic construct
  source 1..2580: mol_type = other DNA
atggccttaccagtgaccgccttgctcctgccgctggccttgctgctccacgccgccaggccggaattcggcgttacccagacacctaagttccgggtgctgaaaaccggccagagcatgacactgctgtgcgcccaggacatgaaccacgagtacatgtattggtacagacaggaccccggcatgggcctgagactgatccactattctgtcggcgagggcaccacagccaaaggcgaagttcctgacggctacaacgtgtcccggctgaagaagcagaacttcctgctgggcctcgaaagcgccgctccatctcagaccagcgtgtacttctgtgccagccggggctaccacagactgaacaacgagcagttcttcggccctggcaccagactgacagttctcgaggacctgaagaacgtgttcccacctgaggtggccgtgttcgagcctagcgaggccgagatcagccacacccagaaagccaccctcgtgtgcctggctaccggcttctaccccgaccatgtggaactgtcttggtgggtcaacggcaaagaggtgcacagcggcgtgtctaccgacccccagccactgaaagaacagcccgccctgaacgacagccggtactgcctgagcagcagactgagagtgtccgccaccttctggcagaacccccggaaccacttcagatgccaggtgcagttctacggcctgagcgagaacgacgagtggacccaggacagagccaagcccgtgacccagatcgtgtctgccgaagcctggggcagagccgattgcggatcccagagcttcggcctgctggaccccaagctgtgctacctgctggatggcatcctgttcatctacggcgtgatcctgaccgccctgttcctgagagtgaagttcagcagaagcgccgacgcccctgcctaccagcagggacagaaccaactgtacaacgagctgaacctgggcagacgggaagagtacgacgtgctggacaagcggagaggcagggaccctgagatgggcggaaagccccagcggagaaagaacccccaggaaggactgttcaacgaactccagaaagacaagatggccgaagccttcagcgagatcggcatgaagggcgagcggagaagaggcaagggccacgatggcctgttccagggcctgagcaccgccaccaaggacaccttcgacgccctgcacatgcaggccctgcctccaagaagggccaagcgatctggatctggagcaacaaacttctcactactcaaacaagcaggtgacgtggaggagaatcccgggcctactagtatggactggatttggcgcatccttttccttgtcggcgctgctaccggcgcgcattccttcgaacagagaaaagaggtggaacaggaccctggacctttcaacgttccagagggcgctaccgtggccttcaactgcacctacagcaatagcgccagccagagcttcttctggtatcggcaggactgccggaaagaacccaagctgctgatgagcgtgtacagcagcggcaacgaggacggcagattcacagcccagctgaacagagccagccagtacatctctctgctgatccgggacagcaagctgagcgatagcgccacctatctgtgcgtggtcaagcctgatcctggcgctggaagctaccagctgacatttggcaagggcaccaagctgtctgtgatccccaatacgcgtatccagaaccctgatcctgccgtgtaccagctgcgggatagcaagagcagcgacaagagcgtgtgtctgttcaccgacttcgacagccagaccaacgtgtcccagagcaaggactccgacgtgtacatcaccgataagaccgtgctggacatgcggagcatggacttcaagagcaactccgccgtggcctggtccaacaagtccgatttcgcctgcgccaacgccttcaacaacagcattatccccgaggacacattcttcccaagccccgagagcagctgcggtacccagagttttgggttgttggaccctaaattgtgctatctgttggacggaatcctgttcatttacggagtgatcctgaccgcattgttcctgaagagaggccggaagaagctgctgtacatcttcaagcagcctttcatgcggcccgtgcagaccacccaggaagaggacggctgctcctgccggttccccgaggaagaagaaggcggctgcgagctgcgggttaagttttccagatccgcagacgcacccgcttaccaacaagggcagaaccaactctacaatgaacttaatttggggcggagggaagagtacgacgttctggacaaaaggaggggacgagatcccgagatgggcggaaagcctcagcgaaggaagaatccgcaagaggggctttataacgaactccagaaagataaaatggcagaagcctatagtgagattgggatgaagggagaaaggaggaggggtaaaggtcacgatgggttgtaccaaggattgagcacagccactaaagatacctatgatgcgctccacatgcaggccctgccgccaagataa

SEQ ID NO: 2574 - DNA, 2454 bp, synthetic construct
  source 1..2454: mol_type = other DNA
atggccttaccagtgaccgccttgctcctgccgctggccttgctgctccacgccgccaggccggaattcggcgttacccagacacctaagttccgggtgctgaaaaccggccagagcatgacactgctgtgcgcccaggacatgaaccacgagtacatgtattggtacagacaggaccccggcatgggcctgagactgatccactattctgtcggcgagggcaccacagccaaaggcgaagttcctgacggctacaacgtgtcccggctgaagaagcagaacttcctgctgggcctcgaaagcgccgctccatctcagaccagcgtgtacttctgtgccagccggggctaccacagactgaacaacgagcagttcttcggccctggcaccagactgacagttctcgaggacctgaagaacgtgttcccacctgaggtggccgtgttcgagcctagcgaggccgagatcagccacacccagaaagccaccctcgtgtgcctggctaccggcttctaccccgaccatgtggaactgtcttggtgggtcaacggcaaagaggtgcacagcggcgtgtctaccgacccccagccactgaaagaacagcccgccctgaacgacagccggtactgcctgagcagcagactgagagtgtccgccaccttctggcagaacccccggaaccacttcagatgccaggtgcagttctacggcctgagcgagaacgacgagtggacccaggacagagccaagcccgtgacccagatcgtgtctgccgaagcctggggcagagccgattgcggatcccagagcttcggcctgctggaccccaagctgtgctacctgctggatggcatcctgttcatctacggcgtgatcctgaccgccctgttcctgagagtgaagttcagcagaagcgccgacgcccctgcctaccagcagggacagaaccaactgtacaacgagctgaacctgggcagacgggaagagtacgacgtgctggacaagcggagaggcagggaccctgagatgggcggaaagccccagcggagaaagaacccccaggaaggactgttcaacgaactccagaaagacaagatggccgaagccttcagcgagatcggcatgaagggcgagcggagaagaggcaagggccacgatggcctgttccagggcctgagcaccgccaccaaggacaccttcgacgccctgcacatgcaggccctgcctccaagaagggccaagcgatctggatctggagcaacaaacttctcactactcaaacaagcaggtgacgtggaggagaatcccgggcctactagtatggactggatttggcgcatccttttccttgtcggcgctgctaccggcgcgcattccttcgaacagagaaaagaggtggaacaggaccctggacctttcaacgttccagagggcgctaccgtggccttcaactgcacctacagcaatagcgccagccagagcttcttctggtatcggcaggactgccggaaagaacccaagctgctgatgagcgtgtacagcagcggcaacgaggacggcagattcacagcccagctgaacagagccagccagtacatctctctgctgatccgggacagcaagctgagcgatagcgccacctatctgtgcgtggtcaagcctgatcctggcgctggaagctaccagctgacatttggcaagggcaccaagctgtctgtgatccccaatacgcgtatccagaaccctgatcctgccgtgtaccagctgcgggatagcaagagcagcgacaagagcgtgtgtctgttcaccgacttcgacagccagaccaacgtgtcccagagcaaggactccgacgtgtacatcaccgataagaccgtgctggacatgcggagcatggacttcaagagcaactccgccgtggcctggtccaacaagtccgatttcgcctgcgccaacgccttcaacaacagcattatccccgaggacacattcttcccaagccccgagagcagctgcggtacccagagcttcggcctgctggaccccaagctgagctacctgctggatggcatcctgttcatctacggcgtgatcctgaccgccctgttcctgagagtgaagttcagcagaagcgccgacgcccctgcctaccagcagggacagaaccaactgtacaacgagctgaacctgggcagacgggaagagtacgacgtgctggacaagcggagaggcagggaccctgagatgggcggaaagccccagcggagaaagaacccccaggaaggactgtataacgaactccagaaagacaagatggccgaagcctacagcgagatcggcatgaagggcgagcggagaagaggcaagggccacgatggcctgtaccagggcctgagcaccgccaccaaggacacctatgacgccctgcacatgcaggccctgcctccaagataa

SEQ ID NO: 2575 - DNA, 2454 bp, synthetic construct
  source 1..2454: mol_type = other DNA
atggccttaccagtgaccgccttgctcctgccgctggccttgctgctccacgccgccaggccggaattcggcgttacccagacacctaagttccgggtgctgaaaaccggccagagcatgacactgctgtgcgcccaggacatgaaccacgagtacatgtattggtacagacaggaccccggcatgggcctgagactgatccactattctgtcggcgagggcaccacagccaaaggcgaagttcctgacggctacaacgtgtcccggctgaagaagcagaacttcctgctgggcctcgaaagcgccgctccatctcagaccagcgtgtacttctgtgccagccggggctaccacagactgaacaacgagcagttcttcggccctggcaccagactgacagttctcgaggacctgaagaacgtgttcccacctgaggtggccgtgttcgagcctagcgaggccgagatcagccacacccagaaagccaccctcgtgtgcctggctaccggcttctaccccgaccatgtggaactgtcttggtgggtcaacggcaaagaggtgcacagcggcgtgtctaccgacccccagccactgaaagaacagcccgccctgaacgacagccggtactgcctgagcagcagactgagagtgtccgccaccttctggcagaacccccggaaccacttcagatgccaggtgcagttctacggcctgagcgagaacgacgagtggacccaggacagagccaagcccgtgacccagatcgtgtctgccgaagcctggggcagagccgattgcggatcccagagcttcggcctgctggaccccaagctgtgctacctgctggatggcatcctgttcatctacggcgtgatcctgaccgccctgttcctgagagtgaagttcagcagaagcgccgacgcccctgcctaccagcagggacagaaccaactgtacaacgagctgaacctgggcagacgggaagagtacgacgtgctggacaagcggagaggcagggaccctgagatgggcggaaagccccagcggagaaagaacccccaggaaggactgttcaacgaactccagaaagacaagatggccgaagccttcagcgagatcggcatgaagggcgagcggagaagaggcaagggccacgatggcctgttccagggcctgagcaccgccaccaaggacaccttcgacgccctgcacatgcaggccctgcctccaagaagggccaagcgatctggatctggagcaacaaacttctcactactcaaacaagcaggtgacgtggaggagaatcccgggcctactagtatggactggatttggcgcatccttttccttgtcggcgctgctaccggcgcgcattccttcgaacagagaaaagaggtggaacaggaccctggacctttcaacgttccagagggcgctaccgtggccttcaactgcacctacagcaatagcgccagccagagcttcttctggtatcggcaggactgccggaaagaacccaagctgctgatgagcgtgtacagcagcggcaacgaggacggcagattcacagcccagctgaacagagccagccagtacatctctctgctgatccgggacagcaagctgagcgatagcgccacctatctgtgcgtggtcaagcctgatcctggcgctggaagctaccagctgacatttggcaagggcaccaagctgtctgtgatccccaatacgcgtatccagaaccctgatcctgccgtgtaccagctgcgggatagcaagagcagcgacaagagcgtgtgtctgttcaccgacttcgacagccagaccaacgtgtcccagagcaaggactccgacgtgtacatcaccgataagaccgtgctggacatgcggagcatggacttcaagagcaactccgccgtggcctggtccaacaagtccgatttcgcctgcgccaacgccttcaacaacagcattatccccgaggacacattcttcccaagccccgagagcagctgcggtacccagagttttgggttgttggaccctaaattgagctatctgttggacggaatcctgttcatttacggagtgatcctgaccgcattgttcctgcgggttaagttttccagatccgcagacgcacccgcttaccaacaagggcagaaccaactctacaatgaacttaatttggggcggagggaagagtacgacgttctggacaaaaggaggggacgagatcccgagatgggcggaaagcctcagcgaaggaagaatccgcaagaggggctttataacgaactccagaaagataaaatggcagaagcctatagtgagattgggatgaagggagaaaggaggaggggtaaaggtcacgatgggttgtaccaaggattgagcacagccactaaagatacctatgatgcgctccacatgcaggccctgccgccaagataa

SEQ ID NO: 2576 - DNA, 2454 bp, synthetic construct
  source 1..2454: mol_type = other DNA
atggccttaccagtgaccgccttgctcctgccgctggccttgctgctccacgccgccaggccggaattcggcgttacccagacacctaagttccgggtgctgaaaaccggccagagcatgacactgctgtgcgcccaggacatgaaccacgagtacatgtattggtacagacaggaccccggcatgggcctgagactgatccactattctgtcggcgagggcaccacagccaaaggcgaagttcctgacggctacaacgtgtcccggctgaagaagcagaacttcctgctgggcctcgaaagcgccgctccatctcagaccagcgtgtacttctgtgccagccggggctaccacagactgaacaacgagcagttcttcggccctggcaccagactgacagttctcgaggacctgaagaacgtgttcccacctgaggtggccgtgttcgagcctagcgaggccgagatcagccacacccagaaagccaccctcgtgtgcctggctaccggcttctaccccgaccatgtggaactgtcttggtgggtcaacggcaaagaggtgcacagcggcgtgtctaccgacccccagccactgaaagaacagcccgccctgaacgacagccggtactgcctgagcagcagactgagagtgtccgccaccttctggcagaacccccggaaccacttcagatgccaggtgcagttctacggcctgagcgagaacgacgagtggacccaggacagagccaagcccgtgacccagatcgtgtctgccgaagcctggggcagagccgattgcggatcccagagcttcggcctgctggaccccaagctgagctacctgctggatggcatcctgttcatctacggcgtgatcctgaccgccctgttcctgagagtgaagttcagcagaagcgccgacgcccctgcctaccagcagggacagaaccaactgtacaacgagctgaacctgggcagacgggaagagtacgacgtgctggacaagcggagaggcagggaccctgagatgggcggaaagccccagcggagaaagaacccccaggaaggactgtataacgaactccagaaagacaagatggccgaagcctacagcgagatcggcatgaagggcgagcggagaagaggcaagggccacgatggcctgtaccagggcctgagcaccgccaccaaggacacctatgacgccctgcacatgcaggccctgcctccaagaagggccaagcgatctggatctggagcaacaaacttctcactactcaaacaagcaggtgacgtggaggagaatcccgggcctactagtatggactggatttggcgcatccttttccttgtcggcgctgctaccggcgcgcattccttcgaacagagaaaagaggtggaacaggaccctggacctttcaacgttccagagggcgctaccgtggccttcaactgcacctacagcaatagcgccagccagagcttcttctggtatcggcaggactgccggaaagaacccaagctgctgatgagcgtgtacagcagcggcaacgaggacggcagattcacagcccagctgaacagagccagccagtacatctctctgctgatccgggacagcaagctgagcgatagcgccacctatctgtgcgtggtcaagcctgatcctggcgctggaagctaccagctgacatttggcaagggcaccaagctgtctgtgatccccaatacgcgtatccagaaccctgatcctgccgtgtaccagctgcgggatagcaagagcagcgacaagagcgtgtgtctgttcaccgacttcgacagccagaccaacgtgtcccagagcaaggactccgacgtgtacatcaccgataagaccgtgctggacatgcggagcatggacttcaagagcaactccgccgtggcctggtccaacaagtccgatttcgcctgcgccaacgccttcaacaacagcattatccccgaggacacattcttcccaagccccgagagcagctgcggtacccagagttttgggttgttggaccctaaattgagctatctgttggacggaatcctgttcatttacggagtgatcctgaccgcattgttcctgcgggttaagttttccagatccgcagacgcacccgcttaccaacaagggcagaaccaactctacaatgaacttaatttggggcggagggaagagtacgacgttctggacaaaaggaggggacgagatcccgagatgggcggaaagcctcagcgaaggaagaatccgcaagaggggctttataacgaactccagaaagataaaatggcagaagcctatagtgagattgggatgaagggagaaaggaggaggggtaaaggtcacgatgggttgtaccaaggattgagcacagccactaaagatacctatgatgcgctccacatgcaggccctgccgccaagataa

SEQ ID NO: 2577 - DNA, 2166 bp, synthetic construct
  source 1..2166: mol_type = other DNA
atggccttaccagtgaccgccttgctcctgccgctggccttgctgctccacgccgccaggccggaattcggcgttacccagacacctaagttccgggtgctgaaaaccggccagagcatgacactgctgtgcgcccaggacatgaaccacgagtacatgtattggtacagacaggaccccggcatgggcctgagactgatccactattctgtcggcgagggcaccacagccaaaggcgaagttcctgacggctacaacgtgtcccggctgaagaagcagaacttcctgctgggcctcgaaagcgccgctccatctcagaccagcgtgtacttctgtgccagccggggctaccacagactgaacaacgagcagttcttcggccctggcaccagactgacagttctcgaggacctgaagaacgtgttcccacctgaggtggccgtgttcgagcctagcgaggccgagatcagccacacccagaaagccaccctcgtgtgcctggctaccggcttctaccccgaccatgtggaactgtcttggtgggtcaacggcaaagaggtgcacagcggcgtgtctaccgacccccagccactgaaagaacagcccgccctgaacgacagccggtactgcctgagcagcagactgagagtgtccgccaccttctggcagaacccccggaaccacttcagatgccaggtgcagttctacggcctgagcgagaacgacgagtggacccaggacagagccaagcccgtgacccagatcgtgtctgccgaagcctggggcagagccgattgcggatccacaacacctggcgagagaagtagcctgcctgccttctatcctggcaccagcggctcttgttctggctgtggatctctgagcctgcctctgctggctggactggttgctgctgatgctgtggcctctctgctgattgtgggagccgtgttcctgtgcgccagacctagaagaagccccgctcaagaggacggcaaggtgtacatcaacatgcccggcagaggaagggccaagcgatctggatctggagcaacaaacttctcactactcaaacaagcaggtgacgtggaggagaatcccgggcctactagtatggactggatttggcgcatccttttccttgtcggcgctgctaccggcgcgcattccttcgaacagagaaaagaggtggaacaggaccctggacctttcaacgttccagagggcgctaccgtggccttcaactgcacctacagcaatagcgccagccagagcttcttctggtatcggcaggactgccggaaagaacccaagctgctgatgagcgtgtacagcagcggcaacgaggacggcagattcacagcccagctgaacagagccagccagtacatctctctgctgatccgggacagcaagctgagcgatagcgccacctatctgtgcgtggtcaagcctgatcctggcgctggaagctaccagctgacatttggcaagggcaccaagctgtctgtgatccccaatacgcgtatccagaaccctgatcctgccgtgtaccagctgcgggatagcaagagcagcgacaagagcgtgtgtctgttcaccgacttcgacagccagaccaacgtgtcccagagcaaggactccgacgtgtacatcaccgataagaccgtgctggacatgcggagcatggacttcaagagcaactccgccgtggcctggtccaacaagtccgatttcgcctgcgccaacgccttcaacaacagcattatccccgaggacacattcttcccaagccccgagagcagctgcggtaccacaacacctggcgagagaagtagcctgcctgccttctatcctggcaccagcggctcttgttctggctgtggatctctgagcctgcctctgctggctggactggttgctgctgatgctgtggcctctctgctgattgtgggagccgtgttcaaacggggcagaaagaaactcctgtatatattcaaacaaccatttatgagaccagtacaaactactcaagaggaagatggctgtagctgccgatttccagaagaagaagaaggaggatgtgaactgctgtgcgccagacctagaagaagccccgctcaagaggacggcaaggtgtacatcaacatgcccggcagaggataa

SEQ ID NO: 2578 - DNA, 2163 bp, synthetic construct
  source 1..2163: mol_type = other DNA
atggccttaccagtgaccgccttgctcctgccgctggccttgctgctccacgccgccaggccggaattcggcgttacccagacacctaagttccgggtgctgaaaaccggccagagcatgacactgctgtgcgcccaggacatgaaccacgagtacatgtattggtacagacaggaccccggcatgggcctgagactgatccactattctgtcggcgagggcaccacagccaaaggcgaagttcctgacggctacaacgtgtcccggctgaagaagcagaacttcctgctgggcctcgaaagcgccgctccatctcagaccagcgtgtacttctgtgccagccggggctaccacagactgaacaacgagcagttcttcggccctggcaccagactgacagttctcgaggacctgaagaacgtgttcccacctgaggtggccgtgttcgagcctagcgaggccgagatcagccacacccagaaagccaccctcgtgtgcctggctaccggcttctaccccgaccatgtggaactgtcttggtgggtcaacggcaaagaggtgcacagcggcgtgtctaccgacccccagccactgaaagaacagcccgccctgaacgacagccggtactgcctgagcagcagactgagagtgtccgccaccttctggcagaacccccggaaccacttcagatgccaggtgcagttctacggcctgagcgagaacgacgagtggacccaggacagagccaagcccgtgacccagatcgtgtctgccgaagcctggggcagagccgattgcggatccacaacacctggcgagagaagtagcctgcctgccttctatcctggcaccagcggctcttgttctggctgtggatctctgagcctgcctctgctggctggactggttgctgctgatgctgtggcctctctgctgattgtgggagccgtgttcctgtgcgccagacctagaagaagccccgctcaagaggacggcaaggtgtacatcaacatgcccggcagaggaagggccaagcgatctggatctggagcaacaaacttctcactactcaaacaagcaggtgacgtggaggagaatcccgggcctactagtatggactggatttggcgcatccttttccttgtcggcgctgctaccggcgcgcattccttcgaacagagaaaagaggtggaacaggaccctggacctttcaacgttccagagggcgctaccgtggccttcaactgcacctacagcaatagcgccagccagagcttcttctggtatcggcaggactgccggaaagaacccaagctgctgatgagcgtgtacagcagcggcaacgaggacggcagattcacagcccagctgaacagagccagccagtacatctctctgctgatccgggacagcaagctgagcgatagcgccacctatctgtgcgtggtcaagcctgatcctggcgctggaagctaccagctgacatttggcaagggcaccaagctgtctgtgatccccaatacgcgtatccagaaccctgatcctgccgtgtaccagctgcgggatagcaagagcagcgacaagagcgtgtgtctgttcaccgacttcgacagccagaccaacgtgtcccagagcaaggactccgacgtgtacatcaccgataagaccgtgctggacatgcggagcatggacttcaagagcaactccgccgtggcctggtccaacaagtccgatttcgcctgcgccaacgccttcaacaacagcattatccccgaggacacattcttcccaagccccgagagcagctgcggtaccacaacacctggcgagagaagtagcctgcctgccttctatcctggcaccagcggctcttgttctggctgtggatctctgagcctgcctctgctggctggactggttgctgctgatgctgtggcctctctgctgattgtgggagccgtgttcaggagtaagaggagcaggctcctgcacagtgactacatgaacatgactccacgccgccccggacccacccgcaagcattaccagccctatgccccaccacgcgacttcgcagcctatcgctccctgtgcgccagacctagaagaagccccgctcaagaggacggcaaggtgtacatcaacatgcccggcagaggataa

SEQ ID NO: 2579 - DNA, 2148 bp, synthetic construct
  source 1..2148: mol_type = other DNA
atggccttaccagtgaccgccttgctcctgccgctggccttgctgctccacgccgccaggccggaattcggcgttacccagacacctaagttccgggtgctgaaaaccggccagagcatgacactgctgtgcgcccaggacatgaaccacgagtacatgtattggtacagacaggaccccggcatgggcctgagactgatccactattctgtcggcgagggcaccacagccaaaggcgaagttcctgacggctacaacgtgtcccggctgaagaagcagaacttcctgctgggcctcgaaagcgccgctccatctcagaccagcgtgtacttctgtgccagccggggctaccacagactgaacaacgagcagttcttcggccctggcaccagactgacagttctcgaggacctgaagaacgtgttcccacctgaggtggccgtgttcgagcctagcgaggccgagatcagccacacccagaaagccaccctcgtgtgcctggctaccggcttctaccccgaccatgtggaactgtcttggtgggtcaacggcaaagaggtgcacagcggcgtgtctaccgacccccagccactgaaagaacagcccgccctgaacgacagccggtactgcctgagcagcagactgagagtgtccgccaccttctggcagaacccccggaaccacttcagatgccaggtgcagttctacggcctgagcgagaacgacgagtggacccaggacagagccaagcccgtgacccagatcgtgtctgccgaagcctggggcagagccgattgcggatccacaacacctggcgagagaagtagcctgcctgccttctatcctggcaccagcggctcttgttctggctgtggatctctgagcctgcctctgctggctggactggttgctgctgatgctgtggcctctctgctgattgtgggagccgtgttcctgtgcgccagacctagaagaagccccgctcaagaggacggcaaggtgtacatcaacatgcccggcagaggaagggccaagcgatctggatctggagcaacaaacttctcactactcaaacaagcaggtgacgtggaggagaatcccgggcctactagtatggactggatttggcgcatccttttccttgtcggcgctgctaccggcgcgcattccttcgaacagagaaaagaggtggaacaggaccctggacctttcaacgttccagagggcgctaccgtggccttcaactgcacctacagcaatagcgccagccagagcttcttctggtatcggcaggactgccggaaagaacccaagctgctgatgagcgtgtacagcagcggcaacgaggacggcagattcacagcccagctgaacagagccagccagtacatctctctgctgatccgggacagcaagctgagcgatagcgccacctatctgtgcgtggtcaagcctgatcctggcgctggaagctaccagctgacatttggcaagggcaccaagctgtctgtgatccccaatacgcgtatccagaaccctgatcctgccgtgtaccagctgcgggatagcaagagcagcgacaagagcgtgtgtctgttcaccgacttcgacagccagaccaacgtgtcccagagcaaggactccgacgtgtacatcaccgataagaccgtgctggacatgcggagcatggacttcaagagcaactccgccgtggcctggtccaacaagtccgatttcgcctgcgccaacgccttcaacaacagcattatccccgaggacacattcttcccaagccccgagagcagctgcggtaccacaacacctggcgagagaagtagcctgcctgccttctatcctggcaccagcggctcttgttctggctgtggatctctgagcctgcctctgctggctggactggttgctgctgatgctgtggcctctctgctgattgtgggagccgtgttcagggaccaaagactgcctcctgacgctcacaaacctccaggcggaggcagcttcagaacccctatccaagaggaacaggctgacgcccacagcaccctggcaaaaattctgtgcgccagacctagaagaagccccgctcaagaggacggcaaggtgtacatcaacatgcccggcagaggataa

SEQ ID NO: 2580 - DNA, 2400 bp, synthetic construct
  source 1..2400: mol_type = other DNA
atggccttaccagtgaccgccttgctcctgccgctggccttgctgctccacgccgccaggccggaattcggcgttacccagacacctaagttccgggtgctgaaaaccggccagagcatgacactgctgtgcgcccaggacatgaaccacgagtacatgtattggtacagacaggaccccggcatgggcctgagactgatccactattctgtcggcgagggcaccacagccaaaggcgaagttcctgacggctacaacgtgtcccggctgaagaagcagaacttcctgctgggcctcgaaagcgccgctccatctcagaccagcgtgtacttctgtgccagccggggctaccacagactgaacaacgagcagttcttcggccctggcaccagactgacagttctcgaggacctgaagaacgtgttcccacctgaggtggccgtgttcgagcctagcgaggccgagatcagccacacccagaaagccaccctcgtgtgcctggctaccggcttctaccccgaccatgtggaactgtcttggtgggtcaacggcaaagaggtgcacagcggcgtgtctaccgacccccagccactgaaagaacagcccgccctgaacgacagccggtactgcctgagcagcagactgagagtgtccgccaccttctggcagaacccccggaaccacttcagatgccaggtgcagttctacggcctgagcgagaacgacgagtggacccaggacagagccaagcccgtgacccagatcgtgtctgccgaagcctggggcagagccgattgcggatccacaacacctggcgagagaagtagcctgcctgccttctatcctggcaccagcggctcttgttctggctgtggatctctgagcctgcctctgctggctggactggttgctgctgatgctgtggcctctctgctgattgtgggagccgtgttcctgtgcgccagacctagaagaagccccgctcaagaggacggcaaggtgtacatcaacatgcccggcagaggaagggccaagcgatctggatctggagcaacaaacttctcactactcaaacaagcaggtgacgtggaggagaatcccgggcctactagtatggactggatttggcgcatccttttccttgtcggcgctgctaccggcgcgcattccttcgaacagagaaaagaggtggaacaggaccctggacctttcaacgttccagagggcgctaccgtggccttcaactgcacctacagcaatagcgccagccagagcttcttctggtatcggcaggactgccggaaagaacccaagctgctgatgagcgtgtacagcagcggcaacgaggacggcagattcacagcccagctgaacagagccagccagtacatctctctgctgatccgggacagcaagctgagcgatagcgccacctatctgtgcgtggtcaagcctgatcctggcgctggaagctaccagctgacatttggcaagggcaccaagctgtctgtgatccccaatacgcgtatccagaaccctgatcctgccgtgtaccagctgcgggatagcaagagcagcgacaagagcgtgtgtctgttcaccgacttcgacagccagaccaacgtgtcccagagcaaggactccgacgtgtacatcaccgataagaccgtgctggacatgcggagcatggacttcaagagcaactccgccgtggcctggtccaacaagtccgatttcgcctgcgccaacgccttcaacaacagcattatccccgaggacacattcttcccaagccccgagagcagctgcggtaccacaacacctggcgagagaagtagcctgcctgccttctatcctggcaccagcggctcttgttctggctgtggatctctgagcctgcctctgctggctggactggttgctgctgatgctgtggcctctctgctgattgtgggagccgtgttctggcggcggaagcggaaagagaagcagtctgagacaagccccaaagagttcctgaccatctacgaggacgtgaaggacctgaaaacccggcggaaccacgaacaagagcagacctttcctggcggaggcagcaccatctacagcatgatccagagccagagcagcgcccctacaagccaagagcctgcctacacactgtactccctgatccagcctagcagaaagagcggcagccggaagagaaatcacagccccagcttcaacagcacgatctacgaagtgatcggcaagagccagccaaaggctcagaaccctgccagactgagccggaaagagctggaaaacttcgacgtgtacagcctgtgcgccagacctagaagaagccccgctcaagaggacggcaaggtgtacatcaacatgcccggcagaggataa

SEQ ID NO: 2581 - DNA, 2253 bp, synthetic construct
  source 1..2253: mol_type = other DNA
atggccttaccagtgaccgccttgctcctgccgctggccttgctgctccacgccgccaggccggaattcggcgttacccagacacctaagttccgggtgctgaaaaccggccagagcatgacactgctgtgcgcccaggacatgaaccacgagtacatgtattggtacagacaggaccccggcatgggcctgagactgatccactattctgtcggcgagggcaccacagccaaaggcgaagttcctgacggctacaacgtgtcccggctgaagaagcagaacttcctgctgggcctcgaaagcgccgctccatctcagaccagcgtgtacttctgtgccagccggggctaccacagactgaacaacgagcagttcttcggccctggcaccagactgacagttctcgaggacctgaagaacgtgttcccacctgaggtggccgtgttcgagcctagcgaggccgagatcagccacacccagaaagccaccctcgtgtgcctggctaccggcttctaccccgaccatgtggaactgtcttggtgggtcaacggcaaagaggtgcacagcggcgtgtctaccgacccccagccactgaaagaacagcccgccctgaacgacagccggtactgcctgagcagcagactgagagtgtccgccaccttctggcagaacccccggaaccacttcagatgccaggtgcagttctacggcctgagcgagaacgacgagtggacccaggacagagccaagcccgtgacccagatcgtgtctgccgaagcctggggcagagccgattgcggatccctgggagagcctcagctgtgctatatcctggacgccatcctgtttctgtacggcatcgtgctgaccctgctgtactgcaaacggggcagaaagaaactcctgtatatattcaaacaaccatttatgagaccagtacaaactactcaagaggaagatggctgtagctgccgatttccagaagaagaagaaggaggatgtgaactgcggctgaagatccaagtgcggaaggccgccatcaccagctacgagaaatccgacggcgtgtacaccggcctgagcaccagaaatcaagagacatacgagacactgaagcacgaaaagcctccacaaagggccaagcgatctggatctggagcaacaaacttctcactactcaaacaagcaggtgacgtggaggagaatcccgggcctactagtatggactggatttggcgcatccttttccttgtcggcgctgctaccggcgcgcattccttcgaacagagaaaagaggtggaacaggaccctggacctttcaacgttccagagggcgctaccgtggccttcaactgcacctacagcaatagcgccagccagagcttcttctggtatcggcaggactgccggaaagaacccaagctgctgatgagcgtgtacagcagcggcaacgaggacggcagattcacagcccagctgaacagagccagccagtacatctctctgctgatccgggacagcaagctgagcgatagcgccacctatctgtgcgtggtcaagcctgatcctggcgctggaagctaccagctgacatttggcaagggcaccaagctgtctgtgatccccaatacgcgtatccagaaccctgatcctgccgtgtaccagctgcgggatagcaagagcagcgacaagagcgtgtgtctgttcaccgacttcgacagccagaccaacgtgtcccagagcaaggactccgacgtgtacatcaccgataagaccgtgctggacatgcggagcatggacttcaagagcaactccgccgtggcctggtccaacaagtccgatttcgcctgcgccaacgccttcaacaacagcattatccccgaggacacattcttcccaagccccgagagcagctgcggtaccctgggagagcctcagctgtgctatatcctggacgccatcctgtttctgtacggcatcgtgctgaccctgctgtactgcaggagtaagaggagcaggctcctgcacagtgactacatgaacatgactccacgccgccccggacccacccgcaagcattaccagccctatgccccaccacgcgacttcgcagcctatcgctcccggctgaagatccaagtgcggaaggccgccatcaccagctacgagaaatccgacggcgtgtacaccggcctgagcaccagaaatcaagagacatacgagacactgaagcacgaaaagcctccacaataa

SEQ ID NO: 2582 - DNA, 2238 bp, synthetic construct
  source 1..2238: mol_type = other DNA
atggccttaccagtgaccgccttgctcctgccgctggccttgctgctccacgccgccaggccggaattcggcgttacccagacacctaagttccgggtgctgaaaaccggccagagcatgacactgctgtgcgcccaggacatgaaccacgagtacatgtattggtacagacaggaccccggcatgggcctgagactgatccactattctgtcggcgagggcaccacagccaaaggcgaagttcctgacggctacaacgtgtcccggctgaagaagcagaacttcctgctgggcctcgaaagcgccgctccatctcagaccagcgtgtacttctgtgccagccggggctaccacagactgaacaacgagcagttcttcggccctggcaccagactgacagttctcgaggacctgaagaacgtgttcccacctgaggtggccgtgttcgagcctagcgaggccgagatcagccacacccagaaagccaccctcgtgtgcctggctaccggcttctaccccgaccatgtggaactgtcttggtgggtcaacggcaaagaggtgcacagcggcgtgtctaccgacccccagccactgaaagaacagcccgccctgaacgacagccggtactgcctgagcagcagactgagagtgtccgccaccttctggcagaacccccggaaccacttcagatgccaggtgcagttctacggcctgagcgagaacgacgagtggacccaggacagagccaagcccgtgacccagatcgtgtctgccgaagcctggggcagagccgattgcggatccctgggagagcctcagctgtgctatatcctggacgccatcctgtttctgtacggcatcgtgctgaccctgctgtactgcaaacggggcagaaagaaactcctgtatatattcaaacaaccatttatgagaccagtacaaactactcaagaggaagatggctgtagctgccgatttccagaagaagaagaaggaggatgtgaactgcggctgaagatccaagtgcggaaggccgccatcaccagctacgagaaatccgacggcgtgtacaccggcctgagcaccagaaatcaagagacatacgagacactgaagcacgaaaagcctccacaaagggccaagcgatctggatctggagcaacaaacttctcactactcaaacaagcaggtgacgtggaggagaatcccgggcctactagtatggactggatttggcgcatccttttccttgtcggcgctgctaccggcgcgcattccttcgaacagagaaaagaggtggaacaggaccctggacctttcaacgttccagagggcgctaccgtggccttcaactgcacctacagcaatagcgccagccagagcttcttctggtatcggcaggactgccggaaagaacccaagctgctgatgagcgtgtacagcagcggcaacgaggacggcagattcacagcccagctgaacagagccagccagtacatctctctgctgatccgggacagcaagctgagcgatagcgccacctatctgtgcgtggtcaagcctgatcctggcgctggaagctaccagctgacatttggcaagggcaccaagctgtctgtgatccccaatacgcgtatccagaaccctgatcctgccgtgtaccagctgcgggatagcaagagcagcgacaagagcgtgtgtctgttcaccgacttcgacagccagaccaacgtgtcccagagcaaggactccgacgtgtacatcaccgataagaccgtgctggacatgcggagcatggacttcaagagcaactccgccgtggcctggtccaacaagtccgatttcgcctgcgccaacgccttcaacaacagcattatccccgaggacacattcttcccaagccccgagagcagctgcggtaccctgggagagcctcagctgtgctatatcctggacgccatcctgtttctgtacggcatcgtgctgaccctgctgtactgcagggaccaaagactgcctcctgacgctcacaaacctccaggcggaggcagcttcagaacccctatccaagaggaacaggctgacgcccacagcaccctggcaaaaattcggctgaagatccaagtgcggaaggccgccatcaccagctacgagaaatccgacggcgtgtacaccggcctgagcaccagaaatcaagagacatacgagacactgaagcacgaaaagcctccacaataa

SEQ ID NO: 2583 - DNA, 2490 bp, synthetic construct
  source 1..2490: mol_type = other DNA
atggccttaccagtgaccgccttgctcctgccgctggccttgctgctccacgccgccaggccggaattcggcgttacccagacacctaagttccgggtgctgaaaaccggccagagcatgacactgctgtgcgcccaggacatgaaccacgagtacatgtattggtacagacaggaccccggcatgggcctgagactgatccactattctgtcggcgagggcaccacagccaaaggcgaagttcctgacggctacaacgtgtcccggctgaagaagcagaacttcctgctgggcctcgaaagcgccgctccatctcagaccagcgtgtacttctgtgccagccggggctaccacagactgaacaacgagcagttcttcggccctggcaccagactgacagttctcgaggacctgaagaacgtgttcccacctgaggtggccgtgttcgagcctagcgaggccgagatcagccacacccagaaagccaccctcgtgtgcctggctaccggcttctaccccgaccatgtggaactgtcttggtgggtcaacggcaaagaggtgcacagcggcgtgtctaccgacccccagccactgaaagaacagcccgccctgaacgacagccggtactgcctgagcagcagactgagagtgtccgccaccttctggcagaacccccggaaccacttcagatgccaggtgcagttctacggcctgagcgagaacgacgagtggacccaggacagagccaagcccgtgacccagatcgtgtctgccgaagcctggggcagagccgattgcggatccctgggagagcctcagctgtgctatatcctggacgccatcctgtttctgtacggcatcgtgctgaccctgctgtactgcaaacggggcagaaagaaactcctgtatatattcaaacaaccatttatgagaccagtacaaactactcaagaggaagatggctgtagctgccgatttccagaagaagaagaaggaggatgtgaactgcggctgaagatccaagtgcggaaggccgccatcaccagctacgagaaatccgacggcgtgtacaccggcctgagcaccagaaatcaagagacatacgagacactgaagcacgaaaagcctccacaaagggccaagcgatctggatctggagcaacaaacttctcactactcaaacaagcaggtgacgtggaggagaatcccgggcctactagtatggactggatttggcgcatccttttccttgtcggcgctgctaccggcgcgcattccttcgaacagagaaaagaggtggaacaggaccctggacctttcaacgttccagagggcgctaccgtggccttcaactgcacctacagcaatagcgccagccagagcttcttctggtatcggcaggactgccggaaagaacccaagctgctgatgagcgtgtacagcagcggcaacgaggacggcagattcacagcccagctgaacagagccagccagtacatctctctgctgatccgggacagcaagctgagcgatagcgccacctatctgtgcgtggtcaagcctgatcctggcgctggaagctaccagctgacatttggcaagggcaccaagctgtctgtgatccccaatacgcgtatccagaaccctgatcctgccgtgtaccagctgcgggatagcaagagcagcgacaagagcgtgtgtctgttcaccgacttcgacagccagaccaacgtgtcccagagcaaggactccgacgtgtacatcaccgataagaccgtgctggacatgcggagcatggacttcaagagcaactccgccgtggcctggtccaacaagtccgatttcgcctgcgccaacgccttcaacaacagcattatccccgaggacacattcttcccaagccccgagagcagctgcggtaccctgggagagcctcagctgtgctatatcctggacgccatcctgtttctgtacggcatcgtgctgaccctgctgtactgctggcggcggaagcggaaagagaagcagtctgagacaagccccaaagagttcctgaccatctacgaggacgtgaaggacctgaaaacccggcggaaccacgaacaagagcagacctttcctggcggaggcagcaccatctacagcatgatccagagccagagcagcgcccctacaagccaagagcctgcctacacactgtactccctgatccagcctagcagaaagagcggcagccggaagagaaatcacagccccagcttcaacagcacgatctacgaagtgatcggcaagagccagccaaaggctcagaaccctgccagactgagccggaaagagctggaaaacttcgacgtgtacagccggctgaagatccaagtgcggaaggccgccatcaccagctacgagaaatccgacggcgtgtacaccggcctgagcaccagaaatcaagagacatacgagacactgaagcacgaaaagcctccacaataa

SEQ ID NO: 2584 - DNA, 2256 bp, synthetic construct
  source 1..2256: mol_type = other DNA
atggccttaccagtgaccgccttgctcctgccgctggccttgctgctccacgccgccaggccggaattcggcgttacccagacacctaagttccgggtgctgaaaaccggccagagcatgacactgctgtgcgcccaggacatgaaccacgagtacatgtattggtacagacaggaccccggcatgggcctgagactgatccactattctgtcggcgagggcaccacagccaaaggcgaagttcctgacggctacaacgtgtcccggctgaagaagcagaacttcctgctgggcctcgaaagcgccgctccatctcagaccagcgtgtacttctgtgccagccggggctaccacagactgaacaacgagcagttcttcggccctggcaccagactgacagttctcgaggacctgaagaacgtgttcccacctgaggtggccgtgttcgagcctagcgaggccgagatcagccacacccagaaagccaccctcgtgtgcctggctaccggcttctaccccgaccatgtggaactgtcttggtgggtcaacggcaaagaggtgcacagcggcgtgtctaccgacccccagccactgaaagaacagcccgccctgaacgacagccggtactgcctgagcagcagactgagagtgtccgccaccttctggcagaacccccggaaccacttcagatgccaggtgcagttctacggcctgagcgagaacgacgagtggacccaggacagagccaagcccgtgacccagatcgtgtctgccgaagcctggggcagagccgattgcggatccctgggagagcctcagctgtgctatatcctggacgccatcctgtttctgtacggcatcgtgctgaccctgctgtactgcaaacggggcagaaagaaactcctgtatatattcaaacaaccatttatgagaccagtacaaactactcaagaggaagatggctgtagctgccgatttccagaagaagaagaaggaggatgtgaactgcggctgaagatccaagtgcggaaggccgccatcaccagctacgagaaatccgacggcgtgtacaccggcctgagcaccagaaatcaagagacatacgagacactgaagcacgaaaagcctccacaaagggccaagcgatctggatctggagcaacaaacttctcactactcaaacaagcaggtgacgtggaggagaatcccgggcctactagtatggactggatttggcgcatccttttccttgtcggcgctgctaccggcgcgcattccttcgaacagagaaaagaggtggaacaggaccctggacctttcaacgttccagagggcgctaccgtggccttcaactgcacctacagcaatagcgccagccagagcttcttctggtatcggcaggactgccggaaagaacccaagctgctgatgagcgtgtacagcagcggcaacgaggacggcagattcacagcccagctgaacagagccagccagtacatctctctgctgatccgggacagcaagctgagcgatagcgccacctatctgtgcgtggtcaagcctgatcctggcgctggaagctaccagctgacatttggcaagggcaccaagctgtctgtgatccccaatacgcgtatccagaaccctgatcctgccgtgtaccagctgcgggatagcaagagcagcgacaagagcgtgtgtctgttcaccgacttcgacagccagaccaacgtgtcccagagcaaggactccgacgtgtacatcaccgataagaccgtgctggacatgcggagcatggacttcaagagcaactccgccgtggcctggtccaacaagtccgatttcgcctgcgccaacgccttcaacaacagcattatccccgaggacacattcttcccaagccccgagagcagctgcggtaccctcggagaaccacagctctgttacattctggatgctatcctgttcctctatgggatcgtcctgacactcctgtattgcaagagaggccggaagaagctgctgtacatcttcaagcagcctttcatgcggcccgtgcagaccacccaggaagaggacggctgctcctgccggttccccgaggaagaagaaggcggctgcgagctgagactcaaaattcaagttcgcaaagccgccattacctcttacgagaagagtgatggggtgtacacaggactgtctacccggaatcaagaaacctacgaaaccctcaaacatgagaagccacctcagtaa

SEQ ID NO: 2585 - DNA, 2253 bp, synthetic construct
  source 1..2253: mol_type = other DNA
atggccttaccagtgaccgccttgctcctgccgctggccttgctgctccacgccgccaggccggaattcggcgttacccagacacctaagttccgggtgctgaaaaccggccagagcatgacactgctgtgcgcccaggacatgaaccacgagtacatgtattggtacagacaggaccccggcatgggcctgagactgatccactattctgtcggcgagggcaccacagccaaaggcgaagttcctgacggctacaacgtgtcccggctgaagaagcagaacttcctgctgggcctcgaaagcgccgctccatctcagaccagcgtgtacttctgtgccagccggggctaccacagactgaacaacgagcagttcttcggccctggcaccagactgacagttctcgaggacctgaagaacgtgttcccacctgaggtggccgtgttcgagcctagcgaggccgagatcagccacacccagaaagccaccctcgtgtgcctggctaccggcttctaccccgaccatgtggaactgtcttggtgggtcaacggcaaagaggtgcacagcggcgtgtctaccgacccccagccactgaaagaacagcccgccctgaacgacagccggtactgcctgagcagcagactgagagtgtccgccaccttctggcagaacccccggaaccacttcagatgccaggtgcagttctacggcctgagcgagaacgacgagtggacccaggacagagccaagcccgtgacccagatcgtgtctgccgaagcctggggcagagccgattgcggatccctgggagagcctcagctgtgctatatcctggacgccatcctgtttctgtacggcatcgtgctgaccctgctgtactgcaaacggggcagaaagaaactcctgtatatattcaaacaaccatttatgagaccagtacaaactactcaagaggaagatggctgtagctgccgatttccagaagaagaagaaggaggatgtgaactgcggctgaagatccaagtgcggaaggccgccatcaccagctacgagaaatccgacggcgtgtacaccggcctgagcaccagaaatcaagagacatacgagacactgaagcacgaaaagcctccacaaagggccaagcgatctggatctggagcaacaaacttctcactactcaaacaagcaggtgacgtggaggagaatcccgggcctactagtatggactggatttggcgcatccttttccttgtcggcgctgctaccggcgcgcattccttcgaacagagaaaagaggtggaacaggaccctggacctttcaacgttccagagggcgctaccgtggccttcaactgcacctacagcaatagcgccagccagagcttcttctggtatcggcaggactgccggaaagaacccaagctgctgatgagcgtgtacagcagcggcaacgaggacggcagattcacagcccagctgaacagagccagccagtacatctctctgctgatccgggacagcaagctgagcgatagcgccacctatctgtgcgtggtcaagcctgatcctggcgctggaagctaccagctgacatttggcaagggcaccaagctgtctgtgatccccaatacgcgtatccagaaccctgatcctgccgtgtaccagctgcgggatagcaagagcagcgacaagagcgtgtgtctgttcaccgacttcgacagccagaccaacgtgtcccagagcaaggactccgacgtgtacatcaccgataagaccgtgctggacatgcggagcatggacttcaagagcaactccgccgtggcctggtccaacaagtccgatttcgcctgcgccaacgccttcaacaacagcattatccccgaggacacattcttcccaagccccgagagcagctgcggtaccctcggagaaccacagctctgttacattctggatgctatcctgttcctctatgggatcgtcctgacactcctgtattgcaggagcaagcggtcacggctgctccacagcgattacatgaatatgacaccacgaagaccgggtcctactcgcaaacactaccaaccctacgcacctccccgcgactttgcagcgtaccgatctagactcaaaattcaagttcgcaaagccgccattacctcttacgagaagagtgatggggtgtacacaggactgtctacccggaatcaagaaacctacgaaaccctcaaacatgagaagccacctcagtaa

SEQ ID NO: 2586 - DNA, 2250 bp, synthetic construct
  source 1..2250: mol_type = other DNA
atggccttaccagtgaccgccttgctcctgccgctggccttgctgctccacgccgccaggccggaattcggcgttacccagacacctaagttccgggtgctgaaaaccggccagagcatgacactgctgtgcgcccaggacatgaaccacgagtacatgtattggtacagacaggaccccggcatgggcctgagactgatccactattctgtcggcgagggcaccacagccaaaggcgaagttcctgacggctacaacgtgtcccggctgaagaagcagaacttcctgctgggcctcgaaagcgccgctccatctcagaccagcgtgtacttctgtgccagccggggctaccacagactgaacaacgagcagttcttcggccctggcaccagactgacagttctcgaggacctgaagaacgtgttcccacctgaggtggccgtgttcgagcctagcgaggccgagatcagccacacccagaaagccaccctcgtgtgcctggctaccggcttctaccccgaccatgtggaactgtcttggtgggtcaacggcaaagaggtgcacagcggcgtgtctaccgacccccagccactgaaagaacagcccgccctgaacgacagccggtactgcctgagcagcagactgagagtgtccgccaccttctggcagaacccccggaaccacttcagatgccaggtgcagttctacggcctgagcgagaacgacgagtggacccaggacagagccaagcccgtgacccagatcgtgtctgccgaagcctggggcagagccgattgcggatccctgggagagcctcagctgtgctatatcctggacgccatcctgtttctgtacggcatcgtgctgaccctgctgtactgcaggagtaagaggagcaggctcctgcacagtgactacatgaacatgactccacgccgccccggacccacccgcaagcattaccagccctatgccccaccacgcgacttcgcagcctatcgctcccggctgaagatccaagtgcggaaggccgccatcaccagctacgagaaatccgacggcgtgtacaccggcctgagcaccagaaatcaagagacatacgagacactgaagcacgaaaagcctccacaaagggccaagcgatctggatctggagcaacaaacttctcactactcaaacaagcaggtgacgtggaggagaatcccgggcctactagtatggactggatttggcgcatccttttccttgtcggcgctgctaccggcgcgcattccttcgaacagagaaaagaggtggaacaggaccctggacctttcaacgttccagagggcgctaccgtggccttcaactgcacctacagcaatagcgccagccagagcttcttctggtatcggcaggactgccggaaagaacccaagctgctgatgagcgtgtacagcagcggcaacgaggacggcagattcacagcccagctgaacagagccagccagtacatctctctgctgatccgggacagcaagctgagcgatagcgccacctatctgtgcgtggtcaagcctgatcctggcgctggaagctaccagctgacatttggcaagggcaccaagctgtctgtgatccccaatacgcgtatccagaaccctgatcctgccgtgtaccagctgcgggatagcaagagcagcgacaagagcgtgtgtctgttcaccgacttcgacagccagaccaacgtgtcccagagcaaggactccgacgtgtacatcaccgataagaccgtgctggacatgcggagcatggacttcaagagcaactccgccgtggcctggtccaacaagtccgatttcgcctgcgccaacgccttcaacaacagcattatccccgaggacacattcttcccaagccccgagagcagctgcggtaccctcggagaaccacagctctgttacattctggatgctatcctgttcctctatgggatcgtcctgacactcctgtattgcaggagcaagcggtcacggctgctccacagcgattacatgaatatgacaccacgaagaccgggtcctactcgcaaacactaccaaccctacgcacctccccgcgactttgcagcgtaccgatctagactcaaaattcaagttcgcaaagccgccattacctcttacgagaagagtgatggggtgtacacaggactgtctacccggaatcaagaaacctacgaaaccctcaaacatgagaagccacctcagtaa

SEQ ID NO: 2587 - DNA, 2004 bp, synthetic construct
  source 1..2004: mol_type = other DNA
atggccttaccagtgaccgccttgctcctgccgctggccttgctgctccacgccgccaggccggaattcggcgttacccagacacctaagttccgggtgctgaaaaccggccagagcatgacactgctgtgcgcccaggacatgaaccacgagtacatgtattggtacagacaggaccccggcatgggcctgagactgatccactattctgtcggcgagggcaccacagccaaaggcgaagttcctgacggctacaacgtgtcccggctgaagaagcagaacttcctgctgggcctcgaaagcgccgctccatctcagaccagcgtgtacttctgtgccagccggggctaccacagactgaacaacgagcagttcttcggccctggcaccagactgacagttctcgaggacctgaagaacgtgttcccacctgaggtggccgtgttcgagcctagcgaggccgagatcagccacacccagaaagccaccctcgtgtgcctggctaccggcttctaccccgaccatgtggaactgtcttggtgggtcaacggcaaagaggtgcacagcggcgtgtctaccgacccccagccactgaaagaacagcccgccctgaacgacagccggtactgcctgagcagcagactgagagtgtccgccaccttctggcagaacccccggaaccacttcagatgccaggtgcagttctacggcctgagcgagaacgacgagtggacccaggacagagccaagcccgtgacccagatcgtgtctgccgaagcctggggcagagccgattgcggatccctgggagagcctcagctgagctatatcctggacgccatcctgtttctgtacggcatcgtgctgaccctgctgtactgccggctgaagatccaagtgcggaaggccgccatcaccagctacgagaaatccgacggcgtgtacaccggcctgagcaccagaaatcaagagacatacgagacactgaagcacgaaaagcctccacaaagggccaagcgatctggatctggagcaacaaacttctcactactcaaacaagcaggtgacgtggaggagaatcccgggcctactagtatggactggatttggcgcatccttttccttgtcggcgctgctaccggcgcgcattccttcgaacagagaaaagaggtggaacaggaccctggacctttcaacgttccagagggcgctaccgtggccttcaactgcacctacagcaatagcgccagccagagcttcttctggtatcggcaggactgccggaaagaacccaagctgctgatgagcgtgtacagcagcggcaacgaggacggcagattcacagcccagctgaacagagccagccagtacatctctctgctgatccgggacagcaagctgagcgatagcgccacctatctgtgcgtggtcaagcctgatcctggcgctggaagctaccagctgacatttggcaagggcaccaagctgtctgtgatccccaatacgcgtatccagaaccctgatcctgccgtgtaccagctgcgggatagcaagagcagcgacaagagcgtgtgtctgttcaccgacttcgacagccagaccaacgtgtcccagagcaaggactccgacgtgtacatcaccgataagaccgtgctggacatgcggagcatggacttcaagagcaactccgccgtggcctggtccaacaagtccgatttcgcctgcgccaacgccttcaacaacagcattatccccgaggacacattcttcccaagccccgagagcagctgcggtaccctcggagaaccacagctctcttacattctggatgctatcctgttcctctatgggatcgtcctgacactcctgtattgcagactcaaaattcaagttcgcaaagccgccattacctcttacgagaagagtgatggggtgtacacaggactgtctacccggaatcaagaaacctacgaaaccctcaaacatgagaagccacctcagtaa

SEQ ID NO: 2588 - DNA, 2112 bp, synthetic construct
  source 1..2112: mol_type = other DNA
atggccttaccagtgaccgccttgctcctgccgctggccttgctgctccacgccgccaggccggaattcggcgttacccagacacctaagttccgggtgctgaaaaccggccagagcatgacactgctgtgcgcccaggacatgaaccacgagtacatgtattggtacagacaggaccccggcatgggcctgagactgatccactattctgtcggcgagggcaccacagccaaaggcgaagttcctgacggctacaacgtgtcccggctgaagaagcagaacttcctgctgggcctcgaaagcgccgctccatctcagaccagcgtgtacttctgtgccagccggggctaccacagactgaacaacgagcagttcttcggccctggcaccagactgacagttctcgaggacctgaagaacgtgttcccacctgaggtggccgtgttcgagcctagcgaggccgagatcagccacacccagaaagccaccctcgtgtgcctggctaccggcttctaccccgaccatgtggaactgtcttggtgggtcaacggcaaagaggtgcacagcggcgtgtctaccgacccccagccactgaaagaacagcccgccctgaacgacagccggtactgcctgagcagcagactgagagtgtccgccaccttctggcagaacccccggaaccacttcagatgccaggtgcagttctacggcctgagcgagaacgacgagtggacccaggacagagccaagcccgtgacccagatcgtgtctgccgaagcctggggcagagccgattgcggatcccaggctcagagcgattgcagctgtagcacagtgtctccaggcgtgctggccggaattgtgatgggcgatctggtgctgacagtgctgattgccctggccgtgtacttcctgggtagactggtgcctagaggaagaggcgctgccgaagccgccacaagaaagcagagaatcaccgagacagagagcccctaccaagagctgcaaggccagagaagcgacgtgtacagcgacctgaatacccagcggccttactacaaaagggccaagcgatctggatctggagcaacaaacttctcactactcaaacaagcaggtgacgtggaggagaatcccgggcctactagtatggactggatttggcgcatccttttccttgtcggcgctgctaccggcgcgcattccttcgaacagagaaaagaggtggaacaggaccctggacctttcaacgttccagagggcgctaccgtggccttcaactgcacctacagcaatagcgccagccagagcttcttctggtatcggcaggactgccggaaagaacccaagctgctgatgagcgtgtacagcagcggcaacgaggacggcagattcacagcccagctgaacagagccagccagtacatctctctgctgatccgggacagcaagctgagcgatagcgccacctatctgtgcgtggtcaagcctgatcctggcgctggaagctaccagctgacatttggcaagggcaccaagctgtctgtgatccccaatacgcgtatccagaaccctgatcctgccgtgtaccagctgcgggatagcaagagcagcgacaagagcgtgtgtctgttcaccgacttcgacagccagaccaacgtgtcccagagcaaggactccgacgtgtacatcaccgataagaccgtgctggacatgcggagcatggacttcaagagcaactccgccgtggcctggtccaacaagtccgatttcgcctgcgccaacgccttcaacaacagcattatccccgaggacacattcttcccaagccccgagagcagctgcggtacccaggctcagagcgattgcagctctagcacagtgtctccaggcgtgctggccggaattgtgatgggcgatctggtgctgacagtgctgattgccctggccgtgtacttcctgggtagactggtgcctagaggaagaggcgctgccgaagccgccacaagaaagcagagaatcaccgagacagagagcccctaccaagagctgcaaggccagagaagcgacgtgtacagcgacctgaatacccagcggccttactacaaataa

SEQ ID NO: 2589 - DNA, 2238 bp, synthetic construct
  source 1..2238: mol_type = other DNA
atggccttaccagtgaccgccttgctcctgccgctggccttgctgctccacgccgccaggccggaattcggcgttacccagacacctaagttccgggtgctgaaaaccggccagagcatgacactgctgtgcgcccaggacatgaaccacgagtacatgtattggtacagacaggaccccggcatgggcctgagactgatccactattctgtcggcgagggcaccacagccaaaggcgaagttcctgacggctacaacgtgtcccggctgaagaagcagaacttcctgctgggcctcgaaagcgccgctccatctcagaccagcgtgtacttctgtgccagccggggctaccacagactgaacaacgagcagttcttcggccctggcaccagactgacagttctcgaggacctgaagaacgtgttcccacctgaggtggccgtgttcgagcctagcgaggccgagatcagccacacccagaaagccaccctcgtgtgcctggctaccggcttctaccccgaccatgtggaactgtcttggtgggtcaacggcaaagaggtgcacagcggcgtgtctaccgacccccagccactgaaagaacagcccgccctgaacgacagccggtactgcctgagcagcagactgagagtgtccgccaccttctggcagaacccccggaaccacttcagatgccaggtgcagttctacggcctgagcgagaacgacgagtggacccaggacagagccaagcccgtgacccagatcgtgtctgccgaagcctggggcagagccgattgcggatcccaggctcagagcgattgcagctgtagcacagtgtctccaggcgtgctggccggaattgtgatgggcgatctggtgctgacagtgctgattgccctggccgtgtacttcctgggtagactggtgcctagaggaagaggcgctgccgaagccgccacaagaaagcagagaatcaccgagacagagagcccctaccaagagctgcaaggccagagaagcgacgtgtacagcgacctgaatacccagcggccttactacaaaagggccaagcgatctggatctggagcaacaaacttctcactactcaaacaagcaggtgacgtggaggagaatcccgggcctactagtatggactggatttggcgcatccttttccttgtcggcgctgctaccggcgcgcattccttcgaacagagaaaagaggtggaacaggaccctggacctttcaacgttccagagggcgctaccgtggccttcaactgcacctacagcaatagcgccagccagagcttcttctggtatcggcaggactgccggaaagaacccaagctgctgatgagcgtgtacagcagcggcaacgaggacggcagattcacagcccagctgaacagagccagccagtacatctctctgctgatccgggacagcaagctgagcgatagcgccacctatctgtgcgtggtcaagcctgatcctggcgctggaagctaccagctgacatttggcaagggcaccaagctgtctgtgatccccaatacgcgtatccagaaccctgatcctgccgtgtaccagctgcgggatagcaagagcagcgacaagagcgtgtgtctgttcaccgacttcgacagccagaccaacgtgtcccagagcaaggactccgacgtgtacatcaccgataagaccgtgctggacatgcggagcatggacttcaagagcaactccgccgtggcctggtccaacaagtccgatttcgcctgcgccaacgccttcaacaacagcattatccccgaggacacattcttcccaagccccgagagcagctgcggtacccaggctcagagcgattgcagctgtagcacagtgtctccaggcgtgctggccggaattgtgatgggcgatctggtgctgacagtgctgattgccctggccgtgtacttcctgggtagactggtgcctagaggaagaggcgctgccgaagccgccacaagaaagcagagaatcaccgagacagagagcccctaccaagagctgcaaggccagagaagcgacgtgtacagcgacctgaatacccagaaacggggcagaaagaaactcctgtatatattcaaacaaccatttatgagaccagtacaaactactcaagaggaagatggctgtagctgccgatttccagaagaagaagaaggaggatgtgaactgcggccttactacaaataa

SEQ ID NO: 2590 - DNA, 2235 bp, synthetic construct
  source 1..2235: mol_type = other DNA
atggccttaccagtgaccgccttgctcctgccgctggccttgctgctccacgccgccaggccggaattcggcgttacccagacacctaagttccgggtgctgaaaaccggccagagcatgacactgctgtgcgcccaggacatgaaccacgagtacatgtattggtacagacaggaccccggcatgggcctgagactgatccactattctgtcggcgagggcaccacagccaaaggcgaagttcctgacggctacaacgtgtcccggctgaagaagcagaacttcctgctgggcctcgaaagcgccgctccatctcagaccagcgtgtacttctgtgccagccggggctaccacagactgaacaacgagcagttcttcggccctggcaccagactgacagttctcgaggacctgaagaacgtgttcccacctgaggtggccgtgttcgagcctagcgaggccgagatcagccacacccagaaagccaccctcgtgtgcctggctaccggcttctaccccgaccatgtggaactgtcttggtgggtcaacggcaaagaggtgcacagcggcgtgtctaccgacccccagccactgaaagaacagcccgccctgaacgacagccggtactgcctgagcagcagactgagagtgtccgccaccttctggcagaacccccggaaccacttcagatgccaggtgcagttctacggcctgagcgagaacgacgagtggacccaggacagagccaagcccgtgacccagatcgtgtctgccgaagcctggggcagagccgattgcggatcccaggctcagagcgattgcagctgtagcacagtgtctccaggcgtgctggccggaattgtgatgggcgatctggtgctgacagtgctgattgccctggccgtgtacttcctgggtagactggtgcctagaggaagaggcgctgccgaagccgccacaagaaagcagagaatcaccgagacagagagcccctaccaagagctgcaaggccagagaagcgacgtgtacagcgacctgaatacccagcggccttactacaaaagggccaagcgatctggatctggagcaacaaacttctcactactcaaacaagcaggtgacgtggaggagaatcccgggcctactagtatggactggatttggcgcatccttttccttgtcggcgctgctaccggcgcgcattccttcgaacagagaaaagaggtggaacaggaccctggacctttcaacgttccagagggcgctaccgtggccttcaactgcacctacagcaatagcgccagccagagcttcttctggtatcggcaggactgccggaaagaacccaagctgctgatgagcgtgtacagcagcggcaacgaggacggcagattcacagcccagctgaacagagccagccagtacatctctctgctgatccgggacagcaagctgagcgatagcgccacctatctgtgcgtggtcaagcctgatcctggcgctggaagctaccagctgacatttggcaagggcaccaagctgtctgtgatccccaatacgcgtatccagaaccctgatcctgccgtgtaccagctgcgggatagcaagagcagcgacaagagcgtgtgtctgttcaccgacttcgacagccagaccaacgtgtcccagagcaaggactccgacgtgtacatcaccgataagaccgtgctggacatgcggagcatggacttcaagagcaactccgccgtggcctggtccaacaagtccgatttcgcctgcgccaacgccttcaacaacagcattatccccgaggacacattcttcccaagccccgagagcagctgcggtacccaggctcagagcgattgcagctgtagcacagtgtctccaggcgtgctggccggaattgtgatgggcgatctggtgctgacagtgctgattgccctggccgtgtacttcctgggtagactggtgcctagaggaagaggcgctgccgaagccgccacaagaaagcagagaatcaccgagacagagagcccctaccaagagctgcaaggccagagaagcgacgtgtacagcgacctgaatacccagaggagcaagcggtcacggctgctccacagcgattacatgaatatgacaccacgaagaccgggtcctactcgcaaacactaccaaccctacgcacctccccgcgactttgcagcgtaccgatctcggccttactacaaataa

SEQ ID NO: 2591 - DNA, 2220 bp, synthetic construct
  source 1..2220: mol_type = other DNA
atggccttaccagtgaccgccttgctcctgccgctggccttgctgctccacgccgccaggccggaattcggcgttacccagacacctaagttccgggtgctgaaaaccggccagagcatgacactgctgtgcgcccaggacatgaaccacgagtacatgtattggtacagacaggaccccggcatgggcctgagactgatccactattctgtcggcgagggcaccacagccaaaggcgaagttcctgacggctacaacgtgtcccggctgaagaagcagaacttcctgctgggcctcgaaagcgccgctccatctcagaccagcgtgtacttctgtgccagccggggctaccacagactgaacaacgagcagttcttcggccctggcaccagactgacagttctcgaggacctgaagaacgtgttcccacctgaggtggccgtgttcgagcctagcgaggccgagatcagccacacccagaaagccaccctcgtgtgcctggctaccggcttctaccccgaccatgtggaactgtcttggtgggtcaacggcaaagaggtgcacagcggcgtgtctaccgacccccagccactgaaagaacagcccgccctgaacgacagccggtactgcctgagcagcagactgagagtgtccgccaccttctggcagaacccccggaaccacttcagatgccaggtgcagttctacggcctgagcgagaacgacgagtggacccaggacagagccaagcccgtgacccagatcgtgtctgccgaagcctggggcagagccgattgcggatcccaggctcagagcgattgcagctgtagcacagtgtctccaggcgtgctggccggaattgtgatgggcgatctggtgctgacagtgctgattgccctggccgtgtacttcctgggtagactggtgcctagaggaagaggcgctgccgaagccgccacaagaaagcagagaatcaccgagacagagagcccctaccaagagctgcaaggccagagaagcgacgtgtacagcgacctgaatacccagcggccttactacaaaagggccaagcgatctggatctggagcaacaaacttctcactactcaaacaagcaggtgacgtggaggagaatcccgggcctactagtatggactggatttggcgcatccttttccttgtcggcgctgctaccggcgcgcattccttcgaacagagaaaagaggtggaacaggaccctggacctttcaacgttccagagggcgctaccgtggccttcaactgcacctacagcaatagcgccagccagagcttcttctggtatcggcaggactgccggaaagaacccaagctgctgatgagcgtgtacagcagcggcaacgaggacggcagattcacagcccagctgaacagagccagccagtacatctctctgctgatccgggacagcaagctgagcgatagcgccacctatctgtgcgtggtcaagcctgatcctggcgctggaagctaccagctgacatttggcaagggcaccaagctgtctgtgatccccaatacgcgtatccagaaccctgatcctgccgtgtaccagctgcgggatagcaagagcagcgacaagagcgtgtgtctgttcaccgacttcgacagccagaccaacgtgtcccagagcaaggactccgacgtgtacatcaccgataagaccgtgctggacatgcggagcatggacttcaagagcaactccgccgtggcctggtccaacaagtccgatttcgcctgcgccaacgccttcaacaacagcattatccccgaggacacattcttcccaagccccgagagcagctgcggtacccaggctcagagcgattgcagctgtagcacagtgtctccaggcgtgctggccggaattgtgatgggcgatctggtgctgacagtgctgattgccctggccgtgtacttcctgggtagactggtgcctagaggaagaggcgctgccgaagccgccacaagaaagcagagaatcaccgagacagagagcccctaccaagagctgcaaggccagagaagcgacgtgtacagcgacctgaatacccagagggaccaaagactgcctcctgacgctcacaaacctccaggcggaggcagcttcagaacccctatccaagaggaacaggctgacgcccacagcaccctggcaaaaattcggccttactacaaataa

SEQ ID NO: 2592 - DNA, 2472 bp, synthetic construct
  source 1..2472: mol_type = other DNA
atggccttaccagtgaccgccttgctcctgccgctggccttgctgctccacgccgccaggccggaattcggcgttacccagacacctaagttccgggtgctgaaaaccggccagagcatgacactgctgtgcgcccaggacatgaaccacgagtacatgtattggtacagacaggaccccggcatgggcctgagactgatccactattctgtcggcgagggcaccacagccaaaggcgaagttcctgacggctacaacgtgtcccggctgaagaagcagaacttcctgctgggcctcgaaagcgccgctccatctcagaccagcgtgtacttctgtgccagccggggctaccacagactgaacaacgagcagttcttcggccctggcaccagactgacagttctcgaggacctgaagaacgtgttcccacctgaggtggccgtgttcgagcctagcgaggccgagatcagccacacccagaaagccaccctcgtgtgcctggctaccggcttctaccccgaccatgtggaactgtcttggtgggtcaacggcaaagaggtgcacagcggcgtgtctaccgacccccagccactgaaagaacagcccgccctgaacgacagccggtactgcctgagcagcagactgagagtgtccgccaccttctggcagaacccccggaaccacttcagatgccaggtgcagttctacggcctgagcgagaacgacgagtggacccaggacagagccaagcccgtgacccagatcgtgtctgccgaagcctggggcagagccgattgcggatcccaggctcagagcgattgcagctgtagcacagtgtctccaggcgtgctggccggaattgtgatgggcgatctggtgctgacagtgctgattgccctggccgtgtacttcctgggtagactggtgcctagaggaagaggcgctgccgaagccgccacaagaaagcagagaatcaccgagacagagagcccctaccaagagctgcaaggccagagaagcgacgtgtacagcgacctgaatacccagcggccttactacaaaagggccaagcgatctggatctggagcaacaaacttctcactactcaaacaagcaggtgacgtggaggagaatcccgggcctactagtatggactggatttggcgcatccttttccttgtcggcgctgctaccggcgcgcattccttcgaacagagaaaagaggtggaacaggaccctggacctttcaacgttccagagggcgctaccgtggccttcaactgcacctacagcaatagcgccagccagagcttcttctggtatcggcaggactgccggaaagaacccaagctgctgatgagcgtgtacagcagcggcaacgaggacggcagattcacagcccagctgaacagagccagccagtacatctctctgctgatccgggacagcaagctgagcgatagcgccacctatctgtgcgtggtcaagcctgatcctggcgctggaagctaccagctgacatttggcaagggcaccaagctgtctgtgatccccaatacgcgtatccagaaccctgatcctgccgtgtaccagctgcgggatagcaagagcagcgacaagagcgtgtgtctgttcaccgacttcgacagccagaccaacgtgtcccagagcaaggactccgacgtgtacatcaccgataagaccgtgctggacatgcggagcatggacttcaagagcaactccgccgtggcctggtccaacaagtccgatttcgcctgcgccaacgccttcaacaacagcattatccccgaggacacattcttcccaagccccgagagcagctgcggtacccaggctcagagcgattgcagctgtagcacagtgtctccaggcgtgctggccggaattgtgatgggcgatctggtgctgacagtgctgattgccctggccgtgtacttcctgggtagactggtgcctagaggaagaggcgctgccgaagccgccacaagaaagcagagaatcaccgagacagagagcccctaccaagagctgcaaggccagagaagcgacgtgtacagcgacctgaatacccagtggcggcggaagcggaaagagaagcagtctgagacaagccccaaagagttcctgaccatctacgaggacgtgaaggacctgaaaacccggcggaaccacgaacaagagcagacctttcctggcggaggcagcaccatctacagcatgatccagagccagagcagcgcccctacaagccaagagcctgcctacacactgtactccctgatccagcctagcagaaagagcggcagccggaagagaaatcacagccccagcttcaacagcacgatctacgaagtgatcggcaagagccagccaaaggctcagaaccctgccagactgagccggaaagagctggaaaacttcgacgtgtacagccggccttactacaaataa

SEQ ID NO: 2593 - DNA, 2748 bp, synthetic construct
  source 1..2748: mol_type = other DNA
atggccttaccagtgaccgccttgctcctgccgctggccttgctgctccacgccgccaggccggaattcggcgttacccagacacctaagttccgggtgctgaaaaccggccagagcatgacactgctgtgcgcccaggacatgaaccacgagtacatgtattggtacagacaggaccccggcatgggcctgagactgatccactattctgtcggcgagggcaccacagccaaaggcgaagttcctgacggctacaacgtgtcccggctgaagaagcagaacttcctgctgggcctcgaaagcgccgctccatctcagaccagcgtgtacttctgtgccagccggggctaccacagactgaacaacgagcagttcttcggccctggcaccagactgacagttctcgaggacctgaagaacgtgttcccacctgaggtggccgtgttcgagcctagcgaggccgagatcagccacacccagaaagccaccctcgtgtgcctggctaccggcttctaccccgaccatgtggaactgtcttggtgggtcaacggcaaagaggtgcacagcggcgtgtctaccgacccccagccactgaaagaacagcccgccctgaacgacagccggtactgcctgagcagcagactgagagtgtccgccaccttctggcagaacccccggaaccacttcagatgccaggtgcagttctacggcctgagcgagaacgacgagtggacccaggacagagccaagcccgtgacccagatcgtgtctgccgaagcctggggcagagccgattgcggatcccaggctcagagcgattgcagctgtagcacagtgtctccaggcgtgctggccggaattgtgatgggcgatctggtgctgacagtgctgattgccctggccgtgtacttcctgggtagactggtgcctagaggaagaggcgctgccgaagccgccacaagaaagcagagaatcaccgagacagagagcccctaccaagagctgcaaggccagagaagcgacgtgtacagcgacctgaatacccagagagtgaagttcagcagaagcgccgacgcccctgcctaccagcagggacagaaccaactgtacaacgagctgaacctgggcagacgggaagagtacgacgtgctggacaagcggagaggcagggaccctgagatgggcggaaagccccagcggagaaagaacccccaggaaggactgtataacgaactccagaaagacaagatggccgaagcctacagcgagatcggcatgaagggcgagcggagaagaggcaagggccacgatggcctgtaccagggcctgagcaccgccaccaaggacacctatgacgccctgcacatgcaggccctgcctccaagaagggccaagcgatctggatctggagcaacaaacttctcactactcaaacaagcaggtgacgtggaggagaatcccgggcctactagtatggactggatttggcgcatccttttccttgtcggcgctgctaccggcgcgcattccttcgaacagagaaaagaggtggaacaggaccctggacctttcaacgttccagagggcgctaccgtggccttcaactgcacctacagcaatagcgccagccagagcttcttctggtatcggcaggactgccggaaagaacccaagctgctgatgagcgtgtacagcagcggcaacgaggacggcagattcacagcccagctgaacagagccagccagtacatctctctgctgatccgggacagcaagctgagcgatagcgccacctatctgtgcgtggtcaagcctgatcctggcgctggaagctaccagctgacatttggcaagggcaccaagctgtctgtgatccccaatacgcgtatccagaaccctgatcctgccgtgtaccagctgcgggatagcaagagcagcgacaagagcgtgtgtctgttcaccgacttcgacagccagaccaacgtgtcccagagcaaggactccgacgtgtacatcaccgataagaccgtgctggacatgcggagcatggacttcaagagcaactccgccgtggcctggtccaacaagtccgatttcgcctgcgccaacgccttcaacaacagcattatccccgaggacacattcttcccaagccccgagagcagctgcggtaccacaacgccgggcgaaaggagttccttgccggccttttaccccggcacaagcggaagctgtagtgggtgtggaagcctcagcctcccacttcttgcgggcctcgtcgcggcagatgcagtagcttcacttcttattgtaggcgcggtatttctctgtgctcgaccaaggaggtcacccgctcaggaggatggtaaggtgtatataaatatgccaggacgcggaagctctagacgggttaagttttccagatccgcagacgcacccgcttaccaacaagggcagaaccaactctacaatgaacttaatttggggcggagggaagagtacgacgttctggacaaaaggaggggacgagatcccgagatgggcggaaagcctcagcgaaggaagaatccgcaagaggggctttataacgaactccagaaagataaaatggcagaagcctatagtgagattgggatgaagggagaaaggaggaggggtaaaggtcacgatgggttgtaccaaggattgagcacagccactaaagatacctatgatgcgctccacatgcaggccctgccgccaagataa

SEQ ID NO: 2594 - DNA, 2526 bp, synthetic construct
  source 1..2526: mol_type = other DNA
atggccttaccagtgaccgccttgctcctgccgctggccttgctgctccacgccgccaggccggaattcggcgttacccagacacctaagttccgggtgctgaaaaccggccagagcatgacactgctgtgcgcccaggacatgaaccacgagtacatgtattggtacagacaggaccccggcatgggcctgagactgatccactattctgtcggcgagggcaccacagccaaaggcgaagttcctgacggctacaacgtgtcccggctgaagaagcagaacttcctgctgggcctcgaaagcgccgctccatctcagaccagcgtgtacttctgtgccagccggggctaccacagactgaacaacgagcagttcttcggccctggcaccagactgacagttctcgaggacctgaagaacgtgttcccacctgaggtggccgtgttcgagcctagcgaggccgagatcagccacacccagaaagccaccctcgtgtgcctggctaccggcttctaccccgaccatgtggaactgtcttggtgggtcaacggcaaagaggtgcacagcggcgtgtctaccgacccccagccactgaaagaacagcccgccctgaacgacagccggtactgcctgagcagcagactgagagtgtccgccaccttctggcagaacccccggaaccacttcagatgccaggtgcagttctacggcctgagcgagaacgacgagtggacccaggacagagccaagcccgtgacccagatcgtgtctgccgaagcctggggcagagccgattgcggatcccaggctcagagcgattgcagctgtagcacagtgtctccaggcgtgctggccggaattgtgatgggcgatctggtgctgacagtgctgattgccctggccgtgtacttcctgggtagactggtgcctagaggaagaggcgctgccgaagccgccacaagaaagcagagaatcaccgagacagagagcccctaccaagagctgcaaggccagagaagcgacgtgtacagcgacctgaatacccagagagtgaagttcagcagaagcgccgacgcccctgcctaccagcagggacagaaccaactgtacaacgagctgaacctgggcagacgggaagagtacgacgtgctggacaagcggagaggcagggaccctgagatgggcggaaagccccagcggagaaagaacccccaggaaggactgtataacgaactccagaaagacaagatggccgaagcctacagcgagatcggcatgaagggcgagcggagaagaggcaagggccacgatggcctgtaccagggcctgagcaccgccaccaaggacacctatgacgccctgcacatgcaggccctgcctccaagaagggccaagcgatctggatctggagcaacaaacttctcactactcaaacaagcaggtgacgtggaggagaatcccgggcctactagtatggactggatttggcgcatccttttccttgtcggcgctgctaccggcgcgcattccttcgaacagagaaaagaggtggaacaggaccctggacctttcaacgttccagagggcgctaccgtggccttcaactgcacctacagcaatagcgccagccagagcttcttctggtatcggcaggactgccggaaagaacccaagctgctgatgagcgtgtacagcagcggcaacgaggacggcagattcacagcccagctgaacagagccagccagtacatctctctgctgatccgggacagcaagctgagcgatagcgccacctatctgtgcgtggtcaagcctgatcctggcgctggaagctaccagctgacatttggcaagggcaccaagctgtctgtgatccccaatacgcgtatccagaaccctgatcctgccgtgtaccagctgcgggatagcaagagcagcgacaagagcgtgtgtctgttcaccgacttcgacagccagaccaacgtgtcccagagcaaggactccgacgtgtacatcaccgataagaccgtgctggacatgcggagcatggacttcaagagcaactccgccgtggcctggtccaacaagtccgatttcgcctgcgccaacgccttcaacaacagcattatccccgaggacacattcttcccaagccccgagagcagctgcggtaccacaacgccgggcgaaaggagttccttgccggccttttaccccggcacaagcggaagctgtagtgggtgtggaagcctcagcctcccacttcttgcgggcctcgtcgcggcagatgcagtagcttcacttcttattgtaggcgcggtatttaagagaggccggaagaagctgctgtacatcttcaagcagcctttcatgcggcccgtgcagaccacccaggaagaggacggctgctcctgccggttccccgaggaagaagaaggcggctgcgagctgctctgtgctcgaccaaggaggtcacccgctcaggaggatggtaaggtgtatataaatatgccaggacgcggataa

SEQ ID NO: 2595 - DNA, 2523 bp, synthetic construct
  source 1..2523: mol_type = other DNA
atggccttaccagtgaccgccttgctcctgccgctggccttgctgctccacgccgccaggccggaattcggcgttacccagacacctaagttccgggtgctgaaaaccggccagagcatgacactgctgtgcgcccaggacatgaaccacgagtacatgtattggtacagacaggaccccggcatgggcctgagactgatccactattctgtcggcgagggcaccacagccaaaggcgaagttcctgacggctacaacgtgtcccggctgaagaagcagaacttcctgctgggcctcgaaagcgccgctccatctcagaccagcgtgtacttctgtgccagccggggctaccacagactgaacaacgagcagttcttcggccctggcaccagactgacagttctcgaggacctgaagaacgtgttcccacctgaggtggccgtgttcgagcctagcgaggccgagatcagccacacccagaaagccaccctcgtgtgcctggctaccggcttctaccccgaccatgtggaactgtcttggtgggtcaacggcaaagaggtgcacagcggcgtgtctaccgacccccagccactgaaagaacagcccgccctgaacgacagccggtactgcctgagcagcagactgagagtgtccgccaccttctggcagaacccccggaaccacttcagatgccaggtgcagttctacggcctgagcgagaacgacgagtggacccaggacagagccaagcccgtgacccagatcgtgtctgccgaagcctggggcagagccgattgcggatcccaggctcagagcgattgcagctgtagcacagtgtctccaggcgtgctggccggaattgtgatgggcgatctggtgctgacagtgctgattgccctggccgtgtacttcctgggtagactggtgcctagaggaagaggcgctgccgaagccgccacaagaaagcagagaatcaccgagacagagagcccctaccaagagctgcaaggccagagaagcgacgtgtacagcgacctgaatacccagagagtgaagttcagcagaagcgccgacgcccctgcctaccagcagggacagaaccaactgtacaacgagctgaacctgggcagacgggaagagtacgacgtgctggacaagcggagaggcagggaccctgagatgggcggaaagccccagcggagaaagaacccccaggaaggactgtataacgaactccagaaagacaagatggccgaagcctacagcgagatcggcatgaagggcgagcggagaagaggcaagggccacgatggcctgtaccagggcctgagcaccgccaccaaggacacctatgacgccctgcacatgcaggccctgcctccaagaagggccaagcgatctggatctggagcaacaaacttctcactactcaaacaagcaggtgacgtggaggagaatcccgggcctactagtatggactggatttggcgcatccttttccttgtcggcgctgctaccggcgcgcattccttcgaacagagaaaagaggtggaacaggaccctggacctttcaacgttccagagggcgctaccgtggccttcaactgcacctacagcaatagcgccagccagagcttcttctggtatcggcaggactgccggaaagaacccaagctgctgatgagcgtgtacagcagcggcaacgaggacggcagattcacagcccagctgaacagagccagccagtacatctctctgctgatccgggacagcaagctgagcgatagcgccacctatctgtgcgtggtcaagcctgatcctggcgctggaagctaccagctgacatttggcaagggcaccaagctgtctgtgatccccaatacgcgtatccagaaccctgatcctgccgtgtaccagctgcgggatagcaagagcagcgacaagagcgtgtgtctgttcaccgacttcgacagccagaccaacgtgtcccagagcaaggactccgacgtgtacatcaccgataagaccgtgctggacatgcggagcatggacttcaagagcaactccgccgtggcctggtccaacaagtccgatttcgcctgcgccaacgccttcaacaacagcattatccccgaggacacattcttcccaagccccgagagcagctgcggtaccacaacgccgggcgaaaggagttccttgccggccttttaccccggcacaagcggaagctgtagtgggtgtggaagcctcagcctcccacttcttgcgggcctcgtcgcggcagatgcagtagcttcacttcttattgtaggcgcggtatttaggagcaagcggtcacggctgctccacagcgattacatgaatatgacaccacgaagaccgggtcctactcgcaaacactaccaaccctacgcacctccccgcgactttgcagcgtaccgatctctctgtgctcgaccaaggaggtcacccgctcaggaggatggtaaggtgtatataaatatgccaggacgcggataa

SEQ ID NO: 2596 - DNA, 3258 bp, synthetic construct
  source 1..3258: mol_type = other DNA
atggccttaccagtgaccgccttgctcctgccgctggccttgctgctccacgccgccaggccggaattcggcgttacccagacacctaagttccgggtgctgaaaaccggccagagcatgacactgctgtgcgcccaggacatgaaccacgagtacatgtattggtacagacaggaccccggcatgggcctgagactgatccactattctgtcggcgagggcaccacagccaaaggcgaagttcctgacggctacaacgtgtcccggctgaagaagcagaacttcctgctgggcctcgaaagcgccgctccatctcagaccagcgtgtacttctgtgccagccggggctaccacagactgaacaacgagcagttcttcggccctggcaccagactgacagttctcgaggacctgaagaacgtgttcccacctgaggtggccgtgttcgagcctagcgaggccgagatcagccacacccagaaagccaccctcgtgtgcctggctaccggcttctaccccgaccatgtggaactgtcttggtgggtcaacggcaaagaggtgcacagcggcgtgtctaccgacccccagccactgaaagaacagcccgccctgaacgacagccggtactgcctgagcagcagactgagagtgtccgccaccttctggcagaacccccggaaccacttcagatgccaggtgcagttctacggcctgagcgagaacgacgagtggacccaggacagagccaagcccgtgacccagatcgtgtctgccgaagcctggggcagagccgattgcggatcccagagcttcggcctgctggaccccaagctgtgctacctgctggatggcatcctgttcatctacggcgtgatcctgaccgccctgttcctgagagtgaagttcagcagaagcgccgacgcccctgcctaccagcagggacagaaccaactgtacaacgagctgaacctgggcagacgggaagagtacgacgtgctggacaagcggagaggcagggaccctgagatgggcggaaagccccagcggagaaagaacccccaggaaggactgtataacgaactccagaaagacaagatggccgaagcctacagcgagatcggcatgaagggcgagcggagaagaggcaagggccacgatggcctgtaccagggcctgagcaccgccaccaaggacacctatgacgccctgcacatgcaggccctgcctccaagaagggccaagcgatctggatctggagcaacaaacttctcactactcaaacaagcaggtgacgtggaggagaatcccgggcctactagtatggactggatttggcgcatccttttccttgtcggcgctgctaccggcgcgcattccttcgaacagagaaaagaggtggaacaggaccctggacctttcaacgttccagagggcgctaccgtggccttcaactgcacctacagcaatagcgccagccagagcttcttctggtatcggcaggactgccggaaagaacccaagctgctgatgagcgtgtacagcagcggcaacgaggacggcagattcacagcccagctgaacagagccagccagtacatctctctgctgatccgggacagcaagctgagcgatagcgccacctatctgtgcgtggtcaagcctgatcctggcgctggaagctaccagctgacatttggcaagggcaccaagctgtctgtgatccccaatacgcgtatccagaaccctgatcctgccgtgtaccagctgcgggatagcaagagcagcgacaagagcgtgtgtctgttcaccgacttcgacagccagaccaacgtgtcccagagcaaggactccgacgtgtacatcaccgataagaccgtgctggacatgcggagcatggacttcaagagcaactccgccgtggcctggtccaacaagtccgatttcgcctgcgccaacgccttcaacaacagcattatccccgaggacacattcttcccaagccccgagagcagctgcggtacccagagttttgggttgttggaccctaaattgtgctatctgttggacggaatcctgttcatttacggagtgatcctgaccgcattgttcctgcgggttaagttttccagatccgcagacgcacccgcttaccaacaagggcagaaccaactctacaatgaacttaatttggggcggagggaagagtacgacgttctggacaaaaggaggggacgagatcccgagatgggcggaaagcctcagcgaaggaagaatccgcaagaggggctttataacgaactccagaaagataaaatggcagaagcctatagtgagattgggatgaagggagaaaggaggaggggtaaaggtcacgatgggttgtaccaaggattgagcacagccactaaagatacctatgatgcgctccacatgcaggccctgccgccaagacgcgccaagagaagcggatctggcgtgaagcagaccctgaatttcgacctgctgaagctggctggcgacgtggaatccaacccaggcccttctagaggccatatggctctgcctgtgacagctctgctgctgcctctggcactgctgcttcatgctgctagacctagccagtttagagtgtcccctctggacagaacctggaacctgggcgagacagtggaactgaagtgccaggtgctgctgagcaaccctacaagcggctgctcctggctgtttcagcctagaggtgcagccgcctctcctacctttctgctgtacctgagccagaacaagcccaaggccgccgaaggactggacacccagagattcagcggcaagagactgggcgacaccttcgtgctgaccctgagcgacttcagaagagagaacgagggctactacttctgtagcgccctgagcaacagcatcatgtacttcagccacttcgtgcccgtgtttctgcccgccaagcctacaacaacccctgctcctagacctcctacaccagctcctacaatcgccagccagcctctgtctctcagacccgaagcctgtagacctgctgctggcggagctgtgcataccagaggactggatttcgcctgcgacatctacatctgggctcctctggctggcacatgtggcgtgctgctgctgtccctggtcatcaccctgtactgcaaccaccggaacaggcggagagtgtgcaagtgccctagacctgtggtcaagagcggcgacaagcctagcctgagcgccagatatgtt

SEQ ID NO: 2597 - DNA, 2481 bp, synthetic construct
  source 1..2481: mol_type = other DNA
atggccttaccagtgaccgccttgctcctgccgctggccttgctgctccacgccgccaggccggaattcggcgttacccagacacctaagttccgggtgctgaaaaccggccagagcatgacactgctgtgcgcccaggacatgaaccacgagtacatgtattggtacagacaggaccccggcatgggcctgagactgatccactattctgtcggcgagggcaccacagccaaaggcgaagttcctgacggctacaacgtgtcccggctgaagaagcagaacttcctgctgggcctcgaaagcgccgctccatctcagaccagcgtgtacttctgtgccagccggggctaccacagactgaacaacgagcagttcttcggccctggcaccagactgacagttctcgaggacctgaagaacgtgttcccacctgaggtggccgtgttcgagcctagcgaggccgagatcagccacacccagaaagccaccctcgtgtgcctggctaccggcttctaccccgaccatgtggaactgtcttggtgggtcaacggcaaagaggtgcacagcggcgtgtctaccgacccccagccactgaaagaacagcccgccctgaacgacagccggtactgcctgagcagcagactgagagtgtccgccaccttctggcagaacccccggaaccacttcagatgccaggtgcagttctacggcctgagcgagaacgacgagtggacccaggacagagccaagcccgtgacccagatcgtgtctgccgaagcctggggcagagccgattgcggatcccagagcttcggcctgctggaccccaagctgtgctacctgctggatggcatcctgttcatctacggcgtgatcctgaccgccctgttcctgagagtgaagttcagcagaagcgccgacgcccctgcctaccagcagggacagaaccaactgtacaacgagctgaacctgggcagacgggaagagtacgacgtgctggacaagcggagaggcagggaccctgagatgggcggaaagccccagcggagaaagaacccccaggaaggactgtataacgaactccagaaagacaagatggccgaagcctacagcgagatcggcatgaagggcgagcggagaagaggcaagggccacgatggcctgtaccagggcctgagcaccgccaccaaggacacctatgacgccctgcacatgcaggccctgcctccaagaagggccaagcgatctggatctggagcaacaaacttctcactactcaaacaagcaggtgacgtggaggagaatcccgggcctactagtatggactggatttggcgcatccttttccttgtcggcgctgctaccggcgcgcattccttcgaacagagaaaagaggtggaacaggaccctggacctttcaacgttccagagggcgctaccgtggccttcaactgcacctacagcaatagcgccagccagagcttcttctggtatcggcaggactgccggaaagaacccaagctgctgatgagcgtgtacagcagcggcaacgaggacggcagattcacagcccagctgaacagagccagccagtacatctctctgctgatccgggacagcaagctgagcgatagcgccacctatctgtgcgtggtcaagcctgatcctggcgctggaagctaccagctgacatttggcaagggcaccaagctgtctgtgatccccaatacgcgtgcctctacaaagggaccctccgtgtttcctctggctcccagcagcaagtctacaagcggaggaacagccgctctgggctgcctggtcaaggattactttcccgagcctgtgaccgtgtcctggaatagcggagcactgacaagcggcgtgcacacctttccagccgtgctgcaaagcagcggcctgtactctctgagcagcgtggtcacagtgcctagctctagcctgggcacccagacctacatctgcaatgtgaaccacaagcctagcaacaccaaggtggacaagagagtggaacccaagagctgtggtacccagagttttgggttgttggaccctaaattgagctatctgttggacggaatcctgttcatttacggagtgatcctgaccgcattgttcctgcgggttaagttttccagatccgcagacgcacccgcttaccaacaagggcagaaccaactctacaatgaacttaatttggggcggagggaagagtacgacgttctggacaaaaggaggggacgagatcccgagatgggcggaaagcctcagcgaaggaagaatccgcaagaggggctttataacgaactccagaaagataaaatggcagaagcctatagtgagattgggatgaagggagaaaggaggaggggtaaaggtcacgatgggttgtaccaaggattgagcacagccactaaagatacctatgatgcgctccacatgcaggccctgccgccaagataa

SEQ ID NO: 2598 - DNA, 2454 bp, synthetic construct
  source 1..2454: mol_type = other DNA
atggccttaccagtgaccgccttgctcctgccgctggccttgctgctccacgccgccaggccggaattcggcgttacccagacacctaagttccgggtgctgaaaaccggccagagcatgacactgctgtgcgcccaggacatgaaccacgagtacatgtattggtacagacaggaccccggcatgggcctgagactgatccactattctgtcggcgagggcaccacagccaaaggcgaagttcctgacggctacaacgtgtcccggctgaagaagcagaacttcctgctgggcctcgaaagcgccgctccatctcagaccagcgtgtacttctgtgccagccggggctaccacagactgaacaacgagcagttcttcggccctggcaccagactgacagttctcgaggacctgaagaacgtgttcccacctgaggtggccgtgttcgagcctagcgaggccgagatcagccacacccagaaagccaccctcgtgtgcctggctaccggcttctaccccgaccatgtggaactgtcttggtgggtcaacggcaaagaggtgcacagcggcgtgtctaccgacccccagccactgaaagaacagcccgccctgaacgacagccggtactgcctgagcagcagactgagagtgtccgccaccttctggcagaacccccggaaccacttcagatgccaggtgcagttctacggcctgagcgagaacgacgagtggacccaggacagagccaagcccgtgacccagatcgtgtctgccgaagcctggggcagagccgattgcggatcccagagcttcggcctgctggaccccaagctgtgctacctgctggatggcatcctgttcatctacggcgtgatcctgaccgccctgttcctgagagtgaagttcagcagaagcgccgacgcccctgcctaccagcagggacagaaccaactgtacaacgagctgaacctgggcagacgggaagagtacgacgtgctggacaagcggagaggcagggaccctgagatgggcggaaagccccagcggagaaagaacccccaggaaggactgtataacgaactccagaaagacaagatggccgaagcctacagcgagatcggcatgaagggcgagcggagaagaggcaagggccacgatggcctgtaccagggcctgagcaccgccaccaaggacacctatgacgccctgcacatgcaggccctgcctccaagaagggccaagcgatctggatctggagcaacaaacttctcactactcaaacaagcaggtgacgtggaggagaatcccgggcctactagtatggactggatttggcgcatccttttccttgtcggcgctgctaccggcgcgcattccttcgaacagagaaaagaggtggaacaggaccctggacctttcaacgttccagagggcgctaccgtggccttcaactgcacctacagcaatagcgccagccagagcttcttctggtatcggcaggactgccggaaagaacccaagctgctgatgagcgtgtacagcagcggcaacgaggacggcagattcacagcccagctgaacagagccagccagtacatctctctgctgatccgggacagcaagctgagcgatagcgccacctatctgtgcgtggtcaagcctgatcctggcgctggaagctaccagctgacatttggcaagggcaccaagctgtctgtgatccccaatacgcgtatccagaaccctgatcctgccgtgtaccagctgcgggatagcaagagcagcgacaagagcgtgtgtctgttcaccgacttcgacagccagaccaacgtgtcccagagcaaggactccgacgtgtacatcaccgataagaccgtgctggacatgcggagcatggacttcaagagcaactccgccgtggcctggtccaacaagtccgatttcgcctgcgccaacgccttcaacaacagcattatccccgaggacacattcttcccaagccccgagagcagctgcggtacccagagttttgggttgttggaccctaaattgagctatctgttggacggaatcctgttcatttacggagtgatcctgaccgcattgttcctgcgggttaagttttccagatccgcagacgcacccgcttaccaacaagggcagaaccaactctacaatgaacttaatttggggcggagggaagagtacgacgttctggacaaaaggaggggacgagatcccgagatgggcggaaagcctcagcgaaggaagaatccgcaagaggggctttataacgaactccagaaagataaaatggcagaagcctatagtgagattgggatgaagggagaaaggaggaggggtaaaggtcacgatgggttgtaccaaggattgagcacagccactaaagatacctatgatgcgctccacatgcaggccctgccgccaagataa

SEQ ID NO: 2599 - DNA, 2961 bp, synthetic construct
  source 1..2961: mol_type = other DNA
atggccttaccagtgaccgccttgctcctgccgctggccttgctgctccacgccgccaggccggaattcggcgttacccagacacctaagttccgggtgctgaaaaccggccagagcatgacactgctgtgcgcccaggacatgaaccacgagtacatgtattggtacagacaggaccccggcatgggcctgagactgatccactattctgtcggcgagggcaccacagccaaaggcgaagttcctgacggctacaacgtgtcccggctgaagaagcagaacttcctgctgggcctcgaaagcgccgctccatctcagaccagcgtgtacttctgtgccagccggggctaccacagactgaacaacgagcagttcttcggccctggcaccagactgacagttctcgagggacagcctaaggccaatcctaccgtgacactgttccctccaagcagcgaagaactccaggccaacaaggccacacttgtgtgcctgatctccgacttctaccctggggctgtgacagtggcttggaaggccgatggatctcctgtgaaagccggcgtggaaaccaccaagccatccaagcagagcaacaacaaatacgccgccagctcctacctgagcctgacacctgagcagtggaagtcccacagatcctacagctgccaagtgacccacgaaggcagcaccgtggaaaagacagtggcccctacagagtgcagcggatccctgggagagcctcagctgtgctatatcctggacgccatcctgtttctgtacggcatcgtgctgaccctgctgtactgccggctgaagatccaagtgcggaaggccgccatcaccagctacgagaaatccgacggcgtgtacaccggcctgagcaccagaaatcaagagacatacgagacactgaagcacgaaaagcctccacaaagggccaagcgatctggatctggagcaacaaacttctcactactcaaacaagcaggtgacgtggaggagaatcccgggcctactagtatggactggatttggcgcatccttttccttgtcggcgctgctaccggcgcgcattccttcgaacagagaaaagaggtggaacaggaccctggacctttcaacgttccagagggcgctaccgtggccttcaactgcacctacagcaatagcgccagccagagcttcttctggtatcggcaggactgccggaaagaacccaagctgctgatgagcgtgtacagcagcggcaacgaggacggcagattcacagcccagctgaacagagccagccagtacatctctctgctgatccgggacagcaagctgagcgatagcgccacctatctgtgcgtggtcaagcctgatcctggcgctggaagctaccagctgacatttggcaagggcaccaagctgtctgtgatccccaatacgcgtatccagaaccctgatcctgccgtgtaccagctgcgggatagcaagagcagcgacaagagcgtgtgtctgttcaccgacttcgacagccagaccaacgtgtcccagagcaaggactccgacgtgtacatcaccgataagaccgtgctggacatgcggagcatggacttcaagagcaactccgccgtggcctggtccaacaagtccgatttcgcctgcgccaacgccttcaacaacagcattatccccgaggacacattcttcccaagccccgagagcagctgcggtacccagagttttgggttgttggaccctaaattgtgctatctgttggacggaatcctgttcatttacggagtgatcctgaccgcattgttcctgcgggttaagttttccagatccgcagacgcacccgcttaccaacaagggcagaaccaactctacaatgaacttaatttggggcggagggaagagtacgacgttctggacaaaaggaggggacgagatcccgagatgggcggaaagcctcagcgaaggaagaatccgcaagaggggctttataacgaactccagaaagataaaatggcagaagcctatagtgagattgggatgaagggagaaaggaggaggggtaaaggtcacgatgggttgtaccaaggattgagcacagccactaaagatacctatgatgcgctccacatgcaggccctgccgccaagacgcgccaagagaagcggatctggcgtgaagcagaccctgaatttcgacctgctgaagctggctggcgacgtggaatccaacccaggcccttctagaggccatatggctctgcctgtgacagctctgctgctgcctctggcactgctgcttcatgctgctagacctagccagtttagagtgtcccctctggacagaacctggaacctgggcgagacagtggaactgaagtgccaggtgctgctgagcaaccctacaagcggctgctcctggctgtttcagcctagaggtgcagccgcctctcctacctttctgctgtacctgagccagaacaagcccaaggccgccgaaggactggacacccagagattcagcggcaagagactgggcgacaccttcgtgctgaccctgagcgacttcagaagagagaacgagggctactacttctgtagcgccctgagcaacagcatcatgtacttcagccacttcgtgcccgtgtttctgcccgccaagcctacaacaacccctgctcctagacctcctacaccagctcctacaatcgccagccagcctctgtctctcagacccgaagcctgtagacctgctgctggcggagctgtgcataccagaggactggatttcgcctgcgacatctacatctgggctcctctggctggcacatgtggcgtgctgctgctgtccctggtcatcaccctgtactgcaaccaccggaacaggcggagagtgtgcaagtgccctagacctgtggtcaagagcggcgacaagcctagcctgagcgccagatatgtt

SEQ ID NO: 2600 - DNA, 2256 bp, synthetic construct
  source 1..2256: mol_type = other DNA
atggccttaccagtgaccgccttgctcctgccgctggccttgctgctccacgccgccaggccggaattcggcgttacccagacacctaagttccgggtgctgaaaaccggccagagcatgacactgctgtgcgcccaggacatgaaccacgagtacatgtattggtacagacaggaccccggcatgggcctgagactgatccactattctgtcggcgagggcaccacagccaaaggcgaagttcctgacggctacaacgtgtcccggctgaagaagcagaacttcctgctgggcctcgaaagcgccgctccatctcagaccagcgtgtacttctgtgccagccggggctaccacagactgaacaacgagcagttcttcggccctggcaccagactgacagttctcgaggacctgaagaacgtgttcccacctgaggtggccgtgttcgagcctagcgaggccgagatcagccacacccagaaagccaccctcgtgtgcctggctaccggcttctaccccgaccatgtggaactgtcttggtgggtcaacggcaaagaggtgcacagcggcgtgtctaccgacccccagccactgaaagaacagcccgccctgaacgacagccggtactgcctgagcagcagactgagagtgtccgccaccttctggcagaacccccggaaccacttcagatgccaggtgcagttctacggcctgagcgagaacgacgagtggacccaggacagagccaagcccgtgacccagatcgtgtctgccgaagcctggggcagagccgattgcggatcccagagcttcggcctgctggaccccaagctgtgctacctgctggatggcatcctgttcatctacggcgtgatcctgaccgccctgttcctgagagtgaagttcagcagaagcgccgacgcccctgcctaccagcagggacagaaccaactgtacaacgagctgaacctgggcagacgggaagagtacgacgtgctggacaagcggagaggcagggaccctgagatgggcggaaagccccagcggagaaagaacccccaggaaggactgtataacgaactccagaaagacaagatggccgaagcctacagcgagatcggcatgaagggcgagcggagaagaggcaagggccacgatggcctgtaccagggcctgagcaccgccaccaaggacacctatgacgccctgcacatgcaggccctgcctccaagaagggccaagcgatctggatctggagcaacaaacttctcactactcaaacaagcaggtgacgtggaggagaatcccgggcctactagtatggactggatttggcgcatccttttccttgtcggcgctgctaccggcgcgcattccttcgaacagagaaaagaggtggaacaggaccctggacctttcaacgttccagagggcgctaccgtggccttcaactgcacctacagcaatagcgccagccagagcttcttctggtatcggcaggactgccggaaagaacccaagctgctgatgagcgtgtacagcagcggcaacgaggacggcagattcacagcccagctgaacagagccagccagtacatctctctgctgatccgggacagcaagctgagcgatagcgccacctatctgtgcgtggtcaagcctgatcctggcgctggaagctaccagctgacatttggcaagggcaccaagctgtctgtgatccccaatacgcgtgcctctacaaagggaccctccgtgtttcctctggctcccagcagcaagtctacaagcggaggaacagccgctctgggctgcctggtcaaggattactttcccgagcctgtgaccgtgtcctggaatagcggagcactgacaagcggcgtgcacacctttccagccgtgctgcaaagcagcggcctgtactctctgagcagcgtggtcacagtgcctagctctagcctgggcacccagacctacatctgcaatgtgaaccacaagcctagcaacaccaaggtggacaagagagtggaacccaagagctgtggtaccctcggagaaccacagctctgttacattctggatgctatcctgttcctctatgggatcgtcctgacactcctgtattgcagactcaaaattcaagttcgcaaagccgccattacctcttacgagaagagtgatggggtgtacacaggactgtctacccggaatcaagaaacctacgaaaccctcaaacatgagaagccacctcagtaa

SEQ ID NO: 2601 - DNA, 2256 bp, synthetic construct; identical to SEQ ID NO: 2600
  source 1..2256: mol_type = other DNA

SEQ ID NO: 2602 - DNA, 2229 bp, synthetic construct
  source 1..2229: mol_type = other DNA
atggccttaccagtgaccgccttgctcctgccgctggccttgctgctccacgccgccaggccggaattcggcgttacccagacacctaagttccgggtgctgaaaaccggccagagcatgacactgctgtgcgcccaggacatgaaccacgagtacatgtattggtacagacaggaccccggcatgggcctgagactgatccactattctgtcggcgagggcaccacagccaaaggcgaagttcctgacggctacaacgtgtcccggctgaagaagcagaacttcctgctgggcctcgaaagcgccgctccatctcagaccagcgtgtacttctgtgccagccggggctaccacagactgaacaacgagcagttcttcggccctggcaccagactgacagttctcgaggacctgaagaacgtgttcccacctgaggtggccgtgttcgagcctagcgaggccgagatcagccacacccagaaagccaccctcgtgtgcctggctaccggcttctaccccgaccatgtggaactgtcttggtgggtcaacggcaaagaggtgcacagcggcgtgtctaccgacccccagccactgaaagaacagcccgccctgaacgacagccggtactgcctgagcagcagactgagagtgtccgccaccttctggcagaacccccggaaccacttcagatgccaggtgcagttctacggcctgagcgagaacgacgagtggacccaggacagagccaagcccgtgacccagatcgtgtctgccgaagcctggggcagagccgattgcggatcccagagcttcggcctgctggaccccaagctgtgctacctgctggatggcatcctgttcatctacggcgtgatcctgaccgccctgttcctgagagtgaagttcagcagaagcgccgacgcccctgcctaccagcagggacagaaccaactgtacaacgagctgaacctgggcagacgggaagagtacgacgtgctggacaagcggagaggcagggaccctgagatgggcggaaagccccagcggagaaagaacccccaggaaggactgtataacgaactccagaaagacaagatggccgaagcctacagcgagatcggcatgaagggcgagcggagaagaggcaagggccacgatggcctgtaccagggcctgagcaccgccaccaaggacacctatgacgccctgcacatgcaggccctgcctccaagaagggccaagcgatctggatctggagcaacaaacttctcactactcaaacaagcaggtgacgtggaggagaatcccgggcctactagtatggactggatttggcgcatccttttccttgtcggcgctgctaccggcgcgcattccttcgaacagagaaaagaggtggaacaggaccctggacctttcaacgttccagagggcgctaccgtggccttcaactgcacctacagcaatagcgccagccagagcttcttctggtatcggcaggactgccggaaagaacccaagctgctgatgagcgtgtacagcagcggcaacgaggacggcagattcacagcccagctgaacagagccagccagtacatctctctgctgatccgggacagcaagctgagcgatagcgccacctatctgtgcgtggtcaagcctgatcctggcgctggaagctaccagctgacatttggcaagggcaccaagctgtctgtgatccccaatacgcgtatccagaaccctgatcctgccgtgtaccagctgcgggatagcaagagcagcgacaagagcgtgtgtctgttcaccgacttcgacagccagaccaacgtgtcccagagcaaggactccgacgtgtacatcaccgataagaccgtgctggacatgcggagcatggacttcaagagcaactccgccgtggcctggtccaacaagtccgatttcgcctgcgccaacgccttcaacaacagcattatccccgaggacacattcttcccaagccccgagagcagctgcggtaccctcggagaaccacagctctgttacattctggatgctatcctgttcctctatgggatcgtcctgacactcctgtattgcagactcaaaattcaagttcgcaaagccgccattacctcttacgagaagagtgatggggtgtacacaggactgtctacccggaatcaagaaacctacgaaaccctcaaacatgagaagccacctcagtaa

SEQ ID NO: 2603 - DNA, 2973 bp, synthetic construct
  source 1..2973: mol_type = other DNA
atggccttaccagtgaccgccttgctcctgccgctggccttgctgctccacgccgccaggccggaattcggcgttacccagacacctaagttccgggtgctgaaaaccggccagagcatgacactgctgtgcgcccaggacatgaaccacgagtacatgtattggtacagacaggaccccggcatgggcctgagactgatccactattctgtcggcgagggcaccacagccaaaggcgaagttcctgacggctacaacgtgtcccggctgaagaagcagaacttcctgctgggcctcgaaagcgccgctccatctcagaccagcgtgtacttctgtgccagccggggctaccacagactgaacaacgagcagttcttcggccctggcaccagactgacagttctcgagggacagcctaaggccaatcctaccgtgacactgttccctccaagcagcgaagaactccaggccaacaaggccacacttgtgtgcctgatctccgacttctaccctggggctgtgacagtggcttggaaggccgatggatctcctgtgaaagccggcgtggaaaccaccaagccatccaagcagagcaacaacaaatacgccgccagctcctacctgagcctgacacctgagcagtggaagtcccacagatcctacagctgccaagtgacccacgaaggcagcaccgtggaaaagacagtggcccctacagagtgcagcacaacacctggcgagagaagtagcctgcctgccttctatcctggcaccagcggctcttgttctggctgtggatctctgagcctgcctctgctggctggactggttgctgctgatgctgtggcctctctgctgattgtgggagccgtgttcctgtgcgccagacctagaagaagccccgctcaagaggacggcaaggtgtacatcaacatgcccggcagaggaagggccaagcgatctggatctggagcaacaaacttctcactactcaaacaagcaggtgacgtggaggagaatcccgggcctactagtatggactggatttggcgcatccttttccttgtcggcgctgctaccggcgcgcattccttcgaacagagaaaagaggtggaacaggaccctggacctttcaacgttccagagggcgctaccgtggccttcaactgcacctacagcaatagcgccagccagagcttcttctggtatcggcaggactgccggaaagaacccaagctgctgatgagcgtgtacagcagcggcaacgaggacggcagattcacagcccagctgaacagagccagccagtacatctctctgctgatccgggacagcaagctgagcgatagcgccacctatctgtgcgtggtcaagcctgatcctggcgctggaagctaccagctgacatttggcaagggcaccaagctgtctgtgatccccaatacgcgtatccagaaccctgatcctgccgtgtaccagctgcgggatagcaagagcagcgacaagagcgtgtgtctgttcaccgacttcgacagccagaccaacgtgtcccagagcaaggactccgacgtgtacatcaccgataagaccgtgctggacatgcggagcatggacttcaagagcaactccgccgtggcctggtccaacaagtccgatttcgcctgcgccaacgccttcaacaacagcattatccccgaggacacattcttcccaagccccgagagcagctgcggtacccagagttttgggttgttggaccctaaattgtgctatctgttggacggaatcctgttcatttacggagtgatcctgaccgcattgttcctgcgggttaagttttccagatccgcagacgcacccgcttaccaacaagggcagaaccaactctacaatgaacttaatttggggcggagggaagagtacgacgttctggacaaaaggaggggacgagatcccgagatgggcggaaagcctcagcgaaggaagaatccgcaagaggggctttataacgaactccagaaagataaaatggcagaagcctatagtgagattgggatgaagggagaaaggaggaggggtaaaggtcacgatgggttgtaccaaggattgagcacagccactaaagatacctatgatgcgctccacatgcaggccctgccgccaagacgcgccaagagaagcggatctggcgtgaagcagaccctgaatttcgacctgctgaagctggctggcgacgtggaatccaacccaggcccttctagaggccatatggctctgcctgtgacagctctgctgctgcctctggcactgctgcttcatgctgctagacctagccagtttagagtgtcccctctggacagaacctggaacctgggcgagacagtggaactgaagtgccaggtgctgctgagcaaccctacaagcggctgctcctggctgtttcagcctagaggtgcagccgcctctcctacctttctgctgtacctgagccagaacaagcccaaggccgccgaaggactggacacccagagattcagcggcaagagactgggcgacaccttcgtgctgaccctgagcgacttcagaagagagaacgagggctactacttctgtagcgccctgagcaacagcatcatgtacttcagccacttcgtgcccgtgtttctgcccgccaagcctacaacaacccctgctcctagacctcctacaccagctcctacaatcgccagccagcctctgtctctcagacccgaagcctgtagacctgctgctggcggagctgtgcataccagaggactggatttcgcctgcgacatctacatctgggctcctctggctggcacatgtggcgtgctgctgctgtccctggtcatcaccctgtactgcaaccaccggaacaggcggagagtgtgcaagtgccctagacctgtggtcaagagcggcgacaagcctagcctgagcgccagatatgtt

SEQ ID NO: 2604 - DNA, 3072 bp, synthetic construct
  source 1..3072: mol_type = other DNA
atggccttaccagtgaccgccttgctcctgccgctggccttgctgctccacgccgccaggccggaattcggcgttacccagacacctaagttccgggtgctgaaaaccggccagagcatgacactgctgtgcgcccaggacatgaaccacgagtacatgtattggtacagacaggaccccggcatgggcctgagactgatccactattctgtcggcgagggcaccacagccaaaggcgaagttcctgacggctacaacgtgtcccggctgaagaagcagaacttcctgctgggcctcgaaagcgccgctccatctcagaccagcgtgtacttctgtgccagccggggctaccacagactgaacaacgagcagttcttcggccctggcaccagactgacagttctcgaggacctgaagaacgtgttcccacctgaggtggccgtgttcgagcctagcgaggccgagatcagccacacccagaaagccaccctcgtgtgcctggctaccggcttctaccccgaccatgtggaactgtcttggtgggtcaacggcaaagaggtgcacagcggcgtgtctaccgacccccagccactgaaagaacagcccgccctgaacgacagccggtactgcctgagcagcagactgagagtgtccgccaccttctggcagaacccccggaaccacttcagatgccaggtgcagttctacggcctgagcgagaacgacgagtggacccaggacagagccaagcccgtgacccagatcgtgtctgccgaagcctggggcagagccgattgcggatcccagagcttcggcctgctggaccccaagctgtgctacctgctggatggcatcctgttcatctacggcgtgatcctgaccgccctgttcctgagagtgaagttcagcagaagcgccgacgcccctgcctaccagcagggacagaaccaactgtacaacgagctgaacctgggcagacgggaagagtacgacgtgctggacaagcggagaggcagggaccctgagatgggcggaaagccccagcggagaaagaacccccaggaaggactgtataacgaactccagaaagacaagatggccgaagcctacagcgagatcggcatgaagggcgagcggagaagaggcaagggccacgatggcctgtaccagggcctgagcaccgccaccaaggacacctatgacgccctgcacatgcaggccctgcctccaagaagggccaagcgatctggatctggagcaacaaacttctcactactcaaacaagcaggtgacgtggaggagaatcccgggcctactagtatggactggatttggcgcatccttttccttgtcggcgctgctaccggcgcgcattccttcgaacagagaaaagaggtggaacaggaccctggacctttcaacgttccagagggcgctaccgtggccttcaactgcacctacagcaatagcgccagccagagcttcttctggtatcggcaggactgccggaaagaacccaagctgctgatgagcgtgtacagcagcggcaacgaggacggcagattcacagcccagctgaacagagccagccagtacatctctctgctgatccgggacagcaagctgagcgatagcgccacctatctgtgcgtggtcaagcctgatcctggcgctggaagctaccagctgacatttggcaagggcaccaagctgtctgtgatccccaatacgcgtgcctctacaaagggaccctccgtgtttcctctggctcccagcagcaagtctacaagcggaggaacagccgctctgggctgcctggtcaaggattactttcccgagcctgtgaccgtgtcctggaatagcggagcactgacaagcggcgtgcacacctttccagccgtgctgcaaagcagcggcctgtactctctgagcagcgtggtcacagtgcctagctctagcctgggcacccagacctacatctgcaatgtgaaccacaagcctagcaacaccaaggtggacaagagagtggaacccaagagctgtacaacgccgggcgaaaggagttccttgccggccttttaccccggcacaagcggaagctgtagtgggtgtggaagcctcagcctcccacttcttgcgggcctcgtcgcggcagatgcagtagcttcacttcttattgtaggcgcggtatttctctgtgctcgaccaaggaggtcacccgctcaggaggatggtaaggtgtatataaatatgccaggacgcggacgcgccaagagaagcggatctggcgtgaagcagaccctgaatttcgacctgctgaagctggctggcgacgtggaatccaacccaggcccttctagaggccatatggctctgcctgtgacagctctgctgctgcctctggcactgctgcttcatgctgctagacctagccagtttagagtgtcccctctggacagaacctggaacctgggcgagacagtggaactgaagtgccaggtgctgctgagcaaccctacaagcggctgctcctggctgtttcagcctagaggtgcagccgcctctcctacctttctgctgtacctgagccagaacaagcccaaggccgccgaaggactggacacccagagattcagcggcaagagactgggcgacaccttcgtgctgaccctgagcgacttcagaagagagaacgagggctactacttctgtagcgccctgagcaacagcatcatgtacttcagccacttcgtgcccgtgtttctgcccgccaagcctacaacaacccctgctcctagacctcctacaccagctcctacaatcgccagccagcctctgtctctcagacccgaagcctgtagacctgctgctggcggagctgtgcataccagaggactggatttcgcctgcgacatctacatctgggctcctctggctggcacatgtggcgtgctgctgctgtccctggtcatcaccctgtactgcaaccaccggaacaggcggagagtgtgcaagtgccctagacctgtggtcaagagcggcgacaagcctagcctgagcgccagatatgtt

SEQ ID NO: 2605 - DNA, 2808 bp, synthetic construct
  source 1..2808: mol_type = other DNA
atggccttaccagtgaccgccttgctcctgccgctggccttgctgctccacgccgccaggccgggcgttacccagacacctaagttccgggtgctgaaaaccggccagagcatgacactgctgtgcgcccaggacatgaaccacgagtacatgtattggtacagacaggaccccggcatgggcctgagactgatccactattctgtcggcgagggcaccacagccaaaggcgaagttcctgacggctacaacgtgtcccggctgaagaagcagaacttcctgctgggcctcgaaagcgccgctccatctcagaccagcgtgtacttctgtgccagccggggctaccacagactgaacaacgagcagttcttcggccctggcaccagactgacagttctcgagctgtgggtttcacagcctccagagatcagaaccctggaaggcagcagcgccttcctgccttgcagcttcaatgcctctcagggcagactggctatcggcagcgtgacctggttcagagatgaggtggtgcccggcaaagaagtgcggaacggcacccctgagtttagaggaaggctggcccctctggcctccagcagatttctgcacgatcaccaggccgagctgcacatcagagatgtgcgaggacacgacgccagcatctacgtgtgcagagtggaagtgctcggcctcggagttggcacaggcaatggaacaagactggtggtggaaaaagagcaccctcagctcggagccggaacagtgctgcttctgagagccggcttttacgccgtgtcctttctgtctgtggccgtgggcagcaccgtgtactatcagggcaagtgcctgacctggaagggacctagaaggcaactgcctgctgtggtgcctgctcctttgcctcctccatgtggaagctctgcccatctgctgccacctgttccaggcggaagggccaagcgatctggatctggagcaacaaacttctcactactcaaacaagcaggtgacgtggaggagaatcccgggcctactagtatggactggatttggcgcatccttttccttgtcggcgctgctaccggcgcgcattccttcgaacagagaaaagaggtggaacaggaccctggacctttcaacgttccagagggcgctaccgtggccttcaactgcacctacagcaatagcgccagccagagcttcttctggtatcggcaggactgccggaaagaacccaagctgctgatgagcgtgtacagcagcggcaacgaggacggcagattcacagcccagctgaacagagccagccagtacatctctctgctgatccgggacagcaagctgagcgatagcgccacctatctgtgcgtggtcaagcctgatcctggcgctggaagctaccagctgacatttggcaagggcaccaagctgtctgtgatccccaatacgcgtctgtgggtgtcccagccacctgaaattcggacactggaaggctcctccgcctttctgccctgtagctttaacgccagccaggggagactcgccatcggctctgtgacatggttccgggatgaagtcgtccctggaaaagaagttcgcaacggaacaccagagttcagaggcagactcgccccactggcaagctccagattcctgcatgaccatcaggctgaactgcacattagggacgtgcggggccacgatgcctccatctatgtgtgtcgggtcgaagtgcttggactcggcgtcggaactggaaacggcactaggctggtggtcgagaaagaacatccacagcttggcgctggcaccgtcctgttgcttagagccggattctatgccgtcagcttcctgtccgtggctgtggggtctacagtgtattaccagggaaaatgtctcacctggaaaggccccagacgccagcttccagctgttgttcctgctccactgccaccaccttgtggctcctctgctcacttgcttccaccagtgcctggcggacgcgccaagagaagcggatctggcgtgaagcagaccctgaatttcgacctgctgaagctggctggcgacgtggaatccaacccaggcccttctagaggccatatggctctgcctgtgacagctctgctgctgcctctggcactgctgcttcatgctgctagacctagccagtttagagtgtcccctctggacagaacctggaacctgggcgagacagtggaactgaagtgccaggtgctgctgagcaaccctacaagcggctgctcctggctgtttcagcctagaggtgcagccgcctctcctacctttctgctgtacctgagccagaacaagcccaaggccgccgaaggactggacacccagagattcagcggcaagagactgggcgacaccttcgtgctgaccctgagcgacttcagaagagagaacgagggctactacttctgtagcgccctgagcaacagcatcatgtacttcagccacttcgtgcccgtgtttctgcccgccaagcctacaacaacccctgctcctagacctcctacaccagctcctacaatcgccagccagcctctgtctctcagacccgaagcctgtagacctgctgctggcggagctgtgcataccagaggactggatttcgcctgcgacatctacatctgggctcctctggctggcacatgtggcgtgctgctgctgtccctggtcatcaccctgtactgcaaccaccggaacaggcggagagtgtgcaagtgccctagacctgtggtcaagagcggcgacaagcctagcctgagcgccagatatgtt

SEQ ID NO: 2606 - DNA, 3213 bp, synthetic construct
  source 1..3213: mol_type = other DNA
atggccttaccagtgaccgccttgctcctgccgctggccttgctgctccacgccgccaggccggaattcggcgttacccagacacctaagttccgggtgctgaaaaccggccagagcatgacactgctgtgcgcccaggacatgaaccacgagtacatgtattggtacagacaggaccccggcatgggcctgagactgatccactattctgtcggcgagggcaccacagccaaaggcgaagttcctgacggctacaacgtgtcccggctgaagaagcagaacttcctgctgggcctcgaaagcgccgctccatctcagaccagcgtgtacttctgtgccagccggggctaccacagactgaacaacgagcagttcttcggccctggcaccagactgacagttctcgagggacagcctaaggccaatcctaccgtgacactgttccctccaagcagcgaagaactccaggccaacaaggccacacttgtgtgcctgatctccgacttctaccctggggctgtgacagtggcttggaaggccgatggatctcctgtgaaagccggcgtggaaaccaccaagccatccaagcagagcaacaacaaatacgccgccagctcctacctgagcctgacacctgagcagtggaagtcccacagatcctacagctgccaagtgacccacgaaggcagcaccgtggaaaagacagtggcccctacagagtgcagcggatcccagagcttcggcctgctggaccccaagctgtgctacctgctggatggcatcctgttcatctacggcgtgatcctgaccgccctgttcctgagagtgaagttcagcagaagcgccgacgcccctgcctaccagcagggacagaaccaactgtacaacgagctgaacctgggcagacgggaagagtacgacgtgctggacaagcggagaggcagggaccctgagatgggcggaaagccccagcggagaaagaacccccaggaaggactgtataacgaactccagaaagacaagatggccgaagcctacagcgagatcggcatgaagggcgagcggagaagaggcaagggccacgatggcctgtaccagggcctgagcaccgccaccaaggacacctatgacgccctgcacatgcaggccctgcctccaagaagggccaagcgatctggatctggagcaacaaacttctcactactcaaacaagcaggtgacgtggaggagaatcccgggcctactagtatggactggatttggcgcatccttttccttgtcggcgctgctaccggcgcgcattccttcgaacagagaaaagaggtggaacaggaccctggacctttcaacgttccagagggcgctaccgtggccttcaactgcacctacagcaatagcgccagccagagcttcttctggtatcggcaggactgccggaaagaacccaagctgctgatgagcgtgtacagcagcggcaacgaggacggcagattcacagcccagctgaacagagccagccagtacatctctctgctgatccgggacagcaagctgagcgatagcgccacctatctgtgcgtggtcaagcctgatcctggcgctggaagctaccagctgacatttggcaagggcaccaagctgtctgtgatccccaatacgcgtgcctctacaaagggaccctccgtgtttcctctggctcccagcagcaagtctacaagcggaggaacagccgctctgggctgcctggtcaaggattactttcccgagcctgtgaccgtgtcctggaatagcggagcactgacaagcggcgtgcacacctttccagccgtgctgcaaagcagcggcctgtactctctgagcagcgtggtcacagtgcctagctctagcctgggcacccagacctacatctgcaatgtgaaccacaagcctagcaacaccaaggtggacaagagagtggaacccaagagctgtggtacccagagttttgggttgttggaccctaaattgtgctatctgttggacggaatcctgttcatttacggagtgatcctgaccgcattgttcctgcgggttaagttttccagatccgcagacgcacccgcttaccaacaagggcagaaccaactctacaatgaacttaatttggggcggagggaagagtacgacgttctggacaaaaggaggggacgagatcccgagatgggcggaaagcctcagcgaaggaagaatccgcaagaggggctttataacgaactccagaaagataaaatggcagaagcctatagtgagattgggatgaagggagaaaggaggaggggtaaaggtcacgatgggttgtaccaaggattgagcacagccactaaagatacctatgatgcgctccacatgcaggccctgccgccaagacgcgccaagagaagcggatctggcgtgaagcagaccctgaatttcgacctgctgaagctggctggcgacgtggaatccaacccaggcccttctagaggccatatggctctgcctgtgacagctctgctgctgcctctggcactgctgcttcatgctgctagacctagccagtttagagtgtcccctctggacagaacctggaacctgggcgagacagtggaactgaagtgccaggtgctgctgagcaaccctacaagcggctgctcctggctgtttcagcctagaggtgcagccgcctctcctacctttctgctgtacctgagccagaacaagcccaaggccgccgaaggactggacacccagagattcagcggcaagagactgggcgacaccttcgtgctgaccctgagcgacttcagaagagagaacgagggctactacttctgtagcgccctgagcaacagcatcatgtacttcagccacttcgtgcccgtgtttctgcccgccaagcctacaacaacccctgctcctagacctcctacaccagctcctacaatcgccagccagcctctgtctctcagacccgaagcctgtagacctgctgctggcggagctgtgcataccagaggactggatttcgcctgcgacatctacatctgggctcctctggctggcacatgtggcgtgctgctgctgtccctggtcatcaccctgtactgcaaccaccggaacaggcggagagtgtgcaagtgccctagacctgtggtcaagagcggcgacaagcctagcctgagcgccagatatgtt

SEQ ID NO: 2607 - DNA, 3267 bp, synthetic construct
  source 1..3267: mol_type = other DNA
atggccttaccagtgaccgccttgctcctgccgctggccttgctgctccacgccgccaggccggaattcggcgttacccagacacctaagttccgggtgctgaaaaccggccagagcatgacactgctgtgcgcccaggacatgaaccacgagtacatgtattggtacagacaggaccccggcatgggcctgagactgatccactattctgtcggcgagggcaccacagccaaaggcgaagttcctgacggctacaacgtgtcccggctgaagaagcagaacttcctgctgggcctcgaaagcgccgctccatctcagaccagcgtgtacttctgtgccagccggggctaccacagactgaacaacgagcagttcttcggccctggcaccagactgacagttctcgagggacagcctaaggccaatcctaccgtgacactgttccctccaagcagcgaagaactccaggccaacaaggccacacttgtgtgcctgatctccgacttctaccctggggctgtgacagtggcttggaaggccgatggatctcctgtgaaagccggcgtggaaaccaccaagccatccaagcagagcaacaacaaatacgccgccagctcctacctgagcctgacacctgagcagtggaagtcccacagatcctacagctgccaagtgacccacgaaggcagcaccgtggaaaagacagtggcccctacagagtgcagcggatcccagagcttcggcctgctggaccccaagctgtgctacctgctggatggcatcctgttcatctacggcgtgatcctgaccgccctgttcctgagagtgaagttcagcagaagcgccgacgcccctgcctaccagcagggacagaaccaactgtacaacgagctgaacctgggcagacgggaagagtacgacgtgctggacaagcggagaggcagggaccctgagatgggcggaaagccccagcggagaaagaacccccaggaaggactgtataacgaactccagaaagacaagatggccgaagcctacagcgagatcggcatgaagggcgagcggagaagaggcaagggccacgatggcctgtaccagggcctgagcaccgccaccaaggacacctatgacgccctgcacatgcaggccctgcctccaagaagggccaagcgatctggatctggagcaacaaacttctcactactcaaacaagcaggtgacgtggaggagaatcccgggcctactagtatggactggatttggcgcatccttttccttgtcggcgctgctaccggcgcgcattccttcgaacagagaaaagaggtggaacaggaccctggacctttcaacgttccagagggcgctaccgtggccttcaactgcacctacagcaatagcgccagccagagcttcttctggtatcggcaggactgccggaaagaacccaagctgctgatgagcgtgtacagcagcggcaacgaggacggcagattcacagcccagctgaacagagccagccagtacatctctctgctgatccgggacagcaagctgagcgatagcgccacctatctgtgcgtggtcaagcctgatcctggcgctggaagctaccagctgacatttggcaagggcaccaagctgtctgtgatccccaatacgcgtgcgtctcccacttctccgaaagttttccccctttccctctgtagcacacaacctgatggaaatgtggtcatcgcatgtctggtacaaggattctttccacaagagccattgagcgttacatggtcagagagcgggcagggagttaccgctaggaatttcccaccctcacaggatgcgagtggtgatctttataccacatcatcacaactcacgttgccagccactcagtgcctcgctggaaagtcagtaacatgccatgtcaaacattacactaatccctcacaagatgttaccgtgccttgcccagtaccttctacgccgcccaccccgtctccatctactccacccacgccatcacctagtggtacccagagttttgggttgttggaccctaaattgtgctatctgttggacggaatcctgttcatttacggagtgatcctgaccgcattgttcctgcgggttaagttttccagatccgcagacgcacccgcttaccaacaagggcagaaccaactctacaatgaacttaatttggggcggagggaagagtacgacgttctggacaaaaggaggggacgagatcccgagatgggcggaaagcctcagcgaaggaagaatccgcaagaggggctttataacgaactccagaaagataaaatggcagaagcctatagtgagattgggatgaagggagaaaggaggaggggtaaaggtcacgatgggttgtaccaaggattgagcacagccactaaagatacctatgatgcgctccacatgcaggccctgccgccaagacgcgccaagagaagcggatctggcgtgaagcagaccctgaatttcgacctgctgaagctggctggcgacgtggaatccaacccaggcccttctagaggccatatggctctgcctgtgacagctctgctgctgcctctggcactgctgcttcatgctgctagacctagccagtttagagtgtcccctctggacagaacctggaacctgggcgagacagtggaactgaagtgccaggtgctgctgagcaaccctacaagcggctgctcctggctgtttcagcctagaggtgcagccgcctctcctacctttctgctgtacctgagccagaacaagcccaaggccgccgaaggactggacacccagagattcagcggcaagagactgggcgacaccttcgtgctgaccctgagcgacttcagaagagagaacgagggctactacttctgtagcgccctgagcaacagcatcatgtacttcagccacttcgtgcccgtgtttctgcccgccaagcctacaacaacccctgctcctagacctcctacaccagctcctacaatcgccagccagcctctgtctctcagacccgaagcctgtagacctgctgctggcggagctgtgcataccagaggactggatttcgcctgcgacatctacatctgggctcctctggctggcacatgtggcgtgctgctgctgtccctggtcatcaccctgtactgcaaccaccggaacaggcggagagtgtgcaagtgccctagacctgtggtcaagagcggcgacaagcctagcctgagcgccagatatgtt

SEQ ID NO: 2608 - DNA, 3210 bp, synthetic construct
  source 1..3210: mol_type = other DNA
atggccttaccagtgaccgccttgctcctgccgctggccttgctgctccacgccgccaggccggaattcggcgttacccagacacctaagttccgggtgctgaaaaccggccagagcatgacactgctgtgcgcccaggacatgaaccacgagtacatgtattggtacagacaggaccccggcatgggcctgagactgatccactattctgtcggcgagggcaccacagccaaaggcgaagttcctgacggctacaacgtgtcccggctgaagaagcagaacttcctgctgggcctcgaaagcgccgctccatctcagaccagcgtgtacttctgtgccagccggggctaccacagactgaacaacgagcagttcttcggccctggcaccagactgacagttctcgagggacagcctaaggccaatcctaccgtgacactgttccctccaagcagcgaagaactccaggccaacaaggccacacttgtgtgcctgatctccgacttctaccctggggctgtgacagtggcttggaaggccgatggatctcctgtgaaagccggcgtggaaaccaccaagccatccaagcagagcaacaacaaatacgccgccagctcctacctgagcctgacacctgagcagtggaagtcccacagatcctacagctgccaagtgacccacgaaggcagcaccgtggaaaagacagtggcccctacagagtgcagcggatcccagagcttcggcctgctggaccccaagctgtgctacctgctggatggcatcctgttcatctacggcgtgatcctgaccgccctgttcctgagagtgaagttcagcagaagcgccgacgcccctgcctaccagcagggacagaaccaactgtacaacgagctgaacctgggcagacgggaagagtacgacgtgctggacaagcggagaggcagggaccctgagatgggcggaaagccccagcggagaaagaacccccaggaaggactgtataacgaactccagaaagacaagatggccgaagcctacagcgagatcggcatgaagggcgagcggagaagaggcaagggccacgatggcctgtaccagggcctgagcaccgccaccaaggacacctatgacgccctgcacatgcaggccctgcctccaagaagggccaagcgatctggatctggagcaacaaacttctcactactcaaacaagcaggtgacgtggaggagaatcccgggcctactagtatggactggatttggcgcatccttttccttgtcggcgctgctaccggcgcgcattccttcgaacagagaaaagaggtggaacaggaccctggacctttcaacgttccagagggcgctaccgtggccttcaactgcacctacagcaatagcgccagccagagcttcttctggtatcggcaggactgccggaaagaacccaagctgctgatgagcgtgtacagcagcggcaacgaggacggcagattcacagcccagctgaacagagccagccagtacatctctctgctgatccgggacagcaagctgagcgatagcgccacctatctgtgcgtggtcaagcctgatcctggcgctggaagctaccagctgacatttggcaagggcaccaagctgtctgtgatccccaatacgcgtgcctccacgaagggaccatctgttttccctcttgccccctgctcacggtcaacgtctgaatccacggcagccctgggctgcctcgttaaggactactttccagagccggtaacagtctcctggaacagtggagcccttacatcaggtgttcacactttccctgccgtcttgcaaagtagcggactgtacagccttagttccgttgttacggttccttctagcaacttcggtacacagacatatacttgtaacgtagatcataagcctagcaacaccaaggtggacaaaaccgtagagagaaagtgtggtacccagagttttgggttgttggaccctaaattgtgctatctgttggacggaatcctgttcatttacggagtgatcctgaccgcattgttcctgcgggttaagttttccagatccgcagacgcacccgcttaccaacaagggcagaaccaactctacaatgaacttaatttggggcggagggaagagtacgacgttctggacaaaaggaggggacgagatcccgagatgggcggaaagcctcagcgaaggaagaatccgcaagaggggctttataacgaactccagaaagataaaatggcagaagcctatagtgagattgggatgaagggagaaaggaggaggggtaaaggtcacgatgggttgtaccaaggattgagcacagccactaaagatacctatgatgcgctccacatgcaggccctgccgccaagacgcgccaagagaagcggatctggcgtgaagcagaccctgaatttcgacctgctgaagctggctggcgacgtggaatccaacccaggcccttctagaggccatatggctctgcctgtgacagctctgctgctgcctctggcactgctgcttcatgctgctagacctagccagtttagagtgtcccctctggacagaacctggaacctgggcgagacagtggaactgaagtgccaggtgctgctgagcaaccctacaagcggctgctcctggctgtttcagcctagaggtgcagccgcctctcctacctttctgctgtacctgagccagaacaagcccaaggccgccgaaggactggacacccagagattcagcggcaagagactgggcgacaccttcgtgctgaccctgagcgacttcagaagagagaacgagggctactacttctgtagcgccctgagcaacagcatcatgtacttcagccacttcgtgcccgtgtttctgcccgccaagcctacaacaacccctgctcctagacctcctacaccagctcctacaatcgccagccagcctctgtctctcagacccgaagcctgtagacctgctgctggcggagctgtgcataccagaggactggatttcgcctgcgacatctacatctgggctcctctggctggcacatgtggcgtgctgctgctgtccctggtcatcaccctgtactgcaaccaccggaacaggcggagagtgtgcaagtgccctagacctgtggtcaagagcggcgacaagcctagcctgagcgccagatatgtt

SEQ ID NO: 2609 - DNA, 3375 bp, synthetic construct
  source 1..3375: mol_type = other DNA
atggccttaccagtgaccgccttgctcctgccgctggccttgctgctccacgccgccaggccgggcgttacccagacacctaagttccgggtgctgaaaaccggccagagcatgacactgctgtgcgcccaggacatgaaccacgagtacatgtattggtacagacaggaccccggcatgggcctgagactgatccactattctgtcggcgagggcaccacagccaaaggcgaagttcctgacggctacaacgtgtcccggctgaagaagcagaacttcctgctgggcctcgaaagcgccgctccatctcagaccagcgtgtacttctgtgccagccggggctaccacagactgaacaacgagcagttcttcggccctggcaccagactgacagttctcgagggacagcctaaggccaatcctaccgtgacactgttccctccaagcagcgaagaactccaggccaacaaggccacacttgtgtgcctgatctccgacttctaccctggggctgtgacagtggcttggaaggccgatggatctcctgtgaaagccggcgtggaaaccaccaagccatccaagcagagcaacaacaaatacgccgccagctcctacctgagcctgacacctgagcagtggaagtcccacagatcctacagctgccaagtgacccacgaaggcagcaccgtggaaaagacagtggcccctacagagtgcagcggatcccagagcttcggcctgctggaccccaagctgtgctacctgctggatggcatcctgttcatctacggcgtgatcctgaccgccctgttcctgagagtgaagttcagcagaagcgccgacgcccctgcctaccagcagggacagaaccaactgtacaacgagctgaacctgggcagacgggaagagtacgacgtgctggacaagcggagaggcagggaccctgagatgggcggaaagccccagcggagaaagaacccccaggaaggactgtataacgaactccagaaagacaagatggccgaagcctacagcgagatcggcatgaagggcgagcggagaagaggcaagggccacgatggcctgtaccagggcctgagcaccgccaccaaggacacctatgacgccctgcacatgcaggccctgcctccaagaagggccaagcgatctggatctggagcaacaaacttctcactactcaaacaagcaggtgacgtggaggagaatcccgggcctactagtatggactggatttggcgcatccttttccttgtcggcgctgctaccggcgcgcattccttcgaacagagaaaagaggtggaacaggaccctggacctttcaacgttccagagggcgctaccgtggccttcaactgcacctacagcaatagcgccagccagagcttcttctggtatcggcaggactgccggaaagaacccaagctgctgatgagcgtgtacagcagcggcaacgaggacggcagattcacagcccagctgaacagagccagccagtacatctctctgctgatccgggacagcaagctgagcgatagcgccacctatctgtgcgtggtcaagcctgatcctggcgctggaagctaccagctgacatttggcaagggcaccaagctgtctgtgatccccaatacgcgtgctccgacaaaggcgccagacgtttttcctattatttcaggatgtcggcatccgaaagataattccccagttgttctggcgtgtcttatcacgggctaccatcctacatctgttaccgttacgtggtatatgggtacgcaaagccaacctcagcggacttttccagagatccaacggcgagattcatattatatgacatccagtcagttgagtacaccgctgcaacagtggcggcaaggtgagtataagtgtgtggtccaacacacagccagtaaaagtaagaaagagatattccggtggcctgaaagcccgaaggcacaagcatcttctgttccgacggcgcaaccgcaagctgaaggaagtcttgcaaaagcaaccacagcacccgcgacaacacgaaacacaggacgcggaggcgaggaaaagaaaaaagaaaaggaaaaggaagagcaagaggagagggaaactaagacccccggtacccagagttttgggttgttggaccctaaattgtgctatctgttggacggaatcctgttcatttacggagtgatcctgaccgcattgttcctgcgggttaagttttccagatccgcagacgcacccgcttaccaacaagggcagaaccaactctacaatgaacttaatttggggcggagggaagagtacgacgttctggacaaaaggaggggacgagatcccgagatgggcggaaagcctcagcgaaggaagaatccgcaagaggggctttataacgaactccagaaagataaaatggcagaagcctatagtgagattgggatgaagggagaaaggaggaggggtaaaggtcacgatgggttgtaccaaggattgagcacagccactaaagatacctatgatgcgctccacatgcaggccctgccgccaagacgcgccaagagaagcggatctggcgtgaagcagaccctgaatttcgacctgctgaagctggctggcgacgtggaatccaacccaggcccttctagaggccatatggctctgcctgtgacagctctgctgctgcctctggcactgctgcttcatgctgctagacctagccagtttagagtgtcccctctggacagaacctggaacctgggcgagacagtggaactgaagtgccaggtgctgctgagcaaccctacaagcggctgctcctggctgtttcagcctagaggtgcagccgcctctcctacctttctgctgtacctgagccagaacaagcccaaggccgccgaaggactggacacccagagattcagcggcaagagactgggcgacaccttcgtgctgaccctgagcgacttcagaagagagaacgagggctactacttctgtagcgccctgagcaacagcatcatgtacttcagccacttcgtgcccgtgtttctgcccgccaagcctacaacaacccctgctcctagacctcctacaccagctcctacaatcgccagccagcctctgtctctcagacccgaagcctgtagacctgctgctggcggagctgtgcataccagaggactggatttcgcctgcgacatctacatctgggctcctctggctggcacatgtggcgtgctgctgctgtccctggtcatcaccctgtactgcaaccaccggaacaggcggagagtgtgcaagtgccctagacctgtggtcaagagcggcgacaagcctagcctgagcgccagatatgtt

SEQ ID NO: 2610 - DNA, 3201 bp, synthetic construct
  source 1..3201: mol_type = other DNA
atggccttaccagtgaccgccttgctcctgccgctggccttgctgctccacgccgccaggccgggcgttacccagacacctaagttccgggtgctgaaaaccggccagagcatgacactgctgtgcgcccaggacatgaaccacgagtacatgtattggtacagacaggaccccggcatgggcctgagactgatccactattctgtcggcgagggcaccacagccaaaggcgaagttcctgacggctacaacgtgtcccggctgaagaagcagaacttcctgctgggcctcgaaagcgccgctccatctcagaccagcgtgtacttctgtgccagccggggctaccacagactgaacaacgagcagttcttcggccctggcaccagactgacagttctcgagggacagcctaaggccaatcctaccgtgacactgttccctccaagcagcgaagaactccaggccaacaaggccacacttgtgtgcctgatctccgacttctaccctggggctgtgacagtggcttggaaggccgatggatctcctgtgaaagccggcgtggaaaccaccaagccatccaagcagagcaacaacaaatacgccgccagctcctacctgagcctgacacctgagcagtggaagtcccacagatcctacagctgccaagtgacccacgaaggcagcaccgtggaaaagacagtggcccctacagagtgcagcggatcccagagcttcggcctgctggaccccaagctgtgctacctgctggatggcatcctgttcatctacggcgtgatcctgaccgccctgttcctgagagtgaagttcagcagaagcgccgacgcccctgcctaccagcagggacagaaccaactgtacaacgagctgaacctgggcagacgggaagagtacgacgtgctggacaagcggagaggcagggaccctgagatgggcggaaagccccagcggagaaagaacccccaggaaggactgtataacgaactccagaaagacaagatggccgaagcctacagcgagatcggcatgaagggcgagcggagaagaggcaagggccacgatggcctgtaccagggcctgagcaccgccaccaaggacacctatgacgccctgcacatgcaggccctgcctccaagaagggccaagcgatctggatctggagcaacaaacttctcactactcaaacaagcaggtgacgtggaggagaatcccgggcctactagtatggactggatttggcgcatccttttccttgtcggcgctgctaccggcgcgcattccttcgaacagagaaaagaggtggaacaggaccctggacctttcaacgttccagagggcgctaccgtggccttcaactgcacctacagcaatagcgccagccagagcttcttctggtatcggcaggactgccggaaagaacccaagctgctgatgagcgtgtacagcagcggcaacgaggacggcagattcacagcccagctgaacagagccagccagtacatctctctgctgatccgggacagcaagctgagcgatagcgccacctatctgtgcgtggtcaagcctgatcctggcgctggaagctaccagctgacatttggcaagggcaccaagctgtctgtgatccccaatacgcgtgcctcaacgaaagggcctagcgtcttccccctggcgccgtgctcacgatccacaagcgaatccaccgccgctctcggatgcctcgtaaaggattatttccctgaaccagtcacggtgtcatggaacagcggtgcccttaccagcggcgtccatacctttcctgctgtgctccagtccagcggactttatagtctcagctctgtcgtgaccgtcccttcctctaattttggcacccagacttacacgtgcaacgtcgatcataagcccagtaacaccaaggtagacaagacggtggaacgaaagggtacccagagttttgggttgttggaccctaaattgtgctatctgttggacggaatcctgttcatttacggagtgatcctgaccgcattgttcctgcgggttaagttttccagatccgcagacgcacccgcttaccaacaagggcagaaccaactctacaatgaacttaatttggggcggagggaagagtacgacgttctggacaaaaggaggggacgagatcccgagatgggcggaaagcctcagcgaaggaagaatccgcaagaggggctttataacgaactccagaaagataaaatggcagaagcctatagtgagattgggatgaagggagaaaggaggaggggtaaaggtcacgatgggttgtaccaaggattgagcacagccactaaagatacctatgatgcgctccacatgcaggccctgccgccaagacgcgccaagagaagcggatctggcgtgaagcagaccctgaatttcgacctgctgaagctggctggcgacgtggaatccaacccaggcccttctagaggccatatggctctgcctgtgacagctctgctgctgcctctggcactgctgcttcatgctgctagacctagccagtttagagtgtcccctctggacagaacctggaacctgggcgagacagtggaactgaagtgccaggtgctgctgagcaaccctacaagcggctgctcctggctgtttcagcctagaggtgcagccgcctctcctacctttctgctgtacctgagccagaacaagcccaaggccgccgaaggactggacacccagagattcagcggcaagagactgggcgacaccttcgtgctgaccctgagcgacttcagaagagagaacgagggctactacttctgtagcgccctgagcaacagcatcatgtacttcagccacttcgtgcccgtgtttctgcccgccaagcctacaacaacccctgctcctagacctcctacaccagctcctacaatcgccagccagcctctgtctctcagacccgaagcctgtagacctgctgctggcggagctgtgcataccagaggactggatttcgcctgcgacatctacatctgggctcctctggctggcacatgtggcgtgctgctgctgtccctggtcatcaccctgtactgcaaccaccggaacaggcggagagtgtgcaagtgccctagacctgtggtcaagagcggcgacaagcctagcctgagcgccagatatgtt

SEQ ID NO: 2611 - DNA, 3222 bp, synthetic construct
  source 1..3222: mol_type = other DNA
atggccttaccagtgaccgccttgctcctgccgctggccttgctgctccacgccgccaggccgggcgttacccagacacctaagttccgggtgctgaaaaccggccagagcatgacactgctgtgcgcccaggacatgaaccacgagtacatgtattggtacagacaggaccccggcatgggcctgagactgatccactattctgtcggcgagggcaccacagccaaaggcgaagttcctgacggctacaacgtgtcccggctgaagaagcagaacttcctgctgggcctcgaaagcgccgctccatctcagaccagcgtgtacttctgtgccagccggggctaccacagactgaacaacgagcagttcttcggccctggcaccagactgacagttctcgagggacagcctaaggccaatcctaccgtgacactgttccctccaagcagcgaagaactccaggccaacaaggccacacttgtgtgcctgatctccgacttctaccctggggctgtgacagtggcttggaaggccgatggatctcctgtgaaagccggcgtggaaaccaccaagccatccaagcagagcaacaacaaatacgccgccagctcctacctgagcctgacacctgagcagtggaagtcccacagatcctacagctgccaagtgacccacgaaggcagcaccgtggaaaagacagtggcccctacagagtgcagcggatcccagagcttcggcctgctggaccccaagctgtgctacctgctggatggcatcctgttcatctacggcgtgatcctgaccgccctgttcctgagagtgaagttcagcagaagcgccgacgcccctgcctaccagcagggacagaaccaactgtacaacgagctgaacctgggcagacgggaagagtacgacgtgctggacaagcggagaggcagggaccctgagatgggcggaaagccccagcggagaaagaacccccaggaaggactgtataacgaactccagaaagacaagatggccgaagcctacagcgagatcggcatgaagggcgagcggagaagaggcaagggccacgatggcctgtaccagggcctgagcaccgccaccaaggacacctatgacgccctgcacatgcaggccctgcctccaagaagggccaagcgatctggatctggagcaacaaacttctcactactcaaacaagcaggtgacgtggaggagaatcccgggcctactagtatggactggatttggcgcatccttttccttgtcggcgctgctaccggcgcgcattccttcgaacagagaaaagaggtggaacaggaccctggacctttcaacgttccagagggcgctaccgtggccttcaactgcacctacagcaatagcgccagccagagcttcttctggtatcggcaggactgccggaaagaacccaagctgctgatgagcgtgtacagcagcggcaacgaggacggcagattcacagcccagctgaacagagccagccagtacatctctctgctgatccgggacagcaagctgagcgatagcgccacctatctgtgcgtggtcaagcctgatcctggcgctggaagctaccagctgacatttggcaagggcaccaagctgtctgtgatccccaatacgcgtgcgtcacctacgtccccaaaagtgttcccgctgtcactcgattccactccacaggacggtaacgtggtggttgcctgcctggtacaaggtttctttcctcaagaaccactctctgtgacgtggtctgaaagtggtcagaatgttacagcacggaacttcccaccgagtcaagatgcgagtggggatctctatacgacatccagtcaactcacactgcccgcaacacaatgccccgatggcaaatctgttacctgccatgtgaaacattacaccaatccatcccaggatgtgacagtaccttgtccggttccgccccctcccccgggtacccagagttttgggttgttggaccctaaattgtgctatctgttggacggaatcctgttcatttacggagtgatcctgaccgcattgttcctgcgggttaagttttccagatccgcagacgcacccgcttaccaacaagggcagaaccaactctacaatgaacttaatttggggcggagggaagagtacgacgttctggacaaaaggaggggacgagatcccgagatgggcggaaagcctcagcgaaggaagaatccgcaagaggggctttataacgaactccagaaagataaaatggcagaagcctatagtgagattgggatgaagggagaaaggaggaggggtaaaggtcacgatgggttgtaccaaggattgagcacagccactaaagatacctatgatgcgctccacatgcaggccctgccgccaagacgcgccaagagaagcggatctggcgtgaagcagaccctgaatttcgacctgctgaagctggctggcgacgtggaatccaacccaggcccttctagaggccatatggctctgcctgtgacagctctgctgctgcctctggcactgctgcttcatgctgctagacctagccagtttagagtgtcccctctggacagaacctggaacctgggcgagacagtggaactgaagtgccaggtgctgctgagcaaccctacaagcggctgctcctggctgtttcagcctagaggtgcagccgcctctcctacctttctgctgtacctgagccagaacaagcccaaggccgccgaaggactggacacccagagattcagcggcaagagactgggcgacaccttcgtgctgaccctgagcgacttcagaagagagaacgagggctactacttctgtagcgccctgagcaacagcatcatgtacttcagccacttcgtgcccgtgtttctgcccgccaagcctacaacaacccctgctcctagacctcctacaccagctcctacaatcgccagccagcctctgtctctcagacccgaagcctgtagacctgctgctggcggagctgtgcataccagaggactggatttcgcctgcgacatctacatctgggctcctctggctggcacatgtggcgtgctgctgctgtccctggtcatcaccctgtactgcaaccaccggaacaggcggagagtgtgcaagtgccctagacctgtggtcaagagcggcgacaagcctagcctgagcgccagatatgtt

SEQ ID NO: 2612 - DNA, 3207 bp, synthetic construct
  source 1..3207: mol_type = other DNA
atggccttaccagtgaccgccttgctcctgccgctggccttgctgctccacgccgccaggccgggcgttacccagacacctaagttccgggtgctgaaaaccggccagagcatgacactgctgtgcgcccaggacatgaaccacgagtacatgtattggtacagacaggaccccggcatgggcctgagactgatccactattctgtcggcgagggcaccacagccaaaggcgaagttcctgacggctacaacgtgtcccggctgaagaagcagaacttcctgctgggcctcgaaagcgccgctccatctcagaccagcgtgtacttctgtgccagccggggctaccacagactgaacaacgagcagttcttcggccctggcaccagactgacagttctcgagggacagcctaaggccaatcctaccgtgacactgttccctccaagcagcgaagaactccaggccaacaaggccacacttgtgtgcctgatctccgacttctaccctggggctgtgacagtggcttggaaggccgatggatctcctgtgaaagccggcgtggaaaccaccaagccatccaagcagagcaacaacaaatacgccgccagctcctacctgagcctgacacctgagcagtggaagtcccacagatcctacagctgccaagtgacccacgaaggcagcaccgtggaaaagacagtggcccctacagagtgcagcggatcccagagcttcggcctgctggaccccaagctgtgctacctgctggatggcatcctgttcatctacggcgtgatcctgaccgccctgttcctgagagtgaagttcagcagaagcgccgacgcccctgcctaccagcagggacagaaccaactgtacaacgagctgaacctgggcagacgggaagagtacgacgtgctggacaagcggagaggcagggaccctgagatgggcggaaagccccagcggagaaagaacccccaggaaggactgtataacgaactccagaaagacaagatggccgaagcctacagcgagatcggcatgaagggcgagcggagaagaggcaagggccacgatggcctgtaccagggcctgagcaccgccaccaaggacacctatgacgccctgcacatgcaggccctgcctccaagaagggccaagcgatctggatctggagcaacaaacttctcactactcaaacaagcaggtgacgtggaggagaatcccgggcctactagtatggactggatttggcgcatccttttccttgtcggcgctgctaccggcgcgcattccttcgaacagagaaaagaggtggaacaggaccctggacctttcaacgttccagagggcgctaccgtggccttcaactgcacctacagcaatagcgccagccagagcttcttctggtatcggcaggactgccggaaagaacccaagctgctgatgagcgtgtacagcagcggcaacgaggacggcagattcacagcccagctgaacagagccagccagtacatctctctgctgatccgggacagcaagctgagcgatagcgccacctatctgtgcgtggtcaagcctgatcctggcgctggaagctaccagctgacatttggcaagggcaccaagctgtctgtgatccccaatacgcgtgctagtacccagtcaccttctgttttcccgcttactagatgctgcaagaacataccatccaatgccacttctgtcacactgggctgtcttgctacaggttattttcctgagccggtgatggtcacttgggataccggtagcctgaatggaactacaatgacgctgcctgccacgacgctcacattgagtgggcattacgcgacaattagtcttttgacggtaagcggagcttgggctaagcagatgttcacttgcagagtagcgcacactccctctagtactgactgggttgacaacaaaaccttttctggtacccagagttttgggttgttggaccctaaattgtgctatctgttggacggaatcctgttcatttacggagtgatcctgaccgcattgttcctgcgggttaagttttccagatccgcagacgcacccgcttaccaacaagggcagaaccaactctacaatgaacttaatttggggcggagggaagagtacgacgttctggacaaaaggaggggacgagatcccgagatgggcggaaagcctcagcgaaggaagaatccgcaagaggggctttataacgaactccagaaagataaaatggcagaagcctatagtgagattgggatgaagggagaaaggaggaggggtaaaggtcacgatgggttgtaccaaggattgagcacagccactaaagatacctatgatgcgctccacatgcaggccctgccgccaagacgcgccaagagaagcggatctggcgtgaagcagaccctgaatttcgacctgctgaagctggctggcgacgtggaatccaacccaggcccttctagaggccatatggctctgcctgtgacagctctgctgctgcctctggcactgctgcttcatgctgctagacctagccagtttagagtgtcccctctggacagaacctggaacctgggcgagacagtggaactgaagtgccaggtgctgctgagcaaccctacaagcggctgctcctggctgtttcagcctagaggtgcagccgcctctcctacctttctgctgtacctgagccagaacaagcccaaggccgccgaaggactggacacccagagattcagcggcaagagactgggcgacaccttcgtgctgaccctgagcgacttcagaagagagaacgagggctactacttctgtagcgccctgagcaacagcatcatgtacttcagccacttcgtgcccgtgtttctgcccgccaagcctacaacaacccctgctcctagacctcctacaccagctcctacaatcgccagccagcctctgtctctcagacccgaagcctgtagacctgctgctggcggagctgtgcataccagaggactggatttcgcctgcgacatctacatctgggctcctctggctggcacatgtggcgtgctgctgctgtccctggtcatcaccctgtactgcaaccaccggaacaggcggagagtgtgcaagtgccctagacctgtggtcaagagcggcgacaagcctagcctgagcgccagatatgtt

SEQ ID NO: 2613 - DNA, 3207 bp, synthetic construct
  source 1..3207: mol_type = other DNA
atggccttaccagtgaccgccttgctcctgccgctggccttgctgctccacgccgccaggccgggcgttacccagacacctaagttccgggtgctgaaaaccggccagagcatgacactgctgtgcgcccaggacatgaaccacgagtacatgtattggtacagacaggaccccggcatgggcctgagactgatccactattctgtcggcgagggcaccacagccaaaggcgaagttcctgacggctacaacgtgtcccggctgaagaagcagaacttcctgctgggcctcgaaagcgccgctccatctcagaccagcgtgtacttctgtgccagccggggctaccacagactgaacaacgagcagttcttcggccctggcaccagactgacagttctcgagggacagcctaaggccaatcctaccgtgacactgttccctccaagcagcgaagaactccaggccaacaaggccacacttgtgtgcctgatctccgacttctaccctggggctgtgacagtggcttggaaggccgatggatctcctgtgaaagccggcgtggaaaccaccaagccatccaagcagagcaacaacaaatacgccgccagctcctacctgagcctgacacctgagcagtggaagtcccacagatcctacagctgccaagtgacccacgaaggcagcaccgtggaaaagacagtggcccctacagagtgcagcggatcccagagcttcggcctgctggaccccaagctgtgctacctgctggatggcatcctgttcatctacggcgtgatcctgaccgccctgttcctgagagtgaagttcagcagaagcgccgacgcccctgcctaccagcagggacagaaccaactgtacaacgagctgaacctgggcagacgggaagagtacgacgtgctggacaagcggagaggcagggaccctgagatgggcggaaagccccagcggagaaagaacccccaggaaggactgtataacgaactccagaaagacaagatggccgaagcctacagcgagatcggcatgaagggcgagcggagaagaggcaagggccacgatggcctgtaccagggcctgagcaccgccaccaaggacacctatgacgccctgcacatgcaggccctgcctccaagaagggccaagcgatctggatctggagcaacaaacttctcactactcaaacaagcaggtgacgtggaggagaatcccgggcctactagtatggactggatttggcgcatccttttccttgtcggcgctgctaccggcgcgcattccttcgaacagagaaaagaggtggaacaggaccctggacctttcaacgttccagagggcgctaccgtggccttcaactgcacctacagcaatagcgccagccagagcttcttctggtatcggcaggactgccggaaagaacccaagctgctgatgagcgtgtacagcagcggcaacgaggacggcagattcacagcccagctgaacagagccagccagtacatctctctgctgatccgggacagcaagctgagcgatagcgccacctatctgtgcgtggtcaagcctgatcctggcgctggaagctaccagctgacatttggcaagggcaccaagctgtctgtgatccccaatacgcgtgcgtccactaagggtccgtcagtcttcccgctggcgccctgttcccgcagcacgagtgaatctaccgccgcccttgggtgcttggtaaaagactattttcctgagcccgttacagtatcatggaacagcggggctctgactagcggggtgcatacgttccctgcggttctgcaatctagcggactgtattctctctccagtgttgtgaccgtgccaagctccagcctcggtactaaaacttatacatgtaatgtggatcataaaccttcaaataccaaggttgacaaaagggtagagagtaagtacggtggtacccagagttttgggttgttggaccctaaattgtgctatctgttggacggaatcctgttcatttacggagtgatcctgaccgcattgttcctgcgggttaagttttccagatccgcagacgcacccgcttaccaacaagggcagaaccaactctacaatgaacttaatttggggcggagggaagagtacgacgttctggacaaaaggaggggacgagatcccgagatgggcggaaagcctcagcgaaggaagaatccgcaagaggggctttataacgaactccagaaagataaaatggcagaagcctatagtgagattgggatgaagggagaaaggaggaggggtaaaggtcacgatgggttgtaccaaggattgagcacagccactaaagatacctatgatgcgctccacatgcaggccctgccgccaagacgcgccaagagaagcggatctggcgtgaagcagaccctgaatttcgacctgctgaagctggctggcgacgtggaatccaacccaggcccttctagaggccatatggctctgcctgtgacagctctgctgctgcctctggcactgctgcttcatgctgctagacctagccagtttagagtgtcccctctggacagaacctggaacctgggcgagacagtggaactgaagtgccaggtgctgctgagcaaccctacaagcggctgctcctggctgtttcagcctagaggtgcagccgcctctcctacctttctgctgtacctgagccagaacaagcccaaggccgccgaaggactggacacccagagattcagcggcaagagactgggcgacaccttcgtgctgaccctgagcgacttcagaagagagaacgagggctactacttctgtagcgccctgagcaacagcatcatgtacttcagccacttcgtgcccgtgtttctgcccgccaagcctacaacaacccctgctcctagacctcctacaccagctcctacaatcgccagccagcctctgtctctcagacccgaagcctgtagacctgctgctggcggagctgtgcataccagaggactggatttcgcctgcgacatctacatctgggctcctctggctggcacatgtggcgtgctgctgctgtccctggtcatcaccctgtactgcaaccaccggaacaggcggagagtgtgcaagtgccctagacctgtggtcaagagcggcgacaagcctagcctgagcgccagatatgtt

SEQ ID NO: 2614 - DNA, 3207 bp, synthetic construct
  source 1..3207: mol_type = other DNA
atggccttaccagtgaccgccttgctcctgccgctggccttgctgctccacgccgccaggccgggcgttacccagacacctaagttccgggtgctgaaaaccggccagagcatgacactgctgtgcgcccaggacatgaaccacgagtacatgtattggtacagacaggaccccggcatgggcctgagactgatccactattctgtcggcgagggcaccacagccaaaggcgaagttcctgacggctacaacgtgtcccggctgaagaagcagaacttcctgctgggcctcgaaagcgccgctccatctcagaccagcgtgtacttctgtgccagccggggctaccacagactgaacaacgagcagttcttcggccctggcaccagactgacagttctcgagggacagcctaaggccaatcctaccgtgacactgttccctccaagcagcgaagaactccaggccaacaaggccacacttgtgtgcctgatctccgacttctaccctggggctgtgacagtggcttggaaggccgatggatctcctgtgaaagccggcgtggaaaccaccaagccatccaagcagagcaacaacaaatacgccgccagctcctacctgagcctgacacctgagcagtggaagtcccacagatcctacagctgccaagtgacccacgaaggcagcaccgtggaaaagacagtggcccctacagagtgcagcggatcccagagcttcggcctgctggaccccaagctgtgctacctgctggatggcatcctgttcatctacggcgtgatcctgaccgccctgttcctgagagtgaagttcagcagaagcgccgacgcccctgcctaccagcagggacagaaccaactgtacaacgagctgaacctgggcagacgggaagagtacgacgtgctggacaagcggagaggcagggaccctgagatgggcggaaagccccagcggagaaagaacccccaggaaggactgtataacgaactccagaaagacaagatggccgaagcctacagcgagatcggcatgaagggcgagcggagaagaggcaagggccacgatggcctgtaccagggcctgagcaccgccaccaaggacacctatgacgccctgcacatgcaggccctgcctccaagaagggccaagcgatctggatctggagcaacaaacttctcactactcaaacaagcaggtgacgtggaggagaatcccgggcctactagtatggactggatttggcgcatccttttccttgtcggcgctgctaccggcgcgcattccttcgaacagagaaaagaggtggaacaggaccctggacctttcaacgttccagagggcgctaccgtggccttcaactgcacctacagcaatagcgccagccagagcttcttctggtatcggcaggactgccggaaagaacccaagctgctgatgagcgtgtacagcagcggcaacgaggacggcagattcacagcccagctgaacagagccagccagtacatctctctgctgatccgggacagcaagctgagcgatagcgccacctatctgtgcgtggtcaagcctgatcctggcgctggaagctaccagctgacatttggcaagggcaccaagctgtctgtgatccccaatacgcgtgcaagtacaaagggacccagtgttttcccgctcgccccctgttcacgatcaacgagtgagtccactgcggctctcggatgcctcgtcaaagactacttccccgagccggtgactgttagttggaactctggggctcttacttcaggcgtacacacattccccgccgtgcttcagtcaagtgggctctactcacttagcagtgtggtaacggttccctctagcaactttggcacccaaacatatacttgcaacgtcgatcacaagccgtcaaataccaaagttgacaagaccgttgaaaggaaatgttgtggtacccagagttttgggttgttggaccctaaattgtgctatctgttggacggaatcctgttcatttacggagtgatcctgaccgcattgttcctgcgggttaagttttccagatccgcagacgcacccgcttaccaacaagggcagaaccaactctacaatgaacttaatttggggcggagggaagagtacgacgttctggacaaaaggaggggacgagatcccgagatgggcggaaagcctcagcgaaggaagaatccgcaagaggggctttataacgaactccagaaagataaaatggcagaagcctatagtgagattgggatgaagggagaaaggaggaggggtaaaggtcacgatgggttgtaccaaggattgagcacagccactaaagatacctatgatgcgctccacatgcaggccctgccgccaagacgcgccaagagaagcggatctggcgtgaagcagaccctgaatttcgacctgctgaagctggctggcgacgtggaatccaacccaggcccttctagaggccatatggctctgcctgtgacagctctgctgctgcctctggcactgctgcttcatgctgctagacctagccagtttagagtgtcccctctggacagaacctggaacctgggcgagacagtggaactgaagtgccaggtgctgctgagcaaccctacaagcggctgctcctggctgtttcagcctagaggtgcagccgcctctcctacctttctgctgtacctgagccagaacaagcccaaggccgccgaaggactggacacccagagattcagcggcaagagactgggcgacaccttcgtgctgaccctgagcgacttcagaagagagaacgagggctactacttctgtagcgccctgagcaacagcatcatgtacttcagccacttcgtgcccgtgtttctgcccgccaagcctacaacaacccctgctcctagacctcctacaccagctcctacaatcgccagccagcctctgtctctcagacccgaagcctgtagacctgctgctggcggagctgtgcataccagaggactggatttcgcctgcgacatctacatctgggctcctctggctggcacatgtggcgtgctgctgctgtccctggtcatcaccctgtactgcaaccaccggaacaggcggagagtgtgcaagtgccctagacctgtggtcaagagcggcgacaagcctagcctgagcgccagatatgtt

SEQ ID NO: 2615 - DNA, 3252 bp, synthetic construct
  source 1..3252: mol_type = other DNA
atggccttaccagtgaccgccttgctcctgccgctggccttgctgctccacgccgccaggccgggcgttacccagacacctaagttccgggtgctgaaaaccggccagagcatgacactgctgtgcgcccaggacatgaaccacgagtacatgtattggtacagacaggaccccggcatgggcctgagactgatccactattctgtcggcgagggcaccacagccaaaggcgaagttcctgacggctacaacgtgtcccggctgaagaagcagaacttcctgctgggcctcgaaagcgccgctccatctcagaccagcgtgtacttctgtgccagccggggctaccacagactgaacaacgagcagttcttcggccctggcaccagactgacagttctcgaggacctgaagaacgtgttcccacctgaggtggccgtgttcgagcctagcgaggccgagatcagccacacccagaaagccaccctcgtgtgcctggctaccggcttctaccccgaccatgtggaactgtcttggtgggtcaacggcaaagaggtgcacagcggcgtgtctaccgacccccagccactgaaagaacagcccgccctgaacgacagccggtactgcctgagcagcagactgagagtgtccgccaccttctggcagaacccccggaaccacttcagatgccaggtgcagttctacggcctgagcgagaacgacgagtggacccaggacagagccaagcccgtgacccagatcgtgtctgccgaagcctggggcagagccgattgcggatcccagagcttcggcctgctggaccccaagctgtgctacctgctggatggcatcctgttcatctacggcgtgatcctgaccgccctgttcctgagagtgaagttcagcagaagcgccgacgcccctgcctaccagcagggacagaaccaactgtacaacgagctgaacctgggcagacgggaagagtacgacgtgctggacaagcggagaggcagggaccctgagatgggcggaaagccccagcggagaaagaacccccaggaaggactgtataacgaactccagaaagacaagatggccgaagcctacagcgagatcggcatgaagggcgagcggagaagaggcaagggccacgatggcctgtaccagggcctgagcaccgccaccaaggacacctatgacgccctgcacatgcaggccctgcctccaagaagggccaagcgatctggatctggagcaacaaacttctcactactcaaacaagcaggtgacgtggaggagaatcccgggcctactagtatggactggatttggcgcatccttttccttgtcggcgctgctaccggcgcgcattccttcgaacagagaaaagaggtggaacaggaccctggacctttcaacgttccagagggcgctaccgtggccttcaactgcacctacagcaatagcgccagccagagcttcttctggtatcggcaggactgccggaaagaacccaagctgctgatgagcgtgtacagcagcggcaacgaggacggcagattcacagcccagctgaacagagccagccagtacatctctctgctgatccgggacagcaagctgagcgatagcgccacctatctgtgcgtggtcaagcctgatcctggcgctggaagctaccagctgacatttggcaagggcaccaagctgtctgtgatccccaatacgcgtatccagaaccctgatcctgccgtgtaccagctgcgggatagcaagagcagcgacaagagcgtgtgtctgttcaccgacttcgacagccagaccaacgtgtcccagagcaaggactccgacgtgtacatcaccgataagaccgtgctggacatgcggagcatggacttcaagagcaactccgccgtggcctggtccaacaagtccgatttcgcctgcgccaacgccttcaacaacagcattatccccgaggacacattcttcccaagccccgagagcagctgcggtacccagagttttgggttgttggaccctaaattgtgctatctgttggacggaatcctgttcatttacggagtgatcctgaccgcattgttcctgcgggttaagttttccagatccgcagacgcacccgcttaccaacaagggcagaaccaactctacaatgaacttaatttggggcggagggaagagtacgacgttctggacaaaaggaggggacgagatcccgagatgggcggaaagcctcagcgaaggaagaatccgcaagaggggctttataacgaactccagaaagataaaatggcagaagcctatagtgagattgggatgaagggagaaaggaggaggggtaaaggtcacgatgggttgtaccaaggattgagcacagccactaaagatacctatgatgcgctccacatgcaggccctgccgccaagacgcgccaagagaagcggatctggcgtgaagcagaccctgaatttcgacctgctgaagctggctggcgacgtggaatccaacccaggcccttctagaggccatatggctctgcctgtgacagctctgctgctgcctctggcactgctgcttcatgctgctagacctagccagtttagagtgtcccctctggacagaacctggaacctgggcgagacagtggaactgaagtgccaggtgctgctgagcaaccctacaagcggctgctcctggctgtttcagcctagaggtgcagccgcctctcctacctttctgctgtacctgagccagaacaagcccaaggccgccgaaggactggacacccagagattcagcggcaagagactgggcgacaccttcgtgctgaccctgagcgacttcagaagagagaacgagggctactacttctgtagcgccctgagcaacagcatcatgtacttcagccacttcgtgcccgtgtttctgcccgccaagcctacaacaacccctgctcctagacctcctacaccagctcctacaatcgccagccagcctctgtctctcagacccgaagcctgtagacctgctgctggcggagctgtgcataccagaggactggatttcgcctgcgacatctacatctgggctcctctggctggcacatgtggcgtgctgctgctgtccctggtcatcaccctgtactgcaaccaccggaacaggcggagagtgtgcaagtgccctagacctgtggtcaagagcggcgacaagcctagcctgagcgccagatatgtt

SEQ ID NO: 2616 - DNA, 3252 bp, synthetic construct
  source 1..3252: mol_type = other DNA
atggccttaccagtgaccgccttgctcctgccgctggccttgctgctccacgccgccaggccgggcgttacccagacacctaagttccgggtgctgaaaaccggccagagcatgacactgctgtgcgcccaggacatgaaccacgagtacatgtattggtacagacaggaccccggcatgggcctgagactgatccactattctgtcggcgagggcaccacagccaaaggcgaagttcctgacggctacaacgtgtcccggctgaagaagcagaacttcctgctgggcctcgaaagcgccgctccatctcagaccagcgtgtacttctgtgccagccggggctaccacagactgaacaacgagcagttcttcggccctggcaccagactgacagttctcgaggacctgaagaacgtgttcccacctgaggtggccgtgttcgagcctagcaaggccgagatcgcccacacccagaaagccaccctcgtgtgcctggctaccggcttctaccccgaccatgtggaactgtcttggtgggtcaacggcaaagaggtgcacagcggcgtgtgtaccgacccccagccactgaaagaacagcccgccctgaacgacagccggtactgcctgagcagcagactgagagtgtccgccaccttctggcagaacccccggaaccacttcagatgccaggtgcagttctacggcctgagcgagaacgacgagtggacccaggacagagccaagcccgtgacccagatcgtgtctgccgaagcctggggcagagccgattgcggatcccagagcttcggcctgctggaccccaagctgtgctacctgctggatggcatcctgttcatctacggcgtgatcctgaccgccctgttcctgagagtgaagttcagcagaagcgccgacgcccctgcctaccagcagggacagaaccaactgtacaacgagctgaacctgggcagacgggaagagtacgacgtgctggacaagcggagaggcagggaccctgagatgggcggaaagccccagcggagaaagaacccccaggaaggactgtataacgaactccagaaagacaagatggccgaagcctacagcgagatcggcatgaagggcgagcggagaagaggcaagggccacgatggcctgtaccagggcctgagcaccgccaccaaggacacctatgacgccctgcacatgcaggccctgcctccaagaagggccaagcgatctggatctggagcaacaaacttctcactactcaaacaagcaggtgacgtggaggagaatcccgggcctactagtatggactggatttggcgcatccttttccttgtcggcgctgctaccggcgcgcattccttcgaacagagaaaagaggtggaacaggaccctggacctttcaacgttccagagggcgctaccgtggccttcaactgcacctacagcaatagcgccagccagagcttcttctggtatcggcaggactgccggaaagaacccaagctgctgatgagcgtgtacagcagcggcaacgaggacggcagattcacagcccagctgaacagagccagccagtacatctctctgctgatccgggacagcaagctgagcgatagcgccacctatctgtgcgtggtcaagcctgatcctggcgctggaagctaccagctgacatttggcaagggcaccaagctgtctgtgatccccaatacgcgtatccagaaccctgatcctgccgtgtaccagctgcgggatagcaagagcagcgacaagagcgtgtgtctgttcaccgacttcgacagccagaccaacgtgtcccagagcaaggactccgacgtgtacatcaccgataagtgcgtgctggacatgcggagcatggacttcaagagcaactccgccgtggcctggtccaacaagtccgatttcgcctgcgccaacgccttcaacaacagcattatccccgaggacacattcttcccaagcagcgacgtgccctgcggtacccagagttttgggttgttggaccctaaattgtgctatctgttggacggaatcctgttcatttacggagtgatcctgaccgcattgttcctgcgggttaagttttccagatccgcagacgcacccgcttaccaacaagggcagaaccaactctacaatgaacttaatttggggcggagggaagagtacgacgttctggacaaaaggaggggacgagatcccgagatgggcggaaagcctcagcgaaggaagaatccgcaagaggggctttataacgaactccagaaagataaaatggcagaagcctatagtgagattgggatgaagggagaaaggaggaggggtaaaggtcacgatgggttgtaccaaggattgagcacagccactaaagatacctatgatgcgctccacatgcaggccctgccgccaagacgcgccaagagaagcggatctggcgtgaagcagaccctgaatttcgacctgctgaagctggctggcgacgtggaatccaacccaggcccttctagaggccatatggctctgcctgtgacagctctgctgctgcctctggcactgctgcttcatgctgctagacctagccagtttagagtgtcccctctggacagaacctggaacctgggcgagacagtggaactgaagtgccaggtgctgctgagcaaccctacaagcggctgctcctggctgtttcagcctagaggtgcagccgcctctcctacctttctgctgtacctgagccagaacaagcccaaggccgccgaaggactggacacccagagattcagcggcaagagactgggcgacaccttcgtgctgaccctgagcgacttcagaagagagaacgagggctactacttctgtagcgccctgagcaacagcatcatgtacttcagccacttcgtgcccgtgtttctgcccgccaagcctacaacaacccctgctcctagacctcctacaccagctcctacaatcgccagccagcctctgtctctcagacccgaagcctgtagacctgctgctggcggagctgtgcataccagaggactggatttcgcctgcgacatctacatctgggctcctctggctggcacatgtggcgtgctgctgctgtccctggtcatcaccctgtactgcaaccaccggaacaggcggagagtgtgcaagtgccctagacctgtggtcaagagcggcgacaagcctagcctgagcgccagatatgtt

SEQ ID NO: 2617 - DNA, 2445 bp, synthetic construct
  source 1..2445: mol_type = other DNA
atggccttaccagtgaccgccttgctcctgccgctggccttgctgctccacgccgccaggccgggcgttacccagacacctaagttccgggtgctgaaaaccggccagagcatgacactgctgtgcgcccaggacatgaaccacgagtacatgtattggtacagacaggaccccggcatgggcctgagactgatccactattctgtcggcgagggcaccacagccaaaggcgaagttcctgacggctacaacgtgtcccggctgaagaagcagaacttcctgctgggcctcgaaagcgccgctccatctcagaccagcgtgtacttctgtgccagccggggctaccacagactgaacaacgagcagttcttcggccctggcaccagactgacagttctcgaggacctgaagaacgtgttcccacctgaggtggccgtgttcgagcctagcgaggccgagatcagccacacccagaaagccaccctcgtgtgcctggctaccggcttctaccccgaccatgtggaactgtcttggtgggtcaacggcaaagaggtgcacagcggcgtgtgtaccgacccccagccactgaaagaacagcccgccctgaacgacagccggtactgcctgagcagcagactgagagtgtccgccaccttctggcagaacccccggaaccacttcagatgccaggtgcagttctacggcctgagcgagaacgacgagtggacccaggacagagccaagcccgtgacccagatcgtgtctgccgaagcctggggcagagccgattgcggatcccagagcttcggcctgctggaccccaagctgtgctacctgctggatggcatcctgttcatctacggcgtgatcctgaccgccctgttcctgagagtgaagttcagcagaagcgccgacgcccctgcctaccagcagggacagaaccaactgtacaacgagctgaacctgggcagacgggaagagtacgacgtgctggacaagcggagaggcagggaccctgagatgggcggaaagccccagcggagaaagaacccccaggaaggactgtataacgaactccagaaagacaagatggccgaagcctacagcgagatcggcatgaagggcgagcggagaagaggcaagggccacgatggcctgtaccagggcctgagcaccgccaccaaggacacctatgacgccctgcacatgcaggccctgcctccaagaagggccaagcgatctggatctggagcaacaaacttctcactactcaaacaagcaggtgacgtggaggagaatcccgggcctactagtatggactggatttggcgcatccttttccttgtcggcgctgctaccggcgcgcattccttcgaacagagaaaagaggtggaacaggaccctggacctttcaacgttccagagggcgctaccgtggccttcaactgcacctacagcaatagcgccagccagagcttcttctggtatcggcaggactgccggaaagaacccaagctgctgatgagcgtgtacagcagcggcaacgaggacggcagattcacagcccagctgaacagagccagccagtacatctctctgctgatccgggacagcaagctgagcgatagcgccacctatctgtgcgtggtcaagcctgatcctggcgctggaagctaccagctgacatttggcaagggcaccaagctgtctgtgatccccaatacgcgtatccagaaccctgatcctgccgtgtaccagctgcgggatagcaagagcagcgacaagagcgtgtgtctgttcaccgacttcgacagccagaccaacgtgtcccagagcaaggactccgacgtgtacatcaccgataagtgcgtgctggacatgcggagcatggacttcaagagcaactccgccgtggcctggtccaacaagtccgatttcgcctgcgccaacgccttcaacaacagcattatccccgaggacacattcttcccaagccccgagagcagctgcggtacccagagttttgggttgttggaccctaaattgtgctatctgttggacggaatcctgttcatttacggagtgatcctgaccgcattgttcctgcgggttaagttttccagatccgcagacgcacccgcttaccaacaagggcagaaccaactctacaatgaacttaatttggggcggagggaagagtacgacgttctggacaaaaggaggggacgagatcccgagatgggcggaaagcctcagcgaaggaagaatccgcaagaggggctttataacgaactccagaaagataaaatggcagaagcctatagtgagattgggatgaagggagaaaggaggaggggtaaaggtcacgatgggttgtaccaaggattgagcacagccactaaagatacctatgatgcgctccacatgcaggccctgccgccaaga

SEQ ID NO: 2618 - DNA, 2568 bp, synthetic construct
  source 1..2568: mol_type = other DNA
atggccttaccagtgaccgccttgctcctgccgctggccttgctgctccacgccgccaggccgggcgttacccagacacctaagttccgggtgctgaaaaccggccagagcatgacactgctgtgcgcccaggacatgaaccacgagtacatgtattggtacagacaggaccccggcatgggcctgagactgatccactattctgtcggcgagggcaccacagccaaaggcgaagttcctgacggctacaacgtgtcccggctgaagaagcagaacttcctgctgggcctcgaaagcgccgctccatctcagaccagcgtgtacttctgtgccagccggggctaccacagactgaacaacgagcagttcttcggccctggcaccagactgacagttctcgagcagagcttcggcctgctggaccccaagctgtgctacctgctggatggcatcctgttcatctacggcgtgatcctgaccgccctgttcctgagagtgaagttcagcagaagcgccgacgcccctgcctaccagcagggacagaaccaactgtacaacgagctgaacctgggcagacgggaagagtacgacgtgctggacaagcggagaggcagggaccctgagatgggcggaaagccccagcggagaaagaacccccaggaaggactgtataacgaactccagaaagacaagatggccgaagcctacagcgagatcggcatgaagggcgagcggagaagaggcaagggccacgatggcctgtaccagggcctgagcaccgccaccaaggacacctatgacgccctgcacatgcaggccctgcctccaagaagggccaagcgatctggatctggagcaacaaacttctcactactcaaacaagcaggtgacgtggaggagaatcccgggcctactagtatggactggatttggcgcatccttttccttgtcggcgctgctaccggcgcgcattccttcgaacagagaaaagaggtggaacaggaccctggacctttcaacgttccagagggcgctaccgtggccttcaactgcacctacagcaatagcgccagccagagcttcttctggtatcggcaggactgccggaaagaacccaagctgctgatgagcgtgtacagcagcggcaacgaggacggcagattcacagcccagctgaacagagccagccagtacatctctctgctgatccgggacagcaagctgagcgatagcgccacctatctgtgcgtggtcaagcctgatcctggcgctggaagctaccagctgacatttggcaagggcaccaagctgtctgtgatccccaatacgcgtcagagttttgggttgttggaccctaaattgtgctatctgttggacggaatcctgttcatttacggagtgatcctgaccgcattgttcctgcgggttaagttttccagatccgcagacgcacccgcttaccaacaagggcagaaccaactctacaatgaacttaatttggggcggagggaagagtacgacgttctggacaaaaggaggggacgagatcccgagatgggcggaaagcctcagcgaaggaagaatccgcaagaggggctttataacgaactccagaaagataaaatggcagaagcctatagtgagattgggatgaagggagaaaggaggaggggtaaaggtcacgatgggttgtaccaaggattgagcacagccactaaagatacctatgatgcgctccacatgcaggccctgccgccaagacgcgccaagagaagcggatctggcgtgaagcagaccctgaatttcgacctgctgaagctggctggcgacgtggaatccaacccaggcccttctagaggccatatggctctgcctgtgacagctctgctgctgcctctggcactgctgcttcatgctgctagacctagccagtttagagtgtcccctctggacagaacctggaacctgggcgagacagtggaactgaagtgccaggtgctgctgagcaaccctacaagcggctgctcctggctgtttcagcctagaggtgcagccgcctctcctacctttctgctgtacctgagccagaacaagcccaaggccgccgaaggactggacacccagagattcagcggcaagagactgggcgacaccttcgtgctgaccctgagcgacttcagaagagagaacgagggctactacttctgtagcgccctgagcaacagcatcatgtacttcagccacttcgtgcccgtgtttctgcccgccaagcctacaacaacccctgctcctagacctcctacaccagctcctacaatcgccagccagcctctgtctctcagacccgaagcctgtagacctgctgctggcggagctgtgcataccagaggactggatttcgcctgcgacatctacatctgggctcctctggctggcacatgtggcgtgctgctgctgtccctggtcatcaccctgtactgcaaccaccggaacaggcggagagtgtgcaagtgccctagacctgtggtcaagagcggcgacaagcctagcctgagcgccagatatgtt

SEQ ID NO: 2619 - DNA, 2568 bp, synthetic construct
  source 1..2568: mol_type = other DNA
atggccttaccagtgaccgccttgctcctgccgctggccttgctgctccacgccgccaggccgggcgttacccagacacctaagttccgggtgctgaaaaccggccagagcatgacactgctgtgcgcccaggacatgaaccacgagtacatgtattggtacagacaggaccccggcatgggcctgagactgatccactattctgtcggcgagggcaccacagccaaaggcgaagttcctgacggctacaacgtgtcccggctgaagaagcagaacttcctgctgggcctcgaaagcgccgctccatctcagaccagcgtgtacttctgtgccagccggggctaccacagactgaacaacgagcagttcttcggccctggcaccagactgacagttctcgaggacctgaagaacgtgttcccacctgaggtggccgtgttcgagcctagcgaggccgagatcagccacacccagaaagccaccctcgtgtgcctggctaccggcttctaccccgaccatgtggaactgtcttggtgggtcaacggcaaagaggtgcacagcggcgtgtgtaccgacccccagccactgaaagaacagcccgccctgaacgacagccggtactgcctgagcagcagactgagagtgtccgccaccttctggcagaacccccggaaccacttcagatgccaggtgcagttctacggcctgagcgagaacgacgagtggacccaggacagagccaagcccgtgacccagatcgtgtctgccgaagcctggggcagagccgattgcggatcccagagcttcggcctgctggaccccaagctgtgctacctgctggatggcatcctgttcatctacggcgtgatcctgaccgccctgttcctgaggagtaagaggagcaggctcctgcacagtgactacatgaacatgactccacgccgccccggacccacccgcaagcattaccagccctatgccccaccacgcgacttcgcagcctatcgctccagagtgaagttcagcagaagcgccgacgcccctgcctaccagcagggacagaaccaactgtacaacgagctgaacctgggcagacgggaagagtacgacgtgctggacaagcggagaggcagggaccctgagatgggcggaaagccccagcggagaaagaacccccaggaaggactgtataacgaactccagaaagacaagatggccgaagcctacagcgagatcggcatgaagggcgagcggagaagaggcaagggccacgatggcctgtaccagggcctgagcaccgccaccaaggacacctatgacgccctgcacatgcaggccctgcctccaagaagggccaagcgatctggatctggagcaacaaacttctcactactcaaacaagcaggtgacgtggaggagaatcccgggcctactagtatggactggatttggcgcatccttttccttgtcggcgctgctaccggcgcgcattccttcgaacagagaaaagaggtggaacaggaccctggacctttcaacgttccagagggcgctaccgtggccttcaactgcacctacagcaatagcgccagccagagcttcttctggtatcggcaggactgccggaaagaacccaagctgctgatgagcgtgtacagcagcggcaacgaggacggcagattcacagcccagctgaacagagccagccagtacatctctctgctgatccgggacagcaagctgagcgatagcgccacctatctgtgcgtggtcaagcctgatcctggcgctggaagctaccagctgacatttggcaagggcaccaagctgtctgtgatccccaatacgcgtatccagaaccctgatcctgccgtgtaccagctgcgggatagcaagagcagcgacaagagcgtgtgtctgttcaccgacttcgacagccagaccaacgtgtcccagagcaaggactccgacgtgtacatcaccgataagtgcgtgctggacatgcggagcatggacttcaagagcaactccgccgtggcctggtccaacaagtccgatttcgcctgcgccaacgccttcaacaacagcattatccccgaggacacattcttcccaagccccgagagcagctgcggtacccagagttttgggttgttggaccctaaattgtgctatctgttggacggaatcctgttcatttacggagtgatcctgaccgcattgttcctgcgggttaagttttccagatccgcagacgcacccgcttaccaacaagggcagaaccaactctacaatgaacttaatttggggcggagggaagagtacgacgttctggacaaaaggaggggacgagatcccgagatgggcggaaagcctcagcgaaggaagaatccgcaagaggggctttataacgaactccagaaagataaaatggcagaagcctatagtgagattgggatgaagggagaaaggaggaggggtaaaggtcacgatgggttgtaccaaggattgagcacagccactaaagatacctatgatgcgctccacatgcaggccctgccgccaaga

SEQ ID NO: 2620 - DNA, 2691 bp, synthetic construct
  source 1..2691: mol_type = other DNA
atggccttaccagtgaccgccttgctcctgccgctggccttgctgctccacgccgccaggccgggcgttacccagacacctaagttccgggtgctgaaaaccggccagagcatgacactgctgtgcgcccaggacatgaaccacgagtacatgtattggtacagacaggaccccggcatgggcctgagactgatccactattctgtcggcgagggcaccacagccaaaggcgaagttcctgacggctacaacgtgtcccggctgaagaagcagaacttcctgctgggcctcgaaagcgccgctccatctcagaccagcgtgtacttctgtgccagccggggctaccacagactgaacaacgagcagttcttcggccctggcaccagactgacagttctcgaggacctgaagaacgtgttcccacctgaggtggccgtgttcgagcctagcgaggccgagatcagccacacccagaaagccaccctcgtgtgcctggctaccggcttctaccccgaccatgtggaactgtcttggtgggtcaacggcaaagaggtgcacagcggcgtgtgtaccgacccccagccactgaaagaacagcccgccctgaacgacagccggtactgcctgagcagcagactgagagtgtccgccaccttctggcagaacccccggaaccacttcagatgccaggtgcagttctacggcctgagcgagaacgacgagtggacccaggacagagccaagcccgtgacccagatcgtgtctgccgaagcctggggcagagccgattgcggatcccagagcttcggcctgctggaccccaagctgtgctacctgctggatggcatcctgttcatctacggcgtgatcctgaccgccctgttcctgaggagtaagaggagcaggctcctgcacagtgactacatgaacatgactccacgccgccccggacccacccgcaagcattaccagccctatgccccaccacgcgacttcgcagcctatcgctccagagtgaagttcagcagaagcgccgacgcccctgcctaccagcagggacagaaccaactgtacaacgagctgaacctgggcagacgggaagagtacgacgtgctggacaagcggagaggcagggaccctgagatgggcggaaagccccagcggagaaagaacccccaggaaggactgtataacgaactccagaaagacaagatggccgaagcctacagcgagatcggcatgaagggcgagcggagaagaggcaagggccacgatggcctgtaccagggcctgagcaccgccaccaaggacacctatgacgccctgcacatgcaggccctgcctccaagaagggccaagcgatctggatctggagcaacaaacttctcactactcaaacaagcaggtgacgtggaggagaatcccgggcctactagtatggactggatttggcgcatccttttccttgtcggcgctgctaccggcgcgcattccttcgaacagagaaaagaggtggaacaggaccctggacctttcaacgttccagagggcgctaccgtggccttcaactgcacctacagcaatagcgccagccagagcttcttctggtatcggcaggactgccggaaagaacccaagctgctgatgagcgtgtacagcagcggcaacgaggacggcagattcacagcccagctgaacagagccagccagtacatctctctgctgatccgggacagcaagctgagcgatagcgccacctatctgtgcgtggtcaagcctgatcctggcgctggaagctaccagctgacatttggcaagggcaccaagctgtctgtgatccccaatacgcgtatccagaaccctgatcctgccgtgtaccagctgcgggatagcaagagcagcgacaagagcgtgtgtctgttcaccgacttcgacagccagaccaacgtgtcccagagcaaggactccgacgtgtacatcaccgataagtgcgtgctggacatgcggagcatggacttcaagagcaactccgccgtggcctggtccaacaagtccgatttcgcctgcgccaacgccttcaacaacagcattatccccgaggacacattcttcccaagccccgagagcagctgcggtacccagagttttgggttgttggaccctaaattgtgctatctgttggacggaatcctgttcatttacggagtgatcctgaccgcattgttcctgaggagcaagcggtcacggctgctccacagcgattacatgaatatgacaccacgaagaccgggtcctactcgcaaacactaccaaccctacgcacctccccgcgactttgcagcgtaccgatctcgggttaagttttccagatccgcagacgcacccgcttaccaacaagggcagaaccaactctacaatgaacttaatttggggcggagggaagagtacgacgttctggacaaaaggaggggacgagatcccgagatgggcggaaagcctcagcgaaggaagaatccgcaagaggggctttataacgaactccagaaagataaaatggcagaagcctatagtgagattgggatgaagggagaaaggaggaggggtaaaggtcacgatgggttgtaccaaggattgagcacagccactaaagatacctatgatgcgctccacatgcaggccctgccgccaaga

SEQ ID NO: 2621 - DNA, 2445 bp, synthetic construct
  source 1..2445: mol_type = other DNA
atggccttaccagtgaccgccttgctcctgccgctggccttgctgctccacgccgccaggccgggcgttacccagacacctaagttccgggtgctgaaaaccggccagagcatgacactgctgtgcgcccaggacatgaaccacgagtacatgtattggtacagacaggaccccggcatgggcctgagactgatccactattctgtcggcgagggcaccacagccaaaggcgaagttcctgacggctacaacgtgtcccggctgaagaagcagaacttcctgctgggcctcgaaagcgccgctccatctcagaccagcgtgtacttctgtgccagccggggctaccacagactgaacaacgagcagttcttcggccctggcaccagactgacagttctcgaggacctgaagaacgtgttcccacctgaggtggccgtgttcgagcctagcgaggccgagatcagccacacccagaaagccaccctcgtgtgcctggctaccggcttctaccccgaccatgtggaactgtcttggtgggtcaacggcaaagaggtgcacagcggcgtgtctaccgacccccagccactgaaagaacagcccgccctgaacgacagccggtactgcctgagcagcagactgagagtgtccgccaccttctggcagaacccccggaaccacttcagatgccaggtgcagttctacggcctgagcgagaacgacgagtggacccaggacagagccaagcccgtgacccagatcgtgtctgccgaagcctggggcagagccgattgcggatcccagagcttcggcctgctggaccccaagctgtgctacctgctggatggcatcctgttcatctacggcgtgatcctgaccgccctgttcctgagagtgaagttcagcagaagcgccgacgcccctgcctaccagcagggacagaaccaactgtacaacgagctgaacctgggcagacgggaagagtacgacgtgctggacaagcggagaggcagggaccctgagatgggcggaaagccccagcggagaaagaacccccaggaaggactgtataacgaactccagaaagacaagatggccgaagcctacagcgagatcggcatgaagggcgagcggagaagaggcaagggccacgatggcctgtaccagggcctgagcaccgccaccaaggacacctatgacgccctgcacatgcaggccctgcctccaagaagggccaagcgatctggatctggagcaacaaacttctcactactcaaacaagcaggtgacgtggaggagaatcccgggcctactagtatggactggatttggcgcatccttttccttgtcggcgctgctaccggcgcgcattccttcgaacagagaaaagaggtggaacaggaccctggacctttcaacgttccagagggcgctaccgtggccttcaactgcacctacagcaatagcgccagccagagcttcttctggtatcggcaggactgccggaaagaacccaagctgctgatgagcgtgtacagcagcggcaacgaggacggcagattcacagcccagctgaacagagccagccagtacatctctctgctgatccgggacagcaagctgagcgatagcgccacctatctgtgcgtggtcaagcctgatcctggcgctggaagctaccagctgacatttggcaagggcaccaagctgtctgtgatccccaatacgcgtatccagaaccctgatcctgccgtgtaccagctgcgggatagcaagagcagcgacaagagcgtgtgtctgttcaccgacttcgacagccagaccaacgtgtcccagagcaaggactccgacgtgtacatcaccgataagaccgtgctggacatgcggagcatggacttcaagagcaactccgccgtggcctggtccaacaagtccgatttcgcctgcgccaacgccttcaacaacagcattatccccgaggacacattcttcccaagccccgagagcagctgcggtacccagagttttgggttgttggaccctaaattgtgctatctgttggacggaatcctgttcatttacggagtgatcctgaccgcattgttcctgcgggttaagttttccagatccgcagacgcacccgcttaccaacaagggcagaaccaactctacaatgaacttaatttggggcggagggaagagtacgacgttctggacaaaaggaggggacgagatcccgagatgggcggaaagcctcagcgaaggaagaatccgcaagaggggctttataacgaactccagaaagataaaatggcagaagcctatagtgagattgggatgaagggagaaaggaggaggggtaaaggtcacgatgggttgtaccaaggattgagcacagccactaaagatacctatgatgcgctccacatgcaggccctgccgccaaga

SEQ ID NO: 2622 - DNA, 3177 bp, synthetic construct
  source 1..3177: mol_type = other DNA
atggccttaccagtgaccgccttgctcctgccgctggccttgctgctccacgccgccaggccgggcgttacccagacacctaagttccgggtgctgaaaaccggccagagcatgacactgctgtgcgcccaggacatgaaccacgagtacatgtattggtacagacaggaccccggcatgggcctgagactgatccactattctgtcggcgagggcaccacagccaaaggcgaagttcctgacggctacaacgtgtcccggctgaagaagcagaacttcctgctgggcctcgaaagcgccgctccatctcagaccagcgtgtacttctgtgccagccggggctaccacagactgaacaacgagcagttcttcggccctggcaccagactgacagttctcgaggacaagcagctggacgccgacgtgtcccccaagcctaccatcttcctgccctctatcgccgagacaaagctccagaaggccggcacctacctgtgcctgctggaaaagttcttcccagatgtgattaagatccactggcaggaaaagaagtccaacaccatcctgggcagccaggaaggcaacaccatgaagaccaacgacacctacatgaagttcagctggctgaccgtgcccgagaagtccctggacaaagaacacagatgcatcgtgcggcacgaaaacaacaagaacggcgtggaccaggaaatcatcttcccacccatcaagaccgatgtgattacaggatcccagagcttcggcctgctggaccccaagctgtgctacctgctggatggcatcctgttcatctacggcgtgatcctgaccgccctgttcctgagagtgaagttcagcagaagcgccgacgcccctgcctaccagcagggacagaaccaactgtacaacgagctgaacctgggcagacgggaagagtacgacgtgctggacaagcggagaggcagggaccctgagatgggcggaaagccccagcggagaaagaacccccaggaaggactgtataacgaactccagaaagacaagatggccgaagcctacagcgagatcggcatgaagggcgagcggagaagaggcaagggccacgatggcctgtaccagggcctgagcaccgccaccaaggacacctatgacgccctgcacatgcaggccctgcctccaagaagggccaagcgatctggatctggagcaacaaacttctcactactcaaacaagcaggtgacgtggaggagaatcccgggcctactagtatggactggatttggcgcatccttttccttgtcggcgctgctaccggcgcgcattccttcgaacagagaaaagaggtggaacaggaccctggacctttcaacgttccagagggcgctaccgtggccttcaactgcacctacagcaatagcgccagccagagcttcttctggtatcggcaggactgccggaaagaacccaagctgctgatgagcgtgtacagcagcggcaacgaggacggcagattcacagcccagctgaacagagccagccagtacatctctctgctgatccgggacagcaagctgagcgatagcgccacctatctgtgcgtggtcaagcctgatcctggcgctggaagctaccagctgacatttggcaagggcaccaagctgtctgtgatccccaatacgcgtagccagcctcacaccaagcccagcgtgttcgtgatgaagaacggcaccaacgtggcctgcctcgtgaaagagttctaccccaaggacatcaggatcaacctggtgtccagcaagaagatcaccgagttcgaccccgccatcgtgatctcccccagcggcaagtacaacgccgtgaagctggggaagtacgaggacagcaacagcgtgacctgctccgtgcagcacgacaacaagaccgtgcacagcaccgactttggtacccagagttttgggttgttggaccctaaattgtgctatctgttggacggaatcctgttcatttacggagtgatcctgaccgcattgttcctgcgggttaagttttccagatccgcagacgcacccgcttaccaacaagggcagaaccaactctacaatgaacttaatttggggcggagggaagagtacgacgttctggacaaaaggaggggacgagatcccgagatgggcggaaagcctcagcgaaggaagaatccgcaagaggggctttataacgaactccagaaagataaaatggcagaagcctatagtgagattgggatgaagggagaaaggaggaggggtaaaggtcacgatgggttgtaccaaggattgagcacagccactaaagatacctatgatgcgctccacatgcaggccctgccgccaagacgcgccaagagaagcggatctggcgtgaagcagaccctgaatttcgacctgctgaagctggctggcgacgtggaatccaacccaggcccttctagaggccatatggctctgcctgtgacagctctgctgctgcctctggcactgctgcttcatgctgctagacctagccagtttagagtgtcccctctggacagaacctggaacctgggcgagacagtggaactgaagtgccaggtgctgctgagcaaccctacaagcggctgctcctggctgtttcagcctagaggtgcagccgcctctcctacctttctgctgtacctgagccagaacaagcccaaggccgccgaaggactggacacccagagattcagcggcaagagactgggcgacaccttcgtgctgaccctgagcgacttcagaagagagaacgagggctactacttctgtagcgccctgagcaacagcatcatgtacttcagccacttcgtgcccgtgtttctgcccgccaagcctacaacaacccctgctcctagacctcctacaccagctcctacaatcgccagccagcctctgtctctcagacccgaagcctgtagacctgctgctggcggagctgtgcataccagaggactggatttcgcctgcgacatctacatctgggctcctctggctggcacatgtggcgtgctgctgctgtccctggtcatcaccctgtactgcaaccaccggaacaggcggagagtgtgcaagtgccctagacctgtggtcaagagcggcgacaagcctagcctgagcgccagatatgtt

SEQ ID NO: 2623 - DNA, 2781 bp, synthetic construct
  source 1..2781: mol_type = other DNA
atggccttaccagtgaccgccttgctcctgccgctggccttgctgctccacgccgccaggccgggcgttacccagacacctaagttccgggtgctgaaaaccggccagagcatgacactgctgtgcgcccaggacatgaaccacgagtacatgtattggtacagacaggaccccggcatgggcctgagactgatccactattctgtcggcgagggcaccacagccaaaggcgaagttcctgacggctacaacgtgtcccggctgaagaagcagaacttcctgctgggcctcgaaagcgccgctccatctcagaccagcgtgtacttctgtgccagccggggctaccacagactgaacaacgagcagttcttcggccctggcaccagactgacagttctcgagggacagcctaaggccaatcctaccgtgacactgttccctccaagcagcgaagaactccaggccaacaaggccacacttgtgtgcctgatctccgacttctaccctggggctgtgacagtggcttggaaggccgatggatctcctgtgaaagccggcgtggaaaccaccaagccatccaagcagagcaacaacaaatacgccgccagctcctacctgagcctgacacctgagcagtggaagtcccacagatcctacagctgccaagtgacccacgaaggcagcaccgtggaaaagacagtggcccctacagagtgcagcacaacacctggcgagagaagtagcctgcctgccttctatcctggcaccagcggctcttgttctggctgtggatctctgagcctgcctctgctggctggactggttgctgctgatgctgtggcctctctgctgattgtgggagccgtgttcctgtgcgccagacctagaagaagccccgctcaagaggacggcaaggtgtacatcaacatgcccggcagaggaagggccaagcgatctggatctggagcaacaaacttctcactactcaaacaagcaggtgacgtggaggagaatcccgggcctactagtatggactggatttggcgcatccttttccttgtcggcgctgctaccggcgcgcattccttcgaacagagaaaagaggtggaacaggaccctggacctttcaacgttccagagggcgctaccgtggccttcaactgcacctacagcaatagcgccagccagagcttcttctggtatcggcaggactgccggaaagaacccaagctgctgatgagcgtgtacagcagcggcaacgaggacggcagattcacagcccagctgaacagagccagccagtacatctctctgctgatccgggacagcaagctgagcgatagcgccacctatctgtgcgtggtcaagcctgatcctggcgctggaagctaccagctgacatttggcaagggcaccaagctgtctgtgatccccaatacgcgtgcctctacaaagggaccctccgtgtttcctctggctcccagcagcaagtctacaagcggaggaacagccgctctgggctgcctggtcaaggattactttcccgagcctgtgaccgtgtcctggaatagcggagcactgacaagcggcgtgcacacctttccagccgtgctgcaaagcagcggcctgtactctctgagcagcgtggtcacagtgcctagctctagcctgggcacccagacctacatctgcaatgtgaaccacaagcctagcaacaccaaggtggacaagagagtggaacccaagagctgtacaacgccgggcgaaaggagttccttgccggccttttaccccggcacaagcggaagctgtagtgggtgtggaagcctcagcctcccacttcttgcgggcctcgtcgcggcagatgcagtagcttcacttcttattgtaggcgcggtatttctctgtgctcgaccaaggaggtcacccgctcaggaggatggtaaggtgtatataaatatgccaggacgcggacgcgccaagagaagcggatctggcgtgaagcagaccctgaatttcgacctgctgaagctggctggcgacgtggaatccaacccaggcccttctagaggccatatggctctgcctgtgacagctctgctgctgcctctggcactgctgcttcatgctgctagacctagccagtttagagtgtcccctctggacagaacctggaacctgggcgagacagtggaactgaagtgccaggtgctgctgagcaaccctacaagcggctgctcctggctgtttcagcctagaggtgcagccgcctctcctacctttctgctgtacctgagccagaacaagcccaaggccgccgaaggactggacacccagagattcagcggcaagagactgggcgacaccttcgtgctgaccctgagcgacttcagaagagagaacgagggctactacttctgtagcgccctgagcaacagcatcatgtacttcagccacttcgtgcccgtgtttctgcccgccaagcctacaacaacccctgctcctagacctcctacaccagctcctacaatcgccagccagcctctgtctctcagacccgaagcctgtagacctgctgctggcggagctgtgcataccagaggactggatttcgcctgcgacatctacatctgggctcctctggctggcacatgtggcgtgctgctgctgtccctggtcatcaccctgtactgcaaccaccggaacaggcggagagtgtgcaagtgccctagacctgtggtcaagagcggcgacaagcctagcctgagcgccagatatgtt

SEQ ID NO: 2624 - DNA, 2268 bp, synthetic construct
  source 1..2268: mol_type = other DNA
atggccttaccagtgaccgccttgctcctgccgctggccttgctgctccacgccgccaggccgggcgttacccagacacctaagttccgggtgctgaaaaccggccagagcatgacactgctgtgcgcccaggacatgaaccacgagtacatgtattggtacagacaggaccccggcatgggcctgagactgatccactattctgtcggcgagggcaccacagccaaaggcgaagttcctgacggctacaacgtgtcccggctgaagaagcagaacttcctgctgggcctcgaaagcgccgctccatctcagaccagcgtgtacttctgtgccagccggggctaccacagactgaacaacgagcagttcttcggccctggcaccagactgacagttctcgagggcgacatcgagaacaccagtctggcccctgaggaccctacctttcctgccgatacctggggcacctacctgctgaccacagagacaggactccagaaagatcacgccctgtgggaccacacagcccagaacctgctgagaatgggcctcgcctttctggtgctggttgccctcgtgtggttcctggtggaagattggctgagccggaagcggacaagagagagagccagcagagcctctacctgggagggaagaagaaggctgaacacccagacacttagggccaagcgatctggatctggagcaacaaacttctcactactcaaacaagcaggtgacgtggaggagaatcccgggcctactagtatggactggatttggcgcatccttttccttgtcggcgctgctaccggcgcgcattccttcgaacagagaaaagaggtggaacaggaccctggacctttcaacgttccagagggcgctaccgtggccttcaactgcacctacagcaatagcgccagccagagcttcttctggtatcggcaggactgccggaaagaacccaagctgctgatgagcgtgtacagcagcggcaacgaggacggcagattcacagcccagctgaacagagccagccagtacatctctctgctgatccgggacagcaagctgagcgatagcgccacctatctgtgcgtggtcaagcctgatcctggcgctggaagctaccagctgacatttggcaagggcaccaagctgtctgtgatccccaatacgcgtggcgatattgagaatacctctctggccccagaagatcctacattccccgccgacacatggggaacatatctgctgacaaccgaaaccgggctgcaaaaggaccatgctctgtgggatcataccgctcagaatctgcttcggatggggcttgcattcctggtcctggtggctcttgtctggtttctggtcgaggactggctgtcccggaagagaaccagagaaagagcttccagggccagcacctgggaaggcagacgcagactgaatactcagaccctgcgcgccaagagaagcggatctggcgtgaagcagaccctgaatttcgacctgctgaagctggctggcgacgtggaatccaacccaggcccttctagaggccatatggctctgcctgtgacagctctgctgctgcctctggcactgctgcttcatgctgctagacctagccagtttagagtgtcccctctggacagaacctggaacctgggcgagacagtggaactgaagtgccaggtgctgctgagcaaccctacaagcggctgctcctggctgtttcagcctagaggtgcagccgcctctcctacctttctgctgtacctgagccagaacaagcccaaggccgccgaaggactggacacccagagattcagcggcaagagactgggcgacaccttcgtgctgaccctgagcgacttcagaagagagaacgagggctactacttctgtagcgccctgagcaacagcatcatgtacttcagccacttcgtgcccgtgtttctgcccgccaagcctacaacaacccctgctcctagacctcctacaccagctcctacaatcgccagccagcctctgtctctcagacccgaagcctgtagacctgctgctggcggagctgtgcataccagaggactggatttcgcctgcgacatctacatctgggctcctctggctggcacatgtggcgtgctgctgctgtccctggtcatcaccctgtactgcaaccaccggaacaggcggagagtgtgcaagtgccctagacctgtggtcaagagcggcgacaagcctagcctgagcgccagatatgtt

SEQ ID NO: 2625 - DNA, 2100 bp, synthetic construct
  source 1..2100: mol_type = other DNA
atggccttaccagtgaccgccttgctcctgccgctggccttgctgctccacgccgccaggccgggcgttacccagacacctaagttccgggtgctgaaaaccggccagagcatgacactgctgtgcgcccaggacatgaaccacgagtacatgtattggtacagacaggaccccggcatgggcctgagactgatccactattctgtcggcgagggcaccacagccaaaggcgaagttcctgacggctacaacgtgtcccggctgaagaagcagaacttcctgctgggcctcgaaagcgccgctccatctcagaccagcgtgtacttctgtgccagccggggctaccacagactgaacaacgagcagttcttcggccctggcaccagactgacagttctcgagatcactcaaggtttggcagtgtcaaccatctcatcattctttccacctggctaccaagtgtccttctgcctggtcatggtgctgctgttcgccgtggataccggcctgtacttcagcgtcaagaccaacatccggtccagcaccagagactggaaggaccacaagttcaagtggcggaaggaccctcaggacaagagggccaagcgatctggatctggagcaacaaacttctcactactcaaacaagcaggtgacgtggaggagaatcccgggcctactagtatggactggatttggcgcatccttttccttgtcggcgctgctaccggcgcgcattccttcgaacagagaaaagaggtggaacaggaccctggacctttcaacgttccagagggcgctaccgtggccttcaactgcacctacagcaatagcgccagccagagcttcttctggtatcggcaggactgccggaaagaacccaagctgctgatgagcgtgtacagcagcggcaacgaggacggcagattcacagcccagctgaacagagccagccagtacatctctctgctgatccgggacagcaagctgagcgatagcgccacctatctgtgcgtggtcaagcctgatcctggcgctggaagctaccagctgacatttggcaagggcaccaagctgtctgtgatccccaatacgcgtatcacccagggcctggccgtgtctaccatcagcagctttttcccacccggctaccaggtgtccttctgcctcgtgatggtgctgctgttcgccgtggacaccggcctgtacttcagcgtgaaaacaaacatccggtccagcaccagagactggaaggaccacaagttcaagtggcggaaggacccccaggacaagcgcgccaagagaagcggatctggcgtgaagcagaccctgaatttcgacctgctgaagctggctggcgacgtggaatccaacccaggcccttctagaggccatatggctctgcctgtgacagctctgctgctgcctctggcactgctgcttcatgctgctagacctagccagtttagagtgtcccctctggacagaacctggaacctgggcgagacagtggaactgaagtgccaggtgctgctgagcaaccctacaagcggctgctcctggctgtttcagcctagaggtgcagccgcctctcctacctttctgctgtacctgagccagaacaagcccaaggccgccgaaggactggacacccagagattcagcggcaagagactgggcgacaccttcgtgctgaccctgagcgacttcagaagagagaacgagggctactacttctgtagcgccctgagcaacagcatcatgtacttcagccacttcgtgcccgtgtttctgcccgccaagcctacaacaacccctgctcctagacctcctacaccagctcctacaatcgccagccagcctctgtctctcagacccgaagcctgtagacctgctgctggcggagctgtgcataccagaggactggatttcgcctgcgacatctacatctgggctcctctggctggcacatgtggcgtgctgctgctgtccctggtcatcaccctgtactgcaaccaccggaacaggcggagagtgtgcaagtgccctagacctgtggtcaagagcggcgacaagcctagcctgagcgccagatatgtt

SEQ ID NO: 2626 - DNA, 2385 bp, synthetic construct
  source 1..2385: mol_type = other DNA
atggccttaccagtgaccgccttgctcctgccgctggccttgctgctccacgccgccaggccggacgtgacccagacacctcggaacagaatcaccaagaccggcaagcggatcatgctggaatgcagccagaccaagggccacgaccggatgtactggtacagacaggaccctggcctgggcctgagactgatctactacagcttcgacgtgaaggacatcaacaagggcgagatcagcgacggctacagcgtgtcaagacaggctcaggccaagttcagcctgtctctggaaagcgccattcctaaccagacagccctgtacttctgtgccacaagcggccagggcgcttacgaggaacagttctttggccctggcaccagactgacagttggacagcctaaggccaatcctaccgtgacactgttccctccaagcagcgaagaactccaggccaacaaggccacacttgtgtgcctgatctccgacttctaccctggggctgtgacagtggcttggaaggccgatggatctcctgtgaaagccggcgtggaaaccaccaagccatccaagcagagcaacaacaaatacgccgccagctcctacctgagcctgacacctgagcagtggaagtcccacagatcctacagctgccaagtgacccacgaaggcagcaccgtggaaaagacagtggcccctacagagtgcagcggatcccagagcttcggcctgctggaccccaagctgtgctacctgctggatggcatcctgttcatctacggcgtgatcctgaccgccctgttcctgagagtgaagttcagcagaagcgccgacgcccctgcctaccagcagggacagaaccaactgtacaacgagctgaacctgggcagacgggaagagtacgacgtgctggacaagcggagaggcagggaccctgagatgggcggaaagccccagcggagaaagaacccccaggaaggactgtataacgaactccagaaagacaagatggccgaagcctacagcgagatcggcatgaagggcgagcggagaagaggcaagggccacgatggcctgtaccagggcctgagcaccgccaccaaggacacctatgacgccctgcacatgcaggccctgcctccaagaagggccaagcgatctggatctggagcaacaaacttctcactactcaaacaagcaggtgacgtggaggagaatcccgggcctactagtatggactggatttggcgcatccttttccttgtcggcgctgctaccggcgcgcattccttcgaaaagaaccaggtggaacagagccctcagagcctgattatcctggaaggcaagaactgcaccctccagtgcaactacaccgtgtctcccttcagcaacctgcggtggtacaagcaggatacaggcagaggccctgtgtctctgaccatcctgaccttcagcgagaacaccaagagcaacggcagatacaccgccacactggacgccgatacaaagcagagcagcctgcacatcacagccagccagctgagcgatagcgccagctacatctgtgtggtgtctggcggcacagacagctggggcaaactccagtttggagctggcacacaggtggtggtcacccctgatgcctctacaaagggaccctccgtgtttcctctggctcccagcagcaagtctacaagcggaggaacagccgctctgggctgcctggtcaaggattactttcccgagcctgtgaccgtgtcctggaatagcggagcactgacaagcggcgtgcacacctttccagccgtgctgcaaagcagcggcctgtactctctgagcagcgtggtcacagtgcctagctctagcctgggcacccagacctacatctgcaatgtgaaccacaagcctagcaacaccaaggtggacaagagagtggaacccaagagctgtggtacccagagttttgggttgttggaccctaaattgtgctatctgttggacggaatcctgttcatttacggagtgatcctgaccgcattgttcctgcgggttaagttttccagatccgcagacgcacccgcttaccaacaagggcagaaccaactctacaatgaacttaatttggggcggagggaagagtacgacgttctggacaaaaggaggggacgagatcccgagatgggcggaaagcctcagcgaaggaagaatccgcaagaggggctttataacgaactccagaaagataaaatggcagaagcctatagtgagattgggatgaagggagaaaggaggaggggtaaaggtcacgatgggttgtaccaaggattgagcacagccactaaagatacctatgatgcgctccacatgcaggccctgccgccaaga

SEQ ID NO: 2627 - DNA, 1683 bp, synthetic construct
  source 1..1683: mol_type = other DNA
atggccttaccagtgaccgccttgctcctgccgctggccttgctgctccacgccgccaggccggacgtgacccagacacctcggaacagaatcaccaagaccggcaagcggatcatgctggaatgcagccagaccaagggccacgaccggatgtactggtacagacaggaccctggcctgggcctgagactgatctactacagcttcgacgtgaaggacatcaacaagggcgagatcagcgacggctacagcgtgtcaagacaggctcaggccaagttcagcctgtctctggaaagcgccattcctaaccagacagccctgtacttctgtgccacaagcggccagggcgcttacgaggaacagttctttggccctggcaccagactgacagttctcgagcagagcttcggcctgctggaccccaagctgtgctacctgctggatggcatcctgttcatctacggcgtgatcctgaccgccctgttcctgagagtgaagttcagcagaagcgccgacgcccctgcctaccagcagggacagaaccaactgtacaacgagctgaacctgggcagacgggaagagtacgacgtgctggacaagcggagaggcagggaccctgagatgggcggaaagccccagcggagaaagaacccccaggaaggactgtataacgaactccagaaagacaagatggccgaagcctacagcgagatcggcatgaagggcgagcggagaagaggcaagggccacgatggcctgtaccagggcctgagcaccgccaccaaggacacctatgacgccctgcacatgcaggccctgcctccaagaagggccaagcgatctggatctggagcaacaaacttctcactactcaaacaagcaggtgacgtggaggagaatcccgggcctactagtatggactggatttggcgcatccttttccttgtcggcgctgctaccggcgcgcattccttcgaaaagaaccaggtggaacagagccctcagagcctgattatcctggaaggcaagaactgcaccctccagtgcaactacaccgtgtctcccttcagcaacctgcggtggtacaagcaggatacaggcagaggccctgtgtctctgaccatcctgaccttcagcgagaacaccaagagcaacggcagatacaccgccacactggacgccgatacaaagcagagcagcctgcacatcacagccagccagctgagcgatagcgccagctacatctgtgtggtgtctggcggcacagacagctggggcaaactccagtttggagctggcacacaggtggtggtcacccctgatacgcgtcagagttttgggttgttggaccctaaattgtgctatctgttggacggaatcctgttcatttacggagtgatcctgaccgcattgttcctgcgggttaagttttccagatccgcagacgcacccgcttaccaacaagggcagaaccaactctacaatgaacttaatttggggcggagggaagagtacgacgttctggacaaaaggaggggacgagatcccgagatgggcggaaagcctcagcgaaggaagaatccgcaagaggggctttataacgaactccagaaagataaaatggcagaagcctatagtgagattgggatgaagggagaaaggaggaggggtaaaggtcacgat

SEQ ID NO: 2628 - DNA, 2835 bp, synthetic construct
  source 1..2835: mol_type = other DNA
atggccttaccagtgaccgccttgctcctgccgctggccttgctgctccacgccgccaggccggacgtgacccagacacctcggaacagaatcaccaagaccggcaagcggatcatgctggaatgcagccagaccaagggccacgaccggatgtactggtacagacaggaccctggcctgggcctgagactgatctactacagcttcgacgtgaaggacatcaacaagggcgagatcagcgacggctacagcgtgtcaagacaggctcaggccaagttcagcctgtctctggaaagcgccattcctaaccagacagccctgtacttctgtgccacaagcggccagggcgcttacgaggaacagttctttggccctggcaccagactgacagttctcgagacaacacctggcgagagaagtagcctgcctgccttctatcctggcaccagcggctcttgttctggctgtggatctctgagcctgcctctgctggctggactggttgctgctgatgctgtggcctctctgctgattgtgggagccgtgttcctgtgcgccagacctagaagaagccccgctcaagaggacggcaaggtgtacatcaacatgcccggcagaggaagcactagtagagtgaagttcagcagaagcgccgacgcccctgcctaccagcagggacagaaccaactgtacaacgagctgaacctgggcagacgggaagagtacgacgtgctggacaagcggagaggcagggaccctgagatgggcggaaagccccagcggagaaagaacccccaggaaggactgtataacgaactccagaaagacaagatggccgaagcctacagcgagatcggcatgaagggcgagcggagaagaggcaagggccacgatggcctgtaccagggcctgagcaccgccaccaaggacacctatgacgccctgcacatgcaggccctgcctccaagaagggccaagcgatctggatctggagcaacaaacttctcactactcaaacaagcaggtgacgtggaggagaatcccgggcctatggactggatttggcgcatccttttccttgtcggcgctgctaccggcgcgcattccttcgaaaagaaccaggtggaacagagccctcagagcctgattatcctggaaggcaagaactgcaccctccagtgcaactacaccgtgtctcccttcagcaacctgcggtggtacaagcaggatacaggcagaggccctgtgtctctgaccatcctgaccttcagcgagaacaccaagagcaacggcagatacaccgccacactggacgccgatacaaagcagagcagcctgcacatcacagccagccagctgagcgatagcgccagctacatctgtgtggtgtctggcggcacagacagctggggcaaactccagtttggagctggcacacaggtggtggtcacccctgatacgcgtacaacgccgggcgaaaggagttccttgccggccttttaccccggcacaagcggaagctgtagtgggtgtggaagcctcagcctcccacttcttgcgggcctcgtcgcggcagatgcagtagcttcacttcttattgtaggcgcggtatttctctgtgctcgaccaaggaggtcacccgctcaggaggatggtaaggtgtatataaatatgccaggacgcggaagctctagacgggttaagttttccagatccgcagacgcacccgcttaccaacaagggcagaaccaactctacaatgaacttaatttggggcggagggaagagtacgacgttctggacaaaaggaggggacgagatcccgagatgggcggaaagcctcagcgaaggaagaatccgcaagaggggctttataacgaactccagaaagataaaatggcagaagcctatagtgagattgggatgaagggagaaaggaggaggggtaaaggtcacgatgggttgtaccaaggattgagcacagccactaaagatacctatgatgcgctccacatgcaggccctgccgccaagacgcgccaagagaagcggatctggcgtgaagcagaccctgaatttcgacctgctgaagctggctggcgacgtggaatccaacccaggccctggccatatggctctgcctgtgacagctctgctgctgcctctggcactgctgcttcatgctgctagacctagccagtttagagtgtcccctctggacagaacctggaacctgggcgagacagtggaactgaagtgccaggtgctgctgagcaaccctacaagcggctgctcctggctgtttcagcctagaggtgcagccgcctctcctacctttctgctgtacctgagccagaacaagcccaaggccgccgaaggactggacacccagagattcagcggcaagagactgggcgacaccttcgtgctgaccctgagcgacttcagaagagagaacgagggctactacttctgtagcgccctgagcaacagcatcatgtacttcagccacttcgtgcccgtgtttctgcccgccaagcctacaacaacccctgctcctagacctcctacaccagctcctacaatcgccagccagcctctgtctctcagacccgaagcctgtagacctgctgctggcggagctgtgcataccagaggactggatttcgcctgcgacatctacatctgggctcctctggctggcacatgtggcgtgctgctgctgtccctggtcatcaccctgtactgcaaccaccggaacaggcggagagtgtgcaagtgccctagacctgtggtcaagagcggcgacaagcctagcctgagcgccagatatgtt

SEQ ID NO: 2629 - DNA, 2835 bp, synthetic construct; identical to SEQ ID NO: 2628
  source 1..2835: mol_type = other DNA

SEQ ID NO: 2630 - DNA, 3333 bp, synthetic construct
  source 1..3333: mol_type = other DNA
atggccttaccagtgaccgccttgctcctgccgctggccttgctgctccacgccgccaggccggacgtgacccagacacctcggaacagaatcaccaagaccggcaagcggatcatgctggaatgcagccagaccaagggccacgaccggatgtactggtacagacaggaccctggcctgggcctgagactgatctactacagcttcgacgtgaaggacatcaacaagggcgagatcagcgacggctacagcgtgtcaagacaggctcaggccaagttcagcctgtctctggaaagcgccattcctaaccagacagccctgtacttctgtgccacaagcggccagggcgcttacgaggaacagttctttggccctggcaccagactgacagttctcgagggacagcctaaggccaatcctaccgtgacactgttccctccaagcagcgaagaactccaggccaacaaggccacacttgtgtgcctgatctccgacttctaccctggggctgtgacagtggcttggaaggccgatggatctcctgtgaaagccggcgtggaaaccaccaagccatccaagcagagcaacaacaaatacgccgccagctcctacctgagcctgacacctgagcagtggaagtcccacagatcctacagctgccaagtgacccacgaaggcagcaccgtggaaaagacagtggcccctacagagtgcagcggatccacaacacctggcgagagaagtagcctgcctgccttctatcctggcaccagcggctcttgttctggctgtggatctctgagcctgcctctgctggctggactggttgctgctgatgctgtggcctctctgctgattgtgggagccgtgttcctgtgcgccagacctagaagaagccccgctcaagaggacggcaaggtgtacatcaacatgcccggcagaggaagcactagtagagtgaagttcagcagaagcgccgacgcccctgcctaccagcagggacagaaccaactgtacaacgagctgaacctgggcagacgggaagagtacgacgtgctggacaagcggagaggcagggaccctgagatgggcggaaagccccagcggagaaagaacccccaggaaggactgtataacgaactccagaaagacaagatggccgaagcctacagcgagatcggcatgaagggcgagcggagaagaggcaagggccacgatggcctgtaccagggcctgagcaccgccaccaaggacacctatgacgccctgcacatgcaggccctgcctccaagaagggccaagcgatctggatctggagcaacaaacttctcactactcaaacaagcaggtgacgtggaggagaatcccgggcctatggactggatttggcgcatccttttccttgtcggcgctgctaccggcgcgcattccttcgaaaagaaccaggtggaacagagccctcagagcctgattatcctggaaggcaagaactgcaccctccagtgcaactacaccgtgtctcccttcagcaacctgcggtggtacaagcaggatacaggcagaggccctgtgtctctgaccatcctgaccttcagcgagaacaccaagagcaacggcagatacaccgccacactggacgccgatacaaagcagagcagcctgcacatcacagccagccagctgagcgatagcgccagctacatctgtgtggtgtctggcggcacagacagctggggcaaactccagtttggagctggcacacaggtggtggtcacccctgatacgcgtgcctctacaaagggaccctccgtgtttcctctggctcccagcagcaagtctacaagcggaggaacagccgctctgggctgcctggtcaaggattactttcccgagcctgtgaccgtgtcctggaatagcggagcactgacaagcggcgtgcacacctttccagccgtgctgcaaagcagcggcctgtactctctgagcagcgtggtcacagtgcctagctctagcctgggcacccagacctacatctgcaatgtgaaccacaagcctagcaacaccaaggtggacaagagagtggaacccaagagctgtggtaccacaacgccgggcgaaaggagttccttgccggccttttaccccggcacaagcggaagctgtagtgggtgtggaagcctcagcctcccacttcttgcgggcctcgtcgcggcagatgcagtagcttcacttcttattgtaggcgcggtatttctctgtgctcgaccaaggaggtcacccgctcaggaggatggtaaggtgtatataaatatgccaggacgcggaagctctagacgggttaagttttccagatccgcagacgcacccgcttaccaacaagggcagaaccaactctacaatgaacttaatttggggcggagggaagagtacgacgttctggacaaaaggaggggacgagatcccgagatgggcggaaagcctcagcgaaggaagaatccgcaagaggggctttataacgaactccagaaagataaaatggcagaagcctatagtgagattgggatgaagggagaaaggaggaggggtaaaggtcacgatgggttgtaccaaggattgagcacagccactaaagatacctatgatgcgctccacatgcaggccctgccgccaagacgcgccaagagaagcggatctggcgtgaagcagaccctgaatttcgacctgctgaagctggctggcgacgtggaatccaacccaggccctggccatatggctacctacgaggtgctgtgcgaggtggcaagaaagctgggcaccgacgacagagaagtggtgctgttcctgctgaacgtgttcatccctcagcctacactggcccagctgatcggtgcactgagagccctgaaagaggaaggccggctgacctttcctctgctggccgaatgcctgttcagagccggaagaagggatctgctgcgggacctgctgcatctggaccccagatttctggaaagacacctggccggcaccatgagctacttcagcccttaccagctgaccgtgctgcacgttgacggcgaactgtgcgccagagatattcggagcctgatcttcctgagcaaggacaccatcggcagccggtctacccctcagacatttctgcactgggtgtactgcatggaaaacctggacctgctcggccccacagatgtggatgccctgatgtccatgctgagaagcctgagcagagtggacctccagagacaggtgcagacactgatgggactgcacctgagcggacctagccacagccagcactacagacacacccct

SEQ ID NO: 2631 - DNA, 3492 bp, synthetic construct
  source 1..3492: mol_type = other DNA
atggccttaccagtgaccgccttgctcctgccgctggccttgctgctccacgccgccaggccggacgtgacccagacacctcggaacagaatcaccaagaccggcaagcggatcatgctggaatgcagccagaccaagggccacgaccggatgtactggtacagacaggaccctggcctgggcctgagactgatctactacagcttcgacgtgaaggacatcaacaagggcgagatcagcgacggctacagcgtgtcaagacaggctcaggccaagttcagcctgtctctggaaagcgccattcctaaccagacagccctgtacttctgtgccacaagcggccagggcgcttacgaggaacagttctttggccctggcaccagactgacagttctcgagggacagcctaaggccaatcctaccgtgacactgttccctccaagcagcgaagaactccaggccaacaaggccacacttgtgtgcctgatctccgacttctaccctggggctgtgacagtggcttggaaggccgatggatctcctgtgaaagccggcgtggaaaccaccaagccatccaagcagagcaacaacaaatacgccgccagctcctacctgagcctgacacctgagcagtggaagtcccacagatcctacagctgccaagtgacccacgaaggcagcaccgtggaaaagacagtggcccctacagagtgcagcggatccacaacacctggcgagagaagtagcctgcctgccttctatcctggcaccagcggctcttgttctggctgtggatctctgagcctgcctctgctggctggactggttgctgctgatgctgtggcctctctgctgattgtgggagccgtgttcctgtgcgccagacctagaagaagccccgctcaagaggacggcaaggtgtacatcaacatgcccggcagaggaagcactagtagagtgaagttcagcagaagcgccgacgcccctgcctaccagcagggacagaaccaactgtacaacgagctgaacctgggcagacgggaagagtacgacgtgctggacaagcggagaggcagggaccctgagatgggcggaaagccccagcggagaaagaacccccaggaaggactgtataacgaactccagaaagacaagatggccgaagcctacagcgagatcggcatgaagggcgagcggagaagaggcaagggccacgatggcctgtaccagggcctgagcaccgccaccaaggacacctatgacgccctgcacatgcaggccctgcctccaagaagggccaagcgatctggatctggagcaacaaacttctcactactcaaacaagcaggtgacgtggaggagaatcccgggcctatggactggatttggcgcatccttttccttgtcggcgctgctaccggcgcgcattccttcgaaaagaaccaggtggaacagagccctcagagcctgattatcctggaaggcaagaactgcaccctccagtgcaactacaccgtgtctcccttcagcaacctgcggtggtacaagcaggatacaggcagaggccctgtgtctctgaccatcctgaccttcagcgagaacaccaagagcaacggcagatacaccgccacactggacgccgatacaaagcagagcagcctgcacatcacagccagccagctgagcgatagcgccagctacatctgtgtggtgtctggcggcacagacagctggggcaaactccagtttggagctggcacacaggtggtggtcacccctgatacgcgtgcctctacaaagggaccctccgtgtttcctctggctcccagcagcaagtctacaagcggaggaacagccgctctgggctgcctggtcaaggattactttcccgagcctgtgaccgtgtcctggaatagcggagcactgacaagcggcgtgcacacctttccagccgtgctgcaaagcagcggcctgtactctctgagcagcgtggtcacagtgcctagctctagcctgggcacccagacctacatctgcaatgtgaaccacaagcctagcaacaccaaggtggacaagagagtggaacccaagagctgtggtaccacaacgccgggcgaaaggagttccttgccggccttttaccccggcacaagcggaagctgtagtgggtgtggaagcctcagcctcccacttcttgcgggcctcgtcgcggcagatgcagtagcttcacttcttattgtaggcgcggtatttctctgtgctcgaccaaggaggtcacccgctcaggaggatggtaaggtgtatataaatatgccaggacgcggaagctctagacgggttaagttttccagatccgcagacgcacccgcttaccaacaagggcagaaccaactctacaatgaacttaatttggggcggagggaagagtacgacgttctggacaaaaggaggggacgagatcccgagatgggcggaaagcctcagcgaaggaagaatccgcaagaggggctttataacgaactccagaaagataaaatggcagaagcctatagtgagattgggatgaagggagaaaggaggaggggtaaaggtcacgatgggttgtaccaaggattgagcacagccactaaagatacctatgatgcgctccacatgcaggccctgccgccaagacgcgccaagagaagcggatctggcgtgaagcagaccctgaatttcgacctgctgaagctggctggcgacgtggaatccaacccaggccctggccatatgtccgactccaaggaggtccctagccttccatttttgcgacacttgctcgaagagttggacagccatgaggacagcttgctgctgtttctgtgtcacgacgcggccccgggctgcacgacggtcacgcaagctttgtgctcgcttagccaacagcgcaagctgaccctcgcggctctggtcgagatgctctacgtgctgcagcgtatggatcttctcaagagccgcttcgggctcagcaaggagggggccgagcaattgctgggcacaagctttctcacgcgctaccgcaagctcatggtttgcgtgggtgaggagctcgactcgagcgagctacgcgctctacgcttgttcgcgtgcaacctgaatccgagcctgagcacggcgctttctgagagcagccgctttgtcgagcttgtactcgcgcttgaaaacgtaggactcgtctcgccatcgagtgtttccgtgcttgcggacatgttgcgcactcttcggcgcctcgatttgtgccagcagcttgttgagtacgaacaacaagagcaagccaggtaccgttactgttacgcggcctcgccctcattgccagttcgtacgttacgtcgggggcacggcgcgagtgaacacgagcagctgtgcatgcccgtgcaagaatcctctgacagccccgagctgctgcgcacgcccgtacaagaatcctccagcgacagccccgagcaaacgact

SEQ ID NO: 2632 - DNA, 3474 bp, synthetic construct
  source 1..3474: mol_type = other DNA
atggccttaccagtgaccgccttgctcctgccgctggccttgctgctccacgccgccaggccggacgtgacccagacacctcggaacagaatcaccaagaccggcaagcggatcatgctggaatgcagccagaccaagggccacgaccggatgtactggtacagacaggaccctggcctgggcctgagactgatctactacagcttcgacgtgaaggacatcaacaagggcgagatcagcgacggctacagcgtgtcaagacaggctcaggccaagttcagcctgtctctggaaagcgccattcctaaccagacagccctgtacttctgtgccacaagcggccagggcgcttacgaggaacagttctttggccctggcaccagactgacagttctcgagggacagcctaaggccaatcctaccgtgacactgttccctccaagcagcgaagaactccaggccaacaaggccacacttgtgtgcctgatctccgacttctaccctggggctgtgacagtggcttggaaggccgatggatctcctgtgaaagccggcgtggaaaccaccaagccatccaagcagagcaacaacaaatacgccgccagctcctacctgagcctgacacctgagcagtggaagtcccacagatcctacagctgccaagtgacccacgaaggcagcaccgtggaaaagacagtggcccctacagagtgcagcggatccacaacacctggcgagagaagtagcctgcctgccttctatcctggcaccagcggctcttgttctggctgtggatctctgagcctgcctctgctggctggactggttgctgctgatgctgtggcctctctgctgattgtgggagccgtgttcctgtgcgccagacctagaagaagccccgctcaagaggacggcaaggtgtacatcaacatgcccggcagaggaagcactagtagagtgaagttcagcagaagcgccgacgcccctgcctaccagcagggacagaaccaactgtacaacgagctgaacctgggcagacgggaagagtacgacgtgctggacaagcggagaggcagggaccctgagatgggcggaaagccccagcggagaaagaacccccaggaaggactgtataacgaactccagaaagacaagatggccgaagcctacagcgagatcggcatgaagggcgagcggagaagaggcaagggccacgatggcctgtaccagggcctgagcaccgccaccaaggacacctatgacgccctgcacatgcaggccctgcctccaagaagggccaagcgatctggatctggagcaacaaacttctcactactcaaacaagcaggtgacgtggaggagaatcccgggcctatggactggatttggcgcatccttttccttgtcggcgctgctaccggcgcgcattccttcgaaaagaaccaggtggaacagagccctcagagcctgattatcctggaaggcaagaactgcaccctccagtgcaactacaccgtgtctcccttcagcaacctgcggtggtacaagcaggatacaggcagaggccctgtgtctctgaccatcctgaccttcagcgagaacaccaagagcaacggcagatacaccgccacactggacgccgatacaaagcagagcagcctgcacatcacagccagccagctgagcgatagcgccagctacatctgtgtggtgtctggcggcacagacagctggggcaaactccagtttggagctggcacacaggtggtggtcacccctgatacgcgtgcctctacaaagggaccctccgtgtttcctctggctcccagcagcaagtctacaagcggaggaacagccgctctgggctgcctggtcaaggattactttcccgagcctgtgaccgtgtcctggaatagcggagcactgacaagcggcgtgcacacctttccagccgtgctgcaaagcagcggcctgtactctctgagcagcgtggtcacagtgcctagctctagcctgggcacccagacctacatctgcaatgtgaaccacaagcctagcaacaccaaggtggacaagagagtggaacccaagagctgtggtaccacaacgccgggcgaaaggagttccttgccggccttttaccccggcacaagcggaagctgtagtgggtgtggaagcctcagcctcccacttcttgcgggcctcgtcgcggcagatgcagtagcttcacttcttattgtaggcgcggtatttctctgtgctcgaccaaggaggtcacccgctcaggaggatggtaaggtgtatataaatatgccaggacgcggaagctctagacgggttaagttttccagatccgcagacgcacccgcttaccaacaagggcagaaccaactctacaatgaacttaatttggggcggagggaagagtacgacgttctggacaaaaggaggggacgagatcccgagatgggcggaaagcctcagcgaaggaagaatccgcaagaggggctttataacgaactccagaaagataaaatggcagaagcctatagtgagattgggatgaagggagaaaggaggaggggtaaaggtcacgatgggttgtaccaaggattgagcacagccactaaagatacctatgatgcgctccacatgcaggccctgccgccaagacgcgccaagagaagcggatctggcgtgaagcagaccctgaatttcgacctgctgaagctggctggcgacgtggaatccaacccaggccctggccatatggctctgcctgtgacagctctgctgctgcctctggcactgctgcttcatgctgctagacctagccagtttagagtgtcccctctggacagaacctggaacctgggcgagacagtggaactgaagtgccaggtgctgctgagcaaccctacaagcggctgctcctggctgtttcagcctagaggtgcagccgcctctcctacctttctgctgtacctgagccagaacaagcccaaggccgccgaaggactggacacccagagattcagcggcaagagactgggcgacaccttcgtgctgaccctgagcgacttcagaagagagaacgagggctactacttctgtagcgccctgagcaacagcatcatgtacttcagccacttcgtgcccgtgtttctgcccgccaagcctacaacaacccctgctcctagacctcctacaccagctcctacaatcgccagccagcctctgtctctcagacccgaagcctgtagacctgctgctggcggagctgtgcataccagaggactggatttcgcctgcgacatctacatctgggctcctctggctggcacatgtggcgtgctgctgctgtccctggtcatcaccctgtactgcaaccaccggaacaggcggagagtgtgcaagtgccctagacctgtggtcaagagcggcgacaagcctagcctgagcgccagatatgtt

SEQ ID NO: 2633 - DNA, 3885 bp, synthetic construct
  source 1..3885: mol_type = other DNA
atggccttaccagtgaccgccttgctcctgccgctggccttgctgctccacgccgccaggccggaagtgcagctggttgaatctggcggaggactggttcaggctggcggatctctgagactgtcttgtgccgccagcggcagaacctttagcatgggctggtttagacaggcccctggcaaagagagagagttcgtcgccgccatcacatactctggcggcagcccttactacgccgactctgtgaagggcagattcaccatcagccgggacaacgccaagaacaccgtgtacctccagatgaacagcctgaagcctgaggacaccgccgtgtactactgcgccgccaatccaacatacggcagcgactggaacgccgagaattggggccagggaacccaagtgacagtgtctagcggtaccggcggaggcggatctggcggcggaggtagcggtggcggaggatctgaattcgacgtgacccagacacctcggaacagaatcaccaagaccggcaagcggatcatgctggaatgcagccagaccaagggccacgaccggatgtactggtacagacaggaccctggcctgggcctgagactgatctactacagcttcgacgtgaaggacatcaacaagggcgagatcagcgacggctacagcgtgtcaagacaggctcaggccaagttcagcctgtctctggaaagcgccattcctaaccagacagccctgtacttctgtgccacaagcggccagggcgcttacgaggaacagttctttggccctggcaccagactgacagttctcgagggacagcctaaggccaatcctaccgtgacactgttccctccaagcagcgaagaactccaggccaacaaggccacacttgtgtgcctgatctccgacttctaccctggggctgtgacagtggcttggaaggccgatggatctcctgtgaaagccggcgtggaaaccaccaagccatccaagcagagcaacaacaaatacgccgccagctcctacctgagcctgacacctgagcagtggaagtcccacagatcctacagctgccaagtgacccacgaaggcagcaccgtggaaaagacagtggcccctacagagtgcagcggatccacaacacctggcgagagaagtagcctgcctgccttctatcctggcaccagcggctcttgttctggctgtggatctctgagcctgcctctgctggctggactggttgctgctgatgctgtggcctctctgctgattgtgggagccgtgttcctgtgcgccagacctagaagaagccccgctcaagaggacggcaaggtgtacatcaacatgcccggcagaggaagcactagtagagtgaagttcagcagaagcgccgacgcccctgcctaccagcagggacagaaccaactgtacaacgagctgaacctgggcagacgggaagagtacgacgtgctggacaagcggagaggcagggaccctgagatgggcggaaagccccagcggagaaagaacccccaggaaggactgtataacgaactccagaaagacaagatggccgaagcctacagcgagatcggcatgaagggcgagcggagaagaggcaagggccacgatggcctgtaccagggcctgagcaccgccaccaaggacacctatgacgccctgcacatgcaggccctgcctccaagaagggccaagcgatctggatctggagcaacaaacttctcactactcaaacaagcaggtgacgtggaggagaatcccgggcctatggactggatttggcgcatccttttccttgtcggcgctgctaccggcgcgcattccttcgaaaagaaccaggtggaacagagccctcagagcctgattatcctggaaggcaagaactgcaccctccagtgcaactacaccgtgtctcccttcagcaacctgcggtggtacaagcaggatacaggcagaggccctgtgtctctgaccatcctgaccttcagcgagaacaccaagagcaacggcagatacaccgccacactggacgccgatacaaagcagagcagcctgcacatcacagccagccagctgagcgatagcgccagctacatctgtgtggtgtctggcggcacagacagctggggcaaactccagtttggagctggcacacaggtggtggtcacccctgatacgcgtgcctctacaaagggaccctccgtgtttcctctggctcccagcagcaagtctacaagcggaggaacagccgctctgggctgcctggtcaaggattactttcccgagcctgtgaccgtgtcctggaatagcggagcactgacaagcggcgtgcacacctttccagccgtgctgcaaagcagcggcctgtactctctgagcagcgtggtcacagtgcctagctctagcctgggcacccagacctacatctgcaatgtgaaccacaagcctagcaacaccaaggtggacaagagagtggaacccaagagctgtggtaccacaacgccgggcgaaaggagttccttgccggccttttaccccggcacaagcggaagctgtagtgggtgtggaagcctcagcctcccacttcttgcgggcctcgtcgcggcagatgcagtagcttcacttcttattgtaggcgcggtatttctctgtgctcgaccaaggaggtcacccgctcaggaggatggtaaggtgtatataaatatgccaggacgcggaagctctagacgggttaagttttccagatccgcagacgcacccgcttaccaacaagggcagaaccaactctacaatgaacttaatttggggcggagggaagagtacgacgttctggacaaaaggaggggacgagatcccgagatgggcggaaagcctcagcgaaggaagaatccgcaagaggggctttataacgaactccagaaagataaaatggcagaagcctatagtgagattgggatgaagggagaaaggaggaggggtaaaggtcacgatgggttgtaccaaggattgagcacagccactaaagatacctatgatgcgctccacatgcaggccctgccgccaagacgcgccaagagaagcggatctggcgtgaagcagaccctgaatttcgacctgctgaagctggctggcgacgtggaatccaacccaggccctggccatatggctctgcctgtgacagctctgctgctgcctctggcactgctgcttcatgctgctagacctagccagtttagagtgtcccctctggacagaacctggaacctgggcgagacagtggaactgaagtgccaggtgctgctgagcaaccctacaagcggctgctcctggctgtttcagcctagaggtgcagccgcctctcctacctttctgctgtacctgagccagaacaagcccaaggccgccgaaggactggacacccagagattcagcggcaagagactgggcgacaccttcgtgctgaccctgagcgacttcagaagagagaacgagggctactacttctgtagcgccctgagcaacagcatcatgtacttcagccacttcgtgcccgtgtttctgcccgccaagcctacaacaacccctgctcctagacctcctacaccagctcctacaatcgccagccagcctctgtctctcagacccgaagcctgtagacctgctgctggcggagctgtgcataccagaggactggatttcgcctgcgacatctacatctgggctcctctggctggcacatgtggcgtgctgctgctgtccctggtcatcaccctgtactgcaaccaccggaacaggcggagagtgtgcaagtgccctagacctgtggtcaagagcggcgacaagcctagcctgagcgccagatatgtt

SEQ ID NO: 2634 - DNA, 4296 bp, synthetic construct
  source 1..4296: mol_type = other DNA
atggccttaccagtgaccgccttgctcctgccgctggccttgctgctccacgccgccaggccggaagtgcagctggttgaatctggcggaggactggttcaggctggcggatctctgagactgtcttgtgccgccagcggcagaacctttagcatgggctggtttagacaggcccctggcaaagagagagagttcgtcgccgccatcacatactctggcggcagcccttactacgccgactctgtgaagggcagattcaccatcagccgggacaacgccaagaacaccgtgtacctccagatgaacagcctgaagcctgaggacaccgccgtgtactactgcgccgccaatccaacatacggcagcgactggaacgccgagaattggggccagggaacccaagtgacagtgtctagcggtaccggcggaggcggatctggcggcggaggtagcggtggcggaggatctgaattcgacgtgacccagacacctcggaacagaatcaccaagaccggcaagcggatcatgctggaatgcagccagaccaagggccacgaccggatgtactggtacagacaggaccctggcctgggcctgagactgatctactacagcttcgacgtgaaggacatcaacaagggcgagatcagcgacggctacagcgtgtcaagacaggctcaggccaagttcagcctgtctctggaaagcgccattcctaaccagacagccctgtacttctgtgccacaagcggccagggcgcttacgaggaacagttctttggccctggcaccagactgacagttctcgagggacagcctaaggccaatcctaccgtgacactgttccctccaagcagcgaagaactccaggccaacaaggccacacttgtgtgcctgatctccgacttctaccctggggctgtgacagtggcttggaaggccgatggatctcctgtgaaagccggcgtggaaaccaccaagccatccaagcagagcaacaacaaatacgccgccagctcctacctgagcctgacacctgagcagtggaagtcccacagatcctacagctgccaagtgacccacgaaggcagcaccgtggaaaagacagtggcccctacagagtgcagcggatccacaacacctggcgagagaagtagcctgcctgccttctatcctggcaccagcggctcttgttctggctgtggatctctgagcctgcctctgctggctggactggttgctgctgatgctgtggcctctctgctgattgtgggagccgtgttcctgtgcgccagacctagaagaagccccgctcaagaggacggcaaggtgtacatcaacatgcccggcagaggaagcactagtagagtgaagttcagcagaagcgccgacgcccctgcctaccagcagggacagaaccaactgtacaacgagctgaacctgggcagacgggaagagtacgacgtgctggacaagcggagaggcagggaccctgagatgggcggaaagccccagcggagaaagaacccccaggaaggactgtataacgaactccagaaagacaagatggccgaagcctacagcgagatcggcatgaagggcgagcggagaagaggcaagggccacgatggcctgtaccagggcctgagcaccgccaccaaggacacctatgacgccctgcacatgcaggccctgcctccaagaagggccaagcgatctggatctggagcaacaaacttctcactactcaaacaagcaggtgacgtggaggagaatcccgggcctatggactggatttggcgcatccttttccttgtcggcgctgctaccggcgcgcattccgggcccgaagtgcaactggttgaatccggtggcggcctggtgcaagcaggcggatctctcagacttagctgtgccgcctccggcagaaccttcacaatgggatggtttaggcaggctccagggaaagagagagagttcgtcgccgccatctctctgtctcccacactggcctactacgccgactctgtgaaaggccggttcaccatctccagagataatgccaagaacaccgtggtgctgcaaatgaactctctgaaacccgaggatacagccctgtactattgtgccgctgaccggaagtccgtgatgagcatcagacccgattactggggacagggcacacaagtcacagtgtcctctggatccggcggcggaggatctggcggaggcggatctgggggcggaggctctttcgaaaagaaccaggtggaacagagccctcagagcctgattatcctggaaggcaagaactgcaccctccagtgcaactacaccgtgtctcccttcagcaacctgcggtggtacaagcaggatacaggcagaggccctgtgtctctgaccatcctgaccttcagcgagaacaccaagagcaacggcagatacaccgccacactggacgccgatacaaagcagagcagcctgcacatcacagccagccagctgagcgatagcgccagctacatctgtgtggtgtctggcggcacagacagctggggcaaactccagtttggagctggcacacaggtggtggtcacccctgatacgcgtgcctctacaaagggaccctccgtgtttcctctggctcccagcagcaagtctacaagcggaggaacagccgctctgggctgcctggtcaaggattactttcccgagcctgtgaccgtgtcctggaatagcggagcactgacaagcggcgtgcacacctttccagccgtgctgcaaagcagcggcctgtactctctgagcagcgtggtcacagtgcctagctctagcctgggcacccagacctacatctgcaatgtgaaccacaagcctagcaacaccaaggtggacaagagagtggaacccaagagctgtggtaccacaacgccgggcgaaaggagttccttgccggccttttaccccggcacaagcggaagctgtagtgggtgtggaagcctcagcctcccacttcttgcgggcctcgtcgcggcagatgcagtagcttcacttcttattgtaggcgcggtatttctctgtgctcgaccaaggaggtcacccgctcaggaggatggtaaggtgtatataaatatgccaggacgcggaagctctagacgggttaagttttccagatccgcagacgcacccgcttaccaacaagggcagaaccaactctacaatgaacttaatttggggcggagggaagagtacgacgttctggacaaaaggaggggacgagatcccgagatgggcggaaagcctcagcgaaggaagaatccgcaagaggggctttataacgaactccagaaagataaaatggcagaagcctatagtgagattgggatgaagggagaaaggaggaggggtaaaggtcacgatgggttgtaccaaggattgagcacagccactaaagatacctatgatgcgctccacatgcaggccctgccgccaagacgcgccaagagaagcggatctggcgtgaagcagaccctgaatttcgacctgctgaagctggctggcgacgtggaatccaacccaggccctggccatatggctctgcctgtgacagctctgctgctgcctctggcactgctgcttcatgctgctagacctagccagtttagagtgtcccctctggacagaacctggaacctgggcgagacagtggaactgaagtgccaggtgctgctgagcaaccctacaagcggctgctcctggctgtttcagcctagaggtgcagccgcctctcctacctttctgctgtacctgagccagaacaagcccaaggccgccgaaggactggacacccagagattcagcggcaagagactgggcgacaccttcgtgctgaccctgagcgacttcagaagagagaacgagggctactacttctgtagcgccctgagcaacagcatcatgtacttcagccacttcgtgcccgtgtttctgcccgccaagcctacaacaacccctgctcctagacctcctacaccagctcctacaatcgccagccagcctctgtctctcagacccgaagcctgtagacctgctgctggcggagctgtgcataccagaggactggatttcgcctgcgacatctacatctgggctcctctggctggcacatgtggcgtgctgctgctgtccctggtcatcaccctgtactgcaaccaccggaacaggcggagagtgtgcaagtgccctagacctgtggtcaagagcggcgacaagcctagcctgagcgccagatatgtt

SEQ ID NO: 2635 - DNA, 2451 bp, synthetic construct
  source 1..2451: mol_type = other DNA
atggccttaccagtgaccgccttgctcctgccgctggccttgctgctccacgccgccaggccggaattcgacgtgacccagacacctcggaacagaatcaccaagaccggcaagcggatcatgctggaatgcagccagaccaagggccacgaccggatgtactggtacagacaggaccctggcctgggcctgagactgatctactacagcttcgacgtgaaggacatcaacaagggcgagatcagcgacggctacagcgtgtcaagacaggctcaggccaagttcagcctgtctctggaaagcgccattcctaaccagacagccctgtacttctgtgccacaagcggccagggcgcttacgaggaacagttctttggccctggcaccagactgacagttctcgaggacctgaagaacgtgttcccacctgaggtggccgtgttcgagcctagcgaggccgagatcagccacacccagaaagccaccctcgtgtgcctggctaccggcttctaccccgaccatgtggaactgtcttggtgggtcaacggcaaagaggtgcacagcggcgtgtctaccgacccccagccactgaaagaacagcccgccctgaacgacagccggtactgcctgagcagcagactgagagtgtccgccaccttctggcagaacccccggaaccacttcagatgccaggtgcagttctacggcctgagcgagaacgacgagtggacccaggacagagccaagcccgtgacccagatcgtgtctgccgaagcctggggcagagccgattgcggatcccagagcttcggcctgctggaccccaagctgtgctacctgctggatggcatcctgttcatctacggcgtgatcctgaccgccctgttcctgagagtgaagttcagcagaagcgccgacgcccctgcctaccagcagggacagaaccaactgtacaacgagctgaacctgggcagacgggaagagtacgacgtgctggacaagcggagaggcagggaccctgagatgggcggaaagccccagcggagaaagaacccccaggaaggactgtataacgaactccagaaagacaagatggccgaagcctacagcgagatcggcatgaagggcgagcggagaagaggcaagggccacgatggcctgtaccagggcctgagcaccgccaccaaggacacctatgacgccctgcacatgcaggccctgcctccaagaagggccaagcgatctggatctggagcaacaaacttctcactactcaaacaagcaggtgacgtggaggagaatcccgggcctactagtatggactggatttggcgcatccttttccttgtcggcgctgctaccggcgcgcattccttcgaaaagaaccaggtggaacagagccctcagagcctgattatcctggaaggcaagaactgcaccctccagtgcaactacaccgtgtctcccttcagcaacctgcggtggtacaagcaggatacaggcagaggccctgtgtctctgaccatcctgaccttcagcgagaacaccaagagcaacggcagatacaccgccacactggacgccgatacaaagcagagcagcctgcacatcacagccagccagctgagcgatagcgccagctacatctgtgtggtgtctggcggcacagacagctggggcaaactccagtttggagctggcacacaggtggtggtcacccctgatacgcgtatccagaaccctgatcctgccgtgtaccagctgcgggatagcaagagcagcgacaagagcgtgtgtctgttcaccgacttcgacagccagaccaacgtgtcccagagcaaggactccgacgtgtacatcaccgataagaccgtgctggacatgcggagcatggacttcaagagcaactccgccgtggcctggtccaacaagtccgatttcgcctgcgccaacgccttcaacaacagcattatccccgaggacacattcttcccaagccccgagagcagctgcggtacccagagttttgggttgttggaccctaaattgtgctatctgttggacggaatcctgttcatttacggagtgatcctgaccgcattgttcctgcgggttaagttttccagatccgcagacgcacccgcttaccaacaagggcagaaccaactctacaatgaacttaatttggggcggagggaagagtacgacgttctggacaaaaggaggggacgagatcccgagatgggcggaaagcctcagcgaaggaagaatccgcaagaggggctttataacgaactccagaaagataaaatggcagaagcctatagtgagattgggatgaagggagaaaggaggaggggtaaaggtcacgatgggttgtaccaaggattgagcacagccactaaagatacctatgatgcgctccacatgcaggccctgccgccaagataa

SEQ ID NO: 2636 - DNA, 2577 bp, synthetic construct
  source 1..2577: mol_type = other DNA
atggccttaccagtgaccgccttgctcctgccgctggccttgctgctccacgccgccaggccggaattcgacgtgacccagacacctcggaacagaatcaccaagaccggcaagcggatcatgctggaatgcagccagaccaagggccacgaccggatgtactggtacagacaggaccctggcctgggcctgagactgatctactacagcttcgacgtgaaggacatcaacaagggcgagatcagcgacggctacagcgtgtcaagacaggctcaggccaagttcagcctgtctctggaaagcgccattcctaaccagacagccctgtacttctgtgccacaagcggccagggcgcttacgaggaacagttctttggccctggcaccagactgacagttctcgaggacctgaagaacgtgttcccacctgaggtggccgtgttcgagcctagcgaggccgagatcagccacacccagaaagccaccctcgtgtgcctggctaccggcttctaccccgaccatgtggaactgtcttggtgggtcaacggcaaagaggtgcacagcggcgtgtctaccgacccccagccactgaaagaacagcccgccctgaacgacagccggtactgcctgagcagcagactgagagtgtccgccaccttctggcagaacccccggaaccacttcagatgccaggtgcagttctacggcctgagcgagaacgacgagtggacccaggacagagccaagcccgtgacccagatcgtgtctgccgaagcctggggcagagccgattgcggatcccagagcttcggcctgctggaccccaagctgtgctacctgctggatggcatcctgttcatctacggcgtgatcctgaccgccctgttcctgagagtgaagttcagcagaagcgccgacgcccctgcctaccagcagggacagaaccaactgtacaacgagctgaacctgggcagacgggaagagtacgacgtgctggacaagcggagaggcagggaccctgagatgggcggaaagccccagcggagaaagaacccccaggaaggactgtataacgaactccagaaagacaagatggccgaagcctacagcgagatcggcatgaagggcgagcggagaagaggcaagggccacgatggcctgtaccagggcctgagcaccgccaccaaggacacctatgacgccctgcacatgcaggccctgcctccaagaagggccaagcgatctggatctggagcaacaaacttctcactactcaaacaagcaggtgacgtggaggagaatcccgggcctactagtatggactggatttggcgcatccttttccttgtcggcgctgctaccggcgcgcattccttcgaaaagaaccaggtggaacagagccctcagagcctgattatcctggaaggcaagaactgcaccctccagtgcaactacaccgtgtctcccttcagcaacctgcggtggtacaagcaggatacaggcagaggccctgtgtctctgaccatcctgaccttcagcgagaacaccaagagcaacggcagatacaccgccacactggacgccgatacaaagcagagcagcctgcacatcacagccagccagctgagcgatagcgccagctacatctgtgtggtgtctggcggcacagacagctggggcaaactccagtttggagctggcacacaggtggtggtcacccctgatacgcgtatccagaaccctgatcctgccgtgtaccagctgcgggatagcaagagcagcgacaagagcgtgtgtctgttcaccgacttcgacagccagaccaacgtgtcccagagcaaggactccgacgtgtacatcaccgataagaccgtgctggacatgcggagcatggacttcaagagcaactccgccgtggcctggtccaacaagtccgatttcgcctgcgccaacgccttcaacaacagcattatccccgaggacacattcttcccaagccccgagagcagctgcggtacccagagcttcggcctgctggaccccaagctgtgctacctgctggatggcatcctgttcatctacggcgtgatcctgaccgccctgttcctgaaacggggcagaaagaaactcctgtatatattcaaacaaccatttatgagaccagtacaaactactcaagaggaagatggctgtagctgccgatttccagaagaagaagaaggaggatgtgaactgagagtgaagttcagcagaagcgccgacgcccctgcctaccagcagggacagaaccaactgtacaacgagctgaacctgggcagacgggaagagtacgacgtgctggacaagcggagaggcagggaccctgagatgggcggaaagccccagcggagaaagaacccccaggaaggactgtataacgaactccagaaagacaagatggccgaagcctacagcgagatcggcatgaagggcgagcggagaagaggcaagggccacgatggcctgtaccagggcctgagcaccgccaccaaggacacctatgacgccctgcacatgcaggccctgcctccaagataa

SEQ ID NO: 2637 - DNA, 2574 bp, synthetic construct
  source 1..2574: mol_type = other DNA
atggccttaccagtgaccgccttgctcctgccgctggccttgctgctccacgccgccaggccggaattcgacgtgacccagacacctcggaacagaatcaccaagaccggcaagcggatcatgctggaatgcagccagaccaagggccacgaccggatgtactggtacagacaggaccctggcctgggcctgagactgatctactacagcttcgacgtgaaggacatcaacaagggcgagatcagcgacggctacagcgtgtcaagacaggctcaggccaagttcagcctgtctctggaaagcgccattcctaaccagacagccctgtacttctgtgccacaagcggccagggcgcttacgaggaacagttctttggccctggcaccagactgacagttctcgaggacctgaagaacgtgttcccacctgaggtggccgtgttcgagcctagcgaggccgagatcagccacacccagaaagccaccctcgtgtgcctggctaccggcttctaccccgaccatgtggaactgtcttggtgggtcaacggcaaagaggtgcacagcggcgtgtctaccgacccccagccactgaaagaacagcccgccctgaacgacagccggtactgcctgagcagcagactgagagtgtccgccaccttctggcagaacccccggaaccacttcagatgccaggtgcagttctacggcctgagcgagaacgacgagtggacccaggacagagccaagcccgtgacccagatcgtgtctgccgaagcctggggcagagccgattgcggatcccagagcttcggcctgctggaccccaagctgtgctacctgctggatggcatcctgttcatctacggcgtgatcctgaccgccctgttcctgagagtgaagttcagcagaagcgccgacgcccctgcctaccagcagggacagaaccaactgtacaacgagctgaacctgggcagacgggaagagtacgacgtgctggacaagcggagaggcagggaccctgagatgggcggaaagccccagcggagaaagaacccccaggaaggactgtataacgaactccagaaagacaagatggccgaagcctacagcgagatcggcatgaagggcgagcggagaagaggcaagggccacgatggcctgtaccagggcctgagcaccgccaccaaggacacctatgacgccctgcacatgcaggccctgcctccaagaagggccaagcgatctggatctggagcaacaaacttctcactactcaaacaagcaggtgacgtggaggagaatcccgggcctactagtatggactggatttggcgcatccttttccttgtcggcgctgctaccggcgcgcattccttcgaaaagaaccaggtggaacagagccctcagagcctgattatcctggaaggcaagaactgcaccctccagtgcaactacaccgtgtctcccttcagcaacctgcggtggtacaagcaggatacaggcagaggccctgtgtctctgaccatcctgaccttcagcgagaacaccaagagcaacggcagatacaccgccacactggacgccgatacaaagcagagcagcctgcacatcacagccagccagctgagcgatagcgccagctacatctgtgtggtgtctggcggcacagacagctggggcaaactccagtttggagctggcacacaggtggtggtcacccctgatacgcgtatccagaaccctgatcctgccgtgtaccagctgcgggatagcaagagcagcgacaagagcgtgtgtctgttcaccgacttcgacagccagaccaacgtgtcccagagcaaggactccgacgtgtacatcaccgataagaccgtgctggacatgcggagcatggacttcaagagcaactccgccgtggcctggtccaacaagtccgatttcgcctgcgccaacgccttcaacaacagcattatccccgaggacacattcttcccaagccccgagagcagctgcggtacccagagcttcggcctgctggaccccaagctgtgctacctgctggatggcatcctgttcatctacggcgtgatcctgaccgccctgttcctgaggagtaagaggagcaggctcctgcacagtgactacatgaacatgactccacgccgccccggacccacccgcaagcattaccagccctatgccccaccacgcgacttcgcagcctatcgctccagagtgaagttcagcagaagcgccgacgcccctgcctaccagcagggacagaaccaactgtacaacgagctgaacctgggcagacgggaagagtacgacgtgctggacaagcggagaggcagggaccctgagatgggcggaaagccccagcggagaaagaacccccaggaaggactgtataacgaactccagaaagacaagatggccgaagcctacagcgagatcggcatgaagggcgagcggagaagaggcaagggccacgatggcctgtaccagggcctgagcaccgccaccaaggacacctatgacgccctgcacatgcaggccctgcctccaagataa

SEQ ID NO: 2638 - DNA, 2559 bp, synthetic construct
  source 1..2559: mol_type = other DNA
atggccttaccagtgaccgccttgctcctgccgctggccttgctgctccacgccgccaggccggaattcgacgtgacccagacacctcggaacagaatcaccaagaccggcaagcggatcatgctggaatgcagccagaccaagggccacgaccggatgtactggtacagacaggaccctggcctgggcctgagactgatctactacagcttcgacgtgaaggacatcaacaagggcgagatcagcgacggctacagcgtgtcaagacaggctcaggccaagttcagcctgtctctggaaagcgccattcctaaccagacagccctgtacttctgtgccacaagcggccagggcgcttacgaggaacagttctttggccctggcaccagactgacagttctcgaggacctgaagaacgtgttcccacctgaggtggccgtgttcgagcctagcgaggccgagatcagccacacccagaaagccaccctcgtgtgcctggctaccggcttctaccccgaccatgtggaactgtcttggtgggtcaacggcaaagaggtgcacagcggcgtgtctaccgacccccagccactgaaagaacagcccgccctgaacgacagccggtactgcctgagcagcagactgagagtgtccgccaccttctggcagaacccccggaaccacttcagatgccaggtgcagttctacggcctgagcgagaacgacgagtggacccaggacagagccaagcccgtgacccagatcgtgtctgccgaagcctggggcagagccgattgcggatcccagagcttcggcctgctggaccccaagctgtgctacctgctggatggcatcctgttcatctacggcgtgatcctgaccgccctgttcctgagagtgaagttcagcagaagcgccgacgcccctgcctaccagcagggacagaaccaactgtacaacgagctgaacctgggcagacgggaagagtacgacgtgctggacaagcggagaggcagggaccctgagatgggcggaaagccccagcggagaaagaacccccaggaaggactgtataacgaactccagaaagacaagatggccgaagcctacagcgagatcggcatgaagggcgagcggagaagaggcaagggccacgatggcctgtaccagggcctgagcaccgccaccaaggacacctatgacgccctgcacatgcaggccctgcctccaagaagggccaagcgatctggatctggagcaacaaacttctcactactcaaacaagcaggtgacgtggaggagaatcccgggcctactagtatggactggatttggcgcatccttttccttgtcggcgctgctaccggcgcgcattccttcgaaaagaaccaggtggaacagagccctcagagcctgattatcctggaaggcaagaactgcaccctccagtgcaactacaccgtgtctcccttcagcaacctgcggtggtacaagcaggatacaggcagaggccctgtgtctctgaccatcctgaccttcagcgagaacaccaagagcaacggcagatacaccgccacactggacgccgatacaaagcagagcagcctgcacatcacagccagccagctgagcgatagcgccagctacatctgtgtggtgtctggcggcacagacagctggggcaaactccagtttggagctggcacacaggtggtggtcacccctgatacgcgtatccagaaccctgatcctgccgtgtaccagctgcgggatagcaagagcagcgacaagagcgtgtgtctgttcaccgacttcgacagccagaccaacgtgtcccagagcaaggactccgacgtgtacatcaccgataagaccgtgctggacatgcggagcatggacttcaagagcaactccgccgtggcctggtccaacaagtccgatttcgcctgcgccaacgccttcaacaacagcattatccccgaggacacattcttcccaagccccgagagcagctgcggtacccagagcttcggcctgctggaccccaagctgtgctacctgctggatggcatcctgttcatctacggcgtgatcctgaccgccctgttcctgagggaccaaagactgcctcctgacgctcacaaacctccaggcggaggcagcttcagaacccctatccaagaggaacaggctgacgcccacagcaccctggcaaaaattagagtgaagttcagcagaagcgccgacgcccctgcctaccagcagggacagaaccaactgtacaacgagctgaacctgggcagacgggaagagtacgacgtgctggacaagcggagaggcagggaccctgagatgggcggaaagccccagcggagaaagaacccccaggaaggactgtataacgaactccagaaagacaagatggccgaagcctacagcgagatcggcatgaagggcgagcggagaagaggcaagggccacgatggcctgtaccagggcctgagcaccgccaccaaggacacctatgacgccctgcacatgcaggccctgcctccaagataa

SEQ ID NO: 2639 - DNA, 2811 bp, synthetic construct
  source 1..2811: mol_type = other DNA
atggccttaccagtgaccgccttgctcctgccgctggccttgctgctccacgccgccaggccggaattcgacgtgacccagacacctcggaacagaatcaccaagaccggcaagcggatcatgctggaatgcagccagaccaagggccacgaccggatgtactggtacagacaggaccctggcctgggcctgagactgatctactacagcttcgacgtgaaggacatcaacaagggcgagatcagcgacggctacagcgtgtcaagacaggctcaggccaagttcagcctgtctctggaaagcgccattcctaaccagacagccctgtacttctgtgccacaagcggccagggcgcttacgaggaacagttctttggccctggcaccagactgacagttctcgaggacctgaagaacgtgttcccacctgaggtggccgtgttcgagcctagcgaggccgagatcagccacacccagaaagccaccctcgtgtgcctggctaccggcttctaccccgaccatgtggaactgtcttggtgggtcaacggcaaagaggtgcacagcggcgtgtctaccgacccccagccactgaaagaacagcccgccctgaacgacagccggtactgcctgagcagcagactgagagtgtccgccaccttctggcagaacccccggaaccacttcagatgccaggtgcagttctacggcctgagcgagaacgacgagtggacccaggacagagccaagcccgtgacccagatcgtgtctgccgaagcctggggcagagccgattgcggatcccagagcttcggcctgctggaccccaagctgtgctacctgctggatggcatcctgttcatctacggcgtgatcctgaccgccctgttcctgagagtgaagttcagcagaagcgccgacgcccctgcctaccagcagggacagaaccaactgtacaacgagctgaacctgggcagacgggaagagtacgacgtgctggacaagcggagaggcagggaccctgagatgggcggaaagccccagcggagaaagaacccccaggaaggactgtataacgaactccagaaagacaagatggccgaagcctacagcgagatcggcatgaagggcgagcggagaagaggcaagggccacgatggcctgtaccagggcctgagcaccgccaccaaggacacctatgacgccctgcacatgcaggccctgcctccaagaagggccaagcgatctggatctggagcaacaaacttctcactactcaaacaagcaggtgacgtggaggagaatcccgggcctactagtatggactggatttggcgcatccttttccttgtcggcgctgctaccggcgcgcattccttcgaaaagaaccaggtggaacagagccctcagagcctgattatcctggaaggcaagaactgcaccctccagtgcaactacaccgtgtctcccttcagcaacctgcggtggtacaagcaggatacaggcagaggccctgtgtctctgaccatcctgaccttcagcgagaacaccaagagcaacggcagatacaccgccacactggacgccgatacaaagcagagcagcctgcacatcacagccagccagctgagcgatagcgccagctacatctgtgtggtgtctggcggcacagacagctggggcaaactccagtttggagctggcacacaggtggtggtcacccctgatacgcgtatccagaaccctgatcctgccgtgtaccagctgcgggatagcaagagcagcgacaagagcgtgtgtctgttcaccgacttcgacagccagaccaacgtgtcccagagcaaggactccgacgtgtacatcaccgataagaccgtgctggacatgcggagcatggacttcaagagcaactccgccgtggcctggtccaacaagtccgatttcgcctgcgccaacgccttcaacaacagcattatccccgaggacacattcttcccaagccccgagagcagctgcggtacccagagcttcggcctgctggaccccaagctgtgctacctgctggatggcatcctgttcatctacggcgtgatcctgaccgccctgttcctgtggcggcggaagcggaaagagaagcagtctgagacaagccccaaagagttcctgaccatctacgaggacgtgaaggacctgaaaacccggcggaaccacgaacaagagcagacctttcctggcggaggcagcaccatctacagcatgatccagagccagagcagcgcccctacaagccaagagcctgcctacacactgtactccctgatccagcctagcagaaagagcggcagccggaagagaaatcacagccccagcttcaacagcacgatctacgaagtgatcggcaagagccagccaaaggctcagaaccctgccagactgagccggaaagagctggaaaacttcgacgtgtacagcagagtgaagttcagcagaagcgccgacgcccctgcctaccagcagggacagaaccaactgtacaacgagctgaacctgggcagacgggaagagtacgacgtgctggacaagcggagaggcagggaccctgagatgggcggaaagccccagcggagaaagaacccccaggaaggactgtataacgaactccagaaagacaagatggccgaagcctacagcgagatcggcatgaagggcgagcggagaagaggcaagggccacgatggcctgtaccagggcctgagcaccgccaccaaggacacctatgacgccctgcacatgcaggccctgcctccaagataa

SEQ ID NO: 2640 - DNA, 2700 bp, synthetic construct
  source 1..2700: mol_type = other DNA
atggccttaccagtgaccgccttgctcctgccgctggccttgctgctccacgccgccaggccggaattcgacgtgacccagacacctcggaacagaatcaccaagaccggcaagcggatcatgctggaatgcagccagaccaagggccacgaccggatgtactggtacagacaggaccctggcctgggcctgagactgatctactacagcttcgacgtgaaggacatcaacaagggcgagatcagcgacggctacagcgtgtcaagacaggctcaggccaagttcagcctgtctctggaaagcgccattcctaaccagacagccctgtacttctgtgccacaagcggccagggcgcttacgaggaacagttctttggccctggcaccagactgacagttctcgaggacctgaagaacgtgttcccacctgaggtggccgtgttcgagcctagcgaggccgagatcagccacacccagaaagccaccctcgtgtgcctggctaccggcttctaccccgaccatgtggaactgtcttggtgggtcaacggcaaagaggtgcacagcggcgtgtctaccgacccccagccactgaaagaacagcccgccctgaacgacagccggtactgcctgagcagcagactgagagtgtccgccaccttctggcagaacccccggaaccacttcagatgccaggtgcagttctacggcctgagcgagaacgacgagtggacccaggacagagccaagcccgtgacccagatcgtgtctgccgaagcctggggcagagccgattgcggatcccagagcttcggcctgctggaccccaagctgtgctacctgctggatggcatcctgttcatctacggcgtgatcctgaccgccctgttcctgaggagtaagaggagcaggctcctgcacagtgactacatgaacatgactccacgccgccccggacccacccgcaagcattaccagccctatgccccaccacgcgacttcgcagcctatcgctccagagtgaagttcagcagaagcgccgacgcccctgcctaccagcagggacagaaccaactgtacaacgagctgaacctgggcagacgggaagagtacgacgtgctggacaagcggagaggcagggaccctgagatgggcggaaagccccagcggagaaagaacccccaggaaggactgtataacgaactccagaaagacaagatggccgaagcctacagcgagatcggcatgaagggcgagcggagaagaggcaagggccacgatggcctgtaccagggcctgagcaccgccaccaaggacacctatgacgccctgcacatgcaggccctgcctccaagaagggccaagcgatctggatctggagcaacaaacttctcactactcaaacaagcaggtgacgtggaggagaatcccgggcctactagtatggactggatttggcgcatccttttccttgtcggcgctgctaccggcgcgcattccttcgaaaagaaccaggtggaacagagccctcagagcctgattatcctggaaggcaagaactgcaccctccagtgcaactacaccgtgtctcccttcagcaacctgcggtggtacaagcaggatacaggcagaggccctgtgtctctgaccatcctgaccttcagcgagaacaccaagagcaacggcagatacaccgccacactggacgccgatacaaagcagagcagcctgcacatcacagccagccagctgagcgatagcgccagctacatctgtgtggtgtctggcggcacagacagctggggcaaactccagtttggagctggcacacaggtggtggtcacccctgatacgcgtatccagaaccctgatcctgccgtgtaccagctgcgggatagcaagagcagcgacaagagcgtgtgtctgttcaccgacttcgacagccagaccaacgtgtcccagagcaaggactccgacgtgtacatcaccgataagaccgtgctggacatgcggagcatggacttcaagagcaactccgccgtggcctggtccaacaagtccgatttcgcctgcgccaacgccttcaacaacagcattatccccgaggacacattcttcccaagccccgagagcagctgcggtacccagagcttcggcctgctggaccccaagctgtgctacctgctggatggcatcctgttcatctacggcgtgatcctgaccgccctgttcctgaaacggggcagaaagaaactcctgtatatattcaaacaaccatttatgagaccagtacaaactactcaagaggaagatggctgtagctgccgatttccagaagaagaagaaggaggatgtgaactgagagtgaagttcagcagaagcgccgacgcccctgcctaccagcagggacagaaccaactgtacaacgagctgaacctgggcagacgggaagagtacgacgtgctggacaagcggagaggcagggaccctgagatgggcggaaagccccagcggagaaagaacccccaggaaggactgtataacgaactccagaaagacaagatggccgaagcctacagcgagatcggcatgaagggcgagcggagaagaggcaagggccacgatggcctgtaccagggcctgagcaccgccaccaaggacacctatgacgccctgcacatgcaggccctgcctccaagataa

SEQ ID NO: 2641 - DNA, 2697 bp, synthetic construct
  source 1..2697: mol_type = other DNA
atggccttaccagtgaccgccttgctcctgccgctggccttgctgctccacgccgccaggccggaattcgacgtgacccagacacctcggaacagaatcaccaagaccggcaagcggatcatgctggaatgcagccagaccaagggccacgaccggatgtactggtacagacaggaccctggcctgggcctgagactgatctactacagcttcgacgtgaaggacatcaacaagggcgagatcagcgacggctacagcgtgtcaagacaggctcaggccaagttcagcctgtctctggaaagcgccattcctaaccagacagccctgtacttctgtgccacaagcggccagggcgcttacgaggaacagttctttggccctggcaccagactgacagttctcgaggacctgaagaacgtgttcccacctgaggtggccgtgttcgagcctagcgaggccgagatcagccacacccagaaagccaccctcgtgtgcctggctaccggcttctaccccgaccatgtggaactgtcttggtgggtcaacggcaaagaggtgcacagcggcgtgtctaccgacccccagccactgaaagaacagcccgccctgaacgacagccggtactgcctgagcagcagactgagagtgtccgccaccttctggcagaacccccggaaccacttcagatgccaggtgcagttctacggcctgagcgagaacgacgagtggacccaggacagagccaagcccgtgacccagatcgtgtctgccgaagcctggggcagagccgattgcggatcccagagcttcggcctgctggaccccaagctgtgctacctgctggatggcatcctgttcatctacggcgtgatcctgaccgccctgttcctgaggagtaagaggagcaggctcctgcacagtgactacatgaacatgactccacgccgccccggacccacccgcaagcattaccagccctatgccccaccacgcgacttcgcagcctatcgctccagagtgaagttcagcagaagcgccgacgcccctgcctaccagcagggacagaaccaactgtacaacgagctgaacctgggcagacgggaagagtacgacgtgctggacaagcggagaggcagggaccctgagatgggcggaaagccccagcggagaaagaacccccaggaaggactgtataacgaactccagaaagacaagatggccgaagcctacagcgagatcggcatgaagggcgagcggagaagaggcaagggccacgatggcctgtaccagggcctgagcaccgccaccaaggacacctatgacgccctgcacatgcaggccctgcctccaagaagggccaagcgatctggatctggagcaacaaacttctcactactcaaacaagcaggtgacgtggaggagaatcccgggcctactagtatggactggatttggcgcatccttttccttgtcggcgctgctaccggcgcgcattccttcgaaaagaaccaggtggaacagagccctcagagcctgattatcctggaaggcaagaactgcaccctccagtgcaactacaccgtgtctcccttcagcaacctgcggtggtacaagcaggatacaggcagaggccctgtgtctctgaccatcctgaccttcagcgagaacaccaagagcaacggcagatacaccgccacactggacgccgatacaaagcagagcagcctgcacatcacagccagccagctgagcgatagcgccagctacatctgtgtggtgtctggcggcacagacagctggggcaaactccagtttggagctggcacacaggtggtggtcacccctgatacgcgtatccagaaccctgatcctgccgtgtaccagctgcgggatagcaagagcagcgacaagagcgtgtgtctgttcaccgacttcgacagccagaccaacgtgtcccagagcaaggactccgacgtgtacatcaccgataagaccgtgctggacatgcggagcatggacttcaagagcaactccgccgtggcctggtccaacaagtccgatttcgcctgcgccaacgccttcaacaacagcattatccccgaggacacattcttcccaagccccgagagcagctgcggtacccagagttttgggttgttggaccctaaattgtgctatctgttggacggaatcctgttcatttacggagtgatcctgaccgcattgttcctgaggagcaagcggtcacggctgctccacagcgattacatgaatatgacaccacgaagaccgggtcctactcgcaaacactaccaaccctacgcacctccccgcgactttgcagcgtaccgatctcgggttaagttttccagatccgcagacgcacccgcttaccaacaagggcagaaccaactctacaatgaacttaatttggggcggagggaagagtacgacgttctggacaaaaggaggggacgagatcccgagatgggcggaaagcctcagcgaaggaagaatccgcaagaggggctttataacgaactccagaaagataaaatggcagaagcctatagtgagattgggatgaagggagaaaggaggaggggtaaaggtcacgatgggttgtaccaaggattgagcacagccactaaagatacctatgatgcgctccacatgcaggccctgccgccaagataa

SEQ ID NO: 2642 - DNA, 2700 bp, synthetic construct
  source 1..2700: mol_type = other DNA
atggccttaccagtgaccgccttgctcctgccgctggccttgctgctccacgccgccaggccggaattcgacgtgacccagacacctcggaacagaatcaccaagaccggcaagcggatcatgctggaatgcagccagaccaagggccacgaccggatgtactggtacagacaggaccctggcctgggcctgagactgatctactacagcttcgacgtgaaggacatcaacaagggcgagatcagcgacggctacagcgtgtcaagacaggctcaggccaagttcagcctgtctctggaaagcgccattcctaaccagacagccctgtacttctgtgccacaagcggccagggcgcttacgaggaacagttctttggccctggcaccagactgacagttctcgaggacctgaagaacgtgttcccacctgaggtggccgtgttcgagcctagcgaggccgagatcagccacacccagaaagccaccctcgtgtgcctggctaccggcttctaccccgaccatgtggaactgtcttggtgggtcaacggcaaagaggtgcacagcggcgtgtctaccgacccccagccactgaaagaacagcccgccctgaacgacagccggtactgcctgagcagcagactgagagtgtccgccaccttctggcagaacccccggaaccacttcagatgccaggtgcagttctacggcctgagcgagaacgacgagtggacccaggacagagccaagcccgtgacccagatcgtgtctgccgaagcctggggcagagccgattgcggatcccagagcttcggcctgctggaccccaagctgtgctacctgctggatggcatcctgttcatctacggcgtgatcctgaccgccctgttcctgaggagtaagaggagcaggctcctgcacagtgactacatgaacatgactccacgccgccccggacccacccgcaagcattaccagccctatgccccaccacgcgacttcgcagcctatcgctccagagtgaagttcagcagaagcgccgacgcccctgcctaccagcagggacagaaccaactgtacaacgagctgaacctgggcagacgggaagagtacgacgtgctggacaagcggagaggcagggaccctgagatgggcggaaagccccagcggagaaagaacccccaggaaggactgtataacgaactccagaaagacaagatggccgaagcctacagcgagatcggcatgaagggcgagcggagaagaggcaagggccacgatggcctgtaccagggcctgagcaccgccaccaaggacacctatgacgccctgcacatgcaggccctgcctccaagaagggccaagcgatctggatctggagcaacaaacttctcactactcaaacaagcaggtgacgtggaggagaatcccgggcctactagtatggactggatttggcgcatccttttccttgtcggcgctgctaccggcgcgcattccttcgaaaagaaccaggtggaacagagccctcagagcctgattatcctggaaggcaagaactgcaccctccagtgcaactacaccgtgtctcccttcagcaacctgcggtggtacaagcaggatacaggcagaggccctgtgtctctgaccatcctgaccttcagcgagaacaccaagagcaacggcagatacaccgccacactggacgccgatacaaagcagagcagcctgcacatcacagccagccagctgagcgatagcgccagctacatctgtgtggtgtctggcggcacagacagctggggcaaactccagtttggagctggcacacaggtggtggtcacccctgatacgcgtatccagaaccctgatcctgccgtgtaccagctgcgggatagcaagagcagcgacaagagcgtgtgtctgttcaccgacttcgacagccagaccaacgtgtcccagagcaaggactccgacgtgtacatcaccgataagaccgtgctggacatgcggagcatggacttcaagagcaactccgccgtggcctggtccaacaagtccgatttcgcctgcgccaacgccttcaacaacagcattatccccgaggacacattcttcccaagccccgagagcagctgcggtacccagagttttgggttgttggaccctaaattgtgctatctgttggacggaatcctgttcatttacggagtgatcctgaccgcattgttcctgaagagaggccggaagaagctgctgtacatcttcaagcagcctttcatgcggcccgtgcagaccacccaggaagaggacggctgctcctgccggttccccgaggaagaagaaggcggctgcgagctgcgggttaagttttccagatccgcagacgcacccgcttaccaacaagggcagaaccaactctacaatgaacttaatttggggcggagggaagagtacgacgttctggacaaaaggaggggacgagatcccgagatgggcggaaagcctcagcgaaggaagaatccgcaagaggggctttataacgaactccagaaagataaaatggcagaagcctatagtgagattgggatgaagggagaaaggaggaggggtaaaggtcacgatgggttgtaccaaggattgagcacagccactaaagatacctatgatgcgctccacatgcaggccctgccgccaagataa

SEQ ID NO: 2643 - DNA, 2451 bp, synthetic construct
  source 1..2451: mol_type = other DNA
atggccttaccagtgaccgccttgctcctgccgctggccttgctgctccacgccgccaggccggaattcgacgtgacccagacacctcggaacagaatcaccaagaccggcaagcggatcatgctggaatgcagccagaccaagggccacgaccggatgtactggtacagacaggaccctggcctgggcctgagactgatctactacagcttcgacgtgaaggacatcaacaagggcgagatcagcgacggctacagcgtgtcaagacaggctcaggccaagttcagcctgtctctggaaagcgccattcctaaccagacagccctgtacttctgtgccacaagcggccagggcgcttacgaggaacagttctttggccctggcaccagactgacagttctcgaggacctgaagaacgtgttcccacctgaggtggccgtgttcgagcctagcgaggccgagatcagccacacccagaaagccaccctcgtgtgcctggctaccggcttctaccccgaccatgtggaactgtcttggtgggtcaacggcaaagaggtgcacagcggcgtgtctaccgacccccagccactgaaagaacagcccgccctgaacgacagccggtactgcctgagcagcagactgagagtgtccgccaccttctggcagaacccccggaaccacttcagatgccaggtgcagttctacggcctgagcgagaacgacgagtggacccaggacagagccaagcccgtgacccagatcgtgtctgccgaagcctggggcagagccgattgcggatcccagagcttcggcctgctggaccccaagctgtgctacctgctggatggcatcctgttcatctacggcgtgatcctgaccgccctgttcctgagagtgaagttcagcagaagcgccgacgcccctgcctaccagcagggacagaaccaactgtacaacgagctgaacctgggcagacgggaagagtacgacgtgctggacaagcggagaggcagggaccctgagatgggcggaaagccccagcggagaaagaacccccaggaaggactgttcaacgaactccagaaagacaagatggccgaagccttcagcgagatcggcatgaagggcgagcggagaagaggcaagggccacgatggcctgttccagggcctgagcaccgccaccaaggacaccttcgacgccctgcacatgcaggccctgcctccaagaagggccaagcgatctggatctggagcaacaaacttctcactactcaaacaagcaggtgacgtggaggagaatcccgggcctactagtatggactggatttggcgcatccttttccttgtcggcgctgctaccggcgcgcattccttcgaaaagaaccaggtggaacagagccctcagagcctgattatcctggaaggcaagaactgcaccctccagtgcaactacaccgtgtctcccttcagcaacctgcggtggtacaagcaggatacaggcagaggccctgtgtctctgaccatcctgaccttcagcgagaacaccaagagcaacggcagatacaccgccacactggacgccgatacaaagcagagcagcctgcacatcacagccagccagctgagcgatagcgccagctacatctgtgtggtgtctggcggcacagacagctggggcaaactccagtttggagctggcacacaggtggtggtcacccctgatacgcgtatccagaaccctgatcctgccgtgtaccagctgcgggatagcaagagcagcgacaagagcgtgtgtctgttcaccgacttcgacagccagaccaacgtgtcccagagcaaggactccgacgtgtacatcaccgataagaccgtgctggacatgcggagcatggacttcaagagcaactccgccgtggcctggtccaacaagtccgatttcgcctgcgccaacgccttcaacaacagcattatccccgaggacacattcttcccaagccccgagagcagctgcggtacccagagttttgggttgttggaccctaaattgtgctatctgttggacggaatcctgttcatttacggagtgatcctgaccgcattgttcctgcgggttaagttttccagatccgcagacgcacccgcttaccaacaagggcagaaccaactctacaatgaacttaatttggggcggagggaagagtacgacgttctggacaaaaggaggggacgagatcccgagatgggcggaaagcctcagcgaaggaagaatccgcaagaggggctttataacgaactccagaaagataaaatggcagaagcctatagtgagattgggatgaagggagaaaggaggaggggtaaaggtcacgatgggttgtaccaaggattgagcacagccactaaagatacctatgatgcgctccacatgcaggccctgccgccaagataa

SEQ ID NO: 2644 - DNA, 2451 bp, synthetic construct
  source 1..2451: mol_type = other DNA
atggccttaccagtgaccgccttgctcctgccgctggccttgctgctccacgccgccaggccggaattcgacgtgacccagacacctcggaacagaatcaccaagaccggcaagcggatcatgctggaatgcagccagaccaagggccacgaccggatgtactggtacagacaggaccctggcctgggcctgagactgatctactacagcttcgacgtgaaggacatcaacaagggcgagatcagcgacggctacagcgtgtcaagacaggctcaggccaagttcagcctgtctctggaaagcgccattcctaaccagacagccctgtacttctgtgccacaagcggccagggcgcttacgaggaacagttctttggccctggcaccagactgacagttctcgaggacctgaagaacgtgttcccacctgaggtggccgtgttcgagcctagcgaggccgagatcagccacacccagaaagccaccctcgtgtgcctggctaccggcttctaccccgaccatgtggaactgtcttggtgggtcaacggcaaagaggtgcacagcggcgtgtctaccgacccccagccactgaaagaacagcccgccctgaacgacagccggtactgcctgagcagcagactgagagtgtccgccaccttctggcagaacccccggaaccacttcagatgccaggtgcagttctacggcctgagcgagaacgacgagtggacccaggacagagccaagcccgtgacccagatcgtgtctgccgaagcctggggcagagccgattgcggatcccagagcttcggcctgctggaccccaagctgtgctacctgctggatggcatcctgttcatctacggcgtgatcctgaccgccctgttcctgagagtgaagttcagcagaagcgccgacgcccctgcctaccagcagggacagaaccaactgtacaacgagctgaacctgggcagacgggaagagtacgacgtgctggacaagcggagaggcagggaccctgagatgggcggaaagccccagcggagaaagaacccccaggaaggactgttcaacgaactccagaaagacaagatggccgaagccttcagcgagatcggcatgaagggcgagcggagaagaggcaagggccacgatggcctgttccagggcctgagcaccgccaccaaggacaccttcgacgccctgcacatgcaggccctgcctccaagaagggccaagcgatctggatctggagcaacaaacttctcactactcaaacaagcaggtgacgtggaggagaatcccgggcctactagtatggactggatttggcgcatccttttccttgtcggcgctgctaccggcgcgcattccttcgaaaagaaccaggtggaacagagccctcagagcctgattatcctggaaggcaagaactgcaccctccagtgcaactacaccgtgtctcccttcagcaacctgcggtggtacaagcaggatacaggcagaggccctgtgtctctgaccatcctgaccttcagcgagaacaccaagagcaacggcagatacaccgccacactggacgccgatacaaagcagagcagcctgcacatcacagccagccagctgagcgatagcgccagctacatctgtgtggtgtctggcggcacagacagctggggcaaactccagtttggagctggcacacaggtggtggtcacccctgatacgcgtatccagaaccctgatcctgccgtgtaccagctgcgggatagcaagagcagcgacaagagcgtgtgtctgttcaccgacttcgacagccagaccaacgtgtcccagagcaaggactccgacgtgtacatcaccgataagaccgtgctggacatgcggagcatggacttcaagagcaactccgccgtggcctggtccaacaagtccgatttcgcctgcgccaacgccttcaacaacagcattatccccgaggacacattcttcccaagccccgagagcagctgcggtacccagagcttcggcctgctggaccccaagctgtgctacctgctggatggcatcctgttcatctacggcgtgatcctgaccgccctgttcctgagagtgaagttcagcagaagcgccgacgcccctgcctaccagcagggacagaaccaactgtacaacgagctgaacctgggcagacgggaagagtacgacgtgctggacaagcggagaggcagggaccctgagatgggcggaaagccccagcggagaaagaacccccaggaaggactgtataacgaactccagaaagacaagatggccgaagcctacagcgagatcggcatgaagggcgagcggagaagaggcaagggccacgatggcctgtaccagggcctgagcaccgccaccaaggacacctatgacgccctgcacatgcaggccctgcctccaagataa

SEQ ID NO: 2645 - DNA, 2577 bp, synthetic construct
  source 1..2577: mol_type = other DNA
atggccttaccagtgaccgccttgctcctgccgctggccttgctgctccacgccgccaggccggaattcgacgtgacccagacacctcggaacagaatcaccaagaccggcaagcggatcatgctggaatgcagccagaccaagggccacgaccggatgtactggtacagacaggaccctggcctgggcctgagactgatctactacagcttcgacgtgaaggacatcaacaagggcgagatcagcgacggctacagcgtgtcaagacaggctcaggccaagttcagcctgtctctggaaagcgccattcctaaccagacagccctgtacttctgtgccacaagcggccagggcgcttacgaggaacagttctttggccctggcaccagactgacagttctcgaggacctgaagaacgtgttcccacctgaggtggccgtgttcgagcctagcgaggccgagatcagccacacccagaaagccaccctcgtgtgcctggctaccggcttctaccccgaccatgtggaactgtcttggtgggtcaacggcaaagaggtgcacagcggcgtgtctaccgacccccagccactgaaagaacagcccgccctgaacgacagccggtactgcctgagcagcagactgagagtgtccgccaccttctggcagaacccccggaaccacttcagatgccaggtgcagttctacggcctgagcgagaacgacgagtggacccaggacagagccaagcccgtgacccagatcgtgtctgccgaagcctggggcagagccgattgcggatcccagagcttcggcctgctggaccccaagctgtgctacctgctggatggcatcctgttcatctacggcgtgatcctgaccgccctgttcctgagagtgaagttcagcagaagcgccgacgcccctgcctaccagcagggacagaaccaactgtacaacgagctgaacctgggcagacgggaagagtacgacgtgctggacaagcggagaggcagggaccctgagatgggcggaaagccccagcggagaaagaacccccaggaaggactgttcaacgaactccagaaagacaagatggccgaagccttcagcgagatcggcatgaagggcgagcggagaagaggcaagggccacgatggcctgttccagggcctgagcaccgccaccaaggacaccttcgacgccctgcacatgcaggccctgcctccaagaagggccaagcgatctggatctggagcaacaaacttctcactactcaaacaagcaggtgacgtggaggagaatcccgggcctactagtatggactggatttggcgcatccttttccttgtcggcgctgctaccggcgcgcattccttcgaaaagaaccaggtggaacagagccctcagagcctgattatcctggaaggcaagaactgcaccctccagtgcaactacaccgtgtctcccttcagcaacctgcggtggtacaagcaggatacaggcagaggccctgtgtctctgaccatcctgaccttcagcgagaacaccaagagcaacggcagatacaccgccacactggacgccgatacaaagcagagcagcctgcacatcacagccagccagctgagcgatagcgccagctacatctgtgtggtgtctggcggcacagacagctggggcaaactccagtttggagctggcacacaggtggtggtcacccctgatacgcgtatccagaaccctgatcctgccgtgtaccagctgcgggatagcaagagcagcgacaagagcgtgtgtctgttcaccgacttcgacagccagaccaacgtgtcccagagcaaggactccgacgtgtacatcaccgataagaccgtgctggacatgcggagcatggacttcaagagcaactccgccgtggcctggtccaacaagtccgatttcgcctgcgccaacgccttcaacaacagcattatccccgaggacacattcttcccaagccccgagagcagctgcggtacccagagcttcggcctgctggaccccaagctgtgctacctgctggatggcatcctgttcatctacggcgtgatcctgaccgccctgttcctgaaacggggcagaaagaaactcctgtatatattcaaacaaccatttatgagaccagtacaaactactcaagaggaagatggctgtagctgccgatttccagaagaagaagaaggaggatgtgaactgagagtgaagttcagcagaagcgccgacgcccctgcctaccagcagggacagaaccaactgtacaacgagctgaacctgggcagacgggaagagtacgacgtgctggacaagcggagaggcagggaccctgagatgggcggaaagccccagcggagaaagaacccccaggaaggactgtataacgaactccagaaagacaagatggccgaagcctacagcgagatcggcatgaagggcgagcggagaagaggcaagggccacgatggcctgtaccagggcctgagcaccgccaccaaggacacctatgacgccctgcacatgcaggccctgcctccaagataa

SEQ ID NO: 2646 - DNA, 2574 bp, synthetic construct
  source 1..2574: mol_type = other DNA
atggccttaccagtgaccgccttgctcctgccgctggccttgctgctccacgccgccaggccggaattcgacgtgacccagacacctcggaacagaatcaccaagaccggcaagcggatcatgctggaatgcagccagaccaagggccacgaccggatgtactggtacagacaggaccctggcctgggcctgagactgatctactacagcttcgacgtgaaggacatcaacaagggcgagatcagcgacggctacagcgtgtcaagacaggctcaggccaagttcagcctgtctctggaaagcgccattcctaaccagacagccctgtacttctgtgccacaagcggccagggcgcttacgaggaacagttctttggccctggcaccagactgacagttctcgaggacctgaagaacgtgttcccacctgaggtggccgtgttcgagcctagcgaggccgagatcagccacacccagaaagccaccctcgtgtgcctggctaccggcttctaccccgaccatgtggaactgtcttggtgggtcaacggcaaagaggtgcacagcggcgtgtctaccgacccccagccactgaaagaacagcccgccctgaacgacagccggtactgcctgagcagcagactgagagtgtccgccaccttctggcagaacccccggaaccacttcagatgccaggtgcagttctacggcctgagcgagaacgacgagtggacccaggacagagccaagcccgtgacccagatcgtgtctgccgaagcctggggcagagccgattgcggatcccagagcttcggcctgctggaccccaagctgtgctacctgctggatggcatcctgttcatctacggcgtgatcctgaccgccctgttcctgagagtgaagttcagcagaagcgccgacgcccctgcctaccagcagggacagaaccaactgtacaacgagctgaacctgggcagacgggaagagtacgacgtgctggacaagcggagaggcagggaccctgagatgggcggaaagccccagcggagaaagaacccccaggaaggactgttcaacgaactccagaaagacaagatggccgaagccttcagcgagatcggcatgaagggcgagcggagaagaggcaagggccacgatggcctgttccagggcctgagcaccgccaccaaggacaccttcgacgccctgcacatgcaggccctgcctccaagaagggccaagcgatctggatctggagcaacaaacttctcactactcaaacaagcaggtgacgtggaggagaatcccgggcctactagtatggactggatttggcgcatccttttccttgtcggcgctgctaccggcgcgcattccttcgaaaagaaccaggtggaacagagccctcagagcctgattatcctggaaggcaagaactgcaccctccagtgcaactacaccgtgtctcccttcagcaacctgcggtggtacaagcaggatacaggcagaggccctgtgtctctgaccatcctgaccttcagcgagaacaccaagagcaacggcagatacaccgccacactggacgccgatacaaagcagagcagcctgcacatcacagccagccagctgagcgatagcgccagctacatctgtgtggtgtctggcggcacagacagctggggcaaactccagtttggagctggcacacaggtggtggtcacccctgatacgcgtatccagaaccctgatcctgccgtgtaccagctgcgggatagcaagagcagcgacaagagcgtgtgtctgttcaccgacttcgacagccagaccaacgtgtcccagagcaaggactccgacgtgtacatcaccgataagaccgtgctggacatgcggagcatggacttcaagagcaactccgccgtggcctggtccaacaagtccgatttcgcctgcgccaacgccttcaacaacagcattatccccgaggacacattcttcccaagccccgagagcagctgcggtacccagagcttcggcctgctggaccccaagctgtgctacctgctggatggcatcctgttcatctacggcgtgatcctgaccgccctgttcctgaggagtaagaggagcaggctcctgcacagtgactacatgaacatgactccacgccgccccggacccacccgcaagcattaccagccctatgccccaccacgcgacttcgcagcctatcgctccagagtgaagttcagcagaagcgccgacgcccctgcctaccagcagggacagaaccaactgtacaacgagctgaacctgggcagacgggaagagtacgacgtgctggacaagcggagaggcagggaccctgagatgggcggaaagccccagcggagaaagaacccccaggaaggactgtataacgaactccagaaagacaagatggccgaagcctacagcgagatcggcatgaagggcgagcggagaagaggcaagggccacgatggcctgtaccagggcctgagcaccgccaccaaggacacctatgacgccctgcacatgcaggccctgcctccaagataa

SEQ ID NO: 2647 - DNA, 2559 bp, synthetic construct
  source 1..2559: mol_type = other DNA
atggccttaccagtgaccgccttgctcctgccgctggccttgctgctccacgccgccaggccggaattcgacgtgacccagacacctcggaacagaatcaccaagaccggcaagcggatcatgctggaatgcagccagaccaagggccacgaccggatgtactggtacagacaggaccctggcctgggcctgagactgatctactacagcttcgacgtgaaggacatcaacaagggcgagatcagcgacggctacagcgtgtcaagacaggctcaggccaagttcagcctgtctctggaaagcgccattcctaaccagacagccctgtacttctgtgccacaagcggccagggcgcttacgaggaacagttctttggccctggcaccagactgacagttctcgaggacctgaagaacgtgttcccacctgaggtggccgtgttcgagcctagcgaggccgagatcagccacacccagaaagccaccctcgtgtgcctggctaccggcttctaccccgaccatgtggaactgtcttggtgggtcaacggcaaagaggtgcacagcggcgtgtctaccgacccccagccactgaaagaacagcccgccctgaacgacagccggtactgcctgagcagcagactgagagtgtccgccaccttctggcagaacccccggaaccacttcagatgccaggtgcagttctacggcctgagcgagaacgacgagtggacccaggacagagccaagcccgtgacccagatcgtgtctgccgaagcctggggcagagccgattgcggatcccagagcttcggcctgctggaccccaagctgtgctacctgctggatggcatcctgttcatctacggcgtgatcctgaccgccctgttcctgagagtgaagttcagcagaagcgccgacgcccctgcctaccagcagggacagaaccaactgtacaacgagctgaacctgggcagacgggaagagtacgacgtgctggacaagcggagaggcagggaccctgagatgggcggaaagccccagcggagaaagaacccccaggaaggactgttcaacgaactccagaaagacaagatggccgaagccttcagcgagatcggcatgaagggcgagcggagaagaggcaagggccacgatggcctgttccagggcctgagcaccgccaccaaggacaccttcgacgccctgcacatgcaggccctgcctccaagaagggccaagcgatctggatctggagcaacaaacttctcactactcaaacaagcaggtgacgtggaggagaatcccgggcctactagtatggactggatttggcgcatccttttccttgtcggcgctgctaccggcgcgcattccttcgaaaagaaccaggtggaacagagccctcagagcctgattatcctggaaggcaagaactgcaccctccagtgcaactacaccgtgtctcccttcagcaacctgcggtggtacaagcaggatacaggcagaggccctgtgtctctgaccatcctgaccttcagcgagaacaccaagagcaacggcagatacaccgccacactggacgccgatacaaagcagagcagcctgcacatcacagccagccagctgagcgatagcgccagctacatctgtgtggtgtctggcggcacagacagctggggcaaactccagtttggagctggcacacaggtggtggtcacccctgatacgcgtatccagaaccctgatcctgccgtgtaccagctgcgggatagcaagagcagcgacaagagcgtgtgtctgttcaccgacttcgacagccagaccaacgtgtcccagagcaaggactccgacgtgtacatcaccgataagaccgtgctggacatgcggagcatggacttcaagagcaactccgccgtggcctggtccaacaagtccgatttcgcctgcgccaacgccttcaacaacagcattatccccgaggacacattcttcccaagccccgagagcagctgcggtacccagagcttcggcctgctggaccccaagctgtgctacctgctggatggcatcctgttcatctacggcgtgatcctgaccgccctgttcctgagggaccaaagactgcctcctgacgctcacaaacctccaggcggaggcagcttcagaacccctatccaagaggaacaggctgacgcccacagcaccctggcaaaaattagagtgaagttcagcagaagcgccgacgcccctgcctaccagcagggacagaaccaactgtacaacgagctgaacctgggcagacgggaagagtacgacgtgctggacaagcggagaggcagggaccctgagatgggcggaaagccccagcggagaaagaacccccaggaaggactgtataacgaactccagaaagacaagatggccgaagcctacagcgagatcggcatgaagggcgagcggagaagaggcaagggccacgatggcctgtaccagggcctgagcaccgccaccaaggacacctatgacgccctgcacatgcaggccctgcctccaagataa

SEQ ID NO: 2648 - DNA, 2811 bp, synthetic construct
  source 1..2811: mol_type = other DNA
atggccttaccagtgaccgccttgctcctgccgctggccttgctgctccacgccgccaggccggaattcgacgtgacccagacacctcggaacagaatcaccaagaccggcaagcggatcatgctggaatgcagccagaccaagggccacgaccggatgtactggtacagacaggaccctggcctgggcctgagactgatctactacagcttcgacgtgaaggacatcaacaagggcgagatcagcgacggctacagcgtgtcaagacaggctcaggccaagttcagcctgtctctggaaagcgccattcctaaccagacagccctgtacttctgtgccacaagcggccagggcgcttacgaggaacagttctttggccctggcaccagactgacagttctcgaggacctgaagaacgtgttcccacctgaggtggccgtgttcgagcctagcgaggccgagatcagccacacccagaaagccaccctcgtgtgcctggctaccggcttctaccccgaccatgtggaactgtcttggtgggtcaacggcaaagaggtgcacagcggcgtgtctaccgacccccagccactgaaagaacagcccgccctgaacgacagccggtactgcctgagcagcagactgagagtgtccgccaccttctggcagaacccccggaaccacttcagatgccaggtgcagttctacggcctgagcgagaacgacgagtggacccaggacagagccaagcccgtgacccagatcgtgtctgccgaagcctggggcagagccgattgcggatcccagagcttcggcctgctggaccccaagctgtgctacctgctggatggcatcctgttcatctacggcgtgatcctgaccgccctgttcctgagagtgaagttcagcagaagcgccgacgcccctgcctaccagcagggacagaaccaactgtacaacgagctgaacctgggcagacgggaagagtacgacgtgctggacaagcggagaggcagggaccctgagatgggcggaaagccccagcggagaaagaacccccaggaaggactgttcaacgaactccagaaagacaagatggccgaagccttcagcgagatcggcatgaagggcgagcggagaagaggcaagggccacgatggcctgttccagggcctgagcaccgccaccaaggacaccttcgacgccctgcacatgcaggccctgcctccaagaagggccaagcgatctggatctggagcaacaaacttctcactactcaaacaagcaggtgacgtggaggagaatcccgggcctactagtatggactggatttggcgcatccttttccttgtcggcgctgctaccggcgcgcattccttcgaaaagaaccaggtggaacagagccctcagagcctgattatcctggaaggcaagaactgcaccctccagtgcaactacaccgtgtctcccttcagcaacctgcggtggtacaagcaggatacaggcagaggccctgtgtctctgaccatcctgaccttcagcgagaacaccaagagcaacggcagatacaccgccacactggacgccgatacaaagcagagcagcctgcacatcacagccagccagctgagcgatagcgccagctacatctgtgtggtgtctggcggcacagacagctggggcaaactccagtttggagctggcacacaggtggtggtcacccctgatacgcgtatccagaaccctgatcctgccgtgtaccagctgcgggatagcaagagcagcgacaagagcgtgtgtctgttcaccgacttcgacagccagaccaacgtgtcccagagcaaggactccgacgtgtacatcaccgataagaccgtgctggacatgcggagcatggacttcaagagcaactccgccgtggcctggtccaacaagtccgatttcgcctgcgccaacgccttcaacaacagcattatccccgaggacacattcttcccaagccccgagagcagctgcggtacccagagcttcggcctgctggaccccaagctgtgctacctgctggatggcatcctgttcatctacggcgtgatcctgaccgccctgttcctgtggcggcggaagcggaaagagaagcagtctgagacaagccccaaagagttcctgaccatctacgaggacgtgaaggacctgaaaacccggcggaaccacgaacaagagcagacctttcctggcggaggcagcaccatctacagcatgatccagagccagagcagcgcccctacaagccaagagcctgcctacacactgtactccctgatccagcctagcagaaagagcggcagccggaagagaaatcacagccccagcttcaacagcacgatctacgaagtgatcggcaagagccagccaaaggctcagaaccctgccagactgagccggaaagagctggaaaacttcgacgtgtacagcagagtgaagttcagcagaagcgccgacgcccctgcctaccagcagggacagaaccaactgtacaacgagctgaacctgggcagacgggaagagtacgacgtgctggacaagcggagaggcagggaccctgagatgggcggaaagccccagcggagaaagaacccccaggaaggactgtataacgaactccagaaagacaagatggccgaagcctacagcgagatcggcatgaagggcgagcggagaagaggcaagggccacgatggcctgtaccagggcctgagcaccgccaccaaggacacctatgacgccctgcacatgcaggccctgcctccaagataa

SEQ ID NO: 2649 - DNA, 2574 bp, synthetic construct
  source 1..2574: mol_type = other DNA
atggccttaccagtgaccgccttgctcctgccgctggccttgctgctccacgccgccaggccggaattcgacgtgacccagacacctcggaacagaatcaccaagaccggcaagcggatcatgctggaatgcagccagaccaagggccacgaccggatgtactggtacagacaggaccctggcctgggcctgagactgatctactacagcttcgacgtgaaggacatcaacaagggcgagatcagcgacggctacagcgtgtcaagacaggctcaggccaagttcagcctgtctctggaaagcgccattcctaaccagacagccctgtacttctgtgccacaagcggccagggcgcttacgaggaacagttctttggccctggcaccagactgacagttctcgaggacctgaagaacgtgttcccacctgaggtggccgtgttcgagcctagcgaggccgagatcagccacacccagaaagccaccctcgtgtgcctggctaccggcttctaccccgaccatgtggaactgtcttggtgggtcaacggcaaagaggtgcacagcggcgtgtctaccgacccccagccactgaaagaacagcccgccctgaacgacagccggtactgcctgagcagcagactgagagtgtccgccaccttctggcagaacccccggaaccacttcagatgccaggtgcagttctacggcctgagcgagaacgacgagtggacccaggacagagccaagcccgtgacccagatcgtgtctgccgaagcctggggcagagccgattgcggatcccagagcttcggcctgctggaccccaagctgtgctacctgctggatggcatcctgttcatctacggcgtgatcctgaccgccctgttcctgagagtgaagttcagcagaagcgccgacgcccctgcctaccagcagggacagaaccaactgtacaacgagctgaacctgggcagacgggaagagtacgacgtgctggacaagcggagaggcagggaccctgagatgggcggaaagccccagcggagaaagaacccccaggaaggactgttcaacgaactccagaaagacaagatggccgaagccttcagcgagatcggcatgaagggcgagcggagaagaggcaagggccacgatggcctgttccagggcctgagcaccgccaccaaggacaccttcgacgccctgcacatgcaggccctgcctccaagaagggccaagcgatctggatctggagcaacaaacttctcactactcaaacaagcaggtgacgtggaggagaatcccgggcctactagtatggactggatttggcgcatccttttccttgtcggcgctgctaccggcgcgcattccttcgaaaagaaccaggtggaacagagccctcagagcctgattatcctggaaggcaagaactgcaccctccagtgcaactacaccgtgtctcccttcagcaacctgcggtggtacaagcaggatacaggcagaggccctgtgtctctgaccatcctgaccttcagcgagaacaccaagagcaacggcagatacaccgccacactggacgccgatacaaagcagagcagcctgcacatcacagccagccagctgagcgatagcgccagctacatctgtgtggtgtctggcggcacagacagctggggcaaactccagtttggagctggcacacaggtggtggtcacccctgatacgcgtatccagaaccctgatcctgccgtgtaccagctgcgggatagcaagagcagcgacaagagcgtgtgtctgttcaccgacttcgacagccagaccaacgtgtcccagagcaaggactccgacgtgtacatcaccgataagaccgtgctggacatgcggagcatggacttcaagagcaactccgccgtggcctggtccaacaagtccgatttcgcctgcgccaacgccttcaacaacagcattatccccgaggacacattcttcccaagccccgagagcagctgcggtacccagagttttgggttgttggaccctaaattgtgctatctgttggacggaatcctgttcatttacggagtgatcctgaccgcattgttcctgaggagcaagcggtcacggctgctccacagcgattacatgaatatgacaccacgaagaccgggtcctactcgcaaacactaccaaccctacgcacctccccgcgactttgcagcgtaccgatctcgggttaagttttccagatccgcagacgcacccgcttaccaacaagggcagaaccaactctacaatgaacttaatttggggcggagggaagagtacgacgttctggacaaaaggaggggacgagatcccgagatgggcggaaagcctcagcgaaggaagaatccgcaagaggggctttataacgaactccagaaagataaaatggcagaagcctatagtgagattgggatgaagggagaaaggaggaggggtaaaggtcacgatgggttgtaccaaggattgagcacagccactaaagatacctatgatgcgctccacatgcaggccctgccgccaagataa

SEQ ID NO: 2650 - DNA, 2577 bp, synthetic construct
  source 1..2577: mol_type = other DNA
atggccttaccagtgaccgccttgctcctgccgctggccttgctgctccacgccgccaggccggaattcgacgtgacccagacacctcggaacagaatcaccaagaccggcaagcggatcatgctggaatgcagccagaccaagggccacgaccggatgtactggtacagacaggaccctggcctgggcctgagactgatctactacagcttcgacgtgaaggacatcaacaagggcgagatcagcgacggctacagcgtgtcaagacaggctcaggccaagttcagcctgtctctggaaagcgccattcctaaccagacagccctgtacttctgtgccacaagcggccagggcgcttacgaggaacagttctttggccctggcaccagactgacagttctcgaggacctgaagaacgtgttcccacctgaggtggccgtgttcgagcctagcgaggccgagatcagccacacccagaaagccaccctcgtgtgcctggctaccggcttctaccccgaccatgtggaactgtcttggtgggtcaacggcaaagaggtgcacagcggcgtgtctaccgacccccagccactgaaagaacagcccgccctgaacgacagccggtactgcctgagcagcagactgagagtgtccgccaccttctggcagaacccccggaaccacttcagatgccaggtgcagttctacggcctgagcgagaacgacgagtggacccaggacagagccaagcccgtgacccagatcgtgtctgccgaagcctggggcagagccgattgcggatcccagagcttcggcctgctggaccccaagctgtgctacctgctggatggcatcctgttcatctacggcgtgatcctgaccgccctgttcctgagagtgaagttcagcagaagcgccgacgcccctgcctaccagcagggacagaaccaactgtacaacgagctgaacctgggcagacgggaagagtacgacgtgctggacaagcggagaggcagggaccctgagatgggcggaaagccccagcggagaaagaacccccaggaaggactgttcaacgaactccagaaagacaagatggccgaagccttcagcgagatcggcatgaagggcgagcggagaagaggcaagggccacgatggcctgttccagggcctgagcaccgccaccaaggacaccttcgacgccctgcacatgcaggccctgcctccaagaagggccaagcgatctggatctggagcaacaaacttctcactactcaaacaagcaggtgacgtggaggagaatcccgggcctactagtatggactggatttggcgcatccttttccttgtcggcgctgctaccggcgcgcattccttcgaaaagaaccaggtggaacagagccctcagagcctgattatcctggaaggcaagaactgcaccctccagtgcaactacaccgtgtctcccttcagcaacctgcggtggtacaagcaggatacaggcagaggccctgtgtctctgaccatcctgaccttcagcgagaacaccaagagcaacggcagatacaccgccacactggacgccgatacaaagcagagcagcctgcacatcacagccagccagctgagcgatagcgccagctacatctgtgtggtgtctggcggcacagacagctggggcaaactccagtttggagctggcacacaggtggtggtcacccctgatacgcgtatccagaaccctgatcctgccgtgtaccagctgcgggatagcaagagcagcgacaagagcgtgtgtctgttcaccgacttcgacagccagaccaacgtgtcccagagcaaggactccgacgtgtacatcaccgataagaccgtgctggacatgcggagcatggacttcaagagcaactccgccgtggcctggtccaacaagtccgatttcgcctgcgccaacgccttcaacaacagcattatccccgaggacacattcttcccaagccccgagagcagctgcggtacccagagttttgggttgttggaccctaaattgtgctatctgttggacggaatcctgttcatttacggagtgatcctgaccgcattgttcctgaagagaggccggaagaagctgctgtacatcttcaagcagcctttcatgcggcccgtgcagaccacccaggaagaggacggctgctcctgccggttccccgaggaagaagaaggcggctgcgagctgcgggttaagttttccagatccgcagacgcacccgcttaccaacaagggcagaaccaactctacaatgaacttaatttggggcggagggaagagtacgacgttctggacaaaaggaggggacgagatcccgagatgggcggaaagcctcagcgaaggaagaatccgcaagaggggctttataacgaactccagaaagataaaatggcagaagcctatagtgagattgggatgaagggagaaaggaggaggggtaaaggtcacgatgggttgtaccaaggattgagcacagccactaaagatacctatgatgcgctccacatgcaggccctgccgccaagataa

SEQ ID NO: 2651 - DNA, 2451 bp, synthetic construct
  source 1..2451: mol_type = other DNA
atggccttaccagtgaccgccttgctcctgccgctggccttgctgctccacgccgccaggccggaattcgacgtgacccagacacctcggaacagaatcaccaagaccggcaagcggatcatgctggaatgcagccagaccaagggccacgaccggatgtactggtacagacaggaccctggcctgggcctgagactgatctactacagcttcgacgtgaaggacatcaacaagggcgagatcagcgacggctacagcgtgtcaagacaggctcaggccaagttcagcctgtctctggaaagcgccattcctaaccagacagccctgtacttctgtgccacaagcggccagggcgcttacgaggaacagttctttggccctggcaccagactgacagttctcgaggacctgaagaacgtgttcccacctgaggtggccgtgttcgagcctagcgaggccgagatcagccacacccagaaagccaccctcgtgtgcctggctaccggcttctaccccgaccatgtggaactgtcttggtgggtcaacggcaaagaggtgcacagcggcgtgtctaccgacccccagccactgaaagaacagcccgccctgaacgacagccggtactgcctgagcagcagactgagagtgtccgccaccttctggcagaacccccggaaccacttcagatgccaggtgcagttctacggcctgagcgagaacgacgagtggacccaggacagagccaagcccgtgacccagatcgtgtctgccgaagcctggggcagagccgattgcggatcccagagcttcggcctgctggaccccaagctgtgctacctgctggatggcatcctgttcatctacggcgtgatcctgaccgccctgttcctgagagtgaagttcagcagaagcgccgacgcccctgcctaccagcagggacagaaccaactgtacaacgagctgaacctgggcagacgggaagagtacgacgtgctggacaagcggagaggcagggaccctgagatgggcggaaagccccagcggagaaagaacccccaggaaggactgttcaacgaactccagaaagacaagatggccgaagccttcagcgagatcggcatgaagggcgagcggagaagaggcaagggccacgatggcctgttccagggcctgagcaccgccaccaaggacaccttcgacgccctgcacatgcaggccctgcctccaagaagggccaagcgatctggatctggagcaacaaacttctcactactcaaacaagcaggtgacgtggaggagaatcccgggcctactagtatggactggatttggcgcatccttttccttgtcggcgctgctaccggcgcgcattccttcgaaaagaaccaggtggaacagagccctcagagcctgattatcctggaaggcaagaactgcaccctccagtgcaactacaccgtgtctcccttcagcaacctgcggtggtacaagcaggatacaggcagaggccctgtgtctctgaccatcctgaccttcagcgagaacaccaagagcaacggcagatacaccgccacactggacgccgatacaaagcagagcagcctgcacatcacagccagccagctgagcgatagcgccagctacatctgtgtggtgtctggcggcacagacagctggggcaaactccagtttggagctggcacacaggtggtggtcacccctgatacgcgtatccagaaccctgatcctgccgtgtaccagctgcgggatagcaagagcagcgacaagagcgtgtgtctgttcaccgacttcgacagccagaccaacgtgtcccagagcaaggactccgacgtgtacatcaccgataagaccgtgctggacatgcggagcatggacttcaagagcaactccgccgtggcctggtccaacaagtccgatttcgcctgcgccaacgccttcaacaacagcattatccccgaggacacattcttcccaagccccgagagcagctgcggtacccagagcttcggcctgctggaccccaagctgagctacctgctggatggcatcctgttcatctacggcgtgatcctgaccgccctgttcctgagagtgaagttcagcagaagcgccgacgcccctgcctaccagcagggacagaaccaactgtacaacgagctgaacctgggcagacgggaagagtacgacgtgctggacaagcggagaggcagggaccctgagatgggcggaaagccccagcggagaaagaacccccaggaaggactgtataacgaactccagaaagacaagatggccgaagcctacagcgagatcggcatgaagggcgagcggagaagaggcaagggccacgatggcctgtaccagggcctgagcaccgccaccaaggacacctatgacgccctgcacatgcaggccctgcctccaagataa

SEQ ID NO: 2652 - DNA, 2451 bp, synthetic construct
  source 1..2451: mol_type = other DNA
atggccttaccagtgaccgccttgctcctgccgctggccttgctgctccacgccgccaggccggaattcgacgtgacccagacacctcggaacagaatcaccaagaccggcaagcggatcatgctggaatgcagccagaccaagggccacgaccggatgtactggtacagacaggaccctggcctgggcctgagactgatctactacagcttcgacgtgaaggacatcaacaagggcgagatcagcgacggctacagcgtgtcaagacaggctcaggccaagttcagcctgtctctggaaagcgccattcctaaccagacagccctgtacttctgtgccacaagcggccagggcgcttacgaggaacagttctttggccctggcaccagactgacagttctcgaggacctgaagaacgtgttcccacctgaggtggccgtgttcgagcctagcgaggccgagatcagccacacccagaaagccaccctcgtgtgcctggctaccggcttctaccccgaccatgtggaactgtcttggtgggtcaacggcaaagaggtgcacagcggcgtgtctaccgacccccagccactgaaagaacagcccgccctgaacgacagccggtactgcctgagcagcagactgagagtgtccgccaccttctggcagaacccccggaaccacttcagatgccaggtgcagttctacggcctgagcgagaacgacgagtggacccaggacagagccaagcccgtgacccagatcgtgtctgccgaagcctggggcagagccgattgcggatcccagagcttcggcctgctggaccccaagctgtgctacctgctggatggcatcctgttcatctacggcgtgatcctgaccgccctgttcctgagagtgaagttcagcagaagcgccgacgcccctgcctaccagcagggacagaaccaactgtacaacgagctgaacctgggcagacgggaagagtacgacgtgctggacaagcggagaggcagggaccctgagatgggcggaaagccccagcggagaaagaacccccaggaaggactgttcaacgaactccagaaagacaagatggccgaagccttcagcgagatcggcatgaagggcgagcggagaagaggcaagggccacgatggcctgttccagggcctgagcaccgccaccaaggacaccttcgacgccctgcacatgcaggccctgcctccaagaagggccaagcgatctggatctggagcaacaaacttctcactactcaaacaagcaggtgacgtggaggagaatcccgggcctactagtatggactggatttggcgcatccttttccttgtcggcgctgctaccggcgcgcattccttcgaaaagaaccaggtggaacagagccctcagagcctgattatcctggaaggcaagaactgcaccctccagtgcaactacaccgtgtctcccttcagcaacctgcggtggtacaagcaggatacaggcagaggccctgtgtctctgaccatcctgaccttcagcgagaacaccaagagcaacggcagatacaccgccacactggacgccgatacaaagcagagcagcctgcacatcacagccagccagctgagcgatagcgccagctacatctgtgtggtgtctggcggcacagacagctggggcaaactccagtttggagctggcacacaggtggtggtcacccctgatacgcgtatccagaaccctgatcctgccgtgtaccagctgcgggatagcaagagcagcgacaagagcgtgtgtctgttcaccgacttcgacagccagaccaacgtgtcccagagcaaggactccgacgtgtacatcaccgataagaccgtgctggacatgcggagcatggacttcaagagcaactccgccgtggcctggtccaacaagtccgatttcgcctgcgccaacgccttcaacaacagcattatccccgaggacacattcttcccaagccccgagagcagctgcggtacccagagttttgggttgttggaccctaaattgagctatctgttggacggaatcctgttcatttacggagtgatcctgaccgcattgttcctgcgggttaagttttccagatccgcagacgcacccgcttaccaacaagggcagaaccaactctacaatgaacttaatttggggcggagggaagagtacgacgttctggacaaaaggaggggacgagatcccgagatgggcggaaagcctcagcgaaggaagaatccgcaagaggggctttataacgaactccagaaagataaaatggcagaagcctatagtgagattgggatgaagggagaaaggaggaggggtaaaggtcacgatgggttgtaccaaggattgagcacagccactaaagatacctatgatgcgctccacatgcaggccctgccgccaagataa

SEQ ID NO: 2653 - DNA, 2451 bp, synthetic construct
  source 1..2451: mol_type = other DNA
atggccttaccagtgaccgccttgctcctgccgctggccttgctgctccacgccgccaggccggaattcgacgtgacccagacacctcggaacagaatcaccaagaccggcaagcggatcatgctggaatgcagccagaccaagggccacgaccggatgtactggtacagacaggaccctggcctgggcctgagactgatctactacagcttcgacgtgaaggacatcaacaagggcgagatcagcgacggctacagcgtgtcaagacaggctcaggccaagttcagcctgtctctggaaagcgccattcctaaccagacagccctgtacttctgtgccacaagcggccagggcgcttacgaggaacagttctttggccctggcaccagactgacagttctcgaggacctgaagaacgtgttcccacctgaggtggccgtgttcgagcctagcgaggccgagatcagccacacccagaaagccaccctcgtgtgcctggctaccggcttctaccccgaccatgtggaactgtcttggtgggtcaacggcaaagaggtgcacagcggcgtgtctaccgacccccagccactgaaagaacagcccgccctgaacgacagccggtactgcctgagcagcagactgagagtgtccgccaccttctggcagaacccccggaaccacttcagatgccaggtgcagttctacggcctgagcgagaacgacgagtggacccaggacagagccaagcccgtgacccagatcgtgtctgccgaagcctggggcagagccgattgcggatcccagagcttcggcctgctggaccccaagctgagctacctgctggatggcatcctgttcatctacggcgtgatcctgaccgccctgttcctgagagtgaagttcagcagaagcgccgacgcccctgcctaccagcagggacagaaccaactgtacaacgagctgaacctgggcagacgggaagagtacgacgtgctggacaagcggagaggcagggaccctgagatgggcggaaagccccagcggagaaagaacccccaggaaggactgtataacgaactccagaaagacaagatggccgaagcctacagcgagatcggcatgaagggcgagcggagaagaggcaagggccacgatggcctgtaccagggcctgagcaccgccaccaaggacacctatgacgccctgcacatgcaggccctgcctccaagaagggccaagcgatctggatctggagcaacaaacttctcactactcaaacaagcaggtgacgtggaggagaatcccgggcctactagtatggactggatttggcgcatccttttccttgtcggcgctgctaccggcgcgcattccttcgaaaagaaccaggtggaacagagccctcagagcctgattatcctggaaggcaagaactgcaccctccagtgcaactacaccgtgtctcccttcagcaacctgcggtggtacaagcaggatacaggcagaggccctgtgtctctgaccatcctgaccttcagcgagaacaccaagagcaacggcagatacaccgccacactggacgccgatacaaagcagagcagcctgcacatcacagccagccagctgagcgatagcgccagctacatctgtgtggtgtctggcggcacagacagctggggcaaactccagtttggagctggcacacaggtggtggtcacccctgatacgcgtatccagaaccctgatcctgccgtgtaccagctgcgggatagcaagagcagcgacaagagcgtgtgtctgttcaccgacttcgacagccagaccaacgtgtcccagagcaaggactccgacgtgtacatcaccgataagaccgtgctggacatgcggagcatggacttcaagagcaactccgccgtggcctggtccaacaagtccgatttcgcctgcgccaacgccttcaacaacagcattatccccgaggacacattcttcccaagccccgagagcagctgcggtacccagagttttgggttgttggaccctaaattgagctatctgttggacggaatcctgttcatttacggagtgatcctgaccgcattgttcctgcgggttaagttttccagatccgcagacgcacccgcttaccaacaagggcagaaccaactctacaatgaacttaatttggggcggagggaagagtacgacgttctggacaaaaggaggggacgagatcccgagatgggcggaaagcctcagcgaaggaagaatccgcaagaggggctttataacgaactccagaaagataaaatggcagaagcctatagtgagattgggatgaagggagaaaggaggaggggtaaaggtcacgatgggttgtaccaaggattgagcacagccactaaagatacctatgatgcgctccacatgcaggccctgccgccaagataa

SEQ ID NO: 2654 - DNA, 2163 bp, synthetic construct
  source 1..2163: mol_type = other DNA
atggccttaccagtgaccgccttgctcctgccgctggccttgctgctccacgccgccaggccggaattcgacgtgacccagacacctcggaacagaatcaccaagaccggcaagcggatcatgctggaatgcagccagaccaagggccacgaccggatgtactggtacagacaggaccctggcctgggcctgagactgatctactacagcttcgacgtgaaggacatcaacaagggcgagatcagcgacggctacagcgtgtcaagacaggctcaggccaagttcagcctgtctctggaaagcgccattcctaaccagacagccctgtacttctgtgccacaagcggccagggcgcttacgaggaacagttctttggccctggcaccagactgacagttctcgaggacctgaagaacgtgttcccacctgaggtggccgtgttcgagcctagcgaggccgagatcagccacacccagaaagccaccctcgtgtgcctggctaccggcttctaccccgaccatgtggaactgtcttggtgggtcaacggcaaagaggtgcacagcggcgtgtctaccgacccccagccactgaaagaacagcccgccctgaacgacagccggtactgcctgagcagcagactgagagtgtccgccaccttctggcagaacccccggaaccacttcagatgccaggtgcagttctacggcctgagcgagaacgacgagtggacccaggacagagccaagcccgtgacccagatcgtgtctgccgaagcctggggcagagccgattgcggatccacaacacctggcgagagaagtagcctgcctgccttctatcctggcaccagcggctcttgttctggctgtggatctctgagcctgcctctgctggctggactggttgctgctgatgctgtggcctctctgctgattgtgggagccgtgttcctgtgcgccagacctagaagaagccccgctcaagaggacggcaaggtgtacatcaacatgcccggcagaggaagggccaagcgatctggatctggagcaacaaacttctcactactcaaacaagcaggtgacgtggaggagaatcccgggcctactagtatggactggatttggcgcatccttttccttgtcggcgctgctaccggcgcgcattccttcgaaaagaaccaggtggaacagagccctcagagcctgattatcctggaaggcaagaactgcaccctccagtgcaactacaccgtgtctcccttcagcaacctgcggtggtacaagcaggatacaggcagaggccctgtgtctctgaccatcctgaccttcagcgagaacaccaagagcaacggcagatacaccgccacactggacgccgatacaaagcagagcagcctgcacatcacagccagccagctgagcgatagcgccagctacatctgtgtggtgtctggcggcacagacagctggggcaaactccagtttggagctggcacacaggtggtggtcacccctgatacgcgtatccagaaccctgatcctgccgtgtaccagctgcgggatagcaagagcagcgacaagagcgtgtgtctgttcaccgacttcgacagccagaccaacgtgtcccagagcaaggactccgacgtgtacatcaccgataagaccgtgctggacatgcggagcatggacttcaagagcaactccgccgtggcctggtccaacaagtccgatttcgcctgcgccaacgccttcaacaacagcattatccccgaggacacattcttcccaagccccgagagcagctgcggtaccacaacacctggcgagagaagtagcctgcctgccttctatcctggcaccagcggctcttgttctggctgtggatctctgagcctgcctctgctggctggactggttgctgctgatgctgtggcctctctgctgattgtgggagccgtgttcaaacggggcagaaagaaactcctgtatatattcaaacaaccatttatgagaccagtacaaactactcaagaggaagatggctgtagctgccgatttccagaagaagaagaaggaggatgtgaactgctgtgcgccagacctagaagaagccccgctcaagaggacggcaaggtgtacatcaacatgcccggcagaggataa

SEQ ID NO: 2655 - DNA, 2160 bp, synthetic construct
  source 1..2160: mol_type = other DNA
atggccttaccagtgaccgccttgctcctgccgctggccttgctgctccacgccgccaggccggaattcgacgtgacccagacacctcggaacagaatcaccaagaccggcaagcggatcatgctggaatgcagccagaccaagggccacgaccggatgtactggtacagacaggaccctggcctgggcctgagactgatctactacagcttcgacgtgaaggacatcaacaagggcgagatcagcgacggctacagcgtgtcaagacaggctcaggccaagttcagcctgtctctggaaagcgccattcctaaccagacagccctgtacttctgtgccacaagcggccagggcgcttacgaggaacagttctttggccctggcaccagactgacagttctcgaggacctgaagaacgtgttcccacctgaggtggccgtgttcgagcctagcgaggccgagatcagccacacccagaaagccaccctcgtgtgcctggctaccggcttctaccccgaccatgtggaactgtcttggtgggtcaacggcaaagaggtgcacagcggcgtgtctaccgacccccagccactgaaagaacagcccgccctgaacgacagccggtactgcctgagcagcagactgagagtgtccgccaccttctggcagaacccccggaaccacttcagatgccaggtgcagttctacggcctgagcgagaacgacgagtggacccaggacagagccaagcccgtgacccagatcgtgtctgccgaagcctggggcagagccgattgcggatccacaacacctggcgagagaagtagcctgcctgccttctatcctggcaccagcggctcttgttctggctgtggatctctgagcctgcctctgctggctggactggttgctgctgatgctgtggcctctctgctgattgtgggagccgtgttcctgtgcgccagacctagaagaagccccgctcaagaggacggcaaggtgtacatcaacatgcccggcagaggaagggccaagcgatctggatctggagcaacaaacttctcactactcaaacaagcaggtgacgtggaggagaatcccgggcctactagtatggactggatttggcgcatccttttccttgtcggcgctgctaccggcgcgcattccttcgaaaagaaccaggtggaacagagccctcagagcctgattatcctggaaggcaagaactgcaccctccagtgcaactacaccgtgtctcccttcagcaacctgcggtggtacaagcaggatacaggcagaggccctgtgtctctgaccatcctgaccttcagcgagaacaccaagagcaacggcagatacaccgccacactggacgccgatacaaagcagagcagcctgcacatcacagccagccagctgagcgatagcgccagctacatctgtgtggtgtctggcggcacagacagctggggcaaactccagtttggagctggcacacaggtggtggtcacccctgatacgcgtatccagaaccctgatcctgccgtgtaccagctgcgggatagcaagagcagcgacaagagcgtgtgtctgttcaccgacttcgacagccagaccaacgtgtcccagagcaaggactccgacgtgtacatcaccgataagaccgtgctggacatgcggagcatggacttcaagagcaactccgccgtggcctggtccaacaagtccgatttcgcctgcgccaacgccttcaacaacagcattatccccgaggacacattcttcccaagccccgagagcagctgcggtaccacaacacctggcgagagaagtagcctgcctgccttctatcctggcaccagcggctcttgttctggctgtggatctctgagcctgcctctgctggctggactggttgctgctgatgctgtggcctctctgctgattgtgggagccgtgttcaggagtaagaggagcaggctcctgcacagtgactacatgaacatgactccacgccgccccggacccacccgcaagcattaccagccctatgccccaccacgcgacttcgcagcctatcgctccctgtgcgccagacctagaagaagccccgctcaagaggacggcaaggtgtacatcaacatgcccggcagaggataa

SEQ ID NO: 2656 - DNA, 2145 bp, synthetic construct
  source 1..2145: mol_type = other DNA
atggccttaccagtgaccgccttgctcctgccgctggccttgctgctccacgccgccaggccggaattcgacgtgacccagacacctcggaacagaatcaccaagaccggcaagcggatcatgctggaatgcagccagaccaagggccacgaccggatgtactggtacagacaggaccctggcctgggcctgagactgatctactacagcttcgacgtgaaggacatcaacaagggcgagatcagcgacggctacagcgtgtcaagacaggctcaggccaagttcagcctgtctctggaaagcgccattcctaaccagacagccctgtacttctgtgccacaagcggccagggcgcttacgaggaacagttctttggccctggcaccagactgacagttctcgaggacctgaagaacgtgttcccacctgaggtggccgtgttcgagcctagcgaggccgagatcagccacacccagaaagccaccctcgtgtgcctggctaccggcttctaccccgaccatgtggaactgtcttggtgggtcaacggcaaagaggtgcacagcggcgtgtctaccgacccccagccactgaaagaacagcccgccctgaacgacagccggtactgcctgagcagcagactgagagtgtccgccaccttctggcagaacccccggaaccacttcagatgccaggtgcagttctacggcctgagcgagaacgacgagtggacccaggacagagccaagcccgtgacccagatcgtgtctgccgaagcctggggcagagccgattgcggatccacaacacctggcgagagaagtagcctgcctgccttctatcctggcaccagcggctcttgttctggctgtggatctctgagcctgcctctgctggctggactggttgctgctgatgctgtggcctctctgctgattgtgggagccgtgttcctgtgcgccagacctagaagaagccccgctcaagaggacggcaaggtgtacatcaacatgcccggcagaggaagggccaagcgatctggatctggagcaacaaacttctcactactcaaacaagcaggtgacgtggaggagaatcccgggcctactagtatggactggatttggcgcatccttttccttgtcggcgctgctaccggcgcgcattccttcgaaaagaaccaggtggaacagagccctcagagcctgattatcctggaaggcaagaactgcaccctccagtgcaactacaccgtgtctcccttcagcaacctgcggtggtacaagcaggatacaggcagaggccctgtgtctctgaccatcctgaccttcagcgagaacaccaagagcaacggcagatacaccgccacactggacgccgatacaaagcagagcagcctgcacatcacagccagccagctgagcgatagcgccagctacatctgtgtggtgtctggcggcacagacagctggggcaaactccagtttggagctggcacacaggtggtggtcacccctgatacgcgtatccagaaccctgatcctgccgtgtaccagctgcgggatagcaagagcagcgacaagagcgtgtgtctgttcaccgacttcgacagccagaccaacgtgtcccagagcaaggactccgacgtgtacatcaccgataagaccgtgctggacatgcggagcatggacttcaagagcaactccgccgtggcctggtccaacaagtccgatttcgcctgcgccaacgccttcaacaacagcattatccccgaggacacattcttcccaagccccgagagcagctgcggtaccacaacacctggcgagagaagtagcctgcctgccttctatcctggcaccagcggctcttgttctggctgtggatctctgagcctgcctctgctggctggactggttgctgctgatgctgtggcctctctgctgattgtgggagccgtgttcagggaccaaagactgcctcctgacgctcacaaacctccaggcggaggcagcttcagaacccctatccaagaggaacaggctgacgcccacagcaccctggcaaaaattctgtgcgccagacctagaagaagccccgctcaagaggacggcaaggtgtacatcaacatgcccggcagaggataa

SEQ ID NO: 2657 - DNA, 2397 bp, synthetic construct
  source 1..2397: mol_type = other DNA
atggccttaccagtgaccgccttgctcctgccgctggccttgctgctccacgccgccaggccggaattcgacgtgacccagacacctcggaacagaatcaccaagaccggcaagcggatcatgctggaatgcagccagaccaagggccacgaccggatgtactggtacagacaggaccctggcctgggcctgagactgatctactacagcttcgacgtgaaggacatcaacaagggcgagatcagcgacggctacagcgtgtcaagacaggctcaggccaagttcagcctgtctctggaaagcgccattcctaaccagacagccctgtacttctgtgccacaagcggccagggcgcttacgaggaacagttctttggccctggcaccagactgacagttctcgaggacctgaagaacgtgttcccacctgaggtggccgtgttcgagcctagcgaggccgagatcagccacacccagaaagccaccctcgtgtgcctggctaccggcttctaccccgaccatgtggaactgtcttggtgggtcaacggcaaagaggtgcacagcggcgtgtctaccgacccccagccactgaaagaacagcccgccctgaacgacagccggtactgcctgagcagcagactgagagtgtccgccaccttctggcagaacccccggaaccacttcagatgccaggtgcagttctacggcctgagcgagaacgacgagtggacccaggacagagccaagcccgtgacccagatcgtgtctgccgaagcctggggcagagccgattgcggatccacaacacctggcgagagaagtagcctgcctgccttctatcctggcaccagcggctcttgttctggctgtggatctctgagcctgcctctgctggctggactggttgctgctgatgctgtggcctctctgctgattgtgggagccgtgttcctgtgcgccagacctagaagaagccccgctcaagaggacggcaaggtgtacatcaacatgcccggcagaggaagggccaagcgatctggatctggagcaacaaacttctcactactcaaacaagcaggtgacgtggaggagaatcccgggcctactagtatggactggatttggcgcatccttttccttgtcggcgctgctaccggcgcgcattccttcgaaaagaaccaggtggaacagagccctcagagcctgattatcctggaaggcaagaactgcaccctccagtgcaactacaccgtgtctcccttcagcaacctgcggtggtacaagcaggatacaggcagaggccctgtgtctctgaccatcctgaccttcagcgagaacaccaagagcaacggcagatacaccgccacactggacgccgatacaaagcagagcagcctgcacatcacagccagccagctgagcgatagcgccagctacatctgtgtggtgtctggcggcacagacagctggggcaaactccagtttggagctggcacacaggtggtggtcacccctgatacgcgtatccagaaccctgatcctgccgtgtaccagctgcgggatagcaagagcagcgacaagagcgtgtgtctgttcaccgacttcgacagccagaccaacgtgtcccagagcaaggactccgacgtgtacatcaccgataagaccgtgctggacatgcggagcatggacttcaagagcaactccgccgtggcctggtccaacaagtccgatttcgcctgcgccaacgccttcaacaacagcattatccccgaggacacattcttcccaagccccgagagcagctgcggtaccacaacacctggcgagagaagtagcctgcctgccttctatcctggcaccagcggctcttgttctggctgtggatctctgagcctgcctctgctggctggactggttgctgctgatgctgtggcctctctgctgattgtgggagccgtgttctggcggcggaagcggaaagagaagcagtctgagacaagccccaaagagttcctgaccatctacgaggacgtgaaggacctgaaaacccggcggaaccacgaacaagagcagacctttcctggcggaggcagcaccatctacagcatgatccagagccagagcagcgcccctacaagccaagagcctgcctacacactgtactccctgatccagcctagcagaaagagcggcagccggaagagaaatcacagccccagcttcaacagcacgatctacgaagtgatcggcaagagccagccaaaggctcagaaccctgccagactgagccggaaagagctggaaaacttcgacgtgtacagcctgtgcgccagacctagaagaagccccgctcaagaggacggcaaggtgtacatcaacatgcccggcagaggataa

SEQ ID NO: 2658 - DNA, 2250 bp, synthetic construct
  source 1..2250: mol_type = other DNA
atggccttaccagtgaccgccttgctcctgccgctggccttgctgctccacgccgccaggccggaattcgacgtgacccagacacctcggaacagaatcaccaagaccggcaagcggatcatgctggaatgcagccagaccaagggccacgaccggatgtactggtacagacaggaccctggcctgggcctgagactgatctactacagcttcgacgtgaaggacatcaacaagggcgagatcagcgacggctacagcgtgtcaagacaggctcaggccaagttcagcctgtctctggaaagcgccattcctaaccagacagccctgtacttctgtgccacaagcggccagggcgcttacgaggaacagttctttggccctggcaccagactgacagttctcgaggacctgaagaacgtgttcccacctgaggtggccgtgttcgagcctagcgaggccgagatcagccacacccagaaagccaccctcgtgtgcctggctaccggcttctaccccgaccatgtggaactgtcttggtgggtcaacggcaaagaggtgcacagcggcgtgtctaccgacccccagccactgaaagaacagcccgccctgaacgacagccggtactgcctgagcagcagactgagagtgtccgccaccttctggcagaacccccggaaccacttcagatgccaggtgcagttctacggcctgagcgagaacgacgagtggacccaggacagagccaagcccgtgacccagatcgtgtctgccgaagcctggggcagagccgattgcggatccctgggagagcctcagctgtgctatatcctggacgccatcctgtttctgtacggcatcgtgctgaccctgctgtactgcaaacggggcagaaagaaactcctgtatatattcaaacaaccatttatgagaccagtacaaactactcaagaggaagatggctgtagctgccgatttccagaagaagaagaaggaggatgtgaactgcggctgaagatccaagtgcggaaggccgccatcaccagctacgagaaatccgacggcgtgtacaccggcctgagcaccagaaatcaagagacatacgagacactgaagcacgaaaagcctccacaaagggccaagcgatctggatctggagcaacaaacttctcactactcaaacaagcaggtgacgtggaggagaatcccgggcctactagtatggactggatttggcgcatccttttccttgtcggcgctgctaccggcgcgcattccttcgaaaagaaccaggtggaacagagccctcagagcctgattatcctggaaggcaagaactgcaccctccagtgcaactacaccgtgtctcccttcagcaacctgcggtggtacaagcaggatacaggcagaggccctgtgtctctgaccatcctgaccttcagcgagaacaccaagagcaacggcagatacaccgccacactggacgccgatacaaagcagagcagcctgcacatcacagccagccagctgagcgatagcgccagctacatctgtgtggtgtctggcggcacagacagctggggcaaactccagtttggagctggcacacaggtggtggtcacccctgatacgcgtatccagaaccctgatcctgccgtgtaccagctgcgggatagcaagagcagcgacaagagcgtgtgtctgttcaccgacttcgacagccagaccaacgtgtcccagagcaaggactccgacgtgtacatcaccgataagaccgtgctggacatgcggagcatggacttcaagagcaactccgccgtggcctggtccaacaagtccgatttcgcctgcgccaacgccttcaacaacagcattatccccgaggacacattcttcccaagccccgagagcagctgcggtaccctgggagagcctcagctgtgctatatcctggacgccatcctgtttctgtacggcatcgtgctgaccctgctgtactgcaggagtaagaggagcaggctcctgcacagtgactacatgaacatgactccacgccgccccggacccacccgcaagcattaccagccctatgccccaccacgcgacttcgcagcctatcgctcccggctgaagatccaagtgcggaaggccgccatcaccagctacgagaaatccgacggcgtgtacaccggcctgagcaccagaaatcaagagacatacgagacactgaagcacgaaaagcctccacaataa

SEQ ID NO: 2659 - DNA, 2235 bp, synthetic construct
  source 1..2235: mol_type = other DNA
atggccttaccagtgaccgccttgctcctgccgctggccttgctgctccacgccgccaggccggaattcgacgtgacccagacacctcggaacagaatcaccaagaccggcaagcggatcatgctggaatgcagccagaccaagggccacgaccggatgtactggtacagacaggaccctggcctgggcctgagactgatctactacagcttcgacgtgaaggacatcaacaagggcgagatcagcgacggctacagcgtgtcaagacaggctcaggccaagttcagcctgtctctggaaagcgccattcctaaccagacagccctgtacttctgtgccacaagcggccagggcgcttacgaggaacagttctttggccctggcaccagactgacagttctcgaggacctgaagaacgtgttcccacctgaggtggccgtgttcgagcctagcgaggccgagatcagccacacccagaaagccaccctcgtgtgcctggctaccggcttctaccccgaccatgtggaactgtcttggtgggtcaacggcaaagaggtgcacagcggcgtgtctaccgacccccagccactgaaagaacagcccgccctgaacgacagccggtactgcctgagcagcagactgagagtgtccgccaccttctggcagaacccccggaaccacttcagatgccaggtgcagttctacggcctgagcgagaacgacgagtggacccaggacagagccaagcccgtgacccagatcgtgtctgccgaagcctggggcagagccgattgcggatccctgggagagcctcagctgtgctatatcctggacgccatcctgtttctgtacggcatcgtgctgaccctgctgtactgcaaacggggcagaaagaaactcctgtatatattcaaacaaccatttatgagaccagtacaaactactcaagaggaagatggctgtagctgccgatttccagaagaagaagaaggaggatgtgaactgcggctgaagatccaagtgcggaaggccgccatcaccagctacgagaaatccgacggcgtgtacaccggcctgagcaccagaaatcaagagacatacgagacactgaagcacgaaaagcctccacaaagggccaagcgatctggatctggagcaacaaacttctcactactcaaacaagcaggtgacgtggaggagaatcccgggcctactagtatggactggatttggcgcatccttttccttgtcggcgctgctaccggcgcgcattccttcgaaaagaaccaggtggaacagagccctcagagcctgattatcctggaaggcaagaactgcaccctccagtgcaactacaccgtgtctcccttcagcaacctgcggtggtacaagcaggatacaggcagaggccctgtgtctctgaccatcctgaccttcagcgagaacaccaagagcaacggcagatacaccgccacactggacgccgatacaaagcagagcagcctgcacatcacagccagccagctgagcgatagcgccagctacatctgtgtggtgtctggcggcacagacagctggggcaaactccagtttggagctggcacacaggtggtggtcacccctgatacgcgtatccagaaccctgatcctgccgtgtaccagctgcgggatagcaagagcagcgacaagagcgtgtgtctgttcaccgacttcgacagccagaccaacgtgtcccagagcaaggactccgacgtgtacatcaccgataagaccgtgctggacatgcggagcatggacttcaagagcaactccgccgtggcctggtccaacaagtccgatttcgcctgcgccaacgccttcaacaacagcattatccccgaggacacattcttcccaagccccgagagcagctgcggtaccctgggagagcctcagctgtgctatatcctggacgccatcctgtttctgtacggcatcgtgctgaccctgctgtactgcagggaccaaagactgcctcctgacgctcacaaacctccaggcggaggcagcttcagaacccctatccaagaggaacaggctgacgcccacagcaccctggcaaaaattcggctgaagatccaagtgcggaaggccgccatcaccagctacgagaaatccgacggcgtgtacaccggcctgagcaccagaaatcaagagacatacgagacactgaagcacgaaaagcctccacaataa

SEQ ID NO: 2660 - DNA, 2487 bp, synthetic construct
  source 1..2487: mol_type = other DNA
atggccttaccagtgaccgccttgctcctgccgctggccttgctgctccacgccgccaggccggaattcgacgtgacccagacacctcggaacagaatcaccaagaccggcaagcggatcatgctggaatgcagccagaccaagggccacgaccggatgtactggtacagacaggaccctggcctgggcctgagactgatctactacagcttcgacgtgaaggacatcaacaagggcgagatcagcgacggctacagcgtgtcaagacaggctcaggccaagttcagcctgtctctggaaagcgccattcctaaccagacagccctgtacttctgtgccacaagcggccagggcgcttacgaggaacagttctttggccctggcaccagactgacagttctcgaggacctgaagaacgtgttcccacctgaggtggccgtgttcgagcctagcgaggccgagatcagccacacccagaaagccaccctcgtgtgcctggctaccggcttctaccccgaccatgtggaactgtcttggtgggtcaacggcaaagaggtgcacagcggcgtgtctaccgacccccagccactgaaagaacagcccgccctgaacgacagccggtactgcctgagcagcagactgagagtgtccgccaccttctggcagaacccccggaaccacttcagatgccaggtgcagttctacggcctgagcgagaacgacgagtggacccaggacagagccaagcccgtgacccagatcgtgtctgccgaagcctggggcagagccgattgcggatccctgggagagcctcagctgtgctatatcctggacgccatcctgtttctgtacggcatcgtgctgaccctgctgtactgcaaacggggcagaaagaaactcctgtatatattcaaacaaccatttatgagaccagtacaaactactcaagaggaagatggctgtagctgccgatttccagaagaagaagaaggaggatgtgaactgcggctgaagatccaagtgcggaaggccgccatcaccagctacgagaaatccgacggcgtgtacaccggcctgagcaccagaaatcaagagacatacgagacactgaagcacgaaaagcctccacaaagggccaagcgatctggatctggagcaacaaacttctcactactcaaacaagcaggtgacgtggaggagaatcccgggcctactagtatggactggatttggcgcatccttttccttgtcggcgctgctaccggcgcgcattccttcgaaaagaaccaggtggaacagagccctcagagcctgattatcctggaaggcaagaactgcaccctccagtgcaactacaccgtgtctcccttcagcaacctgcggtggtacaagcaggatacaggcagaggccctgtgtctctgaccatcctgaccttcagcgagaacaccaagagcaacggcagatacaccgccacactggacgccgatacaaagcagagcagcctgcacatcacagccagccagctgagcgatagcgccagctacatctgtgtggtgtctggcggcacagacagctggggcaaactccagtttggagctggcacacaggtggtggtcacccctgatacgcgtatccagaaccctgatcctgccgtgtaccagctgcgggatagcaagagcagcgacaagagcgtgtgtctgttcaccgacttcgacagccagaccaacgtgtcccagagcaaggactccgacgtgtacatcaccgataagaccgtgctggacatgcggagcatggacttcaagagcaactccgccgtggcctggtccaacaagtccgatttcgcctgcgccaacgccttcaacaacagcattatccccgaggacacattcttcccaagccccgagagcagctgcggtaccctgggagagcctcagctgtgctatatcctggacgccatcctgtttctgtacggcatcgtgctgaccctgctgtactgctggcggcggaagcggaaagagaagcagtctgagacaagccccaaagagttcctgaccatctacgaggacgtgaaggacctgaaaacccggcggaaccacgaacaagagcagacctttcctggcggaggcagcaccatctacagcatgatccagagccagagcagcgcccctacaagccaagagcctgcctacacactgtactccctgatccagcctagcagaaagagcggcagccggaagagaaatcacagccccagcttcaacagcacgatctacgaagtgatcggcaagagccagccaaaggctcagaaccctgccagactgagccggaaagagctggaaaacttcgacgtgtacagccggctgaagatccaagtgcggaaggccgccatcaccagctacgagaaatccgacggcgtgtacaccggcctgagcaccagaaatcaagagacatacgagacactgaagcacgaaaagcctccacaataa

SEQ ID NO: 2661 - DNA, 2253 bp, synthetic construct
  source 1..2253: mol_type = other DNA
atggccttaccagtgaccgccttgctcctgccgctggccttgctgctccacgccgccaggccggaattcgacgtgacccagacacctcggaacagaatcaccaagaccggcaagcggatcatgctggaatgcagccagaccaagggccacgaccggatgtactggtacagacaggaccctggcctgggcctgagactgatctactacagcttcgacgtgaaggacatcaacaagggcgagatcagcgacggctacagcgtgtcaagacaggctcaggccaagttcagcctgtctctggaaagcgccattcctaaccagacagccctgtacttctgtgccacaagcggccagggcgcttacgaggaacagttctttggccctggcaccagactgacagttctcgaggacctgaagaacgtgttcccacctgaggtggccgtgttcgagcctagcgaggccgagatcagccacacccagaaagccaccctcgtgtgcctggctaccggcttctaccccgaccatgtggaactgtcttggtgggtcaacggcaaagaggtgcacagcggcgtgtctaccgacccccagccactgaaagaacagcccgccctgaacgacagccggtactgcctgagcagcagactgagagtgtccgccaccttctggcagaacccccggaaccacttcagatgccaggtgcagttctacggcctgagcgagaacgacgagtggacccaggacagagccaagcccgtgacccagatcgtgtctgccgaagcctggggcagagccgattgcggatccctgggagagcctcagctgtgctatatcctggacgccatcctgtttctgtacggcatcgtgctgaccctgctgtactgcaaacggggcagaaagaaactcctgtatatattcaaacaaccatttatgagaccagtacaaactactcaagaggaagatggctgtagctgccgatttccagaagaagaagaaggaggatgtgaactgcggctgaagatccaagtgcggaaggccgccatcaccagctacgagaaatccgacggcgtgtacaccggcctgagcaccagaaatcaagagacatacgagacactgaagcacgaaaagcctccacaaagggccaagcgatctggatctggagcaacaaacttctcactactcaaacaagcaggtgacgtggaggagaatcccgggcctactagtatggactggatttggcgcatccttttccttgtcggcgctgctaccggcgcgcattccttcgaaaagaaccaggtggaacagagccctcagagcctgattatcctggaaggcaagaactgcaccctccagtgcaactacaccgtgtctcccttcagcaacctgcggtggtacaagcaggatacaggcagaggccctgtgtctctgaccatcctgaccttcagcgagaacaccaagagcaacggcagatacaccgccacactggacgccgatacaaagcagagcagcctgcacatcacagccagccagctgagcgatagcgccagctacatctgtgtggtgtctggcggcacagacagctggggcaaactccagtttggagctggcacacaggtggtggtcacccctgatacgcgtatccagaaccctgatcctgccgtgtaccagctgcgggatagcaagagcagcgacaagagcgtgtgtctgttcaccgacttcgacagccagaccaacgtgtcccagagcaaggactccgacgtgtacatcaccgataagaccgtgctggacatgcggagcatggacttcaagagcaactccgccgtggcctggtccaacaagtccgatttcgcctgcgccaacgccttcaacaacagcattatccccgaggacacattcttcccaagccccgagagcagctgcggtaccctcggagaaccacagctctgttacattctggatgctatcctgttcctctatgggatcgtcctgacactcctgtattgcaagagaggccggaagaagctgctgtacatcttcaagcagcctttcatgcggcccgtgcagaccacccaggaagaggacggctgctcctgccggttccccgaggaagaagaaggcggctgcgagctgagactcaaaattcaagttcgcaaagccgccattacctcttacgagaagagtgatggggtgtacacaggactgtctacccggaatcaagaaacctacgaaaccctcaaacatgagaagccacctcagtaa

SEQ ID NO: 2662 - DNA, 2250 bp, synthetic construct
  source 1..2250: mol_type = other DNA
atggccttaccagtgaccgccttgctcctgccgctggccttgctgctccacgccgccaggccggaattcgacgtgacccagacacctcggaacagaatcaccaagaccggcaagcggatcatgctggaatgcagccagaccaagggccacgaccggatgtactggtacagacaggaccctggcctgggcctgagactgatctactacagcttcgacgtgaaggacatcaacaagggcgagatcagcgacggctacagcgtgtcaagacaggctcaggccaagttcagcctgtctctggaaagcgccattcctaaccagacagccctgtacttctgtgccacaagcggccagggcgcttacgaggaacagttctttggccctggcaccagactgacagttctcgaggacctgaagaacgtgttcccacctgaggtggccgtgttcgagcctagcgaggccgagatcagccacacccagaaagccaccctcgtgtgcctggctaccggcttctaccccgaccatgtggaactgtcttggtgggtcaacggcaaagaggtgcacagcggcgtgtctaccgacccccagccactgaaagaacagcccgccctgaacgacagccggtactgcctgagcagcagactgagagtgtccgccaccttctggcagaacccccggaaccacttcagatgccaggtgcagttctacggcctgagcgagaacgacgagtggacccaggacagagccaagcccgtgacccagatcgtgtctgccgaagcctggggcagagccgattgcggatccctgggagagcctcagctgtgctatatcctggacgccatcctgtttctgtacggcatcgtgctgaccctgctgtactgcaaacggggcagaaagaaactcctgtatatattcaaacaaccatttatgagaccagtacaaactactcaagaggaagatggctgtagctgccgatttccagaagaagaagaaggaggatgtgaactgcggctgaagatccaagtgcggaaggccgccatcaccagctacgagaaatccgacggcgtgtacaccggcctgagcaccagaaatcaagagacatacgagacactgaagcacgaaaagcctccacaaagggccaagcgatctggatctggagcaacaaacttctcactactcaaacaagcaggtgacgtggaggagaatcccgggcctactagtatggactggatttggcgcatccttttccttgtcggcgctgctaccggcgcgcattccttcgaaaagaaccaggtggaacagagccctcagagcctgattatcctggaaggcaagaactgcaccctccagtgcaactacaccgtgtctcccttcagcaacctgcggtggtacaagcaggatacaggcagaggccctgtgtctctgaccatcctgaccttcagcgagaacaccaagagcaacggcagatacaccgccacactggacgccgatacaaagcagagcagcctgcacatcacagccagccagctgagcgatagcgccagctacatctgtgtggtgtctggcggcacagacagctggggcaaactccagtttggagctggcacacaggtggtggtcacccctgatacgcgtatccagaaccctgatcctgccgtgtaccagctgcgggatagcaagagcagcgacaagagcgtgtgtctgttcaccgacttcgacagccagaccaacgtgtcccagagcaaggactccgacgtgtacatcaccgataagaccgtgctggacatgcggagcatggacttcaagagcaactccgccgtggcctggtccaacaagtccgatttcgcctgcgccaacgccttcaacaacagcattatccccgaggacacattcttcccaagccccgagagcagctgcggtaccctcggagaaccacagctctgttacattctggatgctatcctgttcctctatgggatcgtcctgacactcctgtattgcaggagcaagcggtcacggctgctccacagcgattacatgaatatgacaccacgaagaccgggtcctactcgcaaacactaccaaccctacgcacctccccgcgactttgcagcgtaccgatctagactcaaaattcaagttcgcaaagccgccattacctcttacgagaagagtgatggggtgtacacaggactgtctacccggaatcaagaaacctacgaaaccctcaaacatgagaagccacctcagtaa

SEQ ID NO: 2663 - DNA, 2247 bp, synthetic construct
  source 1..2247: mol_type = other DNA
atggccttaccagtgaccgccttgctcctgccgctggccttgctgctccacgccgccaggccggaattcgacgtgacccagacacctcggaacagaatcaccaagaccggcaagcggatcatgctggaatgcagccagaccaagggccacgaccggatgtactggtacagacaggaccctggcctgggcctgagactgatctactacagcttcgacgtgaaggacatcaacaagggcgagatcagcgacggctacagcgtgtcaagacaggctcaggccaagttcagcctgtctctggaaagcgccattcctaaccagacagccctgtacttctgtgccacaagcggccagggcgcttacgaggaacagttctttggccctggcaccagactgacagttctcgaggacctgaagaacgtgttcccacctgaggtggccgtgttcgagcctagcgaggccgagatcagccacacccagaaagccaccctcgtgtgcctggctaccggcttctaccccgaccatgtggaactgtcttggtgggtcaacggcaaagaggtgcacagcggcgtgtctaccgacccccagccactgaaagaacagcccgccctgaacgacagccggtactgcctgagcagcagactgagagtgtccgccaccttctggcagaacccccggaaccacttcagatgccaggtgcagttctacggcctgagcgagaacgacgagtggacccaggacagagccaagcccgtgacccagatcgtgtctgccgaagcctggggcagagccgattgcggatccctgggagagcctcagctgtgctatatcctggacgccatcctgtttctgtacggcatcgtgctgaccctgctgtactgcaggagtaagaggagcaggctcctgcacagtgactacatgaacatgactccacgccgccccggacccacccgcaagcattaccagccctatgccccaccacgcgacttcgcagcctatcgctcccggctgaagatccaagtgcggaaggccgccatcaccagctacgagaaatccgacggcgtgtacaccggcctgagcaccagaaatcaagagacatacgagacactgaagcacgaaaagcctccacaaagggccaagcgatctggatctggagcaacaaacttctcactactcaaacaagcaggtgacgtggaggagaatcccgggcctactagtatggactggatttggcgcatccttttccttgtcggcgctgctaccggcgcgcattccttcgaaaagaaccaggtggaacagagccctcagagcctgattatcctggaaggcaagaactgcaccctccagtgcaactacaccgtgtctcccttcagcaacctgcggtggtacaagcaggatacaggcagaggccctgtgtctctgaccatcctgaccttcagcgagaacaccaagagcaacggcagatacaccgccacactggacgccgatacaaagcagagcagcctgcacatcacagccagccagctgagcgatagcgccagctacatctgtgtggtgtctggcggcacagacagctggggcaaactccagtttggagctggcacacaggtggtggtcacccctgatacgcgtatccagaaccctgatcctgccgtgtaccagctgcgggatagcaagagcagcgacaagagcgtgtgtctgttcaccgacttcgacagccagaccaacgtgtcccagagcaaggactccgacgtgtacatcaccgataagaccgtgctggacatgcggagcatggacttcaagagcaactccgccgtggcctggtccaacaagtccgatttcgcctgcgccaacgccttcaacaacagcattatccccgaggacacattcttcccaagccccgagagcagctgcggtaccctcggagaaccacagctctgttacattctggatgctatcctgttcctctatgggatcgtcctgacactcctgtattgcaggagcaagcggtcacggctgctccacagcgattacatgaatatgacaccacgaagaccgggtcctactcgcaaacactaccaaccctacgcacctccccgcgactttgcagcgtaccgatctagactcaaaattcaagttcgcaaagccgccattacctcttacgagaagagtgatggggtgtacacaggactgtctacccggaatcaagaaacctacgaaaccctcaaacatgagaagccacctcagtaa

SEQ ID NO: 2664 - DNA, 2001 bp, synthetic construct
  source 1..2001: mol_type = other DNA
atggccttaccagtgaccgccttgctcctgccgctggccttgctgctccacgccgccaggccggaattcgacgtgacccagacacctcggaacagaatcaccaagaccggcaagcggatcatgctggaatgcagccagaccaagggccacgaccggatgtactggtacagacaggaccctggcctgggcctgagactgatctactacagcttcgacgtgaaggacatcaacaagggcgagatcagcgacggctacagcgtgtcaagacaggctcaggccaagttcagcctgtctctggaaagcgccattcctaaccagacagccctgtacttctgtgccacaagcggccagggcgcttacgaggaacagttctttggccctggcaccagactgacagttctcgaggacctgaagaacgtgttcccacctgaggtggccgtgttcgagcctagcgaggccgagatcagccacacccagaaagccaccctcgtgtgcctggctaccggcttctaccccgaccatgtggaactgtcttggtgggtcaacggcaaagaggtgcacagcggcgtgtctaccgacccccagccactgaaagaacagcccgccctgaacgacagccggtactgcctgagcagcagactgagagtgtccgccaccttctggcagaacccccggaaccacttcagatgccaggtgcagttctacggcctgagcgagaacgacgagtggacccaggacagagccaagcccgtgacccagatcgtgtctgccgaagcctggggcagagccgattgcggatccctgggagagcctcagctgagctatatcctggacgccatcctgtttctgtacggcatcgtgctgaccctgctgtactgccggctgaagatccaagtgcggaaggccgccatcaccagctacgagaaatccgacggcgtgtacaccggcctgagcaccagaaatcaagagacatacgagacactgaagcacgaaaagcctccacaaagggccaagcgatctggatctggagcaacaaacttctcactactcaaacaagcaggtgacgtggaggagaatcccgggcctactagtatggactggatttggcgcatccttttccttgtcggcgctgctaccggcgcgcattccttcgaaaagaaccaggtggaacagagccctcagagcctgattatcctggaaggcaagaactgcaccctccagtgcaactacaccgtgtctcccttcagcaacctgcggtggtacaagcaggatacaggcagaggccctgtgtctctgaccatcctgaccttcagcgagaacaccaagagcaacggcagatacaccgccacactggacgccgatacaaagcagagcagcctgcacatcacagccagccagctgagcgatagcgccagctacatctgtgtggtgtctggcggcacagacagctggggcaaactccagtttggagctggcacacaggtggtggtcacccctgatacgcgtatccagaaccctgatcctgccgtgtaccagctgcgggatagcaagagcagcgacaagagcgtgtgtctgttcaccgacttcgacagccagaccaacgtgtcccagagcaaggactccgacgtgtacatcaccgataagaccgtgctggacatgcggagcatggacttcaagagcaactccgccgtggcctggtccaacaagtccgatttcgcctgcgccaacgccttcaacaacagcattatccccgaggacacattcttcccaagccccgagagcagctgcggtaccctcggagaaccacagctctcttacattctggatgctatcctgttcctctatgggatcgtcctgacactcctgtattgcagactcaaaattcaagttcgcaaagccgccattacctcttacgagaagagtgatggggtgtacacaggactgtctacccggaatcaagaaacctacgaaaccctcaaacatgagaagccacctcagtaa

SEQ ID NO: 2665 - DNA, 2109 bp, synthetic construct
  source 1..2109: mol_type = other DNA
atggccttaccagtgaccgccttgctcctgccgctggccttgctgctccacgccgccaggccggaattcgacgtgacccagacacctcggaacagaatcaccaagaccggcaagcggatcatgctggaatgcagccagaccaagggccacgaccggatgtactggtacagacaggaccctggcctgggcctgagactgatctactacagcttcgacgtgaaggacatcaacaagggcgagatcagcgacggctacagcgtgtcaagacaggctcaggccaagttcagcctgtctctggaaagcgccattcctaaccagacagccctgtacttctgtgccacaagcggccagggcgcttacgaggaacagttctttggccctggcaccagactgacagttctcgaggacctgaagaacgtgttcccacctgaggtggccgtgttcgagcctagcgaggccgagatcagccacacccagaaagccaccctcgtgtgcctggctaccggcttctaccccgaccatgtggaactgtcttggtgggtcaacggcaaagaggtgcacagcggcgtgtctaccgacccccagccactgaaagaacagcccgccctgaacgacagccggtactgcctgagcagcagactgagagtgtccgccaccttctggcagaacccccggaaccacttcagatgccaggtgcagttctacggcctgagcgagaacgacgagtggacccaggacagagccaagcccgtgacccagatcgtgtctgccgaagcctggggcagagccgattgcggatcccaggctcagagcgattgcagctgtagcacagtgtctccaggcgtgctggccggaattgtgatgggcgatctggtgctgacagtgctgattgccctggccgtgtacttcctgggtagactggtgcctagaggaagaggcgctgccgaagccgccacaagaaagcagagaatcaccgagacagagagcccctaccaagagctgcaaggccagagaagcgacgtgtacagcgacctgaatacccagcggccttactacaaaagggccaagcgatctggatctggagcaacaaacttctcactactcaaacaagcaggtgacgtggaggagaatcccgggcctactagtatggactggatttggcgcatccttttccttgtcggcgctgctaccggcgcgcattccttcgaaaagaaccaggtggaacagagccctcagagcctgattatcctggaaggcaagaactgcaccctccagtgcaactacaccgtgtctcccttcagcaacctgcggtggtacaagcaggatacaggcagaggccctgtgtctctgaccatcctgaccttcagcgagaacaccaagagcaacggcagatacaccgccacactggacgccgatacaaagcagagcagcctgcacatcacagccagccagctgagcgatagcgccagctacatctgtgtggtgtctggcggcacagacagctggggcaaactccagtttggagctggcacacaggtggtggtcacccctgatacgcgtatccagaaccctgatcctgccgtgtaccagctgcgggatagcaagagcagcgacaagagcgtgtgtctgttcaccgacttcgacagccagaccaacgtgtcccagagcaaggactccgacgtgtacatcaccgataagaccgtgctggacatgcggagcatggacttcaagagcaactccgccgtggcctggtccaacaagtccgatttcgcctgcgccaacgccttcaacaacagcattatccccgaggacacattcttcccaagccccgagagcagctgcggtacccaggctcagagcgattgcagctctagcacagtgtctccaggcgtgctggccggaattgtgatgggcgatctggtgctgacagtgctgattgccctggccgtgtacttcctgggtagactggtgcctagaggaagaggcgctgccgaagccgccacaagaaagcagagaatcaccgagacagagagcccctaccaagagctgcaaggccagagaagcgacgtgtacagcgacctgaatacccagcggccttactacaaataa

SEQ ID NO: 2666 - DNA, 2235 bp, synthetic construct
  source 1..2235: mol_type = other DNA
atggccttaccagtgaccgccttgctcctgccgctggccttgctgctccacgccgccaggccggaattcgacgtgacccagacacctcggaacagaatcaccaagaccggcaagcggatcatgctggaatgcagccagaccaagggccacgaccggatgtactggtacagacaggaccctggcctgggcctgagactgatctactacagcttcgacgtgaaggacatcaacaagggcgagatcagcgacggctacagcgtgtcaagacaggctcaggccaagttcagcctgtctctggaaagcgccattcctaaccagacagccctgtacttctgtgccacaagcggccagggcgcttacgaggaacagttctttggccctggcaccagactgacagttctcgaggacctgaagaacgtgttcccacctgaggtggccgtgttcgagcctagcgaggccgagatcagccacacccagaaagccaccctcgtgtgcctggctaccggcttctaccccgaccatgtggaactgtcttggtgggtcaacggcaaagaggtgcacagcggcgtgtctaccgacccccagccactgaaagaacagcccgccctgaacgacagccggtactgcctgagcagcagactgagagtgtccgccaccttctggcagaacccccggaaccacttcagatgccaggtgcagttctacggcctgagcgagaacgacgagtggacccaggacagagccaagcccgtgacccagatcgtgtctgccgaagcctggggcagagccgattgcggatcccaggctcagagcgattgcagctgtagcacagtgtctccaggcgtgctggccggaattgtgatgggcgatctggtgctgacagtgctgattgccctggccgtgtacttcctgggtagactggtgcctagaggaagaggcgctgccgaagccgccacaagaaagcagagaatcaccgagacagagagcccctaccaagagctgcaaggccagagaagcgacgtgtacagcgacctgaatacccagcggccttactacaaaagggccaagcgatctggatctggagcaacaaacttctcactactcaaacaagcaggtgacgtggaggagaatcccgggcctactagtatggactggatttggcgcatccttttccttgtcggcgctgctaccggcgcgcattccttcgaaaagaaccaggtggaacagagccctcagagcctgattatcctggaaggcaagaactgcaccctccagtgcaactacaccgtgtctcccttcagcaacctgcggtggtacaagcaggatacaggcagaggccctgtgtctctgaccatcctgaccttcagcgagaacaccaagagcaacggcagatacaccgccacactggacgccgatacaaagcagagcagcctgcacatcacagccagccagctgagcgatagcgccagctacatctgtgtggtgtctggcggcacagacagctggggcaaactccagtttggagctggcacacaggtggtggtcacccctgatacgcgtatccagaaccctgatcctgccgtgtaccagctgcgggatagcaagagcagcgacaagagcgtgtgtctgttcaccgacttcgacagccagaccaacgtgtcccagagcaaggactccgacgtgtacatcaccgataagaccgtgctggacatgcggagcatggacttcaagagcaactccgccgtggcctggtccaacaagtccgatttcgcctgcgccaacgccttcaacaacagcattatccccgaggacacattcttcccaagccccgagagcagctgcggtacccaggctcagagcgattgcagctgtagcacagtgtctccaggcgtgctggccggaattgtgatgggcgatctggtgctgacagtgctgattgccctggccgtgtacttcctgggtagactggtgcctagaggaagaggcgctgccgaagccgccacaagaaagcagagaatcaccgagacagagagcccctaccaagagctgcaaggccagagaagcgacgtgtacagcgacctgaatacccagaaacggggcagaaagaaactcctgtatatattcaaacaaccatttatgagaccagtacaaactactcaagaggaagatggctgtagctgccgatttccagaagaagaagaaggaggatgtgaactgcggccttactacaaataa

SEQ ID NO: 2667 - DNA, 2232 bp, synthetic construct
  source 1..2232: mol_type = other DNA
atggccttaccagtgaccgccttgctcctgccgctggccttgctgctccacgccgccaggccggaattcgacgtgacccagacacctcggaacagaatcaccaagaccggcaagcggatcatgctggaatgcagccagaccaagggccacgaccggatgtactggtacagacaggaccctggcctgggcctgagactgatctactacagcttcgacgtgaaggacatcaacaagggcgagatcagcgacggctacagcgtgtcaagacaggctcaggccaagttcagcctgtctctggaaagcgccattcctaaccagacagccctgtacttctgtgccacaagcggccagggcgcttacgaggaacagttctttggccctggcaccagactgacagttctcgaggacctgaagaacgtgttcccacctgaggtggccgtgttcgagcctagcgaggccgagatcagccacacccagaaagccaccctcgtgtgcctggctaccggcttctaccccgaccatgtggaactgtcttggtgggtcaacggcaaagaggtgcacagcggcgtgtctaccgacccccagccactgaaagaacagcccgccctgaacgacagccggtactgcctgagcagcagactgagagtgtccgccaccttctggcagaacccccggaaccacttcagatgccaggtgcagttctacggcctgagcgagaacgacgagtggacccaggacagagccaagcccgtgacccagatcgtgtctgccgaagcctggggcagagccgattgcggatcccaggctcagagcgattgcagctgtagcacagtgtctccaggcgtgctggccggaattgtgatgggcgatctggtgctgacagtgctgattgccctggccgtgtacttcctgggtagactggtgcctagaggaagaggcgctgccgaagccgccacaagaaagcagagaatcaccgagacagagagcccctaccaagagctgcaaggccagagaagcgacgtgtacagcgacctgaatacccagcggccttactacaaaagggccaagcgatctggatctggagcaacaaacttctcactactcaaacaagcaggtgacgtggaggagaatcccgggcctactagtatggactggatttggcgcatccttttccttgtcggcgctgctaccggcgcgcattccttcgaaaagaaccaggtggaacagagccctcagagcctgattatcctggaaggcaagaactgcaccctccagtgcaactacaccgtgtctcccttcagcaacctgcggtggtacaagcaggatacaggcagaggccctgtgtctctgaccatcctgaccttcagcgagaacaccaagagcaacggcagatacaccgccacactggacgccgatacaaagcagagcagcctgcacatcacagccagccagctgagcgatagcgccagctacatctgtgtggtgtctggcggcacagacagctggggcaaactccagtttggagctggcacacaggtggtggtcacccctgatacgcgtatccagaaccctgatcctgccgtgtaccagctgcgggatagcaagagcagcgacaagagcgtgtgtctgttcaccgacttcgacagccagaccaacgtgtcccagagcaaggactccgacgtgtacatcaccgataagaccgtgctggacatgcggagcatggacttcaagagcaactccgccgtggcctggtccaacaagtccgatttcgcctgcgccaacgccttcaacaacagcattatccccgaggacacattcttcccaagccccgagagcagctgcggtacccaggctcagagcgattgcagctgtagcacagtgtctccaggcgtgctggccggaattgtgatgggcgatctggtgctgacagtgctgattgccctggccgtgtacttcctgggtagactggtgcctagaggaagaggcgctgccgaagccgccacaagaaagcagagaatcaccgagacagagagcccctaccaagagctgcaaggccagagaagcgacgtgtacagcgacctgaatacccagaggagcaagcggtcacggctgctccacagcgattacatgaatatgacaccacgaagaccgggtcctactcgcaaacactaccaaccctacgcacctccccgcgactttgcagcgtaccgatctcggccttactacaaataa

SEQ ID NO: 2668 - DNA, 2217 bp, synthetic construct
  source 1..2217: mol_type = other DNA
atggccttaccagtgaccgccttgctcctgccgctggccttgctgctccacgccgccaggccggaattcgacgtgacccagacacctcggaacagaatcaccaagaccggcaagcggatcatgctggaatgcagccagaccaagggccacgaccggatgtactggtacagacaggaccctggcctgggcctgagactgatctactacagcttcgacgtgaaggacatcaacaagggcgagatcagcgacggctacagcgtgtcaagacaggctcaggccaagttcagcctgtctctggaaagcgccattcctaaccagacagccctgtacttctgtgccacaagcggccagggcgcttacgaggaacagttctttggccctggcaccagactgacagttctcgaggacctgaagaacgtgttcccacctgaggtggccgtgttcgagcctagcgaggccgagatcagccacacccagaaagccaccctcgtgtgcctggctaccggcttctaccccgaccatgtggaactgtcttggtgggtcaacggcaaagaggtgcacagcggcgtgtctaccgacccccagccactgaaagaacagcccgccctgaacgacagccggtactgcctgagcagcagactgagagtgtccgccaccttctggcagaacccccggaaccacttcagatgccaggtgcagttctacggcctgagcgagaacgacgagtggacccaggacagagccaagcccgtgacccagatcgtgtctgccgaagcctggggcagagccgattgcggatcccaggctcagagcgattgcagctgtagcacagtgtctccaggcgtgctggccggaattgtgatgggcgatctggtgctgacagtgctgattgccctggccgtgtacttcctgggtagactggtgcctagaggaagaggcgctgccgaagccgccacaagaaagcagagaatcaccgagacagagagcccctaccaagagctgcaaggccagagaagcgacgtgtacagcgacctgaatacccagcggccttactacaaaagggccaagcgatctggatctggagcaacaaacttctcactactcaaacaagcaggtgacgtggaggagaatcccgggcctactagtatggactggatttggcgcatccttttccttgtcggcgctgctaccggcgcgcattccttcgaaaagaaccaggtggaacagagccctcagagcctgattatcctggaaggcaagaactgcaccctccagtgcaactacaccgtgtctcccttcagcaacctgcggtggtacaagcaggatacaggcagaggccctgtgtctctgaccatcctgaccttcagcgagaacaccaagagcaacggcagatacaccgccacactggacgccgatacaaagcagagcagcctgcacatcacagccagccagctgagcgatagcgccagctacatctgtgtggtgtctggcggcacagacagctggggcaaactccagtttggagctggcacacaggtggtggtcacccctgatacgcgtatccagaaccctgatcctgccgtgtaccagctgcgggatagcaagagcagcgacaagagcgtgtgtctgttcaccgacttcgacagccagaccaacgtgtcccagagcaaggactccgacgtgtacatcaccgataagaccgtgctggacatgcggagcatggacttcaagagcaactccgccgtggcctggtccaacaagtccgatttcgcctgcgccaacgccttcaacaacagcattatccccgaggacacattcttcccaagccccgagagcagctgcggtacccaggctcagagcgattgcagctgtagcacagtgtctccaggcgtgctggccggaattgtgatgggcgatctggtgctgacagtgctgattgccctggccgtgtacttcctgggtagactggtgcctagaggaagaggcgctgccgaagccgccacaagaaagcagagaatcaccgagacagagagcccctaccaagagctgcaaggccagagaagcgacgtgtacagcgacctgaatacccagagggaccaaagactgcctcctgacgctcacaaacctccaggcggaggcagcttcagaacccctatccaagaggaacaggctgacgcccacagcaccctggcaaaaattcggccttactacaaataa

SEQ ID NO: 2669 - DNA, 2469 bp, synthetic construct
  source 1..2469: mol_type = other DNA
atggccttaccagtgaccgccttgctcctgccgctggccttgctgctccacgccgccaggccggaattcgacgtgacccagacacctcggaacagaatcaccaagaccggcaagcggatcatgctggaatgcagccagaccaagggccacgaccggatgtactggtacagacaggaccctggcctgggcctgagactgatctactacagcttcgacgtgaaggacatcaacaagggcgagatcagcgacggctacagcgtgtcaagacaggctcaggccaagttcagcctgtctctggaaagcgccattcctaaccagacagccctgtacttctgtgccacaagcggccagggcgcttacgaggaacagttctttggccctggcaccagactgacagttctcgaggacctgaagaacgtgttcccacctgaggtggccgtgttcgagcctagcgaggccgagatcagccacacccagaaagccaccctcgtgtgcctggctaccggcttctaccccgaccatgtggaactgtcttggtgggtcaacggcaaagaggtgcacagcggcgtgtctaccgacccccagccactgaaagaacagcccgccctgaacgacagccggtactgcctgagcagcagactgagagtgtccgccaccttctggcagaacccccggaaccacttcagatgccaggtgcagttctacggcctgagcgagaacgacgagtggacccaggacagagccaagcccgtgacccagatcgtgtctgccgaagcctggggcagagccgattgcggatcccaggctcagagcgattgcagctgtagcacagtgtctccaggcgtgctggccggaattgtgatgggcgatctggtgctgacagtgctgattgccctggccgtgtacttcctgggtagactggtgcctagaggaagaggcgctgccgaagccgccacaagaaagcagagaatcaccgagacagagagcccctaccaagagctgcaaggccagagaagcgacgtgtacagcgacctgaatacccagcggccttactacaaaagggccaagcgatctggatctggagcaacaaacttctcactactcaaacaagcaggtgacgtggaggagaatcccgggcctactagtatggactggatttggcgcatccttttccttgtcggcgctgctaccggcgcgcattccttcgaaaagaaccaggtggaacagagccctcagagcctgattatcctggaaggcaagaactgcaccctccagtgcaactacaccgtgtctcccttcagcaacctgcggtggtacaagcaggatacaggcagaggccctgtgtctctgaccatcctgaccttcagcgagaacaccaagagcaacggcagatacaccgccacactggacgccgatacaaagcagagcagcctgcacatcacagccagccagctgagcgatagcgccagctacatctgtgtggtgtctggcggcacagacagctggggcaaactccagtttggagctggcacacaggtggtggtcacccctgatacgcgtatccagaaccctgatcctgccgtgtaccagctgcgggatagcaagagcagcgacaagagcgtgtgtctgttcaccgacttcgacagccagaccaacgtgtcccagagcaaggactccgacgtgtacatcaccgataagaccgtgctggacatgcggagcatggacttcaagagcaactccgccgtggcctggtccaacaagtccgatttcgcctgcgccaacgccttcaacaacagcattatccccgaggacacattcttcccaagccccgagagcagctgcggtacccaggctcagagcgattgcagctgtagcacagtgtctccaggcgtgctggccggaattgtgatgggcgatctggtgctgacagtgctgattgccctggccgtgtacttcctgggtagactggtgcctagaggaagaggcgctgccgaagccgccacaagaaagcagagaatcaccgagacagagagcccctaccaagagctgcaaggccagagaagcgacgtgtacagcgacctgaatacccagtggcggcggaagcggaaagagaagcagtctgagacaagccccaaagagttcctgaccatctacgaggacgtgaaggacctgaaaacccggcggaaccacgaacaagagcagacctttcctggcggaggcagcaccatctacagcatgatccagagccagagcagcgcccctacaagccaagagcctgcctacacactgtactccctgatccagcctagcagaaagagcggcagccggaagagaaatcacagccccagcttcaacagcacgatctacgaagtgatcggcaagagccagccaaaggctcagaaccctgccagactgagccggaaagagctggaaaacttcgacgtgtacagccggccttactacaaataa

SEQ ID NO: 2670 - DNA, 2745 bp, synthetic construct
  source 1..2745: mol_type = other DNA
atggccttaccagtgaccgccttgctcctgccgctggccttgctgctccacgccgccaggccggaattcgacgtgacccagacacctcggaacagaatcaccaagaccggcaagcggatcatgctggaatgcagccagaccaagggccacgaccggatgtactggtacagacaggaccctggcctgggcctgagactgatctactacagcttcgacgtgaaggacatcaacaagggcgagatcagcgacggctacagcgtgtcaagacaggctcaggccaagttcagcctgtctctggaaagcgccattcctaaccagacagccctgtacttctgtgccacaagcggccagggcgcttacgaggaacagttctttggccctggcaccagactgacagttctcgaggacctgaagaacgtgttcccacctgaggtggccgtgttcgagcctagcgaggccgagatcagccacacccagaaagccaccctcgtgtgcctggctaccggcttctaccccgaccatgtggaactgtcttggtgggtcaacggcaaagaggtgcacagcggcgtgtctaccgacccccagccactgaaagaacagcccgccctgaacgacagccggtactgcctgagcagcagactgagagtgtccgccaccttctggcagaacccccggaaccacttcagatgccaggtgcagttctacggcctgagcgagaacgacgagtggacccaggacagagccaagcccgtgacccagatcgtgtctgccgaagcctggggcagagccgattgcggatcccaggctcagagcgattgcagctgtagcacagtgtctccaggcgtgctggccggaattgtgatgggcgatctggtgctgacagtgctgattgccctggccgtgtacttcctgggtagactggtgcctagaggaagaggcgctgccgaagccgccacaagaaagcagagaatcaccgagacagagagcccctaccaagagctgcaaggccagagaagcgacgtgtacagcgacctgaatacccagagagtgaagttcagcagaagcgccgacgcccctgcctaccagcagggacagaaccaactgtacaacgagctgaacctgggcagacgggaagagtacgacgtgctggacaagcggagaggcagggaccctgagatgggcggaaagccccagcggagaaagaacccccaggaaggactgtataacgaactccagaaagacaagatggccgaagcctacagcgagatcggcatgaagggcgagcggagaagaggcaagggccacgatggcctgtaccagggcctgagcaccgccaccaaggacacctatgacgccctgcacatgcaggccctgcctccaagaagggccaagcgatctggatctggagcaacaaacttctcactactcaaacaagcaggtgacgtggaggagaatcccgggcctactagtatggactggatttggcgcatccttttccttgtcggcgctgctaccggcgcgcattccttcgaaaagaaccaggtggaacagagccctcagagcctgattatcctggaaggcaagaactgcaccctccagtgcaactacaccgtgtctcccttcagcaacctgcggtggtacaagcaggatacaggcagaggccctgtgtctctgaccatcctgaccttcagcgagaacaccaagagcaacggcagatacaccgccacactggacgccgatacaaagcagagcagcctgcacatcacagccagccagctgagcgatagcgccagctacatctgtgtggtgtctggcggcacagacagctggggcaaactccagtttggagctggcacacaggtggtggtcacccctgatacgcgtatccagaaccctgatcctgccgtgtaccagctgcgggatagcaagagcagcgacaagagcgtgtgtctgttcaccgacttcgacagccagaccaacgtgtcccagagcaaggactccgacgtgtacatcaccgataagaccgtgctggacatgcggagcatggacttcaagagcaactccgccgtggcctggtccaacaagtccgatttcgcctgcgccaacgccttcaacaacagcattatccccgaggacacattcttcccaagccccgagagcagctgcggtaccacaacgccgggcgaaaggagttccttgccggccttttaccccggcacaagcggaagctgtagtgggtgtggaagcctcagcctcccacttcttgcgggcctcgtcgcggcagatgcagtagcttcacttcttattgtaggcgcggtatttctctgtgctcgaccaaggaggtcacccgctcaggaggatggtaaggtgtatataaatatgccaggacgcggaagctctagacgggttaagttttccagatccgcagacgcacccgcttaccaacaagggcagaaccaactctacaatgaacttaatttggggcggagggaagagtacgacgttctggacaaaaggaggggacgagatcccgagatgggcggaaagcctcagcgaaggaagaatccgcaagaggggctttataacgaactccagaaagataaaatggcagaagcctatagtgagattgggatgaagggagaaaggaggaggggtaaaggtcacgatgggttgtaccaaggattgagcacagccactaaagatacctatgatgcgctccacatgcaggccctgccgccaagataa

SEQ ID NO: 2671 - DNA, 2523 bp, synthetic construct
  source 1..2523: mol_type = other DNA
atggccttaccagtgaccgccttgctcctgccgctggccttgctgctccacgccgccaggccggaattcgacgtgacccagacacctcggaacagaatcaccaagaccggcaagcggatcatgctggaatgcagccagaccaagggccacgaccggatgtactggtacagacaggaccctggcctgggcctgagactgatctactacagcttcgacgtgaaggacatcaacaagggcgagatcagcgacggctacagcgtgtcaagacaggctcaggccaagttcagcctgtctctggaaagcgccattcctaaccagacagccctgtacttctgtgccacaagcggccagggcgcttacgaggaacagttctttggccctggcaccagactgacagttctcgaggacctgaagaacgtgttcccacctgaggtggccgtgttcgagcctagcgaggccgagatcagccacacccagaaagccaccctcgtgtgcctggctaccggcttctaccccgaccatgtggaactgtcttggtgggtcaacggcaaagaggtgcacagcggcgtgtctaccgacccccagccactgaaagaacagcccgccctgaacgacagccggtactgcctgagcagcagactgagagtgtccgccaccttctggcagaacccccggaaccacttcagatgccaggtgcagttctacggcctgagcgagaacgacgagtggacccaggacagagccaagcccgtgacccagatcgtgtctgccgaagcctggggcagagccgattgcggatcccaggctcagagcgattgcagctgtagcacagtgtctccaggcgtgctggccggaattgtgatgggcgatctggtgctgacagtgctgattgccctggccgtgtacttcctgggtagactggtgcctagaggaagaggcgctgccgaagccgccacaagaaagcagagaatcaccgagacagagagcccctaccaagagctgcaaggccagagaagcgacgtgtacagcgacctgaatacccagagagtgaagttcagcagaagcgccgacgcccctgcctaccagcagggacagaaccaactgtacaacgagctgaacctgggcagacgggaagagtacgacgtgctggacaagcggagaggcagggaccctgagatgggcggaaagccccagcggagaaagaacccccaggaaggactgtataacgaactccagaaagacaagatggccgaagcctacagcgagatcggcatgaagggcgagcggagaagaggcaagggccacgatggcctgtaccagggcctgagcaccgccaccaaggacacctatgacgccctgcacatgcaggccctgcctccaagaagggccaagcgatctggatctggagcaacaaacttctcactactcaaacaagcaggtgacgtggaggagaatcccgggcctactagtatggactggatttggcgcatccttttccttgtcggcgctgctaccggcgcgcattccttcgaaaagaaccaggtggaacagagccctcagagcctgattatcctggaaggcaagaactgcaccctccagtgcaactacaccgtgtctcccttcagcaacctgcggtggtacaagcaggatacaggcagaggccctgtgtctctgaccatcctgaccttcagcgagaacaccaagagcaacggcagatacaccgccacactggacgccgatacaaagcagagcagcctgcacatcacagccagccagctgagcgatagcgccagctacatctgtgtggtgtctggcggcacagacagctggggcaaactccagtttggagctggcacacaggtggtggtcacccctgatacgcgtatccagaaccctgatcctgccgtgtaccagctgcgggatagcaagagcagcgacaagagcgtgtgtctgttcaccgacttcgacagccagaccaacgtgtcccagagcaaggactccgacgtgtacatcaccgataagaccgtgctggacatgcggagcatggacttcaagagcaactccgccgtggcctggtccaacaagtccgatttcgcctgcgccaacgccttcaacaacagcattatccccgaggacacattcttcccaagccccgagagcagctgcggtaccacaacgccgggcgaaaggagttccttgccggccttttaccccggcacaagcggaagctgtagtgggtgtggaagcctcagcctcccacttcttgcgggcctcgtcgcggcagatgcagtagcttcacttcttattgtaggcgcggtatttaagagaggccggaagaagctgctgtacatcttcaagcagcctttcatgcggcccgtgcagaccacccaggaagaggacggctgctcctgccggttccccgaggaagaagaaggcggctgcgagctgctctgtgctcgaccaaggaggtcacccgctcaggaggatggtaaggtgtatataaatatgccaggacgcggataa

SEQ ID NO: 2672 - DNA, 2520 bp, synthetic construct
  source 1..2520: mol_type = other DNA
atggccttaccagtgaccgccttgctcctgccgctggccttgctgctccacgccgccaggccggaattcgacgtgacccagacacctcggaacagaatcaccaagaccggcaagcggatcatgctggaatgcagccagaccaagggccacgaccggatgtactggtacagacaggaccctggcctgggcctgagactgatctactacagcttcgacgtgaaggacatcaacaagggcgagatcagcgacggctacagcgtgtcaagacaggctcaggccaagttcagcctgtctctggaaagcgccattcctaaccagacagccctgtacttctgtgccacaagcggccagggcgcttacgaggaacagttctttggccctggcaccagactgacagttctcgaggacctgaagaacgtgttcccacctgaggtggccgtgttcgagcctagcgaggccgagatcagccacacccagaaagccaccctcgtgtgcctggctaccggcttctaccccgaccatgtggaactgtcttggtgggtcaacggcaaagaggtgcacagcggcgtgtctaccgacccccagccactgaaagaacagcccgccctgaacgacagccggtactgcctgagcagcagactgagagtgtccgccaccttctggcagaacccccggaaccacttcagatgccaggtgcagttctacggcctgagcgagaacgacgagtggacccaggacagagccaagcccgtgacccagatcgtgtctgccgaagcctggggcagagccgattgcggatcccaggctcagagcgattgcagctgtagcacagtgtctccaggcgtgctggccggaattgtgatgggcgatctggtgctgacagtgctgattgccctggccgtgtacttcctgggtagactggtgcctagaggaagaggcgctgccgaagccgccacaagaaagcagagaatcaccgagacagagagcccctaccaagagctgcaaggccagagaagcgacgtgtacagcgacctgaatacccagagagtgaagttcagcagaagcgccgacgcccctgcctaccagcagggacagaaccaactgtacaacgagctgaacctgggcagacgggaagagtacgacgtgctggacaagcggagaggcagggaccctgagatgggcggaaagccccagcggagaaagaacccccaggaaggactgtataacgaactccagaaagacaagatggccgaagcctacagcgagatcggcatgaagggcgagcggagaagaggcaagggccacgatggcctgtaccagggcctgagcaccgccaccaaggacacctatgacgccctgcacatgcaggccctgcctccaagaagggccaagcgatctggatctggagcaacaaacttctcactactcaaacaagcaggtgacgtggaggagaatcccgggcctactagtatggactggatttggcgcatccttttccttgtcggcgctgctaccggcgcgcattccttcgaaaagaaccaggtggaacagagccctcagagcctgattatcctggaaggcaagaactgcaccctccagtgcaactacaccgtgtctcccttcagcaacctgcggtggtacaagcaggatacaggcagaggccctgtgtctctgaccatcctgaccttcagcgagaacaccaagagcaacggcagatacaccgccacactggacgccgatacaaagcagagcagcctgcacatcacagccagccagctgagcgatagcgccagctacatctgtgtggtgtctggcggcacagacagctggggcaaactccagtttggagctggcacacaggtggtggtcacccctgatacgcgtatccagaaccctgatcctgccgtgtaccagctgcgggatagcaagagcagcgacaagagcgtgtgtctgttcaccgacttcgacagccagaccaacgtgtcccagagcaaggactccgacgtgtacatcaccgataagaccgtgctggacatgcggagcatggacttcaagagcaactccgccgtggcctggtccaacaagtccgatttcgcctgcgccaacgccttcaacaacagcattatccccgaggacacattcttcccaagccccgagagcagctgcggtaccacaacgccgggcgaaaggagttccttgccggccttttaccccggcacaagcggaagctgtagtgggtgtggaagcctcagcctcccacttcttgcgggcctcgtcgcggcagatgcagtagcttcacttcttattgtaggcgcggtatttaggagcaagcggtcacggctgctccacagcgattacatgaatatgacaccacgaagaccgggtcctactcgcaaacactaccaaccctacgcacctccccgcgactttgcagcgtaccgatctctctgtgctcgaccaaggaggtcacccgctcaggaggatggtaaggtgtatataaatatgccaggacgcggataa

SEQ ID NO: 2673 - DNA, 3255 bp, synthetic construct
  source 1..3255: mol_type = other DNA
atggccttaccagtgaccgccttgctcctgccgctggccttgctgctccacgccgccaggccggaattcgacgtgacccagacacctcggaacagaatcaccaagaccggcaagcggatcatgctggaatgcagccagaccaagggccacgaccggatgtactggtacagacaggaccctggcctgggcctgagactgatctactacagcttcgacgtgaaggacatcaacaagggcgagatcagcgacggctacagcgtgtcaagacaggctcaggccaagttcagcctgtctctggaaagcgccattcctaaccagacagccctgtacttctgtgccacaagcggccagggcgcttacgaggaacagttctttggccctggcaccagactgacagttctcgaggacctgaagaacgtgttcccacctgaggtggccgtgttcgagcctagcgaggccgagatcagccacacccagaaagccaccctcgtgtgcctggctaccggcttctaccccgaccatgtggaactgtcttggtgggtcaacggcaaagaggtgcacagcggcgtgtctaccgacccccagccactgaaagaacagcccgccctgaacgacagccggtactgcctgagcagcagactgagagtgtccgccaccttctggcagaacccccggaaccacttcagatgccaggtgcagttctacggcctgagcgagaacgacgagtggacccaggacagagccaagcccgtgacccagatcgtgtctgccgaagcctggggcagagccgattgcggatcccagagcttcggcctgctggaccccaagctgtgctacctgctggatggcatcctgttcatctacggcgtgatcctgaccgccctgttcctgagagtgaagttcagcagaagcgccgacgcccctgcctaccagcagggacagaaccaactgtacaacgagctgaacctgggcagacgggaagagtacgacgtgctggacaagcggagaggcagggaccctgagatgggcggaaagccccagcggagaaagaacccccaggaaggactgtataacgaactccagaaagacaagatggccgaagcctacagcgagatcggcatgaagggcgagcggagaagaggcaagggccacgatggcctgtaccagggcctgagcaccgccaccaaggacacctatgacgccctgcacatgcaggccctgcctccaagaagggccaagcgatctggatctggagcaacaaacttctcactactcaaacaagcaggtgacgtggaggagaatcccgggcctactagtatggactggatttggcgcatccttttccttgtcggcgctgctaccggcgcgcattccttcgaaaagaaccaggtggaacagagccctcagagcctgattatcctggaaggcaagaactgcaccctccagtgcaactacaccgtgtctcccttcagcaacctgcggtggtacaagcaggatacaggcagaggccctgtgtctctgaccatcctgaccttcagcgagaacaccaagagcaacggcagatacaccgccacactggacgccgatacaaagcagagcagcctgcacatcacagccagccagctgagcgatagcgccagctacatctgtgtggtgtctggcggcacagacagctggggcaaactccagtttggagctggcacacaggtggtggtcacccctgatacgcgtatccagaaccctgatcctgccgtgtaccagctgcgggatagcaagagcagcgacaagagcgtgtgtctgttcaccgacttcgacagccagaccaacgtgtcccagagcaaggactccgacgtgtacatcaccgataagaccgtgctggacatgcggagcatggacttcaagagcaactccgccgtggcctggtccaacaagtccgatttcgcctgcgccaacgccttcaacaacagcattatccccgaggacacattcttcccaagccccgagagcagctgcggtacccagagttttgggttgttggaccctaaattgtgctatctgttggacggaatcctgttcatttacggagtgatcctgaccgcattgttcctgcgggttaagttttccagatccgcagacgcacccgcttaccaacaagggcagaaccaactctacaatgaacttaatttggggcggagggaagagtacgacgttctggacaaaaggaggggacgagatcccgagatgggcggaaagcctcagcgaaggaagaatccgcaagaggggctttataacgaactccagaaagataaaatggcagaagcctatagtgagattgggatgaagggagaaaggaggaggggtaaaggtcacgatgggttgtaccaaggattgagcacagccactaaagatacctatgatgcgctccacatgcaggccctgccgccaagacgcgccaagagaagcggatctggcgtgaagcagaccctgaatttcgacctgctgaagctggctggcgacgtggaatccaacccaggcccttctagaggccatatggctctgcctgtgacagctctgctgctgcctctggcactgctgcttcatgctgctagacctagccagtttagagtgtcccctctggacagaacctggaacctgggcgagacagtggaactgaagtgccaggtgctgctgagcaaccctacaagcggctgctcctggctgtttcagcctagaggtgcagccgcctctcctacctttctgctgtacctgagccagaacaagcccaaggccgccgaaggactggacacccagagattcagcggcaagagactgggcgacaccttcgtgctgaccctgagcgacttcagaagagagaacgagggctactacttctgtagcgccctgagcaacagcatcatgtacttcagccacttcgtgcccgtgtttctgcccgccaagcctacaacaacccctgctcctagacctcctacaccagctcctacaatcgccagccagcctctgtctctcagacccgaagcctgtagacctgctgctggcggagctgtgcataccagaggactggatttcgcctgcgacatctacatctgggctcctctggctggcacatgtggcgtgctgctgctgtccctggtcatcaccctgtactgcaaccaccggaacaggcggagagtgtgcaagtgccctagacctgtggtcaagagcggcgacaagcctagcctgagcgccagatatgtt

SEQ ID NO: 2674 - DNA, 2478 bp, synthetic construct
  source 1..2478: mol_type = other DNA
atggccttaccagtgaccgccttgctcctgccgctggccttgctgctccacgccgccaggccggaattcgacgtgacccagacacctcggaacagaatcaccaagaccggcaagcggatcatgctggaatgcagccagaccaagggccacgaccggatgtactggtacagacaggaccctggcctgggcctgagactgatctactacagcttcgacgtgaaggacatcaacaagggcgagatcagcgacggctacagcgtgtcaagacaggctcaggccaagttcagcctgtctctggaaagcgccattcctaaccagacagccctgtacttctgtgccacaagcggccagggcgcttacgaggaacagttctttggccctggcaccagactgacagttctcgaggacctgaagaacgtgttcccacctgaggtggccgtgttcgagcctagcgaggccgagatcagccacacccagaaagccaccctcgtgtgcctggctaccggcttctaccccgaccatgtggaactgtcttggtgggtcaacggcaaagaggtgcacagcggcgtgtctaccgacccccagccactgaaagaacagcccgccctgaacgacagccggtactgcctgagcagcagactgagagtgtccgccaccttctggcagaacccccggaaccacttcagatgccaggtgcagttctacggcctgagcgagaacgacgagtggacccaggacagagccaagcccgtgacccagatcgtgtctgccgaagcctggggcagagccgattgcggatcccagagcttcggcctgctggaccccaagctgtgctacctgctggatggcatcctgttcatctacggcgtgatcctgaccgccctgttcctgagagtgaagttcagcagaagcgccgacgcccctgcctaccagcagggacagaaccaactgtacaacgagctgaacctgggcagacgggaagagtacgacgtgctggacaagcggagaggcagggaccctgagatgggcggaaagccccagcggagaaagaacccccaggaaggactgtataacgaactccagaaagacaagatggccgaagcctacagcgagatcggcatgaagggcgagcggagaagaggcaagggccacgatggcctgtaccagggcctgagcaccgccaccaaggacacctatgacgccctgcacatgcaggccctgcctccaagaagggccaagcgatctggatctggagcaacaaacttctcactactcaaacaagcaggtgacgtggaggagaatcccgggcctactagtatggactggatttggcgcatccttttccttgtcggcgctgctaccggcgcgcattccttcgaaaagaaccaggtggaacagagccctcagagcctgattatcctggaaggcaagaactgcaccctccagtgcaactacaccgtgtctcccttcagcaacctgcggtggtacaagcaggatacaggcagaggccctgtgtctctgaccatcctgaccttcagcgagaacaccaagagcaacggcagatacaccgccacactggacgccgatacaaagcagagcagcctgcacatcacagccagccagctgagcgatagcgccagctacatctgtgtggtgtctggcggcacagacagctggggcaaactccagtttggagctggcacacaggtggtggtcacccctgatacgcgtgcctctacaaagggaccctccgtgtttcctctggctcccagcagcaagtctacaagcggaggaacagccgctctgggctgcctggtcaaggattactttcccgagcctgtgaccgtgtcctggaatagcggagcactgacaagcggcgtgcacacctttccagccgtgctgcaaagcagcggcctgtactctctgagcagcgtggtcacagtgcctagctctagcctgggcacccagacctacatctgcaatgtgaaccacaagcctagcaacaccaaggtggacaagagagtggaacccaagagctgtggtacccagagttttgggttgttggaccctaaattgagctatctgttggacggaatcctgttcatttacggagtgatcctgaccgcattgttcctgcgggttaagttttccagatccgcagacgcacccgcttaccaacaagggcagaaccaactctacaatgaacttaatttggggcggagggaagagtacgacgttctggacaaaaggaggggacgagatcccgagatgggcggaaagcctcagcgaaggaagaatccgcaagaggggctttataacgaactccagaaagataaaatggcagaagcctatagtgagattgggatgaagggagaaaggaggaggggtaaaggtcacgatgggttgtaccaaggattgagcacagccactaaagatacctatgatgcgctccacatgcaggccctgccgccaagataa

SEQ ID NO: 2675 - DNA, 2451 bp, synthetic construct
  source 1..2451: mol_type = other DNA
atggccttaccagtgaccgccttgctcctgccgctggccttgctgctccacgccgccaggccggaattcgacgtgacccagacacctcggaacagaatcaccaagaccggcaagcggatcatgctggaatgcagccagaccaagggccacgaccggatgtactggtacagacaggaccctggcctgggcctgagactgatctactacagcttcgacgtgaaggacatcaacaagggcgagatcagcgacggctacagcgtgtcaagacaggctcaggccaagttcagcctgtctctggaaagcgccattcctaaccagacagccctgtacttctgtgccacaagcggccagggcgcttacgaggaacagttctttggccctggcaccagactgacagttctcgaggacctgaagaacgtgttcccacctgaggtggccgtgttcgagcctagcgaggccgagatcagccacacccagaaagccaccctcgtgtgcctggctaccggcttctaccccgaccatgtggaactgtcttggtgggtcaacggcaaagaggtgcacagcggcgtgtctaccgacccccagccactgaaagaacagcccgccctgaacgacagccggtactgcctgagcagcagactgagagtgtccgccaccttctggcagaacccccggaaccacttcagatgccaggtgcagttctacggcctgagcgagaacgacgagtggacccaggacagagccaagcccgtgacccagatcgtgtctgccgaagcctggggcagagccgattgcggatcccagagcttcggcctgctggaccccaagctgtgctacctgctggatggcatcctgttcatctacggcgtgatcctgaccgccctgttcctgagagtgaagttcagcagaagcgccgacgcccctgcctaccagcagggacagaaccaactgtacaacgagctgaacctgggcagacgggaagagtacgacgtgctggacaagcggagaggcagggaccctgagatgggcggaaagccccagcggagaaagaacccccaggaaggactgtataacgaactccagaaagacaagatggccgaagcctacagcgagatcggcatgaagggcgagcggagaagaggcaagggccacgatggcctgtaccagggcctgagcaccgccaccaaggacacctatgacgccctgcacatgcaggccctgcctccaagaagggccaagcgatctggatctggagcaacaaacttctcactactcaaacaagcaggtgacgtggaggagaatcccgggcctactagtatggactggatttggcgcatccttttccttgtcggcgctgctaccggcgcgcattccttcgaaaagaaccaggtggaacagagccctcagagcctgattatcctggaaggcaagaactgcaccctccagtgcaactacaccgtgtctcccttcagcaacctgcggtggtacaagcaggatacaggcagaggccctgtgtctctgaccatcctgaccttcagcgagaacaccaagagcaacggcagatacaccgccacactggacgccgatacaaagcagagcagcctgcacatcacagccagccagctgagcgatagcgccagctacatctgtgtggtgtctggcggcacagacagctggggcaaactccagtttggagctggcacacaggtggtggtcacccctgatacgcgtatccagaaccctgatcctgccgtgtaccagctgcgggatagcaagagcagcgacaagagcgtgtgtctgttcaccgacttcgacagccagaccaacgtgtcccagagcaaggactccgacgtgtacatcaccgataagaccgtgctggacatgcggagcatggacttcaagagcaactccgccgtggcctggtccaacaagtccgatttcgcctgcgccaacgccttcaacaacagcattatccccgaggacacattcttcccaagccccgagagcagctgcggtacccagagttttgggttgttggaccctaaattgagctatctgttggacggaatcctgttcatttacggagtgatcctgaccgcattgttcctgcgggttaagttttccagatccgcagacgcacccgcttaccaacaagggcagaaccaactctacaatgaacttaatttggggcggagggaagagtacgacgttctggacaaaaggaggggacgagatcccgagatgggcggaaagcctcagcgaaggaagaatccgcaagaggggctttataacgaactccagaaagataaaatggcagaagcctatagtgagattgggatgaagggagaaaggaggaggggtaaaggtcacgatgggttgtaccaaggattgagcacagccactaaagatacctatgatgcgctccacatgcaggccctgccgccaagataa

SEQ ID NO: 2676 - DNA, 2958 bp, synthetic construct
  source 1..2958: mol_type = other DNA
atggccttaccagtgaccgccttgctcctgccgctggccttgctgctccacgccgccaggccggaattcgacgtgacccagacacctcggaacagaatcaccaagaccggcaagcggatcatgctggaatgcagccagaccaagggccacgaccggatgtactggtacagacaggaccctggcctgggcctgagactgatctactacagcttcgacgtgaaggacatcaacaagggcgagatcagcgacggctacagcgtgtcaagacaggctcaggccaagttcagcctgtctctggaaagcgccattcctaaccagacagccctgtacttctgtgccacaagcggccagggcgcttacgaggaacagttctttggccctggcaccagactgacagttctcgagggacagcctaaggccaatcctaccgtgacactgttccctccaagcagcgaagaactccaggccaacaaggccacacttgtgtgcctgatctccgacttctaccctggggctgtgacagtggcttggaaggccgatggatctcctgtgaaagccggcgtggaaaccaccaagccatccaagcagagcaacaacaaatacgccgccagctcctacctgagcctgacacctgagcagtggaagtcccacagatcctacagctgccaagtgacccacgaaggcagcaccgtggaaaagacagtggcccctacagagtgcagcggatccctgggagagcctcagctgtgctatatcctggacgccatcctgtttctgtacggcatcgtgctgaccctgctgtactgccggctgaagatccaagtgcggaaggccgccatcaccagctacgagaaatccgacggcgtgtacaccggcctgagcaccagaaatcaagagacatacgagacactgaagcacgaaaagcctccacaaagggccaagcgatctggatctggagcaacaaacttctcactactcaaacaagcaggtgacgtggaggagaatcccgggcctactagtatggactggatttggcgcatccttttccttgtcggcgctgctaccggcgcgcattccttcgaaaagaaccaggtggaacagagccctcagagcctgattatcctggaaggcaagaactgcaccctccagtgcaactacaccgtgtctcccttcagcaacctgcggtggtacaagcaggatacaggcagaggccctgtgtctctgaccatcctgaccttcagcgagaacaccaagagcaacggcagatacaccgccacactggacgccgatacaaagcagagcagcctgcacatcacagccagccagctgagcgatagcgccagctacatctgtgtggtgtctggcggcacagacagctggggcaaactccagtttggagctggcacacaggtggtggtcacccctgatacgcgtatccagaaccctgatcctgccgtgtaccagctgcgggatagcaagagcagcgacaagagcgtgtgtctgttcaccgacttcgacagccagaccaacgtgtcccagagcaaggactccgacgtgtacatcaccgataagaccgtgctggacatgcggagcatggacttcaagagcaactccgccgtggcctggtccaacaagtccgatttcgcctgcgccaacgccttcaacaacagcattatccccgaggacacattcttcccaagccccgagagcagctgcggtacccagagttttgggttgttggaccctaaattgtgctatctgttggacggaatcctgttcatttacggagtgatcctgaccgcattgttcctgcgggttaagttttccagatccgcagacgcacccgcttaccaacaagggcagaaccaactctacaatgaacttaatttggggcggagggaagagtacgacgttctggacaaaaggaggggacgagatcccgagatgggcggaaagcctcagcgaaggaagaatccgcaagaggggctttataacgaactccagaaagataaaatggcagaagcctatagtgagattgggatgaagggagaaaggaggaggggtaaaggtcacgatgggttgtaccaaggattgagcacagccactaaagatacctatgatgcgctccacatgcaggccctgccgccaagacgcgccaagagaagcggatctggcgtgaagcagaccctgaatttcgacctgctgaagctggctggcgacgtggaatccaacccaggcccttctagaggccatatggctctgcctgtgacagctctgctgctgcctctggcactgctgcttcatgctgctagacctagccagtttagagtgtcccctctggacagaacctggaacctgggcgagacagtggaactgaagtgccaggtgctgctgagcaaccctacaagcggctgctcctggctgtttcagcctagaggtgcagccgcctctcctacctttctgctgtacctgagccagaacaagcccaaggccgccgaaggactggacacccagagattcagcggcaagagactgggcgacaccttcgtgctgaccctgagcgacttcagaagagagaacgagggctactacttctgtagcgccctgagcaacagcatcatgtacttcagccacttcgtgcccgtgtttctgcccgccaagcctacaacaacccctgctcctagacctcctacaccagctcctacaatcgccagccagcctctgtctctcagacccgaagcctgtagacctgctgctggcggagctgtgcataccagaggactggatttcgcctgcgacatctacatctgggctcctctggctggcacatgtggcgtgctgctgctgtccctggtcatcaccctgtactgcaaccaccggaacaggcggagagtgtgcaagtgccctagacctgtggtcaagagcggcgacaagcctagcctgagcgccagatatgtt

SEQ ID NO: 2677 - DNA, 2253 bp, synthetic construct
  source 1..2253: mol_type = other DNA
atggccttaccagtgaccgccttgctcctgccgctggccttgctgctccacgccgccaggccggaattcgacgtgacccagacacctcggaacagaatcaccaagaccggcaagcggatcatgctggaatgcagccagaccaagggccacgaccggatgtactggtacagacaggaccctggcctgggcctgagactgatctactacagcttcgacgtgaaggacatcaacaagggcgagatcagcgacggctacagcgtgtcaagacaggctcaggccaagttcagcctgtctctggaaagcgccattcctaaccagacagccctgtacttctgtgccacaagcggccagggcgcttacgaggaacagttctttggccctggcaccagactgacagttctcgaggacctgaagaacgtgttcccacctgaggtggccgtgttcgagcctagcgaggccgagatcagccacacccagaaagccaccctcgtgtgcctggctaccggcttctaccccgaccatgtggaactgtcttggtgggtcaacggcaaagaggtgcacagcggcgtgtctaccgacccccagccactgaaagaacagcccgccctgaacgacagccggtactgcctgagcagcagactgagagtgtccgccaccttctggcagaacccccggaaccacttcagatgccaggtgcagttctacggcctgagcgagaacgacgagtggacccaggacagagccaagcccgtgacccagatcgtgtctgccgaagcctggggcagagccgattgcggatcccagagcttcggcctgctggaccccaagctgtgctacctgctggatggcatcctgttcatctacggcgtgatcctgaccgccctgttcctgagagtgaagttcagcagaagcgccgacgcccctgcctaccagcagggacagaaccaactgtacaacgagctgaacctgggcagacgggaagagtacgacgtgctggacaagcggagaggcagggaccctgagatgggcggaaagccccagcggagaaagaacccccaggaaggactgtataacgaactccagaaagacaagatggccgaagcctacagcgagatcggcatgaagggcgagcggagaagaggcaagggccacgatggcctgtaccagggcctgagcaccgccaccaaggacacctatgacgccctgcacatgcaggccctgcctccaagaagggccaagcgatctggatctggagcaacaaacttctcactactcaaacaagcaggtgacgtggaggagaatcccgggcctactagtatggactggatttggcgcatccttttccttgtcggcgctgctaccggcgcgcattccttcgaaaagaaccaggtggaacagagccctcagagcctgattatcctggaaggcaagaactgcaccctccagtgcaactacaccgtgtctcccttcagcaacctgcggtggtacaagcaggatacaggcagaggccctgtgtctctgaccatcctgaccttcagcgagaacaccaagagcaacggcagatacaccgccacactggacgccgatacaaagcagagcagcctgcacatcacagccagccagctgagcgatagcgccagctacatctgtgtggtgtctggcggcacagacagctggggcaaactccagtttggagctggcacacaggtggtggtcacccctgatacgcgtgcctctacaaagggaccctccgtgtttcctctggctcccagcagcaagtctacaagcggaggaacagccgctctgggctgcctggtcaaggattactttcccgagcctgtgaccgtgtcctggaatagcggagcactgacaagcggcgtgcacacctttccagccgtgctgcaaagcagcggcctgtactctctgagcagcgtggtcacagtgcctagctctagcctgggcacccagacctacatctgcaatgtgaaccacaagcctagcaacaccaaggtggacaagagagtggaacccaagagctgtggtaccctcggagaaccacagctctgttacattctggatgctatcctgttcctctatgggatcgtcctgacactcctgtattgcagactcaaaattcaagttcgcaaagccgccattacctcttacgagaagagtgatggggtgtacacaggactgtctacccggaatcaagaaacctacgaaaccctcaaacatgagaagccacctcagtaa

SEQ ID NO: 2678 - DNA, 2253 bp, synthetic construct; identical to SEQ ID NO: 2677
  source 1..2253: mol_type = other DNA

SEQ ID NO: 2679 - DNA, 2226 bp, synthetic construct
  source 1..2226: mol_type = other DNA
atggccttaccagtgaccgccttgctcctgccgctggccttgctgctccacgccgccaggccggaattcgacgtgacccagacacctcggaacagaatcaccaagaccggcaagcggatcatgctggaatgcagccagaccaagggccacgaccggatgtactggtacagacaggaccctggcctgggcctgagactgatctactacagcttcgacgtgaaggacatcaacaagggcgagatcagcgacggctacagcgtgtcaagacaggctcaggccaagttcagcctgtctctggaaagcgccattcctaaccagacagccctgtacttctgtgccacaagcggccagggcgcttacgaggaacagttctttggccctggcaccagactgacagttctcgaggacctgaagaacgtgttcccacctgaggtggccgtgttcgagcctagcgaggccgagatcagccacacccagaaagccaccctcgtgtgcctggctaccggcttctaccccgaccatgtggaactgtcttggtgggtcaacggcaaagaggtgcacagcggcgtgtctaccgacccccagccactgaaagaacagcccgccctgaacgacagccggtactgcctgagcagcagactgagagtgtccgccaccttctggcagaacccccggaaccacttcagatgccaggtgcagttctacggcctgagcgagaacgacgagtggacccaggacagagccaagcccgtgacccagatcgtgtctgccgaagcctggggcagagccgattgcggatcccagagcttcggcctgctggaccccaagctgtgctacctgctggatggcatcctgttcatctacggcgtgatcctgaccgccctgttcctgagagtgaagttcagcagaagcgccgacgcccctgcctaccagcagggacagaaccaactgtacaacgagctgaacctgggcagacgggaagagtacgacgtgctggacaagcggagaggcagggaccctgagatgggcggaaagccccagcggagaaagaacccccaggaaggactgtataacgaactccagaaagacaagatggccgaagcctacagcgagatcggcatgaagggcgagcggagaagaggcaagggccacgatggcctgtaccagggcctgagcaccgccaccaaggacacctatgacgccctgcacatgcaggccctgcctccaagaagggccaagcgatctggatctggagcaacaaacttctcactactcaaacaagcaggtgacgtggaggagaatcccgggcctactagtatggactggatttggcgcatccttttccttgtcggcgctgctaccggcgcgcattccttcgaaaagaaccaggtggaacagagccctcagagcctgattatcctggaaggcaagaactgcaccctccagtgcaactacaccgtgtctcccttcagcaacctgcggtggtacaagcaggatacaggcagaggccctgtgtctctgaccatcctgaccttcagcgagaacaccaagagcaacggcagatacaccgccacactggacgccgatacaaagcagagcagcctgcacatcacagccagccagctgagcgatagcgccagctacatctgtgtggtgtctggcggcacagacagctggggcaaactccagtttggagctggcacacaggtggtggtcacccctgatacgcgtatccagaaccctgatcctgccgtgtaccagctgcgggatagcaagagcagcgacaagagcgtgtgtctgttcaccgacttcgacagccagaccaacgtgtcccagagcaaggactccgacgtgtacatcaccgataagaccgtgctggacatgcggagcatggacttcaagagcaactccgccgtggcctggtccaacaagtccgatttcgcctgcgccaacgccttcaacaacagcattatccccgaggacacattcttcccaagccccgagagcagctgcggtaccctcggagaaccacagctctgttacattctggatgctatcctgttcctctatgggatcgtcctgacactcctgtattgcagactcaaaattcaagttcgcaaagccgccattacctcttacgagaagagtgatggggtgtacacaggactgtctacccggaatcaagaaacctacgaaaccctcaaacatgagaagccacctcagtaa

SEQ ID NO: 2680 - DNA, 2970 bp, synthetic construct
  source 1..2970: mol_type = other DNA
atggccttaccagtgaccgccttgctcctgccgctggccttgctgctccacgccgccaggccggaattcgacgtgacccagacacctcggaacagaatcaccaagaccggcaagcggatcatgctggaatgcagccagaccaagggccacgaccggatgtactggtacagacaggaccctggcctgggcctgagactgatctactacagcttcgacgtgaaggacatcaacaagggcgagatcagcgacggctacagcgtgtcaagacaggctcaggccaagttcagcctgtctctggaaagcgccattcctaaccagacagccctgtacttctgtgccacaagcggccagggcgcttacgaggaacagttctttggccctggcaccagactgacagttctcgagggacagcctaaggccaatcctaccgtgacactgttccctccaagcagcgaagaactccaggccaacaaggccacacttgtgtgcctgatctccgacttctaccctggggctgtgacagtggcttggaaggccgatggatctcctgtgaaagccggcgtggaaaccaccaagccatccaagcagagcaacaacaaatacgccgccagctcctacctgagcctgacacctgagcagtggaagtcccacagatcctacagctgccaagtgacccacgaaggcagcaccgtggaaaagacagtggcccctacagagtgcagcacaacacctggcgagagaagtagcctgcctgccttctatcctggcaccagcggctcttgttctggctgtggatctctgagcctgcctctgctggctggactggttgctgctgatgctgtggcctctctgctgattgtgggagccgtgttcctgtgcgccagacctagaagaagccccgctcaagaggacggcaaggtgtacatcaacatgcccggcagaggaagggccaagcgatctggatctggagcaacaaacttctcactactcaaacaagcaggtgacgtggaggagaatcccgggcctactagtatggactggatttggcgcatccttttccttgtcggcgctgctaccggcgcgcattccttcgaaaagaaccaggtggaacagagccctcagagcctgattatcctggaaggcaagaactgcaccctccagtgcaactacaccgtgtctcccttcagcaacctgcggtggtacaagcaggatacaggcagaggccctgtgtctctgaccatcctgaccttcagcgagaacaccaagagcaacggcagatacaccgccacactggacgccgatacaaagcagagcagcctgcacatcacagccagccagctgagcgatagcgccagctacatctgtgtggtgtctggcggcacagacagctggggcaaactccagtttggagctggcacacaggtggtggtcacccctgatacgcgtatccagaaccctgatcctgccgtgtaccagctgcgggatagcaagagcagcgacaagagcgtgtgtctgttcaccgacttcgacagccagaccaacgtgtcccagagcaaggactccgacgtgtacatcaccgataagaccgtgctggacatgcggagcatggacttcaagagcaactccgccgtggcctggtccaacaagtccgatttcgcctgcgccaacgccttcaacaacagcattatccccgaggacacattcttcccaagccccgagagcagctgcggtacccagagttttgggttgttggaccctaaattgtgctatctgttggacggaatcctgttcatttacggagtgatcctgaccgcattgttcctgcgggttaagttttccagatccgcagacgcacccgcttaccaacaagggcagaaccaactctacaatgaacttaatttggggcggagggaagagtacgacgttctggacaaaaggaggggacgagatcccgagatgggcggaaagcctcagcgaaggaagaatccgcaagaggggctttataacgaactccagaaagataaaatggcagaagcctatagtgagattgggatgaagggagaaaggaggaggggtaaaggtcacgatgggttgtaccaaggattgagcacagccactaaagatacctatgatgcgctccacatgcaggccctgccgccaagacgcgccaagagaagcggatctggcgtgaagcagaccctgaatttcgacctgctgaagctggctggcgacgtggaatccaacccaggcccttctagaggccatatggctctgcctgtgacagctctgctgctgcctctggcactgctgcttcatgctgctagacctagccagtttagagtgtcccctctggacagaacctggaacctgggcgagacagtggaactgaagtgccaggtgctgctgagcaaccctacaagcggctgctcctggctgtttcagcctagaggtgcagccgcctctcctacctttctgctgtacctgagccagaacaagcccaaggccgccgaaggactggacacccagagattcagcggcaagagactgggcgacaccttcgtgctgaccctgagcgacttcagaagagagaacgagggctactacttctgtagcgccctgagcaacagcatcatgtacttcagccacttcgtgcccgtgtttctgcccgccaagcctacaacaacccctgctcctagacctcctacaccagctcctacaatcgccagccagcctctgtctctcagacccgaagcctgtagacctgctgctggcggagctgtgcataccagaggactggatttcgcctgcgacatctacatctgggctcctctggctggcacatgtggcgtgctgctgctgtccctggtcatcaccctgtactgcaaccaccggaacaggcggagagtgtgcaagtgccctagacctgtggtcaagagcggcgacaagcctagcctgagcgccagatatgtt

SEQ ID NO: 2681 - DNA, 3069 bp, synthetic construct
  source 1..3069: mol_type = other DNA
atggccttaccagtgaccgccttgctcctgccgctggccttgctgctccacgccgccaggccggaattcgacgtgacccagacacctcggaacagaatcaccaagaccggcaagcggatcatgctggaatgcagccagaccaagggccacgaccggatgtactggtacagacaggaccctggcctgggcctgagactgatctactacagcttcgacgtgaaggacatcaacaagggcgagatcagcgacggctacagcgtgtcaagacaggctcaggccaagttcagcctgtctctggaaagcgccattcctaaccagacagccctgtacttctgtgccacaagcggccagggcgcttacgaggaacagttctttggccctggcaccagactgacagttctcgaggacctgaagaacgtgttcccacctgaggtggccgtgttcgagcctagcgaggccgagatcagccacacccagaaagccaccctcgtgtgcctggctaccggcttctaccccgaccatgtggaactgtcttggtgggtcaacggcaaagaggtgcacagcggcgtgtctaccgacccccagccactgaaagaacagcccgccctgaacgacagccggtactgcctgagcagcagactgagagtgtccgccaccttctggcagaacccccggaaccacttcagatgccaggtgcagttctacggcctgagcgagaacgacgagtggacccaggacagagccaagcccgtgacccagatcgtgtctgccgaagcctggggcagagccgattgcggatcccagagcttcggcctgctggaccccaagctgtgctacctgctggatggcatcctgttcatctacggcgtgatcctgaccgccctgttcctgagagtgaagttcagcagaagcgccgacgcccctgcctaccagcagggacagaaccaactgtacaacgagctgaacctgggcagacgggaagagtacgacgtgctggacaagcggagaggcagggaccctgagatgggcggaaagccccagcggagaaagaacccccaggaaggactgtataacgaactccagaaagacaagatggccgaagcctacagcgagatcggcatgaagggcgagcggagaagaggcaagggccacgatggcctgtaccagggcctgagcaccgccaccaaggacacctatgacgccctgcacatgcaggccctgcctccaagaagggccaagcgatctggatctggagcaacaaacttctcactactcaaacaagcaggtgacgtggaggagaatcccgggcctactagtatggactggatttggcgcatccttttccttgtcggcgctgctaccggcgcgcattccttcgaaaagaaccaggtggaacagagccctcagagcctgattatcctggaaggcaagaactgcaccctccagtgcaactacaccgtgtctcccttcagcaacctgcggtggtacaagcaggatacaggcagaggccctgtgtctctgaccatcctgaccttcagcgagaacaccaagagcaacggcagatacaccgccacactggacgccgatacaaagcagagcagcctgcacatcacagccagccagctgagcgatagcgccagctacatctgtgtggtgtctggcggcacagacagctggggcaaactccagtttggagctggcacacaggtggtggtcacccctgatacgcgtgcctctacaaagggaccctccgtgtttcctctggctcccagcagcaagtctacaagcggaggaacagccgctctgggctgcctggtcaaggattactttcccgagcctgtgaccgtgtcctggaatagcggagcactgacaagcggcgtgcacacctttccagccgtgctgcaaagcagcggcctgtactctctgagcagcgtggtcacagtgcctagctctagcctgggcacccagacctacatctgcaatgtgaaccacaagcctagcaacaccaaggtggacaagagagtggaacccaagagctgtacaacgccgggcgaaaggagttccttgccggccttttaccccggcacaagcggaagctgtagtgggtgtggaagcctcagcctcccacttcttgcgggcctcgtcgcggcagatgcagtagcttcacttcttattgtaggcgcggtatttctctgtgctcgaccaaggaggtcacccgctcaggaggatggtaaggtgtatataaatatgccaggacgcggacgcgccaagagaagcggatctggcgtgaagcagaccctgaatttcgacctgctgaagctggctggcgacgtggaatccaacccaggcccttctagaggccatatggctctgcctgtgacagctctgctgctgcctctggcactgctgcttcatgctgctagacctagccagtttagagtgtcccctctggacagaacctggaacctgggcgagacagtggaactgaagtgccaggtgctgctgagcaaccctacaagcggctgctcctggctgtttcagcctagaggtgcagccgcctctcctacctttctgctgtacctgagccagaacaagcccaaggccgccgaaggactggacacccagagattcagcggcaagagactgggcgacaccttcgtgctgaccctgagcgacttcagaagagagaacgagggctactacttctgtagcgccctgagcaacagcatcatgtacttcagccacttcgtgcccgtgtttctgcccgccaagcctacaacaacccctgctcctagacctcctacaccagctcctacaatcgccagccagcctctgtctctcagacccgaagcctgtagacctgctgctggcggagctgtgcataccagaggactggatttcgcctgcgacatctacatctgggctcctctggctggcacatgtggcgtgctgctgctgtccctggtcatcaccctgtactgcaaccaccggaacaggcggagagtgtgcaagtgccctagacctgtggtcaagagcggcgacaagcctagcctgagcgccagatatgtt

SEQ ID NO: 2682 - DNA, 2805 bp, synthetic construct
  source 1..2805: mol_type = other DNA
atggccttaccagtgaccgccttgctcctgccgctggccttgctgctccacgccgccaggccggacgtgacccagacacctcggaacagaatcaccaagaccggcaagcggatcatgctggaatgcagccagaccaagggccacgaccggatgtactggtacagacaggaccctggcctgggcctgagactgatctactacagcttcgacgtgaaggacatcaacaagggcgagatcagcgacggctacagcgtgtcaagacaggctcaggccaagttcagcctgtctctggaaagcgccattcctaaccagacagccctgtacttctgtgccacaagcggccagggcgcttacgaggaacagttctttggccctggcaccagactgacagttctcgagctgtgggtttcacagcctccagagatcagaaccctggaaggcagcagcgccttcctgccttgcagcttcaatgcctctcagggcagactggctatcggcagcgtgacctggttcagagatgaggtggtgcccggcaaagaagtgcggaacggcacccctgagtttagaggaaggctggcccctctggcctccagcagatttctgcacgatcaccaggccgagctgcacatcagagatgtgcgaggacacgacgccagcatctacgtgtgcagagtggaagtgctcggcctcggagttggcacaggcaatggaacaagactggtggtggaaaaagagcaccctcagctcggagccggaacagtgctgcttctgagagccggcttttacgccgtgtcctttctgtctgtggccgtgggcagcaccgtgtactatcagggcaagtgcctgacctggaagggacctagaaggcaactgcctgctgtggtgcctgctcctttgcctcctccatgtggaagctctgcccatctgctgccacctgttccaggcggaagggccaagcgatctggatctggagcaacaaacttctcactactcaaacaagcaggtgacgtggaggagaatcccgggcctactagtatggactggatttggcgcatccttttccttgtcggcgctgctaccggcgcgcattccttcgaaaagaaccaggtggaacagagccctcagagcctgattatcctggaaggcaagaactgcaccctccagtgcaactacaccgtgtctcccttcagcaacctgcggtggtacaagcaggatacaggcagaggccctgtgtctctgaccatcctgaccttcagcgagaacaccaagagcaacggcagatacaccgccacactggacgccgatacaaagcagagcagcctgcacatcacagccagccagctgagcgatagcgccagctacatctgtgtggtgtctggcggcacagacagctggggcaaactccagtttggagctggcacacaggtggtggtcacccctgatacgcgtctgtgggtgtcccagccacctgaaattcggacactggaaggctcctccgcctttctgccctgtagctttaacgccagccaggggagactcgccatcggctctgtgacatggttccgggatgaagtcgtccctggaaaagaagttcgcaacggaacaccagagttcagaggcagactcgccccactggcaagctccagattcctgcatgaccatcaggctgaactgcacattagggacgtgcggggccacgatgcctccatctatgtgtgtcgggtcgaagtgcttggactcggcgtcggaactggaaacggcactaggctggtggtcgagaaagaacatccacagcttggcgctggcaccgtcctgttgcttagagccggattctatgccgtcagcttcctgtccgtggctgtggggtctacagtgtattaccagggaaaatgtctcacctggaaaggccccagacgccagcttccagctgttgttcctgctccactgccaccaccttgtggctcctctgctcacttgcttccaccagtgcctggcggacgcgccaagagaagcggatctggcgtgaagcagaccctgaatttcgacctgctgaagctggctggcgacgtggaatccaacccaggcccttctagaggccatatggctctgcctgtgacagctctgctgctgcctctggcactgctgcttcatgctgctagacctagccagtttagagtgtcccctctggacagaacctggaacctgggcgagacagtggaactgaagtgccaggtgctgctgagcaaccctacaagcggctgctcctggctgtttcagcctagaggtgcagccgcctctcctacctttctgctgtacctgagccagaacaagcccaaggccgccgaaggactggacacccagagattcagcggcaagagactgggcgacaccttcgtgctgaccctgagcgacttcagaagagagaacgagggctactacttctgtagcgccctgagcaacagcatcatgtacttcagccacttcgtgcccgtgtttctgcccgccaagcctacaacaacccctgctcctagacctcctacaccagctcctacaatcgccagccagcctctgtctctcagacccgaagcctgtagacctgctgctggcggagctgtgcataccagaggactggatttcgcctgcgacatctacatctgggctcctctggctggcacatgtggcgtgctgctgctgtccctggtcatcaccctgtactgcaaccaccggaacaggcggagagtgtgcaagtgccctagacctgtggtcaagagcggcgacaagcctagcctgagcgccagatatgtt

SEQ ID NO: 2683 - DNA, 3210 bp, synthetic construct
  source 1..3210: mol_type = other DNA
atggccttaccagtgaccgccttgctcctgccgctggccttgctgctccacgccgccaggccggaattcgacgtgacccagacacctcggaacagaatcaccaagaccggcaagcggatcatgctggaatgcagccagaccaagggccacgaccggatgtactggtacagacaggaccctggcctgggcctgagactgatctactacagcttcgacgtgaaggacatcaacaagggcgagatcagcgacggctacagcgtgtcaagacaggctcaggccaagttcagcctgtctctggaaagcgccattcctaaccagacagccctgtacttctgtgccacaagcggccagggcgcttacgaggaacagttctttggccctggcaccagactgacagttctcgagggacagcctaaggccaatcctaccgtgacactgttccctccaagcagcgaagaactccaggccaacaaggccacacttgtgtgcctgatctccgacttctaccctggggctgtgacagtggcttggaaggccgatggatctcctgtgaaagccggcgtggaaaccaccaagccatccaagcagagcaacaacaaatacgccgccagctcctacctgagcctgacacctgagcagtggaagtcccacagatcctacagctgccaagtgacccacgaaggcagcaccgtggaaaagacagtggcccctacagagtgcagcggatcccagagcttcggcctgctggaccccaagctgtgctacctgctggatggcatcctgttcatctacggcgtgatcctgaccgccctgttcctgagagtgaagttcagcagaagcgccgacgcccctgcctaccagcagggacagaaccaactgtacaacgagctgaacctgggcagacgggaagagtacgacgtgctggacaagcggagaggcagggaccctgagatgggcggaaagccccagcggagaaagaacccccaggaaggactgtataacgaactccagaaagacaagatggccgaagcctacagcgagatcggcatgaagggcgagcggagaagaggcaagggccacgatggcctgtaccagggcctgagcaccgccaccaaggacacctatgacgccctgcacatgcaggccctgcctccaagaagggccaagcgatctggatctggagcaacaaacttctcactactcaaacaagcaggtgacgtggaggagaatcccgggcctactagtatggactggatttggcgcatccttttccttgtcggcgctgctaccggcgcgcattccttcgaaaagaaccaggtggaacagagccctcagagcctgattatcctggaaggcaagaactgcaccctccagtgcaactacaccgtgtctcccttcagcaacctgcggtggtacaagcaggatacaggcagaggccctgtgtctctgaccatcctgaccttcagcgagaacaccaagagcaacggcagatacaccgccacactggacgccgatacaaagcagagcagcctgcacatcacagccagccagctgagcgatagcgccagctacatctgtgtggtgtctggcggcacagacagctggggcaaactccagtttggagctggcacacaggtggtggtcacccctgatacgcgtgcctctacaaagggaccctccgtgtttcctctggctcccagcagcaagtctacaagcggaggaacagccgctctgggctgcctggtcaaggattactttcccgagcctgtgaccgtgtcctggaatagcggagcactgacaagcggcgtgcacacctttccagccgtgctgcaaagcagcggcctgtactctctgagcagcgtggtcacagtgcctagctctagcctgggcacccagacctacatctgcaatgtgaaccacaagcctagcaacaccaaggtggacaagagagtggaacccaagagctgtggtacccagagttttgggttgttggaccctaaattgtgctatctgttggacggaatcctgttcatttacggagtgatcctgaccgcattgttcctgcgggttaagttttccagatccgcagacgcacccgcttaccaacaagggcagaaccaactctacaatgaacttaatttggggcggagggaagagtacgacgttctggacaaaaggaggggacgagatcccgagatgggcggaaagcctcagcgaaggaagaatccgcaagaggggctttataacgaactccagaaagataaaatggcagaagcctatagtgagattgggatgaagggagaaaggaggaggggtaaaggtcacgatgggttgtaccaaggattgagcacagccactaaagatacctatgatgcgctccacatgcaggccctgccgccaagacgcgccaagagaagcggatctggcgtgaagcagaccctgaatttcgacctgctgaagctggctggcgacgtggaatccaacccaggcccttctagaggccatatggctctgcctgtgacagctctgctgctgcctctggcactgctgcttcatgctgctagacctagccagtttagagtgtcccctctggacagaacctggaacctgggcgagacagtggaactgaagtgccaggtgctgctgagcaaccctacaagcggctgctcctggctgtttcagcctagaggtgcagccgcctctcctacctttctgctgtacctgagccagaacaagcccaaggccgccgaaggactggacacccagagattcagcggcaagagactgggcgacaccttcgtgctgaccctgagcgacttcagaagagagaacgagggctactacttctgtagcgccctgagcaacagcatcatgtacttcagccacttcgtgcccgtgtttctgcccgccaagcctacaacaacccctgctcctagacctcctacaccagctcctacaatcgccagccagcctctgtctctcagacccgaagcctgtagacctgctgctggcggagctgtgcataccagaggactggatttcgcctgcgacatctacatctgggctcctctggctggcacatgtggcgtgctgctgctgtccctggtcatcaccctgtactgcaaccaccggaacaggcggagagtgtgcaagtgccctagacctgtggtcaagagcggcgacaagcctagcctgagcgccagatatgtt

SEQ ID NO: 2684 - DNA, 3264 bp, synthetic construct
  source 1..3264: mol_type = other DNA
atggccttaccagtgaccgccttgctcctgccgctggccttgctgctccacgccgccaggccggaattcgacgtgacccagacacctcggaacagaatcaccaagaccggcaagcggatcatgctggaatgcagccagaccaagggccacgaccggatgtactggtacagacaggaccctggcctgggcctgagactgatctactacagcttcgacgtgaaggacatcaacaagggcgagatcagcgacggctacagcgtgtcaagacaggctcaggccaagttcagcctgtctctggaaagcgccattcctaaccagacagccctgtacttctgtgccacaagcggccagggcgcttacgaggaacagttctttggccctggcaccagactgacagttctcgagggacagcctaaggccaatcctaccgtgacactgttccctccaagcagcgaagaactccaggccaacaaggccacacttgtgtgcctgatctccgacttctaccctggggctgtgacagtggcttggaaggccgatggatctcctgtgaaagccggcgtggaaaccaccaagccatccaagcagagcaacaacaaatacgccgccagctcctacctgagcctgacacctgagcagtggaagtcccacagatcctacagctgccaagtgacccacgaaggcagcaccgtggaaaagacagtggcccctacagagtgcagcggatcccagagcttcggcctgctggaccccaagctgtgctacctgctggatggcatcctgttcatctacggcgtgatcctgaccgccctgttcctgagagtgaagttcagcagaagcgccgacgcccctgcctaccagcagggacagaaccaactgtacaacgagctgaacctgggcagacgggaagagtacgacgtgctggacaagcggagaggcagggaccctgagatgggcggaaagccccagcggagaaagaacccccaggaaggactgtataacgaactccagaaagacaagatggccgaagcctacagcgagatcggcatgaagggcgagcggagaagaggcaagggccacgatggcctgtaccagggcctgagcaccgccaccaaggacacctatgacgccctgcacatgcaggccctgcctccaagaagggccaagcgatctggatctggagcaacaaacttctcactactcaaacaagcaggtgacgtggaggagaatcccgggcctactagtatggactggatttggcgcatccttttccttgtcggcgctgctaccggcgcgcattccttcgaaaagaaccaggtggaacagagccctcagagcctgattatcctggaaggcaagaactgcaccctccagtgcaactacaccgtgtctcccttcagcaacctgcggtggtacaagcaggatacaggcagaggccctgtgtctctgaccatcctgaccttcagcgagaacaccaagagcaacggcagatacaccgccacactggacgccgatacaaagcagagcagcctgcacatcacagccagccagctgagcgatagcgccagctacatctgtgtggtgtctggcggcacagacagctggggcaaactccagtttggagctggcacacaggtggtggtcacccctgatacgcgtgcgtctcccacttctccgaaagttttccccctttccctctgtagcacacaacctgatggaaatgtggtcatcgcatgtctggtacaaggattctttccacaagagccattgagcgttacatggtcagagagcgggcagggagttaccgctaggaatttcccaccctcacaggatgcgagtggtgatctttataccacatcatcacaactcacgttgccagccactcagtgcctcgctggaaagtcagtaacatgccatgtcaaacattacactaatccctcacaagatgttaccgtgccttgcccagtaccttctacgccgcccaccccgtctccatctactccacccacgccatcacctagtggtacccagagttttgggttgttggaccctaaattgtgctatctgttggacggaatcctgttcatttacggagtgatcctgaccgcattgttcctgcgggttaagttttccagatccgcagacgcacccgcttaccaacaagggcagaaccaactctacaatgaacttaatttggggcggagggaagagtacgacgttctggacaaaaggaggggacgagatcccgagatgggcggaaagcctcagcgaaggaagaatccgcaagaggggctttataacgaactccagaaagataaaatggcagaagcctatagtgagattgggatgaagggagaaaggaggaggggtaaaggtcacgatgggttgtaccaaggattgagcacagccactaaagatacctatgatgcgctccacatgcaggccctgccgccaagacgcgccaagagaagcggatctggcgtgaagcagaccctgaatttcgacctgctgaagctggctggcgacgtggaatccaacccaggcccttctagaggccatatggctctgcctgtgacagctctgctgctgcctctggcactgctgcttcatgctgctagacctagccagtttagagtgtcccctctggacagaacctggaacctgggcgagacagtggaactgaagtgccaggtgctgctgagcaaccctacaagcggctgctcctggctgtttcagcctagaggtgcagccgcctctcctacctttctgctgtacctgagccagaacaagcccaaggccgccgaaggactggacacccagagattcagcggcaagagactgggcgacaccttcgtgctgaccctgagcgacttcagaagagagaacgagggctactacttctgtagcgccctgagcaacagcatcatgtacttcagccacttcgtgcccgtgtttctgcccgccaagcctacaacaacccctgctcctagacctcctacaccagctcctacaatcgccagccagcctctgtctctcagacccgaagcctgtagacctgctgctggcggagctgtgcataccagaggactggatttcgcctgcgacatctacatctgggctcctctggctggcacatgtggcgtgctgctgctgtccctggtcatcaccctgtactgcaaccaccggaacaggcggagagtgtgcaagtgccctagacctgtggtcaagagcggcgacaagcctagcctgagcgccagatatgtt

SEQ ID NO: 2685 - DNA, 3207 bp, synthetic construct
  source 1..3207: mol_type = other DNA
atggccttaccagtgaccgccttgctcctgccgctggccttgctgctccacgccgccaggccggaattcgacgtgacccagacacctcggaacagaatcaccaagaccggcaagcggatcatgctggaatgcagccagaccaagggccacgaccggatgtactggtacagacaggaccctggcctgggcctgagactgatctactacagcttcgacgtgaaggacatcaacaagggcgagatcagcgacggctacagcgtgtcaagacaggctcaggccaagttcagcctgtctctggaaagcgccattcctaaccagacagccctgtacttctgtgccacaagcggccagggcgcttacgaggaacagttctttggccctggcaccagactgacagttctcgagggacagcctaaggccaatcctaccgtgacactgttccctccaagcagcgaagaactccaggccaacaaggccacacttgtgtgcctgatctccgacttctaccctggggctgtgacagtggcttggaaggccgatggatctcctgtgaaagccggcgtggaaaccaccaagccatccaagcagagcaacaacaaatacgccgccagctcctacctgagcctgacacctgagcagtggaagtcccacagatcctacagctgccaagtgacccacgaaggcagcaccgtggaaaagacagtggcccctacagagtgcagcggatcccagagcttcggcctgctggaccccaagctgtgctacctgctggatggcatcctgttcatctacggcgtgatcctgaccgccctgttcctgagagtgaagttcagcagaagcgccgacgcccctgcctaccagcagggacagaaccaactgtacaacgagctgaacctgggcagacgggaagagtacgacgtgctggacaagcggagaggcagggaccctgagatgggcggaaagccccagcggagaaagaacccccaggaaggactgtataacgaactccagaaagacaagatggccgaagcctacagcgagatcggcatgaagggcgagcggagaagaggcaagggccacgatggcctgtaccagggcctgagcaccgccaccaaggacacctatgacgccctgcacatgcaggccctgcctccaagaagggccaagcgatctggatctggagcaacaaacttctcactactcaaacaagcaggtgacgtggaggagaatcccgggcctactagtatggactggatttggcgcatccttttccttgtcggcgctgctaccggcgcgcattccttcgaaaagaaccaggtggaacagagccctcagagcctgattatcctggaaggcaagaactgcaccctccagtgcaactacaccgtgtctcccttcagcaacctgcggtggtacaagcaggatacaggcagaggccctgtgtctctgaccatcctgaccttcagcgagaacaccaagagcaacggcagatacaccgccacactggacgccgatacaaagcagagcagcctgcacatcacagccagccagctgagcgatagcgccagctacatctgtgtggtgtctggcggcacagacagctggggcaaactccagtttggagctggcacacaggtggtggtcacccctgatacgcgtgcctccacgaagggaccatctgttttccctcttgccccctgctcacggtcaacgtctgaatccacggcagccctgggctgcctcgttaaggactactttccagagccggtaacagtctcctggaacagtggagcccttacatcaggtgttcacactttccctgccgtcttgcaaagtagcggactgtacagccttagttccgttgttacggttccttctagcaacttcggtacacagacatatacttgtaacgtagatcataagcctagcaacaccaaggtggacaaaaccgtagagagaaagtgtggtacccagagttttgggttgttggaccctaaattgtgctatctgttggacggaatcctgttcatttacggagtgatcctgaccgcattgttcctgcgggttaagttttccagatccgcagacgcacccgcttaccaacaagggcagaaccaactctacaatgaacttaatttggggcggagggaagagtacgacgttctggacaaaaggaggggacgagatcccgagatgggcggaaagcctcagcgaaggaagaatccgcaagaggggctttataacgaactccagaaagataaaatggcagaagcctatagtgagattgggatgaagggagaaaggaggaggggtaaaggtcacgatgggttgtaccaaggattgagcacagccactaaagatacctatgatgcgctccacatgcaggccctgccgccaagacgcgccaagagaagcggatctggcgtgaagcagaccctgaatttcgacctgctgaagctggctggcgacgtggaatccaacccaggcccttctagaggccatatggctctgcctgtgacagctctgctgctgcctctggcactgctgcttcatgctgctagacctagccagtttagagtgtcccctctggacagaacctggaacctgggcgagacagtggaactgaagtgccaggtgctgctgagcaaccctacaagcggctgctcctggctgtttcagcctagaggtgcagccgcctctcctacctttctgctgtacctgagccagaacaagcccaaggccgccgaaggactggacacccagagattcagcggcaagagactgggcgacaccttcgtgctgaccctgagcgacttcagaagagagaacgagggctactacttctgtagcgccctgagcaacagcatcatgtacttcagccacttcgtgcccgtgtttctgcccgccaagcctacaacaacccctgctcctagacctcctacaccagctcctacaatcgccagccagcctctgtctctcagacccgaagcctgtagacctgctgctggcggagctgtgcataccagaggactggatttcgcctgcgacatctacatctgggctcctctggctggcacatgtggcgtgctgctgctgtccctggtcatcaccctgtactgcaaccaccggaacaggcggagagtgtgcaagtgccctagacctgtggtcaagagcggcgacaagcctagcctgagcgccagatatgtt

SEQ ID NO: 2686 - DNA, 3372 bp, synthetic construct
  source 1..3372: mol_type = other DNA
atggccttaccagtgaccgccttgctcctgccgctggccttgctgctccacgccgccaggccggacgtgacccagacacctcggaacagaatcaccaagaccggcaagcggatcatgctggaatgcagccagaccaagggccacgaccggatgtactggtacagacaggaccctggcctgggcctgagactgatctactacagcttcgacgtgaaggacatcaacaagggcgagatcagcgacggctacagcgtgtcaagacaggctcaggccaagttcagcctgtctctggaaagcgccattcctaaccagacagccctgtacttctgtgccacaagcggccagggcgcttacgaggaacagttctttggccctggcaccagactgacagttctcgagggacagcctaaggccaatcctaccgtgacactgttccctccaagcagcgaagaactccaggccaacaaggccacacttgtgtgcctgatctccgacttctaccctggggctgtgacagtggcttggaaggccgatggatctcctgtgaaagccggcgtggaaaccaccaagccatccaagcagagcaacaacaaatacgccgccagctcctacctgagcctgacacctgagcagtggaagtcccacagatcctacagctgccaagtgacccacgaaggcagcaccgtggaaaagacagtggcccctacagagtgcagcggatcccagagcttcggcctgctggaccccaagctgtgctacctgctggatggcatcctgttcatctacggcgtgatcctgaccgccctgttcctgagagtgaagttcagcagaagcgccgacgcccctgcctaccagcagggacagaaccaactgtacaacgagctgaacctgggcagacgggaagagtacgacgtgctggacaagcggagaggcagggaccctgagatgggcggaaagccccagcggagaaagaacccccaggaaggactgtataacgaactccagaaagacaagatggccgaagcctacagcgagatcggcatgaagggcgagcggagaagaggcaagggccacgatggcctgtaccagggcctgagcaccgccaccaaggacacctatgacgccctgcacatgcaggccctgcctccaagaagggccaagcgatctggatctggagcaacaaacttctcactactcaaacaagcaggtgacgtggaggagaatcccgggcctactagtatggactggatttggcgcatccttttccttgtcggcgctgctaccggcgcgcattccttcgaaaagaaccaggtggaacagagccctcagagcctgattatcctggaaggcaagaactgcaccctccagtgcaactacaccgtgtctcccttcagcaacctgcggtggtacaagcaggatacaggcagaggccctgtgtctctgaccatcctgaccttcagcgagaacaccaagagcaacggcagatacaccgccacactggacgccgatacaaagcagagcagcctgcacatcacagccagccagctgagcgatagcgccagctacatctgtgtggtgtctggcggcacagacagctggggcaaactccagtttggagctggcacacaggtggtggtcacccctgatacgcgtgctccgacaaaggcgccagacgtttttcctattatttcaggatgtcggcatccgaaagataattccccagttgttctggcgtgtcttatcacgggctaccatcctacatctgttaccgttacgtggtatatgggtacgcaaagccaacctcagcggacttttccagagatccaacggcgagattcatattatatgacatccagtcagttgagtacaccgctgcaacagtggcggcaaggtgagtataagtgtgtggtccaacacacagccagtaaaagtaagaaagagatattccggtggcctgaaagcccgaaggcacaagcatcttctgttccgacggcgcaaccgcaagctgaaggaagtcttgcaaaagcaaccacagcacccgcgacaacacgaaacacaggacgcggaggcgaggaaaagaaaaaagaaaaggaaaaggaagagcaagaggagagggaaactaagacccccggtacccagagttttgggttgttggaccctaaattgtgctatctgttggacggaatcctgttcatttacggagtgatcctgaccgcattgttcctgcgggttaagttttccagatccgcagacgcacccgcttaccaacaagggcagaaccaactctacaatgaacttaatttggggcggagggaagagtacgacgttctggacaaaaggaggggacgagatcccgagatgggcggaaagcctcagcgaaggaagaatccgcaagaggggctttataacgaactccagaaagataaaatggcagaagcctatagtgagattgggatgaagggagaaaggaggaggggtaaaggtcacgatgggttgtaccaaggattgagcacagccactaaagatacctatgatgcgctccacatgcaggccctgccgccaagacgcgccaagagaagcggatctggcgtgaagcagaccctgaatttcgacctgctgaagctggctggcgacgtggaatccaacccaggcccttctagaggccatatggctctgcctgtgacagctctgctgctgcctctggcactgctgcttcatgctgctagacctagccagtttagagtgtcccctctggacagaacctggaacctgggcgagacagtggaactgaagtgccaggtgctgctgagcaaccctacaagcggctgctcctggctgtttcagcctagaggtgcagccgcctctcctacctttctgctgtacctgagccagaacaagcccaaggccgccgaaggactggacacccagagattcagcggcaagagactgggcgacaccttcgtgctgaccctgagcgacttcagaagagagaacgagggctactacttctgtagcgccctgagcaacagcatcatgtacttcagccacttcgtgcccgtgtttctgcccgccaagcctacaacaacccctgctcctagacctcctacaccagctcctacaatcgccagccagcctctgtctctcagacccgaagcctgtagacctgctgctggcggagctgtgcataccagaggactggatttcgcctgcgacatctacatctgggctcctctggctggcacatgtggcgtgctgctgctgtccctggtcatcaccctgtactgcaaccaccggaacaggcggagagtgtgcaagtgccctagacctgtggtcaagagcggcgacaagcctagcctgagcgccagatatgtt

SEQ ID NO: 2687 - DNA, 3198 bp, synthetic construct
  source 1..3198: mol_type = other DNA
atggccttaccagtgaccgccttgctcctgccgctggccttgctgctccacgccgccaggccggacgtgacccagacacctcggaacagaatcaccaagaccggcaagcggatcatgctggaatgcagccagaccaagggccacgaccggatgtactggtacagacaggaccctggcctgggcctgagactgatctactacagcttcgacgtgaaggacatcaacaagggcgagatcagcgacggctacagcgtgtcaagacaggctcaggccaagttcagcctgtctctggaaagcgccattcctaaccagacagccctgtacttctgtgccacaagcggccagggcgcttacgaggaacagttctttggccctggcaccagactgacagttctcgagggacagcctaaggccaatcctaccgtgacactgttccctccaagcagcgaagaactccaggccaacaaggccacacttgtgtgcctgatctccgacttctaccctggggctgtgacagtggcttggaaggccgatggatctcctgtgaaagccggcgtggaaaccaccaagccatccaagcagagcaacaacaaatacgccgccagctcctacctgagcctgacacctgagcagtggaagtcccacagatcctacagctgccaagtgacccacgaaggcagcaccgtggaaaagacagtggcccctacagagtgcagcggatcccagagcttcggcctgctggaccccaagctgtgctacctgctggatggcatcctgttcatctacggcgtgatcctgaccgccctgttcctgagagtgaagttcagcagaagcgccgacgcccctgcctaccagcagggacagaaccaactgtacaacgagctgaacctgggcagacgggaagagtacgacgtgctggacaagcggagaggcagggaccctgagatgggcggaaagccccagcggagaaagaacccccaggaaggactgtataacgaactccagaaagacaagatggccgaagcctacagcgagatcggcatgaagggcgagcggagaagaggcaagggccacgatggcctgtaccagggcctgagcaccgccaccaaggacacctatgacgccctgcacatgcaggccctgcctccaagaagggccaagcgatctggatctggagcaacaaacttctcactactcaaacaagcaggtgacgtggaggagaatcccgggcctactagtatggactggatttggcgcatccttttccttgtcggcgctgctaccggcgcgcattccttcgaaaagaaccaggtggaacagagccctcagagcctgattatcctggaaggcaagaactgcaccctccagtgcaactacaccgtgtctcccttcagcaacctgcggtggtacaagcaggatacaggcagaggccctgtgtctctgaccatcctgaccttcagcgagaacaccaagagcaacggcagatacaccgccacactggacgccgatacaaagcagagcagcctgcacatcacagccagccagctgagcgatagcgccagctacatctgtgtggtgtctggcggcacagacagctggggcaaactccagtttggagctggcacacaggtggtggtcacccctgatacgcgtgcctcaacgaaagggcctagcgtcttccccctggcgccgtgctcacgatccacaagcgaatccaccgccgctctcggatgcctcgtaaaggattatttccctgaaccagtcacggtgtcatggaacagcggtgcccttaccagcggcgtccatacctttcctgctgtgctccagtccagcggactttatagtctcagctctgtcgtgaccgtcccttcctctaattttggcacccagacttacacgtgcaacgtcgatcataagcccagtaacaccaaggtagacaagacggtggaacgaaagggtacccagagttttgggttgttggaccctaaattgtgctatctgttggacggaatcctgttcatttacggagtgatcctgaccgcattgttcctgcgggttaagttttccagatccgcagacgcacccgcttaccaacaagggcagaaccaactctacaatgaacttaatttggggcggagggaagagtacgacgttctggacaaaaggaggggacgagatcccgagatgggcggaaagcctcagcgaaggaagaatccgcaagaggggctttataacgaactccagaaagataaaatggcagaagcctatagtgagattgggatgaagggagaaaggaggaggggtaaaggtcacgatgggttgtaccaaggattgagcacagccactaaagatacctatgatgcgctccacatgcaggccctgccgccaagacgcgccaagagaagcggatctggcgtgaagcagaccctgaatttcgacctgctgaagctggctggcgacgtggaatccaacccaggcccttctagaggccatatggctctgcctgtgacagctctgctgctgcctctggcactgctgcttcatgctgctagacctagccagtttagagtgtcccctctggacagaacctggaacctgggcgagacagtggaactgaagtgccaggtgctgctgagcaaccctacaagcggctgctcctggctgtttcagcctagaggtgcagccgcctctcctacctttctgctgtacctgagccagaacaagcccaaggccgccgaaggactggacacccagagattcagcggcaagagactgggcgacaccttcgtgctgaccctgagcgacttcagaagagagaacgagggctactacttctgtagcgccctgagcaacagcatcatgtacttcagccacttcgtgcccgtgtttctgcccgccaagcctacaacaacccctgctcctagacctcctacaccagctcctacaatcgccagccagcctctgtctctcagacccgaagcctgtagacctgctgctggcggagctgtgcataccagaggactggatttcgcctgcgacatctacatctgggctcctctggctggcacatgtggcgtgctgctgctgtccctggtcatcaccctgtactgcaaccaccggaacaggcggagagtgtgcaagtgccctagacctgtggtcaagagcggcgacaagcctagcctgagcgccagatatgtt

SEQ ID NO: 2688 - DNA, 3219 bp, synthetic construct
  source 1..3219: mol_type = other DNA
atggccttaccagtgaccgccttgctcctgccgctggccttgctgctccacgccgccaggccggacgtgacccagacacctcggaacagaatcaccaagaccggcaagcggatcatgctggaatgcagccagaccaagggccacgaccggatgtactggtacagacaggaccctggcctgggcctgagactgatctactacagcttcgacgtgaaggacatcaacaagggcgagatcagcgacggctacagcgtgtcaagacaggctcaggccaagttcagcctgtctctggaaagcgccattcctaaccagacagccctgtacttctgtgccacaagcggccagggcgcttacgaggaacagttctttggccctggcaccagactgacagttctcgagggacagcctaaggccaatcctaccgtgacactgttccctccaagcagcgaagaactccaggccaacaaggccacacttgtgtgcctgatctccgacttctaccctggggctgtgacagtggcttggaaggccgatggatctcctgtgaaagccggcgtggaaaccaccaagccatccaagcagagcaacaacaaatacgccgccagctcctacctgagcctgacacctgagcagtggaagtcccacagatcctacagctgccaagtgacccacgaaggcagcaccgtggaaaagacagtggcccctacagagtgcagcggatcccagagcttcggcctgctggaccccaagctgtgctacctgctggatggcatcctgttcatctacggcgtgatcctgaccgccctgttcctgagagtgaagttcagcagaagcgccgacgcccctgcctaccagcagggacagaaccaactgtacaacgagctgaacctgggcagacgggaagagtacgacgtgctggacaagcggagaggcagggaccctgagatgggcggaaagccccagcggagaaagaacccccaggaaggactgtataacgaactccagaaagacaagatggccgaagcctacagcgagatcggcatgaagggcgagcggagaagaggcaagggccacgatggcctgtaccagggcctgagcaccgccaccaaggacacctatgacgccctgcacatgcaggccctgcctccaagaagggccaagcgatctggatctggagcaacaaacttctcactactcaaacaagcaggtgacgtggaggagaatcccgggcctactagtatggactggatttggcgcatccttttccttgtcggcgctgctaccggcgcgcattccttcgaaaagaaccaggtggaacagagccctcagagcctgattatcctggaaggcaagaactgcaccctccagtgcaactacaccgtgtctcccttcagcaacctgcggtggtacaagcaggatacaggcagaggccctgtgtctctgaccatcctgaccttcagcgagaacaccaagagcaacggcagatacaccgccacactggacgccgatacaaagcagagcagcctgcacatcacagccagccagctgagcgatagcgccagctacatctgtgtggtgtctggcggcacagacagctggggcaaactccagtttggagctggcacacaggtggtggtcacccctgatacgcgtgcgtcacctacgtccccaaaagtgttcccgctgtcactcgattccactccacaggacggtaacgtggtggttgcctgcctggtacaaggtttctttcctcaagaaccactctctgtgacgtggtctgaaagtggtcagaatgttacagcacggaacttcccaccgagtcaagatgcgagtggggatctctatacgacatccagtcaactcacactgcccgcaacacaatgccccgatggcaaatctgttacctgccatgtgaaacattacaccaatccatcccaggatgtgacagtaccttgtccggttccgccccctcccccgggtacccagagttttgggttgttggaccctaaattgtgctatctgttggacggaatcctgttcatttacggagtgatcctgaccgcattgttcctgcgggttaagttttccagatccgcagacgcacccgcttaccaacaagggcagaaccaactctacaatgaacttaatttggggcggagggaagagtacgacgttctggacaaaaggaggggacgagatcccgagatgggcggaaagcctcagcgaaggaagaatccgcaagaggggctttataacgaactccagaaagataaaatggcagaagcctatagtgagattgggatgaagggagaaaggaggaggggtaaaggtcacgatgggttgtaccaaggattgagcacagccactaaagatacctatgatgcgctccacatgcaggccctgccgccaagacgcgccaagagaagcggatctggcgtgaagcagaccctgaatttcgacctgctgaagctggctggcgacgtggaatccaacccaggcccttctagaggccatatggctctgcctgtgacagctctgctgctgcctctggcactgctgcttcatgctgctagacctagccagtttagagtgtcccctctggacagaacctggaacctgggcgagacagtggaactgaagtgccaggtgctgctgagcaaccctacaagcggctgctcctggctgtttcagcctagaggtgcagccgcctctcctacctttctgctgtacctgagccagaacaagcccaaggccgccgaaggactggacacccagagattcagcggcaagagactgggcgacaccttcgtgctgaccctgagcgacttcagaagagagaacgagggctactacttctgtagcgccctgagcaacagcatcatgtacttcagccacttcgtgcccgtgtttctgcccgccaagcctacaacaacccctgctcctagacctcctacaccagctcctacaatcgccagccagcctctgtctctcagacccgaagcctgtagacctgctgctggcggagctgtgcataccagaggactggatttcgcctgcgacatctacatctgggctcctctggctggcacatgtggcgtgctgctgctgtccctggtcatcaccctgtactgcaaccaccggaacaggcggagagtgtgcaagtgccctagacctgtggtcaagagcggcgacaagcctagcctgagcgccagatatgtt

SEQ ID NO: 2689 - DNA, 3204 bp, synthetic construct
  source 1..3204: mol_type = other DNA
atggccttaccagtgaccgccttgctcctgccgctggccttgctgctccacgccgccaggccggacgtgacccagacacctcggaacagaatcaccaagaccggcaagcggatcatgctggaatgcagccagaccaagggccacgaccggatgtactggtacagacaggaccctggcctgggcctgagactgatctactacagcttcgacgtgaaggacatcaacaagggcgagatcagcgacggctacagcgtgtcaagacaggctcaggccaagttcagcctgtctctggaaagcgccattcctaaccagacagccctgtacttctgtgccacaagcggccagggcgcttacgaggaacagttctttggccctggcaccagactgacagttctcgagggacagcctaaggccaatcctaccgtgacactgttccctccaagcagcgaagaactccaggccaacaaggccacacttgtgtgcctgatctccgacttctaccctggggctgtgacagtggcttggaaggccgatggatctcctgtgaaagccggcgtggaaaccaccaagccatccaagcagagcaacaacaaatacgccgccagctcctacctgagcctgacacctgagcagtggaagtcccacagatcctacagctgccaagtgacccacgaaggcagcaccgtggaaaagacagtggcccctacagagtgcagcggatcccagagcttcggcctgctggaccccaagctgtgctacctgctggatggcatcctgttcatctacggcgtgatcctgaccgccctgttcctgagagtgaagttcagcagaagcgccgacgcccctgcctaccagcagggacagaaccaactgtacaacgagctgaacctgggcagacgggaagagtacgacgtgctggacaagcggagaggcagggaccctgagatgggcggaaagccccagcggagaaagaacccccaggaaggactgtataacgaactccagaaagacaagatggccgaagcctacagcgagatcggcatgaagggcgagcggagaagaggcaagggccacgatggcctgtaccagggcctgagcaccgccaccaaggacacctatgacgccctgcacatgcaggccctgcctccaagaagggccaagcgatctggatctggagcaacaaacttctcactactcaaacaagcaggtgacgtggaggagaatcccgggcctactagtatggactggatttggcgcatccttttccttgtcggcgctgctaccggcgcgcattccttcgaaaagaaccaggtggaacagagccctcagagcctgattatcctggaaggcaagaactgcaccctccagtgcaactacaccgtgtctcccttcagcaacctgcggtggtacaagcaggatacaggcagaggccctgtgtctctgaccatcctgaccttcagcgagaacaccaagagcaacggcagatacaccgccacactggacgccgatacaaagcagagcagcctgcacatcacagccagccagctgagcgatagcgccagctacatctgtgtggtgtctggcggcacagacagctggggcaaactccagtttggagctggcacacaggtggtggtcacccctgatacgcgtgctagtacccagtcaccttctgttttcccgcttactagatgctgcaagaacataccatccaatgccacttctgtcacactgggctgtcttgctacaggttattttcctgagccggtgatggtcacttgggataccggtagcctgaatggaactacaatgacgctgcctgccacgacgctcacattgagtgggcattacgcgacaattagtcttttgacggtaagcggagcttgggctaagcagatgttcacttgcagagtagcgcacactccctctagtactgactgggttgacaacaaaaccttttctggtacccagagttttgggttgttggaccctaaattgtgctatctgttggacggaatcctgttcatttacggagtgatcctgaccgcattgttcctgcgggttaagttttccagatccgcagacgcacccgcttaccaacaagggcagaaccaactctacaatgaacttaatttggggcggagggaagagtacgacgttctggacaaaaggaggggacgagatcccgagatgggcggaaagcctcagcgaaggaagaatccgcaagaggggctttataacgaactccagaaagataaaatggcagaagcctatagtgagattgggatgaagggagaaaggaggaggggtaaaggtcacgatgggttgtaccaaggattgagcacagccactaaagatacctatgatgcgctccacatgcaggccctgccgccaagacgcgccaagagaagcggatctggcgtgaagcagaccctgaatttcgacctgctgaagctggctggcgacgtggaatccaacccaggcccttctagaggccatatggctctgcctgtgacagctctgctgctgcctctggcactgctgcttcatgctgctagacctagccagtttagagtgtcccctctggacagaacctggaacctgggcgagacagtggaactgaagtgccaggtgctgctgagcaaccctacaagcggctgctcctggctgtttcagcctagaggtgcagccgcctctcctacctttctgctgtacctgagccagaacaagcccaaggccgccgaaggactggacacccagagattcagcggcaagagactgggcgacaccttcgtgctgaccctgagcgacttcagaagagagaacgagggctactacttctgtagcgccctgagcaacagcatcatgtacttcagccacttcgtgcccgtgtttctgcccgccaagcctacaacaacccctgctcctagacctcctacaccagctcctacaatcgccagccagcctctgtctctcagacccgaagcctgtagacctgctgctggcggagctgtgcataccagaggactggatttcgcctgcgacatctacatctgggctcctctggctggcacatgtggcgtgctgctgctgtccctggtcatcaccctgtactgcaaccaccggaacaggcggagagtgtgcaagtgccctagacctgtggtcaagagcggcgacaagcctagcctgagcgccagatatgtt

SEQ ID NO: 2690 - DNA, 3204 bp, synthetic construct
  source 1..3204: mol_type = other DNA
atggccttaccagtgaccgccttgctcctgccgctggccttgctgctccacgccgccaggccggacgtgacccagacacctcggaacagaatcaccaagaccggcaagcggatcatgctggaatgcagccagaccaagggccacgaccggatgtactggtacagacaggaccctggcctgggcctgagactgatctactacagcttcgacgtgaaggacatcaacaagggcgagatcagcgacggctacagcgtgtcaagacaggctcaggccaagttcagcctgtctctggaaagcgccattcctaaccagacagccctgtacttctgtgccacaagcggccagggcgcttacgaggaacagttctttggccctggcaccagactgacagttctcgagggacagcctaaggccaatcctaccgtgacactgttccctccaagcagcgaagaactccaggccaacaaggccacacttgtgtgcctgatctccgacttctaccctggggctgtgacagtggcttggaaggccgatggatctcctgtgaaagccggcgtggaaaccaccaagccatccaagcagagcaacaacaaatacgccgccagctcctacctgagcctgacacctgagcagtggaagtcccacagatcctacagctgccaagtgacccacgaaggcagcaccgtggaaaagacagtggcccctacagagtgcagcggatcccagagcttcggcctgctggaccccaagctgtgctacctgctggatggcatcctgttcatctacggcgtgatcctgaccgccctgttcctgagagtgaagttcagcagaagcgccgacgcccctgcctaccagcagggacagaaccaactgtacaacgagctgaacctgggcagacgggaagagtacgacgtgctggacaagcggagaggcagggaccctgagatgggcggaaagccccagcggagaaagaacccccaggaaggactgtataacgaactccagaaagacaagatggccgaagcctacagcgagatcggcatgaagggcgagcggagaagaggcaagggccacgatggcctgtaccagggcctgagcaccgccaccaaggacacctatgacgccctgcacatgcaggccctgcctccaagaagggccaagcgatctggatctggagcaacaaacttctcactactcaaacaagcaggtgacgtggaggagaatcccgggcctactagtatggactggatttggcgcatccttttccttgtcggcgctgctaccggcgcgcattccttcgaaaagaaccaggtggaacagagccctcagagcctgattatcctggaaggcaagaactgcaccctccagtgcaactacaccgtgtctcccttcagcaacctgcggtggtacaagcaggatacaggcagaggccctgtgtctctgaccatcctgaccttcagcgagaacaccaagagcaacggcagatacaccgccacactggacgccgatacaaagcagagcagcctgcacatcacagccagccagctgagcgatagcgccagctacatctgtgtggtgtctggcggcacagacagctggggcaaactccagtttggagctggcacacaggtggtggtcacccctgatacgcgtgcgtccactaagggtccgtcagtcttcccgctggcgccctgttcccgcagcacgagtgaatctaccgccgcccttgggtgcttggtaaaagactattttcctgagcccgttacagtatcatggaacagcggggctctgactagcggggtgcatacgttccctgcggttctgcaatctagcggactgtattctctctccagtgttgtgaccgtgccaagctccagcctcggtactaaaacttatacatgtaatgtggatcataaaccttcaaataccaaggttgacaaaagggtagagagtaagtacggtggtacccagagttttgggttgttggaccctaaattgtgctatctgttggacggaatcctgttcatttacggagtgatcctgaccgcattgttcctgcgggttaagttttccagatccgcagacgcacccgcttaccaacaagggcagaaccaactctacaatgaacttaatttggggcggagggaagagtacgacgttctggacaaaaggaggggacgagatcccgagatgggcggaaagcctcagcgaaggaagaatccgcaagaggggctttataacgaactccagaaagataaaatggcagaagcctatagtgagattgggatgaagggagaaaggaggaggggtaaaggtcacgatgggttgtaccaaggattgagcacagccactaaagatacctatgatgcgctccacatgcaggccctgccgccaagacgcgccaagagaagcggatctggcgtgaagcagaccctgaatttcgacctgctgaagctggctggcgacgtggaatccaacccaggcccttctagaggccatatggctctgcctgtgacagctctgctgctgcctctggcactgctgcttcatgctgctagacctagccagtttagagtgtcccctctggacagaacctggaacctgggcgagacagtggaactgaagtgccaggtgctgctgagcaaccctacaagcggctgctcctggctgtttcagcctagaggtgcagccgcctctcctacctttctgctgtacctgagccagaacaagcccaaggccgccgaaggactggacacccagagattcagcggcaagagactgggcgacaccttcgtgctgaccctgagcgacttcagaagagagaacgagggctactacttctgtagcgccctgagcaacagcatcatgtacttcagccacttcgtgcccgtgtttctgcccgccaagcctacaacaacccctgctcctagacctcctacaccagctcctacaatcgccagccagcctctgtctctcagacccgaagcctgtagacctgctgctggcggagctgtgcataccagaggactggatttcgcctgcgacatctacatctgggctcctctggctggcacatgtggcgtgctgctgctgtccctggtcatcaccctgtactgcaaccaccggaacaggcggagagtgtgcaagtgccctagacctgtggtcaagagcggcgacaagcctagcctgagcgccagatatgtt

SEQ ID NO: 2691 - DNA, 3204 bp, synthetic construct
  source 1..3204: mol_type = other DNA
atggccttaccagtgaccgccttgctcctgccgctggccttgctgctccacgccgccaggccggacgtgacccagacacctcggaacagaatcaccaagaccggcaagcggatcatgctggaatgcagccagaccaagggccacgaccggatgtactggtacagacaggaccctggcctgggcctgagactgatctactacagcttcgacgtgaaggacatcaacaagggcgagatcagcgacggctacagcgtgtcaagacaggctcaggccaagttcagcctgtctctggaaagcgccattcctaaccagacagccctgtacttctgtgccacaagcggccagggcgcttacgaggaacagttctttggccctggcaccagactgacagttctcgagggacagcctaaggccaatcctaccgtgacactgttccctccaagcagcgaagaactccaggccaacaaggccacacttgtgtgcctgatctccgacttctaccctggggctgtgacagtggcttggaaggccgatggatctcctgtgaaagccggcgtggaaaccaccaagccatccaagcagagcaacaacaaatacgccgccagctcctacctgagcctgacacctgagcagtggaagtcccacagatcctacagctgccaagtgacccacgaaggcagcaccgtggaaaagacagtggcccctacagagtgcagcggatcccagagcttcggcctgctggaccccaagctgtgctacctgctggatggcatcctgttcatctacggcgtgatcctgaccgccctgttcctgagagtgaagttcagcagaagcgccgacgcccctgcctaccagcagggacagaaccaactgtacaacgagctgaacctgggcagacgggaagagtacgacgtgctggacaagcggagaggcagggaccctgagatgggcggaaagccccagcggagaaagaacccccaggaaggactgtataacgaactccagaaagacaagatggccgaagcctacagcgagatcggcatgaagggcgagcggagaagaggcaagggccacgatggcctgtaccagggcctgagcaccgccaccaaggacacctatgacgccctgcacatgcaggccctgcctccaagaagggccaagcgatctggatctggagcaacaaacttctcactactcaaacaagcaggtgacgtggaggagaatcccgggcctactagtatggactggatttggcgcatccttttccttgtcggcgctgctaccggcgcgcattccttcgaaaagaaccaggtggaacagagccctcagagcctgattatcctggaaggcaagaactgcaccctccagtgcaactacaccgtgtctcccttcagcaacctgcggtggtacaagcaggatacaggcagaggccctgtgtctctgaccatcctgaccttcagcgagaacaccaagagcaacggcagatacaccgccacactggacgccgatacaaagcagagcagcctgcacatcacagccagccagctgagcgatagcgccagctacatctgtgtggtgtctggcggcacagacagctggggcaaactccagtttggagctggcacacaggtggtggtcacccctgatacgcgtgcaagtacaaagggacccagtgttttcccgctcgccccctgttcacgatcaacgagtgagtccactgcggctctcggatgcctcgtcaaagactacttccccgagccggtgactgttagttggaactctggggctcttacttcaggcgtacacacattccccgccgtgcttcagtcaagtgggctctactcacttagcagtgtggtaacggttccctctagcaactttggcacccaaacatatacttgcaacgtcgatcacaagccgtcaaataccaaagttgacaagaccgttgaaaggaaatgttgtggtacccagagttttgggttgttggaccctaaattgtgctatctgttggacggaatcctgttcatttacggagtgatcctgaccgcattgttcctgcgggttaagttttccagatccgcagacgcacccgcttaccaacaagggcagaaccaactctacaatgaacttaatttggggcggagggaagagtacgacgttctggacaaaaggaggggacgagatcccgagatgggcggaaagcctcagcgaaggaagaatccgcaagaggggctttataacgaactccagaaagataaaatggcagaagcctatagtgagattgggatgaagggagaaaggaggaggggtaaaggtcacgatgggttgtaccaaggattgagcacagccactaaagatacctatgatgcgctccacatgcaggccctgccgccaagacgcgccaagagaagcggatctggcgtgaagcagaccctgaatttcgacctgctgaagctggctggcgacgtggaatccaacccaggcccttctagaggccatatggctctgcctgtgacagctctgctgctgcctctggcactgctgcttcatgctgctagacctagccagtttagagtgtcccctctggacagaacctggaacctgggcgagacagtggaactgaagtgccaggtgctgctgagcaaccctacaagcggctgctcctggctgtttcagcctagaggtgcagccgcctctcctacctttctgctgtacctgagccagaacaagcccaaggccgccgaaggactggacacccagagattcagcggcaagagactgggcgacaccttcgtgctgaccctgagcgacttcagaagagagaacgagggctactacttctgtagcgccctgagcaacagcatcatgtacttcagccacttcgtgcccgtgtttctgcccgccaagcctacaacaacccctgctcctagacctcctacaccagctcctacaatcgccagccagcctctgtctctcagacccgaagcctgtagacctgctgctggcggagctgtgcataccagaggactggatttcgcctgcgacatctacatctgggctcctctggctggcacatgtggcgtgctgctgctgtccctggtcatcaccctgtactgcaaccaccggaacaggcggagagtgtgcaagtgccctagacctgtggtcaagagcggcgacaagcctagcctgagcgccagatatgtt

SEQ ID NO: 2692 - DNA, 3249 bp, synthetic construct
  source 1..3249: mol_type = other DNA
atggccttaccagtgaccgccttgctcctgccgctggccttgctgctccacgccgccaggccggacgtgacccagacacctcggaacagaatcaccaagaccggcaagcggatcatgctggaatgcagccagaccaagggccacgaccggatgtactggtacagacaggaccctggcctgggcctgagactgatctactacagcttcgacgtgaaggacatcaacaagggcgagatcagcgacggctacagcgtgtcaagacaggctcaggccaagttcagcctgtctctggaaagcgccattcctaaccagacagccctgtacttctgtgccacaagcggccagggcgcttacgaggaacagttctttggccctggcaccagactgacagttctcgaggacctgaagaacgtgttcccacctgaggtggccgtgttcgagcctagcgaggccgagatcagccacacccagaaagccaccctcgtgtgcctggctaccggcttctaccccgaccatgtggaactgtcttggtgggtcaacggcaaagaggtgcacagcggcgtgtctaccgacccccagccactgaaagaacagcccgccctgaacgacagccggtactgcctgagcagcagactgagagtgtccgccaccttctggcagaacccccggaaccacttcagatgccaggtgcagttctacggcctgagcgagaacgacgagtggacccaggacagagccaagcccgtgacccagatcgtgtctgccgaagcctggggcagagccgattgcggatcccagagcttcggcctgctggaccccaagctgtgctacctgctggatggcatcctgttcatctacggcgtgatcctgaccgccctgttcctgagagtgaagttcagcagaagcgccgacgcccctgcctaccagcagggacagaaccaactgtacaacgagctgaacctgggcagacgggaagagtacgacgtgctggacaagcggagaggcagggaccctgagatgggcggaaagccccagcggagaaagaacccccaggaaggactgtataacgaactccagaaagacaagatggccgaagcctacagcgagatcggcatgaagggcgagcggagaagaggcaagggccacgatggcctgtaccagggcctgagcaccgccaccaaggacacctatgacgccctgcacatgcaggccctgcctccaagaagggccaagcgatctggatctggagcaacaaacttctcactactcaaacaagcaggtgacgtggaggagaatcccgggcctactagtatggactggatttggcgcatccttttccttgtcggcgctgctaccggcgcgcattccttcgaaaagaaccaggtggaacagagccctcagagcctgattatcctggaaggcaagaactgcaccctccagtgcaactacaccgtgtctcccttcagcaacctgcggtggtacaagcaggatacaggcagaggccctgtgtctctgaccatcctgaccttcagcgagaacaccaagagcaacggcagatacaccgccacactggacgccgatacaaagcagagcagcctgcacatcacagccagccagctgagcgatagcgccagctacatctgtgtggtgtctggcggcacagacagctggggcaaactccagtttggagctggcacacaggtggtggtcacccctgatacgcgtatccagaaccctgatcctgccgtgtaccagctgcgggatagcaagagcagcgacaagagcgtgtgtctgttcaccgacttcgacagccagaccaacgtgtcccagagcaaggactccgacgtgtacatcaccgataagaccgtgctggacatgcggagcatggacttcaagagcaactccgccgtggcctggtccaacaagtccgatttcgcctgcgccaacgccttcaacaacagcattatccccgaggacacattcttcccaagccccgagagcagctgcggtacccagagttttgggttgttggaccctaaattgtgctatctgttggacggaatcctgttcatttacggagtgatcctgaccgcattgttcctgcgggttaagttttccagatccgcagacgcacccgcttaccaacaagggcagaaccaactctacaatgaacttaatttggggcggagggaagagtacgacgttctggacaaaaggaggggacgagatcccgagatgggcggaaagcctcagcgaaggaagaatccgcaagaggggctttataacgaactccagaaagataaaatggcagaagcctatagtgagattgggatgaagggagaaaggaggaggggtaaaggtcacgatgggttgtaccaaggattgagcacagccactaaagatacctatgatgcgctccacatgcaggccctgccgccaagacgcgccaagagaagcggatctggcgtgaagcagaccctgaatttcgacctgctgaagctggctggcgacgtggaatccaacccaggcccttctagaggccatatggctctgcctgtgacagctctgctgctgcctctggcactgctgcttcatgctgctagacctagccagtttagagtgtcccctctggacagaacctggaacctgggcgagacagtggaactgaagtgccaggtgctgctgagcaaccctacaagcggctgctcctggctgtttcagcctagaggtgcagccgcctctcctacctttctgctgtacctgagccagaacaagcccaaggccgccgaaggactggacacccagagattcagcggcaagagactgggcgacaccttcgtgctgaccctgagcgacttcagaagagagaacgagggctactacttctgtagcgccctgagcaacagcatcatgtacttcagccacttcgtgcccgtgtttctgcccgccaagcctacaacaacccctgctcctagacctcctacaccagctcctacaatcgccagccagcctctgtctctcagacccgaagcctgtagacctgctgctggcggagctgtgcataccagaggactggatttcgcctgcgacatctacatctgggctcctctggctggcacatgtggcgtgctgctgctgtccctggtcatcaccctgtactgcaaccaccggaacaggcggagagtgtgcaagtgccctagacctgtggtcaagagcggcgacaagcctagcctgagcgccagatatgtt

SEQ ID NO: 2693 - DNA, 3249 bp, synthetic construct
  source 1..3249: mol_type = other DNA
atggccttaccagtgaccgccttgctcctgccgctggccttgctgctccacgccgccaggccggacgtgacccagacacctcggaacagaatcaccaagaccggcaagcggatcatgctggaatgcagccagaccaagggccacgaccggatgtactggtacagacaggaccctggcctgggcctgagactgatctactacagcttcgacgtgaaggacatcaacaagggcgagatcagcgacggctacagcgtgtcaagacaggctcaggccaagttcagcctgtctctggaaagcgccattcctaaccagacagccctgtacttctgtgccacaagcggccagggcgcttacgaggaacagttctttggccctggcaccagactgacagttctcgaggacctgaagaacgtgttcccacctgaggtggccgtgttcgagcctagcaaggccgagatcgcccacacccagaaagccaccctcgtgtgcctggctaccggcttctaccccgaccatgtggaactgtcttggtgggtcaacggcaaagaggtgcacagcggcgtgtgtaccgacccccagccactgaaagaacagcccgccctgaacgacagccggtactgcctgagcagcagactgagagtgtccgccaccttctggcagaacccccggaaccacttcagatgccaggtgcagttctacggcctgagcgagaacgacgagtggacccaggacagagccaagcccgtgacccagatcgtgtctgccgaagcctggggcagagccgattgcggatcccagagcttcggcctgctggaccccaagctgtgctacctgctggatggcatcctgttcatctacggcgtgatcctgaccgccctgttcctgagagtgaagttcagcagaagcgccgacgcccctgcctaccagcagggacagaaccaactgtacaacgagctgaacctgggcagacgggaagagtacgacgtgctggacaagcggagaggcagggaccctgagatgggcggaaagccccagcggagaaagaacccccaggaaggactgtataacgaactccagaaagacaagatggccgaagcctacagcgagatcggcatgaagggcgagcggagaagaggcaagggccacgatggcctgtaccagggcctgagcaccgccaccaaggacacctatgacgccctgcacatgcaggccctgcctccaagaagggccaagcgatctggatctggagcaacaaacttctcactactcaaacaagcaggtgacgtggaggagaatcccgggcctactagtatggactggatttggcgcatccttttccttgtcggcgctgctaccggcgcgcattccttcgaaaagaaccaggtggaacagagccctcagagcctgattatcctggaaggcaagaactgcaccctccagtgcaactacaccgtgtctcccttcagcaacctgcggtggtacaagcaggatacaggcagaggccctgtgtctctgaccatcctgaccttcagcgagaacaccaagagcaacggcagatacaccgccacactggacgccgatacaaagcagagcagcctgcacatcacagccagccagctgagcgatagcgccagctacatctgtgtggtgtctggcggcacagacagctggggcaaactccagtttggagctggcacacaggtggtggtcacccctgatacgcgtatccagaaccctgatcctgccgtgtaccagctgcgggatagcaagagcagcgacaagagcgtgtgtctgttcaccgacttcgacagccagaccaacgtgtcccagagcaaggactccgacgtgtacatcaccgataagtgcgtgctggacatgcggagcatggacttcaagagcaactccgccgtggcctggtccaacaagtccgatttcgcctgcgccaacgccttcaacaacagcattatccccgaggacacattcttcccaagcagcgacgtgccctgcggtacccagagttttgggttgttggaccctaaattgtgctatctgttggacggaatcctgttcatttacggagtgatcctgaccgcattgttcctgcgggttaagttttccagatccgcagacgcacccgcttaccaacaagggcagaaccaactctacaatgaacttaatttggggcggagggaagagtacgacgttctggacaaaaggaggggacgagatcccgagatgggcggaaagcctcagcgaaggaagaatccgcaagaggggctttataacgaactccagaaagataaaatggcagaagcctatagtgagattgggatgaagggagaaaggaggaggggtaaaggtcacgatgggttgtaccaaggattgagcacagccactaaagatacctatgatgcgctccacatgcaggccctgccgccaagacgcgccaagagaagcggatctggcgtgaagcagaccctgaatttcgacctgctgaagctggctggcgacgtggaatccaacccaggcccttctagaggccatatggctctgcctgtgacagctctgctgctgcctctggcactgctgcttcatgctgctagacctagccagtttagagtgtcccctctggacagaacctggaacctgggcgagacagtggaactgaagtgccaggtgctgctgagcaaccctacaagcggctgctcctggctgtttcagcctagaggtgcagccgcctctcctacctttctgctgtacctgagccagaacaagcccaaggccgccgaaggactggacacccagagattcagcggcaagagactgggcgacaccttcgtgctgaccctgagcgacttcagaagagagaacgagggctactacttctgtagcgccctgagcaacagcatcatgtacttcagccacttcgtgcccgtgtttctgcccgccaagcctacaacaacccctgctcctagacctcctacaccagctcctacaatcgccagccagcctctgtctctcagacccgaagcctgtagacctgctgctggcggagctgtgcataccagaggactggatttcgcctgcgacatctacatctgggctcctctggctggcacatgtggcgtgctgctgctgtccctggtcatcaccctgtactgcaaccaccggaacaggcggagagtgtgcaagtgccctagacctgtggtcaagagcggcgacaagcctagcctgagcgccagatatgtt

SEQ ID NO: 2694 - DNA, 2442 bp, synthetic construct
  source 1..2442: mol_type = other DNA
atggccttaccagtgaccgccttgctcctgccgctggccttgctgctccacgccgccaggccggacgtgacccagacacctcggaacagaatcaccaagaccggcaagcggatcatgctggaatgcagccagaccaagggccacgaccggatgtactggtacagacaggaccctggcctgggcctgagactgatctactacagcttcgacgtgaaggacatcaacaagggcgagatcagcgacggctacagcgtgtcaagacaggctcaggccaagttcagcctgtctctggaaagcgccattcctaaccagacagccctgtacttctgtgccacaagcggccagggcgcttacgaggaacagttctttggccctggcaccagactgacagttctcgaggacctgaagaacgtgttcccacctgaggtggccgtgttcgagcctagcgaggccgagatcagccacacccagaaagccaccctcgtgtgcctggctaccggcttctaccccgaccatgtggaactgtcttggtgggtcaacggcaaagaggtgcacagcggcgtgtgtaccgacccccagccactgaaagaacagcccgccctgaacgacagccggtactgcctgagcagcagactgagagtgtccgccaccttctggcagaacccccggaaccacttcagatgccaggtgcagttctacggcctgagcgagaacgacgagtggacccaggacagagccaagcccgtgacccagatcgtgtctgccgaagcctggggcagagccgattgcggatcccagagcttcggcctgctggaccccaagctgtgctacctgctggatggcatcctgttcatctacggcgtgatcctgaccgccctgttcctgagagtgaagttcagcagaagcgccgacgcccctgcctaccagcagggacagaaccaactgtacaacgagctgaacctgggcagacgggaagagtacgacgtgctggacaagcggagaggcagggaccctgagatgggcggaaagccccagcggagaaagaacccccaggaaggactgtataacgaactccagaaagacaagatggccgaagcctacagcgagatcggcatgaagggcgagcggagaagaggcaagggccacgatggcctgtaccagggcctgagcaccgccaccaaggacacctatgacgccctgcacatgcaggccctgcctccaagaagggccaagcgatctggatctggagcaacaaacttctcactactcaaacaagcaggtgacgtggaggagaatcccgggcctactagtatggactggatttggcgcatccttttccttgtcggcgctgctaccggcgcgcattccttcgaaaagaaccaggtggaacagagccctcagagcctgattatcctggaaggcaagaactgcaccctccagtgcaactacaccgtgtctcccttcagcaacctgcggtggtacaagcaggatacaggcagaggccctgtgtctctgaccatcctgaccttcagcgagaacaccaagagcaacggcagatacaccgccacactggacgccgatacaaagcagagcagcctgcacatcacagccagccagctgagcgatagcgccagctacatctgtgtggtgtctggcggcacagacagctggggcaaactccagtttggagctggcacacaggtggtggtcacccctgatacgcgtatccagaaccctgatcctgccgtgtaccagctgcgggatagcaagagcagcgacaagagcgtgtgtctgttcaccgacttcgacagccagaccaacgtgtcccagagcaaggactccgacgtgtacatcaccgataagtgcgtgctggacatgcggagcatggacttcaagagcaactccgccgtggcctggtccaacaagtccgatttcgcctgcgccaacgccttcaacaacagcattatccccgaggacacattcttcccaagccccgagagcagctgcggtacccagagttttgggttgttggaccctaaattgtgctatctgttggacggaatcctgttcatttacggagtgatcctgaccgcattgttcctgcgggttaagttttccagatccgcagacgcacccgcttaccaacaagggcagaaccaactctacaatgaacttaatttggggcggagggaagagtacgacgttctggacaaaaggaggggacgagatcccgagatgggcggaaagcctcagcgaaggaagaatccgcaagaggggctttataacgaactccagaaagataaaatggcagaagcctatagtgagattgggatgaagggagaaaggaggaggggtaaaggtcacgatgggttgtaccaaggattgagcacagccactaaagatacctatgatgcgctccacatgcaggccctgccgccaaga

SEQ ID NO: 2695 - DNA, 2565 bp, synthetic construct
  source 1..2565: mol_type = other DNA
atggccttaccagtgaccgccttgctcctgccgctggccttgctgctccacgccgccaggccggacgtgacccagacacctcggaacagaatcaccaagaccggcaagcggatcatgctggaatgcagccagaccaagggccacgaccggatgtactggtacagacaggaccctggcctgggcctgagactgatctactacagcttcgacgtgaaggacatcaacaagggcgagatcagcgacggctacagcgtgtcaagacaggctcaggccaagttcagcctgtctctggaaagcgccattcctaaccagacagccctgtacttctgtgccacaagcggccagggcgcttacgaggaacagttctttggccctggcaccagactgacagttctcgagcagagcttcggcctgctggaccccaagctgtgctacctgctggatggcatcctgttcatctacggcgtgatcctgaccgccctgttcctgagagtgaagttcagcagaagcgccgacgcccctgcctaccagcagggacagaaccaactgtacaacgagctgaacctgggcagacgggaagagtacgacgtgctggacaagcggagaggcagggaccctgagatgggcggaaagccccagcggagaaagaacccccaggaaggactgtataacgaactccagaaagacaagatggccgaagcctacagcgagatcggcatgaagggcgagcggagaagaggcaagggccacgatggcctgtaccagggcctgagcaccgccaccaaggacacctatgacgccctgcacatgcaggccctgcctccaagaagggccaagcgatctggatctggagcaacaaacttctcactactcaaacaagcaggtgacgtggaggagaatcccgggcctactagtatggactggatttggcgcatccttttccttgtcggcgctgctaccggcgcgcattccttcgaaaagaaccaggtggaacagagccctcagagcctgattatcctggaaggcaagaactgcaccctccagtgcaactacaccgtgtctcccttcagcaacctgcggtggtacaagcaggatacaggcagaggccctgtgtctctgaccatcctgaccttcagcgagaacaccaagagcaacggcagatacaccgccacactggacgccgatacaaagcagagcagcctgcacatcacagccagccagctgagcgatagcgccagctacatctgtgtggtgtctggcggcacagacagctggggcaaactccagtttggagctggcacacaggtggtggtcacccctgatacgcgtcagagttttgggttgttggaccctaaattgtgctatctgttggacggaatcctgttcatttacggagtgatcctgaccgcattgttcctgcgggttaagttttccagatccgcagacgcacccgcttaccaacaagggcagaaccaactctacaatgaacttaatttggggcggagggaagagtacgacgttctggacaaaaggaggggacgagatcccgagatgggcggaaagcctcagcgaaggaagaatccgcaagaggggctttataacgaactccagaaagataaaatggcagaagcctatagtgagattgggatgaagggagaaaggaggaggggtaaaggtcacgatgggttgtaccaaggattgagcacagccactaaagatacctatgatgcgctccacatgcaggccctgccgccaagacgcgccaagagaagcggatctggcgtgaagcagaccctgaatttcgacctgctgaagctggctggcgacgtggaatccaacccaggcccttctagaggccatatggctctgcctgtgacagctctgctgctgcctctggcactgctgcttcatgctgctagacctagccagtttagagtgtcccctctggacagaacctggaacctgggcgagacagtggaactgaagtgccaggtgctgctgagcaaccctacaagcggctgctcctggctgtttcagcctagaggtgcagccgcctctcctacctttctgctgtacctgagccagaacaagcccaaggccgccgaaggactggacacccagagattcagcggcaagagactgggcgacaccttcgtgctgaccctgagcgacttcagaagagagaacgagggctactacttctgtagcgccctgagcaacagcatcatgtacttcagccacttcgtgcccgtgtttctgcccgccaagcctacaacaacccctgctcctagacctcctacaccagctcctacaatcgccagccagcctctgtctctcagacccgaagcctgtagacctgctgctggcggagctgtgcataccagaggactggatttcgcctgcgacatctacatctgggctcctctggctggcacatgtggcgtgctgctgctgtccctggtcatcaccctgtactgcaaccaccggaacaggcggagagtgtgcaagtgccctagacctgtggtcaagagcggcgacaagcctagcctgagcgccagatatgtt

SEQ ID NO: 2696 - DNA, 2565 bp, synthetic construct
  source 1..2565: mol_type = other DNA
atggccttaccagtgaccgccttgctcctgccgctggccttgctgctccacgccgccaggccggacgtgacccagacacctcggaacagaatcaccaagaccggcaagcggatcatgctggaatgcagccagaccaagggccacgaccggatgtactggtacagacaggaccctggcctgggcctgagactgatctactacagcttcgacgtgaaggacatcaacaagggcgagatcagcgacggctacagcgtgtcaagacaggctcaggccaagttcagcctgtctctggaaagcgccattcctaaccagacagccctgtacttctgtgccacaagcggccagggcgcttacgaggaacagttctttggccctggcaccagactgacagttctcgaggacctgaagaacgtgttcccacctgaggtggccgtgttcgagcctagcgaggccgagatcagccacacccagaaagccaccctcgtgtgcctggctaccggcttctaccccgaccatgtggaactgtcttggtgggtcaacggcaaagaggtgcacagcggcgtgtgtaccgacccccagccactgaaagaacagcccgccctgaacgacagccggtactgcctgagcagcagactgagagtgtccgccaccttctggcagaacccccggaaccacttcagatgccaggtgcagttctacggcctgagcgagaacgacgagtggacccaggacagagccaagcccgtgacccagatcgtgtctgccgaagcctggggcagagccgattgcggatcccagagcttcggcctgctggaccccaagctgtgctacctgctggatggcatcctgttcatctacggcgtgatcctgaccgccctgttcctgaggagtaagaggagcaggctcctgcacagtgactacatgaacatgactccacgccgccccggacccacccgcaagcattaccagccctatgccccaccacgcgacttcgcagcctatcgctccagagtgaagttcagcagaagcgccgacgcccctgcctaccagcagggacagaaccaactgtacaacgagctgaacctgggcagacgggaagagtacgacgtgctggacaagcggagaggcagggaccctgagatgggcggaaagccccagcggagaaagaacccccaggaaggactgtataacgaactccagaaagacaagatggccgaagcctacagcgagatcggcatgaagggcgagcggagaagaggcaagggccacgatggcctgtaccagggcctgagcaccgccaccaaggacacctatgacgccctgcacatgcaggccctgcctccaagaagggccaagcgatctggatctggagcaacaaacttctcactactcaaacaagcaggtgacgtggaggagaatcccgggcctactagtatggactggatttggcgcatccttttccttgtcggcgctgctaccggcgcgcattccttcgaaaagaaccaggtggaacagagccctcagagcctgattatcctggaaggcaagaactgcaccctccagtgcaactacaccgtgtctcccttcagcaacctgcggtggtacaagcaggatacaggcagaggccctgtgtctctgaccatcctgaccttcagcgagaacaccaagagcaacggcagatacaccgccacactggacgccgatacaaagcagagcagcctgcacatcacagccagccagctgagcgatagcgccagctacatctgtgtggtgtctggcggcacagacagctggggcaaactccagtttggagctggcacacaggtggtggtcacccctgatacgcgtatccagaaccctgatcctgccgtgtaccagctgcgggatagcaagagcagcgacaagagcgtgtgtctgttcaccgacttcgacagccagaccaacgtgtcccagagcaaggactccgacgtgtacatcaccgataagtgcgtgctggacatgcggagcatggacttcaagagcaactccgccgtggcctggtccaacaagtccgatttcgcctgcgccaacgccttcaacaacagcattatccccgaggacacattcttcccaagccccgagagcagctgcggtacccagagttttgggttgttggaccctaaattgtgctatctgttggacggaatcctgttcatttacggagtgatcctgaccgcattgttcctgcgggttaagttttccagatccgcagacgcacccgcttaccaacaagggcagaaccaactctacaatgaacttaatttggggcggagggaagagtacgacgttctggacaaaaggaggggacgagatcccgagatgggcggaaagcctcagcgaaggaagaatccgcaagaggggctttataacgaactccagaaagataaaatggcagaagcctatagtgagattgggatgaagggagaaaggaggaggggtaaaggtcacgatgggttgtaccaaggattgagcacagccactaaagatacctatgatgcgctccacatgcaggccctgccgccaaga

SEQ ID NO: 2697 - DNA, 2688 bp, synthetic construct
  source 1..2688: mol_type = other DNA
atggccttaccagtgaccgccttgctcctgccgctggccttgctgctccacgccgccaggccggacgtgacccagacacctcggaacagaatcaccaagaccggcaagcggatcatgctggaatgcagccagaccaagggccacgaccggatgtactggtacagacaggaccctggcctgggcctgagactgatctactacagcttcgacgtgaaggacatcaacaagggcgagatcagcgacggctacagcgtgtcaagacaggctcaggccaagttcagcctgtctctggaaagcgccattcctaaccagacagccctgtacttctgtgccacaagcggccagggcgcttacgaggaacagttctttggccctggcaccagactgacagttctcgaggacctgaagaacgtgttcccacctgaggtggccgtgttcgagcctagcgaggccgagatcagccacacccagaaagccaccctcgtgtgcctggctaccggcttctaccccgaccatgtggaactgtcttggtgggtcaacggcaaagaggtgcacagcggcgtgtgtaccgacccccagccactgaaagaacagcccgccctgaacgacagccggtactgcctgagcagcagactgagagtgtccgccaccttctggcagaacccccggaaccacttcagatgccaggtgcagttctacggcctgagcgagaacgacgagtggacccaggacagagccaagcccgtgacccagatcgtgtctgccgaagcctggggcagagccgattgcggatcccagagcttcggcctgctggaccccaagctgtgctacctgctggatggcatcctgttcatctacggcgtgatcctgaccgccctgttcctgaggagtaagaggagcaggctcctgcacagtgactacatgaacatgactccacgccgccccggacccacccgcaagcattaccagccctatgccccaccacgcgacttcgcagcctatcgctccagagtgaagttcagcagaagcgccgacgcccctgcctaccagcagggacagaaccaactgtacaacgagctgaacctgggcagacgggaagagtacgacgtgctggacaagcggagaggcagggaccctgagatgggcggaaagccccagcggagaaagaacccccaggaaggactgtataacgaactccagaaagacaagatggccgaagcctacagcgagatcggcatgaagggcgagcggagaagaggcaagggccacgatggcctgtaccagggcctgagcaccgccaccaaggacacctatgacgccctgcacatgcaggccctgcctccaagaagggccaagcgatctggatctggagcaacaaacttctcactactcaaacaagcaggtgacgtggaggagaatcccgggcctactagtatggactggatttggcgcatccttttccttgtcggcgctgctaccggcgcgcattccttcgaaaagaaccaggtggaacagagccctcagagcctgattatcctggaaggcaagaactgcaccctccagtgcaactacaccgtgtctcccttcagcaacctgcggtggtacaagcaggatacaggcagaggccctgtgtctctgaccatcctgaccttcagcgagaacaccaagagcaacggcagatacaccgccacactggacgccgatacaaagcagagcagcctgcacatcacagccagccagctgagcgatagcgccagctacatctgtgtggtgtctggcggcacagacagctggggcaaactccagtttggagctggcacacaggtggtggtcacccctgatacgcgtatccagaaccctgatcctgccgtgtaccagctgcgggatagcaagagcagcgacaagagcgtgtgtctgttcaccgacttcgacagccagaccaacgtgtcccagagcaaggactccgacgtgtacatcaccgataagtgcgtgctggacatgcggagcatggacttcaagagcaactccgccgtggcctggtccaacaagtccgatttcgcctgcgccaacgccttcaacaacagcattatccccgaggacacattcttcccaagccccgagagcagctgcggtacccagagttttgggttgttggaccctaaattgtgctatctgttggacggaatcctgttcatttacggagtgatcctgaccgcattgttcctgaggagcaagcggtcacggctgctccacagcgattacatgaatatgacaccacgaagaccgggtcctactcgcaaacactaccaaccctacgcacctccccgcgactttgcagcgtaccgatctcgggttaagttttccagatccgcagacgcacccgcttaccaacaagggcagaaccaactctacaatgaacttaatttggggcggagggaagagtacgacgttctggacaaaaggaggggacgagatcccgagatgggcggaaagcctcagcgaaggaagaatccgcaagaggggctttataacgaactccagaaagataaaatggcagaagcctatagtgagattgggatgaagggagaaaggaggaggggtaaaggtcacgatgggttgtaccaaggattgagcacagccactaaagatacctatgatgcgctccacatgcaggccctgccgccaaga

SEQ ID NO: 2698 - DNA, 2442 bp, synthetic construct
  source 1..2442: mol_type = other DNA
atggccttaccagtgaccgccttgctcctgccgctggccttgctgctccacgccgccaggccggacgtgacccagacacctcggaacagaatcaccaagaccggcaagcggatcatgctggaatgcagccagaccaagggccacgaccggatgtactggtacagacaggaccctggcctgggcctgagactgatctactacagcttcgacgtgaaggacatcaacaagggcgagatcagcgacggctacagcgtgtcaagacaggctcaggccaagttcagcctgtctctggaaagcgccattcctaaccagacagccctgtacttctgtgccacaagcggccagggcgcttacgaggaacagttctttggccctggcaccagactgacagttctcgaggacctgaagaacgtgttcccacctgaggtggccgtgttcgagcctagcgaggccgagatcagccacacccagaaagccaccctcgtgtgcctggctaccggcttctaccccgaccatgtggaactgtcttggtgggtcaacggcaaagaggtgcacagcggcgtgtctaccgacccccagccactgaaagaacagcccgccctgaacgacagccggtactgcctgagcagcagactgagagtgtccgccaccttctggcagaacccccggaaccacttcagatgccaggtgcagttctacggcctgagcgagaacgacgagtggacccaggacagagccaagcccgtgacccagatcgtgtctgccgaagcctggggcagagccgattgcggatcccagagcttcggcctgctggaccccaagctgtgctacctgctggatggcatcctgttcatctacggcgtgatcctgaccgccctgttcctgagagtgaagttcagcagaagcgccgacgcccctgcctaccagcagggacagaaccaactgtacaacgagctgaacctgggcagacgggaagagtacgacgtgctggacaagcggagaggcagggaccctgagatgggcggaaagccccagcggagaaagaacccccaggaaggactgtataacgaactccagaaagacaagatggccgaagcctacagcgagatcggcatgaagggcgagcggagaagaggcaagggccacgatggcctgtaccagggcctgagcaccgccaccaaggacacctatgacgccctgcacatgcaggccctgcctccaagaagggccaagcgatctggatctggagcaacaaacttctcactactcaaacaagcaggtgacgtggaggagaatcccgggcctactagtatggactggatttggcgcatccttttccttgtcggcgctgctaccggcgcgcattccttcgaaaagaaccaggtggaacagagccctcagagcctgattatcctggaaggcaagaactgcaccctccagtgcaactacaccgtgtctcccttcagcaacctgcggtggtacaagcaggatacaggcagaggccctgtgtctctgaccatcctgaccttcagcgagaacaccaagagcaacggcagatacaccgccacactggacgccgatacaaagcagagcagcctgcacatcacagccagccagctgagcgatagcgccagctacatctgtgtggtgtctggcggcacagacagctggggcaaactccagtttggagctggcacacaggtggtggtcacccctgatacgcgtatccagaaccctgatcctgccgtgtaccagctgcgggatagcaagagcagcgacaagagcgtgtgtctgttcaccgacttcgacagccagaccaacgtgtcccagagcaaggactccgacgtgtacatcaccgataagaccgtgctggacatgcggagcatggacttcaagagcaactccgccgtggcctggtccaacaagtccgatttcgcctgcgccaacgccttcaacaacagcattatccccgaggacacattcttcccaagccccgagagcagctgcggtacccagagttttgggttgttggaccctaaattgtgctatctgttggacggaatcctgttcatttacggagtgatcctgaccgcattgttcctgcgggttaagttttccagatccgcagacgcacccgcttaccaacaagggcagaaccaactctacaatgaacttaatttggggcggagggaagagtacgacgttctggacaaaaggaggggacgagatcccgagatgggcggaaagcctcagcgaaggaagaatccgcaagaggggctttataacgaactccagaaagataaaatggcagaagcctatagtgagattgggatgaagggagaaaggaggaggggtaaaggtcacgatgggttgtaccaaggattgagcacagccactaaagatacctatgatgcgctccacatgcaggccctgccgccaaga

SEQ ID NO: 2699 - DNA, 3174 bp, synthetic construct
  source 1..3174: mol_type = other DNA
atggccttaccagtgaccgccttgctcctgccgctggccttgctgctccacgccgccaggccggacgtgacccagacacctcggaacagaatcaccaagaccggcaagcggatcatgctggaatgcagccagaccaagggccacgaccggatgtactggtacagacaggaccctggcctgggcctgagactgatctactacagcttcgacgtgaaggacatcaacaagggcgagatcagcgacggctacagcgtgtcaagacaggctcaggccaagttcagcctgtctctggaaagcgccattcctaaccagacagccctgtacttctgtgccacaagcggccagggcgcttacgaggaacagttctttggccctggcaccagactgacagttctcgaggacaagcagctggacgccgacgtgtcccccaagcctaccatcttcctgccctctatcgccgagacaaagctccagaaggccggcacctacctgtgcctgctggaaaagttcttcccagatgtgattaagatccactggcaggaaaagaagtccaacaccatcctgggcagccaggaaggcaacaccatgaagaccaacgacacctacatgaagttcagctggctgaccgtgcccgagaagtccctggacaaagaacacagatgcatcgtgcggcacgaaaacaacaagaacggcgtggaccaggaaatcatcttcccacccatcaagaccgatgtgattacaggatcccagagcttcggcctgctggaccccaagctgtgctacctgctggatggcatcctgttcatctacggcgtgatcctgaccgccctgttcctgagagtgaagttcagcagaagcgccgacgcccctgcctaccagcagggacagaaccaactgtacaacgagctgaacctgggcagacgggaagagtacgacgtgctggacaagcggagaggcagggaccctgagatgggcggaaagccccagcggagaaagaacccccaggaaggactgtataacgaactccagaaagacaagatggccgaagcctacagcgagatcggcatgaagggcgagcggagaagaggcaagggccacgatggcctgtaccagggcctgagcaccgccaccaaggacacctatgacgccctgcacatgcaggccctgcctccaagaagggccaagcgatctggatctggagcaacaaacttctcactactcaaacaagcaggtgacgtggaggagaatcccgggcctactagtatggactggatttggcgcatccttttccttgtcggcgctgctaccggcgcgcattccttcgaaaagaaccaggtggaacagagccctcagagcctgattatcctggaaggcaagaactgcaccctccagtgcaactacaccgtgtctcccttcagcaacctgcggtggtacaagcaggatacaggcagaggccctgtgtctctgaccatcctgaccttcagcgagaacaccaagagcaacggcagatacaccgccacactggacgccgatacaaagcagagcagcctgcacatcacagccagccagctgagcgatagcgccagctacatctgtgtggtgtctggcggcacagacagctggggcaaactccagtttggagctggcacacaggtggtggtcacccctgatacgcgtagccagcctcacaccaagcccagcgtgttcgtgatgaagaacggcaccaacgtggcctgcctcgtgaaagagttctaccccaaggacatcaggatcaacctggtgtccagcaagaagatcaccgagttcgaccccgccatcgtgatctcccccagcggcaagtacaacgccgtgaagctggggaagtacgaggacagcaacagcgtgacctgctccgtgcagcacgacaacaagaccgtgcacagcaccgactttggtacccagagttttgggttgttggaccctaaattgtgctatctgttggacggaatcctgttcatttacggagtgatcctgaccgcattgttcctgcgggttaagttttccagatccgcagacgcacccgcttaccaacaagggcagaaccaactctacaatgaacttaatttggggcggagggaagagtacgacgttctggacaaaaggaggggacgagatcccgagatgggcggaaagcctcagcgaaggaagaatccgcaagaggggctttataacgaactccagaaagataaaatggcagaagcctatagtgagattgggatgaagggagaaaggaggaggggtaaaggtcacgatgggttgtaccaaggattgagcacagccactaaagatacctatgatgcgctccacatgcaggccctgccgccaagacgcgccaagagaagcggatctggcgtgaagcagaccctgaatttcgacctgctgaagctggctggcgacgtggaatccaacccaggcccttctagaggccatatggctctgcctgtgacagctctgctgctgcctctggcactgctgcttcatgctgctagacctagccagtttagagtgtcccctctggacagaacctggaacctgggcgagacagtggaactgaagtgccaggtgctgctgagcaaccctacaagcggctgctcctggctgtttcagcctagaggtgcagccgcctctcctacctttctgctgtacctgagccagaacaagcccaaggccgccgaaggactggacacccagagattcagcggcaagagactgggcgacaccttcgtgctgaccctgagcgacttcagaagagagaacgagggctactacttctgtagcgccctgagcaacagcatcatgtacttcagccacttcgtgcccgtgtttctgcccgccaagcctacaacaacccctgctcctagacctcctacaccagctcctacaatcgccagccagcctctgtctctcagacccgaagcctgtagacctgctgctggcggagctgtgcataccagaggactggatttcgcctgcgacatctacatctgggctcctctggctggcacatgtggcgtgctgctgctgtccctggtcatcaccctgtactgcaaccaccggaacaggcggagagtgtgcaagtgccctagacctgtggtcaagagcggcgacaagcctagcctgagcgccagatatgtt

SEQ ID NO: 2700 - DNA, 2778 bp, synthetic construct
  source 1..2778: mol_type = other DNA
atggccttaccagtgaccgccttgctcctgccgctggccttgctgctccacgccgccaggccggacgtgacccagacacctcggaacagaatcaccaagaccggcaagcggatcatgctggaatgcagccagaccaagggccacgaccggatgtactggtacagacaggaccctggcctgggcctgagactgatctactacagcttcgacgtgaaggacatcaacaagggcgagatcagcgacggctacagcgtgtcaagacaggctcaggccaagttcagcctgtctctggaaagcgccattcctaaccagacagccctgtacttctgtgccacaagcggccagggcgcttacgaggaacagttctttggccctggcaccagactgacagttctcgagggacagcctaaggccaatcctaccgtgacactgttccctccaagcagcgaagaactccaggccaacaaggccacacttgtgtgcctgatctccgacttctaccctggggctgtgacagtggcttggaaggccgatggatctcctgtgaaagccggcgtggaaaccaccaagccatccaagcagagcaacaacaaatacgccgccagctcctacctgagcctgacacctgagcagtggaagtcccacagatcctacagctgccaagtgacccacgaaggcagcaccgtggaaaagacagtggcccctacagagtgcagcacaacacctggcgagagaagtagcctgcctgccttctatcctggcaccagcggctcttgttctggctgtggatctctgagcctgcctctgctggctggactggttgctgctgatgctgtggcctctctgctgattgtgggagccgtgttcctgtgcgccagacctagaagaagccccgctcaagaggacggcaaggtgtacatcaacatgcccggcagaggaagggccaagcgatctggatctggagcaacaaacttctcactactcaaacaagcaggtgacgtggaggagaatcccgggcctactagtatggactggatttggcgcatccttttccttgtcggcgctgctaccggcgcgcattccttcgaaaagaaccaggtggaacagagccctcagagcctgattatcctggaaggcaagaactgcaccctccagtgcaactacaccgtgtctcccttcagcaacctgcggtggtacaagcaggatacaggcagaggccctgtgtctctgaccatcctgaccttcagcgagaacaccaagagcaacggcagatacaccgccacactggacgccgatacaaagcagagcagcctgcacatcacagccagccagctgagcgatagcgccagctacatctgtgtggtgtctggcggcacagacagctggggcaaactccagtttggagctggcacacaggtggtggtcacccctgatacgcgtgcctctacaaagggaccctccgtgtttcctctggctcccagcagcaagtctacaagcggaggaacagccgctctgggctgcctggtcaaggattactttcccgagcctgtgaccgtgtcctggaatagcggagcactgacaagcggcgtgcacacctttccagccgtgctgcaaagcagcggcctgtactctctgagcagcgtggtcacagtgcctagctctagcctgggcacccagacctacatctgcaatgtgaaccacaagcctagcaacaccaaggtggacaagagagtggaacccaagagctgtacaacgccgggcgaaaggagttccttgccggccttttaccccggcacaagcggaagctgtagtgggtgtggaagcctcagcctcccacttcttgcgggcctcgtcgcggcagatgcagtagcttcacttcttattgtaggcgcggtatttctctgtgctcgaccaaggaggtcacccgctcaggaggatggtaaggtgtatataaatatgccaggacgcggacgcgccaagagaagcggatctggcgtgaagcagaccctgaatttcgacctgctgaagctggctggcgacgtggaatccaacccaggcccttctagaggccatatggctctgcctgtgacagctctgctgctgcctctggcactgctgcttcatgctgctagacctagccagtttagagtgtcccctctggacagaacctggaacctgggcgagacagtggaactgaagtgccaggtgctgctgagcaaccctacaagcggctgctcctggctgtttcagcctagaggtgcagccgcctctcctacctttctgctgtacctgagccagaacaagcccaaggccgccgaaggactggacacccagagattcagcggcaagagactgggcgacaccttcgtgctgaccctgagcgacttcagaagagagaacgagggctactacttctgtagcgccctgagcaacagcatcatgtacttcagccacttcgtgcccgtgtttctgcccgccaagcctacaacaacccctgctcctagacctcctacaccagctcctacaatcgccagccagcctctgtctctcagacccgaagcctgtagacctgctgctggcggagctgtgcataccagaggactggatttcgcctgcgacatctacatctgggctcctctggctggcacatgtggcgtgctgctgctgtccctggtcatcaccctgtactgcaaccaccggaacaggcggagagtgtgcaagtgccctagacctgtggtcaagagcggcgacaagcctagcctgagcgccagatatgtt

SEQ ID NO: 2701 - DNA, 2265 bp, synthetic construct
  source 1..2265: mol_type = other DNA
atggccttaccagtgaccgccttgctcctgccgctggccttgctgctccacgccgccaggccggacgtgacccagacacctcggaacagaatcaccaagaccggcaagcggatcatgctggaatgcagccagaccaagggccacgaccggatgtactggtacagacaggaccctggcctgggcctgagactgatctactacagcttcgacgtgaaggacatcaacaagggcgagatcagcgacggctacagcgtgtcaagacaggctcaggccaagttcagcctgtctctggaaagcgccattcctaaccagacagccctgtacttctgtgccacaagcggccagggcgcttacgaggaacagttctttggccctggcaccagactgacagttctcgagggcgacatcgagaacaccagtctggcccctgaggaccctacctttcctgccgatacctggggcacctacctgctgaccacagagacaggactccagaaagatcacgccctgtgggaccacacagcccagaacctgctgagaatgggcctcgcctttctggtgctggttgccctcgtgtggttcctggtggaagattggctgagccggaagcggacaagagagagagccagcagagcctctacctgggagggaagaagaaggctgaacacccagacacttagggccaagcgatctggatctggagcaacaaacttctcactactcaaacaagcaggtgacgtggaggagaatcccgggcctactagtatggactggatttggcgcatccttttccttgtcggcgctgctaccggcgcgcattccttcgaaaagaaccaggtggaacagagccctcagagcctgattatcctggaaggcaagaactgcaccctccagtgcaactacaccgtgtctcccttcagcaacctgcggtggtacaagcaggatacaggcagaggccctgtgtctctgaccatcctgaccttcagcgagaacaccaagagcaacggcagatacaccgccacactggacgccgatacaaagcagagcagcctgcacatcacagccagccagctgagcgatagcgccagctacatctgtgtggtgtctggcggcacagacagctggggcaaactccagtttggagctggcacacaggtggtggtcacccctgatacgcgtggcgatattgagaatacctctctggccccagaagatcctacattccccgccgacacatggggaacatatctgctgacaaccgaaaccgggctgcaaaaggaccatgctctgtgggatcataccgctcagaatctgcttcggatggggcttgcattcctggtcctggtggctcttgtctggtttctggtcgaggactggctgtcccggaagagaaccagagaaagagcttccagggccagcacctgggaaggcagacgcagactgaatactcagaccctgcgcgccaagagaagcggatctggcgtgaagcagaccctgaatttcgacctgctgaagctggctggcgacgtggaatccaacccaggcccttctagaggccatatggctctgcctgtgacagctctgctgctgcctctggcactgctgcttcatgctgctagacctagccagtttagagtgtcccctctggacagaacctggaacctgggcgagacagtggaactgaagtgccaggtgctgctgagcaaccctacaagcggctgctcctggctgtttcagcctagaggtgcagccgcctctcctacctttctgctgtacctgagccagaacaagcccaaggccgccgaaggactggacacccagagattcagcggcaagagactgggcgacaccttcgtgctgaccctgagcgacttcagaagagagaacgagggctactacttctgtagcgccctgagcaacagcatcatgtacttcagccacttcgtgcccgtgtttctgcccgccaagcctacaacaacccctgctcctagacctcctacaccagctcctacaatcgccagccagcctctgtctctcagacccgaagcctgtagacctgctgctggcggagctgtgcataccagaggactggatttcgcctgcgacatctacatctgggctcctctggctggcacatgtggcgtgctgctgctgtccctggtcatcaccctgtactgcaaccaccggaacaggcggagagtgtgcaagtgccctagacctgtggtcaagagcggcgacaagcctagcctgagcgccagatatgtt

SEQ ID NO: 2702 - DNA, 2097 bp, synthetic construct
  source 1..2097: mol_type = other DNA
atggccttaccagtgaccgccttgctcctgccgctggccttgctgctccacgccgccaggccggacgtgacccagacacctcggaacagaatcaccaagaccggcaagcggatcatgctggaatgcagccagaccaagggccacgaccggatgtactggtacagacaggaccctggcctgggcctgagactgatctactacagcttcgacgtgaaggacatcaacaagggcgagatcagcgacggctacagcgtgtcaagacaggctcaggccaagttcagcctgtctctggaaagcgccattcctaaccagacagccctgtacttctgtgccacaagcggccagggcgcttacgaggaacagttctttggccctggcaccagactgacagttctcgagatcactcaaggtttggcagtgtcaaccatctcatcattctttccacctggctaccaagtgtccttctgcctggtcatggtgctgctgttcgccgtggataccggcctgtacttcagcgtcaagaccaacatccggtccagcaccagagactggaaggaccacaagttcaagtggcggaaggaccctcaggacaagagggccaagcgatctggatctggagcaacaaacttctcactactcaaacaagcaggtgacgtggaggagaatcccgggcctactagtatggactggatttggcgcatccttttccttgtcggcgctgctaccggcgcgcattccttcgaaaagaaccaggtggaacagagccctcagagcctgattatcctggaaggcaagaactgcaccctccagtgcaactacaccgtgtctcccttcagcaacctgcggtggtacaagcaggatacaggcagaggccctgtgtctctgaccatcctgaccttcagcgagaacaccaagagcaacggcagatacaccgccacactggacgccgatacaaagcagagcagcctgcacatcacagccagccagctgagcgatagcgccagctacatctgtgtggtgtctggcggcacagacagctggggcaaactccagtttggagctggcacacaggtggtggtcacccctgatacgcgtatcacccagggcctggccgtgtctaccatcagcagctttttcccacccggctaccaggtgtccttctgcctcgtgatggtgctgctgttcgccgtggacaccggcctgtacttcagcgtgaaaacaaacatccggtccagcaccagagactggaaggaccacaagttcaagtggcggaaggacccccaggacaagcgcgccaagagaagcggatctggcgtgaagcagaccctgaatttcgacctgctgaagctggctggcgacgtggaatccaacccaggcccttctagaggccatatggctctgcctgtgacagctctgctgctgcctctggcactgctgcttcatgctgctagacctagccagtttagagtgtcccctctggacagaacctggaacctgggcgagacagtggaactgaagtgccaggtgctgctgagcaaccctacaagcggctgctcctggctgtttcagcctagaggtgcagccgcctctcctacctttctgctgtacctgagccagaacaagcccaaggccgccgaaggactggacacccagagattcagcggcaagagactgggcgacaccttcgtgctgaccctgagcgacttcagaagagagaacgagggctactacttctgtagcgccctgagcaacagcatcatgtacttcagccacttcgtgcccgtgtttctgcccgccaagcctacaacaacccctgctcctagacctcctacaccagctcctacaatcgccagccagcctctgtctctcagacccgaagcctgtagacctgctgctggcggagctgtgcataccagaggactggatttcgcctgcgacatctacatctgggctcctctggctggcacatgtggcgtgctgctgctgtccctggtcatcaccctgtactgcaaccaccggaacaggcggagagtgtgcaagtgccctagacctgtggtcaagagcggcgacaagcctagcctgagcgccagatatgtt

SEQ ID NO: 2703 - DNA, 2379 bp, synthetic construct
  source 1..2379: mol_type = other DNA
atggccttaccagtgaccgccttgctcctgccgctggccttgctgctccacgccgccaggccgagcagatacctggtcaagcggaccggcgagaaggtgttcctggaatgcgtgcaggacatggaccacgaaaacatgttctggtacagacaggaccccggcctgggcctgagactgatctacttcagctacgacgtgaagatgaaggaaaagggcgacatccccgagggctacagcgtgtccagagagaagaaagagcggttcagcctgatcctggaaagcgccagcaccaaccagaccagcatgtacctgtgtgccagcagcctgtggggcagactggctaagaacatccagtatttcggagccggcaccagactgtctgttctcgagggacagcctaaggccaatcctaccgtgacactgttccctccaagcagcgaagaactccaggccaacaaggccacacttgtgtgcctgatctccgacttctaccctggggctgtgacagtggcttggaaggccgatggatctcctgtgaaagccggcgtggaaaccaccaagccatccaagcagagcaacaacaaatacgccgccagctcctacctgagcctgacacctgagcagtggaagtcccacagatcctacagctgccaagtgacccacgaaggcagcaccgtggaaaagacagtggcccctacagagtgcagcggatcccagagcttcggcctgctggaccccaagctgtgctacctgctggatggcatcctgttcatctacggcgtgatcctgaccgccctgttcctgagagtgaagttcagcagaagcgccgacgcccctgcctaccagcagggacagaaccaactgtacaacgagctgaacctgggcagacgggaagagtacgacgtgctggacaagcggagaggcagggaccctgagatgggcggaaagccccagcggagaaagaacccccaggaaggactgtataacgaactccagaaagacaagatggccgaagcctacagcgagatcggcatgaagggcgagcggagaagaggcaagggccacgatggcctgtaccagggcctgagcaccgccaccaaggacacctatgacgccctgcacatgcaggccctgcctccaagaagggccaagcgatctggatctggagcaacaaacttctcactactcaaacaagcaggtgacgtggaggagaatcccgggcctactagtatggactggatttggcgcatccttttccttgtcggcgctgctaccggcgcgcattccttcgaagaggatcaagtgacccagtctcctgaggctctgaggctgcaagagggcgagagcagctctctgaactgctcctacacagtgtctggcctgaggggcctgttttggtataggcaagaccctggcaagggacccgagttcctgttcacactgtactctgccggcgaggaaaaagagaaagaacgcctgaaggccacgctgaccaagaaagagagcttcctgcacatcacagcccctaagcctgaggacagcgccacctatctgtgtgccgtgcaggccaatagaggcagcacactggggagactgtacttcggcagaggcacccagctgaccgtttggcctgatgcctctacaaagggaccctccgtgtttcctctggctcccagcagcaagtctacaagcggaggaacagccgctctgggctgcctggtcaaggattactttcccgagcctgtgaccgtgtcctggaatagcggagcactgacaagcggcgtgcacacctttccagccgtgctgcaaagcagcggcctgtactctctgagcagcgtggtcacagtgcctagctctagcctgggcacccagacctacatctgcaatgtgaaccacaagcctagcaacaccaaggtggacaagagagtggaacccaagagctgtggtacccagagttttgggttgttggaccctaaattgtgctatctgttggacggaatcctgttcatttacggagtgatcctgaccgcattgttcctgcgggttaagttttccagatccgcagacgcacccgcttaccaacaagggcagaaccaactctacaatgaacttaatttggggcggagggaagagtacgacgttctggacaaaaggaggggacgagatcccgagatgggcggaaagcctcagcgaaggaagaatccgcaagaggggctttataacgaactccagaaagataaaatggcagaagcctatagtgagattgggatgaagggagaaaggaggaggggtaaaggtcacgatgggttgtaccaaggattgagcacagccactaaagatacctatgatgcgctccacatgcaggccctgccgccaaga

SEQ ID NO: 2704 - DNA, 1677 bp, synthetic construct
  source 1..1677: mol_type = other DNA
atggccttaccagtgaccgccttgctcctgccgctggccttgctgctccacgccgccaggccgagcagatacctggtcaagcggaccggcgagaaggtgttcctggaatgcgtgcaggacatggaccacgaaaacatgttctggtacagacaggaccccggcctgggcctgagactgatctacttcagctacgacgtgaagatgaaggaaaagggcgacatccccgagggctacagcgtgtccagagagaagaaagagcggttcagcctgatcctggaaagcgccagcaccaaccagaccagcatgtacctgtgtgccagcagcctgtggggcagactggctaagaacatccagtatttcggagccggcaccagactgtctgttctcgagctcgagcagagcttcggcctgctggaccccaagctgtgctacctgctggatggcatcctgttcatctacggcgtgatcctgaccgccctgttcctgagagtgaagttcagcagaagcgccgacgcccctgcctaccagcagggacagaaccaactgtacaacgagctgaacctgggcagacgggaagagtacgacgtgctggacaagcggagaggcagggaccctgagatgggcggaaagccccagcggagaaagaacccccaggaaggactgtataacgaactccagaaagacaagatggccgaagcctacagcgagatcggcatgaagggcgagcggagaagaggcaagggccacgatggcctgtaccagggcctgagcaccgccaccaaggacacctatgacgccctgcacatgcaggccctgcctccaagaagggccaagcgatctggatctggagcaacaaacttctcactactcaaacaagcaggtgacgtggaggagaatcccgggcctactagtatggactggatttggcgcatccttttccttgtcggcgctgctaccggcgcgcattccttcgaagaggatcaagtgacccagtctcctgaggctctgaggctgcaagagggcgagagcagctctctgaactgctcctacacagtgtctggcctgaggggcctgttttggtataggcaagaccctggcaagggacccgagttcctgttcacactgtactctgccggcgaggaaaaagagaaagaacgcctgaaggccacgctgaccaagaaagagagcttcctgcacatcacagcccctaagcctgaggacagcgccacctatctgtgtgccgtgcaggccaatagaggcagcacactggggagactgtacttcggcagaggcacccagctgaccgtttggcctgatacgcgtcagagttttgggttgttggaccctaaattgtgctatctgttggacggaatcctgttcatttacggagtgatcctgaccgcattgttcctgcgggttaagttttccagatccgcagacgcacccgcttaccaacaagggcagaaccaactctacaatgaacttaatttggggcggagggaagagtacgacgttctggacaaaaggaggggacgagatcccgagatgggcggaaagcctcagcgaaggaagaatccgcaagaggggctttataacgaactccagaaagataaaatggcagaagcctatagtgagattgggatgaagggagaaaggaggaggggtaaaggtcacgat

SEQ ID NO: 2705 - DNA, 2829 bp, synthetic construct
  source 1..2829: mol_type = other DNA
atggccttaccagtgaccgccttgctcctgccgctggccttgctgctccacgccgccaggccgagcagatacctggtcaagcggaccggcgagaaggtgttcctggaatgcgtgcaggacatggaccacgaaaacatgttctggtacagacaggaccccggcctgggcctgagactgatctacttcagctacgacgtgaagatgaaggaaaagggcgacatccccgagggctacagcgtgtccagagagaagaaagagcggttcagcctgatcctggaaagcgccagcaccaaccagaccagcatgtacctgtgtgccagcagcctgtggggcagactggctaagaacatccagtatttcggagccggcaccagactgtctgttctcgagctcgagacaacacctggcgagagaagtagcctgcctgccttctatcctggcaccagcggctcttgttctggctgtggatctctgagcctgcctctgctggctggactggttgctgctgatgctgtggcctctctgctgattgtgggagccgtgttcctgtgcgccagacctagaagaagccccgctcaagaggacggcaaggtgtacatcaacatgcccggcagaggaagcactagtagagtgaagttcagcagaagcgccgacgcccctgcctaccagcagggacagaaccaactgtacaacgagctgaacctgggcagacgggaagagtacgacgtgctggacaagcggagaggcagggaccctgagatgggcggaaagccccagcggagaaagaacccccaggaaggactgtataacgaactccagaaagacaagatggccgaagcctacagcgagatcggcatgaagggcgagcggagaagaggcaagggccacgatggcctgtaccagggcctgagcaccgccaccaaggacacctatgacgccctgcacatgcaggccctgcctccaagaagggccaagcgatctggatctggagcaacaaacttctcactactcaaacaagcaggtgacgtggaggagaatcccgggcctatggactggatttggcgcatccttttccttgtcggcgctgctaccggcgcgcattccttcgaagaggatcaagtgacccagtctcctgaggctctgaggctgcaagagggcgagagcagctctctgaactgctcctacacagtgtctggcctgaggggcctgttttggtataggcaagaccctggcaagggacccgagttcctgttcacactgtactctgccggcgaggaaaaagagaaagaacgcctgaaggccacgctgaccaagaaagagagcttcctgcacatcacagcccctaagcctgaggacagcgccacctatctgtgtgccgtgcaggccaatagaggcagcacactggggagactgtacttcggcagaggcacccagctgaccgtttggcctgatacgcgtacaacgccgggcgaaaggagttccttgccggccttttaccccggcacaagcggaagctgtagtgggtgtggaagcctcagcctcccacttcttgcgggcctcgtcgcggcagatgcagtagcttcacttcttattgtaggcgcggtatttctctgtgctcgaccaaggaggtcacccgctcaggaggatggtaaggtgtatataaatatgccaggacgcggaagctctagacgggttaagttttccagatccgcagacgcacccgcttaccaacaagggcagaaccaactctacaatgaacttaatttggggcggagggaagagtacgacgttctggacaaaaggaggggacgagatcccgagatgggcggaaagcctcagcgaaggaagaatccgcaagaggggctttataacgaactccagaaagataaaatggcagaagcctatagtgagattgggatgaagggagaaaggaggaggggtaaaggtcacgatgggttgtaccaaggattgagcacagccactaaagatacctatgatgcgctccacatgcaggccctgccgccaagacgcgccaagagaagcggatctggcgtgaagcagaccctgaatttcgacctgctgaagctggctggcgacgtggaatccaacccaggccctggccatatggctctgcctgtgacagctctgctgctgcctctggcactgctgcttcatgctgctagacctagccagtttagagtgtcccctctggacagaacctggaacctgggcgagacagtggaactgaagtgccaggtgctgctgagcaaccctacaagcggctgctcctggctgtttcagcctagaggtgcagccgcctctcctacctttctgctgtacctgagccagaacaagcccaaggccgccgaaggactggacacccagagattcagcggcaagagactgggcgacaccttcgtgctgaccctgagcgacttcagaagagagaacgagggctactacttctgtagcgccctgagcaacagcatcatgtacttcagccacttcgtgcccgtgtttctgcccgccaagcctacaacaacccctgctcctagacctcctacaccagctcctacaatcgccagccagcctctgtctctcagacccgaagcctgtagacctgctgctggcggagctgtgcataccagaggactggatttcgcctgcgacatctacatctgggctcctctggctggcacatgtggcgtgctgctgctgtccctggtcatcaccctgtactgcaaccaccggaacaggcggagagtgtgcaagtgccctagacctgtggtcaagagcggcgacaagcctagcctgagcgccagatatgtt

SEQ ID NO: 2706 - DNA, 2829 bp, synthetic construct; identical to SEQ ID NO: 2705
  source 1..2829: mol_type = other DNA

SEQ ID NO: 2707 - DNA, 3327 bp, synthetic construct
  source 1..3327: mol_type = other DNA
atggccttaccagtgaccgccttgctcctgccgctggccttgctgctccacgccgccaggccgagcagatacctggtcaagcggaccggcgagaaggtgttcctggaatgcgtgcaggacatggaccacgaaaacatgttctggtacagacaggaccccggcctgggcctgagactgatctacttcagctacgacgtgaagatgaaggaaaagggcgacatccccgagggctacagcgtgtccagagagaagaaagagcggttcagcctgatcctggaaagcgccagcaccaaccagaccagcatgtacctgtgtgccagcagcctgtggggcagactggctaagaacatccagtatttcggagccggcaccagactgtctgttctcgagctcgagggacagcctaaggccaatcctaccgtgacactgttccctccaagcagcgaagaactccaggccaacaaggccacacttgtgtgcctgatctccgacttctaccctggggctgtgacagtggcttggaaggccgatggatctcctgtgaaagccggcgtggaaaccaccaagccatccaagcagagcaacaacaaatacgccgccagctcctacctgagcctgacacctgagcagtggaagtcccacagatcctacagctgccaagtgacccacgaaggcagcaccgtggaaaagacagtggcccctacagagtgcagcggatccacaacacctggcgagagaagtagcctgcctgccttctatcctggcaccagcggctcttgttctggctgtggatctctgagcctgcctctgctggctggactggttgctgctgatgctgtggcctctctgctgattgtgggagccgtgttcctgtgcgccagacctagaagaagccccgctcaagaggacggcaaggtgtacatcaacatgcccggcagaggaagcactagtagagtgaagttcagcagaagcgccgacgcccctgcctaccagcagggacagaaccaactgtacaacgagctgaacctgggcagacgggaagagtacgacgtgctggacaagcggagaggcagggaccctgagatgggcggaaagccccagcggagaaagaacccccaggaaggactgtataacgaactccagaaagacaagatggccgaagcctacagcgagatcggcatgaagggcgagcggagaagaggcaagggccacgatggcctgtaccagggcctgagcaccgccaccaaggacacctatgacgccctgcacatgcaggccctgcctccaagaagggccaagcgatctggatctggagcaacaaacttctcactactcaaacaagcaggtgacgtggaggagaatcccgggcctatggactggatttggcgcatccttttccttgtcggcgctgctaccggcgcgcattccttcgaagaggatcaagtgacccagtctcctgaggctctgaggctgcaagagggcgagagcagctctctgaactgctcctacacagtgtctggcctgaggggcctgttttggtataggcaagaccctggcaagggacccgagttcctgttcacactgtactctgccggcgaggaaaaagagaaagaacgcctgaaggccacgctgaccaagaaagagagcttcctgcacatcacagcccctaagcctgaggacagcgccacctatctgtgtgccgtgcaggccaatagaggcagcacactggggagactgtacttcggcagaggcacccagctgaccgtttggcctgatacgcgtgcctctacaaagggaccctccgtgtttcctctggctcccagcagcaagtctacaagcggaggaacagccgctctgggctgcctggtcaaggattactttcccgagcctgtgaccgtgtcctggaatagcggagcactgacaagcggcgtgcacacctttccagccgtgctgcaaagcagcggcctgtactctctgagcagcgtggtcacagtgcctagctctagcctgggcacccagacctacatctgcaatgtgaaccacaagcctagcaacaccaaggtggacaagagagtggaacccaagagctgtggtaccacaacgccgggcgaaaggagttccttgccggccttttaccccggcacaagcggaagctgtagtgggtgtggaagcctcagcctcccacttcttgcgggcctcgtcgcggcagatgcagtagcttcacttcttattgtaggcgcggtatttctctgtgctcgaccaaggaggtcacccgctcaggaggatggtaaggtgtatataaatatgccaggacgcggaagctctagacgggttaagttttccagatccgcagacgcacccgcttaccaacaagggcagaaccaactctacaatgaacttaatttggggcggagggaagagtacgacgttctggacaaaaggaggggacgagatcccgagatgggcggaaagcctcagcgaaggaagaatccgcaagaggggctttataacgaactccagaaagataaaatggcagaagcctatagtgagattgggatgaagggagaaaggaggaggggtaaaggtcacgatgggttgtaccaaggattgagcacagccactaaagatacctatgatgcgctccacatgcaggccctgccgccaagacgcgccaagagaagcggatctggcgtgaagcagaccctgaatttcgacctgctgaagctggctggcgacgtggaatccaacccaggccctggccatatggctacctacgaggtgctgtgcgaggtggcaagaaagctgggcaccgacgacagagaagtggtgctgttcctgctgaacgtgttcatccctcagcctacactggcccagctgatcggtgcactgagagccctgaaagaggaaggccggctgacctttcctctgctggccgaatgcctgttcagagccggaagaagggatctgctgcgggacctgctgcatctggaccccagatttctggaaagacacctggccggcaccatgagctacttcagcccttaccagctgaccgtgctgcacgttgacggcgaactgtgcgccagagatattcggagcctgatcttcctgagcaaggacaccatcggcagccggtctacccctcagacatttctgcactgggtgtactgcatggaaaacctggacctgctcggccccacagatgtggatgccctgatgtccatgctgagaagcctgagcagagtggacctccagagacaggtgcagacactgatgggactgcacctgagcggacctagccacagccagcactacagacacacccct

SEQ ID NO: 2708 - DNA, 3486 bp, synthetic construct
  source 1..3486: mol_type = other DNA
atggccttaccagtgaccgccttgctcctgccgctggccttgctgctccacgccgccaggccgagcagatacctggtcaagcggaccggcgagaaggtgttcctggaatgcgtgcaggacatggaccacgaaaacatgttctggtacagacaggaccccggcctgggcctgagactgatctacttcagctacgacgtgaagatgaaggaaaagggcgacatccccgagggctacagcgtgtccagagagaagaaagagcggttcagcctgatcctggaaagcgccagcaccaaccagaccagcatgtacctgtgtgccagcagcctgtggggcagactggctaagaacatccagtatttcggagccggcaccagactgtctgttctcgagctcgagggacagcctaaggccaatcctaccgtgacactgttccctccaagcagcgaagaactccaggccaacaaggccacacttgtgtgcctgatctccgacttctaccctggggctgtgacagtggcttggaaggccgatggatctcctgtgaaagccggcgtggaaaccaccaagccatccaagcagagcaacaacaaatacgccgccagctcctacctgagcctgacacctgagcagtggaagtcccacagatcctacagctgccaagtgacccacgaaggcagcaccgtggaaaagacagtggcccctacagagtgcagcggatccacaacacctggcgagagaagtagcctgcctgccttctatcctggcaccagcggctcttgttctggctgtggatctctgagcctgcctctgctggctggactggttgctgctgatgctgtggcctctctgctgattgtgggagccgtgttcctgtgcgccagacctagaagaagccccgctcaagaggacggcaaggtgtacatcaacatgcccggcagaggaagcactagtagagtgaagttcagcagaagcgccgacgcccctgcctaccagcagggacagaaccaactgtacaacgagctgaacctgggcagacgggaagagtacgacgtgctggacaagcggagaggcagggaccctgagatgggcggaaagccccagcggagaaagaacccccaggaaggactgtataacgaactccagaaagacaagatggccgaagcctacagcgagatcggcatgaagggcgagcggagaagaggcaagggccacgatggcctgtaccagggcctgagcaccgccaccaaggacacctatgacgccctgcacatgcaggccctgcctccaagaagggccaagcgatctggatctggagcaacaaacttctcactactcaaacaagcaggtgacgtggaggagaatcccgggcctatggactggatttggcgcatccttttccttgtcggcgctgctaccggcgcgcattccttcgaagaggatcaagtgacccagtctcctgaggctctgaggctgcaagagggcgagagcagctctctgaactgctcctacacagtgtctggcctgaggggcctgttttggtataggcaagaccctggcaagggacccgagttcctgttcacactgtactctgccggcgaggaaaaagagaaagaacgcctgaaggccacgctgaccaagaaagagagcttcctgcacatcacagcccctaagcctgaggacagcgccacctatctgtgtgccgtgcaggccaatagaggcagcacactggggagactgtacttcggcagaggcacccagctgaccgtttggcctgatacgcgtgcctctacaaagggaccctccgtgtttcctctggctcccagcagcaagtctacaagcggaggaacagccgctctgggctgcctggtcaaggattactttcccgagcctgtgaccgtgtcctggaatagcggagcactgacaagcggcgtgcacacctttccagccgtgctgcaaagcagcggcctgtactctctgagcagcgtggtcacagtgcctagctctagcctgggcacccagacctacatctgcaatgtgaaccacaagcctagcaacaccaaggtggacaagagagtggaacccaagagctgtggtaccacaacgccgggcgaaaggagttccttgccggccttttaccccggcacaagcggaagctgtagtgggtgtggaagcctcagcctcccacttcttgcgggcctcgtcgcggcagatgcagtagcttcacttcttattgtaggcgcggtatttctctgtgctcgaccaaggaggtcacccgctcaggaggatggtaaggtgtatataaatatgccaggacgcggaagctctagacgggttaagttttccagatccgcagacgcacccgcttaccaacaagggcagaaccaactctacaatgaacttaatttggggcggagggaagagtacgacgttctggacaaaaggaggggacgagatcccgagatgggcggaaagcctcagcgaaggaagaatccgcaagaggggctttataacgaactccagaaagataaaatggcagaagcctatagtgagattgggatgaagggagaaaggaggaggggtaaaggtcacgatgggttgtaccaaggattgagcacagccactaaagatacctatgatgcgctccacatgcaggccctgccgccaagacgcgccaagagaagcggatctggcgtgaagcagaccctgaatttcgacctgctgaagctggctggcgacgtggaatccaacccaggccctggccatatgtccgactccaaggaggtccctagccttccatttttgcgacacttgctcgaagagttggacagccatgaggacagcttgctgctgtttctgtgtcacgacgcggccccgggctgcacgacggtcacgcaagctttgtgctcgcttagccaacagcgcaagctgaccctcgcggctctggtcgagatgctctacgtgctgcagcgtatggatcttctcaagagccgcttcgggctcagcaaggagggggccgagcaattgctgggcacaagctttctcacgcgctaccgcaagctcatggtttgcgtgggtgaggagctcgactcgagcgagctacgcgctctacgcttgttcgcgtgcaacctgaatccgagcctgagcacggcgctttctgagagcagccgctttgtcgagcttgtactcgcgcttgaaaacgtaggactcgtctcgccatcgagtgtttccgtgcttgcggacatgttgcgcactcttcggcgcctcgatttgtgccagcagcttgttgagtacgaacaacaagagcaagccaggtaccgttactgttacgcggcctcgccctcattgccagttcgtacgttacgtcgggggcacggcgcgagtgaacacgagcagctgtgcatgcccgtgcaagaatcctctgacagccccgagctgctgcgcacgcccgtacaagaatcctccagcgacagccccgagcaaacgact

SEQ ID NO: 2709 - DNA, 3468 bp, synthetic construct
  source 1..3468: mol_type = other DNA
atggccttaccagtgaccgccttgctcctgccgctggccttgctgctccacgccgccaggccgagcagatacctggtcaagcggaccggcgagaaggtgttcctggaatgcgtgcaggacatggaccacgaaaacatgttctggtacagacaggaccccggcctgggcctgagactgatctacttcagctacgacgtgaagatgaaggaaaagggcgacatccccgagggctacagcgtgtccagagagaagaaagagcggttcagcctgatcctggaaagcgccagcaccaaccagaccagcatgtacctgtgtgccagcagcctgtggggcagactggctaagaacatccagtatttcggagccggcaccagactgtctgttctcgagctcgagggacagcctaaggccaatcctaccgtgacactgttccctccaagcagcgaagaactccaggccaacaaggccacacttgtgtgcctgatctccgacttctaccctggggctgtgacagtggcttggaaggccgatggatctcctgtgaaagccggcgtggaaaccaccaagccatccaagcagagcaacaacaaatacgccgccagctcctacctgagcctgacacctgagcagtggaagtcccacagatcctacagctgccaagtgacccacgaaggcagcaccgtggaaaagacagtggcccctacagagtgcagcggatccacaacacctggcgagagaagtagcctgcctgccttctatcctggcaccagcggctcttgttctggctgtggatctctgagcctgcctctgctggctggactggttgctgctgatgctgtggcctctctgctgattgtgggagccgtgttcctgtgcgccagacctagaagaagccccgctcaagaggacggcaaggtgtacatcaacatgcccggcagaggaagcactagtagagtgaagttcagcagaagcgccgacgcccctgcctaccagcagggacagaaccaactgtacaacgagctgaacctgggcagacgggaagagtacgacgtgctggacaagcggagaggcagggaccctgagatgggcggaaagccccagcggagaaagaacccccaggaaggactgtataacgaactccagaaagacaagatggccgaagcctacagcgagatcggcatgaagggcgagcggagaagaggcaagggccacgatggcctgtaccagggcctgagcaccgccaccaaggacacctatgacgccctgcacatgcaggccctgcctccaagaagggccaagcgatctggatctggagcaacaaacttctcactactcaaacaagcaggtgacgtggaggagaatcccgggcctatggactggatttggcgcatccttttccttgtcggcgctgctaccggcgcgcattccttcgaagaggatcaagtgacccagtctcctgaggctctgaggctgcaagagggcgagagcagctctctgaactgctcctacacagtgtctggcctgaggggcctgttttggtataggcaagaccctggcaagggacccgagttcctgttcacactgtactctgccggcgaggaaaaagagaaagaacgcctgaaggccacgctgaccaagaaagagagcttcctgcacatcacagcccctaagcctgaggacagcgccacctatctgtgtgccgtgcaggccaatagaggcagcacactggggagactgtacttcggcagaggcacccagctgaccgtttggcctgatacgcgtgcctctacaaagggaccctccgtgtttcctctggctcccagcagcaagtctacaagcggaggaacagccgctctgggctgcctggtcaaggattactttcccgagcctgtgaccgtgtcctggaatagcggagcactgacaagcggcgtgcacacctttccagccgtgctgcaaagcagcggcctgtactctctgagcagcgtggtcacagtgcctagctctagcctgggcacccagacctacatctgcaatgtgaaccacaagcctagcaacaccaaggtggacaagagagtggaacccaagagctgtggtaccacaacgccgggcgaaaggagttccttgccggccttttaccccggcacaagcggaagctgtagtgggtgtggaagcctcagcctcccacttcttgcgggcctcgtcgcggcagatgcagtagcttcacttcttattgtaggcgcggtatttctctgtgctcgaccaaggaggtcacccgctcaggaggatggtaaggtgtatataaatatgccaggacgcggaagctctagacgggttaagttttccagatccgcagacgcacccgcttaccaacaagggcagaaccaactctacaatgaacttaatttggggcggagggaagagtacgacgttctggacaaaaggaggggacgagatcccgagatgggcggaaagcctcagcgaaggaagaatccgcaagaggggctttataacgaactccagaaagataaaatggcagaagcctatagtgagattgggatgaagggagaaaggaggaggggtaaaggtcacgatgggttgtaccaaggattgagcacagccactaaagatacctatgatgcgctccacatgcaggccctgccgccaagacgcgccaagagaagcggatctggcgtgaagcagaccctgaatttcgacctgctgaagctggctggcgacgtggaatccaacccaggccctggccatatggctctgcctgtgacagctctgctgctgcctctggcactgctgcttcatgctgctagacctagccagtttagagtgtcccctctggacagaacctggaacctgggcgagacagtggaactgaagtgccaggtgctgctgagcaaccctacaagcggctgctcctggctgtttcagcctagaggtgcagccgcctctcctacctttctgctgtacctgagccagaacaagcccaaggccgccgaaggactggacacccagagattcagcggcaagagactgggcgacaccttcgtgctgaccctgagcgacttcagaagagagaacgagggctactacttctgtagcgccctgagcaacagcatcatgtacttcagccacttcgtgcccgtgtttctgcccgccaagcctacaacaacccctgctcctagacctcctacaccagctcctacaatcgccagccagcctctgtctctcagacccgaagcctgtagacctgctgctggcggagctgtgcataccagaggactggatttcgcctgcgacatctacatctgggctcctctggctggcacatgtggcgtgctgctgctgtccctggtcatcaccctgtactgcaaccaccggaacaggcggagagtgtgcaagtgccctagacctgtggtcaagagcggcgacaagcctagcctgagcgccagatatgtt

SEQ ID NO: 2710 - DNA, 3879 bp, synthetic construct
  source 1..3879: mol_type = other DNA
atggccttaccagtgaccgccttgctcctgccgctggccttgctgctccacgccgccaggccggaagtgcagctggttgaatctggcggaggactggttcaggctggcggatctctgagactgtcttgtgccgccagcggcagaacctttagcatgggctggtttagacaggcccctggcaaagagagagagttcgtcgccgccatcacatactctggcggcagcccttactacgccgactctgtgaagggcagattcaccatcagccgggacaacgccaagaacaccgtgtacctccagatgaacagcctgaagcctgaggacaccgccgtgtactactgcgccgccaatccaacatacggcagcgactggaacgccgagaattggggccagggaacccaagtgacagtgtctagcggtaccggcggaggcggatctggcggcggaggtagcggtggcggaggatctgaattcagcagatacctggtcaagcggaccggcgagaaggtgttcctggaatgcgtgcaggacatggaccacgaaaacatgttctggtacagacaggaccccggcctgggcctgagactgatctacttcagctacgacgtgaagatgaaggaaaagggcgacatccccgagggctacagcgtgtccagagagaagaaagagcggttcagcctgatcctggaaagcgccagcaccaaccagaccagcatgtacctgtgtgccagcagcctgtggggcagactggctaagaacatccagtatttcggagccggcaccagactgtctgttctcgagctcgagggacagcctaaggccaatcctaccgtgacactgttccctccaagcagcgaagaactccaggccaacaaggccacacttgtgtgcctgatctccgacttctaccctggggctgtgacagtggcttggaaggccgatggatctcctgtgaaagccggcgtggaaaccaccaagccatccaagcagagcaacaacaaatacgccgccagctcctacctgagcctgacacctgagcagtggaagtcccacagatcctacagctgccaagtgacccacgaaggcagcaccgtggaaaagacagtggcccctacagagtgcagcggatccacaacacctggcgagagaagtagcctgcctgccttctatcctggcaccagcggctcttgttctggctgtggatctctgagcctgcctctgctggctggactggttgctgctgatgctgtggcctctctgctgattgtgggagccgtgttcctgtgcgccagacctagaagaagccccgctcaagaggacggcaaggtgtacatcaacatgcccggcagaggaagcactagtagagtgaagttcagcagaagcgccgacgcccctgcctaccagcagggacagaaccaactgtacaacgagctgaacctgggcagacgggaagagtacgacgtgctggacaagcggagaggcagggaccctgagatgggcggaaagccccagcggagaaagaacccccaggaaggactgtataacgaactccagaaagacaagatggccgaagcctacagcgagatcggcatgaagggcgagcggagaagaggcaagggccacgatggcctgtaccagggcctgagcaccgccaccaaggacacctatgacgccctgcacatgcaggccctgcctccaagaagggccaagcgatctggatctggagcaacaaacttctcactactcaaacaagcaggtgacgtggaggagaatcccgggcctatggactggatttggcgcatccttttccttgtcggcgctgctaccggcgcgcattccttcgaagaggatcaagtgacccagtctcctgaggctctgaggctgcaagagggcgagagcagctctctgaactgctcctacacagtgtctggcctgaggggcctgttttggtataggcaagaccctggcaagggacccgagttcctgttcacactgtactctgccggcgaggaaaaagagaaagaacgcctgaaggccacgctgaccaagaaagagagcttcctgcacatcacagcccctaagcctgaggacagcgccacctatctgtgtgccgtgcaggccaatagaggcagcacactggggagactgtacttcggcagaggcacccagctgaccgtttggcctgatacgcgtgcctctacaaagggaccctccgtgtttcctctggctcccagcagcaagtctacaagcggaggaacagccgctctgggctgcctggtcaaggattactttcccgagcctgtgaccgtgtcctggaatagcggagcactgacaagcggcgtgcacacctttccagccgtgctgcaaagcagcggcctgtactctctgagcagcgtggtcacagtgcctagctctagcctgggcacccagacctacatctgcaatgtgaaccacaagcctagcaacaccaaggtggacaagagagtggaacccaagagctgtggtaccacaacgccgggcgaaaggagttccttgccggccttttaccccggcacaagcggaagctgtagtgggtgtggaagcctcagcctcccacttcttgcgggcctcgtcgcggcagatgcagtagcttcacttcttattgtaggcgcggtatttctctgtgctcgaccaaggaggtcacccgctcaggaggatggtaaggtgtatataaatatgccaggacgcggaagctctagacgggttaagttttccagatccgcagacgcacccgcttaccaacaagggcagaaccaactctacaatgaacttaatttggggcggagggaagagtacgacgttctggacaaaaggaggggacgagatcccgagatgggcggaaagcctcagcgaaggaagaatccgcaagaggggctttataacgaactccagaaagataaaatggcagaagcctatagtgagattgggatgaagggagaaaggaggaggggtaaaggtcacgatgggttgtaccaaggattgagcacagccactaaagatacctatgatgcgctccacatgcaggccctgccgccaagacgcgccaagagaagcggatctggcgtgaagcagaccctgaatttcgacctgctgaagctggctggcgacgtggaatccaacccaggccctggccatatggctctgcctgtgacagctctgctgctgcctctggcactgctgcttcatgctgctagacctagccagtttagagtgtcccctctggacagaacctggaacctgggcgagacagtggaactgaagtgccaggtgctgctgagcaaccctacaagcggctgctcctggctgtttcagcctagaggtgcagccgcctctcctacctttctgctgtacctgagccagaacaagcccaaggccgccgaaggactggacacccagagattcagcggcaagagactgggcgacaccttcgtgctgaccctgagcgacttcagaagagagaacgagggctactacttctgtagcgccctgagcaacagcatcatgtacttcagccacttcgtgcccgtgtttctgcccgccaagcctacaacaacccctgctcctagacctcctacaccagctcctacaatcgccagccagcctctgtctctcagacccgaagcctgtagacctgctgctggcggagctgtgcataccagaggactggatttcgcctgcgacatctacatctgggctcctctggctggcacatgtggcgtgctgctgctgtccctggtcatcaccctgtactgcaaccaccggaacaggcggagagtgtgcaagtgccctagacctgtggtcaagagcggcgacaagcctagcctgagcgccagatatgtt

SEQ ID NO: 2711 - DNA, 4290 bp, synthetic construct
  source 1..4290: mol_type = other DNA
atggccttaccagtgaccgccttgctcctgccgctggccttgctgctccacgccgccaggccggaagtgcagctggttgaatctggcggaggactggttcaggctggcggatctctgagactgtcttgtgccgccagcggcagaacctttagcatgggctggtttagacaggcccctggcaaagagagagagttcgtcgccgccatcacatactctggcggcagcccttactacgccgactctgtgaagggcagattcaccatcagccgggacaacgccaagaacaccgtgtacctccagatgaacagcctgaagcctgaggacaccgccgtgtactactgcgccgccaatccaacatacggcagcgactggaacgccgagaattggggccagggaacccaagtgacagtgtctagcggtaccggcggaggcggatctggcggcggaggtagcggtggcggaggatctgaattcagcagatacctggtcaagcggaccggcgagaaggtgttcctggaatgcgtgcaggacatggaccacgaaaacatgttctggtacagacaggaccccggcctgggcctgagactgatctacttcagctacgacgtgaagatgaaggaaaagggcgacatccccgagggctacagcgtgtccagagagaagaaagagcggttcagcctgatcctggaaagcgccagcaccaaccagaccagcatgtacctgtgtgccagcagcctgtggggcagactggctaagaacatccagtatttcggagccggcaccagactgtctgttctcgagctcgagggacagcctaaggccaatcctaccgtgacactgttccctccaagcagcgaagaactccaggccaacaaggccacacttgtgtgcctgatctccgacttctaccctggggctgtgacagtggcttggaaggccgatggatctcctgtgaaagccggcgtggaaaccaccaagccatccaagcagagcaacaacaaatacgccgccagctcctacctgagcctgacacctgagcagtggaagtcccacagatcctacagctgccaagtgacccacgaaggcagcaccgtggaaaagacagtggcccctacagagtgcagcggatccacaacacctggcgagagaagtagcctgcctgccttctatcctggcaccagcggctcttgttctggctgtggatctctgagcctgcctctgctggctggactggttgctgctgatgctgtggcctctctgctgattgtgggagccgtgttcctgtgcgccagacctagaagaagccccgctcaagaggacggcaaggtgtacatcaacatgcccggcagaggaagcactagtagagtgaagttcagcagaagcgccgacgcccctgcctaccagcagggacagaaccaactgtacaacgagctgaacctgggcagacgggaagagtacgacgtgctggacaagcggagaggcagggaccctgagatgggcggaaagccccagcggagaaagaacccccaggaaggactgtataacgaactccagaaagacaagatggccgaagcctacagcgagatcggcatgaagggcgagcggagaagaggcaagggccacgatggcctgtaccagggcctgagcaccgccaccaaggacacctatgacgccctgcacatgcaggccctgcctccaagaagggccaagcgatctggatctggagcaacaaacttctcactactcaaacaagcaggtgacgtggaggagaatcccgggcctatggactggatttggcgcatccttttccttgtcggcgctgctaccggcgcgcattccgggcccgaagtgcaactggttgaatccggtggcggcctggtgcaagcaggcggatctctcagacttagctgtgccgcctccggcagaaccttcacaatgggatggtttaggcaggctccagggaaagagagagagttcgtcgccgccatctctctgtctcccacactggcctactacgccgactctgtgaaaggccggttcaccatctccagagataatgccaagaacaccgtggtgctgcaaatgaactctctgaaacccgaggatacagccctgtactattgtgccgctgaccggaagtccgtgatgagcatcagacccgattactggggacagggcacacaagtcacagtgtcctctggatccggcggcggaggatctggcggaggcggatctgggggcggaggctctttcgaagaggatcaagtgacccagtctcctgaggctctgaggctgcaagagggcgagagcagctctctgaactgctcctacacagtgtctggcctgaggggcctgttttggtataggcaagaccctggcaagggacccgagttcctgttcacactgtactctgccggcgaggaaaaagagaaagaacgcctgaaggccacgctgaccaagaaagagagcttcctgcacatcacagcccctaagcctgaggacagcgccacctatctgtgtgccgtgcaggccaatagaggcagcacactggggagactgtacttcggcagaggcacccagctgaccgtttggcctgatacgcgtgcctctacaaagggaccctccgtgtttcctctggctcccagcagcaagtctacaagcggaggaacagccgctctgggctgcctggtcaaggattactttcccgagcctgtgaccgtgtcctggaatagcggagcactgacaagcggcgtgcacacctttccagccgtgctgcaaagcagcggcctgtactctctgagcagcgtggtcacagtgcctagctctagcctgggcacccagacctacatctgcaatgtgaaccacaagcctagcaacaccaaggtggacaagagagtggaacccaagagctgtggtaccacaacgccgggcgaaaggagttccttgccggccttttaccccggcacaagcggaagctgtagtgggtgtggaagcctcagcctcccacttcttgcgggcctcgtcgcggcagatgcagtagcttcacttcttattgtaggcgcggtatttctctgtgctcgaccaaggaggtcacccgctcaggaggatggtaaggtgtatataaatatgccaggacgcggaagctctagacgggttaagttttccagatccgcagacgcacccgcttaccaacaagggcagaaccaactctacaatgaacttaatttggggcggagggaagagtacgacgttctggacaaaaggaggggacgagatcccgagatgggcggaaagcctcagcgaaggaagaatccgcaagaggggctttataacgaactccagaaagataaaatggcagaagcctatagtgagattgggatgaagggagaaaggaggaggggtaaaggtcacgatgggttgtaccaaggattgagcacagccactaaagatacctatgatgcgctccacatgcaggccctgccgccaagacgcgccaagagaagcggatctggcgtgaagcagaccctgaatttcgacctgctgaagctggctggcgacgtggaatccaacccaggccctggccatatggctctgcctgtgacagctctgctgctgcctctggcactgctgcttcatgctgctagacctagccagtttagagtgtcccctctggacagaacctggaacctgggcgagacagtggaactgaagtgccaggtgctgctgagcaaccctacaagcggctgctcctggctgtttcagcctagaggtgcagccgcctctcctacctttctgctgtacctgagccagaacaagcccaaggccgccgaaggactggacacccagagattcagcggcaagagactgggcgacaccttcgtgctgaccctgagcgacttcagaagagagaacgagggctactacttctgtagcgccctgagcaacagcatcatgtacttcagccacttcgtgcccgtgtttctgcccgccaagcctacaacaacccctgctcctagacctcctacaccagctcctacaatcgccagccagcctctgtctctcagacccgaagcctgtagacctgctgctggcggagctgtgcataccagaggactggatttcgcctgcgacatctacatctgggctcctctggctggcacatgtggcgtgctgctgctgtccctggtcatcaccctgtactgcaaccaccggaacaggcggagagtgtgcaagtgccctagacctgtggtcaagagcggcgacaagcctagcctgagcgccagatatgtt

SEQ ID NO: 2712 - DNA, 2445 bp, synthetic construct
  source 1..2445: mol_type = other DNA
atggccttaccagtgaccgccttgctcctgccgctggccttgctgctccacgccgccaggccggaattcagcagatacctggtcaagcggaccggcgagaaggtgttcctggaatgcgtgcaggacatggaccacgaaaacatgttctggtacagacaggaccccggcctgggcctgagactgatctacttcagctacgacgtgaagatgaaggaaaagggcgacatccccgagggctacagcgtgtccagagagaagaaagagcggttcagcctgatcctggaaagcgccagcaccaaccagaccagcatgtacctgtgtgccagcagcctgtggggcagactggctaagaacatccagtatttcggagccggcaccagactgtctgttctcgagctcgaggacctgaagaacgtgttcccacctgaggtggccgtgttcgagcctagcgaggccgagatcagccacacccagaaagccaccctcgtgtgcctggctaccggcttctaccccgaccatgtggaactgtcttggtgggtcaacggcaaagaggtgcacagcggcgtgtctaccgacccccagccactgaaagaacagcccgccctgaacgacagccggtactgcctgagcagcagactgagagtgtccgccaccttctggcagaacccccggaaccacttcagatgccaggtgcagttctacggcctgagcgagaacgacgagtggacccaggacagagccaagcccgtgacccagatcgtgtctgccgaagcctggggcagagccgattgcggatcccagagcttcggcctgctggaccccaagctgtgctacctgctggatggcatcctgttcatctacggcgtgatcctgaccgccctgttcctgagagtgaagttcagcagaagcgccgacgcccctgcctaccagcagggacagaaccaactgtacaacgagctgaacctgggcagacgggaagagtacgacgtgctggacaagcggagaggcagggaccctgagatgggcggaaagccccagcggagaaagaacccccaggaaggactgtataacgaactccagaaagacaagatggccgaagcctacagcgagatcggcatgaagggcgagcggagaagaggcaagggccacgatggcctgtaccagggcctgagcaccgccaccaaggacacctatgacgccctgcacatgcaggccctgcctccaagaagggccaagcgatctggatctggagcaacaaacttctcactactcaaacaagcaggtgacgtggaggagaatcccgggcctactagtatggactggatttggcgcatccttttccttgtcggcgctgctaccggcgcgcattccttcgaagaggatcaagtgacccagtctcctgaggctctgaggctgcaagagggcgagagcagctctctgaactgctcctacacagtgtctggcctgaggggcctgttttggtataggcaagaccctggcaagggacccgagttcctgttcacactgtactctgccggcgaggaaaaagagaaagaacgcctgaaggccacgctgaccaagaaagagagcttcctgcacatcacagcccctaagcctgaggacagcgccacctatctgtgtgccgtgcaggccaatagaggcagcacactggggagactgtacttcggcagaggcacccagctgaccgtttggcctgatacgcgtatccagaaccctgatcctgccgtgtaccagctgcgggatagcaagagcagcgacaagagcgtgtgtctgttcaccgacttcgacagccagaccaacgtgtcccagagcaaggactccgacgtgtacatcaccgataagaccgtgctggacatgcggagcatggacttcaagagcaactccgccgtggcctggtccaacaagtccgatttcgcctgcgccaacgccttcaacaacagcattatccccgaggacacattcttcccaagccccgagagcagctgcggtacccagagttttgggttgttggaccctaaattgtgctatctgttggacggaatcctgttcatttacggagtgatcctgaccgcattgttcctgcgggttaagttttccagatccgcagacgcacccgcttaccaacaagggcagaaccaactctacaatgaacttaatttggggcggagggaagagtacgacgttctggacaaaaggaggggacgagatcccgagatgggcggaaagcctcagcgaaggaagaatccgcaagaggggctttataacgaactccagaaagataaaatggcagaagcctatagtgagattgggatgaagggagaaaggaggaggggtaaaggtcacgatgggttgtaccaaggattgagcacagccactaaagatacctatgatgcgctccacatgcaggccctgccgccaagataa

SEQ ID NO: 2713 - DNA, 2571 bp, synthetic construct
  source 1..2571: mol_type = other DNA
atggccttaccagtgaccgccttgctcctgccgctggccttgctgctccacgccgccaggccggaattcagcagatacctggtcaagcggaccggcgagaaggtgttcctggaatgcgtgcaggacatggaccacgaaaacatgttctggtacagacaggaccccggcctgggcctgagactgatctacttcagctacgacgtgaagatgaaggaaaagggcgacatccccgagggctacagcgtgtccagagagaagaaagagcggttcagcctgatcctggaaagcgccagcaccaaccagaccagcatgtacctgtgtgccagcagcctgtggggcagactggctaagaacatccagtatttcggagccggcaccagactgtctgttctcgagctcgaggacctgaagaacgtgttcccacctgaggtggccgtgttcgagcctagcgaggccgagatcagccacacccagaaagccaccctcgtgtgcctggctaccggcttctaccccgaccatgtggaactgtcttggtgggtcaacggcaaagaggtgcacagcggcgtgtctaccgacccccagccactgaaagaacagcccgccctgaacgacagccggtactgcctgagcagcagactgagagtgtccgccaccttctggcagaacccccggaaccacttcagatgccaggtgcagttctacggcctgagcgagaacgacgagtggacccaggacagagccaagcccgtgacccagatcgtgtctgccgaagcctggggcagagccgattgcggatcccagagcttcggcctgctggaccccaagctgtgctacctgctggatggcatcctgttcatctacggcgtgatcctgaccgccctgttcctgagagtgaagttcagcagaagcgccgacgcccctgcctaccagcagggacagaaccaactgtacaacgagctgaacctgggcagacgggaagagtacgacgtgctggacaagcggagaggcagggaccctgagatgggcggaaagccccagcggagaaagaacccccaggaaggactgtataacgaactccagaaagacaagatggccgaagcctacagcgagatcggcatgaagggcgagcggagaagaggcaagggccacgatggcctgtaccagggcctgagcaccgccaccaaggacacctatgacgccctgcacatgcaggccctgcctccaagaagggccaagcgatctggatctggagcaacaaacttctcactactcaaacaagcaggtgacgtggaggagaatcccgggcctactagtatggactggatttggcgcatccttttccttgtcggcgctgctaccggcgcgcattccttcgaagaggatcaagtgacccagtctcctgaggctctgaggctgcaagagggcgagagcagctctctgaactgctcctacacagtgtctggcctgaggggcctgttttggtataggcaagaccctggcaagggacccgagttcctgttcacactgtactctgccggcgaggaaaaagagaaagaacgcctgaaggccacgctgaccaagaaagagagcttcctgcacatcacagcccctaagcctgaggacagcgccacctatctgtgtgccgtgcaggccaatagaggcagcacactggggagactgtacttcggcagaggcacccagctgaccgtttggcctgatacgcgtatccagaaccctgatcctgccgtgtaccagctgcgggatagcaagagcagcgacaagagcgtgtgtctgttcaccgacttcgacagccagaccaacgtgtcccagagcaaggactccgacgtgtacatcaccgataagaccgtgctggacatgcggagcatggacttcaagagcaactccgccgtggcctggtccaacaagtccgatttcgcctgcgccaacgccttcaacaacagcattatccccgaggacacattcttcccaagccccgagagcagctgcggtacccagagcttcggcctgctggaccccaagctgtgctacctgctggatggcatcctgttcatctacggcgtgatcctgaccgccctgttcctgaaacggggcagaaagaaactcctgtatatattcaaacaaccatttatgagaccagtacaaactactcaagaggaagatggctgtagctgccgatttccagaagaagaagaaggaggatgtgaactgagagtgaagttcagcagaagcgccgacgcccctgcctaccagcagggacagaaccaactgtacaacgagctgaacctgggcagacgggaagagtacgacgtgctggacaagcggagaggcagggaccctgagatgggcggaaagccccagcggagaaagaacccccaggaaggactgtataacgaactccagaaagacaagatggccgaagcctacagcgagatcggcatgaagggcgagcggagaagaggcaagggccacgatggcctgtaccagggcctgagcaccgccaccaaggacacctatgacgccctgcacatgcaggccctgcctccaagataa

SEQ ID NO: 2714 - DNA, 2568 bp, synthetic construct
  source 1..2568: mol_type = other DNA
atggccttaccagtgaccgccttgctcctgccgctggccttgctgctccacgccgccaggccggaattcagcagatacctggtcaagcggaccggcgagaaggtgttcctggaatgcgtgcaggacatggaccacgaaaacatgttctggtacagacaggaccccggcctgggcctgagactgatctacttcagctacgacgtgaagatgaaggaaaagggcgacatccccgagggctacagcgtgtccagagagaagaaagagcggttcagcctgatcctggaaagcgccagcaccaaccagaccagcatgtacctgtgtgccagcagcctgtggggcagactggctaagaacatccagtatttcggagccggcaccagactgtctgttctcgagctcgaggacctgaagaacgtgttcccacctgaggtggccgtgttcgagcctagcgaggccgagatcagccacacccagaaagccaccctcgtgtgcctggctaccggcttctaccccgaccatgtggaactgtcttggtgggtcaacggcaaagaggtgcacagcggcgtgtctaccgacccccagccactgaaagaacagcccgccctgaacgacagccggtactgcctgagcagcagactgagagtgtccgccaccttctggcagaacccccggaaccacttcagatgccaggtgcagttctacggcctgagcgagaacgacgagtggacccaggacagagccaagcccgtgacccagatcgtgtctgccgaagcctggggcagagccgattgcggatcccagagcttcggcctgctggaccccaagctgtgctacctgctggatggcatcctgttcatctacggcgtgatcctgaccgccctgttcctgagagtgaagttcagcagaagcgccgacgcccctgcctaccagcagggacagaaccaactgtacaacgagctgaacctgggcagacgggaagagtacgacgtgctggacaagcggagaggcagggaccctgagatgggcggaaagccccagcggagaaagaacccccaggaaggactgtataacgaactccagaaagacaagatggccgaagcctacagcgagatcggcatgaagggcgagcggagaagaggcaagggccacgatggcctgtaccagggcctgagcaccgccaccaaggacacctatgacgccctgcacatgcaggccctgcctccaagaagggccaagcgatctggatctggagcaacaaacttctcactactcaaacaagcaggtgacgtggaggagaatcccgggcctactagtatggactggatttggcgcatccttttccttgtcggcgctgctaccggcgcgcattccttcgaagaggatcaagtgacccagtctcctgaggctctgaggctgcaagagggcgagagcagctctctgaactgctcctacacagtgtctggcctgaggggcctgttttggtataggcaagaccctggcaagggacccgagttcctgttcacactgtactctgccggcgaggaaaaagagaaagaacgcctgaaggccacgctgaccaagaaagagagcttcctgcacatcacagcccctaagcctgaggacagcgccacctatctgtgtgccgtgcaggccaatagaggcagcacactggggagactgtacttcggcagaggcacccagctgaccgtttggcctgatacgcgtatccagaaccctgatcctgccgtgtaccagctgcgggatagcaagagcagcgacaagagcgtgtgtctgttcaccgacttcgacagccagaccaacgtgtcccagagcaaggactccgacgtgtacatcaccgataagaccgtgctggacatgcggagcatggacttcaagagcaactccgccgtggcctggtccaacaagtccgatttcgcctgcgccaacgccttcaacaacagcattatccccgaggacacattcttcccaagccccgagagcagctgcggtacccagagcttcggcctgctggaccccaagctgtgctacctgctggatggcatcctgttcatctacggcgtgatcctgaccgccctgttcctgaggagtaagaggagcaggctcctgcacagtgactacatgaacatgactccacgccgccccggacccacccgcaagcattaccagccctatgccccaccacgcgacttcgcagcctatcgctccagagtgaagttcagcagaagcgccgacgcccctgcctaccagcagggacagaaccaactgtacaacgagctgaacctgggcagacgggaagagtacgacgtgctggacaagcggagaggcagggaccctgagatgggcggaaagccccagcggagaaagaacccccaggaaggactgtataacgaactccagaaagacaagatggccgaagcctacagcgagatcggcatgaagggcgagcggagaagaggcaagggccacgatggcctgtaccagggcctgagcaccgccaccaaggacacctatgacgccctgcacatgcaggccctgcctccaagataa

SEQ ID NO: 2715 - DNA, 2553 bp, synthetic construct
  source 1..2553: mol_type = other DNA
atggccttaccagtgaccgccttgctcctgccgctggccttgctgctccacgccgccaggccggaattcagcagatacctggtcaagcggaccggcgagaaggtgttcctggaatgcgtgcaggacatggaccacgaaaacatgttctggtacagacaggaccccggcctgggcctgagactgatctacttcagctacgacgtgaagatgaaggaaaagggcgacatccccgagggctacagcgtgtccagagagaagaaagagcggttcagcctgatcctggaaagcgccagcaccaaccagaccagcatgtacctgtgtgccagcagcctgtggggcagactggctaagaacatccagtatttcggagccggcaccagactgtctgttctcgagctcgaggacctgaagaacgtgttcccacctgaggtggccgtgttcgagcctagcgaggccgagatcagccacacccagaaagccaccctcgtgtgcctggctaccggcttctaccccgaccatgtggaactgtcttggtgggtcaacggcaaagaggtgcacagcggcgtgtctaccgacccccagccactgaaagaacagcccgccctgaacgacagccggtactgcctgagcagcagactgagagtgtccgccaccttctggcagaacccccggaaccacttcagatgccaggtgcagttctacggcctgagcgagaacgacgagtggacccaggacagagccaagcccgtgacccagatcgtgtctgccgaagcctggggcagagccgattgcggatcccagagcttcggcctgctggaccccaagctgtgctacctgctggatggcatcctgttcatctacggcgtgatcctgaccgccctgttcctgagagtgaagttcagcagaagcgccgacgcccctgcctaccagcagggacagaaccaactgtacaacgagctgaacctgggcagacgggaagagtacgacgtgctggacaagcggagaggcagggaccctgagatgggcggaaagccccagcggagaaagaacccccaggaaggactgtataacgaactccagaaagacaagatggccgaagcctacagcgagatcggcatgaagggcgagcggagaagaggcaagggccacgatggcctgtaccagggcctgagcaccgccaccaaggacacctatgacgccctgcacatgcaggccctgcctccaagaagggccaagcgatctggatctggagcaacaaacttctcactactcaaacaagcaggtgacgtggaggagaatcccgggcctactagtatggactggatttggcgcatccttttccttgtcggcgctgctaccggcgcgcattccttcgaagaggatcaagtgacccagtctcctgaggctctgaggctgcaagagggcgagagcagctctctgaactgctcctacacagtgtctggcctgaggggcctgttttggtataggcaagaccctggcaagggacccgagttcctgttcacactgtactctgccggcgaggaaaaagagaaagaacgcctgaaggccacgctgaccaagaaagagagcttcctgcacatcacagcccctaagcctgaggacagcgccacctatctgtgtgccgtgcaggccaatagaggcagcacactggggagactgtacttcggcagaggcacccagctgaccgtttggcctgatacgcgtatccagaaccctgatcctgccgtgtaccagctgcgggatagcaagagcagcgacaagagcgtgtgtctgttcaccgacttcgacagccagaccaacgtgtcccagagcaaggactccgacgtgtacatcaccgataagaccgtgctggacatgcggagcatggacttcaagagcaactccgccgtggcctggtccaacaagtccgatttcgcctgcgccaacgccttcaacaacagcattatccccgaggacacattcttcccaagccccgagagcagctgcggtacccagagcttcggcctgctggaccccaagctgtgctacctgctggatggcatcctgttcatctacggcgtgatcctgaccgccctgttcctgagggaccaaagactgcctcctgacgctcacaaacctccaggcggaggcagcttcagaacccctatccaagaggaacaggctgacgcccacagcaccctggcaaaaattagagtgaagttcagcagaagcgccgacgcccctgcctaccagcagggacagaaccaactgtacaacgagctgaacctgggcagacgggaagagtacgacgtgctggacaagcggagaggcagggaccctgagatgggcggaaagccccagcggagaaagaacccccaggaaggactgtataacgaactccagaaagacaagatggccgaagcctacagcgagatcggcatgaagggcgagcggagaagaggcaagggccacgatggcctgtaccagggcctgagcaccgccaccaaggacacctatgacgccctgcacatgcaggccctgcctccaagataa

SEQ ID NO: 2716 - DNA, 2805 bp, synthetic construct
  source 1..2805: mol_type = other DNA
atggccttaccagtgaccgccttgctcctgccgctggccttgctgctccacgccgccaggccggaattcagcagatacctggtcaagcggaccggcgagaaggtgttcctggaatgcgtgcaggacatggaccacgaaaacatgttctggtacagacaggaccccggcctgggcctgagactgatctacttcagctacgacgtgaagatgaaggaaaagggcgacatccccgagggctacagcgtgtccagagagaagaaagagcggttcagcctgatcctggaaagcgccagcaccaaccagaccagcatgtacctgtgtgccagcagcctgtggggcagactggctaagaacatccagtatttcggagccggcaccagactgtctgttctcgagctcgaggacctgaagaacgtgttcccacctgaggtggccgtgttcgagcctagcgaggccgagatcagccacacccagaaagccaccctcgtgtgcctggctaccggcttctaccccgaccatgtggaactgtcttggtgggtcaacggcaaagaggtgcacagcggcgtgtctaccgacccccagccactgaaagaacagcccgccctgaacgacagccggtactgcctgagcagcagactgagagtgtccgccaccttctggcagaacccccggaaccacttcagatgccaggtgcagttctacggcctgagcgagaacgacgagtggacccaggacagagccaagcccgtgacccagatcgtgtctgccgaagcctggggcagagccgattgcggatcccagagcttcggcctgctggaccccaagctgtgctacctgctggatggcatcctgttcatctacggcgtgatcctgaccgccctgttcctgagagtgaagttcagcagaagcgccgacgcccctgcctaccagcagggacagaaccaactgtacaacgagctgaacctgggcagacgggaagagtacgacgtgctggacaagcggagaggcagggaccctgagatgggcggaaagccccagcggagaaagaacccccaggaaggactgtataacgaactccagaaagacaagatggccgaagcctacagcgagatcggcatgaagggcgagcggagaagaggcaagggccacgatggcctgtaccagggcctgagcaccgccaccaaggacacctatgacgccctgcacatgcaggccctgcctccaagaagggccaagcgatctggatctggagcaacaaacttctcactactcaaacaagcaggtgacgtggaggagaatcccgggcctactagtatggactggatttggcgcatccttttccttgtcggcgctgctaccggcgcgcattccttcgaagaggatcaagtgacccagtctcctgaggctctgaggctgcaagagggcgagagcagctctctgaactgctcctacacagtgtctggcctgaggggcctgttttggtataggcaagaccctggcaagggacccgagttcctgttcacactgtactctgccggcgaggaaaaagagaaagaacgcctgaaggccacgctgaccaagaaagagagcttcctgcacatcacagcccctaagcctgaggacagcgccacctatctgtgtgccgtgcaggccaatagaggcagcacactggggagactgtacttcggcagaggcacccagctgaccgtttggcctgatacgcgtatccagaaccctgatcctgccgtgtaccagctgcgggatagcaagagcagcgacaagagcgtgtgtctgttcaccgacttcgacagccagaccaacgtgtcccagagcaaggactccgacgtgtacatcaccgataagaccgtgctggacatgcggagcatggacttcaagagcaactccgccgtggcctggtccaacaagtccgatttcgcctgcgccaacgccttcaacaacagcattatccccgaggacacattcttcccaagccccgagagcagctgcggtacccagagcttcggcctgctggaccccaagctgtgctacctgctggatggcatcctgttcatctacggcgtgatcctgaccgccctgttcctgtggcggcggaagcggaaagagaagcagtctgagacaagccccaaagagttcctgaccatctacgaggacgtgaaggacctgaaaacccggcggaaccacgaacaagagcagacctttcctggcggaggcagcaccatctacagcatgatccagagccagagcagcgcccctacaagccaagagcctgcctacacactgtactccctgatccagcctagcagaaagagcggcagccggaagagaaatcacagccccagcttcaacagcacgatctacgaagtgatcggcaagagccagccaaaggctcagaaccctgccagactgagccggaaagagctggaaaacttcgacgtgtacagcagagtgaagttcagcagaagcgccgacgcccctgcctaccagcagggacagaaccaactgtacaacgagctgaacctgggcagacgggaagagtacgacgtgctggacaagcggagaggcagggaccctgagatgggcggaaagccccagcggagaaagaacccccaggaaggactgtataacgaactccagaaagacaagatggccgaagcctacagcgagatcggcatgaagggcgagcggagaagaggcaagggccacgatggcctgtaccagggcctgagcaccgccaccaaggacacctatgacgccctgcacatgcaggccctgcctccaagataa

SEQ ID NO: 2717 - DNA, 2694 bp, synthetic construct
  source 1..2694: mol_type = other DNA
atggccttaccagtgaccgccttgctcctgccgctggccttgctgctccacgccgccaggccggaattcagcagatacctggtcaagcggaccggcgagaaggtgttcctggaatgcgtgcaggacatggaccacgaaaacatgttctggtacagacaggaccccggcctgggcctgagactgatctacttcagctacgacgtgaagatgaaggaaaagggcgacatccccgagggctacagcgtgtccagagagaagaaagagcggttcagcctgatcctggaaagcgccagcaccaaccagaccagcatgtacctgtgtgccagcagcctgtggggcagactggctaagaacatccagtatttcggagccggcaccagactgtctgttctcgagctcgaggacctgaagaacgtgttcccacctgaggtggccgtgttcgagcctagcgaggccgagatcagccacacccagaaagccaccctcgtgtgcctggctaccggcttctaccccgaccatgtggaactgtcttggtgggtcaacggcaaagaggtgcacagcggcgtgtctaccgacccccagccactgaaagaacagcccgccctgaacgacagccggtactgcctgagcagcagactgagagtgtccgccaccttctggcagaacccccggaaccacttcagatgccaggtgcagttctacggcctgagcgagaacgacgagtggacccaggacagagccaagcccgtgacccagatcgtgtctgccgaagcctggggcagagccgattgcggatcccagagcttcggcctgctggaccccaagctgtgctacctgctggatggcatcctgttcatctacggcgtgatcctgaccgccctgttcctgaggagtaagaggagcaggctcctgcacagtgactacatgaacatgactccacgccgccccggacccacccgcaagcattaccagccctatgccccaccacgcgacttcgcagcctatcgctccagagtgaagttcagcagaagcgccgacgcccctgcctaccagcagggacagaaccaactgtacaacgagctgaacctgggcagacgggaagagtacgacgtgctggacaagcggagaggcagggaccctgagatgggcggaaagccccagcggagaaagaacccccaggaaggactgtataacgaactccagaaagacaagatggccgaagcctacagcgagatcggcatgaagggcgagcggagaagaggcaagggccacgatggcctgtaccagggcctgagcaccgccaccaaggacacctatgacgccctgcacatgcaggccctgcctccaagaagggccaagcgatctggatctggagcaacaaacttctcactactcaaacaagcaggtgacgtggaggagaatcccgggcctactagtatggactggatttggcgcatccttttccttgtcggcgctgctaccggcgcgcattccttcgaagaggatcaagtgacccagtctcctgaggctctgaggctgcaagagggcgagagcagctctctgaactgctcctacacagtgtctggcctgaggggcctgttttggtataggcaagaccctggcaagggacccgagttcctgttcacactgtactctgccggcgaggaaaaagagaaagaacgcctgaaggccacgctgaccaagaaagagagcttcctgcacatcacagcccctaagcctgaggacagcgccacctatctgtgtgccgtgcaggccaatagaggcagcacactggggagactgtacttcggcagaggcacccagctgaccgtttggcctgatacgcgtatccagaaccctgatcctgccgtgtaccagctgcgggatagcaagagcagcgacaagagcgtgtgtctgttcaccgacttcgacagccagaccaacgtgtcccagagcaaggactccgacgtgtacatcaccgataagaccgtgctggacatgcggagcatggacttcaagagcaactccgccgtggcctggtccaacaagtccgatttcgcctgcgccaacgccttcaacaacagcattatccccgaggacacattcttcccaagccccgagagcagctgcggtacccagagcttcggcctgctggaccccaagctgtgctacctgctggatggcatcctgttcatctacggcgtgatcctgaccgccctgttcctgaaacggggcagaaagaaactcctgtatatattcaaacaaccatttatgagaccagtacaaactactcaagaggaagatggctgtagctgccgatttccagaagaagaagaaggaggatgtgaactgagagtgaagttcagcagaagcgccgacgcccctgcctaccagcagggacagaaccaactgtacaacgagctgaacctgggcagacgggaagagtacgacgtgctggacaagcggagaggcagggaccctgagatgggcggaaagccccagcggagaaagaacccccaggaaggactgtataacgaactccagaaagacaagatggccgaagcctacagcgagatcggcatgaagggcgagcggagaagaggcaagggccacgatggcctgtaccagggcctgagcaccgccaccaaggacacctatgacgccctgcacatgcaggccctgcctccaagataa

SEQ ID NO: 2718 - DNA, 2691 bp, synthetic construct
  source 1..2691: mol_type = other DNA
atggccttaccagtgaccgccttgctcctgccgctggccttgctgctccacgccgccaggccggaattcagcagatacctggtcaagcggaccggcgagaaggtgttcctggaatgcgtgcaggacatggaccacgaaaacatgttctggtacagacaggaccccggcctgggcctgagactgatctacttcagctacgacgtgaagatgaaggaaaagggcgacatccccgagggctacagcgtgtccagagagaagaaagagcggttcagcctgatcctggaaagcgccagcaccaaccagaccagcatgtacctgtgtgccagcagcctgtggggcagactggctaagaacatccagtatttcggagccggcaccagactgtctgttctcgagctcgaggacctgaagaacgtgttcccacctgaggtggccgtgttcgagcctagcgaggccgagatcagccacacccagaaagccaccctcgtgtgcctggctaccggcttctaccccgaccatgtggaactgtcttggtgggtcaacggcaaagaggtgcacagcggcgtgtctaccgacccccagccactgaaagaacagcccgccctgaacgacagccggtactgcctgagcagcagactgagagtgtccgccaccttctggcagaacccccggaaccacttcagatgccaggtgcagttctacggcctgagcgagaacgacgagtggacccaggacagagccaagcccgtgacccagatcgtgtctgccgaagcctggggcagagccgattgcggatcccagagcttcggcctgctggaccccaagctgtgctacctgctggatggcatcctgttcatctacggcgtgatcctgaccgccctgttcctgaggagtaagaggagcaggctcctgcacagtgactacatgaacatgactccacgccgccccggacccacccgcaagcattaccagccctatgccccaccacgcgacttcgcagcctatcgctccagagtgaagttcagcagaagcgccgacgcccctgcctaccagcagggacagaaccaactgtacaacgagctgaacctgggcagacgggaagagtacgacgtgctggacaagcggagaggcagggaccctgagatgggcggaaagccccagcggagaaagaacccccaggaaggactgtataacgaactccagaaagacaagatggccgaagcctacagcgagatcggcatgaagggcgagcggagaagaggcaagggccacgatggcctgtaccagggcctgagcaccgccaccaaggacacctatgacgccctgcacatgcaggccctgcctccaagaagggccaagcgatctggatctggagcaacaaacttctcactactcaaacaagcaggtgacgtggaggagaatcccgggcctactagtatggactggatttggcgcatccttttccttgtcggcgctgctaccggcgcgcattccttcgaagaggatcaagtgacccagtctcctgaggctctgaggctgcaagagggcgagagcagctctctgaactgctcctacacagtgtctggcctgaggggcctgttttggtataggcaagaccctggcaagggacccgagttcctgttcacactgtactctgccggcgaggaaaaagagaaagaacgcctgaaggccacgctgaccaagaaagagagcttcctgcacatcacagcccctaagcctgaggacagcgccacctatctgtgtgccgtgcaggccaatagaggcagcacactggggagactgtacttcggcagaggcacccagctgaccgtttggcctgatacgcgtatccagaaccctgatcctgccgtgtaccagctgcgggatagcaagagcagcgacaagagcgtgtgtctgttcaccgacttcgacagccagaccaacgtgtcccagagcaaggactccgacgtgtacatcaccgataagaccgtgctggacatgcggagcatggacttcaagagcaactccgccgtggcctggtccaacaagtccgatttcgcctgcgccaacgccttcaacaacagcattatccccgaggacacattcttcccaagccccgagagcagctgcggtacccagagttttgggttgttggaccctaaattgtgctatctgttggacggaatcctgttcatttacggagtgatcctgaccgcattgttcctgaggagcaagcggtcacggctgctccacagcgattacatgaatatgacaccacgaagaccgggtcctactcgcaaacactaccaaccctacgcacctccccgcgactttgcagcgtaccgatctcgggttaagttttccagatccgcagacgcacccgcttaccaacaagggcagaaccaactctacaatgaacttaatttggggcggagggaagagtacgacgttctggacaaaaggaggggacgagatcccgagatgggcggaaagcctcagcgaaggaagaatccgcaagaggggctttataacgaactccagaaagataaaatggcagaagcctatagtgagattgggatgaagggagaaaggaggaggggtaaaggtcacgatgggttgtaccaaggattgagcacagccactaaagatacctatgatgcgctccacatgcaggccctgccgccaagataa

SEQ ID NO: 2719 - DNA, 2694 bp, synthetic construct
  source 1..2694: mol_type = other DNA
atggccttaccagtgaccgccttgctcctgccgctggccttgctgctccacgccgccaggccggaattcagcagatacctggtcaagcggaccggcgagaaggtgttcctggaatgcgtgcaggacatggaccacgaaaacatgttctggtacagacaggaccccggcctgggcctgagactgatctacttcagctacgacgtgaagatgaaggaaaagggcgacatccccgagggctacagcgtgtccagagagaagaaagagcggttcagcctgatcctggaaagcgccagcaccaaccagaccagcatgtacctgtgtgccagcagcctgtggggcagactggctaagaacatccagtatttcggagccggcaccagactgtctgttctcgagctcgaggacctgaagaacgtgttcccacctgaggtggccgtgttcgagcctagcgaggccgagatcagccacacccagaaagccaccctcgtgtgcctggctaccggcttctaccccgaccatgtggaactgtcttggtgggtcaacggcaaagaggtgcacagcggcgtgtctaccgacccccagccactgaaagaacagcccgccctgaacgacagccggtactgcctgagcagcagactgagagtgtccgccaccttctggcagaacccccggaaccacttcagatgccaggtgcagttctacggcctgagcgagaacgacgagtggacccaggacagagccaagcccgtgacccagatcgtgtctgccgaagcctggggcagagccgattgcggatcccagagcttcggcctgctggaccccaagctgtgctacctgctggatggcatcctgttcatctacggcgtgatcctgaccgccctgttcctgaggagtaagaggagcaggctcctgcacagtgactacatgaacatgactccacgccgccccggacccacccgcaagcattaccagccctatgccccaccacgcgacttcgcagcctatcgctccagagtgaagttcagcagaagcgccgacgcccctgcctaccagcagggacagaaccaactgtacaacgagctgaacctgggcagacgggaagagtacgacgtgctggacaagcggagaggcagggaccctgagatgggcggaaagccccagcggagaaagaacccccaggaaggactgtataacgaactccagaaagacaagatggccgaagcctacagcgagatcggcatgaagggcgagcggagaagaggcaagggccacgatggcctgtaccagggcctgagcaccgccaccaaggacacctatgacgccctgcacatgcaggccctgcctccaagaagggccaagcgatctggatctggagcaacaaacttctcactactcaaacaagcaggtgacgtggaggagaatcccgggcctactagtatggactggatttggcgcatccttttccttgtcggcgctgctaccggcgcgcattccttcgaagaggatcaagtgacccagtctcctgaggctctgaggctgcaagagggcgagagcagctctctgaactgctcctacacagtgtctggcctgaggggcctgttttggtataggcaagaccctggcaagggacccgagttcctgttcacactgtactctgccggcgaggaaaaagagaaagaacgcctgaaggccacgctgaccaagaaagagagcttcctgcacatcacagcccctaagcctgaggacagcgccacctatctgtgtgccgtgcaggccaatagaggcagcacactggggagactgtacttcggcagaggcacccagctgaccgtttggcctgatacgcgtatccagaaccctgatcctgccgtgtaccagctgcgggatagcaagagcagcgacaagagcgtgtgtctgttcaccgacttcgacagccagaccaacgtgtcccagagcaaggactccgacgtgtacatcaccgataagaccgtgctggacatgcggagcatggacttcaagagcaactccgccgtggcctggtccaacaagtccgatttcgcctgcgccaacgccttcaacaacagcattatccccgaggacacattcttcccaagccccgagagcagctgcggtacccagagttttgggttgttggaccctaaattgtgctatctgttggacggaatcctgttcatttacggagtgatcctgaccgcattgttcctgaagagaggccggaagaagctgctgtacatcttcaagcagcctttcatgcggcccgtgcagaccacccaggaagaggacggctgctcctgccggttccccgaggaagaagaaggcggctgcgagctgcgggttaagttttccagatccgcagacgcacccgcttaccaacaagggcagaaccaactctacaatgaacttaatttggggcggagggaagagtacgacgttctggacaaaaggaggggacgagatcccgagatgggcggaaagcctcagcgaaggaagaatccgcaagaggggctttataacgaactccagaaagataaaatggcagaagcctatagtgagattgggatgaagggagaaaggaggaggggtaaaggtcacgatgggttgtaccaaggattgagcacagccactaaagatacctatgatgcgctccacatgcaggccctgccgccaagataa

SEQ ID NO: 2720 - DNA, 2445 bp, synthetic construct
  source 1..2445: mol_type = other DNA
atggccttaccagtgaccgccttgctcctgccgctggccttgctgctccacgccgccaggccggaattcagcagatacctggtcaagcggaccggcgagaaggtgttcctggaatgcgtgcaggacatggaccacgaaaacatgttctggtacagacaggaccccggcctgggcctgagactgatctacttcagctacgacgtgaagatgaaggaaaagggcgacatccccgagggctacagcgtgtccagagagaagaaagagcggttcagcctgatcctggaaagcgccagcaccaaccagaccagcatgtacctgtgtgccagcagcctgtggggcagactggctaagaacatccagtatttcggagccggcaccagactgtctgttctcgagctcgaggacctgaagaacgtgttcccacctgaggtggccgtgttcgagcctagcgaggccgagatcagccacacccagaaagccaccctcgtgtgcctggctaccggcttctaccccgaccatgtggaactgtcttggtgggtcaacggcaaagaggtgcacagcggcgtgtctaccgacccccagccactgaaagaacagcccgccctgaacgacagccggtactgcctgagcagcagactgagagtgtccgccaccttctggcagaacccccggaaccacttcagatgccaggtgcagttctacggcctgagcgagaacgacgagtggacccaggacagagccaagcccgtgacccagatcgtgtctgccgaagcctggggcagagccgattgcggatcccagagcttcggcctgctggaccccaagctgtgctacctgctggatggcatcctgttcatctacggcgtgatcctgaccgccctgttcctgagagtgaagttcagcagaagcgccgacgcccctgcctaccagcagggacagaaccaactgtacaacgagctgaacctgggcagacgggaagagtacgacgtgctggacaagcggagaggcagggaccctgagatgggcggaaagccccagcggagaaagaacccccaggaaggactgttcaacgaactccagaaagacaagatggccgaagccttcagcgagatcggcatgaagggcgagcggagaagaggcaagggccacgatggcctgttccagggcctgagcaccgccaccaaggacaccttcgacgccctgcacatgcaggccctgcctccaagaagggccaagcgatctggatctggagcaacaaacttctcactactcaaacaagcaggtgacgtggaggagaatcccgggcctactagtatggactggatttggcgcatccttttccttgtcggcgctgctaccggcgcgcattccttcgaagaggatcaagtgacccagtctcctgaggctctgaggctgcaagagggcgagagcagctctctgaactgctcctacacagtgtctggcctgaggggcctgttttggtataggcaagaccctggcaagggacccgagttcctgttcacactgtactctgccggcgaggaaaaagagaaagaacgcctgaaggccacgctgaccaagaaagagagcttcctgcacatcacagcccctaagcctgaggacagcgccacctatctgtgtgccgtgcaggccaatagaggcagcacactggggagactgtacttcggcagaggcacccagctgaccgtttggcctgatacgcgtatccagaaccctgatcctgccgtgtaccagctgcgggatagcaagagcagcgacaagagcgtgtgtctgttcaccgacttcgacagccagaccaacgtgtcccagagcaaggactccgacgtgtacatcaccgataagaccgtgctggacatgcggagcatggacttcaagagcaactccgccgtggcctggtccaacaagtccgatttcgcctgcgccaacgccttcaacaacagcattatccccgaggacacattcttcccaagccccgagagcagctgcggtacccagagttttgggttgttggaccctaaattgtgctatctgttggacggaatcctgttcatttacggagtgatcctgaccgcattgttcctgcgggttaagttttccagatccgcagacgcacccgcttaccaacaagggcagaaccaactctacaatgaacttaatttggggcggagggaagagtacgacgttctggacaaaaggaggggacgagatcccgagatgggcggaaagcctcagcgaaggaagaatccgcaagaggggctttataacgaactccagaaagataaaatggcagaagcctatagtgagattgggatgaagggagaaaggaggaggggtaaaggtcacgatgggttgtaccaaggattgagcacagccactaaagatacctatgatgcgctccacatgcaggccctgccgccaagataa

SEQ ID NO: 2721 - DNA, 2445 bp, synthetic construct
  source 1..2445: mol_type = other DNA
atggccttaccagtgaccgccttgctcctgccgctggccttgctgctccacgccgccaggccggaattcagcagatacctggtcaagcggaccggcgagaaggtgttcctggaatgcgtgcaggacatggaccacgaaaacatgttctggtacagacaggaccccggcctgggcctgagactgatctacttcagctacgacgtgaagatgaaggaaaagggcgacatccccgagggctacagcgtgtccagagagaagaaagagcggttcagcctgatcctggaaagcgccagcaccaaccagaccagcatgtacctgtgtgccagcagcctgtggggcagactggctaagaacatccagtatttcggagccggcaccagactgtctgttctcgagctcgaggacctgaagaacgtgttcccacctgaggtggccgtgttcgagcctagcgaggccgagatcagccacacccagaaagccaccctcgtgtgcctggctaccggcttctaccccgaccatgtggaactgtcttggtgggtcaacggcaaagaggtgcacagcggcgtgtctaccgacccccagccactgaaagaacagcccgccctgaacgacagccggtactgcctgagcagcagactgagagtgtccgccaccttctggcagaacccccggaaccacttcagatgccaggtgcagttctacggcctgagcgagaacgacgagtggacccaggacagagccaagcccgtgacccagatcgtgtctgccgaagcctggggcagagccgattgcggatcccagagcttcggcctgctggaccccaagctgtgctacctgctggatggcatcctgttcatctacggcgtgatcctgaccgccctgttcctgagagtgaagttcagcagaagcgccgacgcccctgcctaccagcagggacagaaccaactgtacaacgagctgaacctgggcagacgggaagagtacgacgtgctggacaagcggagaggcagggaccctgagatgggcggaaagccccagcggagaaagaacccccaggaaggactgttcaacgaactccagaaagacaagatggccgaagccttcagcgagatcggcatgaagggcgagcggagaagaggcaagggccacgatggcctgttccagggcctgagcaccgccaccaaggacaccttcgacgccctgcacatgcaggccctgcctccaagaagggccaagcgatctggatctggagcaacaaacttctcactactcaaacaagcaggtgacgtggaggagaatcccgggcctactagtatggactggatttggcgcatccttttccttgtcggcgctgctaccggcgcgcattccttcgaagaggatcaagtgacccagtctcctgaggctctgaggctgcaagagggcgagagcagctctctgaactgctcctacacagtgtctggcctgaggggcctgttttggtataggcaagaccctggcaagggacccgagttcctgttcacactgtactctgccggcgaggaaaaagagaaagaacgcctgaaggccacgctgaccaagaaagagagcttcctgcacatcacagcccctaagcctgaggacagcgccacctatctgtgtgccgtgcaggccaatagaggcagcacactggggagactgtacttcggcagaggcacccagctgaccgtttggcctgatacgcgtatccagaaccctgatcctgccgtgtaccagctgcgggatagcaagagcagcgacaagagcgtgtgtctgttcaccgacttcgacagccagaccaacgtgtcccagagcaaggactccgacgtgtacatcaccgataagaccgtgctggacatgcggagcatggacttcaagagcaactccgccgtggcctggtccaacaagtccgatttcgcctgcgccaacgccttcaacaacagcattatccccgaggacacattcttcccaagccccgagagcagctgcggtacccagagcttcggcctgctggaccccaagctgtgctacctgctggatggcatcctgttcatctacggcgtgatcctgaccgccctgttcctgagagtgaagttcagcagaagcgccgacgcccctgcctaccagcagggacagaaccaactgtacaacgagctgaacctgggcagacgggaagagtacgacgtgctggacaagcggagaggcagggaccctgagatgggcggaaagccccagcggagaaagaacccccaggaaggactgtataacgaactccagaaagacaagatggccgaagcctacagcgagatcggcatgaagggcgagcggagaagaggcaagggccacgatggcctgtaccagggcctgagcaccgccaccaaggacacctatgacgccctgcacatgcaggccctgcctccaagataa

SEQ ID NO: 2722 - DNA, 2571 bp, synthetic construct
  source 1..2571: mol_type = other DNA
atggccttaccagtgaccgccttgctcctgccgctggccttgctgctccacgccgccaggccggaattcagcagatacctggtcaagcggaccggcgagaaggtgttcctggaatgcgtgcaggacatggaccacgaaaacatgttctggtacagacaggaccccggcctgggcctgagactgatctacttcagctacgacgtgaagatgaaggaaaagggcgacatccccgagggctacagcgtgtccagagagaagaaagagcggttcagcctgatcctggaaagcgccagcaccaaccagaccagcatgtacctgtgtgccagcagcctgtggggcagactggctaagaacatccagtatttcggagccggcaccagactgtctgttctcgagctcgaggacctgaagaacgtgttcccacctgaggtggccgtgttcgagcctagcgaggccgagatcagccacacccagaaagccaccctcgtgtgcctggctaccggcttctaccccgaccatgtggaactgtcttggtgggtcaacggcaaagaggtgcacagcggcgtgtctaccgacccccagccactgaaagaacagcccgccctgaacgacagccggtactgcctgagcagcagactgagagtgtccgccaccttctggcagaacccccggaaccacttcagatgccaggtgcagttctacggcctgagcgagaacgacgagtggacccaggacagagccaagcccgtgacccagatcgtgtctgccgaagcctggggcagagccgattgcggatcccagagcttcggcctgctggaccccaagctgtgctacctgctggatggcatcctgttcatctacggcgtgatcctgaccgccctgttcctgagagtgaagttcagcagaagcgccgacgcccctgcctaccagcagggacagaaccaactgtacaacgagctgaacctgggcagacgggaagagtacgacgtgctggacaagcggagaggcagggaccctgagatgggcggaaagccccagcggagaaagaacccccaggaaggactgttcaacgaactccagaaagacaagatggccgaagccttcagcgagatcggcatgaagggcgagcggagaagaggcaagggccacgatggcctgttccagggcctgagcaccgccaccaaggacaccttcgacgccctgcacatgcaggccctgcctccaagaagggccaagcgatctggatctggagcaacaaacttctcactactcaaacaagcaggtgacgtggaggagaatcccgggcctactagtatggactggatttggcgcatccttttccttgtcggcgctgctaccggcgcgcattccttcgaagaggatcaagtgacccagtctcctgaggctctgaggctgcaagagggcgagagcagctctctgaactgctcctacacagtgtctggcctgaggggcctgttttggtataggcaagaccctggcaagggacccgagttcctgttcacactgtactctgccggcgaggaaaaagagaaagaacgcctgaaggccacgctgaccaagaaagagagcttcctgcacatcacagcccctaagcctgaggacagcgccacctatctgtgtgccgtgcaggccaatagaggcagcacactggggagactgtacttcggcagaggcacccagctgaccgtttggcctgatacgcgtatccagaaccctgatcctgccgtgtaccagctgcgggatagcaagagcagcgacaagagcgtgtgtctgttcaccgacttcgacagccagaccaacgtgtcccagagcaaggactccgacgtgtacatcaccgataagaccgtgctggacatgcggagcatggacttcaagagcaactccgccgtggcctggtccaacaagtccgatttcgcctgcgccaacgccttcaacaacagcattatccccgaggacacattcttcccaagccccgagagcagctgcggtacccagagcttcggcctgctggaccccaagctgtgctacctgctggatggcatcctgttcatctacggcgtgatcctgaccgccctgttcctgaaacggggcagaaagaaactcctgtatatattcaaacaaccatttatgagaccagtacaaactactcaagaggaagatggctgtagctgccgatttccagaagaagaagaaggaggatgtgaactgagagtgaagttcagcagaagcgccgacgcccctgcctaccagcagggacagaaccaactgtacaacgagctgaacctgggcagacgggaagagtacgacgtgctggacaagcggagaggcagggaccctgagatgggcggaaagccccagcggagaaagaacccccaggaaggactgtataacgaactccagaaagacaagatggccgaagcctacagcgagatcggcatgaagggcgagcggagaagaggcaagggccacgatggcctgtaccagggcctgagcaccgccaccaaggacacctatgacgccctgcacatgcaggccctgcctccaagataa

SEQ ID NO: 2723 - DNA, 2568 bp, synthetic construct
  source 1..2568: mol_type = other DNA
atggccttaccagtgaccgccttgctcctgccgctggccttgctgctccacgccgccaggccggaattcagcagatacctggtcaagcggaccggcgagaaggtgttcctggaatgcgtgcaggacatggaccacgaaaacatgttctggtacagacaggaccccggcctgggcctgagactgatctacttcagctacgacgtgaagatgaaggaaaagggcgacatccccgagggctacagcgtgtccagagagaagaaagagcggttcagcctgatcctggaaagcgccagcaccaaccagaccagcatgtacctgtgtgccagcagcctgtggggcagactggctaagaacatccagtatttcggagccggcaccagactgtctgttctcgagctcgaggacctgaagaacgtgttcccacctgaggtggccgtgttcgagcctagcgaggccgagatcagccacacccagaaagccaccctcgtgtgcctggctaccggcttctaccccgaccatgtggaactgtcttggtgggtcaacggcaaagaggtgcacagcggcgtgtctaccgacccccagccactgaaagaacagcccgccctgaacgacagccggtactgcctgagcagcagactgagagtgtccgccaccttctggcagaacccccggaaccacttcagatgccaggtgcagttctacggcctgagcgagaacgacgagtggacccaggacagagccaagcccgtgacccagatcgtgtctgccgaagcctggggcagagccgattgcggatcccagagcttcggcctgctggaccccaagctgtgctacctgctggatggcatcctgttcatctacggcgtgatcctgaccgccctgttcctgagagtgaagttcagcagaagcgccgacgcccctgcctaccagcagggacagaaccaactgtacaacgagctgaacctgggcagacgggaagagtacgacgtgctggacaagcggagaggcagggaccctgagatgggcggaaagccccagcggagaaagaacccccaggaaggactgttcaacgaactccagaaagacaagatggccgaagccttcagcgagatcggcatgaagggcgagcggagaagaggcaagggccacgatggcctgttccagggcctgagcaccgccaccaaggacaccttcgacgccctgcacatgcaggccctgcctccaagaagggccaagcgatctggatctggagcaacaaacttctcactactcaaacaagcaggtgacgtggaggagaatcccgggcctactagtatggactggatttggcgcatccttttccttgtcggcgctgctaccggcgcgcattccttcgaagaggatcaagtgacccagtctcctgaggctctgaggctgcaagagggcgagagcagctctctgaactgctcctacacagtgtctggcctgaggggcctgttttggtataggcaagaccctggcaagggacccgagttcctgttcacactgtactctgccggcgaggaaaaagagaaagaacgcctgaaggccacgctgaccaagaaagagagcttcctgcacatcacagcccctaagcctgaggacagcgccacctatctgtgtgccgtgcaggccaatagaggcagcacactggggagactgtacttcggcagaggcacccagctgaccgtttggcctgatacgcgtatccagaaccctgatcctgccgtgtaccagctgcgggatagcaagagcagcgacaagagcgtgtgtctgttcaccgacttcgacagccagaccaacgtgtcccagagcaaggactccgacgtgtacatcaccgataagaccgtgctggacatgcggagcatggacttcaagagcaactccgccgtggcctggtccaacaagtccgatttcgcctgcgccaacgccttcaacaacagcattatccccgaggacacattcttcccaagccccgagagcagctgcggtacccagagcttcggcctgctggaccccaagctgtgctacctgctggatggcatcctgttcatctacggcgtgatcctgaccgccctgttcctgaggagtaagaggagcaggctcctgcacagtgactacatgaacatgactccacgccgccccggacccacccgcaagcattaccagccctatgccccaccacgcgacttcgcagcctatcgctccagagtgaagttcagcagaagcgccgacgcccctgcctaccagcagggacagaaccaactgtacaacgagctgaacctgggcagacgggaagagtacgacgtgctggacaagcggagaggcagggaccctgagatgggcggaaagccccagcggagaaagaacccccaggaaggactgtataacgaactccagaaagacaagatggccgaagcctacagcgagatcggcatgaagggcgagcggagaagaggcaagggccacgatggcctgtaccagggcctgagcaccgccaccaaggacacctatgacgccctgcacatgcaggccctgcctccaagataa

SEQ ID NO: 2724 - DNA, 2553 bp, synthetic construct
  source 1..2553: mol_type = other DNA
atggccttaccagtgaccgccttgctcctgccgctggccttgctgctccacgccgccaggccggaattcagcagatacctggtcaagcggaccggcgagaaggtgttcctggaatgcgtgcaggacatggaccacgaaaacatgttctggtacagacaggaccccggcctgggcctgagactgatctacttcagctacgacgtgaagatgaaggaaaagggcgacatccccgagggctacagcgtgtccagagagaagaaagagcggttcagcctgatcctggaaagcgccagcaccaaccagaccagcatgtacctgtgtgccagcagcctgtggggcagactggctaagaacatccagtatttcggagccggcaccagactgtctgttctcgagctcgaggacctgaagaacgtgttcccacctgaggtggccgtgttcgagcctagcgaggccgagatcagccacacccagaaagccaccctcgtgtgcctggctaccggcttctaccccgaccatgtggaactgtcttggtgggtcaacggcaaagaggtgcacagcggcgtgtctaccgacccccagccactgaaagaacagcccgccctgaacgacagccggtactgcctgagcagcagactgagagtgtccgccaccttctggcagaacccccggaaccacttcagatgccaggtgcagttctacggcctgagcgagaacgacgagtggacccaggacagagccaagcccgtgacccagatcgtgtctgccgaagcctggggcagagccgattgcggatcccagagcttcggcctgctggaccccaagctgtgctacctgctggatggcatcctgttcatctacggcgtgatcctgaccgccctgttcctgagagtgaagttcagcagaagcgccgacgcccctgcctaccagcagggacagaaccaactgtacaacgagctgaacctgggcagacgggaagagtacgacgtgctggacaagcggagaggcagggaccctgagatgggcggaaagccccagcggagaaagaacccccaggaaggactgttcaacgaactccagaaagacaagatggccgaagccttcagcgagatcggcatgaagggcgagcggagaagaggcaagggccacgatggcctgttccagggcctgagcaccgccaccaaggacaccttcgacgccctgcacatgcaggccctgcctccaagaagggccaagcgatctggatctggagcaacaaacttctcactactcaaacaagcaggtgacgtggaggagaatcccgggcctactagtatggactggatttggcgcatccttttccttgtcggcgctgctaccggcgcgcattccttcgaagaggatcaagtgacccagtctcctgaggctctgaggctgcaagagggcgagagcagctctctgaactgctcctacacagtgtctggcctgaggggcctgttttggtataggcaagaccctggcaagggacccgagttcctgttcacactgtactctgccggcgaggaaaaagagaaagaacgcctgaaggccacgctgaccaagaaagagagcttcctgcacatcacagcccctaagcctgaggacagcgccacctatctgtgtgccgtgcaggccaatagaggcagcacactggggagactgtacttcggcagaggcacccagctgaccgtttggcctgatacgcgtatccagaaccctgatcctgccgtgtaccagctgcgggatagcaagagcagcgacaagagcgtgtgtctgttcaccgacttcgacagccagaccaacgtgtcccagagcaaggactccgacgtgtacatcaccgataagaccgtgctggacatgcggagcatggacttcaagagcaactccgccgtggcctggtccaacaagtccgatttcgcctgcgccaacgccttcaacaacagcattatccccgaggacacattcttcccaagccccgagagcagctgcggtacccagagcttcggcctgctggaccccaagctgtgctacctgctggatggcatcctgttcatctacggcgtgatcctgaccgccctgttcctgagggaccaaagactgcctcctgacgctcacaaacctccaggcggaggcagcttcagaacccctatccaagaggaacaggctgacgcccacagcaccctggcaaaaattagagtgaagttcagcagaagcgccgacgcccctgcctaccagcagggacagaaccaactgtacaacgagctgaacctgggcagacgggaagagtacgacgtgctggacaagcggagaggcagggaccctgagatgggcggaaagccccagcggagaaagaacccccaggaaggactgtataacgaactccagaaagacaagatggccgaagcctacagcgagatcggcatgaagggcgagcggagaagaggcaagggccacgatggcctgtaccagggcctgagcaccgccaccaaggacacctatgacgccctgcacatgcaggccctgcctccaagataa

SEQ ID NO: 2725 - DNA, 2805 bp, synthetic construct
  source 1..2805: mol_type = other DNA
atggccttaccagtgaccgccttgctcctgccgctggccttgctgctccacgccgccaggccggaattcagcagatacctggtcaagcggaccggcgagaaggtgttcctggaatgcgtgcaggacatggaccacgaaaacatgttctggtacagacaggaccccggcctgggcctgagactgatctacttcagctacgacgtgaagatgaaggaaaagggcgacatccccgagggctacagcgtgtccagagagaagaaagagcggttcagcctgatcctggaaagcgccagcaccaaccagaccagcatgtacctgtgtgccagcagcctgtggggcagactggctaagaacatccagtatttcggagccggcaccagactgtctgttctcgagctcgaggacctgaagaacgtgttcccacctgaggtggccgtgttcgagcctagcgaggccgagatcagccacacccagaaagccaccctcgtgtgcctggctaccggcttctaccccgaccatgtggaactgtcttggtgggtcaacggcaaagaggtgcacagcggcgtgtctaccgacccccagccactgaaagaacagcccgccctgaacgacagccggtactgcctgagcagcagactgagagtgtccgccaccttctggcagaacccccggaaccacttcagatgccaggtgcagttctacggcctgagcgagaacgacgagtggacccaggacagagccaagcccgtgacccagatcgtgtctgccgaagcctggggcagagccgattgcggatcccagagcttcggcctgctggaccccaagctgtgctacctgctggatggcatcctgttcatctacggcgtgatcctgaccgccctgttcctgagagtgaagttcagcagaagcgccgacgcccctgcctaccagcagggacagaaccaactgtacaacgagctgaacctgggcagacgggaagagtacgacgtgctggacaagcggagaggcagggaccctgagatgggcggaaagccccagcggagaaagaacccccaggaaggactgttcaacgaactccagaaagacaagatggccgaagccttcagcgagatcggcatgaagggcgagcggagaagaggcaagggccacgatggcctgttccagggcctgagcaccgccaccaaggacaccttcgacgccctgcacatgcaggccctgcctccaagaagggccaagcgatctggatctggagcaacaaacttctcactactcaaacaagcaggtgacgtggaggagaatcccgggcctactagtatggactggatttggcgcatccttttccttgtcggcgctgctaccggcgcgcattccttcgaagaggatcaagtgacccagtctcctgaggctctgaggctgcaagagggcgagagcagctctctgaactgctcctacacagtgtctggcctgaggggcctgttttggtataggcaagaccctggcaagggacccgagttcctgttcacactgtactctgccggcgaggaaaaagagaaagaacgcctgaaggccacgctgaccaagaaagagagcttcctgcacatcacagcccctaagcctgaggacagcgccacctatctgtgtgccgtgcaggccaatagaggcagcacactggggagactgtacttcggcagaggcacccagctgaccgtttggcctgatacgcgtatccagaaccctgatcctgccgtgtaccagctgcgggatagcaagagcagcgacaagagcgtgtgtctgttcaccgacttcgacagccagaccaacgtgtcccagagcaaggactccgacgtgtacatcaccgataagaccgtgctggacatgcggagcatggacttcaagagcaactccgccgtggcctggtccaacaagtccgatttcgcctgcgccaacgccttcaacaacagcattatccccgaggacacattcttcccaagccccgagagcagctgcggtacccagagcttcggcctgctggaccccaagctgtgctacctgctggatggcatcctgttcatctacggcgtgatcctgaccgccctgttcctgtggcggcggaagcggaaagagaagcagtctgagacaagccccaaagagttcctgaccatctacgaggacgtgaaggacctgaaaacccggcggaaccacgaacaagagcagacctttcctggcggaggcagcaccatctacagcatgatccagagccagagcagcgcccctacaagccaagagcctgcctacacactgtactccctgatccagcctagcagaaagagcggcagccggaagagaaatcacagccccagcttcaacagcacgatctacgaagtgatcggcaagagccagccaaaggctcagaaccctgccagactgagccggaaagagctggaaaacttcgacgtgtacagcagagtgaagttcagcagaagcgccgacgcccctgcctaccagcagggacagaaccaactgtacaacgagctgaacctgggcagacgggaagagtacgacgtgctggacaagcggagaggcagggaccctgagatgggcggaaagccccagcggagaaagaacccccaggaaggactgtataacgaactccagaaagacaagatggccgaagcctacagcgagatcggcatgaagggcgagcggagaagaggcaagggccacgatggcctgtaccagggcctgagcaccgccaccaaggacacctatgacgccctgcacatgcaggccctgcctccaagataa

SEQ ID NO: 2726 - DNA, 2568 bp, synthetic construct
  source 1..2568: mol_type = other DNA
atggccttaccagtgaccgccttgctcctgccgctggccttgctgctccacgccgccaggccggaattcagcagatacctggtcaagcggaccggcgagaaggtgttcctggaatgcgtgcaggacatggaccacgaaaacatgttctggtacagacaggaccccggcctgggcctgagactgatctacttcagctacgacgtgaagatgaaggaaaagggcgacatccccgagggctacagcgtgtccagagagaagaaagagcggttcagcctgatcctggaaagcgccagcaccaaccagaccagcatgtacctgtgtgccagcagcctgtggggcagactggctaagaacatccagtatttcggagccggcaccagactgtctgttctcgagctcgaggacctgaagaacgtgttcccacctgaggtggccgtgttcgagcctagcgaggccgagatcagccacacccagaaagccaccctcgtgtgcctggctaccggcttctaccccgaccatgtggaactgtcttggtgggtcaacggcaaagaggtgcacagcggcgtgtctaccgacccccagccactgaaagaacagcccgccctgaacgacagccggtactgcctgagcagcagactgagagtgtccgccaccttctggcagaacccccggaaccacttcagatgccaggtgcagttctacggcctgagcgagaacgacgagtggacccaggacagagccaagcccgtgacccagatcgtgtctgccgaagcctggggcagagccgattgcggatcccagagcttcggcctgctggaccccaagctgtgctacctgctggatggcatcctgttcatctacggcgtgatcctgaccgccctgttcctgagagtgaagttcagcagaagcgccgacgcccctgcctaccagcagggacagaaccaactgtacaacgagctgaacctgggcagacgggaagagtacgacgtgctggacaagcggagaggcagggaccctgagatgggcggaaagccccagcggagaaagaacccccaggaaggactgttcaacgaactccagaaagacaagatggccgaagccttcagcgagatcggcatgaagggcgagcggagaagaggcaagggccacgatggcctgttccagggcctgagcaccgccaccaaggacaccttcgacgccctgcacatgcaggccctgcctccaagaagggccaagcgatctggatctggagcaacaaacttctcactactcaaacaagcaggtgacgtggaggagaatcccgggcctactagtatggactggatttggcgcatccttttccttgtcggcgctgctaccggcgcgcattccttcgaagaggatcaagtgacccagtctcctgaggctctgaggctgcaagagggcgagagcagctctctgaactgctcctacacagtgtctggcctgaggggcctgttttggtataggcaagaccctggcaagggacccgagttcctgttcacactgtactctgccggcgaggaaaaagagaaagaacgcctgaaggccacgctgaccaagaaagagagcttcctgcacatcacagcccctaagcctgaggacagcgccacctatctgtgtgccgtgcaggccaatagaggcagcacactggggagactgtacttcggcagaggcacccagctgaccgtttggcctgatacgcgtatccagaaccctgatcctgccgtgtaccagctgcgggatagcaagagcagcgacaagagcgtgtgtctgttcaccgacttcgacagccagaccaacgtgtcccagagcaaggactccgacgtgtacatcaccgataagaccgtgctggacatgcggagcatggacttcaagagcaactccgccgtggcctggtccaacaagtccgatttcgcctgcgccaacgccttcaacaacagcattatccccgaggacacattcttcccaagccccgagagcagctgcggtacccagagttttgggttgttggaccctaaattgtgctatctgttggacggaatcctgttcatttacggagtgatcctgaccgcattgttcctgaggagcaagcggtcacggctgctccacagcgattacatgaatatgacaccacgaagaccgggtcctactcgcaaacactaccaaccctacgcacctccccgcgactttgcagcgtaccgatctcgggttaagttttccagatccgcagacgcacccgcttaccaacaagggcagaaccaactctacaatgaacttaatttggggcggagggaagagtacgacgttctggacaaaaggaggggacgagatcccgagatgggcggaaagcctcagcgaaggaagaatccgcaagaggggctttataacgaactccagaaagataaaatggcagaagcctatagtgagattgggatgaagggagaaaggaggaggggtaaaggtcacgatgggttgtaccaaggattgagcacagccactaaagatacctatgatgcgctccacatgcaggccctgccgccaagataa

SEQ ID NO: 2727 - DNA, 2571 bp, synthetic construct
  source 1..2571: mol_type = other DNA
atggccttaccagtgaccgccttgctcctgccgctggccttgctgctccacgccgccaggccggaattcagcagatacctggtcaagcggaccggcgagaaggtgttcctggaatgcgtgcaggacatggaccacgaaaacatgttctggtacagacaggaccccggcctgggcctgagactgatctacttcagctacgacgtgaagatgaaggaaaagggcgacatccccgagggctacagcgtgtccagagagaagaaagagcggttcagcctgatcctggaaagcgccagcaccaaccagaccagcatgtacctgtgtgccagcagcctgtggggcagactggctaagaacatccagtatttcggagccggcaccagactgtctgttctcgagctcgaggacctgaagaacgtgttcccacctgaggtggccgtgttcgagcctagcgaggccgagatcagccacacccagaaagccaccctcgtgtgcctggctaccggcttctaccccgaccatgtggaactgtcttggtgggtcaacggcaaagaggtgcacagcggcgtgtctaccgacccccagccactgaaagaacagcccgccctgaacgacagccggtactgcctgagcagcagactgagagtgtccgccaccttctggcagaacccccggaaccacttcagatgccaggtgcagttctacggcctgagcgagaacgacgagtggacccaggacagagccaagcccgtgacccagatcgtgtctgccgaagcctggggcagagccgattgcggatcccagagcttcggcctgctggaccccaagctgtgctacctgctggatggcatcctgttcatctacggcgtgatcctgaccgccctgttcctgagagtgaagttcagcagaagcgccgacgcccctgcctaccagcagggacagaaccaactgtacaacgagctgaacctgggcagacgggaagagtacgacgtgctggacaagcggagaggcagggaccctgagatgggcggaaagccccagcggagaaagaacccccaggaaggactgttcaacgaactccagaaagacaagatggccgaagccttcagcgagatcggcatgaagggcgagcggagaagaggcaagggccacgatggcctgttccagggcctgagcaccgccaccaaggacaccttcgacgccctgcacatgcaggccctgcctccaagaagggccaagcgatctggatctggagcaacaaacttctcactactcaaacaagcaggtgacgtggaggagaatcccgggcctactagtatggactggatttggcgcatccttttccttgtcggcgctgctaccggcgcgcattccttcgaagaggatcaagtgacccagtctcctgaggctctgaggctgcaagagggcgagagcagctctctgaactgctcctacacagtgtctggcctgaggggcctgttttggtataggcaagaccctggcaagggacccgagttcctgttcacactgtactctgccggcgaggaaaaagagaaagaacgcctgaaggccacgctgaccaagaaagagagcttcctgcacatcacagcccctaagcctgaggacagcgccacctatctgtgtgccgtgcaggccaatagaggcagcacactggggagactgtacttcggcagaggcacccagctgaccgtttggcctgatacgcgtatccagaaccctgatcctgccgtgtaccagctgcgggatagcaagagcagcgacaagagcgtgtgtctgttcaccgacttcgacagccagaccaacgtgtcccagagcaaggactccgacgtgtacatcaccgataagaccgtgctggacatgcggagcatggacttcaagagcaactccgccgtggcctggtccaacaagtccgatttcgcctgcgccaacgccttcaacaacagcattatccccgaggacacattcttcccaagccccgagagcagctgcggtacccagagttttgggttgttggaccctaaattgtgctatctgttggacggaatcctgttcatttacggagtgatcctgaccgcattgttcctgaagagaggccggaagaagctgctgtacatcttcaagcagcctttcatgcggcccgtgcagaccacccaggaagaggacggctgctcctgccggttccccgaggaagaagaaggcggctgcgagctgcgggttaagttttccagatccgcagacgcacccgcttaccaacaagggcagaaccaactctacaatgaacttaatttggggcggagggaagagtacgacgttctggacaaaaggaggggacgagatcccgagatgggcggaaagcctcagcgaaggaagaatccgcaagaggggctttataacgaactccagaaagataaaatggcagaagcctatagtgagattgggatgaagggagaaaggaggaggggtaaaggtcacgatgggttgtaccaaggattgagcacagccactaaagatacctatgatgcgctccacatgcaggccctgccgccaagataa

SEQ ID NO: 2728 - DNA, 2445 bp, synthetic construct
  source 1..2445: mol_type = other DNA
atggccttaccagtgaccgccttgctcctgccgctggccttgctgctccacgccgccaggccggaattcagcagatacctggtcaagcggaccggcgagaaggtgttcctggaatgcgtgcaggacatggaccacgaaaacatgttctggtacagacaggaccccggcctgggcctgagactgatctacttcagctacgacgtgaagatgaaggaaaagggcgacatccccgagggctacagcgtgtccagagagaagaaagagcggttcagcctgatcctggaaagcgccagcaccaaccagaccagcatgtacctgtgtgccagcagcctgtggggcagactggctaagaacatccagtatttcggagccggcaccagactgtctgttctcgagctcgaggacctgaagaacgtgttcccacctgaggtggccgtgttcgagcctagcgaggccgagatcagccacacccagaaagccaccctcgtgtgcctggctaccggcttctaccccgaccatgtggaactgtcttggtgggtcaacggcaaagaggtgcacagcggcgtgtctaccgacccccagccactgaaagaacagcccgccctgaacgacagccggtactgcctgagcagcagactgagagtgtccgccaccttctggcagaacccccggaaccacttcagatgccaggtgcagttctacggcctgagcgagaacgacgagtggacccaggacagagccaagcccgtgacccagatcgtgtctgccgaagcctggggcagagccgattgcggatcccagagcttcggcctgctggaccccaagctgtgctacctgctggatggcatcctgttcatctacggcgtgatcctgaccgccctgttcctgagagtgaagttcagcagaagcgccgacgcccctgcctaccagcagggacagaaccaactgtacaacgagctgaacctgggcagacgggaagagtacgacgtgctggacaagcggagaggcagggaccctgagatgggcggaaagccccagcggagaaagaacccccaggaaggactgttcaacgaactccagaaagacaagatggccgaagccttcagcgagatcggcatgaagggcgagcggagaagaggcaagggccacgatggcctgttccagggcctgagcaccgccaccaaggacaccttcgacgccctgcacatgcaggccctgcctccaagaagggccaagcgatctggatctggagcaacaaacttctcactactcaaacaagcaggtgacgtggaggagaatcccgggcctactagtatggactggatttggcgcatccttttccttgtcggcgctgctaccggcgcgcattccttcgaagaggatcaagtgacccagtctcctgaggctctgaggctgcaagagggcgagagcagctctctgaactgctcctacacagtgtctggcctgaggggcctgttttggtataggcaagaccctggcaagggacccgagttcctgttcacactgtactctgccggcgaggaaaaagagaaagaacgcctgaaggccacgctgaccaagaaagagagcttcctgcacatcacagcccctaagcctgaggacagcgccacctatctgtgtgccgtgcaggccaatagaggcagcacactggggagactgtacttcggcagaggcacccagctgaccgtttggcctgatacgcgtatccagaaccctgatcctgccgtgtaccagctgcgggatagcaagagcagcgacaagagcgtgtgtctgttcaccgacttcgacagccagaccaacgtgtcccagagcaaggactccgacgtgtacatcaccgataagaccgtgctggacatgcggagcatggacttcaagagcaactccgccgtggcctggtccaacaagtccgatttcgcctgcgccaacgccttcaacaacagcattatccccgaggacacattcttcccaagccccgagagcagctgcggtacccagagcttcggcctgctggaccccaagctgagctacctgctggatggcatcctgttcatctacggcgtgatcctgaccgccctgttcctgagagtgaagttcagcagaagcgccgacgcccctgcctaccagcagggacagaaccaactgtacaacgagctgaacctgggcagacgggaagagtacgacgtgctggacaagcggagaggcagggaccctgagatgggcggaaagccccagcggagaaagaacccccaggaaggactgtataacgaactccagaaagacaagatggccgaagcctacagcgagatcggcatgaagggcgagcggagaagaggcaagggccacgatggcctgtaccagggcctgagcaccgccaccaaggacacctatgacgccctgcacatgcaggccctgcctccaagataa

SEQ ID NO: 2729 - DNA, 2445 bp, synthetic construct
  source 1..2445: mol_type = other DNA
atggccttaccagtgaccgccttgctcctgccgctggccttgctgctccacgccgccaggccggaattcagcagatacctggtcaagcggaccggcgagaaggtgttcctggaatgcgtgcaggacatggaccacgaaaacatgttctggtacagacaggaccccggcctgggcctgagactgatctacttcagctacgacgtgaagatgaaggaaaagggcgacatccccgagggctacagcgtgtccagagagaagaaagagcggttcagcctgatcctggaaagcgccagcaccaaccagaccagcatgtacctgtgtgccagcagcctgtggggcagactggctaagaacatccagtatttcggagccggcaccagactgtctgttctcgagctcgaggacctgaagaacgtgttcccacctgaggtggccgtgttcgagcctagcgaggccgagatcagccacacccagaaagccaccctcgtgtgcctggctaccggcttctaccccgaccatgtggaactgtcttggtgggtcaacggcaaagaggtgcacagcggcgtgtctaccgacccccagccactgaaagaacagcccgccctgaacgacagccggtactgcctgagcagcagactgagagtgtccgccaccttctggcagaacccccggaaccacttcagatgccaggtgcagttctacggcctgagcgagaacgacgagtggacccaggacagagccaagcccgtgacccagatcgtgtctgccgaagcctggggcagagccgattgcggatcccagagcttcggcctgctggaccccaagctgtgctacctgctggatggcatcctgttcatctacggcgtgatcctgaccgccctgttcctgagagtgaagttcagcagaagcgccgacgcccctgcctaccagcagggacagaaccaactgtacaacgagctgaacctgggcagacgggaagagtacgacgtgctggacaagcggagaggcagggaccctgagatgggcggaaagccccagcggagaaagaacccccaggaaggactgttcaacgaactccagaaagacaagatggccgaagccttcagcgagatcggcatgaagggcgagcggagaagaggcaagggccacgatggcctgttccagggcctgagcaccgccaccaaggacaccttcgacgccctgcacatgcaggccctgcctccaagaagggccaagcgatctggatctggagcaacaaacttctcactactcaaacaagcaggtgacgtggaggagaatcccgggcctactagtatggactggatttggcgcatccttttccttgtcggcgctgctaccggcgcgcattccttcgaagaggatcaagtgacccagtctcctgaggctctgaggctgcaagagggcgagagcagctctctgaactgctcctacacagtgtctggcctgaggggcctgttttggtataggcaagaccctggcaagggacccgagttcctgttcacactgtactctgccggcgaggaaaaagagaaagaacgcctgaaggccacgctgaccaagaaagagagcttcctgcacatcacagcccctaagcctgaggacagcgccacctatctgtgtgccgtgcaggccaatagaggcagcacactggggagactgtacttcggcagaggcacccagctgaccgtttggcctgatacgcgtatccagaaccctgatcctgccgtgtaccagctgcgggatagcaagagcagcgacaagagcgtgtgtctgttcaccgacttcgacagccagaccaacgtgtcccagagcaaggactccgacgtgtacatcaccgataagaccgtgctggacatgcggagcatggacttcaagagcaactccgccgtggcctggtccaacaagtccgatttcgcctgcgccaacgccttcaacaacagcattatccccgaggacacattcttcccaagccccgagagcagctgcggtacccagagttttgggttgttggaccctaaattgagctatctgttggacggaatcctgttcatttacggagtgatcctgaccgcattgttcctgcgggttaagttttccagatccgcagacgcacccgcttaccaacaagggcagaaccaactctacaatgaacttaatttggggcggagggaagagtacgacgttctggacaaaaggaggggacgagatcccgagatgggcggaaagcctcagcgaaggaagaatccgcaagaggggctttataacgaactccagaaagataaaatggcagaagcctatagtgagattgggatgaagggagaaaggaggaggggtaaaggtcacgatgggttgtaccaaggattgagcacagccactaaagatacctatgatgcgctccacatgcaggccctgccgccaagataa

SEQ ID NO: 2730 - DNA, 2445 bp, synthetic construct
  source 1..2445: mol_type = other DNA
atggccttaccagtgaccgccttgctcctgccgctggccttgctgctccacgccgccaggccggaattcagcagatacctggtcaagcggaccggcgagaaggtgttcctggaatgcgtgcaggacatggaccacgaaaacatgttctggtacagacaggaccccggcctgggcctgagactgatctacttcagctacgacgtgaagatgaaggaaaagggcgacatccccgagggctacagcgtgtccagagagaagaaagagcggttcagcctgatcctggaaagcgccagcaccaaccagaccagcatgtacctgtgtgccagcagcctgtggggcagactggctaagaacatccagtatttcggagccggcaccagactgtctgttctcgagctcgaggacctgaagaacgtgttcccacctgaggtggccgtgttcgagcctagcgaggccgagatcagccacacccagaaagccaccctcgtgtgcctggctaccggcttctaccccgaccatgtggaactgtcttggtgggtcaacggcaaagaggtgcacagcggcgtgtctaccgacccccagccactgaaagaacagcccgccctgaacgacagccggtactgcctgagcagcagactgagagtgtccgccaccttctggcagaacccccggaaccacttcagatgccaggtgcagttctacggcctgagcgagaacgacgagtggacccaggacagagccaagcccgtgacccagatcgtgtctgccgaagcctggggcagagccgattgcggatcccagagcttcggcctgctggaccccaagctgagctacctgctggatggcatcctgttcatctacggcgtgatcctgaccgccctgttcctgagagtgaagttcagcagaagcgccgacgcccctgcctaccagcagggacagaaccaactgtacaacgagctgaacctgggcagacgggaagagtacgacgtgctggacaagcggagaggcagggaccctgagatgggcggaaagccccagcggagaaagaacccccaggaaggactgtataacgaactccagaaagacaagatggccgaagcctacagcgagatcggcatgaagggcgagcggagaagaggcaagggccacgatggcctgtaccagggcctgagcaccgccaccaaggacacctatgacgccctgcacatgcaggccctgcctccaagaagggccaagcgatctggatctggagcaacaaacttctcactactcaaacaagcaggtgacgtggaggagaatcccgggcctactagtatggactggatttggcgcatccttttccttgtcggcgctgctaccggcgcgcattccttcgaagaggatcaagtgacccagtctcctgaggctctgaggctgcaagagggcgagagcagctctctgaactgctcctacacagtgtctggcctgaggggcctgttttggtataggcaagaccctggcaagggacccgagttcctgttcacactgtactctgccggcgaggaaaaagagaaagaacgcctgaaggccacgctgaccaagaaagagagcttcctgcacatcacagcccctaagcctgaggacagcgccacctatctgtgtgccgtgcaggccaatagaggcagcacactggggagactgtacttcggcagaggcacccagctgaccgtttggcctgatacgcgtatccagaaccctgatcctgccgtgtaccagctgcgggatagcaagagcagcgacaagagcgtgtgtctgttcaccgacttcgacagccagaccaacgtgtcccagagcaaggactccgacgtgtacatcaccgataagaccgtgctggacatgcggagcatggacttcaagagcaactccgccgtggcctggtccaacaagtccgatttcgcctgcgccaacgccttcaacaacagcattatccccgaggacacattcttcccaagccccgagagcagctgcggtacccagagttttgggttgttggaccctaaattgagctatctgttggacggaatcctgttcatttacggagtgatcctgaccgcattgttcctgcgggttaagttttccagatccgcagacgcacccgcttaccaacaagggcagaaccaactctacaatgaacttaatttggggcggagggaagagtacgacgttctggacaaaaggaggggacgagatcccgagatgggcggaaagcctcagcgaaggaagaatccgcaagaggggctttataacgaactccagaaagataaaatggcagaagcctatagtgagattgggatgaagggagaaaggaggaggggtaaaggtcacgatgggttgtaccaaggattgagcacagccactaaagatacctatgatgcgctccacatgcaggccctgccgccaagataa

SEQ ID NO: 2731 - DNA, 2157 bp, synthetic construct
  source 1..2157: mol_type = other DNA
atggccttaccagtgaccgccttgctcctgccgctggccttgctgctccacgccgccaggccggaattcagcagatacctggtcaagcggaccggcgagaaggtgttcctggaatgcgtgcaggacatggaccacgaaaacatgttctggtacagacaggaccccggcctgggcctgagactgatctacttcagctacgacgtgaagatgaaggaaaagggcgacatccccgagggctacagcgtgtccagagagaagaaagagcggttcagcctgatcctggaaagcgccagcaccaaccagaccagcatgtacctgtgtgccagcagcctgtggggcagactggctaagaacatccagtatttcggagccggcaccagactgtctgttctcgagctcgaggacctgaagaacgtgttcccacctgaggtggccgtgttcgagcctagcgaggccgagatcagccacacccagaaagccaccctcgtgtgcctggctaccggcttctaccccgaccatgtggaactgtcttggtgggtcaacggcaaagaggtgcacagcggcgtgtctaccgacccccagccactgaaagaacagcccgccctgaacgacagccggtactgcctgagcagcagactgagagtgtccgccaccttctggcagaacccccggaaccacttcagatgccaggtgcagttctacggcctgagcgagaacgacgagtggacccaggacagagccaagcccgtgacccagatcgtgtctgccgaagcctggggcagagccgattgcggatccacaacacctggcgagagaagtagcctgcctgccttctatcctggcaccagcggctcttgttctggctgtggatctctgagcctgcctctgctggctggactggttgctgctgatgctgtggcctctctgctgattgtgggagccgtgttcctgtgcgccagacctagaagaagccccgctcaagaggacggcaaggtgtacatcaacatgcccggcagaggaagggccaagcgatctggatctggagcaacaaacttctcactactcaaacaagcaggtgacgtggaggagaatcccgggcctactagtatggactggatttggcgcatccttttccttgtcggcgctgctaccggcgcgcattccttcgaagaggatcaagtgacccagtctcctgaggctctgaggctgcaagagggcgagagcagctctctgaactgctcctacacagtgtctggcctgaggggcctgttttggtataggcaagaccctggcaagggacccgagttcctgttcacactgtactctgccggcgaggaaaaagagaaagaacgcctgaaggccacgctgaccaagaaagagagcttcctgcacatcacagcccctaagcctgaggacagcgccacctatctgtgtgccgtgcaggccaatagaggcagcacactggggagactgtacttcggcagaggcacccagctgaccgtttggcctgatacgcgtatccagaaccctgatcctgccgtgtaccagctgcgggatagcaagagcagcgacaagagcgtgtgtctgttcaccgacttcgacagccagaccaacgtgtcccagagcaaggactccgacgtgtacatcaccgataagaccgtgctggacatgcggagcatggacttcaagagcaactccgccgtggcctggtccaacaagtccgatttcgcctgcgccaacgccttcaacaacagcattatccccgaggacacattcttcccaagccccgagagcagctgcggtaccacaacacctggcgagagaagtagcctgcctgccttctatcctggcaccagcggctcttgttctggctgtggatctctgagcctgcctctgctggctggactggttgctgctgatgctgtggcctctctgctgattgtgggagccgtgttcaaacggggcagaaagaaactcctgtatatattcaaacaaccatttatgagaccagtacaaactactcaagaggaagatggctgtagctgccgatttccagaagaagaagaaggaggatgtgaactgctgtgcgccagacctagaagaagccccgctcaagaggacggcaaggtgtacatcaacatgcccggcagaggataa

SEQ ID NO: 2732 - DNA, 2154 bp, synthetic construct
  source 1..2154: mol_type = other DNA
atggccttaccagtgaccgccttgctcctgccgctggccttgctgctccacgccgccaggccggaattcagcagatacctggtcaagcggaccggcgagaaggtgttcctggaatgcgtgcaggacatggaccacgaaaacatgttctggtacagacaggaccccggcctgggcctgagactgatctacttcagctacgacgtgaagatgaaggaaaagggcgacatccccgagggctacagcgtgtccagagagaagaaagagcggttcagcctgatcctggaaagcgccagcaccaaccagaccagcatgtacctgtgtgccagcagcctgtggggcagactggctaagaacatccagtatttcggagccggcaccagactgtctgttctcgagctcgaggacctgaagaacgtgttcccacctgaggtggccgtgttcgagcctagcgaggccgagatcagccacacccagaaagccaccctcgtgtgcctggctaccggcttctaccccgaccatgtggaactgtcttggtgggtcaacggcaaagaggtgcacagcggcgtgtctaccgacccccagccactgaaagaacagcccgccctgaacgacagccggtactgcctgagcagcagactgagagtgtccgccaccttctggcagaacccccggaaccacttcagatgccaggtgcagttctacggcctgagcgagaacgacgagtggacccaggacagagccaagcccgtgacccagatcgtgtctgccgaagcctggggcagagccgattgcggatccacaacacctggcgagagaagtagcctgcctgccttctatcctggcaccagcggctcttgttctggctgtggatctctgagcctgcctctgctggctggactggttgctgctgatgctgtggcctctctgctgattgtgggagccgtgttcctgtgcgccagacctagaagaagccccgctcaagaggacggcaaggtgtacatcaacatgcccggcagaggaagggccaagcgatctggatctggagcaacaaacttctcactactcaaacaagcaggtgacgtggaggagaatcccgggcctactagtatggactggatttggcgcatccttttccttgtcggcgctgctaccggcgcgcattccttcgaagaggatcaagtgacccagtctcctgaggctctgaggctgcaagagggcgagagcagctctctgaactgctcctacacagtgtctggcctgaggggcctgttttggtataggcaagaccctggcaagggacccgagttcctgttcacactgtactctgccggcgaggaaaaagagaaagaacgcctgaaggccacgctgaccaagaaagagagcttcctgcacatcacagcccctaagcctgaggacagcgccacctatctgtgtgccgtgcaggccaatagaggcagcacactggggagactgtacttcggcagaggcacccagctgaccgtttggcctgatacgcgtatccagaaccctgatcctgccgtgtaccagctgcgggatagcaagagcagcgacaagagcgtgtgtctgttcaccgacttcgacagccagaccaacgtgtcccagagcaaggactccgacgtgtacatcaccgataagaccgtgctggacatgcggagcatggacttcaagagcaactccgccgtggcctggtccaacaagtccgatttcgcctgcgccaacgccttcaacaacagcattatccccgaggacacattcttcccaagccccgagagcagctgcggtaccacaacacctggcgagagaagtagcctgcctgccttctatcctggcaccagcggctcttgttctggctgtggatctctgagcctgcctctgctggctggactggttgctgctgatgctgtggcctctctgctgattgtgggagccgtgttcaggagtaagaggagcaggctcctgcacagtgactacatgaacatgactccacgccgccccggacccacccgcaagcattaccagccctatgccccaccacgcgacttcgcagcctatcgctccctgtgcgccagacctagaagaagccccgctcaagaggacggcaaggtgtacatcaacatgcccggcagaggataa

SEQ ID NO: 2733 - DNA, 2139 bp, synthetic construct
  source 1..2139: mol_type = other DNA
atggccttaccagtgaccgccttgctcctgccgctggccttgctgctccacgccgccaggccggaattcagcagatacctggtcaagcggaccggcgagaaggtgttcctggaatgcgtgcaggacatggaccacgaaaacatgttctggtacagacaggaccccggcctgggcctgagactgatctacttcagctacgacgtgaagatgaaggaaaagggcgacatccccgagggctacagcgtgtccagagagaagaaagagcggttcagcctgatcctggaaagcgccagcaccaaccagaccagcatgtacctgtgtgccagcagcctgtggggcagactggctaagaacatccagtatttcggagccggcaccagactgtctgttctcgagctcgaggacctgaagaacgtgttcccacctgaggtggccgtgttcgagcctagcgaggccgagatcagccacacccagaaagccaccctcgtgtgcctggctaccggcttctaccccgaccatgtggaactgtcttggtgggtcaacggcaaagaggtgcacagcggcgtgtctaccgacccccagccactgaaagaacagcccgccctgaacgacagccggtactgcctgagcagcagactgagagtgtccgccaccttctggcagaacccccggaaccacttcagatgccaggtgcagttctacggcctgagcgagaacgacgagtggacccaggacagagccaagcccgtgacccagatcgtgtctgccgaagcctggggcagagccgattgcggatccacaacacctggcgagagaagtagcctgcctgccttctatcctggcaccagcggctcttgttctggctgtggatctctgagcctgcctctgctggctggactggttgctgctgatgctgtggcctctctgctgattgtgggagccgtgttcctgtgcgccagacctagaagaagccccgctcaagaggacggcaaggtgtacatcaacatgcccggcagaggaagggccaagcgatctggatctggagcaacaaacttctcactactcaaacaagcaggtgacgtggaggagaatcccgggcctactagtatggactggatttggcgcatccttttccttgtcggcgctgctaccggcgcgcattccttcgaagaggatcaagtgacccagtctcctgaggctctgaggctgcaagagggcgagagcagctctctgaactgctcctacacagtgtctggcctgaggggcctgttttggtataggcaagaccctggcaagggacccgagttcctgttcacactgtactctgccggcgaggaaaaagagaaagaacgcctgaaggccacgctgaccaagaaagagagcttcctgcacatcacagcccctaagcctgaggacagcgccacctatctgtgtgccgtgcaggccaatagaggcagcacactggggagactgtacttcggcagaggcacccagctgaccgtttggcctgatacgcgtatccagaaccctgatcctgccgtgtaccagctgcgggatagcaagagcagcgacaagagcgtgtgtctgttcaccgacttcgacagccagaccaacgtgtcccagagcaaggactccgacgtgtacatcaccgataagaccgtgctggacatgcggagcatggacttcaagagcaactccgccgtggcctggtccaacaagtccgatttcgcctgcgccaacgccttcaacaacagcattatccccgaggacacattcttcccaagccccgagagcagctgcggtaccacaacacctggcgagagaagtagcctgcctgccttctatcctggcaccagcggctcttgttctggctgtggatctctgagcctgcctctgctggctggactggttgctgctgatgctgtggcctctctgctgattgtgggagccgtgttcagggaccaaagactgcctcctgacgctcacaaacctccaggcggaggcagcttcagaacccctatccaagaggaacaggctgacgcccacagcaccctggcaaaaattctgtgcgccagacctagaagaagccccgctcaagaggacggcaaggtgtacatcaacatgcccggcagaggataa

SEQ ID NO: 2734 - DNA, 2391 bp, synthetic construct
  source 1..2391: mol_type = other DNA
atggccttaccagtgaccgccttgctcctgccgctggccttgctgctccacgccgccaggccggaattcagcagatacctggtcaagcggaccggcgagaaggtgttcctggaatgcgtgcaggacatggaccacgaaaacatgttctggtacagacaggaccccggcctgggcctgagactgatctacttcagctacgacgtgaagatgaaggaaaagggcgacatccccgagggctacagcgtgtccagagagaagaaagagcggttcagcctgatcctggaaagcgccagcaccaaccagaccagcatgtacctgtgtgccagcagcctgtggggcagactggctaagaacatccagtatttcggagccggcaccagactgtctgttctcgagctcgaggacctgaagaacgtgttcccacctgaggtggccgtgttcgagcctagcgaggccgagatcagccacacccagaaagccaccctcgtgtgcctggctaccggcttctaccccgaccatgtggaactgtcttggtgggtcaacggcaaagaggtgcacagcggcgtgtctaccgacccccagccactgaaagaacagcccgccctgaacgacagccggtactgcctgagcagcagactgagagtgtccgccaccttctggcagaacccccggaaccacttcagatgccaggtgcagttctacggcctgagcgagaacgacgagtggacccaggacagagccaagcccgtgacccagatcgtgtctgccgaagcctggggcagagccgattgcggatccacaacacctggcgagagaagtagcctgcctgccttctatcctggcaccagcggctcttgttctggctgtggatctctgagcctgcctctgctggctggactggttgctgctgatgctgtggcctctctgctgattgtgggagccgtgttcctgtgcgccagacctagaagaagccccgctcaagaggacggcaaggtgtacatcaacatgcccggcagaggaagggccaagcgatctggatctggagcaacaaacttctcactactcaaacaagcaggtgacgtggaggagaatcccgggcctactagtatggactggatttggcgcatccttttccttgtcggcgctgctaccggcgcgcattccttcgaagaggatcaagtgacccagtctcctgaggctctgaggctgcaagagggcgagagcagctctctgaactgctcctacacagtgtctggcctgaggggcctgttttggtataggcaagaccctggcaagggacccgagttcctgttcacactgtactctgccggcgaggaaaaagagaaagaacgcctgaaggccacgctgaccaagaaagagagcttcctgcacatcacagcccctaagcctgaggacagcgccacctatctgtgtgccgtgcaggccaatagaggcagcacactggggagactgtacttcggcagaggcacccagctgaccgtttggcctgatacgcgtatccagaaccctgatcctgccgtgtaccagctgcgggatagcaagagcagcgacaagagcgtgtgtctgttcaccgacttcgacagccagaccaacgtgtcccagagcaaggactccgacgtgtacatcaccgataagaccgtgctggacatgcggagcatggacttcaagagcaactccgccgtggcctggtccaacaagtccgatttcgcctgcgccaacgccttcaacaacagcattatccccgaggacacattcttcccaagccccgagagcagctgcggtaccacaacacctggcgagagaagtagcctgcctgccttctatcctggcaccagcggctcttgttctggctgtggatctctgagcctgcctctgctggctggactggttgctgctgatgctgtggcctctctgctgattgtgggagccgtgttctggcggcggaagcggaaagagaagcagtctgagacaagccccaaagagttcctgaccatctacgaggacgtgaaggacctgaaaacccggcggaaccacgaacaagagcagacctttcctggcggaggcagcaccatctacagcatgatccagagccagagcagcgcccctacaagccaagagcctgcctacacactgtactccctgatccagcctagcagaaagagcggcagccggaagagaaatcacagccccagcttcaacagcacgatctacgaagtgatcggcaagagccagccaaaggctcagaaccctgccagactgagccggaaagagctggaaaacttcgacgtgtacagcctgtgcgccagacctagaagaagccccgctcaagaggacggcaaggtgtacatcaacatgcccggcagaggataa

SEQ ID NO: 2735 - DNA, 2244 bp, synthetic construct
  source 1..2244: mol_type = other DNA
atggccttaccagtgaccgccttgctcctgccgctggccttgctgctccacgccgccaggccggaattcagcagatacctggtcaagcggaccggcgagaaggtgttcctggaatgcgtgcaggacatggaccacgaaaacatgttctggtacagacaggaccccggcctgggcctgagactgatctacttcagctacgacgtgaagatgaaggaaaagggcgacatccccgagggctacagcgtgtccagagagaagaaagagcggttcagcctgatcctggaaagcgccagcaccaaccagaccagcatgtacctgtgtgccagcagcctgtggggcagactggctaagaacatccagtatttcggagccggcaccagactgtctgttctcgagctcgaggacctgaagaacgtgttcccacctgaggtggccgtgttcgagcctagcgaggccgagatcagccacacccagaaagccaccctcgtgtgcctggctaccggcttctaccccgaccatgtggaactgtcttggtgggtcaacggcaaagaggtgcacagcggcgtgtctaccgacccccagccactgaaagaacagcccgccctgaacgacagccggtactgcctgagcagcagactgagagtgtccgccaccttctggcagaacccccggaaccacttcagatgccaggtgcagttctacggcctgagcgagaacgacgagtggacccaggacagagccaagcccgtgacccagatcgtgtctgccgaagcctggggcagagccgattgcggatccctgggagagcctcagctgtgctatatcctggacgccatcctgtttctgtacggcatcgtgctgaccctgctgtactgcaaacggggcagaaagaaactcctgtatatattcaaacaaccatttatgagaccagtacaaactactcaagaggaagatggctgtagctgccgatttccagaagaagaagaaggaggatgtgaactgcggctgaagatccaagtgcggaaggccgccatcaccagctacgagaaatccgacggcgtgtacaccggcctgagcaccagaaatcaagagacatacgagacactgaagcacgaaaagcctccacaaagggccaagcgatctggatctggagcaacaaacttctcactactcaaacaagcaggtgacgtggaggagaatcccgggcctactagtatggactggatttggcgcatccttttccttgtcggcgctgctaccggcgcgcattccttcgaagaggatcaagtgacccagtctcctgaggctctgaggctgcaagagggcgagagcagctctctgaactgctcctacacagtgtctggcctgaggggcctgttttggtataggcaagaccctggcaagggacccgagttcctgttcacactgtactctgccggcgaggaaaaagagaaagaacgcctgaaggccacgctgaccaagaaagagagcttcctgcacatcacagcccctaagcctgaggacagcgccacctatctgtgtgccgtgcaggccaatagaggcagcacactggggagactgtacttcggcagaggcacccagctgaccgtttggcctgatacgcgtatccagaaccctgatcctgccgtgtaccagctgcgggatagcaagagcagcgacaagagcgtgtgtctgttcaccgacttcgacagccagaccaacgtgtcccagagcaaggactccgacgtgtacatcaccgataagaccgtgctggacatgcggagcatggacttcaagagcaactccgccgtggcctggtccaacaagtccgatttcgcctgcgccaacgccttcaacaacagcattatccccgaggacacattcttcccaagccccgagagcagctgcggtaccctgggagagcctcagctgtgctatatcctggacgccatcctgtttctgtacggcatcgtgctgaccctgctgtactgcaggagtaagaggagcaggctcctgcacagtgactacatgaacatgactccacgccgccccggacccacccgcaagcattaccagccctatgccccaccacgcgacttcgcagcctatcgctcccggctgaagatccaagtgcggaaggccgccatcaccagctacgagaaatccgacggcgtgtacaccggcctgagcaccagaaatcaagagacatacgagacactgaagcacgaaaagcctccacaataa

SEQ ID NO: 2736 - DNA, 2229 bp, synthetic construct
  source 1..2229: mol_type = other DNA
atggccttaccagtgaccgccttgctcctgccgctggccttgctgctccacgccgccaggccggaattcagcagatacctggtcaagcggaccggcgagaaggtgttcctggaatgcgtgcaggacatggaccacgaaaacatgttctggtacagacaggaccccggcctgggcctgagactgatctacttcagctacgacgtgaagatgaaggaaaagggcgacatccccgagggctacagcgtgtccagagagaagaaagagcggttcagcctgatcctggaaagcgccagcaccaaccagaccagcatgtacctgtgtgccagcagcctgtggggcagactggctaagaacatccagtatttcggagccggcaccagactgtctgttctcgagctcgaggacctgaagaacgtgttcccacctgaggtggccgtgttcgagcctagcgaggccgagatcagccacacccagaaagccaccctcgtgtgcctggctaccggcttctaccccgaccatgtggaactgtcttggtgggtcaacggcaaagaggtgcacagcggcgtgtctaccgacccccagccactgaaagaacagcccgccctgaacgacagccggtactgcctgagcagcagactgagagtgtccgccaccttctggcagaacccccggaaccacttcagatgccaggtgcagttctacggcctgagcgagaacgacgagtggacccaggacagagccaagcccgtgacccagatcgtgtctgccgaagcctggggcagagccgattgcggatccctgggagagcctcagctgtgctatatcctggacgccatcctgtttctgtacggcatcgtgctgaccctgctgtactgcaaacggggcagaaagaaactcctgtatatattcaaacaaccatttatgagaccagtacaaactactcaagaggaagatggctgtagctgccgatttccagaagaagaagaaggaggatgtgaactgcggctgaagatccaagtgcggaaggccgccatcaccagctacgagaaatccgacggcgtgtacaccggcctgagcaccagaaatcaagagacatacgagacactgaagcacgaaaagcctccacaaagggccaagcgatctggatctggagcaacaaacttctcactactcaaacaagcaggtgacgtggaggagaatcccgggcctactagtatggactggatttggcgcatccttttccttgtcggcgctgctaccggcgcgcattccttcgaagaggatcaagtgacccagtctcctgaggctctgaggctgcaagagggcgagagcagctctctgaactgctcctacacagtgtctggcctgaggggcctgttttggtataggcaagaccctggcaagggacccgagttcctgttcacactgtactctgccggcgaggaaaaagagaaagaacgcctgaaggccacgctgaccaagaaagagagcttcctgcacatcacagcccctaagcctgaggacagcgccacctatctgtgtgccgtgcaggccaatagaggcagcacactggggagactgtacttcggcagaggcacccagctgaccgtttggcctgatacgcgtatccagaaccctgatcctgccgtgtaccagctgcgggatagcaagagcagcgacaagagcgtgtgtctgttcaccgacttcgacagccagaccaacgtgtcccagagcaaggactccgacgtgtacatcaccgataagaccgtgctggacatgcggagcatggacttcaagagcaactccgccgtggcctggtccaacaagtccgatttcgcctgcgccaacgccttcaacaacagcattatccccgaggacacattcttcccaagccccgagagcagctgcggtaccctgggagagcctcagctgtgctatatcctggacgccatcctgtttctgtacggcatcgtgctgaccctgctgtactgcagggaccaaagactgcctcctgacgctcacaaacctccaggcggaggcagcttcagaacccctatccaagaggaacaggctgacgcccacagcaccctggcaaaaattcggctgaagatccaagtgcggaaggccgccatcaccagctacgagaaatccgacggcgtgtacaccggcctgagcaccagaaatcaagagacatacgagacactgaagcacgaaaagcctccacaataa

SEQ ID NO: 2737 - DNA, 2481 bp, synthetic construct
  source 1..2481: mol_type = other DNA
atggccttaccagtgaccgccttgctcctgccgctggccttgctgctccacgccgccaggccggaattcagcagatacctggtcaagcggaccggcgagaaggtgttcctggaatgcgtgcaggacatggaccacgaaaacatgttctggtacagacaggaccccggcctgggcctgagactgatctacttcagctacgacgtgaagatgaaggaaaagggcgacatccccgagggctacagcgtgtccagagagaagaaagagcggttcagcctgatcctggaaagcgccagcaccaaccagaccagcatgtacctgtgtgccagcagcctgtggggcagactggctaagaacatccagtatttcggagccggcaccagactgtctgttctcgagctcgaggacctgaagaacgtgttcccacctgaggtggccgtgttcgagcctagcgaggccgagatcagccacacccagaaagccaccctcgtgtgcctggctaccggcttctaccccgaccatgtggaactgtcttggtgggtcaacggcaaagaggtgcacagcggcgtgtctaccgacccccagccactgaaagaacagcccgccctgaacgacagccggtactgcctgagcagcagactgagagtgtccgccaccttctggcagaacccccggaaccacttcagatgccaggtgcagttctacggcctgagcgagaacgacgagtggacccaggacagagccaagcccgtgacccagatcgtgtctgccgaagcctggggcagagccgattgcggatccctgggagagcctcagctgtgctatatcctggacgccatcctgtttctgtacggcatcgtgctgaccctgctgtactgcaaacggggcagaaagaaactcctgtatatattcaaacaaccatttatgagaccagtacaaactactcaagaggaagatggctgtagctgccgatttccagaagaagaagaaggaggatgtgaactgcggctgaagatccaagtgcggaaggccgccatcaccagctacgagaaatccgacggcgtgtacaccggcctgagcaccagaaatcaagagacatacgagacactgaagcacgaaaagcctccacaaagggccaagcgatctggatctggagcaacaaacttctcactactcaaacaagcaggtgacgtggaggagaatcccgggcctactagtatggactggatttggcgcatccttttccttgtcggcgctgctaccggcgcgcattccttcgaagaggatcaagtgacccagtctcctgaggctctgaggctgcaagagggcgagagcagctctctgaactgctcctacacagtgtctggcctgaggggcctgttttggtataggcaagaccctggcaagggacccgagttcctgttcacactgtactctgccggcgaggaaaaagagaaagaacgcctgaaggccacgctgaccaagaaagagagcttcctgcacatcacagcccctaagcctgaggacagcgccacctatctgtgtgccgtgcaggccaatagaggcagcacactggggagactgtacttcggcagaggcacccagctgaccgtttggcctgatacgcgtatccagaaccctgatcctgccgtgtaccagctgcgggatagcaagagcagcgacaagagcgtgtgtctgttcaccgacttcgacagccagaccaacgtgtcccagagcaaggactccgacgtgtacatcaccgataagaccgtgctggacatgcggagcatggacttcaagagcaactccgccgtggcctggtccaacaagtccgatttcgcctgcgccaacgccttcaacaacagcattatccccgaggacacattcttcccaagccccgagagcagctgcggtaccctgggagagcctcagctgtgctatatcctggacgccatcctgtttctgtacggcatcgtgctgaccctgctgtactgctggcggcggaagcggaaagagaagcagtctgagacaagccccaaagagttcctgaccatctacgaggacgtgaaggacctgaaaacccggcggaaccacgaacaagagcagacctttcctggcggaggcagcaccatctacagcatgatccagagccagagcagcgcccctacaagccaagagcctgcctacacactgtactccctgatccagcctagcagaaagagcggcagccggaagagaaatcacagccccagcttcaacagcacgatctacgaagtgatcggcaagagccagccaaaggctcagaaccctgccagactgagccggaaagagctggaaaacttcgacgtgtacagccggctgaagatccaagtgcggaaggccgccatcaccagctacgagaaatccgacggcgtgtacaccggcctgagcaccagaaatcaagagacatacgagacactgaagcacgaaaagcctccacaataa

SEQ ID NO: 2738 - DNA, 2247 bp, synthetic construct
  source 1..2247: mol_type = other DNA
atggccttaccagtgaccgccttgctcctgccgctggccttgctgctccacgccgccaggccggaattcagcagatacctggtcaagcggaccggcgagaaggtgttcctggaatgcgtgcaggacatggaccacgaaaacatgttctggtacagacaggaccccggcctgggcctgagactgatctacttcagctacgacgtgaagatgaaggaaaagggcgacatccccgagggctacagcgtgtccagagagaagaaagagcggttcagcctgatcctggaaagcgccagcaccaaccagaccagcatgtacctgtgtgccagcagcctgtggggcagactggctaagaacatccagtatttcggagccggcaccagactgtctgttctcgagctcgaggacctgaagaacgtgttcccacctgaggtggccgtgttcgagcctagcgaggccgagatcagccacacccagaaagccaccctcgtgtgcctggctaccggcttctaccccgaccatgtggaactgtcttggtgggtcaacggcaaagaggtgcacagcggcgtgtctaccgacccccagccactgaaagaacagcccgccctgaacgacagccggtactgcctgagcagcagactgagagtgtccgccaccttctggcagaacccccggaaccacttcagatgccaggtgcagttctacggcctgagcgagaacgacgagtggacccaggacagagccaagcccgtgacccagatcgtgtctgccgaagcctggggcagagccgattgcggatccctgggagagcctcagctgtgctatatcctggacgccatcctgtttctgtacggcatcgtgctgaccctgctgtactgcaaacggggcagaaagaaactcctgtatatattcaaacaaccatttatgagaccagtacaaactactcaagaggaagatggctgtagctgccgatttccagaagaagaagaaggaggatgtgaactgcggctgaagatccaagtgcggaaggccgccatcaccagctacgagaaatccgacggcgtgtacaccggcctgagcaccagaaatcaagagacatacgagacactgaagcacgaaaagcctccacaaagggccaagcgatctggatctggagcaacaaacttctcactactcaaacaagcaggtgacgtggaggagaatcccgggcctactagtatggactggatttggcgcatccttttccttgtcggcgctgctaccggcgcgcattccttcgaagaggatcaagtgacccagtctcctgaggctctgaggctgcaagagggcgagagcagctctctgaactgctcctacacagtgtctggcctgaggggcctgttttggtataggcaagaccctggcaagggacccgagttcctgttcacactgtactctgccggcgaggaaaaagagaaagaacgcctgaaggccacgctgaccaagaaagagagcttcctgcacatcacagcccctaagcctgaggacagcgccacctatctgtgtgccgtgcaggccaatagaggcagcacactggggagactgtacttcggcagaggcacccagctgaccgtttggcctgatacgcgtatccagaaccctgatcctgccgtgtaccagctgcgggatagcaagagcagcgacaagagcgtgtgtctgttcaccgacttcgacagccagaccaacgtgtcccagagcaaggactccgacgtgtacatcaccgataagaccgtgctggacatgcggagcatggacttcaagagcaactccgccgtggcctggtccaacaagtccgatttcgcctgcgccaacgccttcaacaacagcattatccccgaggacacattcttcccaagccccgagagcagctgcggtaccctcggagaaccacagctctgttacattctggatgctatcctgttcctctatgggatcgtcctgacactcctgtattgcaagagaggccggaagaagctgctgtacatcttcaagcagcctttcatgcggcccgtgcagaccacccaggaagaggacggctgctcctgccggttccccgaggaagaagaaggcggctgcgagctgagactcaaaattcaagttcgcaaagccgccattacctcttacgagaagagtgatggggtgtacacaggactgtctacccggaatcaagaaacctacgaaaccctcaaacatgagaagccacctcagtaa

SEQ ID NO: 2739 - DNA, 2244 bp, synthetic construct
  source 1..2244: mol_type = other DNA
atggccttaccagtgaccgccttgctcctgccgctggccttgctgctccacgccgccaggccggaattcagcagatacctggtcaagcggaccggcgagaaggtgttcctggaatgcgtgcaggacatggaccacgaaaacatgttctggtacagacaggaccccggcctgggcctgagactgatctacttcagctacgacgtgaagatgaaggaaaagggcgacatccccgagggctacagcgtgtccagagagaagaaagagcggttcagcctgatcctggaaagcgccagcaccaaccagaccagcatgtacctgtgtgccagcagcctgtggggcagactggctaagaacatccagtatttcggagccggcaccagactgtctgttctcgagctcgaggacctgaagaacgtgttcccacctgaggtggccgtgttcgagcctagcgaggccgagatcagccacacccagaaagccaccctcgtgtgcctggctaccggcttctaccccgaccatgtggaactgtcttggtgggtcaacggcaaagaggtgcacagcggcgtgtctaccgacccccagccactgaaagaacagcccgccctgaacgacagccggtactgcctgagcagcagactgagagtgtccgccaccttctggcagaacccccggaaccacttcagatgccaggtgcagttctacggcctgagcgagaacgacgagtggacccaggacagagccaagcccgtgacccagatcgtgtctgccgaagcctggggcagagccgattgcggatccctgggagagcctcagctgtgctatatcctggacgccatcctgtttctgtacggcatcgtgctgaccctgctgtactgcaaacggggcagaaagaaactcctgtatatattcaaacaaccatttatgagaccagtacaaactactcaagaggaagatggctgtagctgccgatttccagaagaagaagaaggaggatgtgaactgcggctgaagatccaagtgcggaaggccgccatcaccagctacgagaaatccgacggcgtgtacaccggcctgagcaccagaaatcaagagacatacgagacactgaagcacgaaaagcctccacaaagggccaagcgatctggatctggagcaacaaacttctcactactcaaacaagcaggtgacgtggaggagaatcccgggcctactagtatggactggatttggcgcatccttttccttgtcggcgctgctaccggcgcgcattccttcgaagaggatcaagtgacccagtctcctgaggctctgaggctgcaagagggcgagagcagctctctgaactgctcctacacagtgtctggcctgaggggcctgttttggtataggcaagaccctggcaagggacccgagttcctgttcacactgtactctgccggcgaggaaaaagagaaagaacgcctgaaggccacgctgaccaagaaagagagcttcctgcacatcacagcccctaagcctgaggacagcgccacctatctgtgtgccgtgcaggccaatagaggcagcacactggggagactgtacttcggcagaggcacccagctgaccgtttggcctgatacgcgtatccagaaccctgatcctgccgtgtaccagctgcgggatagcaagagcagcgacaagagcgtgtgtctgttcaccgacttcgacagccagaccaacgtgtcccagagcaaggactccgacgtgtacatcaccgataagaccgtgctggacatgcggagcatggacttcaagagcaactccgccgtggcctggtccaacaagtccgatttcgcctgcgccaacgccttcaacaacagcattatccccgaggacacattcttcccaagccccgagagcagctgcggtaccctcggagaaccacagctctgttacattctggatgctatcctgttcctctatgggatcgtcctgacactcctgtattgcaggagcaagcggtcacggctgctccacagcgattacatgaatatgacaccacgaagaccgggtcctactcgcaaacactaccaaccctacgcacctccccgcgactttgcagcgtaccgatctagactcaaaattcaagttcgcaaagccgccattacctcttacgagaagagtgatggggtgtacacaggactgtctacccggaatcaagaaacctacgaaaccctcaaacatgagaagccacctcagtaa

SEQ ID NO: 2740 - DNA, 2241 bp, synthetic construct
  source 1..2241: mol_type = other DNA
atggccttaccagtgaccgccttgctcctgccgctggccttgctgctccacgccgccaggccggaattcagcagatacctggtcaagcggaccggcgagaaggtgttcctggaatgcgtgcaggacatggaccacgaaaacatgttctggtacagacaggaccccggcctgggcctgagactgatctacttcagctacgacgtgaagatgaaggaaaagggcgacatccccgagggctacagcgtgtccagagagaagaaagagcggttcagcctgatcctggaaagcgccagcaccaaccagaccagcatgtacctgtgtgccagcagcctgtggggcagactggctaagaacatccagtatttcggagccggcaccagactgtctgttctcgagctcgaggacctgaagaacgtgttcccacctgaggtggccgtgttcgagcctagcgaggccgagatcagccacacccagaaagccaccctcgtgtgcctggctaccggcttctaccccgaccatgtggaactgtcttggtgggtcaacggcaaagaggtgcacagcggcgtgtctaccgacccccagccactgaaagaacagcccgccctgaacgacagccggtactgcctgagcagcagactgagagtgtccgccaccttctggcagaacccccggaaccacttcagatgccaggtgcagttctacggcctgagcgagaacgacgagtggacccaggacagagccaagcccgtgacccagatcgtgtctgccgaagcctggggcagagccgattgcggatccctgggagagcctcagctgtgctatatcctggacgccatcctgtttctgtacggcatcgtgctgaccctgctgtactgcaggagtaagaggagcaggctcctgcacagtgactacatgaacatgactccacgccgccccggacccacccgcaagcattaccagccctatgccccaccacgcgacttcgcagcctatcgctcccggctgaagatccaagtgcggaaggccgccatcaccagctacgagaaatccgacggcgtgtacaccggcctgagcaccagaaatcaagagacatacgagacactgaagcacgaaaagcctccacaaagggccaagcgatctggatctggagcaacaaacttctcactactcaaacaagcaggtgacgtggaggagaatcccgggcctactagtatggactggatttggcgcatccttttccttgtcggcgctgctaccggcgcgcattccttcgaagaggatcaagtgacccagtctcctgaggctctgaggctgcaagagggcgagagcagctctctgaactgctcctacacagtgtctggcctgaggggcctgttttggtataggcaagaccctggcaagggacccgagttcctgttcacactgtactctgccggcgaggaaaaagagaaagaacgcctgaaggccacgctgaccaagaaagagagcttcctgcacatcacagcccctaagcctgaggacagcgccacctatctgtgtgccgtgcaggccaatagaggcagcacactggggagactgtacttcggcagaggcacccagctgaccgtttggcctgatacgcgtatccagaaccctgatcctgccgtgtaccagctgcgggatagcaagagcagcgacaagagcgtgtgtctgttcaccgacttcgacagccagaccaacgtgtcccagagcaaggactccgacgtgtacatcaccgataagaccgtgctggacatgcggagcatggacttcaagagcaactccgccgtggcctggtccaacaagtccgatttcgcctgcgccaacgccttcaacaacagcattatccccgaggacacattcttcccaagccccgagagcagctgcggtaccctcggagaaccacagctctgttacattctggatgctatcctgttcctctatgggatcgtcctgacactcctgtattgcaggagcaagcggtcacggctgctccacagcgattacatgaatatgacaccacgaagaccgggtcctactcgcaaacactaccaaccctacgcacctccccgcgactttgcagcgtaccgatctagactcaaaattcaagttcgcaaagccgccattacctcttacgagaagagtgatggggtgtacacaggactgtctacccggaatcaagaaacctacgaaaccctcaaacatgagaagccacctcagtaa

SEQ ID NO: 2741 - DNA, 1995 bp, synthetic construct
  source 1..1995: mol_type = other DNA
atggccttaccagtgaccgccttgctcctgccgctggccttgctgctccacgccgccaggccggaattcagcagatacctggtcaagcggaccggcgagaaggtgttcctggaatgcgtgcaggacatggaccacgaaaacatgttctggtacagacaggaccccggcctgggcctgagactgatctacttcagctacgacgtgaagatgaaggaaaagggcgacatccccgagggctacagcgtgtccagagagaagaaagagcggttcagcctgatcctggaaagcgccagcaccaaccagaccagcatgtacctgtgtgccagcagcctgtggggcagactggctaagaacatccagtatttcggagccggcaccagactgtctgttctcgagctcgaggacctgaagaacgtgttcccacctgaggtggccgtgttcgagcctagcgaggccgagatcagccacacccagaaagccaccctcgtgtgcctggctaccggcttctaccccgaccatgtggaactgtcttggtgggtcaacggcaaagaggtgcacagcggcgtgtctaccgacccccagccactgaaagaacagcccgccctgaacgacagccggtactgcctgagcagcagactgagagtgtccgccaccttctggcagaacccccggaaccacttcagatgccaggtgcagttctacggcctgagcgagaacgacgagtggacccaggacagagccaagcccgtgacccagatcgtgtctgccgaagcctggggcagagccgattgcggatccctgggagagcctcagctgagctatatcctggacgccatcctgtttctgtacggcatcgtgctgaccctgctgtactgccggctgaagatccaagtgcggaaggccgccatcaccagctacgagaaatccgacggcgtgtacaccggcctgagcaccagaaatcaagagacatacgagacactgaagcacgaaaagcctccacaaagggccaagcgatctggatctggagcaacaaacttctcactactcaaacaagcaggtgacgtggaggagaatcccgggcctactagtatggactggatttggcgcatccttttccttgtcggcgctgctaccggcgcgcattccttcgaagaggatcaagtgacccagtctcctgaggctctgaggctgcaagagggcgagagcagctctctgaactgctcctacacagtgtctggcctgaggggcctgttttggtataggcaagaccctggcaagggacccgagttcctgttcacactgtactctgccggcgaggaaaaagagaaagaacgcctgaaggccacgctgaccaagaaagagagcttcctgcacatcacagcccctaagcctgaggacagcgccacctatctgtgtgccgtgcaggccaatagaggcagcacactggggagactgtacttcggcagaggcacccagctgaccgtttggcctgatacgcgtatccagaaccctgatcctgccgtgtaccagctgcgggatagcaagagcagcgacaagagcgtgtgtctgttcaccgacttcgacagccagaccaacgtgtcccagagcaaggactccgacgtgtacatcaccgataagaccgtgctggacatgcggagcatggacttcaagagcaactccgccgtggcctggtccaacaagtccgatttcgcctgcgccaacgccttcaacaacagcattatccccgaggacacattcttcccaagccccgagagcagctgcggtaccctcggagaaccacagctctcttacattctggatgctatcctgttcctctatgggatcgtcctgacactcctgtattgcagactcaaaattcaagttcgcaaagccgccattacctcttacgagaagagtgatggggtgtacacaggactgtctacccggaatcaagaaacctacgaaaccctcaaacatgagaagccacctcagtaa

SEQ ID NO: 2742 - DNA, 2103 bp, synthetic construct
  source 1..2103: mol_type = other DNA
atggccttaccagtgaccgccttgctcctgccgctggccttgctgctccacgccgccaggccggaattcagcagatacctggtcaagcggaccggcgagaaggtgttcctggaatgcgtgcaggacatggaccacgaaaacatgttctggtacagacaggaccccggcctgggcctgagactgatctacttcagctacgacgtgaagatgaaggaaaagggcgacatccccgagggctacagcgtgtccagagagaagaaagagcggttcagcctgatcctggaaagcgccagcaccaaccagaccagcatgtacctgtgtgccagcagcctgtggggcagactggctaagaacatccagtatttcggagccggcaccagactgtctgttctcgagctcgaggacctgaagaacgtgttcccacctgaggtggccgtgttcgagcctagcgaggccgagatcagccacacccagaaagccaccctcgtgtgcctggctaccggcttctaccccgaccatgtggaactgtcttggtgggtcaacggcaaagaggtgcacagcggcgtgtctaccgacccccagccactgaaagaacagcccgccctgaacgacagccggtactgcctgagcagcagactgagagtgtccgccaccttctggcagaacccccggaaccacttcagatgccaggtgcagttctacggcctgagcgagaacgacgagtggacccaggacagagccaagcccgtgacccagatcgtgtctgccgaagcctggggcagagccgattgcggatcccaggctcagagcgattgcagctgtagcacagtgtctccaggcgtgctggccggaattgtgatgggcgatctggtgctgacagtgctgattgccctggccgtgtacttcctgggtagactggtgcctagaggaagaggcgctgccgaagccgccacaagaaagcagagaatcaccgagacagagagcccctaccaagagctgcaaggccagagaagcgacgtgtacagcgacctgaatacccagcggccttactacaaaagggccaagcgatctggatctggagcaacaaacttctcactactcaaacaagcaggtgacgtggaggagaatcccgggcctactagtatggactggatttggcgcatccttttccttgtcggcgctgctaccggcgcgcattccttcgaagaggatcaagtgacccagtctcctgaggctctgaggctgcaagagggcgagagcagctctctgaactgctcctacacagtgtctggcctgaggggcctgttttggtataggcaagaccctggcaagggacccgagttcctgttcacactgtactctgccggcgaggaaaaagagaaagaacgcctgaaggccacgctgaccaagaaagagagcttcctgcacatcacagcccctaagcctgaggacagcgccacctatctgtgtgccgtgcaggccaatagaggcagcacactggggagactgtacttcggcagaggcacccagctgaccgtttggcctgatacgcgtatccagaaccctgatcctgccgtgtaccagctgcgggatagcaagagcagcgacaagagcgtgtgtctgttcaccgacttcgacagccagaccaacgtgtcccagagcaaggactccgacgtgtacatcaccgataagaccgtgctggacatgcggagcatggacttcaagagcaactccgccgtggcctggtccaacaagtccgatttcgcctgcgccaacgccttcaacaacagcattatccccgaggacacattcttcccaagccccgagagcagctgcggtacccaggctcagagcgattgcagctctagcacagtgtctccaggcgtgctggccggaattgtgatgggcgatctggtgctgacagtgctgattgccctggccgtgtacttcctgggtagactggtgcctagaggaagaggcgctgccgaagccgccacaagaaagcagagaatcaccgagacagagagcccctaccaagagctgcaaggccagagaagcgacgtgtacagcgacctgaatacccagcggccttactacaaataa

SEQ ID NO: 2743 - DNA, 2229 bp, synthetic construct
  source 1..2229: mol_type = other DNA
atggccttaccagtgaccgccttgctcctgccgctggccttgctgctccacgccgccaggccggaattcagcagatacctggtcaagcggaccggcgagaaggtgttcctggaatgcgtgcaggacatggaccacgaaaacatgttctggtacagacaggaccccggcctgggcctgagactgatctacttcagctacgacgtgaagatgaaggaaaagggcgacatccccgagggctacagcgtgtccagagagaagaaagagcggttcagcctgatcctggaaagcgccagcaccaaccagaccagcatgtacctgtgtgccagcagcctgtggggcagactggctaagaacatccagtatttcggagccggcaccagactgtctgttctcgagctcgaggacctgaagaacgtgttcccacctgaggtggccgtgttcgagcctagcgaggccgagatcagccacacccagaaagccaccctcgtgtgcctggctaccggcttctaccccgaccatgtggaactgtcttggtgggtcaacggcaaagaggtgcacagcggcgtgtctaccgacccccagccactgaaagaacagcccgccctgaacgacagccggtactgcctgagcagcagactgagagtgtccgccaccttctggcagaacccccggaaccacttcagatgccaggtgcagttctacggcctgagcgagaacgacgagtggacccaggacagagccaagcccgtgacccagatcgtgtctgccgaagcctggggcagagccgattgcggatcccaggctcagagcgattgcagctgtagcacagtgtctccaggcgtgctggccggaattgtgatgggcgatctggtgctgacagtgctgattgccctggccgtgtacttcctgggtagactggtgcctagaggaagaggcgctgccgaagccgccacaagaaagcagagaatcaccgagacagagagcccctaccaagagctgcaaggccagagaagcgacgtgtacagcgacctgaatacccagcggccttactacaaaagggccaagcgatctggatctggagcaacaaacttctcactactcaaacaagcaggtgacgtggaggagaatcccgggcctactagtatggactggatttggcgcatccttttccttgtcggcgctgctaccggcgcgcattccttcgaagaggatcaagtgacccagtctcctgaggctctgaggctgcaagagggcgagagcagctctctgaactgctcctacacagtgtctggcctgaggggcctgttttggtataggcaagaccctggcaagggacccgagttcctgttcacactgtactctgccggcgaggaaaaagagaaagaacgcctgaaggccacgctgaccaagaaagagagcttcctgcacatcacagcccctaagcctgaggacagcgccacctatctgtgtgccgtgcaggccaatagaggcagcacactggggagactgtacttcggcagaggcacccagctgaccgtttggcctgatacgcgtatccagaaccctgatcctgccgtgtaccagctgcgggatagcaagagcagcgacaagagcgtgtgtctgttcaccgacttcgacagccagaccaacgtgtcccagagcaaggactccgacgtgtacatcaccgataagaccgtgctggacatgcggagcatggacttcaagagcaactccgccgtggcctggtccaacaagtccgatttcgcctgcgccaacgccttcaacaacagcattatccccgaggacacattcttcccaagccccgagagcagctgcggtacccaggctcagagcgattgcagctgtagcacagtgtctccaggcgtgctggccggaattgtgatgggcgatctggtgctgacagtgctgattgccctggccgtgtacttcctgggtagactggtgcctagaggaagaggcgctgccgaagccgccacaagaaagcagagaatcaccgagacagagagcccctaccaagagctgcaaggccagagaagcgacgtgtacagcgacctgaatacccagaaacggggcagaaagaaactcctgtatatattcaaacaaccatttatgagaccagtacaaactactcaagaggaagatggctgtagctgccgatttccagaagaagaagaaggaggatgtgaactgcggccttactacaaataa

SEQ ID NO: 2744 - DNA, 2226 bp, synthetic construct
  source 1..2226: mol_type = other DNA
atggccttaccagtgaccgccttgctcctgccgctggccttgctgctccacgccgccaggccggaattcagcagatacctggtcaagcggaccggcgagaaggtgttcctggaatgcgtgcaggacatggaccacgaaaacatgttctggtacagacaggaccccggcctgggcctgagactgatctacttcagctacgacgtgaagatgaaggaaaagggcgacatccccgagggctacagcgtgtccagagagaagaaagagcggttcagcctgatcctggaaagcgccagcaccaaccagaccagcatgtacctgtgtgccagcagcctgtggggcagactggctaagaacatccagtatttcggagccggcaccagactgtctgttctcgagctcgaggacctgaagaacgtgttcccacctgaggtggccgtgttcgagcctagcgaggccgagatcagccacacccagaaagccaccctcgtgtgcctggctaccggcttctaccccgaccatgtggaactgtcttggtgggtcaacggcaaagaggtgcacagcggcgtgtctaccgacccccagccactgaaagaacagcccgccctgaacgacagccggtactgcctgagcagcagactgagagtgtccgccaccttctggcagaacccccggaaccacttcagatgccaggtgcagttctacggcctgagcgagaacgacgagtggacccaggacagagccaagcccgtgacccagatcgtgtctgccgaagcctggggcagagccgattgcggatcccaggctcagagcgattgcagctgtagcacagtgtctccaggcgtgctggccggaattgtgatgggcgatctggtgctgacagtgctgattgccctggccgtgtacttcctgggtagactggtgcctagaggaagaggcgctgccgaagccgccacaagaaagcagagaatcaccgagacagagagcccctaccaagagctgcaaggccagagaagcgacgtgtacagcgacctgaatacccagcggccttactacaaaagggccaagcgatctggatctggagcaacaaacttctcactactcaaacaagcaggtgacgtggaggagaatcccgggcctactagtatggactggatttggcgcatccttttccttgtcggcgctgctaccggcgcgcattccttcgaagaggatcaagtgacccagtctcctgaggctctgaggctgcaagagggcgagagcagctctctgaactgctcctacacagtgtctggcctgaggggcctgttttggtataggcaagaccctggcaagggacccgagttcctgttcacactgtactctgccggcgaggaaaaagagaaagaacgcctgaaggccacgctgaccaagaaagagagcttcctgcacatcacagcccctaagcctgaggacagcgccacctatctgtgtgccgtgcaggccaatagaggcagcacactggggagactgtacttcggcagaggcacccagctgaccgtttggcctgatacgcgtatccagaaccctgatcctgccgtgtaccagctgcgggatagcaagagcagcgacaagagcgtgtgtctgttcaccgacttcgacagccagaccaacgtgtcccagagcaaggactccgacgtgtacatcaccgataagaccgtgctggacatgcggagcatggacttcaagagcaactccgccgtggcctggtccaacaagtccgatttcgcctgcgccaacgccttcaacaacagcattatccccgaggacacattcttcccaagccccgagagcagctgcggtacccaggctcagagcgattgcagctgtagcacagtgtctccaggcgtgctggccggaattgtgatgggcgatctggtgctgacagtgctgattgccctggccgtgtacttcctgggtagactggtgcctagaggaagaggcgctgccgaagccgccacaagaaagcagagaatcaccgagacagagagcccctaccaagagctgcaaggccagagaagcgacgtgtacagcgacctgaatacccagaggagcaagcggtcacggctgctccacagcgattacatgaatatgacaccacgaagaccgggtcctactcgcaaacactaccaaccctacgcacctccccgcgactttgcagcgtaccgatctcggccttactacaaataa

SEQ ID NO: 2745 - DNA, 2211 bp, synthetic construct
  source 1..2211: mol_type = other DNA
atggccttaccagtgaccgccttgctcctgccgctggccttgctgctccacgccgccaggccggaattcagcagatacctggtcaagcggaccggcgagaaggtgttcctggaatgcgtgcaggacatggaccacgaaaacatgttctggtacagacaggaccccggcctgggcctgagactgatctacttcagctacgacgtgaagatgaaggaaaagggcgacatccccgagggctacagcgtgtccagagagaagaaagagcggttcagcctgatcctggaaagcgccagcaccaaccagaccagcatgtacctgtgtgccagcagcctgtggggcagactggctaagaacatccagtatttcggagccggcaccagactgtctgttctcgagctcgaggacctgaagaacgtgttcccacctgaggtggccgtgttcgagcctagcgaggccgagatcagccacacccagaaagccaccctcgtgtgcctggctaccggcttctaccccgaccatgtggaactgtcttggtgggtcaacggcaaagaggtgcacagcggcgtgtctaccgacccccagccactgaaagaacagcccgccctgaacgacagccggtactgcctgagcagcagactgagagtgtccgccaccttctggcagaacccccggaaccacttcagatgccaggtgcagttctacggcctgagcgagaacgacgagtggacccaggacagagccaagcccgtgacccagatcgtgtctgccgaagcctggggcagagccgattgcggatcccaggctcagagcgattgcagctgtagcacagtgtctccaggcgtgctggccggaattgtgatgggcgatctggtgctgacagtgctgattgccctggccgtgtacttcctgggtagactggtgcctagaggaagaggcgctgccgaagccgccacaagaaagcagagaatcaccgagacagagagcccctaccaagagctgcaaggccagagaagcgacgtgtacagcgacctgaatacccagcggccttactacaaaagggccaagcgatctggatctggagcaacaaacttctcactactcaaacaagcaggtgacgtggaggagaatcccgggcctactagtatggactggatttggcgcatccttttccttgtcggcgctgctaccggcgcgcattccttcgaagaggatcaagtgacccagtctcctgaggctctgaggctgcaagagggcgagagcagctctctgaactgctcctacacagtgtctggcctgaggggcctgttttggtataggcaagaccctggcaagggacccgagttcctgttcacactgtactctgccggcgaggaaaaagagaaagaacgcctgaaggccacgctgaccaagaaagagagcttcctgcacatcacagcccctaagcctgaggacagcgccacctatctgtgtgccgtgcaggccaatagaggcagcacactggggagactgtacttcggcagaggcacccagctgaccgtttggcctgatacgcgtatccagaaccctgatcctgccgtgtaccagctgcgggatagcaagagcagcgacaagagcgtgtgtctgttcaccgacttcgacagccagaccaacgtgtcccagagcaaggactccgacgtgtacatcaccgataagaccgtgctggacatgcggagcatggacttcaagagcaactccgccgtggcctggtccaacaagtccgatttcgcctgcgccaacgccttcaacaacagcattatccccgaggacacattcttcccaagccccgagagcagctgcggtacccaggctcagagcgattgcagctgtagcacagtgtctccaggcgtgctggccggaattgtgatgggcgatctggtgctgacagtgctgattgccctggccgtgtacttcctgggtagactggtgcctagaggaagaggcgctgccgaagccgccacaagaaagcagagaatcaccgagacagagagcccctaccaagagctgcaaggccagagaagcgacgtgtacagcgacctgaatacccagagggaccaaagactgcctcctgacgctcacaaacctccaggcggaggcagcttcagaacccctatccaagaggaacaggctgacgcccacagcaccctggcaaaaattcggccttactacaaataa

SEQ ID NO: 2746 - DNA, 2463 bp, synthetic construct
  source 1..2463: mol_type = other DNA
atggccttaccagtgaccgccttgctcctgccgctggccttgctgctccacgccgccaggccggaattcagcagatacctggtcaagcggaccggcgagaaggtgttcctggaatgcgtgcaggacatggaccacgaaaacatgttctggtacagacaggaccccggcctgggcctgagactgatctacttcagctacgacgtgaagatgaaggaaaagggcgacatccccgagggctacagcgtgtccagagagaagaaagagcggttcagcctgatcctggaaagcgccagcaccaaccagaccagcatgtacctgtgtgccagcagcctgtggggcagactggctaagaacatccagtatttcggagccggcaccagactgtctgttctcgagctcgaggacctgaagaacgtgttcccacctgaggtggccgtgttcgagcctagcgaggccgagatcagccacacccagaaagccaccctcgtgtgcctggctaccggcttctaccccgaccatgtggaactgtcttggtgggtcaacggcaaagaggtgcacagcggcgtgtctaccgacccccagccactgaaagaacagcccgccctgaacgacagccggtactgcctgagcagcagactgagagtgtccgccaccttctggcagaacccccggaaccacttcagatgccaggtgcagttctacggcctgagcgagaacgacgagtggacccaggacagagccaagcccgtgacccagatcgtgtctgccgaagcctggggcagagccgattgcggatcccaggctcagagcgattgcagctgtagcacagtgtctccaggcgtgctggccggaattgtgatgggcgatctggtgctgacagtgctgattgccctggccgtgtacttcctgggtagactggtgcctagaggaagaggcgctgccgaagccgccacaagaaagcagagaatcaccgagacagagagcccctaccaagagctgcaaggccagagaagcgacgtgtacagcgacctgaatacccagcggccttactacaaaagggccaagcgatctggatctggagcaacaaacttctcactactcaaacaagcaggtgacgtggaggagaatcccgggcctactagtatggactggatttggcgcatccttttccttgtcggcgctgctaccggcgcgcattccttcgaagaggatcaagtgacccagtctcctgaggctctgaggctgcaagagggcgagagcagctctctgaactgctcctacacagtgtctggcctgaggggcctgttttggtataggcaagaccctggcaagggacccgagttcctgttcacactgtactctgccggcgaggaaaaagagaaagaacgcctgaaggccacgctgaccaagaaagagagcttcctgcacatcacagcccctaagcctgaggacagcgccacctatctgtgtgccgtgcaggccaatagaggcagcacactggggagactgtacttcggcagaggcacccagctgaccgtttggcctgatacgcgtatccagaaccctgatcctgccgtgtaccagctgcgggatagcaagagcagcgacaagagcgtgtgtctgttcaccgacttcgacagccagaccaacgtgtcccagagcaaggactccgacgtgtacatcaccgataagaccgtgctggacatgcggagcatggacttcaagagcaactccgccgtggcctggtccaacaagtccgatttcgcctgcgccaacgccttcaacaacagcattatccccgaggacacattcttcccaagccccgagagcagctgcggtacccaggctcagagcgattgcagctgtagcacagtgtctccaggcgtgctggccggaattgtgatgggcgatctggtgctgacagtgctgattgccctggccgtgtacttcctgggtagactggtgcctagaggaagaggcgctgccgaagccgccacaagaaagcagagaatcaccgagacagagagcccctaccaagagctgcaaggccagagaagcgacgtgtacagcgacctgaatacccagtggcggcggaagcggaaagagaagcagtctgagacaagccccaaagagttcctgaccatctacgaggacgtgaaggacctgaaaacccggcggaaccacgaacaagagcagacctttcctggcggaggcagcaccatctacagcatgatccagagccagagcagcgcccctacaagccaagagcctgcctacacactgtactccctgatccagcctagcagaaagagcggcagccggaagagaaatcacagccccagcttcaacagcacgatctacgaagtgatcggcaagagccagccaaaggctcagaaccctgccagactgagccggaaagagctggaaaacttcgacgtgtacagccggccttactacaaataa

SEQ ID NO: 2747 - DNA, 2739 bp, synthetic construct
  source 1..2739: mol_type = other DNA
atggccttaccagtgaccgccttgctcctgccgctggccttgctgctccacgccgccaggccggaattcagcagatacctggtcaagcggaccggcgagaaggtgttcctggaatgcgtgcaggacatggaccacgaaaacatgttctggtacagacaggaccccggcctgggcctgagactgatctacttcagctacgacgtgaagatgaaggaaaagggcgacatccccgagggctacagcgtgtccagagagaagaaagagcggttcagcctgatcctggaaagcgccagcaccaaccagaccagcatgtacctgtgtgccagcagcctgtggggcagactggctaagaacatccagtatttcggagccggcaccagactgtctgttctcgagctcgaggacctgaagaacgtgttcccacctgaggtggccgtgttcgagcctagcgaggccgagatcagccacacccagaaagccaccctcgtgtgcctggctaccggcttctaccccgaccatgtggaactgtcttggtgggtcaacggcaaagaggtgcacagcggcgtgtctaccgacccccagccactgaaagaacagcccgccctgaacgacagccggtactgcctgagcagcagactgagagtgtccgccaccttctggcagaacccccggaaccacttcagatgccaggtgcagttctacggcctgagcgagaacgacgagtggacccaggacagagccaagcccgtgacccagatcgtgtctgccgaagcctggggcagagccgattgcggatcccaggctcagagcgattgcagctgtagcacagtgtctccaggcgtgctggccggaattgtgatgggcgatctggtgctgacagtgctgattgccctggccgtgtacttcctgggtagactggtgcctagaggaagaggcgctgccgaagccgccacaagaaagcagagaatcaccgagacagagagcccctaccaagagctgcaaggccagagaagcgacgtgtacagcgacctgaatacccagagagtgaagttcagcagaagcgccgacgcccctgcctaccagcagggacagaaccaactgtacaacgagctgaacctgggcagacgggaagagtacgacgtgctggacaagcggagaggcagggaccctgagatgggcggaaagccccagcggagaaagaacccccaggaaggactgtataacgaactccagaaagacaagatggccgaagcctacagcgagatcggcatgaagggcgagcggagaagaggcaagggccacgatggcctgtaccagggcctgagcaccgccaccaaggacacctatgacgccctgcacatgcaggccctgcctccaagaagggccaagcgatctggatctggagcaacaaacttctcactactcaaacaagcaggtgacgtggaggagaatcccgggcctactagtatggactggatttggcgcatccttttccttgtcggcgctgctaccggcgcgcattccttcgaagaggatcaagtgacccagtctcctgaggctctgaggctgcaagagggcgagagcagctctctgaactgctcctacacagtgtctggcctgaggggcctgttttggtataggcaagaccctggcaagggacccgagttcctgttcacactgtactctgccggcgaggaaaaagagaaagaacgcctgaaggccacgctgaccaagaaagagagcttcctgcacatcacagcccctaagcctgaggacagcgccacctatctgtgtgccgtgcaggccaatagaggcagcacactggggagactgtacttcggcagaggcacccagctgaccgtttggcctgatacgcgtatccagaaccctgatcctgccgtgtaccagctgcgggatagcaagagcagcgacaagagcgtgtgtctgttcaccgacttcgacagccagaccaacgtgtcccagagcaaggactccgacgtgtacatcaccgataagaccgtgctggacatgcggagcatggacttcaagagcaactccgccgtggcctggtccaacaagtccgatttcgcctgcgccaacgccttcaacaacagcattatccccgaggacacattcttcccaagccccgagagcagctgcggtaccacaacgccgggcgaaaggagttccttgccggccttttaccccggcacaagcggaagctgtagtgggtgtggaagcctcagcctcccacttcttgcgggcctcgtcgcggcagatgcagtagcttcacttcttattgtaggcgcggtatttctctgtgctcgaccaaggaggtcacccgctcaggaggatggtaaggtgtatataaatatgccaggacgcggaagctctagacgggttaagttttccagatccgcagacgcacccgcttaccaacaagggcagaaccaactctacaatgaacttaatttggggcggagggaagagtacgacgttctggacaaaaggaggggacgagatcccgagatgggcggaaagcctcagcgaaggaagaatccgcaagaggggctttataacgaactccagaaagataaaatggcagaagcctatagtgagattgggatgaagggagaaaggaggaggggtaaaggtcacgatgggttgtaccaaggattgagcacagccactaaagatacctatgatgcgctccacatgcaggccctgccgccaagataa

SEQ ID NO: 2748 - DNA, 2517 bp, synthetic construct
  source 1..2517: mol_type = other DNA
atggccttaccagtgaccgccttgctcctgccgctggccttgctgctccacgccgccaggccggaattcagcagatacctggtcaagcggaccggcgagaaggtgttcctggaatgcgtgcaggacatggaccacgaaaacatgttctggtacagacaggaccccggcctgggcctgagactgatctacttcagctacgacgtgaagatgaaggaaaagggcgacatccccgagggctacagcgtgtccagagagaagaaagagcggttcagcctgatcctggaaagcgccagcaccaaccagaccagcatgtacctgtgtgccagcagcctgtggggcagactggctaagaacatccagtatttcggagccggcaccagactgtctgttctcgagctcgaggacctgaagaacgtgttcccacctgaggtggccgtgttcgagcctagcgaggccgagatcagccacacccagaaagccaccctcgtgtgcctggctaccggcttctaccccgaccatgtggaactgtcttggtgggtcaacggcaaagaggtgcacagcggcgtgtctaccgacccccagccactgaaagaacagcccgccctgaacgacagccggtactgcctgagcagcagactgagagtgtccgccaccttctggcagaacccccggaaccacttcagatgccaggtgcagttctacggcctgagcgagaacgacgagtggacccaggacagagccaagcccgtgacccagatcgtgtctgccgaagcctggggcagagccgattgcggatcccaggctcagagcgattgcagctgtagcacagtgtctccaggcgtgctggccggaattgtgatgggcgatctggtgctgacagtgctgattgccctggccgtgtacttcctgggtagactggtgcctagaggaagaggcgctgccgaagccgccacaagaaagcagagaatcaccgagacagagagcccctaccaagagctgcaaggccagagaagcgacgtgtacagcgacctgaatacccagagagtgaagttcagcagaagcgccgacgcccctgcctaccagcagggacagaaccaactgtacaacgagctgaacctgggcagacgggaagagtacgacgtgctggacaagcggagaggcagggaccctgagatgggcggaaagccccagcggagaaagaacccccaggaaggactgtataacgaactccagaaagacaagatggccgaagcctacagcgagatcggcatgaagggcgagcggagaagaggcaagggccacgatggcctgtaccagggcctgagcaccgccaccaaggacacctatgacgccctgcacatgcaggccctgcctccaagaagggccaagcgatctggatctggagcaacaaacttctcactactcaaacaagcaggtgacgtggaggagaatcccgggcctactagtatggactggatttggcgcatccttttccttgtcggcgctgctaccggcgcgcattccttcgaagaggatcaagtgacccagtctcctgaggctctgaggctgcaagagggcgagagcagctctctgaactgctcctacacagtgtctggcctgaggggcctgttttggtataggcaagaccctggcaagggacccgagttcctgttcacactgtactctgccggcgaggaaaaagagaaagaacgcctgaaggccacgctgaccaagaaagagagcttcctgcacatcacagcccctaagcctgaggacagcgccacctatctgtgtgccgtgcaggccaatagaggcagcacactggggagactgtacttcggcagaggcacccagctgaccgtttggcctgatacgcgtatccagaaccctgatcctgccgtgtaccagctgcgggatagcaagagcagcgacaagagcgtgtgtctgttcaccgacttcgacagccagaccaacgtgtcccagagcaaggactccgacgtgtacatcaccgataagaccgtgctggacatgcggagcatggacttcaagagcaactccgccgtggcctggtccaacaagtccgatttcgcctgcgccaacgccttcaacaacagcattatccccgaggacacattcttcccaagccccgagagcagctgcggtaccacaacgccgggcgaaaggagttccttgccggccttttaccccggcacaagcggaagctgtagtgggtgtggaagcctcagcctcccacttcttgcgggcctcgtcgcggcagatgcagtagcttcacttcttattgtaggcgcggtatttaagagaggccggaagaagctgctgtacatcttcaagcagcctttcatgcggcccgtgcagaccacccaggaagaggacggctgctcctgccggttccccgaggaagaagaaggcggctgcgagctgctctgtgctcgaccaaggaggtcacccgctcaggaggatggtaaggtgtatataaatatgccaggacgcggataa

SEQ ID NO: 2749 - DNA, 2514 bp, synthetic construct
  source 1..2514: mol_type = other DNA
atggccttaccagtgaccgccttgctcctgccgctggccttgctgctccacgccgccaggccggaattcagcagatacctggtcaagcggaccggcgagaaggtgttcctggaatgcgtgcaggacatggaccacgaaaacatgttctggtacagacaggaccccggcctgggcctgagactgatctacttcagctacgacgtgaagatgaaggaaaagggcgacatccccgagggctacagcgtgtccagagagaagaaagagcggttcagcctgatcctggaaagcgccagcaccaaccagaccagcatgtacctgtgtgccagcagcctgtggggcagactggctaagaacatccagtatttcggagccggcaccagactgtctgttctcgagctcgaggacctgaagaacgtgttcccacctgaggtggccgtgttcgagcctagcgaggccgagatcagccacacccagaaagccaccctcgtgtgcctggctaccggcttctaccccgaccatgtggaactgtcttggtgggtcaacggcaaagaggtgcacagcggcgtgtctaccgacccccagccactgaaagaacagcccgccctgaacgacagccggtactgcctgagcagcagactgagagtgtccgccaccttctggcagaacccccggaaccacttcagatgccaggtgcagttctacggcctgagcgagaacgacgagtggacccaggacagagccaagcccgtgacccagatcgtgtctgccgaagcctggggcagagccgattgcggatcccaggctcagagcgattgcagctgtagcacagtgtctccaggcgtgctggccggaattgtgatgggcgatctggtgctgacagtgctgattgccctggccgtgtacttcctgggtagactggtgcctagaggaagaggcgctgccgaagccgccacaagaaagcagagaatcaccgagacagagagcccctaccaagagctgcaaggccagagaagcgacgtgtacagcgacctgaatacccagagagtgaagttcagcagaagcgccgacgcccctgcctaccagcagggacagaaccaactgtacaacgagctgaacctgggcagacgggaagagtacgacgtgctggacaagcggagaggcagggaccctgagatgggcggaaagccccagcggagaaagaacccccaggaaggactgtataacgaactccagaaagacaagatggccgaagcctacagcgagatcggcatgaagggcgagcggagaagaggcaagggccacgatggcctgtaccagggcctgagcaccgccaccaaggacacctatgacgccctgcacatgcaggccctgcctccaagaagggccaagcgatctggatctggagcaacaaacttctcactactcaaacaagcaggtgacgtggaggagaatcccgggcctactagtatggactggatttggcgcatccttttccttgtcggcgctgctaccggcgcgcattccttcgaagaggatcaagtgacccagtctcctgaggctctgaggctgcaagagggcgagagcagctctctgaactgctcctacacagtgtctggcctgaggggcctgttttggtataggcaagaccctggcaagggacccgagttcctgttcacactgtactctgccggcgaggaaaaagagaaagaacgcctgaaggccacgctgaccaagaaagagagcttcctgcacatcacagcccctaagcctgaggacagcgccacctatctgtgtgccgtgcaggccaatagaggcagcacactggggagactgtacttcggcagaggcacccagctgaccgtttggcctgatacgcgtatccagaaccctgatcctgccgtgtaccagctgcgggatagcaagagcagcgacaagagcgtgtgtctgttcaccgacttcgacagccagaccaacgtgtcccagagcaaggactccgacgtgtacatcaccgataagaccgtgctggacatgcggagcatggacttcaagagcaactccgccgtggcctggtccaacaagtccgatttcgcctgcgccaacgccttcaacaacagcattatccccgaggacacattcttcccaagccccgagagcagctgcggtaccacaacgccgggcgaaaggagttccttgccggccttttaccccggcacaagcggaagctgtagtgggtgtggaagcctcagcctcccacttcttgcgggcctcgtcgcggcagatgcagtagcttcacttcttattgtaggcgcggtatttaggagcaagcggtcacggctgctccacagcgattacatgaatatgacaccacgaagaccgggtcctactcgcaaacactaccaaccctacgcacctccccgcgactttgcagcgtaccgatctctctgtgctcgaccaaggaggtcacccgctcaggaggatggtaaggtgtatataaatatgccaggacgcggataa

SEQ ID NO: 2750 - DNA, 3249 bp, synthetic construct
  source 1..3249: mol_type = other DNA
atggccttaccagtgaccgccttgctcctgccgctggccttgctgctccacgccgccaggccggaattcagcagatacctggtcaagcggaccggcgagaaggtgttcctggaatgcgtgcaggacatggaccacgaaaacatgttctggtacagacaggaccccggcctgggcctgagactgatctacttcagctacgacgtgaagatgaaggaaaagggcgacatccccgagggctacagcgtgtccagagagaagaaagagcggttcagcctgatcctggaaagcgccagcaccaaccagaccagcatgtacctgtgtgccagcagcctgtggggcagactggctaagaacatccagtatttcggagccggcaccagactgtctgttctcgagctcgaggacctgaagaacgtgttcccacctgaggtggccgtgttcgagcctagcgaggccgagatcagccacacccagaaagccaccctcgtgtgcctggctaccggcttctaccccgaccatgtggaactgtcttggtgggtcaacggcaaagaggtgcacagcggcgtgtctaccgacccccagccactgaaagaacagcccgccctgaacgacagccggtactgcctgagcagcagactgagagtgtccgccaccttctggcagaacccccggaaccacttcagatgccaggtgcagttctacggcctgagcgagaacgacgagtggacccaggacagagccaagcccgtgacccagatcgtgtctgccgaagcctggggcagagccgattgcggatcccagagcttcggcctgctggaccccaagctgtgctacctgctggatggcatcctgttcatctacggcgtgatcctgaccgccctgttcctgagagtgaagttcagcagaagcgccgacgcccctgcctaccagcagggacagaaccaactgtacaacgagctgaacctgggcagacgggaagagtacgacgtgctggacaagcggagaggcagggaccctgagatgggcggaaagccccagcggagaaagaacccccaggaaggactgtataacgaactccagaaagacaagatggccgaagcctacagcgagatcggcatgaagggcgagcggagaagaggcaagggccacgatggcctgtaccagggcctgagcaccgccaccaaggacacctatgacgccctgcacatgcaggccctgcctccaagaagggccaagcgatctggatctggagcaacaaacttctcactactcaaacaagcaggtgacgtggaggagaatcccgggcctactagtatggactggatttggcgcatccttttccttgtcggcgctgctaccggcgcgcattccttcgaagaggatcaagtgacccagtctcctgaggctctgaggctgcaagagggcgagagcagctctctgaactgctcctacacagtgtctggcctgaggggcctgttttggtataggcaagaccctggcaagggacccgagttcctgttcacactgtactctgccggcgaggaaaaagagaaagaacgcctgaaggccacgctgaccaagaaagagagcttcctgcacatcacagcccctaagcctgaggacagcgccacctatctgtgtgccgtgcaggccaatagaggcagcacactggggagactgtacttcggcagaggcacccagctgaccgtttggcctgatacgcgtatccagaaccctgatcctgccgtgtaccagctgcgggatagcaagagcagcgacaagagcgtgtgtctgttcaccgacttcgacagccagaccaacgtgtcccagagcaaggactccgacgtgtacatcaccgataagaccgtgctggacatgcggagcatggacttcaagagcaactccgccgtggcctggtccaacaagtccgatttcgcctgcgccaacgccttcaacaacagcattatccccgaggacacattcttcccaagccccgagagcagctgcggtacccagagttttgggttgttggaccctaaattgtgctatctgttggacggaatcctgttcatttacggagtgatcctgaccgcattgttcctgcgggttaagttttccagatccgcagacgcacccgcttaccaacaagggcagaaccaactctacaatgaacttaatttggggcggagggaagagtacgacgttctggacaaaaggaggggacgagatcccgagatgggcggaaagcctcagcgaaggaagaatccgcaagaggggctttataacgaactccagaaagataaaatggcagaagcctatagtgagattgggatgaagggagaaaggaggaggggtaaaggtcacgatgggttgtaccaaggattgagcacagccactaaagatacctatgatgcgctccacatgcaggccctgccgccaagacgcgccaagagaagcggatctggcgtgaagcagaccctgaatttcgacctgctgaagctggctggcgacgtggaatccaacccaggcccttctagaggccatatggctctgcctgtgacagctctgctgctgcctctggcactgctgcttcatgctgctagacctagccagtttagagtgtcccctctggacagaacctggaacctgggcgagacagtggaactgaagtgccaggtgctgctgagcaaccctacaagcggctgctcctggctgtttcagcctagaggtgcagccgcctctcctacctttctgctgtacctgagccagaacaagcccaaggccgccgaaggactggacacccagagattcagcggcaagagactgggcgacaccttcgtgctgaccctgagcgacttcagaagagagaacgagggctactacttctgtagcgccctgagcaacagcatcatgtacttcagccacttcgtgcccgtgtttctgcccgccaagcctacaacaacccctgctcctagacctcctacaccagctcctacaatcgccagccagcctctgtctctcagacccgaagcctgtagacctgctgctggcggagctgtgcataccagaggactggatttcgcctgcgacatctacatctgggctcctctggctggcacatgtggcgtgctgctgctgtccctggtcatcaccctgtactgcaaccaccggaacaggcggagagtgtgcaagtgccctagacctgtggtcaagagcggcgacaagcctagcctgagcgccagatatgtt

SEQ ID NO: 2751 - DNA, 2472 bp, synthetic construct
  source 1..2472: mol_type = other DNA
atggccttaccagtgaccgccttgctcctgccgctggccttgctgctccacgccgccaggccggaattcagcagatacctggtcaagcggaccggcgagaaggtgttcctggaatgcgtgcaggacatggaccacgaaaacatgttctggtacagacaggaccccggcctgggcctgagactgatctacttcagctacgacgtgaagatgaaggaaaagggcgacatccccgagggctacagcgtgtccagagagaagaaagagcggttcagcctgatcctggaaagcgccagcaccaaccagaccagcatgtacctgtgtgccagcagcctgtggggcagactggctaagaacatccagtatttcggagccggcaccagactgtctgttctcgagctcgaggacctgaagaacgtgttcccacctgaggtggccgtgttcgagcctagcgaggccgagatcagccacacccagaaagccaccctcgtgtgcctggctaccggcttctaccccgaccatgtggaactgtcttggtgggtcaacggcaaagaggtgcacagcggcgtgtctaccgacccccagccactgaaagaacagcccgccctgaacgacagccggtactgcctgagcagcagactgagagtgtccgccaccttctggcagaacccccggaaccacttcagatgccaggtgcagttctacggcctgagcgagaacgacgagtggacccaggacagagccaagcccgtgacccagatcgtgtctgccgaagcctggggcagagccgattgcggatcccagagcttcggcctgctggaccccaagctgtgctacctgctggatggcatcctgttcatctacggcgtgatcctgaccgccctgttcctgagagtgaagttcagcagaagcgccgacgcccctgcctaccagcagggacagaaccaactgtacaacgagctgaacctgggcagacgggaagagtacgacgtgctggacaagcggagaggcagggaccctgagatgggcggaaagccccagcggagaaagaacccccaggaaggactgtataacgaactccagaaagacaagatggccgaagcctacagcgagatcggcatgaagggcgagcggagaagaggcaagggccacgatggcctgtaccagggcctgagcaccgccaccaaggacacctatgacgccctgcacatgcaggccctgcctccaagaagggccaagcgatctggatctggagcaacaaacttctcactactcaaacaagcaggtgacgtggaggagaatcccgggcctactagtatggactggatttggcgcatccttttccttgtcggcgctgctaccggcgcgcattccttcgaagaggatcaagtgacccagtctcctgaggctctgaggctgcaagagggcgagagcagctctctgaactgctcctacacagtgtctggcctgaggggcctgttttggtataggcaagaccctggcaagggacccgagttcctgttcacactgtactctgccggcgaggaaaaagagaaagaacgcctgaaggccacgctgaccaagaaagagagcttcctgcacatcacagcccctaagcctgaggacagcgccacctatctgtgtgccgtgcaggccaatagaggcagcacactggggagactgtacttcggcagaggcacccagctgaccgtttggcctgatacgcgtgcctctacaaagggaccctccgtgtttcctctggctcccagcagcaagtctacaagcggaggaacagccgctctgggctgcctggtcaaggattactttcccgagcctgtgaccgtgtcctggaatagcggagcactgacaagcggcgtgcacacctttccagccgtgctgcaaagcagcggcctgtactctctgagcagcgtggtcacagtgcctagctctagcctgggcacccagacctacatctgcaatgtgaaccacaagcctagcaacaccaaggtggacaagagagtggaacccaagagctgtggtacccagagttttgggttgttggaccctaaattgagctatctgttggacggaatcctgttcatttacggagtgatcctgaccgcattgttcctgcgggttaagttttccagatccgcagacgcacccgcttaccaacaagggcagaaccaactctacaatgaacttaatttggggcggagggaagagtacgacgttctggacaaaaggaggggacgagatcccgagatgggcggaaagcctcagcgaaggaagaatccgcaagaggggctttataacgaactccagaaagataaaatggcagaagcctatagtgagattgggatgaagggagaaaggaggaggggtaaaggtcacgatgggttgtaccaaggattgagcacagccactaaagatacctatgatgcgctccacatgcaggccctgccgccaagataa

SEQ ID NO: 2752 - DNA, 2445 bp, synthetic construct
  source 1..2445: mol_type = other DNA
atggccttaccagtgaccgccttgctcctgccgctggccttgctgctccacgccgccaggccggaattcagcagatacctggtcaagcggaccggcgagaaggtgttcctggaatgcgtgcaggacatggaccacgaaaacatgttctggtacagacaggaccccggcctgggcctgagactgatctacttcagctacgacgtgaagatgaaggaaaagggcgacatccccgagggctacagcgtgtccagagagaagaaagagcggttcagcctgatcctggaaagcgccagcaccaaccagaccagcatgtacctgtgtgccagcagcctgtggggcagactggctaagaacatccagtatttcggagccggcaccagactgtctgttctcgagctcgaggacctgaagaacgtgttcccacctgaggtggccgtgttcgagcctagcgaggccgagatcagccacacccagaaagccaccctcgtgtgcctggctaccggcttctaccccgaccatgtggaactgtcttggtgggtcaacggcaaagaggtgcacagcggcgtgtctaccgacccccagccactgaaagaacagcccgccctgaacgacagccggtactgcctgagcagcagactgagagtgtccgccaccttctggcagaacccccggaaccacttcagatgccaggtgcagttctacggcctgagcgagaacgacgagtggacccaggacagagccaagcccgtgacccagatcgtgtctgccgaagcctggggcagagccgattgcggatcccagagcttcggcctgctggaccccaagctgtgctacctgctggatggcatcctgttcatctacggcgtgatcctgaccgccctgttcctgagagtgaagttcagcagaagcgccgacgcccctgcctaccagcagggacagaaccaactgtacaacgagctgaacctgggcagacgggaagagtacgacgtgctggacaagcggagaggcagggaccctgagatgggcggaaagccccagcggagaaagaacccccaggaaggactgtataacgaactccagaaagacaagatggccgaagcctacagcgagatcggcatgaagggcgagcggagaagaggcaagggccacgatggcctgtaccagggcctgagcaccgccaccaaggacacctatgacgccctgcacatgcaggccctgcctccaagaagggccaagcgatctggatctggagcaacaaacttctcactactcaaacaagcaggtgacgtggaggagaatcccgggcctactagtatggactggatttggcgcatccttttccttgtcggcgctgctaccggcgcgcattccttcgaagaggatcaagtgacccagtctcctgaggctctgaggctgcaagagggcgagagcagctctctgaactgctcctacacagtgtctggcctgaggggcctgttttggtataggcaagaccctggcaagggacccgagttcctgttcacactgtactctgccggcgaggaaaaagagaaagaacgcctgaaggccacgctgaccaagaaagagagcttcctgcacatcacagcccctaagcctgaggacagcgccacctatctgtgtgccgtgcaggccaatagaggcagcacactggggagactgtacttcggcagaggcacccagctgaccgtttggcctgatacgcgtatccagaaccctgatcctgccgtgtaccagctgcgggatagcaagagcagcgacaagagcgtgtgtctgttcaccgacttcgacagccagaccaacgtgtcccagagcaaggactccgacgtgtacatcaccgataagaccgtgctggacatgcggagcatggacttcaagagcaactccgccgtggcctggtccaacaagtccgatttcgcctgcgccaacgccttcaacaacagcattatccccgaggacacattcttcccaagccccgagagcagctgcggtacccagagttttgggttgttggaccctaaattgagctatctgttggacggaatcctgttcatttacggagtgatcctgaccgcattgttcctgcgggttaagttttccagatccgcagacgcacccgcttaccaacaagggcagaaccaactctacaatgaacttaatttggggcggagggaagagtacgacgttctggacaaaaggaggggacgagatcccgagatgggcggaaagcctcagcgaaggaagaatccgcaagaggggctttataacgaactccagaaagataaaatggcagaagcctatagtgagattgggatgaagggagaaaggaggaggggtaaaggtcacgatgggttgtaccaaggattgagcacagccactaaagatacctatgatgcgctccacatgcaggccctgccgccaagataa

SEQ ID NO: 2753 - DNA, 2952 bp, synthetic construct
  source 1..2952: mol_type = other DNA
atggccttaccagtgaccgccttgctcctgccgctggccttgctgctccacgccgccaggccggaattcagcagatacctggtcaagcggaccggcgagaaggtgttcctggaatgcgtgcaggacatggaccacgaaaacatgttctggtacagacaggaccccggcctgggcctgagactgatctacttcagctacgacgtgaagatgaaggaaaagggcgacatccccgagggctacagcgtgtccagagagaagaaagagcggttcagcctgatcctggaaagcgccagcaccaaccagaccagcatgtacctgtgtgccagcagcctgtggggcagactggctaagaacatccagtatttcggagccggcaccagactgtctgttctcgagctcgagggacagcctaaggccaatcctaccgtgacactgttccctccaagcagcgaagaactccaggccaacaaggccacacttgtgtgcctgatctccgacttctaccctggggctgtgacagtggcttggaaggccgatggatctcctgtgaaagccggcgtggaaaccaccaagccatccaagcagagcaacaacaaatacgccgccagctcctacctgagcctgacacctgagcagtggaagtcccacagatcctacagctgccaagtgacccacgaaggcagcaccgtggaaaagacagtggcccctacagagtgcagcggatccctgggagagcctcagctgtgctatatcctggacgccatcctgtttctgtacggcatcgtgctgaccctgctgtactgccggctgaagatccaagtgcggaaggccgccatcaccagctacgagaaatccgacggcgtgtacaccggcctgagcaccagaaatcaagagacatacgagacactgaagcacgaaaagcctccacaaagggccaagcgatctggatctggagcaacaaacttctcactactcaaacaagcaggtgacgtggaggagaatcccgggcctactagtatggactggatttggcgcatccttttccttgtcggcgctgctaccggcgcgcattccttcgaagaggatcaagtgacccagtctcctgaggctctgaggctgcaagagggcgagagcagctctctgaactgctcctacacagtgtctggcctgaggggcctgttttggtataggcaagaccctggcaagggacccgagttcctgttcacactgtactctgccggcgaggaaaaagagaaagaacgcctgaaggccacgctgaccaagaaagagagcttcctgcacatcacagcccctaagcctgaggacagcgccacctatctgtgtgccgtgcaggccaatagaggcagcacactggggagactgtacttcggcagaggcacccagctgaccgtttggcctgatacgcgtatccagaaccctgatcctgccgtgtaccagctgcgggatagcaagagcagcgacaagagcgtgtgtctgttcaccgacttcgacagccagaccaacgtgtcccagagcaaggactccgacgtgtacatcaccgataagaccgtgctggacatgcggagcatggacttcaagagcaactccgccgtggcctggtccaacaagtccgatttcgcctgcgccaacgccttcaacaacagcattatccccgaggacacattcttcccaagccccgagagcagctgcggtacccagagttttgggttgttggaccctaaattgtgctatctgttggacggaatcctgttcatttacggagtgatcctgaccgcattgttcctgcgggttaagttttccagatccgcagacgcacccgcttaccaacaagggcagaaccaactctacaatgaacttaatttggggcggagggaagagtacgacgttctggacaaaaggaggggacgagatcccgagatgggcggaaagcctcagcgaaggaagaatccgcaagaggggctttataacgaactccagaaagataaaatggcagaagcctatagtgagattgggatgaagggagaaaggaggaggggtaaaggtcacgatgggttgtaccaaggattgagcacagccactaaagatacctatgatgcgctccacatgcaggccctgccgccaagacgcgccaagagaagcggatctggcgtgaagcagaccctgaatttcgacctgctgaagctggctggcgacgtggaatccaacccaggcccttctagaggccatatggctctgcctgtgacagctctgctgctgcctctggcactgctgcttcatgctgctagacctagccagtttagagtgtcccctctggacagaacctggaacctgggcgagacagtggaactgaagtgccaggtgctgctgagcaaccctacaagcggctgctcctggctgtttcagcctagaggtgcagccgcctctcctacctttctgctgtacctgagccagaacaagcccaaggccgccgaaggactggacacccagagattcagcggcaagagactgggcgacaccttcgtgctgaccctgagcgacttcagaagagagaacgagggctactacttctgtagcgccctgagcaacagcatcatgtacttcagccacttcgtgcccgtgtttctgcccgccaagcctacaacaacccctgctcctagacctcctacaccagctcctacaatcgccagccagcctctgtctctcagacccgaagcctgtagacctgctgctggcggagctgtgcataccagaggactggatttcgcctgcgacatctacatctgggctcctctggctggcacatgtggcgtgctgctgctgtccctggtcatcaccctgtactgcaaccaccggaacaggcggagagtgtgcaagtgccctagacctgtggtcaagagcggcgacaagcctagcctgagcgccagatatgtt

SEQ ID NO: 2754 - DNA, 2247 bp, synthetic construct
  source 1..2247: mol_type = other DNA
atggccttaccagtgaccgccttgctcctgccgctggccttgctgctccacgccgccaggccggaattcagcagatacctggtcaagcggaccggcgagaaggtgttcctggaatgcgtgcaggacatggaccacgaaaacatgttctggtacagacaggaccccggcctgggcctgagactgatctacttcagctacgacgtgaagatgaaggaaaagggcgacatccccgagggctacagcgtgtccagagagaagaaagagcggttcagcctgatcctggaaagcgccagcaccaaccagaccagcatgtacctgtgtgccagcagcctgtggggcagactggctaagaacatccagtatttcggagccggcaccagactgtctgttctcgagctcgaggacctgaagaacgtgttcccacctgaggtggccgtgttcgagcctagcgaggccgagatcagccacacccagaaagccaccctcgtgtgcctggctaccggcttctaccccgaccatgtggaactgtcttggtgggtcaacggcaaagaggtgcacagcggcgtgtctaccgacccccagccactgaaagaacagcccgccctgaacgacagccggtactgcctgagcagcagactgagagtgtccgccaccttctggcagaacccccggaaccacttcagatgccaggtgcagttctacggcctgagcgagaacgacgagtggacccaggacagagccaagcccgtgacccagatcgtgtctgccgaagcctggggcagagccgattgcggatcccagagcttcggcctgctggaccccaagctgtgctacctgctggatggcatcctgttcatctacggcgtgatcctgaccgccctgttcctgagagtgaagttcagcagaagcgccgacgcccctgcctaccagcagggacagaaccaactgtacaacgagctgaacctgggcagacgggaagagtacgacgtgctggacaagcggagaggcagggaccctgagatgggcggaaagccccagcggagaaagaacccccaggaaggactgtataacgaactccagaaagacaagatggccgaagcctacagcgagatcggcatgaagggcgagcggagaagaggcaagggccacgatggcctgtaccagggcctgagcaccgccaccaaggacacctatgacgccctgcacatgcaggccctgcctccaagaagggccaagcgatctggatctggagcaacaaacttctcactactcaaacaagcaggtgacgtggaggagaatcccgggcctactagtatggactggatttggcgcatccttttccttgtcggcgctgctaccggcgcgcattccttcgaagaggatcaagtgacccagtctcctgaggctctgaggctgcaagagggcgagagcagctctctgaactgctcctacacagtgtctggcctgaggggcctgttttggtataggcaagaccctggcaagggacccgagttcctgttcacactgtactctgccggcgaggaaaaagagaaagaacgcctgaaggccacgctgaccaagaaagagagcttcctgcacatcacagcccctaagcctgaggacagcgccacctatctgtgtgccgtgcaggccaatagaggcagcacactggggagactgtacttcggcagaggcacccagctgaccgtttggcctgatacgcgtgcctctacaaagggaccctccgtgtttcctctggctcccagcagcaagtctacaagcggaggaacagccgctctgggctgcctggtcaaggattactttcccgagcctgtgaccgtgtcctggaatagcggagcactgacaagcggcgtgcacacctttccagccgtgctgcaaagcagcggcctgtactctctgagcagcgtggtcacagtgcctagctctagcctgggcacccagacctacatctgcaatgtgaaccacaagcctagcaacaccaaggtggacaagagagtggaacccaagagctgtggtaccctcggagaaccacagctctgttacattctggatgctatcctgttcctctatgggatcgtcctgacactcctgtattgcagactcaaaattcaagttcgcaaagccgccattacctcttacgagaagagtgatggggtgtacacaggactgtctacccggaatcaagaaacctacgaaaccctcaaacatgagaagccacctcagtaa

SEQ ID NO: 2755 - DNA, 2247 bp, synthetic construct; identical to SEQ ID NO: 2754
  source 1..2247: mol_type = other DNA

SEQ ID NO: 2756 - DNA, 2220 bp, synthetic construct
  source 1..2220: mol_type = other DNA
atggccttaccagtgaccgccttgctcctgccgctggccttgctgctccacgccgccaggccggaattcagcagatacctggtcaagcggaccggcgagaaggtgttcctggaatgcgtgcaggacatggaccacgaaaacatgttctggtacagacaggaccccggcctgggcctgagactgatctacttcagctacgacgtgaagatgaaggaaaagggcgacatccccgagggctacagcgtgtccagagagaagaaagagcggttcagcctgatcctggaaagcgccagcaccaaccagaccagcatgtacctgtgtgccagcagcctgtggggcagactggctaagaacatccagtatttcggagccggcaccagactgtctgttctcgagctcgaggacctgaagaacgtgttcccacctgaggtggccgtgttcgagcctagcgaggccgagatcagccacacccagaaagccaccctcgtgtgcctggctaccggcttctaccccgaccatgtggaactgtcttggtgggtcaacggcaaagaggtgcacagcggcgtgtctaccgacccccagccactgaaagaacagcccgccctgaacgacagccggtactgcctgagcagcagactgagagtgtccgccaccttctggcagaacccccggaaccacttcagatgccaggtgcagttctacggcctgagcgagaacgacgagtggacccaggacagagccaagcccgtgacccagatcgtgtctgccgaagcctggggcagagccgattgcggatcccagagcttcggcctgctggaccccaagctgtgctacctgctggatggcatcctgttcatctacggcgtgatcctgaccgccctgttcctgagagtgaagttcagcagaagcgccgacgcccctgcctaccagcagggacagaaccaactgtacaacgagctgaacctgggcagacgggaagagtacgacgtgctggacaagcggagaggcagggaccctgagatgggcggaaagccccagcggagaaagaacccccaggaaggactgtataacgaactccagaaagacaagatggccgaagcctacagcgagatcggcatgaagggcgagcggagaagaggcaagggccacgatggcctgtaccagggcctgagcaccgccaccaaggacacctatgacgccctgcacatgcaggccctgcctccaagaagggccaagcgatctggatctggagcaacaaacttctcactactcaaacaagcaggtgacgtggaggagaatcccgggcctactagtatggactggatttggcgcatccttttccttgtcggcgctgctaccggcgcgcattccttcgaagaggatcaagtgacccagtctcctgaggctctgaggctgcaagagggcgagagcagctctctgaactgctcctacacagtgtctggcctgaggggcctgttttggtataggcaagaccctggcaagggacccgagttcctgttcacactgtactctgccggcgaggaaaaagagaaagaacgcctgaaggccacgctgaccaagaaagagagcttcctgcacatcacagcccctaagcctgaggacagcgccacctatctgtgtgccgtgcaggccaatagaggcagcacactggggagactgtacttcggcagaggcacccagctgaccgtttggcctgatacgcgtatccagaaccctgatcctgccgtgtaccagctgcgggatagcaagagcagcgacaagagcgtgtgtctgttcaccgacttcgacagccagaccaacgtgtcccagagcaaggactccgacgtgtacatcaccgataagaccgtgctggacatgcggagcatggacttcaagagcaactccgccgtggcctggtccaacaagtccgatttcgcctgcgccaacgccttcaacaacagcattatccccgaggacacattcttcccaagccccgagagcagctgcggtaccctcggagaaccacagctctgttacattctggatgctatcctgttcctctatgggatcgtcctgacactcctgtattgcagactcaaaattcaagttcgcaaagccgccattacctcttacgagaagagtgatggggtgtacacaggactgtctacccggaatcaagaaacctacgaaaccctcaaacatgagaagccacctcagtaa

SEQ ID NO: 2757 - DNA, 2964 bp, synthetic construct
  source 1..2964: mol_type = other DNA
atggccttaccagtgaccgccttgctcctgccgctggccttgctgctccacgccgccaggccggaattcagcagatacctggtcaagcggaccggcgagaaggtgttcctggaatgcgtgcaggacatggaccacgaaaacatgttctggtacagacaggaccccggcctgggcctgagactgatctacttcagctacgacgtgaagatgaaggaaaagggcgacatccccgagggctacagcgtgtccagagagaagaaagagcggttcagcctgatcctggaaagcgccagcaccaaccagaccagcatgtacctgtgtgccagcagcctgtggggcagactggctaagaacatccagtatttcggagccggcaccagactgtctgttctcgagctcgagggacagcctaaggccaatcctaccgtgacactgttccctccaagcagcgaagaactccaggccaacaaggccacacttgtgtgcctgatctccgacttctaccctggggctgtgacagtggcttggaaggccgatggatctcctgtgaaagccggcgtggaaaccaccaagccatccaagcagagcaacaacaaatacgccgccagctcctacctgagcctgacacctgagcagtggaagtcccacagatcctacagctgccaagtgacccacgaaggcagcaccgtggaaaagacagtggcccctacagagtgcagcacaacacctggcgagagaagtagcctgcctgccttctatcctggcaccagcggctcttgttctggctgtggatctctgagcctgcctctgctggctggactggttgctgctgatgctgtggcctctctgctgattgtgggagccgtgttcctgtgcgccagacctagaagaagccccgctcaagaggacggcaaggtgtacatcaacatgcccggcagaggaagggccaagcgatctggatctggagcaacaaacttctcactactcaaacaagcaggtgacgtggaggagaatcccgggcctactagtatggactggatttggcgcatccttttccttgtcggcgctgctaccggcgcgcattccttcgaagaggatcaagtgacccagtctcctgaggctctgaggctgcaagagggcgagagcagctctctgaactgctcctacacagtgtctggcctgaggggcctgttttggtataggcaagaccctggcaagggacccgagttcctgttcacactgtactctgccggcgaggaaaaagagaaagaacgcctgaaggccacgctgaccaagaaagagagcttcctgcacatcacagcccctaagcctgaggacagcgccacctatctgtgtgccgtgcaggccaatagaggcagcacactggggagactgtacttcggcagaggcacccagctgaccgtttggcctgatacgcgtatccagaaccctgatcctgccgtgtaccagctgcgggatagcaagagcagcgacaagagcgtgtgtctgttcaccgacttcgacagccagaccaacgtgtcccagagcaaggactccgacgtgtacatcaccgataagaccgtgctggacatgcggagcatggacttcaagagcaactccgccgtggcctggtccaacaagtccgatttcgcctgcgccaacgccttcaacaacagcattatccccgaggacacattcttcccaagccccgagagcagctgcggtacccagagttttgggttgttggaccctaaattgtgctatctgttggacggaatcctgttcatttacggagtgatcctgaccgcattgttcctgcgggttaagttttccagatccgcagacgcacccgcttaccaacaagggcagaaccaactctacaatgaacttaatttggggcggagggaagagtacgacgttctggacaaaaggaggggacgagatcccgagatgggcggaaagcctcagcgaaggaagaatccgcaagaggggctttataacgaactccagaaagataaaatggcagaagcctatagtgagattgggatgaagggagaaaggaggaggggtaaaggtcacgatgggttgtaccaaggattgagcacagccactaaagatacctatgatgcgctccacatgcaggccctgccgccaagacgcgccaagagaagcggatctggcgtgaagcagaccctgaatttcgacctgctgaagctggctggcgacgtggaatccaacccaggcccttctagaggccatatggctctgcctgtgacagctctgctgctgcctctggcactgctgcttcatgctgctagacctagccagtttagagtgtcccctctggacagaacctggaacctgggcgagacagtggaactgaagtgccaggtgctgctgagcaaccctacaagcggctgctcctggctgtttcagcctagaggtgcagccgcctctcctacctttctgctgtacctgagccagaacaagcccaaggccgccgaaggactggacacccagagattcagcggcaagagactgggcgacaccttcgtgctgaccctgagcgacttcagaagagagaacgagggctactacttctgtagcgccctgagcaacagcatcatgtacttcagccacttcgtgcccgtgtttctgcccgccaagcctacaacaacccctgctcctagacctcctacaccagctcctacaatcgccagccagcctctgtctctcagacccgaagcctgtagacctgctgctggcggagctgtgcataccagaggactggatttcgcctgcgacatctacatctgggctcctctggctggcacatgtggcgtgctgctgctgtccctggtcatcaccctgtactgcaaccaccggaacaggcggagagtgtgcaagtgccctagacctgtggtcaagagcggcgacaagcctagcctgagcgccagatatgtt

SEQ ID NO: 2758 - DNA, 3063 bp, synthetic construct
  source 1..3063: mol_type = other DNA
atggccttaccagtgaccgccttgctcctgccgctggccttgctgctccacgccgccaggccggaattcagcagatacctggtcaagcggaccggcgagaaggtgttcctggaatgcgtgcaggacatggaccacgaaaacatgttctggtacagacaggaccccggcctgggcctgagactgatctacttcagctacgacgtgaagatgaaggaaaagggcgacatccccgagggctacagcgtgtccagagagaagaaagagcggttcagcctgatcctggaaagcgccagcaccaaccagaccagcatgtacctgtgtgccagcagcctgtggggcagactggctaagaacatccagtatttcggagccggcaccagactgtctgttctcgagctcgaggacctgaagaacgtgttcccacctgaggtggccgtgttcgagcctagcgaggccgagatcagccacacccagaaagccaccctcgtgtgcctggctaccggcttctaccccgaccatgtggaactgtcttggtgggtcaacggcaaagaggtgcacagcggcgtgtctaccgacccccagccactgaaagaacagcccgccctgaacgacagccggtactgcctgagcagcagactgagagtgtccgccaccttctggcagaacccccggaaccacttcagatgccaggtgcagttctacggcctgagcgagaacgacgagtggacccaggacagagccaagcccgtgacccagatcgtgtctgccgaagcctggggcagagccgattgcggatcccagagcttcggcctgctggaccccaagctgtgctacctgctggatggcatcctgttcatctacggcgtgatcctgaccgccctgttcctgagagtgaagttcagcagaagcgccgacgcccctgcctaccagcagggacagaaccaactgtacaacgagctgaacctgggcagacgggaagagtacgacgtgctggacaagcggagaggcagggaccctgagatgggcggaaagccccagcggagaaagaacccccaggaaggactgtataacgaactccagaaagacaagatggccgaagcctacagcgagatcggcatgaagggcgagcggagaagaggcaagggccacgatggcctgtaccagggcctgagcaccgccaccaaggacacctatgacgccctgcacatgcaggccctgcctccaagaagggccaagcgatctggatctggagcaacaaacttctcactactcaaacaagcaggtgacgtggaggagaatcccgggcctactagtatggactggatttggcgcatccttttccttgtcggcgctgctaccggcgcgcattccttcgaagaggatcaagtgacccagtctcctgaggctctgaggctgcaagagggcgagagcagctctctgaactgctcctacacagtgtctggcctgaggggcctgttttggtataggcaagaccctggcaagggacccgagttcctgttcacactgtactctgccggcgaggaaaaagagaaagaacgcctgaaggccacgctgaccaagaaagagagcttcctgcacatcacagcccctaagcctgaggacagcgccacctatctgtgtgccgtgcaggccaatagaggcagcacactggggagactgtacttcggcagaggcacccagctgaccgtttggcctgatacgcgtgcctctacaaagggaccctccgtgtttcctctggctcccagcagcaagtctacaagcggaggaacagccgctctgggctgcctggtcaaggattactttcccgagcctgtgaccgtgtcctggaatagcggagcactgacaagcggcgtgcacacctttccagccgtgctgcaaagcagcggcctgtactctctgagcagcgtggtcacagtgcctagctctagcctgggcacccagacctacatctgcaatgtgaaccacaagcctagcaacaccaaggtggacaagagagtggaacccaagagctgtacaacgccgggcgaaaggagttccttgccggccttttaccccggcacaagcggaagctgtagtgggtgtggaagcctcagcctcccacttcttgcgggcctcgtcgcggcagatgcagtagcttcacttcttattgtaggcgcggtatttctctgtgctcgaccaaggaggtcacccgctcaggaggatggtaaggtgtatataaatatgccaggacgcggacgcgccaagagaagcggatctggcgtgaagcagaccctgaatttcgacctgctgaagctggctggcgacgtggaatccaacccaggcccttctagaggccatatggctctgcctgtgacagctctgctgctgcctctggcactgctgcttcatgctgctagacctagccagtttagagtgtcccctctggacagaacctggaacctgggcgagacagtggaactgaagtgccaggtgctgctgagcaaccctacaagcggctgctcctggctgtttcagcctagaggtgcagccgcctctcctacctttctgctgtacctgagccagaacaagcccaaggccgccgaaggactggacacccagagattcagcggcaagagactgggcgacaccttcgtgctgaccctgagcgacttcagaagagagaacgagggctactacttctgtagcgccctgagcaacagcatcatgtacttcagccacttcgtgcccgtgtttctgcccgccaagcctacaacaacccctgctcctagacctcctacaccagctcctacaatcgccagccagcctctgtctctcagacccgaagcctgtagacctgctgctggcggagctgtgcataccagaggactggatttcgcctgcgacatctacatctgggctcctctggctggcacatgtggcgtgctgctgctgtccctggtcatcaccctgtactgcaaccaccggaacaggcggagagtgtgcaagtgccctagacctgtggtcaagagcggcgacaagcctagcctgagcgccagatatgtt

SEQ ID NO: 2759 - DNA, 2799 bp, synthetic construct
  source 1..2799: mol_type = other DNA
atggccttaccagtgaccgccttgctcctgccgctggccttgctgctccacgccgccaggccgagcagatacctggtcaagcggaccggcgagaaggtgttcctggaatgcgtgcaggacatggaccacgaaaacatgttctggtacagacaggaccccggcctgggcctgagactgatctacttcagctacgacgtgaagatgaaggaaaagggcgacatccccgagggctacagcgtgtccagagagaagaaagagcggttcagcctgatcctggaaagcgccagcaccaaccagaccagcatgtacctgtgtgccagcagcctgtggggcagactggctaagaacatccagtatttcggagccggcaccagactgtctgttctcgagctcgagctgtgggtttcacagcctccagagatcagaaccctggaaggcagcagcgccttcctgccttgcagcttcaatgcctctcagggcagactggctatcggcagcgtgacctggttcagagatgaggtggtgcccggcaaagaagtgcggaacggcacccctgagtttagaggaaggctggcccctctggcctccagcagatttctgcacgatcaccaggccgagctgcacatcagagatgtgcgaggacacgacgccagcatctacgtgtgcagagtggaagtgctcggcctcggagttggcacaggcaatggaacaagactggtggtggaaaaagagcaccctcagctcggagccggaacagtgctgcttctgagagccggcttttacgccgtgtcctttctgtctgtggccgtgggcagcaccgtgtactatcagggcaagtgcctgacctggaagggacctagaaggcaactgcctgctgtggtgcctgctcctttgcctcctccatgtggaagctctgcccatctgctgccacctgttccaggcggaagggccaagcgatctggatctggagcaacaaacttctcactactcaaacaagcaggtgacgtggaggagaatcccgggcctactagtatggactggatttggcgcatccttttccttgtcggcgctgctaccggcgcgcattccttcgaagaggatcaagtgacccagtctcctgaggctctgaggctgcaagagggcgagagcagctctctgaactgctcctacacagtgtctggcctgaggggcctgttttggtataggcaagaccctggcaagggacccgagttcctgttcacactgtactctgccggcgaggaaaaagagaaagaacgcctgaaggccacgctgaccaagaaagagagcttcctgcacatcacagcccctaagcctgaggacagcgccacctatctgtgtgccgtgcaggccaatagaggcagcacactggggagactgtacttcggcagaggcacccagctgaccgtttggcctgatacgcgtctgtgggtgtcccagccacctgaaattcggacactggaaggctcctccgcctttctgccctgtagctttaacgccagccaggggagactcgccatcggctctgtgacatggttccgggatgaagtcgtccctggaaaagaagttcgcaacggaacaccagagttcagaggcagactcgccccactggcaagctccagattcctgcatgaccatcaggctgaactgcacattagggacgtgcggggccacgatgcctccatctatgtgtgtcgggtcgaagtgcttggactcggcgtcggaactggaaacggcactaggctggtggtcgagaaagaacatccacagcttggcgctggcaccgtcctgttgcttagagccggattctatgccgtcagcttcctgtccgtggctgtggggtctacagtgtattaccagggaaaatgtctcacctggaaaggccccagacgccagcttccagctgttgttcctgctccactgccaccaccttgtggctcctctgctcacttgcttccaccagtgcctggcggacgcgccaagagaagcggatctggcgtgaagcagaccctgaatttcgacctgctgaagctggctggcgacgtggaatccaacccaggcccttctagaggccatatggctctgcctgtgacagctctgctgctgcctctggcactgctgcttcatgctgctagacctagccagtttagagtgtcccctctggacagaacctggaacctgggcgagacagtggaactgaagtgccaggtgctgctgagcaaccctacaagcggctgctcctggctgtttcagcctagaggtgcagccgcctctcctacctttctgctgtacctgagccagaacaagcccaaggccgccgaaggactggacacccagagattcagcggcaagagactgggcgacaccttcgtgctgaccctgagcgacttcagaagagagaacgagggctactacttctgtagcgccctgagcaacagcatcatgtacttcagccacttcgtgcccgtgtttctgcccgccaagcctacaacaacccctgctcctagacctcctacaccagctcctacaatcgccagccagcctctgtctctcagacccgaagcctgtagacctgctgctggcggagctgtgcataccagaggactggatttcgcctgcgacatctacatctgggctcctctggctggcacatgtggcgtgctgctgctgtccctggtcatcaccctgtactgcaaccaccggaacaggcggagagtgtgcaagtgccctagacctgtggtcaagagcggcgacaagcctagcctgagcgccagatatgtt

SEQ ID NO: 2760 - DNA, 3204 bp, synthetic construct
  source 1..3204: mol_type = other DNA
atggccttaccagtgaccgccttgctcctgccgctggccttgctgctccacgccgccaggccggaattcagcagatacctggtcaagcggaccggcgagaaggtgttcctggaatgcgtgcaggacatggaccacgaaaacatgttctggtacagacaggaccccggcctgggcctgagactgatctacttcagctacgacgtgaagatgaaggaaaagggcgacatccccgagggctacagcgtgtccagagagaagaaagagcggttcagcctgatcctggaaagcgccagcaccaaccagaccagcatgtacctgtgtgccagcagcctgtggggcagactggctaagaacatccagtatttcggagccggcaccagactgtctgttctcgagctcgagggacagcctaaggccaatcctaccgtgacactgttccctccaagcagcgaagaactccaggccaacaaggccacacttgtgtgcctgatctccgacttctaccctggggctgtgacagtggcttggaaggccgatggatctcctgtgaaagccggcgtggaaaccaccaagccatccaagcagagcaacaacaaatacgccgccagctcctacctgagcctgacacctgagcagtggaagtcccacagatcctacagctgccaagtgacccacgaaggcagcaccgtggaaaagacagtggcccctacagagtgcagcggatcccagagcttcggcctgctggaccccaagctgtgctacctgctggatggcatcctgttcatctacggcgtgatcctgaccgccctgttcctgagagtgaagttcagcagaagcgccgacgcccctgcctaccagcagggacagaaccaactgtacaacgagctgaacctgggcagacgggaagagtacgacgtgctggacaagcggagaggcagggaccctgagatgggcggaaagccccagcggagaaagaacccccaggaaggactgtataacgaactccagaaagacaagatggccgaagcctacagcgagatcggcatgaagggcgagcggagaagaggcaagggccacgatggcctgtaccagggcctgagcaccgccaccaaggacacctatgacgccctgcacatgcaggccctgcctccaagaagggccaagcgatctggatctggagcaacaaacttctcactactcaaacaagcaggtgacgtggaggagaatcccgggcctactagtatggactggatttggcgcatccttttccttgtcggcgctgctaccggcgcgcattccttcgaagaggatcaagtgacccagtctcctgaggctctgaggctgcaagagggcgagagcagctctctgaactgctcctacacagtgtctggcctgaggggcctgttttggtataggcaagaccctggcaagggacccgagttcctgttcacactgtactctgccggcgaggaaaaagagaaagaacgcctgaaggccacgctgaccaagaaagagagcttcctgcacatcacagcccctaagcctgaggacagcgccacctatctgtgtgccgtgcaggccaatagaggcagcacactggggagactgtacttcggcagaggcacccagctgaccgtttggcctgatacgcgtgcctctacaaagggaccctccgtgtttcctctggctcccagcagcaagtctacaagcggaggaacagccgctctgggctgcctggtcaaggattactttcccgagcctgtgaccgtgtcctggaatagcggagcactgacaagcggcgtgcacacctttccagccgtgctgcaaagcagcggcctgtactctctgagcagcgtggtcacagtgcctagctctagcctgggcacccagacctacatctgcaatgtgaaccacaagcctagcaacaccaaggtggacaagagagtggaacccaagagctgtggtacccagagttttgggttgttggaccctaaattgtgctatctgttggacggaatcctgttcatttacggagtgatcctgaccgcattgttcctgcgggttaagttttccagatccgcagacgcacccgcttaccaacaagggcagaaccaactctacaatgaacttaatttggggcggagggaagagtacgacgttctggacaaaaggaggggacgagatcccgagatgggcggaaagcctcagcgaaggaagaatccgcaagaggggctttataacgaactccagaaagataaaatggcagaagcctatagtgagattgggatgaagggagaaaggaggaggggtaaaggtcacgatgggttgtaccaaggattgagcacagccactaaagatacctatgatgcgctccacatgcaggccctgccgccaagacgcgccaagagaagcggatctggcgtgaagcagaccctgaatttcgacctgctgaagctggctggcgacgtggaatccaacccaggcccttctagaggccatatggctctgcctgtgacagctctgctgctgcctctggcactgctgcttcatgctgctagacctagccagtttagagtgtcccctctggacagaacctggaacctgggcgagacagtggaactgaagtgccaggtgctgctgagcaaccctacaagcggctgctcctggctgtttcagcctagaggtgcagccgcctctcctacctttctgctgtacctgagccagaacaagcccaaggccgccgaaggactggacacccagagattcagcggcaagagactgggcgacaccttcgtgctgaccctgagcgacttcagaagagagaacgagggctactacttctgtagcgccctgagcaacagcatcatgtacttcagccacttcgtgcccgtgtttctgcccgccaagcctacaacaacccctgctcctagacctcctacaccagctcctacaatcgccagccagcctctgtctctcagacccgaagcctgtagacctgctgctggcggagctgtgcataccagaggactggatttcgcctgcgacatctacatctgggctcctctggctggcacatgtggcgtgctgctgctgtccctggtcatcaccctgtactgcaaccaccggaacaggcggagagtgtgcaagtgccctagacctgtggtcaagagcggcgacaagcctagcctgagcgccagatatgtt

SEQ ID NO: 2761 - DNA, 3258 bp, synthetic construct
  source 1..3258: mol_type = other DNA
atggccttaccagtgaccgccttgctcctgccgctggccttgctgctccacgccgccaggccggaattcagcagatacctggtcaagcggaccggcgagaaggtgttcctggaatgcgtgcaggacatggaccacgaaaacatgttctggtacagacaggaccccggcctgggcctgagactgatctacttcagctacgacgtgaagatgaaggaaaagggcgacatccccgagggctacagcgtgtccagagagaagaaagagcggttcagcctgatcctggaaagcgccagcaccaaccagaccagcatgtacctgtgtgccagcagcctgtggggcagactggctaagaacatccagtatttcggagccggcaccagactgtctgttctcgagctcgagggacagcctaaggccaatcctaccgtgacactgttccctccaagcagcgaagaactccaggccaacaaggccacacttgtgtgcctgatctccgacttctaccctggggctgtgacagtggcttggaaggccgatggatctcctgtgaaagccggcgtggaaaccaccaagccatccaagcagagcaacaacaaatacgccgccagctcctacctgagcctgacacctgagcagtggaagtcccacagatcctacagctgccaagtgacccacgaaggcagcaccgtggaaaagacagtggcccctacagagtgcagcggatcccagagcttcggcctgctggaccccaagctgtgctacctgctggatggcatcctgttcatctacggcgtgatcctgaccgccctgttcctgagagtgaagttcagcagaagcgccgacgcccctgcctaccagcagggacagaaccaactgtacaacgagctgaacctgggcagacgggaagagtacgacgtgctggacaagcggagaggcagggaccctgagatgggcggaaagccccagcggagaaagaacccccaggaaggactgtataacgaactccagaaagacaagatggccgaagcctacagcgagatcggcatgaagggcgagcggagaagaggcaagggccacgatggcctgtaccagggcctgagcaccgccaccaaggacacctatgacgccctgcacatgcaggccctgcctccaagaagggccaagcgatctggatctggagcaacaaacttctcactactcaaacaagcaggtgacgtggaggagaatcccgggcctactagtatggactggatttggcgcatccttttccttgtcggcgctgctaccggcgcgcattccttcgaagaggatcaagtgacccagtctcctgaggctctgaggctgcaagagggcgagagcagctctctgaactgctcctacacagtgtctggcctgaggggcctgttttggtataggcaagaccctggcaagggacccgagttcctgttcacactgtactctgccggcgaggaaaaagagaaagaacgcctgaaggccacgctgaccaagaaagagagcttcctgcacatcacagcccctaagcctgaggacagcgccacctatctgtgtgccgtgcaggccaatagaggcagcacactggggagactgtacttcggcagaggcacccagctgaccgtttggcctgatacgcgtgcgtctcccacttctccgaaagttttccccctttccctctgtagcacacaacctgatggaaatgtggtcatcgcatgtctggtacaaggattctttccacaagagccattgagcgttacatggtcagagagcgggcagggagttaccgctaggaatttcccaccctcacaggatgcgagtggtgatctttataccacatcatcacaactcacgttgccagccactcagtgcctcgctggaaagtcagtaacatgccatgtcaaacattacactaatccctcacaagatgttaccgtgccttgcccagtaccttctacgccgcccaccccgtctccatctactccacccacgccatcacctagtggtacccagagttttgggttgttggaccctaaattgtgctatctgttggacggaatcctgttcatttacggagtgatcctgaccgcattgttcctgcgggttaagttttccagatccgcagacgcacccgcttaccaacaagggcagaaccaactctacaatgaacttaatttggggcggagggaagagtacgacgttctggacaaaaggaggggacgagatcccgagatgggcggaaagcctcagcgaaggaagaatccgcaagaggggctttataacgaactccagaaagataaaatggcagaagcctatagtgagattgggatgaagggagaaaggaggaggggtaaaggtcacgatgggttgtaccaaggattgagcacagccactaaagatacctatgatgcgctccacatgcaggccctgccgccaagacgcgccaagagaagcggatctggcgtgaagcagaccctgaatttcgacctgctgaagctggctggcgacgtggaatccaacccaggcccttctagaggccatatggctctgcctgtgacagctctgctgctgcctctggcactgctgcttcatgctgctagacctagccagtttagagtgtcccctctggacagaacctggaacctgggcgagacagtggaactgaagtgccaggtgctgctgagcaaccctacaagcggctgctcctggctgtttcagcctagaggtgcagccgcctctcctacctttctgctgtacctgagccagaacaagcccaaggccgccgaaggactggacacccagagattcagcggcaagagactgggcgacaccttcgtgctgaccctgagcgacttcagaagagagaacgagggctactacttctgtagcgccctgagcaacagcatcatgtacttcagccacttcgtgcccgtgtttctgcccgccaagcctacaacaacccctgctcctagacctcctacaccagctcctacaatcgccagccagcctctgtctctcagacccgaagcctgtagacctgctgctggcggagctgtgcataccagaggactggatttcgcctgcgacatctacatctgggctcctctggctggcacatgtggcgtgctgctgctgtccctggtcatcaccctgtactgcaaccaccggaacaggcggagagtgtgcaagtgccctagacctgtggtcaagagcggcgacaagcctagcctgagcgccagatatgtt

SEQ ID NO: 2762 - DNA, 3201 bp, synthetic construct
  source 1..3201: mol_type = other DNA
atggccttaccagtgaccgccttgctcctgccgctggccttgctgctccacgccgccaggccggaattcagcagatacctggtcaagcggaccggcgagaaggtgttcctggaatgcgtgcaggacatggaccacgaaaacatgttctggtacagacaggaccccggcctgggcctgagactgatctacttcagctacgacgtgaagatgaaggaaaagggcgacatccccgagggctacagcgtgtccagagagaagaaagagcggttcagcctgatcctggaaagcgccagcaccaaccagaccagcatgtacctgtgtgccagcagcctgtggggcagactggctaagaacatccagtatttcggagccggcaccagactgtctgttctcgagctcgagggacagcctaaggccaatcctaccgtgacactgttccctccaagcagcgaagaactccaggccaacaaggccacacttgtgtgcctgatctccgacttctaccctggggctgtgacagtggcttggaaggccgatggatctcctgtgaaagccggcgtggaaaccaccaagccatccaagcagagcaacaacaaatacgccgccagctcctacctgagcctgacacctgagcagtggaagtcccacagatcctacagctgccaagtgacccacgaaggcagcaccgtggaaaagacagtggcccctacagagtgcagcggatcccagagcttcggcctgctggaccccaagctgtgctacctgctggatggcatcctgttcatctacggcgtgatcctgaccgccctgttcctgagagtgaagttcagcagaagcgccgacgcccctgcctaccagcagggacagaaccaactgtacaacgagctgaacctgggcagacgggaagagtacgacgtgctggacaagcggagaggcagggaccctgagatgggcggaaagccccagcggagaaagaacccccaggaaggactgtataacgaactccagaaagacaagatggccgaagcctacagcgagatcggcatgaagggcgagcggagaagaggcaagggccacgatggcctgtaccagggcctgagcaccgccaccaaggacacctatgacgccctgcacatgcaggccctgcctccaagaagggccaagcgatctggatctggagcaacaaacttctcactactcaaacaagcaggtgacgtggaggagaatcccgggcctactagtatggactggatttggcgcatccttttccttgtcggcgctgctaccggcgcgcattccttcgaagaggatcaagtgacccagtctcctgaggctctgaggctgcaagagggcgagagcagctctctgaactgctcctacacagtgtctggcctgaggggcctgttttggtataggcaagaccctggcaagggacccgagttcctgttcacactgtactctgccggcgaggaaaaagagaaagaacgcctgaaggccacgctgaccaagaaagagagcttcctgcacatcacagcccctaagcctgaggacagcgccacctatctgtgtgccgtgcaggccaatagaggcagcacactggggagactgtacttcggcagaggcacccagctgaccgtttggcctgatacgcgtgcctccacgaagggaccatctgttttccctcttgccccctgctcacggtcaacgtctgaatccacggcagccctgggctgcctcgttaaggactactttccagagccggtaacagtctcctggaacagtggagcccttacatcaggtgttcacactttccctgccgtcttgcaaagtagcggactgtacagccttagttccgttgttacggttccttctagcaacttcggtacacagacatatacttgtaacgtagatcataagcctagcaacaccaaggtggacaaaaccgtagagagaaagtgtggtacccagagttttgggttgttggaccctaaattgtgctatctgttggacggaatcctgttcatttacggagtgatcctgaccgcattgttcctgcgggttaagttttccagatccgcagacgcacccgcttaccaacaagggcagaaccaactctacaatgaacttaatttggggcggagggaagagtacgacgttctggacaaaaggaggggacgagatcccgagatgggcggaaagcctcagcgaaggaagaatccgcaagaggggctttataacgaactccagaaagataaaatggcagaagcctatagtgagattgggatgaagggagaaaggaggaggggtaaaggtcacgatgggttgtaccaaggattgagcacagccactaaagatacctatgatgcgctccacatgcaggccctgccgccaagacgcgccaagagaagcggatctggcgtgaagcagaccctgaatttcgacctgctgaagctggctggcgacgtggaatccaacccaggcccttctagaggccatatggctctgcctgtgacagctctgctgctgcctctggcactgctgcttcatgctgctagacctagccagtttagagtgtcccctctggacagaacctggaacctgggcgagacagtggaactgaagtgccaggtgctgctgagcaaccctacaagcggctgctcctggctgtttcagcctagaggtgcagccgcctctcctacctttctgctgtacctgagccagaacaagcccaaggccgccgaaggactggacacccagagattcagcggcaagagactgggcgacaccttcgtgctgaccctgagcgacttcagaagagagaacgagggctactacttctgtagcgccctgagcaacagcatcatgtacttcagccacttcgtgcccgtgtttctgcccgccaagcctacaacaacccctgctcctagacctcctacaccagctcctacaatcgccagccagcctctgtctctcagacccgaagcctgtagacctgctgctggcggagctgtgcataccagaggactggatttcgcctgcgacatctacatctgggctcctctggctggcacatgtggcgtgctgctgctgtccctggtcatcaccctgtactgcaaccaccggaacaggcggagagtgtgcaagtgccctagacctgtggtcaagagcggcgacaagcctagcctgagcgccagatatgtt

SEQ ID NO: 2763 - DNA, 3366 bp, synthetic construct
  source 1..3366: mol_type = other DNA
atggccttaccagtgaccgccttgctcctgccgctggccttgctgctccacgccgccaggccgagcagatacctggtcaagcggaccggcgagaaggtgttcctggaatgcgtgcaggacatggaccacgaaaacatgttctggtacagacaggaccccggcctgggcctgagactgatctacttcagctacgacgtgaagatgaaggaaaagggcgacatccccgagggctacagcgtgtccagagagaagaaagagcggttcagcctgatcctggaaagcgccagcaccaaccagaccagcatgtacctgtgtgccagcagcctgtggggcagactggctaagaacatccagtatttcggagccggcaccagactgtctgttctcgagctcgagggacagcctaaggccaatcctaccgtgacactgttccctccaagcagcgaagaactccaggccaacaaggccacacttgtgtgcctgatctccgacttctaccctggggctgtgacagtggcttggaaggccgatggatctcctgtgaaagccggcgtggaaaccaccaagccatccaagcagagcaacaacaaatacgccgccagctcctacctgagcctgacacctgagcagtggaagtcccacagatcctacagctgccaagtgacccacgaaggcagcaccgtggaaaagacagtggcccctacagagtgcagcggatcccagagcttcggcctgctggaccccaagctgtgctacctgctggatggcatcctgttcatctacggcgtgatcctgaccgccctgttcctgagagtgaagttcagcagaagcgccgacgcccctgcctaccagcagggacagaaccaactgtacaacgagctgaacctgggcagacgggaagagtacgacgtgctggacaagcggagaggcagggaccctgagatgggcggaaagccccagcggagaaagaacccccaggaaggactgtataacgaactccagaaagacaagatggccgaagcctacagcgagatcggcatgaagggcgagcggagaagaggcaagggccacgatggcctgtaccagggcctgagcaccgccaccaaggacacctatgacgccctgcacatgcaggccctgcctccaagaagggccaagcgatctggatctggagcaacaaacttctcactactcaaacaagcaggtgacgtggaggagaatcccgggcctactagtatggactggatttggcgcatccttttccttgtcggcgctgctaccggcgcgcattccttcgaagaggatcaagtgacccagtctcctgaggctctgaggctgcaagagggcgagagcagctctctgaactgctcctacacagtgtctggcctgaggggcctgttttggtataggcaagaccctggcaagggacccgagttcctgttcacactgtactctgccggcgaggaaaaagagaaagaacgcctgaaggccacgctgaccaagaaagagagcttcctgcacatcacagcccctaagcctgaggacagcgccacctatctgtgtgccgtgcaggccaatagaggcagcacactggggagactgtacttcggcagaggcacccagctgaccgtttggcctgatacgcgtgctccgacaaaggcgccagacgtttttcctattatttcaggatgtcggcatccgaaagataattccccagttgttctggcgtgtcttatcacgggctaccatcctacatctgttaccgttacgtggtatatgggtacgcaaagccaacctcagcggacttttccagagatccaacggcgagattcatattatatgacatccagtcagttgagtacaccgctgcaacagtggcggcaaggtgagtataagtgtgtggtccaacacacagccagtaaaagtaagaaagagatattccggtggcctgaaagcccgaaggcacaagcatcttctgttccgacggcgcaaccgcaagctgaaggaagtcttgcaaaagcaaccacagcacccgcgacaacacgaaacacaggacgcggaggcgaggaaaagaaaaaagaaaaggaaaaggaagagcaagaggagagggaaactaagacccccggtacccagagttttgggttgttggaccctaaattgtgctatctgttggacggaatcctgttcatttacggagtgatcctgaccgcattgttcctgcgggttaagttttccagatccgcagacgcacccgcttaccaacaagggcagaaccaactctacaatgaacttaatttggggcggagggaagagtacgacgttctggacaaaaggaggggacgagatcccgagatgggcggaaagcctcagcgaaggaagaatccgcaagaggggctttataacgaactccagaaagataaaatggcagaagcctatagtgagattgggatgaagggagaaaggaggaggggtaaaggtcacgatgggttgtaccaaggattgagcacagccactaaagatacctatgatgcgctccacatgcaggccctgccgccaagacgcgccaagagaagcggatctggcgtgaagcagaccctgaatttcgacctgctgaagctggctggcgacgtggaatccaacccaggcccttctagaggccatatggctctgcctgtgacagctctgctgctgcctctggcactgctgcttcatgctgctagacctagccagtttagagtgtcccctctggacagaacctggaacctgggcgagacagtggaactgaagtgccaggtgctgctgagcaaccctacaagcggctgctcctggctgtttcagcctagaggtgcagccgcctctcctacctttctgctgtacctgagccagaacaagcccaaggccgccgaaggactggacacccagagattcagcggcaagagactgggcgacaccttcgtgctgaccctgagcgacttcagaagagagaacgagggctactacttctgtagcgccctgagcaacagcatcatgtacttcagccacttcgtgcccgtgtttctgcccgccaagcctacaacaacccctgctcctagacctcctacaccagctcctacaatcgccagccagcctctgtctctcagacccgaagcctgtagacctgctgctggcggagctgtgcataccagaggactggatttcgcctgcgacatctacatctgggctcctctggctggcacatgtggcgtgctgctgctgtccctggtcatcaccctgtactgcaaccaccggaacaggcggagagtgtgcaagtgccctagacctgtggtcaagagcggcgacaagcctagcctgagcgccagatatgtt

SEQ ID NO: 2764 - DNA, 3192 bp, synthetic construct
  source 1..3192: mol_type = other DNA
atggccttaccagtgaccgccttgctcctgccgctggccttgctgctccacgccgccaggccgagcagatacctggtcaagcggaccggcgagaaggtgttcctggaatgcgtgcaggacatggaccacgaaaacatgttctggtacagacaggaccccggcctgggcctgagactgatctacttcagctacgacgtgaagatgaaggaaaagggcgacatccccgagggctacagcgtgtccagagagaagaaagagcggttcagcctgatcctggaaagcgccagcaccaaccagaccagcatgtacctgtgtgccagcagcctgtggggcagactggctaagaacatccagtatttcggagccggcaccagactgtctgttctcgagctcgagggacagcctaaggccaatcctaccgtgacactgttccctccaagcagcgaagaactccaggccaacaaggccacacttgtgtgcctgatctccgacttctaccctggggctgtgacagtggcttggaaggccgatggatctcctgtgaaagccggcgtggaaaccaccaagccatccaagcagagcaacaacaaatacgccgccagctcctacctgagcctgacacctgagcagtggaagtcccacagatcctacagctgccaagtgacccacgaaggcagcaccgtggaaaagacagtggcccctacagagtgcagcggatcccagagcttcggcctgctggaccccaagctgtgctacctgctggatggcatcctgttcatctacggcgtgatcctgaccgccctgttcctgagagtgaagttcagcagaagcgccgacgcccctgcctaccagcagggacagaaccaactgtacaacgagctgaacctgggcagacgggaagagtacgacgtgctggacaagcggagaggcagggaccctgagatgggcggaaagccccagcggagaaagaacccccaggaaggactgtataacgaactccagaaagacaagatggccgaagcctacagcgagatcggcatgaagggcgagcggagaagaggcaagggccacgatggcctgtaccagggcctgagcaccgccaccaaggacacctatgacgccctgcacatgcaggccctgcctccaagaagggccaagcgatctggatctggagcaacaaacttctcactactcaaacaagcaggtgacgtggaggagaatcccgggcctactagtatggactggatttggcgcatccttttccttgtcggcgctgctaccggcgcgcattccttcgaagaggatcaagtgacccagtctcctgaggctctgaggctgcaagagggcgagagcagctctctgaactgctcctacacagtgtctggcctgaggggcctgttttggtataggcaagaccctggcaagggacccgagttcctgttcacactgtactctgccggcgaggaaaaagagaaagaacgcctgaaggccacgctgaccaagaaagagagcttcctgcacatcacagcccctaagcctgaggacagcgccacctatctgtgtgccgtgcaggccaatagaggcagcacactggggagactgtacttcggcagaggcacccagctgaccgtttggcctgatacgcgtgcctcaacgaaagggcctagcgtcttccccctggcgccgtgctcacgatccacaagcgaatccaccgccgctctcggatgcctcgtaaaggattatttccctgaaccagtcacggtgtcatggaacagcggtgcccttaccagcggcgtccatacctttcctgctgtgctccagtccagcggactttatagtctcagctctgtcgtgaccgtcccttcctctaattttggcacccagacttacacgtgcaacgtcgatcataagcccagtaacaccaaggtagacaagacggtggaacgaaagggtacccagagttttgggttgttggaccctaaattgtgctatctgttggacggaatcctgttcatttacggagtgatcctgaccgcattgttcctgcgggttaagttttccagatccgcagacgcacccgcttaccaacaagggcagaaccaactctacaatgaacttaatttggggcggagggaagagtacgacgttctggacaaaaggaggggacgagatcccgagatgggcggaaagcctcagcgaaggaagaatccgcaagaggggctttataacgaactccagaaagataaaatggcagaagcctatagtgagattgggatgaagggagaaaggaggaggggtaaaggtcacgatgggttgtaccaaggattgagcacagccactaaagatacctatgatgcgctccacatgcaggccctgccgccaagacgcgccaagagaagcggatctggcgtgaagcagaccctgaatttcgacctgctgaagctggctggcgacgtggaatccaacccaggcccttctagaggccatatggctctgcctgtgacagctctgctgctgcctctggcactgctgcttcatgctgctagacctagccagtttagagtgtcccctctggacagaacctggaacctgggcgagacagtggaactgaagtgccaggtgctgctgagcaaccctacaagcggctgctcctggctgtttcagcctagaggtgcagccgcctctcctacctttctgctgtacctgagccagaacaagcccaaggccgccgaaggactggacacccagagattcagcggcaagagactgggcgacaccttcgtgctgaccctgagcgacttcagaagagagaacgagggctactacttctgtagcgccctgagcaacagcatcatgtacttcagccacttcgtgcccgtgtttctgcccgccaagcctacaacaacccctgctcctagacctcctacaccagctcctacaatcgccagccagcctctgtctctcagacccgaagcctgtagacctgctgctggcggagctgtgcataccagaggactggatttcgcctgcgacatctacatctgggctcctctggctggcacatgtggcgtgctgctgctgtccctggtcatcaccctgtactgcaaccaccggaacaggcggagagtgtgcaagtgccctagacctgtggtcaagagcggcgacaagcctagcctgagcgccagatatgtt

SEQ ID NO: 2765 - DNA, 3213 bp, synthetic construct
  source 1..3213: mol_type = other DNA
atggccttaccagtgaccgccttgctcctgccgctggccttgctgctccacgccgccaggccgagcagatacctggtcaagcggaccggcgagaaggtgttcctggaatgcgtgcaggacatggaccacgaaaacatgttctggtacagacaggaccccggcctgggcctgagactgatctacttcagctacgacgtgaagatgaaggaaaagggcgacatccccgagggctacagcgtgtccagagagaagaaagagcggttcagcctgatcctggaaagcgccagcaccaaccagaccagcatgtacctgtgtgccagcagcctgtggggcagactggctaagaacatccagtatttcggagccggcaccagactgtctgttctcgagctcgagggacagcctaaggccaatcctaccgtgacactgttccctccaagcagcgaagaactccaggccaacaaggccacacttgtgtgcctgatctccgacttctaccctggggctgtgacagtggcttggaaggccgatggatctcctgtgaaagccggcgtggaaaccaccaagccatccaagcagagcaacaacaaatacgccgccagctcctacctgagcctgacacctgagcagtggaagtcccacagatcctacagctgccaagtgacccacgaaggcagcaccgtggaaaagacagtggcccctacagagtgcagcggatcccagagcttcggcctgctggaccccaagctgtgctacctgctggatggcatcctgttcatctacggcgtgatcctgaccgccctgttcctgagagtgaagttcagcagaagcgccgacgcccctgcctaccagcagggacagaaccaactgtacaacgagctgaacctgggcagacgggaagagtacgacgtgctggacaagcggagaggcagggaccctgagatgggcggaaagccccagcggagaaagaacccccaggaaggactgtataacgaactccagaaagacaagatggccgaagcctacagcgagatcggcatgaagggcgagcggagaagaggcaagggccacgatggcctgtaccagggcctgagcaccgccaccaaggacacctatgacgccctgcacatgcaggccctgcctccaagaagggccaagcgatctggatctggagcaacaaacttctcactactcaaacaagcaggtgacgtggaggagaatcccgggcctactagtatggactggatttggcgcatccttttccttgtcggcgctgctaccggcgcgcattccttcgaagaggatcaagtgacccagtctcctgaggctctgaggctgcaagagggcgagagcagctctctgaactgctcctacacagtgtctggcctgaggggcctgttttggtataggcaagaccctggcaagggacccgagttcctgttcacactgtactctgccggcgaggaaaaagagaaagaacgcctgaaggccacgctgaccaagaaagagagcttcctgcacatcacagcccctaagcctgaggacagcgccacctatctgtgtgccgtgcaggccaatagaggcagcacactggggagactgtacttcggcagaggcacccagctgaccgtttggcctgatacgcgtgcgtcacctacgtccccaaaagtgttcccgctgtcactcgattccactccacaggacggtaacgtggtggttgcctgcctggtacaaggtttctttcctcaagaaccactctctgtgacgtggtctgaaagtggtcagaatgttacagcacggaacttcccaccgagtcaagatgcgagtggggatctctatacgacatccagtcaactcacactgcccgcaacacaatgccccgatggcaaatctgttacctgccatgtgaaacattacaccaatccatcccaggatgtgacagtaccttgtccggttccgccccctcccccgggtacccagagttttgggttgttggaccctaaattgtgctatctgttggacggaatcctgttcatttacggagtgatcctgaccgcattgttcctgcgggttaagttttccagatccgcagacgcacccgcttaccaacaagggcagaaccaactctacaatgaacttaatttggggcggagggaagagtacgacgttctggacaaaaggaggggacgagatcccgagatgggcggaaagcctcagcgaaggaagaatccgcaagaggggctttataacgaactccagaaagataaaatggcagaagcctatagtgagattgggatgaagggagaaaggaggaggggtaaaggtcacgatgggttgtaccaaggattgagcacagccactaaagatacctatgatgcgctccacatgcaggccctgccgccaagacgcgccaagagaagcggatctggcgtgaagcagaccctgaatttcgacctgctgaagctggctggcgacgtggaatccaacccaggcccttctagaggccatatggctctgcctgtgacagctctgctgctgcctctggcactgctgcttcatgctgctagacctagccagtttagagtgtcccctctggacagaacctggaacctgggcgagacagtggaactgaagtgccaggtgctgctgagcaaccctacaagcggctgctcctggctgtttcagcctagaggtgcagccgcctctcctacctttctgctgtacctgagccagaacaagcccaaggccgccgaaggactggacacccagagattcagcggcaagagactgggcgacaccttcgtgctgaccctgagcgacttcagaagagagaacgagggctactacttctgtagcgccctgagcaacagcatcatgtacttcagccacttcgtgcccgtgtttctgcccgccaagcctacaacaacccctgctcctagacctcctacaccagctcctacaatcgccagccagcctctgtctctcagacccgaagcctgtagacctgctgctggcggagctgtgcataccagaggactggatttcgcctgcgacatctacatctgggctcctctggctggcacatgtggcgtgctgctgctgtccctggtcatcaccctgtactgcaaccaccggaacaggcggagagtgtgcaagtgccctagacctgtggtcaagagcggcgacaagcctagcctgagcgccagatatgtt

SEQ ID NO: 2766 - DNA, 3198 bp, synthetic construct
  source 1..3198: mol_type = other DNA
atggccttaccagtgaccgccttgctcctgccgctggccttgctgctccacgccgccaggccgagcagatacctggtcaagcggaccggcgagaaggtgttcctggaatgcgtgcaggacatggaccacgaaaacatgttctggtacagacaggaccccggcctgggcctgagactgatctacttcagctacgacgtgaagatgaaggaaaagggcgacatccccgagggctacagcgtgtccagagagaagaaagagcggttcagcctgatcctggaaagcgccagcaccaaccagaccagcatgtacctgtgtgccagcagcctgtggggcagactggctaagaacatccagtatttcggagccggcaccagactgtctgttctcgagctcgagggacagcctaaggccaatcctaccgtgacactgttccctccaagcagcgaagaactccaggccaacaaggccacacttgtgtgcctgatctccgacttctaccctggggctgtgacagtggcttggaaggccgatggatctcctgtgaaagccggcgtggaaaccaccaagccatccaagcagagcaacaacaaatacgccgccagctcctacctgagcctgacacctgagcagtggaagtcccacagatcctacagctgccaagtgacccacgaaggcagcaccgtggaaaagacagtggcccctacagagtgcagcggatcccagagcttcggcctgctggaccccaagctgtgctacctgctggatggcatcctgttcatctacggcgtgatcctgaccgccctgttcctgagagtgaagttcagcagaagcgccgacgcccctgcctaccagcagggacagaaccaactgtacaacgagctgaacctgggcagacgggaagagtacgacgtgctggacaagcggagaggcagggaccctgagatgggcggaaagccccagcggagaaagaacccccaggaaggactgtataacgaactccagaaagacaagatggccgaagcctacagcgagatcggcatgaagggcgagcggagaagaggcaagggccacgatggcctgtaccagggcctgagcaccgccaccaaggacacctatgacgccctgcacatgcaggccctgcctccaagaagggccaagcgatctggatctggagcaacaaacttctcactactcaaacaagcaggtgacgtggaggagaatcccgggcctactagtatggactggatttggcgcatccttttccttgtcggcgctgctaccggcgcgcattccttcgaagaggatcaagtgacccagtctcctgaggctctgaggctgcaagagggcgagagcagctctctgaactgctcctacacagtgtctggcctgaggggcctgttttggtataggcaagaccctggcaagggacccgagttcctgttcacactgtactctgccggcgaggaaaaagagaaagaacgcctgaaggccacgctgaccaagaaagagagcttcctgcacatcacagcccctaagcctgaggacagcgccacctatctgtgtgccgtgcaggccaatagaggcagcacactggggagactgtacttcggcagaggcacccagctgaccgtttggcctgatacgcgtgctagtacccagtcaccttctgttttcccgcttactagatgctgcaagaacataccatccaatgccacttctgtcacactgggctgtcttgctacaggttattttcctgagccggtgatggtcacttgggataccggtagcctgaatggaactacaatgacgctgcctgccacgacgctcacattgagtgggcattacgcgacaattagtcttttgacggtaagcggagcttgggctaagcagatgttcacttgcagagtagcgcacactccctctagtactgactgggttgacaacaaaaccttttctggtacccagagttttgggttgttggaccctaaattgtgctatctgttggacggaatcctgttcatttacggagtgatcctgaccgcattgttcctgcgggttaagttttccagatccgcagacgcacccgcttaccaacaagggcagaaccaactctacaatgaacttaatttggggcggagggaagagtacgacgttctggacaaaaggaggggacgagatcccgagatgggcggaaagcctcagcgaaggaagaatccgcaagaggggctttataacgaactccagaaagataaaatggcagaagcctatagtgagattgggatgaagggagaaaggaggaggggtaaaggtcacgatgggttgtaccaaggattgagcacagccactaaagatacctatgatgcgctccacatgcaggccctgccgccaagacgcgccaagagaagcggatctggcgtgaagcagaccctgaatttcgacctgctgaagctggctggcgacgtggaatccaacccaggcccttctagaggccatatggctctgcctgtgacagctctgctgctgcctctggcactgctgcttcatgctgctagacctagccagtttagagtgtcccctctggacagaacctggaacctgggcgagacagtggaactgaagtgccaggtgctgctgagcaaccctacaagcggctgctcctggctgtttcagcctagaggtgcagccgcctctcctacctttctgctgtacctgagccagaacaagcccaaggccgccgaaggactggacacccagagattcagcggcaagagactgggcgacaccttcgtgctgaccctgagcgacttcagaagagagaacgagggctactacttctgtagcgccctgagcaacagcatcatgtacttcagccacttcgtgcccgtgtttctgcccgccaagcctacaacaacccctgctcctagacctcctacaccagctcctacaatcgccagccagcctctgtctctcagacccgaagcctgtagacctgctgctggcggagctgtgcataccagaggactggatttcgcctgcgacatctacatctgggctcctctggctggcacatgtggcgtgctgctgctgtccctggtcatcaccctgtactgcaaccaccggaacaggcggagagtgtgcaagtgccctagacctgtggtcaagagcggcgacaagcctagcctgagcgccagatatgtt

SEQ ID NO: 2767 - DNA, 3198 bp, synthetic construct
  source 1..3198: mol_type = other DNA
atggccttaccagtgaccgccttgctcctgccgctggccttgctgctccacgccgccaggccgagcagatacctggtcaagcggaccggcgagaaggtgttcctggaatgcgtgcaggacatggaccacgaaaacatgttctggtacagacaggaccccggcctgggcctgagactgatctacttcagctacgacgtgaagatgaaggaaaagggcgacatccccgagggctacagcgtgtccagagagaagaaagagcggttcagcctgatcctggaaagcgccagcaccaaccagaccagcatgtacctgtgtgccagcagcctgtggggcagactggctaagaacatccagtatttcggagccggcaccagactgtctgttctcgagctcgagggacagcctaaggccaatcctaccgtgacactgttccctccaagcagcgaagaactccaggccaacaaggccacacttgtgtgcctgatctccgacttctaccctggggctgtgacagtggcttggaaggccgatggatctcctgtgaaagccggcgtggaaaccaccaagccatccaagcagagcaacaacaaatacgccgccagctcctacctgagcctgacacctgagcagtggaagtcccacagatcctacagctgccaagtgacccacgaaggcagcaccgtggaaaagacagtggcccctacagagtgcagcggatcccagagcttcggcctgctggaccccaagctgtgctacctgctggatggcatcctgttcatctacggcgtgatcctgaccgccctgttcctgagagtgaagttcagcagaagcgccgacgcccctgcctaccagcagggacagaaccaactgtacaacgagctgaacctgggcagacgggaagagtacgacgtgctggacaagcggagaggcagggaccctgagatgggcggaaagccccagcggagaaagaacccccaggaaggactgtataacgaactccagaaagacaagatggccgaagcctacagcgagatcggcatgaagggcgagcggagaagaggcaagggccacgatggcctgtaccagggcctgagcaccgccaccaaggacacctatgacgccctgcacatgcaggccctgcctccaagaagggccaagcgatctggatctggagcaacaaacttctcactactcaaacaagcaggtgacgtggaggagaatcccgggcctactagtatggactggatttggcgcatccttttccttgtcggcgctgctaccggcgcgcattccttcgaagaggatcaagtgacccagtctcctgaggctctgaggctgcaagagggcgagagcagctctctgaactgctcctacacagtgtctggcctgaggggcctgttttggtataggcaagaccctggcaagggacccgagttcctgttcacactgtactctgccggcgaggaaaaagagaaagaacgcctgaaggccacgctgaccaagaaagagagcttcctgcacatcacagcccctaagcctgaggacagcgccacctatctgtgtgccgtgcaggccaatagaggcagcacactggggagactgtacttcggcagaggcacccagctgaccgtttggcctgatacgcgtgcgtccactaagggtccgtcagtcttcccgctggcgccctgttcccgcagcacgagtgaatctaccgccgcccttgggtgcttggtaaaagactattttcctgagcccgttacagtatcatggaacagcggggctctgactagcggggtgcatacgttccctgcggttctgcaatctagcggactgtattctctctccagtgttgtgaccgtgccaagctccagcctcggtactaaaacttatacatgtaatgtggatcataaaccttcaaataccaaggttgacaaaagggtagagagtaagtacggtggtacccagagttttgggttgttggaccctaaattgtgctatctgttggacggaatcctgttcatttacggagtgatcctgaccgcattgttcctgcgggttaagttttccagatccgcagacgcacccgcttaccaacaagggcagaaccaactctacaatgaacttaatttggggcggagggaagagtacgacgttctggacaaaaggaggggacgagatcccgagatgggcggaaagcctcagcgaaggaagaatccgcaagaggggctttataacgaactccagaaagataaaatggcagaagcctatagtgagattgggatgaagggagaaaggaggaggggtaaaggtcacgatgggttgtaccaaggattgagcacagccactaaagatacctatgatgcgctccacatgcaggccctgccgccaagacgcgccaagagaagcggatctggcgtgaagcagaccctgaatttcgacctgctgaagctggctggcgacgtggaatccaacccaggcccttctagaggccatatggctctgcctgtgacagctctgctgctgcctctggcactgctgcttcatgctgctagacctagccagtttagagtgtcccctctggacagaacctggaacctgggcgagacagtggaactgaagtgccaggtgctgctgagcaaccctacaagcggctgctcctggctgtttcagcctagaggtgcagccgcctctcctacctttctgctgtacctgagccagaacaagcccaaggccgccgaaggactggacacccagagattcagcggcaagagactgggcgacaccttcgtgctgaccctgagcgacttcagaagagagaacgagggctactacttctgtagcgccctgagcaacagcatcatgtacttcagccacttcgtgcccgtgtttctgcccgccaagcctacaacaacccctgctcctagacctcctacaccagctcctacaatcgccagccagcctctgtctctcagacccgaagcctgtagacctgctgctggcggagctgtgcataccagaggactggatttcgcctgcgacatctacatctgggctcctctggctggcacatgtggcgtgctgctgctgtccctggtcatcaccctgtactgcaaccaccggaacaggcggagagtgtgcaagtgccctagacctgtggtcaagagcggcgacaagcctagcctgagcgccagatatgtt

SEQ ID NO: 2768 - DNA, 3198 bp, synthetic construct
  source 1..3198: mol_type = other DNA
atggccttaccagtgaccgccttgctcctgccgctggccttgctgctccacgccgccaggccgagcagatacctggtcaagcggaccggcgagaaggtgttcctggaatgcgtgcaggacatggaccacgaaaacatgttctggtacagacaggaccccggcctgggcctgagactgatctacttcagctacgacgtgaagatgaaggaaaagggcgacatccccgagggctacagcgtgtccagagagaagaaagagcggttcagcctgatcctggaaagcgccagcaccaaccagaccagcatgtacctgtgtgccagcagcctgtggggcagactggctaagaacatccagtatttcggagccggcaccagactgtctgttctcgagctcgagggacagcctaaggccaatcctaccgtgacactgttccctccaagcagcgaagaactccaggccaacaaggccacacttgtgtgcctgatctccgacttctaccctggggctgtgacagtggcttggaaggccgatggatctcctgtgaaagccggcgtggaaaccaccaagccatccaagcagagcaacaacaaatacgccgccagctcctacctgagcctgacacctgagcagtggaagtcccacagatcctacagctgccaagtgacccacgaaggcagcaccgtggaaaagacagtggcccctacagagtgcagcggatcccagagcttcggcctgctggaccccaagctgtgctacctgctggatggcatcctgttcatctacggcgtgatcctgaccgccctgttcctgagagtgaagttcagcagaagcgccgacgcccctgcctaccagcagggacagaaccaactgtacaacgagctgaacctgggcagacgggaagagtacgacgtgctggacaagcggagaggcagggaccctgagatgggcggaaagccccagcggagaaagaacccccaggaaggactgtataacgaactccagaaagacaagatggccgaagcctacagcgagatcggcatgaagggcgagcggagaagaggcaagggccacgatggcctgtaccagggcctgagcaccgccaccaaggacacctatgacgccctgcacatgcaggccctgcctccaagaagggccaagcgatctggatctggagcaacaaacttctcactactcaaacaagcaggtgacgtggaggagaatcccgggcctactagtatggactggatttggcgcatccttttccttgtcggcgctgctaccggcgcgcattccttcgaagaggatcaagtgacccagtctcctgaggctctgaggctgcaagagggcgagagcagctctctgaactgctcctacacagtgtctggcctgaggggcctgttttggtataggcaagaccctggcaagggacccgagttcctgttcacactgtactctgccggcgaggaaaaagagaaagaacgcctgaaggccacgctgaccaagaaagagagcttcctgcacatcacagcccctaagcctgaggacagcgccacctatctgtgtgccgtgcaggccaatagaggcagcacactggggagactgtacttcggcagaggcacccagctgaccgtttggcctgatacgcgtgcaagtacaaagggacccagtgttttcccgctcgccccctgttcacgatcaacgagtgagtccactgcggctctcggatgcctcgtcaaagactacttccccgagccggtgactgttagttggaactctggggctcttacttcaggcgtacacacattccccgccgtgcttcagtcaagtgggctctactcacttagcagtgtggtaacggttccctctagcaactttggcacccaaacatatacttgcaacgtcgatcacaagccgtcaaataccaaagttgacaagaccgttgaaaggaaatgttgtggtacccagagttttgggttgttggaccctaaattgtgctatctgttggacggaatcctgttcatttacggagtgatcctgaccgcattgttcctgcgggttaagttttccagatccgcagacgcacccgcttaccaacaagggcagaaccaactctacaatgaacttaatttggggcggagggaagagtacgacgttctggacaaaaggaggggacgagatcccgagatgggcggaaagcctcagcgaaggaagaatccgcaagaggggctttataacgaactccagaaagataaaatggcagaagcctatagtgagattgggatgaagggagaaaggaggaggggtaaaggtcacgatgggttgtaccaaggattgagcacagccactaaagatacctatgatgcgctccacatgcaggccctgccgccaagacgcgccaagagaagcggatctggcgtgaagcagaccctgaatttcgacctgctgaagctggctggcgacgtggaatccaacccaggcccttctagaggccatatggctctgcctgtgacagctctgctgctgcctctggcactgctgcttcatgctgctagacctagccagtttagagtgtcccctctggacagaacctggaacctgggcgagacagtggaactgaagtgccaggtgctgctgagcaaccctacaagcggctgctcctggctgtttcagcctagaggtgcagccgcctctcctacctttctgctgtacctgagccagaacaagcccaaggccgccgaaggactggacacccagagattcagcggcaagagactgggcgacaccttcgtgctgaccctgagcgacttcagaagagagaacgagggctactacttctgtagcgccctgagcaacagcatcatgtacttcagccacttcgtgcccgtgtttctgcccgccaagcctacaacaacccctgctcctagacctcctacaccagctcctacaatcgccagccagcctctgtctctcagacccgaagcctgtagacctgctgctggcggagctgtgcataccagaggactggatttcgcctgcgacatctacatctgggctcctctggctggcacatgtggcgtgctgctgctgtccctggtcatcaccctgtactgcaaccaccggaacaggcggagagtgtgcaagtgccctagacctgtggtcaagagcggcgacaagcctagcctgagcgccagatatgtt

SEQ ID NO: 2769 - DNA, 3243 bp, synthetic construct
  source 1..3243: mol_type = other DNA
atggccttaccagtgaccgccttgctcctgccgctggccttgctgctccacgccgccaggccgagcagatacctggtcaagcggaccggcgagaaggtgttcctggaatgcgtgcaggacatggaccacgaaaacatgttctggtacagacaggaccccggcctgggcctgagactgatctacttcagctacgacgtgaagatgaaggaaaagggcgacatccccgagggctacagcgtgtccagagagaagaaagagcggttcagcctgatcctggaaagcgccagcaccaaccagaccagcatgtacctgtgtgccagcagcctgtggggcagactggctaagaacatccagtatttcggagccggcaccagactgtctgttctcgagctcgaggacctgaagaacgtgttcccacctgaggtggccgtgttcgagcctagcgaggccgagatcagccacacccagaaagccaccctcgtgtgcctggctaccggcttctaccccgaccatgtggaactgtcttggtgggtcaacggcaaagaggtgcacagcggcgtgtctaccgacccccagccactgaaagaacagcccgccctgaacgacagccggtactgcctgagcagcagactgagagtgtccgccaccttctggcagaacccccggaaccacttcagatgccaggtgcagttctacggcctgagcgagaacgacgagtggacccaggacagagccaagcccgtgacccagatcgtgtctgccgaagcctggggcagagccgattgcggatcccagagcttcggcctgctggaccccaagctgtgctacctgctggatggcatcctgttcatctacggcgtgatcctgaccgccctgttcctgagagtgaagttcagcagaagcgccgacgcccctgcctaccagcagggacagaaccaactgtacaacgagctgaacctgggcagacgggaagagtacgacgtgctggacaagcggagaggcagggaccctgagatgggcggaaagccccagcggagaaagaacccccaggaaggactgtataacgaactccagaaagacaagatggccgaagcctacagcgagatcggcatgaagggcgagcggagaagaggcaagggccacgatggcctgtaccagggcctgagcaccgccaccaaggacacctatgacgccctgcacatgcaggccctgcctccaagaagggccaagcgatctggatctggagcaacaaacttctcactactcaaacaagcaggtgacgtggaggagaatcccgggcctactagtatggactggatttggcgcatccttttccttgtcggcgctgctaccggcgcgcattccttcgaagaggatcaagtgacccagtctcctgaggctctgaggctgcaagagggcgagagcagctctctgaactgctcctacacagtgtctggcctgaggggcctgttttggtataggcaagaccctggcaagggacccgagttcctgttcacactgtactctgccggcgaggaaaaagagaaagaacgcctgaaggccacgctgaccaagaaagagagcttcctgcacatcacagcccctaagcctgaggacagcgccacctatctgtgtgccgtgcaggccaatagaggcagcacactggggagactgtacttcggcagaggcacccagctgaccgtttggcctgatacgcgtatccagaaccctgatcctgccgtgtaccagctgcgggatagcaagagcagcgacaagagcgtgtgtctgttcaccgacttcgacagccagaccaacgtgtcccagagcaaggactccgacgtgtacatcaccgataagaccgtgctggacatgcggagcatggacttcaagagcaactccgccgtggcctggtccaacaagtccgatttcgcctgcgccaacgccttcaacaacagcattatccccgaggacacattcttcccaagccccgagagcagctgcggtacccagagttttgggttgttggaccctaaattgtgctatctgttggacggaatcctgttcatttacggagtgatcctgaccgcattgttcctgcgggttaagttttccagatccgcagacgcacccgcttaccaacaagggcagaaccaactctacaatgaacttaatttggggcggagggaagagtacgacgttctggacaaaaggaggggacgagatcccgagatgggcggaaagcctcagcgaaggaagaatccgcaagaggggctttataacgaactccagaaagataaaatggcagaagcctatagtgagattgggatgaagggagaaaggaggaggggtaaaggtcacgatgggttgtaccaaggattgagcacagccactaaagatacctatgatgcgctccacatgcaggccctgccgccaagacgcgccaagagaagcggatctggcgtgaagcagaccctgaatttcgacctgctgaagctggctggcgacgtggaatccaacccaggcccttctagaggccatatggctctgcctgtgacagctctgctgctgcctctggcactgctgcttcatgctgctagacctagccagtttagagtgtcccctctggacagaacctggaacctgggcgagacagtggaactgaagtgccaggtgctgctgagcaaccctacaagcggctgctcctggctgtttcagcctagaggtgcagccgcctctcctacctttctgctgtacctgagccagaacaagcccaaggccgccgaaggactggacacccagagattcagcggcaagagactgggcgacaccttcgtgctgaccctgagcgacttcagaagagagaacgagggctactacttctgtagcgccctgagcaacagcatcatgtacttcagccacttcgtgcccgtgtttctgcccgccaagcctacaacaacccctgctcctagacctcctacaccagctcctacaatcgccagccagcctctgtctctcagacccgaagcctgtagacctgctgctggcggagctgtgcataccagaggactggatttcgcctgcgacatctacatctgggctcctctggctggcacatgtggcgtgctgctgctgtccctggtcatcaccctgtactgcaaccaccggaacaggcggagagtgtgcaagtgccctagacctgtggtcaagagcggcgacaagcctagcctgagcgccagatatgtt

SEQ ID NO: 2770 - DNA, 3243 bp, synthetic construct
  source 1..3243: mol_type = other DNA
atggccttaccagtgaccgccttgctcctgccgctggccttgctgctccacgccgccaggccgagcagatacctggtcaagcggaccggcgagaaggtgttcctggaatgcgtgcaggacatggaccacgaaaacatgttctggtacagacaggaccccggcctgggcctgagactgatctacttcagctacgacgtgaagatgaaggaaaagggcgacatccccgagggctacagcgtgtccagagagaagaaagagcggttcagcctgatcctggaaagcgccagcaccaaccagaccagcatgtacctgtgtgccagcagcctgtggggcagactggctaagaacatccagtatttcggagccggcaccagactgtctgttctcgagctcgaggacctgaagaacgtgttcccacctgaggtggccgtgttcgagcctagcaaggccgagatcgcccacacccagaaagccaccctcgtgtgcctggctaccggcttctaccccgaccatgtggaactgtcttggtgggtcaacggcaaagaggtgcacagcggcgtgtgtaccgacccccagccactgaaagaacagcccgccctgaacgacagccggtactgcctgagcagcagactgagagtgtccgccaccttctggcagaacccccggaaccacttcagatgccaggtgcagttctacggcctgagcgagaacgacgagtggacccaggacagagccaagcccgtgacccagatcgtgtctgccgaagcctggggcagagccgattgcggatcccagagcttcggcctgctggaccccaagctgtgctacctgctggatggcatcctgttcatctacggcgtgatcctgaccgccctgttcctgagagtgaagttcagcagaagcgccgacgcccctgcctaccagcagggacagaaccaactgtacaacgagctgaacctgggcagacgggaagagtacgacgtgctggacaagcggagaggcagggaccctgagatgggcggaaagccccagcggagaaagaacccccaggaaggactgtataacgaactccagaaagacaagatggccgaagcctacagcgagatcggcatgaagggcgagcggagaagaggcaagggccacgatggcctgtaccagggcctgagcaccgccaccaaggacacctatgacgccctgcacatgcaggccctgcctccaagaagggccaagcgatctggatctggagcaacaaacttctcactactcaaacaagcaggtgacgtggaggagaatcccgggcctactagtatggactggatttggcgcatccttttccttgtcggcgctgctaccggcgcgcattccttcgaagaggatcaagtgacccagtctcctgaggctctgaggctgcaagagggcgagagcagctctctgaactgctcctacacagtgtctggcctgaggggcctgttttggtataggcaagaccctggcaagggacccgagttcctgttcacactgtactctgccggcgaggaaaaagagaaagaacgcctgaaggccacgctgaccaagaaagagagcttcctgcacatcacagcccctaagcctgaggacagcgccacctatctgtgtgccgtgcaggccaatagaggcagcacactggggagactgtacttcggcagaggcacccagctgaccgtttggcctgatacgcgtatccagaaccctgatcctgccgtgtaccagctgcgggatagcaagagcagcgacaagagcgtgtgtctgttcaccgacttcgacagccagaccaacgtgtcccagagcaaggactccgacgtgtacatcaccgataagtgcgtgctggacatgcggagcatggacttcaagagcaactccgccgtggcctggtccaacaagtccgatttcgcctgcgccaacgccttcaacaacagcattatccccgaggacacattcttcccaagcagcgacgtgccctgcggtacccagagttttgggttgttggaccctaaattgtgctatctgttggacggaatcctgttcatttacggagtgatcctgaccgcattgttcctgcgggttaagttttccagatccgcagacgcacccgcttaccaacaagggcagaaccaactctacaatgaacttaatttggggcggagggaagagtacgacgttctggacaaaaggaggggacgagatcccgagatgggcggaaagcctcagcgaaggaagaatccgcaagaggggctttataacgaactccagaaagataaaatggcagaagcctatagtgagattgggatgaagggagaaaggaggaggggtaaaggtcacgatgggttgtaccaaggattgagcacagccactaaagatacctatgatgcgctccacatgcaggccctgccgccaagacgcgccaagagaagcggatctggcgtgaagcagaccctgaatttcgacctgctgaagctggctggcgacgtggaatccaacccaggcccttctagaggccatatggctctgcctgtgacagctctgctgctgcctctggcactgctgcttcatgctgctagacctagccagtttagagtgtcccctctggacagaacctggaacctgggcgagacagtggaactgaagtgccaggtgctgctgagcaaccctacaagcggctgctcctggctgtttcagcctagaggtgcagccgcctctcctacctttctgctgtacctgagccagaacaagcccaaggccgccgaaggactggacacccagagattcagcggcaagagactgggcgacaccttcgtgctgaccctgagcgacttcagaagagagaacgagggctactacttctgtagcgccctgagcaacagcatcatgtacttcagccacttcgtgcccgtgtttctgcccgccaagcctacaacaacccctgctcctagacctcctacaccagctcctacaatcgccagccagcctctgtctctcagacccgaagcctgtagacctgctgctggcggagctgtgcataccagaggactggatttcgcctgcgacatctacatctgggctcctctggctggcacatgtggcgtgctgctgctgtccctggtcatcaccctgtactgcaaccaccggaacaggcggagagtgtgcaagtgccctagacctgtggtcaagagcggcgacaagcctagcctgagcgccagatatgtt

SEQ ID NO: 2771 - DNA, 2436 bp, synthetic construct
  source 1..2436: mol_type = other DNA
atggccttaccagtgaccgccttgctcctgccgctggccttgctgctccacgccgccaggccgagcagatacctggtcaagcggaccggcgagaaggtgttcctggaatgcgtgcaggacatggaccacgaaaacatgttctggtacagacaggaccccggcctgggcctgagactgatctacttcagctacgacgtgaagatgaaggaaaagggcgacatccccgagggctacagcgtgtccagagagaagaaagagcggttcagcctgatcctggaaagcgccagcaccaaccagaccagcatgtacctgtgtgccagcagcctgtggggcagactggctaagaacatccagtatttcggagccggcaccagactgtctgttctcgagctcgaggacctgaagaacgtgttcccacctgaggtggccgtgttcgagcctagcgaggccgagatcagccacacccagaaagccaccctcgtgtgcctggctaccggcttctaccccgaccatgtggaactgtcttggtgggtcaacggcaaagaggtgcacagcggcgtgtgtaccgacccccagccactgaaagaacagcccgccctgaacgacagccggtactgcctgagcagcagactgagagtgtccgccaccttctggcagaacccccggaaccacttcagatgccaggtgcagttctacggcctgagcgagaacgacgagtggacccaggacagagccaagcccgtgacccagatcgtgtctgccgaagcctggggcagagccgattgcggatcccagagcttcggcctgctggaccccaagctgtgctacctgctggatggcatcctgttcatctacggcgtgatcctgaccgccctgttcctgagagtgaagttcagcagaagcgccgacgcccctgcctaccagcagggacagaaccaactgtacaacgagctgaacctgggcagacgggaagagtacgacgtgctggacaagcggagaggcagggaccctgagatgggcggaaagccccagcggagaaagaacccccaggaaggactgtataacgaactccagaaagacaagatggccgaagcctacagcgagatcggcatgaagggcgagcggagaagaggcaagggccacgatggcctgtaccagggcctgagcaccgccaccaaggacacctatgacgccctgcacatgcaggccctgcctccaagaagggccaagcgatctggatctggagcaacaaacttctcactactcaaacaagcaggtgacgtggaggagaatcccgggcctactagtatggactggatttggcgcatccttttccttgtcggcgctgctaccggcgcgcattccttcgaagaggatcaagtgacccagtctcctgaggctctgaggctgcaagagggcgagagcagctctctgaactgctcctacacagtgtctggcctgaggggcctgttttggtataggcaagaccctggcaagggacccgagttcctgttcacactgtactctgccggcgaggaaaaagagaaagaacgcctgaaggccacgctgaccaagaaagagagcttcctgcacatcacagcccctaagcctgaggacagcgccacctatctgtgtgccgtgcaggccaatagaggcagcacactggggagactgtacttcggcagaggcacccagctgaccgtttggcctgatacgcgtatccagaaccctgatcctgccgtgtaccagctgcgggatagcaagagcagcgacaagagcgtgtgtctgttcaccgacttcgacagccagaccaacgtgtcccagagcaaggactccgacgtgtacatcaccgataagtgcgtgctggacatgcggagcatggacttcaagagcaactccgccgtggcctggtccaacaagtccgatttcgcctgcgccaacgccttcaacaacagcattatccccgaggacacattcttcccaagccccgagagcagctgcggtacccagagttttgggttgttggaccctaaattgtgctatctgttggacggaatcctgttcatttacggagtgatcctgaccgcattgttcctgcgggttaagttttccagatccgcagacgcacccgcttaccaacaagggcagaaccaactctacaatgaacttaatttggggcggagggaagagtacgacgttctggacaaaaggaggggacgagatcccgagatgggcggaaagcctcagcgaaggaagaatccgcaagaggggctttataacgaactccagaaagataaaatggcagaagcctatagtgagattgggatgaagggagaaaggaggaggggtaaaggtcacgatgggttgtaccaaggattgagcacagccactaaagatacctatgatgcgctccacatgcaggccctgccgccaaga

SEQ ID NO: 2772 - DNA, 2559 bp, synthetic construct
  source 1..2559: mol_type = other DNA
atggccttaccagtgaccgccttgctcctgccgctggccttgctgctccacgccgccaggccgagcagatacctggtcaagcggaccggcgagaaggtgttcctggaatgcgtgcaggacatggaccacgaaaacatgttctggtacagacaggaccccggcctgggcctgagactgatctacttcagctacgacgtgaagatgaaggaaaagggcgacatccccgagggctacagcgtgtccagagagaagaaagagcggttcagcctgatcctggaaagcgccagcaccaaccagaccagcatgtacctgtgtgccagcagcctgtggggcagactggctaagaacatccagtatttcggagccggcaccagactgtctgttctcgagctcgagcagagcttcggcctgctggaccccaagctgtgctacctgctggatggcatcctgttcatctacggcgtgatcctgaccgccctgttcctgagagtgaagttcagcagaagcgccgacgcccctgcctaccagcagggacagaaccaactgtacaacgagctgaacctgggcagacgggaagagtacgacgtgctggacaagcggagaggcagggaccctgagatgggcggaaagccccagcggagaaagaacccccaggaaggactgtataacgaactccagaaagacaagatggccgaagcctacagcgagatcggcatgaagggcgagcggagaagaggcaagggccacgatggcctgtaccagggcctgagcaccgccaccaaggacacctatgacgccctgcacatgcaggccctgcctccaagaagggccaagcgatctggatctggagcaacaaacttctcactactcaaacaagcaggtgacgtggaggagaatcccgggcctactagtatggactggatttggcgcatccttttccttgtcggcgctgctaccggcgcgcattccttcgaagaggatcaagtgacccagtctcctgaggctctgaggctgcaagagggcgagagcagctctctgaactgctcctacacagtgtctggcctgaggggcctgttttggtataggcaagaccctggcaagggacccgagttcctgttcacactgtactctgccggcgaggaaaaagagaaagaacgcctgaaggccacgctgaccaagaaagagagcttcctgcacatcacagcccctaagcctgaggacagcgccacctatctgtgtgccgtgcaggccaatagaggcagcacactggggagactgtacttcggcagaggcacccagctgaccgtttggcctgatacgcgtcagagttttgggttgttggaccctaaattgtgctatctgttggacggaatcctgttcatttacggagtgatcctgaccgcattgttcctgcgggttaagttttccagatccgcagacgcacccgcttaccaacaagggcagaaccaactctacaatgaacttaatttggggcggagggaagagtacgacgttctggacaaaaggaggggacgagatcccgagatgggcggaaagcctcagcgaaggaagaatccgcaagaggggctttataacgaactccagaaagataaaatggcagaagcctatagtgagattgggatgaagggagaaaggaggaggggtaaaggtcacgatgggttgtaccaaggattgagcacagccactaaagatacctatgatgcgctccacatgcaggccctgccgccaagacgcgccaagagaagcggatctggcgtgaagcagaccctgaatttcgacctgctgaagctggctggcgacgtggaatccaacccaggcccttctagaggccatatggctctgcctgtgacagctctgctgctgcctctggcactgctgcttcatgctgctagacctagccagtttagagtgtcccctctggacagaacctggaacctgggcgagacagtggaactgaagtgccaggtgctgctgagcaaccctacaagcggctgctcctggctgtttcagcctagaggtgcagccgcctctcctacctttctgctgtacctgagccagaacaagcccaaggccgccgaaggactggacacccagagattcagcggcaagagactgggcgacaccttcgtgctgaccctgagcgacttcagaagagagaacgagggctactacttctgtagcgccctgagcaacagcatcatgtacttcagccacttcgtgcccgtgtttctgcccgccaagcctacaacaacccctgctcctagacctcctacaccagctcctacaatcgccagccagcctctgtctctcagacccgaagcctgtagacctgctgctggcggagctgtgcataccagaggactggatttcgcctgcgacatctacatctgggctcctctggctggcacatgtggcgtgctgctgctgtccctggtcatcaccctgtactgcaaccaccggaacaggcggagagtgtgcaagtgccctagacctgtggtcaagagcggcgacaagcctagcctgagcgccagatatgtt

SEQ ID NO: 2773 - DNA, 2559 bp, synthetic construct
  source 1..2559: mol_type = other DNA
atggccttaccagtgaccgccttgctcctgccgctggccttgctgctccacgccgccaggccgagcagatacctggtcaagcggaccggcgagaaggtgttcctggaatgcgtgcaggacatggaccacgaaaacatgttctggtacagacaggaccccggcctgggcctgagactgatctacttcagctacgacgtgaagatgaaggaaaagggcgacatccccgagggctacagcgtgtccagagagaagaaagagcggttcagcctgatcctggaaagcgccagcaccaaccagaccagcatgtacctgtgtgccagcagcctgtggggcagactggctaagaacatccagtatttcggagccggcaccagactgtctgttctcgagctcgaggacctgaagaacgtgttcccacctgaggtggccgtgttcgagcctagcgaggccgagatcagccacacccagaaagccaccctcgtgtgcctggctaccggcttctaccccgaccatgtggaactgtcttggtgggtcaacggcaaagaggtgcacagcggcgtgtgtaccgacccccagccactgaaagaacagcccgccctgaacgacagccggtactgcctgagcagcagactgagagtgtccgccaccttctggcagaacccccggaaccacttcagatgccaggtgcagttctacggcctgagcgagaacgacgagtggacccaggacagagccaagcccgtgacccagatcgtgtctgccgaagcctggggcagagccgattgcggatcccagagcttcggcctgctggaccccaagctgtgctacctgctggatggcatcctgttcatctacggcgtgatcctgaccgccctgttcctgaggagtaagaggagcaggctcctgcacagtgactacatgaacatgactccacgccgccccggacccacccgcaagcattaccagccctatgccccaccacgcgacttcgcagcctatcgctccagagtgaagttcagcagaagcgccgacgcccctgcctaccagcagggacagaaccaactgtacaacgagctgaacctgggcagacgggaagagtacgacgtgctggacaagcggagaggcagggaccctgagatgggcggaaagccccagcggagaaagaacccccaggaaggactgtataacgaactccagaaagacaagatggccgaagcctacagcgagatcggcatgaagggcgagcggagaagaggcaagggccacgatggcctgtaccagggcctgagcaccgccaccaaggacacctatgacgccctgcacatgcaggccctgcctccaagaagggccaagcgatctggatctggagcaacaaacttctcactactcaaacaagcaggtgacgtggaggagaatcccgggcctactagtatggactggatttggcgcatccttttccttgtcggcgctgctaccggcgcgcattccttcgaagaggatcaagtgacccagtctcctgaggctctgaggctgcaagagggcgagagcagctctctgaactgctcctacacagtgtctggcctgaggggcctgttttggtataggcaagaccctggcaagggacccgagttcctgttcacactgtactctgccggcgaggaaaaagagaaagaacgcctgaaggccacgctgaccaagaaagagagcttcctgcacatcacagcccctaagcctgaggacagcgccacctatctgtgtgccgtgcaggccaatagaggcagcacactggggagactgtacttcggcagaggcacccagctgaccgtttggcctgatacgcgtatccagaaccctgatcctgccgtgtaccagctgcgggatagcaagagcagcgacaagagcgtgtgtctgttcaccgacttcgacagccagaccaacgtgtcccagagcaaggactccgacgtgtacatcaccgataagtgcgtgctggacatgcggagcatggacttcaagagcaactccgccgtggcctggtccaacaagtccgatttcgcctgcgccaacgccttcaacaacagcattatccccgaggacacattcttcccaagccccgagagcagctgcggtacccagagttttgggttgttggaccctaaattgtgctatctgttggacggaatcctgttcatttacggagtgatcctgaccgcattgttcctgcgggttaagttttccagatccgcagacgcacccgcttaccaacaagggcagaaccaactctacaatgaacttaatttggggcggagggaagagtacgacgttctggacaaaaggaggggacgagatcccgagatgggcggaaagcctcagcgaaggaagaatccgcaagaggggctttataacgaactccagaaagataaaatggcagaagcctatagtgagattgggatgaagggagaaaggaggaggggtaaaggtcacgatgggttgtaccaaggattgagcacagccactaaagatacctatgatgcgctccacatgcaggccctgccgccaaga

SEQ ID NO: 2774 - DNA, 2682 bp, synthetic construct
  source 1..2682: mol_type = other DNA
atggccttaccagtgaccgccttgctcctgccgctggccttgctgctccacgccgccaggccgagcagatacctggtcaagcggaccggcgagaaggtgttcctggaatgcgtgcaggacatggaccacgaaaacatgttctggtacagacaggaccccggcctgggcctgagactgatctacttcagctacgacgtgaagatgaaggaaaagggcgacatccccgagggctacagcgtgtccagagagaagaaagagcggttcagcctgatcctggaaagcgccagcaccaaccagaccagcatgtacctgtgtgccagcagcctgtggggcagactggctaagaacatccagtatttcggagccggcaccagactgtctgttctcgagctcgaggacctgaagaacgtgttcccacctgaggtggccgtgttcgagcctagcgaggccgagatcagccacacccagaaagccaccctcgtgtgcctggctaccggcttctaccccgaccatgtggaactgtcttggtgggtcaacggcaaagaggtgcacagcggcgtgtgtaccgacccccagccactgaaagaacagcccgccctgaacgacagccggtactgcctgagcagcagactgagagtgtccgccaccttctggcagaacccccggaaccacttcagatgccaggtgcagttctacggcctgagcgagaacgacgagtggacccaggacagagccaagcccgtgacccagatcgtgtctgccgaagcctggggcagagccgattgcggatcccagagcttcggcctgctggaccccaagctgtgctacctgctggatggcatcctgttcatctacggcgtgatcctgaccgccctgttcctgaggagtaagaggagcaggctcctgcacagtgactacatgaacatgactccacgccgccccggacccacccgcaagcattaccagccctatgccccaccacgcgacttcgcagcctatcgctccagagtgaagttcagcagaagcgccgacgcccctgcctaccagcagggacagaaccaactgtacaacgagctgaacctgggcagacgggaagagtacgacgtgctggacaagcggagaggcagggaccctgagatgggcggaaagccccagcggagaaagaacccccaggaaggactgtataacgaactccagaaagacaagatggccgaagcctacagcgagatcggcatgaagggcgagcggagaagaggcaagggccacgatggcctgtaccagggcctgagcaccgccaccaaggacacctatgacgccctgcacatgcaggccctgcctccaagaagggccaagcgatctggatctggagcaacaaacttctcactactcaaacaagcaggtgacgtggaggagaatcccgggcctactagtatggactggatttggcgcatccttttccttgtcggcgctgctaccggcgcgcattccttcgaagaggatcaagtgacccagtctcctgaggctctgaggctgcaagagggcgagagcagctctctgaactgctcctacacagtgtctggcctgaggggcctgttttggtataggcaagaccctggcaagggacccgagttcctgttcacactgtactctgccggcgaggaaaaagagaaagaacgcctgaaggccacgctgaccaagaaagagagcttcctgcacatcacagcccctaagcctgaggacagcgccacctatctgtgtgccgtgcaggccaatagaggcagcacactggggagactgtacttcggcagaggcacccagctgaccgtttggcctgatacgcgtatccagaaccctgatcctgccgtgtaccagctgcgggatagcaagagcagcgacaagagcgtgtgtctgttcaccgacttcgacagccagaccaacgtgtcccagagcaaggactccgacgtgtacatcaccgataagtgcgtgctggacatgcggagcatggacttcaagagcaactccgccgtggcctggtccaacaagtccgatttcgcctgcgccaacgccttcaacaacagcattatccccgaggacacattcttcccaagccccgagagcagctgcggtacccagagttttgggttgttggaccctaaattgtgctatctgttggacggaatcctgttcatttacggagtgatcctgaccgcattgttcctgaggagcaagcggtcacggctgctccacagcgattacatgaatatgacaccacgaagaccgggtcctactcgcaaacactaccaaccctacgcacctccccgcgactttgcagcgtaccgatctcgggttaagttttccagatccgcagacgcacccgcttaccaacaagggcagaaccaactctacaatgaacttaatttggggcggagggaagagtacgacgttctggacaaaaggaggggacgagatcccgagatgggcggaaagcctcagcgaaggaagaatccgcaagaggggctttataacgaactccagaaagataaaatggcagaagcctatagtgagattgggatgaagggagaaaggaggaggggtaaaggtcacgatgggttgtaccaaggattgagcacagccactaaagatacctatgatgcgctccacatgcaggccctgccgccaaga

SEQ ID NO: 2775 - DNA, 2436 bp, synthetic construct
  source 1..2436: mol_type = other DNA
atggccttaccagtgaccgccttgctcctgccgctggccttgctgctccacgccgccaggccgagcagatacctggtcaagcggaccggcgagaaggtgttcctggaatgcgtgcaggacatggaccacgaaaacatgttctggtacagacaggaccccggcctgggcctgagactgatctacttcagctacgacgtgaagatgaaggaaaagggcgacatccccgagggctacagcgtgtccagagagaagaaagagcggttcagcctgatcctggaaagcgccagcaccaaccagaccagcatgtacctgtgtgccagcagcctgtggggcagactggctaagaacatccagtatttcggagccggcaccagactgtctgttctcgagctcgaggacctgaagaacgtgttcccacctgaggtggccgtgttcgagcctagcgaggccgagatcagccacacccagaaagccaccctcgtgtgcctggctaccggcttctaccccgaccatgtggaactgtcttggtgggtcaacggcaaagaggtgcacagcggcgtgtctaccgacccccagccactgaaagaacagcccgccctgaacgacagccggtactgcctgagcagcagactgagagtgtccgccaccttctggcagaacccccggaaccacttcagatgccaggtgcagttctacggcctgagcgagaacgacgagtggacccaggacagagccaagcccgtgacccagatcgtgtctgccgaagcctggggcagagccgattgcggatcccagagcttcggcctgctggaccccaagctgtgctacctgctggatggcatcctgttcatctacggcgtgatcctgaccgccctgttcctgagagtgaagttcagcagaagcgccgacgcccctgcctaccagcagggacagaaccaactgtacaacgagctgaacctgggcagacgggaagagtacgacgtgctggacaagcggagaggcagggaccctgagatgggcggaaagccccagcggagaaagaacccccaggaaggactgtataacgaactccagaaagacaagatggccgaagcctacagcgagatcggcatgaagggcgagcggagaagaggcaagggccacgatggcctgtaccagggcctgagcaccgccaccaaggacacctatgacgccctgcacatgcaggccctgcctccaagaagggccaagcgatctggatctggagcaacaaacttctcactactcaaacaagcaggtgacgtggaggagaatcccgggcctactagtatggactggatttggcgcatccttttccttgtcggcgctgctaccggcgcgcattccttcgaagaggatcaagtgacccagtctcctgaggctctgaggctgcaagagggcgagagcagctctctgaactgctcctacacagtgtctggcctgaggggcctgttttggtataggcaagaccctggcaagggacccgagttcctgttcacactgtactctgccggcgaggaaaaagagaaagaacgcctgaaggccacgctgaccaagaaagagagcttcctgcacatcacagcccctaagcctgaggacagcgccacctatctgtgtgccgtgcaggccaatagaggcagcacactggggagactgtacttcggcagaggcacccagctgaccgtttggcctgatacgcgtatccagaaccctgatcctgccgtgtaccagctgcgggatagcaagagcagcgacaagagcgtgtgtctgttcaccgacttcgacagccagaccaacgtgtcccagagcaaggactccgacgtgtacatcaccgataagaccgtgctggacatgcggagcatggacttcaagagcaactccgccgtggcctggtccaacaagtccgatttcgcctgcgccaacgccttcaacaacagcattatccccgaggacacattcttcccaagccccgagagcagctgcggtacccagagttttgggttgttggaccctaaattgtgctatctgttggacggaatcctgttcatttacggagtgatcctgaccgcattgttcctgcgggttaagttttccagatccgcagacgcacccgcttaccaacaagggcagaaccaactctacaatgaacttaatttggggcggagggaagagtacgacgttctggacaaaaggaggggacgagatcccgagatgggcggaaagcctcagcgaaggaagaatccgcaagaggggctttataacgaactccagaaagataaaatggcagaagcctatagtgagattgggatgaagggagaaaggaggaggggtaaaggtcacgatgggttgtaccaaggattgagcacagccactaaagatacctatgatgcgctccacatgcaggccctgccgccaaga

SEQ ID NO: 2776 - DNA, 3168 bp, synthetic construct
  source 1..3168: mol_type = other DNA
atggccttaccagtgaccgccttgctcctgccgctggccttgctgctccacgccgccaggccgagcagatacctggtcaagcggaccggcgagaaggtgttcctggaatgcgtgcaggacatggaccacgaaaacatgttctggtacagacaggaccccggcctgggcctgagactgatctacttcagctacgacgtgaagatgaaggaaaagggcgacatccccgagggctacagcgtgtccagagagaagaaagagcggttcagcctgatcctggaaagcgccagcaccaaccagaccagcatgtacctgtgtgccagcagcctgtggggcagactggctaagaacatccagtatttcggagccggcaccagactgtctgttctcgagctcgaggacaagcagctggacgccgacgtgtcccccaagcctaccatcttcctgccctctatcgccgagacaaagctccagaaggccggcacctacctgtgcctgctggaaaagttcttcccagatgtgattaagatccactggcaggaaaagaagtccaacaccatcctgggcagccaggaaggcaacaccatgaagaccaacgacacctacatgaagttcagctggctgaccgtgcccgagaagtccctggacaaagaacacagatgcatcgtgcggcacgaaaacaacaagaacggcgtggaccaggaaatcatcttcccacccatcaagaccgatgtgattacaggatcccagagcttcggcctgctggaccccaagctgtgctacctgctggatggcatcctgttcatctacggcgtgatcctgaccgccctgttcctgagagtgaagttcagcagaagcgccgacgcccctgcctaccagcagggacagaaccaactgtacaacgagctgaacctgggcagacgggaagagtacgacgtgctggacaagcggagaggcagggaccctgagatgggcggaaagccccagcggagaaagaacccccaggaaggactgtataacgaactccagaaagacaagatggccgaagcctacagcgagatcggcatgaagggcgagcggagaagaggcaagggccacgatggcctgtaccagggcctgagcaccgccaccaaggacacctatgacgccctgcacatgcaggccctgcctccaagaagggccaagcgatctggatctggagcaacaaacttctcactactcaaacaagcaggtgacgtggaggagaatcccgggcctactagtatggactggatttggcgcatccttttccttgtcggcgctgctaccggcgcgcattccttcgaagaggatcaagtgacccagtctcctgaggctctgaggctgcaagagggcgagagcagctctctgaactgctcctacacagtgtctggcctgaggggcctgttttggtataggcaagaccctggcaagggacccgagttcctgttcacactgtactctgccggcgaggaaaaagagaaagaacgcctgaaggccacgctgaccaagaaagagagcttcctgcacatcacagcccctaagcctgaggacagcgccacctatctgtgtgccgtgcaggccaatagaggcagcacactggggagactgtacttcggcagaggcacccagctgaccgtttggcctgatacgcgtagccagcctcacaccaagcccagcgtgttcgtgatgaagaacggcaccaacgtggcctgcctcgtgaaagagttctaccccaaggacatcaggatcaacctggtgtccagcaagaagatcaccgagttcgaccccgccatcgtgatctcccccagcggcaagtacaacgccgtgaagctggggaagtacgaggacagcaacagcgtgacctgctccgtgcagcacgacaacaagaccgtgcacagcaccgactttggtacccagagttttgggttgttggaccctaaattgtgctatctgttggacggaatcctgttcatttacggagtgatcctgaccgcattgttcctgcgggttaagttttccagatccgcagacgcacccgcttaccaacaagggcagaaccaactctacaatgaacttaatttggggcggagggaagagtacgacgttctggacaaaaggaggggacgagatcccgagatgggcggaaagcctcagcgaaggaagaatccgcaagaggggctttataacgaactccagaaagataaaatggcagaagcctatagtgagattgggatgaagggagaaaggaggaggggtaaaggtcacgatgggttgtaccaaggattgagcacagccactaaagatacctatgatgcgctccacatgcaggccctgccgccaagacgcgccaagagaagcggatctggcgtgaagcagaccctgaatttcgacctgctgaagctggctggcgacgtggaatccaacccaggcccttctagaggccatatggctctgcctgtgacagctctgctgctgcctctggcactgctgcttcatgctgctagacctagccagtttagagtgtcccctctggacagaacctggaacctgggcgagacagtggaactgaagtgccaggtgctgctgagcaaccctacaagcggctgctcctggctgtttcagcctagaggtgcagccgcctctcctacctttctgctgtacctgagccagaacaagcccaaggccgccgaaggactggacacccagagattcagcggcaagagactgggcgacaccttcgtgctgaccctgagcgacttcagaagagagaacgagggctactacttctgtagcgccctgagcaacagcatcatgtacttcagccacttcgtgcccgtgtttctgcccgccaagcctacaacaacccctgctcctagacctcctacaccagctcctacaatcgccagccagcctctgtctctcagacccgaagcctgtagacctgctgctggcggagctgtgcataccagaggactggatttcgcctgcgacatctacatctgggctcctctggctggcacatgtggcgtgctgctgctgtccctggtcatcaccctgtactgcaaccaccggaacaggcggagagtgtgcaagtgccctagacctgtggtcaagagcggcgacaagcctagcctgagcgccagatatgtt

SEQ ID NO: 2777 - DNA, 2772 bp, synthetic construct
  source 1..2772: mol_type = other DNA
atggccttaccagtgaccgccttgctcctgccgctggccttgctgctccacgccgccaggccgagcagatacctggtcaagcggaccggcgagaaggtgttcctggaatgcgtgcaggacatggaccacgaaaacatgttctggtacagacaggaccccggcctgggcctgagactgatctacttcagctacgacgtgaagatgaaggaaaagggcgacatccccgagggctacagcgtgtccagagagaagaaagagcggttcagcctgatcctggaaagcgccagcaccaaccagaccagcatgtacctgtgtgccagcagcctgtggggcagactggctaagaacatccagtatttcggagccggcaccagactgtctgttctcgagctcgagggacagcctaaggccaatcctaccgtgacactgttccctccaagcagcgaagaactccaggccaacaaggccacacttgtgtgcctgatctccgacttctaccctggggctgtgacagtggcttggaaggccgatggatctcctgtgaaagccggcgtggaaaccaccaagccatccaagcagagcaacaacaaatacgccgccagctcctacctgagcctgacacctgagcagtggaagtcccacagatcctacagctgccaagtgacccacgaaggcagcaccgtggaaaagacagtggcccctacagagtgcagcacaacacctggcgagagaagtagcctgcctgccttctatcctggcaccagcggctcttgttctggctgtggatctctgagcctgcctctgctggctggactggttgctgctgatgctgtggcctctctgctgattgtgggagccgtgttcctgtgcgccagacctagaagaagccccgctcaagaggacggcaaggtgtacatcaacatgcccggcagaggaagggccaagcgatctggatctggagcaacaaacttctcactactcaaacaagcaggtgacgtggaggagaatcccgggcctactagtatggactggatttggcgcatccttttccttgtcggcgctgctaccggcgcgcattccttcgaagaggatcaagtgacccagtctcctgaggctctgaggctgcaagagggcgagagcagctctctgaactgctcctacacagtgtctggcctgaggggcctgttttggtataggcaagaccctggcaagggacccgagttcctgttcacactgtactctgccggcgaggaaaaagagaaagaacgcctgaaggccacgctgaccaagaaagagagcttcctgcacatcacagcccctaagcctgaggacagcgccacctatctgtgtgccgtgcaggccaatagaggcagcacactggggagactgtacttcggcagaggcacccagctgaccgtttggcctgatacgcgtgcctctacaaagggaccctccgtgtttcctctggctcccagcagcaagtctacaagcggaggaacagccgctctgggctgcctggtcaaggattactttcccgagcctgtgaccgtgtcctggaatagcggagcactgacaagcggcgtgcacacctttccagccgtgctgcaaagcagcggcctgtactctctgagcagcgtggtcacagtgcctagctctagcctgggcacccagacctacatctgcaatgtgaaccacaagcctagcaacaccaaggtggacaagagagtggaacccaagagctgtacaacgccgggcgaaaggagttccttgccggccttttaccccggcacaagcggaagctgtagtgggtgtggaagcctcagcctcccacttcttgcgggcctcgtcgcggcagatgcagtagcttcacttcttattgtaggcgcggtatttctctgtgctcgaccaaggaggtcacccgctcaggaggatggtaaggtgtatataaatatgccaggacgcggacgcgccaagagaagcggatctggcgtgaagcagaccctgaatttcgacctgctgaagctggctggcgacgtggaatccaacccaggcccttctagaggccatatggctctgcctgtgacagctctgctgctgcctctggcactgctgcttcatgctgctagacctagccagtttagagtgtcccctctggacagaacctggaacctgggcgagacagtggaactgaagtgccaggtgctgctgagcaaccctacaagcggctgctcctggctgtttcagcctagaggtgcagccgcctctcctacctttctgctgtacctgagccagaacaagcccaaggccgccgaaggactggacacccagagattcagcggcaagagactgggcgacaccttcgtgctgaccctgagcgacttcagaagagagaacgagggctactacttctgtagcgccctgagcaacagcatcatgtacttcagccacttcgtgcccgtgtttctgcccgccaagcctacaacaacccctgctcctagacctcctacaccagctcctacaatcgccagccagcctctgtctctcagacccgaagcctgtagacctgctgctggcggagctgtgcataccagaggactggatttcgcctgcgacatctacatctgggctcctctggctggcacatgtggcgtgctgctgctgtccctggtcatcaccctgtactgcaaccaccggaacaggcggagagtgtgcaagtgccctagacctgtggtcaagagcggcgacaagcctagcctgagcgccagatatgtt

SEQ ID NO: 2778 - DNA, 2259 bp, synthetic construct
  source 1..2259: mol_type = other DNA
atggccttaccagtgaccgccttgctcctgccgctggccttgctgctccacgccgccaggccgagcagatacctggtcaagcggaccggcgagaaggtgttcctggaatgcgtgcaggacatggaccacgaaaacatgttctggtacagacaggaccccggcctgggcctgagactgatctacttcagctacgacgtgaagatgaaggaaaagggcgacatccccgagggctacagcgtgtccagagagaagaaagagcggttcagcctgatcctggaaagcgccagcaccaaccagaccagcatgtacctgtgtgccagcagcctgtggggcagactggctaagaacatccagtatttcggagccggcaccagactgtctgttctcgagctcgagggcgacatcgagaacaccagtctggcccctgaggaccctacctttcctgccgatacctggggcacctacctgctgaccacagagacaggactccagaaagatcacgccctgtgggaccacacagcccagaacctgctgagaatgggcctcgcctttctggtgctggttgccctcgtgtggttcctggtggaagattggctgagccggaagcggacaagagagagagccagcagagcctctacctgggagggaagaagaaggctgaacacccagacacttagggccaagcgatctggatctggagcaacaaacttctcactactcaaacaagcaggtgacgtggaggagaatcccgggcctactagtatggactggatttggcgcatccttttccttgtcggcgctgctaccggcgcgcattccttcgaagaggatcaagtgacccagtctcctgaggctctgaggctgcaagagggcgagagcagctctctgaactgctcctacacagtgtctggcctgaggggcctgttttggtataggcaagaccctggcaagggacccgagttcctgttcacactgtactctgccggcgaggaaaaagagaaagaacgcctgaaggccacgctgaccaagaaagagagcttcctgcacatcacagcccctaagcctgaggacagcgccacctatctgtgtgccgtgcaggccaatagaggcagcacactggggagactgtacttcggcagaggcacccagctgaccgtttggcctgatacgcgtggcgatattgagaatacctctctggccccagaagatcctacattccccgccgacacatggggaacatatctgctgacaaccgaaaccgggctgcaaaaggaccatgctctgtgggatcataccgctcagaatctgcttcggatggggcttgcattcctggtcctggtggctcttgtctggtttctggtcgaggactggctgtcccggaagagaaccagagaaagagcttccagggccagcacctgggaaggcagacgcagactgaatactcagaccctgcgcgccaagagaagcggatctggcgtgaagcagaccctgaatttcgacctgctgaagctggctggcgacgtggaatccaacccaggcccttctagaggccatatggctctgcctgtgacagctctgctgctgcctctggcactgctgcttcatgctgctagacctagccagtttagagtgtcccctctggacagaacctggaacctgggcgagacagtggaactgaagtgccaggtgctgctgagcaaccctacaagcggctgctcctggctgtttcagcctagaggtgcagccgcctctcctacctttctgctgtacctgagccagaacaagcccaaggccgccgaaggactggacacccagagattcagcggcaagagactgggcgacaccttcgtgctgaccctgagcgacttcagaagagagaacgagggctactacttctgtagcgccctgagcaacagcatcatgtacttcagccacttcgtgcccgtgtttctgcccgccaagcctacaacaacccctgctcctagacctcctacaccagctcctacaatcgccagccagcctctgtctctcagacccgaagcctgtagacctgctgctggcggagctgtgcataccagaggactggatttcgcctgcgacatctacatctgggctcctctggctggcacatgtggcgtgctgctgctgtccctggtcatcaccctgtactgcaaccaccggaacaggcggagagtgtgcaagtgccctagacctgtggtcaagagcggcgacaagcctagcctgagcgccagatatgtt

SEQ ID NO: 2779 - DNA, 2091 bp, synthetic construct
  source 1..2091: mol_type = other DNA
atggccttaccagtgaccgccttgctcctgccgctggccttgctgctccacgccgccaggccgagcagatacctggtcaagcggaccggcgagaaggtgttcctggaatgcgtgcaggacatggaccacgaaaacatgttctggtacagacaggaccccggcctgggcctgagactgatctacttcagctacgacgtgaagatgaaggaaaagggcgacatccccgagggctacagcgtgtccagagagaagaaagagcggttcagcctgatcctggaaagcgccagcaccaaccagaccagcatgtacctgtgtgccagcagcctgtggggcagactggctaagaacatccagtatttcggagccggcaccagactgtctgttctcgagctcgagatcactcaaggtttggcagtgtcaaccatctcatcattctttccacctggctaccaagtgtccttctgcctggtcatggtgctgctgttcgccgtggataccggcctgtacttcagcgtcaagaccaacatccggtccagcaccagagactggaaggaccacaagttcaagtggcggaaggaccctcaggacaagagggccaagcgatctggatctggagcaacaaacttctcactactcaaacaagcaggtgacgtggaggagaatcccgggcctactagtatggactggatttggcgcatccttttccttgtcggcgctgctaccggcgcgcattccttcgaagaggatcaagtgacccagtctcctgaggctctgaggctgcaagagggcgagagcagctctctgaactgctcctacacagtgtctggcctgaggggcctgttttggtataggcaagaccctggcaagggacccgagttcctgttcacactgtactctgccggcgaggaaaaagagaaagaacgcctgaaggccacgctgaccaagaaagagagcttcctgcacatcacagcccctaagcctgaggacagcgccacctatctgtgtgccgtgcaggccaatagaggcagcacactggggagactgtacttcggcagaggcacccagctgaccgtttggcctgatacgcgtatcacccagggcctggccgtgtctaccatcagcagctttttcccacccggctaccaggtgtccttctgcctcgtgatggtgctgctgttcgccgtggacaccggcctgtacttcagcgtgaaaacaaacatccggtccagcaccagagactggaaggaccacaagttcaagtggcggaaggacccccaggacaagcgcgccaagagaagcggatctggcgtgaagcagaccctgaatttcgacctgctgaagctggctggcgacgtggaatccaacccaggcccttctagaggccatatggctctgcctgtgacagctctgctgctgcctctggcactgctgcttcatgctgctagacctagccagtttagagtgtcccctctggacagaacctggaacctgggcgagacagtggaactgaagtgccaggtgctgctgagcaaccctacaagcggctgctcctggctgtttcagcctagaggtgcagccgcctctcctacctttctgctgtacctgagccagaacaagcccaaggccgccgaaggactggacacccagagattcagcggcaagagactgggcgacaccttcgtgctgaccctgagcgacttcagaagagagaacgagggctactacttctgtagcgccctgagcaacagcatcatgtacttcagccacttcgtgcccgtgtttctgcccgccaagcctacaacaacccctgctcctagacctcctacaccagctcctacaatcgccagccagcctctgtctctcagacccgaagcctgtagacctgctgctggcggagctgtgcataccagaggactggatttcgcctgcgacatctacatctgggctcctctggctggcacatgtggcgtgctgctgctgtccctggtcatcaccctgtactgcaaccaccggaacaggcggagagtgtgcaagtgccctagacctgtggtcaagagcggcgacaagcctagcctgagcgccagatatgtt

SEQ ID NO: 2780 - DNA, 2367 bp, synthetic construct
  source 1..2367: mol_type = other DNA
atggccttaccagtgaccgccttgctcctgccgctggccttgctgctccacgccgccaggccgagcagatacctggtcaagcggaccggcgagaaggtgttcctggaatgcgtgcaggacatggaccacgaaaacatgttctggtacagacaggaccccggcctgggcctgagactgatctacttcagctacgacgtgaagatgaaggaaaagggcgacatccccgagggctacagcgtgtccagagagaagaaagagcggttcagcctgatcctggaaagcgccagcaccaaccagaccagcatgtacctgtgcgccagcagcttttggggcagaagcaccgacacacagtatttcggccctggcaccagactgacagttggacagcctaaggccaatcctaccgtgacactgttccctccaagcagcgaagaactccaggccaacaaggccacacttgtgtgcctgatctccgacttctaccctggggctgtgacagtggcttggaaggccgatggatctcctgtgaaagccggcgtggaaaccaccaagccatccaagcagagcaacaacaaatacgccgccagctcctacctgagcctgacacctgagcagtggaagtcccacagatcctacagctgccaagtgacccacgaaggcagcaccgtggaaaagacagtggcccctacagagtgcagcggatcccagagcttcggcctgctggaccccaagctgtgctacctgctggatggcatcctgttcatctacggcgtgatcctgaccgccctgttcctgagagtgaagttcagcagaagcgccgacgcccctgcctaccagcagggacagaaccaactgtacaacgagctgaacctgggcagacgggaagagtacgacgtgctggacaagcggagaggcagggaccctgagatgggcggaaagccccagcggagaaagaacccccaggaaggactgtataacgaactccagaaagacaagatggccgaagcctacagcgagatcggcatgaagggcgagcggagaagaggcaagggccacgatggcctgtaccagggcctgagcaccgccaccaaggacacctatgacgccctgcacatgcaggccctgcctccaagaagggccaagcgatctggatctggagcaacaaacttctcactactcaaacaagcaggtgacgtggaggagaatcccgggcctactagtatggactggatttggcgcatccttttccttgtcggcgctgctaccggcgcgcattccttcgaaaagcaagaagtgacccagattcctgccgctctgtctgtgcctgagggcgagaatctggtgctgaactgctccttcaccgacagcgccatctacaacctccagtggttcaggcaggaccctggcaagggactgacaagcctgctgctgattcagagcagccagagagagcagaccagcggcagactgaatgccagcctggataagtccagcggaagaagcaccctgtatatcgccgcttctcagcctggcgatagcgccacatatctgtgtgccgtgcgggaaacaagcggctccaggctgacttttggcgagggcacacagctgaccgtgaatcccgatgcctctacaaagggaccctccgtgtttcctctggctcccagcagcaagtctacaagcggaggaacagccgctctgggctgcctggtcaaggattactttcccgagcctgtgaccgtgtcctggaatagcggagcactgacaagcggcgtgcacacctttccagccgtgctgcaaagcagcggcctgtactctctgagcagcgtggtcacagtgcctagctctagcctgggcacccagacctacatctgcaatgtgaaccacaagcctagcaacaccaaggtggacaagagagtggaacccaagagctgtggtacccagagttttgggttgttggaccctaaattgtgctatctgttggacggaatcctgttcatttacggagtgatcctgaccgcattgttcctgcgggttaagttttccagatccgcagacgcacccgcttaccaacaagggcagaaccaactctacaatgaacttaatttggggcggagggaagagtacgacgttctggacaaaaggaggggacgagatcccgagatgggcggaaagcctcagcgaaggaagaatccgcaagaggggctttataacgaactccagaaagataaaatggcagaagcctatagtgagattgggatgaagggagaaaggaggaggggtaaaggtcacgatgggttgtaccaaggattgagcacagccactaaagatacctatgatgcgctccacatgcaggccctgccgccaaga

SEQ ID NO: 2781 - DNA, 1665 bp, synthetic construct
  source 1..1665: mol_type = other DNA
atggccttaccagtgaccgccttgctcctgccgctggccttgctgctccacgccgccaggccgagcagatacctggtcaagcggaccggcgagaaggtgttcctggaatgcgtgcaggacatggaccacgaaaacatgttctggtacagacaggaccccggcctgggcctgagactgatctacttcagctacgacgtgaagatgaaggaaaagggcgacatccccgagggctacagcgtgtccagagagaagaaagagcggttcagcctgatcctggaaagcgccagcaccaaccagaccagcatgtacctgtgcgccagcagcttttggggcagaagcaccgacacacagtatttcggccctggcaccagactgacagttctcgagcagagcttcggcctgctggaccccaagctgtgctacctgctggatggcatcctgttcatctacggcgtgatcctgaccgccctgttcctgagagtgaagttcagcagaagcgccgacgcccctgcctaccagcagggacagaaccaactgtacaacgagctgaacctgggcagacgggaagagtacgacgtgctggacaagcggagaggcagggaccctgagatgggcggaaagccccagcggagaaagaacccccaggaaggactgtataacgaactccagaaagacaagatggccgaagcctacagcgagatcggcatgaagggcgagcggagaagaggcaagggccacgatggcctgtaccagggcctgagcaccgccaccaaggacacctatgacgccctgcacatgcaggccctgcctccaagaagggccaagcgatctggatctggagcaacaaacttctcactactcaaacaagcaggtgacgtggaggagaatcccgggcctactagtatggactggatttggcgcatccttttccttgtcggcgctgctaccggcgcgcattccttcgaaaagcaagaagtgacccagattcctgccgctctgtctgtgcctgagggcgagaatctggtgctgaactgctccttcaccgacagcgccatctacaacctccagtggttcaggcaggaccctggcaagggactgacaagcctgctgctgattcagagcagccagagagagcagaccagcggcagactgaatgccagcctggataagtccagcggaagaagcaccctgtatatcgccgcttctcagcctggcgatagcgccacatatctgtgtgccgtgcgggaaacaagcggctccaggctgacttttggcgagggcacacagctgaccgtgaatcccgatacgcgtcagagttttgggttgttggaccctaaattgtgctatctgttggacggaatcctgttcatttacggagtgatcctgaccgcattgttcctgcgggttaagttttccagatccgcagacgcacccgcttaccaacaagggcagaaccaactctacaatgaacttaatttggggcggagggaagagtacgacgttctggacaaaaggaggggacgagatcccgagatgggcggaaagcctcagcgaaggaagaatccgcaagaggggctttataacgaactccagaaagataaaatggcagaagcctatagtgagattgggatgaagggagaaaggaggaggggtaaaggtcacgat

SEQ ID NO: 2782 - DNA, 2817 bp, synthetic construct
  source 1..2817: mol_type = other DNA
atggccttaccagtgaccgccttgctcctgccgctggccttgctgctccacgccgccaggccgagcagatacctggtcaagcggaccggcgagaaggtgttcctggaatgcgtgcaggacatggaccacgaaaacatgttctggtacagacaggaccccggcctgggcctgagactgatctacttcagctacgacgtgaagatgaaggaaaagggcgacatccccgagggctacagcgtgtccagagagaagaaagagcggttcagcctgatcctggaaagcgccagcaccaaccagaccagcatgtacctgtgcgccagcagcttttggggcagaagcaccgacacacagtatttcggccctggcaccagactgacagttctcgagacaacacctggcgagagaagtagcctgcctgccttctatcctggcaccagcggctcttgttctggctgtggatctctgagcctgcctctgctggctggactggttgctgctgatgctgtggcctctctgctgattgtgggagccgtgttcctgtgcgccagacctagaagaagccccgctcaagaggacggcaaggtgtacatcaacatgcccggcagaggaagcactagtagagtgaagttcagcagaagcgccgacgcccctgcctaccagcagggacagaaccaactgtacaacgagctgaacctgggcagacgggaagagtacgacgtgctggacaagcggagaggcagggaccctgagatgggcggaaagccccagcggagaaagaacccccaggaaggactgtataacgaactccagaaagacaagatggccgaagcctacagcgagatcggcatgaagggcgagcggagaagaggcaagggccacgatggcctgtaccagggcctgagcaccgccaccaaggacacctatgacgccctgcacatgcaggccctgcctccaagaagggccaagcgatctggatctggagcaacaaacttctcactactcaaacaagcaggtgacgtggaggagaatcccgggcctatggactggatttggcgcatccttttccttgtcggcgctgctaccggcgcgcattccttcgaaaagcaagaagtgacccagattcctgccgctctgtctgtgcctgagggcgagaatctggtgctgaactgctccttcaccgacagcgccatctacaacctccagtggttcaggcaggaccctggcaagggactgacaagcctgctgctgattcagagcagccagagagagcagaccagcggcagactgaatgccagcctggataagtccagcggaagaagcaccctgtatatcgccgcttctcagcctggcgatagcgccacatatctgtgtgccgtgcgggaaacaagcggctccaggctgacttttggcgagggcacacagctgaccgtgaatcccgatacgcgtacaacgccgggcgaaaggagttccttgccggccttttaccccggcacaagcggaagctgtagtgggtgtggaagcctcagcctcccacttcttgcgggcctcgtcgcggcagatgcagtagcttcacttcttattgtaggcgcggtatttctctgtgctcgaccaaggaggtcacccgctcaggaggatggtaaggtgtatataaatatgccaggacgcggaagctctagacgggttaagttttccagatccgcagacgcacccgcttaccaacaagggcagaaccaactctacaatgaacttaatttggggcggagggaagagtacgacgttctggacaaaaggaggggacgagatcccgagatgggcggaaagcctcagcgaaggaagaatccgcaagaggggctttataacgaactccagaaagataaaatggcagaagcctatagtgagattgggatgaagggagaaaggaggaggggtaaaggtcacgatgggttgtaccaaggattgagcacagccactaaagatacctatgatgcgctccacatgcaggccctgccgccaagacgcgccaagagaagcggatctggcgtgaagcagaccctgaatttcgacctgctgaagctggctggcgacgtggaatccaacccaggccctggccatatggctctgcctgtgacagctctgctgctgcctctggcactgctgcttcatgctgctagacctagccagtttagagtgtcccctctggacagaacctggaacctgggcgagacagtggaactgaagtgccaggtgctgctgagcaaccctacaagcggctgctcctggctgtttcagcctagaggtgcagccgcctctcctacctttctgctgtacctgagccagaacaagcccaaggccgccgaaggactggacacccagagattcagcggcaagagactgggcgacaccttcgtgctgaccctgagcgacttcagaagagagaacgagggctactacttctgtagcgccctgagcaacagcatcatgtacttcagccacttcgtgcccgtgtttctgcccgccaagcctacaacaacccctgctcctagacctcctacaccagctcctacaatcgccagccagcctctgtctctcagacccgaagcctgtagacctgctgctggcggagctgtgcataccagaggactggatttcgcctgcgacatctacatctgggctcctctggctggcacatgtggcgtgctgctgctgtccctggtcatcaccctgtactgcaaccaccggaacaggcggagagtgtgcaagtgccctagacctgtggtcaagagcggcgacaagcctagcctgagcgccagatatgtt

SEQ ID NO: 2783 - DNA, 2817 bp, synthetic construct; identical to SEQ ID NO: 2782
  source 1..2817: mol_type = other DNA

SEQ ID NO: 2784 - DNA, 3315 bp, synthetic construct
  source 1..3315: mol_type = other DNA
atggccttaccagtgaccgccttgctcctgccgctggccttgctgctccacgccgccaggccgagcagatacctggtcaagcggaccggcgagaaggtgttcctggaatgcgtgcaggacatggaccacgaaaacatgttctggtacagacaggaccccggcctgggcctgagactgatctacttcagctacgacgtgaagatgaaggaaaagggcgacatccccgagggctacagcgtgtccagagagaagaaagagcggttcagcctgatcctggaaagcgccagcaccaaccagaccagcatgtacctgtgcgccagcagcttttggggcagaagcaccgacacacagtatttcggccctggcaccagactgacagttctcgagggacagcctaaggccaatcctaccgtgacactgttccctccaagcagcgaagaactccaggccaacaaggccacacttgtgtgcctgatctccgacttctaccctggggctgtgacagtggcttggaaggccgatggatctcctgtgaaagccggcgtggaaaccaccaagccatccaagcagagcaacaacaaatacgccgccagctcctacctgagcctgacacctgagcagtggaagtcccacagatcctacagctgccaagtgacccacgaaggcagcaccgtggaaaagacagtggcccctacagagtgcagcggatccacaacacctggcgagagaagtagcctgcctgccttctatcctggcaccagcggctcttgttctggctgtggatctctgagcctgcctctgctggctggactggttgctgctgatgctgtggcctctctgctgattgtgggagccgtgttcctgtgcgccagacctagaagaagccccgctcaagaggacggcaaggtgtacatcaacatgcccggcagaggaagcactagtagagtgaagttcagcagaagcgccgacgcccctgcctaccagcagggacagaaccaactgtacaacgagctgaacctgggcagacgggaagagtacgacgtgctggacaagcggagaggcagggaccctgagatgggcggaaagccccagcggagaaagaacccccaggaaggactgtataacgaactccagaaagacaagatggccgaagcctacagcgagatcggcatgaagggcgagcggagaagaggcaagggccacgatggcctgtaccagggcctgagcaccgccaccaaggacacctatgacgccctgcacatgcaggccctgcctccaagaagggccaagcgatctggatctggagcaacaaacttctcactactcaaacaagcaggtgacgtggaggagaatcccgggcctatggactggatttggcgcatccttttccttgtcggcgctgctaccggcgcgcattccttcgaaaagcaagaagtgacccagattcctgccgctctgtctgtgcctgagggcgagaatctggtgctgaactgctccttcaccgacagcgccatctacaacctccagtggttcaggcaggaccctggcaagggactgacaagcctgctgctgattcagagcagccagagagagcagaccagcggcagactgaatgccagcctggataagtccagcggaagaagcaccctgtatatcgccgcttctcagcctggcgatagcgccacatatctgtgtgccgtgcgggaaacaagcggctccaggctgacttttggcgagggcacacagctgaccgtgaatcccgatacgcgtgcctctacaaagggaccctccgtgtttcctctggctcccagcagcaagtctacaagcggaggaacagccgctctgggctgcctggtcaaggattactttcccgagcctgtgaccgtgtcctggaatagcggagcactgacaagcggcgtgcacacctttccagccgtgctgcaaagcagcggcctgtactctctgagcagcgtggtcacagtgcctagctctagcctgggcacccagacctacatctgcaatgtgaaccacaagcctagcaacaccaaggtggacaagagagtggaacccaagagctgtggtaccacaacgccgggcgaaaggagttccttgccggccttttaccccggcacaagcggaagctgtagtgggtgtggaagcctcagcctcccacttcttgcgggcctcgtcgcggcagatgcagtagcttcacttcttattgtaggcgcggtatttctctgtgctcgaccaaggaggtcacccgctcaggaggatggtaaggtgtatataaatatgccaggacgcggaagctctagacgggttaagttttccagatccgcagacgcacccgcttaccaacaagggcagaaccaactctacaatgaacttaatttggggcggagggaagagtacgacgttctggacaaaaggaggggacgagatcccgagatgggcggaaagcctcagcgaaggaagaatccgcaagaggggctttataacgaactccagaaagataaaatggcagaagcctatagtgagattgggatgaagggagaaaggaggaggggtaaaggtcacgatgggttgtaccaaggattgagcacagccactaaagatacctatgatgcgctccacatgcaggccctgccgccaagacgcgccaagagaagcggatctggcgtgaagcagaccctgaatttcgacctgctgaagctggctggcgacgtggaatccaacccaggccctggccatatggctacctacgaggtgctgtgcgaggtggcaagaaagctgggcaccgacgacagagaagtggtgctgttcctgctgaacgtgttcatccctcagcctacactggcccagctgatcggtgcactgagagccctgaaagaggaaggccggctgacctttcctctgctggccgaatgcctgttcagagccggaagaagggatctgctgcgggacctgctgcatctggaccccagatttctggaaagacacctggccggcaccatgagctacttcagcccttaccagctgaccgtgctgcacgttgacggcgaactgtgcgccagagatattcggagcctgatcttcctgagcaaggacaccatcggcagccggtctacccctcagacatttctgcactgggtgtactgcatggaaaacctggacctgctcggccccacagatgtggatgccctgatgtccatgctgagaagcctgagcagagtggacctccagagacaggtgcagacactgatgggactgcacctgagcggacctagccacagccagcactacagacacacccct

SEQ ID NO: 2785 - DNA, 3474 bp, synthetic construct
  source 1..3474: mol_type = other DNA
atggccttaccagtgaccgccttgctcctgccgctggccttgctgctccacgccgccaggccgagcagatacctggtcaagcggaccggcgagaaggtgttcctggaatgcgtgcaggacatggaccacgaaaacatgttctggtacagacaggaccccggcctgggcctgagactgatctacttcagctacgacgtgaagatgaaggaaaagggcgacatccccgagggctacagcgtgtccagagagaagaaagagcggttcagcctgatcctggaaagcgccagcaccaaccagaccagcatgtacctgtgcgccagcagcttttggggcagaagcaccgacacacagtatttcggccctggcaccagactgacagttctcgagggacagcctaaggccaatcctaccgtgacactgttccctccaagcagcgaagaactccaggccaacaaggccacacttgtgtgcctgatctccgacttctaccctggggctgtgacagtggcttggaaggccgatggatctcctgtgaaagccggcgtggaaaccaccaagccatccaagcagagcaacaacaaatacgccgccagctcctacctgagcctgacacctgagcagtggaagtcccacagatcctacagctgccaagtgacccacgaaggcagcaccgtggaaaagacagtggcccctacagagtgcagcggatccacaacacctggcgagagaagtagcctgcctgccttctatcctggcaccagcggctcttgttctggctgtggatctctgagcctgcctctgctggctggactggttgctgctgatgctgtggcctctctgctgattgtgggagccgtgttcctgtgcgccagacctagaagaagccccgctcaagaggacggcaaggtgtacatcaacatgcccggcagaggaagcactagtagagtgaagttcagcagaagcgccgacgcccctgcctaccagcagggacagaaccaactgtacaacgagctgaacctgggcagacgggaagagtacgacgtgctggacaagcggagaggcagggaccctgagatgggcggaaagccccagcggagaaagaacccccaggaaggactgtataacgaactccagaaagacaagatggccgaagcctacagcgagatcggcatgaagggcgagcggagaagaggcaagggccacgatggcctgtaccagggcctgagcaccgccaccaaggacacctatgacgccctgcacatgcaggccctgcctccaagaagggccaagcgatctggatctggagcaacaaacttctcactactcaaacaagcaggtgacgtggaggagaatcccgggcctatggactggatttggcgcatccttttccttgtcggcgctgctaccggcgcgcattccttcgaaaagcaagaagtgacccagattcctgccgctctgtctgtgcctgagggcgagaatctggtgctgaactgctccttcaccgacagcgccatctacaacctccagtggttcaggcaggaccctggcaagggactgacaagcctgctgctgattcagagcagccagagagagcagaccagcggcagactgaatgccagcctggataagtccagcggaagaagcaccctgtatatcgccgcttctcagcctggcgatagcgccacatatctgtgtgccgtgcgggaaacaagcggctccaggctgacttttggcgagggcacacagctgaccgtgaatcccgatacgcgtgcctctacaaagggaccctccgtgtttcctctggctcccagcagcaagtctacaagcggaggaacagccgctctgggctgcctggtcaaggattactttcccgagcctgtgaccgtgtcctggaatagcggagcactgacaagcggcgtgcacacctttccagccgtgctgcaaagcagcggcctgtactctctgagcagcgtggtcacagtgcctagctctagcctgggcacccagacctacatctgcaatgtgaaccacaagcctagcaacaccaaggtggacaagagagtggaacccaagagctgtggtaccacaacgccgggcgaaaggagttccttgccggccttttaccccggcacaagcggaagctgtagtgggtgtggaagcctcagcctcccacttcttgcgggcctcgtcgcggcagatgcagtagcttcacttcttattgtaggcgcggtatttctctgtgctcgaccaaggaggtcacccgctcaggaggatggtaaggtgtatataaatatgccaggacgcggaagctctagacgggttaagttttccagatccgcagacgcacccgcttaccaacaagggcagaaccaactctacaatgaacttaatttggggcggagggaagagtacgacgttctggacaaaaggaggggacgagatcccgagatgggcggaaagcctcagcgaaggaagaatccgcaagaggggctttataacgaactccagaaagataaaatggcagaagcctatagtgagattgggatgaagggagaaaggaggaggggtaaaggtcacgatgggttgtaccaaggattgagcacagccactaaagatacctatgatgcgctccacatgcaggccctgccgccaagacgcgccaagagaagcggatctggcgtgaagcagaccctgaatttcgacctgctgaagctggctggcgacgtggaatccaacccaggccctggccatatgtccgactccaaggaggtccctagccttccatttttgcgacacttgctcgaagagttggacagccatgaggacagcttgctgctgtttctgtgtcacgacgcggccccgggctgcacgacggtcacgcaagctttgtgctcgcttagccaacagcgcaagctgaccctcgcggctctggtcgagatgctctacgtgctgcagcgtatggatcttctcaagagccgcttcgggctcagcaaggagggggccgagcaattgctgggcacaagctttctcacgcgctaccgcaagctcatggtttgcgtgggtgaggagctcgactcgagcgagctacgcgctctacgcttgttcgcgtgcaacctgaatccgagcctgagcacggcgctttctgagagcagccgctttgtcgagcttgtactcgcgcttgaaaacgtaggactcgtctcgccatcgagtgtttccgtgcttgcggacatgttgcgcactcttcggcgcctcgatttgtgccagcagcttgttgagtacgaacaacaagagcaagccaggtaccgttactgttacgcggcctcgccctcattgccagttcgtacgttacgtcgggggcacggcgcgagtgaacacgagcagctgtgcatgcccgtgcaagaatcctctgacagccccgagctgctgcgcacgcccgtacaagaatcctccagcgacagccccgagcaaacgact

SEQ ID NO: 2786 - DNA, 3456 bp, synthetic construct
  source 1..3456: mol_type = other DNA
atggccttaccagtgaccgccttgctcctgccgctggccttgctgctccacgccgccaggccgagcagatacctggtcaagcggaccggcgagaaggtgttcctggaatgcgtgcaggacatggaccacgaaaacatgttctggtacagacaggaccccggcctgggcctgagactgatctacttcagctacgacgtgaagatgaaggaaaagggcgacatccccgagggctacagcgtgtccagagagaagaaagagcggttcagcctgatcctggaaagcgccagcaccaaccagaccagcatgtacctgtgcgccagcagcttttggggcagaagcaccgacacacagtatttcggccctggcaccagactgacagttctcgagggacagcctaaggccaatcctaccgtgacactgttccctccaagcagcgaagaactccaggccaacaaggccacacttgtgtgcctgatctccgacttctaccctggggctgtgacagtggcttggaaggccgatggatctcctgtgaaagccggcgtggaaaccaccaagccatccaagcagagcaacaacaaatacgccgccagctcctacctgagcctgacacctgagcagtggaagtcccacagatcctacagctgccaagtgacccacgaaggcagcaccgtggaaaagacagtggcccctacagagtgcagcggatccacaacacctggcgagagaagtagcctgcctgccttctatcctggcaccagcggctcttgttctggctgtggatctctgagcctgcctctgctggctggactggttgctgctgatgctgtggcctctctgctgattgtgggagccgtgttcctgtgcgccagacctagaagaagccccgctcaagaggacggcaaggtgtacatcaacatgcccggcagaggaagcactagtagagtgaagttcagcagaagcgccgacgcccctgcctaccagcagggacagaaccaactgtacaacgagctgaacctgggcagacgggaagagtacgacgtgctggacaagcggagaggcagggaccctgagatgggcggaaagccccagcggagaaagaacccccaggaaggactgtataacgaactccagaaagacaagatggccgaagcctacagcgagatcggcatgaagggcgagcggagaagaggcaagggccacgatggcctgtaccagggcctgagcaccgccaccaaggacacctatgacgccctgcacatgcaggccctgcctccaagaagggccaagcgatctggatctggagcaacaaacttctcactactcaaacaagcaggtgacgtggaggagaatcccgggcctatggactggatttggcgcatccttttccttgtcggcgctgctaccggcgcgcattccttcgaaaagcaagaagtgacccagattcctgccgctctgtctgtgcctgagggcgagaatctggtgctgaactgctccttcaccgacagcgccatctacaacctccagtggttcaggcaggaccctggcaagggactgacaagcctgctgctgattcagagcagccagagagagcagaccagcggcagactgaatgccagcctggataagtccagcggaagaagcaccctgtatatcgccgcttctcagcctggcgatagcgccacatatctgtgtgccgtgcgggaaacaagcggctccaggctgacttttggcgagggcacacagctgaccgtgaatcccgatacgcgtgcctctacaaagggaccctccgtgtttcctctggctcccagcagcaagtctacaagcggaggaacagccgctctgggctgcctggtcaaggattactttcccgagcctgtgaccgtgtcctggaatagcggagcactgacaagcggcgtgcacacctttccagccgtgctgcaaagcagcggcctgtactctctgagcagcgtggtcacagtgcctagctctagcctgggcacccagacctacatctgcaatgtgaaccacaagcctagcaacaccaaggtggacaagagagtggaacccaagagctgtggtaccacaacgccgggcgaaaggagttccttgccggccttttaccccggcacaagcggaagctgtagtgggtgtggaagcctcagcctcccacttcttgcgggcctcgtcgcggcagatgcagtagcttcacttcttattgtaggcgcggtatttctctgtgctcgaccaaggaggtcacccgctcaggaggatggtaaggtgtatataaatatgccaggacgcggaagctctagacgggttaagttttccagatccgcagacgcacccgcttaccaacaagggcagaaccaactctacaatgaacttaatttggggcggagggaagagtacgacgttctggacaaaaggaggggacgagatcccgagatgggcggaaagcctcagcgaaggaagaatccgcaagaggggctttataacgaactccagaaagataaaatggcagaagcctatagtgagattgggatgaagggagaaaggaggaggggtaaaggtcacgatgggttgtaccaaggattgagcacagccactaaagatacctatgatgcgctccacatgcaggccctgccgccaagacgcgccaagagaagcggatctggcgtgaagcagaccctgaatttcgacctgctgaagctggctggcgacgtggaatccaacccaggccctggccatatggctctgcctgtgacagctctgctgctgcctctggcactgctgcttcatgctgctagacctagccagtttagagtgtcccctctggacagaacctggaacctgggcgagacagtggaactgaagtgccaggtgctgctgagcaaccctacaagcggctgctcctggctgtttcagcctagaggtgcagccgcctctcctacctttctgctgtacctgagccagaacaagcccaaggccgccgaaggactggacacccagagattcagcggcaagagactgggcgacaccttcgtgctgaccctgagcgacttcagaagagagaacgagggctactacttctgtagcgccctgagcaacagcatcatgtacttcagccacttcgtgcccgtgtttctgcccgccaagcctacaacaacccctgctcctagacctcctacaccagctcctacaatcgccagccagcctctgtctctcagacccgaagcctgtagacctgctgctggcggagctgtgcataccagaggactggatttcgcctgcgacatctacatctgggctcctctggctggcacatgtggcgtgctgctgctgtccctggtcatcaccctgtactgcaaccaccggaacaggcggagagtgtgcaagtgccctagacctgtggtcaagagcggcgacaagcctagcctgagcgccagatatgtt

SEQ ID NO: 2787 - DNA, 3867 bp, synthetic construct
  source 1..3867: mol_type = other DNA
atggccttaccagtgaccgccttgctcctgccgctggccttgctgctccacgccgccaggccggaagtgcagctggttgaatctggcggaggactggttcaggctggcggatctctgagactgtcttgtgccgccagcggcagaacctttagcatgggctggtttagacaggcccctggcaaagagagagagttcgtcgccgccatcacatactctggcggcagcccttactacgccgactctgtgaagggcagattcaccatcagccgggacaacgccaagaacaccgtgtacctccagatgaacagcctgaagcctgaggacaccgccgtgtactactgcgccgccaatccaacatacggcagcgactggaacgccgagaattggggccagggaacccaagtgacagtgtctagcggtaccggcggaggcggatctggcggcggaggtagcggtggcggaggatctgaattcagcagatacctggtcaagcggaccggcgagaaggtgttcctggaatgcgtgcaggacatggaccacgaaaacatgttctggtacagacaggaccccggcctgggcctgagactgatctacttcagctacgacgtgaagatgaaggaaaagggcgacatccccgagggctacagcgtgtccagagagaagaaagagcggttcagcctgatcctggaaagcgccagcaccaaccagaccagcatgtacctgtgcgccagcagcttttggggcagaagcaccgacacacagtatttcggccctggcaccagactgacagttctcgagggacagcctaaggccaatcctaccgtgacactgttccctccaagcagcgaagaactccaggccaacaaggccacacttgtgtgcctgatctccgacttctaccctggggctgtgacagtggcttggaaggccgatggatctcctgtgaaagccggcgtggaaaccaccaagccatccaagcagagcaacaacaaatacgccgccagctcctacctgagcctgacacctgagcagtggaagtcccacagatcctacagctgccaagtgacccacgaaggcagcaccgtggaaaagacagtggcccctacagagtgcagcggatccacaacacctggcgagagaagtagcctgcctgccttctatcctggcaccagcggctcttgttctggctgtggatctctgagcctgcctctgctggctggactggttgctgctgatgctgtggcctctctgctgattgtgggagccgtgttcctgtgcgccagacctagaagaagccccgctcaagaggacggcaaggtgtacatcaacatgcccggcagaggaagcactagtagagtgaagttcagcagaagcgccgacgcccctgcctaccagcagggacagaaccaactgtacaacgagctgaacctgggcagacgggaagagtacgacgtgctggacaagcggagaggcagggaccctgagatgggcggaaagccccagcggagaaagaacccccaggaaggactgtataacgaactccagaaagacaagatggccgaagcctacagcgagatcggcatgaagggcgagcggagaagaggcaagggccacgatggcctgtaccagggcctgagcaccgccaccaaggacacctatgacgccctgcacatgcaggccctgcctccaagaagggccaagcgatctggatctggagcaacaaacttctcactactcaaacaagcaggtgacgtggaggagaatcccgggcctatggactggatttggcgcatccttttccttgtcggcgctgctaccggcgcgcattccttcgaaaagcaagaagtgacccagattcctgccgctctgtctgtgcctgagggcgagaatctggtgctgaactgctccttcaccgacagcgccatctacaacctccagtggttcaggcaggaccctggcaagggactgacaagcctgctgctgattcagagcagccagagagagcagaccagcggcagactgaatgccagcctggataagtccagcggaagaagcaccctgtatatcgccgcttctcagcctggcgatagcgccacatatctgtgtgccgtgcgggaaacaagcggctccaggctgacttttggcgagggcacacagctgaccgtgaatcccgatacgcgtgcctctacaaagggaccctccgtgtttcctctggctcccagcagcaagtctacaagcggaggaacagccgctctgggctgcctggtcaaggattactttcccgagcctgtgaccgtgtcctggaatagcggagcactgacaagcggcgtgcacacctttccagccgtgctgcaaagcagcggcctgtactctctgagcagcgtggtcacagtgcctagctctagcctgggcacccagacctacatctgcaatgtgaaccacaagcctagcaacaccaaggtggacaagagagtggaacccaagagctgtggtaccacaacgccgggcgaaaggagttccttgccggccttttaccccggcacaagcggaagctgtagtgggtgtggaagcctcagcctcccacttcttgcgggcctcgtcgcggcagatgcagtagcttcacttcttattgtaggcgcggtatttctctgtgctcgaccaaggaggtcacccgctcaggaggatggtaaggtgtatataaatatgccaggacgcggaagctctagacgggttaagttttccagatccgcagacgcacccgcttaccaacaagggcagaaccaactctacaatgaacttaatttggggcggagggaagagtacgacgttctggacaaaaggaggggacgagatcccgagatgggcggaaagcctcagcgaaggaagaatccgcaagaggggctttataacgaactccagaaagataaaatggcagaagcctatagtgagattgggatgaagggagaaaggaggaggggtaaaggtcacgatgggttgtaccaaggattgagcacagccactaaagatacctatgatgcgctccacatgcaggccctgccgccaagacgcgccaagagaagcggatctggcgtgaagcagaccctgaatttcgacctgctgaagctggctggcgacgtggaatccaacccaggccctggccatatggctctgcctgtgacagctctgctgctgcctctggcactgctgcttcatgctgctagacctagccagtttagagtgtcccctctggacagaacctggaacctgggcgagacagtggaactgaagtgccaggtgctgctgagcaaccctacaagcggctgctcctggctgtttcagcctagaggtgcagccgcctctcctacctttctgctgtacctgagccagaacaagcccaaggccgccgaaggactggacacccagagattcagcggcaagagactgggcgacaccttcgtgctgaccctgagcgacttcagaagagagaacgagggctactacttctgtagcgccctgagcaacagcatcatgtacttcagccacttcgtgcccgtgtttctgcccgccaagcctacaacaacccctgctcctagacctcctacaccagctcctacaatcgccagccagcctctgtctctcagacccgaagcctgtagacctgctgctggcggagctgtgcataccagaggactggatttcgcctgcgacatctacatctgggctcctctggctggcacatgtggcgtgctgctgctgtccctggtcatcaccctgtactgcaaccaccggaacaggcggagagtgtgcaagtgccctagacctgtggtcaagagcggcgacaagcctagcctgagcgccagatatgtt

SEQ ID NO: 2788 - DNA, 4278 bp, synthetic construct
  source 1..4278: mol_type = other DNA
atggccttaccagtgaccgccttgctcctgccgctggccttgctgctccacgccgccaggccggaagtgcagctggttgaatctggcggaggactggttcaggctggcggatctctgagactgtcttgtgccgccagcggcagaacctttagcatgggctggtttagacaggcccctggcaaagagagagagttcgtcgccgccatcacatactctggcggcagcccttactacgccgactctgtgaagggcagattcaccatcagccgggacaacgccaagaacaccgtgtacctccagatgaacagcctgaagcctgaggacaccgccgtgtactactgcgccgccaatccaacatacggcagcgactggaacgccgagaattggggccagggaacccaagtgacagtgtctagcggtaccggcggaggcggatctggcggcggaggtagcggtggcggaggatctgaattcagcagatacctggtcaagcggaccggcgagaaggtgttcctggaatgcgtgcaggacatggaccacgaaaacatgttctggtacagacaggaccccggcctgggcctgagactgatctacttcagctacgacgtgaagatgaaggaaaagggcgacatccccgagggctacagcgtgtccagagagaagaaagagcggttcagcctgatcctggaaagcgccagcaccaaccagaccagcatgtacctgtgcgccagcagcttttggggcagaagcaccgacacacagtatttcggccctggcaccagactgacagttctcgagggacagcctaaggccaatcctaccgtgacactgttccctccaagcagcgaagaactccaggccaacaaggccacacttgtgtgcctgatctccgacttctaccctggggctgtgacagtggcttggaaggccgatggatctcctgtgaaagccggcgtggaaaccaccaagccatccaagcagagcaacaacaaatacgccgccagctcctacctgagcctgacacctgagcagtggaagtcccacagatcctacagctgccaagtgacccacgaaggcagcaccgtggaaaagacagtggcccctacagagtgcagcggatccacaacacctggcgagagaagtagcctgcctgccttctatcctggcaccagcggctcttgttctggctgtggatctctgagcctgcctctgctggctggactggttgctgctgatgctgtggcctctctgctgattgtgggagccgtgttcctgtgcgccagacctagaagaagccccgctcaagaggacggcaaggtgtacatcaacatgcccggcagaggaagcactagtagagtgaagttcagcagaagcgccgacgcccctgcctaccagcagggacagaaccaactgtacaacgagctgaacctgggcagacgggaagagtacgacgtgctggacaagcggagaggcagggaccctgagatgggcggaaagccccagcggagaaagaacccccaggaaggactgtataacgaactccagaaagacaagatggccgaagcctacagcgagatcggcatgaagggcgagcggagaagaggcaagggccacgatggcctgtaccagggcctgagcaccgccaccaaggacacctatgacgccctgcacatgcaggccctgcctccaagaagggccaagcgatctggatctggagcaacaaacttctcactactcaaacaagcaggtgacgtggaggagaatcccgggcctatggactggatttggcgcatccttttccttgtcggcgctgctaccggcgcgcattccgggcccgaagtgcaactggttgaatccggtggcggcctggtgcaagcaggcggatctctcagacttagctgtgccgcctccggcagaaccttcacaatgggatggtttaggcaggctccagggaaagagagagagttcgtcgccgccatctctctgtctcccacactggcctactacgccgactctgtgaaaggccggttcaccatctccagagataatgccaagaacaccgtggtgctgcaaatgaactctctgaaacccgaggatacagccctgtactattgtgccgctgaccggaagtccgtgatgagcatcagacccgattactggggacagggcacacaagtcacagtgtcctctggatccggcggcggaggatctggcggaggcggatctgggggcggaggctctttcgaaaagcaagaagtgacccagattcctgccgctctgtctgtgcctgagggcgagaatctggtgctgaactgctccttcaccgacagcgccatctacaacctccagtggttcaggcaggaccctggcaagggactgacaagcctgctgctgattcagagcagccagagagagcagaccagcggcagactgaatgccagcctggataagtccagcggaagaagcaccctgtatatcgccgcttctcagcctggcgatagcgccacatatctgtgtgccgtgcgggaaacaagcggctccaggctgacttttggcgagggcacacagctgaccgtgaatcccgatacgcgtgcctctacaaagggaccctccgtgtttcctctggctcccagcagcaagtctacaagcggaggaacagccgctctgggctgcctggtcaaggattactttcccgagcctgtgaccgtgtcctggaatagcggagcactgacaagcggcgtgcacacctttccagccgtgctgcaaagcagcggcctgtactctctgagcagcgtggtcacagtgcctagctctagcctgggcacccagacctacatctgcaatgtgaaccacaagcctagcaacaccaaggtggacaagagagtggaacccaagagctgtggtaccacaacgccgggcgaaaggagttccttgccggccttttaccccggcacaagcggaagctgtagtgggtgtggaagcctcagcctcccacttcttgcgggcctcgtcgcggcagatgcagtagcttcacttcttattgtaggcgcggtatttctctgtgctcgaccaaggaggtcacccgctcaggaggatggtaaggtgtatataaatatgccaggacgcggaagctctagacgggttaagttttccagatccgcagacgcacccgcttaccaacaagggcagaaccaactctacaatgaacttaatttggggcggagggaagagtacgacgttctggacaaaaggaggggacgagatcccgagatgggcggaaagcctcagcgaaggaagaatccgcaagaggggctttataacgaactccagaaagataaaatggcagaagcctatagtgagattgggatgaagggagaaaggaggaggggtaaaggtcacgatgggttgtaccaaggattgagcacagccactaaagatacctatgatgcgctccacatgcaggccctgccgccaagacgcgccaagagaagcggatctggcgtgaagcagaccctgaatttcgacctgctgaagctggctggcgacgtggaatccaacccaggccctggccatatggctctgcctgtgacagctctgctgctgcctctggcactgctgcttcatgctgctagacctagccagtttagagtgtcccctctggacagaacctggaacctgggcgagacagtggaactgaagtgccaggtgctgctgagcaaccctacaagcggctgctcctggctgtttcagcctagaggtgcagccgcctctcctacctttctgctgtacctgagccagaacaagcccaaggccgccgaaggactggacacccagagattcagcggcaagagactgggcgacaccttcgtgctgaccctgagcgacttcagaagagagaacgagggctactacttctgtagcgccctgagcaacagcatcatgtacttcagccacttcgtgcccgtgtttctgcccgccaagcctacaacaacccctgctcctagacctcctacaccagctcctacaatcgccagccagcctctgtctctcagacccgaagcctgtagacctgctgctggcggagctgtgcataccagaggactggatttcgcctgcgacatctacatctgggctcctctggctggcacatgtggcgtgctgctgctgtccctggtcatcaccctgtactgcaaccaccggaacaggcggagagtgtgcaagtgccctagacctgtggtcaagagcggcgacaagcctagcctgagcgccagatatgtt

SEQ ID NO: 2789 - DNA, 2433 bp, synthetic construct
  source 1..2433: mol_type = other DNA
atggccttaccagtgaccgccttgctcctgccgctggccttgctgctccacgccgccaggccggaattcagcagatacctggtcaagcggaccggcgagaaggtgttcctggaatgcgtgcaggacatggaccacgaaaacatgttctggtacagacaggaccccggcctgggcctgagactgatctacttcagctacgacgtgaagatgaaggaaaagggcgacatccccgagggctacagcgtgtccagagagaagaaagagcggttcagcctgatcctggaaagcgccagcaccaaccagaccagcatgtacctgtgcgccagcagcttttggggcagaagcaccgacacacagtatttcggccctggcaccagactgacagttctcgaggacctgaagaacgtgttcccacctgaggtggccgtgttcgagcctagcgaggccgagatcagccacacccagaaagccaccctcgtgtgcctggctaccggcttctaccccgaccatgtggaactgtcttggtgggtcaacggcaaagaggtgcacagcggcgtgtctaccgacccccagccactgaaagaacagcccgccctgaacgacagccggtactgcctgagcagcagactgagagtgtccgccaccttctggcagaacccccggaaccacttcagatgccaggtgcagttctacggcctgagcgagaacgacgagtggacccaggacagagccaagcccgtgacccagatcgtgtctgccgaagcctggggcagagccgattgcggatcccagagcttcggcctgctggaccccaagctgtgctacctgctggatggcatcctgttcatctacggcgtgatcctgaccgccctgttcctgagagtgaagttcagcagaagcgccgacgcccctgcctaccagcagggacagaaccaactgtacaacgagctgaacctgggcagacgggaagagtacgacgtgctggacaagcggagaggcagggaccctgagatgggcggaaagccccagcggagaaagaacccccaggaaggactgtataacgaactccagaaagacaagatggccgaagcctacagcgagatcggcatgaagggcgagcggagaagaggcaagggccacgatggcctgtaccagggcctgagcaccgccaccaaggacacctatgacgccctgcacatgcaggccctgcctccaagaagggccaagcgatctggatctggagcaacaaacttctcactactcaaacaagcaggtgacgtggaggagaatcccgggcctactagtatggactggatttggcgcatccttttccttgtcggcgctgctaccggcgcgcattccttcgaaaagcaagaagtgacccagattcctgccgctctgtctgtgcctgagggcgagaatctggtgctgaactgctccttcaccgacagcgccatctacaacctccagtggttcaggcaggaccctggcaagggactgacaagcctgctgctgattcagagcagccagagagagcagaccagcggcagactgaatgccagcctggataagtccagcggaagaagcaccctgtatatcgccgcttctcagcctggcgatagcgccacatatctgtgtgccgtgcgggaaacaagcggctccaggctgacttttggcgagggcacacagctgaccgtgaatcccgatacgcgtatccagaaccctgatcctgccgtgtaccagctgcgggatagcaagagcagcgacaagagcgtgtgtctgttcaccgacttcgacagccagaccaacgtgtcccagagcaaggactccgacgtgtacatcaccgataagaccgtgctggacatgcggagcatggacttcaagagcaactccgccgtggcctggtccaacaagtccgatttcgcctgcgccaacgccttcaacaacagcattatccccgaggacacattcttcccaagccccgagagcagctgcggtacccagagttttgggttgttggaccctaaattgtgctatctgttggacggaatcctgttcatttacggagtgatcctgaccgcattgttcctgcgggttaagttttccagatccgcagacgcacccgcttaccaacaagggcagaaccaactctacaatgaacttaatttggggcggagggaagagtacgacgttctggacaaaaggaggggacgagatcccgagatgggcggaaagcctcagcgaaggaagaatccgcaagaggggctttataacgaactccagaaagataaaatggcagaagcctatagtgagattgggatgaagggagaaaggaggaggggtaaaggtcacgatgggttgtaccaaggattgagcacagccactaaagatacctatgatgcgctccacatgcaggccctgccgccaagataa

SEQ ID NO: 2790 - DNA, 2559 bp, synthetic construct
  source 1..2559: mol_type = other DNA
atggccttaccagtgaccgccttgctcctgccgctggccttgctgctccacgccgccaggccggaattcagcagatacctggtcaagcggaccggcgagaaggtgttcctggaatgcgtgcaggacatggaccacgaaaacatgttctggtacagacaggaccccggcctgggcctgagactgatctacttcagctacgacgtgaagatgaaggaaaagggcgacatccccgagggctacagcgtgtccagagagaagaaagagcggttcagcctgatcctggaaagcgccagcaccaaccagaccagcatgtacctgtgcgccagcagcttttggggcagaagcaccgacacacagtatttcggccctggcaccagactgacagttctcgaggacctgaagaacgtgttcccacctgaggtggccgtgttcgagcctagcgaggccgagatcagccacacccagaaagccaccctcgtgtgcctggctaccggcttctaccccgaccatgtggaactgtcttggtgggtcaacggcaaagaggtgcacagcggcgtgtctaccgacccccagccactgaaagaacagcccgccctgaacgacagccggtactgcctgagcagcagactgagagtgtccgccaccttctggcagaacccccggaaccacttcagatgccaggtgcagttctacggcctgagcgagaacgacgagtggacccaggacagagccaagcccgtgacccagatcgtgtctgccgaagcctggggcagagccgattgcggatcccagagcttcggcctgctggaccccaagctgtgctacctgctggatggcatcctgttcatctacggcgtgatcctgaccgccctgttcctgagagtgaagttcagcagaagcgccgacgcccctgcctaccagcagggacagaaccaactgtacaacgagctgaacctgggcagacgggaagagtacgacgtgctggacaagcggagaggcagggaccctgagatgggcggaaagccccagcggagaaagaacccccaggaaggactgtataacgaactccagaaagacaagatggccgaagcctacagcgagatcggcatgaagggcgagcggagaagaggcaagggccacgatggcctgtaccagggcctgagcaccgccaccaaggacacctatgacgccctgcacatgcaggccctgcctccaagaagggccaagcgatctggatctggagcaacaaacttctcactactcaaacaagcaggtgacgtggaggagaatcccgggcctactagtatggactggatttggcgcatccttttccttgtcggcgctgctaccggcgcgcattccttcgaaaagcaagaagtgacccagattcctgccgctctgtctgtgcctgagggcgagaatctggtgctgaactgctccttcaccgacagcgccatctacaacctccagtggttcaggcaggaccctggcaagggactgacaagcctgctgctgattcagagcagccagagagagcagaccagcggcagactgaatgccagcctggataagtccagcggaagaagcaccctgtatatcgccgcttctcagcctggcgatagcgccacatatctgtgtgccgtgcgggaaacaagcggctccaggctgacttttggcgagggcacacagctgaccgtgaatcccgatacgcgtatccagaaccctgatcctgccgtgtaccagctgcgggatagcaagagcagcgacaagagcgtgtgtctgttcaccgacttcgacagccagaccaacgtgtcccagagcaaggactccgacgtgtacatcaccgataagaccgtgctggacatgcggagcatggacttcaagagcaactccgccgtggcctggtccaacaagtccgatttcgcctgcgccaacgccttcaacaacagcattatccccgaggacacattcttcccaagccccgagagcagctgcggtacccagagcttcggcctgctggaccccaagctgtgctacctgctggatggcatcctgttcatctacggcgtgatcctgaccgccctgttcctgaaacggggcagaaagaaactcctgtatatattcaaacaaccatttatgagaccagtacaaactactcaagaggaagatggctgtagctgccgatttccagaagaagaagaaggaggatgtgaactgagagtgaagttcagcagaagcgccgacgcccctgcctaccagcagggacagaaccaactgtacaacgagctgaacctgggcagacgggaagagtacgacgtgctggacaagcggagaggcagggaccctgagatgggcggaaagccccagcggagaaagaacccccaggaaggactgtataacgaactccagaaagacaagatggccgaagcctacagcgagatcggcatgaagggcgagcggagaagaggcaagggccacgatggcctgtaccagggcctgagcaccgccaccaaggacacctatgacgccctgcacatgcaggccctgcctccaagataa

SEQ ID NO: 2791 - DNA, 2556 bp, synthetic construct
  source 1..2556: mol_type = other DNA
atggccttaccagtgaccgccttgctcctgccgctggccttgctgctccacgccgccaggccggaattcagcagatacctggtcaagcggaccggcgagaaggtgttcctggaatgcgtgcaggacatggaccacgaaaacatgttctggtacagacaggaccccggcctgggcctgagactgatctacttcagctacgacgtgaagatgaaggaaaagggcgacatccccgagggctacagcgtgtccagagagaagaaagagcggttcagcctgatcctggaaagcgccagcaccaaccagaccagcatgtacctgtgcgccagcagcttttggggcagaagcaccgacacacagtatttcggccctggcaccagactgacagttctcgaggacctgaagaacgtgttcccacctgaggtggccgtgttcgagcctagcgaggccgagatcagccacacccagaaagccaccctcgtgtgcctggctaccggcttctaccccgaccatgtggaactgtcttggtgggtcaacggcaaagaggtgcacagcggcgtgtctaccgacccccagccactgaaagaacagcccgccctgaacgacagccggtactgcctgagcagcagactgagagtgtccgccaccttctggcagaacccccggaaccacttcagatgccaggtgcagttctacggcctgagcgagaacgacgagtggacccaggacagagccaagcccgtgacccagatcgtgtctgccgaagcctggggcagagccgattgcggatcccagagcttcggcctgctggaccccaagctgtgctacctgctggatggcatcctgttcatctacggcgtgatcctgaccgccctgttcctgagagtgaagttcagcagaagcgccgacgcccctgcctaccagcagggacagaaccaactgtacaacgagctgaacctgggcagacgggaagagtacgacgtgctggacaagcggagaggcagggaccctgagatgggcggaaagccccagcggagaaagaacccccaggaaggactgtataacgaactccagaaagacaagatggccgaagcctacagcgagatcggcatgaagggcgagcggagaagaggcaagggccacgatggcctgtaccagggcctgagcaccgccaccaaggacacctatgacgccctgcacatgcaggccctgcctccaagaagggccaagcgatctggatctggagcaacaaacttctcactactcaaacaagcaggtgacgtggaggagaatcccgggcctactagtatggactggatttggcgcatccttttccttgtcggcgctgctaccggcgcgcattccttcgaaaagcaagaagtgacccagattcctgccgctctgtctgtgcctgagggcgagaatctggtgctgaactgctccttcaccgacagcgccatctacaacctccagtggttcaggcaggaccctggcaagggactgacaagcctgctgctgattcagagcagccagagagagcagaccagcggcagactgaatgccagcctggataagtccagcggaagaagcaccctgtatatcgccgcttctcagcctggcgatagcgccacatatctgtgtgccgtgcgggaaacaagcggctccaggctgacttttggcgagggcacacagctgaccgtgaatcccgatacgcgtatccagaaccctgatcctgccgtgtaccagctgcgggatagcaagagcagcgacaagagcgtgtgtctgttcaccgacttcgacagccagaccaacgtgtcccagagcaaggactccgacgtgtacatcaccgataagaccgtgctggacatgcggagcatggacttcaagagcaactccgccgtggcctggtccaacaagtccgatttcgcctgcgccaacgccttcaacaacagcattatccccgaggacacattcttcccaagccccgagagcagctgcggtacccagagcttcggcctgctggaccccaagctgtgctacctgctggatggcatcctgttcatctacggcgtgatcctgaccgccctgttcctgaggagtaagaggagcaggctcctgcacagtgactacatgaacatgactccacgccgccccggacccacccgcaagcattaccagccctatgccccaccacgcgacttcgcagcctatcgctccagagtgaagttcagcagaagcgccgacgcccctgcctaccagcagggacagaaccaactgtacaacgagctgaacctgggcagacgggaagagtacgacgtgctggacaagcggagaggcagggaccctgagatgggcggaaagccccagcggagaaagaacccccaggaaggactgtataacgaactccagaaagacaagatggccgaagcctacagcgagatcggcatgaagggcgagcggagaagaggcaagggccacgatggcctgtaccagggcctgagcaccgccaccaaggacacctatgacgccctgcacatgcaggccctgcctccaagataa

SEQ ID NO: 2792 - DNA, 2541 bp, synthetic construct
  source 1..2541: mol_type = other DNA
atggccttaccagtgaccgccttgctcctgccgctggccttgctgctccacgccgccaggccggaattcagcagatacctggtcaagcggaccggcgagaaggtgttcctggaatgcgtgcaggacatggaccacgaaaacatgttctggtacagacaggaccccggcctgggcctgagactgatctacttcagctacgacgtgaagatgaaggaaaagggcgacatccccgagggctacagcgtgtccagagagaagaaagagcggttcagcctgatcctggaaagcgccagcaccaaccagaccagcatgtacctgtgcgccagcagcttttggggcagaagcaccgacacacagtatttcggccctggcaccagactgacagttctcgaggacctgaagaacgtgttcccacctgaggtggccgtgttcgagcctagcgaggccgagatcagccacacccagaaagccaccctcgtgtgcctggctaccggcttctaccccgaccatgtggaactgtcttggtgggtcaacggcaaagaggtgcacagcggcgtgtctaccgacccccagccactgaaagaacagcccgccctgaacgacagccggtactgcctgagcagcagactgagagtgtccgccaccttctggcagaacccccggaaccacttcagatgccaggtgcagttctacggcctgagcgagaacgacgagtggacccaggacagagccaagcccgtgacccagatcgtgtctgccgaagcctggggcagagccgattgcggatcccagagcttcggcctgctggaccccaagctgtgctacctgctggatggcatcctgttcatctacggcgtgatcctgaccgccctgttcctgagagtgaagttcagcagaagcgccgacgcccctgcctaccagcagggacagaaccaactgtacaacgagctgaacctgggcagacgggaagagtacgacgtgctggacaagcggagaggcagggaccctgagatgggcggaaagccccagcggagaaagaacccccaggaaggactgtataacgaactccagaaagacaagatggccgaagcctacagcgagatcggcatgaagggcgagcggagaagaggcaagggccacgatggcctgtaccagggcctgagcaccgccaccaaggacacctatgacgccctgcacatgcaggccctgcctccaagaagggccaagcgatctggatctggagcaacaaacttctcactactcaaacaagcaggtgacgtggaggagaatcccgggcctactagtatggactggatttggcgcatccttttccttgtcggcgctgctaccggcgcgcattccttcgaaaagcaagaagtgacccagattcctgccgctctgtctgtgcctgagggcgagaatctggtgctgaactgctccttcaccgacagcgccatctacaacctccagtggttcaggcaggaccctggcaagggactgacaagcctgctgctgattcagagcagccagagagagcagaccagcggcagactgaatgccagcctggataagtccagcggaagaagcaccctgtatatcgccgcttctcagcctggcgatagcgccacatatctgtgtgccgtgcgggaaacaagcggctccaggctgacttttggcgagggcacacagctgaccgtgaatcccgatacgcgtatccagaaccctgatcctgccgtgtaccagctgcgggatagcaagagcagcgacaagagcgtgtgtctgttcaccgacttcgacagccagaccaacgtgtcccagagcaaggactccgacgtgtacatcaccgataagaccgtgctggacatgcggagcatggacttcaagagcaactccgccgtggcctggtccaacaagtccgatttcgcctgcgccaacgccttcaacaacagcattatccccgaggacacattcttcccaagccccgagagcagctgcggtacccagagcttcggcctgctggaccccaagctgtgctacctgctggatggcatcctgttcatctacggcgtgatcctgaccgccctgttcctgagggaccaaagactgcctcctgacgctcacaaacctccaggcggaggcagcttcagaacccctatccaagaggaacaggctgacgcccacagcaccctggcaaaaattagagtgaagttcagcagaagcgccgacgcccctgcctaccagcagggacagaaccaactgtacaacgagctgaacctgggcagacgggaagagtacgacgtgctggacaagcggagaggcagggaccctgagatgggcggaaagccccagcggagaaagaacccccaggaaggactgtataacgaactccagaaagacaagatggccgaagcctacagcgagatcggcatgaagggcgagcggagaagaggcaagggccacgatggcctgtaccagggcctgagcaccgccaccaaggacacctatgacgccctgcacatgcaggccctgcctccaagataa

SEQ ID NO: 2793 - DNA, 2793 bp, synthetic construct
  source 1..2793: mol_type = other DNA
atggccttaccagtgaccgccttgctcctgccgctggccttgctgctccacgccgccaggccggaattcagcagatacctggtcaagcggaccggcgagaaggtgttcctggaatgcgtgcaggacatggaccacgaaaacatgttctggtacagacaggaccccggcctgggcctgagactgatctacttcagctacgacgtgaagatgaaggaaaagggcgacatccccgagggctacagcgtgtccagagagaagaaagagcggttcagcctgatcctggaaagcgccagcaccaaccagaccagcatgtacctgtgcgccagcagcttttggggcagaagcaccgacacacagtatttcggccctggcaccagactgacagttctcgaggacctgaagaacgtgttcccacctgaggtggccgtgttcgagcctagcgaggccgagatcagccacacccagaaagccaccctcgtgtgcctggctaccggcttctaccccgaccatgtggaactgtcttggtgggtcaacggcaaagaggtgcacagcggcgtgtctaccgacccccagccactgaaagaacagcccgccctgaacgacagccggtactgcctgagcagcagactgagagtgtccgccaccttctggcagaacccccggaaccacttcagatgccaggtgcagttctacggcctgagcgagaacgacgagtggacccaggacagagccaagcccgtgacccagatcgtgtctgccgaagcctggggcagagccgattgcggatcccagagcttcggcctgctggaccccaagctgtgctacctgctggatggcatcctgttcatctacggcgtgatcctgaccgccctgttcctgagagtgaagttcagcagaagcgccgacgcccctgcctaccagcagggacagaaccaactgtacaacgagctgaacctgggcagacgggaagagtacgacgtgctggacaagcggagaggcagggaccctgagatgggcggaaagccccagcggagaaagaacccccaggaaggactgtataacgaactccagaaagacaagatggccgaagcctacagcgagatcggcatgaagggcgagcggagaagaggcaagggccacgatggcctgtaccagggcctgagcaccgccaccaaggacacctatgacgccctgcacatgcaggccctgcctccaagaagggccaagcgatctggatctggagcaacaaacttctcactactcaaacaagcaggtgacgtggaggagaatcccgggcctactagtatggactggatttggcgcatccttttccttgtcggcgctgctaccggcgcgcattccttcgaaaagcaagaagtgacccagattcctgccgctctgtctgtgcctgagggcgagaatctggtgctgaactgctccttcaccgacagcgccatctacaacctccagtggttcaggcaggaccctggcaagggactgacaagcctgctgctgattcagagcagccagagagagcagaccagcggcagactgaatgccagcctggataagtccagcggaagaagcaccctgtatatcgccgcttctcagcctggcgatagcgccacatatctgtgtgccgtgcgggaaacaagcggctccaggctgacttttggcgagggcacacagctgaccgtgaatcccgatacgcgtatccagaaccctgatcctgccgtgtaccagctgcgggatagcaagagcagcgacaagagcgtgtgtctgttcaccgacttcgacagccagaccaacgtgtcccagagcaaggactccgacgtgtacatcaccgataagaccgtgctggacatgcggagcatggacttcaagagcaactccgccgtggcctggtccaacaagtccgatttcgcctgcgccaacgccttcaacaacagcattatccccgaggacacattcttcccaagccccgagagcagctgcggtacccagagcttcggcctgctggaccccaagctgtgctacctgctggatggcatcctgttcatctacggcgtgatcctgaccgccctgttcctgtggcggcggaagcggaaagagaagcagtctgagacaagccccaaagagttcctgaccatctacgaggacgtgaaggacctgaaaacccggcggaaccacgaacaagagcagacctttcctggcggaggcagcaccatctacagcatgatccagagccagagcagcgcccctacaagccaagagcctgcctacacactgtactccctgatccagcctagcagaaagagcggcagccggaagagaaatcacagccccagcttcaacagcacgatctacgaagtgatcggcaagagccagccaaaggctcagaaccctgccagactgagccggaaagagctggaaaacttcgacgtgtacagcagagtgaagttcagcagaagcgccgacgcccctgcctaccagcagggacagaaccaactgtacaacgagctgaacctgggcagacgggaagagtacgacgtgctggacaagcggagaggcagggaccctgagatgggcggaaagccccagcggagaaagaacccccaggaaggactgtataacgaactccagaaagacaagatggccgaagcctacagcgagatcggcatgaagggcgagcggagaagaggcaagggccacgatggcctgtaccagggcctgagcaccgccaccaaggacacctatgacgccctgcacatgcaggccctgcctccaagataa

SEQ ID NO: 2794 - DNA, 2682 bp, synthetic construct
  source 1..2682: mol_type = other DNA
atggccttaccagtgaccgccttgctcctgccgctggccttgctgctccacgccgccaggccggaattcagcagatacctggtcaagcggaccggcgagaaggtgttcctggaatgcgtgcaggacatggaccacgaaaacatgttctggtacagacaggaccccggcctgggcctgagactgatctacttcagctacgacgtgaagatgaaggaaaagggcgacatccccgagggctacagcgtgtccagagagaagaaagagcggttcagcctgatcctggaaagcgccagcaccaaccagaccagcatgtacctgtgcgccagcagcttttggggcagaagcaccgacacacagtatttcggccctggcaccagactgacagttctcgaggacctgaagaacgtgttcccacctgaggtggccgtgttcgagcctagcgaggccgagatcagccacacccagaaagccaccctcgtgtgcctggctaccggcttctaccccgaccatgtggaactgtcttggtgggtcaacggcaaagaggtgcacagcggcgtgtctaccgacccccagccactgaaagaacagcccgccctgaacgacagccggtactgcctgagcagcagactgagagtgtccgccaccttctggcagaacccccggaaccacttcagatgccaggtgcagttctacggcctgagcgagaacgacgagtggacccaggacagagccaagcccgtgacccagatcgtgtctgccgaagcctggggcagagccgattgcggatcccagagcttcggcctgctggaccccaagctgtgctacctgctggatggcatcctgttcatctacggcgtgatcctgaccgccctgttcctgaggagtaagaggagcaggctcctgcacagtgactacatgaacatgactccacgccgccccggacccacccgcaagcattaccagccctatgccccaccacgcgacttcgcagcctatcgctccagagtgaagttcagcagaagcgccgacgcccctgcctaccagcagggacagaaccaactgtacaacgagctgaacctgggcagacgggaagagtacgacgtgctggacaagcggagaggcagggaccctgagatgggcggaaagccccagcggagaaagaacccccaggaaggactgtataacgaactccagaaagacaagatggccgaagcctacagcgagatcggcatgaagggcgagcggagaagaggcaagggccacgatggcctgtaccagggcctgagcaccgccaccaaggacacctatgacgccctgcacatgcaggccctgcctccaagaagggccaagcgatctggatctggagcaacaaacttctcactactcaaacaagcaggtgacgtggaggagaatcccgggcctactagtatggactggatttggcgcatccttttccttgtcggcgctgctaccggcgcgcattccttcgaaaagcaagaagtgacccagattcctgccgctctgtctgtgcctgagggcgagaatctggtgctgaactgctccttcaccgacagcgccatctacaacctccagtggttcaggcaggaccctggcaagggactgacaagcctgctgctgattcagagcagccagagagagcagaccagcggcagactgaatgccagcctggataagtccagcggaagaagcaccctgtatatcgccgcttctcagcctggcgatagcgccacatatctgtgtgccgtgcgggaaacaagcggctccaggctgacttttggcgagggcacacagctgaccgtgaatcccgatacgcgtatccagaaccctgatcctgccgtgtaccagctgcgggatagcaagagcagcgacaagagcgtgtgtctgttcaccgacttcgacagccagaccaacgtgtcccagagcaaggactccgacgtgtacatcaccgataagaccgtgctggacatgcggagcatggacttcaagagcaactccgccgtggcctggtccaacaagtccgatttcgcctgcgccaacgccttcaacaacagcattatccccgaggacacattcttcccaagccccgagagcagctgcggtacccagagcttcggcctgctggaccccaagctgtgctacctgctggatggcatcctgttcatctacggcgtgatcctgaccgccctgttcctgaaacggggcagaaagaaactcctgtatatattcaaacaaccatttatgagaccagtacaaactactcaagaggaagatggctgtagctgccgatttccagaagaagaagaaggaggatgtgaactgagagtgaagttcagcagaagcgccgacgcccctgcctaccagcagggacagaaccaactgtacaacgagctgaacctgggcagacgggaagagtacgacgtgctggacaagcggagaggcagggaccctgagatgggcggaaagccccagcggagaaagaacccccaggaaggactgtataacgaactccagaaagacaagatggccgaagcctacagcgagatcggcatgaagggcgagcggagaagaggcaagggccacgatggcctgtaccagggcctgagcaccgccaccaaggacacctatgacgccctgcacatgcaggccctgcctccaagataa

SEQ ID NO: 2795 - DNA, 2679 bp, synthetic construct
  source 1..2679: mol_type = other DNA
atggccttaccagtgaccgccttgctcctgccgctggccttgctgctccacgccgccaggccggaattcagcagatacctggtcaagcggaccggcgagaaggtgttcctggaatgcgtgcaggacatggaccacgaaaacatgttctggtacagacaggaccccggcctgggcctgagactgatctacttcagctacgacgtgaagatgaaggaaaagggcgacatccccgagggctacagcgtgtccagagagaagaaagagcggttcagcctgatcctggaaagcgccagcaccaaccagaccagcatgtacctgtgcgccagcagcttttggggcagaagcaccgacacacagtatttcggccctggcaccagactgacagttctcgaggacctgaagaacgtgttcccacctgaggtggccgtgttcgagcctagcgaggccgagatcagccacacccagaaagccaccctcgtgtgcctggctaccggcttctaccccgaccatgtggaactgtcttggtgggtcaacggcaaagaggtgcacagcggcgtgtctaccgacccccagccactgaaagaacagcccgccctgaacgacagccggtactgcctgagcagcagactgagagtgtccgccaccttctggcagaacccccggaaccacttcagatgccaggtgcagttctacggcctgagcgagaacgacgagtggacccaggacagagccaagcccgtgacccagatcgtgtctgccgaagcctggggcagagccgattgcggatcccagagcttcggcctgctggaccccaagctgtgctacctgctggatggcatcctgttcatctacggcgtgatcctgaccgccctgttcctgaggagtaagaggagcaggctcctgcacagtgactacatgaacatgactccacgccgccccggacccacccgcaagcattaccagccctatgccccaccacgcgacttcgcagcctatcgctccagagtgaagttcagcagaagcgccgacgcccctgcctaccagcagggacagaaccaactgtacaacgagctgaacctgggcagacgggaagagtacgacgtgctggacaagcggagaggcagggaccctgagatgggcggaaagccccagcggagaaagaacccccaggaaggactgtataacgaactccagaaagacaagatggccgaagcctacagcgagatcggcatgaagggcgagcggagaagaggcaagggccacgatggcctgtaccagggcctgagcaccgccaccaaggacacctatgacgccctgcacatgcaggccctgcctccaagaagggccaagcgatctggatctggagcaacaaacttctcactactcaaacaagcaggtgacgtggaggagaatcccgggcctactagtatggactggatttggcgcatccttttccttgtcggcgctgctaccggcgcgcattccttcgaaaagcaagaagtgacccagattcctgccgctctgtctgtgcctgagggcgagaatctggtgctgaactgctccttcaccgacagcgccatctacaacctccagtggttcaggcaggaccctggcaagggactgacaagcctgctgctgattcagagcagccagagagagcagaccagcggcagactgaatgccagcctggataagtccagcggaagaagcaccctgtatatcgccgcttctcagcctggcgatagcgccacatatctgtgtgccgtgcgggaaacaagcggctccaggctgacttttggcgagggcacacagctgaccgtgaatcccgatacgcgtatccagaaccctgatcctgccgtgtaccagctgcgggatagcaagagcagcgacaagagcgtgtgtctgttcaccgacttcgacagccagaccaacgtgtcccagagcaaggactccgacgtgtacatcaccgataagaccgtgctggacatgcggagcatggacttcaagagcaactccgccgtggcctggtccaacaagtccgatttcgcctgcgccaacgccttcaacaacagcattatccccgaggacacattcttcccaagccccgagagcagctgcggtacccagagttttgggttgttggaccctaaattgtgctatctgttggacggaatcctgttcatttacggagtgatcctgaccgcattgttcctgaggagcaagcggtcacggctgctccacagcgattacatgaatatgacaccacgaagaccgggtcctactcgcaaacactaccaaccctacgcacctccccgcgactttgcagcgtaccgatctcgggttaagttttccagatccgcagacgcacccgcttaccaacaagggcagaaccaactctacaatgaacttaatttggggcggagggaagagtacgacgttctggacaaaaggaggggacgagatcccgagatgggcggaaagcctcagcgaaggaagaatccgcaagaggggctttataacgaactccagaaagataaaatggcagaagcctatagtgagattgggatgaagggagaaaggaggaggggtaaaggtcacgatgggttgtaccaaggattgagcacagccactaaagatacctatgatgcgctccacatgcaggccctgccgccaagataa

SEQ ID NO: 2796 - DNA, 2682 bp, synthetic construct
  source 1..2682: mol_type = other DNA
atggccttaccagtgaccgccttgctcctgccgctggccttgctgctccacgccgccaggccggaattcagcagatacctggtcaagcggaccggcgagaaggtgttcctggaatgcgtgcaggacatggaccacgaaaacatgttctggtacagacaggaccccggcctgggcctgagactgatctacttcagctacgacgtgaagatgaaggaaaagggcgacatccccgagggctacagcgtgtccagagagaagaaagagcggttcagcctgatcctggaaagcgccagcaccaaccagaccagcatgtacctgtgcgccagcagcttttggggcagaagcaccgacacacagtatttcggccctggcaccagactgacagttctcgaggacctgaagaacgtgttcccacctgaggtggccgtgttcgagcctagcgaggccgagatcagccacacccagaaagccaccctcgtgtgcctggctaccggcttctaccccgaccatgtggaactgtcttggtgggtcaacggcaaagaggtgcacagcggcgtgtctaccgacccccagccactgaaagaacagcccgccctgaacgacagccggtactgcctgagcagcagactgagagtgtccgccaccttctggcagaacccccggaaccacttcagatgccaggtgcagttctacggcctgagcgagaacgacgagtggacccaggacagagccaagcccgtgacccagatcgtgtctgccgaagcctggggcagagccgattgcggatcccagagcttcggcctgctggaccccaagctgtgctacctgctggatggcatcctgttcatctacggcgtgatcctgaccgccctgttcctgaggagtaagaggagcaggctcctgcacagtgactacatgaacatgactccacgccgccccggacccacccgcaagcattaccagccctatgccccaccacgcgacttcgcagcctatcgctccagagtgaagttcagcagaagcgccgacgcccctgcctaccagcagggacagaaccaactgtacaacgagctgaacctgggcagacgggaagagtacgacgtgctggacaagcggagaggcagggaccctgagatgggcggaaagccccagcggagaaagaacccccaggaaggactgtataacgaactccagaaagacaagatggccgaagcctacagcgagatcggcatgaagggcgagcggagaagaggcaagggccacgatggcctgtaccagggcctgagcaccgccaccaaggacacctatgacgccctgcacatgcaggccctgcctccaagaagggccaagcgatctggatctggagcaacaaacttctcactactcaaacaagcaggtgacgtggaggagaatcccgggcctactagtatggactggatttggcgcatccttttccttgtcggcgctgctaccggcgcgcattccttcgaaaagcaagaagtgacccagattcctgccgctctgtctgtgcctgagggcgagaatctggtgctgaactgctccttcaccgacagcgccatctacaacctccagtggttcaggcaggaccctggcaagggactgacaagcctgctgctgattcagagcagccagagagagcagaccagcggcagactgaatgccagcctggataagtccagcggaagaagcaccctgtatatcgccgcttctcagcctggcgatagcgccacatatctgtgtgccgtgcgggaaacaagcggctccaggctgacttttggcgagggcacacagctgaccgtgaatcccgatacgcgtatccagaaccctgatcctgccgtgtaccagctgcgggatagcaagagcagcgacaagagcgtgtgtctgttcaccgacttcgacagccagaccaacgtgtcccagagcaaggactccgacgtgtacatcaccgataagaccgtgctggacatgcggagcatggacttcaagagcaactccgccgtggcctggtccaacaagtccgatttcgcctgcgccaacgccttcaacaacagcattatccccgaggacacattcttcccaagccccgagagcagctgcggtacccagagttttgggttgttggaccctaaattgtgctatctgttggacggaatcctgttcatttacggagtgatcctgaccgcattgttcctgaagagaggccggaagaagctgctgtacatcttcaagcagcctttcatgcggcccgtgcagaccacccaggaagaggacggctgctcctgccggttccccgaggaagaagaaggcggctgcgagctgcgggttaagttttccagatccgcagacgcacccgcttaccaacaagggcagaaccaactctacaatgaacttaatttggggcggagggaagagtacgacgttctggacaaaaggaggggacgagatcccgagatgggcggaaagcctcagcgaaggaagaatccgcaagaggggctttataacgaactccagaaagataaaatggcagaagcctatagtgagattgggatgaagggagaaaggaggaggggtaaaggtcacgatgggttgtaccaaggattgagcacagccactaaagatacctatgatgcgctccacatgcaggccctgccgccaagataa

SEQ ID NO: 2797 - DNA, 2433 bp, synthetic construct
  source 1..2433: mol_type = other DNA
atggccttaccagtgaccgccttgctcctgccgctggccttgctgctccacgccgccaggccggaattcagcagatacctggtcaagcggaccggcgagaaggtgttcctggaatgcgtgcaggacatggaccacgaaaacatgttctggtacagacaggaccccggcctgggcctgagactgatctacttcagctacgacgtgaagatgaaggaaaagggcgacatccccgagggctacagcgtgtccagagagaagaaagagcggttcagcctgatcctggaaagcgccagcaccaaccagaccagcatgtacctgtgcgccagcagcttttggggcagaagcaccgacacacagtatttcggccctggcaccagactgacagttctcgaggacctgaagaacgtgttcccacctgaggtggccgtgttcgagcctagcgaggccgagatcagccacacccagaaagccaccctcgtgtgcctggctaccggcttctaccccgaccatgtggaactgtcttggtgggtcaacggcaaagaggtgcacagcggcgtgtctaccgacccccagccactgaaagaacagcccgccctgaacgacagccggtactgcctgagcagcagactgagagtgtccgccaccttctggcagaacccccggaaccacttcagatgccaggtgcagttctacggcctgagcgagaacgacgagtggacccaggacagagccaagcccgtgacccagatcgtgtctgccgaagcctggggcagagccgattgcggatcccagagcttcggcctgctggaccccaagctgtgctacctgctggatggcatcctgttcatctacggcgtgatcctgaccgccctgttcctgagagtgaagttcagcagaagcgccgacgcccctgcctaccagcagggacagaaccaactgtacaacgagctgaacctgggcagacgggaagagtacgacgtgctggacaagcggagaggcagggaccctgagatgggcggaaagccccagcggagaaagaacccccaggaaggactgttcaacgaactccagaaagacaagatggccgaagccttcagcgagatcggcatgaagggcgagcggagaagaggcaagggccacgatggcctgttccagggcctgagcaccgccaccaaggacaccttcgacgccctgcacatgcaggccctgcctccaagaagggccaagcgatctggatctggagcaacaaacttctcactactcaaacaagcaggtgacgtggaggagaatcccgggcctactagtatggactggatttggcgcatccttttccttgtcggcgctgctaccggcgcgcattccttcgaaaagcaagaagtgacccagattcctgccgctctgtctgtgcctgagggcgagaatctggtgctgaactgctccttcaccgacagcgccatctacaacctccagtggttcaggcaggaccctggcaagggactgacaagcctgctgctgattcagagcagccagagagagcagaccagcggcagactgaatgccagcctggataagtccagcggaagaagcaccctgtatatcgccgcttctcagcctggcgatagcgccacatatctgtgtgccgtgcgggaaacaagcggctccaggctgacttttggcgagggcacacagctgaccgtgaatcccgatacgcgtatccagaaccctgatcctgccgtgtaccagctgcgggatagcaagagcagcgacaagagcgtgtgtctgttcaccgacttcgacagccagaccaacgtgtcccagagcaaggactccgacgtgtacatcaccgataagaccgtgctggacatgcggagcatggacttcaagagcaactccgccgtggcctggtccaacaagtccgatttcgcctgcgccaacgccttcaacaacagcattatccccgaggacacattcttcccaagccccgagagcagctgcggtacccagagttttgggttgttggaccctaaattgtgctatctgttggacggaatcctgttcatttacggagtgatcctgaccgcattgttcctgcgggttaagttttccagatccgcagacgcacccgcttaccaacaagggcagaaccaactctacaatgaacttaatttggggcggagggaagagtacgacgttctggacaaaaggaggggacgagatcccgagatgggcggaaagcctcagcgaaggaagaatccgcaagaggggctttataacgaactccagaaagataaaatggcagaagcctatagtgagattgggatgaagggagaaaggaggaggggtaaaggtcacgatgggttgtaccaaggattgagcacagccactaaagatacctatgatgcgctccacatgcaggccctgccgccaagataa

SEQ ID NO: 2798 - DNA, 2433 bp, synthetic construct
  source 1..2433: mol_type = other DNA
atggccttaccagtgaccgccttgctcctgccgctggccttgctgctccacgccgccaggccggaattcagcagatacctggtcaagcggaccggcgagaaggtgttcctggaatgcgtgcaggacatggaccacgaaaacatgttctggtacagacaggaccccggcctgggcctgagactgatctacttcagctacgacgtgaagatgaaggaaaagggcgacatccccgagggctacagcgtgtccagagagaagaaagagcggttcagcctgatcctggaaagcgccagcaccaaccagaccagcatgtacctgtgcgccagcagcttttggggcagaagcaccgacacacagtatttcggccctggcaccagactgacagttctcgaggacctgaagaacgtgttcccacctgaggtggccgtgttcgagcctagcgaggccgagatcagccacacccagaaagccaccctcgtgtgcctggctaccggcttctaccccgaccatgtggaactgtcttggtgggtcaacggcaaagaggtgcacagcggcgtgtctaccgacccccagccactgaaagaacagcccgccctgaacgacagccggtactgcctgagcagcagactgagagtgtccgccaccttctggcagaacccccggaaccacttcagatgccaggtgcagttctacggcctgagcgagaacgacgagtggacccaggacagagccaagcccgtgacccagatcgtgtctgccgaagcctggggcagagccgattgcggatcccagagcttcggcctgctggaccccaagctgtgctacctgctggatggcatcctgttcatctacggcgtgatcctgaccgccctgttcctgagagtgaagttcagcagaagcgccgacgcccctgcctaccagcagggacagaaccaactgtacaacgagctgaacctgggcagacgggaagagtacgacgtgctggacaagcggagaggcagggaccctgagatgggcggaaagccccagcggagaaagaacccccaggaaggactgttcaacgaactccagaaagacaagatggccgaagccttcagcgagatcggcatgaagggcgagcggagaagaggcaagggccacgatggcctgttccagggcctgagcaccgccaccaaggacaccttcgacgccctgcacatgcaggccctgcctccaagaagggccaagcgatctggatctggagcaacaaacttctcactactcaaacaagcaggtgacgtggaggagaatcccgggcctactagtatggactggatttggcgcatccttttccttgtcggcgctgctaccggcgcgcattccttcgaaaagcaagaagtgacccagattcctgccgctctgtctgtgcctgagggcgagaatctggtgctgaactgctccttcaccgacagcgccatctacaacctccagtggttcaggcaggaccctggcaagggactgacaagcctgctgctgattcagagcagccagagagagcagaccagcggcagactgaatgccagcctggataagtccagcggaagaagcaccctgtatatcgccgcttctcagcctggcgatagcgccacatatctgtgtgccgtgcgggaaacaagcggctccaggctgacttttggcgagggcacacagctgaccgtgaatcccgatacgcgtatccagaaccctgatcctgccgtgtaccagctgcgggatagcaagagcagcgacaagagcgtgtgtctgttcaccgacttcgacagccagaccaacgtgtcccagagcaaggactccgacgtgtacatcaccgataagaccgtgctggacatgcggagcatggacttcaagagcaactccgccgtggcctggtccaacaagtccgatttcgcctgcgccaacgccttcaacaacagcattatccccgaggacacattcttcccaagccccgagagcagctgcggtacccagagcttcggcctgctggaccccaagctgtgctacctgctggatggcatcctgttcatctacggcgtgatcctgaccgccctgttcctgagagtgaagttcagcagaagcgccgacgcccctgcctaccagcagggacagaaccaactgtacaacgagctgaacctgggcagacgggaagagtacgacgtgctggacaagcggagaggcagggaccctgagatgggcggaaagccccagcggagaaagaacccccaggaaggactgtataacgaactccagaaagacaagatggccgaagcctacagcgagatcggcatgaagggcgagcggagaagaggcaagggccacgatggcctgtaccagggcctgagcaccgccaccaaggacacctatgacgccctgcacatgcaggccctgcctccaagataa

SEQ ID NO: 2799 - DNA, 2559 bp, synthetic construct
  source 1..2559: mol_type = other DNA
atggccttaccagtgaccgccttgctcctgccgctggccttgctgctccacgccgccaggccggaattcagcagatacctggtcaagcggaccggcgagaaggtgttcctggaatgcgtgcaggacatggaccacgaaaacatgttctggtacagacaggaccccggcctgggcctgagactgatctacttcagctacgacgtgaagatgaaggaaaagggcgacatccccgagggctacagcgtgtccagagagaagaaagagcggttcagcctgatcctggaaagcgccagcaccaaccagaccagcatgtacctgtgcgccagcagcttttggggcagaagcaccgacacacagtatttcggccctggcaccagactgacagttctcgaggacctgaagaacgtgttcccacctgaggtggccgtgttcgagcctagcgaggccgagatcagccacacccagaaagccaccctcgtgtgcctggctaccggcttctaccccgaccatgtggaactgtcttggtgggtcaacggcaaagaggtgcacagcggcgtgtctaccgacccccagccactgaaagaacagcccgccctgaacgacagccggtactgcctgagcagcagactgagagtgtccgccaccttctggcagaacccccggaaccacttcagatgccaggtgcagttctacggcctgagcgagaacgacgagtggacccaggacagagccaagcccgtgacccagatcgtgtctgccgaagcctggggcagagccgattgcggatcccagagcttcggcctgctggaccccaagctgtgctacctgctggatggcatcctgttcatctacggcgtgatcctgaccgccctgttcctgagagtgaagttcagcagaagcgccgacgcccctgcctaccagcagggacagaaccaactgtacaacgagctgaacctgggcagacgggaagagtacgacgtgctggacaagcggagaggcagggaccctgagatgggcggaaagccccagcggagaaagaacccccaggaaggactgttcaacgaactccagaaagacaagatggccgaagccttcagcgagatcggcatgaagggcgagcggagaagaggcaagggccacgatggcctgttccagggcctgagcaccgccaccaaggacaccttcgacgccctgcacatgcaggccctgcctccaagaagggccaagcgatctggatctggagcaacaaacttctcactactcaaacaagcaggtgacgtggaggagaatcccgggcctactagtatggactggatttggcgcatccttttccttgtcggcgctgctaccggcgcgcattccttcgaaaagcaagaagtgacccagattcctgccgctctgtctgtgcctgagggcgagaatctggtgctgaactgctccttcaccgacagcgccatctacaacctccagtggttcaggcaggaccctggcaagggactgacaagcctgctgctgattcagagcagccagagagagcagaccagcggcagactgaatgccagcctggataagtccagcggaagaagcaccctgtatatcgccgcttctcagcctggcgatagcgccacatatctgtgtgccgtgcgggaaacaagcggctccaggctgacttttggcgagggcacacagctgaccgtgaatcccgatacgcgtatccagaaccctgatcctgccgtgtaccagctgcgggatagcaagagcagcgacaagagcgtgtgtctgttcaccgacttcgacagccagaccaacgtgtcccagagcaaggactccgacgtgtacatcaccgataagaccgtgctggacatgcggagcatggacttcaagagcaactccgccgtggcctggtccaacaagtccgatttcgcctgcgccaacgccttcaacaacagcattatccccgaggacacattcttcccaagccccgagagcagctgcggtacccagagcttcggcctgctggaccccaagctgtgctacctgctggatggcatcctgttcatctacggcgtgatcctgaccgccctgttcctgaaacggggcagaaagaaactcctgtatatattcaaacaaccatttatgagaccagtacaaactactcaagaggaagatggctgtagctgccgatttccagaagaagaagaaggaggatgtgaactgagagtgaagttcagcagaagcgccgacgcccctgcctaccagcagggacagaaccaactgtacaacgagctgaacctgggcagacgggaagagtacgacgtgctggacaagcggagaggcagggaccctgagatgggcggaaagccccagcggagaaagaacccccaggaaggactgtataacgaactccagaaagacaagatggccgaagcctacagcgagatcggcatgaagggcgagcggagaagaggcaagggccacgatggcctgtaccagggcctgagcaccgccaccaaggacacctatgacgccctgcacatgcaggccctgcctccaagataa

SEQ ID NO: 2800 - DNA, 2556 bp, synthetic construct
  source 1..2556: mol_type = other DNA
atggccttaccagtgaccgccttgctcctgccgctggccttgctgctccacgccgccaggccggaattcagcagatacctggtcaagcggaccggcgagaaggtgttcctggaatgcgtgcaggacatggaccacgaaaacatgttctggtacagacaggaccccggcctgggcctgagactgatctacttcagctacgacgtgaagatgaaggaaaagggcgacatccccgagggctacagcgtgtccagagagaagaaagagcggttcagcctgatcctggaaagcgccagcaccaaccagaccagcatgtacctgtgcgccagcagcttttggggcagaagcaccgacacacagtatttcggccctggcaccagactgacagttctcgaggacctgaagaacgtgttcccacctgaggtggccgtgttcgagcctagcgaggccgagatcagccacacccagaaagccaccctcgtgtgcctggctaccggcttctaccccgaccatgtggaactgtcttggtgggtcaacggcaaagaggtgcacagcggcgtgtctaccgacccccagccactgaaagaacagcccgccctgaacgacagccggtactgcctgagcagcagactgagagtgtccgccaccttctggcagaacccccggaaccacttcagatgccaggtgcagttctacggcctgagcgagaacgacgagtggacccaggacagagccaagcccgtgacccagatcgtgtctgccgaagcctggggcagagccgattgcggatcccagagcttcggcctgctggaccccaagctgtgctacctgctggatggcatcctgttcatctacggcgtgatcctgaccgccctgttcctgagagtgaagttcagcagaagcgccgacgcccctgcctaccagcagggacagaaccaactgtacaacgagctgaacctgggcagacgggaagagtacgacgtgctggacaagcggagaggcagggaccctgagatgggcggaaagccccagcggagaaagaacccccaggaaggactgttcaacgaactccagaaagacaagatggccgaagccttcagcgagatcggcatgaagggcgagcggagaagaggcaagggccacgatggcctgttccagggcctgagcaccgccaccaaggacaccttcgacgccctgcacatgcaggccctgcctccaagaagggccaagcgatctggatctggagcaacaaacttctcactactcaaacaagcaggtgacgtggaggagaatcccgggcctactagtatggactggatttggcgcatccttttccttgtcggcgctgctaccggcgcgcattccttcgaaaagcaagaagtgacccagattcctgccgctctgtctgtgcctgagggcgagaatctggtgctgaactgctccttcaccgacagcgccatctacaacctccagtggttcaggcaggaccctggcaagggactgacaagcctgctgctgattcagagcagccagagagagcagaccagcggcagactgaatgccagcctggataagtccagcggaagaagcaccctgtatatcgccgcttctcagcctggcgatagcgccacatatctgtgtgccgtgcgggaaacaagcggctccaggctgacttttggcgagggcacacagctgaccgtgaatcccgatacgcgtatccagaaccctgatcctgccgtgtaccagctgcgggatagcaagagcagcgacaagagcgtgtgtctgttcaccgacttcgacagccagaccaacgtgtcccagagcaaggactccgacgtgtacatcaccgataagaccgtgctggacatgcggagcatggacttcaagagcaactccgccgtggcctggtccaacaagtccgatttcgcctgcgccaacgccttcaacaacagcattatccccgaggacacattcttcccaagccccgagagcagctgcggtacccagagcttcggcctgctggaccccaagctgtgctacctgctggatggcatcctgttcatctacggcgtgatcctgaccgccctgttcctgaggagtaagaggagcaggctcctgcacagtgactacatgaacatgactccacgccgccccggacccacccgcaagcattaccagccctatgccccaccacgcgacttcgcagcctatcgctccagagtgaagttcagcagaagcgccgacgcccctgcctaccagcagggacagaaccaactgtacaacgagctgaacctgggcagacgggaagagtacgacgtgctggacaagcggagaggcagggaccctgagatgggcggaaagccccagcggagaaagaacccccaggaaggactgtataacgaactccagaaagacaagatggccgaagcctacagcgagatcggcatgaagggcgagcggagaagaggcaagggccacgatggcctgtaccagggcctgagcaccgccaccaaggacacctatgacgccctgcacatgcaggccctgcctccaagataa

SEQ ID NO: 2801 - DNA, 2541 bp, synthetic construct
  source 1..2541: mol_type = other DNA
atggccttaccagtgaccgccttgctcctgccgctggccttgctgctccacgccgccaggccggaattcagcagatacctggtcaagcggaccggcgagaaggtgttcctggaatgcgtgcaggacatggaccacgaaaacatgttctggtacagacaggaccccggcctgggcctgagactgatctacttcagctacgacgtgaagatgaaggaaaagggcgacatccccgagggctacagcgtgtccagagagaagaaagagcggttcagcctgatcctggaaagcgccagcaccaaccagaccagcatgtacctgtgcgccagcagcttttggggcagaagcaccgacacacagtatttcggccctggcaccagactgacagttctcgaggacctgaagaacgtgttcccacctgaggtggccgtgttcgagcctagcgaggccgagatcagccacacccagaaagccaccctcgtgtgcctggctaccggcttctaccccgaccatgtggaactgtcttggtgggtcaacggcaaagaggtgcacagcggcgtgtctaccgacccccagccactgaaagaacagcccgccctgaacgacagccggtactgcctgagcagcagactgagagtgtccgccaccttctggcagaacccccggaaccacttcagatgccaggtgcagttctacggcctgagcgagaacgacgagtggacccaggacagagccaagcccgtgacccagatcgtgtctgccgaagcctggggcagagccgattgcggatcccagagcttcggcctgctggaccccaagctgtgctacctgctggatggcatcctgttcatctacggcgtgatcctgaccgccctgttcctgagagtgaagttcagcagaagcgccgacgcccctgcctaccagcagggacagaaccaactgtacaacgagctgaacctgggcagacgggaagagtacgacgtgctggacaagcggagaggcagggaccctgagatgggcggaaagccccagcggagaaagaacccccaggaaggactgttcaacgaactccagaaagacaagatggccgaagccttcagcgagatcggcatgaagggcgagcggagaagaggcaagggccacgatggcctgttccagggcctgagcaccgccaccaaggacaccttcgacgccctgcacatgcaggccctgcctccaagaagggccaagcgatctggatctggagcaacaaacttctcactactcaaacaagcaggtgacgtggaggagaatcccgggcctactagtatggactggatttggcgcatccttttccttgtcggcgctgctaccggcgcgcattccttcgaaaagcaagaagtgacccagattcctgccgctctgtctgtgcctgagggcgagaatctggtgctgaactgctccttcaccgacagcgccatctacaacctccagtggttcaggcaggaccctggcaagggactgacaagcctgctgctgattcagagcagccagagagagcagaccagcggcagactgaatgccagcctggataagtccagcggaagaagcaccctgtatatcgccgcttctcagcctggcgatagcgccacatatctgtgtgccgtgcgggaaacaagcggctccaggctgacttttggcgagggcacacagctgaccgtgaatcccgatacgcgtatccagaaccctgatcctgccgtgtaccagctgcgggatagcaagagcagcgacaagagcgtgtgtctgttcaccgacttcgacagccagaccaacgtgtcccagagcaaggactccgacgtgtacatcaccgataagaccgtgctggacatgcggagcatggacttcaagagcaactccgccgtggcctggtccaacaagtccgatttcgcctgcgccaacgccttcaacaacagcattatccccgaggacacattcttcccaagccccgagagcagctgcggtacccagagcttcggcctgctggaccccaagctgtgctacctgctggatggcatcctgttcatctacggcgtgatcctgaccgccctgttcctgagggaccaaagactgcctcctgacgctcacaaacctccaggcggaggcagcttcagaacccctatccaagaggaacaggctgacgcccacagcaccctggcaaaaattagagtgaagttcagcagaagcgccgacgcccctgcctaccagcagggacagaaccaactgtacaacgagctgaacctgggcagacgggaagagtacgacgtgctggacaagcggagaggcagggaccctgagatgggcggaaagccccagcggagaaagaacccccaggaaggactgtataacgaactccagaaagacaagatggccgaagcctacagcgagatcggcatgaagggcgagcggagaagaggcaagggccacgatggcctgtaccagggcctgagcaccgccaccaaggacacctatgacgccctgcacatgcaggccctgcctccaagataa

SEQ ID NO: 2802 - DNA, 2793 bp, synthetic construct
  source 1..2793: mol_type = other DNA
atggccttaccagtgaccgccttgctcctgccgctggccttgctgctccacgccgccaggccggaattcagcagatacctggtcaagcggaccggcgagaaggtgttcctggaatgcgtgcaggacatggaccacgaaaacatgttctggtacagacaggaccccggcctgggcctgagactgatctacttcagctacgacgtgaagatgaaggaaaagggcgacatccccgagggctacagcgtgtccagagagaagaaagagcggttcagcctgatcctggaaagcgccagcaccaaccagaccagcatgtacctgtgcgccagcagcttttggggcagaagcaccgacacacagtatttcggccctggcaccagactgacagttctcgaggacctgaagaacgtgttcccacctgaggtggccgtgttcgagcctagcgaggccgagatcagccacacccagaaagccaccctcgtgtgcctggctaccggcttctaccccgaccatgtggaactgtcttggtgggtcaacggcaaagaggtgcacagcggcgtgtctaccgacccccagccactgaaagaacagcccgccctgaacgacagccggtactgcctgagcagcagactgagagtgtccgccaccttctggcagaacccccggaaccacttcagatgccaggtgcagttctacggcctgagcgagaacgacgagtggacccaggacagagccaagcccgtgacccagatcgtgtctgccgaagcctggggcagagccgattgcggatcccagagcttcggcctgctggaccccaagctgtgctacctgctggatggcatcctgttcatctacggcgtgatcctgaccgccctgttcctgagagtgaagttcagcagaagcgccgacgcccctgcctaccagcagggacagaaccaactgtacaacgagctgaacctgggcagacgggaagagtacgacgtgctggacaagcggagaggcagggaccctgagatgggcggaaagccccagcggagaaagaacccccaggaaggactgttcaacgaactccagaaagacaagatggccgaagccttcagcgagatcggcatgaagggcgagcggagaagaggcaagggccacgatggcctgttccagggcctgagcaccgccaccaaggacaccttcgacgccctgcacatgcaggccctgcctccaagaagggccaagcgatctggatctggagcaacaaacttctcactactcaaacaagcaggtgacgtggaggagaatcccgggcctactagtatggactggatttggcgcatccttttccttgtcggcgctgctaccggcgcgcattccttcgaaaagcaagaagtgacccagattcctgccgctctgtctgtgcctgagggcgagaatctggtgctgaactgctccttcaccgacagcgccatctacaacctccagtggttcaggcaggaccctggcaagggactgacaagcctgctgctgattcagagcagccagagagagcagaccagcggcagactgaatgccagcctggataagtccagcggaagaagcaccctgtatatcgccgcttctcagcctggcgatagcgccacatatctgtgtgccgtgcgggaaacaagcggctccaggctgacttttggcgagggcacacagctgaccgtgaatcccgatacgcgtatccagaaccctgatcctgccgtgtaccagctgcgggatagcaagagcagcgacaagagcgtgtgtctgttcaccgacttcgacagccagaccaacgtgtcccagagcaaggactccgacgtgtacatcaccgataagaccgtgctggacatgcggagcatggacttcaagagcaactccgccgtggcctggtccaacaagtccgatttcgcctgcgccaacgccttcaacaacagcattatccccgaggacacattcttcccaagccccgagagcagctgcggtacccagagcttcggcctgctggaccccaagctgtgctacctgctggatggcatcctgttcatctacggcgtgatcctgaccgccctgttcctgtggcggcggaagcggaaagagaagcagtctgagacaagccccaaagagttcctgaccatctacgaggacgtgaaggacctgaaaacccggcggaaccacgaacaagagcagacctttcctggcggaggcagcaccatctacagcatgatccagagccagagcagcgcccctacaagccaagagcctgcctacacactgtactccctgatccagcctagcagaaagagcggcagccggaagagaaatcacagccccagcttcaacagcacgatctacgaagtgatcggcaagagccagccaaaggctcagaaccctgccagactgagccggaaagagctggaaaacttcgacgtgtacagcagagtgaagttcagcagaagcgccgacgcccctgcctaccagcagggacagaaccaactgtacaacgagctgaacctgggcagacgggaagagtacgacgtgctggacaagcggagaggcagggaccctgagatgggcggaaagccccagcggagaaagaacccccaggaaggactgtataacgaactccagaaagacaagatggccgaagcctacagcgagatcggcatgaagggcgagcggagaagaggcaagggccacgatggcctgtaccagggcctgagcaccgccaccaaggacacctatgacgccctgcacatgcaggccctgcctccaagataa

SEQ ID NO: 2803 - DNA, 2556 bp, synthetic construct
  source 1..2556: mol_type = other DNA
atggccttaccagtgaccgccttgctcctgccgctggccttgctgctccacgccgccaggccggaattcagcagatacctggtcaagcggaccggcgagaaggtgttcctggaatgcgtgcaggacatggaccacgaaaacatgttctggtacagacaggaccccggcctgggcctgagactgatctacttcagctacgacgtgaagatgaaggaaaagggcgacatccccgagggctacagcgtgtccagagagaagaaagagcggttcagcctgatcctggaaagcgccagcaccaaccagaccagcatgtacctgtgcgccagcagcttttggggcagaagcaccgacacacagtatttcggccctggcaccagactgacagttctcgaggacctgaagaacgtgttcccacctgaggtggccgtgttcgagcctagcgaggccgagatcagccacacccagaaagccaccctcgtgtgcctggctaccggcttctaccccgaccatgtggaactgtcttggtgggtcaacggcaaagaggtgcacagcggcgtgtctaccgacccccagccactgaaagaacagcccgccctgaacgacagccggtactgcctgagcagcagactgagagtgtccgccaccttctggcagaacccccggaaccacttcagatgccaggtgcagttctacggcctgagcgagaacgacgagtggacccaggacagagccaagcccgtgacccagatcgtgtctgccgaagcctggggcagagccgattgcggatcccagagcttcggcctgctggaccccaagctgtgctacctgctggatggcatcctgttcatctacggcgtgatcctgaccgccctgttcctgagagtgaagttcagcagaagcgccgacgcccctgcctaccagcagggacagaaccaactgtacaacgagctgaacctgggcagacgggaagagtacgacgtgctggacaagcggagaggcagggaccctgagatgggcggaaagccccagcggagaaagaacccccaggaaggactgttcaacgaactccagaaagacaagatggccgaagccttcagcgagatcggcatgaagggcgagcggagaagaggcaagggccacgatggcctgttccagggcctgagcaccgccaccaaggacaccttcgacgccctgcacatgcaggccctgcctccaagaagggccaagcgatctggatctggagcaacaaacttctcactactcaaacaagcaggtgacgtggaggagaatcccgggcctactagtatggactggatttggcgcatccttttccttgtcggcgctgctaccggcgcgcattccttcgaaaagcaagaagtgacccagattcctgccgctctgtctgtgcctgagggcgagaatctggtgctgaactgctccttcaccgacagcgccatctacaacctccagtggttcaggcaggaccctggcaagggactgacaagcctgctgctgattcagagcagccagagagagcagaccagcggcagactgaatgccagcctggataagtccagcggaagaagcaccctgtatatcgccgcttctcagcctggcgatagcgccacatatctgtgtgccgtgcgggaaacaagcggctccaggctgacttttggcgagggcacacagctgaccgtgaatcccgatacgcgtatccagaaccctgatcctgccgtgtaccagctgcgggatagcaagagcagcgacaagagcgtgtgtctgttcaccgacttcgacagccagaccaacgtgtcccagagcaaggactccgacgtgtacatcaccgataagaccgtgctggacatgcggagcatggacttcaagagcaactccgccgtggcctggtccaacaagtccgatttcgcctgcgccaacgccttcaacaacagcattatccccgaggacacattcttcccaagccccgagagcagctgcggtacccagagttttgggttgttggaccctaaattgtgctatctgttggacggaatcctgttcatttacggagtgatcctgaccgcattgttcctgaggagcaagcggtcacggctgctccacagcgattacatgaatatgacaccacgaagaccgggtcctactcgcaaacactaccaaccctacgcacctccccgcgactttgcagcgtaccgatctcgggttaagttttccagatccgcagacgcacccgcttaccaacaagggcagaaccaactctacaatgaacttaatttggggcggagggaagagtacgacgttctggacaaaaggaggggacgagatcccgagatgggcggaaagcctcagcgaaggaagaatccgcaagaggggctttataacgaactccagaaagataaaatggcagaagcctatagtgagattgggatgaagggagaaaggaggaggggtaaaggtcacgatgggttgtaccaaggattgagcacagccactaaagatacctatgatgcgctccacatgcaggccctgccgccaagataa

SEQ ID NO: 2804 - DNA, 2559 bp, synthetic construct
  source 1..2559: mol_type = other DNA
atggccttaccagtgaccgccttgctcctgccgctggccttgctgctccacgccgccaggccggaattcagcagatacctggtcaagcggaccggcgagaaggtgttcctggaatgcgtgcaggacatggaccacgaaaacatgttctggtacagacaggaccccggcctgggcctgagactgatctacttcagctacgacgtgaagatgaaggaaaagggcgacatccccgagggctacagcgtgtccagagagaagaaagagcggttcagcctgatcctggaaagcgccagcaccaaccagaccagcatgtacctgtgcgccagcagcttttggggcagaagcaccgacacacagtatttcggccctggcaccagactgacagttctcgaggacctgaagaacgtgttcccacctgaggtggccgtgttcgagcctagcgaggccgagatcagccacacccagaaagccaccctcgtgtgcctggctaccggcttctaccccgaccatgtggaactgtcttggtgggtcaacggcaaagaggtgcacagcggcgtgtctaccgacccccagccactgaaagaacagcccgccctgaacgacagccggtactgcctgagcagcagactgagagtgtccgccaccttctggcagaacccccggaaccacttcagatgccaggtgcagttctacggcctgagcgagaacgacgagtggacccaggacagagccaagcccgtgacccagatcgtgtctgccgaagcctggggcagagccgattgcggatcccagagcttcggcctgctggaccccaagctgtgctacctgctggatggcatcctgttcatctacggcgtgatcctgaccgccctgttcctgagagtgaagttcagcagaagcgccgacgcccctgcctaccagcagggacagaaccaactgtacaacgagctgaacctgggcagacgggaagagtacgacgtgctggacaagcggagaggcagggaccctgagatgggcggaaagccccagcggagaaagaacccccaggaaggactgttcaacgaactccagaaagacaagatggccgaagccttcagcgagatcggcatgaagggcgagcggagaagaggcaagggccacgatggcctgttccagggcctgagcaccgccaccaaggacaccttcgacgccctgcacatgcaggccctgcctccaagaagggccaagcgatctggatctggagcaacaaacttctcactactcaaacaagcaggtgacgtggaggagaatcccgggcctactagtatggactggatttggcgcatccttttccttgtcggcgctgctaccggcgcgcattccttcgaaaagcaagaagtgacccagattcctgccgctctgtctgtgcctgagggcgagaatctggtgctgaactgctccttcaccgacagcgccatctacaacctccagtggttcaggcaggaccctggcaagggactgacaagcctgctgctgattcagagcagccagagagagcagaccagcggcagactgaatgccagcctggataagtccagcggaagaagcaccctgtatatcgccgcttctcagcctggcgatagcgccacatatctgtgtgccgtgcgggaaacaagcggctccaggctgacttttggcgagggcacacagctgaccgtgaatcccgatacgcgtatccagaaccctgatcctgccgtgtaccagctgcgggatagcaagagcagcgacaagagcgtgtgtctgttcaccgacttcgacagccagaccaacgtgtcccagagcaaggactccgacgtgtacatcaccgataagaccgtgctggacatgcggagcatggacttcaagagcaactccgccgtggcctggtccaacaagtccgatttcgcctgcgccaacgccttcaacaacagcattatccccgaggacacattcttcccaagccccgagagcagctgcggtacccagagttttgggttgttggaccctaaattgtgctatctgttggacggaatcctgttcatttacggagtgatcctgaccgcattgttcctgaagagaggccggaagaagctgctgtacatcttcaagcagcctttcatgcggcccgtgcagaccacccaggaagaggacggctgctcctgccggttccccgaggaagaagaaggcggctgcgagctgcgggttaagttttccagatccgcagacgcacccgcttaccaacaagggcagaaccaactctacaatgaacttaatttggggcggagggaagagtacgacgttctggacaaaaggaggggacgagatcccgagatgggcggaaagcctcagcgaaggaagaatccgcaagaggggctttataacgaactccagaaagataaaatggcagaagcctatagtgagattgggatgaagggagaaaggaggaggggtaaaggtcacgatgggttgtaccaaggattgagcacagccactaaagatacctatgatgcgctccacatgcaggccctgccgccaagataa

SEQ ID NO: 2805 - DNA, 2433 bp, synthetic construct
  source 1..2433: mol_type = other DNA
atggccttaccagtgaccgccttgctcctgccgctggccttgctgctccacgccgccaggccggaattcagcagatacctggtcaagcggaccggcgagaaggtgttcctggaatgcgtgcaggacatggaccacgaaaacatgttctggtacagacaggaccccggcctgggcctgagactgatctacttcagctacgacgtgaagatgaaggaaaagggcgacatccccgagggctacagcgtgtccagagagaagaaagagcggttcagcctgatcctggaaagcgccagcaccaaccagaccagcatgtacctgtgcgccagcagcttttggggcagaagcaccgacacacagtatttcggccctggcaccagactgacagttctcgaggacctgaagaacgtgttcccacctgaggtggccgtgttcgagcctagcgaggccgagatcagccacacccagaaagccaccctcgtgtgcctggctaccggcttctaccccgaccatgtggaactgtcttggtgggtcaacggcaaagaggtgcacagcggcgtgtctaccgacccccagccactgaaagaacagcccgccctgaacgacagccggtactgcctgagcagcagactgagagtgtccgccaccttctggcagaacccccggaaccacttcagatgccaggtgcagttctacggcctgagcgagaacgacgagtggacccaggacagagccaagcccgtgacccagatcgtgtctgccgaagcctggggcagagccgattgcggatcccagagcttcggcctgctggaccccaagctgtgctacctgctggatggcatcctgttcatctacggcgtgatcctgaccgccctgttcctgagagtgaagttcagcagaagcgccgacgcccctgcctaccagcagggacagaaccaactgtacaacgagctgaacctgggcagacgggaagagtacgacgtgctggacaagcggagaggcagggaccctgagatgggcggaaagccccagcggagaaagaacccccaggaaggactgttcaacgaactccagaaagacaagatggccgaagccttcagcgagatcggcatgaagggcgagcggagaagaggcaagggccacgatggcctgttccagggcctgagcaccgccaccaaggacaccttcgacgccctgcacatgcaggccctgcctccaagaagggccaagcgatctggatctggagcaacaaacttctcactactcaaacaagcaggtgacgtggaggagaatcccgggcctactagtatggactggatttggcgcatccttttccttgtcggcgctgctaccggcgcgcattccttcgaaaagcaagaagtgacccagattcctgccgctctgtctgtgcctgagggcgagaatctggtgctgaactgctccttcaccgacagcgccatctacaacctccagtggttcaggcaggaccctggcaagggactgacaagcctgctgctgattcagagcagccagagagagcagaccagcggcagactgaatgccagcctggataagtccagcggaagaagcaccctgtatatcgccgcttctcagcctggcgatagcgccacatatctgtgtgccgtgcgggaaacaagcggctccaggctgacttttggcgagggcacacagctgaccgtgaatcccgatacgcgtatccagaaccctgatcctgccgtgtaccagctgcgggatagcaagagcagcgacaagagcgtgtgtctgttcaccgacttcgacagccagaccaacgtgtcccagagcaaggactccgacgtgtacatcaccgataagaccgtgctggacatgcggagcatggacttcaagagcaactccgccgtggcctggtccaacaagtccgatttcgcctgcgccaacgccttcaacaacagcattatccccgaggacacattcttcccaagccccgagagcagctgcggtacccagagcttcggcctgctggaccccaagctgagctacctgctggatggcatcctgttcatctacggcgtgatcctgaccgccctgttcctgagagtgaagttcagcagaagcgccgacgcccctgcctaccagcagggacagaaccaactgtacaacgagctgaacctgggcagacgggaagagtacgacgtgctggacaagcggagaggcagggaccctgagatgggcggaaagccccagcggagaaagaacccccaggaaggactgtataacgaactccagaaagacaagatggccgaagcctacagcgagatcggcatgaagggcgagcggagaagaggcaagggccacgatggcctgtaccagggcctgagcaccgccaccaaggacacctatgacgccctgcacatgcaggccctgcctccaagataa

SEQ ID NO: 2806 - DNA, 2433 bp, synthetic construct
  source 1..2433: mol_type = other DNA
atggccttaccagtgaccgccttgctcctgccgctggccttgctgctccacgccgccaggccggaattcagcagatacctggtcaagcggaccggcgagaaggtgttcctggaatgcgtgcaggacatggaccacgaaaacatgttctggtacagacaggaccccggcctgggcctgagactgatctacttcagctacgacgtgaagatgaaggaaaagggcgacatccccgagggctacagcgtgtccagagagaagaaagagcggttcagcctgatcctggaaagcgccagcaccaaccagaccagcatgtacctgtgcgccagcagcttttggggcagaagcaccgacacacagtatttcggccctggcaccagactgacagttctcgaggacctgaagaacgtgttcccacctgaggtggccgtgttcgagcctagcgaggccgagatcagccacacccagaaagccaccctcgtgtgcctggctaccggcttctaccccgaccatgtggaactgtcttggtgggtcaacggcaaagaggtgcacagcggcgtgtctaccgacccccagccactgaaagaacagcccgccctgaacgacagccggtactgcctgagcagcagactgagagtgtccgccaccttctggcagaacccccggaaccacttcagatgccaggtgcagttctacggcctgagcgagaacgacgagtggacccaggacagagccaagcccgtgacccagatcgtgtctgccgaagcctggggcagagccgattgcggatcccagagcttcggcctgctggaccccaagctgtgctacctgctggatggcatcctgttcatctacggcgtgatcctgaccgccctgttcctgagagtgaagttcagcagaagcgccgacgcccctgcctaccagcagggacagaaccaactgtacaacgagctgaacctgggcagacgggaagagtacgacgtgctggacaagcggagaggcagggaccctgagatgggcggaaagccccagcggagaaagaacccccaggaaggactgttcaacgaactccagaaagacaagatggccgaagccttcagcgagatcggcatgaagggcgagcggagaagaggcaagggccacgatggcctgttccagggcctgagcaccgccaccaaggacaccttcgacgccctgcacatgcaggccctgcctccaagaagggccaagcgatctggatctggagcaacaaacttctcactactcaaacaagcaggtgacgtggaggagaatcccgggcctactagtatggactggatttggcgcatccttttccttgtcggcgctgctaccggcgcgcattccttcgaaaagcaagaagtgacccagattcctgccgctctgtctgtgcctgagggcgagaatctggtgctgaactgctccttcaccgacagcgccatctacaacctccagtggttcaggcaggaccctggcaagggactgacaagcctgctgctgattcagagcagccagagagagcagaccagcggcagactgaatgccagcctggataagtccagcggaagaagcaccctgtatatcgccgcttctcagcctggcgatagcgccacatatctgtgtgccgtgcgggaaacaagcggctccaggctgacttttggcgagggcacacagctgaccgtgaatcccgatacgcgtatccagaaccctgatcctgccgtgtaccagctgcgggatagcaagagcagcgacaagagcgtgtgtctgttcaccgacttcgacagccagaccaacgtgtcccagagcaaggactccgacgtgtacatcaccgataagaccgtgctggacatgcggagcatggacttcaagagcaactccgccgtggcctggtccaacaagtccgatttcgcctgcgccaacgccttcaacaacagcattatccccgaggacacattcttcccaagccccgagagcagctgcggtacccagagttttgggttgttggaccctaaattgagctatctgttggacggaatcctgttcatttacggagtgatcctgaccgcattgttcctgcgggttaagttttccagatccgcagacgcacccgcttaccaacaagggcagaaccaactctacaatgaacttaatttggggcggagggaagagtacgacgttctggacaaaaggaggggacgagatcccgagatgggcggaaagcctcagcgaaggaagaatccgcaagaggggctttataacgaactccagaaagataaaatggcagaagcctatagtgagattgggatgaagggagaaaggaggaggggtaaaggtcacgatgggttgtaccaaggattgagcacagccactaaagatacctatgatgcgctccacatgcaggccctgccgccaagataa

SEQ ID NO: 2807 - DNA, 2433 bp, synthetic construct
  source 1..2433: mol_type = other DNA
atggccttaccagtgaccgccttgctcctgccgctggccttgctgctccacgccgccaggccggaattcagcagatacctggtcaagcggaccggcgagaaggtgttcctggaatgcgtgcaggacatggaccacgaaaacatgttctggtacagacaggaccccggcctgggcctgagactgatctacttcagctacgacgtgaagatgaaggaaaagggcgacatccccgagggctacagcgtgtccagagagaagaaagagcggttcagcctgatcctggaaagcgccagcaccaaccagaccagcatgtacctgtgcgccagcagcttttggggcagaagcaccgacacacagtatttcggccctggcaccagactgacagttctcgaggacctgaagaacgtgttcccacctgaggtggccgtgttcgagcctagcgaggccgagatcagccacacccagaaagccaccctcgtgtgcctggctaccggcttctaccccgaccatgtggaactgtcttggtgggtcaacggcaaagaggtgcacagcggcgtgtctaccgacccccagccactgaaagaacagcccgccctgaacgacagccggtactgcctgagcagcagactgagagtgtccgccaccttctggcagaacccccggaaccacttcagatgccaggtgcagttctacggcctgagcgagaacgacgagtggacccaggacagagccaagcccgtgacccagatcgtgtctgccgaagcctggggcagagccgattgcggatcccagagcttcggcctgctggaccccaagctgagctacctgctggatggcatcctgttcatctacggcgtgatcctgaccgccctgttcctgagagtgaagttcagcagaagcgccgacgcccctgcctaccagcagggacagaaccaactgtacaacgagctgaacctgggcagacgggaagagtacgacgtgctggacaagcggagaggcagggaccctgagatgggcggaaagccccagcggagaaagaacccccaggaaggactgtataacgaactccagaaagacaagatggccgaagcctacagcgagatcggcatgaagggcgagcggagaagaggcaagggccacgatggcctgtaccagggcctgagcaccgccaccaaggacacctatgacgccctgcacatgcaggccctgcctccaagaagggccaagcgatctggatctggagcaacaaacttctcactactcaaacaagcaggtgacgtggaggagaatcccgggcctactagtatggactggatttggcgcatccttttccttgtcggcgctgctaccggcgcgcattccttcgaaaagcaagaagtgacccagattcctgccgctctgtctgtgcctgagggcgagaatctggtgctgaactgctccttcaccgacagcgccatctacaacctccagtggttcaggcaggaccctggcaagggactgacaagcctgctgctgattcagagcagccagagagagcagaccagcggcagactgaatgccagcctggataagtccagcggaagaagcaccctgtatatcgccgcttctcagcctggcgatagcgccacatatctgtgtgccgtgcgggaaacaagcggctccaggctgacttttggcgagggcacacagctgaccgtgaatcccgatacgcgtatccagaaccctgatcctgccgtgtaccagctgcgggatagcaagagcagcgacaagagcgtgtgtctgttcaccgacttcgacagccagaccaacgtgtcccagagcaaggactccgacgtgtacatcaccgataagaccgtgctggacatgcggagcatggacttcaagagcaactccgccgtggcctggtccaacaagtccgatttcgcctgcgccaacgccttcaacaacagcattatccccgaggacacattcttcccaagccccgagagcagctgcggtacccagagttttgggttgttggaccctaaattgagctatctgttggacggaatcctgttcatttacggagtgatcctgaccgcattgttcctgcgggttaagttttccagatccgcagacgcacccgcttaccaacaagggcagaaccaactctacaatgaacttaatttggggcggagggaagagtacgacgttctggacaaaaggaggggacgagatcccgagatgggcggaaagcctcagcgaaggaagaatccgcaagaggggctttataacgaactccagaaagataaaatggcagaagcctatagtgagattgggatgaagggagaaaggaggaggggtaaaggtcacgatgggttgtaccaaggattgagcacagccactaaagatacctatgatgcgctccacatgcaggccctgccgccaagataa

SEQ ID NO: 2808 - DNA, 2145 bp, synthetic construct
  source 1..2145: mol_type = other DNA
atggccttaccagtgaccgccttgctcctgccgctggccttgctgctccacgccgccaggccggaattcagcagatacctggtcaagcggaccggcgagaaggtgttcctggaatgcgtgcaggacatggaccacgaaaacatgttctggtacagacaggaccccggcctgggcctgagactgatctacttcagctacgacgtgaagatgaaggaaaagggcgacatccccgagggctacagcgtgtccagagagaagaaagagcggttcagcctgatcctggaaagcgccagcaccaaccagaccagcatgtacctgtgcgccagcagcttttggggcagaagcaccgacacacagtatttcggccctggcaccagactgacagttctcgaggacctgaagaacgtgttcccacctgaggtggccgtgttcgagcctagcgaggccgagatcagccacacccagaaagccaccctcgtgtgcctggctaccggcttctaccccgaccatgtggaactgtcttggtgggtcaacggcaaagaggtgcacagcggcgtgtctaccgacccccagccactgaaagaacagcccgccctgaacgacagccggtactgcctgagcagcagactgagagtgtccgccaccttctggcagaacccccggaaccacttcagatgccaggtgcagttctacggcctgagcgagaacgacgagtggacccaggacagagccaagcccgtgacccagatcgtgtctgccgaagcctggggcagagccgattgcggatccacaacacctggcgagagaagtagcctgcctgccttctatcctggcaccagcggctcttgttctggctgtggatctctgagcctgcctctgctggctggactggttgctgctgatgctgtggcctctctgctgattgtgggagccgtgttcctgtgcgccagacctagaagaagccccgctcaagaggacggcaaggtgtacatcaacatgcccggcagaggaagggccaagcgatctggatctggagcaacaaacttctcactactcaaacaagcaggtgacgtggaggagaatcccgggcctactagtatggactggatttggcgcatccttttccttgtcggcgctgctaccggcgcgcattccttcgaaaagcaagaagtgacccagattcctgccgctctgtctgtgcctgagggcgagaatctggtgctgaactgctccttcaccgacagcgccatctacaacctccagtggttcaggcaggaccctggcaagggactgacaagcctgctgctgattcagagcagccagagagagcagaccagcggcagactgaatgccagcctggataagtccagcggaagaagcaccctgtatatcgccgcttctcagcctggcgatagcgccacatatctgtgtgccgtgcgggaaacaagcggctccaggctgacttttggcgagggcacacagctgaccgtgaatcccgatacgcgtatccagaaccctgatcctgccgtgtaccagctgcgggatagcaagagcagcgacaagagcgtgtgtctgttcaccgacttcgacagccagaccaacgtgtcccagagcaaggactccgacgtgtacatcaccgataagaccgtgctggacatgcggagcatggacttcaagagcaactccgccgtggcctggtccaacaagtccgatttcgcctgcgccaacgccttcaacaacagcattatccccgaggacacattcttcccaagccccgagagcagctgcggtaccacaacacctggcgagagaagtagcctgcctgccttctatcctggcaccagcggctcttgttctggctgtggatctctgagcctgcctctgctggctggactggttgctgctgatgctgtggcctctctgctgattgtgggagccgtgttcaaacggggcagaaagaaactcctgtatatattcaaacaaccatttatgagaccagtacaaactactcaagaggaagatggctgtagctgccgatttccagaagaagaagaaggaggatgtgaactgctgtgcgccagacctagaagaagccccgctcaagaggacggcaaggtgtacatcaacatgcccggcagaggataa

SEQ ID NO: 2809 - DNA, 2142 bp, synthetic construct
  source 1..2142: mol_type = other DNA
atggccttaccagtgaccgccttgctcctgccgctggccttgctgctccacgccgccaggccggaattcagcagatacctggtcaagcggaccggcgagaaggtgttcctggaatgcgtgcaggacatggaccacgaaaacatgttctggtacagacaggaccccggcctgggcctgagactgatctacttcagctacgacgtgaagatgaaggaaaagggcgacatccccgagggctacagcgtgtccagagagaagaaagagcggttcagcctgatcctggaaagcgccagcaccaaccagaccagcatgtacctgtgcgccagcagcttttggggcagaagcaccgacacacagtatttcggccctggcaccagactgacagttctcgaggacctgaagaacgtgttcccacctgaggtggccgtgttcgagcctagcgaggccgagatcagccacacccagaaagccaccctcgtgtgcctggctaccggcttctaccccgaccatgtggaactgtcttggtgggtcaacggcaaagaggtgcacagcggcgtgtctaccgacccccagccactgaaagaacagcccgccctgaacgacagccggtactgcctgagcagcagactgagagtgtccgccaccttctggcagaacccccggaaccacttcagatgccaggtgcagttctacggcctgagcgagaacgacgagtggacccaggacagagccaagcccgtgacccagatcgtgtctgccgaagcctggggcagagccgattgcggatccacaacacctggcgagagaagtagcctgcctgccttctatcctggcaccagcggctcttgttctggctgtggatctctgagcctgcctctgctggctggactggttgctgctgatgctgtggcctctctgctgattgtgggagccgtgttcctgtgcgccagacctagaagaagccccgctcaagaggacggcaaggtgtacatcaacatgcccggcagaggaagggccaagcgatctggatctggagcaacaaacttctcactactcaaacaagcaggtgacgtggaggagaatcccgggcctactagtatggactggatttggcgcatccttttccttgtcggcgctgctaccggcgcgcattccttcgaaaagcaagaagtgacccagattcctgccgctctgtctgtgcctgagggcgagaatctggtgctgaactgctccttcaccgacagcgccatctacaacctccagtggttcaggcaggaccctggcaagggactgacaagcctgctgctgattcagagcagccagagagagcagaccagcggcagactgaatgccagcctggataagtccagcggaagaagcaccctgtatatcgccgcttctcagcctggcgatagcgccacatatctgtgtgccgtgcgggaaacaagcggctccaggctgacttttggcgagggcacacagctgaccgtgaatcccgatacgcgtatccagaaccctgatcctgccgtgtaccagctgcgggatagcaagagcagcgacaagagcgtgtgtctgttcaccgacttcgacagccagaccaacgtgtcccagagcaaggactccgacgtgtacatcaccgataagaccgtgctggacatgcggagcatggacttcaagagcaactccgccgtggcctggtccaacaagtccgatttcgcctgcgccaacgccttcaacaacagcattatccccgaggacacattcttcccaagccccgagagcagctgcggtaccacaacacctggcgagagaagtagcctgcctgccttctatcctggcaccagcggctcttgttctggctgtggatctctgagcctgcctctgctggctggactggttgctgctgatgctgtggcctctctgctgattgtgggagccgtgttcaggagtaagaggagcaggctcctgcacagtgactacatgaacatgactccacgccgccccggacccacccgcaagcattaccagccctatgccccaccacgcgacttcgcagcctatcgctccctgtgcgccagacctagaagaagccccgctcaagaggacggcaaggtgtacatcaacatgcccggcagaggataa

SEQ ID NO: 2810 - DNA, 2127 bp, synthetic construct
  source 1..2127: mol_type = other DNA
atggccttaccagtgaccgccttgctcctgccgctggccttgctgctccacgccgccaggccggaattcagcagatacctggtcaagcggaccggcgagaaggtgttcctggaatgcgtgcaggacatggaccacgaaaacatgttctggtacagacaggaccccggcctgggcctgagactgatctacttcagctacgacgtgaagatgaaggaaaagggcgacatccccgagggctacagcgtgtccagagagaagaaagagcggttcagcctgatcctggaaagcgccagcaccaaccagaccagcatgtacctgtgcgccagcagcttttggggcagaagcaccgacacacagtatttcggccctggcaccagactgacagttctcgaggacctgaagaacgtgttcccacctgaggtggccgtgttcgagcctagcgaggccgagatcagccacacccagaaagccaccctcgtgtgcctggctaccggcttctaccccgaccatgtggaactgtcttggtgggtcaacggcaaagaggtgcacagcggcgtgtctaccgacccccagccactgaaagaacagcccgccctgaacgacagccggtactgcctgagcagcagactgagagtgtccgccaccttctggcagaacccccggaaccacttcagatgccaggtgcagttctacggcctgagcgagaacgacgagtggacccaggacagagccaagcccgtgacccagatcgtgtctgccgaagcctggggcagagccgattgcggatccacaacacctggcgagagaagtagcctgcctgccttctatcctggcaccagcggctcttgttctggctgtggatctctgagcctgcctctgctggctggactggttgctgctgatgctgtggcctctctgctgattgtgggagccgtgttcctgtgcgccagacctagaagaagccccgctcaagaggacggcaaggtgtacatcaacatgcccggcagaggaagggccaagcgatctggatctggagcaacaaacttctcactactcaaacaagcaggtgacgtggaggagaatcccgggcctactagtatggactggatttggcgcatccttttccttgtcggcgctgctaccggcgcgcattccttcgaaaagcaagaagtgacccagattcctgccgctctgtctgtgcctgagggcgagaatctggtgctgaactgctccttcaccgacagcgccatctacaacctccagtggttcaggcaggaccctggcaagggactgacaagcctgctgctgattcagagcagccagagagagcagaccagcggcagactgaatgccagcctggataagtccagcggaagaagcaccctgtatatcgccgcttctcagcctggcgatagcgccacatatctgtgtgccgtgcgggaaacaagcggctccaggctgacttttggcgagggcacacagctgaccgtgaatcccgatacgcgtatccagaaccctgatcctgccgtgtaccagctgcgggatagcaagagcagcgacaagagcgtgtgtctgttcaccgacttcgacagccagaccaacgtgtcccagagcaaggactccgacgtgtacatcaccgataagaccgtgctggacatgcggagcatggacttcaagagcaactccgccgtggcctggtccaacaagtccgatttcgcctgcgccaacgccttcaacaacagcattatccccgaggacacattcttcccaagccccgagagcagctgcggtaccacaacacctggcgagagaagtagcctgcctgccttctatcctggcaccagcggctcttgttctggctgtggatctctgagcctgcctctgctggctggactggttgctgctgatgctgtggcctctctgctgattgtgggagccgtgttcagggaccaaagactgcctcctgacgctcacaaacctccaggcggaggcagcttcagaacccctatccaagaggaacaggctgacgcccacagcaccctggcaaaaattctgtgcgccagacctagaagaagccccgctcaagaggacggcaaggtgtacatcaacatgcccggcagaggataa

SEQ ID NO: 2811 - DNA, 2379 bp, synthetic construct
  source 1..2379: mol_type = other DNA
atggccttaccagtgaccgccttgctcctgccgctggccttgctgctccacgccgccaggccggaattcagcagatacctggtcaagcggaccggcgagaaggtgttcctggaatgcgtgcaggacatggaccacgaaaacatgttctggtacagacaggaccccggcctgggcctgagactgatctacttcagctacgacgtgaagatgaaggaaaagggcgacatccccgagggctacagcgtgtccagagagaagaaagagcggttcagcctgatcctggaaagcgccagcaccaaccagaccagcatgtacctgtgcgccagcagcttttggggcagaagcaccgacacacagtatttcggccctggcaccagactgacagttctcgaggacctgaagaacgtgttcccacctgaggtggccgtgttcgagcctagcgaggccgagatcagccacacccagaaagccaccctcgtgtgcctggctaccggcttctaccccgaccatgtggaactgtcttggtgggtcaacggcaaagaggtgcacagcggcgtgtctaccgacccccagccactgaaagaacagcccgccctgaacgacagccggtactgcctgagcagcagactgagagtgtccgccaccttctggcagaacccccggaaccacttcagatgccaggtgcagttctacggcctgagcgagaacgacgagtggacccaggacagagccaagcccgtgacccagatcgtgtctgccgaagcctggggcagagccgattgcggatccacaacacctggcgagagaagtagcctgcctgccttctatcctggcaccagcggctcttgttctggctgtggatctctgagcctgcctctgctggctggactggttgctgctgatgctgtggcctctctgctgattgtgggagccgtgttcctgtgcgccagacctagaagaagccccgctcaagaggacggcaaggtgtacatcaacatgcccggcagaggaagggccaagcgatctggatctggagcaacaaacttctcactactcaaacaagcaggtgacgtggaggagaatcccgggcctactagtatggactggatttggcgcatccttttccttgtcggcgctgctaccggcgcgcattccttcgaaaagcaagaagtgacccagattcctgccgctctgtctgtgcctgagggcgagaatctggtgctgaactgctccttcaccgacagcgccatctacaacctccagtggttcaggcaggaccctggcaagggactgacaagcctgctgctgattcagagcagccagagagagcagaccagcggcagactgaatgccagcctggataagtccagcggaagaagcaccctgtatatcgccgcttctcagcctggcgatagcgccacatatctgtgtgccgtgcgggaaacaagcggctccaggctgacttttggcgagggcacacagctgaccgtgaatcccgatacgcgtatccagaaccctgatcctgccgtgtaccagctgcgggatagcaagagcagcgacaagagcgtgtgtctgttcaccgacttcgacagccagaccaacgtgtcccagagcaaggactccgacgtgtacatcaccgataagaccgtgctggacatgcggagcatggacttcaagagcaactccgccgtggcctggtccaacaagtccgatttcgcctgcgccaacgccttcaacaacagcattatccccgaggacacattcttcccaagccccgagagcagctgcggtaccacaacacctggcgagagaagtagcctgcctgccttctatcctggcaccagcggctcttgttctggctgtggatctctgagcctgcctctgctggctggactggttgctgctgatgctgtggcctctctgctgattgtgggagccgtgttctggcggcggaagcggaaagagaagcagtctgagacaagccccaaagagttcctgaccatctacgaggacgtgaaggacctgaaaacccggcggaaccacgaacaagagcagacctttcctggcggaggcagcaccatctacagcatgatccagagccagagcagcgcccctacaagccaagagcctgcctacacactgtactccctgatccagcctagcagaaagagcggcagccggaagagaaatcacagccccagcttcaacagcacgatctacgaagtgatcggcaagagccagccaaaggctcagaaccctgccagactgagccggaaagagctggaaaacttcgacgtgtacagcctgtgcgccagacctagaagaagccccgctcaagaggacggcaaggtgtacatcaacatgcccggcagaggataa

SEQ ID NO: 2812 - DNA, 2232 bp, synthetic construct
  source 1..2232: mol_type = other DNA
atggccttaccagtgaccgccttgctcctgccgctggccttgctgctccacgccgccaggccggaattcagcagatacctggtcaagcggaccggcgagaaggtgttcctggaatgcgtgcaggacatggaccacgaaaacatgttctggtacagacaggaccccggcctgggcctgagactgatctacttcagctacgacgtgaagatgaaggaaaagggcgacatccccgagggctacagcgtgtccagagagaagaaagagcggttcagcctgatcctggaaagcgccagcaccaaccagaccagcatgtacctgtgcgccagcagcttttggggcagaagcaccgacacacagtatttcggccctggcaccagactgacagttctcgaggacctgaagaacgtgttcccacctgaggtggccgtgttcgagcctagcgaggccgagatcagccacacccagaaagccaccctcgtgtgcctggctaccggcttctaccccgaccatgtggaactgtcttggtgggtcaacggcaaagaggtgcacagcggcgtgtctaccgacccccagccactgaaagaacagcccgccctgaacgacagccggtactgcctgagcagcagactgagagtgtccgccaccttctggcagaacccccggaaccacttcagatgccaggtgcagttctacggcctgagcgagaacgacgagtggacccaggacagagccaagcccgtgacccagatcgtgtctgccgaagcctggggcagagccgattgcggatccctgggagagcctcagctgtgctatatcctggacgccatcctgtttctgtacggcatcgtgctgaccctgctgtactgcaaacggggcagaaagaaactcctgtatatattcaaacaaccatttatgagaccagtacaaactactcaagaggaagatggctgtagctgccgatttccagaagaagaagaaggaggatgtgaactgcggctgaagatccaagtgcggaaggccgccatcaccagctacgagaaatccgacggcgtgtacaccggcctgagcaccagaaatcaagagacatacgagacactgaagcacgaaaagcctccacaaagggccaagcgatctggatctggagcaacaaacttctcactactcaaacaagcaggtgacgtggaggagaatcccgggcctactagtatggactggatttggcgcatccttttccttgtcggcgctgctaccggcgcgcattccttcgaaaagcaagaagtgacccagattcctgccgctctgtctgtgcctgagggcgagaatctggtgctgaactgctccttcaccgacagcgccatctacaacctccagtggttcaggcaggaccctggcaagggactgacaagcctgctgctgattcagagcagccagagagagcagaccagcggcagactgaatgccagcctggataagtccagcggaagaagcaccctgtatatcgccgcttctcagcctggcgatagcgccacatatctgtgtgccgtgcgggaaacaagcggctccaggctgacttttggcgagggcacacagctgaccgtgaatcccgatacgcgtatccagaaccctgatcctgccgtgtaccagctgcgggatagcaagagcagcgacaagagcgtgtgtctgttcaccgacttcgacagccagaccaacgtgtcccagagcaaggactccgacgtgtacatcaccgataagaccgtgctggacatgcggagcatggacttcaagagcaactccgccgtggcctggtccaacaagtccgatttcgcctgcgccaacgccttcaacaacagcattatccccgaggacacattcttcccaagccccgagagcagctgcggtaccctgggagagcctcagctgtgctatatcctggacgccatcctgtttctgtacggcatcgtgctgaccctgctgtactgcaggagtaagaggagcaggctcctgcacagtgactacatgaacatgactccacgccgccccggacccacccgcaagcattaccagccctatgccccaccacgcgacttcgcagcctatcgctcccggctgaagatccaagtgcggaaggccgccatcaccagctacgagaaatccgacggcgtgtacaccggcctgagcaccagaaatcaagagacatacgagacactgaagcacgaaaagcctccacaataa

SEQ ID NO: 2813 - DNA, 2217 bp, synthetic construct
  source 1..2217: mol_type = other DNA
atggccttaccagtgaccgccttgctcctgccgctggccttgctgctccacgccgccaggccggaattcagcagatacctggtcaagcggaccggcgagaaggtgttcctggaatgcgtgcaggacatggaccacgaaaacatgttctggtacagacaggaccccggcctgggcctgagactgatctacttcagctacgacgtgaagatgaaggaaaagggcgacatccccgagggctacagcgtgtccagagagaagaaagagcggttcagcctgatcctggaaagcgccagcaccaaccagaccagcatgtacctgtgcgccagcagcttttggggcagaagcaccgacacacagtatttcggccctggcaccagactgacagttctcgaggacctgaagaacgtgttcccacctgaggtggccgtgttcgagcctagcgaggccgagatcagccacacccagaaagccaccctcgtgtgcctggctaccggcttctaccccgaccatgtggaactgtcttggtgggtcaacggcaaagaggtgcacagcggcgtgtctaccgacccccagccactgaaagaacagcccgccctgaacgacagccggtactgcctgagcagcagactgagagtgtccgccaccttctggcagaacccccggaaccacttcagatgccaggtgcagttctacggcctgagcgagaacgacgagtggacccaggacagagccaagcccgtgacccagatcgtgtctgccgaagcctggggcagagccgattgcggatccctgggagagcctcagctgtgctatatcctggacgccatcctgtttctgtacggcatcgtgctgaccctgctgtactgcaaacggggcagaaagaaactcctgtatatattcaaacaaccatttatgagaccagtacaaactactcaagaggaagatggctgtagctgccgatttccagaagaagaagaaggaggatgtgaactgcggctgaagatccaagtgcggaaggccgccatcaccagctacgagaaatccgacggcgtgtacaccggcctgagcaccagaaatcaagagacatacgagacactgaagcacgaaaagcctccacaaagggccaagcgatctggatctggagcaacaaacttctcactactcaaacaagcaggtgacgtggaggagaatcccgggcctactagtatggactggatttggcgcatccttttccttgtcggcgctgctaccggcgcgcattccttcgaaaagcaagaagtgacccagattcctgccgctctgtctgtgcctgagggcgagaatctggtgctgaactgctccttcaccgacagcgccatctacaacctccagtggttcaggcaggaccctggcaagggactgacaagcctgctgctgattcagagcagccagagagagcagaccagcggcagactgaatgccagcctggataagtccagcggaagaagcaccctgtatatcgccgcttctcagcctggcgatagcgccacatatctgtgtgccgtgcgggaaacaagcggctccaggctgacttttggcgagggcacacagctgaccgtgaatcccgatacgcgtatccagaaccctgatcctgccgtgtaccagctgcgggatagcaagagcagcgacaagagcgtgtgtctgttcaccgacttcgacagccagaccaacgtgtcccagagcaaggactccgacgtgtacatcaccgataagaccgtgctggacatgcggagcatggacttcaagagcaactccgccgtggcctggtccaacaagtccgatttcgcctgcgccaacgccttcaacaacagcattatccccgaggacacattcttcccaagccccgagagcagctgcggtaccctgggagagcctcagctgtgctatatcctggacgccatcctgtttctgtacggcatcgtgctgaccctgctgtactgcagggaccaaagactgcctcctgacgctcacaaacctccaggcggaggcagcttcagaacccctatccaagaggaacaggctgacgcccacagcaccctggcaaaaattcggctgaagatccaagtgcggaaggccgccatcaccagctacgagaaatccgacggcgtgtacaccggcctgagcaccagaaatcaagagacatacgagacactgaagcacgaaaagcctccacaataa

SEQ ID NO: 2814 - DNA, 2469 bp, synthetic construct
  source 1..2469: mol_type = other DNA
atggccttaccagtgaccgccttgctcctgccgctggccttgctgctccacgccgccaggccggaattcagcagatacctggtcaagcggaccggcgagaaggtgttcctggaatgcgtgcaggacatggaccacgaaaacatgttctggtacagacaggaccccggcctgggcctgagactgatctacttcagctacgacgtgaagatgaaggaaaagggcgacatccccgagggctacagcgtgtccagagagaagaaagagcggttcagcctgatcctggaaagcgccagcaccaaccagaccagcatgtacctgtgcgccagcagcttttggggcagaagcaccgacacacagtatttcggccctggcaccagactgacagttctcgaggacctgaagaacgtgttcccacctgaggtggccgtgttcgagcctagcgaggccgagatcagccacacccagaaagccaccctcgtgtgcctggctaccggcttctaccccgaccatgtggaactgtcttggtgggtcaacggcaaagaggtgcacagcggcgtgtctaccgacccccagccactgaaagaacagcccgccctgaacgacagccggtactgcctgagcagcagactgagagtgtccgccaccttctggcagaacccccggaaccacttcagatgccaggtgcagttctacggcctgagcgagaacgacgagtggacccaggacagagccaagcccgtgacccagatcgtgtctgccgaagcctggggcagagccgattgcggatccctgggagagcctcagctgtgctatatcctggacgccatcctgtttctgtacggcatcgtgctgaccctgctgtactgcaaacggggcagaaagaaactcctgtatatattcaaacaaccatttatgagaccagtacaaactactcaagaggaagatggctgtagctgccgatttccagaagaagaagaaggaggatgtgaactgcggctgaagatccaagtgcggaaggccgccatcaccagctacgagaaatccgacggcgtgtacaccggcctgagcaccagaaatcaagagacatacgagacactgaagcacgaaaagcctccacaaagggccaagcgatctggatctggagcaacaaacttctcactactcaaacaagcaggtgacgtggaggagaatcccgggcctactagtatggactggatttggcgcatccttttccttgtcggcgctgctaccggcgcgcattccttcgaaaagcaagaagtgacccagattcctgccgctctgtctgtgcctgagggcgagaatctggtgctgaactgctccttcaccgacagcgccatctacaacctccagtggttcaggcaggaccctggcaagggactgacaagcctgctgctgattcagagcagccagagagagcagaccagcggcagactgaatgccagcctggataagtccagcggaagaagcaccctgtatatcgccgcttctcagcctggcgatagcgccacatatctgtgtgccgtgcgggaaacaagcggctccaggctgacttttggcgagggcacacagctgaccgtgaatcccgatacgcgtatccagaaccctgatcctgccgtgtaccagctgcgggatagcaagagcagcgacaagagcgtgtgtctgttcaccgacttcgacagccagaccaacgtgtcccagagcaaggactccgacgtgtacatcaccgataagaccgtgctggacatgcggagcatggacttcaagagcaactccgccgtggcctggtccaacaagtccgatttcgcctgcgccaacgccttcaacaacagcattatccccgaggacacattcttcccaagccccgagagcagctgcggtaccctgggagagcctcagctgtgctatatcctggacgccatcctgtttctgtacggcatcgtgctgaccctgctgtactgctggcggcggaagcggaaagagaagcagtctgagacaagccccaaagagttcctgaccatctacgaggacgtgaaggacctgaaaacccggcggaaccacgaacaagagcagacctttcctggcggaggcagcaccatctacagcatgatccagagccagagcagcgcccctacaagccaagagcctgcctacacactgtactccctgatccagcctagcagaaagagcggcagccggaagagaaatcacagccccagcttcaacagcacgatctacgaagtgatcggcaagagccagccaaaggctcagaaccctgccagactgagccggaaagagctggaaaacttcgacgtgtacagccggctgaagatccaagtgcggaaggccgccatcaccagctacgagaaatccgacggcgtgtacaccggcctgagcaccagaaatcaagagacatacgagacactgaagcacgaaaagcctccacaataa

SEQ ID NO: 2815 - DNA, 2235 bp, synthetic construct
  source 1..2235: mol_type = other DNA
atggccttaccagtgaccgccttgctcctgccgctggccttgctgctccacgccgccaggccggaattcagcagatacctggtcaagcggaccggcgagaaggtgttcctggaatgcgtgcaggacatggaccacgaaaacatgttctggtacagacaggaccccggcctgggcctgagactgatctacttcagctacgacgtgaagatgaaggaaaagggcgacatccccgagggctacagcgtgtccagagagaagaaagagcggttcagcctgatcctggaaagcgccagcaccaaccagaccagcatgtacctgtgcgccagcagcttttggggcagaagcaccgacacacagtatttcggccctggcaccagactgacagttctcgaggacctgaagaacgtgttcccacctgaggtggccgtgttcgagcctagcgaggccgagatcagccacacccagaaagccaccctcgtgtgcctggctaccggcttctaccccgaccatgtggaactgtcttggtgggtcaacggcaaagaggtgcacagcggcgtgtctaccgacccccagccactgaaagaacagcccgccctgaacgacagccggtactgcctgagcagcagactgagagtgtccgccaccttctggcagaacccccggaaccacttcagatgccaggtgcagttctacggcctgagcgagaacgacgagtggacccaggacagagccaagcccgtgacccagatcgtgtctgccgaagcctggggcagagccgattgcggatccctgggagagcctcagctgtgctatatcctggacgccatcctgtttctgtacggcatcgtgctgaccctgctgtactgcaaacggggcagaaagaaactcctgtatatattcaaacaaccatttatgagaccagtacaaactactcaagaggaagatggctgtagctgccgatttccagaagaagaagaaggaggatgtgaactgcggctgaagatccaagtgcggaaggccgccatcaccagctacgagaaatccgacggcgtgtacaccggcctgagcaccagaaatcaagagacatacgagacactgaagcacgaaaagcctccacaaagggccaagcgatctggatctggagcaacaaacttctcactactcaaacaagcaggtgacgtggaggagaatcccgggcctactagtatggactggatttggcgcatccttttccttgtcggcgctgctaccggcgcgcattccttcgaaaagcaagaagtgacccagattcctgccgctctgtctgtgcctgagggcgagaatctggtgctgaactgctccttcaccgacagcgccatctacaacctccagtggttcaggcaggaccctggcaagggactgacaagcctgctgctgattcagagcagccagagagagcagaccagcggcagactgaatgccagcctggataagtccagcggaagaagcaccctgtatatcgccgcttctcagcctggcgatagcgccacatatctgtgtgccgtgcgggaaacaagcggctccaggctgacttttggcgagggcacacagctgaccgtgaatcccgatacgcgtatccagaaccctgatcctgccgtgtaccagctgcgggatagcaagagcagcgacaagagcgtgtgtctgttcaccgacttcgacagccagaccaacgtgtcccagagcaaggactccgacgtgtacatcaccgataagaccgtgctggacatgcggagcatggacttcaagagcaactccgccgtggcctggtccaacaagtccgatttcgcctgcgccaacgccttcaacaacagcattatccccgaggacacattcttcccaagccccgagagcagctgcggtaccctcggagaaccacagctctgttacattctggatgctatcctgttcctctatgggatcgtcctgacactcctgtattgcaagagaggccggaagaagctgctgtacatcttcaagcagcctttcatgcggcccgtgcagaccacccaggaagaggacggctgctcctgccggttccccgaggaagaagaaggcggctgcgagctgagactcaaaattcaagttcgcaaagccgccattacctcttacgagaagagtgatggggtgtacacaggactgtctacccggaatcaagaaacctacgaaaccctcaaacatgagaagccacctcagtaa

SEQ ID NO: 2816 - DNA, 2232 bp, synthetic construct
  source 1..2232: mol_type = other DNA
atggccttaccagtgaccgccttgctcctgccgctggccttgctgctccacgccgccaggccggaattcagcagatacctggtcaagcggaccggcgagaaggtgttcctggaatgcgtgcaggacatggaccacgaaaacatgttctggtacagacaggaccccggcctgggcctgagactgatctacttcagctacgacgtgaagatgaaggaaaagggcgacatccccgagggctacagcgtgtccagagagaagaaagagcggttcagcctgatcctggaaagcgccagcaccaaccagaccagcatgtacctgtgcgccagcagcttttggggcagaagcaccgacacacagtatttcggccctggcaccagactgacagttctcgaggacctgaagaacgtgttcccacctgaggtggccgtgttcgagcctagcgaggccgagatcagccacacccagaaagccaccctcgtgtgcctggctaccggcttctaccccgaccatgtggaactgtcttggtgggtcaacggcaaagaggtgcacagcggcgtgtctaccgacccccagccactgaaagaacagcccgccctgaacgacagccggtactgcctgagcagcagactgagagtgtccgccaccttctggcagaacccccggaaccacttcagatgccaggtgcagttctacggcctgagcgagaacgacgagtggacccaggacagagccaagcccgtgacccagatcgtgtctgccgaagcctggggcagagccgattgcggatccctgggagagcctcagctgtgctatatcctggacgccatcctgtttctgtacggcatcgtgctgaccctgctgtactgcaaacggggcagaaagaaactcctgtatatattcaaacaaccatttatgagaccagtacaaactactcaagaggaagatggctgtagctgccgatttccagaagaagaagaaggaggatgtgaactgcggctgaagatccaagtgcggaaggccgccatcaccagctacgagaaatccgacggcgtgtacaccggcctgagcaccagaaatcaagagacatacgagacactgaagcacgaaaagcctccacaaagggccaagcgatctggatctggagcaacaaacttctcactactcaaacaagcaggtgacgtggaggagaatcccgggcctactagtatggactggatttggcgcatccttttccttgtcggcgctgctaccggcgcgcattccttcgaaaagcaagaagtgacccagattcctgccgctctgtctgtgcctgagggcgagaatctggtgctgaactgctccttcaccgacagcgccatctacaacctccagtggttcaggcaggaccctggcaagggactgacaagcctgctgctgattcagagcagccagagagagcagaccagcggcagactgaatgccagcctggataagtccagcggaagaagcaccctgtatatcgccgcttctcagcctggcgatagcgccacatatctgtgtgccgtgcgggaaacaagcggctccaggctgacttttggcgagggcacacagctgaccgtgaatcccgatacgcgtatccagaaccctgatcctgccgtgtaccagctgcgggatagcaagagcagcgacaagagcgtgtgtctgttcaccgacttcgacagccagaccaacgtgtcccagagcaaggactccgacgtgtacatcaccgataagaccgtgctggacatgcggagcatggacttcaagagcaactccgccgtggcctggtccaacaagtccgatttcgcctgcgccaacgccttcaacaacagcattatccccgaggacacattcttcccaagccccgagagcagctgcggtaccctcggagaaccacagctctgttacattctggatgctatcctgttcctctatgggatcgtcctgacactcctgtattgcaggagcaagcggtcacggctgctccacagcgattacatgaatatgacaccacgaagaccgggtcctactcgcaaacactaccaaccctacgcacctccccgcgactttgcagcgtaccgatctagactcaaaattcaagttcgcaaagccgccattacctcttacgagaagagtgatggggtgtacacaggactgtctacccggaatcaagaaacctacgaaaccctcaaacatgagaagccacctcagtaa

SEQ ID NO: 2817 - DNA, 2229 bp, synthetic construct
  source 1..2229: mol_type = other DNA
atggccttaccagtgaccgccttgctcctgccgctggccttgctgctccacgccgccaggccggaattcagcagatacctggtcaagcggaccggcgagaaggtgttcctggaatgcgtgcaggacatggaccacgaaaacatgttctggtacagacaggaccccggcctgggcctgagactgatctacttcagctacgacgtgaagatgaaggaaaagggcgacatccccgagggctacagcgtgtccagagagaagaaagagcggttcagcctgatcctggaaagcgccagcaccaaccagaccagcatgtacctgtgcgccagcagcttttggggcagaagcaccgacacacagtatttcggccctggcaccagactgacagttctcgaggacctgaagaacgtgttcccacctgaggtggccgtgttcgagcctagcgaggccgagatcagccacacccagaaagccaccctcgtgtgcctggctaccggcttctaccccgaccatgtggaactgtcttggtgggtcaacggcaaagaggtgcacagcggcgtgtctaccgacccccagccactgaaagaacagcccgccctgaacgacagccggtactgcctgagcagcagactgagagtgtccgccaccttctggcagaacccccggaaccacttcagatgccaggtgcagttctacggcctgagcgagaacgacgagtggacccaggacagagccaagcccgtgacccagatcgtgtctgccgaagcctggggcagagccgattgcggatccctgggagagcctcagctgtgctatatcctggacgccatcctgtttctgtacggcatcgtgctgaccctgctgtactgcaggagtaagaggagcaggctcctgcacagtgactacatgaacatgactccacgccgccccggacccacccgcaagcattaccagccctatgccccaccacgcgacttcgcagcctatcgctcccggctgaagatccaagtgcggaaggccgccatcaccagctacgagaaatccgacggcgtgtacaccggcctgagcaccagaaatcaagagacatacgagacactgaagcacgaaaagcctccacaaagggccaagcgatctggatctggagcaacaaacttctcactactcaaacaagcaggtgacgtggaggagaatcccgggcctactagtatggactggatttggcgcatccttttccttgtcggcgctgctaccggcgcgcattccttcgaaaagcaagaagtgacccagattcctgccgctctgtctgtgcctgagggcgagaatctggtgctgaactgctccttcaccgacagcgccatctacaacctccagtggttcaggcaggaccctggcaagggactgacaagcctgctgctgattcagagcagccagagagagcagaccagcggcagactgaatgccagcctggataagtccagcggaagaagcaccctgtatatcgccgcttctcagcctggcgatagcgccacatatctgtgtgccgtgcgggaaacaagcggctccaggctgacttttggcgagggcacacagctgaccgtgaatcccgatacgcgtatccagaaccctgatcctgccgtgtaccagctgcgggatagcaagagcagcgacaagagcgtgtgtctgttcaccgacttcgacagccagaccaacgtgtcccagagcaaggactccgacgtgtacatcaccgataagaccgtgctggacatgcggagcatggacttcaagagcaactccgccgtggcctggtccaacaagtccgatttcgcctgcgccaacgccttcaacaacagcattatccccgaggacacattcttcccaagccccgagagcagctgcggtaccctcggagaaccacagctctgttacattctggatgctatcctgttcctctatgggatcgtcctgacactcctgtattgcaggagcaagcggtcacggctgctccacagcgattacatgaatatgacaccacgaagaccgggtcctactcgcaaacactaccaaccctacgcacctccccgcgactttgcagcgtaccgatctagactcaaaattcaagttcgcaaagccgccattacctcttacgagaagagtgatggggtgtacacaggactgtctacccggaatcaagaaacctacgaaaccctcaaacatgagaagccacctcagtaa

SEQ ID NO: 2818 - DNA, 1983 bp, synthetic construct
  source 1..1983: mol_type = other DNA
atggccttaccagtgaccgccttgctcctgccgctggccttgctgctccacgccgccaggccggaattcagcagatacctggtcaagcggaccggcgagaaggtgttcctggaatgcgtgcaggacatggaccacgaaaacatgttctggtacagacaggaccccggcctgggcctgagactgatctacttcagctacgacgtgaagatgaaggaaaagggcgacatccccgagggctacagcgtgtccagagagaagaaagagcggttcagcctgatcctggaaagcgccagcaccaaccagaccagcatgtacctgtgcgccagcagcttttggggcagaagcaccgacacacagtatttcggccctggcaccagactgacagttctcgaggacctgaagaacgtgttcccacctgaggtggccgtgttcgagcctagcgaggccgagatcagccacacccagaaagccaccctcgtgtgcctggctaccggcttctaccccgaccatgtggaactgtcttggtgggtcaacggcaaagaggtgcacagcggcgtgtctaccgacccccagccactgaaagaacagcccgccctgaacgacagccggtactgcctgagcagcagactgagagtgtccgccaccttctggcagaacccccggaaccacttcagatgccaggtgcagttctacggcctgagcgagaacgacgagtggacccaggacagagccaagcccgtgacccagatcgtgtctgccgaagcctggggcagagccgattgcggatccctgggagagcctcagctgagctatatcctggacgccatcctgtttctgtacggcatcgtgctgaccctgctgtactgccggctgaagatccaagtgcggaaggccgccatcaccagctacgagaaatccgacggcgtgtacaccggcctgagcaccagaaatcaagagacatacgagacactgaagcacgaaaagcctccacaaagggccaagcgatctggatctggagcaacaaacttctcactactcaaacaagcaggtgacgtggaggagaatcccgggcctactagtatggactggatttggcgcatccttttccttgtcggcgctgctaccggcgcgcattccttcgaaaagcaagaagtgacccagattcctgccgctctgtctgtgcctgagggcgagaatctggtgctgaactgctccttcaccgacagcgccatctacaacctccagtggttcaggcaggaccctggcaagggactgacaagcctgctgctgattcagagcagccagagagagcagaccagcggcagactgaatgccagcctggataagtccagcggaagaagcaccctgtatatcgccgcttctcagcctggcgatagcgccacatatctgtgtgccgtgcgggaaacaagcggctccaggctgacttttggcgagggcacacagctgaccgtgaatcccgatacgcgtatccagaaccctgatcctgccgtgtaccagctgcgggatagcaagagcagcgacaagagcgtgtgtctgttcaccgacttcgacagccagaccaacgtgtcccagagcaaggactccgacgtgtacatcaccgataagaccgtgctggacatgcggagcatggacttcaagagcaactccgccgtggcctggtccaacaagtccgatttcgcctgcgccaacgccttcaacaacagcattatccccgaggacacattcttcccaagccccgagagcagctgcggtaccctcggagaaccacagctctcttacattctggatgctatcctgttcctctatgggatcgtcctgacactcctgtattgcagactcaaaattcaagttcgcaaagccgccattacctcttacgagaagagtgatggggtgtacacaggactgtctacccggaatcaagaaacctacgaaaccctcaaacatgagaagccacctcagtaa

SEQ ID NO: 2819 - DNA, 2091 bp, synthetic construct
  source 1..2091: mol_type = other DNA
atggccttaccagtgaccgccttgctcctgccgctggccttgctgctccacgccgccaggccggaattcagcagatacctggtcaagcggaccggcgagaaggtgttcctggaatgcgtgcaggacatggaccacgaaaacatgttctggtacagacaggaccccggcctgggcctgagactgatctacttcagctacgacgtgaagatgaaggaaaagggcgacatccccgagggctacagcgtgtccagagagaagaaagagcggttcagcctgatcctggaaagcgccagcaccaaccagaccagcatgtacctgtgcgccagcagcttttggggcagaagcaccgacacacagtatttcggccctggcaccagactgacagttctcgaggacctgaagaacgtgttcccacctgaggtggccgtgttcgagcctagcgaggccgagatcagccacacccagaaagccaccctcgtgtgcctggctaccggcttctaccccgaccatgtggaactgtcttggtgggtcaacggcaaagaggtgcacagcggcgtgtctaccgacccccagccactgaaagaacagcccgccctgaacgacagccggtactgcctgagcagcagactgagagtgtccgccaccttctggcagaacccccggaaccacttcagatgccaggtgcagttctacggcctgagcgagaacgacgagtggacccaggacagagccaagcccgtgacccagatcgtgtctgccgaagcctggggcagagccgattgcggatcccaggctcagagcgattgcagctgtagcacagtgtctccaggcgtgctggccggaattgtgatgggcgatctggtgctgacagtgctgattgccctggccgtgtacttcctgggtagactggtgcctagaggaagaggcgctgccgaagccgccacaagaaagcagagaatcaccgagacagagagcccctaccaagagctgcaaggccagagaagcgacgtgtacagcgacctgaatacccagcggccttactacaaaagggccaagcgatctggatctggagcaacaaacttctcactactcaaacaagcaggtgacgtggaggagaatcccgggcctactagtatggactggatttggcgcatccttttccttgtcggcgctgctaccggcgcgcattccttcgaaaagcaagaagtgacccagattcctgccgctctgtctgtgcctgagggcgagaatctggtgctgaactgctccttcaccgacagcgccatctacaacctccagtggttcaggcaggaccctggcaagggactgacaagcctgctgctgattcagagcagccagagagagcagaccagcggcagactgaatgccagcctggataagtccagcggaagaagcaccctgtatatcgccgcttctcagcctggcgatagcgccacatatctgtgtgccgtgcgggaaacaagcggctccaggctgacttttggcgagggcacacagctgaccgtgaatcccgatacgcgtatccagaaccctgatcctgccgtgtaccagctgcgggatagcaagagcagcgacaagagcgtgtgtctgttcaccgacttcgacagccagaccaacgtgtcccagagcaaggactccgacgtgtacatcaccgataagaccgtgctggacatgcggagcatggacttcaagagcaactccgccgtggcctggtccaacaagtccgatttcgcctgcgccaacgccttcaacaacagcattatccccgaggacacattcttcccaagccccgagagcagctgcggtacccaggctcagagcgattgcagctctagcacagtgtctccaggcgtgctggccggaattgtgatgggcgatctggtgctgacagtgctgattgccctggccgtgtacttcctgggtagactggtgcctagaggaagaggcgctgccgaagccgccacaagaaagcagagaatcaccgagacagagagcccctaccaagagctgcaaggccagagaagcgacgtgtacagcgacctgaatacccagcggccttactacaaataa

SEQ ID NO: 2820 - DNA, 2217 bp, synthetic construct
  source 1..2217: mol_type = other DNA
atggccttaccagtgaccgccttgctcctgccgctggccttgctgctccacgccgccaggccggaattcagcagatacctggtcaagcggaccggcgagaaggtgttcctggaatgcgtgcaggacatggaccacgaaaacatgttctggtacagacaggaccccggcctgggcctgagactgatctacttcagctacgacgtgaagatgaaggaaaagggcgacatccccgagggctacagcgtgtccagagagaagaaagagcggttcagcctgatcctggaaagcgccagcaccaaccagaccagcatgtacctgtgcgccagcagcttttggggcagaagcaccgacacacagtatttcggccctggcaccagactgacagttctcgaggacctgaagaacgtgttcccacctgaggtggccgtgttcgagcctagcgaggccgagatcagccacacccagaaagccaccctcgtgtgcctggctaccggcttctaccccgaccatgtggaactgtcttggtgggtcaacggcaaagaggtgcacagcggcgtgtctaccgacccccagccactgaaagaacagcccgccctgaacgacagccggtactgcctgagcagcagactgagagtgtccgccaccttctggcagaacccccggaaccacttcagatgccaggtgcagttctacggcctgagcgagaacgacgagtggacccaggacagagccaagcccgtgacccagatcgtgtctgccgaagcctggggcagagccgattgcggatcccaggctcagagcgattgcagctgtagcacagtgtctccaggcgtgctggccggaattgtgatgggcgatctggtgctgacagtgctgattgccctggccgtgtacttcctgggtagactggtgcctagaggaagaggcgctgccgaagccgccacaagaaagcagagaatcaccgagacagagagcccctaccaagagctgcaaggccagagaagcgacgtgtacagcgacctgaatacccagcggccttactacaaaagggccaagcgatctggatctggagcaacaaacttctcactactcaaacaagcaggtgacgtggaggagaatcccgggcctactagtatggactggatttggcgcatccttttccttgtcggcgctgctaccggcgcgcattccttcgaaaagcaagaagtgacccagattcctgccgctctgtctgtgcctgagggcgagaatctggtgctgaactgctccttcaccgacagcgccatctacaacctccagtggttcaggcaggaccctggcaagggactgacaagcctgctgctgattcagagcagccagagagagcagaccagcggcagactgaatgccagcctggataagtccagcggaagaagcaccctgtatatcgccgcttctcagcctggcgatagcgccacatatctgtgtgccgtgcgggaaacaagcggctccaggctgacttttggcgagggcacacagctgaccgtgaatcccgatacgcgtatccagaaccctgatcctgccgtgtaccagctgcgggatagcaagagcagcgacaagagcgtgtgtctgttcaccgacttcgacagccagaccaacgtgtcccagagcaaggactccgacgtgtacatcaccgataagaccgtgctggacatgcggagcatggacttcaagagcaactccgccgtggcctggtccaacaagtccgatttcgcctgcgccaacgccttcaacaacagcattatccccgaggacacattcttcccaagccccgagagcagctgcggtacccaggctcagagcgattgcagctgtagcacagtgtctccaggcgtgctggccggaattgtgatgggcgatctggtgctgacagtgctgattgccctggccgtgtacttcctgggtagactggtgcctagaggaagaggcgctgccgaagccgccacaagaaagcagagaatcaccgagacagagagcccctaccaagagctgcaaggccagagaagcgacgtgtacagcgacctgaatacccagaaacggggcagaaagaaactcctgtatatattcaaacaaccatttatgagaccagtacaaactactcaagaggaagatggctgtagctgccgatttccagaagaagaagaaggaggatgtgaactgcggccttactacaaataa

SEQ ID NO: 2821 - DNA, 2214 bp, synthetic construct
  source 1..2214: mol_type = other DNA
atggccttaccagtgaccgccttgctcctgccgctggccttgctgctccacgccgccaggccggaattcagcagatacctggtcaagcggaccggcgagaaggtgttcctggaatgcgtgcaggacatggaccacgaaaacatgttctggtacagacaggaccccggcctgggcctgagactgatctacttcagctacgacgtgaagatgaaggaaaagggcgacatccccgagggctacagcgtgtccagagagaagaaagagcggttcagcctgatcctggaaagcgccagcaccaaccagaccagcatgtacctgtgcgccagcagcttttggggcagaagcaccgacacacagtatttcggccctggcaccagactgacagttctcgaggacctgaagaacgtgttcccacctgaggtggccgtgttcgagcctagcgaggccgagatcagccacacccagaaagccaccctcgtgtgcctggctaccggcttctaccccgaccatgtggaactgtcttggtgggtcaacggcaaagaggtgcacagcggcgtgtctaccgacccccagccactgaaagaacagcccgccctgaacgacagccggtactgcctgagcagcagactgagagtgtccgccaccttctggcagaacccccggaaccacttcagatgccaggtgcagttctacggcctgagcgagaacgacgagtggacccaggacagagccaagcccgtgacccagatcgtgtctgccgaagcctggggcagagccgattgcggatcccaggctcagagcgattgcagctgtagcacagtgtctccaggcgtgctggccggaattgtgatgggcgatctggtgctgacagtgctgattgccctggccgtgtacttcctgggtagactggtgcctagaggaagaggcgctgccgaagccgccacaagaaagcagagaatcaccgagacagagagcccctaccaagagctgcaaggccagagaagcgacgtgtacagcgacctgaatacccagcggccttactacaaaagggccaagcgatctggatctggagcaacaaacttctcactactcaaacaagcaggtgacgtggaggagaatcccgggcctactagtatggactggatttggcgcatccttttccttgtcggcgctgctaccggcgcgcattccttcgaaaagcaagaagtgacccagattcctgccgctctgtctgtgcctgagggcgagaatctggtgctgaactgctccttcaccgacagcgccatctacaacctccagtggttcaggcaggaccctggcaagggactgacaagcctgctgctgattcagagcagccagagagagcagaccagcggcagactgaatgccagcctggataagtccagcggaagaagcaccctgtatatcgccgcttctcagcctggcgatagcgccacatatctgtgtgccgtgcgggaaacaagcggctccaggctgacttttggcgagggcacacagctgaccgtgaatcccgatacgcgtatccagaaccctgatcctgccgtgtaccagctgcgggatagcaagagcagcgacaagagcgtgtgtctgttcaccgacttcgacagccagaccaacgtgtcccagagcaaggactccgacgtgtacatcaccgataagaccgtgctggacatgcggagcatggacttcaagagcaactccgccgtggcctggtccaacaagtccgatttcgcctgcgccaacgccttcaacaacagcattatccccgaggacacattcttcccaagccccgagagcagctgcggtacccaggctcagagcgattgcagctgtagcacagtgtctccaggcgtgctggccggaattgtgatgggcgatctggtgctgacagtgctgattgccctggccgtgtacttcctgggtagactggtgcctagaggaagaggcgctgccgaagccgccacaagaaagcagagaatcaccgagacagagagcccctaccaagagctgcaaggccagagaagcgacgtgtacagcgacctgaatacccagaggagcaagcggtcacggctgctccacagcgattacatgaatatgacaccacgaagaccgggtcctactcgcaaacactaccaaccctacgcacctccccgcgactttgcagcgtaccgatctcggccttactacaaataa

SEQ ID NO: 2822 - DNA, 2199 bp, synthetic construct
  source 1..2199: mol_type = other DNA
atggccttaccagtgaccgccttgctcctgccgctggccttgctgctccacgccgccaggccggaattcagcagatacctggtcaagcggaccggcgagaaggtgttcctggaatgcgtgcaggacatggaccacgaaaacatgttctggtacagacaggaccccggcctgggcctgagactgatctacttcagctacgacgtgaagatgaaggaaaagggcgacatccccgagggctacagcgtgtccagagagaagaaagagcggttcagcctgatcctggaaagcgccagcaccaaccagaccagcatgtacctgtgcgccagcagcttttggggcagaagcaccgacacacagtatttcggccctggcaccagactgacagttctcgaggacctgaagaacgtgttcccacctgaggtggccgtgttcgagcctagcgaggccgagatcagccacacccagaaagccaccctcgtgtgcctggctaccggcttctaccccgaccatgtggaactgtcttggtgggtcaacggcaaagaggtgcacagcggcgtgtctaccgacccccagccactgaaagaacagcccgccctgaacgacagccggtactgcctgagcagcagactgagagtgtccgccaccttctggcagaacccccggaaccacttcagatgccaggtgcagttctacggcctgagcgagaacgacgagtggacccaggacagagccaagcccgtgacccagatcgtgtctgccgaagcctggggcagagccgattgcggatcccaggctcagagcgattgcagctgtagcacagtgtctccaggcgtgctggccggaattgtgatgggcgatctggtgctgacagtgctgattgccctggccgtgtacttcctgggtagactggtgcctagaggaagaggcgctgccgaagccgccacaagaaagcagagaatcaccgagacagagagcccctaccaagagctgcaaggccagagaagcgacgtgtacagcgacctgaatacccagcggccttactacaaaagggccaagcgatctggatctggagcaacaaacttctcactactcaaacaagcaggtgacgtggaggagaatcccgggcctactagtatggactggatttggcgcatccttttccttgtcggcgctgctaccggcgcgcattccttcgaaaagcaagaagtgacccagattcctgccgctctgtctgtgcctgagggcgagaatctggtgctgaactgctccttcaccgacagcgccatctacaacctccagtggttcaggcaggaccctggcaagggactgacaagcctgctgctgattcagagcagccagagagagcagaccagcggcagactgaatgccagcctggataagtccagcggaagaagcaccctgtatatcgccgcttctcagcctggcgatagcgccacatatctgtgtgccgtgcgggaaacaagcggctccaggctgacttttggcgagggcacacagctgaccgtgaatcccgatacgcgtatccagaaccctgatcctgccgtgtaccagctgcgggatagcaagagcagcgacaagagcgtgtgtctgttcaccgacttcgacagccagaccaacgtgtcccagagcaaggactccgacgtgtacatcaccgataagaccgtgctggacatgcggagcatggacttcaagagcaactccgccgtggcctggtccaacaagtccgatttcgcctgcgccaacgccttcaacaacagcattatccccgaggacacattcttcccaagccccgagagcagctgcggtacccaggctcagagcgattgcagctgtagcacagtgtctccaggcgtgctggccggaattgtgatgggcgatctggtgctgacagtgctgattgccctggccgtgtacttcctgggtagactggtgcctagaggaagaggcgctgccgaagccgccacaagaaagcagagaatcaccgagacagagagcccctaccaagagctgcaaggccagagaagcgacgtgtacagcgacctgaatacccagagggaccaaagactgcctcctgacgctcacaaacctccaggcggaggcagcttcagaacccctatccaagaggaacaggctgacgcccacagcaccctggcaaaaattcggccttactacaaataa

SEQ ID NO: 2823 - DNA, 2451 bp, synthetic construct
  source 1..2451: mol_type = other DNA
atggccttaccagtgaccgccttgctcctgccgctggccttgctgctccacgccgccaggccggaattcagcagatacctggtcaagcggaccggcgagaaggtgttcctggaatgcgtgcaggacatggaccacgaaaacatgttctggtacagacaggaccccggcctgggcctgagactgatctacttcagctacgacgtgaagatgaaggaaaagggcgacatccccgagggctacagcgtgtccagagagaagaaagagcggttcagcctgatcctggaaagcgccagcaccaaccagaccagcatgtacctgtgcgccagcagcttttggggcagaagcaccgacacacagtatttcggccctggcaccagactgacagttctcgaggacctgaagaacgtgttcccacctgaggtggccgtgttcgagcctagcgaggccgagatcagccacacccagaaagccaccctcgtgtgcctggctaccggcttctaccccgaccatgtggaactgtcttggtgggtcaacggcaaagaggtgcacagcggcgtgtctaccgacccccagccactgaaagaacagcccgccctgaacgacagccggtactgcctgagcagcagactgagagtgtccgccaccttctggcagaacccccggaaccacttcagatgccaggtgcagttctacggcctgagcgagaacgacgagtggacccaggacagagccaagcccgtgacccagatcgtgtctgccgaagcctggggcagagccgattgcggatcccaggctcagagcgattgcagctgtagcacagtgtctccaggcgtgctggccggaattgtgatgggcgatctggtgctgacagtgctgattgccctggccgtgtacttcctgggtagactggtgcctagaggaagaggcgctgccgaagccgccacaagaaagcagagaatcaccgagacagagagcccctaccaagagctgcaaggccagagaagcgacgtgtacagcgacctgaatacccagcggccttactacaaaagggccaagcgatctggatctggagcaacaaacttctcactactcaaacaagcaggtgacgtggaggagaatcccgggcctactagtatggactggatttggcgcatccttttccttgtcggcgctgctaccggcgcgcattccttcgaaaagcaagaagtgacccagattcctgccgctctgtctgtgcctgagggcgagaatctggtgctgaactgctccttcaccgacagcgccatctacaacctccagtggttcaggcaggaccctggcaagggactgacaagcctgctgctgattcagagcagccagagagagcagaccagcggcagactgaatgccagcctggataagtccagcggaagaagcaccctgtatatcgccgcttctcagcctggcgatagcgccacatatctgtgtgccgtgcgggaaacaagcggctccaggctgacttttggcgagggcacacagctgaccgtgaatcccgatacgcgtatccagaaccctgatcctgccgtgtaccagctgcgggatagcaagagcagcgacaagagcgtgtgtctgttcaccgacttcgacagccagaccaacgtgtcccagagcaaggactccgacgtgtacatcaccgataagaccgtgctggacatgcggagcatggacttcaagagcaactccgccgtggcctggtccaacaagtccgatttcgcctgcgccaacgccttcaacaacagcattatccccgaggacacattcttcccaagccccgagagcagctgcggtacccaggctcagagcgattgcagctgtagcacagtgtctccaggcgtgctggccggaattgtgatgggcgatctggtgctgacagtgctgattgccctggccgtgtacttcctgggtagactggtgcctagaggaagaggcgctgccgaagccgccacaagaaagcagagaatcaccgagacagagagcccctaccaagagctgcaaggccagagaagcgacgtgtacagcgacctgaatacccagtggcggcggaagcggaaagagaagcagtctgagacaagccccaaagagttcctgaccatctacgaggacgtgaaggacctgaaaacccggcggaaccacgaacaagagcagacctttcctggcggaggcagcaccatctacagcatgatccagagccagagcagcgcccctacaagccaagagcctgcctacacactgtactccctgatccagcctagcagaaagagcggcagccggaagagaaatcacagccccagcttcaacagcacgatctacgaagtgatcggcaagagccagccaaaggctcagaaccctgccagactgagccggaaagagctggaaaacttcgacgtgtacagccggccttactacaaataa

SEQ ID NO: 2824 - DNA, 2727 bp, synthetic construct
  source 1..2727: mol_type = other DNA
atggccttaccagtgaccgccttgctcctgccgctggccttgctgctccacgccgccaggccggaattcagcagatacctggtcaagcggaccggcgagaaggtgttcctggaatgcgtgcaggacatggaccacgaaaacatgttctggtacagacaggaccccggcctgggcctgagactgatctacttcagctacgacgtgaagatgaaggaaaagggcgacatccccgagggctacagcgtgtccagagagaagaaagagcggttcagcctgatcctggaaagcgccagcaccaaccagaccagcatgtacctgtgcgccagcagcttttggggcagaagcaccgacacacagtatttcggccctggcaccagactgacagttctcgaggacctgaagaacgtgttcccacctgaggtggccgtgttcgagcctagcgaggccgagatcagccacacccagaaagccaccctcgtgtgcctggctaccggcttctaccccgaccatgtggaactgtcttggtgggtcaacggcaaagaggtgcacagcggcgtgtctaccgacccccagccactgaaagaacagcccgccctgaacgacagccggtactgcctgagcagcagactgagagtgtccgccaccttctggcagaacccccggaaccacttcagatgccaggtgcagttctacggcctgagcgagaacgacgagtggacccaggacagagccaagcccgtgacccagatcgtgtctgccgaagcctggggcagagccgattgcggatcccaggctcagagcgattgcagctgtagcacagtgtctccaggcgtgctggccggaattgtgatgggcgatctggtgctgacagtgctgattgccctggccgtgtacttcctgggtagactggtgcctagaggaagaggcgctgccgaagccgccacaagaaagcagagaatcaccgagacagagagcccctaccaagagctgcaaggccagagaagcgacgtgtacagcgacctgaatacccagagagtgaagttcagcagaagcgccgacgcccctgcctaccagcagggacagaaccaactgtacaacgagctgaacctgggcagacgggaagagtacgacgtgctggacaagcggagaggcagggaccctgagatgggcggaaagccccagcggagaaagaacccccaggaaggactgtataacgaactccagaaagacaagatggccgaagcctacagcgagatcggcatgaagggcgagcggagaagaggcaagggccacgatggcctgtaccagggcctgagcaccgccaccaaggacacctatgacgccctgcacatgcaggccctgcctccaagaagggccaagcgatctggatctggagcaacaaacttctcactactcaaacaagcaggtgacgtggaggagaatcccgggcctactagtatggactggatttggcgcatccttttccttgtcggcgctgctaccggcgcgcattccttcgaaaagcaagaagtgacccagattcctgccgctctgtctgtgcctgagggcgagaatctggtgctgaactgctccttcaccgacagcgccatctacaacctccagtggttcaggcaggaccctggcaagggactgacaagcctgctgctgattcagagcagccagagagagcagaccagcggcagactgaatgccagcctggataagtccagcggaagaagcaccctgtatatcgccgcttctcagcctggcgatagcgccacatatctgtgtgccgtgcgggaaacaagcggctccaggctgacttttggcgagggcacacagctgaccgtgaatcccgatacgcgtatccagaaccctgatcctgccgtgtaccagctgcgggatagcaagagcagcgacaagagcgtgtgtctgttcaccgacttcgacagccagaccaacgtgtcccagagcaaggactccgacgtgtacatcaccgataagaccgtgctggacatgcggagcatggacttcaagagcaactccgccgtggcctggtccaacaagtccgatttcgcctgcgccaacgccttcaacaacagcattatccccgaggacacattcttcccaagccccgagagcagctgcggtaccacaacgccgggcgaaaggagttccttgccggccttttaccccggcacaagcggaagctgtagtgggtgtggaagcctcagcctcccacttcttgcgggcctcgtcgcggcagatgcagtagcttcacttcttattgtaggcgcggtatttctctgtgctcgaccaaggaggtcacccgctcaggaggatggtaaggtgtatataaatatgccaggacgcggaagctctagacgggttaagttttccagatccgcagacgcacccgcttaccaacaagggcagaaccaactctacaatgaacttaatttggggcggagggaagagtacgacgttctggacaaaaggaggggacgagatcccgagatgggcggaaagcctcagcgaaggaagaatccgcaagaggggctttataacgaactccagaaagataaaatggcagaagcctatagtgagattgggatgaagggagaaaggaggaggggtaaaggtcacgatgggttgtaccaaggattgagcacagccactaaagatacctatgatgcgctccacatgcaggccctgccgccaagataa

SEQ ID NO: 2825 - DNA, 2505 bp, synthetic construct
  source 1..2505: mol_type = other DNA
atggccttaccagtgaccgccttgctcctgccgctggccttgctgctccacgccgccaggccggaattcagcagatacctggtcaagcggaccggcgagaaggtgttcctggaatgcgtgcaggacatggaccacgaaaacatgttctggtacagacaggaccccggcctgggcctgagactgatctacttcagctacgacgtgaagatgaaggaaaagggcgacatccccgagggctacagcgtgtccagagagaagaaagagcggttcagcctgatcctggaaagcgccagcaccaaccagaccagcatgtacctgtgcgccagcagcttttggggcagaagcaccgacacacagtatttcggccctggcaccagactgacagttctcgaggacctgaagaacgtgttcccacctgaggtggccgtgttcgagcctagcgaggccgagatcagccacacccagaaagccaccctcgtgtgcctggctaccggcttctaccccgaccatgtggaactgtcttggtgggtcaacggcaaagaggtgcacagcggcgtgtctaccgacccccagccactgaaagaacagcccgccctgaacgacagccggtactgcctgagcagcagactgagagtgtccgccaccttctggcagaacccccggaaccacttcagatgccaggtgcagttctacggcctgagcgagaacgacgagtggacccaggacagagccaagcccgtgacccagatcgtgtctgccgaagcctggggcagagccgattgcggatcccaggctcagagcgattgcagctgtagcacagtgtctccaggcgtgctggccggaattgtgatgggcgatctggtgctgacagtgctgattgccctggccgtgtacttcctgggtagactggtgcctagaggaagaggcgctgccgaagccgccacaagaaagcagagaatcaccgagacagagagcccctaccaagagctgcaaggccagagaagcgacgtgtacagcgacctgaatacccagagagtgaagttcagcagaagcgccgacgcccctgcctaccagcagggacagaaccaactgtacaacgagctgaacctgggcagacgggaagagtacgacgtgctggacaagcggagaggcagggaccctgagatgggcggaaagccccagcggagaaagaacccccaggaaggactgtataacgaactccagaaagacaagatggccgaagcctacagcgagatcggcatgaagggcgagcggagaagaggcaagggccacgatggcctgtaccagggcctgagcaccgccaccaaggacacctatgacgccctgcacatgcaggccctgcctccaagaagggccaagcgatctggatctggagcaacaaacttctcactactcaaacaagcaggtgacgtggaggagaatcccgggcctactagtatggactggatttggcgcatccttttccttgtcggcgctgctaccggcgcgcattccttcgaaaagcaagaagtgacccagattcctgccgctctgtctgtgcctgagggcgagaatctggtgctgaactgctccttcaccgacagcgccatctacaacctccagtggttcaggcaggaccctggcaagggactgacaagcctgctgctgattcagagcagccagagagagcagaccagcggcagactgaatgccagcctggataagtccagcggaagaagcaccctgtatatcgccgcttctcagcctggcgatagcgccacatatctgtgtgccgtgcgggaaacaagcggctccaggctgacttttggcgagggcacacagctgaccgtgaatcccgatacgcgtatccagaaccctgatcctgccgtgtaccagctgcgggatagcaagagcagcgacaagagcgtgtgtctgttcaccgacttcgacagccagaccaacgtgtcccagagcaaggactccgacgtgtacatcaccgataagaccgtgctggacatgcggagcatggacttcaagagcaactccgccgtggcctggtccaacaagtccgatttcgcctgcgccaacgccttcaacaacagcattatccccgaggacacattcttcccaagccccgagagcagctgcggtaccacaacgccgggcgaaaggagttccttgccggccttttaccccggcacaagcggaagctgtagtgggtgtggaagcctcagcctcccacttcttgcgggcctcgtcgcggcagatgcagtagcttcacttcttattgtaggcgcggtatttaagagaggccggaagaagctgctgtacatcttcaagcagcctttcatgcggcccgtgcagaccacccaggaagaggacggctgctcctgccggttccccgaggaagaagaaggcggctgcgagctgctctgtgctcgaccaaggaggtcacccgctcaggaggatggtaaggtgtatataaatatgccaggacgcggataa

SEQ ID NO: 2826 - DNA, 2502 bp, synthetic construct
  source 1..2502: mol_type = other DNA
atggccttaccagtgaccgccttgctcctgccgctggccttgctgctccacgccgccaggccggaattcagcagatacctggtcaagcggaccggcgagaaggtgttcctggaatgcgtgcaggacatggaccacgaaaacatgttctggtacagacaggaccccggcctgggcctgagactgatctacttcagctacgacgtgaagatgaaggaaaagggcgacatccccgagggctacagcgtgtccagagagaagaaagagcggttcagcctgatcctggaaagcgccagcaccaaccagaccagcatgtacctgtgcgccagcagcttttggggcagaagcaccgacacacagtatttcggccctggcaccagactgacagttctcgaggacctgaagaacgtgttcccacctgaggtggccgtgttcgagcctagcgaggccgagatcagccacacccagaaagccaccctcgtgtgcctggctaccggcttctaccccgaccatgtggaactgtcttggtgggtcaacggcaaagaggtgcacagcggcgtgtctaccgacccccagccactgaaagaacagcccgccctgaacgacagccggtactgcctgagcagcagactgagagtgtccgccaccttctggcagaacccccggaaccacttcagatgccaggtgcagttctacggcctgagcgagaacgacgagtggacccaggacagagccaagcccgtgacccagatcgtgtctgccgaagcctggggcagagccgattgcggatcccaggctcagagcgattgcagctgtagcacagtgtctccaggcgtgctggccggaattgtgatgggcgatctggtgctgacagtgctgattgccctggccgtgtacttcctgggtagactggtgcctagaggaagaggcgctgccgaagccgccacaagaaagcagagaatcaccgagacagagagcccctaccaagagctgcaaggccagagaagcgacgtgtacagcgacctgaatacccagagagtgaagttcagcagaagcgccgacgcccctgcctaccagcagggacagaaccaactgtacaacgagctgaacctgggcagacgggaagagtacgacgtgctggacaagcggagaggcagggaccctgagatgggcggaaagccccagcggagaaagaacccccaggaaggactgtataacgaactccagaaagacaagatggccgaagcctacagcgagatcggcatgaagggcgagcggagaagaggcaagggccacgatggcctgtaccagggcctgagcaccgccaccaaggacacctatgacgccctgcacatgcaggccctgcctccaagaagggccaagcgatctggatctggagcaacaaacttctcactactcaaacaagcaggtgacgtggaggagaatcccgggcctactagtatggactggatttggcgcatccttttccttgtcggcgctgctaccggcgcgcattccttcgaaaagcaagaagtgacccagattcctgccgctctgtctgtgcctgagggcgagaatctggtgctgaactgctccttcaccgacagcgccatctacaacctccagtggttcaggcaggaccctggcaagggactgacaagcctgctgctgattcagagcagccagagagagcagaccagcggcagactgaatgccagcctggataagtccagcggaagaagcaccctgtatatcgccgcttctcagcctggcgatagcgccacatatctgtgtgccgtgcgggaaacaagcggctccaggctgacttttggcgagggcacacagctgaccgtgaatcccgatacgcgtatccagaaccctgatcctgccgtgtaccagctgcgggatagcaagagcagcgacaagagcgtgtgtctgttcaccgacttcgacagccagaccaacgtgtcccagagcaaggactccgacgtgtacatcaccgataagaccgtgctggacatgcggagcatggacttcaagagcaactccgccgtggcctggtccaacaagtccgatttcgcctgcgccaacgccttcaacaacagcattatccccgaggacacattcttcccaagccccgagagcagctgcggtaccacaacgccgggcgaaaggagttccttgccggccttttaccccggcacaagcggaagctgtagtgggtgtggaagcctcagcctcccacttcttgcgggcctcgtcgcggcagatgcagtagcttcacttcttattgtaggcgcggtatttaggagcaagcggtcacggctgctccacagcgattacatgaatatgacaccacgaagaccgggtcctactcgcaaacactaccaaccctacgcacctccccgcgactttgcagcgtaccgatctctctgtgctcgaccaaggaggtcacccgctcaggaggatggtaaggtgtatataaatatgccaggacgcggataa

SEQ ID NO: 2827 - DNA, 3237 bp, synthetic construct
  source 1..3237: mol_type = other DNA
atggccttaccagtgaccgccttgctcctgccgctggccttgctgctccacgccgccaggccggaattcagcagatacctggtcaagcggaccggcgagaaggtgttcctggaatgcgtgcaggacatggaccacgaaaacatgttctggtacagacaggaccccggcctgggcctgagactgatctacttcagctacgacgtgaagatgaaggaaaagggcgacatccccgagggctacagcgtgtccagagagaagaaagagcggttcagcctgatcctggaaagcgccagcaccaaccagaccagcatgtacctgtgcgccagcagcttttggggcagaagcaccgacacacagtatttcggccctggcaccagactgacagttctcgaggacctgaagaacgtgttcccacctgaggtggccgtgttcgagcctagcgaggccgagatcagccacacccagaaagccaccctcgtgtgcctggctaccggcttctaccccgaccatgtggaactgtcttggtgggtcaacggcaaagaggtgcacagcggcgtgtctaccgacccccagccactgaaagaacagcccgccctgaacgacagccggtactgcctgagcagcagactgagagtgtccgccaccttctggcagaacccccggaaccacttcagatgccaggtgcagttctacggcctgagcgagaacgacgagtggacccaggacagagccaagcccgtgacccagatcgtgtctgccgaagcctggggcagagccgattgcggatcccagagcttcggcctgctggaccccaagctgtgctacctgctggatggcatcctgttcatctacggcgtgatcctgaccgccctgttcctgagagtgaagttcagcagaagcgccgacgcccctgcctaccagcagggacagaaccaactgtacaacgagctgaacctgggcagacgggaagagtacgacgtgctggacaagcggagaggcagggaccctgagatgggcggaaagccccagcggagaaagaacccccaggaaggactgtataacgaactccagaaagacaagatggccgaagcctacagcgagatcggcatgaagggcgagcggagaagaggcaagggccacgatggcctgtaccagggcctgagcaccgccaccaaggacacctatgacgccctgcacatgcaggccctgcctccaagaagggccaagcgatctggatctggagcaacaaacttctcactactcaaacaagcaggtgacgtggaggagaatcccgggcctactagtatggactggatttggcgcatccttttccttgtcggcgctgctaccggcgcgcattccttcgaaaagcaagaagtgacccagattcctgccgctctgtctgtgcctgagggcgagaatctggtgctgaactgctccttcaccgacagcgccatctacaacctccagtggttcaggcaggaccctggcaagggactgacaagcctgctgctgattcagagcagccagagagagcagaccagcggcagactgaatgccagcctggataagtccagcggaagaagcaccctgtatatcgccgcttctcagcctggcgatagcgccacatatctgtgtgccgtgcgggaaacaagcggctccaggctgacttttggcgagggcacacagctgaccgtgaatcccgatacgcgtatccagaaccctgatcctgccgtgtaccagctgcgggatagcaagagcagcgacaagagcgtgtgtctgttcaccgacttcgacagccagaccaacgtgtcccagagcaaggactccgacgtgtacatcaccgataagaccgtgctggacatgcggagcatggacttcaagagcaactccgccgtggcctggtccaacaagtccgatttcgcctgcgccaacgccttcaacaacagcattatccccgaggacacattcttcccaagccccgagagcagctgcggtacccagagttttgggttgttggaccctaaattgtgctatctgttggacggaatcctgttcatttacggagtgatcctgaccgcattgttcctgcgggttaagttttccagatccgcagacgcacccgcttaccaacaagggcagaaccaactctacaatgaacttaatttggggcggagggaagagtacgacgttctggacaaaaggaggggacgagatcccgagatgggcggaaagcctcagcgaaggaagaatccgcaagaggggctttataacgaactccagaaagataaaatggcagaagcctatagtgagattgggatgaagggagaaaggaggaggggtaaaggtcacgatgggttgtaccaaggattgagcacagccactaaagatacctatgatgcgctccacatgcaggccctgccgccaagacgcgccaagagaagcggatctggcgtgaagcagaccctgaatttcgacctgctgaagctggctggcgacgtggaatccaacccaggcccttctagaggccatatggctctgcctgtgacagctctgctgctgcctctggcactgctgcttcatgctgctagacctagccagtttagagtgtcccctctggacagaacctggaacctgggcgagacagtggaactgaagtgccaggtgctgctgagcaaccctacaagcggctgctcctggctgtttcagcctagaggtgcagccgcctctcctacctttctgctgtacctgagccagaacaagcccaaggccgccgaaggactggacacccagagattcagcggcaagagactgggcgacaccttcgtgctgaccctgagcgacttcagaagagagaacgagggctactacttctgtagcgccctgagcaacagcatcatgtacttcagccacttcgtgcccgtgtttctgcccgccaagcctacaacaacccctgctcctagacctcctacaccagctcctacaatcgccagccagcctctgtctctcagacccgaagcctgtagacctgctgctggcggagctgtgcataccagaggactggatttcgcctgcgacatctacatctgggctcctctggctggcacatgtggcgtgctgctgctgtccctggtcatcaccctgtactgcaaccaccggaacaggcggagagtgtgcaagtgccctagacctgtggtcaagagcggcgacaagcctagcctgagcgccagatatgtt

SEQ ID NO: 2828 - DNA, 2460 bp, synthetic construct
  source 1..2460: mol_type = other DNA
atggccttaccagtgaccgccttgctcctgccgctggccttgctgctccacgccgccaggccggaattcagcagatacctggtcaagcggaccggcgagaaggtgttcctggaatgcgtgcaggacatggaccacgaaaacatgttctggtacagacaggaccccggcctgggcctgagactgatctacttcagctacgacgtgaagatgaaggaaaagggcgacatccccgagggctacagcgtgtccagagagaagaaagagcggttcagcctgatcctggaaagcgccagcaccaaccagaccagcatgtacctgtgcgccagcagcttttggggcagaagcaccgacacacagtatttcggccctggcaccagactgacagttctcgaggacctgaagaacgtgttcccacctgaggtggccgtgttcgagcctagcgaggccgagatcagccacacccagaaagccaccctcgtgtgcctggctaccggcttctaccccgaccatgtggaactgtcttggtgggtcaacggcaaagaggtgcacagcggcgtgtctaccgacccccagccactgaaagaacagcccgccctgaacgacagccggtactgcctgagcagcagactgagagtgtccgccaccttctggcagaacccccggaaccacttcagatgccaggtgcagttctacggcctgagcgagaacgacgagtggacccaggacagagccaagcccgtgacccagatcgtgtctgccgaagcctggggcagagccgattgcggatcccagagcttcggcctgctggaccccaagctgtgctacctgctggatggcatcctgttcatctacggcgtgatcctgaccgccctgttcctgagagtgaagttcagcagaagcgccgacgcccctgcctaccagcagggacagaaccaactgtacaacgagctgaacctgggcagacgggaagagtacgacgtgctggacaagcggagaggcagggaccctgagatgggcggaaagccccagcggagaaagaacccccaggaaggactgtataacgaactccagaaagacaagatggccgaagcctacagcgagatcggcatgaagggcgagcggagaagaggcaagggccacgatggcctgtaccagggcctgagcaccgccaccaaggacacctatgacgccctgcacatgcaggccctgcctccaagaagggccaagcgatctggatctggagcaacaaacttctcactactcaaacaagcaggtgacgtggaggagaatcccgggcctactagtatggactggatttggcgcatccttttccttgtcggcgctgctaccggcgcgcattccttcgaaaagcaagaagtgacccagattcctgccgctctgtctgtgcctgagggcgagaatctggtgctgaactgctccttcaccgacagcgccatctacaacctccagtggttcaggcaggaccctggcaagggactgacaagcctgctgctgattcagagcagccagagagagcagaccagcggcagactgaatgccagcctggataagtccagcggaagaagcaccctgtatatcgccgcttctcagcctggcgatagcgccacatatctgtgtgccgtgcgggaaacaagcggctccaggctgacttttggcgagggcacacagctgaccgtgaatcccgatacgcgtgcctctacaaagggaccctccgtgtttcctctggctcccagcagcaagtctacaagcggaggaacagccgctctgggctgcctggtcaaggattactttcccgagcctgtgaccgtgtcctggaatagcggagcactgacaagcggcgtgcacacctttccagccgtgctgcaaagcagcggcctgtactctctgagcagcgtggtcacagtgcctagctctagcctgggcacccagacctacatctgcaatgtgaaccacaagcctagcaacaccaaggtggacaagagagtggaacccaagagctgtggtacccagagttttgggttgttggaccctaaattgagctatctgttggacggaatcctgttcatttacggagtgatcctgaccgcattgttcctgcgggttaagttttccagatccgcagacgcacccgcttaccaacaagggcagaaccaactctacaatgaacttaatttggggcggagggaagagtacgacgttctggacaaaaggaggggacgagatcccgagatgggcggaaagcctcagcgaaggaagaatccgcaagaggggctttataacgaactccagaaagataaaatggcagaagcctatagtgagattgggatgaagggagaaaggaggaggggtaaaggtcacgatgggttgtaccaaggattgagcacagccactaaagatacctatgatgcgctccacatgcaggccctgccgccaagataa

SEQ ID NO: 2829 - DNA, 2433 bp, synthetic construct
  source 1..2433: mol_type = other DNA
atggccttaccagtgaccgccttgctcctgccgctggccttgctgctccacgccgccaggccggaattcagcagatacctggtcaagcggaccggcgagaaggtgttcctggaatgcgtgcaggacatggaccacgaaaacatgttctggtacagacaggaccccggcctgggcctgagactgatctacttcagctacgacgtgaagatgaaggaaaagggcgacatccccgagggctacagcgtgtccagagagaagaaagagcggttcagcctgatcctggaaagcgccagcaccaaccagaccagcatgtacctgtgcgccagcagcttttggggcagaagcaccgacacacagtatttcggccctggcaccagactgacagttctcgaggacctgaagaacgtgttcccacctgaggtggccgtgttcgagcctagcgaggccgagatcagccacacccagaaagccaccctcgtgtgcctggctaccggcttctaccccgaccatgtggaactgtcttggtgggtcaacggcaaagaggtgcacagcggcgtgtctaccgacccccagccactgaaagaacagcccgccctgaacgacagccggtactgcctgagcagcagactgagagtgtccgccaccttctggcagaacccccggaaccacttcagatgccaggtgcagttctacggcctgagcgagaacgacgagtggacccaggacagagccaagcccgtgacccagatcgtgtctgccgaagcctggggcagagccgattgcggatcccagagcttcggcctgctggaccccaagctgtgctacctgctggatggcatcctgttcatctacggcgtgatcctgaccgccctgttcctgagagtgaagttcagcagaagcgccgacgcccctgcctaccagcagggacagaaccaactgtacaacgagctgaacctgggcagacgggaagagtacgacgtgctggacaagcggagaggcagggaccctgagatgggcggaaagccccagcggagaaagaacccccaggaaggactgtataacgaactccagaaagacaagatggccgaagcctacagcgagatcggcatgaagggcgagcggagaagaggcaagggccacgatggcctgtaccagggcctgagcaccgccaccaaggacacctatgacgccctgcacatgcaggccctgcctccaagaagggccaagcgatctggatctggagcaacaaacttctcactactcaaacaagcaggtgacgtggaggagaatcccgggcctactagtatggactggatttggcgcatccttttccttgtcggcgctgctaccggcgcgcattccttcgaaaagcaagaagtgacccagattcctgccgctctgtctgtgcctgagggcgagaatctggtgctgaactgctccttcaccgacagcgccatctacaacctccagtggttcaggcaggaccctggcaagggactgacaagcctgctgctgattcagagcagccagagagagcagaccagcggcagactgaatgccagcctggataagtccagcggaagaagcaccctgtatatcgccgcttctcagcctggcgatagcgccacatatctgtgtgccgtgcgggaaacaagcggctccaggctgacttttggcgagggcacacagctgaccgtgaatcccgatacgcgtatccagaaccctgatcctgccgtgtaccagctgcgggatagcaagagcagcgacaagagcgtgtgtctgttcaccgacttcgacagccagaccaacgtgtcccagagcaaggactccgacgtgtacatcaccgataagaccgtgctggacatgcggagcatggacttcaagagcaactccgccgtggcctggtccaacaagtccgatttcgcctgcgccaacgccttcaacaacagcattatccccgaggacacattcttcccaagccccgagagcagctgcggtacccagagttttgggttgttggaccctaaattgagctatctgttggacggaatcctgttcatttacggagtgatcctgaccgcattgttcctgcgggttaagttttccagatccgcagacgcacccgcttaccaacaagggcagaaccaactctacaatgaacttaatttggggcggagggaagagtacgacgttctggacaaaaggaggggacgagatcccgagatgggcggaaagcctcagcgaaggaagaatccgcaagaggggctttataacgaactccagaaagataaaatggcagaagcctatagtgagattgggatgaagggagaaaggaggaggggtaaaggtcacgatgggttgtaccaaggattgagcacagccactaaagatacctatgatgcgctccacatgcaggccctgccgccaagataa

SEQ ID NO: 2830 - DNA, 2940 bp, synthetic construct
  source 1..2940: mol_type = other DNA
atggccttaccagtgaccgccttgctcctgccgctggccttgctgctccacgccgccaggccggaattcagcagatacctggtcaagcggaccggcgagaaggtgttcctggaatgcgtgcaggacatggaccacgaaaacatgttctggtacagacaggaccccggcctgggcctgagactgatctacttcagctacgacgtgaagatgaaggaaaagggcgacatccccgagggctacagcgtgtccagagagaagaaagagcggttcagcctgatcctggaaagcgccagcaccaaccagaccagcatgtacctgtgcgccagcagcttttggggcagaagcaccgacacacagtatttcggccctggcaccagactgacagttctcgagggacagcctaaggccaatcctaccgtgacactgttccctccaagcagcgaagaactccaggccaacaaggccacacttgtgtgcctgatctccgacttctaccctggggctgtgacagtggcttggaaggccgatggatctcctgtgaaagccggcgtggaaaccaccaagccatccaagcagagcaacaacaaatacgccgccagctcctacctgagcctgacacctgagcagtggaagtcccacagatcctacagctgccaagtgacccacgaaggcagcaccgtggaaaagacagtggcccctacagagtgcagcggatccctgggagagcctcagctgtgctatatcctggacgccatcctgtttctgtacggcatcgtgctgaccctgctgtactgccggctgaagatccaagtgcggaaggccgccatcaccagctacgagaaatccgacggcgtgtacaccggcctgagcaccagaaatcaagagacatacgagacactgaagcacgaaaagcctccacaaagggccaagcgatctggatctggagcaacaaacttctcactactcaaacaagcaggtgacgtggaggagaatcccgggcctactagtatggactggatttggcgcatccttttccttgtcggcgctgctaccggcgcgcattccttcgaaaagcaagaagtgacccagattcctgccgctctgtctgtgcctgagggcgagaatctggtgctgaactgctccttcaccgacagcgccatctacaacctccagtggttcaggcaggaccctggcaagggactgacaagcctgctgctgattcagagcagccagagagagcagaccagcggcagactgaatgccagcctggataagtccagcggaagaagcaccctgtatatcgccgcttctcagcctggcgatagcgccacatatctgtgtgccgtgcgggaaacaagcggctccaggctgacttttggcgagggcacacagctgaccgtgaatcccgatacgcgtatccagaaccctgatcctgccgtgtaccagctgcgggatagcaagagcagcgacaagagcgtgtgtctgttcaccgacttcgacagccagaccaacgtgtcccagagcaaggactccgacgtgtacatcaccgataagaccgtgctggacatgcggagcatggacttcaagagcaactccgccgtggcctggtccaacaagtccgatttcgcctgcgccaacgccttcaacaacagcattatccccgaggacacattcttcccaagccccgagagcagctgcggtacccagagttttgggttgttggaccctaaattgtgctatctgttggacggaatcctgttcatttacggagtgatcctgaccgcattgttcctgcgggttaagttttccagatccgcagacgcacccgcttaccaacaagggcagaaccaactctacaatgaacttaatttggggcggagggaagagtacgacgttctggacaaaaggaggggacgagatcccgagatgggcggaaagcctcagcgaaggaagaatccgcaagaggggctttataacgaactccagaaagataaaatggcagaagcctatagtgagattgggatgaagggagaaaggaggaggggtaaaggtcacgatgggttgtaccaaggattgagcacagccactaaagatacctatgatgcgctccacatgcaggccctgccgccaagacgcgccaagagaagcggatctggcgtgaagcagaccctgaatttcgacctgctgaagctggctggcgacgtggaatccaacccaggcccttctagaggccatatggctctgcctgtgacagctctgctgctgcctctggcactgctgcttcatgctgctagacctagccagtttagagtgtcccctctggacagaacctggaacctgggcgagacagtggaactgaagtgccaggtgctgctgagcaaccctacaagcggctgctcctggctgtttcagcctagaggtgcagccgcctctcctacctttctgctgtacctgagccagaacaagcccaaggccgccgaaggactggacacccagagattcagcggcaagagactgggcgacaccttcgtgctgaccctgagcgacttcagaagagagaacgagggctactacttctgtagcgccctgagcaacagcatcatgtacttcagccacttcgtgcccgtgtttctgcccgccaagcctacaacaacccctgctcctagacctcctacaccagctcctacaatcgccagccagcctctgtctctcagacccgaagcctgtagacctgctgctggcggagctgtgcataccagaggactggatttcgcctgcgacatctacatctgggctcctctggctggcacatgtggcgtgctgctgctgtccctggtcatcaccctgtactgcaaccaccggaacaggcggagagtgtgcaagtgccctagacctgtggtcaagagcggcgacaagcctagcctgagcgccagatatgtt

SEQ ID NO: 2831 - DNA, 2235 bp, synthetic construct
  source 1..2235: mol_type = other DNA
atggccttaccagtgaccgccttgctcctgccgctggccttgctgctccacgccgccaggccggaattcagcagatacctggtcaagcggaccggcgagaaggtgttcctggaatgcgtgcaggacatggaccacgaaaacatgttctggtacagacaggaccccggcctgggcctgagactgatctacttcagctacgacgtgaagatgaaggaaaagggcgacatccccgagggctacagcgtgtccagagagaagaaagagcggttcagcctgatcctggaaagcgccagcaccaaccagaccagcatgtacctgtgcgccagcagcttttggggcagaagcaccgacacacagtatttcggccctggcaccagactgacagttctcgaggacctgaagaacgtgttcccacctgaggtggccgtgttcgagcctagcgaggccgagatcagccacacccagaaagccaccctcgtgtgcctggctaccggcttctaccccgaccatgtggaactgtcttggtgggtcaacggcaaagaggtgcacagcggcgtgtctaccgacccccagccactgaaagaacagcccgccctgaacgacagccggtactgcctgagcagcagactgagagtgtccgccaccttctggcagaacccccggaaccacttcagatgccaggtgcagttctacggcctgagcgagaacgacgagtggacccaggacagagccaagcccgtgacccagatcgtgtctgccgaagcctggggcagagccgattgcggatcccagagcttcggcctgctggaccccaagctgtgctacctgctggatggcatcctgttcatctacggcgtgatcctgaccgccctgttcctgagagtgaagttcagcagaagcgccgacgcccctgcctaccagcagggacagaaccaactgtacaacgagctgaacctgggcagacgggaagagtacgacgtgctggacaagcggagaggcagggaccctgagatgggcggaaagccccagcggagaaagaacccccaggaaggactgtataacgaactccagaaagacaagatggccgaagcctacagcgagatcggcatgaagggcgagcggagaagaggcaagggccacgatggcctgtaccagggcctgagcaccgccaccaaggacacctatgacgccctgcacatgcaggccctgcctccaagaagggccaagcgatctggatctggagcaacaaacttctcactactcaaacaagcaggtgacgtggaggagaatcccgggcctactagtatggactggatttggcgcatccttttccttgtcggcgctgctaccggcgcgcattccttcgaaaagcaagaagtgacccagattcctgccgctctgtctgtgcctgagggcgagaatctggtgctgaactgctccttcaccgacagcgccatctacaacctccagtggttcaggcaggaccctggcaagggactgacaagcctgctgctgattcagagcagccagagagagcagaccagcggcagactgaatgccagcctggataagtccagcggaagaagcaccctgtatatcgccgcttctcagcctggcgatagcgccacatatctgtgtgccgtgcgggaaacaagcggctccaggctgacttttggcgagggcacacagctgaccgtgaatcccgatacgcgtgcctctacaaagggaccctccgtgtttcctctggctcccagcagcaagtctacaagcggaggaacagccgctctgggctgcctggtcaaggattactttcccgagcctgtgaccgtgtcctggaatagcggagcactgacaagcggcgtgcacacctttccagccgtgctgcaaagcagcggcctgtactctctgagcagcgtggtcacagtgcctagctctagcctgggcacccagacctacatctgcaatgtgaaccacaagcctagcaacaccaaggtggacaagagagtggaacccaagagctgtggtaccctcggagaaccacagctctgttacattctggatgctatcctgttcctctatgggatcgtcctgacactcctgtattgcagactcaaaattcaagttcgcaaagccgccattacctcttacgagaagagtgatggggtgtacacaggactgtctacccggaatcaagaaacctacgaaaccctcaaacatgagaagccacctcagtaa

SEQ ID NO: 2832 - DNA, 2235 bp, synthetic construct; identical to SEQ ID NO: 2831
  source 1..2235: mol_type = other DNA

SEQ ID NO: 2833 - DNA, 2208 bp, synthetic construct
  source 1..2208: mol_type = other DNA
atggccttaccagtgaccgccttgctcctgccgctggccttgctgctccacgccgccaggccggaattcagcagatacctggtcaagcggaccggcgagaaggtgttcctggaatgcgtgcaggacatggaccacgaaaacatgttctggtacagacaggaccccggcctgggcctgagactgatctacttcagctacgacgtgaagatgaaggaaaagggcgacatccccgagggctacagcgtgtccagagagaagaaagagcggttcagcctgatcctggaaagcgccagcaccaaccagaccagcatgtacctgtgcgccagcagcttttggggcagaagcaccgacacacagtatttcggccctggcaccagactgacagttctcgaggacctgaagaacgtgttcccacctgaggtggccgtgttcgagcctagcgaggccgagatcagccacacccagaaagccaccctcgtgtgcctggctaccggcttctaccccgaccatgtggaactgtcttggtgggtcaacggcaaagaggtgcacagcggcgtgtctaccgacccccagccactgaaagaacagcccgccctgaacgacagccggtactgcctgagcagcagactgagagtgtccgccaccttctggcagaacccccggaaccacttcagatgccaggtgcagttctacggcctgagcgagaacgacgagtggacccaggacagagccaagcccgtgacccagatcgtgtctgccgaagcctggggcagagccgattgcggatcccagagcttcggcctgctggaccccaagctgtgctacctgctggatggcatcctgttcatctacggcgtgatcctgaccgccctgttcctgagagtgaagttcagcagaagcgccgacgcccctgcctaccagcagggacagaaccaactgtacaacgagctgaacctgggcagacgggaagagtacgacgtgctggacaagcggagaggcagggaccctgagatgggcggaaagccccagcggagaaagaacccccaggaaggactgtataacgaactccagaaagacaagatggccgaagcctacagcgagatcggcatgaagggcgagcggagaagaggcaagggccacgatggcctgtaccagggcctgagcaccgccaccaaggacacctatgacgccctgcacatgcaggccctgcctccaagaagggccaagcgatctggatctggagcaacaaacttctcactactcaaacaagcaggtgacgtggaggagaatcccgggcctactagtatggactggatttggcgcatccttttccttgtcggcgctgctaccggcgcgcattccttcgaaaagcaagaagtgacccagattcctgccgctctgtctgtgcctgagggcgagaatctggtgctgaactgctccttcaccgacagcgccatctacaacctccagtggttcaggcaggaccctggcaagggactgacaagcctgctgctgattcagagcagccagagagagcagaccagcggcagactgaatgccagcctggataagtccagcggaagaagcaccctgtatatcgccgcttctcagcctggcgatagcgccacatatctgtgtgccgtgcgggaaacaagcggctccaggctgacttttggcgagggcacacagctgaccgtgaatcccgatacgcgtatccagaaccctgatcctgccgtgtaccagctgcgggatagcaagagcagcgacaagagcgtgtgtctgttcaccgacttcgacagccagaccaacgtgtcccagagcaaggactccgacgtgtacatcaccgataagaccgtgctggacatgcggagcatggacttcaagagcaactccgccgtggcctggtccaacaagtccgatttcgcctgcgccaacgccttcaacaacagcattatccccgaggacacattcttcccaagccccgagagcagctgcggtaccctcggagaaccacagctctgttacattctggatgctatcctgttcctctatgggatcgtcctgacactcctgtattgcagactcaaaattcaagttcgcaaagccgccattacctcttacgagaagagtgatggggtgtacacaggactgtctacccggaatcaagaaacctacgaaaccctcaaacatgagaagccacctcagtaa

SEQ ID NO: 2834 - DNA, 2952 bp, synthetic construct
  source 1..2952: mol_type = other DNA
atggccttaccagtgaccgccttgctcctgccgctggccttgctgctccacgccgccaggccggaattcagcagatacctggtcaagcggaccggcgagaaggtgttcctggaatgcgtgcaggacatggaccacgaaaacatgttctggtacagacaggaccccggcctgggcctgagactgatctacttcagctacgacgtgaagatgaaggaaaagggcgacatccccgagggctacagcgtgtccagagagaagaaagagcggttcagcctgatcctggaaagcgccagcaccaaccagaccagcatgtacctgtgcgccagcagcttttggggcagaagcaccgacacacagtatttcggccctggcaccagactgacagttctcgagggacagcctaaggccaatcctaccgtgacactgttccctccaagcagcgaagaactccaggccaacaaggccacacttgtgtgcctgatctccgacttctaccctggggctgtgacagtggcttggaaggccgatggatctcctgtgaaagccggcgtggaaaccaccaagccatccaagcagagcaacaacaaatacgccgccagctcctacctgagcctgacacctgagcagtggaagtcccacagatcctacagctgccaagtgacccacgaaggcagcaccgtggaaaagacagtggcccctacagagtgcagcacaacacctggcgagagaagtagcctgcctgccttctatcctggcaccagcggctcttgttctggctgtggatctctgagcctgcctctgctggctggactggttgctgctgatgctgtggcctctctgctgattgtgggagccgtgttcctgtgcgccagacctagaagaagccccgctcaagaggacggcaaggtgtacatcaacatgcccggcagaggaagggccaagcgatctggatctggagcaacaaacttctcactactcaaacaagcaggtgacgtggaggagaatcccgggcctactagtatggactggatttggcgcatccttttccttgtcggcgctgctaccggcgcgcattccttcgaaaagcaagaagtgacccagattcctgccgctctgtctgtgcctgagggcgagaatctggtgctgaactgctccttcaccgacagcgccatctacaacctccagtggttcaggcaggaccctggcaagggactgacaagcctgctgctgattcagagcagccagagagagcagaccagcggcagactgaatgccagcctggataagtccagcggaagaagcaccctgtatatcgccgcttctcagcctggcgatagcgccacatatctgtgtgccgtgcgggaaacaagcggctccaggctgacttttggcgagggcacacagctgaccgtgaatcccgatacgcgtatccagaaccctgatcctgccgtgtaccagctgcgggatagcaagagcagcgacaagagcgtgtgtctgttcaccgacttcgacagccagaccaacgtgtcccagagcaaggactccgacgtgtacatcaccgataagaccgtgctggacatgcggagcatggacttcaagagcaactccgccgtggcctggtccaacaagtccgatttcgcctgcgccaacgccttcaacaacagcattatccccgaggacacattcttcccaagccccgagagcagctgcggtacccagagttttgggttgttggaccctaaattgtgctatctgttggacggaatcctgttcatttacggagtgatcctgaccgcattgttcctgcgggttaagttttccagatccgcagacgcacccgcttaccaacaagggcagaaccaactctacaatgaacttaatttggggcggagggaagagtacgacgttctggacaaaaggaggggacgagatcccgagatgggcggaaagcctcagcgaaggaagaatccgcaagaggggctttataacgaactccagaaagataaaatggcagaagcctatagtgagattgggatgaagggagaaaggaggaggggtaaaggtcacgatgggttgtaccaaggattgagcacagccactaaagatacctatgatgcgctccacatgcaggccctgccgccaagacgcgccaagagaagcggatctggcgtgaagcagaccctgaatttcgacctgctgaagctggctggcgacgtggaatccaacccaggcccttctagaggccatatggctctgcctgtgacagctctgctgctgcctctggcactgctgcttcatgctgctagacctagccagtttagagtgtcccctctggacagaacctggaacctgggcgagacagtggaactgaagtgccaggtgctgctgagcaaccctacaagcggctgctcctggctgtttcagcctagaggtgcagccgcctctcctacctttctgctgtacctgagccagaacaagcccaaggccgccgaaggactggacacccagagattcagcggcaagagactgggcgacaccttcgtgctgaccctgagcgacttcagaagagagaacgagggctactacttctgtagcgccctgagcaacagcatcatgtacttcagccacttcgtgcccgtgtttctgcccgccaagcctacaacaacccctgctcctagacctcctacaccagctcctacaatcgccagccagcctctgtctctcagacccgaagcctgtagacctgctgctggcggagctgtgcataccagaggactggatttcgcctgcgacatctacatctgggctcctctggctggcacatgtggcgtgctgctgctgtccctggtcatcaccctgtactgcaaccaccggaacaggcggagagtgtgcaagtgccctagacctgtggtcaagagcggcgacaagcctagcctgagcgccagatatgtt

SEQ ID NO: 2835 - DNA, 3051 bp, synthetic construct
  source 1..3051: mol_type = other DNA
atggccttaccagtgaccgccttgctcctgccgctggccttgctgctccacgccgccaggccggaattcagcagatacctggtcaagcggaccggcgagaaggtgttcctggaatgcgtgcaggacatggaccacgaaaacatgttctggtacagacaggaccccggcctgggcctgagactgatctacttcagctacgacgtgaagatgaaggaaaagggcgacatccccgagggctacagcgtgtccagagagaagaaagagcggttcagcctgatcctggaaagcgccagcaccaaccagaccagcatgtacctgtgcgccagcagcttttggggcagaagcaccgacacacagtatttcggccctggcaccagactgacagttctcgaggacctgaagaacgtgttcccacctgaggtggccgtgttcgagcctagcgaggccgagatcagccacacccagaaagccaccctcgtgtgcctggctaccggcttctaccccgaccatgtggaactgtcttggtgggtcaacggcaaagaggtgcacagcggcgtgtctaccgacccccagccactgaaagaacagcccgccctgaacgacagccggtactgcctgagcagcagactgagagtgtccgccaccttctggcagaacccccggaaccacttcagatgccaggtgcagttctacggcctgagcgagaacgacgagtggacccaggacagagccaagcccgtgacccagatcgtgtctgccgaagcctggggcagagccgattgcggatcccagagcttcggcctgctggaccccaagctgtgctacctgctggatggcatcctgttcatctacggcgtgatcctgaccgccctgttcctgagagtgaagttcagcagaagcgccgacgcccctgcctaccagcagggacagaaccaactgtacaacgagctgaacctgggcagacgggaagagtacgacgtgctggacaagcggagaggcagggaccctgagatgggcggaaagccccagcggagaaagaacccccaggaaggactgtataacgaactccagaaagacaagatggccgaagcctacagcgagatcggcatgaagggcgagcggagaagaggcaagggccacgatggcctgtaccagggcctgagcaccgccaccaaggacacctatgacgccctgcacatgcaggccctgcctccaagaagggccaagcgatctggatctggagcaacaaacttctcactactcaaacaagcaggtgacgtggaggagaatcccgggcctactagtatggactggatttggcgcatccttttccttgtcggcgctgctaccggcgcgcattccttcgaaaagcaagaagtgacccagattcctgccgctctgtctgtgcctgagggcgagaatctggtgctgaactgctccttcaccgacagcgccatctacaacctccagtggttcaggcaggaccctggcaagggactgacaagcctgctgctgattcagagcagccagagagagcagaccagcggcagactgaatgccagcctggataagtccagcggaagaagcaccctgtatatcgccgcttctcagcctggcgatagcgccacatatctgtgtgccgtgcgggaaacaagcggctccaggctgacttttggcgagggcacacagctgaccgtgaatcccgatacgcgtgcctctacaaagggaccctccgtgtttcctctggctcccagcagcaagtctacaagcggaggaacagccgctctgggctgcctggtcaaggattactttcccgagcctgtgaccgtgtcctggaatagcggagcactgacaagcggcgtgcacacctttccagccgtgctgcaaagcagcggcctgtactctctgagcagcgtggtcacagtgcctagctctagcctgggcacccagacctacatctgcaatgtgaaccacaagcctagcaacaccaaggtggacaagagagtggaacccaagagctgtacaacgccgggcgaaaggagttccttgccggccttttaccccggcacaagcggaagctgtagtgggtgtggaagcctcagcctcccacttcttgcgggcctcgtcgcggcagatgcagtagcttcacttcttattgtaggcgcggtatttctctgtgctcgaccaaggaggtcacccgctcaggaggatggtaaggtgtatataaatatgccaggacgcggacgcgccaagagaagcggatctggcgtgaagcagaccctgaatttcgacctgctgaagctggctggcgacgtggaatccaacccaggcccttctagaggccatatggctctgcctgtgacagctctgctgctgcctctggcactgctgcttcatgctgctagacctagccagtttagagtgtcccctctggacagaacctggaacctgggcgagacagtggaactgaagtgccaggtgctgctgagcaaccctacaagcggctgctcctggctgtttcagcctagaggtgcagccgcctctcctacctttctgctgtacctgagccagaacaagcccaaggccgccgaaggactggacacccagagattcagcggcaagagactgggcgacaccttcgtgctgaccctgagcgacttcagaagagagaacgagggctactacttctgtagcgccctgagcaacagcatcatgtacttcagccacttcgtgcccgtgtttctgcccgccaagcctacaacaacccctgctcctagacctcctacaccagctcctacaatcgccagccagcctctgtctctcagacccgaagcctgtagacctgctgctggcggagctgtgcataccagaggactggatttcgcctgcgacatctacatctgggctcctctggctggcacatgtggcgtgctgctgctgtccctggtcatcaccctgtactgcaaccaccggaacaggcggagagtgtgcaagtgccctagacctgtggtcaagagcggcgacaagcctagcctgagcgccagatatgtt

SEQ ID NO: 2836 - DNA, 2787 bp, synthetic construct
  source 1..2787: mol_type = other DNA
atggccttaccagtgaccgccttgctcctgccgctggccttgctgctccacgccgccaggccgagcagatacctggtcaagcggaccggcgagaaggtgttcctggaatgcgtgcaggacatggaccacgaaaacatgttctggtacagacaggaccccggcctgggcctgagactgatctacttcagctacgacgtgaagatgaaggaaaagggcgacatccccgagggctacagcgtgtccagagagaagaaagagcggttcagcctgatcctggaaagcgccagcaccaaccagaccagcatgtacctgtgcgccagcagcttttggggcagaagcaccgacacacagtatttcggccctggcaccagactgacagttctcgagctgtgggtttcacagcctccagagatcagaaccctggaaggcagcagcgccttcctgccttgcagcttcaatgcctctcagggcagactggctatcggcagcgtgacctggttcagagatgaggtggtgcccggcaaagaagtgcggaacggcacccctgagtttagaggaaggctggcccctctggcctccagcagatttctgcacgatcaccaggccgagctgcacatcagagatgtgcgaggacacgacgccagcatctacgtgtgcagagtggaagtgctcggcctcggagttggcacaggcaatggaacaagactggtggtggaaaaagagcaccctcagctcggagccggaacagtgctgcttctgagagccggcttttacgccgtgtcctttctgtctgtggccgtgggcagcaccgtgtactatcagggcaagtgcctgacctggaagggacctagaaggcaactgcctgctgtggtgcctgctcctttgcctcctccatgtggaagctctgcccatctgctgccacctgttccaggcggaagggccaagcgatctggatctggagcaacaaacttctcactactcaaacaagcaggtgacgtggaggagaatcccgggcctactagtatggactggatttggcgcatccttttccttgtcggcgctgctaccggcgcgcattccttcgaaaagcaagaagtgacccagattcctgccgctctgtctgtgcctgagggcgagaatctggtgctgaactgctccttcaccgacagcgccatctacaacctccagtggttcaggcaggaccctggcaagggactgacaagcctgctgctgattcagagcagccagagagagcagaccagcggcagactgaatgccagcctggataagtccagcggaagaagcaccctgtatatcgccgcttctcagcctggcgatagcgccacatatctgtgtgccgtgcgggaaacaagcggctccaggctgacttttggcgagggcacacagctgaccgtgaatcccgatacgcgtctgtgggtgtcccagccacctgaaattcggacactggaaggctcctccgcctttctgccctgtagctttaacgccagccaggggagactcgccatcggctctgtgacatggttccgggatgaagtcgtccctggaaaagaagttcgcaacggaacaccagagttcagaggcagactcgccccactggcaagctccagattcctgcatgaccatcaggctgaactgcacattagggacgtgcggggccacgatgcctccatctatgtgtgtcgggtcgaagtgcttggactcggcgtcggaactggaaacggcactaggctggtggtcgagaaagaacatccacagcttggcgctggcaccgtcctgttgcttagagccggattctatgccgtcagcttcctgtccgtggctgtggggtctacagtgtattaccagggaaaatgtctcacctggaaaggccccagacgccagcttccagctgttgttcctgctccactgccaccaccttgtggctcctctgctcacttgcttccaccagtgcctggcggacgcgccaagagaagcggatctggcgtgaagcagaccctgaatttcgacctgctgaagctggctggcgacgtggaatccaacccaggcccttctagaggccatatggctctgcctgtgacagctctgctgctgcctctggcactgctgcttcatgctgctagacctagccagtttagagtgtcccctctggacagaacctggaacctgggcgagacagtggaactgaagtgccaggtgctgctgagcaaccctacaagcggctgctcctggctgtttcagcctagaggtgcagccgcctctcctacctttctgctgtacctgagccagaacaagcccaaggccgccgaaggactggacacccagagattcagcggcaagagactgggcgacaccttcgtgctgaccctgagcgacttcagaagagagaacgagggctactacttctgtagcgccctgagcaacagcatcatgtacttcagccacttcgtgcccgtgtttctgcccgccaagcctacaacaacccctgctcctagacctcctacaccagctcctacaatcgccagccagcctctgtctctcagacccgaagcctgtagacctgctgctggcggagctgtgcataccagaggactggatttcgcctgcgacatctacatctgggctcctctggctggcacatgtggcgtgctgctgctgtccctggtcatcaccctgtactgcaaccaccggaacaggcggagagtgtgcaagtgccctagacctgtggtcaagagcggcgacaagcctagcctgagcgccagatatgtt

SEQ ID NO: 2837 - DNA, 3192 bp, synthetic construct
  source 1..3192: mol_type = other DNA
atggccttaccagtgaccgccttgctcctgccgctggccttgctgctccacgccgccaggccggaattcagcagatacctggtcaagcggaccggcgagaaggtgttcctggaatgcgtgcaggacatggaccacgaaaacatgttctggtacagacaggaccccggcctgggcctgagactgatctacttcagctacgacgtgaagatgaaggaaaagggcgacatccccgagggctacagcgtgtccagagagaagaaagagcggttcagcctgatcctggaaagcgccagcaccaaccagaccagcatgtacctgtgcgccagcagcttttggggcagaagcaccgacacacagtatttcggccctggcaccagactgacagttctcgagggacagcctaaggccaatcctaccgtgacactgttccctccaagcagcgaagaactccaggccaacaaggccacacttgtgtgcctgatctccgacttctaccctggggctgtgacagtggcttggaaggccgatggatctcctgtgaaagccggcgtggaaaccaccaagccatccaagcagagcaacaacaaatacgccgccagctcctacctgagcctgacacctgagcagtggaagtcccacagatcctacagctgccaagtgacccacgaaggcagcaccgtggaaaagacagtggcccctacagagtgcagcggatcccagagcttcggcctgctggaccccaagctgtgctacctgctggatggcatcctgttcatctacggcgtgatcctgaccgccctgttcctgagagtgaagttcagcagaagcgccgacgcccctgcctaccagcagggacagaaccaactgtacaacgagctgaacctgggcagacgggaagagtacgacgtgctggacaagcggagaggcagggaccctgagatgggcggaaagccccagcggagaaagaacccccaggaaggactgtataacgaactccagaaagacaagatggccgaagcctacagcgagatcggcatgaagggcgagcggagaagaggcaagggccacgatggcctgtaccagggcctgagcaccgccaccaaggacacctatgacgccctgcacatgcaggccctgcctccaagaagggccaagcgatctggatctggagcaacaaacttctcactactcaaacaagcaggtgacgtggaggagaatcccgggcctactagtatggactggatttggcgcatccttttccttgtcggcgctgctaccggcgcgcattccttcgaaaagcaagaagtgacccagattcctgccgctctgtctgtgcctgagggcgagaatctggtgctgaactgctccttcaccgacagcgccatctacaacctccagtggttcaggcaggaccctggcaagggactgacaagcctgctgctgattcagagcagccagagagagcagaccagcggcagactgaatgccagcctggataagtccagcggaagaagcaccctgtatatcgccgcttctcagcctggcgatagcgccacatatctgtgtgccgtgcgggaaacaagcggctccaggctgacttttggcgagggcacacagctgaccgtgaatcccgatacgcgtgcctctacaaagggaccctccgtgtttcctctggctcccagcagcaagtctacaagcggaggaacagccgctctgggctgcctggtcaaggattactttcccgagcctgtgaccgtgtcctggaatagcggagcactgacaagcggcgtgcacacctttccagccgtgctgcaaagcagcggcctgtactctctgagcagcgtggtcacagtgcctagctctagcctgggcacccagacctacatctgcaatgtgaaccacaagcctagcaacaccaaggtggacaagagagtggaacccaagagctgtggtacccagagttttgggttgttggaccctaaattgtgctatctgttggacggaatcctgttcatttacggagtgatcctgaccgcattgttcctgcgggttaagttttccagatccgcagacgcacccgcttaccaacaagggcagaaccaactctacaatgaacttaatttggggcggagggaagagtacgacgttctggacaaaaggaggggacgagatcccgagatgggcggaaagcctcagcgaaggaagaatccgcaagaggggctttataacgaactccagaaagataaaatggcagaagcctatagtgagattgggatgaagggagaaaggaggaggggtaaaggtcacgatgggttgtaccaaggattgagcacagccactaaagatacctatgatgcgctccacatgcaggccctgccgccaagacgcgccaagagaagcggatctggcgtgaagcagaccctgaatttcgacctgctgaagctggctggcgacgtggaatccaacccaggcccttctagaggccatatggctctgcctgtgacagctctgctgctgcctctggcactgctgcttcatgctgctagacctagccagtttagagtgtcccctctggacagaacctggaacctgggcgagacagtggaactgaagtgccaggtgctgctgagcaaccctacaagcggctgctcctggctgtttcagcctagaggtgcagccgcctctcctacctttctgctgtacctgagccagaacaagcccaaggccgccgaaggactggacacccagagattcagcggcaagagactgggcgacaccttcgtgctgaccctgagcgacttcagaagagagaacgagggctactacttctgtagcgccctgagcaacagcatcatgtacttcagccacttcgtgcccgtgtttctgcccgccaagcctacaacaacccctgctcctagacctcctacaccagctcctacaatcgccagccagcctctgtctctcagacccgaagcctgtagacctgctgctggcggagctgtgcataccagaggactggatttcgcctgcgacatctacatctgggctcctctggctggcacatgtggcgtgctgctgctgtccctggtcatcaccctgtactgcaaccaccggaacaggcggagagtgtgcaagtgccctagacctgtggtcaagagcggcgacaagcctagcctgagcgccagatatgtt

SEQ ID NO: 2838 - DNA, 3246 bp, synthetic construct
  source 1..3246: mol_type = other DNA
atggccttaccagtgaccgccttgctcctgccgctggccttgctgctccacgccgccaggccggaattcagcagatacctggtcaagcggaccggcgagaaggtgttcctggaatgcgtgcaggacatggaccacgaaaacatgttctggtacagacaggaccccggcctgggcctgagactgatctacttcagctacgacgtgaagatgaaggaaaagggcgacatccccgagggctacagcgtgtccagagagaagaaagagcggttcagcctgatcctggaaagcgccagcaccaaccagaccagcatgtacctgtgcgccagcagcttttggggcagaagcaccgacacacagtatttcggccctggcaccagactgacagttctcgagggacagcctaaggccaatcctaccgtgacactgttccctccaagcagcgaagaactccaggccaacaaggccacacttgtgtgcctgatctccgacttctaccctggggctgtgacagtggcttggaaggccgatggatctcctgtgaaagccggcgtggaaaccaccaagccatccaagcagagcaacaacaaatacgccgccagctcctacctgagcctgacacctgagcagtggaagtcccacagatcctacagctgccaagtgacccacgaaggcagcaccgtggaaaagacagtggcccctacagagtgcagcggatcccagagcttcggcctgctggaccccaagctgtgctacctgctggatggcatcctgttcatctacggcgtgatcctgaccgccctgttcctgagagtgaagttcagcagaagcgccgacgcccctgcctaccagcagggacagaaccaactgtacaacgagctgaacctgggcagacgggaagagtacgacgtgctggacaagcggagaggcagggaccctgagatgggcggaaagccccagcggagaaagaacccccaggaaggactgtataacgaactccagaaagacaagatggccgaagcctacagcgagatcggcatgaagggcgagcggagaagaggcaagggccacgatggcctgtaccagggcctgagcaccgccaccaaggacacctatgacgccctgcacatgcaggccctgcctccaagaagggccaagcgatctggatctggagcaacaaacttctcactactcaaacaagcaggtgacgtggaggagaatcccgggcctactagtatggactggatttggcgcatccttttccttgtcggcgctgctaccggcgcgcattccttcgaaaagcaagaagtgacccagattcctgccgctctgtctgtgcctgagggcgagaatctggtgctgaactgctccttcaccgacagcgccatctacaacctccagtggttcaggcaggaccctggcaagggactgacaagcctgctgctgattcagagcagccagagagagcagaccagcggcagactgaatgccagcctggataagtccagcggaagaagcaccctgtatatcgccgcttctcagcctggcgatagcgccacatatctgtgtgccgtgcgggaaacaagcggctccaggctgacttttggcgagggcacacagctgaccgtgaatcccgatacgcgtgcgtctcccacttctccgaaagttttccccctttccctctgtagcacacaacctgatggaaatgtggtcatcgcatgtctggtacaaggattctttccacaagagccattgagcgttacatggtcagagagcgggcagggagttaccgctaggaatttcccaccctcacaggatgcgagtggtgatctttataccacatcatcacaactcacgttgccagccactcagtgcctcgctggaaagtcagtaacatgccatgtcaaacattacactaatccctcacaagatgttaccgtgccttgcccagtaccttctacgccgcccaccccgtctccatctactccacccacgccatcacctagtggtacccagagttttgggttgttggaccctaaattgtgctatctgttggacggaatcctgttcatttacggagtgatcctgaccgcattgttcctgcgggttaagttttccagatccgcagacgcacccgcttaccaacaagggcagaaccaactctacaatgaacttaatttggggcggagggaagagtacgacgttctggacaaaaggaggggacgagatcccgagatgggcggaaagcctcagcgaaggaagaatccgcaagaggggctttataacgaactccagaaagataaaatggcagaagcctatagtgagattgggatgaagggagaaaggaggaggggtaaaggtcacgatgggttgtaccaaggattgagcacagccactaaagatacctatgatgcgctccacatgcaggccctgccgccaagacgcgccaagagaagcggatctggcgtgaagcagaccctgaatttcgacctgctgaagctggctggcgacgtggaatccaacccaggcccttctagaggccatatggctctgcctgtgacagctctgctgctgcctctggcactgctgcttcatgctgctagacctagccagtttagagtgtcccctctggacagaacctggaacctgggcgagacagtggaactgaagtgccaggtgctgctgagcaaccctacaagcggctgctcctggctgtttcagcctagaggtgcagccgcctctcctacctttctgctgtacctgagccagaacaagcccaaggccgccgaaggactggacacccagagattcagcggcaagagactgggcgacaccttcgtgctgaccctgagcgacttcagaagagagaacgagggctactacttctgtagcgccctgagcaacagcatcatgtacttcagccacttcgtgcccgtgtttctgcccgccaagcctacaacaacccctgctcctagacctcctacaccagctcctacaatcgccagccagcctctgtctctcagacccgaagcctgtagacctgctgctggcggagctgtgcataccagaggactggatttcgcctgcgacatctacatctgggctcctctggctggcacatgtggcgtgctgctgctgtccctggtcatcaccctgtactgcaaccaccggaacaggcggagagtgtgcaagtgccctagacctgtggtcaagagcggcgacaagcctagcctgagcgccagatatgtt

SEQ ID NO: 2839 - DNA, 3189 bp, synthetic construct
  source 1..3189: mol_type = other DNA
atggccttaccagtgaccgccttgctcctgccgctggccttgctgctccacgccgccaggccggaattcagcagatacctggtcaagcggaccggcgagaaggtgttcctggaatgcgtgcaggacatggaccacgaaaacatgttctggtacagacaggaccccggcctgggcctgagactgatctacttcagctacgacgtgaagatgaaggaaaagggcgacatccccgagggctacagcgtgtccagagagaagaaagagcggttcagcctgatcctggaaagcgccagcaccaaccagaccagcatgtacctgtgcgccagcagcttttggggcagaagcaccgacacacagtatttcggccctggcaccagactgacagttctcgagggacagcctaaggccaatcctaccgtgacactgttccctccaagcagcgaagaactccaggccaacaaggccacacttgtgtgcctgatctccgacttctaccctggggctgtgacagtggcttggaaggccgatggatctcctgtgaaagccggcgtggaaaccaccaagccatccaagcagagcaacaacaaatacgccgccagctcctacctgagcctgacacctgagcagtggaagtcccacagatcctacagctgccaagtgacccacgaaggcagcaccgtggaaaagacagtggcccctacagagtgcagcggatcccagagcttcggcctgctggaccccaagctgtgctacctgctggatggcatcctgttcatctacggcgtgatcctgaccgccctgttcctgagagtgaagttcagcagaagcgccgacgcccctgcctaccagcagggacagaaccaactgtacaacgagctgaacctgggcagacgggaagagtacgacgtgctggacaagcggagaggcagggaccctgagatgggcggaaagccccagcggagaaagaacccccaggaaggactgtataacgaactccagaaagacaagatggccgaagcctacagcgagatcggcatgaagggcgagcggagaagaggcaagggccacgatggcctgtaccagggcctgagcaccgccaccaaggacacctatgacgccctgcacatgcaggccctgcctccaagaagggccaagcgatctggatctggagcaacaaacttctcactactcaaacaagcaggtgacgtggaggagaatcccgggcctactagtatggactggatttggcgcatccttttccttgtcggcgctgctaccggcgcgcattccttcgaaaagcaagaagtgacccagattcctgccgctctgtctgtgcctgagggcgagaatctggtgctgaactgctccttcaccgacagcgccatctacaacctccagtggttcaggcaggaccctggcaagggactgacaagcctgctgctgattcagagcagccagagagagcagaccagcggcagactgaatgccagcctggataagtccagcggaagaagcaccctgtatatcgccgcttctcagcctggcgatagcgccacatatctgtgtgccgtgcgggaaacaagcggctccaggctgacttttggcgagggcacacagctgaccgtgaatcccgatacgcgtgcctccacgaagggaccatctgttttccctcttgccccctgctcacggtcaacgtctgaatccacggcagccctgggctgcctcgttaaggactactttccagagccggtaacagtctcctggaacagtggagcccttacatcaggtgttcacactttccctgccgtcttgcaaagtagcggactgtacagccttagttccgttgttacggttccttctagcaacttcggtacacagacatatacttgtaacgtagatcataagcctagcaacaccaaggtggacaaaaccgtagagagaaagtgtggtacccagagttttgggttgttggaccctaaattgtgctatctgttggacggaatcctgttcatttacggagtgatcctgaccgcattgttcctgcgggttaagttttccagatccgcagacgcacccgcttaccaacaagggcagaaccaactctacaatgaacttaatttggggcggagggaagagtacgacgttctggacaaaaggaggggacgagatcccgagatgggcggaaagcctcagcgaaggaagaatccgcaagaggggctttataacgaactccagaaagataaaatggcagaagcctatagtgagattgggatgaagggagaaaggaggaggggtaaaggtcacgatgggttgtaccaaggattgagcacagccactaaagatacctatgatgcgctccacatgcaggccctgccgccaagacgcgccaagagaagcggatctggcgtgaagcagaccctgaatttcgacctgctgaagctggctggcgacgtggaatccaacccaggcccttctagaggccatatggctctgcctgtgacagctctgctgctgcctctggcactgctgcttcatgctgctagacctagccagtttagagtgtcccctctggacagaacctggaacctgggcgagacagtggaactgaagtgccaggtgctgctgagcaaccctacaagcggctgctcctggctgtttcagcctagaggtgcagccgcctctcctacctttctgctgtacctgagccagaacaagcccaaggccgccgaaggactggacacccagagattcagcggcaagagactgggcgacaccttcgtgctgaccctgagcgacttcagaagagagaacgagggctactacttctgtagcgccctgagcaacagcatcatgtacttcagccacttcgtgcccgtgtttctgcccgccaagcctacaacaacccctgctcctagacctcctacaccagctcctacaatcgccagccagcctctgtctctcagacccgaagcctgtagacctgctgctggcggagctgtgcataccagaggactggatttcgcctgcgacatctacatctgggctcctctggctggcacatgtggcgtgctgctgctgtccctggtcatcaccctgtactgcaaccaccggaacaggcggagagtgtgcaagtgccctagacctgtggtcaagagcggcgacaagcctagcctgagcgccagatatgtt

SEQ ID NO: 2840 - DNA, 3354 bp, synthetic construct
  source 1..3354: mol_type = other DNA
atggccttaccagtgaccgccttgctcctgccgctggccttgctgctccacgccgccaggccgagcagatacctggtcaagcggaccggcgagaaggtgttcctggaatgcgtgcaggacatggaccacgaaaacatgttctggtacagacaggaccccggcctgggcctgagactgatctacttcagctacgacgtgaagatgaaggaaaagggcgacatccccgagggctacagcgtgtccagagagaagaaagagcggttcagcctgatcctggaaagcgccagcaccaaccagaccagcatgtacctgtgcgccagcagcttttggggcagaagcaccgacacacagtatttcggccctggcaccagactgacagttctcgagggacagcctaaggccaatcctaccgtgacactgttccctccaagcagcgaagaactccaggccaacaaggccacacttgtgtgcctgatctccgacttctaccctggggctgtgacagtggcttggaaggccgatggatctcctgtgaaagccggcgtggaaaccaccaagccatccaagcagagcaacaacaaatacgccgccagctcctacctgagcctgacacctgagcagtggaagtcccacagatcctacagctgccaagtgacccacgaaggcagcaccgtggaaaagacagtggcccctacagagtgcagcggatcccagagcttcggcctgctggaccccaagctgtgctacctgctggatggcatcctgttcatctacggcgtgatcctgaccgccctgttcctgagagtgaagttcagcagaagcgccgacgcccctgcctaccagcagggacagaaccaactgtacaacgagctgaacctgggcagacgggaagagtacgacgtgctggacaagcggagaggcagggaccctgagatgggcggaaagccccagcggagaaagaacccccaggaaggactgtataacgaactccagaaagacaagatggccgaagcctacagcgagatcggcatgaagggcgagcggagaagaggcaagggccacgatggcctgtaccagggcctgagcaccgccaccaaggacacctatgacgccctgcacatgcaggccctgcctccaagaagggccaagcgatctggatctggagcaacaaacttctcactactcaaacaagcaggtgacgtggaggagaatcccgggcctactagtatggactggatttggcgcatccttttccttgtcggcgctgctaccggcgcgcattccttcgaaaagcaagaagtgacccagattcctgccgctctgtctgtgcctgagggcgagaatctggtgctgaactgctccttcaccgacagcgccatctacaacctccagtggttcaggcaggaccctggcaagggactgacaagcctgctgctgattcagagcagccagagagagcagaccagcggcagactgaatgccagcctggataagtccagcggaagaagcaccctgtatatcgccgcttctcagcctggcgatagcgccacatatctgtgtgccgtgcgggaaacaagcggctccaggctgacttttggcgagggcacacagctgaccgtgaatcccgatacgcgtgctccgacaaaggcgccagacgtttttcctattatttcaggatgtcggcatccgaaagataattccccagttgttctggcgtgtcttatcacgggctaccatcctacatctgttaccgttacgtggtatatgggtacgcaaagccaacctcagcggacttttccagagatccaacggcgagattcatattatatgacatccagtcagttgagtacaccgctgcaacagtggcggcaaggtgagtataagtgtgtggtccaacacacagccagtaaaagtaagaaagagatattccggtggcctgaaagcccgaaggcacaagcatcttctgttccgacggcgcaaccgcaagctgaaggaagtcttgcaaaagcaaccacagcacccgcgacaacacgaaacacaggacgcggaggcgaggaaaagaaaaaagaaaaggaaaaggaagagcaagaggagagggaaactaagacccccggtacccagagttttgggttgttggaccctaaattgtgctatctgttggacggaatcctgttcatttacggagtgatcctgaccgcattgttcctgcgggttaagttttccagatccgcagacgcacccgcttaccaacaagggcagaaccaactctacaatgaacttaatttggggcggagggaagagtacgacgttctggacaaaaggaggggacgagatcccgagatgggcggaaagcctcagcgaaggaagaatccgcaagaggggctttataacgaactccagaaagataaaatggcagaagcctatagtgagattgggatgaagggagaaaggaggaggggtaaaggtcacgatgggttgtaccaaggattgagcacagccactaaagatacctatgatgcgctccacatgcaggccctgccgccaagacgcgccaagagaagcggatctggcgtgaagcagaccctgaatttcgacctgctgaagctggctggcgacgtggaatccaacccaggcccttctagaggccatatggctctgcctgtgacagctctgctgctgcctctggcactgctgcttcatgctgctagacctagccagtttagagtgtcccctctggacagaacctggaacctgggcgagacagtggaactgaagtgccaggtgctgctgagcaaccctacaagcggctgctcctggctgtttcagcctagaggtgcagccgcctctcctacctttctgctgtacctgagccagaacaagcccaaggccgccgaaggactggacacccagagattcagcggcaagagactgggcgacaccttcgtgctgaccctgagcgacttcagaagagagaacgagggctactacttctgtagcgccctgagcaacagcatcatgtacttcagccacttcgtgcccgtgtttctgcccgccaagcctacaacaacccctgctcctagacctcctacaccagctcctacaatcgccagccagcctctgtctctcagacccgaagcctgtagacctgctgctggcggagctgtgcataccagaggactggatttcgcctgcgacatctacatctgggctcctctggctggcacatgtggcgtgctgctgctgtccctggtcatcaccctgtactgcaaccaccggaacaggcggagagtgtgcaagtgccctagacctgtggtcaagagcggcgacaagcctagcctgagcgccagatatgtt

SEQ ID NO: 2841 - DNA, 3180 bp, synthetic construct
  source 1..3180: mol_type = other DNA
atggccttaccagtgaccgccttgctcctgccgctggccttgctgctccacgccgccaggccgagcagatacctggtcaagcggaccggcgagaaggtgttcctggaatgcgtgcaggacatggaccacgaaaacatgttctggtacagacaggaccccggcctgggcctgagactgatctacttcagctacgacgtgaagatgaaggaaaagggcgacatccccgagggctacagcgtgtccagagagaagaaagagcggttcagcctgatcctggaaagcgccagcaccaaccagaccagcatgtacctgtgcgccagcagcttttggggcagaagcaccgacacacagtatttcggccctggcaccagactgacagttctcgagggacagcctaaggccaatcctaccgtgacactgttccctccaagcagcgaagaactccaggccaacaaggccacacttgtgtgcctgatctccgacttctaccctggggctgtgacagtggcttggaaggccgatggatctcctgtgaaagccggcgtggaaaccaccaagccatccaagcagagcaacaacaaatacgccgccagctcctacctgagcctgacacctgagcagtggaagtcccacagatcctacagctgccaagtgacccacgaaggcagcaccgtggaaaagacagtggcccctacagagtgcagcggatcccagagcttcggcctgctggaccccaagctgtgctacctgctggatggcatcctgttcatctacggcgtgatcctgaccgccctgttcctgagagtgaagttcagcagaagcgccgacgcccctgcctaccagcagggacagaaccaactgtacaacgagctgaacctgggcagacgggaagagtacgacgtgctggacaagcggagaggcagggaccctgagatgggcggaaagccccagcggagaaagaacccccaggaaggactgtataacgaactccagaaagacaagatggccgaagcctacagcgagatcggcatgaagggcgagcggagaagaggcaagggccacgatggcctgtaccagggcctgagcaccgccaccaaggacacctatgacgccctgcacatgcaggccctgcctccaagaagggccaagcgatctggatctggagcaacaaacttctcactactcaaacaagcaggtgacgtggaggagaatcccgggcctactagtatggactggatttggcgcatccttttccttgtcggcgctgctaccggcgcgcattccttcgaaaagcaagaagtgacccagattcctgccgctctgtctgtgcctgagggcgagaatctggtgctgaactgctccttcaccgacagcgccatctacaacctccagtggttcaggcaggaccctggcaagggactgacaagcctgctgctgattcagagcagccagagagagcagaccagcggcagactgaatgccagcctggataagtccagcggaagaagcaccctgtatatcgccgcttctcagcctggcgatagcgccacatatctgtgtgccgtgcgggaaacaagcggctccaggctgacttttggcgagggcacacagctgaccgtgaatcccgatacgcgtgcctcaacgaaagggcctagcgtcttccccctggcgccgtgctcacgatccacaagcgaatccaccgccgctctcggatgcctcgtaaaggattatttccctgaaccagtcacggtgtcatggaacagcggtgcccttaccagcggcgtccatacctttcctgctgtgctccagtccagcggactttatagtctcagctctgtcgtgaccgtcccttcctctaattttggcacccagacttacacgtgcaacgtcgatcataagcccagtaacaccaaggtagacaagacggtggaacgaaagggtacccagagttttgggttgttggaccctaaattgtgctatctgttggacggaatcctgttcatttacggagtgatcctgaccgcattgttcctgcgggttaagttttccagatccgcagacgcacccgcttaccaacaagggcagaaccaactctacaatgaacttaatttggggcggagggaagagtacgacgttctggacaaaaggaggggacgagatcccgagatgggcggaaagcctcagcgaaggaagaatccgcaagaggggctttataacgaactccagaaagataaaatggcagaagcctatagtgagattgggatgaagggagaaaggaggaggggtaaaggtcacgatgggttgtaccaaggattgagcacagccactaaagatacctatgatgcgctccacatgcaggccctgccgccaagacgcgccaagagaagcggatctggcgtgaagcagaccctgaatttcgacctgctgaagctggctggcgacgtggaatccaacccaggcccttctagaggccatatggctctgcctgtgacagctctgctgctgcctctggcactgctgcttcatgctgctagacctagccagtttagagtgtcccctctggacagaacctggaacctgggcgagacagtggaactgaagtgccaggtgctgctgagcaaccctacaagcggctgctcctggctgtttcagcctagaggtgcagccgcctctcctacctttctgctgtacctgagccagaacaagcccaaggccgccgaaggactggacacccagagattcagcggcaagagactgggcgacaccttcgtgctgaccctgagcgacttcagaagagagaacgagggctactacttctgtagcgccctgagcaacagcatcatgtacttcagccacttcgtgcccgtgtttctgcccgccaagcctacaacaacccctgctcctagacctcctacaccagctcctacaatcgccagccagcctctgtctctcagacccgaagcctgtagacctgctgctggcggagctgtgcataccagaggactggatttcgcctgcgacatctacatctgggctcctctggctggcacatgtggcgtgctgctgctgtccctggtcatcaccctgtactgcaaccaccggaacaggcggagagtgtgcaagtgccctagacctgtggtcaagagcggcgacaagcctagcctgagcgccagatatgtt

SEQ ID NO: 2842 - DNA, 3201 bp, synthetic construct
  source 1..3201: mol_type = other DNA
atggccttaccagtgaccgccttgctcctgccgctggccttgctgctccacgccgccaggccgagcagatacctggtcaagcggaccggcgagaaggtgttcctggaatgcgtgcaggacatggaccacgaaaacatgttctggtacagacaggaccccggcctgggcctgagactgatctacttcagctacgacgtgaagatgaaggaaaagggcgacatccccgagggctacagcgtgtccagagagaagaaagagcggttcagcctgatcctggaaagcgccagcaccaaccagaccagcatgtacctgtgcgccagcagcttttggggcagaagcaccgacacacagtatttcggccctggcaccagactgacagttctcgagggacagcctaaggccaatcctaccgtgacactgttccctccaagcagcgaagaactccaggccaacaaggccacacttgtgtgcctgatctccgacttctaccctggggctgtgacagtggcttggaaggccgatggatctcctgtgaaagccggcgtggaaaccaccaagccatccaagcagagcaacaacaaatacgccgccagctcctacctgagcctgacacctgagcagtggaagtcccacagatcctacagctgccaagtgacccacgaaggcagcaccgtggaaaagacagtggcccctacagagtgcagcggatcccagagcttcggcctgctggaccccaagctgtgctacctgctggatggcatcctgttcatctacggcgtgatcctgaccgccctgttcctgagagtgaagttcagcagaagcgccgacgcccctgcctaccagcagggacagaaccaactgtacaacgagctgaacctgggcagacgggaagagtacgacgtgctggacaagcggagaggcagggaccctgagatgggcggaaagccccagcggagaaagaacccccaggaaggactgtataacgaactccagaaagacaagatggccgaagcctacagcgagatcggcatgaagggcgagcggagaagaggcaagggccacgatggcctgtaccagggcctgagcaccgccaccaaggacacctatgacgccctgcacatgcaggccctgcctccaagaagggccaagcgatctggatctggagcaacaaacttctcactactcaaacaagcaggtgacgtggaggagaatcccgggcctactagtatggactggatttggcgcatccttttccttgtcggcgctgctaccggcgcgcattccttcgaaaagcaagaagtgacccagattcctgccgctctgtctgtgcctgagggcgagaatctggtgctgaactgctccttcaccgacagcgccatctacaacctccagtggttcaggcaggaccctggcaagggactgacaagcctgctgctgattcagagcagccagagagagcagaccagcggcagactgaatgccagcctggataagtccagcggaagaagcaccctgtatatcgccgcttctcagcctggcgatagcgccacatatctgtgtgccgtgcgggaaacaagcggctccaggctgacttttggcgagggcacacagctgaccgtgaatcccgatacgcgtgcgtcacctacgtccccaaaagtgttcccgctgtcactcgattccactccacaggacggtaacgtggtggttgcctgcctggtacaaggtttctttcctcaagaaccactctctgtgacgtggtctgaaagtggtcagaatgttacagcacggaacttcccaccgagtcaagatgcgagtggggatctctatacgacatccagtcaactcacactgcccgcaacacaatgccccgatggcaaatctgttacctgccatgtgaaacattacaccaatccatcccaggatgtgacagtaccttgtccggttccgccccctcccccgggtacccagagttttgggttgttggaccctaaattgtgctatctgttggacggaatcctgttcatttacggagtgatcctgaccgcattgttcctgcgggttaagttttccagatccgcagacgcacccgcttaccaacaagggcagaaccaactctacaatgaacttaatttggggcggagggaagagtacgacgttctggacaaaaggaggggacgagatcccgagatgggcggaaagcctcagcgaaggaagaatccgcaagaggggctttataacgaactccagaaagataaaatggcagaagcctatagtgagattgggatgaagggagaaaggaggaggggtaaaggtcacgatgggttgtaccaaggattgagcacagccactaaagatacctatgatgcgctccacatgcaggccctgccgccaagacgcgccaagagaagcggatctggcgtgaagcagaccctgaatttcgacctgctgaagctggctggcgacgtggaatccaacccaggcccttctagaggccatatggctctgcctgtgacagctctgctgctgcctctggcactgctgcttcatgctgctagacctagccagtttagagtgtcccctctggacagaacctggaacctgggcgagacagtggaactgaagtgccaggtgctgctgagcaaccctacaagcggctgctcctggctgtttcagcctagaggtgcagccgcctctcctacctttctgctgtacctgagccagaacaagcccaaggccgccgaaggactggacacccagagattcagcggcaagagactgggcgacaccttcgtgctgaccctgagcgacttcagaagagagaacgagggctactacttctgtagcgccctgagcaacagcatcatgtacttcagccacttcgtgcccgtgtttctgcccgccaagcctacaacaacccctgctcctagacctcctacaccagctcctacaatcgccagccagcctctgtctctcagacccgaagcctgtagacctgctgctggcggagctgtgcataccagaggactggatttcgcctgcgacatctacatctgggctcctctggctggcacatgtggcgtgctgctgctgtccctggtcatcaccctgtactgcaaccaccggaacaggcggagagtgtgcaagtgccctagacctgtggtcaagagcggcgacaagcctagcctgagcgccagatatgtt

SEQ ID NO: 2843 - DNA, 3186 bp, synthetic construct
  source 1..3186: mol_type = other DNA
atggccttaccagtgaccgccttgctcctgccgctggccttgctgctccacgccgccaggccgagcagatacctggtcaagcggaccggcgagaaggtgttcctggaatgcgtgcaggacatggaccacgaaaacatgttctggtacagacaggaccccggcctgggcctgagactgatctacttcagctacgacgtgaagatgaaggaaaagggcgacatccccgagggctacagcgtgtccagagagaagaaagagcggttcagcctgatcctggaaagcgccagcaccaaccagaccagcatgtacctgtgcgccagcagcttttggggcagaagcaccgacacacagtatttcggccctggcaccagactgacagttctcgagggacagcctaaggccaatcctaccgtgacactgttccctccaagcagcgaagaactccaggccaacaaggccacacttgtgtgcctgatctccgacttctaccctggggctgtgacagtggcttggaaggccgatggatctcctgtgaaagccggcgtggaaaccaccaagccatccaagcagagcaacaacaaatacgccgccagctcctacctgagcctgacacctgagcagtggaagtcccacagatcctacagctgccaagtgacccacgaaggcagcaccgtggaaaagacagtggcccctacagagtgcagcggatcccagagcttcggcctgctggaccccaagctgtgctacctgctggatggcatcctgttcatctacggcgtgatcctgaccgccctgttcctgagagtgaagttcagcagaagcgccgacgcccctgcctaccagcagggacagaaccaactgtacaacgagctgaacctgggcagacgggaagagtacgacgtgctggacaagcggagaggcagggaccctgagatgggcggaaagccccagcggagaaagaacccccaggaaggactgtataacgaactccagaaagacaagatggccgaagcctacagcgagatcggcatgaagggcgagcggagaagaggcaagggccacgatggcctgtaccagggcctgagcaccgccaccaaggacacctatgacgccctgcacatgcaggccctgcctccaagaagggccaagcgatctggatctggagcaacaaacttctcactactcaaacaagcaggtgacgtggaggagaatcccgggcctactagtatggactggatttggcgcatccttttccttgtcggcgctgctaccggcgcgcattccttcgaaaagcaagaagtgacccagattcctgccgctctgtctgtgcctgagggcgagaatctggtgctgaactgctccttcaccgacagcgccatctacaacctccagtggttcaggcaggaccctggcaagggactgacaagcctgctgctgattcagagcagccagagagagcagaccagcggcagactgaatgccagcctggataagtccagcggaagaagcaccctgtatatcgccgcttctcagcctggcgatagcgccacatatctgtgtgccgtgcgggaaacaagcggctccaggctgacttttggcgagggcacacagctgaccgtgaatcccgatacgcgtgctagtacccagtcaccttctgttttcccgcttactagatgctgcaagaacataccatccaatgccacttctgtcacactgggctgtcttgctacaggttattttcctgagccggtgatggtcacttgggataccggtagcctgaatggaactacaatgacgctgcctgccacgacgctcacattgagtgggcattacgcgacaattagtcttttgacggtaagcggagcttgggctaagcagatgttcacttgcagagtagcgcacactccctctagtactgactgggttgacaacaaaaccttttctggtacccagagttttgggttgttggaccctaaattgtgctatctgttggacggaatcctgttcatttacggagtgatcctgaccgcattgttcctgcgggttaagttttccagatccgcagacgcacccgcttaccaacaagggcagaaccaactctacaatgaacttaatttggggcggagggaagagtacgacgttctggacaaaaggaggggacgagatcccgagatgggcggaaagcctcagcgaaggaagaatccgcaagaggggctttataacgaactccagaaagataaaatggcagaagcctatagtgagattgggatgaagggagaaaggaggaggggtaaaggtcacgatgggttgtaccaaggattgagcacagccactaaagatacctatgatgcgctccacatgcaggccctgccgccaagacgcgccaagagaagcggatctggcgtgaagcagaccctgaatttcgacctgctgaagctggctggcgacgtggaatccaacccaggcccttctagaggccatatggctctgcctgtgacagctctgctgctgcctctggcactgctgcttcatgctgctagacctagccagtttagagtgtcccctctggacagaacctggaacctgggcgagacagtggaactgaagtgccaggtgctgctgagcaaccctacaagcggctgctcctggctgtttcagcctagaggtgcagccgcctctcctacctttctgctgtacctgagccagaacaagcccaaggccgccgaaggactggacacccagagattcagcggcaagagactgggcgacaccttcgtgctgaccctgagcgacttcagaagagagaacgagggctactacttctgtagcgccctgagcaacagcatcatgtacttcagccacttcgtgcccgtgtttctgcccgccaagcctacaacaacccctgctcctagacctcctacaccagctcctacaatcgccagccagcctctgtctctcagacccgaagcctgtagacctgctgctggcggagctgtgcataccagaggactggatttcgcctgcgacatctacatctgggctcctctggctggcacatgtggcgtgctgctgctgtccctggtcatcaccctgtactgcaaccaccggaacaggcggagagtgtgcaagtgccctagacctgtggtcaagagcggcgacaagcctagcctgagcgccagatatgtt

SEQ ID NO: 2844 - DNA, 3186 bp, synthetic construct
  source 1..3186: mol_type = other DNA
atggccttaccagtgaccgccttgctcctgccgctggccttgctgctccacgccgccaggccgagcagatacctggtcaagcggaccggcgagaaggtgttcctggaatgcgtgcaggacatggaccacgaaaacatgttctggtacagacaggaccccggcctgggcctgagactgatctacttcagctacgacgtgaagatgaaggaaaagggcgacatccccgagggctacagcgtgtccagagagaagaaagagcggttcagcctgatcctggaaagcgccagcaccaaccagaccagcatgtacctgtgcgccagcagcttttggggcagaagcaccgacacacagtatttcggccctggcaccagactgacagttctcgagggacagcctaaggccaatcctaccgtgacactgttccctccaagcagcgaagaactccaggccaacaaggccacacttgtgtgcctgatctccgacttctaccctggggctgtgacagtggcttggaaggccgatggatctcctgtgaaagccggcgtggaaaccaccaagccatccaagcagagcaacaacaaatacgccgccagctcctacctgagcctgacacctgagcagtggaagtcccacagatcctacagctgccaagtgacccacgaaggcagcaccgtggaaaagacagtggcccctacagagtgcagcggatcccagagcttcggcctgctggaccccaagctgtgctacctgctggatggcatcctgttcatctacggcgtgatcctgaccgccctgttcctgagagtgaagttcagcagaagcgccgacgcccctgcctaccagcagggacagaaccaactgtacaacgagctgaacctgggcagacgggaagagtacgacgtgctggacaagcggagaggcagggaccctgagatgggcggaaagccccagcggagaaagaacccccaggaaggactgtataacgaactccagaaagacaagatggccgaagcctacagcgagatcggcatgaagggcgagcggagaagaggcaagggccacgatggcctgtaccagggcctgagcaccgccaccaaggacacctatgacgccctgcacatgcaggccctgcctccaagaagggccaagcgatctggatctggagcaacaaacttctcactactcaaacaagcaggtgacgtggaggagaatcccgggcctactagtatggactggatttggcgcatccttttccttgtcggcgctgctaccggcgcgcattccttcgaaaagcaagaagtgacccagattcctgccgctctgtctgtgcctgagggcgagaatctggtgctgaactgctccttcaccgacagcgccatctacaacctccagtggttcaggcaggaccctggcaagggactgacaagcctgctgctgattcagagcagccagagagagcagaccagcggcagactgaatgccagcctggataagtccagcggaagaagcaccctgtatatcgccgcttctcagcctggcgatagcgccacatatctgtgtgccgtgcgggaaacaagcggctccaggctgacttttggcgagggcacacagctgaccgtgaatcccgatacgcgtgcgtccactaagggtccgtcagtcttcccgctggcgccctgttcccgcagcacgagtgaatctaccgccgcccttgggtgcttggtaaaagactattttcctgagcccgttacagtatcatggaacagcggggctctgactagcggggtgcatacgttccctgcggttctgcaatctagcggactgtattctctctccagtgttgtgaccgtgccaagctccagcctcggtactaaaacttatacatgtaatgtggatcataaaccttcaaataccaaggttgacaaaagggtagagagtaagtacggtggtacccagagttttgggttgttggaccctaaattgtgctatctgttggacggaatcctgttcatttacggagtgatcctgaccgcattgttcctgcgggttaagttttccagatccgcagacgcacccgcttaccaacaagggcagaaccaactctacaatgaacttaatttggggcggagggaagagtacgacgttctggacaaaaggaggggacgagatcccgagatgggcggaaagcctcagcgaaggaagaatccgcaagaggggctttataacgaactccagaaagataaaatggcagaagcctatagtgagattgggatgaagggagaaaggaggaggggtaaaggtcacgatgggttgtaccaaggattgagcacagccactaaagatacctatgatgcgctccacatgcaggccctgccgccaagacgcgccaagagaagcggatctggcgtgaagcagaccctgaatttcgacctgctgaagctggctggcgacgtggaatccaacccaggcccttctagaggccatatggctctgcctgtgacagctctgctgctgcctctggcactgctgcttcatgctgctagacctagccagtttagagtgtcccctctggacagaacctggaacctgggcgagacagtggaactgaagtgccaggtgctgctgagcaaccctacaagcggctgctcctggctgtttcagcctagaggtgcagccgcctctcctacctttctgctgtacctgagccagaacaagcccaaggccgccgaaggactggacacccagagattcagcggcaagagactgggcgacaccttcgtgctgaccctgagcgacttcagaagagagaacgagggctactacttctgtagcgccctgagcaacagcatcatgtacttcagccacttcgtgcccgtgtttctgcccgccaagcctacaacaacccctgctcctagacctcctacaccagctcctacaatcgccagccagcctctgtctctcagacccgaagcctgtagacctgctgctggcggagctgtgcataccagaggactggatttcgcctgcgacatctacatctgggctcctctggctggcacatgtggcgtgctgctgctgtccctggtcatcaccctgtactgcaaccaccggaacaggcggagagtgtgcaagtgccctagacctgtggtcaagagcggcgacaagcctagcctgagcgccagatatgtt

SEQ ID NO: 2845 - DNA, 3186 bp, synthetic construct
  source 1..3186: mol_type = other DNA
atggccttaccagtgaccgccttgctcctgccgctggccttgctgctccacgccgccaggccgagcagatacctggtcaagcggaccggcgagaaggtgttcctggaatgcgtgcaggacatggaccacgaaaacatgttctggtacagacaggaccccggcctgggcctgagactgatctacttcagctacgacgtgaagatgaaggaaaagggcgacatccccgagggctacagcgtgtccagagagaagaaagagcggttcagcctgatcctggaaagcgccagcaccaaccagaccagcatgtacctgtgcgccagcagcttttggggcagaagcaccgacacacagtatttcggccctggcaccagactgacagttctcgagggacagcctaaggccaatcctaccgtgacactgttccctccaagcagcgaagaactccaggccaacaaggccacacttgtgtgcctgatctccgacttctaccctggggctgtgacagtggcttggaaggccgatggatctcctgtgaaagccggcgtggaaaccaccaagccatccaagcagagcaacaacaaatacgccgccagctcctacctgagcctgacacctgagcagtggaagtcccacagatcctacagctgccaagtgacccacgaaggcagcaccgtggaaaagacagtggcccctacagagtgcagcggatcccagagcttcggcctgctggaccccaagctgtgctacctgctggatggcatcctgttcatctacggcgtgatcctgaccgccctgttcctgagagtgaagttcagcagaagcgccgacgcccctgcctaccagcagggacagaaccaactgtacaacgagctgaacctgggcagacgggaagagtacgacgtgctggacaagcggagaggcagggaccctgagatgggcggaaagccccagcggagaaagaacccccaggaaggactgtataacgaactccagaaagacaagatggccgaagcctacagcgagatcggcatgaagggcgagcggagaagaggcaagggccacgatggcctgtaccagggcctgagcaccgccaccaaggacacctatgacgccctgcacatgcaggccctgcctccaagaagggccaagcgatctggatctggagcaacaaacttctcactactcaaacaagcaggtgacgtggaggagaatcccgggcctactagtatggactggatttggcgcatccttttccttgtcggcgctgctaccggcgcgcattccttcgaaaagcaagaagtgacccagattcctgccgctctgtctgtgcctgagggcgagaatctggtgctgaactgctccttcaccgacagcgccatctacaacctccagtggttcaggcaggaccctggcaagggactgacaagcctgctgctgattcagagcagccagagagagcagaccagcggcagactgaatgccagcctggataagtccagcggaagaagcaccctgtatatcgccgcttctcagcctggcgatagcgccacatatctgtgtgccgtgcgggaaacaagcggctccaggctgacttttggcgagggcacacagctgaccgtgaatcccgatacgcgtgcaagtacaaagggacccagtgttttcccgctcgccccctgttcacgatcaacgagtgagtccactgcggctctcggatgcctcgtcaaagactacttccccgagccggtgactgttagttggaactctggggctcttacttcaggcgtacacacattccccgccgtgcttcagtcaagtgggctctactcacttagcagtgtggtaacggttccctctagcaactttggcacccaaacatatacttgcaacgtcgatcacaagccgtcaaataccaaagttgacaagaccgttgaaaggaaatgttgtggtacccagagttttgggttgttggaccctaaattgtgctatctgttggacggaatcctgttcatttacggagtgatcctgaccgcattgttcctgcgggttaagttttccagatccgcagacgcacccgcttaccaacaagggcagaaccaactctacaatgaacttaatttggggcggagggaagagtacgacgttctggacaaaaggaggggacgagatcccgagatgggcggaaagcctcagcgaaggaagaatccgcaagaggggctttataacgaactccagaaagataaaatggcagaagcctatagtgagattgggatgaagggagaaaggaggaggggtaaaggtcacgatgggttgtaccaaggattgagcacagccactaaagatacctatgatgcgctccacatgcaggccctgccgccaagacgcgccaagagaagcggatctggcgtgaagcagaccctgaatttcgacctgctgaagctggctggcgacgtggaatccaacccaggcccttctagaggccatatggctctgcctgtgacagctctgctgctgcctctggcactgctgcttcatgctgctagacctagccagtttagagtgtcccctctggacagaacctggaacctgggcgagacagtggaactgaagtgccaggtgctgctgagcaaccctacaagcggctgctcctggctgtttcagcctagaggtgcagccgcctctcctacctttctgctgtacctgagccagaacaagcccaaggccgccgaaggactggacacccagagattcagcggcaagagactgggcgacaccttcgtgctgaccctgagcgacttcagaagagagaacgagggctactacttctgtagcgccctgagcaacagcatcatgtacttcagccacttcgtgcccgtgtttctgcccgccaagcctacaacaacccctgctcctagacctcctacaccagctcctacaatcgccagccagcctctgtctctcagacccgaagcctgtagacctgctgctggcggagctgtgcataccagaggactggatttcgcctgcgacatctacatctgggctcctctggctggcacatgtggcgtgctgctgctgtccctggtcatcaccctgtactgcaaccaccggaacaggcggagagtgtgcaagtgccctagacctgtggtcaagagcggcgacaagcctagcctgagcgccagatatgtt

SEQ ID NO: 2846 - DNA, 3231 bp, synthetic construct
  source 1..3231: mol_type = other DNA
atggccttaccagtgaccgccttgctcctgccgctggccttgctgctccacgccgccaggccgagcagatacctggtcaagcggaccggcgagaaggtgttcctggaatgcgtgcaggacatggaccacgaaaacatgttctggtacagacaggaccccggcctgggcctgagactgatctacttcagctacgacgtgaagatgaaggaaaagggcgacatccccgagggctacagcgtgtccagagagaagaaagagcggttcagcctgatcctggaaagcgccagcaccaaccagaccagcatgtacctgtgcgccagcagcttttggggcagaagcaccgacacacagtatttcggccctggcaccagactgacagttctcgaggacctgaagaacgtgttcccacctgaggtggccgtgttcgagcctagcgaggccgagatcagccacacccagaaagccaccctcgtgtgcctggctaccggcttctaccccgaccatgtggaactgtcttggtgggtcaacggcaaagaggtgcacagcggcgtgtctaccgacccccagccactgaaagaacagcccgccctgaacgacagccggtactgcctgagcagcagactgagagtgtccgccaccttctggcagaacccccggaaccacttcagatgccaggtgcagttctacggcctgagcgagaacgacgagtggacccaggacagagccaagcccgtgacccagatcgtgtctgccgaagcctggggcagagccgattgcggatcccagagcttcggcctgctggaccccaagctgtgctacctgctggatggcatcctgttcatctacggcgtgatcctgaccgccctgttcctgagagtgaagttcagcagaagcgccgacgcccctgcctaccagcagggacagaaccaactgtacaacgagctgaacctgggcagacgggaagagtacgacgtgctggacaagcggagaggcagggaccctgagatgggcggaaagccccagcggagaaagaacccccaggaaggactgtataacgaactccagaaagacaagatggccgaagcctacagcgagatcggcatgaagggcgagcggagaagaggcaagggccacgatggcctgtaccagggcctgagcaccgccaccaaggacacctatgacgccctgcacatgcaggccctgcctccaagaagggccaagcgatctggatctggagcaacaaacttctcactactcaaacaagcaggtgacgtggaggagaatcccgggcctactagtatggactggatttggcgcatccttttccttgtcggcgctgctaccggcgcgcattccttcgaaaagcaagaagtgacccagattcctgccgctctgtctgtgcctgagggcgagaatctggtgctgaactgctccttcaccgacagcgccatctacaacctccagtggttcaggcaggaccctggcaagggactgacaagcctgctgctgattcagagcagccagagagagcagaccagcggcagactgaatgccagcctggataagtccagcggaagaagcaccctgtatatcgccgcttctcagcctggcgatagcgccacatatctgtgtgccgtgcgggaaacaagcggctccaggctgacttttggcgagggcacacagctgaccgtgaatcccgatacgcgtatccagaaccctgatcctgccgtgtaccagctgcgggatagcaagagcagcgacaagagcgtgtgtctgttcaccgacttcgacagccagaccaacgtgtcccagagcaaggactccgacgtgtacatcaccgataagaccgtgctggacatgcggagcatggacttcaagagcaactccgccgtggcctggtccaacaagtccgatttcgcctgcgccaacgccttcaacaacagcattatccccgaggacacattcttcccaagccccgagagcagctgcggtacccagagttttgggttgttggaccctaaattgtgctatctgttggacggaatcctgttcatttacggagtgatcctgaccgcattgttcctgcgggttaagttttccagatccgcagacgcacccgcttaccaacaagggcagaaccaactctacaatgaacttaatttggggcggagggaagagtacgacgttctggacaaaaggaggggacgagatcccgagatgggcggaaagcctcagcgaaggaagaatccgcaagaggggctttataacgaactccagaaagataaaatggcagaagcctatagtgagattgggatgaagggagaaaggaggaggggtaaaggtcacgatgggttgtaccaaggattgagcacagccactaaagatacctatgatgcgctccacatgcaggccctgccgccaagacgcgccaagagaagcggatctggcgtgaagcagaccctgaatttcgacctgctgaagctggctggcgacgtggaatccaacccaggcccttctagaggccatatggctctgcctgtgacagctctgctgctgcctctggcactgctgcttcatgctgctagacctagccagtttagagtgtcccctctggacagaacctggaacctgggcgagacagtggaactgaagtgccaggtgctgctgagcaaccctacaagcggctgctcctggctgtttcagcctagaggtgcagccgcctctcctacctttctgctgtacctgagccagaacaagcccaaggccgccgaaggactggacacccagagattcagcggcaagagactgggcgacaccttcgtgctgaccctgagcgacttcagaagagagaacgagggctactacttctgtagcgccctgagcaacagcatcatgtacttcagccacttcgtgcccgtgtttctgcccgccaagcctacaacaacccctgctcctagacctcctacaccagctcctacaatcgccagccagcctctgtctctcagacccgaagcctgtagacctgctgctggcggagctgtgcataccagaggactggatttcgcctgcgacatctacatctgggctcctctggctggcacatgtggcgtgctgctgctgtccctggtcatcaccctgtactgcaaccaccggaacaggcggagagtgtgcaagtgccctagacctgtggtcaagagcggcgacaagcctagcctgagcgccagatatgtt

SEQ ID NO: 2847 - DNA, 3231 bp, synthetic construct
  source 1..3231: mol_type = other DNA
atggccttaccagtgaccgccttgctcctgccgctggccttgctgctccacgccgccaggccgagcagatacctggtcaagcggaccggcgagaaggtgttcctggaatgcgtgcaggacatggaccacgaaaacatgttctggtacagacaggaccccggcctgggcctgagactgatctacttcagctacgacgtgaagatgaaggaaaagggcgacatccccgagggctacagcgtgtccagagagaagaaagagcggttcagcctgatcctggaaagcgccagcaccaaccagaccagcatgtacctgtgcgccagcagcttttggggcagaagcaccgacacacagtatttcggccctggcaccagactgacagttctcgaggacctgaagaacgtgttcccacctgaggtggccgtgttcgagcctagcaaggccgagatcgcccacacccagaaagccaccctcgtgtgcctggctaccggcttctaccccgaccatgtggaactgtcttggtgggtcaacggcaaagaggtgcacagcggcgtgtgtaccgacccccagccactgaaagaacagcccgccctgaacgacagccggtactgcctgagcagcagactgagagtgtccgccaccttctggcagaacccccggaaccacttcagatgccaggtgcagttctacggcctgagcgagaacgacgagtggacccaggacagagccaagcccgtgacccagatcgtgtctgccgaagcctggggcagagccgattgcggatcccagagcttcggcctgctggaccccaagctgtgctacctgctggatggcatcctgttcatctacggcgtgatcctgaccgccctgttcctgagagtgaagttcagcagaagcgccgacgcccctgcctaccagcagggacagaaccaactgtacaacgagctgaacctgggcagacgggaagagtacgacgtgctggacaagcggagaggcagggaccctgagatgggcggaaagccccagcggagaaagaacccccaggaaggactgtataacgaactccagaaagacaagatggccgaagcctacagcgagatcggcatgaagggcgagcggagaagaggcaagggccacgatggcctgtaccagggcctgagcaccgccaccaaggacacctatgacgccctgcacatgcaggccctgcctccaagaagggccaagcgatctggatctggagcaacaaacttctcactactcaaacaagcaggtgacgtggaggagaatcccgggcctactagtatggactggatttggcgcatccttttccttgtcggcgctgctaccggcgcgcattccttcgaaaagcaagaagtgacccagattcctgccgctctgtctgtgcctgagggcgagaatctggtgctgaactgctccttcaccgacagcgccatctacaacctccagtggttcaggcaggaccctggcaagggactgacaagcctgctgctgattcagagcagccagagagagcagaccagcggcagactgaatgccagcctggataagtccagcggaagaagcaccctgtatatcgccgcttctcagcctggcgatagcgccacatatctgtgtgccgtgcgggaaacaagcggctccaggctgacttttggcgagggcacacagctgaccgtgaatcccgatacgcgtatccagaaccctgatcctgccgtgtaccagctgcgggatagcaagagcagcgacaagagcgtgtgtctgttcaccgacttcgacagccagaccaacgtgtcccagagcaaggactccgacgtgtacatcaccgataagtgcgtgctggacatgcggagcatggacttcaagagcaactccgccgtggcctggtccaacaagtccgatttcgcctgcgccaacgccttcaacaacagcattatccccgaggacacattcttcccaagcagcgacgtgccctgcggtacccagagttttgggttgttggaccctaaattgtgctatctgttggacggaatcctgttcatttacggagtgatcctgaccgcattgttcctgcgggttaagttttccagatccgcagacgcacccgcttaccaacaagggcagaaccaactctacaatgaacttaatttggggcggagggaagagtacgacgttctggacaaaaggaggggacgagatcccgagatgggcggaaagcctcagcgaaggaagaatccgcaagaggggctttataacgaactccagaaagataaaatggcagaagcctatagtgagattgggatgaagggagaaaggaggaggggtaaaggtcacgatgggttgtaccaaggattgagcacagccactaaagatacctatgatgcgctccacatgcaggccctgccgccaagacgcgccaagagaagcggatctggcgtgaagcagaccctgaatttcgacctgctgaagctggctggcgacgtggaatccaacccaggcccttctagaggccatatggctctgcctgtgacagctctgctgctgcctctggcactgctgcttcatgctgctagacctagccagtttagagtgtcccctctggacagaacctggaacctgggcgagacagtggaactgaagtgccaggtgctgctgagcaaccctacaagcggctgctcctggctgtttcagcctagaggtgcagccgcctctcctacctttctgctgtacctgagccagaacaagcccaaggccgccgaaggactggacacccagagattcagcggcaagagactgggcgacaccttcgtgctgaccctgagcgacttcagaagagagaacgagggctactacttctgtagcgccctgagcaacagcatcatgtacttcagccacttcgtgcccgtgtttctgcccgccaagcctacaacaacccctgctcctagacctcctacaccagctcctacaatcgccagccagcctctgtctctcagacccgaagcctgtagacctgctgctggcggagctgtgcataccagaggactggatttcgcctgcgacatctacatctgggctcctctggctggcacatgtggcgtgctgctgctgtccctggtcatcaccctgtactgcaaccaccggaacaggcggagagtgtgcaagtgccctagacctgtggtcaagagcggcgacaagcctagcctgagcgccagatatgtt

SEQ ID NO: 2848 - DNA, 2424 bp, synthetic construct
  source 1..2424: mol_type = other DNA
atggccttaccagtgaccgccttgctcctgccgctggccttgctgctccacgccgccaggccgagcagatacctggtcaagcggaccggcgagaaggtgttcctggaatgcgtgcaggacatggaccacgaaaacatgttctggtacagacaggaccccggcctgggcctgagactgatctacttcagctacgacgtgaagatgaaggaaaagggcgacatccccgagggctacagcgtgtccagagagaagaaagagcggttcagcctgatcctggaaagcgccagcaccaaccagaccagcatgtacctgtgcgccagcagcttttggggcagaagcaccgacacacagtatttcggccctggcaccagactgacagttctcgaggacctgaagaacgtgttcccacctgaggtggccgtgttcgagcctagcgaggccgagatcagccacacccagaaagccaccctcgtgtgcctggctaccggcttctaccccgaccatgtggaactgtcttggtgggtcaacggcaaagaggtgcacagcggcgtgtgtaccgacccccagccactgaaagaacagcccgccctgaacgacagccggtactgcctgagcagcagactgagagtgtccgccaccttctggcagaacccccggaaccacttcagatgccaggtgcagttctacggcctgagcgagaacgacgagtggacccaggacagagccaagcccgtgacccagatcgtgtctgccgaagcctggggcagagccgattgcggatcccagagcttcggcctgctggaccccaagctgtgctacctgctggatggcatcctgttcatctacggcgtgatcctgaccgccctgttcctgagagtgaagttcagcagaagcgccgacgcccctgcctaccagcagggacagaaccaactgtacaacgagctgaacctgggcagacgggaagagtacgacgtgctggacaagcggagaggcagggaccctgagatgggcggaaagccccagcggagaaagaacccccaggaaggactgtataacgaactccagaaagacaagatggccgaagcctacagcgagatcggcatgaagggcgagcggagaagaggcaagggccacgatggcctgtaccagggcctgagcaccgccaccaaggacacctatgacgccctgcacatgcaggccctgcctccaagaagggccaagcgatctggatctggagcaacaaacttctcactactcaaacaagcaggtgacgtggaggagaatcccgggcctactagtatggactggatttggcgcatccttttccttgtcggcgctgctaccggcgcgcattccttcgaaaagcaagaagtgacccagattcctgccgctctgtctgtgcctgagggcgagaatctggtgctgaactgctccttcaccgacagcgccatctacaacctccagtggttcaggcaggaccctggcaagggactgacaagcctgctgctgattcagagcagccagagagagcagaccagcggcagactgaatgccagcctggataagtccagcggaagaagcaccctgtatatcgccgcttctcagcctggcgatagcgccacatatctgtgtgccgtgcgggaaacaagcggctccaggctgacttttggcgagggcacacagctgaccgtgaatcccgatacgcgtatccagaaccctgatcctgccgtgtaccagctgcgggatagcaagagcagcgacaagagcgtgtgtctgttcaccgacttcgacagccagaccaacgtgtcccagagcaaggactccgacgtgtacatcaccgataagtgcgtgctggacatgcggagcatggacttcaagagcaactccgccgtggcctggtccaacaagtccgatttcgcctgcgccaacgccttcaacaacagcattatccccgaggacacattcttcccaagccccgagagcagctgcggtacccagagttttgggttgttggaccctaaattgtgctatctgttggacggaatcctgttcatttacggagtgatcctgaccgcattgttcctgcgggttaagttttccagatccgcagacgcacccgcttaccaacaagggcagaaccaactctacaatgaacttaatttggggcggagggaagagtacgacgttctggacaaaaggaggggacgagatcccgagatgggcggaaagcctcagcgaaggaagaatccgcaagaggggctttataacgaactccagaaagataaaatggcagaagcctatagtgagattgggatgaagggagaaaggaggaggggtaaaggtcacgatgggttgtaccaaggattgagcacagccactaaagatacctatgatgcgctccacatgcaggccctgccgccaaga

SEQ ID NO: 2849 - DNA, 2547 bp, synthetic construct
  source 1..2547: mol_type = other DNA
atggccttaccagtgaccgccttgctcctgccgctggccttgctgctccacgccgccaggccgagcagatacctggtcaagcggaccggcgagaaggtgttcctggaatgcgtgcaggacatggaccacgaaaacatgttctggtacagacaggaccccggcctgggcctgagactgatctacttcagctacgacgtgaagatgaaggaaaagggcgacatccccgagggctacagcgtgtccagagagaagaaagagcggttcagcctgatcctggaaagcgccagcaccaaccagaccagcatgtacctgtgcgccagcagcttttggggcagaagcaccgacacacagtatttcggccctggcaccagactgacagttctcgagcagagcttcggcctgctggaccccaagctgtgctacctgctggatggcatcctgttcatctacggcgtgatcctgaccgccctgttcctgagagtgaagttcagcagaagcgccgacgcccctgcctaccagcagggacagaaccaactgtacaacgagctgaacctgggcagacgggaagagtacgacgtgctggacaagcggagaggcagggaccctgagatgggcggaaagccccagcggagaaagaacccccaggaaggactgtataacgaactccagaaagacaagatggccgaagcctacagcgagatcggcatgaagggcgagcggagaagaggcaagggccacgatggcctgtaccagggcctgagcaccgccaccaaggacacctatgacgccctgcacatgcaggccctgcctccaagaagggccaagcgatctggatctggagcaacaaacttctcactactcaaacaagcaggtgacgtggaggagaatcccgggcctactagtatggactggatttggcgcatccttttccttgtcggcgctgctaccggcgcgcattccttcgaaaagcaagaagtgacccagattcctgccgctctgtctgtgcctgagggcgagaatctggtgctgaactgctccttcaccgacagcgccatctacaacctccagtggttcaggcaggaccctggcaagggactgacaagcctgctgctgattcagagcagccagagagagcagaccagcggcagactgaatgccagcctggataagtccagcggaagaagcaccctgtatatcgccgcttctcagcctggcgatagcgccacatatctgtgtgccgtgcgggaaacaagcggctccaggctgacttttggcgagggcacacagctgaccgtgaatcccgatacgcgtcagagttttgggttgttggaccctaaattgtgctatctgttggacggaatcctgttcatttacggagtgatcctgaccgcattgttcctgcgggttaagttttccagatccgcagacgcacccgcttaccaacaagggcagaaccaactctacaatgaacttaatttggggcggagggaagagtacgacgttctggacaaaaggaggggacgagatcccgagatgggcggaaagcctcagcgaaggaagaatccgcaagaggggctttataacgaactccagaaagataaaatggcagaagcctatagtgagattgggatgaagggagaaaggaggaggggtaaaggtcacgatgggttgtaccaaggattgagcacagccactaaagatacctatgatgcgctccacatgcaggccctgccgccaagacgcgccaagagaagcggatctggcgtgaagcagaccctgaatttcgacctgctgaagctggctggcgacgtggaatccaacccaggcccttctagaggccatatggctctgcctgtgacagctctgctgctgcctctggcactgctgcttcatgctgctagacctagccagtttagagtgtcccctctggacagaacctggaacctgggcgagacagtggaactgaagtgccaggtgctgctgagcaaccctacaagcggctgctcctggctgtttcagcctagaggtgcagccgcctctcctacctttctgctgtacctgagccagaacaagcccaaggccgccgaaggactggacacccagagattcagcggcaagagactgggcgacaccttcgtgctgaccctgagcgacttcagaagagagaacgagggctactacttctgtagcgccctgagcaacagcatcatgtacttcagccacttcgtgcccgtgtttctgcccgccaagcctacaacaacccctgctcctagacctcctacaccagctcctacaatcgccagccagcctctgtctctcagacccgaagcctgtagacctgctgctggcggagctgtgcataccagaggactggatttcgcctgcgacatctacatctgggctcctctggctggcacatgtggcgtgctgctgctgtccctggtcatcaccctgtactgcaaccaccggaacaggcggagagtgtgcaagtgccctagacctgtggtcaagagcggcgacaagcctagcctgagcgccagatatgtt

SEQ ID NO: 2850 - DNA, 2547 bp, synthetic construct
  source 1..2547: mol_type = other DNA
atggccttaccagtgaccgccttgctcctgccgctggccttgctgctccacgccgccaggccgagcagatacctggtcaagcggaccggcgagaaggtgttcctggaatgcgtgcaggacatggaccacgaaaacatgttctggtacagacaggaccccggcctgggcctgagactgatctacttcagctacgacgtgaagatgaaggaaaagggcgacatccccgagggctacagcgtgtccagagagaagaaagagcggttcagcctgatcctggaaagcgccagcaccaaccagaccagcatgtacctgtgcgccagcagcttttggggcagaagcaccgacacacagtatttcggccctggcaccagactgacagttctcgaggacctgaagaacgtgttcccacctgaggtggccgtgttcgagcctagcgaggccgagatcagccacacccagaaagccaccctcgtgtgcctggctaccggcttctaccccgaccatgtggaactgtcttggtgggtcaacggcaaagaggtgcacagcggcgtgtgtaccgacccccagccactgaaagaacagcccgccctgaacgacagccggtactgcctgagcagcagactgagagtgtccgccaccttctggcagaacccccggaaccacttcagatgccaggtgcagttctacggcctgagcgagaacgacgagtggacccaggacagagccaagcccgtgacccagatcgtgtctgccgaagcctggggcagagccgattgcggatcccagagcttcggcctgctggaccccaagctgtgctacctgctggatggcatcctgttcatctacggcgtgatcctgaccgccctgttcctgaggagtaagaggagcaggctcctgcacagtgactacatgaacatgactccacgccgccccggacccacccgcaagcattaccagccctatgccccaccacgcgacttcgcagcctatcgctccagagtgaagttcagcagaagcgccgacgcccctgcctaccagcagggacagaaccaactgtacaacgagctgaacctgggcagacgggaagagtacgacgtgctggacaagcggagaggcagggaccctgagatgggcggaaagccccagcggagaaagaacccccaggaaggactgtataacgaactccagaaagacaagatggccgaagcctacagcgagatcggcatgaagggcgagcggagaagaggcaagggccacgatggcctgtaccagggcctgagcaccgccaccaaggacacctatgacgccctgcacatgcaggccctgcctccaagaagggccaagcgatctggatctggagcaacaaacttctcactactcaaacaagcaggtgacgtggaggagaatcccgggcctactagtatggactggatttggcgcatccttttccttgtcggcgctgctaccggcgcgcattccttcgaaaagcaagaagtgacccagattcctgccgctctgtctgtgcctgagggcgagaatctggtgctgaactgctccttcaccgacagcgccatctacaacctccagtggttcaggcaggaccctggcaagggactgacaagcctgctgctgattcagagcagccagagagagcagaccagcggcagactgaatgccagcctggataagtccagcggaagaagcaccctgtatatcgccgcttctcagcctggcgatagcgccacatatctgtgtgccgtgcgggaaacaagcggctccaggctgacttttggcgagggcacacagctgaccgtgaatcccgatacgcgtatccagaaccctgatcctgccgtgtaccagctgcgggatagcaagagcagcgacaagagcgtgtgtctgttcaccgacttcgacagccagaccaacgtgtcccagagcaaggactccgacgtgtacatcaccgataagtgcgtgctggacatgcggagcatggacttcaagagcaactccgccgtggcctggtccaacaagtccgatttcgcctgcgccaacgccttcaacaacagcattatccccgaggacacattcttcccaagccccgagagcagctgcggtacccagagttttgggttgttggaccctaaattgtgctatctgttggacggaatcctgttcatttacggagtgatcctgaccgcattgttcctgcgggttaagttttccagatccgcagacgcacccgcttaccaacaagggcagaaccaactctacaatgaacttaatttggggcggagggaagagtacgacgttctggacaaaaggaggggacgagatcccgagatgggcggaaagcctcagcgaaggaagaatccgcaagaggggctttataacgaactccagaaagataaaatggcagaagcctatagtgagattgggatgaagggagaaaggaggaggggtaaaggtcacgatgggttgtaccaaggattgagcacagccactaaagatacctatgatgcgctccacatgcaggccctgccgccaaga

SEQ ID NO: 2851 - DNA, 2670 bp, synthetic construct
  source 1..2670: mol_type = other DNA
atggccttaccagtgaccgccttgctcctgccgctggccttgctgctccacgccgccaggccgagcagatacctggtcaagcggaccggcgagaaggtgttcctggaatgcgtgcaggacatggaccacgaaaacatgttctggtacagacaggaccccggcctgggcctgagactgatctacttcagctacgacgtgaagatgaaggaaaagggcgacatccccgagggctacagcgtgtccagagagaagaaagagcggttcagcctgatcctggaaagcgccagcaccaaccagaccagcatgtacctgtgcgccagcagcttttggggcagaagcaccgacacacagtatttcggccctggcaccagactgacagttctcgaggacctgaagaacgtgttcccacctgaggtggccgtgttcgagcctagcgaggccgagatcagccacacccagaaagccaccctcgtgtgcctggctaccggcttctaccccgaccatgtggaactgtcttggtgggtcaacggcaaagaggtgcacagcggcgtgtgtaccgacccccagccactgaaagaacagcccgccctgaacgacagccggtactgcctgagcagcagactgagagtgtccgccaccttctggcagaacccccggaaccacttcagatgccaggtgcagttctacggcctgagcgagaacgacgagtggacccaggacagagccaagcccgtgacccagatcgtgtctgccgaagcctggggcagagccgattgcggatcccagagcttcggcctgctggaccccaagctgtgctacctgctggatggcatcctgttcatctacggcgtgatcctgaccgccctgttcctgaggagtaagaggagcaggctcctgcacagtgactacatgaacatgactccacgccgccccggacccacccgcaagcattaccagccctatgccccaccacgcgacttcgcagcctatcgctccagagtgaagttcagcagaagcgccgacgcccctgcctaccagcagggacagaaccaactgtacaacgagctgaacctgggcagacgggaagagtacgacgtgctggacaagcggagaggcagggaccctgagatgggcggaaagccccagcggagaaagaacccccaggaaggactgtataacgaactccagaaagacaagatggccgaagcctacagcgagatcggcatgaagggcgagcggagaagaggcaagggccacgatggcctgtaccagggcctgagcaccgccaccaaggacacctatgacgccctgcacatgcaggccctgcctccaagaagggccaagcgatctggatctggagcaacaaacttctcactactcaaacaagcaggtgacgtggaggagaatcccgggcctactagtatggactggatttggcgcatccttttccttgtcggcgctgctaccggcgcgcattccttcgaaaagcaagaagtgacccagattcctgccgctctgtctgtgcctgagggcgagaatctggtgctgaactgctccttcaccgacagcgccatctacaacctccagtggttcaggcaggaccctggcaagggactgacaagcctgctgctgattcagagcagccagagagagcagaccagcggcagactgaatgccagcctggataagtccagcggaagaagcaccctgtatatcgccgcttctcagcctggcgatagcgccacatatctgtgtgccgtgcgggaaacaagcggctccaggctgacttttggcgagggcacacagctgaccgtgaatcccgatacgcgtatccagaaccctgatcctgccgtgtaccagctgcgggatagcaagagcagcgacaagagcgtgtgtctgttcaccgacttcgacagccagaccaacgtgtcccagagcaaggactccgacgtgtacatcaccgataagtgcgtgctggacatgcggagcatggacttcaagagcaactccgccgtggcctggtccaacaagtccgatttcgcctgcgccaacgccttcaacaacagcattatccccgaggacacattcttcccaagccccgagagcagctgcggtacccagagttttgggttgttggaccctaaattgtgctatctgttggacggaatcctgttcatttacggagtgatcctgaccgcattgttcctgaggagcaagcggtcacggctgctccacagcgattacatgaatatgacaccacgaagaccgggtcctactcgcaaacactaccaaccctacgcacctccccgcgactttgcagcgtaccgatctcgggttaagttttccagatccgcagacgcacccgcttaccaacaagggcagaaccaactctacaatgaacttaatttggggcggagggaagagtacgacgttctggacaaaaggaggggacgagatcccgagatgggcggaaagcctcagcgaaggaagaatccgcaagaggggctttataacgaactccagaaagataaaatggcagaagcctatagtgagattgggatgaagggagaaaggaggaggggtaaaggtcacgatgggttgtaccaaggattgagcacagccactaaagatacctatgatgcgctccacatgcaggccctgccgccaaga

SEQ ID NO: 2852 - DNA, 2424 bp, synthetic construct
  source 1..2424: mol_type = other DNA
atggccttaccagtgaccgccttgctcctgccgctggccttgctgctccacgccgccaggccgagcagatacctggtcaagcggaccggcgagaaggtgttcctggaatgcgtgcaggacatggaccacgaaaacatgttctggtacagacaggaccccggcctgggcctgagactgatctacttcagctacgacgtgaagatgaaggaaaagggcgacatccccgagggctacagcgtgtccagagagaagaaagagcggttcagcctgatcctggaaagcgccagcaccaaccagaccagcatgtacctgtgcgccagcagcttttggggcagaagcaccgacacacagtatttcggccctggcaccagactgacagttctcgaggacctgaagaacgtgttcccacctgaggtggccgtgttcgagcctagcgaggccgagatcagccacacccagaaagccaccctcgtgtgcctggctaccggcttctaccccgaccatgtggaactgtcttggtgggtcaacggcaaagaggtgcacagcggcgtgtctaccgacccccagccactgaaagaacagcccgccctgaacgacagccggtactgcctgagcagcagactgagagtgtccgccaccttctggcagaacccccggaaccacttcagatgccaggtgcagttctacggcctgagcgagaacgacgagtggacccaggacagagccaagcccgtgacccagatcgtgtctgccgaagcctggggcagagccgattgcggatcccagagcttcggcctgctggaccccaagctgtgctacctgctggatggcatcctgttcatctacggcgtgatcctgaccgccctgttcctgagagtgaagttcagcagaagcgccgacgcccctgcctaccagcagggacagaaccaactgtacaacgagctgaacctgggcagacgggaagagtacgacgtgctggacaagcggagaggcagggaccctgagatgggcggaaagccccagcggagaaagaacccccaggaaggactgtataacgaactccagaaagacaagatggccgaagcctacagcgagatcggcatgaagggcgagcggagaagaggcaagggccacgatggcctgtaccagggcctgagcaccgccaccaaggacacctatgacgccctgcacatgcaggccctgcctccaagaagggccaagcgatctggatctggagcaacaaacttctcactactcaaacaagcaggtgacgtggaggagaatcccgggcctactagtatggactggatttggcgcatccttttccttgtcggcgctgctaccggcgcgcattccttcgaaaagcaagaagtgacccagattcctgccgctctgtctgtgcctgagggcgagaatctggtgctgaactgctccttcaccgacagcgccatctacaacctccagtggttcaggcaggaccctggcaagggactgacaagcctgctgctgattcagagcagccagagagagcagaccagcggcagactgaatgccagcctggataagtccagcggaagaagcaccctgtatatcgccgcttctcagcctggcgatagcgccacatatctgtgtgccgtgcgggaaacaagcggctccaggctgacttttggcgagggcacacagctgaccgtgaatcccgatacgcgtatccagaaccctgatcctgccgtgtaccagctgcgggatagcaagagcagcgacaagagcgtgtgtctgttcaccgacttcgacagccagaccaacgtgtcccagagcaaggactccgacgtgtacatcaccgataagaccgtgctggacatgcggagcatggacttcaagagcaactccgccgtggcctggtccaacaagtccgatttcgcctgcgccaacgccttcaacaacagcattatccccgaggacacattcttcccaagccccgagagcagctgcggtacccagagttttgggttgttggaccctaaattgtgctatctgttggacggaatcctgttcatttacggagtgatcctgaccgcattgttcctgcgggttaagttttccagatccgcagacgcacccgcttaccaacaagggcagaaccaactctacaatgaacttaatttggggcggagggaagagtacgacgttctggacaaaaggaggggacgagatcccgagatgggcggaaagcctcagcgaaggaagaatccgcaagaggggctttataacgaactccagaaagataaaatggcagaagcctatagtgagattgggatgaagggagaaaggaggaggggtaaaggtcacgatgggttgtaccaaggattgagcacagccactaaagatacctatgatgcgctccacatgcaggccctgccgccaaga

SEQ ID NO: 2853 - DNA, 3156 bp, synthetic construct
  source 1..3156: mol_type = other DNA
atggccttaccagtgaccgccttgctcctgccgctggccttgctgctccacgccgccaggccgagcagatacctggtcaagcggaccggcgagaaggtgttcctggaatgcgtgcaggacatggaccacgaaaacatgttctggtacagacaggaccccggcctgggcctgagactgatctacttcagctacgacgtgaagatgaaggaaaagggcgacatccccgagggctacagcgtgtccagagagaagaaagagcggttcagcctgatcctggaaagcgccagcaccaaccagaccagcatgtacctgtgcgccagcagcttttggggcagaagcaccgacacacagtatttcggccctggcaccagactgacagttctcgaggacaagcagctggacgccgacgtgtcccccaagcctaccatcttcctgccctctatcgccgagacaaagctccagaaggccggcacctacctgtgcctgctggaaaagttcttcccagatgtgattaagatccactggcaggaaaagaagtccaacaccatcctgggcagccaggaaggcaacaccatgaagaccaacgacacctacatgaagttcagctggctgaccgtgcccgagaagtccctggacaaagaacacagatgcatcgtgcggcacgaaaacaacaagaacggcgtggaccaggaaatcatcttcccacccatcaagaccgatgtgattacaggatcccagagcttcggcctgctggaccccaagctgtgctacctgctggatggcatcctgttcatctacggcgtgatcctgaccgccctgttcctgagagtgaagttcagcagaagcgccgacgcccctgcctaccagcagggacagaaccaactgtacaacgagctgaacctgggcagacgggaagagtacgacgtgctggacaagcggagaggcagggaccctgagatgggcggaaagccccagcggagaaagaacccccaggaaggactgtataacgaactccagaaagacaagatggccgaagcctacagcgagatcggcatgaagggcgagcggagaagaggcaagggccacgatggcctgtaccagggcctgagcaccgccaccaaggacacctatgacgccctgcacatgcaggccctgcctccaagaagggccaagcgatctggatctggagcaacaaacttctcactactcaaacaagcaggtgacgtggaggagaatcccgggcctactagtatggactggatttggcgcatccttttccttgtcggcgctgctaccggcgcgcattccttcgaaaagcaagaagtgacccagattcctgccgctctgtctgtgcctgagggcgagaatctggtgctgaactgctccttcaccgacagcgccatctacaacctccagtggttcaggcaggaccctggcaagggactgacaagcctgctgctgattcagagcagccagagagagcagaccagcggcagactgaatgccagcctggataagtccagcggaagaagcaccctgtatatcgccgcttctcagcctggcgatagcgccacatatctgtgtgccgtgcgggaaacaagcggctccaggctgacttttggcgagggcacacagctgaccgtgaatcccgatacgcgtagccagcctcacaccaagcccagcgtgttcgtgatgaagaacggcaccaacgtggcctgcctcgtgaaagagttctaccccaaggacatcaggatcaacctggtgtccagcaagaagatcaccgagttcgaccccgccatcgtgatctcccccagcggcaagtacaacgccgtgaagctggggaagtacgaggacagcaacagcgtgacctgctccgtgcagcacgacaacaagaccgtgcacagcaccgactttggtacccagagttttgggttgttggaccctaaattgtgctatctgttggacggaatcctgttcatttacggagtgatcctgaccgcattgttcctgcgggttaagttttccagatccgcagacgcacccgcttaccaacaagggcagaaccaactctacaatgaacttaatttggggcggagggaagagtacgacgttctggacaaaaggaggggacgagatcccgagatgggcggaaagcctcagcgaaggaagaatccgcaagaggggctttataacgaactccagaaagataaaatggcagaagcctatagtgagattgggatgaagggagaaaggaggaggggtaaaggtcacgatgggttgtaccaaggattgagcacagccactaaagatacctatgatgcgctccacatgcaggccctgccgccaagacgcgccaagagaagcggatctggcgtgaagcagaccctgaatttcgacctgctgaagctggctggcgacgtggaatccaacccaggcccttctagaggccatatggctctgcctgtgacagctctgctgctgcctctggcactgctgcttcatgctgctagacctagccagtttagagtgtcccctctggacagaacctggaacctgggcgagacagtggaactgaagtgccaggtgctgctgagcaaccctacaagcggctgctcctggctgtttcagcctagaggtgcagccgcctctcctacctttctgctgtacctgagccagaacaagcccaaggccgccgaaggactggacacccagagattcagcggcaagagactgggcgacaccttcgtgctgaccctgagcgacttcagaagagagaacgagggctactacttctgtagcgccctgagcaacagcatcatgtacttcagccacttcgtgcccgtgtttctgcccgccaagcctacaacaacccctgctcctagacctcctacaccagctcctacaatcgccagccagcctctgtctctcagacccgaagcctgtagacctgctgctggcggagctgtgcataccagaggactggatttcgcctgcgacatctacatctgggctcctctggctggcacatgtggcgtgctgctgctgtccctggtcatcaccctgtactgcaaccaccggaacaggcggagagtgtgcaagtgccctagacctgtggtcaagagcggcgacaagcctagcctgagcgccagatatgtt

SEQ ID NO: 2854 - DNA, 2760 bp, synthetic construct
  source 1..2760: mol_type = other DNA
atggccttaccagtgaccgccttgctcctgccgctggccttgctgctccacgccgccaggccgagcagatacctggtcaagcggaccggcgagaaggtgttcctggaatgcgtgcaggacatggaccacgaaaacatgttctggtacagacaggaccccggcctgggcctgagactgatctacttcagctacgacgtgaagatgaaggaaaagggcgacatccccgagggctacagcgtgtccagagagaagaaagagcggttcagcctgatcctggaaagcgccagcaccaaccagaccagcatgtacctgtgcgccagcagcttttggggcagaagcaccgacacacagtatttcggccctggcaccagactgacagttctcgagggacagcctaaggccaatcctaccgtgacactgttccctccaagcagcgaagaactccaggccaacaaggccacacttgtgtgcctgatctccgacttctaccctggggctgtgacagtggcttggaaggccgatggatctcctgtgaaagccggcgtggaaaccaccaagccatccaagcagagcaacaacaaatacgccgccagctcctacctgagcctgacacctgagcagtggaagtcccacagatcctacagctgccaagtgacccacgaaggcagcaccgtggaaaagacagtggcccctacagagtgcagcacaacacctggcgagagaagtagcctgcctgccttctatcctggcaccagcggctcttgttctggctgtggatctctgagcctgcctctgctggctggactggttgctgctgatgctgtggcctctctgctgattgtgggagccgtgttcctgtgcgccagacctagaagaagccccgctcaagaggacggcaaggtgtacatcaacatgcccggcagaggaagggccaagcgatctggatctggagcaacaaacttctcactactcaaacaagcaggtgacgtggaggagaatcccgggcctactagtatggactggatttggcgcatccttttccttgtcggcgctgctaccggcgcgcattccttcgaaaagcaagaagtgacccagattcctgccgctctgtctgtgcctgagggcgagaatctggtgctgaactgctccttcaccgacagcgccatctacaacctccagtggttcaggcaggaccctggcaagggactgacaagcctgctgctgattcagagcagccagagagagcagaccagcggcagactgaatgccagcctggataagtccagcggaagaagcaccctgtatatcgccgcttctcagcctggcgatagcgccacatatctgtgtgccgtgcgggaaacaagcggctccaggctgacttttggcgagggcacacagctgaccgtgaatcccgatacgcgtgcctctacaaagggaccctccgtgtttcctctggctcccagcagcaagtctacaagcggaggaacagccgctctgggctgcctggtcaaggattactttcccgagcctgtgaccgtgtcctggaatagcggagcactgacaagcggcgtgcacacctttccagccgtgctgcaaagcagcggcctgtactctctgagcagcgtggtcacagtgcctagctctagcctgggcacccagacctacatctgcaatgtgaaccacaagcctagcaacaccaaggtggacaagagagtggaacccaagagctgtacaacgccgggcgaaaggagttccttgccggccttttaccccggcacaagcggaagctgtagtgggtgtggaagcctcagcctcccacttcttgcgggcctcgtcgcggcagatgcagtagcttcacttcttattgtaggcgcggtatttctctgtgctcgaccaaggaggtcacccgctcaggaggatggtaaggtgtatataaatatgccaggacgcggacgcgccaagagaagcggatctggcgtgaagcagaccctgaatttcgacctgctgaagctggctggcgacgtggaatccaacccaggcccttctagaggccatatggctctgcctgtgacagctctgctgctgcctctggcactgctgcttcatgctgctagacctagccagtttagagtgtcccctctggacagaacctggaacctgggcgagacagtggaactgaagtgccaggtgctgctgagcaaccctacaagcggctgctcctggctgtttcagcctagaggtgcagccgcctctcctacctttctgctgtacctgagccagaacaagcccaaggccgccgaaggactggacacccagagattcagcggcaagagactgggcgacaccttcgtgctgaccctgagcgacttcagaagagagaacgagggctactacttctgtagcgccctgagcaacagcatcatgtacttcagccacttcgtgcccgtgtttctgcccgccaagcctacaacaacccctgctcctagacctcctacaccagctcctacaatcgccagccagcctctgtctctcagacccgaagcctgtagacctgctgctggcggagctgtgcataccagaggactggatttcgcctgcgacatctacatctgggctcctctggctggcacatgtggcgtgctgctgctgtccctggtcatcaccctgtactgcaaccaccggaacaggcggagagtgtgcaagtgccctagacctgtggtcaagagcggcgacaagcctagcctgagcgccagatatgtt

SEQ ID NO: 2855 - DNA, 2247 bp, synthetic construct
  source 1..2247: mol_type = other DNA
atggccttaccagtgaccgccttgctcctgccgctggccttgctgctccacgccgccaggccgagcagatacctggtcaagcggaccggcgagaaggtgttcctggaatgcgtgcaggacatggaccacgaaaacatgttctggtacagacaggaccccggcctgggcctgagactgatctacttcagctacgacgtgaagatgaaggaaaagggcgacatccccgagggctacagcgtgtccagagagaagaaagagcggttcagcctgatcctggaaagcgccagcaccaaccagaccagcatgtacctgtgcgccagcagcttttggggcagaagcaccgacacacagtatttcggccctggcaccagactgacagttctcgagggcgacatcgagaacaccagtctggcccctgaggaccctacctttcctgccgatacctggggcacctacctgctgaccacagagacaggactccagaaagatcacgccctgtgggaccacacagcccagaacctgctgagaatgggcctcgcctttctggtgctggttgccctcgtgtggttcctggtggaagattggctgagccggaagcggacaagagagagagccagcagagcctctacctgggagggaagaagaaggctgaacacccagacacttagggccaagcgatctggatctggagcaacaaacttctcactactcaaacaagcaggtgacgtggaggagaatcccgggcctactagtatggactggatttggcgcatccttttccttgtcggcgctgctaccggcgcgcattccttcgaaaagcaagaagtgacccagattcctgccgctctgtctgtgcctgagggcgagaatctggtgctgaactgctccttcaccgacagcgccatctacaacctccagtggttcaggcaggaccctggcaagggactgacaagcctgctgctgattcagagcagccagagagagcagaccagcggcagactgaatgccagcctggataagtccagcggaagaagcaccctgtatatcgccgcttctcagcctggcgatagcgccacatatctgtgtgccgtgcgggaaacaagcggctccaggctgacttttggcgagggcacacagctgaccgtgaatcccgatacgcgtggcgatattgagaatacctctctggccccagaagatcctacattccccgccgacacatggggaacatatctgctgacaaccgaaaccgggctgcaaaaggaccatgctctgtgggatcataccgctcagaatctgcttcggatggggcttgcattcctggtcctggtggctcttgtctggtttctggtcgaggactggctgtcccggaagagaaccagagaaagagcttccagggccagcacctgggaaggcagacgcagactgaatactcagaccctgcgcgccaagagaagcggatctggcgtgaagcagaccctgaatttcgacctgctgaagctggctggcgacgtggaatccaacccaggcccttctagaggccatatggctctgcctgtgacagctctgctgctgcctctggcactgctgcttcatgctgctagacctagccagtttagagtgtcccctctggacagaacctggaacctgggcgagacagtggaactgaagtgccaggtgctgctgagcaaccctacaagcggctgctcctggctgtttcagcctagaggtgcagccgcctctcctacctttctgctgtacctgagccagaacaagcccaaggccgccgaaggactggacacccagagattcagcggcaagagactgggcgacaccttcgtgctgaccctgagcgacttcagaagagagaacgagggctactacttctgtagcgccctgagcaacagcatcatgtacttcagccacttcgtgcccgtgtttctgcccgccaagcctacaacaacccctgctcctagacctcctacaccagctcctacaatcgccagccagcctctgtctctcagacccgaagcctgtagacctgctgctggcggagctgtgcataccagaggactggatttcgcctgcgacatctacatctgggctcctctggctggcacatgtggcgtgctgctgctgtccctggtcatcaccctgtactgcaaccaccggaacaggcggagagtgtgcaagtgccctagacctgtggtcaagagcggcgacaagcctagcctgagcgccagatatgtt

SEQ ID NO: 2856 - DNA, 2079 bp, synthetic construct
  source 1..2079: mol_type = other DNA
atggccttaccagtgaccgccttgctcctgccgctggccttgctgctccacgccgccaggccgagcagatacctggtcaagcggaccggcgagaaggtgttcctggaatgcgtgcaggacatggaccacgaaaacatgttctggtacagacaggaccccggcctgggcctgagactgatctacttcagctacgacgtgaagatgaaggaaaagggcgacatccccgagggctacagcgtgtccagagagaagaaagagcggttcagcctgatcctggaaagcgccagcaccaaccagaccagcatgtacctgtgcgccagcagcttttggggcagaagcaccgacacacagtatttcggccctggcaccagactgacagttctcgagatcactcaaggtttggcagtgtcaaccatctcatcattctttccacctggctaccaagtgtccttctgcctggtcatggtgctgctgttcgccgtggataccggcctgtacttcagcgtcaagaccaacatccggtccagcaccagagactggaaggaccacaagttcaagtggcggaaggaccctcaggacaagagggccaagcgatctggatctggagcaacaaacttctcactactcaaacaagcaggtgacgtggaggagaatcccgggcctactagtatggactggatttggcgcatccttttccttgtcggcgctgctaccggcgcgcattccttcgaaaagcaagaagtgacccagattcctgccgctctgtctgtgcctgagggcgagaatctggtgctgaactgctccttcaccgacagcgccatctacaacctccagtggttcaggcaggaccctggcaagggactgacaagcctgctgctgattcagagcagccagagagagcagaccagcggcagactgaatgccagcctggataagtccagcggaagaagcaccctgtatatcgccgcttctcagcctggcgatagcgccacatatctgtgtgccgtgcgggaaacaagcggctccaggctgacttttggcgagggcacacagctgaccgtgaatcccgatacgcgtatcacccagggcctggccgtgtctaccatcagcagctttttcccacccggctaccaggtgtccttctgcctcgtgatggtgctgctgttcgccgtggacaccggcctgtacttcagcgtgaaaacaaacatccggtccagcaccagagactggaaggaccacaagttcaagtggcggaaggacccccaggacaagcgcgccaagagaagcggatctggcgtgaagcagaccctgaatttcgacctgctgaagctggctggcgacgtggaatccaacccaggcccttctagaggccatatggctctgcctgtgacagctctgctgctgcctctggcactgctgcttcatgctgctagacctagccagtttagagtgtcccctctggacagaacctggaacctgggcgagacagtggaactgaagtgccaggtgctgctgagcaaccctacaagcggctgctcctggctgtttcagcctagaggtgcagccgcctctcctacctttctgctgtacctgagccagaacaagcccaaggccgccgaaggactggacacccagagattcagcggcaagagactgggcgacaccttcgtgctgaccctgagcgacttcagaagagagaacgagggctactacttctgtagcgccctgagcaacagcatcatgtacttcagccacttcgtgcccgtgtttctgcccgccaagcctacaacaacccctgctcctagacctcctacaccagctcctacaatcgccagccagcctctgtctctcagacccgaagcctgtagacctgctgctggcggagctgtgcataccagaggactggatttcgcctgcgacatctacatctgggctcctctggctggcacatgtggcgtgctgctgctgtccctggtcatcaccctgtactgcaaccaccggaacaggcggagagtgtgcaagtgccctagacctgtggtcaagagcggcgacaagcctagcctgagcgccagatatgtt

SEQ ID NO: 2857 - DNA, 2376 bp, synthetic construct
  source 1..2376: mol_type = other DNA
atggccttaccagtgaccgccttgctcctgccgctggccttgctgctccacgccgccaggccgggcgtgacacagtctcccacacacctgattaagaccagaggccagcaagtgaccctgcggtgtagccctaagagcggccacgataccgtgtcctggtatcagcaggctctcggacagggaccccagttcatcttccagtattacgaggaagaggaacggcagcggggcaacttccccgatagattttccggccatcagttccccaactacagctccgagctgaacgtgaacgctctgctgctgggagatagcgccctgtacctgtgtgcctctagccttggctggcgcggaggcagatacaacgagcagttctttggccctggcaccagactgacagtgggacagcctaaggccaatcctaccgtgacactgttccctccaagcagcgaagaactccaggccaacaaggccacacttgtgtgcctgatctccgacttctaccctggggctgtgacagtggcttggaaggccgatggatctcctgtgaaagccggcgtggaaaccaccaagccatccaagcagagcaacaacaaatacgccgccagctcctacctgagcctgacacctgagcagtggaagtcccacagatcctacagctgccaagtgacccacgaaggcagcaccgtggaaaagacagtggcccctacagagtgcagcggatcccagagcttcggcctgctggaccccaagctgtgctacctgctggatggcatcctgttcatctacggcgtgatcctgaccgccctgttcctgagagtgaagttcagcagaagcgccgacgcccctgcctaccagcagggacagaaccaactgtacaacgagctgaacctgggcagacgggaagagtacgacgtgctggacaagcggagaggcagggaccctgagatgggcggaaagccccagcggagaaagaacccccaggaaggactgtataacgaactccagaaagacaagatggccgaagcctacagcgagatcggcatgaagggcgagcggagaagaggcaagggccacgatggcctgtaccagggcctgagcaccgccaccaaggacacctatgacgccctgcacatgcaggccctgcctccaagaagggccaagcgatctggatctggagcaacaaacttctcactactcaaacaagcaggtgacgtggaggagaatcccgggcctactagtatggactggatttggcgcatccttttccttgtcggcgctgctaccggcgcgcattccttcgaacagaatatcgaccagcctacagagatgaccgccaccgaaggcgctatcgtgcagatcaactgcacctaccagaccagcggcttcaacggcctgttctggtatcaacagcacgccggcgaggcccctaccttcctgtcttacaatgtgctggacggcctggaagagaagggcagattcagcagcttcctgagcagaagcaagggctacagctacctgctgctgaaagaactccagatgaaggacagcgcctcctacctgtgcgcttccgtggacggcaacaacagactggccttcggcaagggcaatcaggtggtcgtgatccccaacgcctctacaaagggaccctccgtgtttcctctggctcccagcagcaagtctacaagcggaggaacagccgctctgggctgcctggtcaaggattactttcccgagcctgtgaccgtgtcctggaatagcggagcactgacaagcggcgtgcacacctttccagccgtgctgcaaagcagcggcctgtactctctgagcagcgtggtcacagtgcctagctctagcctgggcacccagacctacatctgcaatgtgaaccacaagcctagcaacaccaaggtggacaagagagtggaacccaagagctgtggtacccagagttttgggttgttggaccctaaattgtgctatctgttggacggaatcctgttcatttacggagtgatcctgaccgcattgttcctgcgggttaagttttccagatccgcagacgcacccgcttaccaacaagggcagaaccaactctacaatgaacttaatttggggcggagggaagagtacgacgttctggacaaaaggaggggacgagatcccgagatgggcggaaagcctcagcgaaggaagaatccgcaagaggggctttataacgaactccagaaagataaaatggcagaagcctatagtgagattgggatgaagggagaaaggaggaggggtaaaggtcacgatgggttgtaccaaggattgagcacagccactaaagatacctatgatgcgctccacatgcaggccctgccgccaaga

SEQ ID NO: 2858 - DNA, 1674 bp, synthetic construct
  source 1..1674: mol_type = other DNA
atggccttaccagtgaccgccttgctcctgccgctggccttgctgctccacgccgccaggccgggcgtgacacagtctcccacacacctgattaagaccagaggccagcaagtgaccctgcggtgtagccctaagagcggccacgataccgtgtcctggtatcagcaggctctcggacagggaccccagttcatcttccagtattacgaggaagaggaacggcagcggggcaacttccccgatagattttccggccatcagttccccaactacagctccgagctgaacgtgaacgctctgctgctgggagatagcgccctgtacctgtgtgcctctagccttggctggcgcggaggcagatacaacgagcagttctttggccctggcaccagactgacagtgctcgagcagagcttcggcctgctggaccccaagctgtgctacctgctggatggcatcctgttcatctacggcgtgatcctgaccgccctgttcctgagagtgaagttcagcagaagcgccgacgcccctgcctaccagcagggacagaaccaactgtacaacgagctgaacctgggcagacgggaagagtacgacgtgctggacaagcggagaggcagggaccctgagatgggcggaaagccccagcggagaaagaacccccaggaaggactgtataacgaactccagaaagacaagatggccgaagcctacagcgagatcggcatgaagggcgagcggagaagaggcaagggccacgatggcctgtaccagggcctgagcaccgccaccaaggacacctatgacgccctgcacatgcaggccctgcctccaagaagggccaagcgatctggatctggagcaacaaacttctcactactcaaacaagcaggtgacgtggaggagaatcccgggcctactagtatggactggatttggcgcatccttttccttgtcggcgctgctaccggcgcgcattccttcgaacagaatatcgaccagcctacagagatgaccgccaccgaaggcgctatcgtgcagatcaactgcacctaccagaccagcggcttcaacggcctgttctggtatcaacagcacgccggcgaggcccctaccttcctgtcttacaatgtgctggacggcctggaagagaagggcagattcagcagcttcctgagcagaagcaagggctacagctacctgctgctgaaagaactccagatgaaggacagcgcctcctacctgtgcgcttccgtggacggcaacaacagactggccttcggcaagggcaatcaggtggtcgtgatccccaacacgcgtcagagttttgggttgttggaccctaaattgtgctatctgttggacggaatcctgttcatttacggagtgatcctgaccgcattgttcctgcgggttaagttttccagatccgcagacgcacccgcttaccaacaagggcagaaccaactctacaatgaacttaatttggggcggagggaagagtacgacgttctggacaaaaggaggggacgagatcccgagatgggcggaaagcctcagcgaaggaagaatccgcaagaggggctttataacgaactccagaaagataaaatggcagaagcctatagtgagattgggatgaagggagaaaggaggaggggtaaaggtcacgat

SEQ ID NO: 2859 - DNA, 2826 bp, synthetic construct
  source 1..2826: mol_type = other DNA
atggccttaccagtgaccgccttgctcctgccgctggccttgctgctccacgccgccaggccgggcgtgacacagtctcccacacacctgattaagaccagaggccagcaagtgaccctgcggtgtagccctaagagcggccacgataccgtgtcctggtatcagcaggctctcggacagggaccccagttcatcttccagtattacgaggaagaggaacggcagcggggcaacttccccgatagattttccggccatcagttccccaactacagctccgagctgaacgtgaacgctctgctgctgggagatagcgccctgtacctgtgtgcctctagccttggctggcgcggaggcagatacaacgagcagttctttggccctggcaccagactgacagtgctcgagacaacacctggcgagagaagtagcctgcctgccttctatcctggcaccagcggctcttgttctggctgtggatctctgagcctgcctctgctggctggactggttgctgctgatgctgtggcctctctgctgattgtgggagccgtgttcctgtgcgccagacctagaagaagccccgctcaagaggacggcaaggtgtacatcaacatgcccggcagaggaagcactagtagagtgaagttcagcagaagcgccgacgcccctgcctaccagcagggacagaaccaactgtacaacgagctgaacctgggcagacgggaagagtacgacgtgctggacaagcggagaggcagggaccctgagatgggcggaaagccccagcggagaaagaacccccaggaaggactgtataacgaactccagaaagacaagatggccgaagcctacagcgagatcggcatgaagggcgagcggagaagaggcaagggccacgatggcctgtaccagggcctgagcaccgccaccaaggacacctatgacgccctgcacatgcaggccctgcctccaagaagggccaagcgatctggatctggagcaacaaacttctcactactcaaacaagcaggtgacgtggaggagaatcccgggcctatggactggatttggcgcatccttttccttgtcggcgctgctaccggcgcgcattccttcgaacagaatatcgaccagcctacagagatgaccgccaccgaaggcgctatcgtgcagatcaactgcacctaccagaccagcggcttcaacggcctgttctggtatcaacagcacgccggcgaggcccctaccttcctgtcttacaatgtgctggacggcctggaagagaagggcagattcagcagcttcctgagcagaagcaagggctacagctacctgctgctgaaagaactccagatgaaggacagcgcctcctacctgtgcgcttccgtggacggcaacaacagactggccttcggcaagggcaatcaggtggtcgtgatccccaacacgcgtacaacgccgggcgaaaggagttccttgccggccttttaccccggcacaagcggaagctgtagtgggtgtggaagcctcagcctcccacttcttgcgggcctcgtcgcggcagatgcagtagcttcacttcttattgtaggcgcggtatttctctgtgctcgaccaaggaggtcacccgctcaggaggatggtaaggtgtatataaatatgccaggacgcggaagctctagacgggttaagttttccagatccgcagacgcacccgcttaccaacaagggcagaaccaactctacaatgaacttaatttggggcggagggaagagtacgacgttctggacaaaaggaggggacgagatcccgagatgggcggaaagcctcagcgaaggaagaatccgcaagaggggctttataacgaactccagaaagataaaatggcagaagcctatagtgagattgggatgaagggagaaaggaggaggggtaaaggtcacgatgggttgtaccaaggattgagcacagccactaaagatacctatgatgcgctccacatgcaggccctgccgccaagacgcgccaagagaagcggatctggcgtgaagcagaccctgaatttcgacctgctgaagctggctggcgacgtggaatccaacccaggccctggccatatggctctgcctgtgacagctctgctgctgcctctggcactgctgcttcatgctgctagacctagccagtttagagtgtcccctctggacagaacctggaacctgggcgagacagtggaactgaagtgccaggtgctgctgagcaaccctacaagcggctgctcctggctgtttcagcctagaggtgcagccgcctctcctacctttctgctgtacctgagccagaacaagcccaaggccgccgaaggactggacacccagagattcagcggcaagagactgggcgacaccttcgtgctgaccctgagcgacttcagaagagagaacgagggctactacttctgtagcgccctgagcaacagcatcatgtacttcagccacttcgtgcccgtgtttctgcccgccaagcctacaacaacccctgctcctagacctcctacaccagctcctacaatcgccagccagcctctgtctctcagacccgaagcctgtagacctgctgctggcggagctgtgcataccagaggactggatttcgcctgcgacatctacatctgggctcctctggctggcacatgtggcgtgctgctgctgtccctggtcatcaccctgtactgcaaccaccggaacaggcggagagtgtgcaagtgccctagacctgtggtcaagagcggcgacaagcctagcctgagcgccagatatgtt

SEQ ID NO: 2860 - DNA, 2826 bp, synthetic construct; identical to SEQ ID NO: 2859
  source 1..2826: mol_type = other DNA

SEQ ID NO: 2861 - DNA, 3324 bp, synthetic construct
  source 1..3324: mol_type = other DNA
atggccttaccagtgaccgccttgctcctgccgctggccttgctgctccacgccgccaggccgggcgtgacacagtctcccacacacctgattaagaccagaggccagcaagtgaccctgcggtgtagccctaagagcggccacgataccgtgtcctggtatcagcaggctctcggacagggaccccagttcatcttccagtattacgaggaagaggaacggcagcggggcaacttccccgatagattttccggccatcagttccccaactacagctccgagctgaacgtgaacgctctgctgctgggagatagcgccctgtacctgtgtgcctctagccttggctggcgcggaggcagatacaacgagcagttctttggccctggcaccagactgacagtgctcgagggacagcctaaggccaatcctaccgtgacactgttccctccaagcagcgaagaactccaggccaacaaggccacacttgtgtgcctgatctccgacttctaccctggggctgtgacagtggcttggaaggccgatggatctcctgtgaaagccggcgtggaaaccaccaagccatccaagcagagcaacaacaaatacgccgccagctcctacctgagcctgacacctgagcagtggaagtcccacagatcctacagctgccaagtgacccacgaaggcagcaccgtggaaaagacagtggcccctacagagtgcagcggatccacaacacctggcgagagaagtagcctgcctgccttctatcctggcaccagcggctcttgttctggctgtggatctctgagcctgcctctgctggctggactggttgctgctgatgctgtggcctctctgctgattgtgggagccgtgttcctgtgcgccagacctagaagaagccccgctcaagaggacggcaaggtgtacatcaacatgcccggcagaggaagcactagtagagtgaagttcagcagaagcgccgacgcccctgcctaccagcagggacagaaccaactgtacaacgagctgaacctgggcagacgggaagagtacgacgtgctggacaagcggagaggcagggaccctgagatgggcggaaagccccagcggagaaagaacccccaggaaggactgtataacgaactccagaaagacaagatggccgaagcctacagcgagatcggcatgaagggcgagcggagaagaggcaagggccacgatggcctgtaccagggcctgagcaccgccaccaaggacacctatgacgccctgcacatgcaggccctgcctccaagaagggccaagcgatctggatctggagcaacaaacttctcactactcaaacaagcaggtgacgtggaggagaatcccgggcctatggactggatttggcgcatccttttccttgtcggcgctgctaccggcgcgcattccttcgaacagaatatcgaccagcctacagagatgaccgccaccgaaggcgctatcgtgcagatcaactgcacctaccagaccagcggcttcaacggcctgttctggtatcaacagcacgccggcgaggcccctaccttcctgtcttacaatgtgctggacggcctggaagagaagggcagattcagcagcttcctgagcagaagcaagggctacagctacctgctgctgaaagaactccagatgaaggacagcgcctcctacctgtgcgcttccgtggacggcaacaacagactggccttcggcaagggcaatcaggtggtcgtgatccccaacacgcgtgcctctacaaagggaccctccgtgtttcctctggctcccagcagcaagtctacaagcggaggaacagccgctctgggctgcctggtcaaggattactttcccgagcctgtgaccgtgtcctggaatagcggagcactgacaagcggcgtgcacacctttccagccgtgctgcaaagcagcggcctgtactctctgagcagcgtggtcacagtgcctagctctagcctgggcacccagacctacatctgcaatgtgaaccacaagcctagcaacaccaaggtggacaagagagtggaacccaagagctgtggtaccacaacgccgggcgaaaggagttccttgccggccttttaccccggcacaagcggaagctgtagtgggtgtggaagcctcagcctcccacttcttgcgggcctcgtcgcggcagatgcagtagcttcacttcttattgtaggcgcggtatttctctgtgctcgaccaaggaggtcacccgctcaggaggatggtaaggtgtatataaatatgccaggacgcggaagctctagacgggttaagttttccagatccgcagacgcacccgcttaccaacaagggcagaaccaactctacaatgaacttaatttggggcggagggaagagtacgacgttctggacaaaaggaggggacgagatcccgagatgggcggaaagcctcagcgaaggaagaatccgcaagaggggctttataacgaactccagaaagataaaatggcagaagcctatagtgagattgggatgaagggagaaaggaggaggggtaaaggtcacgatgggttgtaccaaggattgagcacagccactaaagatacctatgatgcgctccacatgcaggccctgccgccaagacgcgccaagagaagcggatctggcgtgaagcagaccctgaatttcgacctgctgaagctggctggcgacgtggaatccaacccaggccctggccatatggctacctacgaggtgctgtgcgaggtggcaagaaagctgggcaccgacgacagagaagtggtgctgttcctgctgaacgtgttcatccctcagcctacactggcccagctgatcggtgcactgagagccctgaaagaggaaggccggctgacctttcctctgctggccgaatgcctgttcagagccggaagaagggatctgctgcgggacctgctgcatctggaccccagatttctggaaagacacctggccggcaccatgagctacttcagcccttaccagctgaccgtgctgcacgttgacggcgaactgtgcgccagagatattcggagcctgatcttcctgagcaaggacaccatcggcagccggtctacccctcagacatttctgcactgggtgtactgcatggaaaacctggacctgctcggccccacagatgtggatgccctgatgtccatgctgagaagcctgagcagagtggacctccagagacaggtgcagacactgatgggactgcacctgagcggacctagccacagccagcactacagacacacccct

SEQ ID NO: 2862 - DNA, 3483 bp, synthetic construct
  source 1..3483: mol_type = other DNA
atggccttaccagtgaccgccttgctcctgccgctggccttgctgctccacgccgccaggccgggcgtgacacagtctcccacacacctgattaagaccagaggccagcaagtgaccctgcggtgtagccctaagagcggccacgataccgtgtcctggtatcagcaggctctcggacagggaccccagttcatcttccagtattacgaggaagaggaacggcagcggggcaacttccccgatagattttccggccatcagttccccaactacagctccgagctgaacgtgaacgctctgctgctgggagatagcgccctgtacctgtgtgcctctagccttggctggcgcggaggcagatacaacgagcagttctttggccctggcaccagactgacagtgctcgagggacagcctaaggccaatcctaccgtgacactgttccctccaagcagcgaagaactccaggccaacaaggccacacttgtgtgcctgatctccgacttctaccctggggctgtgacagtggcttggaaggccgatggatctcctgtgaaagccggcgtggaaaccaccaagccatccaagcagagcaacaacaaatacgccgccagctcctacctgagcctgacacctgagcagtggaagtcccacagatcctacagctgccaagtgacccacgaaggcagcaccgtggaaaagacagtggcccctacagagtgcagcggatccacaacacctggcgagagaagtagcctgcctgccttctatcctggcaccagcggctcttgttctggctgtggatctctgagcctgcctctgctggctggactggttgctgctgatgctgtggcctctctgctgattgtgggagccgtgttcctgtgcgccagacctagaagaagccccgctcaagaggacggcaaggtgtacatcaacatgcccggcagaggaagcactagtagagtgaagttcagcagaagcgccgacgcccctgcctaccagcagggacagaaccaactgtacaacgagctgaacctgggcagacgggaagagtacgacgtgctggacaagcggagaggcagggaccctgagatgggcggaaagccccagcggagaaagaacccccaggaaggactgtataacgaactccagaaagacaagatggccgaagcctacagcgagatcggcatgaagggcgagcggagaagaggcaagggccacgatggcctgtaccagggcctgagcaccgccaccaaggacacctatgacgccctgcacatgcaggccctgcctccaagaagggccaagcgatctggatctggagcaacaaacttctcactactcaaacaagcaggtgacgtggaggagaatcccgggcctatggactggatttggcgcatccttttccttgtcggcgctgctaccggcgcgcattccttcgaacagaatatcgaccagcctacagagatgaccgccaccgaaggcgctatcgtgcagatcaactgcacctaccagaccagcggcttcaacggcctgttctggtatcaacagcacgccggcgaggcccctaccttcctgtcttacaatgtgctggacggcctggaagagaagggcagattcagcagcttcctgagcagaagcaagggctacagctacctgctgctgaaagaactccagatgaaggacagcgcctcctacctgtgcgcttccgtggacggcaacaacagactggccttcggcaagggcaatcaggtggtcgtgatccccaacacgcgtgcctctacaaagggaccctccgtgtttcctctggctcccagcagcaagtctacaagcggaggaacagccgctctgggctgcctggtcaaggattactttcccgagcctgtgaccgtgtcctggaatagcggagcactgacaagcggcgtgcacacctttccagccgtgctgcaaagcagcggcctgtactctctgagcagcgtggtcacagtgcctagctctagcctgggcacccagacctacatctgcaatgtgaaccacaagcctagcaacaccaaggtggacaagagagtggaacccaagagctgtggtaccacaacgccgggcgaaaggagttccttgccggccttttaccccggcacaagcggaagctgtagtgggtgtggaagcctcagcctcccacttcttgcgggcctcgtcgcggcagatgcagtagcttcacttcttattgtaggcgcggtatttctctgtgctcgaccaaggaggtcacccgctcaggaggatggtaaggtgtatataaatatgccaggacgcggaagctctagacgggttaagttttccagatccgcagacgcacccgcttaccaacaagggcagaaccaactctacaatgaacttaatttggggcggagggaagagtacgacgttctggacaaaaggaggggacgagatcccgagatgggcggaaagcctcagcgaaggaagaatccgcaagaggggctttataacgaactccagaaagataaaatggcagaagcctatagtgagattgggatgaagggagaaaggaggaggggtaaaggtcacgatgggttgtaccaaggattgagcacagccactaaagatacctatgatgcgctccacatgcaggccctgccgccaagacgcgccaagagaagcggatctggcgtgaagcagaccctgaatttcgacctgctgaagctggctggcgacgtggaatccaacccaggccctggccatatgtccgactccaaggaggtccctagccttccatttttgcgacacttgctcgaagagttggacagccatgaggacagcttgctgctgtttctgtgtcacgacgcggccccgggctgcacgacggtcacgcaagctttgtgctcgcttagccaacagcgcaagctgaccctcgcggctctggtcgagatgctctacgtgctgcagcgtatggatcttctcaagagccgcttcgggctcagcaaggagggggccgagcaattgctgggcacaagctttctcacgcgctaccgcaagctcatggtttgcgtgggtgaggagctcgactcgagcgagctacgcgctctacgcttgttcgcgtgcaacctgaatccgagcctgagcacggcgctttctgagagcagccgctttgtcgagcttgtactcgcgcttgaaaacgtaggactcgtctcgccatcgagtgtttccgtgcttgcggacatgttgcgcactcttcggcgcctcgatttgtgccagcagcttgttgagtacgaacaacaagagcaagccaggtaccgttactgttacgcggcctcgccctcattgccagttcgtacgttacgtcgggggcacggcgcgagtgaacacgagcagctgtgcatgcccgtgcaagaatcctctgacagccccgagctgctgcgcacgcccgtacaagaatcctccagcgacagccccgagcaaacgact

SEQ ID NO: 2863 - DNA, 3465 bp, synthetic construct
  source 1..3465: mol_type = other DNA
atggccttaccagtgaccgccttgctcctgccgctggccttgctgctccacgccgccaggccgggcgtgacacagtctcccacacacctgattaagaccagaggccagcaagtgaccctgcggtgtagccctaagagcggccacgataccgtgtcctggtatcagcaggctctcggacagggaccccagttcatcttccagtattacgaggaagaggaacggcagcggggcaacttccccgatagattttccggccatcagttccccaactacagctccgagctgaacgtgaacgctctgctgctgggagatagcgccctgtacctgtgtgcctctagccttggctggcgcggaggcagatacaacgagcagttctttggccctggcaccagactgacagtgctcgagggacagcctaaggccaatcctaccgtgacactgttccctccaagcagcgaagaactccaggccaacaaggccacacttgtgtgcctgatctccgacttctaccctggggctgtgacagtggcttggaaggccgatggatctcctgtgaaagccggcgtggaaaccaccaagccatccaagcagagcaacaacaaatacgccgccagctcctacctgagcctgacacctgagcagtggaagtcccacagatcctacagctgccaagtgacccacgaaggcagcaccgtggaaaagacagtggcccctacagagtgcagcggatccacaacacctggcgagagaagtagcctgcctgccttctatcctggcaccagcggctcttgttctggctgtggatctctgagcctgcctctgctggctggactggttgctgctgatgctgtggcctctctgctgattgtgggagccgtgttcctgtgcgccagacctagaagaagccccgctcaagaggacggcaaggtgtacatcaacatgcccggcagaggaagcactagtagagtgaagttcagcagaagcgccgacgcccctgcctaccagcagggacagaaccaactgtacaacgagctgaacctgggcagacgggaagagtacgacgtgctggacaagcggagaggcagggaccctgagatgggcggaaagccccagcggagaaagaacccccaggaaggactgtataacgaactccagaaagacaagatggccgaagcctacagcgagatcggcatgaagggcgagcggagaagaggcaagggccacgatggcctgtaccagggcctgagcaccgccaccaaggacacctatgacgccctgcacatgcaggccctgcctccaagaagggccaagcgatctggatctggagcaacaaacttctcactactcaaacaagcaggtgacgtggaggagaatcccgggcctatggactggatttggcgcatccttttccttgtcggcgctgctaccggcgcgcattccttcgaacagaatatcgaccagcctacagagatgaccgccaccgaaggcgctatcgtgcagatcaactgcacctaccagaccagcggcttcaacggcctgttctggtatcaacagcacgccggcgaggcccctaccttcctgtcttacaatgtgctggacggcctggaagagaagggcagattcagcagcttcctgagcagaagcaagggctacagctacctgctgctgaaagaactccagatgaaggacagcgcctcctacctgtgcgcttccgtggacggcaacaacagactggccttcggcaagggcaatcaggtggtcgtgatccccaacacgcgtgcctctacaaagggaccctccgtgtttcctctggctcccagcagcaagtctacaagcggaggaacagccgctctgggctgcctggtcaaggattactttcccgagcctgtgaccgtgtcctggaatagcggagcactgacaagcggcgtgcacacctttccagccgtgctgcaaagcagcggcctgtactctctgagcagcgtggtcacagtgcctagctctagcctgggcacccagacctacatctgcaatgtgaaccacaagcctagcaacaccaaggtggacaagagagtggaacccaagagctgtggtaccacaacgccgggcgaaaggagttccttgccggccttttaccccggcacaagcggaagctgtagtgggtgtggaagcctcagcctcccacttcttgcgggcctcgtcgcggcagatgcagtagcttcacttcttattgtaggcgcggtatttctctgtgctcgaccaaggaggtcacccgctcaggaggatggtaaggtgtatataaatatgccaggacgcggaagctctagacgggttaagttttccagatccgcagacgcacccgcttaccaacaagggcagaaccaactctacaatgaacttaatttggggcggagggaagagtacgacgttctggacaaaaggaggggacgagatcccgagatgggcggaaagcctcagcgaaggaagaatccgcaagaggggctttataacgaactccagaaagataaaatggcagaagcctatagtgagattgggatgaagggagaaaggaggaggggtaaaggtcacgatgggttgtaccaaggattgagcacagccactaaagatacctatgatgcgctccacatgcaggccctgccgccaagacgcgccaagagaagcggatctggcgtgaagcagaccctgaatttcgacctgctgaagctggctggcgacgtggaatccaacccaggccctggccatatggctctgcctgtgacagctctgctgctgcctctggcactgctgcttcatgctgctagacctagccagtttagagtgtcccctctggacagaacctggaacctgggcgagacagtggaactgaagtgccaggtgctgctgagcaaccctacaagcggctgctcctggctgtttcagcctagaggtgcagccgcctctcctacctttctgctgtacctgagccagaacaagcccaaggccgccgaaggactggacacccagagattcagcggcaagagactgggcgacaccttcgtgctgaccctgagcgacttcagaagagagaacgagggctactacttctgtagcgccctgagcaacagcatcatgtacttcagccacttcgtgcccgtgtttctgcccgccaagcctacaacaacccctgctcctagacctcctacaccagctcctacaatcgccagccagcctctgtctctcagacccgaagcctgtagacctgctgctggcggagctgtgcataccagaggactggatttcgcctgcgacatctacatctgggctcctctggctggcacatgtggcgtgctgctgctgtccctggtcatcaccctgtactgcaaccaccggaacaggcggagagtgtgcaagtgccctagacctgtggtcaagagcggcgacaagcctagcctgagcgccagatatgtt

SEQ ID NO: 2864 - DNA, 3876 bp, synthetic construct
  source 1..3876: mol_type = other DNA
atggccttaccagtgaccgccttgctcctgccgctggccttgctgctccacgccgccaggccggaagtgcagctggttgaatctggcggaggactggttcaggctggcggatctctgagactgtcttgtgccgccagcggcagaacctttagcatgggctggtttagacaggcccctggcaaagagagagagttcgtcgccgccatcacatactctggcggcagcccttactacgccgactctgtgaagggcagattcaccatcagccgggacaacgccaagaacaccgtgtacctccagatgaacagcctgaagcctgaggacaccgccgtgtactactgcgccgccaatccaacatacggcagcgactggaacgccgagaattggggccagggaacccaagtgacagtgtctagcggtaccggcggaggcggatctggcggcggaggtagcggtggcggaggatctgaattcggcgtgacacagtctcccacacacctgattaagaccagaggccagcaagtgaccctgcggtgtagccctaagagcggccacgataccgtgtcctggtatcagcaggctctcggacagggaccccagttcatcttccagtattacgaggaagaggaacggcagcggggcaacttccccgatagattttccggccatcagttccccaactacagctccgagctgaacgtgaacgctctgctgctgggagatagcgccctgtacctgtgtgcctctagccttggctggcgcggaggcagatacaacgagcagttctttggccctggcaccagactgacagtgctcgagggacagcctaaggccaatcctaccgtgacactgttccctccaagcagcgaagaactccaggccaacaaggccacacttgtgtgcctgatctccgacttctaccctggggctgtgacagtggcttggaaggccgatggatctcctgtgaaagccggcgtggaaaccaccaagccatccaagcagagcaacaacaaatacgccgccagctcctacctgagcctgacacctgagcagtggaagtcccacagatcctacagctgccaagtgacccacgaaggcagcaccgtggaaaagacagtggcccctacagagtgcagcggatccacaacacctggcgagagaagtagcctgcctgccttctatcctggcaccagcggctcttgttctggctgtggatctctgagcctgcctctgctggctggactggttgctgctgatgctgtggcctctctgctgattgtgggagccgtgttcctgtgcgccagacctagaagaagccccgctcaagaggacggcaaggtgtacatcaacatgcccggcagaggaagcactagtagagtgaagttcagcagaagcgccgacgcccctgcctaccagcagggacagaaccaactgtacaacgagctgaacctgggcagacgggaagagtacgacgtgctggacaagcggagaggcagggaccctgagatgggcggaaagccccagcggagaaagaacccccaggaaggactgtataacgaactccagaaagacaagatggccgaagcctacagcgagatcggcatgaagggcgagcggagaagaggcaagggccacgatggcctgtaccagggcctgagcaccgccaccaaggacacctatgacgccctgcacatgcaggccctgcctccaagaagggccaagcgatctggatctggagcaacaaacttctcactactcaaacaagcaggtgacgtggaggagaatcccgggcctatggactggatttggcgcatccttttccttgtcggcgctgctaccggcgcgcattccttcgaacagaatatcgaccagcctacagagatgaccgccaccgaaggcgctatcgtgcagatcaactgcacctaccagaccagcggcttcaacggcctgttctggtatcaacagcacgccggcgaggcccctaccttcctgtcttacaatgtgctggacggcctggaagagaagggcagattcagcagcttcctgagcagaagcaagggctacagctacctgctgctgaaagaactccagatgaaggacagcgcctcctacctgtgcgcttccgtggacggcaacaacagactggccttcggcaagggcaatcaggtggtcgtgatccccaacacgcgtgcctctacaaagggaccctccgtgtttcctctggctcccagcagcaagtctacaagcggaggaacagccgctctgggctgcctggtcaaggattactttcccgagcctgtgaccgtgtcctggaatagcggagcactgacaagcggcgtgcacacctttccagccgtgctgcaaagcagcggcctgtactctctgagcagcgtggtcacagtgcctagctctagcctgggcacccagacctacatctgcaatgtgaaccacaagcctagcaacaccaaggtggacaagagagtggaacccaagagctgtggtaccacaacgccgggcgaaaggagttccttgccggccttttaccccggcacaagcggaagctgtagtgggtgtggaagcctcagcctcccacttcttgcgggcctcgtcgcggcagatgcagtagcttcacttcttattgtaggcgcggtatttctctgtgctcgaccaaggaggtcacccgctcaggaggatggtaaggtgtatataaatatgccaggacgcggaagctctagacgggttaagttttccagatccgcagacgcacccgcttaccaacaagggcagaaccaactctacaatgaacttaatttggggcggagggaagagtacgacgttctggacaaaaggaggggacgagatcccgagatgggcggaaagcctcagcgaaggaagaatccgcaagaggggctttataacgaactccagaaagataaaatggcagaagcctatagtgagattgggatgaagggagaaaggaggaggggtaaaggtcacgatgggttgtaccaaggattgagcacagccactaaagatacctatgatgcgctccacatgcaggccctgccgccaagacgcgccaagagaagcggatctggcgtgaagcagaccctgaatttcgacctgctgaagctggctggcgacgtggaatccaacccaggccctggccatatggctctgcctgtgacagctctgctgctgcctctggcactgctgcttcatgctgctagacctagccagtttagagtgtcccctctggacagaacctggaacctgggcgagacagtggaactgaagtgccaggtgctgctgagcaaccctacaagcggctgctcctggctgtttcagcctagaggtgcagccgcctctcctacctttctgctgtacctgagccagaacaagcccaaggccgccgaaggactggacacccagagattcagcggcaagagactgggcgacaccttcgtgctgaccctgagcgacttcagaagagagaacgagggctactacttctgtagcgccctgagcaacagcatcatgtacttcagccacttcgtgcccgtgtttctgcccgccaagcctacaacaacccctgctcctagacctcctacaccagctcctacaatcgccagccagcctctgtctctcagacccgaagcctgtagacctgctgctggcggagctgtgcataccagaggactggatttcgcctgcgacatctacatctgggctcctctggctggcacatgtggcgtgctgctgctgtccctggtcatcaccctgtactgcaaccaccggaacaggcggagagtgtgcaagtgccctagacctgtggtcaagagcggcgacaagcctagcctgagcgccagatatgtt

SEQ ID NO: 2865 - DNA, 4287 bp, synthetic construct
  source 1..4287: mol_type = other DNA
atggccttaccagtgaccgccttgctcctgccgctggccttgctgctccacgccgccaggccggaagtgcagctggttgaatctggcggaggactggttcaggctggcggatctctgagactgtcttgtgccgccagcggcagaacctttagcatgggctggtttagacaggcccctggcaaagagagagagttcgtcgccgccatcacatactctggcggcagcccttactacgccgactctgtgaagggcagattcaccatcagccgggacaacgccaagaacaccgtgtacctccagatgaacagcctgaagcctgaggacaccgccgtgtactactgcgccgccaatccaacatacggcagcgactggaacgccgagaattggggccagggaacccaagtgacagtgtctagcggtaccggcggaggcggatctggcggcggaggtagcggtggcggaggatctgaattcggcgtgacacagtctcccacacacctgattaagaccagaggccagcaagtgaccctgcggtgtagccctaagagcggccacgataccgtgtcctggtatcagcaggctctcggacagggaccccagttcatcttccagtattacgaggaagaggaacggcagcggggcaacttccccgatagattttccggccatcagttccccaactacagctccgagctgaacgtgaacgctctgctgctgggagatagcgccctgtacctgtgtgcctctagccttggctggcgcggaggcagatacaacgagcagttctttggccctggcaccagactgacagtgctcgagggacagcctaaggccaatcctaccgtgacactgttccctccaagcagcgaagaactccaggccaacaaggccacacttgtgtgcctgatctccgacttctaccctggggctgtgacagtggcttggaaggccgatggatctcctgtgaaagccggcgtggaaaccaccaagccatccaagcagagcaacaacaaatacgccgccagctcctacctgagcctgacacctgagcagtggaagtcccacagatcctacagctgccaagtgacccacgaaggcagcaccgtggaaaagacagtggcccctacagagtgcagcggatccacaacacctggcgagagaagtagcctgcctgccttctatcctggcaccagcggctcttgttctggctgtggatctctgagcctgcctctgctggctggactggttgctgctgatgctgtggcctctctgctgattgtgggagccgtgttcctgtgcgccagacctagaagaagccccgctcaagaggacggcaaggtgtacatcaacatgcccggcagaggaagcactagtagagtgaagttcagcagaagcgccgacgcccctgcctaccagcagggacagaaccaactgtacaacgagctgaacctgggcagacgggaagagtacgacgtgctggacaagcggagaggcagggaccctgagatgggcggaaagccccagcggagaaagaacccccaggaaggactgtataacgaactccagaaagacaagatggccgaagcctacagcgagatcggcatgaagggcgagcggagaagaggcaagggccacgatggcctgtaccagggcctgagcaccgccaccaaggacacctatgacgccctgcacatgcaggccctgcctccaagaagggccaagcgatctggatctggagcaacaaacttctcactactcaaacaagcaggtgacgtggaggagaatcccgggcctatggactggatttggcgcatccttttccttgtcggcgctgctaccggcgcgcattccgggcccgaagtgcaactggttgaatccggtggcggcctggtgcaagcaggcggatctctcagacttagctgtgccgcctccggcagaaccttcacaatgggatggtttaggcaggctccagggaaagagagagagttcgtcgccgccatctctctgtctcccacactggcctactacgccgactctgtgaaaggccggttcaccatctccagagataatgccaagaacaccgtggtgctgcaaatgaactctctgaaacccgaggatacagccctgtactattgtgccgctgaccggaagtccgtgatgagcatcagacccgattactggggacagggcacacaagtcacagtgtcctctggatccggcggcggaggatctggcggaggcggatctgggggcggaggctctttcgaacagaatatcgaccagcctacagagatgaccgccaccgaaggcgctatcgtgcagatcaactgcacctaccagaccagcggcttcaacggcctgttctggtatcaacagcacgccggcgaggcccctaccttcctgtcttacaatgtgctggacggcctggaagagaagggcagattcagcagcttcctgagcagaagcaagggctacagctacctgctgctgaaagaactccagatgaaggacagcgcctcctacctgtgcgcttccgtggacggcaacaacagactggccttcggcaagggcaatcaggtggtcgtgatccccaacacgcgtgcctctacaaagggaccctccgtgtttcctctggctcccagcagcaagtctacaagcggaggaacagccgctctgggctgcctggtcaaggattactttcccgagcctgtgaccgtgtcctggaatagcggagcactgacaagcggcgtgcacacctttccagccgtgctgcaaagcagcggcctgtactctctgagcagcgtggtcacagtgcctagctctagcctgggcacccagacctacatctgcaatgtgaaccacaagcctagcaacaccaaggtggacaagagagtggaacccaagagctgtggtaccacaacgccgggcgaaaggagttccttgccggccttttaccccggcacaagcggaagctgtagtgggtgtggaagcctcagcctcccacttcttgcgggcctcgtcgcggcagatgcagtagcttcacttcttattgtaggcgcggtatttctctgtgctcgaccaaggaggtcacccgctcaggaggatggtaaggtgtatataaatatgccaggacgcggaagctctagacgggttaagttttccagatccgcagacgcacccgcttaccaacaagggcagaaccaactctacaatgaacttaatttggggcggagggaagagtacgacgttctggacaaaaggaggggacgagatcccgagatgggcggaaagcctcagcgaaggaagaatccgcaagaggggctttataacgaactccagaaagataaaatggcagaagcctatagtgagattgggatgaagggagaaaggaggaggggtaaaggtcacgatgggttgtaccaaggattgagcacagccactaaagatacctatgatgcgctccacatgcaggccctgccgccaagacgcgccaagagaagcggatctggcgtgaagcagaccctgaatttcgacctgctgaagctggctggcgacgtggaatccaacccaggccctggccatatggctctgcctgtgacagctctgctgctgcctctggcactgctgcttcatgctgctagacctagccagtttagagtgtcccctctggacagaacctggaacctgggcgagacagtggaactgaagtgccaggtgctgctgagcaaccctacaagcggctgctcctggctgtttcagcctagaggtgcagccgcctctcctacctttctgctgtacctgagccagaacaagcccaaggccgccgaaggactggacacccagagattcagcggcaagagactgggcgacaccttcgtgctgaccctgagcgacttcagaagagagaacgagggctactacttctgtagcgccctgagcaacagcatcatgtacttcagccacttcgtgcccgtgtttctgcccgccaagcctacaacaacccctgctcctagacctcctacaccagctcctacaatcgccagccagcctctgtctctcagacccgaagcctgtagacctgctgctggcggagctgtgcataccagaggactggatttcgcctgcgacatctacatctgggctcctctggctggcacatgtggcgtgctgctgctgtccctggtcatcaccctgtactgcaaccaccggaacaggcggagagtgtgcaagtgccctagacctgtggtcaagagcggcgacaagcctagcctgagcgccagatatgtt

SEQ ID NO: 2866 - DNA, 2442 bp, synthetic construct
  source 1..2442: mol_type = other DNA
atggccttaccagtgaccgccttgctcctgccgctggccttgctgctccacgccgccaggccggaattcggcgtgacacagtctcccacacacctgattaagaccagaggccagcaagtgaccctgcggtgtagccctaagagcggccacgataccgtgtcctggtatcagcaggctctcggacagggaccccagttcatcttccagtattacgaggaagaggaacggcagcggggcaacttccccgatagattttccggccatcagttccccaactacagctccgagctgaacgtgaacgctctgctgctgggagatagcgccctgtacctgtgtgcctctagccttggctggcgcggaggcagatacaacgagcagttctttggccctggcaccagactgacagtgctcgaggacctgaagaacgtgttcccacctgaggtggccgtgttcgagcctagcgaggccgagatcagccacacccagaaagccaccctcgtgtgcctggctaccggcttctaccccgaccatgtggaactgtcttggtgggtcaacggcaaagaggtgcacagcggcgtgtctaccgacccccagccactgaaagaacagcccgccctgaacgacagccggtactgcctgagcagcagactgagagtgtccgccaccttctggcagaacccccggaaccacttcagatgccaggtgcagttctacggcctgagcgagaacgacgagtggacccaggacagagccaagcccgtgacccagatcgtgtctgccgaagcctggggcagagccgattgcggatcccagagcttcggcctgctggaccccaagctgtgctacctgctggatggcatcctgttcatctacggcgtgatcctgaccgccctgttcctgagagtgaagttcagcagaagcgccgacgcccctgcctaccagcagggacagaaccaactgtacaacgagctgaacctgggcagacgggaagagtacgacgtgctggacaagcggagaggcagggaccctgagatgggcggaaagccccagcggagaaagaacccccaggaaggactgtataacgaactccagaaagacaagatggccgaagcctacagcgagatcggcatgaagggcgagcggagaagaggcaagggccacgatggcctgtaccagggcctgagcaccgccaccaaggacacctatgacgccctgcacatgcaggccctgcctccaagaagggccaagcgatctggatctggagcaacaaacttctcactactcaaacaagcaggtgacgtggaggagaatcccgggcctactagtatggactggatttggcgcatccttttccttgtcggcgctgctaccggcgcgcattccttcgaacagaatatcgaccagcctacagagatgaccgccaccgaaggcgctatcgtgcagatcaactgcacctaccagaccagcggcttcaacggcctgttctggtatcaacagcacgccggcgaggcccctaccttcctgtcttacaatgtgctggacggcctggaagagaagggcagattcagcagcttcctgagcagaagcaagggctacagctacctgctgctgaaagaactccagatgaaggacagcgcctcctacctgtgcgcttccgtggacggcaacaacagactggccttcggcaagggcaatcaggtggtcgtgatccccaacacgcgtatccagaaccctgatcctgccgtgtaccagctgcgggatagcaagagcagcgacaagagcgtgtgtctgttcaccgacttcgacagccagaccaacgtgtcccagagcaaggactccgacgtgtacatcaccgataagaccgtgctggacatgcggagcatggacttcaagagcaactccgccgtggcctggtccaacaagtccgatttcgcctgcgccaacgccttcaacaacagcattatccccgaggacacattcttcccaagccccgagagcagctgcggtacccagagttttgggttgttggaccctaaattgtgctatctgttggacggaatcctgttcatttacggagtgatcctgaccgcattgttcctgcgggttaagttttccagatccgcagacgcacccgcttaccaacaagggcagaaccaactctacaatgaacttaatttggggcggagggaagagtacgacgttctggacaaaaggaggggacgagatcccgagatgggcggaaagcctcagcgaaggaagaatccgcaagaggggctttataacgaactccagaaagataaaatggcagaagcctatagtgagattgggatgaagggagaaaggaggaggggtaaaggtcacgatgggttgtaccaaggattgagcacagccactaaagatacctatgatgcgctccacatgcaggccctgccgccaagataa

SEQ ID NO: 2867 - DNA, 2568 bp, synthetic construct
  source 1..2568: mol_type = other DNA
atggccttaccagtgaccgccttgctcctgccgctggccttgctgctccacgccgccaggccggaattcggcgtgacacagtctcccacacacctgattaagaccagaggccagcaagtgaccctgcggtgtagccctaagagcggccacgataccgtgtcctggtatcagcaggctctcggacagggaccccagttcatcttccagtattacgaggaagaggaacggcagcggggcaacttccccgatagattttccggccatcagttccccaactacagctccgagctgaacgtgaacgctctgctgctgggagatagcgccctgtacctgtgtgcctctagccttggctggcgcggaggcagatacaacgagcagttctttggccctggcaccagactgacagtgctcgaggacctgaagaacgtgttcccacctgaggtggccgtgttcgagcctagcgaggccgagatcagccacacccagaaagccaccctcgtgtgcctggctaccggcttctaccccgaccatgtggaactgtcttggtgggtcaacggcaaagaggtgcacagcggcgtgtctaccgacccccagccactgaaagaacagcccgccctgaacgacagccggtactgcctgagcagcagactgagagtgtccgccaccttctggcagaacccccggaaccacttcagatgccaggtgcagttctacggcctgagcgagaacgacgagtggacccaggacagagccaagcccgtgacccagatcgtgtctgccgaagcctggggcagagccgattgcggatcccagagcttcggcctgctggaccccaagctgtgctacctgctggatggcatcctgttcatctacggcgtgatcctgaccgccctgttcctgagagtgaagttcagcagaagcgccgacgcccctgcctaccagcagggacagaaccaactgtacaacgagctgaacctgggcagacgggaagagtacgacgtgctggacaagcggagaggcagggaccctgagatgggcggaaagccccagcggagaaagaacccccaggaaggactgtataacgaactccagaaagacaagatggccgaagcctacagcgagatcggcatgaagggcgagcggagaagaggcaagggccacgatggcctgtaccagggcctgagcaccgccaccaaggacacctatgacgccctgcacatgcaggccctgcctccaagaagggccaagcgatctggatctggagcaacaaacttctcactactcaaacaagcaggtgacgtggaggagaatcccgggcctactagtatggactggatttggcgcatccttttccttgtcggcgctgctaccggcgcgcattccttcgaacagaatatcgaccagcctacagagatgaccgccaccgaaggcgctatcgtgcagatcaactgcacctaccagaccagcggcttcaacggcctgttctggtatcaacagcacgccggcgaggcccctaccttcctgtcttacaatgtgctggacggcctggaagagaagggcagattcagcagcttcctgagcagaagcaagggctacagctacctgctgctgaaagaactccagatgaaggacagcgcctcctacctgtgcgcttccgtggacggcaacaacagactggccttcggcaagggcaatcaggtggtcgtgatccccaacacgcgtatccagaaccctgatcctgccgtgtaccagctgcgggatagcaagagcagcgacaagagcgtgtgtctgttcaccgacttcgacagccagaccaacgtgtcccagagcaaggactccgacgtgtacatcaccgataagaccgtgctggacatgcggagcatggacttcaagagcaactccgccgtggcctggtccaacaagtccgatttcgcctgcgccaacgccttcaacaacagcattatccccgaggacacattcttcccaagccccgagagcagctgcggtacccagagcttcggcctgctggaccccaagctgtgctacctgctggatggcatcctgttcatctacggcgtgatcctgaccgccctgttcctgaaacggggcagaaagaaactcctgtatatattcaaacaaccatttatgagaccagtacaaactactcaagaggaagatggctgtagctgccgatttccagaagaagaagaaggaggatgtgaactgagagtgaagttcagcagaagcgccgacgcccctgcctaccagcagggacagaaccaactgtacaacgagctgaacctgggcagacgggaagagtacgacgtgctggacaagcggagaggcagggaccctgagatgggcggaaagccccagcggagaaagaacccccaggaaggactgtataacgaactccagaaagacaagatggccgaagcctacagcgagatcggcatgaagggcgagcggagaagaggcaagggccacgatggcctgtaccagggcctgagcaccgccaccaaggacacctatgacgccctgcacatgcaggccctgcctccaagataa

SEQ ID NO: 2868 - DNA, 2565 bp, synthetic construct
  source 1..2565: mol_type = other DNA
atggccttaccagtgaccgccttgctcctgccgctggccttgctgctccacgccgccaggccggaattcggcgtgacacagtctcccacacacctgattaagaccagaggccagcaagtgaccctgcggtgtagccctaagagcggccacgataccgtgtcctggtatcagcaggctctcggacagggaccccagttcatcttccagtattacgaggaagaggaacggcagcggggcaacttccccgatagattttccggccatcagttccccaactacagctccgagctgaacgtgaacgctctgctgctgggagatagcgccctgtacctgtgtgcctctagccttggctggcgcggaggcagatacaacgagcagttctttggccctggcaccagactgacagtgctcgaggacctgaagaacgtgttcccacctgaggtggccgtgttcgagcctagcgaggccgagatcagccacacccagaaagccaccctcgtgtgcctggctaccggcttctaccccgaccatgtggaactgtcttggtgggtcaacggcaaagaggtgcacagcggcgtgtctaccgacccccagccactgaaagaacagcccgccctgaacgacagccggtactgcctgagcagcagactgagagtgtccgccaccttctggcagaacccccggaaccacttcagatgccaggtgcagttctacggcctgagcgagaacgacgagtggacccaggacagagccaagcccgtgacccagatcgtgtctgccgaagcctggggcagagccgattgcggatcccagagcttcggcctgctggaccccaagctgtgctacctgctggatggcatcctgttcatctacggcgtgatcctgaccgccctgttcctgagagtgaagttcagcagaagcgccgacgcccctgcctaccagcagggacagaaccaactgtacaacgagctgaacctgggcagacgggaagagtacgacgtgctggacaagcggagaggcagggaccctgagatgggcggaaagccccagcggagaaagaacccccaggaaggactgtataacgaactccagaaagacaagatggccgaagcctacagcgagatcggcatgaagggcgagcggagaagaggcaagggccacgatggcctgtaccagggcctgagcaccgccaccaaggacacctatgacgccctgcacatgcaggccctgcctccaagaagggccaagcgatctggatctggagcaacaaacttctcactactcaaacaagcaggtgacgtggaggagaatcccgggcctactagtatggactggatttggcgcatccttttccttgtcggcgctgctaccggcgcgcattccttcgaacagaatatcgaccagcctacagagatgaccgccaccgaaggcgctatcgtgcagatcaactgcacctaccagaccagcggcttcaacggcctgttctggtatcaacagcacgccggcgaggcccctaccttcctgtcttacaatgtgctggacggcctggaagagaagggcagattcagcagcttcctgagcagaagcaagggctacagctacctgctgctgaaagaactccagatgaaggacagcgcctcctacctgtgcgcttccgtggacggcaacaacagactggccttcggcaagggcaatcaggtggtcgtgatccccaacacgcgtatccagaaccctgatcctgccgtgtaccagctgcgggatagcaagagcagcgacaagagcgtgtgtctgttcaccgacttcgacagccagaccaacgtgtcccagagcaaggactccgacgtgtacatcaccgataagaccgtgctggacatgcggagcatggacttcaagagcaactccgccgtggcctggtccaacaagtccgatttcgcctgcgccaacgccttcaacaacagcattatccccgaggacacattcttcccaagccccgagagcagctgcggtacccagagcttcggcctgctggaccccaagctgtgctacctgctggatggcatcctgttcatctacggcgtgatcctgaccgccctgttcctgaggagtaagaggagcaggctcctgcacagtgactacatgaacatgactccacgccgccccggacccacccgcaagcattaccagccctatgccccaccacgcgacttcgcagcctatcgctccagagtgaagttcagcagaagcgccgacgcccctgcctaccagcagggacagaaccaactgtacaacgagctgaacctgggcagacgggaagagtacgacgtgctggacaagcggagaggcagggaccctgagatgggcggaaagccccagcggagaaagaacccccaggaaggactgtataacgaactccagaaagacaagatggccgaagcctacagcgagatcggcatgaagggcgagcggagaagaggcaagggccacgatggcctgtaccagggcctgagcaccgccaccaaggacacctatgacgccctgcacatgcaggccctgcctccaagataa

SEQ ID NO: 2869 - DNA, 2550 bp, synthetic construct
  source 1..2550: mol_type = other DNA
atggccttaccagtgaccgccttgctcctgccgctggccttgctgctccacgccgccaggccggaattcggcgtgacacagtctcccacacacctgattaagaccagaggccagcaagtgaccctgcggtgtagccctaagagcggccacgataccgtgtcctggtatcagcaggctctcggacagggaccccagttcatcttccagtattacgaggaagaggaacggcagcggggcaacttccccgatagattttccggccatcagttccccaactacagctccgagctgaacgtgaacgctctgctgctgggagatagcgccctgtacctgtgtgcctctagccttggctggcgcggaggcagatacaacgagcagttctttggccctggcaccagactgacagtgctcgaggacctgaagaacgtgttcccacctgaggtggccgtgttcgagcctagcgaggccgagatcagccacacccagaaagccaccctcgtgtgcctggctaccggcttctaccccgaccatgtggaactgtcttggtgggtcaacggcaaagaggtgcacagcggcgtgtctaccgacccccagccactgaaagaacagcccgccctgaacgacagccggtactgcctgagcagcagactgagagtgtccgccaccttctggcagaacccccggaaccacttcagatgccaggtgcagttctacggcctgagcgagaacgacgagtggacccaggacagagccaagcccgtgacccagatcgtgtctgccgaagcctggggcagagccgattgcggatcccagagcttcggcctgctggaccccaagctgtgctacctgctggatggcatcctgttcatctacggcgtgatcctgaccgccctgttcctgagagtgaagttcagcagaagcgccgacgcccctgcctaccagcagggacagaaccaactgtacaacgagctgaacctgggcagacgggaagagtacgacgtgctggacaagcggagaggcagggaccctgagatgggcggaaagccccagcggagaaagaacccccaggaaggactgtataacgaactccagaaagacaagatggccgaagcctacagcgagatcggcatgaagggcgagcggagaagaggcaagggccacgatggcctgtaccagggcctgagcaccgccaccaaggacacctatgacgccctgcacatgcaggccctgcctccaagaagggccaagcgatctggatctggagcaacaaacttctcactactcaaacaagcaggtgacgtggaggagaatcccgggcctactagtatggactggatttggcgcatccttttccttgtcggcgctgctaccggcgcgcattccttcgaacagaatatcgaccagcctacagagatgaccgccaccgaaggcgctatcgtgcagatcaactgcacctaccagaccagcggcttcaacggcctgttctggtatcaacagcacgccggcgaggcccctaccttcctgtcttacaatgtgctggacggcctggaagagaagggcagattcagcagcttcctgagcagaagcaagggctacagctacctgctgctgaaagaactccagatgaaggacagcgcctcctacctgtgcgcttccgtggacggcaacaacagactggccttcggcaagggcaatcaggtggtcgtgatccccaacacgcgtatccagaaccctgatcctgccgtgtaccagctgcgggatagcaagagcagcgacaagagcgtgtgtctgttcaccgacttcgacagccagaccaacgtgtcccagagcaaggactccgacgtgtacatcaccgataagaccgtgctggacatgcggagcatggacttcaagagcaactccgccgtggcctggtccaacaagtccgatttcgcctgcgccaacgccttcaacaacagcattatccccgaggacacattcttcccaagccccgagagcagctgcggtacccagagcttcggcctgctggaccccaagctgtgctacctgctggatggcatcctgttcatctacggcgtgatcctgaccgccctgttcctgagggaccaaagactgcctcctgacgctcacaaacctccaggcggaggcagcttcagaacccctatccaagaggaacaggctgacgcccacagcaccctggcaaaaattagagtgaagttcagcagaagcgccgacgcccctgcctaccagcagggacagaaccaactgtacaacgagctgaacctgggcagacgggaagagtacgacgtgctggacaagcggagaggcagggaccctgagatgggcggaaagccccagcggagaaagaacccccaggaaggactgtataacgaactccagaaagacaagatggccgaagcctacagcgagatcggcatgaagggcgagcggagaagaggcaagggccacgatggcctgtaccagggcctgagcaccgccaccaaggacacctatgacgccctgcacatgcaggccctgcctccaagataa

SEQ ID NO: 2870 - DNA, 2802 bp, synthetic construct
  source 1..2802: mol_type = other DNA
atggccttaccagtgaccgccttgctcctgccgctggccttgctgctccacgccgccaggccggaattcggcgtgacacagtctcccacacacctgattaagaccagaggccagcaagtgaccctgcggtgtagccctaagagcggccacgataccgtgtcctggtatcagcaggctctcggacagggaccccagttcatcttccagtattacgaggaagaggaacggcagcggggcaacttccccgatagattttccggccatcagttccccaactacagctccgagctgaacgtgaacgctctgctgctgggagatagcgccctgtacctgtgtgcctctagccttggctggcgcggaggcagatacaacgagcagttctttggccctggcaccagactgacagtgctcgaggacctgaagaacgtgttcccacctgaggtggccgtgttcgagcctagcgaggccgagatcagccacacccagaaagccaccctcgtgtgcctggctaccggcttctaccccgaccatgtggaactgtcttggtgggtcaacggcaaagaggtgcacagcggcgtgtctaccgacccccagccactgaaagaacagcccgccctgaacgacagccggtactgcctgagcagcagactgagagtgtccgccaccttctggcagaacccccggaaccacttcagatgccaggtgcagttctacggcctgagcgagaacgacgagtggacccaggacagagccaagcccgtgacccagatcgtgtctgccgaagcctggggcagagccgattgcggatcccagagcttcggcctgctggaccccaagctgtgctacctgctggatggcatcctgttcatctacggcgtgatcctgaccgccctgttcctgagagtgaagttcagcagaagcgccgacgcccctgcctaccagcagggacagaaccaactgtacaacgagctgaacctgggcagacgggaagagtacgacgtgctggacaagcggagaggcagggaccctgagatgggcggaaagccccagcggagaaagaacccccaggaaggactgtataacgaactccagaaagacaagatggccgaagcctacagcgagatcggcatgaagggcgagcggagaagaggcaagggccacgatggcctgtaccagggcctgagcaccgccaccaaggacacctatgacgccctgcacatgcaggccctgcctccaagaagggccaagcgatctggatctggagcaacaaacttctcactactcaaacaagcaggtgacgtggaggagaatcccgggcctactagtatggactggatttggcgcatccttttccttgtcggcgctgctaccggcgcgcattccttcgaacagaatatcgaccagcctacagagatgaccgccaccgaaggcgctatcgtgcagatcaactgcacctaccagaccagcggcttcaacggcctgttctggtatcaacagcacgccggcgaggcccctaccttcctgtcttacaatgtgctggacggcctggaagagaagggcagattcagcagcttcctgagcagaagcaagggctacagctacctgctgctgaaagaactccagatgaaggacagcgcctcctacctgtgcgcttccgtggacggcaacaacagactggccttcggcaagggcaatcaggtggtcgtgatccccaacacgcgtatccagaaccctgatcctgccgtgtaccagctgcgggatagcaagagcagcgacaagagcgtgtgtctgttcaccgacttcgacagccagaccaacgtgtcccagagcaaggactccgacgtgtacatcaccgataagaccgtgctggacatgcggagcatggacttcaagagcaactccgccgtggcctggtccaacaagtccgatttcgcctgcgccaacgccttcaacaacagcattatccccgaggacacattcttcccaagccccgagagcagctgcggtacccagagcttcggcctgctggaccccaagctgtgctacctgctggatggcatcctgttcatctacggcgtgatcctgaccgccctgttcctgtggcggcggaagcggaaagagaagcagtctgagacaagccccaaagagttcctgaccatctacgaggacgtgaaggacctgaaaacccggcggaaccacgaacaagagcagacctttcctggcggaggcagcaccatctacagcatgatccagagccagagcagcgcccctacaagccaagagcctgcctacacactgtactccctgatccagcctagcagaaagagcggcagccggaagagaaatcacagccccagcttcaacagcacgatctacgaagtgatcggcaagagccagccaaaggctcagaaccctgccagactgagccggaaagagctggaaaacttcgacgtgtacagcagagtgaagttcagcagaagcgccgacgcccctgcctaccagcagggacagaaccaactgtacaacgagctgaacctgggcagacgggaagagtacgacgtgctggacaagcggagaggcagggaccctgagatgggcggaaagccccagcggagaaagaacccccaggaaggactgtataacgaactccagaaagacaagatggccgaagcctacagcgagatcggcatgaagggcgagcggagaagaggcaagggccacgatggcctgtaccagggcctgagcaccgccaccaaggacacctatgacgccctgcacatgcaggccctgcctccaagataa

SEQ ID NO: 2871 - DNA, 2691 bp, synthetic construct
  source 1..2691: mol_type = other DNA
atggccttaccagtgaccgccttgctcctgccgctggccttgctgctccacgccgccaggccggaattcggcgtgacacagtctcccacacacctgattaagaccagaggccagcaagtgaccctgcggtgtagccctaagagcggccacgataccgtgtcctggtatcagcaggctctcggacagggaccccagttcatcttccagtattacgaggaagaggaacggcagcggggcaacttccccgatagattttccggccatcagttccccaactacagctccgagctgaacgtgaacgctctgctgctgggagatagcgccctgtacctgtgtgcctctagccttggctggcgcggaggcagatacaacgagcagttctttggccctggcaccagactgacagtgctcgaggacctgaagaacgtgttcccacctgaggtggccgtgttcgagcctagcgaggccgagatcagccacacccagaaagccaccctcgtgtgcctggctaccggcttctaccccgaccatgtggaactgtcttggtgggtcaacggcaaagaggtgcacagcggcgtgtctaccgacccccagccactgaaagaacagcccgccctgaacgacagccggtactgcctgagcagcagactgagagtgtccgccaccttctggcagaacccccggaaccacttcagatgccaggtgcagttctacggcctgagcgagaacgacgagtggacccaggacagagccaagcccgtgacccagatcgtgtctgccgaagcctggggcagagccgattgcggatcccagagcttcggcctgctggaccccaagctgtgctacctgctggatggcatcctgttcatctacggcgtgatcctgaccgccctgttcctgaggagtaagaggagcaggctcctgcacagtgactacatgaacatgactccacgccgccccggacccacccgcaagcattaccagccctatgccccaccacgcgacttcgcagcctatcgctccagagtgaagttcagcagaagcgccgacgcccctgcctaccagcagggacagaaccaactgtacaacgagctgaacctgggcagacgggaagagtacgacgtgctggacaagcggagaggcagggaccctgagatgggcggaaagccccagcggagaaagaacccccaggaaggactgtataacgaactccagaaagacaagatggccgaagcctacagcgagatcggcatgaagggcgagcggagaagaggcaagggccacgatggcctgtaccagggcctgagcaccgccaccaaggacacctatgacgccctgcacatgcaggccctgcctccaagaagggccaagcgatctggatctggagcaacaaacttctcactactcaaacaagcaggtgacgtggaggagaatcccgggcctactagtatggactggatttggcgcatccttttccttgtcggcgctgctaccggcgcgcattccttcgaacagaatatcgaccagcctacagagatgaccgccaccgaaggcgctatcgtgcagatcaactgcacctaccagaccagcggcttcaacggcctgttctggtatcaacagcacgccggcgaggcccctaccttcctgtcttacaatgtgctggacggcctggaagagaagggcagattcagcagcttcctgagcagaagcaagggctacagctacctgctgctgaaagaactccagatgaaggacagcgcctcctacctgtgcgcttccgtggacggcaacaacagactggccttcggcaagggcaatcaggtggtcgtgatccccaacacgcgtatccagaaccctgatcctgccgtgtaccagctgcgggatagcaagagcagcgacaagagcgtgtgtctgttcaccgacttcgacagccagaccaacgtgtcccagagcaaggactccgacgtgtacatcaccgataagaccgtgctggacatgcggagcatggacttcaagagcaactccgccgtggcctggtccaacaagtccgatttcgcctgcgccaacgccttcaacaacagcattatccccgaggacacattcttcccaagccccgagagcagctgcggtacccagagcttcggcctgctggaccccaagctgtgctacctgctggatggcatcctgttcatctacggcgtgatcctgaccgccctgttcctgaaacggggcagaaagaaactcctgtatatattcaaacaaccatttatgagaccagtacaaactactcaagaggaagatggctgtagctgccgatttccagaagaagaagaaggaggatgtgaactgagagtgaagttcagcagaagcgccgacgcccctgcctaccagcagggacagaaccaactgtacaacgagctgaacctgggcagacgggaagagtacgacgtgctggacaagcggagaggcagggaccctgagatgggcggaaagccccagcggagaaagaacccccaggaaggactgtataacgaactccagaaagacaagatggccgaagcctacagcgagatcggcatgaagggcgagcggagaagaggcaagggccacgatggcctgtaccagggcctgagcaccgccaccaaggacacctatgacgccctgcacatgcaggccctgcctccaagataa

SEQ ID NO: 2872 - DNA, 2688 bp, synthetic construct
  source 1..2688: mol_type = other DNA
atggccttaccagtgaccgccttgctcctgccgctggccttgctgctccacgccgccaggccggaattcggcgtgacacagtctcccacacacctgattaagaccagaggccagcaagtgaccctgcggtgtagccctaagagcggccacgataccgtgtcctggtatcagcaggctctcggacagggaccccagttcatcttccagtattacgaggaagaggaacggcagcggggcaacttccccgatagattttccggccatcagttccccaactacagctccgagctgaacgtgaacgctctgctgctgggagatagcgccctgtacctgtgtgcctctagccttggctggcgcggaggcagatacaacgagcagttctttggccctggcaccagactgacagtgctcgaggacctgaagaacgtgttcccacctgaggtggccgtgttcgagcctagcgaggccgagatcagccacacccagaaagccaccctcgtgtgcctggctaccggcttctaccccgaccatgtggaactgtcttggtgggtcaacggcaaagaggtgcacagcggcgtgtctaccgacccccagccactgaaagaacagcccgccctgaacgacagccggtactgcctgagcagcagactgagagtgtccgccaccttctggcagaacccccggaaccacttcagatgccaggtgcagttctacggcctgagcgagaacgacgagtggacccaggacagagccaagcccgtgacccagatcgtgtctgccgaagcctggggcagagccgattgcggatcccagagcttcggcctgctggaccccaagctgtgctacctgctggatggcatcctgttcatctacggcgtgatcctgaccgccctgttcctgaggagtaagaggagcaggctcctgcacagtgactacatgaacatgactccacgccgccccggacccacccgcaagcattaccagccctatgccccaccacgcgacttcgcagcctatcgctccagagtgaagttcagcagaagcgccgacgcccctgcctaccagcagggacagaaccaactgtacaacgagctgaacctgggcagacgggaagagtacgacgtgctggacaagcggagaggcagggaccctgagatgggcggaaagccccagcggagaaagaacccccaggaaggactgtataacgaactccagaaagacaagatggccgaagcctacagcgagatcggcatgaagggcgagcggagaagaggcaagggccacgatggcctgtaccagggcctgagcaccgccaccaaggacacctatgacgccctgcacatgcaggccctgcctccaagaagggccaagcgatctggatctggagcaacaaacttctcactactcaaacaagcaggtgacgtggaggagaatcccgggcctactagtatggactggatttggcgcatccttttccttgtcggcgctgctaccggcgcgcattccttcgaacagaatatcgaccagcctacagagatgaccgccaccgaaggcgctatcgtgcagatcaactgcacctaccagaccagcggcttcaacggcctgttctggtatcaacagcacgccggcgaggcccctaccttcctgtcttacaatgtgctggacggcctggaagagaagggcagattcagcagcttcctgagcagaagcaagggctacagctacctgctgctgaaagaactccagatgaaggacagcgcctcctacctgtgcgcttccgtggacggcaacaacagactggccttcggcaagggcaatcaggtggtcgtgatccccaacacgcgtatccagaaccctgatcctgccgtgtaccagctgcgggatagcaagagcagcgacaagagcgtgtgtctgttcaccgacttcgacagccagaccaacgtgtcccagagcaaggactccgacgtgtacatcaccgataagaccgtgctggacatgcggagcatggacttcaagagcaactccgccgtggcctggtccaacaagtccgatttcgcctgcgccaacgccttcaacaacagcattatccccgaggacacattcttcccaagccccgagagcagctgcggtacccagagttttgggttgttggaccctaaattgtgctatctgttggacggaatcctgttcatttacggagtgatcctgaccgcattgttcctgaggagcaagcggtcacggctgctccacagcgattacatgaatatgacaccacgaagaccgggtcctactcgcaaacactaccaaccctacgcacctccccgcgactttgcagcgtaccgatctcgggttaagttttccagatccgcagacgcacccgcttaccaacaagggcagaaccaactctacaatgaacttaatttggggcggagggaagagtacgacgttctggacaaaaggaggggacgagatcccgagatgggcggaaagcctcagcgaaggaagaatccgcaagaggggctttataacgaactccagaaagataaaatggcagaagcctatagtgagattgggatgaagggagaaaggaggaggggtaaaggtcacgatgggttgtaccaaggattgagcacagccactaaagatacctatgatgcgctccacatgcaggccctgccgccaagataa

SEQ ID NO: 2873 - DNA, 2691 bp, synthetic construct
  source 1..2691: mol_type = other DNA
atggccttaccagtgaccgccttgctcctgccgctggccttgctgctccacgccgccaggccggaattcggcgtgacacagtctcccacacacctgattaagaccagaggccagcaagtgaccctgcggtgtagccctaagagcggccacgataccgtgtcctggtatcagcaggctctcggacagggaccccagttcatcttccagtattacgaggaagaggaacggcagcggggcaacttccccgatagattttccggccatcagttccccaactacagctccgagctgaacgtgaacgctctgctgctgggagatagcgccctgtacctgtgtgcctctagccttggctggcgcggaggcagatacaacgagcagttctttggccctggcaccagactgacagtgctcgaggacctgaagaacgtgttcccacctgaggtggccgtgttcgagcctagcgaggccgagatcagccacacccagaaagccaccctcgtgtgcctggctaccggcttctaccccgaccatgtggaactgtcttggtgggtcaacggcaaagaggtgcacagcggcgtgtctaccgacccccagccactgaaagaacagcccgccctgaacgacagccggtactgcctgagcagcagactgagagtgtccgccaccttctggcagaacccccggaaccacttcagatgccaggtgcagttctacggcctgagcgagaacgacgagtggacccaggacagagccaagcccgtgacccagatcgtgtctgccgaagcctggggcagagccgattgcggatcccagagcttcggcctgctggaccccaagctgtgctacctgctggatggcatcctgttcatctacggcgtgatcctgaccgccctgttcctgaggagtaagaggagcaggctcctgcacagtgactacatgaacatgactccacgccgccccggacccacccgcaagcattaccagccctatgccccaccacgcgacttcgcagcctatcgctccagagtgaagttcagcagaagcgccgacgcccctgcctaccagcagggacagaaccaactgtacaacgagctgaacctgggcagacgggaagagtacgacgtgctggacaagcggagaggcagggaccctgagatgggcggaaagccccagcggagaaagaacccccaggaaggactgtataacgaactccagaaagacaagatggccgaagcctacagcgagatcggcatgaagggcgagcggagaagaggcaagggccacgatggcctgtaccagggcctgagcaccgccaccaaggacacctatgacgccctgcacatgcaggccctgcctccaagaagggccaagcgatctggatctggagcaacaaacttctcactactcaaacaagcaggtgacgtggaggagaatcccgggcctactagtatggactggatttggcgcatccttttccttgtcggcgctgctaccggcgcgcattccttcgaacagaatatcgaccagcctacagagatgaccgccaccgaaggcgctatcgtgcagatcaactgcacctaccagaccagcggcttcaacggcctgttctggtatcaacagcacgccggcgaggcccctaccttcctgtcttacaatgtgctggacggcctggaagagaagggcagattcagcagcttcctgagcagaagcaagggctacagctacctgctgctgaaagaactccagatgaaggacagcgcctcctacctgtgcgcttccgtggacggcaacaacagactggccttcggcaagggcaatcaggtggtcgtgatccccaacacgcgtatccagaaccctgatcctgccgtgtaccagctgcgggatagcaagagcagcgacaagagcgtgtgtctgttcaccgacttcgacagccagaccaacgtgtcccagagcaaggactccgacgtgtacatcaccgataagaccgtgctggacatgcggagcatggacttcaagagcaactccgccgtggcctggtccaacaagtccgatttcgcctgcgccaacgccttcaacaacagcattatccccgaggacacattcttcccaagccccgagagcagctgcggtacccagagttttgggttgttggaccctaaattgtgctatctgttggacggaatcctgttcatttacggagtgatcctgaccgcattgttcctgaagagaggccggaagaagctgctgtacatcttcaagcagcctttcatgcggcccgtgcagaccacccaggaagaggacggctgctcctgccggttccccgaggaagaagaaggcggctgcgagctgcgggttaagttttccagatccgcagacgcacccgcttaccaacaagggcagaaccaactctacaatgaacttaatttggggcggagggaagagtacgacgttctggacaaaaggaggggacgagatcccgagatgggcggaaagcctcagcgaaggaagaatccgcaagaggggctttataacgaactccagaaagataaaatggcagaagcctatagtgagattgggatgaagggagaaaggaggaggggtaaaggtcacgatgggttgtaccaaggattgagcacagccactaaagatacctatgatgcgctccacatgcaggccctgccgccaagataa

SEQ ID NO: 2874 - DNA, 2442 bp, synthetic construct
  source 1..2442: mol_type = other DNA
atggccttaccagtgaccgccttgctcctgccgctggccttgctgctccacgccgccaggccggaattcggcgtgacacagtctcccacacacctgattaagaccagaggccagcaagtgaccctgcggtgtagccctaagagcggccacgataccgtgtcctggtatcagcaggctctcggacagggaccccagttcatcttccagtattacgaggaagaggaacggcagcggggcaacttccccgatagattttccggccatcagttccccaactacagctccgagctgaacgtgaacgctctgctgctgggagatagcgccctgtacctgtgtgcctctagccttggctggcgcggaggcagatacaacgagcagttctttggccctggcaccagactgacagtgctcgaggacctgaagaacgtgttcccacctgaggtggccgtgttcgagcctagcgaggccgagatcagccacacccagaaagccaccctcgtgtgcctggctaccggcttctaccccgaccatgtggaactgtcttggtgggtcaacggcaaagaggtgcacagcggcgtgtctaccgacccccagccactgaaagaacagcccgccctgaacgacagccggtactgcctgagcagcagactgagagtgtccgccaccttctggcagaacccccggaaccacttcagatgccaggtgcagttctacggcctgagcgagaacgacgagtggacccaggacagagccaagcccgtgacccagatcgtgtctgccgaagcctggggcagagccgattgcggatcccagagcttcggcctgctggaccccaagctgtgctacctgctggatggcatcctgttcatctacggcgtgatcctgaccgccctgttcctgagagtgaagttcagcagaagcgccgacgcccctgcctaccagcagggacagaaccaactgtacaacgagctgaacctgggcagacgggaagagtacgacgtgctggacaagcggagaggcagggaccctgagatgggcggaaagccccagcggagaaagaacccccaggaaggactgttcaacgaactccagaaagacaagatggccgaagccttcagcgagatcggcatgaagggcgagcggagaagaggcaagggccacgatggcctgttccagggcctgagcaccgccaccaaggacaccttcgacgccctgcacatgcaggccctgcctccaagaagggccaagcgatctggatctggagcaacaaacttctcactactcaaacaagcaggtgacgtggaggagaatcccgggcctactagtatggactggatttggcgcatccttttccttgtcggcgctgctaccggcgcgcattccttcgaacagaatatcgaccagcctacagagatgaccgccaccgaaggcgctatcgtgcagatcaactgcacctaccagaccagcggcttcaacggcctgttctggtatcaacagcacgccggcgaggcccctaccttcctgtcttacaatgtgctggacggcctggaagagaagggcagattcagcagcttcctgagcagaagcaagggctacagctacctgctgctgaaagaactccagatgaaggacagcgcctcctacctgtgcgcttccgtggacggcaacaacagactggccttcggcaagggcaatcaggtggtcgtgatccccaacacgcgtatccagaaccctgatcctgccgtgtaccagctgcgggatagcaagagcagcgacaagagcgtgtgtctgttcaccgacttcgacagccagaccaacgtgtcccagagcaaggactccgacgtgtacatcaccgataagaccgtgctggacatgcggagcatggacttcaagagcaactccgccgtggcctggtccaacaagtccgatttcgcctgcgccaacgccttcaacaacagcattatccccgaggacacattcttcccaagccccgagagcagctgcggtacccagagttttgggttgttggaccctaaattgtgctatctgttggacggaatcctgttcatttacggagtgatcctgaccgcattgttcctgcgggttaagttttccagatccgcagacgcacccgcttaccaacaagggcagaaccaactctacaatgaacttaatttggggcggagggaagagtacgacgttctggacaaaaggaggggacgagatcccgagatgggcggaaagcctcagcgaaggaagaatccgcaagaggggctttataacgaactccagaaagataaaatggcagaagcctatagtgagattgggatgaagggagaaaggaggaggggtaaaggtcacgatgggttgtaccaaggattgagcacagccactaaagatacctatgatgcgctccacatgcaggccctgccgccaagataa

SEQ ID NO: 2875 - DNA, 2442 bp, synthetic construct
  source 1..2442: mol_type = other DNA
atggccttaccagtgaccgccttgctcctgccgctggccttgctgctccacgccgccaggccggaattcggcgtgacacagtctcccacacacctgattaagaccagaggccagcaagtgaccctgcggtgtagccctaagagcggccacgataccgtgtcctggtatcagcaggctctcggacagggaccccagttcatcttccagtattacgaggaagaggaacggcagcggggcaacttccccgatagattttccggccatcagttccccaactacagctccgagctgaacgtgaacgctctgctgctgggagatagcgccctgtacctgtgtgcctctagccttggctggcgcggaggcagatacaacgagcagttctttggccctggcaccagactgacagtgctcgaggacctgaagaacgtgttcccacctgaggtggccgtgttcgagcctagcgaggccgagatcagccacacccagaaagccaccctcgtgtgcctggctaccggcttctaccccgaccatgtggaactgtcttggtgggtcaacggcaaagaggtgcacagcggcgtgtctaccgacccccagccactgaaagaacagcccgccctgaacgacagccggtactgcctgagcagcagactgagagtgtccgccaccttctggcagaacccccggaaccacttcagatgccaggtgcagttctacggcctgagcgagaacgacgagtggacccaggacagagccaagcccgtgacccagatcgtgtctgccgaagcctggggcagagccgattgcggatcccagagcttcggcctgctggaccccaagctgtgctacctgctggatggcatcctgttcatctacggcgtgatcctgaccgccctgttcctgagagtgaagttcagcagaagcgccgacgcccctgcctaccagcagggacagaaccaactgtacaacgagctgaacctgggcagacgggaagagtacgacgtgctggacaagcggagaggcagggaccctgagatgggcggaaagccccagcggagaaagaacccccaggaaggactgttcaacgaactccagaaagacaagatggccgaagccttcagcgagatcggcatgaagggcgagcggagaagaggcaagggccacgatggcctgttccagggcctgagcaccgccaccaaggacaccttcgacgccctgcacatgcaggccctgcctccaagaagggccaagcgatctggatctggagcaacaaacttctcactactcaaacaagcaggtgacgtggaggagaatcccgggcctactagtatggactggatttggcgcatccttttccttgtcggcgctgctaccggcgcgcattccttcgaacagaatatcgaccagcctacagagatgaccgccaccgaaggcgctatcgtgcagatcaactgcacctaccagaccagcggcttcaacggcctgttctggtatcaacagcacgccggcgaggcccctaccttcctgtcttacaatgtgctggacggcctggaagagaagggcagattcagcagcttcctgagcagaagcaagggctacagctacctgctgctgaaagaactccagatgaaggacagcgcctcctacctgtgcgcttccgtggacggcaacaacagactggccttcggcaagggcaatcaggtggtcgtgatccccaacacgcgtatccagaaccctgatcctgccgtgtaccagctgcgggatagcaagagcagcgacaagagcgtgtgtctgttcaccgacttcgacagccagaccaacgtgtcccagagcaaggactccgacgtgtacatcaccgataagaccgtgctggacatgcggagcatggacttcaagagcaactccgccgtggcctggtccaacaagtccgatttcgcctgcgccaacgccttcaacaacagcattatccccgaggacacattcttcccaagccccgagagcagctgcggtacccagagcttcggcctgctggaccccaagctgtgctacctgctggatggcatcctgttcatctacggcgtgatcctgaccgccctgttcctgagagtgaagttcagcagaagcgccgacgcccctgcctaccagcagggacagaaccaactgtacaacgagctgaacctgggcagacgggaagagtacgacgtgctggacaagcggagaggcagggaccctgagatgggcggaaagccccagcggagaaagaacccccaggaaggactgtataacgaactccagaaagacaagatggccgaagcctacagcgagatcggcatgaagggcgagcggagaagaggcaagggccacgatggcctgtaccagggcctgagcaccgccaccaaggacacctatgacgccctgcacatgcaggccctgcctccaagataa

SEQ ID NO: 2876 - DNA, 2568 bp, synthetic construct
  source 1..2568: mol_type = other DNA
atggccttaccagtgaccgccttgctcctgccgctggccttgctgctccacgccgccaggccggaattcggcgtgacacagtctcccacacacctgattaagaccagaggccagcaagtgaccctgcggtgtagccctaagagcggccacgataccgtgtcctggtatcagcaggctctcggacagggaccccagttcatcttccagtattacgaggaagaggaacggcagcggggcaacttccccgatagattttccggccatcagttccccaactacagctccgagctgaacgtgaacgctctgctgctgggagatagcgccctgtacctgtgtgcctctagccttggctggcgcggaggcagatacaacgagcagttctttggccctggcaccagactgacagtgctcgaggacctgaagaacgtgttcccacctgaggtggccgtgttcgagcctagcgaggccgagatcagccacacccagaaagccaccctcgtgtgcctggctaccggcttctaccccgaccatgtggaactgtcttggtgggtcaacggcaaagaggtgcacagcggcgtgtctaccgacccccagccactgaaagaacagcccgccctgaacgacagccggtactgcctgagcagcagactgagagtgtccgccaccttctggcagaacccccggaaccacttcagatgccaggtgcagttctacggcctgagcgagaacgacgagtggacccaggacagagccaagcccgtgacccagatcgtgtctgccgaagcctggggcagagccgattgcggatcccagagcttcggcctgctggaccccaagctgtgctacctgctggatggcatcctgttcatctacggcgtgatcctgaccgccctgttcctgagagtgaagttcagcagaagcgccgacgcccctgcctaccagcagggacagaaccaactgtacaacgagctgaacctgggcagacgggaagagtacgacgtgctggacaagcggagaggcagggaccctgagatgggcggaaagccccagcggagaaagaacccccaggaaggactgttcaacgaactccagaaagacaagatggccgaagccttcagcgagatcggcatgaagggcgagcggagaagaggcaagggccacgatggcctgttccagggcctgagcaccgccaccaaggacaccttcgacgccctgcacatgcaggccctgcctccaagaagggccaagcgatctggatctggagcaacaaacttctcactactcaaacaagcaggtgacgtggaggagaatcccgggcctactagtatggactggatttggcgcatccttttccttgtcggcgctgctaccggcgcgcattccttcgaacagaatatcgaccagcctacagagatgaccgccaccgaaggcgctatcgtgcagatcaactgcacctaccagaccagcggcttcaacggcctgttctggtatcaacagcacgccggcgaggcccctaccttcctgtcttacaatgtgctggacggcctggaagagaagggcagattcagcagcttcctgagcagaagcaagggctacagctacctgctgctgaaagaactccagatgaaggacagcgcctcctacctgtgcgcttccgtggacggcaacaacagactggccttcggcaagggcaatcaggtggtcgtgatccccaacacgcgtatccagaaccctgatcctgccgtgtaccagctgcgggatagcaagagcagcgacaagagcgtgtgtctgttcaccgacttcgacagccagaccaacgtgtcccagagcaaggactccgacgtgtacatcaccgataagaccgtgctggacatgcggagcatggacttcaagagcaactccgccgtggcctggtccaacaagtccgatttcgcctgcgccaacgccttcaacaacagcattatccccgaggacacattcttcccaagccccgagagcagctgcggtacccagagcttcggcctgctggaccccaagctgtgctacctgctggatggcatcctgttcatctacggcgtgatcctgaccgccctgttcctgaaacggggcagaaagaaactcctgtatatattcaaacaaccatttatgagaccagtacaaactactcaagaggaagatggctgtagctgccgatttccagaagaagaagaaggaggatgtgaactgagagtgaagttcagcagaagcgccgacgcccctgcctaccagcagggacagaaccaactgtacaacgagctgaacctgggcagacgggaagagtacgacgtgctggacaagcggagaggcagggaccctgagatgggcggaaagccccagcggagaaagaacccccaggaaggactgtataacgaactccagaaagacaagatggccgaagcctacagcgagatcggcatgaagggcgagcggagaagaggcaagggccacgatggcctgtaccagggcctgagcaccgccaccaaggacacctatgacgccctgcacatgcaggccctgcctccaagataa

SEQ ID NO: 2877 - DNA, 2565 bp, synthetic construct
  source 1..2565: mol_type = other DNA
atggccttaccagtgaccgccttgctcctgccgctggccttgctgctccacgccgccaggccggaattcggcgtgacacagtctcccacacacctgattaagaccagaggccagcaagtgaccctgcggtgtagccctaagagcggccacgataccgtgtcctggtatcagcaggctctcggacagggaccccagttcatcttccagtattacgaggaagaggaacggcagcggggcaacttccccgatagattttccggccatcagttccccaactacagctccgagctgaacgtgaacgctctgctgctgggagatagcgccctgtacctgtgtgcctctagccttggctggcgcggaggcagatacaacgagcagttctttggccctggcaccagactgacagtgctcgaggacctgaagaacgtgttcccacctgaggtggccgtgttcgagcctagcgaggccgagatcagccacacccagaaagccaccctcgtgtgcctggctaccggcttctaccccgaccatgtggaactgtcttggtgggtcaacggcaaagaggtgcacagcggcgtgtctaccgacccccagccactgaaagaacagcccgccctgaacgacagccggtactgcctgagcagcagactgagagtgtccgccaccttctggcagaacccccggaaccacttcagatgccaggtgcagttctacggcctgagcgagaacgacgagtggacccaggacagagccaagcccgtgacccagatcgtgtctgccgaagcctggggcagagccgattgcggatcccagagcttcggcctgctggaccccaagctgtgctacctgctggatggcatcctgttcatctacggcgtgatcctgaccgccctgttcctgagagtgaagttcagcagaagcgccgacgcccctgcctaccagcagggacagaaccaactgtacaacgagctgaacctgggcagacgggaagagtacgacgtgctggacaagcggagaggcagggaccctgagatgggcggaaagccccagcggagaaagaacccccaggaaggactgttcaacgaactccagaaagacaagatggccgaagccttcagcgagatcggcatgaagggcgagcggagaagaggcaagggccacgatggcctgttccagggcctgagcaccgccaccaaggacaccttcgacgccctgcacatgcaggccctgcctccaagaagggccaagcgatctggatctggagcaacaaacttctcactactcaaacaagcaggtgacgtggaggagaatcccgggcctactagtatggactggatttggcgcatccttttccttgtcggcgctgctaccggcgcgcattccttcgaacagaatatcgaccagcctacagagatgaccgccaccgaaggcgctatcgtgcagatcaactgcacctaccagaccagcggcttcaacggcctgttctggtatcaacagcacgccggcgaggcccctaccttcctgtcttacaatgtgctggacggcctggaagagaagggcagattcagcagcttcctgagcagaagcaagggctacagctacctgctgctgaaagaactccagatgaaggacagcgcctcctacctgtgcgcttccgtggacggcaacaacagactggccttcggcaagggcaatcaggtggtcgtgatccccaacacgcgtatccagaaccctgatcctgccgtgtaccagctgcgggatagcaagagcagcgacaagagcgtgtgtctgttcaccgacttcgacagccagaccaacgtgtcccagagcaaggactccgacgtgtacatcaccgataagaccgtgctggacatgcggagcatggacttcaagagcaactccgccgtggcctggtccaacaagtccgatttcgcctgcgccaacgccttcaacaacagcattatccccgaggacacattcttcccaagccccgagagcagctgcggtacccagagcttcggcctgctggaccccaagctgtgctacctgctggatggcatcctgttcatctacggcgtgatcctgaccgccctgttcctgaggagtaagaggagcaggctcctgcacagtgactacatgaacatgactccacgccgccccggacccacccgcaagcattaccagccctatgccccaccacgcgacttcgcagcctatcgctccagagtgaagttcagcagaagcgccgacgcccctgcctaccagcagggacagaaccaactgtacaacgagctgaacctgggcagacgggaagagtacgacgtgctggacaagcggagaggcagggaccctgagatgggcggaaagccccagcggagaaagaacccccaggaaggactgtataacgaactccagaaagacaagatggccgaagcctacagcgagatcggcatgaagggcgagcggagaagaggcaagggccacgatggcctgtaccagggcctgagcaccgccaccaaggacacctatgacgccctgcacatgcaggccctgcctccaagataa

SEQ ID NO: 2878 - DNA, 2550 bp, synthetic construct
  source 1..2550: mol_type = other DNA
atggccttaccagtgaccgccttgctcctgccgctggccttgctgctccacgccgccaggccggaattcggcgtgacacagtctcccacacacctgattaagaccagaggccagcaagtgaccctgcggtgtagccctaagagcggccacgataccgtgtcctggtatcagcaggctctcggacagggaccccagttcatcttccagtattacgaggaagaggaacggcagcggggcaacttccccgatagattttccggccatcagttccccaactacagctccgagctgaacgtgaacgctctgctgctgggagatagcgccctgtacctgtgtgcctctagccttggctggcgcggaggcagatacaacgagcagttctttggccctggcaccagactgacagtgctcgaggacctgaagaacgtgttcccacctgaggtggccgtgttcgagcctagcgaggccgagatcagccacacccagaaagccaccctcgtgtgcctggctaccggcttctaccccgaccatgtggaactgtcttggtgggtcaacggcaaagaggtgcacagcggcgtgtctaccgacccccagccactgaaagaacagcccgccctgaacgacagccggtactgcctgagcagcagactgagagtgtccgccaccttctggcagaacccccggaaccacttcagatgccaggtgcagttctacggcctgagcgagaacgacgagtggacccaggacagagccaagcccgtgacccagatcgtgtctgccgaagcctggggcagagccgattgcggatcccagagcttcggcctgctggaccccaagctgtgctacctgctggatggcatcctgttcatctacggcgtgatcctgaccgccctgttcctgagagtgaagttcagcagaagcgccgacgcccctgcctaccagcagggacagaaccaactgtacaacgagctgaacctgggcagacgggaagagtacgacgtgctggacaagcggagaggcagggaccctgagatgggcggaaagccccagcggagaaagaacccccaggaaggactgttcaacgaactccagaaagacaagatggccgaagccttcagcgagatcggcatgaagggcgagcggagaagaggcaagggccacgatggcctgttccagggcctgagcaccgccaccaaggacaccttcgacgccctgcacatgcaggccctgcctccaagaagggccaagcgatctggatctggagcaacaaacttctcactactcaaacaagcaggtgacgtggaggagaatcccgggcctactagtatggactggatttggcgcatccttttccttgtcggcgctgctaccggcgcgcattccttcgaacagaatatcgaccagcctacagagatgaccgccaccgaaggcgctatcgtgcagatcaactgcacctaccagaccagcggcttcaacggcctgttctggtatcaacagcacgccggcgaggcccctaccttcctgtcttacaatgtgctggacggcctggaagagaagggcagattcagcagcttcctgagcagaagcaagggctacagctacctgctgctgaaagaactccagatgaaggacagcgcctcctacctgtgcgcttccgtggacggcaacaacagactggccttcggcaagggcaatcaggtggtcgtgatccccaacacgcgtatccagaaccctgatcctgccgtgtaccagctgcgggatagcaagagcagcgacaagagcgtgtgtctgttcaccgacttcgacagccagaccaacgtgtcccagagcaaggactccgacgtgtacatcaccgataagaccgtgctggacatgcggagcatggacttcaagagcaactccgccgtggcctggtccaacaagtccgatttcgcctgcgccaacgccttcaacaacagcattatccccgaggacacattcttcccaagccccgagagcagctgcggtacccagagcttcggcctgctggaccccaagctgtgctacctgctggatggcatcctgttcatctacggcgtgatcctgaccgccctgttcctgagggaccaaagactgcctcctgacgctcacaaacctccaggcggaggcagcttcagaacccctatccaagaggaacaggctgacgcccacagcaccctggcaaaaattagagtgaagttcagcagaagcgccgacgcccctgcctaccagcagggacagaaccaactgtacaacgagctgaacctgggcagacgggaagagtacgacgtgctggacaagcggagaggcagggaccctgagatgggcggaaagccccagcggagaaagaacccccaggaaggactgtataacgaactccagaaagacaagatggccgaagcctacagcgagatcggcatgaagggcgagcggagaagaggcaagggccacgatggcctgtaccagggcctgagcaccgccaccaaggacacctatgacgccctgcacatgcaggccctgcctccaagataa

SEQ ID NO: 2879 - DNA, 2802 bp, synthetic construct
  source 1..2802: mol_type = other DNA
atggccttaccagtgaccgccttgctcctgccgctggccttgctgctccacgccgccaggccggaattcggcgtgacacagtctcccacacacctgattaagaccagaggccagcaagtgaccctgcggtgtagccctaagagcggccacgataccgtgtcctggtatcagcaggctctcggacagggaccccagttcatcttccagtattacgaggaagaggaacggcagcggggcaacttccccgatagattttccggccatcagttccccaactacagctccgagctgaacgtgaacgctctgctgctgggagatagcgccctgtacctgtgtgcctctagccttggctggcgcggaggcagatacaacgagcagttctttggccctggcaccagactgacagtgctcgaggacctgaagaacgtgttcccacctgaggtggccgtgttcgagcctagcgaggccgagatcagccacacccagaaagccaccctcgtgtgcctggctaccggcttctaccccgaccatgtggaactgtcttggtgggtcaacggcaaagaggtgcacagcggcgtgtctaccgacccccagccactgaaagaacagcccgccctgaacgacagccggtactgcctgagcagcagactgagagtgtccgccaccttctggcagaacccccggaaccacttcagatgccaggtgcagttctacggcctgagcgagaacgacgagtggacccaggacagagccaagcccgtgacccagatcgtgtctgccgaagcctggggcagagccgattgcggatcccagagcttcggcctgctggaccccaagctgtgctacctgctggatggcatcctgttcatctacggcgtgatcctgaccgccctgttcctgagagtgaagttcagcagaagcgccgacgcccctgcctaccagcagggacagaaccaactgtacaacgagctgaacctgggcagacgggaagagtacgacgtgctggacaagcggagaggcagggaccctgagatgggcggaaagccccagcggagaaagaacccccaggaaggactgttcaacgaactccagaaagacaagatggccgaagccttcagcgagatcggcatgaagggcgagcggagaagaggcaagggccacgatggcctgttccagggcctgagcaccgccaccaaggacaccttcgacgccctgcacatgcaggccctgcctccaagaagggccaagcgatctggatctggagcaacaaacttctcactactcaaacaagcaggtgacgtggaggagaatcccgggcctactagtatggactggatttggcgcatccttttccttgtcggcgctgctaccggcgcgcattccttcgaacagaatatcgaccagcctacagagatgaccgccaccgaaggcgctatcgtgcagatcaactgcacctaccagaccagcggcttcaacggcctgttctggtatcaacagcacgccggcgaggcccctaccttcctgtcttacaatgtgctggacggcctggaagagaagggcagattcagcagcttcctgagcagaagcaagggctacagctacctgctgctgaaagaactccagatgaaggacagcgcctcctacctgtgcgcttccgtggacggcaacaacagactggccttcggcaagggcaatcaggtggtcgtgatccccaacacgcgtatccagaaccctgatcctgccgtgtaccagctgcgggatagcaagagcagcgacaagagcgtgtgtctgttcaccgacttcgacagccagaccaacgtgtcccagagcaaggactccgacgtgtacatcaccgataagaccgtgctggacatgcggagcatggacttcaagagcaactccgccgtggcctggtccaacaagtccgatttcgcctgcgccaacgccttcaacaacagcattatccccgaggacacattcttcccaagccccgagagcagctgcggtacccagagcttcggcctgctggaccccaagctgtgctacctgctggatggcatcctgttcatctacggcgtgatcctgaccgccctgttcctgtggcggcggaagcggaaagagaagcagtctgagacaagccccaaagagttcctgaccatctacgaggacgtgaaggacctgaaaacccggcggaaccacgaacaagagcagacctttcctggcggaggcagcaccatctacagcatgatccagagccagagcagcgcccctacaagccaagagcctgcctacacactgtactccctgatccagcctagcagaaagagcggcagccggaagagaaatcacagccccagcttcaacagcacgatctacgaagtgatcggcaagagccagccaaaggctcagaaccctgccagactgagccggaaagagctggaaaacttcgacgtgtacagcagagtgaagttcagcagaagcgccgacgcccctgcctaccagcagggacagaaccaactgtacaacgagctgaacctgggcagacgggaagagtacgacgtgctggacaagcggagaggcagggaccctgagatgggcggaaagccccagcggagaaagaacccccaggaaggactgtataacgaactccagaaagacaagatggccgaagcctacagcgagatcggcatgaagggcgagcggagaagaggcaagggccacgatggcctgtaccagggcctgagcaccgccaccaaggacacctatgacgccctgcacatgcaggccctgcctccaagataa

SEQ ID NO: 2880 - DNA, 2565 bp, synthetic construct
  source 1..2565: mol_type = other DNA
atggccttaccagtgaccgccttgctcctgccgctggccttgctgctccacgccgccaggccggaattcggcgtgacacagtctcccacacacctgattaagaccagaggccagcaagtgaccctgcggtgtagccctaagagcggccacgataccgtgtcctggtatcagcaggctctcggacagggaccccagttcatcttccagtattacgaggaagaggaacggcagcggggcaacttccccgatagattttccggccatcagttccccaactacagctccgagctgaacgtgaacgctctgctgctgggagatagcgccctgtacctgtgtgcctctagccttggctggcgcggaggcagatacaacgagcagttctttggccctggcaccagactgacagtgctcgaggacctgaagaacgtgttcccacctgaggtggccgtgttcgagcctagcgaggccgagatcagccacacccagaaagccaccctcgtgtgcctggctaccggcttctaccccgaccatgtggaactgtcttggtgggtcaacggcaaagaggtgcacagcggcgtgtctaccgacccccagccactgaaagaacagcccgccctgaacgacagccggtactgcctgagcagcagactgagagtgtccgccaccttctggcagaacccccggaaccacttcagatgccaggtgcagttctacggcctgagcgagaacgacgagtggacccaggacagagccaagcccgtgacccagatcgtgtctgccgaagcctggggcagagccgattgcggatcccagagcttcggcctgctggaccccaagctgtgctacctgctggatggcatcctgttcatctacggcgtgatcctgaccgccctgttcctgagagtgaagttcagcagaagcgccgacgcccctgcctaccagcagggacagaaccaactgtacaacgagctgaacctgggcagacgggaagagtacgacgtgctggacaagcggagaggcagggaccctgagatgggcggaaagccccagcggagaaagaacccccaggaaggactgttcaacgaactccagaaagacaagatggccgaagccttcagcgagatcggcatgaagggcgagcggagaagaggcaagggccacgatggcctgttccagggcctgagcaccgccaccaaggacaccttcgacgccctgcacatgcaggccctgcctccaagaagggccaagcgatctggatctggagcaacaaacttctcactactcaaacaagcaggtgacgtggaggagaatcccgggcctactagtatggactggatttggcgcatccttttccttgtcggcgctgctaccggcgcgcattccttcgaacagaatatcgaccagcctacagagatgaccgccaccgaaggcgctatcgtgcagatcaactgcacctaccagaccagcggcttcaacggcctgttctggtatcaacagcacgccggcgaggcccctaccttcctgtcttacaatgtgctggacggcctggaagagaagggcagattcagcagcttcctgagcagaagcaagggctacagctacctgctgctgaaagaactccagatgaaggacagcgcctcctacctgtgcgcttccgtggacggcaacaacagactggccttcggcaagggcaatcaggtggtcgtgatccccaacacgcgtatccagaaccctgatcctgccgtgtaccagctgcgggatagcaagagcagcgacaagagcgtgtgtctgttcaccgacttcgacagccagaccaacgtgtcccagagcaaggactccgacgtgtacatcaccgataagaccgtgctggacatgcggagcatggacttcaagagcaactccgccgtggcctggtccaacaagtccgatttcgcctgcgccaacgccttcaacaacagcattatccccgaggacacattcttcccaagccccgagagcagctgcggtacccagagttttgggttgttggaccctaaattgtgctatctgttggacggaatcctgttcatttacggagtgatcctgaccgcattgttcctgaggagcaagcggtcacggctgctccacagcgattacatgaatatgacaccacgaagaccgggtcctactcgcaaacactaccaaccctacgcacctccccgcgactttgcagcgtaccgatctcgggttaagttttccagatccgcagacgcacccgcttaccaacaagggcagaaccaactctacaatgaacttaatttggggcggagggaagagtacgacgttctggacaaaaggaggggacgagatcccgagatgggcggaaagcctcagcgaaggaagaatccgcaagaggggctttataacgaactccagaaagataaaatggcagaagcctatagtgagattgggatgaagggagaaaggaggaggggtaaaggtcacgatgggttgtaccaaggattgagcacagccactaaagatacctatgatgcgctccacatgcaggccctgccgccaagataa

SEQ ID NO: 2881 - DNA, 2568 bp, synthetic construct
  source 1..2568: mol_type = other DNA
atggccttaccagtgaccgccttgctcctgccgctggccttgctgctccacgccgccaggccggaattcggcgtgacacagtctcccacacacctgattaagaccagaggccagcaagtgaccctgcggtgtagccctaagagcggccacgataccgtgtcctggtatcagcaggctctcggacagggaccccagttcatcttccagtattacgaggaagaggaacggcagcggggcaacttccccgatagattttccggccatcagttccccaactacagctccgagctgaacgtgaacgctctgctgctgggagatagcgccctgtacctgtgtgcctctagccttggctggcgcggaggcagatacaacgagcagttctttggccctggcaccagactgacagtgctcgaggacctgaagaacgtgttcccacctgaggtggccgtgttcgagcctagcgaggccgagatcagccacacccagaaagccaccctcgtgtgcctggctaccggcttctaccccgaccatgtggaactgtcttggtgggtcaacggcaaagaggtgcacagcggcgtgtctaccgacccccagccactgaaagaacagcccgccctgaacgacagccggtactgcctgagcagcagactgagagtgtccgccaccttctggcagaacccccggaaccacttcagatgccaggtgcagttctacggcctgagcgagaacgacgagtggacccaggacagagccaagcccgtgacccagatcgtgtctgccgaagcctggggcagagccgattgcggatcccagagcttcggcctgctggaccccaagctgtgctacctgctggatggcatcctgttcatctacggcgtgatcctgaccgccctgttcctgagagtgaagttcagcagaagcgccgacgcccctgcctaccagcagggacagaaccaactgtacaacgagctgaacctgggcagacgggaagagtacgacgtgctggacaagcggagaggcagggaccctgagatgggcggaaagccccagcggagaaagaacccccaggaaggactgttcaacgaactccagaaagacaagatggccgaagccttcagcgagatcggcatgaagggcgagcggagaagaggcaagggccacgatggcctgttccagggcctgagcaccgccaccaaggacaccttcgacgccctgcacatgcaggccctgcctccaagaagggccaagcgatctggatctggagcaacaaacttctcactactcaaacaagcaggtgacgtggaggagaatcccgggcctactagtatggactggatttggcgcatccttttccttgtcggcgctgctaccggcgcgcattccttcgaacagaatatcgaccagcctacagagatgaccgccaccgaaggcgctatcgtgcagatcaactgcacctaccagaccagcggcttcaacggcctgttctggtatcaacagcacgccggcgaggcccctaccttcctgtcttacaatgtgctggacggcctggaagagaagggcagattcagcagcttcctgagcagaagcaagggctacagctacctgctgctgaaagaactccagatgaaggacagcgcctcctacctgtgcgcttccgtggacggcaacaacagactggccttcggcaagggcaatcaggtggtcgtgatccccaacacgcgtatccagaaccctgatcctgccgtgtaccagctgcgggatagcaagagcagcgacaagagcgtgtgtctgttcaccgacttcgacagccagaccaacgtgtcccagagcaaggactccgacgtgtacatcaccgataagaccgtgctggacatgcggagcatggacttcaagagcaactccgccgtggcctggtccaacaagtccgatttcgcctgcgccaacgccttcaacaacagcattatccccgaggacacattcttcccaagccccgagagcagctgcggtacccagagttttgggttgttggaccctaaattgtgctatctgttggacggaatcctgttcatttacggagtgatcctgaccgcattgttcctgaagagaggccggaagaagctgctgtacatcttcaagcagcctttcatgcggcccgtgcagaccacccaggaagaggacggctgctcctgccggttccccgaggaagaagaaggcggctgcgagctgcgggttaagttttccagatccgcagacgcacccgcttaccaacaagggcagaaccaactctacaatgaacttaatttggggcggagggaagagtacgacgttctggacaaaaggaggggacgagatcccgagatgggcggaaagcctcagcgaaggaagaatccgcaagaggggctttataacgaactccagaaagataaaatggcagaagcctatagtgagattgggatgaagggagaaaggaggaggggtaaaggtcacgatgggttgtaccaaggattgagcacagccactaaagatacctatgatgcgctccacatgcaggccctgccgccaagataa

SEQ ID NO: 2882 - DNA, 2442 bp, synthetic construct
  source 1..2442: mol_type = other DNA
atggccttaccagtgaccgccttgctcctgccgctggccttgctgctccacgccgccaggccggaattcggcgtgacacagtctcccacacacctgattaagaccagaggccagcaagtgaccctgcggtgtagccctaagagcggccacgataccgtgtcctggtatcagcaggctctcggacagggaccccagttcatcttccagtattacgaggaagaggaacggcagcggggcaacttccccgatagattttccggccatcagttccccaactacagctccgagctgaacgtgaacgctctgctgctgggagatagcgccctgtacctgtgtgcctctagccttggctggcgcggaggcagatacaacgagcagttctttggccctggcaccagactgacagtgctcgaggacctgaagaacgtgttcccacctgaggtggccgtgttcgagcctagcgaggccgagatcagccacacccagaaagccaccctcgtgtgcctggctaccggcttctaccccgaccatgtggaactgtcttggtgggtcaacggcaaagaggtgcacagcggcgtgtctaccgacccccagccactgaaagaacagcccgccctgaacgacagccggtactgcctgagcagcagactgagagtgtccgccaccttctggcagaacccccggaaccacttcagatgccaggtgcagttctacggcctgagcgagaacgacgagtggacccaggacagagccaagcccgtgacccagatcgtgtctgccgaagcctggggcagagccgattgcggatcccagagcttcggcctgctggaccccaagctgtgctacctgctggatggcatcctgttcatctacggcgtgatcctgaccgccctgttcctgagagtgaagttcagcagaagcgccgacgcccctgcctaccagcagggacagaaccaactgtacaacgagctgaacctgggcagacgggaagagtacgacgtgctggacaagcggagaggcagggaccctgagatgggcggaaagccccagcggagaaagaacccccaggaaggactgttcaacgaactccagaaagacaagatggccgaagccttcagcgagatcggcatgaagggcgagcggagaagaggcaagggccacgatggcctgttccagggcctgagcaccgccaccaaggacaccttcgacgccctgcacatgcaggccctgcctccaagaagggccaagcgatctggatctggagcaacaaacttctcactactcaaacaagcaggtgacgtggaggagaatcccgggcctactagtatggactggatttggcgcatccttttccttgtcggcgctgctaccggcgcgcattccttcgaacagaatatcgaccagcctacagagatgaccgccaccgaaggcgctatcgtgcagatcaactgcacctaccagaccagcggcttcaacggcctgttctggtatcaacagcacgccggcgaggcccctaccttcctgtcttacaatgtgctggacggcctggaagagaagggcagattcagcagcttcctgagcagaagcaagggctacagctacctgctgctgaaagaactccagatgaaggacagcgcctcctacctgtgcgcttccgtggacggcaacaacagactggccttcggcaagggcaatcaggtggtcgtgatccccaacacgcgtatccagaaccctgatcctgccgtgtaccagctgcgggatagcaagagcagcgacaagagcgtgtgtctgttcaccgacttcgacagccagaccaacgtgtcccagagcaaggactccgacgtgtacatcaccgataagaccgtgctggacatgcggagcatggacttcaagagcaactccgccgtggcctggtccaacaagtccgatttcgcctgcgccaacgccttcaacaacagcattatccccgaggacacattcttcccaagccccgagagcagctgcggtacccagagcttcggcctgctggaccccaagctgagctacctgctggatggcatcctgttcatctacggcgtgatcctgaccgccctgttcctgagagtgaagttcagcagaagcgccgacgcccctgcctaccagcagggacagaaccaactgtacaacgagctgaacctgggcagacgggaagagtacgacgtgctggacaagcggagaggcagggaccctgagatgggcggaaagccccagcggagaaagaacccccaggaaggactgtataacgaactccagaaagacaagatggccgaagcctacagcgagatcggcatgaagggcgagcggagaagaggcaagggccacgatggcctgtaccagggcctgagcaccgccaccaaggacacctatgacgccctgcacatgcaggccctgcctccaagataa

SEQ ID NO: 2883 - DNA, 2442 bp, synthetic construct
  source 1..2442: mol_type = other DNA
atggccttaccagtgaccgccttgctcctgccgctggccttgctgctccacgccgccaggccggaattcggcgtgacacagtctcccacacacctgattaagaccagaggccagcaagtgaccctgcggtgtagccctaagagcggccacgataccgtgtcctggtatcagcaggctctcggacagggaccccagttcatcttccagtattacgaggaagaggaacggcagcggggcaacttccccgatagattttccggccatcagttccccaactacagctccgagctgaacgtgaacgctctgctgctgggagatagcgccctgtacctgtgtgcctctagccttggctggcgcggaggcagatacaacgagcagttctttggccctggcaccagactgacagtgctcgaggacctgaagaacgtgttcccacctgaggtggccgtgttcgagcctagcgaggccgagatcagccacacccagaaagccaccctcgtgtgcctggctaccggcttctaccccgaccatgtggaactgtcttggtgggtcaacggcaaagaggtgcacagcggcgtgtctaccgacccccagccactgaaagaacagcccgccctgaacgacagccggtactgcctgagcagcagactgagagtgtccgccaccttctggcagaacccccggaaccacttcagatgccaggtgcagttctacggcctgagcgagaacgacgagtggacccaggacagagccaagcccgtgacccagatcgtgtctgccgaagcctggggcagagccgattgcggatcccagagcttcggcctgctggaccccaagctgtgctacctgctggatggcatcctgttcatctacggcgtgatcctgaccgccctgttcctgagagtgaagttcagcagaagcgccgacgcccctgcctaccagcagggacagaaccaactgtacaacgagctgaacctgggcagacgggaagagtacgacgtgctggacaagcggagaggcagggaccctgagatgggcggaaagccccagcggagaaagaacccccaggaaggactgttcaacgaactccagaaagacaagatggccgaagccttcagcgagatcggcatgaagggcgagcggagaagaggcaagggccacgatggcctgttccagggcctgagcaccgccaccaaggacaccttcgacgccctgcacatgcaggccctgcctccaagaagggccaagcgatctggatctggagcaacaaacttctcactactcaaacaagcaggtgacgtggaggagaatcccgggcctactagtatggactggatttggcgcatccttttccttgtcggcgctgctaccggcgcgcattccttcgaacagaatatcgaccagcctacagagatgaccgccaccgaaggcgctatcgtgcagatcaactgcacctaccagaccagcggcttcaacggcctgttctggtatcaacagcacgccggcgaggcccctaccttcctgtcttacaatgtgctggacggcctggaagagaagggcagattcagcagcttcctgagcagaagcaagggctacagctacctgctgctgaaagaactccagatgaaggacagcgcctcctacctgtgcgcttccgtggacggcaacaacagactggccttcggcaagggcaatcaggtggtcgtgatccccaacacgcgtatccagaaccctgatcctgccgtgtaccagctgcgggatagcaagagcagcgacaagagcgtgtgtctgttcaccgacttcgacagccagaccaacgtgtcccagagcaaggactccgacgtgtacatcaccgataagaccgtgctggacatgcggagcatggacttcaagagcaactccgccgtggcctggtccaacaagtccgatttcgcctgcgccaacgccttcaacaacagcattatccccgaggacacattcttcccaagccccgagagcagctgcggtacccagagttttgggttgttggaccctaaattgagctatctgttggacggaatcctgttcatttacggagtgatcctgaccgcattgttcctgcgggttaagttttccagatccgcagacgcacccgcttaccaacaagggcagaaccaactctacaatgaacttaatttggggcggagggaagagtacgacgttctggacaaaaggaggggacgagatcccgagatgggcggaaagcctcagcgaaggaagaatccgcaagaggggctttataacgaactccagaaagataaaatggcagaagcctatagtgagattgggatgaagggagaaaggaggaggggtaaaggtcacgatgggttgtaccaaggattgagcacagccactaaagatacctatgatgcgctccacatgcaggccctgccgccaagataa

SEQ ID NO: 2884 - DNA, 2442 bp, synthetic construct
  source 1..2442: mol_type = other DNA
atggccttaccagtgaccgccttgctcctgccgctggccttgctgctccacgccgccaggccggaattcggcgtgacacagtctcccacacacctgattaagaccagaggccagcaagtgaccctgcggtgtagccctaagagcggccacgataccgtgtcctggtatcagcaggctctcggacagggaccccagttcatcttccagtattacgaggaagaggaacggcagcggggcaacttccccgatagattttccggccatcagttccccaactacagctccgagctgaacgtgaacgctctgctgctgggagatagcgccctgtacctgtgtgcctctagccttggctggcgcggaggcagatacaacgagcagttctttggccctggcaccagactgacagtgctcgaggacctgaagaacgtgttcccacctgaggtggccgtgttcgagcctagcgaggccgagatcagccacacccagaaagccaccctcgtgtgcctggctaccggcttctaccccgaccatgtggaactgtcttggtgggtcaacggcaaagaggtgcacagcggcgtgtctaccgacccccagccactgaaagaacagcccgccctgaacgacagccggtactgcctgagcagcagactgagagtgtccgccaccttctggcagaacccccggaaccacttcagatgccaggtgcagttctacggcctgagcgagaacgacgagtggacccaggacagagccaagcccgtgacccagatcgtgtctgccgaagcctggggcagagccgattgcggatcccagagcttcggcctgctggaccccaagctgagctacctgctggatggcatcctgttcatctacggcgtgatcctgaccgccctgttcctgagagtgaagttcagcagaagcgccgacgcccctgcctaccagcagggacagaaccaactgtacaacgagctgaacctgggcagacgggaagagtacgacgtgctggacaagcggagaggcagggaccctgagatgggcggaaagccccagcggagaaagaacccccaggaaggactgtataacgaactccagaaagacaagatggccgaagcctacagcgagatcggcatgaagggcgagcggagaagaggcaagggccacgatggcctgtaccagggcctgagcaccgccaccaaggacacctatgacgccctgcacatgcaggccctgcctccaagaagggccaagcgatctggatctggagcaacaaacttctcactactcaaacaagcaggtgacgtggaggagaatcccgggcctactagtatggactggatttggcgcatccttttccttgtcggcgctgctaccggcgcgcattccttcgaacagaatatcgaccagcctacagagatgaccgccaccgaaggcgctatcgtgcagatcaactgcacctaccagaccagcggcttcaacggcctgttctggtatcaacagcacgccggcgaggcccctaccttcctgtcttacaatgtgctggacggcctggaagagaagggcagattcagcagcttcctgagcagaagcaagggctacagctacctgctgctgaaagaactccagatgaaggacagcgcctcctacctgtgcgcttccgtggacggcaacaacagactggccttcggcaagggcaatcaggtggtcgtgatccccaacacgcgtatccagaaccctgatcctgccgtgtaccagctgcgggatagcaagagcagcgacaagagcgtgtgtctgttcaccgacttcgacagccagaccaacgtgtcccagagcaaggactccgacgtgtacatcaccgataagaccgtgctggacatgcggagcatggacttcaagagcaactccgccgtggcctggtccaacaagtccgatttcgcctgcgccaacgccttcaacaacagcattatccccgaggacacattcttcccaagccccgagagcagctgcggtacccagagttttgggttgttggaccctaaattgagctatctgttggacggaatcctgttcatttacggagtgatcctgaccgcattgttcctgcgggttaagttttccagatccgcagacgcacccgcttaccaacaagggcagaaccaactctacaatgaacttaatttggggcggagggaagagtacgacgttctggacaaaaggaggggacgagatcccgagatgggcggaaagcctcagcgaaggaagaatccgcaagaggggctttataacgaactccagaaagataaaatggcagaagcctatagtgagattgggatgaagggagaaaggaggaggggtaaaggtcacgatgggttgtaccaaggattgagcacagccactaaagatacctatgatgcgctccacatgcaggccctgccgccaagataa

SEQ ID NO: 2885 - DNA, 2154 bp, synthetic construct
  source 1..2154: mol_type = other DNA
atggccttaccagtgaccgccttgctcctgccgctggccttgctgctccacgccgccaggccggaattcggcgtgacacagtctcccacacacctgattaagaccagaggccagcaagtgaccctgcggtgtagccctaagagcggccacgataccgtgtcctggtatcagcaggctctcggacagggaccccagttcatcttccagtattacgaggaagaggaacggcagcggggcaacttccccgatagattttccggccatcagttccccaactacagctccgagctgaacgtgaacgctctgctgctgggagatagcgccctgtacctgtgtgcctctagccttggctggcgcggaggcagatacaacgagcagttctttggccctggcaccagactgacagtgctcgaggacctgaagaacgtgttcccacctgaggtggccgtgttcgagcctagcgaggccgagatcagccacacccagaaagccaccctcgtgtgcctggctaccggcttctaccccgaccatgtggaactgtcttggtgggtcaacggcaaagaggtgcacagcggcgtgtctaccgacccccagccactgaaagaacagcccgccctgaacgacagccggtactgcctgagcagcagactgagagtgtccgccaccttctggcagaacccccggaaccacttcagatgccaggtgcagttctacggcctgagcgagaacgacgagtggacccaggacagagccaagcccgtgacccagatcgtgtctgccgaagcctggggcagagccgattgcggatccacaacacctggcgagagaagtagcctgcctgccttctatcctggcaccagcggctcttgttctggctgtggatctctgagcctgcctctgctggctggactggttgctgctgatgctgtggcctctctgctgattgtgggagccgtgttcctgtgcgccagacctagaagaagccccgctcaagaggacggcaaggtgtacatcaacatgcccggcagaggaagggccaagcgatctggatctggagcaacaaacttctcactactcaaacaagcaggtgacgtggaggagaatcccgggcctactagtatggactggatttggcgcatccttttccttgtcggcgctgctaccggcgcgcattccttcgaacagaatatcgaccagcctacagagatgaccgccaccgaaggcgctatcgtgcagatcaactgcacctaccagaccagcggcttcaacggcctgttctggtatcaacagcacgccggcgaggcccctaccttcctgtcttacaatgtgctggacggcctggaagagaagggcagattcagcagcttcctgagcagaagcaagggctacagctacctgctgctgaaagaactccagatgaaggacagcgcctcctacctgtgcgcttccgtggacggcaacaacagactggccttcggcaagggcaatcaggtggtcgtgatccccaacacgcgtatccagaaccctgatcctgccgtgtaccagctgcgggatagcaagagcagcgacaagagcgtgtgtctgttcaccgacttcgacagccagaccaacgtgtcccagagcaaggactccgacgtgtacatcaccgataagaccgtgctggacatgcggagcatggacttcaagagcaactccgccgtggcctggtccaacaagtccgatttcgcctgcgccaacgccttcaacaacagcattatccccgaggacacattcttcccaagccccgagagcagctgcggtaccacaacacctggcgagagaagtagcctgcctgccttctatcctggcaccagcggctcttgttctggctgtggatctctgagcctgcctctgctggctggactggttgctgctgatgctgtggcctctctgctgattgtgggagccgtgttcaaacggggcagaaagaaactcctgtatatattcaaacaaccatttatgagaccagtacaaactactcaagaggaagatggctgtagctgccgatttccagaagaagaagaaggaggatgtgaactgctgtgcgccagacctagaagaagccccgctcaagaggacggcaaggtgtacatcaacatgcccggcagaggataa

SEQ ID NO: 2886 - DNA, 2151 bp, synthetic construct
  source 1..2151: mol_type = other DNA
atggccttaccagtgaccgccttgctcctgccgctggccttgctgctccacgccgccaggccggaattcggcgtgacacagtctcccacacacctgattaagaccagaggccagcaagtgaccctgcggtgtagccctaagagcggccacgataccgtgtcctggtatcagcaggctctcggacagggaccccagttcatcttccagtattacgaggaagaggaacggcagcggggcaacttccccgatagattttccggccatcagttccccaactacagctccgagctgaacgtgaacgctctgctgctgggagatagcgccctgtacctgtgtgcctctagccttggctggcgcggaggcagatacaacgagcagttctttggccctggcaccagactgacagtgctcgaggacctgaagaacgtgttcccacctgaggtggccgtgttcgagcctagcgaggccgagatcagccacacccagaaagccaccctcgtgtgcctggctaccggcttctaccccgaccatgtggaactgtcttggtgggtcaacggcaaagaggtgcacagcggcgtgtctaccgacccccagccactgaaagaacagcccgccctgaacgacagccggtactgcctgagcagcagactgagagtgtccgccaccttctggcagaacccccggaaccacttcagatgccaggtgcagttctacggcctgagcgagaacgacgagtggacccaggacagagccaagcccgtgacccagatcgtgtctgccgaagcctggggcagagccgattgcggatccacaacacctggcgagagaagtagcctgcctgccttctatcctggcaccagcggctcttgttctggctgtggatctctgagcctgcctctgctggctggactggttgctgctgatgctgtggcctctctgctgattgtgggagccgtgttcctgtgcgccagacctagaagaagccccgctcaagaggacggcaaggtgtacatcaacatgcccggcagaggaagggccaagcgatctggatctggagcaacaaacttctcactactcaaacaagcaggtgacgtggaggagaatcccgggcctactagtatggactggatttggcgcatccttttccttgtcggcgctgctaccggcgcgcattccttcgaacagaatatcgaccagcctacagagatgaccgccaccgaaggcgctatcgtgcagatcaactgcacctaccagaccagcggcttcaacggcctgttctggtatcaacagcacgccggcgaggcccctaccttcctgtcttacaatgtgctggacggcctggaagagaagggcagattcagcagcttcctgagcagaagcaagggctacagctacctgctgctgaaagaactccagatgaaggacagcgcctcctacctgtgcgcttccgtggacggcaacaacagactggccttcggcaagggcaatcaggtggtcgtgatccccaacacgcgtatccagaaccctgatcctgccgtgtaccagctgcgggatagcaagagcagcgacaagagcgtgtgtctgttcaccgacttcgacagccagaccaacgtgtcccagagcaaggactccgacgtgtacatcaccgataagaccgtgctggacatgcggagcatggacttcaagagcaactccgccgtggcctggtccaacaagtccgatttcgcctgcgccaacgccttcaacaacagcattatccccgaggacacattcttcccaagccccgagagcagctgcggtaccacaacacctggcgagagaagtagcctgcctgccttctatcctggcaccagcggctcttgttctggctgtggatctctgagcctgcctctgctggctggactggttgctgctgatgctgtggcctctctgctgattgtgggagccgtgttcaggagtaagaggagcaggctcctgcacagtgactacatgaacatgactccacgccgccccggacccacccgcaagcattaccagccctatgccccaccacgcgacttcgcagcctatcgctccctgtgcgccagacctagaagaagccccgctcaagaggacggcaaggtgtacatcaacatgcccggcagaggataa

SEQ ID NO: 2887 - DNA, 2136 bp, synthetic construct
  source 1..2136: mol_type = other DNA
atggccttaccagtgaccgccttgctcctgccgctggccttgctgctccacgccgccaggccggaattcggcgtgacacagtctcccacacacctgattaagaccagaggccagcaagtgaccctgcggtgtagccctaagagcggccacgataccgtgtcctggtatcagcaggctctcggacagggaccccagttcatcttccagtattacgaggaagaggaacggcagcggggcaacttccccgatagattttccggccatcagttccccaactacagctccgagctgaacgtgaacgctctgctgctgggagatagcgccctgtacctgtgtgcctctagccttggctggcgcggaggcagatacaacgagcagttctttggccctggcaccagactgacagtgctcgaggacctgaagaacgtgttcccacctgaggtggccgtgttcgagcctagcgaggccgagatcagccacacccagaaagccaccctcgtgtgcctggctaccggcttctaccccgaccatgtggaactgtcttggtgggtcaacggcaaagaggtgcacagcggcgtgtctaccgacccccagccactgaaagaacagcccgccctgaacgacagccggtactgcctgagcagcagactgagagtgtccgccaccttctggcagaacccccggaaccacttcagatgccaggtgcagttctacggcctgagcgagaacgacgagtggacccaggacagagccaagcccgtgacccagatcgtgtctgccgaagcctggggcagagccgattgcggatccacaacacctggcgagagaagtagcctgcctgccttctatcctggcaccagcggctcttgttctggctgtggatctctgagcctgcctctgctggctggactggttgctgctgatgctgtggcctctctgctgattgtgggagccgtgttcctgtgcgccagacctagaagaagccccgctcaagaggacggcaaggtgtacatcaacatgcccggcagaggaagggccaagcgatctggatctggagcaacaaacttctcactactcaaacaagcaggtgacgtggaggagaatcccgggcctactagtatggactggatttggcgcatccttttccttgtcggcgctgctaccggcgcgcattccttcgaacagaatatcgaccagcctacagagatgaccgccaccgaaggcgctatcgtgcagatcaactgcacctaccagaccagcggcttcaacggcctgttctggtatcaacagcacgccggcgaggcccctaccttcctgtcttacaatgtgctggacggcctggaagagaagggcagattcagcagcttcctgagcagaagcaagggctacagctacctgctgctgaaagaactccagatgaaggacagcgcctcctacctgtgcgcttccgtggacggcaacaacagactggccttcggcaagggcaatcaggtggtcgtgatccccaacacgcgtatccagaaccctgatcctgccgtgtaccagctgcgggatagcaagagcagcgacaagagcgtgtgtctgttcaccgacttcgacagccagaccaacgtgtcccagagcaaggactccgacgtgtacatcaccgataagaccgtgctggacatgcggagcatggacttcaagagcaactccgccgtggcctggtccaacaagtccgatttcgcctgcgccaacgccttcaacaacagcattatccccgaggacacattcttcccaagccccgagagcagctgcggtaccacaacacctggcgagagaagtagcctgcctgccttctatcctggcaccagcggctcttgttctggctgtggatctctgagcctgcctctgctggctggactggttgctgctgatgctgtggcctctctgctgattgtgggagccgtgttcagggaccaaagactgcctcctgacgctcacaaacctccaggcggaggcagcttcagaacccctatccaagaggaacaggctgacgcccacagcaccctggcaaaaattctgtgcgccagacctagaagaagccccgctcaagaggacggcaaggtgtacatcaacatgcccggcagaggataa

SEQ ID NO: 2888 - DNA, 2388 bp, synthetic construct
  source 1..2388: mol_type = other DNA
atggccttaccagtgaccgccttgctcctgccgctggccttgctgctccacgccgccaggccggaattcggcgtgacacagtctcccacacacctgattaagaccagaggccagcaagtgaccctgcggtgtagccctaagagcggccacgataccgtgtcctggtatcagcaggctctcggacagggaccccagttcatcttccagtattacgaggaagaggaacggcagcggggcaacttccccgatagattttccggccatcagttccccaactacagctccgagctgaacgtgaacgctctgctgctgggagatagcgccctgtacctgtgtgcctctagccttggctggcgcggaggcagatacaacgagcagttctttggccctggcaccagactgacagtgctcgaggacctgaagaacgtgttcccacctgaggtggccgtgttcgagcctagcgaggccgagatcagccacacccagaaagccaccctcgtgtgcctggctaccggcttctaccccgaccatgtggaactgtcttggtgggtcaacggcaaagaggtgcacagcggcgtgtctaccgacccccagccactgaaagaacagcccgccctgaacgacagccggtactgcctgagcagcagactgagagtgtccgccaccttctggcagaacccccggaaccacttcagatgccaggtgcagttctacggcctgagcgagaacgacgagtggacccaggacagagccaagcccgtgacccagatcgtgtctgccgaagcctggggcagagccgattgcggatccacaacacctggcgagagaagtagcctgcctgccttctatcctggcaccagcggctcttgttctggctgtggatctctgagcctgcctctgctggctggactggttgctgctgatgctgtggcctctctgctgattgtgggagccgtgttcctgtgcgccagacctagaagaagccccgctcaagaggacggcaaggtgtacatcaacatgcccggcagaggaagggccaagcgatctggatctggagcaacaaacttctcactactcaaacaagcaggtgacgtggaggagaatcccgggcctactagtatggactggatttggcgcatccttttccttgtcggcgctgctaccggcgcgcattccttcgaacagaatatcgaccagcctacagagatgaccgccaccgaaggcgctatcgtgcagatcaactgcacctaccagaccagcggcttcaacggcctgttctggtatcaacagcacgccggcgaggcccctaccttcctgtcttacaatgtgctggacggcctggaagagaagggcagattcagcagcttcctgagcagaagcaagggctacagctacctgctgctgaaagaactccagatgaaggacagcgcctcctacctgtgcgcttccgtggacggcaacaacagactggccttcggcaagggcaatcaggtggtcgtgatccccaacacgcgtatccagaaccctgatcctgccgtgtaccagctgcgggatagcaagagcagcgacaagagcgtgtgtctgttcaccgacttcgacagccagaccaacgtgtcccagagcaaggactccgacgtgtacatcaccgataagaccgtgctggacatgcggagcatggacttcaagagcaactccgccgtggcctggtccaacaagtccgatttcgcctgcgccaacgccttcaacaacagcattatccccgaggacacattcttcccaagccccgagagcagctgcggtaccacaacacctggcgagagaagtagcctgcctgccttctatcctggcaccagcggctcttgttctggctgtggatctctgagcctgcctctgctggctggactggttgctgctgatgctgtggcctctctgctgattgtgggagccgtgttctggcggcggaagcggaaagagaagcagtctgagacaagccccaaagagttcctgaccatctacgaggacgtgaaggacctgaaaacccggcggaaccacgaacaagagcagacctttcctggcggaggcagcaccatctacagcatgatccagagccagagcagcgcccctacaagccaagagcctgcctacacactgtactccctgatccagcctagcagaaagagcggcagccggaagagaaatcacagccccagcttcaacagcacgatctacgaagtgatcggcaagagccagccaaaggctcagaaccctgccagactgagccggaaagagctggaaaacttcgacgtgtacagcctgtgcgccagacctagaagaagccccgctcaagaggacggcaaggtgtacatcaacatgcccggcagaggataa

SEQ ID NO: 2889 - DNA, 2241 bp, synthetic construct
  source 1..2241: mol_type = other DNA
atggccttaccagtgaccgccttgctcctgccgctggccttgctgctccacgccgccaggccggaattcggcgtgacacagtctcccacacacctgattaagaccagaggccagcaagtgaccctgcggtgtagccctaagagcggccacgataccgtgtcctggtatcagcaggctctcggacagggaccccagttcatcttccagtattacgaggaagaggaacggcagcggggcaacttccccgatagattttccggccatcagttccccaactacagctccgagctgaacgtgaacgctctgctgctgggagatagcgccctgtacctgtgtgcctctagccttggctggcgcggaggcagatacaacgagcagttctttggccctggcaccagactgacagtgctcgaggacctgaagaacgtgttcccacctgaggtggccgtgttcgagcctagcgaggccgagatcagccacacccagaaagccaccctcgtgtgcctggctaccggcttctaccccgaccatgtggaactgtcttggtgggtcaacggcaaagaggtgcacagcggcgtgtctaccgacccccagccactgaaagaacagcccgccctgaacgacagccggtactgcctgagcagcagactgagagtgtccgccaccttctggcagaacccccggaaccacttcagatgccaggtgcagttctacggcctgagcgagaacgacgagtggacccaggacagagccaagcccgtgacccagatcgtgtctgccgaagcctggggcagagccgattgcggatccctgggagagcctcagctgtgctatatcctggacgccatcctgtttctgtacggcatcgtgctgaccctgctgtactgcaaacggggcagaaagaaactcctgtatatattcaaacaaccatttatgagaccagtacaaactactcaagaggaagatggctgtagctgccgatttccagaagaagaagaaggaggatgtgaactgcggctgaagatccaagtgcggaaggccgccatcaccagctacgagaaatccgacggcgtgtacaccggcctgagcaccagaaatcaagagacatacgagacactgaagcacgaaaagcctccacaaagggccaagcgatctggatctggagcaacaaacttctcactactcaaacaagcaggtgacgtggaggagaatcccgggcctactagtatggactggatttggcgcatccttttccttgtcggcgctgctaccggcgcgcattccttcgaacagaatatcgaccagcctacagagatgaccgccaccgaaggcgctatcgtgcagatcaactgcacctaccagaccagcggcttcaacggcctgttctggtatcaacagcacgccggcgaggcccctaccttcctgtcttacaatgtgctggacggcctggaagagaagggcagattcagcagcttcctgagcagaagcaagggctacagctacctgctgctgaaagaactccagatgaaggacagcgcctcctacctgtgcgcttccgtggacggcaacaacagactggccttcggcaagggcaatcaggtggtcgtgatccccaacacgcgtatccagaaccctgatcctgccgtgtaccagctgcgggatagcaagagcagcgacaagagcgtgtgtctgttcaccgacttcgacagccagaccaacgtgtcccagagcaaggactccgacgtgtacatcaccgataagaccgtgctggacatgcggagcatggacttcaagagcaactccgccgtggcctggtccaacaagtccgatttcgcctgcgccaacgccttcaacaacagcattatccccgaggacacattcttcccaagccccgagagcagctgcggtaccctgggagagcctcagctgtgctatatcctggacgccatcctgtttctgtacggcatcgtgctgaccctgctgtactgcaggagtaagaggagcaggctcctgcacagtgactacatgaacatgactccacgccgccccggacccacccgcaagcattaccagccctatgccccaccacgcgacttcgcagcctatcgctcccggctgaagatccaagtgcggaaggccgccatcaccagctacgagaaatccgacggcgtgtacaccggcctgagcaccagaaatcaagagacatacgagacactgaagcacgaaaagcctccacaataa

SEQ ID NO: 2890 - DNA, 2226 bp, synthetic construct
  source 1..2226: mol_type = other DNA
atggccttaccagtgaccgccttgctcctgccgctggccttgctgctccacgccgccaggccggaattcggcgtgacacagtctcccacacacctgattaagaccagaggccagcaagtgaccctgcggtgtagccctaagagcggccacgataccgtgtcctggtatcagcaggctctcggacagggaccccagttcatcttccagtattacgaggaagaggaacggcagcggggcaacttccccgatagattttccggccatcagttccccaactacagctccgagctgaacgtgaacgctctgctgctgggagatagcgccctgtacctgtgtgcctctagccttggctggcgcggaggcagatacaacgagcagttctttggccctggcaccagactgacagtgctcgaggacctgaagaacgtgttcccacctgaggtggccgtgttcgagcctagcgaggccgagatcagccacacccagaaagccaccctcgtgtgcctggctaccggcttctaccccgaccatgtggaactgtcttggtgggtcaacggcaaagaggtgcacagcggcgtgtctaccgacccccagccactgaaagaacagcccgccctgaacgacagccggtactgcctgagcagcagactgagagtgtccgccaccttctggcagaacccccggaaccacttcagatgccaggtgcagttctacggcctgagcgagaacgacgagtggacccaggacagagccaagcccgtgacccagatcgtgtctgccgaagcctggggcagagccgattgcggatccctgggagagcctcagctgtgctatatcctggacgccatcctgtttctgtacggcatcgtgctgaccctgctgtactgcaaacggggcagaaagaaactcctgtatatattcaaacaaccatttatgagaccagtacaaactactcaagaggaagatggctgtagctgccgatttccagaagaagaagaaggaggatgtgaactgcggctgaagatccaagtgcggaaggccgccatcaccagctacgagaaatccgacggcgtgtacaccggcctgagcaccagaaatcaagagacatacgagacactgaagcacgaaaagcctccacaaagggccaagcgatctggatctggagcaacaaacttctcactactcaaacaagcaggtgacgtggaggagaatcccgggcctactagtatggactggatttggcgcatccttttccttgtcggcgctgctaccggcgcgcattccttcgaacagaatatcgaccagcctacagagatgaccgccaccgaaggcgctatcgtgcagatcaactgcacctaccagaccagcggcttcaacggcctgttctggtatcaacagcacgccggcgaggcccctaccttcctgtcttacaatgtgctggacggcctggaagagaagggcagattcagcagcttcctgagcagaagcaagggctacagctacctgctgctgaaagaactccagatgaaggacagcgcctcctacctgtgcgcttccgtggacggcaacaacagactggccttcggcaagggcaatcaggtggtcgtgatccccaacacgcgtatccagaaccctgatcctgccgtgtaccagctgcgggatagcaagagcagcgacaagagcgtgtgtctgttcaccgacttcgacagccagaccaacgtgtcccagagcaaggactccgacgtgtacatcaccgataagaccgtgctggacatgcggagcatggacttcaagagcaactccgccgtggcctggtccaacaagtccgatttcgcctgcgccaacgccttcaacaacagcattatccccgaggacacattcttcccaagccccgagagcagctgcggtaccctgggagagcctcagctgtgctatatcctggacgccatcctgtttctgtacggcatcgtgctgaccctgctgtactgcagggaccaaagactgcctcctgacgctcacaaacctccaggcggaggcagcttcagaacccctatccaagaggaacaggctgacgcccacagcaccctggcaaaaattcggctgaagatccaagtgcggaaggccgccatcaccagctacgagaaatccgacggcgtgtacaccggcctgagcaccagaaatcaagagacatacgagacactgaagcacgaaaagcctccacaataa

SEQ ID NO: 2891 - DNA, 2478 bp, synthetic construct
  source 1..2478: mol_type = other DNA
atggccttaccagtgaccgccttgctcctgccgctggccttgctgctccacgccgccaggccggaattcggcgtgacacagtctcccacacacctgattaagaccagaggccagcaagtgaccctgcggtgtagccctaagagcggccacgataccgtgtcctggtatcagcaggctctcggacagggaccccagttcatcttccagtattacgaggaagaggaacggcagcggggcaacttccccgatagattttccggccatcagttccccaactacagctccgagctgaacgtgaacgctctgctgctgggagatagcgccctgtacctgtgtgcctctagccttggctggcgcggaggcagatacaacgagcagttctttggccctggcaccagactgacagtgctcgaggacctgaagaacgtgttcccacctgaggtggccgtgttcgagcctagcgaggccgagatcagccacacccagaaagccaccctcgtgtgcctggctaccggcttctaccccgaccatgtggaactgtcttggtgggtcaacggcaaagaggtgcacagcggcgtgtctaccgacccccagccactgaaagaacagcccgccctgaacgacagccggtactgcctgagcagcagactgagagtgtccgccaccttctggcagaacccccggaaccacttcagatgccaggtgcagttctacggcctgagcgagaacgacgagtggacccaggacagagccaagcccgtgacccagatcgtgtctgccgaagcctggggcagagccgattgcggatccctgggagagcctcagctgtgctatatcctggacgccatcctgtttctgtacggcatcgtgctgaccctgctgtactgcaaacggggcagaaagaaactcctgtatatattcaaacaaccatttatgagaccagtacaaactactcaagaggaagatggctgtagctgccgatttccagaagaagaagaaggaggatgtgaactgcggctgaagatccaagtgcggaaggccgccatcaccagctacgagaaatccgacggcgtgtacaccggcctgagcaccagaaatcaagagacatacgagacactgaagcacgaaaagcctccacaaagggccaagcgatctggatctggagcaacaaacttctcactactcaaacaagcaggtgacgtggaggagaatcccgggcctactagtatggactggatttggcgcatccttttccttgtcggcgctgctaccggcgcgcattccttcgaacagaatatcgaccagcctacagagatgaccgccaccgaaggcgctatcgtgcagatcaactgcacctaccagaccagcggcttcaacggcctgttctggtatcaacagcacgccggcgaggcccctaccttcctgtcttacaatgtgctggacggcctggaagagaagggcagattcagcagcttcctgagcagaagcaagggctacagctacctgctgctgaaagaactccagatgaaggacagcgcctcctacctgtgcgcttccgtggacggcaacaacagactggccttcggcaagggcaatcaggtggtcgtgatccccaacacgcgtatccagaaccctgatcctgccgtgtaccagctgcgggatagcaagagcagcgacaagagcgtgtgtctgttcaccgacttcgacagccagaccaacgtgtcccagagcaaggactccgacgtgtacatcaccgataagaccgtgctggacatgcggagcatggacttcaagagcaactccgccgtggcctggtccaacaagtccgatttcgcctgcgccaacgccttcaacaacagcattatccccgaggacacattcttcccaagccccgagagcagctgcggtaccctgggagagcctcagctgtgctatatcctggacgccatcctgtttctgtacggcatcgtgctgaccctgctgtactgctggcggcggaagcggaaagagaagcagtctgagacaagccccaaagagttcctgaccatctacgaggacgtgaaggacctgaaaacccggcggaaccacgaacaagagcagacctttcctggcggaggcagcaccatctacagcatgatccagagccagagcagcgcccctacaagccaagagcctgcctacacactgtactccctgatccagcctagcagaaagagcggcagccggaagagaaatcacagccccagcttcaacagcacgatctacgaagtgatcggcaagagccagccaaaggctcagaaccctgccagactgagccggaaagagctggaaaacttcgacgtgtacagccggctgaagatccaagtgcggaaggccgccatcaccagctacgagaaatccgacggcgtgtacaccggcctgagcaccagaaatcaagagacatacgagacactgaagcacgaaaagcctccacaataa

SEQ ID NO: 2892 - DNA, 2244 bp, synthetic construct
  source 1..2244: mol_type = other DNA
atggccttaccagtgaccgccttgctcctgccgctggccttgctgctccacgccgccaggccggaattcggcgtgacacagtctcccacacacctgattaagaccagaggccagcaagtgaccctgcggtgtagccctaagagcggccacgataccgtgtcctggtatcagcaggctctcggacagggaccccagttcatcttccagtattacgaggaagaggaacggcagcggggcaacttccccgatagattttccggccatcagttccccaactacagctccgagctgaacgtgaacgctctgctgctgggagatagcgccctgtacctgtgtgcctctagccttggctggcgcggaggcagatacaacgagcagttctttggccctggcaccagactgacagtgctcgaggacctgaagaacgtgttcccacctgaggtggccgtgttcgagcctagcgaggccgagatcagccacacccagaaagccaccctcgtgtgcctggctaccggcttctaccccgaccatgtggaactgtcttggtgggtcaacggcaaagaggtgcacagcggcgtgtctaccgacccccagccactgaaagaacagcccgccctgaacgacagccggtactgcctgagcagcagactgagagtgtccgccaccttctggcagaacccccggaaccacttcagatgccaggtgcagttctacggcctgagcgagaacgacgagtggacccaggacagagccaagcccgtgacccagatcgtgtctgccgaagcctggggcagagccgattgcggatccctgggagagcctcagctgtgctatatcctggacgccatcctgtttctgtacggcatcgtgctgaccctgctgtactgcaaacggggcagaaagaaactcctgtatatattcaaacaaccatttatgagaccagtacaaactactcaagaggaagatggctgtagctgccgatttccagaagaagaagaaggaggatgtgaactgcggctgaagatccaagtgcggaaggccgccatcaccagctacgagaaatccgacggcgtgtacaccggcctgagcaccagaaatcaagagacatacgagacactgaagcacgaaaagcctccacaaagggccaagcgatctggatctggagcaacaaacttctcactactcaaacaagcaggtgacgtggaggagaatcccgggcctactagtatggactggatttggcgcatccttttccttgtcggcgctgctaccggcgcgcattccttcgaacagaatatcgaccagcctacagagatgaccgccaccgaaggcgctatcgtgcagatcaactgcacctaccagaccagcggcttcaacggcctgttctggtatcaacagcacgccggcgaggcccctaccttcctgtcttacaatgtgctggacggcctggaagagaagggcagattcagcagcttcctgagcagaagcaagggctacagctacctgctgctgaaagaactccagatgaaggacagcgcctcctacctgtgcgcttccgtggacggcaacaacagactggccttcggcaagggcaatcaggtggtcgtgatccccaacacgcgtatccagaaccctgatcctgccgtgtaccagctgcgggatagcaagagcagcgacaagagcgtgtgtctgttcaccgacttcgacagccagaccaacgtgtcccagagcaaggactccgacgtgtacatcaccgataagaccgtgctggacatgcggagcatggacttcaagagcaactccgccgtggcctggtccaacaagtccgatttcgcctgcgccaacgccttcaacaacagcattatccccgaggacacattcttcccaagccccgagagcagctgcggtaccctcggagaaccacagctctgttacattctggatgctatcctgttcctctatgggatcgtcctgacactcctgtattgcaagagaggccggaagaagctgctgtacatcttcaagcagcctttcatgcggcccgtgcagaccacccaggaagaggacggctgctcctgccggttccccgaggaagaagaaggcggctgcgagctgagactcaaaattcaagttcgcaaagccgccattacctcttacgagaagagtgatggggtgtacacaggactgtctacccggaatcaagaaacctacgaaaccctcaaacatgagaagccacctcagtaa

SEQ ID NO: 2893 - DNA, 2241 bp, synthetic construct
  source 1..2241: mol_type = other DNA
atggccttaccagtgaccgccttgctcctgccgctggccttgctgctccacgccgccaggccggaattcggcgtgacacagtctcccacacacctgattaagaccagaggccagcaagtgaccctgcggtgtagccctaagagcggccacgataccgtgtcctggtatcagcaggctctcggacagggaccccagttcatcttccagtattacgaggaagaggaacggcagcggggcaacttccccgatagattttccggccatcagttccccaactacagctccgagctgaacgtgaacgctctgctgctgggagatagcgccctgtacctgtgtgcctctagccttggctggcgcggaggcagatacaacgagcagttctttggccctggcaccagactgacagtgctcgaggacctgaagaacgtgttcccacctgaggtggccgtgttcgagcctagcgaggccgagatcagccacacccagaaagccaccctcgtgtgcctggctaccggcttctaccccgaccatgtggaactgtcttggtgggtcaacggcaaagaggtgcacagcggcgtgtctaccgacccccagccactgaaagaacagcccgccctgaacgacagccggtactgcctgagcagcagactgagagtgtccgccaccttctggcagaacccccggaaccacttcagatgccaggtgcagttctacggcctgagcgagaacgacgagtggacccaggacagagccaagcccgtgacccagatcgtgtctgccgaagcctggggcagagccgattgcggatccctgggagagcctcagctgtgctatatcctggacgccatcctgtttctgtacggcatcgtgctgaccctgctgtactgcaaacggggcagaaagaaactcctgtatatattcaaacaaccatttatgagaccagtacaaactactcaagaggaagatggctgtagctgccgatttccagaagaagaagaaggaggatgtgaactgcggctgaagatccaagtgcggaaggccgccatcaccagctacgagaaatccgacggcgtgtacaccggcctgagcaccagaaatcaagagacatacgagacactgaagcacgaaaagcctccacaaagggccaagcgatctggatctggagcaacaaacttctcactactcaaacaagcaggtgacgtggaggagaatcccgggcctactagtatggactggatttggcgcatccttttccttgtcggcgctgctaccggcgcgcattccttcgaacagaatatcgaccagcctacagagatgaccgccaccgaaggcgctatcgtgcagatcaactgcacctaccagaccagcggcttcaacggcctgttctggtatcaacagcacgccggcgaggcccctaccttcctgtcttacaatgtgctggacggcctggaagagaagggcagattcagcagcttcctgagcagaagcaagggctacagctacctgctgctgaaagaactccagatgaaggacagcgcctcctacctgtgcgcttccgtggacggcaacaacagactggccttcggcaagggcaatcaggtggtcgtgatccccaacacgcgtatccagaaccctgatcctgccgtgtaccagctgcgggatagcaagagcagcgacaagagcgtgtgtctgttcaccgacttcgacagccagaccaacgtgtcccagagcaaggactccgacgtgtacatcaccgataagaccgtgctggacatgcggagcatggacttcaagagcaactccgccgtggcctggtccaacaagtccgatttcgcctgcgccaacgccttcaacaacagcattatccccgaggacacattcttcccaagccccgagagcagctgcggtaccctcggagaaccacagctctgttacattctggatgctatcctgttcctctatgggatcgtcctgacactcctgtattgcaggagcaagcggtcacggctgctccacagcgattacatgaatatgacaccacgaagaccgggtcctactcgcaaacactaccaaccctacgcacctccccgcgactttgcagcgtaccgatctagactcaaaattcaagttcgcaaagccgccattacctcttacgagaagagtgatggggtgtacacaggactgtctacccggaatcaagaaacctacgaaaccctcaaacatgagaagccacctcagtaa

SEQ ID NO: 2894 - DNA, 2238 bp, synthetic construct
  source 1..2238: mol_type = other DNA
atggccttaccagtgaccgccttgctcctgccgctggccttgctgctccacgccgccaggccggaattcggcgtgacacagtctcccacacacctgattaagaccagaggccagcaagtgaccctgcggtgtagccctaagagcggccacgataccgtgtcctggtatcagcaggctctcggacagggaccccagttcatcttccagtattacgaggaagaggaacggcagcggggcaacttccccgatagattttccggccatcagttccccaactacagctccgagctgaacgtgaacgctctgctgctgggagatagcgccctgtacctgtgtgcctctagccttggctggcgcggaggcagatacaacgagcagttctttggccctggcaccagactgacagtgctcgaggacctgaagaacgtgttcccacctgaggtggccgtgttcgagcctagcgaggccgagatcagccacacccagaaagccaccctcgtgtgcctggctaccggcttctaccccgaccatgtggaactgtcttggtgggtcaacggcaaagaggtgcacagcggcgtgtctaccgacccccagccactgaaagaacagcccgccctgaacgacagccggtactgcctgagcagcagactgagagtgtccgccaccttctggcagaacccccggaaccacttcagatgccaggtgcagttctacggcctgagcgagaacgacgagtggacccaggacagagccaagcccgtgacccagatcgtgtctgccgaagcctggggcagagccgattgcggatccctgggagagcctcagctgtgctatatcctggacgccatcctgtttctgtacggcatcgtgctgaccctgctgtactgcaggagtaagaggagcaggctcctgcacagtgactacatgaacatgactccacgccgccccggacccacccgcaagcattaccagccctatgccccaccacgcgacttcgcagcctatcgctcccggctgaagatccaagtgcggaaggccgccatcaccagctacgagaaatccgacggcgtgtacaccggcctgagcaccagaaatcaagagacatacgagacactgaagcacgaaaagcctccacaaagggccaagcgatctggatctggagcaacaaacttctcactactcaaacaagcaggtgacgtggaggagaatcccgggcctactagtatggactggatttggcgcatccttttccttgtcggcgctgctaccggcgcgcattccttcgaacagaatatcgaccagcctacagagatgaccgccaccgaaggcgctatcgtgcagatcaactgcacctaccagaccagcggcttcaacggcctgttctggtatcaacagcacgccggcgaggcccctaccttcctgtcttacaatgtgctggacggcctggaagagaagggcagattcagcagcttcctgagcagaagcaagggctacagctacctgctgctgaaagaactccagatgaaggacagcgcctcctacctgtgcgcttccgtggacggcaacaacagactggccttcggcaagggcaatcaggtggtcgtgatccccaacacgcgtatccagaaccctgatcctgccgtgtaccagctgcgggatagcaagagcagcgacaagagcgtgtgtctgttcaccgacttcgacagccagaccaacgtgtcccagagcaaggactccgacgtgtacatcaccgataagaccgtgctggacatgcggagcatggacttcaagagcaactccgccgtggcctggtccaacaagtccgatttcgcctgcgccaacgccttcaacaacagcattatccccgaggacacattcttcccaagccccgagagcagctgcggtaccctcggagaaccacagctctgttacattctggatgctatcctgttcctctatgggatcgtcctgacactcctgtattgcaggagcaagcggtcacggctgctccacagcgattacatgaatatgacaccacgaagaccgggtcctactcgcaaacactaccaaccctacgcacctccccgcgactttgcagcgtaccgatctagactcaaaattcaagttcgcaaagccgccattacctcttacgagaagagtgatggggtgtacacaggactgtctacccggaatcaagaaacctacgaaaccctcaaacatgagaagccacctcagtaa

SEQ ID NO: 2895 - DNA, 1992 bp, synthetic construct
  source 1..1992: mol_type = other DNA
atggccttaccagtgaccgccttgctcctgccgctggccttgctgctccacgccgccaggccggaattcggcgtgacacagtctcccacacacctgattaagaccagaggccagcaagtgaccctgcggtgtagccctaagagcggccacgataccgtgtcctggtatcagcaggctctcggacagggaccccagttcatcttccagtattacgaggaagaggaacggcagcggggcaacttccccgatagattttccggccatcagttccccaactacagctccgagctgaacgtgaacgctctgctgctgggagatagcgccctgtacctgtgtgcctctagccttggctggcgcggaggcagatacaacgagcagttctttggccctggcaccagactgacagtgctcgaggacctgaagaacgtgttcccacctgaggtggccgtgttcgagcctagcgaggccgagatcagccacacccagaaagccaccctcgtgtgcctggctaccggcttctaccccgaccatgtggaactgtcttggtgggtcaacggcaaagaggtgcacagcggcgtgtctaccgacccccagccactgaaagaacagcccgccctgaacgacagccggtactgcctgagcagcagactgagagtgtccgccaccttctggcagaacccccggaaccacttcagatgccaggtgcagttctacggcctgagcgagaacgacgagtggacccaggacagagccaagcccgtgacccagatcgtgtctgccgaagcctggggcagagccgattgcggatccctgggagagcctcagctgagctatatcctggacgccatcctgtttctgtacggcatcgtgctgaccctgctgtactgccggctgaagatccaagtgcggaaggccgccatcaccagctacgagaaatccgacggcgtgtacaccggcctgagcaccagaaatcaagagacatacgagacactgaagcacgaaaagcctccacaaagggccaagcgatctggatctggagcaacaaacttctcactactcaaacaagcaggtgacgtggaggagaatcccgggcctactagtatggactggatttggcgcatccttttccttgtcggcgctgctaccggcgcgcattccttcgaacagaatatcgaccagcctacagagatgaccgccaccgaaggcgctatcgtgcagatcaactgcacctaccagaccagcggcttcaacggcctgttctggtatcaacagcacgccggcgaggcccctaccttcctgtcttacaatgtgctggacggcctggaagagaagggcagattcagcagcttcctgagcagaagcaagggctacagctacctgctgctgaaagaactccagatgaaggacagcgcctcctacctgtgcgcttccgtggacggcaacaacagactggccttcggcaagggcaatcaggtggtcgtgatccccaacacgcgtatccagaaccctgatcctgccgtgtaccagctgcgggatagcaagagcagcgacaagagcgtgtgtctgttcaccgacttcgacagccagaccaacgtgtcccagagcaaggactccgacgtgtacatcaccgataagaccgtgctggacatgcggagcatggacttcaagagcaactccgccgtggcctggtccaacaagtccgatttcgcctgcgccaacgccttcaacaacagcattatccccgaggacacattcttcccaagccccgagagcagctgcggtaccctcggagaaccacagctctcttacattctggatgctatcctgttcctctatgggatcgtcctgacactcctgtattgcagactcaaaattcaagttcgcaaagccgccattacctcttacgagaagagtgatggggtgtacacaggactgtctacccggaatcaagaaacctacgaaaccctcaaacatgagaagccacctcagtaa

SEQ ID NO: 2896 - DNA, 2100 bp, synthetic construct
  source 1..2100: mol_type = other DNA
atggccttaccagtgaccgccttgctcctgccgctggccttgctgctccacgccgccaggccggaattcggcgtgacacagtctcccacacacctgattaagaccagaggccagcaagtgaccctgcggtgtagccctaagagcggccacgataccgtgtcctggtatcagcaggctctcggacagggaccccagttcatcttccagtattacgaggaagaggaacggcagcggggcaacttccccgatagattttccggccatcagttccccaactacagctccgagctgaacgtgaacgctctgctgctgggagatagcgccctgtacctgtgtgcctctagccttggctggcgcggaggcagatacaacgagcagttctttggccctggcaccagactgacagtgctcgaggacctgaagaacgtgttcccacctgaggtggccgtgttcgagcctagcgaggccgagatcagccacacccagaaagccaccctcgtgtgcctggctaccggcttctaccccgaccatgtggaactgtcttggtgggtcaacggcaaagaggtgcacagcggcgtgtctaccgacccccagccactgaaagaacagcccgccctgaacgacagccggtactgcctgagcagcagactgagagtgtccgccaccttctggcagaacccccggaaccacttcagatgccaggtgcagttctacggcctgagcgagaacgacgagtggacccaggacagagccaagcccgtgacccagatcgtgtctgccgaagcctggggcagagccgattgcggatcccaggctcagagcgattgcagctgtagcacagtgtctccaggcgtgctggccggaattgtgatgggcgatctggtgctgacagtgctgattgccctggccgtgtacttcctgggtagactggtgcctagaggaagaggcgctgccgaagccgccacaagaaagcagagaatcaccgagacagagagcccctaccaagagctgcaaggccagagaagcgacgtgtacagcgacctgaatacccagcggccttactacaaaagggccaagcgatctggatctggagcaacaaacttctcactactcaaacaagcaggtgacgtggaggagaatcccgggcctactagtatggactggatttggcgcatccttttccttgtcggcgctgctaccggcgcgcattccttcgaacagaatatcgaccagcctacagagatgaccgccaccgaaggcgctatcgtgcagatcaactgcacctaccagaccagcggcttcaacggcctgttctggtatcaacagcacgccggcgaggcccctaccttcctgtcttacaatgtgctggacggcctggaagagaagggcagattcagcagcttcctgagcagaagcaagggctacagctacctgctgctgaaagaactccagatgaaggacagcgcctcctacctgtgcgcttccgtggacggcaacaacagactggccttcggcaagggcaatcaggtggtcgtgatccccaacacgcgtatccagaaccctgatcctgccgtgtaccagctgcgggatagcaagagcagcgacaagagcgtgtgtctgttcaccgacttcgacagccagaccaacgtgtcccagagcaaggactccgacgtgtacatcaccgataagaccgtgctggacatgcggagcatggacttcaagagcaactccgccgtggcctggtccaacaagtccgatttcgcctgcgccaacgccttcaacaacagcattatccccgaggacacattcttcccaagccccgagagcagctgcggtacccaggctcagagcgattgcagctctagcacagtgtctccaggcgtgctggccggaattgtgatgggcgatctggtgctgacagtgctgattgccctggccgtgtacttcctgggtagactggtgcctagaggaagaggcgctgccgaagccgccacaagaaagcagagaatcaccgagacagagagcccctaccaagagctgcaaggccagagaagcgacgtgtacagcgacctgaatacccagcggccttactacaaataa

SEQ ID NO: 2897 - DNA, 2226 bp, synthetic construct
  source 1..2226: mol_type = other DNA
atggccttaccagtgaccgccttgctcctgccgctggccttgctgctccacgccgccaggccggaattcggcgtgacacagtctcccacacacctgattaagaccagaggccagcaagtgaccctgcggtgtagccctaagagcggccacgataccgtgtcctggtatcagcaggctctcggacagggaccccagttcatcttccagtattacgaggaagaggaacggcagcggggcaacttccccgatagattttccggccatcagttccccaactacagctccgagctgaacgtgaacgctctgctgctgggagatagcgccctgtacctgtgtgcctctagccttggctggcgcggaggcagatacaacgagcagttctttggccctggcaccagactgacagtgctcgaggacctgaagaacgtgttcccacctgaggtggccgtgttcgagcctagcgaggccgagatcagccacacccagaaagccaccctcgtgtgcctggctaccggcttctaccccgaccatgtggaactgtcttggtgggtcaacggcaaagaggtgcacagcggcgtgtctaccgacccccagccactgaaagaacagcccgccctgaacgacagccggtactgcctgagcagcagactgagagtgtccgccaccttctggcagaacccccggaaccacttcagatgccaggtgcagttctacggcctgagcgagaacgacgagtggacccaggacagagccaagcccgtgacccagatcgtgtctgccgaagcctggggcagagccgattgcggatcccaggctcagagcgattgcagctgtagcacagtgtctccaggcgtgctggccggaattgtgatgggcgatctggtgctgacagtgctgattgccctggccgtgtacttcctgggtagactggtgcctagaggaagaggcgctgccgaagccgccacaagaaagcagagaatcaccgagacagagagcccctaccaagagctgcaaggccagagaagcgacgtgtacagcgacctgaatacccagcggccttactacaaaagggccaagcgatctggatctggagcaacaaacttctcactactcaaacaagcaggtgacgtggaggagaatcccgggcctactagtatggactggatttggcgcatccttttccttgtcggcgctgctaccggcgcgcattccttcgaacagaatatcgaccagcctacagagatgaccgccaccgaaggcgctatcgtgcagatcaactgcacctaccagaccagcggcttcaacggcctgttctggtatcaacagcacgccggcgaggcccctaccttcctgtcttacaatgtgctggacggcctggaagagaagggcagattcagcagcttcctgagcagaagcaagggctacagctacctgctgctgaaagaactccagatgaaggacagcgcctcctacctgtgcgcttccgtggacggcaacaacagactggccttcggcaagggcaatcaggtggtcgtgatccccaacacgcgtatccagaaccctgatcctgccgtgtaccagctgcgggatagcaagagcagcgacaagagcgtgtgtctgttcaccgacttcgacagccagaccaacgtgtcccagagcaaggactccgacgtgtacatcaccgataagaccgtgctggacatgcggagcatggacttcaagagcaactccgccgtggcctggtccaacaagtccgatttcgcctgcgccaacgccttcaacaacagcattatccccgaggacacattcttcccaagccccgagagcagctgcggtacccaggctcagagcgattgcagctgtagcacagtgtctccaggcgtgctggccggaattgtgatgggcgatctggtgctgacagtgctgattgccctggccgtgtacttcctgggtagactggtgcctagaggaagaggcgctgccgaagccgccacaagaaagcagagaatcaccgagacagagagcccctaccaagagctgcaaggccagagaagcgacgtgtacagcgacctgaatacccagaaacggggcagaaagaaactcctgtatatattcaaacaaccatttatgagaccagtacaaactactcaagaggaagatggctgtagctgccgatttccagaagaagaagaaggaggatgtgaactgcggccttactacaaataa

SEQ ID NO: 2898 - DNA, 2223 bp, synthetic construct
  source 1..2223: mol_type = other DNA
atggccttaccagtgaccgccttgctcctgccgctggccttgctgctccacgccgccaggccggaattcggcgtgacacagtctcccacacacctgattaagaccagaggccagcaagtgaccctgcggtgtagccctaagagcggccacgataccgtgtcctggtatcagcaggctctcggacagggaccccagttcatcttccagtattacgaggaagaggaacggcagcggggcaacttccccgatagattttccggccatcagttccccaactacagctccgagctgaacgtgaacgctctgctgctgggagatagcgccctgtacctgtgtgcctctagccttggctggcgcggaggcagatacaacgagcagttctttggccctggcaccagactgacagtgctcgaggacctgaagaacgtgttcccacctgaggtggccgtgttcgagcctagcgaggccgagatcagccacacccagaaagccaccctcgtgtgcctggctaccggcttctaccccgaccatgtggaactgtcttggtgggtcaacggcaaagaggtgcacagcggcgtgtctaccgacccccagccactgaaagaacagcccgccctgaacgacagccggtactgcctgagcagcagactgagagtgtccgccaccttctggcagaacccccggaaccacttcagatgccaggtgcagttctacggcctgagcgagaacgacgagtggacccaggacagagccaagcccgtgacccagatcgtgtctgccgaagcctggggcagagccgattgcggatcccaggctcagagcgattgcagctgtagcacagtgtctccaggcgtgctggccggaattgtgatgggcgatctggtgctgacagtgctgattgccctggccgtgtacttcctgggtagactggtgcctagaggaagaggcgctgccgaagccgccacaagaaagcagagaatcaccgagacagagagcccctaccaagagctgcaaggccagagaagcgacgtgtacagcgacctgaatacccagcggccttactacaaaagggccaagcgatctggatctggagcaacaaacttctcactactcaaacaagcaggtgacgtggaggagaatcccgggcctactagtatggactggatttggcgcatccttttccttgtcggcgctgctaccggcgcgcattccttcgaacagaatatcgaccagcctacagagatgaccgccaccgaaggcgctatcgtgcagatcaactgcacctaccagaccagcggcttcaacggcctgttctggtatcaacagcacgccggcgaggcccctaccttcctgtcttacaatgtgctggacggcctggaagagaagggcagattcagcagcttcctgagcagaagcaagggctacagctacctgctgctgaaagaactccagatgaaggacagcgcctcctacctgtgcgcttccgtggacggcaacaacagactggccttcggcaagggcaatcaggtggtcgtgatccccaacacgcgtatccagaaccctgatcctgccgtgtaccagctgcgggatagcaagagcagcgacaagagcgtgtgtctgttcaccgacttcgacagccagaccaacgtgtcccagagcaaggactccgacgtgtacatcaccgataagaccgtgctggacatgcggagcatggacttcaagagcaactccgccgtggcctggtccaacaagtccgatttcgcctgcgccaacgccttcaacaacagcattatccccgaggacacattcttcccaagccccgagagcagctgcggtacccaggctcagagcgattgcagctgtagcacagtgtctccaggcgtgctggccggaattgtgatgggcgatctggtgctgacagtgctgattgccctggccgtgtacttcctgggtagactggtgcctagaggaagaggcgctgccgaagccgccacaagaaagcagagaatcaccgagacagagagcccctaccaagagctgcaaggccagagaagcgacgtgtacagcgacctgaatacccagaggagcaagcggtcacggctgctccacagcgattacatgaatatgacaccacgaagaccgggtcctactcgcaaacactaccaaccctacgcacctccccgcgactttgcagcgtaccgatctcggccttactacaaataa

SEQ ID NO: 2899 - DNA, 2208 bp, synthetic construct
  source 1..2208: mol_type = other DNA
atggccttaccagtgaccgccttgctcctgccgctggccttgctgctccacgccgccaggccggaattcggcgtgacacagtctcccacacacctgattaagaccagaggccagcaagtgaccctgcggtgtagccctaagagcggccacgataccgtgtcctggtatcagcaggctctcggacagggaccccagttcatcttccagtattacgaggaagaggaacggcagcggggcaacttccccgatagattttccggccatcagttccccaactacagctccgagctgaacgtgaacgctctgctgctgggagatagcgccctgtacctgtgtgcctctagccttggctggcgcggaggcagatacaacgagcagttctttggccctggcaccagactgacagtgctcgaggacctgaagaacgtgttcccacctgaggtggccgtgttcgagcctagcgaggccgagatcagccacacccagaaagccaccctcgtgtgcctggctaccggcttctaccccgaccatgtggaactgtcttggtgggtcaacggcaaagaggtgcacagcggcgtgtctaccgacccccagccactgaaagaacagcccgccctgaacgacagccggtactgcctgagcagcagactgagagtgtccgccaccttctggcagaacccccggaaccacttcagatgccaggtgcagttctacggcctgagcgagaacgacgagtggacccaggacagagccaagcccgtgacccagatcgtgtctgccgaagcctggggcagagccgattgcggatcccaggctcagagcgattgcagctgtagcacagtgtctccaggcgtgctggccggaattgtgatgggcgatctggtgctgacagtgctgattgccctggccgtgtacttcctgggtagactggtgcctagaggaagaggcgctgccgaagccgccacaagaaagcagagaatcaccgagacagagagcccctaccaagagctgcaaggccagagaagcgacgtgtacagcgacctgaatacccagcggccttactacaaaagggccaagcgatctggatctggagcaacaaacttctcactactcaaacaagcaggtgacgtggaggagaatcccgggcctactagtatggactggatttggcgcatccttttccttgtcggcgctgctaccggcgcgcattccttcgaacagaatatcgaccagcctacagagatgaccgccaccgaaggcgctatcgtgcagatcaactgcacctaccagaccagcggcttcaacggcctgttctggtatcaacagcacgccggcgaggcccctaccttcctgtcttacaatgtgctggacggcctggaagagaagggcagattcagcagcttcctgagcagaagcaagggctacagctacctgctgctgaaagaactccagatgaaggacagcgcctcctacctgtgcgcttccgtggacggcaacaacagactggccttcggcaagggcaatcaggtggtcgtgatccccaacacgcgtatccagaaccctgatcctgccgtgtaccagctgcgggatagcaagagcagcgacaagagcgtgtgtctgttcaccgacttcgacagccagaccaacgtgtcccagagcaaggactccgacgtgtacatcaccgataagaccgtgctggacatgcggagcatggacttcaagagcaactccgccgtggcctggtccaacaagtccgatttcgcctgcgccaacgccttcaacaacagcattatccccgaggacacattcttcccaagccccgagagcagctgcggtacccaggctcagagcgattgcagctgtagcacagtgtctccaggcgtgctggccggaattgtgatgggcgatctggtgctgacagtgctgattgccctggccgtgtacttcctgggtagactggtgcctagaggaagaggcgctgccgaagccgccacaagaaagcagagaatcaccgagacagagagcccctaccaagagctgcaaggccagagaagcgacgtgtacagcgacctgaatacccagagggaccaaagactgcctcctgacgctcacaaacctccaggcggaggcagcttcagaacccctatccaagaggaacaggctgacgcccacagcaccctggcaaaaattcggccttactacaaataa

SEQ ID NO: 2900 - DNA, 2460 bp, synthetic construct
  source 1..2460: mol_type = other DNA
atggccttaccagtgaccgccttgctcctgccgctggccttgctgctccacgccgccaggccggaattcggcgtgacacagtctcccacacacctgattaagaccagaggccagcaagtgaccctgcggtgtagccctaagagcggccacgataccgtgtcctggtatcagcaggctctcggacagggaccccagttcatcttccagtattacgaggaagaggaacggcagcggggcaacttccccgatagattttccggccatcagttccccaactacagctccgagctgaacgtgaacgctctgctgctgggagatagcgccctgtacctgtgtgcctctagccttggctggcgcggaggcagatacaacgagcagttctttggccctggcaccagactgacagtgctcgaggacctgaagaacgtgttcccacctgaggtggccgtgttcgagcctagcgaggccgagatcagccacacccagaaagccaccctcgtgtgcctggctaccggcttctaccccgaccatgtggaactgtcttggtgggtcaacggcaaagaggtgcacagcggcgtgtctaccgacccccagccactgaaagaacagcccgccctgaacgacagccggtactgcctgagcagcagactgagagtgtccgccaccttctggcagaacccccggaaccacttcagatgccaggtgcagttctacggcctgagcgagaacgacgagtggacccaggacagagccaagcccgtgacccagatcgtgtctgccgaagcctggggcagagccgattgcggatcccaggctcagagcgattgcagctgtagcacagtgtctccaggcgtgctggccggaattgtgatgggcgatctggtgctgacagtgctgattgccctggccgtgtacttcctgggtagactggtgcctagaggaagaggcgctgccgaagccgccacaagaaagcagagaatcaccgagacagagagcccctaccaagagctgcaaggccagagaagcgacgtgtacagcgacctgaatacccagcggccttactacaaaagggccaagcgatctggatctggagcaacaaacttctcactactcaaacaagcaggtgacgtggaggagaatcccgggcctactagtatggactggatttggcgcatccttttccttgtcggcgctgctaccggcgcgcattccttcgaacagaatatcgaccagcctacagagatgaccgccaccgaaggcgctatcgtgcagatcaactgcacctaccagaccagcggcttcaacggcctgttctggtatcaacagcacgccggcgaggcccctaccttcctgtcttacaatgtgctggacggcctggaagagaagggcagattcagcagcttcctgagcagaagcaagggctacagctacctgctgctgaaagaactccagatgaaggacagcgcctcctacctgtgcgcttccgtggacggcaacaacagactggccttcggcaagggcaatcaggtggtcgtgatccccaacacgcgtatccagaaccctgatcctgccgtgtaccagctgcgggatagcaagagcagcgacaagagcgtgtgtctgttcaccgacttcgacagccagaccaacgtgtcccagagcaaggactccgacgtgtacatcaccgataagaccgtgctggacatgcggagcatggacttcaagagcaactccgccgtggcctggtccaacaagtccgatttcgcctgcgccaacgccttcaacaacagcattatccccgaggacacattcttcccaagccccgagagcagctgcggtacccaggctcagagcgattgcagctgtagcacagtgtctccaggcgtgctggccggaattgtgatgggcgatctggtgctgacagtgctgattgccctggccgtgtacttcctgggtagactggtgcctagaggaagaggcgctgccgaagccgccacaagaaagcagagaatcaccgagacagagagcccctaccaagagctgcaaggccagagaagcgacgtgtacagcgacctgaatacccagtggcggcggaagcggaaagagaagcagtctgagacaagccccaaagagttcctgaccatctacgaggacgtgaaggacctgaaaacccggcggaaccacgaacaagagcagacctttcctggcggaggcagcaccatctacagcatgatccagagccagagcagcgcccctacaagccaagagcctgcctacacactgtactccctgatccagcctagcagaaagagcggcagccggaagagaaatcacagccccagcttcaacagcacgatctacgaagtgatcggcaagagccagccaaaggctcagaaccctgccagactgagccggaaagagctggaaaacttcgacgtgtacagccggccttactacaaataa

SEQ ID NO: 2901 - DNA, 2736 bp, synthetic construct
  source 1..2736: mol_type = other DNA
atggccttaccagtgaccgccttgctcctgccgctggccttgctgctccacgccgccaggccggaattcggcgtgacacagtctcccacacacctgattaagaccagaggccagcaagtgaccctgcggtgtagccctaagagcggccacgataccgtgtcctggtatcagcaggctctcggacagggaccccagttcatcttccagtattacgaggaagaggaacggcagcggggcaacttccccgatagattttccggccatcagttccccaactacagctccgagctgaacgtgaacgctctgctgctgggagatagcgccctgtacctgtgtgcctctagccttggctggcgcggaggcagatacaacgagcagttctttggccctggcaccagactgacagtgctcgaggacctgaagaacgtgttcccacctgaggtggccgtgttcgagcctagcgaggccgagatcagccacacccagaaagccaccctcgtgtgcctggctaccggcttctaccccgaccatgtggaactgtcttggtgggtcaacggcaaagaggtgcacagcggcgtgtctaccgacccccagccactgaaagaacagcccgccctgaacgacagccggtactgcctgagcagcagactgagagtgtccgccaccttctggcagaacccccggaaccacttcagatgccaggtgcagttctacggcctgagcgagaacgacgagtggacccaggacagagccaagcccgtgacccagatcgtgtctgccgaagcctggggcagagccgattgcggatcccaggctcagagcgattgcagctgtagcacagtgtctccaggcgtgctggccggaattgtgatgggcgatctggtgctgacagtgctgattgccctggccgtgtacttcctgggtagactggtgcctagaggaagaggcgctgccgaagccgccacaagaaagcagagaatcaccgagacagagagcccctaccaagagctgcaaggccagagaagcgacgtgtacagcgacctgaatacccagagagtgaagttcagcagaagcgccgacgcccctgcctaccagcagggacagaaccaactgtacaacgagctgaacctgggcagacgggaagagtacgacgtgctggacaagcggagaggcagggaccctgagatgggcggaaagccccagcggagaaagaacccccaggaaggactgtataacgaactccagaaagacaagatggccgaagcctacagcgagatcggcatgaagggcgagcggagaagaggcaagggccacgatggcctgtaccagggcctgagcaccgccaccaaggacacctatgacgccctgcacatgcaggccctgcctccaagaagggccaagcgatctggatctggagcaacaaacttctcactactcaaacaagcaggtgacgtggaggagaatcccgggcctactagtatggactggatttggcgcatccttttccttgtcggcgctgctaccggcgcgcattccttcgaacagaatatcgaccagcctacagagatgaccgccaccgaaggcgctatcgtgcagatcaactgcacctaccagaccagcggcttcaacggcctgttctggtatcaacagcacgccggcgaggcccctaccttcctgtcttacaatgtgctggacggcctggaagagaagggcagattcagcagcttcctgagcagaagcaagggctacagctacctgctgctgaaagaactccagatgaaggacagcgcctcctacctgtgcgcttccgtggacggcaacaacagactggccttcggcaagggcaatcaggtggtcgtgatccccaacacgcgtatccagaaccctgatcctgccgtgtaccagctgcgggatagcaagagcagcgacaagagcgtgtgtctgttcaccgacttcgacagccagaccaacgtgtcccagagcaaggactccgacgtgtacatcaccgataagaccgtgctggacatgcggagcatggacttcaagagcaactccgccgtggcctggtccaacaagtccgatttcgcctgcgccaacgccttcaacaacagcattatccccgaggacacattcttcccaagccccgagagcagctgcggtaccacaacgccgggcgaaaggagttccttgccggccttttaccccggcacaagcggaagctgtagtgggtgtggaagcctcagcctcccacttcttgcgggcctcgtcgcggcagatgcagtagcttcacttcttattgtaggcgcggtatttctctgtgctcgaccaaggaggtcacccgctcaggaggatggtaaggtgtatataaatatgccaggacgcggaagctctagacgggttaagttttccagatccgcagacgcacccgcttaccaacaagggcagaaccaactctacaatgaacttaatttggggcggagggaagagtacgacgttctggacaaaaggaggggacgagatcccgagatgggcggaaagcctcagcgaaggaagaatccgcaagaggggctttataacgaactccagaaagataaaatggcagaagcctatagtgagattgggatgaagggagaaaggaggaggggtaaaggtcacgatgggttgtaccaaggattgagcacagccactaaagatacctatgatgcgctccacatgcaggccctgccgccaagataa

SEQ ID NO: 2902 - DNA, 2514 bp, synthetic construct
  source 1..2514: mol_type = other DNA
atggccttaccagtgaccgccttgctcctgccgctggccttgctgctccacgccgccaggccggaattcggcgtgacacagtctcccacacacctgattaagaccagaggccagcaagtgaccctgcggtgtagccctaagagcggccacgataccgtgtcctggtatcagcaggctctcggacagggaccccagttcatcttccagtattacgaggaagaggaacggcagcggggcaacttccccgatagattttccggccatcagttccccaactacagctccgagctgaacgtgaacgctctgctgctgggagatagcgccctgtacctgtgtgcctctagccttggctggcgcggaggcagatacaacgagcagttctttggccctggcaccagactgacagtgctcgaggacctgaagaacgtgttcccacctgaggtggccgtgttcgagcctagcgaggccgagatcagccacacccagaaagccaccctcgtgtgcctggctaccggcttctaccccgaccatgtggaactgtcttggtgggtcaacggcaaagaggtgcacagcggcgtgtctaccgacccccagccactgaaagaacagcccgccctgaacgacagccggtactgcctgagcagcagactgagagtgtccgccaccttctggcagaacccccggaaccacttcagatgccaggtgcagttctacggcctgagcgagaacgacgagtggacccaggacagagccaagcccgtgacccagatcgtgtctgccgaagcctggggcagagccgattgcggatcccaggctcagagcgattgcagctgtagcacagtgtctccaggcgtgctggccggaattgtgatgggcgatctggtgctgacagtgctgattgccctggccgtgtacttcctgggtagactggtgcctagaggaagaggcgctgccgaagccgccacaagaaagcagagaatcaccgagacagagagcccctaccaagagctgcaaggccagagaagcgacgtgtacagcgacctgaatacccagagagtgaagttcagcagaagcgccgacgcccctgcctaccagcagggacagaaccaactgtacaacgagctgaacctgggcagacgggaagagtacgacgtgctggacaagcggagaggcagggaccctgagatgggcggaaagccccagcggagaaagaacccccaggaaggactgtataacgaactccagaaagacaagatggccgaagcctacagcgagatcggcatgaagggcgagcggagaagaggcaagggccacgatggcctgtaccagggcctgagcaccgccaccaaggacacctatgacgccctgcacatgcaggccctgcctccaagaagggccaagcgatctggatctggagcaacaaacttctcactactcaaacaagcaggtgacgtggaggagaatcccgggcctactagtatggactggatttggcgcatccttttccttgtcggcgctgctaccggcgcgcattccttcgaacagaatatcgaccagcctacagagatgaccgccaccgaaggcgctatcgtgcagatcaactgcacctaccagaccagcggcttcaacggcctgttctggtatcaacagcacgccggcgaggcccctaccttcctgtcttacaatgtgctggacggcctggaagagaagggcagattcagcagcttcctgagcagaagcaagggctacagctacctgctgctgaaagaactccagatgaaggacagcgcctcctacctgtgcgcttccgtggacggcaacaacagactggccttcggcaagggcaatcaggtggtcgtgatccccaacacgcgtatccagaaccctgatcctgccgtgtaccagctgcgggatagcaagagcagcgacaagagcgtgtgtctgttcaccgacttcgacagccagaccaacgtgtcccagagcaaggactccgacgtgtacatcaccgataagaccgtgctggacatgcggagcatggacttcaagagcaactccgccgtggcctggtccaacaagtccgatttcgcctgcgccaacgccttcaacaacagcattatccccgaggacacattcttcccaagccccgagagcagctgcggtaccacaacgccgggcgaaaggagttccttgccggccttttaccccggcacaagcggaagctgtagtgggtgtggaagcctcagcctcccacttcttgcgggcctcgtcgcggcagatgcagtagcttcacttcttattgtaggcgcggtatttaagagaggccggaagaagctgctgtacatcttcaagcagcctttcatgcggcccgtgcagaccacccaggaagaggacggctgctcctgccggttccccgaggaagaagaaggcggctgcgagctgctctgtgctcgaccaaggaggtcacccgctcaggaggatggtaaggtgtatataaatatgccaggacgcggataa

SEQ ID NO: 2903 - DNA, 2511 bp, synthetic construct
  source 1..2511: mol_type = other DNA
atggccttaccagtgaccgccttgctcctgccgctggccttgctgctccacgccgccaggccggaattcggcgtgacacagtctcccacacacctgattaagaccagaggccagcaagtgaccctgcggtgtagccctaagagcggccacgataccgtgtcctggtatcagcaggctctcggacagggaccccagttcatcttccagtattacgaggaagaggaacggcagcggggcaacttccccgatagattttccggccatcagttccccaactacagctccgagctgaacgtgaacgctctgctgctgggagatagcgccctgtacctgtgtgcctctagccttggctggcgcggaggcagatacaacgagcagttctttggccctggcaccagactgacagtgctcgaggacctgaagaacgtgttcccacctgaggtggccgtgttcgagcctagcgaggccgagatcagccacacccagaaagccaccctcgtgtgcctggctaccggcttctaccccgaccatgtggaactgtcttggtgggtcaacggcaaagaggtgcacagcggcgtgtctaccgacccccagccactgaaagaacagcccgccctgaacgacagccggtactgcctgagcagcagactgagagtgtccgccaccttctggcagaacccccggaaccacttcagatgccaggtgcagttctacggcctgagcgagaacgacgagtggacccaggacagagccaagcccgtgacccagatcgtgtctgccgaagcctggggcagagccgattgcggatcccaggctcagagcgattgcagctgtagcacagtgtctccaggcgtgctggccggaattgtgatgggcgatctggtgctgacagtgctgattgccctggccgtgtacttcctgggtagactggtgcctagaggaagaggcgctgccgaagccgccacaagaaagcagagaatcaccgagacagagagcccctaccaagagctgcaaggccagagaagcgacgtgtacagcgacctgaatacccagagagtgaagttcagcagaagcgccgacgcccctgcctaccagcagggacagaaccaactgtacaacgagctgaacctgggcagacgggaagagtacgacgtgctggacaagcggagaggcagggaccctgagatgggcggaaagccccagcggagaaagaacccccaggaaggactgtataacgaactccagaaagacaagatggccgaagcctacagcgagatcggcatgaagggcgagcggagaagaggcaagggccacgatggcctgtaccagggcctgagcaccgccaccaaggacacctatgacgccctgcacatgcaggccctgcctccaagaagggccaagcgatctggatctggagcaacaaacttctcactactcaaacaagcaggtgacgtggaggagaatcccgggcctactagtatggactggatttggcgcatccttttccttgtcggcgctgctaccggcgcgcattccttcgaacagaatatcgaccagcctacagagatgaccgccaccgaaggcgctatcgtgcagatcaactgcacctaccagaccagcggcttcaacggcctgttctggtatcaacagcacgccggcgaggcccctaccttcctgtcttacaatgtgctggacggcctggaagagaagggcagattcagcagcttcctgagcagaagcaagggctacagctacctgctgctgaaagaactccagatgaaggacagcgcctcctacctgtgcgcttccgtggacggcaacaacagactggccttcggcaagggcaatcaggtggtcgtgatccccaacacgcgtatccagaaccctgatcctgccgtgtaccagctgcgggatagcaagagcagcgacaagagcgtgtgtctgttcaccgacttcgacagccagaccaacgtgtcccagagcaaggactccgacgtgtacatcaccgataagaccgtgctggacatgcggagcatggacttcaagagcaactccgccgtggcctggtccaacaagtccgatttcgcctgcgccaacgccttcaacaacagcattatccccgaggacacattcttcccaagccccgagagcagctgcggtaccacaacgccgggcgaaaggagttccttgccggccttttaccccggcacaagcggaagctgtagtgggtgtggaagcctcagcctcccacttcttgcgggcctcgtcgcggcagatgcagtagcttcacttcttattgtaggcgcggtatttaggagcaagcggtcacggctgctccacagcgattacatgaatatgacaccacgaagaccgggtcctactcgcaaacactaccaaccctacgcacctccccgcgactttgcagcgtaccgatctctctgtgctcgaccaaggaggtcacccgctcaggaggatggtaaggtgtatataaatatgccaggacgcggataa

SEQ ID NO: 2904 - DNA, 3246 bp, synthetic construct
  source 1..3246: mol_type = other DNA
atggccttaccagtgaccgccttgctcctgccgctggccttgctgctccacgccgccaggccggaattcggcgtgacacagtctcccacacacctgattaagaccagaggccagcaagtgaccctgcggtgtagccctaagagcggccacgataccgtgtcctggtatcagcaggctctcggacagggaccccagttcatcttccagtattacgaggaagaggaacggcagcggggcaacttccccgatagattttccggccatcagttccccaactacagctccgagctgaacgtgaacgctctgctgctgggagatagcgccctgtacctgtgtgcctctagccttggctggcgcggaggcagatacaacgagcagttctttggccctggcaccagactgacagtgctcgaggacctgaagaacgtgttcccacctgaggtggccgtgttcgagcctagcgaggccgagatcagccacacccagaaagccaccctcgtgtgcctggctaccggcttctaccccgaccatgtggaactgtcttggtgggtcaacggcaaagaggtgcacagcggcgtgtctaccgacccccagccactgaaagaacagcccgccctgaacgacagccggtactgcctgagcagcagactgagagtgtccgccaccttctggcagaacccccggaaccacttcagatgccaggtgcagttctacggcctgagcgagaacgacgagtggacccaggacagagccaagcccgtgacccagatcgtgtctgccgaagcctggggcagagccgattgcggatcccagagcttcggcctgctggaccccaagctgtgctacctgctggatggcatcctgttcatctacggcgtgatcctgaccgccctgttcctgagagtgaagttcagcagaagcgccgacgcccctgcctaccagcagggacagaaccaactgtacaacgagctgaacctgggcagacgggaagagtacgacgtgctggacaagcggagaggcagggaccctgagatgggcggaaagccccagcggagaaagaacccccaggaaggactgtataacgaactccagaaagacaagatggccgaagcctacagcgagatcggcatgaagggcgagcggagaagaggcaagggccacgatggcctgtaccagggcctgagcaccgccaccaaggacacctatgacgccctgcacatgcaggccctgcctccaagaagggccaagcgatctggatctggagcaacaaacttctcactactcaaacaagcaggtgacgtggaggagaatcccgggcctactagtatggactggatttggcgcatccttttccttgtcggcgctgctaccggcgcgcattccttcgaacagaatatcgaccagcctacagagatgaccgccaccgaaggcgctatcgtgcagatcaactgcacctaccagaccagcggcttcaacggcctgttctggtatcaacagcacgccggcgaggcccctaccttcctgtcttacaatgtgctggacggcctggaagagaagggcagattcagcagcttcctgagcagaagcaagggctacagctacctgctgctgaaagaactccagatgaaggacagcgcctcctacctgtgcgcttccgtggacggcaacaacagactggccttcggcaagggcaatcaggtggtcgtgatccccaacacgcgtatccagaaccctgatcctgccgtgtaccagctgcgggatagcaagagcagcgacaagagcgtgtgtctgttcaccgacttcgacagccagaccaacgtgtcccagagcaaggactccgacgtgtacatcaccgataagaccgtgctggacatgcggagcatggacttcaagagcaactccgccgtggcctggtccaacaagtccgatttcgcctgcgccaacgccttcaacaacagcattatccccgaggacacattcttcccaagccccgagagcagctgcggtacccagagttttgggttgttggaccctaaattgtgctatctgttggacggaatcctgttcatttacggagtgatcctgaccgcattgttcctgcgggttaagttttccagatccgcagacgcacccgcttaccaacaagggcagaaccaactctacaatgaacttaatttggggcggagggaagagtacgacgttctggacaaaaggaggggacgagatcccgagatgggcggaaagcctcagcgaaggaagaatccgcaagaggggctttataacgaactccagaaagataaaatggcagaagcctatagtgagattgggatgaagggagaaaggaggaggggtaaaggtcacgatgggttgtaccaaggattgagcacagccactaaagatacctatgatgcgctccacatgcaggccctgccgccaagacgcgccaagagaagcggatctggcgtgaagcagaccctgaatttcgacctgctgaagctggctggcgacgtggaatccaacccaggcccttctagaggccatatggctctgcctgtgacagctctgctgctgcctctggcactgctgcttcatgctgctagacctagccagtttagagtgtcccctctggacagaacctggaacctgggcgagacagtggaactgaagtgccaggtgctgctgagcaaccctacaagcggctgctcctggctgtttcagcctagaggtgcagccgcctctcctacctttctgctgtacctgagccagaacaagcccaaggccgccgaaggactggacacccagagattcagcggcaagagactgggcgacaccttcgtgctgaccctgagcgacttcagaagagagaacgagggctactacttctgtagcgccctgagcaacagcatcatgtacttcagccacttcgtgcccgtgtttctgcccgccaagcctacaacaacccctgctcctagacctcctacaccagctcctacaatcgccagccagcctctgtctctcagacccgaagcctgtagacctgctgctggcggagctgtgcataccagaggactggatttcgcctgcgacatctacatctgggctcctctggctggcacatgtggcgtgctgctgctgtccctggtcatcaccctgtactgcaaccaccggaacaggcggagagtgtgcaagtgccctagacctgtggtcaagagcggcgacaagcctagcctgagcgccagatatgtt

SEQ ID NO: 2905 - DNA, 2469 bp, synthetic construct
  source 1..2469: mol_type = other DNA
atggccttaccagtgaccgccttgctcctgccgctggccttgctgctccacgccgccaggccggaattcggcgtgacacagtctcccacacacctgattaagaccagaggccagcaagtgaccctgcggtgtagccctaagagcggccacgataccgtgtcctggtatcagcaggctctcggacagggaccccagttcatcttccagtattacgaggaagaggaacggcagcggggcaacttccccgatagattttccggccatcagttccccaactacagctccgagctgaacgtgaacgctctgctgctgggagatagcgccctgtacctgtgtgcctctagccttggctggcgcggaggcagatacaacgagcagttctttggccctggcaccagactgacagtgctcgaggacctgaagaacgtgttcccacctgaggtggccgtgttcgagcctagcgaggccgagatcagccacacccagaaagccaccctcgtgtgcctggctaccggcttctaccccgaccatgtggaactgtcttggtgggtcaacggcaaagaggtgcacagcggcgtgtctaccgacccccagccactgaaagaacagcccgccctgaacgacagccggtactgcctgagcagcagactgagagtgtccgccaccttctggcagaacccccggaaccacttcagatgccaggtgcagttctacggcctgagcgagaacgacgagtggacccaggacagagccaagcccgtgacccagatcgtgtctgccgaagcctggggcagagccgattgcggatcccagagcttcggcctgctggaccccaagctgtgctacctgctggatggcatcctgttcatctacggcgtgatcctgaccgccctgttcctgagagtgaagttcagcagaagcgccgacgcccctgcctaccagcagggacagaaccaactgtacaacgagctgaacctgggcagacgggaagagtacgacgtgctggacaagcggagaggcagggaccctgagatgggcggaaagccccagcggagaaagaacccccaggaaggactgtataacgaactccagaaagacaagatggccgaagcctacagcgagatcggcatgaagggcgagcggagaagaggcaagggccacgatggcctgtaccagggcctgagcaccgccaccaaggacacctatgacgccctgcacatgcaggccctgcctccaagaagggccaagcgatctggatctggagcaacaaacttctcactactcaaacaagcaggtgacgtggaggagaatcccgggcctactagtatggactggatttggcgcatccttttccttgtcggcgctgctaccggcgcgcattccttcgaacagaatatcgaccagcctacagagatgaccgccaccgaaggcgctatcgtgcagatcaactgcacctaccagaccagcggcttcaacggcctgttctggtatcaacagcacgccggcgaggcccctaccttcctgtcttacaatgtgctggacggcctggaagagaagggcagattcagcagcttcctgagcagaagcaagggctacagctacctgctgctgaaagaactccagatgaaggacagcgcctcctacctgtgcgcttccgtggacggcaacaacagactggccttcggcaagggcaatcaggtggtcgtgatccccaacacgcgtgcctctacaaagggaccctccgtgtttcctctggctcccagcagcaagtctacaagcggaggaacagccgctctgggctgcctggtcaaggattactttcccgagcctgtgaccgtgtcctggaatagcggagcactgacaagcggcgtgcacacctttccagccgtgctgcaaagcagcggcctgtactctctgagcagcgtggtcacagtgcctagctctagcctgggcacccagacctacatctgcaatgtgaaccacaagcctagcaacaccaaggtggacaagagagtggaacccaagagctgtggtacccagagttttgggttgttggaccctaaattgagctatctgttggacggaatcctgttcatttacggagtgatcctgaccgcattgttcctgcgggttaagttttccagatccgcagacgcacccgcttaccaacaagggcagaaccaactctacaatgaacttaatttggggcggagggaagagtacgacgttctggacaaaaggaggggacgagatcccgagatgggcggaaagcctcagcgaaggaagaatccgcaagaggggctttataacgaactccagaaagataaaatggcagaagcctatagtgagattgggatgaagggagaaaggaggaggggtaaaggtcacgatgggttgtaccaaggattgagcacagccactaaagatacctatgatgcgctccacatgcaggccctgccgccaagataa

SEQ ID NO: 2906 - DNA, 2442 bp, synthetic construct
  source 1..2442: mol_type = other DNA
atggccttaccagtgaccgccttgctcctgccgctggccttgctgctccacgccgccaggccggaattcggcgtgacacagtctcccacacacctgattaagaccagaggccagcaagtgaccctgcggtgtagccctaagagcggccacgataccgtgtcctggtatcagcaggctctcggacagggaccccagttcatcttccagtattacgaggaagaggaacggcagcggggcaacttccccgatagattttccggccatcagttccccaactacagctccgagctgaacgtgaacgctctgctgctgggagatagcgccctgtacctgtgtgcctctagccttggctggcgcggaggcagatacaacgagcagttctttggccctggcaccagactgacagtgctcgaggacctgaagaacgtgttcccacctgaggtggccgtgttcgagcctagcgaggccgagatcagccacacccagaaagccaccctcgtgtgcctggctaccggcttctaccccgaccatgtggaactgtcttggtgggtcaacggcaaagaggtgcacagcggcgtgtctaccgacccccagccactgaaagaacagcccgccctgaacgacagccggtactgcctgagcagcagactgagagtgtccgccaccttctggcagaacccccggaaccacttcagatgccaggtgcagttctacggcctgagcgagaacgacgagtggacccaggacagagccaagcccgtgacccagatcgtgtctgccgaagcctggggcagagccgattgcggatcccagagcttcggcctgctggaccccaagctgtgctacctgctggatggcatcctgttcatctacggcgtgatcctgaccgccctgttcctgagagtgaagttcagcagaagcgccgacgcccctgcctaccagcagggacagaaccaactgtacaacgagctgaacctgggcagacgggaagagtacgacgtgctggacaagcggagaggcagggaccctgagatgggcggaaagccccagcggagaaagaacccccaggaaggactgtataacgaactccagaaagacaagatggccgaagcctacagcgagatcggcatgaagggcgagcggagaagaggcaagggccacgatggcctgtaccagggcctgagcaccgccaccaaggacacctatgacgccctgcacatgcaggccctgcctccaagaagggccaagcgatctggatctggagcaacaaacttctcactactcaaacaagcaggtgacgtggaggagaatcccgggcctactagtatggactggatttggcgcatccttttccttgtcggcgctgctaccggcgcgcattccttcgaacagaatatcgaccagcctacagagatgaccgccaccgaaggcgctatcgtgcagatcaactgcacctaccagaccagcggcttcaacggcctgttctggtatcaacagcacgccggcgaggcccctaccttcctgtcttacaatgtgctggacggcctggaagagaagggcagattcagcagcttcctgagcagaagcaagggctacagctacctgctgctgaaagaactccagatgaaggacagcgcctcctacctgtgcgcttccgtggacggcaacaacagactggccttcggcaagggcaatcaggtggtcgtgatccccaacacgcgtatccagaaccctgatcctgccgtgtaccagctgcgggatagcaagagcagcgacaagagcgtgtgtctgttcaccgacttcgacagccagaccaacgtgtcccagagcaaggactccgacgtgtacatcaccgataagaccgtgctggacatgcggagcatggacttcaagagcaactccgccgtggcctggtccaacaagtccgatttcgcctgcgccaacgccttcaacaacagcattatccccgaggacacattcttcccaagccccgagagcagctgcggtacccagagttttgggttgttggaccctaaattgagctatctgttggacggaatcctgttcatttacggagtgatcctgaccgcattgttcctgcgggttaagttttccagatccgcagacgcacccgcttaccaacaagggcagaaccaactctacaatgaacttaatttggggcggagggaagagtacgacgttctggacaaaaggaggggacgagatcccgagatgggcggaaagcctcagcgaaggaagaatccgcaagaggggctttataacgaactccagaaagataaaatggcagaagcctatagtgagattgggatgaagggagaaaggaggaggggtaaaggtcacgatgggttgtaccaaggattgagcacagccactaaagatacctatgatgcgctccacatgcaggccctgccgccaagataa

SEQ ID NO: 2907 - DNA, 2949 bp, synthetic construct
  source 1..2949: mol_type = other DNA
atggccttaccagtgaccgccttgctcctgccgctggccttgctgctccacgccgccaggccggaattcggcgtgacacagtctcccacacacctgattaagaccagaggccagcaagtgaccctgcggtgtagccctaagagcggccacgataccgtgtcctggtatcagcaggctctcggacagggaccccagttcatcttccagtattacgaggaagaggaacggcagcggggcaacttccccgatagattttccggccatcagttccccaactacagctccgagctgaacgtgaacgctctgctgctgggagatagcgccctgtacctgtgtgcctctagccttggctggcgcggaggcagatacaacgagcagttctttggccctggcaccagactgacagtgctcgagggacagcctaaggccaatcctaccgtgacactgttccctccaagcagcgaagaactccaggccaacaaggccacacttgtgtgcctgatctccgacttctaccctggggctgtgacagtggcttggaaggccgatggatctcctgtgaaagccggcgtggaaaccaccaagccatccaagcagagcaacaacaaatacgccgccagctcctacctgagcctgacacctgagcagtggaagtcccacagatcctacagctgccaagtgacccacgaaggcagcaccgtggaaaagacagtggcccctacagagtgcagcggatccctgggagagcctcagctgtgctatatcctggacgccatcctgtttctgtacggcatcgtgctgaccctgctgtactgccggctgaagatccaagtgcggaaggccgccatcaccagctacgagaaatccgacggcgtgtacaccggcctgagcaccagaaatcaagagacatacgagacactgaagcacgaaaagcctccacaaagggccaagcgatctggatctggagcaacaaacttctcactactcaaacaagcaggtgacgtggaggagaatcccgggcctactagtatggactggatttggcgcatccttttccttgtcggcgctgctaccggcgcgcattccttcgaacagaatatcgaccagcctacagagatgaccgccaccgaaggcgctatcgtgcagatcaactgcacctaccagaccagcggcttcaacggcctgttctggtatcaacagcacgccggcgaggcccctaccttcctgtcttacaatgtgctggacggcctggaagagaagggcagattcagcagcttcctgagcagaagcaagggctacagctacctgctgctgaaagaactccagatgaaggacagcgcctcctacctgtgcgcttccgtggacggcaacaacagactggccttcggcaagggcaatcaggtggtcgtgatccccaacacgcgtatccagaaccctgatcctgccgtgtaccagctgcgggatagcaagagcagcgacaagagcgtgtgtctgttcaccgacttcgacagccagaccaacgtgtcccagagcaaggactccgacgtgtacatcaccgataagaccgtgctggacatgcggagcatggacttcaagagcaactccgccgtggcctggtccaacaagtccgatttcgcctgcgccaacgccttcaacaacagcattatccccgaggacacattcttcccaagccccgagagcagctgcggtacccagagttttgggttgttggaccctaaattgtgctatctgttggacggaatcctgttcatttacggagtgatcctgaccgcattgttcctgcgggttaagttttccagatccgcagacgcacccgcttaccaacaagggcagaaccaactctacaatgaacttaatttggggcggagggaagagtacgacgttctggacaaaaggaggggacgagatcccgagatgggcggaaagcctcagcgaaggaagaatccgcaagaggggctttataacgaactccagaaagataaaatggcagaagcctatagtgagattgggatgaagggagaaaggaggaggggtaaaggtcacgatgggttgtaccaaggattgagcacagccactaaagatacctatgatgcgctccacatgcaggccctgccgccaagacgcgccaagagaagcggatctggcgtgaagcagaccctgaatttcgacctgctgaagctggctggcgacgtggaatccaacccaggcccttctagaggccatatggctctgcctgtgacagctctgctgctgcctctggcactgctgcttcatgctgctagacctagccagtttagagtgtcccctctggacagaacctggaacctgggcgagacagtggaactgaagtgccaggtgctgctgagcaaccctacaagcggctgctcctggctgtttcagcctagaggtgcagccgcctctcctacctttctgctgtacctgagccagaacaagcccaaggccgccgaaggactggacacccagagattcagcggcaagagactgggcgacaccttcgtgctgaccctgagcgacttcagaagagagaacgagggctactacttctgtagcgccctgagcaacagcatcatgtacttcagccacttcgtgcccgtgtttctgcccgccaagcctacaacaacccctgctcctagacctcctacaccagctcctacaatcgccagccagcctctgtctctcagacccgaagcctgtagacctgctgctggcggagctgtgcataccagaggactggatttcgcctgcgacatctacatctgggctcctctggctggcacatgtggcgtgctgctgctgtccctggtcatcaccctgtactgcaaccaccggaacaggcggagagtgtgcaagtgccctagacctgtggtcaagagcggcgacaagcctagcctgagcgccagatatgtt

SEQ ID NO: 2908 - DNA, 2244 bp, synthetic construct
  source 1..2244: mol_type = other DNA
atggccttaccagtgaccgccttgctcctgccgctggccttgctgctccacgccgccaggccggaattcggcgtgacacagtctcccacacacctgattaagaccagaggccagcaagtgaccctgcggtgtagccctaagagcggccacgataccgtgtcctggtatcagcaggctctcggacagggaccccagttcatcttccagtattacgaggaagaggaacggcagcggggcaacttccccgatagattttccggccatcagttccccaactacagctccgagctgaacgtgaacgctctgctgctgggagatagcgccctgtacctgtgtgcctctagccttggctggcgcggaggcagatacaacgagcagttctttggccctggcaccagactgacagtgctcgaggacctgaagaacgtgttcccacctgaggtggccgtgttcgagcctagcgaggccgagatcagccacacccagaaagccaccctcgtgtgcctggctaccggcttctaccccgaccatgtggaactgtcttggtgggtcaacggcaaagaggtgcacagcggcgtgtctaccgacccccagccactgaaagaacagcccgccctgaacgacagccggtactgcctgagcagcagactgagagtgtccgccaccttctggcagaacccccggaaccacttcagatgccaggtgcagttctacggcctgagcgagaacgacgagtggacccaggacagagccaagcccgtgacccagatcgtgtctgccgaagcctggggcagagccgattgcggatcccagagcttcggcctgctggaccccaagctgtgctacctgctggatggcatcctgttcatctacggcgtgatcctgaccgccctgttcctgagagtgaagttcagcagaagcgccgacgcccctgcctaccagcagggacagaaccaactgtacaacgagctgaacctgggcagacgggaagagtacgacgtgctggacaagcggagaggcagggaccctgagatgggcggaaagccccagcggagaaagaacccccaggaaggactgtataacgaactccagaaagacaagatggccgaagcctacagcgagatcggcatgaagggcgagcggagaagaggcaagggccacgatggcctgtaccagggcctgagcaccgccaccaaggacacctatgacgccctgcacatgcaggccctgcctccaagaagggccaagcgatctggatctggagcaacaaacttctcactactcaaacaagcaggtgacgtggaggagaatcccgggcctactagtatggactggatttggcgcatccttttccttgtcggcgctgctaccggcgcgcattccttcgaacagaatatcgaccagcctacagagatgaccgccaccgaaggcgctatcgtgcagatcaactgcacctaccagaccagcggcttcaacggcctgttctggtatcaacagcacgccggcgaggcccctaccttcctgtcttacaatgtgctggacggcctggaagagaagggcagattcagcagcttcctgagcagaagcaagggctacagctacctgctgctgaaagaactccagatgaaggacagcgcctcctacctgtgcgcttccgtggacggcaacaacagactggccttcggcaagggcaatcaggtggtcgtgatccccaacacgcgtgcctctacaaagggaccctccgtgtttcctctggctcccagcagcaagtctacaagcggaggaacagccgctctgggctgcctggtcaaggattactttcccgagcctgtgaccgtgtcctggaatagcggagcactgacaagcggcgtgcacacctttccagccgtgctgcaaagcagcggcctgtactctctgagcagcgtggtcacagtgcctagctctagcctgggcacccagacctacatctgcaatgtgaaccacaagcctagcaacaccaaggtggacaagagagtggaacccaagagctgtggtaccctcggagaaccacagctctgttacattctggatgctatcctgttcctctatgggatcgtcctgacactcctgtattgcagactcaaaattcaagttcgcaaagccgccattacctcttacgagaagagtgatggggtgtacacaggactgtctacccggaatcaagaaacctacgaaaccctcaaacatgagaagccacctcagtaa

SEQ ID NO: 2909 - DNA, 2244 bp, synthetic construct; identical to SEQ ID NO: 2908
  source 1..2244: mol_type = other DNA

SEQ ID NO: 2910 - DNA, 2217 bp, synthetic construct
  source 1..2217: mol_type = other DNA
atggccttaccagtgaccgccttgctcctgccgctggccttgctgctccacgccgccaggccggaattcggcgtgacacagtctcccacacacctgattaagaccagaggccagcaagtgaccctgcggtgtagccctaagagcggccacgataccgtgtcctggtatcagcaggctctcggacagggaccccagttcatcttccagtattacgaggaagaggaacggcagcggggcaacttccccgatagattttccggccatcagttccccaactacagctccgagctgaacgtgaacgctctgctgctgggagatagcgccctgtacctgtgtgcctctagccttggctggcgcggaggcagatacaacgagcagttctttggccctggcaccagactgacagtgctcgaggacctgaagaacgtgttcccacctgaggtggccgtgttcgagcctagcgaggccgagatcagccacacccagaaagccaccctcgtgtgcctggctaccggcttctaccccgaccatgtggaactgtcttggtgggtcaacggcaaagaggtgcacagcggcgtgtctaccgacccccagccactgaaagaacagcccgccctgaacgacagccggtactgcctgagcagcagactgagagtgtccgccaccttctggcagaacccccggaaccacttcagatgccaggtgcagttctacggcctgagcgagaacgacgagtggacccaggacagagccaagcccgtgacccagatcgtgtctgccgaagcctggggcagagccgattgcggatcccagagcttcggcctgctggaccccaagctgtgctacctgctggatggcatcctgttcatctacggcgtgatcctgaccgccctgttcctgagagtgaagttcagcagaagcgccgacgcccctgcctaccagcagggacagaaccaactgtacaacgagctgaacctgggcagacgggaagagtacgacgtgctggacaagcggagaggcagggaccctgagatgggcggaaagccccagcggagaaagaacccccaggaaggactgtataacgaactccagaaagacaagatggccgaagcctacagcgagatcggcatgaagggcgagcggagaagaggcaagggccacgatggcctgtaccagggcctgagcaccgccaccaaggacacctatgacgccctgcacatgcaggccctgcctccaagaagggccaagcgatctggatctggagcaacaaacttctcactactcaaacaagcaggtgacgtggaggagaatcccgggcctactagtatggactggatttggcgcatccttttccttgtcggcgctgctaccggcgcgcattccttcgaacagaatatcgaccagcctacagagatgaccgccaccgaaggcgctatcgtgcagatcaactgcacctaccagaccagcggcttcaacggcctgttctggtatcaacagcacgccggcgaggcccctaccttcctgtcttacaatgtgctggacggcctggaagagaagggcagattcagcagcttcctgagcagaagcaagggctacagctacctgctgctgaaagaactccagatgaaggacagcgcctcctacctgtgcgcttccgtggacggcaacaacagactggccttcggcaagggcaatcaggtggtcgtgatccccaacacgcgtatccagaaccctgatcctgccgtgtaccagctgcgggatagcaagagcagcgacaagagcgtgtgtctgttcaccgacttcgacagccagaccaacgtgtcccagagcaaggactccgacgtgtacatcaccgataagaccgtgctggacatgcggagcatggacttcaagagcaactccgccgtggcctggtccaacaagtccgatttcgcctgcgccaacgccttcaacaacagcattatccccgaggacacattcttcccaagccccgagagcagctgcggtaccctcggagaaccacagctctgttacattctggatgctatcctgttcctctatgggatcgtcctgacactcctgtattgcagactcaaaattcaagttcgcaaagccgccattacctcttacgagaagagtgatggggtgtacacaggactgtctacccggaatcaagaaacctacgaaaccctcaaacatgagaagccacctcagtaa

SEQ ID NO: 2911 - DNA, 2961 bp, synthetic construct
  source 1..2961: mol_type = other DNA
atggccttaccagtgaccgccttgctcctgccgctggccttgctgctccacgccgccaggccggaattcggcgtgacacagtctcccacacacctgattaagaccagaggccagcaagtgaccctgcggtgtagccctaagagcggccacgataccgtgtcctggtatcagcaggctctcggacagggaccccagttcatcttccagtattacgaggaagaggaacggcagcggggcaacttccccgatagattttccggccatcagttccccaactacagctccgagctgaacgtgaacgctctgctgctgggagatagcgccctgtacctgtgtgcctctagccttggctggcgcggaggcagatacaacgagcagttctttggccctggcaccagactgacagtgctcgagggacagcctaaggccaatcctaccgtgacactgttccctccaagcagcgaagaactccaggccaacaaggccacacttgtgtgcctgatctccgacttctaccctggggctgtgacagtggcttggaaggccgatggatctcctgtgaaagccggcgtggaaaccaccaagccatccaagcagagcaacaacaaatacgccgccagctcctacctgagcctgacacctgagcagtggaagtcccacagatcctacagctgccaagtgacccacgaaggcagcaccgtggaaaagacagtggcccctacagagtgcagcacaacacctggcgagagaagtagcctgcctgccttctatcctggcaccagcggctcttgttctggctgtggatctctgagcctgcctctgctggctggactggttgctgctgatgctgtggcctctctgctgattgtgggagccgtgttcctgtgcgccagacctagaagaagccccgctcaagaggacggcaaggtgtacatcaacatgcccggcagaggaagggccaagcgatctggatctggagcaacaaacttctcactactcaaacaagcaggtgacgtggaggagaatcccgggcctactagtatggactggatttggcgcatccttttccttgtcggcgctgctaccggcgcgcattccttcgaacagaatatcgaccagcctacagagatgaccgccaccgaaggcgctatcgtgcagatcaactgcacctaccagaccagcggcttcaacggcctgttctggtatcaacagcacgccggcgaggcccctaccttcctgtcttacaatgtgctggacggcctggaagagaagggcagattcagcagcttcctgagcagaagcaagggctacagctacctgctgctgaaagaactccagatgaaggacagcgcctcctacctgtgcgcttccgtggacggcaacaacagactggccttcggcaagggcaatcaggtggtcgtgatccccaacacgcgtatccagaaccctgatcctgccgtgtaccagctgcgggatagcaagagcagcgacaagagcgtgtgtctgttcaccgacttcgacagccagaccaacgtgtcccagagcaaggactccgacgtgtacatcaccgataagaccgtgctggacatgcggagcatggacttcaagagcaactccgccgtggcctggtccaacaagtccgatttcgcctgcgccaacgccttcaacaacagcattatccccgaggacacattcttcccaagccccgagagcagctgcggtacccagagttttgggttgttggaccctaaattgtgctatctgttggacggaatcctgttcatttacggagtgatcctgaccgcattgttcctgcgggttaagttttccagatccgcagacgcacccgcttaccaacaagggcagaaccaactctacaatgaacttaatttggggcggagggaagagtacgacgttctggacaaaaggaggggacgagatcccgagatgggcggaaagcctcagcgaaggaagaatccgcaagaggggctttataacgaactccagaaagataaaatggcagaagcctatagtgagattgggatgaagggagaaaggaggaggggtaaaggtcacgatgggttgtaccaaggattgagcacagccactaaagatacctatgatgcgctccacatgcaggccctgccgccaagacgcgccaagagaagcggatctggcgtgaagcagaccctgaatttcgacctgctgaagctggctggcgacgtggaatccaacccaggcccttctagaggccatatggctctgcctgtgacagctctgctgctgcctctggcactgctgcttcatgctgctagacctagccagtttagagtgtcccctctggacagaacctggaacctgggcgagacagtggaactgaagtgccaggtgctgctgagcaaccctacaagcggctgctcctggctgtttcagcctagaggtgcagccgcctctcctacctttctgctgtacctgagccagaacaagcccaaggccgccgaaggactggacacccagagattcagcggcaagagactgggcgacaccttcgtgctgaccctgagcgacttcagaagagagaacgagggctactacttctgtagcgccctgagcaacagcatcatgtacttcagccacttcgtgcccgtgtttctgcccgccaagcctacaacaacccctgctcctagacctcctacaccagctcctacaatcgccagccagcctctgtctctcagacccgaagcctgtagacctgctgctggcggagctgtgcataccagaggactggatttcgcctgcgacatctacatctgggctcctctggctggcacatgtggcgtgctgctgctgtccctggtcatcaccctgtactgcaaccaccggaacaggcggagagtgtgcaagtgccctagacctgtggtcaagagcggcgacaagcctagcctgagcgccagatatgtt

SEQ ID NO: 2912 - DNA, 3060 bp, synthetic construct
  source 1..3060: mol_type = other DNA
atggccttaccagtgaccgccttgctcctgccgctggccttgctgctccacgccgccaggccggaattcggcgtgacacagtctcccacacacctgattaagaccagaggccagcaagtgaccctgcggtgtagccctaagagcggccacgataccgtgtcctggtatcagcaggctctcggacagggaccccagttcatcttccagtattacgaggaagaggaacggcagcggggcaacttccccgatagattttccggccatcagttccccaactacagctccgagctgaacgtgaacgctctgctgctgggagatagcgccctgtacctgtgtgcctctagccttggctggcgcggaggcagatacaacgagcagttctttggccctggcaccagactgacagtgctcgaggacctgaagaacgtgttcccacctgaggtggccgtgttcgagcctagcgaggccgagatcagccacacccagaaagccaccctcgtgtgcctggctaccggcttctaccccgaccatgtggaactgtcttggtgggtcaacggcaaagaggtgcacagcggcgtgtctaccgacccccagccactgaaagaacagcccgccctgaacgacagccggtactgcctgagcagcagactgagagtgtccgccaccttctggcagaacccccggaaccacttcagatgccaggtgcagttctacggcctgagcgagaacgacgagtggacccaggacagagccaagcccgtgacccagatcgtgtctgccgaagcctggggcagagccgattgcggatcccagagcttcggcctgctggaccccaagctgtgctacctgctggatggcatcctgttcatctacggcgtgatcctgaccgccctgttcctgagagtgaagttcagcagaagcgccgacgcccctgcctaccagcagggacagaaccaactgtacaacgagctgaacctgggcagacgggaagagtacgacgtgctggacaagcggagaggcagggaccctgagatgggcggaaagccccagcggagaaagaacccccaggaaggactgtataacgaactccagaaagacaagatggccgaagcctacagcgagatcggcatgaagggcgagcggagaagaggcaagggccacgatggcctgtaccagggcctgagcaccgccaccaaggacacctatgacgccctgcacatgcaggccctgcctccaagaagggccaagcgatctggatctggagcaacaaacttctcactactcaaacaagcaggtgacgtggaggagaatcccgggcctactagtatggactggatttggcgcatccttttccttgtcggcgctgctaccggcgcgcattccttcgaacagaatatcgaccagcctacagagatgaccgccaccgaaggcgctatcgtgcagatcaactgcacctaccagaccagcggcttcaacggcctgttctggtatcaacagcacgccggcgaggcccctaccttcctgtcttacaatgtgctggacggcctggaagagaagggcagattcagcagcttcctgagcagaagcaagggctacagctacctgctgctgaaagaactccagatgaaggacagcgcctcctacctgtgcgcttccgtggacggcaacaacagactggccttcggcaagggcaatcaggtggtcgtgatccccaacacgcgtgcctctacaaagggaccctccgtgtttcctctggctcccagcagcaagtctacaagcggaggaacagccgctctgggctgcctggtcaaggattactttcccgagcctgtgaccgtgtcctggaatagcggagcactgacaagcggcgtgcacacctttccagccgtgctgcaaagcagcggcctgtactctctgagcagcgtggtcacagtgcctagctctagcctgggcacccagacctacatctgcaatgtgaaccacaagcctagcaacaccaaggtggacaagagagtggaacccaagagctgtacaacgccgggcgaaaggagttccttgccggccttttaccccggcacaagcggaagctgtagtgggtgtggaagcctcagcctcccacttcttgcgggcctcgtcgcggcagatgcagtagcttcacttcttattgtaggcgcggtatttctctgtgctcgaccaaggaggtcacccgctcaggaggatggtaaggtgtatataaatatgccaggacgcggacgcgccaagagaagcggatctggcgtgaagcagaccctgaatttcgacctgctgaagctggctggcgacgtggaatccaacccaggcccttctagaggccatatggctctgcctgtgacagctctgctgctgcctctggcactgctgcttcatgctgctagacctagccagtttagagtgtcccctctggacagaacctggaacctgggcgagacagtggaactgaagtgccaggtgctgctgagcaaccctacaagcggctgctcctggctgtttcagcctagaggtgcagccgcctctcctacctttctgctgtacctgagccagaacaagcccaaggccgccgaaggactggacacccagagattcagcggcaagagactgggcgacaccttcgtgctgaccctgagcgacttcagaagagagaacgagggctactacttctgtagcgccctgagcaacagcatcatgtacttcagccacttcgtgcccgtgtttctgcccgccaagcctacaacaacccctgctcctagacctcctacaccagctcctacaatcgccagccagcctctgtctctcagacccgaagcctgtagacctgctgctggcggagctgtgcataccagaggactggatttcgcctgcgacatctacatctgggctcctctggctggcacatgtggcgtgctgctgctgtccctggtcatcaccctgtactgcaaccaccggaacaggcggagagtgtgcaagtgccctagacctgtggtcaagagcggcgacaagcctagcctgagcgccagatatgtt

SEQ ID NO: 2913 - DNA, 2796 bp, synthetic construct
  source 1..2796: mol_type = other DNA
atggccttaccagtgaccgccttgctcctgccgctggccttgctgctccacgccgccaggccgggcgtgacacagtctcccacacacctgattaagaccagaggccagcaagtgaccctgcggtgtagccctaagagcggccacgataccgtgtcctggtatcagcaggctctcggacagggaccccagttcatcttccagtattacgaggaagaggaacggcagcggggcaacttccccgatagattttccggccatcagttccccaactacagctccgagctgaacgtgaacgctctgctgctgggagatagcgccctgtacctgtgtgcctctagccttggctggcgcggaggcagatacaacgagcagttctttggccctggcaccagactgacagtgctcgagctgtgggtttcacagcctccagagatcagaaccctggaaggcagcagcgccttcctgccttgcagcttcaatgcctctcagggcagactggctatcggcagcgtgacctggttcagagatgaggtggtgcccggcaaagaagtgcggaacggcacccctgagtttagaggaaggctggcccctctggcctccagcagatttctgcacgatcaccaggccgagctgcacatcagagatgtgcgaggacacgacgccagcatctacgtgtgcagagtggaagtgctcggcctcggagttggcacaggcaatggaacaagactggtggtggaaaaagagcaccctcagctcggagccggaacagtgctgcttctgagagccggcttttacgccgtgtcctttctgtctgtggccgtgggcagcaccgtgtactatcagggcaagtgcctgacctggaagggacctagaaggcaactgcctgctgtggtgcctgctcctttgcctcctccatgtggaagctctgcccatctgctgccacctgttccaggcggaagggccaagcgatctggatctggagcaacaaacttctcactactcaaacaagcaggtgacgtggaggagaatcccgggcctactagtatggactggatttggcgcatccttttccttgtcggcgctgctaccggcgcgcattccttcgaacagaatatcgaccagcctacagagatgaccgccaccgaaggcgctatcgtgcagatcaactgcacctaccagaccagcggcttcaacggcctgttctggtatcaacagcacgccggcgaggcccctaccttcctgtcttacaatgtgctggacggcctggaagagaagggcagattcagcagcttcctgagcagaagcaagggctacagctacctgctgctgaaagaactccagatgaaggacagcgcctcctacctgtgcgcttccgtggacggcaacaacagactggccttcggcaagggcaatcaggtggtcgtgatccccaacacgcgtctgtgggtgtcccagccacctgaaattcggacactggaaggctcctccgcctttctgccctgtagctttaacgccagccaggggagactcgccatcggctctgtgacatggttccgggatgaagtcgtccctggaaaagaagttcgcaacggaacaccagagttcagaggcagactcgccccactggcaagctccagattcctgcatgaccatcaggctgaactgcacattagggacgtgcggggccacgatgcctccatctatgtgtgtcgggtcgaagtgcttggactcggcgtcggaactggaaacggcactaggctggtggtcgagaaagaacatccacagcttggcgctggcaccgtcctgttgcttagagccggattctatgccgtcagcttcctgtccgtggctgtggggtctacagtgtattaccagggaaaatgtctcacctggaaaggccccagacgccagcttccagctgttgttcctgctccactgccaccaccttgtggctcctctgctcacttgcttccaccagtgcctggcggacgcgccaagagaagcggatctggcgtgaagcagaccctgaatttcgacctgctgaagctggctggcgacgtggaatccaacccaggcccttctagaggccatatggctctgcctgtgacagctctgctgctgcctctggcactgctgcttcatgctgctagacctagccagtttagagtgtcccctctggacagaacctggaacctgggcgagacagtggaactgaagtgccaggtgctgctgagcaaccctacaagcggctgctcctggctgtttcagcctagaggtgcagccgcctctcctacctttctgctgtacctgagccagaacaagcccaaggccgccgaaggactggacacccagagattcagcggcaagagactgggcgacaccttcgtgctgaccctgagcgacttcagaagagagaacgagggctactacttctgtagcgccctgagcaacagcatcatgtacttcagccacttcgtgcccgtgtttctgcccgccaagcctacaacaacccctgctcctagacctcctacaccagctcctacaatcgccagccagcctctgtctctcagacccgaagcctgtagacctgctgctggcggagctgtgcataccagaggactggatttcgcctgcgacatctacatctgggctcctctggctggcacatgtggcgtgctgctgctgtccctggtcatcaccctgtactgcaaccaccggaacaggcggagagtgtgcaagtgccctagacctgtggtcaagagcggcgacaagcctagcctgagcgccagatatgtt

SEQ ID NO: 2914 - DNA, 3201 bp, synthetic construct
  source 1..3201: mol_type = other DNA
atggccttaccagtgaccgccttgctcctgccgctggccttgctgctccacgccgccaggccggaattcggcgtgacacagtctcccacacacctgattaagaccagaggccagcaagtgaccctgcggtgtagccctaagagcggccacgataccgtgtcctggtatcagcaggctctcggacagggaccccagttcatcttccagtattacgaggaagaggaacggcagcggggcaacttccccgatagattttccggccatcagttccccaactacagctccgagctgaacgtgaacgctctgctgctgggagatagcgccctgtacctgtgtgcctctagccttggctggcgcggaggcagatacaacgagcagttctttggccctggcaccagactgacagtgctcgagggacagcctaaggccaatcctaccgtgacactgttccctccaagcagcgaagaactccaggccaacaaggccacacttgtgtgcctgatctccgacttctaccctggggctgtgacagtggcttggaaggccgatggatctcctgtgaaagccggcgtggaaaccaccaagccatccaagcagagcaacaacaaatacgccgccagctcctacctgagcctgacacctgagcagtggaagtcccacagatcctacagctgccaagtgacccacgaaggcagcaccgtggaaaagacagtggcccctacagagtgcagcggatcccagagcttcggcctgctggaccccaagctgtgctacctgctggatggcatcctgttcatctacggcgtgatcctgaccgccctgttcctgagagtgaagttcagcagaagcgccgacgcccctgcctaccagcagggacagaaccaactgtacaacgagctgaacctgggcagacgggaagagtacgacgtgctggacaagcggagaggcagggaccctgagatgggcggaaagccccagcggagaaagaacccccaggaaggactgtataacgaactccagaaagacaagatggccgaagcctacagcgagatcggcatgaagggcgagcggagaagaggcaagggccacgatggcctgtaccagggcctgagcaccgccaccaaggacacctatgacgccctgcacatgcaggccctgcctccaagaagggccaagcgatctggatctggagcaacaaacttctcactactcaaacaagcaggtgacgtggaggagaatcccgggcctactagtatggactggatttggcgcatccttttccttgtcggcgctgctaccggcgcgcattccttcgaacagaatatcgaccagcctacagagatgaccgccaccgaaggcgctatcgtgcagatcaactgcacctaccagaccagcggcttcaacggcctgttctggtatcaacagcacgccggcgaggcccctaccttcctgtcttacaatgtgctggacggcctggaagagaagggcagattcagcagcttcctgagcagaagcaagggctacagctacctgctgctgaaagaactccagatgaaggacagcgcctcctacctgtgcgcttccgtggacggcaacaacagactggccttcggcaagggcaatcaggtggtcgtgatccccaacacgcgtgcctctacaaagggaccctccgtgtttcctctggctcccagcagcaagtctacaagcggaggaacagccgctctgggctgcctggtcaaggattactttcccgagcctgtgaccgtgtcctggaatagcggagcactgacaagcggcgtgcacacctttccagccgtgctgcaaagcagcggcctgtactctctgagcagcgtggtcacagtgcctagctctagcctgggcacccagacctacatctgcaatgtgaaccacaagcctagcaacaccaaggtggacaagagagtggaacccaagagctgtggtacccagagttttgggttgttggaccctaaattgtgctatctgttggacggaatcctgttcatttacggagtgatcctgaccgcattgttcctgcgggttaagttttccagatccgcagacgcacccgcttaccaacaagggcagaaccaactctacaatgaacttaatttggggcggagggaagagtacgacgttctggacaaaaggaggggacgagatcccgagatgggcggaaagcctcagcgaaggaagaatccgcaagaggggctttataacgaactccagaaagataaaatggcagaagcctatagtgagattgggatgaagggagaaaggaggaggggtaaaggtcacgatgggttgtaccaaggattgagcacagccactaaagatacctatgatgcgctccacatgcaggccctgccgccaagacgcgccaagagaagcggatctggcgtgaagcagaccctgaatttcgacctgctgaagctggctggcgacgtggaatccaacccaggcccttctagaggccatatggctctgcctgtgacagctctgctgctgcctctggcactgctgcttcatgctgctagacctagccagtttagagtgtcccctctggacagaacctggaacctgggcgagacagtggaactgaagtgccaggtgctgctgagcaaccctacaagcggctgctcctggctgtttcagcctagaggtgcagccgcctctcctacctttctgctgtacctgagccagaacaagcccaaggccgccgaaggactggacacccagagattcagcggcaagagactgggcgacaccttcgtgctgaccctgagcgacttcagaagagagaacgagggctactacttctgtagcgccctgagcaacagcatcatgtacttcagccacttcgtgcccgtgtttctgcccgccaagcctacaacaacccctgctcctagacctcctacaccagctcctacaatcgccagccagcctctgtctctcagacccgaagcctgtagacctgctgctggcggagctgtgcataccagaggactggatttcgcctgcgacatctacatctgggctcctctggctggcacatgtggcgtgctgctgctgtccctggtcatcaccctgtactgcaaccaccggaacaggcggagagtgtgcaagtgccctagacctgtggtcaagagcggcgacaagcctagcctgagcgccagatatgtt

SEQ ID NO: 2915 - DNA, 3255 bp, synthetic construct
  source 1..3255: mol_type = other DNA
atggccttaccagtgaccgccttgctcctgccgctggccttgctgctccacgccgccaggccggaattcggcgtgacacagtctcccacacacctgattaagaccagaggccagcaagtgaccctgcggtgtagccctaagagcggccacgataccgtgtcctggtatcagcaggctctcggacagggaccccagttcatcttccagtattacgaggaagaggaacggcagcggggcaacttccccgatagattttccggccatcagttccccaactacagctccgagctgaacgtgaacgctctgctgctgggagatagcgccctgtacctgtgtgcctctagccttggctggcgcggaggcagatacaacgagcagttctttggccctggcaccagactgacagtgctcgagggacagcctaaggccaatcctaccgtgacactgttccctccaagcagcgaagaactccaggccaacaaggccacacttgtgtgcctgatctccgacttctaccctggggctgtgacagtggcttggaaggccgatggatctcctgtgaaagccggcgtggaaaccaccaagccatccaagcagagcaacaacaaatacgccgccagctcctacctgagcctgacacctgagcagtggaagtcccacagatcctacagctgccaagtgacccacgaaggcagcaccgtggaaaagacagtggcccctacagagtgcagcggatcccagagcttcggcctgctggaccccaagctgtgctacctgctggatggcatcctgttcatctacggcgtgatcctgaccgccctgttcctgagagtgaagttcagcagaagcgccgacgcccctgcctaccagcagggacagaaccaactgtacaacgagctgaacctgggcagacgggaagagtacgacgtgctggacaagcggagaggcagggaccctgagatgggcggaaagccccagcggagaaagaacccccaggaaggactgtataacgaactccagaaagacaagatggccgaagcctacagcgagatcggcatgaagggcgagcggagaagaggcaagggccacgatggcctgtaccagggcctgagcaccgccaccaaggacacctatgacgccctgcacatgcaggccctgcctccaagaagggccaagcgatctggatctggagcaacaaacttctcactactcaaacaagcaggtgacgtggaggagaatcccgggcctactagtatggactggatttggcgcatccttttccttgtcggcgctgctaccggcgcgcattccttcgaacagaatatcgaccagcctacagagatgaccgccaccgaaggcgctatcgtgcagatcaactgcacctaccagaccagcggcttcaacggcctgttctggtatcaacagcacgccggcgaggcccctaccttcctgtcttacaatgtgctggacggcctggaagagaagggcagattcagcagcttcctgagcagaagcaagggctacagctacctgctgctgaaagaactccagatgaaggacagcgcctcctacctgtgcgcttccgtggacggcaacaacagactggccttcggcaagggcaatcaggtggtcgtgatccccaacacgcgtgcgtctcccacttctccgaaagttttccccctttccctctgtagcacacaacctgatggaaatgtggtcatcgcatgtctggtacaaggattctttccacaagagccattgagcgttacatggtcagagagcgggcagggagttaccgctaggaatttcccaccctcacaggatgcgagtggtgatctttataccacatcatcacaactcacgttgccagccactcagtgcctcgctggaaagtcagtaacatgccatgtcaaacattacactaatccctcacaagatgttaccgtgccttgcccagtaccttctacgccgcccaccccgtctccatctactccacccacgccatcacctagtggtacccagagttttgggttgttggaccctaaattgtgctatctgttggacggaatcctgttcatttacggagtgatcctgaccgcattgttcctgcgggttaagttttccagatccgcagacgcacccgcttaccaacaagggcagaaccaactctacaatgaacttaatttggggcggagggaagagtacgacgttctggacaaaaggaggggacgagatcccgagatgggcggaaagcctcagcgaaggaagaatccgcaagaggggctttataacgaactccagaaagataaaatggcagaagcctatagtgagattgggatgaagggagaaaggaggaggggtaaaggtcacgatgggttgtaccaaggattgagcacagccactaaagatacctatgatgcgctccacatgcaggccctgccgccaagacgcgccaagagaagcggatctggcgtgaagcagaccctgaatttcgacctgctgaagctggctggcgacgtggaatccaacccaggcccttctagaggccatatggctctgcctgtgacagctctgctgctgcctctggcactgctgcttcatgctgctagacctagccagtttagagtgtcccctctggacagaacctggaacctgggcgagacagtggaactgaagtgccaggtgctgctgagcaaccctacaagcggctgctcctggctgtttcagcctagaggtgcagccgcctctcctacctttctgctgtacctgagccagaacaagcccaaggccgccgaaggactggacacccagagattcagcggcaagagactgggcgacaccttcgtgctgaccctgagcgacttcagaagagagaacgagggctactacttctgtagcgccctgagcaacagcatcatgtacttcagccacttcgtgcccgtgtttctgcccgccaagcctacaacaacccctgctcctagacctcctacaccagctcctacaatcgccagccagcctctgtctctcagacccgaagcctgtagacctgctgctggcggagctgtgcataccagaggactggatttcgcctgcgacatctacatctgggctcctctggctggcacatgtggcgtgctgctgctgtccctggtcatcaccctgtactgcaaccaccggaacaggcggagagtgtgcaagtgccctagacctgtggtcaagagcggcgacaagcctagcctgagcgccagatatgtt

SEQ ID NO: 2916 - DNA, 3198 bp, synthetic construct
  source 1..3198: mol_type = other DNA
atggccttaccagtgaccgccttgctcctgccgctggccttgctgctccacgccgccaggccggaattcggcgtgacacagtctcccacacacctgattaagaccagaggccagcaagtgaccctgcggtgtagccctaagagcggccacgataccgtgtcctggtatcagcaggctctcggacagggaccccagttcatcttccagtattacgaggaagaggaacggcagcggggcaacttccccgatagattttccggccatcagttccccaactacagctccgagctgaacgtgaacgctctgctgctgggagatagcgccctgtacctgtgtgcctctagccttggctggcgcggaggcagatacaacgagcagttctttggccctggcaccagactgacagtgctcgagggacagcctaaggccaatcctaccgtgacactgttccctccaagcagcgaagaactccaggccaacaaggccacacttgtgtgcctgatctccgacttctaccctggggctgtgacagtggcttggaaggccgatggatctcctgtgaaagccggcgtggaaaccaccaagccatccaagcagagcaacaacaaatacgccgccagctcctacctgagcctgacacctgagcagtggaagtcccacagatcctacagctgccaagtgacccacgaaggcagcaccgtggaaaagacagtggcccctacagagtgcagcggatcccagagcttcggcctgctggaccccaagctgtgctacctgctggatggcatcctgttcatctacggcgtgatcctgaccgccctgttcctgagagtgaagttcagcagaagcgccgacgcccctgcctaccagcagggacagaaccaactgtacaacgagctgaacctgggcagacgggaagagtacgacgtgctggacaagcggagaggcagggaccctgagatgggcggaaagccccagcggagaaagaacccccaggaaggactgtataacgaactccagaaagacaagatggccgaagcctacagcgagatcggcatgaagggcgagcggagaagaggcaagggccacgatggcctgtaccagggcctgagcaccgccaccaaggacacctatgacgccctgcacatgcaggccctgcctccaagaagggccaagcgatctggatctggagcaacaaacttctcactactcaaacaagcaggtgacgtggaggagaatcccgggcctactagtatggactggatttggcgcatccttttccttgtcggcgctgctaccggcgcgcattccttcgaacagaatatcgaccagcctacagagatgaccgccaccgaaggcgctatcgtgcagatcaactgcacctaccagaccagcggcttcaacggcctgttctggtatcaacagcacgccggcgaggcccctaccttcctgtcttacaatgtgctggacggcctggaagagaagggcagattcagcagcttcctgagcagaagcaagggctacagctacctgctgctgaaagaactccagatgaaggacagcgcctcctacctgtgcgcttccgtggacggcaacaacagactggccttcggcaagggcaatcaggtggtcgtgatccccaacacgcgtgcctccacgaagggaccatctgttttccctcttgccccctgctcacggtcaacgtctgaatccacggcagccctgggctgcctcgttaaggactactttccagagccggtaacagtctcctggaacagtggagcccttacatcaggtgttcacactttccctgccgtcttgcaaagtagcggactgtacagccttagttccgttgttacggttccttctagcaacttcggtacacagacatatacttgtaacgtagatcataagcctagcaacaccaaggtggacaaaaccgtagagagaaagtgtggtacccagagttttgggttgttggaccctaaattgtgctatctgttggacggaatcctgttcatttacggagtgatcctgaccgcattgttcctgcgggttaagttttccagatccgcagacgcacccgcttaccaacaagggcagaaccaactctacaatgaacttaatttggggcggagggaagagtacgacgttctggacaaaaggaggggacgagatcccgagatgggcggaaagcctcagcgaaggaagaatccgcaagaggggctttataacgaactccagaaagataaaatggcagaagcctatagtgagattgggatgaagggagaaaggaggaggggtaaaggtcacgatgggttgtaccaaggattgagcacagccactaaagatacctatgatgcgctccacatgcaggccctgccgccaagacgcgccaagagaagcggatctggcgtgaagcagaccctgaatttcgacctgctgaagctggctggcgacgtggaatccaacccaggcccttctagaggccatatggctctgcctgtgacagctctgctgctgcctctggcactgctgcttcatgctgctagacctagccagtttagagtgtcccctctggacagaacctggaacctgggcgagacagtggaactgaagtgccaggtgctgctgagcaaccctacaagcggctgctcctggctgtttcagcctagaggtgcagccgcctctcctacctttctgctgtacctgagccagaacaagcccaaggccgccgaaggactggacacccagagattcagcggcaagagactgggcgacaccttcgtgctgaccctgagcgacttcagaagagagaacgagggctactacttctgtagcgccctgagcaacagcatcatgtacttcagccacttcgtgcccgtgtttctgcccgccaagcctacaacaacccctgctcctagacctcctacaccagctcctacaatcgccagccagcctctgtctctcagacccgaagcctgtagacctgctgctggcggagctgtgcataccagaggactggatttcgcctgcgacatctacatctgggctcctctggctggcacatgtggcgtgctgctgctgtccctggtcatcaccctgtactgcaaccaccggaacaggcggagagtgtgcaagtgccctagacctgtggtcaagagcggcgacaagcctagcctgagcgccagatatgtt

SEQ ID NO: 2917 - DNA, 3363 bp, synthetic construct
  source 1..3363: mol_type = other DNA
atggccttaccagtgaccgccttgctcctgccgctggccttgctgctccacgccgccaggccgggcgtgacacagtctcccacacacctgattaagaccagaggccagcaagtgaccctgcggtgtagccctaagagcggccacgataccgtgtcctggtatcagcaggctctcggacagggaccccagttcatcttccagtattacgaggaagaggaacggcagcggggcaacttccccgatagattttccggccatcagttccccaactacagctccgagctgaacgtgaacgctctgctgctgggagatagcgccctgtacctgtgtgcctctagccttggctggcgcggaggcagatacaacgagcagttctttggccctggcaccagactgacagtgctcgagggacagcctaaggccaatcctaccgtgacactgttccctccaagcagcgaagaactccaggccaacaaggccacacttgtgtgcctgatctccgacttctaccctggggctgtgacagtggcttggaaggccgatggatctcctgtgaaagccggcgtggaaaccaccaagccatccaagcagagcaacaacaaatacgccgccagctcctacctgagcctgacacctgagcagtggaagtcccacagatcctacagctgccaagtgacccacgaaggcagcaccgtggaaaagacagtggcccctacagagtgcagcggatcccagagcttcggcctgctggaccccaagctgtgctacctgctggatggcatcctgttcatctacggcgtgatcctgaccgccctgttcctgagagtgaagttcagcagaagcgccgacgcccctgcctaccagcagggacagaaccaactgtacaacgagctgaacctgggcagacgggaagagtacgacgtgctggacaagcggagaggcagggaccctgagatgggcggaaagccccagcggagaaagaacccccaggaaggactgtataacgaactccagaaagacaagatggccgaagcctacagcgagatcggcatgaagggcgagcggagaagaggcaagggccacgatggcctgtaccagggcctgagcaccgccaccaaggacacctatgacgccctgcacatgcaggccctgcctccaagaagggccaagcgatctggatctggagcaacaaacttctcactactcaaacaagcaggtgacgtggaggagaatcccgggcctactagtatggactggatttggcgcatccttttccttgtcggcgctgctaccggcgcgcattccttcgaacagaatatcgaccagcctacagagatgaccgccaccgaaggcgctatcgtgcagatcaactgcacctaccagaccagcggcttcaacggcctgttctggtatcaacagcacgccggcgaggcccctaccttcctgtcttacaatgtgctggacggcctggaagagaagggcagattcagcagcttcctgagcagaagcaagggctacagctacctgctgctgaaagaactccagatgaaggacagcgcctcctacctgtgcgcttccgtggacggcaacaacagactggccttcggcaagggcaatcaggtggtcgtgatccccaacacgcgtgctccgacaaaggcgccagacgtttttcctattatttcaggatgtcggcatccgaaagataattccccagttgttctggcgtgtcttatcacgggctaccatcctacatctgttaccgttacgtggtatatgggtacgcaaagccaacctcagcggacttttccagagatccaacggcgagattcatattatatgacatccagtcagttgagtacaccgctgcaacagtggcggcaaggtgagtataagtgtgtggtccaacacacagccagtaaaagtaagaaagagatattccggtggcctgaaagcccgaaggcacaagcatcttctgttccgacggcgcaaccgcaagctgaaggaagtcttgcaaaagcaaccacagcacccgcgacaacacgaaacacaggacgcggaggcgaggaaaagaaaaaagaaaaggaaaaggaagagcaagaggagagggaaactaagacccccggtacccagagttttgggttgttggaccctaaattgtgctatctgttggacggaatcctgttcatttacggagtgatcctgaccgcattgttcctgcgggttaagttttccagatccgcagacgcacccgcttaccaacaagggcagaaccaactctacaatgaacttaatttggggcggagggaagagtacgacgttctggacaaaaggaggggacgagatcccgagatgggcggaaagcctcagcgaaggaagaatccgcaagaggggctttataacgaactccagaaagataaaatggcagaagcctatagtgagattgggatgaagggagaaaggaggaggggtaaaggtcacgatgggttgtaccaaggattgagcacagccactaaagatacctatgatgcgctccacatgcaggccctgccgccaagacgcgccaagagaagcggatctggcgtgaagcagaccctgaatttcgacctgctgaagctggctggcgacgtggaatccaacccaggcccttctagaggccatatggctctgcctgtgacagctctgctgctgcctctggcactgctgcttcatgctgctagacctagccagtttagagtgtcccctctggacagaacctggaacctgggcgagacagtggaactgaagtgccaggtgctgctgagcaaccctacaagcggctgctcctggctgtttcagcctagaggtgcagccgcctctcctacctttctgctgtacctgagccagaacaagcccaaggccgccgaaggactggacacccagagattcagcggcaagagactgggcgacaccttcgtgctgaccctgagcgacttcagaagagagaacgagggctactacttctgtagcgccctgagcaacagcatcatgtacttcagccacttcgtgcccgtgtttctgcccgccaagcctacaacaacccctgctcctagacctcctacaccagctcctacaatcgccagccagcctctgtctctcagacccgaagcctgtagacctgctgctggcggagctgtgcataccagaggactggatttcgcctgcgacatctacatctgggctcctctggctggcacatgtggcgtgctgctgctgtccctggtcatcaccctgtactgcaaccaccggaacaggcggagagtgtgcaagtgccctagacctgtggtcaagagcggcgacaagcctagcctgagcgccagatatgtt

SEQ ID NO: 2918 - DNA, 3189 bp, synthetic construct
  source 1..3189: mol_type = other DNA
atggccttaccagtgaccgccttgctcctgccgctggccttgctgctccacgccgccaggccgggcgtgacacagtctcccacacacctgattaagaccagaggccagcaagtgaccctgcggtgtagccctaagagcggccacgataccgtgtcctggtatcagcaggctctcggacagggaccccagttcatcttccagtattacgaggaagaggaacggcagcggggcaacttccccgatagattttccggccatcagttccccaactacagctccgagctgaacgtgaacgctctgctgctgggagatagcgccctgtacctgtgtgcctctagccttggctggcgcggaggcagatacaacgagcagttctttggccctggcaccagactgacagtgctcgagggacagcctaaggccaatcctaccgtgacactgttccctccaagcagcgaagaactccaggccaacaaggccacacttgtgtgcctgatctccgacttctaccctggggctgtgacagtggcttggaaggccgatggatctcctgtgaaagccggcgtggaaaccaccaagccatccaagcagagcaacaacaaatacgccgccagctcctacctgagcctgacacctgagcagtggaagtcccacagatcctacagctgccaagtgacccacgaaggcagcaccgtggaaaagacagtggcccctacagagtgcagcggatcccagagcttcggcctgctggaccccaagctgtgctacctgctggatggcatcctgttcatctacggcgtgatcctgaccgccctgttcctgagagtgaagttcagcagaagcgccgacgcccctgcctaccagcagggacagaaccaactgtacaacgagctgaacctgggcagacgggaagagtacgacgtgctggacaagcggagaggcagggaccctgagatgggcggaaagccccagcggagaaagaacccccaggaaggactgtataacgaactccagaaagacaagatggccgaagcctacagcgagatcggcatgaagggcgagcggagaagaggcaagggccacgatggcctgtaccagggcctgagcaccgccaccaaggacacctatgacgccctgcacatgcaggccctgcctccaagaagggccaagcgatctggatctggagcaacaaacttctcactactcaaacaagcaggtgacgtggaggagaatcccgggcctactagtatggactggatttggcgcatccttttccttgtcggcgctgctaccggcgcgcattccttcgaacagaatatcgaccagcctacagagatgaccgccaccgaaggcgctatcgtgcagatcaactgcacctaccagaccagcggcttcaacggcctgttctggtatcaacagcacgccggcgaggcccctaccttcctgtcttacaatgtgctggacggcctggaagagaagggcagattcagcagcttcctgagcagaagcaagggctacagctacctgctgctgaaagaactccagatgaaggacagcgcctcctacctgtgcgcttccgtggacggcaacaacagactggccttcggcaagggcaatcaggtggtcgtgatccccaacacgcgtgcctcaacgaaagggcctagcgtcttccccctggcgccgtgctcacgatccacaagcgaatccaccgccgctctcggatgcctcgtaaaggattatttccctgaaccagtcacggtgtcatggaacagcggtgcccttaccagcggcgtccatacctttcctgctgtgctccagtccagcggactttatagtctcagctctgtcgtgaccgtcccttcctctaattttggcacccagacttacacgtgcaacgtcgatcataagcccagtaacaccaaggtagacaagacggtggaacgaaagggtacccagagttttgggttgttggaccctaaattgtgctatctgttggacggaatcctgttcatttacggagtgatcctgaccgcattgttcctgcgggttaagttttccagatccgcagacgcacccgcttaccaacaagggcagaaccaactctacaatgaacttaatttggggcggagggaagagtacgacgttctggacaaaaggaggggacgagatcccgagatgggcggaaagcctcagcgaaggaagaatccgcaagaggggctttataacgaactccagaaagataaaatggcagaagcctatagtgagattgggatgaagggagaaaggaggaggggtaaaggtcacgatgggttgtaccaaggattgagcacagccactaaagatacctatgatgcgctccacatgcaggccctgccgccaagacgcgccaagagaagcggatctggcgtgaagcagaccctgaatttcgacctgctgaagctggctggcgacgtggaatccaacccaggcccttctagaggccatatggctctgcctgtgacagctctgctgctgcctctggcactgctgcttcatgctgctagacctagccagtttagagtgtcccctctggacagaacctggaacctgggcgagacagtggaactgaagtgccaggtgctgctgagcaaccctacaagcggctgctcctggctgtttcagcctagaggtgcagccgcctctcctacctttctgctgtacctgagccagaacaagcccaaggccgccgaaggactggacacccagagattcagcggcaagagactgggcgacaccttcgtgctgaccctgagcgacttcagaagagagaacgagggctactacttctgtagcgccctgagcaacagcatcatgtacttcagccacttcgtgcccgtgtttctgcccgccaagcctacaacaacccctgctcctagacctcctacaccagctcctacaatcgccagccagcctctgtctctcagacccgaagcctgtagacctgctgctggcggagctgtgcataccagaggactggatttcgcctgcgacatctacatctgggctcctctggctggcacatgtggcgtgctgctgctgtccctggtcatcaccctgtactgcaaccaccggaacaggcggagagtgtgcaagtgccctagacctgtggtcaagagcggcgacaagcctagcctgagcgccagatatgtt

SEQ ID NO: 2919 - DNA, 3210 bp, synthetic construct
  source 1..3210: mol_type = other DNA
atggccttaccagtgaccgccttgctcctgccgctggccttgctgctccacgccgccaggccgggcgtgacacagtctcccacacacctgattaagaccagaggccagcaagtgaccctgcggtgtagccctaagagcggccacgataccgtgtcctggtatcagcaggctctcggacagggaccccagttcatcttccagtattacgaggaagaggaacggcagcggggcaacttccccgatagattttccggccatcagttccccaactacagctccgagctgaacgtgaacgctctgctgctgggagatagcgccctgtacctgtgtgcctctagccttggctggcgcggaggcagatacaacgagcagttctttggccctggcaccagactgacagtgctcgagggacagcctaaggccaatcctaccgtgacactgttccctccaagcagcgaagaactccaggccaacaaggccacacttgtgtgcctgatctccgacttctaccctggggctgtgacagtggcttggaaggccgatggatctcctgtgaaagccggcgtggaaaccaccaagccatccaagcagagcaacaacaaatacgccgccagctcctacctgagcctgacacctgagcagtggaagtcccacagatcctacagctgccaagtgacccacgaaggcagcaccgtggaaaagacagtggcccctacagagtgcagcggatcccagagcttcggcctgctggaccccaagctgtgctacctgctggatggcatcctgttcatctacggcgtgatcctgaccgccctgttcctgagagtgaagttcagcagaagcgccgacgcccctgcctaccagcagggacagaaccaactgtacaacgagctgaacctgggcagacgggaagagtacgacgtgctggacaagcggagaggcagggaccctgagatgggcggaaagccccagcggagaaagaacccccaggaaggactgtataacgaactccagaaagacaagatggccgaagcctacagcgagatcggcatgaagggcgagcggagaagaggcaagggccacgatggcctgtaccagggcctgagcaccgccaccaaggacacctatgacgccctgcacatgcaggccctgcctccaagaagggccaagcgatctggatctggagcaacaaacttctcactactcaaacaagcaggtgacgtggaggagaatcccgggcctactagtatggactggatttggcgcatccttttccttgtcggcgctgctaccggcgcgcattccttcgaacagaatatcgaccagcctacagagatgaccgccaccgaaggcgctatcgtgcagatcaactgcacctaccagaccagcggcttcaacggcctgttctggtatcaacagcacgccggcgaggcccctaccttcctgtcttacaatgtgctggacggcctggaagagaagggcagattcagcagcttcctgagcagaagcaagggctacagctacctgctgctgaaagaactccagatgaaggacagcgcctcctacctgtgcgcttccgtggacggcaacaacagactggccttcggcaagggcaatcaggtggtcgtgatccccaacacgcgtgcgtcacctacgtccccaaaagtgttcccgctgtcactcgattccactccacaggacggtaacgtggtggttgcctgcctggtacaaggtttctttcctcaagaaccactctctgtgacgtggtctgaaagtggtcagaatgttacagcacggaacttcccaccgagtcaagatgcgagtggggatctctatacgacatccagtcaactcacactgcccgcaacacaatgccccgatggcaaatctgttacctgccatgtgaaacattacaccaatccatcccaggatgtgacagtaccttgtccggttccgccccctcccccgggtacccagagttttgggttgttggaccctaaattgtgctatctgttggacggaatcctgttcatttacggagtgatcctgaccgcattgttcctgcgggttaagttttccagatccgcagacgcacccgcttaccaacaagggcagaaccaactctacaatgaacttaatttggggcggagggaagagtacgacgttctggacaaaaggaggggacgagatcccgagatgggcggaaagcctcagcgaaggaagaatccgcaagaggggctttataacgaactccagaaagataaaatggcagaagcctatagtgagattgggatgaagggagaaaggaggaggggtaaaggtcacgatgggttgtaccaaggattgagcacagccactaaagatacctatgatgcgctccacatgcaggccctgccgccaagacgcgccaagagaagcggatctggcgtgaagcagaccctgaatttcgacctgctgaagctggctggcgacgtggaatccaacccaggcccttctagaggccatatggctctgcctgtgacagctctgctgctgcctctggcactgctgcttcatgctgctagacctagccagtttagagtgtcccctctggacagaacctggaacctgggcgagacagtggaactgaagtgccaggtgctgctgagcaaccctacaagcggctgctcctggctgtttcagcctagaggtgcagccgcctctcctacctttctgctgtacctgagccagaacaagcccaaggccgccgaaggactggacacccagagattcagcggcaagagactgggcgacaccttcgtgctgaccctgagcgacttcagaagagagaacgagggctactacttctgtagcgccctgagcaacagcatcatgtacttcagccacttcgtgcccgtgtttctgcccgccaagcctacaacaacccctgctcctagacctcctacaccagctcctacaatcgccagccagcctctgtctctcagacccgaagcctgtagacctgctgctggcggagctgtgcataccagaggactggatttcgcctgcgacatctacatctgggctcctctggctggcacatgtggcgtgctgctgctgtccctggtcatcaccctgtactgcaaccaccggaacaggcggagagtgtgcaagtgccctagacctgtggtcaagagcggcgacaagcctagcctgagcgccagatatgtt

SEQ ID NO: 2920 - DNA, 3195 bp, synthetic construct
  source 1..3195: mol_type = other DNA
atggccttaccagtgaccgccttgctcctgccgctggccttgctgctccacgccgccaggccgggcgtgacacagtctcccacacacctgattaagaccagaggccagcaagtgaccctgcggtgtagccctaagagcggccacgataccgtgtcctggtatcagcaggctctcggacagggaccccagttcatcttccagtattacgaggaagaggaacggcagcggggcaacttccccgatagattttccggccatcagttccccaactacagctccgagctgaacgtgaacgctctgctgctgggagatagcgccctgtacctgtgtgcctctagccttggctggcgcggaggcagatacaacgagcagttctttggccctggcaccagactgacagtgctcgagggacagcctaaggccaatcctaccgtgacactgttccctccaagcagcgaagaactccaggccaacaaggccacacttgtgtgcctgatctccgacttctaccctggggctgtgacagtggcttggaaggccgatggatctcctgtgaaagccggcgtggaaaccaccaagccatccaagcagagcaacaacaaatacgccgccagctcctacctgagcctgacacctgagcagtggaagtcccacagatcctacagctgccaagtgacccacgaaggcagcaccgtggaaaagacagtggcccctacagagtgcagcggatcccagagcttcggcctgctggaccccaagctgtgctacctgctggatggcatcctgttcatctacggcgtgatcctgaccgccctgttcctgagagtgaagttcagcagaagcgccgacgcccctgcctaccagcagggacagaaccaactgtacaacgagctgaacctgggcagacgggaagagtacgacgtgctggacaagcggagaggcagggaccctgagatgggcggaaagccccagcggagaaagaacccccaggaaggactgtataacgaactccagaaagacaagatggccgaagcctacagcgagatcggcatgaagggcgagcggagaagaggcaagggccacgatggcctgtaccagggcctgagcaccgccaccaaggacacctatgacgccctgcacatgcaggccctgcctccaagaagggccaagcgatctggatctggagcaacaaacttctcactactcaaacaagcaggtgacgtggaggagaatcccgggcctactagtatggactggatttggcgcatccttttccttgtcggcgctgctaccggcgcgcattccttcgaacagaatatcgaccagcctacagagatgaccgccaccgaaggcgctatcgtgcagatcaactgcacctaccagaccagcggcttcaacggcctgttctggtatcaacagcacgccggcgaggcccctaccttcctgtcttacaatgtgctggacggcctggaagagaagggcagattcagcagcttcctgagcagaagcaagggctacagctacctgctgctgaaagaactccagatgaaggacagcgcctcctacctgtgcgcttccgtggacggcaacaacagactggccttcggcaagggcaatcaggtggtcgtgatccccaacacgcgtgctagtacccagtcaccttctgttttcccgcttactagatgctgcaagaacataccatccaatgccacttctgtcacactgggctgtcttgctacaggttattttcctgagccggtgatggtcacttgggataccggtagcctgaatggaactacaatgacgctgcctgccacgacgctcacattgagtgggcattacgcgacaattagtcttttgacggtaagcggagcttgggctaagcagatgttcacttgcagagtagcgcacactccctctagtactgactgggttgacaacaaaaccttttctggtacccagagttttgggttgttggaccctaaattgtgctatctgttggacggaatcctgttcatttacggagtgatcctgaccgcattgttcctgcgggttaagttttccagatccgcagacgcacccgcttaccaacaagggcagaaccaactctacaatgaacttaatttggggcggagggaagagtacgacgttctggacaaaaggaggggacgagatcccgagatgggcggaaagcctcagcgaaggaagaatccgcaagaggggctttataacgaactccagaaagataaaatggcagaagcctatagtgagattgggatgaagggagaaaggaggaggggtaaaggtcacgatgggttgtaccaaggattgagcacagccactaaagatacctatgatgcgctccacatgcaggccctgccgccaagacgcgccaagagaagcggatctggcgtgaagcagaccctgaatttcgacctgctgaagctggctggcgacgtggaatccaacccaggcccttctagaggccatatggctctgcctgtgacagctctgctgctgcctctggcactgctgcttcatgctgctagacctagccagtttagagtgtcccctctggacagaacctggaacctgggcgagacagtggaactgaagtgccaggtgctgctgagcaaccctacaagcggctgctcctggctgtttcagcctagaggtgcagccgcctctcctacctttctgctgtacctgagccagaacaagcccaaggccgccgaaggactggacacccagagattcagcggcaagagactgggcgacaccttcgtgctgaccctgagcgacttcagaagagagaacgagggctactacttctgtagcgccctgagcaacagcatcatgtacttcagccacttcgtgcccgtgtttctgcccgccaagcctacaacaacccctgctcctagacctcctacaccagctcctacaatcgccagccagcctctgtctctcagacccgaagcctgtagacctgctgctggcggagctgtgcataccagaggactggatttcgcctgcgacatctacatctgggctcctctggctggcacatgtggcgtgctgctgctgtccctggtcatcaccctgtactgcaaccaccggaacaggcggagagtgtgcaagtgccctagacctgtggtcaagagcggcgacaagcctagcctgagcgccagatatgtt

SEQ ID NO: 2921 - DNA, 3195 bp, synthetic construct
  source 1..3195: mol_type = other DNA
atggccttaccagtgaccgccttgctcctgccgctggccttgctgctccacgccgccaggccgggcgtgacacagtctcccacacacctgattaagaccagaggccagcaagtgaccctgcggtgtagccctaagagcggccacgataccgtgtcctggtatcagcaggctctcggacagggaccccagttcatcttccagtattacgaggaagaggaacggcagcggggcaacttccccgatagattttccggccatcagttccccaactacagctccgagctgaacgtgaacgctctgctgctgggagatagcgccctgtacctgtgtgcctctagccttggctggcgcggaggcagatacaacgagcagttctttggccctggcaccagactgacagtgctcgagggacagcctaaggccaatcctaccgtgacactgttccctccaagcagcgaagaactccaggccaacaaggccacacttgtgtgcctgatctccgacttctaccctggggctgtgacagtggcttggaaggccgatggatctcctgtgaaagccggcgtggaaaccaccaagccatccaagcagagcaacaacaaatacgccgccagctcctacctgagcctgacacctgagcagtggaagtcccacagatcctacagctgccaagtgacccacgaaggcagcaccgtggaaaagacagtggcccctacagagtgcagcggatcccagagcttcggcctgctggaccccaagctgtgctacctgctggatggcatcctgttcatctacggcgtgatcctgaccgccctgttcctgagagtgaagttcagcagaagcgccgacgcccctgcctaccagcagggacagaaccaactgtacaacgagctgaacctgggcagacgggaagagtacgacgtgctggacaagcggagaggcagggaccctgagatgggcggaaagccccagcggagaaagaacccccaggaaggactgtataacgaactccagaaagacaagatggccgaagcctacagcgagatcggcatgaagggcgagcggagaagaggcaagggccacgatggcctgtaccagggcctgagcaccgccaccaaggacacctatgacgccctgcacatgcaggccctgcctccaagaagggccaagcgatctggatctggagcaacaaacttctcactactcaaacaagcaggtgacgtggaggagaatcccgggcctactagtatggactggatttggcgcatccttttccttgtcggcgctgctaccggcgcgcattccttcgaacagaatatcgaccagcctacagagatgaccgccaccgaaggcgctatcgtgcagatcaactgcacctaccagaccagcggcttcaacggcctgttctggtatcaacagcacgccggcgaggcccctaccttcctgtcttacaatgtgctggacggcctggaagagaagggcagattcagcagcttcctgagcagaagcaagggctacagctacctgctgctgaaagaactccagatgaaggacagcgcctcctacctgtgcgcttccgtggacggcaacaacagactggccttcggcaagggcaatcaggtggtcgtgatccccaacacgcgtgcgtccactaagggtccgtcagtcttcccgctggcgccctgttcccgcagcacgagtgaatctaccgccgcccttgggtgcttggtaaaagactattttcctgagcccgttacagtatcatggaacagcggggctctgactagcggggtgcatacgttccctgcggttctgcaatctagcggactgtattctctctccagtgttgtgaccgtgccaagctccagcctcggtactaaaacttatacatgtaatgtggatcataaaccttcaaataccaaggttgacaaaagggtagagagtaagtacggtggtacccagagttttgggttgttggaccctaaattgtgctatctgttggacggaatcctgttcatttacggagtgatcctgaccgcattgttcctgcgggttaagttttccagatccgcagacgcacccgcttaccaacaagggcagaaccaactctacaatgaacttaatttggggcggagggaagagtacgacgttctggacaaaaggaggggacgagatcccgagatgggcggaaagcctcagcgaaggaagaatccgcaagaggggctttataacgaactccagaaagataaaatggcagaagcctatagtgagattgggatgaagggagaaaggaggaggggtaaaggtcacgatgggttgtaccaaggattgagcacagccactaaagatacctatgatgcgctccacatgcaggccctgccgccaagacgcgccaagagaagcggatctggcgtgaagcagaccctgaatttcgacctgctgaagctggctggcgacgtggaatccaacccaggcccttctagaggccatatggctctgcctgtgacagctctgctgctgcctctggcactgctgcttcatgctgctagacctagccagtttagagtgtcccctctggacagaacctggaacctgggcgagacagtggaactgaagtgccaggtgctgctgagcaaccctacaagcggctgctcctggctgtttcagcctagaggtgcagccgcctctcctacctttctgctgtacctgagccagaacaagcccaaggccgccgaaggactggacacccagagattcagcggcaagagactgggcgacaccttcgtgctgaccctgagcgacttcagaagagagaacgagggctactacttctgtagcgccctgagcaacagcatcatgtacttcagccacttcgtgcccgtgtttctgcccgccaagcctacaacaacccctgctcctagacctcctacaccagctcctacaatcgccagccagcctctgtctctcagacccgaagcctgtagacctgctgctggcggagctgtgcataccagaggactggatttcgcctgcgacatctacatctgggctcctctggctggcacatgtggcgtgctgctgctgtccctggtcatcaccctgtactgcaaccaccggaacaggcggagagtgtgcaagtgccctagacctgtggtcaagagcggcgacaagcctagcctgagcgccagatatgtt

SEQ ID NO: 2922 - DNA, 3195 bp, synthetic construct
  source 1..3195: mol_type = other DNA
atggccttaccagtgaccgccttgctcctgccgctggccttgctgctccacgccgccaggccgggcgtgacacagtctcccacacacctgattaagaccagaggccagcaagtgaccctgcggtgtagccctaagagcggccacgataccgtgtcctggtatcagcaggctctcggacagggaccccagttcatcttccagtattacgaggaagaggaacggcagcggggcaacttccccgatagattttccggccatcagttccccaactacagctccgagctgaacgtgaacgctctgctgctgggagatagcgccctgtacctgtgtgcctctagccttggctggcgcggaggcagatacaacgagcagttctttggccctggcaccagactgacagtgctcgagggacagcctaaggccaatcctaccgtgacactgttccctccaagcagcgaagaactccaggccaacaaggccacacttgtgtgcctgatctccgacttctaccctggggctgtgacagtggcttggaaggccgatggatctcctgtgaaagccggcgtggaaaccaccaagccatccaagcagagcaacaacaaatacgccgccagctcctacctgagcctgacacctgagcagtggaagtcccacagatcctacagctgccaagtgacccacgaaggcagcaccgtggaaaagacagtggcccctacagagtgcagcggatcccagagcttcggcctgctggaccccaagctgtgctacctgctggatggcatcctgttcatctacggcgtgatcctgaccgccctgttcctgagagtgaagttcagcagaagcgccgacgcccctgcctaccagcagggacagaaccaactgtacaacgagctgaacctgggcagacgggaagagtacgacgtgctggacaagcggagaggcagggaccctgagatgggcggaaagccccagcggagaaagaacccccaggaaggactgtataacgaactccagaaagacaagatggccgaagcctacagcgagatcggcatgaagggcgagcggagaagaggcaagggccacgatggcctgtaccagggcctgagcaccgccaccaaggacacctatgacgccctgcacatgcaggccctgcctccaagaagggccaagcgatctggatctggagcaacaaacttctcactactcaaacaagcaggtgacgtggaggagaatcccgggcctactagtatggactggatttggcgcatccttttccttgtcggcgctgctaccggcgcgcattccttcgaacagaatatcgaccagcctacagagatgaccgccaccgaaggcgctatcgtgcagatcaactgcacctaccagaccagcggcttcaacggcctgttctggtatcaacagcacgccggcgaggcccctaccttcctgtcttacaatgtgctggacggcctggaagagaagggcagattcagcagcttcctgagcagaagcaagggctacagctacctgctgctgaaagaactccagatgaaggacagcgcctcctacctgtgcgcttccgtggacggcaacaacagactggccttcggcaagggcaatcaggtggtcgtgatccccaacacgcgtgcaagtacaaagggacccagtgttttcccgctcgccccctgttcacgatcaacgagtgagtccactgcggctctcggatgcctcgtcaaagactacttccccgagccggtgactgttagttggaactctggggctcttacttcaggcgtacacacattccccgccgtgcttcagtcaagtgggctctactcacttagcagtgtggtaacggttccctctagcaactttggcacccaaacatatacttgcaacgtcgatcacaagccgtcaaataccaaagttgacaagaccgttgaaaggaaatgttgtggtacccagagttttgggttgttggaccctaaattgtgctatctgttggacggaatcctgttcatttacggagtgatcctgaccgcattgttcctgcgggttaagttttccagatccgcagacgcacccgcttaccaacaagggcagaaccaactctacaatgaacttaatttggggcggagggaagagtacgacgttctggacaaaaggaggggacgagatcccgagatgggcggaaagcctcagcgaaggaagaatccgcaagaggggctttataacgaactccagaaagataaaatggcagaagcctatagtgagattgggatgaagggagaaaggaggaggggtaaaggtcacgatgggttgtaccaaggattgagcacagccactaaagatacctatgatgcgctccacatgcaggccctgccgccaagacgcgccaagagaagcggatctggcgtgaagcagaccctgaatttcgacctgctgaagctggctggcgacgtggaatccaacccaggcccttctagaggccatatggctctgcctgtgacagctctgctgctgcctctggcactgctgcttcatgctgctagacctagccagtttagagtgtcccctctggacagaacctggaacctgggcgagacagtggaactgaagtgccaggtgctgctgagcaaccctacaagcggctgctcctggctgtttcagcctagaggtgcagccgcctctcctacctttctgctgtacctgagccagaacaagcccaaggccgccgaaggactggacacccagagattcagcggcaagagactgggcgacaccttcgtgctgaccctgagcgacttcagaagagagaacgagggctactacttctgtagcgccctgagcaacagcatcatgtacttcagccacttcgtgcccgtgtttctgcccgccaagcctacaacaacccctgctcctagacctcctacaccagctcctacaatcgccagccagcctctgtctctcagacccgaagcctgtagacctgctgctggcggagctgtgcataccagaggactggatttcgcctgcgacatctacatctgggctcctctggctggcacatgtggcgtgctgctgctgtccctggtcatcaccctgtactgcaaccaccggaacaggcggagagtgtgcaagtgccctagacctgtggtcaagagcggcgacaagcctagcctgagcgccagatatgtt

SEQ ID NO: 2923 - DNA, 3240 bp, synthetic construct
  source 1..3240: mol_type = other DNA
atggccttaccagtgaccgccttgctcctgccgctggccttgctgctccacgccgccaggccgggcgtgacacagtctcccacacacctgattaagaccagaggccagcaagtgaccctgcggtgtagccctaagagcggccacgataccgtgtcctggtatcagcaggctctcggacagggaccccagttcatcttccagtattacgaggaagaggaacggcagcggggcaacttccccgatagattttccggccatcagttccccaactacagctccgagctgaacgtgaacgctctgctgctgggagatagcgccctgtacctgtgtgcctctagccttggctggcgcggaggcagatacaacgagcagttctttggccctggcaccagactgacagtgctcgaggacctgaagaacgtgttcccacctgaggtggccgtgttcgagcctagcgaggccgagatcagccacacccagaaagccaccctcgtgtgcctggctaccggcttctaccccgaccatgtggaactgtcttggtgggtcaacggcaaagaggtgcacagcggcgtgtctaccgacccccagccactgaaagaacagcccgccctgaacgacagccggtactgcctgagcagcagactgagagtgtccgccaccttctggcagaacccccggaaccacttcagatgccaggtgcagttctacggcctgagcgagaacgacgagtggacccaggacagagccaagcccgtgacccagatcgtgtctgccgaagcctggggcagagccgattgcggatcccagagcttcggcctgctggaccccaagctgtgctacctgctggatggcatcctgttcatctacggcgtgatcctgaccgccctgttcctgagagtgaagttcagcagaagcgccgacgcccctgcctaccagcagggacagaaccaactgtacaacgagctgaacctgggcagacgggaagagtacgacgtgctggacaagcggagaggcagggaccctgagatgggcggaaagccccagcggagaaagaacccccaggaaggactgtataacgaactccagaaagacaagatggccgaagcctacagcgagatcggcatgaagggcgagcggagaagaggcaagggccacgatggcctgtaccagggcctgagcaccgccaccaaggacacctatgacgccctgcacatgcaggccctgcctccaagaagggccaagcgatctggatctggagcaacaaacttctcactactcaaacaagcaggtgacgtggaggagaatcccgggcctactagtatggactggatttggcgcatccttttccttgtcggcgctgctaccggcgcgcattccttcgaacagaatatcgaccagcctacagagatgaccgccaccgaaggcgctatcgtgcagatcaactgcacctaccagaccagcggcttcaacggcctgttctggtatcaacagcacgccggcgaggcccctaccttcctgtcttacaatgtgctggacggcctggaagagaagggcagattcagcagcttcctgagcagaagcaagggctacagctacctgctgctgaaagaactccagatgaaggacagcgcctcctacctgtgcgcttccgtggacggcaacaacagactggccttcggcaagggcaatcaggtggtcgtgatccccaacacgcgtatccagaaccctgatcctgccgtgtaccagctgcgggatagcaagagcagcgacaagagcgtgtgtctgttcaccgacttcgacagccagaccaacgtgtcccagagcaaggactccgacgtgtacatcaccgataagaccgtgctggacatgcggagcatggacttcaagagcaactccgccgtggcctggtccaacaagtccgatttcgcctgcgccaacgccttcaacaacagcattatccccgaggacacattcttcccaagccccgagagcagctgcggtacccagagttttgggttgttggaccctaaattgtgctatctgttggacggaatcctgttcatttacggagtgatcctgaccgcattgttcctgcgggttaagttttccagatccgcagacgcacccgcttaccaacaagggcagaaccaactctacaatgaacttaatttggggcggagggaagagtacgacgttctggacaaaaggaggggacgagatcccgagatgggcggaaagcctcagcgaaggaagaatccgcaagaggggctttataacgaactccagaaagataaaatggcagaagcctatagtgagattgggatgaagggagaaaggaggaggggtaaaggtcacgatgggttgtaccaaggattgagcacagccactaaagatacctatgatgcgctccacatgcaggccctgccgccaagacgcgccaagagaagcggatctggcgtgaagcagaccctgaatttcgacctgctgaagctggctggcgacgtggaatccaacccaggcccttctagaggccatatggctctgcctgtgacagctctgctgctgcctctggcactgctgcttcatgctgctagacctagccagtttagagtgtcccctctggacagaacctggaacctgggcgagacagtggaactgaagtgccaggtgctgctgagcaaccctacaagcggctgctcctggctgtttcagcctagaggtgcagccgcctctcctacctttctgctgtacctgagccagaacaagcccaaggccgccgaaggactggacacccagagattcagcggcaagagactgggcgacaccttcgtgctgaccctgagcgacttcagaagagagaacgagggctactacttctgtagcgccctgagcaacagcatcatgtacttcagccacttcgtgcccgtgtttctgcccgccaagcctacaacaacccctgctcctagacctcctacaccagctcctacaatcgccagccagcctctgtctctcagacccgaagcctgtagacctgctgctggcggagctgtgcataccagaggactggatttcgcctgcgacatctacatctgggctcctctggctggcacatgtggcgtgctgctgctgtccctggtcatcaccctgtactgcaaccaccggaacaggcggagagtgtgcaagtgccctagacctgtggtcaagagcggcgacaagcctagcctgagcgccagatatgtt

SEQ ID NO: 2924 - DNA, 3240 bp, synthetic construct
  source 1..3240: mol_type = other DNA
atggccttaccagtgaccgccttgctcctgccgctggccttgctgctccacgccgccaggccgggcgtgacacagtctcccacacacctgattaagaccagaggccagcaagtgaccctgcggtgtagccctaagagcggccacgataccgtgtcctggtatcagcaggctctcggacagggaccccagttcatcttccagtattacgaggaagaggaacggcagcggggcaacttccccgatagattttccggccatcagttccccaactacagctccgagctgaacgtgaacgctctgctgctgggagatagcgccctgtacctgtgtgcctctagccttggctggcgcggaggcagatacaacgagcagttctttggccctggcaccagactgacagtgctcgaggacctgaagaacgtgttcccacctgaggtggccgtgttcgagcctagcaaggccgagatcgcccacacccagaaagccaccctcgtgtgcctggctaccggcttctaccccgaccatgtggaactgtcttggtgggtcaacggcaaagaggtgcacagcggcgtgtgtaccgacccccagccactgaaagaacagcccgccctgaacgacagccggtactgcctgagcagcagactgagagtgtccgccaccttctggcagaacccccggaaccacttcagatgccaggtgcagttctacggcctgagcgagaacgacgagtggacccaggacagagccaagcccgtgacccagatcgtgtctgccgaagcctggggcagagccgattgcggatcccagagcttcggcctgctggaccccaagctgtgctacctgctggatggcatcctgttcatctacggcgtgatcctgaccgccctgttcctgagagtgaagttcagcagaagcgccgacgcccctgcctaccagcagggacagaaccaactgtacaacgagctgaacctgggcagacgggaagagtacgacgtgctggacaagcggagaggcagggaccctgagatgggcggaaagccccagcggagaaagaacccccaggaaggactgtataacgaactccagaaagacaagatggccgaagcctacagcgagatcggcatgaagggcgagcggagaagaggcaagggccacgatggcctgtaccagggcctgagcaccgccaccaaggacacctatgacgccctgcacatgcaggccctgcctccaagaagggccaagcgatctggatctggagcaacaaacttctcactactcaaacaagcaggtgacgtggaggagaatcccgggcctactagtatggactggatttggcgcatccttttccttgtcggcgctgctaccggcgcgcattccttcgaacagaatatcgaccagcctacagagatgaccgccaccgaaggcgctatcgtgcagatcaactgcacctaccagaccagcggcttcaacggcctgttctggtatcaacagcacgccggcgaggcccctaccttcctgtcttacaatgtgctggacggcctggaagagaagggcagattcagcagcttcctgagcagaagcaagggctacagctacctgctgctgaaagaactccagatgaaggacagcgcctcctacctgtgcgcttccgtggacggcaacaacagactggccttcggcaagggcaatcaggtggtcgtgatccccaacacgcgtatccagaaccctgatcctgccgtgtaccagctgcgggatagcaagagcagcgacaagagcgtgtgtctgttcaccgacttcgacagccagaccaacgtgtcccagagcaaggactccgacgtgtacatcaccgataagtgcgtgctggacatgcggagcatggacttcaagagcaactccgccgtggcctggtccaacaagtccgatttcgcctgcgccaacgccttcaacaacagcattatccccgaggacacattcttcccaagcagcgacgtgccctgcggtacccagagttttgggttgttggaccctaaattgtgctatctgttggacggaatcctgttcatttacggagtgatcctgaccgcattgttcctgcgggttaagttttccagatccgcagacgcacccgcttaccaacaagggcagaaccaactctacaatgaacttaatttggggcggagggaagagtacgacgttctggacaaaaggaggggacgagatcccgagatgggcggaaagcctcagcgaaggaagaatccgcaagaggggctttataacgaactccagaaagataaaatggcagaagcctatagtgagattgggatgaagggagaaaggaggaggggtaaaggtcacgatgggttgtaccaaggattgagcacagccactaaagatacctatgatgcgctccacatgcaggccctgccgccaagacgcgccaagagaagcggatctggcgtgaagcagaccctgaatttcgacctgctgaagctggctggcgacgtggaatccaacccaggcccttctagaggccatatggctctgcctgtgacagctctgctgctgcctctggcactgctgcttcatgctgctagacctagccagtttagagtgtcccctctggacagaacctggaacctgggcgagacagtggaactgaagtgccaggtgctgctgagcaaccctacaagcggctgctcctggctgtttcagcctagaggtgcagccgcctctcctacctttctgctgtacctgagccagaacaagcccaaggccgccgaaggactggacacccagagattcagcggcaagagactgggcgacaccttcgtgctgaccctgagcgacttcagaagagagaacgagggctactacttctgtagcgccctgagcaacagcatcatgtacttcagccacttcgtgcccgtgtttctgcccgccaagcctacaacaacccctgctcctagacctcctacaccagctcctacaatcgccagccagcctctgtctctcagacccgaagcctgtagacctgctgctggcggagctgtgcataccagaggactggatttcgcctgcgacatctacatctgggctcctctggctggcacatgtggcgtgctgctgctgtccctggtcatcaccctgtactgcaaccaccggaacaggcggagagtgtgcaagtgccctagacctgtggtcaagagcggcgacaagcctagcctgagcgccagatatgtt

SEQ ID NO: 2925 - DNA, 2433 bp, synthetic construct
  source 1..2433: mol_type = other DNA
atggccttaccagtgaccgccttgctcctgccgctggccttgctgctccacgccgccaggccgggcgtgacacagtctcccacacacctgattaagaccagaggccagcaagtgaccctgcggtgtagccctaagagcggccacgataccgtgtcctggtatcagcaggctctcggacagggaccccagttcatcttccagtattacgaggaagaggaacggcagcggggcaacttccccgatagattttccggccatcagttccccaactacagctccgagctgaacgtgaacgctctgctgctgggagatagcgccctgtacctgtgtgcctctagccttggctggcgcggaggcagatacaacgagcagttctttggccctggcaccagactgacagtgctcgaggacctgaagaacgtgttcccacctgaggtggccgtgttcgagcctagcgaggccgagatcagccacacccagaaagccaccctcgtgtgcctggctaccggcttctaccccgaccatgtggaactgtcttggtgggtcaacggcaaagaggtgcacagcggcgtgtgtaccgacccccagccactgaaagaacagcccgccctgaacgacagccggtactgcctgagcagcagactgagagtgtccgccaccttctggcagaacccccggaaccacttcagatgccaggtgcagttctacggcctgagcgagaacgacgagtggacccaggacagagccaagcccgtgacccagatcgtgtctgccgaagcctggggcagagccgattgcggatcccagagcttcggcctgctggaccccaagctgtgctacctgctggatggcatcctgttcatctacggcgtgatcctgaccgccctgttcctgagagtgaagttcagcagaagcgccgacgcccctgcctaccagcagggacagaaccaactgtacaacgagctgaacctgggcagacgggaagagtacgacgtgctggacaagcggagaggcagggaccctgagatgggcggaaagccccagcggagaaagaacccccaggaaggactgtataacgaactccagaaagacaagatggccgaagcctacagcgagatcggcatgaagggcgagcggagaagaggcaagggccacgatggcctgtaccagggcctgagcaccgccaccaaggacacctatgacgccctgcacatgcaggccctgcctccaagaagggccaagcgatctggatctggagcaacaaacttctcactactcaaacaagcaggtgacgtggaggagaatcccgggcctactagtatggactggatttggcgcatccttttccttgtcggcgctgctaccggcgcgcattccttcgaacagaatatcgaccagcctacagagatgaccgccaccgaaggcgctatcgtgcagatcaactgcacctaccagaccagcggcttcaacggcctgttctggtatcaacagcacgccggcgaggcccctaccttcctgtcttacaatgtgctggacggcctggaagagaagggcagattcagcagcttcctgagcagaagcaagggctacagctacctgctgctgaaagaactccagatgaaggacagcgcctcctacctgtgcgcttccgtggacggcaacaacagactggccttcggcaagggcaatcaggtggtcgtgatccccaacacgcgtatccagaaccctgatcctgccgtgtaccagctgcgggatagcaagagcagcgacaagagcgtgtgtctgttcaccgacttcgacagccagaccaacgtgtcccagagcaaggactccgacgtgtacatcaccgataagtgcgtgctggacatgcggagcatggacttcaagagcaactccgccgtggcctggtccaacaagtccgatttcgcctgcgccaacgccttcaacaacagcattatccccgaggacacattcttcccaagccccgagagcagctgcggtacccagagttttgggttgttggaccctaaattgtgctatctgttggacggaatcctgttcatttacggagtgatcctgaccgcattgttcctgcgggttaagttttccagatccgcagacgcacccgcttaccaacaagggcagaaccaactctacaatgaacttaatttggggcggagggaagagtacgacgttctggacaaaaggaggggacgagatcccgagatgggcggaaagcctcagcgaaggaagaatccgcaagaggggctttataacgaactccagaaagataaaatggcagaagcctatagtgagattgggatgaagggagaaaggaggaggggtaaaggtcacgatgggttgtaccaaggattgagcacagccactaaagatacctatgatgcgctccacatgcaggccctgccgccaaga

SEQ ID NO: 2926 - DNA, 2556 bp, synthetic construct
  source 1..2556: mol_type = other DNA
atggccttaccagtgaccgccttgctcctgccgctggccttgctgctccacgccgccaggccgggcgtgacacagtctcccacacacctgattaagaccagaggccagcaagtgaccctgcggtgtagccctaagagcggccacgataccgtgtcctggtatcagcaggctctcggacagggaccccagttcatcttccagtattacgaggaagaggaacggcagcggggcaacttccccgatagattttccggccatcagttccccaactacagctccgagctgaacgtgaacgctctgctgctgggagatagcgccctgtacctgtgtgcctctagccttggctggcgcggaggcagatacaacgagcagttctttggccctggcaccagactgacagtgctcgagcagagcttcggcctgctggaccccaagctgtgctacctgctggatggcatcctgttcatctacggcgtgatcctgaccgccctgttcctgagagtgaagttcagcagaagcgccgacgcccctgcctaccagcagggacagaaccaactgtacaacgagctgaacctgggcagacgggaagagtacgacgtgctggacaagcggagaggcagggaccctgagatgggcggaaagccccagcggagaaagaacccccaggaaggactgtataacgaactccagaaagacaagatggccgaagcctacagcgagatcggcatgaagggcgagcggagaagaggcaagggccacgatggcctgtaccagggcctgagcaccgccaccaaggacacctatgacgccctgcacatgcaggccctgcctccaagaagggccaagcgatctggatctggagcaacaaacttctcactactcaaacaagcaggtgacgtggaggagaatcccgggcctactagtatggactggatttggcgcatccttttccttgtcggcgctgctaccggcgcgcattccttcgaacagaatatcgaccagcctacagagatgaccgccaccgaaggcgctatcgtgcagatcaactgcacctaccagaccagcggcttcaacggcctgttctggtatcaacagcacgccggcgaggcccctaccttcctgtcttacaatgtgctggacggcctggaagagaagggcagattcagcagcttcctgagcagaagcaagggctacagctacctgctgctgaaagaactccagatgaaggacagcgcctcctacctgtgcgcttccgtggacggcaacaacagactggccttcggcaagggcaatcaggtggtcgtgatccccaacacgcgtcagagttttgggttgttggaccctaaattgtgctatctgttggacggaatcctgttcatttacggagtgatcctgaccgcattgttcctgcgggttaagttttccagatccgcagacgcacccgcttaccaacaagggcagaaccaactctacaatgaacttaatttggggcggagggaagagtacgacgttctggacaaaaggaggggacgagatcccgagatgggcggaaagcctcagcgaaggaagaatccgcaagaggggctttataacgaactccagaaagataaaatggcagaagcctatagtgagattgggatgaagggagaaaggaggaggggtaaaggtcacgatgggttgtaccaaggattgagcacagccactaaagatacctatgatgcgctccacatgcaggccctgccgccaagacgcgccaagagaagcggatctggcgtgaagcagaccctgaatttcgacctgctgaagctggctggcgacgtggaatccaacccaggcccttctagaggccatatggctctgcctgtgacagctctgctgctgcctctggcactgctgcttcatgctgctagacctagccagtttagagtgtcccctctggacagaacctggaacctgggcgagacagtggaactgaagtgccaggtgctgctgagcaaccctacaagcggctgctcctggctgtttcagcctagaggtgcagccgcctctcctacctttctgctgtacctgagccagaacaagcccaaggccgccgaaggactggacacccagagattcagcggcaagagactgggcgacaccttcgtgctgaccctgagcgacttcagaagagagaacgagggctactacttctgtagcgccctgagcaacagcatcatgtacttcagccacttcgtgcccgtgtttctgcccgccaagcctacaacaacccctgctcctagacctcctacaccagctcctacaatcgccagccagcctctgtctctcagacccgaagcctgtagacctgctgctggcggagctgtgcataccagaggactggatttcgcctgcgacatctacatctgggctcctctggctggcacatgtggcgtgctgctgctgtccctggtcatcaccctgtactgcaaccaccggaacaggcggagagtgtgcaagtgccctagacctgtggtcaagagcggcgacaagcctagcctgagcgccagatatgtt

SEQ ID NO: 2927 - DNA, 2556 bp, synthetic construct
  source 1..2556: mol_type = other DNA
atggccttaccagtgaccgccttgctcctgccgctggccttgctgctccacgccgccaggccgggcgtgacacagtctcccacacacctgattaagaccagaggccagcaagtgaccctgcggtgtagccctaagagcggccacgataccgtgtcctggtatcagcaggctctcggacagggaccccagttcatcttccagtattacgaggaagaggaacggcagcggggcaacttccccgatagattttccggccatcagttccccaactacagctccgagctgaacgtgaacgctctgctgctgggagatagcgccctgtacctgtgtgcctctagccttggctggcgcggaggcagatacaacgagcagttctttggccctggcaccagactgacagtgctcgaggacctgaagaacgtgttcccacctgaggtggccgtgttcgagcctagcgaggccgagatcagccacacccagaaagccaccctcgtgtgcctggctaccggcttctaccccgaccatgtggaactgtcttggtgggtcaacggcaaagaggtgcacagcggcgtgtgtaccgacccccagccactgaaagaacagcccgccctgaacgacagccggtactgcctgagcagcagactgagagtgtccgccaccttctggcagaacccccggaaccacttcagatgccaggtgcagttctacggcctgagcgagaacgacgagtggacccaggacagagccaagcccgtgacccagatcgtgtctgccgaagcctggggcagagccgattgcggatcccagagcttcggcctgctggaccccaagctgtgctacctgctggatggcatcctgttcatctacggcgtgatcctgaccgccctgttcctgaggagtaagaggagcaggctcctgcacagtgactacatgaacatgactccacgccgccccggacccacccgcaagcattaccagccctatgccccaccacgcgacttcgcagcctatcgctccagagtgaagttcagcagaagcgccgacgcccctgcctaccagcagggacagaaccaactgtacaacgagctgaacctgggcagacgggaagagtacgacgtgctggacaagcggagaggcagggaccctgagatgggcggaaagccccagcggagaaagaacccccaggaaggactgtataacgaactccagaaagacaagatggccgaagcctacagcgagatcggcatgaagggcgagcggagaagaggcaagggccacgatggcctgtaccagggcctgagcaccgccaccaaggacacctatgacgccctgcacatgcaggccctgcctccaagaagggccaagcgatctggatctggagcaacaaacttctcactactcaaacaagcaggtgacgtggaggagaatcccgggcctactagtatggactggatttggcgcatccttttccttgtcggcgctgctaccggcgcgcattccttcgaacagaatatcgaccagcctacagagatgaccgccaccgaaggcgctatcgtgcagatcaactgcacctaccagaccagcggcttcaacggcctgttctggtatcaacagcacgccggcgaggcccctaccttcctgtcttacaatgtgctggacggcctggaagagaagggcagattcagcagcttcctgagcagaagcaagggctacagctacctgctgctgaaagaactccagatgaaggacagcgcctcctacctgtgcgcttccgtggacggcaacaacagactggccttcggcaagggcaatcaggtggtcgtgatccccaacacgcgtatccagaaccctgatcctgccgtgtaccagctgcgggatagcaagagcagcgacaagagcgtgtgtctgttcaccgacttcgacagccagaccaacgtgtcccagagcaaggactccgacgtgtacatcaccgataagtgcgtgctggacatgcggagcatggacttcaagagcaactccgccgtggcctggtccaacaagtccgatttcgcctgcgccaacgccttcaacaacagcattatccccgaggacacattcttcccaagccccgagagcagctgcggtacccagagttttgggttgttggaccctaaattgtgctatctgttggacggaatcctgttcatttacggagtgatcctgaccgcattgttcctgcgggttaagttttccagatccgcagacgcacccgcttaccaacaagggcagaaccaactctacaatgaacttaatttggggcggagggaagagtacgacgttctggacaaaaggaggggacgagatcccgagatgggcggaaagcctcagcgaaggaagaatccgcaagaggggctttataacgaactccagaaagataaaatggcagaagcctatagtgagattgggatgaagggagaaaggaggaggggtaaaggtcacgatgggttgtaccaaggattgagcacagccactaaagatacctatgatgcgctccacatgcaggccctgccgccaaga

SEQ ID NO: 2928 - DNA, 2679 bp, synthetic construct
  source 1..2679: mol_type = other DNA
atggccttaccagtgaccgccttgctcctgccgctggccttgctgctccacgccgccaggccgggcgtgacacagtctcccacacacctgattaagaccagaggccagcaagtgaccctgcggtgtagccctaagagcggccacgataccgtgtcctggtatcagcaggctctcggacagggaccccagttcatcttccagtattacgaggaagaggaacggcagcggggcaacttccccgatagattttccggccatcagttccccaactacagctccgagctgaacgtgaacgctctgctgctgggagatagcgccctgtacctgtgtgcctctagccttggctggcgcggaggcagatacaacgagcagttctttggccctggcaccagactgacagtgctcgaggacctgaagaacgtgttcccacctgaggtggccgtgttcgagcctagcgaggccgagatcagccacacccagaaagccaccctcgtgtgcctggctaccggcttctaccccgaccatgtggaactgtcttggtgggtcaacggcaaagaggtgcacagcggcgtgtgtaccgacccccagccactgaaagaacagcccgccctgaacgacagccggtactgcctgagcagcagactgagagtgtccgccaccttctggcagaacccccggaaccacttcagatgccaggtgcagttctacggcctgagcgagaacgacgagtggacccaggacagagccaagcccgtgacccagatcgtgtctgccgaagcctggggcagagccgattgcggatcccagagcttcggcctgctggaccccaagctgtgctacctgctggatggcatcctgttcatctacggcgtgatcctgaccgccctgttcctgaggagtaagaggagcaggctcctgcacagtgactacatgaacatgactccacgccgccccggacccacccgcaagcattaccagccctatgccccaccacgcgacttcgcagcctatcgctccagagtgaagttcagcagaagcgccgacgcccctgcctaccagcagggacagaaccaactgtacaacgagctgaacctgggcagacgggaagagtacgacgtgctggacaagcggagaggcagggaccctgagatgggcggaaagccccagcggagaaagaacccccaggaaggactgtataacgaactccagaaagacaagatggccgaagcctacagcgagatcggcatgaagggcgagcggagaagaggcaagggccacgatggcctgtaccagggcctgagcaccgccaccaaggacacctatgacgccctgcacatgcaggccctgcctccaagaagggccaagcgatctggatctggagcaacaaacttctcactactcaaacaagcaggtgacgtggaggagaatcccgggcctactagtatggactggatttggcgcatccttttccttgtcggcgctgctaccggcgcgcattccttcgaacagaatatcgaccagcctacagagatgaccgccaccgaaggcgctatcgtgcagatcaactgcacctaccagaccagcggcttcaacggcctgttctggtatcaacagcacgccggcgaggcccctaccttcctgtcttacaatgtgctggacggcctggaagagaagggcagattcagcagcttcctgagcagaagcaagggctacagctacctgctgctgaaagaactccagatgaaggacagcgcctcctacctgtgcgcttccgtggacggcaacaacagactggccttcggcaagggcaatcaggtggtcgtgatccccaacacgcgtatccagaaccctgatcctgccgtgtaccagctgcgggatagcaagagcagcgacaagagcgtgtgtctgttcaccgacttcgacagccagaccaacgtgtcccagagcaaggactccgacgtgtacatcaccgataagtgcgtgctggacatgcggagcatggacttcaagagcaactccgccgtggcctggtccaacaagtccgatttcgcctgcgccaacgccttcaacaacagcattatccccgaggacacattcttcccaagccccgagagcagctgcggtacccagagttttgggttgttggaccctaaattgtgctatctgttggacggaatcctgttcatttacggagtgatcctgaccgcattgttcctgaggagcaagcggtcacggctgctccacagcgattacatgaatatgacaccacgaagaccgggtcctactcgcaaacactaccaaccctacgcacctccccgcgactttgcagcgtaccgatctcgggttaagttttccagatccgcagacgcacccgcttaccaacaagggcagaaccaactctacaatgaacttaatttggggcggagggaagagtacgacgttctggacaaaaggaggggacgagatcccgagatgggcggaaagcctcagcgaaggaagaatccgcaagaggggctttataacgaactccagaaagataaaatggcagaagcctatagtgagattgggatgaagggagaaaggaggaggggtaaaggtcacgatgggttgtaccaaggattgagcacagccactaaagatacctatgatgcgctccacatgcaggccctgccgccaaga

SEQ ID NO: 2929 - DNA, 2433 bp, synthetic construct
  source 1..2433: mol_type = other DNA
atggccttaccagtgaccgccttgctcctgccgctggccttgctgctccacgccgccaggccgggcgtgacacagtctcccacacacctgattaagaccagaggccagcaagtgaccctgcggtgtagccctaagagcggccacgataccgtgtcctggtatcagcaggctctcggacagggaccccagttcatcttccagtattacgaggaagaggaacggcagcggggcaacttccccgatagattttccggccatcagttccccaactacagctccgagctgaacgtgaacgctctgctgctgggagatagcgccctgtacctgtgtgcctctagccttggctggcgcggaggcagatacaacgagcagttctttggccctggcaccagactgacagtgctcgaggacctgaagaacgtgttcccacctgaggtggccgtgttcgagcctagcgaggccgagatcagccacacccagaaagccaccctcgtgtgcctggctaccggcttctaccccgaccatgtggaactgtcttggtgggtcaacggcaaagaggtgcacagcggcgtgtctaccgacccccagccactgaaagaacagcccgccctgaacgacagccggtactgcctgagcagcagactgagagtgtccgccaccttctggcagaacccccggaaccacttcagatgccaggtgcagttctacggcctgagcgagaacgacgagtggacccaggacagagccaagcccgtgacccagatcgtgtctgccgaagcctggggcagagccgattgcggatcccagagcttcggcctgctggaccccaagctgtgctacctgctggatggcatcctgttcatctacggcgtgatcctgaccgccctgttcctgagagtgaagttcagcagaagcgccgacgcccctgcctaccagcagggacagaaccaactgtacaacgagctgaacctgggcagacgggaagagtacgacgtgctggacaagcggagaggcagggaccctgagatgggcggaaagccccagcggagaaagaacccccaggaaggactgtataacgaactccagaaagacaagatggccgaagcctacagcgagatcggcatgaagggcgagcggagaagaggcaagggccacgatggcctgtaccagggcctgagcaccgccaccaaggacacctatgacgccctgcacatgcaggccctgcctccaagaagggccaagcgatctggatctggagcaacaaacttctcactactcaaacaagcaggtgacgtggaggagaatcccgggcctactagtatggactggatttggcgcatccttttccttgtcggcgctgctaccggcgcgcattccttcgaacagaatatcgaccagcctacagagatgaccgccaccgaaggcgctatcgtgcagatcaactgcacctaccagaccagcggcttcaacggcctgttctggtatcaacagcacgccggcgaggcccctaccttcctgtcttacaatgtgctggacggcctggaagagaagggcagattcagcagcttcctgagcagaagcaagggctacagctacctgctgctgaaagaactccagatgaaggacagcgcctcctacctgtgcgcttccgtggacggcaacaacagactggccttcggcaagggcaatcaggtggtcgtgatccccaacacgcgtatccagaaccctgatcctgccgtgtaccagctgcgggatagcaagagcagcgacaagagcgtgtgtctgttcaccgacttcgacagccagaccaacgtgtcccagagcaaggactccgacgtgtacatcaccgataagaccgtgctggacatgcggagcatggacttcaagagcaactccgccgtggcctggtccaacaagtccgatttcgcctgcgccaacgccttcaacaacagcattatccccgaggacacattcttcccaagccccgagagcagctgcggtacccagagttttgggttgttggaccctaaattgtgctatctgttggacggaatcctgttcatttacggagtgatcctgaccgcattgttcctgcgggttaagttttccagatccgcagacgcacccgcttaccaacaagggcagaaccaactctacaatgaacttaatttggggcggagggaagagtacgacgttctggacaaaaggaggggacgagatcccgagatgggcggaaagcctcagcgaaggaagaatccgcaagaggggctttataacgaactccagaaagataaaatggcagaagcctatagtgagattgggatgaagggagaaaggaggaggggtaaaggtcacgatgggttgtaccaaggattgagcacagccactaaagatacctatgatgcgctccacatgcaggccctgccgccaaga

SEQ ID NO: 2930 - DNA, 3165 bp, synthetic construct
  source 1..3165: mol_type = other DNA
atggccttaccagtgaccgccttgctcctgccgctggccttgctgctccacgccgccaggccgggcgtgacacagtctcccacacacctgattaagaccagaggccagcaagtgaccctgcggtgtagccctaagagcggccacgataccgtgtcctggtatcagcaggctctcggacagggaccccagttcatcttccagtattacgaggaagaggaacggcagcggggcaacttccccgatagattttccggccatcagttccccaactacagctccgagctgaacgtgaacgctctgctgctgggagatagcgccctgtacctgtgtgcctctagccttggctggcgcggaggcagatacaacgagcagttctttggccctggcaccagactgacagtgctcgaggacaagcagctggacgccgacgtgtcccccaagcctaccatcttcctgccctctatcgccgagacaaagctccagaaggccggcacctacctgtgcctgctggaaaagttcttcccagatgtgattaagatccactggcaggaaaagaagtccaacaccatcctgggcagccaggaaggcaacaccatgaagaccaacgacacctacatgaagttcagctggctgaccgtgcccgagaagtccctggacaaagaacacagatgcatcgtgcggcacgaaaacaacaagaacggcgtggaccaggaaatcatcttcccacccatcaagaccgatgtgattacaggatcccagagcttcggcctgctggaccccaagctgtgctacctgctggatggcatcctgttcatctacggcgtgatcctgaccgccctgttcctgagagtgaagttcagcagaagcgccgacgcccctgcctaccagcagggacagaaccaactgtacaacgagctgaacctgggcagacgggaagagtacgacgtgctggacaagcggagaggcagggaccctgagatgggcggaaagccccagcggagaaagaacccccaggaaggactgtataacgaactccagaaagacaagatggccgaagcctacagcgagatcggcatgaagggcgagcggagaagaggcaagggccacgatggcctgtaccagggcctgagcaccgccaccaaggacacctatgacgccctgcacatgcaggccctgcctccaagaagggccaagcgatctggatctggagcaacaaacttctcactactcaaacaagcaggtgacgtggaggagaatcccgggcctactagtatggactggatttggcgcatccttttccttgtcggcgctgctaccggcgcgcattccttcgaacagaatatcgaccagcctacagagatgaccgccaccgaaggcgctatcgtgcagatcaactgcacctaccagaccagcggcttcaacggcctgttctggtatcaacagcacgccggcgaggcccctaccttcctgtcttacaatgtgctggacggcctggaagagaagggcagattcagcagcttcctgagcagaagcaagggctacagctacctgctgctgaaagaactccagatgaaggacagcgcctcctacctgtgcgcttccgtggacggcaacaacagactggccttcggcaagggcaatcaggtggtcgtgatccccaacacgcgtagccagcctcacaccaagcccagcgtgttcgtgatgaagaacggcaccaacgtggcctgcctcgtgaaagagttctaccccaaggacatcaggatcaacctggtgtccagcaagaagatcaccgagttcgaccccgccatcgtgatctcccccagcggcaagtacaacgccgtgaagctggggaagtacgaggacagcaacagcgtgacctgctccgtgcagcacgacaacaagaccgtgcacagcaccgactttggtacccagagttttgggttgttggaccctaaattgtgctatctgttggacggaatcctgttcatttacggagtgatcctgaccgcattgttcctgcgggttaagttttccagatccgcagacgcacccgcttaccaacaagggcagaaccaactctacaatgaacttaatttggggcggagggaagagtacgacgttctggacaaaaggaggggacgagatcccgagatgggcggaaagcctcagcgaaggaagaatccgcaagaggggctttataacgaactccagaaagataaaatggcagaagcctatagtgagattgggatgaagggagaaaggaggaggggtaaaggtcacgatgggttgtaccaaggattgagcacagccactaaagatacctatgatgcgctccacatgcaggccctgccgccaagacgcgccaagagaagcggatctggcgtgaagcagaccctgaatttcgacctgctgaagctggctggcgacgtggaatccaacccaggcccttctagaggccatatggctctgcctgtgacagctctgctgctgcctctggcactgctgcttcatgctgctagacctagccagtttagagtgtcccctctggacagaacctggaacctgggcgagacagtggaactgaagtgccaggtgctgctgagcaaccctacaagcggctgctcctggctgtttcagcctagaggtgcagccgcctctcctacctttctgctgtacctgagccagaacaagcccaaggccgccgaaggactggacacccagagattcagcggcaagagactgggcgacaccttcgtgctgaccctgagcgacttcagaagagagaacgagggctactacttctgtagcgccctgagcaacagcatcatgtacttcagccacttcgtgcccgtgtttctgcccgccaagcctacaacaacccctgctcctagacctcctacaccagctcctacaatcgccagccagcctctgtctctcagacccgaagcctgtagacctgctgctggcggagctgtgcataccagaggactggatttcgcctgcgacatctacatctgggctcctctggctggcacatgtggcgtgctgctgctgtccctggtcatcaccctgtactgcaaccaccggaacaggcggagagtgtgcaagtgccctagacctgtggtcaagagcggcgacaagcctagcctgagcgccagatatgtt

SEQ ID NO: 2931 - DNA, 2769 bp, synthetic construct
  source 1..2769: mol_type = other DNA
atggccttaccagtgaccgccttgctcctgccgctggccttgctgctccacgccgccaggccgggcgtgacacagtctcccacacacctgattaagaccagaggccagcaagtgaccctgcggtgtagccctaagagcggccacgataccgtgtcctggtatcagcaggctctcggacagggaccccagttcatcttccagtattacgaggaagaggaacggcagcggggcaacttccccgatagattttccggccatcagttccccaactacagctccgagctgaacgtgaacgctctgctgctgggagatagcgccctgtacctgtgtgcctctagccttggctggcgcggaggcagatacaacgagcagttctttggccctggcaccagactgacagtgctcgagggacagcctaaggccaatcctaccgtgacactgttccctccaagcagcgaagaactccaggccaacaaggccacacttgtgtgcctgatctccgacttctaccctggggctgtgacagtggcttggaaggccgatggatctcctgtgaaagccggcgtggaaaccaccaagccatccaagcagagcaacaacaaatacgccgccagctcctacctgagcctgacacctgagcagtggaagtcccacagatcctacagctgccaagtgacccacgaaggcagcaccgtggaaaagacagtggcccctacagagtgcagcacaacacctggcgagagaagtagcctgcctgccttctatcctggcaccagcggctcttgttctggctgtggatctctgagcctgcctctgctggctggactggttgctgctgatgctgtggcctctctgctgattgtgggagccgtgttcctgtgcgccagacctagaagaagccccgctcaagaggacggcaaggtgtacatcaacatgcccggcagaggaagggccaagcgatctggatctggagcaacaaacttctcactactcaaacaagcaggtgacgtggaggagaatcccgggcctactagtatggactggatttggcgcatccttttccttgtcggcgctgctaccggcgcgcattccttcgaacagaatatcgaccagcctacagagatgaccgccaccgaaggcgctatcgtgcagatcaactgcacctaccagaccagcggcttcaacggcctgttctggtatcaacagcacgccggcgaggcccctaccttcctgtcttacaatgtgctggacggcctggaagagaagggcagattcagcagcttcctgagcagaagcaagggctacagctacctgctgctgaaagaactccagatgaaggacagcgcctcctacctgtgcgcttccgtggacggcaacaacagactggccttcggcaagggcaatcaggtggtcgtgatccccaacacgcgtgcctctacaaagggaccctccgtgtttcctctggctcccagcagcaagtctacaagcggaggaacagccgctctgggctgcctggtcaaggattactttcccgagcctgtgaccgtgtcctggaatagcggagcactgacaagcggcgtgcacacctttccagccgtgctgcaaagcagcggcctgtactctctgagcagcgtggtcacagtgcctagctctagcctgggcacccagacctacatctgcaatgtgaaccacaagcctagcaacaccaaggtggacaagagagtggaacccaagagctgtacaacgccgggcgaaaggagttccttgccggccttttaccccggcacaagcggaagctgtagtgggtgtggaagcctcagcctcccacttcttgcgggcctcgtcgcggcagatgcagtagcttcacttcttattgtaggcgcggtatttctctgtgctcgaccaaggaggtcacccgctcaggaggatggtaaggtgtatataaatatgccaggacgcggacgcgccaagagaagcggatctggcgtgaagcagaccctgaatttcgacctgctgaagctggctggcgacgtggaatccaacccaggcccttctagaggccatatggctctgcctgtgacagctctgctgctgcctctggcactgctgcttcatgctgctagacctagccagtttagagtgtcccctctggacagaacctggaacctgggcgagacagtggaactgaagtgccaggtgctgctgagcaaccctacaagcggctgctcctggctgtttcagcctagaggtgcagccgcctctcctacctttctgctgtacctgagccagaacaagcccaaggccgccgaaggactggacacccagagattcagcggcaagagactgggcgacaccttcgtgctgaccctgagcgacttcagaagagagaacgagggctactacttctgtagcgccctgagcaacagcatcatgtacttcagccacttcgtgcccgtgtttctgcccgccaagcctacaacaacccctgctcctagacctcctacaccagctcctacaatcgccagccagcctctgtctctcagacccgaagcctgtagacctgctgctggcggagctgtgcataccagaggactggatttcgcctgcgacatctacatctgggctcctctggctggcacatgtggcgtgctgctgctgtccctggtcatcaccctgtactgcaaccaccggaacaggcggagagtgtgcaagtgccctagacctgtggtcaagagcggcgacaagcctagcctgagcgccagatatgtt

SEQ ID NO: 2932 - DNA, 2256 bp, synthetic construct
  source 1..2256: mol_type = other DNA
atggccttaccagtgaccgccttgctcctgccgctggccttgctgctccacgccgccaggccgggcgtgacacagtctcccacacacctgattaagaccagaggccagcaagtgaccctgcggtgtagccctaagagcggccacgataccgtgtcctggtatcagcaggctctcggacagggaccccagttcatcttccagtattacgaggaagaggaacggcagcggggcaacttccccgatagattttccggccatcagttccccaactacagctccgagctgaacgtgaacgctctgctgctgggagatagcgccctgtacctgtgtgcctctagccttggctggcgcggaggcagatacaacgagcagttctttggccctggcaccagactgacagtgctcgagggcgacatcgagaacaccagtctggcccctgaggaccctacctttcctgccgatacctggggcacctacctgctgaccacagagacaggactccagaaagatcacgccctgtgggaccacacagcccagaacctgctgagaatgggcctcgcctttctggtgctggttgccctcgtgtggttcctggtggaagattggctgagccggaagcggacaagagagagagccagcagagcctctacctgggagggaagaagaaggctgaacacccagacacttagggccaagcgatctggatctggagcaacaaacttctcactactcaaacaagcaggtgacgtggaggagaatcccgggcctactagtatggactggatttggcgcatccttttccttgtcggcgctgctaccggcgcgcattccttcgaacagaatatcgaccagcctacagagatgaccgccaccgaaggcgctatcgtgcagatcaactgcacctaccagaccagcggcttcaacggcctgttctggtatcaacagcacgccggcgaggcccctaccttcctgtcttacaatgtgctggacggcctggaagagaagggcagattcagcagcttcctgagcagaagcaagggctacagctacctgctgctgaaagaactccagatgaaggacagcgcctcctacctgtgcgcttccgtggacggcaacaacagactggccttcggcaagggcaatcaggtggtcgtgatccccaacacgcgtggcgatattgagaatacctctctggccccagaagatcctacattccccgccgacacatggggaacatatctgctgacaaccgaaaccgggctgcaaaaggaccatgctctgtgggatcataccgctcagaatctgcttcggatggggcttgcattcctggtcctggtggctcttgtctggtttctggtcgaggactggctgtcccggaagagaaccagagaaagagcttccagggccagcacctgggaaggcagacgcagactgaatactcagaccctgcgcgccaagagaagcggatctggcgtgaagcagaccctgaatttcgacctgctgaagctggctggcgacgtggaatccaacccaggcccttctagaggccatatggctctgcctgtgacagctctgctgctgcctctggcactgctgcttcatgctgctagacctagccagtttagagtgtcccctctggacagaacctggaacctgggcgagacagtggaactgaagtgccaggtgctgctgagcaaccctacaagcggctgctcctggctgtttcagcctagaggtgcagccgcctctcctacctttctgctgtacctgagccagaacaagcccaaggccgccgaaggactggacacccagagattcagcggcaagagactgggcgacaccttcgtgctgaccctgagcgacttcagaagagagaacgagggctactacttctgtagcgccctgagcaacagcatcatgtacttcagccacttcgtgcccgtgtttctgcccgccaagcctacaacaacccctgctcctagacctcctacaccagctcctacaatcgccagccagcctctgtctctcagacccgaagcctgtagacctgctgctggcggagctgtgcataccagaggactggatttcgcctgcgacatctacatctgggctcctctggctggcacatgtggcgtgctgctgctgtccctggtcatcaccctgtactgcaaccaccggaacaggcggagagtgtgcaagtgccctagacctgtggtcaagagcggcgacaagcctagcctgagcgccagatatgtt

SEQ ID NO: 2933 - DNA, 2088 bp, synthetic construct
  source 1..2088: mol_type = other DNA
atggccttaccagtgaccgccttgctcctgccgctggccttgctgctccacgccgccaggccgggcgtgacacagtctcccacacacctgattaagaccagaggccagcaagtgaccctgcggtgtagccctaagagcggccacgataccgtgtcctggtatcagcaggctctcggacagggaccccagttcatcttccagtattacgaggaagaggaacggcagcggggcaacttccccgatagattttccggccatcagttccccaactacagctccgagctgaacgtgaacgctctgctgctgggagatagcgccctgtacctgtgtgcctctagccttggctggcgcggaggcagatacaacgagcagttctttggccctggcaccagactgacagtgctcgagatcactcaaggtttggcagtgtcaaccatctcatcattctttccacctggctaccaagtgtccttctgcctggtcatggtgctgctgttcgccgtggataccggcctgtacttcagcgtcaagaccaacatccggtccagcaccagagactggaaggaccacaagttcaagtggcggaaggaccctcaggacaagagggccaagcgatctggatctggagcaacaaacttctcactactcaaacaagcaggtgacgtggaggagaatcccgggcctactagtatggactggatttggcgcatccttttccttgtcggcgctgctaccggcgcgcattccttcgaacagaatatcgaccagcctacagagatgaccgccaccgaaggcgctatcgtgcagatcaactgcacctaccagaccagcggcttcaacggcctgttctggtatcaacagcacgccggcgaggcccctaccttcctgtcttacaatgtgctggacggcctggaagagaagggcagattcagcagcttcctgagcagaagcaagggctacagctacctgctgctgaaagaactccagatgaaggacagcgcctcctacctgtgcgcttccgtggacggcaacaacagactggccttcggcaagggcaatcaggtggtcgtgatccccaacacgcgtatcacccagggcctggccgtgtctaccatcagcagctttttcccacccggctaccaggtgtccttctgcctcgtgatggtgctgctgttcgccgtggacaccggcctgtacttcagcgtgaaaacaaacatccggtccagcaccagagactggaaggaccacaagttcaagtggcggaaggacccccaggacaagcgcgccaagagaagcggatctggcgtgaagcagaccctgaatttcgacctgctgaagctggctggcgacgtggaatccaacccaggcccttctagaggccatatggctctgcctgtgacagctctgctgctgcctctggcactgctgcttcatgctgctagacctagccagtttagagtgtcccctctggacagaacctggaacctgggcgagacagtggaactgaagtgccaggtgctgctgagcaaccctacaagcggctgctcctggctgtttcagcctagaggtgcagccgcctctcctacctttctgctgtacctgagccagaacaagcccaaggccgccgaaggactggacacccagagattcagcggcaagagactgggcgacaccttcgtgctgaccctgagcgacttcagaagagagaacgagggctactacttctgtagcgccctgagcaacagcatcatgtacttcagccacttcgtgcccgtgtttctgcccgccaagcctacaacaacccctgctcctagacctcctacaccagctcctacaatcgccagccagcctctgtctctcagacccgaagcctgtagacctgctgctggcggagctgtgcataccagaggactggatttcgcctgcgacatctacatctgggctcctctggctggcacatgtggcgtgctgctgctgtccctggtcatcaccctgtactgcaaccaccggaacaggcggagagtgtgcaagtgccctagacctgtggtcaagagcggcgacaagcctagcctgagcgccagatatgtt

SEQ ID NO: 2934 - DNA, 2367 bp, synthetic construct; identical to SEQ ID NO: 2780
  source 1..2367: mol_type = other DNA

SEQ ID NO: 2935 - DNA, 1665 bp, synthetic construct; identical to SEQ ID NO: 2781
  source 1..1665: mol_type = other DNA

SEQ ID NO: 2936 - DNA, 2817 bp, synthetic construct; identical to SEQ ID NO: 2782
  source 1..2817: mol_type = other DNA

SEQ ID NO: 2937 - DNA, 2817 bp, synthetic construct; identical to SEQ ID NO: 2782
  source 1..2817: mol_type = other DNA

SEQ ID NO: 2938 - DNA, 3315 bp, synthetic construct; identical to SEQ ID NO: 2784
  source 1..3315: mol_type = other DNA

SEQ ID NO: 2939 - DNA, 3474 bp, synthetic construct; identical to SEQ ID NO: 2785
  source 1..3474: mol_type = other DNA

SEQ ID NO: 2940 - DNA, 3456 bp, synthetic construct; identical to SEQ ID NO: 2786
  source 1..3456: mol_type = other DNA

SEQ ID NO: 2941 - DNA, 3867 bp, synthetic construct; identical to SEQ ID NO: 2787
  source 1..3867: mol_type = other DNA

SEQ ID NO: 2942 - DNA, 4278 bp, synthetic construct; identical to SEQ ID NO: 2788
  source 1..4278: mol_type = other DNA

SEQ ID NO: 2943 - DNA, 2433 bp, synthetic construct; identical to SEQ ID NO: 2789
  source 1..2433: mol_type = other DNA

SEQ ID NO: 2944 - DNA, 2559 bp, synthetic construct; identical to SEQ ID NO: 2790
  source 1..2559: mol_type = other DNA

SEQ ID NO: 2945 - DNA, 2556 bp, synthetic construct; identical to SEQ ID NO: 2791
  source 1..2556: mol_type = other DNA

SEQ ID NO: 2946 - DNA, 2541 bp, synthetic construct; identical to SEQ ID NO: 2792
  source 1..2541: mol_type = other DNA

SEQ ID NO: 2947 - DNA, 2793 bp, synthetic construct; identical to SEQ ID NO: 2793
  source 1..2793: mol_type = other DNA

SEQ ID NO: 2948 - DNA, 2682 bp, synthetic construct; identical to SEQ ID NO: 2794
  source 1..2682: mol_type = other DNA

SEQ ID NO: 2949 - DNA, 2679 bp, synthetic construct; identical to SEQ ID NO: 2795
  source 1..2679: mol_type = other DNA

SEQ ID NO: 2950 - DNA, 2682 bp, synthetic construct; identical to SEQ ID NO: 2796
  source 1..2682: mol_type = other DNA

SEQ ID NO: 2951 - DNA, 2433 bp, synthetic construct; identical to SEQ ID NO: 2797
  source 1..2433: mol_type = other DNA

SEQ ID NO: 2952 - DNA, 2433 bp, synthetic construct; identical to SEQ ID NO: 2798
  source 1..2433: mol_type = other DNA

SEQ ID NO: 2953 - DNA, 2559 bp, synthetic construct; identical to SEQ ID NO: 2799
  source 1..2559: mol_type = other DNA

SEQ ID NO: 2954 - DNA, 2556 bp, synthetic construct; identical to SEQ ID NO: 2800
  source 1..2556: mol_type = other DNA

SEQ ID NO: 2955 - DNA, 2541 bp, synthetic construct; identical to SEQ ID NO: 2801
  source 1..2541: mol_type = other DNA

SEQ ID NO: 2956 - DNA, 2793 bp, synthetic construct; identical to SEQ ID NO: 2802
  source 1..2793: mol_type = other DNA

SEQ ID NO: 2957 - DNA, 2556 bp, synthetic construct; identical to SEQ ID NO: 2803
  source 1..2556: mol_type = other DNA

SEQ ID NO: 2958 - DNA, 2559 bp, synthetic construct; identical to SEQ ID NO: 2804
  source 1..2559: mol_type = other DNA

SEQ ID NO: 2959 - DNA, 2433 bp, synthetic construct; identical to SEQ ID NO: 2805
  source 1..2433: mol_type = other DNA

SEQ ID NO: 2960 - DNA, 2433 bp, synthetic construct; identical to SEQ ID NO: 2806
  source 1..2433: mol_type = other DNA

SEQ ID NO: 2961 - DNA, 2433 bp, synthetic construct; identical to SEQ ID NO: 2807
  source 1..2433: mol_type = other DNA

SEQ ID NO: 2962 - DNA, 2145 bp, synthetic construct; identical to SEQ ID NO: 2808
  source 1..2145: mol_type = other DNA

SEQ ID NO: 2963 - DNA, 2142 bp, synthetic construct; identical to SEQ ID NO: 2809
  source 1..2142: mol_type = other DNA

SEQ ID NO: 2964 - DNA, 2127 bp, synthetic construct; identical to SEQ ID NO: 2810
  source 1..2127: mol_type = other DNA

SEQ ID NO: 2965 - DNA, 2379 bp, synthetic construct; identical to SEQ ID NO: 2811
  source 1..2379: mol_type = other DNA

SEQ ID NO: 2966 - DNA, 2232 bp, synthetic construct; identical to SEQ ID NO: 2812
  source 1..2232: mol_type = other DNA

SEQ ID NO: 2967 - DNA, 2217 bp, synthetic construct; identical to SEQ ID NO: 2813
  source 1..2217: mol_type = other DNA

SEQ ID NO: 2968 - DNA, 2469 bp, synthetic construct; identical to SEQ ID NO: 2814
  source 1..2469: mol_type = other DNA

SEQ ID NO: 2969 - DNA, 2235 bp, synthetic construct; identical to SEQ ID NO: 2815
  source 1..2235: mol_type = other DNA

SEQ ID NO: 2970 - DNA, 2232 bp, synthetic construct; identical to SEQ ID NO: 2816
  source 1..2232: mol_type = other DNA

SEQ ID NO: 2971 - DNA, 2229 bp, synthetic construct; identical to SEQ ID NO: 2817
  source 1..2229: mol_type = other DNA

SEQ ID NO: 2972 - DNA, 1983 bp, synthetic construct; identical to SEQ ID NO: 2818
  source 1..1983: mol_type = other DNA

SEQ ID NO: 2973 - DNA, 2091 bp, synthetic construct; identical to SEQ ID NO: 2819
  source 1..2091: mol_type = other DNA

SEQ ID NO: 2974 - DNA, 2217 bp, synthetic construct; identical to SEQ ID NO: 2820
  source 1..2217: mol_type = other DNA

SEQ ID NO: 2975 - DNA, 2214 bp, synthetic construct; identical to SEQ ID NO: 2821
  source 1..2214: mol_type = other DNA

SEQ ID NO: 2976 - DNA, 2199 bp, synthetic construct; identical to SEQ ID NO: 2822
  source 1..2199: mol_type = other DNA

SEQ ID NO: 2977 - DNA, 2451 bp, synthetic construct; identical to SEQ ID NO: 2823
  source 1..2451: mol_type = other DNA

SEQ ID NO: 2978 - DNA, 2727 bp, synthetic construct; identical to SEQ ID NO: 2824
  source 1..2727: mol_type = other DNA

SEQ ID NO: 2979 - DNA, 2505 bp, synthetic construct; identical to SEQ ID NO: 2825
  source 1..2505: mol_type = other DNA

SEQ ID NO: 2980 - DNA, 2502 bp, synthetic construct; identical to SEQ ID NO: 2826
  source 1..2502: mol_type = other DNA

SEQ ID NO: 2981 - DNA, 3237 bp, synthetic construct; identical to SEQ ID NO: 2827
  source 1..3237: mol_type = other DNA

SEQ ID NO: 2982 - DNA, 2460 bp, synthetic construct; identical to SEQ ID NO: 2828
  source 1..2460: mol_type = other DNA

SEQ ID NO: 2983 - DNA, 2433 bp, synthetic construct; identical to SEQ ID NO: 2829
  source 1..2433: mol_type = other DNA

SEQ ID NO: 2984 - DNA, 2940 bp, synthetic construct; identical to SEQ ID NO: 2830
  source 1..2940: mol_type = other DNA

SEQ ID NO: 2985 - DNA, 2235 bp, synthetic construct; identical to SEQ ID NO: 2831
  source 1..2235: mol_type = other DNA

SEQ ID NO: 2986 - DNA, 2235 bp, synthetic construct; identical to SEQ ID NO: 2831
  source 1..2235: mol_type = other DNA

SEQ ID NO: 2987 - DNA, 2208 bp, synthetic construct; identical to SEQ ID NO: 2833
  source 1..2208: mol_type = other DNA

SEQ ID NO: 2988 - DNA, 2952 bp, synthetic construct; identical to SEQ ID NO: 2834
  source 1..2952: mol_type = other DNA

SEQ ID NO: 2989 - DNA, 3051 bp, synthetic construct; identical to SEQ ID NO: 2835
  source 1..3051: mol_type = other DNA

SEQ ID NO: 2990 - DNA, 2787 bp, synthetic construct; identical to SEQ ID NO: 2836
  source 1..2787: mol_type = other DNA

SEQ ID NO: 2991 - DNA, 3192 bp, synthetic construct; identical to SEQ ID NO: 2837
  source 1..3192: mol_type = other DNA

SEQ ID NO: 2992 - DNA, 3246 bp, synthetic construct; identical to SEQ ID NO: 2838
  source 1..3246: mol_type = other DNA

SEQ ID NO: 2993 - DNA, 3189 bp, synthetic construct; identical to SEQ ID NO: 2839
  source 1..3189: mol_type = other DNA

SEQ ID NO: 2994 - DNA, 3354 bp, synthetic construct; identical to SEQ ID NO: 2840
  source 1..3354: mol_type = other DNA

SEQ ID NO: 2995 - DNA, 3180 bp, synthetic construct; identical to SEQ ID NO: 2841
  source 1..3180: mol_type = other DNA

SEQ ID NO: 2996 - DNA, 3201 bp, synthetic construct; identical to SEQ ID NO: 2842
  source 1..3201: mol_type = other DNA

SEQ ID NO: 2997 - DNA, 3186 bp, synthetic construct; identical to SEQ ID NO: 2843
  source 1..3186: mol_type = other DNA

SEQ ID NO: 2998 - DNA, 3186 bp, synthetic construct; identical to SEQ ID NO: 2844
  source 1..3186: mol_type = other DNA

SEQ ID NO: 2999 - DNA, 3186 bp, synthetic construct; identical to SEQ ID NO: 2845
  source 1..3186: mol_type = other DNA

SEQ ID NO: 3000 - DNA, 3231 bp, synthetic construct; identical to SEQ ID NO: 2846
  source 1..3231: mol_type = other DNA

SEQ ID NO: 3001 - DNA, 3231 bp, synthetic construct; identical to SEQ ID NO: 2847
  source 1..3231: mol_type = other DNA

SEQ ID NO: 3002 - DNA, 2424 bp, synthetic construct; identical to SEQ ID NO: 2848
  source 1..2424: mol_type = other DNA

SEQ ID NO: 3003 - DNA, 2547 bp, synthetic construct; identical to SEQ ID NO: 2849
  source 1..2547: mol_type = other DNA

SEQ ID NO: 3004 - DNA, 2547 bp, synthetic construct; identical to SEQ ID NO: 2850
  source 1..2547: mol_type = other DNA

SEQ ID NO: 3005 - DNA, 2670 bp, synthetic construct; identical to SEQ ID NO: 2851
  source 1..2670: mol_type = other DNA

SEQ ID NO: 3006 - DNA, 2424 bp, synthetic construct; identical to SEQ ID NO: 2852
  source 1..2424: mol_type = other DNA

SEQ ID NO: 3007 - DNA, 3156 bp, synthetic construct; identical to SEQ ID NO: 2853
  source 1..3156: mol_type = other DNA

SEQ ID NO: 3008 - DNA, 2760 bp, synthetic construct; identical to SEQ ID NO: 2854
  source 1..2760: mol_type = other DNA

SEQ ID NO: 3009 - DNA, 2247 bp, synthetic construct; identical to SEQ ID NO: 2855
  source 1..2247: mol_type = other DNA

SEQ ID NO: 3010 - DNA, 2079 bp, synthetic construct; identical to SEQ ID NO: 2856
  source 1..2079: mol_type = other DNA

SEQ ID NO: 3011 - DNA, 2379 bp, synthetic construct; identical to SEQ ID NO: 2703
  source 1..2379: mol_type = other DNA

SEQ ID NO: 3012 - DNA, 1677 bp, synthetic construct; identical to SEQ ID NO: 2704
  source 1..1677: mol_type = other DNA

SEQ ID NO: 3013 - DNA, 2829 bp, synthetic construct; identical to SEQ ID NO: 2705
  source 1..2829: mol_type = other DNA

SEQ ID NO: 3014 - DNA, 2829 bp, synthetic construct; identical to SEQ ID NO: 2705
  source 1..2829: mol_type = other DNA

SEQ ID NO: 3015 - DNA, 3327 bp, synthetic construct; identical to SEQ ID NO: 2707
  source 1..3327: mol_type = other DNA

SEQ ID NO: 3016 - DNA, 3486 bp, synthetic construct; identical to SEQ ID NO: 2708
  source 1..3486: mol_type = other DNA

SEQ ID NO: 3017 - DNA, 3468 bp, synthetic construct; identical to SEQ ID NO: 2709
  source 1..3468: mol_type = other DNA

SEQ ID NO: 3018 - DNA, 3879 bp, synthetic construct; identical to SEQ ID NO: 2710
  source 1..3879: mol_type = other DNA

SEQ ID NO: 3019 - DNA, 4290 bp, synthetic construct; identical to SEQ ID NO: 2711
  source 1..4290: mol_type = other DNA

SEQ ID NO: 3020 - DNA, 2445 bp, synthetic construct; identical to SEQ ID NO: 2712
  source 1..2445: mol_type = other DNA

SEQ ID NO: 3021 - DNA, 2571 bp, synthetic construct; identical to SEQ ID NO: 2713
  source 1..2571: mol_type = other DNA

SEQ ID NO: 3022 - DNA, 2568 bp, synthetic construct; identical to SEQ ID NO: 2714
  source 1..2568: mol_type = other DNA

SEQ ID NO: 3023 - DNA, 2553 bp, synthetic construct; identical to SEQ ID NO: 2715
  source 1..2553: mol_type = other DNA

SEQ ID NO: 3024 - DNA, 2805 bp, synthetic construct; identical to SEQ ID NO: 2716
  source 1..2805: mol_type = other DNA

SEQ ID NO: 3025 - DNA, 2694 bp, synthetic construct; identical to SEQ ID NO: 2717
  source 1..2694: mol_type = other DNA

SEQ ID NO: 3026 - DNA, 2691 bp, synthetic construct; identical to SEQ ID NO: 2718
  source 1..2691: mol_type = other DNA

SEQ ID NO: 3027 - DNA, 2694 bp, synthetic construct; identical to SEQ ID NO: 2719
  source 1..2694: mol_type = other DNA

SEQ ID NO: 3028 - DNA, 2445 bp, synthetic construct; identical to SEQ ID NO: 2720
  source 1..2445: mol_type = other DNA

SEQ ID NO: 3029 - DNA, 2445 bp, synthetic construct; identical to SEQ ID NO: 2721
  source 1..2445: mol_type = other DNA

SEQ ID NO: 3030 - DNA, 2571 bp, synthetic construct; identical to SEQ ID NO: 2722
  source 1..2571: mol_type = other DNA

SEQ ID NO: 3031 - DNA, 2568 bp, synthetic construct; identical to SEQ ID NO: 2723
  source 1..2568: mol_type = other DNA

SEQ ID NO: 3032 - DNA, 2553 bp, synthetic construct; identical to SEQ ID NO: 2724
  source 1..2553: mol_type = other DNA

SEQ ID NO: 3033 - DNA, 2805 bp, synthetic construct; identical to SEQ ID NO: 2725
  source 1..2805: mol_type = other DNA

SEQ ID NO: 3034 - DNA, 2568 bp, synthetic construct; identical to SEQ ID NO: 2726
  source 1..2568: mol_type = other DNA

SEQ ID NO: 3035 - DNA, 2571 bp, synthetic construct; identical to SEQ ID NO: 2727
  source 1..2571: mol_type = other DNA

SEQ ID NO: 3036 - DNA, 2445 bp, synthetic construct; identical to SEQ ID NO: 2728
  source 1..2445: mol_type = other DNA

SEQ ID NO: 3037 - DNA, 2445 bp, synthetic construct; identical to SEQ ID NO: 2729
  source 1..2445: mol_type = other DNA

SEQ ID NO: 3038 - DNA, 2445 bp, synthetic construct; identical to SEQ ID NO: 2730
  source 1..2445: mol_type = other DNA

SEQ ID NO: 3039 - DNA, 2157 bp, synthetic construct; identical to SEQ ID NO: 2731
  source 1..2157: mol_type = other DNA

SEQ ID NO: 3040 - DNA, 2154 bp, synthetic construct; identical to SEQ ID NO: 2732
  source 1..2154: mol_type = other DNA

SEQ ID NO: 3041 - DNA, 2139 bp, synthetic construct; identical to SEQ ID NO: 2733
  source 1..2139: mol_type = other DNA

SEQ ID NO: 3042 - DNA, 2391 bp, synthetic construct; identical to SEQ ID NO: 2734
  source 1..2391: mol_type = other DNA

SEQ ID NO: 3043 - DNA, 2244 bp, synthetic construct; identical to SEQ ID NO: 2735
  source 1..2244: mol_type = other DNA

SEQ ID NO: 3044 - DNA, 2229 bp, synthetic construct; identical to SEQ ID NO: 2736
  source 1..2229: mol_type = other DNA

SEQ ID NO: 3045 - DNA, 2481 bp, synthetic construct; identical to SEQ ID NO: 2737
  source 1..2481: mol_type = other DNA

SEQ ID NO: 3046 - DNA, 2247 bp, synthetic construct; identical to SEQ ID NO: 2738
  source 1..2247: mol_type = other DNA

SEQ ID NO: 3047 - DNA, 2244 bp, synthetic construct; identical to SEQ ID NO: 2739
  source 1..2244: mol_type = other DNA

SEQ ID NO: 3048 - DNA, 2241 bp, synthetic construct; identical to SEQ ID NO: 2740
  source 1..2241: mol_type = other DNA

SEQ ID NO: 3049 - DNA, 1995 bp, synthetic construct; identical to SEQ ID NO: 2741
  source 1..1995: mol_type = other DNA

SEQ ID NO: 3050 - DNA, 2103 bp, synthetic construct; identical to SEQ ID NO: 2742
  source 1..2103: mol_type = other DNA

SEQ ID NO: 3051 - DNA, 2229 bp, synthetic construct; identical to SEQ ID NO: 2743
  source 1..2229: mol_type = other DNA

SEQ ID NO: 3052 - DNA, 2226 bp, synthetic construct; identical to SEQ ID NO: 2744
  source 1..2226: mol_type = other DNA

SEQ ID NO: 3053 - DNA, 2211 bp, synthetic construct; identical to SEQ ID NO: 2745
  source 1..2211: mol_type = other DNA

SEQ ID NO: 3054 - DNA, 2463 bp, synthetic construct; identical to SEQ ID NO: 2746
  source 1..2463: mol_type = other DNA

SEQ ID NO: 3055 - DNA, 2739 bp, synthetic construct; identical to SEQ ID NO: 2747
  source 1..2739: mol_type = other DNA

SEQ ID NO: 3056 - DNA, 2517 bp, synthetic construct; identical to SEQ ID NO: 2748
  source 1..2517: mol_type = other DNA

SEQ ID NO: 3057 - DNA, 2514 bp, synthetic construct; identical to SEQ ID NO: 2749
  source 1..2514: mol_type = other DNA

SEQ ID NO: 3058 - DNA, 3249 bp, synthetic construct; identical to SEQ ID NO: 2750
  source 1..3249: mol_type = other DNA

SEQ ID NO: 3059 - DNA, 2472 bp, synthetic construct; identical to SEQ ID NO: 2751
  source 1..2472: mol_type = other DNA

SEQ ID NO: 3060 - DNA, 2445 bp, synthetic construct; identical to SEQ ID NO: 2752
  source 1..2445: mol_type = other DNA

SEQ ID NO: 3061 - DNA, 2952 bp, synthetic construct; identical to SEQ ID NO: 2753
  source 1..2952: mol_type = other DNA

SEQ ID NO: 3062 - DNA, 2247 bp, synthetic construct; identical to SEQ ID NO: 2754
  source 1..2247: mol_type = other DNA

SEQ ID NO: 3063 - DNA, 2247 bp, synthetic construct; identical to SEQ ID NO: 2754
  source 1..2247: mol_type = other DNA

SEQ ID NO: 3064 - DNA, 2220 bp, synthetic construct; identical to SEQ ID NO: 2756
  source 1..2220: mol_type = other DNA

SEQ ID NO: 3065 - DNA, 2964 bp, synthetic construct; identical to SEQ ID NO: 2757
  source 1..2964: mol_type = other DNA

SEQ ID NO: 3066 - DNA, 3063 bp, synthetic construct; identical to SEQ ID NO: 2758
  source 1..3063: mol_type = other DNA

SEQ ID NO: 3067 - DNA, 2799 bp, synthetic construct; identical to SEQ ID NO: 2759
  source 1..2799: mol_type = other DNA

SEQ ID NO: 3068 - DNA, 3204 bp, synthetic construct; identical to SEQ ID NO: 2760
  source 1..3204: mol_type = other DNA

SEQ ID NO: 3069 - DNA, 3258 bp, synthetic construct; identical to SEQ ID NO: 2761
  source 1..3258: mol_type = other DNA

SEQ ID NO: 3070 - DNA, 3201 bp, synthetic construct; identical to SEQ ID NO: 2762
  source 1..3201: mol_type = other DNA

SEQ ID NO: 3071 - DNA, 3366 bp, synthetic construct; identical to SEQ ID NO: 2763
  source 1..3366: mol_type = other DNA

SEQ ID NO: 3072 - DNA, 3192 bp, synthetic construct; identical to SEQ ID NO: 2764
  source 1..3192: mol_type = other DNA

SEQ ID NO: 3073 - DNA, 3213 bp, synthetic construct; identical to SEQ ID NO: 2765
  source 1..3213: mol_type = other DNA

SEQ ID NO: 3074 - DNA, 3198 bp, synthetic construct; identical to SEQ ID NO: 2766
  source 1..3198: mol_type = other DNA

SEQ ID NO: 3075 - DNA, 3198 bp, synthetic construct; identical to SEQ ID NO: 2767
  source 1..3198: mol_type = other DNA

SEQ ID NO: 3076 - DNA, 3198 bp, synthetic construct; identical to SEQ ID NO: 2768
  source 1..3198: mol_type = other DNA

SEQ ID NO: 3077 - DNA, 3243 bp, synthetic construct; identical to SEQ ID NO: 2769
  source 1..3243: mol_type = other DNA

SEQ ID NO: 3078 - DNA, 3243 bp, synthetic construct; identical to SEQ ID NO: 2770
  source 1..3243: mol_type = other DNA

SEQ ID NO: 3079 - DNA, 2436 bp, synthetic construct; identical to SEQ ID NO: 2771
  source 1..2436: mol_type = other DNA

SEQ ID NO: 3080 - DNA, 2559 bp, synthetic construct; identical to SEQ ID NO: 2772
  source 1..2559: mol_type = other DNA

SEQ ID NO: 3081 - DNA, 2559 bp, synthetic construct; identical to SEQ ID NO: 2773
  source 1..2559: mol_type = other DNA

SEQ ID NO: 3082 - DNA, 2682 bp, synthetic construct; identical to SEQ ID NO: 2774
  source 1..2682: mol_type = other DNA

SEQ ID NO: 3083 - DNA, 2436 bp, synthetic construct; identical to SEQ ID NO: 2775
  source 1..2436: mol_type = other DNA

SEQ ID NO: 3084 - DNA, 3168 bp, synthetic construct; identical to SEQ ID NO: 2776
  source 1..3168: mol_type = other DNA

SEQ ID NO: 3085 - DNA, 2772 bp, synthetic construct; identical to SEQ ID NO: 2777
  source 1..2772: mol_type = other DNA

SEQ ID NO: 3086 - DNA, 2259 bp, synthetic construct; identical to SEQ ID NO: 2778
  source 1..2259: mol_type = other DNA

SEQ ID NO: 3087 - DNA, 2091 bp, synthetic construct; identical to SEQ ID NO: 2779
  source 1..2091: mol_type = other DNA

SEQ ID NO: 3088 - DNA, 2385 bp, synthetic construct; identical to SEQ ID NO: 2626
  source 1..2385: mol_type = other DNA

SEQ ID NO: 3089 - DNA, 1683 bp, synthetic construct; identical to SEQ ID NO: 2627
  source 1..1683: mol_type = other DNA

SEQ ID NO: 3090 - DNA, 2835 bp, synthetic construct; identical to SEQ ID NO: 2628
  source 1..2835: mol_type = other DNA

SEQ ID NO: 3091 - DNA, 2835 bp, synthetic construct; identical to SEQ ID NO: 2628
  source 1..2835: mol_type = other DNA

SEQ ID NO: 3092 - DNA, 3333 bp, synthetic construct; identical to SEQ ID NO: 2630
  source 1..3333: mol_type = other DNA

SEQ ID NO: 3093 - DNA, 3492 bp, synthetic construct; identical to SEQ ID NO: 2631
  source 1..3492: mol_type = other DNA

SEQ ID NO: 3094 - DNA, 3474 bp, synthetic construct; identical to SEQ ID NO: 2632
  source 1..3474: mol_type = other DNA

SEQ ID NO: 3095 - DNA, 3885 bp, synthetic construct; identical to SEQ ID NO: 2633
  source 1..3885: mol_type = other DNA

SEQ ID NO: 3096 - DNA, 4296 bp, synthetic construct; identical to SEQ ID NO: 2634
  source 1..4296: mol_type = other DNA

SEQ ID NO: 3097 - DNA, 2451 bp, synthetic construct; identical to SEQ ID NO: 2635
  source 1..2451: mol_type = other DNA

SEQ ID NO: 3098 - DNA, 2577 bp, synthetic construct; identical to SEQ ID NO: 2636
  source 1..2577: mol_type = other DNA

SEQ ID NO: 3099 - DNA, 2574 bp, synthetic construct; identical to SEQ ID NO: 2637
  source 1..2574: mol_type = other DNA

SEQ ID NO: 3100 - DNA, 2559 bp, synthetic construct; identical to SEQ ID NO: 2638
  source 1..2559: mol_type = other DNA

SEQ ID NO: 3101 - DNA, 2811 bp, synthetic construct; identical to SEQ ID NO: 2639
  source 1..2811: mol_type = other DNA

SEQ ID NO: 3102 - DNA, 2700 bp, synthetic construct; identical to SEQ ID NO: 2640
  source 1..2700: mol_type = other DNA

SEQ ID NO: 3103 - DNA, 2697 bp, synthetic construct; identical to SEQ ID NO: 2641
  source 1..2697: mol_type = other DNA

SEQ ID NO: 3104 - DNA, 2700 bp, synthetic construct; identical to SEQ ID NO: 2642
  source 1..2700: mol_type = other DNA

SEQ ID NO: 3105 - DNA, 2451 bp, synthetic construct; identical to SEQ ID NO: 2643
  source 1..2451: mol_type = other DNA

SEQ ID NO: 3106 - DNA, 2451 bp, synthetic construct; identical to SEQ ID NO: 2644
  source 1..2451: mol_type = other DNA

SEQ ID NO: 3107 - DNA, 2577 bp, synthetic construct; identical to SEQ ID NO: 2645
  source 1..2577: mol_type = other DNA

SEQ ID NO: 3108 - DNA, 2574 bp, synthetic construct; identical to SEQ ID NO: 2646
  source 1..2574: mol_type = other DNA

SEQ ID NO: 3109 - DNA, 2559 bp, synthetic construct; identical to SEQ ID NO: 2647
  source 1..2559: mol_type = other DNA

SEQ ID NO: 3110 - DNA, 2811 bp, synthetic construct; identical to SEQ ID NO: 2648
  source 1..2811: mol_type = other DNA

SEQ ID NO: 3111 - DNA, 2574 bp, synthetic construct; identical to SEQ ID NO: 2649
  source 1..2574: mol_type = other DNA

SEQ ID NO: 3112 - DNA, 2577 bp, synthetic construct; identical to SEQ ID NO: 2650
  source 1..2577: mol_type = other DNA

SEQ ID NO: 3113 - DNA, 2451 bp, synthetic construct; identical to SEQ ID NO: 2651
  source 1..2451: mol_type = other DNA

SEQ ID NO: 3114 - DNA, 2451 bp, synthetic construct; identical to SEQ ID NO: 2652
  source 1..2451: mol_type = other DNA

SEQ ID NO: 3115 - DNA, 2451 bp, synthetic construct; identical to SEQ ID NO: 2653
  source 1..2451: mol_type = other DNA

SEQ ID NO: 3116 - DNA, 2163 bp, synthetic construct; identical to SEQ ID NO: 2654
  source 1..2163: mol_type = other DNA

SEQ ID NO: 3117 - DNA, 2160 bp, synthetic construct; identical to SEQ ID NO: 2655
  source 1..2160: mol_type = other DNA

SEQ ID NO: 3118 - DNA, 2145 bp, synthetic construct; identical to SEQ ID NO: 2656
  source 1..2145: mol_type = other DNA

SEQ ID NO: 3119 - DNA, 2397 bp, synthetic construct; identical to SEQ ID NO: 2657
  source 1..2397: mol_type = other DNA

SEQ ID NO: 3120 - DNA, 2250 bp, synthetic construct; identical to SEQ ID NO: 2658
  source 1..2250: mol_type = other DNA

SEQ ID NO: 3121 - DNA, 2235 bp, synthetic construct; identical to SEQ ID NO: 2659
  source 1..2235: mol_type = other DNA

SEQ ID NO: 3122 - DNA, 2487 bp, synthetic construct; identical to SEQ ID NO: 2660
  source 1..2487: mol_type = other DNA

SEQ ID NO: 3123 - DNA, 2253 bp, synthetic construct; identical to SEQ ID NO: 2661
  source 1..2253: mol_type = other DNA

SEQ ID NO: 3124 - DNA, 2250 bp, synthetic construct; identical to SEQ ID NO: 2662
  source 1..2250: mol_type = other DNA

SEQ ID NO: 3125 - DNA, 2247 bp, synthetic construct; identical to SEQ ID NO: 2663
  source 1..2247: mol_type = other DNA

SEQ ID NO: 3126 - DNA, 2001 bp, synthetic construct; identical to SEQ ID NO: 2664
  source 1..2001: mol_type = other DNA

SEQ ID NO: 3127 - DNA, 2109 bp, synthetic construct; identical to SEQ ID NO: 2665
  source 1..2109: mol_type = other DNA

SEQ ID NO: 3128 - DNA, 2235 bp, synthetic construct; identical to SEQ ID NO: 2666
  source 1..2235: mol_type = other DNA

SEQ ID NO: 3129 - DNA, 2232 bp, synthetic construct; identical to SEQ ID NO: 2667
  source 1..2232: mol_type = other DNA

SEQ ID NO: 3130 - DNA, 2217 bp, synthetic construct; identical to SEQ ID NO: 2668
  source 1..2217: mol_type = other DNA

SEQ ID NO: 3131 - DNA, 2469 bp, synthetic construct; identical to SEQ ID NO: 2669
  source 1..2469: mol_type = other DNA

SEQ ID NO: 3132 - DNA, 2745 bp, synthetic construct; identical to SEQ ID NO: 2670
  source 1..2745: mol_type = other DNA

SEQ ID NO: 3133 - DNA, 2523 bp, synthetic construct; identical to SEQ ID NO: 2671
  source 1..2523: mol_type = other DNA

SEQ ID NO: 3134 - DNA, 2520 bp, synthetic construct; identical to SEQ ID NO: 2672
  source 1..2520: mol_type = other DNA

SEQ ID NO: 3135 - DNA, 3255 bp, synthetic construct; identical to SEQ ID NO: 2673
  source 1..3255: mol_type = other DNA

SEQ ID NO: 3136 - DNA, 2478 bp, synthetic construct; identical to SEQ ID NO: 2674
  source 1..2478: mol_type = other DNA

SEQ ID NO: 3137 - DNA, 2451 bp, synthetic construct; identical to SEQ ID NO: 2675
  source 1..2451: mol_type = other DNA

SEQ ID NO: 3138 - DNA, 2958 bp, synthetic construct; identical to SEQ ID NO: 2676
  source 1..2958: mol_type = other DNA

SEQ ID NO: 3139 - DNA, 2253 bp, synthetic construct; identical to SEQ ID NO: 2677
  source 1..2253: mol_type = other DNA

SEQ ID NO: 3140 - DNA, 2253 bp, synthetic construct; identical to SEQ ID NO: 2677
  source 1..2253: mol_type = other DNA

SEQ ID NO: 3141 - DNA, 2226 bp, synthetic construct; identical to SEQ ID NO: 2679
  source 1..2226: mol_type = other DNA

SEQ ID NO: 3142 - DNA, 2970 bp, synthetic construct; identical to SEQ ID NO: 2680
  source 1..2970: mol_type = other DNA

SEQ ID NO: 3143 - DNA, 3069 bp, synthetic construct; identical to SEQ ID NO: 2681
  source 1..3069: mol_type = other DNA

SEQ ID NO: 3144 - DNA, 2805 bp, synthetic construct; identical to SEQ ID NO: 2682
  source 1..2805: mol_type = other DNA

SEQ ID NO: 3145 - DNA, 3210 bp, synthetic construct; identical to SEQ ID NO: 2683
  source 1..3210: mol_type = other DNA

SEQ ID NO: 3146 - DNA, 3264 bp, synthetic construct; identical to SEQ ID NO: 2684
  source 1..3264: mol_type = other DNA

SEQ ID NO: 3147 - DNA, 3207 bp, synthetic construct; identical to SEQ ID NO: 2685
  source 1..3207: mol_type = other DNA

SEQ ID NO: 3148 - DNA, 3372 bp, synthetic construct; identical to SEQ ID NO: 2686
  source 1..3372: mol_type = other DNA

SEQ ID NO: 3149 - DNA, 3198 bp, synthetic construct; identical to SEQ ID NO: 2687
  source 1..3198: mol_type = other DNA

SEQ ID NO: 3150 - DNA, 3219 bp, synthetic construct; identical to SEQ ID NO: 2688
  source 1..3219: mol_type = other DNA

SEQ ID NO: 3151 - DNA, 3204 bp, synthetic construct; identical to SEQ ID NO: 2689
  source 1..3204: mol_type = other DNA

SEQ ID NO: 3152 - DNA, 3204 bp, synthetic construct; identical to SEQ ID NO: 2690
  source 1..3204: mol_type = other DNA

SEQ ID NO: 3153 - DNA, 3204 bp, synthetic construct; identical to SEQ ID NO: 2691
  source 1..3204: mol_type = other DNA

SEQ ID NO: 3154 - DNA, 3249 bp, synthetic construct; identical to SEQ ID NO: 2692
  source 1..3249: mol_type = other DNA

SEQ ID NO: 3155 - DNA, 3249 bp, synthetic construct; identical to SEQ ID NO: 2693
  source 1..3249: mol_type = other DNA

SEQ ID NO: 3156 - DNA, 2442 bp, synthetic construct; identical to SEQ ID NO: 2694
  source 1..2442: mol_type = other DNA

SEQ ID NO: 3157 - DNA, 2565 bp, synthetic construct; identical to SEQ ID NO: 2695
  source 1..2565: mol_type = other DNA

SEQ ID NO: 3158 - DNA, 2565 bp, synthetic construct; identical to SEQ ID NO: 2696
  source 1..2565: mol_type = other DNA

SEQ ID NO: 3159 - DNA, 2688 bp, synthetic construct; identical to SEQ ID NO: 2697
  source 1..2688: mol_type = other DNA

SEQ ID NO: 3160 - DNA, 2442 bp, synthetic construct; identical to SEQ ID NO: 2698
  source 1..2442: mol_type = other DNA

SEQ ID NO: 3161 - DNA, 3174 bp, synthetic construct; identical to SEQ ID NO: 2699
  source 1..3174: mol_type = other DNA

SEQ ID NO: 3162 - DNA, 2778 bp, synthetic construct; identical to SEQ ID NO: 2700
  source 1..2778: mol_type = other DNA

SEQ ID NO: 3163 - DNA, 2265 bp, synthetic construct; identical to SEQ ID NO: 2701
  source 1..2265: mol_type = other DNA

SEQ ID NO: 3164 - DNA, 2097 bp, synthetic construct; identical to SEQ ID NO: 2702
  source 1..2097: mol_type = other DNA

SEQ ID NO: 3165 - DNA, 3180 bp, synthetic construct
  source 1..3180: mol_type = other DNA
atggccttaccagtgaccgccttgctcctgccgctggccttgctgctccacgccgccaggccggaattcaatgctggcgtgacccagacacctaagttccaggtgctgaaaaccggccagagcatgaccctgcaatgcgcccaggacatgaaccatgagtacatgagctggtacagacaggaccccggcatgggcctgagactgatccactactctgtggctatccagaccaccgaccagggcgaagtgcccaatggctacaacgtgtccagaagcaccatcgaggacttcccactgagactgctgtctgccgctcctagccagaccagcgtgtacttttgtgccagcagctacctgggcaacaccggcgagctgttttttggcgagggcagcagactgaccgtgctcgaggacctgaagaacgtgttcccacctgaggtggccgtgttcgagcctagcgaggccgagatcagccacacccagaaagccaccctcgtgtgcctggctaccggcttctaccccgaccatgtggaactgtcttggtgggtcaacggcaaagaggtgcacagcggcgtgtctaccgacccccagccactgaaagaacagcccgccctgaacgacagccggtactgcctgagcagcagactgagagtgtccgccaccttctggcagaacccccggaaccacttcagatgccaggtgcagttctacggcctgagcgagaacgacgagtggacccaggacagagccaagcccgtgacccagatcgtgtctgccgaagcctggggcagagccgattgcggatcccagagcttcggcctgctggaccccaagctgtgctacctgctggatggcatcctgttcatctacggcgtgatcctgaccgccctgttcctgagagtgaagttcagcagaagcgccgacgcccctgcctaccagcagggacagaaccaactgtacaacgagctgaacctgggcagacgggaagagtacgacgtgctggacaagcggagaggcagggaccctgagatgggcggaaagccccagcggagaaagaacccccaggaaggactgtataacgaactccagaaagacaagatggccgaagcctacagcgagatcggcatgaagggcgagcggagaagaggcaagggccacgatggcctgtaccagggcctgagcaccgccaccaaggacacctatgacgccctgcacatgcaggccctgcctccaagaagggccaagcgatctggatctggagcaacaaacttctcactactcaaacaagcaggtgacgtggaggagaatcccgggcctactagtatggactggatttggcgcatccttttccttgtcggcgctgctaccggcgcgcattccttcgaacaagaagtgacacagatccctgccgctctgtctgtgcctgagggcgaaaacctggtgctgaactgctccttcaccgacagcgccatctacaacctccagtggttcaggcaggaccctggaaagggactgacaagcctgctgctgatccagagcagccagagagagcagacctccggcagactgaatgccagcctggataagagcagcggcaggtctaccctgtatatcgccgcttctcagcctggcgatagcgccacatatctgtgtgctgtgcggcctacaagcggcggcagctacatccctacatttggcagaggcaccagcctgatcgtgcacccttatacgcgtatccagaaccctgatcctgccgtgtaccagctgcgggatagcaagagcagcgacaagagcgtgtgtctgttcaccgacttcgacagccagaccaacgtgtcccagagcaaggactccgacgtgtacatcaccgataagaccgtgctggacatgcggagcatggacttcaagagcaactccgccgtggcctggtccaacaagtccgatttcgcctgcgccaacgccttcaacaacagcattatccccgaggacacattcttcccaagccccgagagcagctgcggtacccagagttttgggttgttggaccctaaattgtgctatctgttggacggaatcctgttcatttacggagtgatcctgaccgcattgttcctgcgggttaagttttccagatccgcagacgcacccgcttaccaacaagggcagaaccaactctacaatgaacttaatttggggcggagggaagagtacgacgttctggacaaaaggaggggacgagatcccgagatgggcggaaagcctcagcgaaggaagaatccgcaagaggggctttataacgaactccagaaagataaaatggcagaagcctatagtgagattgggatgaagggagaaaggaggaggggtaaaggtcacgatgggttgtaccaaggattgagcacagccactaaagatacctatgatgcgctccacatgcaggccctgccgccaagacgcgccaagagaagcggatctggcgtgaagcagaccctgaatttcgacctgctgaagctggctggcgacgtggaatccaacccaggcccttctagcaccatgaggccaagactgtggctgctgctggctgctcagctgacagtgctgcacggcaattctgtgctccagcagacccctgcctacatcaaggtgcagaccaacaagatggtcatgctgagctgcgaggccaaaatcagcctgagcaacatgcggatctactggctgcggcagagacaggcccctagcagcgatagccaccacgaatttctggccctgtgggatagcgccaagggcacaattcacggcgaggaagtggaacaagagaagatcgccgtgttccgggacgccagcagattcatcctgaacctgaccagcgtgaagcccgaggacagcggcatctatttctgcatgatcgtgggcagccccgagctgacatttggcaagggaacacagctgagcgtggtggacttcctgcctactacagcccagcctaccaagaagtctaccctgaagaaaagagtgtgcaggctgcccagacctgagacacagaaaggccctctgtgcagccctatcacactgggattgctggtggctggcgtgctggtgctgctggtttctctgggagttgccatccacctgtgctgtagaagaaggcgggccagactgcggtttatgaagcagttctacaag

SEQ ID NO: 3166 - DNA, 21 bp, synthetic construct
  source 1..21: mol_type = other DNA
ggggggggggggggggggggg

SEQ ID NO: 3167 - DNA, 21 bp, synthetic construct
  source 1..21: mol_type = other DNA
ggggggggggggggggggggg

SEQ ID NO: 3168 - DNA, 21 bp, synthetic construct
  source 1..21: mol_type = other DNA
ggggggggggggggggggggg

SEQ ID NO: 3169 - DNA, 21 bp, synthetic construct
  source 1..21: mol_type = other DNA
ggggggggggggggggggggg

SEQ ID NO: 3170 - DNA, 21 bp, synthetic construct
  source 1..21: mol_type = other DNA
ggggggggggggggggggggg

SEQ ID NO: 3171 - DNA, 3093 bp, synthetic construct
  source 1..3093: mol_type = other DNA
atggccttaccagtgaccgccttgctcctgccgctggccttgctgctccacgccgccaggccggacatccagatgacacagagccctagcagcctgtctgccagcgtgggagacagagtgaccatcacatgcaaggccagcgaccacatcaacaactggctggcctggtatcagcagaagcctggacaggcccctaagctgctgatctacggcgctaccacactggaaacaggcgtgcccagcagattttctggcagcggctctggcaccgactacaccctgacaatatccagcctccagcctgaggacttcgccacctactactgtcagcagagctggaacaccccttggacattcggccagggcaccaagctggaaatcaagagaggacagcctaaggccaatcctaccgtgacactgttccctccaagcagcgaagaactccaggccaacaaggccacacttgtgtgcctgatctccgacttctaccctggggctgtgacagtggcttggaaggccgatggatctcctgtgaaagccggcgtggaaaccaccaagccatccaagcagagcaacaacaaatacgccgccagctcctacctgagcctgacacctgagcagtggaagtcccacagatcctacagctgccaagtgacccacgaaggcagcaccgtggaaaagacagtggcccctacagagtgcagcggatcccagagcttcggcctgctggaccccaagctgtgctacctgctggatggcatcctgttcatctacggcgtgatcctgaccgccctgttcctgagagtgaagttcagcagaagcgccgacgcccctgcctaccagcagggacagaaccaactgtacaacgagctgaacctgggcagacgggaagagtacgacgtgctggacaagcggagaggcagggaccctgagatgggcggaaagccccggagaaagaacccccaggaaggactgtataacgaactccagaaagacaagatggccgaagcctacagcgagatcggcatgaagggcgagcggagaagaggcaagggccacgatggcctgtaccagggcctgagcaccgccaccaaggacacctatgacgccctgcacatgcaggccctgcctccaagaagggccaagcgatctggatctggagcaacaaacttctcactactcaaacaagcaggtgacgtggaggagaatcccgggcctactagtatggactggatttggcgcatccttttccttgtcggcgctgctaccggcgcgcattccttcgaacaagttcagcttcaacagcctggcgctgagctggtcaaacctggcgcttctgtgaagatgagctgcaaagccagcggctacgccttcagcagctactggatcaactggatgaagcagaaacccggccagggactcgaatggatcggccaaatctatcccggcgacggcgacaccaactacaacggcaagttcaagggcagagccacactgaccgccgatacctctagcagcacagcctacatgcagctgagcagcctgaccagcgaagatagcgccgtgtacttctgtgcccggtccatcacaacagtcgtgggctgcgctatggactattggggccagggaacaagcgtgaccgtgtctagtgcctctacaaagggaccctccgtgtttcctctggctcccagcagcaagtctacaagcggaggaacagccgctctgggctgcctggtcaaggattactttcccgagcctgtgaccgtgtcctggaatagcggagcactgacaagcggcgtgcacacctttccagccgtgctgcaaagcagcggcctgtactctctgagcagcgtggtcacagtgcctagctctagcctgggcacccagacctacatctgcaatgtgaaccacaagcctagcaacaccaaggtggacaagagagtggaacccaagagctgtggtacccagagttttgggttgttggaccctaaattgtgctatctgttggacggaatcctgttcatttacggagtgatcctgaccgcattgttcctgcgggttaagttttccagatccgcagacgcacccgcttaccaacaagggcagaaccaactctacaatgaacttaatttggggcggagggaagagtacgacgttctggacaaaaggaggggacgagatcccgagatgggcggaaagcctcgaaggaagaatccgcaagaggggctttataacgaactccagaaagataaaatggcagaagcctatagtgagattgggatgaagggagaaaggaggaggggtaaaggtcacgatgggttgtaccaaggattgagcacagccactaaagatacctatgatgcgctccacatgcaggccctgccgccaagacgcgccaagagaagcggatctggcgtgaagcagaccctgaatttcgacctgctgaagctggctggcgacgtggaatccaacccaggcccttctagaggccatatgaccgagtacaagcccacggtgcgcctcgccacccgcgacgacgtccccagggccgtacgcaccctcgccgccgcgttcgccgactaccccgccacgcgccacaccgtcgatccggaccgccacatcgagcgggtcaccgagctgcaagaactcttcctcacgcgcgtcgggctcgacatcggcaaggtgtgggtcgcggacgacggcgccgcggtggcggtctggaccacgccggagagcgtcgaagcgggggcggtgttcgccgagatcggcccgcgcatggccgagttgagcggttcccggctggccgcgcagcaacagatggaaggcctcctggcgccgcaccggcccaaggagcccgcgtggttcctggccaccgtcggcgtctcgcccgaccaccagggcaagggtctgggcagcgccgtcgtgctccccggagtggaggcggccgagcgcgccggggtgcccgccttcctggagacctccgcgccccgcaacctccccttctacgagcggctcggcttcaccgtcaccgccgacgtcgaggtgcccgaaggaccgcgcacctggtgcatgacccgcaagcccggtgcctga

SEQ ID NO: 3172 - DNA, 2448 bp, synthetic construct
  source 1..2448: mol_type = other DNA
atggccttaccagtgaccgccttgctcctgccgctggccttgctgctccacgccgccaggccggacatccagatgacacagagccctagcagcctgtctgccagcgtgggagacagagtgaccatcacatgcaaggccagcgaccacatcaacaactggctggcctggtatcagcagaagcctggacaggcccctaagctgctgatctacggcgctaccacactggaaacaggcgtgcccagcagattttctggcagcggctctggcaccgactacaccctgacaatatccagcctccagcctgaggacttcgccacctactactgtcagcagagctggaacaccccttggacattcggccagggcaccaagctggaaatcaagagactcgaggacctgaagaacgtgttcccacctgaggtggccgtgttcgagcctagcgaggccgagatcagccacacccagaaagccaccctcgtgtgcctggctaccggcttctaccccgaccatgtggaactgtcttggtgggtcaacggcaaagaggtgcacagcggcgtgtctaccgacccccagccactgaaagaacagcccgccctgaacgacagccggtactgcctgagcagcagactgagagtgtccgccaccttctggcagaacccccggaaccacttcagatgccaggtgcagttctacggcctgagcgagaacgacgagtggacccaggacagagccaagcccgtgacccagatcgtgtctgccgaagcctggggcagagccgattgcggatcccagagcttcggcctgctggaccccaagctgtgctacctgctggatggcatcctgttcatctacggcgtgatcctgaccgccctgttcctgagagtgaagttcagcagaagcgccgacgcccctgcctaccagcagggacagaaccaactgtacaacgagctgaacctgggcagacgggaagagtacgacgtgctggacaagcggagaggcagggaccctgagatgggcggaaagccccggagaaagaacccccaggaaggactgtataacgaactccagaaagacaagatggccgaagcctacagcgagatcggcatgaagggcgagcggagaagaggcaagggccacgatggcctgtaccagggcctgagcaccgccaccaaggacacctatgacgccctgcacatgcaggccctgcctccaagaagggccaagcgatctggatctggagcaacaaacttctcactactcaaacaagcaggtgacgtggaggagaatcccgggcctactagtatggactggatttggcgcatccttttccttgtcggcgctgctaccggcgcgcattccttcgaacaagttcagcttcaacagcctggcgctgagctggtcaaacctggcgcttctgtgaagatgagctgcaaagccagcggctacgccttcagcagctactggatcaactggatgaagcagaaacccggccagggactcgaatggatcggccaaatctatcccggcgacggcgacaccaactacaacggcaagttcaagggcagagccacactgaccgccgatacctctagcagcacagcctacatgcagctgagcagcctgaccagcgaagatagcgccgtgtacttctgtgcccggtccatcacaacagtcgtgggctgcgctatggactattggggccagggaacaagcgtgaccgtgtctagtacgcgtatccagaaccctgatcctgccgtgtaccagctgcgggatagcaagagcagcgacaagagcgtgtgtctgttcaccgacttcgacagccagaccaacgtgtcccagagcaaggactccgacgtgtacatcaccgataagaccgtgctggacatgcggagcatggacttcaagagcaactccgccgtggcctggtccaacaagtccgatttcgcctgcgccaacgccttcaacaacagcattatccccgaggacacattcttcccaagccccgagagcagctgcggtacccagagttttgggttgttggaccctaaattgtgctatctgttggacggaatcctgttcatttacggagtgatcctgaccgcattgttcctgcgggttaagttttccagatccgcagacgcacccgcttaccaacaagggcagaaccaactctacaatgaacttaatttggggcggagggaagagtacgacgttctggacaaaaggaggggacgagatcccgagatgggcggaaagcctcgaaggaagaatccgcaagaggggctttataacgaactccagaaagataaaatggcagaagcctatagtgagattgggatgaagggagaaaggaggaggggtaaaggtcacgatgggttgtaccaaggattgagcacagccactaaagatacctatgatgcgctccacatgcaggccctgccgccaaga

SEQ ID NO: 3173 - DNA, 2448 bp, synthetic construct
  source 1..2448: mol_type = other DNA
atggccttaccagtgaccgccttgctcctgccgctggccttgctgctccacgccgccaggccggacatccagatgacacagagccctagcagcctgtctgccagcgtgggagacagagtgaccatcacatgcaaggccagcgaccacatcaacaactggctggcctggtatcagcagaagcctggacaggcccctaagctgctgatctacggcgctaccacactggaaacaggcgtgcccagcagattttctggcagcggctctggcaccgactacaccctgacaatatccagcctccagcctgaggacttcgccacctactactgtcagcagagctggaacaccccttggacattcggccagggcaccaagctggaaatcaagagactcgaggacctgaagaacgtgttcccacctgaggtggccgtgttcgagcctagcaaggccgagatcgcccacacccagaaagccaccctcgtgtgcctggctaccggcttctaccccgaccatgtggaactgtcttggtgggtcaacggcaaagaggtgcacagcggcgtgtgtaccgacccccagccactgaaagaacagcccgccctgaacgacagccggtactgcctgagcagcagactgagagtgtccgccaccttctggcagaacccccggaaccacttcagatgccaggtgcagttctacggcctgagcgagaacgacgagtggacccaggacagagccaagcccgtgacccagatcgtgtctgccgaagcctggggcagagccgattgcggatcccagagcttcggcctgctggaccccaagctgtgctacctgctggatggcatcctgttcatctacggcgtgatcctgaccgccctgttcctgagagtgaagttcagcagaagcgccgacgcccctgcctaccagcagggacagaaccaactgtacaacgagctgaacctgggcagacgggaagagtacgacgtgctggacaagcggagaggcagggaccctgagatgggcggaaagccccggagaaagaacccccaggaaggactgtataacgaactccagaaagacaagatggccgaagcctacagcgagatcggcatgaagggcgagcggagaagaggcaagggccacgatggcctgtaccagggcctgagcaccgccaccaaggacacctatgacgccctgcacatgcaggccctgcctccaagaagggccaagcgatctggatctggagcaacaaacttctcactactcaaacaagcaggtgacgtggaggagaatcccgggcctactagtatggactggatttggcgcatccttttccttgtcggcgctgctaccggcgcgcattccttcgaacaagttcagcttcaacagcctggcgctgagctggtcaaacctggcgcttctgtgaagatgagctgcaaagccagcggctacgccttcagcagctactggatcaactggatgaagcagaaacccggccagggactcgaatggatcggccaaatctatcccggcgacggcgacaccaactacaacggcaagttcaagggcagagccacactgaccgccgatacctctagcagcacagcctacatgcagctgagcagcctgaccagcgaagatagcgccgtgtacttctgtgcccggtccatcacaacagtcgtgggctgcgctatggactattggggccagggaacaagcgtgaccgtgtctagtacgcgtatccagaaccctgatcctgccgtgtaccagctgcgggatagcaagagcagcgacaagagcgtgtgtctgttcaccgacttcgacagccagaccaacgtgtcccagagcaaggactccgacgtgtacatcaccgataagtgcgtgctggacatgcggagcatggacttcaagagcaactccgccgtggcctggtccaacaagtccgatttcgcctgcgccaacgccttcaacaacagcattatccccgaggacacattcttcccaagcagcgacgtgccctgcggtacccagagttttgggttgttggaccctaaattgtgctatctgttggacggaatcctgttcatttacggagtgatcctgaccgcattgttcctgcgggttaagttttccagatccgcagacgcacccgcttaccaacaagggcagaaccaactctacaatgaacttaatttggggcggagggaagagtacgacgttctggacaaaaggaggggacgagatcccgagatgggcggaaagcctcgaaggaagaatccgcaagaggggctttataacgaactccagaaagataaaatggcagaagcctatagtgagattgggatgaagggagaaaggaggaggggtaaaggtcacgatgggttgtaccaaggattgagcacagccactaaagatacctatgatgcgctccacatgcaggccctgccgccaaga

SEQ ID NO: 3174 - DNA, 2661 bp, synthetic construct
  source 1..2661: mol_type = other DNA
atggccttaccagtgaccgccttgctcctgccgctggccttgctgctccacgccgccaggccggacatccagatgacacagagccctagcagcctgtctgccagcgtgggagacagagtgaccatcacatgcaaggccagcgaccacatcaacaactggctggcctggtatcagcagaagcctggacaggcccctaagctgctgatctacggcgctaccacactggaaacaggcgtgcccagcagattttctggcagcggctctggcaccgactacaccctgacaatatccagcctccagcctgaggacttcgccacctactactgtcagcagagctggaacaccccttggacattcggccagggcaccaagctggaaatcaagagactcgaggggaaaccaattcccaaccctcttctgggactggattcaaccggcagcggcgaggacctgaagaacgtgttcccacctgaggtggccgtgttcgagcctagcgaggccgagatcagccacacccagaaagccaccctcgtgtgcctggctaccggcttctaccccgaccatgtggaactgtcttggtgggtcaacggcaaagaggtgcacagcggcgtgtctaccgacccccagccactgaaagaacagcccgccctgaacgacagccggtactgcctgagcagcagactgagagtgtccgccaccttctggcagaacccccggaaccacttcagatgccaggtgcagttctacggcctgagcgagaacgacgagtggacccaggacagagccaagcccgtgacccagatcgtgtctgccgaagcctggggcagagccgattgcggatcccagagcttcggcctgctggaccccaagctgtgctacctgctggatggcatcctgttcatctacggcgtgatcctgaccgccctgttcctgagagtgaagttcagcagaagcgccgacgcccctgcctaccagcagggacagaaccaactgtacaacgagctgaacctgggcagacgggaagagtacgacgtgctggacaagcggagaggcagggaccctgagatgggcggaaagccccggagaaagaacccccaggaaggactgtataacgaactccagaaagacaagatggccgaagcctacagcgagatcggcatgaagggcgagcggagaagaggcaagggccacgatggcctgtaccagggcctgagcaccgccaccaaggacacctatgacgccctgcacatgcaggccctgcctccaagaagggccaagcgatctggatctggagcaacaaacttctcactactcaaacaagcaggtgacgtggaggagaatcccgggcctactagtatggactggatttggcgcatccttttccttgtcggcgctgctaccggcgcgcattccttcgaacaagttcagcttcaacagcctggcgctgagctggtcaaacctggcgcttctgtgaagatgagctgcaaagccagcggctacgccttcagcagctactggatcaactggatgaagcagaaacccggccagggactcgaatggatcggccaaatctatcccggcgacggcgacaccaactacaacggcaagttcaagggcagagccacactgaccgccgatacctctagcagcacagcctacatgcagctgagcagcctgaccagcgaagatagcgccgtgtacttctgtgcccggtccatcacaacagtcgtgggctgcgctatggactattggggccagggaacaagcgtgaccgtgtctagtacgcgtgagcagaaactgatctcggaagaggatgggagcggcatccagaaccctgatcctgccgtgtaccagctgcgggatagcaagagcagcgacaagagcgtgtgtctgttcaccgacttcgacagccagaccaacgtgtcccagagcaaggactccgacgtgtacatcaccgataagaccgtgctggacatgcggagcatggacttcaagagcaactccgccgtggcctggtccaacaagtccgatttcgcctgcgccaacgccttcaacaacagcattatccccgaggacacattcttcccaagccccgagagcagctgcggtacccagagttttgggttgttggaccctaaattgtgctatctgttggacggaatcctgttcatttacggagtgatcctgaccgcattgttcctgaggagcaagcggtcacggctgctccacagcgattacatgaatatgacaccacgaagaccgggtcctactcgcaaacactaccaaccctacgcacctccccgcgactttgcagcgtaccgatctcgggttaagttttccagatccgcagacgcacccgcttaccaacaagggcagaaccaactctacaatgaacttaatttggggcggagggaagagtacgacgttctggacaaaaggaggggacgagatcccgagatgggcggaaagcctcgaaggaagaatccgcaagaggggctttataacgaactccagaaagataaaatggcagaagcctatagtgagattgggatgaagggagaaaggaggaggggtaaaggtcacgatgggttgtaccaaggattgagcacagccactaaagatacctatgatgcgctccacatgcaggccctgccgccaaga

SEQ ID NO: 3175 - DNA, 2784 bp, synthetic construct
  source 1..2784: mol_type = other DNA
atggccttaccagtgaccgccttgctcctgccgctggccttgctgctccacgccgccaggccggacatccagatgacacagagccctagcagcctgtctgccagcgtgggagacagagtgaccatcacatgcaaggccagcgaccacatcaacaactggctggcctggtatcagcagaagcctggacaggcccctaagctgctgatctacggcgctaccacactggaaacaggcgtgcccagcagattttctggcagcggctctggcaccgactacaccctgacaatatccagcctccagcctgaggacttcgccacctactactgtcagcagagctggaacaccccttggacattcggccagggcaccaagctggaaatcaagagactcgaggggaaaccaattcccaaccctcttctgggactggattcaaccggcagcggcgaggacctgaagaacgtgttcccacctgaggtggccgtgttcgagcctagcgaggccgagatcagccacacccagaaagccaccctcgtgtgcctggctaccggcttctaccccgaccatgtggaactgtcttggtgggtcaacggcaaagaggtgcacagcggcgtgtctaccgacccccagccactgaaagaacagcccgccctgaacgacagccggtactgcctgagcagcagactgagagtgtccgccaccttctggcagaacccccggaaccacttcagatgccaggtgcagttctacggcctgagcgagaacgacgagtggacccaggacagagccaagcccgtgacccagatcgtgtctgccgaagcctggggcagagccgattgcggatcccagagcttcggcctgctggaccccaagctgtgctacctgctggatggcatcctgttcatctacggcgtgatcctgaccgccctgttcctgaggagtaagaggagcaggctcctgcacagtgactacatgaacatgactccacgccgccccggacccacccgcaagcattaccagccctatgccccaccacgcgacttcgcagcctatcgctccagagtgaagttcagcagaagcgccgacgcccctgcctaccagcagggacagaaccaactgtacaacgagctgaacctgggcagacgggaagagtacgacgtgctggacaagcggagaggcagggaccctgagatgggcggaaagccccggagaaagaacccccaggaaggactgtataacgaactccagaaagacaagatggccgaagcctacagcgagatcggcatgaagggcgagcggagaagaggcaagggccacgatggcctgtaccagggcctgagcaccgccaccaaggacacctatgacgccctgcacatgcaggccctgcctccaagaagggccaagcgatctggatctggagcaacaaacttctcactactcaaacaagcaggtgacgtggaggagaatcccgggcctactagtatggactggatttggcgcatccttttccttgtcggcgctgctaccggcgcgcattccttcgaacaagttcagcttcaacagcctggcgctgagctggtcaaacctggcgcttctgtgaagatgagctgcaaagccagcggctacgccttcagcagctactggatcaactggatgaagcagaaacccggccagggactcgaatggatcggccaaatctatcccggcgacggcgacaccaactacaacggcaagttcaagggcagagccacactgaccgccgatacctctagcagcacagcctacatgcagctgagcagcctgaccagcgaagatagcgccgtgtacttctgtgcccggtccatcacaacagtcgtgggctgcgctatggactattggggccagggaacaagcgtgaccgtgtctagtacgcgtgagcagaaactgatctcggaagaggatgggagcggcatccagaaccctgatcctgccgtgtaccagctgcgggatagcaagagcagcgacaagagcgtgtgtctgttcaccgacttcgacagccagaccaacgtgtcccagagcaaggactccgacgtgtacatcaccgataagaccgtgctggacatgcggagcatggacttcaagagcaactccgccgtggcctggtccaacaagtccgatttcgcctgcgccaacgccttcaacaacagcattatccccgaggacacattcttcccaagccccgagagcagctgcggtacccagagttttgggttgttggaccctaaattgtgctatctgttggacggaatcctgttcatttacggagtgatcctgaccgcattgttcctgaggagcaagcggtcacggctgctccacagcgattacatgaatatgacaccacgaagaccgggtcctactcgcaaacactaccaaccctacgcacctccccgcgactttgcagcgtaccgatctcgggttaagttttccagatccgcagacgcacccgcttaccaacaagggcagaaccaactctacaatgaacttaatttggggcggagggaagagtacgacgttctggacaaaaggaggggacgagatcccgagatgggcggaaagcctcgaaggaagaatccgcaagaggggctttataacgaactccagaaagataaaatggcagaagcctatagtgagattgggatgaagggagaaaggaggaggggtaaaggtcacgatgggttgtaccaaggattgagcacagccactaaagatacctatgatgcgctccacatgcaggccctgccgccaaga

SEQ ID NO: 3176 - DNA, 2667 bp, synthetic construct
  source 1..2667: mol_type = other DNA
atggccttaccagtgaccgccttgctcctgccgctggccttgctgctccacgccgccaggccggacatccagatgacacagagccctagcagcctgtctgccagcgtgggagacagagtgaccatcacatgcaaggccagcgaccacatcaacaactggctggcctggtatcagcagaagcctggacaggcccctaagctgctgatctacggcgctaccacactggaaacaggcgtgcccagcagattttctggcagcggctctggcaccgactacaccctgacaatatccagcctccagcctgaggacttcgccacctactactgtcagcagagctggaacaccccttggacattcggccagggcaccaagctggaaatcaagagactcgaggggaaaccaattcccaaccctcttctgggactggattcaaccggcagcggcgaggacctgaagaacgtgttcccacctgaggtggccgtgttcgagcctagcgaggccgagatcagccacacccagaaagccaccctcgtgtgcctggctaccggcttctaccccgaccatgtggaactgtcttggtgggtcaacggcaaagaggtgcacagcggcgtgtctaccgacccccagccactgaaagaacagcccgccctgaacgacagccggtactgcctgagcagcagactgagagtgtccgccaccttctggcagaacccccggaaccacttcagatgccaggtgcagttctacggcctgagcgagaacgacgagtggacccaggacagagccaagcccgtgacccagatcgtgtctgccgaagcctggggcagagccgattgcggatcccagagcttcggcctgctggaccccaagctgtgctacctgctggatggcatcctgttcatctacggcgtgatcctgaccgccctgttcctgagagtgaagttcagcagaagcgccgacgcccctgcctaccagcagggacagaaccaactgtacaacgagctgaacctgggcagacgggaagagtacgacgtgctggacaagcggagaggcagggaccctgagatgggcggaaagccccggagaaagaacccccaggaaggactgtataacgaactccagaaagacaagatggccgaagcctacagcgagatcggcatgaagggcgagcggagaagaggcaagggccacgatggcctgtaccagggcctgagcaccgccaccaaggacacctatgacgccctgcacatgcaggccctgcctccaagaagggccaagcgatctggatctggagcaacaaacttctcactactcaaacaagcaggtgacgtggaggagaatcccgggcctactagtatggactggatttggcgcatccttttccttgtcggcgctgctaccggcgcgcattccttcgaacaagttcagcttcaacagcctggcgctgagctggtcaaacctggcgcttctgtgaagatgagctgcaaagccagcggctacgccttcagcagctactggatcaactggatgaagcagaaacccggccagggactcgaatggatcggccaaatctatcccggcgacggcgacaccaactacaacggcaagttcaagggcagagccacactgaccgccgatacctctagcagcacagcctacatgcagctgagcagcctgaccagcgaagatagcgccgtgtacttctgtgcccggtccatcacaacagtcgtgggctgcgctatggactattggggccagggaacaagcgtgaccgtgtctagtacgcgtgagcagaaactgatctcggaagaggatctggggagcggcatccagaaccctgatcctgccgtgtaccagctgcgggatagcaagagcagcgacaagagcgtgtgtctgttcaccgacttcgacagccagaccaacgtgtcccagagcaaggactccgacgtgtacatcaccgataagaccgtgctggacatgcggagcatggacttcaagagcaactccgccgtggcctggtccaacaagtccgatttcgcctgcgccaacgccttcaacaacagcattatccccgaggacacattcttcccaagccccgagagcagctgcggtacccagagttttgggttgttggaccctaaattgtgctatctgttggacggaatcctgttcatttacggagtgatcctgaccgcattgttcctgaagagaggccggaagaagctgctgtacatcttcaagcagcctttcatgcggcccgtgcagaccacccaggaagaggacggctgctcctgccggttccccgaggaagaagaaggcggctgcgagctgcgggttaagttttccagatccgcagacgcacccgcttaccaacaagggcagaaccaactctacaatgaacttaatttggggcggagggaagagtacgacgttctggacaaaaggaggggacgagatcccgagatgggcggaaagcctcgaaggaagaatccgcaagaggggctttataacgaactccagaaagataaaatggcagaagcctatagtgagattgggatgaagggagaaaggaggaggggtaaaggtcacgatgggttgtaccaaggattgagcacagccactaaagatacctatgatgcgctccacatgcaggccctgccgccaaga

SEQ ID NO: 3177 - DNA, 2793 bp, synthetic construct
  source 1..2793: mol_type = other DNA
atggccttaccagtgaccgccttgctcctgccgctggccttgctgctccacgccgccaggccggacatccagatgacacagagccctagcagcctgtctgccagcgtgggagacagagtgaccatcacatgcaaggccagcgaccacatcaacaactggctggcctggtatcagcagaagcctggacaggcccctaagctgctgatctacggcgctaccacactggaaacaggcgtgcccagcagattttctggcagcggctctggcaccgactacaccctgacaatatccagcctccagcctgaggacttcgccacctactactgtcagcagagctggaacaccccttggacattcggccagggcaccaagctggaaatcaagagactcgaggggaaaccaattcccaaccctcttctgggactggattcaaccggcagcggcgaggacctgaagaacgtgttcccacctgaggtggccgtgttcgagcctagcgaggccgagatcagccacacccagaaagccaccctcgtgtgcctggctaccggcttctaccccgaccatgtggaactgtcttggtgggtcaacggcaaagaggtgcacagcggcgtgtctaccgacccccagccactgaaagaacagcccgccctgaacgacagccggtactgcctgagcagcagactgagagtgtccgccaccttctggcagaacccccggaaccacttcagatgccaggtgcagttctacggcctgagcgagaacgacgagtggacccaggacagagccaagcccgtgacccagatcgtgtctgccgaagcctggggcagagccgattgcggatcccagagcttcggcctgctggaccccaagctgtgctacctgctggatggcatcctgttcatctacggcgtgatcctgaccgccctgttcctgaaacggggcagaaagaaactcctgtatatattcaaacaaccatttatgagaccagtacaaactactcaagaggaagatggctgtagctgccgatttccagaagaagaagaaggaggatgtgaactgagagtgaagttcagcagaagcgccgacgcccctgcctaccagcagggacagaaccaactgtacaacgagctgaacctgggcagacgggaagagtacgacgtgctggacaagcggagaggcagggaccctgagatgggcggaaagccccggagaaagaacccccaggaaggactgtataacgaactccagaaagacaagatggccgaagcctacagcgagatcggcatgaagggcgagcggagaagaggcaagggccacgatggcctgtaccagggcctgagcaccgccaccaaggacacctatgacgccctgcacatgcaggccctgcctccaagaagggccaagcgatctggatctggagcaacaaacttctcactactcaaacaagcaggtgacgtggaggagaatcccgggcctactagtatggactggatttggcgcatccttttccttgtcggcgctgctaccggcgcgcattccttcgaacaagttcagcttcaacagcctggcgctgagctggtcaaacctggcgcttctgtgaagatgagctgcaaagccagcggctacgccttcagcagctactggatcaactggatgaagcagaaacccggccagggactcgaatggatcggccaaatctatcccggcgacggcgacaccaactacaacggcaagttcaagggcagagccacactgaccgccgatacctctagcagcacagcctacatgcagctgagcagcctgaccagcgaagatagcgccgtgtacttctgtgcccggtccatcacaacagtcgtgggctgcgctatggactattggggccagggaacaagcgtgaccgtgtctagtacgcgtgagcagaaactgatctcggaagaggatctggggagcggcatccagaaccctgatcctgccgtgtaccagctgcgggatagcaagagcagcgacaagagcgtgtgtctgttcaccgacttcgacagccagaccaacgtgtcccagagcaaggactccgacgtgtacatcaccgataagaccgtgctggacatgcggagcatggacttcaagagcaactccgccgtggcctggtccaacaagtccgatttcgcctgcgccaacgccttcaacaacagcattatccccgaggacacattcttcccaagccccgagagcagctgcggtacccagagttttgggttgttggaccctaaattgtgctatctgttggacggaatcctgttcatttacggagtgatcctgaccgcattgttcctgaagagaggccggaagaagctgctgtacatcttcaagcagcctttcatgcggcccgtgcagaccacccaggaagaggacggctgctcctgccggttccccgaggaagaagaaggcggctgcgagctgcgggttaagttttccagatccgcagacgcacccgcttaccaacaagggcagaaccaactctacaatgaacttaatttggggcggagggaagagtacgacgttctggacaaaaggaggggacgagatcccgagatgggcggaaagcctcgaaggaagaatccgcaagaggggctttataacgaactccagaaagataaaatggcagaagcctatagtgagattgggatgaagggagaaaggaggaggggtaaaggtcacgatgggttgtaccaaggattgagcacagccactaaagatacctatgatgcgctccacatgcaggccctgccgccaaga

SEQ ID NO: 3178 - DNA, 2466 bp, synthetic construct
  source 1..2466: mol_type = other DNA
atggccttaccagtgaccgccttgctcctgccgctggccttgctgctccacgccgccaggccggacatccagatgacacagagccctagcagcctgtctgccagcgtgggagacagagtgaccatcacatgcaaggccagcgaccacatcaacaactggctggcctggtatcagcagaagcctggacaggcccctaagctgctgatctacggcgctaccacactggaaacaggcgtgcccagcagattttctggcagcggctctggcaccgactacaccctgacaatatccagcctccagcctgaggacttcgccacctactactgtcagcagagctggaacaccccttggacattcggccagggcaccaagctggaaatcaagagactcgagcagagcttcggcctgctggaccccaagctgtgctacctgctggatggcatcctgttcatctacggcgtgatcctgaccgccctgttcctgagagtgaagttcagcagaagcgccgacgcccctgcctaccagcagggacagaaccaactgtacaacgagctgaacctgggcagacgggaagagtacgacgtgctggacaagcggagaggcagggaccctgagatgggcggaaagccccggagaaagaacccccaggaaggactgtataacgaactccagaaagacaagatggccgaagcctacagcgagatcggcatgaagggcgagcggagaagaggcaagggccacgatggcctgtaccagggcctgagcaccgccaccaaggacacctatgacgccctgcacatgcaggccctgcctccaagaagggccaagcgatctggatctggagcaacaaacttctcactactcaaacaagcaggtgacgtggaggagaatcccgggcctactagtatggactggatttggcgcatccttttccttgtcggcgctgctaccggcgcgcattccttcgaacaagttcagcttcaacagcctggcgctgagctggtcaaacctggcgcttctgtgaagatgagctgcaaagccagcggctacgccttcagcagctactggatcaactggatgaagcagaaacccggccagggactcgaatggatcggccaaatctatcccggcgacggcgacaccaactacaacggcaagttcaagggcagagccacactgaccgccgatacctctagcagcacagcctacatgcagctgagcagcctgaccagcgaagatagcgccgtgtacttctgtgcccggtccatcacaacagtcgtgggctgcgctatggactattggggccagggaacaagcgtgaccgtgtctagtacgcgtcagagttttgggttgttggaccctaaattgtgctatctgttggacggaatcctgttcatttacggagtgatcctgaccgcattgttcctgcgggttaagttttccagatccgcagacgcacccgcttaccaacaagggcagaaccaactctacaatgaacttaatttggggcggagggaagagtacgacgttctggacaaaaggaggggacgagatcccgagatgggcggaaagcctcgaaggaagaatccgcaagaggggctttataacgaactccagaaagataaaatggcagaagcctatagtgagattgggatgaagggagaaaggaggaggggtaaaggtcacgatgggttgtaccaaggattgagcacagccactaaagatacctatgatgcgctccacatgcaggccctgccgccaagacgcgccaagagaagcggatctggcgtgaagcagaccctgaatttcgacctgctgaagctggctggcgacgtggaatccaacccaggcccttctagaggccatatgaccgagtacaagcccacggtgcgcctcgccacccgcgacgacgtccccagggccgtacgcaccctcgccgccgcgttcgccgactaccccgccacgcgccacaccgtcgatccggaccgccacatcgagcgggtcaccgagctgcaagaactcttcctcacgcgcgtcgggctcgacatcggcaaggtgtgggtcgcggacgacggcgccgcggtggcggtctggaccacgccggagagcgtcgaagcgggggcggtgttcgccgagatcggcccgcgcatggccgagttgagcggttcccggctggccgcgcagcaacagatggaaggcctcctggcgccgcaccggcccaaggagcccgcgtggttcctggccaccgtcggcgtctcgcccgaccaccagggcaagggtctgggcagcgccgtcgtgctccccggagtggaggcggccgagcgcgccggggtgcccgccttcctggagacctccgcgccccgcaacctccccttctacgagcggctcggcttcaccgtcaccgccgacgtcgaggtgcccgaaggaccgcgcacctggtgcatgacccgcaagcccggtgcctga

SEQ ID NO: 3179 - DNA, 2949 bp, synthetic construct
  source 1..2949: mol_type = other DNA
atggccttaccagtgaccgccttgctcctgccgctggccttgctgctccacgccgccaggccggacatccagatgacacagagccctagcagcctgtctgccagcgtgggagacagagtgaccatcacatgcaaggccagcgaccacatcaacaactggctggcctggtatcagcagaagcctggacaggcccctaagctgctgatctacggcgctaccacactggaaacaggcgtgcccagcagattttctggcagcggctctggcaccgactacaccctgacaatatccagcctccagcctgaggacttcgccacctactactgtcagcagagctggaacaccccttggacattcggccagggcaccaagctggaaatcaagagactcgagggacagcctaaggccaatcctaccgtgacactgttccctccaagcagcgaagaactccaggccaacaaggccacacttgtgtgcctgatctccgacttctaccctggggctgtgacagtggcttggaaggccgatggatctcctgtgaaagccggcgtggaaaccaccaagccatccaagcagagcaacaacaaatacgccgccagctcctacctgagcctgacacctgagcagtggaagtcccacagatcctacagctgccaagtgacccacgaaggcagcaccgtggaaaagacagtggcccctacagagtgcagcggatcccagagcttcggcctgctggaccccaagctgtgctacctgctggatggcatcctgttcatctacggcgtgatcctgaccgccctgttcctgagagtgaagttcagcagaagcgccgacgcccctgcctaccagcagggacagaaccaactgtacaacgagctgaacctgggcagacgggaagagtacgacgtgctggacaagcggagaggcagggaccctgagatgggcggaaagccccggagaaagaacccccaggaaggactgtataacgaactccagaaagacaagatggccgaagcctacagcgagatcggcatgaagggcgagcggagaagaggcaagggccacgatggcctgtaccagggcctgagcaccgccaccaaggacacctatgacgccctgcacatgcaggccctgcctccaagaagggccaagcgatctggatctggagcaacaaacttctcactactcaaacaagcaggtgacgtggaggagaatcccgggcctactagtatggactggatttggcgcatccttttccttgtcggcgctgctaccggcgcgcattccttcgaacaagttcagcttcaacagcctggcgctgagctggtcaaacctggcgcttctgtgaagatgagctgcaaagccagcggctacgccttcagcagctactggatcaactggatgaagcagaaacccggccagggactcgaatggatcggccaaatctatcccggcgacggcgacaccaactacaacggcaagttcaagggcagagccacactgaccgccgatacctctagcagcacagcctacatgcagctgagcagcctgaccagcgaagatagcgccgtgtacttctgtgcccggtccatcacaacagtcgtgggctgcgctatggactattggggccagggaacaagcgtgaccgtgtctagtacgcgtgcctctacaaagggaccctccgtgtttcctctggctcccagcagcaagtctacaagcggaggaacagccgctctgggctgcctggtcaaggattactttcccgagcctgtgaccgtgtcctggaatagcggagcactgacaagcggcgtgcacacctttccagccgtgctgcaaagcagcggcctgtactctctgagcagcgtggtcacagtgcctagctctagcctgggcacccagacctacatctgcaatgtgaaccacaagcctagcaacaccaaggtggacaagagagtggaacccaagagctgtggtaccggcgacatcgagaacaccagtctggcccctgaggaccctacctttcctgccgatacctggggcacctacctgctgaccacagagacaggactccagaaagatcacgccctgtgggaccacacagcccagaacctgctgagaatgggcctcgcctttctggtgctggttgccctcgtgtggttcctggtggaagattggctgagccggaagcggacaagagagagagccagcagagcctctacctgggagggaagaagaaggctgaacacccagacacttagggccaagcgatctggatctggagcaacaaacttctcactactcaaacaagcaggtgacgtggaggagaatcccgggccttctagaggccatatgaccgagtacaagcccacggtgcgcctcgccacccgcgacgacgtccccagggccgtacgcaccctcgccgccgcgttcgccgactaccccgccacgcgccacaccgtcgatccggaccgccacatcgagcgggtcaccgagctgcaagaactcttcctcacgcgcgtcgggctcgacatcggcaaggtgtgggtcgcggacgacggcgccgcggtggcggtctggaccacgccggagagcgtcgaagcgggggcggtgttcgccgagatcggcccgcgcatggccgagttgagcggttcccggctggccgcgcagcaacagatggaaggcctcctggcgccgcaccggcccaaggagcccgcgtggttcctggccaccgtcggcgtctcgcccgaccaccagggcaagggtctgggcagcgccgtcgtgctccccggagtggaggcggccgagcgcgccggggtgcccgccttcctggagacctccgcgccccgcaacctccccttctacgagcggctcggcttcaccgtcaccgccgacgtcgaggtgcccgaaggaccgcgcacctggtgcatgacccgcaagcccggtgcctga

SEQ ID NO: 3180 - DNA, 3147 bp, synthetic construct
  source 1..3147: mol_type = other DNA
atggccttaccagtgaccgccttgctcctgccgctggccttgctgctccacgccgccaggccggacatccagatgacacagagccctagcagcctgtctgccagcgtgggagacagagtgaccatcacatgcaaggccagcgaccacatcaacaactggctggcctggtatcagcagaagcctggacaggcccctaagctgctgatctacggcgctaccacactggaaacaggcgtgcccagcagattttctggcagcggctctggcaccgactacaccctgacaatatccagcctccagcctgaggacttcgccacctactactgtcagcagagctggaacaccccttggacattcggccagggcaccaagctggaaatcaagagactcgagggacagcctaaggccaatcctaccgtgacactgttccctccaagcagcgaagaactccaggccaacaaggccacacttgtgtgcctgatctccgacttctaccctggggctgtgacagtggcttggaaggccgatggatctcctgtgaaagccggcgtggaaaccaccaagccatccaagcagagcaacaacaaatacgccgccagctcctacctgagcctgacacctgagcagtggaagtcccacagatcctacagctgccaagtgacccacgaaggcagcaccgtggaaaagacagtggcccctacagagtgcagcggatcccagagcttcggcctgctggaccccaagctgtgctacctgctggatggcatcctgttcatctacggcgtgatcctgaccgccctgttcctgagagtgaagttcagcagaagcgccgacgcccctgcctaccagcagggacagaaccaactgtacaacgagctgaacctgggcagacgggaagagtacgacgtgctggacaagcggagaggcagggaccctgagatgggcggaaagccccggagaaagaacccccaggaaggactgtataacgaactccagaaagacaagatggccgaagcctacagcgagatcggcatgaagggcgagcggagaagaggcaagggccacgatggcctgtaccagggcctgagcaccgccaccaaggacacctatgacgccctgcacatgcaggccctgcctccaagaagggccaagcgatctggatctggagcaacaaacttctcactactcaaacaagcaggtgacgtggaggagaatcccgggcctactagtatggactggatttggcgcatccttttccttgtcggcgctgctaccggcgcgcattccttcgaacaagttcagcttcaacagcctggcgctgagctggtcaaacctggcgcttctgtgaagatgagctgcaaagccagcggctacgccttcagcagctactggatcaactggatgaagcagaaacccggccagggactcgaatggatcggccaaatctatcccggcgacggcgacaccaactacaacggcaagttcaagggcagagccacactgaccgccgatacctctagcagcacagcctacatgcagctgagcagcctgaccagcgaagatagcgccgtgtacttctgtgcccggtccatcacaacagtcgtgggctgcgctatggactattggggccagggaacaagcgtgaccgtgtctagtacgcgtgcctctacaaagggaccctccgtgtttcctctggctcccagcagcaagtctacaagcggaggaacagccgctctgggctgcctggtcaaggattactttcccgagcctgtgaccgtgtcctggaatagcggagcactgacaagcggcgtgcacacctttccagccgtgctgcaaagcagcggcctgtactctctgagcagcgtggtcacagtgcctagctctagcctgggcacccagacctacatctgcaatgtgaaccacaagcctagcaacaccaaggtggacaagagagtggaacccaagagctgtggtaccaagtctgtgcgcttttacctggtcgtcagccctgccagtgcctccactcagacatcttggaccccaagggaccttgtgtcctctcagacacagacacagtcctgcgtgccaccaactgctggcgcaagacaggctccagagtctcccagcacaatccccgtcccttctcagccccagaactccacacttaggccaggaccagctgctccaatcgcactggtcccagtgttctgcggactgctggttgccaagtctctggtgctgagcgcactcctcgtttggtggggcgatatttggtggaaaacgatgatggaattgagatccctcgatacgcagaaagccacatgccaccttcagcaagtcacagacttgccttggaccagcgtcagctctcccgtggaacgggaaattctgtatcatacagtggcccgcaccaagatttccgacgatgacgacgagcacacactgcgcgccaagagaagcggatctggcgtgaagcagaccctgaatttcgacctgctgaagctggctggcgacgtggaatccaacccaggcccttctagaggccatatgaccgagtacaagcccacggtgcgcctcgccacccgcgacgacgtccccagggccgtacgcaccctcgccgccgcgttcgccgactaccccgccacgcgccacaccgtcgatccggaccgccacatcgagcgggtcaccgagctgcaagaactcttcctcacgcgcgtcgggctcgacatcggcaaggtgtgggtcgcggacgacggcgccgcggtggcggtctggaccacgccggagagcgtcgaagcgggggcggtgttcgccgagatcggcccgcgcatggccgagttgagcggttcccggctggccgcgcagcaacagatggaaggcctcctggcgccgcaccggcccaaggagcccgcgtggttcctggccaccgtcggcgtctcgcccgaccaccagggcaagggtctgggcagcgccgtcgtgctccccggagtggaggcggccgagcgcgccggggtgcccgccttcctggagacctccgcgccccgcaacctccccttctacgagcggctcggcttcaccgtcaccgccgacgtcgaggtgcccgaaggaccgcgcacctggtgcatgacccgcaagcccggtgcctga

SEQ ID NO: 3181 - DNA, 2907 bp, synthetic construct
  source 1..2907: mol_type = other DNA
atggccttaccagtgaccgccttgctcctgccgctggccttgctgctccacgccgccaggccggacatccagatgacacagagccctagcagcctgtctgccagcgtgggagacagagtgaccatcacatgcaaggccagcgaccacatcaacaactggctggcctggtatcagcagaagcctggacaggcccctaagctgctgatctacggcgctaccacactggaaacaggcgtgcccagcagattttctggcagcggctctggcaccgactacaccctgacaatatccagcctccagcctgaggacttcgccacctactactgtcagcagagctggaacaccccttggacattcggccagggcaccaagctggaaatcaagagactcgagggacagcctaaggccaatcctaccgtgacactgttccctccaagcagcgaagaactccaggccaacaaggccacacttgtgtgcctgatctccgacttctaccctggggctgtgacagtggcttggaaggccgatggatctcctgtgaaagccggcgtggaaaccaccaagccatccaagcagagcaacaacaaatacgccgccagctcctacctgagcctgacacctgagcagtggaagtcccacagatcctacagctgccaagtgacccacgaaggcagcaccgtggaaaagacagtggcccctacagagtgcagcggatcccagagcttcggcctgctggaccccaagctgtgctacctgctggatggcatcctgttcatctacggcgtgatcctgaccgccctgttcctgagagtgaagttcagcagaagcgccgacgcccctgcctaccagcagggacagaaccaactgtacaacgagctgaacctgggcagacgggaagagtacgacgtgctggacaagcggagaggcagggaccctgagatgggcggaaagccccggagaaagaacccccaggaaggactgtataacgaactccagaaagacaagatggccgaagcctacagcgagatcggcatgaagggcgagcggagaagaggcaagggccacgatggcctgtaccagggcctgagcaccgccaccaaggacacctatgacgccctgcacatgcaggccctgcctccaagaagggccaagcgatctggatctggagcaacaaacttctcactactcaaacaagcaggtgacgtggaggagaatcccgggcctactagtatggactggatttggcgcatccttttccttgtcggcgctgctaccggcgcgcattccttcgaacaagttcagcttcaacagcctggcgctgagctggtcaaacctggcgcttctgtgaagatgagctgcaaagccagcggctacgccttcagcagctactggatcaactggatgaagcagaaacccggccagggactcgaatggatcggccaaatctatcccggcgacggcgacaccaactacaacggcaagttcaagggcagagccacactgaccgccgatacctctagcagcacagcctacatgcagctgagcagcctgaccagcgaagatagcgccgtgtacttctgtgcccggtccatcacaacagtcgtgggctgcgctatggactattggggccagggaacaagcgtgaccgtgtctagtacgcgtgcctctacaaagggaccctccgtgtttcctctggctcccagcagcaagtctacaagcggaggaacagccgctctgggctgcctggtcaaggattactttcccgagcctgtgaccgtgtcctggaatagcggagcactgacaagcggcgtgcacacctttccagccgtgctgcaaagcagcggcctgtactctctgagcagcgtggtcacagtgcctagctctagcctgggcacccagacctacatctgcaatgtgaaccacaagcctagcaacaccaaggtggacaagagagtggaacccaagagctgtggtaccgtggtcgagaaagaacatccacagcttggcgctggcaccgtcctgttgcttagagccggattctatgccgtcagcttcctgtccgtggctgtggggtctacagtgtattaccagggaaaatgtctcacctggaaaggccccagacgccagcttccagctgttgttcctgctccactgccaccaccttgtggctcctctgctcacttgcttccaccagtgcctggcggacgcgccaagagaagcggatctggcgtgaagcagaccctgaatttcgacctgctgaagctggctggcgacgtggaatccaacccaggcccttctagaggccatatgaccgagtacaagcccacggtgcgcctcgccacccgcgacgacgtccccagggccgtacgcaccctcgccgccgcgttcgccgactaccccgccacgcgccacaccgtcgatccggaccgccacatcgagcgggtcaccgagctgcaagaactcttcctcacgcgcgtcgggctcgacatcggcaaggtgtgggtcgcggacgacggcgccgcggtggcggtctggaccacgccggagagcgtcgaagcgggggcggtgttcgccgagatcggcccgcgcatggccgagttgagcggttcccggctggccgcgcagcaacagatggaaggcctcctggcgccgcaccggcccaaggagcccgcgtggttcctggccaccgtcggcgtctcgcccgaccaccagggcaagggtctgggcagcgccgtcgtgctccccggagtggaggcggccgagcgcgccggggtgcccgccttcctggagacctccgcgccccgcaacctccccttctacgagcggctcggcttcaccgtcaccgccgacgtcgaggtgcccgaaggaccgcgcacctggtgcatgacccgcaagcccggtgcctga

SEQ ID NO: 3182 - DNA, 2994 bp, synthetic construct
  source 1..2994: mol_type = other DNA
atggccttaccagtgaccgccttgctcctgccgctggccttgctgctccacgccgccaggccggacatccagatgacacagagccctagcagcctgtctgccagcgtgggagacagagtgaccatcacatgcaaggccagcgaccacatcaacaactggctggcctggtatcagcagaagcctggacaggcccctaagctgctgatctacggcgctaccacactggaaacaggcgtgcccagcagattttctggcagcggctctggcaccgactacaccctgacaatatccagcctccagcctgaggacttcgccacctactactgtcagcagagctggaacaccccttggacattcggccagggcaccaagctggaaatcaagagactcgaggacctgaagaacgtgttcccacctgaggtggccgtgttcgagcctagcgaggccgagatcagccacacccagaaagccaccctcgtgtgcctggctaccggcttctaccccgaccatgtggaactgtcttggtgggtcaacggcaaagaggtgcacagcggcgtgtctaccgacccccagccactgaaagaacagcccgccctgaacgacagccggtactgcctgagcagcagactgagagtgtccgccaccttctggcagaacccccggaaccacttcagatgccaggtgcagttctacggcctgagcgagaacgacgagtggacccaggacagagccaagcccgtgacccagatcgtgtctgccgaagcctggggcagagccgattgcggatcccagagcttcggcctgctggaccccaagctgtgctacctgctggatggcatcctgttcatctacggcgtgatcctgaccgccctgttcctgagagtgaagttcagcagaagcgccgacgcccctgcctaccagcagggacagaaccaactgtacaacgagctgaacctgggcagacgggaagagtacgacgtgctggacaagcggagaggcagggaccctgagatgggcggaaagccccggagaaagaacccccaggaaggactgtataacgaactccagaaagacaagatggccgaagcctacagcgagatcggcatgaagggcgagcggagaagaggcaagggccacgatggcctgtaccagggcctgagcaccgccaccaaggacacctatgacgccctgcacatgcaggccctgcctccaagaagggccaagcgatctggatctggagcaacaaacttctcactactcaaacaagcaggtgacgtggaggagaatcccgggcctactagtatggactggatttggcgcatccttttccttgtcggcgctgctaccggcgcgcattccttcgaacaagttcagcttcaacagcctggcgctgagctggtcaaacctggcgcttctgtgaagatgagctgcaaagccagcggctacgccttcagcagctactggatcaactggatgaagcagaaacccggccagggactcgaatggatcggccaaatctatcccggcgacggcgacaccaactacaacggcaagttcaagggcagagccacactgaccgccgatacctctagcagcacagcctacatgcagctgagcagcctgaccagcgaagatagcgccgtgtacttctgtgcccggtccatcacaacagtcgtgggctgcgctatggactattggggccagggaacaagcgtgaccgtgtctagtacgcgtatccagaaccctgatcctgccgtgtaccagctgcgggatagcaagagcagcgacaagagcgtgtgtctgttcaccgacttcgacagccagaccaacgtgtcccagagcaaggactccgacgtgtacatcaccgataagaccgtgctggacatgcggagcatggacttcaagagcaactccgccgtggcctggtccaacaagtccgatttcgcctgcgccaacgccttcaacaacagcattatccccgaggacacattcttcccaagccccgagagcagctgcggtaccggcgacatcgagaacaccagtctggcccctgaggaccctacctttcctgccgatacctggggcacctacctgctgaccacagagacaggactccagaaagatcacgccctgtgggaccacacagcccagaacctgctgagaatgggcctcgcctttctggtgctggttgccctcgtgtggttcctggtggaagattggctgagccggaagcggacaagagagagagccagcagagcctctacctgggagggaagaagaaggctgaacacccagacacttagggccaagcgatctggatctggagcaacaaacttctcactactcaaacaagcaggtgacgtggaggagaatcccgggccttctagaggccatatgaccgagtacaagcccacggtgcgcctcgccacccgcgacgacgtccccagggccgtacgcaccctcgccgccgcgttcgccgactaccccgccacgcgccacaccgtcgatccggaccgccacatcgagcgggtcaccgagctgcaagaactcttcctcacgcgcgtcgggctcgacatcggcaaggtgtgggtcgcggacgacggcgccgcggtggcggtctggaccacgccggagagcgtcgaagcgggggcggtgttcgccgagatcggcccgcgcatggccgagttgagcggttcccggctggccgcgcagcaacagatggaaggcctcctggcgccgcaccggcccaaggagcccgcgtggttcctggccaccgtcggcgtctcgcccgaccaccagggcaagggtctgggcagcgccgtcgtgctccccggagtggaggcggccgagcgcgccggggtgcccgccttcctggagacctccgcgccccgcaacctccccttctacgagcggctcggcttcaccgtcaccgccgacgtcgaggtgcccgaaggaccgcgcacctggtgcatgacccgcaagcccggtgcctga

SEQ ID NO: 3183 - DNA, 3192 bp, synthetic construct
  source 1..3192: mol_type = other DNA
atggccttaccagtgaccgccttgctcctgccgctggccttgctgctccacgccgccaggccggacatccagatgacacagagccctagcagcctgtctgccagcgtgggagacagagtgaccatcacatgcaaggccagcgaccacatcaacaactggctggcctggtatcagcagaagcctggacaggcccctaagctgctgatctacggcgctaccacactggaaacaggcgtgcccagcagattttctggcagcggctctggcaccgactacaccctgacaatatccagcctccagcctgaggacttcgccacctactactgtcagcagagctggaacaccccttggacattcggccagggcaccaagctggaaatcaagagactcgaggacctgaagaacgtgttcccacctgaggtggccgtgttcgagcctagcgaggccgagatcagccacacccagaaagccaccctcgtgtgcctggctaccggcttctaccccgaccatgtggaactgtcttggtgggtcaacggcaaagaggtgcacagcggcgtgtctaccgacccccagccactgaaagaacagcccgccctgaacgacagccggtactgcctgagcagcagactgagagtgtccgccaccttctggcagaacccccggaaccacttcagatgccaggtgcagttctacggcctgagcgagaacgacgagtggacccaggacagagccaagcccgtgacccagatcgtgtctgccgaagcctggggcagagccgattgcggatcccagagcttcggcctgctggaccccaagctgtgctacctgctggatggcatcctgttcatctacggcgtgatcctgaccgccctgttcctgagagtgaagttcagcagaagcgccgacgcccctgcctaccagcagggacagaaccaactgtacaacgagctgaacctgggcagacgggaagagtacgacgtgctggacaagcggagaggcagggaccctgagatgggcggaaagccccggagaaagaacccccaggaaggactgtataacgaactccagaaagacaagatggccgaagcctacagcgagatcggcatgaagggcgagcggagaagaggcaagggccacgatggcctgtaccagggcctgagcaccgccaccaaggacacctatgacgccctgcacatgcaggccctgcctccaagaagggccaagcgatctggatctggagcaacaaacttctcactactcaaacaagcaggtgacgtggaggagaatcccgggcctactagtatggactggatttggcgcatccttttccttgtcggcgctgctaccggcgcgcattccttcgaacaagttcagcttcaacagcctggcgctgagctggtcaaacctggcgcttctgtgaagatgagctgcaaagccagcggctacgccttcagcagctactggatcaactggatgaagcagaaacccggccagggactcgaatggatcggccaaatctatcccggcgacggcgacaccaactacaacggcaagttcaagggcagagccacactgaccgccgatacctctagcagcacagcctacatgcagctgagcagcctgaccagcgaagatagcgccgtgtacttctgtgcccggtccatcacaacagtcgtgggctgcgctatggactattggggccagggaacaagcgtgaccgtgtctagtacgcgtatccagaaccctgatcctgccgtgtaccagctgcgggatagcaagagcagcgacaagagcgtgtgtctgttcaccgacttcgacagccagaccaacgtgtcccagagcaaggactccgacgtgtacatcaccgataagaccgtgctggacatgcggagcatggacttcaagagcaactccgccgtggcctggtccaacaagtccgatttcgcctgcgccaacgccttcaacaacagcattatccccgaggacacattcttcccaagccccgagagcagctgcggtaccaagtctgtgcgcttttacctggtcgtcagccctgccagtgcctccactcagacatcttggaccccaagggaccttgtgtcctctcagacacagacacagtcctgcgtgccaccaactgctggcgcaagacaggctccagagtctcccagcacaatccccgtcccttctcagccccagaactccacacttaggccaggaccagctgctccaatcgcactggtcccagtgttctgcggactgctggttgccaagtctctggtgctgagcgcactcctcgtttggtggggcgatatttggtggaaaacgatgatggaattgagatccctcgatacgcagaaagccacatgccaccttcagcaagtcacagacttgccttggaccagcgtcagctctcccgtggaacgggaaattctgtatcatacagtggcccgcaccaagatttccgacgatgacgacgagcacacactgcgcgccaagagaagcggatctggcgtgaagcagaccctgaatttcgacctgctgaagctggctggcgacgtggaatccaacccaggcccttctagaggccatatgaccgagtacaagcccacggtgcgcctcgccacccgcgacgacgtccccagggccgtacgcaccctcgccgccgcgttcgccgactaccccgccacgcgccacaccgtcgatccggaccgccacatcgagcgggtcaccgagctgcaagaactcttcctcacgcgcgtcgggctcgacatcggcaaggtgtgggtcgcggacgacggcgccgcggtggcggtctggaccacgccggagagcgtcgaagcgggggcggtgttcgccgagatcggcccgcgcatggccgagttgagcggttcccggctggccgcgcagcaacagatggaaggcctcctggcgccgcaccggcccaaggagcccgcgtggttcctggccaccgtcggcgtctcgcccgaccaccagggcaagggtctgggcagcgccgtcgtgctccccggagtggaggcggccgagcgcgccggggtgcccgccttcctggagacctccgcgccccgcaacctccccttctacgagcggctcggcttcaccgtcaccgccgacgtcgaggtgcccgaaggaccgcgcacctggtgcatgacccgcaagcccggtgcctga

SEQ ID NO: 3184 - DNA, 2952 bp, synthetic construct
  source 1..2952: mol_type = other DNA
atggccttaccagtgaccgccttgctcctgccgctggccttgctgctccacgccgccaggccggacatccagatgacacagagccctagcagcctgtctgccagcgtgggagacagagtgaccatcacatgcaaggccagcgaccacatcaacaactggctggcctggtatcagcagaagcctggacaggcccctaagctgctgatctacggcgctaccacactggaaacaggcgtgcccagcagattttctggcagcggctctggcaccgactacaccctgacaatatccagcctccagcctgaggacttcgccacctactactgtcagcagagctggaacaccccttggacattcggccagggcaccaagctggaaatcaagagactcgaggacctgaagaacgtgttcccacctgaggtggccgtgttcgagcctagcgaggccgagatcagccacacccagaaagccaccctcgtgtgcctggctaccggcttctaccccgaccatgtggaactgtcttggtgggtcaacggcaaagaggtgcacagcggcgtgtctaccgacccccagccactgaaagaacagcccgccctgaacgacagccggtactgcctgagcagcagactgagagtgtccgccaccttctggcagaacccccggaaccacttcagatgccaggtgcagttctacggcctgagcgagaacgacgagtggacccaggacagagccaagcccgtgacccagatcgtgtctgccgaagcctggggcagagccgattgcggatcccagagcttcggcctgctggaccccaagctgtgctacctgctggatggcatcctgttcatctacggcgtgatcctgaccgccctgttcctgagagtgaagttcagcagaagcgccgacgcccctgcctaccagcagggacagaaccaactgtacaacgagctgaacctgggcagacgggaagagtacgacgtgctggacaagcggagaggcagggaccctgagatgggcggaaagccccggagaaagaacccccaggaaggactgtataacgaactccagaaagacaagatggccgaagcctacagcgagatcggcatgaagggcgagcggagaagaggcaagggccacgatggcctgtaccagggcctgagcaccgccaccaaggacacctatgacgccctgcacatgcaggccctgcctccaagaagggccaagcgatctggatctggagcaacaaacttctcactactcaaacaagcaggtgacgtggaggagaatcccgggcctactagtatggactggatttggcgcatccttttccttgtcggcgctgctaccggcgcgcattccttcgaacaagttcagcttcaacagcctggcgctgagctggtcaaacctggcgcttctgtgaagatgagctgcaaagccagcggctacgccttcagcagctactggatcaactggatgaagcagaaacccggccagggactcgaatggatcggccaaatctatcccggcgacggcgacaccaactacaacggcaagttcaagggcagagccacactgaccgccgatacctctagcagcacagcctacatgcagctgagcagcctgaccagcgaagatagcgccgtgtacttctgtgcccggtccatcacaacagtcgtgggctgcgctatggactattggggccagggaacaagcgtgaccgtgtctagtacgcgtatccagaaccctgatcctgccgtgtaccagctgcgggatagcaagagcagcgacaagagcgtgtgtctgttcaccgacttcgacagccagaccaacgtgtcccagagcaaggactccgacgtgtacatcaccgataagaccgtgctggacatgcggagcatggacttcaagagcaactccgccgtggcctggtccaacaagtccgatttcgcctgcgccaacgccttcaacaacagcattatccccgaggacacattcttcccaagccccgagagcagctgcggtaccgtggtcgagaaagaacatccacagcttggcgctggcaccgtcctgttgcttagagccggattctatgccgtcagcttcctgtccgtggctgtggggtctacagtgtattaccagggaaaatgtctcacctggaaaggccccagacgccagcttccagctgttgttcctgctccactgccaccaccttgtggctcctctgctcacttgcttccaccagtgcctggcggacgcgccaagagaagcggatctggcgtgaagcagaccctgaatttcgacctgctgaagctggctggcgacgtggaatccaacccaggcccttctagaggccatatgaccgagtacaagcccacggtgcgcctcgccacccgcgacgacgtccccagggccgtacgcaccctcgccgccgcgttcgccgactaccccgccacgcgccacaccgtcgatccggaccgccacatcgagcgggtcaccgagctgcaagaactcttcctcacgcgcgtcgggctcgacatcggcaaggtgtgggtcgcggacgacggcgccgcggtggcggtctggaccacgccggagagcgtcgaagcgggggcggtgttcgccgagatcggcccgcgcatggccgagttgagcggttcccggctggccgcgcagcaacagatggaaggcctcctggcgccgcaccggcccaaggagcccgcgtggttcctggccaccgtcggcgtctcgcccgaccaccagggcaagggtctgggcagcgccgtcgtgctccccggagtggaggcggccgagcgcgccggggtgcccgccttcctggagacctccgcgccccgcaacctccccttctacgagcggctcggcttcaccgtcaccgccgacgtcgaggtgcccgaaggaccgcgcacctggtgcatgacccgcaagcccggtgcctga

SEQ ID NO: 3185 - DNA, 2865 bp, synthetic construct
  source 1..2865: mol_type = other DNA
atggccttaccagtgaccgccttgctcctgccgctggccttgctgctccacgccgccaggccggacatccagatgacacagagccctagcagcctgtctgccagcgtgggagacagagtgaccatcacatgcaaggccagcgaccacatcaacaactggctggcctggtatcagcagaagcctggacaggcccctaagctgctgatctacggcgctaccacactggaaacaggcgtgcccagcagattttctggcagcggctctggcaccgactacaccctgacaatatccagcctccagcctgaggacttcgccacctactactgtcagcagagctggaacaccccttggacattcggccagggcaccaagctggaaatcaagagactcgagggacagcctaaggccaatcctaccgtgacactgttccctccaagcagcgaagaactccaggccaacaaggccacacttgtgtgcctgatctccgacttctaccctggggctgtgacagtggcttggaaggccgatggatctcctgtgaaagccggcgtggaaaccaccaagccatccaagcagagcaacaacaaatacgccgccagctcctacctgagcctgacacctgagcagtggaagtcccacagatcctacagctgccaagtgacccacgaaggcagcaccgtggaaaagacagtggcccctacagagtgcagcggatcccagagcttcggcctgctggaccccaagctgtgctacctgctggatggcatcctgttcatctacggcgtgatcctgaccgccctgttcctgagagtgaagttcagcagaagcgccgacgcccctgcctaccagcagggacagaaccaactgtacaacgagctgaacctgggcagacgggaagagtacgacgtgctggacaagcggagaggcagggaccctgagatgggcggaaagccccggagaaagaacccccaggaaggactgtataacgaactccagaaagacaagatggccgaagcctacagcgagatcggcatgaagggcgagcggagaagaggcaagggccacgatggcctgtaccagggcctgagcaccgccaccaaggacacctatgacgccctgcacatgcaggccctgcctccaagaagggccaagcgatctggatctggagcaacaaacttctcactactcaaacaagcaggtgacgtggaggagaatcccgggcctactagtatggactggatttggcgcatccttttccttgtcggcgctgctaccggcgcgcattccttcgaacaagttcagcttcaacagcctggcgctgagctggtcaaacctggcgcttctgtgaagatgagctgcaaagccagcggctacgccttcagcagctactggatcaactggatgaagcagaaacccggccagggactcgaatggatcggccaaatctatcccggcgacggcgacaccaactacaacggcaagttcaagggcagagccacactgaccgccgatacctctagcagcacagcctacatgcagctgagcagcctgaccagcgaagatagcgccgtgtacttctgtgcccggtccatcacaacagtcgtgggctgcgctatggactattggggccagggaacaagcgtgaccgtgtctagtacgcgtgcctctacaaagggaccctccgtgtttcctctggctcccagcagcaagtctacaagcggaggaacagccgctctgggctgcctggtcaaggattactttcccgagcctgtgaccgtgtcctggaatagcggagcactgacaagcggcgtgcacacctttccagccgtgctgcaaagcagcggcctgtactctctgagcagcgtggtcacagtgcctagctctagcctgggcacccagacctacatctgcaatgtgaaccacaagcctagcaacaccaaggtggacaagagagtggaacccaagagctgtggtaccatcactcaaggtttggcagtgtcaaccatctcatcattctttccacctggctaccaagtgtccttctgcctggtcatggtgctgctgttcgccgtggataccggcctgtacttcagcgtcaagaccaacatccggtccagcaccagagactggaaggaccacaagttcaagtggcggaaggaccctcaggacaagagggccaagcgatctggatctggagcaacaaacttctcactactcaaacaagcaggtgacgtggaggagaatcccgggccttctagaggccatatgaccgagtacaagcccacggtgcgcctcgccacccgcgacgacgtccccagggccgtacgcaccctcgccgccgcgttcgccgactaccccgccacgcgccacaccgtcgatccggaccgccacatcgagcgggtcaccgagctgcaagaactcttcctcacgcgcgtcgggctcgacatcggcaaggtgtgggtcgcggacgacggcgccgcggtggcggtctggaccacgccggagagcgtcgaagcgggggcggtgttcgccgagatcggcccgcgcatggccgagttgagcggttcccggctggccgcgcagcaacagatggaaggcctcctggcgccgcaccggcccaaggagcccgcgtggttcctggccaccgtcggcgtctcgcccgaccaccagggcaagggtctgggcagcgccgtcgtgctccccggagtggaggcggccgagcgcgccggggtgcccgccttcctggagacctccgcgccccgcaacctccccttctacgagcggctcggcttcaccgtcaccgccgacgtcgaggtgcccgaaggaccgcgcacctggtgcatgacccgcaagcccggtgcctga

SEQ ID NO: 3186 - DNA, 2910 bp, synthetic construct
  source 1..2910: mol_type = other DNA
atggccttaccagtgaccgccttgctcctgccgctggccttgctgctccacgccgccaggccggacatccagatgacacagagccctagcagcctgtctgccagcgtgggagacagagtgaccatcacatgcaaggccagcgaccacatcaacaactggctggcctggtatcagcagaagcctggacaggcccctaagctgctgatctacggcgctaccacactggaaacaggcgtgcccagcagattttctggcagcggctctggcaccgactacaccctgacaatatccagcctccagcctgaggacttcgccacctactactgtcagcagagctggaacaccccttggacattcggccagggcaccaagctggaaatcaagagactcgaggacctgaagaacgtgttcccacctgaggtggccgtgttcgagcctagcgaggccgagatcagccacacccagaaagccaccctcgtgtgcctggctaccggcttctaccccgaccatgtggaactgtcttggtgggtcaacggcaaagaggtgcacagcggcgtgtctaccgacccccagccactgaaagaacagcccgccctgaacgacagccggtactgcctgagcagcagactgagagtgtccgccaccttctggcagaacccccggaaccacttcagatgccaggtgcagttctacggcctgagcgagaacgacgagtggacccaggacagagccaagcccgtgacccagatcgtgtctgccgaagcctggggcagagccgattgcggatcccagagcttcggcctgctggaccccaagctgtgctacctgctggatggcatcctgttcatctacggcgtgatcctgaccgccctgttcctgagagtgaagttcagcagaagcgccgacgcccctgcctaccagcagggacagaaccaactgtacaacgagctgaacctgggcagacgggaagagtacgacgtgctggacaagcggagaggcagggaccctgagatgggcggaaagccccggagaaagaacccccaggaaggactgtataacgaactccagaaagacaagatggccgaagcctacagcgagatcggcatgaagggcgagcggagaagaggcaagggccacgatggcctgtaccagggcctgagcaccgccaccaaggacacctatgacgccctgcacatgcaggccctgcctccaagaagggccaagcgatctggatctggagcaacaaacttctcactactcaaacaagcaggtgacgtggaggagaatcccgggcctactagtatggactggatttggcgcatccttttccttgtcggcgctgctaccggcgcgcattccttcgaacaagttcagcttcaacagcctggcgctgagctggtcaaacctggcgcttctgtgaagatgagctgcaaagccagcggctacgccttcagcagctactggatcaactggatgaagcagaaacccggccagggactcgaatggatcggccaaatctatcccggcgacggcgacaccaactacaacggcaagttcaagggcagagccacactgaccgccgatacctctagcagcacagcctacatgcagctgagcagcctgaccagcgaagatagcgccgtgtacttctgtgcccggtccatcacaacagtcgtgggctgcgctatggactattggggccagggaacaagcgtgaccgtgtctagtacgcgtatccagaaccctgatcctgccgtgtaccagctgcgggatagcaagagcagcgacaagagcgtgtgtctgttcaccgacttcgacagccagaccaacgtgtcccagagcaaggactccgacgtgtacatcaccgataagaccgtgctggacatgcggagcatggacttcaagagcaactccgccgtggcctggtccaacaagtccgatttcgcctgcgccaacgccttcaacaacagcattatccccgaggacacattcttcccaagccccgagagcagctgcggtaccatcactcaaggtttggcagtgtcaaccatctcatcattctttccacctggctaccaagtgtccttctgcctggtcatggtgctgctgttcgccgtggataccggcctgtacttcagcgtcaagaccaacatccggtccagcaccagagactggaaggaccacaagttcaagtggcggaaggaccctcaggacaagagggccaagcgatctggatctggagcaacaaacttctcactactcaaacaagcaggtgacgtggaggagaatcccgggccttctagaggccatatgaccgagtacaagcccacggtgcgcctcgccacccgcgacgacgtccccagggccgtacgcaccctcgccgccgcgttcgccgactaccccgccacgcgccacaccgtcgatccggaccgccacatcgagcgggtcaccgagctgcaagaactcttcctcacgcgcgtcgggctcgacatcggcaaggtgtgggtcgcggacgacggcgccgcggtggcggtctggaccacgccggagagcgtcgaagcgggggcggtgttcgccgagatcggcccgcgcatggccgagttgagcggttcccggctggccgcgcagcaacagatggaaggcctcctggcgccgcaccggcccaaggagcccgcgtggttcctggccaccgtcggcgtctcgcccgaccaccagggcaagggtctgggcagcgccgtcgtgctccccggagtggaggcggccgagcgcgccggggtgcccgccttcctggagacctccgcgccccgcaacctccccttctacgagcggctcggcttcaccgtcaccgccgacgtcgaggtgcccgaaggaccgcgcacctggtgcatgacccgcaagcccggtgcctga

SEQ ID NO: 3187 - DNA, 2382 bp, synthetic construct
  source 1..2382: mol_type = other DNA
atggccttaccagtgaccgccttgctcctgccgctggccttgctgctccacgccgccaggccgaatgctggcgtgacccagacacctaagttccaggtgctgaaaaccggccagagcatgaccctgcaatgcgcccaggacatgaaccatgagtacatgagctggtacagacaggaccccggcatgggcctgagactgatccactactctgtggctatccagaccaccgaccagggcgaagtgcccaatggctacaacgtgtccagaagcaccatcgaggacttcccactgagactgctgtctgccgctcctagccagaccagcgtgtacttttgtgccagcagctacctgggcaacaccggcgagctgttttttggcgagggcagcagactgaccgtgggacagcctaaggccaatcctaccgtgacactgttccctccaagcagcgaagaactccaggccaacaaggccacacttgtgtgcctgatctccgacttctaccctggggctgtgacagtggcttggaaggccgatggatctcctgtgaaagccggcgtggaaaccaccaagccatccaagcagagcaacaacaaatacgccgccagctcctacctgagcctgacacctgagcagtggaagtcccacagatcctacagctgccaagtgacccacgaaggcagcaccgtggaaaagacagtggcccctacagagtgcagcggatcccagagcttcggcctgctggaccccaagctgtgctacctgctggatggcatcctgttcatctacggcgtgatcctgaccgccctgttcctgagagtgaagttcagcagaagcgccgacgcccctgcctaccagcagggacagaaccaactgtacaacgagctgaacctgggcagacgggaagagtacgacgtgctggacaagcggagaggcagggaccctgagatgggcggaaagccccggagaaagaacccccaggaaggactgtataacgaactccagaaagacaagatggccgaagcctacagcgagatcggcatgaagggcgagcggagaagaggcaagggccacgatggcctgtaccagggcctgagcaccgccaccaaggacacctatgacgccctgcacatgcaggccctgcctccaagaagggccaagcgatctggatctggagcaacaaacttctcactactcaaacaagcaggtgacgtggaggagaatcccgggcctactagtatggactggatttggcgcatccttttccttgtcggcgctgctaccggcgcgcattccttcgaacaagaagtgacacagatccctgccgctctgtctgtgcctgagggcgaaaacctggtgctgaactgctccttcaccgacagcgccatctacaacctccagtggttcaggcaggaccctggaaagggactgacaagcctgctgctgatccagagcagccagagagagcagacctccggcagactgaatgccagcctggataagagcagcggcaggtctaccctgtatatcgccgcttctcagcctggcgatagcgccacatatctgtgtgctgtgcggcctacaagcggcggcagctacatccctacatttggcagaggcaccagcctgatcgtgcacccttatgcctctacaaagggaccctccgtgtttcctctggctcccagcagcaagtctacaagcggaggaacagccgctctgggctgcctggtcaaggattactttcccgagcctgtgaccgtgtcctggaatagcggagcactgacaagcggcgtgcacacctttccagccgtgctgcaaagcagcggcctgtactctctgagcagcgtggtcacagtgcctagctctagcctgggcacccagacctacatctgcaatgtgaaccacaagcctagcaacaccaaggtggacaagagagtggaacccaagagctgtggtacccagagttttgggttgttggaccctaaattgtgctatctgttggacggaatcctgttcatttacggagtgatcctgaccgcattgttcctgcgggttaagttttccagatccgcagacgcacccgcttaccaacaagggcagaaccaactctacaatgaacttaatttggggcggagggaagagtacgacgttctggacaaaaggaggggacgagatcccgagatgggcggaaagcctcgaaggaagaatccgcaagaggggctttataacgaactccagaaagataaaatggcagaagcctatagtgagattgggatgaagggagaaaggaggaggggtaaaggtcacgatgggttgtaccaaggattgagcacagccactaaagatacctatgatgcgctccacatgcaggccctgccgccaaga

SEQ ID NO: 3188 - DNA, 1680 bp, synthetic construct
  source 1..1680: mol_type = other DNA
atggccttaccagtgaccgccttgctcctgccgctggccttgctgctccacgccgccaggccgaatgctggcgtgacccagacacctaagttccaggtgctgaaaaccggccagagcatgaccctgcaatgcgcccaggacatgaaccatgagtacatgagctggtacagacaggaccccggcatgggcctgagactgatccactactctgtggctatccagaccaccgaccagggcgaagtgcccaatggctacaacgtgtccagaagcaccatcgaggacttcccactgagactgctgtctgccgctcctagccagaccagcgtgtacttttgtgccagcagctacctgggcaacaccggcgagctgttttttggcgagggcagcagactgaccgtgctcgagcagagcttcggcctgctggaccccaagctgtgctacctgctggatggcatcctgttcatctacggcgtgatcctgaccgccctgttcctgagagtgaagttcagcagaagcgccgacgcccctgcctaccagcagggacagaaccaactgtacaacgagctgaacctgggcagacgggaagagtacgacgtgctggacaagcggagaggcagggaccctgagatgggcggaaagccccggagaaagaacccccaggaaggactgtataacgaactccagaaagacaagatggccgaagcctacagcgagatcggcatgaagggcgagcggagaagaggcaagggccacgatggcctgtaccagggcctgagcaccgccaccaaggacacctatgacgccctgcacatgcaggccctgcctccaagaagggccaagcgatctggatctggagcaacaaacttctcactactcaaacaagcaggtgacgtggaggagaatcccgggcctactagtatggactggatttggcgcatccttttccttgtcggcgctgctaccggcgcgcattccttcgaacaagaagtgacacagatccctgccgctctgtctgtgcctgagggcgaaaacctggtgctgaactgctccttcaccgacagcgccatctacaacctccagtggttcaggcaggaccctggaaagggactgacaagcctgctgctgatccagagcagccagagagagcagacctccggcagactgaatgccagcctggataagagcagcggcaggtctaccctgtatatcgccgcttctcagcctggcgatagcgccacatatctgtgtgctgtgcggcctacaagcggcggcagctacatccctacatttggcagaggcaccagcctgatcgtgcacccttatacgcgtcagagttttgggttgttggaccctaaattgtgctatctgttggacggaatcctgttcatttacggagtgatcctgaccgcattgttcctgcgggttaagttttccagatccgcagacgcacccgcttaccaacaagggcagaaccaactctacaatgaacttaatttggggcggagggaagagtacgacgttctggacaaaaggaggggacgagatcccgagatgggcggaaagcctcgaaggaagaatccgcaagaggggctttataacgaactccagaaagataaaatggcagaagcctatagtgagattgggatgaagggagaaaggaggaggggtaaaggtcacgat

SEQ ID NO: 3189 - DNA, 2832 bp, synthetic construct
  source 1..2832: mol_type = other DNA
atggccttaccagtgaccgccttgctcctgccgctggccttgctgctccacgccgccaggccgaatgctggcgtgacccagacacctaagttccaggtgctgaaaaccggccagagcatgaccctgcaatgcgcccaggacatgaaccatgagtacatgagctggtacagacaggaccccggcatgggcctgagactgatccactactctgtggctatccagaccaccgaccagggcgaagtgcccaatggctacaacgtgtccagaagcaccatcgaggacttcccactgagactgctgtctgccgctcctagccagaccagcgtgtacttttgtgccagcagctacctgggcaacaccggcgagctgttttttggcgagggcagcagactgaccgtgctcgagacaacacctggcgagagaagtagcctgcctgccttctatcctggcaccagcggctcttgttctggctgtggatctctgagcctgcctctgctggctggactggttgctgctgatgctgtggcctctctgctgattgtgggagccgtgttcctgtgcgccagacctagaagaagccccgctcaagaggacggcaaggtgtacatcaacatgcccggcagaggaagcactagtagagtgaagttcagcagaagcgccgacgcccctgcctaccagcagggacagaaccaactgtacaacgagctgaacctgggcagacgggaagagtacgacgtgctggacaagcggagaggcagggaccctgagatgggcggaaagccccggagaaagaacccccaggaaggactgtataacgaactccagaaagacaagatggccgaagcctacagcgagatcggcatgaagggcgagcggagaagaggcaagggccacgatggcctgtaccagggcctgagcaccgccaccaaggacacctatgacgccctgcacatgcaggccctgcctccaagaagggccaagcgatctggatctggagcaacaaacttctcactactcaaacaagcaggtgacgtggaggagaatcccgggcctatggactggatttggcgcatccttttccttgtcggcgctgctaccggcgcgcattccttcgaacaagaagtgacacagatccctgccgctctgtctgtgcctgagggcgaaaacctggtgctgaactgctccttcaccgacagcgccatctacaacctccagtggttcaggcaggaccctggaaagggactgacaagcctgctgctgatccagagcagccagagagagcagacctccggcagactgaatgccagcctggataagagcagcggcaggtctaccctgtatatcgccgcttctcagcctggcgatagcgccacatatctgtgtgctgtgcggcctacaagcggcggcagctacatccctacatttggcagaggcaccagcctgatcgtgcacccttatacgcgtacaacgccgggcgaaaggagttccttgccggccttttaccccggcacaagcggaagctgtagtgggtgtggaagcctcagcctcccacttcttgcgggcctcgtcgcggcagatgcagtagcttcacttcttattgtaggcgcggtatttctctgtgctcgaccaaggaggtcacccgctcaggaggatggtaaggtgtatataaatatgccaggacgcggaagctctagacgggttaagttttccagatccgcagacgcacccgcttaccaacaagggcagaaccaactctacaatgaacttaatttggggcggagggaagagtacgacgttctggacaaaaggaggggacgagatcccgagatgggcggaaagcctcgaaggaagaatccgcaagaggggctttataacgaactccagaaagataaaatggcagaagcctatagtgagattgggatgaagggagaaaggaggaggggtaaaggtcacgatgggttgtaccaaggattgagcacagccactaaagatacctatgatgcgctccacatgcaggccctgccgccaagacgcgccaagagaagcggatctggcgtgaagcagaccctgaatttcgacctgctgaagctggctggcgacgtggaatccaacccaggccctggccatatggctctgcctgtgacagctctgctgctgcctctggcactgctgcttcatgctgctagacctagccagtttagagtgtcccctctggacagaacctggaacctgggcgagacagtggaactgaagtgccaggtgctgctgagcaaccctacaagcggctgctcctggctgtttcagcctagaggtgcagccgcctctcctacctttctgctgtacctgagccagaacaagcccaaggccgccgaaggactggacacccagagattcagcggcaagagactgggcgacaccttcgtgctgaccctgagcgacttcagaagagagaacgagggctactacttctgtagcgccctgagcaacagcatcatgtacttcagccacttcgtgcccgtgtttctgcccgccaagcctacaacaacccctgctcctagacctcctacaccagctcctacaatcgccagccagcctctgtctctcagacccgaagcctgtagacctgctgctggcggagctgtgcataccagaggactggatttcgcctgcgacatctacatctgggctcctctggctggcacatgtggcgtgctgctgctgtccctggtcatcaccctgtactgcaaccaccggaacaggcggagagtgtgcaagtgccctagacctgtggtcaagagcggcgacaagcctagcctgagcgccagatatgtt

SEQ ID NO: 3190 - DNA, 2832 bp, synthetic construct; identical to SEQ ID NO: 3189
  source 1..2832: mol_type = other DNA

SEQ ID NO: 3191 - DNA, 3330 bp, synthetic construct
  source 1..3330: mol_type = other DNA
atggccttaccagtgaccgccttgctcctgccgctggccttgctgctccacgccgccaggccgaatgctggcgtgacccagacacctaagttccaggtgctgaaaaccggccagagcatgaccctgcaatgcgcccaggacatgaaccatgagtacatgagctggtacagacaggaccccggcatgggcctgagactgatccactactctgtggctatccagaccaccgaccagggcgaagtgcccaatggctacaacgtgtccagaagcaccatcgaggacttcccactgagactgctgtctgccgctcctagccagaccagcgtgtacttttgtgccagcagctacctgggcaacaccggcgagctgttttttggcgagggcagcagactgaccgtgctcgagggacagcctaaggccaatcctaccgtgacactgttccctccaagcagcgaagaactccaggccaacaaggccacacttgtgtgcctgatctccgacttctaccctggggctgtgacagtggcttggaaggccgatggatctcctgtgaaagccggcgtggaaaccaccaagccatccaagcagagcaacaacaaatacgccgccagctcctacctgagcctgacacctgagcagtggaagtcccacagatcctacagctgccaagtgacccacgaaggcagcaccgtggaaaagacagtggcccctacagagtgcagcggatccacaacacctggcgagagaagtagcctgcctgccttctatcctggcaccagcggctcttgttctggctgtggatctctgagcctgcctctgctggctggactggttgctgctgatgctgtggcctctctgctgattgtgggagccgtgttcctgtgcgccagacctagaagaagccccgctcaagaggacggcaaggtgtacatcaacatgcccggcagaggaagcactagtagagtgaagttcagcagaagcgccgacgcccctgcctaccagcagggacagaaccaactgtacaacgagctgaacctgggcagacgggaagagtacgacgtgctggacaagcggagaggcagggaccctgagatgggcggaaagccccggagaaagaacccccaggaaggactgtataacgaactccagaaagacaagatggccgaagcctacagcgagatcggcatgaagggcgagcggagaagaggcaagggccacgatggcctgtaccagggcctgagcaccgccaccaaggacacctatgacgccctgcacatgcaggccctgcctccaagaagggccaagcgatctggatctggagcaacaaacttctcactactcaaacaagcaggtgacgtggaggagaatcccgggcctatggactggatttggcgcatccttttccttgtcggcgctgctaccggcgcgcattccttcgaacaagaagtgacacagatccctgccgctctgtctgtgcctgagggcgaaaacctggtgctgaactgctccttcaccgacagcgccatctacaacctccagtggttcaggcaggaccctggaaagggactgacaagcctgctgctgatccagagcagccagagagagcagacctccggcagactgaatgccagcctggataagagcagcggcaggtctaccctgtatatcgccgcttctcagcctggcgatagcgccacatatctgtgtgctgtgcggcctacaagcggcggcagctacatccctacatttggcagaggcaccagcctgatcgtgcacccttatacgcgtgcctctacaaagggaccctccgtgtttcctctggctcccagcagcaagtctacaagcggaggaacagccgctctgggctgcctggtcaaggattactttcccgagcctgtgaccgtgtcctggaatagcggagcactgacaagcggcgtgcacacctttccagccgtgctgcaaagcagcggcctgtactctctgagcagcgtggtcacagtgcctagctctagcctgggcacccagacctacatctgcaatgtgaaccacaagcctagcaacaccaaggtggacaagagagtggaacccaagagctgtggtaccacaacgccgggcgaaaggagttccttgccggccttttaccccggcacaagcggaagctgtagtgggtgtggaagcctcagcctcccacttcttgcgggcctcgtcgcggcagatgcagtagcttcacttcttattgtaggcgcggtatttctctgtgctcgaccaaggaggtcacccgctcaggaggatggtaaggtgtatataaatatgccaggacgcggaagctctagacgggttaagttttccagatccgcagacgcacccgcttaccaacaagggcagaaccaactctacaatgaacttaatttggggcggagggaagagtacgacgttctggacaaaaggaggggacgagatcccgagatgggcggaaagcctcgaaggaagaatccgcaagaggggctttataacgaactccagaaagataaaatggcagaagcctatagtgagattgggatgaagggagaaaggaggaggggtaaaggtcacgatgggttgtaccaaggattgagcacagccactaaagatacctatgatgcgctccacatgcaggccctgccgccaagacgcgccaagagaagcggatctggcgtgaagcagaccctgaatttcgacctgctgaagctggctggcgacgtggaatccaacccaggccctggccatatggctacctacgaggtgctgtgcgaggtggcaagaaagctgggcaccgacgacagagaagtggtgctgttcctgctgaacgtgttcatccctcagcctacactggcccagctgatcggtgcactgagagccctgaaagaggaaggccggctgacctttcctctgctggccgaatgcctgttcagagccggaagaagggatctgctgcgggacctgctgcatctggaccccagatttctggaaagacacctggccggcaccatgagctacttcagcccttaccagctgaccgtgctgcacgttgacggcgaactgtgcgccagagatattcggagcctgatcttcctgagcaaggacaccatcggcagccggtctacccctcagacatttctgcactgggtgtactgcatggaaaacctggacctgctcggccccacagatgtggatgccctgatgtccatgctgagaagcctgagcagagtggacctccagagacaggtgcagacactgatgggactgcacctgagcggacctagccacagccagcactacagacacacccct

SEQ ID NO: 3192 - DNA, 3489 bp, synthetic construct
  source 1..3489: mol_type = other DNA
atggccttaccagtgaccgccttgctcctgccgctggccttgctgctccacgccgccaggccgaatgctggcgtgacccagacacctaagttccaggtgctgaaaaccggccagagcatgaccctgcaatgcgcccaggacatgaaccatgagtacatgagctggtacagacaggaccccggcatgggcctgagactgatccactactctgtggctatccagaccaccgaccagggcgaagtgcccaatggctacaacgtgtccagaagcaccatcgaggacttcccactgagactgctgtctgccgctcctagccagaccagcgtgtacttttgtgccagcagctacctgggcaacaccggcgagctgttttttggcgagggcagcagactgaccgtgctcgagggacagcctaaggccaatcctaccgtgacactgttccctccaagcagcgaagaactccaggccaacaaggccacacttgtgtgcctgatctccgacttctaccctggggctgtgacagtggcttggaaggccgatggatctcctgtgaaagccggcgtggaaaccaccaagccatccaagcagagcaacaacaaatacgccgccagctcctacctgagcctgacacctgagcagtggaagtcccacagatcctacagctgccaagtgacccacgaaggcagcaccgtggaaaagacagtggcccctacagagtgcagcggatccacaacacctggcgagagaagtagcctgcctgccttctatcctggcaccagcggctcttgttctggctgtggatctctgagcctgcctctgctggctggactggttgctgctgatgctgtggcctctctgctgattgtgggagccgtgttcctgtgcgccagacctagaagaagccccgctcaagaggacggcaaggtgtacatcaacatgcccggcagaggaagcactagtagagtgaagttcagcagaagcgccgacgcccctgcctaccagcagggacagaaccaactgtacaacgagctgaacctgggcagacgggaagagtacgacgtgctggacaagcggagaggcagggaccctgagatgggcggaaagccccggagaaagaacccccaggaaggactgtataacgaactccagaaagacaagatggccgaagcctacagcgagatcggcatgaagggcgagcggagaagaggcaagggccacgatggcctgtaccagggcctgagcaccgccaccaaggacacctatgacgccctgcacatgcaggccctgcctccaagaagggccaagcgatctggatctggagcaacaaacttctcactactcaaacaagcaggtgacgtggaggagaatcccgggcctatggactggatttggcgcatccttttccttgtcggcgctgctaccggcgcgcattccttcgaacaagaagtgacacagatccctgccgctctgtctgtgcctgagggcgaaaacctggtgctgaactgctccttcaccgacagcgccatctacaacctccagtggttcaggcaggaccctggaaagggactgacaagcctgctgctgatccagagcagccagagagagcagacctccggcagactgaatgccagcctggataagagcagcggcaggtctaccctgtatatcgccgcttctcagcctggcgatagcgccacatatctgtgtgctgtgcggcctacaagcggcggcagctacatccctacatttggcagaggcaccagcctgatcgtgcacccttatacgcgtgcctctacaaagggaccctccgtgtttcctctggctcccagcagcaagtctacaagcggaggaacagccgctctgggctgcctggtcaaggattactttcccgagcctgtgaccgtgtcctggaatagcggagcactgacaagcggcgtgcacacctttccagccgtgctgcaaagcagcggcctgtactctctgagcagcgtggtcacagtgcctagctctagcctgggcacccagacctacatctgcaatgtgaaccacaagcctagcaacaccaaggtggacaagagagtggaacccaagagctgtggtaccacaacgccgggcgaaaggagttccttgccggccttttaccccggcacaagcggaagctgtagtgggtgtggaagcctcagcctcccacttcttgcgggcctcgtcgcggcagatgcagtagcttcacttcttattgtaggcgcggtatttctctgtgctcgaccaaggaggtcacccgctcaggaggatggtaaggtgtatataaatatgccaggacgcggaagctctagacgggttaagttttccagatccgcagacgcacccgcttaccaacaagggcagaaccaactctacaatgaacttaatttggggcggagggaagagtacgacgttctggacaaaaggaggggacgagatcccgagatgggcggaaagcctcgaaggaagaatccgcaagaggggctttataacgaactccagaaagataaaatggcagaagcctatagtgagattgggatgaagggagaaaggaggaggggtaaaggtcacgatgggttgtaccaaggattgagcacagccactaaagatacctatgatgcgctccacatgcaggccctgccgccaagacgcgccaagagaagcggatctggcgtgaagcagaccctgaatttcgacctgctgaagctggctggcgacgtggaatccaacccaggccctggccatatgtccgactccaaggaggtccctagccttccatttttgcgacacttgctcgaagagttggacagccatgaggacagcttgctgctgtttctgtgtcacgacgcggccccgggctgcacgacggtcacgcaagctttgtgctcgcttagccaacagcgcaagctgaccctcgcggctctggtcgagatgctctacgtgctgcagcgtatggatcttctcaagagccgcttcgggctcagcaaggagggggccgagcaattgctgggcacaagctttctcacgcgctaccgcaagctcatggtttgcgtgggtgaggagctcgactcgagcgagctacgcgctctacgcttgttcgcgtgcaacctgaatccgagcctgagcacggcgctttctgagagcagccgctttgtcgagcttgtactcgcgcttgaaaacgtaggactcgtctcgccatcgagtgtttccgtgcttgcggacatgttgcgcactcttcggcgcctcgatttgtgccagcagcttgttgagtacgaacaacaagagcaagccaggtaccgttactgttacgcggcctcgccctcattgccagttcgtacgttacgtcgggggcacggcgcgagtgaacacgagcagctgtgcatgcccgtgcaagaatcctctgacagccccgagctgctgcgcacgcccgtacaagaatcctccagcgacagccccgagcaaacgact

SEQ ID NO: 3193 - DNA, 3471 bp, synthetic construct
  source 1..3471: mol_type = other DNA
atggccttaccagtgaccgccttgctcctgccgctggccttgctgctccacgccgccaggccgaatgctggcgtgacccagacacctaagttccaggtgctgaaaaccggccagagcatgaccctgcaatgcgcccaggacatgaaccatgagtacatgagctggtacagacaggaccccggcatgggcctgagactgatccactactctgtggctatccagaccaccgaccagggcgaagtgcccaatggctacaacgtgtccagaagcaccatcgaggacttcccactgagactgctgtctgccgctcctagccagaccagcgtgtacttttgtgccagcagctacctgggcaacaccggcgagctgttttttggcgagggcagcagactgaccgtgctcgagggacagcctaaggccaatcctaccgtgacactgttccctccaagcagcgaagaactccaggccaacaaggccacacttgtgtgcctgatctccgacttctaccctggggctgtgacagtggcttggaaggccgatggatctcctgtgaaagccggcgtggaaaccaccaagccatccaagcagagcaacaacaaatacgccgccagctcctacctgagcctgacacctgagcagtggaagtcccacagatcctacagctgccaagtgacccacgaaggcagcaccgtggaaaagacagtggcccctacagagtgcagcggatccacaacacctggcgagagaagtagcctgcctgccttctatcctggcaccagcggctcttgttctggctgtggatctctgagcctgcctctgctggctggactggttgctgctgatgctgtggcctctctgctgattgtgggagccgtgttcctgtgcgccagacctagaagaagccccgctcaagaggacggcaaggtgtacatcaacatgcccggcagaggaagcactagtagagtgaagttcagcagaagcgccgacgcccctgcctaccagcagggacagaaccaactgtacaacgagctgaacctgggcagacgggaagagtacgacgtgctggacaagcggagaggcagggaccctgagatgggcggaaagccccggagaaagaacccccaggaaggactgtataacgaactccagaaagacaagatggccgaagcctacagcgagatcggcatgaagggcgagcggagaagaggcaagggccacgatggcctgtaccagggcctgagcaccgccaccaaggacacctatgacgccctgcacatgcaggccctgcctccaagaagggccaagcgatctggatctggagcaacaaacttctcactactcaaacaagcaggtgacgtggaggagaatcccgggcctatggactggatttggcgcatccttttccttgtcggcgctgctaccggcgcgcattccttcgaacaagaagtgacacagatccctgccgctctgtctgtgcctgagggcgaaaacctggtgctgaactgctccttcaccgacagcgccatctacaacctccagtggttcaggcaggaccctggaaagggactgacaagcctgctgctgatccagagcagccagagagagcagacctccggcagactgaatgccagcctggataagagcagcggcaggtctaccctgtatatcgccgcttctcagcctggcgatagcgccacatatctgtgtgctgtgcggcctacaagcggcggcagctacatccctacatttggcagaggcaccagcctgatcgtgcacccttatacgcgtgcctctacaaagggaccctccgtgtttcctctggctcccagcagcaagtctacaagcggaggaacagccgctctgggctgcctggtcaaggattactttcccgagcctgtgaccgtgtcctggaatagcggagcactgacaagcggcgtgcacacctttccagccgtgctgcaaagcagcggcctgtactctctgagcagcgtggtcacagtgcctagctctagcctgggcacccagacctacatctgcaatgtgaaccacaagcctagcaacaccaaggtggacaagagagtggaacccaagagctgtggtaccacaacgccgggcgaaaggagttccttgccggccttttaccccggcacaagcggaagctgtagtgggtgtggaagcctcagcctcccacttcttgcgggcctcgtcgcggcagatgcagtagcttcacttcttattgtaggcgcggtatttctctgtgctcgaccaaggaggtcacccgctcaggaggatggtaaggtgtatataaatatgccaggacgcggaagctctagacgggttaagttttccagatccgcagacgcacccgcttaccaacaagggcagaaccaactctacaatgaacttaatttggggcggagggaagagtacgacgttctggacaaaaggaggggacgagatcccgagatgggcggaaagcctcgaaggaagaatccgcaagaggggctttataacgaactccagaaagataaaatggcagaagcctatagtgagattgggatgaagggagaaaggaggaggggtaaaggtcacgatgggttgtaccaaggattgagcacagccactaaagatacctatgatgcgctccacatgcaggccctgccgccaagacgcgccaagagaagcggatctggcgtgaagcagaccctgaatttcgacctgctgaagctggctggcgacgtggaatccaacccaggccctggccatatggctctgcctgtgacagctctgctgctgcctctggcactgctgcttcatgctgctagacctagccagtttagagtgtcccctctggacagaacctggaacctgggcgagacagtggaactgaagtgccaggtgctgctgagcaaccctacaagcggctgctcctggctgtttcagcctagaggtgcagccgcctctcctacctttctgctgtacctgagccagaacaagcccaaggccgccgaaggactggacacccagagattcagcggcaagagactgggcgacaccttcgtgctgaccctgagcgacttcagaagagagaacgagggctactacttctgtagcgccctgagcaacagcatcatgtacttcagccacttcgtgcccgtgtttctgcccgccaagcctacaacaacccctgctcctagacctcctacaccagctcctacaatcgccagccagcctctgtctctcagacccgaagcctgtagacctgctgctggcggagctgtgcataccagaggactggatttcgcctgcgacatctacatctgggctcctctggctggcacatgtggcgtgctgctgctgtccctggtcatcaccctgtactgcaaccaccggaacaggcggagagtgtgcaagtgccctagacctgtggtcaagagcggcgacaagcctagcctgagcgccagatatgtt

SEQ ID NO: 3194 - DNA, 3882 bp, synthetic construct
  source 1..3882: mol_type = other DNA
atggccttaccagtgaccgccttgctcctgccgctggccttgctgctccacgccgccaggccggaagtgcagctggttgaatctggcggaggactggttcaggctggcggatctctgagactgtcttgtgccgccagcggcagaacctttagcatgggctggtttagacaggcccctggcaaagagagagagttcgtcgccgccatcacatactctggcggcagcccttactacgccgactctgtgaagggcagattcaccatcagccgggacaacgccaagaacaccgtgtacctccagatgaacagcctgaagcctgaggacaccgccgtgtactactgcgccgccaatccaacatacggcagcgactggaacgccgagaattggggccagggaacccaagtgacagtgtctagcggtaccggcggaggcggatctggcggcggaggtagcggtggcggaggatctgaattcaatgctggcgtgacccagacacctaagttccaggtgctgaaaaccggccagagcatgaccctgcaatgcgcccaggacatgaaccatgagtacatgagctggtacagacaggaccccggcatgggcctgagactgatccactactctgtggctatccagaccaccgaccagggcgaagtgcccaatggctacaacgtgtccagaagcaccatcgaggacttcccactgagactgctgtctgccgctcctagccagaccagcgtgtacttttgtgccagcagctacctgggcaacaccggcgagctgttttttggcgagggcagcagactgaccgtgctcgagggacagcctaaggccaatcctaccgtgacactgttccctccaagcagcgaagaactccaggccaacaaggccacacttgtgtgcctgatctccgacttctaccctggggctgtgacagtggcttggaaggccgatggatctcctgtgaaagccggcgtggaaaccaccaagccatccaagcagagcaacaacaaatacgccgccagctcctacctgagcctgacacctgagcagtggaagtcccacagatcctacagctgccaagtgacccacgaaggcagcaccgtggaaaagacagtggcccctacagagtgcagcggatccacaacacctggcgagagaagtagcctgcctgccttctatcctggcaccagcggctcttgttctggctgtggatctctgagcctgcctctgctggctggactggttgctgctgatgctgtggcctctctgctgattgtgggagccgtgttcctgtgcgccagacctagaagaagccccgctcaagaggacggcaaggtgtacatcaacatgcccggcagaggaagcactagtagagtgaagttcagcagaagcgccgacgcccctgcctaccagcagggacagaaccaactgtacaacgagctgaacctgggcagacgggaagagtacgacgtgctggacaagcggagaggcagggaccctgagatgggcggaaagccccggagaaagaacccccaggaaggactgtataacgaactccagaaagacaagatggccgaagcctacagcgagatcggcatgaagggcgagcggagaagaggcaagggccacgatggcctgtaccagggcctgagcaccgccaccaaggacacctatgacgccctgcacatgcaggccctgcctccaagaagggccaagcgatctggatctggagcaacaaacttctcactactcaaacaagcaggtgacgtggaggagaatcccgggcctatggactggatttggcgcatccttttccttgtcggcgctgctaccggcgcgcattccttcgaacaagaagtgacacagatccctgccgctctgtctgtgcctgagggcgaaaacctggtgctgaactgctccttcaccgacagcgccatctacaacctccagtggttcaggcaggaccctggaaagggactgacaagcctgctgctgatccagagcagccagagagagcagacctccggcagactgaatgccagcctggataagagcagcggcaggtctaccctgtatatcgccgcttctcagcctggcgatagcgccacatatctgtgtgctgtgcggcctacaagcggcggcagctacatccctacatttggcagaggcaccagcctgatcgtgcacccttatacgcgtgcctctacaaagggaccctccgtgtttcctctggctcccagcagcaagtctacaagcggaggaacagccgctctgggctgcctggtcaaggattactttcccgagcctgtgaccgtgtcctggaatagcggagcactgacaagcggcgtgcacacctttccagccgtgctgcaaagcagcggcctgtactctctgagcagcgtggtcacagtgcctagctctagcctgggcacccagacctacatctgcaatgtgaaccacaagcctagcaacaccaaggtggacaagagagtggaacccaagagctgtggtaccacaacgccgggcgaaaggagttccttgccggccttttaccccggcacaagcggaagctgtagtgggtgtggaagcctcagcctcccacttcttgcgggcctcgtcgcggcagatgcagtagcttcacttcttattgtaggcgcggtatttctctgtgctcgaccaaggaggtcacccgctcaggaggatggtaaggtgtatataaatatgccaggacgcggaagctctagacgggttaagttttccagatccgcagacgcacccgcttaccaacaagggcagaaccaactctacaatgaacttaatttggggcggagggaagagtacgacgttctggacaaaaggaggggacgagatcccgagatgggcggaaagcctcgaaggaagaatccgcaagaggggctttataacgaactccagaaagataaaatggcagaagcctatagtgagattgggatgaagggagaaaggaggaggggtaaaggtcacgatgggttgtaccaaggattgagcacagccactaaagatacctatgatgcgctccacatgcaggccctgccgccaagacgcgccaagagaagcggatctggcgtgaagcagaccctgaatttcgacctgctgaagctggctggcgacgtggaatccaacccaggccctggccatatggctctgcctgtgacagctctgctgctgcctctggcactgctgcttcatgctgctagacctagccagtttagagtgtcccctctggacagaacctggaacctgggcgagacagtggaactgaagtgccaggtgctgctgagcaaccctacaagcggctgctcctggctgtttcagcctagaggtgcagccgcctctcctacctttctgctgtacctgagccagaacaagcccaaggccgccgaaggactggacacccagagattcagcggcaagagactgggcgacaccttcgtgctgaccctgagcgacttcagaagagagaacgagggctactacttctgtagcgccctgagcaacagcatcatgtacttcagccacttcgtgcccgtgtttctgcccgccaagcctacaacaacccctgctcctagacctcctacaccagctcctacaatcgccagccagcctctgtctctcagacccgaagcctgtagacctgctgctggcggagctgtgcataccagaggactggatttcgcctgcgacatctacatctgggctcctctggctggcacatgtggcgtgctgctgctgtccctggtcatcaccctgtactgcaaccaccggaacaggcggagagtgtgcaagtgccctagacctgtggtcaagagcggcgacaagcctagcctgagcgccagatatgtt

SEQ ID NO: 3195 - DNA, 4293 bp, synthetic construct
  source 1..4293: mol_type = other DNA
atggccttaccagtgaccgccttgctcctgccgctggccttgctgctccacgccgccaggccggaagtgcagctggttgaatctggcggaggactggttcaggctggcggatctctgagactgtcttgtgccgccagcggcagaacctttagcatgggctggtttagacaggcccctggcaaagagagagagttcgtcgccgccatcacatactctggcggcagcccttactacgccgactctgtgaagggcagattcaccatcagccgggacaacgccaagaacaccgtgtacctccagatgaacagcctgaagcctgaggacaccgccgtgtactactgcgccgccaatccaacatacggcagcgactggaacgccgagaattggggccagggaacccaagtgacagtgtctagcggtaccggcggaggcggatctggcggcggaggtagcggtggcggaggatctgaattcaatgctggcgtgacccagacacctaagttccaggtgctgaaaaccggccagagcatgaccctgcaatgcgcccaggacatgaaccatgagtacatgagctggtacagacaggaccccggcatgggcctgagactgatccactactctgtggctatccagaccaccgaccagggcgaagtgcccaatggctacaacgtgtccagaagcaccatcgaggacttcccactgagactgctgtctgccgctcctagccagaccagcgtgtacttttgtgccagcagctacctgggcaacaccggcgagctgttttttggcgagggcagcagactgaccgtgctcgagggacagcctaaggccaatcctaccgtgacactgttccctccaagcagcgaagaactccaggccaacaaggccacacttgtgtgcctgatctccgacttctaccctggggctgtgacagtggcttggaaggccgatggatctcctgtgaaagccggcgtggaaaccaccaagccatccaagcagagcaacaacaaatacgccgccagctcctacctgagcctgacacctgagcagtggaagtcccacagatcctacagctgccaagtgacccacgaaggcagcaccgtggaaaagacagtggcccctacagagtgcagcggatccacaacacctggcgagagaagtagcctgcctgccttctatcctggcaccagcggctcttgttctggctgtggatctctgagcctgcctctgctggctggactggttgctgctgatgctgtggcctctctgctgattgtgggagccgtgttcctgtgcgccagacctagaagaagccccgctcaagaggacggcaaggtgtacatcaacatgcccggcagaggaagcactagtagagtgaagttcagcagaagcgccgacgcccctgcctaccagcagggacagaaccaactgtacaacgagctgaacctgggcagacgggaagagtacgacgtgctggacaagcggagaggcagggaccctgagatgggcggaaagccccggagaaagaacccccaggaaggactgtataacgaactccagaaagacaagatggccgaagcctacagcgagatcggcatgaagggcgagcggagaagaggcaagggccacgatggcctgtaccagggcctgagcaccgccaccaaggacacctatgacgccctgcacatgcaggccctgcctccaagaagggccaagcgatctggatctggagcaacaaacttctcactactcaaacaagcaggtgacgtggaggagaatcccgggcctatggactggatttggcgcatccttttccttgtcggcgctgctaccggcgcgcattccgggcccgaagtgcaactggttgaatccggtggcggcctggtgcaagcaggcggatctctcagacttagctgtgccgcctccggcagaaccttcacaatgggatggtttaggcaggctccagggaaagagagagagttcgtcgccgccatctctctgtctcccacactggcctactacgccgactctgtgaaaggccggttcaccatctccagagataatgccaagaacaccgtggtgctgcaaatgaactctctgaaacccgaggatacagccctgtactattgtgccgctgaccggaagtccgtgatgagcatcagacccgattactggggacagggcacacaagtcacagtgtcctctggatccggcggcggaggatctggcggaggcggatctgggggcggaggctctttcgaacaagaagtgacacagatccctgccgctctgtctgtgcctgagggcgaaaacctggtgctgaactgctccttcaccgacagcgccatctacaacctccagtggttcaggcaggaccctggaaagggactgacaagcctgctgctgatccagagcagccagagagagcagacctccggcagactgaatgccagcctggataagagcagcggcaggtctaccctgtatatcgccgcttctcagcctggcgatagcgccacatatctgtgtgctgtgcggcctacaagcggcggcagctacatccctacatttggcagaggcaccagcctgatcgtgcacccttatacgcgtgcctctacaaagggaccctccgtgtttcctctggctcccagcagcaagtctacaagcggaggaacagccgctctgggctgcctggtcaaggattactttcccgagcctgtgaccgtgtcctggaatagcggagcactgacaagcggcgtgcacacctttccagccgtgctgcaaagcagcggcctgtactctctgagcagcgtggtcacagtgcctagctctagcctgggcacccagacctacatctgcaatgtgaaccacaagcctagcaacaccaaggtggacaagagagtggaacccaagagctgtggtaccacaacgccgggcgaaaggagttccttgccggccttttaccccggcacaagcggaagctgtagtgggtgtggaagcctcagcctcccacttcttgcgggcctcgtcgcggcagatgcagtagcttcacttcttattgtaggcgcggtatttctctgtgctcgaccaaggaggtcacccgctcaggaggatggtaaggtgtatataaatatgccaggacgcggaagctctagacgggttaagttttccagatccgcagacgcacccgcttaccaacaagggcagaaccaactctacaatgaacttaatttggggcggagggaagagtacgacgttctggacaaaaggaggggacgagatcccgagatgggcggaaagcctcgaaggaagaatccgcaagaggggctttataacgaactccagaaagataaaatggcagaagcctatagtgagattgggatgaagggagaaaggaggaggggtaaaggtcacgatgggttgtaccaaggattgagcacagccactaaagatacctatgatgcgctccacatgcaggccctgccgccaagacgcgccaagagaagcggatctggcgtgaagcagaccctgaatttcgacctgctgaagctggctggcgacgtggaatccaacccaggccctggccatatggctctgcctgtgacagctctgctgctgcctctggcactgctgcttcatgctgctagacctagccagtttagagtgtcccctctggacagaacctggaacctgggcgagacagtggaactgaagtgccaggtgctgctgagcaaccctacaagcggctgctcctggctgtttcagcctagaggtgcagccgcctctcctacctttctgctgtacctgagccagaacaagcccaaggccgccgaaggactggacacccagagattcagcggcaagagactgggcgacaccttcgtgctgaccctgagcgacttcagaagagagaacgagggctactacttctgtagcgccctgagcaacagcatcatgtacttcagccacttcgtgcccgtgtttctgcccgccaagcctacaacaacccctgctcctagacctcctacaccagctcctacaatcgccagccagcctctgtctctcagacccgaagcctgtagacctgctgctggcggagctgtgcataccagaggactggatttcgcctgcgacatctacatctgggctcctctggctggcacatgtggcgtgctgctgctgtccctggtcatcaccctgtactgcaaccaccggaacaggcggagagtgtgcaagtgccctagacctgtggtcaagagcggcgacaagcctagcctgagcgccagatatgtt

SEQ ID NO: 3196 - DNA, 2448 bp, synthetic construct
  source 1..2448: mol_type = other DNA
atggccttaccagtgaccgccttgctcctgccgctggccttgctgctccacgccgccaggccggaattcaatgctggcgtgacccagacacctaagttccaggtgctgaaaaccggccagagcatgaccctgcaatgcgcccaggacatgaaccatgagtacatgagctggtacagacaggaccccggcatgggcctgagactgatccactactctgtggctatccagaccaccgaccagggcgaagtgcccaatggctacaacgtgtccagaagcaccatcgaggacttcccactgagactgctgtctgccgctcctagccagaccagcgtgtacttttgtgccagcagctacctgggcaacaccggcgagctgttttttggcgagggcagcagactgaccgtgctcgaggacctgaagaacgtgttcccacctgaggtggccgtgttcgagcctagcgaggccgagatcagccacacccagaaagccaccctcgtgtgcctggctaccggcttctaccccgaccatgtggaactgtcttggtgggtcaacggcaaagaggtgcacagcggcgtgtctaccgacccccagccactgaaagaacagcccgccctgaacgacagccggtactgcctgagcagcagactgagagtgtccgccaccttctggcagaacccccggaaccacttcagatgccaggtgcagttctacggcctgagcgagaacgacgagtggacccaggacagagccaagcccgtgacccagatcgtgtctgccgaagcctggggcagagccgattgcggatcccagagcttcggcctgctggaccccaagctgtgctacctgctggatggcatcctgttcatctacggcgtgatcctgaccgccctgttcctgagagtgaagttcagcagaagcgccgacgcccctgcctaccagcagggacagaaccaactgtacaacgagctgaacctgggcagacgggaagagtacgacgtgctggacaagcggagaggcagggaccctgagatgggcggaaagccccggagaaagaacccccaggaaggactgtataacgaactccagaaagacaagatggccgaagcctacagcgagatcggcatgaagggcgagcggagaagaggcaagggccacgatggcctgtaccagggcctgagcaccgccaccaaggacacctatgacgccctgcacatgcaggccctgcctccaagaagggccaagcgatctggatctggagcaacaaacttctcactactcaaacaagcaggtgacgtggaggagaatcccgggcctactagtatggactggatttggcgcatccttttccttgtcggcgctgctaccggcgcgcattccttcgaacaagaagtgacacagatccctgccgctctgtctgtgcctgagggcgaaaacctggtgctgaactgctccttcaccgacagcgccatctacaacctccagtggttcaggcaggaccctggaaagggactgacaagcctgctgctgatccagagcagccagagagagcagacctccggcagactgaatgccagcctggataagagcagcggcaggtctaccctgtatatcgccgcttctcagcctggcgatagcgccacatatctgtgtgctgtgcggcctacaagcggcggcagctacatccctacatttggcagaggcaccagcctgatcgtgcacccttatacgcgtatccagaaccctgatcctgccgtgtaccagctgcgggatagcaagagcagcgacaagagcgtgtgtctgttcaccgacttcgacagccagaccaacgtgtcccagagcaaggactccgacgtgtacatcaccgataagaccgtgctggacatgcggagcatggacttcaagagcaactccgccgtggcctggtccaacaagtccgatttcgcctgcgccaacgccttcaacaacagcattatccccgaggacacattcttcccaagccccgagagcagctgcggtacccagagttttgggttgttggaccctaaattgtgctatctgttggacggaatcctgttcatttacggagtgatcctgaccgcattgttcctgcgggttaagttttccagatccgcagacgcacccgcttaccaacaagggcagaaccaactctacaatgaacttaatttggggcggagggaagagtacgacgttctggacaaaaggaggggacgagatcccgagatgggcggaaagcctcgaaggaagaatccgcaagaggggctttataacgaactccagaaagataaaatggcagaagcctatagtgagattgggatgaagggagaaaggaggaggggtaaaggtcacgatgggttgtaccaaggattgagcacagccactaaagatacctatgatgcgctccacatgcaggccctgccgccaagataa

SEQ ID NO: 3197 - DNA, 2574 bp, synthetic construct
  source 1..2574: mol_type = other DNA
atggccttaccagtgaccgccttgctcctgccgctggccttgctgctccacgccgccaggccggaattcaatgctggcgtgacccagacacctaagttccaggtgctgaaaaccggccagagcatgaccctgcaatgcgcccaggacatgaaccatgagtacatgagctggtacagacaggaccccggcatgggcctgagactgatccactactctgtggctatccagaccaccgaccagggcgaagtgcccaatggctacaacgtgtccagaagcaccatcgaggacttcccactgagactgctgtctgccgctcctagccagaccagcgtgtacttttgtgccagcagctacctgggcaacaccggcgagctgttttttggcgagggcagcagactgaccgtgctcgaggacctgaagaacgtgttcccacctgaggtggccgtgttcgagcctagcgaggccgagatcagccacacccagaaagccaccctcgtgtgcctggctaccggcttctaccccgaccatgtggaactgtcttggtgggtcaacggcaaagaggtgcacagcggcgtgtctaccgacccccagccactgaaagaacagcccgccctgaacgacagccggtactgcctgagcagcagactgagagtgtccgccaccttctggcagaacccccggaaccacttcagatgccaggtgcagttctacggcctgagcgagaacgacgagtggacccaggacagagccaagcccgtgacccagatcgtgtctgccgaagcctggggcagagccgattgcggatcccagagcttcggcctgctggaccccaagctgtgctacctgctggatggcatcctgttcatctacggcgtgatcctgaccgccctgttcctgagagtgaagttcagcagaagcgccgacgcccctgcctaccagcagggacagaaccaactgtacaacgagctgaacctgggcagacgggaagagtacgacgtgctggacaagcggagaggcagggaccctgagatgggcggaaagccccggagaaagaacccccaggaaggactgtataacgaactccagaaagacaagatggccgaagcctacagcgagatcggcatgaagggcgagcggagaagaggcaagggccacgatggcctgtaccagggcctgagcaccgccaccaaggacacctatgacgccctgcacatgcaggccctgcctccaagaagggccaagcgatctggatctggagcaacaaacttctcactactcaaacaagcaggtgacgtggaggagaatcccgggcctactagtatggactggatttggcgcatccttttccttgtcggcgctgctaccggcgcgcattccttcgaacaagaagtgacacagatccctgccgctctgtctgtgcctgagggcgaaaacctggtgctgaactgctccttcaccgacagcgccatctacaacctccagtggttcaggcaggaccctggaaagggactgacaagcctgctgctgatccagagcagccagagagagcagacctccggcagactgaatgccagcctggataagagcagcggcaggtctaccctgtatatcgccgcttctcagcctggcgatagcgccacatatctgtgtgctgtgcggcctacaagcggcggcagctacatccctacatttggcagaggcaccagcctgatcgtgcacccttatacgcgtatccagaaccctgatcctgccgtgtaccagctgcgggatagcaagagcagcgacaagagcgtgtgtctgttcaccgacttcgacagccagaccaacgtgtcccagagcaaggactccgacgtgtacatcaccgataagaccgtgctggacatgcggagcatggacttcaagagcaactccgccgtggcctggtccaacaagtccgatttcgcctgcgccaacgccttcaacaacagcattatccccgaggacacattcttcccaagccccgagagcagctgcggtacccagagcttcggcctgctggaccccaagctgtgctacctgctggatggcatcctgttcatctacggcgtgatcctgaccgccctgttcctgaaacggggcagaaagaaactcctgtatatattcaaacaaccatttatgagaccagtacaaactactcaagaggaagatggctgtagctgccgatttccagaagaagaagaaggaggatgtgaactgagagtgaagttcagcagaagcgccgacgcccctgcctaccagcagggacagaaccaactgtacaacgagctgaacctgggcagacgggaagagtacgacgtgctggacaagcggagaggcagggaccctgagatgggcggaaagccccggagaaagaacccccaggaaggactgtataacgaactccagaaagacaagatggccgaagcctacagcgagatcggcatgaagggcgagcggagaagaggcaagggccacgatggcctgtaccagggcctgagcaccgccaccaaggacacctatgacgccctgcacatgcaggccctgcctccaagataa

SEQ ID NO: 3198 - DNA, 2571 bp, synthetic construct
  source 1..2571: mol_type = other DNA
atggccttaccagtgaccgccttgctcctgccgctggccttgctgctccacgccgccaggccggaattcaatgctggcgtgacccagacacctaagttccaggtgctgaaaaccggccagagcatgaccctgcaatgcgcccaggacatgaaccatgagtacatgagctggtacagacaggaccccggcatgggcctgagactgatccactactctgtggctatccagaccaccgaccagggcgaagtgcccaatggctacaacgtgtccagaagcaccatcgaggacttcccactgagactgctgtctgccgctcctagccagaccagcgtgtacttttgtgccagcagctacctgggcaacaccggcgagctgttttttggcgagggcagcagactgaccgtgctcgaggacctgaagaacgtgttcccacctgaggtggccgtgttcgagcctagcgaggccgagatcagccacacccagaaagccaccctcgtgtgcctggctaccggcttctaccccgaccatgtggaactgtcttggtgggtcaacggcaaagaggtgcacagcggcgtgtctaccgacccccagccactgaaagaacagcccgccctgaacgacagccggtactgcctgagcagcagactgagagtgtccgccaccttctggcagaacccccggaaccacttcagatgccaggtgcagttctacggcctgagcgagaacgacgagtggacccaggacagagccaagcccgtgacccagatcgtgtctgccgaagcctggggcagagccgattgcggatcccagagcttcggcctgctggaccccaagctgtgctacctgctggatggcatcctgttcatctacggcgtgatcctgaccgccctgttcctgagagtgaagttcagcagaagcgccgacgcccctgcctaccagcagggacagaaccaactgtacaacgagctgaacctgggcagacgggaagagtacgacgtgctggacaagcggagaggcagggaccctgagatgggcggaaagccccggagaaagaacccccaggaaggactgtataacgaactccagaaagacaagatggccgaagcctacagcgagatcggcatgaagggcgagcggagaagaggcaagggccacgatggcctgtaccagggcctgagcaccgccaccaaggacacctatgacgccctgcacatgcaggccctgcctccaagaagggccaagcgatctggatctggagcaacaaacttctcactactcaaacaagcaggtgacgtggaggagaatcccgggcctactagtatggactggatttggcgcatccttttccttgtcggcgctgctaccggcgcgcattccttcgaacaagaagtgacacagatccctgccgctctgtctgtgcctgagggcgaaaacctggtgctgaactgctccttcaccgacagcgccatctacaacctccagtggttcaggcaggaccctggaaagggactgacaagcctgctgctgatccagagcagccagagagagcagacctccggcagactgaatgccagcctggataagagcagcggcaggtctaccctgtatatcgccgcttctcagcctggcgatagcgccacatatctgtgtgctgtgcggcctacaagcggcggcagctacatccctacatttggcagaggcaccagcctgatcgtgcacccttatacgcgtatccagaaccctgatcctgccgtgtaccagctgcgggatagcaagagcagcgacaagagcgtgtgtctgttcaccgacttcgacagccagaccaacgtgtcccagagcaaggactccgacgtgtacatcaccgataagaccgtgctggacatgcggagcatggacttcaagagcaactccgccgtggcctggtccaacaagtccgatttcgcctgcgccaacgccttcaacaacagcattatccccgaggacacattcttcccaagccccgagagcagctgcggtacccagagcttcggcctgctggaccccaagctgtgctacctgctggatggcatcctgttcatctacggcgtgatcctgaccgccctgttcctgaggagtaagaggagcaggctcctgcacagtgactacatgaacatgactccacgccgccccggacccacccgcaagcattaccagccctatgccccaccacgcgacttcgcagcctatcgctccagagtgaagttcagcagaagcgccgacgcccctgcctaccagcagggacagaaccaactgtacaacgagctgaacctgggcagacgggaagagtacgacgtgctggacaagcggagaggcagggaccctgagatgggcggaaagccccggagaaagaacccccaggaaggactgtataacgaactccagaaagacaagatggccgaagcctacagcgagatcggcatgaagggcgagcggagaagaggcaagggccacgatggcctgtaccagggcctgagcaccgccaccaaggacacctatgacgccctgcacatgcaggccctgcctccaagataa

SEQ ID NO: 3199 - DNA, 2556 bp, synthetic construct
  source 1..2556: mol_type = other DNA
atggccttaccagtgaccgccttgctcctgccgctggccttgctgctccacgccgccaggccggaattcaatgctggcgtgacccagacacctaagttccaggtgctgaaaaccggccagagcatgaccctgcaatgcgcccaggacatgaaccatgagtacatgagctggtacagacaggaccccggcatgggcctgagactgatccactactctgtggctatccagaccaccgaccagggcgaagtgcccaatggctacaacgtgtccagaagcaccatcgaggacttcccactgagactgctgtctgccgctcctagccagaccagcgtgtacttttgtgccagcagctacctgggcaacaccggcgagctgttttttggcgagggcagcagactgaccgtgctcgaggacctgaagaacgtgttcccacctgaggtggccgtgttcgagcctagcgaggccgagatcagccacacccagaaagccaccctcgtgtgcctggctaccggcttctaccccgaccatgtggaactgtcttggtgggtcaacggcaaagaggtgcacagcggcgtgtctaccgacccccagccactgaaagaacagcccgccctgaacgacagccggtactgcctgagcagcagactgagagtgtccgccaccttctggcagaacccccggaaccacttcagatgccaggtgcagttctacggcctgagcgagaacgacgagtggacccaggacagagccaagcccgtgacccagatcgtgtctgccgaagcctggggcagagccgattgcggatcccagagcttcggcctgctggaccccaagctgtgctacctgctggatggcatcctgttcatctacggcgtgatcctgaccgccctgttcctgagagtgaagttcagcagaagcgccgacgcccctgcctaccagcagggacagaaccaactgtacaacgagctgaacctgggcagacgggaagagtacgacgtgctggacaagcggagaggcagggaccctgagatgggcggaaagccccggagaaagaacccccaggaaggactgtataacgaactccagaaagacaagatggccgaagcctacagcgagatcggcatgaagggcgagcggagaagaggcaagggccacgatggcctgtaccagggcctgagcaccgccaccaaggacacctatgacgccctgcacatgcaggccctgcctccaagaagggccaagcgatctggatctggagcaacaaacttctcactactcaaacaagcaggtgacgtggaggagaatcccgggcctactagtatggactggatttggcgcatccttttccttgtcggcgctgctaccggcgcgcattccttcgaacaagaagtgacacagatccctgccgctctgtctgtgcctgagggcgaaaacctggtgctgaactgctccttcaccgacagcgccatctacaacctccagtggttcaggcaggaccctggaaagggactgacaagcctgctgctgatccagagcagccagagagagcagacctccggcagactgaatgccagcctggataagagcagcggcaggtctaccctgtatatcgccgcttctcagcctggcgatagcgccacatatctgtgtgctgtgcggcctacaagcggcggcagctacatccctacatttggcagaggcaccagcctgatcgtgcacccttatacgcgtatccagaaccctgatcctgccgtgtaccagctgcgggatagcaagagcagcgacaagagcgtgtgtctgttcaccgacttcgacagccagaccaacgtgtcccagagcaaggactccgacgtgtacatcaccgataagaccgtgctggacatgcggagcatggacttcaagagcaactccgccgtggcctggtccaacaagtccgatttcgcctgcgccaacgccttcaacaacagcattatccccgaggacacattcttcccaagccccgagagcagctgcggtacccagagcttcggcctgctggaccccaagctgtgctacctgctggatggcatcctgttcatctacggcgtgatcctgaccgccctgttcctgagggaccaaagactgcctcctgacgctcacaaacctccaggcggaggcagcttcagaacccctatccaagaggaacaggctgacgcccacagcaccctggcaaaaattagagtgaagttcagcagaagcgccgacgcccctgcctaccagcagggacagaaccaactgtacaacgagctgaacctgggcagacgggaagagtacgacgtgctggacaagcggagaggcagggaccctgagatgggcggaaagccccggagaaagaacccccaggaaggactgtataacgaactccagaaagacaagatggccgaagcctacagcgagatcggcatgaagggcgagcggagaagaggcaagggccacgatggcctgtaccagggcctgagcaccgccaccaaggacacctatgacgccctgcacatgcaggccctgcctccaagataa

SEQ ID NO: 3200 - DNA, 2808 bp, synthetic construct
  source 1..2808: mol_type = other DNA
atggccttaccagtgaccgccttgctcctgccgctggccttgctgctccacgccgccaggccggaattcaatgctggcgtgacccagacacctaagttccaggtgctgaaaaccggccagagcatgaccctgcaatgcgcccaggacatgaaccatgagtacatgagctggtacagacaggaccccggcatgggcctgagactgatccactactctgtggctatccagaccaccgaccagggcgaagtgcccaatggctacaacgtgtccagaagcaccatcgaggacttcccactgagactgctgtctgccgctcctagccagaccagcgtgtacttttgtgccagcagctacctgggcaacaccggcgagctgttttttggcgagggcagcagactgaccgtgctcgaggacctgaagaacgtgttcccacctgaggtggccgtgttcgagcctagcgaggccgagatcagccacacccagaaagccaccctcgtgtgcctggctaccggcttctaccccgaccatgtggaactgtcttggtgggtcaacggcaaagaggtgcacagcggcgtgtctaccgacccccagccactgaaagaacagcccgccctgaacgacagccggtactgcctgagcagcagactgagagtgtccgccaccttctggcagaacccccggaaccacttcagatgccaggtgcagttctacggcctgagcgagaacgacgagtggacccaggacagagccaagcccgtgacccagatcgtgtctgccgaagcctggggcagagccgattgcggatcccagagcttcggcctgctggaccccaagctgtgctacctgctggatggcatcctgttcatctacggcgtgatcctgaccgccctgttcctgagagtgaagttcagcagaagcgccgacgcccctgcctaccagcagggacagaaccaactgtacaacgagctgaacctgggcagacgggaagagtacgacgtgctggacaagcggagaggcagggaccctgagatgggcggaaagccccggagaaagaacccccaggaaggactgtataacgaactccagaaagacaagatggccgaagcctacagcgagatcggcatgaagggcgagcggagaagaggcaagggccacgatggcctgtaccagggcctgagcaccgccaccaaggacacctatgacgccctgcacatgcaggccctgcctccaagaagggccaagcgatctggatctggagcaacaaacttctcactactcaaacaagcaggtgacgtggaggagaatcccgggcctactagtatggactggatttggcgcatccttttccttgtcggcgctgctaccggcgcgcattccttcgaacaagaagtgacacagatccctgccgctctgtctgtgcctgagggcgaaaacctggtgctgaactgctccttcaccgacagcgccatctacaacctccagtggttcaggcaggaccctggaaagggactgacaagcctgctgctgatccagagcagccagagagagcagacctccggcagactgaatgccagcctggataagagcagcggcaggtctaccctgtatatcgccgcttctcagcctggcgatagcgccacatatctgtgtgctgtgcggcctacaagcggcggcagctacatccctacatttggcagaggcaccagcctgatcgtgcacccttatacgcgtatccagaaccctgatcctgccgtgtaccagctgcgggatagcaagagcagcgacaagagcgtgtgtctgttcaccgacttcgacagccagaccaacgtgtcccagagcaaggactccgacgtgtacatcaccgataagaccgtgctggacatgcggagcatggacttcaagagcaactccgccgtggcctggtccaacaagtccgatttcgcctgcgccaacgccttcaacaacagcattatccccgaggacacattcttcccaagccccgagagcagctgcggtacccagagcttcggcctgctggaccccaagctgtgctacctgctggatggcatcctgttcatctacggcgtgatcctgaccgccctgttcctgtggcggcggaagcggaaagagaagcagtctgagacaagccccaaagagttcctgaccatctacgaggacgtgaaggacctgaaaacccggcggaaccacgaacaagagcagacctttcctggcggaggcagcaccatctacagcatgatccagagccagagcagcgcccctacaagccaagagcctgcctacacactgtactccctgatccagcctagcagaaagagcggcagccggaagagaaatcacagccccagcttcaacagcacgatctacgaagtgatcggcaagagccagccaaaggctcagaaccctgccagactgagccggaaagagctggaaaacttcgacgtgtacagcagagtgaagttcagcagaagcgccgacgcccctgcctaccagcagggacagaaccaactgtacaacgagctgaacctgggcagacgggaagagtacgacgtgctggacaagcggagaggcagggaccctgagatgggcggaaagccccggagaaagaacccccaggaaggactgtataacgaactccagaaagacaagatggccgaagcctacagcgagatcggcatgaagggcgagcggagaagaggcaagggccacgatggcctgtaccagggcctgagcaccgccaccaaggacacctatgacgccctgcacatgcaggccctgcctccaagataa

SEQ ID NO: 3201 - DNA, 2697 bp, synthetic construct
  source 1..2697: mol_type = other DNA
atggccttaccagtgaccgccttgctcctgccgctggccttgctgctccacgccgccaggccggaattcaatgctggcgtgacccagacacctaagttccaggtgctgaaaaccggccagagcatgaccctgcaatgcgcccaggacatgaaccatgagtacatgagctggtacagacaggaccccggcatgggcctgagactgatccactactctgtggctatccagaccaccgaccagggcgaagtgcccaatggctacaacgtgtccagaagcaccatcgaggacttcccactgagactgctgtctgccgctcctagccagaccagcgtgtacttttgtgccagcagctacctgggcaacaccggcgagctgttttttggcgagggcagcagactgaccgtgctcgaggacctgaagaacgtgttcccacctgaggtggccgtgttcgagcctagcgaggccgagatcagccacacccagaaagccaccctcgtgtgcctggctaccggcttctaccccgaccatgtggaactgtcttggtgggtcaacggcaaagaggtgcacagcggcgtgtctaccgacccccagccactgaaagaacagcccgccctgaacgacagccggtactgcctgagcagcagactgagagtgtccgccaccttctggcagaacccccggaaccacttcagatgccaggtgcagttctacggcctgagcgagaacgacgagtggacccaggacagagccaagcccgtgacccagatcgtgtctgccgaagcctggggcagagccgattgcggatcccagagcttcggcctgctggaccccaagctgtgctacctgctggatggcatcctgttcatctacggcgtgatcctgaccgccctgttcctgaggagtaagaggagcaggctcctgcacagtgactacatgaacatgactccacgccgccccggacccacccgcaagcattaccagccctatgccccaccacgcgacttcgcagcctatcgctccagagtgaagttcagcagaagcgccgacgcccctgcctaccagcagggacagaaccaactgtacaacgagctgaacctgggcagacgggaagagtacgacgtgctggacaagcggagaggcagggaccctgagatgggcggaaagccccggagaaagaacccccaggaaggactgtataacgaactccagaaagacaagatggccgaagcctacagcgagatcggcatgaagggcgagcggagaagaggcaagggccacgatggcctgtaccagggcctgagcaccgccaccaaggacacctatgacgccctgcacatgcaggccctgcctccaagaagggccaagcgatctggatctggagcaacaaacttctcactactcaaacaagcaggtgacgtggaggagaatcccgggcctactagtatggactggatttggcgcatccttttccttgtcggcgctgctaccggcgcgcattccttcgaacaagaagtgacacagatccctgccgctctgtctgtgcctgagggcgaaaacctggtgctgaactgctccttcaccgacagcgccatctacaacctccagtggttcaggcaggaccctggaaagggactgacaagcctgctgctgatccagagcagccagagagagcagacctccggcagactgaatgccagcctggataagagcagcggcaggtctaccctgtatatcgccgcttctcagcctggcgatagcgccacatatctgtgtgctgtgcggcctacaagcggcggcagctacatccctacatttggcagaggcaccagcctgatcgtgcacccttatacgcgtatccagaaccctgatcctgccgtgtaccagctgcgggatagcaagagcagcgacaagagcgtgtgtctgttcaccgacttcgacagccagaccaacgtgtcccagagcaaggactccgacgtgtacatcaccgataagaccgtgctggacatgcggagcatggacttcaagagcaactccgccgtggcctggtccaacaagtccgatttcgcctgcgccaacgccttcaacaacagcattatccccgaggacacattcttcccaagccccgagagcagctgcggtacccagagcttcggcctgctggaccccaagctgtgctacctgctggatggcatcctgttcatctacggcgtgatcctgaccgccctgttcctgaaacggggcagaaagaaactcctgtatatattcaaacaaccatttatgagaccagtacaaactactcaagaggaagatggctgtagctgccgatttccagaagaagaagaaggaggatgtgaactgagagtgaagttcagcagaagcgccgacgcccctgcctaccagcagggacagaaccaactgtacaacgagctgaacctgggcagacgggaagagtacgacgtgctggacaagcggagaggcagggaccctgagatgggcggaaagccccggagaaagaacccccaggaaggactgtataacgaactccagaaagacaagatggccgaagcctacagcgagatcggcatgaagggcgagcggagaagaggcaagggccacgatggcctgtaccagggcctgagcaccgccaccaaggacacctatgacgccctgcacatgcaggccctgcctccaagataa

SEQ ID NO: 3202 - DNA, 2694 bp, synthetic construct
  source 1..2694: mol_type = other DNA
atggccttaccagtgaccgccttgctcctgccgctggccttgctgctccacgccgccaggccggaattcaatgctggcgtgacccagacacctaagttccaggtgctgaaaaccggccagagcatgaccctgcaatgcgcccaggacatgaaccatgagtacatgagctggtacagacaggaccccggcatgggcctgagactgatccactactctgtggctatccagaccaccgaccagggcgaagtgcccaatggctacaacgtgtccagaagcaccatcgaggacttcccactgagactgctgtctgccgctcctagccagaccagcgtgtacttttgtgccagcagctacctgggcaacaccggcgagctgttttttggcgagggcagcagactgaccgtgctcgaggacctgaagaacgtgttcccacctgaggtggccgtgttcgagcctagcgaggccgagatcagccacacccagaaagccaccctcgtgtgcctggctaccggcttctaccccgaccatgtggaactgtcttggtgggtcaacggcaaagaggtgcacagcggcgtgtctaccgacccccagccactgaaagaacagcccgccctgaacgacagccggtactgcctgagcagcagactgagagtgtccgccaccttctggcagaacccccggaaccacttcagatgccaggtgcagttctacggcctgagcgagaacgacgagtggacccaggacagagccaagcccgtgacccagatcgtgtctgccgaagcctggggcagagccgattgcggatcccagagcttcggcctgctggaccccaagctgtgctacctgctggatggcatcctgttcatctacggcgtgatcctgaccgccctgttcctgaggagtaagaggagcaggctcctgcacagtgactacatgaacatgactccacgccgccccggacccacccgcaagcattaccagccctatgccccaccacgcgacttcgcagcctatcgctccagagtgaagttcagcagaagcgccgacgcccctgcctaccagcagggacagaaccaactgtacaacgagctgaacctgggcagacgggaagagtacgacgtgctggacaagcggagaggcagggaccctgagatgggcggaaagccccggagaaagaacccccaggaaggactgtataacgaactccagaaagacaagatggccgaagcctacagcgagatcggcatgaagggcgagcggagaagaggcaagggccacgatggcctgtaccagggcctgagcaccgccaccaaggacacctatgacgccctgcacatgcaggccctgcctccaagaagggccaagcgatctggatctggagcaacaaacttctcactactcaaacaagcaggtgacgtggaggagaatcccgggcctactagtatggactggatttggcgcatccttttccttgtcggcgctgctaccggcgcgcattccttcgaacaagaagtgacacagatccctgccgctctgtctgtgcctgagggcgaaaacctggtgctgaactgctccttcaccgacagcgccatctacaacctccagtggttcaggcaggaccctggaaagggactgacaagcctgctgctgatccagagcagccagagagagcagacctccggcagactgaatgccagcctggataagagcagcggcaggtctaccctgtatatcgccgcttctcagcctggcgatagcgccacatatctgtgtgctgtgcggcctacaagcggcggcagctacatccctacatttggcagaggcaccagcctgatcgtgcacccttatacgcgtatccagaaccctgatcctgccgtgtaccagctgcgggatagcaagagcagcgacaagagcgtgtgtctgttcaccgacttcgacagccagaccaacgtgtcccagagcaaggactccgacgtgtacatcaccgataagaccgtgctggacatgcggagcatggacttcaagagcaactccgccgtggcctggtccaacaagtccgatttcgcctgcgccaacgccttcaacaacagcattatccccgaggacacattcttcccaagccccgagagcagctgcggtacccagagttttgggttgttggaccctaaattgtgctatctgttggacggaatcctgttcatttacggagtgatcctgaccgcattgttcctgaggagcaagcggtcacggctgctccacagcgattacatgaatatgacaccacgaagaccgggtcctactcgcaaacactaccaaccctacgcacctccccgcgactttgcagcgtaccgatctcgggttaagttttccagatccgcagacgcacccgcttaccaacaagggcagaaccaactctacaatgaacttaatttggggcggagggaagagtacgacgttctggacaaaaggaggggacgagatcccgagatgggcggaaagcctcgaaggaagaatccgcaagaggggctttataacgaactccagaaagataaaatggcagaagcctatagtgagattgggatgaagggagaaaggaggaggggtaaaggtcacgatgggttgtaccaaggattgagcacagccactaaagatacctatgatgcgctccacatgcaggccctgccgccaagataa

SEQ ID NO: 3203 - DNA, 2697 bp, synthetic construct
  source 1..2697: mol_type = other DNA
atggccttaccagtgaccgccttgctcctgccgctggccttgctgctccacgccgccaggccggaattcaatgctggcgtgacccagacacctaagttccaggtgctgaaaaccggccagagcatgaccctgcaatgcgcccaggacatgaaccatgagtacatgagctggtacagacaggaccccggcatgggcctgagactgatccactactctgtggctatccagaccaccgaccagggcgaagtgcccaatggctacaacgtgtccagaagcaccatcgaggacttcccactgagactgctgtctgccgctcctagccagaccagcgtgtacttttgtgccagcagctacctgggcaacaccggcgagctgttttttggcgagggcagcagactgaccgtgctcgaggacctgaagaacgtgttcccacctgaggtggccgtgttcgagcctagcgaggccgagatcagccacacccagaaagccaccctcgtgtgcctggctaccggcttctaccccgaccatgtggaactgtcttggtgggtcaacggcaaagaggtgcacagcggcgtgtctaccgacccccagccactgaaagaacagcccgccctgaacgacagccggtactgcctgagcagcagactgagagtgtccgccaccttctggcagaacccccggaaccacttcagatgccaggtgcagttctacggcctgagcgagaacgacgagtggacccaggacagagccaagcccgtgacccagatcgtgtctgccgaagcctggggcagagccgattgcggatcccagagcttcggcctgctggaccccaagctgtgctacctgctggatggcatcctgttcatctacggcgtgatcctgaccgccctgttcctgaggagtaagaggagcaggctcctgcacagtgactacatgaacatgactccacgccgccccggacccacccgcaagcattaccagccctatgccccaccacgcgacttcgcagcctatcgctccagagtgaagttcagcagaagcgccgacgcccctgcctaccagcagggacagaaccaactgtacaacgagctgaacctgggcagacgggaagagtacgacgtgctggacaagcggagaggcagggaccctgagatgggcggaaagccccggagaaagaacccccaggaaggactgtataacgaactccagaaagacaagatggccgaagcctacagcgagatcggcatgaagggcgagcggagaagaggcaagggccacgatggcctgtaccagggcctgagcaccgccaccaaggacacctatgacgccctgcacatgcaggccctgcctccaagaagggccaagcgatctggatctggagcaacaaacttctcactactcaaacaagcaggtgacgtggaggagaatcccgggcctactagtatggactggatttggcgcatccttttccttgtcggcgctgctaccggcgcgcattccttcgaacaagaagtgacacagatccctgccgctctgtctgtgcctgagggcgaaaacctggtgctgaactgctccttcaccgacagcgccatctacaacctccagtggttcaggcaggaccctggaaagggactgacaagcctgctgctgatccagagcagccagagagagcagacctccggcagactgaatgccagcctggataagagcagcggcaggtctaccctgtatatcgccgcttctcagcctggcgatagcgccacatatctgtgtgctgtgcggcctacaagcggcggcagctacatccctacatttggcagaggcaccagcctgatcgtgcacccttatacgcgtatccagaaccctgatcctgccgtgtaccagctgcgggatagcaagagcagcgacaagagcgtgtgtctgttcaccgacttcgacagccagaccaacgtgtcccagagcaaggactccgacgtgtacatcaccgataagaccgtgctggacatgcggagcatggacttcaagagcaactccgccgtggcctggtccaacaagtccgatttcgcctgcgccaacgccttcaacaacagcattatccccgaggacacattcttcccaagccccgagagcagctgcggtacccagagttttgggttgttggaccctaaattgtgctatctgttggacggaatcctgttcatttacggagtgatcctgaccgcattgttcctgaagagaggccggaagaagctgctgtacatcttcaagcagcctttcatgcggcccgtgcagaccacccaggaagaggacggctgctcctgccggttccccgaggaagaagaaggcggctgcgagctgcgggttaagttttccagatccgcagacgcacccgcttaccaacaagggcagaaccaactctacaatgaacttaatttggggcggagggaagagtacgacgttctggacaaaaggaggggacgagatcccgagatgggcggaaagcctcgaaggaagaatccgcaagaggggctttataacgaactccagaaagataaaatggcagaagcctatagtgagattgggatgaagggagaaaggaggaggggtaaaggtcacgatgggttgtaccaaggattgagcacagccactaaagatacctatgatgcgctccacatgcaggccctgccgccaagataa

SEQ ID NO: 3204 - DNA, 2448 bp, synthetic construct
  source 1..2448: mol_type = other DNA
atggccttaccagtgaccgccttgctcctgccgctggccttgctgctccacgccgccaggccggaattcaatgctggcgtgacccagacacctaagttccaggtgctgaaaaccggccagagcatgaccctgcaatgcgcccaggacatgaaccatgagtacatgagctggtacagacaggaccccggcatgggcctgagactgatccactactctgtggctatccagaccaccgaccagggcgaagtgcccaatggctacaacgtgtccagaagcaccatcgaggacttcccactgagactgctgtctgccgctcctagccagaccagcgtgtacttttgtgccagcagctacctgggcaacaccggcgagctgttttttggcgagggcagcagactgaccgtgctcgaggacctgaagaacgtgttcccacctgaggtggccgtgttcgagcctagcgaggccgagatcagccacacccagaaagccaccctcgtgtgcctggctaccggcttctaccccgaccatgtggaactgtcttggtgggtcaacggcaaagaggtgcacagcggcgtgtctaccgacccccagccactgaaagaacagcccgccctgaacgacagccggtactgcctgagcagcagactgagagtgtccgccaccttctggcagaacccccggaaccacttcagatgccaggtgcagttctacggcctgagcgagaacgacgagtggacccaggacagagccaagcccgtgacccagatcgtgtctgccgaagcctggggcagagccgattgcggatcccagagcttcggcctgctggaccccaagctgtgctacctgctggatggcatcctgttcatctacggcgtgatcctgaccgccctgttcctgagagtgaagttcagcagaagcgccgacgcccctgcctaccagcagggacagaaccaactgtacaacgagctgaacctgggcagacgggaagagtacgacgtgctggacaagcggagaggcagggaccctgagatgggcggaaagccccggagaaagaacccccaggaaggactgttcaacgaactccagaaagacaagatggccgaagccttcagcgagatcggcatgaagggcgagcggagaagaggcaagggccacgatggcctgttccagggcctgagcaccgccaccaaggacaccttcgacgccctgcacatgcaggccctgcctccaagaagggccaagcgatctggatctggagcaacaaacttctcactactcaaacaagcaggtgacgtggaggagaatcccgggcctactagtatggactggatttggcgcatccttttccttgtcggcgctgctaccggcgcgcattccttcgaacaagaagtgacacagatccctgccgctctgtctgtgcctgagggcgaaaacctggtgctgaactgctccttcaccgacagcgccatctacaacctccagtggttcaggcaggaccctggaaagggactgacaagcctgctgctgatccagagcagccagagagagcagacctccggcagactgaatgccagcctggataagagcagcggcaggtctaccctgtatatcgccgcttctcagcctggcgatagcgccacatatctgtgtgctgtgcggcctacaagcggcggcagctacatccctacatttggcagaggcaccagcctgatcgtgcacccttatacgcgtatccagaaccctgatcctgccgtgtaccagctgcgggatagcaagagcagcgacaagagcgtgtgtctgttcaccgacttcgacagccagaccaacgtgtcccagagcaaggactccgacgtgtacatcaccgataagaccgtgctggacatgcggagcatggacttcaagagcaactccgccgtggcctggtccaacaagtccgatttcgcctgcgccaacgccttcaacaacagcattatccccgaggacacattcttcccaagccccgagagcagctgcggtacccagagttttgggttgttggaccctaaattgtgctatctgttggacggaatcctgttcatttacggagtgatcctgaccgcattgttcctgcgggttaagttttccagatccgcagacgcacccgcttaccaacaagggcagaaccaactctacaatgaacttaatttggggcggagggaagagtacgacgttctggacaaaaggaggggacgagatcccgagatgggcggaaagcctcgaaggaagaatccgcaagaggggctttataacgaactccagaaagataaaatggcagaagcctatagtgagattgggatgaagggagaaaggaggaggggtaaaggtcacgatgggttgtaccaaggattgagcacagccactaaagatacctatgatgcgctccacatgcaggccctgccgccaagataa

SEQ ID NO: 3205 - DNA, 2448 bp, synthetic construct
  source 1..2448: mol_type = other DNA
atggccttaccagtgaccgccttgctcctgccgctggccttgctgctccacgccgccaggccggaattcaatgctggcgtgacccagacacctaagttccaggtgctgaaaaccggccagagcatgaccctgcaatgcgcccaggacatgaaccatgagtacatgagctggtacagacaggaccccggcatgggcctgagactgatccactactctgtggctatccagaccaccgaccagggcgaagtgcccaatggctacaacgtgtccagaagcaccatcgaggacttcccactgagactgctgtctgccgctcctagccagaccagcgtgtacttttgtgccagcagctacctgggcaacaccggcgagctgttttttggcgagggcagcagactgaccgtgctcgaggacctgaagaacgtgttcccacctgaggtggccgtgttcgagcctagcgaggccgagatcagccacacccagaaagccaccctcgtgtgcctggctaccggcttctaccccgaccatgtggaactgtcttggtgggtcaacggcaaagaggtgcacagcggcgtgtctaccgacccccagccactgaaagaacagcccgccctgaacgacagccggtactgcctgagcagcagactgagagtgtccgccaccttctggcagaacccccggaaccacttcagatgccaggtgcagttctacggcctgagcgagaacgacgagtggacccaggacagagccaagcccgtgacccagatcgtgtctgccgaagcctggggcagagccgattgcggatcccagagcttcggcctgctggaccccaagctgtgctacctgctggatggcatcctgttcatctacggcgtgatcctgaccgccctgttcctgagagtgaagttcagcagaagcgccgacgcccctgcctaccagcagggacagaaccaactgtacaacgagctgaacctgggcagacgggaagagtacgacgtgctggacaagcggagaggcagggaccctgagatgggcggaaagccccggagaaagaacccccaggaaggactgttcaacgaactccagaaagacaagatggccgaagccttcagcgagatcggcatgaagggcgagcggagaagaggcaagggccacgatggcctgttccagggcctgagcaccgccaccaaggacaccttcgacgccctgcacatgcaggccctgcctccaagaagggccaagcgatctggatctggagcaacaaacttctcactactcaaacaagcaggtgacgtggaggagaatcccgggcctactagtatggactggatttggcgcatccttttccttgtcggcgctgctaccggcgcgcattccttcgaacaagaagtgacacagatccctgccgctctgtctgtgcctgagggcgaaaacctggtgctgaactgctccttcaccgacagcgccatctacaacctccagtggttcaggcaggaccctggaaagggactgacaagcctgctgctgatccagagcagccagagagagcagacctccggcagactgaatgccagcctggataagagcagcggcaggtctaccctgtatatcgccgcttctcagcctggcgatagcgccacatatctgtgtgctgtgcggcctacaagcggcggcagctacatccctacatttggcagaggcaccagcctgatcgtgcacccttatacgcgtatccagaaccctgatcctgccgtgtaccagctgcgggatagcaagagcagcgacaagagcgtgtgtctgttcaccgacttcgacagccagaccaacgtgtcccagagcaaggactccgacgtgtacatcaccgataagaccgtgctggacatgcggagcatggacttcaagagcaactccgccgtggcctggtccaacaagtccgatttcgcctgcgccaacgccttcaacaacagcattatccccgaggacacattcttcccaagccccgagagcagctgcggtacccagagcttcggcctgctggaccccaagctgtgctacctgctggatggcatcctgttcatctacggcgtgatcctgaccgccctgttcctgagagtgaagttcagcagaagcgccgacgcccctgcctaccagcagggacagaaccaactgtacaacgagctgaacctgggcagacgggaagagtacgacgtgctggacaagcggagaggcagggaccctgagatgggcggaaagccccggagaaagaacccccaggaaggactgtataacgaactccagaaagacaagatggccgaagcctacagcgagatcggcatgaagggcgagcggagaagaggcaagggccacgatggcctgtaccagggcctgagcaccgccaccaaggacacctatgacgccctgcacatgcaggccctgcctccaagataa

SEQ ID NO: 3206 - DNA, 2574 bp, synthetic construct
  source 1..2574: mol_type = other DNA
atggccttaccagtgaccgccttgctcctgccgctggccttgctgctccacgccgccaggccggaattcaatgctggcgtgacccagacacctaagttccaggtgctgaaaaccggccagagcatgaccctgcaatgcgcccaggacatgaaccatgagtacatgagctggtacagacaggaccccggcatgggcctgagactgatccactactctgtggctatccagaccaccgaccagggcgaagtgcccaatggctacaacgtgtccagaagcaccatcgaggacttcccactgagactgctgtctgccgctcctagccagaccagcgtgtacttttgtgccagcagctacctgggcaacaccggcgagctgttttttggcgagggcagcagactgaccgtgctcgaggacctgaagaacgtgttcccacctgaggtggccgtgttcgagcctagcgaggccgagatcagccacacccagaaagccaccctcgtgtgcctggctaccggcttctaccccgaccatgtggaactgtcttggtgggtcaacggcaaagaggtgcacagcggcgtgtctaccgacccccagccactgaaagaacagcccgccctgaacgacagccggtactgcctgagcagcagactgagagtgtccgccaccttctggcagaacccccggaaccacttcagatgccaggtgcagttctacggcctgagcgagaacgacgagtggacccaggacagagccaagcccgtgacccagatcgtgtctgccgaagcctggggcagagccgattgcggatcccagagcttcggcctgctggaccccaagctgtgctacctgctggatggcatcctgttcatctacggcgtgatcctgaccgccctgttcctgagagtgaagttcagcagaagcgccgacgcccctgcctaccagcagggacagaaccaactgtacaacgagctgaacctgggcagacgggaagagtacgacgtgctggacaagcggagaggcagggaccctgagatgggcggaaagccccggagaaagaacccccaggaaggactgttcaacgaactccagaaagacaagatggccgaagccttcagcgagatcggcatgaagggcgagcggagaagaggcaagggccacgatggcctgttccagggcctgagcaccgccaccaaggacaccttcgacgccctgcacatgcaggccctgcctccaagaagggccaagcgatctggatctggagcaacaaacttctcactactcaaacaagcaggtgacgtggaggagaatcccgggcctactagtatggactggatttggcgcatccttttccttgtcggcgctgctaccggcgcgcattccttcgaacaagaagtgacacagatccctgccgctctgtctgtgcctgagggcgaaaacctggtgctgaactgctccttcaccgacagcgccatctacaacctccagtggttcaggcaggaccctggaaagggactgacaagcctgctgctgatccagagcagccagagagagcagacctccggcagactgaatgccagcctggataagagcagcggcaggtctaccctgtatatcgccgcttctcagcctggcgatagcgccacatatctgtgtgctgtgcggcctacaagcggcggcagctacatccctacatttggcagaggcaccagcctgatcgtgcacccttatacgcgtatccagaaccctgatcctgccgtgtaccagctgcgggatagcaagagcagcgacaagagcgtgtgtctgttcaccgacttcgacagccagaccaacgtgtcccagagcaaggactccgacgtgtacatcaccgataagaccgtgctggacatgcggagcatggacttcaagagcaactccgccgtggcctggtccaacaagtccgatttcgcctgcgccaacgccttcaacaacagcattatccccgaggacacattcttcccaagccccgagagcagctgcggtacccagagcttcggcctgctggaccccaagctgtgctacctgctggatggcatcctgttcatctacggcgtgatcctgaccgccctgttcctgaaacggggcagaaagaaactcctgtatatattcaaacaaccatttatgagaccagtacaaactactcaagaggaagatggctgtagctgccgatttccagaagaagaagaaggaggatgtgaactgagagtgaagttcagcagaagcgccgacgcccctgcctaccagcagggacagaaccaactgtacaacgagctgaacctgggcagacgggaagagtacgacgtgctggacaagcggagaggcagggaccctgagatgggcggaaagccccggagaaagaacccccaggaaggactgtataacgaactccagaaagacaagatggccgaagcctacagcgagatcggcatgaagggcgagcggagaagaggcaagggccacgatggcctgtaccagggcctgagcaccgccaccaaggacacctatgacgccctgcacatgcaggccctgcctccaagataa

SEQ ID NO: 3207 - DNA, 2571 bp, synthetic construct
  source 1..2571: mol_type = other DNA
atggccttaccagtgaccgccttgctcctgccgctggccttgctgctccacgccgccaggccggaattcaatgctggcgtgacccagacacctaagttccaggtgctgaaaaccggccagagcatgaccctgcaatgcgcccaggacatgaaccatgagtacatgagctggtacagacaggaccccggcatgggcctgagactgatccactactctgtggctatccagaccaccgaccagggcgaagtgcccaatggctacaacgtgtccagaagcaccatcgaggacttcccactgagactgctgtctgccgctcctagccagaccagcgtgtacttttgtgccagcagctacctgggcaacaccggcgagctgttttttggcgagggcagcagactgaccgtgctcgaggacctgaagaacgtgttcccacctgaggtggccgtgttcgagcctagcgaggccgagatcagccacacccagaaagccaccctcgtgtgcctggctaccggcttctaccccgaccatgtggaactgtcttggtgggtcaacggcaaagaggtgcacagcggcgtgtctaccgacccccagccactgaaagaacagcccgccctgaacgacagccggtactgcctgagcagcagactgagagtgtccgccaccttctggcagaacccccggaaccacttcagatgccaggtgcagttctacggcctgagcgagaacgacgagtggacccaggacagagccaagcccgtgacccagatcgtgtctgccgaagcctggggcagagccgattgcggatcccagagcttcggcctgctggaccccaagctgtgctacctgctggatggcatcctgttcatctacggcgtgatcctgaccgccctgttcctgagagtgaagttcagcagaagcgccgacgcccctgcctaccagcagggacagaaccaactgtacaacgagctgaacctgggcagacgggaagagtacgacgtgctggacaagcggagaggcagggaccctgagatgggcggaaagccccggagaaagaacccccaggaaggactgttcaacgaactccagaaagacaagatggccgaagccttcagcgagatcggcatgaagggcgagcggagaagaggcaagggccacgatggcctgttccagggcctgagcaccgccaccaaggacaccttcgacgccctgcacatgcaggccctgcctccaagaagggccaagcgatctggatctggagcaacaaacttctcactactcaaacaagcaggtgacgtggaggagaatcccgggcctactagtatggactggatttggcgcatccttttccttgtcggcgctgctaccggcgcgcattccttcgaacaagaagtgacacagatccctgccgctctgtctgtgcctgagggcgaaaacctggtgctgaactgctccttcaccgacagcgccatctacaacctccagtggttcaggcaggaccctggaaagggactgacaagcctgctgctgatccagagcagccagagagagcagacctccggcagactgaatgccagcctggataagagcagcggcaggtctaccctgtatatcgccgcttctcagcctggcgatagcgccacatatctgtgtgctgtgcggcctacaagcggcggcagctacatccctacatttggcagaggcaccagcctgatcgtgcacccttatacgcgtatccagaaccctgatcctgccgtgtaccagctgcgggatagcaagagcagcgacaagagcgtgtgtctgttcaccgacttcgacagccagaccaacgtgtcccagagcaaggactccgacgtgtacatcaccgataagaccgtgctggacatgcggagcatggacttcaagagcaactccgccgtggcctggtccaacaagtccgatttcgcctgcgccaacgccttcaacaacagcattatccccgaggacacattcttcccaagccccgagagcagctgcggtacccagagcttcggcctgctggaccccaagctgtgctacctgctggatggcatcctgttcatctacggcgtgatcctgaccgccctgttcctgaggagtaagaggagcaggctcctgcacagtgactacatgaacatgactccacgccgccccggacccacccgcaagcattaccagccctatgccccaccacgcgacttcgcagcctatcgctccagagtgaagttcagcagaagcgccgacgcccctgcctaccagcagggacagaaccaactgtacaacgagctgaacctgggcagacgggaagagtacgacgtgctggacaagcggagaggcagggaccctgagatgggcggaaagccccggagaaagaacccccaggaaggactgtataacgaactccagaaagacaagatggccgaagcctacagcgagatcggcatgaagggcgagcggagaagaggcaagggccacgatggcctgtaccagggcctgagcaccgccaccaaggacacctatgacgccctgcacatgcaggccctgcctccaagataa

SEQ ID NO: 3208 - DNA, 2556 bp, synthetic construct
  source 1..2556: mol_type = other DNA
atggccttaccagtgaccgccttgctcctgccgctggccttgctgctccacgccgccaggccggaattcaatgctggcgtgacccagacacctaagttccaggtgctgaaaaccggccagagcatgaccctgcaatgcgcccaggacatgaaccatgagtacatgagctggtacagacaggaccccggcatgggcctgagactgatccactactctgtggctatccagaccaccgaccagggcgaagtgcccaatggctacaacgtgtccagaagcaccatcgaggacttcccactgagactgctgtctgccgctcctagccagaccagcgtgtacttttgtgccagcagctacctgggcaacaccggcgagctgttttttggcgagggcagcagactgaccgtgctcgaggacctgaagaacgtgttcccacctgaggtggccgtgttcgagcctagcgaggccgagatcagccacacccagaaagccaccctcgtgtgcctggctaccggcttctaccccgaccatgtggaactgtcttggtgggtcaacggcaaagaggtgcacagcggcgtgtctaccgacccccagccactgaaagaacagcccgccctgaacgacagccggtactgcctgagcagcagactgagagtgtccgccaccttctggcagaacccccggaaccacttcagatgccaggtgcagttctacggcctgagcgagaacgacgagtggacccaggacagagccaagcccgtgacccagatcgtgtctgccgaagcctggggcagagccgattgcggatcccagagcttcggcctgctggaccccaagctgtgctacctgctggatggcatcctgttcatctacggcgtgatcctgaccgccctgttcctgagagtgaagttcagcagaagcgccgacgcccctgcctaccagcagggacagaaccaactgtacaacgagctgaacctgggcagacgggaagagtacgacgtgctggacaagcggagaggcagggaccctgagatgggcggaaagccccggagaaagaacccccaggaaggactgttcaacgaactccagaaagacaagatggccgaagccttcagcgagatcggcatgaagggcgagcggagaagaggcaagggccacgatggcctgttccagggcctgagcaccgccaccaaggacaccttcgacgccctgcacatgcaggccctgcctccaagaagggccaagcgatctggatctggagcaacaaacttctcactactcaaacaagcaggtgacgtggaggagaatcccgggcctactagtatggactggatttggcgcatccttttccttgtcggcgctgctaccggcgcgcattccttcgaacaagaagtgacacagatccctgccgctctgtctgtgcctgagggcgaaaacctggtgctgaactgctccttcaccgacagcgccatctacaacctccagtggttcaggcaggaccctggaaagggactgacaagcctgctgctgatccagagcagccagagagagcagacctccggcagactgaatgccagcctggataagagcagcggcaggtctaccctgtatatcgccgcttctcagcctggcgatagcgccacatatctgtgtgctgtgcggcctacaagcggcggcagctacatccctacatttggcagaggcaccagcctgatcgtgcacccttatacgcgtatccagaaccctgatcctgccgtgtaccagctgcgggatagcaagagcagcgacaagagcgtgtgtctgttcaccgacttcgacagccagaccaacgtgtcccagagcaaggactccgacgtgtacatcaccgataagaccgtgctggacatgcggagcatggacttcaagagcaactccgccgtggcctggtccaacaagtccgatttcgcctgcgccaacgccttcaacaacagcattatccccgaggacacattcttcccaagccccgagagcagctgcggtacccagagcttcggcctgctggaccccaagctgtgctacctgctggatggcatcctgttcatctacggcgtgatcctgaccgccctgttcctgagggaccaaagactgcctcctgacgctcacaaacctccaggcggaggcagcttcagaacccctatccaagaggaacaggctgacgcccacagcaccctggcaaaaattagagtgaagttcagcagaagcgccgacgcccctgcctaccagcagggacagaaccaactgtacaacgagctgaacctgggcagacgggaagagtacgacgtgctggacaagcggagaggcagggaccctgagatgggcggaaagccccggagaaagaacccccaggaaggactgtataacgaactccagaaagacaagatggccgaagcctacagcgagatcggcatgaagggcgagcggagaagaggcaagggccacgatggcctgtaccagggcctgagcaccgccaccaaggacacctatgacgccctgcacatgcaggccctgcctccaagataa

SEQ ID NO: 3209 - DNA, 2808 bp, synthetic construct
  source 1..2808: mol_type = other DNA
atggccttaccagtgaccgccttgctcctgccgctggccttgctgctccacgccgccaggccggaattcaatgctggcgtgacccagacacctaagttccaggtgctgaaaaccggccagagcatgaccctgcaatgcgcccaggacatgaaccatgagtacatgagctggtacagacaggaccccggcatgggcctgagactgatccactactctgtggctatccagaccaccgaccagggcgaagtgcccaatggctacaacgtgtccagaagcaccatcgaggacttcccactgagactgctgtctgccgctcctagccagaccagcgtgtacttttgtgccagcagctacctgggcaacaccggcgagctgttttttggcgagggcagcagactgaccgtgctcgaggacctgaagaacgtgttcccacctgaggtggccgtgttcgagcctagcgaggccgagatcagccacacccagaaagccaccctcgtgtgcctggctaccggcttctaccccgaccatgtggaactgtcttggtgggtcaacggcaaagaggtgcacagcggcgtgtctaccgacccccagccactgaaagaacagcccgccctgaacgacagccggtactgcctgagcagcagactgagagtgtccgccaccttctggcagaacccccggaaccacttcagatgccaggtgcagttctacggcctgagcgagaacgacgagtggacccaggacagagccaagcccgtgacccagatcgtgtctgccgaagcctggggcagagccgattgcggatcccagagcttcggcctgctggaccccaagctgtgctacctgctggatggcatcctgttcatctacggcgtgatcctgaccgccctgttcctgagagtgaagttcagcagaagcgccgacgcccctgcctaccagcagggacagaaccaactgtacaacgagctgaacctgggcagacgggaagagtacgacgtgctggacaagcggagaggcagggaccctgagatgggcggaaagccccggagaaagaacccccaggaaggactgttcaacgaactccagaaagacaagatggccgaagccttcagcgagatcggcatgaagggcgagcggagaagaggcaagggccacgatggcctgttccagggcctgagcaccgccaccaaggacaccttcgacgccctgcacatgcaggccctgcctccaagaagggccaagcgatctggatctggagcaacaaacttctcactactcaaacaagcaggtgacgtggaggagaatcccgggcctactagtatggactggatttggcgcatccttttccttgtcggcgctgctaccggcgcgcattccttcgaacaagaagtgacacagatccctgccgctctgtctgtgcctgagggcgaaaacctggtgctgaactgctccttcaccgacagcgccatctacaacctccagtggttcaggcaggaccctggaaagggactgacaagcctgctgctgatccagagcagccagagagagcagacctccggcagactgaatgccagcctggataagagcagcggcaggtctaccctgtatatcgccgcttctcagcctggcgatagcgccacatatctgtgtgctgtgcggcctacaagcggcggcagctacatccctacatttggcagaggcaccagcctgatcgtgcacccttatacgcgtatccagaaccctgatcctgccgtgtaccagctgcgggatagcaagagcagcgacaagagcgtgtgtctgttcaccgacttcgacagccagaccaacgtgtcccagagcaaggactccgacgtgtacatcaccgataagaccgtgctggacatgcggagcatggacttcaagagcaactccgccgtggcctggtccaacaagtccgatttcgcctgcgccaacgccttcaacaacagcattatccccgaggacacattcttcccaagccccgagagcagctgcggtacccagagcttcggcctgctggaccccaagctgtgctacctgctggatggcatcctgttcatctacggcgtgatcctgaccgccctgttcctgtggcggcggaagcggaaagagaagcagtctgagacaagccccaaagagttcctgaccatctacgaggacgtgaaggacctgaaaacccggcggaaccacgaacaagagcagacctttcctggcggaggcagcaccatctacagcatgatccagagccagagcagcgcccctacaagccaagagcctgcctacacactgtactccctgatccagcctagcagaaagagcggcagccggaagagaaatcacagccccagcttcaacagcacgatctacgaagtgatcggcaagagccagccaaaggctcagaaccctgccagactgagccggaaagagctggaaaacttcgacgtgtacagcagagtgaagttcagcagaagcgccgacgcccctgcctaccagcagggacagaaccaactgtacaacgagctgaacctgggcagacgggaagagtacgacgtgctggacaagcggagaggcagggaccctgagatgggcggaaagccccggagaaagaacccccaggaaggactgtataacgaactccagaaagacaagatggccgaagcctacagcgagatcggcatgaagggcgagcggagaagaggcaagggccacgatggcctgtaccagggcctgagcaccgccaccaaggacacctatgacgccctgcacatgcaggccctgcctccaagataa

SEQ ID NO: 3210 - DNA, 2571 bp, synthetic construct
  source 1..2571: mol_type = other DNA
atggccttaccagtgaccgccttgctcctgccgctggccttgctgctccacgccgccaggccggaattcaatgctggcgtgacccagacacctaagttccaggtgctgaaaaccggccagagcatgaccctgcaatgcgcccaggacatgaaccatgagtacatgagctggtacagacaggaccccggcatgggcctgagactgatccactactctgtggctatccagaccaccgaccagggcgaagtgcccaatggctacaacgtgtccagaagcaccatcgaggacttcccactgagactgctgtctgccgctcctagccagaccagcgtgtacttttgtgccagcagctacctgggcaacaccggcgagctgttttttggcgagggcagcagactgaccgtgctcgaggacctgaagaacgtgttcccacctgaggtggccgtgttcgagcctagcgaggccgagatcagccacacccagaaagccaccctcgtgtgcctggctaccggcttctaccccgaccatgtggaactgtcttggtgggtcaacggcaaagaggtgcacagcggcgtgtctaccgacccccagccactgaaagaacagcccgccctgaacgacagccggtactgcctgagcagcagactgagagtgtccgccaccttctggcagaacccccggaaccacttcagatgccaggtgcagttctacggcctgagcgagaacgacgagtggacccaggacagagccaagcccgtgacccagatcgtgtctgccgaagcctggggcagagccgattgcggatcccagagcttcggcctgctggaccccaagctgtgctacctgctggatggcatcctgttcatctacggcgtgatcctgaccgccctgttcctgagagtgaagttcagcagaagcgccgacgcccctgcctaccagcagggacagaaccaactgtacaacgagctgaacctgggcagacgggaagagtacgacgtgctggacaagcggagaggcagggaccctgagatgggcggaaagccccggagaaagaacccccaggaaggactgttcaacgaactccagaaagacaagatggccgaagccttcagcgagatcggcatgaagggcgagcggagaagaggcaagggccacgatggcctgttccagggcctgagcaccgccaccaaggacaccttcgacgccctgcacatgcaggccctgcctccaagaagggccaagcgatctggatctggagcaacaaacttctcactactcaaacaagcaggtgacgtggaggagaatcccgggcctactagtatggactggatttggcgcatccttttccttgtcggcgctgctaccggcgcgcattccttcgaacaagaagtgacacagatccctgccgctctgtctgtgcctgagggcgaaaacctggtgctgaactgctccttcaccgacagcgccatctacaacctccagtggttcaggcaggaccctggaaagggactgacaagcctgctgctgatccagagcagccagagagagcagacctccggcagactgaatgccagcctggataagagcagcggcaggtctaccctgtatatcgccgcttctcagcctggcgatagcgccacatatctgtgtgctgtgcggcctacaagcggcggcagctacatccctacatttggcagaggcaccagcctgatcgtgcacccttatacgcgtatccagaaccctgatcctgccgtgtaccagctgcgggatagcaagagcagcgacaagagcgtgtgtctgttcaccgacttcgacagccagaccaacgtgtcccagagcaaggactccgacgtgtacatcaccgataagaccgtgctggacatgcggagcatggacttcaagagcaactccgccgtggcctggtccaacaagtccgatttcgcctgcgccaacgccttcaacaacagcattatccccgaggacacattcttcccaagccccgagagcagctgcggtacccagagttttgggttgttggaccctaaattgtgctatctgttggacggaatcctgttcatttacggagtgatcctgaccgcattgttcctgaggagcaagcggtcacggctgctccacagcgattacatgaatatgacaccacgaagaccgggtcctactcgcaaacactaccaaccctacgcacctccccgcgactttgcagcgtaccgatctcgggttaagttttccagatccgcagacgcacccgcttaccaacaagggcagaaccaactctacaatgaacttaatttggggcggagggaagagtacgacgttctggacaaaaggaggggacgagatcccgagatgggcggaaagcctcgaaggaagaatccgcaagaggggctttataacgaactccagaaagataaaatggcagaagcctatagtgagattgggatgaagggagaaaggaggaggggtaaaggtcacgatgggttgtaccaaggattgagcacagccactaaagatacctatgatgcgctccacatgcaggccctgccgccaagataa

SEQ ID NO: 3211 - DNA, 2574 bp, synthetic construct
  source 1..2574: mol_type = other DNA
atggccttaccagtgaccgccttgctcctgccgctggccttgctgctccacgccgccaggccggaattcaatgctggcgtgacccagacacctaagttccaggtgctgaaaaccggccagagcatgaccctgcaatgcgcccaggacatgaaccatgagtacatgagctggtacagacaggaccccggcatgggcctgagactgatccactactctgtggctatccagaccaccgaccagggcgaagtgcccaatggctacaacgtgtccagaagcaccatcgaggacttcccactgagactgctgtctgccgctcctagccagaccagcgtgtacttttgtgccagcagctacctgggcaacaccggcgagctgttttttggcgagggcagcagactgaccgtgctcgaggacctgaagaacgtgttcccacctgaggtggccgtgttcgagcctagcgaggccgagatcagccacacccagaaagccaccctcgtgtgcctggctaccggcttctaccccgaccatgtggaactgtcttggtgggtcaacggcaaagaggtgcacagcggcgtgtctaccgacccccagccactgaaagaacagcccgccctgaacgacagccggtactgcctgagcagcagactgagagtgtccgccaccttctggcagaacccccggaaccacttcagatgccaggtgcagttctacggcctgagcgagaacgacgagtggacccaggacagagccaagcccgtgacccagatcgtgtctgccgaagcctggggcagagccgattgcggatcccagagcttcggcctgctggaccccaagctgtgctacctgctggatggcatcctgttcatctacggcgtgatcctgaccgccctgttcctgagagtgaagttcagcagaagcgccgacgcccctgcctaccagcagggacagaaccaactgtacaacgagctgaacctgggcagacgggaagagtacgacgtgctggacaagcggagaggcagggaccctgagatgggcggaaagccccggagaaagaacccccaggaaggactgttcaacgaactccagaaagacaagatggccgaagccttcagcgagatcggcatgaagggcgagcggagaagaggcaagggccacgatggcctgttccagggcctgagcaccgccaccaaggacaccttcgacgccctgcacatgcaggccctgcctccaagaagggccaagcgatctggatctggagcaacaaacttctcactactcaaacaagcaggtgacgtggaggagaatcccgggcctactagtatggactggatttggcgcatccttttccttgtcggcgctgctaccggcgcgcattccttcgaacaagaagtgacacagatccctgccgctctgtctgtgcctgagggcgaaaacctggtgctgaactgctccttcaccgacagcgccatctacaacctccagtggttcaggcaggaccctggaaagggactgacaagcctgctgctgatccagagcagccagagagagcagacctccggcagactgaatgccagcctggataagagcagcggcaggtctaccctgtatatcgccgcttctcagcctggcgatagcgccacatatctgtgtgctgtgcggcctacaagcggcggcagctacatccctacatttggcagaggcaccagcctgatcgtgcacccttatacgcgtatccagaaccctgatcctgccgtgtaccagctgcgggatagcaagagcagcgacaagagcgtgtgtctgttcaccgacttcgacagccagaccaacgtgtcccagagcaaggactccgacgtgtacatcaccgataagaccgtgctggacatgcggagcatggacttcaagagcaactccgccgtggcctggtccaacaagtccgatttcgcctgcgccaacgccttcaacaacagcattatccccgaggacacattcttcccaagccccgagagcagctgcggtacccagagttttgggttgttggaccctaaattgtgctatctgttggacggaatcctgttcatttacggagtgatcctgaccgcattgttcctgaagagaggccggaagaagctgctgtacatcttcaagcagcctttcatgcggcccgtgcagaccacccaggaagaggacggctgctcctgccggttccccgaggaagaagaaggcggctgcgagctgcgggttaagttttccagatccgcagacgcacccgcttaccaacaagggcagaaccaactctacaatgaacttaatttggggcggagggaagagtacgacgttctggacaaaaggaggggacgagatcccgagatgggcggaaagcctcgaaggaagaatccgcaagaggggctttataacgaactccagaaagataaaatggcagaagcctatagtgagattgggatgaagggagaaaggaggaggggtaaaggtcacgatgggttgtaccaaggattgagcacagccactaaagatacctatgatgcgctccacatgcaggccctgccgccaagataa

SEQ ID NO: 3212 - DNA, 2448 bp, synthetic construct
  source 1..2448: mol_type = other DNA
atggccttaccagtgaccgccttgctcctgccgctggccttgctgctccacgccgccaggccggaattcaatgctggcgtgacccagacacctaagttccaggtgctgaaaaccggccagagcatgaccctgcaatgcgcccaggacatgaaccatgagtacatgagctggtacagacaggaccccggcatgggcctgagactgatccactactctgtggctatccagaccaccgaccagggcgaagtgcccaatggctacaacgtgtccagaagcaccatcgaggacttcccactgagactgctgtctgccgctcctagccagaccagcgtgtacttttgtgccagcagctacctgggcaacaccggcgagctgttttttggcgagggcagcagactgaccgtgctcgaggacctgaagaacgtgttcccacctgaggtggccgtgttcgagcctagcgaggccgagatcagccacacccagaaagccaccctcgtgtgcctggctaccggcttctaccccgaccatgtggaactgtcttggtgggtcaacggcaaagaggtgcacagcggcgtgtctaccgacccccagccactgaaagaacagcccgccctgaacgacagccggtactgcctgagcagcagactgagagtgtccgccaccttctggcagaacccccggaaccacttcagatgccaggtgcagttctacggcctgagcgagaacgacgagtggacccaggacagagccaagcccgtgacccagatcgtgtctgccgaagcctggggcagagccgattgcggatcccagagcttcggcctgctggaccccaagctgtgctacctgctggatggcatcctgttcatctacggcgtgatcctgaccgccctgttcctgagagtgaagttcagcagaagcgccgacgcccctgcctaccagcagggacagaaccaactgtacaacgagctgaacctgggcagacgggaagagtacgacgtgctggacaagcggagaggcagggaccctgagatgggcggaaagccccggagaaagaacccccaggaaggactgttcaacgaactccagaaagacaagatggccgaagccttcagcgagatcggcatgaagggcgagcggagaagaggcaagggccacgatggcctgttccagggcctgagcaccgccaccaaggacaccttcgacgccctgcacatgcaggccctgcctccaagaagggccaagcgatctggatctggagcaacaaacttctcactactcaaacaagcaggtgacgtggaggagaatcccgggcctactagtatggactggatttggcgcatccttttccttgtcggcgctgctaccggcgcgcattccttcgaacaagaagtgacacagatccctgccgctctgtctgtgcctgagggcgaaaacctggtgctgaactgctccttcaccgacagcgccatctacaacctccagtggttcaggcaggaccctggaaagggactgacaagcctgctgctgatccagagcagccagagagagcagacctccggcagactgaatgccagcctggataagagcagcggcaggtctaccctgtatatcgccgcttctcagcctggcgatagcgccacatatctgtgtgctgtgcggcctacaagcggcggcagctacatccctacatttggcagaggcaccagcctgatcgtgcacccttatacgcgtatccagaaccctgatcctgccgtgtaccagctgcgggatagcaagagcagcgacaagagcgtgtgtctgttcaccgacttcgacagccagaccaacgtgtcccagagcaaggactccgacgtgtacatcaccgataagaccgtgctggacatgcggagcatggacttcaagagcaactccgccgtggcctggtccaacaagtccgatttcgcctgcgccaacgccttcaacaacagcattatccccgaggacacattcttcccaagccccgagagcagctgcggtacccagagcttcggcctgctggaccccaagctgagctacctgctggatggcatcctgttcatctacggcgtgatcctgaccgccctgttcctgagagtgaagttcagcagaagcgccgacgcccctgcctaccagcagggacagaaccaactgtacaacgagctgaacctgggcagacgggaagagtacgacgtgctggacaagcggagaggcagggaccctgagatgggcggaaagccccggagaaagaacccccaggaaggactgtataacgaactccagaaagacaagatggccgaagcctacagcgagatcggcatgaagggcgagcggagaagaggcaagggccacgatggcctgtaccagggcctgagcaccgccaccaaggacacctatgacgccctgcacatgcaggccctgcctccaagataa

SEQ ID NO: 3213 - DNA, 2448 bp, synthetic construct
  source 1..2448: mol_type = other DNA
atggccttaccagtgaccgccttgctcctgccgctggccttgctgctccacgccgccaggccggaattcaatgctggcgtgacccagacacctaagttccaggtgctgaaaaccggccagagcatgaccctgcaatgcgcccaggacatgaaccatgagtacatgagctggtacagacaggaccccggcatgggcctgagactgatccactactctgtggctatccagaccaccgaccagggcgaagtgcccaatggctacaacgtgtccagaagcaccatcgaggacttcccactgagactgctgtctgccgctcctagccagaccagcgtgtacttttgtgccagcagctacctgggcaacaccggcgagctgttttttggcgagggcagcagactgaccgtgctcgaggacctgaagaacgtgttcccacctgaggtggccgtgttcgagcctagcgaggccgagatcagccacacccagaaagccaccctcgtgtgcctggctaccggcttctaccccgaccatgtggaactgtcttggtgggtcaacggcaaagaggtgcacagcggcgtgtctaccgacccccagccactgaaagaacagcccgccctgaacgacagccggtactgcctgagcagcagactgagagtgtccgccaccttctggcagaacccccggaaccacttcagatgccaggtgcagttctacggcctgagcgagaacgacgagtggacccaggacagagccaagcccgtgacccagatcgtgtctgccgaagcctggggcagagccgattgcggatcccagagcttcggcctgctggaccccaagctgtgctacctgctggatggcatcctgttcatctacggcgtgatcctgaccgccctgttcctgagagtgaagttcagcagaagcgccgacgcccctgcctaccagcagggacagaaccaactgtacaacgagctgaacctgggcagacgggaagagtacgacgtgctggacaagcggagaggcagggaccctgagatgggcggaaagccccggagaaagaacccccaggaaggactgttcaacgaactccagaaagacaagatggccgaagccttcagcgagatcggcatgaagggcgagcggagaagaggcaagggccacgatggcctgttccagggcctgagcaccgccaccaaggacaccttcgacgccctgcacatgcaggccctgcctccaagaagggccaagcgatctggatctggagcaacaaacttctcactactcaaacaagcaggtgacgtggaggagaatcccgggcctactagtatggactggatttggcgcatccttttccttgtcggcgctgctaccggcgcgcattccttcgaacaagaagtgacacagatccctgccgctctgtctgtgcctgagggcgaaaacctggtgctgaactgctccttcaccgacagcgccatctacaacctccagtggttcaggcaggaccctggaaagggactgacaagcctgctgctgatccagagcagccagagagagcagacctccggcagactgaatgccagcctggataagagcagcggcaggtctaccctgtatatcgccgcttctcagcctggcgatagcgccacatatctgtgtgctgtgcggcctacaagcggcggcagctacatccctacatttggcagaggcaccagcctgatcgtgcacccttatacgcgtatccagaaccctgatcctgccgtgtaccagctgcgggatagcaagagcagcgacaagagcgtgtgtctgttcaccgacttcgacagccagaccaacgtgtcccagagcaaggactccgacgtgtacatcaccgataagaccgtgctggacatgcggagcatggacttcaagagcaactccgccgtggcctggtccaacaagtccgatttcgcctgcgccaacgccttcaacaacagcattatccccgaggacacattcttcccaagccccgagagcagctgcggtacccagagttttgggttgttggaccctaaattgagctatctgttggacggaatcctgttcatttacggagtgatcctgaccgcattgttcctgcgggttaagttttccagatccgcagacgcacccgcttaccaacaagggcagaaccaactctacaatgaacttaatttggggcggagggaagagtacgacgttctggacaaaaggaggggacgagatcccgagatgggcggaaagcctcgaaggaagaatccgcaagaggggctttataacgaactccagaaagataaaatggcagaagcctatagtgagattgggatgaagggagaaaggaggaggggtaaaggtcacgatgggttgtaccaaggattgagcacagccactaaagatacctatgatgcgctccacatgcaggccctgccgccaagataa

SEQ ID NO: 3214 - DNA, 2448 bp, synthetic construct
  source 1..2448: mol_type = other DNA
atggccttaccagtgaccgccttgctcctgccgctggccttgctgctccacgccgccaggccggaattcaatgctggcgtgacccagacacctaagttccaggtgctgaaaaccggccagagcatgaccctgcaatgcgcccaggacatgaaccatgagtacatgagctggtacagacaggaccccggcatgggcctgagactgatccactactctgtggctatccagaccaccgaccagggcgaagtgcccaatggctacaacgtgtccagaagcaccatcgaggacttcccactgagactgctgtctgccgctcctagccagaccagcgtgtacttttgtgccagcagctacctgggcaacaccggcgagctgttttttggcgagggcagcagactgaccgtgctcgaggacctgaagaacgtgttcccacctgaggtggccgtgttcgagcctagcgaggccgagatcagccacacccagaaagccaccctcgtgtgcctggctaccggcttctaccccgaccatgtggaactgtcttggtgggtcaacggcaaagaggtgcacagcggcgtgtctaccgacccccagccactgaaagaacagcccgccctgaacgacagccggtactgcctgagcagcagactgagagtgtccgccaccttctggcagaacccccggaaccacttcagatgccaggtgcagttctacggcctgagcgagaacgacgagtggacccaggacagagccaagcccgtgacccagatcgtgtctgccgaagcctggggcagagccgattgcggatcccagagcttcggcctgctggaccccaagctgagctacctgctggatggcatcctgttcatctacggcgtgatcctgaccgccctgttcctgagagtgaagttcagcagaagcgccgacgcccctgcctaccagcagggacagaaccaactgtacaacgagctgaacctgggcagacgggaagagtacgacgtgctggacaagcggagaggcagggaccctgagatgggcggaaagccccggagaaagaacccccaggaaggactgtataacgaactccagaaagacaagatggccgaagcctacagcgagatcggcatgaagggcgagcggagaagaggcaagggccacgatggcctgtaccagggcctgagcaccgccaccaaggacacctatgacgccctgcacatgcaggccctgcctccaagaagggccaagcgatctggatctggagcaacaaacttctcactactcaaacaagcaggtgacgtggaggagaatcccgggcctactagtatggactggatttggcgcatccttttccttgtcggcgctgctaccggcgcgcattccttcgaacaagaagtgacacagatccctgccgctctgtctgtgcctgagggcgaaaacctggtgctgaactgctccttcaccgacagcgccatctacaacctccagtggttcaggcaggaccctggaaagggactgacaagcctgctgctgatccagagcagccagagagagcagacctccggcagactgaatgccagcctggataagagcagcggcaggtctaccctgtatatcgccgcttctcagcctggcgatagcgccacatatctgtgtgctgtgcggcctacaagcggcggcagctacatccctacatttggcagaggcaccagcctgatcgtgcacccttatacgcgtatccagaaccctgatcctgccgtgtaccagctgcgggatagcaagagcagcgacaagagcgtgtgtctgttcaccgacttcgacagccagaccaacgtgtcccagagcaaggactccgacgtgtacatcaccgataagaccgtgctggacatgcggagcatggacttcaagagcaactccgccgtggcctggtccaacaagtccgatttcgcctgcgccaacgccttcaacaacagcattatccccgaggacacattcttcccaagccccgagagcagctgcggtacccagagttttgggttgttggaccctaaattgagctatctgttggacggaatcctgttcatttacggagtgatcctgaccgcattgttcctgcgggttaagttttccagatccgcagacgcacccgcttaccaacaagggcagaaccaactctacaatgaacttaatttggggcggagggaagagtacgacgttctggacaaaaggaggggacgagatcccgagatgggcggaaagcctcgaaggaagaatccgcaagaggggctttataacgaactccagaaagataaaatggcagaagcctatagtgagattgggatgaagggagaaaggaggaggggtaaaggtcacgatgggttgtaccaaggattgagcacagccactaaagatacctatgatgcgctccacatgcaggccctgccgccaagataa

SEQ ID NO: 3215 - DNA, 3252 bp, synthetic construct
  source 1..3252: mol_type = other DNA
atggccttaccagtgaccgccttgctcctgccgctggccttgctgctccacgccgccaggccggaattcaatgctggcgtgacccagacacctaagttccaggtgctgaaaaccggccagagcatgaccctgcaatgcgcccaggacatgaaccatgagtacatgagctggtacagacaggaccccggcatgggcctgagactgatccactactctgtggctatccagaccaccgaccagggcgaagtgcccaatggctacaacgtgtccagaagcaccatcgaggacttcccactgagactgctgtctgccgctcctagccagaccagcgtgtacttttgtgccagcagctacctgggcaacaccggcgagctgttttttggcgagggcagcagactgaccgtgctcgaggacctgaagaacgtgttcccacctgaggtggccgtgttcgagcctagcgaggccgagatcagccacacccagaaagccaccctcgtgtgcctggctaccggcttctaccccgaccatgtggaactgtcttggtgggtcaacggcaaagaggtgcacagcggcgtgtctaccgacccccagccactgaaagaacagcccgccctgaacgacagccggtactgcctgagcagcagactgagagtgtccgccaccttctggcagaacccccggaaccacttcagatgccaggtgcagttctacggcctgagcgagaacgacgagtggacccaggacagagccaagcccgtgacccagatcgtgtctgccgaagcctggggcagagccgattgcggatcccagagcttcggcctgctggaccccaagctgtgctacctgctggatggcatcctgttcatctacggcgtgatcctgaccgccctgttcctgagagtgaagttcagcagaagcgccgacgcccctgcctaccagcagggacagaaccaactgtacaacgagctgaacctgggcagacgggaagagtacgacgtgctggacaagcggagaggcagggaccctgagatgggcggaaagccccggagaaagaacccccaggaaggactgtataacgaactccagaaagacaagatggccgaagcctacagcgagatcggcatgaagggcgagcggagaagaggcaagggccacgatggcctgtaccagggcctgagcaccgccaccaaggacacctatgacgccctgcacatgcaggccctgcctccaagaagggccaagcgatctggatctggagcaacaaacttctcactactcaaacaagcaggtgacgtggaggagaatcccgggcctactagtatggactggatttggcgcatccttttccttgtcggcgctgctaccggcgcgcattccttcgaacaagaagtgacacagatccctgccgctctgtctgtgcctgagggcgaaaacctggtgctgaactgctccttcaccgacagcgccatctacaacctccagtggttcaggcaggaccctggaaagggactgacaagcctgctgctgatccagagcagccagagagagcagacctccggcagactgaatgccagcctggataagagcagcggcaggtctaccctgtatatcgccgcttctcagcctggcgatagcgccacatatctgtgtgctgtgcggcctacaagcggcggcagctacatccctacatttggcagaggcaccagcctgatcgtgcacccttatacgcgtatccagaaccctgatcctgccgtgtaccagctgcgggatagcaagagcagcgacaagagcgtgtgtctgttcaccgacttcgacagccagaccaacgtgtcccagagcaaggactccgacgtgtacatcaccgataagaccgtgctggacatgcggagcatggacttcaagagcaactccgccgtggcctggtccaacaagtccgatttcgcctgcgccaacgccttcaacaacagcattatccccgaggacacattcttcccaagccccgagagcagctgcggtacccagagttttgggttgttggaccctaaattgtgctatctgttggacggaatcctgttcatttacggagtgatcctgaccgcattgttcctgcgggttaagttttccagatccgcagacgcacccgcttaccaacaagggcagaaccaactctacaatgaacttaatttggggcggagggaagagtacgacgttctggacaaaaggaggggacgagatcccgagatgggcggaaagcctcgaaggaagaatccgcaagaggggctttataacgaactccagaaagataaaatggcagaagcctatagtgagattgggatgaagggagaaaggaggaggggtaaaggtcacgatgggttgtaccaaggattgagcacagccactaaagatacctatgatgcgctccacatgcaggccctgccgccaagacgcgccaagagaagcggatctggcgtgaagcagaccctgaatttcgacctgctgaagctggctggcgacgtggaatccaacccaggcccttctagaggccatatggctctgcctgtgacagctctgctgctgcctctggcactgctgcttcatgctgctagacctagccagtttagagtgtcccctctggacagaacctggaacctgggcgagacagtggaactgaagtgccaggtgctgctgagcaaccctacaagcggctgctcctggctgtttcagcctagaggtgcagccgcctctcctacctttctgctgtacctgagccagaacaagcccaaggccgccgaaggactggacacccagagattcagcggcaagagactgggcgacaccttcgtgctgaccctgagcgacttcagaagagagaacgagggctactacttctgtagcgccctgagcaacagcatcatgtacttcagccacttcgtgcccgtgtttctgcccgccaagcctacaacaacccctgctcctagacctcctacaccagctcctacaatcgccagccagcctctgtctctcagacccgaagcctgtagacctgctgctggcggagctgtgcataccagaggactggatttcgcctgcgacatctacatctgggctcctctggctggcacatgtggcgtgctgctgctgtccctggtcatcaccctgtactgcaaccaccggaacaggcggagagtgtgcaagtgccctagacctgtggtcaagagcggcgacaagcctagcctgagcgccagatatgtt

SEQ ID NO: 3216 - DNA, 2475 bp, synthetic construct
  source 1..2475: mol_type = other DNA
atggccttaccagtgaccgccttgctcctgccgctggccttgctgctccacgccgccaggccggaattcaatgctggcgtgacccagacacctaagttccaggtgctgaaaaccggccagagcatgaccctgcaatgcgcccaggacatgaaccatgagtacatgagctggtacagacaggaccccggcatgggcctgagactgatccactactctgtggctatccagaccaccgaccagggcgaagtgcccaatggctacaacgtgtccagaagcaccatcgaggacttcccactgagactgctgtctgccgctcctagccagaccagcgtgtacttttgtgccagcagctacctgggcaacaccggcgagctgttttttggcgagggcagcagactgaccgtgctcgaggacctgaagaacgtgttcccacctgaggtggccgtgttcgagcctagcgaggccgagatcagccacacccagaaagccaccctcgtgtgcctggctaccggcttctaccccgaccatgtggaactgtcttggtgggtcaacggcaaagaggtgcacagcggcgtgtctaccgacccccagccactgaaagaacagcccgccctgaacgacagccggtactgcctgagcagcagactgagagtgtccgccaccttctggcagaacccccggaaccacttcagatgccaggtgcagttctacggcctgagcgagaacgacgagtggacccaggacagagccaagcccgtgacccagatcgtgtctgccgaagcctggggcagagccgattgcggatcccagagcttcggcctgctggaccccaagctgtgctacctgctggatggcatcctgttcatctacggcgtgatcctgaccgccctgttcctgagagtgaagttcagcagaagcgccgacgcccctgcctaccagcagggacagaaccaactgtacaacgagctgaacctgggcagacgggaagagtacgacgtgctggacaagcggagaggcagggaccctgagatgggcggaaagccccggagaaagaacccccaggaaggactgtataacgaactccagaaagacaagatggccgaagcctacagcgagatcggcatgaagggcgagcggagaagaggcaagggccacgatggcctgtaccagggcctgagcaccgccaccaaggacacctatgacgccctgcacatgcaggccctgcctccaagaagggccaagcgatctggatctggagcaacaaacttctcactactcaaacaagcaggtgacgtggaggagaatcccgggcctactagtatggactggatttggcgcatccttttccttgtcggcgctgctaccggcgcgcattccttcgaacaagaagtgacacagatccctgccgctctgtctgtgcctgagggcgaaaacctggtgctgaactgctccttcaccgacagcgccatctacaacctccagtggttcaggcaggaccctggaaagggactgacaagcctgctgctgatccagagcagccagagagagcagacctccggcagactgaatgccagcctggataagagcagcggcaggtctaccctgtatatcgccgcttctcagcctggcgatagcgccacatatctgtgtgctgtgcggcctacaagcggcggcagctacatccctacatttggcagaggcaccagcctgatcgtgcacccttatacgcgtgcctctacaaagggaccctccgtgtttcctctggctcccagcagcaagtctacaagcggaggaacagccgctctgggctgcctggtcaaggattactttcccgagcctgtgaccgtgtcctggaatagcggagcactgacaagcggcgtgcacacctttccagccgtgctgcaaagcagcggcctgtactctctgagcagcgtggtcacagtgcctagctctagcctgggcacccagacctacatctgcaatgtgaaccacaagcctagcaacaccaaggtggacaagagagtggaacccaagagctgtggtacccagagttttgggttgttggaccctaaattgagctatctgttggacggaatcctgttcatttacggagtgatcctgaccgcattgttcctgcgggttaagttttccagatccgcagacgcacccgcttaccaacaagggcagaaccaactctacaatgaacttaatttggggcggagggaagagtacgacgttctggacaaaaggaggggacgagatcccgagatgggcggaaagcctcgaaggaagaatccgcaagaggggctttataacgaactccagaaagataaaatggcagaagcctatagtgagattgggatgaagggagaaaggaggaggggtaaaggtcacgatgggttgtaccaaggattgagcacagccactaaagatacctatgatgcgctccacatgcaggccctgccgccaagataa

SEQ ID NO: 3217 - DNA, 2448 bp, synthetic construct
  source 1..2448: mol_type = other DNA
atggccttaccagtgaccgccttgctcctgccgctggccttgctgctccacgccgccaggccggaattcaatgctggcgtgacccagacacctaagttccaggtgctgaaaaccggccagagcatgaccctgcaatgcgcccaggacatgaaccatgagtacatgagctggtacagacaggaccccggcatgggcctgagactgatccactactctgtggctatccagaccaccgaccagggcgaagtgcccaatggctacaacgtgtccagaagcaccatcgaggacttcccactgagactgctgtctgccgctcctagccagaccagcgtgtacttttgtgccagcagctacctgggcaacaccggcgagctgttttttggcgagggcagcagactgaccgtgctcgaggacctgaagaacgtgttcccacctgaggtggccgtgttcgagcctagcgaggccgagatcagccacacccagaaagccaccctcgtgtgcctggctaccggcttctaccccgaccatgtggaactgtcttggtgggtcaacggcaaagaggtgcacagcggcgtgtctaccgacccccagccactgaaagaacagcccgccctgaacgacagccggtactgcctgagcagcagactgagagtgtccgccaccttctggcagaacccccggaaccacttcagatgccaggtgcagttctacggcctgagcgagaacgacgagtggacccaggacagagccaagcccgtgacccagatcgtgtctgccgaagcctggggcagagccgattgcggatcccagagcttcggcctgctggaccccaagctgtgctacctgctggatggcatcctgttcatctacggcgtgatcctgaccgccctgttcctgagagtgaagttcagcagaagcgccgacgcccctgcctaccagcagggacagaaccaactgtacaacgagctgaacctgggcagacgggaagagtacgacgtgctggacaagcggagaggcagggaccctgagatgggcggaaagccccggagaaagaacccccaggaaggactgtataacgaactccagaaagacaagatggccgaagcctacagcgagatcggcatgaagggcgagcggagaagaggcaagggccacgatggcctgtaccagggcctgagcaccgccaccaaggacacctatgacgccctgcacatgcaggccctgcctccaagaagggccaagcgatctggatctggagcaacaaacttctcactactcaaacaagcaggtgacgtggaggagaatcccgggcctactagtatggactggatttggcgcatccttttccttgtcggcgctgctaccggcgcgcattccttcgaacaagaagtgacacagatccctgccgctctgtctgtgcctgagggcgaaaacctggtgctgaactgctccttcaccgacagcgccatctacaacctccagtggttcaggcaggaccctggaaagggactgacaagcctgctgctgatccagagcagccagagagagcagacctccggcagactgaatgccagcctggataagagcagcggcaggtctaccctgtatatcgccgcttctcagcctggcgatagcgccacatatctgtgtgctgtgcggcctacaagcggcggcagctacatccctacatttggcagaggcaccagcctgatcgtgcacccttatacgcgtatccagaaccctgatcctgccgtgtaccagctgcgggatagcaagagcagcgacaagagcgtgtgtctgttcaccgacttcgacagccagaccaacgtgtcccagagcaaggactccgacgtgtacatcaccgataagaccgtgctggacatgcggagcatggacttcaagagcaactccgccgtggcctggtccaacaagtccgatttcgcctgcgccaacgccttcaacaacagcattatccccgaggacacattcttcccaagccccgagagcagctgcggtacccagagttttgggttgttggaccctaaattgagctatctgttggacggaatcctgttcatttacggagtgatcctgaccgcattgttcctgcgggttaagttttccagatccgcagacgcacccgcttaccaacaagggcagaaccaactctacaatgaacttaatttggggcggagggaagagtacgacgttctggacaaaaggaggggacgagatcccgagatgggcggaaagcctcgaaggaagaatccgcaagaggggctttataacgaactccagaaagataaaatggcagaagcctatagtgagattgggatgaagggagaaaggaggaggggtaaaggtcacgatgggttgtaccaaggattgagcacagccactaaagatacctatgatgcgctccacatgcaggccctgccgccaagataa

SEQ ID NO: 3218 - DNA, 2958 bp, synthetic construct
  source 1..2958: mol_type = other DNA
atggccttaccagtgaccgccttgctcctgccgctggccttgctgctccacgccgccaggccggaattcaatgctggcgtgacccagacacctaagttccaggtgctgaaaaccggccagagcatgaccctgcaatgcgcccaggacatgaaccatgagtacatgagctggtacagacaggaccccggcatgggcctgagactgatccactactctgtggctatccagaccaccgaccagggcgaagtgcccaatggctacaacgtgtccagaagcaccatcgaggacttcccactgagactgctgtctgccgctcctagccagaccagcgtgtacttttgtgccagcagctacctgggcaacaccggcgagctgttttttggcgagggcagcagactgaccgtgctcgagggacagcctaaggccaatcctaccgtgacactgttccctccaagcagcgaagaactccaggccaacaaggccacacttgtgtgcctgatctccgacttctaccctggggctgtgacagtggcttggaaggccgatggatctcctgtgaaagccggcgtggaaaccaccaagccatccaagcagagcaacaacaaatacgccgccagctcctacctgagcctgacacctgagcagtggaagtcccacagatcctacagctgccaagtgacccacgaaggcagcaccgtggaaaagacagtggcccctacagagtgcagcggatccctgggagagcctcagctgtgctatatcctggacgccatcctgtttctgtacggcatcgtgctgaccctgctgtactgccggctgaagatccaagtgcggaaggccgccatcaccagctacgagaaatccgacggcgtgtacaccggcctgagcaccagaaatcaagagacatacgagacactgaagcacgaaaagcctccacaaagggccaagcgatctggatctggagcaacaaacttctcactactcaaacaagcaggtgacgtggaggagaatcccgggcctactagtatggactggatttggcgcatccttttccttgtcggcgctgctaccggcgcgcattccttcgaacaagaagtgacacagatccctgccgctctgtctgtgcctgagggcgaaaacctggtgctgaactgctccttcaccgacagcgccatctacaacctccagtggttcaggcaggaccctggaaagggactgacaagcctgctgctgatccagagcagccagagagagcagacctccggcagactgaatgccagcctggataagagcagcggcaggtctaccctgtatatcgccgcttctcagcctggcgatagcgccacatatctgtgtgctgtgcggcctacaagcggcggcagctacatccctacatttggcagaggcaccagcctgatcgtgcacccttatacgcgtatccagaaccctgatcctgccgtgtaccagctgcgggatagcaagagcagcgacaagagcgtgtgtctgttcaccgacttcgacagccagaccaacgtgtcccagagcaaggactccgacgtgtacatcaccgataagaccgtgctggacatgcggagcatggacttcaagagcaactccgccgtggcctggtccaacaagtccgatttcgcctgcgccaacgccttcaacaacagcattatccccgaggacacattcttcccaagccccgagagcagctgcggtacccagagttttgggttgttggaccctaaattgtgctatctgttggacggaatcctgttcatttacggagtgatcctgaccgcattgttcctgcgggttaagttttccagatccgcagacgcacccgcttaccaacaagggcagaaccaactctacaatgaacttaatttggggcggagggaagagtacgacgttctggacaaaaggaggggacgagatcccgagatgggcggaaagcctcgaaggaagaatccgcaagaggggctttataacgaactccagaaagataaaatggcagaagcctatagtgagattgggatgaagggagaaaggaggaggggtaaaggtcacgatgggttgtaccaaggattgagcacagccactaaagatacctatgatgcgctccacatgcaggccctgccgccaagacgcgccaagagaagcggatctggcgtgaagcagaccctgaatttcgacctgctgaagctggctggcgacgtggaatccaacccaggcccttctagaggccatatggctctgcctgtgacagctctgctgctgcctctggcactgctgcttcatgctgctagacctagccagtttagagtgtcccctctggacagaacctggaacctgggcgagacagtggaactgaagtgccaggtgctgctgagcaaccctacaagcggctgctcctggctgtttcagcctagaggtgcagccgcctctcctacctttctgctgtacctgagccagaacaagcccaaggccgccgaaggactggacacccagagattcagcggcaagagactgggcgacaccttcgtgctgaccctgagcgacttcagaagagagaacgagggctactacttctgtagcgccctgagcaacagcatcatgtacttcagccacttcgtgcccgtgtttctgcccgccaagcctacaacaacccctgctcctagacctcctacaccagctcctacaatcgccagccagcctctgtctctcagacccgaagcctgtagacctgctgctggcggagctgtgcataccagaggactggatttcgcctgcgacatctacatctgggctcctctggctggcacatgtggcgtgctgctgctgtccctggtcatcaccctgtactgcaaccaccggaacaggcggagagtgtgcaagtgccctagacctgtggtcaagagcggcgacaagcctagcctgagcgccagatatgtt

SEQ ID NO: 3219 - DNA, 2253 bp, synthetic construct
  source 1..2253: mol_type = other DNA
atggccttaccagtgaccgccttgctcctgccgctggccttgctgctccacgccgccaggccggaattcaatgctggcgtgacccagacacctaagttccaggtgctgaaaaccggccagagcatgaccctgcaatgcgcccaggacatgaaccatgagtacatgagctggtacagacaggaccccggcatgggcctgagactgatccactactctgtggctatccagaccaccgaccagggcgaagtgcccaatggctacaacgtgtccagaagcaccatcgaggacttcccactgagactgctgtctgccgctcctagccagaccagcgtgtacttttgtgccagcagctacctgggcaacaccggcgagctgttttttggcgagggcagcagactgaccgtgctcgaggacctgaagaacgtgttcccacctgaggtggccgtgttcgagcctagcgaggccgagatcagccacacccagaaagccaccctcgtgtgcctggctaccggcttctaccccgaccatgtggaactgtcttggtgggtcaacggcaaagaggtgcacagcggcgtgtctaccgacccccagccactgaaagaacagcccgccctgaacgacagccggtactgcctgagcagcagactgagagtgtccgccaccttctggcagaacccccggaaccacttcagatgccaggtgcagttctacggcctgagcgagaacgacgagtggacccaggacagagccaagcccgtgacccagatcgtgtctgccgaagcctggggcagagccgattgcggatcccagagcttcggcctgctggaccccaagctgtgctacctgctggatggcatcctgttcatctacggcgtgatcctgaccgccctgttcctgagagtgaagttcagcagaagcgccgacgcccctgcctaccagcagggacagaaccaactgtacaacgagctgaacctgggcagacgggaagagtacgacgtgctggacaagcggagaggcagggaccctgagatgggcggaaagccccggagaaagaacccccaggaaggactgtataacgaactccagaaagacaagatggccgaagcctacagcgagatcggcatgaagggcgagcggagaagaggcaagggccacgatggcctgtaccagggcctgagcaccgccaccaaggacacctatgacgccctgcacatgcaggccctgcctccaagaagggccaagcgatctggatctggagcaacaaacttctcactactcaaacaagcaggtgacgtggaggagaatcccgggcctactagtatggactggatttggcgcatccttttccttgtcggcgctgctaccggcgcgcattccttcgaacaagaagtgacacagatccctgccgctctgtctgtgcctgagggcgaaaacctggtgctgaactgctccttcaccgacagcgccatctacaacctccagtggttcaggcaggaccctggaaagggactgacaagcctgctgctgatccagagcagccagagagagcagacctccggcagactgaatgccagcctggataagagcagcggcaggtctaccctgtatatcgccgcttctcagcctggcgatagcgccacatatctgtgtgctgtgcggcctacaagcggcggcagctacatccctacatttggcagaggcaccagcctgatcgtgcacccttatacgcgtgcctctacaaagggaccctccgtgtttcctctggctcccagcagcaagtctacaagcggaggaacagccgctctgggctgcctggtcaaggattactttcccgagcctgtgaccgtgtcctggaatagcggagcactgacaagcggcgtgcacacctttccagccgtgctgcaaagcagcggcctgtactctctgagcagcgtggtcacagtgcctagctctagcctgggcacccagacctacatctgcaatgtgaaccacaagcctagcaacaccaaggtggacaagagagtggaacccaagagctgtggtaccctcggagaaccacagctctgttacattctggatgctatcctgttcctctatgggatcgtcctgacactcctgtattgcagactcaaaattcaagttcgcaaagccgccattacctcttacgagaagagtgatggggtgtacacaggactgtctacccggaatcaagaaacctacgaaaccctcaaacatgagaagccacctcagtaa

SEQ ID NO: 3220 - DNA, 2253 bp, synthetic construct; identical to SEQ ID NO: 3219
  source 1..2253: mol_type = other DNA

SEQ ID NO: 3221 - DNA, 2226 bp, synthetic construct
  source 1..2226: mol_type = other DNA
atggccttaccagtgaccgccttgctcctgccgctggccttgctgctccacgccgccaggccggaattcaatgctggcgtgacccagacacctaagttccaggtgctgaaaaccggccagagcatgaccctgcaatgcgcccaggacatgaaccatgagtacatgagctggtacagacaggaccccggcatgggcctgagactgatccactactctgtggctatccagaccaccgaccagggcgaagtgcccaatggctacaacgtgtccagaagcaccatcgaggacttcccactgagactgctgtctgccgctcctagccagaccagcgtgtacttttgtgccagcagctacctgggcaacaccggcgagctgttttttggcgagggcagcagactgaccgtgctcgaggacctgaagaacgtgttcccacctgaggtggccgtgttcgagcctagcgaggccgagatcagccacacccagaaagccaccctcgtgtgcctggctaccggcttctaccccgaccatgtggaactgtcttggtgggtcaacggcaaagaggtgcacagcggcgtgtctaccgacccccagccactgaaagaacagcccgccctgaacgacagccggtactgcctgagcagcagactgagagtgtccgccaccttctggcagaacccccggaaccacttcagatgccaggtgcagttctacggcctgagcgagaacgacgagtggacccaggacagagccaagcccgtgacccagatcgtgtctgccgaagcctggggcagagccgattgcggatcccagagcttcggcctgctggaccccaagctgtgctacctgctggatggcatcctgttcatctacggcgtgatcctgaccgccctgttcctgagagtgaagttcagcagaagcgccgacgcccctgcctaccagcagggacagaaccaactgtacaacgagctgaacctgggcagacgggaagagtacgacgtgctggacaagcggagaggcagggaccctgagatgggcggaaagccccggagaaagaacccccaggaaggactgtataacgaactccagaaagacaagatggccgaagcctacagcgagatcggcatgaagggcgagcggagaagaggcaagggccacgatggcctgtaccagggcctgagcaccgccaccaaggacacctatgacgccctgcacatgcaggccctgcctccaagaagggccaagcgatctggatctggagcaacaaacttctcactactcaaacaagcaggtgacgtggaggagaatcccgggcctactagtatggactggatttggcgcatccttttccttgtcggcgctgctaccggcgcgcattccttcgaacaagaagtgacacagatccctgccgctctgtctgtgcctgagggcgaaaacctggtgctgaactgctccttcaccgacagcgccatctacaacctccagtggttcaggcaggaccctggaaagggactgacaagcctgctgctgatccagagcagccagagagagcagacctccggcagactgaatgccagcctggataagagcagcggcaggtctaccctgtatatcgccgcttctcagcctggcgatagcgccacatatctgtgtgctgtgcggcctacaagcggcggcagctacatccctacatttggcagaggcaccagcctgatcgtgcacccttatacgcgtatccagaaccctgatcctgccgtgtaccagctgcgggatagcaagagcagcgacaagagcgtgtgtctgttcaccgacttcgacagccagaccaacgtgtcccagagcaaggactccgacgtgtacatcaccgataagaccgtgctggacatgcggagcatggacttcaagagcaactccgccgtggcctggtccaacaagtccgatttcgcctgcgccaacgccttcaacaacagcattatccccgaggacacattcttcccaagccccgagagcagctgcggtaccctcggagaaccacagctctgttacattctggatgctatcctgttcctctatgggatcgtcctgacactcctgtattgcagactcaaaattcaagttcgcaaagccgccattacctcttacgagaagagtgatggggtgtacacaggactgtctacccggaatcaagaaacctacgaaaccctcaaacatgagaagccacctcagtaa

SEQ ID NO: 3222 - DNA, 2970 bp, synthetic construct
  source 1..2970: mol_type = other DNA
atggccttaccagtgaccgccttgctcctgccgctggccttgctgctccacgccgccaggccggaattcaatgctggcgtgacccagacacctaagttccaggtgctgaaaaccggccagagcatgaccctgcaatgcgcccaggacatgaaccatgagtacatgagctggtacagacaggaccccggcatgggcctgagactgatccactactctgtggctatccagaccaccgaccagggcgaagtgcccaatggctacaacgtgtccagaagcaccatcgaggacttcccactgagactgctgtctgccgctcctagccagaccagcgtgtacttttgtgccagcagctacctgggcaacaccggcgagctgttttttggcgagggcagcagactgaccgtgctcgagggacagcctaaggccaatcctaccgtgacactgttccctccaagcagcgaagaactccaggccaacaaggccacacttgtgtgcctgatctccgacttctaccctggggctgtgacagtggcttggaaggccgatggatctcctgtgaaagccggcgtggaaaccaccaagccatccaagcagagcaacaacaaatacgccgccagctcctacctgagcctgacacctgagcagtggaagtcccacagatcctacagctgccaagtgacccacgaaggcagcaccgtggaaaagacagtggcccctacagagtgcagcacaacacctggcgagagaagtagcctgcctgccttctatcctggcaccagcggctcttgttctggctgtggatctctgagcctgcctctgctggctggactggttgctgctgatgctgtggcctctctgctgattgtgggagccgtgttcctgtgcgccagacctagaagaagccccgctcaagaggacggcaaggtgtacatcaacatgcccggcagaggaagggccaagcgatctggatctggagcaacaaacttctcactactcaaacaagcaggtgacgtggaggagaatcccgggcctactagtatggactggatttggcgcatccttttccttgtcggcgctgctaccggcgcgcattccttcgaacaagaagtgacacagatccctgccgctctgtctgtgcctgagggcgaaaacctggtgctgaactgctccttcaccgacagcgccatctacaacctccagtggttcaggcaggaccctggaaagggactgacaagcctgctgctgatccagagcagccagagagagcagacctccggcagactgaatgccagcctggataagagcagcggcaggtctaccctgtatatcgccgcttctcagcctggcgatagcgccacatatctgtgtgctgtgcggcctacaagcggcggcagctacatccctacatttggcagaggcaccagcctgatcgtgcacccttatacgcgtatccagaaccctgatcctgccgtgtaccagctgcgggatagcaagagcagcgacaagagcgtgtgtctgttcaccgacttcgacagccagaccaacgtgtcccagagcaaggactccgacgtgtacatcaccgataagaccgtgctggacatgcggagcatggacttcaagagcaactccgccgtggcctggtccaacaagtccgatttcgcctgcgccaacgccttcaacaacagcattatccccgaggacacattcttcccaagccccgagagcagctgcggtacccagagttttgggttgttggaccctaaattgtgctatctgttggacggaatcctgttcatttacggagtgatcctgaccgcattgttcctgcgggttaagttttccagatccgcagacgcacccgcttaccaacaagggcagaaccaactctacaatgaacttaatttggggcggagggaagagtacgacgttctggacaaaaggaggggacgagatcccgagatgggcggaaagcctcgaaggaagaatccgcaagaggggctttataacgaactccagaaagataaaatggcagaagcctatagtgagattgggatgaagggagaaaggaggaggggtaaaggtcacgatgggttgtaccaaggattgagcacagccactaaagatacctatgatgcgctccacatgcaggccctgccgccaagacgcgccaagagaagcggatctggcgtgaagcagaccctgaatttcgacctgctgaagctggctggcgacgtggaatccaacccaggcccttctagaggccatatggctctgcctgtgacagctctgctgctgcctctggcactgctgcttcatgctgctagacctagccagtttagagtgtcccctctggacagaacctggaacctgggcgagacagtggaactgaagtgccaggtgctgctgagcaaccctacaagcggctgctcctggctgtttcagcctagaggtgcagccgcctctcctacctttctgctgtacctgagccagaacaagcccaaggccgccgaaggactggacacccagagattcagcggcaagagactgggcgacaccttcgtgctgaccctgagcgacttcagaagagagaacgagggctactacttctgtagcgccctgagcaacagcatcatgtacttcagccacttcgtgcccgtgtttctgcccgccaagcctacaacaacccctgctcctagacctcctacaccagctcctacaatcgccagccagcctctgtctctcagacccgaagcctgtagacctgctgctggcggagctgtgcataccagaggactggatttcgcctgcgacatctacatctgggctcctctggctggcacatgtggcgtgctgctgctgtccctggtcatcaccctgtactgcaaccaccggaacaggcggagagtgtgcaagtgccctagacctgtggtcaagagcggcgacaagcctagcctgagcgccagatatgtt

SEQ ID NO: 3223 - DNA, 3069 bp, synthetic construct
  source 1..3069: mol_type = other DNA
atggccttaccagtgaccgccttgctcctgccgctggccttgctgctccacgccgccaggccggaattcaatgctggcgtgacccagacacctaagttccaggtgctgaaaaccggccagagcatgaccctgcaatgcgcccaggacatgaaccatgagtacatgagctggtacagacaggaccccggcatgggcctgagactgatccactactctgtggctatccagaccaccgaccagggcgaagtgcccaatggctacaacgtgtccagaagcaccatcgaggacttcccactgagactgctgtctgccgctcctagccagaccagcgtgtacttttgtgccagcagctacctgggcaacaccggcgagctgttttttggcgagggcagcagactgaccgtgctcgaggacctgaagaacgtgttcccacctgaggtggccgtgttcgagcctagcgaggccgagatcagccacacccagaaagccaccctcgtgtgcctggctaccggcttctaccccgaccatgtggaactgtcttggtgggtcaacggcaaagaggtgcacagcggcgtgtctaccgacccccagccactgaaagaacagcccgccctgaacgacagccggtactgcctgagcagcagactgagagtgtccgccaccttctggcagaacccccggaaccacttcagatgccaggtgcagttctacggcctgagcgagaacgacgagtggacccaggacagagccaagcccgtgacccagatcgtgtctgccgaagcctggggcagagccgattgcggatcccagagcttcggcctgctggaccccaagctgtgctacctgctggatggcatcctgttcatctacggcgtgatcctgaccgccctgttcctgagagtgaagttcagcagaagcgccgacgcccctgcctaccagcagggacagaaccaactgtacaacgagctgaacctgggcagacgggaagagtacgacgtgctggacaagcggagaggcagggaccctgagatgggcggaaagccccggagaaagaacccccaggaaggactgtataacgaactccagaaagacaagatggccgaagcctacagcgagatcggcatgaagggcgagcggagaagaggcaagggccacgatggcctgtaccagggcctgagcaccgccaccaaggacacctatgacgccctgcacatgcaggccctgcctccaagaagggccaagcgatctggatctggagcaacaaacttctcactactcaaacaagcaggtgacgtggaggagaatcccgggcctactagtatggactggatttggcgcatccttttccttgtcggcgctgctaccggcgcgcattccttcgaacaagaagtgacacagatccctgccgctctgtctgtgcctgagggcgaaaacctggtgctgaactgctccttcaccgacagcgccatctacaacctccagtggttcaggcaggaccctggaaagggactgacaagcctgctgctgatccagagcagccagagagagcagacctccggcagactgaatgccagcctggataagagcagcggcaggtctaccctgtatatcgccgcttctcagcctggcgatagcgccacatatctgtgtgctgtgcggcctacaagcggcggcagctacatccctacatttggcagaggcaccagcctgatcgtgcacccttatacgcgtgcctctacaaagggaccctccgtgtttcctctggctcccagcagcaagtctacaagcggaggaacagccgctctgggctgcctggtcaaggattactttcccgagcctgtgaccgtgtcctggaatagcggagcactgacaagcggcgtgcacacctttccagccgtgctgcaaagcagcggcctgtactctctgagcagcgtggtcacagtgcctagctctagcctgggcacccagacctacatctgcaatgtgaaccacaagcctagcaacaccaaggtggacaagagagtggaacccaagagctgtacaacgccgggcgaaaggagttccttgccggccttttaccccggcacaagcggaagctgtagtgggtgtggaagcctcagcctcccacttcttgcgggcctcgtcgcggcagatgcagtagcttcacttcttattgtaggcgcggtatttctctgtgctcgaccaaggaggtcacccgctcaggaggatggtaaggtgtatataaatatgccaggacgcggacgcgccaagagaagcggatctggcgtgaagcagaccctgaatttcgacctgctgaagctggctggcgacgtggaatccaacccaggcccttctagaggccatatggctctgcctgtgacagctctgctgctgcctctggcactgctgcttcatgctgctagacctagccagtttagagtgtcccctctggacagaacctggaacctgggcgagacagtggaactgaagtgccaggtgctgctgagcaaccctacaagcggctgctcctggctgtttcagcctagaggtgcagccgcctctcctacctttctgctgtacctgagccagaacaagcccaaggccgccgaaggactggacacccagagattcagcggcaagagactgggcgacaccttcgtgctgaccctgagcgacttcagaagagagaacgagggctactacttctgtagcgccctgagcaacagcatcatgtacttcagccacttcgtgcccgtgtttctgcccgccaagcctacaacaacccctgctcctagacctcctacaccagctcctacaatcgccagccagcctctgtctctcagacccgaagcctgtagacctgctgctggcggagctgtgcataccagaggactggatttcgcctgcgacatctacatctgggctcctctggctggcacatgtggcgtgctgctgctgtccctggtcatcaccctgtactgcaaccaccggaacaggcggagagtgtgcaagtgccctagacctgtggtcaagagcggcgacaagcctagcctgagcgccagatatgtt

SEQ ID NO: 3224 - DNA, 3051 bp, synthetic construct
  source 1..3051: mol_type = other DNA
atggccttaccagtgaccgccttgctcctgccgctggccttgctgctccacgccgccaggccggctatccagaccaccgaccagggcgaagtgcccaatggctacaacgtgtccagaagcaccatcgaggacttcccactgagactgctgtctgccgctcctagccagaccagcgtgtacttttgtgccagcagctacctgggcaacaccggcgagctgttttttggcgagggcagcagactgaccgtgctcgagggacagcctaaggccaatcctaccgtgacactgttccctccaagcagcgaagaactccaggccaacaaggccacacttgtgtgcctgatctccgacttctaccctggggctgtgacagtggcttggaaggccgatggatctcctgtgaaagccggcgtggaaaccaccaagccatccaagcagagcaacaacaaatacgccgccagctcctacctgagcctgacacctgagcagtggaagtcccacagatcctacagctgccaagtgacccacgaaggcagcaccgtggaaaagacagtggcccctacagagtgcagcggatcccagagcttcggcctgctggaccccaagctgtgctacctgctggatggcatcctgttcatctacggcgtgatcctgaccgccctgttcctgagagtgaagttcagcagaagcgccgacgcccctgcctaccagcagggacagaaccaactgtacaacgagctgaacctgggcagacgggaagagtacgacgtgctggacaagcggagaggcagggaccctgagatgggcggaaagccccggagaaagaacccccaggaaggactgtataacgaactccagaaagacaagatggccgaagcctacagcgagatcggcatgaagggcgagcggagaagaggcaagggccacgatggcctgtaccagggcctgagcaccgccaccaaggacacctatgacgccctgcacatgcaggccctgcctccaagaagggccaagcgatctggatctggagcaacaaacttctcactactcaaacaagcaggtgacgtggaggagaatcccgggcctactagtatggactggatttggcgcatccttttccttgtcggcgctgctaccggcgcgcattccttcgaacaagaagtgacacagatccctgccgctctgtctgtgcctgagggcgaaaacctggtgctgaactgctccttcaccgacagcgccatctacaacctccagtggttcaggcaggaccctggaaagggactgacaagcctgctgctgatccagagcagccagagagagcagacctccggcagactgaatgccagcctggataagagcagcggcaggtctaccctgtatatcgccgcttctcagcctggcgatagcgccacatatctgtgtgctgtgcggcctacaagcggcggcagctacatccctacatttggcagaggcaccagcctgatcgtgcacccttatacgcgtgcctctacaaagggaccctccgtgtttcctctggctcccagcagcaagtctacaagcggaggaacagccgctctgggctgcctggtcaaggattactttcccgagcctgtgaccgtgtcctggaatagcggagcactgacaagcggcgtgcacacctttccagccgtgctgcaaagcagcggcctgtactctctgagcagcgtggtcacagtgcctagctctagcctgggcacccagacctacatctgcaatgtgaaccacaagcctagcaacaccaaggtggacaagagagtggaacccaagagctgtggtacccagagttttgggttgttggaccctaaattgtgctatctgttggacggaatcctgttcatttacggagtgatcctgaccgcattgttcctgcgggttaagttttccagatccgcagacgcacccgcttaccaacaagggcagaaccaactctacaatgaacttaatttggggcggagggaagagtacgacgttctggacaaaaggaggggacgagatcccgagatgggcggaaagcctcgaaggaagaatccgcaagaggggctttataacgaactccagaaagataaaatggcagaagcctatagtgagattgggatgaagggagaaaggaggaggggtaaaggtcacgatgggttgtaccaaggattgagcacagccactaaagatacctatgatgcgctccacatgcaggccctgccgccaagacgcgccaagagaagcggatctggcgtgaagcagaccctgaatttcgacctgctgaagctggctggcgacgtggaatccaacccaggcccttctagaggccatatggctctgcctgtgacagctctgctgctgcctctggcactgctgcttcatgctgctagacctagccagtttagagtgtcccctctggacagaacctggaacctgggcgagacagtggaactgaagtgccaggtgctgctgagcaaccctacaagcggctgctcctggctgtttcagcctagaggtgcagccgcctctcctacctttctgctgtacctgagccagaacaagcccaaggccgccgaaggactggacacccagagattcagcggcaagagactgggcgacaccttcgtgctgaccctgagcgacttcagaagagagaacgagggctactacttctgtagcgccctgagcaacagcatcatgtacttcagccacttcgtgcccgtgtttctgcccgccaagcctacaacaacccctgctcctagacctcctacaccagctcctacaatcgccagccagcctctgtctctcagacccgaagcctgtagacctgctgctggcggagctgtgcataccagaggactggatttcgcctgcgacatctacatctgggctcctctggctggcacatgtggcgtgctgctgctgtccctggtcatcaccctgtactgcaaccaccggaacaggcggagagtgtgcaagtgccctagacctgtggtcaagagcggcgacaagcctagcctgagcgccagatatgtt

SEQ ID NO: 3225 - DNA, 3105 bp, synthetic construct
  source 1..3105: mol_type = other DNA
atggccttaccagtgaccgccttgctcctgccgctggccttgctgctccacgccgccaggccggctatccagaccaccgaccagggcgaagtgcccaatggctacaacgtgtccagaagcaccatcgaggacttcccactgagactgctgtctgccgctcctagccagaccagcgtgtacttttgtgccagcagctacctgggcaacaccggcgagctgttttttggcgagggcagcagactgaccgtgctcgagggacagcctaaggccaatcctaccgtgacactgttccctccaagcagcgaagaactccaggccaacaaggccacacttgtgtgcctgatctccgacttctaccctggggctgtgacagtggcttggaaggccgatggatctcctgtgaaagccggcgtggaaaccaccaagccatccaagcagagcaacaacaaatacgccgccagctcctacctgagcctgacacctgagcagtggaagtcccacagatcctacagctgccaagtgacccacgaaggcagcaccgtggaaaagacagtggcccctacagagtgcagcggatcccagagcttcggcctgctggaccccaagctgtgctacctgctggatggcatcctgttcatctacggcgtgatcctgaccgccctgttcctgagagtgaagttcagcagaagcgccgacgcccctgcctaccagcagggacagaaccaactgtacaacgagctgaacctgggcagacgggaagagtacgacgtgctggacaagcggagaggcagggaccctgagatgggcggaaagccccggagaaagaacccccaggaaggactgtataacgaactccagaaagacaagatggccgaagcctacagcgagatcggcatgaagggcgagcggagaagaggcaagggccacgatggcctgtaccagggcctgagcaccgccaccaaggacacctatgacgccctgcacatgcaggccctgcctccaagaagggccaagcgatctggatctggagcaacaaacttctcactactcaaacaagcaggtgacgtggaggagaatcccgggcctactagtatggactggatttggcgcatccttttccttgtcggcgctgctaccggcgcgcattccttcgaacaagaagtgacacagatccctgccgctctgtctgtgcctgagggcgaaaacctggtgctgaactgctccttcaccgacagcgccatctacaacctccagtggttcaggcaggaccctggaaagggactgacaagcctgctgctgatccagagcagccagagagagcagacctccggcagactgaatgccagcctggataagagcagcggcaggtctaccctgtatatcgccgcttctcagcctggcgatagcgccacatatctgtgtgctgtgcggcctacaagcggcggcagctacatccctacatttggcagaggcaccagcctgatcgtgcacccttatacgcgtgcgtctcccacttctccgaaagttttccccctttccctctgtagcacacaacctgatggaaatgtggtcatcgcatgtctggtacaaggattctttccacaagagccattgagcgttacatggtcagagagcgggcagggagttaccgctaggaatttcccaccctcacaggatgcgagtggtgatctttataccacatcatcacaactcacgttgccagccactcagtgcctcgctggaaagtcagtaacatgccatgtcaaacattacactaatccctcacaagatgttaccgtgccttgcccagtaccttctacgccgcccaccccgtctccatctactccacccacgccatcacctagtggtacccagagttttgggttgttggaccctaaattgtgctatctgttggacggaatcctgttcatttacggagtgatcctgaccgcattgttcctgcgggttaagttttccagatccgcagacgcacccgcttaccaacaagggcagaaccaactctacaatgaacttaatttggggcggagggaagagtacgacgttctggacaaaaggaggggacgagatcccgagatgggcggaaagcctcgaaggaagaatccgcaagaggggctttataacgaactccagaaagataaaatggcagaagcctatagtgagattgggatgaagggagaaaggaggaggggtaaaggtcacgatgggttgtaccaaggattgagcacagccactaaagatacctatgatgcgctccacatgcaggccctgccgccaagacgcgccaagagaagcggatctggcgtgaagcagaccctgaatttcgacctgctgaagctggctggcgacgtggaatccaacccaggcccttctagaggccatatggctctgcctgtgacagctctgctgctgcctctggcactgctgcttcatgctgctagacctagccagtttagagtgtcccctctggacagaacctggaacctgggcgagacagtggaactgaagtgccaggtgctgctgagcaaccctacaagcggctgctcctggctgtttcagcctagaggtgcagccgcctctcctacctttctgctgtacctgagccagaacaagcccaaggccgccgaaggactggacacccagagattcagcggcaagagactgggcgacaccttcgtgctgaccctgagcgacttcagaagagagaacgagggctactacttctgtagcgccctgagcaacagcatcatgtacttcagccacttcgtgcccgtgtttctgcccgccaagcctacaacaacccctgctcctagacctcctacaccagctcctacaatcgccagccagcctctgtctctcagacccgaagcctgtagacctgctgctggcggagctgtgcataccagaggactggatttcgcctgcgacatctacatctgggctcctctggctggcacatgtggcgtgctgctgctgtccctggtcatcaccctgtactgcaaccaccggaacaggcggagagtgtgcaagtgccctagacctgtggtcaagagcggcgacaagcctagcctgagcgccagatatgtt

SEQ ID NO: 3226 - DNA, 3057 bp, synthetic construct
  source 1..3057: mol_type = other DNA
gctagcaccatggccttaccagtgaccgccttgctcctgccgctggccttgctgctccacgccgccaggccggctatccagaccaccgaccagggcgaagtgcccaatggctacaacgtgtccagaagcaccatcgaggacttcccactgagactgctgtctgccgctcctagccagaccagcgtgtacttttgtgccagcagctacctgggcaacaccggcgagctgttttttggcgagggcagcagactgaccgtgctcgagggacagcctaaggccaatcctaccgtgacactgttccctccaagcagcgaagaactccaggccaacaaggccacacttgtgtgcctgatctccgacttctaccctggggctgtgacagtggcttggaaggccgatggatctcctgtgaaagccggcgtggaaaccaccaagccatccaagcagagcaacaacaaatacgccgccagctcctacctgagcctgacacctgagcagtggaagtcccacagatcctacagctgccaagtgacccacgaaggcagcaccgtggaaaagacagtggcccctacagagtgcagcggatcccagagcttcggcctgctggaccccaagctgtgctacctgctggatggcatcctgttcatctacggcgtgatcctgaccgccctgttcctgagagtgaagttcagcagaagcgccgacgcccctgcctaccagcagggacagaaccaactgtacaacgagctgaacctgggcagacgggaagagtacgacgtgctggacaagcggagaggcagggaccctgagatgggcggaaagccccggagaaagaacccccaggaaggactgtataacgaactccagaaagacaagatggccgaagcctacagcgagatcggcatgaagggcgagcggagaagaggcaagggccacgatggcctgtaccagggcctgagcaccgccaccaaggacacctatgacgccctgcacatgcaggccctgcctccaagaagggccaagcgatctggatctggagcaacaaacttctcactactcaaacaagcaggtgacgtggaggagaatcccgggcctactagtatggactggatttggcgcatccttttccttgtcggcgctgctaccggcgcgcattccttcgaacaagaagtgacacagatccctgccgctctgtctgtgcctgagggcgaaaacctggtgctgaactgctccttcaccgacagcgccatctacaacctccagtggttcaggcaggaccctggaaagggactgacaagcctgctgctgatccagagcagccagagagagcagacctccggcagactgaatgccagcctggataagagcagcggcaggtctaccctgtatatcgccgcttctcagcctggcgatagcgccacatatctgtgtgctgtgcggcctacaagcggcggcagctacatccctacatttggcagaggcaccagcctgatcgtgcacccttatacgcgtgcctccacgaagggaccatctgttttccctcttgccccctgctcacggtcaacgtctgaatccacggcagccctgggctgcctcgttaaggactactttccagagccggtaacagtctcctggaacagtggagcccttacatcaggtgttcacactttccctgccgtcttgcaaagtagcggactgtacagccttagttccgttgttacggttccttctagcaacttcggtacacagacatatacttgtaacgtagatcataagcctagcaacaccaaggtggacaaaaccgtagagagaaagtgtggtacccagagttttgggttgttggaccctaaattgtgctatctgttggacggaatcctgttcatttacggagtgatcctgaccgcattgttcctgcgggttaagttttccagatccgcagacgcacccgcttaccaacaagggcagaaccaactctacaatgaacttaatttggggcggagggaagagtacgacgttctggacaaaaggaggggacgagatcccgagatgggcggaaagcctcgaaggaagaatccgcaagaggggctttataacgaactccagaaagataaaatggcagaagcctatagtgagattgggatgaagggagaaaggaggaggggtaaaggtcacgatgggttgtaccaaggattgagcacagccactaaagatacctatgatgcgctccacatgcaggccctgccgccaagacgcgccaagagaagcggatctggcgtgaagcagaccctgaatttcgacctgctgaagctggctggcgacgtggaatccaacccaggcccttctagaggccatatggctctgcctgtgacagctctgctgctgcctctggcactgctgcttcatgctgctagacctagccagtttagagtgtcccctctggacagaacctggaacctgggcgagacagtggaactgaagtgccaggtgctgctgagcaaccctacaagcggctgctcctggctgtttcagcctagaggtgcagccgcctctcctacctttctgctgtacctgagccagaacaagcccaaggccgccgaaggactggacacccagagattcagcggcaagagactgggcgacaccttcgtgctgaccctgagcgacttcagaagagagaacgagggctactacttctgtagcgccctgagcaacagcatcatgtacttcagccacttcgtgcccgtgtttctgcccgccaagcctacaacaacccctgctcctagacctcctacaccagctcctacaatcgccagccagcctctgtctctcagacccgaagcctgtagacctgctgctggcggagctgtgcataccagaggactggatttcgcctgcgacatctacatctgggctcctctggctggcacatgtggcgtgctgctgctgtccctggtcatcaccctgtactgcaaccaccggaacaggcggagagtgtgcaagtgccctagacctgtggtcaagagcggcgacaagcctagcctgagcgccagatatgtt

SEQ ID NO: 3227 - DNA, 3369 bp, synthetic construct
  source 1..3369: mol_type = other DNA
atggccttaccagtgaccgccttgctcctgccgctggccttgctgctccacgccgccaggccgaatgctggcgtgacccagacacctaagttccaggtgctgaaaaccggccagagcatgaccctgcaatgcgcccaggacatgaaccatgagtacatgagctggtacagacaggaccccggcatgggcctgagactgatccactactctgtggctatccagaccaccgaccagggcgaagtgcccaatggctacaacgtgtccagaagcaccatcgaggacttcccactgagactgctgtctgccgctcctagccagaccagcgtgtacttttgtgccagcagctacctgggcaacaccggcgagctgttttttggcgagggcagcagactgaccgtgctcgagggacagcctaaggccaatcctaccgtgacactgttccctccaagcagcgaagaactccaggccaacaaggccacacttgtgtgcctgatctccgacttctaccctggggctgtgacagtggcttggaaggccgatggatctcctgtgaaagccggcgtggaaaccaccaagccatccaagcagagcaacaacaaatacgccgccagctcctacctgagcctgacacctgagcagtggaagtcccacagatcctacagctgccaagtgacccacgaaggcagcaccgtggaaaagacagtggcccctacagagtgcagcggatcccagagcttcggcctgctggaccccaagctgtgctacctgctggatggcatcctgttcatctacggcgtgatcctgaccgccctgttcctgagagtgaagttcagcagaagcgccgacgcccctgcctaccagcagggacagaaccaactgtacaacgagctgaacctgggcagacgggaagagtacgacgtgctggacaagcggagaggcagggaccctgagatgggcggaaagccccggagaaagaacccccaggaaggactgtataacgaactccagaaagacaagatggccgaagcctacagcgagatcggcatgaagggcgagcggagaagaggcaagggccacgatggcctgtaccagggcctgagcaccgccaccaaggacacctatgacgccctgcacatgcaggccctgcctccaagaagggccaagcgatctggatctggagcaacaaacttctcactactcaaacaagcaggtgacgtggaggagaatcccgggcctactagtatggactggatttggcgcatccttttccttgtcggcgctgctaccggcgcgcattccttcgaacaagaagtgacacagatccctgccgctctgtctgtgcctgagggcgaaaacctggtgctgaactgctccttcaccgacagcgccatctacaacctccagtggttcaggcaggaccctggaaagggactgacaagcctgctgctgatccagagcagccagagagagcagacctccggcagactgaatgccagcctggataagagcagcggcaggtctaccctgtatatcgccgcttctcagcctggcgatagcgccacatatctgtgtgctgtgcggcctacaagcggcggcagctacatccctacatttggcagaggcaccagcctgatcgtgcacccttatacgcgtgctccgacaaaggcgccagacgtttttcctattatttcaggatgtcggcatccgaaagataattccccagttgttctggcgtgtcttatcacgggctaccatcctacatctgttaccgttacgtggtatatgggtacgcaaagccaacctcagcggacttttccagagatccaacggcgagattcatattatatgacatccagtcagttgagtacaccgctgcaacagtggcggcaaggtgagtataagtgtgtggtccaacacacagccagtaaaagtaagaaagagatattccggtggcctgaaagcccgaaggcacaagcatcttctgttccgacggcgcaaccgcaagctgaaggaagtcttgcaaaagcaaccacagcacccgcgacaacacgaaacacaggacgcggaggcgaggaaaagaaaaaagaaaaggaaaaggaagagcaagaggagagggaaactaagacccccggtacccagagttttgggttgttggaccctaaattgtgctatctgttggacggaatcctgttcatttacggagtgatcctgaccgcattgttcctgcgggttaagttttccagatccgcagacgcacccgcttaccaacaagggcagaaccaactctacaatgaacttaatttggggcggagggaagagtacgacgttctggacaaaaggaggggacgagatcccgagatgggcggaaagcctcgaaggaagaatccgcaagaggggctttataacgaactccagaaagataaaatggcagaagcctatagtgagattgggatgaagggagaaaggaggaggggtaaaggtcacgatgggttgtaccaaggattgagcacagccactaaagatacctatgatgcgctccacatgcaggccctgccgccaagacgcgccaagagaagcggatctggcgtgaagcagaccctgaatttcgacctgctgaagctggctggcgacgtggaatccaacccaggcccttctagaggccatatggctctgcctgtgacagctctgctgctgcctctggcactgctgcttcatgctgctagacctagccagtttagagtgtcccctctggacagaacctggaacctgggcgagacagtggaactgaagtgccaggtgctgctgagcaaccctacaagcggctgctcctggctgtttcagcctagaggtgcagccgcctctcctacctttctgctgtacctgagccagaacaagcccaaggccgccgaaggactggacacccagagattcagcggcaagagactgggcgacaccttcgtgctgaccctgagcgacttcagaagagagaacgagggctactacttctgtagcgccctgagcaacagcatcatgtacttcagccacttcgtgcccgtgtttctgcccgccaagcctacaacaacccctgctcctagacctcctacaccagctcctacaatcgccagccagcctctgtctctcagacccgaagcctgtagacctgctgctggcggagctgtgcataccagaggactggatttcgcctgcgacatctacatctgggctcctctggctggcacatgtggcgtgctgctgctgtccctggtcatcaccctgtactgcaaccaccggaacaggcggagagtgtgcaagtgccctagacctgtggtcaagagcggcgacaagcctagcctgagcgccagatatgtt

SEQ ID NO: 3228 - DNA, 3195 bp, synthetic construct
  source 1..3195: mol_type = other DNA
atggccttaccagtgaccgccttgctcctgccgctggccttgctgctccacgccgccaggccgaatgctggcgtgacccagacacctaagttccaggtgctgaaaaccggccagagcatgaccctgcaatgcgcccaggacatgaaccatgagtacatgagctggtacagacaggaccccggcatgggcctgagactgatccactactctgtggctatccagaccaccgaccagggcgaagtgcccaatggctacaacgtgtccagaagcaccatcgaggacttcccactgagactgctgtctgccgctcctagccagaccagcgtgtacttttgtgccagcagctacctgggcaacaccggcgagctgttttttggcgagggcagcagactgaccgtgctcgagggacagcctaaggccaatcctaccgtgacactgttccctccaagcagcgaagaactccaggccaacaaggccacacttgtgtgcctgatctccgacttctaccctggggctgtgacagtggcttggaaggccgatggatctcctgtgaaagccggcgtggaaaccaccaagccatccaagcagagcaacaacaaatacgccgccagctcctacctgagcctgacacctgagcagtggaagtcccacagatcctacagctgccaagtgacccacgaaggcagcaccgtggaaaagacagtggcccctacagagtgcagcggatcccagagcttcggcctgctggaccccaagctgtgctacctgctggatggcatcctgttcatctacggcgtgatcctgaccgccctgttcctgagagtgaagttcagcagaagcgccgacgcccctgcctaccagcagggacagaaccaactgtacaacgagctgaacctgggcagacgggaagagtacgacgtgctggacaagcggagaggcagggaccctgagatgggcggaaagccccggagaaagaacccccaggaaggactgtataacgaactccagaaagacaagatggccgaagcctacagcgagatcggcatgaagggcgagcggagaagaggcaagggccacgatggcctgtaccagggcctgagcaccgccaccaaggacacctatgacgccctgcacatgcaggccctgcctccaagaagggccaagcgatctggatctggagcaacaaacttctcactactcaaacaagcaggtgacgtggaggagaatcccgggcctactagtatggactggatttggcgcatccttttccttgtcggcgctgctaccggcgcgcattccttcgaacaagaagtgacacagatccctgccgctctgtctgtgcctgagggcgaaaacctggtgctgaactgctccttcaccgacagcgccatctacaacctccagtggttcaggcaggaccctggaaagggactgacaagcctgctgctgatccagagcagccagagagagcagacctccggcagactgaatgccagcctggataagagcagcggcaggtctaccctgtatatcgccgcttctcagcctggcgatagcgccacatatctgtgtgctgtgcggcctacaagcggcggcagctacatccctacatttggcagaggcaccagcctgatcgtgcacccttatacgcgtgcctcaacgaaagggcctagcgtcttccccctggcgccgtgctcacgatccacaagcgaatccaccgccgctctcggatgcctcgtaaaggattatttccctgaaccagtcacggtgtcatggaacagcggtgcccttaccagcggcgtccatacctttcctgctgtgctccagtccagcggactttatagtctcagctctgtcgtgaccgtcccttcctctaattttggcacccagacttacacgtgcaacgtcgatcataagcccagtaacaccaaggtagacaagacggtggaacgaaagggtacccagagttttgggttgttggaccctaaattgtgctatctgttggacggaatcctgttcatttacggagtgatcctgaccgcattgttcctgcgggttaagttttccagatccgcagacgcacccgcttaccaacaagggcagaaccaactctacaatgaacttaatttggggcggagggaagagtacgacgttctggacaaaaggaggggacgagatcccgagatgggcggaaagcctcgaaggaagaatccgcaagaggggctttataacgaactccagaaagataaaatggcagaagcctatagtgagattgggatgaagggagaaaggaggaggggtaaaggtcacgatgggttgtaccaaggattgagcacagccactaaagatacctatgatgcgctccacatgcaggccctgccgccaagacgcgccaagagaagcggatctggcgtgaagcagaccctgaatttcgacctgctgaagctggctggcgacgtggaatccaacccaggcccttctagaggccatatggctctgcctgtgacagctctgctgctgcctctggcactgctgcttcatgctgctagacctagccagtttagagtgtcccctctggacagaacctggaacctgggcgagacagtggaactgaagtgccaggtgctgctgagcaaccctacaagcggctgctcctggctgtttcagcctagaggtgcagccgcctctcctacctttctgctgtacctgagccagaacaagcccaaggccgccgaaggactggacacccagagattcagcggcaagagactgggcgacaccttcgtgctgaccctgagcgacttcagaagagagaacgagggctactacttctgtagcgccctgagcaacagcatcatgtacttcagccacttcgtgcccgtgtttctgcccgccaagcctacaacaacccctgctcctagacctcctacaccagctcctacaatcgccagccagcctctgtctctcagacccgaagcctgtagacctgctgctggcggagctgtgcataccagaggactggatttcgcctgcgacatctacatctgggctcctctggctggcacatgtggcgtgctgctgctgtccctggtcatcaccctgtactgcaaccaccggaacaggcggagagtgtgcaagtgccctagacctgtggtcaagagcggcgacaagcctagcctgagcgccagatatgtt

SEQ ID NO: 3229 - DNA, 3216 bp, synthetic construct
  source 1..3216: mol_type = other DNA
atggccttaccagtgaccgccttgctcctgccgctggccttgctgctccacgccgccaggccgaatgctggcgtgacccagacacctaagttccaggtgctgaaaaccggccagagcatgaccctgcaatgcgcccaggacatgaaccatgagtacatgagctggtacagacaggaccccggcatgggcctgagactgatccactactctgtggctatccagaccaccgaccagggcgaagtgcccaatggctacaacgtgtccagaagcaccatcgaggacttcccactgagactgctgtctgccgctcctagccagaccagcgtgtacttttgtgccagcagctacctgggcaacaccggcgagctgttttttggcgagggcagcagactgaccgtgctcgagggacagcctaaggccaatcctaccgtgacactgttccctccaagcagcgaagaactccaggccaacaaggccacacttgtgtgcctgatctccgacttctaccctggggctgtgacagtggcttggaaggccgatggatctcctgtgaaagccggcgtggaaaccaccaagccatccaagcagagcaacaacaaatacgccgccagctcctacctgagcctgacacctgagcagtggaagtcccacagatcctacagctgccaagtgacccacgaaggcagcaccgtggaaaagacagtggcccctacagagtgcagcggatcccagagcttcggcctgctggaccccaagctgtgctacctgctggatggcatcctgttcatctacggcgtgatcctgaccgccctgttcctgagagtgaagttcagcagaagcgccgacgcccctgcctaccagcagggacagaaccaactgtacaacgagctgaacctgggcagacgggaagagtacgacgtgctggacaagcggagaggcagggaccctgagatgggcggaaagccccggagaaagaacccccaggaaggactgtataacgaactccagaaagacaagatggccgaagcctacagcgagatcggcatgaagggcgagcggagaagaggcaagggccacgatggcctgtaccagggcctgagcaccgccaccaaggacacctatgacgccctgcacatgcaggccctgcctccaagaagggccaagcgatctggatctggagcaacaaacttctcactactcaaacaagcaggtgacgtggaggagaatcccgggcctactagtatggactggatttggcgcatccttttccttgtcggcgctgctaccggcgcgcattccttcgaacaagaagtgacacagatccctgccgctctgtctgtgcctgagggcgaaaacctggtgctgaactgctccttcaccgacagcgccatctacaacctccagtggttcaggcaggaccctggaaagggactgacaagcctgctgctgatccagagcagccagagagagcagacctccggcagactgaatgccagcctggataagagcagcggcaggtctaccctgtatatcgccgcttctcagcctggcgatagcgccacatatctgtgtgctgtgcggcctacaagcggcggcagctacatccctacatttggcagaggcaccagcctgatcgtgcacccttatacgcgtgcgtcacctacgtccccaaaagtgttcccgctgtcactcgattccactccacaggacggtaacgtggtggttgcctgcctggtacaaggtttctttcctcaagaaccactctctgtgacgtggtctgaaagtggtcagaatgttacagcacggaacttcccaccgagtcaagatgcgagtggggatctctatacgacatccagtcaactcacactgcccgcaacacaatgccccgatggcaaatctgttacctgccatgtgaaacattacaccaatccatcccaggatgtgacagtaccttgtccggttccgccccctcccccgggtacccagagttttgggttgttggaccctaaattgtgctatctgttggacggaatcctgttcatttacggagtgatcctgaccgcattgttcctgcgggttaagttttccagatccgcagacgcacccgcttaccaacaagggcagaaccaactctacaatgaacttaatttggggcggagggaagagtacgacgttctggacaaaaggaggggacgagatcccgagatgggcggaaagcctcgaaggaagaatccgcaagaggggctttataacgaactccagaaagataaaatggcagaagcctatagtgagattgggatgaagggagaaaggaggaggggtaaaggtcacgatgggttgtaccaaggattgagcacagccactaaagatacctatgatgcgctccacatgcaggccctgccgccaagacgcgccaagagaagcggatctggcgtgaagcagaccctgaatttcgacctgctgaagctggctggcgacgtggaatccaacccaggcccttctagaggccatatggctctgcctgtgacagctctgctgctgcctctggcactgctgcttcatgctgctagacctagccagtttagagtgtcccctctggacagaacctggaacctgggcgagacagtggaactgaagtgccaggtgctgctgagcaaccctacaagcggctgctcctggctgtttcagcctagaggtgcagccgcctctcctacctttctgctgtacctgagccagaacaagcccaaggccgccgaaggactggacacccagagattcagcggcaagagactgggcgacaccttcgtgctgaccctgagcgacttcagaagagagaacgagggctactacttctgtagcgccctgagcaacagcatcatgtacttcagccacttcgtgcccgtgtttctgcccgccaagcctacaacaacccctgctcctagacctcctacaccagctcctacaatcgccagccagcctctgtctctcagacccgaagcctgtagacctgctgctggcggagctgtgcataccagaggactggatttcgcctgcgacatctacatctgggctcctctggctggcacatgtggcgtgctgctgctgtccctggtcatcaccctgtactgcaaccaccggaacaggcggagagtgtgcaagtgccctagacctgtggtcaagagcggcgacaagcctagcctgagcgccagatatgtt

SEQ ID NO: 3230 - DNA, 3201 bp, synthetic construct
  source 1..3201: mol_type = other DNA
atggccttaccagtgaccgccttgctcctgccgctggccttgctgctccacgccgccaggccgaatgctggcgtgacccagacacctaagttccaggtgctgaaaaccggccagagcatgaccctgcaatgcgcccaggacatgaaccatgagtacatgagctggtacagacaggaccccggcatgggcctgagactgatccactactctgtggctatccagaccaccgaccagggcgaagtgcccaatggctacaacgtgtccagaagcaccatcgaggacttcccactgagactgctgtctgccgctcctagccagaccagcgtgtacttttgtgccagcagctacctgggcaacaccggcgagctgttttttggcgagggcagcagactgaccgtgctcgagggacagcctaaggccaatcctaccgtgacactgttccctccaagcagcgaagaactccaggccaacaaggccacacttgtgtgcctgatctccgacttctaccctggggctgtgacagtggcttggaaggccgatggatctcctgtgaaagccggcgtggaaaccaccaagccatccaagcagagcaacaacaaatacgccgccagctcctacctgagcctgacacctgagcagtggaagtcccacagatcctacagctgccaagtgacccacgaaggcagcaccgtggaaaagacagtggcccctacagagtgcagcggatcccagagcttcggcctgctggaccccaagctgtgctacctgctggatggcatcctgttcatctacggcgtgatcctgaccgccctgttcctgagagtgaagttcagcagaagcgccgacgcccctgcctaccagcagggacagaaccaactgtacaacgagctgaacctgggcagacgggaagagtacgacgtgctggacaagcggagaggcagggaccctgagatgggcggaaagccccggagaaagaacccccaggaaggactgtataacgaactccagaaagacaagatggccgaagcctacagcgagatcggcatgaagggcgagcggagaagaggcaagggccacgatggcctgtaccagggcctgagcaccgccaccaaggacacctatgacgccctgcacatgcaggccctgcctccaagaagggccaagcgatctggatctggagcaacaaacttctcactactcaaacaagcaggtgacgtggaggagaatcccgggcctactagtatggactggatttggcgcatccttttccttgtcggcgctgctaccggcgcgcattccttcgaacaagaagtgacacagatccctgccgctctgtctgtgcctgagggcgaaaacctggtgctgaactgctccttcaccgacagcgccatctacaacctccagtggttcaggcaggaccctggaaagggactgacaagcctgctgctgatccagagcagccagagagagcagacctccggcagactgaatgccagcctggataagagcagcggcaggtctaccctgtatatcgccgcttctcagcctggcgatagcgccacatatctgtgtgctgtgcggcctacaagcggcggcagctacatccctacatttggcagaggcaccagcctgatcgtgcacccttatacgcgtgctagtacccagtcaccttctgttttcccgcttactagatgctgcaagaacataccatccaatgccacttctgtcacactgggctgtcttgctacaggttattttcctgagccggtgatggtcacttgggataccggtagcctgaatggaactacaatgacgctgcctgccacgacgctcacattgagtgggcattacgcgacaattagtcttttgacggtaagcggagcttgggctaagcagatgttcacttgcagagtagcgcacactccctctagtactgactgggttgacaacaaaaccttttctggtacccagagttttgggttgttggaccctaaattgtgctatctgttggacggaatcctgttcatttacggagtgatcctgaccgcattgttcctgcgggttaagttttccagatccgcagacgcacccgcttaccaacaagggcagaaccaactctacaatgaacttaatttggggcggagggaagagtacgacgttctggacaaaaggaggggacgagatcccgagatgggcggaaagcctcgaaggaagaatccgcaagaggggctttataacgaactccagaaagataaaatggcagaagcctatagtgagattgggatgaagggagaaaggaggaggggtaaaggtcacgatgggttgtaccaaggattgagcacagccactaaagatacctatgatgcgctccacatgcaggccctgccgccaagacgcgccaagagaagcggatctggcgtgaagcagaccctgaatttcgacctgctgaagctggctggcgacgtggaatccaacccaggcccttctagaggccatatggctctgcctgtgacagctctgctgctgcctctggcactgctgcttcatgctgctagacctagccagtttagagtgtcccctctggacagaacctggaacctgggcgagacagtggaactgaagtgccaggtgctgctgagcaaccctacaagcggctgctcctggctgtttcagcctagaggtgcagccgcctctcctacctttctgctgtacctgagccagaacaagcccaaggccgccgaaggactggacacccagagattcagcggcaagagactgggcgacaccttcgtgctgaccctgagcgacttcagaagagagaacgagggctactacttctgtagcgccctgagcaacagcatcatgtacttcagccacttcgtgcccgtgtttctgcccgccaagcctacaacaacccctgctcctagacctcctacaccagctcctacaatcgccagccagcctctgtctctcagacccgaagcctgtagacctgctgctggcggagctgtgcataccagaggactggatttcgcctgcgacatctacatctgggctcctctggctggcacatgtggcgtgctgctgctgtccctggtcatcaccctgtactgcaaccaccggaacaggcggagagtgtgcaagtgccctagacctgtggtcaagagcggcgacaagcctagcctgagcgccagatatgtt

SEQ ID NO: 3231 - DNA, 3201 bp, synthetic construct
  source 1..3201: mol_type = other DNA
atggccttaccagtgaccgccttgctcctgccgctggccttgctgctccacgccgccaggccgaatgctggcgtgacccagacacctaagttccaggtgctgaaaaccggccagagcatgaccctgcaatgcgcccaggacatgaaccatgagtacatgagctggtacagacaggaccccggcatgggcctgagactgatccactactctgtggctatccagaccaccgaccagggcgaagtgcccaatggctacaacgtgtccagaagcaccatcgaggacttcccactgagactgctgtctgccgctcctagccagaccagcgtgtacttttgtgccagcagctacctgggcaacaccggcgagctgttttttggcgagggcagcagactgaccgtgctcgagggacagcctaaggccaatcctaccgtgacactgttccctccaagcagcgaagaactccaggccaacaaggccacacttgtgtgcctgatctccgacttctaccctggggctgtgacagtggcttggaaggccgatggatctcctgtgaaagccggcgtggaaaccaccaagccatccaagcagagcaacaacaaatacgccgccagctcctacctgagcctgacacctgagcagtggaagtcccacagatcctacagctgccaagtgacccacgaaggcagcaccgtggaaaagacagtggcccctacagagtgcagcggatcccagagcttcggcctgctggaccccaagctgtgctacctgctggatggcatcctgttcatctacggcgtgatcctgaccgccctgttcctgagagtgaagttcagcagaagcgccgacgcccctgcctaccagcagggacagaaccaactgtacaacgagctgaacctgggcagacgggaagagtacgacgtgctggacaagcggagaggcagggaccctgagatgggcggaaagccccggagaaagaacccccaggaaggactgtataacgaactccagaaagacaagatggccgaagcctacagcgagatcggcatgaagggcgagcggagaagaggcaagggccacgatggcctgtaccagggcctgagcaccgccaccaaggacacctatgacgccctgcacatgcaggccctgcctccaagaagggccaagcgatctggatctggagcaacaaacttctcactactcaaacaagcaggtgacgtggaggagaatcccgggcctactagtatggactggatttggcgcatccttttccttgtcggcgctgctaccggcgcgcattccttcgaacaagaagtgacacagatccctgccgctctgtctgtgcctgagggcgaaaacctggtgctgaactgctccttcaccgacagcgccatctacaacctccagtggttcaggcaggaccctggaaagggactgacaagcctgctgctgatccagagcagccagagagagcagacctccggcagactgaatgccagcctggataagagcagcggcaggtctaccctgtatatcgccgcttctcagcctggcgatagcgccacatatctgtgtgctgtgcggcctacaagcggcggcagctacatccctacatttggcagaggcaccagcctgatcgtgcacccttatacgcgtgcgtccactaagggtccgtcagtcttcccgctggcgccctgttcccgcagcacgagtgaatctaccgccgcccttgggtgcttggtaaaagactattttcctgagcccgttacagtatcatggaacagcggggctctgactagcggggtgcatacgttccctgcggttctgcaatctagcggactgtattctctctccagtgttgtgaccgtgccaagctccagcctcggtactaaaacttatacatgtaatgtggatcataaaccttcaaataccaaggttgacaaaagggtagagagtaagtacggtggtacccagagttttgggttgttggaccctaaattgtgctatctgttggacggaatcctgttcatttacggagtgatcctgaccgcattgttcctgcgggttaagttttccagatccgcagacgcacccgcttaccaacaagggcagaaccaactctacaatgaacttaatttggggcggagggaagagtacgacgttctggacaaaaggaggggacgagatcccgagatgggcggaaagcctcgaaggaagaatccgcaagaggggctttataacgaactccagaaagataaaatggcagaagcctatagtgagattgggatgaagggagaaaggaggaggggtaaaggtcacgatgggttgtaccaaggattgagcacagccactaaagatacctatgatgcgctccacatgcaggccctgccgccaagacgcgccaagagaagcggatctggcgtgaagcagaccctgaatttcgacctgctgaagctggctggcgacgtggaatccaacccaggcccttctagaggccatatggctctgcctgtgacagctctgctgctgcctctggcactgctgcttcatgctgctagacctagccagtttagagtgtcccctctggacagaacctggaacctgggcgagacagtggaactgaagtgccaggtgctgctgagcaaccctacaagcggctgctcctggctgtttcagcctagaggtgcagccgcctctcctacctttctgctgtacctgagccagaacaagcccaaggccgccgaaggactggacacccagagattcagcggcaagagactgggcgacaccttcgtgctgaccctgagcgacttcagaagagagaacgagggctactacttctgtagcgccctgagcaacagcatcatgtacttcagccacttcgtgcccgtgtttctgcccgccaagcctacaacaacccctgctcctagacctcctacaccagctcctacaatcgccagccagcctctgtctctcagacccgaagcctgtagacctgctgctggcggagctgtgcataccagaggactggatttcgcctgcgacatctacatctgggctcctctggctggcacatgtggcgtgctgctgctgtccctggtcatcaccctgtactgcaaccaccggaacaggcggagagtgtgcaagtgccctagacctgtggtcaagagcggcgacaagcctagcctgagcgccagatatgtt

SEQ ID NO: 3232 - DNA, 3201 bp, synthetic construct
  source 1..3201: mol_type = other DNA
atggccttaccagtgaccgccttgctcctgccgctggccttgctgctccacgccgccaggccgaatgctggcgtgacccagacacctaagttccaggtgctgaaaaccggccagagcatgaccctgcaatgcgcccaggacatgaaccatgagtacatgagctggtacagacaggaccccggcatgggcctgagactgatccactactctgtggctatccagaccaccgaccagggcgaagtgcccaatggctacaacgtgtccagaagcaccatcgaggacttcccactgagactgctgtctgccgctcctagccagaccagcgtgtacttttgtgccagcagctacctgggcaacaccggcgagctgttttttggcgagggcagcagactgaccgtgctcgagggacagcctaaggccaatcctaccgtgacactgttccctccaagcagcgaagaactccaggccaacaaggccacacttgtgtgcctgatctccgacttctaccctggggctgtgacagtggcttggaaggccgatggatctcctgtgaaagccggcgtggaaaccaccaagccatccaagcagagcaacaacaaatacgccgccagctcctacctgagcctgacacctgagcagtggaagtcccacagatcctacagctgccaagtgacccacgaaggcagcaccgtggaaaagacagtggcccctacagagtgcagcggatcccagagcttcggcctgctggaccccaagctgtgctacctgctggatggcatcctgttcatctacggcgtgatcctgaccgccctgttcctgagagtgaagttcagcagaagcgccgacgcccctgcctaccagcagggacagaaccaactgtacaacgagctgaacctgggcagacgggaagagtacgacgtgctggacaagcggagaggcagggaccctgagatgggcggaaagccccggagaaagaacccccaggaaggactgtataacgaactccagaaagacaagatggccgaagcctacagcgagatcggcatgaagggcgagcggagaagaggcaagggccacgatggcctgtaccagggcctgagcaccgccaccaaggacacctatgacgccctgcacatgcaggccctgcctccaagaagggccaagcgatctggatctggagcaacaaacttctcactactcaaacaagcaggtgacgtggaggagaatcccgggcctactagtatggactggatttggcgcatccttttccttgtcggcgctgctaccggcgcgcattccttcgaacaagaagtgacacagatccctgccgctctgtctgtgcctgagggcgaaaacctggtgctgaactgctccttcaccgacagcgccatctacaacctccagtggttcaggcaggaccctggaaagggactgacaagcctgctgctgatccagagcagccagagagagcagacctccggcagactgaatgccagcctggataagagcagcggcaggtctaccctgtatatcgccgcttctcagcctggcgatagcgccacatatctgtgtgctgtgcggcctacaagcggcggcagctacatccctacatttggcagaggcaccagcctgatcgtgcacccttatacgcgtgcaagtacaaagggacccagtgttttcccgctcgccccctgttcacgatcaacgagtgagtccactgcggctctcggatgcctcgtcaaagactacttccccgagccggtgactgttagttggaactctggggctcttacttcaggcgtacacacattccccgccgtgcttcagtcaagtgggctctactcacttagcagtgtggtaacggttccctctagcaactttggcacccaaacatatacttgcaacgtcgatcacaagccgtcaaataccaaagttgacaagaccgttgaaaggaaatgttgtggtacccagagttttgggttgttggaccctaaattgtgctatctgttggacggaatcctgttcatttacggagtgatcctgaccgcattgttcctgcgggttaagttttccagatccgcagacgcacccgcttaccaacaagggcagaaccaactctacaatgaacttaatttggggcggagggaagagtacgacgttctggacaaaaggaggggacgagatcccgagatgggcggaaagcctcgaaggaagaatccgcaagaggggctttataacgaactccagaaagataaaatggcagaagcctatagtgagattgggatgaagggagaaaggaggaggggtaaaggtcacgatgggttgtaccaaggattgagcacagccactaaagatacctatgatgcgctccacatgcaggccctgccgccaagacgcgccaagagaagcggatctggcgtgaagcagaccctgaatttcgacctgctgaagctggctggcgacgtggaatccaacccaggcccttctagaggccatatggctctgcctgtgacagctctgctgctgcctctggcactgctgcttcatgctgctagacctagccagtttagagtgtcccctctggacagaacctggaacctgggcgagacagtggaactgaagtgccaggtgctgctgagcaaccctacaagcggctgctcctggctgtttcagcctagaggtgcagccgcctctcctacctttctgctgtacctgagccagaacaagcccaaggccgccgaaggactggacacccagagattcagcggcaagagactgggcgacaccttcgtgctgaccctgagcgacttcagaagagagaacgagggctactacttctgtagcgccctgagcaacagcatcatgtacttcagccacttcgtgcccgtgtttctgcccgccaagcctacaacaacccctgctcctagacctcctacaccagctcctacaatcgccagccagcctctgtctctcagacccgaagcctgtagacctgctgctggcggagctgtgcataccagaggactggatttcgcctgcgacatctacatctgggctcctctggctggcacatgtggcgtgctgctgctgtccctggtcatcaccctgtactgcaaccaccggaacaggcggagagtgtgcaagtgccctagacctgtggtcaagagcggcgacaagcctagcctgagcgccagatatgtt

SEQ ID NO: 3233 - DNA, 3246 bp, synthetic construct
  source 1..3246: mol_type = other DNA
atggccttaccagtgaccgccttgctcctgccgctggccttgctgctccacgccgccaggccgaatgctggcgtgacccagacacctaagttccaggtgctgaaaaccggccagagcatgaccctgcaatgcgcccaggacatgaaccatgagtacatgagctggtacagacaggaccccggcatgggcctgagactgatccactactctgtggctatccagaccaccgaccagggcgaagtgcccaatggctacaacgtgtccagaagcaccatcgaggacttcccactgagactgctgtctgccgctcctagccagaccagcgtgtacttttgtgccagcagctacctgggcaacaccggcgagctgttttttggcgagggcagcagactgaccgtgctcgaggacctgaagaacgtgttcccacctgaggtggccgtgttcgagcctagcgaggccgagatcagccacacccagaaagccaccctcgtgtgcctggctaccggcttctaccccgaccatgtggaactgtcttggtgggtcaacggcaaagaggtgcacagcggcgtgtctaccgacccccagccactgaaagaacagcccgccctgaacgacagccggtactgcctgagcagcagactgagagtgtccgccaccttctggcagaacccccggaaccacttcagatgccaggtgcagttctacggcctgagcgagaacgacgagtggacccaggacagagccaagcccgtgacccagatcgtgtctgccgaagcctggggcagagccgattgcggatcccagagcttcggcctgctggaccccaagctgtgctacctgctggatggcatcctgttcatctacggcgtgatcctgaccgccctgttcctgagagtgaagttcagcagaagcgccgacgcccctgcctaccagcagggacagaaccaactgtacaacgagctgaacctgggcagacgggaagagtacgacgtgctggacaagcggagaggcagggaccctgagatgggcggaaagccccggagaaagaacccccaggaaggactgtataacgaactccagaaagacaagatggccgaagcctacagcgagatcggcatgaagggcgagcggagaagaggcaagggccacgatggcctgtaccagggcctgagcaccgccaccaaggacacctatgacgccctgcacatgcaggccctgcctccaagaagggccaagcgatctggatctggagcaacaaacttctcactactcaaacaagcaggtgacgtggaggagaatcccgggcctactagtatggactggatttggcgcatccttttccttgtcggcgctgctaccggcgcgcattccttcgaacaagaagtgacacagatccctgccgctctgtctgtgcctgagggcgaaaacctggtgctgaactgctccttcaccgacagcgccatctacaacctccagtggttcaggcaggaccctggaaagggactgacaagcctgctgctgatccagagcagccagagagagcagacctccggcagactgaatgccagcctggataagagcagcggcaggtctaccctgtatatcgccgcttctcagcctggcgatagcgccacatatctgtgtgctgtgcggcctacaagcggcggcagctacatccctacatttggcagaggcaccagcctgatcgtgcacccttatacgcgtatccagaaccctgatcctgccgtgtaccagctgcgggatagcaagagcagcgacaagagcgtgtgtctgttcaccgacttcgacagccagaccaacgtgtcccagagcaaggactccgacgtgtacatcaccgataagaccgtgctggacatgcggagcatggacttcaagagcaactccgccgtggcctggtccaacaagtccgatttcgcctgcgccaacgccttcaacaacagcattatccccgaggacacattcttcccaagccccgagagcagctgcggtacccagagttttgggttgttggaccctaaattgtgctatctgttggacggaatcctgttcatttacggagtgatcctgaccgcattgttcctgcgggttaagttttccagatccgcagacgcacccgcttaccaacaagggcagaaccaactctacaatgaacttaatttggggcggagggaagagtacgacgttctggacaaaaggaggggacgagatcccgagatgggcggaaagcctcgaaggaagaatccgcaagaggggctttataacgaactccagaaagataaaatggcagaagcctatagtgagattgggatgaagggagaaaggaggaggggtaaaggtcacgatgggttgtaccaaggattgagcacagccactaaagatacctatgatgcgctccacatgcaggccctgccgccaagacgcgccaagagaagcggatctggcgtgaagcagaccctgaatttcgacctgctgaagctggctggcgacgtggaatccaacccaggcccttctagaggccatatggctctgcctgtgacagctctgctgctgcctctggcactgctgcttcatgctgctagacctagccagtttagagtgtcccctctggacagaacctggaacctgggcgagacagtggaactgaagtgccaggtgctgctgagcaaccctacaagcggctgctcctggctgtttcagcctagaggtgcagccgcctctcctacctttctgctgtacctgagccagaacaagcccaaggccgccgaaggactggacacccagagattcagcggcaagagactgggcgacaccttcgtgctgaccctgagcgacttcagaagagagaacgagggctactacttctgtagcgccctgagcaacagcatcatgtacttcagccacttcgtgcccgtgtttctgcccgccaagcctacaacaacccctgctcctagacctcctacaccagctcctacaatcgccagccagcctctgtctctcagacccgaagcctgtagacctgctgctggcggagctgtgcataccagaggactggatttcgcctgcgacatctacatctgggctcctctggctggcacatgtggcgtgctgctgctgtccctggtcatcaccctgtactgcaaccaccggaacaggcggagagtgtgcaagtgccctagacctgtggtcaagagcggcgacaagcctagcctgagcgccagatatgtt

SEQ ID NO: 3234 - DNA, 3246 bp, synthetic construct
  source 1..3246: mol_type = other DNA
atggccttaccagtgaccgccttgctcctgccgctggccttgctgctccacgccgccaggccgaatgctggcgtgacccagacacctaagttccaggtgctgaaaaccggccagagcatgaccctgcaatgcgcccaggacatgaaccatgagtacatgagctggtacagacaggaccccggcatgggcctgagactgatccactactctgtggctatccagaccaccgaccagggcgaagtgcccaatggctacaacgtgtccagaagcaccatcgaggacttcccactgagactgctgtctgccgctcctagccagaccagcgtgtacttttgtgccagcagctacctgggcaacaccggcgagctgttttttggcgagggcagcagactgaccgtgctcgaggacctgaagaacgtgttcccacctgaggtggccgtgttcgagcctagcaaggccgagatcgcccacacccagaaagccaccctcgtgtgcctggctaccggcttctaccccgaccatgtggaactgtcttggtgggtcaacggcaaagaggtgcacagcggcgtgtgtaccgacccccagccactgaaagaacagcccgccctgaacgacagccggtactgcctgagcagcagactgagagtgtccgccaccttctggcagaacccccggaaccacttcagatgccaggtgcagttctacggcctgagcgagaacgacgagtggacccaggacagagccaagcccgtgacccagatcgtgtctgccgaagcctggggcagagccgattgcggatcccagagcttcggcctgctggaccccaagctgtgctacctgctggatggcatcctgttcatctacggcgtgatcctgaccgccctgttcctgagagtgaagttcagcagaagcgccgacgcccctgcctaccagcagggacagaaccaactgtacaacgagctgaacctgggcagacgggaagagtacgacgtgctggacaagcggagaggcagggaccctgagatgggcggaaagccccggagaaagaacccccaggaaggactgtataacgaactccagaaagacaagatggccgaagcctacagcgagatcggcatgaagggcgagcggagaagaggcaagggccacgatggcctgtaccagggcctgagcaccgccaccaaggacacctatgacgccctgcacatgcaggccctgcctccaagaagggccaagcgatctggatctggagcaacaaacttctcactactcaaacaagcaggtgacgtggaggagaatcccgggcctactagtatggactggatttggcgcatccttttccttgtcggcgctgctaccggcgcgcattccttcgaacaagaagtgacacagatccctgccgctctgtctgtgcctgagggcgaaaacctggtgctgaactgctccttcaccgacagcgccatctacaacctccagtggttcaggcaggaccctggaaagggactgacaagcctgctgctgatccagagcagccagagagagcagacctccggcagactgaatgccagcctggataagagcagcggcaggtctaccctgtatatcgccgcttctcagcctggcgatagcgccacatatctgtgtgctgtgcggcctacaagcggcggcagctacatccctacatttggcagaggcaccagcctgatcgtgcacccttatacgcgtatccagaaccctgatcctgccgtgtaccagctgcgggatagcaagagcagcgacaagagcgtgtgtctgttcaccgacttcgacagccagaccaacgtgtcccagagcaaggactccgacgtgtacatcaccgataagtgcgtgctggacatgcggagcatggacttcaagagcaactccgccgtggcctggtccaacaagtccgatttcgcctgcgccaacgccttcaacaacagcattatccccgaggacacattcttcccaagcagcgacgtgccctgcggtacccagagttttgggttgttggaccctaaattgtgctatctgttggacggaatcctgttcatttacggagtgatcctgaccgcattgttcctgcgggttaagttttccagatccgcagacgcacccgcttaccaacaagggcagaaccaactctacaatgaacttaatttggggcggagggaagagtacgacgttctggacaaaaggaggggacgagatcccgagatgggcggaaagcctcgaaggaagaatccgcaagaggggctttataacgaactccagaaagataaaatggcagaagcctatagtgagattgggatgaagggagaaaggaggaggggtaaaggtcacgatgggttgtaccaaggattgagcacagccactaaagatacctatgatgcgctccacatgcaggccctgccgccaagacgcgccaagagaagcggatctggcgtgaagcagaccctgaatttcgacctgctgaagctggctggcgacgtggaatccaacccaggcccttctagaggccatatggctctgcctgtgacagctctgctgctgcctctggcactgctgcttcatgctgctagacctagccagtttagagtgtcccctctggacagaacctggaacctgggcgagacagtggaactgaagtgccaggtgctgctgagcaaccctacaagcggctgctcctggctgtttcagcctagaggtgcagccgcctctcctacctttctgctgtacctgagccagaacaagcccaaggccgccgaaggactggacacccagagattcagcggcaagagactgggcgacaccttcgtgctgaccctgagcgacttcagaagagagaacgagggctactacttctgtagcgccctgagcaacagcatcatgtacttcagccacttcgtgcccgtgtttctgcccgccaagcctacaacaacccctgctcctagacctcctacaccagctcctacaatcgccagccagcctctgtctctcagacccgaagcctgtagacctgctgctggcggagctgtgcataccagaggactggatttcgcctgcgacatctacatctgggctcctctggctggcacatgtggcgtgctgctgctgtccctggtcatcaccctgtactgcaaccaccggaacaggcggagagtgtgcaagtgccctagacctgtggtcaagagcggcgacaagcctagcctgagcgccagatatgtt

SEQ ID NO: 3235 - DNA, 2439 bp, synthetic construct
  source 1..2439: mol_type = other DNA
atggccttaccagtgaccgccttgctcctgccgctggccttgctgctccacgccgccaggccgaatgctggcgtgacccagacacctaagttccaggtgctgaaaaccggccagagcatgaccctgcaatgcgcccaggacatgaaccatgagtacatgagctggtacagacaggaccccggcatgggcctgagactgatccactactctgtggctatccagaccaccgaccagggcgaagtgcccaatggctacaacgtgtccagaagcaccatcgaggacttcccactgagactgctgtctgccgctcctagccagaccagcgtgtacttttgtgccagcagctacctgggcaacaccggcgagctgttttttggcgagggcagcagactgaccgtgctcgaggacctgaagaacgtgttcccacctgaggtggccgtgttcgagcctagcgaggccgagatcagccacacccagaaagccaccctcgtgtgcctggctaccggcttctaccccgaccatgtggaactgtcttggtgggtcaacggcaaagaggtgcacagcggcgtgtgtaccgacccccagccactgaaagaacagcccgccctgaacgacagccggtactgcctgagcagcagactgagagtgtccgccaccttctggcagaacccccggaaccacttcagatgccaggtgcagttctacggcctgagcgagaacgacgagtggacccaggacagagccaagcccgtgacccagatcgtgtctgccgaagcctggggcagagccgattgcggatcccagagcttcggcctgctggaccccaagctgtgctacctgctggatggcatcctgttcatctacggcgtgatcctgaccgccctgttcctgagagtgaagttcagcagaagcgccgacgcccctgcctaccagcagggacagaaccaactgtacaacgagctgaacctgggcagacgggaagagtacgacgtgctggacaagcggagaggcagggaccctgagatgggcggaaagccccggagaaagaacccccaggaaggactgtataacgaactccagaaagacaagatggccgaagcctacagcgagatcggcatgaagggcgagcggagaagaggcaagggccacgatggcctgtaccagggcctgagcaccgccaccaaggacacctatgacgccctgcacatgcaggccctgcctccaagaagggccaagcgatctggatctggagcaacaaacttctcactactcaaacaagcaggtgacgtggaggagaatcccgggcctactagtatggactggatttggcgcatccttttccttgtcggcgctgctaccggcgcgcattccttcgaacaagaagtgacacagatccctgccgctctgtctgtgcctgagggcgaaaacctggtgctgaactgctccttcaccgacagcgccatctacaacctccagtggttcaggcaggaccctggaaagggactgacaagcctgctgctgatccagagcagccagagagagcagacctccggcagactgaatgccagcctggataagagcagcggcaggtctaccctgtatatcgccgcttctcagcctggcgatagcgccacatatctgtgtgctgtgcggcctacaagcggcggcagctacatccctacatttggcagaggcaccagcctgatcgtgcacccttatacgcgtatccagaaccctgatcctgccgtgtaccagctgcgggatagcaagagcagcgacaagagcgtgtgtctgttcaccgacttcgacagccagaccaacgtgtcccagagcaaggactccgacgtgtacatcaccgataagtgcgtgctggacatgcggagcatggacttcaagagcaactccgccgtggcctggtccaacaagtccgatttcgcctgcgccaacgccttcaacaacagcattatccccgaggacacattcttcccaagccccgagagcagctgcggtacccagagttttgggttgttggaccctaaattgtgctatctgttggacggaatcctgttcatttacggagtgatcctgaccgcattgttcctgcgggttaagttttccagatccgcagacgcacccgcttaccaacaagggcagaaccaactctacaatgaacttaatttggggcggagggaagagtacgacgttctggacaaaaggaggggacgagatcccgagatgggcggaaagcctcgaaggaagaatccgcaagaggggctttataacgaactccagaaagataaaatggcagaagcctatagtgagattgggatgaagggagaaaggaggaggggtaaaggtcacgatgggttgtaccaaggattgagcacagccactaaagatacctatgatgcgctccacatgcaggccctgccgccaaga

SEQ ID NO: 3236 - DNA, 2562 bp, synthetic construct
  source 1..2562: mol_type = other DNA
atggccttaccagtgaccgccttgctcctgccgctggccttgctgctccacgccgccaggccgaatgctggcgtgacccagacacctaagttccaggtgctgaaaaccggccagagcatgaccctgcaatgcgcccaggacatgaaccatgagtacatgagctggtacagacaggaccccggcatgggcctgagactgatccactactctgtggctatccagaccaccgaccagggcgaagtgcccaatggctacaacgtgtccagaagcaccatcgaggacttcccactgagactgctgtctgccgctcctagccagaccagcgtgtacttttgtgccagcagctacctgggcaacaccggcgagctgttttttggcgagggcagcagactgaccgtgctcgagcagagcttcggcctgctggaccccaagctgtgctacctgctggatggcatcctgttcatctacggcgtgatcctgaccgccctgttcctgagagtgaagttcagcagaagcgccgacgcccctgcctaccagcagggacagaaccaactgtacaacgagctgaacctgggcagacgggaagagtacgacgtgctggacaagcggagaggcagggaccctgagatgggcggaaagccccggagaaagaacccccaggaaggactgtataacgaactccagaaagacaagatggccgaagcctacagcgagatcggcatgaagggcgagcggagaagaggcaagggccacgatggcctgtaccagggcctgagcaccgccaccaaggacacctatgacgccctgcacatgcaggccctgcctccaagaagggccaagcgatctggatctggagcaacaaacttctcactactcaaacaagcaggtgacgtggaggagaatcccgggcctactagtatggactggatttggcgcatccttttccttgtcggcgctgctaccggcgcgcattccttcgaacaagaagtgacacagatccctgccgctctgtctgtgcctgagggcgaaaacctggtgctgaactgctccttcaccgacagcgccatctacaacctccagtggttcaggcaggaccctggaaagggactgacaagcctgctgctgatccagagcagccagagagagcagacctccggcagactgaatgccagcctggataagagcagcggcaggtctaccctgtatatcgccgcttctcagcctggcgatagcgccacatatctgtgtgctgtgcggcctacaagcggcggcagctacatccctacatttggcagaggcaccagcctgatcgtgcacccttatacgcgtcagagttttgggttgttggaccctaaattgtgctatctgttggacggaatcctgttcatttacggagtgatcctgaccgcattgttcctgcgggttaagttttccagatccgcagacgcacccgcttaccaacaagggcagaaccaactctacaatgaacttaatttggggcggagggaagagtacgacgttctggacaaaaggaggggacgagatcccgagatgggcggaaagcctcgaaggaagaatccgcaagaggggctttataacgaactccagaaagataaaatggcagaagcctatagtgagattgggatgaagggagaaaggaggaggggtaaaggtcacgatgggttgtaccaaggattgagcacagccactaaagatacctatgatgcgctccacatgcaggccctgccgccaagacgcgccaagagaagcggatctggcgtgaagcagaccctgaatttcgacctgctgaagctggctggcgacgtggaatccaacccaggcccttctagaggccatatggctctgcctgtgacagctctgctgctgcctctggcactgctgcttcatgctgctagacctagccagtttagagtgtcccctctggacagaacctggaacctgggcgagacagtggaactgaagtgccaggtgctgctgagcaaccctacaagcggctgctcctggctgtttcagcctagaggtgcagccgcctctcctacctttctgctgtacctgagccagaacaagcccaaggccgccgaaggactggacacccagagattcagcggcaagagactgggcgacaccttcgtgctgaccctgagcgacttcagaagagagaacgagggctactacttctgtagcgccctgagcaacagcatcatgtacttcagccacttcgtgcccgtgtttctgcccgccaagcctacaacaacccctgctcctagacctcctacaccagctcctacaatcgccagccagcctctgtctctcagacccgaagcctgtagacctgctgctggcggagctgtgcataccagaggactggatttcgcctgcgacatctacatctgggctcctctggctggcacatgtggcgtgctgctgctgtccctggtcatcaccctgtactgcaaccaccggaacaggcggagagtgtgcaagtgccctagacctgtggtcaagagcggcgacaagcctagcctgagcgccagatatgtt

SEQ ID NO: 3237 - DNA, 2562 bp, synthetic construct
  source 1..2562: mol_type = other DNA
atggccttaccagtgaccgccttgctcctgccgctggccttgctgctccacgccgccaggccgaatgctggcgtgacccagacacctaagttccaggtgctgaaaaccggccagagcatgaccctgcaatgcgcccaggacatgaaccatgagtacatgagctggtacagacaggaccccggcatgggcctgagactgatccactactctgtggctatccagaccaccgaccagggcgaagtgcccaatggctacaacgtgtccagaagcaccatcgaggacttcccactgagactgctgtctgccgctcctagccagaccagcgtgtacttttgtgccagcagctacctgggcaacaccggcgagctgttttttggcgagggcagcagactgaccgtgctcgaggacctgaagaacgtgttcccacctgaggtggccgtgttcgagcctagcgaggccgagatcagccacacccagaaagccaccctcgtgtgcctggctaccggcttctaccccgaccatgtggaactgtcttggtgggtcaacggcaaagaggtgcacagcggcgtgtgtaccgacccccagccactgaaagaacagcccgccctgaacgacagccggtactgcctgagcagcagactgagagtgtccgccaccttctggcagaacccccggaaccacttcagatgccaggtgcagttctacggcctgagcgagaacgacgagtggacccaggacagagccaagcccgtgacccagatcgtgtctgccgaagcctggggcagagccgattgcggatcccagagcttcggcctgctggaccccaagctgtgctacctgctggatggcatcctgttcatctacggcgtgatcctgaccgccctgttcctgaggagtaagaggagcaggctcctgcacagtgactacatgaacatgactccacgccgccccggacccacccgcaagcattaccagccctatgccccaccacgcgacttcgcagcctatcgctccagagtgaagttcagcagaagcgccgacgcccctgcctaccagcagggacagaaccaactgtacaacgagctgaacctgggcagacgggaagagtacgacgtgctggacaagcggagaggcagggaccctgagatgggcggaaagccccggagaaagaacccccaggaaggactgtataacgaactccagaaagacaagatggccgaagcctacagcgagatcggcatgaagggcgagcggagaagaggcaagggccacgatggcctgtaccagggcctgagcaccgccaccaaggacacctatgacgccctgcacatgcaggccctgcctccaagaagggccaagcgatctggatctggagcaacaaacttctcactactcaaacaagcaggtgacgtggaggagaatcccgggcctactagtatggactggatttggcgcatccttttccttgtcggcgctgctaccggcgcgcattccttcgaacaagaagtgacacagatccctgccgctctgtctgtgcctgagggcgaaaacctggtgctgaactgctccttcaccgacagcgccatctacaacctccagtggttcaggcaggaccctggaaagggactgacaagcctgctgctgatccagagcagccagagagagcagacctccggcagactgaatgccagcctggataagagcagcggcaggtctaccctgtatatcgccgcttctcagcctggcgatagcgccacatatctgtgtgctgtgcggcctacaagcggcggcagctacatccctacatttggcagaggcaccagcctgatcgtgcacccttatacgcgtatccagaaccctgatcctgccgtgtaccagctgcgggatagcaagagcagcgacaagagcgtgtgtctgttcaccgacttcgacagccagaccaacgtgtcccagagcaaggactccgacgtgtacatcaccgataagtgcgtgctggacatgcggagcatggacttcaagagcaactccgccgtggcctggtccaacaagtccgatttcgcctgcgccaacgccttcaacaacagcattatccccgaggacacattcttcccaagccccgagagcagctgcggtacccagagttttgggttgttggaccctaaattgtgctatctgttggacggaatcctgttcatttacggagtgatcctgaccgcattgttcctgcgggttaagttttccagatccgcagacgcacccgcttaccaacaagggcagaaccaactctacaatgaacttaatttggggcggagggaagagtacgacgttctggacaaaaggaggggacgagatcccgagatgggcggaaagcctcgaaggaagaatccgcaagaggggctttataacgaactccagaaagataaaatggcagaagcctatagtgagattgggatgaagggagaaaggaggaggggtaaaggtcacgatgggttgtaccaaggattgagcacagccactaaagatacctatgatgcgctccacatgcaggccctgccgccaaga

SEQ ID NO: 3238 - DNA, 2685 bp, synthetic construct
  source 1..2685: mol_type = other DNA
atggccttaccagtgaccgccttgctcctgccgctggccttgctgctccacgccgccaggccgaatgctggcgtgacccagacacctaagttccaggtgctgaaaaccggccagagcatgaccctgcaatgcgcccaggacatgaaccatgagtacatgagctggtacagacaggaccccggcatgggcctgagactgatccactactctgtggctatccagaccaccgaccagggcgaagtgcccaatggctacaacgtgtccagaagcaccatcgaggacttcccactgagactgctgtctgccgctcctagccagaccagcgtgtacttttgtgccagcagctacctgggcaacaccggcgagctgttttttggcgagggcagcagactgaccgtgctcgaggacctgaagaacgtgttcccacctgaggtggccgtgttcgagcctagcgaggccgagatcagccacacccagaaagccaccctcgtgtgcctggctaccggcttctaccccgaccatgtggaactgtcttggtgggtcaacggcaaagaggtgcacagcggcgtgtgtaccgacccccagccactgaaagaacagcccgccctgaacgacagccggtactgcctgagcagcagactgagagtgtccgccaccttctggcagaacccccggaaccacttcagatgccaggtgcagttctacggcctgagcgagaacgacgagtggacccaggacagagccaagcccgtgacccagatcgtgtctgccgaagcctggggcagagccgattgcggatcccagagcttcggcctgctggaccccaagctgtgctacctgctggatggcatcctgttcatctacggcgtgatcctgaccgccctgttcctgaggagtaagaggagcaggctcctgcacagtgactacatgaacatgactccacgccgccccggacccacccgcaagcattaccagccctatgccccaccacgcgacttcgcagcctatcgctccagagtgaagttcagcagaagcgccgacgcccctgcctaccagcagggacagaaccaactgtacaacgagctgaacctgggcagacgggaagagtacgacgtgctggacaagcggagaggcagggaccctgagatgggcggaaagccccggagaaagaacccccaggaaggactgtataacgaactccagaaagacaagatggccgaagcctacagcgagatcggcatgaagggcgagcggagaagaggcaagggccacgatggcctgtaccagggcctgagcaccgccaccaaggacacctatgacgccctgcacatgcaggccctgcctccaagaagggccaagcgatctggatctggagcaacaaacttctcactactcaaacaagcaggtgacgtggaggagaatcccgggcctactagtatggactggatttggcgcatccttttccttgtcggcgctgctaccggcgcgcattccttcgaacaagaagtgacacagatccctgccgctctgtctgtgcctgagggcgaaaacctggtgctgaactgctccttcaccgacagcgccatctacaacctccagtggttcaggcaggaccctggaaagggactgacaagcctgctgctgatccagagcagccagagagagcagacctccggcagactgaatgccagcctggataagagcagcggcaggtctaccctgtatatcgccgcttctcagcctggcgatagcgccacatatctgtgtgctgtgcggcctacaagcggcggcagctacatccctacatttggcagaggcaccagcctgatcgtgcacccttatacgcgtatccagaaccctgatcctgccgtgtaccagctgcgggatagcaagagcagcgacaagagcgtgtgtctgttcaccgacttcgacagccagaccaacgtgtcccagagcaaggactccgacgtgtacatcaccgataagtgcgtgctggacatgcggagcatggacttcaagagcaactccgccgtggcctggtccaacaagtccgatttcgcctgcgccaacgccttcaacaacagcattatccccgaggacacattcttcccaagccccgagagcagctgcggtacccagagttttgggttgttggaccctaaattgtgctatctgttggacggaatcctgttcatttacggagtgatcctgaccgcattgttcctgaggagcaagcggtcacggctgctccacagcgattacatgaatatgacaccacgaagaccgggtcctactcgcaaacactaccaaccctacgcacctccccgcgactttgcagcgtaccgatctcgggttaagttttccagatccgcagacgcacccgcttaccaacaagggcagaaccaactctacaatgaacttaatttggggcggagggaagagtacgacgttctggacaaaaggaggggacgagatcccgagatgggcggaaagcctcgaaggaagaatccgcaagaggggctttataacgaactccagaaagataaaatggcagaagcctatagtgagattgggatgaagggagaaaggaggaggggtaaaggtcacgatgggttgtaccaaggattgagcacagccactaaagatacctatgatgcgctccacatgcaggccctgccgccaaga

SEQ ID NO: 3239 - DNA, 2439 bp, synthetic construct
  source 1..2439: mol_type = other DNA
atggccttaccagtgaccgccttgctcctgccgctggccttgctgctccacgccgccaggccgaatgctggcgtgacccagacacctaagttccaggtgctgaaaaccggccagagcatgaccctgcaatgcgcccaggacatgaaccatgagtacatgagctggtacagacaggaccccggcatgggcctgagactgatccactactctgtggctatccagaccaccgaccagggcgaagtgcccaatggctacaacgtgtccagaagcaccatcgaggacttcccactgagactgctgtctgccgctcctagccagaccagcgtgtacttttgtgccagcagctacctgggcaacaccggcgagctgttttttggcgagggcagcagactgaccgtgctcgaggacctgaagaacgtgttcccacctgaggtggccgtgttcgagcctagcgaggccgagatcagccacacccagaaagccaccctcgtgtgcctggctaccggcttctaccccgaccatgtggaactgtcttggtgggtcaacggcaaagaggtgcacagcggcgtgtctaccgacccccagccactgaaagaacagcccgccctgaacgacagccggtactgcctgagcagcagactgagagtgtccgccaccttctggcagaacccccggaaccacttcagatgccaggtgcagttctacggcctgagcgagaacgacgagtggacccaggacagagccaagcccgtgacccagatcgtgtctgccgaagcctggggcagagccgattgcggatcccagagcttcggcctgctggaccccaagctgtgctacctgctggatggcatcctgttcatctacggcgtgatcctgaccgccctgttcctgagagtgaagttcagcagaagcgccgacgcccctgcctaccagcagggacagaaccaactgtacaacgagctgaacctgggcagacgggaagagtacgacgtgctggacaagcggagaggcagggaccctgagatgggcggaaagccccggagaaagaacccccaggaaggactgtataacgaactccagaaagacaagatggccgaagcctacagcgagatcggcatgaagggcgagcggagaagaggcaagggccacgatggcctgtaccagggcctgagcaccgccaccaaggacacctatgacgccctgcacatgcaggccctgcctccaagaagggccaagcgatctggatctggagcaacaaacttctcactactcaaacaagcaggtgacgtggaggagaatcccgggcctactagtatggactggatttggcgcatccttttccttgtcggcgctgctaccggcgcgcattccttcgaacaagaagtgacacagatccctgccgctctgtctgtgcctgagggcgaaaacctggtgctgaactgctccttcaccgacagcgccatctacaacctccagtggttcaggcaggaccctggaaagggactgacaagcctgctgctgatccagagcagccagagagagcagacctccggcagactgaatgccagcctggataagagcagcggcaggtctaccctgtatatcgccgcttctcagcctggcgatagcgccacatatctgtgtgctgtgcggcctacaagcggcggcagctacatccctacatttggcagaggcaccagcctgatcgtgcacccttatacgcgtatccagaaccctgatcctgccgtgtaccagctgcgggatagcaagagcagcgacaagagcgtgtgtctgttcaccgacttcgacagccagaccaacgtgtcccagagcaaggactccgacgtgtacatcaccgataagaccgtgctggacatgcggagcatggacttcaagagcaactccgccgtggcctggtccaacaagtccgatttcgcctgcgccaacgccttcaacaacagcattatccccgaggacacattcttcccaagccccgagagcagctgcggtacccagagttttgggttgttggaccctaaattgtgctatctgttggacggaatcctgttcatttacggagtgatcctgaccgcattgttcctgcgggttaagttttccagatccgcagacgcacccgcttaccaacaagggcagaaccaactctacaatgaacttaatttggggcggagggaagagtacgacgttctggacaaaaggaggggacgagatcccgagatgggcggaaagcctcgaaggaagaatccgcaagaggggctttataacgaactccagaaagataaaatggcagaagcctatagtgagattgggatgaagggagaaaggaggaggggtaaaggtcacgatgggttgtaccaaggattgagcacagccactaaagatacctatgatgcgctccacatgcaggccctgccgccaaga

SEQ ID NO: 3240 - DNA, 3171 bp, synthetic construct
  source 1..3171: mol_type = other DNA
atggccttaccagtgaccgccttgctcctgccgctggccttgctgctccacgccgccaggccgaatgctggcgtgacccagacacctaagttccaggtgctgaaaaccggccagagcatgaccctgcaatgcgcccaggacatgaaccatgagtacatgagctggtacagacaggaccccggcatgggcctgagactgatccactactctgtggctatccagaccaccgaccagggcgaagtgcccaatggctacaacgtgtccagaagcaccatcgaggacttcccactgagactgctgtctgccgctcctagccagaccagcgtgtacttttgtgccagcagctacctgggcaacaccggcgagctgttttttggcgagggcagcagactgaccgtgctcgaggacaagcagctggacgccgacgtgtcccccaagcctaccatcttcctgccctctatcgccgagacaaagctccagaaggccggcacctacctgtgcctgctggaaaagttcttcccagatgtgattaagatccactggcaggaaaagaagtccaacaccatcctgggcagccaggaaggcaacaccatgaagaccaacgacacctacatgaagttcagctggctgaccgtgcccgagaagtccctggacaaagaacacagatgcatcgtgcggcacgaaaacaacaagaacggcgtggaccaggaaatcatcttcccacccatcaagaccgatgtgattacaggatcccagagcttcggcctgctggaccccaagctgtgctacctgctggatggcatcctgttcatctacggcgtgatcctgaccgccctgttcctgagagtgaagttcagcagaagcgccgacgcccctgcctaccagcagggacagaaccaactgtacaacgagctgaacctgggcagacgggaagagtacgacgtgctggacaagcggagaggcagggaccctgagatgggcggaaagccccggagaaagaacccccaggaaggactgtataacgaactccagaaagacaagatggccgaagcctacagcgagatcggcatgaagggcgagcggagaagaggcaagggccacgatggcctgtaccagggcctgagcaccgccaccaaggacacctatgacgccctgcacatgcaggccctgcctccaagaagggccaagcgatctggatctggagcaacaaacttctcactactcaaacaagcaggtgacgtggaggagaatcccgggcctactagtatggactggatttggcgcatccttttccttgtcggcgctgctaccggcgcgcattccttcgaacaagaagtgacacagatccctgccgctctgtctgtgcctgagggcgaaaacctggtgctgaactgctccttcaccgacagcgccatctacaacctccagtggttcaggcaggaccctggaaagggactgacaagcctgctgctgatccagagcagccagagagagcagacctccggcagactgaatgccagcctggataagagcagcggcaggtctaccctgtatatcgccgcttctcagcctggcgatagcgccacatatctgtgtgctgtgcggcctacaagcggcggcagctacatccctacatttggcagaggcaccagcctgatcgtgcacccttatacgcgtagccagcctcacaccaagcccagcgtgttcgtgatgaagaacggcaccaacgtggcctgcctcgtgaaagagttctaccccaaggacatcaggatcaacctggtgtccagcaagaagatcaccgagttcgaccccgccatcgtgatctcccccagcggcaagtacaacgccgtgaagctggggaagtacgaggacagcaacagcgtgacctgctccgtgcagcacgacaacaagaccgtgcacagcaccgactttggtacccagagttttgggttgttggaccctaaattgtgctatctgttggacggaatcctgttcatttacggagtgatcctgaccgcattgttcctgcgggttaagttttccagatccgcagacgcacccgcttaccaacaagggcagaaccaactctacaatgaacttaatttggggcggagggaagagtacgacgttctggacaaaaggaggggacgagatcccgagatgggcggaaagcctcgaaggaagaatccgcaagaggggctttataacgaactccagaaagataaaatggcagaagcctatagtgagattgggatgaagggagaaaggaggaggggtaaaggtcacgatgggttgtaccaaggattgagcacagccactaaagatacctatgatgcgctccacatgcaggccctgccgccaagacgcgccaagagaagcggatctggcgtgaagcagaccctgaatttcgacctgctgaagctggctggcgacgtggaatccaacccaggcccttctagaggccatatggctctgcctgtgacagctctgctgctgcctctggcactgctgcttcatgctgctagacctagccagtttagagtgtcccctctggacagaacctggaacctgggcgagacagtggaactgaagtgccaggtgctgctgagcaaccctacaagcggctgctcctggctgtttcagcctagaggtgcagccgcctctcctacctttctgctgtacctgagccagaacaagcccaaggccgccgaaggactggacacccagagattcagcggcaagagactgggcgacaccttcgtgctgaccctgagcgacttcagaagagagaacgagggctactacttctgtagcgccctgagcaacagcatcatgtacttcagccacttcgtgcccgtgtttctgcccgccaagcctacaacaacccctgctcctagacctcctacaccagctcctacaatcgccagccagcctctgtctctcagacccgaagcctgtagacctgctgctggcggagctgtgcataccagaggactggatttcgcctgcgacatctacatctgggctcctctggctggcacatgtggcgtgctgctgctgtccctggtcatcaccctgtactgcaaccaccggaacaggcggagagtgtgcaagtgccctagacctgtggtcaagagcggcgacaagcctagcctgagcgccagatatgtt

SEQ ID NO: 3241 - DNA, 2856 bp, synthetic construct
  source 1..2856: mol_type = other DNA
atggccttaccagtgaccgccttgctcctgccgctggccttgctgctccacgccgccaggccggcatgcggcgtgacacagagccccacacacctgattaagaccagaggccagcaggccacactgagatgcagccctatcagcggccacaccagcgtgtactggtatcagcaggctctcggactgggcctccagttcctgctttggtacgacgagggcgaagagagaaaccggggcaacttccctcctcggttttccggcagacagttccccaactacagcagcgagctgaacgtgaacgccctggaactggaagatagcgccctgtacctgtgtgccagctctctcggcggagatgaactgggagccgatggcaacgagcagttctttggccctggcaccagactgaccgtgctggaaggtaccggcggaggcggatctggcggcggaggtagcggtggcggaggatctgaattcaatgctggcgtgacccagacacctaagttccaggtgctgaaaaccggccagagcatgaccctgcaatgcgcccaggacatgaaccatgagtacatgagctggtacagacaggaccccggcatgggcctgagactgatccactactctgtggctatccagaccaccgaccagggcgaagtgcccaatggctacaacgtgtccagaagcaccatcgaggacttcccactgagactgctgtctgccgctcctagccagaccagcgtgtacttttgtgccagcagctacctgggcaacaccggcgagctgttttttggcgagggcagcagactgaccgtgctcgaggacctgaagaacgtgttcccacctgaggtggccgtgttcgagcctagcgaggccgagatcagccacacccagaaagccaccctcgtgtgcctggctaccggcttctaccccgaccatgtggaactgtcttggtgggtcaacggcaaagaggtgcacagcggcgtgtctaccgacccccagccactgaaagaacagcccgccctgaacgacagccggtactgcctgagcagcagactgagagtgtccgccaccttctggcagaacccccggaaccacttcagatgccaggtgcagttctacggcctgagcgagaacgacgagtggacccaggacagagccaagcccgtgacccagatcgtgtctgccgaagcctggggcagagccgattgcggatcccagagcttcggcctgctggaccccaagctgtgctacctgctggatggcatcctgttcatctacggcgtgatcctgaccgccctgttcctgagagtgaagttcagcagaagcgccgacgcccctgcctaccagcagggacagaaccaactgtacaacgagctgaacctgggcagacgggaagagtacgacgtgctggacaagcggagaggcagggaccctgagatgggcggaaagccccggagaaagaacccccaggaaggactgtataacgaactccagaaagacaagatggccgaagcctacagcgagatcggcatgaagggcgagcggagaagaggcaagggccacgatggcctgtaccagggcctgagcaccgccaccaaggacacctatgacgccctgcacatgcaggccctgcctccaagaagggccaagcgatctggatctggagcaacaaacttctcactactcaaacaagcaggtgacgtggaggagaatcccgggcctactagtatggactggatttggcgcatccttttccttgtcggcgctgctaccggcgcgcattccttcgaacaagaagtgacacagatccctgccgctctgtctgtgcctgagggcgaaaacctggtgctgaactgctccttcaccgacagcgccatctacaacctccagtggttcaggcaggaccctggaaagggactgacaagcctgctgctgatccagagcagccagagagagcagacctccggcagactgaatgccagcctggataagagcagcggcaggtctaccctgtatatcgccgcttctcagcctggcgatagcgccacatatctgtgtgctgtgcggcctacaagcggcggcagctacatccctacatttggcagaggcaccagcctgatcgtgcacccttatacgcgtatccagaaccctgatcctgccgtgtaccagctgcgggatagcaagagcagcgacaagagcgtgtgtctgttcaccgacttcgacagccagaccaacgtgtcccagagcaaggactccgacgtgtacatcaccgataagaccgtgctggacatgcggagcatggacttcaagagcaactccgccgtggcctggtccaacaagtccgatttcgcctgcgccaacgccttcaacaacagcattatccccgaggacacattcttcccaagccccgagagcagctgcggtacccagagttttgggttgttggaccctaaattgtgctatctgttggacggaatcctgttcatttacggagtgatcctgaccgcattgttcctgcgggttaagttttccagatccgcagacgcacccgcttaccaacaagggcagaaccaactctacaatgaacttaatttggggcggagggaagagtacgacgttctggacaaaaggaggggacgagatcccgagatgggcggaaagcctcgaaggaagaatccgcaagaggggctttataacgaactccagaaagataaaatggcagaagcctatagtgagattgggatgaagggagaaaggaggaggggtaaaggtcacgatgggttgtaccaaggattgagcacagccactaaagatacctatgatgcgctccacatgcaggccctgccgccaagataa

SEQ ID NO: 3242 - DNA, 3273 bp, synthetic construct
  source 1..3273: mol_type = other DNA
atggccttaccagtgaccgccttgctcctgccgctggccttgctgctccacgccgccaggccggcatgcggcgtgacacagagccccacacacctgattaagaccagaggccagcaggccacactgagatgcagccctatcagcggccacaccagcgtgtactggtatcagcaggctctcggactgggcctccagttcctgctttggtacgacgagggcgaagagagaaaccggggcaacttccctcctcggttttccggcagacagttccccaactacagcagcgagctgaacgtgaacgccctggaactggaagatagcgccctgtacctgtgtgccagctctctcggcggagatgaactgggagccgatggcaacgagcagttctttggccctggcaccagactgaccgtgctggaaggtaccggcggaggcggatctggcggcggaggtagcggtggcggaggatctgaattcaatgctggcgtgacccagacacctaagttccaggtgctgaaaaccggccagagcatgaccctgcaatgcgcccaggacatgaaccatgagtacatgagctggtacagacaggaccccggcatgggcctgagactgatccactactctgtggctatccagaccaccgaccagggcgaagtgcccaatggctacaacgtgtccagaagcaccatcgaggacttcccactgagactgctgtctgccgctcctagccagaccagcgtgtacttttgtgccagcagctacctgggcaacaccggcgagctgttttttggcgagggcagcagactgaccgtgctcgaggacctgaagaacgtgttcccacctgaggtggccgtgttcgagcctagcgaggccgagatcagccacacccagaaagccaccctcgtgtgcctggctaccggcttctaccccgaccatgtggaactgtcttggtgggtcaacggcaaagaggtgcacagcggcgtgtctaccgacccccagccactgaaagaacagcccgccctgaacgacagccggtactgcctgagcagcagactgagagtgtccgccaccttctggcagaacccccggaaccacttcagatgccaggtgcagttctacggcctgagcgagaacgacgagtggacccaggacagagccaagcccgtgacccagatcgtgtctgccgaagcctggggcagagccgattgcggatcccagagcttcggcctgctggaccccaagctgtgctacctgctggatggcatcctgttcatctacggcgtgatcctgaccgccctgttcctgagagtgaagttcagcagaagcgccgacgcccctgcctaccagcagggacagaaccaactgtacaacgagctgaacctgggcagacgggaagagtacgacgtgctggacaagcggagaggcagggaccctgagatgggcggaaagccccggagaaagaacccccaggaaggactgtataacgaactccagaaagacaagatggccgaagcctacagcgagatcggcatgaagggcgagcggagaagaggcaagggccacgatggcctgtaccagggcctgagcaccgccaccaaggacacctatgacgccctgcacatgcaggccctgcctccaagaagggccaagcgatctggatctggagcaacaaacttctcactactcaaacaagcaggtgacgtggaggagaatcccgggcctactagtatggactggatttggcgcatccttttccttgtcggcgctgctaccggcgcgcattccgggccccaggttcagctgcaagagtctggcggaggacttgctcaagctggcggaagcctgagactgtcttgtgccgcctctggcagaaccttcagcatgggctggtttagacaggcccctggcaaagagagagagttcgtcgccgccatcacatacagcggcggcagcccttactacgcctcttctgtcagaggccggttcaccatcagccgggacaacgccaagaacaccgtgtacctccagatgaacagcctgaagccagaggacaccgccgtgtactactgtgccgccaatccaacctacggcagcgactggaatgccgagaattggggccagggcacccaagtgacagtgtctagtggatccggcggcggaggatctggcggaggcggatctgggggcggaggctctttcgaattcgaacaagaagtgacacagatccctgccgctctgtctgtgcctgagggcgaaaacctggtgctgaactgctccttcaccgacagcgccatctacaacctccagtggttcaggcaggaccctggaaagggactgacaagcctgctgctgatccagagcagccagagagagcagacctccggcagactgaatgccagcctggataagagcagcggcaggtctaccctgtatatcgccgcttctcagcctggcgatagcgccacatatctgtgtgctgtgcggcctacaagcggcggcagctacatccctacatttggcagaggcaccagcctgatcgtgcacccttatacgcgtatccagaaccctgatcctgccgtgtaccagctgcgggatagcaagagcagcgacaagagcgtgtgtctgttcaccgacttcgacagccagaccaacgtgtcccagagcaaggactccgacgtgtacatcaccgataagaccgtgctggacatgcggagcatggacttcaagagcaactccgccgtggcctggtccaacaagtccgatttcgcctgcgccaacgccttcaacaacagcattatccccgaggacacattcttcccaagccccgagagcagctgcggtacccagagttttgggttgttggaccctaaattgtgctatctgttggacggaatcctgttcatttacggagtgatcctgaccgcattgttcctgcgggttaagttttccagatccgcagacgcacccgcttaccaacaagggcagaaccaactctacaatgaacttaatttggggcggagggaagagtacgacgttctggacaaaaggaggggacgagatcccgagatgggcggaaagcctcgaaggaagaatccgcaagaggggctttataacgaactccagaaagataaaatggcagaagcctatagtgagattgggatgaagggagaaaggaggaggggtaaaggtcacgatgggttgtaccaaggattgagcacagccactaaagatacctatgatgcgctccacatgcaggccctgccgccaagataa

SEQ ID NO: 3243 - DNA, 2859 bp, synthetic construct
  source 1..2859: mol_type = other DNA
atggccttaccagtgaccgccttgctcctgccgctggccttgctgctccacgccgccaggccggacatccagatgacacagagccctagcagcctgtctgccagcgtgggagacagagtgaccatcacatgcaaggccagcgaccacatcaacaactggctggcctggtatcagcagaagcctggacaggcccctaagctgctgatctacggcgctaccacactggaaacaggcgtgcccagcagattttctggcagcggctctggcaccgactacaccctgacaatatccagcctccagcctgaggacttcgccacctactactgtcagcagagctggaacaccccttggacattcggccagggcaccaagctggaaatcaagagactcgaggacctgaagaacgtgttcccacctgaggtggccgtgttcgagcctagcgaggccgagatcagccacacccagaaagccaccctcgtgtgcctggctaccggcttctaccccgaccatgtggaactgtcttggtgggtcaacggcaaagaggtgcacagcggcgtgtctaccgacccccagccactgaaagaacagcccgccctgaacgacagccggtactgcctgagcagcagactgagagtgtccgccaccttctggcagaacccccggaaccacttcagatgccaggtgcagttctacggcctgagcgagaacgacgagtggacccaggacagagccaagcccgtgacccagatcgtgtctgccgaagcctggggcagagccgattgcggatcccagagcttcggcctgctggaccccaagctgtgctacctgctggatggcatcctgttcatctacggcgtgatcctgaccgccctgttcctgagagtgaagttcagcagaagcgccgacgcccctgcctaccagcagggacagaaccaactgtacaacgagctgaacctgggcagacgggaagagtacgacgtgctggacaagcggagaggcagggaccctgagatgggcggaaagccccggagaaagaacccccaggaaggactgtataacgaactccagaaagacaagatggccgaagcctacagcgagatcggcatgaagggcgagcggagaagaggcaagggccacgatggcctgtaccagggcctgagcaccgccaccaaggacacctatgacgccctgcacatgcaggccctgcctccaagaagggccaagcgatctggatctggagcaacaaacttctcactactcaaacaagcaggtgacgtggaggagaatcccgggcctactagtatggactggatttggcgcatccttttccttgtcggcgctgctaccggcgcccattccgggccccagctccagctgcaagagtctggacctggcctggtcaagcctagcgagacactgagcctgacctgtaccgtgtccggcgatagcatcagcagcggcgattactactggggctggatcagacagcctcctggcaaaggactggaatggatcggccacatctactacagcggcgtgacctactacaaccccagcctgaagtccagagtgaccatcagcgtggacaccagccggaaccagttctccctgaagctgtctagcgtgacagccgccgataccgccgtgtactactgcaccagagaggacagcagcaactggcggagtagaggccagggaacactggtcacagttagctctggatccggcggcggaggatctggcggaggcggatctgggggcggaggctctttcgaacaagttcagcttcaacagcctggcgctgagctggtcaaacctggcgcttctgtgaagatgagctgcaaagccagcggctacgccttcagcagctactggatcaactggatgaagcagaaacccggccagggactcgaatggatcggccaaatctatcccggcgacggcgacaccaactacaacggcaagttcaagggcagagccacactgaccgccgatacctctagcagcacagcctacatgcagctgagcagcctgaccagcgaagatagcgccgtgtacttctgtgcccggtccatcacaacagtcgtgggctgcgctatggactattggggccagggaacaagcgtgaccgtgtctagtacgcgtatccagaaccctgatcctgccgtgtaccagctgcgggatagcaagagcagcgacaagagcgtgtgtctgttcaccgacttcgacagccagaccaacgtgtcccagagcaaggactccgacgtgtacatcaccgataagaccgtgctggacatgcggagcatggacttcaagagcaactccgccgtggcctggtccaacaagtccgatttcgcctgcgccaacgccttcaacaacagcattatccccgaggacacattcttcccaagccccgagagcagctgcggtacccagagttttgggttgttggaccctaaattgtgctatctgttggacggaatcctgttcatttacggagtgatcctgaccgcattgttcctgcgggttaagttttccagatccgcagacgcacccgcttaccaacaagggcagaaccaactctacaatgaacttaatttggggcggagggaagagtacgacgttctggacaaaaggaggggacgagatcccgagatgggcggaaagcctcgaaggaagaatccgcaagaggggctttataacgaactccagaaagataaaatggcagaagcctatagtgagattgggatgaagggagaaaggaggaggggtaaaggtcacgatgggttgtaccaaggattgagcacagccactaaagatacctatgatgcgctccacatgcaggccctgccgccaaga

SEQ ID NO: 3244 - DNA, 25 bp, synthetic construct
  source 1..25: mol_type = other DNA
ggggggggggggggggggggggggg

SEQ ID NO: 3245 - DNA, 25 bp, synthetic construct
  source 1..25: mol_type = other DNA
ggggggggggggggggggggggggg

SEQ ID NO: 3246 - DNA, 1491 bp, synthetic construct
  source 1..1491: mol_type = other DNA
atggccttaccagtgaccgccttgctcctgccgctggccttgctgctccacgccgccaggccggacatccagatgacacagagccctagcagcctgtctgccagcgtgggagacagagtgaccatcacatgcaaggccagcgaccacatcaacaactggctggcctggtatcagcagaagcctggacaggcccctaagctgctgatctacggcgctaccacactggaaacaggcgtgcccagcagattttctggcagcggctctggcaccgactacaccctgacaatatccagcctccagcctgaggacttcgccacctactactgtcagcagagctggaacaccccttggacattcggccagggcaccaagctggaaatcaagagaggcggaggcggaagtggaggcggaggatctggcggcggaggctctcaagttcagcttcaacagcctggcgctgagctggtcaaacctggcgcttctgtgaagatgagctgcaaagccagcggctacgccttcagcagctactggatcaactggatgaagcagaaacccggccagggactcgaatggatcggccaaatctatcccggcgacggcgacaccaactacaacggcaagttcaagggcagagccacactgaccgccgatacctctagcagcacagcctacatgcagctgagcagcctgaccagcgaagatagcgccgtgtacttctgtgcccggtccatcacaacagtcgtgggctgcgctatggactattggggccagggaacaagcgtgaccgtgtctagtacgcgtgagcagaaactgatctcggaagaggatctgaaaattgaagttatgtatcctcctccttacctagacaatgagaagagcaatggaaccattatccatgtgaaagggaaacacctttgtccaagtcccctatttcccggaccttctaagcccttttgggtgctggtggtggttgggggagtcctggcttgctatagcttgctagtaacagtggcctttattattttctgggtgaggagtaagaggagcaggctcctgcacagtgactacatgaacatgactccacgccgccccggacccacccgcaagcattaccagccctatgccccaccacgcgacttcgcagcctatcgctccagagtgaagttcagcaggagcgcagacgcccccgcgtaccagcagggccagaaccagctctataacgagctcaatctaggacgaagagaggagtacgatgttttggacaagagacgtggccgggaccctgagatggggggaaagccgagaaggaagaaccctcaggaaggcctgtacaatgaactgcagaaagataagatggcggaggcctacagtgagattgggatgaaaggcgagcgccggaggggcaaggggcacgatggcctttaccagggtctcagtacagccaccaaggacacctacgacgcccttcacatgcaggccctgccccctcgc

SEQ ID NO: 3247 - DNA, 1512 bp, synthetic construct
  source 1..1512: mol_type = other DNA
atggccttaccagtgaccgccttgctcctgccgctggccttgctgctccacgccgccaggccggacatccagatgacacagagccctagcagcctgtctgccagcgtgggagacagagtgaccatcacatgcaaggccagcgaccacatcaacaactggctggcctggtatcagcagaagcctggacaggcccctaagctgctgatctacggcgctaccacactggaaacaggcgtgcccagcagattttctggcagcggctctggcaccgactacaccctgacaatatccagcctccagcctgaggacttcgccacctactactgtcagcagagctggaacaccccttggacattcggccagggcaccaagctggaaatcaagagaggcggaggcggaagtggaggcggaggatctggcggcggaggctctcaagttcagcttcaacagcctggcgctgagctggtcaaacctggcgcttctgtgaagatgagctgcaaagccagcggctacgccttcagcagctactggatcaactggatgaagcagaaacccggccagggactcgaatggatcggccaaatctatcccggcgacggcgacaccaactacaacggcaagttcaagggcagagccacactgaccgccgatacctctagcagcacagcctacatgcagctgagcagcctgaccagcgaagatagcgccgtgtacttctgtgcccggtccatcacaacagtcgtgggctgcgctatggactattggggccagggaacaagcgtgaccgtgtctagtacgcgtgagcagaaactgatctcggaagaggatctggcgaagcccaccacgacgccagcgccgcgaccaccaacaccggcgcccaccatcgcgtcgcagcccctgtccctgcgcccagaggcgtgccggccagcggcggggggcgcagtgcacacgagggggctggacttcgcctgtgacatctacatctgggcgcccttggccgggacttgtggggtccttctcctgtcactggttatcaccctttactgcaaacggggcagaaagaaactcctgtatatattcaaacaaccatttatgagaccagtacaaactactcaagaggaagatggctgtagctgccgatttccagaagaagaagaaggaggatgtgaactgagagtgaagttcagcaggagcgcagacgcccccgcgtaccagcagggccagaaccagctctataacgagctgaatctaggacgaagagaggagtacgatgttttggacaagagacgtggccgggaccctgagatggggggaaagccgagaaggaagaaccctcaggaaggcctgtacaatgaactgcagaaagataagatggcggaggcctacagtgagattgggatgaaaggcgagcgccggaggggcaaggggcacgatggcctttaccagggtctcagtacagccaccaaggacacctacgacgcccttcacatgcaggccctgccccctcgctga

SEQ ID NO: 3248 - DNA, 1512 bp, synthetic construct
  source 1..1512: mol_type = other DNA
atggccttaccagtgaccgccttgctcctgccgctggccttgctgctccacgccgccaggccgcaagttcagcttcaacagcctggcgctgagctggtcaaacctggcgcttctgtgaagatgagctgcaaagccagcggctacgccttcagcagctactggatcaactggatgaagcagaaacccggccagggactcgaatggatcggccaaatctatcccggcgacggcgacaccaactacaacggcaagttcaagggcagagccacactgaccgccgatacctctagcagcacagcctacatgcagctgagcagcctgaccagcgaagatagcgccgtgtacttctgtgcccggtccatcacaacagtcgtgggctgcgctatggactattggggccagggaacaagcgtgaccgtgtctagtggcggaggcggaagtggaggcggaggatctggcggcggaggctctgacatccagatgacacagagccctagcagcctgtctgccagcgtgggagacagagtgaccatcacatgcaaggccagcgaccacatcaacaactggctggcctggtatcagcagaagcctggacaggcccctaagctgctgatctacggcgctaccacactggaaacaggcgtgcccagcagattttctggcagcggctctggcaccgactacaccctgacaatatccagcctccagcctgaggacttcgccacctactactgtcagcagagctggaacaccccttggacattcggccagggcaccaagctggaaatcaagagaacgcgtgagcagaaactgatctcggaagaggatctggcgaagcccaccacgacgccagcgccgcgaccaccaacaccggcgcccaccatcgcgtcgcagcccctgtccctgcgcccagaggcgtgccggccagcggcggggggcgcagtgcacacgagggggctggacttcgcctgtgacatctacatctgggcgcccttggccgggacttgtggggtccttctcctgtcactggttatcaccctttactgcaaacggggcagaaagaaactcctgtatatattcaaacaaccatttatgagaccagtacaaactactcaagaggaagatggctgtagctgccgatttccagaagaagaagaaggaggatgtgaactgagagtgaagttcagcaggagcgcagacgcccccgcgtaccagcagggccagaaccagctctataacgagctgaatctaggacgaagagaggagtacgatgttttggacaagagacgtggccgggaccctgagatggggggaaagccgagaaggaagaaccctcaggaaggcctgtacaatgaactgcagaaagataagatggcggaggcctacagtgagattgggatgaaaggcgagcgccggaggggcaaggggcacgatggcctttaccagggtctcagtacagccaccaaggacacctacgacgcccttcacatgcaggccctgccccctcgctga

SEQ ID NO: 3249 - DNA, 2751 bp, synthetic construct
  source 1..2751: mol_type = other DNA
atggccttaccagtgaccgccttgctcctgccgctggccttgctgctccacgccgccaggccggacatccagatgacacagagccctagcagcctgtctgccagcgtgggagacagagtgaccatcacatgcaaggccagcgaccacatcaacaactggctggcctggtatcagcagaagcctggacaggcccctaagctgctgatctacggcgctaccacactggaaacaggcgtgcccagcagattttctggcagcggctctggcaccgactacaccctgacaatatccagcctccagcctgaggacttcgccacctactactgtcagcagagctggaacaccccttggacattcggccagggcaccaagctggaaatcaagagaggcggaggcggaagtggaggcggaggatctggcggcggaggctctcaagttcagcttcaacagcctggcgctgagctggtcaaacctggcgcttctgtgaagatgagctgcaaagccagcggctacgccttcagcagctactggatcaactggatgaagcagaaacccggccagggactcgaatggatcggccaaatctatcccggcgacggcgacaccaactacaacggcaagttcaagggcagagccacactgaccgccgatacctctagcagcacagcctacatgcagctgagcagcctgaccagcgaagatagcgccgtgtacttctgtgcccggtccatcacaacagtcgtgggctgcgctatggactattggggccagggaacaagcgtgaccgtgtctagtacgcgtgagcagaaactgatctcggaagaggatctggcgaagcccaccacgacgccagcgccgcgaccaccaacaccggcgcccaccatcgcgtcgcagcccctgtccctgcgcccagaggcgtgccggccagcggcggggggcgcagtgcacacgagggggctggacttcgcctgtgacatctacatctgggcgcccttggccgggacttgtggggtccttctcctgtcactggttatcaccctttactgcgggcgcgccagagtgaagttcagcaggagcgcagacgcccccgcgtaccagcagggccagaaccagctctataacgagctgaatctaggacgaagagaggagtacgatgttttggacaagagacgtggccgggaccctgagatggggggaaagccgagaaggaagaaccctcaggaaggcctgtacaatgaactgcagaaagataagatggcggaggcctacagtgagattgggatgaaaggcgagcgccggaggggcaaggggcacgatggcctttaccagggtctcagtacagccaccaaggacacctacgacgcccttcacatgcaggccctgccccctcgctctagaggatctggagcaacaaacttctcactactcaaacaagcaggtgacgtggaggagaatcccgggcctgggatccacatggccacttacgaggttctctgtgaggtggcgcggaaactgggcacggatgacagggaagtggtattgttcctcctaaacgtgttcatacctcaacccacactggcccaattaattggagctcttagagctttaaaggaggagggcaggttaacgtttcccctgttagcggaatgtctgtttcgtgcaggtcgcagagacctcttgcgcgacctgcttcacttagacccgcgttttttagagcgccacctagcgggcacaatgagttatttcagcccttatcagctcactgttctccacgtagacggggagctgtgtgcgagggatattaggtctttgatatttttaagcaaggacactatagggtctcgcagcacaccacagacattcttacactgggtgtactgtatggaaaacttagacctactgggtcccactgacgtggatgccctaatgtcaatgcttagatctttgtcaagagtagacctacagcgccaagtgcaaaccctaatgggccttcacctttccggcccatcacactcccaacactatcgccatacaccactcgagaccgatttctacgactacaaggacgacgatgacaagactagtggctccggcgagggcagaggaagtctactaacctgcggagatgtggaagaaaatcctggcccacatatgaccgagtacaagcccacggtgcgcctcgccacccgcgacgacgtccccagggccgtacgcaccctcgccgccgcgttcgccgactaccccgccacgcgccacaccgtcgatccggaccgccacatcgagcgggtcaccgagctgcaagaactcttcctcacgcgcgtcgggctcgacatcggcaaggtgtgggtcgcggacgacggcgccgcggtggcggtctggaccacgccggagagcgtcgaagcgggggcggtgttcgccgagatcggcccgcgcatggccgagttgagcggttcccggctggccgcgcagcaacagatggaaggcctcctggcgccgcaccggcccaaggagcccgcgtggttcctggccaccgtcggcgtctcgcccgaccaccagggcaagggtctgggcagcgccgtcgtgctccccggagtggaggcggccgagcgcgccggggtgcccgccttcctggagacctccgcgccccgcaacctccccttctacgagcggctcggcttcaccgtcaccgccgacgtcgaggtgcccgaaggaccgcgcacctggtgcatgacccgcaagcccggtgcctga

SEQ ID NO: 3250 - DNA, 2571 bp, synthetic construct
  source 1..2571: mol_type = other DNA
atggccttaccagtgaccgccttgctcctgccgctggccttgctgctccacgccgccaggccggacatccagatgacacagagccctagcagcctgtctgccagcgtgggagacagagtgaccatcacatgcaaggccagcgaccacatcaacaactggctggcctggtatcagcagaagcctggacaggcccctaagctgctgatctacggcgctaccacactggaaacaggcgtgcccagcagattttctggcagcggctctggcaccgactacaccctgacaatatccagcctccagcctgaggacttcgccacctactactgtcagcagagctggaacaccccttggacattcggccagggcaccaagctggaaatcaagagactcgagatccagaaccctgatcctgccgtgtaccagctgcgggatagcaagagcagcgacaagagcgtgtgtctgttcaccgacttcgacagccagaccaacgtgtcccagagcaaggactccgacgtgtacatcaccgataagtgcgtgctggacatgcggagcatggacttcaagagcaactccgccgtggcctggtccaacaagtccgatttcgcctgcgccaacgccttcaacaacagcattatccccgaggacacattcttcccaagcagcgacgtgccctgcgacgtgaagctggtggaaaagagcttcgagacagacaccaacctgaacttccagaacctgagcgtgatcggcttcagaatcctgctgctgaaagtggccggctttaacctgctgatgaccctgcggctgtggtccagccgcgccaagagaagcggatctggcgtgaagcagaccctgaatttcgacctgctgaagctggctggcgacgtggaatccaacccaggccctactagtatggactggatttggcgcatccttttccttgtcggcgctgctaccggcgcgcattccttcgaacaagttcagcttcaacagcctggcgctgagctggtcaaacctggcgcttctgtgaagatgagctgcaaagccagcggctacgccttcagcagctactggatcaactggatgaagcagaaacccggccagggactcgaatggatcggccaaatctatcccggcgacggcgacaccaactacaacggcaagttcaagggcagagccacactgaccgccgatacctctagcagcacagcctacatgcagctgagcagcctgaccagcgaagatagcgccgtgtacttctgtgcccggtccatcacaacagtcgtgggctgcgctatggactattggggccagggaacaagcgtgaccgtgtctagtacgcgtgaggacctgaagaacgtgttcccacctgaggtggccgtgttcgagcctagcaaggccgagatcgcccacacccagaaagccaccctcgtgtgcctggctaccggcttctaccccgaccatgtggaactgtcttggtgggtcaacggcaaagaggtgcacagcggcgtgtgtaccgacccccagccactgaaagaacagcccgccctgaacgacagccggtactgcctgagcagcagactgagagtgtccgccaccttctggcagaacccccggaaccacttcagatgccaggtgcagttctacggcctgagcgagaacgacgagtggacccaggacagagccaagcccgtgacccagatcgtgtctgccgaagcctggggcagagccgattgcggcatcaccagcgccagctaccaccagggcgtgctgagcgccaccatcctgtacgagatcctgctgggcaaggccaccctgtacgccgtgctggtgtctgccctggtgctgatggctatggtcaagcggaaggacagccggggaagggccaagcgatctggatctggagcaacaaacttctcactactcaaacaagcaggtgacgtggaggagaatcccgggccttctagaggccatatgaccgagtacaagcccacggtgcgcctcgccacccgcgacgacgtccccagggccgtacgcaccctcgccgccgcgttcgccgactaccccgccacgcgccacaccgtcgatccggaccgccacatcgagcgggtcaccgagctgcaagaactcttcctcacgcgcgtcgggctcgacatcggcaaggtgtgggtcgcggacgacggcgccgcggtggcggtctggaccacgccggagagcgtcgaagcgggggcggtgttcgccgagatcggcccgcgcatggccgagttgagcggttcccggctggccgcgcagcaacagatggaaggcctcctggcgccgcaccggcccaaggagcccgcgtggttcctggccaccgtcggcgtctcgcccgaccaccagggcaagggtctgggcagcgccgtcgtgctccccggagtggaggcggccgagcgcgccggggtgcccgccttcctggagacctccgcgccccgcaacctccccttctacgagcggctcggcttcaccgtcaccgccgacgtcgaggtgcccgaaggaccgcgcacctggtgcatgacccgcaagcccggtgcctga

SEQ ID NO: 3251 - DNA, 2568 bp, synthetic construct
  source 1..2568: mol_type = other DNA
atggccttaccagtgaccgccttgctcctgccgctggccttgctgctccacgccgccaggccggacatccagatgacacagagccctagcagcctgtctgccagcgtgggagacagagtgaccatcacatgcaaggccagcgaccacatcaacaactggctggcctggtatcagcagaagcctggacaggcccctaagctgctgatctacggcgctaccacactggaaacaggcgtgcccagcagattttctggcagcggctctggcaccgactacaccctgacaatatccagcctccagcctgaggacttcgccacctactactgtcagcagagctggaacaccccttggacattcggccagggcaccaagctggaaatcaagagactcgaggacctgaagaacgtgttcccacctgaggtggccgtgttcgagcctagcaaggccgagatcgcccacacccagaaagccaccctcgtgtgcctggctaccggcttctaccccgaccatgtggaactgtcttggtgggtcaacggcaaagaggtgcacagcggcgtgtgtaccgacccccagccactgaaagaacagcccgccctgaacgacagccggtactgcctgagcagcagactgagagtgtccgccaccttctggcagaacccccggaaccacttcagatgccaggtgcagttctacggcctgagcgagaacgacgagtggacccaggacagagccaagcccgtgacccagatcgtgtctgccgaagcctggggcagagccgattgcggcatcaccagcgccagctaccaccagggcgtgctgagcgccaccatcctgtacgagatcctgctgggcaaggccaccctgtacgccgtgctggtgtctgccctggtgctgatggctatggtcaagcggaaggacagccggggaagggccaagcgatctggatctggagcaacaaacttctcactactcaaacaagcaggtgacgtggaggagaatcccgggcctactagtatggactggatttggcgcatccttttccttgtcggcgctgctaccggcgcgcattccttcgaacaagttcagcttcaacagcctggcgctgagctggtcaaacctggcgcttctgtgaagatgagctgcaaagccagcggctacgccttcagcagctactggatcaactggatgaagcagaaacccggccagggactcgaatggatcggccaaatctatcccggcgacggcgacaccaactacaacggcaagttcaagggcagagccacactgaccgccgatacctctagcagcacagcctacatgcagctgagcagcctgaccagcgaagatagcgccgtgtacttctgtgcccggtccatcacaacagtcgtgggctgcgctatggactattggggccagggaacaagcgtgaccgtgtctagtacgcgtatccagaaccctgatcctgccgtgtaccagctgcgggatagcaagagcagcgacaagagcgtgtgtctgttcaccgacttcgacagccagaccaacgtgtcccagagcaaggactccgacgtgtacatcaccgataagtgcgtgctggacatgcggagcatggacttcaagagcaactccgccgtggcctggtccaacaagtccgatttcgcctgcgccaacgccttcaacaacagcattatccccgaggacacattcttcccaagcagcgacgtgccctgcgacgtgaagctggtggaaaagagcttcgagacagacaccaacctgaacttccagaacctgagcgtgatcggcttcagaatcctgctgctgaaagtggccggctttaacctgctgatgaccctgcggctgtggtccagccgcgccaagagaagcggatctggcgtgaagcagaccctgaatttcgacctgctgaagctggctggcgacgtggaatccaacccaggcccttctagaggccatatgaccgagtacaagcccacggtgcgcctcgccacccgcgacgacgtccccagggccgtacgcaccctcgccgccgcgttcgccgactaccccgccacgcgccacaccgtcgatccggaccgccacatcgagcgggtcaccgagctgcaagaactcttcctcacgcgcgtcgggctcgacatcggcaaggtgtgggtcgcggacgacggcgccgcggtggcggtctggaccacgccggagagcgtcgaagcgggggcggtgttcgccgagatcggcccgcgcatggccgagttgagcggttcccggctggccgcgcagcaacagatggaaggcctcctggcgccgcaccggcccaaggagcccgcgtggttcctggccaccgtcggcgtctcgcccgaccaccagggcaagggtctgggcagcgccgtcgtgctccccggagtggaggcggccgagcgcgccggggtgcccgccttcctggagacctccgcgccccgcaacctccccttctacgagcggctcggcttcaccgtcaccgccgacgtcgaggtgcccgaaggaccgcgcacctggtgcatgacccgcaagcccggtgcctga

SEQ ID NO: 3252 - DNA, 1866 bp, synthetic construct
  source 1..1866: mol_type = other DNA
atggccttaccagtgaccgccttgctcctgccgctggccttgctgctccacgccgccaggccggacatccagatgacacagagccctagcagcctgtctgccagcgtgggagacagagtgaccatcacatgcaaggccagcgaccacatcaacaactggctggcctggtatcagcagaagcctggacaggcccctaagctgctgatctacggcgctaccacactggaaacaggcgtgcccagcagattttctggcagcggctctggcaccgactacaccctgacaatatccagcctccagcctgaggacttcgccacctactactgtcagcagagctggaacaccccttggacattcggccagggcaccaagctggaaatcaagagactcgaggacctgaagaacgtgttcccacctgaggtggccgtgttcgagcctagcgaggccgagatcagccacacccagaaagccaccctcgtgtgcctggctaccggcttctaccccgaccatgtggaactgtcttggtgggtcaacggcaaagaggtgcacagcggcgtgtgtaccgacccccagccactgaaagaacagcccgccctgaacgacagccggtactgcctgagcagcagactgagagtgtccgccaccttctggcagaacccccggaaccacttcagatgccaggtgcagttctacggcctgagcgagaacgacgagtggacccaggacagagccaagcccgtgacccagatcgtgtctgccgaagcctggggcagagccgattgcggctttaccagcgagagctaccagcagggcgtgctgagcgccaccatcctgtacgagatcctgctgggcaaggccaccctgtacgccgtgctggtgtctgccctggtgctgatggctatggtcaagcggaaggacagccggggaagggccaagcgatctggatctggagcaacaaacttctcactactcaaacaagcaggtgacgtggaggagaatcccgggcctactagtatggactggatttggcgcatccttttccttgtcggcgctgctaccggcgcgcattccttcgaacaagttcagcttcaacagcctggcgctgagctggtcaaacctggcgcttctgtgaagatgagctgcaaagccagcggctacgccttcagcagctactggatcaactggatgaagcagaaacccggccagggactcgaatggatcggccaaatctatcccggcgacggcgacaccaactacaacggcaagttcaagggcagagccacactgaccgccgatacctctagcagcacagcctacatgcagctgagcagcctgaccagcgaagatagcgccgtgtacttctgtgcccggtccatcacaacagtcgtgggctgcgctatggactattggggccagggaacaagcgtgaccgtgtctagtacgcgtatccagaaccctgatcctgccgtgtaccagctgcgggatagcaagagcagcgacaagagcgtgtgtctgttcaccgacttcgacagccagaccaacgtgtcccagagcaaggactccgacgtgtacatcaccgataagtgcgtgctggacatgcggagcatggacttcaagagcaactccgccgtggcctggtccaacaagtccgatttcgcctgcgccaacgccttcaacaacagcattatccccgaggacacattcttcccaagccccgagagcagctgcgacgtgaagctggtggaaaagagcttcgagacagacaccaacctgaacttccagaacctgagcgtgatcggcttcagaatcctgctgctgaaagtggccggctttaacctgctgatgaccctgcggctgtggtccagc

SEQ ID NO: 3253 - DNA, 2541 bp, synthetic construct
  source 1..2541: mol_type = other DNA
atggccttaccagtgaccgccttgctcctgccgctggccttgctgctccacgccgccaggccggacatccagatgacacagagccctagcagcctgtctgccagcgtgggagacagagtgaccatcacatgcaaggccagcgaccacatcaacaactggctggcctggtatcagcagaagcctggacaggcccctaagctgctgatctacggcgctaccacactggaaacaggcgtgcccagcagattttctggcagcggctctggcaccgactacaccctgacaatatccagcctccagcctgaggacttcgccacctactactgtcagcagagctggaacaccccttggacattcggccagggcaccaagctggaaatcaagagactcgaggacctgaagaacgtgttcccacctgaggtggccgtgttcgagcctagcgaggccgagatcagccacacccagaaagccaccctcgtgtgcctggctaccggcttctaccccgaccatgtggaactgtcttggtgggtcaacggcaaagaggtgcacagcggcgtgtgtaccgacccccagccactgaaagaacagcccgccctgaacgacagccggtactgcctgagcagcagactgagagtgtccgccaccttctggcagaacccccggaaccacttcagatgccaggtgcagttctacggcctgagcgagaacgacgagtggacccaggacagagccaagcccgtgacccagatcgtgtctgccgaagcctggggcagagccgattgcggctttaccagcgagagctaccagcagggcgtgctgagcgccaccatcctgtacgagatcctgctgggcaaggccaccctgtacgccgtgctggtgtctgccctggtgctgatggctatggtcaagcggaaggacagccggggaagggccaagcgatctggatctggagcaacaaacttctcactactcaaacaagcaggtgacgtggaggagaatcccgggcctactagtatggactggatttggcgcatccttttccttgtcggcgctgctaccggcgcgcattccttcgaacaagttcagcttcaacagcctggcgctgagctggtcaaacctggcgcttctgtgaagatgagctgcaaagccagcggctacgccttcagcagctactggatcaactggatgaagcagaaacccggccagggactcgaatggatcggccaaatctatcccggcgacggcgacaccaactacaacggcaagttcaagggcagagccacactgaccgccgatacctctagcagcacagcctacatgcagctgagcagcctgaccagcgaagatagcgccgtgtacttctgtgcccggtccatcacaacagtcgtgggctgcgctatggactattggggccagggaacaagcgtgaccgtgtctagtacgcgtatccagaaccctgatcctgccgtgtaccagctgcgggatagcaagagcagcgacaagagcgtgtgtctgttcaccgacttcgacagccagaccaacgtgtcccagagcaaggactccgacgtgtacatcaccgataagtgcgtgctggacatgcggagcatggacttcaagagcaactccgccgtggcctggtccaacaagtccgatttcgcctgcgccaacgccttcaacaacagcattatccccgaggacacattcttcccaagccccgagagcagctgcgacgtgaagctggtggaaaagagcttcgagacagacaccaacctgaacttccagaacctgagcgtgatcggcttcagaatcctgctgctgaaagtggccggctttaacctgctgatgaccctgcggctgtggtccagccgcgccaagagaagcggatctggcgtgaagcagaccctgaatttcgacctgctgaagctggctggcgacgtggaatccaacccaggcccttctagaggcgggatccacaccatggctacctacgaggtgctgtgcgaggtggcaagaaagctgggcaccgacgacagagaagtggtgctgttcctgctgaacgtgttcatccctcagcctacactggcccagctgatcggtgcactgagagccctgaaagaggaaggccggctgacctttcctctgctggccgaatgcctgttcagagccggaagaagggatctgctgcgggacctgctgcatctggaccccagatttctggaaagacacctggccggcaccatgagctacttcagcccttaccagctgaccgtgctgcacgttgacggcgaactgtgcgccagagatattcggagcctgatcttcctgagcaaggacaccatcggcagccggtctacccctcagacatttctgcactgggtgtactgcatggaaaacctggacctgctcggccccacagatgtggatgccctgatgtccatgctgagaagcctgagcagagtggacctccagagacaggtgcagacactgatgggactgcacctgagcggacctagccacagccagcactacagacacacccct

SEQ ID NO: 3254 - DNA, 1878 bp, synthetic construct
  source 1..1878: mol_type = other DNA
atggccttaccagtgaccgccttgctcctgccgctggccttgctgctccacgccgccaggccggacatccagatgacacagagccctagcagcctgtctgccagcgtgggagacagagtgaccatcacatgcaaggccagcgaccacatcaacaactggctggcctggtatcagcagaagcctggacaggcccctaagctgctgatctacggcgctaccacactggaaacaggcgtgcccagcagattttctggcagcggctctggcaccgactacaccctgacaatatccagcctccagcctgaggacttcgccacctactactgtcagcagagctggaacaccccttggacattcggccagggcaccaagctggaaatcaagagactcgagatccagaaccctgatcctgccgtgtaccagctgcgggatagcaagagcagcgacaagagcgtgtgtctgttcaccgacttcgacagccagaccaacgtgtcccagagcaaggactccgacgtgtacatcaccgataagtgcgtgctggacatgcggagcatggacttcaagagcaactccgccgtggcctggtccaacaagtccgatttcgcctgcgccaacgccttcaacaacagcattatccccgaggacacattcttcccaagccccgagagcagctgcgacgtgaagctggtggaaaagagcttcgagacagacaccaacctgaacttccagaacctgagcgtgatcggcttcagaatcctgctgctgaaagtggccggctttaacctgctgatgaccctgcggctgtggtccagccgcgccaagagaagcggatctggcgtgaagcagaccctgaatttcgacctgctgaagctggctggcgacgtggaatccaacccaggccctactagtatggactggatttggcgcatccttttccttgtcggcgctgctaccggcgcgcattccttcgaacaagttcagcttcaacagcctggcgctgagctggtcaaacctggcgcttctgtgaagatgagctgcaaagccagcggctacgccttcagcagctactggatcaactggatgaagcagaaacccggccagggactcgaatggatcggccaaatctatcccggcgacggcgacaccaactacaacggcaagttcaagggcagagccacactgaccgccgatacctctagcagcacagcctacatgcagctgagcagcctgaccagcgaagatagcgccgtgtacttctgtgcccggtccatcacaacagtcgtgggctgcgctatggactattggggccagggaacaagcgtgaccgtgtctagtacgcgtgaggacctgaagaacgtgttcccacctgaggtggccgtgttcgagcctagcgaggccgagatcagccacacccagaaagccaccctcgtgtgcctggctaccggcttctaccccgaccatgtggaactgtcttggtgggtcaacggcaaagaggtgcacagcggcgtgtgtaccgacccccagccactgaaagaacagcccgccctgaacgacagccggtactgcctgagcagcagactgagagtgtccgccaccttctggcagaacccccggaaccacttcagatgccaggtgcagttctacggcctgagcgagaacgacgagtggacccaggacagagccaagcccgtgacccagatcgtgtctgccgaagcctggggcagagccgattgcggctttaccagcgagagctaccagcagggcgtgctgagcgccaccatcctgtacgagatcctgctgggcaaggccaccctgtacgccgtgctggtgtctgccctggtgctgatggctatggtcaagcggaaggacagccgggga

SEQ ID NO: 3255 - DNA, 2544 bp, synthetic construct
  source 1..2544: mol_type = other DNA
atggccttaccagtgaccgccttgctcctgccgctggccttgctgctccacgccgccaggccggacatccagatgacacagagccctagcagcctgtctgccagcgtgggagacagagtgaccatcacatgcaaggccagcgaccacatcaacaactggctggcctggtatcagcagaagcctggacaggcccctaagctgctgatctacggcgctaccacactggaaacaggcgtgcccagcagattttctggcagcggctctggcaccgactacaccctgacaatatccagcctccagcctgaggacttcgccacctactactgtcagcagagctggaacaccccttggacattcggccagggcaccaagctggaaatcaagagactcgagatccagaaccctgatcctgccgtgtaccagctgcgggatagcaagagcagcgacaagagcgtgtgtctgttcaccgacttcgacagccagaccaacgtgtcccagagcaaggactccgacgtgtacatcaccgataagtgcgtgctggacatgcggagcatggacttcaagagcaactccgccgtggcctggtccaacaagtccgatttcgcctgcgccaacgccttcaacaacagcattatccccgaggacacattcttcccaagccccgagagcagctgcgacgtgaagctggtggaaaagagcttcgagacagacaccaacctgaacttccagaacctgagcgtgatcggcttcagaatcctgctgctgaaagtggccggctttaacctgctgatgaccctgcggctgtggtccagccgcgccaagagaagcggatctggcgtgaagcagaccctgaatttcgacctgctgaagctggctggcgacgtggaatccaacccaggccctactagtatggactggatttggcgcatccttttccttgtcggcgctgctaccggcgcgcattccttcgaacaagttcagcttcaacagcctggcgctgagctggtcaaacctggcgcttctgtgaagatgagctgcaaagccagcggctacgccttcagcagctactggatcaactggatgaagcagaaacccggccagggactcgaatggatcggccaaatctatcccggcgacggcgacaccaactacaacggcaagttcaagggcagagccacactgaccgccgatacctctagcagcacagcctacatgcagctgagcagcctgaccagcgaagatagcgccgtgtacttctgtgcccggtccatcacaacagtcgtgggctgcgctatggactattggggccagggaacaagcgtgaccgtgtctagtacgcgtgaggacctgaagaacgtgttcccacctgaggtggccgtgttcgagcctagcgaggccgagatcagccacacccagaaagccaccctcgtgtgcctggctaccggcttctaccccgaccatgtggaactgtcttggtgggtcaacggcaaagaggtgcacagcggcgtgtgtaccgacccccagccactgaaagaacagcccgccctgaacgacagccggtactgcctgagcagcagactgagagtgtccgccaccttctggcagaacccccggaaccacttcagatgccaggtgcagttctacggcctgagcgagaacgacgagtggacccaggacagagccaagcccgtgacccagatcgtgtctgccgaagcctggggcagagccgattgcggctttaccagcgagagctaccagcagggcgtgctgagcgccaccatcctgtacgagatcctgctgggcaaggccaccctgtacgccgtgctggtgtctgccctggtgctgatggctatggtcaagcggaaggacagccggggaagggccaagcgatctggatctggagcaacaaacttctcactactcaaacaagcaggtgacgtggaggagaatcccgggccttctagaggcgggatccacaccatggctacctacgaggtgctgtgcgaggtggcaagaaagctgggcaccgacgacagagaagtggtgctgttcctgctgaacgtgttcatccctcagcctacactggcccagctgatcggtgcactgagagccctgaaagaggaaggccggctgacctttcctctgctggccgaatgcctgttcagagccggaagaagggatctgctgcgggacctgctgcatctggaccccagatttctggaaagacacctggccggcaccatgagctacttcagcccttaccagctgaccgtgctgcacgttgacggcgaactgtgcgccagagatattcggagcctgatcttcctgagcaaggacaccatcggcagccggtctacccctcagacatttctgcactgggtgtactgcatggaaaacctggacctgctcggccccacagatgtggatgccctgatgtccatgctgagaagcctgagcagagtggacctccagagacaggtgcagacactgatgggactgcacctgagcggacctagccacagccagcactacagacacacccct

SEQ ID NO: 3256 - DNA, 2703 bp, synthetic construct
  source 1..2703: mol_type = other DNA
atggccttaccagtgaccgccttgctcctgccgctggccttgctgctccacgccgccaggccgctcgaggggaaaccaattcccaaccctcttctgggactggattcaaccggcagcggcgaggacctgaagaacgtgttcccacctgaggtggccgtgttcgagcctagcaaggccgagatcgcccacacccagaaagccaccctcgtgtgcctggctaccggcttctaccccgaccatgtggaactgtcttggtgggtcaacggcaaagaggtgcacagcggcgtgtgtaccgacccccagccactgaaagaacagcccgccctgaacgacagccggtactgcctgagcagcagactgagagtgtccgccaccttctggcagaacccccggaaccacttcagatgccaggtgcagttctacggcctgagcgagaacgacgagtggacccaggacagagccaagcccgtgacccagatcgtgtctgccgaagcctggggcagagccgattgcggcatcaccagcgccagctaccaccagggcgtgctgagcgccaccatcctgtacgagatcctgctgggcaaggccaccctgtacgccgtgctggtgtctgccctggtgctgatggctatggtcaagcggaaggacagccggggaagggccaagcgatctggatctggagcaacaaacttctcactactcaaacaagcaggtgacgtggaggagaatcccgggcctactagcatggccttaccagtgaccgccttgctcctgccgctggccttgctgctccacgccgccaggccggacatccagatgacacagagccctagcagcctgtctgccagcgtgggagacagagtgaccatcacatgcaaggccagcgaccacatcaacaactggctggcctggtatcagcagaagcctggacaggcccctaagctgctgatctacggcgctaccacactggaaacaggcgtgcccagcagattttctggcagcggctctggcaccgactacaccctgacaatatccagcctccagcctgaggacttcgccacctactactgtcagcagagctggaacaccccttggacattcggccagggcaccaagctggaaatcaagagaggcggaggcggaagtggaggcggaggatctggcggcggaggctctcaagttcagcttcaacagcctggcgctgagctggtcaaacctggcgcttctgtgaagatgagctgcaaagccagcggctacgccttcagcagctactggatcaactggatgaagcagaaacccggccagggactcgaatggatcggccaaatctatcccggcgacggcgacaccaactacaacggcaagttcaagggcagagccacactgaccgccgatacctctagcagcacagcctacatgcagctgagcagcctgaccagcgaagatagcgccgtgtacttctgtgcccggtccatcacaacagtcgtgggctgcgctatggactattggggccagggaacaagcgtgaccgtgtctagtacgcgtgagcagaaactgatctcggaagaggatgggagcggcatccagaaccctgatcctgccgtgtaccagctgcgggatagcaagagcagcgacaagagcgtgtgtctgttcaccgacttcgacagccagaccaacgtgtcccagagcaaggactccgacgtgtacatcaccgataagtgcgtgctggacatgcggagcatggacttcaagagcaactccgccgtggcctggtccaacaagtccgatttcgcctgcgccaacgccttcaacaacagcattatccccgaggacacattcttcccaagcagcgacgtgccctgcgacgtgaagctggtggaaaagagcttcgagacagacaccaacctgaacttccagaacctgagcgtgatcggcttcagaatcctgctgctgaaagtggccggctttaacctgctgatgaccctgcggctgtggtccagccgcgccaagagaagcggatctggcgtgaagcagaccctgaatttcgacctgctgaagctggctggcgacgtggaatccaacccaggcccttctagaggccatatgaccgagtacaagcccacggtgcgcctcgccacccgcgacgacgtccccagggccgtacgcaccctcgccgccgcgttcgccgactaccccgccacgcgccacaccgtcgatccggaccgccacatcgagcgggtcaccgagctgcaagaactcttcctcacgcgcgtcgggctcgacatcggcaaggtgtgggtcgcggacgacggcgccgcggtggcggtctggaccacgccggagagcgtcgaagcgggggcggtgttcgccgagatcggcccgcgcatggccgagttgagcggttcccggctggccgcgcagcaacagatggaaggcctcctggcgccgcaccggcccaaggagcccgcgtggttcctggccaccgtcggcgtctcgcccgaccaccagggcaagggtctgggcagcgccgtcgtgctccccggagtggaggcggccgagcgcgccggggtgcccgccttcctggagacctccgcgccccgcaacctccccttctacgagcggctcggcttcaccgtcaccgccgacgtcgaggtgcccgaaggaccgcgcacctggtgcatgacccgcaagcccggtgcctga

SEQ ID NO: 3257 - DNA, 2706 bp, synthetic construct
  source 1..2706: mol_type = other DNA
atggccttaccagtgaccgccttgctcctgccgctggccttgctgctccacgccgccaggccgctcgagcagaaactgatctcggaagaggatctgggctccggcgatcgccctgatcctgccgtgtaccagctgcgggatagcaagagcagcgacaagagcgtgtgtctgttcaccgacttcgacagccagaccaacgtgtcccagagcaaggactccgacgtgtacatcaccgataagtgcgtgctggacatgcggagcatggacttcaagagcaactccgccgtggcctggtccaacaagtccgatttcgcctgcgccaacgccttcaacaacagcattatccccgaggacacattcttcccaagccccgagagcagctgcgacgtgaagctggtggaaaagagcttcgagacagacaccaacctgaacttccagaacctgagcgtgatcggcttcagaatcctgctgctgaaagtggccggctttaacctgctgatgaccctgcggctgtggtccagctctagtcgcgccaagagaagcggatctggcgtgaagcagaccctgaatttcgacctgctgaagctggctggcgacgtggaatccaacccaggccccactagcatggccttaccagtgaccgccttgctcctgccgctggccttgctgctccacgccgccaggccggacatccagatgacacagagccctagcagcctgtctgccagcgtgggagacagagtgaccatcacatgcaaggccagcgaccacatcaacaactggctggcctggtatcagcagaagcctggacaggcccctaagctgctgatctacggcgctaccacactggaaacaggcgtgcccagcagattttctggcagcggctctggcaccgactacaccctgacaatatccagcctccagcctgaggacttcgccacctactactgtcagcagagctggaacaccccttggacattcggccagggcaccaagctggaaatcaagagaggcggaggcggaagtggaggcggaggatctggcggcggaggctctcaagttcagcttcaacagcctggcgctgagctggtcaaacctggcgcttctgtgaagatgagctgcaaagccagcggctacgccttcagcagctactggatcaactggatgaagcagaaacccggccagggactcgaatggatcggccaaatctatcccggcgacggcgacaccaactacaacggcaagttcaagggcagagccacactgaccgccgatacctctagcagcacagcctacatgcagctgagcagcctgaccagcgaagatagcgccgtgtacttctgtgcccggtccatcacaacagtcgtgggctgcgctatggactattggggccagggaacaagcgtgaccgtgtctagtacgcgtgggaaaccaattcccaaccctcttctgggactggattcaaccggcagcggcgaggacctgaagaacgtgttcccacctgaggtggccgtgttcgagcctagcgaggccgagatcagccacacccagaaagccaccctcgtgtgcctggctaccggcttctaccccgaccatgtggaactgtcttggtgggtcaacggcaaagaggtgcacagcggcgtgtgtaccgacccccagccactgaaagaacagcccgccctgaacgacagccggtactgcctgagcagcagactgagagtgtccgccaccttctggcagaacccccggaaccacttcagatgccaggtgcagttctacggcctgagcgagaacgacgagtggacccaggacagagccaagcccgtgacccagatcgtgtctgccgaagcctggggcagagccgattgcggctttaccagcgagagctaccagcagggcgtgctgagcgccaccatcctgtacgagatcctgctgggcaaggccaccctgtacgccgtgctggtgtctgccctggtgctgatggctatggtcaagcggaaggacagccggggaagggccaagcgatctggatctggagcaacaaacttctcactactcaaacaagcaggtgacgtggaggagaatcccgggccttctagaggccatatgaccgagtacaagcccacggtgcgcctcgccacccgcgacgacgtccccagggccgtacgcaccctcgccgccgcgttcgccgactaccccgccacgcgccacaccgtcgatccggaccgccacatcgagcgggtcaccgagctgcaagaactcttcctcacgcgcgtcgggctcgacatcggcaaggtgtgggtcgcggacgacggcgccgcggtggcggtctggaccacgccggagagcgtcgaagcgggggcggtgttcgccgagatcggcccgcgcatggccgagttgagcggttcccggctggccgcgcagcaacagatggaaggcctcctggcgccgcaccggcccaaggagcccgcgtggttcctggccaccgtcggcgtctcgcccgaccaccagggcaagggtctgggcagcgccgtcgtgctccccggagtggaggcggccgagcgcgccggggtgcccgccttcctggagacctccgcgccccgcaacctccccttctacgagcggctcggcttcaccgtcaccgccgacgtcgaggtgcccgaaggaccgcgcacctggtgcatgacccgcaagcccggtgcctga

SEQ ID NO: 3258 - DNA, 2568 bp, synthetic construct
  source 1..2568: mol_type = other DNA
atggccttaccagtgaccgccttgctcctgccgctggccttgctgctccacgccgccaggccggacatccagatgacacagagccctagcagcctgtctgccagcgtgggagacagagtgaccatcacatgcaaggccagcgaccacatcaacaactggctggcctggtatcagcagaagcctggacaggcccctaagctgctgatctacggcgctaccacactggaaacaggcgtgcccagcagattttctggcagcggctctggcaccgactacaccctgacaatatccagcctccagcctgaggacttcgccacctactactgtcagcagagctggaacaccccttggacattcggccagggcaccaagctggaaatcaagagactcgaggacctgaagaacgtgttcccacctgaggtggccgtgttcgagcctagcgaggccgagatcagccacacccagaaagccaccctcgtgtgcctggctaccggcttctaccccgaccatgtggaactgtcttggtgggtcaacggcaaagaggtgcacagcggcgtgtctaccgacccccagccactgaaagaacagcccgccctgaacgacagccggtactgcctgagcagcagactgagagtgtccgccaccttctggcagaacccccggaaccacttcagatgccaggtgcagttctacggcctgagcgagaacgacgagtggacccaggacagagccaagcccgtgacccagatcgtgtctgccgaagcctggggcagagccgattgcggctttaccagcgagagctaccagcagggcgtgctgagcgccaccatcctgtacgagatcctgctgggcaaggccaccctgtacgccgtgctggtgtctgccctggtgctgatggctatggtcaagcggaaggacagccggggaagggccaagcgatctggatctggagcaacaaacttctcactactcaaacaagcaggtgacgtggaggagaatcccgggcctactagtatggactggatttggcgcatccttttccttgtcggcgctgctaccggcgcgcattccttcgaacaagttcagcttcaacagcctggcgctgagctggtcaaacctggcgcttctgtgaagatgagctgcaaagccagcggctacgccttcagcagctactggatcaactggatgaagcagaaacccggccagggactcgaatggatcggccaaatctatcccggcgacggcgacaccaactacaacggcaagttcaagggcagagccacactgaccgccgatacctctagcagcacagcctacatgcagctgagcagcctgaccagcgaagatagcgccgtgtacttctgtgcccggtccatcacaacagtcgtgggctgcgctatggactattggggccagggaacaagcgtgaccgtgtctagtacgcgtatccagaaccctgatcctgccgtgtaccagctgcgggatagcaagagcagcgacaagagcgtgtgtctgttcaccgacttcgacagccagaccaacgtgtcccagagcaaggactccgacgtgtacatcaccgataagaccgtgctggacatgcggagcatggacttcaagagcaactccgccgtggcctggtccaacaagtccgatttcgcctgcgccaacgccttcaacaacagcattatccccgaggacacattcttcccaagccccgagagcagctgcgacgtgaagctggtggaaaagagcttcgagacagacaccaacctgaacttccagaacctgagcgtgatcggcttcagaatcctgctgctgaaagtggccggctttaacctgctgatgaccctgcggctgtggtccagccgcgccaagagaagcggatctggcgtgaagcagaccctgaatttcgacctgctgaagctggctggcgacgtggaatccaacccaggcccttctagaggccatatgaccgagtacaagcccacggtgcgcctcgccacccgcgacgacgtccccagggccgtacgcaccctcgccgccgcgttcgccgactaccccgccacgcgccacaccgtcgatccggaccgccacatcgagcgggtcaccgagctgcaagaactcttcctcacgcgcgtcgggctcgacatcggcaaggtgtgggtcgcggacgacggcgccgcggtggcggtctggaccacgccggagagcgtcgaagcgggggcggtgttcgccgagatcggcccgcgcatggccgagttgagcggttcccggctggccgcgcagcaacagatggaaggcctcctggcgccgcaccggcccaaggagcccgcgtggttcctggccaccgtcggcgtctcgcccgaccaccagggcaagggtctgggcagcgccgtcgtgctccccggagtggaggcggccgagcgcgccggggtgcccgccttcctggagacctccgcgccccgcaacctccccttctacgagcggctcggcttcaccgtcaccgccgacgtcgaggtgcccgaaggaccgcgcacctggtgcatgacccgcaagcccggtgcctga

SEQ ID NO: 3259 - DNA, 2814 bp, synthetic construct
  source 1..2814: mol_type = other DNA
atggccttaccagtgaccgccttgctcctgccgctggccttgctgctccacgccgccaggccggacatccagatgacacagagccctagcagcctgtctgccagcgtgggagacagagtgaccatcacatgcaaggccagcgaccacatcaacaactggctggcctggtatcagcagaagcctggacaggcccctaagctgctgatctacggcgctaccacactggaaacaggcgtgcccagcagattttctggcagcggctctggcaccgactacaccctgacaatatccagcctccagcctgaggacttcgccacctactactgtcagcagagctggaacaccccttggacattcggccagggcaccaagctggaaatcaagagactcgaggacctgaagaacgtgttcccacctgaggtggccgtgttcgagcctagcgaggccgagatcagccacacccagaaagccaccctcgtgtgcctggctaccggcttctaccccgaccatgtggaactgtcttggtgggtcaacggcaaagaggtgcacagcggcgtgtctaccgacccccagccactgaaagaacagcccgccctgaacgacagccggtactgcctgagcagcagactgagagtgtccgccaccttctggcagaacccccggaaccacttcagatgccaggtgcagttctacggcctgagcgagaacgacgagtggacccaggacagagccaagcccgtgacccagatcgtgtctgccgaagcctggggcagagccgattgcggctttaccagcgagagctaccagcagggcgtgctgagcgccaccatcctgtacgagatcctgctgggcaaggccaccctgtacgccgtgctggtgtctgccctggtgctgatggctatggtcaagcggaaggacagccggggaagggccaagcgatctggatctggagcaacaaacttctcactactcaaacaagcaggtgacgtggaggagaatcccgggcctactagtatggactggatttggcgcatccttttccttgtcggcgctgctaccggcgcgcattccttcgaacaagttcagcttcaacagcctggcgctgagctggtcaaacctggcgcttctgtgaagatgagctgcaaagccagcggctacgccttcagcagctactggatcaactggatgaagcagaaacccggccagggactcgaatggatcggccaaatctatcccggcgacggcgacaccaactacaacggcaagttcaagggcagagccacactgaccgccgatacctctagcagcacagcctacatgcagctgagcagcctgaccagcgaagatagcgccgtgtacttctgtgcccggtccatcacaacagtcgtgggctgcgctatggactattggggccagggaacaagcgtgaccgtgtctagtacgcgtgagcagaaactgatctcggaagaggatgggagcggcaccccattcccttctctggcccctcccatcatgctgctggtggacggcaagcagcagatggtggtcgtgtgcctggtgctggatgtggccccacctggactggacagccccatctggtttagcgccggcaatggctctgccctggacgcctttacctacggcccaagccctgccaccgatggcacctggacaaatctggcccacctgagcctgcccagcgaggaactggcttcttgggagcctctcgtgtgccacacaggacctggcgctgagggacacagcagatccacccagcctatgcacctgtctggcgaggccagcaccgccagaacctgtcctcaggaacctctgagaggcacccctggcggagcactgtggctgggagtgctgagactgctgctgttcaagctgctgctgtttgacctgctgctgacctgctcctgtctgtgcgatcctgccggccctctgccttctcctgccaccaccacaagactgagagccctgggcagccacagactgcaccctgccacagagacaggcggcagagaggccacaagcagccctagaccccagcccagagacagaagatggggcgataccccccctggcagaaagcctggatctccagtccgcgccaagagaagcggatctggcgtgaagcagaccctgaatttcgacctgctgaagctggctggcgacgtggaatccaacccaggcccttctagaggccatatgaccgagtacaagcccacggtgcgcctcgccacccgcgacgacgtccccagggccgtacgcaccctcgccgccgcgttcgccgactaccccgccacgcgccacaccgtcgatccggaccgccacatcgagcgggtcaccgagctgcaagaactcttcctcacgcgcgtcgggctcgacatcggcaaggtgtgggtcgcggacgacggcgccgcggtggcggtctggaccacgccggagagcgtcgaagcgggggcggtgttcgccgagatcggcccgcgcatggccgagttgagcggttcccggctggccgcgcagcaacagatggaaggcctcctggcgccgcaccggcccaaggagcccgcgtggttcctggccaccgtcggcgtctcgcccgaccaccagggcaagggtctgggcagcgccgtcgtgctccccggagtggaggcggccgagcgcgccggggtgcccgccttcctggagacctccgcgccccgcaacctccccttctacgagcggctcggcttcaccgtcaccgccgacgtcgaggtgcccgaaggaccgcgcacctggtgcatgacccgcaagcccggtgcctga

SEQ ID NO: 3260 - DNA, 2868 bp, synthetic construct
  source 1..2868: mol_type = other DNA
atggccttaccagtgaccgccttgctcctgccgctggccttgctgctccacgccgccaggccgctcgaggacctgaagaacgtgttcccacctgaggtggccgtgttcgagcctagcgaggccgagatcagccacacccagaaagccaccctcgtgtgcctggctaccggcttctaccccgaccatgtggaactgtcttggtgggtcaacggcaaagaggtgcacagcggcgtgtctaccgacccccagccactgaaagaacagcccgccctgaacgacagccggtactgcctgagcagcagactgagagtgtccgccaccttctggcagaacccccggaaccacttcagatgccaggtgcagttctacggcctgagcgagaacgacgagtggacccaggacagagccaagcccgtgacccagatcgtgtctgccgaagcctggggcagagccgattgcggctttaccagcgagagctaccagcagggcgtgctgagcgccaccatcctgtacgagatcctgctgggcaaggccaccctgtacgccgtgctggtgtctgccctggtgctgatggctatggtcaagcggaaggacagccggggaagggccaagcgatctggatctggagcaacaaacttctcactactcaaacaagcaggtgacgtggaggagaatcccgggcctactagcatggccttaccagtgaccgccttgctcctgccgctggccttgctgctccacgccgccaggccggacatccagatgacacagagccctagcagcctgtctgccagcgtgggagacagagtgaccatcacatgcaaggccagcgaccacatcaacaactggctggcctggtatcagcagaagcctggacaggcccctaagctgctgatctacggcgctaccacactggaaacaggcgtgcccagcagattttctggcagcggctctggcaccgactacaccctgacaatatccagcctccagcctgaggacttcgccacctactactgtcagcagagctggaacaccccttggacattcggccagggcaccaagctggaaatcaagagaggcggaggcggaagtggaggcggaggatctggcggcggaggctctcaagttcagcttcaacagcctggcgctgagctggtcaaacctggcgcttctgtgaagatgagctgcaaagccagcggctacgccttcagcagctactggatcaactggatgaagcagaaacccggccagggactcgaatggatcggccaaatctatcccggcgacggcgacaccaactacaacggcaagttcaagggcagagccacactgaccgccgatacctctagcagcacagcctacatgcagctgagcagcctgaccagcgaagatagcgccgtgtacttctgtgcccggtccatcacaacagtcgtgggctgcgctatggactattggggccagggaacaagcgtgaccgtgtctagtacgcgtgagcagaaactgatctcggaagaggatctggggagcggcaccccattcccttctctggcccctcccatcatgctgctggtggacggcaagcagcagatggtggtcgtgtgcctggtgctggatgtggccccacctggactggacagccccatctggtttagcgccggcaatggctctgccctggacgcctttacctacggcccaagccctgccaccgatggcacctggacaaatctggcccacctgagcctgcccagcgaggaactggcttcttgggagcctctcgtgtgccacacaggacctggcgctgagggacacagcagatccacccagcctatgcacctgtctggcgaggccagcaccgccagaacctgtcctcaggaacctctgagaggcacccctggcggagcactgtggctgggagtgctgagactgctgctgttcaagctgctgctgtttgacctgctgctgacctgctcctgtctgtgcgatcctgccggccctctgccttctcctgccaccaccacaagactgagagccctgggcagccacagactgcaccctgccacagagacaggcggcagagaggccacaagcagccctagaccccagcccagagacagaagatggggcgataccccccctggcagaaagcctggatctccagtccgcgccaagagaagcggatctggcgtgaagcagaccctgaatttcgacctgctgaagctggctggcgacgtggaatccaacccaggcccttctagatctagaggccatatgaccgagtacaagcccacggtgcgcctcgccacccgcgacgacgtccccagggccgtacgcaccctcgccgccgcgttcgccgactaccccgccacgcgccacaccgtcgatccggaccgccacatcgagcgggtcaccgagctgcaagaactcttcctcacgcgcgtcgggctcgacatcggcaaggtgtgggtcgcggacgacggcgccgcggtggcggtctggaccacgccggagagcgtcgaagcgggggcggtgttcgccgagatcggcccgcgcatggccgagttgagcggttcccggctggccgcgcagcaacagatggaaggcctcctggcgccgcaccggcccaaggagcccgcgtggttcctggccaccgtcggcgtctcgcccgaccaccagggcaagggtctgggcagcgccgtcgtgctccccggagtggaggcggccgagcgcgccggggtgcccgccttcctggagacctccgcgccccgcaacctccccttctacgagcggctcggcttcaccgtcaccgccgacgtcgaggtgcccgaaggaccgcgcacctggtgcatgacccgcaagcccggtgcctga

SEQ ID NO: 3261 - DNA, 2679 bp, synthetic construct
  source 1..2679: mol_type = other DNA
atggccttaccagtgaccgccttgctcctgccgctggccttgctgctccacgccgccaggccggacatccagatgacacagagccctagcagcctgtctgccagcgtgggagacagagtgaccatcacatgcaaggccagcgaccacatcaacaactggctggcctggtatcagcagaagcctggacaggcccctaagctgctgatctacggcgctaccacactggaaacaggcgtgcccagcagattttctggcagcggctctggcaccgactacaccctgacaatatccagcctccagcctgaggacttcgccacctactactgtcagcagagctggaacaccccttggacattcggccagggcaccaagctggaaatcaagagactcgaggggaaaccaattcccaaccctcttctgggactggattcaaccggcagcggcgacaagcagctggacgccgacgtgtcccccaagcctaccatcttcctgccctctatcgccgagacaaagctccagaaggccggcacctacctgtgcctgctggaaaagttcttcccagatgtgattaagatccactggcaggaaaagaagtccaacaccatcctgggcagccaggaaggcaacaccatgaagaccaacgacacctacatgaagttcagctggctgaccgtgcccgagaagtccctggacaaagaacacagatgcatcgtgcggcacgaaaacaacaagaacggcgtggaccaggaaatcatcttcccacccatcaagaccgatgtgattacaatggaccccaaggacaactgctccaaggacgccaacgataccctgctgctccagctgaccaacaccagcgcctactacatgtacttgttgctgctgctgaagtccgtggtgtacttcgccatcatcacatgctgcctgctgcggagaaccgccttctgctgcaacggcgagaagtctagggccaagcgatctggatctggagcaacaaacttctcactactcaaacaagcaggtgacgtggaggagaatcccgggcctactagtatggactggatttggcgcatccttttccttgtcggcgctgctaccggcgcgcattccttcgaacaagttcagcttcaacagcctggcgctgagctggtcaaacctggcgcttctgtgaagatgagctgcaaagccagcggctacgccttcagcagctactggatcaactggatgaagcagaaacccggccagggactcgaatggatcggccaaatctatcccggcgacggcgacaccaactacaacggcaagttcaagggcagagccacactgaccgccgatacctctagcagcacagcctacatgcagctgagcagcctgaccagcgaagatagcgccgtgtacttctgtgcccggtccatcacaacagtcgtgggctgcgctatggactattggggccagggaacaagcgtgaccgtgtctagtacgcgtgagcagaaactgatctcggaagaggatgggagcggcagccagcctcacaccaagcccagcgtgttcgtgatgaagaacggcaccaacgtggcctgcctcgtgaaagagttctaccccaaggacatcaggatcaacctggtgtccagcaagaagatcaccgagttcgaccccgccatcgtgatctcccccagcggcaagtacaacgccgtgaagctggggaagtacgaggacagcaacagcgtgacctgctccgtgcagcacgacaacaagaccgtgcacagcaccgactttgaagtgaaaaccgactccaccgaccacgtgaagcccaaagagacagagaacaccaagcagcccagcaagagctgccacaagcccaaggccatcgtgcacaccgagaaagtgaacatgatgagcctgaccgtgctgggcctgcggatgctgttcgccaaaaccgtggccgtgaacttcctgctgaccgccaagctgttcttcctccgcgccaagagaagcggatctggcgtgaagcagaccctgaatttcgacctgctgaagctggctggcgacgtggaatccaacccaggcccttctagaggccatatgaccgagtacaagcccacggtgcgcctcgccacccgcgacgacgtccccagggccgtacgcaccctcgccgccgcgttcgccgactaccccgccacgcgccacaccgtcgatccggaccgccacatcgagcgggtcaccgagctgcaagaactcttcctcacgcgcgtcgggctcgacatcggcaaggtgtgggtcgcggacgacggcgccgcggtggcggtctggaccacgccggagagcgtcgaagcgggggcggtgttcgccgagatcggcccgcgcatggccgagttgagcggttcccggctggccgcgcagcaacagatggaaggcctcctggcgccgcaccggcccaaggagcccgcgtggttcctggccaccgtcggcgtctcgcccgaccaccagggcaagggtctgggcagcgccgtcgtgctccccggagtggaggcggccgagcgcgccggggtgcccgccttcctggagacctccgcgccccgcaacctccccttctacgagcggctcggcttcaccgtcaccgccgacgtcgaggtgcccgaaggaccgcgcacctggtgcatgacccgcaagcccggtgcctga

SEQ ID NO: 3262 - DNA, 1890 bp, synthetic construct
  source 1..1890: mol_type = other DNA
atggccttaccagtgaccgccttgctcctgccgctggccttgctgctccacgccgccaggccggacatccagatgacacagagccctagcagcctgtctgccagcgtgggagacagagtgaccatcacatgcaaggccagcgaccacatcaacaactggctggcctggtatcagcagaagcctggacaggcccctaagctgctgatctacggcgctaccacactggaaacaggcgtgcccagcagattttctggcagcggctctggcaccgactacaccctgacaatatccagcctccagcctgaggacttcgccacctactactgtcagcagagctggaacaccccttggacattcggccagggcaccaagctggaaatcaagagactcgagagccagcctcacaccaagcccagcgtgttcgtgatgaagaacggcaccaacgtggcctgcctcgtgaaagagttctaccccaaggacatcaggatcaacctggtgtccagcaagaagatcaccgagttcgaccccgccatcgtgatctcccccagcggcaagtacaacgccgtgaagctggggaagtacgaggacagcaacagcgtgacctgctccgtgcagcacgacaacaagaccgtgcacagcaccgactttgaagtgaaaaccgactccaccgaccacgtgaagcccaaagagacagagaacaccaagcagcccagcaagagctgccacaagcccaaggccatcgtgcacaccgagaaagtgaacatgatgagcctgaccgtgctgggcctgcggatgctgttcgccaaaaccgtggccgtgaacttcctgctgaccgccaagctgttcttcctcagggccaagcgatctggatctggagcaacaaacttctcactactcaaacaagcaggtgacgtggaggagaatcccgggcctactagtatggactggatttggcgcatccttttccttgtcggcgctgctaccggcgcgcattccttcgaacaagttcagcttcaacagcctggcgctgagctggtcaaacctggcgcttctgtgaagatgagctgcaaagccagcggctacgccttcagcagctactggatcaactggatgaagcagaaacccggccagggactcgaatggatcggccaaatctatcccggcgacggcgacaccaactacaacggcaagttcaagggcagagccacactgaccgccgatacctctagcagcacagcctacatgcagctgagcagcctgaccagcgaagatagcgccgtgtacttctgtgcccggtccatcacaacagtcgtgggctgcgctatggactattggggccagggaacaagcgtgaccgtgtctagtacgcgtgacaagcagctggacgccgacgtgtcccccaagcctaccatcttcctgccctctatcgccgagacaaagctccagaaggccggcacctacctgtgcctgctggaaaagttcttcccagatgtgattaagatccactggcaggaaaagaagtccaacaccatcctgggcagccaggaaggcaacaccatgaagaccaacgacacctacatgaagttcagctggctgaccgtgcccgagaagtccctggacaaagaacacagatgcatcgtgcggcacgaaaacaacaagaacggcgtggaccaggaaatcatcttcccacccatcaagaccgatgtgattacaatggaccccaaggacaactgctccaaggacgccaacgataccctgctgctccagctgaccaacaccagcgcctactacatgtacttgttgctgctgctgaagtccgtggtgtacttcgccatcatcacatgctgcctgctgcggagaaccgccttctgctgcaacggcgagaagtct

SEQ ID NO: 3263 - DNA, 2724 bp, synthetic construct
  source 1..2724: mol_type = other DNA
atggccttaccagtgaccgccttgctcctgccgctggccttgctgctccacgccgccaggccgctcgaggggaaaccaattcccaaccctcttctgggactggattcaaccggcagcggcgacaagcagctggacgccgacgtgtcccccaagcctaccatcttcctgccctctatcgccgagacaaagctccagaaggccggcacctacctgtgcctgctggaaaagttcttcccagatgtgattaagatccactggcaggaaaagaagtccaacaccatcctgggcagccaggaaggcaacaccatgaagaccaacgacacctacatgaagttcagctggctgaccgtgcccgagaagtccctggacaaagaacacagatgcatcgtgcggcacgaaaacaacaagaacggcgtggaccaggaaatcatcttcccacccatcaagaccgatgtgattacaatggaccccaaggacaactgctccaaggacgccaacgataccctgctgctccagctgaccaacaccagcgcctactacatgtacttgttgctgctgctgaagtccgtggtgtacttcgccatcatcacatgctgcctgctgcggagaaccgccttctgctgcaacggcgagaagtctagggccaagcgatctggatctggagcaacaaacttctcactactcaaacaagcaggtgacgtggaggagaatcccgggcctactagcatggccttaccagtgaccgccttgctcctgccgctggccttgctgctccacgccgccaggccggacatccagatgacacagagccctagcagcctgtctgccagcgtgggagacagagtgaccatcacatgcaaggccagcgaccacatcaacaactggctggcctggtatcagcagaagcctggacaggcccctaagctgctgatctacggcgctaccacactggaaacaggcgtgcccagcagattttctggcagcggctctggcaccgactacaccctgacaatatccagcctccagcctgaggacttcgccacctactactgtcagcagagctggaacaccccttggacattcggccagggcaccaagctggaaatcaagagaggcggaggcggaagtggaggcggaggatctggcggcggaggctctcaagttcagcttcaacagcctggcgctgagctggtcaaacctggcgcttctgtgaagatgagctgcaaagccagcggctacgccttcagcagctactggatcaactggatgaagcagaaacccggccagggactcgaatggatcggccaaatctatcccggcgacggcgacaccaactacaacggcaagttcaagggcagagccacactgaccgccgatacctctagcagcacagcctacatgcagctgagcagcctgaccagcgaagatagcgccgtgtacttctgtgcccggtccatcacaacagtcgtgggctgcgctatggactattggggccagggaacaagcgtgaccgtgtctagtacgcgtgagcagaaactgatctcggaagaggatgggagcggcagccagcctcacaccaagcccagcgtgttcgtgatgaagaacggcaccaacgtggcctgcctcgtgaaagagttctaccccaaggacatcaggatcaacctggtgtccagcaagaagatcaccgagttcgaccccgccatcgtgatctcccccagcggcaagtacaacgccgtgaagctggggaagtacgaggacagcaacagcgtgacctgctccgtgcagcacgacaacaagaccgtgcacagcaccgactttgaagtgaaaaccgactccaccgaccacgtgaagcccaaagagacagagaacaccaagcagcccagcaagagctgccacaagcccaaggccatcgtgcacaccgagaaagtgaacatgatgagcctgaccgtgctgggcctgcggatgctgttcgccaaaaccgtggccgtgaacttcctgctgaccgccaagctgttcttcctccgcgccaagagaagcggatctggcgtgaagcagaccctgaatttcgacctgctgaagctggctggcgacgtggaatccaacccaggcccttctagaggccatatgaccgagtacaagcccacggtgcgcctcgccacccgcgacgacgtccccagggccgtacgcaccctcgccgccgcgttcgccgactaccccgccacgcgccacaccgtcgatccggaccgccacatcgagcgggtcaccgagctgcaagaactcttcctcacgcgcgtcgggctcgacatcggcaaggtgtgggtcgcggacgacggcgccgcggtggcggtctggaccacgccggagagcgtcgaagcgggggcggtgttcgccgagatcggcccgcgcatggccgagttgagcggttcccggctggccgcgcagcaacagatggaaggcctcctggcgccgcaccggcccaaggagcccgcgtggttcctggccaccgtcggcgtctcgcccgaccaccagggcaagggtctgggcagcgccgtcgtgctccccggagtggaggcggccgagcgcgccggggtgcccgccttcctggagacctccgcgccccgcaacctccccttctacgagcggctcggcttcaccgtcaccgccgacgtcgaggtgcccgaaggaccgcgcacctggtgcatgacccgcaagcccggtgcctga

SEQ ID NO: 3264 - DNA, 3099 bp, synthetic construct
  source 1..3099: mol_type = other DNA
atggccttaccagtgaccgccttgctcctgccgctggccttgctgctccacgccgccaggccggacatccagatgacacagagccctagcagcctgtctgccagcgtgggagacagagtgaccatcacatgcaaggccagcgaccacatcaacaactggctggcctggtatcagcagaagcctggacaggcccctaagctgctgatctacggcgctaccacactggaaacaggcgtgcccagcagattttctggcagcggctctggcaccgactacaccctgacaatatccagcctccagcctgaggacttcgccacctactactgtcagcagagctggaacaccccttggacattcggccagggcaccaagctggaaatcaagagaggacagcctaaggccaatcctaccgtgacactgttccctccaagcagcgaagaactccaggccaacaaggccacacttgtgtgcctgatctccgacttctaccctggggctgtgacagtggcttggaaggccgatggatctcctgtgaaagccggcgtggaaaccaccaagccatccaagcagagcaacaacaaatacgccgccagctcctacctgagcctgacacctgagcagtggaagtcccacagatcctacagctgccaagtgacccacgaaggcagcaccgtggaaaagacagtggcccctacagagtgcagcggatcccagagcttcggcctgctggaccccaagctgtgctacctgctggatggcatcctgttcatctacggcgtgatcctgaccgccctgttcctgagagtgaagttcagcagaagcgccgacgcccctgcctaccagcagggacagaaccaactgtacaacgagctgaacctgggcagacgggaagagtacgacgtgctggacaagcggagaggcagggaccctgagatgggcggaaagccccagcggagaaagaacccccaggaaggactgtataacgaactccagaaagacaagatggccgaagcctacagcgagatcggcatgaagggcgagcggagaagaggcaagggccacgatggcctgtaccagggcctgagcaccgccaccaaggacacctatgacgccctgcacatgcaggccctgcctccaagaagggccaagcgatctggatctggagcaacaaacttctcactactcaaacaagcaggtgacgtggaggagaatcccgggcctactagtatggactggatttggcgcatccttttccttgtcggcgctgctaccggcgcgcattccttcgaacaagttcagcttcaacagcctggcgctgagctggtcaaacctggcgcttctgtgaagatgagctgcaaagccagcggctacgccttcagcagctactggatcaactggatgaagcagaaacccggccagggactcgaatggatcggccaaatctatcccggcgacggcgacaccaactacaacggcaagttcaagggcagagccacactgaccgccgatacctctagcagcacagcctacatgcagctgagcagcctgaccagcgaagatagcgccgtgtacttctgtgcccggtccatcacaacagtcgtgggctgcgctatggactattggggccagggaacaagcgtgaccgtgtctagtgcctctacaaagggaccctccgtgtttcctctggctcccagcagcaagtctacaagcggaggaacagccgctctgggctgcctggtcaaggattactttcccgagcctgtgaccgtgtcctggaatagcggagcactgacaagcggcgtgcacacctttccagccgtgctgcaaagcagcggcctgtactctctgagcagcgtggtcacagtgcctagctctagcctgggcacccagacctacatctgcaatgtgaaccacaagcctagcaacaccaaggtggacaagagagtggaacccaagagctgtggtacccagagttttgggttgttggaccctaaattgtgctatctgttggacggaatcctgttcatttacggagtgatcctgaccgcattgttcctgcgggttaagttttccagatccgcagacgcacccgcttaccaacaagggcagaaccaactctacaatgaacttaatttggggcggagggaagagtacgacgttctggacaaaaggaggggacgagatcccgagatgggcggaaagcctcagcgaaggaagaatccgcaagaggggctttataacgaactccagaaagataaaatggcagaagcctatagtgagattgggatgaagggagaaaggaggaggggtaaaggtcacgatgggttgtaccaaggattgagcacagccactaaagatacctatgatgcgctccacatgcaggccctgccgccaagacgcgccaagagaagcggatctggcgtgaagcagaccctgaatttcgacctgctgaagctggctggcgacgtggaatccaacccaggcccttctagaggccatatgaccgagtacaagcccacggtgcgcctcgccacccgcgacgacgtccccagggccgtacgcaccctcgccgccgcgttcgccgactaccccgccacgcgccacaccgtcgatccggaccgccacatcgagcgggtcaccgagctgcaagaactcttcctcacgcgcgtcgggctcgacatcggcaaggtgtgggtcgcggacgacggcgccgcggtggcggtctggaccacgccggagagcgtcgaagcgggggcggtgttcgccgagatcggcccgcgcatggccgagttgagcggttcccggctggccgcgcagcaacagatggaaggcctcctggcgccgcaccggcccaaggagcccgcgtggttcctggccaccgtcggcgtctcgcccgaccaccagggcaagggtctgggcagcgccgtcgtgctccccggagtggaggcggccgagcgcgccggggtgcccgccttcctggagacctccgcgccccgcaacctccccttctacgagcggctcggcttcaccgtcaccgccgacgtcgaggtgcccgaaggaccgcgcacctggtgcatgacccgcaagcccggtgcctga

SEQ ID NO: 3265 - DNA, 2454 bp, synthetic construct
  source 1..2454: mol_type = other DNA
atggccttaccagtgaccgccttgctcctgccgctggccttgctgctccacgccgccaggccggacatccagatgacacagagccctagcagcctgtctgccagcgtgggagacagagtgaccatcacatgcaaggccagcgaccacatcaacaactggctggcctggtatcagcagaagcctggacaggcccctaagctgctgatctacggcgctaccacactggaaacaggcgtgcccagcagattttctggcagcggctctggcaccgactacaccctgacaatatccagcctccagcctgaggacttcgccacctactactgtcagcagagctggaacaccccttggacattcggccagggcaccaagctggaaatcaagagactcgaggacctgaagaacgtgttcccacctgaggtggccgtgttcgagcctagcgaggccgagatcagccacacccagaaagccaccctcgtgtgcctggctaccggcttctaccccgaccatgtggaactgtcttggtgggtcaacggcaaagaggtgcacagcggcgtgtctaccgacccccagccactgaaagaacagcccgccctgaacgacagccggtactgcctgagcagcagactgagagtgtccgccaccttctggcagaacccccggaaccacttcagatgccaggtgcagttctacggcctgagcgagaacgacgagtggacccaggacagagccaagcccgtgacccagatcgtgtctgccgaagcctggggcagagccgattgcggatcccagagcttcggcctgctggaccccaagctgtgctacctgctggatggcatcctgttcatctacggcgtgatcctgaccgccctgttcctgagagtgaagttcagcagaagcgccgacgcccctgcctaccagcagggacagaaccaactgtacaacgagctgaacctgggcagacgggaagagtacgacgtgctggacaagcggagaggcagggaccctgagatgggcggaaagccccagcggagaaagaacccccaggaaggactgtataacgaactccagaaagacaagatggccgaagcctacagcgagatcggcatgaagggcgagcggagaagaggcaagggccacgatggcctgtaccagggcctgagcaccgccaccaaggacacctatgacgccctgcacatgcaggccctgcctccaagaagggccaagcgatctggatctggagcaacaaacttctcactactcaaacaagcaggtgacgtggaggagaatcccgggcctactagtatggactggatttggcgcatccttttccttgtcggcgctgctaccggcgcgcattccttcgaacaagttcagcttcaacagcctggcgctgagctggtcaaacctggcgcttctgtgaagatgagctgcaaagccagcggctacgccttcagcagctactggatcaactggatgaagcagaaacccggccagggactcgaatggatcggccaaatctatcccggcgacggcgacaccaactacaacggcaagttcaagggcagagccacactgaccgccgatacctctagcagcacagcctacatgcagctgagcagcctgaccagcgaagatagcgccgtgtacttctgtgcccggtccatcacaacagtcgtgggctgcgctatggactattggggccagggaacaagcgtgaccgtgtctagtacgcgtatccagaaccctgatcctgccgtgtaccagctgcgggatagcaagagcagcgacaagagcgtgtgtctgttcaccgacttcgacagccagaccaacgtgtcccagagcaaggactccgacgtgtacatcaccgataagaccgtgctggacatgcggagcatggacttcaagagcaactccgccgtggcctggtccaacaagtccgatttcgcctgcgccaacgccttcaacaacagcattatccccgaggacacattcttcccaagccccgagagcagctgcggtacccagagttttgggttgttggaccctaaattgtgctatctgttggacggaatcctgttcatttacggagtgatcctgaccgcattgttcctgcgggttaagttttccagatccgcagacgcacccgcttaccaacaagggcagaaccaactctacaatgaacttaatttggggcggagggaagagtacgacgttctggacaaaaggaggggacgagatcccgagatgggcggaaagcctcagcgaaggaagaatccgcaagaggggctttataacgaactccagaaagataaaatggcagaagcctatagtgagattgggatgaagggagaaaggaggaggggtaaaggtcacgatgggttgtaccaaggattgagcacagccactaaagatacctatgatgcgctccacatgcaggccctgccgccaaga

SEQ ID NO: 3266 - DNA, 2454 bp, synthetic construct
  source 1..2454: mol_type = other DNA
atggccttaccagtgaccgccttgctcctgccgctggccttgctgctccacgccgccaggccggacatccagatgacacagagccctagcagcctgtctgccagcgtgggagacagagtgaccatcacatgcaaggccagcgaccacatcaacaactggctggcctggtatcagcagaagcctggacaggcccctaagctgctgatctacggcgctaccacactggaaacaggcgtgcccagcagattttctggcagcggctctggcaccgactacaccctgacaatatccagcctccagcctgaggacttcgccacctactactgtcagcagagctggaacaccccttggacattcggccagggcaccaagctggaaatcaagagactcgaggacctgaagaacgtgttcccacctgaggtggccgtgttcgagcctagcaaggccgagatcgcccacacccagaaagccaccctcgtgtgcctggctaccggcttctaccccgaccatgtggaactgtcttggtgggtcaacggcaaagaggtgcacagcggcgtgtgtaccgacccccagccactgaaagaacagcccgccctgaacgacagccggtactgcctgagcagcagactgagagtgtccgccaccttctggcagaacccccggaaccacttcagatgccaggtgcagttctacggcctgagcgagaacgacgagtggacccaggacagagccaagcccgtgacccagatcgtgtctgccgaagcctggggcagagccgattgcggatcccagagcttcggcctgctggaccccaagctgtgctacctgctggatggcatcctgttcatctacggcgtgatcctgaccgccctgttcctgagagtgaagttcagcagaagcgccgacgcccctgcctaccagcagggacagaaccaactgtacaacgagctgaacctgggcagacgggaagagtacgacgtgctggacaagcggagaggcagggaccctgagatgggcggaaagccccagcggagaaagaacccccaggaaggactgtataacgaactccagaaagacaagatggccgaagcctacagcgagatcggcatgaagggcgagcggagaagaggcaagggccacgatggcctgtaccagggcctgagcaccgccaccaaggacacctatgacgccctgcacatgcaggccctgcctccaagaagggccaagcgatctggatctggagcaacaaacttctcactactcaaacaagcaggtgacgtggaggagaatcccgggcctactagtatggactggatttggcgcatccttttccttgtcggcgctgctaccggcgcgcattccttcgaacaagttcagcttcaacagcctggcgctgagctggtcaaacctggcgcttctgtgaagatgagctgcaaagccagcggctacgccttcagcagctactggatcaactggatgaagcagaaacccggccagggactcgaatggatcggccaaatctatcccggcgacggcgacaccaactacaacggcaagttcaagggcagagccacactgaccgccgatacctctagcagcacagcctacatgcagctgagcagcctgaccagcgaagatagcgccgtgtacttctgtgcccggtccatcacaacagtcgtgggctgcgctatggactattggggccagggaacaagcgtgaccgtgtctagtacgcgtatccagaaccctgatcctgccgtgtaccagctgcgggatagcaagagcagcgacaagagcgtgtgtctgttcaccgacttcgacagccagaccaacgtgtcccagagcaaggactccgacgtgtacatcaccgataagtgcgtgctggacatgcggagcatggacttcaagagcaactccgccgtggcctggtccaacaagtccgatttcgcctgcgccaacgccttcaacaacagcattatccccgaggacacattcttcccaagcagcgacgtgccctgcggtacccagagttttgggttgttggaccctaaattgtgctatctgttggacggaatcctgttcatttacggagtgatcctgaccgcattgttcctgcgggttaagttttccagatccgcagacgcacccgcttaccaacaagggcagaaccaactctacaatgaacttaatttggggcggagggaagagtacgacgttctggacaaaaggaggggacgagatcccgagatgggcggaaagcctcagcgaaggaagaatccgcaagaggggctttataacgaactccagaaagataaaatggcagaagcctatagtgagattgggatgaagggagaaaggaggaggggtaaaggtcacgatgggttgtaccaaggattgagcacagccactaaagatacctatgatgcgctccacatgcaggccctgccgccaaga

SEQ ID NO: 3267 - DNA, 2667 bp, synthetic construct
  source 1..2667: mol_type = other DNA
atggccttaccagtgaccgccttgctcctgccgctggccttgctgctccacgccgccaggccggacatccagatgacacagagccctagcagcctgtctgccagcgtgggagacagagtgaccatcacatgcaaggccagcgaccacatcaacaactggctggcctggtatcagcagaagcctggacaggcccctaagctgctgatctacggcgctaccacactggaaacaggcgtgcccagcagattttctggcagcggctctggcaccgactacaccctgacaatatccagcctccagcctgaggacttcgccacctactactgtcagcagagctggaacaccccttggacattcggccagggcaccaagctggaaatcaagagactcgaggggaaaccaattcccaaccctcttctgggactggattcaaccggcagcggcgaggacctgaagaacgtgttcccacctgaggtggccgtgttcgagcctagcgaggccgagatcagccacacccagaaagccaccctcgtgtgcctggctaccggcttctaccccgaccatgtggaactgtcttggtgggtcaacggcaaagaggtgcacagcggcgtgtctaccgacccccagccactgaaagaacagcccgccctgaacgacagccggtactgcctgagcagcagactgagagtgtccgccaccttctggcagaacccccggaaccacttcagatgccaggtgcagttctacggcctgagcgagaacgacgagtggacccaggacagagccaagcccgtgacccagatcgtgtctgccgaagcctggggcagagccgattgcggatcccagagcttcggcctgctggaccccaagctgtgctacctgctggatggcatcctgttcatctacggcgtgatcctgaccgccctgttcctgagagtgaagttcagcagaagcgccgacgcccctgcctaccagcagggacagaaccaactgtacaacgagctgaacctgggcagacgggaagagtacgacgtgctggacaagcggagaggcagggaccctgagatgggcggaaagccccagcggagaaagaacccccaggaaggactgtataacgaactccagaaagacaagatggccgaagcctacagcgagatcggcatgaagggcgagcggagaagaggcaagggccacgatggcctgtaccagggcctgagcaccgccaccaaggacacctatgacgccctgcacatgcaggccctgcctccaagaagggccaagcgatctggatctggagcaacaaacttctcactactcaaacaagcaggtgacgtggaggagaatcccgggcctactagtatggactggatttggcgcatccttttccttgtcggcgctgctaccggcgcgcattccttcgaacaagttcagcttcaacagcctggcgctgagctggtcaaacctggcgcttctgtgaagatgagctgcaaagccagcggctacgccttcagcagctactggatcaactggatgaagcagaaacccggccagggactcgaatggatcggccaaatctatcccggcgacggcgacaccaactacaacggcaagttcaagggcagagccacactgaccgccgatacctctagcagcacagcctacatgcagctgagcagcctgaccagcgaagatagcgccgtgtacttctgtgcccggtccatcacaacagtcgtgggctgcgctatggactattggggccagggaacaagcgtgaccgtgtctagtacgcgtgagcagaaactgatctcggaagaggatgggagcggcatccagaaccctgatcctgccgtgtaccagctgcgggatagcaagagcagcgacaagagcgtgtgtctgttcaccgacttcgacagccagaccaacgtgtcccagagcaaggactccgacgtgtacatcaccgataagaccgtgctggacatgcggagcatggacttcaagagcaactccgccgtggcctggtccaacaagtccgatttcgcctgcgccaacgccttcaacaacagcattatccccgaggacacattcttcccaagccccgagagcagctgcggtacccagagttttgggttgttggaccctaaattgtgctatctgttggacggaatcctgttcatttacggagtgatcctgaccgcattgttcctgaggagcaagcggtcacggctgctccacagcgattacatgaatatgacaccacgaagaccgggtcctactcgcaaacactaccaaccctacgcacctccccgcgactttgcagcgtaccgatctcgggttaagttttccagatccgcagacgcacccgcttaccaacaagggcagaaccaactctacaatgaacttaatttggggcggagggaagagtacgacgttctggacaaaaggaggggacgagatcccgagatgggcggaaagcctcagcgaaggaagaatccgcaagaggggctttataacgaactccagaaagataaaatggcagaagcctatagtgagattgggatgaagggagaaaggaggaggggtaaaggtcacgatgggttgtaccaaggattgagcacagccactaaagatacctatgatgcgctccacatgcaggccctgccgccaaga

SEQ ID NO: 3268 - DNA, 2790 bp, synthetic construct
  source 1..2790: mol_type = other DNA
atggccttaccagtgaccgccttgctcctgccgctggccttgctgctccacgccgccaggccggacatccagatgacacagagccctagcagcctgtctgccagcgtgggagacagagtgaccatcacatgcaaggccagcgaccacatcaacaactggctggcctggtatcagcagaagcctggacaggcccctaagctgctgatctacggcgctaccacactggaaacaggcgtgcccagcagattttctggcagcggctctggcaccgactacaccctgacaatatccagcctccagcctgaggacttcgccacctactactgtcagcagagctggaacaccccttggacattcggccagggcaccaagctggaaatcaagagactcgaggggaaaccaattcccaaccctcttctgggactggattcaaccggcagcggcgaggacctgaagaacgtgttcccacctgaggtggccgtgttcgagcctagcgaggccgagatcagccacacccagaaagccaccctcgtgtgcctggctaccggcttctaccccgaccatgtggaactgtcttggtgggtcaacggcaaagaggtgcacagcggcgtgtctaccgacccccagccactgaaagaacagcccgccctgaacgacagccggtactgcctgagcagcagactgagagtgtccgccaccttctggcagaacccccggaaccacttcagatgccaggtgcagttctacggcctgagcgagaacgacgagtggacccaggacagagccaagcccgtgacccagatcgtgtctgccgaagcctggggcagagccgattgcggatcccagagcttcggcctgctggaccccaagctgtgctacctgctggatggcatcctgttcatctacggcgtgatcctgaccgccctgttcctgaggagtaagaggagcaggctcctgcacagtgactacatgaacatgactccacgccgccccggacccacccgcaagcattaccagccctatgccccaccacgcgacttcgcagcctatcgctccagagtgaagttcagcagaagcgccgacgcccctgcctaccagcagggacagaaccaactgtacaacgagctgaacctgggcagacgggaagagtacgacgtgctggacaagcggagaggcagggaccctgagatgggcggaaagccccagcggagaaagaacccccaggaaggactgtataacgaactccagaaagacaagatggccgaagcctacagcgagatcggcatgaagggcgagcggagaagaggcaagggccacgatggcctgtaccagggcctgagcaccgccaccaaggacacctatgacgccctgcacatgcaggccctgcctccaagaagggccaagcgatctggatctggagcaacaaacttctcactactcaaacaagcaggtgacgtggaggagaatcccgggcctactagtatggactggatttggcgcatccttttccttgtcggcgctgctaccggcgcgcattccttcgaacaagttcagcttcaacagcctggcgctgagctggtcaaacctggcgcttctgtgaagatgagctgcaaagccagcggctacgccttcagcagctactggatcaactggatgaagcagaaacccggccagggactcgaatggatcggccaaatctatcccggcgacggcgacaccaactacaacggcaagttcaagggcagagccacactgaccgccgatacctctagcagcacagcctacatgcagctgagcagcctgaccagcgaagatagcgccgtgtacttctgtgcccggtccatcacaacagtcgtgggctgcgctatggactattggggccagggaacaagcgtgaccgtgtctagtacgcgtgagcagaaactgatctcggaagaggatgggagcggcatccagaaccctgatcctgccgtgtaccagctgcgggatagcaagagcagcgacaagagcgtgtgtctgttcaccgacttcgacagccagaccaacgtgtcccagagcaaggactccgacgtgtacatcaccgataagaccgtgctggacatgcggagcatggacttcaagagcaactccgccgtggcctggtccaacaagtccgatttcgcctgcgccaacgccttcaacaacagcattatccccgaggacacattcttcccaagccccgagagcagctgcggtacccagagttttgggttgttggaccctaaattgtgctatctgttggacggaatcctgttcatttacggagtgatcctgaccgcattgttcctgaggagcaagcggtcacggctgctccacagcgattacatgaatatgacaccacgaagaccgggtcctactcgcaaacactaccaaccctacgcacctccccgcgactttgcagcgtaccgatctcgggttaagttttccagatccgcagacgcacccgcttaccaacaagggcagaaccaactctacaatgaacttaatttggggcggagggaagagtacgacgttctggacaaaaggaggggacgagatcccgagatgggcggaaagcctcagcgaaggaagaatccgcaagaggggctttataacgaactccagaaagataaaatggcagaagcctatagtgagattgggatgaagggagaaaggaggaggggtaaaggtcacgatgggttgtaccaaggattgagcacagccactaaagatacctatgatgcgctccacatgcaggccctgccgccaaga

SEQ ID NO: 3269 - DNA, 2673 bp, synthetic construct
  source 1..2673: mol_type = other DNA
atggccttaccagtgaccgccttgctcctgccgctggccttgctgctccacgccgccaggccggacatccagatgacacagagccctagcagcctgtctgccagcgtgggagacagagtgaccatcacatgcaaggccagcgaccacatcaacaactggctggcctggtatcagcagaagcctggacaggcccctaagctgctgatctacggcgctaccacactggaaacaggcgtgcccagcagattttctggcagcggctctggcaccgactacaccctgacaatatccagcctccagcctgaggacttcgccacctactactgtcagcagagctggaacaccccttggacattcggccagggcaccaagctggaaatcaagagactcgaggggaaaccaattcccaaccctcttctgggactggattcaaccggcagcggcgaggacctgaagaacgtgttcccacctgaggtggccgtgttcgagcctagcgaggccgagatcagccacacccagaaagccaccctcgtgtgcctggctaccggcttctaccccgaccatgtggaactgtcttggtgggtcaacggcaaagaggtgcacagcggcgtgtctaccgacccccagccactgaaagaacagcccgccctgaacgacagccggtactgcctgagcagcagactgagagtgtccgccaccttctggcagaacccccggaaccacttcagatgccaggtgcagttctacggcctgagcgagaacgacgagtggacccaggacagagccaagcccgtgacccagatcgtgtctgccgaagcctggggcagagccgattgcggatcccagagcttcggcctgctggaccccaagctgtgctacctgctggatggcatcctgttcatctacggcgtgatcctgaccgccctgttcctgagagtgaagttcagcagaagcgccgacgcccctgcctaccagcagggacagaaccaactgtacaacgagctgaacctgggcagacgggaagagtacgacgtgctggacaagcggagaggcagggaccctgagatgggcggaaagccccagcggagaaagaacccccaggaaggactgtataacgaactccagaaagacaagatggccgaagcctacagcgagatcggcatgaagggcgagcggagaagaggcaagggccacgatggcctgtaccagggcctgagcaccgccaccaaggacacctatgacgccctgcacatgcaggccctgcctccaagaagggccaagcgatctggatctggagcaacaaacttctcactactcaaacaagcaggtgacgtggaggagaatcccgggcctactagtatggactggatttggcgcatccttttccttgtcggcgctgctaccggcgcgcattccttcgaacaagttcagcttcaacagcctggcgctgagctggtcaaacctggcgcttctgtgaagatgagctgcaaagccagcggctacgccttcagcagctactggatcaactggatgaagcagaaacccggccagggactcgaatggatcggccaaatctatcccggcgacggcgacaccaactacaacggcaagttcaagggcagagccacactgaccgccgatacctctagcagcacagcctacatgcagctgagcagcctgaccagcgaagatagcgccgtgtacttctgtgcccggtccatcacaacagtcgtgggctgcgctatggactattggggccagggaacaagcgtgaccgtgtctagtacgcgtgagcagaaactgatctcggaagaggatctggggagcggcatccagaaccctgatcctgccgtgtaccagctgcgggatagcaagagcagcgacaagagcgtgtgtctgttcaccgacttcgacagccagaccaacgtgtcccagagcaaggactccgacgtgtacatcaccgataagaccgtgctggacatgcggagcatggacttcaagagcaactccgccgtggcctggtccaacaagtccgatttcgcctgcgccaacgccttcaacaacagcattatccccgaggacacattcttcccaagccccgagagcagctgcggtacccagagttttgggttgttggaccctaaattgtgctatctgttggacggaatcctgttcatttacggagtgatcctgaccgcattgttcctgaagagaggccggaagaagctgctgtacatcttcaagcagcctttcatgcggcccgtgcagaccacccaggaagaggacggctgctcctgccggttccccgaggaagaagaaggcggctgcgagctgcgggttaagttttccagatccgcagacgcacccgcttaccaacaagggcagaaccaactctacaatgaacttaatttggggcggagggaagagtacgacgttctggacaaaaggaggggacgagatcccgagatgggcggaaagcctcagcgaaggaagaatccgcaagaggggctttataacgaactccagaaagataaaatggcagaagcctatagtgagattgggatgaagggagaaaggaggaggggtaaaggtcacgatgggttgtaccaaggattgagcacagccactaaagatacctatgatgcgctccacatgcaggccctgccgccaaga

SEQ ID NO: 3270 - DNA, 2799 bp, synthetic construct
  source 1..2799: mol_type = other DNA
atggccttaccagtgaccgccttgctcctgccgctggccttgctgctccacgccgccaggccggacatccagatgacacagagccctagcagcctgtctgccagcgtgggagacagagtgaccatcacatgcaaggccagcgaccacatcaacaactggctggcctggtatcagcagaagcctggacaggcccctaagctgctgatctacggcgctaccacactggaaacaggcgtgcccagcagattttctggcagcggctctggcaccgactacaccctgacaatatccagcctccagcctgaggacttcgccacctactactgtcagcagagctggaacaccccttggacattcggccagggcaccaagctggaaatcaagagactcgaggggaaaccaattcccaaccctcttctgggactggattcaaccggcagcggcgaggacctgaagaacgtgttcccacctgaggtggccgtgttcgagcctagcgaggccgagatcagccacacccagaaagccaccctcgtgtgcctggctaccggcttctaccccgaccatgtggaactgtcttggtgggtcaacggcaaagaggtgcacagcggcgtgtctaccgacccccagccactgaaagaacagcccgccctgaacgacagccggtactgcctgagcagcagactgagagtgtccgccaccttctggcagaacccccggaaccacttcagatgccaggtgcagttctacggcctgagcgagaacgacgagtggacccaggacagagccaagcccgtgacccagatcgtgtctgccgaagcctggggcagagccgattgcggatcccagagcttcggcctgctggaccccaagctgtgctacctgctggatggcatcctgttcatctacggcgtgatcctgaccgccctgttcctgaaacggggcagaaagaaactcctgtatatattcaaacaaccatttatgagaccagtacaaactactcaagaggaagatggctgtagctgccgatttccagaagaagaagaaggaggatgtgaactgagagtgaagttcagcagaagcgccgacgcccctgcctaccagcagggacagaaccaactgtacaacgagctgaacctgggcagacgggaagagtacgacgtgctggacaagcggagaggcagggaccctgagatgggcggaaagccccagcggagaaagaacccccaggaaggactgtataacgaactccagaaagacaagatggccgaagcctacagcgagatcggcatgaagggcgagcggagaagaggcaagggccacgatggcctgtaccagggcctgagcaccgccaccaaggacacctatgacgccctgcacatgcaggccctgcctccaagaagggccaagcgatctggatctggagcaacaaacttctcactactcaaacaagcaggtgacgtggaggagaatcccgggcctactagtatggactggatttggcgcatccttttccttgtcggcgctgctaccggcgcgcattccttcgaacaagttcagcttcaacagcctggcgctgagctggtcaaacctggcgcttctgtgaagatgagctgcaaagccagcggctacgccttcagcagctactggatcaactggatgaagcagaaacccggccagggactcgaatggatcggccaaatctatcccggcgacggcgacaccaactacaacggcaagttcaagggcagagccacactgaccgccgatacctctagcagcacagcctacatgcagctgagcagcctgaccagcgaagatagcgccgtgtacttctgtgcccggtccatcacaacagtcgtgggctgcgctatggactattggggccagggaacaagcgtgaccgtgtctagtacgcgtgagcagaaactgatctcggaagaggatctggggagcggcatccagaaccctgatcctgccgtgtaccagctgcgggatagcaagagcagcgacaagagcgtgtgtctgttcaccgacttcgacagccagaccaacgtgtcccagagcaaggactccgacgtgtacatcaccgataagaccgtgctggacatgcggagcatggacttcaagagcaactccgccgtggcctggtccaacaagtccgatttcgcctgcgccaacgccttcaacaacagcattatccccgaggacacattcttcccaagccccgagagcagctgcggtacccagagttttgggttgttggaccctaaattgtgctatctgttggacggaatcctgttcatttacggagtgatcctgaccgcattgttcctgaagagaggccggaagaagctgctgtacatcttcaagcagcctttcatgcggcccgtgcagaccacccaggaagaggacggctgctcctgccggttccccgaggaagaagaaggcggctgcgagctgcgggttaagttttccagatccgcagacgcacccgcttaccaacaagggcagaaccaactctacaatgaacttaatttggggcggagggaagagtacgacgttctggacaaaaggaggggacgagatcccgagatgggcggaaagcctcagcgaaggaagaatccgcaagaggggctttataacgaactccagaaagataaaatggcagaagcctatagtgagattgggatgaagggagaaaggaggaggggtaaaggtcacgatgggttgtaccaaggattgagcacagccactaaagatacctatgatgcgctccacatgcaggccctgccgccaaga

SEQ ID NO: 3271 - DNA, 2472 bp, synthetic construct
  source 1..2472: mol_type = other DNA
atggccttaccagtgaccgccttgctcctgccgctggccttgctgctccacgccgccaggccggacatccagatgacacagagccctagcagcctgtctgccagcgtgggagacagagtgaccatcacatgcaaggccagcgaccacatcaacaactggctggcctggtatcagcagaagcctggacaggcccctaagctgctgatctacggcgctaccacactggaaacaggcgtgcccagcagattttctggcagcggctctggcaccgactacaccctgacaatatccagcctccagcctgaggacttcgccacctactactgtcagcagagctggaacaccccttggacattcggccagggcaccaagctggaaatcaagagactcgagcagagcttcggcctgctggaccccaagctgtgctacctgctggatggcatcctgttcatctacggcgtgatcctgaccgccctgttcctgagagtgaagttcagcagaagcgccgacgcccctgcctaccagcagggacagaaccaactgtacaacgagctgaacctgggcagacgggaagagtacgacgtgctggacaagcggagaggcagggaccctgagatgggcggaaagccccagcggagaaagaacccccaggaaggactgtataacgaactccagaaagacaagatggccgaagcctacagcgagatcggcatgaagggcgagcggagaagaggcaagggccacgatggcctgtaccagggcctgagcaccgccaccaaggacacctatgacgccctgcacatgcaggccctgcctccaagaagggccaagcgatctggatctggagcaacaaacttctcactactcaaacaagcaggtgacgtggaggagaatcccgggcctactagtatggactggatttggcgcatccttttccttgtcggcgctgctaccggcgcgcattccttcgaacaagttcagcttcaacagcctggcgctgagctggtcaaacctggcgcttctgtgaagatgagctgcaaagccagcggctacgccttcagcagctactggatcaactggatgaagcagaaacccggccagggactcgaatggatcggccaaatctatcccggcgacggcgacaccaactacaacggcaagttcaagggcagagccacactgaccgccgatacctctagcagcacagcctacatgcagctgagcagcctgaccagcgaagatagcgccgtgtacttctgtgcccggtccatcacaacagtcgtgggctgcgctatggactattggggccagggaacaagcgtgaccgtgtctagtacgcgtcagagttttgggttgttggaccctaaattgtgctatctgttggacggaatcctgttcatttacggagtgatcctgaccgcattgttcctgcgggttaagttttccagatccgcagacgcacccgcttaccaacaagggcagaaccaactctacaatgaacttaatttggggcggagggaagagtacgacgttctggacaaaaggaggggacgagatcccgagatgggcggaaagcctcagcgaaggaagaatccgcaagaggggctttataacgaactccagaaagataaaatggcagaagcctatagtgagattgggatgaagggagaaaggaggaggggtaaaggtcacgatgggttgtaccaaggattgagcacagccactaaagatacctatgatgcgctccacatgcaggccctgccgccaagacgcgccaagagaagcggatctggcgtgaagcagaccctgaatttcgacctgctgaagctggctggcgacgtggaatccaacccaggcccttctagaggccatatgaccgagtacaagcccacggtgcgcctcgccacccgcgacgacgtccccagggccgtacgcaccctcgccgccgcgttcgccgactaccccgccacgcgccacaccgtcgatccggaccgccacatcgagcgggtcaccgagctgcaagaactcttcctcacgcgcgtcgggctcgacatcggcaaggtgtgggtcgcggacgacggcgccgcggtggcggtctggaccacgccggagagcgtcgaagcgggggcggtgttcgccgagatcggcccgcgcatggccgagttgagcggttcccggctggccgcgcagcaacagatggaaggcctcctggcgccgcaccggcccaaggagcccgcgtggttcctggccaccgtcggcgtctcgcccgaccaccagggcaagggtctgggcagcgccgtcgtgctccccggagtggaggcggccgagcgcgccggggtgcccgccttcctggagacctccgcgccccgcaacctccccttctacgagcggctcggcttcaccgtcaccgccgacgtcgaggtgcccgaaggaccgcgcacctggtgcatgacccgcaagcccggtgcctga

SEQ ID NO: 3272 - DNA, 1944 bp, synthetic construct
  source 1..1944: mol_type = other DNA
atggccttaccagtgaccgccttgctcctgccgctggccttgctgctccacgccgccaggccggacatccagatgacacagagccctagcagcctgtctgccagcgtgggagacagagtgaccatcacatgcaaggccagcgaccacatcaacaactggctggcctggtatcagcagaagcctggacaggcccctaagctgctgatctacggcgctaccacactggaaacaggcgtgcccagcagattttctggcagcggctctggcaccgactacaccctgacaatatccagcctccagcctgaggacttcgccacctactactgtcagcagagctggaacaccccttggacattcggccagggcaccaagctggaaatcaagagactcgagggacagcctaaggccaatcctaccgtgacactgttccctccaagcagcgaagaactccaggccaacaaggccacacttgtgtgcctgatctccgacttctaccctggggctgtgacagtggcttggaaggccgatggatctcctgtgaaagccggcgtggaaaccaccaagccatccaagcagagcaacaacaaatacgccgccagctcctacctgagcctgacacctgagcagtggaagtcccacagatcctacagctgccaagtgacccacgaaggcagcaccgtggaaaagacagtggcccctacagagtgcagccccatcaagaccgatgtgattacaatggaccccaaggacaactgctccaaggacgccaacgataccctgctgctccagctgaccaacaccagcgcctactacatgtacttgttgctgctgctgaagtccgtggtgtacttcgccatcatcacatgctgcctgctgcggagaaccgccttctgctgcaacggcgagaagtctagggccaagcgatctggatctggagcaacaaacttctcactactcaaacaagcaggtgacgtggaggagaatcccgggcctactagtatggactggatttggcgcatccttttccttgtcggcgctgctaccggcgcgcattccttcgaacaagttcagcttcaacagcctggcgctgagctggtcaaacctggcgcttctgtgaagatgagctgcaaagccagcggctacgccttcagcagctactggatcaactggatgaagcagaaacccggccagggactcgaatggatcggccaaatctatcccggcgacggcgacaccaactacaacggcaagttcaagggcagagccacactgaccgccgatacctctagcagcacagcctacatgcagctgagcagcctgaccagcgaagatagcgccgtgtacttctgtgcccggtccatcacaacagtcgtgggctgcgctatggactattggggccagggaacaagcgtgaccgtgtctagtacgcgtgcctctacaaagggaccctccgtgtttcctctggctcccagcagcaagtctacaagcggaggaacagccgctctgggctgcctggtcaaggattactttcccgagcctgtgaccgtgtcctggaatagcggagcactgacaagcggcgtgcacacctttccagccgtgctgcaaagcagcggcctgtactctctgagcagcgtggtcacagtgcctagctctagcctgggcacccagacctacatctgcaatgtgaaccacaagcctagcaacaccaaggtggacaagagagtggaacccaagagctgtgaagtgaaaaccgactccaccgaccacgtgaagcccaaagagacagagaacaccaagcagcccagcaagagctgccacaagcccaaggccatcgtgcacaccgagaaagtgaacatgatgagcctgaccgtgctgggcctgcggatgctgttcgccaaaaccgtggccgtgaacttcctgctgaccgccaagctgttcttcctc

SEQ ID NO: 3273 - DNA, 1878 bp, synthetic construct
  source 1..1878: mol_type = other DNA
atggccttaccagtgaccgccttgctcctgccgctggccttgctgctccacgccgccaggccggacatccagatgacacagagccctagcagcctgtctgccagcgtgggagacagagtgaccatcacatgcaaggccagcgaccacatcaacaactggctggcctggtatcagcagaagcctggacaggcccctaagctgctgatctacggcgctaccacactggaaacaggcgtgcccagcagattttctggcagcggctctggcaccgactacaccctgacaatatccagcctccagcctgaggacttcgccacctactactgtcagcagagctggaacaccccttggacattcggccagggcaccaagctggaaatcaagagactcgagggacagcctaaggccaatcctaccgtgacactgttccctccaagcagcgaagaactccaggccaacaaggccacacttgtgtgcctgatctccgacttctaccctggggctgtgacagtggcttggaaggccgatggatctcctgtgaaagccggcgtggaaaccaccaagccatccaagcagagcaacaacaaatacgccgccagctcctacctgagcctgacacctgagcagtggaagtcccacagatcctacagctgccaagtgacccacgaaggcagcaccgtggaaaagacagtggcccctacagagtgcagcggcagagccgattgcggcatcaccagcgccagctaccaccagggcgtgctgagcgccaccatcctgtacgagatcctgctgggcaaggccaccctgtacgccgtgctggtgtctgccctggtgctgatggctatggtcaagcggaaggacagccggggaagggccaagcgatctggatctggagcaacaaacttctcactactcaaacaagcaggtgacgtggaggagaatcccgggcctactagtatggactggatttggcgcatccttttccttgtcggcgctgctaccggcgcgcattccttcgaacaagttcagcttcaacagcctggcgctgagctggtcaaacctggcgcttctgtgaagatgagctgcaaagccagcggctacgccttcagcagctactggatcaactggatgaagcagaaacccggccagggactcgaatggatcggccaaatctatcccggcgacggcgacaccaactacaacggcaagttcaagggcagagccacactgaccgccgatacctctagcagcacagcctacatgcagctgagcagcctgaccagcgaagatagcgccgtgtacttctgtgcccggtccatcacaacagtcgtgggctgcgctatggactattggggccagggaacaagcgtgaccgtgtctagtacgcgtgcctctacaaagggaccctccgtgtttcctctggctcccagcagcaagtctacaagcggaggaacagccgctctgggctgcctggtcaaggattactttcccgagcctgtgaccgtgtcctggaatagcggagcactgacaagcggcgtgcacacctttccagccgtgctgcaaagcagcggcctgtactctctgagcagcgtggtcacagtgcctagctctagcctgggcacccagacctacatctgcaatgtgaaccacaagcctagcaacaccaaggtggacaagagagtggaacccaagagctgtatccccgaggacacattcttcccaagcagcgacgtgccctgcgacgtgaagctggtggaaaagagcttcgagacagacaccaacctgaacttccagaacctgagcgtgatcggcttcagaatcctgctgctgaaagtggccggctttaacctgctgatgaccctgcggctgtggtccagc

SEQ ID NO: 3274 - DNA, 1878 bp, synthetic construct
  source 1..1878: mol_type = other DNA
atggccttaccagtgaccgccttgctcctgccgctggccttgctgctccacgccgccaggccggacatccagatgacacagagccctagcagcctgtctgccagcgtgggagacagagtgaccatcacatgcaaggccagcgaccacatcaacaactggctggcctggtatcagcagaagcctggacaggcccctaagctgctgatctacggcgctaccacactggaaacaggcgtgcccagcagattttctggcagcggctctggcaccgactacaccctgacaatatccagcctccagcctgaggacttcgccacctactactgtcagcagagctggaacaccccttggacattcggccagggcaccaagctggaaatcaagagactcgagggacagcctaaggccaatcctaccgtgacactgttccctccaagcagcgaagaactccaggccaacaaggccacacttgtgtgcctgatctccgacttctaccctggggctgtgacagtggcttggaaggccgatggatctcctgtgaaagccggcgtggaaaccaccaagccatccaagcagagcaacaacaaatacgccgccagctcctacctgagcctgacacctgagcagtggaagtcccacagatcctacagctgccaagtgacccacgaaggcagcaccgtggaaaagacagtggcccctacagagtgcagcggcagagccgattgcggctttaccagcgagagctaccagcagggcgtgctgagcgccaccatcctgtacgagatcctgctgggcaaggccaccctgtacgccgtgctggtgtctgccctggtgctgatggctatggtcaagcggaaggacagccggggaagggccaagcgatctggatctggagcaacaaacttctcactactcaaacaagcaggtgacgtggaggagaatcccgggcctactagtatggactggatttggcgcatccttttccttgtcggcgctgctaccggcgcgcattccttcgaacaagttcagcttcaacagcctggcgctgagctggtcaaacctggcgcttctgtgaagatgagctgcaaagccagcggctacgccttcagcagctactggatcaactggatgaagcagaaacccggccagggactcgaatggatcggccaaatctatcccggcgacggcgacaccaactacaacggcaagttcaagggcagagccacactgaccgccgatacctctagcagcacagcctacatgcagctgagcagcctgaccagcgaagatagcgccgtgtacttctgtgcccggtccatcacaacagtcgtgggctgcgctatggactattggggccagggaacaagcgtgaccgtgtctagtacgcgtgcctctacaaagggaccctccgtgtttcctctggctcccagcagcaagtctacaagcggaggaacagccgctctgggctgcctggtcaaggattactttcccgagcctgtgaccgtgtcctggaatagcggagcactgacaagcggcgtgcacacctttccagccgtgctgcaaagcagcggcctgtactctctgagcagcgtggtcacagtgcctagctctagcctgggcacccagacctacatctgcaatgtgaaccacaagcctagcaacaccaaggtggacaagagagtggaacccaagagctgtatccccgaggacacattcttcccaagccccgagagcagctgcgacgtgaagctggtggaaaagagcttcgagacagacaccaacctgaacttccagaacctgagcgtgatcggcttcagaatcctgctgctgaaagtggccggctttaacctgctgatgaccctgcggctgtggtccagc

SEQ ID NO: 3275 - DNA, 1356 bp, synthetic construct
  source 1..1356: mol_type = other DNA
atggccttaccagtgaccgccttgctcctgccgctggccttgctgctccacgccgccaggccggacatccagatgacacagagccctagcagcctgtctgccagcgtgggagacagagtgaccatcacatgcaaggccagcgaccacatcaacaactggctggcctggtatcagcagaagcctggacaggcccctaagctgctgatctacggcgctaccacactggaaacaggcgtgcccagcagattttctggcagcggctctggcaccgactacaccctgacaatatccagcctccagcctgaggacttcgccacctactactgtcagcagagctggaacaccccttggacattcggccagggcaccaagctggaaatcaagagaggcggaggcggaagtggaggcggaggatctggcggcggaggctctcaagttcagcttcaacagcctggcgctgagctggtcaaacctggcgcttctgtgaagatgagctgcaaagccagcggctacgccttcagcagctactggatcaactggatgaagcagaaacccggccagggactcgaatggatcggccaaatctatcccggcgacggcgacaccaactacaacggcaagttcaagggcagagccacactgaccgccgatacctctagcagcacagcctacatgcagctgagcagcctgaccagcgaagatagcgccgtgtacttctgtgcccggtccatcacaacagtcgtgggctgcgctatggactattggggccagggaacaagcgtgaccgtgtctagtacgcgtgacggtaacgaggagatgggaggaatcactcaaaccccttacaaagtctcaatttcaggaacaactgttatccttacatgtccccagtatcctggcagcgagatcctttggcagcataacgacaagaatatagggggagatgaagacgataagaatatcggatctgacgaggatcacttgagcctgaaagagttctccgagcttgaacaaagcggatattatgtgtgctatccgcgcgggtcaaagccggaagacgctaacttttacctttatctccgagccagagtgtgcgaaaattgcatggaaatggacgttatgtccgttgctacaatagttatcgtagatatatgcatcacgggtggactgcttctgctggtttattattggtccaagaatagaaaggccaaagctaaacccgtgaccagaggcgctggcgcaggcggaaggcaaaggggacaaaacaaagaacggccaccaccagtgccaaatccagattatgagcctattcggaaaggacagagggacctgtactctggcctgaatcagagaagaatc

SEQ ID NO: 3276 - DNA, 1251 bp, synthetic construct
  source 1..1251: mol_type = other DNA
atggccttaccagtgaccgccttgctcctgccgctggccttgctgctccacgccgccaggccggacatccagatgacacagagccctagcagcctgtctgccagcgtgggagacagagtgaccatcacatgcaaggccagcgaccacatcaacaactggctggcctggtatcagcagaagcctggacaggcccctaagctgctgatctacggcgctaccacactggaaacaggcgtgcccagcagattttctggcagcggctctggcaccgactacaccctgacaatatccagcctccagcctgaggacttcgccacctactactgtcagcagagctggaacaccccttggacattcggccagggcaccaagctggaaatcaagagaggcggaggcggaagtggaggcggaggatctggcggcggaggctctcaagttcagcttcaacagcctggcgctgagctggtcaaacctggcgcttctgtgaagatgagctgcaaagccagcggctacgccttcagcagctactggatcaactggatgaagcagaaacccggccagggactcgaatggatcggccaaatctatcccggcgacggcgacaccaactacaacggcaagttcaagggcagagccacactgaccgccgatacctctagcagcacagcctacatgcagctgagcagcctgaccagcgaagatagcgccgtgtacttctgtgcccggtccatcacaacagtcgtgggctgcgctatggactattggggccagggaacaagcgtgaccgtgtctagtacgcgtttcaagatccccatcgaggaactggaagatcgggtgttcgtgaactgcaacacctctatcacctgggtggaaggcaccgtgggaacactgctgagcgacatcaccagactggacctcggcaagcggattctggaccctcggggcatctacagatgcaacggcaccgacatctacaaggacaaagaaagcaccgtgcaggtccactacagaatgtgccagtcctgcgtggaactggaccctgctacagtggccggcatcatcgtgaccgatgtgatcgctactctgctgctggctctgggagtgttctgcttcgccggacacgaaacaggcagactgtctggcgctgccgatacacaggccctgctgagaaacgaccaagtgtatcagcccctgcgcgacagagatgatgcccagtattctcacctcggcggcaactgggctagaaacaag

SEQ ID NO: 3277 - DNA, 1281 bp, synthetic construct
  source 1..1281: mol_type = other DNA
atggccttaccagtgaccgccttgctcctgccgctggccttgctgctccacgccgccaggccggacatccagatgacacagagccctagcagcctgtctgccagcgtgggagacagagtgaccatcacatgcaaggccagcgaccacatcaacaactggctggcctggtatcagcagaagcctggacaggcccctaagctgctgatctacggcgctaccacactggaaacaggcgtgcccagcagattttctggcagcggctctggcaccgactacaccctgacaatatccagcctccagcctgaggacttcgccacctactactgtcagcagagctggaacaccccttggacattcggccagggcaccaagctggaaatcaagagaggcggaggcggaagtggaggcggaggatctggcggcggaggctctcaagttcagcttcaacagcctggcgctgagctggtcaaacctggcgcttctgtgaagatgagctgcaaagccagcggctacgccttcagcagctactggatcaactggatgaagcagaaacccggccagggactcgaatggatcggccaaatctatcccggcgacggcgacaccaactacaacggcaagttcaagggcagagccacactgaccgccgatacctctagcagcacagcctacatgcagctgagcagcctgaccagcgaagatagcgccgtgtacttctgtgcccggtccatcacaacagtcgtgggctgcgctatggactattggggccagggaacaagcgtgaccgtgtctagtacgcgtcagagcatcaagggcaaccacctggtcaaggtgtacgactaccaagaggacggcagcgtgctgctgacatgtgatgccgaggccaagaacatcacctggtttaaggacggcaagatgatcggcttcctgaccgaggacaagaagaagtggaacctgggcagcaacgctaaggaccccagaggcatgtatcagtgcaagggcagccagaacaagagcaagcccctccaggtgtactaccggatgtgccagaactgcatcgagctgaacgccgctaccatcagcggctttctgttcgccgagatcgtgtccatcttcgtgctggccgtgggcgtgtactttatcgctggacaggatggcgtgcggcagagcagagcttccgataagcaaaccctgctgcctaacgaccagctgtaccagcctctgaaggacagagaggacgaccagtacagccacctccagggcaatcagctgagaagaaac

SEQ ID NO: 3278 - DNA, 1230 bp, synthetic construct
  source 1..1230: mol_type = other DNA
atggccttaccagtgaccgccttgctcctgccgctggccttgctgctccacgccgccaggccggacatccagatgacacagagccctagcagcctgtctgccagcgtgggagacagagtgaccatcacatgcaaggccagcgaccacatcaacaactggctggcctggtatcagcagaagcctggacaggcccctaagctgctgatctacggcgctaccacactggaaacaggcgtgcccagcagattttctggcagcggctctggcaccgactacaccctgacaatatccagcctccagcctgaggacttcgccacctactactgtcagcagagctggaacaccccttggacattcggccagggcaccaagctggaaatcaagagaggcggaggcggaagtggaggcggaggatctggcggcggaggctctcaagttcagcttcaacagcctggcgctgagctggtcaaacctggcgcttctgtgaagatgagctgcaaagccagcggctacgccttcagcagctactggatcaactggatgaagcagaaacccggccagggactcgaatggatcggccaaatctatcccggcgacggcgacaccaactacaacggcaagttcaagggcagagccacactgaccgccgatacctctagcagcacagcctacatgcagctgagcagcctgaccagcgaagatagcgccgtgtacttctgtgcccggtccatcacaacagtcgtgggctgcgctatggactattggggccagggaacaagcgtgaccgtgtctagtacgcgtcagagttttgggttgttggaccctaaattgtgctatctgttggacggaatcctgttcatttacggagtgatcctgaccgcattgttcctgcgggttaagttttccagatccgcagacgcacccgcttaccaacaagggcagaaccaactctacaatgaacttaatttggggcggagggaagagtacgacgttctggacaaaaggaggggacgagatcccgagatgggcggaaagcctcagcgaaggaagaatccgcaagaggggctttataacgaactccagaaagataaaatggcagaagcctatagtgagattgggatgaagggagaaaggaggaggggtaaaggtcacgatgggttgtaccaaggattgagcacagccactaaagatacctatgatgcgctccacatgcaggccctgccgccaaga

SEQ ID NO: 3279 - DNA, 1356 bp, synthetic construct
  source 1..1356: mol_type = other DNA
atggccttaccagtgaccgccttgctcctgccgctggccttgctgctccacgccgccaggccgcaagttcagcttcaacagcctggcgctgagctggtcaaacctggcgcttctgtgaagatgagctgcaaagccagcggctacgccttcagcagctactggatcaactggatgaagcagaaacccggccagggactcgaatggatcggccaaatctatcccggcgacggcgacaccaactacaacggcaagttcaagggcagagccacactgaccgccgatacctctagcagcacagcctacatgcagctgagcagcctgaccagcgaagatagcgccgtgtacttctgtgcccggtccatcacaacagtcgtgggctgcgctatggactattggggccagggaacaagcgtgaccgtgtctagtggcggaggcggaagtggaggcggaggatctggcggcggaggctctgacatccagatgacacagagccctagcagcctgtctgccagcgtgggagacagagtgaccatcacatgcaaggccagcgaccacatcaacaactggctggcctggtatcagcagaagcctggacaggcccctaagctgctgatctacggcgctaccacactggaaacaggcgtgcccagcagattttctggcagcggctctggcaccgactacaccctgacaatatccagcctccagcctgaggacttcgccacctactactgtcagcagagctggaacaccccttggacattcggccagggcaccaagctggaaatcaagagaacgcgtgacggtaacgaggagatgggaggaatcactcaaaccccttacaaagtctcaatttcaggaacaactgttatccttacatgtccccagtatcctggcagcgagatcctttggcagcataacgacaagaatatagggggagatgaagacgataagaatatcggatctgacgaggatcacttgagcctgaaagagttctccgagcttgaacaaagcggatattatgtgtgctatccgcgcgggtcaaagccggaagacgctaacttttacctttatctccgagccagagtgtgcgaaaattgcatggaaatggacgttatgtccgttgctacaatagttatcgtagatatatgcatcacgggtggactgcttctgctggtttattattggtccaagaatagaaaggccaaagctaaacccgtgaccagaggcgctggcgcaggcggaaggcaaaggggacaaaacaaagaacggccaccaccagtgccaaatccagattatgagcctattcggaaaggacagagggacctgtactctggcctgaatcagagaagaatc

SEQ ID NO: 3280 - DNA, 1251 bp, synthetic construct
  source 1..1251: mol_type = other DNA
atggccttaccagtgaccgccttgctcctgccgctggccttgctgctccacgccgccaggccgcaagttcagcttcaacagcctggcgctgagctggtcaaacctggcgcttctgtgaagatgagctgcaaagccagcggctacgccttcagcagctactggatcaactggatgaagcagaaacccggccagggactcgaatggatcggccaaatctatcccggcgacggcgacaccaactacaacggcaagttcaagggcagagccacactgaccgccgatacctctagcagcacagcctacatgcagctgagcagcctgaccagcgaagatagcgccgtgtacttctgtgcccggtccatcacaacagtcgtgggctgcgctatggactattggggccagggaacaagcgtgaccgtgtctagtggcggaggcggaagtggaggcggaggatctggcggcggaggctctgacatccagatgacacagagccctagcagcctgtctgccagcgtgggagacagagtgaccatcacatgcaaggccagcgaccacatcaacaactggctggcctggtatcagcagaagcctggacaggcccctaagctgctgatctacggcgctaccacactggaaacaggcgtgcccagcagattttctggcagcggctctggcaccgactacaccctgacaatatccagcctccagcctgaggacttcgccacctactactgtcagcagagctggaacaccccttggacattcggccagggcaccaagctggaaatcaagagaacgcgtttcaagatccccatcgaggaactggaagatcgggtgttcgtgaactgcaacacctctatcacctgggtggaaggcaccgtgggaacactgctgagcgacatcaccagactggacctcggcaagcggattctggaccctcggggcatctacagatgcaacggcaccgacatctacaaggacaaagaaagcaccgtgcaggtccactacagaatgtgccagtcctgcgtggaactggaccctgctacagtggccggcatcatcgtgaccgatgtgatcgctactctgctgctggctctgggagtgttctgcttcgccggacacgaaacaggcagactgtctggcgctgccgatacacaggccctgctgagaaacgaccaagtgtatcagcccctgcgcgacagagatgatgcccagtattctcacctcggcggcaactgggctagaaacaag

SEQ ID NO: 3281 - DNA, 1281 bp, synthetic construct
  source 1..1281: mol_type = other DNA
atggccttaccagtgaccgccttgctcctgccgctggccttgctgctccacgccgccaggccgcaagttcagcttcaacagcctggcgctgagctggtcaaacctggcgcttctgtgaagatgagctgcaaagccagcggctacgccttcagcagctactggatcaactggatgaagcagaaacccggccagggactcgaatggatcggccaaatctatcccggcgacggcgacaccaactacaacggcaagttcaagggcagagccacactgaccgccgatacctctagcagcacagcctacatgcagctgagcagcctgaccagcgaagatagcgccgtgtacttctgtgcccggtccatcacaacagtcgtgggctgcgctatggactattggggccagggaacaagcgtgaccgtgtctagtggcggaggcggaagtggaggcggaggatctggcggcggaggctctgacatccagatgacacagagccctagcagcctgtctgccagcgtgggagacagagtgaccatcacatgcaaggccagcgaccacatcaacaactggctggcctggtatcagcagaagcctggacaggcccctaagctgctgatctacggcgctaccacactggaaacaggcgtgcccagcagattttctggcagcggctctggcaccgactacaccctgacaatatccagcctccagcctgaggacttcgccacctactactgtcagcagagctggaacaccccttggacattcggccagggcaccaagctggaaatcaagagaacgcgtcagagcatcaagggcaaccacctggtcaaggtgtacgactaccaagaggacggcagcgtgctgctgacatgtgatgccgaggccaagaacatcacctggtttaaggacggcaagatgatcggcttcctgaccgaggacaagaagaagtggaacctgggcagcaacgctaaggaccccagaggcatgtatcagtgcaagggcagccagaacaagagcaagcccctccaggtgtactaccggatgtgccagaactgcatcgagctgaacgccgctaccatcagcggctttctgttcgccgagatcgtgtccatcttcgtgctggccgtgggcgtgtactttatcgctggacaggatggcgtgcggcagagcagagcttccgataagcaaaccctgctgcctaacgaccagctgtaccagcctctgaaggacagagaggacgaccagtacagccacctccagggcaatcagctgagaagaaac

SEQ ID NO: 3282 - DNA, 1230 bp, synthetic construct
  source 1..1230: mol_type = other DNA
atggccttaccagtgaccgccttgctcctgccgctggccttgctgctccacgccgccaggccgcaagttcagcttcaacagcctggcgctgagctggtcaaacctggcgcttctgtgaagatgagctgcaaagccagcggctacgccttcagcagctactggatcaactggatgaagcagaaacccggccagggactcgaatggatcggccaaatctatcccggcgacggcgacaccaactacaacggcaagttcaagggcagagccacactgaccgccgatacctctagcagcacagcctacatgcagctgagcagcctgaccagcgaagatagcgccgtgtacttctgtgcccggtccatcacaacagtcgtgggctgcgctatggactattggggccagggaacaagcgtgaccgtgtctagtggcggaggcggaagtggaggcggaggatctggcggcggaggctctgacatccagatgacacagagccctagcagcctgtctgccagcgtgggagacagagtgaccatcacatgcaaggccagcgaccacatcaacaactggctggcctggtatcagcagaagcctggacaggcccctaagctgctgatctacggcgctaccacactggaaacaggcgtgcccagcagattttctggcagcggctctggcaccgactacaccctgacaatatccagcctccagcctgaggacttcgccacctactactgtcagcagagctggaacaccccttggacattcggccagggcaccaagctggaaatcaagagaacgcgtcagagttttgggttgttggaccctaaattgtgctatctgttggacggaatcctgttcatttacggagtgatcctgaccgcattgttcctgcgggttaagttttccagatccgcagacgcacccgcttaccaacaagggcagaaccaactctacaatgaacttaatttggggcggagggaagagtacgacgttctggacaaaaggaggggacgagatcccgagatgggcggaaagcctcagcgaaggaagaatccgcaagaggggctttataacgaactccagaaagataaaatggcagaagcctatagtgagattgggatgaagggagaaaggaggaggggtaaaggtcacgatgggttgtaccaaggattgagcacagccactaaagatacctatgatgcgctccacatgcaggccctgccgccaaga

SEQ ID NO: 3283 - DNA, 1515 bp, synthetic construct
  source 1..1515: mol_type = other DNA
atggccttaccagtgaccgccttgctcctgccgctggccttgctgctccacgccgccaggccggacatccagatgacacagagccctagcagcctgtctgccagcgtgggagacagagtgaccatcacatgcaaggccagcgaccacatcaacaactggctggcctggtatcagcagaagcctggacaggcccctaagctgctgatctacggcgctaccacactggaaacaggcgtgcccagcagattttctggcagcggctctggcaccgactacaccctgacaatatccagcctccagcctgaggacttcgccacctactactgtcagcagagctggaacaccccttggacattcggccagggcaccaagctggaaatcaagagaggcggaggcggaagtggaggcggaggatctggcggcggaggctctcaagttcagcttcaacagcctggcgctgagctggtcaaacctggcgcttctgtgaagatgagctgcaaagccagcggctacgccttcagcagctactggatcaactggatgaagcagaaacccggccagggactcgaatggatcggccaaatctatcccggcgacggcgacaccaactacaacggcaagttcaagggcagagccacactgaccgccgatacctctagcagcacagcctacatgcagctgagcagcctgaccagcgaagatagcgccgtgtacttctgtgcccggtccatcacaacagtcgtgggctgcgctatggactattggggccagggaacaagcgtgaccgtgtctagtacgcgtggaatgaggactgaggatcttcccaaagctgtcgtctttctcgaaccccaatggtatcgggtgctcgaaaaagactctgtgacactgaaatgccaaggggcctactctcccgaggacaactccacacagtggtttcataatgagtccctcatcagctctcaggccagctcttatttcattgatgccgctacagtggacgactccggcgagtatcggtgtcagaccaatctgtctacactgtctgaccccgtgcagcttgaggtccacattggatggttgctcttgcaagccccacgctgggttttcaaagaggaagatccaatccatctgcggtgccacagctggaaaaacaccgctctccacaaagtcacatacctgcaaaatggcaaaggacgcaaatacttccatcacaattccgatttttacattccgaaggctaccctgaaagacagcggcagctatttctgccggggactcgtcggctccaagaatgtgtcctccgaaaccgtgaatatcacgattacccaaggactggctgtgcctacaatctctagcttctttccgcctggataccaagtctccttctgtcttgtgatggtcctcctgtttgctgtggacacaggactgtacttttccgtgaaaacgaacatccgcagctccacacgcgattggaaagatcacaagtttaaatggcgcaaagatccccaggacaag

SEQ ID NO: 3284 - DNA, 2364 bp, synthetic construct
  source 1..2364: mol_type = other DNA
atggccttaccagtgaccgccttgctcctgccgctggccttgctgctccacgccgccaggccggacatccagatgacacagagccctagcagcctgtctgccagcgtgggagacagagtgaccatcacatgcaaggccagcgaccacatcaacaactggctggcctggtatcagcagaagcctggacaggcccctaagctgctgatctacggcgctaccacactggaaacaggcgtgcccagcagattttctggcagcggctctggcaccgactacaccctgacaatatccagcctccagcctgaggacttcgccacctactactgtcagcagagctggaacaccccttggacattcggccagggcaccaagctggaaatcaagagaggcggaggcggaagtggaggcggaggatctggcggcggaggctctcaagttcagcttcaacagcctggcgctgagctggtcaaacctggcgcttctgtgaagatgagctgcaaagccagcggctacgccttcagcagctactggatcaactggatgaagcagaaacccggccagggactcgaatggatcggccaaatctatcccggcgacggcgacaccaactacaacggcaagttcaagggcagagccacactgaccgccgatacctctagcagcacagcctacatgcagctgagcagcctgaccagcgaagatagcgccgtgtacttctgtgcccggtccatcacaacagtcgtgggctgcgctatggactattggggccagggaacaagcgtgaccgtgtctagtacgcgtggaggctctggacaacaacagaccctgcctaaaccattcatctgggctgaaccccactttatggttccgaaagagaaacaagtcacgatttgttgccaagggaattacggggccgtcgagtatcagctccactttgagggctccctgtttgctgtggatcggcccaagccacctgaaagaatcaacaaagtccaattctatattcctgatatgaactcccgcatggcaggccagtattcatgtatctaccgcgtgggagaactttggagtgaaccctctaacctgctggacctcgtcgtgacagagatgtatgatacacccacactgtctgtgcaccctgggccagaagttatcagcggagaaaaagttaccttttattgccgcctcgataccgctacctctatgttcctcttgctgaaagagggccgcagctctcacgtgcagcgaggctacggaaaggtccaagctgagtttcctctcggccccgtgaccaccgctcacaggggcacatatagatgttttggctcttataacaatcatgcctggtcattcccatccgagcctgtgaaactgctggtcacaggcgatattgagaatacctctctggccccagaagatcctacattccccgccgacacatggggaacatatctgctgacaaccgaaaccgggctgcaaaaggaccatgctctgtgggatcataccgctcagaatctgcttcggatggggcttgcattcctggtcctggtggctcttgtctggtttctggtcgaggactggctgtcccggaagagaaccagagaaagagcttccagggccagcacctgggaaggcagacgcagactgaatactcagaccctgcgcgccaagagaagcggatctggcgtgaagcagaccctgaatttcgacctgctgaagctggctggcgacgtggaatccaacccaggcccttctagaggccatatgaccgagtacaagcccacggtgcgcctcgccacccgcgacgacgtccccagggccgtacgcaccctcgccgccgcgttcgccgactaccccgccacgcgccacaccgtcgatccggaccgccacatcgagcgggtcaccgagctgcaagaactcttcctcacgcgcgtcgggctcgacatcggcaaggtgtgggtcgcggacgacggcgccgcggtggcggtctggaccacgccggagagcgtcgaagcgggggcggtgttcgccgagatcggcccgcgcatggccgagttgagcggttcccggctggccgcgcagcaacagatggaaggcctcctggcgccgcaccggcccaaggagcccgcgtggttcctggccaccgtcggcgtctcgcccgaccaccagggcaagggtctgggcagcgccgtcgtgctccccggagtggaggcggccgagcgcgccggggtgcccgccttcctggagacctccgcgccccgcaacctccccttctacgagcggctcggcttcaccgtcaccgccgacgtcgaggtgcccgaaggaccgcgcacctggtgcatgacccgcaagcccggtgcctga

SEQ ID NO: 3285 - DNA, 1863 bp, synthetic construct
  source 1..1863: mol_type = other DNA
atggccttaccagtgaccgccttgctcctgccgctggccttgctgctccacgccgccaggccggacatccagatgacacagagccctagcagcctgtctgccagcgtgggagacagagtgaccatcacatgcaaggccagcgaccacatcaacaactggctggcctggtatcagcagaagcctggacaggcccctaagctgctgatctacggcgctaccacactggaaacaggcgtgcccagcagattttctggcagcggctctggcaccgactacaccctgacaatatccagcctccagcctgaggacttcgccacctactactgtcagcagagctggaacaccccttggacattcggccagggcaccaagctggaaatcaagagaggcggaggcggaagtggaggcggaggatctggcggcggaggctctcaagttcagcttcaacagcctggcgctgagctggtcaaacctggcgcttctgtgaagatgagctgcaaagccagcggctacgccttcagcagctactggatcaactggatgaagcagaaacccggccagggactcgaatggatcggccaaatctatcccggcgacggcgacaccaactacaacggcaagttcaagggcagagccacactgaccgccgatacctctagcagcacagcctacatgcagctgagcagcctgaccagcgaagatagcgccgtgtacttctgtgcccggtccatcacaacagtcgtgggctgcgctatggactattggggccagggaacaagcgtgaccgtgtctagtacgcgtaaaattgaagttatgtatcctcctccttacctagacaatgagaagagcaatggaaccattatccatgtgaaaggggcgcgtggcgatattgagaatacctctctggccccagaagatcctacattccccgccgacacatggggaacatatctgctgacaaccgaaaccgggctgcaaaaggaccatgctctgtgggatcataccgctcagaatctgcttcggatggggcttgcattcctggtcctggtggctcttgtctggtttctggtcgaggactggctgtcccggaagagaaccagagaaagagcttccagggccagcacctgggaaggcagacgcagactgaatactcagaccctgcgcgccaagagaagcggatctggcgtgaagcagaccctgaatttcgacctgctgaagctggctggcgacgtggaatccaacccaggcccttctagaggccatatgaccgagtacaagcccacggtgcgcctcgccacccgcgacgacgtccccagggccgtacgcaccctcgccgccgcgttcgccgactaccccgccacgcgccacaccgtcgatccggaccgccacatcgagcgggtcaccgagctgcaagaactcttcctcacgcgcgtcgggctcgacatcggcaaggtgtgggtcgcggacgacggcgccgcggtggcggtctggaccacgccggagagcgtcgaagcgggggcggtgttcgccgagatcggcccgcgcatggccgagttgagcggttcccggctggccgcgcagcaacagatggaaggcctcctggcgccgcaccggcccaaggagcccgcgtggttcctggccaccgtcggcgtctcgcccgaccaccagggcaagggtctgggcagcgccgtcgtgctccccggagtggaggcggccgagcgcgccggggtgcccgccttcctggagacctccgcgccccgcaacctccccttctacgagcggctcggcttcaccgtcaccgccgacgtcgaggtgcccgaaggaccgcgcacctggtgcatgacccgcaagcccggtgcctga

SEQ ID NO: 3286 - DNA, 2124 bp, synthetic construct
  source 1..2124: mol_type = other DNA
atggccttaccagtgaccgccttgctcctgccgctggccttgctgctccacgccgccaggccggacatccagatgacacagagccctagcagcctgtctgccagcgtgggagacagagtgaccatcacatgcaaggccagcgaccacatcaacaactggctggcctggtatcagcagaagcctggacaggcccctaagctgctgatctacggcgctaccacactggaaacaggcgtgcccagcagattttctggcagcggctctggcaccgactacaccctgacaatatccagcctccagcctgaggacttcgccacctactactgtcagcagagctggaacaccccttggacattcggccagggcaccaagctggaaatcaagagaggcggaggcggaagtggaggcggaggatctggcggcggaggctctcaagttcagcttcaacagcctggcgctgagctggtcaaacctggcgcttctgtgaagatgagctgcaaagccagcggctacgccttcagcagctactggatcaactggatgaagcagaaacccggccagggactcgaatggatcggccaaatctatcccggcgacggcgacaccaactacaacggcaagttcaagggcagagccacactgaccgccgatacctctagcagcacagcctacatgcagctgagcagcctgaccagcgaagatagcgccgtgtacttctgtgcccggtccatcacaacagtcgtgggctgcgctatggactattggggccagggaacaagcgtgaccgtgtctagtacgcgtctgtgggtgtcccagccacctgaaattcggacactggaaggctcctccgcctttctgccctgtagctttaacgccagccaggggagactcgccatcggctctgtgacatggttccgggatgaagtcgtccctggaaaagaagttcgcaacggaacaccagagttcagaggcagactcgccccactggcaagctccagattcctgcatgaccatcaggctgaactgcacattagggacgtgcggggccacgatgcctccatctatgtgtgtcgggtcgaagtgcttggactcggcgtcggaactggaaacggcactaggctggtggtcgagaaagaacatccacagcttggcgctggcaccgtcctgttgcttagagccggattctatgccgtcagcttcctgtccgtggctgtggggtctacagtgtattaccagggaaaatgtctcacctggaaaggccccagacgccagcttccagctgttgttcctgctccactgccaccaccttgtggctcctctgctcacttgcttccaccagtgcctggcggacgcgccaagagaagcggatctggcgtgaagcagaccctgaatttcgacctgctgaagctggctggcgacgtggaatccaacccaggcccttctagaatgtaccggatgcagctgctgagctgtatcgccctgtctctggccctggtcacaaatagcgcccctaccagcagcagcaccaagaaaacccagctgcaactggaacacctcctgctggacctccagatgatcctgaacggcatcaacaactacaagaaccccaagctgaccgagatgctgaccgccaagttctacatgcccaagaaggccaccgagctgaagcacctccagtgcctggaagaggaactgaagcccctggaagaagtgctgaatctggcccagagcaagaacttccacctgaggccaagggacctgatctccaacatcaacgtgatcgtgctggaactgaaaggcagcgagacaaccttcatgtgcgagtacgccgacgagacagctaccatcgtggaatttctgaatcggtggatcaccttctgccagagcatcatcagcaccctgacaaagatcgaagtgatgtaccctcctccttacctggacaacgagaagtccaacggcaccatcatccacgtgaagggcaagcacctgtgtccttctccactgttccccggacctagcaagcctttctgggtgctcgttgttgttggcggcgtgctggcctgttacagcctgctggttaccgtggccttcatcatcttttgggtccgaagcaagcggagctaa

SEQ ID NO: 3287 - DNA, 2052 bp, synthetic construct
  source 1..2052: mol_type = other DNA
atggccttaccagtgaccgccttgctcctgccgctggccttgctgctccacgccgccaggccggacatccagatgacacagagccctagcagcctgtctgccagcgtgggagacagagtgaccatcacatgcaaggccagcgaccacatcaacaactggctggcctggtatcagcagaagcctggacaggcccctaagctgctgatctacggcgctaccacactggaaacaggcgtgcccagcagattttctggcagcggctctggcaccgactacaccctgacaatatccagcctccagcctgaggacttcgccacctactactgtcagcagagctggaacaccccttggacattcggccagggcaccaagctggaaatcaagagaggcggaggcggaagtggaggcggaggatctggcggcggaggctctcaagttcagcttcaacagcctggcgctgagctggtcaaacctggcgcttctgtgaagatgagctgcaaagccagcggctacgccttcagcagctactggatcaactggatgaagcagaaacccggccagggactcgaatggatcggccaaatctatcccggcgacggcgacaccaactacaacggcaagttcaagggcagagccacactgaccgccgatacctctagcagcacagcctacatgcagctgagcagcctgaccagcgaagatagcgccgtgtacttctgtgcccggtccatcacaacagtcgtgggctgcgctatggactattggggccagggaacaagcgtgaccgtgtctagtacgcgtctgtgggtgtcccagccacctgaaattcggacactggaaggctcctccgcctttctgccctgtagctttaacgccagccaggggagactcgccatcggctctgtgacatggttccgggatgaagtcgtccctggaaaagaagttcgcaacggaacaccagagttcagaggcagactcgccccactggcaagctccagattcctgcatgaccatcaggctgaactgcacattagggacgtgcggggccacgatgcctccatctatgtgtgtcgggtcgaagtgcttggactcggcgtcggaactggaaacggcactaggctggtggtcgagaaagaacatccacagcttggcgctggcaccgtcctgttgcttagagccggattctatgccgtcagcttcctgtccgtggctgtggggtctacagtgtattaccagggaaaatgtctcacctggaaaggccccagacgccagcttccagctgttgttcctgctccactgccaccaccttgtggctcctctgctcacttgcttccaccagtgcctggcggacgcgccaagagaagcggatctggcgtgaagcagaccctgaatttcgacctgctgaagctggctggcgacgtggaatccaacccaggcccttctagaggccatatgaccgagtacaagcccacggtgcgcctcgccacccgcgacgacgtccccagggccgtacgcaccctcgccgccgcgttcgccgactaccccgccacgcgccacaccgtcgatccggaccgccacatcgagcgggtcaccgagctgcaagaactcttcctcacgcgcgtcgggctcgacatcggcaaggtgtgggtcgcggacgacggcgccgcggtggcggtctggaccacgccggagagcgtcgaagcgggggcggtgttcgccgagatcggcccgcgcatggccgagttgagcggttcccggctggccgcgcagcaacagatggaaggcctcctggcgccgcaccggcccaaggagcccgcgtggttcctggccaccgtcggcgtctcgcccgaccaccagggcaagggtctgggcagcgccgtcgtgctccccggagtggaggcggccgagcgcgccggggtgcccgccttcctggagacctccgcgccccgcaacctccccttctacgagcggctcggcttcaccgtcaccgccgacgtcgaggtgcccgaaggaccgcgcacctggtgcatgacccgcaagcccggtgcctga

SEQ ID NO: 3288 - DNA, 1077 bp, synthetic construct
  source 1..1077: mol_type = other DNA
atggccttaccagtgaccgccttgctcctgccgctggccttgctgctccacgccgccaggccggacatccagatgacacagagccctagcagcctgtctgccagcgtgggagacagagtgaccatcacatgcaaggccagcgaccacatcaacaactggctggcctggtatcagcagaagcctggacaggcccctaagctgctgatctacggcgctaccacactggaaacaggcgtgcccagcagattttctggcagcggctctggcaccgactacaccctgacaatatccagcctccagcctgaggacttcgccacctactactgtcagcagagctggaacaccccttggacattcggccagggcaccaagctggaaatcaagagaggcggaggcggaagtggaggcggaggatctggcggcggaggctctcaagttcagcttcaacagcctggcgctgagctggtcaaacctggcgcttctgtgaagatgagctgcaaagccagcggctacgccttcagcagctactggatcaactggatgaagcagaaacccggccagggactcgaatggatcggccaaatctatcccggcgacggcgacaccaactacaacggcaagttcaagggcagagccacactgaccgccgatacctctagcagcacagcctacatgcagctgagcagcctgaccagcgaagatagcgccgtgtacttctgtgcccggtccatcacaacagtcgtgggctgcgctatggactattggggccagggaacaagcgtgaccgtgtctagtacgcgtaaaattgaagttatgtatcctcctccttacctagacaatgagaagagcaatggaaccattatccatgtgaaaggggcgcgtatcacccagggcctggccgtgtctaccatcagcagctttttcccacccggctaccaggtgtccttctgcctcgtgatggtgctgctgttcgccgtggacaccggcctgtacttcagcgtgaaaacaaacatccggtccagcaccagagactggaaggaccacaagttcaagtggcggaaggacccccaggacaag

SEQ ID NO: 3289 - DNA, 1077 bp, synthetic construct
  source 1..1077: mol_type = other DNA
atggccttaccagtgaccgccttgctcctgccgctggccttgctgctccacgccgccaggccggacatccagatgacacagagccctagcagcctgtctgccagcgtgggagacagagtgaccatcacatgcaaggccagcgaccacatcaacaactggctggcctggtatcagcagaagcctggacaggcccctaagctgctgatctacggcgctaccacactggaaacaggcgtgcccagcagattttctggcagcggctctggcaccgactacaccctgacaatatccagcctccagcctgaggacttcgccacctactactgtcagcagagctggaacaccccttggacattcggccagggcaccaagctggaaatcaagagaggcggaggcggaagtggaggcggaggatctggcggcggaggctctcaagttcagcttcaacagcctggcgctgagctggtcaaacctggcgcttctgtgaagatgagctgcaaagccagcggctacgccttcagcagctactggatcaactggatgaagcagaaacccggccagggactcgaatggatcggccaaatctatcccggcgacggcgacaccaactacaacggcaagttcaagggcagagccacactgaccgccgatacctctagcagcacagcctacatgcagctgagcagcctgaccagcgaagatagcgccgtgtacttctgtgcccggtccatcacaacagtcgtgggctgcgctatggactattggggccagggaacaagcgtgaccgtgtctagtacgcgtaaaattgaagttatgtatcctcctccttacctagacaatgagaagagcaatggaaccattatccatgtgaaaggggcgcgtattacccaaggactggctgtgcctacaatctctagcttctttccgcctggataccaagtctccttctgtcttgtgatggtcctcctgtttgctgtggacacaggactgtacttttccgtgaaaacgaacatccgcagctccacacgcgattggaaagatcacaagtttaaatggcgcaaagatccccaggacaag

SEQ ID NO: 3290 - DNA, 1014 bp, synthetic construct
  source 1..1014: mol_type = other DNA
atggccttaccagtgaccgccttgctcctgccgctggccttgctgctccacgccgccaggccggacatccagatgacacagagccctagcagcctgtctgccagcgtgggagacagagtgaccatcacatgcaaggccagcgaccacatcaacaactggctggcctggtatcagcagaagcctggacaggcccctaagctgctgatctacggcgctaccacactggaaacaggcgtgcccagcagattttctggcagcggctctggcaccgactacaccctgacaatatccagcctccagcctgaggacttcgccacctactactgtcagcagagctggaacaccccttggacattcggccagggcaccaagctggaaatcaagagaggcggaggcggaagtggaggcggaggatctggcggcggaggctctcaagttcagcttcaacagcctggcgctgagctggtcaaacctggcgcttctgtgaagatgagctgcaaagccagcggctacgccttcagcagctactggatcaactggatgaagcagaaacccggccagggactcgaatggatcggccaaatctatcccggcgacggcgacaccaactacaacggcaagttcaagggcagagccacactgaccgccgatacctctagcagcacagcctacatgcagctgagcagcctgaccagcgaagatagcgccgtgtacttctgtgcccggtccatcacaacagtcgtgggctgcgctatggactattggggccagggaacaagcgtgaccgtgtctagtacgcgtaaaattgaagttatgtatcctcctccttacctagacaatgagaagagcaatggaaccattatccatgtgaaaggggcgcgtattacccaaggactggctgtgtctacaatctctagcttctctccgcctggataccaagtctccttctgtcttgtgatggtcctcctgtttgctgtggacacaggactgtacttttccgtgaaaacgaacatc

SEQ ID NO: 3291 - DNA, 1107 bp, synthetic construct
  source 1..1107: mol_type = other DNA
atggccttaccagtgaccgccttgctcctgccgctggccttgctgctccacgccgccaggccggacatccagatgacacagagccctagcagcctgtctgccagcgtgggagacagagtgaccatcacatgcaaggccagcgaccacatcaacaactggctggcctggtatcagcagaagcctggacaggcccctaagctgctgatctacggcgctaccacactggaaacaggcgtgcccagcagattttctggcagcggctctggcaccgactacaccctgacaatatccagcctccagcctgaggacttcgccacctactactgtcagcagagctggaacaccccttggacattcggccagggcaccaagctggaaatcaagagaggcggaggcggaagtggaggcggaggatctggcggcggaggctctcaagttcagcttcaacagcctggcgctgagctggtcaaacctggcgcttctgtgaagatgagctgcaaagccagcggctacgccttcagcagctactggatcaactggatgaagcagaaacccggccagggactcgaatggatcggccaaatctatcccggcgacggcgacaccaactacaacggcaagttcaagggcagagccacactgaccgccgatacctctagcagcacagcctacatgcagctgagcagcctgaccagcgaagatagcgccgtgtacttctgtgcccggtccatcacaacagtcgtgggctgcgctatggactattggggccagggaacaagcgtgaccgtgtctagtacgcgtaaaattgaagttatgtatcctcctccttacctagacaatgagaagagcaatggaaccattatccatgtgaaaggggcgcgtgtcgagaaagaacatccacagcttggcgctggcaccgtcctgttgcttagagccggattctatgccgtcagcttcctgtccgtggctgtggggtctacagtgtattaccagggaaaatgtctcacctggaaaggccccagacgccagcttccagctgttgttcctgctccactgccaccaccttgtggctcctctgctcacttgcttccaccagtgcctggcgga

SEQ ID NO: 3292 - DNA, 1350 bp, synthetic construct
  source 1..1350: mol_type = other DNA
atggccttaccagtgaccgccttgctcctgccgctggccttgctgctccacgccgccaggccggacatccagatgacacagagccctagcagcctgtctgccagcgtgggagacagagtgaccatcacatgcaaggccagcgaccacatcaacaactggctggcctggtatcagcagaagcctggacaggcccctaagctgctgatctacggcgctaccacactggaaacaggcgtgcccagcagattttctggcagcggctctggcaccgactacaccctgacaatatccagcctccagcctgaggacttcgccacctactactgtcagcagagctggaacaccccttggacattcggccagggcaccaagctggaaatcaagagaggcggaggcggaagtggaggcggaggatctggcggcggaggctctcaagttcagcttcaacagcctggcgctgagctggtcaaacctggcgcttctgtgaagatgagctgcaaagccagcggctacgccttcagcagctactggatcaactggatgaagcagaaacccggccagggactcgaatggatcggccaaatctatcccggcgacggcgacaccaactacaacggcaagttcaagggcagagccacactgaccgccgatacctctagcagcacagcctacatgcagctgagcagcctgaccagcgaagatagcgccgtgtacttctgtgcccggtccatcacaacagtcgtgggctgcgctatggactattggggccagggaacaagcgtgaccgtgtctagtacgcgtaaaattgaagttatgtatcctcctccttacctagacaatgagaagagcaatggaaccattatccatgtgaaaggggcgcgtaagtctgtgcgcttttacctggtcgtcagccctgccagtgcctccactcagacatcttggaccccaagggaccttgtgtcctctcagacacagacacagtcctgcgtgccaccaactgctggcgcaagacaggctccagagtctcccagcacaatccccgtcccttctcagccccagaactccacacttaggccaggaccagctgctccaatcgcactggtcccagtgttctgcggactgctggttgccaagtctctggtgctgagcgcactcctcgtttggtggggcgatatttggtggaaaacgatgatggaattgagatccctcgatacgcagaaagccacatgccaccttcagcaagtcacagacttgccttggaccagcgtcagctctcccgtggaacgggaaattctgtatcatacagtggcccgcaccaagatttccgacgatgacgacgagcacacactg

SEQ ID NO: 3293 - DNA, 1161 bp, synthetic construct
  source 1..1161: mol_type = other DNA
atggccttaccagtgaccgccttgctcctgccgctggccttgctgctccacgccgccaggccggacatccagatgacacagagccctagcagcctgtctgccagcgtgggagacagagtgaccatcacatgcaaggccagcgaccacatcaacaactggctggcctggtatcagcagaagcctggacaggcccctaagctgctgatctacggcgctaccacactggaaacaggcgtgcccagcagattttctggcagcggctctggcaccgactacaccctgacaatatccagcctccagcctgaggacttcgccacctactactgtcagcagagctggaacaccccttggacattcggccagggcaccaagctggaaatcaagagaggcggaggcggaagtggaggcggaggatctggcggcggaggctctcaagttcagcttcaacagcctggcgctgagctggtcaaacctggcgcttctgtgaagatgagctgcaaagccagcggctacgccttcagcagctactggatcaactggatgaagcagaaacccggccagggactcgaatggatcggccaaatctatcccggcgacggcgacaccaactacaacggcaagttcaagggcagagccacactgaccgccgatacctctagcagcacagcctacatgcagctgagcagcctgaccagcgaagatagcgccgtgtacttctgtgcccggtccatcacaacagtcgtgggctgcgctatggactattggggccagggaacaagcgtgaccgtgtctagtacgcgtaaaattgaagttatgtatcctcctccttacctagacaatgagaagagcaatggaaccattatccatgtgaaaggggcgcgtggcgatattgagaatacctctctggccccagaagatcctacattccccgccgacacatggggaacatatctgctgacaaccgaaaccgggctgcaaaaggaccatgctctgtgggatcataccgctcagaatctgcttcggatggggcttgcattcctggtcctggtggctcttgtctggtttctggtcgaggactggctgtcccggaagagaaccagagaaagagcttccagggccagcacctgggaaggcagacgcagactgaatactcagaccctg

SEQ ID NO: 3294 - DNA, 2952 bp, synthetic construct
  source 1..2952: mol_type = other DNA
atggccttaccagtgaccgccttgctcctgccgctggccttgctgctccacgccgccaggccggacatccagatgacacagagccctagcagcctgtctgccagcgtgggagacagagtgaccatcacatgcaaggccagcgaccacatcaacaactggctggcctggtatcagcagaagcctggacaggcccctaagctgctgatctacggcgctaccacactggaaacaggcgtgcccagcagattttctggcagcggctctggcaccgactacaccctgacaatatccagcctccagcctgaggacttcgccacctactactgtcagcagagctggaacaccccttggacattcggccagggcaccaagctggaaatcaagagactcgagggacagcctaaggccaatcctaccgtgacactgttccctccaagcagcgaagaactccaggccaacaaggccacacttgtgtgcctgatctccgacttctaccctggggctgtgacagtggcttggaaggccgatggatctcctgtgaaagccggcgtggaaaccaccaagccatccaagcagagcaacaacaaatacgccgccagctcctacctgagcctgacacctgagcagtggaagtcccacagatcctacagctgccaagtgacccacgaaggcagcaccgtggaaaagacagtggcccctacagagtgcagcggatcccagagcttcggcctgctggaccccaagctgtgctacctgctggatggcatcctgttcatctacggcgtgatcctgaccgccctgttcctgagagtgaagttcagcagaagcgccgacgcccctgcctaccagcagggacagaaccaactgtacaacgagctgaacctgggcagacgggaagagtacgacgtgctggacaagcggagaggcagggaccctgagatgggcggaaagccccagcggagaaagaacccccaggaaggactgtataacgaactccagaaagacaagatggccgaagcctacagcgagatcggcatgaagggcgagcggagaagaggcaagggccacgatggcctgtaccagggcctgagcaccgccaccaaggacacctatgacgccctgcacatgcaggccctgcctccaagaagggccaagcgatctggatctggagcaacaaacttctcactactcaaacaagcaggtgacgtggaggagaatcccgggcctactagtatggactggatttggcgcatccttttccttgtcggcgctgctaccggcgcgcattccttcgaacaagttcagcttcaacagcctggcgctgagctggtcaaacctggcgcttctgtgaagatgagctgcaaagccagcggctacgccttcagcagctactggatcaactggatgaagcagaaacccggccagggactcgaatggatcggccaaatctatcccggcgacggcgacaccaactacaacggcaagttcaagggcagagccacactgaccgccgatacctctagcagcacagcctacatgcagctgagcagcctgaccagcgaagatagcgccgtgtacttctgtgcccggtccatcacaacagtcgtgggctgcgctatggactattggggccagggaacaagcgtgaccgtgtctagtacgcgtgcctctacaaagggaccctccgtgtttcctctggctcccagcagcaagtctacaagcggaggaacagccgctctgggctgcctggtcaaggattactttcccgagcctgtgaccgtgtcctggaatagcggagcactgacaagcggcgtgcacacctttccagccgtgctgcaaagcagcggcctgtactctctgagcagcgtggtcacagtgcctagctctagcctgggcacccagacctacatctgcaatgtgaaccacaagcctagcaacaccaaggtggacaagagagtggaacccaagagctgtggtaccggcgacatcgagaacaccagtctggcccctgaggaccctacctttcctgccgatacctggggcacctacctgctgaccacagagacaggactccagaaagatcacgccctgtgggaccacacagcccagaacctgctgagaatgggcctcgcctttctggtgctggttgccctcgtgtggttcctggtggaagattggctgagccggaagcggacaagagagagagccagcagagcctctacctgggagggaagaagaaggctgaacacccagacacttagggccaagcgatctggatctggagcaacaaacttctcactactcaaacaagcaggtgacgtggaggagaatcccgggccttctagaggccatatgaccgagtacaagcccacggtgcgcctcgccacccgcgacgacgtccccagggccgtacgcaccctcgccgccgcgttcgccgactaccccgccacgcgccacaccgtcgatccggaccgccacatcgagcgggtcaccgagctgcaagaactcttcctcacgcgcgtcgggctcgacatcggcaaggtgtgggtcgcggacgacggcgccgcggtggcggtctggaccacgccggagagcgtcgaagcgggggcggtgttcgccgagatcggcccgcgcatggccgagttgagcggttcccggctggccgcgcagcaacagatggaaggcctcctggcgccgcaccggcccaaggagcccgcgtggttcctggccaccgtcggcgtctcgcccgaccaccagggcaagggtctgggcagcgccgtcgtgctccccggagtggaggcggccgagcgcgccggggtgcccgccttcctggagacctccgcgccccgcaacctccccttctacgagcggctcggcttcaccgtcaccgccgacgtcgaggtgcccgaaggaccgcgcacctggtgcatgacccgcaagcccggtgcctga

SEQ ID NO: 3295 - DNA, 3150 bp, synthetic construct
  source 1..3150: mol_type = other DNA
atggccttaccagtgaccgccttgctcctgccgctggccttgctgctccacgccgccaggccggacatccagatgacacagagccctagcagcctgtctgccagcgtgggagacagagtgaccatcacatgcaaggccagcgaccacatcaacaactggctggcctggtatcagcagaagcctggacaggcccctaagctgctgatctacggcgctaccacactggaaacaggcgtgcccagcagattttctggcagcggctctggcaccgactacaccctgacaatatccagcctccagcctgaggacttcgccacctactactgtcagcagagctggaacaccccttggacattcggccagggcaccaagctggaaatcaagagactcgagggacagcctaaggccaatcctaccgtgacactgttccctccaagcagcgaagaactccaggccaacaaggccacacttgtgtgcctgatctccgacttctaccctggggctgtgacagtggcttggaaggccgatggatctcctgtgaaagccggcgtggaaaccaccaagccatccaagcagagcaacaacaaatacgccgccagctcctacctgagcctgacacctgagcagtggaagtcccacagatcctacagctgccaagtgacccacgaaggcagcaccgtggaaaagacagtggcccctacagagtgcagcggatcccagagcttcggcctgctggaccccaagctgtgctacctgctggatggcatcctgttcatctacggcgtgatcctgaccgccctgttcctgagagtgaagttcagcagaagcgccgacgcccctgcctaccagcagggacagaaccaactgtacaacgagctgaacctgggcagacgggaagagtacgacgtgctggacaagcggagaggcagggaccctgagatgggcggaaagccccagcggagaaagaacccccaggaaggactgtataacgaactccagaaagacaagatggccgaagcctacagcgagatcggcatgaagggcgagcggagaagaggcaagggccacgatggcctgtaccagggcctgagcaccgccaccaaggacacctatgacgccctgcacatgcaggccctgcctccaagaagggccaagcgatctggatctggagcaacaaacttctcactactcaaacaagcaggtgacgtggaggagaatcccgggcctactagtatggactggatttggcgcatccttttccttgtcggcgctgctaccggcgcgcattccttcgaacaagttcagcttcaacagcctggcgctgagctggtcaaacctggcgcttctgtgaagatgagctgcaaagccagcggctacgccttcagcagctactggatcaactggatgaagcagaaacccggccagggactcgaatggatcggccaaatctatcccggcgacggcgacaccaactacaacggcaagttcaagggcagagccacactgaccgccgatacctctagcagcacagcctacatgcagctgagcagcctgaccagcgaagatagcgccgtgtacttctgtgcccggtccatcacaacagtcgtgggctgcgctatggactattggggccagggaacaagcgtgaccgtgtctagtacgcgtgcctctacaaagggaccctccgtgtttcctctggctcccagcagcaagtctacaagcggaggaacagccgctctgggctgcctggtcaaggattactttcccgagcctgtgaccgtgtcctggaatagcggagcactgacaagcggcgtgcacacctttccagccgtgctgcaaagcagcggcctgtactctctgagcagcgtggtcacagtgcctagctctagcctgggcacccagacctacatctgcaatgtgaaccacaagcctagcaacaccaaggtggacaagagagtggaacccaagagctgtggtaccaagtctgtgcgcttttacctggtcgtcagccctgccagtgcctccactcagacatcttggaccccaagggaccttgtgtcctctcagacacagacacagtcctgcgtgccaccaactgctggcgcaagacaggctccagagtctcccagcacaatccccgtcccttctcagccccagaactccacacttaggccaggaccagctgctccaatcgcactggtcccagtgttctgcggactgctggttgccaagtctctggtgctgagcgcactcctcgtttggtggggcgatatttggtggaaaacgatgatggaattgagatccctcgatacgcagaaagccacatgccaccttcagcaagtcacagacttgccttggaccagcgtcagctctcccgtggaacgggaaattctgtatcatacagtggcccgcaccaagatttccgacgatgacgacgagcacacactgcgcgccaagagaagcggatctggcgtgaagcagaccctgaatttcgacctgctgaagctggctggcgacgtggaatccaacccaggcccttctagaggccatatgaccgagtacaagcccacggtgcgcctcgccacccgcgacgacgtccccagggccgtacgcaccctcgccgccgcgttcgccgactaccccgccacgcgccacaccgtcgatccggaccgccacatcgagcgggtcaccgagctgcaagaactcttcctcacgcgcgtcgggctcgacatcggcaaggtgtgggtcgcggacgacggcgccgcggtggcggtctggaccacgccggagagcgtcgaagcgggggcggtgttcgccgagatcggcccgcgcatggccgagttgagcggttcccggctggccgcgcagcaacagatggaaggcctcctggcgccgcaccggcccaaggagcccgcgtggttcctggccaccgtcggcgtctcgcccgaccaccagggcaagggtctgggcagcgccgtcgtgctccccggagtggaggcggccgagcgcgccggggtgcccgccttcctggagacctccgcgccccgcaacctccccttctacgagcggctcggcttcaccgtcaccgccgacgtcgaggtgcccgaaggaccgcgcacctggtgcatgacccgcaagcccggtgcctga

SEQ ID NO: 3296 - DNA, 2910 bp, synthetic construct
  source 1..2910: mol_type = other DNA
atggccttaccagtgaccgccttgctcctgccgctggccttgctgctccacgccgccaggccggacatccagatgacacagagccctagcagcctgtctgccagcgtgggagacagagtgaccatcacatgcaaggccagcgaccacatcaacaactggctggcctggtatcagcagaagcctggacaggcccctaagctgctgatctacggcgctaccacactggaaacaggcgtgcccagcagattttctggcagcggctctggcaccgactacaccctgacaatatccagcctccagcctgaggacttcgccacctactactgtcagcagagctggaacaccccttggacattcggccagggcaccaagctggaaatcaagagactcgagggacagcctaaggccaatcctaccgtgacactgttccctccaagcagcgaagaactccaggccaacaaggccacacttgtgtgcctgatctccgacttctaccctggggctgtgacagtggcttggaaggccgatggatctcctgtgaaagccggcgtggaaaccaccaagccatccaagcagagcaacaacaaatacgccgccagctcctacctgagcctgacacctgagcagtggaagtcccacagatcctacagctgccaagtgacccacgaaggcagcaccgtggaaaagacagtggcccctacagagtgcagcggatcccagagcttcggcctgctggaccccaagctgtgctacctgctggatggcatcctgttcatctacggcgtgatcctgaccgccctgttcctgagagtgaagttcagcagaagcgccgacgcccctgcctaccagcagggacagaaccaactgtacaacgagctgaacctgggcagacgggaagagtacgacgtgctggacaagcggagaggcagggaccctgagatgggcggaaagccccagcggagaaagaacccccaggaaggactgtataacgaactccagaaagacaagatggccgaagcctacagcgagatcggcatgaagggcgagcggagaagaggcaagggccacgatggcctgtaccagggcctgagcaccgccaccaaggacacctatgacgccctgcacatgcaggccctgcctccaagaagggccaagcgatctggatctggagcaacaaacttctcactactcaaacaagcaggtgacgtggaggagaatcccgggcctactagtatggactggatttggcgcatccttttccttgtcggcgctgctaccggcgcgcattccttcgaacaagttcagcttcaacagcctggcgctgagctggtcaaacctggcgcttctgtgaagatgagctgcaaagccagcggctacgccttcagcagctactggatcaactggatgaagcagaaacccggccagggactcgaatggatcggccaaatctatcccggcgacggcgacaccaactacaacggcaagttcaagggcagagccacactgaccgccgatacctctagcagcacagcctacatgcagctgagcagcctgaccagcgaagatagcgccgtgtacttctgtgcccggtccatcacaacagtcgtgggctgcgctatggactattggggccagggaacaagcgtgaccgtgtctagtacgcgtgcctctacaaagggaccctccgtgtttcctctggctcccagcagcaagtctacaagcggaggaacagccgctctgggctgcctggtcaaggattactttcccgagcctgtgaccgtgtcctggaatagcggagcactgacaagcggcgtgcacacctttccagccgtgctgcaaagcagcggcctgtactctctgagcagcgtggtcacagtgcctagctctagcctgggcacccagacctacatctgcaatgtgaaccacaagcctagcaacaccaaggtggacaagagagtggaacccaagagctgtggtaccgtggtcgagaaagaacatccacagcttggcgctggcaccgtcctgttgcttagagccggattctatgccgtcagcttcctgtccgtggctgtggggtctacagtgtattaccagggaaaatgtctcacctggaaaggccccagacgccagcttccagctgttgttcctgctccactgccaccaccttgtggctcctctgctcacttgcttccaccagtgcctggcggacgcgccaagagaagcggatctggcgtgaagcagaccctgaatttcgacctgctgaagctggctggcgacgtggaatccaacccaggcccttctagaggccatatgaccgagtacaagcccacggtgcgcctcgccacccgcgacgacgtccccagggccgtacgcaccctcgccgccgcgttcgccgactaccccgccacgcgccacaccgtcgatccggaccgccacatcgagcgggtcaccgagctgcaagaactcttcctcacgcgcgtcgggctcgacatcggcaaggtgtgggtcgcggacgacggcgccgcggtggcggtctggaccacgccggagagcgtcgaagcgggggcggtgttcgccgagatcggcccgcgcatggccgagttgagcggttcccggctggccgcgcagcaacagatggaaggcctcctggcgccgcaccggcccaaggagcccgcgtggttcctggccaccgtcggcgtctcgcccgaccaccagggcaagggtctgggcagcgccgtcgtgctccccggagtggaggcggccgagcgcgccggggtgcccgccttcctggagacctccgcgccccgcaacctccccttctacgagcggctcggcttcaccgtcaccgccgacgtcgaggtgcccgaaggaccgcgcacctggtgcatgacccgcaagcccggtgcctga

SEQ ID NO: 3297 - DNA, 2997 bp, synthetic construct
  source 1..2997: mol_type = other DNA
atggccttaccagtgaccgccttgctcctgccgctggccttgctgctccacgccgccaggccggacatccagatgacacagagccctagcagcctgtctgccagcgtgggagacagagtgaccatcacatgcaaggccagcgaccacatcaacaactggctggcctggtatcagcagaagcctggacaggcccctaagctgctgatctacggcgctaccacactggaaacaggcgtgcccagcagattttctggcagcggctctggcaccgactacaccctgacaatatccagcctccagcctgaggacttcgccacctactactgtcagcagagctggaacaccccttggacattcggccagggcaccaagctggaaatcaagagactcgaggacctgaagaacgtgttcccacctgaggtggccgtgttcgagcctagcgaggccgagatcagccacacccagaaagccaccctcgtgtgcctggctaccggcttctaccccgaccatgtggaactgtcttggtgggtcaacggcaaagaggtgcacagcggcgtgtctaccgacccccagccactgaaagaacagcccgccctgaacgacagccggtactgcctgagcagcagactgagagtgtccgccaccttctggcagaacccccggaaccacttcagatgccaggtgcagttctacggcctgagcgagaacgacgagtggacccaggacagagccaagcccgtgacccagatcgtgtctgccgaagcctggggcagagccgattgcggatcccagagcttcggcctgctggaccccaagctgtgctacctgctggatggcatcctgttcatctacggcgtgatcctgaccgccctgttcctgagagtgaagttcagcagaagcgccgacgcccctgcctaccagcagggacagaaccaactgtacaacgagctgaacctgggcagacgggaagagtacgacgtgctggacaagcggagaggcagggaccctgagatgggcggaaagccccagcggagaaagaacccccaggaaggactgtataacgaactccagaaagacaagatggccgaagcctacagcgagatcggcatgaagggcgagcggagaagaggcaagggccacgatggcctgtaccagggcctgagcaccgccaccaaggacacctatgacgccctgcacatgcaggccctgcctccaagaagggccaagcgatctggatctggagcaacaaacttctcactactcaaacaagcaggtgacgtggaggagaatcccgggcctactagtatggactggatttggcgcatccttttccttgtcggcgctgctaccggcgcgcattccttcgaacaagttcagcttcaacagcctggcgctgagctggtcaaacctggcgcttctgtgaagatgagctgcaaagccagcggctacgccttcagcagctactggatcaactggatgaagcagaaacccggccagggactcgaatggatcggccaaatctatcccggcgacggcgacaccaactacaacggcaagttcaagggcagagccacactgaccgccgatacctctagcagcacagcctacatgcagctgagcagcctgaccagcgaagatagcgccgtgtacttctgtgcccggtccatcacaacagtcgtgggctgcgctatggactattggggccagggaacaagcgtgaccgtgtctagtacgcgtatccagaaccctgatcctgccgtgtaccagctgcgggatagcaagagcagcgacaagagcgtgtgtctgttcaccgacttcgacagccagaccaacgtgtcccagagcaaggactccgacgtgtacatcaccgataagaccgtgctggacatgcggagcatggacttcaagagcaactccgccgtggcctggtccaacaagtccgatttcgcctgcgccaacgccttcaacaacagcattatccccgaggacacattcttcccaagccccgagagcagctgcggtaccggcgacatcgagaacaccagtctggcccctgaggaccctacctttcctgccgatacctggggcacctacctgctgaccacagagacaggactccagaaagatcacgccctgtgggaccacacagcccagaacctgctgagaatgggcctcgcctttctggtgctggttgccctcgtgtggttcctggtggaagattggctgagccggaagcggacaagagagagagccagcagagcctctacctgggagggaagaagaaggctgaacacccagacacttagggccaagcgatctggatctggagcaacaaacttctcactactcaaacaagcaggtgacgtggaggagaatcccgggccttctagaggccatatgaccgagtacaagcccacggtgcgcctcgccacccgcgacgacgtccccagggccgtacgcaccctcgccgccgcgttcgccgactaccccgccacgcgccacaccgtcgatccggaccgccacatcgagcgggtcaccgagctgcaagaactcttcctcacgcgcgtcgggctcgacatcggcaaggtgtgggtcgcggacgacggcgccgcggtggcggtctggaccacgccggagagcgtcgaagcgggggcggtgttcgccgagatcggcccgcgcatggccgagttgagcggttcccggctggccgcgcagcaacagatggaaggcctcctggcgccgcaccggcccaaggagcccgcgtggttcctggccaccgtcggcgtctcgcccgaccaccagggcaagggtctgggcagcgccgtcgtgctccccggagtggaggcggccgagcgcgccggggtgcccgccttcctggagacctccgcgccccgcaacctccccttctacgagcggctcggcttcaccgtcaccgccgacgtcgaggtgcccgaaggaccgcgcacctggtgcatgacccgcaagcccggtgcctga

SEQ ID NO: 3298 - DNA, 3195 bp, synthetic construct
  source 1..3195: mol_type = other DNA
atggccttaccagtgaccgccttgctcctgccgctggccttgctgctccacgccgccaggccggacatccagatgacacagagccctagcagcctgtctgccagcgtgggagacagagtgaccatcacatgcaaggccagcgaccacatcaacaactggctggcctggtatcagcagaagcctggacaggcccctaagctgctgatctacggcgctaccacactggaaacaggcgtgcccagcagattttctggcagcggctctggcaccgactacaccctgacaatatccagcctccagcctgaggacttcgccacctactactgtcagcagagctggaacaccccttggacattcggccagggcaccaagctggaaatcaagagactcgaggacctgaagaacgtgttcccacctgaggtggccgtgttcgagcctagcgaggccgagatcagccacacccagaaagccaccctcgtgtgcctggctaccggcttctaccccgaccatgtggaactgtcttggtgggtcaacggcaaagaggtgcacagcggcgtgtctaccgacccccagccactgaaagaacagcccgccctgaacgacagccggtactgcctgagcagcagactgagagtgtccgccaccttctggcagaacccccggaaccacttcagatgccaggtgcagttctacggcctgagcgagaacgacgagtggacccaggacagagccaagcccgtgacccagatcgtgtctgccgaagcctggggcagagccgattgcggatcccagagcttcggcctgctggaccccaagctgtgctacctgctggatggcatcctgttcatctacggcgtgatcctgaccgccctgttcctgagagtgaagttcagcagaagcgccgacgcccctgcctaccagcagggacagaaccaactgtacaacgagctgaacctgggcagacgggaagagtacgacgtgctggacaagcggagaggcagggaccctgagatgggcggaaagccccagcggagaaagaacccccaggaaggactgtataacgaactccagaaagacaagatggccgaagcctacagcgagatcggcatgaagggcgagcggagaagaggcaagggccacgatggcctgtaccagggcctgagcaccgccaccaaggacacctatgacgccctgcacatgcaggccctgcctccaagaagggccaagcgatctggatctggagcaacaaacttctcactactcaaacaagcaggtgacgtggaggagaatcccgggcctactagtatggactggatttggcgcatccttttccttgtcggcgctgctaccggcgcgcattccttcgaacaagttcagcttcaacagcctggcgctgagctggtcaaacctggcgcttctgtgaagatgagctgcaaagccagcggctacgccttcagcagctactggatcaactggatgaagcagaaacccggccagggactcgaatggatcggccaaatctatcccggcgacggcgacaccaactacaacggcaagttcaagggcagagccacactgaccgccgatacctctagcagcacagcctacatgcagctgagcagcctgaccagcgaagatagcgccgtgtacttctgtgcccggtccatcacaacagtcgtgggctgcgctatggactattggggccagggaacaagcgtgaccgtgtctagtacgcgtatccagaaccctgatcctgccgtgtaccagctgcgggatagcaagagcagcgacaagagcgtgtgtctgttcaccgacttcgacagccagaccaacgtgtcccagagcaaggactccgacgtgtacatcaccgataagaccgtgctggacatgcggagcatggacttcaagagcaactccgccgtggcctggtccaacaagtccgatttcgcctgcgccaacgccttcaacaacagcattatccccgaggacacattcttcccaagccccgagagcagctgcggtaccaagtctgtgcgcttttacctggtcgtcagccctgccagtgcctccactcagacatcttggaccccaagggaccttgtgtcctctcagacacagacacagtcctgcgtgccaccaactgctggcgcaagacaggctccagagtctcccagcacaatccccgtcccttctcagccccagaactccacacttaggccaggaccagctgctccaatcgcactggtcccagtgttctgcggactgctggttgccaagtctctggtgctgagcgcactcctcgtttggtggggcgatatttggtggaaaacgatgatggaattgagatccctcgatacgcagaaagccacatgccaccttcagcaagtcacagacttgccttggaccagcgtcagctctcccgtggaacgggaaattctgtatcatacagtggcccgcaccaagatttccgacgatgacgacgagcacacactgcgcgccaagagaagcggatctggcgtgaagcagaccctgaatttcgacctgctgaagctggctggcgacgtggaatccaacccaggcccttctagaggccatatgaccgagtacaagcccacggtgcgcctcgccacccgcgacgacgtccccagggccgtacgcaccctcgccgccgcgttcgccgactaccccgccacgcgccacaccgtcgatccggaccgccacatcgagcgggtcaccgagctgcaagaactcttcctcacgcgcgtcgggctcgacatcggcaaggtgtgggtcgcggacgacggcgccgcggtggcggtctggaccacgccggagagcgtcgaagcgggggcggtgttcgccgagatcggcccgcgcatggccgagttgagcggttcccggctggccgcgcagcaacagatggaaggcctcctggcgccgcaccggcccaaggagcccgcgtggttcctggccaccgtcggcgtctcgcccgaccaccagggcaagggtctgggcagcgccgtcgtgctccccggagtggaggcggccgagcgcgccggggtgcccgccttcctggagacctccgcgccccgcaacctccccttctacgagcggctcggcttcaccgtcaccgccgacgtcgaggtgcccgaaggaccgcgcacctggtgcatgacccgcaagcccggtgcctga

SEQ ID NO: 3299 - DNA, 2955 bp, synthetic construct
  source 1..2955: mol_type = other DNA
atggccttaccagtgaccgccttgctcctgccgctggccttgctgctccacgccgccaggccggacatccagatgacacagagccctagcagcctgtctgccagcgtgggagacagagtgaccatcacatgcaaggccagcgaccacatcaacaactggctggcctggtatcagcagaagcctggacaggcccctaagctgctgatctacggcgctaccacactggaaacaggcgtgcccagcagattttctggcagcggctctggcaccgactacaccctgacaatatccagcctccagcctgaggacttcgccacctactactgtcagcagagctggaacaccccttggacattcggccagggcaccaagctggaaatcaagagactcgaggacctgaagaacgtgttcccacctgaggtggccgtgttcgagcctagcgaggccgagatcagccacacccagaaagccaccctcgtgtgcctggctaccggcttctaccccgaccatgtggaactgtcttggtgggtcaacggcaaagaggtgcacagcggcgtgtctaccgacccccagccactgaaagaacagcccgccctgaacgacagccggtactgcctgagcagcagactgagagtgtccgccaccttctggcagaacccccggaaccacttcagatgccaggtgcagttctacggcctgagcgagaacgacgagtggacccaggacagagccaagcccgtgacccagatcgtgtctgccgaagcctggggcagagccgattgcggatcccagagcttcggcctgctggaccccaagctgtgctacctgctggatggcatcctgttcatctacggcgtgatcctgaccgccctgttcctgagagtgaagttcagcagaagcgccgacgcccctgcctaccagcagggacagaaccaactgtacaacgagctgaacctgggcagacgggaagagtacgacgtgctggacaagcggagaggcagggaccctgagatgggcggaaagccccagcggagaaagaacccccaggaaggactgtataacgaactccagaaagacaagatggccgaagcctacagcgagatcggcatgaagggcgagcggagaagaggcaagggccacgatggcctgtaccagggcctgagcaccgccaccaaggacacctatgacgccctgcacatgcaggccctgcctccaagaagggccaagcgatctggatctggagcaacaaacttctcactactcaaacaagcaggtgacgtggaggagaatcccgggcctactagtatggactggatttggcgcatccttttccttgtcggcgctgctaccggcgcgcattccttcgaacaagttcagcttcaacagcctggcgctgagctggtcaaacctggcgcttctgtgaagatgagctgcaaagccagcggctacgccttcagcagctactggatcaactggatgaagcagaaacccggccagggactcgaatggatcggccaaatctatcccggcgacggcgacaccaactacaacggcaagttcaagggcagagccacactgaccgccgatacctctagcagcacagcctacatgcagctgagcagcctgaccagcgaagatagcgccgtgtacttctgtgcccggtccatcacaacagtcgtgggctgcgctatggactattggggccagggaacaagcgtgaccgtgtctagtacgcgtatccagaaccctgatcctgccgtgtaccagctgcgggatagcaagagcagcgacaagagcgtgtgtctgttcaccgacttcgacagccagaccaacgtgtcccagagcaaggactccgacgtgtacatcaccgataagaccgtgctggacatgcggagcatggacttcaagagcaactccgccgtggcctggtccaacaagtccgatttcgcctgcgccaacgccttcaacaacagcattatccccgaggacacattcttcccaagccccgagagcagctgcggtaccgtggtcgagaaagaacatccacagcttggcgctggcaccgtcctgttgcttagagccggattctatgccgtcagcttcctgtccgtggctgtggggtctacagtgtattaccagggaaaatgtctcacctggaaaggccccagacgccagcttccagctgttgttcctgctccactgccaccaccttgtggctcctctgctcacttgcttccaccagtgcctggcggacgcgccaagagaagcggatctggcgtgaagcagaccctgaatttcgacctgctgaagctggctggcgacgtggaatccaacccaggcccttctagaggccatatgaccgagtacaagcccacggtgcgcctcgccacccgcgacgacgtccccagggccgtacgcaccctcgccgccgcgttcgccgactaccccgccacgcgccacaccgtcgatccggaccgccacatcgagcgggtcaccgagctgcaagaactcttcctcacgcgcgtcgggctcgacatcggcaaggtgtgggtcgcggacgacggcgccgcggtggcggtctggaccacgccggagagcgtcgaagcgggggcggtgttcgccgagatcggcccgcgcatggccgagttgagcggttcccggctggccgcgcagcaacagatggaaggcctcctggcgccgcaccggcccaaggagcccgcgtggttcctggccaccgtcggcgtctcgcccgaccaccagggcaagggtctgggcagcgccgtcgtgctccccggagtggaggcggccgagcgcgccggggtgcccgccttcctggagacctccgcgccccgcaacctccccttctacgagcggctcggcttcaccgtcaccgccgacgtcgaggtgcccgaaggaccgcgcacctggtgcatgacccgcaagcccggtgcctga

SEQ ID NO: 3300 - DNA, 2868 bp, synthetic construct
  source 1..2868: mol_type = other DNA
atggccttaccagtgaccgccttgctcctgccgctggccttgctgctccacgccgccaggccggacatccagatgacacagagccctagcagcctgtctgccagcgtgggagacagagtgaccatcacatgcaaggccagcgaccacatcaacaactggctggcctggtatcagcagaagcctggacaggcccctaagctgctgatctacggcgctaccacactggaaacaggcgtgcccagcagattttctggcagcggctctggcaccgactacaccctgacaatatccagcctccagcctgaggacttcgccacctactactgtcagcagagctggaacaccccttggacattcggccagggcaccaagctggaaatcaagagactcgagggacagcctaaggccaatcctaccgtgacactgttccctccaagcagcgaagaactccaggccaacaaggccacacttgtgtgcctgatctccgacttctaccctggggctgtgacagtggcttggaaggccgatggatctcctgtgaaagccggcgtggaaaccaccaagccatccaagcagagcaacaacaaatacgccgccagctcctacctgagcctgacacctgagcagtggaagtcccacagatcctacagctgccaagtgacccacgaaggcagcaccgtggaaaagacagtggcccctacagagtgcagcggatcccagagcttcggcctgctggaccccaagctgtgctacctgctggatggcatcctgttcatctacggcgtgatcctgaccgccctgttcctgagagtgaagttcagcagaagcgccgacgcccctgcctaccagcagggacagaaccaactgtacaacgagctgaacctgggcagacgggaagagtacgacgtgctggacaagcggagaggcagggaccctgagatgggcggaaagccccagcggagaaagaacccccaggaaggactgtataacgaactccagaaagacaagatggccgaagcctacagcgagatcggcatgaagggcgagcggagaagaggcaagggccacgatggcctgtaccagggcctgagcaccgccaccaaggacacctatgacgccctgcacatgcaggccctgcctccaagaagggccaagcgatctggatctggagcaacaaacttctcactactcaaacaagcaggtgacgtggaggagaatcccgggcctactagtatggactggatttggcgcatccttttccttgtcggcgctgctaccggcgcgcattccttcgaacaagttcagcttcaacagcctggcgctgagctggtcaaacctggcgcttctgtgaagatgagctgcaaagccagcggctacgccttcagcagctactggatcaactggatgaagcagaaacccggccagggactcgaatggatcggccaaatctatcccggcgacggcgacaccaactacaacggcaagttcaagggcagagccacactgaccgccgatacctctagcagcacagcctacatgcagctgagcagcctgaccagcgaagatagcgccgtgtacttctgtgcccggtccatcacaacagtcgtgggctgcgctatggactattggggccagggaacaagcgtgaccgtgtctagtacgcgtgcctctacaaagggaccctccgtgtttcctctggctcccagcagcaagtctacaagcggaggaacagccgctctgggctgcctggtcaaggattactttcccgagcctgtgaccgtgtcctggaatagcggagcactgacaagcggcgtgcacacctttccagccgtgctgcaaagcagcggcctgtactctctgagcagcgtggtcacagtgcctagctctagcctgggcacccagacctacatctgcaatgtgaaccacaagcctagcaacaccaaggtggacaagagagtggaacccaagagctgtggtaccatcactcaaggtttggcagtgtcaaccatctcatcattctttccacctggctaccaagtgtccttctgcctggtcatggtgctgctgttcgccgtggataccggcctgtacttcagcgtcaagaccaacatccggtccagcaccagagactggaaggaccacaagttcaagtggcggaaggaccctcaggacaagagggccaagcgatctggatctggagcaacaaacttctcactactcaaacaagcaggtgacgtggaggagaatcccgggccttctagaggccatatgaccgagtacaagcccacggtgcgcctcgccacccgcgacgacgtccccagggccgtacgcaccctcgccgccgcgttcgccgactaccccgccacgcgccacaccgtcgatccggaccgccacatcgagcgggtcaccgagctgcaagaactcttcctcacgcgcgtcgggctcgacatcggcaaggtgtgggtcgcggacgacggcgccgcggtggcggtctggaccacgccggagagcgtcgaagcgggggcggtgttcgccgagatcggcccgcgcatggccgagttgagcggttcccggctggccgcgcagcaacagatggaaggcctcctggcgccgcaccggcccaaggagcccgcgtggttcctggccaccgtcggcgtctcgcccgaccaccagggcaagggtctgggcagcgccgtcgtgctccccggagtggaggcggccgagcgcgccggggtgcccgccttcctggagacctccgcgccccgcaacctccccttctacgagcggctcggcttcaccgtcaccgccgacgtcgaggtgcccgaaggaccgcgcacctggtgcatgacccgcaagcccggtgcctga

SEQ ID NO: 3301 - DNA, 2913 bp, synthetic construct
  source 1..2913: mol_type = other DNA
atggccttaccagtgaccgccttgctcctgccgctggccttgctgctccacgccgccaggccggacatccagatgacacagagccctagcagcctgtctgccagcgtgggagacagagtgaccatcacatgcaaggccagcgaccacatcaacaactggctggcctggtatcagcagaagcctggacaggcccctaagctgctgatctacggcgctaccacactggaaacaggcgtgcccagcagattttctggcagcggctctggcaccgactacaccctgacaatatccagcctccagcctgaggacttcgccacctactactgtcagcagagctggaacaccccttggacattcggccagggcaccaagctggaaatcaagagactcgaggacctgaagaacgtgttcccacctgaggtggccgtgttcgagcctagcgaggccgagatcagccacacccagaaagccaccctcgtgtgcctggctaccggcttctaccccgaccatgtggaactgtcttggtgggtcaacggcaaagaggtgcacagcggcgtgtctaccgacccccagccactgaaagaacagcccgccctgaacgacagccggtactgcctgagcagcagactgagagtgtccgccaccttctggcagaacccccggaaccacttcagatgccaggtgcagttctacggcctgagcgagaacgacgagtggacccaggacagagccaagcccgtgacccagatcgtgtctgccgaagcctggggcagagccgattgcggatcccagagcttcggcctgctggaccccaagctgtgctacctgctggatggcatcctgttcatctacggcgtgatcctgaccgccctgttcctgagagtgaagttcagcagaagcgccgacgcccctgcctaccagcagggacagaaccaactgtacaacgagctgaacctgggcagacgggaagagtacgacgtgctggacaagcggagaggcagggaccctgagatgggcggaaagccccagcggagaaagaacccccaggaaggactgtataacgaactccagaaagacaagatggccgaagcctacagcgagatcggcatgaagggcgagcggagaagaggcaagggccacgatggcctgtaccagggcctgagcaccgccaccaaggacacctatgacgccctgcacatgcaggccctgcctccaagaagggccaagcgatctggatctggagcaacaaacttctcactactcaaacaagcaggtgacgtggaggagaatcccgggcctactagtatggactggatttggcgcatccttttccttgtcggcgctgctaccggcgcgcattccttcgaacaagttcagcttcaacagcctggcgctgagctggtcaaacctggcgcttctgtgaagatgagctgcaaagccagcggctacgccttcagcagctactggatcaactggatgaagcagaaacccggccagggactcgaatggatcggccaaatctatcccggcgacggcgacaccaactacaacggcaagttcaagggcagagccacactgaccgccgatacctctagcagcacagcctacatgcagctgagcagcctgaccagcgaagatagcgccgtgtacttctgtgcccggtccatcacaacagtcgtgggctgcgctatggactattggggccagggaacaagcgtgaccgtgtctagtacgcgtatccagaaccctgatcctgccgtgtaccagctgcgggatagcaagagcagcgacaagagcgtgtgtctgttcaccgacttcgacagccagaccaacgtgtcccagagcaaggactccgacgtgtacatcaccgataagaccgtgctggacatgcggagcatggacttcaagagcaactccgccgtggcctggtccaacaagtccgatttcgcctgcgccaacgccttcaacaacagcattatccccgaggacacattcttcccaagccccgagagcagctgcggtaccatcactcaaggtttggcagtgtcaaccatctcatcattctttccacctggctaccaagtgtccttctgcctggtcatggtgctgctgttcgccgtggataccggcctgtacttcagcgtcaagaccaacatccggtccagcaccagagactggaaggaccacaagttcaagtggcggaaggaccctcaggacaagagggccaagcgatctggatctggagcaacaaacttctcactactcaaacaagcaggtgacgtggaggagaatcccgggccttctagaggccatatgaccgagtacaagcccacggtgcgcctcgccacccgcgacgacgtccccagggccgtacgcaccctcgccgccgcgttcgccgactaccccgccacgcgccacaccgtcgatccggaccgccacatcgagcgggtcaccgagctgcaagaactcttcctcacgcgcgtcgggctcgacatcggcaaggtgtgggtcgcggacgacggcgccgcggtggcggtctggaccacgccggagagcgtcgaagcgggggcggtgttcgccgagatcggcccgcgcatggccgagttgagcggttcccggctggccgcgcagcaacagatggaaggcctcctggcgccgcaccggcccaaggagcccgcgtggttcctggccaccgtcggcgtctcgcccgaccaccagggcaagggtctgggcagcgccgtcgtgctccccggagtggaggcggccgagcgcgccggggtgcccgccttcctggagacctccgcgccccgcaacctccccttctacgagcggctcggcttcaccgtcaccgccgacgtcgaggtgcccgaaggaccgcgcacctggtgcatgacccgcaagcccggtgcctga

SEQ ID NO: 3302 - DNA, 1962 bp, synthetic construct; identical to SEQ ID NO: 1001
  source 1..1962: mol_type = other DNA

SEQ ID NO: 3303 - DNA, 1500 bp, synthetic construct
  source 1..1500: mol_type = other DNA
atggccttaccagtgaccgccttgctcctgccgctggccttgctgctccacgccgccaggccggacattgtgctgacacagtctcccgccagcctggccgtttctctgggacagagagccaccatcagctgtagagccagcaagagcgtgtccaccagcggctactcttacctgcactggtatcagcagaagcccggccagcctcctaagctgctgatctacctggcctccaacctggaaagcggagtgcctgccagattttctggctctggcagcggcaccgacttcaccctgaatatccatcctgtggaagaagaggacgccgccacctactactgccagcacagtagagagctgcccttcacatttggctccggcaccaagctggaaatcaagggcggaggcggaagtggaggcggaggatctggcggcggaggctctcaggtgcagctggttgaatctggcggaggactggttcagcctggcggatctctgaagctgtcttgtgccgccagcggcttcgacttcagcagatactggatgagctgggtccgacaggcccctggcaaaggactggaatggatcggcgagatcaaccccaccagcagcaccatcaacttcacccctagcctgaaggacaaggtgttcatcagccgggacaacgccaagaacaccctgtacctccagatgagcaaagtgcggagcgaggacacagccctgtactactgtgccagaggcaactactacagatacggcgacgctatggactactggggccagggaacaagcgtgacagtctcttctacgcgtgagcagaaactgatctcggaagaggatctgaaaattgaagttatgtatcctcctccttacctagacaatgagaagagcaatggaaccattatccatgtgaaagggaaacacctttgtccaagtcccctatttcccggaccttctaagcccttttgggtgctggtggtggttgggggagtcctggcttgctatagcttgctagtaacagtggcctttattattttctgggtgaggagtaagaggagcaggctcctgcacagtgactacatgaacatgactccacgccgccccggacccacccgcaagcattaccagccctatgccccaccacgcgacttcgcagcctatcgctccagagtgaagttcagcaggagcgcagacgcccccgcgtaccagcagggccagaaccagctctataacgagctcaatctaggacgaagagaggagtacgatgttttggacaagagacgtggccgggaccctgagatggggggaaagccgagaaggaagaaccctcaggaaggcctgtacaatgaactgcagaaagataagatggcggaggcctacagtgagattgggatgaaaggcgagcgccggaggggcaaggggcacgatggcctttaccagggtctcagtacagccaccaaggacacctacgacgcccttcacatgcaggccctgccccctcgc

SEQ ID NO: 3304 - DNA, 1521 bp, synthetic construct
  source 1..1521: mol_type = other DNA
atggccttaccagtgaccgccttgctcctgccgctggccttgctgctccacgccgccaggccggacattgtgctgacacagtctcccgccagcctggccgtttctctgggacagagagccaccatcagctgtagagccagcaagagcgtgtccaccagcggctactcttacctgcactggtatcagcagaagcccggccagcctcctaagctgctgatctacctggcctccaacctggaaagcggagtgcctgccagattttctggctctggcagcggcaccgacttcaccctgaatatccatcctgtggaagaagaggacgccgccacctactactgccagcacagtagagagctgcccttcacatttggctccggcaccaagctggaaatcaagggcggaggcggaagtggaggcggaggatctggcggcggaggctctcaggtgcagctggttgaatctggcggaggactggttcagcctggcggatctctgaagctgtcttgtgccgccagcggcttcgacttcagcagatactggatgagctgggtccgacaggcccctggcaaaggactggaatggatcggcgagatcaaccccaccagcagcaccatcaacttcacccctagcctgaaggacaaggtgttcatcagccgggacaacgccaagaacaccctgtacctccagatgagcaaagtgcggagcgaggacacagccctgtactactgtgccagaggcaactactacagatacggcgacgctatggactactggggccagggaacaagcgtgacagtctcttctacgcgtgagcagaaactgatctcggaagaggatctggcgaagcccaccacgacgccagcgccgcgaccaccaacaccggcgcccaccatcgcgtcgcagcccctgtccctgcgcccagaggcgtgccggccagcggcggggggcgcagtgcacacgagggggctggacttcgcctgtgacatctacatctgggcgcccttggccgggacttgtggggtccttctcctgtcactggttatcaccctttactgcaaacggggcagaaagaaactcctgtatatattcaaacaaccatttatgagaccagtacaaactactcaagaggaagatggctgtagctgccgatttccagaagaagaagaaggaggatgtgaactgagagtgaagttcagcaggagcgcagacgcccccgcgtaccagcagggccagaaccagctctataacgagctgaatctaggacgaagagaggagtacgatgttttggacaagagacgtggccgggaccctgagatggggggaaagccgagaaggaagaaccctcaggaaggcctgtacaatgaactgcagaaagataagatggcggaggcctacagtgagattgggatgaaaggcgagcgccggaggggcaaggggcacgatggcctttaccagggtctcagtacagccaccaaggacacctacgacgcccttcacatgcaggccctgccccctcgctga

SEQ ID NO: 3305 - DNA, 1521 bp, synthetic construct
  source 1..1521: mol_type = other DNA
atggccttaccagtgaccgccttgctcctgccgctggccttgctgctccacgccgccaggccgcaggtgcagctggttgaatctggcggaggactggttcagcctggcggatctctgaagctgtcttgtgccgccagcggcttcgacttcagcagatactggatgagctgggtccgacaggcccctggcaaaggactggaatggatcggcgagatcaaccccaccagcagcaccatcaacttcacccctagcctgaaggacaaggtgttcatcagccgggacaacgccaagaacaccctgtacctccagatgagcaaagtgcggagcgaggacacagccctgtactactgtgccagaggcaactactacagatacggcgacgctatggactactggggccagggaacaagcgtgacagtctcttctggcggaggcggaagtggaggcggaggatctggcggcggaggctctgacattgtgctgacacagtctcccgccagcctggccgtttctctgggacagagagccaccatcagctgtagagccagcaagagcgtgtccaccagcggctactcttacctgcactggtatcagcagaagcccggccagcctcctaagctgctgatctacctggcctccaacctggaaagcggagtgcctgccagattttctggctctggcagcggcaccgacttcaccctgaatatccatcctgtggaagaagaggacgccgccacctactactgccagcacagtagagagctgcccttcacatttggctccggcaccaagctggaaatcaagacgcgtgagcagaaactgatctcggaagaggatctggcgaagcccaccacgacgccagcgccgcgaccaccaacaccggcgcccaccatcgcgtcgcagcccctgtccctgcgcccagaggcgtgccggccagcggcggggggcgcagtgcacacgagggggctggacttcgcctgtgacatctacatctgggcgcccttggccgggacttgtggggtccttctcctgtcactggttatcaccctttactgcaaacggggcagaaagaaactcctgtatatattcaaacaaccatttatgagaccagtacaaactactcaagaggaagatggctgtagctgccgatttccagaagaagaagaaggaggatgtgaactgagagtgaagttcagcaggagcgcagacgcccccgcgtaccagcagggccagaaccagctctataacgagctgaatctaggacgaagagaggagtacgatgttttggacaagagacgtggccgggaccctgagatggggggaaagccgagaaggaagaaccctcaggaaggcctgtacaatgaactgcagaaagataagatggcggaggcctacagtgagattgggatgaaaggcgagcgccggaggggcaaggggcacgatggcctttaccagggtctcagtacagccaccaaggacacctacgacgcccttcacatgcaggccctgccccctcgctga

SEQ ID NO: 3306 - DNA, 2760 bp, synthetic construct
  source 1..2760: mol_type = other DNA
atggccttaccagtgaccgccttgctcctgccgctggccttgctgctccacgccgccaggccggacattgtgctgacacagtctcccgccagcctggccgtttctctgggacagagagccaccatcagctgtagagccagcaagagcgtgtccaccagcggctactcttacctgcactggtatcagcagaagcccggccagcctcctaagctgctgatctacctggcctccaacctggaaagcggagtgcctgccagattttctggctctggcagcggcaccgacttcaccctgaatatccatcctgtggaagaagaggacgccgccacctactactgccagcacagtagagagctgcccttcacatttggctccggcaccaagctggaaatcaagggcggaggcggaagtggaggcggaggatctggcggcggaggctctcaggtgcagctggttgaatctggcggaggactggttcagcctggcggatctctgaagctgtcttgtgccgccagcggcttcgacttcagcagatactggatgagctgggtccgacaggcccctggcaaaggactggaatggatcggcgagatcaaccccaccagcagcaccatcaacttcacccctagcctgaaggacaaggtgttcatcagccgggacaacgccaagaacaccctgtacctccagatgagcaaagtgcggagcgaggacacagccctgtactactgtgccagaggcaactactacagatacggcgacgctatggactactggggccagggaacaagcgtgacagtctcttctacgcgtgagcagaaactgatctcggaagaggatctggcgaagcccaccacgacgccagcgccgcgaccaccaacaccggcgcccaccatcgcgtcgcagcccctgtccctgcgcccagaggcgtgccggccagcggcggggggcgcagtgcacacgagggggctggacttcgcctgtgacatctacatctgggcgcccttggccgggacttgtggggtccttctcctgtcactggttatcaccctttactgcgggcgcgccagagtgaagttcagcaggagcgcagacgcccccgcgtaccagcagggccagaaccagctctataacgagctgaatctaggacgaagagaggagtacgatgttttggacaagagacgtggccgggaccctgagatggggggaaagccgagaaggaagaaccctcaggaaggcctgtacaatgaactgcagaaagataagatggcggaggcctacagtgagattgggatgaaaggcgagcgccggaggggcaaggggcacgatggcctttaccagggtctcagtacagccaccaaggacacctacgacgcccttcacatgcaggccctgccccctcgctctagaggatctggagcaacaaacttctcactactcaaacaagcaggtgacgtggaggagaatcccgggcctgggatccacatggccacttacgaggttctctgtgaggtggcgcggaaactgggcacggatgacagggaagtggtattgttcctcctaaacgtgttcatacctcaacccacactggcccaattaattggagctcttagagctttaaaggaggagggcaggttaacgtttcccctgttagcggaatgtctgtttcgtgcaggtcgcagagacctcttgcgcgacctgcttcacttagacccgcgttttttagagcgccacctagcgggcacaatgagttatttcagcccttatcagctcactgttctccacgtagacggggagctgtgtgcgagggatattaggtctttgatatttttaagcaaggacactatagggtctcgcagcacaccacagacattcttacactgggtgtactgtatggaaaacttagacctactgggtcccactgacgtggatgccctaatgtcaatgcttagatctttgtcaagagtagacctacagcgccaagtgcaaaccctaatgggccttcacctttccggcccatcacactcccaacactatcgccatacaccactcgagaccgatttctacgactacaaggacgacgatgacaagactagtggctccggcgagggcagaggaagtctactaacctgcggagatgtggaagaaaatcctggcccacatatgaccgagtacaagcccacggtgcgcctcgccacccgcgacgacgtccccagggccgtacgcaccctcgccgccgcgttcgccgactaccccgccacgcgccacaccgtcgatccggaccgccacatcgagcgggtcaccgagctgcaagaactcttcctcacgcgcgtcgggctcgacatcggcaaggtgtgggtcgcggacgacggcgccgcggtggcggtctggaccacgccggagagcgtcgaagcgggggcggtgttcgccgagatcggcccgcgcatggccgagttgagcggttcccggctggccgcgcagcaacagatggaaggcctcctggcgccgcaccggcccaaggagcccgcgtggttcctggccaccgtcggcgtctcgcccgaccaccagggcaagggtctgggcagcgccgtcgtgctccccggagtggaggcggccgagcgcgccggggtgcccgccttcctggagacctccgcgccccgcaacctccccttctacgagcggctcggcttcaccgtcaccgccgacgtcgaggtgcccgaaggaccgcgcacctggtgcatgacccgcaagcccggtgcctga

SEQ ID NO: 3307 - DNA, 2580 bp, synthetic construct
  source 1..2580: mol_type = other DNA
atggccttaccagtgaccgccttgctcctgccgctggccttgctgctccacgccgccaggccggacattgtgctgacacagtctcccgccagcctggccgtttctctgggacagagagccaccatcagctgtagagccagcaagagcgtgtccaccagcggctactcttacctgcactggtatcagcagaagcccggccagcctcctaagctgctgatctacctggcctccaacctggaaagcggagtgcctgccagattttctggctctggcagcggcaccgacttcaccctgaatatccatcctgtggaagaagaggacgccgccacctactactgccagcacagtagagagctgcccttcacatttggctccggcaccaagctggaaatcaagctcgagatccagaaccctgatcctgccgtgtaccagctgcgggatagcaagagcagcgacaagagcgtgtgtctgttcaccgacttcgacagccagaccaacgtgtcccagagcaaggactccgacgtgtacatcaccgataagtgcgtgctggacatgcggagcatggacttcaagagcaactccgccgtggcctggtccaacaagtccgatttcgcctgcgccaacgccttcaacaacagcattatccccgaggacacattcttcccaagcagcgacgtgccctgcgacgtgaagctggtggaaaagagcttcgagacagacaccaacctgaacttccagaacctgagcgtgatcggcttcagaatcctgctgctgaaagtggccggctttaacctgctgatgaccctgcggctgtggtccagccgcgccaagagaagcggatctggcgtgaagcagaccctgaatttcgacctgctgaagctggctggcgacgtggaatccaacccaggccctactagtatggactggatttggcgcatccttttccttgtcggcgctgctaccggcgcgcattccttcgaacaggtgcagctggttgaatctggcggaggactggttcagcctggcggatctctgaagctgtcttgtgccgccagcggcttcgacttcagcagatactggatgagctgggtccgacaggcccctggcaaaggactggaatggatcggcgagatcaaccccaccagcagcaccatcaacttcacccctagcctgaaggacaaggtgttcatcagccgggacaacgccaagaacaccctgtacctccagatgagcaaagtgcggagcgaggacacagccctgtactactgtgccagaggcaactactacagatacggcgacgctatggactactggggccagggaacaagcgtgacagtctcttctacgcgtgaggacctgaagaacgtgttcccacctgaggtggccgtgttcgagcctagcaaggccgagatcgcccacacccagaaagccaccctcgtgtgcctggctaccggcttctaccccgaccatgtggaactgtcttggtgggtcaacggcaaagaggtgcacagcggcgtgtgtaccgacccccagccactgaaagaacagcccgccctgaacgacagccggtactgcctgagcagcagactgagagtgtccgccaccttctggcagaacccccggaaccacttcagatgccaggtgcagttctacggcctgagcgagaacgacgagtggacccaggacagagccaagcccgtgacccagatcgtgtctgccgaagcctggggcagagccgattgcggcatcaccagcgccagctaccaccagggcgtgctgagcgccaccatcctgtacgagatcctgctgggcaaggccaccctgtacgccgtgctggtgtctgccctggtgctgatggctatggtcaagcggaaggacagccggggaagggccaagcgatctggatctggagcaacaaacttctcactactcaaacaagcaggtgacgtggaggagaatcccgggccttctagaggccatatgaccgagtacaagcccacggtgcgcctcgccacccgcgacgacgtccccagggccgtacgcaccctcgccgccgcgttcgccgactaccccgccacgcgccacaccgtcgatccggaccgccacatcgagcgggtcaccgagctgcaagaactcttcctcacgcgcgtcgggctcgacatcggcaaggtgtgggtcgcggacgacggcgccgcggtggcggtctggaccacgccggagagcgtcgaagcgggggcggtgttcgccgagatcggcccgcgcatggccgagttgagcggttcccggctggccgcgcagcaacagatggaaggcctcctggcgccgcaccggcccaaggagcccgcgtggttcctggccaccgtcggcgtctcgcccgaccaccagggcaagggtctgggcagcgccgtcgtgctccccggagtggaggcggccgagcgcgccggggtgcccgccttcctggagacctccgcgccccgcaacctccccttctacgagcggctcggcttcaccgtcaccgccgacgtcgaggtgcccgaaggaccgcgcacctggtgcatgacccgcaagcccggtgcctga

SEQ ID NO: 3308 - DNA, 2577 bp, synthetic construct
  source 1..2577: mol_type = other DNA
atggccttaccagtgaccgccttgctcctgccgctggccttgctgctccacgccgccaggccggacattgtgctgacacagtctcccgccagcctggccgtttctctgggacagagagccaccatcagctgtagagccagcaagagcgtgtccaccagcggctactcttacctgcactggtatcagcagaagcccggccagcctcctaagctgctgatctacctggcctccaacctggaaagcggagtgcctgccagattttctggctctggcagcggcaccgacttcaccctgaatatccatcctgtggaagaagaggacgccgccacctactactgccagcacagtagagagctgcccttcacatttggctccggcaccaagctggaaatcaagctcgaggacctgaagaacgtgttcccacctgaggtggccgtgttcgagcctagcaaggccgagatcgcccacacccagaaagccaccctcgtgtgcctggctaccggcttctaccccgaccatgtggaactgtcttggtgggtcaacggcaaagaggtgcacagcggcgtgtgtaccgacccccagccactgaaagaacagcccgccctgaacgacagccggtactgcctgagcagcagactgagagtgtccgccaccttctggcagaacccccggaaccacttcagatgccaggtgcagttctacggcctgagcgagaacgacgagtggacccaggacagagccaagcccgtgacccagatcgtgtctgccgaagcctggggcagagccgattgcggcatcaccagcgccagctaccaccagggcgtgctgagcgccaccatcctgtacgagatcctgctgggcaaggccaccctgtacgccgtgctggtgtctgccctggtgctgatggctatggtcaagcggaaggacagccggggaagggccaagcgatctggatctggagcaacaaacttctcactactcaaacaagcaggtgacgtggaggagaatcccgggcctactagtatggactggatttggcgcatccttttccttgtcggcgctgctaccggcgcgcattccttcgaacaggtgcagctggttgaatctggcggaggactggttcagcctggcggatctctgaagctgtcttgtgccgccagcggcttcgacttcagcagatactggatgagctgggtccgacaggcccctggcaaaggactggaatggatcggcgagatcaaccccaccagcagcaccatcaacttcacccctagcctgaaggacaaggtgttcatcagccgggacaacgccaagaacaccctgtacctccagatgagcaaagtgcggagcgaggacacagccctgtactactgtgccagaggcaactactacagatacggcgacgctatggactactggggccagggaacaagcgtgacagtctcttctacgcgtatccagaaccctgatcctgccgtgtaccagctgcgggatagcaagagcagcgacaagagcgtgtgtctgttcaccgacttcgacagccagaccaacgtgtcccagagcaaggactccgacgtgtacatcaccgataagtgcgtgctggacatgcggagcatggacttcaagagcaactccgccgtggcctggtccaacaagtccgatttcgcctgcgccaacgccttcaacaacagcattatccccgaggacacattcttcccaagcagcgacgtgccctgcgacgtgaagctggtggaaaagagcttcgagacagacaccaacctgaacttccagaacctgagcgtgatcggcttcagaatcctgctgctgaaagtggccggctttaacctgctgatgaccctgcggctgtggtccagccgcgccaagagaagcggatctggcgtgaagcagaccctgaatttcgacctgctgaagctggctggcgacgtggaatccaacccaggcccttctagaggccatatgaccgagtacaagcccacggtgcgcctcgccacccgcgacgacgtccccagggccgtacgcaccctcgccgccgcgttcgccgactaccccgccacgcgccacaccgtcgatccggaccgccacatcgagcgggtcaccgagctgcaagaactcttcctcacgcgcgtcgggctcgacatcggcaaggtgtgggtcgcggacgacggcgccgcggtggcggtctggaccacgccggagagcgtcgaagcgggggcggtgttcgccgagatcggcccgcgcatggccgagttgagcggttcccggctggccgcgcagcaacagatggaaggcctcctggcgccgcaccggcccaaggagcccgcgtggttcctggccaccgtcggcgtctcgcccgaccaccagggcaagggtctgggcagcgccgtcgtgctccccggagtggaggcggccgagcgcgccggggtgcccgccttcctggagacctccgcgccccgcaacctccccttctacgagcggctcggcttcaccgtcaccgccgacgtcgaggtgcccgaaggaccgcgcacctggtgcatgacccgcaagcccggtgcctga

SEQ ID NO: 3309 - DNA, 1875 bp, synthetic construct
  source 1..1875: mol_type = other DNA
atggccttaccagtgaccgccttgctcctgccgctggccttgctgctccacgccgccaggccggacattgtgctgacacagtctcccgccagcctggccgtttctctgggacagagagccaccatcagctgtagagccagcaagagcgtgtccaccagcggctactcttacctgcactggtatcagcagaagcccggccagcctcctaagctgctgatctacctggcctccaacctggaaagcggagtgcctgccagattttctggctctggcagcggcaccgacttcaccctgaatatccatcctgtggaagaagaggacgccgccacctactactgccagcacagtagagagctgcccttcacatttggctccggcaccaagctggaaatcaagctcgaggacctgaagaacgtgttcccacctgaggtggccgtgttcgagcctagcgaggccgagatcagccacacccagaaagccaccctcgtgtgcctggctaccggcttctaccccgaccatgtggaactgtcttggtgggtcaacggcaaagaggtgcacagcggcgtgtgtaccgacccccagccactgaaagaacagcccgccctgaacgacagccggtactgcctgagcagcagactgagagtgtccgccaccttctggcagaacccccggaaccacttcagatgccaggtgcagttctacggcctgagcgagaacgacgagtggacccaggacagagccaagcccgtgacccagatcgtgtctgccgaagcctggggcagagccgattgcggctttaccagcgagagctaccagcagggcgtgctgagcgccaccatcctgtacgagatcctgctgggcaaggccaccctgtacgccgtgctggtgtctgccctggtgctgatggctatggtcaagcggaaggacagccggggaagggccaagcgatctggatctggagcaacaaacttctcactactcaaacaagcaggtgacgtggaggagaatcccgggcctactagtatggactggatttggcgcatccttttccttgtcggcgctgctaccggcgcgcattccttcgaacaggtgcagctggttgaatctggcggaggactggttcagcctggcggatctctgaagctgtcttgtgccgccagcggcttcgacttcagcagatactggatgagctgggtccgacaggcccctggcaaaggactggaatggatcggcgagatcaaccccaccagcagcaccatcaacttcacccctagcctgaaggacaaggtgttcatcagccgggacaacgccaagaacaccctgtacctccagatgagcaaagtgcggagcgaggacacagccctgtactactgtgccagaggcaactactacagatacggcgacgctatggactactggggccagggaacaagcgtgacagtctcttctacgcgtatccagaaccctgatcctgccgtgtaccagctgcgggatagcaagagcagcgacaagagcgtgtgtctgttcaccgacttcgacagccagaccaacgtgtcccagagcaaggactccgacgtgtacatcaccgataagtgcgtgctggacatgcggagcatggacttcaagagcaactccgccgtggcctggtccaacaagtccgatttcgcctgcgccaacgccttcaacaacagcattatccccgaggacacattcttcccaagccccgagagcagctgcgacgtgaagctggtggaaaagagcttcgagacagacaccaacctgaacttccagaacctgagcgtgatcggcttcagaatcctgctgctgaaagtggccggctttaacctgctgatgaccctgcggctgtggtccagc

SEQ ID NO: 3310 - DNA, 2550 bp, synthetic construct
  source 1..2550: mol_type = other DNA
atggccttaccagtgaccgccttgctcctgccgctggccttgctgctccacgccgccaggccggacattgtgctgacacagtctcccgccagcctggccgtttctctgggacagagagccaccatcagctgtagagccagcaagagcgtgtccaccagcggctactcttacctgcactggtatcagcagaagcccggccagcctcctaagctgctgatctacctggcctccaacctggaaagcggagtgcctgccagattttctggctctggcagcggcaccgacttcaccctgaatatccatcctgtggaagaagaggacgccgccacctactactgccagcacagtagagagctgcccttcacatttggctccggcaccaagctggaaatcaagctcgaggacctgaagaacgtgttcccacctgaggtggccgtgttcgagcctagcgaggccgagatcagccacacccagaaagccaccctcgtgtgcctggctaccggcttctaccccgaccatgtggaactgtcttggtgggtcaacggcaaagaggtgcacagcggcgtgtgtaccgacccccagccactgaaagaacagcccgccctgaacgacagccggtactgcctgagcagcagactgagagtgtccgccaccttctggcagaacccccggaaccacttcagatgccaggtgcagttctacggcctgagcgagaacgacgagtggacccaggacagagccaagcccgtgacccagatcgtgtctgccgaagcctggggcagagccgattgcggctttaccagcgagagctaccagcagggcgtgctgagcgccaccatcctgtacgagatcctgctgggcaaggccaccctgtacgccgtgctggtgtctgccctggtgctgatggctatggtcaagcggaaggacagccggggaagggccaagcgatctggatctggagcaacaaacttctcactactcaaacaagcaggtgacgtggaggagaatcccgggcctactagtatggactggatttggcgcatccttttccttgtcggcgctgctaccggcgcgcattccttcgaacaggtgcagctggttgaatctggcggaggactggttcagcctggcggatctctgaagctgtcttgtgccgccagcggcttcgacttcagcagatactggatgagctgggtccgacaggcccctggcaaaggactggaatggatcggcgagatcaaccccaccagcagcaccatcaacttcacccctagcctgaaggacaaggtgttcatcagccgggacaacgccaagaacaccctgtacctccagatgagcaaagtgcggagcgaggacacagccctgtactactgtgccagaggcaactactacagatacggcgacgctatggactactggggccagggaacaagcgtgacagtctcttctacgcgtatccagaaccctgatcctgccgtgtaccagctgcgggatagcaagagcagcgacaagagcgtgtgtctgttcaccgacttcgacagccagaccaacgtgtcccagagcaaggactccgacgtgtacatcaccgataagtgcgtgctggacatgcggagcatggacttcaagagcaactccgccgtggcctggtccaacaagtccgatttcgcctgcgccaacgccttcaacaacagcattatccccgaggacacattcttcccaagccccgagagcagctgcgacgtgaagctggtggaaaagagcttcgagacagacaccaacctgaacttccagaacctgagcgtgatcggcttcagaatcctgctgctgaaagtggccggctttaacctgctgatgaccctgcggctgtggtccagccgcgccaagagaagcggatctggcgtgaagcagaccctgaatttcgacctgctgaagctggctggcgacgtggaatccaacccaggcccttctagaggcgggatccacaccatggctacctacgaggtgctgtgcgaggtggcaagaaagctgggcaccgacgacagagaagtggtgctgttcctgctgaacgtgttcatccctcagcctacactggcccagctgatcggtgcactgagagccctgaaagaggaaggccggctgacctttcctctgctggccgaatgcctgttcagagccggaagaagggatctgctgcgggacctgctgcatctggaccccagatttctggaaagacacctggccggcaccatgagctacttcagcccttaccagctgaccgtgctgcacgttgacggcgaactgtgcgccagagatattcggagcctgatcttcctgagcaaggacaccatcggcagccggtctacccctcagacatttctgcactgggtgtactgcatggaaaacctggacctgctcggccccacagatgtggatgccctgatgtccatgctgagaagcctgagcagagtggacctccagagacaggtgcagacactgatgggactgcacctgagcggacctagccacagccagcactacagacacacccct

SEQ ID NO: 3311 - DNA, 1887 bp, synthetic construct
  source 1..1887: mol_type = other DNA
atggccttaccagtgaccgccttgctcctgccgctggccttgctgctccacgccgccaggccggacattgtgctgacacagtctcccgccagcctggccgtttctctgggacagagagccaccatcagctgtagagccagcaagagcgtgtccaccagcggctactcttacctgcactggtatcagcagaagcccggccagcctcctaagctgctgatctacctggcctccaacctggaaagcggagtgcctgccagattttctggctctggcagcggcaccgacttcaccctgaatatccatcctgtggaagaagaggacgccgccacctactactgccagcacagtagagagctgcccttcacatttggctccggcaccaagctggaaatcaagctcgagatccagaaccctgatcctgccgtgtaccagctgcgggatagcaagagcagcgacaagagcgtgtgtctgttcaccgacttcgacagccagaccaacgtgtcccagagcaaggactccgacgtgtacatcaccgataagtgcgtgctggacatgcggagcatggacttcaagagcaactccgccgtggcctggtccaacaagtccgatttcgcctgcgccaacgccttcaacaacagcattatccccgaggacacattcttcccaagccccgagagcagctgcgacgtgaagctggtggaaaagagcttcgagacagacaccaacctgaacttccagaacctgagcgtgatcggcttcagaatcctgctgctgaaagtggccggctttaacctgctgatgaccctgcggctgtggtccagccgcgccaagagaagcggatctggcgtgaagcagaccctgaatttcgacctgctgaagctggctggcgacgtggaatccaacccaggccctactagtatggactggatttggcgcatccttttccttgtcggcgctgctaccggcgcgcattccttcgaacaggtgcagctggttgaatctggcggaggactggttcagcctggcggatctctgaagctgtcttgtgccgccagcggcttcgacttcagcagatactggatgagctgggtccgacaggcccctggcaaaggactggaatggatcggcgagatcaaccccaccagcagcaccatcaacttcacccctagcctgaaggacaaggtgttcatcagccgggacaacgccaagaacaccctgtacctccagatgagcaaagtgcggagcgaggacacagccctgtactactgtgccagaggcaactactacagatacggcgacgctatggactactggggccagggaacaagcgtgacagtctcttctacgcgtgaggacctgaagaacgtgttcccacctgaggtggccgtgttcgagcctagcgaggccgagatcagccacacccagaaagccaccctcgtgtgcctggctaccggcttctaccccgaccatgtggaactgtcttggtgggtcaacggcaaagaggtgcacagcggcgtgtgtaccgacccccagccactgaaagaacagcccgccctgaacgacagccggtactgcctgagcagcagactgagagtgtccgccaccttctggcagaacccccggaaccacttcagatgccaggtgcagttctacggcctgagcgagaacgacgagtggacccaggacagagccaagcccgtgacccagatcgtgtctgccgaagcctggggcagagccgattgcggctttaccagcgagagctaccagcagggcgtgctgagcgccaccatcctgtacgagatcctgctgggcaaggccaccctgtacgccgtgctggtgtctgccctggtgctgatggctatggtcaagcggaaggacagccgggga

SEQ ID NO: 3312 - DNA, 2553 bp, synthetic construct
  source 1..2553: mol_type = other DNA
atggccttaccagtgaccgccttgctcctgccgctggccttgctgctccacgccgccaggccggacattgtgctgacacagtctcccgccagcctggccgtttctctgggacagagagccaccatcagctgtagagccagcaagagcgtgtccaccagcggctactcttacctgcactggtatcagcagaagcccggccagcctcctaagctgctgatctacctggcctccaacctggaaagcggagtgcctgccagattttctggctctggcagcggcaccgacttcaccctgaatatccatcctgtggaagaagaggacgccgccacctactactgccagcacagtagagagctgcccttcacatttggctccggcaccaagctggaaatcaagctcgagatccagaaccctgatcctgccgtgtaccagctgcgggatagcaagagcagcgacaagagcgtgtgtctgttcaccgacttcgacagccagaccaacgtgtcccagagcaaggactccgacgtgtacatcaccgataagtgcgtgctggacatgcggagcatggacttcaagagcaactccgccgtggcctggtccaacaagtccgatttcgcctgcgccaacgccttcaacaacagcattatccccgaggacacattcttcccaagccccgagagcagctgcgacgtgaagctggtggaaaagagcttcgagacagacaccaacctgaacttccagaacctgagcgtgatcggcttcagaatcctgctgctgaaagtggccggctttaacctgctgatgaccctgcggctgtggtccagccgcgccaagagaagcggatctggcgtgaagcagaccctgaatttcgacctgctgaagctggctggcgacgtggaatccaacccaggccctactagtatggactggatttggcgcatccttttccttgtcggcgctgctaccggcgcgcattccttcgaacaggtgcagctggttgaatctggcggaggactggttcagcctggcggatctctgaagctgtcttgtgccgccagcggcttcgacttcagcagatactggatgagctgggtccgacaggcccctggcaaaggactggaatggatcggcgagatcaaccccaccagcagcaccatcaacttcacccctagcctgaaggacaaggtgttcatcagccgggacaacgccaagaacaccctgtacctccagatgagcaaagtgcggagcgaggacacagccctgtactactgtgccagaggcaactactacagatacggcgacgctatggactactggggccagggaacaagcgtgacagtctcttctacgcgtgaggacctgaagaacgtgttcccacctgaggtggccgtgttcgagcctagcgaggccgagatcagccacacccagaaagccaccctcgtgtgcctggctaccggcttctaccccgaccatgtggaactgtcttggtgggtcaacggcaaagaggtgcacagcggcgtgtgtaccgacccccagccactgaaagaacagcccgccctgaacgacagccggtactgcctgagcagcagactgagagtgtccgccaccttctggcagaacccccggaaccacttcagatgccaggtgcagttctacggcctgagcgagaacgacgagtggacccaggacagagccaagcccgtgacccagatcgtgtctgccgaagcctggggcagagccgattgcggctttaccagcgagagctaccagcagggcgtgctgagcgccaccatcctgtacgagatcctgctgggcaaggccaccctgtacgccgtgctggtgtctgccctggtgctgatggctatggtcaagcggaaggacagccggggaagggccaagcgatctggatctggagcaacaaacttctcactactcaaacaagcaggtgacgtggaggagaatcccgggccttctagaggcgggatccacaccatggctacctacgaggtgctgtgcgaggtggcaagaaagctgggcaccgacgacagagaagtggtgctgttcctgctgaacgtgttcatccctcagcctacactggcccagctgatcggtgcactgagagccctgaaagaggaaggccggctgacctttcctctgctggccgaatgcctgttcagagccggaagaagggatctgctgcgggacctgctgcatctggaccccagatttctggaaagacacctggccggcaccatgagctacttcagcccttaccagctgaccgtgctgcacgttgacggcgaactgtgcgccagagatattcggagcctgatcttcctgagcaaggacaccatcggcagccggtctacccctcagacatttctgcactgggtgtactgcatggaaaacctggacctgctcggccccacagatgtggatgccctgatgtccatgctgagaagcctgagcagagtggacctccagagacaggtgcagacactgatgggactgcacctgagcggacctagccacagccagcactacagacacacccct

SEQ ID NO: 3313 - DNA, 2712 bp, synthetic construct
  source 1..2712: mol_type = other DNA
atggccttaccagtgaccgccttgctcctgccgctggccttgctgctccacgccgccaggccgctcgaggggaaaccaattcccaaccctcttctgggactggattcaaccggcagcggcgaggacctgaagaacgtgttcccacctgaggtggccgtgttcgagcctagcaaggccgagatcgcccacacccagaaagccaccctcgtgtgcctggctaccggcttctaccccgaccatgtggaactgtcttggtgggtcaacggcaaagaggtgcacagcggcgtgtgtaccgacccccagccactgaaagaacagcccgccctgaacgacagccggtactgcctgagcagcagactgagagtgtccgccaccttctggcagaacccccggaaccacttcagatgccaggtgcagttctacggcctgagcgagaacgacgagtggacccaggacagagccaagcccgtgacccagatcgtgtctgccgaagcctggggcagagccgattgcggcatcaccagcgccagctaccaccagggcgtgctgagcgccaccatcctgtacgagatcctgctgggcaaggccaccctgtacgccgtgctggtgtctgccctggtgctgatggctatggtcaagcggaaggacagccggggaagggccaagcgatctggatctggagcaacaaacttctcactactcaaacaagcaggtgacgtggaggagaatcccgggcctactagcatggccttaccagtgaccgccttgctcctgccgctggccttgctgctccacgccgccaggccggacattgtgctgacacagtctcccgccagcctggccgtttctctgggacagagagccaccatcagctgtagagccagcaagagcgtgtccaccagcggctactcttacctgcactggtatcagcagaagcccggccagcctcctaagctgctgatctacctggcctccaacctggaaagcggagtgcctgccagattttctggctctggcagcggcaccgacttcaccctgaatatccatcctgtggaagaagaggacgccgccacctactactgccagcacagtagagagctgcccttcacatttggctccggcaccaagctggaaatcaagggcggaggcggaagtggaggcggaggatctggcggcggaggctctcaggtgcagctggttgaatctggcggaggactggttcagcctggcggatctctgaagctgtcttgtgccgccagcggcttcgacttcagcagatactggatgagctgggtccgacaggcccctggcaaaggactggaatggatcggcgagatcaaccccaccagcagcaccatcaacttcacccctagcctgaaggacaaggtgttcatcagccgggacaacgccaagaacaccctgtacctccagatgagcaaagtgcggagcgaggacacagccctgtactactgtgccagaggcaactactacagatacggcgacgctatggactactggggccagggaacaagcgtgacagtctcttctacgcgtgagcagaaactgatctcggaagaggatgggagcggcatccagaaccctgatcctgccgtgtaccagctgcgggatagcaagagcagcgacaagagcgtgtgtctgttcaccgacttcgacagccagaccaacgtgtcccagagcaaggactccgacgtgtacatcaccgataagtgcgtgctggacatgcggagcatggacttcaagagcaactccgccgtggcctggtccaacaagtccgatttcgcctgcgccaacgccttcaacaacagcattatccccgaggacacattcttcccaagcagcgacgtgccctgcgacgtgaagctggtggaaaagagcttcgagacagacaccaacctgaacttccagaacctgagcgtgatcggcttcagaatcctgctgctgaaagtggccggctttaacctgctgatgaccctgcggctgtggtccagccgcgccaagagaagcggatctggcgtgaagcagaccctgaatttcgacctgctgaagctggctggcgacgtggaatccaacccaggcccttctagaggccatatgaccgagtacaagcccacggtgcgcctcgccacccgcgacgacgtccccagggccgtacgcaccctcgccgccgcgttcgccgactaccccgccacgcgccacaccgtcgatccggaccgccacatcgagcgggtcaccgagctgcaagaactcttcctcacgcgcgtcgggctcgacatcggcaaggtgtgggtcgcggacgacggcgccgcggtggcggtctggaccacgccggagagcgtcgaagcgggggcggtgttcgccgagatcggcccgcgcatggccgagttgagcggttcccggctggccgcgcagcaacagatggaaggcctcctggcgccgcaccggcccaaggagcccgcgtggttcctggccaccgtcggcgtctcgcccgaccaccagggcaagggtctgggcagcgccgtcgtgctccccggagtggaggcggccgagcgcgccggggtgcccgccttcctggagacctccgcgccccgcaacctccccttctacgagcggctcggcttcaccgtcaccgccgacgtcgaggtgcccgaaggaccgcgcacctggtgcatgacccgcaagcccggtgcctga

SEQ ID NO: 3314 - DNA, 2715 bp, synthetic construct
  source 1..2715: mol_type = other DNA
atggccttaccagtgaccgccttgctcctgccgctggccttgctgctccacgccgccaggccgctcgagcagaaactgatctcggaagaggatctgggctccggcgatcgccctgatcctgccgtgtaccagctgcgggatagcaagagcagcgacaagagcgtgtgtctgttcaccgacttcgacagccagaccaacgtgtcccagagcaaggactccgacgtgtacatcaccgataagtgcgtgctggacatgcggagcatggacttcaagagcaactccgccgtggcctggtccaacaagtccgatttcgcctgcgccaacgccttcaacaacagcattatccccgaggacacattcttcccaagccccgagagcagctgcgacgtgaagctggtggaaaagagcttcgagacagacaccaacctgaacttccagaacctgagcgtgatcggcttcagaatcctgctgctgaaagtggccggctttaacctgctgatgaccctgcggctgtggtccagctctagtcgcgccaagagaagcggatctggcgtgaagcagaccctgaatttcgacctgctgaagctggctggcgacgtggaatccaacccaggccccactagcatggccttaccagtgaccgccttgctcctgccgctggccttgctgctccacgccgccaggccggacattgtgctgacacagtctcccgccagcctggccgtttctctgggacagagagccaccatcagctgtagagccagcaagagcgtgtccaccagcggctactcttacctgcactggtatcagcagaagcccggccagcctcctaagctgctgatctacctggcctccaacctggaaagcggagtgcctgccagattttctggctctggcagcggcaccgacttcaccctgaatatccatcctgtggaagaagaggacgccgccacctactactgccagcacagtagagagctgcccttcacatttggctccggcaccaagctggaaatcaagggcggaggcggaagtggaggcggaggatctggcggcggaggctctcaggtgcagctggttgaatctggcggaggactggttcagcctggcggatctctgaagctgtcttgtgccgccagcggcttcgacttcagcagatactggatgagctgggtccgacaggcccctggcaaaggactggaatggatcggcgagatcaaccccaccagcagcaccatcaacttcacccctagcctgaaggacaaggtgttcatcagccgggacaacgccaagaacaccctgtacctccagatgagcaaagtgcggagcgaggacacagccctgtactactgtgccagaggcaactactacagatacggcgacgctatggactactggggccagggaacaagcgtgacagtctcttctacgcgtgggaaaccaattcccaaccctcttctgggactggattcaaccggcagcggcgaggacctgaagaacgtgttcccacctgaggtggccgtgttcgagcctagcgaggccgagatcagccacacccagaaagccaccctcgtgtgcctggctaccggcttctaccccgaccatgtggaactgtcttggtgggtcaacggcaaagaggtgcacagcggcgtgtgtaccgacccccagccactgaaagaacagcccgccctgaacgacagccggtactgcctgagcagcagactgagagtgtccgccaccttctggcagaacccccggaaccacttcagatgccaggtgcagttctacggcctgagcgagaacgacgagtggacccaggacagagccaagcccgtgacccagatcgtgtctgccgaagcctggggcagagccgattgcggctttaccagcgagagctaccagcagggcgtgctgagcgccaccatcctgtacgagatcctgctgggcaaggccaccctgtacgccgtgctggtgtctgccctggtgctgatggctatggtcaagcggaaggacagccggggaagggccaagcgatctggatctggagcaacaaacttctcactactcaaacaagcaggtgacgtggaggagaatcccgggccttctagaggccatatgaccgagtacaagcccacggtgcgcctcgccacccgcgacgacgtccccagggccgtacgcaccctcgccgccgcgttcgccgactaccccgccacgcgccacaccgtcgatccggaccgccacatcgagcgggtcaccgagctgcaagaactcttcctcacgcgcgtcgggctcgacatcggcaaggtgtgggtcgcggacgacggcgccgcggtggcggtctggaccacgccggagagcgtcgaagcgggggcggtgttcgccgagatcggcccgcgcatggccgagttgagcggttcccggctggccgcgcagcaacagatggaaggcctcctggcgccgcaccggcccaaggagcccgcgtggttcctggccaccgtcggcgtctcgcccgaccaccagggcaagggtctgggcagcgccgtcgtgctccccggagtggaggcggccgagcgcgccggggtgcccgccttcctggagacctccgcgccccgcaacctccccttctacgagcggctcggcttcaccgtcaccgccgacgtcgaggtgcccgaaggaccgcgcacctggtgcatgacccgcaagcccggtgcctga

SEQ ID NO: 3315 - DNA, 2577 bp, synthetic construct
  source 1..2577: mol_type = other DNA
atggccttaccagtgaccgccttgctcctgccgctggccttgctgctccacgccgccaggccggacattgtgctgacacagtctcccgccagcctggccgtttctctgggacagagagccaccatcagctgtagagccagcaagagcgtgtccaccagcggctactcttacctgcactggtatcagcagaagcccggccagcctcctaagctgctgatctacctggcctccaacctggaaagcggagtgcctgccagattttctggctctggcagcggcaccgacttcaccctgaatatccatcctgtggaagaagaggacgccgccacctactactgccagcacagtagagagctgcccttcacatttggctccggcaccaagctggaaatcaagctcgaggacctgaagaacgtgttcccacctgaggtggccgtgttcgagcctagcgaggccgagatcagccacacccagaaagccaccctcgtgtgcctggctaccggcttctaccccgaccatgtggaactgtcttggtgggtcaacggcaaagaggtgcacagcggcgtgtctaccgacccccagccactgaaagaacagcccgccctgaacgacagccggtactgcctgagcagcagactgagagtgtccgccaccttctggcagaacccccggaaccacttcagatgccaggtgcagttctacggcctgagcgagaacgacgagtggacccaggacagagccaagcccgtgacccagatcgtgtctgccgaagcctggggcagagccgattgcggctttaccagcgagagctaccagcagggcgtgctgagcgccaccatcctgtacgagatcctgctgggcaaggccaccctgtacgccgtgctggtgtctgccctggtgctgatggctatggtcaagcggaaggacagccggggaagggccaagcgatctggatctggagcaacaaacttctcactactcaaacaagcaggtgacgtggaggagaatcccgggcctactagtatggactggatttggcgcatccttttccttgtcggcgctgctaccggcgcgcattccttcgaacaggtgcagctggttgaatctggcggaggactggttcagcctggcggatctctgaagctgtcttgtgccgccagcggcttcgacttcagcagatactggatgagctgggtccgacaggcccctggcaaaggactggaatggatcggcgagatcaaccccaccagcagcaccatcaacttcacccctagcctgaaggacaaggtgttcatcagccgggacaacgccaagaacaccctgtacctccagatgagcaaagtgcggagcgaggacacagccctgtactactgtgccagaggcaactactacagatacggcgacgctatggactactggggccagggaacaagcgtgacagtctcttctacgcgtatccagaaccctgatcctgccgtgtaccagctgcgggatagcaagagcagcgacaagagcgtgtgtctgttcaccgacttcgacagccagaccaacgtgtcccagagcaaggactccgacgtgtacatcaccgataagaccgtgctggacatgcggagcatggacttcaagagcaactccgccgtggcctggtccaacaagtccgatttcgcctgcgccaacgccttcaacaacagcattatccccgaggacacattcttcccaagccccgagagcagctgcgacgtgaagctggtggaaaagagcttcgagacagacaccaacctgaacttccagaacctgagcgtgatcggcttcagaatcctgctgctgaaagtggccggctttaacctgctgatgaccctgcggctgtggtccagccgcgccaagagaagcggatctggcgtgaagcagaccctgaatttcgacctgctgaagctggctggcgacgtggaatccaacccaggcccttctagaggccatatgaccgagtacaagcccacggtgcgcctcgccacccgcgacgacgtccccagggccgtacgcaccctcgccgccgcgttcgccgactaccccgccacgcgccacaccgtcgatccggaccgccacatcgagcgggtcaccgagctgcaagaactcttcctcacgcgcgtcgggctcgacatcggcaaggtgtgggtcgcggacgacggcgccgcggtggcggtctggaccacgccggagagcgtcgaagcgggggcggtgttcgccgagatcggcccgcgcatggccgagttgagcggttcccggctggccgcgcagcaacagatggaaggcctcctggcgccgcaccggcccaaggagcccgcgtggttcctggccaccgtcggcgtctcgcccgaccaccagggcaagggtctgggcagcgccgtcgtgctccccggagtggaggcggccgagcgcgccggggtgcccgccttcctggagacctccgcgccccgcaacctccccttctacgagcggctcggcttcaccgtcaccgccgacgtcgaggtgcccgaaggaccgcgcacctggtgcatgacccgcaagcccggtgcctga

SEQ ID NO: 3316 - DNA, 2823 bp, synthetic construct
  source 1..2823: mol_type = other DNA
atggccttaccagtgaccgccttgctcctgccgctggccttgctgctccacgccgccaggccggacattgtgctgacacagtctcccgccagcctggccgtttctctgggacagagagccaccatcagctgtagagccagcaagagcgtgtccaccagcggctactcttacctgcactggtatcagcagaagcccggccagcctcctaagctgctgatctacctggcctccaacctggaaagcggagtgcctgccagattttctggctctggcagcggcaccgacttcaccctgaatatccatcctgtggaagaagaggacgccgccacctactactgccagcacagtagagagctgcccttcacatttggctccggcaccaagctggaaatcaagctcgaggacctgaagaacgtgttcccacctgaggtggccgtgttcgagcctagcgaggccgagatcagccacacccagaaagccaccctcgtgtgcctggctaccggcttctaccccgaccatgtggaactgtcttggtgggtcaacggcaaagaggtgcacagcggcgtgtctaccgacccccagccactgaaagaacagcccgccctgaacgacagccggtactgcctgagcagcagactgagagtgtccgccaccttctggcagaacccccggaaccacttcagatgccaggtgcagttctacggcctgagcgagaacgacgagtggacccaggacagagccaagcccgtgacccagatcgtgtctgccgaagcctggggcagagccgattgcggctttaccagcgagagctaccagcagggcgtgctgagcgccaccatcctgtacgagatcctgctgggcaaggccaccctgtacgccgtgctggtgtctgccctggtgctgatggctatggtcaagcggaaggacagccggggaagggccaagcgatctggatctggagcaacaaacttctcactactcaaacaagcaggtgacgtggaggagaatcccgggcctactagtatggactggatttggcgcatccttttccttgtcggcgctgctaccggcgcgcattccttcgaacaggtgcagctggttgaatctggcggaggactggttcagcctggcggatctctgaagctgtcttgtgccgccagcggcttcgacttcagcagatactggatgagctgggtccgacaggcccctggcaaaggactggaatggatcggcgagatcaaccccaccagcagcaccatcaacttcacccctagcctgaaggacaaggtgttcatcagccgggacaacgccaagaacaccctgtacctccagatgagcaaagtgcggagcgaggacacagccctgtactactgtgccagaggcaactactacagatacggcgacgctatggactactggggccagggaacaagcgtgacagtctcttctacgcgtgagcagaaactgatctcggaagaggatgggagcggcaccccattcccttctctggcccctcccatcatgctgctggtggacggcaagcagcagatggtggtcgtgtgcctggtgctggatgtggccccacctggactggacagccccatctggtttagcgccggcaatggctctgccctggacgcctttacctacggcccaagccctgccaccgatggcacctggacaaatctggcccacctgagcctgcccagcgaggaactggcttcttgggagcctctcgtgtgccacacaggacctggcgctgagggacacagcagatccacccagcctatgcacctgtctggcgaggccagcaccgccagaacctgtcctcaggaacctctgagaggcacccctggcggagcactgtggctgggagtgctgagactgctgctgttcaagctgctgctgtttgacctgctgctgacctgctcctgtctgtgcgatcctgccggccctctgccttctcctgccaccaccacaagactgagagccctgggcagccacagactgcaccctgccacagagacaggcggcagagaggccacaagcagccctagaccccagcccagagacagaagatggggcgataccccccctggcagaaagcctggatctccagtccgcgccaagagaagcggatctggcgtgaagcagaccctgaatttcgacctgctgaagctggctggcgacgtggaatccaacccaggcccttctagaggccatatgaccgagtacaagcccacggtgcgcctcgccacccgcgacgacgtccccagggccgtacgcaccctcgccgccgcgttcgccgactaccccgccacgcgccacaccgtcgatccggaccgccacatcgagcgggtcaccgagctgcaagaactcttcctcacgcgcgtcgggctcgacatcggcaaggtgtgggtcgcggacgacggcgccgcggtggcggtctggaccacgccggagagcgtcgaagcgggggcggtgttcgccgagatcggcccgcgcatggccgagttgagcggttcccggctggccgcgcagcaacagatggaaggcctcctggcgccgcaccggcccaaggagcccgcgtggttcctggccaccgtcggcgtctcgcccgaccaccagggcaagggtctgggcagcgccgtcgtgctccccggagtggaggcggccgagcgcgccggggtgcccgccttcctggagacctccgcgccccgcaacctccccttctacgagcggctcggcttcaccgtcaccgccgacgtcgaggtgcccgaaggaccgcgcacctggtgcatgacccgcaagcccggtgcctga

SEQ ID NO: 3317 - DNA, 2877 bp, synthetic construct
  source 1..2877: mol_type = other DNA
atggccttaccagtgaccgccttgctcctgccgctggccttgctgctccacgccgccaggccgctcgaggacctgaagaacgtgttcccacctgaggtggccgtgttcgagcctagcgaggccgagatcagccacacccagaaagccaccctcgtgtgcctggctaccggcttctaccccgaccatgtggaactgtcttggtgggtcaacggcaaagaggtgcacagcggcgtgtctaccgacccccagccactgaaagaacagcccgccctgaacgacagccggtactgcctgagcagcagactgagagtgtccgccaccttctggcagaacccccggaaccacttcagatgccaggtgcagttctacggcctgagcgagaacgacgagtggacccaggacagagccaagcccgtgacccagatcgtgtctgccgaagcctggggcagagccgattgcggctttaccagcgagagctaccagcagggcgtgctgagcgccaccatcctgtacgagatcctgctgggcaaggccaccctgtacgccgtgctggtgtctgccctggtgctgatggctatggtcaagcggaaggacagccggggaagggccaagcgatctggatctggagcaacaaacttctcactactcaaacaagcaggtgacgtggaggagaatcccgggcctactagcatggccttaccagtgaccgccttgctcctgccgctggccttgctgctccacgccgccaggccggacattgtgctgacacagtctcccgccagcctggccgtttctctgggacagagagccaccatcagctgtagagccagcaagagcgtgtccaccagcggctactcttacctgcactggtatcagcagaagcccggccagcctcctaagctgctgatctacctggcctccaacctggaaagcggagtgcctgccagattttctggctctggcagcggcaccgacttcaccctgaatatccatcctgtggaagaagaggacgccgccacctactactgccagcacagtagagagctgcccttcacatttggctccggcaccaagctggaaatcaagggcggaggcggaagtggaggcggaggatctggcggcggaggctctcaggtgcagctggttgaatctggcggaggactggttcagcctggcggatctctgaagctgtcttgtgccgccagcggcttcgacttcagcagatactggatgagctgggtccgacaggcccctggcaaaggactggaatggatcggcgagatcaaccccaccagcagcaccatcaacttcacccctagcctgaaggacaaggtgttcatcagccgggacaacgccaagaacaccctgtacctccagatgagcaaagtgcggagcgaggacacagccctgtactactgtgccagaggcaactactacagatacggcgacgctatggactactggggccagggaacaagcgtgacagtctcttctacgcgtgagcagaaactgatctcggaagaggatctggggagcggcaccccattcccttctctggcccctcccatcatgctgctggtggacggcaagcagcagatggtggtcgtgtgcctggtgctggatgtggccccacctggactggacagccccatctggtttagcgccggcaatggctctgccctggacgcctttacctacggcccaagccctgccaccgatggcacctggacaaatctggcccacctgagcctgcccagcgaggaactggcttcttgggagcctctcgtgtgccacacaggacctggcgctgagggacacagcagatccacccagcctatgcacctgtctggcgaggccagcaccgccagaacctgtcctcaggaacctctgagaggcacccctggcggagcactgtggctgggagtgctgagactgctgctgttcaagctgctgctgtttgacctgctgctgacctgctcctgtctgtgcgatcctgccggccctctgccttctcctgccaccaccacaagactgagagccctgggcagccacagactgcaccctgccacagagacaggcggcagagaggccacaagcagccctagaccccagcccagagacagaagatggggcgataccccccctggcagaaagcctggatctccagtccgcgccaagagaagcggatctggcgtgaagcagaccctgaatttcgacctgctgaagctggctggcgacgtggaatccaacccaggcccttctagatctagaggccatatgaccgagtacaagcccacggtgcgcctcgccacccgcgacgacgtccccagggccgtacgcaccctcgccgccgcgttcgccgactaccccgccacgcgccacaccgtcgatccggaccgccacatcgagcgggtcaccgagctgcaagaactcttcctcacgcgcgtcgggctcgacatcggcaaggtgtgggtcgcggacgacggcgccgcggtggcggtctggaccacgccggagagcgtcgaagcgggggcggtgttcgccgagatcggcccgcgcatggccgagttgagcggttcccggctggccgcgcagcaacagatggaaggcctcctggcgccgcaccggcccaaggagcccgcgtggttcctggccaccgtcggcgtctcgcccgaccaccagggcaagggtctgggcagcgccgtcgtgctccccggagtggaggcggccgagcgcgccggggtgcccgccttcctggagacctccgcgccccgcaacctccccttctacgagcggctcggcttcaccgtcaccgccgacgtcgaggtgcccgaaggaccgcgcacctggtgcatgacccgcaagcccggtgcctga

SEQ ID NO: 3318 - DNA, 2688 bp, synthetic construct
  source 1..2688: mol_type = other DNA
atggccttaccagtgaccgccttgctcctgccgctggccttgctgctccacgccgccaggccggacattgtgctgacacagtctcccgccagcctggccgtttctctgggacagagagccaccatcagctgtagagccagcaagagcgtgtccaccagcggctactcttacctgcactggtatcagcagaagcccggccagcctcctaagctgctgatctacctggcctccaacctggaaagcggagtgcctgccagattttctggctctggcagcggcaccgacttcaccctgaatatccatcctgtggaagaagaggacgccgccacctactactgccagcacagtagagagctgcccttcacatttggctccggcaccaagctggaaatcaagctcgaggggaaaccaattcccaaccctcttctgggactggattcaaccggcagcggcgacaagcagctggacgccgacgtgtcccccaagcctaccatcttcctgccctctatcgccgagacaaagctccagaaggccggcacctacctgtgcctgctggaaaagttcttcccagatgtgattaagatccactggcaggaaaagaagtccaacaccatcctgggcagccaggaaggcaacaccatgaagaccaacgacacctacatgaagttcagctggctgaccgtgcccgagaagtccctggacaaagaacacagatgcatcgtgcggcacgaaaacaacaagaacggcgtggaccaggaaatcatcttcccacccatcaagaccgatgtgattacaatggaccccaaggacaactgctccaaggacgccaacgataccctgctgctccagctgaccaacaccagcgcctactacatgtacttgttgctgctgctgaagtccgtggtgtacttcgccatcatcacatgctgcctgctgcggagaaccgccttctgctgcaacggcgagaagtctagggccaagcgatctggatctggagcaacaaacttctcactactcaaacaagcaggtgacgtggaggagaatcccgggcctactagtatggactggatttggcgcatccttttccttgtcggcgctgctaccggcgcgcattccttcgaacaggtgcagctggttgaatctggcggaggactggttcagcctggcggatctctgaagctgtcttgtgccgccagcggcttcgacttcagcagatactggatgagctgggtccgacaggcccctggcaaaggactggaatggatcggcgagatcaaccccaccagcagcaccatcaacttcacccctagcctgaaggacaaggtgttcatcagccgggacaacgccaagaacaccctgtacctccagatgagcaaagtgcggagcgaggacacagccctgtactactgtgccagaggcaactactacagatacggcgacgctatggactactggggccagggaacaagcgtgacagtctcttctacgcgtgagcagaaactgatctcggaagaggatgggagcggcagccagcctcacaccaagcccagcgtgttcgtgatgaagaacggcaccaacgtggcctgcctcgtgaaagagttctaccccaaggacatcaggatcaacctggtgtccagcaagaagatcaccgagttcgaccccgccatcgtgatctcccccagcggcaagtacaacgccgtgaagctggggaagtacgaggacagcaacagcgtgacctgctccgtgcagcacgacaacaagaccgtgcacagcaccgactttgaagtgaaaaccgactccaccgaccacgtgaagcccaaagagacagagaacaccaagcagcccagcaagagctgccacaagcccaaggccatcgtgcacaccgagaaagtgaacatgatgagcctgaccgtgctgggcctgcggatgctgttcgccaaaaccgtggccgtgaacttcctgctgaccgccaagctgttcttcctccgcgccaagagaagcggatctggcgtgaagcagaccctgaatttcgacctgctgaagctggctggcgacgtggaatccaacccaggcccttctagaggccatatgaccgagtacaagcccacggtgcgcctcgccacccgcgacgacgtccccagggccgtacgcaccctcgccgccgcgttcgccgactaccccgccacgcgccacaccgtcgatccggaccgccacatcgagcgggtcaccgagctgcaagaactcttcctcacgcgcgtcgggctcgacatcggcaaggtgtgggtcgcggacgacggcgccgcggtggcggtctggaccacgccggagagcgtcgaagcgggggcggtgttcgccgagatcggcccgcgcatggccgagttgagcggttcccggctggccgcgcagcaacagatggaaggcctcctggcgccgcaccggcccaaggagcccgcgtggttcctggccaccgtcggcgtctcgcccgaccaccagggcaagggtctgggcagcgccgtcgtgctccccggagtggaggcggccgagcgcgccggggtgcccgccttcctggagacctccgcgccccgcaacctccccttctacgagcggctcggcttcaccgtcaccgccgacgtcgaggtgcccgaaggaccgcgcacctggtgcatgacccgcaagcccggtgcctga

SEQ ID NO: 3319 - DNA, 1899 bp, synthetic construct
  source 1..1899: mol_type = other DNA
atggccttaccagtgaccgccttgctcctgccgctggccttgctgctccacgccgccaggccggacattgtgctgacacagtctcccgccagcctggccgtttctctgggacagagagccaccatcagctgtagagccagcaagagcgtgtccaccagcggctactcttacctgcactggtatcagcagaagcccggccagcctcctaagctgctgatctacctggcctccaacctggaaagcggagtgcctgccagattttctggctctggcagcggcaccgacttcaccctgaatatccatcctgtggaagaagaggacgccgccacctactactgccagcacagtagagagctgcccttcacatttggctccggcaccaagctggaaatcaagctcgagagccagcctcacaccaagcccagcgtgttcgtgatgaagaacggcaccaacgtggcctgcctcgtgaaagagttctaccccaaggacatcaggatcaacctggtgtccagcaagaagatcaccgagttcgaccccgccatcgtgatctcccccagcggcaagtacaacgccgtgaagctggggaagtacgaggacagcaacagcgtgacctgctccgtgcagcacgacaacaagaccgtgcacagcaccgactttgaagtgaaaaccgactccaccgaccacgtgaagcccaaagagacagagaacaccaagcagcccagcaagagctgccacaagcccaaggccatcgtgcacaccgagaaagtgaacatgatgagcctgaccgtgctgggcctgcggatgctgttcgccaaaaccgtggccgtgaacttcctgctgaccgccaagctgttcttcctcagggccaagcgatctggatctggagcaacaaacttctcactactcaaacaagcaggtgacgtggaggagaatcccgggcctactagtatggactggatttggcgcatccttttccttgtcggcgctgctaccggcgcgcattccttcgaacaggtgcagctggttgaatctggcggaggactggttcagcctggcggatctctgaagctgtcttgtgccgccagcggcttcgacttcagcagatactggatgagctgggtccgacaggcccctggcaaaggactggaatggatcggcgagatcaaccccaccagcagcaccatcaacttcacccctagcctgaaggacaaggtgttcatcagccgggacaacgccaagaacaccctgtacctccagatgagcaaagtgcggagcgaggacacagccctgtactactgtgccagaggcaactactacagatacggcgacgctatggactactggggccagggaacaagcgtgacagtctcttctacgcgtgacaagcagctggacgccgacgtgtcccccaagcctaccatcttcctgccctctatcgccgagacaaagctccagaaggccggcacctacctgtgcctgctggaaaagttcttcccagatgtgattaagatccactggcaggaaaagaagtccaacaccatcctgggcagccaggaaggcaacaccatgaagaccaacgacacctacatgaagttcagctggctgaccgtgcccgagaagtccctggacaaagaacacagatgcatcgtgcggcacgaaaacaacaagaacggcgtggaccaggaaatcatcttcccacccatcaagaccgatgtgattacaatggaccccaaggacaactgctccaaggacgccaacgataccctgctgctccagctgaccaacaccagcgcctactacatgtacttgttgctgctgctgaagtccgtggtgtacttcgccatcatcacatgctgcctgctgcggagaaccgccttctgctgcaacggcgagaagtct

SEQ ID NO: 3320 - DNA, 2733 bp, synthetic construct
  source 1..2733: mol_type = other DNA
atggccttaccagtgaccgccttgctcctgccgctggccttgctgctccacgccgccaggccgctcgaggggaaaccaattcccaaccctcttctgggactggattcaaccggcagcggcgacaagcagctggacgccgacgtgtcccccaagcctaccatcttcctgccctctatcgccgagacaaagctccagaaggccggcacctacctgtgcctgctggaaaagttcttcccagatgtgattaagatccactggcaggaaaagaagtccaacaccatcctgggcagccaggaaggcaacaccatgaagaccaacgacacctacatgaagttcagctggctgaccgtgcccgagaagtccctggacaaagaacacagatgcatcgtgcggcacgaaaacaacaagaacggcgtggaccaggaaatcatcttcccacccatcaagaccgatgtgattacaatggaccccaaggacaactgctccaaggacgccaacgataccctgctgctccagctgaccaacaccagcgcctactacatgtacttgttgctgctgctgaagtccgtggtgtacttcgccatcatcacatgctgcctgctgcggagaaccgccttctgctgcaacggcgagaagtctagggccaagcgatctggatctggagcaacaaacttctcactactcaaacaagcaggtgacgtggaggagaatcccgggcctactagcatggccttaccagtgaccgccttgctcctgccgctggccttgctgctccacgccgccaggccggacattgtgctgacacagtctcccgccagcctggccgtttctctgggacagagagccaccatcagctgtagagccagcaagagcgtgtccaccagcggctactcttacctgcactggtatcagcagaagcccggccagcctcctaagctgctgatctacctggcctccaacctggaaagcggagtgcctgccagattttctggctctggcagcggcaccgacttcaccctgaatatccatcctgtggaagaagaggacgccgccacctactactgccagcacagtagagagctgcccttcacatttggctccggcaccaagctggaaatcaagggcggaggcggaagtggaggcggaggatctggcggcggaggctctcaggtgcagctggttgaatctggcggaggactggttcagcctggcggatctctgaagctgtcttgtgccgccagcggcttcgacttcagcagatactggatgagctgggtccgacaggcccctggcaaaggactggaatggatcggcgagatcaaccccaccagcagcaccatcaacttcacccctagcctgaaggacaaggtgttcatcagccgggacaacgccaagaacaccctgtacctccagatgagcaaagtgcggagcgaggacacagccctgtactactgtgccagaggcaactactacagatacggcgacgctatggactactggggccagggaacaagcgtgacagtctcttctacgcgtgagcagaaactgatctcggaagaggatgggagcggcagccagcctcacaccaagcccagcgtgttcgtgatgaagaacggcaccaacgtggcctgcctcgtgaaagagttctaccccaaggacatcaggatcaacctggtgtccagcaagaagatcaccgagttcgaccccgccatcgtgatctcccccagcggcaagtacaacgccgtgaagctggggaagtacgaggacagcaacagcgtgacctgctccgtgcagcacgacaacaagaccgtgcacagcaccgactttgaagtgaaaaccgactccaccgaccacgtgaagcccaaagagacagagaacaccaagcagcccagcaagagctgccacaagcccaaggccatcgtgcacaccgagaaagtgaacatgatgagcctgaccgtgctgggcctgcggatgctgttcgccaaaaccgtggccgtgaacttcctgctgaccgccaagctgttcttcctccgcgccaagagaagcggatctggcgtgaagcagaccctgaatttcgacctgctgaagctggctggcgacgtggaatccaacccaggcccttctagaggccatatgaccgagtacaagcccacggtgcgcctcgccacccgcgacgacgtccccagggccgtacgcaccctcgccgccgcgttcgccgactaccccgccacgcgccacaccgtcgatccggaccgccacatcgagcgggtcaccgagctgcaagaactcttcctcacgcgcgtcgggctcgacatcggcaaggtgtgggtcgcggacgacggcgccgcggtggcggtctggaccacgccggagagcgtcgaagcgggggcggtgttcgccgagatcggcccgcgcatggccgagttgagcggttcccggctggccgcgcagcaacagatggaaggcctcctggcgccgcaccggcccaaggagcccgcgtggttcctggccaccgtcggcgtctcgcccgaccaccagggcaagggtctgggcagcgccgtcgtgctccccggagtggaggcggccgagcgcgccggggtgcccgccttcctggagacctccgcgccccgcaacctccccttctacgagcggctcggcttcaccgtcaccgccgacgtcgaggtgcccgaaggaccgcgcacctggtgcatgacccgcaagcccggtgcctga

SEQ ID NO: 3321 - DNA, 3108 bp, synthetic construct
  source 1..3108: mol_type = other DNA
atggccttaccagtgaccgccttgctcctgccgctggccttgctgctccacgccgccaggccggacattgtgctgacacagtctcccgccagcctggccgtttctctgggacagagagccaccatcagctgtagagccagcaagagcgtgtccaccagcggctactcttacctgcactggtatcagcagaagcccggccagcctcctaagctgctgatctacctggcctccaacctggaaagcggagtgcctgccagattttctggctctggcagcggcaccgacttcaccctgaatatccatcctgtggaagaagaggacgccgccacctactactgccagcacagtagagagctgcccttcacatttggctccggcaccaagctggaaatcaagggacagcctaaggccaatcctaccgtgacactgttccctccaagcagcgaagaactccaggccaacaaggccacacttgtgtgcctgatctccgacttctaccctggggctgtgacagtggcttggaaggccgatggatctcctgtgaaagccggcgtggaaaccaccaagccatccaagcagagcaacaacaaatacgccgccagctcctacctgagcctgacacctgagcagtggaagtcccacagatcctacagctgccaagtgacccacgaaggcagcaccgtggaaaagacagtggcccctacagagtgcagcggatcccagagcttcggcctgctggaccccaagctgtgctacctgctggatggcatcctgttcatctacggcgtgatcctgaccgccctgttcctgagagtgaagttcagcagaagcgccgacgcccctgcctaccagcagggacagaaccaactgtacaacgagctgaacctgggcagacgggaagagtacgacgtgctggacaagcggagaggcagggaccctgagatgggcggaaagccccagcggagaaagaacccccaggaaggactgtataacgaactccagaaagacaagatggccgaagcctacagcgagatcggcatgaagggcgagcggagaagaggcaagggccacgatggcctgtaccagggcctgagcaccgccaccaaggacacctatgacgccctgcacatgcaggccctgcctccaagaagggccaagcgatctggatctggagcaacaaacttctcactactcaaacaagcaggtgacgtggaggagaatcccgggcctactagtatggactggatttggcgcatccttttccttgtcggcgctgctaccggcgcgcattccttcgaacaggtgcagctggttgaatctggcggaggactggttcagcctggcggatctctgaagctgtcttgtgccgccagcggcttcgacttcagcagatactggatgagctgggtccgacaggcccctggcaaaggactggaatggatcggcgagatcaaccccaccagcagcaccatcaacttcacccctagcctgaaggacaaggtgttcatcagccgggacaacgccaagaacaccctgtacctccagatgagcaaagtgcggagcgaggacacagccctgtactactgtgccagaggcaactactacagatacggcgacgctatggactactggggccagggaacaagcgtgacagtctcttctgcctctacaaagggaccctccgtgtttcctctggctcccagcagcaagtctacaagcggaggaacagccgctctgggctgcctggtcaaggattactttcccgagcctgtgaccgtgtcctggaatagcggagcactgacaagcggcgtgcacacctttccagccgtgctgcaaagcagcggcctgtactctctgagcagcgtggtcacagtgcctagctctagcctgggcacccagacctacatctgcaatgtgaaccacaagcctagcaacaccaaggtggacaagagagtggaacccaagagctgtggtacccagagttttgggttgttggaccctaaattgtgctatctgttggacggaatcctgttcatttacggagtgatcctgaccgcattgttcctgcgggttaagttttccagatccgcagacgcacccgcttaccaacaagggcagaaccaactctacaatgaacttaatttggggcggagggaagagtacgacgttctggacaaaaggaggggacgagatcccgagatgggcggaaagcctcagcgaaggaagaatccgcaagaggggctttataacgaactccagaaagataaaatggcagaagcctatagtgagattgggatgaagggagaaaggaggaggggtaaaggtcacgatgggttgtaccaaggattgagcacagccactaaagatacctatgatgcgctccacatgcaggccctgccgccaagacgcgccaagagaagcggatctggcgtgaagcagaccctgaatttcgacctgctgaagctggctggcgacgtggaatccaacccaggcccttctagaggccatatgaccgagtacaagcccacggtgcgcctcgccacccgcgacgacgtccccagggccgtacgcaccctcgccgccgcgttcgccgactaccccgccacgcgccacaccgtcgatccggaccgccacatcgagcgggtcaccgagctgcaagaactcttcctcacgcgcgtcgggctcgacatcggcaaggtgtgggtcgcggacgacggcgccgcggtggcggtctggaccacgccggagagcgtcgaagcgggggcggtgttcgccgagatcggcccgcgcatggccgagttgagcggttcccggctggccgcgcagcaacagatggaaggcctcctggcgccgcaccggcccaaggagcccgcgtggttcctggccaccgtcggcgtctcgcccgaccaccagggcaagggtctgggcagcgccgtcgtgctccccggagtggaggcggccgagcgcgccggggtgcccgccttcctggagacctccgcgccccgcaacctccccttctacgagcggctcggcttcaccgtcaccgccgacgtcgaggtgcccgaaggaccgcgcacctggtgcatgacccgcaagcccggtgcctga

SEQ ID NO: 3322 - DNA, 2463 bp, synthetic construct
  source 1..2463: mol_type = other DNA
atggccttaccagtgaccgccttgctcctgccgctggccttgctgctccacgccgccaggccggacattgtgctgacacagtctcccgccagcctggccgtttctctgggacagagagccaccatcagctgtagagccagcaagagcgtgtccaccagcggctactcttacctgcactggtatcagcagaagcccggccagcctcctaagctgctgatctacctggcctccaacctggaaagcggagtgcctgccagattttctggctctggcagcggcaccgacttcaccctgaatatccatcctgtggaagaagaggacgccgccacctactactgccagcacagtagagagctgcccttcacatttggctccggcaccaagctggaaatcaagctcgaggacctgaagaacgtgttcccacctgaggtggccgtgttcgagcctagcgaggccgagatcagccacacccagaaagccaccctcgtgtgcctggctaccggcttctaccccgaccatgtggaactgtcttggtgggtcaacggcaaagaggtgcacagcggcgtgtctaccgacccccagccactgaaagaacagcccgccctgaacgacagccggtactgcctgagcagcagactgagagtgtccgccaccttctggcagaacccccggaaccacttcagatgccaggtgcagttctacggcctgagcgagaacgacgagtggacccaggacagagccaagcccgtgacccagatcgtgtctgccgaagcctggggcagagccgattgcggatcccagagcttcggcctgctggaccccaagctgtgctacctgctggatggcatcctgttcatctacggcgtgatcctgaccgccctgttcctgagagtgaagttcagcagaagcgccgacgcccctgcctaccagcagggacagaaccaactgtacaacgagctgaacctgggcagacgggaagagtacgacgtgctggacaagcggagaggcagggaccctgagatgggcggaaagccccagcggagaaagaacccccaggaaggactgtataacgaactccagaaagacaagatggccgaagcctacagcgagatcggcatgaagggcgagcggagaagaggcaagggccacgatggcctgtaccagggcctgagcaccgccaccaaggacacctatgacgccctgcacatgcaggccctgcctccaagaagggccaagcgatctggatctggagcaacaaacttctcactactcaaacaagcaggtgacgtggaggagaatcccgggcctactagtatggactggatttggcgcatccttttccttgtcggcgctgctaccggcgcgcattccttcgaacaggtgcagctggttgaatctggcggaggactggttcagcctggcggatctctgaagctgtcttgtgccgccagcggcttcgacttcagcagatactggatgagctgggtccgacaggcccctggcaaaggactggaatggatcggcgagatcaaccccaccagcagcaccatcaacttcacccctagcctgaaggacaaggtgttcatcagccgggacaacgccaagaacaccctgtacctccagatgagcaaagtgcggagcgaggacacagccctgtactactgtgccagaggcaactactacagatacggcgacgctatggactactggggccagggaacaagcgtgacagtctcttctacgcgtatccagaaccctgatcctgccgtgtaccagctgcgggatagcaagagcagcgacaagagcgtgtgtctgttcaccgacttcgacagccagaccaacgtgtcccagagcaaggactccgacgtgtacatcaccgataagaccgtgctggacatgcggagcatggacttcaagagcaactccgccgtggcctggtccaacaagtccgatttcgcctgcgccaacgccttcaacaacagcattatccccgaggacacattcttcccaagccccgagagcagctgcggtacccagagttttgggttgttggaccctaaattgtgctatctgttggacggaatcctgttcatttacggagtgatcctgaccgcattgttcctgcgggttaagttttccagatccgcagacgcacccgcttaccaacaagggcagaaccaactctacaatgaacttaatttggggcggagggaagagtacgacgttctggacaaaaggaggggacgagatcccgagatgggcggaaagcctcagcgaaggaagaatccgcaagaggggctttataacgaactccagaaagataaaatggcagaagcctatagtgagattgggatgaagggagaaaggaggaggggtaaaggtcacgatgggttgtaccaaggattgagcacagccactaaagatacctatgatgcgctccacatgcaggccctgccgccaaga

SEQ ID NO: 3323 - DNA, 2463 bp, synthetic construct
  source 1..2463: mol_type = other DNA
atggccttaccagtgaccgccttgctcctgccgctggccttgctgctccacgccgccaggccggacattgtgctgacacagtctcccgccagcctggccgtttctctgggacagagagccaccatcagctgtagagccagcaagagcgtgtccaccagcggctactcttacctgcactggtatcagcagaagcccggccagcctcctaagctgctgatctacctggcctccaacctggaaagcggagtgcctgccagattttctggctctggcagcggcaccgacttcaccctgaatatccatcctgtggaagaagaggacgccgccacctactactgccagcacagtagagagctgcccttcacatttggctccggcaccaagctggaaatcaagctcgaggacctgaagaacgtgttcccacctgaggtggccgtgttcgagcctagcaaggccgagatcgcccacacccagaaagccaccctcgtgtgcctggctaccggcttctaccccgaccatgtggaactgtcttggtgggtcaacggcaaagaggtgcacagcggcgtgtgtaccgacccccagccactgaaagaacagcccgccctgaacgacagccggtactgcctgagcagcagactgagagtgtccgccaccttctggcagaacccccggaaccacttcagatgccaggtgcagttctacggcctgagcgagaacgacgagtggacccaggacagagccaagcccgtgacccagatcgtgtctgccgaagcctggggcagagccgattgcggatcccagagcttcggcctgctggaccccaagctgtgctacctgctggatggcatcctgttcatctacggcgtgatcctgaccgccctgttcctgagagtgaagttcagcagaagcgccgacgcccctgcctaccagcagggacagaaccaactgtacaacgagctgaacctgggcagacgggaagagtacgacgtgctggacaagcggagaggcagggaccctgagatgggcggaaagccccagcggagaaagaacccccaggaaggactgtataacgaactccagaaagacaagatggccgaagcctacagcgagatcggcatgaagggcgagcggagaagaggcaagggccacgatggcctgtaccagggcctgagcaccgccaccaaggacacctatgacgccctgcacatgcaggccctgcctccaagaagggccaagcgatctggatctggagcaacaaacttctcactactcaaacaagcaggtgacgtggaggagaatcccgggcctactagtatggactggatttggcgcatccttttccttgtcggcgctgctaccggcgcgcattccttcgaacaggtgcagctggttgaatctggcggaggactggttcagcctggcggatctctgaagctgtcttgtgccgccagcggcttcgacttcagcagatactggatgagctgggtccgacaggcccctggcaaaggactggaatggatcggcgagatcaaccccaccagcagcaccatcaacttcacccctagcctgaaggacaaggtgttcatcagccgggacaacgccaagaacaccctgtacctccagatgagcaaagtgcggagcgaggacacagccctgtactactgtgccagaggcaactactacagatacggcgacgctatggactactggggccagggaacaagcgtgacagtctcttctacgcgtatccagaaccctgatcctgccgtgtaccagctgcgggatagcaagagcagcgacaagagcgtgtgtctgttcaccgacttcgacagccagaccaacgtgtcccagagcaaggactccgacgtgtacatcaccgataagtgcgtgctggacatgcggagcatggacttcaagagcaactccgccgtggcctggtccaacaagtccgatttcgcctgcgccaacgccttcaacaacagcattatccccgaggacacattcttcccaagcagcgacgtgccctgcggtacccagagttttgggttgttggaccctaaattgtgctatctgttggacggaatcctgttcatttacggagtgatcctgaccgcattgttcctgcgggttaagttttccagatccgcagacgcacccgcttaccaacaagggcagaaccaactctacaatgaacttaatttggggcggagggaagagtacgacgttctggacaaaaggaggggacgagatcccgagatgggcggaaagcctcagcgaaggaagaatccgcaagaggggctttataacgaactccagaaagataaaatggcagaagcctatagtgagattgggatgaagggagaaaggaggaggggtaaaggtcacgatgggttgtaccaaggattgagcacagccactaaagatacctatgatgcgctccacatgcaggccctgccgccaaga

SEQ ID NO: 3324 - DNA, 2676 bp, synthetic construct
  source 1..2676: mol_type = other DNA
atggccttaccagtgaccgccttgctcctgccgctggccttgctgctccacgccgccaggccggacattgtgctgacacagtctcccgccagcctggccgtttctctgggacagagagccaccatcagctgtagagccagcaagagcgtgtccaccagcggctactcttacctgcactggtatcagcagaagcccggccagcctcctaagctgctgatctacctggcctccaacctggaaagcggagtgcctgccagattttctggctctggcagcggcaccgacttcaccctgaatatccatcctgtggaagaagaggacgccgccacctactactgccagcacagtagagagctgcccttcacatttggctccggcaccaagctggaaatcaagctcgaggggaaaccaattcccaaccctcttctgggactggattcaaccggcagcggcgaggacctgaagaacgtgttcccacctgaggtggccgtgttcgagcctagcgaggccgagatcagccacacccagaaagccaccctcgtgtgcctggctaccggcttctaccccgaccatgtggaactgtcttggtgggtcaacggcaaagaggtgcacagcggcgtgtctaccgacccccagccactgaaagaacagcccgccctgaacgacagccggtactgcctgagcagcagactgagagtgtccgccaccttctggcagaacccccggaaccacttcagatgccaggtgcagttctacggcctgagcgagaacgacgagtggacccaggacagagccaagcccgtgacccagatcgtgtctgccgaagcctggggcagagccgattgcggatcccagagcttcggcctgctggaccccaagctgtgctacctgctggatggcatcctgttcatctacggcgtgatcctgaccgccctgttcctgagagtgaagttcagcagaagcgccgacgcccctgcctaccagcagggacagaaccaactgtacaacgagctgaacctgggcagacgggaagagtacgacgtgctggacaagcggagaggcagggaccctgagatgggcggaaagccccagcggagaaagaacccccaggaaggactgtataacgaactccagaaagacaagatggccgaagcctacagcgagatcggcatgaagggcgagcggagaagaggcaagggccacgatggcctgtaccagggcctgagcaccgccaccaaggacacctatgacgccctgcacatgcaggccctgcctccaagaagggccaagcgatctggatctggagcaacaaacttctcactactcaaacaagcaggtgacgtggaggagaatcccgggcctactagtatggactggatttggcgcatccttttccttgtcggcgctgctaccggcgcgcattccttcgaacaggtgcagctggttgaatctggcggaggactggttcagcctggcggatctctgaagctgtcttgtgccgccagcggcttcgacttcagcagatactggatgagctgggtccgacaggcccctggcaaaggactggaatggatcggcgagatcaaccccaccagcagcaccatcaacttcacccctagcctgaaggacaaggtgttcatcagccgggacaacgccaagaacaccctgtacctccagatgagcaaagtgcggagcgaggacacagccctgtactactgtgccagaggcaactactacagatacggcgacgctatggactactggggccagggaacaagcgtgacagtctcttctacgcgtgagcagaaactgatctcggaagaggatgggagcggcatccagaaccctgatcctgccgtgtaccagctgcgggatagcaagagcagcgacaagagcgtgtgtctgttcaccgacttcgacagccagaccaacgtgtcccagagcaaggactccgacgtgtacatcaccgataagaccgtgctggacatgcggagcatggacttcaagagcaactccgccgtggcctggtccaacaagtccgatttcgcctgcgccaacgccttcaacaacagcattatccccgaggacacattcttcccaagccccgagagcagctgcggtacccagagttttgggttgttggaccctaaattgtgctatctgttggacggaatcctgttcatttacggagtgatcctgaccgcattgttcctgaggagcaagcggtcacggctgctccacagcgattacatgaatatgacaccacgaagaccgggtcctactcgcaaacactaccaaccctacgcacctccccgcgactttgcagcgtaccgatctcgggttaagttttccagatccgcagacgcacccgcttaccaacaagggcagaaccaactctacaatgaacttaatttggggcggagggaagagtacgacgttctggacaaaaggaggggacgagatcccgagatgggcggaaagcctcagcgaaggaagaatccgcaagaggggctttataacgaactccagaaagataaaatggcagaagcctatagtgagattgggatgaagggagaaaggaggaggggtaaaggtcacgatgggttgtaccaaggattgagcacagccactaaagatacctatgatgcgctccacatgcaggccctgccgccaaga

SEQ ID NO: 3325 - DNA, 2799 bp, synthetic construct
  source 1..2799: mol_type = other DNA
atggccttaccagtgaccgccttgctcctgccgctggccttgctgctccacgccgccaggccggacattgtgctgacacagtctcccgccagcctggccgtttctctgggacagagagccaccatcagctgtagagccagcaagagcgtgtccaccagcggctactcttacctgcactggtatcagcagaagcccggccagcctcctaagctgctgatctacctggcctccaacctggaaagcggagtgcctgccagattttctggctctggcagcggcaccgacttcaccctgaatatccatcctgtggaagaagaggacgccgccacctactactgccagcacagtagagagctgcccttcacatttggctccggcaccaagctggaaatcaagctcgaggggaaaccaattcccaaccctcttctgggactggattcaaccggcagcggcgaggacctgaagaacgtgttcccacctgaggtggccgtgttcgagcctagcgaggccgagatcagccacacccagaaagccaccctcgtgtgcctggctaccggcttctaccccgaccatgtggaactgtcttggtgggtcaacggcaaagaggtgcacagcggcgtgtctaccgacccccagccactgaaagaacagcccgccctgaacgacagccggtactgcctgagcagcagactgagagtgtccgccaccttctggcagaacccccggaaccacttcagatgccaggtgcagttctacggcctgagcgagaacgacgagtggacccaggacagagccaagcccgtgacccagatcgtgtctgccgaagcctggggcagagccgattgcggatcccagagcttcggcctgctggaccccaagctgtgctacctgctggatggcatcctgttcatctacggcgtgatcctgaccgccctgttcctgaggagtaagaggagcaggctcctgcacagtgactacatgaacatgactccacgccgccccggacccacccgcaagcattaccagccctatgccccaccacgcgacttcgcagcctatcgctccagagtgaagttcagcagaagcgccgacgcccctgcctaccagcagggacagaaccaactgtacaacgagctgaacctgggcagacgggaagagtacgacgtgctggacaagcggagaggcagggaccctgagatgggcggaaagccccagcggagaaagaacccccaggaaggactgtataacgaactccagaaagacaagatggccgaagcctacagcgagatcggcatgaagggcgagcggagaagaggcaagggccacgatggcctgtaccagggcctgagcaccgccaccaaggacacctatgacgccctgcacatgcaggccctgcctccaagaagggccaagcgatctggatctggagcaacaaacttctcactactcaaacaagcaggtgacgtggaggagaatcccgggcctactagtatggactggatttggcgcatccttttccttgtcggcgctgctaccggcgcgcattccttcgaacaggtgcagctggttgaatctggcggaggactggttcagcctggcggatctctgaagctgtcttgtgccgccagcggcttcgacttcagcagatactggatgagctgggtccgacaggcccctggcaaaggactggaatggatcggcgagatcaaccccaccagcagcaccatcaacttcacccctagcctgaaggacaaggtgttcatcagccgggacaacgccaagaacaccctgtacctccagatgagcaaagtgcggagcgaggacacagccctgtactactgtgccagaggcaactactacagatacggcgacgctatggactactggggccagggaacaagcgtgacagtctcttctacgcgtgagcagaaactgatctcggaagaggatgggagcggcatccagaaccctgatcctgccgtgtaccagctgcgggatagcaagagcagcgacaagagcgtgtgtctgttcaccgacttcgacagccagaccaacgtgtcccagagcaaggactccgacgtgtacatcaccgataagaccgtgctggacatgcggagcatggacttcaagagcaactccgccgtggcctggtccaacaagtccgatttcgcctgcgccaacgccttcaacaacagcattatccccgaggacacattcttcccaagccccgagagcagctgcggtacccagagttttgggttgttggaccctaaattgtgctatctgttggacggaatcctgttcatttacggagtgatcctgaccgcattgttcctgaggagcaagcggtcacggctgctccacagcgattacatgaatatgacaccacgaagaccgggtcctactcgcaaacactaccaaccctacgcacctccccgcgactttgcagcgtaccgatctcgggttaagttttccagatccgcagacgcacccgcttaccaacaagggcagaaccaactctacaatgaacttaatttggggcggagggaagagtacgacgttctggacaaaaggaggggacgagatcccgagatgggcggaaagcctcagcgaaggaagaatccgcaagaggggctttataacgaactccagaaagataaaatggcagaagcctatagtgagattgggatgaagggagaaaggaggaggggtaaaggtcacgatgggttgtaccaaggattgagcacagccactaaagatacctatgatgcgctccacatgcaggccctgccgccaaga

SEQ ID NO: 3326 - DNA, 2682 bp, synthetic construct
  source 1..2682: mol_type = other DNA
atggccttaccagtgaccgccttgctcctgccgctggccttgctgctccacgccgccaggccggacattgtgctgacacagtctcccgccagcctggccgtttctctgggacagagagccaccatcagctgtagagccagcaagagcgtgtccaccagcggctactcttacctgcactggtatcagcagaagcccggccagcctcctaagctgctgatctacctggcctccaacctggaaagcggagtgcctgccagattttctggctctggcagcggcaccgacttcaccctgaatatccatcctgtggaagaagaggacgccgccacctactactgccagcacagtagagagctgcccttcacatttggctccggcaccaagctggaaatcaagctcgaggggaaaccaattcccaaccctcttctgggactggattcaaccggcagcggcgaggacctgaagaacgtgttcccacctgaggtggccgtgttcgagcctagcgaggccgagatcagccacacccagaaagccaccctcgtgtgcctggctaccggcttctaccccgaccatgtggaactgtcttggtgggtcaacggcaaagaggtgcacagcggcgtgtctaccgacccccagccactgaaagaacagcccgccctgaacgacagccggtactgcctgagcagcagactgagagtgtccgccaccttctggcagaacccccggaaccacttcagatgccaggtgcagttctacggcctgagcgagaacgacgagtggacccaggacagagccaagcccgtgacccagatcgtgtctgccgaagcctggggcagagccgattgcggatcccagagcttcggcctgctggaccccaagctgtgctacctgctggatggcatcctgttcatctacggcgtgatcctgaccgccctgttcctgagagtgaagttcagcagaagcgccgacgcccctgcctaccagcagggacagaaccaactgtacaacgagctgaacctgggcagacgggaagagtacgacgtgctggacaagcggagaggcagggaccctgagatgggcggaaagccccagcggagaaagaacccccaggaaggactgtataacgaactccagaaagacaagatggccgaagcctacagcgagatcggcatgaagggcgagcggagaagaggcaagggccacgatggcctgtaccagggcctgagcaccgccaccaaggacacctatgacgccctgcacatgcaggccctgcctccaagaagggccaagcgatctggatctggagcaacaaacttctcactactcaaacaagcaggtgacgtggaggagaatcccgggcctactagtatggactggatttggcgcatccttttccttgtcggcgctgctaccggcgcgcattccttcgaacaggtgcagctggttgaatctggcggaggactggttcagcctggcggatctctgaagctgtcttgtgccgccagcggcttcgacttcagcagatactggatgagctgggtccgacaggcccctggcaaaggactggaatggatcggcgagatcaaccccaccagcagcaccatcaacttcacccctagcctgaaggacaaggtgttcatcagccgggacaacgccaagaacaccctgtacctccagatgagcaaagtgcggagcgaggacacagccctgtactactgtgccagaggcaactactacagatacggcgacgctatggactactggggccagggaacaagcgtgacagtctcttctacgcgtgagcagaaactgatctcggaagaggatctggggagcggcatccagaaccctgatcctgccgtgtaccagctgcgggatagcaagagcagcgacaagagcgtgtgtctgttcaccgacttcgacagccagaccaacgtgtcccagagcaaggactccgacgtgtacatcaccgataagaccgtgctggacatgcggagcatggacttcaagagcaactccgccgtggcctggtccaacaagtccgatttcgcctgcgccaacgccttcaacaacagcattatccccgaggacacattcttcccaagccccgagagcagctgcggtacccagagttttgggttgttggaccctaaattgtgctatctgttggacggaatcctgttcatttacggagtgatcctgaccgcattgttcctgaagagaggccggaagaagctgctgtacatcttcaagcagcctttcatgcggcccgtgcagaccacccaggaagaggacggctgctcctgccggttccccgaggaagaagaaggcggctgcgagctgcgggttaagttttccagatccgcagacgcacccgcttaccaacaagggcagaaccaactctacaatgaacttaatttggggcggagggaagagtacgacgttctggacaaaaggaggggacgagatcccgagatgggcggaaagcctcagcgaaggaagaatccgcaagaggggctttataacgaactccagaaagataaaatggcagaagcctatagtgagattgggatgaagggagaaaggaggaggggtaaaggtcacgatgggttgtaccaaggattgagcacagccactaaagatacctatgatgcgctccacatgcaggccctgccgccaaga

SEQ ID NO: 3327 - DNA, 2808 bp, synthetic construct
  source 1..2808: mol_type = other DNA
atggccttaccagtgaccgccttgctcctgccgctggccttgctgctccacgccgccaggccggacattgtgctgacacagtctcccgccagcctggccgtttctctgggacagagagccaccatcagctgtagagccagcaagagcgtgtccaccagcggctactcttacctgcactggtatcagcagaagcccggccagcctcctaagctgctgatctacctggcctccaacctggaaagcggagtgcctgccagattttctggctctggcagcggcaccgacttcaccctgaatatccatcctgtggaagaagaggacgccgccacctactactgccagcacagtagagagctgcccttcacatttggctccggcaccaagctggaaatcaagctcgaggggaaaccaattcccaaccctcttctgggactggattcaaccggcagcggcgaggacctgaagaacgtgttcccacctgaggtggccgtgttcgagcctagcgaggccgagatcagccacacccagaaagccaccctcgtgtgcctggctaccggcttctaccccgaccatgtggaactgtcttggtgggtcaacggcaaagaggtgcacagcggcgtgtctaccgacccccagccactgaaagaacagcccgccctgaacgacagccggtactgcctgagcagcagactgagagtgtccgccaccttctggcagaacccccggaaccacttcagatgccaggtgcagttctacggcctgagcgagaacgacgagtggacccaggacagagccaagcccgtgacccagatcgtgtctgccgaagcctggggcagagccgattgcggatcccagagcttcggcctgctggaccccaagctgtgctacctgctggatggcatcctgttcatctacggcgtgatcctgaccgccctgttcctgaaacggggcagaaagaaactcctgtatatattcaaacaaccatttatgagaccagtacaaactactcaagaggaagatggctgtagctgccgatttccagaagaagaagaaggaggatgtgaactgagagtgaagttcagcagaagcgccgacgcccctgcctaccagcagggacagaaccaactgtacaacgagctgaacctgggcagacgggaagagtacgacgtgctggacaagcggagaggcagggaccctgagatgggcggaaagccccagcggagaaagaacccccaggaaggactgtataacgaactccagaaagacaagatggccgaagcctacagcgagatcggcatgaagggcgagcggagaagaggcaagggccacgatggcctgtaccagggcctgagcaccgccaccaaggacacctatgacgccctgcacatgcaggccctgcctccaagaagggccaagcgatctggatctggagcaacaaacttctcactactcaaacaagcaggtgacgtggaggagaatcccgggcctactagtatggactggatttggcgcatccttttccttgtcggcgctgctaccggcgcgcattccttcgaacaggtgcagctggttgaatctggcggaggactggttcagcctggcggatctctgaagctgtcttgtgccgccagcggcttcgacttcagcagatactggatgagctgggtccgacaggcccctggcaaaggactggaatggatcggcgagatcaaccccaccagcagcaccatcaacttcacccctagcctgaaggacaaggtgttcatcagccgggacaacgccaagaacaccctgtacctccagatgagcaaagtgcggagcgaggacacagccctgtactactgtgccagaggcaactactacagatacggcgacgctatggactactggggccagggaacaagcgtgacagtctcttctacgcgtgagcagaaactgatctcggaagaggatctggggagcggcatccagaaccctgatcctgccgtgtaccagctgcgggatagcaagagcagcgacaagagcgtgtgtctgttcaccgacttcgacagccagaccaacgtgtcccagagcaaggactccgacgtgtacatcaccgataagaccgtgctggacatgcggagcatggacttcaagagcaactccgccgtggcctggtccaacaagtccgatttcgcctgcgccaacgccttcaacaacagcattatccccgaggacacattcttcccaagccccgagagcagctgcggtacccagagttttgggttgttggaccctaaattgtgctatctgttggacggaatcctgttcatttacggagtgatcctgaccgcattgttcctgaagagaggccggaagaagctgctgtacatcttcaagcagcctttcatgcggcccgtgcagaccacccaggaagaggacggctgctcctgccggttccccgaggaagaagaaggcggctgcgagctgcgggttaagttttccagatccgcagacgcacccgcttaccaacaagggcagaaccaactctacaatgaacttaatttggggcggagggaagagtacgacgttctggacaaaaggaggggacgagatcccgagatgggcggaaagcctcagcgaaggaagaatccgcaagaggggctttataacgaactccagaaagataaaatggcagaagcctatagtgagattgggatgaagggagaaaggaggaggggtaaaggtcacgatgggttgtaccaaggattgagcacagccactaaagatacctatgatgcgctccacatgcaggccctgccgccaaga

SEQ ID NO: 3328 - DNA, 2481 bp, synthetic construct
  source 1..2481: mol_type = other DNA
atggccttaccagtgaccgccttgctcctgccgctggccttgctgctccacgccgccaggccggacattgtgctgacacagtctcccgccagcctggccgtttctctgggacagagagccaccatcagctgtagagccagcaagagcgtgtccaccagcggctactcttacctgcactggtatcagcagaagcccggccagcctcctaagctgctgatctacctggcctccaacctggaaagcggagtgcctgccagattttctggctctggcagcggcaccgacttcaccctgaatatccatcctgtggaagaagaggacgccgccacctactactgccagcacagtagagagctgcccttcacatttggctccggcaccaagctggaaatcaagctcgagcagagcttcggcctgctggaccccaagctgtgctacctgctggatggcatcctgttcatctacggcgtgatcctgaccgccctgttcctgagagtgaagttcagcagaagcgccgacgcccctgcctaccagcagggacagaaccaactgtacaacgagctgaacctgggcagacgggaagagtacgacgtgctggacaagcggagaggcagggaccctgagatgggcggaaagccccagcggagaaagaacccccaggaaggactgtataacgaactccagaaagacaagatggccgaagcctacagcgagatcggcatgaagggcgagcggagaagaggcaagggccacgatggcctgtaccagggcctgagcaccgccaccaaggacacctatgacgccctgcacatgcaggccctgcctccaagaagggccaagcgatctggatctggagcaacaaacttctcactactcaaacaagcaggtgacgtggaggagaatcccgggcctactagtatggactggatttggcgcatccttttccttgtcggcgctgctaccggcgcgcattccttcgaacaggtgcagctggttgaatctggcggaggactggttcagcctggcggatctctgaagctgtcttgtgccgccagcggcttcgacttcagcagatactggatgagctgggtccgacaggcccctggcaaaggactggaatggatcggcgagatcaaccccaccagcagcaccatcaacttcacccctagcctgaaggacaaggtgttcatcagccgggacaacgccaagaacaccctgtacctccagatgagcaaagtgcggagcgaggacacagccctgtactactgtgccagaggcaactactacagatacggcgacgctatggactactggggccagggaacaagcgtgacagtctcttctacgcgtcagagttttgggttgttggaccctaaattgtgctatctgttggacggaatcctgttcatttacggagtgatcctgaccgcattgttcctgcgggttaagttttccagatccgcagacgcacccgcttaccaacaagggcagaaccaactctacaatgaacttaatttggggcggagggaagagtacgacgttctggacaaaaggaggggacgagatcccgagatgggcggaaagcctcagcgaaggaagaatccgcaagaggggctttataacgaactccagaaagataaaatggcagaagcctatagtgagattgggatgaagggagaaaggaggaggggtaaaggtcacgatgggttgtaccaaggattgagcacagccactaaagatacctatgatgcgctccacatgcaggccctgccgccaagacgcgccaagagaagcggatctggcgtgaagcagaccctgaatttcgacctgctgaagctggctggcgacgtggaatccaacccaggcccttctagaggccatatgaccgagtacaagcccacggtgcgcctcgccacccgcgacgacgtccccagggccgtacgcaccctcgccgccgcgttcgccgactaccccgccacgcgccacaccgtcgatccggaccgccacatcgagcgggtcaccgagctgcaagaactcttcctcacgcgcgtcgggctcgacatcggcaaggtgtgggtcgcggacgacggcgccgcggtggcggtctggaccacgccggagagcgtcgaagcgggggcggtgttcgccgagatcggcccgcgcatggccgagttgagcggttcccggctggccgcgcagcaacagatggaaggcctcctggcgccgcaccggcccaaggagcccgcgtggttcctggccaccgtcggcgtctcgcccgaccaccagggcaagggtctgggcagcgccgtcgtgctccccggagtggaggcggccgagcgcgccggggtgcccgccttcctggagacctccgcgccccgcaacctccccttctacgagcggctcggcttcaccgtcaccgccgacgtcgaggtgcccgaaggaccgcgcacctggtgcatgacccgcaagcccggtgcctga

SEQ ID NO: 3329 - DNA, 1953 bp, synthetic construct
  source 1..1953: mol_type = other DNA
atggccttaccagtgaccgccttgctcctgccgctggccttgctgctccacgccgccaggccggacattgtgctgacacagtctcccgccagcctggccgtttctctgggacagagagccaccatcagctgtagagccagcaagagcgtgtccaccagcggctactcttacctgcactggtatcagcagaagcccggccagcctcctaagctgctgatctacctggcctccaacctggaaagcggagtgcctgccagattttctggctctggcagcggcaccgacttcaccctgaatatccatcctgtggaagaagaggacgccgccacctactactgccagcacagtagagagctgcccttcacatttggctccggcaccaagctggaaatcaagctcgagggacagcctaaggccaatcctaccgtgacactgttccctccaagcagcgaagaactccaggccaacaaggccacacttgtgtgcctgatctccgacttctaccctggggctgtgacagtggcttggaaggccgatggatctcctgtgaaagccggcgtggaaaccaccaagccatccaagcagagcaacaacaaatacgccgccagctcctacctgagcctgacacctgagcagtggaagtcccacagatcctacagctgccaagtgacccacgaaggcagcaccgtggaaaagacagtggcccctacagagtgcagccccatcaagaccgatgtgattacaatggaccccaaggacaactgctccaaggacgccaacgataccctgctgctccagctgaccaacaccagcgcctactacatgtacttgttgctgctgctgaagtccgtggtgtacttcgccatcatcacatgctgcctgctgcggagaaccgccttctgctgcaacggcgagaagtctagggccaagcgatctggatctggagcaacaaacttctcactactcaaacaagcaggtgacgtggaggagaatcccgggcctactagtatggactggatttggcgcatccttttccttgtcggcgctgctaccggcgcgcattccttcgaacaggtgcagctggttgaatctggcggaggactggttcagcctggcggatctctgaagctgtcttgtgccgccagcggcttcgacttcagcagatactggatgagctgggtccgacaggcccctggcaaaggactggaatggatcggcgagatcaaccccaccagcagcaccatcaacttcacccctagcctgaaggacaaggtgttcatcagccgggacaacgccaagaacaccctgtacctccagatgagcaaagtgcggagcgaggacacagccctgtactactgtgccagaggcaactactacagatacggcgacgctatggactactggggccagggaacaagcgtgacagtctcttctacgcgtgcctctacaaagggaccctccgtgtttcctctggctcccagcagcaagtctacaagcggaggaacagccgctctgggctgcctggtcaaggattactttcccgagcctgtgaccgtgtcctggaatagcggagcactgacaagcggcgtgcacacctttccagccgtgctgcaaagcagcggcctgtactctctgagcagcgtggtcacagtgcctagctctagcctgggcacccagacctacatctgcaatgtgaaccacaagcctagcaacaccaaggtggacaagagagtggaacccaagagctgtgaagtgaaaaccgactccaccgaccacgtgaagcccaaagagacagagaacaccaagcagcccagcaagagctgccacaagcccaaggccatcgtgcacaccgagaaagtgaacatgatgagcctgaccgtgctgggcctgcggatgctgttcgccaaaaccgtggccgtgaacttcctgctgaccgccaagctgttcttcctc

SEQ ID NO: 3330 - DNA, 1887 bp, synthetic construct
  source 1..1887: mol_type = other DNA
atggccttaccagtgaccgccttgctcctgccgctggccttgctgctccacgccgccaggccggacattgtgctgacacagtctcccgccagcctggccgtttctctgggacagagagccaccatcagctgtagagccagcaagagcgtgtccaccagcggctactcttacctgcactggtatcagcagaagcccggccagcctcctaagctgctgatctacctggcctccaacctggaaagcggagtgcctgccagattttctggctctggcagcggcaccgacttcaccctgaatatccatcctgtggaagaagaggacgccgccacctactactgccagcacagtagagagctgcccttcacatttggctccggcaccaagctggaaatcaagctcgagggacagcctaaggccaatcctaccgtgacactgttccctccaagcagcgaagaactccaggccaacaaggccacacttgtgtgcctgatctccgacttctaccctggggctgtgacagtggcttggaaggccgatggatctcctgtgaaagccggcgtggaaaccaccaagccatccaagcagagcaacaacaaatacgccgccagctcctacctgagcctgacacctgagcagtggaagtcccacagatcctacagctgccaagtgacccacgaaggcagcaccgtggaaaagacagtggcccctacagagtgcagcggcagagccgattgcggcatcaccagcgccagctaccaccagggcgtgctgagcgccaccatcctgtacgagatcctgctgggcaaggccaccctgtacgccgtgctggtgtctgccctggtgctgatggctatggtcaagcggaaggacagccggggaagggccaagcgatctggatctggagcaacaaacttctcactactcaaacaagcaggtgacgtggaggagaatcccgggcctactagtatggactggatttggcgcatccttttccttgtcggcgctgctaccggcgcgcattccttcgaacaggtgcagctggttgaatctggcggaggactggttcagcctggcggatctctgaagctgtcttgtgccgccagcggcttcgacttcagcagatactggatgagctgggtccgacaggcccctggcaaaggactggaatggatcggcgagatcaaccccaccagcagcaccatcaacttcacccctagcctgaaggacaaggtgttcatcagccgggacaacgccaagaacaccctgtacctccagatgagcaaagtgcggagcgaggacacagccctgtactactgtgccagaggcaactactacagatacggcgacgctatggactactggggccagggaacaagcgtgacagtctcttctacgcgtgcctctacaaagggaccctccgtgtttcctctggctcccagcagcaagtctacaagcggaggaacagccgctctgggctgcctggtcaaggattactttcccgagcctgtgaccgtgtcctggaatagcggagcactgacaagcggcgtgcacacctttccagccgtgctgcaaagcagcggcctgtactctctgagcagcgtggtcacagtgcctagctctagcctgggcacccagacctacatctgcaatgtgaaccacaagcctagcaacaccaaggtggacaagagagtggaacccaagagctgtatccccgaggacacattcttcccaagcagcgacgtgccctgcgacgtgaagctggtggaaaagagcttcgagacagacaccaacctgaacttccagaacctgagcgtgatcggcttcagaatcctgctgctgaaagtggccggctttaacctgctgatgaccctgcggctgtggtccagc

SEQ ID NO: 3331 - DNA, 1887 bp, synthetic construct
  source 1..1887: mol_type = other DNA
atggccttaccagtgaccgccttgctcctgccgctggccttgctgctccacgccgccaggccggacattgtgctgacacagtctcccgccagcctggccgtttctctgggacagagagccaccatcagctgtagagccagcaagagcgtgtccaccagcggctactcttacctgcactggtatcagcagaagcccggccagcctcctaagctgctgatctacctggcctccaacctggaaagcggagtgcctgccagattttctggctctggcagcggcaccgacttcaccctgaatatccatcctgtggaagaagaggacgccgccacctactactgccagcacagtagagagctgcccttcacatttggctccggcaccaagctggaaatcaagctcgagggacagcctaaggccaatcctaccgtgacactgttccctccaagcagcgaagaactccaggccaacaaggccacacttgtgtgcctgatctccgacttctaccctggggctgtgacagtggcttggaaggccgatggatctcctgtgaaagccggcgtggaaaccaccaagccatccaagcagagcaacaacaaatacgccgccagctcctacctgagcctgacacctgagcagtggaagtcccacagatcctacagctgccaagtgacccacgaaggcagcaccgtggaaaagacagtggcccctacagagtgcagcggcagagccgattgcggctttaccagcgagagctaccagcagggcgtgctgagcgccaccatcctgtacgagatcctgctgggcaaggccaccctgtacgccgtgctggtgtctgccctggtgctgatggctatggtcaagcggaaggacagccggggaagggccaagcgatctggatctggagcaacaaacttctcactactcaaacaagcaggtgacgtggaggagaatcccgggcctactagtatggactggatttggcgcatccttttccttgtcggcgctgctaccggcgcgcattccttcgaacaggtgcagctggttgaatctggcggaggactggttcagcctggcggatctctgaagctgtcttgtgccgccagcggcttcgacttcagcagatactggatgagctgggtccgacaggcccctggcaaaggactggaatggatcggcgagatcaaccccaccagcagcaccatcaacttcacccctagcctgaaggacaaggtgttcatcagccgggacaacgccaagaacaccctgtacctccagatgagcaaagtgcggagcgaggacacagccctgtactactgtgccagaggcaactactacagatacggcgacgctatggactactggggccagggaacaagcgtgacagtctcttctacgcgtgcctctacaaagggaccctccgtgtttcctctggctcccagcagcaagtctacaagcggaggaacagccgctctgggctgcctggtcaaggattactttcccgagcctgtgaccgtgtcctggaatagcggagcactgacaagcggcgtgcacacctttccagccgtgctgcaaagcagcggcctgtactctctgagcagcgtggtcacagtgcctagctctagcctgggcacccagacctacatctgcaatgtgaaccacaagcctagcaacaccaaggtggacaagagagtggaacccaagagctgtatccccgaggacacattcttcccaagccccgagagcagctgcgacgtgaagctggtggaaaagagcttcgagacagacaccaacctgaacttccagaacctgagcgtgatcggcttcagaatcctgctgctgaaagtggccggctttaacctgctgatgaccctgcggctgtggtccagc

SEQ ID NO: 3332 - DNA, 1365 bp, synthetic construct
  source 1..1365: mol_type = other DNA
atggccttaccagtgaccgccttgctcctgccgctggccttgctgctccacgccgccaggccggacattgtgctgacacagtctcccgccagcctggccgtttctctgggacagagagccaccatcagctgtagagccagcaagagcgtgtccaccagcggctactcttacctgcactggtatcagcagaagcccggccagcctcctaagctgctgatctacctggcctccaacctggaaagcggagtgcctgccagattttctggctctggcagcggcaccgacttcaccctgaatatccatcctgtggaagaagaggacgccgccacctactactgccagcacagtagagagctgcccttcacatttggctccggcaccaagctggaaatcaagggcggaggcggaagtggaggcggaggatctggcggcggaggctctcaggtgcagctggttgaatctggcggaggactggttcagcctggcggatctctgaagctgtcttgtgccgccagcggcttcgacttcagcagatactggatgagctgggtccgacaggcccctggcaaaggactggaatggatcggcgagatcaaccccaccagcagcaccatcaacttcacccctagcctgaaggacaaggtgttcatcagccgggacaacgccaagaacaccctgtacctccagatgagcaaagtgcggagcgaggacacagccctgtactactgtgccagaggcaactactacagatacggcgacgctatggactactggggccagggaacaagcgtgacagtctcttctacgcgtgacggtaacgaggagatgggaggaatcactcaaaccccttacaaagtctcaatttcaggaacaactgttatccttacatgtccccagtatcctggcagcgagatcctttggcagcataacgacaagaatatagggggagatgaagacgataagaatatcggatctgacgaggatcacttgagcctgaaagagttctccgagcttgaacaaagcggatattatgtgtgctatccgcgcgggtcaaagccggaagacgctaacttttacctttatctccgagccagagtgtgcgaaaattgcatggaaatggacgttatgtccgttgctacaatagttatcgtagatatatgcatcacgggtggactgcttctgctggtttattattggtccaagaatagaaaggccaaagctaaacccgtgaccagaggcgctggcgcaggcggaaggcaaaggggacaaaacaaagaacggccaccaccagtgccaaatccagattatgagcctattcggaaaggacagagggacctgtactctggcctgaatcagagaagaatc

SEQ ID NO: 3333 - DNA, 1260 bp, synthetic construct
  source 1..1260: mol_type = other DNA
atggccttaccagtgaccgccttgctcctgccgctggccttgctgctccacgccgccaggccggacattgtgctgacacagtctcccgccagcctggccgtttctctgggacagagagccaccatcagctgtagagccagcaagagcgtgtccaccagcggctactcttacctgcactggtatcagcagaagcccggccagcctcctaagctgctgatctacctggcctccaacctggaaagcggagtgcctgccagattttctggctctggcagcggcaccgacttcaccctgaatatccatcctgtggaagaagaggacgccgccacctactactgccagcacagtagagagctgcccttcacatttggctccggcaccaagctggaaatcaagggcggaggcggaagtggaggcggaggatctggcggcggaggctctcaggtgcagctggttgaatctggcggaggactggttcagcctggcggatctctgaagctgtcttgtgccgccagcggcttcgacttcagcagatactggatgagctgggtccgacaggcccctggcaaaggactggaatggatcggcgagatcaaccccaccagcagcaccatcaacttcacccctagcctgaaggacaaggtgttcatcagccgggacaacgccaagaacaccctgtacctccagatgagcaaagtgcggagcgaggacacagccctgtactactgtgccagaggcaactactacagatacggcgacgctatggactactggggccagggaacaagcgtgacagtctcttctacgcgtttcaagatccccatcgaggaactggaagatcgggtgttcgtgaactgcaacacctctatcacctgggtggaaggcaccgtgggaacactgctgagcgacatcaccagactggacctcggcaagcggattctggaccctcggggcatctacagatgcaacggcaccgacatctacaaggacaaagaaagcaccgtgcaggtccactacagaatgtgccagtcctgcgtggaactggaccctgctacagtggccggcatcatcgtgaccgatgtgatcgctactctgctgctggctctgggagtgttctgcttcgccggacacgaaacaggcagactgtctggcgctgccgatacacaggccctgctgagaaacgaccaagtgtatcagcccctgcgcgacagagatgatgcccagtattctcacctcggcggcaactgggctagaaacaag

SEQ ID NO: 3334 - DNA, 1290 bp, synthetic construct
  source 1..1290: mol_type = other DNA
atggccttaccagtgaccgccttgctcctgccgctggccttgctgctccacgccgccaggccggacattgtgctgacacagtctcccgccagcctggccgtttctctgggacagagagccaccatcagctgtagagccagcaagagcgtgtccaccagcggctactcttacctgcactggtatcagcagaagcccggccagcctcctaagctgctgatctacctggcctccaacctggaaagcggagtgcctgccagattttctggctctggcagcggcaccgacttcaccctgaatatccatcctgtggaagaagaggacgccgccacctactactgccagcacagtagagagctgcccttcacatttggctccggcaccaagctggaaatcaagggcggaggcggaagtggaggcggaggatctggcggcggaggctctcaggtgcagctggttgaatctggcggaggactggttcagcctggcggatctctgaagctgtcttgtgccgccagcggcttcgacttcagcagatactggatgagctgggtccgacaggcccctggcaaaggactggaatggatcggcgagatcaaccccaccagcagcaccatcaacttcacccctagcctgaaggacaaggtgttcatcagccgggacaacgccaagaacaccctgtacctccagatgagcaaagtgcggagcgaggacacagccctgtactactgtgccagaggcaactactacagatacggcgacgctatggactactggggccagggaacaagcgtgacagtctcttctacgcgtcagagcatcaagggcaaccacctggtcaaggtgtacgactaccaagaggacggcagcgtgctgctgacatgtgatgccgaggccaagaacatcacctggtttaaggacggcaagatgatcggcttcctgaccgaggacaagaagaagtggaacctgggcagcaacgctaaggaccccagaggcatgtatcagtgcaagggcagccagaacaagagcaagcccctccaggtgtactaccggatgtgccagaactgcatcgagctgaacgccgctaccatcagcggctttctgttcgccgagatcgtgtccatcttcgtgctggccgtgggcgtgtactttatcgctggacaggatggcgtgcggcagagcagagcttccgataagcaaaccctgctgcctaacgaccagctgtaccagcctctgaaggacagagaggacgaccagtacagccacctccagggcaatcagctgagaagaaac

SEQ ID NO: 3335 - DNA, 1239 bp, synthetic construct
  source 1..1239: mol_type = other DNA
atggccttaccagtgaccgccttgctcctgccgctggccttgctgctccacgccgccaggccggacattgtgctgacacagtctcccgccagcctggccgtttctctgggacagagagccaccatcagctgtagagccagcaagagcgtgtccaccagcggctactcttacctgcactggtatcagcagaagcccggccagcctcctaagctgctgatctacctggcctccaacctggaaagcggagtgcctgccagattttctggctctggcagcggcaccgacttcaccctgaatatccatcctgtggaagaagaggacgccgccacctactactgccagcacagtagagagctgcccttcacatttggctccggcaccaagctggaaatcaagggcggaggcggaagtggaggcggaggatctggcggcggaggctctcaggtgcagctggttgaatctggcggaggactggttcagcctggcggatctctgaagctgtcttgtgccgccagcggcttcgacttcagcagatactggatgagctgggtccgacaggcccctggcaaaggactggaatggatcggcgagatcaaccccaccagcagcaccatcaacttcacccctagcctgaaggacaaggtgttcatcagccgggacaacgccaagaacaccctgtacctccagatgagcaaagtgcggagcgaggacacagccctgtactactgtgccagaggcaactactacagatacggcgacgctatggactactggggccagggaacaagcgtgacagtctcttctacgcgtcagagttttgggttgttggaccctaaattgtgctatctgttggacggaatcctgttcatttacggagtgatcctgaccgcattgttcctgcgggttaagttttccagatccgcagacgcacccgcttaccaacaagggcagaaccaactctacaatgaacttaatttggggcggagggaagagtacgacgttctggacaaaaggaggggacgagatcccgagatgggcggaaagcctcagcgaaggaagaatccgcaagaggggctttataacgaactccagaaagataaaatggcagaagcctatagtgagattgggatgaagggagaaaggaggaggggtaaaggtcacgatgggttgtaccaaggattgagcacagccactaaagatacctatgatgcgctccacatgcaggccctgccgccaaga

SEQ ID NO: 3336 - DNA, 1365 bp, synthetic construct
  source 1..1365: mol_type = other DNA
atggccttaccagtgaccgccttgctcctgccgctggccttgctgctccacgccgccaggccgcaggtgcagctggttgaatctggcggaggactggttcagcctggcggatctctgaagctgtcttgtgccgccagcggcttcgacttcagcagatactggatgagctgggtccgacaggcccctggcaaaggactggaatggatcggcgagatcaaccccaccagcagcaccatcaacttcacccctagcctgaaggacaaggtgttcatcagccgggacaacgccaagaacaccctgtacctccagatgagcaaagtgcggagcgaggacacagccctgtactactgtgccagaggcaactactacagatacggcgacgctatggactactggggccagggaacaagcgtgacagtctcttctggcggaggcggaagtggaggcggaggatctggcggcggaggctctgacattgtgctgacacagtctcccgccagcctggccgtttctctgggacagagagccaccatcagctgtagagccagcaagagcgtgtccaccagcggctactcttacctgcactggtatcagcagaagcccggccagcctcctaagctgctgatctacctggcctccaacctggaaagcggagtgcctgccagattttctggctctggcagcggcaccgacttcaccctgaatatccatcctgtggaagaagaggacgccgccacctactactgccagcacagtagagagctgcccttcacatttggctccggcaccaagctggaaatcaagacgcgtgacggtaacgaggagatgggaggaatcactcaaaccccttacaaagtctcaatttcaggaacaactgttatccttacatgtccccagtatcctggcagcgagatcctttggcagcataacgacaagaatatagggggagatgaagacgataagaatatcggatctgacgaggatcacttgagcctgaaagagttctccgagcttgaacaaagcggatattatgtgtgctatccgcgcgggtcaaagccggaagacgctaacttttacctttatctccgagccagagtgtgcgaaaattgcatggaaatggacgttatgtccgttgctacaatagttatcgtagatatatgcatcacgggtggactgcttctgctggtttattattggtccaagaatagaaaggccaaagctaaacccgtgaccagaggcgctggcgcaggcggaaggcaaaggggacaaaacaaagaacggccaccaccagtgccaaatccagattatgagcctattcggaaaggacagagggacctgtactctggcctgaatcagagaagaatc

SEQ ID NO: 3337 - DNA, 1260 bp, synthetic construct
  source 1..1260: mol_type = other DNA
atggccttaccagtgaccgccttgctcctgccgctggccttgctgctccacgccgccaggccgcaggtgcagctggttgaatctggcggaggactggttcagcctggcggatctctgaagctgtcttgtgccgccagcggcttcgacttcagcagatactggatgagctgggtccgacaggcccctggcaaaggactggaatggatcggcgagatcaaccccaccagcagcaccatcaacttcacccctagcctgaaggacaaggtgttcatcagccgggacaacgccaagaacaccctgtacctccagatgagcaaagtgcggagcgaggacacagccctgtactactgtgccagaggcaactactacagatacggcgacgctatggactactggggccagggaacaagcgtgacagtctcttctggcggaggcggaagtggaggcggaggatctggcggcggaggctctgacattgtgctgacacagtctcccgccagcctggccgtttctctgggacagagagccaccatcagctgtagagccagcaagagcgtgtccaccagcggctactcttacctgcactggtatcagcagaagcccggccagcctcctaagctgctgatctacctggcctccaacctggaaagcggagtgcctgccagattttctggctctggcagcggcaccgacttcaccctgaatatccatcctgtggaagaagaggacgccgccacctactactgccagcacagtagagagctgcccttcacatttggctccggcaccaagctggaaatcaagacgcgtttcaagatccccatcgaggaactggaagatcgggtgttcgtgaactgcaacacctctatcacctgggtggaaggcaccgtgggaacactgctgagcgacatcaccagactggacctcggcaagcggattctggaccctcggggcatctacagatgcaacggcaccgacatctacaaggacaaagaaagcaccgtgcaggtccactacagaatgtgccagtcctgcgtggaactggaccctgctacagtggccggcatcatcgtgaccgatgtgatcgctactctgctgctggctctgggagtgttctgcttcgccggacacgaaacaggcagactgtctggcgctgccgatacacaggccctgctgagaaacgaccaagtgtatcagcccctgcgcgacagagatgatgcccagtattctcacctcggcggcaactgggctagaaacaag

SEQ ID NO: 3338 - DNA, 1290 bp, synthetic construct
  source 1..1290: mol_type = other DNA
atggccttaccagtgaccgccttgctcctgccgctggccttgctgctccacgccgccaggccgcaggtgcagctggttgaatctggcggaggactggttcagcctggcggatctctgaagctgtcttgtgccgccagcggcttcgacttcagcagatactggatgagctgggtccgacaggcccctggcaaaggactggaatggatcggcgagatcaaccccaccagcagcaccatcaacttcacccctagcctgaaggacaaggtgttcatcagccgggacaacgccaagaacaccctgtacctccagatgagcaaagtgcggagcgaggacacagccctgtactactgtgccagaggcaactactacagatacggcgacgctatggactactggggccagggaacaagcgtgacagtctcttctggcggaggcggaagtggaggcggaggatctggcggcggaggctctgacattgtgctgacacagtctcccgccagcctggccgtttctctgggacagagagccaccatcagctgtagagccagcaagagcgtgtccaccagcggctactcttacctgcactggtatcagcagaagcccggccagcctcctaagctgctgatctacctggcctccaacctggaaagcggagtgcctgccagattttctggctctggcagcggcaccgacttcaccctgaatatccatcctgtggaagaagaggacgccgccacctactactgccagcacagtagagagctgcccttcacatttggctccggcaccaagctggaaatcaagacgcgtcagagcatcaagggcaaccacctggtcaaggtgtacgactaccaagaggacggcagcgtgctgctgacatgtgatgccgaggccaagaacatcacctggtttaaggacggcaagatgatcggcttcctgaccgaggacaagaagaagtggaacctgggcagcaacgctaaggaccccagaggcatgtatcagtgcaagggcagccagaacaagagcaagcccctccaggtgtactaccggatgtgccagaactgcatcgagctgaacgccgctaccatcagcggctttctgttcgccgagatcgtgtccatcttcgtgctggccgtgggcgtgtactttatcgctggacaggatggcgtgcggcagagcagagcttccgataagcaaaccctgctgcctaacgaccagctgtaccagcctctgaaggacagagaggacgaccagtacagccacctccagggcaatcagctgagaagaaac

SEQ ID NO: 3339 - DNA, 1239 bp, synthetic construct
  source 1..1239: mol_type = other DNA
atggccttaccagtgaccgccttgctcctgccgctggccttgctgctccacgccgccaggccgcaggtgcagctggttgaatctggcggaggactggttcagcctggcggatctctgaagctgtcttgtgccgccagcggcttcgacttcagcagatactggatgagctgggtccgacaggcccctggcaaaggactggaatggatcggcgagatcaaccccaccagcagcaccatcaacttcacccctagcctgaaggacaaggtgttcatcagccgggacaacgccaagaacaccctgtacctccagatgagcaaagtgcggagcgaggacacagccctgtactactgtgccagaggcaactactacagatacggcgacgctatggactactggggccagggaacaagcgtgacagtctcttctggcggaggcggaagtggaggcggaggatctggcggcggaggctctgacattgtgctgacacagtctcccgccagcctggccgtttctctgggacagagagccaccatcagctgtagagccagcaagagcgtgtccaccagcggctactcttacctgcactggtatcagcagaagcccggccagcctcctaagctgctgatctacctggcctccaacctggaaagcggagtgcctgccagattttctggctctggcagcggcaccgacttcaccctgaatatccatcctgtggaagaagaggacgccgccacctactactgccagcacagtagagagctgcccttcacatttggctccggcaccaagctggaaatcaagacgcgtcagagttttgggttgttggaccctaaattgtgctatctgttggacggaatcctgttcatttacggagtgatcctgaccgcattgttcctgcgggttaagttttccagatccgcagacgcacccgcttaccaacaagggcagaaccaactctacaatgaacttaatttggggcggagggaagagtacgacgttctggacaaaaggaggggacgagatcccgagatgggcggaaagcctcagcgaaggaagaatccgcaagaggggctttataacgaactccagaaagataaaatggcagaagcctatagtgagattgggatgaagggagaaaggaggaggggtaaaggtcacgatgggttgtaccaaggattgagcacagccactaaagatacctatgatgcgctccacatgcaggccctgccgccaaga

SEQ ID NO: 3340 - DNA, 1524 bp, synthetic construct
  source 1..1524: mol_type = other DNA
atggccttaccagtgaccgccttgctcctgccgctggccttgctgctccacgccgccaggccggacattgtgctgacacagtctcccgccagcctggccgtttctctgggacagagagccaccatcagctgtagagccagcaagagcgtgtccaccagcggctactcttacctgcactggtatcagcagaagcccggccagcctcctaagctgctgatctacctggcctccaacctggaaagcggagtgcctgccagattttctggctctggcagcggcaccgacttcaccctgaatatccatcctgtggaagaagaggacgccgccacctactactgccagcacagtagagagctgcccttcacatttggctccggcaccaagctggaaatcaagggcggaggcggaagtggaggcggaggatctggcggcggaggctctcaggtgcagctggttgaatctggcggaggactggttcagcctggcggatctctgaagctgtcttgtgccgccagcggcttcgacttcagcagatactggatgagctgggtccgacaggcccctggcaaaggactggaatggatcggcgagatcaaccccaccagcagcaccatcaacttcacccctagcctgaaggacaaggtgttcatcagccgggacaacgccaagaacaccctgtacctccagatgagcaaagtgcggagcgaggacacagccctgtactactgtgccagaggcaactactacagatacggcgacgctatggactactggggccagggaacaagcgtgacagtctcttctacgcgtggaatgaggactgaggatcttcccaaagctgtcgtctttctcgaaccccaatggtatcgggtgctcgaaaaagactctgtgacactgaaatgccaaggggcctactctcccgaggacaactccacacagtggtttcataatgagtccctcatcagctctcaggccagctcttatttcattgatgccgctacagtggacgactccggcgagtatcggtgtcagaccaatctgtctacactgtctgaccccgtgcagcttgaggtccacattggatggttgctcttgcaagccccacgctgggttttcaaagaggaagatccaatccatctgcggtgccacagctggaaaaacaccgctctccacaaagtcacatacctgcaaaatggcaaaggacgcaaatacttccatcacaattccgatttttacattccgaaggctaccctgaaagacagcggcagctatttctgccggggactcgtcggctccaagaatgtgtcctccgaaaccgtgaatatcacgattacccaaggactggctgtgcctacaatctctagcttctttccgcctggataccaagtctccttctgtcttgtgatggtcctcctgtttgctgtggacacaggactgtacttttccgtgaaaacgaacatccgcagctccacacgcgattggaaagatcacaagtttaaatggcgcaaagatccccaggacaag

SEQ ID NO: 3341 - DNA, 2373 bp, synthetic construct
  source 1..2373: mol_type = other DNA
atggccttaccagtgaccgccttgctcctgccgctggccttgctgctccacgccgccaggccggacattgtgctgacacagtctcccgccagcctggccgtttctctgggacagagagccaccatcagctgtagagccagcaagagcgtgtccaccagcggctactcttacctgcactggtatcagcagaagcccggccagcctcctaagctgctgatctacctggcctccaacctggaaagcggagtgcctgccagattttctggctctggcagcggcaccgacttcaccctgaatatccatcctgtggaagaagaggacgccgccacctactactgccagcacagtagagagctgcccttcacatttggctccggcaccaagctggaaatcaagggcggaggcggaagtggaggcggaggatctggcggcggaggctctcaggtgcagctggttgaatctggcggaggactggttcagcctggcggatctctgaagctgtcttgtgccgccagcggcttcgacttcagcagatactggatgagctgggtccgacaggcccctggcaaaggactggaatggatcggcgagatcaaccccaccagcagcaccatcaacttcacccctagcctgaaggacaaggtgttcatcagccgggacaacgccaagaacaccctgtacctccagatgagcaaagtgcggagcgaggacacagccctgtactactgtgccagaggcaactactacagatacggcgacgctatggactactggggccagggaacaagcgtgacagtctcttctacgcgtggaggctctggacaacaacagaccctgcctaaaccattcatctgggctgaaccccactttatggttccgaaagagaaacaagtcacgatttgttgccaagggaattacggggccgtcgagtatcagctccactttgagggctccctgtttgctgtggatcggcccaagccacctgaaagaatcaacaaagtccaattctatattcctgatatgaactcccgcatggcaggccagtattcatgtatctaccgcgtgggagaactttggagtgaaccctctaacctgctggacctcgtcgtgacagagatgtatgatacacccacactgtctgtgcaccctgggccagaagttatcagcggagaaaaagttaccttttattgccgcctcgataccgctacctctatgttcctcttgctgaaagagggccgcagctctcacgtgcagcgaggctacggaaaggtccaagctgagtttcctctcggccccgtgaccaccgctcacaggggcacatatagatgttttggctcttataacaatcatgcctggtcattcccatccgagcctgtgaaactgctggtcacaggcgatattgagaatacctctctggccccagaagatcctacattccccgccgacacatggggaacatatctgctgacaaccgaaaccgggctgcaaaaggaccatgctctgtgggatcataccgctcagaatctgcttcggatggggcttgcattcctggtcctggtggctcttgtctggtttctggtcgaggactggctgtcccggaagagaaccagagaaagagcttccagggccagcacctgggaaggcagacgcagactgaatactcagaccctgcgcgccaagagaagcggatctggcgtgaagcagaccctgaatttcgacctgctgaagctggctggcgacgtggaatccaacccaggcccttctagaggccatatgaccgagtacaagcccacggtgcgcctcgccacccgcgacgacgtccccagggccgtacgcaccctcgccgccgcgttcgccgactaccccgccacgcgccacaccgtcgatccggaccgccacatcgagcgggtcaccgagctgcaagaactcttcctcacgcgcgtcgggctcgacatcggcaaggtgtgggtcgcggacgacggcgccgcggtggcggtctggaccacgccggagagcgtcgaagcgggggcggtgttcgccgagatcggcccgcgcatggccgagttgagcggttcccggctggccgcgcagcaacagatggaaggcctcctggcgccgcaccggcccaaggagcccgcgtggttcctggccaccgtcggcgtctcgcccgaccaccagggcaagggtctgggcagcgccgtcgtgctccccggagtggaggcggccgagcgcgccggggtgcccgccttcctggagacctccgcgccccgcaacctccccttctacgagcggctcggcttcaccgtcaccgccgacgtcgaggtgcccgaaggaccgcgcacctggtgcatgacccgcaagcccggtgcctga

SEQ ID NO: 3342 - DNA, 1872 bp, synthetic construct
  source 1..1872: mol_type = other DNA
atggccttaccagtgaccgccttgctcctgccgctggccttgctgctccacgccgccaggccggacattgtgctgacacagtctcccgccagcctggccgtttctctgggacagagagccaccatcagctgtagagccagcaagagcgtgtccaccagcggctactcttacctgcactggtatcagcagaagcccggccagcctcctaagctgctgatctacctggcctccaacctggaaagcggagtgcctgccagattttctggctctggcagcggcaccgacttcaccctgaatatccatcctgtggaagaagaggacgccgccacctactactgccagcacagtagagagctgcccttcacatttggctccggcaccaagctggaaatcaagggcggaggcggaagtggaggcggaggatctggcggcggaggctctcaggtgcagctggttgaatctggcggaggactggttcagcctggcggatctctgaagctgtcttgtgccgccagcggcttcgacttcagcagatactggatgagctgggtccgacaggcccctggcaaaggactggaatggatcggcgagatcaaccccaccagcagcaccatcaacttcacccctagcctgaaggacaaggtgttcatcagccgggacaacgccaagaacaccctgtacctccagatgagcaaagtgcggagcgaggacacagccctgtactactgtgccagaggcaactactacagatacggcgacgctatggactactggggccagggaacaagcgtgacagtctcttctacgcgtaaaattgaagttatgtatcctcctccttacctagacaatgagaagagcaatggaaccattatccatgtgaaaggggcgcgtggcgatattgagaatacctctctggccccagaagatcctacattccccgccgacacatggggaacatatctgctgacaaccgaaaccgggctgcaaaaggaccatgctctgtgggatcataccgctcagaatctgcttcggatggggcttgcattcctggtcctggtggctcttgtctggtttctggtcgaggactggctgtcccggaagagaaccagagaaagagcttccagggccagcacctgggaaggcagacgcagactgaatactcagaccctgcgcgccaagagaagcggatctggcgtgaagcagaccctgaatttcgacctgctgaagctggctggcgacgtggaatccaacccaggcccttctagaggccatatgaccgagtacaagcccacggtgcgcctcgccacccgcgacgacgtccccagggccgtacgcaccctcgccgccgcgttcgccgactaccccgccacgcgccacaccgtcgatccggaccgccacatcgagcgggtcaccgagctgcaagaactcttcctcacgcgcgtcgggctcgacatcggcaaggtgtgggtcgcggacgacggcgccgcggtggcggtctggaccacgccggagagcgtcgaagcgggggcggtgttcgccgagatcggcccgcgcatggccgagttgagcggttcccggctggccgcgcagcaacagatggaaggcctcctggcgccgcaccggcccaaggagcccgcgtggttcctggccaccgtcggcgtctcgcccgaccaccagggcaagggtctgggcagcgccgtcgtgctccccggagtggaggcggccgagcgcgccggggtgcccgccttcctggagacctccgcgccccgcaacctccccttctacgagcggctcggcttcaccgtcaccgccgacgtcgaggtgcccgaaggaccgcgcacctggtgcatgacccgcaagcccggtgcctga

SEQ ID NO: 3343 - DNA, 2133 bp, synthetic construct
  source 1..2133: mol_type = other DNA
atggccttaccagtgaccgccttgctcctgccgctggccttgctgctccacgccgccaggccggacattgtgctgacacagtctcccgccagcctggccgtttctctgggacagagagccaccatcagctgtagagccagcaagagcgtgtccaccagcggctactcttacctgcactggtatcagcagaagcccggccagcctcctaagctgctgatctacctggcctccaacctggaaagcggagtgcctgccagattttctggctctggcagcggcaccgacttcaccctgaatatccatcctgtggaagaagaggacgccgccacctactactgccagcacagtagagagctgcccttcacatttggctccggcaccaagctggaaatcaagggcggaggcggaagtggaggcggaggatctggcggcggaggctctcaggtgcagctggttgaatctggcggaggactggttcagcctggcggatctctgaagctgtcttgtgccgccagcggcttcgacttcagcagatactggatgagctgggtccgacaggcccctggcaaaggactggaatggatcggcgagatcaaccccaccagcagcaccatcaacttcacccctagcctgaaggacaaggtgttcatcagccgggacaacgccaagaacaccctgtacctccagatgagcaaagtgcggagcgaggacacagccctgtactactgtgccagaggcaactactacagatacggcgacgctatggactactggggccagggaacaagcgtgacagtctcttctacgcgtctgtgggtgtcccagccacctgaaattcggacactggaaggctcctccgcctttctgccctgtagctttaacgccagccaggggagactcgccatcggctctgtgacatggttccgggatgaagtcgtccctggaaaagaagttcgcaacggaacaccagagttcagaggcagactcgccccactggcaagctccagattcctgcatgaccatcaggctgaactgcacattagggacgtgcggggccacgatgcctccatctatgtgtgtcgggtcgaagtgcttggactcggcgtcggaactggaaacggcactaggctggtggtcgagaaagaacatccacagcttggcgctggcaccgtcctgttgcttagagccggattctatgccgtcagcttcctgtccgtggctgtggggtctacagtgtattaccagggaaaatgtctcacctggaaaggccccagacgccagcttccagctgttgttcctgctccactgccaccaccttgtggctcctctgctcacttgcttccaccagtgcctggcggacgcgccaagagaagcggatctggcgtgaagcagaccctgaatttcgacctgctgaagctggctggcgacgtggaatccaacccaggcccttctagaatgtaccggatgcagctgctgagctgtatcgccctgtctctggccctggtcacaaatagcgcccctaccagcagcagcaccaagaaaacccagctgcaactggaacacctcctgctggacctccagatgatcctgaacggcatcaacaactacaagaaccccaagctgaccgagatgctgaccgccaagttctacatgcccaagaaggccaccgagctgaagcacctccagtgcctggaagaggaactgaagcccctggaagaagtgctgaatctggcccagagcaagaacttccacctgaggccaagggacctgatctccaacatcaacgtgatcgtgctggaactgaaaggcagcgagacaaccttcatgtgcgagtacgccgacgagacagctaccatcgtggaatttctgaatcggtggatcaccttctgccagagcatcatcagcaccctgacaaagatcgaagtgatgtaccctcctccttacctggacaacgagaagtccaacggcaccatcatccacgtgaagggcaagcacctgtgtccttctccactgttccccggacctagcaagcctttctgggtgctcgttgttgttggcggcgtgctggcctgttacagcctgctggttaccgtggccttcatcatcttttgggtccgaagcaagcggagctaa

SEQ ID NO: 3344 - DNA, 2061 bp, synthetic construct
  source 1..2061: mol_type = other DNA
atggccttaccagtgaccgccttgctcctgccgctggccttgctgctccacgccgccaggccggacattgtgctgacacagtctcccgccagcctggccgtttctctgggacagagagccaccatcagctgtagagccagcaagagcgtgtccaccagcggctactcttacctgcactggtatcagcagaagcccggccagcctcctaagctgctgatctacctggcctccaacctggaaagcggagtgcctgccagattttctggctctggcagcggcaccgacttcaccctgaatatccatcctgtggaagaagaggacgccgccacctactactgccagcacagtagagagctgcccttcacatttggctccggcaccaagctggaaatcaagggcggaggcggaagtggaggcggaggatctggcggcggaggctctcaggtgcagctggttgaatctggcggaggactggttcagcctggcggatctctgaagctgtcttgtgccgccagcggcttcgacttcagcagatactggatgagctgggtccgacaggcccctggcaaaggactggaatggatcggcgagatcaaccccaccagcagcaccatcaacttcacccctagcctgaaggacaaggtgttcatcagccgggacaacgccaagaacaccctgtacctccagatgagcaaagtgcggagcgaggacacagccctgtactactgtgccagaggcaactactacagatacggcgacgctatggactactggggccagggaacaagcgtgacagtctcttctacgcgtctgtgggtgtcccagccacctgaaattcggacactggaaggctcctccgcctttctgccctgtagctttaacgccagccaggggagactcgccatcggctctgtgacatggttccgggatgaagtcgtccctggaaaagaagttcgcaacggaacaccagagttcagaggcagactcgccccactggcaagctccagattcctgcatgaccatcaggctgaactgcacattagggacgtgcggggccacgatgcctccatctatgtgtgtcgggtcgaagtgcttggactcggcgtcggaactggaaacggcactaggctggtggtcgagaaagaacatccacagcttggcgctggcaccgtcctgttgcttagagccggattctatgccgtcagcttcctgtccgtggctgtggggtctacagtgtattaccagggaaaatgtctcacctggaaaggccccagacgccagcttccagctgttgttcctgctccactgccaccaccttgtggctcctctgctcacttgcttccaccagtgcctggcggacgcgccaagagaagcggatctggcgtgaagcagaccctgaatttcgacctgctgaagctggctggcgacgtggaatccaacccaggcccttctagaggccatatgaccgagtacaagcccacggtgcgcctcgccacccgcgacgacgtccccagggccgtacgcaccctcgccgccgcgttcgccgactaccccgccacgcgccacaccgtcgatccggaccgccacatcgagcgggtcaccgagctgcaagaactcttcctcacgcgcgtcgggctcgacatcggcaaggtgtgggtcgcggacgacggcgccgcggtggcggtctggaccacgccggagagcgtcgaagcgggggcggtgttcgccgagatcggcccgcgcatggccgagttgagcggttcccggctggccgcgcagcaacagatggaaggcctcctggcgccgcaccggcccaaggagcccgcgtggttcctggccaccgtcggcgtctcgcccgaccaccagggcaagggtctgggcagcgccgtcgtgctccccggagtggaggcggccgagcgcgccggggtgcccgccttcctggagacctccgcgccccgcaacctccccttctacgagcggctcggcttcaccgtcaccgccgacgtcgaggtgcccgaaggaccgcgcacctggtgcatgacccgcaagcccggtgcctga

SEQ ID NO: 3345 - DNA, 1086 bp, synthetic construct
  source 1..1086: mol_type = other DNA
atggccttaccagtgaccgccttgctcctgccgctggccttgctgctccacgccgccaggccggacattgtgctgacacagtctcccgccagcctggccgtttctctgggacagagagccaccatcagctgtagagccagcaagagcgtgtccaccagcggctactcttacctgcactggtatcagcagaagcccggccagcctcctaagctgctgatctacctggcctccaacctggaaagcggagtgcctgccagattttctggctctggcagcggcaccgacttcaccctgaatatccatcctgtggaagaagaggacgccgccacctactactgccagcacagtagagagctgcccttcacatttggctccggcaccaagctggaaatcaagggcggaggcggaagtggaggcggaggatctggcggcggaggctctcaggtgcagctggttgaatctggcggaggactggttcagcctggcggatctctgaagctgtcttgtgccgccagcggcttcgacttcagcagatactggatgagctgggtccgacaggcccctggcaaaggactggaatggatcggcgagatcaaccccaccagcagcaccatcaacttcacccctagcctgaaggacaaggtgttcatcagccgggacaacgccaagaacaccctgtacctccagatgagcaaagtgcggagcgaggacacagccctgtactactgtgccagaggcaactactacagatacggcgacgctatggactactggggccagggaacaagcgtgacagtctcttctacgcgtaaaattgaagttatgtatcctcctccttacctagacaatgagaagagcaatggaaccattatccatgtgaaaggggcgcgtatcacccagggcctggccgtgtctaccatcagcagctttttcccacccggctaccaggtgtccttctgcctcgtgatggtgctgctgttcgccgtggacaccggcctgtacttcagcgtgaaaacaaacatccggtccagcaccagagactggaaggaccacaagttcaagtggcggaaggacccccaggacaag

SEQ ID NO: 3346 - DNA, 1086 bp, synthetic construct
  source 1..1086: mol_type = other DNA
atggccttaccagtgaccgccttgctcctgccgctggccttgctgctccacgccgccaggccggacattgtgctgacacagtctcccgccagcctggccgtttctctgggacagagagccaccatcagctgtagagccagcaagagcgtgtccaccagcggctactcttacctgcactggtatcagcagaagcccggccagcctcctaagctgctgatctacctggcctccaacctggaaagcggagtgcctgccagattttctggctctggcagcggcaccgacttcaccctgaatatccatcctgtggaagaagaggacgccgccacctactactgccagcacagtagagagctgcccttcacatttggctccggcaccaagctggaaatcaagggcggaggcggaagtggaggcggaggatctggcggcggaggctctcaggtgcagctggttgaatctggcggaggactggttcagcctggcggatctctgaagctgtcttgtgccgccagcggcttcgacttcagcagatactggatgagctgggtccgacaggcccctggcaaaggactggaatggatcggcgagatcaaccccaccagcagcaccatcaacttcacccctagcctgaaggacaaggtgttcatcagccgggacaacgccaagaacaccctgtacctccagatgagcaaagtgcggagcgaggacacagccctgtactactgtgccagaggcaactactacagatacggcgacgctatggactactggggccagggaacaagcgtgacagtctcttctacgcgtaaaattgaagttatgtatcctcctccttacctagacaatgagaagagcaatggaaccattatccatgtgaaaggggcgcgtattacccaaggactggctgtgcctacaatctctagcttctttccgcctggataccaagtctccttctgtcttgtgatggtcctcctgtttgctgtggacacaggactgtacttttccgtgaaaacgaacatccgcagctccacacgcgattggaaagatcacaagtttaaatggcgcaaagatccccaggacaag

SEQ ID NO: 3347 - DNA, 1023 bp, synthetic construct
  source 1..1023: mol_type = other DNA
atggccttaccagtgaccgccttgctcctgccgctggccttgctgctccacgccgccaggccggacattgtgctgacacagtctcccgccagcctggccgtttctctgggacagagagccaccatcagctgtagagccagcaagagcgtgtccaccagcggctactcttacctgcactggtatcagcagaagcccggccagcctcctaagctgctgatctacctggcctccaacctggaaagcggagtgcctgccagattttctggctctggcagcggcaccgacttcaccctgaatatccatcctgtggaagaagaggacgccgccacctactactgccagcacagtagagagctgcccttcacatttggctccggcaccaagctggaaatcaagggcggaggcggaagtggaggcggaggatctggcggcggaggctctcaggtgcagctggttgaatctggcggaggactggttcagcctggcggatctctgaagctgtcttgtgccgccagcggcttcgacttcagcagatactggatgagctgggtccgacaggcccctggcaaaggactggaatggatcggcgagatcaaccccaccagcagcaccatcaacttcacccctagcctgaaggacaaggtgttcatcagccgggacaacgccaagaacaccctgtacctccagatgagcaaagtgcggagcgaggacacagccctgtactactgtgccagaggcaactactacagatacggcgacgctatggactactggggccagggaacaagcgtgacagtctcttctacgcgtaaaattgaagttatgtatcctcctccttacctagacaatgagaagagcaatggaaccattatccatgtgaaaggggcgcgtattacccaaggactggctgtgtctacaatctctagcttctctccgcctggataccaagtctccttctgtcttgtgatggtcctcctgtttgctgtggacacaggactgtacttttccgtgaaaacgaacatc

SEQ ID NO: 3348 - DNA, 1116 bp, synthetic construct
  source 1..1116: mol_type = other DNA
atggccttaccagtgaccgccttgctcctgccgctggccttgctgctccacgccgccaggccggacattgtgctgacacagtctcccgccagcctggccgtttctctgggacagagagccaccatcagctgtagagccagcaagagcgtgtccaccagcggctactcttacctgcactggtatcagcagaagcccggccagcctcctaagctgctgatctacctggcctccaacctggaaagcggagtgcctgccagattttctggctctggcagcggcaccgacttcaccctgaatatccatcctgtggaagaagaggacgccgccacctactactgccagcacagtagagagctgcccttcacatttggctccggcaccaagctggaaatcaagggcggaggcggaagtggaggcggaggatctggcggcggaggctctcaggtgcagctggttgaatctggcggaggactggttcagcctggcggatctctgaagctgtcttgtgccgccagcggcttcgacttcagcagatactggatgagctgggtccgacaggcccctggcaaaggactggaatggatcggcgagatcaaccccaccagcagcaccatcaacttcacccctagcctgaaggacaaggtgttcatcagccgggacaacgccaagaacaccctgtacctccagatgagcaaagtgcggagcgaggacacagccctgtactactgtgccagaggcaactactacagatacggcgacgctatggactactggggccagggaacaagcgtgacagtctcttctacgcgtaaaattgaagttatgtatcctcctccttacctagacaatgagaagagcaatggaaccattatccatgtgaaaggggcgcgtgtcgagaaagaacatccacagcttggcgctggcaccgtcctgttgcttagagccggattctatgccgtcagcttcctgtccgtggctgtggggtctacagtgtattaccagggaaaatgtctcacctggaaaggccccagacgccagcttccagctgttgttcctgctccactgccaccaccttgtggctcctctgctcacttgcttccaccagtgcctggcgga

SEQ ID NO: 3349 - DNA, 1359 bp, synthetic construct
  source 1..1359: mol_type = other DNA
atggccttaccagtgaccgccttgctcctgccgctggccttgctgctccacgccgccaggccggacattgtgctgacacagtctcccgccagcctggccgtttctctgggacagagagccaccatcagctgtagagccagcaagagcgtgtccaccagcggctactcttacctgcactggtatcagcagaagcccggccagcctcctaagctgctgatctacctggcctccaacctggaaagcggagtgcctgccagattttctggctctggcagcggcaccgacttcaccctgaatatccatcctgtggaagaagaggacgccgccacctactactgccagcacagtagagagctgcccttcacatttggctccggcaccaagctggaaatcaagggcggaggcggaagtggaggcggaggatctggcggcggaggctctcaggtgcagctggttgaatctggcggaggactggttcagcctggcggatctctgaagctgtcttgtgccgccagcggcttcgacttcagcagatactggatgagctgggtccgacaggcccctggcaaaggactggaatggatcggcgagatcaaccccaccagcagcaccatcaacttcacccctagcctgaaggacaaggtgttcatcagccgggacaacgccaagaacaccctgtacctccagatgagcaaagtgcggagcgaggacacagccctgtactactgtgccagaggcaactactacagatacggcgacgctatggactactggggccagggaacaagcgtgacagtctcttctacgcgtaaaattgaagttatgtatcctcctccttacctagacaatgagaagagcaatggaaccattatccatgtgaaaggggcgcgtaagtctgtgcgcttttacctggtcgtcagccctgccagtgcctccactcagacatcttggaccccaagggaccttgtgtcctctcagacacagacacagtcctgcgtgccaccaactgctggcgcaagacaggctccagagtctcccagcacaatccccgtcccttctcagccccagaactccacacttaggccaggaccagctgctccaatcgcactggtcccagtgttctgcggactgctggttgccaagtctctggtgctgagcgcactcctcgtttggtggggcgatatttggtggaaaacgatgatggaattgagatccctcgatacgcagaaagccacatgccaccttcagcaagtcacagacttgccttggaccagcgtcagctctcccgtggaacgggaaattctgtatcatacagtggcccgcaccaagatttccgacgatgacgacgagcacacactg

SEQ ID NO: 3350 - DNA, 1170 bp, synthetic construct
  source 1..1170: mol_type = other DNA
atggccttaccagtgaccgccttgctcctgccgctggccttgctgctccacgccgccaggccggacattgtgctgacacagtctcccgccagcctggccgtttctctgggacagagagccaccatcagctgtagagccagcaagagcgtgtccaccagcggctactcttacctgcactggtatcagcagaagcccggccagcctcctaagctgctgatctacctggcctccaacctggaaagcggagtgcctgccagattttctggctctggcagcggcaccgacttcaccctgaatatccatcctgtggaagaagaggacgccgccacctactactgccagcacagtagagagctgcccttcacatttggctccggcaccaagctggaaatcaagggcggaggcggaagtggaggcggaggatctggcggcggaggctctcaggtgcagctggttgaatctggcggaggactggttcagcctggcggatctctgaagctgtcttgtgccgccagcggcttcgacttcagcagatactggatgagctgggtccgacaggcccctggcaaaggactggaatggatcggcgagatcaaccccaccagcagcaccatcaacttcacccctagcctgaaggacaaggtgttcatcagccgggacaacgccaagaacaccctgtacctccagatgagcaaagtgcggagcgaggacacagccctgtactactgtgccagaggcaactactacagatacggcgacgctatggactactggggccagggaacaagcgtgacagtctcttctacgcgtaaaattgaagttatgtatcctcctccttacctagacaatgagaagagcaatggaaccattatccatgtgaaaggggcgcgtggcgatattgagaatacctctctggccccagaagatcctacattccccgccgacacatggggaacatatctgctgacaaccgaaaccgggctgcaaaaggaccatgctctgtgggatcataccgctcagaatctgcttcggatggggcttgcattcctggtcctggtggctcttgtctggtttctggtcgaggactggctgtcccggaagagaaccagagaaagagcttccagggccagcacctgggaaggcagacgcagactgaatactcagaccctg

SEQ ID NO: 3351 - DNA, 2961 bp, synthetic construct
  source 1..2961: mol_type = other DNA
atggccttaccagtgaccgccttgctcctgccgctggccttgctgctccacgccgccaggccggacattgtgctgacacagtctcccgccagcctggccgtttctctgggacagagagccaccatcagctgtagagccagcaagagcgtgtccaccagcggctactcttacctgcactggtatcagcagaagcccggccagcctcctaagctgctgatctacctggcctccaacctggaaagcggagtgcctgccagattttctggctctggcagcggcaccgacttcaccctgaatatccatcctgtggaagaagaggacgccgccacctactactgccagcacagtagagagctgcccttcacatttggctccggcaccaagctggaaatcaagctcgagggacagcctaaggccaatcctaccgtgacactgttccctccaagcagcgaagaactccaggccaacaaggccacacttgtgtgcctgatctccgacttctaccctggggctgtgacagtggcttggaaggccgatggatctcctgtgaaagccggcgtggaaaccaccaagccatccaagcagagcaacaacaaatacgccgccagctcctacctgagcctgacacctgagcagtggaagtcccacagatcctacagctgccaagtgacccacgaaggcagcaccgtggaaaagacagtggcccctacagagtgcagcggatcccagagcttcggcctgctggaccccaagctgtgctacctgctggatggcatcctgttcatctacggcgtgatcctgaccgccctgttcctgagagtgaagttcagcagaagcgccgacgcccctgcctaccagcagggacagaaccaactgtacaacgagctgaacctgggcagacgggaagagtacgacgtgctggacaagcggagaggcagggaccctgagatgggcggaaagccccagcggagaaagaacccccaggaaggactgtataacgaactccagaaagacaagatggccgaagcctacagcgagatcggcatgaagggcgagcggagaagaggcaagggccacgatggcctgtaccagggcctgagcaccgccaccaaggacacctatgacgccctgcacatgcaggccctgcctccaagaagggccaagcgatctggatctggagcaacaaacttctcactactcaaacaagcaggtgacgtggaggagaatcccgggcctactagtatggactggatttggcgcatccttttccttgtcggcgctgctaccggcgcgcattccttcgaacaggtgcagctggttgaatctggcggaggactggttcagcctggcggatctctgaagctgtcttgtgccgccagcggcttcgacttcagcagatactggatgagctgggtccgacaggcccctggcaaaggactggaatggatcggcgagatcaaccccaccagcagcaccatcaacttcacccctagcctgaaggacaaggtgttcatcagccgggacaacgccaagaacaccctgtacctccagatgagcaaagtgcggagcgaggacacagccctgtactactgtgccagaggcaactactacagatacggcgacgctatggactactggggccagggaacaagcgtgacagtctcttctacgcgtgcctctacaaagggaccctccgtgtttcctctggctcccagcagcaagtctacaagcggaggaacagccgctctgggctgcctggtcaaggattactttcccgagcctgtgaccgtgtcctggaatagcggagcactgacaagcggcgtgcacacctttccagccgtgctgcaaagcagcggcctgtactctctgagcagcgtggtcacagtgcctagctctagcctgggcacccagacctacatctgcaatgtgaaccacaagcctagcaacaccaaggtggacaagagagtggaacccaagagctgtggtaccggcgacatcgagaacaccagtctggcccctgaggaccctacctttcctgccgatacctggggcacctacctgctgaccacagagacaggactccagaaagatcacgccctgtgggaccacacagcccagaacctgctgagaatgggcctcgcctttctggtgctggttgccctcgtgtggttcctggtggaagattggctgagccggaagcggacaagagagagagccagcagagcctctacctgggagggaagaagaaggctgaacacccagacacttagggccaagcgatctggatctggagcaacaaacttctcactactcaaacaagcaggtgacgtggaggagaatcccgggccttctagaggccatatgaccgagtacaagcccacggtgcgcctcgccacccgcgacgacgtccccagggccgtacgcaccctcgccgccgcgttcgccgactaccccgccacgcgccacaccgtcgatccggaccgccacatcgagcgggtcaccgagctgcaagaactcttcctcacgcgcgtcgggctcgacatcggcaaggtgtgggtcgcggacgacggcgccgcggtggcggtctggaccacgccggagagcgtcgaagcgggggcggtgttcgccgagatcggcccgcgcatggccgagttgagcggttcccggctggccgcgcagcaacagatggaaggcctcctggcgccgcaccggcccaaggagcccgcgtggttcctggccaccgtcggcgtctcgcccgaccaccagggcaagggtctgggcagcgccgtcgtgctccccggagtggaggcggccgagcgcgccggggtgcccgccttcctggagacctccgcgccccgcaacctccccttctacgagcggctcggcttcaccgtcaccgccgacgtcgaggtgcccgaaggaccgcgcacctggtgcatgacccgcaagcccggtgcctga

SEQ ID NO: 3352 - DNA, 3159 bp, synthetic construct
  source 1..3159: mol_type = other DNA
atggccttaccagtgaccgccttgctcctgccgctggccttgctgctccacgccgccaggccggacattgtgctgacacagtctcccgccagcctggccgtttctctgggacagagagccaccatcagctgtagagccagcaagagcgtgtccaccagcggctactcttacctgcactggtatcagcagaagcccggccagcctcctaagctgctgatctacctggcctccaacctggaaagcggagtgcctgccagattttctggctctggcagcggcaccgacttcaccctgaatatccatcctgtggaagaagaggacgccgccacctactactgccagcacagtagagagctgcccttcacatttggctccggcaccaagctggaaatcaagctcgagggacagcctaaggccaatcctaccgtgacactgttccctccaagcagcgaagaactccaggccaacaaggccacacttgtgtgcctgatctccgacttctaccctggggctgtgacagtggcttggaaggccgatggatctcctgtgaaagccggcgtggaaaccaccaagccatccaagcagagcaacaacaaatacgccgccagctcctacctgagcctgacacctgagcagtggaagtcccacagatcctacagctgccaagtgacccacgaaggcagcaccgtggaaaagacagtggcccctacagagtgcagcggatcccagagcttcggcctgctggaccccaagctgtgctacctgctggatggcatcctgttcatctacggcgtgatcctgaccgccctgttcctgagagtgaagttcagcagaagcgccgacgcccctgcctaccagcagggacagaaccaactgtacaacgagctgaacctgggcagacgggaagagtacgacgtgctggacaagcggagaggcagggaccctgagatgggcggaaagccccagcggagaaagaacccccaggaaggactgtataacgaactccagaaagacaagatggccgaagcctacagcgagatcggcatgaagggcgagcggagaagaggcaagggccacgatggcctgtaccagggcctgagcaccgccaccaaggacacctatgacgccctgcacatgcaggccctgcctccaagaagggccaagcgatctggatctggagcaacaaacttctcactactcaaacaagcaggtgacgtggaggagaatcccgggcctactagtatggactggatttggcgcatccttttccttgtcggcgctgctaccggcgcgcattccttcgaacaggtgcagctggttgaatctggcggaggactggttcagcctggcggatctctgaagctgtcttgtgccgccagcggcttcgacttcagcagatactggatgagctgggtccgacaggcccctggcaaaggactggaatggatcggcgagatcaaccccaccagcagcaccatcaacttcacccctagcctgaaggacaaggtgttcatcagccgggacaacgccaagaacaccctgtacctccagatgagcaaagtgcggagcgaggacacagccctgtactactgtgccagaggcaactactacagatacggcgacgctatggactactggggccagggaacaagcgtgacagtctcttctacgcgtgcctctacaaagggaccctccgtgtttcctctggctcccagcagcaagtctacaagcggaggaacagccgctctgggctgcctggtcaaggattactttcccgagcctgtgaccgtgtcctggaatagcggagcactgacaagcggcgtgcacacctttccagccgtgctgcaaagcagcggcctgtactctctgagcagcgtggtcacagtgcctagctctagcctgggcacccagacctacatctgcaatgtgaaccacaagcctagcaacaccaaggtggacaagagagtggaacccaagagctgtggtaccaagtctgtgcgcttttacctggtcgtcagccctgccagtgcctccactcagacatcttggaccccaagggaccttgtgtcctctcagacacagacacagtcctgcgtgccaccaactgctggcgcaagacaggctccagagtctcccagcacaatccccgtcccttctcagccccagaactccacacttaggccaggaccagctgctccaatcgcactggtcccagtgttctgcggactgctggttgccaagtctctggtgctgagcgcactcctcgtttggtggggcgatatttggtggaaaacgatgatggaattgagatccctcgatacgcagaaagccacatgccaccttcagcaagtcacagacttgccttggaccagcgtcagctctcccgtggaacgggaaattctgtatcatacagtggcccgcaccaagatttccgacgatgacgacgagcacacactgcgcgccaagagaagcggatctggcgtgaagcagaccctgaatttcgacctgctgaagctggctggcgacgtggaatccaacccaggcccttctagaggccatatgaccgagtacaagcccacggtgcgcctcgccacccgcgacgacgtccccagggccgtacgcaccctcgccgccgcgttcgccgactaccccgccacgcgccacaccgtcgatccggaccgccacatcgagcgggtcaccgagctgcaagaactcttcctcacgcgcgtcgggctcgacatcggcaaggtgtgggtcgcggacgacggcgccgcggtggcggtctggaccacgccggagagcgtcgaagcgggggcggtgttcgccgagatcggcccgcgcatggccgagttgagcggttcccggctggccgcgcagcaacagatggaaggcctcctggcgccgcaccggcccaaggagcccgcgtggttcctggccaccgtcggcgtctcgcccgaccaccagggcaagggtctgggcagcgccgtcgtgctccccggagtggaggcggccgagcgcgccggggtgcccgccttcctggagacctccgcgccccgcaacctccccttctacgagcggctcggcttcaccgtcaccgccgacgtcgaggtgcccgaaggaccgcgcacctggtgcatgacccgcaagcccggtgcctga

SEQ ID NO: 3353 - DNA, 2919 bp, synthetic construct
  source 1..2919: mol_type = other DNA
atggccttaccagtgaccgccttgctcctgccgctggccttgctgctccacgccgccaggccggacattgtgctgacacagtctcccgccagcctggccgtttctctgggacagagagccaccatcagctgtagagccagcaagagcgtgtccaccagcggctactcttacctgcactggtatcagcagaagcccggccagcctcctaagctgctgatctacctggcctccaacctggaaagcggagtgcctgccagattttctggctctggcagcggcaccgacttcaccctgaatatccatcctgtggaagaagaggacgccgccacctactactgccagcacagtagagagctgcccttcacatttggctccggcaccaagctggaaatcaagctcgagggacagcctaaggccaatcctaccgtgacactgttccctccaagcagcgaagaactccaggccaacaaggccacacttgtgtgcctgatctccgacttctaccctggggctgtgacagtggcttggaaggccgatggatctcctgtgaaagccggcgtggaaaccaccaagccatccaagcagagcaacaacaaatacgccgccagctcctacctgagcctgacacctgagcagtggaagtcccacagatcctacagctgccaagtgacccacgaaggcagcaccgtggaaaagacagtggcccctacagagtgcagcggatcccagagcttcggcctgctggaccccaagctgtgctacctgctggatggcatcctgttcatctacggcgtgatcctgaccgccctgttcctgagagtgaagttcagcagaagcgccgacgcccctgcctaccagcagggacagaaccaactgtacaacgagctgaacctgggcagacgggaagagtacgacgtgctggacaagcggagaggcagggaccctgagatgggcggaaagccccagcggagaaagaacccccaggaaggactgtataacgaactccagaaagacaagatggccgaagcctacagcgagatcggcatgaagggcgagcggagaagaggcaagggccacgatggcctgtaccagggcctgagcaccgccaccaaggacacctatgacgccctgcacatgcaggccctgcctccaagaagggccaagcgatctggatctggagcaacaaacttctcactactcaaacaagcaggtgacgtggaggagaatcccgggcctactagtatggactggatttggcgcatccttttccttgtcggcgctgctaccggcgcgcattccttcgaacaggtgcagctggttgaatctggcggaggactggttcagcctggcggatctctgaagctgtcttgtgccgccagcggcttcgacttcagcagatactggatgagctgggtccgacaggcccctggcaaaggactggaatggatcggcgagatcaaccccaccagcagcaccatcaacttcacccctagcctgaaggacaaggtgttcatcagccgggacaacgccaagaacaccctgtacctccagatgagcaaagtgcggagcgaggacacagccctgtactactgtgccagaggcaactactacagatacggcgacgctatggactactggggccagggaacaagcgtgacagtctcttctacgcgtgcctctacaaagggaccctccgtgtttcctctggctcccagcagcaagtctacaagcggaggaacagccgctctgggctgcctggtcaaggattactttcccgagcctgtgaccgtgtcctggaatagcggagcactgacaagcggcgtgcacacctttccagccgtgctgcaaagcagcggcctgtactctctgagcagcgtggtcacagtgcctagctctagcctgggcacccagacctacatctgcaatgtgaaccacaagcctagcaacaccaaggtggacaagagagtggaacccaagagctgtggtaccgtggtcgagaaagaacatccacagcttggcgctggcaccgtcctgttgcttagagccggattctatgccgtcagcttcctgtccgtggctgtggggtctacagtgtattaccagggaaaatgtctcacctggaaaggccccagacgccagcttccagctgttgttcctgctccactgccaccaccttgtggctcctctgctcacttgcttccaccagtgcctggcggacgcgccaagagaagcggatctggcgtgaagcagaccctgaatttcgacctgctgaagctggctggcgacgtggaatccaacccaggcccttctagaggccatatgaccgagtacaagcccacggtgcgcctcgccacccgcgacgacgtccccagggccgtacgcaccctcgccgccgcgttcgccgactaccccgccacgcgccacaccgtcgatccggaccgccacatcgagcgggtcaccgagctgcaagaactcttcctcacgcgcgtcgggctcgacatcggcaaggtgtgggtcgcggacgacggcgccgcggtggcggtctggaccacgccggagagcgtcgaagcgggggcggtgttcgccgagatcggcccgcgcatggccgagttgagcggttcccggctggccgcgcagcaacagatggaaggcctcctggcgccgcaccggcccaaggagcccgcgtggttcctggccaccgtcggcgtctcgcccgaccaccagggcaagggtctgggcagcgccgtcgtgctccccggagtggaggcggccgagcgcgccggggtgcccgccttcctggagacctccgcgccccgcaacctccccttctacgagcggctcggcttcaccgtcaccgccgacgtcgaggtgcccgaaggaccgcgcacctggtgcatgacccgcaagcccggtgcctga

SEQ ID NO: 3354 - DNA, 3006 bp, synthetic construct
  source 1..3006: mol_type = other DNA
atggccttaccagtgaccgccttgctcctgccgctggccttgctgctccacgccgccaggccggacattgtgctgacacagtctcccgccagcctggccgtttctctgggacagagagccaccatcagctgtagagccagcaagagcgtgtccaccagcggctactcttacctgcactggtatcagcagaagcccggccagcctcctaagctgctgatctacctggcctccaacctggaaagcggagtgcctgccagattttctggctctggcagcggcaccgacttcaccctgaatatccatcctgtggaagaagaggacgccgccacctactactgccagcacagtagagagctgcccttcacatttggctccggcaccaagctggaaatcaagctcgaggacctgaagaacgtgttcccacctgaggtggccgtgttcgagcctagcgaggccgagatcagccacacccagaaagccaccctcgtgtgcctggctaccggcttctaccccgaccatgtggaactgtcttggtgggtcaacggcaaagaggtgcacagcggcgtgtctaccgacccccagccactgaaagaacagcccgccctgaacgacagccggtactgcctgagcagcagactgagagtgtccgccaccttctggcagaacccccggaaccacttcagatgccaggtgcagttctacggcctgagcgagaacgacgagtggacccaggacagagccaagcccgtgacccagatcgtgtctgccgaagcctggggcagagccgattgcggatcccagagcttcggcctgctggaccccaagctgtgctacctgctggatggcatcctgttcatctacggcgtgatcctgaccgccctgttcctgagagtgaagttcagcagaagcgccgacgcccctgcctaccagcagggacagaaccaactgtacaacgagctgaacctgggcagacgggaagagtacgacgtgctggacaagcggagaggcagggaccctgagatgggcggaaagccccagcggagaaagaacccccaggaaggactgtataacgaactccagaaagacaagatggccgaagcctacagcgagatcggcatgaagggcgagcggagaagaggcaagggccacgatggcctgtaccagggcctgagcaccgccaccaaggacacctatgacgccctgcacatgcaggccctgcctccaagaagggccaagcgatctggatctggagcaacaaacttctcactactcaaacaagcaggtgacgtggaggagaatcccgggcctactagtatggactggatttggcgcatccttttccttgtcggcgctgctaccggcgcgcattccttcgaacaggtgcagctggttgaatctggcggaggactggttcagcctggcggatctctgaagctgtcttgtgccgccagcggcttcgacttcagcagatactggatgagctgggtccgacaggcccctggcaaaggactggaatggatcggcgagatcaaccccaccagcagcaccatcaacttcacccctagcctgaaggacaaggtgttcatcagccgggacaacgccaagaacaccctgtacctccagatgagcaaagtgcggagcgaggacacagccctgtactactgtgccagaggcaactactacagatacggcgacgctatggactactggggccagggaacaagcgtgacagtctcttctacgcgtatccagaaccctgatcctgccgtgtaccagctgcgggatagcaagagcagcgacaagagcgtgtgtctgttcaccgacttcgacagccagaccaacgtgtcccagagcaaggactccgacgtgtacatcaccgataagaccgtgctggacatgcggagcatggacttcaagagcaactccgccgtggcctggtccaacaagtccgatttcgcctgcgccaacgccttcaacaacagcattatccccgaggacacattcttcccaagccccgagagcagctgcggtaccggcgacatcgagaacaccagtctggcccctgaggaccctacctttcctgccgatacctggggcacctacctgctgaccacagagacaggactccagaaagatcacgccctgtgggaccacacagcccagaacctgctgagaatgggcctcgcctttctggtgctggttgccctcgtgtggttcctggtggaagattggctgagccggaagcggacaagagagagagccagcagagcctctacctgggagggaagaagaaggctgaacacccagacacttagggccaagcgatctggatctggagcaacaaacttctcactactcaaacaagcaggtgacgtggaggagaatcccgggccttctagaggccatatgaccgagtacaagcccacggtgcgcctcgccacccgcgacgacgtccccagggccgtacgcaccctcgccgccgcgttcgccgactaccccgccacgcgccacaccgtcgatccggaccgccacatcgagcgggtcaccgagctgcaagaactcttcctcacgcgcgtcgggctcgacatcggcaaggtgtgggtcgcggacgacggcgccgcggtggcggtctggaccacgccggagagcgtcgaagcgggggcggtgttcgccgagatcggcccgcgcatggccgagttgagcggttcccggctggccgcgcagcaacagatggaaggcctcctggcgccgcaccggcccaaggagcccgcgtggttcctggccaccgtcggcgtctcgcccgaccaccagggcaagggtctgggcagcgccgtcgtgctccccggagtggaggcggccgagcgcgccggggtgcccgccttcctggagacctccgcgccccgcaacctccccttctacgagcggctcggcttcaccgtcaccgccgacgtcgaggtgcccgaaggaccgcgcacctggtgcatgacccgcaagcccggtgcctga

SEQ ID NO: 3355 - DNA, 3204 bp, synthetic construct
  source 1..3204: mol_type = other DNA
atggccttaccagtgaccgccttgctcctgccgctggccttgctgctccacgccgccaggccggacattgtgctgacacagtctcccgccagcctggccgtttctctgggacagagagccaccatcagctgtagagccagcaagagcgtgtccaccagcggctactcttacctgcactggtatcagcagaagcccggccagcctcctaagctgctgatctacctggcctccaacctggaaagcggagtgcctgccagattttctggctctggcagcggcaccgacttcaccctgaatatccatcctgtggaagaagaggacgccgccacctactactgccagcacagtagagagctgcccttcacatttggctccggcaccaagctggaaatcaagctcgaggacctgaagaacgtgttcccacctgaggtggccgtgttcgagcctagcgaggccgagatcagccacacccagaaagccaccctcgtgtgcctggctaccggcttctaccccgaccatgtggaactgtcttggtgggtcaacggcaaagaggtgcacagcggcgtgtctaccgacccccagccactgaaagaacagcccgccctgaacgacagccggtactgcctgagcagcagactgagagtgtccgccaccttctggcagaacccccggaaccacttcagatgccaggtgcagttctacggcctgagcgagaacgacgagtggacccaggacagagccaagcccgtgacccagatcgtgtctgccgaagcctggggcagagccgattgcggatcccagagcttcggcctgctggaccccaagctgtgctacctgctggatggcatcctgttcatctacggcgtgatcctgaccgccctgttcctgagagtgaagttcagcagaagcgccgacgcccctgcctaccagcagggacagaaccaactgtacaacgagctgaacctgggcagacgggaagagtacgacgtgctggacaagcggagaggcagggaccctgagatgggcggaaagccccagcggagaaagaacccccaggaaggactgtataacgaactccagaaagacaagatggccgaagcctacagcgagatcggcatgaagggcgagcggagaagaggcaagggccacgatggcctgtaccagggcctgagcaccgccaccaaggacacctatgacgccctgcacatgcaggccctgcctccaagaagggccaagcgatctggatctggagcaacaaacttctcactactcaaacaagcaggtgacgtggaggagaatcccgggcctactagtatggactggatttggcgcatccttttccttgtcggcgctgctaccggcgcgcattccttcgaacaggtgcagctggttgaatctggcggaggactggttcagcctggcggatctctgaagctgtcttgtgccgccagcggcttcgacttcagcagatactggatgagctgggtccgacaggcccctggcaaaggactggaatggatcggcgagatcaaccccaccagcagcaccatcaacttcacccctagcctgaaggacaaggtgttcatcagccgggacaacgccaagaacaccctgtacctccagatgagcaaagtgcggagcgaggacacagccctgtactactgtgccagaggcaactactacagatacggcgacgctatggactactggggccagggaacaagcgtgacagtctcttctacgcgtatccagaaccctgatcctgccgtgtaccagctgcgggatagcaagagcagcgacaagagcgtgtgtctgttcaccgacttcgacagccagaccaacgtgtcccagagcaaggactccgacgtgtacatcaccgataagaccgtgctggacatgcggagcatggacttcaagagcaactccgccgtggcctggtccaacaagtccgatttcgcctgcgccaacgccttcaacaacagcattatccccgaggacacattcttcccaagccccgagagcagctgcggtaccaagtctgtgcgcttttacctggtcgtcagccctgccagtgcctccactcagacatcttggaccccaagggaccttgtgtcctctcagacacagacacagtcctgcgtgccaccaactgctggcgcaagacaggctccagagtctcccagcacaatccccgtcccttctcagccccagaactccacacttaggccaggaccagctgctccaatcgcactggtcccagtgttctgcggactgctggttgccaagtctctggtgctgagcgcactcctcgtttggtggggcgatatttggtggaaaacgatgatggaattgagatccctcgatacgcagaaagccacatgccaccttcagcaagtcacagacttgccttggaccagcgtcagctctcccgtggaacgggaaattctgtatcatacagtggcccgcaccaagatttccgacgatgacgacgagcacacactgcgcgccaagagaagcggatctggcgtgaagcagaccctgaatttcgacctgctgaagctggctggcgacgtggaatccaacccaggcccttctagaggccatatgaccgagtacaagcccacggtgcgcctcgccacccgcgacgacgtccccagggccgtacgcaccctcgccgccgcgttcgccgactaccccgccacgcgccacaccgtcgatccggaccgccacatcgagcgggtcaccgagctgcaagaactcttcctcacgcgcgtcgggctcgacatcggcaaggtgtgggtcgcggacgacggcgccgcggtggcggtctggaccacgccggagagcgtcgaagcgggggcggtgttcgccgagatcggcccgcgcatggccgagttgagcggttcccggctggccgcgcagcaacagatggaaggcctcctggcgccgcaccggcccaaggagcccgcgtggttcctggccaccgtcggcgtctcgcccgaccaccagggcaagggtctgggcagcgccgtcgtgctccccggagtggaggcggccgagcgcgccggggtgcccgccttcctggagacctccgcgccccgcaacctccccttctacgagcggctcggcttcaccgtcaccgccgacgtcgaggtgcccgaaggaccgcgcacctggtgcatgacccgcaagcccggtgcctga

SEQ ID NO: 3356 - DNA, 2964 bp, synthetic construct
  source 1..2964: mol_type = other DNA
atggccttaccagtgaccgccttgctcctgccgctggccttgctgctccacgccgccaggccggacattgtgctgacacagtctcccgccagcctggccgtttctctgggacagagagccaccatcagctgtagagccagcaagagcgtgtccaccagcggctactcttacctgcactggtatcagcagaagcccggccagcctcctaagctgctgatctacctggcctccaacctggaaagcggagtgcctgccagattttctggctctggcagcggcaccgacttcaccctgaatatccatcctgtggaagaagaggacgccgccacctactactgccagcacagtagagagctgcccttcacatttggctccggcaccaagctggaaatcaagctcgaggacctgaagaacgtgttcccacctgaggtggccgtgttcgagcctagcgaggccgagatcagccacacccagaaagccaccctcgtgtgcctggctaccggcttctaccccgaccatgtggaactgtcttggtgggtcaacggcaaagaggtgcacagcggcgtgtctaccgacccccagccactgaaagaacagcccgccctgaacgacagccggtactgcctgagcagcagactgagagtgtccgccaccttctggcagaacccccggaaccacttcagatgccaggtgcagttctacggcctgagcgagaacgacgagtggacccaggacagagccaagcccgtgacccagatcgtgtctgccgaagcctggggcagagccgattgcggatcccagagcttcggcctgctggaccccaagctgtgctacctgctggatggcatcctgttcatctacggcgtgatcctgaccgccctgttcctgagagtgaagttcagcagaagcgccgacgcccctgcctaccagcagggacagaaccaactgtacaacgagctgaacctgggcagacgggaagagtacgacgtgctggacaagcggagaggcagggaccctgagatgggcggaaagccccagcggagaaagaacccccaggaaggactgtataacgaactccagaaagacaagatggccgaagcctacagcgagatcggcatgaagggcgagcggagaagaggcaagggccacgatggcctgtaccagggcctgagcaccgccaccaaggacacctatgacgccctgcacatgcaggccctgcctccaagaagggccaagcgatctggatctggagcaacaaacttctcactactcaaacaagcaggtgacgtggaggagaatcccgggcctactagtatggactggatttggcgcatccttttccttgtcggcgctgctaccggcgcgcattccttcgaacaggtgcagctggttgaatctggcggaggactggttcagcctggcggatctctgaagctgtcttgtgccgccagcggcttcgacttcagcagatactggatgagctgggtccgacaggcccctggcaaaggactggaatggatcggcgagatcaaccccaccagcagcaccatcaacttcacccctagcctgaaggacaaggtgttcatcagccgggacaacgccaagaacaccctgtacctccagatgagcaaagtgcggagcgaggacacagccctgtactactgtgccagaggcaactactacagatacggcgacgctatggactactggggccagggaacaagcgtgacagtctcttctacgcgtatccagaaccctgatcctgccgtgtaccagctgcgggatagcaagagcagcgacaagagcgtgtgtctgttcaccgacttcgacagccagaccaacgtgtcccagagcaaggactccgacgtgtacatcaccgataagaccgtgctggacatgcggagcatggacttcaagagcaactccgccgtggcctggtccaacaagtccgatttcgcctgcgccaacgccttcaacaacagcattatccccgaggacacattcttcccaagccccgagagcagctgcggtaccgtggtcgagaaagaacatccacagcttggcgctggcaccgtcctgttgcttagagccggattctatgccgtcagcttcctgtccgtggctgtggggtctacagtgtattaccagggaaaatgtctcacctggaaaggccccagacgccagcttccagctgttgttcctgctccactgccaccaccttgtggctcctctgctcacttgcttccaccagtgcctggcggacgcgccaagagaagcggatctggcgtgaagcagaccctgaatttcgacctgctgaagctggctggcgacgtggaatccaacccaggcccttctagaggccatatgaccgagtacaagcccacggtgcgcctcgccacccgcgacgacgtccccagggccgtacgcaccctcgccgccgcgttcgccgactaccccgccacgcgccacaccgtcgatccggaccgccacatcgagcgggtcaccgagctgcaagaactcttcctcacgcgcgtcgggctcgacatcggcaaggtgtgggtcgcggacgacggcgccgcggtggcggtctggaccacgccggagagcgtcgaagcgggggcggtgttcgccgagatcggcccgcgcatggccgagttgagcggttcccggctggccgcgcagcaacagatggaaggcctcctggcgccgcaccggcccaaggagcccgcgtggttcctggccaccgtcggcgtctcgcccgaccaccagggcaagggtctgggcagcgccgtcgtgctccccggagtggaggcggccgagcgcgccggggtgcccgccttcctggagacctccgcgccccgcaacctccccttctacgagcggctcggcttcaccgtcaccgccgacgtcgaggtgcccgaaggaccgcgcacctggtgcatgacccgcaagcccggtgcctga

SEQ ID NO: 3357 - DNA, 2877 bp, synthetic construct
  source 1..2877: mol_type = other DNA
atggccttaccagtgaccgccttgctcctgccgctggccttgctgctccacgccgccaggccggacattgtgctgacacagtctcccgccagcctggccgtttctctgggacagagagccaccatcagctgtagagccagcaagagcgtgtccaccagcggctactcttacctgcactggtatcagcagaagcccggccagcctcctaagctgctgatctacctggcctccaacctggaaagcggagtgcctgccagattttctggctctggcagcggcaccgacttcaccctgaatatccatcctgtggaagaagaggacgccgccacctactactgccagcacagtagagagctgcccttcacatttggctccggcaccaagctggaaatcaagctcgagggacagcctaaggccaatcctaccgtgacactgttccctccaagcagcgaagaactccaggccaacaaggccacacttgtgtgcctgatctccgacttctaccctggggctgtgacagtggcttggaaggccgatggatctcctgtgaaagccggcgtggaaaccaccaagccatccaagcagagcaacaacaaatacgccgccagctcctacctgagcctgacacctgagcagtggaagtcccacagatcctacagctgccaagtgacccacgaaggcagcaccgtggaaaagacagtggcccctacagagtgcagcggatcccagagcttcggcctgctggaccccaagctgtgctacctgctggatggcatcctgttcatctacggcgtgatcctgaccgccctgttcctgagagtgaagttcagcagaagcgccgacgcccctgcctaccagcagggacagaaccaactgtacaacgagctgaacctgggcagacgggaagagtacgacgtgctggacaagcggagaggcagggaccctgagatgggcggaaagccccagcggagaaagaacccccaggaaggactgtataacgaactccagaaagacaagatggccgaagcctacagcgagatcggcatgaagggcgagcggagaagaggcaagggccacgatggcctgtaccagggcctgagcaccgccaccaaggacacctatgacgccctgcacatgcaggccctgcctccaagaagggccaagcgatctggatctggagcaacaaacttctcactactcaaacaagcaggtgacgtggaggagaatcccgggcctactagtatggactggatttggcgcatccttttccttgtcggcgctgctaccggcgcgcattccttcgaacaggtgcagctggttgaatctggcggaggactggttcagcctggcggatctctgaagctgtcttgtgccgccagcggcttcgacttcagcagatactggatgagctgggtccgacaggcccctggcaaaggactggaatggatcggcgagatcaaccccaccagcagcaccatcaacttcacccctagcctgaaggacaaggtgttcatcagccgggacaacgccaagaacaccctgtacctccagatgagcaaagtgcggagcgaggacacagccctgtactactgtgccagaggcaactactacagatacggcgacgctatggactactggggccagggaacaagcgtgacagtctcttctacgcgtgcctctacaaagggaccctccgtgtttcctctggctcccagcagcaagtctacaagcggaggaacagccgctctgggctgcctggtcaaggattactttcccgagcctgtgaccgtgtcctggaatagcggagcactgacaagcggcgtgcacacctttccagccgtgctgcaaagcagcggcctgtactctctgagcagcgtggtcacagtgcctagctctagcctgggcacccagacctacatctgcaatgtgaaccacaagcctagcaacaccaaggtggacaagagagtggaacccaagagctgtggtaccatcactcaaggtttggcagtgtcaaccatctcatcattctttccacctggctaccaagtgtccttctgcctggtcatggtgctgctgttcgccgtggataccggcctgtacttcagcgtcaagaccaacatccggtccagcaccagagactggaaggaccacaagttcaagtggcggaaggaccctcaggacaagagggccaagcgatctggatctggagcaacaaacttctcactactcaaacaagcaggtgacgtggaggagaatcccgggccttctagaggccatatgaccgagtacaagcccacggtgcgcctcgccacccgcgacgacgtccccagggccgtacgcaccctcgccgccgcgttcgccgactaccccgccacgcgccacaccgtcgatccggaccgccacatcgagcgggtcaccgagctgcaagaactcttcctcacgcgcgtcgggctcgacatcggcaaggtgtgggtcgcggacgacggcgccgcggtggcggtctggaccacgccggagagcgtcgaagcgggggcggtgttcgccgagatcggcccgcgcatggccgagttgagcggttcccggctggccgcgcagcaacagatggaaggcctcctggcgccgcaccggcccaaggagcccgcgtggttcctggccaccgtcggcgtctcgcccgaccaccagggcaagggtctgggcagcgccgtcgtgctccccggagtggaggcggccgagcgcgccggggtgcccgccttcctggagacctccgcgccccgcaacctccccttctacgagcggctcggcttcaccgtcaccgccgacgtcgaggtgcccgaaggaccgcgcacctggtgcatgacccgcaagcccggtgcctga

SEQ ID NO: 3358 - DNA, 2922 bp, synthetic construct
  source 1..2922: mol_type = other DNA
atggccttaccagtgaccgccttgctcctgccgctggccttgctgctccacgccgccaggccggacattgtgctgacacagtctcccgccagcctggccgtttctctgggacagagagccaccatcagctgtagagccagcaagagcgtgtccaccagcggctactcttacctgcactggtatcagcagaagcccggccagcctcctaagctgctgatctacctggcctccaacctggaaagcggagtgcctgccagattttctggctctggcagcggcaccgacttcaccctgaatatccatcctgtggaagaagaggacgccgccacctactactgccagcacagtagagagctgcccttcacatttggctccggcaccaagctggaaatcaagctcgaggacctgaagaacgtgttcccacctgaggtggccgtgttcgagcctagcgaggccgagatcagccacacccagaaagccaccctcgtgtgcctggctaccggcttctaccccgaccatgtggaactgtcttggtgggtcaacggcaaagaggtgcacagcggcgtgtctaccgacccccagccactgaaagaacagcccgccctgaacgacagccggtactgcctgagcagcagactgagagtgtccgccaccttctggcagaacccccggaaccacttcagatgccaggtgcagttctacggcctgagcgagaacgacgagtggacccaggacagagccaagcccgtgacccagatcgtgtctgccgaagcctggggcagagccgattgcggatcccagagcttcggcctgctggaccccaagctgtgctacctgctggatggcatcctgttcatctacggcgtgatcctgaccgccctgttcctgagagtgaagttcagcagaagcgccgacgcccctgcctaccagcagggacagaaccaactgtacaacgagctgaacctgggcagacgggaagagtacgacgtgctggacaagcggagaggcagggaccctgagatgggcggaaagccccagcggagaaagaacccccaggaaggactgtataacgaactccagaaagacaagatggccgaagcctacagcgagatcggcatgaagggcgagcggagaagaggcaagggccacgatggcctgtaccagggcctgagcaccgccaccaaggacacctatgacgccctgcacatgcaggccctgcctccaagaagggccaagcgatctggatctggagcaacaaacttctcactactcaaacaagcaggtgacgtggaggagaatcccgggcctactagtatggactggatttggcgcatccttttccttgtcggcgctgctaccggcgcgcattccttcgaacaggtgcagctggttgaatctggcggaggactggttcagcctggcggatctctgaagctgtcttgtgccgccagcggcttcgacttcagcagatactggatgagctgggtccgacaggcccctggcaaaggactggaatggatcggcgagatcaaccccaccagcagcaccatcaacttcacccctagcctgaaggacaaggtgttcatcagccgggacaacgccaagaacaccctgtacctccagatgagcaaagtgcggagcgaggacacagccctgtactactgtgccagaggcaactactacagatacggcgacgctatggactactggggccagggaacaagcgtgacagtctcttctacgcgtatccagaaccctgatcctgccgtgtaccagctgcgggatagcaagagcagcgacaagagcgtgtgtctgttcaccgacttcgacagccagaccaacgtgtcccagagcaaggactccgacgtgtacatcaccgataagaccgtgctggacatgcggagcatggacttcaagagcaactccgccgtggcctggtccaacaagtccgatttcgcctgcgccaacgccttcaacaacagcattatccccgaggacacattcttcccaagccccgagagcagctgcggtaccatcactcaaggtttggcagtgtcaaccatctcatcattctttccacctggctaccaagtgtccttctgcctggtcatggtgctgctgttcgccgtggataccggcctgtacttcagcgtcaagaccaacatccggtccagcaccagagactggaaggaccacaagttcaagtggcggaaggaccctcaggacaagagggccaagcgatctggatctggagcaacaaacttctcactactcaaacaagcaggtgacgtggaggagaatcccgggccttctagaggccatatgaccgagtacaagcccacggtgcgcctcgccacccgcgacgacgtccccagggccgtacgcaccctcgccgccgcgttcgccgactaccccgccacgcgccacaccgtcgatccggaccgccacatcgagcgggtcaccgagctgcaagaactcttcctcacgcgcgtcgggctcgacatcggcaaggtgtgggtcgcggacgacggcgccgcggtggcggtctggaccacgccggagagcgtcgaagcgggggcggtgttcgccgagatcggcccgcgcatggccgagttgagcggttcccggctggccgcgcagcaacagatggaaggcctcctggcgccgcaccggcccaaggagcccgcgtggttcctggccaccgtcggcgtctcgcccgaccaccagggcaagggtctgggcagcgccgtcgtgctccccggagtggaggcggccgagcgcgccggggtgcccgccttcctggagacctccgcgccccgcaacctccccttctacgagcggctcggcttcaccgtcaccgccgacgtcgaggtgcccgaaggaccgcgcacctggtgcatgacccgcaagcccggtgcctga

SEQ ID NO: 3359 - DNA, 1971 bp, synthetic construct
  source 1..1971: mol_type = other DNA
atggccttaccagtgaccgccttgctcctgccgctggccttgctgctccacgccgccaggccggacattgtgctgacacagtctcccgccagcctggccgtttctctgggacagagagccaccatcagctgtagagccagcaagagcgtgtccaccagcggctactcttacctgcactggtatcagcagaagcccggccagcctcctaagctgctgatctacctggcctccaacctggaaagcggagtgcctgccagattttctggctctggcagcggcaccgacttcaccctgaatatccatcctgtggaagaagaggacgccgccacctactactgccagcacagtagagagctgcccttcacatttggctccggcaccaagctggaaatcaagctcgagggacagcctaaggccaatcctaccgtgacactgttccctccaagcagcgaagaactccaggccaacaaggccacacttgtgtgcctgatctccgacttctaccctggggctgtgacagtggcttggaaggccgatggatctcctgtgaaagccggcgtggaaaccaccaagccatccaagcagagcaacaacaaatacgccgccagctcctacctgagcctgacacctgagcagtggaagtcccacagatcctacagctgccaagtgacccacgaaggcagcaccgtggaaaagacagtggcccctacagagtgcagcggatccctgggagagcctcagctgtgctatatcctggacgccatcctgtttctgtacggcatcgtgctgaccctgctgtactgccggctgaagatccaagtgcggaaggccgccatcaccagctacgagaaatccgacggcgtgtacaccggcctgagcaccagaaatcaagagacatacgagacactgaagcacgaaaagcctccacaaagggccaagcgatctggatctggagcaacaaacttctcactactcaaacaagcaggtgacgtggaggagaatcccgggcctactagtatggactggatttggcgcatccttttccttgtcggcgctgctaccggcgcgcattccttcgaacaggtgcagctggttgaatctggcggaggactggttcagcctggcggatctctgaagctgtcttgtgccgccagcggcttcgacttcagcagatactggatgagctgggtccgacaggcccctggcaaaggactggaatggatcggcgagatcaaccccaccagcagcaccatcaacttcacccctagcctgaaggacaaggtgttcatcagccgggacaacgccaagaacaccctgtacctccagatgagcaaagtgcggagcgaggacacagccctgtactactgtgccagaggcaactactacagatacggcgacgctatggactactggggccagggaacaagcgtgacagtctcttctacgcgtgcctctacaaagggaccctccgtgtttcctctggctcccagcagcaagtctacaagcggaggaacagccgctctgggctgcctggtcaaggattactttcccgagcctgtgaccgtgtcctggaatagcggagcactgacaagcggcgtgcacacctttccagccgtgctgcaaagcagcggcctgtactctctgagcagcgtggtcacagtgcctagctctagcctgggcacccagacctacatctgcaatgtgaaccacaagcctagcaacaccaaggtggacaagagagtggaacccaagagctgtggtaccctcggagaaccacagctctgttacattctggatgctatcctgttcctctatgggatcgtcctgacactcctgtattgcagactcaaaattcaagttcgcaaagccgccattacctcttacgagaagagtgatggggtgtacacaggactgtctacccggaatcaagaaacctacgaaaccctcaaacatgagaagccacctcagtaa

SEQ ID NO: 3360 - DNA, 1467 bp, synthetic construct
  source 1..1467: mol_type = other DNA
atggccttaccagtgaccgccttgctcctgccgctggccttgctgctccacgccgccaggccggatattcagatgacacagagccccagcagcctgtctgcctctgtgggagacagagtgaccatcacctgtcgggcctctcagaatgtgggaacagccgtggcttggtttcagcagaagcctggcaaggcccctaagatcctgatctacagcgccagcaacagatacaccggcgtgccaagtagaagcacaggctctggcagcggcaccgatttcaccctgacaatatccagcctccagcctgaggacttcgccacctactactgccagcagtacagcacataccctctgaccttcggccaggggaccaagctggaaatcaagggcggaggcggaagtggaggcggaggatctggcggcggaggctctgaggtgcagctggttgaatctggcggaggactggttcagcctggcggatctctgagactgtcttgtgccgccagcggcttcacctttagcacatacggaatggcctgggtccgacagacccctgatagaaggctggaactggtggctaccatcaacagcaacggcggcaagacctaccatcctgacagcgtgaagggcagattcaccatcagccgggacaacagcaagaacaccctgtacctccagatgaacagcctgagagccgaggacaccgccgtgtactactgcaccagagaaggactggactactggggccagggcacactggttacagtttctagcacgcgtgagcagaaactgatctcggaagaggatctgaaaattgaagttatgtatcctcctccttacctagacaatgagaagagcaatggaaccattatccatgtgaaagggaaacacctttgtccaagtcccctatttcccggaccttctaagcccttttgggtgctggtggtggttgggggagtcctggcttgctatagcttgctagtaacagtggcctttattattttctgggtgaggagtaagaggagcaggctcctgcacagtgactacatgaacatgactccacgccgccccggacccacccgcaagcattaccagccctatgccccaccacgcgacttcgcagcctatcgctccagagtgaagttcagcaggagcgcagacgcccccgcgtaccagcagggccagaaccagctctataacgagctcaatctaggacgaagagaggagtacgatgttttggacaagagacgtggccgggaccctgagatggggggaaagccgagaaggaagaaccctcaggaaggcctgtacaatgaactgcagaaagataagatggcggaggcctacagtgagattgggatgaaaggcgagcgccggaggggcaaggggcacgatggcctttaccagggtctcagtacagccaccaaggacacctacgacgcccttcacatgcaggccctgccccctcgc

SEQ ID NO: 3361 - DNA, 1488 bp, synthetic construct
  source 1..1488: mol_type = other DNA
atggccttaccagtgaccgccttgctcctgccgctggccttgctgctccacgccgccaggccggatattcagatgacacagagccccagcagcctgtctgcctctgtgggagacagagtgaccatcacctgtcgggcctctcagaatgtgggaacagccgtggcttggtttcagcagaagcctggcaaggcccctaagatcctgatctacagcgccagcaacagatacaccggcgtgccaagtagaagcacaggctctggcagcggcaccgatttcaccctgacaatatccagcctccagcctgaggacttcgccacctactactgccagcagtacagcacataccctctgaccttcggccaggggaccaagctggaaatcaagggcggaggcggaagtggaggcggaggatctggcggcggaggctctgaggtgcagctggttgaatctggcggaggactggttcagcctggcggatctctgagactgtcttgtgccgccagcggcttcacctttagcacatacggaatggcctgggtccgacagacccctgatagaaggctggaactggtggctaccatcaacagcaacggcggcaagacctaccatcctgacagcgtgaagggcagattcaccatcagccgggacaacagcaagaacaccctgtacctccagatgaacagcctgagagccgaggacaccgccgtgtactactgcaccagagaaggactggactactggggccagggcacactggttacagtttctagcacgcgtgagcagaaactgatctcggaagaggatctggcgaagcccaccacgacgccagcgccgcgaccaccaacaccggcgcccaccatcgcgtcgcagcccctgtccctgcgcccagaggcgtgccggccagcggcggggggcgcagtgcacacgagggggctggacttcgcctgtgacatctacatctgggcgcccttggccgggacttgtggggtccttctcctgtcactggttatcaccctttactgcaaacggggcagaaagaaactcctgtatatattcaaacaaccatttatgagaccagtacaaactactcaagaggaagatggctgtagctgccgatttccagaagaagaagaaggaggatgtgaactgagagtgaagttcagcaggagcgcagacgcccccgcgtaccagcagggccagaaccagctctataacgagctgaatctaggacgaagagaggagtacgatgttttggacaagagacgtggccgggaccctgagatggggggaaagccgagaaggaagaaccctcaggaaggcctgtacaatgaactgcagaaagataagatggcggaggcctacagtgagattgggatgaaaggcgagcgccggaggggcaaggggcacgatggcctttaccagggtctcagtacagccaccaaggacacctacgacgcccttcacatgcaggccctgccccctcgctga

SEQ ID NO: 3362 - DNA, 1488 bp, synthetic construct
  source 1..1488: mol_type = other DNA
atggccttaccagtgaccgccttgctcctgccgctggccttgctgctccacgccgccaggccggaggtgcagctggttgaatctggcggaggactggttcagcctggcggatctctgagactgtcttgtgccgccagcggcttcacctttagcacatacggaatggcctgggtccgacagacccctgatagaaggctggaactggtggctaccatcaacagcaacggcggcaagacctaccatcctgacagcgtgaagggcagattcaccatcagccgggacaacagcaagaacaccctgtacctccagatgaacagcctgagagccgaggacaccgccgtgtactactgcaccagagaaggactggactactggggccagggcacactggttacagtttctagcggcggaggcggaagtggaggcggaggatctggcggcggaggctctgatattcagatgacacagagccccagcagcctgtctgcctctgtgggagacagagtgaccatcacctgtcgggcctctcagaatgtgggaacagccgtggcttggtttcagcagaagcctggcaaggcccctaagatcctgatctacagcgccagcaacagatacaccggcgtgccaagtagaagcacaggctctggcagcggcaccgatttcaccctgacaatatccagcctccagcctgaggacttcgccacctactactgccagcagtacagcacataccctctgaccttcggccaggggaccaagctggaaatcaagacgcgtgagcagaaactgatctcggaagaggatctggcgaagcccaccacgacgccagcgccgcgaccaccaacaccggcgcccaccatcgcgtcgcagcccctgtccctgcgcccagaggcgtgccggccagcggcggggggcgcagtgcacacgagggggctggacttcgcctgtgacatctacatctgggcgcccttggccgggacttgtggggtccttctcctgtcactggttatcaccctttactgcaaacggggcagaaagaaactcctgtatatattcaaacaaccatttatgagaccagtacaaactactcaagaggaagatggctgtagctgccgatttccagaagaagaagaaggaggatgtgaactgagagtgaagttcagcaggagcgcagacgcccccgcgtaccagcagggccagaaccagctctataacgagctgaatctaggacgaagagaggagtacgatgttttggacaagagacgtggccgggaccctgagatggggggaaagccgagaaggaagaaccctcaggaaggcctgtacaatgaactgcagaaagataagatggcggaggcctacagtgagattgggatgaaaggcgagcgccggaggggcaaggggcacgatggcctttaccagggtctcagtacagccaccaaggacacctacgacgcccttcacatgcaggccctgccccctcgctga

SEQ ID NO: 3363 - DNA, 2727 bp, synthetic construct
  source 1..2727: mol_type = other DNA
atggccttaccagtgaccgccttgctcctgccgctggccttgctgctccacgccgccaggccggatattcagatgacacagagccccagcagcctgtctgcctctgtgggagacagagtgaccatcacctgtcgggcctctcagaatgtgggaacagccgtggcttggtttcagcagaagcctggcaaggcccctaagatcctgatctacagcgccagcaacagatacaccggcgtgccaagtagaagcacaggctctggcagcggcaccgatttcaccctgacaatatccagcctccagcctgaggacttcgccacctactactgccagcagtacagcacataccctctgaccttcggccaggggaccaagctggaaatcaagggcggaggcggaagtggaggcggaggatctggcggcggaggctctgaggtgcagctggttgaatctggcggaggactggttcagcctggcggatctctgagactgtcttgtgccgccagcggcttcacctttagcacatacggaatggcctgggtccgacagacccctgatagaaggctggaactggtggctaccatcaacagcaacggcggcaagacctaccatcctgacagcgtgaagggcagattcaccatcagccgggacaacagcaagaacaccctgtacctccagatgaacagcctgagagccgaggacaccgccgtgtactactgcaccagagaaggactggactactggggccagggcacactggttacagtttctagcacgcgtgagcagaaactgatctcggaagaggatctggcgaagcccaccacgacgccagcgccgcgaccaccaacaccggcgcccaccatcgcgtcgcagcccctgtccctgcgcccagaggcgtgccggccagcggcggggggcgcagtgcacacgagggggctggacttcgcctgtgacatctacatctgggcgcccttggccgggacttgtggggtccttctcctgtcactggttatcaccctttactgcgggcgcgccagagtgaagttcagcaggagcgcagacgcccccgcgtaccagcagggccagaaccagctctataacgagctgaatctaggacgaagagaggagtacgatgttttggacaagagacgtggccgggaccctgagatggggggaaagccgagaaggaagaaccctcaggaaggcctgtacaatgaactgcagaaagataagatggcggaggcctacagtgagattgggatgaaaggcgagcgccggaggggcaaggggcacgatggcctttaccagggtctcagtacagccaccaaggacacctacgacgcccttcacatgcaggccctgccccctcgctctagaggatctggagcaacaaacttctcactactcaaacaagcaggtgacgtggaggagaatcccgggcctgggatccacatggccacttacgaggttctctgtgaggtggcgcggaaactgggcacggatgacagggaagtggtattgttcctcctaaacgtgttcatacctcaacccacactggcccaattaattggagctcttagagctttaaaggaggagggcaggttaacgtttcccctgttagcggaatgtctgtttcgtgcaggtcgcagagacctcttgcgcgacctgcttcacttagacccgcgttttttagagcgccacctagcgggcacaatgagttatttcagcccttatcagctcactgttctccacgtagacggggagctgtgtgcgagggatattaggtctttgatatttttaagcaaggacactatagggtctcgcagcacaccacagacattcttacactgggtgtactgtatggaaaacttagacctactgggtcccactgacgtggatgccctaatgtcaatgcttagatctttgtcaagagtagacctacagcgccaagtgcaaaccctaatgggccttcacctttccggcccatcacactcccaacactatcgccatacaccactcgagaccgatttctacgactacaaggacgacgatgacaagactagtggctccggcgagggcagaggaagtctactaacctgcggagatgtggaagaaaatcctggcccacatatgaccgagtacaagcccacggtgcgcctcgccacccgcgacgacgtccccagggccgtacgcaccctcgccgccgcgttcgccgactaccccgccacgcgccacaccgtcgatccggaccgccacatcgagcgggtcaccgagctgcaagaactcttcctcacgcgcgtcgggctcgacatcggcaaggtgtgggtcgcggacgacggcgccgcggtggcggtctggaccacgccggagagcgtcgaagcgggggcggtgttcgccgagatcggcccgcgcatggccgagttgagcggttcccggctggccgcgcagcaacagatggaaggcctcctggcgccgcaccggcccaaggagcccgcgtggttcctggccaccgtcggcgtctcgcccgaccaccagggcaagggtctgggcagcgccgtcgtgctccccggagtggaggcggccgagcgcgccggggtgcccgccttcctggagacctccgcgccccgcaacctccccttctacgagcggctcggcttcaccgtcaccgccgacgtcgaggtgcccgaaggaccgcgcacctggtgcatgacccgcaagcccggtgcctga

SEQ ID NO: 3364 - DNA, 2547 bp, synthetic construct
  source 1..2547: mol_type = other DNA
atggccttaccagtgaccgccttgctcctgccgctggccttgctgctccacgccgccaggccggatattcagatgacacagagccccagcagcctgtctgcctctgtgggagacagagtgaccatcacctgtcgggcctctcagaatgtgggaacagccgtggcttggtttcagcagaagcctggcaaggcccctaagatcctgatctacagcgccagcaacagatacaccggcgtgccaagtagaagcacaggctctggcagcggcaccgatttcaccctgacaatatccagcctccagcctgaggacttcgccacctactactgccagcagtacagcacataccctctgaccttcggccaggggaccaagctggaaatcaagctcgagatccagaaccctgatcctgccgtgtaccagctgcgggatagcaagagcagcgacaagagcgtgtgtctgttcaccgacttcgacagccagaccaacgtgtcccagagcaaggactccgacgtgtacatcaccgataagtgcgtgctggacatgcggagcatggacttcaagagcaactccgccgtggcctggtccaacaagtccgatttcgcctgcgccaacgccttcaacaacagcattatccccgaggacacattcttcccaagcagcgacgtgccctgcgacgtgaagctggtggaaaagagcttcgagacagacaccaacctgaacttccagaacctgagcgtgatcggcttcagaatcctgctgctgaaagtggccggctttaacctgctgatgaccctgcggctgtggtccagccgcgccaagagaagcggatctggcgtgaagcagaccctgaatttcgacctgctgaagctggctggcgacgtggaatccaacccaggccctactagtatggactggatttggcgcatccttttccttgtcggcgctgctaccggcgcgcattccttcgaagaggtgcagctggttgaatctggcggaggactggttcagcctggcggatctctgagactgtcttgtgccgccagcggcttcacctttagcacatacggaatggcctgggtccgacagacccctgatagaaggctggaactggtggctaccatcaacagcaacggcggcaagacctaccatcctgacagcgtgaagggcagattcaccatcagccgggacaacagcaagaacaccctgtacctccagatgaacagcctgagagccgaggacaccgccgtgtactactgcaccagagaaggactggactactggggccagggcacactggttacagtttctagcacgcgtgaggacctgaagaacgtgttcccacctgaggtggccgtgttcgagcctagcaaggccgagatcgcccacacccagaaagccaccctcgtgtgcctggctaccggcttctaccccgaccatgtggaactgtcttggtgggtcaacggcaaagaggtgcacagcggcgtgtgtaccgacccccagccactgaaagaacagcccgccctgaacgacagccggtactgcctgagcagcagactgagagtgtccgccaccttctggcagaacccccggaaccacttcagatgccaggtgcagttctacggcctgagcgagaacgacgagtggacccaggacagagccaagcccgtgacccagatcgtgtctgccgaagcctggggcagagccgattgcggcatcaccagcgccagctaccaccagggcgtgctgagcgccaccatcctgtacgagatcctgctgggcaaggccaccctgtacgccgtgctggtgtctgccctggtgctgatggctatggtcaagcggaaggacagccggggaagggccaagcgatctggatctggagcaacaaacttctcactactcaaacaagcaggtgacgtggaggagaatcccgggccttctagaggccatatgaccgagtacaagcccacggtgcgcctcgccacccgcgacgacgtccccagggccgtacgcaccctcgccgccgcgttcgccgactaccccgccacgcgccacaccgtcgatccggaccgccacatcgagcgggtcaccgagctgcaagaactcttcctcacgcgcgtcgggctcgacatcggcaaggtgtgggtcgcggacgacggcgccgcggtggcggtctggaccacgccggagagcgtcgaagcgggggcggtgttcgccgagatcggcccgcgcatggccgagttgagcggttcccggctggccgcgcagcaacagatggaaggcctcctggcgccgcaccggcccaaggagcccgcgtggttcctggccaccgtcggcgtctcgcccgaccaccagggcaagggtctgggcagcgccgtcgtgctccccggagtggaggcggccgagcgcgccggggtgcccgccttcctggagacctccgcgccccgcaacctccccttctacgagcggctcggcttcaccgtcaccgccgacgtcgaggtgcccgaaggaccgcgcacctggtgcatgacccgcaagcccggtgcctga

SEQ ID NO: 3365 - DNA, 2544 bp, synthetic construct
  source 1..2544: mol_type = other DNA
atggccttaccagtgaccgccttgctcctgccgctggccttgctgctccacgccgccaggccggatattcagatgacacagagccccagcagcctgtctgcctctgtgggagacagagtgaccatcacctgtcgggcctctcagaatgtgggaacagccgtggcttggtttcagcagaagcctggcaaggcccctaagatcctgatctacagcgccagcaacagatacaccggcgtgccaagtagaagcacaggctctggcagcggcaccgatttcaccctgacaatatccagcctccagcctgaggacttcgccacctactactgccagcagtacagcacataccctctgaccttcggccaggggaccaagctggaaatcaagctcgaggacctgaagaacgtgttcccacctgaggtggccgtgttcgagcctagcaaggccgagatcgcccacacccagaaagccaccctcgtgtgcctggctaccggcttctaccccgaccatgtggaactgtcttggtgggtcaacggcaaagaggtgcacagcggcgtgtgtaccgacccccagccactgaaagaacagcccgccctgaacgacagccggtactgcctgagcagcagactgagagtgtccgccaccttctggcagaacccccggaaccacttcagatgccaggtgcagttctacggcctgagcgagaacgacgagtggacccaggacagagccaagcccgtgacccagatcgtgtctgccgaagcctggggcagagccgattgcggcatcaccagcgccagctaccaccagggcgtgctgagcgccaccatcctgtacgagatcctgctgggcaaggccaccctgtacgccgtgctggtgtctgccctggtgctgatggctatggtcaagcggaaggacagccggggaagggccaagcgatctggatctggagcaacaaacttctcactactcaaacaagcaggtgacgtggaggagaatcccgggcctactagtatggactggatttggcgcatccttttccttgtcggcgctgctaccggcgcgcattccttcgaagaggtgcagctggttgaatctggcggaggactggttcagcctggcggatctctgagactgtcttgtgccgccagcggcttcacctttagcacatacggaatggcctgggtccgacagacccctgatagaaggctggaactggtggctaccatcaacagcaacggcggcaagacctaccatcctgacagcgtgaagggcagattcaccatcagccgggacaacagcaagaacaccctgtacctccagatgaacagcctgagagccgaggacaccgccgtgtactactgcaccagagaaggactggactactggggccagggcacactggttacagtttctagcacgcgtatccagaaccctgatcctgccgtgtaccagctgcgggatagcaagagcagcgacaagagcgtgtgtctgttcaccgacttcgacagccagaccaacgtgtcccagagcaaggactccgacgtgtacatcaccgataagtgcgtgctggacatgcggagcatggacttcaagagcaactccgccgtggcctggtccaacaagtccgatttcgcctgcgccaacgccttcaacaacagcattatccccgaggacacattcttcccaagcagcgacgtgccctgcgacgtgaagctggtggaaaagagcttcgagacagacaccaacctgaacttccagaacctgagcgtgatcggcttcagaatcctgctgctgaaagtggccggctttaacctgctgatgaccctgcggctgtggtccagccgcgccaagagaagcggatctggcgtgaagcagaccctgaatttcgacctgctgaagctggctggcgacgtggaatccaacccaggcccttctagaggccatatgaccgagtacaagcccacggtgcgcctcgccacccgcgacgacgtccccagggccgtacgcaccctcgccgccgcgttcgccgactaccccgccacgcgccacaccgtcgatccggaccgccacatcgagcgggtcaccgagctgcaagaactcttcctcacgcgcgtcgggctcgacatcggcaaggtgtgggtcgcggacgacggcgccgcggtggcggtctggaccacgccggagagcgtcgaagcgggggcggtgttcgccgagatcggcccgcgcatggccgagttgagcggttcccggctggccgcgcagcaacagatggaaggcctcctggcgccgcaccggcccaaggagcccgcgtggttcctggccaccgtcggcgtctcgcccgaccaccagggcaagggtctgggcagcgccgtcgtgctccccggagtggaggcggccgagcgcgccggggtgcccgccttcctggagacctccgcgccccgcaacctccccttctacgagcggctcggcttcaccgtcaccgccgacgtcgaggtgcccgaaggaccgcgcacctggtgcatgacccgcaagcccggtgcctga

SEQ ID NO: 3366 - DNA, 1842 bp, synthetic construct
  source 1..1842: mol_type = other DNA
atggccttaccagtgaccgccttgctcctgccgctggccttgctgctccacgccgccaggccggatattcagatgacacagagccccagcagcctgtctgcctctgtgggagacagagtgaccatcacctgtcgggcctctcagaatgtgggaacagccgtggcttggtttcagcagaagcctggcaaggcccctaagatcctgatctacagcgccagcaacagatacaccggcgtgccaagtagaagcacaggctctggcagcggcaccgatttcaccctgacaatatccagcctccagcctgaggacttcgccacctactactgccagcagtacagcacataccctctgaccttcggccaggggaccaagctggaaatcaagctcgaggacctgaagaacgtgttcccacctgaggtggccgtgttcgagcctagcgaggccgagatcagccacacccagaaagccaccctcgtgtgcctggctaccggcttctaccccgaccatgtggaactgtcttggtgggtcaacggcaaagaggtgcacagcggcgtgtgtaccgacccccagccactgaaagaacagcccgccctgaacgacagccggtactgcctgagcagcagactgagagtgtccgccaccttctggcagaacccccggaaccacttcagatgccaggtgcagttctacggcctgagcgagaacgacgagtggacccaggacagagccaagcccgtgacccagatcgtgtctgccgaagcctggggcagagccgattgcggctttaccagcgagagctaccagcagggcgtgctgagcgccaccatcctgtacgagatcctgctgggcaaggccaccctgtacgccgtgctggtgtctgccctggtgctgatggctatggtcaagcggaaggacagccggggaagggccaagcgatctggatctggagcaacaaacttctcactactcaaacaagcaggtgacgtggaggagaatcccgggcctactagtatggactggatttggcgcatccttttccttgtcggcgctgctaccggcgcgcattccttcgaagaggtgcagctggttgaatctggcggaggactggttcagcctggcggatctctgagactgtcttgtgccgccagcggcttcacctttagcacatacggaatggcctgggtccgacagacccctgatagaaggctggaactggtggctaccatcaacagcaacggcggcaagacctaccatcctgacagcgtgaagggcagattcaccatcagccgggacaacagcaagaacaccctgtacctccagatgaacagcctgagagccgaggacaccgccgtgtactactgcaccagagaaggactggactactggggccagggcacactggttacagtttctagcacgcgtatccagaaccctgatcctgccgtgtaccagctgcgggatagcaagagcagcgacaagagcgtgtgtctgttcaccgacttcgacagccagaccaacgtgtcccagagcaaggactccgacgtgtacatcaccgataagtgcgtgctggacatgcggagcatggacttcaagagcaactccgccgtggcctggtccaacaagtccgatttcgcctgcgccaacgccttcaacaacagcattatccccgaggacacattcttcccaagccccgagagcagctgcgacgtgaagctggtggaaaagagcttcgagacagacaccaacctgaacttccagaacctgagcgtgatcggcttcagaatcctgctgctgaaagtggccggctttaacctgctgatgaccctgcggctgtggtccagc

SEQ ID NO: 3367 - DNA, 2517 bp, synthetic construct
  source 1..2517: mol_type = other DNA
atggccttaccagtgaccgccttgctcctgccgctggccttgctgctccacgccgccaggccggatattcagatgacacagagccccagcagcctgtctgcctctgtgggagacagagtgaccatcacctgtcgggcctctcagaatgtgggaacagccgtggcttggtttcagcagaagcctggcaaggcccctaagatcctgatctacagcgccagcaacagatacaccggcgtgccaagtagaagcacaggctctggcagcggcaccgatttcaccctgacaatatccagcctccagcctgaggacttcgccacctactactgccagcagtacagcacataccctctgaccttcggccaggggaccaagctggaaatcaagctcgaggacctgaagaacgtgttcccacctgaggtggccgtgttcgagcctagcgaggccgagatcagccacacccagaaagccaccctcgtgtgcctggctaccggcttctaccccgaccatgtggaactgtcttggtgggtcaacggcaaagaggtgcacagcggcgtgtgtaccgacccccagccactgaaagaacagcccgccctgaacgacagccggtactgcctgagcagcagactgagagtgtccgccaccttctggcagaacccccggaaccacttcagatgccaggtgcagttctacggcctgagcgagaacgacgagtggacccaggacagagccaagcccgtgacccagatcgtgtctgccgaagcctggggcagagccgattgcggctttaccagcgagagctaccagcagggcgtgctgagcgccaccatcctgtacgagatcctgctgggcaaggccaccctgtacgccgtgctggtgtctgccctggtgctgatggctatggtcaagcggaaggacagccggggaagggccaagcgatctggatctggagcaacaaacttctcactactcaaacaagcaggtgacgtggaggagaatcccgggcctactagtatggactggatttggcgcatccttttccttgtcggcgctgctaccggcgcgcattccttcgaagaggtgcagctggttgaatctggcggaggactggttcagcctggcggatctctgagactgtcttgtgccgccagcggcttcacctttagcacatacggaatggcctgggtccgacagacccctgatagaaggctggaactggtggctaccatcaacagcaacggcggcaagacctaccatcctgacagcgtgaagggcagattcaccatcagccgggacaacagcaagaacaccctgtacctccagatgaacagcctgagagccgaggacaccgccgtgtactactgcaccagagaaggactggactactggggccagggcacactggttacagtttctagcacgcgtatccagaaccctgatcctgccgtgtaccagctgcgggatagcaagagcagcgacaagagcgtgtgtctgttcaccgacttcgacagccagaccaacgtgtcccagagcaaggactccgacgtgtacatcaccgataagtgcgtgctggacatgcggagcatggacttcaagagcaactccgccgtggcctggtccaacaagtccgatttcgcctgcgccaacgccttcaacaacagcattatccccgaggacacattcttcccaagccccgagagcagctgcgacgtgaagctggtggaaaagagcttcgagacagacaccaacctgaacttccagaacctgagcgtgatcggcttcagaatcctgctgctgaaagtggccggctttaacctgctgatgaccctgcggctgtggtccagccgcgccaagagaagcggatctggcgtgaagcagaccctgaatttcgacctgctgaagctggctggcgacgtggaatccaacccaggcccttctagaggcgggatccacaccatggctacctacgaggtgctgtgcgaggtggcaagaaagctgggcaccgacgacagagaagtggtgctgttcctgctgaacgtgttcatccctcagcctacactggcccagctgatcggtgcactgagagccctgaaagaggaaggccggctgacctttcctctgctggccgaatgcctgttcagagccggaagaagggatctgctgcgggacctgctgcatctggaccccagatttctggaaagacacctggccggcaccatgagctacttcagcccttaccagctgaccgtgctgcacgttgacggcgaactgtgcgccagagatattcggagcctgatcttcctgagcaaggacaccatcggcagccggtctacccctcagacatttctgcactgggtgtactgcatggaaaacctggacctgctcggccccacagatgtggatgccctgatgtccatgctgagaagcctgagcagagtggacctccagagacaggtgcagacactgatgggactgcacctgagcggacctagccacagccagcactacagacacacccct

SEQ ID NO: 3368 - DNA, 1854 bp, synthetic construct
  source 1..1854: mol_type = other DNA
atggccttaccagtgaccgccttgctcctgccgctggccttgctgctccacgccgccaggccggatattcagatgacacagagccccagcagcctgtctgcctctgtgggagacagagtgaccatcacctgtcgggcctctcagaatgtgggaacagccgtggcttggtttcagcagaagcctggcaaggcccctaagatcctgatctacagcgccagcaacagatacaccggcgtgccaagtagaagcacaggctctggcagcggcaccgatttcaccctgacaatatccagcctccagcctgaggacttcgccacctactactgccagcagtacagcacataccctctgaccttcggccaggggaccaagctggaaatcaagctcgagatccagaaccctgatcctgccgtgtaccagctgcgggatagcaagagcagcgacaagagcgtgtgtctgttcaccgacttcgacagccagaccaacgtgtcccagagcaaggactccgacgtgtacatcaccgataagtgcgtgctggacatgcggagcatggacttcaagagcaactccgccgtggcctggtccaacaagtccgatttcgcctgcgccaacgccttcaacaacagcattatccccgaggacacattcttcccaagccccgagagcagctgcgacgtgaagctggtggaaaagagcttcgagacagacaccaacctgaacttccagaacctgagcgtgatcggcttcagaatcctgctgctgaaagtggccggctttaacctgctgatgaccctgcggctgtggtccagccgcgccaagagaagcggatctggcgtgaagcagaccctgaatttcgacctgctgaagctggctggcgacgtggaatccaacccaggccctactagtatggactggatttggcgcatccttttccttgtcggcgctgctaccggcgcgcattccttcgaagaggtgcagctggttgaatctggcggaggactggttcagcctggcggatctctgagactgtcttgtgccgccagcggcttcacctttagcacatacggaatggcctgggtccgacagacccctgatagaaggctggaactggtggctaccatcaacagcaacggcggcaagacctaccatcctgacagcgtgaagggcagattcaccatcagccgggacaacagcaagaacaccctgtacctccagatgaacagcctgagagccgaggacaccgccgtgtactactgcaccagagaaggactggactactggggccagggcacactggttacagtttctagcacgcgtgaggacctgaagaacgtgttcccacctgaggtggccgtgttcgagcctagcgaggccgagatcagccacacccagaaagccaccctcgtgtgcctggctaccggcttctaccccgaccatgtggaactgtcttggtgggtcaacggcaaagaggtgcacagcggcgtgtgtaccgacccccagccactgaaagaacagcccgccctgaacgacagccggtactgcctgagcagcagactgagagtgtccgccaccttctggcagaacccccggaaccacttcagatgccaggtgcagttctacggcctgagcgagaacgacgagtggacccaggacagagccaagcccgtgacccagatcgtgtctgccgaagcctggggcagagccgattgcggctttaccagcgagagctaccagcagggcgtgctgagcgccaccatcctgtacgagatcctgctgggcaaggccaccctgtacgccgtgctggtgtctgccctggtgctgatggctatggtcaagcggaaggacagccgggga

SEQ ID NO: 3369 - DNA, 2520 bp, synthetic construct
  source 1..2520: mol_type = other DNA
atggccttaccagtgaccgccttgctcctgccgctggccttgctgctccacgccgccaggccggatattcagatgacacagagccccagcagcctgtctgcctctgtgggagacagagtgaccatcacctgtcgggcctctcagaatgtgggaacagccgtggcttggtttcagcagaagcctggcaaggcccctaagatcctgatctacagcgccagcaacagatacaccggcgtgccaagtagaagcacaggctctggcagcggcaccgatttcaccctgacaatatccagcctccagcctgaggacttcgccacctactactgccagcagtacagcacataccctctgaccttcggccaggggaccaagctggaaatcaagctcgagatccagaaccctgatcctgccgtgtaccagctgcgggatagcaagagcagcgacaagagcgtgtgtctgttcaccgacttcgacagccagaccaacgtgtcccagagcaaggactccgacgtgtacatcaccgataagtgcgtgctggacatgcggagcatggacttcaagagcaactccgccgtggcctggtccaacaagtccgatttcgcctgcgccaacgccttcaacaacagcattatccccgaggacacattcttcccaagccccgagagcagctgcgacgtgaagctggtggaaaagagcttcgagacagacaccaacctgaacttccagaacctgagcgtgatcggcttcagaatcctgctgctgaaagtggccggctttaacctgctgatgaccctgcggctgtggtccagccgcgccaagagaagcggatctggcgtgaagcagaccctgaatttcgacctgctgaagctggctggcgacgtggaatccaacccaggccctactagtatggactggatttggcgcatccttttccttgtcggcgctgctaccggcgcgcattccttcgaagaggtgcagctggttgaatctggcggaggactggttcagcctggcggatctctgagactgtcttgtgccgccagcggcttcacctttagcacatacggaatggcctgggtccgacagacccctgatagaaggctggaactggtggctaccatcaacagcaacggcggcaagacctaccatcctgacagcgtgaagggcagattcaccatcagccgggacaacagcaagaacaccctgtacctccagatgaacagcctgagagccgaggacaccgccgtgtactactgcaccagagaaggactggactactggggccagggcacactggttacagtttctagcacgcgtgaggacctgaagaacgtgttcccacctgaggtggccgtgttcgagcctagcgaggccgagatcagccacacccagaaagccaccctcgtgtgcctggctaccggcttctaccccgaccatgtggaactgtcttggtgggtcaacggcaaagaggtgcacagcggcgtgtgtaccgacccccagccactgaaagaacagcccgccctgaacgacagccggtactgcctgagcagcagactgagagtgtccgccaccttctggcagaacccccggaaccacttcagatgccaggtgcagttctacggcctgagcgagaacgacgagtggacccaggacagagccaagcccgtgacccagatcgtgtctgccgaagcctggggcagagccgattgcggctttaccagcgagagctaccagcagggcgtgctgagcgccaccatcctgtacgagatcctgctgggcaaggccaccctgtacgccgtgctggtgtctgccctggtgctgatggctatggtcaagcggaaggacagccggggaagggccaagcgatctggatctggagcaacaaacttctcactactcaaacaagcaggtgacgtggaggagaatcccgggccttctagaggcgggatccacaccatggctacctacgaggtgctgtgcgaggtggcaagaaagctgggcaccgacgacagagaagtggtgctgttcctgctgaacgtgttcatccctcagcctacactggcccagctgatcggtgcactgagagccctgaaagaggaaggccggctgacctttcctctgctggccgaatgcctgttcagagccggaagaagggatctgctgcgggacctgctgcatctggaccccagatttctggaaagacacctggccggcaccatgagctacttcagcccttaccagctgaccgtgctgcacgttgacggcgaactgtgcgccagagatattcggagcctgatcttcctgagcaaggacaccatcggcagccggtctacccctcagacatttctgcactgggtgtactgcatggaaaacctggacctgctcggccccacagatgtggatgccctgatgtccatgctgagaagcctgagcagagtggacctccagagacaggtgcagacactgatgggactgcacctgagcggacctagccacagccagcactacagacacacccct

SEQ ID NO: 3370 - DNA, 2679 bp, synthetic construct
  source 1..2679: mol_type = other DNA
atggccttaccagtgaccgccttgctcctgccgctggccttgctgctccacgccgccaggccgctcgaggggaaaccaattcccaaccctcttctgggactggattcaaccggcagcggcgaggacctgaagaacgtgttcccacctgaggtggccgtgttcgagcctagcaaggccgagatcgcccacacccagaaagccaccctcgtgtgcctggctaccggcttctaccccgaccatgtggaactgtcttggtgggtcaacggcaaagaggtgcacagcggcgtgtgtaccgacccccagccactgaaagaacagcccgccctgaacgacagccggtactgcctgagcagcagactgagagtgtccgccaccttctggcagaacccccggaaccacttcagatgccaggtgcagttctacggcctgagcgagaacgacgagtggacccaggacagagccaagcccgtgacccagatcgtgtctgccgaagcctggggcagagccgattgcggcatcaccagcgccagctaccaccagggcgtgctgagcgccaccatcctgtacgagatcctgctgggcaaggccaccctgtacgccgtgctggtgtctgccctggtgctgatggctatggtcaagcggaaggacagccggggaagggccaagcgatctggatctggagcaacaaacttctcactactcaaacaagcaggtgacgtggaggagaatcccgggcctactagcatggccttaccagtgaccgccttgctcctgccgctggccttgctgctccacgccgccaggccggatattcagatgacacagagccccagcagcctgtctgcctctgtgggagacagagtgaccatcacctgtcgggcctctcagaatgtgggaacagccgtggcttggtttcagcagaagcctggcaaggcccctaagatcctgatctacagcgccagcaacagatacaccggcgtgccaagtagaagcacaggctctggcagcggcaccgatttcaccctgacaatatccagcctccagcctgaggacttcgccacctactactgccagcagtacagcacataccctctgaccttcggccaggggaccaagctggaaatcaagggcggaggcggaagtggaggcggaggatctggcggcggaggctctgaggtgcagctggttgaatctggcggaggactggttcagcctggcggatctctgagactgtcttgtgccgccagcggcttcacctttagcacatacggaatggcctgggtccgacagacccctgatagaaggctggaactggtggctaccatcaacagcaacggcggcaagacctaccatcctgacagcgtgaagggcagattcaccatcagccgggacaacagcaagaacaccctgtacctccagatgaacagcctgagagccgaggacaccgccgtgtactactgcaccagagaaggactggactactggggccagggcacactggttacagtttctagcacgcgtgagcagaaactgatctcggaagaggatgggagcggcatccagaaccctgatcctgccgtgtaccagctgcgggatagcaagagcagcgacaagagcgtgtgtctgttcaccgacttcgacagccagaccaacgtgtcccagagcaaggactccgacgtgtacatcaccgataagtgcgtgctggacatgcggagcatggacttcaagagcaactccgccgtggcctggtccaacaagtccgatttcgcctgcgccaacgccttcaacaacagcattatccccgaggacacattcttcccaagcagcgacgtgccctgcgacgtgaagctggtggaaaagagcttcgagacagacaccaacctgaacttccagaacctgagcgtgatcggcttcagaatcctgctgctgaaagtggccggctttaacctgctgatgaccctgcggctgtggtccagccgcgccaagagaagcggatctggcgtgaagcagaccctgaatttcgacctgctgaagctggctggcgacgtggaatccaacccaggcccttctagaggccatatgaccgagtacaagcccacggtgcgcctcgccacccgcgacgacgtccccagggccgtacgcaccctcgccgccgcgttcgccgactaccccgccacgcgccacaccgtcgatccggaccgccacatcgagcgggtcaccgagctgcaagaactcttcctcacgcgcgtcgggctcgacatcggcaaggtgtgggtcgcggacgacggcgccgcggtggcggtctggaccacgccggagagcgtcgaagcgggggcggtgttcgccgagatcggcccgcgcatggccgagttgagcggttcccggctggccgcgcagcaacagatggaaggcctcctggcgccgcaccggcccaaggagcccgcgtggttcctggccaccgtcggcgtctcgcccgaccaccagggcaagggtctgggcagcgccgtcgtgctccccggagtggaggcggccgagcgcgccggggtgcccgccttcctggagacctccgcgccccgcaacctccccttctacgagcggctcggcttcaccgtcaccgccgacgtcgaggtgcccgaaggaccgcgcacctggtgcatgacccgcaagcccggtgcctga

SEQ ID NO: 3371 - DNA, 2682 bp, synthetic construct
  source 1..2682: mol_type = other DNA
atggccttaccagtgaccgccttgctcctgccgctggccttgctgctccacgccgccaggccgctcgagcagaaactgatctcggaagaggatctgggctccggcgatcgccctgatcctgccgtgtaccagctgcgggatagcaagagcagcgacaagagcgtgtgtctgttcaccgacttcgacagccagaccaacgtgtcccagagcaaggactccgacgtgtacatcaccgataagtgcgtgctggacatgcggagcatggacttcaagagcaactccgccgtggcctggtccaacaagtccgatttcgcctgcgccaacgccttcaacaacagcattatccccgaggacacattcttcccaagccccgagagcagctgcgacgtgaagctggtggaaaagagcttcgagacagacaccaacctgaacttccagaacctgagcgtgatcggcttcagaatcctgctgctgaaagtggccggctttaacctgctgatgaccctgcggctgtggtccagctctagtcgcgccaagagaagcggatctggcgtgaagcagaccctgaatttcgacctgctgaagctggctggcgacgtggaatccaacccaggccccactagcatggccttaccagtgaccgccttgctcctgccgctggccttgctgctccacgccgccaggccggatattcagatgacacagagccccagcagcctgtctgcctctgtgggagacagagtgaccatcacctgtcgggcctctcagaatgtgggaacagccgtggcttggtttcagcagaagcctggcaaggcccctaagatcctgatctacagcgccagcaacagatacaccggcgtgccaagtagaagcacaggctctggcagcggcaccgatttcaccctgacaatatccagcctccagcctgaggacttcgccacctactactgccagcagtacagcacataccctctgaccttcggccaggggaccaagctggaaatcaagggcggaggcggaagtggaggcggaggatctggcggcggaggctctgaggtgcagctggttgaatctggcggaggactggttcagcctggcggatctctgagactgtcttgtgccgccagcggcttcacctttagcacatacggaatggcctgggtccgacagacccctgatagaaggctggaactggtggctaccatcaacagcaacggcggcaagacctaccatcctgacagcgtgaagggcagattcaccatcagccgggacaacagcaagaacaccctgtacctccagatgaacagcctgagagccgaggacaccgccgtgtactactgcaccagagaaggactggactactggggccagggcacactggttacagtttctagcacgcgtgggaaaccaattcccaaccctcttctgggactggattcaaccggcagcggcgaggacctgaagaacgtgttcccacctgaggtggccgtgttcgagcctagcgaggccgagatcagccacacccagaaagccaccctcgtgtgcctggctaccggcttctaccccgaccatgtggaactgtcttggtgggtcaacggcaaagaggtgcacagcggcgtgtgtaccgacccccagccactgaaagaacagcccgccctgaacgacagccggtactgcctgagcagcagactgagagtgtccgccaccttctggcagaacccccggaaccacttcagatgccaggtgcagttctacggcctgagcgagaacgacgagtggacccaggacagagccaagcccgtgacccagatcgtgtctgccgaagcctggggcagagccgattgcggctttaccagcgagagctaccagcagggcgtgctgagcgccaccatcctgtacgagatcctgctgggcaaggccaccctgtacgccgtgctggtgtctgccctggtgctgatggctatggtcaagcggaaggacagccggggaagggccaagcgatctggatctggagcaacaaacttctcactactcaaacaagcaggtgacgtggaggagaatcccgggccttctagaggccatatgaccgagtacaagcccacggtgcgcctcgccacccgcgacgacgtccccagggccgtacgcaccctcgccgccgcgttcgccgactaccccgccacgcgccacaccgtcgatccggaccgccacatcgagcgggtcaccgagctgcaagaactcttcctcacgcgcgtcgggctcgacatcggcaaggtgtgggtcgcggacgacggcgccgcggtggcggtctggaccacgccggagagcgtcgaagcgggggcggtgttcgccgagatcggcccgcgcatggccgagttgagcggttcccggctggccgcgcagcaacagatggaaggcctcctggcgccgcaccggcccaaggagcccgcgtggttcctggccaccgtcggcgtctcgcccgaccaccagggcaagggtctgggcagcgccgtcgtgctccccggagtggaggcggccgagcgcgccggggtgcccgccttcctggagacctccgcgccccgcaacctccccttctacgagcggctcggcttcaccgtcaccgccgacgtcgaggtgcccgaaggaccgcgcacctggtgcatgacccgcaagcccggtgcctga

SEQ ID NO: 3372 - DNA, 2544 bp, synthetic construct
  source 1..2544: mol_type = other DNA
atggccttaccagtgaccgccttgctcctgccgctggccttgctgctccacgccgccaggccggatattcagatgacacagagccccagcagcctgtctgcctctgtgggagacagagtgaccatcacctgtcgggcctctcagaatgtgggaacagccgtggcttggtttcagcagaagcctggcaaggcccctaagatcctgatctacagcgccagcaacagatacaccggcgtgccaagtagaagcacaggctctggcagcggcaccgatttcaccctgacaatatccagcctccagcctgaggacttcgccacctactactgccagcagtacagcacataccctctgaccttcggccaggggaccaagctggaaatcaagctcgaggacctgaagaacgtgttcccacctgaggtggccgtgttcgagcctagcgaggccgagatcagccacacccagaaagccaccctcgtgtgcctggctaccggcttctaccccgaccatgtggaactgtcttggtgggtcaacggcaaagaggtgcacagcggcgtgtctaccgacccccagccactgaaagaacagcccgccctgaacgacagccggtactgcctgagcagcagactgagagtgtccgccaccttctggcagaacccccggaaccacttcagatgccaggtgcagttctacggcctgagcgagaacgacgagtggacccaggacagagccaagcccgtgacccagatcgtgtctgccgaagcctggggcagagccgattgcggctttaccagcgagagctaccagcagggcgtgctgagcgccaccatcctgtacgagatcctgctgggcaaggccaccctgtacgccgtgctggtgtctgccctggtgctgatggctatggtcaagcggaaggacagccggggaagggccaagcgatctggatctggagcaacaaacttctcactactcaaacaagcaggtgacgtggaggagaatcccgggcctactagtatggactggatttggcgcatccttttccttgtcggcgctgctaccggcgcgcattccttcgaagaggtgcagctggttgaatctggcggaggactggttcagcctggcggatctctgagactgtcttgtgccgccagcggcttcacctttagcacatacggaatggcctgggtccgacagacccctgatagaaggctggaactggtggctaccatcaacagcaacggcggcaagacctaccatcctgacagcgtgaagggcagattcaccatcagccgggacaacagcaagaacaccctgtacctccagatgaacagcctgagagccgaggacaccgccgtgtactactgcaccagagaaggactggactactggggccagggcacactggttacagtttctagcacgcgtatccagaaccctgatcctgccgtgtaccagctgcgggatagcaagagcagcgacaagagcgtgtgtctgttcaccgacttcgacagccagaccaacgtgtcccagagcaaggactccgacgtgtacatcaccgataagaccgtgctggacatgcggagcatggacttcaagagcaactccgccgtggcctggtccaacaagtccgatttcgcctgcgccaacgccttcaacaacagcattatccccgaggacacattcttcccaagccccgagagcagctgcgacgtgaagctggtggaaaagagcttcgagacagacaccaacctgaacttccagaacctgagcgtgatcggcttcagaatcctgctgctgaaagtggccggctttaacctgctgatgaccctgcggctgtggtccagccgcgccaagagaagcggatctggcgtgaagcagaccctgaatttcgacctgctgaagctggctggcgacgtggaatccaacccaggcccttctagaggccatatgaccgagtacaagcccacggtgcgcctcgccacccgcgacgacgtccccagggccgtacgcaccctcgccgccgcgttcgccgactaccccgccacgcgccacaccgtcgatccggaccgccacatcgagcgggtcaccgagctgcaagaactcttcctcacgcgcgtcgggctcgacatcggcaaggtgtgggtcgcggacgacggcgccgcggtggcggtctggaccacgccggagagcgtcgaagcgggggcggtgttcgccgagatcggcccgcgcatggccgagttgagcggttcccggctggccgcgcagcaacagatggaaggcctcctggcgccgcaccggcccaaggagcccgcgtggttcctggccaccgtcggcgtctcgcccgaccaccagggcaagggtctgggcagcgccgtcgtgctccccggagtggaggcggccgagcgcgccggggtgcccgccttcctggagacctccgcgccccgcaacctccccttctacgagcggctcggcttcaccgtcaccgccgacgtcgaggtgcccgaaggaccgcgcacctggtgcatgacccgcaagcccggtgcctga

SEQ ID NO: 3373 - DNA, 2790 bp, synthetic construct
  source 1..2790: mol_type = other DNA
atggccttaccagtgaccgccttgctcctgccgctggccttgctgctccacgccgccaggccggatattcagatgacacagagccccagcagcctgtctgcctctgtgggagacagagtgaccatcacctgtcgggcctctcagaatgtgggaacagccgtggcttggtttcagcagaagcctggcaaggcccctaagatcctgatctacagcgccagcaacagatacaccggcgtgccaagtagaagcacaggctctggcagcggcaccgatttcaccctgacaatatccagcctccagcctgaggacttcgccacctactactgccagcagtacagcacataccctctgaccttcggccaggggaccaagctggaaatcaagctcgaggacctgaagaacgtgttcccacctgaggtggccgtgttcgagcctagcgaggccgagatcagccacacccagaaagccaccctcgtgtgcctggctaccggcttctaccccgaccatgtggaactgtcttggtgggtcaacggcaaagaggtgcacagcggcgtgtctaccgacccccagccactgaaagaacagcccgccctgaacgacagccggtactgcctgagcagcagactgagagtgtccgccaccttctggcagaacccccggaaccacttcagatgccaggtgcagttctacggcctgagcgagaacgacgagtggacccaggacagagccaagcccgtgacccagatcgtgtctgccgaagcctggggcagagccgattgcggctttaccagcgagagctaccagcagggcgtgctgagcgccaccatcctgtacgagatcctgctgggcaaggccaccctgtacgccgtgctggtgtctgccctggtgctgatggctatggtcaagcggaaggacagccggggaagggccaagcgatctggatctggagcaacaaacttctcactactcaaacaagcaggtgacgtggaggagaatcccgggcctactagtatggactggatttggcgcatccttttccttgtcggcgctgctaccggcgcgcattccttcgaagaggtgcagctggttgaatctggcggaggactggttcagcctggcggatctctgagactgtcttgtgccgccagcggcttcacctttagcacatacggaatggcctgggtccgacagacccctgatagaaggctggaactggtggctaccatcaacagcaacggcggcaagacctaccatcctgacagcgtgaagggcagattcaccatcagccgggacaacagcaagaacaccctgtacctccagatgaacagcctgagagccgaggacaccgccgtgtactactgcaccagagaaggactggactactggggccagggcacactggttacagtttctagcacgcgtgagcagaaactgatctcggaagaggatgggagcggcaccccattcccttctctggcccctcccatcatgctgctggtggacggcaagcagcagatggtggtcgtgtgcctggtgctggatgtggccccacctggactggacagccccatctggtttagcgccggcaatggctctgccctggacgcctttacctacggcccaagccctgccaccgatggcacctggacaaatctggcccacctgagcctgcccagcgaggaactggcttcttgggagcctctcgtgtgccacacaggacctggcgctgagggacacagcagatccacccagcctatgcacctgtctggcgaggccagcaccgccagaacctgtcctcaggaacctctgagaggcacccctggcggagcactgtggctgggagtgctgagactgctgctgttcaagctgctgctgtttgacctgctgctgacctgctcctgtctgtgcgatcctgccggccctctgccttctcctgccaccaccacaagactgagagccctgggcagccacagactgcaccctgccacagagacaggcggcagagaggccacaagcagccctagaccccagcccagagacagaagatggggcgataccccccctggcagaaagcctggatctccagtccgcgccaagagaagcggatctggcgtgaagcagaccctgaatttcgacctgctgaagctggctggcgacgtggaatccaacccaggcccttctagaggccatatgaccgagtacaagcccacggtgcgcctcgccacccgcgacgacgtccccagggccgtacgcaccctcgccgccgcgttcgccgactaccccgccacgcgccacaccgtcgatccggaccgccacatcgagcgggtcaccgagctgcaagaactcttcctcacgcgcgtcgggctcgacatcggcaaggtgtgggtcgcggacgacggcgccgcggtggcggtctggaccacgccggagagcgtcgaagcgggggcggtgttcgccgagatcggcccgcgcatggccgagttgagcggttcccggctggccgcgcagcaacagatggaaggcctcctggcgccgcaccggcccaaggagcccgcgtggttcctggccaccgtcggcgtctcgcccgaccaccagggcaagggtctgggcagcgccgtcgtgctccccggagtggaggcggccgagcgcgccggggtgcccgccttcctggagacctccgcgccccgcaacctccccttctacgagcggctcggcttcaccgtcaccgccgacgtcgaggtgcccgaaggaccgcgcacctggtgcatgacccgcaagcccggtgcctga

SEQ ID NO: 3374 - DNA, 2844 bp, synthetic construct
  source 1..2844: mol_type = other DNA
atggccttaccagtgaccgccttgctcctgccgctggccttgctgctccacgccgccaggccgctcgaggacctgaagaacgtgttcccacctgaggtggccgtgttcgagcctagcgaggccgagatcagccacacccagaaagccaccctcgtgtgcctggctaccggcttctaccccgaccatgtggaactgtcttggtgggtcaacggcaaagaggtgcacagcggcgtgtctaccgacccccagccactgaaagaacagcccgccctgaacgacagccggtactgcctgagcagcagactgagagtgtccgccaccttctggcagaacccccggaaccacttcagatgccaggtgcagttctacggcctgagcgagaacgacgagtggacccaggacagagccaagcccgtgacccagatcgtgtctgccgaagcctggggcagagccgattgcggctttaccagcgagagctaccagcagggcgtgctgagcgccaccatcctgtacgagatcctgctgggcaaggccaccctgtacgccgtgctggtgtctgccctggtgctgatggctatggtcaagcggaaggacagccggggaagggccaagcgatctggatctggagcaacaaacttctcactactcaaacaagcaggtgacgtggaggagaatcccgggcctactagcatggccttaccagtgaccgccttgctcctgccgctggccttgctgctccacgccgccaggccggatattcagatgacacagagccccagcagcctgtctgcctctgtgggagacagagtgaccatcacctgtcgggcctctcagaatgtgggaacagccgtggcttggtttcagcagaagcctggcaaggcccctaagatcctgatctacagcgccagcaacagatacaccggcgtgccaagtagaagcacaggctctggcagcggcaccgatttcaccctgacaatatccagcctccagcctgaggacttcgccacctactactgccagcagtacagcacataccctctgaccttcggccaggggaccaagctggaaatcaagggcggaggcggaagtggaggcggaggatctggcggcggaggctctgaggtgcagctggttgaatctggcggaggactggttcagcctggcggatctctgagactgtcttgtgccgccagcggcttcacctttagcacatacggaatggcctgggtccgacagacccctgatagaaggctggaactggtggctaccatcaacagcaacggcggcaagacctaccatcctgacagcgtgaagggcagattcaccatcagccgggacaacagcaagaacaccctgtacctccagatgaacagcctgagagccgaggacaccgccgtgtactactgcaccagagaaggactggactactggggccagggcacactggttacagtttctagcacgcgtgagcagaaactgatctcggaagaggatctggggagcggcaccccattcccttctctggcccctcccatcatgctgctggtggacggcaagcagcagatggtggtcgtgtgcctggtgctggatgtggccccacctggactggacagccccatctggtttagcgccggcaatggctctgccctggacgcctttacctacggcccaagccctgccaccgatggcacctggacaaatctggcccacctgagcctgcccagcgaggaactggcttcttgggagcctctcgtgtgccacacaggacctggcgctgagggacacagcagatccacccagcctatgcacctgtctggcgaggccagcaccgccagaacctgtcctcaggaacctctgagaggcacccctggcggagcactgtggctgggagtgctgagactgctgctgttcaagctgctgctgtttgacctgctgctgacctgctcctgtctgtgcgatcctgccggccctctgccttctcctgccaccaccacaagactgagagccctgggcagccacagactgcaccctgccacagagacaggcggcagagaggccacaagcagccctagaccccagcccagagacagaagatggggcgataccccccctggcagaaagcctggatctccagtccgcgccaagagaagcggatctggcgtgaagcagaccctgaatttcgacctgctgaagctggctggcgacgtggaatccaacccaggcccttctagatctagaggccatatgaccgagtacaagcccacggtgcgcctcgccacccgcgacgacgtccccagggccgtacgcaccctcgccgccgcgttcgccgactaccccgccacgcgccacaccgtcgatccggaccgccacatcgagcgggtcaccgagctgcaagaactcttcctcacgcgcgtcgggctcgacatcggcaaggtgtgggtcgcggacgacggcgccgcggtggcggtctggaccacgccggagagcgtcgaagcgggggcggtgttcgccgagatcggcccgcgcatggccgagttgagcggttcccggctggccgcgcagcaacagatggaaggcctcctggcgccgcaccggcccaaggagcccgcgtggttcctggccaccgtcggcgtctcgcccgaccaccagggcaagggtctgggcagcgccgtcgtgctccccggagtggaggcggccgagcgcgccggggtgcccgccttcctggagacctccgcgccccgcaacctccccttctacgagcggctcggcttcaccgtcaccgccgacgtcgaggtgcccgaaggaccgcgcacctggtgcatgacccgcaagcccggtgcctga

SEQ ID NO: 3375 - DNA, 2655 bp, synthetic construct
  source 1..2655: mol_type = other DNA
atggccttaccagtgaccgccttgctcctgccgctggccttgctgctccacgccgccaggccggatattcagatgacacagagccccagcagcctgtctgcctctgtgggagacagagtgaccatcacctgtcgggcctctcagaatgtgggaacagccgtggcttggtttcagcagaagcctggcaaggcccctaagatcctgatctacagcgccagcaacagatacaccggcgtgccaagtagaagcacaggctctggcagcggcaccgatttcaccctgacaatatccagcctccagcctgaggacttcgccacctactactgccagcagtacagcacataccctctgaccttcggccaggggaccaagctggaaatcaagctcgaggggaaaccaattcccaaccctcttctgggactggattcaaccggcagcggcgacaagcagctggacgccgacgtgtcccccaagcctaccatcttcctgccctctatcgccgagacaaagctccagaaggccggcacctacctgtgcctgctggaaaagttcttcccagatgtgattaagatccactggcaggaaaagaagtccaacaccatcctgggcagccaggaaggcaacaccatgaagaccaacgacacctacatgaagttcagctggctgaccgtgcccgagaagtccctggacaaagaacacagatgcatcgtgcggcacgaaaacaacaagaacggcgtggaccaggaaatcatcttcccacccatcaagaccgatgtgattacaatggaccccaaggacaactgctccaaggacgccaacgataccctgctgctccagctgaccaacaccagcgcctactacatgtacttgttgctgctgctgaagtccgtggtgtacttcgccatcatcacatgctgcctgctgcggagaaccgccttctgctgcaacggcgagaagtctagggccaagcgatctggatctggagcaacaaacttctcactactcaaacaagcaggtgacgtggaggagaatcccgggcctactagtatggactggatttggcgcatccttttccttgtcggcgctgctaccggcgcgcattccttcgaagaggtgcagctggttgaatctggcggaggactggttcagcctggcggatctctgagactgtcttgtgccgccagcggcttcacctttagcacatacggaatggcctgggtccgacagacccctgatagaaggctggaactggtggctaccatcaacagcaacggcggcaagacctaccatcctgacagcgtgaagggcagattcaccatcagccgggacaacagcaagaacaccctgtacctccagatgaacagcctgagagccgaggacaccgccgtgtactactgcaccagagaaggactggactactggggccagggcacactggttacagtttctagcacgcgtgagcagaaactgatctcggaagaggatgggagcggcagccagcctcacaccaagcccagcgtgttcgtgatgaagaacggcaccaacgtggcctgcctcgtgaaagagttctaccccaaggacatcaggatcaacctggtgtccagcaagaagatcaccgagttcgaccccgccatcgtgatctcccccagcggcaagtacaacgccgtgaagctggggaagtacgaggacagcaacagcgtgacctgctccgtgcagcacgacaacaagaccgtgcacagcaccgactttgaagtgaaaaccgactccaccgaccacgtgaagcccaaagagacagagaacaccaagcagcccagcaagagctgccacaagcccaaggccatcgtgcacaccgagaaagtgaacatgatgagcctgaccgtgctgggcctgcggatgctgttcgccaaaaccgtggccgtgaacttcctgctgaccgccaagctgttcttcctccgcgccaagagaagcggatctggcgtgaagcagaccctgaatttcgacctgctgaagctggctggcgacgtggaatccaacccaggcccttctagaggccatatgaccgagtacaagcccacggtgcgcctcgccacccgcgacgacgtccccagggccgtacgcaccctcgccgccgcgttcgccgactaccccgccacgcgccacaccgtcgatccggaccgccacatcgagcgggtcaccgagctgcaagaactcttcctcacgcgcgtcgggctcgacatcggcaaggtgtgggtcgcggacgacggcgccgcggtggcggtctggaccacgccggagagcgtcgaagcgggggcggtgttcgccgagatcggcccgcgcatggccgagttgagcggttcccggctggccgcgcagcaacagatggaaggcctcctggcgccgcaccggcccaaggagcccgcgtggttcctggccaccgtcggcgtctcgcccgaccaccagggcaagggtctgggcagcgccgtcgtgctccccggagtggaggcggccgagcgcgccggggtgcccgccttcctggagacctccgcgccccgcaacctccccttctacgagcggctcggcttcaccgtcaccgccgacgtcgaggtgcccgaaggaccgcgcacctggtgcatgacccgcaagcccggtgcctga

SEQ ID NO: 3376 - DNA, 1866 bp, synthetic construct
  source 1..1866: mol_type = other DNA
atggccttaccagtgaccgccttgctcctgccgctggccttgctgctccacgccgccaggccggatattcagatgacacagagccccagcagcctgtctgcctctgtgggagacagagtgaccatcacctgtcgggcctctcagaatgtgggaacagccgtggcttggtttcagcagaagcctggcaaggcccctaagatcctgatctacagcgccagcaacagatacaccggcgtgccaagtagaagcacaggctctggcagcggcaccgatttcaccctgacaatatccagcctccagcctgaggacttcgccacctactactgccagcagtacagcacataccctctgaccttcggccaggggaccaagctggaaatcaagctcgagagccagcctcacaccaagcccagcgtgttcgtgatgaagaacggcaccaacgtggcctgcctcgtgaaagagttctaccccaaggacatcaggatcaacctggtgtccagcaagaagatcaccgagttcgaccccgccatcgtgatctcccccagcggcaagtacaacgccgtgaagctggggaagtacgaggacagcaacagcgtgacctgctccgtgcagcacgacaacaagaccgtgcacagcaccgactttgaagtgaaaaccgactccaccgaccacgtgaagcccaaagagacagagaacaccaagcagcccagcaagagctgccacaagcccaaggccatcgtgcacaccgagaaagtgaacatgatgagcctgaccgtgctgggcctgcggatgctgttcgccaaaaccgtggccgtgaacttcctgctgaccgccaagctgttcttcctcagggccaagcgatctggatctggagcaacaaacttctcactactcaaacaagcaggtgacgtggaggagaatcccgggcctactagtatggactggatttggcgcatccttttccttgtcggcgctgctaccggcgcgcattccttcgaagaggtgcagctggttgaatctggcggaggactggttcagcctggcggatctctgagactgtcttgtgccgccagcggcttcacctttagcacatacggaatggcctgggtccgacagacccctgatagaaggctggaactggtggctaccatcaacagcaacggcggcaagacctaccatcctgacagcgtgaagggcagattcaccatcagccgggacaacagcaagaacaccctgtacctccagatgaacagcctgagagccgaggacaccgccgtgtactactgcaccagagaaggactggactactggggccagggcacactggttacagtttctagcacgcgtgacaagcagctggacgccgacgtgtcccccaagcctaccatcttcctgccctctatcgccgagacaaagctccagaaggccggcacctacctgtgcctgctggaaaagttcttcccagatgtgattaagatccactggcaggaaaagaagtccaacaccatcctgggcagccaggaaggcaacaccatgaagaccaacgacacctacatgaagttcagctggctgaccgtgcccgagaagtccctggacaaagaacacagatgcatcgtgcggcacgaaaacaacaagaacggcgtggaccaggaaatcatcttcccacccatcaagaccgatgtgattacaatggaccccaaggacaactgctccaaggacgccaacgataccctgctgctccagctgaccaacaccagcgcctactacatgtacttgttgctgctgctgaagtccgtggtgtacttcgccatcatcacatgctgcctgctgcggagaaccgccttctgctgcaacggcgagaagtct

SEQ ID NO: 3377 - DNA, 2700 bp, synthetic construct
  source 1..2700: mol_type = other DNA
atggccttaccagtgaccgccttgctcctgccgctggccttgctgctccacgccgccaggccgctcgaggggaaaccaattcccaaccctcttctgggactggattcaaccggcagcggcgacaagcagctggacgccgacgtgtcccccaagcctaccatcttcctgccctctatcgccgagacaaagctccagaaggccggcacctacctgtgcctgctggaaaagttcttcccagatgtgattaagatccactggcaggaaaagaagtccaacaccatcctgggcagccaggaaggcaacaccatgaagaccaacgacacctacatgaagttcagctggctgaccgtgcccgagaagtccctggacaaagaacacagatgcatcgtgcggcacgaaaacaacaagaacggcgtggaccaggaaatcatcttcccacccatcaagaccgatgtgattacaatggaccccaaggacaactgctccaaggacgccaacgataccctgctgctccagctgaccaacaccagcgcctactacatgtacttgttgctgctgctgaagtccgtggtgtacttcgccatcatcacatgctgcctgctgcggagaaccgccttctgctgcaacggcgagaagtctagggccaagcgatctggatctggagcaacaaacttctcactactcaaacaagcaggtgacgtggaggagaatcccgggcctactagcatggccttaccagtgaccgccttgctcctgccgctggccttgctgctccacgccgccaggccggatattcagatgacacagagccccagcagcctgtctgcctctgtgggagacagagtgaccatcacctgtcgggcctctcagaatgtgggaacagccgtggcttggtttcagcagaagcctggcaaggcccctaagatcctgatctacagcgccagcaacagatacaccggcgtgccaagtagaagcacaggctctggcagcggcaccgatttcaccctgacaatatccagcctccagcctgaggacttcgccacctactactgccagcagtacagcacataccctctgaccttcggccaggggaccaagctggaaatcaagggcggaggcggaagtggaggcggaggatctggcggcggaggctctgaggtgcagctggttgaatctggcggaggactggttcagcctggcggatctctgagactgtcttgtgccgccagcggcttcacctttagcacatacggaatggcctgggtccgacagacccctgatagaaggctggaactggtggctaccatcaacagcaacggcggcaagacctaccatcctgacagcgtgaagggcagattcaccatcagccgggacaacagcaagaacaccctgtacctccagatgaacagcctgagagccgaggacaccgccgtgtactactgcaccagagaaggactggactactggggccagggcacactggttacagtttctagcacgcgtgagcagaaactgatctcggaagaggatgggagcggcagccagcctcacaccaagcccagcgtgttcgtgatgaagaacggcaccaacgtggcctgcctcgtgaaagagttctaccccaaggacatcaggatcaacctggtgtccagcaagaagatcaccgagttcgaccccgccatcgtgatctcccccagcggcaagtacaacgccgtgaagctggggaagtacgaggacagcaacagcgtgacctgctccgtgcagcacgacaacaagaccgtgcacagcaccgactttgaagtgaaaaccgactccaccgaccacgtgaagcccaaagagacagagaacaccaagcagcccagcaagagctgccacaagcccaaggccatcgtgcacaccgagaaagtgaacatgatgagcctgaccgtgctgggcctgcggatgctgttcgccaaaaccgtggccgtgaacttcctgctgaccgccaagctgttcttcctccgcgccaagagaagcggatctggcgtgaagcagaccctgaatttcgacctgctgaagctggctggcgacgtggaatccaacccaggcccttctagaggccatatgaccgagtacaagcccacggtgcgcctcgccacccgcgacgacgtccccagggccgtacgcaccctcgccgccgcgttcgccgactaccccgccacgcgccacaccgtcgatccggaccgccacatcgagcgggtcaccgagctgcaagaactcttcctcacgcgcgtcgggctcgacatcggcaaggtgtgggtcgcggacgacggcgccgcggtggcggtctggaccacgccggagagcgtcgaagcgggggcggtgttcgccgagatcggcccgcgcatggccgagttgagcggttcccggctggccgcgcagcaacagatggaaggcctcctggcgccgcaccggcccaaggagcccgcgtggttcctggccaccgtcggcgtctcgcccgaccaccagggcaagggtctgggcagcgccgtcgtgctccccggagtggaggcggccgagcgcgccggggtgcccgccttcctggagacctccgcgccccgcaacctccccttctacgagcggctcggcttcaccgtcaccgccgacgtcgaggtgcccgaaggaccgcgcacctggtgcatgacccgcaagcccggtgcctga

SEQ ID NO: 3378 - DNA, 3075 bp, synthetic construct
  source 1..3075: mol_type = other DNA
atggccttaccagtgaccgccttgctcctgccgctggccttgctgctccacgccgccaggccggatattcagatgacacagagccccagcagcctgtctgcctctgtgggagacagagtgaccatcacctgtcgggcctctcagaatgtgggaacagccgtggcttggtttcagcagaagcctggcaaggcccctaagatcctgatctacagcgccagcaacagatacaccggcgtgccaagtagaagcacaggctctggcagcggcaccgatttcaccctgacaatatccagcctccagcctgaggacttcgccacctactactgccagcagtacagcacataccctctgaccttcggccaggggaccaagctggaaatcaagggacagcctaaggccaatcctaccgtgacactgttccctccaagcagcgaagaactccaggccaacaaggccacacttgtgtgcctgatctccgacttctaccctggggctgtgacagtggcttggaaggccgatggatctcctgtgaaagccggcgtggaaaccaccaagccatccaagcagagcaacaacaaatacgccgccagctcctacctgagcctgacacctgagcagtggaagtcccacagatcctacagctgccaagtgacccacgaaggcagcaccgtggaaaagacagtggcccctacagagtgcagcggatcccagagcttcggcctgctggaccccaagctgtgctacctgctggatggcatcctgttcatctacggcgtgatcctgaccgccctgttcctgagagtgaagttcagcagaagcgccgacgcccctgcctaccagcagggacagaaccaactgtacaacgagctgaacctgggcagacgggaagagtacgacgtgctggacaagcggagaggcagggaccctgagatgggcggaaagccccagcggagaaagaacccccaggaaggactgtataacgaactccagaaagacaagatggccgaagcctacagcgagatcggcatgaagggcgagcggagaagaggcaagggccacgatggcctgtaccagggcctgagcaccgccaccaaggacacctatgacgccctgcacatgcaggccctgcctccaagaagggccaagcgatctggatctggagcaacaaacttctcactactcaaacaagcaggtgacgtggaggagaatcccgggcctactagtatggactggatttggcgcatccttttccttgtcggcgctgctaccggcgcgcattccttcgaagaggtgcagctggttgaatctggcggaggactggttcagcctggcggatctctgagactgtcttgtgccgccagcggcttcacctttagcacatacggaatggcctgggtccgacagacccctgatagaaggctggaactggtggctaccatcaacagcaacggcggcaagacctaccatcctgacagcgtgaagggcagattcaccatcagccgggacaacagcaagaacaccctgtacctccagatgaacagcctgagagccgaggacaccgccgtgtactactgcaccagagaaggactggactactggggccagggcacactggttacagtttctagcgcctctacaaagggaccctccgtgtttcctctggctcccagcagcaagtctacaagcggaggaacagccgctctgggctgcctggtcaaggattactttcccgagcctgtgaccgtgtcctggaatagcggagcactgacaagcggcgtgcacacctttccagccgtgctgcaaagcagcggcctgtactctctgagcagcgtggtcacagtgcctagctctagcctgggcacccagacctacatctgcaatgtgaaccacaagcctagcaacaccaaggtggacaagagagtggaacccaagagctgtggtacccagagttttgggttgttggaccctaaattgtgctatctgttggacggaatcctgttcatttacggagtgatcctgaccgcattgttcctgcgggttaagttttccagatccgcagacgcacccgcttaccaacaagggcagaaccaactctacaatgaacttaatttggggcggagggaagagtacgacgttctggacaaaaggaggggacgagatcccgagatgggcggaaagcctcagcgaaggaagaatccgcaagaggggctttataacgaactccagaaagataaaatggcagaagcctatagtgagattgggatgaagggagaaaggaggaggggtaaaggtcacgatgggttgtaccaaggattgagcacagccactaaagatacctatgatgcgctccacatgcaggccctgccgccaagacgcgccaagagaagcggatctggcgtgaagcagaccctgaatttcgacctgctgaagctggctggcgacgtggaatccaacccaggcccttctagaggccatatgaccgagtacaagcccacggtgcgcctcgccacccgcgacgacgtccccagggccgtacgcaccctcgccgccgcgttcgccgactaccccgccacgcgccacaccgtcgatccggaccgccacatcgagcgggtcaccgagctgcaagaactcttcctcacgcgcgtcgggctcgacatcggcaaggtgtgggtcgcggacgacggcgccgcggtggcggtctggaccacgccggagagcgtcgaagcgggggcggtgttcgccgagatcggcccgcgcatggccgagttgagcggttcccggctggccgcgcagcaacagatggaaggcctcctggcgccgcaccggcccaaggagcccgcgtggttcctggccaccgtcggcgtctcgcccgaccaccagggcaagggtctgggcagcgccgtcgtgctccccggagtggaggcggccgagcgcgccggggtgcccgccttcctggagacctccgcgccccgcaacctccccttctacgagcggctcggcttcaccgtcaccgccgacgtcgaggtgcccgaaggaccgcgcacctggtgcatgacccgcaagcccggtgcctga

SEQ ID NO: 3379 - DNA, 2430 bp, synthetic construct
  source 1..2430: mol_type = other DNA
atggccttaccagtgaccgccttgctcctgccgctggccttgctgctccacgccgccaggccggatattcagatgacacagagccccagcagcctgtctgcctctgtgggagacagagtgaccatcacctgtcgggcctctcagaatgtgggaacagccgtggcttggtttcagcagaagcctggcaaggcccctaagatcctgatctacagcgccagcaacagatacaccggcgtgccaagtagaagcacaggctctggcagcggcaccgatttcaccctgacaatatccagcctccagcctgaggacttcgccacctactactgccagcagtacagcacataccctctgaccttcggccaggggaccaagctggaaatcaagctcgaggacctgaagaacgtgttcccacctgaggtggccgtgttcgagcctagcgaggccgagatcagccacacccagaaagccaccctcgtgtgcctggctaccggcttctaccccgaccatgtggaactgtcttggtgggtcaacggcaaagaggtgcacagcggcgtgtctaccgacccccagccactgaaagaacagcccgccctgaacgacagccggtactgcctgagcagcagactgagagtgtccgccaccttctggcagaacccccggaaccacttcagatgccaggtgcagttctacggcctgagcgagaacgacgagtggacccaggacagagccaagcccgtgacccagatcgtgtctgccgaagcctggggcagagccgattgcggatcccagagcttcggcctgctggaccccaagctgtgctacctgctggatggcatcctgttcatctacggcgtgatcctgaccgccctgttcctgagagtgaagttcagcagaagcgccgacgcccctgcctaccagcagggacagaaccaactgtacaacgagctgaacctgggcagacgggaagagtacgacgtgctggacaagcggagaggcagggaccctgagatgggcggaaagccccagcggagaaagaacccccaggaaggactgtataacgaactccagaaagacaagatggccgaagcctacagcgagatcggcatgaagggcgagcggagaagaggcaagggccacgatggcctgtaccagggcctgagcaccgccaccaaggacacctatgacgccctgcacatgcaggccctgcctccaagaagggccaagcgatctggatctggagcaacaaacttctcactactcaaacaagcaggtgacgtggaggagaatcccgggcctactagtatggactggatttggcgcatccttttccttgtcggcgctgctaccggcgcgcattccttcgaagaggtgcagctggttgaatctggcggaggactggttcagcctggcggatctctgagactgtcttgtgccgccagcggcttcacctttagcacatacggaatggcctgggtccgacagacccctgatagaaggctggaactggtggctaccatcaacagcaacggcggcaagacctaccatcctgacagcgtgaagggcagattcaccatcagccgggacaacagcaagaacaccctgtacctccagatgaacagcctgagagccgaggacaccgccgtgtactactgcaccagagaaggactggactactggggccagggcacactggttacagtttctagcacgcgtatccagaaccctgatcctgccgtgtaccagctgcgggatagcaagagcagcgacaagagcgtgtgtctgttcaccgacttcgacagccagaccaacgtgtcccagagcaaggactccgacgtgtacatcaccgataagaccgtgctggacatgcggagcatggacttcaagagcaactccgccgtggcctggtccaacaagtccgatttcgcctgcgccaacgccttcaacaacagcattatccccgaggacacattcttcccaagccccgagagcagctgcggtacccagagttttgggttgttggaccctaaattgtgctatctgttggacggaatcctgttcatttacggagtgatcctgaccgcattgttcctgcgggttaagttttccagatccgcagacgcacccgcttaccaacaagggcagaaccaactctacaatgaacttaatttggggcggagggaagagtacgacgttctggacaaaaggaggggacgagatcccgagatgggcggaaagcctcagcgaaggaagaatccgcaagaggggctttataacgaactccagaaagataaaatggcagaagcctatagtgagattgggatgaagggagaaaggaggaggggtaaaggtcacgatgggttgtaccaaggattgagcacagccactaaagatacctatgatgcgctccacatgcaggccctgccgccaaga

SEQ ID NO: 3380 - DNA, 2430 bp, synthetic construct
  source 1..2430: mol_type = other DNA
atggccttaccagtgaccgccttgctcctgccgctggccttgctgctccacgccgccaggccggatattcagatgacacagagccccagcagcctgtctgcctctgtgggagacagagtgaccatcacctgtcgggcctctcagaatgtgggaacagccgtggcttggtttcagcagaagcctggcaaggcccctaagatcctgatctacagcgccagcaacagatacaccggcgtgccaagtagaagcacaggctctggcagcggcaccgatttcaccctgacaatatccagcctccagcctgaggacttcgccacctactactgccagcagtacagcacataccctctgaccttcggccaggggaccaagctggaaatcaagctcgaggacctgaagaacgtgttcccacctgaggtggccgtgttcgagcctagcaaggccgagatcgcccacacccagaaagccaccctcgtgtgcctggctaccggcttctaccccgaccatgtggaactgtcttggtgggtcaacggcaaagaggtgcacagcggcgtgtgtaccgacccccagccactgaaagaacagcccgccctgaacgacagccggtactgcctgagcagcagactgagagtgtccgccaccttctggcagaacccccggaaccacttcagatgccaggtgcagttctacggcctgagcgagaacgacgagtggacccaggacagagccaagcccgtgacccagatcgtgtctgccgaagcctggggcagagccgattgcggatcccagagcttcggcctgctggaccccaagctgtgctacctgctggatggcatcctgttcatctacggcgtgatcctgaccgccctgttcctgagagtgaagttcagcagaagcgccgacgcccctgcctaccagcagggacagaaccaactgtacaacgagctgaacctgggcagacgggaagagtacgacgtgctggacaagcggagaggcagggaccctgagatgggcggaaagccccagcggagaaagaacccccaggaaggactgtataacgaactccagaaagacaagatggccgaagcctacagcgagatcggcatgaagggcgagcggagaagaggcaagggccacgatggcctgtaccagggcctgagcaccgccaccaaggacacctatgacgccctgcacatgcaggccctgcctccaagaagggccaagcgatctggatctggagcaacaaacttctcactactcaaacaagcaggtgacgtggaggagaatcccgggcctactagtatggactggatttggcgcatccttttccttgtcggcgctgctaccggcgcgcattccttcgaagaggtgcagctggttgaatctggcggaggactggttcagcctggcggatctctgagactgtcttgtgccgccagcggcttcacctttagcacatacggaatggcctgggtccgacagacccctgatagaaggctggaactggtggctaccatcaacagcaacggcggcaagacctaccatcctgacagcgtgaagggcagattcaccatcagccgggacaacagcaagaacaccctgtacctccagatgaacagcctgagagccgaggacaccgccgtgtactactgcaccagagaaggactggactactggggccagggcacactggttacagtttctagcacgcgtatccagaaccctgatcctgccgtgtaccagctgcgggatagcaagagcagcgacaagagcgtgtgtctgttcaccgacttcgacagccagaccaacgtgtcccagagcaaggactccgacgtgtacatcaccgataagtgcgtgctggacatgcggagcatggacttcaagagcaactccgccgtggcctggtccaacaagtccgatttcgcctgcgccaacgccttcaacaacagcattatccccgaggacacattcttcccaagcagcgacgtgccctgcggtacccagagttttgggttgttggaccctaaattgtgctatctgttggacggaatcctgttcatttacggagtgatcctgaccgcattgttcctgcgggttaagttttccagatccgcagacgcacccgcttaccaacaagggcagaaccaactctacaatgaacttaatttggggcggagggaagagtacgacgttctggacaaaaggaggggacgagatcccgagatgggcggaaagcctcagcgaaggaagaatccgcaagaggggctttataacgaactccagaaagataaaatggcagaagcctatagtgagattgggatgaagggagaaaggaggaggggtaaaggtcacgatgggttgtaccaaggattgagcacagccactaaagatacctatgatgcgctccacatgcaggccctgccgccaaga

SEQ ID NO: 3381 - DNA, 2643 bp, synthetic construct
  source 1..2643: mol_type = other DNA
atggccttaccagtgaccgccttgctcctgccgctggccttgctgctccacgccgccaggccggatattcagatgacacagagccccagcagcctgtctgcctctgtgggagacagagtgaccatcacctgtcgggcctctcagaatgtgggaacagccgtggcttggtttcagcagaagcctggcaaggcccctaagatcctgatctacagcgccagcaacagatacaccggcgtgccaagtagaagcacaggctctggcagcggcaccgatttcaccctgacaatatccagcctccagcctgaggacttcgccacctactactgccagcagtacagcacataccctctgaccttcggccaggggaccaagctggaaatcaagctcgaggggaaaccaattcccaaccctcttctgggactggattcaaccggcagcggcgaggacctgaagaacgtgttcccacctgaggtggccgtgttcgagcctagcgaggccgagatcagccacacccagaaagccaccctcgtgtgcctggctaccggcttctaccccgaccatgtggaactgtcttggtgggtcaacggcaaagaggtgcacagcggcgtgtctaccgacccccagccactgaaagaacagcccgccctgaacgacagccggtactgcctgagcagcagactgagagtgtccgccaccttctggcagaacccccggaaccacttcagatgccaggtgcagttctacggcctgagcgagaacgacgagtggacccaggacagagccaagcccgtgacccagatcgtgtctgccgaagcctggggcagagccgattgcggatcccagagcttcggcctgctggaccccaagctgtgctacctgctggatggcatcctgttcatctacggcgtgatcctgaccgccctgttcctgagagtgaagttcagcagaagcgccgacgcccctgcctaccagcagggacagaaccaactgtacaacgagctgaacctgggcagacgggaagagtacgacgtgctggacaagcggagaggcagggaccctgagatgggcggaaagccccagcggagaaagaacccccaggaaggactgtataacgaactccagaaagacaagatggccgaagcctacagcgagatcggcatgaagggcgagcggagaagaggcaagggccacgatggcctgtaccagggcctgagcaccgccaccaaggacacctatgacgccctgcacatgcaggccctgcctccaagaagggccaagcgatctggatctggagcaacaaacttctcactactcaaacaagcaggtgacgtggaggagaatcccgggcctactagtatggactggatttggcgcatccttttccttgtcggcgctgctaccggcgcgcattccttcgaagaggtgcagctggttgaatctggcggaggactggttcagcctggcggatctctgagactgtcttgtgccgccagcggcttcacctttagcacatacggaatggcctgggtccgacagacccctgatagaaggctggaactggtggctaccatcaacagcaacggcggcaagacctaccatcctgacagcgtgaagggcagattcaccatcagccgggacaacagcaagaacaccctgtacctccagatgaacagcctgagagccgaggacaccgccgtgtactactgcaccagagaaggactggactactggggccagggcacactggttacagtttctagcacgcgtgagcagaaactgatctcggaagaggatgggagcggcatccagaaccctgatcctgccgtgtaccagctgcgggatagcaagagcagcgacaagagcgtgtgtctgttcaccgacttcgacagccagaccaacgtgtcccagagcaaggactccgacgtgtacatcaccgataagaccgtgctggacatgcggagcatggacttcaagagcaactccgccgtggcctggtccaacaagtccgatttcgcctgcgccaacgccttcaacaacagcattatccccgaggacacattcttcccaagccccgagagcagctgcggtacccagagttttgggttgttggaccctaaattgtgctatctgttggacggaatcctgttcatttacggagtgatcctgaccgcattgttcctgaggagcaagcggtcacggctgctccacagcgattacatgaatatgacaccacgaagaccgggtcctactcgcaaacactaccaaccctacgcacctccccgcgactttgcagcgtaccgatctcgggttaagttttccagatccgcagacgcacccgcttaccaacaagggcagaaccaactctacaatgaacttaatttggggcggagggaagagtacgacgttctggacaaaaggaggggacgagatcccgagatgggcggaaagcctcagcgaaggaagaatccgcaagaggggctttataacgaactccagaaagataaaatggcagaagcctatagtgagattgggatgaagggagaaaggaggaggggtaaaggtcacgatgggttgtaccaaggattgagcacagccactaaagatacctatgatgcgctccacatgcaggccctgccgccaaga

SEQ ID NO: 3382 - DNA, 2766 bp, synthetic construct
  source 1..2766: mol_type = other DNA
atggccttaccagtgaccgccttgctcctgccgctggccttgctgctccacgccgccaggccggatattcagatgacacagagccccagcagcctgtctgcctctgtgggagacagagtgaccatcacctgtcgggcctctcagaatgtgggaacagccgtggcttggtttcagcagaagcctggcaaggcccctaagatcctgatctacagcgccagcaacagatacaccggcgtgccaagtagaagcacaggctctggcagcggcaccgatttcaccctgacaatatccagcctccagcctgaggacttcgccacctactactgccagcagtacagcacataccctctgaccttcggccaggggaccaagctggaaatcaagctcgaggggaaaccaattcccaaccctcttctgggactggattcaaccggcagcggcgaggacctgaagaacgtgttcccacctgaggtggccgtgttcgagcctagcgaggccgagatcagccacacccagaaagccaccctcgtgtgcctggctaccggcttctaccccgaccatgtggaactgtcttggtgggtcaacggcaaagaggtgcacagcggcgtgtctaccgacccccagccactgaaagaacagcccgccctgaacgacagccggtactgcctgagcagcagactgagagtgtccgccaccttctggcagaacccccggaaccacttcagatgccaggtgcagttctacggcctgagcgagaacgacgagtggacccaggacagagccaagcccgtgacccagatcgtgtctgccgaagcctggggcagagccgattgcggatcccagagcttcggcctgctggaccccaagctgtgctacctgctggatggcatcctgttcatctacggcgtgatcctgaccgccctgttcctgaggagtaagaggagcaggctcctgcacagtgactacatgaacatgactccacgccgccccggacccacccgcaagcattaccagccctatgccccaccacgcgacttcgcagcctatcgctccagagtgaagttcagcagaagcgccgacgcccctgcctaccagcagggacagaaccaactgtacaacgagctgaacctgggcagacgggaagagtacgacgtgctggacaagcggagaggcagggaccctgagatgggcggaaagccccagcggagaaagaacccccaggaaggactgtataacgaactccagaaagacaagatggccgaagcctacagcgagatcggcatgaagggcgagcggagaagaggcaagggccacgatggcctgtaccagggcctgagcaccgccaccaaggacacctatgacgccctgcacatgcaggccctgcctccaagaagggccaagcgatctggatctggagcaacaaacttctcactactcaaacaagcaggtgacgtggaggagaatcccgggcctactagtatggactggatttggcgcatccttttccttgtcggcgctgctaccggcgcgcattccttcgaagaggtgcagctggttgaatctggcggaggactggttcagcctggcggatctctgagactgtcttgtgccgccagcggcttcacctttagcacatacggaatggcctgggtccgacagacccctgatagaaggctggaactggtggctaccatcaacagcaacggcggcaagacctaccatcctgacagcgtgaagggcagattcaccatcagccgggacaacagcaagaacaccctgtacctccagatgaacagcctgagagccgaggacaccgccgtgtactactgcaccagagaaggactggactactggggccagggcacactggttacagtttctagcacgcgtgagcagaaactgatctcggaagaggatgggagcggcatccagaaccctgatcctgccgtgtaccagctgcgggatagcaagagcagcgacaagagcgtgtgtctgttcaccgacttcgacagccagaccaacgtgtcccagagcaaggactccgacgtgtacatcaccgataagaccgtgctggacatgcggagcatggacttcaagagcaactccgccgtggcctggtccaacaagtccgatttcgcctgcgccaacgccttcaacaacagcattatccccgaggacacattcttcccaagccccgagagcagctgcggtacccagagttttgggttgttggaccctaaattgtgctatctgttggacggaatcctgttcatttacggagtgatcctgaccgcattgttcctgaggagcaagcggtcacggctgctccacagcgattacatgaatatgacaccacgaagaccgggtcctactcgcaaacactaccaaccctacgcacctccccgcgactttgcagcgtaccgatctcgggttaagttttccagatccgcagacgcacccgcttaccaacaagggcagaaccaactctacaatgaacttaatttggggcggagggaagagtacgacgttctggacaaaaggaggggacgagatcccgagatgggcggaaagcctcagcgaaggaagaatccgcaagaggggctttataacgaactccagaaagataaaatggcagaagcctatagtgagattgggatgaagggagaaaggaggaggggtaaaggtcacgatgggttgtaccaaggattgagcacagccactaaagatacctatgatgcgctccacatgcaggccctgccgccaaga

SEQ ID NO: 3383 - DNA, 2649 bp, synthetic construct
  source 1..2649: mol_type = other DNA
atggccttaccagtgaccgccttgctcctgccgctggccttgctgctccacgccgccaggccggatattcagatgacacagagccccagcagcctgtctgcctctgtgggagacagagtgaccatcacctgtcgggcctctcagaatgtgggaacagccgtggcttggtttcagcagaagcctggcaaggcccctaagatcctgatctacagcgccagcaacagatacaccggcgtgccaagtagaagcacaggctctggcagcggcaccgatttcaccctgacaatatccagcctccagcctgaggacttcgccacctactactgccagcagtacagcacataccctctgaccttcggccaggggaccaagctggaaatcaagctcgaggggaaaccaattcccaaccctcttctgggactggattcaaccggcagcggcgaggacctgaagaacgtgttcccacctgaggtggccgtgttcgagcctagcgaggccgagatcagccacacccagaaagccaccctcgtgtgcctggctaccggcttctaccccgaccatgtggaactgtcttggtgggtcaacggcaaagaggtgcacagcggcgtgtctaccgacccccagccactgaaagaacagcccgccctgaacgacagccggtactgcctgagcagcagactgagagtgtccgccaccttctggcagaacccccggaaccacttcagatgccaggtgcagttctacggcctgagcgagaacgacgagtggacccaggacagagccaagcccgtgacccagatcgtgtctgccgaagcctggggcagagccgattgcggatcccagagcttcggcctgctggaccccaagctgtgctacctgctggatggcatcctgttcatctacggcgtgatcctgaccgccctgttcctgagagtgaagttcagcagaagcgccgacgcccctgcctaccagcagggacagaaccaactgtacaacgagctgaacctgggcagacgggaagagtacgacgtgctggacaagcggagaggcagggaccctgagatgggcggaaagccccagcggagaaagaacccccaggaaggactgtataacgaactccagaaagacaagatggccgaagcctacagcgagatcggcatgaagggcgagcggagaagaggcaagggccacgatggcctgtaccagggcctgagcaccgccaccaaggacacctatgacgccctgcacatgcaggccctgcctccaagaagggccaagcgatctggatctggagcaacaaacttctcactactcaaacaagcaggtgacgtggaggagaatcccgggcctactagtatggactggatttggcgcatccttttccttgtcggcgctgctaccggcgcgcattccttcgaagaggtgcagctggttgaatctggcggaggactggttcagcctggcggatctctgagactgtcttgtgccgccagcggcttcacctttagcacatacggaatggcctgggtccgacagacccctgatagaaggctggaactggtggctaccatcaacagcaacggcggcaagacctaccatcctgacagcgtgaagggcagattcaccatcagccgggacaacagcaagaacaccctgtacctccagatgaacagcctgagagccgaggacaccgccgtgtactactgcaccagagaaggactggactactggggccagggcacactggttacagtttctagcacgcgtgagcagaaactgatctcggaagaggatctggggagcggcatccagaaccctgatcctgccgtgtaccagctgcgggatagcaagagcagcgacaagagcgtgtgtctgttcaccgacttcgacagccagaccaacgtgtcccagagcaaggactccgacgtgtacatcaccgataagaccgtgctggacatgcggagcatggacttcaagagcaactccgccgtggcctggtccaacaagtccgatttcgcctgcgccaacgccttcaacaacagcattatccccgaggacacattcttcccaagccccgagagcagctgcggtacccagagttttgggttgttggaccctaaattgtgctatctgttggacggaatcctgttcatttacggagtgatcctgaccgcattgttcctgaagagaggccggaagaagctgctgtacatcttcaagcagcctttcatgcggcccgtgcagaccacccaggaagaggacggctgctcctgccggttccccgaggaagaagaaggcggctgcgagctgcgggttaagttttccagatccgcagacgcacccgcttaccaacaagggcagaaccaactctacaatgaacttaatttggggcggagggaagagtacgacgttctggacaaaaggaggggacgagatcccgagatgggcggaaagcctcagcgaaggaagaatccgcaagaggggctttataacgaactccagaaagataaaatggcagaagcctatagtgagattgggatgaagggagaaaggaggaggggtaaaggtcacgatgggttgtaccaaggattgagcacagccactaaagatacctatgatgcgctccacatgcaggccctgccgccaaga

SEQ ID NO: 3384 - DNA, 2775 bp, synthetic construct
  source 1..2775: mol_type = other DNA
atggccttaccagtgaccgccttgctcctgccgctggccttgctgctccacgccgccaggccggatattcagatgacacagagccccagcagcctgtctgcctctgtgggagacagagtgaccatcacctgtcgggcctctcagaatgtgggaacagccgtggcttggtttcagcagaagcctggcaaggcccctaagatcctgatctacagcgccagcaacagatacaccggcgtgccaagtagaagcacaggctctggcagcggcaccgatttcaccctgacaatatccagcctccagcctgaggacttcgccacctactactgccagcagtacagcacataccctctgaccttcggccaggggaccaagctggaaatcaagctcgaggggaaaccaattcccaaccctcttctgggactggattcaaccggcagcggcgaggacctgaagaacgtgttcccacctgaggtggccgtgttcgagcctagcgaggccgagatcagccacacccagaaagccaccctcgtgtgcctggctaccggcttctaccccgaccatgtggaactgtcttggtgggtcaacggcaaagaggtgcacagcggcgtgtctaccgacccccagccactgaaagaacagcccgccctgaacgacagccggtactgcctgagcagcagactgagagtgtccgccaccttctggcagaacccccggaaccacttcagatgccaggtgcagttctacggcctgagcgagaacgacgagtggacccaggacagagccaagcccgtgacccagatcgtgtctgccgaagcctggggcagagccgattgcggatcccagagcttcggcctgctggaccccaagctgtgctacctgctggatggcatcctgttcatctacggcgtgatcctgaccgccctgttcctgaaacggggcagaaagaaactcctgtatatattcaaacaaccatttatgagaccagtacaaactactcaagaggaagatggctgtagctgccgatttccagaagaagaagaaggaggatgtgaactgagagtgaagttcagcagaagcgccgacgcccctgcctaccagcagggacagaaccaactgtacaacgagctgaacctgggcagacgggaagagtacgacgtgctggacaagcggagaggcagggaccctgagatgggcggaaagccccagcggagaaagaacccccaggaaggactgtataacgaactccagaaagacaagatggccgaagcctacagcgagatcggcatgaagggcgagcggagaagaggcaagggccacgatggcctgtaccagggcctgagcaccgccaccaaggacacctatgacgccctgcacatgcaggccctgcctccaagaagggccaagcgatctggatctggagcaacaaacttctcactactcaaacaagcaggtgacgtggaggagaatcccgggcctactagtatggactggatttggcgcatccttttccttgtcggcgctgctaccggcgcgcattccttcgaagaggtgcagctggttgaatctggcggaggactggttcagcctggcggatctctgagactgtcttgtgccgccagcggcttcacctttagcacatacggaatggcctgggtccgacagacccctgatagaaggctggaactggtggctaccatcaacagcaacggcggcaagacctaccatcctgacagcgtgaagggcagattcaccatcagccgggacaacagcaagaacaccctgtacctccagatgaacagcctgagagccgaggacaccgccgtgtactactgcaccagagaaggactggactactggggccagggcacactggttacagtttctagcacgcgtgagcagaaactgatctcggaagaggatctggggagcggcatccagaaccctgatcctgccgtgtaccagctgcgggatagcaagagcagcgacaagagcgtgtgtctgttcaccgacttcgacagccagaccaacgtgtcccagagcaaggactccgacgtgtacatcaccgataagaccgtgctggacatgcggagcatggacttcaagagcaactccgccgtggcctggtccaacaagtccgatttcgcctgcgccaacgccttcaacaacagcattatccccgaggacacattcttcccaagccccgagagcagctgcggtacccagagttttgggttgttggaccctaaattgtgctatctgttggacggaatcctgttcatttacggagtgatcctgaccgcattgttcctgaagagaggccggaagaagctgctgtacatcttcaagcagcctttcatgcggcccgtgcagaccacccaggaagaggacggctgctcctgccggttccccgaggaagaagaaggcggctgcgagctgcgggttaagttttccagatccgcagacgcacccgcttaccaacaagggcagaaccaactctacaatgaacttaatttggggcggagggaagagtacgacgttctggacaaaaggaggggacgagatcccgagatgggcggaaagcctcagcgaaggaagaatccgcaagaggggctttataacgaactccagaaagataaaatggcagaagcctatagtgagattgggatgaagggagaaaggaggaggggtaaaggtcacgatgggttgtaccaaggattgagcacagccactaaagatacctatgatgcgctccacatgcaggccctgccgccaaga

SEQ ID NO: 3385 - DNA, 2448 bp, synthetic construct
  source 1..2448: mol_type = other DNA
atggccttaccagtgaccgccttgctcctgccgctggccttgctgctccacgccgccaggccggatattcagatgacacagagccccagcagcctgtctgcctctgtgggagacagagtgaccatcacctgtcgggcctctcagaatgtgggaacagccgtggcttggtttcagcagaagcctggcaaggcccctaagatcctgatctacagcgccagcaacagatacaccggcgtgccaagtagaagcacaggctctggcagcggcaccgatttcaccctgacaatatccagcctccagcctgaggacttcgccacctactactgccagcagtacagcacataccctctgaccttcggccaggggaccaagctggaaatcaagctcgagcagagcttcggcctgctggaccccaagctgtgctacctgctggatggcatcctgttcatctacggcgtgatcctgaccgccctgttcctgagagtgaagttcagcagaagcgccgacgcccctgcctaccagcagggacagaaccaactgtacaacgagctgaacctgggcagacgggaagagtacgacgtgctggacaagcggagaggcagggaccctgagatgggcggaaagccccagcggagaaagaacccccaggaaggactgtataacgaactccagaaagacaagatggccgaagcctacagcgagatcggcatgaagggcgagcggagaagaggcaagggccacgatggcctgtaccagggcctgagcaccgccaccaaggacacctatgacgccctgcacatgcaggccctgcctccaagaagggccaagcgatctggatctggagcaacaaacttctcactactcaaacaagcaggtgacgtggaggagaatcccgggcctactagtatggactggatttggcgcatccttttccttgtcggcgctgctaccggcgcgcattccttcgaagaggtgcagctggttgaatctggcggaggactggttcagcctggcggatctctgagactgtcttgtgccgccagcggcttcacctttagcacatacggaatggcctgggtccgacagacccctgatagaaggctggaactggtggctaccatcaacagcaacggcggcaagacctaccatcctgacagcgtgaagggcagattcaccatcagccgggacaacagcaagaacaccctgtacctccagatgaacagcctgagagccgaggacaccgccgtgtactactgcaccagagaaggactggactactggggccagggcacactggttacagtttctagcacgcgtcagagttttgggttgttggaccctaaattgtgctatctgttggacggaatcctgttcatttacggagtgatcctgaccgcattgttcctgcgggttaagttttccagatccgcagacgcacccgcttaccaacaagggcagaaccaactctacaatgaacttaatttggggcggagggaagagtacgacgttctggacaaaaggaggggacgagatcccgagatgggcggaaagcctcagcgaaggaagaatccgcaagaggggctttataacgaactccagaaagataaaatggcagaagcctatagtgagattgggatgaagggagaaaggaggaggggtaaaggtcacgatgggttgtaccaaggattgagcacagccactaaagatacctatgatgcgctccacatgcaggccctgccgccaagacgcgccaagagaagcggatctggcgtgaagcagaccctgaatttcgacctgctgaagctggctggcgacgtggaatccaacccaggcccttctagaggccatatgaccgagtacaagcccacggtgcgcctcgccacccgcgacgacgtccccagggccgtacgcaccctcgccgccgcgttcgccgactaccccgccacgcgccacaccgtcgatccggaccgccacatcgagcgggtcaccgagctgcaagaactcttcctcacgcgcgtcgggctcgacatcggcaaggtgtgggtcgcggacgacggcgccgcggtggcggtctggaccacgccggagagcgtcgaagcgggggcggtgttcgccgagatcggcccgcgcatggccgagttgagcggttcccggctggccgcgcagcaacagatggaaggcctcctggcgccgcaccggcccaaggagcccgcgtggttcctggccaccgtcggcgtctcgcccgaccaccagggcaagggtctgggcagcgccgtcgtgctccccggagtggaggcggccgagcgcgccggggtgcccgccttcctggagacctccgcgccccgcaacctccccttctacgagcggctcggcttcaccgtcaccgccgacgtcgaggtgcccgaaggaccgcgcacctggtgcatgacccgcaagcccggtgcctga

SEQ ID NO: 3386 - DNA, 1920 bp, synthetic construct
  source 1..1920: mol_type = other DNA
atggccttaccagtgaccgccttgctcctgccgctggccttgctgctccacgccgccaggccggatattcagatgacacagagccccagcagcctgtctgcctctgtgggagacagagtgaccatcacctgtcgggcctctcagaatgtgggaacagccgtggcttggtttcagcagaagcctggcaaggcccctaagatcctgatctacagcgccagcaacagatacaccggcgtgccaagtagaagcacaggctctggcagcggcaccgatttcaccctgacaatatccagcctccagcctgaggacttcgccacctactactgccagcagtacagcacataccctctgaccttcggccaggggaccaagctggaaatcaagctcgagggacagcctaaggccaatcctaccgtgacactgttccctccaagcagcgaagaactccaggccaacaaggccacacttgtgtgcctgatctccgacttctaccctggggctgtgacagtggcttggaaggccgatggatctcctgtgaaagccggcgtggaaaccaccaagccatccaagcagagcaacaacaaatacgccgccagctcctacctgagcctgacacctgagcagtggaagtcccacagatcctacagctgccaagtgacccacgaaggcagcaccgtggaaaagacagtggcccctacagagtgcagccccatcaagaccgatgtgattacaatggaccccaaggacaactgctccaaggacgccaacgataccctgctgctccagctgaccaacaccagcgcctactacatgtacttgttgctgctgctgaagtccgtggtgtacttcgccatcatcacatgctgcctgctgcggagaaccgccttctgctgcaacggcgagaagtctagggccaagcgatctggatctggagcaacaaacttctcactactcaaacaagcaggtgacgtggaggagaatcccgggcctactagtatggactggatttggcgcatccttttccttgtcggcgctgctaccggcgcgcattccttcgaagaggtgcagctggttgaatctggcggaggactggttcagcctggcggatctctgagactgtcttgtgccgccagcggcttcacctttagcacatacggaatggcctgggtccgacagacccctgatagaaggctggaactggtggctaccatcaacagcaacggcggcaagacctaccatcctgacagcgtgaagggcagattcaccatcagccgggacaacagcaagaacaccctgtacctccagatgaacagcctgagagccgaggacaccgccgtgtactactgcaccagagaaggactggactactggggccagggcacactggttacagtttctagcacgcgtgcctctacaaagggaccctccgtgtttcctctggctcccagcagcaagtctacaagcggaggaacagccgctctgggctgcctggtcaaggattactttcccgagcctgtgaccgtgtcctggaatagcggagcactgacaagcggcgtgcacacctttccagccgtgctgcaaagcagcggcctgtactctctgagcagcgtggtcacagtgcctagctctagcctgggcacccagacctacatctgcaatgtgaaccacaagcctagcaacaccaaggtggacaagagagtggaacccaagagctgtgaagtgaaaaccgactccaccgaccacgtgaagcccaaagagacagagaacaccaagcagcccagcaagagctgccacaagcccaaggccatcgtgcacaccgagaaagtgaacatgatgagcctgaccgtgctgggcctgcggatgctgttcgccaaaaccgtggccgtgaacttcctgctgaccgccaagctgttcttcctc

SEQ ID NO: 3387 - DNA, 1854 bp, synthetic construct
  source 1..1854: mol_type = other DNA
atggccttaccagtgaccgccttgctcctgccgctggccttgctgctccacgccgccaggccggatattcagatgacacagagccccagcagcctgtctgcctctgtgggagacagagtgaccatcacctgtcgggcctctcagaatgtgggaacagccgtggcttggtttcagcagaagcctggcaaggcccctaagatcctgatctacagcgccagcaacagatacaccggcgtgccaagtagaagcacaggctctggcagcggcaccgatttcaccctgacaatatccagcctccagcctgaggacttcgccacctactactgccagcagtacagcacataccctctgaccttcggccaggggaccaagctggaaatcaagctcgagggacagcctaaggccaatcctaccgtgacactgttccctccaagcagcgaagaactccaggccaacaaggccacacttgtgtgcctgatctccgacttctaccctggggctgtgacagtggcttggaaggccgatggatctcctgtgaaagccggcgtggaaaccaccaagccatccaagcagagcaacaacaaatacgccgccagctcctacctgagcctgacacctgagcagtggaagtcccacagatcctacagctgccaagtgacccacgaaggcagcaccgtggaaaagacagtggcccctacagagtgcagcggcagagccgattgcggcatcaccagcgccagctaccaccagggcgtgctgagcgccaccatcctgtacgagatcctgctgggcaaggccaccctgtacgccgtgctggtgtctgccctggtgctgatggctatggtcaagcggaaggacagccggggaagggccaagcgatctggatctggagcaacaaacttctcactactcaaacaagcaggtgacgtggaggagaatcccgggcctactagtatggactggatttggcgcatccttttccttgtcggcgctgctaccggcgcgcattccttcgaagaggtgcagctggttgaatctggcggaggactggttcagcctggcggatctctgagactgtcttgtgccgccagcggcttcacctttagcacatacggaatggcctgggtccgacagacccctgatagaaggctggaactggtggctaccatcaacagcaacggcggcaagacctaccatcctgacagcgtgaagggcagattcaccatcagccgggacaacagcaagaacaccctgtacctccagatgaacagcctgagagccgaggacaccgccgtgtactactgcaccagagaaggactggactactggggccagggcacactggttacagtttctagcacgcgtgcctctacaaagggaccctccgtgtttcctctggctcccagcagcaagtctacaagcggaggaacagccgctctgggctgcctggtcaaggattactttcccgagcctgtgaccgtgtcctggaatagcggagcactgacaagcggcgtgcacacctttccagccgtgctgcaaagcagcggcctgtactctctgagcagcgtggtcacagtgcctagctctagcctgggcacccagacctacatctgcaatgtgaaccacaagcctagcaacaccaaggtggacaagagagtggaacccaagagctgtatccccgaggacacattcttcccaagcagcgacgtgccctgcgacgtgaagctggtggaaaagagcttcgagacagacaccaacctgaacttccagaacctgagcgtgatcggcttcagaatcctgctgctgaaagtggccggctttaacctgctgatgaccctgcggctgtggtccagc

SEQ ID NO: 3388 - DNA, 1854 bp, synthetic construct
  source 1..1854: mol_type = other DNA
atggccttaccagtgaccgccttgctcctgccgctggccttgctgctccacgccgccaggccggatattcagatgacacagagccccagcagcctgtctgcctctgtgggagacagagtgaccatcacctgtcgggcctctcagaatgtgggaacagccgtggcttggtttcagcagaagcctggcaaggcccctaagatcctgatctacagcgccagcaacagatacaccggcgtgccaagtagaagcacaggctctggcagcggcaccgatttcaccctgacaatatccagcctccagcctgaggacttcgccacctactactgccagcagtacagcacataccctctgaccttcggccaggggaccaagctggaaatcaagctcgagggacagcctaaggccaatcctaccgtgacactgttccctccaagcagcgaagaactccaggccaacaaggccacacttgtgtgcctgatctccgacttctaccctggggctgtgacagtggcttggaaggccgatggatctcctgtgaaagccggcgtggaaaccaccaagccatccaagcagagcaacaacaaatacgccgccagctcctacctgagcctgacacctgagcagtggaagtcccacagatcctacagctgccaagtgacccacgaaggcagcaccgtggaaaagacagtggcccctacagagtgcagcggcagagccgattgcggctttaccagcgagagctaccagcagggcgtgctgagcgccaccatcctgtacgagatcctgctgggcaaggccaccctgtacgccgtgctggtgtctgccctggtgctgatggctatggtcaagcggaaggacagccggggaagggccaagcgatctggatctggagcaacaaacttctcactactcaaacaagcaggtgacgtggaggagaatcccgggcctactagtatggactggatttggcgcatccttttccttgtcggcgctgctaccggcgcgcattccttcgaagaggtgcagctggttgaatctggcggaggactggttcagcctggcggatctctgagactgtcttgtgccgccagcggcttcacctttagcacatacggaatggcctgggtccgacagacccctgatagaaggctggaactggtggctaccatcaacagcaacggcggcaagacctaccatcctgacagcgtgaagggcagattcaccatcagccgggacaacagcaagaacaccctgtacctccagatgaacagcctgagagccgaggacaccgccgtgtactactgcaccagagaaggactggactactggggccagggcacactggttacagtttctagcacgcgtgcctctacaaagggaccctccgtgtttcctctggctcccagcagcaagtctacaagcggaggaacagccgctctgggctgcctggtcaaggattactttcccgagcctgtgaccgtgtcctggaatagcggagcactgacaagcggcgtgcacacctttccagccgtgctgcaaagcagcggcctgtactctctgagcagcgtggtcacagtgcctagctctagcctgggcacccagacctacatctgcaatgtgaaccacaagcctagcaacaccaaggtggacaagagagtggaacccaagagctgtatccccgaggacacattcttcccaagccccgagagcagctgcgacgtgaagctggtggaaaagagcttcgagacagacaccaacctgaacttccagaacctgagcgtgatcggcttcagaatcctgctgctgaaagtggccggctttaacctgctgatgaccctgcggctgtggtccagc

SEQ ID NO: 3389 - DNA, 1332 bp, synthetic construct
  source 1..1332: mol_type = other DNA
atggccttaccagtgaccgccttgctcctgccgctggccttgctgctccacgccgccaggccggatattcagatgacacagagccccagcagcctgtctgcctctgtgggagacagagtgaccatcacctgtcgggcctctcagaatgtgggaacagccgtggcttggtttcagcagaagcctggcaaggcccctaagatcctgatctacagcgccagcaacagatacaccggcgtgccaagtagaagcacaggctctggcagcggcaccgatttcaccctgacaatatccagcctccagcctgaggacttcgccacctactactgccagcagtacagcacataccctctgaccttcggccaggggaccaagctggaaatcaagggcggaggcggaagtggaggcggaggatctggcggcggaggctctgaggtgcagctggttgaatctggcggaggactggttcagcctggcggatctctgagactgtcttgtgccgccagcggcttcacctttagcacatacggaatggcctgggtccgacagacccctgatagaaggctggaactggtggctaccatcaacagcaacggcggcaagacctaccatcctgacagcgtgaagggcagattcaccatcagccgggacaacagcaagaacaccctgtacctccagatgaacagcctgagagccgaggacaccgccgtgtactactgcaccagagaaggactggactactggggccagggcacactggttacagtttctagcacgcgtgacggtaacgaggagatgggaggaatcactcaaaccccttacaaagtctcaatttcaggaacaactgttatccttacatgtccccagtatcctggcagcgagatcctttggcagcataacgacaagaatatagggggagatgaagacgataagaatatcggatctgacgaggatcacttgagcctgaaagagttctccgagcttgaacaaagcggatattatgtgtgctatccgcgcgggtcaaagccggaagacgctaacttttacctttatctccgagccagagtgtgcgaaaattgcatggaaatggacgttatgtccgttgctacaatagttatcgtagatatatgcatcacgggtggactgcttctgctggtttattattggtccaagaatagaaaggccaaagctaaacccgtgaccagaggcgctggcgcaggcggaaggcaaaggggacaaaacaaagaacggccaccaccagtgccaaatccagattatgagcctattcggaaaggacagagggacctgtactctggcctgaatcagagaagaatc

SEQ ID NO: 3390 - DNA, 1227 bp, synthetic construct
  source 1..1227: mol_type = other DNA
atggccttaccagtgaccgccttgctcctgccgctggccttgctgctccacgccgccaggccggatattcagatgacacagagccccagcagcctgtctgcctctgtgggagacagagtgaccatcacctgtcgggcctctcagaatgtgggaacagccgtggcttggtttcagcagaagcctggcaaggcccctaagatcctgatctacagcgccagcaacagatacaccggcgtgccaagtagaagcacaggctctggcagcggcaccgatttcaccctgacaatatccagcctccagcctgaggacttcgccacctactactgccagcagtacagcacataccctctgaccttcggccaggggaccaagctggaaatcaagggcggaggcggaagtggaggcggaggatctggcggcggaggctctgaggtgcagctggttgaatctggcggaggactggttcagcctggcggatctctgagactgtcttgtgccgccagcggcttcacctttagcacatacggaatggcctgggtccgacagacccctgatagaaggctggaactggtggctaccatcaacagcaacggcggcaagacctaccatcctgacagcgtgaagggcagattcaccatcagccgggacaacagcaagaacaccctgtacctccagatgaacagcctgagagccgaggacaccgccgtgtactactgcaccagagaaggactggactactggggccagggcacactggttacagtttctagcacgcgtttcaagatccccatcgaggaactggaagatcgggtgttcgtgaactgcaacacctctatcacctgggtggaaggcaccgtgggaacactgctgagcgacatcaccagactggacctcggcaagcggattctggaccctcggggcatctacagatgcaacggcaccgacatctacaaggacaaagaaagcaccgtgcaggtccactacagaatgtgccagtcctgcgtggaactggaccctgctacagtggccggcatcatcgtgaccgatgtgatcgctactctgctgctggctctgggagtgttctgcttcgccggacacgaaacaggcagactgtctggcgctgccgatacacaggccctgctgagaaacgaccaagtgtatcagcccctgcgcgacagagatgatgcccagtattctcacctcggcggcaactgggctagaaacaag

SEQ ID NO: 3391 - DNA, 1257 bp, synthetic construct
  source 1..1257: mol_type = other DNA
atggccttaccagtgaccgccttgctcctgccgctggccttgctgctccacgccgccaggccggatattcagatgacacagagccccagcagcctgtctgcctctgtgggagacagagtgaccatcacctgtcgggcctctcagaatgtgggaacagccgtggcttggtttcagcagaagcctggcaaggcccctaagatcctgatctacagcgccagcaacagatacaccggcgtgccaagtagaagcacaggctctggcagcggcaccgatttcaccctgacaatatccagcctccagcctgaggacttcgccacctactactgccagcagtacagcacataccctctgaccttcggccaggggaccaagctggaaatcaagggcggaggcggaagtggaggcggaggatctggcggcggaggctctgaggtgcagctggttgaatctggcggaggactggttcagcctggcggatctctgagactgtcttgtgccgccagcggcttcacctttagcacatacggaatggcctgggtccgacagacccctgatagaaggctggaactggtggctaccatcaacagcaacggcggcaagacctaccatcctgacagcgtgaagggcagattcaccatcagccgggacaacagcaagaacaccctgtacctccagatgaacagcctgagagccgaggacaccgccgtgtactactgcaccagagaaggactggactactggggccagggcacactggttacagtttctagcacgcgtcagagcatcaagggcaaccacctggtcaaggtgtacgactaccaagaggacggcagcgtgctgctgacatgtgatgccgaggccaagaacatcacctggtttaaggacggcaagatgatcggcttcctgaccgaggacaagaagaagtggaacctgggcagcaacgctaaggaccccagaggcatgtatcagtgcaagggcagccagaacaagagcaagcccctccaggtgtactaccggatgtgccagaactgcatcgagctgaacgccgctaccatcagcggctttctgttcgccgagatcgtgtccatcttcgtgctggccgtgggcgtgtactttatcgctggacaggatggcgtgcggcagagcagagcttccgataagcaaaccctgctgcctaacgaccagctgtaccagcctctgaaggacagagaggacgaccagtacagccacctccagggcaatcagctgagaagaaac

SEQ ID NO: 3392 - DNA, 1206 bp, synthetic construct
  source 1..1206: mol_type = other DNA
atggccttaccagtgaccgccttgctcctgccgctggccttgctgctccacgccgccaggccggatattcagatgacacagagccccagcagcctgtctgcctctgtgggagacagagtgaccatcacctgtcgggcctctcagaatgtgggaacagccgtggcttggtttcagcagaagcctggcaaggcccctaagatcctgatctacagcgccagcaacagatacaccggcgtgccaagtagaagcacaggctctggcagcggcaccgatttcaccctgacaatatccagcctccagcctgaggacttcgccacctactactgccagcagtacagcacataccctctgaccttcggccaggggaccaagctggaaatcaagggcggaggcggaagtggaggcggaggatctggcggcggaggctctgaggtgcagctggttgaatctggcggaggactggttcagcctggcggatctctgagactgtcttgtgccgccagcggcttcacctttagcacatacggaatggcctgggtccgacagacccctgatagaaggctggaactggtggctaccatcaacagcaacggcggcaagacctaccatcctgacagcgtgaagggcagattcaccatcagccgggacaacagcaagaacaccctgtacctccagatgaacagcctgagagccgaggacaccgccgtgtactactgcaccagagaaggactggactactggggccagggcacactggttacagtttctagcacgcgtcagagttttgggttgttggaccctaaattgtgctatctgttggacggaatcctgttcatttacggagtgatcctgaccgcattgttcctgcgggttaagttttccagatccgcagacgcacccgcttaccaacaagggcagaaccaactctacaatgaacttaatttggggcggagggaagagtacgacgttctggacaaaaggaggggacgagatcccgagatgggcggaaagcctcagcgaaggaagaatccgcaagaggggctttataacgaactccagaaagataaaatggcagaagcctatagtgagattgggatgaagggagaaaggaggaggggtaaaggtcacgatgggttgtaccaaggattgagcacagccactaaagatacctatgatgcgctccacatgcaggccctgccgccaaga

SEQ ID NO: 3393 - DNA, 1332 bp, synthetic construct
  source 1..1332: mol_type = other DNA
atggccttaccagtgaccgccttgctcctgccgctggccttgctgctccacgccgccaggccggaggtgcagctggttgaatctggcggaggactggttcagcctggcggatctctgagactgtcttgtgccgccagcggcttcacctttagcacatacggaatggcctgggtccgacagacccctgatagaaggctggaactggtggctaccatcaacagcaacggcggcaagacctaccatcctgacagcgtgaagggcagattcaccatcagccgggacaacagcaagaacaccctgtacctccagatgaacagcctgagagccgaggacaccgccgtgtactactgcaccagagaaggactggactactggggccagggcacactggttacagtttctagcggcggaggcggaagtggaggcggaggatctggcggcggaggctctgatattcagatgacacagagccccagcagcctgtctgcctctgtgggagacagagtgaccatcacctgtcgggcctctcagaatgtgggaacagccgtggcttggtttcagcagaagcctggcaaggcccctaagatcctgatctacagcgccagcaacagatacaccggcgtgccaagtagaagcacaggctctggcagcggcaccgatttcaccctgacaatatccagcctccagcctgaggacttcgccacctactactgccagcagtacagcacataccctctgaccttcggccaggggaccaagctggaaatcaagacgcgtgacggtaacgaggagatgggaggaatcactcaaaccccttacaaagtctcaatttcaggaacaactgttatccttacatgtccccagtatcctggcagcgagatcctttggcagcataacgacaagaatatagggggagatgaagacgataagaatatcggatctgacgaggatcacttgagcctgaaagagttctccgagcttgaacaaagcggatattatgtgtgctatccgcgcgggtcaaagccggaagacgctaacttttacctttatctccgagccagagtgtgcgaaaattgcatggaaatggacgttatgtccgttgctacaatagttatcgtagatatatgcatcacgggtggactgcttctgctggtttattattggtccaagaatagaaaggccaaagctaaacccgtgaccagaggcgctggcgcaggcggaaggcaaaggggacaaaacaaagaacggccaccaccagtgccaaatccagattatgagcctattcggaaaggacagagggacctgtactctggcctgaatcagagaagaatc

SEQ ID NO: 3394 - DNA, 1227 bp, synthetic construct
  source 1..1227: mol_type = other DNA
atggccttaccagtgaccgccttgctcctgccgctggccttgctgctccacgccgccaggccggaggtgcagctggttgaatctggcggaggactggttcagcctggcggatctctgagactgtcttgtgccgccagcggcttcacctttagcacatacggaatggcctgggtccgacagacccctgatagaaggctggaactggtggctaccatcaacagcaacggcggcaagacctaccatcctgacagcgtgaagggcagattcaccatcagccgggacaacagcaagaacaccctgtacctccagatgaacagcctgagagccgaggacaccgccgtgtactactgcaccagagaaggactggactactggggccagggcacactggttacagtttctagcggcggaggcggaagtggaggcggaggatctggcggcggaggctctgatattcagatgacacagagccccagcagcctgtctgcctctgtgggagacagagtgaccatcacctgtcgggcctctcagaatgtgggaacagccgtggcttggtttcagcagaagcctggcaaggcccctaagatcctgatctacagcgccagcaacagatacaccggcgtgccaagtagaagcacaggctctggcagcggcaccgatttcaccctgacaatatccagcctccagcctgaggacttcgccacctactactgccagcagtacagcacataccctctgaccttcggccaggggaccaagctggaaatcaagacgcgtttcaagatccccatcgaggaactggaagatcgggtgttcgtgaactgcaacacctctatcacctgggtggaaggcaccgtgggaacactgctgagcgacatcaccagactggacctcggcaagcggattctggaccctcggggcatctacagatgcaacggcaccgacatctacaaggacaaagaaagcaccgtgcaggtccactacagaatgtgccagtcctgcgtggaactggaccctgctacagtggccggcatcatcgtgaccgatgtgatcgctactctgctgctggctctgggagtgttctgcttcgccggacacgaaacaggcagactgtctggcgctgccgatacacaggccctgctgagaaacgaccaagtgtatcagcccctgcgcgacagagatgatgcccagtattctcacctcggcggcaactgggctagaaacaag

SEQ ID NO: 3395 - DNA, 1257 bp, synthetic construct
  source 1..1257: mol_type = other DNA
atggccttaccagtgaccgccttgctcctgccgctggccttgctgctccacgccgccaggccggaggtgcagctggttgaatctggcggaggactggttcagcctggcggatctctgagactgtcttgtgccgccagcggcttcacctttagcacatacggaatggcctgggtccgacagacccctgatagaaggctggaactggtggctaccatcaacagcaacggcggcaagacctaccatcctgacagcgtgaagggcagattcaccatcagccgggacaacagcaagaacaccctgtacctccagatgaacagcctgagagccgaggacaccgccgtgtactactgcaccagagaaggactggactactggggccagggcacactggttacagtttctagcggcggaggcggaagtggaggcggaggatctggcggcggaggctctgatattcagatgacacagagccccagcagcctgtctgcctctgtgggagacagagtgaccatcacctgtcgggcctctcagaatgtgggaacagccgtggcttggtttcagcagaagcctggcaaggcccctaagatcctgatctacagcgccagcaacagatacaccggcgtgccaagtagaagcacaggctctggcagcggcaccgatttcaccctgacaatatccagcctccagcctgaggacttcgccacctactactgccagcagtacagcacataccctctgaccttcggccaggggaccaagctggaaatcaagacgcgtcagagcatcaagggcaaccacctggtcaaggtgtacgactaccaagaggacggcagcgtgctgctgacatgtgatgccgaggccaagaacatcacctggtttaaggacggcaagatgatcggcttcctgaccgaggacaagaagaagtggaacctgggcagcaacgctaaggaccccagaggcatgtatcagtgcaagggcagccagaacaagagcaagcccctccaggtgtactaccggatgtgccagaactgcatcgagctgaacgccgctaccatcagcggctttctgttcgccgagatcgtgtccatcttcgtgctggccgtgggcgtgtactttatcgctggacaggatggcgtgcggcagagcagagcttccgataagcaaaccctgctgcctaacgaccagctgtaccagcctctgaaggacagagaggacgaccagtacagccacctccagggcaatcagctgagaagaaac

SEQ ID NO: 3396 - DNA, 1206 bp, synthetic construct
  source 1..1206: mol_type = other DNA
atggccttaccagtgaccgccttgctcctgccgctggccttgctgctccacgccgccaggccggaggtgcagctggttgaatctggcggaggactggttcagcctggcggatctctgagactgtcttgtgccgccagcggcttcacctttagcacatacggaatggcctgggtccgacagacccctgatagaaggctggaactggtggctaccatcaacagcaacggcggcaagacctaccatcctgacagcgtgaagggcagattcaccatcagccgggacaacagcaagaacaccctgtacctccagatgaacagcctgagagccgaggacaccgccgtgtactactgcaccagagaaggactggactactggggccagggcacactggttacagtttctagcggcggaggcggaagtggaggcggaggatctggcggcggaggctctgatattcagatgacacagagccccagcagcctgtctgcctctgtgggagacagagtgaccatcacctgtcgggcctctcagaatgtgggaacagccgtggcttggtttcagcagaagcctggcaaggcccctaagatcctgatctacagcgccagcaacagatacaccggcgtgccaagtagaagcacaggctctggcagcggcaccgatttcaccctgacaatatccagcctccagcctgaggacttcgccacctactactgccagcagtacagcacataccctctgaccttcggccaggggaccaagctggaaatcaagacgcgtcagagttttgggttgttggaccctaaattgtgctatctgttggacggaatcctgttcatttacggagtgatcctgaccgcattgttcctgcgggttaagttttccagatccgcagacgcacccgcttaccaacaagggcagaaccaactctacaatgaacttaatttggggcggagggaagagtacgacgttctggacaaaaggaggggacgagatcccgagatgggcggaaagcctcagcgaaggaagaatccgcaagaggggctttataacgaactccagaaagataaaatggcagaagcctatagtgagattgggatgaagggagaaaggaggaggggtaaaggtcacgatgggttgtaccaaggattgagcacagccactaaagatacctatgatgcgctccacatgcaggccctgccgccaaga

SEQ ID NO: 3397 - DNA, 1491 bp, synthetic construct
  source 1..1491: mol_type = other DNA
atggccttaccagtgaccgccttgctcctgccgctggccttgctgctccacgccgccaggccggatattcagatgacacagagccccagcagcctgtctgcctctgtgggagacagagtgaccatcacctgtcgggcctctcagaatgtgggaacagccgtggcttggtttcagcagaagcctggcaaggcccctaagatcctgatctacagcgccagcaacagatacaccggcgtgccaagtagaagcacaggctctggcagcggcaccgatttcaccctgacaatatccagcctccagcctgaggacttcgccacctactactgccagcagtacagcacataccctctgaccttcggccaggggaccaagctggaaatcaagggcggaggcggaagtggaggcggaggatctggcggcggaggctctgaggtgcagctggttgaatctggcggaggactggttcagcctggcggatctctgagactgtcttgtgccgccagcggcttcacctttagcacatacggaatggcctgggtccgacagacccctgatagaaggctggaactggtggctaccatcaacagcaacggcggcaagacctaccatcctgacagcgtgaagggcagattcaccatcagccgggacaacagcaagaacaccctgtacctccagatgaacagcctgagagccgaggacaccgccgtgtactactgcaccagagaaggactggactactggggccagggcacactggttacagtttctagcacgcgtggaatgaggactgaggatcttcccaaagctgtcgtctttctcgaaccccaatggtatcgggtgctcgaaaaagactctgtgacactgaaatgccaaggggcctactctcccgaggacaactccacacagtggtttcataatgagtccctcatcagctctcaggccagctcttatttcattgatgccgctacagtggacgactccggcgagtatcggtgtcagaccaatctgtctacactgtctgaccccgtgcagcttgaggtccacattggatggttgctcttgcaagccccacgctgggttttcaaagaggaagatccaatccatctgcggtgccacagctggaaaaacaccgctctccacaaagtcacatacctgcaaaatggcaaaggacgcaaatacttccatcacaattccgatttttacattccgaaggctaccctgaaagacagcggcagctatttctgccggggactcgtcggctccaagaatgtgtcctccgaaaccgtgaatatcacgattacccaaggactggctgtgcctacaatctctagcttctttccgcctggataccaagtctccttctgtcttgtgatggtcctcctgtttgctgtggacacaggactgtacttttccgtgaaaacgaacatccgcagctccacacgcgattggaaagatcacaagtttaaatggcgcaaagatccccaggacaag

SEQ ID NO: 3398 - DNA, 2340 bp, synthetic construct
  source 1..2340: mol_type = other DNA
atggccttaccagtgaccgccttgctcctgccgctggccttgctgctccacgccgccaggccggatattcagatgacacagagccccagcagcctgtctgcctctgtgggagacagagtgaccatcacctgtcgggcctctcagaatgtgggaacagccgtggcttggtttcagcagaagcctggcaaggcccctaagatcctgatctacagcgccagcaacagatacaccggcgtgccaagtagaagcacaggctctggcagcggcaccgatttcaccctgacaatatccagcctccagcctgaggacttcgccacctactactgccagcagtacagcacataccctctgaccttcggccaggggaccaagctggaaatcaagggcggaggcggaagtggaggcggaggatctggcggcggaggctctgaggtgcagctggttgaatctggcggaggactggttcagcctggcggatctctgagactgtcttgtgccgccagcggcttcacctttagcacatacggaatggcctgggtccgacagacccctgatagaaggctggaactggtggctaccatcaacagcaacggcggcaagacctaccatcctgacagcgtgaagggcagattcaccatcagccgggacaacagcaagaacaccctgtacctccagatgaacagcctgagagccgaggacaccgccgtgtactactgcaccagagaaggactggactactggggccagggcacactggttacagtttctagcacgcgtggaggctctggacaacaacagaccctgcctaaaccattcatctgggctgaaccccactttatggttccgaaagagaaacaagtcacgatttgttgccaagggaattacggggccgtcgagtatcagctccactttgagggctccctgtttgctgtggatcggcccaagccacctgaaagaatcaacaaagtccaattctatattcctgatatgaactcccgcatggcaggccagtattcatgtatctaccgcgtgggagaactttggagtgaaccctctaacctgctggacctcgtcgtgacagagatgtatgatacacccacactgtctgtgcaccctgggccagaagttatcagcggagaaaaagttaccttttattgccgcctcgataccgctacctctatgttcctcttgctgaaagagggccgcagctctcacgtgcagcgaggctacggaaaggtccaagctgagtttcctctcggccccgtgaccaccgctcacaggggcacatatagatgttttggctcttataacaatcatgcctggtcattcccatccgagcctgtgaaactgctggtcacaggcgatattgagaatacctctctggccccagaagatcctacattccccgccgacacatggggaacatatctgctgacaaccgaaaccgggctgcaaaaggaccatgctctgtgggatcataccgctcagaatctgcttcggatggggcttgcattcctggtcctggtggctcttgtctggtttctggtcgaggactggctgtcccggaagagaaccagagaaagagcttccagggccagcacctgggaaggcagacgcagactgaatactcagaccctgcgcgccaagagaagcggatctggcgtgaagcagaccctgaatttcgacctgctgaagctggctggcgacgtggaatccaacccaggcccttctagaggccatatgaccgagtacaagcccacggtgcgcctcgccacccgcgacgacgtccccagggccgtacgcaccctcgccgccgcgttcgccgactaccccgccacgcgccacaccgtcgatccggaccgccacatcgagcgggtcaccgagctgcaagaactcttcctcacgcgcgtcgggctcgacatcggcaaggtgtgggtcgcggacgacggcgccgcggtggcggtctggaccacgccggagagcgtcgaagcgggggcggtgttcgccgagatcggcccgcgcatggccgagttgagcggttcccggctggccgcgcagcaacagatggaaggcctcctggcgccgcaccggcccaaggagcccgcgtggttcctggccaccgtcggcgtctcgcccgaccaccagggcaagggtctgggcagcgccgtcgtgctccccggagtggaggcggccgagcgcgccggggtgcccgccttcctggagacctccgcgccccgcaacctccccttctacgagcggctcggcttcaccgtcaccgccgacgtcgaggtgcccgaaggaccgcgcacctggtgcatgacccgcaagcccggtgcctga

SEQ ID NO: 3399 - DNA, 1839 bp, synthetic construct
  source 1..1839: mol_type = other DNA
atggccttaccagtgaccgccttgctcctgccgctggccttgctgctccacgccgccaggccggatattcagatgacacagagccccagcagcctgtctgcctctgtgggagacagagtgaccatcacctgtcgggcctctcagaatgtgggaacagccgtggcttggtttcagcagaagcctggcaaggcccctaagatcctgatctacagcgccagcaacagatacaccggcgtgccaagtagaagcacaggctctggcagcggcaccgatttcaccctgacaatatccagcctccagcctgaggacttcgccacctactactgccagcagtacagcacataccctctgaccttcggccaggggaccaagctggaaatcaagggcggaggcggaagtggaggcggaggatctggcggcggaggctctgaggtgcagctggttgaatctggcggaggactggttcagcctggcggatctctgagactgtcttgtgccgccagcggcttcacctttagcacatacggaatggcctgggtccgacagacccctgatagaaggctggaactggtggctaccatcaacagcaacggcggcaagacctaccatcctgacagcgtgaagggcagattcaccatcagccgggacaacagcaagaacaccctgtacctccagatgaacagcctgagagccgaggacaccgccgtgtactactgcaccagagaaggactggactactggggccagggcacactggttacagtttctagcacgcgtaaaattgaagttatgtatcctcctccttacctagacaatgagaagagcaatggaaccattatccatgtgaaaggggcgcgtggcgatattgagaatacctctctggccccagaagatcctacattccccgccgacacatggggaacatatctgctgacaaccgaaaccgggctgcaaaaggaccatgctctgtgggatcataccgctcagaatctgcttcggatggggcttgcattcctggtcctggtggctcttgtctggtttctggtcgaggactggctgtcccggaagagaaccagagaaagagcttccagggccagcacctgggaaggcagacgcagactgaatactcagaccctgcgcgccaagagaagcggatctggcgtgaagcagaccctgaatttcgacctgctgaagctggctggcgacgtggaatccaacccaggcccttctagaggccatatgaccgagtacaagcccacggtgcgcctcgccacccgcgacgacgtccccagggccgtacgcaccctcgccgccgcgttcgccgactaccccgccacgcgccacaccgtcgatccggaccgccacatcgagcgggtcaccgagctgcaagaactcttcctcacgcgcgtcgggctcgacatcggcaaggtgtgggtcgcggacgacggcgccgcggtggcggtctggaccacgccggagagcgtcgaagcgggggcggtgttcgccgagatcggcccgcgcatggccgagttgagcggttcccggctggccgcgcagcaacagatggaaggcctcctggcgccgcaccggcccaaggagcccgcgtggttcctggccaccgtcggcgtctcgcccgaccaccagggcaagggtctgggcagcgccgtcgtgctccccggagtggaggcggccgagcgcgccggggtgcccgccttcctggagacctccgcgccccgcaacctccccttctacgagcggctcggcttcaccgtcaccgccgacgtcgaggtgcccgaaggaccgcgcacctggtgcatgacccgcaagcccggtgcctga

SEQ ID NO: 3400 - DNA, 2100 bp, synthetic construct
  source 1..2100: mol_type = other DNA
atggccttaccagtgaccgccttgctcctgccgctggccttgctgctccacgccgccaggccggatattcagatgacacagagccccagcagcctgtctgcctctgtgggagacagagtgaccatcacctgtcgggcctctcagaatgtgggaacagccgtggcttggtttcagcagaagcctggcaaggcccctaagatcctgatctacagcgccagcaacagatacaccggcgtgccaagtagaagcacaggctctggcagcggcaccgatttcaccctgacaatatccagcctccagcctgaggacttcgccacctactactgccagcagtacagcacataccctctgaccttcggccaggggaccaagctggaaatcaagggcggaggcggaagtggaggcggaggatctggcggcggaggctctgaggtgcagctggttgaatctggcggaggactggttcagcctggcggatctctgagactgtcttgtgccgccagcggcttcacctttagcacatacggaatggcctgggtccgacagacccctgatagaaggctggaactggtggctaccatcaacagcaacggcggcaagacctaccatcctgacagcgtgaagggcagattcaccatcagccgggacaacagcaagaacaccctgtacctccagatgaacagcctgagagccgaggacaccgccgtgtactactgcaccagagaaggactggactactggggccagggcacactggttacagtttctagcacgcgtctgtgggtgtcccagccacctgaaattcggacactggaaggctcctccgcctttctgccctgtagctttaacgccagccaggggagactcgccatcggctctgtgacatggttccgggatgaagtcgtccctggaaaagaagttcgcaacggaacaccagagttcagaggcagactcgccccactggcaagctccagattcctgcatgaccatcaggctgaactgcacattagggacgtgcggggccacgatgcctccatctatgtgtgtcgggtcgaagtgcttggactcggcgtcggaactggaaacggcactaggctggtggtcgagaaagaacatccacagcttggcgctggcaccgtcctgttgcttagagccggattctatgccgtcagcttcctgtccgtggctgtggggtctacagtgtattaccagggaaaatgtctcacctggaaaggccccagacgccagcttccagctgttgttcctgctccactgccaccaccttgtggctcctctgctcacttgcttccaccagtgcctggcggacgcgccaagagaagcggatctggcgtgaagcagaccctgaatttcgacctgctgaagctggctggcgacgtggaatccaacccaggcccttctagaatgtaccggatgcagctgctgagctgtatcgccctgtctctggccctggtcacaaatagcgcccctaccagcagcagcaccaagaaaacccagctgcaactggaacacctcctgctggacctccagatgatcctgaacggcatcaacaactacaagaaccccaagctgaccgagatgctgaccgccaagttctacatgcccaagaaggccaccgagctgaagcacctccagtgcctggaagaggaactgaagcccctggaagaagtgctgaatctggcccagagcaagaacttccacctgaggccaagggacctgatctccaacatcaacgtgatcgtgctggaactgaaaggcagcgagacaaccttcatgtgcgagtacgccgacgagacagctaccatcgtggaatttctgaatcggtggatcaccttctgccagagcatcatcagcaccctgacaaagatcgaagtgatgtaccctcctccttacctggacaacgagaagtccaacggcaccatcatccacgtgaagggcaagcacctgtgtccttctccactgttccccggacctagcaagcctttctgggtgctcgttgttgttggcggcgtgctggcctgttacagcctgctggttaccgtggccttcatcatcttttgggtccgaagcaagcggagctaa

SEQ ID NO: 3401 - DNA, 2028 bp, synthetic construct
  source 1..2028: mol_type = other DNA
atggccttaccagtgaccgccttgctcctgccgctggccttgctgctccacgccgccaggccggatattcagatgacacagagccccagcagcctgtctgcctctgtgggagacagagtgaccatcacctgtcgggcctctcagaatgtgggaacagccgtggcttggtttcagcagaagcctggcaaggcccctaagatcctgatctacagcgccagcaacagatacaccggcgtgccaagtagaagcacaggctctggcagcggcaccgatttcaccctgacaatatccagcctccagcctgaggacttcgccacctactactgccagcagtacagcacataccctctgaccttcggccaggggaccaagctggaaatcaagggcggaggcggaagtggaggcggaggatctggcggcggaggctctgaggtgcagctggttgaatctggcggaggactggttcagcctggcggatctctgagactgtcttgtgccgccagcggcttcacctttagcacatacggaatggcctgggtccgacagacccctgatagaaggctggaactggtggctaccatcaacagcaacggcggcaagacctaccatcctgacagcgtgaagggcagattcaccatcagccgggacaacagcaagaacaccctgtacctccagatgaacagcctgagagccgaggacaccgccgtgtactactgcaccagagaaggactggactactggggccagggcacactggttacagtttctagcacgcgtctgtgggtgtcccagccacctgaaattcggacactggaaggctcctccgcctttctgccctgtagctttaacgccagccaggggagactcgccatcggctctgtgacatggttccgggatgaagtcgtccctggaaaagaagttcgcaacggaacaccagagttcagaggcagactcgccccactggcaagctccagattcctgcatgaccatcaggctgaactgcacattagggacgtgcggggccacgatgcctccatctatgtgtgtcgggtcgaagtgcttggactcggcgtcggaactggaaacggcactaggctggtggtcgagaaagaacatccacagcttggcgctggcaccgtcctgttgcttagagccggattctatgccgtcagcttcctgtccgtggctgtggggtctacagtgtattaccagggaaaatgtctcacctggaaaggccccagacgccagcttccagctgttgttcctgctccactgccaccaccttgtggctcctctgctcacttgcttccaccagtgcctggcggacgcgccaagagaagcggatctggcgtgaagcagaccctgaatttcgacctgctgaagctggctggcgacgtggaatccaacccaggcccttctagaggccatatgaccgagtacaagcccacggtgcgcctcgccacccgcgacgacgtccccagggccgtacgcaccctcgccgccgcgttcgccgactaccccgccacgcgccacaccgtcgatccggaccgccacatcgagcgggtcaccgagctgcaagaactcttcctcacgcgcgtcgggctcgacatcggcaaggtgtgggtcgcggacgacggcgccgcggtggcggtctggaccacgccggagagcgtcgaagcgggggcggtgttcgccgagatcggcccgcgcatggccgagttgagcggttcccggctggccgcgcagcaacagatggaaggcctcctggcgccgcaccggcccaaggagcccgcgtggttcctggccaccgtcggcgtctcgcccgaccaccagggcaagggtctgggcagcgccgtcgtgctccccggagtggaggcggccgagcgcgccggggtgcccgccttcctggagacctccgcgccccgcaacctccccttctacgagcggctcggcttcaccgtcaccgccgacgtcgaggtgcccgaaggaccgcgcacctggtgcatgacccgcaagcccggtgcctga

SEQ ID NO: 3402 - DNA, 1053 bp, synthetic construct
  source 1..1053: mol_type = other DNA
atggccttaccagtgaccgccttgctcctgccgctggccttgctgctccacgccgccaggccggatattcagatgacacagagccccagcagcctgtctgcctctgtgggagacagagtgaccatcacctgtcgggcctctcagaatgtgggaacagccgtggcttggtttcagcagaagcctggcaaggcccctaagatcctgatctacagcgccagcaacagatacaccggcgtgccaagtagaagcacaggctctggcagcggcaccgatttcaccctgacaatatccagcctccagcctgaggacttcgccacctactactgccagcagtacagcacataccctctgaccttcggccaggggaccaagctggaaatcaagggcggaggcggaagtggaggcggaggatctggcggcggaggctctgaggtgcagctggttgaatctggcggaggactggttcagcctggcggatctctgagactgtcttgtgccgccagcggcttcacctttagcacatacggaatggcctgggtccgacagacccctgatagaaggctggaactggtggctaccatcaacagcaacggcggcaagacctaccatcctgacagcgtgaagggcagattcaccatcagccgggacaacagcaagaacaccctgtacctccagatgaacagcctgagagccgaggacaccgccgtgtactactgcaccagagaaggactggactactggggccagggcacactggttacagtttctagcacgcgtaaaattgaagttatgtatcctcctccttacctagacaatgagaagagcaatggaaccattatccatgtgaaaggggcgcgtatcacccagggcctggccgtgtctaccatcagcagctttttcccacccggctaccaggtgtccttctgcctcgtgatggtgctgctgttcgccgtggacaccggcctgtacttcagcgtgaaaacaaacatccggtccagcaccagagactggaaggaccacaagttcaagtggcggaaggacccccaggacaag

SEQ ID NO: 3403 - DNA, 1053 bp, synthetic construct
  source 1..1053: mol_type = other DNA
atggccttaccagtgaccgccttgctcctgccgctggccttgctgctccacgccgccaggccggatattcagatgacacagagccccagcagcctgtctgcctctgtgggagacagagtgaccatcacctgtcgggcctctcagaatgtgggaacagccgtggcttggtttcagcagaagcctggcaaggcccctaagatcctgatctacagcgccagcaacagatacaccggcgtgccaagtagaagcacaggctctggcagcggcaccgatttcaccctgacaatatccagcctccagcctgaggacttcgccacctactactgccagcagtacagcacataccctctgaccttcggccaggggaccaagctggaaatcaagggcggaggcggaagtggaggcggaggatctggcggcggaggctctgaggtgcagctggttgaatctggcggaggactggttcagcctggcggatctctgagactgtcttgtgccgccagcggcttcacctttagcacatacggaatggcctgggtccgacagacccctgatagaaggctggaactggtggctaccatcaacagcaacggcggcaagacctaccatcctgacagcgtgaagggcagattcaccatcagccgggacaacagcaagaacaccctgtacctccagatgaacagcctgagagccgaggacaccgccgtgtactactgcaccagagaaggactggactactggggccagggcacactggttacagtttctagcacgcgtaaaattgaagttatgtatcctcctccttacctagacaatgagaagagcaatggaaccattatccatgtgaaaggggcgcgtattacccaaggactggctgtgcctacaatctctagcttctttccgcctggataccaagtctccttctgtcttgtgatggtcctcctgtttgctgtggacacaggactgtacttttccgtgaaaacgaacatccgcagctccacacgcgattggaaagatcacaagtttaaatggcgcaaagatccccaggacaag

SEQ ID NO: 3404 - DNA, 990 bp, synthetic construct
  source 1..990: mol_type = other DNA
atggccttaccagtgaccgccttgctcctgccgctggccttgctgctccacgccgccaggccggatattcagatgacacagagccccagcagcctgtctgcctctgtgggagacagagtgaccatcacctgtcgggcctctcagaatgtgggaacagccgtggcttggtttcagcagaagcctggcaaggcccctaagatcctgatctacagcgccagcaacagatacaccggcgtgccaagtagaagcacaggctctggcagcggcaccgatttcaccctgacaatatccagcctccagcctgaggacttcgccacctactactgccagcagtacagcacataccctctgaccttcggccaggggaccaagctggaaatcaagggcggaggcggaagtggaggcggaggatctggcggcggaggctctgaggtgcagctggttgaatctggcggaggactggttcagcctggcggatctctgagactgtcttgtgccgccagcggcttcacctttagcacatacggaatggcctgggtccgacagacccctgatagaaggctggaactggtggctaccatcaacagcaacggcggcaagacctaccatcctgacagcgtgaagggcagattcaccatcagccgggacaacagcaagaacaccctgtacctccagatgaacagcctgagagccgaggacaccgccgtgtactactgcaccagagaaggactggactactggggccagggcacactggttacagtttctagcacgcgtaaaattgaagttatgtatcctcctccttacctagacaatgagaagagcaatggaaccattatccatgtgaaaggggcgcgtattacccaaggactggctgtgtctacaatctctagcttctctccgcctggataccaagtctccttctgtcttgtgatggtcctcctgtttgctgtggacacaggactgtacttttccgtgaaaacgaacatc

SEQ ID NO: 3405 - DNA, 1083 bp, synthetic construct
  source 1..1083: mol_type = other DNA
atggccttaccagtgaccgccttgctcctgccgctggccttgctgctccacgccgccaggccggatattcagatgacacagagccccagcagcctgtctgcctctgtgggagacagagtgaccatcacctgtcgggcctctcagaatgtgggaacagccgtggcttggtttcagcagaagcctggcaaggcccctaagatcctgatctacagcgccagcaacagatacaccggcgtgccaagtagaagcacaggctctggcagcggcaccgatttcaccctgacaatatccagcctccagcctgaggacttcgccacctactactgccagcagtacagcacataccctctgaccttcggccaggggaccaagctggaaatcaagggcggaggcggaagtggaggcggaggatctggcggcggaggctctgaggtgcagctggttgaatctggcggaggactggttcagcctggcggatctctgagactgtcttgtgccgccagcggcttcacctttagcacatacggaatggcctgggtccgacagacccctgatagaaggctggaactggtggctaccatcaacagcaacggcggcaagacctaccatcctgacagcgtgaagggcagattcaccatcagccgggacaacagcaagaacaccctgtacctccagatgaacagcctgagagccgaggacaccgccgtgtactactgcaccagagaaggactggactactggggccagggcacactggttacagtttctagcacgcgtaaaattgaagttatgtatcctcctccttacctagacaatgagaagagcaatggaaccattatccatgtgaaaggggcgcgtgtcgagaaagaacatccacagcttggcgctggcaccgtcctgttgcttagagccggattctatgccgtcagcttcctgtccgtggctgtggggtctacagtgtattaccagggaaaatgtctcacctggaaaggccccagacgccagcttccagctgttgttcctgctccactgccaccaccttgtggctcctctgctcacttgcttccaccagtgcctggcgga

SEQ ID NO: 3406 - DNA, 1326 bp, synthetic construct
  source 1..1326: mol_type = other DNA
atggccttaccagtgaccgccttgctcctgccgctggccttgctgctccacgccgccaggccggatattcagatgacacagagccccagcagcctgtctgcctctgtgggagacagagtgaccatcacctgtcgggcctctcagaatgtgggaacagccgtggcttggtttcagcagaagcctggcaaggcccctaagatcctgatctacagcgccagcaacagatacaccggcgtgccaagtagaagcacaggctctggcagcggcaccgatttcaccctgacaatatccagcctccagcctgaggacttcgccacctactactgccagcagtacagcacataccctctgaccttcggccaggggaccaagctggaaatcaagggcggaggcggaagtggaggcggaggatctggcggcggaggctctgaggtgcagctggttgaatctggcggaggactggttcagcctggcggatctctgagactgtcttgtgccgccagcggcttcacctttagcacatacggaatggcctgggtccgacagacccctgatagaaggctggaactggtggctaccatcaacagcaacggcggcaagacctaccatcctgacagcgtgaagggcagattcaccatcagccgggacaacagcaagaacaccctgtacctccagatgaacagcctgagagccgaggacaccgccgtgtactactgcaccagagaaggactggactactggggccagggcacactggttacagtttctagcacgcgtaaaattgaagttatgtatcctcctccttacctagacaatgagaagagcaatggaaccattatccatgtgaaaggggcgcgtaagtctgtgcgcttttacctggtcgtcagccctgccagtgcctccactcagacatcttggaccccaagggaccttgtgtcctctcagacacagacacagtcctgcgtgccaccaactgctggcgcaagacaggctccagagtctcccagcacaatccccgtcccttctcagccccagaactccacacttaggccaggaccagctgctccaatcgcactggtcccagtgttctgcggactgctggttgccaagtctctggtgctgagcgcactcctcgtttggtggggcgatatttggtggaaaacgatgatggaattgagatccctcgatacgcagaaagccacatgccaccttcagcaagtcacagacttgccttggaccagcgtcagctctcccgtggaacgggaaattctgtatcatacagtggcccgcaccaagatttccgacgatgacgacgagcacacactg

SEQ ID NO: 3407 - DNA, 1137 bp, synthetic construct
  source 1..1137: mol_type = other DNA
atggccttaccagtgaccgccttgctcctgccgctggccttgctgctccacgccgccaggccggatattcagatgacacagagccccagcagcctgtctgcctctgtgggagacagagtgaccatcacctgtcgggcctctcagaatgtgggaacagccgtggcttggtttcagcagaagcctggcaaggcccctaagatcctgatctacagcgccagcaacagatacaccggcgtgccaagtagaagcacaggctctggcagcggcaccgatttcaccctgacaatatccagcctccagcctgaggacttcgccacctactactgccagcagtacagcacataccctctgaccttcggccaggggaccaagctggaaatcaagggcggaggcggaagtggaggcggaggatctggcggcggaggctctgaggtgcagctggttgaatctggcggaggactggttcagcctggcggatctctgagactgtcttgtgccgccagcggcttcacctttagcacatacggaatggcctgggtccgacagacccctgatagaaggctggaactggtggctaccatcaacagcaacggcggcaagacctaccatcctgacagcgtgaagggcagattcaccatcagccgggacaacagcaagaacaccctgtacctccagatgaacagcctgagagccgaggacaccgccgtgtactactgcaccagagaaggactggactactggggccagggcacactggttacagtttctagcacgcgtaaaattgaagttatgtatcctcctccttacctagacaatgagaagagcaatggaaccattatccatgtgaaaggggcgcgtggcgatattgagaatacctctctggccccagaagatcctacattccccgccgacacatggggaacatatctgctgacaaccgaaaccgggctgcaaaaggaccatgctctgtgggatcataccgctcagaatctgcttcggatggggcttgcattcctggtcctggtggctcttgtctggtttctggtcgaggactggctgtcccggaagagaaccagagaaagagcttccagggccagcacctgggaaggcagacgcagactgaatactcagaccctg

SEQ ID NO: 3408 - DNA, 2928 bp, synthetic construct
  source 1..2928: mol_type = other DNA
atggccttaccagtgaccgccttgctcctgccgctggccttgctgctccacgccgccaggccggatattcagatgacacagagccccagcagcctgtctgcctctgtgggagacagagtgaccatcacctgtcgggcctctcagaatgtgggaacagccgtggcttggtttcagcagaagcctggcaaggcccctaagatcctgatctacagcgccagcaacagatacaccggcgtgccaagtagaagcacaggctctggcagcggcaccgatttcaccctgacaatatccagcctccagcctgaggacttcgccacctactactgccagcagtacagcacataccctctgaccttcggccaggggaccaagctggaaatcaagctcgagggacagcctaaggccaatcctaccgtgacactgttccctccaagcagcgaagaactccaggccaacaaggccacacttgtgtgcctgatctccgacttctaccctggggctgtgacagtggcttggaaggccgatggatctcctgtgaaagccggcgtggaaaccaccaagccatccaagcagagcaacaacaaatacgccgccagctcctacctgagcctgacacctgagcagtggaagtcccacagatcctacagctgccaagtgacccacgaaggcagcaccgtggaaaagacagtggcccctacagagtgcagcggatcccagagcttcggcctgctggaccccaagctgtgctacctgctggatggcatcctgttcatctacggcgtgatcctgaccgccctgttcctgagagtgaagttcagcagaagcgccgacgcccctgcctaccagcagggacagaaccaactgtacaacgagctgaacctgggcagacgggaagagtacgacgtgctggacaagcggagaggcagggaccctgagatgggcggaaagccccagcggagaaagaacccccaggaaggactgtataacgaactccagaaagacaagatggccgaagcctacagcgagatcggcatgaagggcgagcggagaagaggcaagggccacgatggcctgtaccagggcctgagcaccgccaccaaggacacctatgacgccctgcacatgcaggccctgcctccaagaagggccaagcgatctggatctggagcaacaaacttctcactactcaaacaagcaggtgacgtggaggagaatcccgggcctactagtatggactggatttggcgcatccttttccttgtcggcgctgctaccggcgcgcattccttcgaagaggtgcagctggttgaatctggcggaggactggttcagcctggcggatctctgagactgtcttgtgccgccagcggcttcacctttagcacatacggaatggcctgggtccgacagacccctgatagaaggctggaactggtggctaccatcaacagcaacggcggcaagacctaccatcctgacagcgtgaagggcagattcaccatcagccgggacaacagcaagaacaccctgtacctccagatgaacagcctgagagccgaggacaccgccgtgtactactgcaccagagaaggactggactactggggccagggcacactggttacagtttctagcacgcgtgcctctacaaagggaccctccgtgtttcctctggctcccagcagcaagtctacaagcggaggaacagccgctctgggctgcctggtcaaggattactttcccgagcctgtgaccgtgtcctggaatagcggagcactgacaagcggcgtgcacacctttccagccgtgctgcaaagcagcggcctgtactctctgagcagcgtggtcacagtgcctagctctagcctgggcacccagacctacatctgcaatgtgaaccacaagcctagcaacaccaaggtggacaagagagtggaacccaagagctgtggtaccggcgacatcgagaacaccagtctggcccctgaggaccctacctttcctgccgatacctggggcacctacctgctgaccacagagacaggactccagaaagatcacgccctgtgggaccacacagcccagaacctgctgagaatgggcctcgcctttctggtgctggttgccctcgtgtggttcctggtggaagattggctgagccggaagcggacaagagagagagccagcagagcctctacctgggagggaagaagaaggctgaacacccagacacttagggccaagcgatctggatctggagcaacaaacttctcactactcaaacaagcaggtgacgtggaggagaatcccgggccttctagaggccatatgaccgagtacaagcccacggtgcgcctcgccacccgcgacgacgtccccagggccgtacgcaccctcgccgccgcgttcgccgactaccccgccacgcgccacaccgtcgatccggaccgccacatcgagcgggtcaccgagctgcaagaactcttcctcacgcgcgtcgggctcgacatcggcaaggtgtgggtcgcggacgacggcgccgcggtggcggtctggaccacgccggagagcgtcgaagcgggggcggtgttcgccgagatcggcccgcgcatggccgagttgagcggttcccggctggccgcgcagcaacagatggaaggcctcctggcgccgcaccggcccaaggagcccgcgtggttcctggccaccgtcggcgtctcgcccgaccaccagggcaagggtctgggcagcgccgtcgtgctccccggagtggaggcggccgagcgcgccggggtgcccgccttcctggagacctccgcgccccgcaacctccccttctacgagcggctcggcttcaccgtcaccgccgacgtcgaggtgcccgaaggaccgcgcacctggtgcatgacccgcaagcccggtgcctga

SEQ ID NO: 3409 - DNA, 3126 bp, synthetic construct
  source 1..3126: mol_type = other DNA
atggccttaccagtgaccgccttgctcctgccgctggccttgctgctccacgccgccaggccggatattcagatgacacagagccccagcagcctgtctgcctctgtgggagacagagtgaccatcacctgtcgggcctctcagaatgtgggaacagccgtggcttggtttcagcagaagcctggcaaggcccctaagatcctgatctacagcgccagcaacagatacaccggcgtgccaagtagaagcacaggctctggcagcggcaccgatttcaccctgacaatatccagcctccagcctgaggacttcgccacctactactgccagcagtacagcacataccctctgaccttcggccaggggaccaagctggaaatcaagctcgagggacagcctaaggccaatcctaccgtgacactgttccctccaagcagcgaagaactccaggccaacaaggccacacttgtgtgcctgatctccgacttctaccctggggctgtgacagtggcttggaaggccgatggatctcctgtgaaagccggcgtggaaaccaccaagccatccaagcagagcaacaacaaatacgccgccagctcctacctgagcctgacacctgagcagtggaagtcccacagatcctacagctgccaagtgacccacgaaggcagcaccgtggaaaagacagtggcccctacagagtgcagcggatcccagagcttcggcctgctggaccccaagctgtgctacctgctggatggcatcctgttcatctacggcgtgatcctgaccgccctgttcctgagagtgaagttcagcagaagcgccgacgcccctgcctaccagcagggacagaaccaactgtacaacgagctgaacctgggcagacgggaagagtacgacgtgctggacaagcggagaggcagggaccctgagatgggcggaaagccccagcggagaaagaacccccaggaaggactgtataacgaactccagaaagacaagatggccgaagcctacagcgagatcggcatgaagggcgagcggagaagaggcaagggccacgatggcctgtaccagggcctgagcaccgccaccaaggacacctatgacgccctgcacatgcaggccctgcctccaagaagggccaagcgatctggatctggagcaacaaacttctcactactcaaacaagcaggtgacgtggaggagaatcccgggcctactagtatggactggatttggcgcatccttttccttgtcggcgctgctaccggcgcgcattccttcgaagaggtgcagctggttgaatctggcggaggactggttcagcctggcggatctctgagactgtcttgtgccgccagcggcttcacctttagcacatacggaatggcctgggtccgacagacccctgatagaaggctggaactggtggctaccatcaacagcaacggcggcaagacctaccatcctgacagcgtgaagggcagattcaccatcagccgggacaacagcaagaacaccctgtacctccagatgaacagcctgagagccgaggacaccgccgtgtactactgcaccagagaaggactggactactggggccagggcacactggttacagtttctagcacgcgtgcctctacaaagggaccctccgtgtttcctctggctcccagcagcaagtctacaagcggaggaacagccgctctgggctgcctggtcaaggattactttcccgagcctgtgaccgtgtcctggaatagcggagcactgacaagcggcgtgcacacctttccagccgtgctgcaaagcagcggcctgtactctctgagcagcgtggtcacagtgcctagctctagcctgggcacccagacctacatctgcaatgtgaaccacaagcctagcaacaccaaggtggacaagagagtggaacccaagagctgtggtaccaagtctgtgcgcttttacctggtcgtcagccctgccagtgcctccactcagacatcttggaccccaagggaccttgtgtcctctcagacacagacacagtcctgcgtgccaccaactgctggcgcaagacaggctccagagtctcccagcacaatccccgtcccttctcagccccagaactccacacttaggccaggaccagctgctccaatcgcactggtcccagtgttctgcggactgctggttgccaagtctctggtgctgagcgcactcctcgtttggtggggcgatatttggtggaaaacgatgatggaattgagatccctcgatacgcagaaagccacatgccaccttcagcaagtcacagacttgccttggaccagcgtcagctctcccgtggaacgggaaattctgtatcatacagtggcccgcaccaagatttccgacgatgacgacgagcacacactgcgcgccaagagaagcggatctggcgtgaagcagaccctgaatttcgacctgctgaagctggctggcgacgtggaatccaacccaggcccttctagaggccatatgaccgagtacaagcccacggtgcgcctcgccacccgcgacgacgtccccagggccgtacgcaccctcgccgccgcgttcgccgactaccccgccacgcgccacaccgtcgatccggaccgccacatcgagcgggtcaccgagctgcaagaactcttcctcacgcgcgtcgggctcgacatcggcaaggtgtgggtcgcggacgacggcgccgcggtggcggtctggaccacgccggagagcgtcgaagcgggggcggtgttcgccgagatcggcccgcgcatggccgagttgagcggttcccggctggccgcgcagcaacagatggaaggcctcctggcgccgcaccggcccaaggagcccgcgtggttcctggccaccgtcggcgtctcgcccgaccaccagggcaagggtctgggcagcgccgtcgtgctccccggagtggaggcggccgagcgcgccggggtgcccgccttcctggagacctccgcgccccgcaacctccccttctacgagcggctcggcttcaccgtcaccgccgacgtcgaggtgcccgaaggaccgcgcacctggtgcatgacccgcaagcccggtgcctga

SEQ ID NO: 3410 - DNA, 2886 bp, synthetic construct
  source 1..2886: mol_type = other DNA
atggccttaccagtgaccgccttgctcctgccgctggccttgctgctccacgccgccaggccggatattcagatgacacagagccccagcagcctgtctgcctctgtgggagacagagtgaccatcacctgtcgggcctctcagaatgtgggaacagccgtggcttggtttcagcagaagcctggcaaggcccctaagatcctgatctacagcgccagcaacagatacaccggcgtgccaagtagaagcacaggctctggcagcggcaccgatttcaccctgacaatatccagcctccagcctgaggacttcgccacctactactgccagcagtacagcacataccctctgaccttcggccaggggaccaagctggaaatcaagctcgagggacagcctaaggccaatcctaccgtgacactgttccctccaagcagcgaagaactccaggccaacaaggccacacttgtgtgcctgatctccgacttctaccctggggctgtgacagtggcttggaaggccgatggatctcctgtgaaagccggcgtggaaaccaccaagccatccaagcagagcaacaacaaatacgccgccagctcctacctgagcctgacacctgagcagtggaagtcccacagatcctacagctgccaagtgacccacgaaggcagcaccgtggaaaagacagtggcccctacagagtgcagcggatcccagagcttcggcctgctggaccccaagctgtgctacctgctggatggcatcctgttcatctacggcgtgatcctgaccgccctgttcctgagagtgaagttcagcagaagcgccgacgcccctgcctaccagcagggacagaaccaactgtacaacgagctgaacctgggcagacgggaagagtacgacgtgctggacaagcggagaggcagggaccctgagatgggcggaaagccccagcggagaaagaacccccaggaaggactgtataacgaactccagaaagacaagatggccgaagcctacagcgagatcggcatgaagggcgagcggagaagaggcaagggccacgatggcctgtaccagggcctgagcaccgccaccaaggacacctatgacgccctgcacatgcaggccctgcctccaagaagggccaagcgatctggatctggagcaacaaacttctcactactcaaacaagcaggtgacgtggaggagaatcccgggcctactagtatggactggatttggcgcatccttttccttgtcggcgctgctaccggcgcgcattccttcgaagaggtgcagctggttgaatctggcggaggactggttcagcctggcggatctctgagactgtcttgtgccgccagcggcttcacctttagcacatacggaatggcctgggtccgacagacccctgatagaaggctggaactggtggctaccatcaacagcaacggcggcaagacctaccatcctgacagcgtgaagggcagattcaccatcagccgggacaacagcaagaacaccctgtacctccagatgaacagcctgagagccgaggacaccgccgtgtactactgcaccagagaaggactggactactggggccagggcacactggttacagtttctagcacgcgtgcctctacaaagggaccctccgtgtttcctctggctcccagcagcaagtctacaagcggaggaacagccgctctgggctgcctggtcaaggattactttcccgagcctgtgaccgtgtcctggaatagcggagcactgacaagcggcgtgcacacctttccagccgtgctgcaaagcagcggcctgtactctctgagcagcgtggtcacagtgcctagctctagcctgggcacccagacctacatctgcaatgtgaaccacaagcctagcaacaccaaggtggacaagagagtggaacccaagagctgtggtaccgtggtcgagaaagaacatccacagcttggcgctggcaccgtcctgttgcttagagccggattctatgccgtcagcttcctgtccgtggctgtggggtctacagtgtattaccagggaaaatgtctcacctggaaaggccccagacgccagcttccagctgttgttcctgctccactgccaccaccttgtggctcctctgctcacttgcttccaccagtgcctggcggacgcgccaagagaagcggatctggcgtgaagcagaccctgaatttcgacctgctgaagctggctggcgacgtggaatccaacccaggcccttctagaggccatatgaccgagtacaagcccacggtgcgcctcgccacccgcgacgacgtccccagggccgtacgcaccctcgccgccgcgttcgccgactaccccgccacgcgccacaccgtcgatccggaccgccacatcgagcgggtcaccgagctgcaagaactcttcctcacgcgcgtcgggctcgacatcggcaaggtgtgggtcgcggacgacggcgccgcggtggcggtctggaccacgccggagagcgtcgaagcgggggcggtgttcgccgagatcggcccgcgcatggccgagttgagcggttcccggctggccgcgcagcaacagatggaaggcctcctggcgccgcaccggcccaaggagcccgcgtggttcctggccaccgtcggcgtctcgcccgaccaccagggcaagggtctgggcagcgccgtcgtgctccccggagtggaggcggccgagcgcgccggggtgcccgccttcctggagacctccgcgccccgcaacctccccttctacgagcggctcggcttcaccgtcaccgccgacgtcgaggtgcccgaaggaccgcgcacctggtgcatgacccgcaagcccggtgcctga

SEQ ID NO: 3411 - DNA, 2973 bp, synthetic construct
  source 1..2973: mol_type = other DNA
atggccttaccagtgaccgccttgctcctgccgctggccttgctgctccacgccgccaggccggatattcagatgacacagagccccagcagcctgtctgcctctgtgggagacagagtgaccatcacctgtcgggcctctcagaatgtgggaacagccgtggcttggtttcagcagaagcctggcaaggcccctaagatcctgatctacagcgccagcaacagatacaccggcgtgccaagtagaagcacaggctctggcagcggcaccgatttcaccctgacaatatccagcctccagcctgaggacttcgccacctactactgccagcagtacagcacataccctctgaccttcggccaggggaccaagctggaaatcaagctcgaggacctgaagaacgtgttcccacctgaggtggccgtgttcgagcctagcgaggccgagatcagccacacccagaaagccaccctcgtgtgcctggctaccggcttctaccccgaccatgtggaactgtcttggtgggtcaacggcaaagaggtgcacagcggcgtgtctaccgacccccagccactgaaagaacagcccgccctgaacgacagccggtactgcctgagcagcagactgagagtgtccgccaccttctggcagaacccccggaaccacttcagatgccaggtgcagttctacggcctgagcgagaacgacgagtggacccaggacagagccaagcccgtgacccagatcgtgtctgccgaagcctggggcagagccgattgcggatcccagagcttcggcctgctggaccccaagctgtgctacctgctggatggcatcctgttcatctacggcgtgatcctgaccgccctgttcctgagagtgaagttcagcagaagcgccgacgcccctgcctaccagcagggacagaaccaactgtacaacgagctgaacctgggcagacgggaagagtacgacgtgctggacaagcggagaggcagggaccctgagatgggcggaaagccccagcggagaaagaacccccaggaaggactgtataacgaactccagaaagacaagatggccgaagcctacagcgagatcggcatgaagggcgagcggagaagaggcaagggccacgatggcctgtaccagggcctgagcaccgccaccaaggacacctatgacgccctgcacatgcaggccctgcctccaagaagggccaagcgatctggatctggagcaacaaacttctcactactcaaacaagcaggtgacgtggaggagaatcccgggcctactagtatggactggatttggcgcatccttttccttgtcggcgctgctaccggcgcgcattccttcgaagaggtgcagctggttgaatctggcggaggactggttcagcctggcggatctctgagactgtcttgtgccgccagcggcttcacctttagcacatacggaatggcctgggtccgacagacccctgatagaaggctggaactggtggctaccatcaacagcaacggcggcaagacctaccatcctgacagcgtgaagggcagattcaccatcagccgggacaacagcaagaacaccctgtacctccagatgaacagcctgagagccgaggacaccgccgtgtactactgcaccagagaaggactggactactggggccagggcacactggttacagtttctagcacgcgtatccagaaccctgatcctgccgtgtaccagctgcgggatagcaagagcagcgacaagagcgtgtgtctgttcaccgacttcgacagccagaccaacgtgtcccagagcaaggactccgacgtgtacatcaccgataagaccgtgctggacatgcggagcatggacttcaagagcaactccgccgtggcctggtccaacaagtccgatttcgcctgcgccaacgccttcaacaacagcattatccccgaggacacattcttcccaagccccgagagcagctgcggtaccggcgacatcgagaacaccagtctggcccctgaggaccctacctttcctgccgatacctggggcacctacctgctgaccacagagacaggactccagaaagatcacgccctgtgggaccacacagcccagaacctgctgagaatgggcctcgcctttctggtgctggttgccctcgtgtggttcctggtggaagattggctgagccggaagcggacaagagagagagccagcagagcctctacctgggagggaagaagaaggctgaacacccagacacttagggccaagcgatctggatctggagcaacaaacttctcactactcaaacaagcaggtgacgtggaggagaatcccgggccttctagaggccatatgaccgagtacaagcccacggtgcgcctcgccacccgcgacgacgtccccagggccgtacgcaccctcgccgccgcgttcgccgactaccccgccacgcgccacaccgtcgatccggaccgccacatcgagcgggtcaccgagctgcaagaactcttcctcacgcgcgtcgggctcgacatcggcaaggtgtgggtcgcggacgacggcgccgcggtggcggtctggaccacgccggagagcgtcgaagcgggggcggtgttcgccgagatcggcccgcgcatggccgagttgagcggttcccggctggccgcgcagcaacagatggaaggcctcctggcgccgcaccggcccaaggagcccgcgtggttcctggccaccgtcggcgtctcgcccgaccaccagggcaagggtctgggcagcgccgtcgtgctccccggagtggaggcggccgagcgcgccggggtgcccgccttcctggagacctccgcgccccgcaacctccccttctacgagcggctcggcttcaccgtcaccgccgacgtcgaggtgcccgaaggaccgcgcacctggtgcatgacccgcaagcccggtgcctga

SEQ ID NO: 3412 - DNA, 3171 bp, synthetic construct
  source 1..3171: mol_type = other DNA
atggccttaccagtgaccgccttgctcctgccgctggccttgctgctccacgccgccaggccggatattcagatgacacagagccccagcagcctgtctgcctctgtgggagacagagtgaccatcacctgtcgggcctctcagaatgtgggaacagccgtggcttggtttcagcagaagcctggcaaggcccctaagatcctgatctacagcgccagcaacagatacaccggcgtgccaagtagaagcacaggctctggcagcggcaccgatttcaccctgacaatatccagcctccagcctgaggacttcgccacctactactgccagcagtacagcacataccctctgaccttcggccaggggaccaagctggaaatcaagctcgaggacctgaagaacgtgttcccacctgaggtggccgtgttcgagcctagcgaggccgagatcagccacacccagaaagccaccctcgtgtgcctggctaccggcttctaccccgaccatgtggaactgtcttggtgggtcaacggcaaagaggtgcacagcggcgtgtctaccgacccccagccactgaaagaacagcccgccctgaacgacagccggtactgcctgagcagcagactgagagtgtccgccaccttctggcagaacccccggaaccacttcagatgccaggtgcagttctacggcctgagcgagaacgacgagtggacccaggacagagccaagcccgtgacccagatcgtgtctgccgaagcctggggcagagccgattgcggatcccagagcttcggcctgctggaccccaagctgtgctacctgctggatggcatcctgttcatctacggcgtgatcctgaccgccctgttcctgagagtgaagttcagcagaagcgccgacgcccctgcctaccagcagggacagaaccaactgtacaacgagctgaacctgggcagacgggaagagtacgacgtgctggacaagcggagaggcagggaccctgagatgggcggaaagccccagcggagaaagaacccccaggaaggactgtataacgaactccagaaagacaagatggccgaagcctacagcgagatcggcatgaagggcgagcggagaagaggcaagggccacgatggcctgtaccagggcctgagcaccgccaccaaggacacctatgacgccctgcacatgcaggccctgcctccaagaagggccaagcgatctggatctggagcaacaaacttctcactactcaaacaagcaggtgacgtggaggagaatcccgggcctactagtatggactggatttggcgcatccttttccttgtcggcgctgctaccggcgcgcattccttcgaagaggtgcagctggttgaatctggcggaggactggttcagcctggcggatctctgagactgtcttgtgccgccagcggcttcacctttagcacatacggaatggcctgggtccgacagacccctgatagaaggctggaactggtggctaccatcaacagcaacggcggcaagacctaccatcctgacagcgtgaagggcagattcaccatcagccgggacaacagcaagaacaccctgtacctccagatgaacagcctgagagccgaggacaccgccgtgtactactgcaccagagaaggactggactactggggccagggcacactggttacagtttctagcacgcgtatccagaaccctgatcctgccgtgtaccagctgcgggatagcaagagcagcgacaagagcgtgtgtctgttcaccgacttcgacagccagaccaacgtgtcccagagcaaggactccgacgtgtacatcaccgataagaccgtgctggacatgcggagcatggacttcaagagcaactccgccgtggcctggtccaacaagtccgatttcgcctgcgccaacgccttcaacaacagcattatccccgaggacacattcttcccaagccccgagagcagctgcggtaccaagtctgtgcgcttttacctggtcgtcagccctgccagtgcctccactcagacatcttggaccccaagggaccttgtgtcctctcagacacagacacagtcctgcgtgccaccaactgctggcgcaagacaggctccagagtctcccagcacaatccccgtcccttctcagccccagaactccacacttaggccaggaccagctgctccaatcgcactggtcccagtgttctgcggactgctggttgccaagtctctggtgctgagcgcactcctcgtttggtggggcgatatttggtggaaaacgatgatggaattgagatccctcgatacgcagaaagccacatgccaccttcagcaagtcacagacttgccttggaccagcgtcagctctcccgtggaacgggaaattctgtatcatacagtggcccgcaccaagatttccgacgatgacgacgagcacacactgcgcgccaagagaagcggatctggcgtgaagcagaccctgaatttcgacctgctgaagctggctggcgacgtggaatccaacccaggcccttctagaggccatatgaccgagtacaagcccacggtgcgcctcgccacccgcgacgacgtccccagggccgtacgcaccctcgccgccgcgttcgccgactaccccgccacgcgccacaccgtcgatccggaccgccacatcgagcgggtcaccgagctgcaagaactcttcctcacgcgcgtcgggctcgacatcggcaaggtgtgggtcgcggacgacggcgccgcggtggcggtctggaccacgccggagagcgtcgaagcgggggcggtgttcgccgagatcggcccgcgcatggccgagttgagcggttcccggctggccgcgcagcaacagatggaaggcctcctggcgccgcaccggcccaaggagcccgcgtggttcctggccaccgtcggcgtctcgcccgaccaccagggcaagggtctgggcagcgccgtcgtgctccccggagtggaggcggccgagcgcgccggggtgcccgccttcctggagacctccgcgccccgcaacctccccttctacgagcggctcggcttcaccgtcaccgccgacgtcgaggtgcccgaaggaccgcgcacctggtgcatgacccgcaagcccggtgcctga

SEQ ID NO: 3413 - DNA, 2931 bp, synthetic construct
  source 1..2931: mol_type = other DNA
atggccttaccagtgaccgccttgctcctgccgctggccttgctgctccacgccgccaggccggatattcagatgacacagagccccagcagcctgtctgcctctgtgggagacagagtgaccatcacctgtcgggcctctcagaatgtgggaacagccgtggcttggtttcagcagaagcctggcaaggcccctaagatcctgatctacagcgccagcaacagatacaccggcgtgccaagtagaagcacaggctctggcagcggcaccgatttcaccctgacaatatccagcctccagcctgaggacttcgccacctactactgccagcagtacagcacataccctctgaccttcggccaggggaccaagctggaaatcaagctcgaggacctgaagaacgtgttcccacctgaggtggccgtgttcgagcctagcgaggccgagatcagccacacccagaaagccaccctcgtgtgcctggctaccggcttctaccccgaccatgtggaactgtcttggtgggtcaacggcaaagaggtgcacagcggcgtgtctaccgacccccagccactgaaagaacagcccgccctgaacgacagccggtactgcctgagcagcagactgagagtgtccgccaccttctggcagaacccccggaaccacttcagatgccaggtgcagttctacggcctgagcgagaacgacgagtggacccaggacagagccaagcccgtgacccagatcgtgtctgccgaagcctggggcagagccgattgcggatcccagagcttcggcctgctggaccccaagctgtgctacctgctggatggcatcctgttcatctacggcgtgatcctgaccgccctgttcctgagagtgaagttcagcagaagcgccgacgcccctgcctaccagcagggacagaaccaactgtacaacgagctgaacctgggcagacgggaagagtacgacgtgctggacaagcggagaggcagggaccctgagatgggcggaaagccccagcggagaaagaacccccaggaaggactgtataacgaactccagaaagacaagatggccgaagcctacagcgagatcggcatgaagggcgagcggagaagaggcaagggccacgatggcctgtaccagggcctgagcaccgccaccaaggacacctatgacgccctgcacatgcaggccctgcctccaagaagggccaagcgatctggatctggagcaacaaacttctcactactcaaacaagcaggtgacgtggaggagaatcccgggcctactagtatggactggatttggcgcatccttttccttgtcggcgctgctaccggcgcgcattccttcgaagaggtgcagctggttgaatctggcggaggactggttcagcctggcggatctctgagactgtcttgtgccgccagcggcttcacctttagcacatacggaatggcctgggtccgacagacccctgatagaaggctggaactggtggctaccatcaacagcaacggcggcaagacctaccatcctgacagcgtgaagggcagattcaccatcagccgggacaacagcaagaacaccctgtacctccagatgaacagcctgagagccgaggacaccgccgtgtactactgcaccagagaaggactggactactggggccagggcacactggttacagtttctagcacgcgtatccagaaccctgatcctgccgtgtaccagctgcgggatagcaagagcagcgacaagagcgtgtgtctgttcaccgacttcgacagccagaccaacgtgtcccagagcaaggactccgacgtgtacatcaccgataagaccgtgctggacatgcggagcatggacttcaagagcaactccgccgtggcctggtccaacaagtccgatttcgcctgcgccaacgccttcaacaacagcattatccccgaggacacattcttcccaagccccgagagcagctgcggtaccgtggtcgagaaagaacatccacagcttggcgctggcaccgtcctgttgcttagagccggattctatgccgtcagcttcctgtccgtggctgtggggtctacagtgtattaccagggaaaatgtctcacctggaaaggccccagacgccagcttccagctgttgttcctgctccactgccaccaccttgtggctcctctgctcacttgcttccaccagtgcctggcggacgcgccaagagaagcggatctggcgtgaagcagaccctgaatttcgacctgctgaagctggctggcgacgtggaatccaacccaggcccttctagaggccatatgaccgagtacaagcccacggtgcgcctcgccacccgcgacgacgtccccagggccgtacgcaccctcgccgccgcgttcgccgactaccccgccacgcgccacaccgtcgatccggaccgccacatcgagcgggtcaccgagctgcaagaactcttcctcacgcgcgtcgggctcgacatcggcaaggtgtgggtcgcggacgacggcgccgcggtggcggtctggaccacgccggagagcgtcgaagcgggggcggtgttcgccgagatcggcccgcgcatggccgagttgagcggttcccggctggccgcgcagcaacagatggaaggcctcctggcgccgcaccggcccaaggagcccgcgtggttcctggccaccgtcggcgtctcgcccgaccaccagggcaagggtctgggcagcgccgtcgtgctccccggagtggaggcggccgagcgcgccggggtgcccgccttcctggagacctccgcgccccgcaacctccccttctacgagcggctcggcttcaccgtcaccgccgacgtcgaggtgcccgaaggaccgcgcacctggtgcatgacccgcaagcccggtgcctga

SEQ ID NO: 3414 - DNA, 2844 bp, synthetic construct
  source 1..2844: mol_type = other DNA
atggccttaccagtgaccgccttgctcctgccgctggccttgctgctccacgccgccaggccggatattcagatgacacagagccccagcagcctgtctgcctctgtgggagacagagtgaccatcacctgtcgggcctctcagaatgtgggaacagccgtggcttggtttcagcagaagcctggcaaggcccctaagatcctgatctacagcgccagcaacagatacaccggcgtgccaagtagaagcacaggctctggcagcggcaccgatttcaccctgacaatatccagcctccagcctgaggacttcgccacctactactgccagcagtacagcacataccctctgaccttcggccaggggaccaagctggaaatcaagctcgagggacagcctaaggccaatcctaccgtgacactgttccctccaagcagcgaagaactccaggccaacaaggccacacttgtgtgcctgatctccgacttctaccctggggctgtgacagtggcttggaaggccgatggatctcctgtgaaagccggcgtggaaaccaccaagccatccaagcagagcaacaacaaatacgccgccagctcctacctgagcctgacacctgagcagtggaagtcccacagatcctacagctgccaagtgacccacgaaggcagcaccgtggaaaagacagtggcccctacagagtgcagcggatcccagagcttcggcctgctggaccccaagctgtgctacctgctggatggcatcctgttcatctacggcgtgatcctgaccgccctgttcctgagagtgaagttcagcagaagcgccgacgcccctgcctaccagcagggacagaaccaactgtacaacgagctgaacctgggcagacgggaagagtacgacgtgctggacaagcggagaggcagggaccctgagatgggcggaaagccccagcggagaaagaacccccaggaaggactgtataacgaactccagaaagacaagatggccgaagcctacagcgagatcggcatgaagggcgagcggagaagaggcaagggccacgatggcctgtaccagggcctgagcaccgccaccaaggacacctatgacgccctgcacatgcaggccctgcctccaagaagggccaagcgatctggatctggagcaacaaacttctcactactcaaacaagcaggtgacgtggaggagaatcccgggcctactagtatggactggatttggcgcatccttttccttgtcggcgctgctaccggcgcgcattccttcgaagaggtgcagctggttgaatctggcggaggactggttcagcctggcggatctctgagactgtcttgtgccgccagcggcttcacctttagcacatacggaatggcctgggtccgacagacccctgatagaaggctggaactggtggctaccatcaacagcaacggcggcaagacctaccatcctgacagcgtgaagggcagattcaccatcagccgggacaacagcaagaacaccctgtacctccagatgaacagcctgagagccgaggacaccgccgtgtactactgcaccagagaaggactggactactggggccagggcacactggttacagtttctagcacgcgtgcctctacaaagggaccctccgtgtttcctctggctcccagcagcaagtctacaagcggaggaacagccgctctgggctgcctggtcaaggattactttcccgagcctgtgaccgtgtcctggaatagcggagcactgacaagcggcgtgcacacctttccagccgtgctgcaaagcagcggcctgtactctctgagcagcgtggtcacagtgcctagctctagcctgggcacccagacctacatctgcaatgtgaaccacaagcctagcaacaccaaggtggacaagagagtggaacccaagagctgtggtaccatcactcaaggtttggcagtgtcaaccatctcatcattctttccacctggctaccaagtgtccttctgcctggtcatggtgctgctgttcgccgtggataccggcctgtacttcagcgtcaagaccaacatccggtccagcaccagagactggaaggaccacaagttcaagtggcggaaggaccctcaggacaagagggccaagcgatctggatctggagcaacaaacttctcactactcaaacaagcaggtgacgtggaggagaatcccgggccttctagaggccatatgaccgagtacaagcccacggtgcgcctcgccacccgcgacgacgtccccagggccgtacgcaccctcgccgccgcgttcgccgactaccccgccacgcgccacaccgtcgatccggaccgccacatcgagcgggtcaccgagctgcaagaactcttcctcacgcgcgtcgggctcgacatcggcaaggtgtgggtcgcggacgacggcgccgcggtggcggtctggaccacgccggagagcgtcgaagcgggggcggtgttcgccgagatcggcccgcgcatggccgagttgagcggttcccggctggccgcgcagcaacagatggaaggcctcctggcgccgcaccggcccaaggagcccgcgtggttcctggccaccgtcggcgtctcgcccgaccaccagggcaagggtctgggcagcgccgtcgtgctccccggagtggaggcggccgagcgcgccggggtgcccgccttcctggagacctccgcgccccgcaacctccccttctacgagcggctcggcttcaccgtcaccgccgacgtcgaggtgcccgaaggaccgcgcacctggtgcatgacccgcaagcccggtgcctga

SEQ ID NO: 3415 - DNA, 2889 bp, synthetic construct
  source 1..2889: mol_type = other DNA
atggccttaccagtgaccgccttgctcctgccgctggccttgctgctccacgccgccaggccggatattcagatgacacagagccccagcagcctgtctgcctctgtgggagacagagtgaccatcacctgtcgggcctctcagaatgtgggaacagccgtggcttggtttcagcagaagcctggcaaggcccctaagatcctgatctacagcgccagcaacagatacaccggcgtgccaagtagaagcacaggctctggcagcggcaccgatttcaccctgacaatatccagcctccagcctgaggacttcgccacctactactgccagcagtacagcacataccctctgaccttcggccaggggaccaagctggaaatcaagctcgaggacctgaagaacgtgttcccacctgaggtggccgtgttcgagcctagcgaggccgagatcagccacacccagaaagccaccctcgtgtgcctggctaccggcttctaccccgaccatgtggaactgtcttggtgggtcaacggcaaagaggtgcacagcggcgtgtctaccgacccccagccactgaaagaacagcccgccctgaacgacagccggtactgcctgagcagcagactgagagtgtccgccaccttctggcagaacccccggaaccacttcagatgccaggtgcagttctacggcctgagcgagaacgacgagtggacccaggacagagccaagcccgtgacccagatcgtgtctgccgaagcctggggcagagccgattgcggatcccagagcttcggcctgctggaccccaagctgtgctacctgctggatggcatcctgttcatctacggcgtgatcctgaccgccctgttcctgagagtgaagttcagcagaagcgccgacgcccctgcctaccagcagggacagaaccaactgtacaacgagctgaacctgggcagacgggaagagtacgacgtgctggacaagcggagaggcagggaccctgagatgggcggaaagccccagcggagaaagaacccccaggaaggactgtataacgaactccagaaagacaagatggccgaagcctacagcgagatcggcatgaagggcgagcggagaagaggcaagggccacgatggcctgtaccagggcctgagcaccgccaccaaggacacctatgacgccctgcacatgcaggccctgcctccaagaagggccaagcgatctggatctggagcaacaaacttctcactactcaaacaagcaggtgacgtggaggagaatcccgggcctactagtatggactggatttggcgcatccttttccttgtcggcgctgctaccggcgcgcattccttcgaagaggtgcagctggttgaatctggcggaggactggttcagcctggcggatctctgagactgtcttgtgccgccagcggcttcacctttagcacatacggaatggcctgggtccgacagacccctgatagaaggctggaactggtggctaccatcaacagcaacggcggcaagacctaccatcctgacagcgtgaagggcagattcaccatcagccgggacaacagcaagaacaccctgtacctccagatgaacagcctgagagccgaggacaccgccgtgtactactgcaccagagaaggactggactactggggccagggcacactggttacagtttctagcacgcgtatccagaaccctgatcctgccgtgtaccagctgcgggatagcaagagcagcgacaagagcgtgtgtctgttcaccgacttcgacagccagaccaacgtgtcccagagcaaggactccgacgtgtacatcaccgataagaccgtgctggacatgcggagcatggacttcaagagcaactccgccgtggcctggtccaacaagtccgatttcgcctgcgccaacgccttcaacaacagcattatccccgaggacacattcttcccaagccccgagagcagctgcggtaccatcactcaaggtttggcagtgtcaaccatctcatcattctttccacctggctaccaagtgtccttctgcctggtcatggtgctgctgttcgccgtggataccggcctgtacttcagcgtcaagaccaacatccggtccagcaccagagactggaaggaccacaagttcaagtggcggaaggaccctcaggacaagagggccaagcgatctggatctggagcaacaaacttctcactactcaaacaagcaggtgacgtggaggagaatcccgggccttctagaggccatatgaccgagtacaagcccacggtgcgcctcgccacccgcgacgacgtccccagggccgtacgcaccctcgccgccgcgttcgccgactaccccgccacgcgccacaccgtcgatccggaccgccacatcgagcgggtcaccgagctgcaagaactcttcctcacgcgcgtcgggctcgacatcggcaaggtgtgggtcgcggacgacggcgccgcggtggcggtctggaccacgccggagagcgtcgaagcgggggcggtgttcgccgagatcggcccgcgcatggccgagttgagcggttcccggctggccgcgcagcaacagatggaaggcctcctggcgccgcaccggcccaaggagcccgcgtggttcctggccaccgtcggcgtctcgcccgaccaccagggcaagggtctgggcagcgccgtcgtgctccccggagtggaggcggccgagcgcgccggggtgcccgccttcctggagacctccgcgccccgcaacctccccttctacgagcggctcggcttcaccgtcaccgccgacgtcgaggtgcccgaaggaccgcgcacctggtgcatgacccgcaagcccggtgcctga

SEQ ID NO: 3416 - DNA, 1938 bp, synthetic construct
  source 1..1938: mol_type = other DNA
atggccttaccagtgaccgccttgctcctgccgctggccttgctgctccacgccgccaggccggatattcagatgacacagagccccagcagcctgtctgcctctgtgggagacagagtgaccatcacctgtcgggcctctcagaatgtgggaacagccgtggcttggtttcagcagaagcctggcaaggcccctaagatcctgatctacagcgccagcaacagatacaccggcgtgccaagtagaagcacaggctctggcagcggcaccgatttcaccctgacaatatccagcctccagcctgaggacttcgccacctactactgccagcagtacagcacataccctctgaccttcggccaggggaccaagctggaaatcaagctcgagggacagcctaaggccaatcctaccgtgacactgttccctccaagcagcgaagaactccaggccaacaaggccacacttgtgtgcctgatctccgacttctaccctggggctgtgacagtggcttggaaggccgatggatctcctgtgaaagccggcgtggaaaccaccaagccatccaagcagagcaacaacaaatacgccgccagctcctacctgagcctgacacctgagcagtggaagtcccacagatcctacagctgccaagtgacccacgaaggcagcaccgtggaaaagacagtggcccctacagagtgcagcggatccctgggagagcctcagctgtgctatatcctggacgccatcctgtttctgtacggcatcgtgctgaccctgctgtactgccggctgaagatccaagtgcggaaggccgccatcaccagctacgagaaatccgacggcgtgtacaccggcctgagcaccagaaatcaagagacatacgagacactgaagcacgaaaagcctccacaaagggccaagcgatctggatctggagcaacaaacttctcactactcaaacaagcaggtgacgtggaggagaatcccgggcctactagtatggactggatttggcgcatccttttccttgtcggcgctgctaccggcgcgcattccttcgaagaggtgcagctggttgaatctggcggaggactggttcagcctggcggatctctgagactgtcttgtgccgccagcggcttcacctttagcacatacggaatggcctgggtccgacagacccctgatagaaggctggaactggtggctaccatcaacagcaacggcggcaagacctaccatcctgacagcgtgaagggcagattcaccatcagccgggacaacagcaagaacaccctgtacctccagatgaacagcctgagagccgaggacaccgccgtgtactactgcaccagagaaggactggactactggggccagggcacactggttacagtttctagcacgcgtgcctctacaaagggaccctccgtgtttcctctggctcccagcagcaagtctacaagcggaggaacagccgctctgggctgcctggtcaaggattactttcccgagcctgtgaccgtgtcctggaatagcggagcactgacaagcggcgtgcacacctttccagccgtgctgcaaagcagcggcctgtactctctgagcagcgtggtcacagtgcctagctctagcctgggcacccagacctacatctgcaatgtgaaccacaagcctagcaacaccaaggtggacaagagagtggaacccaagagctgtggtaccctcggagaaccacagctctgttacattctggatgctatcctgttcctctatgggatcgtcctgacactcctgtattgcagactcaaaattcaagttcgcaaagccgccattacctcttacgagaagagtgatggggtgtacacaggactgtctacccggaatcaagaaacctacgaaaccctcaaacatgagaagccacctcagtaa

SEQ ID NO: 3417 - DNA, 1467 bp, synthetic construct
  source 1..1467: mol_type = other DNA
atggccttaccagtgaccgccttgctcctgccgctggccttgctgctccacgccgccaggccggacatcgtgctgacccagagccagaaattcatgagcaccagcgtgggcgacagagtgtccatcatctgtagagccagccagtctgtgggaacagccgtggcttggtatcagctgaaggccggacagagccccaagctgctgatctacagcgccagcaacagattcaccggcgtgcccgatagattcacaggcagcggctctggcaccgacttcaccctgacaatcagcaacgtgcagagcgaggacctggccgactacttctgtcagcagtacagcacataccctctggcctttggcgctggcaccaagctggaacttaaaggcggaggcggaagtggaggcggaggatctggcggcggaggctctgaagtgcagctggttgaatctggcggcggaattgtgcagcctggcggatctctgaagctgagctgtgccgccagcggcttcaccttcaacgatttcggcatgagctggatcagacagacccctgacaagcggctggaactggtggctaccatcaacaccaatggcggcaccacacactaccccgactctgtgaagggcagattcagcatcagccgggacaacgccaagaaattcgtgtacctccagatgagcagcctgaagtccgacgacaccgccatctactactgccccagagaaggactggactactggggccagggaaccacactgacagtgtctagtacgcgtgagcagaaactgatctcggaagaggatctgaaaattgaagttatgtatcctcctccttacctagacaatgagaagagcaatggaaccattatccatgtgaaagggaaacacctttgtccaagtcccctatttcccggaccttctaagcccttttgggtgctggtggtggttgggggagtcctggcttgctatagcttgctagtaacagtggcctttattattttctgggtgaggagtaagaggagcaggctcctgcacagtgactacatgaacatgactccacgccgccccggacccacccgcaagcattaccagccctatgccccaccacgcgacttcgcagcctatcgctccagagtgaagttcagcaggagcgcagacgcccccgcgtaccagcagggccagaaccagctctataacgagctcaatctaggacgaagagaggagtacgatgttttggacaagagacgtggccgggaccctgagatggggggaaagccgagaaggaagaaccctcaggaaggcctgtacaatgaactgcagaaagataagatggcggaggcctacagtgagattgggatgaaaggcgagcgccggaggggcaaggggcacgatggcctttaccagggtctcagtacagccaccaaggacacctacgacgcccttcacatgcaggccctgccccctcgc

SEQ ID NO: 3418 - DNA, 1488 bp, synthetic construct
  source 1..1488: mol_type = other DNA
atggccttaccagtgaccgccttgctcctgccgctggccttgctgctccacgccgccaggccggacatcgtgctgacccagagccagaaattcatgagcaccagcgtgggcgacagagtgtccatcatctgtagagccagccagtctgtgggaacagccgtggcttggtatcagctgaaggccggacagagccccaagctgctgatctacagcgccagcaacagattcaccggcgtgcccgatagattcacaggcagcggctctggcaccgacttcaccctgacaatcagcaacgtgcagagcgaggacctggccgactacttctgtcagcagtacagcacataccctctggcctttggcgctggcaccaagctggaacttaaaggcggaggcggaagtggaggcggaggatctggcggcggaggctctgaagtgcagctggttgaatctggcggcggaattgtgcagcctggcggatctctgaagctgagctgtgccgccagcggcttcaccttcaacgatttcggcatgagctggatcagacagacccctgacaagcggctggaactggtggctaccatcaacaccaatggcggcaccacacactaccccgactctgtgaagggcagattcagcatcagccgggacaacgccaagaaattcgtgtacctccagatgagcagcctgaagtccgacgacaccgccatctactactgccccagagaaggactggactactggggccagggaaccacactgacagtgtctagtacgcgtgagcagaaactgatctcggaagaggatctggcgaagcccaccacgacgccagcgccgcgaccaccaacaccggcgcccaccatcgcgtcgcagcccctgtccctgcgcccagaggcgtgccggccagcggcggggggcgcagtgcacacgagggggctggacttcgcctgtgacatctacatctgggcgcccttggccgggacttgtggggtccttctcctgtcactggttatcaccctttactgcaaacggggcagaaagaaactcctgtatatattcaaacaaccatttatgagaccagtacaaactactcaagaggaagatggctgtagctgccgatttccagaagaagaagaaggaggatgtgaactgagagtgaagttcagcaggagcgcagacgcccccgcgtaccagcagggccagaaccagctctataacgagctgaatctaggacgaagagaggagtacgatgttttggacaagagacgtggccgggaccctgagatggggggaaagccgagaaggaagaaccctcaggaaggcctgtacaatgaactgcagaaagataagatggcggaggcctacagtgagattgggatgaaaggcgagcgccggaggggcaaggggcacgatggcctttaccagggtctcagtacagccaccaaggacacctacgacgcccttcacatgcaggccctgccccctcgctga

SEQ ID NO: 3419 - DNA, 1488 bp, synthetic construct
  source 1..1488: mol_type = other DNA
atggccttaccagtgaccgccttgctcctgccgctggccttgctgctccacgccgccaggccggaagtgcagctggttgaatctggcggcggaattgtgcagcctggcggatctctgaagctgagctgtgccgccagcggcttcaccttcaacgatttcggcatgagctggatcagacagacccctgacaagcggctggaactggtggctaccatcaacaccaatggcggcaccacacactaccccgactctgtgaagggcagattcagcatcagccgggacaacgccaagaaattcgtgtacctccagatgagcagcctgaagtccgacgacaccgccatctactactgccccagagaaggactggactactggggccagggaaccacactgacagtgtctagtggcggaggcggaagtggaggcggaggatctggcggcggaggctctgacatcgtgctgacccagagccagaaattcatgagcaccagcgtgggcgacagagtgtccatcatctgtagagccagccagtctgtgggaacagccgtggcttggtatcagctgaaggccggacagagccccaagctgctgatctacagcgccagcaacagattcaccggcgtgcccgatagattcacaggcagcggctctggcaccgacttcaccctgacaatcagcaacgtgcagagcgaggacctggccgactacttctgtcagcagtacagcacataccctctggcctttggcgctggcaccaagctggaacttaaaacgcgtgagcagaaactgatctcggaagaggatctggcgaagcccaccacgacgccagcgccgcgaccaccaacaccggcgcccaccatcgcgtcgcagcccctgtccctgcgcccagaggcgtgccggccagcggcggggggcgcagtgcacacgagggggctggacttcgcctgtgacatctacatctgggcgcccttggccgggacttgtggggtccttctcctgtcactggttatcaccctttactgcaaacggggcagaaagaaactcctgtatatattcaaacaaccatttatgagaccagtacaaactactcaagaggaagatggctgtagctgccgatttccagaagaagaagaaggaggatgtgaactgagagtgaagttcagcaggagcgcagacgcccccgcgtaccagcagggccagaaccagctctataacgagctgaatctaggacgaagagaggagtacgatgttttggacaagagacgtggccgggaccctgagatggggggaaagccgagaaggaagaaccctcaggaaggcctgtacaatgaactgcagaaagataagatggcggaggcctacagtgagattgggatgaaaggcgagcgccggaggggcaaggggcacgatggcctttaccagggtctcagtacagccaccaaggacacctacgacgcccttcacatgcaggccctgccccctcgctga

SEQ ID NO: 3420 - DNA, 2727 bp, synthetic construct
  source 1..2727: mol_type = other DNA
atggccttaccagtgaccgccttgctcctgccgctggccttgctgctccacgccgccaggccggacatcgtgctgacccagagccagaaattcatgagcaccagcgtgggcgacagagtgtccatcatctgtagagccagccagtctgtgggaacagccgtggcttggtatcagctgaaggccggacagagccccaagctgctgatctacagcgccagcaacagattcaccggcgtgcccgatagattcacaggcagcggctctggcaccgacttcaccctgacaatcagcaacgtgcagagcgaggacctggccgactacttctgtcagcagtacagcacataccctctggcctttggcgctggcaccaagctggaacttaaaggcggaggcggaagtggaggcggaggatctggcggcggaggctctgaagtgcagctggttgaatctggcggcggaattgtgcagcctggcggatctctgaagctgagctgtgccgccagcggcttcaccttcaacgatttcggcatgagctggatcagacagacccctgacaagcggctggaactggtggctaccatcaacaccaatggcggcaccacacactaccccgactctgtgaagggcagattcagcatcagccgggacaacgccaagaaattcgtgtacctccagatgagcagcctgaagtccgacgacaccgccatctactactgccccagagaaggactggactactggggccagggaaccacactgacagtgtctagtacgcgtgagcagaaactgatctcggaagaggatctggcgaagcccaccacgacgccagcgccgcgaccaccaacaccggcgcccaccatcgcgtcgcagcccctgtccctgcgcccagaggcgtgccggccagcggcggggggcgcagtgcacacgagggggctggacttcgcctgtgacatctacatctgggcgcccttggccgggacttgtggggtccttctcctgtcactggttatcaccctttactgcgggcgcgccagagtgaagttcagcaggagcgcagacgcccccgcgtaccagcagggccagaaccagctctataacgagctgaatctaggacgaagagaggagtacgatgttttggacaagagacgtggccgggaccctgagatggggggaaagccgagaaggaagaaccctcaggaaggcctgtacaatgaactgcagaaagataagatggcggaggcctacagtgagattgggatgaaaggcgagcgccggaggggcaaggggcacgatggcctttaccagggtctcagtacagccaccaaggacacctacgacgcccttcacatgcaggccctgccccctcgctctagaggatctggagcaacaaacttctcactactcaaacaagcaggtgacgtggaggagaatcccgggcctgggatccacatggccacttacgaggttctctgtgaggtggcgcggaaactgggcacggatgacagggaagtggtattgttcctcctaaacgtgttcatacctcaacccacactggcccaattaattggagctcttagagctttaaaggaggagggcaggttaacgtttcccctgttagcggaatgtctgtttcgtgcaggtcgcagagacctcttgcgcgacctgcttcacttagacccgcgttttttagagcgccacctagcgggcacaatgagttatttcagcccttatcagctcactgttctccacgtagacggggagctgtgtgcgagggatattaggtctttgatatttttaagcaaggacactatagggtctcgcagcacaccacagacattcttacactgggtgtactgtatggaaaacttagacctactgggtcccactgacgtggatgccctaatgtcaatgcttagatctttgtcaagagtagacctacagcgccaagtgcaaaccctaatgggccttcacctttccggcccatcacactcccaacactatcgccatacaccactcgagaccgatttctacgactacaaggacgacgatgacaagactagtggctccggcgagggcagaggaagtctactaacctgcggagatgtggaagaaaatcctggcccacatatgaccgagtacaagcccacggtgcgcctcgccacccgcgacgacgtccccagggccgtacgcaccctcgccgccgcgttcgccgactaccccgccacgcgccacaccgtcgatccggaccgccacatcgagcgggtcaccgagctgcaagaactcttcctcacgcgcgtcgggctcgacatcggcaaggtgtgggtcgcggacgacggcgccgcggtggcggtctggaccacgccggagagcgtcgaagcgggggcggtgttcgccgagatcggcccgcgcatggccgagttgagcggttcccggctggccgcgcagcaacagatggaaggcctcctggcgccgcaccggcccaaggagcccgcgtggttcctggccaccgtcggcgtctcgcccgaccaccagggcaagggtctgggcagcgccgtcgtgctccccggagtggaggcggccgagcgcgccggggtgcccgccttcctggagacctccgcgccccgcaacctccccttctacgagcggctcggcttcaccgtcaccgccgacgtcgaggtgcccgaaggaccgcgcacctggtgcatgacccgcaagcccggtgcctga

SEQ ID NO: 3421 - DNA, 2547 bp, synthetic construct
  source 1..2547: mol_type = other DNA
atggccttaccagtgaccgccttgctcctgccgctggccttgctgctccacgccgccaggccggacatcgtgctgacccagagccagaaattcatgagcaccagcgtgggcgacagagtgtccatcatctgtagagccagccagtctgtgggaacagccgtggcttggtatcagctgaaggccggacagagccccaagctgctgatctacagcgccagcaacagattcaccggcgtgcccgatagattcacaggcagcggctctggcaccgacttcaccctgacaatcagcaacgtgcagagcgaggacctggccgactacttctgtcagcagtacagcacataccctctggcctttggcgctggcaccaagctggaacttaaactcgagatccagaaccctgatcctgccgtgtaccagctgcgggatagcaagagcagcgacaagagcgtgtgtctgttcaccgacttcgacagccagaccaacgtgtcccagagcaaggactccgacgtgtacatcaccgataagtgcgtgctggacatgcggagcatggacttcaagagcaactccgccgtggcctggtccaacaagtccgatttcgcctgcgccaacgccttcaacaacagcattatccccgaggacacattcttcccaagcagcgacgtgccctgcgacgtgaagctggtggaaaagagcttcgagacagacaccaacctgaacttccagaacctgagcgtgatcggcttcagaatcctgctgctgaaagtggccggctttaacctgctgatgaccctgcggctgtggtccagccgcgccaagagaagcggatctggcgtgaagcagaccctgaatttcgacctgctgaagctggctggcgacgtggaatccaacccaggccctactagtatggactggatttggcgcatccttttccttgtcggcgctgctaccggcgcgcattccttcgaagaagtgcagctggttgaatctggcggcggaattgtgcagcctggcggatctctgaagctgagctgtgccgccagcggcttcaccttcaacgatttcggcatgagctggatcagacagacccctgacaagcggctggaactggtggctaccatcaacaccaatggcggcaccacacactaccccgactctgtgaagggcagattcagcatcagccgggacaacgccaagaaattcgtgtacctccagatgagcagcctgaagtccgacgacaccgccatctactactgccccagagaaggactggactactggggccagggaaccacactgacagtgtctagtacgcgtgaggacctgaagaacgtgttcccacctgaggtggccgtgttcgagcctagcaaggccgagatcgcccacacccagaaagccaccctcgtgtgcctggctaccggcttctaccccgaccatgtggaactgtcttggtgggtcaacggcaaagaggtgcacagcggcgtgtgtaccgacccccagccactgaaagaacagcccgccctgaacgacagccggtactgcctgagcagcagactgagagtgtccgccaccttctggcagaacccccggaaccacttcagatgccaggtgcagttctacggcctgagcgagaacgacgagtggacccaggacagagccaagcccgtgacccagatcgtgtctgccgaagcctggggcagagccgattgcggcatcaccagcgccagctaccaccagggcgtgctgagcgccaccatcctgtacgagatcctgctgggcaaggccaccctgtacgccgtgctggtgtctgccctggtgctgatggctatggtcaagcggaaggacagccggggaagggccaagcgatctggatctggagcaacaaacttctcactactcaaacaagcaggtgacgtggaggagaatcccgggccttctagaggccatatgaccgagtacaagcccacggtgcgcctcgccacccgcgacgacgtccccagggccgtacgcaccctcgccgccgcgttcgccgactaccccgccacgcgccacaccgtcgatccggaccgccacatcgagcgggtcaccgagctgcaagaactcttcctcacgcgcgtcgggctcgacatcggcaaggtgtgggtcgcggacgacggcgccgcggtggcggtctggaccacgccggagagcgtcgaagcgggggcggtgttcgccgagatcggcccgcgcatggccgagttgagcggttcccggctggccgcgcagcaacagatggaaggcctcctggcgccgcaccggcccaaggagcccgcgtggttcctggccaccgtcggcgtctcgcccgaccaccagggcaagggtctgggcagcgccgtcgtgctccccggagtggaggcggccgagcgcgccggggtgcccgccttcctggagacctccgcgccccgcaacctccccttctacgagcggctcggcttcaccgtcaccgccgacgtcgaggtgcccgaaggaccgcgcacctggtgcatgacccgcaagcccggtgcctga

SEQ ID NO: 3422 - DNA, 2544 bp, synthetic construct
  source 1..2544: mol_type = other DNA
atggccttaccagtgaccgccttgctcctgccgctggccttgctgctccacgccgccaggccggacatcgtgctgacccagagccagaaattcatgagcaccagcgtgggcgacagagtgtccatcatctgtagagccagccagtctgtgggaacagccgtggcttggtatcagctgaaggccggacagagccccaagctgctgatctacagcgccagcaacagattcaccggcgtgcccgatagattcacaggcagcggctctggcaccgacttcaccctgacaatcagcaacgtgcagagcgaggacctggccgactacttctgtcagcagtacagcacataccctctggcctttggcgctggcaccaagctggaacttaaactcgaggacctgaagaacgtgttcccacctgaggtggccgtgttcgagcctagcaaggccgagatcgcccacacccagaaagccaccctcgtgtgcctggctaccggcttctaccccgaccatgtggaactgtcttggtgggtcaacggcaaagaggtgcacagcggcgtgtgtaccgacccccagccactgaaagaacagcccgccctgaacgacagccggtactgcctgagcagcagactgagagtgtccgccaccttctggcagaacccccggaaccacttcagatgccaggtgcagttctacggcctgagcgagaacgacgagtggacccaggacagagccaagcccgtgacccagatcgtgtctgccgaagcctggggcagagccgattgcggcatcaccagcgccagctaccaccagggcgtgctgagcgccaccatcctgtacgagatcctgctgggcaaggccaccctgtacgccgtgctggtgtctgccctggtgctgatggctatggtcaagcggaaggacagccggggaagggccaagcgatctggatctggagcaacaaacttctcactactcaaacaagcaggtgacgtggaggagaatcccgggcctactagtatggactggatttggcgcatccttttccttgtcggcgctgctaccggcgcgcattccttcgaagaagtgcagctggttgaatctggcggcggaattgtgcagcctggcggatctctgaagctgagctgtgccgccagcggcttcaccttcaacgatttcggcatgagctggatcagacagacccctgacaagcggctggaactggtggctaccatcaacaccaatggcggcaccacacactaccccgactctgtgaagggcagattcagcatcagccgggacaacgccaagaaattcgtgtacctccagatgagcagcctgaagtccgacgacaccgccatctactactgccccagagaaggactggactactggggccagggaaccacactgacagtgtctagtacgcgtatccagaaccctgatcctgccgtgtaccagctgcgggatagcaagagcagcgacaagagcgtgtgtctgttcaccgacttcgacagccagaccaacgtgtcccagagcaaggactccgacgtgtacatcaccgataagtgcgtgctggacatgcggagcatggacttcaagagcaactccgccgtggcctggtccaacaagtccgatttcgcctgcgccaacgccttcaacaacagcattatccccgaggacacattcttcccaagcagcgacgtgccctgcgacgtgaagctggtggaaaagagcttcgagacagacaccaacctgaacttccagaacctgagcgtgatcggcttcagaatcctgctgctgaaagtggccggctttaacctgctgatgaccctgcggctgtggtccagccgcgccaagagaagcggatctggcgtgaagcagaccctgaatttcgacctgctgaagctggctggcgacgtggaatccaacccaggcccttctagaggccatatgaccgagtacaagcccacggtgcgcctcgccacccgcgacgacgtccccagggccgtacgcaccctcgccgccgcgttcgccgactaccccgccacgcgccacaccgtcgatccggaccgccacatcgagcgggtcaccgagctgcaagaactcttcctcacgcgcgtcgggctcgacatcggcaaggtgtgggtcgcggacgacggcgccgcggtggcggtctggaccacgccggagagcgtcgaagcgggggcggtgttcgccgagatcggcccgcgcatggccgagttgagcggttcccggctggccgcgcagcaacagatggaaggcctcctggcgccgcaccggcccaaggagcccgcgtggttcctggccaccgtcggcgtctcgcccgaccaccagggcaagggtctgggcagcgccgtcgtgctccccggagtggaggcggccgagcgcgccggggtgcccgccttcctggagacctccgcgccccgcaacctccccttctacgagcggctcggcttcaccgtcaccgccgacgtcgaggtgcccgaaggaccgcgcacctggtgcatgacccgcaagcccggtgcctga

SEQ ID NO: 3423 - DNA, 1842 bp, synthetic construct
  source 1..1842: mol_type = other DNA
atggccttaccagtgaccgccttgctcctgccgctggccttgctgctccacgccgccaggccggacatcgtgctgacccagagccagaaattcatgagcaccagcgtgggcgacagagtgtccatcatctgtagagccagccagtctgtgggaacagccgtggcttggtatcagctgaaggccggacagagccccaagctgctgatctacagcgccagcaacagattcaccggcgtgcccgatagattcacaggcagcggctctggcaccgacttcaccctgacaatcagcaacgtgcagagcgaggacctggccgactacttctgtcagcagtacagcacataccctctggcctttggcgctggcaccaagctggaacttaaactcgaggacctgaagaacgtgttcccacctgaggtggccgtgttcgagcctagcgaggccgagatcagccacacccagaaagccaccctcgtgtgcctggctaccggcttctaccccgaccatgtggaactgtcttggtgggtcaacggcaaagaggtgcacagcggcgtgtgtaccgacccccagccactgaaagaacagcccgccctgaacgacagccggtactgcctgagcagcagactgagagtgtccgccaccttctggcagaacccccggaaccacttcagatgccaggtgcagttctacggcctgagcgagaacgacgagtggacccaggacagagccaagcccgtgacccagatcgtgtctgccgaagcctggggcagagccgattgcggctttaccagcgagagctaccagcagggcgtgctgagcgccaccatcctgtacgagatcctgctgggcaaggccaccctgtacgccgtgctggtgtctgccctggtgctgatggctatggtcaagcggaaggacagccggggaagggccaagcgatctggatctggagcaacaaacttctcactactcaaacaagcaggtgacgtggaggagaatcccgggcctactagtatggactggatttggcgcatccttttccttgtcggcgctgctaccggcgcgcattccttcgaagaagtgcagctggttgaatctggcggcggaattgtgcagcctggcggatctctgaagctgagctgtgccgccagcggcttcaccttcaacgatttcggcatgagctggatcagacagacccctgacaagcggctggaactggtggctaccatcaacaccaatggcggcaccacacactaccccgactctgtgaagggcagattcagcatcagccgggacaacgccaagaaattcgtgtacctccagatgagcagcctgaagtccgacgacaccgccatctactactgccccagagaaggactggactactggggccagggaaccacactgacagtgtctagtacgcgtatccagaaccctgatcctgccgtgtaccagctgcgggatagcaagagcagcgacaagagcgtgtgtctgttcaccgacttcgacagccagaccaacgtgtcccagagcaaggactccgacgtgtacatcaccgataagtgcgtgctggacatgcggagcatggacttcaagagcaactccgccgtggcctggtccaacaagtccgatttcgcctgcgccaacgccttcaacaacagcattatccccgaggacacattcttcccaagccccgagagcagctgcgacgtgaagctggtggaaaagagcttcgagacagacaccaacctgaacttccagaacctgagcgtgatcggcttcagaatcctgctgctgaaagtggccggctttaacctgctgatgaccctgcggctgtggtccagc

SEQ ID NO: 3424 - DNA, 2517 bp, synthetic construct
  source 1..2517: mol_type = other DNA
atggccttaccagtgaccgccttgctcctgccgctggccttgctgctccacgccgccaggccggacatcgtgctgacccagagccagaaattcatgagcaccagcgtgggcgacagagtgtccatcatctgtagagccagccagtctgtgggaacagccgtggcttggtatcagctgaaggccggacagagccccaagctgctgatctacagcgccagcaacagattcaccggcgtgcccgatagattcacaggcagcggctctggcaccgacttcaccctgacaatcagcaacgtgcagagcgaggacctggccgactacttctgtcagcagtacagcacataccctctggcctttggcgctggcaccaagctggaacttaaactcgaggacctgaagaacgtgttcccacctgaggtggccgtgttcgagcctagcgaggccgagatcagccacacccagaaagccaccctcgtgtgcctggctaccggcttctaccccgaccatgtggaactgtcttggtgggtcaacggcaaagaggtgcacagcggcgtgtgtaccgacccccagccactgaaagaacagcccgccctgaacgacagccggtactgcctgagcagcagactgagagtgtccgccaccttctggcagaacccccggaaccacttcagatgccaggtgcagttctacggcctgagcgagaacgacgagtggacccaggacagagccaagcccgtgacccagatcgtgtctgccgaagcctggggcagagccgattgcggctttaccagcgagagctaccagcagggcgtgctgagcgccaccatcctgtacgagatcctgctgggcaaggccaccctgtacgccgtgctggtgtctgccctggtgctgatggctatggtcaagcggaaggacagccggggaagggccaagcgatctggatctggagcaacaaacttctcactactcaaacaagcaggtgacgtggaggagaatcccgggcctactagtatggactggatttggcgcatccttttccttgtcggcgctgctaccggcgcgcattccttcgaagaagtgcagctggttgaatctggcggcggaattgtgcagcctggcggatctctgaagctgagctgtgccgccagcggcttcaccttcaacgatttcggcatgagctggatcagacagacccctgacaagcggctggaactggtggctaccatcaacaccaatggcggcaccacacactaccccgactctgtgaagggcagattcagcatcagccgggacaacgccaagaaattcgtgtacctccagatgagcagcctgaagtccgacgacaccgccatctactactgccccagagaaggactggactactggggccagggaaccacactgacagtgtctagtacgcgtatccagaaccctgatcctgccgtgtaccagctgcgggatagcaagagcagcgacaagagcgtgtgtctgttcaccgacttcgacagccagaccaacgtgtcccagagcaaggactccgacgtgtacatcaccgataagtgcgtgctggacatgcggagcatggacttcaagagcaactccgccgtggcctggtccaacaagtccgatttcgcctgcgccaacgccttcaacaacagcattatccccgaggacacattcttcccaagccccgagagcagctgcgacgtgaagctggtggaaaagagcttcgagacagacaccaacctgaacttccagaacctgagcgtgatcggcttcagaatcctgctgctgaaagtggccggctttaacctgctgatgaccctgcggctgtggtccagccgcgccaagagaagcggatctggcgtgaagcagaccctgaatttcgacctgctgaagctggctggcgacgtggaatccaacccaggcccttctagaggcgggatccacaccatggctacctacgaggtgctgtgcgaggtggcaagaaagctgggcaccgacgacagagaagtggtgctgttcctgctgaacgtgttcatccctcagcctacactggcccagctgatcggtgcactgagagccctgaaagaggaaggccggctgacctttcctctgctggccgaatgcctgttcagagccggaagaagggatctgctgcgggacctgctgcatctggaccccagatttctggaaagacacctggccggcaccatgagctacttcagcccttaccagctgaccgtgctgcacgttgacggcgaactgtgcgccagagatattcggagcctgatcttcctgagcaaggacaccatcggcagccggtctacccctcagacatttctgcactgggtgtactgcatggaaaacctggacctgctcggccccacagatgtggatgccctgatgtccatgctgagaagcctgagcagagtggacctccagagacaggtgcagacactgatgggactgcacctgagcggacctagccacagccagcactacagacacacccct

SEQ ID NO: 3425 - DNA, 1854 bp, synthetic construct
  source 1..1854: mol_type = other DNA
atggccttaccagtgaccgccttgctcctgccgctggccttgctgctccacgccgccaggccggacatcgtgctgacccagagccagaaattcatgagcaccagcgtgggcgacagagtgtccatcatctgtagagccagccagtctgtgggaacagccgtggcttggtatcagctgaaggccggacagagccccaagctgctgatctacagcgccagcaacagattcaccggcgtgcccgatagattcacaggcagcggctctggcaccgacttcaccctgacaatcagcaacgtgcagagcgaggacctggccgactacttctgtcagcagtacagcacataccctctggcctttggcgctggcaccaagctggaacttaaactcgagatccagaaccctgatcctgccgtgtaccagctgcgggatagcaagagcagcgacaagagcgtgtgtctgttcaccgacttcgacagccagaccaacgtgtcccagagcaaggactccgacgtgtacatcaccgataagtgcgtgctggacatgcggagcatggacttcaagagcaactccgccgtggcctggtccaacaagtccgatttcgcctgcgccaacgccttcaacaacagcattatccccgaggacacattcttcccaagccccgagagcagctgcgacgtgaagctggtggaaaagagcttcgagacagacaccaacctgaacttccagaacctgagcgtgatcggcttcagaatcctgctgctgaaagtggccggctttaacctgctgatgaccctgcggctgtggtccagccgcgccaagagaagcggatctggcgtgaagcagaccctgaatttcgacctgctgaagctggctggcgacgtggaatccaacccaggccctactagtatggactggatttggcgcatccttttccttgtcggcgctgctaccggcgcgcattccttcgaagaagtgcagctggttgaatctggcggcggaattgtgcagcctggcggatctctgaagctgagctgtgccgccagcggcttcaccttcaacgatttcggcatgagctggatcagacagacccctgacaagcggctggaactggtggctaccatcaacaccaatggcggcaccacacactaccccgactctgtgaagggcagattcagcatcagccgggacaacgccaagaaattcgtgtacctccagatgagcagcctgaagtccgacgacaccgccatctactactgccccagagaaggactggactactggggccagggaaccacactgacagtgtctagtacgcgtgaggacctgaagaacgtgttcccacctgaggtggccgtgttcgagcctagcgaggccgagatcagccacacccagaaagccaccctcgtgtgcctggctaccggcttctaccccgaccatgtggaactgtcttggtgggtcaacggcaaagaggtgcacagcggcgtgtgtaccgacccccagccactgaaagaacagcccgccctgaacgacagccggtactgcctgagcagcagactgagagtgtccgccaccttctggcagaacccccggaaccacttcagatgccaggtgcagttctacggcctgagcgagaacgacgagtggacccaggacagagccaagcccgtgacccagatcgtgtctgccgaagcctggggcagagccgattgcggctttaccagcgagagctaccagcagggcgtgctgagcgccaccatcctgtacgagatcctgctgggcaaggccaccctgtacgccgtgctggtgtctgccctggtgctgatggctatggtcaagcggaaggacagccgggga

SEQ ID NO: 3426 - DNA, 2520 bp, synthetic construct
  source 1..2520: mol_type = other DNA
atggccttaccagtgaccgccttgctcctgccgctggccttgctgctccacgccgccaggccggacatcgtgctgacccagagccagaaattcatgagcaccagcgtgggcgacagagtgtccatcatctgtagagccagccagtctgtgggaacagccgtggcttggtatcagctgaaggccggacagagccccaagctgctgatctacagcgccagcaacagattcaccggcgtgcccgatagattcacaggcagcggctctggcaccgacttcaccctgacaatcagcaacgtgcagagcgaggacctggccgactacttctgtcagcagtacagcacataccctctggcctttggcgctggcaccaagctggaacttaaactcgagatccagaaccctgatcctgccgtgtaccagctgcgggatagcaagagcagcgacaagagcgtgtgtctgttcaccgacttcgacagccagaccaacgtgtcccagagcaaggactccgacgtgtacatcaccgataagtgcgtgctggacatgcggagcatggacttcaagagcaactccgccgtggcctggtccaacaagtccgatttcgcctgcgccaacgccttcaacaacagcattatccccgaggacacattcttcccaagccccgagagcagctgcgacgtgaagctggtggaaaagagcttcgagacagacaccaacctgaacttccagaacctgagcgtgatcggcttcagaatcctgctgctgaaagtggccggctttaacctgctgatgaccctgcggctgtggtccagccgcgccaagagaagcggatctggcgtgaagcagaccctgaatttcgacctgctgaagctggctggcgacgtggaatccaacccaggccctactagtatggactggatttggcgcatccttttccttgtcggcgctgctaccggcgcgcattccttcgaagaagtgcagctggttgaatctggcggcggaattgtgcagcctggcggatctctgaagctgagctgtgccgccagcggcttcaccttcaacgatttcggcatgagctggatcagacagacccctgacaagcggctggaactggtggctaccatcaacaccaatggcggcaccacacactaccccgactctgtgaagggcagattcagcatcagccgggacaacgccaagaaattcgtgtacctccagatgagcagcctgaagtccgacgacaccgccatctactactgccccagagaaggactggactactggggccagggaaccacactgacagtgtctagtacgcgtgaggacctgaagaacgtgttcccacctgaggtggccgtgttcgagcctagcgaggccgagatcagccacacccagaaagccaccctcgtgtgcctggctaccggcttctaccccgaccatgtggaactgtcttggtgggtcaacggcaaagaggtgcacagcggcgtgtgtaccgacccccagccactgaaagaacagcccgccctgaacgacagccggtactgcctgagcagcagactgagagtgtccgccaccttctggcagaacccccggaaccacttcagatgccaggtgcagttctacggcctgagcgagaacgacgagtggacccaggacagagccaagcccgtgacccagatcgtgtctgccgaagcctggggcagagccgattgcggctttaccagcgagagctaccagcagggcgtgctgagcgccaccatcctgtacgagatcctgctgggcaaggccaccctgtacgccgtgctggtgtctgccctggtgctgatggctatggtcaagcggaaggacagccggggaagggccaagcgatctggatctggagcaacaaacttctcactactcaaacaagcaggtgacgtggaggagaatcccgggccttctagaggcgggatccacaccatggctacctacgaggtgctgtgcgaggtggcaagaaagctgggcaccgacgacagagaagtggtgctgttcctgctgaacgtgttcatccctcagcctacactggcccagctgatcggtgcactgagagccctgaaagaggaaggccggctgacctttcctctgctggccgaatgcctgttcagagccggaagaagggatctgctgcgggacctgctgcatctggaccccagatttctggaaagacacctggccggcaccatgagctacttcagcccttaccagctgaccgtgctgcacgttgacggcgaactgtgcgccagagatattcggagcctgatcttcctgagcaaggacaccatcggcagccggtctacccctcagacatttctgcactgggtgtactgcatggaaaacctggacctgctcggccccacagatgtggatgccctgatgtccatgctgagaagcctgagcagagtggacctccagagacaggtgcagacactgatgggactgcacctgagcggacctagccacagccagcactacagacacacccct

SEQ ID NO: 3427 - DNA, 2679 bp, synthetic construct
  source 1..2679: mol_type = other DNA
atggccttaccagtgaccgccttgctcctgccgctggccttgctgctccacgccgccaggccgctcgaggggaaaccaattcccaaccctcttctgggactggattcaaccggcagcggcgaggacctgaagaacgtgttcccacctgaggtggccgtgttcgagcctagcaaggccgagatcgcccacacccagaaagccaccctcgtgtgcctggctaccggcttctaccccgaccatgtggaactgtcttggtgggtcaacggcaaagaggtgcacagcggcgtgtgtaccgacccccagccactgaaagaacagcccgccctgaacgacagccggtactgcctgagcagcagactgagagtgtccgccaccttctggcagaacccccggaaccacttcagatgccaggtgcagttctacggcctgagcgagaacgacgagtggacccaggacagagccaagcccgtgacccagatcgtgtctgccgaagcctggggcagagccgattgcggcatcaccagcgccagctaccaccagggcgtgctgagcgccaccatcctgtacgagatcctgctgggcaaggccaccctgtacgccgtgctggtgtctgccctggtgctgatggctatggtcaagcggaaggacagccggggaagggccaagcgatctggatctggagcaacaaacttctcactactcaaacaagcaggtgacgtggaggagaatcccgggcctactagcatggccttaccagtgaccgccttgctcctgccgctggccttgctgctccacgccgccaggccggacatcgtgctgacccagagccagaaattcatgagcaccagcgtgggcgacagagtgtccatcatctgtagagccagccagtctgtgggaacagccgtggcttggtatcagctgaaggccggacagagccccaagctgctgatctacagcgccagcaacagattcaccggcgtgcccgatagattcacaggcagcggctctggcaccgacttcaccctgacaatcagcaacgtgcagagcgaggacctggccgactacttctgtcagcagtacagcacataccctctggcctttggcgctggcaccaagctggaacttaaaggcggaggcggaagtggaggcggaggatctggcggcggaggctctgaagtgcagctggttgaatctggcggcggaattgtgcagcctggcggatctctgaagctgagctgtgccgccagcggcttcaccttcaacgatttcggcatgagctggatcagacagacccctgacaagcggctggaactggtggctaccatcaacaccaatggcggcaccacacactaccccgactctgtgaagggcagattcagcatcagccgggacaacgccaagaaattcgtgtacctccagatgagcagcctgaagtccgacgacaccgccatctactactgccccagagaaggactggactactggggccagggaaccacactgacagtgtctagtacgcgtgagcagaaactgatctcggaagaggatgggagcggcatccagaaccctgatcctgccgtgtaccagctgcgggatagcaagagcagcgacaagagcgtgtgtctgttcaccgacttcgacagccagaccaacgtgtcccagagcaaggactccgacgtgtacatcaccgataagtgcgtgctggacatgcggagcatggacttcaagagcaactccgccgtggcctggtccaacaagtccgatttcgcctgcgccaacgccttcaacaacagcattatccccgaggacacattcttcccaagcagcgacgtgccctgcgacgtgaagctggtggaaaagagcttcgagacagacaccaacctgaacttccagaacctgagcgtgatcggcttcagaatcctgctgctgaaagtggccggctttaacctgctgatgaccctgcggctgtggtccagccgcgccaagagaagcggatctggcgtgaagcagaccctgaatttcgacctgctgaagctggctggcgacgtggaatccaacccaggcccttctagaggccatatgaccgagtacaagcccacggtgcgcctcgccacccgcgacgacgtccccagggccgtacgcaccctcgccgccgcgttcgccgactaccccgccacgcgccacaccgtcgatccggaccgccacatcgagcgggtcaccgagctgcaagaactcttcctcacgcgcgtcgggctcgacatcggcaaggtgtgggtcgcggacgacggcgccgcggtggcggtctggaccacgccggagagcgtcgaagcgggggcggtgttcgccgagatcggcccgcgcatggccgagttgagcggttcccggctggccgcgcagcaacagatggaaggcctcctggcgccgcaccggcccaaggagcccgcgtggttcctggccaccgtcggcgtctcgcccgaccaccagggcaagggtctgggcagcgccgtcgtgctccccggagtggaggcggccgagcgcgccggggtgcccgccttcctggagacctccgcgccccgcaacctccccttctacgagcggctcggcttcaccgtcaccgccgacgtcgaggtgcccgaaggaccgcgcacctggtgcatgacccgcaagcccggtgcctga

SEQ ID NO: 3428 - DNA, 2682 bp, synthetic construct
  source 1..2682: mol_type = other DNA
atggccttaccagtgaccgccttgctcctgccgctggccttgctgctccacgccgccaggccgctcgagcagaaactgatctcggaagaggatctgggctccggcgatcgccctgatcctgccgtgtaccagctgcgggatagcaagagcagcgacaagagcgtgtgtctgttcaccgacttcgacagccagaccaacgtgtcccagagcaaggactccgacgtgtacatcaccgataagtgcgtgctggacatgcggagcatggacttcaagagcaactccgccgtggcctggtccaacaagtccgatttcgcctgcgccaacgccttcaacaacagcattatccccgaggacacattcttcccaagccccgagagcagctgcgacgtgaagctggtggaaaagagcttcgagacagacaccaacctgaacttccagaacctgagcgtgatcggcttcagaatcctgctgctgaaagtggccggctttaacctgctgatgaccctgcggctgtggtccagctctagtcgcgccaagagaagcggatctggcgtgaagcagaccctgaatttcgacctgctgaagctggctggcgacgtggaatccaacccaggccccactagcatggccttaccagtgaccgccttgctcctgccgctggccttgctgctccacgccgccaggccggacatcgtgctgacccagagccagaaattcatgagcaccagcgtgggcgacagagtgtccatcatctgtagagccagccagtctgtgggaacagccgtggcttggtatcagctgaaggccggacagagccccaagctgctgatctacagcgccagcaacagattcaccggcgtgcccgatagattcacaggcagcggctctggcaccgacttcaccctgacaatcagcaacgtgcagagcgaggacctggccgactacttctgtcagcagtacagcacataccctctggcctttggcgctggcaccaagctggaacttaaaggcggaggcggaagtggaggcggaggatctggcggcggaggctctgaagtgcagctggttgaatctggcggcggaattgtgcagcctggcggatctctgaagctgagctgtgccgccagcggcttcaccttcaacgatttcggcatgagctggatcagacagacccctgacaagcggctggaactggtggctaccatcaacaccaatggcggcaccacacactaccccgactctgtgaagggcagattcagcatcagccgggacaacgccaagaaattcgtgtacctccagatgagcagcctgaagtccgacgacaccgccatctactactgccccagagaaggactggactactggggccagggaaccacactgacagtgtctagtacgcgtgggaaaccaattcccaaccctcttctgggactggattcaaccggcagcggcgaggacctgaagaacgtgttcccacctgaggtggccgtgttcgagcctagcgaggccgagatcagccacacccagaaagccaccctcgtgtgcctggctaccggcttctaccccgaccatgtggaactgtcttggtgggtcaacggcaaagaggtgcacagcggcgtgtgtaccgacccccagccactgaaagaacagcccgccctgaacgacagccggtactgcctgagcagcagactgagagtgtccgccaccttctggcagaacccccggaaccacttcagatgccaggtgcagttctacggcctgagcgagaacgacgagtggacccaggacagagccaagcccgtgacccagatcgtgtctgccgaagcctggggcagagccgattgcggctttaccagcgagagctaccagcagggcgtgctgagcgccaccatcctgtacgagatcctgctgggcaaggccaccctgtacgccgtgctggtgtctgccctggtgctgatggctatggtcaagcggaaggacagccggggaagggccaagcgatctggatctggagcaacaaacttctcactactcaaacaagcaggtgacgtggaggagaatcccgggccttctagaggccatatgaccgagtacaagcccacggtgcgcctcgccacccgcgacgacgtccccagggccgtacgcaccctcgccgccgcgttcgccgactaccccgccacgcgccacaccgtcgatccggaccgccacatcgagcgggtcaccgagctgcaagaactcttcctcacgcgcgtcgggctcgacatcggcaaggtgtgggtcgcggacgacggcgccgcggtggcggtctggaccacgccggagagcgtcgaagcgggggcggtgttcgccgagatcggcccgcgcatggccgagttgagcggttcccggctggccgcgcagcaacagatggaaggcctcctggcgccgcaccggcccaaggagcccgcgtggttcctggccaccgtcggcgtctcgcccgaccaccagggcaagggtctgggcagcgccgtcgtgctccccggagtggaggcggccgagcgcgccggggtgcccgccttcctggagacctccgcgccccgcaacctccccttctacgagcggctcggcttcaccgtcaccgccgacgtcgaggtgcccgaaggaccgcgcacctggtgcatgacccgcaagcccggtgcctga

SEQ ID NO: 3429 - DNA, 2544 bp, synthetic construct
  source 1..2544: mol_type = other DNA
atggccttaccagtgaccgccttgctcctgccgctggccttgctgctccacgccgccaggccggacatcgtgctgacccagagccagaaattcatgagcaccagcgtgggcgacagagtgtccatcatctgtagagccagccagtctgtgggaacagccgtggcttggtatcagctgaaggccggacagagccccaagctgctgatctacagcgccagcaacagattcaccggcgtgcccgatagattcacaggcagcggctctggcaccgacttcaccctgacaatcagcaacgtgcagagcgaggacctggccgactacttctgtcagcagtacagcacataccctctggcctttggcgctggcaccaagctggaacttaaactcgaggacctgaagaacgtgttcccacctgaggtggccgtgttcgagcctagcgaggccgagatcagccacacccagaaagccaccctcgtgtgcctggctaccggcttctaccccgaccatgtggaactgtcttggtgggtcaacggcaaagaggtgcacagcggcgtgtctaccgacccccagccactgaaagaacagcccgccctgaacgacagccggtactgcctgagcagcagactgagagtgtccgccaccttctggcagaacccccggaaccacttcagatgccaggtgcagttctacggcctgagcgagaacgacgagtggacccaggacagagccaagcccgtgacccagatcgtgtctgccgaagcctggggcagagccgattgcggctttaccagcgagagctaccagcagggcgtgctgagcgccaccatcctgtacgagatcctgctgggcaaggccaccctgtacgccgtgctggtgtctgccctggtgctgatggctatggtcaagcggaaggacagccggggaagggccaagcgatctggatctggagcaacaaacttctcactactcaaacaagcaggtgacgtggaggagaatcccgggcctactagtatggactggatttggcgcatccttttccttgtcggcgctgctaccggcgcgcattccttcgaagaagtgcagctggttgaatctggcggcggaattgtgcagcctggcggatctctgaagctgagctgtgccgccagcggcttcaccttcaacgatttcggcatgagctggatcagacagacccctgacaagcggctggaactggtggctaccatcaacaccaatggcggcaccacacactaccccgactctgtgaagggcagattcagcatcagccgggacaacgccaagaaattcgtgtacctccagatgagcagcctgaagtccgacgacaccgccatctactactgccccagagaaggactggactactggggccagggaaccacactgacagtgtctagtacgcgtatccagaaccctgatcctgccgtgtaccagctgcgggatagcaagagcagcgacaagagcgtgtgtctgttcaccgacttcgacagccagaccaacgtgtcccagagcaaggactccgacgtgtacatcaccgataagaccgtgctggacatgcggagcatggacttcaagagcaactccgccgtggcctggtccaacaagtccgatttcgcctgcgccaacgccttcaacaacagcattatccccgaggacacattcttcccaagccccgagagcagctgcgacgtgaagctggtggaaaagagcttcgagacagacaccaacctgaacttccagaacctgagcgtgatcggcttcagaatcctgctgctgaaagtggccggctttaacctgctgatgaccctgcggctgtggtccagccgcgccaagagaagcggatctggcgtgaagcagaccctgaatttcgacctgctgaagctggctggcgacgtggaatccaacccaggcccttctagaggccatatgaccgagtacaagcccacggtgcgcctcgccacccgcgacgacgtccccagggccgtacgcaccctcgccgccgcgttcgccgactaccccgccacgcgccacaccgtcgatccggaccgccacatcgagcgggtcaccgagctgcaagaactcttcctcacgcgcgtcgggctcgacatcggcaaggtgtgggtcgcggacgacggcgccgcggtggcggtctggaccacgccggagagcgtcgaagcgggggcggtgttcgccgagatcggcccgcgcatggccgagttgagcggttcccggctggccgcgcagcaacagatggaaggcctcctggcgccgcaccggcccaaggagcccgcgtggttcctggccaccgtcggcgtctcgcccgaccaccagggcaagggtctgggcagcgccgtcgtgctccccggagtggaggcggccgagcgcgccggggtgcccgccttcctggagacctccgcgccccgcaacctccccttctacgagcggctcggcttcaccgtcaccgccgacgtcgaggtgcccgaaggaccgcgcacctggtgcatgacccgcaagcccggtgcctga

SEQ ID NO: 3430 - DNA, 2790 bp, synthetic construct
  source 1..2790: mol_type = other DNA
atggccttaccagtgaccgccttgctcctgccgctggccttgctgctccacgccgccaggccggacatcgtgctgacccagagccagaaattcatgagcaccagcgtgggcgacagagtgtccatcatctgtagagccagccagtctgtgggaacagccgtggcttggtatcagctgaaggccggacagagccccaagctgctgatctacagcgccagcaacagattcaccggcgtgcccgatagattcacaggcagcggctctggcaccgacttcaccctgacaatcagcaacgtgcagagcgaggacctggccgactacttctgtcagcagtacagcacataccctctggcctttggcgctggcaccaagctggaacttaaactcgaggacctgaagaacgtgttcccacctgaggtggccgtgttcgagcctagcgaggccgagatcagccacacccagaaagccaccctcgtgtgcctggctaccggcttctaccccgaccatgtggaactgtcttggtgggtcaacggcaaagaggtgcacagcggcgtgtctaccgacccccagccactgaaagaacagcccgccctgaacgacagccggtactgcctgagcagcagactgagagtgtccgccaccttctggcagaacccccggaaccacttcagatgccaggtgcagttctacggcctgagcgagaacgacgagtggacccaggacagagccaagcccgtgacccagatcgtgtctgccgaagcctggggcagagccgattgcggctttaccagcgagagctaccagcagggcgtgctgagcgccaccatcctgtacgagatcctgctgggcaaggccaccctgtacgccgtgctggtgtctgccctggtgctgatggctatggtcaagcggaaggacagccggggaagggccaagcgatctggatctggagcaacaaacttctcactactcaaacaagcaggtgacgtggaggagaatcccgggcctactagtatggactggatttggcgcatccttttccttgtcggcgctgctaccggcgcgcattccttcgaagaagtgcagctggttgaatctggcggcggaattgtgcagcctggcggatctctgaagctgagctgtgccgccagcggcttcaccttcaacgatttcggcatgagctggatcagacagacccctgacaagcggctggaactggtggctaccatcaacaccaatggcggcaccacacactaccccgactctgtgaagggcagattcagcatcagccgggacaacgccaagaaattcgtgtacctccagatgagcagcctgaagtccgacgacaccgccatctactactgccccagagaaggactggactactggggccagggaaccacactgacagtgtctagtacgcgtgagcagaaactgatctcggaagaggatgggagcggcaccccattcccttctctggcccctcccatcatgctgctggtggacggcaagcagcagatggtggtcgtgtgcctggtgctggatgtggccccacctggactggacagccccatctggtttagcgccggcaatggctctgccctggacgcctttacctacggcccaagccctgccaccgatggcacctggacaaatctggcccacctgagcctgcccagcgaggaactggcttcttgggagcctctcgtgtgccacacaggacctggcgctgagggacacagcagatccacccagcctatgcacctgtctggcgaggccagcaccgccagaacctgtcctcaggaacctctgagaggcacccctggcggagcactgtggctgggagtgctgagactgctgctgttcaagctgctgctgtttgacctgctgctgacctgctcctgtctgtgcgatcctgccggccctctgccttctcctgccaccaccacaagactgagagccctgggcagccacagactgcaccctgccacagagacaggcggcagagaggccacaagcagccctagaccccagcccagagacagaagatggggcgataccccccctggcagaaagcctggatctccagtccgcgccaagagaagcggatctggcgtgaagcagaccctgaatttcgacctgctgaagctggctggcgacgtggaatccaacccaggcccttctagaggccatatgaccgagtacaagcccacggtgcgcctcgccacccgcgacgacgtccccagggccgtacgcaccctcgccgccgcgttcgccgactaccccgccacgcgccacaccgtcgatccggaccgccacatcgagcgggtcaccgagctgcaagaactcttcctcacgcgcgtcgggctcgacatcggcaaggtgtgggtcgcggacgacggcgccgcggtggcggtctggaccacgccggagagcgtcgaagcgggggcggtgttcgccgagatcggcccgcgcatggccgagttgagcggttcccggctggccgcgcagcaacagatggaaggcctcctggcgccgcaccggcccaaggagcccgcgtggttcctggccaccgtcggcgtctcgcccgaccaccagggcaagggtctgggcagcgccgtcgtgctccccggagtggaggcggccgagcgcgccggggtgcccgccttcctggagacctccgcgccccgcaacctccccttctacgagcggctcggcttcaccgtcaccgccgacgtcgaggtgcccgaaggaccgcgcacctggtgcatgacccgcaagcccggtgcctga

SEQ ID NO: 3431 - DNA, 2844 bp, synthetic construct
  source 1..2844: mol_type = other DNA
atggccttaccagtgaccgccttgctcctgccgctggccttgctgctccacgccgccaggccgctcgaggacctgaagaacgtgttcccacctgaggtggccgtgttcgagcctagcgaggccgagatcagccacacccagaaagccaccctcgtgtgcctggctaccggcttctaccccgaccatgtggaactgtcttggtgggtcaacggcaaagaggtgcacagcggcgtgtctaccgacccccagccactgaaagaacagcccgccctgaacgacagccggtactgcctgagcagcagactgagagtgtccgccaccttctggcagaacccccggaaccacttcagatgccaggtgcagttctacggcctgagcgagaacgacgagtggacccaggacagagccaagcccgtgacccagatcgtgtctgccgaagcctggggcagagccgattgcggctttaccagcgagagctaccagcagggcgtgctgagcgccaccatcctgtacgagatcctgctgggcaaggccaccctgtacgccgtgctggtgtctgccctggtgctgatggctatggtcaagcggaaggacagccggggaagggccaagcgatctggatctggagcaacaaacttctcactactcaaacaagcaggtgacgtggaggagaatcccgggcctactagcatggccttaccagtgaccgccttgctcctgccgctggccttgctgctccacgccgccaggccggacatcgtgctgacccagagccagaaattcatgagcaccagcgtgggcgacagagtgtccatcatctgtagagccagccagtctgtgggaacagccgtggcttggtatcagctgaaggccggacagagccccaagctgctgatctacagcgccagcaacagattcaccggcgtgcccgatagattcacaggcagcggctctggcaccgacttcaccctgacaatcagcaacgtgcagagcgaggacctggccgactacttctgtcagcagtacagcacataccctctggcctttggcgctggcaccaagctggaacttaaaggcggaggcggaagtggaggcggaggatctggcggcggaggctctgaagtgcagctggttgaatctggcggcggaattgtgcagcctggcggatctctgaagctgagctgtgccgccagcggcttcaccttcaacgatttcggcatgagctggatcagacagacccctgacaagcggctggaactggtggctaccatcaacaccaatggcggcaccacacactaccccgactctgtgaagggcagattcagcatcagccgggacaacgccaagaaattcgtgtacctccagatgagcagcctgaagtccgacgacaccgccatctactactgccccagagaaggactggactactggggccagggaaccacactgacagtgtctagtacgcgtgagcagaaactgatctcggaagaggatctggggagcggcaccccattcccttctctggcccctcccatcatgctgctggtggacggcaagcagcagatggtggtcgtgtgcctggtgctggatgtggccccacctggactggacagccccatctggtttagcgccggcaatggctctgccctggacgcctttacctacggcccaagccctgccaccgatggcacctggacaaatctggcccacctgagcctgcccagcgaggaactggcttcttgggagcctctcgtgtgccacacaggacctggcgctgagggacacagcagatccacccagcctatgcacctgtctggcgaggccagcaccgccagaacctgtcctcaggaacctctgagaggcacccctggcggagcactgtggctgggagtgctgagactgctgctgttcaagctgctgctgtttgacctgctgctgacctgctcctgtctgtgcgatcctgccggccctctgccttctcctgccaccaccacaagactgagagccctgggcagccacagactgcaccctgccacagagacaggcggcagagaggccacaagcagccctagaccccagcccagagacagaagatggggcgataccccccctggcagaaagcctggatctccagtccgcgccaagagaagcggatctggcgtgaagcagaccctgaatttcgacctgctgaagctggctggcgacgtggaatccaacccaggcccttctagatctagaggccatatgaccgagtacaagcccacggtgcgcctcgccacccgcgacgacgtccccagggccgtacgcaccctcgccgccgcgttcgccgactaccccgccacgcgccacaccgtcgatccggaccgccacatcgagcgggtcaccgagctgcaagaactcttcctcacgcgcgtcgggctcgacatcggcaaggtgtgggtcgcggacgacggcgccgcggtggcggtctggaccacgccggagagcgtcgaagcgggggcggtgttcgccgagatcggcccgcgcatggccgagttgagcggttcccggctggccgcgcagcaacagatggaaggcctcctggcgccgcaccggcccaaggagcccgcgtggttcctggccaccgtcggcgtctcgcccgaccaccagggcaagggtctgggcagcgccgtcgtgctccccggagtggaggcggccgagcgcgccggggtgcccgccttcctggagacctccgcgccccgcaacctccccttctacgagcggctcggcttcaccgtcaccgccgacgtcgaggtgcccgaaggaccgcgcacctggtgcatgacccgcaagcccggtgcctga

SEQ ID NO: 3432 - DNA, 2655 bp, synthetic construct
  source 1..2655: mol_type = other DNA
atggccttaccagtgaccgccttgctcctgccgctggccttgctgctccacgccgccaggccggacatcgtgctgacccagagccagaaattcatgagcaccagcgtgggcgacagagtgtccatcatctgtagagccagccagtctgtgggaacagccgtggcttggtatcagctgaaggccggacagagccccaagctgctgatctacagcgccagcaacagattcaccggcgtgcccgatagattcacaggcagcggctctggcaccgacttcaccctgacaatcagcaacgtgcagagcgaggacctggccgactacttctgtcagcagtacagcacataccctctggcctttggcgctggcaccaagctggaacttaaactcgaggggaaaccaattcccaaccctcttctgggactggattcaaccggcagcggcgacaagcagctggacgccgacgtgtcccccaagcctaccatcttcctgccctctatcgccgagacaaagctccagaaggccggcacctacctgtgcctgctggaaaagttcttcccagatgtgattaagatccactggcaggaaaagaagtccaacaccatcctgggcagccaggaaggcaacaccatgaagaccaacgacacctacatgaagttcagctggctgaccgtgcccgagaagtccctggacaaagaacacagatgcatcgtgcggcacgaaaacaacaagaacggcgtggaccaggaaatcatcttcccacccatcaagaccgatgtgattacaatggaccccaaggacaactgctccaaggacgccaacgataccctgctgctccagctgaccaacaccagcgcctactacatgtacttgttgctgctgctgaagtccgtggtgtacttcgccatcatcacatgctgcctgctgcggagaaccgccttctgctgcaacggcgagaagtctagggccaagcgatctggatctggagcaacaaacttctcactactcaaacaagcaggtgacgtggaggagaatcccgggcctactagtatggactggatttggcgcatccttttccttgtcggcgctgctaccggcgcgcattccttcgaagaagtgcagctggttgaatctggcggcggaattgtgcagcctggcggatctctgaagctgagctgtgccgccagcggcttcaccttcaacgatttcggcatgagctggatcagacagacccctgacaagcggctggaactggtggctaccatcaacaccaatggcggcaccacacactaccccgactctgtgaagggcagattcagcatcagccgggacaacgccaagaaattcgtgtacctccagatgagcagcctgaagtccgacgacaccgccatctactactgccccagagaaggactggactactggggccagggaaccacactgacagtgtctagtacgcgtgagcagaaactgatctcggaagaggatgggagcggcagccagcctcacaccaagcccagcgtgttcgtgatgaagaacggcaccaacgtggcctgcctcgtgaaagagttctaccccaaggacatcaggatcaacctggtgtccagcaagaagatcaccgagttcgaccccgccatcgtgatctcccccagcggcaagtacaacgccgtgaagctggggaagtacgaggacagcaacagcgtgacctgctccgtgcagcacgacaacaagaccgtgcacagcaccgactttgaagtgaaaaccgactccaccgaccacgtgaagcccaaagagacagagaacaccaagcagcccagcaagagctgccacaagcccaaggccatcgtgcacaccgagaaagtgaacatgatgagcctgaccgtgctgggcctgcggatgctgttcgccaaaaccgtggccgtgaacttcctgctgaccgccaagctgttcttcctccgcgccaagagaagcggatctggcgtgaagcagaccctgaatttcgacctgctgaagctggctggcgacgtggaatccaacccaggcccttctagaggccatatgaccgagtacaagcccacggtgcgcctcgccacccgcgacgacgtccccagggccgtacgcaccctcgccgccgcgttcgccgactaccccgccacgcgccacaccgtcgatccggaccgccacatcgagcgggtcaccgagctgcaagaactcttcctcacgcgcgtcgggctcgacatcggcaaggtgtgggtcgcggacgacggcgccgcggtggcggtctggaccacgccggagagcgtcgaagcgggggcggtgttcgccgagatcggcccgcgcatggccgagttgagcggttcccggctggccgcgcagcaacagatggaaggcctcctggcgccgcaccggcccaaggagcccgcgtggttcctggccaccgtcggcgtctcgcccgaccaccagggcaagggtctgggcagcgccgtcgtgctccccggagtggaggcggccgagcgcgccggggtgcccgccttcctggagacctccgcgccccgcaacctccccttctacgagcggctcggcttcaccgtcaccgccgacgtcgaggtgcccgaaggaccgcgcacctggtgcatgacccgcaagcccggtgcctga

SEQ ID NO: 3433 - DNA, 1866 bp, synthetic construct
  source 1..1866: mol_type = other DNA
atggccttaccagtgaccgccttgctcctgccgctggccttgctgctccacgccgccaggccggacatcgtgctgacccagagccagaaattcatgagcaccagcgtgggcgacagagtgtccatcatctgtagagccagccagtctgtgggaacagccgtggcttggtatcagctgaaggccggacagagccccaagctgctgatctacagcgccagcaacagattcaccggcgtgcccgatagattcacaggcagcggctctggcaccgacttcaccctgacaatcagcaacgtgcagagcgaggacctggccgactacttctgtcagcagtacagcacataccctctggcctttggcgctggcaccaagctggaacttaaactcgagagccagcctcacaccaagcccagcgtgttcgtgatgaagaacggcaccaacgtggcctgcctcgtgaaagagttctaccccaaggacatcaggatcaacctggtgtccagcaagaagatcaccgagttcgaccccgccatcgtgatctcccccagcggcaagtacaacgccgtgaagctggggaagtacgaggacagcaacagcgtgacctgctccgtgcagcacgacaacaagaccgtgcacagcaccgactttgaagtgaaaaccgactccaccgaccacgtgaagcccaaagagacagagaacaccaagcagcccagcaagagctgccacaagcccaaggccatcgtgcacaccgagaaagtgaacatgatgagcctgaccgtgctgggcctgcggatgctgttcgccaaaaccgtggccgtgaacttcctgctgaccgccaagctgttcttcctcagggccaagcgatctggatctggagcaacaaacttctcactactcaaacaagcaggtgacgtggaggagaatcccgggcctactagtatggactggatttggcgcatccttttccttgtcggcgctgctaccggcgcgcattccttcgaagaagtgcagctggttgaatctggcggcggaattgtgcagcctggcggatctctgaagctgagctgtgccgccagcggcttcaccttcaacgatttcggcatgagctggatcagacagacccctgacaagcggctggaactggtggctaccatcaacaccaatggcggcaccacacactaccccgactctgtgaagggcagattcagcatcagccgggacaacgccaagaaattcgtgtacctccagatgagcagcctgaagtccgacgacaccgccatctactactgccccagagaaggactggactactggggccagggaaccacactgacagtgtctagtacgcgtgacaagcagctggacgccgacgtgtcccccaagcctaccatcttcctgccctctatcgccgagacaaagctccagaaggccggcacctacctgtgcctgctggaaaagttcttcccagatgtgattaagatccactggcaggaaaagaagtccaacaccatcctgggcagccaggaaggcaacaccatgaagaccaacgacacctacatgaagttcagctggctgaccgtgcccgagaagtccctggacaaagaacacagatgcatcgtgcggcacgaaaacaacaagaacggcgtggaccaggaaatcatcttcccacccatcaagaccgatgtgattacaatggaccccaaggacaactgctccaaggacgccaacgataccctgctgctccagctgaccaacaccagcgcctactacatgtacttgttgctgctgctgaagtccgtggtgtacttcgccatcatcacatgctgcctgctgcggagaaccgccttctgctgcaacggcgagaagtct

SEQ ID NO: 3434 - DNA, 2700 bp, synthetic construct
  source 1..2700: mol_type = other DNA
atggccttaccagtgaccgccttgctcctgccgctggccttgctgctccacgccgccaggccgctcgaggggaaaccaattcccaaccctcttctgggactggattcaaccggcagcggcgacaagcagctggacgccgacgtgtcccccaagcctaccatcttcctgccctctatcgccgagacaaagctccagaaggccggcacctacctgtgcctgctggaaaagttcttcccagatgtgattaagatccactggcaggaaaagaagtccaacaccatcctgggcagccaggaaggcaacaccatgaagaccaacgacacctacatgaagttcagctggctgaccgtgcccgagaagtccctggacaaagaacacagatgcatcgtgcggcacgaaaacaacaagaacggcgtggaccaggaaatcatcttcccacccatcaagaccgatgtgattacaatggaccccaaggacaactgctccaaggacgccaacgataccctgctgctccagctgaccaacaccagcgcctactacatgtacttgttgctgctgctgaagtccgtggtgtacttcgccatcatcacatgctgcctgctgcggagaaccgccttctgctgcaacggcgagaagtctagggccaagcgatctggatctggagcaacaaacttctcactactcaaacaagcaggtgacgtggaggagaatcccgggcctactagcatggccttaccagtgaccgccttgctcctgccgctggccttgctgctccacgccgccaggccggacatcgtgctgacccagagccagaaattcatgagcaccagcgtgggcgacagagtgtccatcatctgtagagccagccagtctgtgggaacagccgtggcttggtatcagctgaaggccggacagagccccaagctgctgatctacagcgccagcaacagattcaccggcgtgcccgatagattcacaggcagcggctctggcaccgacttcaccctgacaatcagcaacgtgcagagcgaggacctggccgactacttctgtcagcagtacagcacataccctctggcctttggcgctggcaccaagctggaacttaaaggcggaggcggaagtggaggcggaggatctggcggcggaggctctgaagtgcagctggttgaatctggcggcggaattgtgcagcctggcggatctctgaagctgagctgtgccgccagcggcttcaccttcaacgatttcggcatgagctggatcagacagacccctgacaagcggctggaactggtggctaccatcaacaccaatggcggcaccacacactaccccgactctgtgaagggcagattcagcatcagccgggacaacgccaagaaattcgtgtacctccagatgagcagcctgaagtccgacgacaccgccatctactactgccccagagaaggactggactactggggccagggaaccacactgacagtgtctagtacgcgtgagcagaaactgatctcggaagaggatgggagcggcagccagcctcacaccaagcccagcgtgttcgtgatgaagaacggcaccaacgtggcctgcctcgtgaaagagttctaccccaaggacatcaggatcaacctggtgtccagcaagaagatcaccgagttcgaccccgccatcgtgatctcccccagcggcaagtacaacgccgtgaagctggggaagtacgaggacagcaacagcgtgacctgctccgtgcagcacgacaacaagaccgtgcacagcaccgactttgaagtgaaaaccgactccaccgaccacgtgaagcccaaagagacagagaacaccaagcagcccagcaagagctgccacaagcccaaggccatcgtgcacaccgagaaagtgaacatgatgagcctgaccgtgctgggcctgcggatgctgttcgccaaaaccgtggccgtgaacttcctgctgaccgccaagctgttcttcctccgcgccaagagaagcggatctggcgtgaagcagaccctgaatttcgacctgctgaagctggctggcgacgtggaatccaacccaggcccttctagaggccatatgaccgagtacaagcccacggtgcgcctcgccacccgcgacgacgtccccagggccgtacgcaccctcgccgccgcgttcgccgactaccccgccacgcgccacaccgtcgatccggaccgccacatcgagcgggtcaccgagctgcaagaactcttcctcacgcgcgtcgggctcgacatcggcaaggtgtgggtcgcggacgacggcgccgcggtggcggtctggaccacgccggagagcgtcgaagcgggggcggtgttcgccgagatcggcccgcgcatggccgagttgagcggttcccggctggccgcgcagcaacagatggaaggcctcctggcgccgcaccggcccaaggagcccgcgtggttcctggccaccgtcggcgtctcgcccgaccaccagggcaagggtctgggcagcgccgtcgtgctccccggagtggaggcggccgagcgcgccggggtgcccgccttcctggagacctccgcgccccgcaacctccccttctacgagcggctcggcttcaccgtcaccgccgacgtcgaggtgcccgaaggaccgcgcacctggtgcatgacccgcaagcccggtgcctga

SEQ ID NO: 3435 - DNA, 3075 bp, synthetic construct
  source 1..3075: mol_type = other DNA
atggccttaccagtgaccgccttgctcctgccgctggccttgctgctccacgccgccaggccggacatcgtgctgacccagagccagaaattcatgagcaccagcgtgggcgacagagtgtccatcatctgtagagccagccagtctgtgggaacagccgtggcttggtatcagctgaaggccggacagagccccaagctgctgatctacagcgccagcaacagattcaccggcgtgcccgatagattcacaggcagcggctctggcaccgacttcaccctgacaatcagcaacgtgcagagcgaggacctggccgactacttctgtcagcagtacagcacataccctctggcctttggcgctggcaccaagctggaacttaaaggacagcctaaggccaatcctaccgtgacactgttccctccaagcagcgaagaactccaggccaacaaggccacacttgtgtgcctgatctccgacttctaccctggggctgtgacagtggcttggaaggccgatggatctcctgtgaaagccggcgtggaaaccaccaagccatccaagcagagcaacaacaaatacgccgccagctcctacctgagcctgacacctgagcagtggaagtcccacagatcctacagctgccaagtgacccacgaaggcagcaccgtggaaaagacagtggcccctacagagtgcagcggatcccagagcttcggcctgctggaccccaagctgtgctacctgctggatggcatcctgttcatctacggcgtgatcctgaccgccctgttcctgagagtgaagttcagcagaagcgccgacgcccctgcctaccagcagggacagaaccaactgtacaacgagctgaacctgggcagacgggaagagtacgacgtgctggacaagcggagaggcagggaccctgagatgggcggaaagccccagcggagaaagaacccccaggaaggactgtataacgaactccagaaagacaagatggccgaagcctacagcgagatcggcatgaagggcgagcggagaagaggcaagggccacgatggcctgtaccagggcctgagcaccgccaccaaggacacctatgacgccctgcacatgcaggccctgcctccaagaagggccaagcgatctggatctggagcaacaaacttctcactactcaaacaagcaggtgacgtggaggagaatcccgggcctactagtatggactggatttggcgcatccttttccttgtcggcgctgctaccggcgcgcattccttcgaagaagtgcagctggttgaatctggcggcggaattgtgcagcctggcggatctctgaagctgagctgtgccgccagcggcttcaccttcaacgatttcggcatgagctggatcagacagacccctgacaagcggctggaactggtggctaccatcaacaccaatggcggcaccacacactaccccgactctgtgaagggcagattcagcatcagccgggacaacgccaagaaattcgtgtacctccagatgagcagcctgaagtccgacgacaccgccatctactactgccccagagaaggactggactactggggccagggaaccacactgacagtgtctagtgcctctacaaagggaccctccgtgtttcctctggctcccagcagcaagtctacaagcggaggaacagccgctctgggctgcctggtcaaggattactttcccgagcctgtgaccgtgtcctggaatagcggagcactgacaagcggcgtgcacacctttccagccgtgctgcaaagcagcggcctgtactctctgagcagcgtggtcacagtgcctagctctagcctgggcacccagacctacatctgcaatgtgaaccacaagcctagcaacaccaaggtggacaagagagtggaacccaagagctgtggtacccagagttttgggttgttggaccctaaattgtgctatctgttggacggaatcctgttcatttacggagtgatcctgaccgcattgttcctgcgggttaagttttccagatccgcagacgcacccgcttaccaacaagggcagaaccaactctacaatgaacttaatttggggcggagggaagagtacgacgttctggacaaaaggaggggacgagatcccgagatgggcggaaagcctcagcgaaggaagaatccgcaagaggggctttataacgaactccagaaagataaaatggcagaagcctatagtgagattgggatgaagggagaaaggaggaggggtaaaggtcacgatgggttgtaccaaggattgagcacagccactaaagatacctatgatgcgctccacatgcaggccctgccgccaagacgcgccaagagaagcggatctggcgtgaagcagaccctgaatttcgacctgctgaagctggctggcgacgtggaatccaacccaggcccttctagaggccatatgaccgagtacaagcccacggtgcgcctcgccacccgcgacgacgtccccagggccgtacgcaccctcgccgccgcgttcgccgactaccccgccacgcgccacaccgtcgatccggaccgccacatcgagcgggtcaccgagctgcaagaactcttcctcacgcgcgtcgggctcgacatcggcaaggtgtgggtcgcggacgacggcgccgcggtggcggtctggaccacgccggagagcgtcgaagcgggggcggtgttcgccgagatcggcccgcgcatggccgagttgagcggttcccggctggccgcgcagcaacagatggaaggcctcctggcgccgcaccggcccaaggagcccgcgtggttcctggccaccgtcggcgtctcgcccgaccaccagggcaagggtctgggcagcgccgtcgtgctccccggagtggaggcggccgagcgcgccggggtgcccgccttcctggagacctccgcgccccgcaacctccccttctacgagcggctcggcttcaccgtcaccgccgacgtcgaggtgcccgaaggaccgcgcacctggtgcatgacccgcaagcccggtgcctga

SEQ ID NO: 3436 - DNA, 2430 bp, synthetic construct
  source 1..2430: mol_type = other DNA
atggccttaccagtgaccgccttgctcctgccgctggccttgctgctccacgccgccaggccggacatcgtgctgacccagagccagaaattcatgagcaccagcgtgggcgacagagtgtccatcatctgtagagccagccagtctgtgggaacagccgtggcttggtatcagctgaaggccggacagagccccaagctgctgatctacagcgccagcaacagattcaccggcgtgcccgatagattcacaggcagcggctctggcaccgacttcaccctgacaatcagcaacgtgcagagcgaggacctggccgactacttctgtcagcagtacagcacataccctctggcctttggcgctggcaccaagctggaacttaaactcgaggacctgaagaacgtgttcccacctgaggtggccgtgttcgagcctagcgaggccgagatcagccacacccagaaagccaccctcgtgtgcctggctaccggcttctaccccgaccatgtggaactgtcttggtgggtcaacggcaaagaggtgcacagcggcgtgtctaccgacccccagccactgaaagaacagcccgccctgaacgacagccggtactgcctgagcagcagactgagagtgtccgccaccttctggcagaacccccggaaccacttcagatgccaggtgcagttctacggcctgagcgagaacgacgagtggacccaggacagagccaagcccgtgacccagatcgtgtctgccgaagcctggggcagagccgattgcggatcccagagcttcggcctgctggaccccaagctgtgctacctgctggatggcatcctgttcatctacggcgtgatcctgaccgccctgttcctgagagtgaagttcagcagaagcgccgacgcccctgcctaccagcagggacagaaccaactgtacaacgagctgaacctgggcagacgggaagagtacgacgtgctggacaagcggagaggcagggaccctgagatgggcggaaagccccagcggagaaagaacccccaggaaggactgtataacgaactccagaaagacaagatggccgaagcctacagcgagatcggcatgaagggcgagcggagaagaggcaagggccacgatggcctgtaccagggcctgagcaccgccaccaaggacacctatgacgccctgcacatgcaggccctgcctccaagaagggccaagcgatctggatctggagcaacaaacttctcactactcaaacaagcaggtgacgtggaggagaatcccgggcctactagtatggactggatttggcgcatccttttccttgtcggcgctgctaccggcgcgcattccttcgaagaagtgcagctggttgaatctggcggcggaattgtgcagcctggcggatctctgaagctgagctgtgccgccagcggcttcaccttcaacgatttcggcatgagctggatcagacagacccctgacaagcggctggaactggtggctaccatcaacaccaatggcggcaccacacactaccccgactctgtgaagggcagattcagcatcagccgggacaacgccaagaaattcgtgtacctccagatgagcagcctgaagtccgacgacaccgccatctactactgccccagagaaggactggactactggggccagggaaccacactgacagtgtctagtacgcgtatccagaaccctgatcctgccgtgtaccagctgcgggatagcaagagcagcgacaagagcgtgtgtctgttcaccgacttcgacagccagaccaacgtgtcccagagcaaggactccgacgtgtacatcaccgataagaccgtgctggacatgcggagcatggacttcaagagcaactccgccgtggcctggtccaacaagtccgatttcgcctgcgccaacgccttcaacaacagcattatccccgaggacacattcttcccaagccccgagagcagctgcggtacccagagttttgggttgttggaccctaaattgtgctatctgttggacggaatcctgttcatttacggagtgatcctgaccgcattgttcctgcgggttaagttttccagatccgcagacgcacccgcttaccaacaagggcagaaccaactctacaatgaacttaatttggggcggagggaagagtacgacgttctggacaaaaggaggggacgagatcccgagatgggcggaaagcctcagcgaaggaagaatccgcaagaggggctttataacgaactccagaaagataaaatggcagaagcctatagtgagattgggatgaagggagaaaggaggaggggtaaaggtcacgatgggttgtaccaaggattgagcacagccactaaagatacctatgatgcgctccacatgcaggccctgccgccaaga

SEQ ID NO: 3437 - DNA, 2430 bp, synthetic construct
  source 1..2430: mol_type = other DNA
atggccttaccagtgaccgccttgctcctgccgctggccttgctgctccacgccgccaggccggacatcgtgctgacccagagccagaaattcatgagcaccagcgtgggcgacagagtgtccatcatctgtagagccagccagtctgtgggaacagccgtggcttggtatcagctgaaggccggacagagccccaagctgctgatctacagcgccagcaacagattcaccggcgtgcccgatagattcacaggcagcggctctggcaccgacttcaccctgacaatcagcaacgtgcagagcgaggacctggccgactacttctgtcagcagtacagcacataccctctggcctttggcgctggcaccaagctggaacttaaactcgaggacctgaagaacgtgttcccacctgaggtggccgtgttcgagcctagcaaggccgagatcgcccacacccagaaagccaccctcgtgtgcctggctaccggcttctaccccgaccatgtggaactgtcttggtgggtcaacggcaaagaggtgcacagcggcgtgtgtaccgacccccagccactgaaagaacagcccgccctgaacgacagccggtactgcctgagcagcagactgagagtgtccgccaccttctggcagaacccccggaaccacttcagatgccaggtgcagttctacggcctgagcgagaacgacgagtggacccaggacagagccaagcccgtgacccagatcgtgtctgccgaagcctggggcagagccgattgcggatcccagagcttcggcctgctggaccccaagctgtgctacctgctggatggcatcctgttcatctacggcgtgatcctgaccgccctgttcctgagagtgaagttcagcagaagcgccgacgcccctgcctaccagcagggacagaaccaactgtacaacgagctgaacctgggcagacgggaagagtacgacgtgctggacaagcggagaggcagggaccctgagatgggcggaaagccccagcggagaaagaacccccaggaaggactgtataacgaactccagaaagacaagatggccgaagcctacagcgagatcggcatgaagggcgagcggagaagaggcaagggccacgatggcctgtaccagggcctgagcaccgccaccaaggacacctatgacgccctgcacatgcaggccctgcctccaagaagggccaagcgatctggatctggagcaacaaacttctcactactcaaacaagcaggtgacgtggaggagaatcccgggcctactagtatggactggatttggcgcatccttttccttgtcggcgctgctaccggcgcgcattccttcgaagaagtgcagctggttgaatctggcggcggaattgtgcagcctggcggatctctgaagctgagctgtgccgccagcggcttcaccttcaacgatttcggcatgagctggatcagacagacccctgacaagcggctggaactggtggctaccatcaacaccaatggcggcaccacacactaccccgactctgtgaagggcagattcagcatcagccgggacaacgccaagaaattcgtgtacctccagatgagcagcctgaagtccgacgacaccgccatctactactgccccagagaaggactggactactggggccagggaaccacactgacagtgtctagtacgcgtatccagaaccctgatcctgccgtgtaccagctgcgggatagcaagagcagcgacaagagcgtgtgtctgttcaccgacttcgacagccagaccaacgtgtcccagagcaaggactccgacgtgtacatcaccgataagtgcgtgctggacatgcggagcatggacttcaagagcaactccgccgtggcctggtccaacaagtccgatttcgcctgcgccaacgccttcaacaacagcattatccccgaggacacattcttcccaagcagcgacgtgccctgcggtacccagagttttgggttgttggaccctaaattgtgctatctgttggacggaatcctgttcatttacggagtgatcctgaccgcattgttcctgcgggttaagttttccagatccgcagacgcacccgcttaccaacaagggcagaaccaactctacaatgaacttaatttggggcggagggaagagtacgacgttctggacaaaaggaggggacgagatcccgagatgggcggaaagcctcagcgaaggaagaatccgcaagaggggctttataacgaactccagaaagataaaatggcagaagcctatagtgagattgggatgaagggagaaaggaggaggggtaaaggtcacgatgggttgtaccaaggattgagcacagccactaaagatacctatgatgcgctccacatgcaggccctgccgccaaga

SEQ ID NO: 3438 - DNA, 2643 bp, synthetic construct
  source 1..2643: mol_type = other DNA
atggccttaccagtgaccgccttgctcctgccgctggccttgctgctccacgccgccaggccggacatcgtgctgacccagagccagaaattcatgagcaccagcgtgggcgacagagtgtccatcatctgtagagccagccagtctgtgggaacagccgtggcttggtatcagctgaaggccggacagagccccaagctgctgatctacagcgccagcaacagattcaccggcgtgcccgatagattcacaggcagcggctctggcaccgacttcaccctgacaatcagcaacgtgcagagcgaggacctggccgactacttctgtcagcagtacagcacataccctctggcctttggcgctggcaccaagctggaacttaaactcgaggggaaaccaattcccaaccctcttctgggactggattcaaccggcagcggcgaggacctgaagaacgtgttcccacctgaggtggccgtgttcgagcctagcgaggccgagatcagccacacccagaaagccaccctcgtgtgcctggctaccggcttctaccccgaccatgtggaactgtcttggtgggtcaacggcaaagaggtgcacagcggcgtgtctaccgacccccagccactgaaagaacagcccgccctgaacgacagccggtactgcctgagcagcagactgagagtgtccgccaccttctggcagaacccccggaaccacttcagatgccaggtgcagttctacggcctgagcgagaacgacgagtggacccaggacagagccaagcccgtgacccagatcgtgtctgccgaagcctggggcagagccgattgcggatcccagagcttcggcctgctggaccccaagctgtgctacctgctggatggcatcctgttcatctacggcgtgatcctgaccgccctgttcctgagagtgaagttcagcagaagcgccgacgcccctgcctaccagcagggacagaaccaactgtacaacgagctgaacctgggcagacgggaagagtacgacgtgctggacaagcggagaggcagggaccctgagatgggcggaaagccccagcggagaaagaacccccaggaaggactgtataacgaactccagaaagacaagatggccgaagcctacagcgagatcggcatgaagggcgagcggagaagaggcaagggccacgatggcctgtaccagggcctgagcaccgccaccaaggacacctatgacgccctgcacatgcaggccctgcctccaagaagggccaagcgatctggatctggagcaacaaacttctcactactcaaacaagcaggtgacgtggaggagaatcccgggcctactagtatggactggatttggcgcatccttttccttgtcggcgctgctaccggcgcgcattccttcgaagaagtgcagctggttgaatctggcggcggaattgtgcagcctggcggatctctgaagctgagctgtgccgccagcggcttcaccttcaacgatttcggcatgagctggatcagacagacccctgacaagcggctggaactggtggctaccatcaacaccaatggcggcaccacacactaccccgactctgtgaagggcagattcagcatcagccgggacaacgccaagaaattcgtgtacctccagatgagcagcctgaagtccgacgacaccgccatctactactgccccagagaaggactggactactggggccagggaaccacactgacagtgtctagtacgcgtgagcagaaactgatctcggaagaggatgggagcggcatccagaaccctgatcctgccgtgtaccagctgcgggatagcaagagcagcgacaagagcgtgtgtctgttcaccgacttcgacagccagaccaacgtgtcccagagcaaggactccgacgtgtacatcaccgataagaccgtgctggacatgcggagcatggacttcaagagcaactccgccgtggcctggtccaacaagtccgatttcgcctgcgccaacgccttcaacaacagcattatccccgaggacacattcttcccaagccccgagagcagctgcggtacccagagttttgggttgttggaccctaaattgtgctatctgttggacggaatcctgttcatttacggagtgatcctgaccgcattgttcctgaggagcaagcggtcacggctgctccacagcgattacatgaatatgacaccacgaagaccgggtcctactcgcaaacactaccaaccctacgcacctccccgcgactttgcagcgtaccgatctcgggttaagttttccagatccgcagacgcacccgcttaccaacaagggcagaaccaactctacaatgaacttaatttggggcggagggaagagtacgacgttctggacaaaaggaggggacgagatcccgagatgggcggaaagcctcagcgaaggaagaatccgcaagaggggctttataacgaactccagaaagataaaatggcagaagcctatagtgagattgggatgaagggagaaaggaggaggggtaaaggtcacgatgggttgtaccaaggattgagcacagccactaaagatacctatgatgcgctccacatgcaggccctgccgccaaga

SEQ ID NO: 3439 - DNA, 2766 bp, synthetic construct
  source 1..2766: mol_type = other DNA
atggccttaccagtgaccgccttgctcctgccgctggccttgctgctccacgccgccaggccggacatcgtgctgacccagagccagaaattcatgagcaccagcgtgggcgacagagtgtccatcatctgtagagccagccagtctgtgggaacagccgtggcttggtatcagctgaaggccggacagagccccaagctgctgatctacagcgccagcaacagattcaccggcgtgcccgatagattcacaggcagcggctctggcaccgacttcaccctgacaatcagcaacgtgcagagcgaggacctggccgactacttctgtcagcagtacagcacataccctctggcctttggcgctggcaccaagctggaacttaaactcgaggggaaaccaattcccaaccctcttctgggactggattcaaccggcagcggcgaggacctgaagaacgtgttcccacctgaggtggccgtgttcgagcctagcgaggccgagatcagccacacccagaaagccaccctcgtgtgcctggctaccggcttctaccccgaccatgtggaactgtcttggtgggtcaacggcaaagaggtgcacagcggcgtgtctaccgacccccagccactgaaagaacagcccgccctgaacgacagccggtactgcctgagcagcagactgagagtgtccgccaccttctggcagaacccccggaaccacttcagatgccaggtgcagttctacggcctgagcgagaacgacgagtggacccaggacagagccaagcccgtgacccagatcgtgtctgccgaagcctggggcagagccgattgcggatcccagagcttcggcctgctggaccccaagctgtgctacctgctggatggcatcctgttcatctacggcgtgatcctgaccgccctgttcctgaggagtaagaggagcaggctcctgcacagtgactacatgaacatgactccacgccgccccggacccacccgcaagcattaccagccctatgccccaccacgcgacttcgcagcctatcgctccagagtgaagttcagcagaagcgccgacgcccctgcctaccagcagggacagaaccaactgtacaacgagctgaacctgggcagacgggaagagtacgacgtgctggacaagcggagaggcagggaccctgagatgggcggaaagccccagcggagaaagaacccccaggaaggactgtataacgaactccagaaagacaagatggccgaagcctacagcgagatcggcatgaagggcgagcggagaagaggcaagggccacgatggcctgtaccagggcctgagcaccgccaccaaggacacctatgacgccctgcacatgcaggccctgcctccaagaagggccaagcgatctggatctggagcaacaaacttctcactactcaaacaagcaggtgacgtggaggagaatcccgggcctactagtatggactggatttggcgcatccttttccttgtcggcgctgctaccggcgcgcattccttcgaagaagtgcagctggttgaatctggcggcggaattgtgcagcctggcggatctctgaagctgagctgtgccgccagcggcttcaccttcaacgatttcggcatgagctggatcagacagacccctgacaagcggctggaactggtggctaccatcaacaccaatggcggcaccacacactaccccgactctgtgaagggcagattcagcatcagccgggacaacgccaagaaattcgtgtacctccagatgagcagcctgaagtccgacgacaccgccatctactactgccccagagaaggactggactactggggccagggaaccacactgacagtgtctagtacgcgtgagcagaaactgatctcggaagaggatgggagcggcatccagaaccctgatcctgccgtgtaccagctgcgggatagcaagagcagcgacaagagcgtgtgtctgttcaccgacttcgacagccagaccaacgtgtcccagagcaaggactccgacgtgtacatcaccgataagaccgtgctggacatgcggagcatggacttcaagagcaactccgccgtggcctggtccaacaagtccgatttcgcctgcgccaacgccttcaacaacagcattatccccgaggacacattcttcccaagccccgagagcagctgcggtacccagagttttgggttgttggaccctaaattgtgctatctgttggacggaatcctgttcatttacggagtgatcctgaccgcattgttcctgaggagcaagcggtcacggctgctccacagcgattacatgaatatgacaccacgaagaccgggtcctactcgcaaacactaccaaccctacgcacctccccgcgactttgcagcgtaccgatctcgggttaagttttccagatccgcagacgcacccgcttaccaacaagggcagaaccaactctacaatgaacttaatttggggcggagggaagagtacgacgttctggacaaaaggaggggacgagatcccgagatgggcggaaagcctcagcgaaggaagaatccgcaagaggggctttataacgaactccagaaagataaaatggcagaagcctatagtgagattgggatgaagggagaaaggaggaggggtaaaggtcacgatgggttgtaccaaggattgagcacagccactaaagatacctatgatgcgctccacatgcaggccctgccgccaaga

SEQ ID NO: 3440 - DNA, 2649 bp, synthetic construct
  source 1..2649: mol_type = other DNA
atggccttaccagtgaccgccttgctcctgccgctggccttgctgctccacgccgccaggccggacatcgtgctgacccagagccagaaattcatgagcaccagcgtgggcgacagagtgtccatcatctgtagagccagccagtctgtgggaacagccgtggcttggtatcagctgaaggccggacagagccccaagctgctgatctacagcgccagcaacagattcaccggcgtgcccgatagattcacaggcagcggctctggcaccgacttcaccctgacaatcagcaacgtgcagagcgaggacctggccgactacttctgtcagcagtacagcacataccctctggcctttggcgctggcaccaagctggaacttaaactcgaggggaaaccaattcccaaccctcttctgggactggattcaaccggcagcggcgaggacctgaagaacgtgttcccacctgaggtggccgtgttcgagcctagcgaggccgagatcagccacacccagaaagccaccctcgtgtgcctggctaccggcttctaccccgaccatgtggaactgtcttggtgggtcaacggcaaagaggtgcacagcggcgtgtctaccgacccccagccactgaaagaacagcccgccctgaacgacagccggtactgcctgagcagcagactgagagtgtccgccaccttctggcagaacccccggaaccacttcagatgccaggtgcagttctacggcctgagcgagaacgacgagtggacccaggacagagccaagcccgtgacccagatcgtgtctgccgaagcctggggcagagccgattgcggatcccagagcttcggcctgctggaccccaagctgtgctacctgctggatggcatcctgttcatctacggcgtgatcctgaccgccctgttcctgagagtgaagttcagcagaagcgccgacgcccctgcctaccagcagggacagaaccaactgtacaacgagctgaacctgggcagacgggaagagtacgacgtgctggacaagcggagaggcagggaccctgagatgggcggaaagccccagcggagaaagaacccccaggaaggactgtataacgaactccagaaagacaagatggccgaagcctacagcgagatcggcatgaagggcgagcggagaagaggcaagggccacgatggcctgtaccagggcctgagcaccgccaccaaggacacctatgacgccctgcacatgcaggccctgcctccaagaagggccaagcgatctggatctggagcaacaaacttctcactactcaaacaagcaggtgacgtggaggagaatcccgggcctactagtatggactggatttggcgcatccttttccttgtcggcgctgctaccggcgcgcattccttcgaagaagtgcagctggttgaatctggcggcggaattgtgcagcctggcggatctctgaagctgagctgtgccgccagcggcttcaccttcaacgatttcggcatgagctggatcagacagacccctgacaagcggctggaactggtggctaccatcaacaccaatggcggcaccacacactaccccgactctgtgaagggcagattcagcatcagccgggacaacgccaagaaattcgtgtacctccagatgagcagcctgaagtccgacgacaccgccatctactactgccccagagaaggactggactactggggccagggaaccacactgacagtgtctagtacgcgtgagcagaaactgatctcggaagaggatctggggagcggcatccagaaccctgatcctgccgtgtaccagctgcgggatagcaagagcagcgacaagagcgtgtgtctgttcaccgacttcgacagccagaccaacgtgtcccagagcaaggactccgacgtgtacatcaccgataagaccgtgctggacatgcggagcatggacttcaagagcaactccgccgtggcctggtccaacaagtccgatttcgcctgcgccaacgccttcaacaacagcattatccccgaggacacattcttcccaagccccgagagcagctgcggtacccagagttttgggttgttggaccctaaattgtgctatctgttggacggaatcctgttcatttacggagtgatcctgaccgcattgttcctgaagagaggccggaagaagctgctgtacatcttcaagcagcctttcatgcggcccgtgcagaccacccaggaagaggacggctgctcctgccggttccccgaggaagaagaaggcggctgcgagctgcgggttaagttttccagatccgcagacgcacccgcttaccaacaagggcagaaccaactctacaatgaacttaatttggggcggagggaagagtacgacgttctggacaaaaggaggggacgagatcccgagatgggcggaaagcctcagcgaaggaagaatccgcaagaggggctttataacgaactccagaaagataaaatggcagaagcctatagtgagattgggatgaagggagaaaggaggaggggtaaaggtcacgatgggttgtaccaaggattgagcacagccactaaagatacctatgatgcgctccacatgcaggccctgccgccaaga

SEQ ID NO: 3441 - DNA, 2775 bp, synthetic construct
  source 1..2775: mol_type = other DNA
atggccttaccagtgaccgccttgctcctgccgctggccttgctgctccacgccgccaggccggacatcgtgctgacccagagccagaaattcatgagcaccagcgtgggcgacagagtgtccatcatctgtagagccagccagtctgtgggaacagccgtggcttggtatcagctgaaggccggacagagccccaagctgctgatctacagcgccagcaacagattcaccggcgtgcccgatagattcacaggcagcggctctggcaccgacttcaccctgacaatcagcaacgtgcagagcgaggacctggccgactacttctgtcagcagtacagcacataccctctggcctttggcgctggcaccaagctggaacttaaactcgaggggaaaccaattcccaaccctcttctgggactggattcaaccggcagcggcgaggacctgaagaacgtgttcccacctgaggtggccgtgttcgagcctagcgaggccgagatcagccacacccagaaagccaccctcgtgtgcctggctaccggcttctaccccgaccatgtggaactgtcttggtgggtcaacggcaaagaggtgcacagcggcgtgtctaccgacccccagccactgaaagaacagcccgccctgaacgacagccggtactgcctgagcagcagactgagagtgtccgccaccttctggcagaacccccggaaccacttcagatgccaggtgcagttctacggcctgagcgagaacgacgagtggacccaggacagagccaagcccgtgacccagatcgtgtctgccgaagcctggggcagagccgattgcggatcccagagcttcggcctgctggaccccaagctgtgctacctgctggatggcatcctgttcatctacggcgtgatcctgaccgccctgttcctgaaacggggcagaaagaaactcctgtatatattcaaacaaccatttatgagaccagtacaaactactcaagaggaagatggctgtagctgccgatttccagaagaagaagaaggaggatgtgaactgagagtgaagttcagcagaagcgccgacgcccctgcctaccagcagggacagaaccaactgtacaacgagctgaacctgggcagacgggaagagtacgacgtgctggacaagcggagaggcagggaccctgagatgggcggaaagccccagcggagaaagaacccccaggaaggactgtataacgaactccagaaagacaagatggccgaagcctacagcgagatcggcatgaagggcgagcggagaagaggcaagggccacgatggcctgtaccagggcctgagcaccgccaccaaggacacctatgacgccctgcacatgcaggccctgcctccaagaagggccaagcgatctggatctggagcaacaaacttctcactactcaaacaagcaggtgacgtggaggagaatcccgggcctactagtatggactggatttggcgcatccttttccttgtcggcgctgctaccggcgcgcattccttcgaagaagtgcagctggttgaatctggcggcggaattgtgcagcctggcggatctctgaagctgagctgtgccgccagcggcttcaccttcaacgatttcggcatgagctggatcagacagacccctgacaagcggctggaactggtggctaccatcaacaccaatggcggcaccacacactaccccgactctgtgaagggcagattcagcatcagccgggacaacgccaagaaattcgtgtacctccagatgagcagcctgaagtccgacgacaccgccatctactactgccccagagaaggactggactactggggccagggaaccacactgacagtgtctagtacgcgtgagcagaaactgatctcggaagaggatctggggagcggcatccagaaccctgatcctgccgtgtaccagctgcgggatagcaagagcagcgacaagagcgtgtgtctgttcaccgacttcgacagccagaccaacgtgtcccagagcaaggactccgacgtgtacatcaccgataagaccgtgctggacatgcggagcatggacttcaagagcaactccgccgtggcctggtccaacaagtccgatttcgcctgcgccaacgccttcaacaacagcattatccccgaggacacattcttcccaagccccgagagcagctgcggtacccagagttttgggttgttggaccctaaattgtgctatctgttggacggaatcctgttcatttacggagtgatcctgaccgcattgttcctgaagagaggccggaagaagctgctgtacatcttcaagcagcctttcatgcggcccgtgcagaccacccaggaagaggacggctgctcctgccggttccccgaggaagaagaaggcggctgcgagctgcgggttaagttttccagatccgcagacgcacccgcttaccaacaagggcagaaccaactctacaatgaacttaatttggggcggagggaagagtacgacgttctggacaaaaggaggggacgagatcccgagatgggcggaaagcctcagcgaaggaagaatccgcaagaggggctttataacgaactccagaaagataaaatggcagaagcctatagtgagattgggatgaagggagaaaggaggaggggtaaaggtcacgatgggttgtaccaaggattgagcacagccactaaagatacctatgatgcgctccacatgcaggccctgccgccaaga

SEQ ID NO: 3442 - DNA, 2448 bp, synthetic construct
  source 1..2448: mol_type = other DNA
atggccttaccagtgaccgccttgctcctgccgctggccttgctgctccacgccgccaggccggacatcgtgctgacccagagccagaaattcatgagcaccagcgtgggcgacagagtgtccatcatctgtagagccagccagtctgtgggaacagccgtggcttggtatcagctgaaggccggacagagccccaagctgctgatctacagcgccagcaacagattcaccggcgtgcccgatagattcacaggcagcggctctggcaccgacttcaccctgacaatcagcaacgtgcagagcgaggacctggccgactacttctgtcagcagtacagcacataccctctggcctttggcgctggcaccaagctggaacttaaactcgagcagagcttcggcctgctggaccccaagctgtgctacctgctggatggcatcctgttcatctacggcgtgatcctgaccgccctgttcctgagagtgaagttcagcagaagcgccgacgcccctgcctaccagcagggacagaaccaactgtacaacgagctgaacctgggcagacgggaagagtacgacgtgctggacaagcggagaggcagggaccctgagatgggcggaaagccccagcggagaaagaacccccaggaaggactgtataacgaactccagaaagacaagatggccgaagcctacagcgagatcggcatgaagggcgagcggagaagaggcaagggccacgatggcctgtaccagggcctgagcaccgccaccaaggacacctatgacgccctgcacatgcaggccctgcctccaagaagggccaagcgatctggatctggagcaacaaacttctcactactcaaacaagcaggtgacgtggaggagaatcccgggcctactagtatggactggatttggcgcatccttttccttgtcggcgctgctaccggcgcgcattccttcgaagaagtgcagctggttgaatctggcggcggaattgtgcagcctggcggatctctgaagctgagctgtgccgccagcggcttcaccttcaacgatttcggcatgagctggatcagacagacccctgacaagcggctggaactggtggctaccatcaacaccaatggcggcaccacacactaccccgactctgtgaagggcagattcagcatcagccgggacaacgccaagaaattcgtgtacctccagatgagcagcctgaagtccgacgacaccgccatctactactgccccagagaaggactggactactggggccagggaaccacactgacagtgtctagtacgcgtcagagttttgggttgttggaccctaaattgtgctatctgttggacggaatcctgttcatttacggagtgatcctgaccgcattgttcctgcgggttaagttttccagatccgcagacgcacccgcttaccaacaagggcagaaccaactctacaatgaacttaatttggggcggagggaagagtacgacgttctggacaaaaggaggggacgagatcccgagatgggcggaaagcctcagcgaaggaagaatccgcaagaggggctttataacgaactccagaaagataaaatggcagaagcctatagtgagattgggatgaagggagaaaggaggaggggtaaaggtcacgatgggttgtaccaaggattgagcacagccactaaagatacctatgatgcgctccacatgcaggccctgccgccaagacgcgccaagagaagcggatctggcgtgaagcagaccctgaatttcgacctgctgaagctggctggcgacgtggaatccaacccaggcccttctagaggccatatgaccgagtacaagcccacggtgcgcctcgccacccgcgacgacgtccccagggccgtacgcaccctcgccgccgcgttcgccgactaccccgccacgcgccacaccgtcgatccggaccgccacatcgagcgggtcaccgagctgcaagaactcttcctcacgcgcgtcgggctcgacatcggcaaggtgtgggtcgcggacgacggcgccgcggtggcggtctggaccacgccggagagcgtcgaagcgggggcggtgttcgccgagatcggcccgcgcatggccgagttgagcggttcccggctggccgcgcagcaacagatggaaggcctcctggcgccgcaccggcccaaggagcccgcgtggttcctggccaccgtcggcgtctcgcccgaccaccagggcaagggtctgggcagcgccgtcgtgctccccggagtggaggcggccgagcgcgccggggtgcccgccttcctggagacctccgcgccccgcaacctccccttctacgagcggctcggcttcaccgtcaccgccgacgtcgaggtgcccgaaggaccgcgcacctggtgcatgacccgcaagcccggtgcctga

SEQ ID NO: 3443 - DNA, 1920 bp, synthetic construct
  source 1..1920: mol_type = other DNA
atggccttaccagtgaccgccttgctcctgccgctggccttgctgctccacgccgccaggccggacatcgtgctgacccagagccagaaattcatgagcaccagcgtgggcgacagagtgtccatcatctgtagagccagccagtctgtgggaacagccgtggcttggtatcagctgaaggccggacagagccccaagctgctgatctacagcgccagcaacagattcaccggcgtgcccgatagattcacaggcagcggctctggcaccgacttcaccctgacaatcagcaacgtgcagagcgaggacctggccgactacttctgtcagcagtacagcacataccctctggcctttggcgctggcaccaagctggaacttaaactcgagggacagcctaaggccaatcctaccgtgacactgttccctccaagcagcgaagaactccaggccaacaaggccacacttgtgtgcctgatctccgacttctaccctggggctgtgacagtggcttggaaggccgatggatctcctgtgaaagccggcgtggaaaccaccaagccatccaagcagagcaacaacaaatacgccgccagctcctacctgagcctgacacctgagcagtggaagtcccacagatcctacagctgccaagtgacccacgaaggcagcaccgtggaaaagacagtggcccctacagagtgcagccccatcaagaccgatgtgattacaatggaccccaaggacaactgctccaaggacgccaacgataccctgctgctccagctgaccaacaccagcgcctactacatgtacttgttgctgctgctgaagtccgtggtgtacttcgccatcatcacatgctgcctgctgcggagaaccgccttctgctgcaacggcgagaagtctagggccaagcgatctggatctggagcaacaaacttctcactactcaaacaagcaggtgacgtggaggagaatcccgggcctactagtatggactggatttggcgcatccttttccttgtcggcgctgctaccggcgcgcattccttcgaagaagtgcagctggttgaatctggcggcggaattgtgcagcctggcggatctctgaagctgagctgtgccgccagcggcttcaccttcaacgatttcggcatgagctggatcagacagacccctgacaagcggctggaactggtggctaccatcaacaccaatggcggcaccacacactaccccgactctgtgaagggcagattcagcatcagccgggacaacgccaagaaattcgtgtacctccagatgagcagcctgaagtccgacgacaccgccatctactactgccccagagaaggactggactactggggccagggaaccacactgacagtgtctagtacgcgtgcctctacaaagggaccctccgtgtttcctctggctcccagcagcaagtctacaagcggaggaacagccgctctgggctgcctggtcaaggattactttcccgagcctgtgaccgtgtcctggaatagcggagcactgacaagcggcgtgcacacctttccagccgtgctgcaaagcagcggcctgtactctctgagcagcgtggtcacagtgcctagctctagcctgggcacccagacctacatctgcaatgtgaaccacaagcctagcaacaccaaggtggacaagagagtggaacccaagagctgtgaagtgaaaaccgactccaccgaccacgtgaagcccaaagagacagagaacaccaagcagcccagcaagagctgccacaagcccaaggccatcgtgcacaccgagaaagtgaacatgatgagcctgaccgtgctgggcctgcggatgctgttcgccaaaaccgtggccgtgaacttcctgctgaccgccaagctgttcttcctc

SEQ ID NO: 3444 - DNA, 1854 bp, synthetic construct
  source 1..1854: mol_type = other DNA
atggccttaccagtgaccgccttgctcctgccgctggccttgctgctccacgccgccaggccggacatcgtgctgacccagagccagaaattcatgagcaccagcgtgggcgacagagtgtccatcatctgtagagccagccagtctgtgggaacagccgtggcttggtatcagctgaaggccggacagagccccaagctgctgatctacagcgccagcaacagattcaccggcgtgcccgatagattcacaggcagcggctctggcaccgacttcaccctgacaatcagcaacgtgcagagcgaggacctggccgactacttctgtcagcagtacagcacataccctctggcctttggcgctggcaccaagctggaacttaaactcgagggacagcctaaggccaatcctaccgtgacactgttccctccaagcagcgaagaactccaggccaacaaggccacacttgtgtgcctgatctccgacttctaccctggggctgtgacagtggcttggaaggccgatggatctcctgtgaaagccggcgtggaaaccaccaagccatccaagcagagcaacaacaaatacgccgccagctcctacctgagcctgacacctgagcagtggaagtcccacagatcctacagctgccaagtgacccacgaaggcagcaccgtggaaaagacagtggcccctacagagtgcagcggcagagccgattgcggcatcaccagcgccagctaccaccagggcgtgctgagcgccaccatcctgtacgagatcctgctgggcaaggccaccctgtacgccgtgctggtgtctgccctggtgctgatggctatggtcaagcggaaggacagccggggaagggccaagcgatctggatctggagcaacaaacttctcactactcaaacaagcaggtgacgtggaggagaatcccgggcctactagtatggactggatttggcgcatccttttccttgtcggcgctgctaccggcgcgcattccttcgaagaagtgcagctggttgaatctggcggcggaattgtgcagcctggcggatctctgaagctgagctgtgccgccagcggcttcaccttcaacgatttcggcatgagctggatcagacagacccctgacaagcggctggaactggtggctaccatcaacaccaatggcggcaccacacactaccccgactctgtgaagggcagattcagcatcagccgggacaacgccaagaaattcgtgtacctccagatgagcagcctgaagtccgacgacaccgccatctactactgccccagagaaggactggactactggggccagggaaccacactgacagtgtctagtacgcgtgcctctacaaagggaccctccgtgtttcctctggctcccagcagcaagtctacaagcggaggaacagccgctctgggctgcctggtcaaggattactttcccgagcctgtgaccgtgtcctggaatagcggagcactgacaagcggcgtgcacacctttccagccgtgctgcaaagcagcggcctgtactctctgagcagcgtggtcacagtgcctagctctagcctgggcacccagacctacatctgcaatgtgaaccacaagcctagcaacaccaaggtggacaagagagtggaacccaagagctgtatccccgaggacacattcttcccaagcagcgacgtgccctgcgacgtgaagctggtggaaaagagcttcgagacagacaccaacctgaacttccagaacctgagcgtgatcggcttcagaatcctgctgctgaaagtggccggctttaacctgctgatgaccctgcggctgtggtccagc

SEQ ID NO: 3445 - DNA, 1854 bp, synthetic construct
  source 1..1854: mol_type = other DNA
atggccttaccagtgaccgccttgctcctgccgctggccttgctgctccacgccgccaggccggacatcgtgctgacccagagccagaaattcatgagcaccagcgtgggcgacagagtgtccatcatctgtagagccagccagtctgtgggaacagccgtggcttggtatcagctgaaggccggacagagccccaagctgctgatctacagcgccagcaacagattcaccggcgtgcccgatagattcacaggcagcggctctggcaccgacttcaccctgacaatcagcaacgtgcagagcgaggacctggccgactacttctgtcagcagtacagcacataccctctggcctttggcgctggcaccaagctggaacttaaactcgagggacagcctaaggccaatcctaccgtgacactgttccctccaagcagcgaagaactccaggccaacaaggccacacttgtgtgcctgatctccgacttctaccctggggctgtgacagtggcttggaaggccgatggatctcctgtgaaagccggcgtggaaaccaccaagccatccaagcagagcaacaacaaatacgccgccagctcctacctgagcctgacacctgagcagtggaagtcccacagatcctacagctgccaagtgacccacgaaggcagcaccgtggaaaagacagtggcccctacagagtgcagcggcagagccgattgcggctttaccagcgagagctaccagcagggcgtgctgagcgccaccatcctgtacgagatcctgctgggcaaggccaccctgtacgccgtgctggtgtctgccctggtgctgatggctatggtcaagcggaaggacagccggggaagggccaagcgatctggatctggagcaacaaacttctcactactcaaacaagcaggtgacgtggaggagaatcccgggcctactagtatggactggatttggcgcatccttttccttgtcggcgctgctaccggcgcgcattccttcgaagaagtgcagctggttgaatctggcggcggaattgtgcagcctggcggatctctgaagctgagctgtgccgccagcggcttcaccttcaacgatttcggcatgagctggatcagacagacccctgacaagcggctggaactggtggctaccatcaacaccaatggcggcaccacacactaccccgactctgtgaagggcagattcagcatcagccgggacaacgccaagaaattcgtgtacctccagatgagcagcctgaagtccgacgacaccgccatctactactgccccagagaaggactggactactggggccagggaaccacactgacagtgtctagtacgcgtgcctctacaaagggaccctccgtgtttcctctggctcccagcagcaagtctacaagcggaggaacagccgctctgggctgcctggtcaaggattactttcccgagcctgtgaccgtgtcctggaatagcggagcactgacaagcggcgtgcacacctttccagccgtgctgcaaagcagcggcctgtactctctgagcagcgtggtcacagtgcctagctctagcctgggcacccagacctacatctgcaatgtgaaccacaagcctagcaacaccaaggtggacaagagagtggaacccaagagctgtatccccgaggacacattcttcccaagccccgagagcagctgcgacgtgaagctggtggaaaagagcttcgagacagacaccaacctgaacttccagaacctgagcgtgatcggcttcagaatcctgctgctgaaagtggccggctttaacctgctgatgaccctgcggctgtggtccagc

SEQ ID NO: 3446 - DNA, 1332 bp, synthetic construct
  source 1..1332: mol_type = other DNA
atggccttaccagtgaccgccttgctcctgccgctggccttgctgctccacgccgccaggccggacatcgtgctgacccagagccagaaattcatgagcaccagcgtgggcgacagagtgtccatcatctgtagagccagccagtctgtgggaacagccgtggcttggtatcagctgaaggccggacagagccccaagctgctgatctacagcgccagcaacagattcaccggcgtgcccgatagattcacaggcagcggctctggcaccgacttcaccctgacaatcagcaacgtgcagagcgaggacctggccgactacttctgtcagcagtacagcacataccctctggcctttggcgctggcaccaagctggaacttaaaggcggaggcggaagtggaggcggaggatctggcggcggaggctctgaagtgcagctggttgaatctggcggcggaattgtgcagcctggcggatctctgaagctgagctgtgccgccagcggcttcaccttcaacgatttcggcatgagctggatcagacagacccctgacaagcggctggaactggtggctaccatcaacaccaatggcggcaccacacactaccccgactctgtgaagggcagattcagcatcagccgggacaacgccaagaaattcgtgtacctccagatgagcagcctgaagtccgacgacaccgccatctactactgccccagagaaggactggactactggggccagggaaccacactgacagtgtctagtacgcgtgacggtaacgaggagatgggaggaatcactcaaaccccttacaaagtctcaatttcaggaacaactgttatccttacatgtccccagtatcctggcagcgagatcctttggcagcataacgacaagaatatagggggagatgaagacgataagaatatcggatctgacgaggatcacttgagcctgaaagagttctccgagcttgaacaaagcggatattatgtgtgctatccgcgcgggtcaaagccggaagacgctaacttttacctttatctccgagccagagtgtgcgaaaattgcatggaaatggacgttatgtccgttgctacaatagttatcgtagatatatgcatcacgggtggactgcttctgctggtttattattggtccaagaatagaaaggccaaagctaaacccgtgaccagaggcgctggcgcaggcggaaggcaaaggggacaaaacaaagaacggccaccaccagtgccaaatccagattatgagcctattcggaaaggacagagggacctgtactctggcctgaatcagagaagaatc

SEQ ID NO: 3447 - DNA, 1227 bp, synthetic construct
  source 1..1227: mol_type = other DNA
atggccttaccagtgaccgccttgctcctgccgctggccttgctgctccacgccgccaggccggacatcgtgctgacccagagccagaaattcatgagcaccagcgtgggcgacagagtgtccatcatctgtagagccagccagtctgtgggaacagccgtggcttggtatcagctgaaggccggacagagccccaagctgctgatctacagcgccagcaacagattcaccggcgtgcccgatagattcacaggcagcggctctggcaccgacttcaccctgacaatcagcaacgtgcagagcgaggacctggccgactacttctgtcagcagtacagcacataccctctggcctttggcgctggcaccaagctggaacttaaaggcggaggcggaagtggaggcggaggatctggcggcggaggctctgaagtgcagctggttgaatctggcggcggaattgtgcagcctggcggatctctgaagctgagctgtgccgccagcggcttcaccttcaacgatttcggcatgagctggatcagacagacccctgacaagcggctggaactggtggctaccatcaacaccaatggcggcaccacacactaccccgactctgtgaagggcagattcagcatcagccgggacaacgccaagaaattcgtgtacctccagatgagcagcctgaagtccgacgacaccgccatctactactgccccagagaaggactggactactggggccagggaaccacactgacagtgtctagtacgcgtttcaagatccccatcgaggaactggaagatcgggtgttcgtgaactgcaacacctctatcacctgggtggaaggcaccgtgggaacactgctgagcgacatcaccagactggacctcggcaagcggattctggaccctcggggcatctacagatgcaacggcaccgacatctacaaggacaaagaaagcaccgtgcaggtccactacagaatgtgccagtcctgcgtggaactggaccctgctacagtggccggcatcatcgtgaccgatgtgatcgctactctgctgctggctctgggagtgttctgcttcgccggacacgaaacaggcagactgtctggcgctgccgatacacaggccctgctgagaaacgaccaagtgtatcagcccctgcgcgacagagatgatgcccagtattctcacctcggcggcaactgggctagaaacaag

SEQ ID NO: 3448 - DNA, 1257 bp, synthetic construct
  source 1..1257: mol_type = other DNA
atggccttaccagtgaccgccttgctcctgccgctggccttgctgctccacgccgccaggccggacatcgtgctgacccagagccagaaattcatgagcaccagcgtgggcgacagagtgtccatcatctgtagagccagccagtctgtgggaacagccgtggcttggtatcagctgaaggccggacagagccccaagctgctgatctacagcgccagcaacagattcaccggcgtgcccgatagattcacaggcagcggctctggcaccgacttcaccctgacaatcagcaacgtgcagagcgaggacctggccgactacttctgtcagcagtacagcacataccctctggcctttggcgctggcaccaagctggaacttaaaggcggaggcggaagtggaggcggaggatctggcggcggaggctctgaagtgcagctggttgaatctggcggcggaattgtgcagcctggcggatctctgaagctgagctgtgccgccagcggcttcaccttcaacgatttcggcatgagctggatcagacagacccctgacaagcggctggaactggtggctaccatcaacaccaatggcggcaccacacactaccccgactctgtgaagggcagattcagcatcagccgggacaacgccaagaaattcgtgtacctccagatgagcagcctgaagtccgacgacaccgccatctactactgccccagagaaggactggactactggggccagggaaccacactgacagtgtctagtacgcgtcagagcatcaagggcaaccacctggtcaaggtgtacgactaccaagaggacggcagcgtgctgctgacatgtgatgccgaggccaagaacatcacctggtttaaggacggcaagatgatcggcttcctgaccgaggacaagaagaagtggaacctgggcagcaacgctaaggaccccagaggcatgtatcagtgcaagggcagccagaacaagagcaagcccctccaggtgtactaccggatgtgccagaactgcatcgagctgaacgccgctaccatcagcggctttctgttcgccgagatcgtgtccatcttcgtgctggccgtgggcgtgtactttatcgctggacaggatggcgtgcggcagagcagagcttccgataagcaaaccctgctgcctaacgaccagctgtaccagcctctgaaggacagagaggacgaccagtacagccacctccagggcaatcagctgagaagaaac

SEQ ID NO: 3449 - DNA, 1206 bp, synthetic construct
  source 1..1206: mol_type = other DNA
atggccttaccagtgaccgccttgctcctgccgctggccttgctgctccacgccgccaggccggacatcgtgctgacccagagccagaaattcatgagcaccagcgtgggcgacagagtgtccatcatctgtagagccagccagtctgtgggaacagccgtggcttggtatcagctgaaggccggacagagccccaagctgctgatctacagcgccagcaacagattcaccggcgtgcccgatagattcacaggcagcggctctggcaccgacttcaccctgacaatcagcaacgtgcagagcgaggacctggccgactacttctgtcagcagtacagcacataccctctggcctttggcgctggcaccaagctggaacttaaaggcggaggcggaagtggaggcggaggatctggcggcggaggctctgaagtgcagctggttgaatctggcggcggaattgtgcagcctggcggatctctgaagctgagctgtgccgccagcggcttcaccttcaacgatttcggcatgagctggatcagacagacccctgacaagcggctggaactggtggctaccatcaacaccaatggcggcaccacacactaccccgactctgtgaagggcagattcagcatcagccgggacaacgccaagaaattcgtgtacctccagatgagcagcctgaagtccgacgacaccgccatctactactgccccagagaaggactggactactggggccagggaaccacactgacagtgtctagtacgcgtcagagttttgggttgttggaccctaaattgtgctatctgttggacggaatcctgttcatttacggagtgatcctgaccgcattgttcctgcgggttaagttttccagatccgcagacgcacccgcttaccaacaagggcagaaccaactctacaatgaacttaatttggggcggagggaagagtacgacgttctggacaaaaggaggggacgagatcccgagatgggcggaaagcctcagcgaaggaagaatccgcaagaggggctttataacgaactccagaaagataaaatggcagaagcctatagtgagattgggatgaagggagaaaggaggaggggtaaaggtcacgatgggttgtaccaaggattgagcacagccactaaagatacctatgatgcgctccacatgcaggccctgccgccaaga

SEQ ID NO: 3450 - DNA, 1332 bp, synthetic construct
  source 1..1332: mol_type = other DNA
atggccttaccagtgaccgccttgctcctgccgctggccttgctgctccacgccgccaggccggaagtgcagctggttgaatctggcggcggaattgtgcagcctggcggatctctgaagctgagctgtgccgccagcggcttcaccttcaacgatttcggcatgagctggatcagacagacccctgacaagcggctggaactggtggctaccatcaacaccaatggcggcaccacacactaccccgactctgtgaagggcagattcagcatcagccgggacaacgccaagaaattcgtgtacctccagatgagcagcctgaagtccgacgacaccgccatctactactgccccagagaaggactggactactggggccagggaaccacactgacagtgtctagtggcggaggcggaagtggaggcggaggatctggcggcggaggctctgacatcgtgctgacccagagccagaaattcatgagcaccagcgtgggcgacagagtgtccatcatctgtagagccagccagtctgtgggaacagccgtggcttggtatcagctgaaggccggacagagccccaagctgctgatctacagcgccagcaacagattcaccggcgtgcccgatagattcacaggcagcggctctggcaccgacttcaccctgacaatcagcaacgtgcagagcgaggacctggccgactacttctgtcagcagtacagcacataccctctggcctttggcgctggcaccaagctggaacttaaaacgcgtgacggtaacgaggagatgggaggaatcactcaaaccccttacaaagtctcaatttcaggaacaactgttatccttacatgtccccagtatcctggcagcgagatcctttggcagcataacgacaagaatatagggggagatgaagacgataagaatatcggatctgacgaggatcacttgagcctgaaagagttctccgagcttgaacaaagcggatattatgtgtgctatccgcgcgggtcaaagccggaagacgctaacttttacctttatctccgagccagagtgtgcgaaaattgcatggaaatggacgttatgtccgttgctacaatagttatcgtagatatatgcatcacgggtggactgcttctgctggtttattattggtccaagaatagaaaggccaaagctaaacccgtgaccagaggcgctggcgcaggcggaaggcaaaggggacaaaacaaagaacggccaccaccagtgccaaatccagattatgagcctattcggaaaggacagagggacctgtactctggcctgaatcagagaagaatc

SEQ ID NO: 3451 - DNA, 1227 bp, synthetic construct
  source 1..1227: mol_type = other DNA
atggccttaccagtgaccgccttgctcctgccgctggccttgctgctccacgccgccaggccggaagtgcagctggttgaatctggcggcggaattgtgcagcctggcggatctctgaagctgagctgtgccgccagcggcttcaccttcaacgatttcggcatgagctggatcagacagacccctgacaagcggctggaactggtggctaccatcaacaccaatggcggcaccacacactaccccgactctgtgaagggcagattcagcatcagccgggacaacgccaagaaattcgtgtacctccagatgagcagcctgaagtccgacgacaccgccatctactactgccccagagaaggactggactactggggccagggaaccacactgacagtgtctagtggcggaggcggaagtggaggcggaggatctggcggcggaggctctgacatcgtgctgacccagagccagaaattcatgagcaccagcgtgggcgacagagtgtccatcatctgtagagccagccagtctgtgggaacagccgtggcttggtatcagctgaaggccggacagagccccaagctgctgatctacagcgccagcaacagattcaccggcgtgcccgatagattcacaggcagcggctctggcaccgacttcaccctgacaatcagcaacgtgcagagcgaggacctggccgactacttctgtcagcagtacagcacataccctctggcctttggcgctggcaccaagctggaacttaaaacgcgtttcaagatccccatcgaggaactggaagatcgggtgttcgtgaactgcaacacctctatcacctgggtggaaggcaccgtgggaacactgctgagcgacatcaccagactggacctcggcaagcggattctggaccctcggggcatctacagatgcaacggcaccgacatctacaaggacaaagaaagcaccgtgcaggtccactacagaatgtgccagtcctgcgtggaactggaccctgctacagtggccggcatcatcgtgaccgatgtgatcgctactctgctgctggctctgggagtgttctgcttcgccggacacgaaacaggcagactgtctggcgctgccgatacacaggccctgctgagaaacgaccaagtgtatcagcccctgcgcgacagagatgatgcccagtattctcacctcggcggcaactgggctagaaacaag

SEQ ID NO: 3452 - DNA, 1257 bp, synthetic construct
  source 1..1257: mol_type = other DNA
atggccttaccagtgaccgccttgctcctgccgctggccttgctgctccacgccgccaggccggaagtgcagctggttgaatctggcggcggaattgtgcagcctggcggatctctgaagctgagctgtgccgccagcggcttcaccttcaacgatttcggcatgagctggatcagacagacccctgacaagcggctggaactggtggctaccatcaacaccaatggcggcaccacacactaccccgactctgtgaagggcagattcagcatcagccgggacaacgccaagaaattcgtgtacctccagatgagcagcctgaagtccgacgacaccgccatctactactgccccagagaaggactggactactggggccagggaaccacactgacagtgtctagtggcggaggcggaagtggaggcggaggatctggcggcggaggctctgacatcgtgctgacccagagccagaaattcatgagcaccagcgtgggcgacagagtgtccatcatctgtagagccagccagtctgtgggaacagccgtggcttggtatcagctgaaggccggacagagccccaagctgctgatctacagcgccagcaacagattcaccggcgtgcccgatagattcacaggcagcggctctggcaccgacttcaccctgacaatcagcaacgtgcagagcgaggacctggccgactacttctgtcagcagtacagcacataccctctggcctttggcgctggcaccaagctggaacttaaaacgcgtcagagcatcaagggcaaccacctggtcaaggtgtacgactaccaagaggacggcagcgtgctgctgacatgtgatgccgaggccaagaacatcacctggtttaaggacggcaagatgatcggcttcctgaccgaggacaagaagaagtggaacctgggcagcaacgctaaggaccccagaggcatgtatcagtgcaagggcagccagaacaagagcaagcccctccaggtgtactaccggatgtgccagaactgcatcgagctgaacgccgctaccatcagcggctttctgttcgccgagatcgtgtccatcttcgtgctggccgtgggcgtgtactttatcgctggacaggatggcgtgcggcagagcagagcttccgataagcaaaccctgctgcctaacgaccagctgtaccagcctctgaaggacagagaggacgaccagtacagccacctccagggcaatcagctgagaagaaac

SEQ ID NO: 3453 - DNA, 1206 bp, synthetic construct
  source 1..1206: mol_type = other DNA
atggccttaccagtgaccgccttgctcctgccgctggccttgctgctccacgccgccaggccggaagtgcagctggttgaatctggcggcggaattgtgcagcctggcggatctctgaagctgagctgtgccgccagcggcttcaccttcaacgatttcggcatgagctggatcagacagacccctgacaagcggctggaactggtggctaccatcaacaccaatggcggcaccacacactaccccgactctgtgaagggcagattcagcatcagccgggacaacgccaagaaattcgtgtacctccagatgagcagcctgaagtccgacgacaccgccatctactactgccccagagaaggactggactactggggccagggaaccacactgacagtgtctagtggcggaggcggaagtggaggcggaggatctggcggcggaggctctgacatcgtgctgacccagagccagaaattcatgagcaccagcgtgggcgacagagtgtccatcatctgtagagccagccagtctgtgggaacagccgtggcttggtatcagctgaaggccggacagagccccaagctgctgatctacagcgccagcaacagattcaccggcgtgcccgatagattcacaggcagcggctctggcaccgacttcaccctgacaatcagcaacgtgcagagcgaggacctggccgactacttctgtcagcagtacagcacataccctctggcctttggcgctggcaccaagctggaacttaaaacgcgtcagagttttgggttgttggaccctaaattgtgctatctgttggacggaatcctgttcatttacggagtgatcctgaccgcattgttcctgcgggttaagttttccagatccgcagacgcacccgcttaccaacaagggcagaaccaactctacaatgaacttaatttggggcggagggaagagtacgacgttctggacaaaaggaggggacgagatcccgagatgggcggaaagcctcagcgaaggaagaatccgcaagaggggctttataacgaactccagaaagataaaatggcagaagcctatagtgagattgggatgaagggagaaaggaggaggggtaaaggtcacgatgggttgtaccaaggattgagcacagccactaaagatacctatgatgcgctccacatgcaggccctgccgccaaga

SEQ ID NO: 3454 - DNA, 1491 bp, synthetic construct
  source 1..1491: mol_type = other DNA
atggccttaccagtgaccgccttgctcctgccgctggccttgctgctccacgccgccaggccggacatcgtgctgacccagagccagaaattcatgagcaccagcgtgggcgacagagtgtccatcatctgtagagccagccagtctgtgggaacagccgtggcttggtatcagctgaaggccggacagagccccaagctgctgatctacagcgccagcaacagattcaccggcgtgcccgatagattcacaggcagcggctctggcaccgacttcaccctgacaatcagcaacgtgcagagcgaggacctggccgactacttctgtcagcagtacagcacataccctctggcctttggcgctggcaccaagctggaacttaaaggcggaggcggaagtggaggcggaggatctggcggcggaggctctgaagtgcagctggttgaatctggcggcggaattgtgcagcctggcggatctctgaagctgagctgtgccgccagcggcttcaccttcaacgatttcggcatgagctggatcagacagacccctgacaagcggctggaactggtggctaccatcaacaccaatggcggcaccacacactaccccgactctgtgaagggcagattcagcatcagccgggacaacgccaagaaattcgtgtacctccagatgagcagcctgaagtccgacgacaccgccatctactactgccccagagaaggactggactactggggccagggaaccacactgacagtgtctagtacgcgtggaatgaggactgaggatcttcccaaagctgtcgtctttctcgaaccccaatggtatcgggtgctcgaaaaagactctgtgacactgaaatgccaaggggcctactctcccgaggacaactccacacagtggtttcataatgagtccctcatcagctctcaggccagctcttatttcattgatgccgctacagtggacgactccggcgagtatcggtgtcagaccaatctgtctacactgtctgaccccgtgcagcttgaggtccacattggatggttgctcttgcaagccccacgctgggttttcaaagaggaagatccaatccatctgcggtgccacagctggaaaaacaccgctctccacaaagtcacatacctgcaaaatggcaaaggacgcaaatacttccatcacaattccgatttttacattccgaaggctaccctgaaagacagcggcagctatttctgccggggactcgtcggctccaagaatgtgtcctccgaaaccgtgaatatcacgattacccaaggactggctgtgcctacaatctctagcttctttccgcctggataccaagtctccttctgtcttgtgatggtcctcctgtttgctgtggacacaggactgtacttttccgtgaaaacgaacatccgcagctccacacgcgattggaaagatcacaagtttaaatggcgcaaagatccccaggacaag

SEQ ID NO: 3455 - DNA, 2340 bp, synthetic construct
  source 1..2340: mol_type = other DNA
atggccttaccagtgaccgccttgctcctgccgctggccttgctgctccacgccgccaggccggacatcgtgctgacccagagccagaaattcatgagcaccagcgtgggcgacagagtgtccatcatctgtagagccagccagtctgtgggaacagccgtggcttggtatcagctgaaggccggacagagccccaagctgctgatctacagcgccagcaacagattcaccggcgtgcccgatagattcacaggcagcggctctggcaccgacttcaccctgacaatcagcaacgtgcagagcgaggacctggccgactacttctgtcagcagtacagcacataccctctggcctttggcgctggcaccaagctggaacttaaaggcggaggcggaagtggaggcggaggatctggcggcggaggctctgaagtgcagctggttgaatctggcggcggaattgtgcagcctggcggatctctgaagctgagctgtgccgccagcggcttcaccttcaacgatttcggcatgagctggatcagacagacccctgacaagcggctggaactggtggctaccatcaacaccaatggcggcaccacacactaccccgactctgtgaagggcagattcagcatcagccgggacaacgccaagaaattcgtgtacctccagatgagcagcctgaagtccgacgacaccgccatctactactgccccagagaaggactggactactggggccagggaaccacactgacagtgtctagtacgcgtggaggctctggacaacaacagaccctgcctaaaccattcatctgggctgaaccccactttatggttccgaaagagaaacaagtcacgatttgttgccaagggaattacggggccgtcgagtatcagctccactttgagggctccctgtttgctgtggatcggcccaagccacctgaaagaatcaacaaagtccaattctatattcctgatatgaactcccgcatggcaggccagtattcatgtatctaccgcgtgggagaactttggagtgaaccctctaacctgctggacctcgtcgtgacagagatgtatgatacacccacactgtctgtgcaccctgggccagaagttatcagcggagaaaaagttaccttttattgccgcctcgataccgctacctctatgttcctcttgctgaaagagggccgcagctctcacgtgcagcgaggctacggaaaggtccaagctgagtttcctctcggccccgtgaccaccgctcacaggggcacatatagatgttttggctcttataacaatcatgcctggtcattcccatccgagcctgtgaaactgctggtcacaggcgatattgagaatacctctctggccccagaagatcctacattccccgccgacacatggggaacatatctgctgacaaccgaaaccgggctgcaaaaggaccatgctctgtgggatcataccgctcagaatctgcttcggatggggcttgcattcctggtcctggtggctcttgtctggtttctggtcgaggactggctgtcccggaagagaaccagagaaagagcttccagggccagcacctgggaaggcagacgcagactgaatactcagaccctgcgcgccaagagaagcggatctggcgtgaagcagaccctgaatttcgacctgctgaagctggctggcgacgtggaatccaacccaggcccttctagaggccatatgaccgagtacaagcccacggtgcgcctcgccacccgcgacgacgtccccagggccgtacgcaccctcgccgccgcgttcgccgactaccccgccacgcgccacaccgtcgatccggaccgccacatcgagcgggtcaccgagctgcaagaactcttcctcacgcgcgtcgggctcgacatcggcaaggtgtgggtcgcggacgacggcgccgcggtggcggtctggaccacgccggagagcgtcgaagcgggggcggtgttcgccgagatcggcccgcgcatggccgagttgagcggttcccggctggccgcgcagcaacagatggaaggcctcctggcgccgcaccggcccaaggagcccgcgtggttcctggccaccgtcggcgtctcgcccgaccaccagggcaagggtctgggcagcgccgtcgtgctccccggagtggaggcggccgagcgcgccggggtgcccgccttcctggagacctccgcgccccgcaacctccccttctacgagcggctcggcttcaccgtcaccgccgacgtcgaggtgcccgaaggaccgcgcacctggtgcatgacccgcaagcccggtgcctga

SEQ ID NO: 3456 - DNA, 1839 bp, synthetic construct
  source 1..1839: mol_type = other DNA
atggccttaccagtgaccgccttgctcctgccgctggccttgctgctccacgccgccaggccggacatcgtgctgacccagagccagaaattcatgagcaccagcgtgggcgacagagtgtccatcatctgtagagccagccagtctgtgggaacagccgtggcttggtatcagctgaaggccggacagagccccaagctgctgatctacagcgccagcaacagattcaccggcgtgcccgatagattcacaggcagcggctctggcaccgacttcaccctgacaatcagcaacgtgcagagcgaggacctggccgactacttctgtcagcagtacagcacataccctctggcctttggcgctggcaccaagctggaacttaaaggcggaggcggaagtggaggcggaggatctggcggcggaggctctgaagtgcagctggttgaatctggcggcggaattgtgcagcctggcggatctctgaagctgagctgtgccgccagcggcttcaccttcaacgatttcggcatgagctggatcagacagacccctgacaagcggctggaactggtggctaccatcaacaccaatggcggcaccacacactaccccgactctgtgaagggcagattcagcatcagccgggacaacgccaagaaattcgtgtacctccagatgagcagcctgaagtccgacgacaccgccatctactactgccccagagaaggactggactactggggccagggaaccacactgacagtgtctagtacgcgtaaaattgaagttatgtatcctcctccttacctagacaatgagaagagcaatggaaccattatccatgtgaaaggggcgcgtggcgatattgagaatacctctctggccccagaagatcctacattccccgccgacacatggggaacatatctgctgacaaccgaaaccgggctgcaaaaggaccatgctctgtgggatcataccgctcagaatctgcttcggatggggcttgcattcctggtcctggtggctcttgtctggtttctggtcgaggactggctgtcccggaagagaaccagagaaagagcttccagggccagcacctgggaaggcagacgcagactgaatactcagaccctgcgcgccaagagaagcggatctggcgtgaagcagaccctgaatttcgacctgctgaagctggctggcgacgtggaatccaacccaggcccttctagaggccatatgaccgagtacaagcccacggtgcgcctcgccacccgcgacgacgtccccagggccgtacgcaccctcgccgccgcgttcgccgactaccccgccacgcgccacaccgtcgatccggaccgccacatcgagcgggtcaccgagctgcaagaactcttcctcacgcgcgtcgggctcgacatcggcaaggtgtgggtcgcggacgacggcgccgcggtggcggtctggaccacgccggagagcgtcgaagcgggggcggtgttcgccgagatcggcccgcgcatggccgagttgagcggttcccggctggccgcgcagcaacagatggaaggcctcctggcgccgcaccggcccaaggagcccgcgtggttcctggccaccgtcggcgtctcgcccgaccaccagggcaagggtctgggcagcgccgtcgtgctccccggagtggaggcggccgagcgcgccggggtgcccgccttcctggagacctccgcgccccgcaacctccccttctacgagcggctcggcttcaccgtcaccgccgacgtcgaggtgcccgaaggaccgcgcacctggtgcatgacccgcaagcccggtgcctga

SEQ ID NO: 3457 - DNA, 2100 bp, synthetic construct
  source 1..2100: mol_type = other DNA
atggccttaccagtgaccgccttgctcctgccgctggccttgctgctccacgccgccaggccggacatcgtgctgacccagagccagaaattcatgagcaccagcgtgggcgacagagtgtccatcatctgtagagccagccagtctgtgggaacagccgtggcttggtatcagctgaaggccggacagagccccaagctgctgatctacagcgccagcaacagattcaccggcgtgcccgatagattcacaggcagcggctctggcaccgacttcaccctgacaatcagcaacgtgcagagcgaggacctggccgactacttctgtcagcagtacagcacataccctctggcctttggcgctggcaccaagctggaacttaaaggcggaggcggaagtggaggcggaggatctggcggcggaggctctgaagtgcagctggttgaatctggcggcggaattgtgcagcctggcggatctctgaagctgagctgtgccgccagcggcttcaccttcaacgatttcggcatgagctggatcagacagacccctgacaagcggctggaactggtggctaccatcaacaccaatggcggcaccacacactaccccgactctgtgaagggcagattcagcatcagccgggacaacgccaagaaattcgtgtacctccagatgagcagcctgaagtccgacgacaccgccatctactactgccccagagaaggactggactactggggccagggaaccacactgacagtgtctagtacgcgtctgtgggtgtcccagccacctgaaattcggacactggaaggctcctccgcctttctgccctgtagctttaacgccagccaggggagactcgccatcggctctgtgacatggttccgggatgaagtcgtccctggaaaagaagttcgcaacggaacaccagagttcagaggcagactcgccccactggcaagctccagattcctgcatgaccatcaggctgaactgcacattagggacgtgcggggccacgatgcctccatctatgtgtgtcgggtcgaagtgcttggactcggcgtcggaactggaaacggcactaggctggtggtcgagaaagaacatccacagcttggcgctggcaccgtcctgttgcttagagccggattctatgccgtcagcttcctgtccgtggctgtggggtctacagtgtattaccagggaaaatgtctcacctggaaaggccccagacgccagcttccagctgttgttcctgctccactgccaccaccttgtggctcctctgctcacttgcttccaccagtgcctggcggacgcgccaagagaagcggatctggcgtgaagcagaccctgaatttcgacctgctgaagctggctggcgacgtggaatccaacccaggcccttctagaatgtaccggatgcagctgctgagctgtatcgccctgtctctggccctggtcacaaatagcgcccctaccagcagcagcaccaagaaaacccagctgcaactggaacacctcctgctggacctccagatgatcctgaacggcatcaacaactacaagaaccccaagctgaccgagatgctgaccgccaagttctacatgcccaagaaggccaccgagctgaagcacctccagtgcctggaagaggaactgaagcccctggaagaagtgctgaatctggcccagagcaagaacttccacctgaggccaagggacctgatctccaacatcaacgtgatcgtgctggaactgaaaggcagcgagacaaccttcatgtgcgagtacgccgacgagacagctaccatcgtggaatttctgaatcggtggatcaccttctgccagagcatcatcagcaccctgacaaagatcgaagtgatgtaccctcctccttacctggacaacgagaagtccaacggcaccatcatccacgtgaagggcaagcacctgtgtccttctccactgttccccggacctagcaagcctttctgggtgctcgttgttgttggcggcgtgctggcctgttacagcctgctggttaccgtggccttcatcatcttttgggtccgaagcaagcggagctaa

SEQ ID NO: 3458 - DNA, 2028 bp, synthetic construct
  source 1..2028: mol_type = other DNA
atggccttaccagtgaccgccttgctcctgccgctggccttgctgctccacgccgccaggccggacatcgtgctgacccagagccagaaattcatgagcaccagcgtgggcgacagagtgtccatcatctgtagagccagccagtctgtgggaacagccgtggcttggtatcagctgaaggccggacagagccccaagctgctgatctacagcgccagcaacagattcaccggcgtgcccgatagattcacaggcagcggctctggcaccgacttcaccctgacaatcagcaacgtgcagagcgaggacctggccgactacttctgtcagcagtacagcacataccctctggcctttggcgctggcaccaagctggaacttaaaggcggaggcggaagtggaggcggaggatctggcggcggaggctctgaagtgcagctggttgaatctggcggcggaattgtgcagcctggcggatctctgaagctgagctgtgccgccagcggcttcaccttcaacgatttcggcatgagctggatcagacagacccctgacaagcggctggaactggtggctaccatcaacaccaatggcggcaccacacactaccccgactctgtgaagggcagattcagcatcagccgggacaacgccaagaaattcgtgtacctccagatgagcagcctgaagtccgacgacaccgccatctactactgccccagagaaggactggactactggggccagggaaccacactgacagtgtctagtacgcgtctgtgggtgtcccagccacctgaaattcggacactggaaggctcctccgcctttctgccctgtagctttaacgccagccaggggagactcgccatcggctctgtgacatggttccgggatgaagtcgtccctggaaaagaagttcgcaacggaacaccagagttcagaggcagactcgccccactggcaagctccagattcctgcatgaccatcaggctgaactgcacattagggacgtgcggggccacgatgcctccatctatgtgtgtcgggtcgaagtgcttggactcggcgtcggaactggaaacggcactaggctggtggtcgagaaagaacatccacagcttggcgctggcaccgtcctgttgcttagagccggattctatgccgtcagcttcctgtccgtggctgtggggtctacagtgtattaccagggaaaatgtctcacctggaaaggccccagacgccagcttccagctgttgttcctgctccactgccaccaccttgtggctcctctgctcacttgcttccaccagtgcctggcggacgcgccaagagaagcggatctggcgtgaagcagaccctgaatttcgacctgctgaagctggctggcgacgtggaatccaacccaggcccttctagaggccatatgaccgagtacaagcccacggtgcgcctcgccacccgcgacgacgtccccagggccgtacgcaccctcgccgccgcgttcgccgactaccccgccacgcgccacaccgtcgatccggaccgccacatcgagcgggtcaccgagctgcaagaactcttcctcacgcgcgtcgggctcgacatcggcaaggtgtgggtcgcggacgacggcgccgcggtggcggtctggaccacgccggagagcgtcgaagcgggggcggtgttcgccgagatcggcccgcgcatggccgagttgagcggttcccggctggccgcgcagcaacagatggaaggcctcctggcgccgcaccggcccaaggagcccgcgtggttcctggccaccgtcggcgtctcgcccgaccaccagggcaagggtctgggcagcgccgtcgtgctccccggagtggaggcggccgagcgcgccggggtgcccgccttcctggagacctccgcgccccgcaacctccccttctacgagcggctcggcttcaccgtcaccgccgacgtcgaggtgcccgaaggaccgcgcacctggtgcatgacccgcaagcccggtgcctga

SEQ ID NO: 3459 - DNA, 1053 bp, synthetic construct
  source 1..1053: mol_type = other DNA
atggccttaccagtgaccgccttgctcctgccgctggccttgctgctccacgccgccaggccggacatcgtgctgacccagagccagaaattcatgagcaccagcgtgggcgacagagtgtccatcatctgtagagccagccagtctgtgggaacagccgtggcttggtatcagctgaaggccggacagagccccaagctgctgatctacagcgccagcaacagattcaccggcgtgcccgatagattcacaggcagcggctctggcaccgacttcaccctgacaatcagcaacgtgcagagcgaggacctggccgactacttctgtcagcagtacagcacataccctctggcctttggcgctggcaccaagctggaacttaaaggcggaggcggaagtggaggcggaggatctggcggcggaggctctgaagtgcagctggttgaatctggcggcggaattgtgcagcctggcggatctctgaagctgagctgtgccgccagcggcttcaccttcaacgatttcggcatgagctggatcagacagacccctgacaagcggctggaactggtggctaccatcaacaccaatggcggcaccacacactaccccgactctgtgaagggcagattcagcatcagccgggacaacgccaagaaattcgtgtacctccagatgagcagcctgaagtccgacgacaccgccatctactactgccccagagaaggactggactactggggccagggaaccacactgacagtgtctagtacgcgtaaaattgaagttatgtatcctcctccttacctagacaatgagaagagcaatggaaccattatccatgtgaaaggggcgcgtatcacccagggcctggccgtgtctaccatcagcagctttttcccacccggctaccaggtgtccttctgcctcgtgatggtgctgctgttcgccgtggacaccggcctgtacttcagcgtgaaaacaaacatccggtccagcaccagagactggaaggaccacaagttcaagtggcggaaggacccccaggacaag

SEQ ID NO: 3460 - DNA, 1053 bp, synthetic construct
  source 1..1053: mol_type = other DNA
atggccttaccagtgaccgccttgctcctgccgctggccttgctgctccacgccgccaggccggacatcgtgctgacccagagccagaaattcatgagcaccagcgtgggcgacagagtgtccatcatctgtagagccagccagtctgtgggaacagccgtggcttggtatcagctgaaggccggacagagccccaagctgctgatctacagcgccagcaacagattcaccggcgtgcccgatagattcacaggcagcggctctggcaccgacttcaccctgacaatcagcaacgtgcagagcgaggacctggccgactacttctgtcagcagtacagcacataccctctggcctttggcgctggcaccaagctggaacttaaaggcggaggcggaagtggaggcggaggatctggcggcggaggctctgaagtgcagctggttgaatctggcggcggaattgtgcagcctggcggatctctgaagctgagctgtgccgccagcggcttcaccttcaacgatttcggcatgagctggatcagacagacccctgacaagcggctggaactggtggctaccatcaacaccaatggcggcaccacacactaccccgactctgtgaagggcagattcagcatcagccgggacaacgccaagaaattcgtgtacctccagatgagcagcctgaagtccgacgacaccgccatctactactgccccagagaaggactggactactggggccagggaaccacactgacagtgtctagtacgcgtaaaattgaagttatgtatcctcctccttacctagacaatgagaagagcaatggaaccattatccatgtgaaaggggcgcgtattacccaaggactggctgtgcctacaatctctagcttctttccgcctggataccaagtctccttctgtcttgtgatggtcctcctgtttgctgtggacacaggactgtacttttccgtgaaaacgaacatccgcagctccacacgcgattggaaagatcacaagtttaaatggcgcaaagatccccaggacaag

SEQ ID NO: 3461 - DNA, 990 bp, synthetic construct
  source 1..990: mol_type = other DNA
atggccttaccagtgaccgccttgctcctgccgctggccttgctgctccacgccgccaggccggacatcgtgctgacccagagccagaaattcatgagcaccagcgtgggcgacagagtgtccatcatctgtagagccagccagtctgtgggaacagccgtggcttggtatcagctgaaggccggacagagccccaagctgctgatctacagcgccagcaacagattcaccggcgtgcccgatagattcacaggcagcggctctggcaccgacttcaccctgacaatcagcaacgtgcagagcgaggacctggccgactacttctgtcagcagtacagcacataccctctggcctttggcgctggcaccaagctggaacttaaaggcggaggcggaagtggaggcggaggatctggcggcggaggctctgaagtgcagctggttgaatctggcggcggaattgtgcagcctggcggatctctgaagctgagctgtgccgccagcggcttcaccttcaacgatttcggcatgagctggatcagacagacccctgacaagcggctggaactggtggctaccatcaacaccaatggcggcaccacacactaccccgactctgtgaagggcagattcagcatcagccgggacaacgccaagaaattcgtgtacctccagatgagcagcctgaagtccgacgacaccgccatctactactgccccagagaaggactggactactggggccagggaaccacactgacagtgtctagtacgcgtaaaattgaagttatgtatcctcctccttacctagacaatgagaagagcaatggaaccattatccatgtgaaaggggcgcgtattacccaaggactggctgtgtctacaatctctagcttctctccgcctggataccaagtctccttctgtcttgtgatggtcctcctgtttgctgtggacacaggactgtacttttccgtgaaaacgaacatc

SEQ ID NO: 3462 - DNA, 1083 bp, synthetic construct
  source 1..1083: mol_type = other DNA
atggccttaccagtgaccgccttgctcctgccgctggccttgctgctccacgccgccaggccggacatcgtgctgacccagagccagaaattcatgagcaccagcgtgggcgacagagtgtccatcatctgtagagccagccagtctgtgggaacagccgtggcttggtatcagctgaaggccggacagagccccaagctgctgatctacagcgccagcaacagattcaccggcgtgcccgatagattcacaggcagcggctctggcaccgacttcaccctgacaatcagcaacgtgcagagcgaggacctggccgactacttctgtcagcagtacagcacataccctctggcctttggcgctggcaccaagctggaacttaaaggcggaggcggaagtggaggcggaggatctggcggcggaggctctgaagtgcagctggttgaatctggcggcggaattgtgcagcctggcggatctctgaagctgagctgtgccgccagcggcttcaccttcaacgatttcggcatgagctggatcagacagacccctgacaagcggctggaactggtggctaccatcaacaccaatggcggcaccacacactaccccgactctgtgaagggcagattcagcatcagccgggacaacgccaagaaattcgtgtacctccagatgagcagcctgaagtccgacgacaccgccatctactactgccccagagaaggactggactactggggccagggaaccacactgacagtgtctagtacgcgtaaaattgaagttatgtatcctcctccttacctagacaatgagaagagcaatggaaccattatccatgtgaaaggggcgcgtgtcgagaaagaacatccacagcttggcgctggcaccgtcctgttgcttagagccggattctatgccgtcagcttcctgtccgtggctgtggggtctacagtgtattaccagggaaaatgtctcacctggaaaggccccagacgccagcttccagctgttgttcctgctccactgccaccaccttgtggctcctctgctcacttgcttccaccagtgcctggcgga

SEQ ID NO: 3463 - DNA, 1326 bp, synthetic construct
  source 1..1326: mol_type = other DNA
atggccttaccagtgaccgccttgctcctgccgctggccttgctgctccacgccgccaggccggacatcgtgctgacccagagccagaaattcatgagcaccagcgtgggcgacagagtgtccatcatctgtagagccagccagtctgtgggaacagccgtggcttggtatcagctgaaggccggacagagccccaagctgctgatctacagcgccagcaacagattcaccggcgtgcccgatagattcacaggcagcggctctggcaccgacttcaccctgacaatcagcaacgtgcagagcgaggacctggccgactacttctgtcagcagtacagcacataccctctggcctttggcgctggcaccaagctggaacttaaaggcggaggcggaagtggaggcggaggatctggcggcggaggctctgaagtgcagctggttgaatctggcggcggaattgtgcagcctggcggatctctgaagctgagctgtgccgccagcggcttcaccttcaacgatttcggcatgagctggatcagacagacccctgacaagcggctggaactggtggctaccatcaacaccaatggcggcaccacacactaccccgactctgtgaagggcagattcagcatcagccgggacaacgccaagaaattcgtgtacctccagatgagcagcctgaagtccgacgacaccgccatctactactgccccagagaaggactggactactggggccagggaaccacactgacagtgtctagtacgcgtaaaattgaagttatgtatcctcctccttacctagacaatgagaagagcaatggaaccattatccatgtgaaaggggcgcgtaagtctgtgcgcttttacctggtcgtcagccctgccagtgcctccactcagacatcttggaccccaagggaccttgtgtcctctcagacacagacacagtcctgcgtgccaccaactgctggcgcaagacaggctccagagtctcccagcacaatccccgtcccttctcagccccagaactccacacttaggccaggaccagctgctccaatcgcactggtcccagtgttctgcggactgctggttgccaagtctctggtgctgagcgcactcctcgtttggtggggcgatatttggtggaaaacgatgatggaattgagatccctcgatacgcagaaagccacatgccaccttcagcaagtcacagacttgccttggaccagcgtcagctctcccgtggaacgggaaattctgtatcatacagtggcccgcaccaagatttccgacgatgacgacgagcacacactg

SEQ ID NO: 3464 - DNA, 1137 bp, synthetic construct
  source 1..1137: mol_type = other DNA
atggccttaccagtgaccgccttgctcctgccgctggccttgctgctccacgccgccaggccggacatcgtgctgacccagagccagaaattcatgagcaccagcgtgggcgacagagtgtccatcatctgtagagccagccagtctgtgggaacagccgtggcttggtatcagctgaaggccggacagagccccaagctgctgatctacagcgccagcaacagattcaccggcgtgcccgatagattcacaggcagcggctctggcaccgacttcaccctgacaatcagcaacgtgcagagcgaggacctggccgactacttctgtcagcagtacagcacataccctctggcctttggcgctggcaccaagctggaacttaaaggcggaggcggaagtggaggcggaggatctggcggcggaggctctgaagtgcagctggttgaatctggcggcggaattgtgcagcctggcggatctctgaagctgagctgtgccgccagcggcttcaccttcaacgatttcggcatgagctggatcagacagacccctgacaagcggctggaactggtggctaccatcaacaccaatggcggcaccacacactaccccgactctgtgaagggcagattcagcatcagccgggacaacgccaagaaattcgtgtacctccagatgagcagcctgaagtccgacgacaccgccatctactactgccccagagaaggactggactactggggccagggaaccacactgacagtgtctagtacgcgtaaaattgaagttatgtatcctcctccttacctagacaatgagaagagcaatggaaccattatccatgtgaaaggggcgcgtggcgatattgagaatacctctctggccccagaagatcctacattccccgccgacacatggggaacatatctgctgacaaccgaaaccgggctgcaaaaggaccatgctctgtgggatcataccgctcagaatctgcttcggatggggcttgcattcctggtcctggtggctcttgtctggtttctggtcgaggactggctgtcccggaagagaaccagagaaagagcttccagggccagcacctgggaaggcagacgcagactgaatactcagaccctg

SEQ ID NO: 3465 - DNA, 2928 bp, synthetic construct
  source 1..2928: mol_type = other DNA
atggccttaccagtgaccgccttgctcctgccgctggccttgctgctccacgccgccaggccggacatcgtgctgacccagagccagaaattcatgagcaccagcgtgggcgacagagtgtccatcatctgtagagccagccagtctgtgggaacagccgtggcttggtatcagctgaaggccggacagagccccaagctgctgatctacagcgccagcaacagattcaccggcgtgcccgatagattcacaggcagcggctctggcaccgacttcaccctgacaatcagcaacgtgcagagcgaggacctggccgactacttctgtcagcagtacagcacataccctctggcctttggcgctggcaccaagctggaacttaaactcgagggacagcctaaggccaatcctaccgtgacactgttccctccaagcagcgaagaactccaggccaacaaggccacacttgtgtgcctgatctccgacttctaccctggggctgtgacagtggcttggaaggccgatggatctcctgtgaaagccggcgtggaaaccaccaagccatccaagcagagcaacaacaaatacgccgccagctcctacctgagcctgacacctgagcagtggaagtcccacagatcctacagctgccaagtgacccacgaaggcagcaccgtggaaaagacagtggcccctacagagtgcagcggatcccagagcttcggcctgctggaccccaagctgtgctacctgctggatggcatcctgttcatctacggcgtgatcctgaccgccctgttcctgagagtgaagttcagcagaagcgccgacgcccctgcctaccagcagggacagaaccaactgtacaacgagctgaacctgggcagacgggaagagtacgacgtgctggacaagcggagaggcagggaccctgagatgggcggaaagccccagcggagaaagaacccccaggaaggactgtataacgaactccagaaagacaagatggccgaagcctacagcgagatcggcatgaagggcgagcggagaagaggcaagggccacgatggcctgtaccagggcctgagcaccgccaccaaggacacctatgacgccctgcacatgcaggccctgcctccaagaagggccaagcgatctggatctggagcaacaaacttctcactactcaaacaagcaggtgacgtggaggagaatcccgggcctactagtatggactggatttggcgcatccttttccttgtcggcgctgctaccggcgcgcattccttcgaagaagtgcagctggttgaatctggcggcggaattgtgcagcctggcggatctctgaagctgagctgtgccgccagcggcttcaccttcaacgatttcggcatgagctggatcagacagacccctgacaagcggctggaactggtggctaccatcaacaccaatggcggcaccacacactaccccgactctgtgaagggcagattcagcatcagccgggacaacgccaagaaattcgtgtacctccagatgagcagcctgaagtccgacgacaccgccatctactactgccccagagaaggactggactactggggccagggaaccacactgacagtgtctagtacgcgtgcctctacaaagggaccctccgtgtttcctctggctcccagcagcaagtctacaagcggaggaacagccgctctgggctgcctggtcaaggattactttcccgagcctgtgaccgtgtcctggaatagcggagcactgacaagcggcgtgcacacctttccagccgtgctgcaaagcagcggcctgtactctctgagcagcgtggtcacagtgcctagctctagcctgggcacccagacctacatctgcaatgtgaaccacaagcctagcaacaccaaggtggacaagagagtggaacccaagagctgtggtaccggcgacatcgagaacaccagtctggcccctgaggaccctacctttcctgccgatacctggggcacctacctgctgaccacagagacaggactccagaaagatcacgccctgtgggaccacacagcccagaacctgctgagaatgggcctcgcctttctggtgctggttgccctcgtgtggttcctggtggaagattggctgagccggaagcggacaagagagagagccagcagagcctctacctgggagggaagaagaaggctgaacacccagacacttagggccaagcgatctggatctggagcaacaaacttctcactactcaaacaagcaggtgacgtggaggagaatcccgggccttctagaggccatatgaccgagtacaagcccacggtgcgcctcgccacccgcgacgacgtccccagggccgtacgcaccctcgccgccgcgttcgccgactaccccgccacgcgccacaccgtcgatccggaccgccacatcgagcgggtcaccgagctgcaagaactcttcctcacgcgcgtcgggctcgacatcggcaaggtgtgggtcgcggacgacggcgccgcggtggcggtctggaccacgccggagagcgtcgaagcgggggcggtgttcgccgagatcggcccgcgcatggccgagttgagcggttcccggctggccgcgcagcaacagatggaaggcctcctggcgccgcaccggcccaaggagcccgcgtggttcctggccaccgtcggcgtctcgcccgaccaccagggcaagggtctgggcagcgccgtcgtgctccccggagtggaggcggccgagcgcgccggggtgcccgccttcctggagacctccgcgccccgcaacctccccttctacgagcggctcggcttcaccgtcaccgccgacgtcgaggtgcccgaaggaccgcgcacctggtgcatgacccgcaagcccggtgcctga

SEQ ID NO: 3466 - DNA, 3126 bp, synthetic construct
  source 1..3126: mol_type = other DNA
atggccttaccagtgaccgccttgctcctgccgctggccttgctgctccacgccgccaggccggacatcgtgctgacccagagccagaaattcatgagcaccagcgtgggcgacagagtgtccatcatctgtagagccagccagtctgtgggaacagccgtggcttggtatcagctgaaggccggacagagccccaagctgctgatctacagcgccagcaacagattcaccggcgtgcccgatagattcacaggcagcggctctggcaccgacttcaccctgacaatcagcaacgtgcagagcgaggacctggccgactacttctgtcagcagtacagcacataccctctggcctttggcgctggcaccaagctggaacttaaactcgagggacagcctaaggccaatcctaccgtgacactgttccctccaagcagcgaagaactccaggccaacaaggccacacttgtgtgcctgatctccgacttctaccctggggctgtgacagtggcttggaaggccgatggatctcctgtgaaagccggcgtggaaaccaccaagccatccaagcagagcaacaacaaatacgccgccagctcctacctgagcctgacacctgagcagtggaagtcccacagatcctacagctgccaagtgacccacgaaggcagcaccgtggaaaagacagtggcccctacagagtgcagcggatcccagagcttcggcctgctggaccccaagctgtgctacctgctggatggcatcctgttcatctacggcgtgatcctgaccgccctgttcctgagagtgaagttcagcagaagcgccgacgcccctgcctaccagcagggacagaaccaactgtacaacgagctgaacctgggcagacgggaagagtacgacgtgctggacaagcggagaggcagggaccctgagatgggcggaaagccccagcggagaaagaacccccaggaaggactgtataacgaactccagaaagacaagatggccgaagcctacagcgagatcggcatgaagggcgagcggagaagaggcaagggccacgatggcctgtaccagggcctgagcaccgccaccaaggacacctatgacgccctgcacatgcaggccctgcctccaagaagggccaagcgatctggatctggagcaacaaacttctcactactcaaacaagcaggtgacgtggaggagaatcccgggcctactagtatggactggatttggcgcatccttttccttgtcggcgctgctaccggcgcgcattccttcgaagaagtgcagctggttgaatctggcggcggaattgtgcagcctggcggatctctgaagctgagctgtgccgccagcggcttcaccttcaacgatttcggcatgagctggatcagacagacccctgacaagcggctggaactggtggctaccatcaacaccaatggcggcaccacacactaccccgactctgtgaagggcagattcagcatcagccgggacaacgccaagaaattcgtgtacctccagatgagcagcctgaagtccgacgacaccgccatctactactgccccagagaaggactggactactggggccagggaaccacactgacagtgtctagtacgcgtgcctctacaaagggaccctccgtgtttcctctggctcccagcagcaagtctacaagcggaggaacagccgctctgggctgcctggtcaaggattactttcccgagcctgtgaccgtgtcctggaatagcggagcactgacaagcggcgtgcacacctttccagccgtgctgcaaagcagcggcctgtactctctgagcagcgtggtcacagtgcctagctctagcctgggcacccagacctacatctgcaatgtgaaccacaagcctagcaacaccaaggtggacaagagagtggaacccaagagctgtggtaccaagtctgtgcgcttttacctggtcgtcagccctgccagtgcctccactcagacatcttggaccccaagggaccttgtgtcctctcagacacagacacagtcctgcgtgccaccaactgctggcgcaagacaggctccagagtctcccagcacaatccccgtcccttctcagccccagaactccacacttaggccaggaccagctgctccaatcgcactggtcccagtgttctgcggactgctggttgccaagtctctggtgctgagcgcactcctcgtttggtggggcgatatttggtggaaaacgatgatggaattgagatccctcgatacgcagaaagccacatgccaccttcagcaagtcacagacttgccttggaccagcgtcagctctcccgtggaacgggaaattctgtatcatacagtggcccgcaccaagatttccgacgatgacgacgagcacacactgcgcgccaagagaagcggatctggcgtgaagcagaccctgaatttcgacctgctgaagctggctggcgacgtggaatccaacccaggcccttctagaggccatatgaccgagtacaagcccacggtgcgcctcgccacccgcgacgacgtccccagggccgtacgcaccctcgccgccgcgttcgccgactaccccgccacgcgccacaccgtcgatccggaccgccacatcgagcgggtcaccgagctgcaagaactcttcctcacgcgcgtcgggctcgacatcggcaaggtgtgggtcgcggacgacggcgccgcggtggcggtctggaccacgccggagagcgtcgaagcgggggcggtgttcgccgagatcggcccgcgcatggccgagttgagcggttcccggctggccgcgcagcaacagatggaaggcctcctggcgccgcaccggcccaaggagcccgcgtggttcctggccaccgtcggcgtctcgcccgaccaccagggcaagggtctgggcagcgccgtcgtgctccccggagtggaggcggccgagcgcgccggggtgcccgccttcctggagacctccgcgccccgcaacctccccttctacgagcggctcggcttcaccgtcaccgccgacgtcgaggtgcccgaaggaccgcgcacctggtgcatgacccgcaagcccggtgcctga

SEQ ID NO: 3467 - DNA, 2886 bp, synthetic construct
  source 1..2886: mol_type = other DNA
atggccttaccagtgaccgccttgctcctgccgctggccttgctgctccacgccgccaggccggacatcgtgctgacccagagccagaaattcatgagcaccagcgtgggcgacagagtgtccatcatctgtagagccagccagtctgtgggaacagccgtggcttggtatcagctgaaggccggacagagccccaagctgctgatctacagcgccagcaacagattcaccggcgtgcccgatagattcacaggcagcggctctggcaccgacttcaccctgacaatcagcaacgtgcagagcgaggacctggccgactacttctgtcagcagtacagcacataccctctggcctttggcgctggcaccaagctggaacttaaactcgagggacagcctaaggccaatcctaccgtgacactgttccctccaagcagcgaagaactccaggccaacaaggccacacttgtgtgcctgatctccgacttctaccctggggctgtgacagtggcttggaaggccgatggatctcctgtgaaagccggcgtggaaaccaccaagccatccaagcagagcaacaacaaatacgccgccagctcctacctgagcctgacacctgagcagtggaagtcccacagatcctacagctgccaagtgacccacgaaggcagcaccgtggaaaagacagtggcccctacagagtgcagcggatcccagagcttcggcctgctggaccccaagctgtgctacctgctggatggcatcctgttcatctacggcgtgatcctgaccgccctgttcctgagagtgaagttcagcagaagcgccgacgcccctgcctaccagcagggacagaaccaactgtacaacgagctgaacctgggcagacgggaagagtacgacgtgctggacaagcggagaggcagggaccctgagatgggcggaaagccccagcggagaaagaacccccaggaaggactgtataacgaactccagaaagacaagatggccgaagcctacagcgagatcggcatgaagggcgagcggagaagaggcaagggccacgatggcctgtaccagggcctgagcaccgccaccaaggacacctatgacgccctgcacatgcaggccctgcctccaagaagggccaagcgatctggatctggagcaacaaacttctcactactcaaacaagcaggtgacgtggaggagaatcccgggcctactagtatggactggatttggcgcatccttttccttgtcggcgctgctaccggcgcgcattccttcgaagaagtgcagctggttgaatctggcggcggaattgtgcagcctggcggatctctgaagctgagctgtgccgccagcggcttcaccttcaacgatttcggcatgagctggatcagacagacccctgacaagcggctggaactggtggctaccatcaacaccaatggcggcaccacacactaccccgactctgtgaagggcagattcagcatcagccgggacaacgccaagaaattcgtgtacctccagatgagcagcctgaagtccgacgacaccgccatctactactgccccagagaaggactggactactggggccagggaaccacactgacagtgtctagtacgcgtgcctctacaaagggaccctccgtgtttcctctggctcccagcagcaagtctacaagcggaggaacagccgctctgggctgcctggtcaaggattactttcccgagcctgtgaccgtgtcctggaatagcggagcactgacaagcggcgtgcacacctttccagccgtgctgcaaagcagcggcctgtactctctgagcagcgtggtcacagtgcctagctctagcctgggcacccagacctacatctgcaatgtgaaccacaagcctagcaacaccaaggtggacaagagagtggaacccaagagctgtggtaccgtggtcgagaaagaacatccacagcttggcgctggcaccgtcctgttgcttagagccggattctatgccgtcagcttcctgtccgtggctgtggggtctacagtgtattaccagggaaaatgtctcacctggaaaggccccagacgccagcttccagctgttgttcctgctccactgccaccaccttgtggctcctctgctcacttgcttccaccagtgcctggcggacgcgccaagagaagcggatctggcgtgaagcagaccctgaatttcgacctgctgaagctggctggcgacgtggaatccaacccaggcccttctagaggccatatgaccgagtacaagcccacggtgcgcctcgccacccgcgacgacgtccccagggccgtacgcaccctcgccgccgcgttcgccgactaccccgccacgcgccacaccgtcgatccggaccgccacatcgagcgggtcaccgagctgcaagaactcttcctcacgcgcgtcgggctcgacatcggcaaggtgtgggtcgcggacgacggcgccgcggtggcggtctggaccacgccggagagcgtcgaagcgggggcggtgttcgccgagatcggcccgcgcatggccgagttgagcggttcccggctggccgcgcagcaacagatggaaggcctcctggcgccgcaccggcccaaggagcccgcgtggttcctggccaccgtcggcgtctcgcccgaccaccagggcaagggtctgggcagcgccgtcgtgctccccggagtggaggcggccgagcgcgccggggtgcccgccttcctggagacctccgcgccccgcaacctccccttctacgagcggctcggcttcaccgtcaccgccgacgtcgaggtgcccgaaggaccgcgcacctggtgcatgacccgcaagcccggtgcctga

SEQ ID NO: 3468 - DNA, 2973 bp, synthetic construct
  source 1..2973: mol_type = other DNA
atggccttaccagtgaccgccttgctcctgccgctggccttgctgctccacgccgccaggccggacatcgtgctgacccagagccagaaattcatgagcaccagcgtgggcgacagagtgtccatcatctgtagagccagccagtctgtgggaacagccgtggcttggtatcagctgaaggccggacagagccccaagctgctgatctacagcgccagcaacagattcaccggcgtgcccgatagattcacaggcagcggctctggcaccgacttcaccctgacaatcagcaacgtgcagagcgaggacctggccgactacttctgtcagcagtacagcacataccctctggcctttggcgctggcaccaagctggaacttaaactcgaggacctgaagaacgtgttcccacctgaggtggccgtgttcgagcctagcgaggccgagatcagccacacccagaaagccaccctcgtgtgcctggctaccggcttctaccccgaccatgtggaactgtcttggtgggtcaacggcaaagaggtgcacagcggcgtgtctaccgacccccagccactgaaagaacagcccgccctgaacgacagccggtactgcctgagcagcagactgagagtgtccgccaccttctggcagaacccccggaaccacttcagatgccaggtgcagttctacggcctgagcgagaacgacgagtggacccaggacagagccaagcccgtgacccagatcgtgtctgccgaagcctggggcagagccgattgcggatcccagagcttcggcctgctggaccccaagctgtgctacctgctggatggcatcctgttcatctacggcgtgatcctgaccgccctgttcctgagagtgaagttcagcagaagcgccgacgcccctgcctaccagcagggacagaaccaactgtacaacgagctgaacctgggcagacgggaagagtacgacgtgctggacaagcggagaggcagggaccctgagatgggcggaaagccccagcggagaaagaacccccaggaaggactgtataacgaactccagaaagacaagatggccgaagcctacagcgagatcggcatgaagggcgagcggagaagaggcaagggccacgatggcctgtaccagggcctgagcaccgccaccaaggacacctatgacgccctgcacatgcaggccctgcctccaagaagggccaagcgatctggatctggagcaacaaacttctcactactcaaacaagcaggtgacgtggaggagaatcccgggcctactagtatggactggatttggcgcatccttttccttgtcggcgctgctaccggcgcgcattccttcgaagaagtgcagctggttgaatctggcggcggaattgtgcagcctggcggatctctgaagctgagctgtgccgccagcggcttcaccttcaacgatttcggcatgagctggatcagacagacccctgacaagcggctggaactggtggctaccatcaacaccaatggcggcaccacacactaccccgactctgtgaagggcagattcagcatcagccgggacaacgccaagaaattcgtgtacctccagatgagcagcctgaagtccgacgacaccgccatctactactgccccagagaaggactggactactggggccagggaaccacactgacagtgtctagtacgcgtatccagaaccctgatcctgccgtgtaccagctgcgggatagcaagagcagcgacaagagcgtgtgtctgttcaccgacttcgacagccagaccaacgtgtcccagagcaaggactccgacgtgtacatcaccgataagaccgtgctggacatgcggagcatggacttcaagagcaactccgccgtggcctggtccaacaagtccgatttcgcctgcgccaacgccttcaacaacagcattatccccgaggacacattcttcccaagccccgagagcagctgcggtaccggcgacatcgagaacaccagtctggcccctgaggaccctacctttcctgccgatacctggggcacctacctgctgaccacagagacaggactccagaaagatcacgccctgtgggaccacacagcccagaacctgctgagaatgggcctcgcctttctggtgctggttgccctcgtgtggttcctggtggaagattggctgagccggaagcggacaagagagagagccagcagagcctctacctgggagggaagaagaaggctgaacacccagacacttagggccaagcgatctggatctggagcaacaaacttctcactactcaaacaagcaggtgacgtggaggagaatcccgggccttctagaggccatatgaccgagtacaagcccacggtgcgcctcgccacccgcgacgacgtccccagggccgtacgcaccctcgccgccgcgttcgccgactaccccgccacgcgccacaccgtcgatccggaccgccacatcgagcgggtcaccgagctgcaagaactcttcctcacgcgcgtcgggctcgacatcggcaaggtgtgggtcgcggacgacggcgccgcggtggcggtctggaccacgccggagagcgtcgaagcgggggcggtgttcgccgagatcggcccgcgcatggccgagttgagcggttcccggctggccgcgcagcaacagatggaaggcctcctggcgccgcaccggcccaaggagcccgcgtggttcctggccaccgtcggcgtctcgcccgaccaccagggcaagggtctgggcagcgccgtcgtgctccccggagtggaggcggccgagcgcgccggggtgcccgccttcctggagacctccgcgccccgcaacctccccttctacgagcggctcggcttcaccgtcaccgccgacgtcgaggtgcccgaaggaccgcgcacctggtgcatgacccgcaagcccggtgcctga

SEQ ID NO: 3469 - DNA, 3171 bp, synthetic construct
  source 1..3171: mol_type = other DNA
atggccttaccagtgaccgccttgctcctgccgctggccttgctgctccacgccgccaggccggacatcgtgctgacccagagccagaaattcatgagcaccagcgtgggcgacagagtgtccatcatctgtagagccagccagtctgtgggaacagccgtggcttggtatcagctgaaggccggacagagccccaagctgctgatctacagcgccagcaacagattcaccggcgtgcccgatagattcacaggcagcggctctggcaccgacttcaccctgacaatcagcaacgtgcagagcgaggacctggccgactacttctgtcagcagtacagcacataccctctggcctttggcgctggcaccaagctggaacttaaactcgaggacctgaagaacgtgttcccacctgaggtggccgtgttcgagcctagcgaggccgagatcagccacacccagaaagccaccctcgtgtgcctggctaccggcttctaccccgaccatgtggaactgtcttggtgggtcaacggcaaagaggtgcacagcggcgtgtctaccgacccccagccactgaaagaacagcccgccctgaacgacagccggtactgcctgagcagcagactgagagtgtccgccaccttctggcagaacccccggaaccacttcagatgccaggtgcagttctacggcctgagcgagaacgacgagtggacccaggacagagccaagcccgtgacccagatcgtgtctgccgaagcctggggcagagccgattgcggatcccagagcttcggcctgctggaccccaagctgtgctacctgctggatggcatcctgttcatctacggcgtgatcctgaccgccctgttcctgagagtgaagttcagcagaagcgccgacgcccctgcctaccagcagggacagaaccaactgtacaacgagctgaacctgggcagacgggaagagtacgacgtgctggacaagcggagaggcagggaccctgagatgggcggaaagccccagcggagaaagaacccccaggaaggactgtataacgaactccagaaagacaagatggccgaagcctacagcgagatcggcatgaagggcgagcggagaagaggcaagggccacgatggcctgtaccagggcctgagcaccgccaccaaggacacctatgacgccctgcacatgcaggccctgcctccaagaagggccaagcgatctggatctggagcaacaaacttctcactactcaaacaagcaggtgacgtggaggagaatcccgggcctactagtatggactggatttggcgcatccttttccttgtcggcgctgctaccggcgcgcattccttcgaagaagtgcagctggttgaatctggcggcggaattgtgcagcctggcggatctctgaagctgagctgtgccgccagcggcttcaccttcaacgatttcggcatgagctggatcagacagacccctgacaagcggctggaactggtggctaccatcaacaccaatggcggcaccacacactaccccgactctgtgaagggcagattcagcatcagccgggacaacgccaagaaattcgtgtacctccagatgagcagcctgaagtccgacgacaccgccatctactactgccccagagaaggactggactactggggccagggaaccacactgacagtgtctagtacgcgtatccagaaccctgatcctgccgtgtaccagctgcgggatagcaagagcagcgacaagagcgtgtgtctgttcaccgacttcgacagccagaccaacgtgtcccagagcaaggactccgacgtgtacatcaccgataagaccgtgctggacatgcggagcatggacttcaagagcaactccgccgtggcctggtccaacaagtccgatttcgcctgcgccaacgccttcaacaacagcattatccccgaggacacattcttcccaagccccgagagcagctgcggtaccaagtctgtgcgcttttacctggtcgtcagccctgccagtgcctccactcagacatcttggaccccaagggaccttgtgtcctctcagacacagacacagtcctgcgtgccaccaactgctggcgcaagacaggctccagagtctcccagcacaatccccgtcccttctcagccccagaactccacacttaggccaggaccagctgctccaatcgcactggtcccagtgttctgcggactgctggttgccaagtctctggtgctgagcgcactcctcgtttggtggggcgatatttggtggaaaacgatgatggaattgagatccctcgatacgcagaaagccacatgccaccttcagcaagtcacagacttgccttggaccagcgtcagctctcccgtggaacgggaaattctgtatcatacagtggcccgcaccaagatttccgacgatgacgacgagcacacactgcgcgccaagagaagcggatctggcgtgaagcagaccctgaatttcgacctgctgaagctggctggcgacgtggaatccaacccaggcccttctagaggccatatgaccgagtacaagcccacggtgcgcctcgccacccgcgacgacgtccccagggccgtacgcaccctcgccgccgcgttcgccgactaccccgccacgcgccacaccgtcgatccggaccgccacatcgagcgggtcaccgagctgcaagaactcttcctcacgcgcgtcgggctcgacatcggcaaggtgtgggtcgcggacgacggcgccgcggtggcggtctggaccacgccggagagcgtcgaagcgggggcggtgttcgccgagatcggcccgcgcatggccgagttgagcggttcccggctggccgcgcagcaacagatggaaggcctcctggcgccgcaccggcccaaggagcccgcgtggttcctggccaccgtcggcgtctcgcccgaccaccagggcaagggtctgggcagcgccgtcgtgctccccggagtggaggcggccgagcgcgccggggtgcccgccttcctggagacctccgcgccccgcaacctccccttctacgagcggctcggcttcaccgtcaccgccgacgtcgaggtgcccgaaggaccgcgcacctggtgcatgacccgcaagcccggtgcctga

SEQ ID NO: 3470 - DNA, 2931 bp, synthetic construct
  source 1..2931: mol_type = other DNA
atggccttaccagtgaccgccttgctcctgccgctggccttgctgctccacgccgccaggccggacatcgtgctgacccagagccagaaattcatgagcaccagcgtgggcgacagagtgtccatcatctgtagagccagccagtctgtgggaacagccgtggcttggtatcagctgaaggccggacagagccccaagctgctgatctacagcgccagcaacagattcaccggcgtgcccgatagattcacaggcagcggctctggcaccgacttcaccctgacaatcagcaacgtgcagagcgaggacctggccgactacttctgtcagcagtacagcacataccctctggcctttggcgctggcaccaagctggaacttaaactcgaggacctgaagaacgtgttcccacctgaggtggccgtgttcgagcctagcgaggccgagatcagccacacccagaaagccaccctcgtgtgcctggctaccggcttctaccccgaccatgtggaactgtcttggtgggtcaacggcaaagaggtgcacagcggcgtgtctaccgacccccagccactgaaagaacagcccgccctgaacgacagccggtactgcctgagcagcagactgagagtgtccgccaccttctggcagaacccccggaaccacttcagatgccaggtgcagttctacggcctgagcgagaacgacgagtggacccaggacagagccaagcccgtgacccagatcgtgtctgccgaagcctggggcagagccgattgcggatcccagagcttcggcctgctggaccccaagctgtgctacctgctggatggcatcctgttcatctacggcgtgatcctgaccgccctgttcctgagagtgaagttcagcagaagcgccgacgcccctgcctaccagcagggacagaaccaactgtacaacgagctgaacctgggcagacgggaagagtacgacgtgctggacaagcggagaggcagggaccctgagatgggcggaaagccccagcggagaaagaacccccaggaaggactgtataacgaactccagaaagacaagatggccgaagcctacagcgagatcggcatgaagggcgagcggagaagaggcaagggccacgatggcctgtaccagggcctgagcaccgccaccaaggacacctatgacgccctgcacatgcaggccctgcctccaagaagggccaagcgatctggatctggagcaacaaacttctcactactcaaacaagcaggtgacgtggaggagaatcccgggcctactagtatggactggatttggcgcatccttttccttgtcggcgctgctaccggcgcgcattccttcgaagaagtgcagctggttgaatctggcggcggaattgtgcagcctggcggatctctgaagctgagctgtgccgccagcggcttcaccttcaacgatttcggcatgagctggatcagacagacccctgacaagcggctggaactggtggctaccatcaacaccaatggcggcaccacacactaccccgactctgtgaagggcagattcagcatcagccgggacaacgccaagaaattcgtgtacctccagatgagcagcctgaagtccgacgacaccgccatctactactgccccagagaaggactggactactggggccagggaaccacactgacagtgtctagtacgcgtatccagaaccctgatcctgccgtgtaccagctgcgggatagcaagagcagcgacaagagcgtgtgtctgttcaccgacttcgacagccagaccaacgtgtcccagagcaaggactccgacgtgtacatcaccgataagaccgtgctggacatgcggagcatggacttcaagagcaactccgccgtggcctggtccaacaagtccgatttcgcctgcgccaacgccttcaacaacagcattatccccgaggacacattcttcccaagccccgagagcagctgcggtaccgtggtcgagaaagaacatccacagcttggcgctggcaccgtcctgttgcttagagccggattctatgccgtcagcttcctgtccgtggctgtggggtctacagtgtattaccagggaaaatgtctcacctggaaaggccccagacgccagcttccagctgttgttcctgctccactgccaccaccttgtggctcctctgctcacttgcttccaccagtgcctggcggacgcgccaagagaagcggatctggcgtgaagcagaccctgaatttcgacctgctgaagctggctggcgacgtggaatccaacccaggcccttctagaggccatatgaccgagtacaagcccacggtgcgcctcgccacccgcgacgacgtccccagggccgtacgcaccctcgccgccgcgttcgccgactaccccgccacgcgccacaccgtcgatccggaccgccacatcgagcgggtcaccgagctgcaagaactcttcctcacgcgcgtcgggctcgacatcggcaaggtgtgggtcgcggacgacggcgccgcggtggcggtctggaccacgccggagagcgtcgaagcgggggcggtgttcgccgagatcggcccgcgcatggccgagttgagcggttcccggctggccgcgcagcaacagatggaaggcctcctggcgccgcaccggcccaaggagcccgcgtggttcctggccaccgtcggcgtctcgcccgaccaccagggcaagggtctgggcagcgccgtcgtgctccccggagtggaggcggccgagcgcgccggggtgcccgccttcctggagacctccgcgccccgcaacctccccttctacgagcggctcggcttcaccgtcaccgccgacgtcgaggtgcccgaaggaccgcgcacctggtgcatgacccgcaagcccggtgcctga

SEQ ID NO: 3471 - DNA, 2844 bp, synthetic construct
  source 1..2844: mol_type = other DNA
atggccttaccagtgaccgccttgctcctgccgctggccttgctgctccacgccgccaggccggacatcgtgctgacccagagccagaaattcatgagcaccagcgtgggcgacagagtgtccatcatctgtagagccagccagtctgtgggaacagccgtggcttggtatcagctgaaggccggacagagccccaagctgctgatctacagcgccagcaacagattcaccggcgtgcccgatagattcacaggcagcggctctggcaccgacttcaccctgacaatcagcaacgtgcagagcgaggacctggccgactacttctgtcagcagtacagcacataccctctggcctttggcgctggcaccaagctggaacttaaactcgagggacagcctaaggccaatcctaccgtgacactgttccctccaagcagcgaagaactccaggccaacaaggccacacttgtgtgcctgatctccgacttctaccctggggctgtgacagtggcttggaaggccgatggatctcctgtgaaagccggcgtggaaaccaccaagccatccaagcagagcaacaacaaatacgccgccagctcctacctgagcctgacacctgagcagtggaagtcccacagatcctacagctgccaagtgacccacgaaggcagcaccgtggaaaagacagtggcccctacagagtgcagcggatcccagagcttcggcctgctggaccccaagctgtgctacctgctggatggcatcctgttcatctacggcgtgatcctgaccgccctgttcctgagagtgaagttcagcagaagcgccgacgcccctgcctaccagcagggacagaaccaactgtacaacgagctgaacctgggcagacgggaagagtacgacgtgctggacaagcggagaggcagggaccctgagatgggcggaaagccccagcggagaaagaacccccaggaaggactgtataacgaactccagaaagacaagatggccgaagcctacagcgagatcggcatgaagggcgagcggagaagaggcaagggccacgatggcctgtaccagggcctgagcaccgccaccaaggacacctatgacgccctgcacatgcaggccctgcctccaagaagggccaagcgatctggatctggagcaacaaacttctcactactcaaacaagcaggtgacgtggaggagaatcccgggcctactagtatggactggatttggcgcatccttttccttgtcggcgctgctaccggcgcgcattccttcgaagaagtgcagctggttgaatctggcggcggaattgtgcagcctggcggatctctgaagctgagctgtgccgccagcggcttcaccttcaacgatttcggcatgagctggatcagacagacccctgacaagcggctggaactggtggctaccatcaacaccaatggcggcaccacacactaccccgactctgtgaagggcagattcagcatcagccgggacaacgccaagaaattcgtgtacctccagatgagcagcctgaagtccgacgacaccgccatctactactgccccagagaaggactggactactggggccagggaaccacactgacagtgtctagtacgcgtgcctctacaaagggaccctccgtgtttcctctggctcccagcagcaagtctacaagcggaggaacagccgctctgggctgcctggtcaaggattactttcccgagcctgtgaccgtgtcctggaatagcggagcactgacaagcggcgtgcacacctttccagccgtgctgcaaagcagcggcctgtactctctgagcagcgtggtcacagtgcctagctctagcctgggcacccagacctacatctgcaatgtgaaccacaagcctagcaacaccaaggtggacaagagagtggaacccaagagctgtggtaccatcactcaaggtttggcagtgtcaaccatctcatcattctttccacctggctaccaagtgtccttctgcctggtcatggtgctgctgttcgccgtggataccggcctgtacttcagcgtcaagaccaacatccggtccagcaccagagactggaaggaccacaagttcaagtggcggaaggaccctcaggacaagagggccaagcgatctggatctggagcaacaaacttctcactactcaaacaagcaggtgacgtggaggagaatcccgggccttctagaggccatatgaccgagtacaagcccacggtgcgcctcgccacccgcgacgacgtccccagggccgtacgcaccctcgccgccgcgttcgccgactaccccgccacgcgccacaccgtcgatccggaccgccacatcgagcgggtcaccgagctgcaagaactcttcctcacgcgcgtcgggctcgacatcggcaaggtgtgggtcgcggacgacggcgccgcggtggcggtctggaccacgccggagagcgtcgaagcgggggcggtgttcgccgagatcggcccgcgcatggccgagttgagcggttcccggctggccgcgcagcaacagatggaaggcctcctggcgccgcaccggcccaaggagcccgcgtggttcctggccaccgtcggcgtctcgcccgaccaccagggcaagggtctgggcagcgccgtcgtgctccccggagtggaggcggccgagcgcgccggggtgcccgccttcctggagacctccgcgccccgcaacctccccttctacgagcggctcggcttcaccgtcaccgccgacgtcgaggtgcccgaaggaccgcgcacctggtgcatgacccgcaagcccggtgcctga

SEQ ID NO: 3472 - DNA, 2889 bp, synthetic construct
  source 1..2889: mol_type = other DNA
atggccttaccagtgaccgccttgctcctgccgctggccttgctgctccacgccgccaggccggacatcgtgctgacccagagccagaaattcatgagcaccagcgtgggcgacagagtgtccatcatctgtagagccagccagtctgtgggaacagccgtggcttggtatcagctgaaggccggacagagccccaagctgctgatctacagcgccagcaacagattcaccggcgtgcccgatagattcacaggcagcggctctggcaccgacttcaccctgacaatcagcaacgtgcagagcgaggacctggccgactacttctgtcagcagtacagcacataccctctggcctttggcgctggcaccaagctggaacttaaactcgaggacctgaagaacgtgttcccacctgaggtggccgtgttcgagcctagcgaggccgagatcagccacacccagaaagccaccctcgtgtgcctggctaccggcttctaccccgaccatgtggaactgtcttggtgggtcaacggcaaagaggtgcacagcggcgtgtctaccgacccccagccactgaaagaacagcccgccctgaacgacagccggtactgcctgagcagcagactgagagtgtccgccaccttctggcagaacccccggaaccacttcagatgccaggtgcagttctacggcctgagcgagaacgacgagtggacccaggacagagccaagcccgtgacccagatcgtgtctgccgaagcctggggcagagccgattgcggatcccagagcttcggcctgctggaccccaagctgtgctacctgctggatggcatcctgttcatctacggcgtgatcctgaccgccctgttcctgagagtgaagttcagcagaagcgccgacgcccctgcctaccagcagggacagaaccaactgtacaacgagctgaacctgggcagacgggaagagtacgacgtgctggacaagcggagaggcagggaccctgagatgggcggaaagccccagcggagaaagaacccccaggaaggactgtataacgaactccagaaagacaagatggccgaagcctacagcgagatcggcatgaagggcgagcggagaagaggcaagggccacgatggcctgtaccagggcctgagcaccgccaccaaggacacctatgacgccctgcacatgcaggccctgcctccaagaagggccaagcgatctggatctggagcaacaaacttctcactactcaaacaagcaggtgacgtggaggagaatcccgggcctactagtatggactggatttggcgcatccttttccttgtcggcgctgctaccggcgcgcattccttcgaagaagtgcagctggttgaatctggcggcggaattgtgcagcctggcggatctctgaagctgagctgtgccgccagcggcttcaccttcaacgatttcggcatgagctggatcagacagacccctgacaagcggctggaactggtggctaccatcaacaccaatggcggcaccacacactaccccgactctgtgaagggcagattcagcatcagccgggacaacgccaagaaattcgtgtacctccagatgagcagcctgaagtccgacgacaccgccatctactactgccccagagaaggactggactactggggccagggaaccacactgacagtgtctagtacgcgtatccagaaccctgatcctgccgtgtaccagctgcgggatagcaagagcagcgacaagagcgtgtgtctgttcaccgacttcgacagccagaccaacgtgtcccagagcaaggactccgacgtgtacatcaccgataagaccgtgctggacatgcggagcatggacttcaagagcaactccgccgtggcctggtccaacaagtccgatttcgcctgcgccaacgccttcaacaacagcattatccccgaggacacattcttcccaagccccgagagcagctgcggtaccatcactcaaggtttggcagtgtcaaccatctcatcattctttccacctggctaccaagtgtccttctgcctggtcatggtgctgctgttcgccgtggataccggcctgtacttcagcgtcaagaccaacatccggtccagcaccagagactggaaggaccacaagttcaagtggcggaaggaccctcaggacaagagggccaagcgatctggatctggagcaacaaacttctcactactcaaacaagcaggtgacgtggaggagaatcccgggccttctagaggccatatgaccgagtacaagcccacggtgcgcctcgccacccgcgacgacgtccccagggccgtacgcaccctcgccgccgcgttcgccgactaccccgccacgcgccacaccgtcgatccggaccgccacatcgagcgggtcaccgagctgcaagaactcttcctcacgcgcgtcgggctcgacatcggcaaggtgtgggtcgcggacgacggcgccgcggtggcggtctggaccacgccggagagcgtcgaagcgggggcggtgttcgccgagatcggcccgcgcatggccgagttgagcggttcccggctggccgcgcagcaacagatggaaggcctcctggcgccgcaccggcccaaggagcccgcgtggttcctggccaccgtcggcgtctcgcccgaccaccagggcaagggtctgggcagcgccgtcgtgctccccggagtggaggcggccgagcgcgccggggtgcccgccttcctggagacctccgcgccccgcaacctccccttctacgagcggctcggcttcaccgtcaccgccgacgtcgaggtgcccgaaggaccgcgcacctggtgcatgacccgcaagcccggtgcctga

SEQ ID NO: 3473 - DNA, 1938 bp, synthetic construct
  source 1..1938: mol_type = other DNA
atggccttaccagtgaccgccttgctcctgccgctggccttgctgctccacgccgccaggccggacatcgtgctgacccagagccagaaattcatgagcaccagcgtgggcgacagagtgtccatcatctgtagagccagccagtctgtgggaacagccgtggcttggtatcagctgaaggccggacagagccccaagctgctgatctacagcgccagcaacagattcaccggcgtgcccgatagattcacaggcagcggctctggcaccgacttcaccctgacaatcagcaacgtgcagagcgaggacctggccgactacttctgtcagcagtacagcacataccctctggcctttggcgctggcaccaagctggaacttaaactcgagggacagcctaaggccaatcctaccgtgacactgttccctccaagcagcgaagaactccaggccaacaaggccacacttgtgtgcctgatctccgacttctaccctggggctgtgacagtggcttggaaggccgatggatctcctgtgaaagccggcgtggaaaccaccaagccatccaagcagagcaacaacaaatacgccgccagctcctacctgagcctgacacctgagcagtggaagtcccacagatcctacagctgccaagtgacccacgaaggcagcaccgtggaaaagacagtggcccctacagagtgcagcggatccctgggagagcctcagctgtgctatatcctggacgccatcctgtttctgtacggcatcgtgctgaccctgctgtactgccggctgaagatccaagtgcggaaggccgccatcaccagctacgagaaatccgacggcgtgtacaccggcctgagcaccagaaatcaagagacatacgagacactgaagcacgaaaagcctccacaaagggccaagcgatctggatctggagcaacaaacttctcactactcaaacaagcaggtgacgtggaggagaatcccgggcctactagtatggactggatttggcgcatccttttccttgtcggcgctgctaccggcgcgcattccttcgaagaagtgcagctggttgaatctggcggcggaattgtgcagcctggcggatctctgaagctgagctgtgccgccagcggcttcaccttcaacgatttcggcatgagctggatcagacagacccctgacaagcggctggaactggtggctaccatcaacaccaatggcggcaccacacactaccccgactctgtgaagggcagattcagcatcagccgggacaacgccaagaaattcgtgtacctccagatgagcagcctgaagtccgacgacaccgccatctactactgccccagagaaggactggactactggggccagggaaccacactgacagtgtctagtacgcgtgcctctacaaagggaccctccgtgtttcctctggctcccagcagcaagtctacaagcggaggaacagccgctctgggctgcctggtcaaggattactttcccgagcctgtgaccgtgtcctggaatagcggagcactgacaagcggcgtgcacacctttccagccgtgctgcaaagcagcggcctgtactctctgagcagcgtggtcacagtgcctagctctagcctgggcacccagacctacatctgcaatgtgaaccacaagcctagcaacaccaaggtggacaagagagtggaacccaagagctgtggtaccctcggagaaccacagctctgttacattctggatgctatcctgttcctctatgggatcgtcctgacactcctgtattgcagactcaaaattcaagttcgcaaagccgccattacctcttacgagaagagtgatggggtgtacacaggactgtctacccggaatcaagaaacctacgaaaccctcaaacatgagaagccacctcagtaa

SEQ ID NO: 3474 - DNA, 2580 bp, synthetic construct; identical to SEQ ID NO: 3307
  source 1..2580: mol_type = other DNA

SEQ ID NO: 3475 - DNA, 2580 bp, synthetic construct; identical to SEQ ID NO: 3307
  source 1..2580: mol_type = other DNA

SEQ ID NO: 3476 - DNA, 2580 bp, synthetic construct; identical to SEQ ID NO: 3307
  source 1..2580: mol_type = other DNA

SEQ ID NO: 3477 - DNA, 2580 bp, synthetic construct; identical to SEQ ID NO: 3307
  source 1..2580: mol_type = other DNA

SEQ ID NO: 3478 - DNA, 2580 bp, synthetic construct; identical to SEQ ID NO: 3307
  source 1..2580: mol_type = other DNA

SEQ ID NO: 3479 - DNA, 2580 bp, synthetic construct; identical to SEQ ID NO: 3307
  source 1..2580: mol_type = other DNA

SEQ ID NO: 3480 - DNA, 2580 bp, synthetic construct; identical to SEQ ID NO: 3307
  source 1..2580: mol_type = other DNA

SEQ ID NO: 3481 - DNA, 2580 bp, synthetic construct; identical to SEQ ID NO: 3307
  source 1..2580: mol_type = other DNA

SEQ ID NO: 3482 - DNA, 2580 bp, synthetic construct; identical to SEQ ID NO: 3307
  source 1..2580: mol_type = other DNA

SEQ ID NO: 3483 - DNA, 2580 bp, synthetic construct; identical to SEQ ID NO: 3307
  source 1..2580: mol_type = other DNA

SEQ ID NO: 3484 - DNA, 2580 bp, synthetic construct; identical to SEQ ID NO: 3307
  source 1..2580: mol_type = other DNA

SEQ ID NO: 3485 - DNA, 2580 bp, synthetic construct; identical to SEQ ID NO: 3307
  source 1..2580: mol_type = other DNA

SEQ ID NO: 3486 - DNA, 2580 bp, synthetic construct; identical to SEQ ID NO: 3307
  source 1..2580: mol_type = other DNA

SEQ ID NO: 3487 - DNA, 2580 bp, synthetic construct; identical to SEQ ID NO: 3307
  source 1..2580: mol_type = other DNA

SEQ ID NO: 3488 - DNA, 2580 bp, synthetic construct; identical to SEQ ID NO: 3307
  source 1..2580: mol_type = other DNA

SEQ ID NO: 3489 - DNA, 2580 bp, synthetic construct; identical to SEQ ID NO: 3307
  source 1..2580: mol_type = other DNA

SEQ ID NO: 3490 - DNA, 2580 bp, synthetic construct; identical to SEQ ID NO: 3307
  source 1..2580: mol_type = other DNA

SEQ ID NO: 3491 - DNA, 2580 bp, synthetic construct; identical to SEQ ID NO: 3307
  source 1..2580: mol_type = other DNA

SEQ ID NO: 3492 - DNA, 2580 bp, synthetic construct; identical to SEQ ID NO: 3307
  source 1..2580: mol_type = other DNA

SEQ ID NO: 3493 - DNA, 2580 bp, synthetic construct; identical to SEQ ID NO: 3307
  source 1..2580: mol_type = other DNA

SEQ ID NO: 3494 - DNA, 2580 bp, synthetic construct; identical to SEQ ID NO: 3307
  source 1..2580: mol_type = other DNA

SEQ ID NO: 3495 - DNA, 2580 bp, synthetic construct; identical to SEQ ID NO: 3307
  source 1..2580: mol_type = other DNA

SEQ ID NO: 3496 - DNA, 2580 bp, synthetic construct; identical to SEQ ID NO: 3307
  source 1..2580: mol_type = other DNA

SEQ ID NO: 3497 - DNA, 2580 bp, synthetic construct; identical to SEQ ID NO: 3307
  source 1..2580: mol_type = other DNA

SEQ ID NO: 3498 - DNA, 2580 bp, synthetic construct; identical to SEQ ID NO: 3307
  source 1..2580: mol_type = other DNA

SEQ ID NO: 3499 - DNA, 2580 bp, synthetic construct; identical to SEQ ID NO: 3307
  source 1..2580: mol_type = other DNA

SEQ ID NO: 3500 - DNA, 2580 bp, synthetic construct; identical to SEQ ID NO: 3307
  source 1..2580: mol_type = other DNA

SEQ ID NO: 3501 - DNA, 2580 bp, synthetic construct; identical to SEQ ID NO: 3307
  source 1..2580: mol_type = other DNA

SEQ ID NO: 3502 - DNA, 2580 bp, synthetic construct; identical to SEQ ID NO: 3307
  source 1..2580: mol_type = other DNA

SEQ ID NO: 3503 - DNA, 2580 bp, synthetic construct; identical to SEQ ID NO: 3307
  source 1..2580: mol_type = other DNA

SEQ ID NO: 3504 - DNA, 2580 bp, synthetic construct; identical to SEQ ID NO: 3307
  source 1..2580: mol_type = other DNA

SEQ ID NO: 3505 - DNA, 2580 bp, synthetic construct; identical to SEQ ID NO: 3307
  source 1..2580: mol_type = other DNA

SEQ ID NO: 3506 - DNA, 2580 bp, synthetic construct; identical to SEQ ID NO: 3307
  source 1..2580: mol_type = other DNA

SEQ ID NO: 3507 - DNA, 2580 bp, synthetic construct; identical to SEQ ID NO: 3307
  source 1..2580: mol_type = other DNA

SEQ ID NO: 3508 - DNA, 2580 bp, synthetic construct; identical to SEQ ID NO: 3307
  source 1..2580: mol_type = other DNA

SEQ ID NO: 3509 - DNA, 2580 bp, synthetic construct; identical to SEQ ID NO: 3307
  source 1..2580: mol_type = other DNA

SEQ ID NO: 3510 - DNA, 2580 bp, synthetic construct; identical to SEQ ID NO: 3307
  source 1..2580: mol_type = other DNA

SEQ ID NO: 3511 - DNA, 2580 bp, synthetic construct; identical to SEQ ID NO: 3307
  source 1..2580: mol_type = other DNA

SEQ ID NO: 3512 - DNA, 2580 bp, synthetic construct; identical to SEQ ID NO: 3307
  source 1..2580: mol_type = other DNA

SEQ ID NO: 3513 - DNA, 2580 bp, synthetic construct; identical to SEQ ID NO: 3307
  source 1..2580: mol_type = other DNA

SEQ ID NO: 3514 - DNA, 2580 bp, synthetic construct; identical to SEQ ID NO: 3307
  source 1..2580: mol_type = other DNA

SEQ ID NO: 3515 - DNA, 2580 bp, synthetic construct; identical to SEQ ID NO: 3307
  source 1..2580: mol_type = other DNA

SEQ ID NO: 3516 - DNA, 2580 bp, synthetic construct; identical to SEQ ID NO: 3307
  source 1..2580: mol_type = other DNA

SEQ ID NO: 3517 - DNA, 2580 bp, synthetic construct; identical to SEQ ID NO: 3307
  source 1..2580: mol_type = other DNA

SEQ ID NO: 3518 - DNA, 2580 bp, synthetic construct; identical to SEQ ID NO: 3307
  source 1..2580: mol_type = other DNA

SEQ ID NO: 3519 - DNA, 2580 bp, synthetic construct; identical to SEQ ID NO: 3307
  source 1..2580: mol_type = other DNA

SEQ ID NO: 3520 - DNA, 2580 bp, synthetic construct; identical to SEQ ID NO: 3307
  source 1..2580: mol_type = other DNA

SEQ ID NO: 3521 - DNA, 2580 bp, synthetic construct; identical to SEQ ID NO: 3307
  source 1..2580: mol_type = other DNA

SEQ ID NO: 3522 - DNA, 2580 bp, synthetic construct; identical to SEQ ID NO: 3307
  source 1..2580: mol_type = other DNA

SEQ ID NO: 3523 - DNA, 2580 bp, synthetic construct; identical to SEQ ID NO: 3307
  source 1..2580: mol_type = other DNA

SEQ ID NO: 3524 - DNA, 2580 bp, synthetic construct; identical to SEQ ID NO: 3307
  source 1..2580: mol_type = other DNA

SEQ ID NO: 3525 - DNA, 2580 bp, synthetic construct; identical to SEQ ID NO: 3307
  source 1..2580: mol_type = other DNA

SEQ ID NO: 3526 - DNA, 2580 bp, synthetic construct; identical to SEQ ID NO: 3307
  source 1..2580: mol_type = other DNA

SEQ ID NO: 3527 - DNA, 2580 bp, synthetic construct; identical to SEQ ID NO: 3307
  source 1..2580: mol_type = other DNA

SEQ ID NO: 3528 - DNA, 2580 bp, synthetic construct; identical to SEQ ID NO: 3307
  source 1..2580: mol_type = other DNA

SEQ ID NO: 3529 - DNA, 2580 bp, synthetic construct; identical to SEQ ID NO: 3307
  source 1..2580: mol_type = other DNA

SEQ ID NO: 3530 - DNA, 2580 bp, synthetic construct; identical to SEQ ID NO: 3307
  source 1..2580: mol_type = other DNA

SEQ ID NO: 3531 - DNA, 2580 bp, synthetic construct; identical to SEQ ID NO: 3307
  source 1..2580: mol_type = other DNA

SEQ ID NO: 3532 - DNA, 2580 bp, synthetic construct; identical to SEQ ID NO: 3307
  source 1..2580: mol_type = other DNA

SEQ ID NO: 3533 - DNA, 2580 bp, synthetic construct; identical to SEQ ID NO: 3307
  source 1..2580: mol_type = other DNA

SEQ ID NO: 3534 - DNA, 2580 bp, synthetic construct; identical to SEQ ID NO: 3307
  source 1..2580: mol_type = other DNA

SEQ ID NO: 3535 - DNA, 2580 bp, synthetic construct; identical to SEQ ID NO: 3307
  source 1..2580: mol_type = other DNA

SEQ ID NO: 3536 - DNA, 2580 bp, synthetic construct; identical to SEQ ID NO: 3307
  source 1..2580: mol_type = other DNA

SEQ ID NO: 3537 - DNA, 2580 bp, synthetic construct; identical to SEQ ID NO: 3307
  source 1..2580: mol_type = other DNA

SEQ ID NO: 3538 - DNA, 2580 bp, synthetic construct; identical to SEQ ID NO: 3307
  source 1..2580: mol_type = other DNA

SEQ ID NO: 3539 - DNA, 2580 bp, synthetic construct; identical to SEQ ID NO: 3307
  source 1..2580: mol_type = other DNA

SEQ ID NO: 3540 - DNA, 2580 bp, synthetic construct; identical to SEQ ID NO: 3307
  source 1..2580: mol_type = other DNA

SEQ ID NO: 3541 - DNA, 2580 bp, synthetic construct; identical to SEQ ID NO: 3307
  source 1..2580: mol_type = other DNA

SEQ ID NO: 3542 - DNA, 2580 bp, synthetic construct; identical to SEQ ID NO: 3307
  source 1..2580: mol_type = other DNA

SEQ ID NO: 3543 - DNA, 2580 bp, synthetic construct; identical to SEQ ID NO: 3307
  source 1..2580: mol_type = other DNA

SEQ ID NO: 3544 - DNA, 2580 bp, synthetic construct; identical to SEQ ID NO: 3307
  source 1..2580: mol_type = other DNA

SEQ ID NO: 3545 - DNA, 2580 bp, synthetic construct; identical to SEQ ID NO: 3307
  source 1..2580: mol_type = other DNA

SEQ ID NO: 3546 - DNA, 2580 bp, synthetic construct; identical to SEQ ID NO: 3307
  source 1..2580: mol_type = other DNA

SEQ ID NO: 3547 - DNA, 2580 bp, synthetic construct; identical to SEQ ID NO: 3307
  source 1..2580: mol_type = other DNA

SEQ ID NO: 3548 - DNA, 2580 bp, synthetic construct; identical to SEQ ID NO: 3307
  source 1..2580: mol_type = other DNA

SEQ ID NO: 3549 - DNA, 2580 bp, synthetic construct; identical to SEQ ID NO: 3307
  source 1..2580: mol_type = other DNA

SEQ ID NO: 3550 - DNA, 2580 bp, synthetic construct; identical to SEQ ID NO: 3307
  source 1..2580: mol_type = other DNA

SEQ ID NO: 3551 - DNA, 2580 bp, synthetic construct; identical to SEQ ID NO: 3307
  source 1..2580: mol_type = other DNA

SEQ ID NO: 3552 - DNA, 2580 bp, synthetic construct; identical to SEQ ID NO: 3307
  source 1..2580: mol_type = other DNA

SEQ ID NO: 3553 - DNA, 2580 bp, synthetic construct; identical to SEQ ID NO: 3307
  source 1..2580: mol_type = other DNA

SEQ ID NO: 3554 - DNA, 2580 bp, synthetic construct; identical to SEQ ID NO: 3307
  source 1..2580: mol_type = other DNA

SEQ ID NO: 3555 - DNA, 2580 bp, synthetic construct; identical to SEQ ID NO: 3307
  source 1..2580: mol_type = other DNA

SEQ ID NO: 3556 - DNA, 2580 bp, synthetic construct; identical to SEQ ID NO: 3307
  source 1..2580: mol_type = other DNA

SEQ ID NO: 3557 - DNA, 2580 bp, synthetic construct; identical to SEQ ID NO: 3307
  source 1..2580: mol_type = other DNA

SEQ ID NO: 3558 - DNA, 2580 bp, synthetic construct; identical to SEQ ID NO: 3307
  source 1..2580: mol_type = other DNA

SEQ ID NO: 3559 - DNA, 2580 bp, synthetic construct; identical to SEQ ID NO: 3307
  source 1..2580: mol_type = other DNA

SEQ ID NO: 3560 - DNA, 2580 bp, synthetic construct; identical to SEQ ID NO: 3307
  source 1..2580: mol_type = other DNA

SEQ ID NO: 3561 - DNA, 2580 bp, synthetic construct; identical to SEQ ID NO: 3307
  source 1..2580: mol_type = other DNA

SEQ ID NO: 3562 - DNA, 2580 bp, synthetic construct; identical to SEQ ID NO: 3307
  source 1..2580: mol_type = other DNA

SEQ ID NO: 3563 - DNA, 2580 bp, synthetic construct; identical to SEQ ID NO: 3307
  source 1..2580: mol_type = other DNA

SEQ ID NO: 3564 - DNA, 2580 bp, synthetic construct; identical to SEQ ID NO: 3307
  source 1..2580: mol_type = other DNA

SEQ ID NO: 3565 - DNA, 2580 bp, synthetic construct; identical to SEQ ID NO: 3307
  source 1..2580: mol_type = other DNA

SEQ ID NO: 3566 - DNA, 2580 bp, synthetic construct; identical to SEQ ID NO: 3307
  source 1..2580: mol_type = other DNA

SEQ ID NO: 3567 - DNA, 2580 bp, synthetic construct; identical to SEQ ID NO: 3307
  source 1..2580: mol_type = other DNA

SEQ ID NO: 3568 - DNA, 2580 bp, synthetic construct; identical to SEQ ID NO: 3307
  source 1..2580: mol_type = other DNA

SEQ ID NO: 3569 - DNA, 2580 bp, synthetic construct; identical to SEQ ID NO: 3307
  source 1..2580: mol_type = other DNA

SEQ ID NO: 3570 - DNA, 2580 bp, synthetic construct; identical to SEQ ID NO: 3307
  source 1..2580: mol_type = other DNA

SEQ ID NO: 3571 - DNA, 2580 bp, synthetic construct; identical to SEQ ID NO: 3307
  source 1..2580: mol_type = other DNA

SEQ ID NO: 3572 - DNA, 2580 bp, synthetic construct; identical to SEQ ID NO: 3307
  source 1..2580: mol_type = other DNA

SEQ ID NO: 3573 - DNA, 2580 bp, synthetic construct; identical to SEQ ID NO: 3307
  source 1..2580: mol_type = other DNA

SEQ ID NO: 3574 - DNA, 2580 bp, synthetic construct; identical to SEQ ID NO: 3307
  source 1..2580: mol_type = other DNA

SEQ ID NO: 3575 - DNA, 2580 bp, synthetic construct; identical to SEQ ID NO: 3307
  source 1..2580: mol_type = other DNA

SEQ ID NO: 3576 - DNA, 2580 bp, synthetic construct; identical to SEQ ID NO: 3307
  source 1..2580: mol_type = other DNA

SEQ ID NO: 3577 - DNA, 2580 bp, synthetic construct; identical to SEQ ID NO: 3307
  source 1..2580: mol_type = other DNA

SEQ ID NO: 3578 - DNA, 2580 bp, synthetic construct; identical to SEQ ID NO: 3307
  source 1..2580: mol_type = other DNA

SEQ ID NO: 3579 - DNA, 2580 bp, synthetic construct; identical to SEQ ID NO: 3307
  source 1..2580: mol_type = other DNA

SEQ ID NO: 3580 - DNA, 2580 bp, synthetic construct; identical to SEQ ID NO: 3307
  source 1..2580: mol_type = other DNA

SEQ ID NO: 3581 - DNA, 2580 bp, synthetic construct; identical to SEQ ID NO: 3307
  source 1..2580: mol_type = other DNA

SEQ ID NO: 3582 - DNA, 2580 bp, synthetic construct; identical to SEQ ID NO: 3307
  source 1..2580: mol_type = other DNA

SEQ ID NO: 3583 - DNA, 2580 bp, synthetic construct; identical to SEQ ID NO: 3307
  source 1..2580: mol_type = other DNA

SEQ ID NO: 3584 - DNA, 2580 bp, synthetic construct; identical to SEQ ID NO: 3307
  source 1..2580: mol_type = other DNA

SEQ ID NO: 3585 - DNA, 2580 bp, synthetic construct; identical to SEQ ID NO: 3307
  source 1..2580: mol_type = other DNA

SEQ ID NO: 3586 - DNA, 2580 bp, synthetic construct; identical to SEQ ID NO: 3307
  source 1..2580: mol_type = other DNA

SEQ ID NO: 3587 - DNA, 2580 bp, synthetic construct; identical to SEQ ID NO: 3307
  source 1..2580: mol_type = other DNA

SEQ ID NO: 3588 - DNA, 1503 bp, synthetic construct
  source 1..1503: mol_type = other DNA
atggccttaccagtgaccgccttgctcctgccgctggccttgctgctccacgccgccaggccgcagcctgtgctgacacagtctagtagcgcctctgcctctctgggcagcagcgtgaagctgacctgtacactgtctagcggccacagcagctacatcattgcctggcatcagcagcagcctggcaaggcccctagatacctgatgaaggtggaaggcagcggcagctacaacaaaggctctggcatccccgagagattcagcggcagttctagcggagccgaccgctacctgaccatcagcaatctccagagcgaggacgaggccgactactactgcgagacatgggacagcaacacccacgtgttcggcaccggcaccaaagtgacagttcttggcggaggcggaagtggaggcggaggatctggcggcggaggctctgaagttcagctggttcagagcggcgctgaagtgaagaaacctggggcctctgtgaaggtgtcctgcaaggcttccggctacacctttaccagctactacatgcactgggtccgacaggcccctggacaaggacttgagtggatgggcatcatcaaccccagcggcggcagaacaagctacgcccagaaattccagggcagagtgaccatgaccagagacacctctaccggcaccgtgtacatggaactgagcagcctgagaagcgaggacaccgccgtgtactactgtgccagaagccactgttctggcggcagctgctacagcatcgactattggggccagggcaccctggtcacagtctcttctacgcgtgagcagaaactgatctcggaagaggatctgaaaattgaagttatgtatcctcctccttacctagacaatgagaagagcaatggaaccattatccatgtgaaagggaaacacctttgtccaagtcccctatttcccggaccttctaagcccttttgggtgctggtggtggttgggggagtcctggcttgctatagcttgctagtaacagtggcctttattattttctgggtgaggagtaagaggagcaggctcctgcacagtgactacatgaacatgactccacgccgccccggacccacccgcaagcattaccagccctatgccccaccacgcgacttcgcagcctatcgctccagagtgaagttcagcaggagcgcagacgcccccgcgtaccagcagggccagaaccagctctataacgagctcaatctaggacgaagagaggagtacgatgttttggacaagagacgtggccgggaccctgagatggggggaaagccgagaaggaagaaccctcaggaaggcctgtacaatgaactgcagaaagataagatggcggaggcctacagtgagattgggatgaaaggcgagcgccggaggggcaaggggcacgatggcctttaccagggtctcagtacagccaccaaggacacctacgacgcccttcacatgcaggccctgccccctcgc

SEQ ID NO: 3589 - DNA, 1524 bp, synthetic construct
  source 1..1524: mol_type = other DNA
atggccttaccagtgaccgccttgctcctgccgctggccttgctgctccacgccgccaggccgcagcctgtgctgacacagtctagtagcgcctctgcctctctgggcagcagcgtgaagctgacctgtacactgtctagcggccacagcagctacatcattgcctggcatcagcagcagcctggcaaggcccctagatacctgatgaaggtggaaggcagcggcagctacaacaaaggctctggcatccccgagagattcagcggcagttctagcggagccgaccgctacctgaccatcagcaatctccagagcgaggacgaggccgactactactgcgagacatgggacagcaacacccacgtgttcggcaccggcaccaaagtgacagttcttggcggaggcggaagtggaggcggaggatctggcggcggaggctctgaagttcagctggttcagagcggcgctgaagtgaagaaacctggggcctctgtgaaggtgtcctgcaaggcttccggctacacctttaccagctactacatgcactgggtccgacaggcccctggacaaggacttgagtggatgggcatcatcaaccccagcggcggcagaacaagctacgcccagaaattccagggcagagtgaccatgaccagagacacctctaccggcaccgtgtacatggaactgagcagcctgagaagcgaggacaccgccgtgtactactgtgccagaagccactgttctggcggcagctgctacagcatcgactattggggccagggcaccctggtcacagtctcttctacgcgtgagcagaaactgatctcggaagaggatctggcgaagcccaccacgacgccagcgccgcgaccaccaacaccggcgcccaccatcgcgtcgcagcccctgtccctgcgcccagaggcgtgccggccagcggcggggggcgcagtgcacacgagggggctggacttcgcctgtgacatctacatctgggcgcccttggccgggacttgtggggtccttctcctgtcactggttatcaccctttactgcaaacggggcagaaagaaactcctgtatatattcaaacaaccatttatgagaccagtacaaactactcaagaggaagatggctgtagctgccgatttccagaagaagaagaaggaggatgtgaactgagagtgaagttcagcaggagcgcagacgcccccgcgtaccagcagggccagaaccagctctataacgagctgaatctaggacgaagagaggagtacgatgttttggacaagagacgtggccgggaccctgagatggggggaaagccgagaaggaagaaccctcaggaaggcctgtacaatgaactgcagaaagataagatggcggaggcctacagtgagattgggatgaaaggcgagcgccggaggggcaaggggcacgatggcctttaccagggtctcagtacagccaccaaggacacctacgacgcccttcacatgcaggccctgccccctcgctga

SEQ ID NO: 3590 - DNA, 1524 bp, synthetic construct
  source 1..1524: mol_type = other DNA
atggccttaccagtgaccgccttgctcctgccgctggccttgctgctccacgccgccaggccggaagttcagctggttcagagcggcgctgaagtgaagaaacctggggcctctgtgaaggtgtcctgcaaggcttccggctacacctttaccagctactacatgcactgggtccgacaggcccctggacaaggacttgagtggatgggcatcatcaaccccagcggcggcagaacaagctacgcccagaaattccagggcagagtgaccatgaccagagacacctctaccggcaccgtgtacatggaactgagcagcctgagaagcgaggacaccgccgtgtactactgtgccagaagccactgttctggcggcagctgctacagcatcgactattggggccagggcaccctggtcacagtctcttctggcggaggcggaagtggaggcggaggatctggcggcggaggctctcagcctgtgctgacacagtctagtagcgcctctgcctctctgggcagcagcgtgaagctgacctgtacactgtctagcggccacagcagctacatcattgcctggcatcagcagcagcctggcaaggcccctagatacctgatgaaggtggaaggcagcggcagctacaacaaaggctctggcatccccgagagattcagcggcagttctagcggagccgaccgctacctgaccatcagcaatctccagagcgaggacgaggccgactactactgcgagacatgggacagcaacacccacgtgttcggcaccggcaccaaagtgacagttcttacgcgtgagcagaaactgatctcggaagaggatctggcgaagcccaccacgacgccagcgccgcgaccaccaacaccggcgcccaccatcgcgtcgcagcccctgtccctgcgcccagaggcgtgccggccagcggcggggggcgcagtgcacacgagggggctggacttcgcctgtgacatctacatctgggcgcccttggccgggacttgtggggtccttctcctgtcactggttatcaccctttactgcaaacggggcagaaagaaactcctgtatatattcaaacaaccatttatgagaccagtacaaactactcaagaggaagatggctgtagctgccgatttccagaagaagaagaaggaggatgtgaactgagagtgaagttcagcaggagcgcagacgcccccgcgtaccagcagggccagaaccagctctataacgagctgaatctaggacgaagagaggagtacgatgttttggacaagagacgtggccgggaccctgagatggggggaaagccgagaaggaagaaccctcaggaaggcctgtacaatgaactgcagaaagataagatggcggaggcctacagtgagattgggatgaaaggcgagcgccggaggggcaaggggcacgatggcctttaccagggtctcagtacagccaccaaggacacctacgacgcccttcacatgcaggccctgccccctcgctga

SEQ ID NO: 3591 - DNA, 2763 bp, synthetic construct
  source 1..2763: mol_type = other DNA
atggccttaccagtgaccgccttgctcctgccgctggccttgctgctccacgccgccaggccgcagcctgtgctgacacagtctagtagcgcctctgcctctctgggcagcagcgtgaagctgacctgtacactgtctagcggccacagcagctacatcattgcctggcatcagcagcagcctggcaaggcccctagatacctgatgaaggtggaaggcagcggcagctacaacaaaggctctggcatccccgagagattcagcggcagttctagcggagccgaccgctacctgaccatcagcaatctccagagcgaggacgaggccgactactactgcgagacatgggacagcaacacccacgtgttcggcaccggcaccaaagtgacagttcttggcggaggcggaagtggaggcggaggatctggcggcggaggctctgaagttcagctggttcagagcggcgctgaagtgaagaaacctggggcctctgtgaaggtgtcctgcaaggcttccggctacacctttaccagctactacatgcactgggtccgacaggcccctggacaaggacttgagtggatgggcatcatcaaccccagcggcggcagaacaagctacgcccagaaattccagggcagagtgaccatgaccagagacacctctaccggcaccgtgtacatggaactgagcagcctgagaagcgaggacaccgccgtgtactactgtgccagaagccactgttctggcggcagctgctacagcatcgactattggggccagggcaccctggtcacagtctcttctacgcgtgagcagaaactgatctcggaagaggatctggcgaagcccaccacgacgccagcgccgcgaccaccaacaccggcgcccaccatcgcgtcgcagcccctgtccctgcgcccagaggcgtgccggccagcggcggggggcgcagtgcacacgagggggctggacttcgcctgtgacatctacatctgggcgcccttggccgggacttgtggggtccttctcctgtcactggttatcaccctttactgcgggcgcgccagagtgaagttcagcaggagcgcagacgcccccgcgtaccagcagggccagaaccagctctataacgagctgaatctaggacgaagagaggagtacgatgttttggacaagagacgtggccgggaccctgagatggggggaaagccgagaaggaagaaccctcaggaaggcctgtacaatgaactgcagaaagataagatggcggaggcctacagtgagattgggatgaaaggcgagcgccggaggggcaaggggcacgatggcctttaccagggtctcagtacagccaccaaggacacctacgacgcccttcacatgcaggccctgccccctcgctctagaggatctggagcaacaaacttctcactactcaaacaagcaggtgacgtggaggagaatcccgggcctgggatccacatggccacttacgaggttctctgtgaggtggcgcggaaactgggcacggatgacagggaagtggtattgttcctcctaaacgtgttcatacctcaacccacactggcccaattaattggagctcttagagctttaaaggaggagggcaggttaacgtttcccctgttagcggaatgtctgtttcgtgcaggtcgcagagacctcttgcgcgacctgcttcacttagacccgcgttttttagagcgccacctagcgggcacaatgagttatttcagcccttatcagctcactgttctccacgtagacggggagctgtgtgcgagggatattaggtctttgatatttttaagcaaggacactatagggtctcgcagcacaccacagacattcttacactgggtgtactgtatggaaaacttagacctactgggtcccactgacgtggatgccctaatgtcaatgcttagatctttgtcaagagtagacctacagcgccaagtgcaaaccctaatgggccttcacctttccggcccatcacactcccaacactatcgccatacaccactcgagaccgatttctacgactacaaggacgacgatgacaagactagtggctccggcgagggcagaggaagtctactaacctgcggagatgtggaagaaaatcctggcccacatatgaccgagtacaagcccacggtgcgcctcgccacccgcgacgacgtccccagggccgtacgcaccctcgccgccgcgttcgccgactaccccgccacgcgccacaccgtcgatccggaccgccacatcgagcgggtcaccgagctgcaagaactcttcctcacgcgcgtcgggctcgacatcggcaaggtgtgggtcgcggacgacggcgccgcggtggcggtctggaccacgccggagagcgtcgaagcgggggcggtgttcgccgagatcggcccgcgcatggccgagttgagcggttcccggctggccgcgcagcaacagatggaaggcctcctggcgccgcaccggcccaaggagcccgcgtggttcctggccaccgtcggcgtctcgcccgaccaccagggcaagggtctgggcagcgccgtcgtgctccccggagtggaggcggccgagcgcgccggggtgcccgccttcctggagacctccgcgccccgcaacctccccttctacgagcggctcggcttcaccgtcaccgccgacgtcgaggtgcccgaaggaccgcgcacctggtgcatgacccgcaagcccggtgcctga

SEQ ID NO: 3592 - DNA, 2583 bp, synthetic construct
  source 1..2583: mol_type = other DNA
atggccttaccagtgaccgccttgctcctgccgctggccttgctgctccacgccgccaggccgcagcctgtgctgacacagtctagtagcgcctctgcctctctgggcagcagcgtgaagctgacctgtacactgtctagcggccacagcagctacatcattgcctggcatcagcagcagcctggcaaggcccctagatacctgatgaaggtggaaggcagcggcagctacaacaaaggctctggcatccccgagagattcagcggcagttctagcggagccgaccgctacctgaccatcagcaatctccagagcgaggacgaggccgactactactgcgagacatgggacagcaacacccacgtgttcggcaccggcaccaaagtgacagttcttctcgagatccagaaccctgatcctgccgtgtaccagctgcgggatagcaagagcagcgacaagagcgtgtgtctgttcaccgacttcgacagccagaccaacgtgtcccagagcaaggactccgacgtgtacatcaccgataagtgcgtgctggacatgcggagcatggacttcaagagcaactccgccgtggcctggtccaacaagtccgatttcgcctgcgccaacgccttcaacaacagcattatccccgaggacacattcttcccaagcagcgacgtgccctgcgacgtgaagctggtggaaaagagcttcgagacagacaccaacctgaacttccagaacctgagcgtgatcggcttcagaatcctgctgctgaaagtggccggctttaacctgctgatgaccctgcggctgtggtccagccgcgccaagagaagcggatctggcgtgaagcagaccctgaatttcgacctgctgaagctggctggcgacgtggaatccaacccaggccctactagtatggactggatttggcgcatccttttccttgtcggcgctgctaccggcgcgcattccttcgaagaagttcagctggttcagagcggcgctgaagtgaagaaacctggggcctctgtgaaggtgtcctgcaaggcttccggctacacctttaccagctactacatgcactgggtccgacaggcccctggacaaggacttgagtggatgggcatcatcaaccccagcggcggcagaacaagctacgcccagaaattccagggcagagtgaccatgaccagagacacctctaccggcaccgtgtacatggaactgagcagcctgagaagcgaggacaccgccgtgtactactgtgccagaagccactgttctggcggcagctgctacagcatcgactattggggccagggcaccctggtcacagtctcttctacgcgtgaggacctgaagaacgtgttcccacctgaggtggccgtgttcgagcctagcaaggccgagatcgcccacacccagaaagccaccctcgtgtgcctggctaccggcttctaccccgaccatgtggaactgtcttggtgggtcaacggcaaagaggtgcacagcggcgtgtgtaccgacccccagccactgaaagaacagcccgccctgaacgacagccggtactgcctgagcagcagactgagagtgtccgccaccttctggcagaacccccggaaccacttcagatgccaggtgcagttctacggcctgagcgagaacgacgagtggacccaggacagagccaagcccgtgacccagatcgtgtctgccgaagcctggggcagagccgattgcggcatcaccagcgccagctaccaccagggcgtgctgagcgccaccatcctgtacgagatcctgctgggcaaggccaccctgtacgccgtgctggtgtctgccctggtgctgatggctatggtcaagcggaaggacagccggggaagggccaagcgatctggatctggagcaacaaacttctcactactcaaacaagcaggtgacgtggaggagaatcccgggccttctagaggccatatgaccgagtacaagcccacggtgcgcctcgccacccgcgacgacgtccccagggccgtacgcaccctcgccgccgcgttcgccgactaccccgccacgcgccacaccgtcgatccggaccgccacatcgagcgggtcaccgagctgcaagaactcttcctcacgcgcgtcgggctcgacatcggcaaggtgtgggtcgcggacgacggcgccgcggtggcggtctggaccacgccggagagcgtcgaagcgggggcggtgttcgccgagatcggcccgcgcatggccgagttgagcggttcccggctggccgcgcagcaacagatggaaggcctcctggcgccgcaccggcccaaggagcccgcgtggttcctggccaccgtcggcgtctcgcccgaccaccagggcaagggtctgggcagcgccgtcgtgctccccggagtggaggcggccgagcgcgccggggtgcccgccttcctggagacctccgcgccccgcaacctccccttctacgagcggctcggcttcaccgtcaccgccgacgtcgaggtgcccgaaggaccgcgcacctggtgcatgacccgcaagcccggtgcctga

SEQ ID NO: 3593 - DNA, 2580 bp, synthetic construct
  source 1..2580: mol_type = other DNA
atggccttaccagtgaccgccttgctcctgccgctggccttgctgctccacgccgccaggccgcagcctgtgctgacacagtctagtagcgcctctgcctctctgggcagcagcgtgaagctgacctgtacactgtctagcggccacagcagctacatcattgcctggcatcagcagcagcctggcaaggcccctagatacctgatgaaggtggaaggcagcggcagctacaacaaaggctctggcatccccgagagattcagcggcagttctagcggagccgaccgctacctgaccatcagcaatctccagagcgaggacgaggccgactactactgcgagacatgggacagcaacacccacgtgttcggcaccggcaccaaagtgacagttcttctcgaggacctgaagaacgtgttcccacctgaggtggccgtgttcgagcctagcaaggccgagatcgcccacacccagaaagccaccctcgtgtgcctggctaccggcttctaccccgaccatgtggaactgtcttggtgggtcaacggcaaagaggtgcacagcggcgtgtgtaccgacccccagccactgaaagaacagcccgccctgaacgacagccggtactgcctgagcagcagactgagagtgtccgccaccttctggcagaacccccggaaccacttcagatgccaggtgcagttctacggcctgagcgagaacgacgagtggacccaggacagagccaagcccgtgacccagatcgtgtctgccgaagcctggggcagagccgattgcggcatcaccagcgccagctaccaccagggcgtgctgagcgccaccatcctgtacgagatcctgctgggcaaggccaccctgtacgccgtgctggtgtctgccctggtgctgatggctatggtcaagcggaaggacagccggggaagggccaagcgatctggatctggagcaacaaacttctcactactcaaacaagcaggtgacgtggaggagaatcccgggcctactagtatggactggatttggcgcatccttttccttgtcggcgctgctaccggcgcgcattccttcgaagaagttcagctggttcagagcggcgctgaagtgaagaaacctggggcctctgtgaaggtgtcctgcaaggcttccggctacacctttaccagctactacatgcactgggtccgacaggcccctggacaaggacttgagtggatgggcatcatcaaccccagcggcggcagaacaagctacgcccagaaattccagggcagagtgaccatgaccagagacacctctaccggcaccgtgtacatggaactgagcagcctgagaagcgaggacaccgccgtgtactactgtgccagaagccactgttctggcggcagctgctacagcatcgactattggggccagggcaccctggtcacagtctcttctacgcgtatccagaaccctgatcctgccgtgtaccagctgcgggatagcaagagcagcgacaagagcgtgtgtctgttcaccgacttcgacagccagaccaacgtgtcccagagcaaggactccgacgtgtacatcaccgataagtgcgtgctggacatgcggagcatggacttcaagagcaactccgccgtggcctggtccaacaagtccgatttcgcctgcgccaacgccttcaacaacagcattatccccgaggacacattcttcccaagcagcgacgtgccctgcgacgtgaagctggtggaaaagagcttcgagacagacaccaacctgaacttccagaacctgagcgtgatcggcttcagaatcctgctgctgaaagtggccggctttaacctgctgatgaccctgcggctgtggtccagccgcgccaagagaagcggatctggcgtgaagcagaccctgaatttcgacctgctgaagctggctggcgacgtggaatccaacccaggcccttctagaggccatatgaccgagtacaagcccacggtgcgcctcgccacccgcgacgacgtccccagggccgtacgcaccctcgccgccgcgttcgccgactaccccgccacgcgccacaccgtcgatccggaccgccacatcgagcgggtcaccgagctgcaagaactcttcctcacgcgcgtcgggctcgacatcggcaaggtgtgggtcgcggacgacggcgccgcggtggcggtctggaccacgccggagagcgtcgaagcgggggcggtgttcgccgagatcggcccgcgcatggccgagttgagcggttcccggctggccgcgcagcaacagatggaaggcctcctggcgccgcaccggcccaaggagcccgcgtggttcctggccaccgtcggcgtctcgcccgaccaccagggcaagggtctgggcagcgccgtcgtgctccccggagtggaggcggccgagcgcgccggggtgcccgccttcctggagacctccgcgccccgcaacctccccttctacgagcggctcggcttcaccgtcaccgccgacgtcgaggtgcccgaaggaccgcgcacctggtgcatgacccgcaagcccggtgcctga

SEQ ID NO: 3594 - DNA, 1878 bp, synthetic construct
  source 1..1878: mol_type = other DNA
atggccttaccagtgaccgccttgctcctgccgctggccttgctgctccacgccgccaggccgcagcctgtgctgacacagtctagtagcgcctctgcctctctgggcagcagcgtgaagctgacctgtacactgtctagcggccacagcagctacatcattgcctggcatcagcagcagcctggcaaggcccctagatacctgatgaaggtggaaggcagcggcagctacaacaaaggctctggcatccccgagagattcagcggcagttctagcggagccgaccgctacctgaccatcagcaatctccagagcgaggacgaggccgactactactgcgagacatgggacagcaacacccacgtgttcggcaccggcaccaaagtgacagttcttctcgaggacctgaagaacgtgttcccacctgaggtggccgtgttcgagcctagcgaggccgagatcagccacacccagaaagccaccctcgtgtgcctggctaccggcttctaccccgaccatgtggaactgtcttggtgggtcaacggcaaagaggtgcacagcggcgtgtgtaccgacccccagccactgaaagaacagcccgccctgaacgacagccggtactgcctgagcagcagactgagagtgtccgccaccttctggcagaacccccggaaccacttcagatgccaggtgcagttctacggcctgagcgagaacgacgagtggacccaggacagagccaagcccgtgacccagatcgtgtctgccgaagcctggggcagagccgattgcggctttaccagcgagagctaccagcagggcgtgctgagcgccaccatcctgtacgagatcctgctgggcaaggccaccctgtacgccgtgctggtgtctgccctggtgctgatggctatggtcaagcggaaggacagccggggaagggccaagcgatctggatctggagcaacaaacttctcactactcaaacaagcaggtgacgtggaggagaatcccgggcctactagtatggactggatttggcgcatccttttccttgtcggcgctgctaccggcgcgcattccttcgaagaagttcagctggttcagagcggcgctgaagtgaagaaacctggggcctctgtgaaggtgtcctgcaaggcttccggctacacctttaccagctactacatgcactgggtccgacaggcccctggacaaggacttgagtggatgggcatcatcaaccccagcggcggcagaacaagctacgcccagaaattccagggcagagtgaccatgaccagagacacctctaccggcaccgtgtacatggaactgagcagcctgagaagcgaggacaccgccgtgtactactgtgccagaagccactgttctggcggcagctgctacagcatcgactattggggccagggcaccctggtcacagtctcttctacgcgtatccagaaccctgatcctgccgtgtaccagctgcgggatagcaagagcagcgacaagagcgtgtgtctgttcaccgacttcgacagccagaccaacgtgtcccagagcaaggactccgacgtgtacatcaccgataagtgcgtgctggacatgcggagcatggacttcaagagcaactccgccgtggcctggtccaacaagtccgatttcgcctgcgccaacgccttcaacaacagcattatccccgaggacacattcttcccaagccccgagagcagctgcgacgtgaagctggtggaaaagagcttcgagacagacaccaacctgaacttccagaacctgagcgtgatcggcttcagaatcctgctgctgaaagtggccggctttaacctgctgatgaccctgcggctgtggtccagc

SEQ ID NO: 3595 - DNA, 2553 bp, synthetic construct
  source 1..2553: mol_type = other DNA
atggccttaccagtgaccgccttgctcctgccgctggccttgctgctccacgccgccaggccgcagcctgtgctgacacagtctagtagcgcctctgcctctctgggcagcagcgtgaagctgacctgtacactgtctagcggccacagcagctacatcattgcctggcatcagcagcagcctggcaaggcccctagatacctgatgaaggtggaaggcagcggcagctacaacaaaggctctggcatccccgagagattcagcggcagttctagcggagccgaccgctacctgaccatcagcaatctccagagcgaggacgaggccgactactactgcgagacatgggacagcaacacccacgtgttcggcaccggcaccaaagtgacagttcttctcgaggacctgaagaacgtgttcccacctgaggtggccgtgttcgagcctagcgaggccgagatcagccacacccagaaagccaccctcgtgtgcctggctaccggcttctaccccgaccatgtggaactgtcttggtgggtcaacggcaaagaggtgcacagcggcgtgtgtaccgacccccagccactgaaagaacagcccgccctgaacgacagccggtactgcctgagcagcagactgagagtgtccgccaccttctggcagaacccccggaaccacttcagatgccaggtgcagttctacggcctgagcgagaacgacgagtggacccaggacagagccaagcccgtgacccagatcgtgtctgccgaagcctggggcagagccgattgcggctttaccagcgagagctaccagcagggcgtgctgagcgccaccatcctgtacgagatcctgctgggcaaggccaccctgtacgccgtgctggtgtctgccctggtgctgatggctatggtcaagcggaaggacagccggggaagggccaagcgatctggatctggagcaacaaacttctcactactcaaacaagcaggtgacgtggaggagaatcccgggcctactagtatggactggatttggcgcatccttttccttgtcggcgctgctaccggcgcgcattccttcgaagaagttcagctggttcagagcggcgctgaagtgaagaaacctggggcctctgtgaaggtgtcctgcaaggcttccggctacacctttaccagctactacatgcactgggtccgacaggcccctggacaaggacttgagtggatgggcatcatcaaccccagcggcggcagaacaagctacgcccagaaattccagggcagagtgaccatgaccagagacacctctaccggcaccgtgtacatggaactgagcagcctgagaagcgaggacaccgccgtgtactactgtgccagaagccactgttctggcggcagctgctacagcatcgactattggggccagggcaccctggtcacagtctcttctacgcgtatccagaaccctgatcctgccgtgtaccagctgcgggatagcaagagcagcgacaagagcgtgtgtctgttcaccgacttcgacagccagaccaacgtgtcccagagcaaggactccgacgtgtacatcaccgataagtgcgtgctggacatgcggagcatggacttcaagagcaactccgccgtggcctggtccaacaagtccgatttcgcctgcgccaacgccttcaacaacagcattatccccgaggacacattcttcccaagccccgagagcagctgcgacgtgaagctggtggaaaagagcttcgagacagacaccaacctgaacttccagaacctgagcgtgatcggcttcagaatcctgctgctgaaagtggccggctttaacctgctgatgaccctgcggctgtggtccagccgcgccaagagaagcggatctggcgtgaagcagaccctgaatttcgacctgctgaagctggctggcgacgtggaatccaacccaggcccttctagaggcgggatccacaccatggctacctacgaggtgctgtgcgaggtggcaagaaagctgggcaccgacgacagagaagtggtgctgttcctgctgaacgtgttcatccctcagcctacactggcccagctgatcggtgcactgagagccctgaaagaggaaggccggctgacctttcctctgctggccgaatgcctgttcagagccggaagaagggatctgctgcgggacctgctgcatctggaccccagatttctggaaagacacctggccggcaccatgagctacttcagcccttaccagctgaccgtgctgcacgttgacggcgaactgtgcgccagagatattcggagcctgatcttcctgagcaaggacaccatcggcagccggtctacccctcagacatttctgcactgggtgtactgcatggaaaacctggacctgctcggccccacagatgtggatgccctgatgtccatgctgagaagcctgagcagagtggacctccagagacaggtgcagacactgatgggactgcacctgagcggacctagccacagccagcactacagacacacccct

SEQ ID NO: 3596 - DNA, 1890 bp, synthetic construct
  source 1..1890: mol_type = other DNA
atggccttaccagtgaccgccttgctcctgccgctggccttgctgctccacgccgccaggccgcagcctgtgctgacacagtctagtagcgcctctgcctctctgggcagcagcgtgaagctgacctgtacactgtctagcggccacagcagctacatcattgcctggcatcagcagcagcctggcaaggcccctagatacctgatgaaggtggaaggcagcggcagctacaacaaaggctctggcatccccgagagattcagcggcagttctagcggagccgaccgctacctgaccatcagcaatctccagagcgaggacgaggccgactactactgcgagacatgggacagcaacacccacgtgttcggcaccggcaccaaagtgacagttcttctcgagatccagaaccctgatcctgccgtgtaccagctgcgggatagcaagagcagcgacaagagcgtgtgtctgttcaccgacttcgacagccagaccaacgtgtcccagagcaaggactccgacgtgtacatcaccgataagtgcgtgctggacatgcggagcatggacttcaagagcaactccgccgtggcctggtccaacaagtccgatttcgcctgcgccaacgccttcaacaacagcattatccccgaggacacattcttcccaagccccgagagcagctgcgacgtgaagctggtggaaaagagcttcgagacagacaccaacctgaacttccagaacctgagcgtgatcggcttcagaatcctgctgctgaaagtggccggctttaacctgctgatgaccctgcggctgtggtccagccgcgccaagagaagcggatctggcgtgaagcagaccctgaatttcgacctgctgaagctggctggcgacgtggaatccaacccaggccctactagtatggactggatttggcgcatccttttccttgtcggcgctgctaccggcgcgcattccttcgaagaagttcagctggttcagagcggcgctgaagtgaagaaacctggggcctctgtgaaggtgtcctgcaaggcttccggctacacctttaccagctactacatgcactgggtccgacaggcccctggacaaggacttgagtggatgggcatcatcaaccccagcggcggcagaacaagctacgcccagaaattccagggcagagtgaccatgaccagagacacctctaccggcaccgtgtacatggaactgagcagcctgagaagcgaggacaccgccgtgtactactgtgccagaagccactgttctggcggcagctgctacagcatcgactattggggccagggcaccctggtcacagtctcttctacgcgtgaggacctgaagaacgtgttcccacctgaggtggccgtgttcgagcctagcgaggccgagatcagccacacccagaaagccaccctcgtgtgcctggctaccggcttctaccccgaccatgtggaactgtcttggtgggtcaacggcaaagaggtgcacagcggcgtgtgtaccgacccccagccactgaaagaacagcccgccctgaacgacagccggtactgcctgagcagcagactgagagtgtccgccaccttctggcagaacccccggaaccacttcagatgccaggtgcagttctacggcctgagcgagaacgacgagtggacccaggacagagccaagcccgtgacccagatcgtgtctgccgaagcctggggcagagccgattgcggctttaccagcgagagctaccagcagggcgtgctgagcgccaccatcctgtacgagatcctgctgggcaaggccaccctgtacgccgtgctggtgtctgccctggtgctgatggctatggtcaagcggaaggacagccgggga

SEQ ID NO: 3597 - DNA, 2556 bp, synthetic construct
  source 1..2556: mol_type = other DNA
atggccttaccagtgaccgccttgctcctgccgctggccttgctgctccacgccgccaggccgcagcctgtgctgacacagtctagtagcgcctctgcctctctgggcagcagcgtgaagctgacctgtacactgtctagcggccacagcagctacatcattgcctggcatcagcagcagcctggcaaggcccctagatacctgatgaaggtggaaggcagcggcagctacaacaaaggctctggcatccccgagagattcagcggcagttctagcggagccgaccgctacctgaccatcagcaatctccagagcgaggacgaggccgactactactgcgagacatgggacagcaacacccacgtgttcggcaccggcaccaaagtgacagttcttctcgagatccagaaccctgatcctgccgtgtaccagctgcgggatagcaagagcagcgacaagagcgtgtgtctgttcaccgacttcgacagccagaccaacgtgtcccagagcaaggactccgacgtgtacatcaccgataagtgcgtgctggacatgcggagcatggacttcaagagcaactccgccgtggcctggtccaacaagtccgatttcgcctgcgccaacgccttcaacaacagcattatccccgaggacacattcttcccaagccccgagagcagctgcgacgtgaagctggtggaaaagagcttcgagacagacaccaacctgaacttccagaacctgagcgtgatcggcttcagaatcctgctgctgaaagtggccggctttaacctgctgatgaccctgcggctgtggtccagccgcgccaagagaagcggatctggcgtgaagcagaccctgaatttcgacctgctgaagctggctggcgacgtggaatccaacccaggccctactagtatggactggatttggcgcatccttttccttgtcggcgctgctaccggcgcgcattccttcgaagaagttcagctggttcagagcggcgctgaagtgaagaaacctggggcctctgtgaaggtgtcctgcaaggcttccggctacacctttaccagctactacatgcactgggtccgacaggcccctggacaaggacttgagtggatgggcatcatcaaccccagcggcggcagaacaagctacgcccagaaattccagggcagagtgaccatgaccagagacacctctaccggcaccgtgtacatggaactgagcagcctgagaagcgaggacaccgccgtgtactactgtgccagaagccactgttctggcggcagctgctacagcatcgactattggggccagggcaccctggtcacagtctcttctacgcgtgaggacctgaagaacgtgttcccacctgaggtggccgtgttcgagcctagcgaggccgagatcagccacacccagaaagccaccctcgtgtgcctggctaccggcttctaccccgaccatgtggaactgtcttggtgggtcaacggcaaagaggtgcacagcggcgtgtgtaccgacccccagccactgaaagaacagcccgccctgaacgacagccggtactgcctgagcagcagactgagagtgtccgccaccttctggcagaacccccggaaccacttcagatgccaggtgcagttctacggcctgagcgagaacgacgagtggacccaggacagagccaagcccgtgacccagatcgtgtctgccgaagcctggggcagagccgattgcggctttaccagcgagagctaccagcagggcgtgctgagcgccaccatcctgtacgagatcctgctgggcaaggccaccctgtacgccgtgctggtgtctgccctggtgctgatggctatggtcaagcggaaggacagccggggaagggccaagcgatctggatctggagcaacaaacttctcactactcaaacaagcaggtgacgtggaggagaatcccgggccttctagaggcgggatccacaccatggctacctacgaggtgctgtgcgaggtggcaagaaagctgggcaccgacgacagagaagtggtgctgttcctgctgaacgtgttcatccctcagcctacactggcccagctgatcggtgcactgagagccctgaaagaggaaggccggctgacctttcctctgctggccgaatgcctgttcagagccggaagaagggatctgctgcgggacctgctgcatctggaccccagatttctggaaagacacctggccggcaccatgagctacttcagcccttaccagctgaccgtgctgcacgttgacggcgaactgtgcgccagagatattcggagcctgatcttcctgagcaaggacaccatcggcagccggtctacccctcagacatttctgcactgggtgtactgcatggaaaacctggacctgctcggccccacagatgtggatgccctgatgtccatgctgagaagcctgagcagagtggacctccagagacaggtgcagacactgatgggactgcacctgagcggacctagccacagccagcactacagacacacccct

SEQ ID NO: 3598 - DNA, 2715 bp, synthetic construct
  source 1..2715: mol_type = other DNA
atggccttaccagtgaccgccttgctcctgccgctggccttgctgctccacgccgccaggccgctcgaggggaaaccaattcccaaccctcttctgggactggattcaaccggcagcggcgaggacctgaagaacgtgttcccacctgaggtggccgtgttcgagcctagcaaggccgagatcgcccacacccagaaagccaccctcgtgtgcctggctaccggcttctaccccgaccatgtggaactgtcttggtgggtcaacggcaaagaggtgcacagcggcgtgtgtaccgacccccagccactgaaagaacagcccgccctgaacgacagccggtactgcctgagcagcagactgagagtgtccgccaccttctggcagaacccccggaaccacttcagatgccaggtgcagttctacggcctgagcgagaacgacgagtggacccaggacagagccaagcccgtgacccagatcgtgtctgccgaagcctggggcagagccgattgcggcatcaccagcgccagctaccaccagggcgtgctgagcgccaccatcctgtacgagatcctgctgggcaaggccaccctgtacgccgtgctggtgtctgccctggtgctgatggctatggtcaagcggaaggacagccggggaagggccaagcgatctggatctggagcaacaaacttctcactactcaaacaagcaggtgacgtggaggagaatcccgggcctactagcatggccttaccagtgaccgccttgctcctgccgctggccttgctgctccacgccgccaggccgcagcctgtgctgacacagtctagtagcgcctctgcctctctgggcagcagcgtgaagctgacctgtacactgtctagcggccacagcagctacatcattgcctggcatcagcagcagcctggcaaggcccctagatacctgatgaaggtggaaggcagcggcagctacaacaaaggctctggcatccccgagagattcagcggcagttctagcggagccgaccgctacctgaccatcagcaatctccagagcgaggacgaggccgactactactgcgagacatgggacagcaacacccacgtgttcggcaccggcaccaaagtgacagttcttggcggaggcggaagtggaggcggaggatctggcggcggaggctctgaagttcagctggttcagagcggcgctgaagtgaagaaacctggggcctctgtgaaggtgtcctgcaaggcttccggctacacctttaccagctactacatgcactgggtccgacaggcccctggacaaggacttgagtggatgggcatcatcaaccccagcggcggcagaacaagctacgcccagaaattccagggcagagtgaccatgaccagagacacctctaccggcaccgtgtacatggaactgagcagcctgagaagcgaggacaccgccgtgtactactgtgccagaagccactgttctggcggcagctgctacagcatcgactattggggccagggcaccctggtcacagtctcttctacgcgtgagcagaaactgatctcggaagaggatgggagcggcatccagaaccctgatcctgccgtgtaccagctgcgggatagcaagagcagcgacaagagcgtgtgtctgttcaccgacttcgacagccagaccaacgtgtcccagagcaaggactccgacgtgtacatcaccgataagtgcgtgctggacatgcggagcatggacttcaagagcaactccgccgtggcctggtccaacaagtccgatttcgcctgcgccaacgccttcaacaacagcattatccccgaggacacattcttcccaagcagcgacgtgccctgcgacgtgaagctggtggaaaagagcttcgagacagacaccaacctgaacttccagaacctgagcgtgatcggcttcagaatcctgctgctgaaagtggccggctttaacctgctgatgaccctgcggctgtggtccagccgcgccaagagaagcggatctggcgtgaagcagaccctgaatttcgacctgctgaagctggctggcgacgtggaatccaacccaggcccttctagaggccatatgaccgagtacaagcccacggtgcgcctcgccacccgcgacgacgtccccagggccgtacgcaccctcgccgccgcgttcgccgactaccccgccacgcgccacaccgtcgatccggaccgccacatcgagcgggtcaccgagctgcaagaactcttcctcacgcgcgtcgggctcgacatcggcaaggtgtgggtcgcggacgacggcgccgcggtggcggtctggaccacgccggagagcgtcgaagcgggggcggtgttcgccgagatcggcccgcgcatggccgagttgagcggttcccggctggccgcgcagcaacagatggaaggcctcctggcgccgcaccggcccaaggagcccgcgtggttcctggccaccgtcggcgtctcgcccgaccaccagggcaagggtctgggcagcgccgtcgtgctccccggagtggaggcggccgagcgcgccggggtgcccgccttcctggagacctccgcgccccgcaacctccccttctacgagcggctcggcttcaccgtcaccgccgacgtcgaggtgcccgaaggaccgcgcacctggtgcatgacccgcaagcccggtgcctga

SEQ ID NO: 3599 - DNA, 2718 bp, synthetic construct
  source 1..2718: mol_type = other DNA
atggccttaccagtgaccgccttgctcctgccgctggccttgctgctccacgccgccaggccgctcgagcagaaactgatctcggaagaggatctgggctccggcgatcgccctgatcctgccgtgtaccagctgcgggatagcaagagcagcgacaagagcgtgtgtctgttcaccgacttcgacagccagaccaacgtgtcccagagcaaggactccgacgtgtacatcaccgataagtgcgtgctggacatgcggagcatggacttcaagagcaactccgccgtggcctggtccaacaagtccgatttcgcctgcgccaacgccttcaacaacagcattatccccgaggacacattcttcccaagccccgagagcagctgcgacgtgaagctggtggaaaagagcttcgagacagacaccaacctgaacttccagaacctgagcgtgatcggcttcagaatcctgctgctgaaagtggccggctttaacctgctgatgaccctgcggctgtggtccagctctagtcgcgccaagagaagcggatctggcgtgaagcagaccctgaatttcgacctgctgaagctggctggcgacgtggaatccaacccaggccccactagcatggccttaccagtgaccgccttgctcctgccgctggccttgctgctccacgccgccaggccgcagcctgtgctgacacagtctagtagcgcctctgcctctctgggcagcagcgtgaagctgacctgtacactgtctagcggccacagcagctacatcattgcctggcatcagcagcagcctggcaaggcccctagatacctgatgaaggtggaaggcagcggcagctacaacaaaggctctggcatccccgagagattcagcggcagttctagcggagccgaccgctacctgaccatcagcaatctccagagcgaggacgaggccgactactactgcgagacatgggacagcaacacccacgtgttcggcaccggcaccaaagtgacagttcttggcggaggcggaagtggaggcggaggatctggcggcggaggctctgaagttcagctggttcagagcggcgctgaagtgaagaaacctggggcctctgtgaaggtgtcctgcaaggcttccggctacacctttaccagctactacatgcactgggtccgacaggcccctggacaaggacttgagtggatgggcatcatcaaccccagcggcggcagaacaagctacgcccagaaattccagggcagagtgaccatgaccagagacacctctaccggcaccgtgtacatggaactgagcagcctgagaagcgaggacaccgccgtgtactactgtgccagaagccactgttctggcggcagctgctacagcatcgactattggggccagggcaccctggtcacagtctcttctacgcgtgggaaaccaattcccaaccctcttctgggactggattcaaccggcagcggcgaggacctgaagaacgtgttcccacctgaggtggccgtgttcgagcctagcgaggccgagatcagccacacccagaaagccaccctcgtgtgcctggctaccggcttctaccccgaccatgtggaactgtcttggtgggtcaacggcaaagaggtgcacagcggcgtgtgtaccgacccccagccactgaaagaacagcccgccctgaacgacagccggtactgcctgagcagcagactgagagtgtccgccaccttctggcagaacccccggaaccacttcagatgccaggtgcagttctacggcctgagcgagaacgacgagtggacccaggacagagccaagcccgtgacccagatcgtgtctgccgaagcctggggcagagccgattgcggctttaccagcgagagctaccagcagggcgtgctgagcgccaccatcctgtacgagatcctgctgggcaaggccaccctgtacgccgtgctggtgtctgccctggtgctgatggctatggtcaagcggaaggacagccggggaagggccaagcgatctggatctggagcaacaaacttctcactactcaaacaagcaggtgacgtggaggagaatcccgggccttctagaggccatatgaccgagtacaagcccacggtgcgcctcgccacccgcgacgacgtccccagggccgtacgcaccctcgccgccgcgttcgccgactaccccgccacgcgccacaccgtcgatccggaccgccacatcgagcgggtcaccgagctgcaagaactcttcctcacgcgcgtcgggctcgacatcggcaaggtgtgggtcgcggacgacggcgccgcggtggcggtctggaccacgccggagagcgtcgaagcgggggcggtgttcgccgagatcggcccgcgcatggccgagttgagcggttcccggctggccgcgcagcaacagatggaaggcctcctggcgccgcaccggcccaaggagcccgcgtggttcctggccaccgtcggcgtctcgcccgaccaccagggcaagggtctgggcagcgccgtcgtgctccccggagtggaggcggccgagcgcgccggggtgcccgccttcctggagacctccgcgccccgcaacctccccttctacgagcggctcggcttcaccgtcaccgccgacgtcgaggtgcccgaaggaccgcgcacctggtgcatgacccgcaagcccggtgcctga

SEQ ID NO: 3600 - DNA, 2580 bp, synthetic construct
  source 1..2580: mol_type = other DNA
atggccttaccagtgaccgccttgctcctgccgctggccttgctgctccacgccgccaggccgcagcctgtgctgacacagtctagtagcgcctctgcctctctgggcagcagcgtgaagctgacctgtacactgtctagcggccacagcagctacatcattgcctggcatcagcagcagcctggcaaggcccctagatacctgatgaaggtggaaggcagcggcagctacaacaaaggctctggcatccccgagagattcagcggcagttctagcggagccgaccgctacctgaccatcagcaatctccagagcgaggacgaggccgactactactgcgagacatgggacagcaacacccacgtgttcggcaccggcaccaaagtgacagttcttctcgaggacctgaagaacgtgttcccacctgaggtggccgtgttcgagcctagcgaggccgagatcagccacacccagaaagccaccctcgtgtgcctggctaccggcttctaccccgaccatgtggaactgtcttggtgggtcaacggcaaagaggtgcacagcggcgtgtctaccgacccccagccactgaaagaacagcccgccctgaacgacagccggtactgcctgagcagcagactgagagtgtccgccaccttctggcagaacccccggaaccacttcagatgccaggtgcagttctacggcctgagcgagaacgacgagtggacccaggacagagccaagcccgtgacccagatcgtgtctgccgaagcctggggcagagccgattgcggctttaccagcgagagctaccagcagggcgtgctgagcgccaccatcctgtacgagatcctgctgggcaaggccaccctgtacgccgtgctggtgtctgccctggtgctgatggctatggtcaagcggaaggacagccggggaagggccaagcgatctggatctggagcaacaaacttctcactactcaaacaagcaggtgacgtggaggagaatcccgggcctactagtatggactggatttggcgcatccttttccttgtcggcgctgctaccggcgcgcattccttcgaagaagttcagctggttcagagcggcgctgaagtgaagaaacctggggcctctgtgaaggtgtcctgcaaggcttccggctacacctttaccagctactacatgcactgggtccgacaggcccctggacaaggacttgagtggatgggcatcatcaaccccagcggcggcagaacaagctacgcccagaaattccagggcagagtgaccatgaccagagacacctctaccggcaccgtgtacatggaactgagcagcctgagaagcgaggacaccgccgtgtactactgtgccagaagccactgttctggcggcagctgctacagcatcgactattggggccagggcaccctggtcacagtctcttctacgcgtatccagaaccctgatcctgccgtgtaccagctgcgggatagcaagagcagcgacaagagcgtgtgtctgttcaccgacttcgacagccagaccaacgtgtcccagagcaaggactccgacgtgtacatcaccgataagaccgtgctggacatgcggagcatggacttcaagagcaactccgccgtggcctggtccaacaagtccgatttcgcctgcgccaacgccttcaacaacagcattatccccgaggacacattcttcccaagccccgagagcagctgcgacgtgaagctggtggaaaagagcttcgagacagacaccaacctgaacttccagaacctgagcgtgatcggcttcagaatcctgctgctgaaagtggccggctttaacctgctgatgaccctgcggctgtggtccagccgcgccaagagaagcggatctggcgtgaagcagaccctgaatttcgacctgctgaagctggctggcgacgtggaatccaacccaggcccttctagaggccatatgaccgagtacaagcccacggtgcgcctcgccacccgcgacgacgtccccagggccgtacgcaccctcgccgccgcgttcgccgactaccccgccacgcgccacaccgtcgatccggaccgccacatcgagcgggtcaccgagctgcaagaactcttcctcacgcgcgtcgggctcgacatcggcaaggtgtgggtcgcggacgacggcgccgcggtggcggtctggaccacgccggagagcgtcgaagcgggggcggtgttcgccgagatcggcccgcgcatggccgagttgagcggttcccggctggccgcgcagcaacagatggaaggcctcctggcgccgcaccggcccaaggagcccgcgtggttcctggccaccgtcggcgtctcgcccgaccaccagggcaagggtctgggcagcgccgtcgtgctccccggagtggaggcggccgagcgcgccggggtgcccgccttcctggagacctccgcgccccgcaacctccccttctacgagcggctcggcttcaccgtcaccgccgacgtcgaggtgcccgaaggaccgcgcacctggtgcatgacccgcaagcccggtgcctga

SEQ ID NO: 3601 - DNA, 2826 bp, synthetic construct
  source 1..2826: mol_type = other DNA
atggccttaccagtgaccgccttgctcctgccgctggccttgctgctccacgccgccaggccgcagcctgtgctgacacagtctagtagcgcctctgcctctctgggcagcagcgtgaagctgacctgtacactgtctagcggccacagcagctacatcattgcctggcatcagcagcagcctggcaaggcccctagatacctgatgaaggtggaaggcagcggcagctacaacaaaggctctggcatccccgagagattcagcggcagttctagcggagccgaccgctacctgaccatcagcaatctccagagcgaggacgaggccgactactactgcgagacatgggacagcaacacccacgtgttcggcaccggcaccaaagtgacagttcttctcgaggacctgaagaacgtgttcccacctgaggtggccgtgttcgagcctagcgaggccgagatcagccacacccagaaagccaccctcgtgtgcctggctaccggcttctaccccgaccatgtggaactgtcttggtgggtcaacggcaaagaggtgcacagcggcgtgtctaccgacccccagccactgaaagaacagcccgccctgaacgacagccggtactgcctgagcagcagactgagagtgtccgccaccttctggcagaacccccggaaccacttcagatgccaggtgcagttctacggcctgagcgagaacgacgagtggacccaggacagagccaagcccgtgacccagatcgtgtctgccgaagcctggggcagagccgattgcggctttaccagcgagagctaccagcagggcgtgctgagcgccaccatcctgtacgagatcctgctgggcaaggccaccctgtacgccgtgctggtgtctgccctggtgctgatggctatggtcaagcggaaggacagccggggaagggccaagcgatctggatctggagcaacaaacttctcactactcaaacaagcaggtgacgtggaggagaatcccgggcctactagtatggactggatttggcgcatccttttccttgtcggcgctgctaccggcgcgcattccttcgaagaagttcagctggttcagagcggcgctgaagtgaagaaacctggggcctctgtgaaggtgtcctgcaaggcttccggctacacctttaccagctactacatgcactgggtccgacaggcccctggacaaggacttgagtggatgggcatcatcaaccccagcggcggcagaacaagctacgcccagaaattccagggcagagtgaccatgaccagagacacctctaccggcaccgtgtacatggaactgagcagcctgagaagcgaggacaccgccgtgtactactgtgccagaagccactgttctggcggcagctgctacagcatcgactattggggccagggcaccctggtcacagtctcttctacgcgtgagcagaaactgatctcggaagaggatgggagcggcaccccattcccttctctggcccctcccatcatgctgctggtggacggcaagcagcagatggtggtcgtgtgcctggtgctggatgtggccccacctggactggacagccccatctggtttagcgccggcaatggctctgccctggacgcctttacctacggcccaagccctgccaccgatggcacctggacaaatctggcccacctgagcctgcccagcgaggaactggcttcttgggagcctctcgtgtgccacacaggacctggcgctgagggacacagcagatccacccagcctatgcacctgtctggcgaggccagcaccgccagaacctgtcctcaggaacctctgagaggcacccctggcggagcactgtggctgggagtgctgagactgctgctgttcaagctgctgctgtttgacctgctgctgacctgctcctgtctgtgcgatcctgccggccctctgccttctcctgccaccaccacaagactgagagccctgggcagccacagactgcaccctgccacagagacaggcggcagagaggccacaagcagccctagaccccagcccagagacagaagatggggcgataccccccctggcagaaagcctggatctccagtccgcgccaagagaagcggatctggcgtgaagcagaccctgaatttcgacctgctgaagctggctggcgacgtggaatccaacccaggcccttctagaggccatatgaccgagtacaagcccacggtgcgcctcgccacccgcgacgacgtccccagggccgtacgcaccctcgccgccgcgttcgccgactaccccgccacgcgccacaccgtcgatccggaccgccacatcgagcgggtcaccgagctgcaagaactcttcctcacgcgcgtcgggctcgacatcggcaaggtgtgggtcgcggacgacggcgccgcggtggcggtctggaccacgccggagagcgtcgaagcgggggcggtgttcgccgagatcggcccgcgcatggccgagttgagcggttcccggctggccgcgcagcaacagatggaaggcctcctggcgccgcaccggcccaaggagcccgcgtggttcctggccaccgtcggcgtctcgcccgaccaccagggcaagggtctgggcagcgccgtcgtgctccccggagtggaggcggccgagcgcgccggggtgcccgccttcctggagacctccgcgccccgcaacctccccttctacgagcggctcggcttcaccgtcaccgccgacgtcgaggtgcccgaaggaccgcgcacctggtgcatgacccgcaagcccggtgcctga

SEQ ID NO: 3602 - DNA, 2880 bp, synthetic construct
  source 1..2880: mol_type = other DNA
atggccttaccagtgaccgccttgctcctgccgctggccttgctgctccacgccgccaggccgctcgaggacctgaagaacgtgttcccacctgaggtggccgtgttcgagcctagcgaggccgagatcagccacacccagaaagccaccctcgtgtgcctggctaccggcttctaccccgaccatgtggaactgtcttggtgggtcaacggcaaagaggtgcacagcggcgtgtctaccgacccccagccactgaaagaacagcccgccctgaacgacagccggtactgcctgagcagcagactgagagtgtccgccaccttctggcagaacccccggaaccacttcagatgccaggtgcagttctacggcctgagcgagaacgacgagtggacccaggacagagccaagcccgtgacccagatcgtgtctgccgaagcctggggcagagccgattgcggctttaccagcgagagctaccagcagggcgtgctgagcgccaccatcctgtacgagatcctgctgggcaaggccaccctgtacgccgtgctggtgtctgccctggtgctgatggctatggtcaagcggaaggacagccggggaagggccaagcgatctggatctggagcaacaaacttctcactactcaaacaagcaggtgacgtggaggagaatcccgggcctactagcatggccttaccagtgaccgccttgctcctgccgctggccttgctgctccacgccgccaggccgcagcctgtgctgacacagtctagtagcgcctctgcctctctgggcagcagcgtgaagctgacctgtacactgtctagcggccacagcagctacatcattgcctggcatcagcagcagcctggcaaggcccctagatacctgatgaaggtggaaggcagcggcagctacaacaaaggctctggcatccccgagagattcagcggcagttctagcggagccgaccgctacctgaccatcagcaatctccagagcgaggacgaggccgactactactgcgagacatgggacagcaacacccacgtgttcggcaccggcaccaaagtgacagttcttggcggaggcggaagtggaggcggaggatctggcggcggaggctctgaagttcagctggttcagagcggcgctgaagtgaagaaacctggggcctctgtgaaggtgtcctgcaaggcttccggctacacctttaccagctactacatgcactgggtccgacaggcccctggacaaggacttgagtggatgggcatcatcaaccccagcggcggcagaacaagctacgcccagaaattccagggcagagtgaccatgaccagagacacctctaccggcaccgtgtacatggaactgagcagcctgagaagcgaggacaccgccgtgtactactgtgccagaagccactgttctggcggcagctgctacagcatcgactattggggccagggcaccctggtcacagtctcttctacgcgtgagcagaaactgatctcggaagaggatctggggagcggcaccccattcccttctctggcccctcccatcatgctgctggtggacggcaagcagcagatggtggtcgtgtgcctggtgctggatgtggccccacctggactggacagccccatctggtttagcgccggcaatggctctgccctggacgcctttacctacggcccaagccctgccaccgatggcacctggacaaatctggcccacctgagcctgcccagcgaggaactggcttcttgggagcctctcgtgtgccacacaggacctggcgctgagggacacagcagatccacccagcctatgcacctgtctggcgaggccagcaccgccagaacctgtcctcaggaacctctgagaggcacccctggcggagcactgtggctgggagtgctgagactgctgctgttcaagctgctgctgtttgacctgctgctgacctgctcctgtctgtgcgatcctgccggccctctgccttctcctgccaccaccacaagactgagagccctgggcagccacagactgcaccctgccacagagacaggcggcagagaggccacaagcagccctagaccccagcccagagacagaagatggggcgataccccccctggcagaaagcctggatctccagtccgcgccaagagaagcggatctggcgtgaagcagaccctgaatttcgacctgctgaagctggctggcgacgtggaatccaacccaggcccttctagatctagaggccatatgaccgagtacaagcccacggtgcgcctcgccacccgcgacgacgtccccagggccgtacgcaccctcgccgccgcgttcgccgactaccccgccacgcgccacaccgtcgatccggaccgccacatcgagcgggtcaccgagctgcaagaactcttcctcacgcgcgtcgggctcgacatcggcaaggtgtgggtcgcggacgacggcgccgcggtggcggtctggaccacgccggagagcgtcgaagcgggggcggtgttcgccgagatcggcccgcgcatggccgagttgagcggttcccggctggccgcgcagcaacagatggaaggcctcctggcgccgcaccggcccaaggagcccgcgtggttcctggccaccgtcggcgtctcgcccgaccaccagggcaagggtctgggcagcgccgtcgtgctccccggagtggaggcggccgagcgcgccggggtgcccgccttcctggagacctccgcgccccgcaacctccccttctacgagcggctcggcttcaccgtcaccgccgacgtcgaggtgcccgaaggaccgcgcacctggtgcatgacccgcaagcccggtgcctga

SEQ ID NO: 3603 - DNA, 2691 bp, synthetic construct
  source 1..2691: mol_type = other DNA
atggccttaccagtgaccgccttgctcctgccgctggccttgctgctccacgccgccaggccgcagcctgtgctgacacagtctagtagcgcctctgcctctctgggcagcagcgtgaagctgacctgtacactgtctagcggccacagcagctacatcattgcctggcatcagcagcagcctggcaaggcccctagatacctgatgaaggtggaaggcagcggcagctacaacaaaggctctggcatccccgagagattcagcggcagttctagcggagccgaccgctacctgaccatcagcaatctccagagcgaggacgaggccgactactactgcgagacatgggacagcaacacccacgtgttcggcaccggcaccaaagtgacagttcttctcgaggggaaaccaattcccaaccctcttctgggactggattcaaccggcagcggcgacaagcagctggacgccgacgtgtcccccaagcctaccatcttcctgccctctatcgccgagacaaagctccagaaggccggcacctacctgtgcctgctggaaaagttcttcccagatgtgattaagatccactggcaggaaaagaagtccaacaccatcctgggcagccaggaaggcaacaccatgaagaccaacgacacctacatgaagttcagctggctgaccgtgcccgagaagtccctggacaaagaacacagatgcatcgtgcggcacgaaaacaacaagaacggcgtggaccaggaaatcatcttcccacccatcaagaccgatgtgattacaatggaccccaaggacaactgctccaaggacgccaacgataccctgctgctccagctgaccaacaccagcgcctactacatgtacttgttgctgctgctgaagtccgtggtgtacttcgccatcatcacatgctgcctgctgcggagaaccgccttctgctgcaacggcgagaagtctagggccaagcgatctggatctggagcaacaaacttctcactactcaaacaagcaggtgacgtggaggagaatcccgggcctactagtatggactggatttggcgcatccttttccttgtcggcgctgctaccggcgcgcattccttcgaagaagttcagctggttcagagcggcgctgaagtgaagaaacctggggcctctgtgaaggtgtcctgcaaggcttccggctacacctttaccagctactacatgcactgggtccgacaggcccctggacaaggacttgagtggatgggcatcatcaaccccagcggcggcagaacaagctacgcccagaaattccagggcagagtgaccatgaccagagacacctctaccggcaccgtgtacatggaactgagcagcctgagaagcgaggacaccgccgtgtactactgtgccagaagccactgttctggcggcagctgctacagcatcgactattggggccagggcaccctggtcacagtctcttctacgcgtgagcagaaactgatctcggaagaggatgggagcggcagccagcctcacaccaagcccagcgtgttcgtgatgaagaacggcaccaacgtggcctgcctcgtgaaagagttctaccccaaggacatcaggatcaacctggtgtccagcaagaagatcaccgagttcgaccccgccatcgtgatctcccccagcggcaagtacaacgccgtgaagctggggaagtacgaggacagcaacagcgtgacctgctccgtgcagcacgacaacaagaccgtgcacagcaccgactttgaagtgaaaaccgactccaccgaccacgtgaagcccaaagagacagagaacaccaagcagcccagcaagagctgccacaagcccaaggccatcgtgcacaccgagaaagtgaacatgatgagcctgaccgtgctgggcctgcggatgctgttcgccaaaaccgtggccgtgaacttcctgctgaccgccaagctgttcttcctccgcgccaagagaagcggatctggcgtgaagcagaccctgaatttcgacctgctgaagctggctggcgacgtggaatccaacccaggcccttctagaggccatatgaccgagtacaagcccacggtgcgcctcgccacccgcgacgacgtccccagggccgtacgcaccctcgccgccgcgttcgccgactaccccgccacgcgccacaccgtcgatccggaccgccacatcgagcgggtcaccgagctgcaagaactcttcctcacgcgcgtcgggctcgacatcggcaaggtgtgggtcgcggacgacggcgccgcggtggcggtctggaccacgccggagagcgtcgaagcgggggcggtgttcgccgagatcggcccgcgcatggccgagttgagcggttcccggctggccgcgcagcaacagatggaaggcctcctggcgccgcaccggcccaaggagcccgcgtggttcctggccaccgtcggcgtctcgcccgaccaccagggcaagggtctgggcagcgccgtcgtgctccccggagtggaggcggccgagcgcgccggggtgcccgccttcctggagacctccgcgccccgcaacctccccttctacgagcggctcggcttcaccgtcaccgccgacgtcgaggtgcccgaaggaccgcgcacctggtgcatgacccgcaagcccggtgcctga

SEQ ID NO: 3604 - DNA, 1902 bp, synthetic construct
  source 1..1902: mol_type = other DNA
atggccttaccagtgaccgccttgctcctgccgctggccttgctgctccacgccgccaggccgcagcctgtgctgacacagtctagtagcgcctctgcctctctgggcagcagcgtgaagctgacctgtacactgtctagcggccacagcagctacatcattgcctggcatcagcagcagcctggcaaggcccctagatacctgatgaaggtggaaggcagcggcagctacaacaaaggctctggcatccccgagagattcagcggcagttctagcggagccgaccgctacctgaccatcagcaatctccagagcgaggacgaggccgactactactgcgagacatgggacagcaacacccacgtgttcggcaccggcaccaaagtgacagttcttctcgagagccagcctcacaccaagcccagcgtgttcgtgatgaagaacggcaccaacgtggcctgcctcgtgaaagagttctaccccaaggacatcaggatcaacctggtgtccagcaagaagatcaccgagttcgaccccgccatcgtgatctcccccagcggcaagtacaacgccgtgaagctggggaagtacgaggacagcaacagcgtgacctgctccgtgcagcacgacaacaagaccgtgcacagcaccgactttgaagtgaaaaccgactccaccgaccacgtgaagcccaaagagacagagaacaccaagcagcccagcaagagctgccacaagcccaaggccatcgtgcacaccgagaaagtgaacatgatgagcctgaccgtgctgggcctgcggatgctgttcgccaaaaccgtggccgtgaacttcctgctgaccgccaagctgttcttcctcagggccaagcgatctggatctggagcaacaaacttctcactactcaaacaagcaggtgacgtggaggagaatcccgggcctactagtatggactggatttggcgcatccttttccttgtcggcgctgctaccggcgcgcattccttcgaagaagttcagctggttcagagcggcgctgaagtgaagaaacctggggcctctgtgaaggtgtcctgcaaggcttccggctacacctttaccagctactacatgcactgggtccgacaggcccctggacaaggacttgagtggatgggcatcatcaaccccagcggcggcagaacaagctacgcccagaaattccagggcagagtgaccatgaccagagacacctctaccggcaccgtgtacatggaactgagcagcctgagaagcgaggacaccgccgtgtactactgtgccagaagccactgttctggcggcagctgctacagcatcgactattggggccagggcaccctggtcacagtctcttctacgcgtgacaagcagctggacgccgacgtgtcccccaagcctaccatcttcctgccctctatcgccgagacaaagctccagaaggccggcacctacctgtgcctgctggaaaagttcttcccagatgtgattaagatccactggcaggaaaagaagtccaacaccatcctgggcagccaggaaggcaacaccatgaagaccaacgacacctacatgaagttcagctggctgaccgtgcccgagaagtccctggacaaagaacacagatgcatcgtgcggcacgaaaacaacaagaacggcgtggaccaggaaatcatcttcccacccatcaagaccgatgtgattacaatggaccccaaggacaactgctccaaggacgccaacgataccctgctgctccagctgaccaacaccagcgcctactacatgtacttgttgctgctgctgaagtccgtggtgtacttcgccatcatcacatgctgcctgctgcggagaaccgccttctgctgcaacggcgagaagtct

SEQ ID NO: 3605 - DNA, 2736 bp, synthetic construct
  source 1..2736: mol_type = other DNA
atggccttaccagtgaccgccttgctcctgccgctggccttgctgctccacgccgccaggccgctcgaggggaaaccaattcccaaccctcttctgggactggattcaaccggcagcggcgacaagcagctggacgccgacgtgtcccccaagcctaccatcttcctgccctctatcgccgagacaaagctccagaaggccggcacctacctgtgcctgctggaaaagttcttcccagatgtgattaagatccactggcaggaaaagaagtccaacaccatcctgggcagccaggaaggcaacaccatgaagaccaacgacacctacatgaagttcagctggctgaccgtgcccgagaagtccctggacaaagaacacagatgcatcgtgcggcacgaaaacaacaagaacggcgtggaccaggaaatcatcttcccacccatcaagaccgatgtgattacaatggaccccaaggacaactgctccaaggacgccaacgataccctgctgctccagctgaccaacaccagcgcctactacatgtacttgttgctgctgctgaagtccgtggtgtacttcgccatcatcacatgctgcctgctgcggagaaccgccttctgctgcaacggcgagaagtctagggccaagcgatctggatctggagcaacaaacttctcactactcaaacaagcaggtgacgtggaggagaatcccgggcctactagcatggccttaccagtgaccgccttgctcctgccgctggccttgctgctccacgccgccaggccgcagcctgtgctgacacagtctagtagcgcctctgcctctctgggcagcagcgtgaagctgacctgtacactgtctagcggccacagcagctacatcattgcctggcatcagcagcagcctggcaaggcccctagatacctgatgaaggtggaaggcagcggcagctacaacaaaggctctggcatccccgagagattcagcggcagttctagcggagccgaccgctacctgaccatcagcaatctccagagcgaggacgaggccgactactactgcgagacatgggacagcaacacccacgtgttcggcaccggcaccaaagtgacagttcttggcggaggcggaagtggaggcggaggatctggcggcggaggctctgaagttcagctggttcagagcggcgctgaagtgaagaaacctggggcctctgtgaaggtgtcctgcaaggcttccggctacacctttaccagctactacatgcactgggtccgacaggcccctggacaaggacttgagtggatgggcatcatcaaccccagcggcggcagaacaagctacgcccagaaattccagggcagagtgaccatgaccagagacacctctaccggcaccgtgtacatggaactgagcagcctgagaagcgaggacaccgccgtgtactactgtgccagaagccactgttctggcggcagctgctacagcatcgactattggggccagggcaccctggtcacagtctcttctacgcgtgagcagaaactgatctcggaagaggatgggagcggcagccagcctcacaccaagcccagcgtgttcgtgatgaagaacggcaccaacgtggcctgcctcgtgaaagagttctaccccaaggacatcaggatcaacctggtgtccagcaagaagatcaccgagttcgaccccgccatcgtgatctcccccagcggcaagtacaacgccgtgaagctggggaagtacgaggacagcaacagcgtgacctgctccgtgcagcacgacaacaagaccgtgcacagcaccgactttgaagtgaaaaccgactccaccgaccacgtgaagcccaaagagacagagaacaccaagcagcccagcaagagctgccacaagcccaaggccatcgtgcacaccgagaaagtgaacatgatgagcctgaccgtgctgggcctgcggatgctgttcgccaaaaccgtggccgtgaacttcctgctgaccgccaagctgttcttcctccgcgccaagagaagcggatctggcgtgaagcagaccctgaatttcgacctgctgaagctggctggcgacgtggaatccaacccaggcccttctagaggccatatgaccgagtacaagcccacggtgcgcctcgccacccgcgacgacgtccccagggccgtacgcaccctcgccgccgcgttcgccgactaccccgccacgcgccacaccgtcgatccggaccgccacatcgagcgggtcaccgagctgcaagaactcttcctcacgcgcgtcgggctcgacatcggcaaggtgtgggtcgcggacgacggcgccgcggtggcggtctggaccacgccggagagcgtcgaagcgggggcggtgttcgccgagatcggcccgcgcatggccgagttgagcggttcccggctggccgcgcagcaacagatggaaggcctcctggcgccgcaccggcccaaggagcccgcgtggttcctggccaccgtcggcgtctcgcccgaccaccagggcaagggtctgggcagcgccgtcgtgctccccggagtggaggcggccgagcgcgccggggtgcccgccttcctggagacctccgcgccccgcaacctccccttctacgagcggctcggcttcaccgtcaccgccgacgtcgaggtgcccgaaggaccgcgcacctggtgcatgacccgcaagcccggtgcctga

SEQ ID NO: 3606 - DNA, 3111 bp, synthetic construct
  source 1..3111: mol_type = other DNA
atggccttaccagtgaccgccttgctcctgccgctggccttgctgctccacgccgccaggccgcagcctgtgctgacacagtctagtagcgcctctgcctctctgggcagcagcgtgaagctgacctgtacactgtctagcggccacagcagctacatcattgcctggcatcagcagcagcctggcaaggcccctagatacctgatgaaggtggaaggcagcggcagctacaacaaaggctctggcatccccgagagattcagcggcagttctagcggagccgaccgctacctgaccatcagcaatctccagagcgaggacgaggccgactactactgcgagacatgggacagcaacacccacgtgttcggcaccggcaccaaagtgacagttcttggacagcctaaggccaatcctaccgtgacactgttccctccaagcagcgaagaactccaggccaacaaggccacacttgtgtgcctgatctccgacttctaccctggggctgtgacagtggcttggaaggccgatggatctcctgtgaaagccggcgtggaaaccaccaagccatccaagcagagcaacaacaaatacgccgccagctcctacctgagcctgacacctgagcagtggaagtcccacagatcctacagctgccaagtgacccacgaaggcagcaccgtggaaaagacagtggcccctacagagtgcagcggatcccagagcttcggcctgctggaccccaagctgtgctacctgctggatggcatcctgttcatctacggcgtgatcctgaccgccctgttcctgagagtgaagttcagcagaagcgccgacgcccctgcctaccagcagggacagaaccaactgtacaacgagctgaacctgggcagacgggaagagtacgacgtgctggacaagcggagaggcagggaccctgagatgggcggaaagccccagcggagaaagaacccccaggaaggactgtataacgaactccagaaagacaagatggccgaagcctacagcgagatcggcatgaagggcgagcggagaagaggcaagggccacgatggcctgtaccagggcctgagcaccgccaccaaggacacctatgacgccctgcacatgcaggccctgcctccaagaagggccaagcgatctggatctggagcaacaaacttctcactactcaaacaagcaggtgacgtggaggagaatcccgggcctactagtatggactggatttggcgcatccttttccttgtcggcgctgctaccggcgcgcattccttcgaagaagttcagctggttcagagcggcgctgaagtgaagaaacctggggcctctgtgaaggtgtcctgcaaggcttccggctacacctttaccagctactacatgcactgggtccgacaggcccctggacaaggacttgagtggatgggcatcatcaaccccagcggcggcagaacaagctacgcccagaaattccagggcagagtgaccatgaccagagacacctctaccggcaccgtgtacatggaactgagcagcctgagaagcgaggacaccgccgtgtactactgtgccagaagccactgttctggcggcagctgctacagcatcgactattggggccagggcaccctggtcacagtctcttctgcctctacaaagggaccctccgtgtttcctctggctcccagcagcaagtctacaagcggaggaacagccgctctgggctgcctggtcaaggattactttcccgagcctgtgaccgtgtcctggaatagcggagcactgacaagcggcgtgcacacctttccagccgtgctgcaaagcagcggcctgtactctctgagcagcgtggtcacagtgcctagctctagcctgggcacccagacctacatctgcaatgtgaaccacaagcctagcaacaccaaggtggacaagagagtggaacccaagagctgtggtacccagagttttgggttgttggaccctaaattgtgctatctgttggacggaatcctgttcatttacggagtgatcctgaccgcattgttcctgcgggttaagttttccagatccgcagacgcacccgcttaccaacaagggcagaaccaactctacaatgaacttaatttggggcggagggaagagtacgacgttctggacaaaaggaggggacgagatcccgagatgggcggaaagcctcagcgaaggaagaatccgcaagaggggctttataacgaactccagaaagataaaatggcagaagcctatagtgagattgggatgaagggagaaaggaggaggggtaaaggtcacgatgggttgtaccaaggattgagcacagccactaaagatacctatgatgcgctccacatgcaggccctgccgccaagacgcgccaagagaagcggatctggcgtgaagcagaccctgaatttcgacctgctgaagctggctggcgacgtggaatccaacccaggcccttctagaggccatatgaccgagtacaagcccacggtgcgcctcgccacccgcgacgacgtccccagggccgtacgcaccctcgccgccgcgttcgccgactaccccgccacgcgccacaccgtcgatccggaccgccacatcgagcgggtcaccgagctgcaagaactcttcctcacgcgcgtcgggctcgacatcggcaaggtgtgggtcgcggacgacggcgccgcggtggcggtctggaccacgccggagagcgtcgaagcgggggcggtgttcgccgagatcggcccgcgcatggccgagttgagcggttcccggctggccgcgcagcaacagatggaaggcctcctggcgccgcaccggcccaaggagcccgcgtggttcctggccaccgtcggcgtctcgcccgaccaccagggcaagggtctgggcagcgccgtcgtgctccccggagtggaggcggccgagcgcgccggggtgcccgccttcctggagacctccgcgccccgcaacctccccttctacgagcggctcggcttcaccgtcaccgccgacgtcgaggtgcccgaaggaccgcgcacctggtgcatgacccgcaagcccggtgcctga

SEQ ID NO: 3607 - DNA, 2466 bp, synthetic construct
  source 1..2466: mol_type = other DNA
atggccttaccagtgaccgccttgctcctgccgctggccttgctgctccacgccgccaggccgcagcctgtgctgacacagtctagtagcgcctctgcctctctgggcagcagcgtgaagctgacctgtacactgtctagcggccacagcagctacatcattgcctggcatcagcagcagcctggcaaggcccctagatacctgatgaaggtggaaggcagcggcagctacaacaaaggctctggcatccccgagagattcagcggcagttctagcggagccgaccgctacctgaccatcagcaatctccagagcgaggacgaggccgactactactgcgagacatgggacagcaacacccacgtgttcggcaccggcaccaaagtgacagttcttctcgaggacctgaagaacgtgttcccacctgaggtggccgtgttcgagcctagcgaggccgagatcagccacacccagaaagccaccctcgtgtgcctggctaccggcttctaccccgaccatgtggaactgtcttggtgggtcaacggcaaagaggtgcacagcggcgtgtctaccgacccccagccactgaaagaacagcccgccctgaacgacagccggtactgcctgagcagcagactgagagtgtccgccaccttctggcagaacccccggaaccacttcagatgccaggtgcagttctacggcctgagcgagaacgacgagtggacccaggacagagccaagcccgtgacccagatcgtgtctgccgaagcctggggcagagccgattgcggatcccagagcttcggcctgctggaccccaagctgtgctacctgctggatggcatcctgttcatctacggcgtgatcctgaccgccctgttcctgagagtgaagttcagcagaagcgccgacgcccctgcctaccagcagggacagaaccaactgtacaacgagctgaacctgggcagacgggaagagtacgacgtgctggacaagcggagaggcagggaccctgagatgggcggaaagccccagcggagaaagaacccccaggaaggactgtataacgaactccagaaagacaagatggccgaagcctacagcgagatcggcatgaagggcgagcggagaagaggcaagggccacgatggcctgtaccagggcctgagcaccgccaccaaggacacctatgacgccctgcacatgcaggccctgcctccaagaagggccaagcgatctggatctggagcaacaaacttctcactactcaaacaagcaggtgacgtggaggagaatcccgggcctactagtatggactggatttggcgcatccttttccttgtcggcgctgctaccggcgcgcattccttcgaagaagttcagctggttcagagcggcgctgaagtgaagaaacctggggcctctgtgaaggtgtcctgcaaggcttccggctacacctttaccagctactacatgcactgggtccgacaggcccctggacaaggacttgagtggatgggcatcatcaaccccagcggcggcagaacaagctacgcccagaaattccagggcagagtgaccatgaccagagacacctctaccggcaccgtgtacatggaactgagcagcctgagaagcgaggacaccgccgtgtactactgtgccagaagccactgttctggcggcagctgctacagcatcgactattggggccagggcaccctggtcacagtctcttctacgcgtatccagaaccctgatcctgccgtgtaccagctgcgggatagcaagagcagcgacaagagcgtgtgtctgttcaccgacttcgacagccagaccaacgtgtcccagagcaaggactccgacgtgtacatcaccgataagaccgtgctggacatgcggagcatggacttcaagagcaactccgccgtggcctggtccaacaagtccgatttcgcctgcgccaacgccttcaacaacagcattatccccgaggacacattcttcccaagccccgagagcagctgcggtacccagagttttgggttgttggaccctaaattgtgctatctgttggacggaatcctgttcatttacggagtgatcctgaccgcattgttcctgcgggttaagttttccagatccgcagacgcacccgcttaccaacaagggcagaaccaactctacaatgaacttaatttggggcggagggaagagtacgacgttctggacaaaaggaggggacgagatcccgagatgggcggaaagcctcagcgaaggaagaatccgcaagaggggctttataacgaactccagaaagataaaatggcagaagcctatagtgagattgggatgaagggagaaaggaggaggggtaaaggtcacgatgggttgtaccaaggattgagcacagccactaaagatacctatgatgcgctccacatgcaggccctgccgccaaga

SEQ ID NO: 3608 - DNA, 2466 bp, synthetic construct
  source 1..2466: mol_type = other DNA
atggccttaccagtgaccgccttgctcctgccgctggccttgctgctccacgccgccaggccgcagcctgtgctgacacagtctagtagcgcctctgcctctctgggcagcagcgtgaagctgacctgtacactgtctagcggccacagcagctacatcattgcctggcatcagcagcagcctggcaaggcccctagatacctgatgaaggtggaaggcagcggcagctacaacaaaggctctggcatccccgagagattcagcggcagttctagcggagccgaccgctacctgaccatcagcaatctccagagcgaggacgaggccgactactactgcgagacatgggacagcaacacccacgtgttcggcaccggcaccaaagtgacagttcttctcgaggacctgaagaacgtgttcccacctgaggtggccgtgttcgagcctagcaaggccgagatcgcccacacccagaaagccaccctcgtgtgcctggctaccggcttctaccccgaccatgtggaactgtcttggtgggtcaacggcaaagaggtgcacagcggcgtgtgtaccgacccccagccactgaaagaacagcccgccctgaacgacagccggtactgcctgagcagcagactgagagtgtccgccaccttctggcagaacccccggaaccacttcagatgccaggtgcagttctacggcctgagcgagaacgacgagtggacccaggacagagccaagcccgtgacccagatcgtgtctgccgaagcctggggcagagccgattgcggatcccagagcttcggcctgctggaccccaagctgtgctacctgctggatggcatcctgttcatctacggcgtgatcctgaccgccctgttcctgagagtgaagttcagcagaagcgccgacgcccctgcctaccagcagggacagaaccaactgtacaacgagctgaacctgggcagacgggaagagtacgacgtgctggacaagcggagaggcagggaccctgagatgggcggaaagccccagcggagaaagaacccccaggaaggactgtataacgaactccagaaagacaagatggccgaagcctacagcgagatcggcatgaagggcgagcggagaagaggcaagggccacgatggcctgtaccagggcctgagcaccgccaccaaggacacctatgacgccctgcacatgcaggccctgcctccaagaagggccaagcgatctggatctggagcaacaaacttctcactactcaaacaagcaggtgacgtggaggagaatcccgggcctactagtatggactggatttggcgcatccttttccttgtcggcgctgctaccggcgcgcattccttcgaagaagttcagctggttcagagcggcgctgaagtgaagaaacctggggcctctgtgaaggtgtcctgcaaggcttccggctacacctttaccagctactacatgcactgggtccgacaggcccctggacaaggacttgagtggatgggcatcatcaaccccagcggcggcagaacaagctacgcccagaaattccagggcagagtgaccatgaccagagacacctctaccggcaccgtgtacatggaactgagcagcctgagaagcgaggacaccgccgtgtactactgtgccagaagccactgttctggcggcagctgctacagcatcgactattggggccagggcaccctggtcacagtctcttctacgcgtatccagaaccctgatcctgccgtgtaccagctgcgggatagcaagagcagcgacaagagcgtgtgtctgttcaccgacttcgacagccagaccaacgtgtcccagagcaaggactccgacgtgtacatcaccgataagtgcgtgctggacatgcggagcatggacttcaagagcaactccgccgtggcctggtccaacaagtccgatttcgcctgcgccaacgccttcaacaacagcattatccccgaggacacattcttcccaagcagcgacgtgccctgcggtacccagagttttgggttgttggaccctaaattgtgctatctgttggacggaatcctgttcatttacggagtgatcctgaccgcattgttcctgcgggttaagttttccagatccgcagacgcacccgcttaccaacaagggcagaaccaactctacaatgaacttaatttggggcggagggaagagtacgacgttctggacaaaaggaggggacgagatcccgagatgggcggaaagcctcagcgaaggaagaatccgcaagaggggctttataacgaactccagaaagataaaatggcagaagcctatagtgagattgggatgaagggagaaaggaggaggggtaaaggtcacgatgggttgtaccaaggattgagcacagccactaaagatacctatgatgcgctccacatgcaggccctgccgccaaga

SEQ ID NO: 3609 - DNA, 2679 bp, synthetic construct
  source 1..2679: mol_type = other DNA
atggccttaccagtgaccgccttgctcctgccgctggccttgctgctccacgccgccaggccgcagcctgtgctgacacagtctagtagcgcctctgcctctctgggcagcagcgtgaagctgacctgtacactgtctagcggccacagcagctacatcattgcctggcatcagcagcagcctggcaaggcccctagatacctgatgaaggtggaaggcagcggcagctacaacaaaggctctggcatccccgagagattcagcggcagttctagcggagccgaccgctacctgaccatcagcaatctccagagcgaggacgaggccgactactactgcgagacatgggacagcaacacccacgtgttcggcaccggcaccaaagtgacagttcttctcgaggggaaaccaattcccaaccctcttctgggactggattcaaccggcagcggcgaggacctgaagaacgtgttcccacctgaggtggccgtgttcgagcctagcgaggccgagatcagccacacccagaaagccaccctcgtgtgcctggctaccggcttctaccccgaccatgtggaactgtcttggtgggtcaacggcaaagaggtgcacagcggcgtgtctaccgacccccagccactgaaagaacagcccgccctgaacgacagccggtactgcctgagcagcagactgagagtgtccgccaccttctggcagaacccccggaaccacttcagatgccaggtgcagttctacggcctgagcgagaacgacgagtggacccaggacagagccaagcccgtgacccagatcgtgtctgccgaagcctggggcagagccgattgcggatcccagagcttcggcctgctggaccccaagctgtgctacctgctggatggcatcctgttcatctacggcgtgatcctgaccgccctgttcctgagagtgaagttcagcagaagcgccgacgcccctgcctaccagcagggacagaaccaactgtacaacgagctgaacctgggcagacgggaagagtacgacgtgctggacaagcggagaggcagggaccctgagatgggcggaaagccccagcggagaaagaacccccaggaaggactgtataacgaactccagaaagacaagatggccgaagcctacagcgagatcggcatgaagggcgagcggagaagaggcaagggccacgatggcctgtaccagggcctgagcaccgccaccaaggacacctatgacgccctgcacatgcaggccctgcctccaagaagggccaagcgatctggatctggagcaacaaacttctcactactcaaacaagcaggtgacgtggaggagaatcccgggcctactagtatggactggatttggcgcatccttttccttgtcggcgctgctaccggcgcgcattccttcgaagaagttcagctggttcagagcggcgctgaagtgaagaaacctggggcctctgtgaaggtgtcctgcaaggcttccggctacacctttaccagctactacatgcactgggtccgacaggcccctggacaaggacttgagtggatgggcatcatcaaccccagcggcggcagaacaagctacgcccagaaattccagggcagagtgaccatgaccagagacacctctaccggcaccgtgtacatggaactgagcagcctgagaagcgaggacaccgccgtgtactactgtgccagaagccactgttctggcggcagctgctacagcatcgactattggggccagggcaccctggtcacagtctcttctacgcgtgagcagaaactgatctcggaagaggatgggagcggcatccagaaccctgatcctgccgtgtaccagctgcgggatagcaagagcagcgacaagagcgtgtgtctgttcaccgacttcgacagccagaccaacgtgtcccagagcaaggactccgacgtgtacatcaccgataagaccgtgctggacatgcggagcatggacttcaagagcaactccgccgtggcctggtccaacaagtccgatttcgcctgcgccaacgccttcaacaacagcattatccccgaggacacattcttcccaagccccgagagcagctgcggtacccagagttttgggttgttggaccctaaattgtgctatctgttggacggaatcctgttcatttacggagtgatcctgaccgcattgttcctgaggagcaagcggtcacggctgctccacagcgattacatgaatatgacaccacgaagaccgggtcctactcgcaaacactaccaaccctacgcacctccccgcgactttgcagcgtaccgatctcgggttaagttttccagatccgcagacgcacccgcttaccaacaagggcagaaccaactctacaatgaacttaatttggggcggagggaagagtacgacgttctggacaaaaggaggggacgagatcccgagatgggcggaaagcctcagcgaaggaagaatccgcaagaggggctttataacgaactccagaaagataaaatggcagaagcctatagtgagattgggatgaagggagaaaggaggaggggtaaaggtcacgatgggttgtaccaaggattgagcacagccactaaagatacctatgatgcgctccacatgcaggccctgccgccaaga

SEQ ID NO: 3610 - DNA, 2802 bp, synthetic construct
  source 1..2802: mol_type = other DNA
atggccttaccagtgaccgccttgctcctgccgctggccttgctgctccacgccgccaggccgcagcctgtgctgacacagtctagtagcgcctctgcctctctgggcagcagcgtgaagctgacctgtacactgtctagcggccacagcagctacatcattgcctggcatcagcagcagcctggcaaggcccctagatacctgatgaaggtggaaggcagcggcagctacaacaaaggctctggcatccccgagagattcagcggcagttctagcggagccgaccgctacctgaccatcagcaatctccagagcgaggacgaggccgactactactgcgagacatgggacagcaacacccacgtgttcggcaccggcaccaaagtgacagttcttctcgaggggaaaccaattcccaaccctcttctgggactggattcaaccggcagcggcgaggacctgaagaacgtgttcccacctgaggtggccgtgttcgagcctagcgaggccgagatcagccacacccagaaagccaccctcgtgtgcctggctaccggcttctaccccgaccatgtggaactgtcttggtgggtcaacggcaaagaggtgcacagcggcgtgtctaccgacccccagccactgaaagaacagcccgccctgaacgacagccggtactgcctgagcagcagactgagagtgtccgccaccttctggcagaacccccggaaccacttcagatgccaggtgcagttctacggcctgagcgagaacgacgagtggacccaggacagagccaagcccgtgacccagatcgtgtctgccgaagcctggggcagagccgattgcggatcccagagcttcggcctgctggaccccaagctgtgctacctgctggatggcatcctgttcatctacggcgtgatcctgaccgccctgttcctgaggagtaagaggagcaggctcctgcacagtgactacatgaacatgactccacgccgccccggacccacccgcaagcattaccagccctatgccccaccacgcgacttcgcagcctatcgctccagagtgaagttcagcagaagcgccgacgcccctgcctaccagcagggacagaaccaactgtacaacgagctgaacctgggcagacgggaagagtacgacgtgctggacaagcggagaggcagggaccctgagatgggcggaaagccccagcggagaaagaacccccaggaaggactgtataacgaactccagaaagacaagatggccgaagcctacagcgagatcggcatgaagggcgagcggagaagaggcaagggccacgatggcctgtaccagggcctgagcaccgccaccaaggacacctatgacgccctgcacatgcaggccctgcctccaagaagggccaagcgatctggatctggagcaacaaacttctcactactcaaacaagcaggtgacgtggaggagaatcccgggcctactagtatggactggatttggcgcatccttttccttgtcggcgctgctaccggcgcgcattccttcgaagaagttcagctggttcagagcggcgctgaagtgaagaaacctggggcctctgtgaaggtgtcctgcaaggcttccggctacacctttaccagctactacatgcactgggtccgacaggcccctggacaaggacttgagtggatgggcatcatcaaccccagcggcggcagaacaagctacgcccagaaattccagggcagagtgaccatgaccagagacacctctaccggcaccgtgtacatggaactgagcagcctgagaagcgaggacaccgccgtgtactactgtgccagaagccactgttctggcggcagctgctacagcatcgactattggggccagggcaccctggtcacagtctcttctacgcgtgagcagaaactgatctcggaagaggatgggagcggcatccagaaccctgatcctgccgtgtaccagctgcgggatagcaagagcagcgacaagagcgtgtgtctgttcaccgacttcgacagccagaccaacgtgtcccagagcaaggactccgacgtgtacatcaccgataagaccgtgctggacatgcggagcatggacttcaagagcaactccgccgtggcctggtccaacaagtccgatttcgcctgcgccaacgccttcaacaacagcattatccccgaggacacattcttcccaagccccgagagcagctgcggtacccagagttttgggttgttggaccctaaattgtgctatctgttggacggaatcctgttcatttacggagtgatcctgaccgcattgttcctgaggagcaagcggtcacggctgctccacagcgattacatgaatatgacaccacgaagaccgggtcctactcgcaaacactaccaaccctacgcacctccccgcgactttgcagcgtaccgatctcgggttaagttttccagatccgcagacgcacccgcttaccaacaagggcagaaccaactctacaatgaacttaatttggggcggagggaagagtacgacgttctggacaaaaggaggggacgagatcccgagatgggcggaaagcctcagcgaaggaagaatccgcaagaggggctttataacgaactccagaaagataaaatggcagaagcctatagtgagattgggatgaagggagaaaggaggaggggtaaaggtcacgatgggttgtaccaaggattgagcacagccactaaagatacctatgatgcgctccacatgcaggccctgccgccaaga

SEQ ID NO: 3611 - DNA, 2685 bp, synthetic construct
  source 1..2685: mol_type = other DNA
atggccttaccagtgaccgccttgctcctgccgctggccttgctgctccacgccgccaggccgcagcctgtgctgacacagtctagtagcgcctctgcctctctgggcagcagcgtgaagctgacctgtacactgtctagcggccacagcagctacatcattgcctggcatcagcagcagcctggcaaggcccctagatacctgatgaaggtggaaggcagcggcagctacaacaaaggctctggcatccccgagagattcagcggcagttctagcggagccgaccgctacctgaccatcagcaatctccagagcgaggacgaggccgactactactgcgagacatgggacagcaacacccacgtgttcggcaccggcaccaaagtgacagttcttctcgaggggaaaccaattcccaaccctcttctgggactggattcaaccggcagcggcgaggacctgaagaacgtgttcccacctgaggtggccgtgttcgagcctagcgaggccgagatcagccacacccagaaagccaccctcgtgtgcctggctaccggcttctaccccgaccatgtggaactgtcttggtgggtcaacggcaaagaggtgcacagcggcgtgtctaccgacccccagccactgaaagaacagcccgccctgaacgacagccggtactgcctgagcagcagactgagagtgtccgccaccttctggcagaacccccggaaccacttcagatgccaggtgcagttctacggcctgagcgagaacgacgagtggacccaggacagagccaagcccgtgacccagatcgtgtctgccgaagcctggggcagagccgattgcggatcccagagcttcggcctgctggaccccaagctgtgctacctgctggatggcatcctgttcatctacggcgtgatcctgaccgccctgttcctgagagtgaagttcagcagaagcgccgacgcccctgcctaccagcagggacagaaccaactgtacaacgagctgaacctgggcagacgggaagagtacgacgtgctggacaagcggagaggcagggaccctgagatgggcggaaagccccagcggagaaagaacccccaggaaggactgtataacgaactccagaaagacaagatggccgaagcctacagcgagatcggcatgaagggcgagcggagaagaggcaagggccacgatggcctgtaccagggcctgagcaccgccaccaaggacacctatgacgccctgcacatgcaggccctgcctccaagaagggccaagcgatctggatctggagcaacaaacttctcactactcaaacaagcaggtgacgtggaggagaatcccgggcctactagtatggactggatttggcgcatccttttccttgtcggcgctgctaccggcgcgcattccttcgaagaagttcagctggttcagagcggcgctgaagtgaagaaacctggggcctctgtgaaggtgtcctgcaaggcttccggctacacctttaccagctactacatgcactgggtccgacaggcccctggacaaggacttgagtggatgggcatcatcaaccccagcggcggcagaacaagctacgcccagaaattccagggcagagtgaccatgaccagagacacctctaccggcaccgtgtacatggaactgagcagcctgagaagcgaggacaccgccgtgtactactgtgccagaagccactgttctggcggcagctgctacagcatcgactattggggccagggcaccctggtcacagtctcttctacgcgtgagcagaaactgatctcggaagaggatctggggagcggcatccagaaccctgatcctgccgtgtaccagctgcgggatagcaagagcagcgacaagagcgtgtgtctgttcaccgacttcgacagccagaccaacgtgtcccagagcaaggactccgacgtgtacatcaccgataagaccgtgctggacatgcggagcatggacttcaagagcaactccgccgtggcctggtccaacaagtccgatttcgcctgcgccaacgccttcaacaacagcattatccccgaggacacattcttcccaagccccgagagcagctgcggtacccagagttttgggttgttggaccctaaattgtgctatctgttggacggaatcctgttcatttacggagtgatcctgaccgcattgttcctgaagagaggccggaagaagctgctgtacatcttcaagcagcctttcatgcggcccgtgcagaccacccaggaagaggacggctgctcctgccggttccccgaggaagaagaaggcggctgcgagctgcgggttaagttttccagatccgcagacgcacccgcttaccaacaagggcagaaccaactctacaatgaacttaatttggggcggagggaagagtacgacgttctggacaaaaggaggggacgagatcccgagatgggcggaaagcctcagcgaaggaagaatccgcaagaggggctttataacgaactccagaaagataaaatggcagaagcctatagtgagattgggatgaagggagaaaggaggaggggtaaaggtcacgatgggttgtaccaaggattgagcacagccactaaagatacctatgatgcgctccacatgcaggccctgccgccaaga

SEQ ID NO: 3612 - DNA, 2811 bp, synthetic construct
  source 1..2811: mol_type = other DNA
atggccttaccagtgaccgccttgctcctgccgctggccttgctgctccacgccgccaggccgcagcctgtgctgacacagtctagtagcgcctctgcctctctgggcagcagcgtgaagctgacctgtacactgtctagcggccacagcagctacatcattgcctggcatcagcagcagcctggcaaggcccctagatacctgatgaaggtggaaggcagcggcagctacaacaaaggctctggcatccccgagagattcagcggcagttctagcggagccgaccgctacctgaccatcagcaatctccagagcgaggacgaggccgactactactgcgagacatgggacagcaacacccacgtgttcggcaccggcaccaaagtgacagttcttctcgaggggaaaccaattcccaaccctcttctgggactggattcaaccggcagcggcgaggacctgaagaacgtgttcccacctgaggtggccgtgttcgagcctagcgaggccgagatcagccacacccagaaagccaccctcgtgtgcctggctaccggcttctaccccgaccatgtggaactgtcttggtgggtcaacggcaaagaggtgcacagcggcgtgtctaccgacccccagccactgaaagaacagcccgccctgaacgacagccggtactgcctgagcagcagactgagagtgtccgccaccttctggcagaacccccggaaccacttcagatgccaggtgcagttctacggcctgagcgagaacgacgagtggacccaggacagagccaagcccgtgacccagatcgtgtctgccgaagcctggggcagagccgattgcggatcccagagcttcggcctgctggaccccaagctgtgctacctgctggatggcatcctgttcatctacggcgtgatcctgaccgccctgttcctgaaacggggcagaaagaaactcctgtatatattcaaacaaccatttatgagaccagtacaaactactcaagaggaagatggctgtagctgccgatttccagaagaagaagaaggaggatgtgaactgagagtgaagttcagcagaagcgccgacgcccctgcctaccagcagggacagaaccaactgtacaacgagctgaacctgggcagacgggaagagtacgacgtgctggacaagcggagaggcagggaccctgagatgggcggaaagccccagcggagaaagaacccccaggaaggactgtataacgaactccagaaagacaagatggccgaagcctacagcgagatcggcatgaagggcgagcggagaagaggcaagggccacgatggcctgtaccagggcctgagcaccgccaccaaggacacctatgacgccctgcacatgcaggccctgcctccaagaagggccaagcgatctggatctggagcaacaaacttctcactactcaaacaagcaggtgacgtggaggagaatcccgggcctactagtatggactggatttggcgcatccttttccttgtcggcgctgctaccggcgcgcattccttcgaagaagttcagctggttcagagcggcgctgaagtgaagaaacctggggcctctgtgaaggtgtcctgcaaggcttccggctacacctttaccagctactacatgcactgggtccgacaggcccctggacaaggacttgagtggatgggcatcatcaaccccagcggcggcagaacaagctacgcccagaaattccagggcagagtgaccatgaccagagacacctctaccggcaccgtgtacatggaactgagcagcctgagaagcgaggacaccgccgtgtactactgtgccagaagccactgttctggcggcagctgctacagcatcgactattggggccagggcaccctggtcacagtctcttctacgcgtgagcagaaactgatctcggaagaggatctggggagcggcatccagaaccctgatcctgccgtgtaccagctgcgggatagcaagagcagcgacaagagcgtgtgtctgttcaccgacttcgacagccagaccaacgtgtcccagagcaaggactccgacgtgtacatcaccgataagaccgtgctggacatgcggagcatggacttcaagagcaactccgccgtggcctggtccaacaagtccgatttcgcctgcgccaacgccttcaacaacagcattatccccgaggacacattcttcccaagccccgagagcagctgcggtacccagagttttgggttgttggaccctaaattgtgctatctgttggacggaatcctgttcatttacggagtgatcctgaccgcattgttcctgaagagaggccggaagaagctgctgtacatcttcaagcagcctttcatgcggcccgtgcagaccacccaggaagaggacggctgctcctgccggttccccgaggaagaagaaggcggctgcgagctgcgggttaagttttccagatccgcagacgcacccgcttaccaacaagggcagaaccaactctacaatgaacttaatttggggcggagggaagagtacgacgttctggacaaaaggaggggacgagatcccgagatgggcggaaagcctcagcgaaggaagaatccgcaagaggggctttataacgaactccagaaagataaaatggcagaagcctatagtgagattgggatgaagggagaaaggaggaggggtaaaggtcacgatgggttgtaccaaggattgagcacagccactaaagatacctatgatgcgctccacatgcaggccctgccgccaaga

SEQ ID NO: 3613 - DNA, 2484 bp, synthetic construct
  source 1..2484: mol_type = other DNA
atggccttaccagtgaccgccttgctcctgccgctggccttgctgctccacgccgccaggccgcagcctgtgctgacacagtctagtagcgcctctgcctctctgggcagcagcgtgaagctgacctgtacactgtctagcggccacagcagctacatcattgcctggcatcagcagcagcctggcaaggcccctagatacctgatgaaggtggaaggcagcggcagctacaacaaaggctctggcatccccgagagattcagcggcagttctagcggagccgaccgctacctgaccatcagcaatctccagagcgaggacgaggccgactactactgcgagacatgggacagcaacacccacgtgttcggcaccggcaccaaagtgacagttcttctcgagcagagcttcggcctgctggaccccaagctgtgctacctgctggatggcatcctgttcatctacggcgtgatcctgaccgccctgttcctgagagtgaagttcagcagaagcgccgacgcccctgcctaccagcagggacagaaccaactgtacaacgagctgaacctgggcagacgggaagagtacgacgtgctggacaagcggagaggcagggaccctgagatgggcggaaagccccagcggagaaagaacccccaggaaggactgtataacgaactccagaaagacaagatggccgaagcctacagcgagatcggcatgaagggcgagcggagaagaggcaagggccacgatggcctgtaccagggcctgagcaccgccaccaaggacacctatgacgccctgcacatgcaggccctgcctccaagaagggccaagcgatctggatctggagcaacaaacttctcactactcaaacaagcaggtgacgtggaggagaatcccgggcctactagtatggactggatttggcgcatccttttccttgtcggcgctgctaccggcgcgcattccttcgaagaagttcagctggttcagagcggcgctgaagtgaagaaacctggggcctctgtgaaggtgtcctgcaaggcttccggctacacctttaccagctactacatgcactgggtccgacaggcccctggacaaggacttgagtggatgggcatcatcaaccccagcggcggcagaacaagctacgcccagaaattccagggcagagtgaccatgaccagagacacctctaccggcaccgtgtacatggaactgagcagcctgagaagcgaggacaccgccgtgtactactgtgccagaagccactgttctggcggcagctgctacagcatcgactattggggccagggcaccctggtcacagtctcttctacgcgtcagagttttgggttgttggaccctaaattgtgctatctgttggacggaatcctgttcatttacggagtgatcctgaccgcattgttcctgcgggttaagttttccagatccgcagacgcacccgcttaccaacaagggcagaaccaactctacaatgaacttaatttggggcggagggaagagtacgacgttctggacaaaaggaggggacgagatcccgagatgggcggaaagcctcagcgaaggaagaatccgcaagaggggctttataacgaactccagaaagataaaatggcagaagcctatagtgagattgggatgaagggagaaaggaggaggggtaaaggtcacgatgggttgtaccaaggattgagcacagccactaaagatacctatgatgcgctccacatgcaggccctgccgccaagacgcgccaagagaagcggatctggcgtgaagcagaccctgaatttcgacctgctgaagctggctggcgacgtggaatccaacccaggcccttctagaggccatatgaccgagtacaagcccacggtgcgcctcgccacccgcgacgacgtccccagggccgtacgcaccctcgccgccgcgttcgccgactaccccgccacgcgccacaccgtcgatccggaccgccacatcgagcgggtcaccgagctgcaagaactcttcctcacgcgcgtcgggctcgacatcggcaaggtgtgggtcgcggacgacggcgccgcggtggcggtctggaccacgccggagagcgtcgaagcgggggcggtgttcgccgagatcggcccgcgcatggccgagttgagcggttcccggctggccgcgcagcaacagatggaaggcctcctggcgccgcaccggcccaaggagcccgcgtggttcctggccaccgtcggcgtctcgcccgaccaccagggcaagggtctgggcagcgccgtcgtgctccccggagtggaggcggccgagcgcgccggggtgcccgccttcctggagacctccgcgccccgcaacctccccttctacgagcggctcggcttcaccgtcaccgccgacgtcgaggtgcccgaaggaccgcgcacctggtgcatgacccgcaagcccggtgcctga

SEQ ID NO: 3614 - DNA, 1956 bp, synthetic construct
  source 1..1956: mol_type = other DNA
atggccttaccagtgaccgccttgctcctgccgctggccttgctgctccacgccgccaggccgcagcctgtgctgacacagtctagtagcgcctctgcctctctgggcagcagcgtgaagctgacctgtacactgtctagcggccacagcagctacatcattgcctggcatcagcagcagcctggcaaggcccctagatacctgatgaaggtggaaggcagcggcagctacaacaaaggctctggcatccccgagagattcagcggcagttctagcggagccgaccgctacctgaccatcagcaatctccagagcgaggacgaggccgactactactgcgagacatgggacagcaacacccacgtgttcggcaccggcaccaaagtgacagttcttctcgagggacagcctaaggccaatcctaccgtgacactgttccctccaagcagcgaagaactccaggccaacaaggccacacttgtgtgcctgatctccgacttctaccctggggctgtgacagtggcttggaaggccgatggatctcctgtgaaagccggcgtggaaaccaccaagccatccaagcagagcaacaacaaatacgccgccagctcctacctgagcctgacacctgagcagtggaagtcccacagatcctacagctgccaagtgacccacgaaggcagcaccgtggaaaagacagtggcccctacagagtgcagccccatcaagaccgatgtgattacaatggaccccaaggacaactgctccaaggacgccaacgataccctgctgctccagctgaccaacaccagcgcctactacatgtacttgttgctgctgctgaagtccgtggtgtacttcgccatcatcacatgctgcctgctgcggagaaccgccttctgctgcaacggcgagaagtctagggccaagcgatctggatctggagcaacaaacttctcactactcaaacaagcaggtgacgtggaggagaatcccgggcctactagtatggactggatttggcgcatccttttccttgtcggcgctgctaccggcgcgcattccttcgaagaagttcagctggttcagagcggcgctgaagtgaagaaacctggggcctctgtgaaggtgtcctgcaaggcttccggctacacctttaccagctactacatgcactgggtccgacaggcccctggacaaggacttgagtggatgggcatcatcaaccccagcggcggcagaacaagctacgcccagaaattccagggcagagtgaccatgaccagagacacctctaccggcaccgtgtacatggaactgagcagcctgagaagcgaggacaccgccgtgtactactgtgccagaagccactgttctggcggcagctgctacagcatcgactattggggccagggcaccctggtcacagtctcttctacgcgtgcctctacaaagggaccctccgtgtttcctctggctcccagcagcaagtctacaagcggaggaacagccgctctgggctgcctggtcaaggattactttcccgagcctgtgaccgtgtcctggaatagcggagcactgacaagcggcgtgcacacctttccagccgtgctgcaaagcagcggcctgtactctctgagcagcgtggtcacagtgcctagctctagcctgggcacccagacctacatctgcaatgtgaaccacaagcctagcaacaccaaggtggacaagagagtggaacccaagagctgtgaagtgaaaaccgactccaccgaccacgtgaagcccaaagagacagagaacaccaagcagcccagcaagagctgccacaagcccaaggccatcgtgcacaccgagaaagtgaacatgatgagcctgaccgtgctgggcctgcggatgctgttcgccaaaaccgtggccgtgaacttcctgctgaccgccaagctgttcttcctc

SEQ ID NO: 3615 - DNA, 1890 bp, synthetic construct
  source 1..1890: mol_type = other DNA
atggccttaccagtgaccgccttgctcctgccgctggccttgctgctccacgccgccaggccgcagcctgtgctgacacagtctagtagcgcctctgcctctctgggcagcagcgtgaagctgacctgtacactgtctagcggccacagcagctacatcattgcctggcatcagcagcagcctggcaaggcccctagatacctgatgaaggtggaaggcagcggcagctacaacaaaggctctggcatccccgagagattcagcggcagttctagcggagccgaccgctacctgaccatcagcaatctccagagcgaggacgaggccgactactactgcgagacatgggacagcaacacccacgtgttcggcaccggcaccaaagtgacagttcttctcgagggacagcctaaggccaatcctaccgtgacactgttccctccaagcagcgaagaactccaggccaacaaggccacacttgtgtgcctgatctccgacttctaccctggggctgtgacagtggcttggaaggccgatggatctcctgtgaaagccggcgtggaaaccaccaagccatccaagcagagcaacaacaaatacgccgccagctcctacctgagcctgacacctgagcagtggaagtcccacagatcctacagctgccaagtgacccacgaaggcagcaccgtggaaaagacagtggcccctacagagtgcagcggcagagccgattgcggcatcaccagcgccagctaccaccagggcgtgctgagcgccaccatcctgtacgagatcctgctgggcaaggccaccctgtacgccgtgctggtgtctgccctggtgctgatggctatggtcaagcggaaggacagccggggaagggccaagcgatctggatctggagcaacaaacttctcactactcaaacaagcaggtgacgtggaggagaatcccgggcctactagtatggactggatttggcgcatccttttccttgtcggcgctgctaccggcgcgcattccttcgaagaagttcagctggttcagagcggcgctgaagtgaagaaacctggggcctctgtgaaggtgtcctgcaaggcttccggctacacctttaccagctactacatgcactgggtccgacaggcccctggacaaggacttgagtggatgggcatcatcaaccccagcggcggcagaacaagctacgcccagaaattccagggcagagtgaccatgaccagagacacctctaccggcaccgtgtacatggaactgagcagcctgagaagcgaggacaccgccgtgtactactgtgccagaagccactgttctggcggcagctgctacagcatcgactattggggccagggcaccctggtcacagtctcttctacgcgtgcctctacaaagggaccctccgtgtttcctctggctcccagcagcaagtctacaagcggaggaacagccgctctgggctgcctggtcaaggattactttcccgagcctgtgaccgtgtcctggaatagcggagcactgacaagcggcgtgcacacctttccagccgtgctgcaaagcagcggcctgtactctctgagcagcgtggtcacagtgcctagctctagcctgggcacccagacctacatctgcaatgtgaaccacaagcctagcaacaccaaggtggacaagagagtggaacccaagagctgtatccccgaggacacattcttcccaagcagcgacgtgccctgcgacgtgaagctggtggaaaagagcttcgagacagacaccaacctgaacttccagaacctgagcgtgatcggcttcagaatcctgctgctgaaagtggccggctttaacctgctgatgaccctgcggctgtggtccagc

SEQ ID NO: 3616 - DNA, 1890 bp, synthetic construct
  source 1..1890: mol_type = other DNA
atggccttaccagtgaccgccttgctcctgccgctggccttgctgctccacgccgccaggccgcagcctgtgctgacacagtctagtagcgcctctgcctctctgggcagcagcgtgaagctgacctgtacactgtctagcggccacagcagctacatcattgcctggcatcagcagcagcctggcaaggcccctagatacctgatgaaggtggaaggcagcggcagctacaacaaaggctctggcatccccgagagattcagcggcagttctagcggagccgaccgctacctgaccatcagcaatctccagagcgaggacgaggccgactactactgcgagacatgggacagcaacacccacgtgttcggcaccggcaccaaagtgacagttcttctcgagggacagcctaaggccaatcctaccgtgacactgttccctccaagcagcgaagaactccaggccaacaaggccacacttgtgtgcctgatctccgacttctaccctggggctgtgacagtggcttggaaggccgatggatctcctgtgaaagccggcgtggaaaccaccaagccatccaagcagagcaacaacaaatacgccgccagctcctacctgagcctgacacctgagcagtggaagtcccacagatcctacagctgccaagtgacccacgaaggcagcaccgtggaaaagacagtggcccctacagagtgcagcggcagagccgattgcggctttaccagcgagagctaccagcagggcgtgctgagcgccaccatcctgtacgagatcctgctgggcaaggccaccctgtacgccgtgctggtgtctgccctggtgctgatggctatggtcaagcggaaggacagccggggaagggccaagcgatctggatctggagcaacaaacttctcactactcaaacaagcaggtgacgtggaggagaatcccgggcctactagtatggactggatttggcgcatccttttccttgtcggcgctgctaccggcgcgcattccttcgaagaagttcagctggttcagagcggcgctgaagtgaagaaacctggggcctctgtgaaggtgtcctgcaaggcttccggctacacctttaccagctactacatgcactgggtccgacaggcccctggacaaggacttgagtggatgggcatcatcaaccccagcggcggcagaacaagctacgcccagaaattccagggcagagtgaccatgaccagagacacctctaccggcaccgtgtacatggaactgagcagcctgagaagcgaggacaccgccgtgtactactgtgccagaagccactgttctggcggcagctgctacagcatcgactattggggccagggcaccctggtcacagtctcttctacgcgtgcctctacaaagggaccctccgtgtttcctctggctcccagcagcaagtctacaagcggaggaacagccgctctgggctgcctggtcaaggattactttcccgagcctgtgaccgtgtcctggaatagcggagcactgacaagcggcgtgcacacctttccagccgtgctgcaaagcagcggcctgtactctctgagcagcgtggtcacagtgcctagctctagcctgggcacccagacctacatctgcaatgtgaaccacaagcctagcaacaccaaggtggacaagagagtggaacccaagagctgtatccccgaggacacattcttcccaagccccgagagcagctgcgacgtgaagctggtggaaaagagcttcgagacagacaccaacctgaacttccagaacctgagcgtgatcggcttcagaatcctgctgctgaaagtggccggctttaacctgctgatgaccctgcggctgtggtccagc

SEQ ID NO: 3617 - DNA, 1368 bp, synthetic construct
  source 1..1368: mol_type = other DNA
atggccttaccagtgaccgccttgctcctgccgctggccttgctgctccacgccgccaggccgcagcctgtgctgacacagtctagtagcgcctctgcctctctgggcagcagcgtgaagctgacctgtacactgtctagcggccacagcagctacatcattgcctggcatcagcagcagcctggcaaggcccctagatacctgatgaaggtggaaggcagcggcagctacaacaaaggctctggcatccccgagagattcagcggcagttctagcggagccgaccgctacctgaccatcagcaatctccagagcgaggacgaggccgactactactgcgagacatgggacagcaacacccacgtgttcggcaccggcaccaaagtgacagttcttggcggaggcggaagtggaggcggaggatctggcggcggaggctctgaagttcagctggttcagagcggcgctgaagtgaagaaacctggggcctctgtgaaggtgtcctgcaaggcttccggctacacctttaccagctactacatgcactgggtccgacaggcccctggacaaggacttgagtggatgggcatcatcaaccccagcggcggcagaacaagctacgcccagaaattccagggcagagtgaccatgaccagagacacctctaccggcaccgtgtacatggaactgagcagcctgagaagcgaggacaccgccgtgtactactgtgccagaagccactgttctggcggcagctgctacagcatcgactattggggccagggcaccctggtcacagtctcttctacgcgtgacggtaacgaggagatgggaggaatcactcaaaccccttacaaagtctcaatttcaggaacaactgttatccttacatgtccccagtatcctggcagcgagatcctttggcagcataacgacaagaatatagggggagatgaagacgataagaatatcggatctgacgaggatcacttgagcctgaaagagttctccgagcttgaacaaagcggatattatgtgtgctatccgcgcgggtcaaagccggaagacgctaacttttacctttatctccgagccagagtgtgcgaaaattgcatggaaatggacgttatgtccgttgctacaatagttatcgtagatatatgcatcacgggtggactgcttctgctggtttattattggtccaagaatagaaaggccaaagctaaacccgtgaccagaggcgctggcgcaggcggaaggcaaaggggacaaaacaaagaacggccaccaccagtgccaaatccagattatgagcctattcggaaaggacagagggacctgtactctggcctgaatcagagaagaatc

SEQ ID NO: 3618 - DNA, 1263 bp, synthetic construct
  source 1..1263: mol_type = other DNA
atggccttaccagtgaccgccttgctcctgccgctggccttgctgctccacgccgccaggccgcagcctgtgctgacacagtctagtagcgcctctgcctctctgggcagcagcgtgaagctgacctgtacactgtctagcggccacagcagctacatcattgcctggcatcagcagcagcctggcaaggcccctagatacctgatgaaggtggaaggcagcggcagctacaacaaaggctctggcatccccgagagattcagcggcagttctagcggagccgaccgctacctgaccatcagcaatctccagagcgaggacgaggccgactactactgcgagacatgggacagcaacacccacgtgttcggcaccggcaccaaagtgacagttcttggcggaggcggaagtggaggcggaggatctggcggcggaggctctgaagttcagctggttcagagcggcgctgaagtgaagaaacctggggcctctgtgaaggtgtcctgcaaggcttccggctacacctttaccagctactacatgcactgggtccgacaggcccctggacaaggacttgagtggatgggcatcatcaaccccagcggcggcagaacaagctacgcccagaaattccagggcagagtgaccatgaccagagacacctctaccggcaccgtgtacatggaactgagcagcctgagaagcgaggacaccgccgtgtactactgtgccagaagccactgttctggcggcagctgctacagcatcgactattggggccagggcaccctggtcacagtctcttctacgcgtttcaagatccccatcgaggaactggaagatcgggtgttcgtgaactgcaacacctctatcacctgggtggaaggcaccgtgggaacactgctgagcgacatcaccagactggacctcggcaagcggattctggaccctcggggcatctacagatgcaacggcaccgacatctacaaggacaaagaaagcaccgtgcaggtccactacagaatgtgccagtcctgcgtggaactggaccctgctacagtggccggcatcatcgtgaccgatgtgatcgctactctgctgctggctctgggagtgttctgcttcgccggacacgaaacaggcagactgtctggcgctgccgatacacaggccctgctgagaaacgaccaagtgtatcagcccctgcgcgacagagatgatgcccagtattctcacctcggcggcaactgggctagaaacaag

SEQ ID NO: 3619 - DNA, 1293 bp, synthetic construct
  source 1..1293: mol_type = other DNA
atggccttaccagtgaccgccttgctcctgccgctggccttgctgctccacgccgccaggccgcagcctgtgctgacacagtctagtagcgcctctgcctctctgggcagcagcgtgaagctgacctgtacactgtctagcggccacagcagctacatcattgcctggcatcagcagcagcctggcaaggcccctagatacctgatgaaggtggaaggcagcggcagctacaacaaaggctctggcatccccgagagattcagcggcagttctagcggagccgaccgctacctgaccatcagcaatctccagagcgaggacgaggccgactactactgcgagacatgggacagcaacacccacgtgttcggcaccggcaccaaagtgacagttcttggcggaggcggaagtggaggcggaggatctggcggcggaggctctgaagttcagctggttcagagcggcgctgaagtgaagaaacctggggcctctgtgaaggtgtcctgcaaggcttccggctacacctttaccagctactacatgcactgggtccgacaggcccctggacaaggacttgagtggatgggcatcatcaaccccagcggcggcagaacaagctacgcccagaaattccagggcagagtgaccatgaccagagacacctctaccggcaccgtgtacatggaactgagcagcctgagaagcgaggacaccgccgtgtactactgtgccagaagccactgttctggcggcagctgctacagcatcgactattggggccagggcaccctggtcacagtctcttctacgcgtcagagcatcaagggcaaccacctggtcaaggtgtacgactaccaagaggacggcagcgtgctgctgacatgtgatgccgaggccaagaacatcacctggtttaaggacggcaagatgatcggcttcctgaccgaggacaagaagaagtggaacctgggcagcaacgctaaggaccccagaggcatgtatcagtgcaagggcagccagaacaagagcaagcccctccaggtgtactaccggatgtgccagaactgcatcgagctgaacgccgctaccatcagcggctttctgttcgccgagatcgtgtccatcttcgtgctggccgtgggcgtgtactttatcgctggacaggatggcgtgcggcagagcagagcttccgataagcaaaccctgctgcctaacgaccagctgtaccagcctctgaaggacagagaggacgaccagtacagccacctccagggcaatcagctgagaagaaac

SEQ ID NO: 3620 - DNA, 1242 bp, synthetic construct
  source 1..1242: mol_type = other DNA
atggccttaccagtgaccgccttgctcctgccgctggccttgctgctccacgccgccaggccgcagcctgtgctgacacagtctagtagcgcctctgcctctctgggcagcagcgtgaagctgacctgtacactgtctagcggccacagcagctacatcattgcctggcatcagcagcagcctggcaaggcccctagatacctgatgaaggtggaaggcagcggcagctacaacaaaggctctggcatccccgagagattcagcggcagttctagcggagccgaccgctacctgaccatcagcaatctccagagcgaggacgaggccgactactactgcgagacatgggacagcaacacccacgtgttcggcaccggcaccaaagtgacagttcttggcggaggcggaagtggaggcggaggatctggcggcggaggctctgaagttcagctggttcagagcggcgctgaagtgaagaaacctggggcctctgtgaaggtgtcctgcaaggcttccggctacacctttaccagctactacatgcactgggtccgacaggcccctggacaaggacttgagtggatgggcatcatcaaccccagcggcggcagaacaagctacgcccagaaattccagggcagagtgaccatgaccagagacacctctaccggcaccgtgtacatggaactgagcagcctgagaagcgaggacaccgccgtgtactactgtgccagaagccactgttctggcggcagctgctacagcatcgactattggggccagggcaccctggtcacagtctcttctacgcgtcagagttttgggttgttggaccctaaattgtgctatctgttggacggaatcctgttcatttacggagtgatcctgaccgcattgttcctgcgggttaagttttccagatccgcagacgcacccgcttaccaacaagggcagaaccaactctacaatgaacttaatttggggcggagggaagagtacgacgttctggacaaaaggaggggacgagatcccgagatgggcggaaagcctcagcgaaggaagaatccgcaagaggggctttataacgaactccagaaagataaaatggcagaagcctatagtgagattgggatgaagggagaaaggaggaggggtaaaggtcacgatgggttgtaccaaggattgagcacagccactaaagatacctatgatgcgctccacatgcaggccctgccgccaaga

SEQ ID NO: 3621 - DNA, 1368 bp, synthetic construct
  source 1..1368: mol_type = other DNA
atggccttaccagtgaccgccttgctcctgccgctggccttgctgctccacgccgccaggccggaagttcagctggttcagagcggcgctgaagtgaagaaacctggggcctctgtgaaggtgtcctgcaaggcttccggctacacctttaccagctactacatgcactgggtccgacaggcccctggacaaggacttgagtggatgggcatcatcaaccccagcggcggcagaacaagctacgcccagaaattccagggcagagtgaccatgaccagagacacctctaccggcaccgtgtacatggaactgagcagcctgagaagcgaggacaccgccgtgtactactgtgccagaagccactgttctggcggcagctgctacagcatcgactattggggccagggcaccctggtcacagtctcttctggcggaggcggaagtggaggcggaggatctggcggcggaggctctcagcctgtgctgacacagtctagtagcgcctctgcctctctgggcagcagcgtgaagctgacctgtacactgtctagcggccacagcagctacatcattgcctggcatcagcagcagcctggcaaggcccctagatacctgatgaaggtggaaggcagcggcagctacaacaaaggctctggcatccccgagagattcagcggcagttctagcggagccgaccgctacctgaccatcagcaatctccagagcgaggacgaggccgactactactgcgagacatgggacagcaacacccacgtgttcggcaccggcaccaaagtgacagttcttacgcgtgacggtaacgaggagatgggaggaatcactcaaaccccttacaaagtctcaatttcaggaacaactgttatccttacatgtccccagtatcctggcagcgagatcctttggcagcataacgacaagaatatagggggagatgaagacgataagaatatcggatctgacgaggatcacttgagcctgaaagagttctccgagcttgaacaaagcggatattatgtgtgctatccgcgcgggtcaaagccggaagacgctaacttttacctttatctccgagccagagtgtgcgaaaattgcatggaaatggacgttatgtccgttgctacaatagttatcgtagatatatgcatcacgggtggactgcttctgctggtttattattggtccaagaatagaaaggccaaagctaaacccgtgaccagaggcgctggcgcaggcggaaggcaaaggggacaaaacaaagaacggccaccaccagtgccaaatccagattatgagcctattcggaaaggacagagggacctgtactctggcctgaatcagagaagaatc

SEQ ID NO: 3622 - DNA, 1263 bp, synthetic construct
  source 1..1263: mol_type = other DNA
atggccttaccagtgaccgccttgctcctgccgctggccttgctgctccacgccgccaggccggaagttcagctggttcagagcggcgctgaagtgaagaaacctggggcctctgtgaaggtgtcctgcaaggcttccggctacacctttaccagctactacatgcactgggtccgacaggcccctggacaaggacttgagtggatgggcatcatcaaccccagcggcggcagaacaagctacgcccagaaattccagggcagagtgaccatgaccagagacacctctaccggcaccgtgtacatggaactgagcagcctgagaagcgaggacaccgccgtgtactactgtgccagaagccactgttctggcggcagctgctacagcatcgactattggggccagggcaccctggtcacagtctcttctggcggaggcggaagtggaggcggaggatctggcggcggaggctctcagcctgtgctgacacagtctagtagcgcctctgcctctctgggcagcagcgtgaagctgacctgtacactgtctagcggccacagcagctacatcattgcctggcatcagcagcagcctggcaaggcccctagatacctgatgaaggtggaaggcagcggcagctacaacaaaggctctggcatccccgagagattcagcggcagttctagcggagccgaccgctacctgaccatcagcaatctccagagcgaggacgaggccgactactactgcgagacatgggacagcaacacccacgtgttcggcaccggcaccaaagtgacagttcttacgcgtttcaagatccccatcgaggaactggaagatcgggtgttcgtgaactgcaacacctctatcacctgggtggaaggcaccgtgggaacactgctgagcgacatcaccagactggacctcggcaagcggattctggaccctcggggcatctacagatgcaacggcaccgacatctacaaggacaaagaaagcaccgtgcaggtccactacagaatgtgccagtcctgcgtggaactggaccctgctacagtggccggcatcatcgtgaccgatgtgatcgctactctgctgctggctctgggagtgttctgcttcgccggacacgaaacaggcagactgtctggcgctgccgatacacaggccctgctgagaaacgaccaagtgtatcagcccctgcgcgacagagatgatgcccagtattctcacctcggcggcaactgggctagaaacaag

SEQ ID NO: 3623 - DNA, 1293 bp, synthetic construct
  source 1..1293: mol_type = other DNA
atggccttaccagtgaccgccttgctcctgccgctggccttgctgctccacgccgccaggccggaagttcagctggttcagagcggcgctgaagtgaagaaacctggggcctctgtgaaggtgtcctgcaaggcttccggctacacctttaccagctactacatgcactgggtccgacaggcccctggacaaggacttgagtggatgggcatcatcaaccccagcggcggcagaacaagctacgcccagaaattccagggcagagtgaccatgaccagagacacctctaccggcaccgtgtacatggaactgagcagcctgagaagcgaggacaccgccgtgtactactgtgccagaagccactgttctggcggcagctgctacagcatcgactattggggccagggcaccctggtcacagtctcttctggcggaggcggaagtggaggcggaggatctggcggcggaggctctcagcctgtgctgacacagtctagtagcgcctctgcctctctgggcagcagcgtgaagctgacctgtacactgtctagcggccacagcagctacatcattgcctggcatcagcagcagcctggcaaggcccctagatacctgatgaaggtggaaggcagcggcagctacaacaaaggctctggcatccccgagagattcagcggcagttctagcggagccgaccgctacctgaccatcagcaatctccagagcgaggacgaggccgactactactgcgagacatgggacagcaacacccacgtgttcggcaccggcaccaaagtgacagttcttacgcgtcagagcatcaagggcaaccacctggtcaaggtgtacgactaccaagaggacggcagcgtgctgctgacatgtgatgccgaggccaagaacatcacctggtttaaggacggcaagatgatcggcttcctgaccgaggacaagaagaagtggaacctgggcagcaacgctaaggaccccagaggcatgtatcagtgcaagggcagccagaacaagagcaagcccctccaggtgtactaccggatgtgccagaactgcatcgagctgaacgccgctaccatcagcggctttctgttcgccgagatcgtgtccatcttcgtgctggccgtgggcgtgtactttatcgctggacaggatggcgtgcggcagagcagagcttccgataagcaaaccctgctgcctaacgaccagctgtaccagcctctgaaggacagagaggacgaccagtacagccacctccagggcaatcagctgagaagaaac

SEQ ID NO: 3624 - DNA, 1242 bp, synthetic construct
  source 1..1242: mol_type = other DNA
atggccttaccagtgaccgccttgctcctgccgctggccttgctgctccacgccgccaggccggaagttcagctggttcagagcggcgctgaagtgaagaaacctggggcctctgtgaaggtgtcctgcaaggcttccggctacacctttaccagctactacatgcactgggtccgacaggcccctggacaaggacttgagtggatgggcatcatcaaccccagcggcggcagaacaagctacgcccagaaattccagggcagagtgaccatgaccagagacacctctaccggcaccgtgtacatggaactgagcagcctgagaagcgaggacaccgccgtgtactactgtgccagaagccactgttctggcggcagctgctacagcatcgactattggggccagggcaccctggtcacagtctcttctggcggaggcggaagtggaggcggaggatctggcggcggaggctctcagcctgtgctgacacagtctagtagcgcctctgcctctctgggcagcagcgtgaagctgacctgtacactgtctagcggccacagcagctacatcattgcctggcatcagcagcagcctggcaaggcccctagatacctgatgaaggtggaaggcagcggcagctacaacaaaggctctggcatccccgagagattcagcggcagttctagcggagccgaccgctacctgaccatcagcaatctccagagcgaggacgaggccgactactactgcgagacatgggacagcaacacccacgtgttcggcaccggcaccaaagtgacagttcttacgcgtcagagttttgggttgttggaccctaaattgtgctatctgttggacggaatcctgttcatttacggagtgatcctgaccgcattgttcctgcgggttaagttttccagatccgcagacgcacccgcttaccaacaagggcagaaccaactctacaatgaacttaatttggggcggagggaagagtacgacgttctggacaaaaggaggggacgagatcccgagatgggcggaaagcctcagcgaaggaagaatccgcaagaggggctttataacgaactccagaaagataaaatggcagaagcctatagtgagattgggatgaagggagaaaggaggaggggtaaaggtcacgatgggttgtaccaaggattgagcacagccactaaagatacctatgatgcgctccacatgcaggccctgccgccaaga

SEQ ID NO: 3625 - DNA, 1527 bp, synthetic construct
  source 1..1527: mol_type = other DNA
atggccttaccagtgaccgccttgctcctgccgctggccttgctgctccacgccgccaggccgcagcctgtgctgacacagtctagtagcgcctctgcctctctgggcagcagcgtgaagctgacctgtacactgtctagcggccacagcagctacatcattgcctggcatcagcagcagcctggcaaggcccctagatacctgatgaaggtggaaggcagcggcagctacaacaaaggctctggcatccccgagagattcagcggcagttctagcggagccgaccgctacctgaccatcagcaatctccagagcgaggacgaggccgactactactgcgagacatgggacagcaacacccacgtgttcggcaccggcaccaaagtgacagttcttggcggaggcggaagtggaggcggaggatctggcggcggaggctctgaagttcagctggttcagagcggcgctgaagtgaagaaacctggggcctctgtgaaggtgtcctgcaaggcttccggctacacctttaccagctactacatgcactgggtccgacaggcccctggacaaggacttgagtggatgggcatcatcaaccccagcggcggcagaacaagctacgcccagaaattccagggcagagtgaccatgaccagagacacctctaccggcaccgtgtacatggaactgagcagcctgagaagcgaggacaccgccgtgtactactgtgccagaagccactgttctggcggcagctgctacagcatcgactattggggccagggcaccctggtcacagtctcttctacgcgtggaatgaggactgaggatcttcccaaagctgtcgtctttctcgaaccccaatggtatcgggtgctcgaaaaagactctgtgacactgaaatgccaaggggcctactctcccgaggacaactccacacagtggtttcataatgagtccctcatcagctctcaggccagctcttatttcattgatgccgctacagtggacgactccggcgagtatcggtgtcagaccaatctgtctacactgtctgaccccgtgcagcttgaggtccacattggatggttgctcttgcaagccccacgctgggttttcaaagaggaagatccaatccatctgcggtgccacagctggaaaaacaccgctctccacaaagtcacatacctgcaaaatggcaaaggacgcaaatacttccatcacaattccgatttttacattccgaaggctaccctgaaagacagcggcagctatttctgccggggactcgtcggctccaagaatgtgtcctccgaaaccgtgaatatcacgattacccaaggactggctgtgcctacaatctctagcttctttccgcctggataccaagtctccttctgtcttgtgatggtcctcctgtttgctgtggacacaggactgtacttttccgtgaaaacgaacatccgcagctccacacgcgattggaaagatcacaagtttaaatggcgcaaagatccccaggacaag

SEQ ID NO: 3626 - DNA, 2376 bp, synthetic construct
  source 1..2376: mol_type = other DNA
atggccttaccagtgaccgccttgctcctgccgctggccttgctgctccacgccgccaggccgcagcctgtgctgacacagtctagtagcgcctctgcctctctgggcagcagcgtgaagctgacctgtacactgtctagcggccacagcagctacatcattgcctggcatcagcagcagcctggcaaggcccctagatacctgatgaaggtggaaggcagcggcagctacaacaaaggctctggcatccccgagagattcagcggcagttctagcggagccgaccgctacctgaccatcagcaatctccagagcgaggacgaggccgactactactgcgagacatgggacagcaacacccacgtgttcggcaccggcaccaaagtgacagttcttggcggaggcggaagtggaggcggaggatctggcggcggaggctctgaagttcagctggttcagagcggcgctgaagtgaagaaacctggggcctctgtgaaggtgtcctgcaaggcttccggctacacctttaccagctactacatgcactgggtccgacaggcccctggacaaggacttgagtggatgggcatcatcaaccccagcggcggcagaacaagctacgcccagaaattccagggcagagtgaccatgaccagagacacctctaccggcaccgtgtacatggaactgagcagcctgagaagcgaggacaccgccgtgtactactgtgccagaagccactgttctggcggcagctgctacagcatcgactattggggccagggcaccctggtcacagtctcttctacgcgtggaggctctggacaacaacagaccctgcctaaaccattcatctgggctgaaccccactttatggttccgaaagagaaacaagtcacgatttgttgccaagggaattacggggccgtcgagtatcagctccactttgagggctccctgtttgctgtggatcggcccaagccacctgaaagaatcaacaaagtccaattctatattcctgatatgaactcccgcatggcaggccagtattcatgtatctaccgcgtgggagaactttggagtgaaccctctaacctgctggacctcgtcgtgacagagatgtatgatacacccacactgtctgtgcaccctgggccagaagttatcagcggagaaaaagttaccttttattgccgcctcgataccgctacctctatgttcctcttgctgaaagagggccgcagctctcacgtgcagcgaggctacggaaaggtccaagctgagtttcctctcggccccgtgaccaccgctcacaggggcacatatagatgttttggctcttataacaatcatgcctggtcattcccatccgagcctgtgaaactgctggtcacaggcgatattgagaatacctctctggccccagaagatcctacattccccgccgacacatggggaacatatctgctgacaaccgaaaccgggctgcaaaaggaccatgctctgtgggatcataccgctcagaatctgcttcggatggggcttgcattcctggtcctggtggctcttgtctggtttctggtcgaggactggctgtcccggaagagaaccagagaaagagcttccagggccagcacctgggaaggcagacgcagactgaatactcagaccctgcgcgccaagagaagcggatctggcgtgaagcagaccctgaatttcgacctgctgaagctggctggcgacgtggaatccaacccaggcccttctagaggccatatgaccgagtacaagcccacggtgcgcctcgccacccgcgacgacgtccccagggccgtacgcaccctcgccgccgcgttcgccgactaccccgccacgcgccacaccgtcgatccggaccgccacatcgagcgggtcaccgagctgcaagaactcttcctcacgcgcgtcgggctcgacatcggcaaggtgtgggtcgcggacgacggcgccgcggtggcggtctggaccacgccggagagcgtcgaagcgggggcggtgttcgccgagatcggcccgcgcatggccgagttgagcggttcccggctggccgcgcagcaacagatggaaggcctcctggcgccgcaccggcccaaggagcccgcgtggttcctggccaccgtcggcgtctcgcccgaccaccagggcaagggtctgggcagcgccgtcgtgctccccggagtggaggcggccgagcgcgccggggtgcccgccttcctggagacctccgcgccccgcaacctccccttctacgagcggctcggcttcaccgtcaccgccgacgtcgaggtgcccgaaggaccgcgcacctggtgcatgacccgcaagcccggtgcctga

SEQ ID NO: 3627 - DNA, 1875 bp, synthetic construct
  source 1..1875: mol_type = other DNA
atggccttaccagtgaccgccttgctcctgccgctggccttgctgctccacgccgccaggccgcagcctgtgctgacacagtctagtagcgcctctgcctctctgggcagcagcgtgaagctgacctgtacactgtctagcggccacagcagctacatcattgcctggcatcagcagcagcctggcaaggcccctagatacctgatgaaggtggaaggcagcggcagctacaacaaaggctctggcatccccgagagattcagcggcagttctagcggagccgaccgctacctgaccatcagcaatctccagagcgaggacgaggccgactactactgcgagacatgggacagcaacacccacgtgttcggcaccggcaccaaagtgacagttcttggcggaggcggaagtggaggcggaggatctggcggcggaggctctgaagttcagctggttcagagcggcgctgaagtgaagaaacctggggcctctgtgaaggtgtcctgcaaggcttccggctacacctttaccagctactacatgcactgggtccgacaggcccctggacaaggacttgagtggatgggcatcatcaaccccagcggcggcagaacaagctacgcccagaaattccagggcagagtgaccatgaccagagacacctctaccggcaccgtgtacatggaactgagcagcctgagaagcgaggacaccgccgtgtactactgtgccagaagccactgttctggcggcagctgctacagcatcgactattggggccagggcaccctggtcacagtctcttctacgcgtaaaattgaagttatgtatcctcctccttacctagacaatgagaagagcaatggaaccattatccatgtgaaaggggcgcgtggcgatattgagaatacctctctggccccagaagatcctacattccccgccgacacatggggaacatatctgctgacaaccgaaaccgggctgcaaaaggaccatgctctgtgggatcataccgctcagaatctgcttcggatggggcttgcattcctggtcctggtggctcttgtctggtttctggtcgaggactggctgtcccggaagagaaccagagaaagagcttccagggccagcacctgggaaggcagacgcagactgaatactcagaccctgcgcgccaagagaagcggatctggcgtgaagcagaccctgaatttcgacctgctgaagctggctggcgacgtggaatccaacccaggcccttctagaggccatatgaccgagtacaagcccacggtgcgcctcgccacccgcgacgacgtccccagggccgtacgcaccctcgccgccgcgttcgccgactaccccgccacgcgccacaccgtcgatccggaccgccacatcgagcgggtcaccgagctgcaagaactcttcctcacgcgcgtcgggctcgacatcggcaaggtgtgggtcgcggacgacggcgccgcggtggcggtctggaccacgccggagagcgtcgaagcgggggcggtgttcgccgagatcggcccgcgcatggccgagttgagcggttcccggctggccgcgcagcaacagatggaaggcctcctggcgccgcaccggcccaaggagcccgcgtggttcctggccaccgtcggcgtctcgcccgaccaccagggcaagggtctgggcagcgccgtcgtgctccccggagtggaggcggccgagcgcgccggggtgcccgccttcctggagacctccgcgccccgcaacctccccttctacgagcggctcggcttcaccgtcaccgccgacgtcgaggtgcccgaaggaccgcgcacctggtgcatgacccgcaagcccggtgcctga

SEQ ID NO: 3628 - DNA, 2136 bp, synthetic construct
  source 1..2136: mol_type = other DNA
atggccttaccagtgaccgccttgctcctgccgctggccttgctgctccacgccgccaggccgcagcctgtgctgacacagtctagtagcgcctctgcctctctgggcagcagcgtgaagctgacctgtacactgtctagcggccacagcagctacatcattgcctggcatcagcagcagcctggcaaggcccctagatacctgatgaaggtggaaggcagcggcagctacaacaaaggctctggcatccccgagagattcagcggcagttctagcggagccgaccgctacctgaccatcagcaatctccagagcgaggacgaggccgactactactgcgagacatgggacagcaacacccacgtgttcggcaccggcaccaaagtgacagttcttggcggaggcggaagtggaggcggaggatctggcggcggaggctctgaagttcagctggttcagagcggcgctgaagtgaagaaacctggggcctctgtgaaggtgtcctgcaaggcttccggctacacctttaccagctactacatgcactgggtccgacaggcccctggacaaggacttgagtggatgggcatcatcaaccccagcggcggcagaacaagctacgcccagaaattccagggcagagtgaccatgaccagagacacctctaccggcaccgtgtacatggaactgagcagcctgagaagcgaggacaccgccgtgtactactgtgccagaagccactgttctggcggcagctgctacagcatcgactattggggccagggcaccctggtcacagtctcttctacgcgtctgtgggtgtcccagccacctgaaattcggacactggaaggctcctccgcctttctgccctgtagctttaacgccagccaggggagactcgccatcggctctgtgacatggttccgggatgaagtcgtccctggaaaagaagttcgcaacggaacaccagagttcagaggcagactcgccccactggcaagctccagattcctgcatgaccatcaggctgaactgcacattagggacgtgcggggccacgatgcctccatctatgtgtgtcgggtcgaagtgcttggactcggcgtcggaactggaaacggcactaggctggtggtcgagaaagaacatccacagcttggcgctggcaccgtcctgttgcttagagccggattctatgccgtcagcttcctgtccgtggctgtggggtctacagtgtattaccagggaaaatgtctcacctggaaaggccccagacgccagcttccagctgttgttcctgctccactgccaccaccttgtggctcctctgctcacttgcttccaccagtgcctggcggacgcgccaagagaagcggatctggcgtgaagcagaccctgaatttcgacctgctgaagctggctggcgacgtggaatccaacccaggcccttctagaatgtaccggatgcagctgctgagctgtatcgccctgtctctggccctggtcacaaatagcgcccctaccagcagcagcaccaagaaaacccagctgcaactggaacacctcctgctggacctccagatgatcctgaacggcatcaacaactacaagaaccccaagctgaccgagatgctgaccgccaagttctacatgcccaagaaggccaccgagctgaagcacctccagtgcctggaagaggaactgaagcccctggaagaagtgctgaatctggcccagagcaagaacttccacctgaggccaagggacctgatctccaacatcaacgtgatcgtgctggaactgaaaggcagcgagacaaccttcatgtgcgagtacgccgacgagacagctaccatcgtggaatttctgaatcggtggatcaccttctgccagagcatcatcagcaccctgacaaagatcgaagtgatgtaccctcctccttacctggacaacgagaagtccaacggcaccatcatccacgtgaagggcaagcacctgtgtccttctccactgttccccggacctagcaagcctttctgggtgctcgttgttgttggcggcgtgctggcctgttacagcctgctggttaccgtggccttcatcatcttttgggtccgaagcaagcggagctaa

SEQ ID NO: 3629 - DNA, 2064 bp, synthetic construct
  source 1..2064: mol_type = other DNA
atggccttaccagtgaccgccttgctcctgccgctggccttgctgctccacgccgccaggccgcagcctgtgctgacacagtctagtagcgcctctgcctctctgggcagcagcgtgaagctgacctgtacactgtctagcggccacagcagctacatcattgcctggcatcagcagcagcctggcaaggcccctagatacctgatgaaggtggaaggcagcggcagctacaacaaaggctctggcatccccgagagattcagcggcagttctagcggagccgaccgctacctgaccatcagcaatctccagagcgaggacgaggccgactactactgcgagacatgggacagcaacacccacgtgttcggcaccggcaccaaagtgacagttcttggcggaggcggaagtggaggcggaggatctggcggcggaggctctgaagttcagctggttcagagcggcgctgaagtgaagaaacctggggcctctgtgaaggtgtcctgcaaggcttccggctacacctttaccagctactacatgcactgggtccgacaggcccctggacaaggacttgagtggatgggcatcatcaaccccagcggcggcagaacaagctacgcccagaaattccagggcagagtgaccatgaccagagacacctctaccggcaccgtgtacatggaactgagcagcctgagaagcgaggacaccgccgtgtactactgtgccagaagccactgttctggcggcagctgctacagcatcgactattggggccagggcaccctggtcacagtctcttctacgcgtctgtgggtgtcccagccacctgaaattcggacactggaaggctcctccgcctttctgccctgtagctttaacgccagccaggggagactcgccatcggctctgtgacatggttccgggatgaagtcgtccctggaaaagaagttcgcaacggaacaccagagttcagaggcagactcgccccactggcaagctccagattcctgcatgaccatcaggctgaactgcacattagggacgtgcggggccacgatgcctccatctatgtgtgtcgggtcgaagtgcttggactcggcgtcggaactggaaacggcactaggctggtggtcgagaaagaacatccacagcttggcgctggcaccgtcctgttgcttagagccggattctatgccgtcagcttcctgtccgtggctgtggggtctacagtgtattaccagggaaaatgtctcacctggaaaggccccagacgccagcttccagctgttgttcctgctccactgccaccaccttgtggctcctctgctcacttgcttccaccagtgcctggcggacgcgccaagagaagcggatctggcgtgaagcagaccctgaatttcgacctgctgaagctggctggcgacgtggaatccaacccaggcccttctagaggccatatgaccgagtacaagcccacggtgcgcctcgccacccgcgacgacgtccccagggccgtacgcaccctcgccgccgcgttcgccgactaccccgccacgcgccacaccgtcgatccggaccgccacatcgagcgggtcaccgagctgcaagaactcttcctcacgcgcgtcgggctcgacatcggcaaggtgtgggtcgcggacgacggcgccgcggtggcggtctggaccacgccggagagcgtcgaagcgggggcggtgttcgccgagatcggcccgcgcatggccgagttgagcggttcccggctggccgcgcagcaacagatggaaggcctcctggcgccgcaccggcccaaggagcccgcgtggttcctggccaccgtcggcgtctcgcccgaccaccagggcaagggtctgggcagcgccgtcgtgctccccggagtggaggcggccgagcgcgccggggtgcccgccttcctggagacctccgcgccccgcaacctccccttctacgagcggctcggcttcaccgtcaccgccgacgtcgaggtgcccgaaggaccgcgcacctggtgcatgacccgcaagcccggtgcctga

SEQ ID NO: 3630 - DNA, 1089 bp, synthetic construct
  source 1..1089: mol_type = other DNA
atggccttaccagtgaccgccttgctcctgccgctggccttgctgctccacgccgccaggccgcagcctgtgctgacacagtctagtagcgcctctgcctctctgggcagcagcgtgaagctgacctgtacactgtctagcggccacagcagctacatcattgcctggcatcagcagcagcctggcaaggcccctagatacctgatgaaggtggaaggcagcggcagctacaacaaaggctctggcatccccgagagattcagcggcagttctagcggagccgaccgctacctgaccatcagcaatctccagagcgaggacgaggccgactactactgcgagacatgggacagcaacacccacgtgttcggcaccggcaccaaagtgacagttcttggcggaggcggaagtggaggcggaggatctggcggcggaggctctgaagttcagctggttcagagcggcgctgaagtgaagaaacctggggcctctgtgaaggtgtcctgcaaggcttccggctacacctttaccagctactacatgcactgggtccgacaggcccctggacaaggacttgagtggatgggcatcatcaaccccagcggcggcagaacaagctacgcccagaaattccagggcagagtgaccatgaccagagacacctctaccggcaccgtgtacatggaactgagcagcctgagaagcgaggacaccgccgtgtactactgtgccagaagccactgttctggcggcagctgctacagcatcgactattggggccagggcaccctggtcacagtctcttctacgcgtaaaattgaagttatgtatcctcctccttacctagacaatgagaagagcaatggaaccattatccatgtgaaaggggcgcgtatcacccagggcctggccgtgtctaccatcagcagctttttcccacccggctaccaggtgtccttctgcctcgtgatggtgctgctgttcgccgtggacaccggcctgtacttcagcgtgaaaacaaacatccggtccagcaccagagactggaaggaccacaagttcaagtggcggaaggacccccaggacaag

SEQ ID NO: 3631 - DNA, 1089 bp, synthetic construct
  source 1..1089: mol_type = other DNA
atggccttaccagtgaccgccttgctcctgccgctggccttgctgctccacgccgccaggccgcagcctgtgctgacacagtctagtagcgcctctgcctctctgggcagcagcgtgaagctgacctgtacactgtctagcggccacagcagctacatcattgcctggcatcagcagcagcctggcaaggcccctagatacctgatgaaggtggaaggcagcggcagctacaacaaaggctctggcatccccgagagattcagcggcagttctagcggagccgaccgctacctgaccatcagcaatctccagagcgaggacgaggccgactactactgcgagacatgggacagcaacacccacgtgttcggcaccggcaccaaagtgacagttcttggcggaggcggaagtggaggcggaggatctggcggcggaggctctgaagttcagctggttcagagcggcgctgaagtgaagaaacctggggcctctgtgaaggtgtcctgcaaggcttccggctacacctttaccagctactacatgcactgggtccgacaggcccctggacaaggacttgagtggatgggcatcatcaaccccagcggcggcagaacaagctacgcccagaaattccagggcagagtgaccatgaccagagacacctctaccggcaccgtgtacatggaactgagcagcctgagaagcgaggacaccgccgtgtactactgtgccagaagccactgttctggcggcagctgctacagcatcgactattggggccagggcaccctggtcacagtctcttctacgcgtaaaattgaagttatgtatcctcctccttacctagacaatgagaagagcaatggaaccattatccatgtgaaaggggcgcgtattacccaaggactggctgtgcctacaatctctagcttctttccgcctggataccaagtctccttctgtcttgtgatggtcctcctgtttgctgtggacacaggactgtacttttccgtgaaaacgaacatccgcagctccacacgcgattggaaagatcacaagtttaaatggcgcaaagatccccaggacaag

SEQ ID NO: 3632 - DNA, 1026 bp, synthetic construct
  source 1..1026: mol_type = other DNA
atggccttaccagtgaccgccttgctcctgccgctggccttgctgctccacgccgccaggccgcagcctgtgctgacacagtctagtagcgcctctgcctctctgggcagcagcgtgaagctgacctgtacactgtctagcggccacagcagctacatcattgcctggcatcagcagcagcctggcaaggcccctagatacctgatgaaggtggaaggcagcggcagctacaacaaaggctctggcatccccgagagattcagcggcagttctagcggagccgaccgctacctgaccatcagcaatctccagagcgaggacgaggccgactactactgcgagacatgggacagcaacacccacgtgttcggcaccggcaccaaagtgacagttcttggcggaggcggaagtggaggcggaggatctggcggcggaggctctgaagttcagctggttcagagcggcgctgaagtgaagaaacctggggcctctgtgaaggtgtcctgcaaggcttccggctacacctttaccagctactacatgcactgggtccgacaggcccctggacaaggacttgagtggatgggcatcatcaaccccagcggcggcagaacaagctacgcccagaaattccagggcagagtgaccatgaccagagacacctctaccggcaccgtgtacatggaactgagcagcctgagaagcgaggacaccgccgtgtactactgtgccagaagccactgttctggcggcagctgctacagcatcgactattggggccagggcaccctggtcacagtctcttctacgcgtaaaattgaagttatgtatcctcctccttacctagacaatgagaagagcaatggaaccattatccatgtgaaaggggcgcgtattacccaaggactggctgtgtctacaatctctagcttctctccgcctggataccaagtctccttctgtcttgtgatggtcctcctgtttgctgtggacacaggactgtacttttccgtgaaaacgaacatc

SEQ ID NO: 3633 - DNA, 1119 bp, synthetic construct
  source 1..1119: mol_type = other DNA
atggccttaccagtgaccgccttgctcctgccgctggccttgctgctccacgccgccaggccgcagcctgtgctgacacagtctagtagcgcctctgcctctctgggcagcagcgtgaagctgacctgtacactgtctagcggccacagcagctacatcattgcctggcatcagcagcagcctggcaaggcccctagatacctgatgaaggtggaaggcagcggcagctacaacaaaggctctggcatccccgagagattcagcggcagttctagcggagccgaccgctacctgaccatcagcaatctccagagcgaggacgaggccgactactactgcgagacatgggacagcaacacccacgtgttcggcaccggcaccaaagtgacagttcttggcggaggcggaagtggaggcggaggatctggcggcggaggctctgaagttcagctggttcagagcggcgctgaagtgaagaaacctggggcctctgtgaaggtgtcctgcaaggcttccggctacacctttaccagctactacatgcactgggtccgacaggcccctggacaaggacttgagtggatgggcatcatcaaccccagcggcggcagaacaagctacgcccagaaattccagggcagagtgaccatgaccagagacacctctaccggcaccgtgtacatggaactgagcagcctgagaagcgaggacaccgccgtgtactactgtgccagaagccactgttctggcggcagctgctacagcatcgactattggggccagggcaccctggtcacagtctcttctacgcgtaaaattgaagttatgtatcctcctccttacctagacaatgagaagagcaatggaaccattatccatgtgaaaggggcgcgtgtcgagaaagaacatccacagcttggcgctggcaccgtcctgttgcttagagccggattctatgccgtcagcttcctgtccgtggctgtggggtctacagtgtattaccagggaaaatgtctcacctggaaaggccccagacgccagcttccagctgttgttcctgctccactgccaccaccttgtggctcctctgctcacttgcttccaccagtgcctggcgga

SEQ ID NO: 3634 - DNA, 1362 bp, synthetic construct
  source 1..1362: mol_type = other DNA
atggccttaccagtgaccgccttgctcctgccgctggccttgctgctccacgccgccaggccgcagcctgtgctgacacagtctagtagcgcctctgcctctctgggcagcagcgtgaagctgacctgtacactgtctagcggccacagcagctacatcattgcctggcatcagcagcagcctggcaaggcccctagatacctgatgaaggtggaaggcagcggcagctacaacaaaggctctggcatccccgagagattcagcggcagttctagcggagccgaccgctacctgaccatcagcaatctccagagcgaggacgaggccgactactactgcgagacatgggacagcaacacccacgtgttcggcaccggcaccaaagtgacagttcttggcggaggcggaagtggaggcggaggatctggcggcggaggctctgaagttcagctggttcagagcggcgctgaagtgaagaaacctggggcctctgtgaaggtgtcctgcaaggcttccggctacacctttaccagctactacatgcactgggtccgacaggcccctggacaaggacttgagtggatgggcatcatcaaccccagcggcggcagaacaagctacgcccagaaattccagggcagagtgaccatgaccagagacacctctaccggcaccgtgtacatggaactgagcagcctgagaagcgaggacaccgccgtgtactactgtgccagaagccactgttctggcggcagctgctacagcatcgactattggggccagggcaccctggtcacagtctcttctacgcgtaaaattgaagttatgtatcctcctccttacctagacaatgagaagagcaatggaaccattatccatgtgaaaggggcgcgtaagtctgtgcgcttttacctggtcgtcagccctgccagtgcctccactcagacatcttggaccccaagggaccttgtgtcctctcagacacagacacagtcctgcgtgccaccaactgctggcgcaagacaggctccagagtctcccagcacaatccccgtcccttctcagccccagaactccacacttaggccaggaccagctgctccaatcgcactggtcccagtgttctgcggactgctggttgccaagtctctggtgctgagcgcactcctcgtttggtggggcgatatttggtggaaaacgatgatggaattgagatccctcgatacgcagaaagccacatgccaccttcagcaagtcacagacttgccttggaccagcgtcagctctcccgtggaacgggaaattctgtatcatacagtggcccgcaccaagatttccgacgatgacgacgagcacacactg

SEQ ID NO: 3635 - DNA, 1173 bp, synthetic construct
  source 1..1173: mol_type = other DNA
atggccttaccagtgaccgccttgctcctgccgctggccttgctgctccacgccgccaggccgcagcctgtgctgacacagtctagtagcgcctctgcctctctgggcagcagcgtgaagctgacctgtacactgtctagcggccacagcagctacatcattgcctggcatcagcagcagcctggcaaggcccctagatacctgatgaaggtggaaggcagcggcagctacaacaaaggctctggcatccccgagagattcagcggcagttctagcggagccgaccgctacctgaccatcagcaatctccagagcgaggacgaggccgactactactgcgagacatgggacagcaacacccacgtgttcggcaccggcaccaaagtgacagttcttggcggaggcggaagtggaggcggaggatctggcggcggaggctctgaagttcagctggttcagagcggcgctgaagtgaagaaacctggggcctctgtgaaggtgtcctgcaaggcttccggctacacctttaccagctactacatgcactgggtccgacaggcccctggacaaggacttgagtggatgggcatcatcaaccccagcggcggcagaacaagctacgcccagaaattccagggcagagtgaccatgaccagagacacctctaccggcaccgtgtacatggaactgagcagcctgagaagcgaggacaccgccgtgtactactgtgccagaagccactgttctggcggcagctgctacagcatcgactattggggccagggcaccctggtcacagtctcttctacgcgtaaaattgaagttatgtatcctcctccttacctagacaatgagaagagcaatggaaccattatccatgtgaaaggggcgcgtggcgatattgagaatacctctctggccccagaagatcctacattccccgccgacacatggggaacatatctgctgacaaccgaaaccgggctgcaaaaggaccatgctctgtgggatcataccgctcagaatctgcttcggatggggcttgcattcctggtcctggtggctcttgtctggtttctggtcgaggactggctgtcccggaagagaaccagagaaagagcttccagggccagcacctgggaaggcagacgcagactgaatactcagaccctg

SEQ ID NO: 3636 - DNA, 2964 bp, synthetic construct
  source 1..2964: mol_type = other DNA
atggccttaccagtgaccgccttgctcctgccgctggccttgctgctccacgccgccaggccgcagcctgtgctgacacagtctagtagcgcctctgcctctctgggcagcagcgtgaagctgacctgtacactgtctagcggccacagcagctacatcattgcctggcatcagcagcagcctggcaaggcccctagatacctgatgaaggtggaaggcagcggcagctacaacaaaggctctggcatccccgagagattcagcggcagttctagcggagccgaccgctacctgaccatcagcaatctccagagcgaggacgaggccgactactactgcgagacatgggacagcaacacccacgtgttcggcaccggcaccaaagtgacagttcttctcgagggacagcctaaggccaatcctaccgtgacactgttccctccaagcagcgaagaactccaggccaacaaggccacacttgtgtgcctgatctccgacttctaccctggggctgtgacagtggcttggaaggccgatggatctcctgtgaaagccggcgtggaaaccaccaagccatccaagcagagcaacaacaaatacgccgccagctcctacctgagcctgacacctgagcagtggaagtcccacagatcctacagctgccaagtgacccacgaaggcagcaccgtggaaaagacagtggcccctacagagtgcagcggatcccagagcttcggcctgctggaccccaagctgtgctacctgctggatggcatcctgttcatctacggcgtgatcctgaccgccctgttcctgagagtgaagttcagcagaagcgccgacgcccctgcctaccagcagggacagaaccaactgtacaacgagctgaacctgggcagacgggaagagtacgacgtgctggacaagcggagaggcagggaccctgagatgggcggaaagccccagcggagaaagaacccccaggaaggactgtataacgaactccagaaagacaagatggccgaagcctacagcgagatcggcatgaagggcgagcggagaagaggcaagggccacgatggcctgtaccagggcctgagcaccgccaccaaggacacctatgacgccctgcacatgcaggccctgcctccaagaagggccaagcgatctggatctggagcaacaaacttctcactactcaaacaagcaggtgacgtggaggagaatcccgggcctactagtatggactggatttggcgcatccttttccttgtcggcgctgctaccggcgcgcattccttcgaagaagttcagctggttcagagcggcgctgaagtgaagaaacctggggcctctgtgaaggtgtcctgcaaggcttccggctacacctttaccagctactacatgcactgggtccgacaggcccctggacaaggacttgagtggatgggcatcatcaaccccagcggcggcagaacaagctacgcccagaaattccagggcagagtgaccatgaccagagacacctctaccggcaccgtgtacatggaactgagcagcctgagaagcgaggacaccgccgtgtactactgtgccagaagccactgttctggcggcagctgctacagcatcgactattggggccagggcaccctggtcacagtctcttctacgcgtgcctctacaaagggaccctccgtgtttcctctggctcccagcagcaagtctacaagcggaggaacagccgctctgggctgcctggtcaaggattactttcccgagcctgtgaccgtgtcctggaatagcggagcactgacaagcggcgtgcacacctttccagccgtgctgcaaagcagcggcctgtactctctgagcagcgtggtcacagtgcctagctctagcctgggcacccagacctacatctgcaatgtgaaccacaagcctagcaacaccaaggtggacaagagagtggaacccaagagctgtggtaccggcgacatcgagaacaccagtctggcccctgaggaccctacctttcctgccgatacctggggcacctacctgctgaccacagagacaggactccagaaagatcacgccctgtgggaccacacagcccagaacctgctgagaatgggcctcgcctttctggtgctggttgccctcgtgtggttcctggtggaagattggctgagccggaagcggacaagagagagagccagcagagcctctacctgggagggaagaagaaggctgaacacccagacacttagggccaagcgatctggatctggagcaacaaacttctcactactcaaacaagcaggtgacgtggaggagaatcccgggccttctagaggccatatgaccgagtacaagcccacggtgcgcctcgccacccgcgacgacgtccccagggccgtacgcaccctcgccgccgcgttcgccgactaccccgccacgcgccacaccgtcgatccggaccgccacatcgagcgggtcaccgagctgcaagaactcttcctcacgcgcgtcgggctcgacatcggcaaggtgtgggtcgcggacgacggcgccgcggtggcggtctggaccacgccggagagcgtcgaagcgggggcggtgttcgccgagatcggcccgcgcatggccgagttgagcggttcccggctggccgcgcagcaacagatggaaggcctcctggcgccgcaccggcccaaggagcccgcgtggttcctggccaccgtcggcgtctcgcccgaccaccagggcaagggtctgggcagcgccgtcgtgctccccggagtggaggcggccgagcgcgccggggtgcccgccttcctggagacctccgcgccccgcaacctccccttctacgagcggctcggcttcaccgtcaccgccgacgtcgaggtgcccgaaggaccgcgcacctggtgcatgacccgcaagcccggtgcctga

SEQ ID NO: 3637 - DNA, 3162 bp, synthetic construct
  source 1..3162: mol_type = other DNA
atggccttaccagtgaccgccttgctcctgccgctggccttgctgctccacgccgccaggccgcagcctgtgctgacacagtctagtagcgcctctgcctctctgggcagcagcgtgaagctgacctgtacactgtctagcggccacagcagctacatcattgcctggcatcagcagcagcctggcaaggcccctagatacctgatgaaggtggaaggcagcggcagctacaacaaaggctctggcatccccgagagattcagcggcagttctagcggagccgaccgctacctgaccatcagcaatctccagagcgaggacgaggccgactactactgcgagacatgggacagcaacacccacgtgttcggcaccggcaccaaagtgacagttcttctcgagggacagcctaaggccaatcctaccgtgacactgttccctccaagcagcgaagaactccaggccaacaaggccacacttgtgtgcctgatctccgacttctaccctggggctgtgacagtggcttggaaggccgatggatctcctgtgaaagccggcgtggaaaccaccaagccatccaagcagagcaacaacaaatacgccgccagctcctacctgagcctgacacctgagcagtggaagtcccacagatcctacagctgccaagtgacccacgaaggcagcaccgtggaaaagacagtggcccctacagagtgcagcggatcccagagcttcggcctgctggaccccaagctgtgctacctgctggatggcatcctgttcatctacggcgtgatcctgaccgccctgttcctgagagtgaagttcagcagaagcgccgacgcccctgcctaccagcagggacagaaccaactgtacaacgagctgaacctgggcagacgggaagagtacgacgtgctggacaagcggagaggcagggaccctgagatgggcggaaagccccagcggagaaagaacccccaggaaggactgtataacgaactccagaaagacaagatggccgaagcctacagcgagatcggcatgaagggcgagcggagaagaggcaagggccacgatggcctgtaccagggcctgagcaccgccaccaaggacacctatgacgccctgcacatgcaggccctgcctccaagaagggccaagcgatctggatctggagcaacaaacttctcactactcaaacaagcaggtgacgtggaggagaatcccgggcctactagtatggactggatttggcgcatccttttccttgtcggcgctgctaccggcgcgcattccttcgaagaagttcagctggttcagagcggcgctgaagtgaagaaacctggggcctctgtgaaggtgtcctgcaaggcttccggctacacctttaccagctactacatgcactgggtccgacaggcccctggacaaggacttgagtggatgggcatcatcaaccccagcggcggcagaacaagctacgcccagaaattccagggcagagtgaccatgaccagagacacctctaccggcaccgtgtacatggaactgagcagcctgagaagcgaggacaccgccgtgtactactgtgccagaagccactgttctggcggcagctgctacagcatcgactattggggccagggcaccctggtcacagtctcttctacgcgtgcctctacaaagggaccctccgtgtttcctctggctcccagcagcaagtctacaagcggaggaacagccgctctgggctgcctggtcaaggattactttcccgagcctgtgaccgtgtcctggaatagcggagcactgacaagcggcgtgcacacctttccagccgtgctgcaaagcagcggcctgtactctctgagcagcgtggtcacagtgcctagctctagcctgggcacccagacctacatctgcaatgtgaaccacaagcctagcaacaccaaggtggacaagagagtggaacccaagagctgtggtaccaagtctgtgcgcttttacctggtcgtcagccctgccagtgcctccactcagacatcttggaccccaagggaccttgtgtcctctcagacacagacacagtcctgcgtgccaccaactgctggcgcaagacaggctccagagtctcccagcacaatccccgtcccttctcagccccagaactccacacttaggccaggaccagctgctccaatcgcactggtcccagtgttctgcggactgctggttgccaagtctctggtgctgagcgcactcctcgtttggtggggcgatatttggtggaaaacgatgatggaattgagatccctcgatacgcagaaagccacatgccaccttcagcaagtcacagacttgccttggaccagcgtcagctctcccgtggaacgggaaattctgtatcatacagtggcccgcaccaagatttccgacgatgacgacgagcacacactgcgcgccaagagaagcggatctggcgtgaagcagaccctgaatttcgacctgctgaagctggctggcgacgtggaatccaacccaggcccttctagaggccatatgaccgagtacaagcccacggtgcgcctcgccacccgcgacgacgtccccagggccgtacgcaccctcgccgccgcgttcgccgactaccccgccacgcgccacaccgtcgatccggaccgccacatcgagcgggtcaccgagctgcaagaactcttcctcacgcgcgtcgggctcgacatcggcaaggtgtgggtcgcggacgacggcgccgcggtggcggtctggaccacgccggagagcgtcgaagcgggggcggtgttcgccgagatcggcccgcgcatggccgagttgagcggttcccggctggccgcgcagcaacagatggaaggcctcctggcgccgcaccggcccaaggagcccgcgtggttcctggccaccgtcggcgtctcgcccgaccaccagggcaagggtctgggcagcgccgtcgtgctccccggagtggaggcggccgagcgcgccggggtgcccgccttcctggagacctccgcgccccgcaacctccccttctacgagcggctcggcttcaccgtcaccgccgacgtcgaggtgcccgaaggaccgcgcacctggtgcatgacccgcaagcccggtgcctga

SEQ ID NO: 3638 - DNA, 2922 bp, synthetic construct
  source 1..2922: mol_type = other DNA
atggccttaccagtgaccgccttgctcctgccgctggccttgctgctccacgccgccaggccgcagcctgtgctgacacagtctagtagcgcctctgcctctctgggcagcagcgtgaagctgacctgtacactgtctagcggccacagcagctacatcattgcctggcatcagcagcagcctggcaaggcccctagatacctgatgaaggtggaaggcagcggcagctacaacaaaggctctggcatccccgagagattcagcggcagttctagcggagccgaccgctacctgaccatcagcaatctccagagcgaggacgaggccgactactactgcgagacatgggacagcaacacccacgtgttcggcaccggcaccaaagtgacagttcttctcgagggacagcctaaggccaatcctaccgtgacactgttccctccaagcagcgaagaactccaggccaacaaggccacacttgtgtgcctgatctccgacttctaccctggggctgtgacagtggcttggaaggccgatggatctcctgtgaaagccggcgtggaaaccaccaagccatccaagcagagcaacaacaaatacgccgccagctcctacctgagcctgacacctgagcagtggaagtcccacagatcctacagctgccaagtgacccacgaaggcagcaccgtggaaaagacagtggcccctacagagtgcagcggatcccagagcttcggcctgctggaccccaagctgtgctacctgctggatggcatcctgttcatctacggcgtgatcctgaccgccctgttcctgagagtgaagttcagcagaagcgccgacgcccctgcctaccagcagggacagaaccaactgtacaacgagctgaacctgggcagacgggaagagtacgacgtgctggacaagcggagaggcagggaccctgagatgggcggaaagccccagcggagaaagaacccccaggaaggactgtataacgaactccagaaagacaagatggccgaagcctacagcgagatcggcatgaagggcgagcggagaagaggcaagggccacgatggcctgtaccagggcctgagcaccgccaccaaggacacctatgacgccctgcacatgcaggccctgcctccaagaagggccaagcgatctggatctggagcaacaaacttctcactactcaaacaagcaggtgacgtggaggagaatcccgggcctactagtatggactggatttggcgcatccttttccttgtcggcgctgctaccggcgcgcattccttcgaagaagttcagctggttcagagcggcgctgaagtgaagaaacctggggcctctgtgaaggtgtcctgcaaggcttccggctacacctttaccagctactacatgcactgggtccgacaggcccctggacaaggacttgagtggatgggcatcatcaaccccagcggcggcagaacaagctacgcccagaaattccagggcagagtgaccatgaccagagacacctctaccggcaccgtgtacatggaactgagcagcctgagaagcgaggacaccgccgtgtactactgtgccagaagccactgttctggcggcagctgctacagcatcgactattggggccagggcaccctggtcacagtctcttctacgcgtgcctctacaaagggaccctccgtgtttcctctggctcccagcagcaagtctacaagcggaggaacagccgctctgggctgcctggtcaaggattactttcccgagcctgtgaccgtgtcctggaatagcggagcactgacaagcggcgtgcacacctttccagccgtgctgcaaagcagcggcctgtactctctgagcagcgtggtcacagtgcctagctctagcctgggcacccagacctacatctgcaatgtgaaccacaagcctagcaacaccaaggtggacaagagagtggaacccaagagctgtggtaccgtggtcgagaaagaacatccacagcttggcgctggcaccgtcctgttgcttagagccggattctatgccgtcagcttcctgtccgtggctgtggggtctacagtgtattaccagggaaaatgtctcacctggaaaggccccagacgccagcttccagctgttgttcctgctccactgccaccaccttgtggctcctctgctcacttgcttccaccagtgcctggcggacgcgccaagagaagcggatctggcgtgaagcagaccctgaatttcgacctgctgaagctggctggcgacgtggaatccaacccaggcccttctagaggccatatgaccgagtacaagcccacggtgcgcctcgccacccgcgacgacgtccccagggccgtacgcaccctcgccgccgcgttcgccgactaccccgccacgcgccacaccgtcgatccggaccgccacatcgagcgggtcaccgagctgcaagaactcttcctcacgcgcgtcgggctcgacatcggcaaggtgtgggtcgcggacgacggcgccgcggtggcggtctggaccacgccggagagcgtcgaagcgggggcggtgttcgccgagatcggcccgcgcatggccgagttgagcggttcccggctggccgcgcagcaacagatggaaggcctcctggcgccgcaccggcccaaggagcccgcgtggttcctggccaccgtcggcgtctcgcccgaccaccagggcaagggtctgggcagcgccgtcgtgctccccggagtggaggcggccgagcgcgccggggtgcccgccttcctggagacctccgcgccccgcaacctccccttctacgagcggctcggcttcaccgtcaccgccgacgtcgaggtgcccgaaggaccgcgcacctggtgcatgacccgcaagcccggtgcctga

SEQ ID NO: 3639 - DNA, 3009 bp, synthetic construct
  source 1..3009: mol_type = other DNA
atggccttaccagtgaccgccttgctcctgccgctggccttgctgctccacgccgccaggccgcagcctgtgctgacacagtctagtagcgcctctgcctctctgggcagcagcgtgaagctgacctgtacactgtctagcggccacagcagctacatcattgcctggcatcagcagcagcctggcaaggcccctagatacctgatgaaggtggaaggcagcggcagctacaacaaaggctctggcatccccgagagattcagcggcagttctagcggagccgaccgctacctgaccatcagcaatctccagagcgaggacgaggccgactactactgcgagacatgggacagcaacacccacgtgttcggcaccggcaccaaagtgacagttcttctcgaggacctgaagaacgtgttcccacctgaggtggccgtgttcgagcctagcgaggccgagatcagccacacccagaaagccaccctcgtgtgcctggctaccggcttctaccccgaccatgtggaactgtcttggtgggtcaacggcaaagaggtgcacagcggcgtgtctaccgacccccagccactgaaagaacagcccgccctgaacgacagccggtactgcctgagcagcagactgagagtgtccgccaccttctggcagaacccccggaaccacttcagatgccaggtgcagttctacggcctgagcgagaacgacgagtggacccaggacagagccaagcccgtgacccagatcgtgtctgccgaagcctggggcagagccgattgcggatcccagagcttcggcctgctggaccccaagctgtgctacctgctggatggcatcctgttcatctacggcgtgatcctgaccgccctgttcctgagagtgaagttcagcagaagcgccgacgcccctgcctaccagcagggacagaaccaactgtacaacgagctgaacctgggcagacgggaagagtacgacgtgctggacaagcggagaggcagggaccctgagatgggcggaaagccccagcggagaaagaacccccaggaaggactgtataacgaactccagaaagacaagatggccgaagcctacagcgagatcggcatgaagggcgagcggagaagaggcaagggccacgatggcctgtaccagggcctgagcaccgccaccaaggacacctatgacgccctgcacatgcaggccctgcctccaagaagggccaagcgatctggatctggagcaacaaacttctcactactcaaacaagcaggtgacgtggaggagaatcccgggcctactagtatggactggatttggcgcatccttttccttgtcggcgctgctaccggcgcgcattccttcgaagaagttcagctggttcagagcggcgctgaagtgaagaaacctggggcctctgtgaaggtgtcctgcaaggcttccggctacacctttaccagctactacatgcactgggtccgacaggcccctggacaaggacttgagtggatgggcatcatcaaccccagcggcggcagaacaagctacgcccagaaattccagggcagagtgaccatgaccagagacacctctaccggcaccgtgtacatggaactgagcagcctgagaagcgaggacaccgccgtgtactactgtgccagaagccactgttctggcggcagctgctacagcatcgactattggggccagggcaccctggtcacagtctcttctacgcgtatccagaaccctgatcctgccgtgtaccagctgcgggatagcaagagcagcgacaagagcgtgtgtctgttcaccgacttcgacagccagaccaacgtgtcccagagcaaggactccgacgtgtacatcaccgataagaccgtgctggacatgcggagcatggacttcaagagcaactccgccgtggcctggtccaacaagtccgatttcgcctgcgccaacgccttcaacaacagcattatccccgaggacacattcttcccaagccccgagagcagctgcggtaccggcgacatcgagaacaccagtctggcccctgaggaccctacctttcctgccgatacctggggcacctacctgctgaccacagagacaggactccagaaagatcacgccctgtgggaccacacagcccagaacctgctgagaatgggcctcgcctttctggtgctggttgccctcgtgtggttcctggtggaagattggctgagccggaagcggacaagagagagagccagcagagcctctacctgggagggaagaagaaggctgaacacccagacacttagggccaagcgatctggatctggagcaacaaacttctcactactcaaacaagcaggtgacgtggaggagaatcccgggccttctagaggccatatgaccgagtacaagcccacggtgcgcctcgccacccgcgacgacgtccccagggccgtacgcaccctcgccgccgcgttcgccgactaccccgccacgcgccacaccgtcgatccggaccgccacatcgagcgggtcaccgagctgcaagaactcttcctcacgcgcgtcgggctcgacatcggcaaggtgtgggtcgcggacgacggcgccgcggtggcggtctggaccacgccggagagcgtcgaagcgggggcggtgttcgccgagatcggcccgcgcatggccgagttgagcggttcccggctggccgcgcagcaacagatggaaggcctcctggcgccgcaccggcccaaggagcccgcgtggttcctggccaccgtcggcgtctcgcccgaccaccagggcaagggtctgggcagcgccgtcgtgctccccggagtggaggcggccgagcgcgccggggtgcccgccttcctggagacctccgcgccccgcaacctccccttctacgagcggctcggcttcaccgtcaccgccgacgtcgaggtgcccgaaggaccgcgcacctggtgcatgacccgcaagcccggtgcctga

SEQ ID NO: 3640 - DNA, 3207 bp, synthetic construct
  source 1..3207: mol_type = other DNA
atggccttaccagtgaccgccttgctcctgccgctggccttgctgctccacgccgccaggccgcagcctgtgctgacacagtctagtagcgcctctgcctctctgggcagcagcgtgaagctgacctgtacactgtctagcggccacagcagctacatcattgcctggcatcagcagcagcctggcaaggcccctagatacctgatgaaggtggaaggcagcggcagctacaacaaaggctctggcatccccgagagattcagcggcagttctagcggagccgaccgctacctgaccatcagcaatctccagagcgaggacgaggccgactactactgcgagacatgggacagcaacacccacgtgttcggcaccggcaccaaagtgacagttcttctcgaggacctgaagaacgtgttcccacctgaggtggccgtgttcgagcctagcgaggccgagatcagccacacccagaaagccaccctcgtgtgcctggctaccggcttctaccccgaccatgtggaactgtcttggtgggtcaacggcaaagaggtgcacagcggcgtgtctaccgacccccagccactgaaagaacagcccgccctgaacgacagccggtactgcctgagcagcagactgagagtgtccgccaccttctggcagaacccccggaaccacttcagatgccaggtgcagttctacggcctgagcgagaacgacgagtggacccaggacagagccaagcccgtgacccagatcgtgtctgccgaagcctggggcagagccgattgcggatcccagagcttcggcctgctggaccccaagctgtgctacctgctggatggcatcctgttcatctacggcgtgatcctgaccgccctgttcctgagagtgaagttcagcagaagcgccgacgcccctgcctaccagcagggacagaaccaactgtacaacgagctgaacctgggcagacgggaagagtacgacgtgctggacaagcggagaggcagggaccctgagatgggcggaaagccccagcggagaaagaacccccaggaaggactgtataacgaactccagaaagacaagatggccgaagcctacagcgagatcggcatgaagggcgagcggagaagaggcaagggccacgatggcctgtaccagggcctgagcaccgccaccaaggacacctatgacgccctgcacatgcaggccctgcctccaagaagggccaagcgatctggatctggagcaacaaacttctcactactcaaacaagcaggtgacgtggaggagaatcccgggcctactagtatggactggatttggcgcatccttttccttgtcggcgctgctaccggcgcgcattccttcgaagaagttcagctggttcagagcggcgctgaagtgaagaaacctggggcctctgtgaaggtgtcctgcaaggcttccggctacacctttaccagctactacatgcactgggtccgacaggcccctggacaaggacttgagtggatgggcatcatcaaccccagcggcggcagaacaagctacgcccagaaattccagggcagagtgaccatgaccagagacacctctaccggcaccgtgtacatggaactgagcagcctgagaagcgaggacaccgccgtgtactactgtgccagaagccactgttctggcggcagctgctacagcatcgactattggggccagggcaccctggtcacagtctcttctacgcgtatccagaaccctgatcctgccgtgtaccagctgcgggatagcaagagcagcgacaagagcgtgtgtctgttcaccgacttcgacagccagaccaacgtgtcccagagcaaggactccgacgtgtacatcaccgataagaccgtgctggacatgcggagcatggacttcaagagcaactccgccgtggcctggtccaacaagtccgatttcgcctgcgccaacgccttcaacaacagcattatccccgaggacacattcttcccaagccccgagagcagctgcggtaccaagtctgtgcgcttttacctggtcgtcagccctgccagtgcctccactcagacatcttggaccccaagggaccttgtgtcctctcagacacagacacagtcctgcgtgccaccaactgctggcgcaagacaggctccagagtctcccagcacaatccccgtcccttctcagccccagaactccacacttaggccaggaccagctgctccaatcgcactggtcccagtgttctgcggactgctggttgccaagtctctggtgctgagcgcactcctcgtttggtggggcgatatttggtggaaaacgatgatggaattgagatccctcgatacgcagaaagccacatgccaccttcagcaagtcacagacttgccttggaccagcgtcagctctcccgtggaacgggaaattctgtatcatacagtggcccgcaccaagatttccgacgatgacgacgagcacacactgcgcgccaagagaagcggatctggcgtgaagcagaccctgaatttcgacctgctgaagctggctggcgacgtggaatccaacccaggcccttctagaggccatatgaccgagtacaagcccacggtgcgcctcgccacccgcgacgacgtccccagggccgtacgcaccctcgccgccgcgttcgccgactaccccgccacgcgccacaccgtcgatccggaccgccacatcgagcgggtcaccgagctgcaagaactcttcctcacgcgcgtcgggctcgacatcggcaaggtgtgggtcgcggacgacggcgccgcggtggcggtctggaccacgccggagagcgtcgaagcgggggcggtgttcgccgagatcggcccgcgcatggccgagttgagcggttcccggctggccgcgcagcaacagatggaaggcctcctggcgccgcaccggcccaaggagcccgcgtggttcctggccaccgtcggcgtctcgcccgaccaccagggcaagggtctgggcagcgccgtcgtgctccccggagtggaggcggccgagcgcgccggggtgcccgccttcctggagacctccgcgccccgcaacctccccttctacgagcggctcggcttcaccgtcaccgccgacgtcgaggtgcccgaaggaccgcgcacctggtgcatgacccgcaagcccggtgcctga

SEQ ID NO: 3641 - DNA, 2967 bp, synthetic construct
  source 1..2967: mol_type = other DNA
atggccttaccagtgaccgccttgctcctgccgctggccttgctgctccacgccgccaggccgcagcctgtgctgacacagtctagtagcgcctctgcctctctgggcagcagcgtgaagctgacctgtacactgtctagcggccacagcagctacatcattgcctggcatcagcagcagcctggcaaggcccctagatacctgatgaaggtggaaggcagcggcagctacaacaaaggctctggcatccccgagagattcagcggcagttctagcggagccgaccgctacctgaccatcagcaatctccagagcgaggacgaggccgactactactgcgagacatgggacagcaacacccacgtgttcggcaccggcaccaaagtgacagttcttctcgaggacctgaagaacgtgttcccacctgaggtggccgtgttcgagcctagcgaggccgagatcagccacacccagaaagccaccctcgtgtgcctggctaccggcttctaccccgaccatgtggaactgtcttggtgggtcaacggcaaagaggtgcacagcggcgtgtctaccgacccccagccactgaaagaacagcccgccctgaacgacagccggtactgcctgagcagcagactgagagtgtccgccaccttctggcagaacccccggaaccacttcagatgccaggtgcagttctacggcctgagcgagaacgacgagtggacccaggacagagccaagcccgtgacccagatcgtgtctgccgaagcctggggcagagccgattgcggatcccagagcttcggcctgctggaccccaagctgtgctacctgctggatggcatcctgttcatctacggcgtgatcctgaccgccctgttcctgagagtgaagttcagcagaagcgccgacgcccctgcctaccagcagggacagaaccaactgtacaacgagctgaacctgggcagacgggaagagtacgacgtgctggacaagcggagaggcagggaccctgagatgggcggaaagccccagcggagaaagaacccccaggaaggactgtataacgaactccagaaagacaagatggccgaagcctacagcgagatcggcatgaagggcgagcggagaagaggcaagggccacgatggcctgtaccagggcctgagcaccgccaccaaggacacctatgacgccctgcacatgcaggccctgcctccaagaagggccaagcgatctggatctggagcaacaaacttctcactactcaaacaagcaggtgacgtggaggagaatcccgggcctactagtatggactggatttggcgcatccttttccttgtcggcgctgctaccggcgcgcattccttcgaagaagttcagctggttcagagcggcgctgaagtgaagaaacctggggcctctgtgaaggtgtcctgcaaggcttccggctacacctttaccagctactacatgcactgggtccgacaggcccctggacaaggacttgagtggatgggcatcatcaaccccagcggcggcagaacaagctacgcccagaaattccagggcagagtgaccatgaccagagacacctctaccggcaccgtgtacatggaactgagcagcctgagaagcgaggacaccgccgtgtactactgtgccagaagccactgttctggcggcagctgctacagcatcgactattggggccagggcaccctggtcacagtctcttctacgcgtatccagaaccctgatcctgccgtgtaccagctgcgggatagcaagagcagcgacaagagcgtgtgtctgttcaccgacttcgacagccagaccaacgtgtcccagagcaaggactccgacgtgtacatcaccgataagaccgtgctggacatgcggagcatggacttcaagagcaactccgccgtggcctggtccaacaagtccgatttcgcctgcgccaacgccttcaacaacagcattatccccgaggacacattcttcccaagccccgagagcagctgcggtaccgtggtcgagaaagaacatccacagcttggcgctggcaccgtcctgttgcttagagccggattctatgccgtcagcttcctgtccgtggctgtggggtctacagtgtattaccagggaaaatgtctcacctggaaaggccccagacgccagcttccagctgttgttcctgctccactgccaccaccttgtggctcctctgctcacttgcttccaccagtgcctggcggacgcgccaagagaagcggatctggcgtgaagcagaccctgaatttcgacctgctgaagctggctggcgacgtggaatccaacccaggcccttctagaggccatatgaccgagtacaagcccacggtgcgcctcgccacccgcgacgacgtccccagggccgtacgcaccctcgccgccgcgttcgccgactaccccgccacgcgccacaccgtcgatccggaccgccacatcgagcgggtcaccgagctgcaagaactcttcctcacgcgcgtcgggctcgacatcggcaaggtgtgggtcgcggacgacggcgccgcggtggcggtctggaccacgccggagagcgtcgaagcgggggcggtgttcgccgagatcggcccgcgcatggccgagttgagcggttcccggctggccgcgcagcaacagatggaaggcctcctggcgccgcaccggcccaaggagcccgcgtggttcctggccaccgtcggcgtctcgcccgaccaccagggcaagggtctgggcagcgccgtcgtgctccccggagtggaggcggccgagcgcgccggggtgcccgccttcctggagacctccgcgccccgcaacctccccttctacgagcggctcggcttcaccgtcaccgccgacgtcgaggtgcccgaaggaccgcgcacctggtgcatgacccgcaagcccggtgcctga

SEQ ID NO: 3642 - DNA, 2880 bp, synthetic construct
  source 1..2880: mol_type = other DNA
atggccttaccagtgaccgccttgctcctgccgctggccttgctgctccacgccgccaggccgcagcctgtgctgacacagtctagtagcgcctctgcctctctgggcagcagcgtgaagctgacctgtacactgtctagcggccacagcagctacatcattgcctggcatcagcagcagcctggcaaggcccctagatacctgatgaaggtggaaggcagcggcagctacaacaaaggctctggcatccccgagagattcagcggcagttctagcggagccgaccgctacctgaccatcagcaatctccagagcgaggacgaggccgactactactgcgagacatgggacagcaacacccacgtgttcggcaccggcaccaaagtgacagttcttctcgagggacagcctaaggccaatcctaccgtgacactgttccctccaagcagcgaagaactccaggccaacaaggccacacttgtgtgcctgatctccgacttctaccctggggctgtgacagtggcttggaaggccgatggatctcctgtgaaagccggcgtggaaaccaccaagccatccaagcagagcaacaacaaatacgccgccagctcctacctgagcctgacacctgagcagtggaagtcccacagatcctacagctgccaagtgacccacgaaggcagcaccgtggaaaagacagtggcccctacagagtgcagcggatcccagagcttcggcctgctggaccccaagctgtgctacctgctggatggcatcctgttcatctacggcgtgatcctgaccgccctgttcctgagagtgaagttcagcagaagcgccgacgcccctgcctaccagcagggacagaaccaactgtacaacgagctgaacctgggcagacgggaagagtacgacgtgctggacaagcggagaggcagggaccctgagatgggcggaaagccccagcggagaaagaacccccaggaaggactgtataacgaactccagaaagacaagatggccgaagcctacagcgagatcggcatgaagggcgagcggagaagaggcaagggccacgatggcctgtaccagggcctgagcaccgccaccaaggacacctatgacgccctgcacatgcaggccctgcctccaagaagggccaagcgatctggatctggagcaacaaacttctcactactcaaacaagcaggtgacgtggaggagaatcccgggcctactagtatggactggatttggcgcatccttttccttgtcggcgctgctaccggcgcgcattccttcgaagaagttcagctggttcagagcggcgctgaagtgaagaaacctggggcctctgtgaaggtgtcctgcaaggcttccggctacacctttaccagctactacatgcactgggtccgacaggcccctggacaaggacttgagtggatgggcatcatcaaccccagcggcggcagaacaagctacgcccagaaattccagggcagagtgaccatgaccagagacacctctaccggcaccgtgtacatggaactgagcagcctgagaagcgaggacaccgccgtgtactactgtgccagaagccactgttctggcggcagctgctacagcatcgactattggggccagggcaccctggtcacagtctcttctacgcgtgcctctacaaagggaccctccgtgtttcctctggctcccagcagcaagtctacaagcggaggaacagccgctctgggctgcctggtcaaggattactttcccgagcctgtgaccgtgtcctggaatagcggagcactgacaagcggcgtgcacacctttccagccgtgctgcaaagcagcggcctgtactctctgagcagcgtggtcacagtgcctagctctagcctgggcacccagacctacatctgcaatgtgaaccacaagcctagcaacaccaaggtggacaagagagtggaacccaagagctgtggtaccatcactcaaggtttggcagtgtcaaccatctcatcattctttccacctggctaccaagtgtccttctgcctggtcatggtgctgctgttcgccgtggataccggcctgtacttcagcgtcaagaccaacatccggtccagcaccagagactggaaggaccacaagttcaagtggcggaaggaccctcaggacaagagggccaagcgatctggatctggagcaacaaacttctcactactcaaacaagcaggtgacgtggaggagaatcccgggccttctagaggccatatgaccgagtacaagcccacggtgcgcctcgccacccgcgacgacgtccccagggccgtacgcaccctcgccgccgcgttcgccgactaccccgccacgcgccacaccgtcgatccggaccgccacatcgagcgggtcaccgagctgcaagaactcttcctcacgcgcgtcgggctcgacatcggcaaggtgtgggtcgcggacgacggcgccgcggtggcggtctggaccacgccggagagcgtcgaagcgggggcggtgttcgccgagatcggcccgcgcatggccgagttgagcggttcccggctggccgcgcagcaacagatggaaggcctcctggcgccgcaccggcccaaggagcccgcgtggttcctggccaccgtcggcgtctcgcccgaccaccagggcaagggtctgggcagcgccgtcgtgctccccggagtggaggcggccgagcgcgccggggtgcccgccttcctggagacctccgcgccccgcaacctccccttctacgagcggctcggcttcaccgtcaccgccgacgtcgaggtgcccgaaggaccgcgcacctggtgcatgacccgcaagcccggtgcctga

SEQ ID NO: 3643 - DNA, 2925 bp, synthetic construct
  source 1..2925: mol_type = other DNA
atggccttaccagtgaccgccttgctcctgccgctggccttgctgctccacgccgccaggccgcagcctgtgctgacacagtctagtagcgcctctgcctctctgggcagcagcgtgaagctgacctgtacactgtctagcggccacagcagctacatcattgcctggcatcagcagcagcctggcaaggcccctagatacctgatgaaggtggaaggcagcggcagctacaacaaaggctctggcatccccgagagattcagcggcagttctagcggagccgaccgctacctgaccatcagcaatctccagagcgaggacgaggccgactactactgcgagacatgggacagcaacacccacgtgttcggcaccggcaccaaagtgacagttcttctcgaggacctgaagaacgtgttcccacctgaggtggccgtgttcgagcctagcgaggccgagatcagccacacccagaaagccaccctcgtgtgcctggctaccggcttctaccccgaccatgtggaactgtcttggtgggtcaacggcaaagaggtgcacagcggcgtgtctaccgacccccagccactgaaagaacagcccgccctgaacgacagccggtactgcctgagcagcagactgagagtgtccgccaccttctggcagaacccccggaaccacttcagatgccaggtgcagttctacggcctgagcgagaacgacgagtggacccaggacagagccaagcccgtgacccagatcgtgtctgccgaagcctggggcagagccgattgcggatcccagagcttcggcctgctggaccccaagctgtgctacctgctggatggcatcctgttcatctacggcgtgatcctgaccgccctgttcctgagagtgaagttcagcagaagcgccgacgcccctgcctaccagcagggacagaaccaactgtacaacgagctgaacctgggcagacgggaagagtacgacgtgctggacaagcggagaggcagggaccctgagatgggcggaaagccccagcggagaaagaacccccaggaaggactgtataacgaactccagaaagacaagatggccgaagcctacagcgagatcggcatgaagggcgagcggagaagaggcaagggccacgatggcctgtaccagggcctgagcaccgccaccaaggacacctatgacgccctgcacatgcaggccctgcctccaagaagggccaagcgatctggatctggagcaacaaacttctcactactcaaacaagcaggtgacgtggaggagaatcccgggcctactagtatggactggatttggcgcatccttttccttgtcggcgctgctaccggcgcgcattccttcgaagaagttcagctggttcagagcggcgctgaagtgaagaaacctggggcctctgtgaaggtgtcctgcaaggcttccggctacacctttaccagctactacatgcactgggtccgacaggcccctggacaaggacttgagtggatgggcatcatcaaccccagcggcggcagaacaagctacgcccagaaattccagggcagagtgaccatgaccagagacacctctaccggcaccgtgtacatggaactgagcagcctgagaagcgaggacaccgccgtgtactactgtgccagaagccactgttctggcggcagctgctacagcatcgactattggggccagggcaccctggtcacagtctcttctacgcgtatccagaaccctgatcctgccgtgtaccagctgcgggatagcaagagcagcgacaagagcgtgtgtctgttcaccgacttcgacagccagaccaacgtgtcccagagcaaggactccgacgtgtacatcaccgataagaccgtgctggacatgcggagcatggacttcaagagcaactccgccgtggcctggtccaacaagtccgatttcgcctgcgccaacgccttcaacaacagcattatccccgaggacacattcttcccaagccccgagagcagctgcggtaccatcactcaaggtttggcagtgtcaaccatctcatcattctttccacctggctaccaagtgtccttctgcctggtcatggtgctgctgttcgccgtggataccggcctgtacttcagcgtcaagaccaacatccggtccagcaccagagactggaaggaccacaagttcaagtggcggaaggaccctcaggacaagagggccaagcgatctggatctggagcaacaaacttctcactactcaaacaagcaggtgacgtggaggagaatcccgggccttctagaggccatatgaccgagtacaagcccacggtgcgcctcgccacccgcgacgacgtccccagggccgtacgcaccctcgccgccgcgttcgccgactaccccgccacgcgccacaccgtcgatccggaccgccacatcgagcgggtcaccgagctgcaagaactcttcctcacgcgcgtcgggctcgacatcggcaaggtgtgggtcgcggacgacggcgccgcggtggcggtctggaccacgccggagagcgtcgaagcgggggcggtgttcgccgagatcggcccgcgcatggccgagttgagcggttcccggctggccgcgcagcaacagatggaaggcctcctggcgccgcaccggcccaaggagcccgcgtggttcctggccaccgtcggcgtctcgcccgaccaccagggcaagggtctgggcagcgccgtcgtgctccccggagtggaggcggccgagcgcgccggggtgcccgccttcctggagacctccgcgccccgcaacctccccttctacgagcggctcggcttcaccgtcaccgccgacgtcgaggtgcccgaaggaccgcgcacctggtgcatgacccgcaagcccggtgcctga

SEQ ID NO: 3644 - DNA, 1974 bp, synthetic construct
  source 1..1974: mol_type = other DNA
atggccttaccagtgaccgccttgctcctgccgctggccttgctgctccacgccgccaggccgcagcctgtgctgacacagtctagtagcgcctctgcctctctgggcagcagcgtgaagctgacctgtacactgtctagcggccacagcagctacatcattgcctggcatcagcagcagcctggcaaggcccctagatacctgatgaaggtggaaggcagcggcagctacaacaaaggctctggcatccccgagagattcagcggcagttctagcggagccgaccgctacctgaccatcagcaatctccagagcgaggacgaggccgactactactgcgagacatgggacagcaacacccacgtgttcggcaccggcaccaaagtgacagttcttctcgagggacagcctaaggccaatcctaccgtgacactgttccctccaagcagcgaagaactccaggccaacaaggccacacttgtgtgcctgatctccgacttctaccctggggctgtgacagtggcttggaaggccgatggatctcctgtgaaagccggcgtggaaaccaccaagccatccaagcagagcaacaacaaatacgccgccagctcctacctgagcctgacacctgagcagtggaagtcccacagatcctacagctgccaagtgacccacgaaggcagcaccgtggaaaagacagtggcccctacagagtgcagcggatccctgggagagcctcagctgtgctatatcctggacgccatcctgtttctgtacggcatcgtgctgaccctgctgtactgccggctgaagatccaagtgcggaaggccgccatcaccagctacgagaaatccgacggcgtgtacaccggcctgagcaccagaaatcaagagacatacgagacactgaagcacgaaaagcctccacaaagggccaagcgatctggatctggagcaacaaacttctcactactcaaacaagcaggtgacgtggaggagaatcccgggcctactagtatggactggatttggcgcatccttttccttgtcggcgctgctaccggcgcgcattccttcgaagaagttcagctggttcagagcggcgctgaagtgaagaaacctggggcctctgtgaaggtgtcctgcaaggcttccggctacacctttaccagctactacatgcactgggtccgacaggcccctggacaaggacttgagtggatgggcatcatcaaccccagcggcggcagaacaagctacgcccagaaattccagggcagagtgaccatgaccagagacacctctaccggcaccgtgtacatggaactgagcagcctgagaagcgaggacaccgccgtgtactactgtgccagaagccactgttctggcggcagctgctacagcatcgactattggggccagggcaccctggtcacagtctcttctacgcgtgcctctacaaagggaccctccgtgtttcctctggctcccagcagcaagtctacaagcggaggaacagccgctctgggctgcctggtcaaggattactttcccgagcctgtgaccgtgtcctggaatagcggagcactgacaagcggcgtgcacacctttccagccgtgctgcaaagcagcggcctgtactctctgagcagcgtggtcacagtgcctagctctagcctgggcacccagacctacatctgcaatgtgaaccacaagcctagcaacaccaaggtggacaagagagtggaacccaagagctgtggtaccctcggagaaccacagctctgttacattctggatgctatcctgttcctctatgggatcgtcctgacactcctgtattgcagactcaaaattcaagttcgcaaagccgccattacctcttacgagaagagtgatggggtgtacacaggactgtctacccggaatcaagaaacctacgaaaccctcaaacatgagaagccacctcagtaa

SEQ ID NO: 3645 - DNA, 1497 bp, synthetic construct
  source 1..1497: mol_type = other DNA
atggccttaccagtgaccgccttgctcctgccgctggccttgctgctccacgccgccaggccggacatcgtgatgacacagagccctagcagcctgacagtgacagccggcgagaaagtgaccatgagctgcaagagcagccagagcctgctgaacagcggcaaccagaagaactacctgacctggtatcagcagaagcccggccagcctcctaagctgctgatctactgggccagcaccagagaaagcggcgtgcccgatagattcacaggcagcggcagcggaaccgacttcaccctgacaatcagctctgtgcaggccgaggatctggccgtgtactactgccagaacgactacagctaccctctgacctttggagccggcaccaagctggaacttaaaggcggaggcggaagtggaggcggaggatctggcggcggaggctctcaaattcagctggtgcagtctggccccgagctgaagaaacctggcgagacagtgaagatttcctgcaaggccagcggctacaccttcaccaactacggcatgaactgggtcaagcaggcccctggcaagggcctgaaatggatgggctggatcaacaccaacaccggcgagcctacctacgccgaagagttcaagggcagattcgccttcagcctggaaaccagcgccagcacagcctacctccagatcaacaacctgaagaacgaggacaccgccacctacttttgcgccagactcggcttcggcaacgctatggattattggggccagggcaccagcgtgaccgtttcttctacgcgtgagcagaaactgatctcggaagaggatctgaaaattgaagttatgtatcctcctccttacctagacaatgagaagagcaatggaaccattatccatgtgaaagggaaacacctttgtccaagtcccctatttcccggaccttctaagcccttttgggtgctggtggtggttgggggagtcctggcttgctatagcttgctagtaacagtggcctttattattttctgggtgaggagtaagaggagcaggctcctgcacagtgactacatgaacatgactccacgccgccccggacccacccgcaagcattaccagccctatgccccaccacgcgacttcgcagcctatcgctccagagtgaagttcagcaggagcgcagacgcccccgcgtaccagcagggccagaaccagctctataacgagctcaatctaggacgaagagaggagtacgatgttttggacaagagacgtggccgggaccctgagatggggggaaagccgagaaggaagaaccctcaggaaggcctgtacaatgaactgcagaaagataagatggcggaggcctacagtgagattgggatgaaaggcgagcgccggaggggcaaggggcacgatggcctttaccagggtctcagtacagccaccaaggacacctacgacgcccttcacatgcaggccctgccccctcgc

SEQ ID NO: 3646 - DNA, 1518 bp, synthetic construct
  source 1..1518: mol_type = other DNA
atggccttaccagtgaccgccttgctcctgccgctggccttgctgctccacgccgccaggccggacatcgtgatgacacagagccctagcagcctgacagtgacagccggcgagaaagtgaccatgagctgcaagagcagccagagcctgctgaacagcggcaaccagaagaactacctgacctggtatcagcagaagcccggccagcctcctaagctgctgatctactgggccagcaccagagaaagcggcgtgcccgatagattcacaggcagcggcagcggaaccgacttcaccctgacaatcagctctgtgcaggccgaggatctggccgtgtactactgccagaacgactacagctaccctctgacctttggagccggcaccaagctggaacttaaaggcggaggcggaagtggaggcggaggatctggcggcggaggctctcaaattcagctggtgcagtctggccccgagctgaagaaacctggcgagacagtgaagatttcctgcaaggccagcggctacaccttcaccaactacggcatgaactgggtcaagcaggcccctggcaagggcctgaaatggatgggctggatcaacaccaacaccggcgagcctacctacgccgaagagttcaagggcagattcgccttcagcctggaaaccagcgccagcacagcctacctccagatcaacaacctgaagaacgaggacaccgccacctacttttgcgccagactcggcttcggcaacgctatggattattggggccagggcaccagcgtgaccgtttcttctacgcgtgagcagaaactgatctcggaagaggatctggcgaagcccaccacgacgccagcgccgcgaccaccaacaccggcgcccaccatcgcgtcgcagcccctgtccctgcgcccagaggcgtgccggccagcggcggggggcgcagtgcacacgagggggctggacttcgcctgtgacatctacatctgggcgcccttggccgggacttgtggggtccttctcctgtcactggttatcaccctttactgcaaacggggcagaaagaaactcctgtatatattcaaacaaccatttatgagaccagtacaaactactcaagaggaagatggctgtagctgccgatttccagaagaagaagaaggaggatgtgaactgagagtgaagttcagcaggagcgcagacgcccccgcgtaccagcagggccagaaccagctctataacgagctgaatctaggacgaagagaggagtacgatgttttggacaagagacgtggccgggaccctgagatggggggaaagccgagaaggaagaaccctcaggaaggcctgtacaatgaactgcagaaagataagatggcggaggcctacagtgagattgggatgaaaggcgagcgccggaggggcaaggggcacgatggcctttaccagggtctcagtacagccaccaaggacacctacgacgcccttcacatgcaggccctgccccctcgctga

SEQ ID NO: 3647 - DNA, 1518 bp, synthetic construct
  source 1..1518: mol_type = other DNA
atggccttaccagtgaccgccttgctcctgccgctggccttgctgctccacgccgccaggccgcaaattcagctggtgcagtctggccccgagctgaagaaacctggcgagacagtgaagatttcctgcaaggccagcggctacaccttcaccaactacggcatgaactgggtcaagcaggcccctggcaagggcctgaaatggatgggctggatcaacaccaacaccggcgagcctacctacgccgaagagttcaagggcagattcgccttcagcctggaaaccagcgccagcacagcctacctccagatcaacaacctgaagaacgaggacaccgccacctacttttgcgccagactcggcttcggcaacgctatggattattggggccagggcaccagcgtgaccgtttcttctggcggaggcggaagtggaggcggaggatctggcggcggaggctctgacatcgtgatgacacagagccctagcagcctgacagtgacagccggcgagaaagtgaccatgagctgcaagagcagccagagcctgctgaacagcggcaaccagaagaactacctgacctggtatcagcagaagcccggccagcctcctaagctgctgatctactgggccagcaccagagaaagcggcgtgcccgatagattcacaggcagcggcagcggaaccgacttcaccctgacaatcagctctgtgcaggccgaggatctggccgtgtactactgccagaacgactacagctaccctctgacctttggagccggcaccaagctggaacttaaaacgcgtgagcagaaactgatctcggaagaggatctggcgaagcccaccacgacgccagcgccgcgaccaccaacaccggcgcccaccatcgcgtcgcagcccctgtccctgcgcccagaggcgtgccggccagcggcggggggcgcagtgcacacgagggggctggacttcgcctgtgacatctacatctgggcgcccttggccgggacttgtggggtccttctcctgtcactggttatcaccctttactgcaaacggggcagaaagaaactcctgtatatattcaaacaaccatttatgagaccagtacaaactactcaagaggaagatggctgtagctgccgatttccagaagaagaagaaggaggatgtgaactgagagtgaagttcagcaggagcgcagacgcccccgcgtaccagcagggccagaaccagctctataacgagctgaatctaggacgaagagaggagtacgatgttttggacaagagacgtggccgggaccctgagatggggggaaagccgagaaggaagaaccctcaggaaggcctgtacaatgaactgcagaaagataagatggcggaggcctacagtgagattgggatgaaaggcgagcgccggaggggcaaggggcacgatggcctttaccagggtctcagtacagccaccaaggacacctacgacgcccttcacatgcaggccctgccccctcgctga

SEQ ID NO: 3648 - DNA, 2757 bp, synthetic construct
  source 1..2757: mol_type = other DNA
atggccttaccagtgaccgccttgctcctgccgctggccttgctgctccacgccgccaggccggacatcgtgatgacacagagccctagcagcctgacagtgacagccggcgagaaagtgaccatgagctgcaagagcagccagagcctgctgaacagcggcaaccagaagaactacctgacctggtatcagcagaagcccggccagcctcctaagctgctgatctactgggccagcaccagagaaagcggcgtgcccgatagattcacaggcagcggcagcggaaccgacttcaccctgacaatcagctctgtgcaggccgaggatctggccgtgtactactgccagaacgactacagctaccctctgacctttggagccggcaccaagctggaacttaaaggcggaggcggaagtggaggcggaggatctggcggcggaggctctcaaattcagctggtgcagtctggccccgagctgaagaaacctggcgagacagtgaagatttcctgcaaggccagcggctacaccttcaccaactacggcatgaactgggtcaagcaggcccctggcaagggcctgaaatggatgggctggatcaacaccaacaccggcgagcctacctacgccgaagagttcaagggcagattcgccttcagcctggaaaccagcgccagcacagcctacctccagatcaacaacctgaagaacgaggacaccgccacctacttttgcgccagactcggcttcggcaacgctatggattattggggccagggcaccagcgtgaccgtttcttctacgcgtgagcagaaactgatctcggaagaggatctggcgaagcccaccacgacgccagcgccgcgaccaccaacaccggcgcccaccatcgcgtcgcagcccctgtccctgcgcccagaggcgtgccggccagcggcggggggcgcagtgcacacgagggggctggacttcgcctgtgacatctacatctgggcgcccttggccgggacttgtggggtccttctcctgtcactggttatcaccctttactgcgggcgcgccagagtgaagttcagcaggagcgcagacgcccccgcgtaccagcagggccagaaccagctctataacgagctgaatctaggacgaagagaggagtacgatgttttggacaagagacgtggccgggaccctgagatggggggaaagccgagaaggaagaaccctcaggaaggcctgtacaatgaactgcagaaagataagatggcggaggcctacagtgagattgggatgaaaggcgagcgccggaggggcaaggggcacgatggcctttaccagggtctcagtacagccaccaaggacacctacgacgcccttcacatgcaggccctgccccctcgctctagaggatctggagcaacaaacttctcactactcaaacaagcaggtgacgtggaggagaatcccgggcctgggatccacatggccacttacgaggttctctgtgaggtggcgcggaaactgggcacggatgacagggaagtggtattgttcctcctaaacgtgttcatacctcaacccacactggcccaattaattggagctcttagagctttaaaggaggagggcaggttaacgtttcccctgttagcggaatgtctgtttcgtgcaggtcgcagagacctcttgcgcgacctgcttcacttagacccgcgttttttagagcgccacctagcgggcacaatgagttatttcagcccttatcagctcactgttctccacgtagacggggagctgtgtgcgagggatattaggtctttgatatttttaagcaaggacactatagggtctcgcagcacaccacagacattcttacactgggtgtactgtatggaaaacttagacctactgggtcccactgacgtggatgccctaatgtcaatgcttagatctttgtcaagagtagacctacagcgccaagtgcaaaccctaatgggccttcacctttccggcccatcacactcccaacactatcgccatacaccactcgagaccgatttctacgactacaaggacgacgatgacaagactagtggctccggcgagggcagaggaagtctactaacctgcggagatgtggaagaaaatcctggcccacatatgaccgagtacaagcccacggtgcgcctcgccacccgcgacgacgtccccagggccgtacgcaccctcgccgccgcgttcgccgactaccccgccacgcgccacaccgtcgatccggaccgccacatcgagcgggtcaccgagctgcaagaactcttcctcacgcgcgtcgggctcgacatcggcaaggtgtgggtcgcggacgacggcgccgcggtggcggtctggaccacgccggagagcgtcgaagcgggggcggtgttcgccgagatcggcccgcgcatggccgagttgagcggttcccggctggccgcgcagcaacagatggaaggcctcctggcgccgcaccggcccaaggagcccgcgtggttcctggccaccgtcggcgtctcgcccgaccaccagggcaagggtctgggcagcgccgtcgtgctccccggagtggaggcggccgagcgcgccggggtgcccgccttcctggagacctccgcgccccgcaacctccccttctacgagcggctcggcttcaccgtcaccgccgacgtcgaggtgcccgaaggaccgcgcacctggtgcatgacccgcaagcccggtgcctga

SEQ ID NO: 3649 - DNA, 2577 bp, synthetic construct
  source 1..2577: mol_type = other DNA
atggccttaccagtgaccgccttgctcctgccgctggccttgctgctccacgccgccaggccggacatcgtgatgacacagagccctagcagcctgacagtgacagccggcgagaaagtgaccatgagctgcaagagcagccagagcctgctgaacagcggcaaccagaagaactacctgacctggtatcagcagaagcccggccagcctcctaagctgctgatctactgggccagcaccagagaaagcggcgtgcccgatagattcacaggcagcggcagcggaaccgacttcaccctgacaatcagctctgtgcaggccgaggatctggccgtgtactactgccagaacgactacagctaccctctgacctttggagccggcaccaagctggaacttaaactcgagatccagaaccctgatcctgccgtgtaccagctgcgggatagcaagagcagcgacaagagcgtgtgtctgttcaccgacttcgacagccagaccaacgtgtcccagagcaaggactccgacgtgtacatcaccgataagtgcgtgctggacatgcggagcatggacttcaagagcaactccgccgtggcctggtccaacaagtccgatttcgcctgcgccaacgccttcaacaacagcattatccccgaggacacattcttcccaagcagcgacgtgccctgcgacgtgaagctggtggaaaagagcttcgagacagacaccaacctgaacttccagaacctgagcgtgatcggcttcagaatcctgctgctgaaagtggccggctttaacctgctgatgaccctgcggctgtggtccagccgcgccaagagaagcggatctggcgtgaagcagaccctgaatttcgacctgctgaagctggctggcgacgtggaatccaacccaggccctactagtatggactggatttggcgcatccttttccttgtcggcgctgctaccggcgcgcattccttcgaacaaattcagctggtgcagtctggccccgagctgaagaaacctggcgagacagtgaagatttcctgcaaggccagcggctacaccttcaccaactacggcatgaactgggtcaagcaggcccctggcaagggcctgaaatggatgggctggatcaacaccaacaccggcgagcctacctacgccgaagagttcaagggcagattcgccttcagcctggaaaccagcgccagcacagcctacctccagatcaacaacctgaagaacgaggacaccgccacctacttttgcgccagactcggcttcggcaacgctatggattattggggccagggcaccagcgtgaccgtttcttctacgcgtgaggacctgaagaacgtgttcccacctgaggtggccgtgttcgagcctagcaaggccgagatcgcccacacccagaaagccaccctcgtgtgcctggctaccggcttctaccccgaccatgtggaactgtcttggtgggtcaacggcaaagaggtgcacagcggcgtgtgtaccgacccccagccactgaaagaacagcccgccctgaacgacagccggtactgcctgagcagcagactgagagtgtccgccaccttctggcagaacccccggaaccacttcagatgccaggtgcagttctacggcctgagcgagaacgacgagtggacccaggacagagccaagcccgtgacccagatcgtgtctgccgaagcctggggcagagccgattgcggcatcaccagcgccagctaccaccagggcgtgctgagcgccaccatcctgtacgagatcctgctgggcaaggccaccctgtacgccgtgctggtgtctgccctggtgctgatggctatggtcaagcggaaggacagccggggaagggccaagcgatctggatctggagcaacaaacttctcactactcaaacaagcaggtgacgtggaggagaatcccgggccttctagaggccatatgaccgagtacaagcccacggtgcgcctcgccacccgcgacgacgtccccagggccgtacgcaccctcgccgccgcgttcgccgactaccccgccacgcgccacaccgtcgatccggaccgccacatcgagcgggtcaccgagctgcaagaactcttcctcacgcgcgtcgggctcgacatcggcaaggtgtgggtcgcggacgacggcgccgcggtggcggtctggaccacgccggagagcgtcgaagcgggggcggtgttcgccgagatcggcccgcgcatggccgagttgagcggttcccggctggccgcgcagcaacagatggaaggcctcctggcgccgcaccggcccaaggagcccgcgtggttcctggccaccgtcggcgtctcgcccgaccaccagggcaagggtctgggcagcgccgtcgtgctccccggagtggaggcggccgagcgcgccggggtgcccgccttcctggagacctccgcgccccgcaacctccccttctacgagcggctcggcttcaccgtcaccgccgacgtcgaggtgcccgaaggaccgcgcacctggtgcatgacccgcaagcccggtgcctga

SEQ ID NO: 3650 - DNA, 2574 bp, synthetic construct
  source 1..2574: mol_type = other DNA
atggccttaccagtgaccgccttgctcctgccgctggccttgctgctccacgccgccaggccggacatcgtgatgacacagagccctagcagcctgacagtgacagccggcgagaaagtgaccatgagctgcaagagcagccagagcctgctgaacagcggcaaccagaagaactacctgacctggtatcagcagaagcccggccagcctcctaagctgctgatctactgggccagcaccagagaaagcggcgtgcccgatagattcacaggcagcggcagcggaaccgacttcaccctgacaatcagctctgtgcaggccgaggatctggccgtgtactactgccagaacgactacagctaccctctgacctttggagccggcaccaagctggaacttaaactcgaggacctgaagaacgtgttcccacctgaggtggccgtgttcgagcctagcaaggccgagatcgcccacacccagaaagccaccctcgtgtgcctggctaccggcttctaccccgaccatgtggaactgtcttggtgggtcaacggcaaagaggtgcacagcggcgtgtgtaccgacccccagccactgaaagaacagcccgccctgaacgacagccggtactgcctgagcagcagactgagagtgtccgccaccttctggcagaacccccggaaccacttcagatgccaggtgcagttctacggcctgagcgagaacgacgagtggacccaggacagagccaagcccgtgacccagatcgtgtctgccgaagcctggggcagagccgattgcggcatcaccagcgccagctaccaccagggcgtgctgagcgccaccatcctgtacgagatcctgctgggcaaggccaccctgtacgccgtgctggtgtctgccctggtgctgatggctatggtcaagcggaaggacagccggggaagggccaagcgatctggatctggagcaacaaacttctcactactcaaacaagcaggtgacgtggaggagaatcccgggcctactagtatggactggatttggcgcatccttttccttgtcggcgctgctaccggcgcgcattccttcgaacaaattcagctggtgcagtctggccccgagctgaagaaacctggcgagacagtgaagatttcctgcaaggccagcggctacaccttcaccaactacggcatgaactgggtcaagcaggcccctggcaagggcctgaaatggatgggctggatcaacaccaacaccggcgagcctacctacgccgaagagttcaagggcagattcgccttcagcctggaaaccagcgccagcacagcctacctccagatcaacaacctgaagaacgaggacaccgccacctacttttgcgccagactcggcttcggcaacgctatggattattggggccagggcaccagcgtgaccgtttcttctacgcgtatccagaaccctgatcctgccgtgtaccagctgcgggatagcaagagcagcgacaagagcgtgtgtctgttcaccgacttcgacagccagaccaacgtgtcccagagcaaggactccgacgtgtacatcaccgataagtgcgtgctggacatgcggagcatggacttcaagagcaactccgccgtggcctggtccaacaagtccgatttcgcctgcgccaacgccttcaacaacagcattatccccgaggacacattcttcccaagcagcgacgtgccctgcgacgtgaagctggtggaaaagagcttcgagacagacaccaacctgaacttccagaacctgagcgtgatcggcttcagaatcctgctgctgaaagtggccggctttaacctgctgatgaccctgcggctgtggtccagccgcgccaagagaagcggatctggcgtgaagcagaccctgaatttcgacctgctgaagctggctggcgacgtggaatccaacccaggcccttctagaggccatatgaccgagtacaagcccacggtgcgcctcgccacccgcgacgacgtccccagggccgtacgcaccctcgccgccgcgttcgccgactaccccgccacgcgccacaccgtcgatccggaccgccacatcgagcgggtcaccgagctgcaagaactcttcctcacgcgcgtcgggctcgacatcggcaaggtgtgggtcgcggacgacggcgccgcggtggcggtctggaccacgccggagagcgtcgaagcgggggcggtgttcgccgagatcggcccgcgcatggccgagttgagcggttcccggctggccgcgcagcaacagatggaaggcctcctggcgccgcaccggcccaaggagcccgcgtggttcctggccaccgtcggcgtctcgcccgaccaccagggcaagggtctgggcagcgccgtcgtgctccccggagtggaggcggccgagcgcgccggggtgcccgccttcctggagacctccgcgccccgcaacctccccttctacgagcggctcggcttcaccgtcaccgccgacgtcgaggtgcccgaaggaccgcgcacctggtgcatgacccgcaagcccggtgcctga

SEQ ID NO: 3651 - DNA, 1872 bp, synthetic construct
  source 1..1872: mol_type = other DNA
atggccttaccagtgaccgccttgctcctgccgctggccttgctgctccacgccgccaggccggacatcgtgatgacacagagccctagcagcctgacagtgacagccggcgagaaagtgaccatgagctgcaagagcagccagagcctgctgaacagcggcaaccagaagaactacctgacctggtatcagcagaagcccggccagcctcctaagctgctgatctactgggccagcaccagagaaagcggcgtgcccgatagattcacaggcagcggcagcggaaccgacttcaccctgacaatcagctctgtgcaggccgaggatctggccgtgtactactgccagaacgactacagctaccctctgacctttggagccggcaccaagctggaacttaaactcgaggacctgaagaacgtgttcccacctgaggtggccgtgttcgagcctagcgaggccgagatcagccacacccagaaagccaccctcgtgtgcctggctaccggcttctaccccgaccatgtggaactgtcttggtgggtcaacggcaaagaggtgcacagcggcgtgtgtaccgacccccagccactgaaagaacagcccgccctgaacgacagccggtactgcctgagcagcagactgagagtgtccgccaccttctggcagaacccccggaaccacttcagatgccaggtgcagttctacggcctgagcgagaacgacgagtggacccaggacagagccaagcccgtgacccagatcgtgtctgccgaagcctggggcagagccgattgcggctttaccagcgagagctaccagcagggcgtgctgagcgccaccatcctgtacgagatcctgctgggcaaggccaccctgtacgccgtgctggtgtctgccctggtgctgatggctatggtcaagcggaaggacagccggggaagggccaagcgatctggatctggagcaacaaacttctcactactcaaacaagcaggtgacgtggaggagaatcccgggcctactagtatggactggatttggcgcatccttttccttgtcggcgctgctaccggcgcgcattccttcgaacaaattcagctggtgcagtctggccccgagctgaagaaacctggcgagacagtgaagatttcctgcaaggccagcggctacaccttcaccaactacggcatgaactgggtcaagcaggcccctggcaagggcctgaaatggatgggctggatcaacaccaacaccggcgagcctacctacgccgaagagttcaagggcagattcgccttcagcctggaaaccagcgccagcacagcctacctccagatcaacaacctgaagaacgaggacaccgccacctacttttgcgccagactcggcttcggcaacgctatggattattggggccagggcaccagcgtgaccgtttcttctacgcgtatccagaaccctgatcctgccgtgtaccagctgcgggatagcaagagcagcgacaagagcgtgtgtctgttcaccgacttcgacagccagaccaacgtgtcccagagcaaggactccgacgtgtacatcaccgataagtgcgtgctggacatgcggagcatggacttcaagagcaactccgccgtggcctggtccaacaagtccgatttcgcctgcgccaacgccttcaacaacagcattatccccgaggacacattcttcccaagccccgagagcagctgcgacgtgaagctggtggaaaagagcttcgagacagacaccaacctgaacttccagaacctgagcgtgatcggcttcagaatcctgctgctgaaagtggccggctttaacctgctgatgaccctgcggctgtggtccagc

SEQ ID NO: 3652 - DNA, 2547 bp, synthetic construct
  source 1..2547: mol_type = other DNA
atggccttaccagtgaccgccttgctcctgccgctggccttgctgctccacgccgccaggccggacatcgtgatgacacagagccctagcagcctgacagtgacagccggcgagaaagtgaccatgagctgcaagagcagccagagcctgctgaacagcggcaaccagaagaactacctgacctggtatcagcagaagcccggccagcctcctaagctgctgatctactgggccagcaccagagaaagcggcgtgcccgatagattcacaggcagcggcagcggaaccgacttcaccctgacaatcagctctgtgcaggccgaggatctggccgtgtactactgccagaacgactacagctaccctctgacctttggagccggcaccaagctggaacttaaactcgaggacctgaagaacgtgttcccacctgaggtggccgtgttcgagcctagcgaggccgagatcagccacacccagaaagccaccctcgtgtgcctggctaccggcttctaccccgaccatgtggaactgtcttggtgggtcaacggcaaagaggtgcacagcggcgtgtgtaccgacccccagccactgaaagaacagcccgccctgaacgacagccggtactgcctgagcagcagactgagagtgtccgccaccttctggcagaacccccggaaccacttcagatgccaggtgcagttctacggcctgagcgagaacgacgagtggacccaggacagagccaagcccgtgacccagatcgtgtctgccgaagcctggggcagagccgattgcggctttaccagcgagagctaccagcagggcgtgctgagcgccaccatcctgtacgagatcctgctgggcaaggccaccctgtacgccgtgctggtgtctgccctggtgctgatggctatggtcaagcggaaggacagccggggaagggccaagcgatctggatctggagcaacaaacttctcactactcaaacaagcaggtgacgtggaggagaatcccgggcctactagtatggactggatttggcgcatccttttccttgtcggcgctgctaccggcgcgcattccttcgaacaaattcagctggtgcagtctggccccgagctgaagaaacctggcgagacagtgaagatttcctgcaaggccagcggctacaccttcaccaactacggcatgaactgggtcaagcaggcccctggcaagggcctgaaatggatgggctggatcaacaccaacaccggcgagcctacctacgccgaagagttcaagggcagattcgccttcagcctggaaaccagcgccagcacagcctacctccagatcaacaacctgaagaacgaggacaccgccacctacttttgcgccagactcggcttcggcaacgctatggattattggggccagggcaccagcgtgaccgtttcttctacgcgtatccagaaccctgatcctgccgtgtaccagctgcgggatagcaagagcagcgacaagagcgtgtgtctgttcaccgacttcgacagccagaccaacgtgtcccagagcaaggactccgacgtgtacatcaccgataagtgcgtgctggacatgcggagcatggacttcaagagcaactccgccgtggcctggtccaacaagtccgatttcgcctgcgccaacgccttcaacaacagcattatccccgaggacacattcttcccaagccccgagagcagctgcgacgtgaagctggtggaaaagagcttcgagacagacaccaacctgaacttccagaacctgagcgtgatcggcttcagaatcctgctgctgaaagtggccggctttaacctgctgatgaccctgcggctgtggtccagccgcgccaagagaagcggatctggcgtgaagcagaccctgaatttcgacctgctgaagctggctggcgacgtggaatccaacccaggcccttctagaggcgggatccacaccatggctacctacgaggtgctgtgcgaggtggcaagaaagctgggcaccgacgacagagaagtggtgctgttcctgctgaacgtgttcatccctcagcctacactggcccagctgatcggtgcactgagagccctgaaagaggaaggccggctgacctttcctctgctggccgaatgcctgttcagagccggaagaagggatctgctgcgggacctgctgcatctggaccccagatttctggaaagacacctggccggcaccatgagctacttcagcccttaccagctgaccgtgctgcacgttgacggcgaactgtgcgccagagatattcggagcctgatcttcctgagcaaggacaccatcggcagccggtctacccctcagacatttctgcactgggtgtactgcatggaaaacctggacctgctcggccccacagatgtggatgccctgatgtccatgctgagaagcctgagcagagtggacctccagagacaggtgcagacactgatgggactgcacctgagcggacctagccacagccagcactacagacacacccct

SEQ ID NO: 3653 - DNA, 1884 bp, synthetic construct
  source 1..1884: mol_type = other DNA
atggccttaccagtgaccgccttgctcctgccgctggccttgctgctccacgccgccaggccggacatcgtgatgacacagagccctagcagcctgacagtgacagccggcgagaaagtgaccatgagctgcaagagcagccagagcctgctgaacagcggcaaccagaagaactacctgacctggtatcagcagaagcccggccagcctcctaagctgctgatctactgggccagcaccagagaaagcggcgtgcccgatagattcacaggcagcggcagcggaaccgacttcaccctgacaatcagctctgtgcaggccgaggatctggccgtgtactactgccagaacgactacagctaccctctgacctttggagccggcaccaagctggaacttaaactcgagatccagaaccctgatcctgccgtgtaccagctgcgggatagcaagagcagcgacaagagcgtgtgtctgttcaccgacttcgacagccagaccaacgtgtcccagagcaaggactccgacgtgtacatcaccgataagtgcgtgctggacatgcggagcatggacttcaagagcaactccgccgtggcctggtccaacaagtccgatttcgcctgcgccaacgccttcaacaacagcattatccccgaggacacattcttcccaagccccgagagcagctgcgacgtgaagctggtggaaaagagcttcgagacagacaccaacctgaacttccagaacctgagcgtgatcggcttcagaatcctgctgctgaaagtggccggctttaacctgctgatgaccctgcggctgtggtccagccgcgccaagagaagcggatctggcgtgaagcagaccctgaatttcgacctgctgaagctggctggcgacgtggaatccaacccaggccctactagtatggactggatttggcgcatccttttccttgtcggcgctgctaccggcgcgcattccttcgaacaaattcagctggtgcagtctggccccgagctgaagaaacctggcgagacagtgaagatttcctgcaaggccagcggctacaccttcaccaactacggcatgaactgggtcaagcaggcccctggcaagggcctgaaatggatgggctggatcaacaccaacaccggcgagcctacctacgccgaagagttcaagggcagattcgccttcagcctggaaaccagcgccagcacagcctacctccagatcaacaacctgaagaacgaggacaccgccacctacttttgcgccagactcggcttcggcaacgctatggattattggggccagggcaccagcgtgaccgtttcttctacgcgtgaggacctgaagaacgtgttcccacctgaggtggccgtgttcgagcctagcgaggccgagatcagccacacccagaaagccaccctcgtgtgcctggctaccggcttctaccccgaccatgtggaactgtcttggtgggtcaacggcaaagaggtgcacagcggcgtgtgtaccgacccccagccactgaaagaacagcccgccctgaacgacagccggtactgcctgagcagcagactgagagtgtccgccaccttctggcagaacccccggaaccacttcagatgccaggtgcagttctacggcctgagcgagaacgacgagtggacccaggacagagccaagcccgtgacccagatcgtgtctgccgaagcctggggcagagccgattgcggctttaccagcgagagctaccagcagggcgtgctgagcgccaccatcctgtacgagatcctgctgggcaaggccaccctgtacgccgtgctggtgtctgccctggtgctgatggctatggtcaagcggaaggacagccgggga

SEQ ID NO: 3654 - DNA, 2550 bp, synthetic construct
  source 1..2550: mol_type = other DNA
atggccttaccagtgaccgccttgctcctgccgctggccttgctgctccacgccgccaggccggacatcgtgatgacacagagccctagcagcctgacagtgacagccggcgagaaagtgaccatgagctgcaagagcagccagagcctgctgaacagcggcaaccagaagaactacctgacctggtatcagcagaagcccggccagcctcctaagctgctgatctactgggccagcaccagagaaagcggcgtgcccgatagattcacaggcagcggcagcggaaccgacttcaccctgacaatcagctctgtgcaggccgaggatctggccgtgtactactgccagaacgactacagctaccctctgacctttggagccggcaccaagctggaacttaaactcgagatccagaaccctgatcctgccgtgtaccagctgcgggatagcaagagcagcgacaagagcgtgtgtctgttcaccgacttcgacagccagaccaacgtgtcccagagcaaggactccgacgtgtacatcaccgataagtgcgtgctggacatgcggagcatggacttcaagagcaactccgccgtggcctggtccaacaagtccgatttcgcctgcgccaacgccttcaacaacagcattatccccgaggacacattcttcccaagccccgagagcagctgcgacgtgaagctggtggaaaagagcttcgagacagacaccaacctgaacttccagaacctgagcgtgatcggcttcagaatcctgctgctgaaagtggccggctttaacctgctgatgaccctgcggctgtggtccagccgcgccaagagaagcggatctggcgtgaagcagaccctgaatttcgacctgctgaagctggctggcgacgtggaatccaacccaggccctactagtatggactggatttggcgcatccttttccttgtcggcgctgctaccggcgcgcattccttcgaacaaattcagctggtgcagtctggccccgagctgaagaaacctggcgagacagtgaagatttcctgcaaggccagcggctacaccttcaccaactacggcatgaactgggtcaagcaggcccctggcaagggcctgaaatggatgggctggatcaacaccaacaccggcgagcctacctacgccgaagagttcaagggcagattcgccttcagcctggaaaccagcgccagcacagcctacctccagatcaacaacctgaagaacgaggacaccgccacctacttttgcgccagactcggcttcggcaacgctatggattattggggccagggcaccagcgtgaccgtttcttctacgcgtgaggacctgaagaacgtgttcccacctgaggtggccgtgttcgagcctagcgaggccgagatcagccacacccagaaagccaccctcgtgtgcctggctaccggcttctaccccgaccatgtggaactgtcttggtgggtcaacggcaaagaggtgcacagcggcgtgtgtaccgacccccagccactgaaagaacagcccgccctgaacgacagccggtactgcctgagcagcagactgagagtgtccgccaccttctggcagaacccccggaaccacttcagatgccaggtgcagttctacggcctgagcgagaacgacgagtggacccaggacagagccaagcccgtgacccagatcgtgtctgccgaagcctggggcagagccgattgcggctttaccagcgagagctaccagcagggcgtgctgagcgccaccatcctgtacgagatcctgctgggcaaggccaccctgtacgccgtgctggtgtctgccctggtgctgatggctatggtcaagcggaaggacagccggggaagggccaagcgatctggatctggagcaacaaacttctcactactcaaacaagcaggtgacgtggaggagaatcccgggccttctagaggcgggatccacaccatggctacctacgaggtgctgtgcgaggtggcaagaaagctgggcaccgacgacagagaagtggtgctgttcctgctgaacgtgttcatccctcagcctacactggcccagctgatcggtgcactgagagccctgaaagaggaaggccggctgacctttcctctgctggccgaatgcctgttcagagccggaagaagggatctgctgcgggacctgctgcatctggaccccagatttctggaaagacacctggccggcaccatgagctacttcagcccttaccagctgaccgtgctgcacgttgacggcgaactgtgcgccagagatattcggagcctgatcttcctgagcaaggacaccatcggcagccggtctacccctcagacatttctgcactgggtgtactgcatggaaaacctggacctgctcggccccacagatgtggatgccctgatgtccatgctgagaagcctgagcagagtggacctccagagacaggtgcagacactgatgggactgcacctgagcggacctagccacagccagcactacagacacacccct

SEQ ID NO: 3655 - DNA, 2709 bp, synthetic construct
  source 1..2709: mol_type = other DNA
atggccttaccagtgaccgccttgctcctgccgctggccttgctgctccacgccgccaggccgctcgaggggaaaccaattcccaaccctcttctgggactggattcaaccggcagcggcgaggacctgaagaacgtgttcccacctgaggtggccgtgttcgagcctagcaaggccgagatcgcccacacccagaaagccaccctcgtgtgcctggctaccggcttctaccccgaccatgtggaactgtcttggtgggtcaacggcaaagaggtgcacagcggcgtgtgtaccgacccccagccactgaaagaacagcccgccctgaacgacagccggtactgcctgagcagcagactgagagtgtccgccaccttctggcagaacccccggaaccacttcagatgccaggtgcagttctacggcctgagcgagaacgacgagtggacccaggacagagccaagcccgtgacccagatcgtgtctgccgaagcctggggcagagccgattgcggcatcaccagcgccagctaccaccagggcgtgctgagcgccaccatcctgtacgagatcctgctgggcaaggccaccctgtacgccgtgctggtgtctgccctggtgctgatggctatggtcaagcggaaggacagccggggaagggccaagcgatctggatctggagcaacaaacttctcactactcaaacaagcaggtgacgtggaggagaatcccgggcctactagcatggccttaccagtgaccgccttgctcctgccgctggccttgctgctccacgccgccaggccggacatcgtgatgacacagagccctagcagcctgacagtgacagccggcgagaaagtgaccatgagctgcaagagcagccagagcctgctgaacagcggcaaccagaagaactacctgacctggtatcagcagaagcccggccagcctcctaagctgctgatctactgggccagcaccagagaaagcggcgtgcccgatagattcacaggcagcggcagcggaaccgacttcaccctgacaatcagctctgtgcaggccgaggatctggccgtgtactactgccagaacgactacagctaccctctgacctttggagccggcaccaagctggaacttaaaggcggaggcggaagtggaggcggaggatctggcggcggaggctctcaaattcagctggtgcagtctggccccgagctgaagaaacctggcgagacagtgaagatttcctgcaaggccagcggctacaccttcaccaactacggcatgaactgggtcaagcaggcccctggcaagggcctgaaatggatgggctggatcaacaccaacaccggcgagcctacctacgccgaagagttcaagggcagattcgccttcagcctggaaaccagcgccagcacagcctacctccagatcaacaacctgaagaacgaggacaccgccacctacttttgcgccagactcggcttcggcaacgctatggattattggggccagggcaccagcgtgaccgtttcttctacgcgtgagcagaaactgatctcggaagaggatgggagcggcatccagaaccctgatcctgccgtgtaccagctgcgggatagcaagagcagcgacaagagcgtgtgtctgttcaccgacttcgacagccagaccaacgtgtcccagagcaaggactccgacgtgtacatcaccgataagtgcgtgctggacatgcggagcatggacttcaagagcaactccgccgtggcctggtccaacaagtccgatttcgcctgcgccaacgccttcaacaacagcattatccccgaggacacattcttcccaagcagcgacgtgccctgcgacgtgaagctggtggaaaagagcttcgagacagacaccaacctgaacttccagaacctgagcgtgatcggcttcagaatcctgctgctgaaagtggccggctttaacctgctgatgaccctgcggctgtggtccagccgcgccaagagaagcggatctggcgtgaagcagaccctgaatttcgacctgctgaagctggctggcgacgtggaatccaacccaggcccttctagaggccatatgaccgagtacaagcccacggtgcgcctcgccacccgcgacgacgtccccagggccgtacgcaccctcgccgccgcgttcgccgactaccccgccacgcgccacaccgtcgatccggaccgccacatcgagcgggtcaccgagctgcaagaactcttcctcacgcgcgtcgggctcgacatcggcaaggtgtgggtcgcggacgacggcgccgcggtggcggtctggaccacgccggagagcgtcgaagcgggggcggtgttcgccgagatcggcccgcgcatggccgagttgagcggttcccggctggccgcgcagcaacagatggaaggcctcctggcgccgcaccggcccaaggagcccgcgtggttcctggccaccgtcggcgtctcgcccgaccaccagggcaagggtctgggcagcgccgtcgtgctccccggagtggaggcggccgagcgcgccggggtgcccgccttcctggagacctccgcgccccgcaacctccccttctacgagcggctcggcttcaccgtcaccgccgacgtcgaggtgcccgaaggaccgcgcacctggtgcatgacccgcaagcccggtgcctga

SEQ ID NO: 3656 - DNA, 2712 bp, synthetic construct
  source 1..2712: mol_type = other DNA
atggccttaccagtgaccgccttgctcctgccgctggccttgctgctccacgccgccaggccgctcgagcagaaactgatctcggaagaggatctgggctccggcgatcgccctgatcctgccgtgtaccagctgcgggatagcaagagcagcgacaagagcgtgtgtctgttcaccgacttcgacagccagaccaacgtgtcccagagcaaggactccgacgtgtacatcaccgataagtgcgtgctggacatgcggagcatggacttcaagagcaactccgccgtggcctggtccaacaagtccgatttcgcctgcgccaacgccttcaacaacagcattatccccgaggacacattcttcccaagccccgagagcagctgcgacgtgaagctggtggaaaagagcttcgagacagacaccaacctgaacttccagaacctgagcgtgatcggcttcagaatcctgctgctgaaagtggccggctttaacctgctgatgaccctgcggctgtggtccagctctagtcgcgccaagagaagcggatctggcgtgaagcagaccctgaatttcgacctgctgaagctggctggcgacgtggaatccaacccaggccccactagcatggccttaccagtgaccgccttgctcctgccgctggccttgctgctccacgccgccaggccggacatcgtgatgacacagagccctagcagcctgacagtgacagccggcgagaaagtgaccatgagctgcaagagcagccagagcctgctgaacagcggcaaccagaagaactacctgacctggtatcagcagaagcccggccagcctcctaagctgctgatctactgggccagcaccagagaaagcggcgtgcccgatagattcacaggcagcggcagcggaaccgacttcaccctgacaatcagctctgtgcaggccgaggatctggccgtgtactactgccagaacgactacagctaccctctgacctttggagccggcaccaagctggaacttaaaggcggaggcggaagtggaggcggaggatctggcggcggaggctctcaaattcagctggtgcagtctggccccgagctgaagaaacctggcgagacagtgaagatttcctgcaaggccagcggctacaccttcaccaactacggcatgaactgggtcaagcaggcccctggcaagggcctgaaatggatgggctggatcaacaccaacaccggcgagcctacctacgccgaagagttcaagggcagattcgccttcagcctggaaaccagcgccagcacagcctacctccagatcaacaacctgaagaacgaggacaccgccacctacttttgcgccagactcggcttcggcaacgctatggattattggggccagggcaccagcgtgaccgtttcttctacgcgtgggaaaccaattcccaaccctcttctgggactggattcaaccggcagcggcgaggacctgaagaacgtgttcccacctgaggtggccgtgttcgagcctagcgaggccgagatcagccacacccagaaagccaccctcgtgtgcctggctaccggcttctaccccgaccatgtggaactgtcttggtgggtcaacggcaaagaggtgcacagcggcgtgtgtaccgacccccagccactgaaagaacagcccgccctgaacgacagccggtactgcctgagcagcagactgagagtgtccgccaccttctggcagaacccccggaaccacttcagatgccaggtgcagttctacggcctgagcgagaacgacgagtggacccaggacagagccaagcccgtgacccagatcgtgtctgccgaagcctggggcagagccgattgcggctttaccagcgagagctaccagcagggcgtgctgagcgccaccatcctgtacgagatcctgctgggcaaggccaccctgtacgccgtgctggtgtctgccctggtgctgatggctatggtcaagcggaaggacagccggggaagggccaagcgatctggatctggagcaacaaacttctcactactcaaacaagcaggtgacgtggaggagaatcccgggccttctagaggccatatgaccgagtacaagcccacggtgcgcctcgccacccgcgacgacgtccccagggccgtacgcaccctcgccgccgcgttcgccgactaccccgccacgcgccacaccgtcgatccggaccgccacatcgagcgggtcaccgagctgcaagaactcttcctcacgcgcgtcgggctcgacatcggcaaggtgtgggtcgcggacgacggcgccgcggtggcggtctggaccacgccggagagcgtcgaagcgggggcggtgttcgccgagatcggcccgcgcatggccgagttgagcggttcccggctggccgcgcagcaacagatggaaggcctcctggcgccgcaccggcccaaggagcccgcgtggttcctggccaccgtcggcgtctcgcccgaccaccagggcaagggtctgggcagcgccgtcgtgctccccggagtggaggcggccgagcgcgccggggtgcccgccttcctggagacctccgcgccccgcaacctccccttctacgagcggctcggcttcaccgtcaccgccgacgtcgaggtgcccgaaggaccgcgcacctggtgcatgacccgcaagcccggtgcctga

SEQ ID NO: 3657 - DNA, 2574 bp, synthetic construct
  source 1..2574: mol_type = other DNA
atggccttaccagtgaccgccttgctcctgccgctggccttgctgctccacgccgccaggccggacatcgtgatgacacagagccctagcagcctgacagtgacagccggcgagaaagtgaccatgagctgcaagagcagccagagcctgctgaacagcggcaaccagaagaactacctgacctggtatcagcagaagcccggccagcctcctaagctgctgatctactgggccagcaccagagaaagcggcgtgcccgatagattcacaggcagcggcagcggaaccgacttcaccctgacaatcagctctgtgcaggccgaggatctggccgtgtactactgccagaacgactacagctaccctctgacctttggagccggcaccaagctggaacttaaactcgaggacctgaagaacgtgttcccacctgaggtggccgtgttcgagcctagcgaggccgagatcagccacacccagaaagccaccctcgtgtgcctggctaccggcttctaccccgaccatgtggaactgtcttggtgggtcaacggcaaagaggtgcacagcggcgtgtctaccgacccccagccactgaaagaacagcccgccctgaacgacagccggtactgcctgagcagcagactgagagtgtccgccaccttctggcagaacccccggaaccacttcagatgccaggtgcagttctacggcctgagcgagaacgacgagtggacccaggacagagccaagcccgtgacccagatcgtgtctgccgaagcctggggcagagccgattgcggctttaccagcgagagctaccagcagggcgtgctgagcgccaccatcctgtacgagatcctgctgggcaaggccaccctgtacgccgtgctggtgtctgccctggtgctgatggctatggtcaagcggaaggacagccggggaagggccaagcgatctggatctggagcaacaaacttctcactactcaaacaagcaggtgacgtggaggagaatcccgggcctactagtatggactggatttggcgcatccttttccttgtcggcgctgctaccggcgcgcattccttcgaacaaattcagctggtgcagtctggccccgagctgaagaaacctggcgagacagtgaagatttcctgcaaggccagcggctacaccttcaccaactacggcatgaactgggtcaagcaggcccctggcaagggcctgaaatggatgggctggatcaacaccaacaccggcgagcctacctacgccgaagagttcaagggcagattcgccttcagcctggaaaccagcgccagcacagcctacctccagatcaacaacctgaagaacgaggacaccgccacctacttttgcgccagactcggcttcggcaacgctatggattattggggccagggcaccagcgtgaccgtttcttctacgcgtatccagaaccctgatcctgccgtgtaccagctgcgggatagcaagagcagcgacaagagcgtgtgtctgttcaccgacttcgacagccagaccaacgtgtcccagagcaaggactccgacgtgtacatcaccgataagaccgtgctggacatgcggagcatggacttcaagagcaactccgccgtggcctggtccaacaagtccgatttcgcctgcgccaacgccttcaacaacagcattatccccgaggacacattcttcccaagccccgagagcagctgcgacgtgaagctggtggaaaagagcttcgagacagacaccaacctgaacttccagaacctgagcgtgatcggcttcagaatcctgctgctgaaagtggccggctttaacctgctgatgaccctgcggctgtggtccagccgcgccaagagaagcggatctggcgtgaagcagaccctgaatttcgacctgctgaagctggctggcgacgtggaatccaacccaggcccttctagaggccatatgaccgagtacaagcccacggtgcgcctcgccacccgcgacgacgtccccagggccgtacgcaccctcgccgccgcgttcgccgactaccccgccacgcgccacaccgtcgatccggaccgccacatcgagcgggtcaccgagctgcaagaactcttcctcacgcgcgtcgggctcgacatcggcaaggtgtgggtcgcggacgacggcgccgcggtggcggtctggaccacgccggagagcgtcgaagcgggggcggtgttcgccgagatcggcccgcgcatggccgagttgagcggttcccggctggccgcgcagcaacagatggaaggcctcctggcgccgcaccggcccaaggagcccgcgtggttcctggccaccgtcggcgtctcgcccgaccaccagggcaagggtctgggcagcgccgtcgtgctccccggagtggaggcggccgagcgcgccggggtgcccgccttcctggagacctccgcgccccgcaacctccccttctacgagcggctcggcttcaccgtcaccgccgacgtcgaggtgcccgaaggaccgcgcacctggtgcatgacccgcaagcccggtgcctga

SEQ ID NO: 3658 - DNA, 2820 bp, synthetic construct
  source 1..2820: mol_type = other DNA
atggccttaccagtgaccgccttgctcctgccgctggccttgctgctccacgccgccaggccggacatcgtgatgacacagagccctagcagcctgacagtgacagccggcgagaaagtgaccatgagctgcaagagcagccagagcctgctgaacagcggcaaccagaagaactacctgacctggtatcagcagaagcccggccagcctcctaagctgctgatctactgggccagcaccagagaaagcggcgtgcccgatagattcacaggcagcggcagcggaaccgacttcaccctgacaatcagctctgtgcaggccgaggatctggccgtgtactactgccagaacgactacagctaccctctgacctttggagccggcaccaagctggaacttaaactcgaggacctgaagaacgtgttcccacctgaggtggccgtgttcgagcctagcgaggccgagatcagccacacccagaaagccaccctcgtgtgcctggctaccggcttctaccccgaccatgtggaactgtcttggtgggtcaacggcaaagaggtgcacagcggcgtgtctaccgacccccagccactgaaagaacagcccgccctgaacgacagccggtactgcctgagcagcagactgagagtgtccgccaccttctggcagaacccccggaaccacttcagatgccaggtgcagttctacggcctgagcgagaacgacgagtggacccaggacagagccaagcccgtgacccagatcgtgtctgccgaagcctggggcagagccgattgcggctttaccagcgagagctaccagcagggcgtgctgagcgccaccatcctgtacgagatcctgctgggcaaggccaccctgtacgccgtgctggtgtctgccctggtgctgatggctatggtcaagcggaaggacagccggggaagggccaagcgatctggatctggagcaacaaacttctcactactcaaacaagcaggtgacgtggaggagaatcccgggcctactagtatggactggatttggcgcatccttttccttgtcggcgctgctaccggcgcgcattccttcgaacaaattcagctggtgcagtctggccccgagctgaagaaacctggcgagacagtgaagatttcctgcaaggccagcggctacaccttcaccaactacggcatgaactgggtcaagcaggcccctggcaagggcctgaaatggatgggctggatcaacaccaacaccggcgagcctacctacgccgaagagttcaagggcagattcgccttcagcctggaaaccagcgccagcacagcctacctccagatcaacaacctgaagaacgaggacaccgccacctacttttgcgccagactcggcttcggcaacgctatggattattggggccagggcaccagcgtgaccgtttcttctacgcgtgagcagaaactgatctcggaagaggatgggagcggcaccccattcccttctctggcccctcccatcatgctgctggtggacggcaagcagcagatggtggtcgtgtgcctggtgctggatgtggccccacctggactggacagccccatctggtttagcgccggcaatggctctgccctggacgcctttacctacggcccaagccctgccaccgatggcacctggacaaatctggcccacctgagcctgcccagcgaggaactggcttcttgggagcctctcgtgtgccacacaggacctggcgctgagggacacagcagatccacccagcctatgcacctgtctggcgaggccagcaccgccagaacctgtcctcaggaacctctgagaggcacccctggcggagcactgtggctgggagtgctgagactgctgctgttcaagctgctgctgtttgacctgctgctgacctgctcctgtctgtgcgatcctgccggccctctgccttctcctgccaccaccacaagactgagagccctgggcagccacagactgcaccctgccacagagacaggcggcagagaggccacaagcagccctagaccccagcccagagacagaagatggggcgataccccccctggcagaaagcctggatctccagtccgcgccaagagaagcggatctggcgtgaagcagaccctgaatttcgacctgctgaagctggctggcgacgtggaatccaacccaggcccttctagaggccatatgaccgagtacaagcccacggtgcgcctcgccacccgcgacgacgtccccagggccgtacgcaccctcgccgccgcgttcgccgactaccccgccacgcgccacaccgtcgatccggaccgccacatcgagcgggtcaccgagctgcaagaactcttcctcacgcgcgtcgggctcgacatcggcaaggtgtgggtcgcggacgacggcgccgcggtggcggtctggaccacgccggagagcgtcgaagcgggggcggtgttcgccgagatcggcccgcgcatggccgagttgagcggttcccggctggccgcgcagcaacagatggaaggcctcctggcgccgcaccggcccaaggagcccgcgtggttcctggccaccgtcggcgtctcgcccgaccaccagggcaagggtctgggcagcgccgtcgtgctccccggagtggaggcggccgagcgcgccggggtgcccgccttcctggagacctccgcgccccgcaacctccccttctacgagcggctcggcttcaccgtcaccgccgacgtcgaggtgcccgaaggaccgcgcacctggtgcatgacccgcaagcccggtgcctga

SEQ ID NO: 3659 - DNA, 2874 bp, synthetic construct
  source 1..2874: mol_type = other DNA
atggccttaccagtgaccgccttgctcctgccgctggccttgctgctccacgccgccaggccgctcgaggacctgaagaacgtgttcccacctgaggtggccgtgttcgagcctagcgaggccgagatcagccacacccagaaagccaccctcgtgtgcctggctaccggcttctaccccgaccatgtggaactgtcttggtgggtcaacggcaaagaggtgcacagcggcgtgtctaccgacccccagccactgaaagaacagcccgccctgaacgacagccggtactgcctgagcagcagactgagagtgtccgccaccttctggcagaacccccggaaccacttcagatgccaggtgcagttctacggcctgagcgagaacgacgagtggacccaggacagagccaagcccgtgacccagatcgtgtctgccgaagcctggggcagagccgattgcggctttaccagcgagagctaccagcagggcgtgctgagcgccaccatcctgtacgagatcctgctgggcaaggccaccctgtacgccgtgctggtgtctgccctggtgctgatggctatggtcaagcggaaggacagccggggaagggccaagcgatctggatctggagcaacaaacttctcactactcaaacaagcaggtgacgtggaggagaatcccgggcctactagcatggccttaccagtgaccgccttgctcctgccgctggccttgctgctccacgccgccaggccggacatcgtgatgacacagagccctagcagcctgacagtgacagccggcgagaaagtgaccatgagctgcaagagcagccagagcctgctgaacagcggcaaccagaagaactacctgacctggtatcagcagaagcccggccagcctcctaagctgctgatctactgggccagcaccagagaaagcggcgtgcccgatagattcacaggcagcggcagcggaaccgacttcaccctgacaatcagctctgtgcaggccgaggatctggccgtgtactactgccagaacgactacagctaccctctgacctttggagccggcaccaagctggaacttaaaggcggaggcggaagtggaggcggaggatctggcggcggaggctctcaaattcagctggtgcagtctggccccgagctgaagaaacctggcgagacagtgaagatttcctgcaaggccagcggctacaccttcaccaactacggcatgaactgggtcaagcaggcccctggcaagggcctgaaatggatgggctggatcaacaccaacaccggcgagcctacctacgccgaagagttcaagggcagattcgccttcagcctggaaaccagcgccagcacagcctacctccagatcaacaacctgaagaacgaggacaccgccacctacttttgcgccagactcggcttcggcaacgctatggattattggggccagggcaccagcgtgaccgtttcttctacgcgtgagcagaaactgatctcggaagaggatctggggagcggcaccccattcccttctctggcccctcccatcatgctgctggtggacggcaagcagcagatggtggtcgtgtgcctggtgctggatgtggccccacctggactggacagccccatctggtttagcgccggcaatggctctgccctggacgcctttacctacggcccaagccctgccaccgatggcacctggacaaatctggcccacctgagcctgcccagcgaggaactggcttcttgggagcctctcgtgtgccacacaggacctggcgctgagggacacagcagatccacccagcctatgcacctgtctggcgaggccagcaccgccagaacctgtcctcaggaacctctgagaggcacccctggcggagcactgtggctgggagtgctgagactgctgctgttcaagctgctgctgtttgacctgctgctgacctgctcctgtctgtgcgatcctgccggccctctgccttctcctgccaccaccacaagactgagagccctgggcagccacagactgcaccctgccacagagacaggcggcagagaggccacaagcagccctagaccccagcccagagacagaagatggggcgataccccccctggcagaaagcctggatctccagtccgcgccaagagaagcggatctggcgtgaagcagaccctgaatttcgacctgctgaagctggctggcgacgtggaatccaacccaggcccttctagatctagaggccatatgaccgagtacaagcccacggtgcgcctcgccacccgcgacgacgtccccagggccgtacgcaccctcgccgccgcgttcgccgactaccccgccacgcgccacaccgtcgatccggaccgccacatcgagcgggtcaccgagctgcaagaactcttcctcacgcgcgtcgggctcgacatcggcaaggtgtgggtcgcggacgacggcgccgcggtggcggtctggaccacgccggagagcgtcgaagcgggggcggtgttcgccgagatcggcccgcgcatggccgagttgagcggttcccggctggccgcgcagcaacagatggaaggcctcctggcgccgcaccggcccaaggagcccgcgtggttcctggccaccgtcggcgtctcgcccgaccaccagggcaagggtctgggcagcgccgtcgtgctccccggagtggaggcggccgagcgcgccggggtgcccgccttcctggagacctccgcgccccgcaacctccccttctacgagcggctcggcttcaccgtcaccgccgacgtcgaggtgcccgaaggaccgcgcacctggtgcatgacccgcaagcccggtgcctga

SEQ ID NO: 3660 - DNA, 2685 bp, synthetic construct
  source 1..2685: mol_type = other DNA
atggccttaccagtgaccgccttgctcctgccgctggccttgctgctccacgccgccaggccggacatcgtgatgacacagagccctagcagcctgacagtgacagccggcgagaaagtgaccatgagctgcaagagcagccagagcctgctgaacagcggcaaccagaagaactacctgacctggtatcagcagaagcccggccagcctcctaagctgctgatctactgggccagcaccagagaaagcggcgtgcccgatagattcacaggcagcggcagcggaaccgacttcaccctgacaatcagctctgtgcaggccgaggatctggccgtgtactactgccagaacgactacagctaccctctgacctttggagccggcaccaagctggaacttaaactcgaggggaaaccaattcccaaccctcttctgggactggattcaaccggcagcggcgacaagcagctggacgccgacgtgtcccccaagcctaccatcttcctgccctctatcgccgagacaaagctccagaaggccggcacctacctgtgcctgctggaaaagttcttcccagatgtgattaagatccactggcaggaaaagaagtccaacaccatcctgggcagccaggaaggcaacaccatgaagaccaacgacacctacatgaagttcagctggctgaccgtgcccgagaagtccctggacaaagaacacagatgcatcgtgcggcacgaaaacaacaagaacggcgtggaccaggaaatcatcttcccacccatcaagaccgatgtgattacaatggaccccaaggacaactgctccaaggacgccaacgataccctgctgctccagctgaccaacaccagcgcctactacatgtacttgttgctgctgctgaagtccgtggtgtacttcgccatcatcacatgctgcctgctgcggagaaccgccttctgctgcaacggcgagaagtctagggccaagcgatctggatctggagcaacaaacttctcactactcaaacaagcaggtgacgtggaggagaatcccgggcctactagtatggactggatttggcgcatccttttccttgtcggcgctgctaccggcgcgcattccttcgaacaaattcagctggtgcagtctggccccgagctgaagaaacctggcgagacagtgaagatttcctgcaaggccagcggctacaccttcaccaactacggcatgaactgggtcaagcaggcccctggcaagggcctgaaatggatgggctggatcaacaccaacaccggcgagcctacctacgccgaagagttcaagggcagattcgccttcagcctggaaaccagcgccagcacagcctacctccagatcaacaacctgaagaacgaggacaccgccacctacttttgcgccagactcggcttcggcaacgctatggattattggggccagggcaccagcgtgaccgtttcttctacgcgtgagcagaaactgatctcggaagaggatgggagcggcagccagcctcacaccaagcccagcgtgttcgtgatgaagaacggcaccaacgtggcctgcctcgtgaaagagttctaccccaaggacatcaggatcaacctggtgtccagcaagaagatcaccgagttcgaccccgccatcgtgatctcccccagcggcaagtacaacgccgtgaagctggggaagtacgaggacagcaacagcgtgacctgctccgtgcagcacgacaacaagaccgtgcacagcaccgactttgaagtgaaaaccgactccaccgaccacgtgaagcccaaagagacagagaacaccaagcagcccagcaagagctgccacaagcccaaggccatcgtgcacaccgagaaagtgaacatgatgagcctgaccgtgctgggcctgcggatgctgttcgccaaaaccgtggccgtgaacttcctgctgaccgccaagctgttcttcctccgcgccaagagaagcggatctggcgtgaagcagaccctgaatttcgacctgctgaagctggctggcgacgtggaatccaacccaggcccttctagaggccatatgaccgagtacaagcccacggtgcgcctcgccacccgcgacgacgtccccagggccgtacgcaccctcgccgccgcgttcgccgactaccccgccacgcgccacaccgtcgatccggaccgccacatcgagcgggtcaccgagctgcaagaactcttcctcacgcgcgtcgggctcgacatcggcaaggtgtgggtcgcggacgacggcgccgcggtggcggtctggaccacgccggagagcgtcgaagcgggggcggtgttcgccgagatcggcccgcgcatggccgagttgagcggttcccggctggccgcgcagcaacagatggaaggcctcctggcgccgcaccggcccaaggagcccgcgtggttcctggccaccgtcggcgtctcgcccgaccaccagggcaagggtctgggcagcgccgtcgtgctccccggagtggaggcggccgagcgcgccggggtgcccgccttcctggagacctccgcgccccgcaacctccccttctacgagcggctcggcttcaccgtcaccgccgacgtcgaggtgcccgaaggaccgcgcacctggtgcatgacccgcaagcccggtgcctga

SEQ ID NO: 3661 - DNA, 1896 bp, synthetic construct
  source 1..1896: mol_type = other DNA
atggccttaccagtgaccgccttgctcctgccgctggccttgctgctccacgccgccaggccggacatcgtgatgacacagagccctagcagcctgacagtgacagccggcgagaaagtgaccatgagctgcaagagcagccagagcctgctgaacagcggcaaccagaagaactacctgacctggtatcagcagaagcccggccagcctcctaagctgctgatctactgggccagcaccagagaaagcggcgtgcccgatagattcacaggcagcggcagcggaaccgacttcaccctgacaatcagctctgtgcaggccgaggatctggccgtgtactactgccagaacgactacagctaccctctgacctttggagccggcaccaagctggaacttaaactcgagagccagcctcacaccaagcccagcgtgttcgtgatgaagaacggcaccaacgtggcctgcctcgtgaaagagttctaccccaaggacatcaggatcaacctggtgtccagcaagaagatcaccgagttcgaccccgccatcgtgatctcccccagcggcaagtacaacgccgtgaagctggggaagtacgaggacagcaacagcgtgacctgctccgtgcagcacgacaacaagaccgtgcacagcaccgactttgaagtgaaaaccgactccaccgaccacgtgaagcccaaagagacagagaacaccaagcagcccagcaagagctgccacaagcccaaggccatcgtgcacaccgagaaagtgaacatgatgagcctgaccgtgctgggcctgcggatgctgttcgccaaaaccgtggccgtgaacttcctgctgaccgccaagctgttcttcctcagggccaagcgatctggatctggagcaacaaacttctcactactcaaacaagcaggtgacgtggaggagaatcccgggcctactagtatggactggatttggcgcatccttttccttgtcggcgctgctaccggcgcgcattccttcgaacaaattcagctggtgcagtctggccccgagctgaagaaacctggcgagacagtgaagatttcctgcaaggccagcggctacaccttcaccaactacggcatgaactgggtcaagcaggcccctggcaagggcctgaaatggatgggctggatcaacaccaacaccggcgagcctacctacgccgaagagttcaagggcagattcgccttcagcctggaaaccagcgccagcacagcctacctccagatcaacaacctgaagaacgaggacaccgccacctacttttgcgccagactcggcttcggcaacgctatggattattggggccagggcaccagcgtgaccgtttcttctacgcgtgacaagcagctggacgccgacgtgtcccccaagcctaccatcttcctgccctctatcgccgagacaaagctccagaaggccggcacctacctgtgcctgctggaaaagttcttcccagatgtgattaagatccactggcaggaaaagaagtccaacaccatcctgggcagccaggaaggcaacaccatgaagaccaacgacacctacatgaagttcagctggctgaccgtgcccgagaagtccctggacaaagaacacagatgcatcgtgcggcacgaaaacaacaagaacggcgtggaccaggaaatcatcttcccacccatcaagaccgatgtgattacaatggaccccaaggacaactgctccaaggacgccaacgataccctgctgctccagctgaccaacaccagcgcctactacatgtacttgttgctgctgctgaagtccgtggtgtacttcgccatcatcacatgctgcctgctgcggagaaccgccttctgctgcaacggcgagaagtct

SEQ ID NO: 3662 - DNA, 2730 bp, synthetic construct
  source 1..2730: mol_type = other DNA
atggccttaccagtgaccgccttgctcctgccgctggccttgctgctccacgccgccaggccgctcgaggggaaaccaattcccaaccctcttctgggactggattcaaccggcagcggcgacaagcagctggacgccgacgtgtcccccaagcctaccatcttcctgccctctatcgccgagacaaagctccagaaggccggcacctacctgtgcctgctggaaaagttcttcccagatgtgattaagatccactggcaggaaaagaagtccaacaccatcctgggcagccaggaaggcaacaccatgaagaccaacgacacctacatgaagttcagctggctgaccgtgcccgagaagtccctggacaaagaacacagatgcatcgtgcggcacgaaaacaacaagaacggcgtggaccaggaaatcatcttcccacccatcaagaccgatgtgattacaatggaccccaaggacaactgctccaaggacgccaacgataccctgctgctccagctgaccaacaccagcgcctactacatgtacttgttgctgctgctgaagtccgtggtgtacttcgccatcatcacatgctgcctgctgcggagaaccgccttctgctgcaacggcgagaagtctagggccaagcgatctggatctggagcaacaaacttctcactactcaaacaagcaggtgacgtggaggagaatcccgggcctactagcatggccttaccagtgaccgccttgctcctgccgctggccttgctgctccacgccgccaggccggacatcgtgatgacacagagccctagcagcctgacagtgacagccggcgagaaagtgaccatgagctgcaagagcagccagagcctgctgaacagcggcaaccagaagaactacctgacctggtatcagcagaagcccggccagcctcctaagctgctgatctactgggccagcaccagagaaagcggcgtgcccgatagattcacaggcagcggcagcggaaccgacttcaccctgacaatcagctctgtgcaggccgaggatctggccgtgtactactgccagaacgactacagctaccctctgacctttggagccggcaccaagctggaacttaaaggcggaggcggaagtggaggcggaggatctggcggcggaggctctcaaattcagctggtgcagtctggccccgagctgaagaaacctggcgagacagtgaagatttcctgcaaggccagcggctacaccttcaccaactacggcatgaactgggtcaagcaggcccctggcaagggcctgaaatggatgggctggatcaacaccaacaccggcgagcctacctacgccgaagagttcaagggcagattcgccttcagcctggaaaccagcgccagcacagcctacctccagatcaacaacctgaagaacgaggacaccgccacctacttttgcgccagactcggcttcggcaacgctatggattattggggccagggcaccagcgtgaccgtttcttctacgcgtgagcagaaactgatctcggaagaggatgggagcggcagccagcctcacaccaagcccagcgtgttcgtgatgaagaacggcaccaacgtggcctgcctcgtgaaagagttctaccccaaggacatcaggatcaacctggtgtccagcaagaagatcaccgagttcgaccccgccatcgtgatctcccccagcggcaagtacaacgccgtgaagctggggaagtacgaggacagcaacagcgtgacctgctccgtgcagcacgacaacaagaccgtgcacagcaccgactttgaagtgaaaaccgactccaccgaccacgtgaagcccaaagagacagagaacaccaagcagcccagcaagagctgccacaagcccaaggccatcgtgcacaccgagaaagtgaacatgatgagcctgaccgtgctgggcctgcggatgctgttcgccaaaaccgtggccgtgaacttcctgctgaccgccaagctgttcttcctccgcgccaagagaagcggatctggcgtgaagcagaccctgaatttcgacctgctgaagctggctggcgacgtggaatccaacccaggcccttctagaggccatatgaccgagtacaagcccacggtgcgcctcgccacccgcgacgacgtccccagggccgtacgcaccctcgccgccgcgttcgccgactaccccgccacgcgccacaccgtcgatccggaccgccacatcgagcgggtcaccgagctgcaagaactcttcctcacgcgcgtcgggctcgacatcggcaaggtgtgggtcgcggacgacggcgccgcggtggcggtctggaccacgccggagagcgtcgaagcgggggcggtgttcgccgagatcggcccgcgcatggccgagttgagcggttcccggctggccgcgcagcaacagatggaaggcctcctggcgccgcaccggcccaaggagcccgcgtggttcctggccaccgtcggcgtctcgcccgaccaccagggcaagggtctgggcagcgccgtcgtgctccccggagtggaggcggccgagcgcgccggggtgcccgccttcctggagacctccgcgccccgcaacctccccttctacgagcggctcggcttcaccgtcaccgccgacgtcgaggtgcccgaaggaccgcgcacctggtgcatgacccgcaagcccggtgcctga

SEQ ID NO: 3663 - DNA, 3105 bp, synthetic construct
  source 1..3105: mol_type = other DNA
atggccttaccagtgaccgccttgctcctgccgctggccttgctgctccacgccgccaggccggacatcgtgatgacacagagccctagcagcctgacagtgacagccggcgagaaagtgaccatgagctgcaagagcagccagagcctgctgaacagcggcaaccagaagaactacctgacctggtatcagcagaagcccggccagcctcctaagctgctgatctactgggccagcaccagagaaagcggcgtgcccgatagattcacaggcagcggcagcggaaccgacttcaccctgacaatcagctctgtgcaggccgaggatctggccgtgtactactgccagaacgactacagctaccctctgacctttggagccggcaccaagctggaacttaaaggacagcctaaggccaatcctaccgtgacactgttccctccaagcagcgaagaactccaggccaacaaggccacacttgtgtgcctgatctccgacttctaccctggggctgtgacagtggcttggaaggccgatggatctcctgtgaaagccggcgtggaaaccaccaagccatccaagcagagcaacaacaaatacgccgccagctcctacctgagcctgacacctgagcagtggaagtcccacagatcctacagctgccaagtgacccacgaaggcagcaccgtggaaaagacagtggcccctacagagtgcagcggatcccagagcttcggcctgctggaccccaagctgtgctacctgctggatggcatcctgttcatctacggcgtgatcctgaccgccctgttcctgagagtgaagttcagcagaagcgccgacgcccctgcctaccagcagggacagaaccaactgtacaacgagctgaacctgggcagacgggaagagtacgacgtgctggacaagcggagaggcagggaccctgagatgggcggaaagccccagcggagaaagaacccccaggaaggactgtataacgaactccagaaagacaagatggccgaagcctacagcgagatcggcatgaagggcgagcggagaagaggcaagggccacgatggcctgtaccagggcctgagcaccgccaccaaggacacctatgacgccctgcacatgcaggccctgcctccaagaagggccaagcgatctggatctggagcaacaaacttctcactactcaaacaagcaggtgacgtggaggagaatcccgggcctactagtatggactggatttggcgcatccttttccttgtcggcgctgctaccggcgcgcattccttcgaacaaattcagctggtgcagtctggccccgagctgaagaaacctggcgagacagtgaagatttcctgcaaggccagcggctacaccttcaccaactacggcatgaactgggtcaagcaggcccctggcaagggcctgaaatggatgggctggatcaacaccaacaccggcgagcctacctacgccgaagagttcaagggcagattcgccttcagcctggaaaccagcgccagcacagcctacctccagatcaacaacctgaagaacgaggacaccgccacctacttttgcgccagactcggcttcggcaacgctatggattattggggccagggcaccagcgtgaccgtttcttctgcctctacaaagggaccctccgtgtttcctctggctcccagcagcaagtctacaagcggaggaacagccgctctgggctgcctggtcaaggattactttcccgagcctgtgaccgtgtcctggaatagcggagcactgacaagcggcgtgcacacctttccagccgtgctgcaaagcagcggcctgtactctctgagcagcgtggtcacagtgcctagctctagcctgggcacccagacctacatctgcaatgtgaaccacaagcctagcaacaccaaggtggacaagagagtggaacccaagagctgtggtacccagagttttgggttgttggaccctaaattgtgctatctgttggacggaatcctgttcatttacggagtgatcctgaccgcattgttcctgcgggttaagttttccagatccgcagacgcacccgcttaccaacaagggcagaaccaactctacaatgaacttaatttggggcggagggaagagtacgacgttctggacaaaaggaggggacgagatcccgagatgggcggaaagcctcagcgaaggaagaatccgcaagaggggctttataacgaactccagaaagataaaatggcagaagcctatagtgagattgggatgaagggagaaaggaggaggggtaaaggtcacgatgggttgtaccaaggattgagcacagccactaaagatacctatgatgcgctccacatgcaggccctgccgccaagacgcgccaagagaagcggatctggcgtgaagcagaccctgaatttcgacctgctgaagctggctggcgacgtggaatccaacccaggcccttctagaggccatatgaccgagtacaagcccacggtgcgcctcgccacccgcgacgacgtccccagggccgtacgcaccctcgccgccgcgttcgccgactaccccgccacgcgccacaccgtcgatccggaccgccacatcgagcgggtcaccgagctgcaagaactcttcctcacgcgcgtcgggctcgacatcggcaaggtgtgggtcgcggacgacggcgccgcggtggcggtctggaccacgccggagagcgtcgaagcgggggcggtgttcgccgagatcggcccgcgcatggccgagttgagcggttcccggctggccgcgcagcaacagatggaaggcctcctggcgccgcaccggcccaaggagcccgcgtggttcctggccaccgtcggcgtctcgcccgaccaccagggcaagggtctgggcagcgccgtcgtgctccccggagtggaggcggccgagcgcgccggggtgcccgccttcctggagacctccgcgccccgcaacctccccttctacgagcggctcggcttcaccgtcaccgccgacgtcgaggtgcccgaaggaccgcgcacctggtgcatgacccgcaagcccggtgcctga

SEQ ID NO: 3664 - DNA, 2460 bp, synthetic construct
  source 1..2460: mol_type = other DNA
atggccttaccagtgaccgccttgctcctgccgctggccttgctgctccacgccgccaggccggacatcgtgatgacacagagccctagcagcctgacagtgacagccggcgagaaagtgaccatgagctgcaagagcagccagagcctgctgaacagcggcaaccagaagaactacctgacctggtatcagcagaagcccggccagcctcctaagctgctgatctactgggccagcaccagagaaagcggcgtgcccgatagattcacaggcagcggcagcggaaccgacttcaccctgacaatcagctctgtgcaggccgaggatctggccgtgtactactgccagaacgactacagctaccctctgacctttggagccggcaccaagctggaacttaaactcgaggacctgaagaacgtgttcccacctgaggtggccgtgttcgagcctagcgaggccgagatcagccacacccagaaagccaccctcgtgtgcctggctaccggcttctaccccgaccatgtggaactgtcttggtgggtcaacggcaaagaggtgcacagcggcgtgtctaccgacccccagccactgaaagaacagcccgccctgaacgacagccggtactgcctgagcagcagactgagagtgtccgccaccttctggcagaacccccggaaccacttcagatgccaggtgcagttctacggcctgagcgagaacgacgagtggacccaggacagagccaagcccgtgacccagatcgtgtctgccgaagcctggggcagagccgattgcggatcccagagcttcggcctgctggaccccaagctgtgctacctgctggatggcatcctgttcatctacggcgtgatcctgaccgccctgttcctgagagtgaagttcagcagaagcgccgacgcccctgcctaccagcagggacagaaccaactgtacaacgagctgaacctgggcagacgggaagagtacgacgtgctggacaagcggagaggcagggaccctgagatgggcggaaagccccagcggagaaagaacccccaggaaggactgtataacgaactccagaaagacaagatggccgaagcctacagcgagatcggcatgaagggcgagcggagaagaggcaagggccacgatggcctgtaccagggcctgagcaccgccaccaaggacacctatgacgccctgcacatgcaggccctgcctccaagaagggccaagcgatctggatctggagcaacaaacttctcactactcaaacaagcaggtgacgtggaggagaatcccgggcctactagtatggactggatttggcgcatccttttccttgtcggcgctgctaccggcgcgcattccttcgaacaaattcagctggtgcagtctggccccgagctgaagaaacctggcgagacagtgaagatttcctgcaaggccagcggctacaccttcaccaactacggcatgaactgggtcaagcaggcccctggcaagggcctgaaatggatgggctggatcaacaccaacaccggcgagcctacctacgccgaagagttcaagggcagattcgccttcagcctggaaaccagcgccagcacagcctacctccagatcaacaacctgaagaacgaggacaccgccacctacttttgcgccagactcggcttcggcaacgctatggattattggggccagggcaccagcgtgaccgtttcttctacgcgtatccagaaccctgatcctgccgtgtaccagctgcgggatagcaagagcagcgacaagagcgtgtgtctgttcaccgacttcgacagccagaccaacgtgtcccagagcaaggactccgacgtgtacatcaccgataagaccgtgctggacatgcggagcatggacttcaagagcaactccgccgtggcctggtccaacaagtccgatttcgcctgcgccaacgccttcaacaacagcattatccccgaggacacattcttcccaagccccgagagcagctgcggtacccagagttttgggttgttggaccctaaattgtgctatctgttggacggaatcctgttcatttacggagtgatcctgaccgcattgttcctgcgggttaagttttccagatccgcagacgcacccgcttaccaacaagggcagaaccaactctacaatgaacttaatttggggcggagggaagagtacgacgttctggacaaaaggaggggacgagatcccgagatgggcggaaagcctcagcgaaggaagaatccgcaagaggggctttataacgaactccagaaagataaaatggcagaagcctatagtgagattgggatgaagggagaaaggaggaggggtaaaggtcacgatgggttgtaccaaggattgagcacagccactaaagatacctatgatgcgctccacatgcaggccctgccgccaaga

SEQ ID NO: 3665 - DNA, 2460 bp, synthetic construct
  source 1..2460: mol_type = other DNA
atggccttaccagtgaccgccttgctcctgccgctggccttgctgctccacgccgccaggccggacatcgtgatgacacagagccctagcagcctgacagtgacagccggcgagaaagtgaccatgagctgcaagagcagccagagcctgctgaacagcggcaaccagaagaactacctgacctggtatcagcagaagcccggccagcctcctaagctgctgatctactgggccagcaccagagaaagcggcgtgcccgatagattcacaggcagcggcagcggaaccgacttcaccctgacaatcagctctgtgcaggccgaggatctggccgtgtactactgccagaacgactacagctaccctctgacctttggagccggcaccaagctggaacttaaactcgaggacctgaagaacgtgttcccacctgaggtggccgtgttcgagcctagcaaggccgagatcgcccacacccagaaagccaccctcgtgtgcctggctaccggcttctaccccgaccatgtggaactgtcttggtgggtcaacggcaaagaggtgcacagcggcgtgtgtaccgacccccagccactgaaagaacagcccgccctgaacgacagccggtactgcctgagcagcagactgagagtgtccgccaccttctggcagaacccccggaaccacttcagatgccaggtgcagttctacggcctgagcgagaacgacgagtggacccaggacagagccaagcccgtgacccagatcgtgtctgccgaagcctggggcagagccgattgcggatcccagagcttcggcctgctggaccccaagctgtgctacctgctggatggcatcctgttcatctacggcgtgatcctgaccgccctgttcctgagagtgaagttcagcagaagcgccgacgcccctgcctaccagcagggacagaaccaactgtacaacgagctgaacctgggcagacgggaagagtacgacgtgctggacaagcggagaggcagggaccctgagatgggcggaaagccccagcggagaaagaacccccaggaaggactgtataacgaactccagaaagacaagatggccgaagcctacagcgagatcggcatgaagggcgagcggagaagaggcaagggccacgatggcctgtaccagggcctgagcaccgccaccaaggacacctatgacgccctgcacatgcaggccctgcctccaagaagggccaagcgatctggatctggagcaacaaacttctcactactcaaacaagcaggtgacgtggaggagaatcccgggcctactagtatggactggatttggcgcatccttttccttgtcggcgctgctaccggcgcgcattccttcgaacaaattcagctggtgcagtctggccccgagctgaagaaacctggcgagacagtgaagatttcctgcaaggccagcggctacaccttcaccaactacggcatgaactgggtcaagcaggcccctggcaagggcctgaaatggatgggctggatcaacaccaacaccggcgagcctacctacgccgaagagttcaagggcagattcgccttcagcctggaaaccagcgccagcacagcctacctccagatcaacaacctgaagaacgaggacaccgccacctacttttgcgccagactcggcttcggcaacgctatggattattggggccagggcaccagcgtgaccgtttcttctacgcgtatccagaaccctgatcctgccgtgtaccagctgcgggatagcaagagcagcgacaagagcgtgtgtctgttcaccgacttcgacagccagaccaacgtgtcccagagcaaggactccgacgtgtacatcaccgataagtgcgtgctggacatgcggagcatggacttcaagagcaactccgccgtggcctggtccaacaagtccgatttcgcctgcgccaacgccttcaacaacagcattatccccgaggacacattcttcccaagcagcgacgtgccctgcggtacccagagttttgggttgttggaccctaaattgtgctatctgttggacggaatcctgttcatttacggagtgatcctgaccgcattgttcctgcgggttaagttttccagatccgcagacgcacccgcttaccaacaagggcagaaccaactctacaatgaacttaatttggggcggagggaagagtacgacgttctggacaaaaggaggggacgagatcccgagatgggcggaaagcctcagcgaaggaagaatccgcaagaggggctttataacgaactccagaaagataaaatggcagaagcctatagtgagattgggatgaagggagaaaggaggaggggtaaaggtcacgatgggttgtaccaaggattgagcacagccactaaagatacctatgatgcgctccacatgcaggccctgccgccaaga

SEQ ID NO: 3666 - DNA, 2673 bp, synthetic construct
  source 1..2673: mol_type = other DNA
atggccttaccagtgaccgccttgctcctgccgctggccttgctgctccacgccgccaggccggacatcgtgatgacacagagccctagcagcctgacagtgacagccggcgagaaagtgaccatgagctgcaagagcagccagagcctgctgaacagcggcaaccagaagaactacctgacctggtatcagcagaagcccggccagcctcctaagctgctgatctactgggccagcaccagagaaagcggcgtgcccgatagattcacaggcagcggcagcggaaccgacttcaccctgacaatcagctctgtgcaggccgaggatctggccgtgtactactgccagaacgactacagctaccctctgacctttggagccggcaccaagctggaacttaaactcgaggggaaaccaattcccaaccctcttctgggactggattcaaccggcagcggcgaggacctgaagaacgtgttcccacctgaggtggccgtgttcgagcctagcgaggccgagatcagccacacccagaaagccaccctcgtgtgcctggctaccggcttctaccccgaccatgtggaactgtcttggtgggtcaacggcaaagaggtgcacagcggcgtgtctaccgacccccagccactgaaagaacagcccgccctgaacgacagccggtactgcctgagcagcagactgagagtgtccgccaccttctggcagaacccccggaaccacttcagatgccaggtgcagttctacggcctgagcgagaacgacgagtggacccaggacagagccaagcccgtgacccagatcgtgtctgccgaagcctggggcagagccgattgcggatcccagagcttcggcctgctggaccccaagctgtgctacctgctggatggcatcctgttcatctacggcgtgatcctgaccgccctgttcctgagagtgaagttcagcagaagcgccgacgcccctgcctaccagcagggacagaaccaactgtacaacgagctgaacctgggcagacgggaagagtacgacgtgctggacaagcggagaggcagggaccctgagatgggcggaaagccccagcggagaaagaacccccaggaaggactgtataacgaactccagaaagacaagatggccgaagcctacagcgagatcggcatgaagggcgagcggagaagaggcaagggccacgatggcctgtaccagggcctgagcaccgccaccaaggacacctatgacgccctgcacatgcaggccctgcctccaagaagggccaagcgatctggatctggagcaacaaacttctcactactcaaacaagcaggtgacgtggaggagaatcccgggcctactagtatggactggatttggcgcatccttttccttgtcggcgctgctaccggcgcgcattccttcgaacaaattcagctggtgcagtctggccccgagctgaagaaacctggcgagacagtgaagatttcctgcaaggccagcggctacaccttcaccaactacggcatgaactgggtcaagcaggcccctggcaagggcctgaaatggatgggctggatcaacaccaacaccggcgagcctacctacgccgaagagttcaagggcagattcgccttcagcctggaaaccagcgccagcacagcctacctccagatcaacaacctgaagaacgaggacaccgccacctacttttgcgccagactcggcttcggcaacgctatggattattggggccagggcaccagcgtgaccgtttcttctacgcgtgagcagaaactgatctcggaagaggatgggagcggcatccagaaccctgatcctgccgtgtaccagctgcgggatagcaagagcagcgacaagagcgtgtgtctgttcaccgacttcgacagccagaccaacgtgtcccagagcaaggactccgacgtgtacatcaccgataagaccgtgctggacatgcggagcatggacttcaagagcaactccgccgtggcctggtccaacaagtccgatttcgcctgcgccaacgccttcaacaacagcattatccccgaggacacattcttcccaagccccgagagcagctgcggtacccagagttttgggttgttggaccctaaattgtgctatctgttggacggaatcctgttcatttacggagtgatcctgaccgcattgttcctgaggagcaagcggtcacggctgctccacagcgattacatgaatatgacaccacgaagaccgggtcctactcgcaaacactaccaaccctacgcacctccccgcgactttgcagcgtaccgatctcgggttaagttttccagatccgcagacgcacccgcttaccaacaagggcagaaccaactctacaatgaacttaatttggggcggagggaagagtacgacgttctggacaaaaggaggggacgagatcccgagatgggcggaaagcctcagcgaaggaagaatccgcaagaggggctttataacgaactccagaaagataaaatggcagaagcctatagtgagattgggatgaagggagaaaggaggaggggtaaaggtcacgatgggttgtaccaaggattgagcacagccactaaagatacctatgatgcgctccacatgcaggccctgccgccaaga

SEQ ID NO: 3667 - DNA, 2796 bp, synthetic construct
  source 1..2796: mol_type = other DNA
atggccttaccagtgaccgccttgctcctgccgctggccttgctgctccacgccgccaggccggacatcgtgatgacacagagccctagcagcctgacagtgacagccggcgagaaagtgaccatgagctgcaagagcagccagagcctgctgaacagcggcaaccagaagaactacctgacctggtatcagcagaagcccggccagcctcctaagctgctgatctactgggccagcaccagagaaagcggcgtgcccgatagattcacaggcagcggcagcggaaccgacttcaccctgacaatcagctctgtgcaggccgaggatctggccgtgtactactgccagaacgactacagctaccctctgacctttggagccggcaccaagctggaacttaaactcgaggggaaaccaattcccaaccctcttctgggactggattcaaccggcagcggcgaggacctgaagaacgtgttcccacctgaggtggccgtgttcgagcctagcgaggccgagatcagccacacccagaaagccaccctcgtgtgcctggctaccggcttctaccccgaccatgtggaactgtcttggtgggtcaacggcaaagaggtgcacagcggcgtgtctaccgacccccagccactgaaagaacagcccgccctgaacgacagccggtactgcctgagcagcagactgagagtgtccgccaccttctggcagaacccccggaaccacttcagatgccaggtgcagttctacggcctgagcgagaacgacgagtggacccaggacagagccaagcccgtgacccagatcgtgtctgccgaagcctggggcagagccgattgcggatcccagagcttcggcctgctggaccccaagctgtgctacctgctggatggcatcctgttcatctacggcgtgatcctgaccgccctgttcctgaggagtaagaggagcaggctcctgcacagtgactacatgaacatgactccacgccgccccggacccacccgcaagcattaccagccctatgccccaccacgcgacttcgcagcctatcgctccagagtgaagttcagcagaagcgccgacgcccctgcctaccagcagggacagaaccaactgtacaacgagctgaacctgggcagacgggaagagtacgacgtgctggacaagcggagaggcagggaccctgagatgggcggaaagccccagcggagaaagaacccccaggaaggactgtataacgaactccagaaagacaagatggccgaagcctacagcgagatcggcatgaagggcgagcggagaagaggcaagggccacgatggcctgtaccagggcctgagcaccgccaccaaggacacctatgacgccctgcacatgcaggccctgcctccaagaagggccaagcgatctggatctggagcaacaaacttctcactactcaaacaagcaggtgacgtggaggagaatcccgggcctactagtatggactggatttggcgcatccttttccttgtcggcgctgctaccggcgcgcattccttcgaacaaattcagctggtgcagtctggccccgagctgaagaaacctggcgagacagtgaagatttcctgcaaggccagcggctacaccttcaccaactacggcatgaactgggtcaagcaggcccctggcaagggcctgaaatggatgggctggatcaacaccaacaccggcgagcctacctacgccgaagagttcaagggcagattcgccttcagcctggaaaccagcgccagcacagcctacctccagatcaacaacctgaagaacgaggacaccgccacctacttttgcgccagactcggcttcggcaacgctatggattattggggccagggcaccagcgtgaccgtttcttctacgcgtgagcagaaactgatctcggaagaggatgggagcggcatccagaaccctgatcctgccgtgtaccagctgcgggatagcaagagcagcgacaagagcgtgtgtctgttcaccgacttcgacagccagaccaacgtgtcccagagcaaggactccgacgtgtacatcaccgataagaccgtgctggacatgcggagcatggacttcaagagcaactccgccgtggcctggtccaacaagtccgatttcgcctgcgccaacgccttcaacaacagcattatccccgaggacacattcttcccaagccccgagagcagctgcggtacccagagttttgggttgttggaccctaaattgtgctatctgttggacggaatcctgttcatttacggagtgatcctgaccgcattgttcctgaggagcaagcggtcacggctgctccacagcgattacatgaatatgacaccacgaagaccgggtcctactcgcaaacactaccaaccctacgcacctccccgcgactttgcagcgtaccgatctcgggttaagttttccagatccgcagacgcacccgcttaccaacaagggcagaaccaactctacaatgaacttaatttggggcggagggaagagtacgacgttctggacaaaaggaggggacgagatcccgagatgggcggaaagcctcagcgaaggaagaatccgcaagaggggctttataacgaactccagaaagataaaatggcagaagcctatagtgagattgggatgaagggagaaaggaggaggggtaaaggtcacgatgggttgtaccaaggattgagcacagccactaaagatacctatgatgcgctccacatgcaggccctgccgccaaga

SEQ ID NO: 3668 - DNA, 2679 bp, synthetic construct
  source 1..2679: mol_type = other DNA
atggccttaccagtgaccgccttgctcctgccgctggccttgctgctccacgccgccaggccggacatcgtgatgacacagagccctagcagcctgacagtgacagccggcgagaaagtgaccatgagctgcaagagcagccagagcctgctgaacagcggcaaccagaagaactacctgacctggtatcagcagaagcccggccagcctcctaagctgctgatctactgggccagcaccagagaaagcggcgtgcccgatagattcacaggcagcggcagcggaaccgacttcaccctgacaatcagctctgtgcaggccgaggatctggccgtgtactactgccagaacgactacagctaccctctgacctttggagccggcaccaagctggaacttaaactcgaggggaaaccaattcccaaccctcttctgggactggattcaaccggcagcggcgaggacctgaagaacgtgttcccacctgaggtggccgtgttcgagcctagcgaggccgagatcagccacacccagaaagccaccctcgtgtgcctggctaccggcttctaccccgaccatgtggaactgtcttggtgggtcaacggcaaagaggtgcacagcggcgtgtctaccgacccccagccactgaaagaacagcccgccctgaacgacagccggtactgcctgagcagcagactgagagtgtccgccaccttctggcagaacccccggaaccacttcagatgccaggtgcagttctacggcctgagcgagaacgacgagtggacccaggacagagccaagcccgtgacccagatcgtgtctgccgaagcctggggcagagccgattgcggatcccagagcttcggcctgctggaccccaagctgtgctacctgctggatggcatcctgttcatctacggcgtgatcctgaccgccctgttcctgagagtgaagttcagcagaagcgccgacgcccctgcctaccagcagggacagaaccaactgtacaacgagctgaacctgggcagacgggaagagtacgacgtgctggacaagcggagaggcagggaccctgagatgggcggaaagccccagcggagaaagaacccccaggaaggactgtataacgaactccagaaagacaagatggccgaagcctacagcgagatcggcatgaagggcgagcggagaagaggcaagggccacgatggcctgtaccagggcctgagcaccgccaccaaggacacctatgacgccctgcacatgcaggccctgcctccaagaagggccaagcgatctggatctggagcaacaaacttctcactactcaaacaagcaggtgacgtggaggagaatcccgggcctactagtatggactggatttggcgcatccttttccttgtcggcgctgctaccggcgcgcattccttcgaacaaattcagctggtgcagtctggccccgagctgaagaaacctggcgagacagtgaagatttcctgcaaggccagcggctacaccttcaccaactacggcatgaactgggtcaagcaggcccctggcaagggcctgaaatggatgggctggatcaacaccaacaccggcgagcctacctacgccgaagagttcaagggcagattcgccttcagcctggaaaccagcgccagcacagcctacctccagatcaacaacctgaagaacgaggacaccgccacctacttttgcgccagactcggcttcggcaacgctatggattattggggccagggcaccagcgtgaccgtttcttctacgcgtgagcagaaactgatctcggaagaggatctggggagcggcatccagaaccctgatcctgccgtgtaccagctgcgggatagcaagagcagcgacaagagcgtgtgtctgttcaccgacttcgacagccagaccaacgtgtcccagagcaaggactccgacgtgtacatcaccgataagaccgtgctggacatgcggagcatggacttcaagagcaactccgccgtggcctggtccaacaagtccgatttcgcctgcgccaacgccttcaacaacagcattatccccgaggacacattcttcccaagccccgagagcagctgcggtacccagagttttgggttgttggaccctaaattgtgctatctgttggacggaatcctgttcatttacggagtgatcctgaccgcattgttcctgaagagaggccggaagaagctgctgtacatcttcaagcagcctttcatgcggcccgtgcagaccacccaggaagaggacggctgctcctgccggttccccgaggaagaagaaggcggctgcgagctgcgggttaagttttccagatccgcagacgcacccgcttaccaacaagggcagaaccaactctacaatgaacttaatttggggcggagggaagagtacgacgttctggacaaaaggaggggacgagatcccgagatgggcggaaagcctcagcgaaggaagaatccgcaagaggggctttataacgaactccagaaagataaaatggcagaagcctatagtgagattgggatgaagggagaaaggaggaggggtaaaggtcacgatgggttgtaccaaggattgagcacagccactaaagatacctatgatgcgctccacatgcaggccctgccgccaaga

SEQ ID NO: 3669 - DNA, 2805 bp, synthetic construct
  source 1..2805: mol_type = other DNA
atggccttaccagtgaccgccttgctcctgccgctggccttgctgctccacgccgccaggccggacatcgtgatgacacagagccctagcagcctgacagtgacagccggcgagaaagtgaccatgagctgcaagagcagccagagcctgctgaacagcggcaaccagaagaactacctgacctggtatcagcagaagcccggccagcctcctaagctgctgatctactgggccagcaccagagaaagcggcgtgcccgatagattcacaggcagcggcagcggaaccgacttcaccctgacaatcagctctgtgcaggccgaggatctggccgtgtactactgccagaacgactacagctaccctctgacctttggagccggcaccaagctggaacttaaactcgaggggaaaccaattcccaaccctcttctgggactggattcaaccggcagcggcgaggacctgaagaacgtgttcccacctgaggtggccgtgttcgagcctagcgaggccgagatcagccacacccagaaagccaccctcgtgtgcctggctaccggcttctaccccgaccatgtggaactgtcttggtgggtcaacggcaaagaggtgcacagcggcgtgtctaccgacccccagccactgaaagaacagcccgccctgaacgacagccggtactgcctgagcagcagactgagagtgtccgccaccttctggcagaacccccggaaccacttcagatgccaggtgcagttctacggcctgagcgagaacgacgagtggacccaggacagagccaagcccgtgacccagatcgtgtctgccgaagcctggggcagagccgattgcggatcccagagcttcggcctgctggaccccaagctgtgctacctgctggatggcatcctgttcatctacggcgtgatcctgaccgccctgttcctgaaacggggcagaaagaaactcctgtatatattcaaacaaccatttatgagaccagtacaaactactcaagaggaagatggctgtagctgccgatttccagaagaagaagaaggaggatgtgaactgagagtgaagttcagcagaagcgccgacgcccctgcctaccagcagggacagaaccaactgtacaacgagctgaacctgggcagacgggaagagtacgacgtgctggacaagcggagaggcagggaccctgagatgggcggaaagccccagcggagaaagaacccccaggaaggactgtataacgaactccagaaagacaagatggccgaagcctacagcgagatcggcatgaagggcgagcggagaagaggcaagggccacgatggcctgtaccagggcctgagcaccgccaccaaggacacctatgacgccctgcacatgcaggccctgcctccaagaagggccaagcgatctggatctggagcaacaaacttctcactactcaaacaagcaggtgacgtggaggagaatcccgggcctactagtatggactggatttggcgcatccttttccttgtcggcgctgctaccggcgcgcattccttcgaacaaattcagctggtgcagtctggccccgagctgaagaaacctggcgagacagtgaagatttcctgcaaggccagcggctacaccttcaccaactacggcatgaactgggtcaagcaggcccctggcaagggcctgaaatggatgggctggatcaacaccaacaccggcgagcctacctacgccgaagagttcaagggcagattcgccttcagcctggaaaccagcgccagcacagcctacctccagatcaacaacctgaagaacgaggacaccgccacctacttttgcgccagactcggcttcggcaacgctatggattattggggccagggcaccagcgtgaccgtttcttctacgcgtgagcagaaactgatctcggaagaggatctggggagcggcatccagaaccctgatcctgccgtgtaccagctgcgggatagcaagagcagcgacaagagcgtgtgtctgttcaccgacttcgacagccagaccaacgtgtcccagagcaaggactccgacgtgtacatcaccgataagaccgtgctggacatgcggagcatggacttcaagagcaactccgccgtggcctggtccaacaagtccgatttcgcctgcgccaacgccttcaacaacagcattatccccgaggacacattcttcccaagccccgagagcagctgcggtacccagagttttgggttgttggaccctaaattgtgctatctgttggacggaatcctgttcatttacggagtgatcctgaccgcattgttcctgaagagaggccggaagaagctgctgtacatcttcaagcagcctttcatgcggcccgtgcagaccacccaggaagaggacggctgctcctgccggttccccgaggaagaagaaggcggctgcgagctgcgggttaagttttccagatccgcagacgcacccgcttaccaacaagggcagaaccaactctacaatgaacttaatttggggcggagggaagagtacgacgttctggacaaaaggaggggacgagatcccgagatgggcggaaagcctcagcgaaggaagaatccgcaagaggggctttataacgaactccagaaagataaaatggcagaagcctatagtgagattgggatgaagggagaaaggaggaggggtaaaggtcacgatgggttgtaccaaggattgagcacagccactaaagatacctatgatgcgctccacatgcaggccctgccgccaaga

SEQ ID NO: 3670 - DNA, 2478 bp, synthetic construct
  source 1..2478: mol_type = other DNA
atggccttaccagtgaccgccttgctcctgccgctggccttgctgctccacgccgccaggccggacatcgtgatgacacagagccctagcagcctgacagtgacagccggcgagaaagtgaccatgagctgcaagagcagccagagcctgctgaacagcggcaaccagaagaactacctgacctggtatcagcagaagcccggccagcctcctaagctgctgatctactgggccagcaccagagaaagcggcgtgcccgatagattcacaggcagcggcagcggaaccgacttcaccctgacaatcagctctgtgcaggccgaggatctggccgtgtactactgccagaacgactacagctaccctctgacctttggagccggcaccaagctggaacttaaactcgagcagagcttcggcctgctggaccccaagctgtgctacctgctggatggcatcctgttcatctacggcgtgatcctgaccgccctgttcctgagagtgaagttcagcagaagcgccgacgcccctgcctaccagcagggacagaaccaactgtacaacgagctgaacctgggcagacgggaagagtacgacgtgctggacaagcggagaggcagggaccctgagatgggcggaaagccccagcggagaaagaacccccaggaaggactgtataacgaactccagaaagacaagatggccgaagcctacagcgagatcggcatgaagggcgagcggagaagaggcaagggccacgatggcctgtaccagggcctgagcaccgccaccaaggacacctatgacgccctgcacatgcaggccctgcctccaagaagggccaagcgatctggatctggagcaacaaacttctcactactcaaacaagcaggtgacgtggaggagaatcccgggcctactagtatggactggatttggcgcatccttttccttgtcggcgctgctaccggcgcgcattccttcgaacaaattcagctggtgcagtctggccccgagctgaagaaacctggcgagacagtgaagatttcctgcaaggccagcggctacaccttcaccaactacggcatgaactgggtcaagcaggcccctggcaagggcctgaaatggatgggctggatcaacaccaacaccggcgagcctacctacgccgaagagttcaagggcagattcgccttcagcctggaaaccagcgccagcacagcctacctccagatcaacaacctgaagaacgaggacaccgccacctacttttgcgccagactcggcttcggcaacgctatggattattggggccagggcaccagcgtgaccgtttcttctacgcgtcagagttttgggttgttggaccctaaattgtgctatctgttggacggaatcctgttcatttacggagtgatcctgaccgcattgttcctgcgggttaagttttccagatccgcagacgcacccgcttaccaacaagggcagaaccaactctacaatgaacttaatttggggcggagggaagagtacgacgttctggacaaaaggaggggacgagatcccgagatgggcggaaagcctcagcgaaggaagaatccgcaagaggggctttataacgaactccagaaagataaaatggcagaagcctatagtgagattgggatgaagggagaaaggaggaggggtaaaggtcacgatgggttgtaccaaggattgagcacagccactaaagatacctatgatgcgctccacatgcaggccctgccgccaagacgcgccaagagaagcggatctggcgtgaagcagaccctgaatttcgacctgctgaagctggctggcgacgtggaatccaacccaggcccttctagaggccatatgaccgagtacaagcccacggtgcgcctcgccacccgcgacgacgtccccagggccgtacgcaccctcgccgccgcgttcgccgactaccccgccacgcgccacaccgtcgatccggaccgccacatcgagcgggtcaccgagctgcaagaactcttcctcacgcgcgtcgggctcgacatcggcaaggtgtgggtcgcggacgacggcgccgcggtggcggtctggaccacgccggagagcgtcgaagcgggggcggtgttcgccgagatcggcccgcgcatggccgagttgagcggttcccggctggccgcgcagcaacagatggaaggcctcctggcgccgcaccggcccaaggagcccgcgtggttcctggccaccgtcggcgtctcgcccgaccaccagggcaagggtctgggcagcgccgtcgtgctccccggagtggaggcggccgagcgcgccggggtgcccgccttcctggagacctccgcgccccgcaacctccccttctacgagcggctcggcttcaccgtcaccgccgacgtcgaggtgcccgaaggaccgcgcacctggtgcatgacccgcaagcccggtgcctga

SEQ ID NO: 3671 - DNA, 1950 bp, synthetic construct
  source 1..1950: mol_type = other DNA
atggccttaccagtgaccgccttgctcctgccgctggccttgctgctccacgccgccaggccggacatcgtgatgacacagagccctagcagcctgacagtgacagccggcgagaaagtgaccatgagctgcaagagcagccagagcctgctgaacagcggcaaccagaagaactacctgacctggtatcagcagaagcccggccagcctcctaagctgctgatctactgggccagcaccagagaaagcggcgtgcccgatagattcacaggcagcggcagcggaaccgacttcaccctgacaatcagctctgtgcaggccgaggatctggccgtgtactactgccagaacgactacagctaccctctgacctttggagccggcaccaagctggaacttaaactcgagggacagcctaaggccaatcctaccgtgacactgttccctccaagcagcgaagaactccaggccaacaaggccacacttgtgtgcctgatctccgacttctaccctggggctgtgacagtggcttggaaggccgatggatctcctgtgaaagccggcgtggaaaccaccaagccatccaagcagagcaacaacaaatacgccgccagctcctacctgagcctgacacctgagcagtggaagtcccacagatcctacagctgccaagtgacccacgaaggcagcaccgtggaaaagacagtggcccctacagagtgcagccccatcaagaccgatgtgattacaatggaccccaaggacaactgctccaaggacgccaacgataccctgctgctccagctgaccaacaccagcgcctactacatgtacttgttgctgctgctgaagtccgtggtgtacttcgccatcatcacatgctgcctgctgcggagaaccgccttctgctgcaacggcgagaagtctagggccaagcgatctggatctggagcaacaaacttctcactactcaaacaagcaggtgacgtggaggagaatcccgggcctactagtatggactggatttggcgcatccttttccttgtcggcgctgctaccggcgcgcattccttcgaacaaattcagctggtgcagtctggccccgagctgaagaaacctggcgagacagtgaagatttcctgcaaggccagcggctacaccttcaccaactacggcatgaactgggtcaagcaggcccctggcaagggcctgaaatggatgggctggatcaacaccaacaccggcgagcctacctacgccgaagagttcaagggcagattcgccttcagcctggaaaccagcgccagcacagcctacctccagatcaacaacctgaagaacgaggacaccgccacctacttttgcgccagactcggcttcggcaacgctatggattattggggccagggcaccagcgtgaccgtttcttctacgcgtgcctctacaaagggaccctccgtgtttcctctggctcccagcagcaagtctacaagcggaggaacagccgctctgggctgcctggtcaaggattactttcccgagcctgtgaccgtgtcctggaatagcggagcactgacaagcggcgtgcacacctttccagccgtgctgcaaagcagcggcctgtactctctgagcagcgtggtcacagtgcctagctctagcctgggcacccagacctacatctgcaatgtgaaccacaagcctagcaacaccaaggtggacaagagagtggaacccaagagctgtgaagtgaaaaccgactccaccgaccacgtgaagcccaaagagacagagaacaccaagcagcccagcaagagctgccacaagcccaaggccatcgtgcacaccgagaaagtgaacatgatgagcctgaccgtgctgggcctgcggatgctgttcgccaaaaccgtggccgtgaacttcctgctgaccgccaagctgttcttcctc

SEQ ID NO: 3672 - DNA, 1884 bp, synthetic construct
  source 1..1884: mol_type = other DNA
atggccttaccagtgaccgccttgctcctgccgctggccttgctgctccacgccgccaggccggacatcgtgatgacacagagccctagcagcctgacagtgacagccggcgagaaagtgaccatgagctgcaagagcagccagagcctgctgaacagcggcaaccagaagaactacctgacctggtatcagcagaagcccggccagcctcctaagctgctgatctactgggccagcaccagagaaagcggcgtgcccgatagattcacaggcagcggcagcggaaccgacttcaccctgacaatcagctctgtgcaggccgaggatctggccgtgtactactgccagaacgactacagctaccctctgacctttggagccggcaccaagctggaacttaaactcgagggacagcctaaggccaatcctaccgtgacactgttccctccaagcagcgaagaactccaggccaacaaggccacacttgtgtgcctgatctccgacttctaccctggggctgtgacagtggcttggaaggccgatggatctcctgtgaaagccggcgtggaaaccaccaagccatccaagcagagcaacaacaaatacgccgccagctcctacctgagcctgacacctgagcagtggaagtcccacagatcctacagctgccaagtgacccacgaaggcagcaccgtggaaaagacagtggcccctacagagtgcagcggcagagccgattgcggcatcaccagcgccagctaccaccagggcgtgctgagcgccaccatcctgtacgagatcctgctgggcaaggccaccctgtacgccgtgctggtgtctgccctggtgctgatggctatggtcaagcggaaggacagccggggaagggccaagcgatctggatctggagcaacaaacttctcactactcaaacaagcaggtgacgtggaggagaatcccgggcctactagtatggactggatttggcgcatccttttccttgtcggcgctgctaccggcgcgcattccttcgaacaaattcagctggtgcagtctggccccgagctgaagaaacctggcgagacagtgaagatttcctgcaaggccagcggctacaccttcaccaactacggcatgaactgggtcaagcaggcccctggcaagggcctgaaatggatgggctggatcaacaccaacaccggcgagcctacctacgccgaagagttcaagggcagattcgccttcagcctggaaaccagcgccagcacagcctacctccagatcaacaacctgaagaacgaggacaccgccacctacttttgcgccagactcggcttcggcaacgctatggattattggggccagggcaccagcgtgaccgtttcttctacgcgtgcctctacaaagggaccctccgtgtttcctctggctcccagcagcaagtctacaagcggaggaacagccgctctgggctgcctggtcaaggattactttcccgagcctgtgaccgtgtcctggaatagcggagcactgacaagcggcgtgcacacctttccagccgtgctgcaaagcagcggcctgtactctctgagcagcgtggtcacagtgcctagctctagcctgggcacccagacctacatctgcaatgtgaaccacaagcctagcaacaccaaggtggacaagagagtggaacccaagagctgtatccccgaggacacattcttcccaagcagcgacgtgccctgcgacgtgaagctggtggaaaagagcttcgagacagacaccaacctgaacttccagaacctgagcgtgatcggcttcagaatcctgctgctgaaagtggccggctttaacctgctgatgaccctgcggctgtggtccagc

SEQ ID NO: 3673 - DNA, 1884 bp, synthetic construct
  source 1..1884: mol_type = other DNA
atggccttaccagtgaccgccttgctcctgccgctggccttgctgctccacgccgccaggccggacatcgtgatgacacagagccctagcagcctgacagtgacagccggcgagaaagtgaccatgagctgcaagagcagccagagcctgctgaacagcggcaaccagaagaactacctgacctggtatcagcagaagcccggccagcctcctaagctgctgatctactgggccagcaccagagaaagcggcgtgcccgatagattcacaggcagcggcagcggaaccgacttcaccctgacaatcagctctgtgcaggccgaggatctggccgtgtactactgccagaacgactacagctaccctctgacctttggagccggcaccaagctggaacttaaactcgagggacagcctaaggccaatcctaccgtgacactgttccctccaagcagcgaagaactccaggccaacaaggccacacttgtgtgcctgatctccgacttctaccctggggctgtgacagtggcttggaaggccgatggatctcctgtgaaagccggcgtggaaaccaccaagccatccaagcagagcaacaacaaatacgccgccagctcctacctgagcctgacacctgagcagtggaagtcccacagatcctacagctgccaagtgacccacgaaggcagcaccgtggaaaagacagtggcccctacagagtgcagcggcagagccgattgcggctttaccagcgagagctaccagcagggcgtgctgagcgccaccatcctgtacgagatcctgctgggcaaggccaccctgtacgccgtgctggtgtctgccctggtgctgatggctatggtcaagcggaaggacagccggggaagggccaagcgatctggatctggagcaacaaacttctcactactcaaacaagcaggtgacgtggaggagaatcccgggcctactagtatggactggatttggcgcatccttttccttgtcggcgctgctaccggcgcgcattccttcgaacaaattcagctggtgcagtctggccccgagctgaagaaacctggcgagacagtgaagatttcctgcaaggccagcggctacaccttcaccaactacggcatgaactgggtcaagcaggcccctggcaagggcctgaaatggatgggctggatcaacaccaacaccggcgagcctacctacgccgaagagttcaagggcagattcgccttcagcctggaaaccagcgccagcacagcctacctccagatcaacaacctgaagaacgaggacaccgccacctacttttgcgccagactcggcttcggcaacgctatggattattggggccagggcaccagcgtgaccgtttcttctacgcgtgcctctacaaagggaccctccgtgtttcctctggctcccagcagcaagtctacaagcggaggaacagccgctctgggctgcctggtcaaggattactttcccgagcctgtgaccgtgtcctggaatagcggagcactgacaagcggcgtgcacacctttccagccgtgctgcaaagcagcggcctgtactctctgagcagcgtggtcacagtgcctagctctagcctgggcacccagacctacatctgcaatgtgaaccacaagcctagcaacaccaaggtggacaagagagtggaacccaagagctgtatccccgaggacacattcttcccaagccccgagagcagctgcgacgtgaagctggtggaaaagagcttcgagacagacaccaacctgaacttccagaacctgagcgtgatcggcttcagaatcctgctgctgaaagtggccggctttaacctgctgatgaccctgcggctgtggtccagc

SEQ ID NO: 3674 - DNA, 1362 bp, synthetic construct
  source 1..1362: mol_type = other DNA
atggccttaccagtgaccgccttgctcctgccgctggccttgctgctccacgccgccaggccggacatcgtgatgacacagagccctagcagcctgacagtgacagccggcgagaaagtgaccatgagctgcaagagcagccagagcctgctgaacagcggcaaccagaagaactacctgacctggtatcagcagaagcccggccagcctcctaagctgctgatctactgggccagcaccagagaaagcggcgtgcccgatagattcacaggcagcggcagcggaaccgacttcaccctgacaatcagctctgtgcaggccgaggatctggccgtgtactactgccagaacgactacagctaccctctgacctttggagccggcaccaagctggaacttaaaggcggaggcggaagtggaggcggaggatctggcggcggaggctctcaaattcagctggtgcagtctggccccgagctgaagaaacctggcgagacagtgaagatttcctgcaaggccagcggctacaccttcaccaactacggcatgaactgggtcaagcaggcccctggcaagggcctgaaatggatgggctggatcaacaccaacaccggcgagcctacctacgccgaagagttcaagggcagattcgccttcagcctggaaaccagcgccagcacagcctacctccagatcaacaacctgaagaacgaggacaccgccacctacttttgcgccagactcggcttcggcaacgctatggattattggggccagggcaccagcgtgaccgtttcttctacgcgtgacggtaacgaggagatgggaggaatcactcaaaccccttacaaagtctcaatttcaggaacaactgttatccttacatgtccccagtatcctggcagcgagatcctttggcagcataacgacaagaatatagggggagatgaagacgataagaatatcggatctgacgaggatcacttgagcctgaaagagttctccgagcttgaacaaagcggatattatgtgtgctatccgcgcgggtcaaagccggaagacgctaacttttacctttatctccgagccagagtgtgcgaaaattgcatggaaatggacgttatgtccgttgctacaatagttatcgtagatatatgcatcacgggtggactgcttctgctggtttattattggtccaagaatagaaaggccaaagctaaacccgtgaccagaggcgctggcgcaggcggaaggcaaaggggacaaaacaaagaacggccaccaccagtgccaaatccagattatgagcctattcggaaaggacagagggacctgtactctggcctgaatcagagaagaatc

SEQ ID NO: 3675 - DNA, 1257 bp, synthetic construct
  source 1..1257: mol_type = other DNA
atggccttaccagtgaccgccttgctcctgccgctggccttgctgctccacgccgccaggccggacatcgtgatgacacagagccctagcagcctgacagtgacagccggcgagaaagtgaccatgagctgcaagagcagccagagcctgctgaacagcggcaaccagaagaactacctgacctggtatcagcagaagcccggccagcctcctaagctgctgatctactgggccagcaccagagaaagcggcgtgcccgatagattcacaggcagcggcagcggaaccgacttcaccctgacaatcagctctgtgcaggccgaggatctggccgtgtactactgccagaacgactacagctaccctctgacctttggagccggcaccaagctggaacttaaaggcggaggcggaagtggaggcggaggatctggcggcggaggctctcaaattcagctggtgcagtctggccccgagctgaagaaacctggcgagacagtgaagatttcctgcaaggccagcggctacaccttcaccaactacggcatgaactgggtcaagcaggcccctggcaagggcctgaaatggatgggctggatcaacaccaacaccggcgagcctacctacgccgaagagttcaagggcagattcgccttcagcctggaaaccagcgccagcacagcctacctccagatcaacaacctgaagaacgaggacaccgccacctacttttgcgccagactcggcttcggcaacgctatggattattggggccagggcaccagcgtgaccgtttcttctacgcgtttcaagatccccatcgaggaactggaagatcgggtgttcgtgaactgcaacacctctatcacctgggtggaaggcaccgtgggaacactgctgagcgacatcaccagactggacctcggcaagcggattctggaccctcggggcatctacagatgcaacggcaccgacatctacaaggacaaagaaagcaccgtgcaggtccactacagaatgtgccagtcctgcgtggaactggaccctgctacagtggccggcatcatcgtgaccgatgtgatcgctactctgctgctggctctgggagtgttctgcttcgccggacacgaaacaggcagactgtctggcgctgccgatacacaggccctgctgagaaacgaccaagtgtatcagcccctgcgcgacagagatgatgcccagtattctcacctcggcggcaactgggctagaaacaag

SEQ ID NO: 3676 - DNA, 1287 bp, synthetic construct
  source 1..1287: mol_type = other DNA
atggccttaccagtgaccgccttgctcctgccgctggccttgctgctccacgccgccaggccggacatcgtgatgacacagagccctagcagcctgacagtgacagccggcgagaaagtgaccatgagctgcaagagcagccagagcctgctgaacagcggcaaccagaagaactacctgacctggtatcagcagaagcccggccagcctcctaagctgctgatctactgggccagcaccagagaaagcggcgtgcccgatagattcacaggcagcggcagcggaaccgacttcaccctgacaatcagctctgtgcaggccgaggatctggccgtgtactactgccagaacgactacagctaccctctgacctttggagccggcaccaagctggaacttaaaggcggaggcggaagtggaggcggaggatctggcggcggaggctctcaaattcagctggtgcagtctggccccgagctgaagaaacctggcgagacagtgaagatttcctgcaaggccagcggctacaccttcaccaactacggcatgaactgggtcaagcaggcccctggcaagggcctgaaatggatgggctggatcaacaccaacaccggcgagcctacctacgccgaagagttcaagggcagattcgccttcagcctggaaaccagcgccagcacagcctacctccagatcaacaacctgaagaacgaggacaccgccacctacttttgcgccagactcggcttcggcaacgctatggattattggggccagggcaccagcgtgaccgtttcttctacgcgtcagagcatcaagggcaaccacctggtcaaggtgtacgactaccaagaggacggcagcgtgctgctgacatgtgatgccgaggccaagaacatcacctggtttaaggacggcaagatgatcggcttcctgaccgaggacaagaagaagtggaacctgggcagcaacgctaaggaccccagaggcatgtatcagtgcaagggcagccagaacaagagcaagcccctccaggtgtactaccggatgtgccagaactgcatcgagctgaacgccgctaccatcagcggctttctgttcgccgagatcgtgtccatcttcgtgctggccgtgggcgtgtactttatcgctggacaggatggcgtgcggcagagcagagcttccgataagcaaaccctgctgcctaacgaccagctgtaccagcctctgaaggacagagaggacgaccagtacagccacctccagggcaatcagctgagaagaaac

SEQ ID NO: 3677 - DNA, 1236 bp, synthetic construct
  source 1..1236: mol_type = other DNA
atggccttaccagtgaccgccttgctcctgccgctggccttgctgctccacgccgccaggccggacatcgtgatgacacagagccctagcagcctgacagtgacagccggcgagaaagtgaccatgagctgcaagagcagccagagcctgctgaacagcggcaaccagaagaactacctgacctggtatcagcagaagcccggccagcctcctaagctgctgatctactgggccagcaccagagaaagcggcgtgcccgatagattcacaggcagcggcagcggaaccgacttcaccctgacaatcagctctgtgcaggccgaggatctggccgtgtactactgccagaacgactacagctaccctctgacctttggagccggcaccaagctggaacttaaaggcggaggcggaagtggaggcggaggatctggcggcggaggctctcaaattcagctggtgcagtctggccccgagctgaagaaacctggcgagacagtgaagatttcctgcaaggccagcggctacaccttcaccaactacggcatgaactgggtcaagcaggcccctggcaagggcctgaaatggatgggctggatcaacaccaacaccggcgagcctacctacgccgaagagttcaagggcagattcgccttcagcctggaaaccagcgccagcacagcctacctccagatcaacaacctgaagaacgaggacaccgccacctacttttgcgccagactcggcttcggcaacgctatggattattggggccagggcaccagcgtgaccgtttcttctacgcgtcagagttttgggttgttggaccctaaattgtgctatctgttggacggaatcctgttcatttacggagtgatcctgaccgcattgttcctgcgggttaagttttccagatccgcagacgcacccgcttaccaacaagggcagaaccaactctacaatgaacttaatttggggcggagggaagagtacgacgttctggacaaaaggaggggacgagatcccgagatgggcggaaagcctcagcgaaggaagaatccgcaagaggggctttataacgaactccagaaagataaaatggcagaagcctatagtgagattgggatgaagggagaaaggaggaggggtaaaggtcacgatgggttgtaccaaggattgagcacagccactaaagatacctatgatgcgctccacatgcaggccctgccgccaaga

SEQ ID NO: 3678 - DNA, 1362 bp, synthetic construct
  source 1..1362: mol_type = other DNA
atggccttaccagtgaccgccttgctcctgccgctggccttgctgctccacgccgccaggccgcaaattcagctggtgcagtctggccccgagctgaagaaacctggcgagacagtgaagatttcctgcaaggccagcggctacaccttcaccaactacggcatgaactgggtcaagcaggcccctggcaagggcctgaaatggatgggctggatcaacaccaacaccggcgagcctacctacgccgaagagttcaagggcagattcgccttcagcctggaaaccagcgccagcacagcctacctccagatcaacaacctgaagaacgaggacaccgccacctacttttgcgccagactcggcttcggcaacgctatggattattggggccagggcaccagcgtgaccgtttcttctggcggaggcggaagtggaggcggaggatctggcggcggaggctctgacatcgtgatgacacagagccctagcagcctgacagtgacagccggcgagaaagtgaccatgagctgcaagagcagccagagcctgctgaacagcggcaaccagaagaactacctgacctggtatcagcagaagcccggccagcctcctaagctgctgatctactgggccagcaccagagaaagcggcgtgcccgatagattcacaggcagcggcagcggaaccgacttcaccctgacaatcagctctgtgcaggccgaggatctggccgtgtactactgccagaacgactacagctaccctctgacctttggagccggcaccaagctggaacttaaaacgcgtgacggtaacgaggagatgggaggaatcactcaaaccccttacaaagtctcaatttcaggaacaactgttatccttacatgtccccagtatcctggcagcgagatcctttggcagcataacgacaagaatatagggggagatgaagacgataagaatatcggatctgacgaggatcacttgagcctgaaagagttctccgagcttgaacaaagcggatattatgtgtgctatccgcgcgggtcaaagccggaagacgctaacttttacctttatctccgagccagagtgtgcgaaaattgcatggaaatggacgttatgtccgttgctacaatagttatcgtagatatatgcatcacgggtggactgcttctgctggtttattattggtccaagaatagaaaggccaaagctaaacccgtgaccagaggcgctggcgcaggcggaaggcaaaggggacaaaacaaagaacggccaccaccagtgccaaatccagattatgagcctattcggaaaggacagagggacctgtactctggcctgaatcagagaagaatc

SEQ ID NO: 3679 - DNA, 1257 bp, synthetic construct
  source 1..1257: mol_type = other DNA
atggccttaccagtgaccgccttgctcctgccgctggccttgctgctccacgccgccaggccgcaaattcagctggtgcagtctggccccgagctgaagaaacctggcgagacagtgaagatttcctgcaaggccagcggctacaccttcaccaactacggcatgaactgggtcaagcaggcccctggcaagggcctgaaatggatgggctggatcaacaccaacaccggcgagcctacctacgccgaagagttcaagggcagattcgccttcagcctggaaaccagcgccagcacagcctacctccagatcaacaacctgaagaacgaggacaccgccacctacttttgcgccagactcggcttcggcaacgctatggattattggggccagggcaccagcgtgaccgtttcttctggcggaggcggaagtggaggcggaggatctggcggcggaggctctgacatcgtgatgacacagagccctagcagcctgacagtgacagccggcgagaaagtgaccatgagctgcaagagcagccagagcctgctgaacagcggcaaccagaagaactacctgacctggtatcagcagaagcccggccagcctcctaagctgctgatctactgggccagcaccagagaaagcggcgtgcccgatagattcacaggcagcggcagcggaaccgacttcaccctgacaatcagctctgtgcaggccgaggatctggccgtgtactactgccagaacgactacagctaccctctgacctttggagccggcaccaagctggaacttaaaacgcgtttcaagatccccatcgaggaactggaagatcgggtgttcgtgaactgcaacacctctatcacctgggtggaaggcaccgtgggaacactgctgagcgacatcaccagactggacctcggcaagcggattctggaccctcggggcatctacagatgcaacggcaccgacatctacaaggacaaagaaagcaccgtgcaggtccactacagaatgtgccagtcctgcgtggaactggaccctgctacagtggccggcatcatcgtgaccgatgtgatcgctactctgctgctggctctgggagtgttctgcttcgccggacacgaaacaggcagactgtctggcgctgccgatacacaggccctgctgagaaacgaccaagtgtatcagcccctgcgcgacagagatgatgcccagtattctcacctcggcggcaactgggctagaaacaag

SEQ ID NO: 3680 - DNA, 1287 bp, synthetic construct
  source 1..1287: mol_type = other DNA
atggccttaccagtgaccgccttgctcctgccgctggccttgctgctccacgccgccaggccgcaaattcagctggtgcagtctggccccgagctgaagaaacctggcgagacagtgaagatttcctgcaaggccagcggctacaccttcaccaactacggcatgaactgggtcaagcaggcccctggcaagggcctgaaatggatgggctggatcaacaccaacaccggcgagcctacctacgccgaagagttcaagggcagattcgccttcagcctggaaaccagcgccagcacagcctacctccagatcaacaacctgaagaacgaggacaccgccacctacttttgcgccagactcggcttcggcaacgctatggattattggggccagggcaccagcgtgaccgtttcttctggcggaggcggaagtggaggcggaggatctggcggcggaggctctgacatcgtgatgacacagagccctagcagcctgacagtgacagccggcgagaaagtgaccatgagctgcaagagcagccagagcctgctgaacagcggcaaccagaagaactacctgacctggtatcagcagaagcccggccagcctcctaagctgctgatctactgggccagcaccagagaaagcggcgtgcccgatagattcacaggcagcggcagcggaaccgacttcaccctgacaatcagctctgtgcaggccgaggatctggccgtgtactactgccagaacgactacagctaccctctgacctttggagccggcaccaagctggaacttaaaacgcgtcagagcatcaagggcaaccacctggtcaaggtgtacgactaccaagaggacggcagcgtgctgctgacatgtgatgccgaggccaagaacatcacctggtttaaggacggcaagatgatcggcttcctgaccgaggacaagaagaagtggaacctgggcagcaacgctaaggaccccagaggcatgtatcagtgcaagggcagccagaacaagagcaagcccctccaggtgtactaccggatgtgccagaactgcatcgagctgaacgccgctaccatcagcggctttctgttcgccgagatcgtgtccatcttcgtgctggccgtgggcgtgtactttatcgctggacaggatggcgtgcggcagagcagagcttccgataagcaaaccctgctgcctaacgaccagctgtaccagcctctgaaggacagagaggacgaccagtacagccacctccagggcaatcagctgagaagaaac

SEQ ID NO: 3681 - DNA, 1236 bp, synthetic construct
  source 1..1236: mol_type = other DNA
atggccttaccagtgaccgccttgctcctgccgctggccttgctgctccacgccgccaggccgcaaattcagctggtgcagtctggccccgagctgaagaaacctggcgagacagtgaagatttcctgcaaggccagcggctacaccttcaccaactacggcatgaactgggtcaagcaggcccctggcaagggcctgaaatggatgggctggatcaacaccaacaccggcgagcctacctacgccgaagagttcaagggcagattcgccttcagcctggaaaccagcgccagcacagcctacctccagatcaacaacctgaagaacgaggacaccgccacctacttttgcgccagactcggcttcggcaacgctatggattattggggccagggcaccagcgtgaccgtttcttctggcggaggcggaagtggaggcggaggatctggcggcggaggctctgacatcgtgatgacacagagccctagcagcctgacagtgacagccggcgagaaagtgaccatgagctgcaagagcagccagagcctgctgaacagcggcaaccagaagaactacctgacctggtatcagcagaagcccggccagcctcctaagctgctgatctactgggccagcaccagagaaagcggcgtgcccgatagattcacaggcagcggcagcggaaccgacttcaccctgacaatcagctctgtgcaggccgaggatctggccgtgtactactgccagaacgactacagctaccctctgacctttggagccggcaccaagctggaacttaaaacgcgtcagagttttgggttgttggaccctaaattgtgctatctgttggacggaatcctgttcatttacggagtgatcctgaccgcattgttcctgcgggttaagttttccagatccgcagacgcacccgcttaccaacaagggcagaaccaactctacaatgaacttaatttggggcggagggaagagtacgacgttctggacaaaaggaggggacgagatcccgagatgggcggaaagcctcagcgaaggaagaatccgcaagaggggctttataacgaactccagaaagataaaatggcagaagcctatagtgagattgggatgaagggagaaaggaggaggggtaaaggtcacgatgggttgtaccaaggattgagcacagccactaaagatacctatgatgcgctccacatgcaggccctgccgccaaga

SEQ ID NO: 3682 - DNA, 1521 bp, synthetic construct
  source 1..1521: mol_type = other DNA
atggccttaccagtgaccgccttgctcctgccgctggccttgctgctccacgccgccaggccggacatcgtgatgacacagagccctagcagcctgacagtgacagccggcgagaaagtgaccatgagctgcaagagcagccagagcctgctgaacagcggcaaccagaagaactacctgacctggtatcagcagaagcccggccagcctcctaagctgctgatctactgggccagcaccagagaaagcggcgtgcccgatagattcacaggcagcggcagcggaaccgacttcaccctgacaatcagctctgtgcaggccgaggatctggccgtgtactactgccagaacgactacagctaccctctgacctttggagccggcaccaagctggaacttaaaggcggaggcggaagtggaggcggaggatctggcggcggaggctctcaaattcagctggtgcagtctggccccgagctgaagaaacctggcgagacagtgaagatttcctgcaaggccagcggctacaccttcaccaactacggcatgaactgggtcaagcaggcccctggcaagggcctgaaatggatgggctggatcaacaccaacaccggcgagcctacctacgccgaagagttcaagggcagattcgccttcagcctggaaaccagcgccagcacagcctacctccagatcaacaacctgaagaacgaggacaccgccacctacttttgcgccagactcggcttcggcaacgctatggattattggggccagggcaccagcgtgaccgtttcttctacgcgtggaatgaggactgaggatcttcccaaagctgtcgtctttctcgaaccccaatggtatcgggtgctcgaaaaagactctgtgacactgaaatgccaaggggcctactctcccgaggacaactccacacagtggtttcataatgagtccctcatcagctctcaggccagctcttatttcattgatgccgctacagtggacgactccggcgagtatcggtgtcagaccaatctgtctacactgtctgaccccgtgcagcttgaggtccacattggatggttgctcttgcaagccccacgctgggttttcaaagaggaagatccaatccatctgcggtgccacagctggaaaaacaccgctctccacaaagtcacatacctgcaaaatggcaaaggacgcaaatacttccatcacaattccgatttttacattccgaaggctaccctgaaagacagcggcagctatttctgccggggactcgtcggctccaagaatgtgtcctccgaaaccgtgaatatcacgattacccaaggactggctgtgcctacaatctctagcttctttccgcctggataccaagtctccttctgtcttgtgatggtcctcctgtttgctgtggacacaggactgtacttttccgtgaaaacgaacatccgcagctccacacgcgattggaaagatcacaagtttaaatggcgcaaagatccccaggacaag

SEQ ID NO: 3683 - DNA, 2370 bp, synthetic construct
  source 1..2370: mol_type = other DNA
atggccttaccagtgaccgccttgctcctgccgctggccttgctgctccacgccgccaggccggacatcgtgatgacacagagccctagcagcctgacagtgacagccggcgagaaagtgaccatgagctgcaagagcagccagagcctgctgaacagcggcaaccagaagaactacctgacctggtatcagcagaagcccggccagcctcctaagctgctgatctactgggccagcaccagagaaagcggcgtgcccgatagattcacaggcagcggcagcggaaccgacttcaccctgacaatcagctctgtgcaggccgaggatctggccgtgtactactgccagaacgactacagctaccctctgacctttggagccggcaccaagctggaacttaaaggcggaggcggaagtggaggcggaggatctggcggcggaggctctcaaattcagctggtgcagtctggccccgagctgaagaaacctggcgagacagtgaagatttcctgcaaggccagcggctacaccttcaccaactacggcatgaactgggtcaagcaggcccctggcaagggcctgaaatggatgggctggatcaacaccaacaccggcgagcctacctacgccgaagagttcaagggcagattcgccttcagcctggaaaccagcgccagcacagcctacctccagatcaacaacctgaagaacgaggacaccgccacctacttttgcgccagactcggcttcggcaacgctatggattattggggccagggcaccagcgtgaccgtttcttctacgcgtggaggctctggacaacaacagaccctgcctaaaccattcatctgggctgaaccccactttatggttccgaaagagaaacaagtcacgatttgttgccaagggaattacggggccgtcgagtatcagctccactttgagggctccctgtttgctgtggatcggcccaagccacctgaaagaatcaacaaagtccaattctatattcctgatatgaactcccgcatggcaggccagtattcatgtatctaccgcgtgggagaactttggagtgaaccctctaacctgctggacctcgtcgtgacagagatgtatgatacacccacactgtctgtgcaccctgggccagaagttatcagcggagaaaaagttaccttttattgccgcctcgataccgctacctctatgttcctcttgctgaaagagggccgcagctctcacgtgcagcgaggctacggaaaggtccaagctgagtttcctctcggccccgtgaccaccgctcacaggggcacatatagatgttttggctcttataacaatcatgcctggtcattcccatccgagcctgtgaaactgctggtcacaggcgatattgagaatacctctctggccccagaagatcctacattccccgccgacacatggggaacatatctgctgacaaccgaaaccgggctgcaaaaggaccatgctctgtgggatcataccgctcagaatctgcttcggatggggcttgcattcctggtcctggtggctcttgtctggtttctggtcgaggactggctgtcccggaagagaaccagagaaagagcttccagggccagcacctgggaaggcagacgcagactgaatactcagaccctgcgcgccaagagaagcggatctggcgtgaagcagaccctgaatttcgacctgctgaagctggctggcgacgtggaatccaacccaggcccttctagaggccatatgaccgagtacaagcccacggtgcgcctcgccacccgcgacgacgtccccagggccgtacgcaccctcgccgccgcgttcgccgactaccccgccacgcgccacaccgtcgatccggaccgccacatcgagcgggtcaccgagctgcaagaactcttcctcacgcgcgtcgggctcgacatcggcaaggtgtgggtcgcggacgacggcgccgcggtggcggtctggaccacgccggagagcgtcgaagcgggggcggtgttcgccgagatcggcccgcgcatggccgagttgagcggttcccggctggccgcgcagcaacagatggaaggcctcctggcgccgcaccggcccaaggagcccgcgtggttcctggccaccgtcggcgtctcgcccgaccaccagggcaagggtctgggcagcgccgtcgtgctccccggagtggaggcggccgagcgcgccggggtgcccgccttcctggagacctccgcgccccgcaacctccccttctacgagcggctcggcttcaccgtcaccgccgacgtcgaggtgcccgaaggaccgcgcacctggtgcatgacccgcaagcccggtgcctga

SEQ ID NO: 3684 - DNA, 1869 bp, synthetic construct
  source 1..1869: mol_type = other DNA
atggccttaccagtgaccgccttgctcctgccgctggccttgctgctccacgccgccaggccggacatcgtgatgacacagagccctagcagcctgacagtgacagccggcgagaaagtgaccatgagctgcaagagcagccagagcctgctgaacagcggcaaccagaagaactacctgacctggtatcagcagaagcccggccagcctcctaagctgctgatctactgggccagcaccagagaaagcggcgtgcccgatagattcacaggcagcggcagcggaaccgacttcaccctgacaatcagctctgtgcaggccgaggatctggccgtgtactactgccagaacgactacagctaccctctgacctttggagccggcaccaagctggaacttaaaggcggaggcggaagtggaggcggaggatctggcggcggaggctctcaaattcagctggtgcagtctggccccgagctgaagaaacctggcgagacagtgaagatttcctgcaaggccagcggctacaccttcaccaactacggcatgaactgggtcaagcaggcccctggcaagggcctgaaatggatgggctggatcaacaccaacaccggcgagcctacctacgccgaagagttcaagggcagattcgccttcagcctggaaaccagcgccagcacagcctacctccagatcaacaacctgaagaacgaggacaccgccacctacttttgcgccagactcggcttcggcaacgctatggattattggggccagggcaccagcgtgaccgtttcttctacgcgtaaaattgaagttatgtatcctcctccttacctagacaatgagaagagcaatggaaccattatccatgtgaaaggggcgcgtggcgatattgagaatacctctctggccccagaagatcctacattccccgccgacacatggggaacatatctgctgacaaccgaaaccgggctgcaaaaggaccatgctctgtgggatcataccgctcagaatctgcttcggatggggcttgcattcctggtcctggtggctcttgtctggtttctggtcgaggactggctgtcccggaagagaaccagagaaagagcttccagggccagcacctgggaaggcagacgcagactgaatactcagaccctgcgcgccaagagaagcggatctggcgtgaagcagaccctgaatttcgacctgctgaagctggctggcgacgtggaatccaacccaggcccttctagaggccatatgaccgagtacaagcccacggtgcgcctcgccacccgcgacgacgtccccagggccgtacgcaccctcgccgccgcgttcgccgactaccccgccacgcgccacaccgtcgatccggaccgccacatcgagcgggtcaccgagctgcaagaactcttcctcacgcgcgtcgggctcgacatcggcaaggtgtgggtcgcggacgacggcgccgcggtggcggtctggaccacgccggagagcgtcgaagcgggggcggtgttcgccgagatcggcccgcgcatggccgagttgagcggttcccggctggccgcgcagcaacagatggaaggcctcctggcgccgcaccggcccaaggagcccgcgtggttcctggccaccgtcggcgtctcgcccgaccaccagggcaagggtctgggcagcgccgtcgtgctccccggagtggaggcggccgagcgcgccggggtgcccgccttcctggagacctccgcgccccgcaacctccccttctacgagcggctcggcttcaccgtcaccgccgacgtcgaggtgcccgaaggaccgcgcacctggtgcatgacccgcaagcccggtgcctga

SEQ ID NO: 3685 - DNA, 2130 bp, synthetic construct
  source 1..2130: mol_type = other DNA
atggccttaccagtgaccgccttgctcctgccgctggccttgctgctccacgccgccaggccggacatcgtgatgacacagagccctagcagcctgacagtgacagccggcgagaaagtgaccatgagctgcaagagcagccagagcctgctgaacagcggcaaccagaagaactacctgacctggtatcagcagaagcccggccagcctcctaagctgctgatctactgggccagcaccagagaaagcggcgtgcccgatagattcacaggcagcggcagcggaaccgacttcaccctgacaatcagctctgtgcaggccgaggatctggccgtgtactactgccagaacgactacagctaccctctgacctttggagccggcaccaagctggaacttaaaggcggaggcggaagtggaggcggaggatctggcggcggaggctctcaaattcagctggtgcagtctggccccgagctgaagaaacctggcgagacagtgaagatttcctgcaaggccagcggctacaccttcaccaactacggcatgaactgggtcaagcaggcccctggcaagggcctgaaatggatgggctggatcaacaccaacaccggcgagcctacctacgccgaagagttcaagggcagattcgccttcagcctggaaaccagcgccagcacagcctacctccagatcaacaacctgaagaacgaggacaccgccacctacttttgcgccagactcggcttcggcaacgctatggattattggggccagggcaccagcgtgaccgtttcttctacgcgtctgtgggtgtcccagccacctgaaattcggacactggaaggctcctccgcctttctgccctgtagctttaacgccagccaggggagactcgccatcggctctgtgacatggttccgggatgaagtcgtccctggaaaagaagttcgcaacggaacaccagagttcagaggcagactcgccccactggcaagctccagattcctgcatgaccatcaggctgaactgcacattagggacgtgcggggccacgatgcctccatctatgtgtgtcgggtcgaagtgcttggactcggcgtcggaactggaaacggcactaggctggtggtcgagaaagaacatccacagcttggcgctggcaccgtcctgttgcttagagccggattctatgccgtcagcttcctgtccgtggctgtggggtctacagtgtattaccagggaaaatgtctcacctggaaaggccccagacgccagcttccagctgttgttcctgctccactgccaccaccttgtggctcctctgctcacttgcttccaccagtgcctggcggacgcgccaagagaagcggatctggcgtgaagcagaccctgaatttcgacctgctgaagctggctggcgacgtggaatccaacccaggcccttctagaatgtaccggatgcagctgctgagctgtatcgccctgtctctggccctggtcacaaatagcgcccctaccagcagcagcaccaagaaaacccagctgcaactggaacacctcctgctggacctccagatgatcctgaacggcatcaacaactacaagaaccccaagctgaccgagatgctgaccgccaagttctacatgcccaagaaggccaccgagctgaagcacctccagtgcctggaagaggaactgaagcccctggaagaagtgctgaatctggcccagagcaagaacttccacctgaggccaagggacctgatctccaacatcaacgtgatcgtgctggaactgaaaggcagcgagacaaccttcatgtgcgagtacgccgacgagacagctaccatcgtggaatttctgaatcggtggatcaccttctgccagagcatcatcagcaccctgacaaagatcgaagtgatgtaccctcctccttacctggacaacgagaagtccaacggcaccatcatccacgtgaagggcaagcacctgtgtccttctccactgttccccggacctagcaagcctttctgggtgctcgttgttgttggcggcgtgctggcctgttacagcctgctggttaccgtggccttcatcatcttttgggtccgaagcaagcggagctaa

SEQ ID NO: 3686 - DNA, 2058 bp, synthetic construct
  source 1..2058: mol_type = other DNA
atggccttaccagtgaccgccttgctcctgccgctggccttgctgctccacgccgccaggccggacatcgtgatgacacagagccctagcagcctgacagtgacagccggcgagaaagtgaccatgagctgcaagagcagccagagcctgctgaacagcggcaaccagaagaactacctgacctggtatcagcagaagcccggccagcctcctaagctgctgatctactgggccagcaccagagaaagcggcgtgcccgatagattcacaggcagcggcagcggaaccgacttcaccctgacaatcagctctgtgcaggccgaggatctggccgtgtactactgccagaacgactacagctaccctctgacctttggagccggcaccaagctggaacttaaaggcggaggcggaagtggaggcggaggatctggcggcggaggctctcaaattcagctggtgcagtctggccccgagctgaagaaacctggcgagacagtgaagatttcctgcaaggccagcggctacaccttcaccaactacggcatgaactgggtcaagcaggcccctggcaagggcctgaaatggatgggctggatcaacaccaacaccggcgagcctacctacgccgaagagttcaagggcagattcgccttcagcctggaaaccagcgccagcacagcctacctccagatcaacaacctgaagaacgaggacaccgccacctacttttgcgccagactcggcttcggcaacgctatggattattggggccagggcaccagcgtgaccgtttcttctacgcgtctgtgggtgtcccagccacctgaaattcggacactggaaggctcctccgcctttctgccctgtagctttaacgccagccaggggagactcgccatcggctctgtgacatggttccgggatgaagtcgtccctggaaaagaagttcgcaacggaacaccagagttcagaggcagactcgccccactggcaagctccagattcctgcatgaccatcaggctgaactgcacattagggacgtgcggggccacgatgcctccatctatgtgtgtcgggtcgaagtgcttggactcggcgtcggaactggaaacggcactaggctggtggtcgagaaagaacatccacagcttggcgctggcaccgtcctgttgcttagagccggattctatgccgtcagcttcctgtccgtggctgtggggtctacagtgtattaccagggaaaatgtctcacctggaaaggccccagacgccagcttccagctgttgttcctgctccactgccaccaccttgtggctcctctgctcacttgcttccaccagtgcctggcggacgcgccaagagaagcggatctggcgtgaagcagaccctgaatttcgacctgctgaagctggctggcgacgtggaatccaacccaggcccttctagaggccatatgaccgagtacaagcccacggtgcgcctcgccacccgcgacgacgtccccagggccgtacgcaccctcgccgccgcgttcgccgactaccccgccacgcgccacaccgtcgatccggaccgccacatcgagcgggtcaccgagctgcaagaactcttcctcacgcgcgtcgggctcgacatcggcaaggtgtgggtcgcggacgacggcgccgcggtggcggtctggaccacgccggagagcgtcgaagcgggggcggtgttcgccgagatcggcccgcgcatggccgagttgagcggttcccggctggccgcgcagcaacagatggaaggcctcctggcgccgcaccggcccaaggagcccgcgtggttcctggccaccgtcggcgtctcgcccgaccaccagggcaagggtctgggcagcgccgtcgtgctccccggagtggaggcggccgagcgcgccggggtgcccgccttcctggagacctccgcgccccgcaacctccccttctacgagcggctcggcttcaccgtcaccgccgacgtcgaggtgcccgaaggaccgcgcacctggtgcatgacccgcaagcccggtgcctga

SEQ ID NO: 3687 - DNA, 1083 bp, synthetic construct
  source 1..1083: mol_type = other DNA
atggccttaccagtgaccgccttgctcctgccgctggccttgctgctccacgccgccaggccggacatcgtgatgacacagagccctagcagcctgacagtgacagccggcgagaaagtgaccatgagctgcaagagcagccagagcctgctgaacagcggcaaccagaagaactacctgacctggtatcagcagaagcccggccagcctcctaagctgctgatctactgggccagcaccagagaaagcggcgtgcccgatagattcacaggcagcggcagcggaaccgacttcaccctgacaatcagctctgtgcaggccgaggatctggccgtgtactactgccagaacgactacagctaccctctgacctttggagccggcaccaagctggaacttaaaggcggaggcggaagtggaggcggaggatctggcggcggaggctctcaaattcagctggtgcagtctggccccgagctgaagaaacctggcgagacagtgaagatttcctgcaaggccagcggctacaccttcaccaactacggcatgaactgggtcaagcaggcccctggcaagggcctgaaatggatgggctggatcaacaccaacaccggcgagcctacctacgccgaagagttcaagggcagattcgccttcagcctggaaaccagcgccagcacagcctacctccagatcaacaacctgaagaacgaggacaccgccacctacttttgcgccagactcggcttcggcaacgctatggattattggggccagggcaccagcgtgaccgtttcttctacgcgtaaaattgaagttatgtatcctcctccttacctagacaatgagaagagcaatggaaccattatccatgtgaaaggggcgcgtatcacccagggcctggccgtgtctaccatcagcagctttttcccacccggctaccaggtgtccttctgcctcgtgatggtgctgctgttcgccgtggacaccggcctgtacttcagcgtgaaaacaaacatccggtccagcaccagagactggaaggaccacaagttcaagtggcggaaggacccccaggacaag

SEQ ID NO: 3688 - DNA, 1083 bp, synthetic construct
  source 1..1083: mol_type = other DNA
atggccttaccagtgaccgccttgctcctgccgctggccttgctgctccacgccgccaggccggacatcgtgatgacacagagccctagcagcctgacagtgacagccggcgagaaagtgaccatgagctgcaagagcagccagagcctgctgaacagcggcaaccagaagaactacctgacctggtatcagcagaagcccggccagcctcctaagctgctgatctactgggccagcaccagagaaagcggcgtgcccgatagattcacaggcagcggcagcggaaccgacttcaccctgacaatcagctctgtgcaggccgaggatctggccgtgtactactgccagaacgactacagctaccctctgacctttggagccggcaccaagctggaacttaaaggcggaggcggaagtggaggcggaggatctggcggcggaggctctcaaattcagctggtgcagtctggccccgagctgaagaaacctggcgagacagtgaagatttcctgcaaggccagcggctacaccttcaccaactacggcatgaactgggtcaagcaggcccctggcaagggcctgaaatggatgggctggatcaacaccaacaccggcgagcctacctacgccgaagagttcaagggcagattcgccttcagcctggaaaccagcgccagcacagcctacctccagatcaacaacctgaagaacgaggacaccgccacctacttttgcgccagactcggcttcggcaacgctatggattattggggccagggcaccagcgtgaccgtttcttctacgcgtaaaattgaagttatgtatcctcctccttacctagacaatgagaagagcaatggaaccattatccatgtgaaaggggcgcgtattacccaaggactggctgtgcctacaatctctagcttctttccgcctggataccaagtctccttctgtcttgtgatggtcctcctgtttgctgtggacacaggactgtacttttccgtgaaaacgaacatccgcagctccacacgcgattggaaagatcacaagtttaaatggcgcaaagatccccaggacaag

SEQ ID NO: 3689 - DNA, 1020 bp, synthetic construct
  source 1..1020: mol_type = other DNA
atggccttaccagtgaccgccttgctcctgccgctggccttgctgctccacgccgccaggccggacatcgtgatgacacagagccctagcagcctgacagtgacagccggcgagaaagtgaccatgagctgcaagagcagccagagcctgctgaacagcggcaaccagaagaactacctgacctggtatcagcagaagcccggccagcctcctaagctgctgatctactgggccagcaccagagaaagcggcgtgcccgatagattcacaggcagcggcagcggaaccgacttcaccctgacaatcagctctgtgcaggccgaggatctggccgtgtactactgccagaacgactacagctaccctctgacctttggagccggcaccaagctggaacttaaaggcggaggcggaagtggaggcggaggatctggcggcggaggctctcaaattcagctggtgcagtctggccccgagctgaagaaacctggcgagacagtgaagatttcctgcaaggccagcggctacaccttcaccaactacggcatgaactgggtcaagcaggcccctggcaagggcctgaaatggatgggctggatcaacaccaacaccggcgagcctacctacgccgaagagttcaagggcagattcgccttcagcctggaaaccagcgccagcacagcctacctccagatcaacaacctgaagaacgaggacaccgccacctacttttgcgccagactcggcttcggcaacgctatggattattggggccagggcaccagcgtgaccgtttcttctacgcgtaaaattgaagttatgtatcctcctccttacctagacaatgagaagagcaatggaaccattatccatgtgaaaggggcgcgtattacccaaggactggctgtgtctacaatctctagcttctctccgcctggataccaagtctccttctgtcttgtgatggtcctcctgtttgctgtggacacaggactgtacttttccgtgaaaacgaacatc

SEQ ID NO: 3690 - DNA, 1113 bp, synthetic construct
  source 1..1113: mol_type = other DNA
atggccttaccagtgaccgccttgctcctgccgctggccttgctgctccacgccgccaggccggacatcgtgatgacacagagccctagcagcctgacagtgacagccggcgagaaagtgaccatgagctgcaagagcagccagagcctgctgaacagcggcaaccagaagaactacctgacctggtatcagcagaagcccggccagcctcctaagctgctgatctactgggccagcaccagagaaagcggcgtgcccgatagattcacaggcagcggcagcggaaccgacttcaccctgacaatcagctctgtgcaggccgaggatctggccgtgtactactgccagaacgactacagctaccctctgacctttggagccggcaccaagctggaacttaaaggcggaggcggaagtggaggcggaggatctggcggcggaggctctcaaattcagctggtgcagtctggccccgagctgaagaaacctggcgagacagtgaagatttcctgcaaggccagcggctacaccttcaccaactacggcatgaactgggtcaagcaggcccctggcaagggcctgaaatggatgggctggatcaacaccaacaccggcgagcctacctacgccgaagagttcaagggcagattcgccttcagcctggaaaccagcgccagcacagcctacctccagatcaacaacctgaagaacgaggacaccgccacctacttttgcgccagactcggcttcggcaacgctatggattattggggccagggcaccagcgtgaccgtttcttctacgcgtaaaattgaagttatgtatcctcctccttacctagacaatgagaagagcaatggaaccattatccatgtgaaaggggcgcgtgtcgagaaagaacatccacagcttggcgctggcaccgtcctgttgcttagagccggattctatgccgtcagcttcctgtccgtggctgtggggtctacagtgtattaccagggaaaatgtctcacctggaaaggccccagacgccagcttccagctgttgttcctgctccactgccaccaccttgtggctcctctgctcacttgcttccaccagtgcctggcgga

SEQ ID NO: 3691 - DNA, 1356 bp, synthetic construct
  source 1..1356: mol_type = other DNA
atggccttaccagtgaccgccttgctcctgccgctggccttgctgctccacgccgccaggccggacatcgtgatgacacagagccctagcagcctgacagtgacagccggcgagaaagtgaccatgagctgcaagagcagccagagcctgctgaacagcggcaaccagaagaactacctgacctggtatcagcagaagcccggccagcctcctaagctgctgatctactgggccagcaccagagaaagcggcgtgcccgatagattcacaggcagcggcagcggaaccgacttcaccctgacaatcagctctgtgcaggccgaggatctggccgtgtactactgccagaacgactacagctaccctctgacctttggagccggcaccaagctggaacttaaaggcggaggcggaagtggaggcggaggatctggcggcggaggctctcaaattcagctggtgcagtctggccccgagctgaagaaacctggcgagacagtgaagatttcctgcaaggccagcggctacaccttcaccaactacggcatgaactgggtcaagcaggcccctggcaagggcctgaaatggatgggctggatcaacaccaacaccggcgagcctacctacgccgaagagttcaagggcagattcgccttcagcctggaaaccagcgccagcacagcctacctccagatcaacaacctgaagaacgaggacaccgccacctacttttgcgccagactcggcttcggcaacgctatggattattggggccagggcaccagcgtgaccgtttcttctacgcgtaaaattgaagttatgtatcctcctccttacctagacaatgagaagagcaatggaaccattatccatgtgaaaggggcgcgtaagtctgtgcgcttttacctggtcgtcagccctgccagtgcctccactcagacatcttggaccccaagggaccttgtgtcctctcagacacagacacagtcctgcgtgccaccaactgctggcgcaagacaggctccagagtctcccagcacaatccccgtcccttctcagccccagaactccacacttaggccaggaccagctgctccaatcgcactggtcccagtgttctgcggactgctggttgccaagtctctggtgctgagcgcactcctcgtttggtggggcgatatttggtggaaaacgatgatggaattgagatccctcgatacgcagaaagccacatgccaccttcagcaagtcacagacttgccttggaccagcgtcagctctcccgtggaacgggaaattctgtatcatacagtggcccgcaccaagatttccgacgatgacgacgagcacacactg

SEQ ID NO: 3692 - DNA, 1167 bp, synthetic construct
  source 1..1167: mol_type = other DNA
atggccttaccagtgaccgccttgctcctgccgctggccttgctgctccacgccgccaggccggacatcgtgatgacacagagccctagcagcctgacagtgacagccggcgagaaagtgaccatgagctgcaagagcagccagagcctgctgaacagcggcaaccagaagaactacctgacctggtatcagcagaagcccggccagcctcctaagctgctgatctactgggccagcaccagagaaagcggcgtgcccgatagattcacaggcagcggcagcggaaccgacttcaccctgacaatcagctctgtgcaggccgaggatctggccgtgtactactgccagaacgactacagctaccctctgacctttggagccggcaccaagctggaacttaaaggcggaggcggaagtggaggcggaggatctggcggcggaggctctcaaattcagctggtgcagtctggccccgagctgaagaaacctggcgagacagtgaagatttcctgcaaggccagcggctacaccttcaccaactacggcatgaactgggtcaagcaggcccctggcaagggcctgaaatggatgggctggatcaacaccaacaccggcgagcctacctacgccgaagagttcaagggcagattcgccttcagcctggaaaccagcgccagcacagcctacctccagatcaacaacctgaagaacgaggacaccgccacctacttttgcgccagactcggcttcggcaacgctatggattattggggccagggcaccagcgtgaccgtttcttctacgcgtaaaattgaagttatgtatcctcctccttacctagacaatgagaagagcaatggaaccattatccatgtgaaaggggcgcgtggcgatattgagaatacctctctggccccagaagatcctacattccccgccgacacatggggaacatatctgctgacaaccgaaaccgggctgcaaaaggaccatgctctgtgggatcataccgctcagaatctgcttcggatggggcttgcattcctggtcctggtggctcttgtctggtttctggtcgaggactggctgtcccggaagagaaccagagaaagagcttccagggccagcacctgggaaggcagacgcagactgaatactcagaccctg

SEQ ID NO: 3693 - DNA, 2958 bp, synthetic construct
  source 1..2958: mol_type = other DNA
atggccttaccagtgaccgccttgctcctgccgctggccttgctgctccacgccgccaggccggacatcgtgatgacacagagccctagcagcctgacagtgacagccggcgagaaagtgaccatgagctgcaagagcagccagagcctgctgaacagcggcaaccagaagaactacctgacctggtatcagcagaagcccggccagcctcctaagctgctgatctactgggccagcaccagagaaagcggcgtgcccgatagattcacaggcagcggcagcggaaccgacttcaccctgacaatcagctctgtgcaggccgaggatctggccgtgtactactgccagaacgactacagctaccctctgacctttggagccggcaccaagctggaacttaaactcgagggacagcctaaggccaatcctaccgtgacactgttccctccaagcagcgaagaactccaggccaacaaggccacacttgtgtgcctgatctccgacttctaccctggggctgtgacagtggcttggaaggccgatggatctcctgtgaaagccggcgtggaaaccaccaagccatccaagcagagcaacaacaaatacgccgccagctcctacctgagcctgacacctgagcagtggaagtcccacagatcctacagctgccaagtgacccacgaaggcagcaccgtggaaaagacagtggcccctacagagtgcagcggatcccagagcttcggcctgctggaccccaagctgtgctacctgctggatggcatcctgttcatctacggcgtgatcctgaccgccctgttcctgagagtgaagttcagcagaagcgccgacgcccctgcctaccagcagggacagaaccaactgtacaacgagctgaacctgggcagacgggaagagtacgacgtgctggacaagcggagaggcagggaccctgagatgggcggaaagccccagcggagaaagaacccccaggaaggactgtataacgaactccagaaagacaagatggccgaagcctacagcgagatcggcatgaagggcgagcggagaagaggcaagggccacgatggcctgtaccagggcctgagcaccgccaccaaggacacctatgacgccctgcacatgcaggccctgcctccaagaagggccaagcgatctggatctggagcaacaaacttctcactactcaaacaagcaggtgacgtggaggagaatcccgggcctactagtatggactggatttggcgcatccttttccttgtcggcgctgctaccggcgcgcattccttcgaacaaattcagctggtgcagtctggccccgagctgaagaaacctggcgagacagtgaagatttcctgcaaggccagcggctacaccttcaccaactacggcatgaactgggtcaagcaggcccctggcaagggcctgaaatggatgggctggatcaacaccaacaccggcgagcctacctacgccgaagagttcaagggcagattcgccttcagcctggaaaccagcgccagcacagcctacctccagatcaacaacctgaagaacgaggacaccgccacctacttttgcgccagactcggcttcggcaacgctatggattattggggccagggcaccagcgtgaccgtttcttctacgcgtgcctctacaaagggaccctccgtgtttcctctggctcccagcagcaagtctacaagcggaggaacagccgctctgggctgcctggtcaaggattactttcccgagcctgtgaccgtgtcctggaatagcggagcactgacaagcggcgtgcacacctttccagccgtgctgcaaagcagcggcctgtactctctgagcagcgtggtcacagtgcctagctctagcctgggcacccagacctacatctgcaatgtgaaccacaagcctagcaacaccaaggtggacaagagagtggaacccaagagctgtggtaccggcgacatcgagaacaccagtctggcccctgaggaccctacctttcctgccgatacctggggcacctacctgctgaccacagagacaggactccagaaagatcacgccctgtgggaccacacagcccagaacctgctgagaatgggcctcgcctttctggtgctggttgccctcgtgtggttcctggtggaagattggctgagccggaagcggacaagagagagagccagcagagcctctacctgggagggaagaagaaggctgaacacccagacacttagggccaagcgatctggatctggagcaacaaacttctcactactcaaacaagcaggtgacgtggaggagaatcccgggccttctagaggccatatgaccgagtacaagcccacggtgcgcctcgccacccgcgacgacgtccccagggccgtacgcaccctcgccgccgcgttcgccgactaccccgccacgcgccacaccgtcgatccggaccgccacatcgagcgggtcaccgagctgcaagaactcttcctcacgcgcgtcgggctcgacatcggcaaggtgtgggtcgcggacgacggcgccgcggtggcggtctggaccacgccggagagcgtcgaagcgggggcggtgttcgccgagatcggcccgcgcatggccgagttgagcggttcccggctggccgcgcagcaacagatggaaggcctcctggcgccgcaccggcccaaggagcccgcgtggttcctggccaccgtcggcgtctcgcccgaccaccagggcaagggtctgggcagcgccgtcgtgctccccggagtggaggcggccgagcgcgccggggtgcccgccttcctggagacctccgcgccccgcaacctccccttctacgagcggctcggcttcaccgtcaccgccgacgtcgaggtgcccgaaggaccgcgcacctggtgcatgacccgcaagcccggtgcctga

SEQ ID NO: 3694 - DNA, 3156 bp, synthetic construct
  source 1..3156: mol_type = other DNA
atggccttaccagtgaccgccttgctcctgccgctggccttgctgctccacgccgccaggccggacatcgtgatgacacagagccctagcagcctgacagtgacagccggcgagaaagtgaccatgagctgcaagagcagccagagcctgctgaacagcggcaaccagaagaactacctgacctggtatcagcagaagcccggccagcctcctaagctgctgatctactgggccagcaccagagaaagcggcgtgcccgatagattcacaggcagcggcagcggaaccgacttcaccctgacaatcagctctgtgcaggccgaggatctggccgtgtactactgccagaacgactacagctaccctctgacctttggagccggcaccaagctggaacttaaactcgagggacagcctaaggccaatcctaccgtgacactgttccctccaagcagcgaagaactccaggccaacaaggccacacttgtgtgcctgatctccgacttctaccctggggctgtgacagtggcttggaaggccgatggatctcctgtgaaagccggcgtggaaaccaccaagccatccaagcagagcaacaacaaatacgccgccagctcctacctgagcctgacacctgagcagtggaagtcccacagatcctacagctgccaagtgacccacgaaggcagcaccgtggaaaagacagtggcccctacagagtgcagcggatcccagagcttcggcctgctggaccccaagctgtgctacctgctggatggcatcctgttcatctacggcgtgatcctgaccgccctgttcctgagagtgaagttcagcagaagcgccgacgcccctgcctaccagcagggacagaaccaactgtacaacgagctgaacctgggcagacgggaagagtacgacgtgctggacaagcggagaggcagggaccctgagatgggcggaaagccccagcggagaaagaacccccaggaaggactgtataacgaactccagaaagacaagatggccgaagcctacagcgagatcggcatgaagggcgagcggagaagaggcaagggccacgatggcctgtaccagggcctgagcaccgccaccaaggacacctatgacgccctgcacatgcaggccctgcctccaagaagggccaagcgatctggatctggagcaacaaacttctcactactcaaacaagcaggtgacgtggaggagaatcccgggcctactagtatggactggatttggcgcatccttttccttgtcggcgctgctaccggcgcgcattccttcgaacaaattcagctggtgcagtctggccccgagctgaagaaacctggcgagacagtgaagatttcctgcaaggccagcggctacaccttcaccaactacggcatgaactgggtcaagcaggcccctggcaagggcctgaaatggatgggctggatcaacaccaacaccggcgagcctacctacgccgaagagttcaagggcagattcgccttcagcctggaaaccagcgccagcacagcctacctccagatcaacaacctgaagaacgaggacaccgccacctacttttgcgccagactcggcttcggcaacgctatggattattggggccagggcaccagcgtgaccgtttcttctacgcgtgcctctacaaagggaccctccgtgtttcctctggctcccagcagcaagtctacaagcggaggaacagccgctctgggctgcctggtcaaggattactttcccgagcctgtgaccgtgtcctggaatagcggagcactgacaagcggcgtgcacacctttccagccgtgctgcaaagcagcggcctgtactctctgagcagcgtggtcacagtgcctagctctagcctgggcacccagacctacatctgcaatgtgaaccacaagcctagcaacaccaaggtggacaagagagtggaacccaagagctgtggtaccaagtctgtgcgcttttacctggtcgtcagccctgccagtgcctccactcagacatcttggaccccaagggaccttgtgtcctctcagacacagacacagtcctgcgtgccaccaactgctggcgcaagacaggctccagagtctcccagcacaatccccgtcccttctcagccccagaactccacacttaggccaggaccagctgctccaatcgcactggtcccagtgttctgcggactgctggttgccaagtctctggtgctgagcgcactcctcgtttggtggggcgatatttggtggaaaacgatgatggaattgagatccctcgatacgcagaaagccacatgccaccttcagcaagtcacagacttgccttggaccagcgtcagctctcccgtggaacgggaaattctgtatcatacagtggcccgcaccaagatttccgacgatgacgacgagcacacactgcgcgccaagagaagcggatctggcgtgaagcagaccctgaatttcgacctgctgaagctggctggcgacgtggaatccaacccaggcccttctagaggccatatgaccgagtacaagcccacggtgcgcctcgccacccgcgacgacgtccccagggccgtacgcaccctcgccgccgcgttcgccgactaccccgccacgcgccacaccgtcgatccggaccgccacatcgagcgggtcaccgagctgcaagaactcttcctcacgcgcgtcgggctcgacatcggcaaggtgtgggtcgcggacgacggcgccgcggtggcggtctggaccacgccggagagcgtcgaagcgggggcggtgttcgccgagatcggcccgcgcatggccgagttgagcggttcccggctggccgcgcagcaacagatggaaggcctcctggcgccgcaccggcccaaggagcccgcgtggttcctggccaccgtcggcgtctcgcccgaccaccagggcaagggtctgggcagcgccgtcgtgctccccggagtggaggcggccgagcgcgccggggtgcccgccttcctggagacctccgcgccccgcaacctccccttctacgagcggctcggcttcaccgtcaccgccgacgtcgaggtgcccgaaggaccgcgcacctggtgcatgacccgcaagcccggtgcctga

SEQ ID NO: 3695 - DNA, 2916 bp, synthetic construct
  source 1..2916: mol_type = other DNA
atggccttaccagtgaccgccttgctcctgccgctggccttgctgctccacgccgccaggccggacatcgtgatgacacagagccctagcagcctgacagtgacagccggcgagaaagtgaccatgagctgcaagagcagccagagcctgctgaacagcggcaaccagaagaactacctgacctggtatcagcagaagcccggccagcctcctaagctgctgatctactgggccagcaccagagaaagcggcgtgcccgatagattcacaggcagcggcagcggaaccgacttcaccctgacaatcagctctgtgcaggccgaggatctggccgtgtactactgccagaacgactacagctaccctctgacctttggagccggcaccaagctggaacttaaactcgagggacagcctaaggccaatcctaccgtgacactgttccctccaagcagcgaagaactccaggccaacaaggccacacttgtgtgcctgatctccgacttctaccctggggctgtgacagtggcttggaaggccgatggatctcctgtgaaagccggcgtggaaaccaccaagccatccaagcagagcaacaacaaatacgccgccagctcctacctgagcctgacacctgagcagtggaagtcccacagatcctacagctgccaagtgacccacgaaggcagcaccgtggaaaagacagtggcccctacagagtgcagcggatcccagagcttcggcctgctggaccccaagctgtgctacctgctggatggcatcctgttcatctacggcgtgatcctgaccgccctgttcctgagagtgaagttcagcagaagcgccgacgcccctgcctaccagcagggacagaaccaactgtacaacgagctgaacctgggcagacgggaagagtacgacgtgctggacaagcggagaggcagggaccctgagatgggcggaaagccccagcggagaaagaacccccaggaaggactgtataacgaactccagaaagacaagatggccgaagcctacagcgagatcggcatgaagggcgagcggagaagaggcaagggccacgatggcctgtaccagggcctgagcaccgccaccaaggacacctatgacgccctgcacatgcaggccctgcctccaagaagggccaagcgatctggatctggagcaacaaacttctcactactcaaacaagcaggtgacgtggaggagaatcccgggcctactagtatggactggatttggcgcatccttttccttgtcggcgctgctaccggcgcgcattccttcgaacaaattcagctggtgcagtctggccccgagctgaagaaacctggcgagacagtgaagatttcctgcaaggccagcggctacaccttcaccaactacggcatgaactgggtcaagcaggcccctggcaagggcctgaaatggatgggctggatcaacaccaacaccggcgagcctacctacgccgaagagttcaagggcagattcgccttcagcctggaaaccagcgccagcacagcctacctccagatcaacaacctgaagaacgaggacaccgccacctacttttgcgccagactcggcttcggcaacgctatggattattggggccagggcaccagcgtgaccgtttcttctacgcgtgcctctacaaagggaccctccgtgtttcctctggctcccagcagcaagtctacaagcggaggaacagccgctctgggctgcctggtcaaggattactttcccgagcctgtgaccgtgtcctggaatagcggagcactgacaagcggcgtgcacacctttccagccgtgctgcaaagcagcggcctgtactctctgagcagcgtggtcacagtgcctagctctagcctgggcacccagacctacatctgcaatgtgaaccacaagcctagcaacaccaaggtggacaagagagtggaacccaagagctgtggtaccgtggtcgagaaagaacatccacagcttggcgctggcaccgtcctgttgcttagagccggattctatgccgtcagcttcctgtccgtggctgtggggtctacagtgtattaccagggaaaatgtctcacctggaaaggccccagacgccagcttccagctgttgttcctgctccactgccaccaccttgtggctcctctgctcacttgcttccaccagtgcctggcggacgcgccaagagaagcggatctggcgtgaagcagaccctgaatttcgacctgctgaagctggctggcgacgtggaatccaacccaggcccttctagaggccatatgaccgagtacaagcccacggtgcgcctcgccacccgcgacgacgtccccagggccgtacgcaccctcgccgccgcgttcgccgactaccccgccacgcgccacaccgtcgatccggaccgccacatcgagcgggtcaccgagctgcaagaactcttcctcacgcgcgtcgggctcgacatcggcaaggtgtgggtcgcggacgacggcgccgcggtggcggtctggaccacgccggagagcgtcgaagcgggggcggtgttcgccgagatcggcccgcgcatggccgagttgagcggttcccggctggccgcgcagcaacagatggaaggcctcctggcgccgcaccggcccaaggagcccgcgtggttcctggccaccgtcggcgtctcgcccgaccaccagggcaagggtctgggcagcgccgtcgtgctccccggagtggaggcggccgagcgcgccggggtgcccgccttcctggagacctccgcgccccgcaacctccccttctacgagcggctcggcttcaccgtcaccgccgacgtcgaggtgcccgaaggaccgcgcacctggtgcatgacccgcaagcccggtgcctga

SEQ ID NO: 3696 - DNA, 3003 bp, synthetic construct
  source 1..3003: mol_type = other DNA
atggccttaccagtgaccgccttgctcctgccgctggccttgctgctccacgccgccaggccggacatcgtgatgacacagagccctagcagcctgacagtgacagccggcgagaaagtgaccatgagctgcaagagcagccagagcctgctgaacagcggcaaccagaagaactacctgacctggtatcagcagaagcccggccagcctcctaagctgctgatctactgggccagcaccagagaaagcggcgtgcccgatagattcacaggcagcggcagcggaaccgacttcaccctgacaatcagctctgtgcaggccgaggatctggccgtgtactactgccagaacgactacagctaccctctgacctttggagccggcaccaagctggaacttaaactcgaggacctgaagaacgtgttcccacctgaggtggccgtgttcgagcctagcgaggccgagatcagccacacccagaaagccaccctcgtgtgcctggctaccggcttctaccccgaccatgtggaactgtcttggtgggtcaacggcaaagaggtgcacagcggcgtgtctaccgacccccagccactgaaagaacagcccgccctgaacgacagccggtactgcctgagcagcagactgagagtgtccgccaccttctggcagaacccccggaaccacttcagatgccaggtgcagttctacggcctgagcgagaacgacgagtggacccaggacagagccaagcccgtgacccagatcgtgtctgccgaagcctggggcagagccgattgcggatcccagagcttcggcctgctggaccccaagctgtgctacctgctggatggcatcctgttcatctacggcgtgatcctgaccgccctgttcctgagagtgaagttcagcagaagcgccgacgcccctgcctaccagcagggacagaaccaactgtacaacgagctgaacctgggcagacgggaagagtacgacgtgctggacaagcggagaggcagggaccctgagatgggcggaaagccccagcggagaaagaacccccaggaaggactgtataacgaactccagaaagacaagatggccgaagcctacagcgagatcggcatgaagggcgagcggagaagaggcaagggccacgatggcctgtaccagggcctgagcaccgccaccaaggacacctatgacgccctgcacatgcaggccctgcctccaagaagggccaagcgatctggatctggagcaacaaacttctcactactcaaacaagcaggtgacgtggaggagaatcccgggcctactagtatggactggatttggcgcatccttttccttgtcggcgctgctaccggcgcgcattccttcgaacaaattcagctggtgcagtctggccccgagctgaagaaacctggcgagacagtgaagatttcctgcaaggccagcggctacaccttcaccaactacggcatgaactgggtcaagcaggcccctggcaagggcctgaaatggatgggctggatcaacaccaacaccggcgagcctacctacgccgaagagttcaagggcagattcgccttcagcctggaaaccagcgccagcacagcctacctccagatcaacaacctgaagaacgaggacaccgccacctacttttgcgccagactcggcttcggcaacgctatggattattggggccagggcaccagcgtgaccgtttcttctacgcgtatccagaaccctgatcctgccgtgtaccagctgcgggatagcaagagcagcgacaagagcgtgtgtctgttcaccgacttcgacagccagaccaacgtgtcccagagcaaggactccgacgtgtacatcaccgataagaccgtgctggacatgcggagcatggacttcaagagcaactccgccgtggcctggtccaacaagtccgatttcgcctgcgccaacgccttcaacaacagcattatccccgaggacacattcttcccaagccccgagagcagctgcggtaccggcgacatcgagaacaccagtctggcccctgaggaccctacctttcctgccgatacctggggcacctacctgctgaccacagagacaggactccagaaagatcacgccctgtgggaccacacagcccagaacctgctgagaatgggcctcgcctttctggtgctggttgccctcgtgtggttcctggtggaagattggctgagccggaagcggacaagagagagagccagcagagcctctacctgggagggaagaagaaggctgaacacccagacacttagggccaagcgatctggatctggagcaacaaacttctcactactcaaacaagcaggtgacgtggaggagaatcccgggccttctagaggccatatgaccgagtacaagcccacggtgcgcctcgccacccgcgacgacgtccccagggccgtacgcaccctcgccgccgcgttcgccgactaccccgccacgcgccacaccgtcgatccggaccgccacatcgagcgggtcaccgagctgcaagaactcttcctcacgcgcgtcgggctcgacatcggcaaggtgtgggtcgcggacgacggcgccgcggtggcggtctggaccacgccggagagcgtcgaagcgggggcggtgttcgccgagatcggcccgcgcatggccgagttgagcggttcccggctggccgcgcagcaacagatggaaggcctcctggcgccgcaccggcccaaggagcccgcgtggttcctggccaccgtcggcgtctcgcccgaccaccagggcaagggtctgggcagcgccgtcgtgctccccggagtggaggcggccgagcgcgccggggtgcccgccttcctggagacctccgcgccccgcaacctccccttctacgagcggctcggcttcaccgtcaccgccgacgtcgaggtgcccgaaggaccgcgcacctggtgcatgacccgcaagcccggtgcctga

SEQ ID NO: 3697 - DNA, 3201 bp, synthetic construct
  source 1..3201: mol_type = other DNA
atggccttaccagtgaccgccttgctcctgccgctggccttgctgctccacgccgccaggccggacatcgtgatgacacagagccctagcagcctgacagtgacagccggcgagaaagtgaccatgagctgcaagagcagccagagcctgctgaacagcggcaaccagaagaactacctgacctggtatcagcagaagcccggccagcctcctaagctgctgatctactgggccagcaccagagaaagcggcgtgcccgatagattcacaggcagcggcagcggaaccgacttcaccctgacaatcagctctgtgcaggccgaggatctggccgtgtactactgccagaacgactacagctaccctctgacctttggagccggcaccaagctggaacttaaactcgaggacctgaagaacgtgttcccacctgaggtggccgtgttcgagcctagcgaggccgagatcagccacacccagaaagccaccctcgtgtgcctggctaccggcttctaccccgaccatgtggaactgtcttggtgggtcaacggcaaagaggtgcacagcggcgtgtctaccgacccccagccactgaaagaacagcccgccctgaacgacagccggtactgcctgagcagcagactgagagtgtccgccaccttctggcagaacccccggaaccacttcagatgccaggtgcagttctacggcctgagcgagaacgacgagtggacccaggacagagccaagcccgtgacccagatcgtgtctgccgaagcctggggcagagccgattgcggatcccagagcttcggcctgctggaccccaagctgtgctacctgctggatggcatcctgttcatctacggcgtgatcctgaccgccctgttcctgagagtgaagttcagcagaagcgccgacgcccctgcctaccagcagggacagaaccaactgtacaacgagctgaacctgggcagacgggaagagtacgacgtgctggacaagcggagaggcagggaccctgagatgggcggaaagccccagcggagaaagaacccccaggaaggactgtataacgaactccagaaagacaagatggccgaagcctacagcgagatcggcatgaagggcgagcggagaagaggcaagggccacgatggcctgtaccagggcctgagcaccgccaccaaggacacctatgacgccctgcacatgcaggccctgcctccaagaagggccaagcgatctggatctggagcaacaaacttctcactactcaaacaagcaggtgacgtggaggagaatcccgggcctactagtatggactggatttggcgcatccttttccttgtcggcgctgctaccggcgcgcattccttcgaacaaattcagctggtgcagtctggccccgagctgaagaaacctggcgagacagtgaagatttcctgcaaggccagcggctacaccttcaccaactacggcatgaactgggtcaagcaggcccctggcaagggcctgaaatggatgggctggatcaacaccaacaccggcgagcctacctacgccgaagagttcaagggcagattcgccttcagcctggaaaccagcgccagcacagcctacctccagatcaacaacctgaagaacgaggacaccgccacctacttttgcgccagactcggcttcggcaacgctatggattattggggccagggcaccagcgtgaccgtttcttctacgcgtatccagaaccctgatcctgccgtgtaccagctgcgggatagcaagagcagcgacaagagcgtgtgtctgttcaccgacttcgacagccagaccaacgtgtcccagagcaaggactccgacgtgtacatcaccgataagaccgtgctggacatgcggagcatggacttcaagagcaactccgccgtggcctggtccaacaagtccgatttcgcctgcgccaacgccttcaacaacagcattatccccgaggacacattcttcccaagccccgagagcagctgcggtaccaagtctgtgcgcttttacctggtcgtcagccctgccagtgcctccactcagacatcttggaccccaagggaccttgtgtcctctcagacacagacacagtcctgcgtgccaccaactgctggcgcaagacaggctccagagtctcccagcacaatccccgtcccttctcagccccagaactccacacttaggccaggaccagctgctccaatcgcactggtcccagtgttctgcggactgctggttgccaagtctctggtgctgagcgcactcctcgtttggtggggcgatatttggtggaaaacgatgatggaattgagatccctcgatacgcagaaagccacatgccaccttcagcaagtcacagacttgccttggaccagcgtcagctctcccgtggaacgggaaattctgtatcatacagtggcccgcaccaagatttccgacgatgacgacgagcacacactgcgcgccaagagaagcggatctggcgtgaagcagaccctgaatttcgacctgctgaagctggctggcgacgtggaatccaacccaggcccttctagaggccatatgaccgagtacaagcccacggtgcgcctcgccacccgcgacgacgtccccagggccgtacgcaccctcgccgccgcgttcgccgactaccccgccacgcgccacaccgtcgatccggaccgccacatcgagcgggtcaccgagctgcaagaactcttcctcacgcgcgtcgggctcgacatcggcaaggtgtgggtcgcggacgacggcgccgcggtggcggtctggaccacgccggagagcgtcgaagcgggggcggtgttcgccgagatcggcccgcgcatggccgagttgagcggttcccggctggccgcgcagcaacagatggaaggcctcctggcgccgcaccggcccaaggagcccgcgtggttcctggccaccgtcggcgtctcgcccgaccaccagggcaagggtctgggcagcgccgtcgtgctccccggagtggaggcggccgagcgcgccggggtgcccgccttcctggagacctccgcgccccgcaacctccccttctacgagcggctcggcttcaccgtcaccgccgacgtcgaggtgcccgaaggaccgcgcacctggtgcatgacccgcaagcccggtgcctga

SEQ ID NO: 3698 - DNA, 2961 bp, synthetic construct
  source 1..2961: mol_type = other DNA
atggccttaccagtgaccgccttgctcctgccgctggccttgctgctccacgccgccaggccggacatcgtgatgacacagagccctagcagcctgacagtgacagccggcgagaaagtgaccatgagctgcaagagcagccagagcctgctgaacagcggcaaccagaagaactacctgacctggtatcagcagaagcccggccagcctcctaagctgctgatctactgggccagcaccagagaaagcggcgtgcccgatagattcacaggcagcggcagcggaaccgacttcaccctgacaatcagctctgtgcaggccgaggatctggccgtgtactactgccagaacgactacagctaccctctgacctttggagccggcaccaagctggaacttaaactcgaggacctgaagaacgtgttcccacctgaggtggccgtgttcgagcctagcgaggccgagatcagccacacccagaaagccaccctcgtgtgcctggctaccggcttctaccccgaccatgtggaactgtcttggtgggtcaacggcaaagaggtgcacagcggcgtgtctaccgacccccagccactgaaagaacagcccgccctgaacgacagccggtactgcctgagcagcagactgagagtgtccgccaccttctggcagaacccccggaaccacttcagatgccaggtgcagttctacggcctgagcgagaacgacgagtggacccaggacagagccaagcccgtgacccagatcgtgtctgccgaagcctggggcagagccgattgcggatcccagagcttcggcctgctggaccccaagctgtgctacctgctggatggcatcctgttcatctacggcgtgatcctgaccgccctgttcctgagagtgaagttcagcagaagcgccgacgcccctgcctaccagcagggacagaaccaactgtacaacgagctgaacctgggcagacgggaagagtacgacgtgctggacaagcggagaggcagggaccctgagatgggcggaaagccccagcggagaaagaacccccaggaaggactgtataacgaactccagaaagacaagatggccgaagcctacagcgagatcggcatgaagggcgagcggagaagaggcaagggccacgatggcctgtaccagggcctgagcaccgccaccaaggacacctatgacgccctgcacatgcaggccctgcctccaagaagggccaagcgatctggatctggagcaacaaacttctcactactcaaacaagcaggtgacgtggaggagaatcccgggcctactagtatggactggatttggcgcatccttttccttgtcggcgctgctaccggcgcgcattccttcgaacaaattcagctggtgcagtctggccccgagctgaagaaacctggcgagacagtgaagatttcctgcaaggccagcggctacaccttcaccaactacggcatgaactgggtcaagcaggcccctggcaagggcctgaaatggatgggctggatcaacaccaacaccggcgagcctacctacgccgaagagttcaagggcagattcgccttcagcctggaaaccagcgccagcacagcctacctccagatcaacaacctgaagaacgaggacaccgccacctacttttgcgccagactcggcttcggcaacgctatggattattggggccagggcaccagcgtgaccgtttcttctacgcgtatccagaaccctgatcctgccgtgtaccagctgcgggatagcaagagcagcgacaagagcgtgtgtctgttcaccgacttcgacagccagaccaacgtgtcccagagcaaggactccgacgtgtacatcaccgataagaccgtgctggacatgcggagcatggacttcaagagcaactccgccgtggcctggtccaacaagtccgatttcgcctgcgccaacgccttcaacaacagcattatccccgaggacacattcttcccaagccccgagagcagctgcggtaccgtggtcgagaaagaacatccacagcttggcgctggcaccgtcctgttgcttagagccggattctatgccgtcagcttcctgtccgtggctgtggggtctacagtgtattaccagggaaaatgtctcacctggaaaggccccagacgccagcttccagctgttgttcctgctccactgccaccaccttgtggctcctctgctcacttgcttccaccagtgcctggcggacgcgccaagagaagcggatctggcgtgaagcagaccctgaatttcgacctgctgaagctggctggcgacgtggaatccaacccaggcccttctagaggccatatgaccgagtacaagcccacggtgcgcctcgccacccgcgacgacgtccccagggccgtacgcaccctcgccgccgcgttcgccgactaccccgccacgcgccacaccgtcgatccggaccgccacatcgagcgggtcaccgagctgcaagaactcttcctcacgcgcgtcgggctcgacatcggcaaggtgtgggtcgcggacgacggcgccgcggtggcggtctggaccacgccggagagcgtcgaagcgggggcggtgttcgccgagatcggcccgcgcatggccgagttgagcggttcccggctggccgcgcagcaacagatggaaggcctcctggcgccgcaccggcccaaggagcccgcgtggttcctggccaccgtcggcgtctcgcccgaccaccagggcaagggtctgggcagcgccgtcgtgctccccggagtggaggcggccgagcgcgccggggtgcccgccttcctggagacctccgcgccccgcaacctccccttctacgagcggctcggcttcaccgtcaccgccgacgtcgaggtgcccgaaggaccgcgcacctggtgcatgacccgcaagcccggtgcctga

SEQ ID NO: 3699 - DNA, 2874 bp, synthetic construct
  source 1..2874: mol_type = other DNA
atggccttaccagtgaccgccttgctcctgccgctggccttgctgctccacgccgccaggccggacatcgtgatgacacagagccctagcagcctgacagtgacagccggcgagaaagtgaccatgagctgcaagagcagccagagcctgctgaacagcggcaaccagaagaactacctgacctggtatcagcagaagcccggccagcctcctaagctgctgatctactgggccagcaccagagaaagcggcgtgcccgatagattcacaggcagcggcagcggaaccgacttcaccctgacaatcagctctgtgcaggccgaggatctggccgtgtactactgccagaacgactacagctaccctctgacctttggagccggcaccaagctggaacttaaactcgagggacagcctaaggccaatcctaccgtgacactgttccctccaagcagcgaagaactccaggccaacaaggccacacttgtgtgcctgatctccgacttctaccctggggctgtgacagtggcttggaaggccgatggatctcctgtgaaagccggcgtggaaaccaccaagccatccaagcagagcaacaacaaatacgccgccagctcctacctgagcctgacacctgagcagtggaagtcccacagatcctacagctgccaagtgacccacgaaggcagcaccgtggaaaagacagtggcccctacagagtgcagcggatcccagagcttcggcctgctggaccccaagctgtgctacctgctggatggcatcctgttcatctacggcgtgatcctgaccgccctgttcctgagagtgaagttcagcagaagcgccgacgcccctgcctaccagcagggacagaaccaactgtacaacgagctgaacctgggcagacgggaagagtacgacgtgctggacaagcggagaggcagggaccctgagatgggcggaaagccccagcggagaaagaacccccaggaaggactgtataacgaactccagaaagacaagatggccgaagcctacagcgagatcggcatgaagggcgagcggagaagaggcaagggccacgatggcctgtaccagggcctgagcaccgccaccaaggacacctatgacgccctgcacatgcaggccctgcctccaagaagggccaagcgatctggatctggagcaacaaacttctcactactcaaacaagcaggtgacgtggaggagaatcccgggcctactagtatggactggatttggcgcatccttttccttgtcggcgctgctaccggcgcgcattccttcgaacaaattcagctggtgcagtctggccccgagctgaagaaacctggcgagacagtgaagatttcctgcaaggccagcggctacaccttcaccaactacggcatgaactgggtcaagcaggcccctggcaagggcctgaaatggatgggctggatcaacaccaacaccggcgagcctacctacgccgaagagttcaagggcagattcgccttcagcctggaaaccagcgccagcacagcctacctccagatcaacaacctgaagaacgaggacaccgccacctacttttgcgccagactcggcttcggcaacgctatggattattggggccagggcaccagcgtgaccgtttcttctacgcgtgcctctacaaagggaccctccgtgtttcctctggctcccagcagcaagtctacaagcggaggaacagccgctctgggctgcctggtcaaggattactttcccgagcctgtgaccgtgtcctggaatagcggagcactgacaagcggcgtgcacacctttccagccgtgctgcaaagcagcggcctgtactctctgagcagcgtggtcacagtgcctagctctagcctgggcacccagacctacatctgcaatgtgaaccacaagcctagcaacaccaaggtggacaagagagtggaacccaagagctgtggtaccatcactcaaggtttggcagtgtcaaccatctcatcattctttccacctggctaccaagtgtccttctgcctggtcatggtgctgctgttcgccgtggataccggcctgtacttcagcgtcaagaccaacatccggtccagcaccagagactggaaggaccacaagttcaagtggcggaaggaccctcaggacaagagggccaagcgatctggatctggagcaacaaacttctcactactcaaacaagcaggtgacgtggaggagaatcccgggccttctagaggccatatgaccgagtacaagcccacggtgcgcctcgccacccgcgacgacgtccccagggccgtacgcaccctcgccgccgcgttcgccgactaccccgccacgcgccacaccgtcgatccggaccgccacatcgagcgggtcaccgagctgcaagaactcttcctcacgcgcgtcgggctcgacatcggcaaggtgtgggtcgcggacgacggcgccgcggtggcggtctggaccacgccggagagcgtcgaagcgggggcggtgttcgccgagatcggcccgcgcatggccgagttgagcggttcccggctggccgcgcagcaacagatggaaggcctcctggcgccgcaccggcccaaggagcccgcgtggttcctggccaccgtcggcgtctcgcccgaccaccagggcaagggtctgggcagcgccgtcgtgctccccggagtggaggcggccgagcgcgccggggtgcccgccttcctggagacctccgcgccccgcaacctccccttctacgagcggctcggcttcaccgtcaccgccgacgtcgaggtgcccgaaggaccgcgcacctggtgcatgacccgcaagcccggtgcctga

SEQ ID NO: 3700 - DNA, 2919 bp, synthetic construct
  source 1..2919: mol_type = other DNA
atggccttaccagtgaccgccttgctcctgccgctggccttgctgctccacgccgccaggccggacatcgtgatgacacagagccctagcagcctgacagtgacagccggcgagaaagtgaccatgagctgcaagagcagccagagcctgctgaacagcggcaaccagaagaactacctgacctggtatcagcagaagcccggccagcctcctaagctgctgatctactgggccagcaccagagaaagcggcgtgcccgatagattcacaggcagcggcagcggaaccgacttcaccctgacaatcagctctgtgcaggccgaggatctggccgtgtactactgccagaacgactacagctaccctctgacctttggagccggcaccaagctggaacttaaactcgaggacctgaagaacgtgttcccacctgaggtggccgtgttcgagcctagcgaggccgagatcagccacacccagaaagccaccctcgtgtgcctggctaccggcttctaccccgaccatgtggaactgtcttggtgggtcaacggcaaagaggtgcacagcggcgtgtctaccgacccccagccactgaaagaacagcccgccctgaacgacagccggtactgcctgagcagcagactgagagtgtccgccaccttctggcagaacccccggaaccacttcagatgccaggtgcagttctacggcctgagcgagaacgacgagtggacccaggacagagccaagcccgtgacccagatcgtgtctgccgaagcctggggcagagccgattgcggatcccagagcttcggcctgctggaccccaagctgtgctacctgctggatggcatcctgttcatctacggcgtgatcctgaccgccctgttcctgagagtgaagttcagcagaagcgccgacgcccctgcctaccagcagggacagaaccaactgtacaacgagctgaacctgggcagacgggaagagtacgacgtgctggacaagcggagaggcagggaccctgagatgggcggaaagccccagcggagaaagaacccccaggaaggactgtataacgaactccagaaagacaagatggccgaagcctacagcgagatcggcatgaagggcgagcggagaagaggcaagggccacgatggcctgtaccagggcctgagcaccgccaccaaggacacctatgacgccctgcacatgcaggccctgcctccaagaagggccaagcgatctggatctggagcaacaaacttctcactactcaaacaagcaggtgacgtggaggagaatcccgggcctactagtatggactggatttggcgcatccttttccttgtcggcgctgctaccggcgcgcattccttcgaacaaattcagctggtgcagtctggccccgagctgaagaaacctggcgagacagtgaagatttcctgcaaggccagcggctacaccttcaccaactacggcatgaactgggtcaagcaggcccctggcaagggcctgaaatggatgggctggatcaacaccaacaccggcgagcctacctacgccgaagagttcaagggcagattcgccttcagcctggaaaccagcgccagcacagcctacctccagatcaacaacctgaagaacgaggacaccgccacctacttttgcgccagactcggcttcggcaacgctatggattattggggccagggcaccagcgtgaccgtttcttctacgcgtatccagaaccctgatcctgccgtgtaccagctgcgggatagcaagagcagcgacaagagcgtgtgtctgttcaccgacttcgacagccagaccaacgtgtcccagagcaaggactccgacgtgtacatcaccgataagaccgtgctggacatgcggagcatggacttcaagagcaactccgccgtggcctggtccaacaagtccgatttcgcctgcgccaacgccttcaacaacagcattatccccgaggacacattcttcccaagccccgagagcagctgcggtaccatcactcaaggtttggcagtgtcaaccatctcatcattctttccacctggctaccaagtgtccttctgcctggtcatggtgctgctgttcgccgtggataccggcctgtacttcagcgtcaagaccaacatccggtccagcaccagagactggaaggaccacaagttcaagtggcggaaggaccctcaggacaagagggccaagcgatctggatctggagcaacaaacttctcactactcaaacaagcaggtgacgtggaggagaatcccgggccttctagaggccatatgaccgagtacaagcccacggtgcgcctcgccacccgcgacgacgtccccagggccgtacgcaccctcgccgccgcgttcgccgactaccccgccacgcgccacaccgtcgatccggaccgccacatcgagcgggtcaccgagctgcaagaactcttcctcacgcgcgtcgggctcgacatcggcaaggtgtgggtcgcggacgacggcgccgcggtggcggtctggaccacgccggagagcgtcgaagcgggggcggtgttcgccgagatcggcccgcgcatggccgagttgagcggttcccggctggccgcgcagcaacagatggaaggcctcctggcgccgcaccggcccaaggagcccgcgtggttcctggccaccgtcggcgtctcgcccgaccaccagggcaagggtctgggcagcgccgtcgtgctccccggagtggaggcggccgagcgcgccggggtgcccgccttcctggagacctccgcgccccgcaacctccccttctacgagcggctcggcttcaccgtcaccgccgacgtcgaggtgcccgaaggaccgcgcacctggtgcatgacccgcaagcccggtgcctga

SEQ ID NO: 3701 - DNA, 1968 bp, synthetic construct
  source 1..1968: mol_type = other DNA
atggccttaccagtgaccgccttgctcctgccgctggccttgctgctccacgccgccaggccggacatcgtgatgacacagagccctagcagcctgacagtgacagccggcgagaaagtgaccatgagctgcaagagcagccagagcctgctgaacagcggcaaccagaagaactacctgacctggtatcagcagaagcccggccagcctcctaagctgctgatctactgggccagcaccagagaaagcggcgtgcccgatagattcacaggcagcggcagcggaaccgacttcaccctgacaatcagctctgtgcaggccgaggatctggccgtgtactactgccagaacgactacagctaccctctgacctttggagccggcaccaagctggaacttaaactcgagggacagcctaaggccaatcctaccgtgacactgttccctccaagcagcgaagaactccaggccaacaaggccacacttgtgtgcctgatctccgacttctaccctggggctgtgacagtggcttggaaggccgatggatctcctgtgaaagccggcgtggaaaccaccaagccatccaagcagagcaacaacaaatacgccgccagctcctacctgagcctgacacctgagcagtggaagtcccacagatcctacagctgccaagtgacccacgaaggcagcaccgtggaaaagacagtggcccctacagagtgcagcggatccctgggagagcctcagctgtgctatatcctggacgccatcctgtttctgtacggcatcgtgctgaccctgctgtactgccggctgaagatccaagtgcggaaggccgccatcaccagctacgagaaatccgacggcgtgtacaccggcctgagcaccagaaatcaagagacatacgagacactgaagcacgaaaagcctccacaaagggccaagcgatctggatctggagcaacaaacttctcactactcaaacaagcaggtgacgtggaggagaatcccgggcctactagtatggactggatttggcgcatccttttccttgtcggcgctgctaccggcgcgcattccttcgaacaaattcagctggtgcagtctggccccgagctgaagaaacctggcgagacagtgaagatttcctgcaaggccagcggctacaccttcaccaactacggcatgaactgggtcaagcaggcccctggcaagggcctgaaatggatgggctggatcaacaccaacaccggcgagcctacctacgccgaagagttcaagggcagattcgccttcagcctggaaaccagcgccagcacagcctacctccagatcaacaacctgaagaacgaggacaccgccacctacttttgcgccagactcggcttcggcaacgctatggattattggggccagggcaccagcgtgaccgtttcttctacgcgtgcctctacaaagggaccctccgtgtttcctctggctcccagcagcaagtctacaagcggaggaacagccgctctgggctgcctggtcaaggattactttcccgagcctgtgaccgtgtcctggaatagcggagcactgacaagcggcgtgcacacctttccagccgtgctgcaaagcagcggcctgtactctctgagcagcgtggtcacagtgcctagctctagcctgggcacccagacctacatctgcaatgtgaaccacaagcctagcaacaccaaggtggacaagagagtggaacccaagagctgtggtaccctcggagaaccacagctctgttacattctggatgctatcctgttcctctatgggatcgtcctgacactcctgtattgcagactcaaaattcaagttcgcaaagccgccattacctcttacgagaagagtgatggggtgtacacaggactgtctacccggaatcaagaaacctacgaaaccctcaaacatgagaagccacctcagtaa

SEQ ID NO: 3702 - DNA, 1500 bp, synthetic construct
  source 1..1500: mol_type = other DNA
atggccttaccagtgaccgccttgctcctgccgctggccttgctgctccacgccgccaggccggacatcgtgatgacacagagccctgatagcctggccgtgtctctgggagagagagccacaatcaactgcgagagcagccagagcctgctgaacagcggcaaccagaagaactacctgacctggtatcagcagaagcccggccagcctcctaagcctctgatctactgggccagcaccagagaaagcggcgtgcccgatagattttctggctctggcagcggcaccgacttcaccctgacaatttctagcctgcaagccgaggacgtggccgtgtactactgccagaacgactacagctacccctacctgttcggccagggcaccaagctggaaatcaaaagaggcggaggcggaagtggaggcggaggatctggcggcggaggctctcaagttcagctggtgcagagcggcagcgagctgaagaaacctggcgcttccgtgaagatcagctgcaaggccagcggctacaccttcaccaactacggcatgaactgggtcaagcaggcccctggacagggcctgaaatggatgggctggatcaacacctacaccggcgagcctacctacgccgaagagttcaagggcagattcgccttcagcctggaaaccagcgccagcacagcctacctccagatcaccagcctgaagaacgaggacaccgccacctacttttgcgccagactcggcttcggcaacgctatggattattggggccagggaaccagcgtgaccgtgtcatctacgcgtgagcagaaactgatctcggaagaggatctgaaaattgaagttatgtatcctcctccttacctagacaatgagaagagcaatggaaccattatccatgtgaaagggaaacacctttgtccaagtcccctatttcccggaccttctaagcccttttgggtgctggtggtggttgggggagtcctggcttgctatagcttgctagtaacagtggcctttattattttctgggtgaggagtaagaggagcaggctcctgcacagtgactacatgaacatgactccacgccgccccggacccacccgcaagcattaccagccctatgccccaccacgcgacttcgcagcctatcgctccagagtgaagttcagcaggagcgcagacgcccccgcgtaccagcagggccagaaccagctctataacgagctcaatctaggacgaagagaggagtacgatgttttggacaagagacgtggccgggaccctgagatggggggaaagccgagaaggaagaaccctcaggaaggcctgtacaatgaactgcagaaagataagatggcggaggcctacagtgagattgggatgaaaggcgagcgccggaggggcaaggggcacgatggcctttaccagggtctcagtacagccaccaaggacacctacgacgcccttcacatgcaggccctgccccctcgc

SEQ ID NO: 3703 - DNA, 1521 bp, synthetic construct
  source 1..1521: mol_type = other DNA
atggccttaccagtgaccgccttgctcctgccgctggccttgctgctccacgccgccaggccggacatcgtgatgacacagagccctgatagcctggccgtgtctctgggagagagagccacaatcaactgcgagagcagccagagcctgctgaacagcggcaaccagaagaactacctgacctggtatcagcagaagcccggccagcctcctaagcctctgatctactgggccagcaccagagaaagcggcgtgcccgatagattttctggctctggcagcggcaccgacttcaccctgacaatttctagcctgcaagccgaggacgtggccgtgtactactgccagaacgactacagctacccctacctgttcggccagggcaccaagctggaaatcaaaagaggcggaggcggaagtggaggcggaggatctggcggcggaggctctcaagttcagctggtgcagagcggcagcgagctgaagaaacctggcgcttccgtgaagatcagctgcaaggccagcggctacaccttcaccaactacggcatgaactgggtcaagcaggcccctggacagggcctgaaatggatgggctggatcaacacctacaccggcgagcctacctacgccgaagagttcaagggcagattcgccttcagcctggaaaccagcgccagcacagcctacctccagatcaccagcctgaagaacgaggacaccgccacctacttttgcgccagactcggcttcggcaacgctatggattattggggccagggaaccagcgtgaccgtgtcatctacgcgtgagcagaaactgatctcggaagaggatctggcgaagcccaccacgacgccagcgccgcgaccaccaacaccggcgcccaccatcgcgtcgcagcccctgtccctgcgcccagaggcgtgccggccagcggcggggggcgcagtgcacacgagggggctggacttcgcctgtgacatctacatctgggcgcccttggccgggacttgtggggtccttctcctgtcactggttatcaccctttactgcaaacggggcagaaagaaactcctgtatatattcaaacaaccatttatgagaccagtacaaactactcaagaggaagatggctgtagctgccgatttccagaagaagaagaaggaggatgtgaactgagagtgaagttcagcaggagcgcagacgcccccgcgtaccagcagggccagaaccagctctataacgagctgaatctaggacgaagagaggagtacgatgttttggacaagagacgtggccgggaccctgagatggggggaaagccgagaaggaagaaccctcaggaaggcctgtacaatgaactgcagaaagataagatggcggaggcctacagtgagattgggatgaaaggcgagcgccggaggggcaaggggcacgatggcctttaccagggtctcagtacagccaccaaggacacctacgacgcccttcacatgcaggccctgccccctcgctga

SEQ ID NO: 3704 - DNA, 1521 bp, synthetic construct
  source 1..1521: mol_type = other DNA
atggccttaccagtgaccgccttgctcctgccgctggccttgctgctccacgccgccaggccgcaagttcagctggtgcagagcggcagcgagctgaagaaacctggcgcttccgtgaagatcagctgcaaggccagcggctacaccttcaccaactacggcatgaactgggtcaagcaggcccctggacagggcctgaaatggatgggctggatcaacacctacaccggcgagcctacctacgccgaagagttcaagggcagattcgccttcagcctggaaaccagcgccagcacagcctacctccagatcaccagcctgaagaacgaggacaccgccacctacttttgcgccagactcggcttcggcaacgctatggattattggggccagggaaccagcgtgaccgtgtcatctggcggaggcggaagtggaggcggaggatctggcggcggaggctctgacatcgtgatgacacagagccctgatagcctggccgtgtctctgggagagagagccacaatcaactgcgagagcagccagagcctgctgaacagcggcaaccagaagaactacctgacctggtatcagcagaagcccggccagcctcctaagcctctgatctactgggccagcaccagagaaagcggcgtgcccgatagattttctggctctggcagcggcaccgacttcaccctgacaatttctagcctgcaagccgaggacgtggccgtgtactactgccagaacgactacagctacccctacctgttcggccagggcaccaagctggaaatcaaaagaacgcgtgagcagaaactgatctcggaagaggatctggcgaagcccaccacgacgccagcgccgcgaccaccaacaccggcgcccaccatcgcgtcgcagcccctgtccctgcgcccagaggcgtgccggccagcggcggggggcgcagtgcacacgagggggctggacttcgcctgtgacatctacatctgggcgcccttggccgggacttgtggggtccttctcctgtcactggttatcaccctttactgcaaacggggcagaaagaaactcctgtatatattcaaacaaccatttatgagaccagtacaaactactcaagaggaagatggctgtagctgccgatttccagaagaagaagaaggaggatgtgaactgagagtgaagttcagcaggagcgcagacgcccccgcgtaccagcagggccagaaccagctctataacgagctgaatctaggacgaagagaggagtacgatgttttggacaagagacgtggccgggaccctgagatggggggaaagccgagaaggaagaaccctcaggaaggcctgtacaatgaactgcagaaagataagatggcggaggcctacagtgagattgggatgaaaggcgagcgccggaggggcaaggggcacgatggcctttaccagggtctcagtacagccaccaaggacacctacgacgcccttcacatgcaggccctgccccctcgctga

SEQ ID NO: 3705 - DNA, 2760 bp, synthetic construct
  source 1..2760: mol_type = other DNA
atggccttaccagtgaccgccttgctcctgccgctggccttgctgctccacgccgccaggccggacatcgtgatgacacagagccctgatagcctggccgtgtctctgggagagagagccacaatcaactgcgagagcagccagagcctgctgaacagcggcaaccagaagaactacctgacctggtatcagcagaagcccggccagcctcctaagcctctgatctactgggccagcaccagagaaagcggcgtgcccgatagattttctggctctggcagcggcaccgacttcaccctgacaatttctagcctgcaagccgaggacgtggccgtgtactactgccagaacgactacagctacccctacctgttcggccagggcaccaagctggaaatcaaaagaggcggaggcggaagtggaggcggaggatctggcggcggaggctctcaagttcagctggtgcagagcggcagcgagctgaagaaacctggcgcttccgtgaagatcagctgcaaggccagcggctacaccttcaccaactacggcatgaactgggtcaagcaggcccctggacagggcctgaaatggatgggctggatcaacacctacaccggcgagcctacctacgccgaagagttcaagggcagattcgccttcagcctggaaaccagcgccagcacagcctacctccagatcaccagcctgaagaacgaggacaccgccacctacttttgcgccagactcggcttcggcaacgctatggattattggggccagggaaccagcgtgaccgtgtcatctacgcgtgagcagaaactgatctcggaagaggatctggcgaagcccaccacgacgccagcgccgcgaccaccaacaccggcgcccaccatcgcgtcgcagcccctgtccctgcgcccagaggcgtgccggccagcggcggggggcgcagtgcacacgagggggctggacttcgcctgtgacatctacatctgggcgcccttggccgggacttgtggggtccttctcctgtcactggttatcaccctttactgcgggcgcgccagagtgaagttcagcaggagcgcagacgcccccgcgtaccagcagggccagaaccagctctataacgagctgaatctaggacgaagagaggagtacgatgttttggacaagagacgtggccgggaccctgagatggggggaaagccgagaaggaagaaccctcaggaaggcctgtacaatgaactgcagaaagataagatggcggaggcctacagtgagattgggatgaaaggcgagcgccggaggggcaaggggcacgatggcctttaccagggtctcagtacagccaccaaggacacctacgacgcccttcacatgcaggccctgccccctcgctctagaggatctggagcaacaaacttctcactactcaaacaagcaggtgacgtggaggagaatcccgggcctgggatccacatggccacttacgaggttctctgtgaggtggcgcggaaactgggcacggatgacagggaagtggtattgttcctcctaaacgtgttcatacctcaacccacactggcccaattaattggagctcttagagctttaaaggaggagggcaggttaacgtttcccctgttagcggaatgtctgtttcgtgcaggtcgcagagacctcttgcgcgacctgcttcacttagacccgcgttttttagagcgccacctagcgggcacaatgagttatttcagcccttatcagctcactgttctccacgtagacggggagctgtgtgcgagggatattaggtctttgatatttttaagcaaggacactatagggtctcgcagcacaccacagacattcttacactgggtgtactgtatggaaaacttagacctactgggtcccactgacgtggatgccctaatgtcaatgcttagatctttgtcaagagtagacctacagcgccaagtgcaaaccctaatgggccttcacctttccggcccatcacactcccaacactatcgccatacaccactcgagaccgatttctacgactacaaggacgacgatgacaagactagtggctccggcgagggcagaggaagtctactaacctgcggagatgtggaagaaaatcctggcccacatatgaccgagtacaagcccacggtgcgcctcgccacccgcgacgacgtccccagggccgtacgcaccctcgccgccgcgttcgccgactaccccgccacgcgccacaccgtcgatccggaccgccacatcgagcgggtcaccgagctgcaagaactcttcctcacgcgcgtcgggctcgacatcggcaaggtgtgggtcgcggacgacggcgccgcggtggcggtctggaccacgccggagagcgtcgaagcgggggcggtgttcgccgagatcggcccgcgcatggccgagttgagcggttcccggctggccgcgcagcaacagatggaaggcctcctggcgccgcaccggcccaaggagcccgcgtggttcctggccaccgtcggcgtctcgcccgaccaccagggcaagggtctgggcagcgccgtcgtgctccccggagtggaggcggccgagcgcgccggggtgcccgccttcctggagacctccgcgccccgcaacctccccttctacgagcggctcggcttcaccgtcaccgccgacgtcgaggtgcccgaaggaccgcgcacctggtgcatgacccgcaagcccggtgcctga

SEQ ID NO: 3706 - DNA, 2580 bp, synthetic construct
  source 1..2580: mol_type = other DNA
atggccttaccagtgaccgccttgctcctgccgctggccttgctgctccacgccgccaggccggacatcgtgatgacacagagccctgatagcctggccgtgtctctgggagagagagccacaatcaactgcgagagcagccagagcctgctgaacagcggcaaccagaagaactacctgacctggtatcagcagaagcccggccagcctcctaagcctctgatctactgggccagcaccagagaaagcggcgtgcccgatagattttctggctctggcagcggcaccgacttcaccctgacaatttctagcctgcaagccgaggacgtggccgtgtactactgccagaacgactacagctacccctacctgttcggccagggcaccaagctggaaatcaaaagactcgagatccagaaccctgatcctgccgtgtaccagctgcgggatagcaagagcagcgacaagagcgtgtgtctgttcaccgacttcgacagccagaccaacgtgtcccagagcaaggactccgacgtgtacatcaccgataagtgcgtgctggacatgcggagcatggacttcaagagcaactccgccgtggcctggtccaacaagtccgatttcgcctgcgccaacgccttcaacaacagcattatccccgaggacacattcttcccaagcagcgacgtgccctgcgacgtgaagctggtggaaaagagcttcgagacagacaccaacctgaacttccagaacctgagcgtgatcggcttcagaatcctgctgctgaaagtggccggctttaacctgctgatgaccctgcggctgtggtccagccgcgccaagagaagcggatctggcgtgaagcagaccctgaatttcgacctgctgaagctggctggcgacgtggaatccaacccaggccctactagtatggactggatttggcgcatccttttccttgtcggcgctgctaccggcgcgcattccttcgaacaagttcagctggtgcagagcggcagcgagctgaagaaacctggcgcttccgtgaagatcagctgcaaggccagcggctacaccttcaccaactacggcatgaactgggtcaagcaggcccctggacagggcctgaaatggatgggctggatcaacacctacaccggcgagcctacctacgccgaagagttcaagggcagattcgccttcagcctggaaaccagcgccagcacagcctacctccagatcaccagcctgaagaacgaggacaccgccacctacttttgcgccagactcggcttcggcaacgctatggattattggggccagggaaccagcgtgaccgtgtcatctacgcgtgaggacctgaagaacgtgttcccacctgaggtggccgtgttcgagcctagcaaggccgagatcgcccacacccagaaagccaccctcgtgtgcctggctaccggcttctaccccgaccatgtggaactgtcttggtgggtcaacggcaaagaggtgcacagcggcgtgtgtaccgacccccagccactgaaagaacagcccgccctgaacgacagccggtactgcctgagcagcagactgagagtgtccgccaccttctggcagaacccccggaaccacttcagatgccaggtgcagttctacggcctgagcgagaacgacgagtggacccaggacagagccaagcccgtgacccagatcgtgtctgccgaagcctggggcagagccgattgcggcatcaccagcgccagctaccaccagggcgtgctgagcgccaccatcctgtacgagatcctgctgggcaaggccaccctgtacgccgtgctggtgtctgccctggtgctgatggctatggtcaagcggaaggacagccggggaagggccaagcgatctggatctggagcaacaaacttctcactactcaaacaagcaggtgacgtggaggagaatcccgggccttctagaggccatatgaccgagtacaagcccacggtgcgcctcgccacccgcgacgacgtccccagggccgtacgcaccctcgccgccgcgttcgccgactaccccgccacgcgccacaccgtcgatccggaccgccacatcgagcgggtcaccgagctgcaagaactcttcctcacgcgcgtcgggctcgacatcggcaaggtgtgggtcgcggacgacggcgccgcggtggcggtctggaccacgccggagagcgtcgaagcgggggcggtgttcgccgagatcggcccgcgcatggccgagttgagcggttcccggctggccgcgcagcaacagatggaaggcctcctggcgccgcaccggcccaaggagcccgcgtggttcctggccaccgtcggcgtctcgcccgaccaccagggcaagggtctgggcagcgccgtcgtgctccccggagtggaggcggccgagcgcgccggggtgcccgccttcctggagacctccgcgccccgcaacctccccttctacgagcggctcggcttcaccgtcaccgccgacgtcgaggtgcccgaaggaccgcgcacctggtgcatgacccgcaagcccggtgcctga

SEQ ID NO: 3707 - DNA, 2577 bp, synthetic construct
  source 1..2577: mol_type = other DNA
atggccttaccagtgaccgccttgctcctgccgctggccttgctgctccacgccgccaggccggacatcgtgatgacacagagccctgatagcctggccgtgtctctgggagagagagccacaatcaactgcgagagcagccagagcctgctgaacagcggcaaccagaagaactacctgacctggtatcagcagaagcccggccagcctcctaagcctctgatctactgggccagcaccagagaaagcggcgtgcccgatagattttctggctctggcagcggcaccgacttcaccctgacaatttctagcctgcaagccgaggacgtggccgtgtactactgccagaacgactacagctacccctacctgttcggccagggcaccaagctggaaatcaaaagactcgaggacctgaagaacgtgttcccacctgaggtggccgtgttcgagcctagcaaggccgagatcgcccacacccagaaagccaccctcgtgtgcctggctaccggcttctaccccgaccatgtggaactgtcttggtgggtcaacggcaaagaggtgcacagcggcgtgtgtaccgacccccagccactgaaagaacagcccgccctgaacgacagccggtactgcctgagcagcagactgagagtgtccgccaccttctggcagaacccccggaaccacttcagatgccaggtgcagttctacggcctgagcgagaacgacgagtggacccaggacagagccaagcccgtgacccagatcgtgtctgccgaagcctggggcagagccgattgcggcatcaccagcgccagctaccaccagggcgtgctgagcgccaccatcctgtacgagatcctgctgggcaaggccaccctgtacgccgtgctggtgtctgccctggtgctgatggctatggtcaagcggaaggacagccggggaagggccaagcgatctggatctggagcaacaaacttctcactactcaaacaagcaggtgacgtggaggagaatcccgggcctactagtatggactggatttggcgcatccttttccttgtcggcgctgctaccggcgcgcattccttcgaacaagttcagctggtgcagagcggcagcgagctgaagaaacctggcgcttccgtgaagatcagctgcaaggccagcggctacaccttcaccaactacggcatgaactgggtcaagcaggcccctggacagggcctgaaatggatgggctggatcaacacctacaccggcgagcctacctacgccgaagagttcaagggcagattcgccttcagcctggaaaccagcgccagcacagcctacctccagatcaccagcctgaagaacgaggacaccgccacctacttttgcgccagactcggcttcggcaacgctatggattattggggccagggaaccagcgtgaccgtgtcatctacgcgtatccagaaccctgatcctgccgtgtaccagctgcgggatagcaagagcagcgacaagagcgtgtgtctgttcaccgacttcgacagccagaccaacgtgtcccagagcaaggactccgacgtgtacatcaccgataagtgcgtgctggacatgcggagcatggacttcaagagcaactccgccgtggcctggtccaacaagtccgatttcgcctgcgccaacgccttcaacaacagcattatccccgaggacacattcttcccaagcagcgacgtgccctgcgacgtgaagctggtggaaaagagcttcgagacagacaccaacctgaacttccagaacctgagcgtgatcggcttcagaatcctgctgctgaaagtggccggctttaacctgctgatgaccctgcggctgtggtccagccgcgccaagagaagcggatctggcgtgaagcagaccctgaatttcgacctgctgaagctggctggcgacgtggaatccaacccaggcccttctagaggccatatgaccgagtacaagcccacggtgcgcctcgccacccgcgacgacgtccccagggccgtacgcaccctcgccgccgcgttcgccgactaccccgccacgcgccacaccgtcgatccggaccgccacatcgagcgggtcaccgagctgcaagaactcttcctcacgcgcgtcgggctcgacatcggcaaggtgtgggtcgcggacgacggcgccgcggtggcggtctggaccacgccggagagcgtcgaagcgggggcggtgttcgccgagatcggcccgcgcatggccgagttgagcggttcccggctggccgcgcagcaacagatggaaggcctcctggcgccgcaccggcccaaggagcccgcgtggttcctggccaccgtcggcgtctcgcccgaccaccagggcaagggtctgggcagcgccgtcgtgctccccggagtggaggcggccgagcgcgccggggtgcccgccttcctggagacctccgcgccccgcaacctccccttctacgagcggctcggcttcaccgtcaccgccgacgtcgaggtgcccgaaggaccgcgcacctggtgcatgacccgcaagcccggtgcctga

SEQ ID NO: 3708 - DNA, 1875 bp, synthetic construct
  source 1..1875: mol_type = other DNA
atggccttaccagtgaccgccttgctcctgccgctggccttgctgctccacgccgccaggccggacatcgtgatgacacagagccctgatagcctggccgtgtctctgggagagagagccacaatcaactgcgagagcagccagagcctgctgaacagcggcaaccagaagaactacctgacctggtatcagcagaagcccggccagcctcctaagcctctgatctactgggccagcaccagagaaagcggcgtgcccgatagattttctggctctggcagcggcaccgacttcaccctgacaatttctagcctgcaagccgaggacgtggccgtgtactactgccagaacgactacagctacccctacctgttcggccagggcaccaagctggaaatcaaaagactcgaggacctgaagaacgtgttcccacctgaggtggccgtgttcgagcctagcgaggccgagatcagccacacccagaaagccaccctcgtgtgcctggctaccggcttctaccccgaccatgtggaactgtcttggtgggtcaacggcaaagaggtgcacagcggcgtgtgtaccgacccccagccactgaaagaacagcccgccctgaacgacagccggtactgcctgagcagcagactgagagtgtccgccaccttctggcagaacccccggaaccacttcagatgccaggtgcagttctacggcctgagcgagaacgacgagtggacccaggacagagccaagcccgtgacccagatcgtgtctgccgaagcctggggcagagccgattgcggctttaccagcgagagctaccagcagggcgtgctgagcgccaccatcctgtacgagatcctgctgggcaaggccaccctgtacgccgtgctggtgtctgccctggtgctgatggctatggtcaagcggaaggacagccggggaagggccaagcgatctggatctggagcaacaaacttctcactactcaaacaagcaggtgacgtggaggagaatcccgggcctactagtatggactggatttggcgcatccttttccttgtcggcgctgctaccggcgcgcattccttcgaacaagttcagctggtgcagagcggcagcgagctgaagaaacctggcgcttccgtgaagatcagctgcaaggccagcggctacaccttcaccaactacggcatgaactgggtcaagcaggcccctggacagggcctgaaatggatgggctggatcaacacctacaccggcgagcctacctacgccgaagagttcaagggcagattcgccttcagcctggaaaccagcgccagcacagcctacctccagatcaccagcctgaagaacgaggacaccgccacctacttttgcgccagactcggcttcggcaacgctatggattattggggccagggaaccagcgtgaccgtgtcatctacgcgtatccagaaccctgatcctgccgtgtaccagctgcgggatagcaagagcagcgacaagagcgtgtgtctgttcaccgacttcgacagccagaccaacgtgtcccagagcaaggactccgacgtgtacatcaccgataagtgcgtgctggacatgcggagcatggacttcaagagcaactccgccgtggcctggtccaacaagtccgatttcgcctgcgccaacgccttcaacaacagcattatccccgaggacacattcttcccaagccccgagagcagctgcgacgtgaagctggtggaaaagagcttcgagacagacaccaacctgaacttccagaacctgagcgtgatcggcttcagaatcctgctgctgaaagtggccggctttaacctgctgatgaccctgcggctgtggtccagc

SEQ ID NO: 3709 - DNA, 2550 bp, synthetic construct
  source 1..2550: mol_type = other DNA
atggccttaccagtgaccgccttgctcctgccgctggccttgctgctccacgccgccaggccggacatcgtgatgacacagagccctgatagcctggccgtgtctctgggagagagagccacaatcaactgcgagagcagccagagcctgctgaacagcggcaaccagaagaactacctgacctggtatcagcagaagcccggccagcctcctaagcctctgatctactgggccagcaccagagaaagcggcgtgcccgatagattttctggctctggcagcggcaccgacttcaccctgacaatttctagcctgcaagccgaggacgtggccgtgtactactgccagaacgactacagctacccctacctgttcggccagggcaccaagctggaaatcaaaagactcgaggacctgaagaacgtgttcccacctgaggtggccgtgttcgagcctagcgaggccgagatcagccacacccagaaagccaccctcgtgtgcctggctaccggcttctaccccgaccatgtggaactgtcttggtgggtcaacggcaaagaggtgcacagcggcgtgtgtaccgacccccagccactgaaagaacagcccgccctgaacgacagccggtactgcctgagcagcagactgagagtgtccgccaccttctggcagaacccccggaaccacttcagatgccaggtgcagttctacggcctgagcgagaacgacgagtggacccaggacagagccaagcccgtgacccagatcgtgtctgccgaagcctggggcagagccgattgcggctttaccagcgagagctaccagcagggcgtgctgagcgccaccatcctgtacgagatcctgctgggcaaggccaccctgtacgccgtgctggtgtctgccctggtgctgatggctatggtcaagcggaaggacagccggggaagggccaagcgatctggatctggagcaacaaacttctcactactcaaacaagcaggtgacgtggaggagaatcccgggcctactagtatggactggatttggcgcatccttttccttgtcggcgctgctaccggcgcgcattccttcgaacaagttcagctggtgcagagcggcagcgagctgaagaaacctggcgcttccgtgaagatcagctgcaaggccagcggctacaccttcaccaactacggcatgaactgggtcaagcaggcccctggacagggcctgaaatggatgggctggatcaacacctacaccggcgagcctacctacgccgaagagttcaagggcagattcgccttcagcctggaaaccagcgccagcacagcctacctccagatcaccagcctgaagaacgaggacaccgccacctacttttgcgccagactcggcttcggcaacgctatggattattggggccagggaaccagcgtgaccgtgtcatctacgcgtatccagaaccctgatcctgccgtgtaccagctgcgggatagcaagagcagcgacaagagcgtgtgtctgttcaccgacttcgacagccagaccaacgtgtcccagagcaaggactccgacgtgtacatcaccgataagtgcgtgctggacatgcggagcatggacttcaagagcaactccgccgtggcctggtccaacaagtccgatttcgcctgcgccaacgccttcaacaacagcattatccccgaggacacattcttcccaagccccgagagcagctgcgacgtgaagctggtggaaaagagcttcgagacagacaccaacctgaacttccagaacctgagcgtgatcggcttcagaatcctgctgctgaaagtggccggctttaacctgctgatgaccctgcggctgtggtccagccgcgccaagagaagcggatctggcgtgaagcagaccctgaatttcgacctgctgaagctggctggcgacgtggaatccaacccaggcccttctagaggcgggatccacaccatggctacctacgaggtgctgtgcgaggtggcaagaaagctgggcaccgacgacagagaagtggtgctgttcctgctgaacgtgttcatccctcagcctacactggcccagctgatcggtgcactgagagccctgaaagaggaaggccggctgacctttcctctgctggccgaatgcctgttcagagccggaagaagggatctgctgcgggacctgctgcatctggaccccagatttctggaaagacacctggccggcaccatgagctacttcagcccttaccagctgaccgtgctgcacgttgacggcgaactgtgcgccagagatattcggagcctgatcttcctgagcaaggacaccatcggcagccggtctacccctcagacatttctgcactgggtgtactgcatggaaaacctggacctgctcggccccacagatgtggatgccctgatgtccatgctgagaagcctgagcagagtggacctccagagacaggtgcagacactgatgggactgcacctgagcggacctagccacagccagcactacagacacacccct

SEQ ID NO: 3710 - DNA, 1887 bp, synthetic construct
  source 1..1887: mol_type = other DNA
atggccttaccagtgaccgccttgctcctgccgctggccttgctgctccacgccgccaggccggacatcgtgatgacacagagccctgatagcctggccgtgtctctgggagagagagccacaatcaactgcgagagcagccagagcctgctgaacagcggcaaccagaagaactacctgacctggtatcagcagaagcccggccagcctcctaagcctctgatctactgggccagcaccagagaaagcggcgtgcccgatagattttctggctctggcagcggcaccgacttcaccctgacaatttctagcctgcaagccgaggacgtggccgtgtactactgccagaacgactacagctacccctacctgttcggccagggcaccaagctggaaatcaaaagactcgagatccagaaccctgatcctgccgtgtaccagctgcgggatagcaagagcagcgacaagagcgtgtgtctgttcaccgacttcgacagccagaccaacgtgtcccagagcaaggactccgacgtgtacatcaccgataagtgcgtgctggacatgcggagcatggacttcaagagcaactccgccgtggcctggtccaacaagtccgatttcgcctgcgccaacgccttcaacaacagcattatccccgaggacacattcttcccaagccccgagagcagctgcgacgtgaagctggtggaaaagagcttcgagacagacaccaacctgaacttccagaacctgagcgtgatcggcttcagaatcctgctgctgaaagtggccggctttaacctgctgatgaccctgcggctgtggtccagccgcgccaagagaagcggatctggcgtgaagcagaccctgaatttcgacctgctgaagctggctggcgacgtggaatccaacccaggccctactagtatggactggatttggcgcatccttttccttgtcggcgctgctaccggcgcgcattccttcgaacaagttcagctggtgcagagcggcagcgagctgaagaaacctggcgcttccgtgaagatcagctgcaaggccagcggctacaccttcaccaactacggcatgaactgggtcaagcaggcccctggacagggcctgaaatggatgggctggatcaacacctacaccggcgagcctacctacgccgaagagttcaagggcagattcgccttcagcctggaaaccagcgccagcacagcctacctccagatcaccagcctgaagaacgaggacaccgccacctacttttgcgccagactcggcttcggcaacgctatggattattggggccagggaaccagcgtgaccgtgtcatctacgcgtgaggacctgaagaacgtgttcccacctgaggtggccgtgttcgagcctagcgaggccgagatcagccacacccagaaagccaccctcgtgtgcctggctaccggcttctaccccgaccatgtggaactgtcttggtgggtcaacggcaaagaggtgcacagcggcgtgtgtaccgacccccagccactgaaagaacagcccgccctgaacgacagccggtactgcctgagcagcagactgagagtgtccgccaccttctggcagaacccccggaaccacttcagatgccaggtgcagttctacggcctgagcgagaacgacgagtggacccaggacagagccaagcccgtgacccagatcgtgtctgccgaagcctggggcagagccgattgcggctttaccagcgagagctaccagcagggcgtgctgagcgccaccatcctgtacgagatcctgctgggcaaggccaccctgtacgccgtgctggtgtctgccctggtgctgatggctatggtcaagcggaaggacagccgggga

SEQ ID NO: 3711 - DNA, 2553 bp, synthetic construct
  source 1..2553: mol_type = other DNA
atggccttaccagtgaccgccttgctcctgccgctggccttgctgctccacgccgccaggccggacatcgtgatgacacagagccctgatagcctggccgtgtctctgggagagagagccacaatcaactgcgagagcagccagagcctgctgaacagcggcaaccagaagaactacctgacctggtatcagcagaagcccggccagcctcctaagcctctgatctactgggccagcaccagagaaagcggcgtgcccgatagattttctggctctggcagcggcaccgacttcaccctgacaatttctagcctgcaagccgaggacgtggccgtgtactactgccagaacgactacagctacccctacctgttcggccagggcaccaagctggaaatcaaaagactcgagatccagaaccctgatcctgccgtgtaccagctgcgggatagcaagagcagcgacaagagcgtgtgtctgttcaccgacttcgacagccagaccaacgtgtcccagagcaaggactccgacgtgtacatcaccgataagtgcgtgctggacatgcggagcatggacttcaagagcaactccgccgtggcctggtccaacaagtccgatttcgcctgcgccaacgccttcaacaacagcattatccccgaggacacattcttcccaagccccgagagcagctgcgacgtgaagctggtggaaaagagcttcgagacagacaccaacctgaacttccagaacctgagcgtgatcggcttcagaatcctgctgctgaaagtggccggctttaacctgctgatgaccctgcggctgtggtccagccgcgccaagagaagcggatctggcgtgaagcagaccctgaatttcgacctgctgaagctggctggcgacgtggaatccaacccaggccctactagtatggactggatttggcgcatccttttccttgtcggcgctgctaccggcgcgcattccttcgaacaagttcagctggtgcagagcggcagcgagctgaagaaacctggcgcttccgtgaagatcagctgcaaggccagcggctacaccttcaccaactacggcatgaactgggtcaagcaggcccctggacagggcctgaaatggatgggctggatcaacacctacaccggcgagcctacctacgccgaagagttcaagggcagattcgccttcagcctggaaaccagcgccagcacagcctacctccagatcaccagcctgaagaacgaggacaccgccacctacttttgcgccagactcggcttcggcaacgctatggattattggggccagggaaccagcgtgaccgtgtcatctacgcgtgaggacctgaagaacgtgttcccacctgaggtggccgtgttcgagcctagcgaggccgagatcagccacacccagaaagccaccctcgtgtgcctggctaccggcttctaccccgaccatgtggaactgtcttggtgggtcaacggcaaagaggtgcacagcggcgtgtgtaccgacccccagccactgaaagaacagcccgccctgaacgacagccggtactgcctgagcagcagactgagagtgtccgccaccttctggcagaacccccggaaccacttcagatgccaggtgcagttctacggcctgagcgagaacgacgagtggacccaggacagagccaagcccgtgacccagatcgtgtctgccgaagcctggggcagagccgattgcggctttaccagcgagagctaccagcagggcgtgctgagcgccaccatcctgtacgagatcctgctgggcaaggccaccctgtacgccgtgctggtgtctgccctggtgctgatggctatggtcaagcggaaggacagccggggaagggccaagcgatctggatctggagcaacaaacttctcactactcaaacaagcaggtgacgtggaggagaatcccgggccttctagaggcgggatccacaccatggctacctacgaggtgctgtgcgaggtggcaagaaagctgggcaccgacgacagagaagtggtgctgttcctgctgaacgtgttcatccctcagcctacactggcccagctgatcggtgcactgagagccctgaaagaggaaggccggctgacctttcctctgctggccgaatgcctgttcagagccggaagaagggatctgctgcgggacctgctgcatctggaccccagatttctggaaagacacctggccggcaccatgagctacttcagcccttaccagctgaccgtgctgcacgttgacggcgaactgtgcgccagagatattcggagcctgatcttcctgagcaaggacaccatcggcagccggtctacccctcagacatttctgcactgggtgtactgcatggaaaacctggacctgctcggccccacagatgtggatgccctgatgtccatgctgagaagcctgagcagagtggacctccagagacaggtgcagacactgatgggactgcacctgagcggacctagccacagccagcactacagacacacccct

SEQ ID NO: 3712 - DNA, 2712 bp, synthetic construct
  source 1..2712: mol_type = other DNA
atggccttaccagtgaccgccttgctcctgccgctggccttgctgctccacgccgccaggccgctcgaggggaaaccaattcccaaccctcttctgggactggattcaaccggcagcggcgaggacctgaagaacgtgttcccacctgaggtggccgtgttcgagcctagcaaggccgagatcgcccacacccagaaagccaccctcgtgtgcctggctaccggcttctaccccgaccatgtggaactgtcttggtgggtcaacggcaaagaggtgcacagcggcgtgtgtaccgacccccagccactgaaagaacagcccgccctgaacgacagccggtactgcctgagcagcagactgagagtgtccgccaccttctggcagaacccccggaaccacttcagatgccaggtgcagttctacggcctgagcgagaacgacgagtggacccaggacagagccaagcccgtgacccagatcgtgtctgccgaagcctggggcagagccgattgcggcatcaccagcgccagctaccaccagggcgtgctgagcgccaccatcctgtacgagatcctgctgggcaaggccaccctgtacgccgtgctggtgtctgccctggtgctgatggctatggtcaagcggaaggacagccggggaagggccaagcgatctggatctggagcaacaaacttctcactactcaaacaagcaggtgacgtggaggagaatcccgggcctactagcatggccttaccagtgaccgccttgctcctgccgctggccttgctgctccacgccgccaggccggacatcgtgatgacacagagccctgatagcctggccgtgtctctgggagagagagccacaatcaactgcgagagcagccagagcctgctgaacagcggcaaccagaagaactacctgacctggtatcagcagaagcccggccagcctcctaagcctctgatctactgggccagcaccagagaaagcggcgtgcccgatagattttctggctctggcagcggcaccgacttcaccctgacaatttctagcctgcaagccgaggacgtggccgtgtactactgccagaacgactacagctacccctacctgttcggccagggcaccaagctggaaatcaaaagaggcggaggcggaagtggaggcggaggatctggcggcggaggctctcaagttcagctggtgcagagcggcagcgagctgaagaaacctggcgcttccgtgaagatcagctgcaaggccagcggctacaccttcaccaactacggcatgaactgggtcaagcaggcccctggacagggcctgaaatggatgggctggatcaacacctacaccggcgagcctacctacgccgaagagttcaagggcagattcgccttcagcctggaaaccagcgccagcacagcctacctccagatcaccagcctgaagaacgaggacaccgccacctacttttgcgccagactcggcttcggcaacgctatggattattggggccagggaaccagcgtgaccgtgtcatctacgcgtgagcagaaactgatctcggaagaggatgggagcggcatccagaaccctgatcctgccgtgtaccagctgcgggatagcaagagcagcgacaagagcgtgtgtctgttcaccgacttcgacagccagaccaacgtgtcccagagcaaggactccgacgtgtacatcaccgataagtgcgtgctggacatgcggagcatggacttcaagagcaactccgccgtggcctggtccaacaagtccgatttcgcctgcgccaacgccttcaacaacagcattatccccgaggacacattcttcccaagcagcgacgtgccctgcgacgtgaagctggtggaaaagagcttcgagacagacaccaacctgaacttccagaacctgagcgtgatcggcttcagaatcctgctgctgaaagtggccggctttaacctgctgatgaccctgcggctgtggtccagccgcgccaagagaagcggatctggcgtgaagcagaccctgaatttcgacctgctgaagctggctggcgacgtggaatccaacccaggcccttctagaggccatatgaccgagtacaagcccacggtgcgcctcgccacccgcgacgacgtccccagggccgtacgcaccctcgccgccgcgttcgccgactaccccgccacgcgccacaccgtcgatccggaccgccacatcgagcgggtcaccgagctgcaagaactcttcctcacgcgcgtcgggctcgacatcggcaaggtgtgggtcgcggacgacggcgccgcggtggcggtctggaccacgccggagagcgtcgaagcgggggcggtgttcgccgagatcggcccgcgcatggccgagttgagcggttcccggctggccgcgcagcaacagatggaaggcctcctggcgccgcaccggcccaaggagcccgcgtggttcctggccaccgtcggcgtctcgcccgaccaccagggcaagggtctgggcagcgccgtcgtgctccccggagtggaggcggccgagcgcgccggggtgcccgccttcctggagacctccgcgccccgcaacctccccttctacgagcggctcggcttcaccgtcaccgccgacgtcgaggtgcccgaaggaccgcgcacctggtgcatgacccgcaagcccggtgcctga

SEQ ID NO: 3713 - DNA, 2715 bp, synthetic construct
  source 1..2715: mol_type = other DNA
atggccttaccagtgaccgccttgctcctgccgctggccttgctgctccacgccgccaggccgctcgagcagaaactgatctcggaagaggatctgggctccggcgatcgccctgatcctgccgtgtaccagctgcgggatagcaagagcagcgacaagagcgtgtgtctgttcaccgacttcgacagccagaccaacgtgtcccagagcaaggactccgacgtgtacatcaccgataagtgcgtgctggacatgcggagcatggacttcaagagcaactccgccgtggcctggtccaacaagtccgatttcgcctgcgccaacgccttcaacaacagcattatccccgaggacacattcttcccaagccccgagagcagctgcgacgtgaagctggtggaaaagagcttcgagacagacaccaacctgaacttccagaacctgagcgtgatcggcttcagaatcctgctgctgaaagtggccggctttaacctgctgatgaccctgcggctgtggtccagctctagtcgcgccaagagaagcggatctggcgtgaagcagaccctgaatttcgacctgctgaagctggctggcgacgtggaatccaacccaggccccactagcatggccttaccagtgaccgccttgctcctgccgctggccttgctgctccacgccgccaggccggacatcgtgatgacacagagccctgatagcctggccgtgtctctgggagagagagccacaatcaactgcgagagcagccagagcctgctgaacagcggcaaccagaagaactacctgacctggtatcagcagaagcccggccagcctcctaagcctctgatctactgggccagcaccagagaaagcggcgtgcccgatagattttctggctctggcagcggcaccgacttcaccctgacaatttctagcctgcaagccgaggacgtggccgtgtactactgccagaacgactacagctacccctacctgttcggccagggcaccaagctggaaatcaaaagaggcggaggcggaagtggaggcggaggatctggcggcggaggctctcaagttcagctggtgcagagcggcagcgagctgaagaaacctggcgcttccgtgaagatcagctgcaaggccagcggctacaccttcaccaactacggcatgaactgggtcaagcaggcccctggacagggcctgaaatggatgggctggatcaacacctacaccggcgagcctacctacgccgaagagttcaagggcagattcgccttcagcctggaaaccagcgccagcacagcctacctccagatcaccagcctgaagaacgaggacaccgccacctacttttgcgccagactcggcttcggcaacgctatggattattggggccagggaaccagcgtgaccgtgtcatctacgcgtgggaaaccaattcccaaccctcttctgggactggattcaaccggcagcggcgaggacctgaagaacgtgttcccacctgaggtggccgtgttcgagcctagcgaggccgagatcagccacacccagaaagccaccctcgtgtgcctggctaccggcttctaccccgaccatgtggaactgtcttggtgggtcaacggcaaagaggtgcacagcggcgtgtgtaccgacccccagccactgaaagaacagcccgccctgaacgacagccggtactgcctgagcagcagactgagagtgtccgccaccttctggcagaacccccggaaccacttcagatgccaggtgcagttctacggcctgagcgagaacgacgagtggacccaggacagagccaagcccgtgacccagatcgtgtctgccgaagcctggggcagagccgattgcggctttaccagcgagagctaccagcagggcgtgctgagcgccaccatcctgtacgagatcctgctgggcaaggccaccctgtacgccgtgctggtgtctgccctggtgctgatggctatggtcaagcggaaggacagccggggaagggccaagcgatctggatctggagcaacaaacttctcactactcaaacaagcaggtgacgtggaggagaatcccgggccttctagaggccatatgaccgagtacaagcccacggtgcgcctcgccacccgcgacgacgtccccagggccgtacgcaccctcgccgccgcgttcgccgactaccccgccacgcgccacaccgtcgatccggaccgccacatcgagcgggtcaccgagctgcaagaactcttcctcacgcgcgtcgggctcgacatcggcaaggtgtgggtcgcggacgacggcgccgcggtggcggtctggaccacgccggagagcgtcgaagcgggggcggtgttcgccgagatcggcccgcgcatggccgagttgagcggttcccggctggccgcgcagcaacagatggaaggcctcctggcgccgcaccggcccaaggagcccgcgtggttcctggccaccgtcggcgtctcgcccgaccaccagggcaagggtctgggcagcgccgtcgtgctccccggagtggaggcggccgagcgcgccggggtgcccgccttcctggagacctccgcgccccgcaacctccccttctacgagcggctcggcttcaccgtcaccgccgacgtcgaggtgcccgaaggaccgcgcacctggtgcatgacccgcaagcccggtgcctga

SEQ ID NO: 3714 - DNA, 2577 bp, synthetic construct
  source 1..2577: mol_type = other DNA
atggccttaccagtgaccgccttgctcctgccgctggccttgctgctccacgccgccaggccggacatcgtgatgacacagagccctgatagcctggccgtgtctctgggagagagagccacaatcaactgcgagagcagccagagcctgctgaacagcggcaaccagaagaactacctgacctggtatcagcagaagcccggccagcctcctaagcctctgatctactgggccagcaccagagaaagcggcgtgcccgatagattttctggctctggcagcggcaccgacttcaccctgacaatttctagcctgcaagccgaggacgtggccgtgtactactgccagaacgactacagctacccctacctgttcggccagggcaccaagctggaaatcaaaagactcgaggacctgaagaacgtgttcccacctgaggtggccgtgttcgagcctagcgaggccgagatcagccacacccagaaagccaccctcgtgtgcctggctaccggcttctaccccgaccatgtggaactgtcttggtgggtcaacggcaaagaggtgcacagcggcgtgtctaccgacccccagccactgaaagaacagcccgccctgaacgacagccggtactgcctgagcagcagactgagagtgtccgccaccttctggcagaacccccggaaccacttcagatgccaggtgcagttctacggcctgagcgagaacgacgagtggacccaggacagagccaagcccgtgacccagatcgtgtctgccgaagcctggggcagagccgattgcggctttaccagcgagagctaccagcagggcgtgctgagcgccaccatcctgtacgagatcctgctgggcaaggccaccctgtacgccgtgctggtgtctgccctggtgctgatggctatggtcaagcggaaggacagccggggaagggccaagcgatctggatctggagcaacaaacttctcactactcaaacaagcaggtgacgtggaggagaatcccgggcctactagtatggactggatttggcgcatccttttccttgtcggcgctgctaccggcgcgcattccttcgaacaagttcagctggtgcagagcggcagcgagctgaagaaacctggcgcttccgtgaagatcagctgcaaggccagcggctacaccttcaccaactacggcatgaactgggtcaagcaggcccctggacagggcctgaaatggatgggctggatcaacacctacaccggcgagcctacctacgccgaagagttcaagggcagattcgccttcagcctggaaaccagcgccagcacagcctacctccagatcaccagcctgaagaacgaggacaccgccacctacttttgcgccagactcggcttcggcaacgctatggattattggggccagggaaccagcgtgaccgtgtcatctacgcgtatccagaaccctgatcctgccgtgtaccagctgcgggatagcaagagcagcgacaagagcgtgtgtctgttcaccgacttcgacagccagaccaacgtgtcccagagcaaggactccgacgtgtacatcaccgataagaccgtgctggacatgcggagcatggacttcaagagcaactccgccgtggcctggtccaacaagtccgatttcgcctgcgccaacgccttcaacaacagcattatccccgaggacacattcttcccaagccccgagagcagctgcgacgtgaagctggtggaaaagagcttcgagacagacaccaacctgaacttccagaacctgagcgtgatcggcttcagaatcctgctgctgaaagtggccggctttaacctgctgatgaccctgcggctgtggtccagccgcgccaagagaagcggatctggcgtgaagcagaccctgaatttcgacctgctgaagctggctggcgacgtggaatccaacccaggcccttctagaggccatatgaccgagtacaagcccacggtgcgcctcgccacccgcgacgacgtccccagggccgtacgcaccctcgccgccgcgttcgccgactaccccgccacgcgccacaccgtcgatccggaccgccacatcgagcgggtcaccgagctgcaagaactcttcctcacgcgcgtcgggctcgacatcggcaaggtgtgggtcgcggacgacggcgccgcggtggcggtctggaccacgccggagagcgtcgaagcgggggcggtgttcgccgagatcggcccgcgcatggccgagttgagcggttcccggctggccgcgcagcaacagatggaaggcctcctggcgccgcaccggcccaaggagcccgcgtggttcctggccaccgtcggcgtctcgcccgaccaccagggcaagggtctgggcagcgccgtcgtgctccccggagtggaggcggccgagcgcgccggggtgcccgccttcctggagacctccgcgccccgcaacctccccttctacgagcggctcggcttcaccgtcaccgccgacgtcgaggtgcccgaaggaccgcgcacctggtgcatgacccgcaagcccggtgcctga

SEQ ID NO: 3715 - DNA, 2823 bp, synthetic construct
  source 1..2823: mol_type = other DNA
atggccttaccagtgaccgccttgctcctgccgctggccttgctgctccacgccgccaggccggacatcgtgatgacacagagccctgatagcctggccgtgtctctgggagagagagccacaatcaactgcgagagcagccagagcctgctgaacagcggcaaccagaagaactacctgacctggtatcagcagaagcccggccagcctcctaagcctctgatctactgggccagcaccagagaaagcggcgtgcccgatagattttctggctctggcagcggcaccgacttcaccctgacaatttctagcctgcaagccgaggacgtggccgtgtactactgccagaacgactacagctacccctacctgttcggccagggcaccaagctggaaatcaaaagactcgaggacctgaagaacgtgttcccacctgaggtggccgtgttcgagcctagcgaggccgagatcagccacacccagaaagccaccctcgtgtgcctggctaccggcttctaccccgaccatgtggaactgtcttggtgggtcaacggcaaagaggtgcacagcggcgtgtctaccgacccccagccactgaaagaacagcccgccctgaacgacagccggtactgcctgagcagcagactgagagtgtccgccaccttctggcagaacccccggaaccacttcagatgccaggtgcagttctacggcctgagcgagaacgacgagtggacccaggacagagccaagcccgtgacccagatcgtgtctgccgaagcctggggcagagccgattgcggctttaccagcgagagctaccagcagggcgtgctgagcgccaccatcctgtacgagatcctgctgggcaaggccaccctgtacgccgtgctggtgtctgccctggtgctgatggctatggtcaagcggaaggacagccggggaagggccaagcgatctggatctggagcaacaaacttctcactactcaaacaagcaggtgacgtggaggagaatcccgggcctactagtatggactggatttggcgcatccttttccttgtcggcgctgctaccggcgcgcattccttcgaacaagttcagctggtgcagagcggcagcgagctgaagaaacctggcgcttccgtgaagatcagctgcaaggccagcggctacaccttcaccaactacggcatgaactgggtcaagcaggcccctggacagggcctgaaatggatgggctggatcaacacctacaccggcgagcctacctacgccgaagagttcaagggcagattcgccttcagcctggaaaccagcgccagcacagcctacctccagatcaccagcctgaagaacgaggacaccgccacctacttttgcgccagactcggcttcggcaacgctatggattattggggccagggaaccagcgtgaccgtgtcatctacgcgtgagcagaaactgatctcggaagaggatgggagcggcaccccattcccttctctggcccctcccatcatgctgctggtggacggcaagcagcagatggtggtcgtgtgcctggtgctggatgtggccccacctggactggacagccccatctggtttagcgccggcaatggctctgccctggacgcctttacctacggcccaagccctgccaccgatggcacctggacaaatctggcccacctgagcctgcccagcgaggaactggcttcttgggagcctctcgtgtgccacacaggacctggcgctgagggacacagcagatccacccagcctatgcacctgtctggcgaggccagcaccgccagaacctgtcctcaggaacctctgagaggcacccctggcggagcactgtggctgggagtgctgagactgctgctgttcaagctgctgctgtttgacctgctgctgacctgctcctgtctgtgcgatcctgccggccctctgccttctcctgccaccaccacaagactgagagccctgggcagccacagactgcaccctgccacagagacaggcggcagagaggccacaagcagccctagaccccagcccagagacagaagatggggcgataccccccctggcagaaagcctggatctccagtccgcgccaagagaagcggatctggcgtgaagcagaccctgaatttcgacctgctgaagctggctggcgacgtggaatccaacccaggcccttctagaggccatatgaccgagtacaagcccacggtgcgcctcgccacccgcgacgacgtccccagggccgtacgcaccctcgccgccgcgttcgccgactaccccgccacgcgccacaccgtcgatccggaccgccacatcgagcgggtcaccgagctgcaagaactcttcctcacgcgcgtcgggctcgacatcggcaaggtgtgggtcgcggacgacggcgccgcggtggcggtctggaccacgccggagagcgtcgaagcgggggcggtgttcgccgagatcggcccgcgcatggccgagttgagcggttcccggctggccgcgcagcaacagatggaaggcctcctggcgccgcaccggcccaaggagcccgcgtggttcctggccaccgtcggcgtctcgcccgaccaccagggcaagggtctgggcagcgccgtcgtgctccccggagtggaggcggccgagcgcgccggggtgcccgccttcctggagacctccgcgccccgcaacctccccttctacgagcggctcggcttcaccgtcaccgccgacgtcgaggtgcccgaaggaccgcgcacctggtgcatgacccgcaagcccggtgcctga

SEQ ID NO: 3716 - DNA, 2877 bp, synthetic construct
  source 1..2877: mol_type = other DNA
atggccttaccagtgaccgccttgctcctgccgctggccttgctgctccacgccgccaggccgctcgaggacctgaagaacgtgttcccacctgaggtggccgtgttcgagcctagcgaggccgagatcagccacacccagaaagccaccctcgtgtgcctggctaccggcttctaccccgaccatgtggaactgtcttggtgggtcaacggcaaagaggtgcacagcggcgtgtctaccgacccccagccactgaaagaacagcccgccctgaacgacagccggtactgcctgagcagcagactgagagtgtccgccaccttctggcagaacccccggaaccacttcagatgccaggtgcagttctacggcctgagcgagaacgacgagtggacccaggacagagccaagcccgtgacccagatcgtgtctgccgaagcctggggcagagccgattgcggctttaccagcgagagctaccagcagggcgtgctgagcgccaccatcctgtacgagatcctgctgggcaaggccaccctgtacgccgtgctggtgtctgccctggtgctgatggctatggtcaagcggaaggacagccggggaagggccaagcgatctggatctggagcaacaaacttctcactactcaaacaagcaggtgacgtggaggagaatcccgggcctactagcatggccttaccagtgaccgccttgctcctgccgctggccttgctgctccacgccgccaggccggacatcgtgatgacacagagccctgatagcctggccgtgtctctgggagagagagccacaatcaactgcgagagcagccagagcctgctgaacagcggcaaccagaagaactacctgacctggtatcagcagaagcccggccagcctcctaagcctctgatctactgggccagcaccagagaaagcggcgtgcccgatagattttctggctctggcagcggcaccgacttcaccctgacaatttctagcctgcaagccgaggacgtggccgtgtactactgccagaacgactacagctacccctacctgttcggccagggcaccaagctggaaatcaaaagaggcggaggcggaagtggaggcggaggatctggcggcggaggctctcaagttcagctggtgcagagcggcagcgagctgaagaaacctggcgcttccgtgaagatcagctgcaaggccagcggctacaccttcaccaactacggcatgaactgggtcaagcaggcccctggacagggcctgaaatggatgggctggatcaacacctacaccggcgagcctacctacgccgaagagttcaagggcagattcgccttcagcctggaaaccagcgccagcacagcctacctccagatcaccagcctgaagaacgaggacaccgccacctacttttgcgccagactcggcttcggcaacgctatggattattggggccagggaaccagcgtgaccgtgtcatctacgcgtgagcagaaactgatctcggaagaggatctggggagcggcaccccattcccttctctggcccctcccatcatgctgctggtggacggcaagcagcagatggtggtcgtgtgcctggtgctggatgtggccccacctggactggacagccccatctggtttagcgccggcaatggctctgccctggacgcctttacctacggcccaagccctgccaccgatggcacctggacaaatctggcccacctgagcctgcccagcgaggaactggcttcttgggagcctctcgtgtgccacacaggacctggcgctgagggacacagcagatccacccagcctatgcacctgtctggcgaggccagcaccgccagaacctgtcctcaggaacctctgagaggcacccctggcggagcactgtggctgggagtgctgagactgctgctgttcaagctgctgctgtttgacctgctgctgacctgctcctgtctgtgcgatcctgccggccctctgccttctcctgccaccaccacaagactgagagccctgggcagccacagactgcaccctgccacagagacaggcggcagagaggccacaagcagccctagaccccagcccagagacagaagatggggcgataccccccctggcagaaagcctggatctccagtccgcgccaagagaagcggatctggcgtgaagcagaccctgaatttcgacctgctgaagctggctggcgacgtggaatccaacccaggcccttctagatctagaggccatatgaccgagtacaagcccacggtgcgcctcgccacccgcgacgacgtccccagggccgtacgcaccctcgccgccgcgttcgccgactaccccgccacgcgccacaccgtcgatccggaccgccacatcgagcgggtcaccgagctgcaagaactcttcctcacgcgcgtcgggctcgacatcggcaaggtgtgggtcgcggacgacggcgccgcggtggcggtctggaccacgccggagagcgtcgaagcgggggcggtgttcgccgagatcggcccgcgcatggccgagttgagcggttcccggctggccgcgcagcaacagatggaaggcctcctggcgccgcaccggcccaaggagcccgcgtggttcctggccaccgtcggcgtctcgcccgaccaccagggcaagggtctgggcagcgccgtcgtgctccccggagtggaggcggccgagcgcgccggggtgcccgccttcctggagacctccgcgccccgcaacctccccttctacgagcggctcggcttcaccgtcaccgccgacgtcgaggtgcccgaaggaccgcgcacctggtgcatgacccgcaagcccggtgcctga

SEQ ID NO: 3717 - DNA, 2688 bp, synthetic construct
  source 1..2688: mol_type = other DNA
atggccttaccagtgaccgccttgctcctgccgctggccttgctgctccacgccgccaggccggacatcgtgatgacacagagccctgatagcctggccgtgtctctgggagagagagccacaatcaactgcgagagcagccagagcctgctgaacagcggcaaccagaagaactacctgacctggtatcagcagaagcccggccagcctcctaagcctctgatctactgggccagcaccagagaaagcggcgtgcccgatagattttctggctctggcagcggcaccgacttcaccctgacaatttctagcctgcaagccgaggacgtggccgtgtactactgccagaacgactacagctacccctacctgttcggccagggcaccaagctggaaatcaaaagactcgaggggaaaccaattcccaaccctcttctgggactggattcaaccggcagcggcgacaagcagctggacgccgacgtgtcccccaagcctaccatcttcctgccctctatcgccgagacaaagctccagaaggccggcacctacctgtgcctgctggaaaagttcttcccagatgtgattaagatccactggcaggaaaagaagtccaacaccatcctgggcagccaggaaggcaacaccatgaagaccaacgacacctacatgaagttcagctggctgaccgtgcccgagaagtccctggacaaagaacacagatgcatcgtgcggcacgaaaacaacaagaacggcgtggaccaggaaatcatcttcccacccatcaagaccgatgtgattacaatggaccccaaggacaactgctccaaggacgccaacgataccctgctgctccagctgaccaacaccagcgcctactacatgtacttgttgctgctgctgaagtccgtggtgtacttcgccatcatcacatgctgcctgctgcggagaaccgccttctgctgcaacggcgagaagtctagggccaagcgatctggatctggagcaacaaacttctcactactcaaacaagcaggtgacgtggaggagaatcccgggcctactagtatggactggatttggcgcatccttttccttgtcggcgctgctaccggcgcgcattccttcgaacaagttcagctggtgcagagcggcagcgagctgaagaaacctggcgcttccgtgaagatcagctgcaaggccagcggctacaccttcaccaactacggcatgaactgggtcaagcaggcccctggacagggcctgaaatggatgggctggatcaacacctacaccggcgagcctacctacgccgaagagttcaagggcagattcgccttcagcctggaaaccagcgccagcacagcctacctccagatcaccagcctgaagaacgaggacaccgccacctacttttgcgccagactcggcttcggcaacgctatggattattggggccagggaaccagcgtgaccgtgtcatctacgcgtgagcagaaactgatctcggaagaggatgggagcggcagccagcctcacaccaagcccagcgtgttcgtgatgaagaacggcaccaacgtggcctgcctcgtgaaagagttctaccccaaggacatcaggatcaacctggtgtccagcaagaagatcaccgagttcgaccccgccatcgtgatctcccccagcggcaagtacaacgccgtgaagctggggaagtacgaggacagcaacagcgtgacctgctccgtgcagcacgacaacaagaccgtgcacagcaccgactttgaagtgaaaaccgactccaccgaccacgtgaagcccaaagagacagagaacaccaagcagcccagcaagagctgccacaagcccaaggccatcgtgcacaccgagaaagtgaacatgatgagcctgaccgtgctgggcctgcggatgctgttcgccaaaaccgtggccgtgaacttcctgctgaccgccaagctgttcttcctccgcgccaagagaagcggatctggcgtgaagcagaccctgaatttcgacctgctgaagctggctggcgacgtggaatccaacccaggcccttctagaggccatatgaccgagtacaagcccacggtgcgcctcgccacccgcgacgacgtccccagggccgtacgcaccctcgccgccgcgttcgccgactaccccgccacgcgccacaccgtcgatccggaccgccacatcgagcgggtcaccgagctgcaagaactcttcctcacgcgcgtcgggctcgacatcggcaaggtgtgggtcgcggacgacggcgccgcggtggcggtctggaccacgccggagagcgtcgaagcgggggcggtgttcgccgagatcggcccgcgcatggccgagttgagcggttcccggctggccgcgcagcaacagatggaaggcctcctggcgccgcaccggcccaaggagcccgcgtggttcctggccaccgtcggcgtctcgcccgaccaccagggcaagggtctgggcagcgccgtcgtgctccccggagtggaggcggccgagcgcgccggggtgcccgccttcctggagacctccgcgccccgcaacctccccttctacgagcggctcggcttcaccgtcaccgccgacgtcgaggtgcccgaaggaccgcgcacctggtgcatgacccgcaagcccggtgcctga

SEQ ID NO: 3718 - DNA, 1899 bp, synthetic construct
  source 1..1899: mol_type = other DNA
atggccttaccagtgaccgccttgctcctgccgctggccttgctgctccacgccgccaggccggacatcgtgatgacacagagccctgatagcctggccgtgtctctgggagagagagccacaatcaactgcgagagcagccagagcctgctgaacagcggcaaccagaagaactacctgacctggtatcagcagaagcccggccagcctcctaagcctctgatctactgggccagcaccagagaaagcggcgtgcccgatagattttctggctctggcagcggcaccgacttcaccctgacaatttctagcctgcaagccgaggacgtggccgtgtactactgccagaacgactacagctacccctacctgttcggccagggcaccaagctggaaatcaaaagactcgagagccagcctcacaccaagcccagcgtgttcgtgatgaagaacggcaccaacgtggcctgcctcgtgaaagagttctaccccaaggacatcaggatcaacctggtgtccagcaagaagatcaccgagttcgaccccgccatcgtgatctcccccagcggcaagtacaacgccgtgaagctggggaagtacgaggacagcaacagcgtgacctgctccgtgcagcacgacaacaagaccgtgcacagcaccgactttgaagtgaaaaccgactccaccgaccacgtgaagcccaaagagacagagaacaccaagcagcccagcaagagctgccacaagcccaaggccatcgtgcacaccgagaaagtgaacatgatgagcctgaccgtgctgggcctgcggatgctgttcgccaaaaccgtggccgtgaacttcctgctgaccgccaagctgttcttcctcagggccaagcgatctggatctggagcaacaaacttctcactactcaaacaagcaggtgacgtggaggagaatcccgggcctactagtatggactggatttggcgcatccttttccttgtcggcgctgctaccggcgcgcattccttcgaacaagttcagctggtgcagagcggcagcgagctgaagaaacctggcgcttccgtgaagatcagctgcaaggccagcggctacaccttcaccaactacggcatgaactgggtcaagcaggcccctggacagggcctgaaatggatgggctggatcaacacctacaccggcgagcctacctacgccgaagagttcaagggcagattcgccttcagcctggaaaccagcgccagcacagcctacctccagatcaccagcctgaagaacgaggacaccgccacctacttttgcgccagactcggcttcggcaacgctatggattattggggccagggaaccagcgtgaccgtgtcatctacgcgtgacaagcagctggacgccgacgtgtcccccaagcctaccatcttcctgccctctatcgccgagacaaagctccagaaggccggcacctacctgtgcctgctggaaaagttcttcccagatgtgattaagatccactggcaggaaaagaagtccaacaccatcctgggcagccaggaaggcaacaccatgaagaccaacgacacctacatgaagttcagctggctgaccgtgcccgagaagtccctggacaaagaacacagatgcatcgtgcggcacgaaaacaacaagaacggcgtggaccaggaaatcatcttcccacccatcaagaccgatgtgattacaatggaccccaaggacaactgctccaaggacgccaacgataccctgctgctccagctgaccaacaccagcgcctactacatgtacttgttgctgctgctgaagtccgtggtgtacttcgccatcatcacatgctgcctgctgcggagaaccgccttctgctgcaacggcgagaagtct

SEQ ID NO: 3719 - DNA, 2733 bp, synthetic construct
  source 1..2733: mol_type = other DNA
atggccttaccagtgaccgccttgctcctgccgctggccttgctgctccacgccgccaggccgctcgaggggaaaccaattcccaaccctcttctgggactggattcaaccggcagcggcgacaagcagctggacgccgacgtgtcccccaagcctaccatcttcctgccctctatcgccgagacaaagctccagaaggccggcacctacctgtgcctgctggaaaagttcttcccagatgtgattaagatccactggcaggaaaagaagtccaacaccatcctgggcagccaggaaggcaacaccatgaagaccaacgacacctacatgaagttcagctggctgaccgtgcccgagaagtccctggacaaagaacacagatgcatcgtgcggcacgaaaacaacaagaacggcgtggaccaggaaatcatcttcccacccatcaagaccgatgtgattacaatggaccccaaggacaactgctccaaggacgccaacgataccctgctgctccagctgaccaacaccagcgcctactacatgtacttgttgctgctgctgaagtccgtggtgtacttcgccatcatcacatgctgcctgctgcggagaaccgccttctgctgcaacggcgagaagtctagggccaagcgatctggatctggagcaacaaacttctcactactcaaacaagcaggtgacgtggaggagaatcccgggcctactagcatggccttaccagtgaccgccttgctcctgccgctggccttgctgctccacgccgccaggccggacatcgtgatgacacagagccctgatagcctggccgtgtctctgggagagagagccacaatcaactgcgagagcagccagagcctgctgaacagcggcaaccagaagaactacctgacctggtatcagcagaagcccggccagcctcctaagcctctgatctactgggccagcaccagagaaagcggcgtgcccgatagattttctggctctggcagcggcaccgacttcaccctgacaatttctagcctgcaagccgaggacgtggccgtgtactactgccagaacgactacagctacccctacctgttcggccagggcaccaagctggaaatcaaaagaggcggaggcggaagtggaggcggaggatctggcggcggaggctctcaagttcagctggtgcagagcggcagcgagctgaagaaacctggcgcttccgtgaagatcagctgcaaggccagcggctacaccttcaccaactacggcatgaactgggtcaagcaggcccctggacagggcctgaaatggatgggctggatcaacacctacaccggcgagcctacctacgccgaagagttcaagggcagattcgccttcagcctggaaaccagcgccagcacagcctacctccagatcaccagcctgaagaacgaggacaccgccacctacttttgcgccagactcggcttcggcaacgctatggattattggggccagggaaccagcgtgaccgtgtcatctacgcgtgagcagaaactgatctcggaagaggatgggagcggcagccagcctcacaccaagcccagcgtgttcgtgatgaagaacggcaccaacgtggcctgcctcgtgaaagagttctaccccaaggacatcaggatcaacctggtgtccagcaagaagatcaccgagttcgaccccgccatcgtgatctcccccagcggcaagtacaacgccgtgaagctggggaagtacgaggacagcaacagcgtgacctgctccgtgcagcacgacaacaagaccgtgcacagcaccgactttgaagtgaaaaccgactccaccgaccacgtgaagcccaaagagacagagaacaccaagcagcccagcaagagctgccacaagcccaaggccatcgtgcacaccgagaaagtgaacatgatgagcctgaccgtgctgggcctgcggatgctgttcgccaaaaccgtggccgtgaacttcctgctgaccgccaagctgttcttcctccgcgccaagagaagcggatctggcgtgaagcagaccctgaatttcgacctgctgaagctggctggcgacgtggaatccaacccaggcccttctagaggccatatgaccgagtacaagcccacggtgcgcctcgccacccgcgacgacgtccccagggccgtacgcaccctcgccgccgcgttcgccgactaccccgccacgcgccacaccgtcgatccggaccgccacatcgagcgggtcaccgagctgcaagaactcttcctcacgcgcgtcgggctcgacatcggcaaggtgtgggtcgcggacgacggcgccgcggtggcggtctggaccacgccggagagcgtcgaagcgggggcggtgttcgccgagatcggcccgcgcatggccgagttgagcggttcccggctggccgcgcagcaacagatggaaggcctcctggcgccgcaccggcccaaggagcccgcgtggttcctggccaccgtcggcgtctcgcccgaccaccagggcaagggtctgggcagcgccgtcgtgctccccggagtggaggcggccgagcgcgccggggtgcccgccttcctggagacctccgcgccccgcaacctccccttctacgagcggctcggcttcaccgtcaccgccgacgtcgaggtgcccgaaggaccgcgcacctggtgcatgacccgcaagcccggtgcctga

SEQ ID NO: 3720 - DNA, 3108 bp, synthetic construct
  source 1..3108: mol_type = other DNA
atggccttaccagtgaccgccttgctcctgccgctggccttgctgctccacgccgccaggccggacatcgtgatgacacagagccctgatagcctggccgtgtctctgggagagagagccacaatcaactgcgagagcagccagagcctgctgaacagcggcaaccagaagaactacctgacctggtatcagcagaagcccggccagcctcctaagcctctgatctactgggccagcaccagagaaagcggcgtgcccgatagattttctggctctggcagcggcaccgacttcaccctgacaatttctagcctgcaagccgaggacgtggccgtgtactactgccagaacgactacagctacccctacctgttcggccagggcaccaagctggaaatcaaaagaggacagcctaaggccaatcctaccgtgacactgttccctccaagcagcgaagaactccaggccaacaaggccacacttgtgtgcctgatctccgacttctaccctggggctgtgacagtggcttggaaggccgatggatctcctgtgaaagccggcgtggaaaccaccaagccatccaagcagagcaacaacaaatacgccgccagctcctacctgagcctgacacctgagcagtggaagtcccacagatcctacagctgccaagtgacccacgaaggcagcaccgtggaaaagacagtggcccctacagagtgcagcggatcccagagcttcggcctgctggaccccaagctgtgctacctgctggatggcatcctgttcatctacggcgtgatcctgaccgccctgttcctgagagtgaagttcagcagaagcgccgacgcccctgcctaccagcagggacagaaccaactgtacaacgagctgaacctgggcagacgggaagagtacgacgtgctggacaagcggagaggcagggaccctgagatgggcggaaagccccagcggagaaagaacccccaggaaggactgtataacgaactccagaaagacaagatggccgaagcctacagcgagatcggcatgaagggcgagcggagaagaggcaagggccacgatggcctgtaccagggcctgagcaccgccaccaaggacacctatgacgccctgcacatgcaggccctgcctccaagaagggccaagcgatctggatctggagcaacaaacttctcactactcaaacaagcaggtgacgtggaggagaatcccgggcctactagtatggactggatttggcgcatccttttccttgtcggcgctgctaccggcgcgcattccttcgaacaagttcagctggtgcagagcggcagcgagctgaagaaacctggcgcttccgtgaagatcagctgcaaggccagcggctacaccttcaccaactacggcatgaactgggtcaagcaggcccctggacagggcctgaaatggatgggctggatcaacacctacaccggcgagcctacctacgccgaagagttcaagggcagattcgccttcagcctggaaaccagcgccagcacagcctacctccagatcaccagcctgaagaacgaggacaccgccacctacttttgcgccagactcggcttcggcaacgctatggattattggggccagggaaccagcgtgaccgtgtcatctgcctctacaaagggaccctccgtgtttcctctggctcccagcagcaagtctacaagcggaggaacagccgctctgggctgcctggtcaaggattactttcccgagcctgtgaccgtgtcctggaatagcggagcactgacaagcggcgtgcacacctttccagccgtgctgcaaagcagcggcctgtactctctgagcagcgtggtcacagtgcctagctctagcctgggcacccagacctacatctgcaatgtgaaccacaagcctagcaacaccaaggtggacaagagagtggaacccaagagctgtggtacccagagttttgggttgttggaccctaaattgtgctatctgttggacggaatcctgttcatttacggagtgatcctgaccgcattgttcctgcgggttaagttttccagatccgcagacgcacccgcttaccaacaagggcagaaccaactctacaatgaacttaatttggggcggagggaagagtacgacgttctggacaaaaggaggggacgagatcccgagatgggcggaaagcctcagcgaaggaagaatccgcaagaggggctttataacgaactccagaaagataaaatggcagaagcctatagtgagattgggatgaagggagaaaggaggaggggtaaaggtcacgatgggttgtaccaaggattgagcacagccactaaagatacctatgatgcgctccacatgcaggccctgccgccaagacgcgccaagagaagcggatctggcgtgaagcagaccctgaatttcgacctgctgaagctggctggcgacgtggaatccaacccaggcccttctagaggccatatgaccgagtacaagcccacggtgcgcctcgccacccgcgacgacgtccccagggccgtacgcaccctcgccgccgcgttcgccgactaccccgccacgcgccacaccgtcgatccggaccgccacatcgagcgggtcaccgagctgcaagaactcttcctcacgcgcgtcgggctcgacatcggcaaggtgtgggtcgcggacgacggcgccgcggtggcggtctggaccacgccggagagcgtcgaagcgggggcggtgttcgccgagatcggcccgcgcatggccgagttgagcggttcccggctggccgcgcagcaacagatggaaggcctcctggcgccgcaccggcccaaggagcccgcgtggttcctggccaccgtcggcgtctcgcccgaccaccagggcaagggtctgggcagcgccgtcgtgctccccggagtggaggcggccgagcgcgccggggtgcccgccttcctggagacctccgcgccccgcaacctccccttctacgagcggctcggcttcaccgtcaccgccgacgtcgaggtgcccgaaggaccgcgcacctggtgcatgacccgcaagcccggtgcctga

SEQ ID NO: 3721 - DNA, 2463 bp, synthetic construct
  source 1..2463: mol_type = other DNA
atggccttaccagtgaccgccttgctcctgccgctggccttgctgctccacgccgccaggccggacatcgtgatgacacagagccctgatagcctggccgtgtctctgggagagagagccacaatcaactgcgagagcagccagagcctgctgaacagcggcaaccagaagaactacctgacctggtatcagcagaagcccggccagcctcctaagcctctgatctactgggccagcaccagagaaagcggcgtgcccgatagattttctggctctggcagcggcaccgacttcaccctgacaatttctagcctgcaagccgaggacgtggccgtgtactactgccagaacgactacagctacccctacctgttcggccagggcaccaagctggaaatcaaaagactcgaggacctgaagaacgtgttcccacctgaggtggccgtgttcgagcctagcgaggccgagatcagccacacccagaaagccaccctcgtgtgcctggctaccggcttctaccccgaccatgtggaactgtcttggtgggtcaacggcaaagaggtgcacagcggcgtgtctaccgacccccagccactgaaagaacagcccgccctgaacgacagccggtactgcctgagcagcagactgagagtgtccgccaccttctggcagaacccccggaaccacttcagatgccaggtgcagttctacggcctgagcgagaacgacgagtggacccaggacagagccaagcccgtgacccagatcgtgtctgccgaagcctggggcagagccgattgcggatcccagagcttcggcctgctggaccccaagctgtgctacctgctggatggcatcctgttcatctacggcgtgatcctgaccgccctgttcctgagagtgaagttcagcagaagcgccgacgcccctgcctaccagcagggacagaaccaactgtacaacgagctgaacctgggcagacgggaagagtacgacgtgctggacaagcggagaggcagggaccctgagatgggcggaaagccccagcggagaaagaacccccaggaaggactgtataacgaactccagaaagacaagatggccgaagcctacagcgagatcggcatgaagggcgagcggagaagaggcaagggccacgatggcctgtaccagggcctgagcaccgccaccaaggacacctatgacgccctgcacatgcaggccctgcctccaagaagggccaagcgatctggatctggagcaacaaacttctcactactcaaacaagcaggtgacgtggaggagaatcccgggcctactagtatggactggatttggcgcatccttttccttgtcggcgctgctaccggcgcgcattccttcgaacaagttcagctggtgcagagcggcagcgagctgaagaaacctggcgcttccgtgaagatcagctgcaaggccagcggctacaccttcaccaactacggcatgaactgggtcaagcaggcccctggacagggcctgaaatggatgggctggatcaacacctacaccggcgagcctacctacgccgaagagttcaagggcagattcgccttcagcctggaaaccagcgccagcacagcctacctccagatcaccagcctgaagaacgaggacaccgccacctacttttgcgccagactcggcttcggcaacgctatggattattggggccagggaaccagcgtgaccgtgtcatctacgcgtatccagaaccctgatcctgccgtgtaccagctgcgggatagcaagagcagcgacaagagcgtgtgtctgttcaccgacttcgacagccagaccaacgtgtcccagagcaaggactccgacgtgtacatcaccgataagaccgtgctggacatgcggagcatggacttcaagagcaactccgccgtggcctggtccaacaagtccgatttcgcctgcgccaacgccttcaacaacagcattatccccgaggacacattcttcccaagccccgagagcagctgcggtacccagagttttgggttgttggaccctaaattgtgctatctgttggacggaatcctgttcatttacggagtgatcctgaccgcattgttcctgcgggttaagttttccagatccgcagacgcacccgcttaccaacaagggcagaaccaactctacaatgaacttaatttggggcggagggaagagtacgacgttctggacaaaaggaggggacgagatcccgagatgggcggaaagcctcagcgaaggaagaatccgcaagaggggctttataacgaactccagaaagataaaatggcagaagcctatagtgagattgggatgaagggagaaaggaggaggggtaaaggtcacgatgggttgtaccaaggattgagcacagccactaaagatacctatgatgcgctccacatgcaggccctgccgccaaga

SEQ ID NO: 3722 - DNA, 2463 bp, synthetic construct
  source 1..2463: mol_type = other DNA
atggccttaccagtgaccgccttgctcctgccgctggccttgctgctccacgccgccaggccggacatcgtgatgacacagagccctgatagcctggccgtgtctctgggagagagagccacaatcaactgcgagagcagccagagcctgctgaacagcggcaaccagaagaactacctgacctggtatcagcagaagcccggccagcctcctaagcctctgatctactgggccagcaccagagaaagcggcgtgcccgatagattttctggctctggcagcggcaccgacttcaccctgacaatttctagcctgcaagccgaggacgtggccgtgtactactgccagaacgactacagctacccctacctgttcggccagggcaccaagctggaaatcaaaagactcgaggacctgaagaacgtgttcccacctgaggtggccgtgttcgagcctagcaaggccgagatcgcccacacccagaaagccaccctcgtgtgcctggctaccggcttctaccccgaccatgtggaactgtcttggtgggtcaacggcaaagaggtgcacagcggcgtgtgtaccgacccccagccactgaaagaacagcccgccctgaacgacagccggtactgcctgagcagcagactgagagtgtccgccaccttctggcagaacccccggaaccacttcagatgccaggtgcagttctacggcctgagcgagaacgacgagtggacccaggacagagccaagcccgtgacccagatcgtgtctgccgaagcctggggcagagccgattgcggatcccagagcttcggcctgctggaccccaagctgtgctacctgctggatggcatcctgttcatctacggcgtgatcctgaccgccctgttcctgagagtgaagttcagcagaagcgccgacgcccctgcctaccagcagggacagaaccaactgtacaacgagctgaacctgggcagacgggaagagtacgacgtgctggacaagcggagaggcagggaccctgagatgggcggaaagccccagcggagaaagaacccccaggaaggactgtataacgaactccagaaagacaagatggccgaagcctacagcgagatcggcatgaagggcgagcggagaagaggcaagggccacgatggcctgtaccagggcctgagcaccgccaccaaggacacctatgacgccctgcacatgcaggccctgcctccaagaagggccaagcgatctggatctggagcaacaaacttctcactactcaaacaagcaggtgacgtggaggagaatcccgggcctactagtatggactggatttggcgcatccttttccttgtcggcgctgctaccggcgcgcattccttcgaacaagttcagctggtgcagagcggcagcgagctgaagaaacctggcgcttccgtgaagatcagctgcaaggccagcggctacaccttcaccaactacggcatgaactgggtcaagcaggcccctggacagggcctgaaatggatgggctggatcaacacctacaccggcgagcctacctacgccgaagagttcaagggcagattcgccttcagcctggaaaccagcgccagcacagcctacctccagatcaccagcctgaagaacgaggacaccgccacctacttttgcgccagactcggcttcggcaacgctatggattattggggccagggaaccagcgtgaccgtgtcatctacgcgtatccagaaccctgatcctgccgtgtaccagctgcgggatagcaagagcagcgacaagagcgtgtgtctgttcaccgacttcgacagccagaccaacgtgtcccagagcaaggactccgacgtgtacatcaccgataagtgcgtgctggacatgcggagcatggacttcaagagcaactccgccgtggcctggtccaacaagtccgatttcgcctgcgccaacgccttcaacaacagcattatccccgaggacacattcttcccaagcagcgacgtgccctgcggtacccagagttttgggttgttggaccctaaattgtgctatctgttggacggaatcctgttcatttacggagtgatcctgaccgcattgttcctgcgggttaagttttccagatccgcagacgcacccgcttaccaacaagggcagaaccaactctacaatgaacttaatttggggcggagggaagagtacgacgttctggacaaaaggaggggacgagatcccgagatgggcggaaagcctcagcgaaggaagaatccgcaagaggggctttataacgaactccagaaagataaaatggcagaagcctatagtgagattgggatgaagggagaaaggaggaggggtaaaggtcacgatgggttgtaccaaggattgagcacagccactaaagatacctatgatgcgctccacatgcaggccctgccgccaaga

SEQ ID NO: 3723 - DNA, 2676 bp, synthetic construct
  source 1..2676: mol_type = other DNA
atggccttaccagtgaccgccttgctcctgccgctggccttgctgctccacgccgccaggccggacatcgtgatgacacagagccctgatagcctggccgtgtctctgggagagagagccacaatcaactgcgagagcagccagagcctgctgaacagcggcaaccagaagaactacctgacctggtatcagcagaagcccggccagcctcctaagcctctgatctactgggccagcaccagagaaagcggcgtgcccgatagattttctggctctggcagcggcaccgacttcaccctgacaatttctagcctgcaagccgaggacgtggccgtgtactactgccagaacgactacagctacccctacctgttcggccagggcaccaagctggaaatcaaaagactcgaggggaaaccaattcccaaccctcttctgggactggattcaaccggcagcggcgaggacctgaagaacgtgttcccacctgaggtggccgtgttcgagcctagcgaggccgagatcagccacacccagaaagccaccctcgtgtgcctggctaccggcttctaccccgaccatgtggaactgtcttggtgggtcaacggcaaagaggtgcacagcggcgtgtctaccgacccccagccactgaaagaacagcccgccctgaacgacagccggtactgcctgagcagcagactgagagtgtccgccaccttctggcagaacccccggaaccacttcagatgccaggtgcagttctacggcctgagcgagaacgacgagtggacccaggacagagccaagcccgtgacccagatcgtgtctgccgaagcctggggcagagccgattgcggatcccagagcttcggcctgctggaccccaagctgtgctacctgctggatggcatcctgttcatctacggcgtgatcctgaccgccctgttcctgagagtgaagttcagcagaagcgccgacgcccctgcctaccagcagggacagaaccaactgtacaacgagctgaacctgggcagacgggaagagtacgacgtgctggacaagcggagaggcagggaccctgagatgggcggaaagccccagcggagaaagaacccccaggaaggactgtataacgaactccagaaagacaagatggccgaagcctacagcgagatcggcatgaagggcgagcggagaagaggcaagggccacgatggcctgtaccagggcctgagcaccgccaccaaggacacctatgacgccctgcacatgcaggccctgcctccaagaagggccaagcgatctggatctggagcaacaaacttctcactactcaaacaagcaggtgacgtggaggagaatcccgggcctactagtatggactggatttggcgcatccttttccttgtcggcgctgctaccggcgcgcattccttcgaacaagttcagctggtgcagagcggcagcgagctgaagaaacctggcgcttccgtgaagatcagctgcaaggccagcggctacaccttcaccaactacggcatgaactgggtcaagcaggcccctggacagggcctgaaatggatgggctggatcaacacctacaccggcgagcctacctacgccgaagagttcaagggcagattcgccttcagcctggaaaccagcgccagcacagcctacctccagatcaccagcctgaagaacgaggacaccgccacctacttttgcgccagactcggcttcggcaacgctatggattattggggccagggaaccagcgtgaccgtgtcatctacgcgtgagcagaaactgatctcggaagaggatgggagcggcatccagaaccctgatcctgccgtgtaccagctgcgggatagcaagagcagcgacaagagcgtgtgtctgttcaccgacttcgacagccagaccaacgtgtcccagagcaaggactccgacgtgtacatcaccgataagaccgtgctggacatgcggagcatggacttcaagagcaactccgccgtggcctggtccaacaagtccgatttcgcctgcgccaacgccttcaacaacagcattatccccgaggacacattcttcccaagccccgagagcagctgcggtacccagagttttgggttgttggaccctaaattgtgctatctgttggacggaatcctgttcatttacggagtgatcctgaccgcattgttcctgaggagcaagcggtcacggctgctccacagcgattacatgaatatgacaccacgaagaccgggtcctactcgcaaacactaccaaccctacgcacctccccgcgactttgcagcgtaccgatctcgggttaagttttccagatccgcagacgcacccgcttaccaacaagggcagaaccaactctacaatgaacttaatttggggcggagggaagagtacgacgttctggacaaaaggaggggacgagatcccgagatgggcggaaagcctcagcgaaggaagaatccgcaagaggggctttataacgaactccagaaagataaaatggcagaagcctatagtgagattgggatgaagggagaaaggaggaggggtaaaggtcacgatgggttgtaccaaggattgagcacagccactaaagatacctatgatgcgctccacatgcaggccctgccgccaaga

SEQ ID NO: 3724 - DNA, 2799 bp, synthetic construct
  source 1..2799: mol_type = other DNA
atggccttaccagtgaccgccttgctcctgccgctggccttgctgctccacgccgccaggccggacatcgtgatgacacagagccctgatagcctggccgtgtctctgggagagagagccacaatcaactgcgagagcagccagagcctgctgaacagcggcaaccagaagaactacctgacctggtatcagcagaagcccggccagcctcctaagcctctgatctactgggccagcaccagagaaagcggcgtgcccgatagattttctggctctggcagcggcaccgacttcaccctgacaatttctagcctgcaagccgaggacgtggccgtgtactactgccagaacgactacagctacccctacctgttcggccagggcaccaagctggaaatcaaaagactcgaggggaaaccaattcccaaccctcttctgggactggattcaaccggcagcggcgaggacctgaagaacgtgttcccacctgaggtggccgtgttcgagcctagcgaggccgagatcagccacacccagaaagccaccctcgtgtgcctggctaccggcttctaccccgaccatgtggaactgtcttggtgggtcaacggcaaagaggtgcacagcggcgtgtctaccgacccccagccactgaaagaacagcccgccctgaacgacagccggtactgcctgagcagcagactgagagtgtccgccaccttctggcagaacccccggaaccacttcagatgccaggtgcagttctacggcctgagcgagaacgacgagtggacccaggacagagccaagcccgtgacccagatcgtgtctgccgaagcctggggcagagccgattgcggatcccagagcttcggcctgctggaccccaagctgtgctacctgctggatggcatcctgttcatctacggcgtgatcctgaccgccctgttcctgaggagtaagaggagcaggctcctgcacagtgactacatgaacatgactccacgccgccccggacccacccgcaagcattaccagccctatgccccaccacgcgacttcgcagcctatcgctccagagtgaagttcagcagaagcgccgacgcccctgcctaccagcagggacagaaccaactgtacaacgagctgaacctgggcagacgggaagagtacgacgtgctggacaagcggagaggcagggaccctgagatgggcggaaagccccagcggagaaagaacccccaggaaggactgtataacgaactccagaaagacaagatggccgaagcctacagcgagatcggcatgaagggcgagcggagaagaggcaagggccacgatggcctgtaccagggcctgagcaccgccaccaaggacacctatgacgccctgcacatgcaggccctgcctccaagaagggccaagcgatctggatctggagcaacaaacttctcactactcaaacaagcaggtgacgtggaggagaatcccgggcctactagtatggactggatttggcgcatccttttccttgtcggcgctgctaccggcgcgcattccttcgaacaagttcagctggtgcagagcggcagcgagctgaagaaacctggcgcttccgtgaagatcagctgcaaggccagcggctacaccttcaccaactacggcatgaactgggtcaagcaggcccctggacagggcctgaaatggatgggctggatcaacacctacaccggcgagcctacctacgccgaagagttcaagggcagattcgccttcagcctggaaaccagcgccagcacagcctacctccagatcaccagcctgaagaacgaggacaccgccacctacttttgcgccagactcggcttcggcaacgctatggattattggggccagggaaccagcgtgaccgtgtcatctacgcgtgagcagaaactgatctcggaagaggatgggagcggcatccagaaccctgatcctgccgtgtaccagctgcgggatagcaagagcagcgacaagagcgtgtgtctgttcaccgacttcgacagccagaccaacgtgtcccagagcaaggactccgacgtgtacatcaccgataagaccgtgctggacatgcggagcatggacttcaagagcaactccgccgtggcctggtccaacaagtccgatttcgcctgcgccaacgccttcaacaacagcattatccccgaggacacattcttcccaagccccgagagcagctgcggtacccagagttttgggttgttggaccctaaattgtgctatctgttggacggaatcctgttcatttacggagtgatcctgaccgcattgttcctgaggagcaagcggtcacggctgctccacagcgattacatgaatatgacaccacgaagaccgggtcctactcgcaaacactaccaaccctacgcacctccccgcgactttgcagcgtaccgatctcgggttaagttttccagatccgcagacgcacccgcttaccaacaagggcagaaccaactctacaatgaacttaatttggggcggagggaagagtacgacgttctggacaaaaggaggggacgagatcccgagatgggcggaaagcctcagcgaaggaagaatccgcaagaggggctttataacgaactccagaaagataaaatggcagaagcctatagtgagattgggatgaagggagaaaggaggaggggtaaaggtcacgatgggttgtaccaaggattgagcacagccactaaagatacctatgatgcgctccacatgcaggccctgccgccaaga

SEQ ID NO: 3725 - DNA, 2682 bp, synthetic construct
  source 1..2682: mol_type = other DNA
atggccttaccagtgaccgccttgctcctgccgctggccttgctgctccacgccgccaggccggacatcgtgatgacacagagccctgatagcctggccgtgtctctgggagagagagccacaatcaactgcgagagcagccagagcctgctgaacagcggcaaccagaagaactacctgacctggtatcagcagaagcccggccagcctcctaagcctctgatctactgggccagcaccagagaaagcggcgtgcccgatagattttctggctctggcagcggcaccgacttcaccctgacaatttctagcctgcaagccgaggacgtggccgtgtactactgccagaacgactacagctacccctacctgttcggccagggcaccaagctggaaatcaaaagactcgaggggaaaccaattcccaaccctcttctgggactggattcaaccggcagcggcgaggacctgaagaacgtgttcccacctgaggtggccgtgttcgagcctagcgaggccgagatcagccacacccagaaagccaccctcgtgtgcctggctaccggcttctaccccgaccatgtggaactgtcttggtgggtcaacggcaaagaggtgcacagcggcgtgtctaccgacccccagccactgaaagaacagcccgccctgaacgacagccggtactgcctgagcagcagactgagagtgtccgccaccttctggcagaacccccggaaccacttcagatgccaggtgcagttctacggcctgagcgagaacgacgagtggacccaggacagagccaagcccgtgacccagatcgtgtctgccgaagcctggggcagagccgattgcggatcccagagcttcggcctgctggaccccaagctgtgctacctgctggatggcatcctgttcatctacggcgtgatcctgaccgccctgttcctgagagtgaagttcagcagaagcgccgacgcccctgcctaccagcagggacagaaccaactgtacaacgagctgaacctgggcagacgggaagagtacgacgtgctggacaagcggagaggcagggaccctgagatgggcggaaagccccagcggagaaagaacccccaggaaggactgtataacgaactccagaaagacaagatggccgaagcctacagcgagatcggcatgaagggcgagcggagaagaggcaagggccacgatggcctgtaccagggcctgagcaccgccaccaaggacacctatgacgccctgcacatgcaggccctgcctccaagaagggccaagcgatctggatctggagcaacaaacttctcactactcaaacaagcaggtgacgtggaggagaatcccgggcctactagtatggactggatttggcgcatccttttccttgtcggcgctgctaccggcgcgcattccttcgaacaagttcagctggtgcagagcggcagcgagctgaagaaacctggcgcttccgtgaagatcagctgcaaggccagcggctacaccttcaccaactacggcatgaactgggtcaagcaggcccctggacagggcctgaaatggatgggctggatcaacacctacaccggcgagcctacctacgccgaagagttcaagggcagattcgccttcagcctggaaaccagcgccagcacagcctacctccagatcaccagcctgaagaacgaggacaccgccacctacttttgcgccagactcggcttcggcaacgctatggattattggggccagggaaccagcgtgaccgtgtcatctacgcgtgagcagaaactgatctcggaagaggatctggggagcggcatccagaaccctgatcctgccgtgtaccagctgcgggatagcaagagcagcgacaagagcgtgtgtctgttcaccgacttcgacagccagaccaacgtgtcccagagcaaggactccgacgtgtacatcaccgataagaccgtgctggacatgcggagcatggacttcaagagcaactccgccgtggcctggtccaacaagtccgatttcgcctgcgccaacgccttcaacaacagcattatccccgaggacacattcttcccaagccccgagagcagctgcggtacccagagttttgggttgttggaccctaaattgtgctatctgttggacggaatcctgttcatttacggagtgatcctgaccgcattgttcctgaagagaggccggaagaagctgctgtacatcttcaagcagcctttcatgcggcccgtgcagaccacccaggaagaggacggctgctcctgccggttccccgaggaagaagaaggcggctgcgagctgcgggttaagttttccagatccgcagacgcacccgcttaccaacaagggcagaaccaactctacaatgaacttaatttggggcggagggaagagtacgacgttctggacaaaaggaggggacgagatcccgagatgggcggaaagcctcagcgaaggaagaatccgcaagaggggctttataacgaactccagaaagataaaatggcagaagcctatagtgagattgggatgaagggagaaaggaggaggggtaaaggtcacgatgggttgtaccaaggattgagcacagccactaaagatacctatgatgcgctccacatgcaggccctgccgccaaga

SEQ ID NO: 3726 - DNA, 2808 bp, synthetic construct
  source 1..2808: mol_type = other DNA
atggccttaccagtgaccgccttgctcctgccgctggccttgctgctccacgccgccaggccggacatcgtgatgacacagagccctgatagcctggccgtgtctctgggagagagagccacaatcaactgcgagagcagccagagcctgctgaacagcggcaaccagaagaactacctgacctggtatcagcagaagcccggccagcctcctaagcctctgatctactgggccagcaccagagaaagcggcgtgcccgatagattttctggctctggcagcggcaccgacttcaccctgacaatttctagcctgcaagccgaggacgtggccgtgtactactgccagaacgactacagctacccctacctgttcggccagggcaccaagctggaaatcaaaagactcgaggggaaaccaattcccaaccctcttctgggactggattcaaccggcagcggcgaggacctgaagaacgtgttcccacctgaggtggccgtgttcgagcctagcgaggccgagatcagccacacccagaaagccaccctcgtgtgcctggctaccggcttctaccccgaccatgtggaactgtcttggtgggtcaacggcaaagaggtgcacagcggcgtgtctaccgacccccagccactgaaagaacagcccgccctgaacgacagccggtactgcctgagcagcagactgagagtgtccgccaccttctggcagaacccccggaaccacttcagatgccaggtgcagttctacggcctgagcgagaacgacgagtggacccaggacagagccaagcccgtgacccagatcgtgtctgccgaagcctggggcagagccgattgcggatcccagagcttcggcctgctggaccccaagctgtgctacctgctggatggcatcctgttcatctacggcgtgatcctgaccgccctgttcctgaaacggggcagaaagaaactcctgtatatattcaaacaaccatttatgagaccagtacaaactactcaagaggaagatggctgtagctgccgatttccagaagaagaagaaggaggatgtgaactgagagtgaagttcagcagaagcgccgacgcccctgcctaccagcagggacagaaccaactgtacaacgagctgaacctgggcagacgggaagagtacgacgtgctggacaagcggagaggcagggaccctgagatgggcggaaagccccagcggagaaagaacccccaggaaggactgtataacgaactccagaaagacaagatggccgaagcctacagcgagatcggcatgaagggcgagcggagaagaggcaagggccacgatggcctgtaccagggcctgagcaccgccaccaaggacacctatgacgccctgcacatgcaggccctgcctccaagaagggccaagcgatctggatctggagcaacaaacttctcactactcaaacaagcaggtgacgtggaggagaatcccgggcctactagtatggactggatttggcgcatccttttccttgtcggcgctgctaccggcgcgcattccttcgaacaagttcagctggtgcagagcggcagcgagctgaagaaacctggcgcttccgtgaagatcagctgcaaggccagcggctacaccttcaccaactacggcatgaactgggtcaagcaggcccctggacagggcctgaaatggatgggctggatcaacacctacaccggcgagcctacctacgccgaagagttcaagggcagattcgccttcagcctggaaaccagcgccagcacagcctacctccagatcaccagcctgaagaacgaggacaccgccacctacttttgcgccagactcggcttcggcaacgctatggattattggggccagggaaccagcgtgaccgtgtcatctacgcgtgagcagaaactgatctcggaagaggatctggggagcggcatccagaaccctgatcctgccgtgtaccagctgcgggatagcaagagcagcgacaagagcgtgtgtctgttcaccgacttcgacagccagaccaacgtgtcccagagcaaggactccgacgtgtacatcaccgataagaccgtgctggacatgcggagcatggacttcaagagcaactccgccgtggcctggtccaacaagtccgatttcgcctgcgccaacgccttcaacaacagcattatccccgaggacacattcttcccaagccccgagagcagctgcggtacccagagttttgggttgttggaccctaaattgtgctatctgttggacggaatcctgttcatttacggagtgatcctgaccgcattgttcctgaagagaggccggaagaagctgctgtacatcttcaagcagcctttcatgcggcccgtgcagaccacccaggaagaggacggctgctcctgccggttccccgaggaagaagaaggcggctgcgagctgcgggttaagttttccagatccgcagacgcacccgcttaccaacaagggcagaaccaactctacaatgaacttaatttggggcggagggaagagtacgacgttctggacaaaaggaggggacgagatcccgagatgggcggaaagcctcagcgaaggaagaatccgcaagaggggctttataacgaactccagaaagataaaatggcagaagcctatagtgagattgggatgaagggagaaaggaggaggggtaaaggtcacgatgggttgtaccaaggattgagcacagccactaaagatacctatgatgcgctccacatgcaggccctgccgccaaga

SEQ ID NO: 3727 - DNA, 2481 bp, synthetic construct
  source 1..2481: mol_type = other DNA
atggccttaccagtgaccgccttgctcctgccgctggccttgctgctccacgccgccaggccggacatcgtgatgacacagagccctgatagcctggccgtgtctctgggagagagagccacaatcaactgcgagagcagccagagcctgctgaacagcggcaaccagaagaactacctgacctggtatcagcagaagcccggccagcctcctaagcctctgatctactgggccagcaccagagaaagcggcgtgcccgatagattttctggctctggcagcggcaccgacttcaccctgacaatttctagcctgcaagccgaggacgtggccgtgtactactgccagaacgactacagctacccctacctgttcggccagggcaccaagctggaaatcaaaagactcgagcagagcttcggcctgctggaccccaagctgtgctacctgctggatggcatcctgttcatctacggcgtgatcctgaccgccctgttcctgagagtgaagttcagcagaagcgccgacgcccctgcctaccagcagggacagaaccaactgtacaacgagctgaacctgggcagacgggaagagtacgacgtgctggacaagcggagaggcagggaccctgagatgggcggaaagccccagcggagaaagaacccccaggaaggactgtataacgaactccagaaagacaagatggccgaagcctacagcgagatcggcatgaagggcgagcggagaagaggcaagggccacgatggcctgtaccagggcctgagcaccgccaccaaggacacctatgacgccctgcacatgcaggccctgcctccaagaagggccaagcgatctggatctggagcaacaaacttctcactactcaaacaagcaggtgacgtggaggagaatcccgggcctactagtatggactggatttggcgcatccttttccttgtcggcgctgctaccggcgcgcattccttcgaacaagttcagctggtgcagagcggcagcgagctgaagaaacctggcgcttccgtgaagatcagctgcaaggccagcggctacaccttcaccaactacggcatgaactgggtcaagcaggcccctggacagggcctgaaatggatgggctggatcaacacctacaccggcgagcctacctacgccgaagagttcaagggcagattcgccttcagcctggaaaccagcgccagcacagcctacctccagatcaccagcctgaagaacgaggacaccgccacctacttttgcgccagactcggcttcggcaacgctatggattattggggccagggaaccagcgtgaccgtgtcatctacgcgtcagagttttgggttgttggaccctaaattgtgctatctgttggacggaatcctgttcatttacggagtgatcctgaccgcattgttcctgcgggttaagttttccagatccgcagacgcacccgcttaccaacaagggcagaaccaactctacaatgaacttaatttggggcggagggaagagtacgacgttctggacaaaaggaggggacgagatcccgagatgggcggaaagcctcagcgaaggaagaatccgcaagaggggctttataacgaactccagaaagataaaatggcagaagcctatagtgagattgggatgaagggagaaaggaggaggggtaaaggtcacgatgggttgtaccaaggattgagcacagccactaaagatacctatgatgcgctccacatgcaggccctgccgccaagacgcgccaagagaagcggatctggcgtgaagcagaccctgaatttcgacctgctgaagctggctggcgacgtggaatccaacccaggcccttctagaggccatatgaccgagtacaagcccacggtgcgcctcgccacccgcgacgacgtccccagggccgtacgcaccctcgccgccgcgttcgccgactaccccgccacgcgccacaccgtcgatccggaccgccacatcgagcgggtcaccgagctgcaagaactcttcctcacgcgcgtcgggctcgacatcggcaaggtgtgggtcgcggacgacggcgccgcggtggcggtctggaccacgccggagagcgtcgaagcgggggcggtgttcgccgagatcggcccgcgcatggccgagttgagcggttcccggctggccgcgcagcaacagatggaaggcctcctggcgccgcaccggcccaaggagcccgcgtggttcctggccaccgtcggcgtctcgcccgaccaccagggcaagggtctgggcagcgccgtcgtgctccccggagtggaggcggccgagcgcgccggggtgcccgccttcctggagacctccgcgccccgcaacctccccttctacgagcggctcggcttcaccgtcaccgccgacgtcgaggtgcccgaaggaccgcgcacctggtgcatgacccgcaagcccggtgcctga

SEQ ID NO: 3728 - DNA, 1953 bp, synthetic construct
  source 1..1953: mol_type = other DNA
atggccttaccagtgaccgccttgctcctgccgctggccttgctgctccacgccgccaggccggacatcgtgatgacacagagccctgatagcctggccgtgtctctgggagagagagccacaatcaactgcgagagcagccagagcctgctgaacagcggcaaccagaagaactacctgacctggtatcagcagaagcccggccagcctcctaagcctctgatctactgggccagcaccagagaaagcggcgtgcccgatagattttctggctctggcagcggcaccgacttcaccctgacaatttctagcctgcaagccgaggacgtggccgtgtactactgccagaacgactacagctacccctacctgttcggccagggcaccaagctggaaatcaaaagactcgagggacagcctaaggccaatcctaccgtgacactgttccctccaagcagcgaagaactccaggccaacaaggccacacttgtgtgcctgatctccgacttctaccctggggctgtgacagtggcttggaaggccgatggatctcctgtgaaagccggcgtggaaaccaccaagccatccaagcagagcaacaacaaatacgccgccagctcctacctgagcctgacacctgagcagtggaagtcccacagatcctacagctgccaagtgacccacgaaggcagcaccgtggaaaagacagtggcccctacagagtgcagccccatcaagaccgatgtgattacaatggaccccaaggacaactgctccaaggacgccaacgataccctgctgctccagctgaccaacaccagcgcctactacatgtacttgttgctgctgctgaagtccgtggtgtacttcgccatcatcacatgctgcctgctgcggagaaccgccttctgctgcaacggcgagaagtctagggccaagcgatctggatctggagcaacaaacttctcactactcaaacaagcaggtgacgtggaggagaatcccgggcctactagtatggactggatttggcgcatccttttccttgtcggcgctgctaccggcgcgcattccttcgaacaagttcagctggtgcagagcggcagcgagctgaagaaacctggcgcttccgtgaagatcagctgcaaggccagcggctacaccttcaccaactacggcatgaactgggtcaagcaggcccctggacagggcctgaaatggatgggctggatcaacacctacaccggcgagcctacctacgccgaagagttcaagggcagattcgccttcagcctggaaaccagcgccagcacagcctacctccagatcaccagcctgaagaacgaggacaccgccacctacttttgcgccagactcggcttcggcaacgctatggattattggggccagggaaccagcgtgaccgtgtcatctacgcgtgcctctacaaagggaccctccgtgtttcctctggctcccagcagcaagtctacaagcggaggaacagccgctctgggctgcctggtcaaggattactttcccgagcctgtgaccgtgtcctggaatagcggagcactgacaagcggcgtgcacacctttccagccgtgctgcaaagcagcggcctgtactctctgagcagcgtggtcacagtgcctagctctagcctgggcacccagacctacatctgcaatgtgaaccacaagcctagcaacaccaaggtggacaagagagtggaacccaagagctgtgaagtgaaaaccgactccaccgaccacgtgaagcccaaagagacagagaacaccaagcagcccagcaagagctgccacaagcccaaggccatcgtgcacaccgagaaagtgaacatgatgagcctgaccgtgctgggcctgcggatgctgttcgccaaaaccgtggccgtgaacttcctgctgaccgccaagctgttcttcctc

SEQ ID NO: 3729 - DNA, 1887 bp, synthetic construct
  source 1..1887: mol_type = other DNA
atggccttaccagtgaccgccttgctcctgccgctggccttgctgctccacgccgccaggccggacatcgtgatgacacagagccctgatagcctggccgtgtctctgggagagagagccacaatcaactgcgagagcagccagagcctgctgaacagcggcaaccagaagaactacctgacctggtatcagcagaagcccggccagcctcctaagcctctgatctactgggccagcaccagagaaagcggcgtgcccgatagattttctggctctggcagcggcaccgacttcaccctgacaatttctagcctgcaagccgaggacgtggccgtgtactactgccagaacgactacagctacccctacctgttcggccagggcaccaagctggaaatcaaaagactcgagggacagcctaaggccaatcctaccgtgacactgttccctccaagcagcgaagaactccaggccaacaaggccacacttgtgtgcctgatctccgacttctaccctggggctgtgacagtggcttggaaggccgatggatctcctgtgaaagccggcgtggaaaccaccaagccatccaagcagagcaacaacaaatacgccgccagctcctacctgagcctgacacctgagcagtggaagtcccacagatcctacagctgccaagtgacccacgaaggcagcaccgtggaaaagacagtggcccctacagagtgcagcggcagagccgattgcggcatcaccagcgccagctaccaccagggcgtgctgagcgccaccatcctgtacgagatcctgctgggcaaggccaccctgtacgccgtgctggtgtctgccctggtgctgatggctatggtcaagcggaaggacagccggggaagggccaagcgatctggatctggagcaacaaacttctcactactcaaacaagcaggtgacgtggaggagaatcccgggcctactagtatggactggatttggcgcatccttttccttgtcggcgctgctaccggcgcgcattccttcgaacaagttcagctggtgcagagcggcagcgagctgaagaaacctggcgcttccgtgaagatcagctgcaaggccagcggctacaccttcaccaactacggcatgaactgggtcaagcaggcccctggacagggcctgaaatggatgggctggatcaacacctacaccggcgagcctacctacgccgaagagttcaagggcagattcgccttcagcctggaaaccagcgccagcacagcctacctccagatcaccagcctgaagaacgaggacaccgccacctacttttgcgccagactcggcttcggcaacgctatggattattggggccagggaaccagcgtgaccgtgtcatctacgcgtgcctctacaaagggaccctccgtgtttcctctggctcccagcagcaagtctacaagcggaggaacagccgctctgggctgcctggtcaaggattactttcccgagcctgtgaccgtgtcctggaatagcggagcactgacaagcggcgtgcacacctttccagccgtgctgcaaagcagcggcctgtactctctgagcagcgtggtcacagtgcctagctctagcctgggcacccagacctacatctgcaatgtgaaccacaagcctagcaacaccaaggtggacaagagagtggaacccaagagctgtatccccgaggacacattcttcccaagcagcgacgtgccctgcgacgtgaagctggtggaaaagagcttcgagacagacaccaacctgaacttccagaacctgagcgtgatcggcttcagaatcctgctgctgaaagtggccggctttaacctgctgatgaccctgcggctgtggtccagc

SEQ ID NO: 3730 - DNA, 1887 bp, synthetic construct
  source 1..1887: mol_type = other DNA
atggccttaccagtgaccgccttgctcctgccgctggccttgctgctccacgccgccaggccggacatcgtgatgacacagagccctgatagcctggccgtgtctctgggagagagagccacaatcaactgcgagagcagccagagcctgctgaacagcggcaaccagaagaactacctgacctggtatcagcagaagcccggccagcctcctaagcctctgatctactgggccagcaccagagaaagcggcgtgcccgatagattttctggctctggcagcggcaccgacttcaccctgacaatttctagcctgcaagccgaggacgtggccgtgtactactgccagaacgactacagctacccctacctgttcggccagggcaccaagctggaaatcaaaagactcgagggacagcctaaggccaatcctaccgtgacactgttccctccaagcagcgaagaactccaggccaacaaggccacacttgtgtgcctgatctccgacttctaccctggggctgtgacagtggcttggaaggccgatggatctcctgtgaaagccggcgtggaaaccaccaagccatccaagcagagcaacaacaaatacgccgccagctcctacctgagcctgacacctgagcagtggaagtcccacagatcctacagctgccaagtgacccacgaaggcagcaccgtggaaaagacagtggcccctacagagtgcagcggcagagccgattgcggctttaccagcgagagctaccagcagggcgtgctgagcgccaccatcctgtacgagatcctgctgggcaaggccaccctgtacgccgtgctggtgtctgccctggtgctgatggctatggtcaagcggaaggacagccggggaagggccaagcgatctggatctggagcaacaaacttctcactactcaaacaagcaggtgacgtggaggagaatcccgggcctactagtatggactggatttggcgcatccttttccttgtcggcgctgctaccggcgcgcattccttcgaacaagttcagctggtgcagagcggcagcgagctgaagaaacctggcgcttccgtgaagatcagctgcaaggccagcggctacaccttcaccaactacggcatgaactgggtcaagcaggcccctggacagggcctgaaatggatgggctggatcaacacctacaccggcgagcctacctacgccgaagagttcaagggcagattcgccttcagcctggaaaccagcgccagcacagcctacctccagatcaccagcctgaagaacgaggacaccgccacctacttttgcgccagactcggcttcggcaacgctatggattattggggccagggaaccagcgtgaccgtgtcatctacgcgtgcctctacaaagggaccctccgtgtttcctctggctcccagcagcaagtctacaagcggaggaacagccgctctgggctgcctggtcaaggattactttcccgagcctgtgaccgtgtcctggaatagcggagcactgacaagcggcgtgcacacctttccagccgtgctgcaaagcagcggcctgtactctctgagcagcgtggtcacagtgcctagctctagcctgggcacccagacctacatctgcaatgtgaaccacaagcctagcaacaccaaggtggacaagagagtggaacccaagagctgtatccccgaggacacattcttcccaagccccgagagcagctgcgacgtgaagctggtggaaaagagcttcgagacagacaccaacctgaacttccagaacctgagcgtgatcggcttcagaatcctgctgctgaaagtggccggctttaacctgctgatgaccctgcggctgtggtccagc

SEQ ID NO: 3731 - DNA, 1365 bp, synthetic construct
  source 1..1365: mol_type = other DNA
atggccttaccagtgaccgccttgctcctgccgctggccttgctgctccacgccgccaggccggacatcgtgatgacacagagccctgatagcctggccgtgtctctgggagagagagccacaatcaactgcgagagcagccagagcctgctgaacagcggcaaccagaagaactacctgacctggtatcagcagaagcccggccagcctcctaagcctctgatctactgggccagcaccagagaaagcggcgtgcccgatagattttctggctctggcagcggcaccgacttcaccctgacaatttctagcctgcaagccgaggacgtggccgtgtactactgccagaacgactacagctacccctacctgttcggccagggcaccaagctggaaatcaaaagaggcggaggcggaagtggaggcggaggatctggcggcggaggctctcaagttcagctggtgcagagcggcagcgagctgaagaaacctggcgcttccgtgaagatcagctgcaaggccagcggctacaccttcaccaactacggcatgaactgggtcaagcaggcccctggacagggcctgaaatggatgggctggatcaacacctacaccggcgagcctacctacgccgaagagttcaagggcagattcgccttcagcctggaaaccagcgccagcacagcctacctccagatcaccagcctgaagaacgaggacaccgccacctacttttgcgccagactcggcttcggcaacgctatggattattggggccagggaaccagcgtgaccgtgtcatctacgcgtgacggtaacgaggagatgggaggaatcactcaaaccccttacaaagtctcaatttcaggaacaactgttatccttacatgtccccagtatcctggcagcgagatcctttggcagcataacgacaagaatatagggggagatgaagacgataagaatatcggatctgacgaggatcacttgagcctgaaagagttctccgagcttgaacaaagcggatattatgtgtgctatccgcgcgggtcaaagccggaagacgctaacttttacctttatctccgagccagagtgtgcgaaaattgcatggaaatggacgttatgtccgttgctacaatagttatcgtagatatatgcatcacgggtggactgcttctgctggtttattattggtccaagaatagaaaggccaaagctaaacccgtgaccagaggcgctggcgcaggcggaaggcaaaggggacaaaacaaagaacggccaccaccagtgccaaatccagattatgagcctattcggaaaggacagagggacctgtactctggcctgaatcagagaagaatc

SEQ ID NO: 3732 - DNA, 1260 bp, synthetic construct
  source 1..1260: mol_type = other DNA
atggccttaccagtgaccgccttgctcctgccgctggccttgctgctccacgccgccaggccggacatcgtgatgacacagagccctgatagcctggccgtgtctctgggagagagagccacaatcaactgcgagagcagccagagcctgctgaacagcggcaaccagaagaactacctgacctggtatcagcagaagcccggccagcctcctaagcctctgatctactgggccagcaccagagaaagcggcgtgcccgatagattttctggctctggcagcggcaccgacttcaccctgacaatttctagcctgcaagccgaggacgtggccgtgtactactgccagaacgactacagctacccctacctgttcggccagggcaccaagctggaaatcaaaagaggcggaggcggaagtggaggcggaggatctggcggcggaggctctcaagttcagctggtgcagagcggcagcgagctgaagaaacctggcgcttccgtgaagatcagctgcaaggccagcggctacaccttcaccaactacggcatgaactgggtcaagcaggcccctggacagggcctgaaatggatgggctggatcaacacctacaccggcgagcctacctacgccgaagagttcaagggcagattcgccttcagcctggaaaccagcgccagcacagcctacctccagatcaccagcctgaagaacgaggacaccgccacctacttttgcgccagactcggcttcggcaacgctatggattattggggccagggaaccagcgtgaccgtgtcatctacgcgtttcaagatccccatcgaggaactggaagatcgggtgttcgtgaactgcaacacctctatcacctgggtggaaggcaccgtgggaacactgctgagcgacatcaccagactggacctcggcaagcggattctggaccctcggggcatctacagatgcaacggcaccgacatctacaaggacaaagaaagcaccgtgcaggtccactacagaatgtgccagtcctgcgtggaactggaccctgctacagtggccggcatcatcgtgaccgatgtgatcgctactctgctgctggctctgggagtgttctgcttcgccggacacgaaacaggcagactgtctggcgctgccgatacacaggccctgctgagaaacgaccaagtgtatcagcccctgcgcgacagagatgatgcccagtattctcacctcggcggcaactgggctagaaacaag

SEQ ID NO: 3733 - DNA, 1290 bp, synthetic construct
  source 1..1290: mol_type = other DNA
atggccttaccagtgaccgccttgctcctgccgctggccttgctgctccacgccgccaggccggacatcgtgatgacacagagccctgatagcctggccgtgtctctgggagagagagccacaatcaactgcgagagcagccagagcctgctgaacagcggcaaccagaagaactacctgacctggtatcagcagaagcccggccagcctcctaagcctctgatctactgggccagcaccagagaaagcggcgtgcccgatagattttctggctctggcagcggcaccgacttcaccctgacaatttctagcctgcaagccgaggacgtggccgtgtactactgccagaacgactacagctacccctacctgttcggccagggcaccaagctggaaatcaaaagaggcggaggcggaagtggaggcggaggatctggcggcggaggctctcaagttcagctggtgcagagcggcagcgagctgaagaaacctggcgcttccgtgaagatcagctgcaaggccagcggctacaccttcaccaactacggcatgaactgggtcaagcaggcccctggacagggcctgaaatggatgggctggatcaacacctacaccggcgagcctacctacgccgaagagttcaagggcagattcgccttcagcctggaaaccagcgccagcacagcctacctccagatcaccagcctgaagaacgaggacaccgccacctacttttgcgccagactcggcttcggcaacgctatggattattggggccagggaaccagcgtgaccgtgtcatctacgcgtcagagcatcaagggcaaccacctggtcaaggtgtacgactaccaagaggacggcagcgtgctgctgacatgtgatgccgaggccaagaacatcacctggtttaaggacggcaagatgatcggcttcctgaccgaggacaagaagaagtggaacctgggcagcaacgctaaggaccccagaggcatgtatcagtgcaagggcagccagaacaagagcaagcccctccaggtgtactaccggatgtgccagaactgcatcgagctgaacgccgctaccatcagcggctttctgttcgccgagatcgtgtccatcttcgtgctggccgtgggcgtgtactttatcgctggacaggatggcgtgcggcagagcagagcttccgataagcaaaccctgctgcctaacgaccagctgtaccagcctctgaaggacagagaggacgaccagtacagccacctccagggcaatcagctgagaagaaac

SEQ ID NO: 3734 - DNA, 1239 bp, synthetic construct
  source 1..1239: mol_type = other DNA
atggccttaccagtgaccgccttgctcctgccgctggccttgctgctccacgccgccaggccggacatcgtgatgacacagagccctgatagcctggccgtgtctctgggagagagagccacaatcaactgcgagagcagccagagcctgctgaacagcggcaaccagaagaactacctgacctggtatcagcagaagcccggccagcctcctaagcctctgatctactgggccagcaccagagaaagcggcgtgcccgatagattttctggctctggcagcggcaccgacttcaccctgacaatttctagcctgcaagccgaggacgtggccgtgtactactgccagaacgactacagctacccctacctgttcggccagggcaccaagctggaaatcaaaagaggcggaggcggaagtggaggcggaggatctggcggcggaggctctcaagttcagctggtgcagagcggcagcgagctgaagaaacctggcgcttccgtgaagatcagctgcaaggccagcggctacaccttcaccaactacggcatgaactgggtcaagcaggcccctggacagggcctgaaatggatgggctggatcaacacctacaccggcgagcctacctacgccgaagagttcaagggcagattcgccttcagcctggaaaccagcgccagcacagcctacctccagatcaccagcctgaagaacgaggacaccgccacctacttttgcgccagactcggcttcggcaacgctatggattattggggccagggaaccagcgtgaccgtgtcatctacgcgtcagagttttgggttgttggaccctaaattgtgctatctgttggacggaatcctgttcatttacggagtgatcctgaccgcattgttcctgcgggttaagttttccagatccgcagacgcacccgcttaccaacaagggcagaaccaactctacaatgaacttaatttggggcggagggaagagtacgacgttctggacaaaaggaggggacgagatcccgagatgggcggaaagcctcagcgaaggaagaatccgcaagaggggctttataacgaactccagaaagataaaatggcagaagcctatagtgagattgggatgaagggagaaaggaggaggggtaaaggtcacgatgggttgtaccaaggattgagcacagccactaaagatacctatgatgcgctccacatgcaggccctgccgccaaga

SEQ ID NO: 3735 - DNA, 1365 bp, synthetic construct
  source 1..1365: mol_type = other DNA
atggccttaccagtgaccgccttgctcctgccgctggccttgctgctccacgccgccaggccgcaagttcagctggtgcagagcggcagcgagctgaagaaacctggcgcttccgtgaagatcagctgcaaggccagcggctacaccttcaccaactacggcatgaactgggtcaagcaggcccctggacagggcctgaaatggatgggctggatcaacacctacaccggcgagcctacctacgccgaagagttcaagggcagattcgccttcagcctggaaaccagcgccagcacagcctacctccagatcaccagcctgaagaacgaggacaccgccacctacttttgcgccagactcggcttcggcaacgctatggattattggggccagggaaccagcgtgaccgtgtcatctggcggaggcggaagtggaggcggaggatctggcggcggaggctctgacatcgtgatgacacagagccctgatagcctggccgtgtctctgggagagagagccacaatcaactgcgagagcagccagagcctgctgaacagcggcaaccagaagaactacctgacctggtatcagcagaagcccggccagcctcctaagcctctgatctactgggccagcaccagagaaagcggcgtgcccgatagattttctggctctggcagcggcaccgacttcaccctgacaatttctagcctgcaagccgaggacgtggccgtgtactactgccagaacgactacagctacccctacctgttcggccagggcaccaagctggaaatcaaaagaacgcgtgacggtaacgaggagatgggaggaatcactcaaaccccttacaaagtctcaatttcaggaacaactgttatccttacatgtccccagtatcctggcagcgagatcctttggcagcataacgacaagaatatagggggagatgaagacgataagaatatcggatctgacgaggatcacttgagcctgaaagagttctccgagcttgaacaaagcggatattatgtgtgctatccgcgcgggtcaaagccggaagacgctaacttttacctttatctccgagccagagtgtgcgaaaattgcatggaaatggacgttatgtccgttgctacaatagttatcgtagatatatgcatcacgggtggactgcttctgctggtttattattggtccaagaatagaaaggccaaagctaaacccgtgaccagaggcgctggcgcaggcggaaggcaaaggggacaaaacaaagaacggccaccaccagtgccaaatccagattatgagcctattcggaaaggacagagggacctgtactctggcctgaatcagagaagaatc

SEQ ID NO: 3736 - DNA, 1260 bp, synthetic construct
  source 1..1260: mol_type = other DNA
atggccttaccagtgaccgccttgctcctgccgctggccttgctgctccacgccgccaggccgcaagttcagctggtgcagagcggcagcgagctgaagaaacctggcgcttccgtgaagatcagctgcaaggccagcggctacaccttcaccaactacggcatgaactgggtcaagcaggcccctggacagggcctgaaatggatgggctggatcaacacctacaccggcgagcctacctacgccgaagagttcaagggcagattcgccttcagcctggaaaccagcgccagcacagcctacctccagatcaccagcctgaagaacgaggacaccgccacctacttttgcgccagactcggcttcggcaacgctatggattattggggccagggaaccagcgtgaccgtgtcatctggcggaggcggaagtggaggcggaggatctggcggcggaggctctgacatcgtgatgacacagagccctgatagcctggccgtgtctctgggagagagagccacaatcaactgcgagagcagccagagcctgctgaacagcggcaaccagaagaactacctgacctggtatcagcagaagcccggccagcctcctaagcctctgatctactgggccagcaccagagaaagcggcgtgcccgatagattttctggctctggcagcggcaccgacttcaccctgacaatttctagcctgcaagccgaggacgtggccgtgtactactgccagaacgactacagctacccctacctgttcggccagggcaccaagctggaaatcaaaagaacgcgtttcaagatccccatcgaggaactggaagatcgggtgttcgtgaactgcaacacctctatcacctgggtggaaggcaccgtgggaacactgctgagcgacatcaccagactggacctcggcaagcggattctggaccctcggggcatctacagatgcaacggcaccgacatctacaaggacaaagaaagcaccgtgcaggtccactacagaatgtgccagtcctgcgtggaactggaccctgctacagtggccggcatcatcgtgaccgatgtgatcgctactctgctgctggctctgggagtgttctgcttcgccggacacgaaacaggcagactgtctggcgctgccgatacacaggccctgctgagaaacgaccaagtgtatcagcccctgcgcgacagagatgatgcccagtattctcacctcggcggcaactgggctagaaacaag

SEQ ID NO: 3737 - DNA, 1290 bp, synthetic construct
  source 1..1290: mol_type = other DNA
atggccttaccagtgaccgccttgctcctgccgctggccttgctgctccacgccgccaggccgcaagttcagctggtgcagagcggcagcgagctgaagaaacctggcgcttccgtgaagatcagctgcaaggccagcggctacaccttcaccaactacggcatgaactgggtcaagcaggcccctggacagggcctgaaatggatgggctggatcaacacctacaccggcgagcctacctacgccgaagagttcaagggcagattcgccttcagcctggaaaccagcgccagcacagcctacctccagatcaccagcctgaagaacgaggacaccgccacctacttttgcgccagactcggcttcggcaacgctatggattattggggccagggaaccagcgtgaccgtgtcatctggcggaggcggaagtggaggcggaggatctggcggcggaggctctgacatcgtgatgacacagagccctgatagcctggccgtgtctctgggagagagagccacaatcaactgcgagagcagccagagcctgctgaacagcggcaaccagaagaactacctgacctggtatcagcagaagcccggccagcctcctaagcctctgatctactgggccagcaccagagaaagcggcgtgcccgatagattttctggctctggcagcggcaccgacttcaccctgacaatttctagcctgcaagccgaggacgtggccgtgtactactgccagaacgactacagctacccctacctgttcggccagggcaccaagctggaaatcaaaagaacgcgtcagagcatcaagggcaaccacctggtcaaggtgtacgactaccaagaggacggcagcgtgctgctgacatgtgatgccgaggccaagaacatcacctggtttaaggacggcaagatgatcggcttcctgaccgaggacaagaagaagtggaacctgggcagcaacgctaaggaccccagaggcatgtatcagtgcaagggcagccagaacaagagcaagcccctccaggtgtactaccggatgtgccagaactgcatcgagctgaacgccgctaccatcagcggctttctgttcgccgagatcgtgtccatcttcgtgctggccgtgggcgtgtactttatcgctggacaggatggcgtgcggcagagcagagcttccgataagcaaaccctgctgcctaacgaccagctgtaccagcctctgaaggacagagaggacgaccagtacagccacctccagggcaatcagctgagaagaaac

SEQ ID NO: 3738 - DNA, 1239 bp, synthetic construct
  source 1..1239: mol_type = other DNA
atggccttaccagtgaccgccttgctcctgccgctggccttgctgctccacgccgccaggccgcaagttcagctggtgcagagcggcagcgagctgaagaaacctggcgcttccgtgaagatcagctgcaaggccagcggctacaccttcaccaactacggcatgaactgggtcaagcaggcccctggacagggcctgaaatggatgggctggatcaacacctacaccggcgagcctacctacgccgaagagttcaagggcagattcgccttcagcctggaaaccagcgccagcacagcctacctccagatcaccagcctgaagaacgaggacaccgccacctacttttgcgccagactcggcttcggcaacgctatggattattggggccagggaaccagcgtgaccgtgtcatctggcggaggcggaagtggaggcggaggatctggcggcggaggctctgacatcgtgatgacacagagccctgatagcctggccgtgtctctgggagagagagccacaatcaactgcgagagcagccagagcctgctgaacagcggcaaccagaagaactacctgacctggtatcagcagaagcccggccagcctcctaagcctctgatctactgggccagcaccagagaaagcggcgtgcccgatagattttctggctctggcagcggcaccgacttcaccctgacaatttctagcctgcaagccgaggacgtggccgtgtactactgccagaacgactacagctacccctacctgttcggccagggcaccaagctggaaatcaaaagaacgcgtcagagttttgggttgttggaccctaaattgtgctatctgttggacggaatcctgttcatttacggagtgatcctgaccgcattgttcctgcgggttaagttttccagatccgcagacgcacccgcttaccaacaagggcagaaccaactctacaatgaacttaatttggggcggagggaagagtacgacgttctggacaaaaggaggggacgagatcccgagatgggcggaaagcctcagcgaaggaagaatccgcaagaggggctttataacgaactccagaaagataaaatggcagaagcctatagtgagattgggatgaagggagaaaggaggaggggtaaaggtcacgatgggttgtaccaaggattgagcacagccactaaagatacctatgatgcgctccacatgcaggccctgccgccaaga

SEQ ID NO: 3739 - DNA, 1524 bp, synthetic construct
  source 1..1524: mol_type = other DNA
atggccttaccagtgaccgccttgctcctgccgctggccttgctgctccacgccgccaggccggacatcgtgatgacacagagccctgatagcctggccgtgtctctgggagagagagccacaatcaactgcgagagcagccagagcctgctgaacagcggcaaccagaagaactacctgacctggtatcagcagaagcccggccagcctcctaagcctctgatctactgggccagcaccagagaaagcggcgtgcccgatagattttctggctctggcagcggcaccgacttcaccctgacaatttctagcctgcaagccgaggacgtggccgtgtactactgccagaacgactacagctacccctacctgttcggccagggcaccaagctggaaatcaaaagaggcggaggcggaagtggaggcggaggatctggcggcggaggctctcaagttcagctggtgcagagcggcagcgagctgaagaaacctggcgcttccgtgaagatcagctgcaaggccagcggctacaccttcaccaactacggcatgaactgggtcaagcaggcccctggacagggcctgaaatggatgggctggatcaacacctacaccggcgagcctacctacgccgaagagttcaagggcagattcgccttcagcctggaaaccagcgccagcacagcctacctccagatcaccagcctgaagaacgaggacaccgccacctacttttgcgccagactcggcttcggcaacgctatggattattggggccagggaaccagcgtgaccgtgtcatctacgcgtggaatgaggactgaggatcttcccaaagctgtcgtctttctcgaaccccaatggtatcgggtgctcgaaaaagactctgtgacactgaaatgccaaggggcctactctcccgaggacaactccacacagtggtttcataatgagtccctcatcagctctcaggccagctcttatttcattgatgccgctacagtggacgactccggcgagtatcggtgtcagaccaatctgtctacactgtctgaccccgtgcagcttgaggtccacattggatggttgctcttgcaagccccacgctgggttttcaaagaggaagatccaatccatctgcggtgccacagctggaaaaacaccgctctccacaaagtcacatacctgcaaaatggcaaaggacgcaaatacttccatcacaattccgatttttacattccgaaggctaccctgaaagacagcggcagctatttctgccggggactcgtcggctccaagaatgtgtcctccgaaaccgtgaatatcacgattacccaaggactggctgtgcctacaatctctagcttctttccgcctggataccaagtctccttctgtcttgtgatggtcctcctgtttgctgtggacacaggactgtacttttccgtgaaaacgaacatccgcagctccacacgcgattggaaagatcacaagtttaaatggcgcaaagatccccaggacaag

SEQ ID NO: 3740 - DNA, 2373 bp, synthetic construct
  source 1..2373: mol_type = other DNA
atggccttaccagtgaccgccttgctcctgccgctggccttgctgctccacgccgccaggccggacatcgtgatgacacagagccctgatagcctggccgtgtctctgggagagagagccacaatcaactgcgagagcagccagagcctgctgaacagcggcaaccagaagaactacctgacctggtatcagcagaagcccggccagcctcctaagcctctgatctactgggccagcaccagagaaagcggcgtgcccgatagattttctggctctggcagcggcaccgacttcaccctgacaatttctagcctgcaagccgaggacgtggccgtgtactactgccagaacgactacagctacccctacctgttcggccagggcaccaagctggaaatcaaaagaggcggaggcggaagtggaggcggaggatctggcggcggaggctctcaagttcagctggtgcagagcggcagcgagctgaagaaacctggcgcttccgtgaagatcagctgcaaggccagcggctacaccttcaccaactacggcatgaactgggtcaagcaggcccctggacagggcctgaaatggatgggctggatcaacacctacaccggcgagcctacctacgccgaagagttcaagggcagattcgccttcagcctggaaaccagcgccagcacagcctacctccagatcaccagcctgaagaacgaggacaccgccacctacttttgcgccagactcggcttcggcaacgctatggattattggggccagggaaccagcgtgaccgtgtcatctacgcgtggaggctctggacaacaacagaccctgcctaaaccattcatctgggctgaaccccactttatggttccgaaagagaaacaagtcacgatttgttgccaagggaattacggggccgtcgagtatcagctccactttgagggctccctgtttgctgtggatcggcccaagccacctgaaagaatcaacaaagtccaattctatattcctgatatgaactcccgcatggcaggccagtattcatgtatctaccgcgtgggagaactttggagtgaaccctctaacctgctggacctcgtcgtgacagagatgtatgatacacccacactgtctgtgcaccctgggccagaagttatcagcggagaaaaagttaccttttattgccgcctcgataccgctacctctatgttcctcttgctgaaagagggccgcagctctcacgtgcagcgaggctacggaaaggtccaagctgagtttcctctcggccccgtgaccaccgctcacaggggcacatatagatgttttggctcttataacaatcatgcctggtcattcccatccgagcctgtgaaactgctggtcacaggcgatattgagaatacctctctggccccagaagatcctacattccccgccgacacatggggaacatatctgctgacaaccgaaaccgggctgcaaaaggaccatgctctgtgggatcataccgctcagaatctgcttcggatggggcttgcattcctggtcctggtggctcttgtctggtttctggtcgaggactggctgtcccggaagagaaccagagaaagagcttccagggccagcacctgggaaggcagacgcagactgaatactcagaccctgcgcgccaagagaagcggatctggcgtgaagcagaccctgaatttcgacctgctgaagctggctggcgacgtggaatccaacccaggcccttctagaggccatatgaccgagtacaagcccacggtgcgcctcgccacccgcgacgacgtccccagggccgtacgcaccctcgccgccgcgttcgccgactaccccgccacgcgccacaccgtcgatccggaccgccacatcgagcgggtcaccgagctgcaagaactcttcctcacgcgcgtcgggctcgacatcggcaaggtgtgggtcgcggacgacggcgccgcggtggcggtctggaccacgccggagagcgtcgaagcgggggcggtgttcgccgagatcggcccgcgcatggccgagttgagcggttcccggctggccgcgcagcaacagatggaaggcctcctggcgccgcaccggcccaaggagcccgcgtggttcctggccaccgtcggcgtctcgcccgaccaccagggcaagggtctgggcagcgccgtcgtgctccccggagtggaggcggccgagcgcgccggggtgcccgccttcctggagacctccgcgccccgcaacctccccttctacgagcggctcggcttcaccgtcaccgccgacgtcgaggtgcccgaaggaccgcgcacctggtgcatgacccgcaagcccggtgcctga

SEQ ID NO: 3741 - DNA, 1872 bp, synthetic construct
  source 1..1872: mol_type = other DNA
atggccttaccagtgaccgccttgctcctgccgctggccttgctgctccacgccgccaggccggacatcgtgatgacacagagccctgatagcctggccgtgtctctgggagagagagccacaatcaactgcgagagcagccagagcctgctgaacagcggcaaccagaagaactacctgacctggtatcagcagaagcccggccagcctcctaagcctctgatctactgggccagcaccagagaaagcggcgtgcccgatagattttctggctctggcagcggcaccgacttcaccctgacaatttctagcctgcaagccgaggacgtggccgtgtactactgccagaacgactacagctacccctacctgttcggccagggcaccaagctggaaatcaaaagaggcggaggcggaagtggaggcggaggatctggcggcggaggctctcaagttcagctggtgcagagcggcagcgagctgaagaaacctggcgcttccgtgaagatcagctgcaaggccagcggctacaccttcaccaactacggcatgaactgggtcaagcaggcccctggacagggcctgaaatggatgggctggatcaacacctacaccggcgagcctacctacgccgaagagttcaagggcagattcgccttcagcctggaaaccagcgccagcacagcctacctccagatcaccagcctgaagaacgaggacaccgccacctacttttgcgccagactcggcttcggcaacgctatggattattggggccagggaaccagcgtgaccgtgtcatctacgcgtaaaattgaagttatgtatcctcctccttacctagacaatgagaagagcaatggaaccattatccatgtgaaaggggcgcgtggcgatattgagaatacctctctggccccagaagatcctacattccccgccgacacatggggaacatatctgctgacaaccgaaaccgggctgcaaaaggaccatgctctgtgggatcataccgctcagaatctgcttcggatggggcttgcattcctggtcctggtggctcttgtctggtttctggtcgaggactggctgtcccggaagagaaccagagaaagagcttccagggccagcacctgggaaggcagacgcagactgaatactcagaccctgcgcgccaagagaagcggatctggcgtgaagcagaccctgaatttcgacctgctgaagctggctggcgacgtggaatccaacccaggcccttctagaggccatatgaccgagtacaagcccacggtgcgcctcgccacccgcgacgacgtccccagggccgtacgcaccctcgccgccgcgttcgccgactaccccgccacgcgccacaccgtcgatccggaccgccacatcgagcgggtcaccgagctgcaagaactcttcctcacgcgcgtcgggctcgacatcggcaaggtgtgggtcgcggacgacggcgccgcggtggcggtctggaccacgccggagagcgtcgaagcgggggcggtgttcgccgagatcggcccgcgcatggccgagttgagcggttcccggctggccgcgcagcaacagatggaaggcctcctggcgccgcaccggcccaaggagcccgcgtggttcctggccaccgtcggcgtctcgcccgaccaccagggcaagggtctgggcagcgccgtcgtgctccccggagtggaggcggccgagcgcgccggggtgcccgccttcctggagacctccgcgccccgcaacctccccttctacgagcggctcggcttcaccgtcaccgccgacgtcgaggtgcccgaaggaccgcgcacctggtgcatgacccgcaagcccggtgcctga

SEQ ID NO: 3742 - DNA, 2133 bp, synthetic construct
  source 1..2133: mol_type = other DNA
atggccttaccagtgaccgccttgctcctgccgctggccttgctgctccacgccgccaggccggacatcgtgatgacacagagccctgatagcctggccgtgtctctgggagagagagccacaatcaactgcgagagcagccagagcctgctgaacagcggcaaccagaagaactacctgacctggtatcagcagaagcccggccagcctcctaagcctctgatctactgggccagcaccagagaaagcggcgtgcccgatagattttctggctctggcagcggcaccgacttcaccctgacaatttctagcctgcaagccgaggacgtggccgtgtactactgccagaacgactacagctacccctacctgttcggccagggcaccaagctggaaatcaaaagaggcggaggcggaagtggaggcggaggatctggcggcggaggctctcaagttcagctggtgcagagcggcagcgagctgaagaaacctggcgcttccgtgaagatcagctgcaaggccagcggctacaccttcaccaactacggcatgaactgggtcaagcaggcccctggacagggcctgaaatggatgggctggatcaacacctacaccggcgagcctacctacgccgaagagttcaagggcagattcgccttcagcctggaaaccagcgccagcacagcctacctccagatcaccagcctgaagaacgaggacaccgccacctacttttgcgccagactcggcttcggcaacgctatggattattggggccagggaaccagcgtgaccgtgtcatctacgcgtctgtgggtgtcccagccacctgaaattcggacactggaaggctcctccgcctttctgccctgtagctttaacgccagccaggggagactcgccatcggctctgtgacatggttccgggatgaagtcgtccctggaaaagaagttcgcaacggaacaccagagttcagaggcagactcgccccactggcaagctccagattcctgcatgaccatcaggctgaactgcacattagggacgtgcggggccacgatgcctccatctatgtgtgtcgggtcgaagtgcttggactcggcgtcggaactggaaacggcactaggctggtggtcgagaaagaacatccacagcttggcgctggcaccgtcctgttgcttagagccggattctatgccgtcagcttcctgtccgtggctgtggggtctacagtgtattaccagggaaaatgtctcacctggaaaggccccagacgccagcttccagctgttgttcctgctccactgccaccaccttgtggctcctctgctcacttgcttccaccagtgcctggcggacgcgccaagagaagcggatctggcgtgaagcagaccctgaatttcgacctgctgaagctggctggcgacgtggaatccaacccaggcccttctagaatgtaccggatgcagctgctgagctgtatcgccctgtctctggccctggtcacaaatagcgcccctaccagcagcagcaccaagaaaacccagctgcaactggaacacctcctgctggacctccagatgatcctgaacggcatcaacaactacaagaaccccaagctgaccgagatgctgaccgccaagttctacatgcccaagaaggccaccgagctgaagcacctccagtgcctggaagaggaactgaagcccctggaagaagtgctgaatctggcccagagcaagaacttccacctgaggccaagggacctgatctccaacatcaacgtgatcgtgctggaactgaaaggcagcgagacaaccttcatgtgcgagtacgccgacgagacagctaccatcgtggaatttctgaatcggtggatcaccttctgccagagcatcatcagcaccctgacaaagatcgaagtgatgtaccctcctccttacctggacaacgagaagtccaacggcaccatcatccacgtgaagggcaagcacctgtgtccttctccactgttccccggacctagcaagcctttctgggtgctcgttgttgttggcggcgtgctggcctgttacagcctgctggttaccgtggccttcatcatcttttgggtccgaagcaagcggagctaa

SEQ ID NO: 3743 - DNA, 2061 bp, synthetic construct
  source 1..2061: mol_type = other DNA
atggccttaccagtgaccgccttgctcctgccgctggccttgctgctccacgccgccaggccggacatcgtgatgacacagagccctgatagcctggccgtgtctctgggagagagagccacaatcaactgcgagagcagccagagcctgctgaacagcggcaaccagaagaactacctgacctggtatcagcagaagcccggccagcctcctaagcctctgatctactgggccagcaccagagaaagcggcgtgcccgatagattttctggctctggcagcggcaccgacttcaccctgacaatttctagcctgcaagccgaggacgtggccgtgtactactgccagaacgactacagctacccctacctgttcggccagggcaccaagctggaaatcaaaagaggcggaggcggaagtggaggcggaggatctggcggcggaggctctcaagttcagctggtgcagagcggcagcgagctgaagaaacctggcgcttccgtgaagatcagctgcaaggccagcggctacaccttcaccaactacggcatgaactgggtcaagcaggcccctggacagggcctgaaatggatgggctggatcaacacctacaccggcgagcctacctacgccgaagagttcaagggcagattcgccttcagcctggaaaccagcgccagcacagcctacctccagatcaccagcctgaagaacgaggacaccgccacctacttttgcgccagactcggcttcggcaacgctatggattattggggccagggaaccagcgtgaccgtgtcatctacgcgtctgtgggtgtcccagccacctgaaattcggacactggaaggctcctccgcctttctgccctgtagctttaacgccagccaggggagactcgccatcggctctgtgacatggttccgggatgaagtcgtccctggaaaagaagttcgcaacggaacaccagagttcagaggcagactcgccccactggcaagctccagattcctgcatgaccatcaggctgaactgcacattagggacgtgcggggccacgatgcctccatctatgtgtgtcgggtcgaagtgcttggactcggcgtcggaactggaaacggcactaggctggtggtcgagaaagaacatccacagcttggcgctggcaccgtcctgttgcttagagccggattctatgccgtcagcttcctgtccgtggctgtggggtctacagtgtattaccagggaaaatgtctcacctggaaaggccccagacgccagcttccagctgttgttcctgctccactgccaccaccttgtggctcctctgctcacttgcttccaccagtgcctggcggacgcgccaagagaagcggatctggcgtgaagcagaccctgaatttcgacctgctgaagctggctggcgacgtggaatccaacccaggcccttctagaggccatatgaccgagtacaagcccacggtgcgcctcgccacccgcgacgacgtccccagggccgtacgcaccctcgccgccgcgttcgccgactaccccgccacgcgccacaccgtcgatccggaccgccacatcgagcgggtcaccgagctgcaagaactcttcctcacgcgcgtcgggctcgacatcggcaaggtgtgggtcgcggacgacggcgccgcggtggcggtctggaccacgccggagagcgtcgaagcgggggcggtgttcgccgagatcggcccgcgcatggccgagttgagcggttcccggctggccgcgcagcaacagatggaaggcctcctggcgccgcaccggcccaaggagcccgcgtggttcctggccaccgtcggcgtctcgcccgaccaccagggcaagggtctgggcagcgccgtcgtgctccccggagtggaggcggccgagcgcgccggggtgcccgccttcctggagacctccgcgccccgcaacctccccttctacgagcggctcggcttcaccgtcaccgccgacgtcgaggtgcccgaaggaccgcgcacctggtgcatgacccgcaagcccggtgcctga

SEQ ID NO: 3744 - DNA, 1086 bp, synthetic construct
  source 1..1086: mol_type = other DNA
atggccttaccagtgaccgccttgctcctgccgctggccttgctgctccacgccgccaggccggacatcgtgatgacacagagccctgatagcctggccgtgtctctgggagagagagccacaatcaactgcgagagcagccagagcctgctgaacagcggcaaccagaagaactacctgacctggtatcagcagaagcccggccagcctcctaagcctctgatctactgggccagcaccagagaaagcggcgtgcccgatagattttctggctctggcagcggcaccgacttcaccctgacaatttctagcctgcaagccgaggacgtggccgtgtactactgccagaacgactacagctacccctacctgttcggccagggcaccaagctggaaatcaaaagaggcggaggcggaagtggaggcggaggatctggcggcggaggctctcaagttcagctggtgcagagcggcagcgagctgaagaaacctggcgcttccgtgaagatcagctgcaaggccagcggctacaccttcaccaactacggcatgaactgggtcaagcaggcccctggacagggcctgaaatggatgggctggatcaacacctacaccggcgagcctacctacgccgaagagttcaagggcagattcgccttcagcctggaaaccagcgccagcacagcctacctccagatcaccagcctgaagaacgaggacaccgccacctacttttgcgccagactcggcttcggcaacgctatggattattggggccagggaaccagcgtgaccgtgtcatctacgcgtaaaattgaagttatgtatcctcctccttacctagacaatgagaagagcaatggaaccattatccatgtgaaaggggcgcgtatcacccagggcctggccgtgtctaccatcagcagctttttcccacccggctaccaggtgtccttctgcctcgtgatggtgctgctgttcgccgtggacaccggcctgtacttcagcgtgaaaacaaacatccggtccagcaccagagactggaaggaccacaagttcaagtggcggaaggacccccaggacaag

SEQ ID NO: 3745 - DNA, 1086 bp, synthetic construct
  source 1..1086: mol_type = other DNA
atggccttaccagtgaccgccttgctcctgccgctggccttgctgctccacgccgccaggccggacatcgtgatgacacagagccctgatagcctggccgtgtctctgggagagagagccacaatcaactgcgagagcagccagagcctgctgaacagcggcaaccagaagaactacctgacctggtatcagcagaagcccggccagcctcctaagcctctgatctactgggccagcaccagagaaagcggcgtgcccgatagattttctggctctggcagcggcaccgacttcaccctgacaatttctagcctgcaagccgaggacgtggccgtgtactactgccagaacgactacagctacccctacctgttcggccagggcaccaagctggaaatcaaaagaggcggaggcggaagtggaggcggaggatctggcggcggaggctctcaagttcagctggtgcagagcggcagcgagctgaagaaacctggcgcttccgtgaagatcagctgcaaggccagcggctacaccttcaccaactacggcatgaactgggtcaagcaggcccctggacagggcctgaaatggatgggctggatcaacacctacaccggcgagcctacctacgccgaagagttcaagggcagattcgccttcagcctggaaaccagcgccagcacagcctacctccagatcaccagcctgaagaacgaggacaccgccacctacttttgcgccagactcggcttcggcaacgctatggattattggggccagggaaccagcgtgaccgtgtcatctacgcgtaaaattgaagttatgtatcctcctccttacctagacaatgagaagagcaatggaaccattatccatgtgaaaggggcgcgtattacccaaggactggctgtgcctacaatctctagcttctttccgcctggataccaagtctccttctgtcttgtgatggtcctcctgtttgctgtggacacaggactgtacttttccgtgaaaacgaacatccgcagctccacacgcgattggaaagatcacaagtttaaatggcgcaaagatccccaggacaag

SEQ ID NO: 3746 - DNA, 1023 bp, synthetic construct
  source 1..1023: mol_type = other DNA
atggccttaccagtgaccgccttgctcctgccgctggccttgctgctccacgccgccaggccggacatcgtgatgacacagagccctgatagcctggccgtgtctctgggagagagagccacaatcaactgcgagagcagccagagcctgctgaacagcggcaaccagaagaactacctgacctggtatcagcagaagcccggccagcctcctaagcctctgatctactgggccagcaccagagaaagcggcgtgcccgatagattttctggctctggcagcggcaccgacttcaccctgacaatttctagcctgcaagccgaggacgtggccgtgtactactgccagaacgactacagctacccctacctgttcggccagggcaccaagctggaaatcaaaagaggcggaggcggaagtggaggcggaggatctggcggcggaggctctcaagttcagctggtgcagagcggcagcgagctgaagaaacctggcgcttccgtgaagatcagctgcaaggccagcggctacaccttcaccaactacggcatgaactgggtcaagcaggcccctggacagggcctgaaatggatgggctggatcaacacctacaccggcgagcctacctacgccgaagagttcaagggcagattcgccttcagcctggaaaccagcgccagcacagcctacctccagatcaccagcctgaagaacgaggacaccgccacctacttttgcgccagactcggcttcggcaacgctatggattattggggccagggaaccagcgtgaccgtgtcatctacgcgtaaaattgaagttatgtatcctcctccttacctagacaatgagaagagcaatggaaccattatccatgtgaaaggggcgcgtattacccaaggactggctgtgtctacaatctctagcttctctccgcctggataccaagtctccttctgtcttgtgatggtcctcctgtttgctgtggacacaggactgtacttttccgtgaaaacgaacatc

SEQ ID NO: 3747 - DNA, 1116 bp, synthetic construct
  source 1..1116: mol_type = other DNA
atggccttaccagtgaccgccttgctcctgccgctggccttgctgctccacgccgccaggccggacatcgtgatgacacagagccctgatagcctggccgtgtctctgggagagagagccacaatcaactgcgagagcagccagagcctgctgaacagcggcaaccagaagaactacctgacctggtatcagcagaagcccggccagcctcctaagcctctgatctactgggccagcaccagagaaagcggcgtgcccgatagattttctggctctggcagcggcaccgacttcaccctgacaatttctagcctgcaagccgaggacgtggccgtgtactactgccagaacgactacagctacccctacctgttcggccagggcaccaagctggaaatcaaaagaggcggaggcggaagtggaggcggaggatctggcggcggaggctctcaagttcagctggtgcagagcggcagcgagctgaagaaacctggcgcttccgtgaagatcagctgcaaggccagcggctacaccttcaccaactacggcatgaactgggtcaagcaggcccctggacagggcctgaaatggatgggctggatcaacacctacaccggcgagcctacctacgccgaagagttcaagggcagattcgccttcagcctggaaaccagcgccagcacagcctacctccagatcaccagcctgaagaacgaggacaccgccacctacttttgcgccagactcggcttcggcaacgctatggattattggggccagggaaccagcgtgaccgtgtcatctacgcgtaaaattgaagttatgtatcctcctccttacctagacaatgagaagagcaatggaaccattatccatgtgaaaggggcgcgtgtcgagaaagaacatccacagcttggcgctggcaccgtcctgttgcttagagccggattctatgccgtcagcttcctgtccgtggctgtggggtctacagtgtattaccagggaaaatgtctcacctggaaaggccccagacgccagcttccagctgttgttcctgctccactgccaccaccttgtggctcctctgctcacttgcttccaccagtgcctggcgga

SEQ ID NO: 3748 - DNA, 1359 bp, synthetic construct
  source 1..1359: mol_type = other DNA
atggccttaccagtgaccgccttgctcctgccgctggccttgctgctccacgccgccaggccggacatcgtgatgacacagagccctgatagcctggccgtgtctctgggagagagagccacaatcaactgcgagagcagccagagcctgctgaacagcggcaaccagaagaactacctgacctggtatcagcagaagcccggccagcctcctaagcctctgatctactgggccagcaccagagaaagcggcgtgcccgatagattttctggctctggcagcggcaccgacttcaccctgacaatttctagcctgcaagccgaggacgtggccgtgtactactgccagaacgactacagctacccctacctgttcggccagggcaccaagctggaaatcaaaagaggcggaggcggaagtggaggcggaggatctggcggcggaggctctcaagttcagctggtgcagagcggcagcgagctgaagaaacctggcgcttccgtgaagatcagctgcaaggccagcggctacaccttcaccaactacggcatgaactgggtcaagcaggcccctggacagggcctgaaatggatgggctggatcaacacctacaccggcgagcctacctacgccgaagagttcaagggcagattcgccttcagcctggaaaccagcgccagcacagcctacctccagatcaccagcctgaagaacgaggacaccgccacctacttttgcgccagactcggcttcggcaacgctatggattattggggccagggaaccagcgtgaccgtgtcatctacgcgtaaaattgaagttatgtatcctcctccttacctagacaatgagaagagcaatggaaccattatccatgtgaaaggggcgcgtaagtctgtgcgcttttacctggtcgtcagccctgccagtgcctccactcagacatcttggaccccaagggaccttgtgtcctctcagacacagacacagtcctgcgtgccaccaactgctggcgcaagacaggctccagagtctcccagcacaatccccgtcccttctcagccccagaactccacacttaggccaggaccagctgctccaatcgcactggtcccagtgttctgcggactgctggttgccaagtctctggtgctgagcgcactcctcgtttggtggggcgatatttggtggaaaacgatgatggaattgagatccctcgatacgcagaaagccacatgccaccttcagcaagtcacagacttgccttggaccagcgtcagctctcccgtggaacgggaaattctgtatcatacagtggcccgcaccaagatttccgacgatgacgacgagcacacactg

SEQ ID NO: 3749 - DNA, 1170 bp, synthetic construct
  source 1..1170: mol_type = other DNA
atggccttaccagtgaccgccttgctcctgccgctggccttgctgctccacgccgccaggccggacatcgtgatgacacagagccctgatagcctggccgtgtctctgggagagagagccacaatcaactgcgagagcagccagagcctgctgaacagcggcaaccagaagaactacctgacctggtatcagcagaagcccggccagcctcctaagcctctgatctactgggccagcaccagagaaagcggcgtgcccgatagattttctggctctggcagcggcaccgacttcaccctgacaatttctagcctgcaagccgaggacgtggccgtgtactactgccagaacgactacagctacccctacctgttcggccagggcaccaagctggaaatcaaaagaggcggaggcggaagtggaggcggaggatctggcggcggaggctctcaagttcagctggtgcagagcggcagcgagctgaagaaacctggcgcttccgtgaagatcagctgcaaggccagcggctacaccttcaccaactacggcatgaactgggtcaagcaggcccctggacagggcctgaaatggatgggctggatcaacacctacaccggcgagcctacctacgccgaagagttcaagggcagattcgccttcagcctggaaaccagcgccagcacagcctacctccagatcaccagcctgaagaacgaggacaccgccacctacttttgcgccagactcggcttcggcaacgctatggattattggggccagggaaccagcgtgaccgtgtcatctacgcgtaaaattgaagttatgtatcctcctccttacctagacaatgagaagagcaatggaaccattatccatgtgaaaggggcgcgtggcgatattgagaatacctctctggccccagaagatcctacattccccgccgacacatggggaacatatctgctgacaaccgaaaccgggctgcaaaaggaccatgctctgtgggatcataccgctcagaatctgcttcggatggggcttgcattcctggtcctggtggctcttgtctggtttctggtcgaggactggctgtcccggaagagaaccagagaaagagcttccagggccagcacctgggaaggcagacgcagactgaatactcagaccctg

SEQ ID NO: 3750 - DNA, 2961 bp, synthetic construct
  source 1..2961: mol_type = other DNA
atggccttaccagtgaccgccttgctcctgccgctggccttgctgctccacgccgccaggccggacatcgtgatgacacagagccctgatagcctggccgtgtctctgggagagagagccacaatcaactgcgagagcagccagagcctgctgaacagcggcaaccagaagaactacctgacctggtatcagcagaagcccggccagcctcctaagcctctgatctactgggccagcaccagagaaagcggcgtgcccgatagattttctggctctggcagcggcaccgacttcaccctgacaatttctagcctgcaagccgaggacgtggccgtgtactactgccagaacgactacagctacccctacctgttcggccagggcaccaagctggaaatcaaaagactcgagggacagcctaaggccaatcctaccgtgacactgttccctccaagcagcgaagaactccaggccaacaaggccacacttgtgtgcctgatctccgacttctaccctggggctgtgacagtggcttggaaggccgatggatctcctgtgaaagccggcgtggaaaccaccaagccatccaagcagagcaacaacaaatacgccgccagctcctacctgagcctgacacctgagcagtggaagtcccacagatcctacagctgccaagtgacccacgaaggcagcaccgtggaaaagacagtggcccctacagagtgcagcggatcccagagcttcggcctgctggaccccaagctgtgctacctgctggatggcatcctgttcatctacggcgtgatcctgaccgccctgttcctgagagtgaagttcagcagaagcgccgacgcccctgcctaccagcagggacagaaccaactgtacaacgagctgaacctgggcagacgggaagagtacgacgtgctggacaagcggagaggcagggaccctgagatgggcggaaagccccagcggagaaagaacccccaggaaggactgtataacgaactccagaaagacaagatggccgaagcctacagcgagatcggcatgaagggcgagcggagaagaggcaagggccacgatggcctgtaccagggcctgagcaccgccaccaaggacacctatgacgccctgcacatgcaggccctgcctccaagaagggccaagcgatctggatctggagcaacaaacttctcactactcaaacaagcaggtgacgtggaggagaatcccgggcctactagtatggactggatttggcgcatccttttccttgtcggcgctgctaccggcgcgcattccttcgaacaagttcagctggtgcagagcggcagcgagctgaagaaacctggcgcttccgtgaagatcagctgcaaggccagcggctacaccttcaccaactacggcatgaactgggtcaagcaggcccctggacagggcctgaaatggatgggctggatcaacacctacaccggcgagcctacctacgccgaagagttcaagggcagattcgccttcagcctggaaaccagcgccagcacagcctacctccagatcaccagcctgaagaacgaggacaccgccacctacttttgcgccagactcggcttcggcaacgctatggattattggggccagggaaccagcgtgaccgtgtcatctacgcgtgcctctacaaagggaccctccgtgtttcctctggctcccagcagcaagtctacaagcggaggaacagccgctctgggctgcctggtcaaggattactttcccgagcctgtgaccgtgtcctggaatagcggagcactgacaagcggcgtgcacacctttccagccgtgctgcaaagcagcggcctgtactctctgagcagcgtggtcacagtgcctagctctagcctgggcacccagacctacatctgcaatgtgaaccacaagcctagcaacaccaaggtggacaagagagtggaacccaagagctgtggtaccggcgacatcgagaacaccagtctggcccctgaggaccctacctttcctgccgatacctggggcacctacctgctgaccacagagacaggactccagaaagatcacgccctgtgggaccacacagcccagaacctgctgagaatgggcctcgcctttctggtgctggttgccctcgtgtggttcctggtggaagattggctgagccggaagcggacaagagagagagccagcagagcctctacctgggagggaagaagaaggctgaacacccagacacttagggccaagcgatctggatctggagcaacaaacttctcactactcaaacaagcaggtgacgtggaggagaatcccgggccttctagaggccatatgaccgagtacaagcccacggtgcgcctcgccacccgcgacgacgtccccagggccgtacgcaccctcgccgccgcgttcgccgactaccccgccacgcgccacaccgtcgatccggaccgccacatcgagcgggtcaccgagctgcaagaactcttcctcacgcgcgtcgggctcgacatcggcaaggtgtgggtcgcggacgacggcgccgcggtggcggtctggaccacgccggagagcgtcgaagcgggggcggtgttcgccgagatcggcccgcgcatggccgagttgagcggttcccggctggccgcgcagcaacagatggaaggcctcctggcgccgcaccggcccaaggagcccgcgtggttcctggccaccgtcggcgtctcgcccgaccaccagggcaagggtctgggcagcgccgtcgtgctccccggagtggaggcggccgagcgcgccggggtgcccgccttcctggagacctccgcgccccgcaacctccccttctacgagcggctcggcttcaccgtcaccgccgacgtcgaggtgcccgaaggaccgcgcacctggtgcatgacccgcaagcccggtgcctga

SEQ ID NO: 3751 - DNA, 3159 bp, synthetic construct
  source 1..3159: mol_type = other DNA
atggccttaccagtgaccgccttgctcctgccgctggccttgctgctccacgccgccaggccggacatcgtgatgacacagagccctgatagcctggccgtgtctctgggagagagagccacaatcaactgcgagagcagccagagcctgctgaacagcggcaaccagaagaactacctgacctggtatcagcagaagcccggccagcctcctaagcctctgatctactgggccagcaccagagaaagcggcgtgcccgatagattttctggctctggcagcggcaccgacttcaccctgacaatttctagcctgcaagccgaggacgtggccgtgtactactgccagaacgactacagctacccctacctgttcggccagggcaccaagctggaaatcaaaagactcgagggacagcctaaggccaatcctaccgtgacactgttccctccaagcagcgaagaactccaggccaacaaggccacacttgtgtgcctgatctccgacttctaccctggggctgtgacagtggcttggaaggccgatggatctcctgtgaaagccggcgtggaaaccaccaagccatccaagcagagcaacaacaaatacgccgccagctcctacctgagcctgacacctgagcagtggaagtcccacagatcctacagctgccaagtgacccacgaaggcagcaccgtggaaaagacagtggcccctacagagtgcagcggatcccagagcttcggcctgctggaccccaagctgtgctacctgctggatggcatcctgttcatctacggcgtgatcctgaccgccctgttcctgagagtgaagttcagcagaagcgccgacgcccctgcctaccagcagggacagaaccaactgtacaacgagctgaacctgggcagacgggaagagtacgacgtgctggacaagcggagaggcagggaccctgagatgggcggaaagccccagcggagaaagaacccccaggaaggactgtataacgaactccagaaagacaagatggccgaagcctacagcgagatcggcatgaagggcgagcggagaagaggcaagggccacgatggcctgtaccagggcctgagcaccgccaccaaggacacctatgacgccctgcacatgcaggccctgcctccaagaagggccaagcgatctggatctggagcaacaaacttctcactactcaaacaagcaggtgacgtggaggagaatcccgggcctactagtatggactggatttggcgcatccttttccttgtcggcgctgctaccggcgcgcattccttcgaacaagttcagctggtgcagagcggcagcgagctgaagaaacctggcgcttccgtgaagatcagctgcaaggccagcggctacaccttcaccaactacggcatgaactgggtcaagcaggcccctggacagggcctgaaatggatgggctggatcaacacctacaccggcgagcctacctacgccgaagagttcaagggcagattcgccttcagcctggaaaccagcgccagcacagcctacctccagatcaccagcctgaagaacgaggacaccgccacctacttttgcgccagactcggcttcggcaacgctatggattattggggccagggaaccagcgtgaccgtgtcatctacgcgtgcctctacaaagggaccctccgtgtttcctctggctcccagcagcaagtctacaagcggaggaacagccgctctgggctgcctggtcaaggattactttcccgagcctgtgaccgtgtcctggaatagcggagcactgacaagcggcgtgcacacctttccagccgtgctgcaaagcagcggcctgtactctctgagcagcgtggtcacagtgcctagctctagcctgggcacccagacctacatctgcaatgtgaaccacaagcctagcaacaccaaggtggacaagagagtggaacccaagagctgtggtaccaagtctgtgcgcttttacctggtcgtcagccctgccagtgcctccactcagacatcttggaccccaagggaccttgtgtcctctcagacacagacacagtcctgcgtgccaccaactgctggcgcaagacaggctccagagtctcccagcacaatccccgtcccttctcagccccagaactccacacttaggccaggaccagctgctccaatcgcactggtcccagtgttctgcggactgctggttgccaagtctctggtgctgagcgcactcctcgtttggtggggcgatatttggtggaaaacgatgatggaattgagatccctcgatacgcagaaagccacatgccaccttcagcaagtcacagacttgccttggaccagcgtcagctctcccgtggaacgggaaattctgtatcatacagtggcccgcaccaagatttccgacgatgacgacgagcacacactgcgcgccaagagaagcggatctggcgtgaagcagaccctgaatttcgacctgctgaagctggctggcgacgtggaatccaacccaggcccttctagaggccatatgaccgagtacaagcccacggtgcgcctcgccacccgcgacgacgtccccagggccgtacgcaccctcgccgccgcgttcgccgactaccccgccacgcgccacaccgtcgatccggaccgccacatcgagcgggtcaccgagctgcaagaactcttcctcacgcgcgtcgggctcgacatcggcaaggtgtgggtcgcggacgacggcgccgcggtggcggtctggaccacgccggagagcgtcgaagcgggggcggtgttcgccgagatcggcccgcgcatggccgagttgagcggttcccggctggccgcgcagcaacagatggaaggcctcctggcgccgcaccggcccaaggagcccgcgtggttcctggccaccgtcggcgtctcgcccgaccaccagggcaagggtctgggcagcgccgtcgtgctccccggagtggaggcggccgagcgcgccggggtgcccgccttcctggagacctccgcgccccgcaacctccccttctacgagcggctcggcttcaccgtcaccgccgacgtcgaggtgcccgaaggaccgcgcacctggtgcatgacccgcaagcccggtgcctga

SEQ ID NO: 3752 - DNA, 2919 bp, synthetic construct
  source 1..2919: mol_type = other DNA
atggccttaccagtgaccgccttgctcctgccgctggccttgctgctccacgccgccaggccggacatcgtgatgacacagagccctgatagcctggccgtgtctctgggagagagagccacaatcaactgcgagagcagccagagcctgctgaacagcggcaaccagaagaactacctgacctggtatcagcagaagcccggccagcctcctaagcctctgatctactgggccagcaccagagaaagcggcgtgcccgatagattttctggctctggcagcggcaccgacttcaccctgacaatttctagcctgcaagccgaggacgtggccgtgtactactgccagaacgactacagctacccctacctgttcggccagggcaccaagctggaaatcaaaagactcgagggacagcctaaggccaatcctaccgtgacactgttccctccaagcagcgaagaactccaggccaacaaggccacacttgtgtgcctgatctccgacttctaccctggggctgtgacagtggcttggaaggccgatggatctcctgtgaaagccggcgtggaaaccaccaagccatccaagcagagcaacaacaaatacgccgccagctcctacctgagcctgacacctgagcagtggaagtcccacagatcctacagctgccaagtgacccacgaaggcagcaccgtggaaaagacagtggcccctacagagtgcagcggatcccagagcttcggcctgctggaccccaagctgtgctacctgctggatggcatcctgttcatctacggcgtgatcctgaccgccctgttcctgagagtgaagttcagcagaagcgccgacgcccctgcctaccagcagggacagaaccaactgtacaacgagctgaacctgggcagacgggaagagtacgacgtgctggacaagcggagaggcagggaccctgagatgggcggaaagccccagcggagaaagaacccccaggaaggactgtataacgaactccagaaagacaagatggccgaagcctacagcgagatcggcatgaagggcgagcggagaagaggcaagggccacgatggcctgtaccagggcctgagcaccgccaccaaggacacctatgacgccctgcacatgcaggccctgcctccaagaagggccaagcgatctggatctggagcaacaaacttctcactactcaaacaagcaggtgacgtggaggagaatcccgggcctactagtatggactggatttggcgcatccttttccttgtcggcgctgctaccggcgcgcattccttcgaacaagttcagctggtgcagagcggcagcgagctgaagaaacctggcgcttccgtgaagatcagctgcaaggccagcggctacaccttcaccaactacggcatgaactgggtcaagcaggcccctggacagggcctgaaatggatgggctggatcaacacctacaccggcgagcctacctacgccgaagagttcaagggcagattcgccttcagcctggaaaccagcgccagcacagcctacctccagatcaccagcctgaagaacgaggacaccgccacctacttttgcgccagactcggcttcggcaacgctatggattattggggccagggaaccagcgtgaccgtgtcatctacgcgtgcctctacaaagggaccctccgtgtttcctctggctcccagcagcaagtctacaagcggaggaacagccgctctgggctgcctggtcaaggattactttcccgagcctgtgaccgtgtcctggaatagcggagcactgacaagcggcgtgcacacctttccagccgtgctgcaaagcagcggcctgtactctctgagcagcgtggtcacagtgcctagctctagcctgggcacccagacctacatctgcaatgtgaaccacaagcctagcaacaccaaggtggacaagagagtggaacccaagagctgtggtaccgtggtcgagaaagaacatccacagcttggcgctggcaccgtcctgttgcttagagccggattctatgccgtcagcttcctgtccgtggctgtggggtctacagtgtattaccagggaaaatgtctcacctggaaaggccccagacgccagcttccagctgttgttcctgctccactgccaccaccttgtggctcctctgctcacttgcttccaccagtgcctggcggacgcgccaagagaagcggatctggcgtgaagcagaccctgaatttcgacctgctgaagctggctggcgacgtggaatccaacccaggcccttctagaggccatatgaccgagtacaagcccacggtgcgcctcgccacccgcgacgacgtccccagggccgtacgcaccctcgccgccgcgttcgccgactaccccgccacgcgccacaccgtcgatccggaccgccacatcgagcgggtcaccgagctgcaagaactcttcctcacgcgcgtcgggctcgacatcggcaaggtgtgggtcgcggacgacggcgccgcggtggcggtctggaccacgccggagagcgtcgaagcgggggcggtgttcgccgagatcggcccgcgcatggccgagttgagcggttcccggctggccgcgcagcaacagatggaaggcctcctggcgccgcaccggcccaaggagcccgcgtggttcctggccaccgtcggcgtctcgcccgaccaccagggcaagggtctgggcagcgccgtcgtgctccccggagtggaggcggccgagcgcgccggggtgcccgccttcctggagacctccgcgccccgcaacctccccttctacgagcggctcggcttcaccgtcaccgccgacgtcgaggtgcccgaaggaccgcgcacctggtgcatgacccgcaagcccggtgcctga

SEQ ID NO: 3753 - DNA, 3006 bp, synthetic construct
  source 1..3006: mol_type = other DNA
atggccttaccagtgaccgccttgctcctgccgctggccttgctgctccacgccgccaggccggacatcgtgatgacacagagccctgatagcctggccgtgtctctgggagagagagccacaatcaactgcgagagcagccagagcctgctgaacagcggcaaccagaagaactacctgacctggtatcagcagaagcccggccagcctcctaagcctctgatctactgggccagcaccagagaaagcggcgtgcccgatagattttctggctctggcagcggcaccgacttcaccctgacaatttctagcctgcaagccgaggacgtggccgtgtactactgccagaacgactacagctacccctacctgttcggccagggcaccaagctggaaatcaaaagactcgaggacctgaagaacgtgttcccacctgaggtggccgtgttcgagcctagcgaggccgagatcagccacacccagaaagccaccctcgtgtgcctggctaccggcttctaccccgaccatgtggaactgtcttggtgggtcaacggcaaagaggtgcacagcggcgtgtctaccgacccccagccactgaaagaacagcccgccctgaacgacagccggtactgcctgagcagcagactgagagtgtccgccaccttctggcagaacccccggaaccacttcagatgccaggtgcagttctacggcctgagcgagaacgacgagtggacccaggacagagccaagcccgtgacccagatcgtgtctgccgaagcctggggcagagccgattgcggatcccagagcttcggcctgctggaccccaagctgtgctacctgctggatggcatcctgttcatctacggcgtgatcctgaccgccctgttcctgagagtgaagttcagcagaagcgccgacgcccctgcctaccagcagggacagaaccaactgtacaacgagctgaacctgggcagacgggaagagtacgacgtgctggacaagcggagaggcagggaccctgagatgggcggaaagccccagcggagaaagaacccccaggaaggactgtataacgaactccagaaagacaagatggccgaagcctacagcgagatcggcatgaagggcgagcggagaagaggcaagggccacgatggcctgtaccagggcctgagcaccgccaccaaggacacctatgacgccctgcacatgcaggccctgcctccaagaagggccaagcgatctggatctggagcaacaaacttctcactactcaaacaagcaggtgacgtggaggagaatcccgggcctactagtatggactggatttggcgcatccttttccttgtcggcgctgctaccggcgcgcattccttcgaacaagttcagctggtgcagagcggcagcgagctgaagaaacctggcgcttccgtgaagatcagctgcaaggccagcggctacaccttcaccaactacggcatgaactgggtcaagcaggcccctggacagggcctgaaatggatgggctggatcaacacctacaccggcgagcctacctacgccgaagagttcaagggcagattcgccttcagcctggaaaccagcgccagcacagcctacctccagatcaccagcctgaagaacgaggacaccgccacctacttttgcgccagactcggcttcggcaacgctatggattattggggccagggaaccagcgtgaccgtgtcatctacgcgtatccagaaccctgatcctgccgtgtaccagctgcgggatagcaagagcagcgacaagagcgtgtgtctgttcaccgacttcgacagccagaccaacgtgtcccagagcaaggactccgacgtgtacatcaccgataagaccgtgctggacatgcggagcatggacttcaagagcaactccgccgtggcctggtccaacaagtccgatttcgcctgcgccaacgccttcaacaacagcattatccccgaggacacattcttcccaagccccgagagcagctgcggtaccggcgacatcgagaacaccagtctggcccctgaggaccctacctttcctgccgatacctggggcacctacctgctgaccacagagacaggactccagaaagatcacgccctgtgggaccacacagcccagaacctgctgagaatgggcctcgcctttctggtgctggttgccctcgtgtggttcctggtggaagattggctgagccggaagcggacaagagagagagccagcagagcctctacctgggagggaagaagaaggctgaacacccagacacttagggccaagcgatctggatctggagcaacaaacttctcactactcaaacaagcaggtgacgtggaggagaatcccgggccttctagaggccatatgaccgagtacaagcccacggtgcgcctcgccacccgcgacgacgtccccagggccgtacgcaccctcgccgccgcgttcgccgactaccccgccacgcgccacaccgtcgatccggaccgccacatcgagcgggtcaccgagctgcaagaactcttcctcacgcgcgtcgggctcgacatcggcaaggtgtgggtcgcggacgacggcgccgcggtggcggtctggaccacgccggagagcgtcgaagcgggggcggtgttcgccgagatcggcccgcgcatggccgagttgagcggttcccggctggccgcgcagcaacagatggaaggcctcctggcgccgcaccggcccaaggagcccgcgtggttcctggccaccgtcggcgtctcgcccgaccaccagggcaagggtctgggcagcgccgtcgtgctccccggagtggaggcggccgagcgcgccggggtgcccgccttcctggagacctccgcgccccgcaacctccccttctacgagcggctcggcttcaccgtcaccgccgacgtcgaggtgcccgaaggaccgcgcacctggtgcatgacccgcaagcccggtgcctga

SEQ ID NO: 3754 - DNA, 3204 bp, synthetic construct
  source 1..3204: mol_type = other DNA
atggccttaccagtgaccgccttgctcctgccgctggccttgctgctccacgccgccaggccggacatcgtgatgacacagagccctgatagcctggccgtgtctctgggagagagagccacaatcaactgcgagagcagccagagcctgctgaacagcggcaaccagaagaactacctgacctggtatcagcagaagcccggccagcctcctaagcctctgatctactgggccagcaccagagaaagcggcgtgcccgatagattttctggctctggcagcggcaccgacttcaccctgacaatttctagcctgcaagccgaggacgtggccgtgtactactgccagaacgactacagctacccctacctgttcggccagggcaccaagctggaaatcaaaagactcgaggacctgaagaacgtgttcccacctgaggtggccgtgttcgagcctagcgaggccgagatcagccacacccagaaagccaccctcgtgtgcctggctaccggcttctaccccgaccatgtggaactgtcttggtgggtcaacggcaaagaggtgcacagcggcgtgtctaccgacccccagccactgaaagaacagcccgccctgaacgacagccggtactgcctgagcagcagactgagagtgtccgccaccttctggcagaacccccggaaccacttcagatgccaggtgcagttctacggcctgagcgagaacgacgagtggacccaggacagagccaagcccgtgacccagatcgtgtctgccgaagcctggggcagagccgattgcggatcccagagcttcggcctgctggaccccaagctgtgctacctgctggatggcatcctgttcatctacggcgtgatcctgaccgccctgttcctgagagtgaagttcagcagaagcgccgacgcccctgcctaccagcagggacagaaccaactgtacaacgagctgaacctgggcagacgggaagagtacgacgtgctggacaagcggagaggcagggaccctgagatgggcggaaagccccagcggagaaagaacccccaggaaggactgtataacgaactccagaaagacaagatggccgaagcctacagcgagatcggcatgaagggcgagcggagaagaggcaagggccacgatggcctgtaccagggcctgagcaccgccaccaaggacacctatgacgccctgcacatgcaggccctgcctccaagaagggccaagcgatctggatctggagcaacaaacttctcactactcaaacaagcaggtgacgtggaggagaatcccgggcctactagtatggactggatttggcgcatccttttccttgtcggcgctgctaccggcgcgcattccttcgaacaagttcagctggtgcagagcggcagcgagctgaagaaacctggcgcttccgtgaagatcagctgcaaggccagcggctacaccttcaccaactacggcatgaactgggtcaagcaggcccctggacagggcctgaaatggatgggctggatcaacacctacaccggcgagcctacctacgccgaagagttcaagggcagattcgccttcagcctggaaaccagcgccagcacagcctacctccagatcaccagcctgaagaacgaggacaccgccacctacttttgcgccagactcggcttcggcaacgctatggattattggggccagggaaccagcgtgaccgtgtcatctacgcgtatccagaaccctgatcctgccgtgtaccagctgcgggatagcaagagcagcgacaagagcgtgtgtctgttcaccgacttcgacagccagaccaacgtgtcccagagcaaggactccgacgtgtacatcaccgataagaccgtgctggacatgcggagcatggacttcaagagcaactccgccgtggcctggtccaacaagtccgatttcgcctgcgccaacgccttcaacaacagcattatccccgaggacacattcttcccaagccccgagagcagctgcggtaccaagtctgtgcgcttttacctggtcgtcagccctgccagtgcctccactcagacatcttggaccccaagggaccttgtgtcctctcagacacagacacagtcctgcgtgccaccaactgctggcgcaagacaggctccagagtctcccagcacaatccccgtcccttctcagccccagaactccacacttaggccaggaccagctgctccaatcgcactggtcccagtgttctgcggactgctggttgccaagtctctggtgctgagcgcactcctcgtttggtggggcgatatttggtggaaaacgatgatggaattgagatccctcgatacgcagaaagccacatgccaccttcagcaagtcacagacttgccttggaccagcgtcagctctcccgtggaacgggaaattctgtatcatacagtggcccgcaccaagatttccgacgatgacgacgagcacacactgcgcgccaagagaagcggatctggcgtgaagcagaccctgaatttcgacctgctgaagctggctggcgacgtggaatccaacccaggcccttctagaggccatatgaccgagtacaagcccacggtgcgcctcgccacccgcgacgacgtccccagggccgtacgcaccctcgccgccgcgttcgccgactaccccgccacgcgccacaccgtcgatccggaccgccacatcgagcgggtcaccgagctgcaagaactcttcctcacgcgcgtcgggctcgacatcggcaaggtgtgggtcgcggacgacggcgccgcggtggcggtctggaccacgccggagagcgtcgaagcgggggcggtgttcgccgagatcggcccgcgcatggccgagttgagcggttcccggctggccgcgcagcaacagatggaaggcctcctggcgccgcaccggcccaaggagcccgcgtggttcctggccaccgtcggcgtctcgcccgaccaccagggcaagggtctgggcagcgccgtcgtgctccccggagtggaggcggccgagcgcgccggggtgcccgccttcctggagacctccgcgccccgcaacctccccttctacgagcggctcggcttcaccgtcaccgccgacgtcgaggtgcccgaaggaccgcgcacctggtgcatgacccgcaagcccggtgcctga

SEQ ID NO: 3755 - DNA, 2964 bp, synthetic construct
  source 1..2964: mol_type = other DNA
atggccttaccagtgaccgccttgctcctgccgctggccttgctgctccacgccgccaggccggacatcgtgatgacacagagccctgatagcctggccgtgtctctgggagagagagccacaatcaactgcgagagcagccagagcctgctgaacagcggcaaccagaagaactacctgacctggtatcagcagaagcccggccagcctcctaagcctctgatctactgggccagcaccagagaaagcggcgtgcccgatagattttctggctctggcagcggcaccgacttcaccctgacaatttctagcctgcaagccgaggacgtggccgtgtactactgccagaacgactacagctacccctacctgttcggccagggcaccaagctggaaatcaaaagactcgaggacctgaagaacgtgttcccacctgaggtggccgtgttcgagcctagcgaggccgagatcagccacacccagaaagccaccctcgtgtgcctggctaccggcttctaccccgaccatgtggaactgtcttggtgggtcaacggcaaagaggtgcacagcggcgtgtctaccgacccccagccactgaaagaacagcccgccctgaacgacagccggtactgcctgagcagcagactgagagtgtccgccaccttctggcagaacccccggaaccacttcagatgccaggtgcagttctacggcctgagcgagaacgacgagtggacccaggacagagccaagcccgtgacccagatcgtgtctgccgaagcctggggcagagccgattgcggatcccagagcttcggcctgctggaccccaagctgtgctacctgctggatggcatcctgttcatctacggcgtgatcctgaccgccctgttcctgagagtgaagttcagcagaagcgccgacgcccctgcctaccagcagggacagaaccaactgtacaacgagctgaacctgggcagacgggaagagtacgacgtgctggacaagcggagaggcagggaccctgagatgggcggaaagccccagcggagaaagaacccccaggaaggactgtataacgaactccagaaagacaagatggccgaagcctacagcgagatcggcatgaagggcgagcggagaagaggcaagggccacgatggcctgtaccagggcctgagcaccgccaccaaggacacctatgacgccctgcacatgcaggccctgcctccaagaagggccaagcgatctggatctggagcaacaaacttctcactactcaaacaagcaggtgacgtggaggagaatcccgggcctactagtatggactggatttggcgcatccttttccttgtcggcgctgctaccggcgcgcattccttcgaacaagttcagctggtgcagagcggcagcgagctgaagaaacctggcgcttccgtgaagatcagctgcaaggccagcggctacaccttcaccaactacggcatgaactgggtcaagcaggcccctggacagggcctgaaatggatgggctggatcaacacctacaccggcgagcctacctacgccgaagagttcaagggcagattcgccttcagcctggaaaccagcgccagcacagcctacctccagatcaccagcctgaagaacgaggacaccgccacctacttttgcgccagactcggcttcggcaacgctatggattattggggccagggaaccagcgtgaccgtgtcatctacgcgtatccagaaccctgatcctgccgtgtaccagctgcgggatagcaagagcagcgacaagagcgtgtgtctgttcaccgacttcgacagccagaccaacgtgtcccagagcaaggactccgacgtgtacatcaccgataagaccgtgctggacatgcggagcatggacttcaagagcaactccgccgtggcctggtccaacaagtccgatttcgcctgcgccaacgccttcaacaacagcattatccccgaggacacattcttcccaagccccgagagcagctgcggtaccgtggtcgagaaagaacatccacagcttggcgctggcaccgtcctgttgcttagagccggattctatgccgtcagcttcctgtccgtggctgtggggtctacagtgtattaccagggaaaatgtctcacctggaaaggccccagacgccagcttccagctgttgttcctgctccactgccaccaccttgtggctcctctgctcacttgcttccaccagtgcctggcggacgcgccaagagaagcggatctggcgtgaagcagaccctgaatttcgacctgctgaagctggctggcgacgtggaatccaacccaggcccttctagaggccatatgaccgagtacaagcccacggtgcgcctcgccacccgcgacgacgtccccagggccgtacgcaccctcgccgccgcgttcgccgactaccccgccacgcgccacaccgtcgatccggaccgccacatcgagcgggtcaccgagctgcaagaactcttcctcacgcgcgtcgggctcgacatcggcaaggtgtgggtcgcggacgacggcgccgcggtggcggtctggaccacgccggagagcgtcgaagcgggggcggtgttcgccgagatcggcccgcgcatggccgagttgagcggttcccggctggccgcgcagcaacagatggaaggcctcctggcgccgcaccggcccaaggagcccgcgtggttcctggccaccgtcggcgtctcgcccgaccaccagggcaagggtctgggcagcgccgtcgtgctccccggagtggaggcggccgagcgcgccggggtgcccgccttcctggagacctccgcgccccgcaacctccccttctacgagcggctcggcttcaccgtcaccgccgacgtcgaggtgcccgaaggaccgcgcacctggtgcatgacccgcaagcccggtgcctga

SEQ ID NO: 3756 - DNA, 2877 bp, synthetic construct
  source 1..2877: mol_type = other DNA
atggccttaccagtgaccgccttgctcctgccgctggccttgctgctccacgccgccaggccggacatcgtgatgacacagagccctgatagcctggccgtgtctctgggagagagagccacaatcaactgcgagagcagccagagcctgctgaacagcggcaaccagaagaactacctgacctggtatcagcagaagcccggccagcctcctaagcctctgatctactgggccagcaccagagaaagcggcgtgcccgatagattttctggctctggcagcggcaccgacttcaccctgacaatttctagcctgcaagccgaggacgtggccgtgtactactgccagaacgactacagctacccctacctgttcggccagggcaccaagctggaaatcaaaagactcgagggacagcctaaggccaatcctaccgtgacactgttccctccaagcagcgaagaactccaggccaacaaggccacacttgtgtgcctgatctccgacttctaccctggggctgtgacagtggcttggaaggccgatggatctcctgtgaaagccggcgtggaaaccaccaagccatccaagcagagcaacaacaaatacgccgccagctcctacctgagcctgacacctgagcagtggaagtcccacagatcctacagctgccaagtgacccacgaaggcagcaccgtggaaaagacagtggcccctacagagtgcagcggatcccagagcttcggcctgctggaccccaagctgtgctacctgctggatggcatcctgttcatctacggcgtgatcctgaccgccctgttcctgagagtgaagttcagcagaagcgccgacgcccctgcctaccagcagggacagaaccaactgtacaacgagctgaacctgggcagacgggaagagtacgacgtgctggacaagcggagaggcagggaccctgagatgggcggaaagccccagcggagaaagaacccccaggaaggactgtataacgaactccagaaagacaagatggccgaagcctacagcgagatcggcatgaagggcgagcggagaagaggcaagggccacgatggcctgtaccagggcctgagcaccgccaccaaggacacctatgacgccctgcacatgcaggccctgcctccaagaagggccaagcgatctggatctggagcaacaaacttctcactactcaaacaagcaggtgacgtggaggagaatcccgggcctactagtatggactggatttggcgcatccttttccttgtcggcgctgctaccggcgcgcattccttcgaacaagttcagctggtgcagagcggcagcgagctgaagaaacctggcgcttccgtgaagatcagctgcaaggccagcggctacaccttcaccaactacggcatgaactgggtcaagcaggcccctggacagggcctgaaatggatgggctggatcaacacctacaccggcgagcctacctacgccgaagagttcaagggcagattcgccttcagcctggaaaccagcgccagcacagcctacctccagatcaccagcctgaagaacgaggacaccgccacctacttttgcgccagactcggcttcggcaacgctatggattattggggccagggaaccagcgtgaccgtgtcatctacgcgtgcctctacaaagggaccctccgtgtttcctctggctcccagcagcaagtctacaagcggaggaacagccgctctgggctgcctggtcaaggattactttcccgagcctgtgaccgtgtcctggaatagcggagcactgacaagcggcgtgcacacctttccagccgtgctgcaaagcagcggcctgtactctctgagcagcgtggtcacagtgcctagctctagcctgggcacccagacctacatctgcaatgtgaaccacaagcctagcaacaccaaggtggacaagagagtggaacccaagagctgtggtaccatcactcaaggtttggcagtgtcaaccatctcatcattctttccacctggctaccaagtgtccttctgcctggtcatggtgctgctgttcgccgtggataccggcctgtacttcagcgtcaagaccaacatccggtccagcaccagagactggaaggaccacaagttcaagtggcggaaggaccctcaggacaagagggccaagcgatctggatctggagcaacaaacttctcactactcaaacaagcaggtgacgtggaggagaatcccgggccttctagaggccatatgaccgagtacaagcccacggtgcgcctcgccacccgcgacgacgtccccagggccgtacgcaccctcgccgccgcgttcgccgactaccccgccacgcgccacaccgtcgatccggaccgccacatcgagcgggtcaccgagctgcaagaactcttcctcacgcgcgtcgggctcgacatcggcaaggtgtgggtcgcggacgacggcgccgcggtggcggtctggaccacgccggagagcgtcgaagcgggggcggtgttcgccgagatcggcccgcgcatggccgagttgagcggttcccggctggccgcgcagcaacagatggaaggcctcctggcgccgcaccggcccaaggagcccgcgtggttcctggccaccgtcggcgtctcgcccgaccaccagggcaagggtctgggcagcgccgtcgtgctccccggagtggaggcggccgagcgcgccggggtgcccgccttcctggagacctccgcgccccgcaacctccccttctacgagcggctcggcttcaccgtcaccgccgacgtcgaggtgcccgaaggaccgcgcacctggtgcatgacccgcaagcccggtgcctga

SEQ ID NO: 3757 - DNA, 2922 bp, synthetic construct
  source 1..2922: mol_type = other DNA
atggccttaccagtgaccgccttgctcctgccgctggccttgctgctccacgccgccaggccggacatcgtgatgacacagagccctgatagcctggccgtgtctctgggagagagagccacaatcaactgcgagagcagccagagcctgctgaacagcggcaaccagaagaactacctgacctggtatcagcagaagcccggccagcctcctaagcctctgatctactgggccagcaccagagaaagcggcgtgcccgatagattttctggctctggcagcggcaccgacttcaccctgacaatttctagcctgcaagccgaggacgtggccgtgtactactgccagaacgactacagctacccctacctgttcggccagggcaccaagctggaaatcaaaagactcgaggacctgaagaacgtgttcccacctgaggtggccgtgttcgagcctagcgaggccgagatcagccacacccagaaagccaccctcgtgtgcctggctaccggcttctaccccgaccatgtggaactgtcttggtgggtcaacggcaaagaggtgcacagcggcgtgtctaccgacccccagccactgaaagaacagcccgccctgaacgacagccggtactgcctgagcagcagactgagagtgtccgccaccttctggcagaacccccggaaccacttcagatgccaggtgcagttctacggcctgagcgagaacgacgagtggacccaggacagagccaagcccgtgacccagatcgtgtctgccgaagcctggggcagagccgattgcggatcccagagcttcggcctgctggaccccaagctgtgctacctgctggatggcatcctgttcatctacggcgtgatcctgaccgccctgttcctgagagtgaagttcagcagaagcgccgacgcccctgcctaccagcagggacagaaccaactgtacaacgagctgaacctgggcagacgggaagagtacgacgtgctggacaagcggagaggcagggaccctgagatgggcggaaagccccagcggagaaagaacccccaggaaggactgtataacgaactccagaaagacaagatggccgaagcctacagcgagatcggcatgaagggcgagcggagaagaggcaagggccacgatggcctgtaccagggcctgagcaccgccaccaaggacacctatgacgccctgcacatgcaggccctgcctccaagaagggccaagcgatctggatctggagcaacaaacttctcactactcaaacaagcaggtgacgtggaggagaatcccgggcctactagtatggactggatttggcgcatccttttccttgtcggcgctgctaccggcgcgcattccttcgaacaagttcagctggtgcagagcggcagcgagctgaagaaacctggcgcttccgtgaagatcagctgcaaggccagcggctacaccttcaccaactacggcatgaactgggtcaagcaggcccctggacagggcctgaaatggatgggctggatcaacacctacaccggcgagcctacctacgccgaagagttcaagggcagattcgccttcagcctggaaaccagcgccagcacagcctacctccagatcaccagcctgaagaacgaggacaccgccacctacttttgcgccagactcggcttcggcaacgctatggattattggggccagggaaccagcgtgaccgtgtcatctacgcgtatccagaaccctgatcctgccgtgtaccagctgcgggatagcaagagcagcgacaagagcgtgtgtctgttcaccgacttcgacagccagaccaacgtgtcccagagcaaggactccgacgtgtacatcaccgataagaccgtgctggacatgcggagcatggacttcaagagcaactccgccgtggcctggtccaacaagtccgatttcgcctgcgccaacgccttcaacaacagcattatccccgaggacacattcttcccaagccccgagagcagctgcggtaccatcactcaaggtttggcagtgtcaaccatctcatcattctttccacctggctaccaagtgtccttctgcctggtcatggtgctgctgttcgccgtggataccggcctgtacttcagcgtcaagaccaacatccggtccagcaccagagactggaaggaccacaagttcaagtggcggaaggaccctcaggacaagagggccaagcgatctggatctggagcaacaaacttctcactactcaaacaagcaggtgacgtggaggagaatcccgggccttctagaggccatatgaccgagtacaagcccacggtgcgcctcgccacccgcgacgacgtccccagggccgtacgcaccctcgccgccgcgttcgccgactaccccgccacgcgccacaccgtcgatccggaccgccacatcgagcgggtcaccgagctgcaagaactcttcctcacgcgcgtcgggctcgacatcggcaaggtgtgggtcgcggacgacggcgccgcggtggcggtctggaccacgccggagagcgtcgaagcgggggcggtgttcgccgagatcggcccgcgcatggccgagttgagcggttcccggctggccgcgcagcaacagatggaaggcctcctggcgccgcaccggcccaaggagcccgcgtggttcctggccaccgtcggcgtctcgcccgaccaccagggcaagggtctgggcagcgccgtcgtgctccccggagtggaggcggccgagcgcgccggggtgcccgccttcctggagacctccgcgccccgcaacctccccttctacgagcggctcggcttcaccgtcaccgccgacgtcgaggtgcccgaaggaccgcgcacctggtgcatgacccgcaagcccggtgcctga

SEQ ID NO: 3758 - DNA, 1971 bp, synthetic construct
  source 1..1971: mol_type = other DNA
atggccttaccagtgaccgccttgctcctgccgctggccttgctgctccacgccgccaggccggacatcgtgatgacacagagccctgatagcctggccgtgtctctgggagagagagccacaatcaactgcgagagcagccagagcctgctgaacagcggcaaccagaagaactacctgacctggtatcagcagaagcccggccagcctcctaagcctctgatctactgggccagcaccagagaaagcggcgtgcccgatagattttctggctctggcagcggcaccgacttcaccctgacaatttctagcctgcaagccgaggacgtggccgtgtactactgccagaacgactacagctacccctacctgttcggccagggcaccaagctggaaatcaaaagactcgagggacagcctaaggccaatcctaccgtgacactgttccctccaagcagcgaagaactccaggccaacaaggccacacttgtgtgcctgatctccgacttctaccctggggctgtgacagtggcttggaaggccgatggatctcctgtgaaagccggcgtggaaaccaccaagccatccaagcagagcaacaacaaatacgccgccagctcctacctgagcctgacacctgagcagtggaagtcccacagatcctacagctgccaagtgacccacgaaggcagcaccgtggaaaagacagtggcccctacagagtgcagcggatccctgggagagcctcagctgtgctatatcctggacgccatcctgtttctgtacggcatcgtgctgaccctgctgtactgccggctgaagatccaagtgcggaaggccgccatcaccagctacgagaaatccgacggcgtgtacaccggcctgagcaccagaaatcaagagacatacgagacactgaagcacgaaaagcctccacaaagggccaagcgatctggatctggagcaacaaacttctcactactcaaacaagcaggtgacgtggaggagaatcccgggcctactagtatggactggatttggcgcatccttttccttgtcggcgctgctaccggcgcgcattccttcgaacaagttcagctggtgcagagcggcagcgagctgaagaaacctggcgcttccgtgaagatcagctgcaaggccagcggctacaccttcaccaactacggcatgaactgggtcaagcaggcccctggacagggcctgaaatggatgggctggatcaacacctacaccggcgagcctacctacgccgaagagttcaagggcagattcgccttcagcctggaaaccagcgccagcacagcctacctccagatcaccagcctgaagaacgaggacaccgccacctacttttgcgccagactcggcttcggcaacgctatggattattggggccagggaaccagcgtgaccgtgtcatctacgcgtgcctctacaaagggaccctccgtgtttcctctggctcccagcagcaagtctacaagcggaggaacagccgctctgggctgcctggtcaaggattactttcccgagcctgtgaccgtgtcctggaatagcggagcactgacaagcggcgtgcacacctttccagccgtgctgcaaagcagcggcctgtactctctgagcagcgtggtcacagtgcctagctctagcctgggcacccagacctacatctgcaatgtgaaccacaagcctagcaacaccaaggtggacaagagagtggaacccaagagctgtggtaccctcggagaaccacagctctgttacattctggatgctatcctgttcctctatgggatcgtcctgacactcctgtattgcagactcaaaattcaagttcgcaaagccgccattacctcttacgagaagagtgatggggtgtacacaggactgtctacccggaatcaagaaacctacgaaaccctcaaacatgagaagccacctcagtaa

SEQ ID NO: 3759 - DNA, 1482 bp, synthetic construct
  source 1..1482: mol_type = other DNA
atggccttaccagtgaccgccttgctcctgccgctggccttgctgctccacgccgccaggccggacatcgtgatgacccagagccctgccaccctgtccgtgtctccaggcgaaagagccaccctgagctgcagagcttcccagagcgtgtccaacgacgtcgtgtggtatcagcagaagcccggccaggcccccagactgctgatctactacgccagcaacagatacaccggcatccccgccagattcagcggctctggcagcggcaccgagttcaccctgacaatcagcagcctccagagcgaggacttcgccgtgtactactgtcagcaggactacaccagcccctggaccttcggccagggcaccaagctggaaatcaagagaggcggaggcggaagtggaggcggaggatctggcggcggaggctctgaggtgcaactggtgcagagcggagccgaagtgaagaaacctggggccagcgtgcgggtgtcctgcaaggccagcggctacacctttaccaactacggcatgaactgggtgcgccaggctcctggacagggcctggaatggatgggctggatcaacacctacaccggcgagcccacctacgccgacgacttcaagggcagagtgaccatgaccaccgacaccagcacctccaccgcctacatggaactgcggagcctgagaagcgacgacaccgccgtgtattattgcgcccggatcggcgacagcagccccagcgattattggggccagggaaccctcgtgaccgtgtcctctacgcgtgagcagaaactgatctcggaagaggatctgaaaattgaagttatgtatcctcctccttacctagacaatgagaagagcaatggaaccattatccatgtgaaagggaaacacctttgtccaagtcccctatttcccggaccttctaagcccttttgggtgctggtggtggttgggggagtcctggcttgctatagcttgctagtaacagtggcctttattattttctgggtgaggagtaagaggagcaggctcctgcacagtgactacatgaacatgactccacgccgccccggacccacccgcaagcattaccagccctatgccccaccacgcgacttcgcagcctatcgctccagagtgaagttcagcaggagcgcagacgcccccgcgtaccagcagggccagaaccagctctataacgagctcaatctaggacgaagagaggagtacgatgttttggacaagagacgtggccgggaccctgagatggggggaaagccgagaaggaagaaccctcaggaaggcctgtacaatgaactgcagaaagataagatggcggaggcctacagtgagattgggatgaaaggcgagcgccggaggggcaaggggcacgatggcctttaccagggtctcagtacagccaccaaggacacctacgacgcccttcacatgcaggccctgccccctcgc

SEQ ID NO: 3760 - DNA, 1503 bp, synthetic construct
  source 1..1503: mol_type = other DNA
atggccttaccagtgaccgccttgctcctgccgctggccttgctgctccacgccgccaggccggacatcgtgatgacccagagccctgccaccctgtccgtgtctccaggcgaaagagccaccctgagctgcagagcttcccagagcgtgtccaacgacgtcgtgtggtatcagcagaagcccggccaggcccccagactgctgatctactacgccagcaacagatacaccggcatccccgccagattcagcggctctggcagcggcaccgagttcaccctgacaatcagcagcctccagagcgaggacttcgccgtgtactactgtcagcaggactacaccagcccctggaccttcggccagggcaccaagctggaaatcaagagaggcggaggcggaagtggaggcggaggatctggcggcggaggctctgaggtgcaactggtgcagagcggagccgaagtgaagaaacctggggccagcgtgcgggtgtcctgcaaggccagcggctacacctttaccaactacggcatgaactgggtgcgccaggctcctggacagggcctggaatggatgggctggatcaacacctacaccggcgagcccacctacgccgacgacttcaagggcagagtgaccatgaccaccgacaccagcacctccaccgcctacatggaactgcggagcctgagaagcgacgacaccgccgtgtattattgcgcccggatcggcgacagcagccccagcgattattggggccagggaaccctcgtgaccgtgtcctctacgcgtgagcagaaactgatctcggaagaggatctggcgaagcccaccacgacgccagcgccgcgaccaccaacaccggcgcccaccatcgcgtcgcagcccctgtccctgcgcccagaggcgtgccggccagcggcggggggcgcagtgcacacgagggggctggacttcgcctgtgacatctacatctgggcgcccttggccgggacttgtggggtccttctcctgtcactggttatcaccctttactgcaaacggggcagaaagaaactcctgtatatattcaaacaaccatttatgagaccagtacaaactactcaagaggaagatggctgtagctgccgatttccagaagaagaagaaggaggatgtgaactgagagtgaagttcagcaggagcgcagacgcccccgcgtaccagcagggccagaaccagctctataacgagctgaatctaggacgaagagaggagtacgatgttttggacaagagacgtggccgggaccctgagatggggggaaagccgagaaggaagaaccctcaggaaggcctgtacaatgaactgcagaaagataagatggcggaggcctacagtgagattgggatgaaaggcgagcgccggaggggcaaggggcacgatggcctttaccagggtctcagtacagccaccaaggacacctacgacgcccttcacatgcaggccctgccccctcgctga

SEQ ID NO: 3761 - DNA, 1503 bp, synthetic construct
  source 1..1503: mol_type = other DNA
atggccttaccagtgaccgccttgctcctgccgctggccttgctgctccacgccgccaggccggaggtgcaactggtgcagagcggagccgaagtgaagaaacctggggccagcgtgcgggtgtcctgcaaggccagcggctacacctttaccaactacggcatgaactgggtgcgccaggctcctggacagggcctggaatggatgggctggatcaacacctacaccggcgagcccacctacgccgacgacttcaagggcagagtgaccatgaccaccgacaccagcacctccaccgcctacatggaactgcggagcctgagaagcgacgacaccgccgtgtattattgcgcccggatcggcgacagcagccccagcgattattggggccagggaaccctcgtgaccgtgtcctctggcggaggcggaagtggaggcggaggatctggcggcggaggctctgacatcgtgatgacccagagccctgccaccctgtccgtgtctccaggcgaaagagccaccctgagctgcagagcttcccagagcgtgtccaacgacgtcgtgtggtatcagcagaagcccggccaggcccccagactgctgatctactacgccagcaacagatacaccggcatccccgccagattcagcggctctggcagcggcaccgagttcaccctgacaatcagcagcctccagagcgaggacttcgccgtgtactactgtcagcaggactacaccagcccctggaccttcggccagggcaccaagctggaaatcaagagaacgcgtgagcagaaactgatctcggaagaggatctggcgaagcccaccacgacgccagcgccgcgaccaccaacaccggcgcccaccatcgcgtcgcagcccctgtccctgcgcccagaggcgtgccggccagcggcggggggcgcagtgcacacgagggggctggacttcgcctgtgacatctacatctgggcgcccttggccgggacttgtggggtccttctcctgtcactggttatcaccctttactgcaaacggggcagaaagaaactcctgtatatattcaaacaaccatttatgagaccagtacaaactactcaagaggaagatggctgtagctgccgatttccagaagaagaagaaggaggatgtgaactgagagtgaagttcagcaggagcgcagacgcccccgcgtaccagcagggccagaaccagctctataacgagctgaatctaggacgaagagaggagtacgatgttttggacaagagacgtggccgggaccctgagatggggggaaagccgagaaggaagaaccctcaggaaggcctgtacaatgaactgcagaaagataagatggcggaggcctacagtgagattgggatgaaaggcgagcgccggaggggcaaggggcacgatggcctttaccagggtctcagtacagccaccaaggacacctacgacgcccttcacatgcaggccctgccccctcgctga

SEQ ID NO: 3762 - DNA, 2742 bp, synthetic construct
  source 1..2742: mol_type = other DNA
atggccttaccagtgaccgccttgctcctgccgctggccttgctgctccacgccgccaggccggacatcgtgatgacccagagccctgccaccctgtccgtgtctccaggcgaaagagccaccctgagctgcagagcttcccagagcgtgtccaacgacgtcgtgtggtatcagcagaagcccggccaggcccccagactgctgatctactacgccagcaacagatacaccggcatccccgccagattcagcggctctggcagcggcaccgagttcaccctgacaatcagcagcctccagagcgaggacttcgccgtgtactactgtcagcaggactacaccagcccctggaccttcggccagggcaccaagctggaaatcaagagaggcggaggcggaagtggaggcggaggatctggcggcggaggctctgaggtgcaactggtgcagagcggagccgaagtgaagaaacctggggccagcgtgcgggtgtcctgcaaggccagcggctacacctttaccaactacggcatgaactgggtgcgccaggctcctggacagggcctggaatggatgggctggatcaacacctacaccggcgagcccacctacgccgacgacttcaagggcagagtgaccatgaccaccgacaccagcacctccaccgcctacatggaactgcggagcctgagaagcgacgacaccgccgtgtattattgcgcccggatcggcgacagcagccccagcgattattggggccagggaaccctcgtgaccgtgtcctctacgcgtgagcagaaactgatctcggaagaggatctggcgaagcccaccacgacgccagcgccgcgaccaccaacaccggcgcccaccatcgcgtcgcagcccctgtccctgcgcccagaggcgtgccggccagcggcggggggcgcagtgcacacgagggggctggacttcgcctgtgacatctacatctgggcgcccttggccgggacttgtggggtccttctcctgtcactggttatcaccctttactgcgggcgcgccagagtgaagttcagcaggagcgcagacgcccccgcgtaccagcagggccagaaccagctctataacgagctgaatctaggacgaagagaggagtacgatgttttggacaagagacgtggccgggaccctgagatggggggaaagccgagaaggaagaaccctcaggaaggcctgtacaatgaactgcagaaagataagatggcggaggcctacagtgagattgggatgaaaggcgagcgccggaggggcaaggggcacgatggcctttaccagggtctcagtacagccaccaaggacacctacgacgcccttcacatgcaggccctgccccctcgctctagaggatctggagcaacaaacttctcactactcaaacaagcaggtgacgtggaggagaatcccgggcctgggatccacatggccacttacgaggttctctgtgaggtggcgcggaaactgggcacggatgacagggaagtggtattgttcctcctaaacgtgttcatacctcaacccacactggcccaattaattggagctcttagagctttaaaggaggagggcaggttaacgtttcccctgttagcggaatgtctgtttcgtgcaggtcgcagagacctcttgcgcgacctgcttcacttagacccgcgttttttagagcgccacctagcgggcacaatgagttatttcagcccttatcagctcactgttctccacgtagacggggagctgtgtgcgagggatattaggtctttgatatttttaagcaaggacactatagggtctcgcagcacaccacagacattcttacactgggtgtactgtatggaaaacttagacctactgggtcccactgacgtggatgccctaatgtcaatgcttagatctttgtcaagagtagacctacagcgccaagtgcaaaccctaatgggccttcacctttccggcccatcacactcccaacactatcgccatacaccactcgagaccgatttctacgactacaaggacgacgatgacaagactagtggctccggcgagggcagaggaagtctactaacctgcggagatgtggaagaaaatcctggcccacatatgaccgagtacaagcccacggtgcgcctcgccacccgcgacgacgtccccagggccgtacgcaccctcgccgccgcgttcgccgactaccccgccacgcgccacaccgtcgatccggaccgccacatcgagcgggtcaccgagctgcaagaactcttcctcacgcgcgtcgggctcgacatcggcaaggtgtgggtcgcggacgacggcgccgcggtggcggtctggaccacgccggagagcgtcgaagcgggggcggtgttcgccgagatcggcccgcgcatggccgagttgagcggttcccggctggccgcgcagcaacagatggaaggcctcctggcgccgcaccggcccaaggagcccgcgtggttcctggccaccgtcggcgtctcgcccgaccaccagggcaagggtctgggcagcgccgtcgtgctccccggagtggaggcggccgagcgcgccggggtgcccgccttcctggagacctccgcgccccgcaacctccccttctacgagcggctcggcttcaccgtcaccgccgacgtcgaggtgcccgaaggaccgcgcacctggtgcatgacccgcaagcccggtgcctga

SEQ ID NO: 3763 - DNA, 2562 bp, synthetic construct
  source 1..2562: mol_type = other DNA
atggccttaccagtgaccgccttgctcctgccgctggccttgctgctccacgccgccaggccggacatcgtgatgacccagagccctgccaccctgtccgtgtctccaggcgaaagagccaccctgagctgcagagcttcccagagcgtgtccaacgacgtcgtgtggtatcagcagaagcccggccaggcccccagactgctgatctactacgccagcaacagatacaccggcatccccgccagattcagcggctctggcagcggcaccgagttcaccctgacaatcagcagcctccagagcgaggacttcgccgtgtactactgtcagcaggactacaccagcccctggaccttcggccagggcaccaagctggaaatcaagagactcgagatccagaaccctgatcctgccgtgtaccagctgcgggatagcaagagcagcgacaagagcgtgtgtctgttcaccgacttcgacagccagaccaacgtgtcccagagcaaggactccgacgtgtacatcaccgataagtgcgtgctggacatgcggagcatggacttcaagagcaactccgccgtggcctggtccaacaagtccgatttcgcctgcgccaacgccttcaacaacagcattatccccgaggacacattcttcccaagcagcgacgtgccctgcgacgtgaagctggtggaaaagagcttcgagacagacaccaacctgaacttccagaacctgagcgtgatcggcttcagaatcctgctgctgaaagtggccggctttaacctgctgatgaccctgcggctgtggtccagccgcgccaagagaagcggatctggcgtgaagcagaccctgaatttcgacctgctgaagctggctggcgacgtggaatccaacccaggccctactagtatggactggatttggcgcatccttttccttgtcggcgctgctaccggcgcgcattccttcgaagaggtgcaactggtgcagagcggagccgaagtgaagaaacctggggccagcgtgcgggtgtcctgcaaggccagcggctacacctttaccaactacggcatgaactgggtgcgccaggctcctggacagggcctggaatggatgggctggatcaacacctacaccggcgagcccacctacgccgacgacttcaagggcagagtgaccatgaccaccgacaccagcacctccaccgcctacatggaactgcggagcctgagaagcgacgacaccgccgtgtattattgcgcccggatcggcgacagcagccccagcgattattggggccagggaaccctcgtgaccgtgtcctctacgcgtgaggacctgaagaacgtgttcccacctgaggtggccgtgttcgagcctagcaaggccgagatcgcccacacccagaaagccaccctcgtgtgcctggctaccggcttctaccccgaccatgtggaactgtcttggtgggtcaacggcaaagaggtgcacagcggcgtgtgtaccgacccccagccactgaaagaacagcccgccctgaacgacagccggtactgcctgagcagcagactgagagtgtccgccaccttctggcagaacccccggaaccacttcagatgccaggtgcagttctacggcctgagcgagaacgacgagtggacccaggacagagccaagcccgtgacccagatcgtgtctgccgaagcctggggcagagccgattgcggcatcaccagcgccagctaccaccagggcgtgctgagcgccaccatcctgtacgagatcctgctgggcaaggccaccctgtacgccgtgctggtgtctgccctggtgctgatggctatggtcaagcggaaggacagccggggaagggccaagcgatctggatctggagcaacaaacttctcactactcaaacaagcaggtgacgtggaggagaatcccgggccttctagaggccatatgaccgagtacaagcccacggtgcgcctcgccacccgcgacgacgtccccagggccgtacgcaccctcgccgccgcgttcgccgactaccccgccacgcgccacaccgtcgatccggaccgccacatcgagcgggtcaccgagctgcaagaactcttcctcacgcgcgtcgggctcgacatcggcaaggtgtgggtcgcggacgacggcgccgcggtggcggtctggaccacgccggagagcgtcgaagcgggggcggtgttcgccgagatcggcccgcgcatggccgagttgagcggttcccggctggccgcgcagcaacagatggaaggcctcctggcgccgcaccggcccaaggagcccgcgtggttcctggccaccgtcggcgtctcgcccgaccaccagggcaagggtctgggcagcgccgtcgtgctccccggagtggaggcggccgagcgcgccggggtgcccgccttcctggagacctccgcgccccgcaacctccccttctacgagcggctcggcttcaccgtcaccgccgacgtcgaggtgcccgaaggaccgcgcacctggtgcatgacccgcaagcccggtgcctga

SEQ ID NO: 3764 - DNA, 2559 bp, synthetic construct
  source 1..2559: mol_type = other DNA
atggccttaccagtgaccgccttgctcctgccgctggccttgctgctccacgccgccaggccggacatcgtgatgacccagagccctgccaccctgtccgtgtctccaggcgaaagagccaccctgagctgcagagcttcccagagcgtgtccaacgacgtcgtgtggtatcagcagaagcccggccaggcccccagactgctgatctactacgccagcaacagatacaccggcatccccgccagattcagcggctctggcagcggcaccgagttcaccctgacaatcagcagcctccagagcgaggacttcgccgtgtactactgtcagcaggactacaccagcccctggaccttcggccagggcaccaagctggaaatcaagagactcgaggacctgaagaacgtgttcccacctgaggtggccgtgttcgagcctagcaaggccgagatcgcccacacccagaaagccaccctcgtgtgcctggctaccggcttctaccccgaccatgtggaactgtcttggtgggtcaacggcaaagaggtgcacagcggcgtgtgtaccgacccccagccactgaaagaacagcccgccctgaacgacagccggtactgcctgagcagcagactgagagtgtccgccaccttctggcagaacccccggaaccacttcagatgccaggtgcagttctacggcctgagcgagaacgacgagtggacccaggacagagccaagcccgtgacccagatcgtgtctgccgaagcctggggcagagccgattgcggcatcaccagcgccagctaccaccagggcgtgctgagcgccaccatcctgtacgagatcctgctgggcaaggccaccctgtacgccgtgctggtgtctgccctggtgctgatggctatggtcaagcggaaggacagccggggaagggccaagcgatctggatctggagcaacaaacttctcactactcaaacaagcaggtgacgtggaggagaatcccgggcctactagtatggactggatttggcgcatccttttccttgtcggcgctgctaccggcgcgcattccttcgaagaggtgcaactggtgcagagcggagccgaagtgaagaaacctggggccagcgtgcgggtgtcctgcaaggccagcggctacacctttaccaactacggcatgaactgggtgcgccaggctcctggacagggcctggaatggatgggctggatcaacacctacaccggcgagcccacctacgccgacgacttcaagggcagagtgaccatgaccaccgacaccagcacctccaccgcctacatggaactgcggagcctgagaagcgacgacaccgccgtgtattattgcgcccggatcggcgacagcagccccagcgattattggggccagggaaccctcgtgaccgtgtcctctacgcgtatccagaaccctgatcctgccgtgtaccagctgcgggatagcaagagcagcgacaagagcgtgtgtctgttcaccgacttcgacagccagaccaacgtgtcccagagcaaggactccgacgtgtacatcaccgataagtgcgtgctggacatgcggagcatggacttcaagagcaactccgccgtggcctggtccaacaagtccgatttcgcctgcgccaacgccttcaacaacagcattatccccgaggacacattcttcccaagcagcgacgtgccctgcgacgtgaagctggtggaaaagagcttcgagacagacaccaacctgaacttccagaacctgagcgtgatcggcttcagaatcctgctgctgaaagtggccggctttaacctgctgatgaccctgcggctgtggtccagccgcgccaagagaagcggatctggcgtgaagcagaccctgaatttcgacctgctgaagctggctggcgacgtggaatccaacccaggcccttctagaggccatatgaccgagtacaagcccacggtgcgcctcgccacccgcgacgacgtccccagggccgtacgcaccctcgccgccgcgttcgccgactaccccgccacgcgccacaccgtcgatccggaccgccacatcgagcgggtcaccgagctgcaagaactcttcctcacgcgcgtcgggctcgacatcggcaaggtgtgggtcgcggacgacggcgccgcggtggcggtctggaccacgccggagagcgtcgaagcgggggcggtgttcgccgagatcggcccgcgcatggccgagttgagcggttcccggctggccgcgcagcaacagatggaaggcctcctggcgccgcaccggcccaaggagcccgcgtggttcctggccaccgtcggcgtctcgcccgaccaccagggcaagggtctgggcagcgccgtcgtgctccccggagtggaggcggccgagcgcgccggggtgcccgccttcctggagacctccgcgccccgcaacctccccttctacgagcggctcggcttcaccgtcaccgccgacgtcgaggtgcccgaaggaccgcgcacctggtgcatgacccgcaagcccggtgcctga

SEQ ID NO: 3765 - DNA, 1857 bp, synthetic construct
  source 1..1857: mol_type = other DNA
atggccttaccagtgaccgccttgctcctgccgctggccttgctgctccacgccgccaggccggacatcgtgatgacccagagccctgccaccctgtccgtgtctccaggcgaaagagccaccctgagctgcagagcttcccagagcgtgtccaacgacgtcgtgtggtatcagcagaagcccggccaggcccccagactgctgatctactacgccagcaacagatacaccggcatccccgccagattcagcggctctggcagcggcaccgagttcaccctgacaatcagcagcctccagagcgaggacttcgccgtgtactactgtcagcaggactacaccagcccctggaccttcggccagggcaccaagctggaaatcaagagactcgaggacctgaagaacgtgttcccacctgaggtggccgtgttcgagcctagcgaggccgagatcagccacacccagaaagccaccctcgtgtgcctggctaccggcttctaccccgaccatgtggaactgtcttggtgggtcaacggcaaagaggtgcacagcggcgtgtgtaccgacccccagccactgaaagaacagcccgccctgaacgacagccggtactgcctgagcagcagactgagagtgtccgccaccttctggcagaacccccggaaccacttcagatgccaggtgcagttctacggcctgagcgagaacgacgagtggacccaggacagagccaagcccgtgacccagatcgtgtctgccgaagcctggggcagagccgattgcggctttaccagcgagagctaccagcagggcgtgctgagcgccaccatcctgtacgagatcctgctgggcaaggccaccctgtacgccgtgctggtgtctgccctggtgctgatggctatggtcaagcggaaggacagccggggaagggccaagcgatctggatctggagcaacaaacttctcactactcaaacaagcaggtgacgtggaggagaatcccgggcctactagtatggactggatttggcgcatccttttccttgtcggcgctgctaccggcgcgcattccttcgaagaggtgcaactggtgcagagcggagccgaagtgaagaaacctggggccagcgtgcgggtgtcctgcaaggccagcggctacacctttaccaactacggcatgaactgggtgcgccaggctcctggacagggcctggaatggatgggctggatcaacacctacaccggcgagcccacctacgccgacgacttcaagggcagagtgaccatgaccaccgacaccagcacctccaccgcctacatggaactgcggagcctgagaagcgacgacaccgccgtgtattattgcgcccggatcggcgacagcagccccagcgattattggggccagggaaccctcgtgaccgtgtcctctacgcgtatccagaaccctgatcctgccgtgtaccagctgcgggatagcaagagcagcgacaagagcgtgtgtctgttcaccgacttcgacagccagaccaacgtgtcccagagcaaggactccgacgtgtacatcaccgataagtgcgtgctggacatgcggagcatggacttcaagagcaactccgccgtggcctggtccaacaagtccgatttcgcctgcgccaacgccttcaacaacagcattatccccgaggacacattcttcccaagccccgagagcagctgcgacgtgaagctggtggaaaagagcttcgagacagacaccaacctgaacttccagaacctgagcgtgatcggcttcagaatcctgctgctgaaagtggccggctttaacctgctgatgaccctgcggctgtggtccagc

SEQ ID NO: 3766 - DNA, 2532 bp, synthetic construct
  source 1..2532: mol_type = other DNA
atggccttaccagtgaccgccttgctcctgccgctggccttgctgctccacgccgccaggccggacatcgtgatgacccagagccctgccaccctgtccgtgtctccaggcgaaagagccaccctgagctgcagagcttcccagagcgtgtccaacgacgtcgtgtggtatcagcagaagcccggccaggcccccagactgctgatctactacgccagcaacagatacaccggcatccccgccagattcagcggctctggcagcggcaccgagttcaccctgacaatcagcagcctccagagcgaggacttcgccgtgtactactgtcagcaggactacaccagcccctggaccttcggccagggcaccaagctggaaatcaagagactcgaggacctgaagaacgtgttcccacctgaggtggccgtgttcgagcctagcgaggccgagatcagccacacccagaaagccaccctcgtgtgcctggctaccggcttctaccccgaccatgtggaactgtcttggtgggtcaacggcaaagaggtgcacagcggcgtgtgtaccgacccccagccactgaaagaacagcccgccctgaacgacagccggtactgcctgagcagcagactgagagtgtccgccaccttctggcagaacccccggaaccacttcagatgccaggtgcagttctacggcctgagcgagaacgacgagtggacccaggacagagccaagcccgtgacccagatcgtgtctgccgaagcctggggcagagccgattgcggctttaccagcgagagctaccagcagggcgtgctgagcgccaccatcctgtacgagatcctgctgggcaaggccaccctgtacgccgtgctggtgtctgccctggtgctgatggctatggtcaagcggaaggacagccggggaagggccaagcgatctggatctggagcaacaaacttctcactactcaaacaagcaggtgacgtggaggagaatcccgggcctactagtatggactggatttggcgcatccttttccttgtcggcgctgctaccggcgcgcattccttcgaagaggtgcaactggtgcagagcggagccgaagtgaagaaacctggggccagcgtgcgggtgtcctgcaaggccagcggctacacctttaccaactacggcatgaactgggtgcgccaggctcctggacagggcctggaatggatgggctggatcaacacctacaccggcgagcccacctacgccgacgacttcaagggcagagtgaccatgaccaccgacaccagcacctccaccgcctacatggaactgcggagcctgagaagcgacgacaccgccgtgtattattgcgcccggatcggcgacagcagccccagcgattattggggccagggaaccctcgtgaccgtgtcctctacgcgtatccagaaccctgatcctgccgtgtaccagctgcgggatagcaagagcagcgacaagagcgtgtgtctgttcaccgacttcgacagccagaccaacgtgtcccagagcaaggactccgacgtgtacatcaccgataagtgcgtgctggacatgcggagcatggacttcaagagcaactccgccgtggcctggtccaacaagtccgatttcgcctgcgccaacgccttcaacaacagcattatccccgaggacacattcttcccaagccccgagagcagctgcgacgtgaagctggtggaaaagagcttcgagacagacaccaacctgaacttccagaacctgagcgtgatcggcttcagaatcctgctgctgaaagtggccggctttaacctgctgatgaccctgcggctgtggtccagccgcgccaagagaagcggatctggcgtgaagcagaccctgaatttcgacctgctgaagctggctggcgacgtggaatccaacccaggcccttctagaggcgggatccacaccatggctacctacgaggtgctgtgcgaggtggcaagaaagctgggcaccgacgacagagaagtggtgctgttcctgctgaacgtgttcatccctcagcctacactggcccagctgatcggtgcactgagagccctgaaagaggaaggccggctgacctttcctctgctggccgaatgcctgttcagagccggaagaagggatctgctgcgggacctgctgcatctggaccccagatttctggaaagacacctggccggcaccatgagctacttcagcccttaccagctgaccgtgctgcacgttgacggcgaactgtgcgccagagatattcggagcctgatcttcctgagcaaggacaccatcggcagccggtctacccctcagacatttctgcactgggtgtactgcatggaaaacctggacctgctcggccccacagatgtggatgccctgatgtccatgctgagaagcctgagcagagtggacctccagagacaggtgcagacactgatgggactgcacctgagcggacctagccacagccagcactacagacacacccct

SEQ ID NO: 3767 - DNA, 1869 bp, synthetic construct
  source 1..1869: mol_type = other DNA
atggccttaccagtgaccgccttgctcctgccgctggccttgctgctccacgccgccaggccggacatcgtgatgacccagagccctgccaccctgtccgtgtctccaggcgaaagagccaccctgagctgcagagcttcccagagcgtgtccaacgacgtcgtgtggtatcagcagaagcccggccaggcccccagactgctgatctactacgccagcaacagatacaccggcatccccgccagattcagcggctctggcagcggcaccgagttcaccctgacaatcagcagcctccagagcgaggacttcgccgtgtactactgtcagcaggactacaccagcccctggaccttcggccagggcaccaagctggaaatcaagagactcgagatccagaaccctgatcctgccgtgtaccagctgcgggatagcaagagcagcgacaagagcgtgtgtctgttcaccgacttcgacagccagaccaacgtgtcccagagcaaggactccgacgtgtacatcaccgataagtgcgtgctggacatgcggagcatggacttcaagagcaactccgccgtggcctggtccaacaagtccgatttcgcctgcgccaacgccttcaacaacagcattatccccgaggacacattcttcccaagccccgagagcagctgcgacgtgaagctggtggaaaagagcttcgagacagacaccaacctgaacttccagaacctgagcgtgatcggcttcagaatcctgctgctgaaagtggccggctttaacctgctgatgaccctgcggctgtggtccagccgcgccaagagaagcggatctggcgtgaagcagaccctgaatttcgacctgctgaagctggctggcgacgtggaatccaacccaggccctactagtatggactggatttggcgcatccttttccttgtcggcgctgctaccggcgcgcattccttcgaagaggtgcaactggtgcagagcggagccgaagtgaagaaacctggggccagcgtgcgggtgtcctgcaaggccagcggctacacctttaccaactacggcatgaactgggtgcgccaggctcctggacagggcctggaatggatgggctggatcaacacctacaccggcgagcccacctacgccgacgacttcaagggcagagtgaccatgaccaccgacaccagcacctccaccgcctacatggaactgcggagcctgagaagcgacgacaccgccgtgtattattgcgcccggatcggcgacagcagccccagcgattattggggccagggaaccctcgtgaccgtgtcctctacgcgtgaggacctgaagaacgtgttcccacctgaggtggccgtgttcgagcctagcgaggccgagatcagccacacccagaaagccaccctcgtgtgcctggctaccggcttctaccccgaccatgtggaactgtcttggtgggtcaacggcaaagaggtgcacagcggcgtgtgtaccgacccccagccactgaaagaacagcccgccctgaacgacagccggtactgcctgagcagcagactgagagtgtccgccaccttctggcagaacccccggaaccacttcagatgccaggtgcagttctacggcctgagcgagaacgacgagtggacccaggacagagccaagcccgtgacccagatcgtgtctgccgaagcctggggcagagccgattgcggctttaccagcgagagctaccagcagggcgtgctgagcgccaccatcctgtacgagatcctgctgggcaaggccaccctgtacgccgtgctggtgtctgccctggtgctgatggctatggtcaagcggaaggacagccgggga

SEQ ID NO: 3768 - DNA, 2535 bp, synthetic construct
  source 1..2535: mol_type = other DNA
atggccttaccagtgaccgccttgctcctgccgctggccttgctgctccacgccgccaggccggacatcgtgatgacccagagccctgccaccctgtccgtgtctccaggcgaaagagccaccctgagctgcagagcttcccagagcgtgtccaacgacgtcgtgtggtatcagcagaagcccggccaggcccccagactgctgatctactacgccagcaacagatacaccggcatccccgccagattcagcggctctggcagcggcaccgagttcaccctgacaatcagcagcctccagagcgaggacttcgccgtgtactactgtcagcaggactacaccagcccctggaccttcggccagggcaccaagctggaaatcaagagactcgagatccagaaccctgatcctgccgtgtaccagctgcgggatagcaagagcagcgacaagagcgtgtgtctgttcaccgacttcgacagccagaccaacgtgtcccagagcaaggactccgacgtgtacatcaccgataagtgcgtgctggacatgcggagcatggacttcaagagcaactccgccgtggcctggtccaacaagtccgatttcgcctgcgccaacgccttcaacaacagcattatccccgaggacacattcttcccaagccccgagagcagctgcgacgtgaagctggtggaaaagagcttcgagacagacaccaacctgaacttccagaacctgagcgtgatcggcttcagaatcctgctgctgaaagtggccggctttaacctgctgatgaccctgcggctgtggtccagccgcgccaagagaagcggatctggcgtgaagcagaccctgaatttcgacctgctgaagctggctggcgacgtggaatccaacccaggccctactagtatggactggatttggcgcatccttttccttgtcggcgctgctaccggcgcgcattccttcgaagaggtgcaactggtgcagagcggagccgaagtgaagaaacctggggccagcgtgcgggtgtcctgcaaggccagcggctacacctttaccaactacggcatgaactgggtgcgccaggctcctggacagggcctggaatggatgggctggatcaacacctacaccggcgagcccacctacgccgacgacttcaagggcagagtgaccatgaccaccgacaccagcacctccaccgcctacatggaactgcggagcctgagaagcgacgacaccgccgtgtattattgcgcccggatcggcgacagcagccccagcgattattggggccagggaaccctcgtgaccgtgtcctctacgcgtgaggacctgaagaacgtgttcccacctgaggtggccgtgttcgagcctagcgaggccgagatcagccacacccagaaagccaccctcgtgtgcctggctaccggcttctaccccgaccatgtggaactgtcttggtgggtcaacggcaaagaggtgcacagcggcgtgtgtaccgacccccagccactgaaagaacagcccgccctgaacgacagccggtactgcctgagcagcagactgagagtgtccgccaccttctggcagaacccccggaaccacttcagatgccaggtgcagttctacggcctgagcgagaacgacgagtggacccaggacagagccaagcccgtgacccagatcgtgtctgccgaagcctggggcagagccgattgcggctttaccagcgagagctaccagcagggcgtgctgagcgccaccatcctgtacgagatcctgctgggcaaggccaccctgtacgccgtgctggtgtctgccctggtgctgatggctatggtcaagcggaaggacagccggggaagggccaagcgatctggatctggagcaacaaacttctcactactcaaacaagcaggtgacgtggaggagaatcccgggccttctagaggcgggatccacaccatggctacctacgaggtgctgtgcgaggtggcaagaaagctgggcaccgacgacagagaagtggtgctgttcctgctgaacgtgttcatccctcagcctacactggcccagctgatcggtgcactgagagccctgaaagaggaaggccggctgacctttcctctgctggccgaatgcctgttcagagccggaagaagggatctgctgcgggacctgctgcatctggaccccagatttctggaaagacacctggccggcaccatgagctacttcagcccttaccagctgaccgtgctgcacgttgacggcgaactgtgcgccagagatattcggagcctgatcttcctgagcaaggacaccatcggcagccggtctacccctcagacatttctgcactgggtgtactgcatggaaaacctggacctgctcggccccacagatgtggatgccctgatgtccatgctgagaagcctgagcagagtggacctccagagacaggtgcagacactgatgggactgcacctgagcggacctagccacagccagcactacagacacacccct

SEQ ID NO: 3769 - DNA, 2694 bp, synthetic construct
  source 1..2694: mol_type = other DNA
atggccttaccagtgaccgccttgctcctgccgctggccttgctgctccacgccgccaggccgctcgaggggaaaccaattcccaaccctcttctgggactggattcaaccggcagcggcgaggacctgaagaacgtgttcccacctgaggtggccgtgttcgagcctagcaaggccgagatcgcccacacccagaaagccaccctcgtgtgcctggctaccggcttctaccccgaccatgtggaactgtcttggtgggtcaacggcaaagaggtgcacagcggcgtgtgtaccgacccccagccactgaaagaacagcccgccctgaacgacagccggtactgcctgagcagcagactgagagtgtccgccaccttctggcagaacccccggaaccacttcagatgccaggtgcagttctacggcctgagcgagaacgacgagtggacccaggacagagccaagcccgtgacccagatcgtgtctgccgaagcctggggcagagccgattgcggcatcaccagcgccagctaccaccagggcgtgctgagcgccaccatcctgtacgagatcctgctgggcaaggccaccctgtacgccgtgctggtgtctgccctggtgctgatggctatggtcaagcggaaggacagccggggaagggccaagcgatctggatctggagcaacaaacttctcactactcaaacaagcaggtgacgtggaggagaatcccgggcctactagcatggccttaccagtgaccgccttgctcctgccgctggccttgctgctccacgccgccaggccggacatcgtgatgacccagagccctgccaccctgtccgtgtctccaggcgaaagagccaccctgagctgcagagcttcccagagcgtgtccaacgacgtcgtgtggtatcagcagaagcccggccaggcccccagactgctgatctactacgccagcaacagatacaccggcatccccgccagattcagcggctctggcagcggcaccgagttcaccctgacaatcagcagcctccagagcgaggacttcgccgtgtactactgtcagcaggactacaccagcccctggaccttcggccagggcaccaagctggaaatcaagagaggcggaggcggaagtggaggcggaggatctggcggcggaggctctgaggtgcaactggtgcagagcggagccgaagtgaagaaacctggggccagcgtgcgggtgtcctgcaaggccagcggctacacctttaccaactacggcatgaactgggtgcgccaggctcctggacagggcctggaatggatgggctggatcaacacctacaccggcgagcccacctacgccgacgacttcaagggcagagtgaccatgaccaccgacaccagcacctccaccgcctacatggaactgcggagcctgagaagcgacgacaccgccgtgtattattgcgcccggatcggcgacagcagccccagcgattattggggccagggaaccctcgtgaccgtgtcctctacgcgtgagcagaaactgatctcggaagaggatgggagcggcatccagaaccctgatcctgccgtgtaccagctgcgggatagcaagagcagcgacaagagcgtgtgtctgttcaccgacttcgacagccagaccaacgtgtcccagagcaaggactccgacgtgtacatcaccgataagtgcgtgctggacatgcggagcatggacttcaagagcaactccgccgtggcctggtccaacaagtccgatttcgcctgcgccaacgccttcaacaacagcattatccccgaggacacattcttcccaagcagcgacgtgccctgcgacgtgaagctggtggaaaagagcttcgagacagacaccaacctgaacttccagaacctgagcgtgatcggcttcagaatcctgctgctgaaagtggccggctttaacctgctgatgaccctgcggctgtggtccagccgcgccaagagaagcggatctggcgtgaagcagaccctgaatttcgacctgctgaagctggctggcgacgtggaatccaacccaggcccttctagaggccatatgaccgagtacaagcccacggtgcgcctcgccacccgcgacgacgtccccagggccgtacgcaccctcgccgccgcgttcgccgactaccccgccacgcgccacaccgtcgatccggaccgccacatcgagcgggtcaccgagctgcaagaactcttcctcacgcgcgtcgggctcgacatcggcaaggtgtgggtcgcggacgacggcgccgcggtggcggtctggaccacgccggagagcgtcgaagcgggggcggtgttcgccgagatcggcccgcgcatggccgagttgagcggttcccggctggccgcgcagcaacagatggaaggcctcctggcgccgcaccggcccaaggagcccgcgtggttcctggccaccgtcggcgtctcgcccgaccaccagggcaagggtctgggcagcgccgtcgtgctccccggagtggaggcggccgagcgcgccggggtgcccgccttcctggagacctccgcgccccgcaacctccccttctacgagcggctcggcttcaccgtcaccgccgacgtcgaggtgcccgaaggaccgcgcacctggtgcatgacccgcaagcccggtgcctga

SEQ ID NO: 3770 - DNA, 2697 bp, synthetic construct
  source 1..2697: mol_type = other DNA
atggccttaccagtgaccgccttgctcctgccgctggccttgctgctccacgccgccaggccgctcgagcagaaactgatctcggaagaggatctgggctccggcgatcgccctgatcctgccgtgtaccagctgcgggatagcaagagcagcgacaagagcgtgtgtctgttcaccgacttcgacagccagaccaacgtgtcccagagcaaggactccgacgtgtacatcaccgataagtgcgtgctggacatgcggagcatggacttcaagagcaactccgccgtggcctggtccaacaagtccgatttcgcctgcgccaacgccttcaacaacagcattatccccgaggacacattcttcccaagccccgagagcagctgcgacgtgaagctggtggaaaagagcttcgagacagacaccaacctgaacttccagaacctgagcgtgatcggcttcagaatcctgctgctgaaagtggccggctttaacctgctgatgaccctgcggctgtggtccagctctagtcgcgccaagagaagcggatctggcgtgaagcagaccctgaatttcgacctgctgaagctggctggcgacgtggaatccaacccaggccccactagcatggccttaccagtgaccgccttgctcctgccgctggccttgctgctccacgccgccaggccggacatcgtgatgacccagagccctgccaccctgtccgtgtctccaggcgaaagagccaccctgagctgcagagcttcccagagcgtgtccaacgacgtcgtgtggtatcagcagaagcccggccaggcccccagactgctgatctactacgccagcaacagatacaccggcatccccgccagattcagcggctctggcagcggcaccgagttcaccctgacaatcagcagcctccagagcgaggacttcgccgtgtactactgtcagcaggactacaccagcccctggaccttcggccagggcaccaagctggaaatcaagagaggcggaggcggaagtggaggcggaggatctggcggcggaggctctgaggtgcaactggtgcagagcggagccgaagtgaagaaacctggggccagcgtgcgggtgtcctgcaaggccagcggctacacctttaccaactacggcatgaactgggtgcgccaggctcctggacagggcctggaatggatgggctggatcaacacctacaccggcgagcccacctacgccgacgacttcaagggcagagtgaccatgaccaccgacaccagcacctccaccgcctacatggaactgcggagcctgagaagcgacgacaccgccgtgtattattgcgcccggatcggcgacagcagccccagcgattattggggccagggaaccctcgtgaccgtgtcctctacgcgtgggaaaccaattcccaaccctcttctgggactggattcaaccggcagcggcgaggacctgaagaacgtgttcccacctgaggtggccgtgttcgagcctagcgaggccgagatcagccacacccagaaagccaccctcgtgtgcctggctaccggcttctaccccgaccatgtggaactgtcttggtgggtcaacggcaaagaggtgcacagcggcgtgtgtaccgacccccagccactgaaagaacagcccgccctgaacgacagccggtactgcctgagcagcagactgagagtgtccgccaccttctggcagaacccccggaaccacttcagatgccaggtgcagttctacggcctgagcgagaacgacgagtggacccaggacagagccaagcccgtgacccagatcgtgtctgccgaagcctggggcagagccgattgcggctttaccagcgagagctaccagcagggcgtgctgagcgccaccatcctgtacgagatcctgctgggcaaggccaccctgtacgccgtgctggtgtctgccctggtgctgatggctatggtcaagcggaaggacagccggggaagggccaagcgatctggatctggagcaacaaacttctcactactcaaacaagcaggtgacgtggaggagaatcccgggccttctagaggccatatgaccgagtacaagcccacggtgcgcctcgccacccgcgacgacgtccccagggccgtacgcaccctcgccgccgcgttcgccgactaccccgccacgcgccacaccgtcgatccggaccgccacatcgagcgggtcaccgagctgcaagaactcttcctcacgcgcgtcgggctcgacatcggcaaggtgtgggtcgcggacgacggcgccgcggtggcggtctggaccacgccggagagcgtcgaagcgggggcggtgttcgccgagatcggcccgcgcatggccgagttgagcggttcccggctggccgcgcagcaacagatggaaggcctcctggcgccgcaccggcccaaggagcccgcgtggttcctggccaccgtcggcgtctcgcccgaccaccagggcaagggtctgggcagcgccgtcgtgctccccggagtggaggcggccgagcgcgccggggtgcccgccttcctggagacctccgcgccccgcaacctccccttctacgagcggctcggcttcaccgtcaccgccgacgtcgaggtgcccgaaggaccgcgcacctggtgcatgacccgcaagcccggtgcctga

SEQ ID NO: 3771 - DNA, 2559 bp, synthetic construct
  source 1..2559: mol_type = other DNA
atggccttaccagtgaccgccttgctcctgccgctggccttgctgctccacgccgccaggccggacatcgtgatgacccagagccctgccaccctgtccgtgtctccaggcgaaagagccaccctgagctgcagagcttcccagagcgtgtccaacgacgtcgtgtggtatcagcagaagcccggccaggcccccagactgctgatctactacgccagcaacagatacaccggcatccccgccagattcagcggctctggcagcggcaccgagttcaccctgacaatcagcagcctccagagcgaggacttcgccgtgtactactgtcagcaggactacaccagcccctggaccttcggccagggcaccaagctggaaatcaagagactcgaggacctgaagaacgtgttcccacctgaggtggccgtgttcgagcctagcgaggccgagatcagccacacccagaaagccaccctcgtgtgcctggctaccggcttctaccccgaccatgtggaactgtcttggtgggtcaacggcaaagaggtgcacagcggcgtgtctaccgacccccagccactgaaagaacagcccgccctgaacgacagccggtactgcctgagcagcagactgagagtgtccgccaccttctggcagaacccccggaaccacttcagatgccaggtgcagttctacggcctgagcgagaacgacgagtggacccaggacagagccaagcccgtgacccagatcgtgtctgccgaagcctggggcagagccgattgcggctttaccagcgagagctaccagcagggcgtgctgagcgccaccatcctgtacgagatcctgctgggcaaggccaccctgtacgccgtgctggtgtctgccctggtgctgatggctatggtcaagcggaaggacagccggggaagggccaagcgatctggatctggagcaacaaacttctcactactcaaacaagcaggtgacgtggaggagaatcccgggcctactagtatggactggatttggcgcatccttttccttgtcggcgctgctaccggcgcgcattccttcgaagaggtgcaactggtgcagagcggagccgaagtgaagaaacctggggccagcgtgcgggtgtcctgcaaggccagcggctacacctttaccaactacggcatgaactgggtgcgccaggctcctggacagggcctggaatggatgggctggatcaacacctacaccggcgagcccacctacgccgacgacttcaagggcagagtgaccatgaccaccgacaccagcacctccaccgcctacatggaactgcggagcctgagaagcgacgacaccgccgtgtattattgcgcccggatcggcgacagcagccccagcgattattggggccagggaaccctcgtgaccgtgtcctctacgcgtatccagaaccctgatcctgccgtgtaccagctgcgggatagcaagagcagcgacaagagcgtgtgtctgttcaccgacttcgacagccagaccaacgtgtcccagagcaaggactccgacgtgtacatcaccgataagaccgtgctggacatgcggagcatggacttcaagagcaactccgccgtggcctggtccaacaagtccgatttcgcctgcgccaacgccttcaacaacagcattatccccgaggacacattcttcccaagccccgagagcagctgcgacgtgaagctggtggaaaagagcttcgagacagacaccaacctgaacttccagaacctgagcgtgatcggcttcagaatcctgctgctgaaagtggccggctttaacctgctgatgaccctgcggctgtggtccagccgcgccaagagaagcggatctggcgtgaagcagaccctgaatttcgacctgctgaagctggctggcgacgtggaatccaacccaggcccttctagaggccatatgaccgagtacaagcccacggtgcgcctcgccacccgcgacgacgtccccagggccgtacgcaccctcgccgccgcgttcgccgactaccccgccacgcgccacaccgtcgatccggaccgccacatcgagcgggtcaccgagctgcaagaactcttcctcacgcgcgtcgggctcgacatcggcaaggtgtgggtcgcggacgacggcgccgcggtggcggtctggaccacgccggagagcgtcgaagcgggggcggtgttcgccgagatcggcccgcgcatggccgagttgagcggttcccggctggccgcgcagcaacagatggaaggcctcctggcgccgcaccggcccaaggagcccgcgtggttcctggccaccgtcggcgtctcgcccgaccaccagggcaagggtctgggcagcgccgtcgtgctccccggagtggaggcggccgagcgcgccggggtgcccgccttcctggagacctccgcgccccgcaacctccccttctacgagcggctcggcttcaccgtcaccgccgacgtcgaggtgcccgaaggaccgcgcacctggtgcatgacccgcaagcccggtgcctga

SEQ ID NO: 3772 - DNA, 2805 bp, synthetic construct
  source 1..2805: mol_type = other DNA
atggccttaccagtgaccgccttgctcctgccgctggccttgctgctccacgccgccaggccggacatcgtgatgacccagagccctgccaccctgtccgtgtctccaggcgaaagagccaccctgagctgcagagcttcccagagcgtgtccaacgacgtcgtgtggtatcagcagaagcccggccaggcccccagactgctgatctactacgccagcaacagatacaccggcatccccgccagattcagcggctctggcagcggcaccgagttcaccctgacaatcagcagcctccagagcgaggacttcgccgtgtactactgtcagcaggactacaccagcccctggaccttcggccagggcaccaagctggaaatcaagagactcgaggacctgaagaacgtgttcccacctgaggtggccgtgttcgagcctagcgaggccgagatcagccacacccagaaagccaccctcgtgtgcctggctaccggcttctaccccgaccatgtggaactgtcttggtgggtcaacggcaaagaggtgcacagcggcgtgtctaccgacccccagccactgaaagaacagcccgccctgaacgacagccggtactgcctgagcagcagactgagagtgtccgccaccttctggcagaacccccggaaccacttcagatgccaggtgcagttctacggcctgagcgagaacgacgagtggacccaggacagagccaagcccgtgacccagatcgtgtctgccgaagcctggggcagagccgattgcggctttaccagcgagagctaccagcagggcgtgctgagcgccaccatcctgtacgagatcctgctgggcaaggccaccctgtacgccgtgctggtgtctgccctggtgctgatggctatggtcaagcggaaggacagccggggaagggccaagcgatctggatctggagcaacaaacttctcactactcaaacaagcaggtgacgtggaggagaatcccgggcctactagtatggactggatttggcgcatccttttccttgtcggcgctgctaccggcgcgcattccttcgaagaggtgcaactggtgcagagcggagccgaagtgaagaaacctggggccagcgtgcgggtgtcctgcaaggccagcggctacacctttaccaactacggcatgaactgggtgcgccaggctcctggacagggcctggaatggatgggctggatcaacacctacaccggcgagcccacctacgccgacgacttcaagggcagagtgaccatgaccaccgacaccagcacctccaccgcctacatggaactgcggagcctgagaagcgacgacaccgccgtgtattattgcgcccggatcggcgacagcagccccagcgattattggggccagggaaccctcgtgaccgtgtcctctacgcgtgagcagaaactgatctcggaagaggatgggagcggcaccccattcccttctctggcccctcccatcatgctgctggtggacggcaagcagcagatggtggtcgtgtgcctggtgctggatgtggccccacctggactggacagccccatctggtttagcgccggcaatggctctgccctggacgcctttacctacggcccaagccctgccaccgatggcacctggacaaatctggcccacctgagcctgcccagcgaggaactggcttcttgggagcctctcgtgtgccacacaggacctggcgctgagggacacagcagatccacccagcctatgcacctgtctggcgaggccagcaccgccagaacctgtcctcaggaacctctgagaggcacccctggcggagcactgtggctgggagtgctgagactgctgctgttcaagctgctgctgtttgacctgctgctgacctgctcctgtctgtgcgatcctgccggccctctgccttctcctgccaccaccacaagactgagagccctgggcagccacagactgcaccctgccacagagacaggcggcagagaggccacaagcagccctagaccccagcccagagacagaagatggggcgataccccccctggcagaaagcctggatctccagtccgcgccaagagaagcggatctggcgtgaagcagaccctgaatttcgacctgctgaagctggctggcgacgtggaatccaacccaggcccttctagaggccatatgaccgagtacaagcccacggtgcgcctcgccacccgcgacgacgtccccagggccgtacgcaccctcgccgccgcgttcgccgactaccccgccacgcgccacaccgtcgatccggaccgccacatcgagcgggtcaccgagctgcaagaactcttcctcacgcgcgtcgggctcgacatcggcaaggtgtgggtcgcggacgacggcgccgcggtggcggtctggaccacgccggagagcgtcgaagcgggggcggtgttcgccgagatcggcccgcgcatggccgagttgagcggttcccggctggccgcgcagcaacagatggaaggcctcctggcgccgcaccggcccaaggagcccgcgtggttcctggccaccgtcggcgtctcgcccgaccaccagggcaagggtctgggcagcgccgtcgtgctccccggagtggaggcggccgagcgcgccggggtgcccgccttcctggagacctccgcgccccgcaacctccccttctacgagcggctcggcttcaccgtcaccgccgacgtcgaggtgcccgaaggaccgcgcacctggtgcatgacccgcaagcccggtgcctga

SEQ ID NO: 3773 - DNA, 2859 bp, synthetic construct
  source 1..2859: mol_type = other DNA
atggccttaccagtgaccgccttgctcctgccgctggccttgctgctccacgccgccaggccgctcgaggacctgaagaacgtgttcccacctgaggtggccgtgttcgagcctagcgaggccgagatcagccacacccagaaagccaccctcgtgtgcctggctaccggcttctaccccgaccatgtggaactgtcttggtgggtcaacggcaaagaggtgcacagcggcgtgtctaccgacccccagccactgaaagaacagcccgccctgaacgacagccggtactgcctgagcagcagactgagagtgtccgccaccttctggcagaacccccggaaccacttcagatgccaggtgcagttctacggcctgagcgagaacgacgagtggacccaggacagagccaagcccgtgacccagatcgtgtctgccgaagcctggggcagagccgattgcggctttaccagcgagagctaccagcagggcgtgctgagcgccaccatcctgtacgagatcctgctgggcaaggccaccctgtacgccgtgctggtgtctgccctggtgctgatggctatggtcaagcggaaggacagccggggaagggccaagcgatctggatctggagcaacaaacttctcactactcaaacaagcaggtgacgtggaggagaatcccgggcctactagcatggccttaccagtgaccgccttgctcctgccgctggccttgctgctccacgccgccaggccggacatcgtgatgacccagagccctgccaccctgtccgtgtctccaggcgaaagagccaccctgagctgcagagcttcccagagcgtgtccaacgacgtcgtgtggtatcagcagaagcccggccaggcccccagactgctgatctactacgccagcaacagatacaccggcatccccgccagattcagcggctctggcagcggcaccgagttcaccctgacaatcagcagcctccagagcgaggacttcgccgtgtactactgtcagcaggactacaccagcccctggaccttcggccagggcaccaagctggaaatcaagagaggcggaggcggaagtggaggcggaggatctggcggcggaggctctgaggtgcaactggtgcagagcggagccgaagtgaagaaacctggggccagcgtgcgggtgtcctgcaaggccagcggctacacctttaccaactacggcatgaactgggtgcgccaggctcctggacagggcctggaatggatgggctggatcaacacctacaccggcgagcccacctacgccgacgacttcaagggcagagtgaccatgaccaccgacaccagcacctccaccgcctacatggaactgcggagcctgagaagcgacgacaccgccgtgtattattgcgcccggatcggcgacagcagccccagcgattattggggccagggaaccctcgtgaccgtgtcctctacgcgtgagcagaaactgatctcggaagaggatctggggagcggcaccccattcccttctctggcccctcccatcatgctgctggtggacggcaagcagcagatggtggtcgtgtgcctggtgctggatgtggccccacctggactggacagccccatctggtttagcgccggcaatggctctgccctggacgcctttacctacggcccaagccctgccaccgatggcacctggacaaatctggcccacctgagcctgcccagcgaggaactggcttcttgggagcctctcgtgtgccacacaggacctggcgctgagggacacagcagatccacccagcctatgcacctgtctggcgaggccagcaccgccagaacctgtcctcaggaacctctgagaggcacccctggcggagcactgtggctgggagtgctgagactgctgctgttcaagctgctgctgtttgacctgctgctgacctgctcctgtctgtgcgatcctgccggccctctgccttctcctgccaccaccacaagactgagagccctgggcagccacagactgcaccctgccacagagacaggcggcagagaggccacaagcagccctagaccccagcccagagacagaagatggggcgataccccccctggcagaaagcctggatctccagtccgcgccaagagaagcggatctggcgtgaagcagaccctgaatttcgacctgctgaagctggctggcgacgtggaatccaacccaggcccttctagatctagaggccatatgaccgagtacaagcccacggtgcgcctcgccacccgcgacgacgtccccagggccgtacgcaccctcgccgccgcgttcgccgactaccccgccacgcgccacaccgtcgatccggaccgccacatcgagcgggtcaccgagctgcaagaactcttcctcacgcgcgtcgggctcgacatcggcaaggtgtgggtcgcggacgacggcgccgcggtggcggtctggaccacgccggagagcgtcgaagcgggggcggtgttcgccgagatcggcccgcgcatggccgagttgagcggttcccggctggccgcgcagcaacagatggaaggcctcctggcgccgcaccggcccaaggagcccgcgtggttcctggccaccgtcggcgtctcgcccgaccaccagggcaagggtctgggcagcgccgtcgtgctccccggagtggaggcggccgagcgcgccggggtgcccgccttcctggagacctccgcgccccgcaacctccccttctacgagcggctcggcttcaccgtcaccgccgacgtcgaggtgcccgaaggaccgcgcacctggtgcatgacccgcaagcccggtgcctga

SEQ ID NO: 3774 - DNA, 2670 bp, synthetic construct
  source 1..2670: mol_type = other DNA
atggccttaccagtgaccgccttgctcctgccgctggccttgctgctccacgccgccaggccggacatcgtgatgacccagagccctgccaccctgtccgtgtctccaggcgaaagagccaccctgagctgcagagcttcccagagcgtgtccaacgacgtcgtgtggtatcagcagaagcccggccaggcccccagactgctgatctactacgccagcaacagatacaccggcatccccgccagattcagcggctctggcagcggcaccgagttcaccctgacaatcagcagcctccagagcgaggacttcgccgtgtactactgtcagcaggactacaccagcccctggaccttcggccagggcaccaagctggaaatcaagagactcgaggggaaaccaattcccaaccctcttctgggactggattcaaccggcagcggcgacaagcagctggacgccgacgtgtcccccaagcctaccatcttcctgccctctatcgccgagacaaagctccagaaggccggcacctacctgtgcctgctggaaaagttcttcccagatgtgattaagatccactggcaggaaaagaagtccaacaccatcctgggcagccaggaaggcaacaccatgaagaccaacgacacctacatgaagttcagctggctgaccgtgcccgagaagtccctggacaaagaacacagatgcatcgtgcggcacgaaaacaacaagaacggcgtggaccaggaaatcatcttcccacccatcaagaccgatgtgattacaatggaccccaaggacaactgctccaaggacgccaacgataccctgctgctccagctgaccaacaccagcgcctactacatgtacttgttgctgctgctgaagtccgtggtgtacttcgccatcatcacatgctgcctgctgcggagaaccgccttctgctgcaacggcgagaagtctagggccaagcgatctggatctggagcaacaaacttctcactactcaaacaagcaggtgacgtggaggagaatcccgggcctactagtatggactggatttggcgcatccttttccttgtcggcgctgctaccggcgcgcattccttcgaagaggtgcaactggtgcagagcggagccgaagtgaagaaacctggggccagcgtgcgggtgtcctgcaaggccagcggctacacctttaccaactacggcatgaactgggtgcgccaggctcctggacagggcctggaatggatgggctggatcaacacctacaccggcgagcccacctacgccgacgacttcaagggcagagtgaccatgaccaccgacaccagcacctccaccgcctacatggaactgcggagcctgagaagcgacgacaccgccgtgtattattgcgcccggatcggcgacagcagccccagcgattattggggccagggaaccctcgtgaccgtgtcctctacgcgtgagcagaaactgatctcggaagaggatgggagcggcagccagcctcacaccaagcccagcgtgttcgtgatgaagaacggcaccaacgtggcctgcctcgtgaaagagttctaccccaaggacatcaggatcaacctggtgtccagcaagaagatcaccgagttcgaccccgccatcgtgatctcccccagcggcaagtacaacgccgtgaagctggggaagtacgaggacagcaacagcgtgacctgctccgtgcagcacgacaacaagaccgtgcacagcaccgactttgaagtgaaaaccgactccaccgaccacgtgaagcccaaagagacagagaacaccaagcagcccagcaagagctgccacaagcccaaggccatcgtgcacaccgagaaagtgaacatgatgagcctgaccgtgctgggcctgcggatgctgttcgccaaaaccgtggccgtgaacttcctgctgaccgccaagctgttcttcctccgcgccaagagaagcggatctggcgtgaagcagaccctgaatttcgacctgctgaagctggctggcgacgtggaatccaacccaggcccttctagaggccatatgaccgagtacaagcccacggtgcgcctcgccacccgcgacgacgtccccagggccgtacgcaccctcgccgccgcgttcgccgactaccccgccacgcgccacaccgtcgatccggaccgccacatcgagcgggtcaccgagctgcaagaactcttcctcacgcgcgtcgggctcgacatcggcaaggtgtgggtcgcggacgacggcgccgcggtggcggtctggaccacgccggagagcgtcgaagcgggggcggtgttcgccgagatcggcccgcgcatggccgagttgagcggttcccggctggccgcgcagcaacagatggaaggcctcctggcgccgcaccggcccaaggagcccgcgtggttcctggccaccgtcggcgtctcgcccgaccaccagggcaagggtctgggcagcgccgtcgtgctccccggagtggaggcggccgagcgcgccggggtgcccgccttcctggagacctccgcgccccgcaacctccccttctacgagcggctcggcttcaccgtcaccgccgacgtcgaggtgcccgaaggaccgcgcacctggtgcatgacccgcaagcccggtgcctga

SEQ ID NO: 3775 - DNA, 1881 bp, synthetic construct
  source 1..1881: mol_type = other DNA
atggccttaccagtgaccgccttgctcctgccgctggccttgctgctccacgccgccaggccggacatcgtgatgacccagagccctgccaccctgtccgtgtctccaggcgaaagagccaccctgagctgcagagcttcccagagcgtgtccaacgacgtcgtgtggtatcagcagaagcccggccaggcccccagactgctgatctactacgccagcaacagatacaccggcatccccgccagattcagcggctctggcagcggcaccgagttcaccctgacaatcagcagcctccagagcgaggacttcgccgtgtactactgtcagcaggactacaccagcccctggaccttcggccagggcaccaagctggaaatcaagagactcgagagccagcctcacaccaagcccagcgtgttcgtgatgaagaacggcaccaacgtggcctgcctcgtgaaagagttctaccccaaggacatcaggatcaacctggtgtccagcaagaagatcaccgagttcgaccccgccatcgtgatctcccccagcggcaagtacaacgccgtgaagctggggaagtacgaggacagcaacagcgtgacctgctccgtgcagcacgacaacaagaccgtgcacagcaccgactttgaagtgaaaaccgactccaccgaccacgtgaagcccaaagagacagagaacaccaagcagcccagcaagagctgccacaagcccaaggccatcgtgcacaccgagaaagtgaacatgatgagcctgaccgtgctgggcctgcggatgctgttcgccaaaaccgtggccgtgaacttcctgctgaccgccaagctgttcttcctcagggccaagcgatctggatctggagcaacaaacttctcactactcaaacaagcaggtgacgtggaggagaatcccgggcctactagtatggactggatttggcgcatccttttccttgtcggcgctgctaccggcgcgcattccttcgaagaggtgcaactggtgcagagcggagccgaagtgaagaaacctggggccagcgtgcgggtgtcctgcaaggccagcggctacacctttaccaactacggcatgaactgggtgcgccaggctcctggacagggcctggaatggatgggctggatcaacacctacaccggcgagcccacctacgccgacgacttcaagggcagagtgaccatgaccaccgacaccagcacctccaccgcctacatggaactgcggagcctgagaagcgacgacaccgccgtgtattattgcgcccggatcggcgacagcagccccagcgattattggggccagggaaccctcgtgaccgtgtcctctacgcgtgacaagcagctggacgccgacgtgtcccccaagcctaccatcttcctgccctctatcgccgagacaaagctccagaaggccggcacctacctgtgcctgctggaaaagttcttcccagatgtgattaagatccactggcaggaaaagaagtccaacaccatcctgggcagccaggaaggcaacaccatgaagaccaacgacacctacatgaagttcagctggctgaccgtgcccgagaagtccctggacaaagaacacagatgcatcgtgcggcacgaaaacaacaagaacggcgtggaccaggaaatcatcttcccacccatcaagaccgatgtgattacaatggaccccaaggacaactgctccaaggacgccaacgataccctgctgctccagctgaccaacaccagcgcctactacatgtacttgttgctgctgctgaagtccgtggtgtacttcgccatcatcacatgctgcctgctgcggagaaccgccttctgctgcaacggcgagaagtct

SEQ ID NO: 3776 - DNA, 2715 bp, synthetic construct
  source 1..2715: mol_type = other DNA
atggccttaccagtgaccgccttgctcctgccgctggccttgctgctccacgccgccaggccgctcgaggggaaaccaattcccaaccctcttctgggactggattcaaccggcagcggcgacaagcagctggacgccgacgtgtcccccaagcctaccatcttcctgccctctatcgccgagacaaagctccagaaggccggcacctacctgtgcctgctggaaaagttcttcccagatgtgattaagatccactggcaggaaaagaagtccaacaccatcctgggcagccaggaaggcaacaccatgaagaccaacgacacctacatgaagttcagctggctgaccgtgcccgagaagtccctggacaaagaacacagatgcatcgtgcggcacgaaaacaacaagaacggcgtggaccaggaaatcatcttcccacccatcaagaccgatgtgattacaatggaccccaaggacaactgctccaaggacgccaacgataccctgctgctccagctgaccaacaccagcgcctactacatgtacttgttgctgctgctgaagtccgtggtgtacttcgccatcatcacatgctgcctgctgcggagaaccgccttctgctgcaacggcgagaagtctagggccaagcgatctggatctggagcaacaaacttctcactactcaaacaagcaggtgacgtggaggagaatcccgggcctactagcatggccttaccagtgaccgccttgctcctgccgctggccttgctgctccacgccgccaggccggacatcgtgatgacccagagccctgccaccctgtccgtgtctccaggcgaaagagccaccctgagctgcagagcttcccagagcgtgtccaacgacgtcgtgtggtatcagcagaagcccggccaggcccccagactgctgatctactacgccagcaacagatacaccggcatccccgccagattcagcggctctggcagcggcaccgagttcaccctgacaatcagcagcctccagagcgaggacttcgccgtgtactactgtcagcaggactacaccagcccctggaccttcggccagggcaccaagctggaaatcaagagaggcggaggcggaagtggaggcggaggatctggcggcggaggctctgaggtgcaactggtgcagagcggagccgaagtgaagaaacctggggccagcgtgcgggtgtcctgcaaggccagcggctacacctttaccaactacggcatgaactgggtgcgccaggctcctggacagggcctggaatggatgggctggatcaacacctacaccggcgagcccacctacgccgacgacttcaagggcagagtgaccatgaccaccgacaccagcacctccaccgcctacatggaactgcggagcctgagaagcgacgacaccgccgtgtattattgcgcccggatcggcgacagcagccccagcgattattggggccagggaaccctcgtgaccgtgtcctctacgcgtgagcagaaactgatctcggaagaggatgggagcggcagccagcctcacaccaagcccagcgtgttcgtgatgaagaacggcaccaacgtggcctgcctcgtgaaagagttctaccccaaggacatcaggatcaacctggtgtccagcaagaagatcaccgagttcgaccccgccatcgtgatctcccccagcggcaagtacaacgccgtgaagctggggaagtacgaggacagcaacagcgtgacctgctccgtgcagcacgacaacaagaccgtgcacagcaccgactttgaagtgaaaaccgactccaccgaccacgtgaagcccaaagagacagagaacaccaagcagcccagcaagagctgccacaagcccaaggccatcgtgcacaccgagaaagtgaacatgatgagcctgaccgtgctgggcctgcggatgctgttcgccaaaaccgtggccgtgaacttcctgctgaccgccaagctgttcttcctccgcgccaagagaagcggatctggcgtgaagcagaccctgaatttcgacctgctgaagctggctggcgacgtggaatccaacccaggcccttctagaggccatatgaccgagtacaagcccacggtgcgcctcgccacccgcgacgacgtccccagggccgtacgcaccctcgccgccgcgttcgccgactaccccgccacgcgccacaccgtcgatccggaccgccacatcgagcgggtcaccgagctgcaagaactcttcctcacgcgcgtcgggctcgacatcggcaaggtgtgggtcgcggacgacggcgccgcggtggcggtctggaccacgccggagagcgtcgaagcgggggcggtgttcgccgagatcggcccgcgcatggccgagttgagcggttcccggctggccgcgcagcaacagatggaaggcctcctggcgccgcaccggcccaaggagcccgcgtggttcctggccaccgtcggcgtctcgcccgaccaccagggcaagggtctgggcagcgccgtcgtgctccccggagtggaggcggccgagcgcgccggggtgcccgccttcctggagacctccgcgccccgcaacctccccttctacgagcggctcggcttcaccgtcaccgccgacgtcgaggtgcccgaaggaccgcgcacctggtgcatgacccgcaagcccggtgcctga

SEQ ID NO: 3777 - DNA, 3090 bp, synthetic construct
  source 1..3090: mol_type = other DNA
atggccttaccagtgaccgccttgctcctgccgctggccttgctgctccacgccgccaggccggacatcgtgatgacccagagccctgccaccctgtccgtgtctccaggcgaaagagccaccctgagctgcagagcttcccagagcgtgtccaacgacgtcgtgtggtatcagcagaagcccggccaggcccccagactgctgatctactacgccagcaacagatacaccggcatccccgccagattcagcggctctggcagcggcaccgagttcaccctgacaatcagcagcctccagagcgaggacttcgccgtgtactactgtcagcaggactacaccagcccctggaccttcggccagggcaccaagctggaaatcaagagaggacagcctaaggccaatcctaccgtgacactgttccctccaagcagcgaagaactccaggccaacaaggccacacttgtgtgcctgatctccgacttctaccctggggctgtgacagtggcttggaaggccgatggatctcctgtgaaagccggcgtggaaaccaccaagccatccaagcagagcaacaacaaatacgccgccagctcctacctgagcctgacacctgagcagtggaagtcccacagatcctacagctgccaagtgacccacgaaggcagcaccgtggaaaagacagtggcccctacagagtgcagcggatcccagagcttcggcctgctggaccccaagctgtgctacctgctggatggcatcctgttcatctacggcgtgatcctgaccgccctgttcctgagagtgaagttcagcagaagcgccgacgcccctgcctaccagcagggacagaaccaactgtacaacgagctgaacctgggcagacgggaagagtacgacgtgctggacaagcggagaggcagggaccctgagatgggcggaaagccccagcggagaaagaacccccaggaaggactgtataacgaactccagaaagacaagatggccgaagcctacagcgagatcggcatgaagggcgagcggagaagaggcaagggccacgatggcctgtaccagggcctgagcaccgccaccaaggacacctatgacgccctgcacatgcaggccctgcctccaagaagggccaagcgatctggatctggagcaacaaacttctcactactcaaacaagcaggtgacgtggaggagaatcccgggcctactagtatggactggatttggcgcatccttttccttgtcggcgctgctaccggcgcgcattccttcgaagaggtgcaactggtgcagagcggagccgaagtgaagaaacctggggccagcgtgcgggtgtcctgcaaggccagcggctacacctttaccaactacggcatgaactgggtgcgccaggctcctggacagggcctggaatggatgggctggatcaacacctacaccggcgagcccacctacgccgacgacttcaagggcagagtgaccatgaccaccgacaccagcacctccaccgcctacatggaactgcggagcctgagaagcgacgacaccgccgtgtattattgcgcccggatcggcgacagcagccccagcgattattggggccagggaaccctcgtgaccgtgtcctctgcctctacaaagggaccctccgtgtttcctctggctcccagcagcaagtctacaagcggaggaacagccgctctgggctgcctggtcaaggattactttcccgagcctgtgaccgtgtcctggaatagcggagcactgacaagcggcgtgcacacctttccagccgtgctgcaaagcagcggcctgtactctctgagcagcgtggtcacagtgcctagctctagcctgggcacccagacctacatctgcaatgtgaaccacaagcctagcaacaccaaggtggacaagagagtggaacccaagagctgtggtacccagagttttgggttgttggaccctaaattgtgctatctgttggacggaatcctgttcatttacggagtgatcctgaccgcattgttcctgcgggttaagttttccagatccgcagacgcacccgcttaccaacaagggcagaaccaactctacaatgaacttaatttggggcggagggaagagtacgacgttctggacaaaaggaggggacgagatcccgagatgggcggaaagcctcagcgaaggaagaatccgcaagaggggctttataacgaactccagaaagataaaatggcagaagcctatagtgagattgggatgaagggagaaaggaggaggggtaaaggtcacgatgggttgtaccaaggattgagcacagccactaaagatacctatgatgcgctccacatgcaggccctgccgccaagacgcgccaagagaagcggatctggcgtgaagcagaccctgaatttcgacctgctgaagctggctggcgacgtggaatccaacccaggcccttctagaggccatatgaccgagtacaagcccacggtgcgcctcgccacccgcgacgacgtccccagggccgtacgcaccctcgccgccgcgttcgccgactaccccgccacgcgccacaccgtcgatccggaccgccacatcgagcgggtcaccgagctgcaagaactcttcctcacgcgcgtcgggctcgacatcggcaaggtgtgggtcgcggacgacggcgccgcggtggcggtctggaccacgccggagagcgtcgaagcgggggcggtgttcgccgagatcggcccgcgcatggccgagttgagcggttcccggctggccgcgcagcaacagatggaaggcctcctggcgccgcaccggcccaaggagcccgcgtggttcctggccaccgtcggcgtctcgcccgaccaccagggcaagggtctgggcagcgccgtcgtgctccccggagtggaggcggccgagcgcgccggggtgcccgccttcctggagacctccgcgccccgcaacctccccttctacgagcggctcggcttcaccgtcaccgccgacgtcgaggtgcccgaaggaccgcgcacctggtgcatgacccgcaagcccggtgcctga

SEQ ID NO: 3778 - DNA, 2445 bp, synthetic construct
  source 1..2445: mol_type = other DNA
atggccttaccagtgaccgccttgctcctgccgctggccttgctgctccacgccgccaggccggacatcgtgatgacccagagccctgccaccctgtccgtgtctccaggcgaaagagccaccctgagctgcagagcttcccagagcgtgtccaacgacgtcgtgtggtatcagcagaagcccggccaggcccccagactgctgatctactacgccagcaacagatacaccggcatccccgccagattcagcggctctggcagcggcaccgagttcaccctgacaatcagcagcctccagagcgaggacttcgccgtgtactactgtcagcaggactacaccagcccctggaccttcggccagggcaccaagctggaaatcaagagactcgaggacctgaagaacgtgttcccacctgaggtggccgtgttcgagcctagcgaggccgagatcagccacacccagaaagccaccctcgtgtgcctggctaccggcttctaccccgaccatgtggaactgtcttggtgggtcaacggcaaagaggtgcacagcggcgtgtctaccgacccccagccactgaaagaacagcccgccctgaacgacagccggtactgcctgagcagcagactgagagtgtccgccaccttctggcagaacccccggaaccacttcagatgccaggtgcagttctacggcctgagcgagaacgacgagtggacccaggacagagccaagcccgtgacccagatcgtgtctgccgaagcctggggcagagccgattgcggatcccagagcttcggcctgctggaccccaagctgtgctacctgctggatggcatcctgttcatctacggcgtgatcctgaccgccctgttcctgagagtgaagttcagcagaagcgccgacgcccctgcctaccagcagggacagaaccaactgtacaacgagctgaacctgggcagacgggaagagtacgacgtgctggacaagcggagaggcagggaccctgagatgggcggaaagccccagcggagaaagaacccccaggaaggactgtataacgaactccagaaagacaagatggccgaagcctacagcgagatcggcatgaagggcgagcggagaagaggcaagggccacgatggcctgtaccagggcctgagcaccgccaccaaggacacctatgacgccctgcacatgcaggccctgcctccaagaagggccaagcgatctggatctggagcaacaaacttctcactactcaaacaagcaggtgacgtggaggagaatcccgggcctactagtatggactggatttggcgcatccttttccttgtcggcgctgctaccggcgcgcattccttcgaagaggtgcaactggtgcagagcggagccgaagtgaagaaacctggggccagcgtgcgggtgtcctgcaaggccagcggctacacctttaccaactacggcatgaactgggtgcgccaggctcctggacagggcctggaatggatgggctggatcaacacctacaccggcgagcccacctacgccgacgacttcaagggcagagtgaccatgaccaccgacaccagcacctccaccgcctacatggaactgcggagcctgagaagcgacgacaccgccgtgtattattgcgcccggatcggcgacagcagccccagcgattattggggccagggaaccctcgtgaccgtgtcctctacgcgtatccagaaccctgatcctgccgtgtaccagctgcgggatagcaagagcagcgacaagagcgtgtgtctgttcaccgacttcgacagccagaccaacgtgtcccagagcaaggactccgacgtgtacatcaccgataagaccgtgctggacatgcggagcatggacttcaagagcaactccgccgtggcctggtccaacaagtccgatttcgcctgcgccaacgccttcaacaacagcattatccccgaggacacattcttcccaagccccgagagcagctgcggtacccagagttttgggttgttggaccctaaattgtgctatctgttggacggaatcctgttcatttacggagtgatcctgaccgcattgttcctgcgggttaagttttccagatccgcagacgcacccgcttaccaacaagggcagaaccaactctacaatgaacttaatttggggcggagggaagagtacgacgttctggacaaaaggaggggacgagatcccgagatgggcggaaagcctcagcgaaggaagaatccgcaagaggggctttataacgaactccagaaagataaaatggcagaagcctatagtgagattgggatgaagggagaaaggaggaggggtaaaggtcacgatgggttgtaccaaggattgagcacagccactaaagatacctatgatgcgctccacatgcaggccctgccgccaaga

SEQ ID NO: 3779 - DNA, 2445 bp, synthetic construct
  source 1..2445: mol_type = other DNA
atggccttaccagtgaccgccttgctcctgccgctggccttgctgctccacgccgccaggccggacatcgtgatgacccagagccctgccaccctgtccgtgtctccaggcgaaagagccaccctgagctgcagagcttcccagagcgtgtccaacgacgtcgtgtggtatcagcagaagcccggccaggcccccagactgctgatctactacgccagcaacagatacaccggcatccccgccagattcagcggctctggcagcggcaccgagttcaccctgacaatcagcagcctccagagcgaggacttcgccgtgtactactgtcagcaggactacaccagcccctggaccttcggccagggcaccaagctggaaatcaagagactcgaggacctgaagaacgtgttcccacctgaggtggccgtgttcgagcctagcaaggccgagatcgcccacacccagaaagccaccctcgtgtgcctggctaccggcttctaccccgaccatgtggaactgtcttggtgggtcaacggcaaagaggtgcacagcggcgtgtgtaccgacccccagccactgaaagaacagcccgccctgaacgacagccggtactgcctgagcagcagactgagagtgtccgccaccttctggcagaacccccggaaccacttcagatgccaggtgcagttctacggcctgagcgagaacgacgagtggacccaggacagagccaagcccgtgacccagatcgtgtctgccgaagcctggggcagagccgattgcggatcccagagcttcggcctgctggaccccaagctgtgctacctgctggatggcatcctgttcatctacggcgtgatcctgaccgccctgttcctgagagtgaagttcagcagaagcgccgacgcccctgcctaccagcagggacagaaccaactgtacaacgagctgaacctgggcagacgggaagagtacgacgtgctggacaagcggagaggcagggaccctgagatgggcggaaagccccagcggagaaagaacccccaggaaggactgtataacgaactccagaaagacaagatggccgaagcctacagcgagatcggcatgaagggcgagcggagaagaggcaagggccacgatggcctgtaccagggcctgagcaccgccaccaaggacacctatgacgccctgcacatgcaggccctgcctccaagaagggccaagcgatctggatctggagcaacaaacttctcactactcaaacaagcaggtgacgtggaggagaatcccgggcctactagtatggactggatttggcgcatccttttccttgtcggcgctgctaccggcgcgcattccttcgaagaggtgcaactggtgcagagcggagccgaagtgaagaaacctggggccagcgtgcgggtgtcctgcaaggccagcggctacacctttaccaactacggcatgaactgggtgcgccaggctcctggacagggcctggaatggatgggctggatcaacacctacaccggcgagcccacctacgccgacgacttcaagggcagagtgaccatgaccaccgacaccagcacctccaccgcctacatggaactgcggagcctgagaagcgacgacaccgccgtgtattattgcgcccggatcggcgacagcagccccagcgattattggggccagggaaccctcgtgaccgtgtcctctacgcgtatccagaaccctgatcctgccgtgtaccagctgcgggatagcaagagcagcgacaagagcgtgtgtctgttcaccgacttcgacagccagaccaacgtgtcccagagcaaggactccgacgtgtacatcaccgataagtgcgtgctggacatgcggagcatggacttcaagagcaactccgccgtggcctggtccaacaagtccgatttcgcctgcgccaacgccttcaacaacagcattatccccgaggacacattcttcccaagcagcgacgtgccctgcggtacccagagttttgggttgttggaccctaaattgtgctatctgttggacggaatcctgttcatttacggagtgatcctgaccgcattgttcctgcgggttaagttttccagatccgcagacgcacccgcttaccaacaagggcagaaccaactctacaatgaacttaatttggggcggagggaagagtacgacgttctggacaaaaggaggggacgagatcccgagatgggcggaaagcctcagcgaaggaagaatccgcaagaggggctttataacgaactccagaaagataaaatggcagaagcctatagtgagattgggatgaagggagaaaggaggaggggtaaaggtcacgatgggttgtaccaaggattgagcacagccactaaagatacctatgatgcgctccacatgcaggccctgccgccaaga

SEQ ID NO: 3780 - DNA, 2658 bp, synthetic construct
  source 1..2658: mol_type = other DNA
atggccttaccagtgaccgccttgctcctgccgctggccttgctgctccacgccgccaggccggacatcgtgatgacccagagccctgccaccctgtccgtgtctccaggcgaaagagccaccctgagctgcagagcttcccagagcgtgtccaacgacgtcgtgtggtatcagcagaagcccggccaggcccccagactgctgatctactacgccagcaacagatacaccggcatccccgccagattcagcggctctggcagcggcaccgagttcaccctgacaatcagcagcctccagagcgaggacttcgccgtgtactactgtcagcaggactacaccagcccctggaccttcggccagggcaccaagctggaaatcaagagactcgaggggaaaccaattcccaaccctcttctgggactggattcaaccggcagcggcgaggacctgaagaacgtgttcccacctgaggtggccgtgttcgagcctagcgaggccgagatcagccacacccagaaagccaccctcgtgtgcctggctaccggcttctaccccgaccatgtggaactgtcttggtgggtcaacggcaaagaggtgcacagcggcgtgtctaccgacccccagccactgaaagaacagcccgccctgaacgacagccggtactgcctgagcagcagactgagagtgtccgccaccttctggcagaacccccggaaccacttcagatgccaggtgcagttctacggcctgagcgagaacgacgagtggacccaggacagagccaagcccgtgacccagatcgtgtctgccgaagcctggggcagagccgattgcggatcccagagcttcggcctgctggaccccaagctgtgctacctgctggatggcatcctgttcatctacggcgtgatcctgaccgccctgttcctgagagtgaagttcagcagaagcgccgacgcccctgcctaccagcagggacagaaccaactgtacaacgagctgaacctgggcagacgggaagagtacgacgtgctggacaagcggagaggcagggaccctgagatgggcggaaagccccagcggagaaagaacccccaggaaggactgtataacgaactccagaaagacaagatggccgaagcctacagcgagatcggcatgaagggcgagcggagaagaggcaagggccacgatggcctgtaccagggcctgagcaccgccaccaaggacacctatgacgccctgcacatgcaggccctgcctccaagaagggccaagcgatctggatctggagcaacaaacttctcactactcaaacaagcaggtgacgtggaggagaatcccgggcctactagtatggactggatttggcgcatccttttccttgtcggcgctgctaccggcgcgcattccttcgaagaggtgcaactggtgcagagcggagccgaagtgaagaaacctggggccagcgtgcgggtgtcctgcaaggccagcggctacacctttaccaactacggcatgaactgggtgcgccaggctcctggacagggcctggaatggatgggctggatcaacacctacaccggcgagcccacctacgccgacgacttcaagggcagagtgaccatgaccaccgacaccagcacctccaccgcctacatggaactgcggagcctgagaagcgacgacaccgccgtgtattattgcgcccggatcggcgacagcagccccagcgattattggggccagggaaccctcgtgaccgtgtcctctacgcgtgagcagaaactgatctcggaagaggatgggagcggcatccagaaccctgatcctgccgtgtaccagctgcgggatagcaagagcagcgacaagagcgtgtgtctgttcaccgacttcgacagccagaccaacgtgtcccagagcaaggactccgacgtgtacatcaccgataagaccgtgctggacatgcggagcatggacttcaagagcaactccgccgtggcctggtccaacaagtccgatttcgcctgcgccaacgccttcaacaacagcattatccccgaggacacattcttcccaagccccgagagcagctgcggtacccagagttttgggttgttggaccctaaattgtgctatctgttggacggaatcctgttcatttacggagtgatcctgaccgcattgttcctgaggagcaagcggtcacggctgctccacagcgattacatgaatatgacaccacgaagaccgggtcctactcgcaaacactaccaaccctacgcacctccccgcgactttgcagcgtaccgatctcgggttaagttttccagatccgcagacgcacccgcttaccaacaagggcagaaccaactctacaatgaacttaatttggggcggagggaagagtacgacgttctggacaaaaggaggggacgagatcccgagatgggcggaaagcctcagcgaaggaagaatccgcaagaggggctttataacgaactccagaaagataaaatggcagaagcctatagtgagattgggatgaagggagaaaggaggaggggtaaaggtcacgatgggttgtaccaaggattgagcacagccactaaagatacctatgatgcgctccacatgcaggccctgccgccaaga

SEQ ID NO: 3781 - DNA, 2781 bp, synthetic construct
  source 1..2781: mol_type = other DNA
atggccttaccagtgaccgccttgctcctgccgctggccttgctgctccacgccgccaggccggacatcgtgatgacccagagccctgccaccctgtccgtgtctccaggcgaaagagccaccctgagctgcagagcttcccagagcgtgtccaacgacgtcgtgtggtatcagcagaagcccggccaggcccccagactgctgatctactacgccagcaacagatacaccggcatccccgccagattcagcggctctggcagcggcaccgagttcaccctgacaatcagcagcctccagagcgaggacttcgccgtgtactactgtcagcaggactacaccagcccctggaccttcggccagggcaccaagctggaaatcaagagactcgaggggaaaccaattcccaaccctcttctgggactggattcaaccggcagcggcgaggacctgaagaacgtgttcccacctgaggtggccgtgttcgagcctagcgaggccgagatcagccacacccagaaagccaccctcgtgtgcctggctaccggcttctaccccgaccatgtggaactgtcttggtgggtcaacggcaaagaggtgcacagcggcgtgtctaccgacccccagccactgaaagaacagcccgccctgaacgacagccggtactgcctgagcagcagactgagagtgtccgccaccttctggcagaacccccggaaccacttcagatgccaggtgcagttctacggcctgagcgagaacgacgagtggacccaggacagagccaagcccgtgacccagatcgtgtctgccgaagcctggggcagagccgattgcggatcccagagcttcggcctgctggaccccaagctgtgctacctgctggatggcatcctgttcatctacggcgtgatcctgaccgccctgttcctgaggagtaagaggagcaggctcctgcacagtgactacatgaacatgactccacgccgccccggacccacccgcaagcattaccagccctatgccccaccacgcgacttcgcagcctatcgctccagagtgaagttcagcagaagcgccgacgcccctgcctaccagcagggacagaaccaactgtacaacgagctgaacctgggcagacgggaagagtacgacgtgctggacaagcggagaggcagggaccctgagatgggcggaaagccccagcggagaaagaacccccaggaaggactgtataacgaactccagaaagacaagatggccgaagcctacagcgagatcggcatgaagggcgagcggagaagaggcaagggccacgatggcctgtaccagggcctgagcaccgccaccaaggacacctatgacgccctgcacatgcaggccctgcctccaagaagggccaagcgatctggatctggagcaacaaacttctcactactcaaacaagcaggtgacgtggaggagaatcccgggcctactagtatggactggatttggcgcatccttttccttgtcggcgctgctaccggcgcgcattccttcgaagaggtgcaactggtgcagagcggagccgaagtgaagaaacctggggccagcgtgcgggtgtcctgcaaggccagcggctacacctttaccaactacggcatgaactgggtgcgccaggctcctggacagggcctggaatggatgggctggatcaacacctacaccggcgagcccacctacgccgacgacttcaagggcagagtgaccatgaccaccgacaccagcacctccaccgcctacatggaactgcggagcctgagaagcgacgacaccgccgtgtattattgcgcccggatcggcgacagcagccccagcgattattggggccagggaaccctcgtgaccgtgtcctctacgcgtgagcagaaactgatctcggaagaggatgggagcggcatccagaaccctgatcctgccgtgtaccagctgcgggatagcaagagcagcgacaagagcgtgtgtctgttcaccgacttcgacagccagaccaacgtgtcccagagcaaggactccgacgtgtacatcaccgataagaccgtgctggacatgcggagcatggacttcaagagcaactccgccgtggcctggtccaacaagtccgatttcgcctgcgccaacgccttcaacaacagcattatccccgaggacacattcttcccaagccccgagagcagctgcggtacccagagttttgggttgttggaccctaaattgtgctatctgttggacggaatcctgttcatttacggagtgatcctgaccgcattgttcctgaggagcaagcggtcacggctgctccacagcgattacatgaatatgacaccacgaagaccgggtcctactcgcaaacactaccaaccctacgcacctccccgcgactttgcagcgtaccgatctcgggttaagttttccagatccgcagacgcacccgcttaccaacaagggcagaaccaactctacaatgaacttaatttggggcggagggaagagtacgacgttctggacaaaaggaggggacgagatcccgagatgggcggaaagcctcagcgaaggaagaatccgcaagaggggctttataacgaactccagaaagataaaatggcagaagcctatagtgagattgggatgaagggagaaaggaggaggggtaaaggtcacgatgggttgtaccaaggattgagcacagccactaaagatacctatgatgcgctccacatgcaggccctgccgccaaga

SEQ ID NO: 3782 - DNA, 2664 bp, synthetic construct
  source 1..2664: mol_type = other DNA
atggccttaccagtgaccgccttgctcctgccgctggccttgctgctccacgccgccaggccggacatcgtgatgacccagagccctgccaccctgtccgtgtctccaggcgaaagagccaccctgagctgcagagcttcccagagcgtgtccaacgacgtcgtgtggtatcagcagaagcccggccaggcccccagactgctgatctactacgccagcaacagatacaccggcatccccgccagattcagcggctctggcagcggcaccgagttcaccctgacaatcagcagcctccagagcgaggacttcgccgtgtactactgtcagcaggactacaccagcccctggaccttcggccagggcaccaagctggaaatcaagagactcgaggggaaaccaattcccaaccctcttctgggactggattcaaccggcagcggcgaggacctgaagaacgtgttcccacctgaggtggccgtgttcgagcctagcgaggccgagatcagccacacccagaaagccaccctcgtgtgcctggctaccggcttctaccccgaccatgtggaactgtcttggtgggtcaacggcaaagaggtgcacagcggcgtgtctaccgacccccagccactgaaagaacagcccgccctgaacgacagccggtactgcctgagcagcagactgagagtgtccgccaccttctggcagaacccccggaaccacttcagatgccaggtgcagttctacggcctgagcgagaacgacgagtggacccaggacagagccaagcccgtgacccagatcgtgtctgccgaagcctggggcagagccgattgcggatcccagagcttcggcctgctggaccccaagctgtgctacctgctggatggcatcctgttcatctacggcgtgatcctgaccgccctgttcctgagagtgaagttcagcagaagcgccgacgcccctgcctaccagcagggacagaaccaactgtacaacgagctgaacctgggcagacgggaagagtacgacgtgctggacaagcggagaggcagggaccctgagatgggcggaaagccccagcggagaaagaacccccaggaaggactgtataacgaactccagaaagacaagatggccgaagcctacagcgagatcggcatgaagggcgagcggagaagaggcaagggccacgatggcctgtaccagggcctgagcaccgccaccaaggacacctatgacgccctgcacatgcaggccctgcctccaagaagggccaagcgatctggatctggagcaacaaacttctcactactcaaacaagcaggtgacgtggaggagaatcccgggcctactagtatggactggatttggcgcatccttttccttgtcggcgctgctaccggcgcgcattccttcgaagaggtgcaactggtgcagagcggagccgaagtgaagaaacctggggccagcgtgcgggtgtcctgcaaggccagcggctacacctttaccaactacggcatgaactgggtgcgccaggctcctggacagggcctggaatggatgggctggatcaacacctacaccggcgagcccacctacgccgacgacttcaagggcagagtgaccatgaccaccgacaccagcacctccaccgcctacatggaactgcggagcctgagaagcgacgacaccgccgtgtattattgcgcccggatcggcgacagcagccccagcgattattggggccagggaaccctcgtgaccgtgtcctctacgcgtgagcagaaactgatctcggaagaggatctggggagcggcatccagaaccctgatcctgccgtgtaccagctgcgggatagcaagagcagcgacaagagcgtgtgtctgttcaccgacttcgacagccagaccaacgtgtcccagagcaaggactccgacgtgtacatcaccgataagaccgtgctggacatgcggagcatggacttcaagagcaactccgccgtggcctggtccaacaagtccgatttcgcctgcgccaacgccttcaacaacagcattatccccgaggacacattcttcccaagccccgagagcagctgcggtacccagagttttgggttgttggaccctaaattgtgctatctgttggacggaatcctgttcatttacggagtgatcctgaccgcattgttcctgaagagaggccggaagaagctgctgtacatcttcaagcagcctttcatgcggcccgtgcagaccacccaggaagaggacggctgctcctgccggttccccgaggaagaagaaggcggctgcgagctgcgggttaagttttccagatccgcagacgcacccgcttaccaacaagggcagaaccaactctacaatgaacttaatttggggcggagggaagagtacgacgttctggacaaaaggaggggacgagatcccgagatgggcggaaagcctcagcgaaggaagaatccgcaagaggggctttataacgaactccagaaagataaaatggcagaagcctatagtgagattgggatgaagggagaaaggaggaggggtaaaggtcacgatgggttgtaccaaggattgagcacagccactaaagatacctatgatgcgctccacatgcaggccctgccgccaaga

SEQ ID NO: 3783 - DNA, 2790 bp, synthetic construct
  source 1..2790: mol_type = other DNA
atggccttaccagtgaccgccttgctcctgccgctggccttgctgctccacgccgccaggccggacatcgtgatgacccagagccctgccaccctgtccgtgtctccaggcgaaagagccaccctgagctgcagagcttcccagagcgtgtccaacgacgtcgtgtggtatcagcagaagcccggccaggcccccagactgctgatctactacgccagcaacagatacaccggcatccccgccagattcagcggctctggcagcggcaccgagttcaccctgacaatcagcagcctccagagcgaggacttcgccgtgtactactgtcagcaggactacaccagcccctggaccttcggccagggcaccaagctggaaatcaagagactcgaggggaaaccaattcccaaccctcttctgggactggattcaaccggcagcggcgaggacctgaagaacgtgttcccacctgaggtggccgtgttcgagcctagcgaggccgagatcagccacacccagaaagccaccctcgtgtgcctggctaccggcttctaccccgaccatgtggaactgtcttggtgggtcaacggcaaagaggtgcacagcggcgtgtctaccgacccccagccactgaaagaacagcccgccctgaacgacagccggtactgcctgagcagcagactgagagtgtccgccaccttctggcagaacccccggaaccacttcagatgccaggtgcagttctacggcctgagcgagaacgacgagtggacccaggacagagccaagcccgtgacccagatcgtgtctgccgaagcctggggcagagccgattgcggatcccagagcttcggcctgctggaccccaagctgtgctacctgctggatggcatcctgttcatctacggcgtgatcctgaccgccctgttcctgaaacggggcagaaagaaactcctgtatatattcaaacaaccatttatgagaccagtacaaactactcaagaggaagatggctgtagctgccgatttccagaagaagaagaaggaggatgtgaactgagagtgaagttcagcagaagcgccgacgcccctgcctaccagcagggacagaaccaactgtacaacgagctgaacctgggcagacgggaagagtacgacgtgctggacaagcggagaggcagggaccctgagatgggcggaaagccccagcggagaaagaacccccaggaaggactgtataacgaactccagaaagacaagatggccgaagcctacagcgagatcggcatgaagggcgagcggagaagaggcaagggccacgatggcctgtaccagggcctgagcaccgccaccaaggacacctatgacgccctgcacatgcaggccctgcctccaagaagggccaagcgatctggatctggagcaacaaacttctcactactcaaacaagcaggtgacgtggaggagaatcccgggcctactagtatggactggatttggcgcatccttttccttgtcggcgctgctaccggcgcgcattccttcgaagaggtgcaactggtgcagagcggagccgaagtgaagaaacctggggccagcgtgcgggtgtcctgcaaggccagcggctacacctttaccaactacggcatgaactgggtgcgccaggctcctggacagggcctggaatggatgggctggatcaacacctacaccggcgagcccacctacgccgacgacttcaagggcagagtgaccatgaccaccgacaccagcacctccaccgcctacatggaactgcggagcctgagaagcgacgacaccgccgtgtattattgcgcccggatcggcgacagcagccccagcgattattggggccagggaaccctcgtgaccgtgtcctctacgcgtgagcagaaactgatctcggaagaggatctggggagcggcatccagaaccctgatcctgccgtgtaccagctgcgggatagcaagagcagcgacaagagcgtgtgtctgttcaccgacttcgacagccagaccaacgtgtcccagagcaaggactccgacgtgtacatcaccgataagaccgtgctggacatgcggagcatggacttcaagagcaactccgccgtggcctggtccaacaagtccgatttcgcctgcgccaacgccttcaacaacagcattatccccgaggacacattcttcccaagccccgagagcagctgcggtacccagagttttgggttgttggaccctaaattgtgctatctgttggacggaatcctgttcatttacggagtgatcctgaccgcattgttcctgaagagaggccggaagaagctgctgtacatcttcaagcagcctttcatgcggcccgtgcagaccacccaggaagaggacggctgctcctgccggttccccgaggaagaagaaggcggctgcgagctgcgggttaagttttccagatccgcagacgcacccgcttaccaacaagggcagaaccaactctacaatgaacttaatttggggcggagggaagagtacgacgttctggacaaaaggaggggacgagatcccgagatgggcggaaagcctcagcgaaggaagaatccgcaagaggggctttataacgaactccagaaagataaaatggcagaagcctatagtgagattgggatgaagggagaaaggaggaggggtaaaggtcacgatgggttgtaccaaggattgagcacagccactaaagatacctatgatgcgctccacatgcaggccctgccgccaaga

SEQ ID NO: 3784 - DNA, 2463 bp, synthetic construct
  source 1..2463: mol_type = other DNA
atggccttaccagtgaccgccttgctcctgccgctggccttgctgctccacgccgccaggccggacatcgtgatgacccagagccctgccaccctgtccgtgtctccaggcgaaagagccaccctgagctgcagagcttcccagagcgtgtccaacgacgtcgtgtggtatcagcagaagcccggccaggcccccagactgctgatctactacgccagcaacagatacaccggcatccccgccagattcagcggctctggcagcggcaccgagttcaccctgacaatcagcagcctccagagcgaggacttcgccgtgtactactgtcagcaggactacaccagcccctggaccttcggccagggcaccaagctggaaatcaagagactcgagcagagcttcggcctgctggaccccaagctgtgctacctgctggatggcatcctgttcatctacggcgtgatcctgaccgccctgttcctgagagtgaagttcagcagaagcgccgacgcccctgcctaccagcagggacagaaccaactgtacaacgagctgaacctgggcagacgggaagagtacgacgtgctggacaagcggagaggcagggaccctgagatgggcggaaagccccagcggagaaagaacccccaggaaggactgtataacgaactccagaaagacaagatggccgaagcctacagcgagatcggcatgaagggcgagcggagaagaggcaagggccacgatggcctgtaccagggcctgagcaccgccaccaaggacacctatgacgccctgcacatgcaggccctgcctccaagaagggccaagcgatctggatctggagcaacaaacttctcactactcaaacaagcaggtgacgtggaggagaatcccgggcctactagtatggactggatttggcgcatccttttccttgtcggcgctgctaccggcgcgcattccttcgaagaggtgcaactggtgcagagcggagccgaagtgaagaaacctggggccagcgtgcgggtgtcctgcaaggccagcggctacacctttaccaactacggcatgaactgggtgcgccaggctcctggacagggcctggaatggatgggctggatcaacacctacaccggcgagcccacctacgccgacgacttcaagggcagagtgaccatgaccaccgacaccagcacctccaccgcctacatggaactgcggagcctgagaagcgacgacaccgccgtgtattattgcgcccggatcggcgacagcagccccagcgattattggggccagggaaccctcgtgaccgtgtcctctacgcgtcagagttttgggttgttggaccctaaattgtgctatctgttggacggaatcctgttcatttacggagtgatcctgaccgcattgttcctgcgggttaagttttccagatccgcagacgcacccgcttaccaacaagggcagaaccaactctacaatgaacttaatttggggcggagggaagagtacgacgttctggacaaaaggaggggacgagatcccgagatgggcggaaagcctcagcgaaggaagaatccgcaagaggggctttataacgaactccagaaagataaaatggcagaagcctatagtgagattgggatgaagggagaaaggaggaggggtaaaggtcacgatgggttgtaccaaggattgagcacagccactaaagatacctatgatgcgctccacatgcaggccctgccgccaagacgcgccaagagaagcggatctggcgtgaagcagaccctgaatttcgacctgctgaagctggctggcgacgtggaatccaacccaggcccttctagaggccatatgaccgagtacaagcccacggtgcgcctcgccacccgcgacgacgtccccagggccgtacgcaccctcgccgccgcgttcgccgactaccccgccacgcgccacaccgtcgatccggaccgccacatcgagcgggtcaccgagctgcaagaactcttcctcacgcgcgtcgggctcgacatcggcaaggtgtgggtcgcggacgacggcgccgcggtggcggtctggaccacgccggagagcgtcgaagcgggggcggtgttcgccgagatcggcccgcgcatggccgagttgagcggttcccggctggccgcgcagcaacagatggaaggcctcctggcgccgcaccggcccaaggagcccgcgtggttcctggccaccgtcggcgtctcgcccgaccaccagggcaagggtctgggcagcgccgtcgtgctccccggagtggaggcggccgagcgcgccggggtgcccgccttcctggagacctccgcgccccgcaacctccccttctacgagcggctcggcttcaccgtcaccgccgacgtcgaggtgcccgaaggaccgcgcacctggtgcatgacccgcaagcccggtgcctga

SEQ ID NO: 3785 - DNA, 1935 bp, synthetic construct
  source 1..1935: mol_type = other DNA
atggccttaccagtgaccgccttgctcctgccgctggccttgctgctccacgccgccaggccggacatcgtgatgacccagagccctgccaccctgtccgtgtctccaggcgaaagagccaccctgagctgcagagcttcccagagcgtgtccaacgacgtcgtgtggtatcagcagaagcccggccaggcccccagactgctgatctactacgccagcaacagatacaccggcatccccgccagattcagcggctctggcagcggcaccgagttcaccctgacaatcagcagcctccagagcgaggacttcgccgtgtactactgtcagcaggactacaccagcccctggaccttcggccagggcaccaagctggaaatcaagagactcgagggacagcctaaggccaatcctaccgtgacactgttccctccaagcagcgaagaactccaggccaacaaggccacacttgtgtgcctgatctccgacttctaccctggggctgtgacagtggcttggaaggccgatggatctcctgtgaaagccggcgtggaaaccaccaagccatccaagcagagcaacaacaaatacgccgccagctcctacctgagcctgacacctgagcagtggaagtcccacagatcctacagctgccaagtgacccacgaaggcagcaccgtggaaaagacagtggcccctacagagtgcagccccatcaagaccgatgtgattacaatggaccccaaggacaactgctccaaggacgccaacgataccctgctgctccagctgaccaacaccagcgcctactacatgtacttgttgctgctgctgaagtccgtggtgtacttcgccatcatcacatgctgcctgctgcggagaaccgccttctgctgcaacggcgagaagtctagggccaagcgatctggatctggagcaacaaacttctcactactcaaacaagcaggtgacgtggaggagaatcccgggcctactagtatggactggatttggcgcatccttttccttgtcggcgctgctaccggcgcgcattccttcgaagaggtgcaactggtgcagagcggagccgaagtgaagaaacctggggccagcgtgcgggtgtcctgcaaggccagcggctacacctttaccaactacggcatgaactgggtgcgccaggctcctggacagggcctggaatggatgggctggatcaacacctacaccggcgagcccacctacgccgacgacttcaagggcagagtgaccatgaccaccgacaccagcacctccaccgcctacatggaactgcggagcctgagaagcgacgacaccgccgtgtattattgcgcccggatcggcgacagcagccccagcgattattggggccagggaaccctcgtgaccgtgtcctctacgcgtgcctctacaaagggaccctccgtgtttcctctggctcccagcagcaagtctacaagcggaggaacagccgctctgggctgcctggtcaaggattactttcccgagcctgtgaccgtgtcctggaatagcggagcactgacaagcggcgtgcacacctttccagccgtgctgcaaagcagcggcctgtactctctgagcagcgtggtcacagtgcctagctctagcctgggcacccagacctacatctgcaatgtgaaccacaagcctagcaacaccaaggtggacaagagagtggaacccaagagctgtgaagtgaaaaccgactccaccgaccacgtgaagcccaaagagacagagaacaccaagcagcccagcaagagctgccacaagcccaaggccatcgtgcacaccgagaaagtgaacatgatgagcctgaccgtgctgggcctgcggatgctgttcgccaaaaccgtggccgtgaacttcctgctgaccgccaagctgttcttcctc

SEQ ID NO: 3786 - DNA, 1869 bp, synthetic construct
  source 1..1869: mol_type = other DNA
atggccttaccagtgaccgccttgctcctgccgctggccttgctgctccacgccgccaggccggacatcgtgatgacccagagccctgccaccctgtccgtgtctccaggcgaaagagccaccctgagctgcagagcttcccagagcgtgtccaacgacgtcgtgtggtatcagcagaagcccggccaggcccccagactgctgatctactacgccagcaacagatacaccggcatccccgccagattcagcggctctggcagcggcaccgagttcaccctgacaatcagcagcctccagagcgaggacttcgccgtgtactactgtcagcaggactacaccagcccctggaccttcggccagggcaccaagctggaaatcaagagactcgagggacagcctaaggccaatcctaccgtgacactgttccctccaagcagcgaagaactccaggccaacaaggccacacttgtgtgcctgatctccgacttctaccctggggctgtgacagtggcttggaaggccgatggatctcctgtgaaagccggcgtggaaaccaccaagccatccaagcagagcaacaacaaatacgccgccagctcctacctgagcctgacacctgagcagtggaagtcccacagatcctacagctgccaagtgacccacgaaggcagcaccgtggaaaagacagtggcccctacagagtgcagcggcagagccgattgcggcatcaccagcgccagctaccaccagggcgtgctgagcgccaccatcctgtacgagatcctgctgggcaaggccaccctgtacgccgtgctggtgtctgccctggtgctgatggctatggtcaagcggaaggacagccggggaagggccaagcgatctggatctggagcaacaaacttctcactactcaaacaagcaggtgacgtggaggagaatcccgggcctactagtatggactggatttggcgcatccttttccttgtcggcgctgctaccggcgcgcattccttcgaagaggtgcaactggtgcagagcggagccgaagtgaagaaacctggggccagcgtgcgggtgtcctgcaaggccagcggctacacctttaccaactacggcatgaactgggtgcgccaggctcctggacagggcctggaatggatgggctggatcaacacctacaccggcgagcccacctacgccgacgacttcaagggcagagtgaccatgaccaccgacaccagcacctccaccgcctacatggaactgcggagcctgagaagcgacgacaccgccgtgtattattgcgcccggatcggcgacagcagccccagcgattattggggccagggaaccctcgtgaccgtgtcctctacgcgtgcctctacaaagggaccctccgtgtttcctctggctcccagcagcaagtctacaagcggaggaacagccgctctgggctgcctggtcaaggattactttcccgagcctgtgaccgtgtcctggaatagcggagcactgacaagcggcgtgcacacctttccagccgtgctgcaaagcagcggcctgtactctctgagcagcgtggtcacagtgcctagctctagcctgggcacccagacctacatctgcaatgtgaaccacaagcctagcaacaccaaggtggacaagagagtggaacccaagagctgtatccccgaggacacattcttcccaagcagcgacgtgccctgcgacgtgaagctggtggaaaagagcttcgagacagacaccaacctgaacttccagaacctgagcgtgatcggcttcagaatcctgctgctgaaagtggccggctttaacctgctgatgaccctgcggctgtggtccagc

SEQ ID NO: 3787 - DNA, 1869 bp, synthetic construct
  source 1..1869: mol_type = other DNA
atggccttaccagtgaccgccttgctcctgccgctggccttgctgctccacgccgccaggccggacatcgtgatgacccagagccctgccaccctgtccgtgtctccaggcgaaagagccaccctgagctgcagagcttcccagagcgtgtccaacgacgtcgtgtggtatcagcagaagcccggccaggcccccagactgctgatctactacgccagcaacagatacaccggcatccccgccagattcagcggctctggcagcggcaccgagttcaccctgacaatcagcagcctccagagcgaggacttcgccgtgtactactgtcagcaggactacaccagcccctggaccttcggccagggcaccaagctggaaatcaagagactcgagggacagcctaaggccaatcctaccgtgacactgttccctccaagcagcgaagaactccaggccaacaaggccacacttgtgtgcctgatctccgacttctaccctggggctgtgacagtggcttggaaggccgatggatctcctgtgaaagccggcgtggaaaccaccaagccatccaagcagagcaacaacaaatacgccgccagctcctacctgagcctgacacctgagcagtggaagtcccacagatcctacagctgccaagtgacccacgaaggcagcaccgtggaaaagacagtggcccctacagagtgcagcggcagagccgattgcggctttaccagcgagagctaccagcagggcgtgctgagcgccaccatcctgtacgagatcctgctgggcaaggccaccctgtacgccgtgctggtgtctgccctggtgctgatggctatggtcaagcggaaggacagccggggaagggccaagcgatctggatctggagcaacaaacttctcactactcaaacaagcaggtgacgtggaggagaatcccgggcctactagtatggactggatttggcgcatccttttccttgtcggcgctgctaccggcgcgcattccttcgaagaggtgcaactggtgcagagcggagccgaagtgaagaaacctggggccagcgtgcgggtgtcctgcaaggccagcggctacacctttaccaactacggcatgaactgggtgcgccaggctcctggacagggcctggaatggatgggctggatcaacacctacaccggcgagcccacctacgccgacgacttcaagggcagagtgaccatgaccaccgacaccagcacctccaccgcctacatggaactgcggagcctgagaagcgacgacaccgccgtgtattattgcgcccggatcggcgacagcagccccagcgattattggggccagggaaccctcgtgaccgtgtcctctacgcgtgcctctacaaagggaccctccgtgtttcctctggctcccagcagcaagtctacaagcggaggaacagccgctctgggctgcctggtcaaggattactttcccgagcctgtgaccgtgtcctggaatagcggagcactgacaagcggcgtgcacacctttccagccgtgctgcaaagcagcggcctgtactctctgagcagcgtggtcacagtgcctagctctagcctgggcacccagacctacatctgcaatgtgaaccacaagcctagcaacaccaaggtggacaagagagtggaacccaagagctgtatccccgaggacacattcttcccaagccccgagagcagctgcgacgtgaagctggtggaaaagagcttcgagacagacaccaacctgaacttccagaacctgagcgtgatcggcttcagaatcctgctgctgaaagtggccggctttaacctgctgatgaccctgcggctgtggtccagc

SEQ ID NO: 3788 - DNA, 1347 bp, synthetic construct
  source 1..1347: mol_type = other DNA
atggccttaccagtgaccgccttgctcctgccgctggccttgctgctccacgccgccaggccggacatcgtgatgacccagagccctgccaccctgtccgtgtctccaggcgaaagagccaccctgagctgcagagcttcccagagcgtgtccaacgacgtcgtgtggtatcagcagaagcccggccaggcccccagactgctgatctactacgccagcaacagatacaccggcatccccgccagattcagcggctctggcagcggcaccgagttcaccctgacaatcagcagcctccagagcgaggacttcgccgtgtactactgtcagcaggactacaccagcccctggaccttcggccagggcaccaagctggaaatcaagagaggcggaggcggaagtggaggcggaggatctggcggcggaggctctgaggtgcaactggtgcagagcggagccgaagtgaagaaacctggggccagcgtgcgggtgtcctgcaaggccagcggctacacctttaccaactacggcatgaactgggtgcgccaggctcctggacagggcctggaatggatgggctggatcaacacctacaccggcgagcccacctacgccgacgacttcaagggcagagtgaccatgaccaccgacaccagcacctccaccgcctacatggaactgcggagcctgagaagcgacgacaccgccgtgtattattgcgcccggatcggcgacagcagccccagcgattattggggccagggaaccctcgtgaccgtgtcctctacgcgtgacggtaacgaggagatgggaggaatcactcaaaccccttacaaagtctcaatttcaggaacaactgttatccttacatgtccccagtatcctggcagcgagatcctttggcagcataacgacaagaatatagggggagatgaagacgataagaatatcggatctgacgaggatcacttgagcctgaaagagttctccgagcttgaacaaagcggatattatgtgtgctatccgcgcgggtcaaagccggaagacgctaacttttacctttatctccgagccagagtgtgcgaaaattgcatggaaatggacgttatgtccgttgctacaatagttatcgtagatatatgcatcacgggtggactgcttctgctggtttattattggtccaagaatagaaaggccaaagctaaacccgtgaccagaggcgctggcgcaggcggaaggcaaaggggacaaaacaaagaacggccaccaccagtgccaaatccagattatgagcctattcggaaaggacagagggacctgtactctggcctgaatcagagaagaatc

SEQ ID NO: 3789 - DNA, 1242 bp, synthetic construct
  source 1..1242: mol_type = other DNA
atggccttaccagtgaccgccttgctcctgccgctggccttgctgctccacgccgccaggccggacatcgtgatgacccagagccctgccaccctgtccgtgtctccaggcgaaagagccaccctgagctgcagagcttcccagagcgtgtccaacgacgtcgtgtggtatcagcagaagcccggccaggcccccagactgctgatctactacgccagcaacagatacaccggcatccccgccagattcagcggctctggcagcggcaccgagttcaccctgacaatcagcagcctccagagcgaggacttcgccgtgtactactgtcagcaggactacaccagcccctggaccttcggccagggcaccaagctggaaatcaagagaggcggaggcggaagtggaggcggaggatctggcggcggaggctctgaggtgcaactggtgcagagcggagccgaagtgaagaaacctggggccagcgtgcgggtgtcctgcaaggccagcggctacacctttaccaactacggcatgaactgggtgcgccaggctcctggacagggcctggaatggatgggctggatcaacacctacaccggcgagcccacctacgccgacgacttcaagggcagagtgaccatgaccaccgacaccagcacctccaccgcctacatggaactgcggagcctgagaagcgacgacaccgccgtgtattattgcgcccggatcggcgacagcagccccagcgattattggggccagggaaccctcgtgaccgtgtcctctacgcgtttcaagatccccatcgaggaactggaagatcgggtgttcgtgaactgcaacacctctatcacctgggtggaaggcaccgtgggaacactgctgagcgacatcaccagactggacctcggcaagcggattctggaccctcggggcatctacagatgcaacggcaccgacatctacaaggacaaagaaagcaccgtgcaggtccactacagaatgtgccagtcctgcgtggaactggaccctgctacagtggccggcatcatcgtgaccgatgtgatcgctactctgctgctggctctgggagtgttctgcttcgccggacacgaaacaggcagactgtctggcgctgccgatacacaggccctgctgagaaacgaccaagtgtatcagcccctgcgcgacagagatgatgcccagtattctcacctcggcggcaactgggctagaaacaag

SEQ ID NO: 3790 - DNA, 1272 bp, synthetic construct
  source 1..1272: mol_type = other DNA
atggccttaccagtgaccgccttgctcctgccgctggccttgctgctccacgccgccaggccggacatcgtgatgacccagagccctgccaccctgtccgtgtctccaggcgaaagagccaccctgagctgcagagcttcccagagcgtgtccaacgacgtcgtgtggtatcagcagaagcccggccaggcccccagactgctgatctactacgccagcaacagatacaccggcatccccgccagattcagcggctctggcagcggcaccgagttcaccctgacaatcagcagcctccagagcgaggacttcgccgtgtactactgtcagcaggactacaccagcccctggaccttcggccagggcaccaagctggaaatcaagagaggcggaggcggaagtggaggcggaggatctggcggcggaggctctgaggtgcaactggtgcagagcggagccgaagtgaagaaacctggggccagcgtgcgggtgtcctgcaaggccagcggctacacctttaccaactacggcatgaactgggtgcgccaggctcctggacagggcctggaatggatgggctggatcaacacctacaccggcgagcccacctacgccgacgacttcaagggcagagtgaccatgaccaccgacaccagcacctccaccgcctacatggaactgcggagcctgagaagcgacgacaccgccgtgtattattgcgcccggatcggcgacagcagccccagcgattattggggccagggaaccctcgtgaccgtgtcctctacgcgtcagagcatcaagggcaaccacctggtcaaggtgtacgactaccaagaggacggcagcgtgctgctgacatgtgatgccgaggccaagaacatcacctggtttaaggacggcaagatgatcggcttcctgaccgaggacaagaagaagtggaacctgggcagcaacgctaaggaccccagaggcatgtatcagtgcaagggcagccagaacaagagcaagcccctccaggtgtactaccggatgtgccagaactgcatcgagctgaacgccgctaccatcagcggctttctgttcgccgagatcgtgtccatcttcgtgctggccgtgggcgtgtactttatcgctggacaggatggcgtgcggcagagcagagcttccgataagcaaaccctgctgcctaacgaccagctgtaccagcctctgaaggacagagaggacgaccagtacagccacctccagggcaatcagctgagaagaaac

SEQ ID NO: 3791 - DNA, 1221 bp, synthetic construct
  source 1..1221: mol_type = other DNA
atggccttaccagtgaccgccttgctcctgccgctggccttgctgctccacgccgccaggccggacatcgtgatgacccagagccctgccaccctgtccgtgtctccaggcgaaagagccaccctgagctgcagagcttcccagagcgtgtccaacgacgtcgtgtggtatcagcagaagcccggccaggcccccagactgctgatctactacgccagcaacagatacaccggcatccccgccagattcagcggctctggcagcggcaccgagttcaccctgacaatcagcagcctccagagcgaggacttcgccgtgtactactgtcagcaggactacaccagcccctggaccttcggccagggcaccaagctggaaatcaagagaggcggaggcggaagtggaggcggaggatctggcggcggaggctctgaggtgcaactggtgcagagcggagccgaagtgaagaaacctggggccagcgtgcgggtgtcctgcaaggccagcggctacacctttaccaactacggcatgaactgggtgcgccaggctcctggacagggcctggaatggatgggctggatcaacacctacaccggcgagcccacctacgccgacgacttcaagggcagagtgaccatgaccaccgacaccagcacctccaccgcctacatggaactgcggagcctgagaagcgacgacaccgccgtgtattattgcgcccggatcggcgacagcagccccagcgattattggggccagggaaccctcgtgaccgtgtcctctacgcgtcagagttttgggttgttggaccctaaattgtgctatctgttggacggaatcctgttcatttacggagtgatcctgaccgcattgttcctgcgggttaagttttccagatccgcagacgcacccgcttaccaacaagggcagaaccaactctacaatgaacttaatttggggcggagggaagagtacgacgttctggacaaaaggaggggacgagatcccgagatgggcggaaagcctcagcgaaggaagaatccgcaagaggggctttataacgaactccagaaagataaaatggcagaagcctatagtgagattgggatgaagggagaaaggaggaggggtaaaggtcacgatgggttgtaccaaggattgagcacagccactaaagatacctatgatgcgctccacatgcaggccctgccgccaaga

SEQ ID NO: 3792 - DNA, 1347 bp, synthetic construct
  source 1..1347: mol_type = other DNA
atggccttaccagtgaccgccttgctcctgccgctggccttgctgctccacgccgccaggccggaggtgcaactggtgcagagcggagccgaagtgaagaaacctggggccagcgtgcgggtgtcctgcaaggccagcggctacacctttaccaactacggcatgaactgggtgcgccaggctcctggacagggcctggaatggatgggctggatcaacacctacaccggcgagcccacctacgccgacgacttcaagggcagagtgaccatgaccaccgacaccagcacctccaccgcctacatggaactgcggagcctgagaagcgacgacaccgccgtgtattattgcgcccggatcggcgacagcagccccagcgattattggggccagggaaccctcgtgaccgtgtcctctggcggaggcggaagtggaggcggaggatctggcggcggaggctctgacatcgtgatgacccagagccctgccaccctgtccgtgtctccaggcgaaagagccaccctgagctgcagagcttcccagagcgtgtccaacgacgtcgtgtggtatcagcagaagcccggccaggcccccagactgctgatctactacgccagcaacagatacaccggcatccccgccagattcagcggctctggcagcggcaccgagttcaccctgacaatcagcagcctccagagcgaggacttcgccgtgtactactgtcagcaggactacaccagcccctggaccttcggccagggcaccaagctggaaatcaagagaacgcgtgacggtaacgaggagatgggaggaatcactcaaaccccttacaaagtctcaatttcaggaacaactgttatccttacatgtccccagtatcctggcagcgagatcctttggcagcataacgacaagaatatagggggagatgaagacgataagaatatcggatctgacgaggatcacttgagcctgaaagagttctccgagcttgaacaaagcggatattatgtgtgctatccgcgcgggtcaaagccggaagacgctaacttttacctttatctccgagccagagtgtgcgaaaattgcatggaaatggacgttatgtccgttgctacaatagttatcgtagatatatgcatcacgggtggactgcttctgctggtttattattggtccaagaatagaaaggccaaagctaaacccgtgaccagaggcgctggcgcaggcggaaggcaaaggggacaaaacaaagaacggccaccaccagtgccaaatccagattatgagcctattcggaaaggacagagggacctgtactctggcctgaatcagagaagaatc

SEQ ID NO: 3793 - DNA, 1242 bp, synthetic construct
  source 1..1242: mol_type = other DNA
atggccttaccagtgaccgccttgctcctgccgctggccttgctgctccacgccgccaggccggaggtgcaactggtgcagagcggagccgaagtgaagaaacctggggccagcgtgcgggtgtcctgcaaggccagcggctacacctttaccaactacggcatgaactgggtgcgccaggctcctggacagggcctggaatggatgggctggatcaacacctacaccggcgagcccacctacgccgacgacttcaagggcagagtgaccatgaccaccgacaccagcacctccaccgcctacatggaactgcggagcctgagaagcgacgacaccgccgtgtattattgcgcccggatcggcgacagcagccccagcgattattggggccagggaaccctcgtgaccgtgtcctctggcggaggcggaagtggaggcggaggatctggcggcggaggctctgacatcgtgatgacccagagccctgccaccctgtccgtgtctccaggcgaaagagccaccctgagctgcagagcttcccagagcgtgtccaacgacgtcgtgtggtatcagcagaagcccggccaggcccccagactgctgatctactacgccagcaacagatacaccggcatccccgccagattcagcggctctggcagcggcaccgagttcaccctgacaatcagcagcctccagagcgaggacttcgccgtgtactactgtcagcaggactacaccagcccctggaccttcggccagggcaccaagctggaaatcaagagaacgcgtttcaagatccccatcgaggaactggaagatcgggtgttcgtgaactgcaacacctctatcacctgggtggaaggcaccgtgggaacactgctgagcgacatcaccagactggacctcggcaagcggattctggaccctcggggcatctacagatgcaacggcaccgacatctacaaggacaaagaaagcaccgtgcaggtccactacagaatgtgccagtcctgcgtggaactggaccctgctacagtggccggcatcatcgtgaccgatgtgatcgctactctgctgctggctctgggagtgttctgcttcgccggacacgaaacaggcagactgtctggcgctgccgatacacaggccctgctgagaaacgaccaagtgtatcagcccctgcgcgacagagatgatgcccagtattctcacctcggcggcaactgggctagaaacaag

SEQ ID NO: 3794 - DNA, 1272 bp, synthetic construct
  source 1..1272: mol_type = other DNA
atggccttaccagtgaccgccttgctcctgccgctggccttgctgctccacgccgccaggccggaggtgcaactggtgcagagcggagccgaagtgaagaaacctggggccagcgtgcgggtgtcctgcaaggccagcggctacacctttaccaactacggcatgaactgggtgcgccaggctcctggacagggcctggaatggatgggctggatcaacacctacaccggcgagcccacctacgccgacgacttcaagggcagagtgaccatgaccaccgacaccagcacctccaccgcctacatggaactgcggagcctgagaagcgacgacaccgccgtgtattattgcgcccggatcggcgacagcagccccagcgattattggggccagggaaccctcgtgaccgtgtcctctggcggaggcggaagtggaggcggaggatctggcggcggaggctctgacatcgtgatgacccagagccctgccaccctgtccgtgtctccaggcgaaagagccaccctgagctgcagagcttcccagagcgtgtccaacgacgtcgtgtggtatcagcagaagcccggccaggcccccagactgctgatctactacgccagcaacagatacaccggcatccccgccagattcagcggctctggcagcggcaccgagttcaccctgacaatcagcagcctccagagcgaggacttcgccgtgtactactgtcagcaggactacaccagcccctggaccttcggccagggcaccaagctggaaatcaagagaacgcgtcagagcatcaagggcaaccacctggtcaaggtgtacgactaccaagaggacggcagcgtgctgctgacatgtgatgccgaggccaagaacatcacctggtttaaggacggcaagatgatcggcttcctgaccgaggacaagaagaagtggaacctgggcagcaacgctaaggaccccagaggcatgtatcagtgcaagggcagccagaacaagagcaagcccctccaggtgtactaccggatgtgccagaactgcatcgagctgaacgccgctaccatcagcggctttctgttcgccgagatcgtgtccatcttcgtgctggccgtgggcgtgtactttatcgctggacaggatggcgtgcggcagagcagagcttccgataagcaaaccctgctgcctaacgaccagctgtaccagcctctgaaggacagagaggacgaccagtacagccacctccagggcaatcagctgagaagaaac

SEQ ID NO: 3795 - DNA, 1221 bp, synthetic construct
  source 1..1221: mol_type = other DNA
atggccttaccagtgaccgccttgctcctgccgctggccttgctgctccacgccgccaggccggaggtgcaactggtgcagagcggagccgaagtgaagaaacctggggccagcgtgcgggtgtcctgcaaggccagcggctacacctttaccaactacggcatgaactgggtgcgccaggctcctggacagggcctggaatggatgggctggatcaacacctacaccggcgagcccacctacgccgacgacttcaagggcagagtgaccatgaccaccgacaccagcacctccaccgcctacatggaactgcggagcctgagaagcgacgacaccgccgtgtattattgcgcccggatcggcgacagcagccccagcgattattggggccagggaaccctcgtgaccgtgtcctctggcggaggcggaagtggaggcggaggatctggcggcggaggctctgacatcgtgatgacccagagccctgccaccctgtccgtgtctccaggcgaaagagccaccctgagctgcagagcttcccagagcgtgtccaacgacgtcgtgtggtatcagcagaagcccggccaggcccccagactgctgatctactacgccagcaacagatacaccggcatccccgccagattcagcggctctggcagcggcaccgagttcaccctgacaatcagcagcctccagagcgaggacttcgccgtgtactactgtcagcaggactacaccagcccctggaccttcggccagggcaccaagctggaaatcaagagaacgcgtcagagttttgggttgttggaccctaaattgtgctatctgttggacggaatcctgttcatttacggagtgatcctgaccgcattgttcctgcgggttaagttttccagatccgcagacgcacccgcttaccaacaagggcagaaccaactctacaatgaacttaatttggggcggagggaagagtacgacgttctggacaaaaggaggggacgagatcccgagatgggcggaaagcctcagcgaaggaagaatccgcaagaggggctttataacgaactccagaaagataaaatggcagaagcctatagtgagattgggatgaagggagaaaggaggaggggtaaaggtcacgatgggttgtaccaaggattgagcacagccactaaagatacctatgatgcgctccacatgcaggccctgccgccaaga

SEQ ID NO: 3796 - DNA, 1506 bp, synthetic construct
  source 1..1506: mol_type = other DNA
atggccttaccagtgaccgccttgctcctgccgctggccttgctgctccacgccgccaggccggacatcgtgatgacccagagccctgccaccctgtccgtgtctccaggcgaaagagccaccctgagctgcagagcttcccagagcgtgtccaacgacgtcgtgtggtatcagcagaagcccggccaggcccccagactgctgatctactacgccagcaacagatacaccggcatccccgccagattcagcggctctggcagcggcaccgagttcaccctgacaatcagcagcctccagagcgaggacttcgccgtgtactactgtcagcaggactacaccagcccctggaccttcggccagggcaccaagctggaaatcaagagaggcggaggcggaagtggaggcggaggatctggcggcggaggctctgaggtgcaactggtgcagagcggagccgaagtgaagaaacctggggccagcgtgcgggtgtcctgcaaggccagcggctacacctttaccaactacggcatgaactgggtgcgccaggctcctggacagggcctggaatggatgggctggatcaacacctacaccggcgagcccacctacgccgacgacttcaagggcagagtgaccatgaccaccgacaccagcacctccaccgcctacatggaactgcggagcctgagaagcgacgacaccgccgtgtattattgcgcccggatcggcgacagcagccccagcgattattggggccagggaaccctcgtgaccgtgtcctctacgcgtggaatgaggactgaggatcttcccaaagctgtcgtctttctcgaaccccaatggtatcgggtgctcgaaaaagactctgtgacactgaaatgccaaggggcctactctcccgaggacaactccacacagtggtttcataatgagtccctcatcagctctcaggccagctcttatttcattgatgccgctacagtggacgactccggcgagtatcggtgtcagaccaatctgtctacactgtctgaccccgtgcagcttgaggtccacattggatggttgctcttgcaagccccacgctgggttttcaaagaggaagatccaatccatctgcggtgccacagctggaaaaacaccgctctccacaaagtcacatacctgcaaaatggcaaaggacgcaaatacttccatcacaattccgatttttacattccgaaggctaccctgaaagacagcggcagctatttctgccggggactcgtcggctccaagaatgtgtcctccgaaaccgtgaatatcacgattacccaaggactggctgtgcctacaatctctagcttctttccgcctggataccaagtctccttctgtcttgtgatggtcctcctgtttgctgtggacacaggactgtacttttccgtgaaaacgaacatccgcagctccacacgcgattggaaagatcacaagtttaaatggcgcaaagatccccaggacaag

SEQ ID NO: 3797 - DNA, 2355 bp, synthetic construct
  source 1..2355: mol_type = other DNA
atggccttaccagtgaccgccttgctcctgccgctggccttgctgctccacgccgccaggccggacatcgtgatgacccagagccctgccaccctgtccgtgtctccaggcgaaagagccaccctgagctgcagagcttcccagagcgtgtccaacgacgtcgtgtggtatcagcagaagcccggccaggcccccagactgctgatctactacgccagcaacagatacaccggcatccccgccagattcagcggctctggcagcggcaccgagttcaccctgacaatcagcagcctccagagcgaggacttcgccgtgtactactgtcagcaggactacaccagcccctggaccttcggccagggcaccaagctggaaatcaagagaggcggaggcggaagtggaggcggaggatctggcggcggaggctctgaggtgcaactggtgcagagcggagccgaagtgaagaaacctggggccagcgtgcgggtgtcctgcaaggccagcggctacacctttaccaactacggcatgaactgggtgcgccaggctcctggacagggcctggaatggatgggctggatcaacacctacaccggcgagcccacctacgccgacgacttcaagggcagagtgaccatgaccaccgacaccagcacctccaccgcctacatggaactgcggagcctgagaagcgacgacaccgccgtgtattattgcgcccggatcggcgacagcagccccagcgattattggggccagggaaccctcgtgaccgtgtcctctacgcgtggaggctctggacaacaacagaccctgcctaaaccattcatctgggctgaaccccactttatggttccgaaagagaaacaagtcacgatttgttgccaagggaattacggggccgtcgagtatcagctccactttgagggctccctgtttgctgtggatcggcccaagccacctgaaagaatcaacaaagtccaattctatattcctgatatgaactcccgcatggcaggccagtattcatgtatctaccgcgtgggagaactttggagtgaaccctctaacctgctggacctcgtcgtgacagagatgtatgatacacccacactgtctgtgcaccctgggccagaagttatcagcggagaaaaagttaccttttattgccgcctcgataccgctacctctatgttcctcttgctgaaagagggccgcagctctcacgtgcagcgaggctacggaaaggtccaagctgagtttcctctcggccccgtgaccaccgctcacaggggcacatatagatgttttggctcttataacaatcatgcctggtcattcccatccgagcctgtgaaactgctggtcacaggcgatattgagaatacctctctggccccagaagatcctacattccccgccgacacatggggaacatatctgctgacaaccgaaaccgggctgcaaaaggaccatgctctgtgggatcataccgctcagaatctgcttcggatggggcttgcattcctggtcctggtggctcttgtctggtttctggtcgaggactggctgtcccggaagagaaccagagaaagagcttccagggccagcacctgggaaggcagacgcagactgaatactcagaccctgcgcgccaagagaagcggatctggcgtgaagcagaccctgaatttcgacctgctgaagctggctggcgacgtggaatccaacccaggcccttctagaggccatatgaccgagtacaagcccacggtgcgcctcgccacccgcgacgacgtccccagggccgtacgcaccctcgccgccgcgttcgccgactaccccgccacgcgccacaccgtcgatccggaccgccacatcgagcgggtcaccgagctgcaagaactcttcctcacgcgcgtcgggctcgacatcggcaaggtgtgggtcgcggacgacggcgccgcggtggcggtctggaccacgccggagagcgtcgaagcgggggcggtgttcgccgagatcggcccgcgcatggccgagttgagcggttcccggctggccgcgcagcaacagatggaaggcctcctggcgccgcaccggcccaaggagcccgcgtggttcctggccaccgtcggcgtctcgcccgaccaccagggcaagggtctgggcagcgccgtcgtgctccccggagtggaggcggccgagcgcgccggggtgcccgccttcctggagacctccgcgccccgcaacctccccttctacgagcggctcggcttcaccgtcaccgccgacgtcgaggtgcccgaaggaccgcgcacctggtgcatgacccgcaagcccggtgcctga

SEQ ID NO: 3798 - DNA, 1854 bp, synthetic construct
  source 1..1854: mol_type = other DNA
atggccttaccagtgaccgccttgctcctgccgctggccttgctgctccacgccgccaggccggacatcgtgatgacccagagccctgccaccctgtccgtgtctccaggcgaaagagccaccctgagctgcagagcttcccagagcgtgtccaacgacgtcgtgtggtatcagcagaagcccggccaggcccccagactgctgatctactacgccagcaacagatacaccggcatccccgccagattcagcggctctggcagcggcaccgagttcaccctgacaatcagcagcctccagagcgaggacttcgccgtgtactactgtcagcaggactacaccagcccctggaccttcggccagggcaccaagctggaaatcaagagaggcggaggcggaagtggaggcggaggatctggcggcggaggctctgaggtgcaactggtgcagagcggagccgaagtgaagaaacctggggccagcgtgcgggtgtcctgcaaggccagcggctacacctttaccaactacggcatgaactgggtgcgccaggctcctggacagggcctggaatggatgggctggatcaacacctacaccggcgagcccacctacgccgacgacttcaagggcagagtgaccatgaccaccgacaccagcacctccaccgcctacatggaactgcggagcctgagaagcgacgacaccgccgtgtattattgcgcccggatcggcgacagcagccccagcgattattggggccagggaaccctcgtgaccgtgtcctctacgcgtaaaattgaagttatgtatcctcctccttacctagacaatgagaagagcaatggaaccattatccatgtgaaaggggcgcgtggcgatattgagaatacctctctggccccagaagatcctacattccccgccgacacatggggaacatatctgctgacaaccgaaaccgggctgcaaaaggaccatgctctgtgggatcataccgctcagaatctgcttcggatggggcttgcattcctggtcctggtggctcttgtctggtttctggtcgaggactggctgtcccggaagagaaccagagaaagagcttccagggccagcacctgggaaggcagacgcagactgaatactcagaccctgcgcgccaagagaagcggatctggcgtgaagcagaccctgaatttcgacctgctgaagctggctggcgacgtggaatccaacccaggcccttctagaggccatatgaccgagtacaagcccacggtgcgcctcgccacccgcgacgacgtccccagggccgtacgcaccctcgccgccgcgttcgccgactaccccgccacgcgccacaccgtcgatccggaccgccacatcgagcgggtcaccgagctgcaagaactcttcctcacgcgcgtcgggctcgacatcggcaaggtgtgggtcgcggacgacggcgccgcggtggcggtctggaccacgccggagagcgtcgaagcgggggcggtgttcgccgagatcggcccgcgcatggccgagttgagcggttcccggctggccgcgcagcaacagatggaaggcctcctggcgccgcaccggcccaaggagcccgcgtggttcctggccaccgtcggcgtctcgcccgaccaccagggcaagggtctgggcagcgccgtcgtgctccccggagtggaggcggccgagcgcgccggggtgcccgccttcctggagacctccgcgccccgcaacctccccttctacgagcggctcggcttcaccgtcaccgccgacgtcgaggtgcccgaaggaccgcgcacctggtgcatgacccgcaagcccggtgcctga

SEQ ID NO: 3799 - DNA, 2115 bp, synthetic construct
  source 1..2115: mol_type = other DNA
atggccttaccagtgaccgccttgctcctgccgctggccttgctgctccacgccgccaggccggacatcgtgatgacccagagccctgccaccctgtccgtgtctccaggcgaaagagccaccctgagctgcagagcttcccagagcgtgtccaacgacgtcgtgtggtatcagcagaagcccggccaggcccccagactgctgatctactacgccagcaacagatacaccggcatccccgccagattcagcggctctggcagcggcaccgagttcaccctgacaatcagcagcctccagagcgaggacttcgccgtgtactactgtcagcaggactacaccagcccctggaccttcggccagggcaccaagctggaaatcaagagaggcggaggcggaagtggaggcggaggatctggcggcggaggctctgaggtgcaactggtgcagagcggagccgaagtgaagaaacctggggccagcgtgcgggtgtcctgcaaggccagcggctacacctttaccaactacggcatgaactgggtgcgccaggctcctggacagggcctggaatggatgggctggatcaacacctacaccggcgagcccacctacgccgacgacttcaagggcagagtgaccatgaccaccgacaccagcacctccaccgcctacatggaactgcggagcctgagaagcgacgacaccgccgtgtattattgcgcccggatcggcgacagcagccccagcgattattggggccagggaaccctcgtgaccgtgtcctctacgcgtctgtgggtgtcccagccacctgaaattcggacactggaaggctcctccgcctttctgccctgtagctttaacgccagccaggggagactcgccatcggctctgtgacatggttccgggatgaagtcgtccctggaaaagaagttcgcaacggaacaccagagttcagaggcagactcgccccactggcaagctccagattcctgcatgaccatcaggctgaactgcacattagggacgtgcggggccacgatgcctccatctatgtgtgtcgggtcgaagtgcttggactcggcgtcggaactggaaacggcactaggctggtggtcgagaaagaacatccacagcttggcgctggcaccgtcctgttgcttagagccggattctatgccgtcagcttcctgtccgtggctgtggggtctacagtgtattaccagggaaaatgtctcacctggaaaggccccagacgccagcttccagctgttgttcctgctccactgccaccaccttgtggctcctctgctcacttgcttccaccagtgcctggcggacgcgccaagagaagcggatctggcgtgaagcagaccctgaatttcgacctgctgaagctggctggcgacgtggaatccaacccaggcccttctagaatgtaccggatgcagctgctgagctgtatcgccctgtctctggccctggtcacaaatagcgcccctaccagcagcagcaccaagaaaacccagctgcaactggaacacctcctgctggacctccagatgatcctgaacggcatcaacaactacaagaaccccaagctgaccgagatgctgaccgccaagttctacatgcccaagaaggccaccgagctgaagcacctccagtgcctggaagaggaactgaagcccctggaagaagtgctgaatctggcccagagcaagaacttccacctgaggccaagggacctgatctccaacatcaacgtgatcgtgctggaactgaaaggcagcgagacaaccttcatgtgcgagtacgccgacgagacagctaccatcgtggaatttctgaatcggtggatcaccttctgccagagcatcatcagcaccctgacaaagatcgaagtgatgtaccctcctccttacctggacaacgagaagtccaacggcaccatcatccacgtgaagggcaagcacctgtgtccttctccactgttccccggacctagcaagcctttctgggtgctcgttgttgttggcggcgtgctggcctgttacagcctgctggttaccgtggccttcatcatcttttgggtccgaagcaagcggagctaa

SEQ ID NO: 3800 - DNA, 2043 bp, synthetic construct
  source 1..2043: mol_type = other DNA
atggccttaccagtgaccgccttgctcctgccgctggccttgctgctccacgccgccaggccggacatcgtgatgacccagagccctgccaccctgtccgtgtctccaggcgaaagagccaccctgagctgcagagcttcccagagcgtgtccaacgacgtcgtgtggtatcagcagaagcccggccaggcccccagactgctgatctactacgccagcaacagatacaccggcatccccgccagattcagcggctctggcagcggcaccgagttcaccctgacaatcagcagcctccagagcgaggacttcgccgtgtactactgtcagcaggactacaccagcccctggaccttcggccagggcaccaagctggaaatcaagagaggcggaggcggaagtggaggcggaggatctggcggcggaggctctgaggtgcaactggtgcagagcggagccgaagtgaagaaacctggggccagcgtgcgggtgtcctgcaaggccagcggctacacctttaccaactacggcatgaactgggtgcgccaggctcctggacagggcctggaatggatgggctggatcaacacctacaccggcgagcccacctacgccgacgacttcaagggcagagtgaccatgaccaccgacaccagcacctccaccgcctacatggaactgcggagcctgagaagcgacgacaccgccgtgtattattgcgcccggatcggcgacagcagccccagcgattattggggccagggaaccctcgtgaccgtgtcctctacgcgtctgtgggtgtcccagccacctgaaattcggacactggaaggctcctccgcctttctgccctgtagctttaacgccagccaggggagactcgccatcggctctgtgacatggttccgggatgaagtcgtccctggaaaagaagttcgcaacggaacaccagagttcagaggcagactcgccccactggcaagctccagattcctgcatgaccatcaggctgaactgcacattagggacgtgcggggccacgatgcctccatctatgtgtgtcgggtcgaagtgcttggactcggcgtcggaactggaaacggcactaggctggtggtcgagaaagaacatccacagcttggcgctggcaccgtcctgttgcttagagccggattctatgccgtcagcttcctgtccgtggctgtggggtctacagtgtattaccagggaaaatgtctcacctggaaaggccccagacgccagcttccagctgttgttcctgctccactgccaccaccttgtggctcctctgctcacttgcttccaccagtgcctggcggacgcgccaagagaagcggatctggcgtgaagcagaccctgaatttcgacctgctgaagctggctggcgacgtggaatccaacccaggcccttctagaggccatatgaccgagtacaagcccacggtgcgcctcgccacccgcgacgacgtccccagggccgtacgcaccctcgccgccgcgttcgccgactaccccgccacgcgccacaccgtcgatccggaccgccacatcgagcgggtcaccgagctgcaagaactcttcctcacgcgcgtcgggctcgacatcggcaaggtgtgggtcgcggacgacggcgccgcggtggcggtctggaccacgccggagagcgtcgaagcgggggcggtgttcgccgagatcggcccgcgcatggccgagttgagcggttcccggctggccgcgcagcaacagatggaaggcctcctggcgccgcaccggcccaaggagcccgcgtggttcctggccaccgtcggcgtctcgcccgaccaccagggcaagggtctgggcagcgccgtcgtgctccccggagtggaggcggccgagcgcgccggggtgcccgccttcctggagacctccgcgccccgcaacctccccttctacgagcggctcggcttcaccgtcaccgccgacgtcgaggtgcccgaaggaccgcgcacctggtgcatgacccgcaagcccggtgcctga

SEQ ID NO: 3801 - DNA, 1068 bp, synthetic construct
  source 1..1068: mol_type = other DNA
atggccttaccagtgaccgccttgctcctgccgctggccttgctgctccacgccgccaggccggacatcgtgatgacccagagccctgccaccctgtccgtgtctccaggcgaaagagccaccctgagctgcagagcttcccagagcgtgtccaacgacgtcgtgtggtatcagcagaagcccggccaggcccccagactgctgatctactacgccagcaacagatacaccggcatccccgccagattcagcggctctggcagcggcaccgagttcaccctgacaatcagcagcctccagagcgaggacttcgccgtgtactactgtcagcaggactacaccagcccctggaccttcggccagggcaccaagctggaaatcaagagaggcggaggcggaagtggaggcggaggatctggcggcggaggctctgaggtgcaactggtgcagagcggagccgaagtgaagaaacctggggccagcgtgcgggtgtcctgcaaggccagcggctacacctttaccaactacggcatgaactgggtgcgccaggctcctggacagggcctggaatggatgggctggatcaacacctacaccggcgagcccacctacgccgacgacttcaagggcagagtgaccatgaccaccgacaccagcacctccaccgcctacatggaactgcggagcctgagaagcgacgacaccgccgtgtattattgcgcccggatcggcgacagcagccccagcgattattggggccagggaaccctcgtgaccgtgtcctctacgcgtaaaattgaagttatgtatcctcctccttacctagacaatgagaagagcaatggaaccattatccatgtgaaaggggcgcgtatcacccagggcctggccgtgtctaccatcagcagctttttcccacccggctaccaggtgtccttctgcctcgtgatggtgctgctgttcgccgtggacaccggcctgtacttcagcgtgaaaacaaacatccggtccagcaccagagactggaaggaccacaagttcaagtggcggaaggacccccaggacaag

SEQ ID NO: 3802 - DNA, 1068 bp, synthetic construct
  source 1..1068: mol_type = other DNA
atggccttaccagtgaccgccttgctcctgccgctggccttgctgctccacgccgccaggccggacatcgtgatgacccagagccctgccaccctgtccgtgtctccaggcgaaagagccaccctgagctgcagagcttcccagagcgtgtccaacgacgtcgtgtggtatcagcagaagcccggccaggcccccagactgctgatctactacgccagcaacagatacaccggcatccccgccagattcagcggctctggcagcggcaccgagttcaccctgacaatcagcagcctccagagcgaggacttcgccgtgtactactgtcagcaggactacaccagcccctggaccttcggccagggcaccaagctggaaatcaagagaggcggaggcggaagtggaggcggaggatctggcggcggaggctctgaggtgcaactggtgcagagcggagccgaagtgaagaaacctggggccagcgtgcgggtgtcctgcaaggccagcggctacacctttaccaactacggcatgaactgggtgcgccaggctcctggacagggcctggaatggatgggctggatcaacacctacaccggcgagcccacctacgccgacgacttcaagggcagagtgaccatgaccaccgacaccagcacctccaccgcctacatggaactgcggagcctgagaagcgacgacaccgccgtgtattattgcgcccggatcggcgacagcagccccagcgattattggggccagggaaccctcgtgaccgtgtcctctacgcgtaaaattgaagttatgtatcctcctccttacctagacaatgagaagagcaatggaaccattatccatgtgaaaggggcgcgtattacccaaggactggctgtgcctacaatctctagcttctttccgcctggataccaagtctccttctgtcttgtgatggtcctcctgtttgctgtggacacaggactgtacttttccgtgaaaacgaacatccgcagctccacacgcgattggaaagatcacaagtttaaatggcgcaaagatccccaggacaag

SEQ ID NO: 3803 - DNA, 1005 bp, synthetic construct
  source 1..1005: mol_type = other DNA
atggccttaccagtgaccgccttgctcctgccgctggccttgctgctccacgccgccaggccggacatcgtgatgacccagagccctgccaccctgtccgtgtctccaggcgaaagagccaccctgagctgcagagcttcccagagcgtgtccaacgacgtcgtgtggtatcagcagaagcccggccaggcccccagactgctgatctactacgccagcaacagatacaccggcatccccgccagattcagcggctctggcagcggcaccgagttcaccctgacaatcagcagcctccagagcgaggacttcgccgtgtactactgtcagcaggactacaccagcccctggaccttcggccagggcaccaagctggaaatcaagagaggcggaggcggaagtggaggcggaggatctggcggcggaggctctgaggtgcaactggtgcagagcggagccgaagtgaagaaacctggggccagcgtgcgggtgtcctgcaaggccagcggctacacctttaccaactacggcatgaactgggtgcgccaggctcctggacagggcctggaatggatgggctggatcaacacctacaccggcgagcccacctacgccgacgacttcaagggcagagtgaccatgaccaccgacaccagcacctccaccgcctacatggaactgcggagcctgagaagcgacgacaccgccgtgtattattgcgcccggatcggcgacagcagccccagcgattattggggccagggaaccctcgtgaccgtgtcctctacgcgtaaaattgaagttatgtatcctcctccttacctagacaatgagaagagcaatggaaccattatccatgtgaaaggggcgcgtattacccaaggactggctgtgtctacaatctctagcttctctccgcctggataccaagtctccttctgtcttgtgatggtcctcctgtttgctgtggacacaggactgtacttttccgtgaaaacgaacatc

SEQ ID NO: 3804 - DNA, 1098 bp, synthetic construct
  source 1..1098: mol_type = other DNA
atggccttaccagtgaccgccttgctcctgccgctggccttgctgctccacgccgccaggccggacatcgtgatgacccagagccctgccaccctgtccgtgtctccaggcgaaagagccaccctgagctgcagagcttcccagagcgtgtccaacgacgtcgtgtggtatcagcagaagcccggccaggcccccagactgctgatctactacgccagcaacagatacaccggcatccccgccagattcagcggctctggcagcggcaccgagttcaccctgacaatcagcagcctccagagcgaggacttcgccgtgtactactgtcagcaggactacaccagcccctggaccttcggccagggcaccaagctggaaatcaagagaggcggaggcggaagtggaggcggaggatctggcggcggaggctctgaggtgcaactggtgcagagcggagccgaagtgaagaaacctggggccagcgtgcgggtgtcctgcaaggccagcggctacacctttaccaactacggcatgaactgggtgcgccaggctcctggacagggcctggaatggatgggctggatcaacacctacaccggcgagcccacctacgccgacgacttcaagggcagagtgaccatgaccaccgacaccagcacctccaccgcctacatggaactgcggagcctgagaagcgacgacaccgccgtgtattattgcgcccggatcggcgacagcagccccagcgattattggggccagggaaccctcgtgaccgtgtcctctacgcgtaaaattgaagttatgtatcctcctccttacctagacaatgagaagagcaatggaaccattatccatgtgaaaggggcgcgtgtcgagaaagaacatccacagcttggcgctggcaccgtcctgttgcttagagccggattctatgccgtcagcttcctgtccgtggctgtggggtctacagtgtattaccagggaaaatgtctcacctggaaaggccccagacgccagcttccagctgttgttcctgctccactgccaccaccttgtggctcctctgctcacttgcttccaccagtgcctggcgga

SEQ ID NO: 3805 - DNA, 1341 bp, synthetic construct
  source 1..1341: mol_type = other DNA
atggccttaccagtgaccgccttgctcctgccgctggccttgctgctccacgccgccaggccggacatcgtgatgacccagagccctgccaccctgtccgtgtctccaggcgaaagagccaccctgagctgcagagcttcccagagcgtgtccaacgacgtcgtgtggtatcagcagaagcccggccaggcccccagactgctgatctactacgccagcaacagatacaccggcatccccgccagattcagcggctctggcagcggcaccgagttcaccctgacaatcagcagcctccagagcgaggacttcgccgtgtactactgtcagcaggactacaccagcccctggaccttcggccagggcaccaagctggaaatcaagagaggcggaggcggaagtggaggcggaggatctggcggcggaggctctgaggtgcaactggtgcagagcggagccgaagtgaagaaacctggggccagcgtgcgggtgtcctgcaaggccagcggctacacctttaccaactacggcatgaactgggtgcgccaggctcctggacagggcctggaatggatgggctggatcaacacctacaccggcgagcccacctacgccgacgacttcaagggcagagtgaccatgaccaccgacaccagcacctccaccgcctacatggaactgcggagcctgagaagcgacgacaccgccgtgtattattgcgcccggatcggcgacagcagccccagcgattattggggccagggaaccctcgtgaccgtgtcctctacgcgtaaaattgaagttatgtatcctcctccttacctagacaatgagaagagcaatggaaccattatccatgtgaaaggggcgcgtaagtctgtgcgcttttacctggtcgtcagccctgccagtgcctccactcagacatcttggaccccaagggaccttgtgtcctctcagacacagacacagtcctgcgtgccaccaactgctggcgcaagacaggctccagagtctcccagcacaatccccgtcccttctcagccccagaactccacacttaggccaggaccagctgctccaatcgcactggtcccagtgttctgcggactgctggttgccaagtctctggtgctgagcgcactcctcgtttggtggggcgatatttggtggaaaacgatgatggaattgagatccctcgatacgcagaaagccacatgccaccttcagcaagtcacagacttgccttggaccagcgtcagctctcccgtggaacgggaaattctgtatcatacagtggcccgcaccaagatttccgacgatgacgacgagcacacactg

SEQ ID NO: 3806 - DNA, 1152 bp, synthetic construct
  source 1..1152: mol_type = other DNA
atggccttaccagtgaccgccttgctcctgccgctggccttgctgctccacgccgccaggccggacatcgtgatgacccagagccctgccaccctgtccgtgtctccaggcgaaagagccaccctgagctgcagagcttcccagagcgtgtccaacgacgtcgtgtggtatcagcagaagcccggccaggcccccagactgctgatctactacgccagcaacagatacaccggcatccccgccagattcagcggctctggcagcggcaccgagttcaccctgacaatcagcagcctccagagcgaggacttcgccgtgtactactgtcagcaggactacaccagcccctggaccttcggccagggcaccaagctggaaatcaagagaggcggaggcggaagtggaggcggaggatctggcggcggaggctctgaggtgcaactggtgcagagcggagccgaagtgaagaaacctggggccagcgtgcgggtgtcctgcaaggccagcggctacacctttaccaactacggcatgaactgggtgcgccaggctcctggacagggcctggaatggatgggctggatcaacacctacaccggcgagcccacctacgccgacgacttcaagggcagagtgaccatgaccaccgacaccagcacctccaccgcctacatggaactgcggagcctgagaagcgacgacaccgccgtgtattattgcgcccggatcggcgacagcagccccagcgattattggggccagggaaccctcgtgaccgtgtcctctacgcgtaaaattgaagttatgtatcctcctccttacctagacaatgagaagagcaatggaaccattatccatgtgaaaggggcgcgtggcgatattgagaatacctctctggccccagaagatcctacattccccgccgacacatggggaacatatctgctgacaaccgaaaccgggctgcaaaaggaccatgctctgtgggatcataccgctcagaatctgcttcggatggggcttgcattcctggtcctggtggctcttgtctggtttctggtcgaggactggctgtcccggaagagaaccagagaaagagcttccagggccagcacctgggaaggcagacgcagactgaatactcagaccctg

SEQ ID NO: 3807 - DNA, 2943 bp, synthetic construct
  source 1..2943: mol_type = other DNA
atggccttaccagtgaccgccttgctcctgccgctggccttgctgctccacgccgccaggccggacatcgtgatgacccagagccctgccaccctgtccgtgtctccaggcgaaagagccaccctgagctgcagagcttcccagagcgtgtccaacgacgtcgtgtggtatcagcagaagcccggccaggcccccagactgctgatctactacgccagcaacagatacaccggcatccccgccagattcagcggctctggcagcggcaccgagttcaccctgacaatcagcagcctccagagcgaggacttcgccgtgtactactgtcagcaggactacaccagcccctggaccttcggccagggcaccaagctggaaatcaagagactcgagggacagcctaaggccaatcctaccgtgacactgttccctccaagcagcgaagaactccaggccaacaaggccacacttgtgtgcctgatctccgacttctaccctggggctgtgacagtggcttggaaggccgatggatctcctgtgaaagccggcgtggaaaccaccaagccatccaagcagagcaacaacaaatacgccgccagctcctacctgagcctgacacctgagcagtggaagtcccacagatcctacagctgccaagtgacccacgaaggcagcaccgtggaaaagacagtggcccctacagagtgcagcggatcccagagcttcggcctgctggaccccaagctgtgctacctgctggatggcatcctgttcatctacggcgtgatcctgaccgccctgttcctgagagtgaagttcagcagaagcgccgacgcccctgcctaccagcagggacagaaccaactgtacaacgagctgaacctgggcagacgggaagagtacgacgtgctggacaagcggagaggcagggaccctgagatgggcggaaagccccagcggagaaagaacccccaggaaggactgtataacgaactccagaaagacaagatggccgaagcctacagcgagatcggcatgaagggcgagcggagaagaggcaagggccacgatggcctgtaccagggcctgagcaccgccaccaaggacacctatgacgccctgcacatgcaggccctgcctccaagaagggccaagcgatctggatctggagcaacaaacttctcactactcaaacaagcaggtgacgtggaggagaatcccgggcctactagtatggactggatttggcgcatccttttccttgtcggcgctgctaccggcgcgcattccttcgaagaggtgcaactggtgcagagcggagccgaagtgaagaaacctggggccagcgtgcgggtgtcctgcaaggccagcggctacacctttaccaactacggcatgaactgggtgcgccaggctcctggacagggcctggaatggatgggctggatcaacacctacaccggcgagcccacctacgccgacgacttcaagggcagagtgaccatgaccaccgacaccagcacctccaccgcctacatggaactgcggagcctgagaagcgacgacaccgccgtgtattattgcgcccggatcggcgacagcagccccagcgattattggggccagggaaccctcgtgaccgtgtcctctacgcgtgcctctacaaagggaccctccgtgtttcctctggctcccagcagcaagtctacaagcggaggaacagccgctctgggctgcctggtcaaggattactttcccgagcctgtgaccgtgtcctggaatagcggagcactgacaagcggcgtgcacacctttccagccgtgctgcaaagcagcggcctgtactctctgagcagcgtggtcacagtgcctagctctagcctgggcacccagacctacatctgcaatgtgaaccacaagcctagcaacaccaaggtggacaagagagtggaacccaagagctgtggtaccggcgacatcgagaacaccagtctggcccctgaggaccctacctttcctgccgatacctggggcacctacctgctgaccacagagacaggactccagaaagatcacgccctgtgggaccacacagcccagaacctgctgagaatgggcctcgcctttctggtgctggttgccctcgtgtggttcctggtggaagattggctgagccggaagcggacaagagagagagccagcagagcctctacctgggagggaagaagaaggctgaacacccagacacttagggccaagcgatctggatctggagcaacaaacttctcactactcaaacaagcaggtgacgtggaggagaatcccgggccttctagaggccatatgaccgagtacaagcccacggtgcgcctcgccacccgcgacgacgtccccagggccgtacgcaccctcgccgccgcgttcgccgactaccccgccacgcgccacaccgtcgatccggaccgccacatcgagcgggtcaccgagctgcaagaactcttcctcacgcgcgtcgggctcgacatcggcaaggtgtgggtcgcggacgacggcgccgcggtggcggtctggaccacgccggagagcgtcgaagcgggggcggtgttcgccgagatcggcccgcgcatggccgagttgagcggttcccggctggccgcgcagcaacagatggaaggcctcctggcgccgcaccggcccaaggagcccgcgtggttcctggccaccgtcggcgtctcgcccgaccaccagggcaagggtctgggcagcgccgtcgtgctccccggagtggaggcggccgagcgcgccggggtgcccgccttcctggagacctccgcgccccgcaacctccccttctacgagcggctcggcttcaccgtcaccgccgacgtcgaggtgcccgaaggaccgcgcacctggtgcatgacccgcaagcccggtgcctga

SEQ ID NO: 3808 - DNA, 3141 bp, synthetic construct
  source 1..3141: mol_type = other DNA
atggccttaccagtgaccgccttgctcctgccgctggccttgctgctccacgccgccaggccggacatcgtgatgacccagagccctgccaccctgtccgtgtctccaggcgaaagagccaccctgagctgcagagcttcccagagcgtgtccaacgacgtcgtgtggtatcagcagaagcccggccaggcccccagactgctgatctactacgccagcaacagatacaccggcatccccgccagattcagcggctctggcagcggcaccgagttcaccctgacaatcagcagcctccagagcgaggacttcgccgtgtactactgtcagcaggactacaccagcccctggaccttcggccagggcaccaagctggaaatcaagagactcgagggacagcctaaggccaatcctaccgtgacactgttccctccaagcagcgaagaactccaggccaacaaggccacacttgtgtgcctgatctccgacttctaccctggggctgtgacagtggcttggaaggccgatggatctcctgtgaaagccggcgtggaaaccaccaagccatccaagcagagcaacaacaaatacgccgccagctcctacctgagcctgacacctgagcagtggaagtcccacagatcctacagctgccaagtgacccacgaaggcagcaccgtggaaaagacagtggcccctacagagtgcagcggatcccagagcttcggcctgctggaccccaagctgtgctacctgctggatggcatcctgttcatctacggcgtgatcctgaccgccctgttcctgagagtgaagttcagcagaagcgccgacgcccctgcctaccagcagggacagaaccaactgtacaacgagctgaacctgggcagacgggaagagtacgacgtgctggacaagcggagaggcagggaccctgagatgggcggaaagccccagcggagaaagaacccccaggaaggactgtataacgaactccagaaagacaagatggccgaagcctacagcgagatcggcatgaagggcgagcggagaagaggcaagggccacgatggcctgtaccagggcctgagcaccgccaccaaggacacctatgacgccctgcacatgcaggccctgcctccaagaagggccaagcgatctggatctggagcaacaaacttctcactactcaaacaagcaggtgacgtggaggagaatcccgggcctactagtatggactggatttggcgcatccttttccttgtcggcgctgctaccggcgcgcattccttcgaagaggtgcaactggtgcagagcggagccgaagtgaagaaacctggggccagcgtgcgggtgtcctgcaaggccagcggctacacctttaccaactacggcatgaactgggtgcgccaggctcctggacagggcctggaatggatgggctggatcaacacctacaccggcgagcccacctacgccgacgacttcaagggcagagtgaccatgaccaccgacaccagcacctccaccgcctacatggaactgcggagcctgagaagcgacgacaccgccgtgtattattgcgcccggatcggcgacagcagccccagcgattattggggccagggaaccctcgtgaccgtgtcctctacgcgtgcctctacaaagggaccctccgtgtttcctctggctcccagcagcaagtctacaagcggaggaacagccgctctgggctgcctggtcaaggattactttcccgagcctgtgaccgtgtcctggaatagcggagcactgacaagcggcgtgcacacctttccagccgtgctgcaaagcagcggcctgtactctctgagcagcgtggtcacagtgcctagctctagcctgggcacccagacctacatctgcaatgtgaaccacaagcctagcaacaccaaggtggacaagagagtggaacccaagagctgtggtaccaagtctgtgcgcttttacctggtcgtcagccctgccagtgcctccactcagacatcttggaccccaagggaccttgtgtcctctcagacacagacacagtcctgcgtgccaccaactgctggcgcaagacaggctccagagtctcccagcacaatccccgtcccttctcagccccagaactccacacttaggccaggaccagctgctccaatcgcactggtcccagtgttctgcggactgctggttgccaagtctctggtgctgagcgcactcctcgtttggtggggcgatatttggtggaaaacgatgatggaattgagatccctcgatacgcagaaagccacatgccaccttcagcaagtcacagacttgccttggaccagcgtcagctctcccgtggaacgggaaattctgtatcatacagtggcccgcaccaagatttccgacgatgacgacgagcacacactgcgcgccaagagaagcggatctggcgtgaagcagaccctgaatttcgacctgctgaagctggctggcgacgtggaatccaacccaggcccttctagaggccatatgaccgagtacaagcccacggtgcgcctcgccacccgcgacgacgtccccagggccgtacgcaccctcgccgccgcgttcgccgactaccccgccacgcgccacaccgtcgatccggaccgccacatcgagcgggtcaccgagctgcaagaactcttcctcacgcgcgtcgggctcgacatcggcaaggtgtgggtcgcggacgacggcgccgcggtggcggtctggaccacgccggagagcgtcgaagcgggggcggtgttcgccgagatcggcccgcgcatggccgagttgagcggttcccggctggccgcgcagcaacagatggaaggcctcctggcgccgcaccggcccaaggagcccgcgtggttcctggccaccgtcggcgtctcgcccgaccaccagggcaagggtctgggcagcgccgtcgtgctccccggagtggaggcggccgagcgcgccggggtgcccgccttcctggagacctccgcgccccgcaacctccccttctacgagcggctcggcttcaccgtcaccgccgacgtcgaggtgcccgaaggaccgcgcacctggtgcatgacccgcaagcccggtgcctga

SEQ ID NO: 3809 - DNA, 2901 bp, synthetic construct
  source 1..2901: mol_type = other DNA
atggccttaccagtgaccgccttgctcctgccgctggccttgctgctccacgccgccaggccggacatcgtgatgacccagagccctgccaccctgtccgtgtctccaggcgaaagagccaccctgagctgcagagcttcccagagcgtgtccaacgacgtcgtgtggtatcagcagaagcccggccaggcccccagactgctgatctactacgccagcaacagatacaccggcatccccgccagattcagcggctctggcagcggcaccgagttcaccctgacaatcagcagcctccagagcgaggacttcgccgtgtactactgtcagcaggactacaccagcccctggaccttcggccagggcaccaagctggaaatcaagagactcgagggacagcctaaggccaatcctaccgtgacactgttccctccaagcagcgaagaactccaggccaacaaggccacacttgtgtgcctgatctccgacttctaccctggggctgtgacagtggcttggaaggccgatggatctcctgtgaaagccggcgtggaaaccaccaagccatccaagcagagcaacaacaaatacgccgccagctcctacctgagcctgacacctgagcagtggaagtcccacagatcctacagctgccaagtgacccacgaaggcagcaccgtggaaaagacagtggcccctacagagtgcagcggatcccagagcttcggcctgctggaccccaagctgtgctacctgctggatggcatcctgttcatctacggcgtgatcctgaccgccctgttcctgagagtgaagttcagcagaagcgccgacgcccctgcctaccagcagggacagaaccaactgtacaacgagctgaacctgggcagacgggaagagtacgacgtgctggacaagcggagaggcagggaccctgagatgggcggaaagccccagcggagaaagaacccccaggaaggactgtataacgaactccagaaagacaagatggccgaagcctacagcgagatcggcatgaagggcgagcggagaagaggcaagggccacgatggcctgtaccagggcctgagcaccgccaccaaggacacctatgacgccctgcacatgcaggccctgcctccaagaagggccaagcgatctggatctggagcaacaaacttctcactactcaaacaagcaggtgacgtggaggagaatcccgggcctactagtatggactggatttggcgcatccttttccttgtcggcgctgctaccggcgcgcattccttcgaagaggtgcaactggtgcagagcggagccgaagtgaagaaacctggggccagcgtgcgggtgtcctgcaaggccagcggctacacctttaccaactacggcatgaactgggtgcgccaggctcctggacagggcctggaatggatgggctggatcaacacctacaccggcgagcccacctacgccgacgacttcaagggcagagtgaccatgaccaccgacaccagcacctccaccgcctacatggaactgcggagcctgagaagcgacgacaccgccgtgtattattgcgcccggatcggcgacagcagccccagcgattattggggccagggaaccctcgtgaccgtgtcctctacgcgtgcctctacaaagggaccctccgtgtttcctctggctcccagcagcaagtctacaagcggaggaacagccgctctgggctgcctggtcaaggattactttcccgagcctgtgaccgtgtcctggaatagcggagcactgacaagcggcgtgcacacctttccagccgtgctgcaaagcagcggcctgtactctctgagcagcgtggtcacagtgcctagctctagcctgggcacccagacctacatctgcaatgtgaaccacaagcctagcaacaccaaggtggacaagagagtggaacccaagagctgtggtaccgtggtcgagaaagaacatccacagcttggcgctggcaccgtcctgttgcttagagccggattctatgccgtcagcttcctgtccgtggctgtggggtctacagtgtattaccagggaaaatgtctcacctggaaaggccccagacgccagcttccagctgttgttcctgctccactgccaccaccttgtggctcctctgctcacttgcttccaccagtgcctggcggacgcgccaagagaagcggatctggcgtgaagcagaccctgaatttcgacctgctgaagctggctggcgacgtggaatccaacccaggcccttctagaggccatatgaccgagtacaagcccacggtgcgcctcgccacccgcgacgacgtccccagggccgtacgcaccctcgccgccgcgttcgccgactaccccgccacgcgccacaccgtcgatccggaccgccacatcgagcgggtcaccgagctgcaagaactcttcctcacgcgcgtcgggctcgacatcggcaaggtgtgggtcgcggacgacggcgccgcggtggcggtctggaccacgccggagagcgtcgaagcgggggcggtgttcgccgagatcggcccgcgcatggccgagttgagcggttcccggctggccgcgcagcaacagatggaaggcctcctggcgccgcaccggcccaaggagcccgcgtggttcctggccaccgtcggcgtctcgcccgaccaccagggcaagggtctgggcagcgccgtcgtgctccccggagtggaggcggccgagcgcgccggggtgcccgccttcctggagacctccgcgccccgcaacctccccttctacgagcggctcggcttcaccgtcaccgccgacgtcgaggtgcccgaaggaccgcgcacctggtgcatgacccgcaagcccggtgcctga

SEQ ID NO: 3810 - DNA, 2988 bp, synthetic construct
  source 1..2988: mol_type = other DNA
atggccttaccagtgaccgccttgctcctgccgctggccttgctgctccacgccgccaggccggacatcgtgatgacccagagccctgccaccctgtccgtgtctccaggcgaaagagccaccctgagctgcagagcttcccagagcgtgtccaacgacgtcgtgtggtatcagcagaagcccggccaggcccccagactgctgatctactacgccagcaacagatacaccggcatccccgccagattcagcggctctggcagcggcaccgagttcaccctgacaatcagcagcctccagagcgaggacttcgccgtgtactactgtcagcaggactacaccagcccctggaccttcggccagggcaccaagctggaaatcaagagactcgaggacctgaagaacgtgttcccacctgaggtggccgtgttcgagcctagcgaggccgagatcagccacacccagaaagccaccctcgtgtgcctggctaccggcttctaccccgaccatgtggaactgtcttggtgggtcaacggcaaagaggtgcacagcggcgtgtctaccgacccccagccactgaaagaacagcccgccctgaacgacagccggtactgcctgagcagcagactgagagtgtccgccaccttctggcagaacccccggaaccacttcagatgccaggtgcagttctacggcctgagcgagaacgacgagtggacccaggacagagccaagcccgtgacccagatcgtgtctgccgaagcctggggcagagccgattgcggatcccagagcttcggcctgctggaccccaagctgtgctacctgctggatggcatcctgttcatctacggcgtgatcctgaccgccctgttcctgagagtgaagttcagcagaagcgccgacgcccctgcctaccagcagggacagaaccaactgtacaacgagctgaacctgggcagacgggaagagtacgacgtgctggacaagcggagaggcagggaccctgagatgggcggaaagccccagcggagaaagaacccccaggaaggactgtataacgaactccagaaagacaagatggccgaagcctacagcgagatcggcatgaagggcgagcggagaagaggcaagggccacgatggcctgtaccagggcctgagcaccgccaccaaggacacctatgacgccctgcacatgcaggccctgcctccaagaagggccaagcgatctggatctggagcaacaaacttctcactactcaaacaagcaggtgacgtggaggagaatcccgggcctactagtatggactggatttggcgcatccttttccttgtcggcgctgctaccggcgcgcattccttcgaagaggtgcaactggtgcagagcggagccgaagtgaagaaacctggggccagcgtgcgggtgtcctgcaaggccagcggctacacctttaccaactacggcatgaactgggtgcgccaggctcctggacagggcctggaatggatgggctggatcaacacctacaccggcgagcccacctacgccgacgacttcaagggcagagtgaccatgaccaccgacaccagcacctccaccgcctacatggaactgcggagcctgagaagcgacgacaccgccgtgtattattgcgcccggatcggcgacagcagccccagcgattattggggccagggaaccctcgtgaccgtgtcctctacgcgtatccagaaccctgatcctgccgtgtaccagctgcgggatagcaagagcagcgacaagagcgtgtgtctgttcaccgacttcgacagccagaccaacgtgtcccagagcaaggactccgacgtgtacatcaccgataagaccgtgctggacatgcggagcatggacttcaagagcaactccgccgtggcctggtccaacaagtccgatttcgcctgcgccaacgccttcaacaacagcattatccccgaggacacattcttcccaagccccgagagcagctgcggtaccggcgacatcgagaacaccagtctggcccctgaggaccctacctttcctgccgatacctggggcacctacctgctgaccacagagacaggactccagaaagatcacgccctgtgggaccacacagcccagaacctgctgagaatgggcctcgcctttctggtgctggttgccctcgtgtggttcctggtggaagattggctgagccggaagcggacaagagagagagccagcagagcctctacctgggagggaagaagaaggctgaacacccagacacttagggccaagcgatctggatctggagcaacaaacttctcactactcaaacaagcaggtgacgtggaggagaatcccgggccttctagaggccatatgaccgagtacaagcccacggtgcgcctcgccacccgcgacgacgtccccagggccgtacgcaccctcgccgccgcgttcgccgactaccccgccacgcgccacaccgtcgatccggaccgccacatcgagcgggtcaccgagctgcaagaactcttcctcacgcgcgtcgggctcgacatcggcaaggtgtgggtcgcggacgacggcgccgcggtggcggtctggaccacgccggagagcgtcgaagcgggggcggtgttcgccgagatcggcccgcgcatggccgagttgagcggttcccggctggccgcgcagcaacagatggaaggcctcctggcgccgcaccggcccaaggagcccgcgtggttcctggccaccgtcggcgtctcgcccgaccaccagggcaagggtctgggcagcgccgtcgtgctccccggagtggaggcggccgagcgcgccggggtgcccgccttcctggagacctccgcgccccgcaacctccccttctacgagcggctcggcttcaccgtcaccgccgacgtcgaggtgcccgaaggaccgcgcacctggtgcatgacccgcaagcccggtgcctga

SEQ ID NO: 3811 - DNA, 3186 bp, synthetic construct
  source 1..3186: mol_type = other DNA
atggccttaccagtgaccgccttgctcctgccgctggccttgctgctccacgccgccaggccggacatcgtgatgacccagagccctgccaccctgtccgtgtctccaggcgaaagagccaccctgagctgcagagcttcccagagcgtgtccaacgacgtcgtgtggtatcagcagaagcccggccaggcccccagactgctgatctactacgccagcaacagatacaccggcatccccgccagattcagcggctctggcagcggcaccgagttcaccctgacaatcagcagcctccagagcgaggacttcgccgtgtactactgtcagcaggactacaccagcccctggaccttcggccagggcaccaagctggaaatcaagagactcgaggacctgaagaacgtgttcccacctgaggtggccgtgttcgagcctagcgaggccgagatcagccacacccagaaagccaccctcgtgtgcctggctaccggcttctaccccgaccatgtggaactgtcttggtgggtcaacggcaaagaggtgcacagcggcgtgtctaccgacccccagccactgaaagaacagcccgccctgaacgacagccggtactgcctgagcagcagactgagagtgtccgccaccttctggcagaacccccggaaccacttcagatgccaggtgcagttctacggcctgagcgagaacgacgagtggacccaggacagagccaagcccgtgacccagatcgtgtctgccgaagcctggggcagagccgattgcggatcccagagcttcggcctgctggaccccaagctgtgctacctgctggatggcatcctgttcatctacggcgtgatcctgaccgccctgttcctgagagtgaagttcagcagaagcgccgacgcccctgcctaccagcagggacagaaccaactgtacaacgagctgaacctgggcagacgggaagagtacgacgtgctggacaagcggagaggcagggaccctgagatgggcggaaagccccagcggagaaagaacccccaggaaggactgtataacgaactccagaaagacaagatggccgaagcctacagcgagatcggcatgaagggcgagcggagaagaggcaagggccacgatggcctgtaccagggcctgagcaccgccaccaaggacacctatgacgccctgcacatgcaggccctgcctccaagaagggccaagcgatctggatctggagcaacaaacttctcactactcaaacaagcaggtgacgtggaggagaatcccgggcctactagtatggactggatttggcgcatccttttccttgtcggcgctgctaccggcgcgcattccttcgaagaggtgcaactggtgcagagcggagccgaagtgaagaaacctggggccagcgtgcgggtgtcctgcaaggccagcggctacacctttaccaactacggcatgaactgggtgcgccaggctcctggacagggcctggaatggatgggctggatcaacacctacaccggcgagcccacctacgccgacgacttcaagggcagagtgaccatgaccaccgacaccagcacctccaccgcctacatggaactgcggagcctgagaagcgacgacaccgccgtgtattattgcgcccggatcggcgacagcagccccagcgattattggggccagggaaccctcgtgaccgtgtcctctacgcgtatccagaaccctgatcctgccgtgtaccagctgcgggatagcaagagcagcgacaagagcgtgtgtctgttcaccgacttcgacagccagaccaacgtgtcccagagcaaggactccgacgtgtacatcaccgataagaccgtgctggacatgcggagcatggacttcaagagcaactccgccgtggcctggtccaacaagtccgatttcgcctgcgccaacgccttcaacaacagcattatccccgaggacacattcttcccaagccccgagagcagctgcggtaccaagtctgtgcgcttttacctggtcgtcagccctgccagtgcctccactcagacatcttggaccccaagggaccttgtgtcctctcagacacagacacagtcctgcgtgccaccaactgctggcgcaagacaggctccagagtctcccagcacaatccccgtcccttctcagccccagaactccacacttaggccaggaccagctgctccaatcgcactggtcccagtgttctgcggactgctggttgccaagtctctggtgctgagcgcactcctcgtttggtggggcgatatttggtggaaaacgatgatggaattgagatccctcgatacgcagaaagccacatgccaccttcagcaagtcacagacttgccttggaccagcgtcagctctcccgtggaacgggaaattctgtatcatacagtggcccgcaccaagatttccgacgatgacgacgagcacacactgcgcgccaagagaagcggatctggcgtgaagcagaccctgaatttcgacctgctgaagctggctggcgacgtggaatccaacccaggcccttctagaggccatatgaccgagtacaagcccacggtgcgcctcgccacccgcgacgacgtccccagggccgtacgcaccctcgccgccgcgttcgccgactaccccgccacgcgccacaccgtcgatccggaccgccacatcgagcgggtcaccgagctgcaagaactcttcctcacgcgcgtcgggctcgacatcggcaaggtgtgggtcgcggacgacggcgccgcggtggcggtctggaccacgccggagagcgtcgaagcgggggcggtgttcgccgagatcggcccgcgcatggccgagttgagcggttcccggctggccgcgcagcaacagatggaaggcctcctggcgccgcaccggcccaaggagcccgcgtggttcctggccaccgtcggcgtctcgcccgaccaccagggcaagggtctgggcagcgccgtcgtgctccccggagtggaggcggccgagcgcgccggggtgcccgccttcctggagacctccgcgccccgcaacctccccttctacgagcggctcggcttcaccgtcaccgccgacgtcgaggtgcccgaaggaccgcgcacctggtgcatgacccgcaagcccggtgcctga

SEQ ID NO: 3812 - DNA, 2946 bp, synthetic construct
  source 1..2946: mol_type = other DNA
atggccttaccagtgaccgccttgctcctgccgctggccttgctgctccacgccgccaggccggacatcgtgatgacccagagccctgccaccctgtccgtgtctccaggcgaaagagccaccctgagctgcagagcttcccagagcgtgtccaacgacgtcgtgtggtatcagcagaagcccggccaggcccccagactgctgatctactacgccagcaacagatacaccggcatccccgccagattcagcggctctggcagcggcaccgagttcaccctgacaatcagcagcctccagagcgaggacttcgccgtgtactactgtcagcaggactacaccagcccctggaccttcggccagggcaccaagctggaaatcaagagactcgaggacctgaagaacgtgttcccacctgaggtggccgtgttcgagcctagcgaggccgagatcagccacacccagaaagccaccctcgtgtgcctggctaccggcttctaccccgaccatgtggaactgtcttggtgggtcaacggcaaagaggtgcacagcggcgtgtctaccgacccccagccactgaaagaacagcccgccctgaacgacagccggtactgcctgagcagcagactgagagtgtccgccaccttctggcagaacccccggaaccacttcagatgccaggtgcagttctacggcctgagcgagaacgacgagtggacccaggacagagccaagcccgtgacccagatcgtgtctgccgaagcctggggcagagccgattgcggatcccagagcttcggcctgctggaccccaagctgtgctacctgctggatggcatcctgttcatctacggcgtgatcctgaccgccctgttcctgagagtgaagttcagcagaagcgccgacgcccctgcctaccagcagggacagaaccaactgtacaacgagctgaacctgggcagacgggaagagtacgacgtgctggacaagcggagaggcagggaccctgagatgggcggaaagccccagcggagaaagaacccccaggaaggactgtataacgaactccagaaagacaagatggccgaagcctacagcgagatcggcatgaagggcgagcggagaagaggcaagggccacgatggcctgtaccagggcctgagcaccgccaccaaggacacctatgacgccctgcacatgcaggccctgcctccaagaagggccaagcgatctggatctggagcaacaaacttctcactactcaaacaagcaggtgacgtggaggagaatcccgggcctactagtatggactggatttggcgcatccttttccttgtcggcgctgctaccggcgcgcattccttcgaagaggtgcaactggtgcagagcggagccgaagtgaagaaacctggggccagcgtgcgggtgtcctgcaaggccagcggctacacctttaccaactacggcatgaactgggtgcgccaggctcctggacagggcctggaatggatgggctggatcaacacctacaccggcgagcccacctacgccgacgacttcaagggcagagtgaccatgaccaccgacaccagcacctccaccgcctacatggaactgcggagcctgagaagcgacgacaccgccgtgtattattgcgcccggatcggcgacagcagccccagcgattattggggccagggaaccctcgtgaccgtgtcctctacgcgtatccagaaccctgatcctgccgtgtaccagctgcgggatagcaagagcagcgacaagagcgtgtgtctgttcaccgacttcgacagccagaccaacgtgtcccagagcaaggactccgacgtgtacatcaccgataagaccgtgctggacatgcggagcatggacttcaagagcaactccgccgtggcctggtccaacaagtccgatttcgcctgcgccaacgccttcaacaacagcattatccccgaggacacattcttcccaagccccgagagcagctgcggtaccgtggtcgagaaagaacatccacagcttggcgctggcaccgtcctgttgcttagagccggattctatgccgtcagcttcctgtccgtggctgtggggtctacagtgtattaccagggaaaatgtctcacctggaaaggccccagacgccagcttccagctgttgttcctgctccactgccaccaccttgtggctcctctgctcacttgcttccaccagtgcctggcggacgcgccaagagaagcggatctggcgtgaagcagaccctgaatttcgacctgctgaagctggctggcgacgtggaatccaacccaggcccttctagaggccatatgaccgagtacaagcccacggtgcgcctcgccacccgcgacgacgtccccagggccgtacgcaccctcgccgccgcgttcgccgactaccccgccacgcgccacaccgtcgatccggaccgccacatcgagcgggtcaccgagctgcaagaactcttcctcacgcgcgtcgggctcgacatcggcaaggtgtgggtcgcggacgacggcgccgcggtggcggtctggaccacgccggagagcgtcgaagcgggggcggtgttcgccgagatcggcccgcgcatggccgagttgagcggttcccggctggccgcgcagcaacagatggaaggcctcctggcgccgcaccggcccaaggagcccgcgtggttcctggccaccgtcggcgtctcgcccgaccaccagggcaagggtctgggcagcgccgtcgtgctccccggagtggaggcggccgagcgcgccggggtgcccgccttcctggagacctccgcgccccgcaacctccccttctacgagcggctcggcttcaccgtcaccgccgacgtcgaggtgcccgaaggaccgcgcacctggtgcatgacccgcaagcccggtgcctga

SEQ ID NO: 3813 - DNA, 2859 bp, synthetic construct
  source 1..2859: mol_type = other DNA
atggccttaccagtgaccgccttgctcctgccgctggccttgctgctccacgccgccaggccggacatcgtgatgacccagagccctgccaccctgtccgtgtctccaggcgaaagagccaccctgagctgcagagcttcccagagcgtgtccaacgacgtcgtgtggtatcagcagaagcccggccaggcccccagactgctgatctactacgccagcaacagatacaccggcatccccgccagattcagcggctctggcagcggcaccgagttcaccctgacaatcagcagcctccagagcgaggacttcgccgtgtactactgtcagcaggactacaccagcccctggaccttcggccagggcaccaagctggaaatcaagagactcgagggacagcctaaggccaatcctaccgtgacactgttccctccaagcagcgaagaactccaggccaacaaggccacacttgtgtgcctgatctccgacttctaccctggggctgtgacagtggcttggaaggccgatggatctcctgtgaaagccggcgtggaaaccaccaagccatccaagcagagcaacaacaaatacgccgccagctcctacctgagcctgacacctgagcagtggaagtcccacagatcctacagctgccaagtgacccacgaaggcagcaccgtggaaaagacagtggcccctacagagtgcagcggatcccagagcttcggcctgctggaccccaagctgtgctacctgctggatggcatcctgttcatctacggcgtgatcctgaccgccctgttcctgagagtgaagttcagcagaagcgccgacgcccctgcctaccagcagggacagaaccaactgtacaacgagctgaacctgggcagacgggaagagtacgacgtgctggacaagcggagaggcagggaccctgagatgggcggaaagccccagcggagaaagaacccccaggaaggactgtataacgaactccagaaagacaagatggccgaagcctacagcgagatcggcatgaagggcgagcggagaagaggcaagggccacgatggcctgtaccagggcctgagcaccgccaccaaggacacctatgacgccctgcacatgcaggccctgcctccaagaagggccaagcgatctggatctggagcaacaaacttctcactactcaaacaagcaggtgacgtggaggagaatcccgggcctactagtatggactggatttggcgcatccttttccttgtcggcgctgctaccggcgcgcattccttcgaagaggtgcaactggtgcagagcggagccgaagtgaagaaacctggggccagcgtgcgggtgtcctgcaaggccagcggctacacctttaccaactacggcatgaactgggtgcgccaggctcctggacagggcctggaatggatgggctggatcaacacctacaccggcgagcccacctacgccgacgacttcaagggcagagtgaccatgaccaccgacaccagcacctccaccgcctacatggaactgcggagcctgagaagcgacgacaccgccgtgtattattgcgcccggatcggcgacagcagccccagcgattattggggccagggaaccctcgtgaccgtgtcctctacgcgtgcctctacaaagggaccctccgtgtttcctctggctcccagcagcaagtctacaagcggaggaacagccgctctgggctgcctggtcaaggattactttcccgagcctgtgaccgtgtcctggaatagcggagcactgacaagcggcgtgcacacctttccagccgtgctgcaaagcagcggcctgtactctctgagcagcgtggtcacagtgcctagctctagcctgggcacccagacctacatctgcaatgtgaaccacaagcctagcaacaccaaggtggacaagagagtggaacccaagagctgtggtaccatcactcaaggtttggcagtgtcaaccatctcatcattctttccacctggctaccaagtgtccttctgcctggtcatggtgctgctgttcgccgtggataccggcctgtacttcagcgtcaagaccaacatccggtccagcaccagagactggaaggaccacaagttcaagtggcggaaggaccctcaggacaagagggccaagcgatctggatctggagcaacaaacttctcactactcaaacaagcaggtgacgtggaggagaatcccgggccttctagaggccatatgaccgagtacaagcccacggtgcgcctcgccacccgcgacgacgtccccagggccgtacgcaccctcgccgccgcgttcgccgactaccccgccacgcgccacaccgtcgatccggaccgccacatcgagcgggtcaccgagctgcaagaactcttcctcacgcgcgtcgggctcgacatcggcaaggtgtgggtcgcggacgacggcgccgcggtggcggtctggaccacgccggagagcgtcgaagcgggggcggtgttcgccgagatcggcccgcgcatggccgagttgagcggttcccggctggccgcgcagcaacagatggaaggcctcctggcgccgcaccggcccaaggagcccgcgtggttcctggccaccgtcggcgtctcgcccgaccaccagggcaagggtctgggcagcgccgtcgtgctccccggagtggaggcggccgagcgcgccggggtgcccgccttcctggagacctccgcgccccgcaacctccccttctacgagcggctcggcttcaccgtcaccgccgacgtcgaggtgcccgaaggaccgcgcacctggtgcatgacccgcaagcccggtgcctga

SEQ ID NO: 3814 - DNA, 2904 bp, synthetic construct
  source 1..2904: mol_type = other DNA
atggccttaccagtgaccgccttgctcctgccgctggccttgctgctccacgccgccaggccggacatcgtgatgacccagagccctgccaccctgtccgtgtctccaggcgaaagagccaccctgagctgcagagcttcccagagcgtgtccaacgacgtcgtgtggtatcagcagaagcccggccaggcccccagactgctgatctactacgccagcaacagatacaccggcatccccgccagattcagcggctctggcagcggcaccgagttcaccctgacaatcagcagcctccagagcgaggacttcgccgtgtactactgtcagcaggactacaccagcccctggaccttcggccagggcaccaagctggaaatcaagagactcgaggacctgaagaacgtgttcccacctgaggtggccgtgttcgagcctagcgaggccgagatcagccacacccagaaagccaccctcgtgtgcctggctaccggcttctaccccgaccatgtggaactgtcttggtgggtcaacggcaaagaggtgcacagcggcgtgtctaccgacccccagccactgaaagaacagcccgccctgaacgacagccggtactgcctgagcagcagactgagagtgtccgccaccttctggcagaacccccggaaccacttcagatgccaggtgcagttctacggcctgagcgagaacgacgagtggacccaggacagagccaagcccgtgacccagatcgtgtctgccgaagcctggggcagagccgattgcggatcccagagcttcggcctgctggaccccaagctgtgctacctgctggatggcatcctgttcatctacggcgtgatcctgaccgccctgttcctgagagtgaagttcagcagaagcgccgacgcccctgcctaccagcagggacagaaccaactgtacaacgagctgaacctgggcagacgggaagagtacgacgtgctggacaagcggagaggcagggaccctgagatgggcggaaagccccagcggagaaagaacccccaggaaggactgtataacgaactccagaaagacaagatggccgaagcctacagcgagatcggcatgaagggcgagcggagaagaggcaagggccacgatggcctgtaccagggcctgagcaccgccaccaaggacacctatgacgccctgcacatgcaggccctgcctccaagaagggccaagcgatctggatctggagcaacaaacttctcactactcaaacaagcaggtgacgtggaggagaatcccgggcctactagtatggactggatttggcgcatccttttccttgtcggcgctgctaccggcgcgcattccttcgaagaggtgcaactggtgcagagcggagccgaagtgaagaaacctggggccagcgtgcgggtgtcctgcaaggccagcggctacacctttaccaactacggcatgaactgggtgcgccaggctcctggacagggcctggaatggatgggctggatcaacacctacaccggcgagcccacctacgccgacgacttcaagggcagagtgaccatgaccaccgacaccagcacctccaccgcctacatggaactgcggagcctgagaagcgacgacaccgccgtgtattattgcgcccggatcggcgacagcagccccagcgattattggggccagggaaccctcgtgaccgtgtcctctacgcgtatccagaaccctgatcctgccgtgtaccagctgcgggatagcaagagcagcgacaagagcgtgtgtctgttcaccgacttcgacagccagaccaacgtgtcccagagcaaggactccgacgtgtacatcaccgataagaccgtgctggacatgcggagcatggacttcaagagcaactccgccgtggcctggtccaacaagtccgatttcgcctgcgccaacgccttcaacaacagcattatccccgaggacacattcttcccaagccccgagagcagctgcggtaccatcactcaaggtttggcagtgtcaaccatctcatcattctttccacctggctaccaagtgtccttctgcctggtcatggtgctgctgttcgccgtggataccggcctgtacttcagcgtcaagaccaacatccggtccagcaccagagactggaaggaccacaagttcaagtggcggaaggaccctcaggacaagagggccaagcgatctggatctggagcaacaaacttctcactactcaaacaagcaggtgacgtggaggagaatcccgggccttctagaggccatatgaccgagtacaagcccacggtgcgcctcgccacccgcgacgacgtccccagggccgtacgcaccctcgccgccgcgttcgccgactaccccgccacgcgccacaccgtcgatccggaccgccacatcgagcgggtcaccgagctgcaagaactcttcctcacgcgcgtcgggctcgacatcggcaaggtgtgggtcgcggacgacggcgccgcggtggcggtctggaccacgccggagagcgtcgaagcgggggcggtgttcgccgagatcggcccgcgcatggccgagttgagcggttcccggctggccgcgcagcaacagatggaaggcctcctggcgccgcaccggcccaaggagcccgcgtggttcctggccaccgtcggcgtctcgcccgaccaccagggcaagggtctgggcagcgccgtcgtgctccccggagtggaggcggccgagcgcgccggggtgcccgccttcctggagacctccgcgccccgcaacctccccttctacgagcggctcggcttcaccgtcaccgccgacgtcgaggtgcccgaaggaccgcgcacctggtgcatgacccgcaagcccggtgcctga

SEQ ID NO: 3815 - DNA, 1953 bp, synthetic construct
  source 1..1953: mol_type = other DNA
atggccttaccagtgaccgccttgctcctgccgctggccttgctgctccacgccgccaggccggacatcgtgatgacccagagccctgccaccctgtccgtgtctccaggcgaaagagccaccctgagctgcagagcttcccagagcgtgtccaacgacgtcgtgtggtatcagcagaagcccggccaggcccccagactgctgatctactacgccagcaacagatacaccggcatccccgccagattcagcggctctggcagcggcaccgagttcaccctgacaatcagcagcctccagagcgaggacttcgccgtgtactactgtcagcaggactacaccagcccctggaccttcggccagggcaccaagctggaaatcaagagactcgagggacagcctaaggccaatcctaccgtgacactgttccctccaagcagcgaagaactccaggccaacaaggccacacttgtgtgcctgatctccgacttctaccctggggctgtgacagtggcttggaaggccgatggatctcctgtgaaagccggcgtggaaaccaccaagccatccaagcagagcaacaacaaatacgccgccagctcctacctgagcctgacacctgagcagtggaagtcccacagatcctacagctgccaagtgacccacgaaggcagcaccgtggaaaagacagtggcccctacagagtgcagcggatccctgggagagcctcagctgtgctatatcctggacgccatcctgtttctgtacggcatcgtgctgaccctgctgtactgccggctgaagatccaagtgcggaaggccgccatcaccagctacgagaaatccgacggcgtgtacaccggcctgagcaccagaaatcaagagacatacgagacactgaagcacgaaaagcctccacaaagggccaagcgatctggatctggagcaacaaacttctcactactcaaacaagcaggtgacgtggaggagaatcccgggcctactagtatggactggatttggcgcatccttttccttgtcggcgctgctaccggcgcgcattccttcgaagaggtgcaactggtgcagagcggagccgaagtgaagaaacctggggccagcgtgcgggtgtcctgcaaggccagcggctacacctttaccaactacggcatgaactgggtgcgccaggctcctggacagggcctggaatggatgggctggatcaacacctacaccggcgagcccacctacgccgacgacttcaagggcagagtgaccatgaccaccgacaccagcacctccaccgcctacatggaactgcggagcctgagaagcgacgacaccgccgtgtattattgcgcccggatcggcgacagcagccccagcgattattggggccagggaaccctcgtgaccgtgtcctctacgcgtgcctctacaaagggaccctccgtgtttcctctggctcccagcagcaagtctacaagcggaggaacagccgctctgggctgcctggtcaaggattactttcccgagcctgtgaccgtgtcctggaatagcggagcactgacaagcggcgtgcacacctttccagccgtgctgcaaagcagcggcctgtactctctgagcagcgtggtcacagtgcctagctctagcctgggcacccagacctacatctgcaatgtgaaccacaagcctagcaacaccaaggtggacaagagagtggaacccaagagctgtggtaccctcggagaaccacagctctgttacattctggatgctatcctgttcctctatgggatcgtcctgacactcctgtattgcagactcaaaattcaagttcgcaaagccgccattacctcttacgagaagagtgatggggtgtacacaggactgtctacccggaatcaagaaacctacgaaaccctcaaacatgagaagccacctcagtaa

SEQ ID NO: 3816 - DNA, 1479 bp, synthetic construct
  source 1..1479: mol_type = other DNA
atggccttaccagtgaccgccttgctcctgccgctggccttgctgctccacgccgccaggccggacatccagatgacacagagccctagcagcctgtctgccagcgtgggagacagagtgaccatcacctgtagagccagccaggatgtgtctacagccgtggcctggtatcagcagaagcctggaaaggcccctaagctgctgatctacagcgccagctttctgtactccggcgtgcccagcagattcagcggaagcagaagcggcaccgacttcaccctgacaatatccagcctccagcctgaggacttcgccacctactactgccagcagtacctgtaccagccttggacattcggccagggcaccaaggtggaaatcaagagaggcggaggcggaagtggaggcggaggatctggcggcggaggctctgaagttcagctggttgagtctggcggaggactggttcaacctggcggaagcctgagactgtcttgtgccgccagcggcttcaacatcgactactacggaatgcactgggtccgacaggcccctggcaaaggacttgaatgggtcgcctctctgtacggcggcagcgatagcacagattacgccgactctgtgaagggcagattcaccatcagcgccgacaccagcaagaacaccgcctacctccagatgaactccctgagagccgaagataccgccgtgtactactgctccagacagtacagcgcctacttcgactattggggccagggaaccctggtcaccgttagctctacgcgtgagcagaaactgatctcggaagaggatctgaaaattgaagttatgtatcctcctccttacctagacaatgagaagagcaatggaaccattatccatgtgaaagggaaacacctttgtccaagtcccctatttcccggaccttctaagcccttttgggtgctggtggtggttgggggagtcctggcttgctatagcttgctagtaacagtggcctttattattttctgggtgaggagtaagaggagcaggctcctgcacagtgactacatgaacatgactccacgccgccccggacccacccgcaagcattaccagccctatgccccaccacgcgacttcgcagcctatcgctccagagtgaagttcagcaggagcgcagacgcccccgcgtaccagcagggccagaaccagctctataacgagctcaatctaggacgaagagaggagtacgatgttttggacaagagacgtggccgggaccctgagatggggggaaagccgagaaggaagaaccctcaggaaggcctgtacaatgaactgcagaaagataagatggcggaggcctacagtgagattgggatgaaaggcgagcgccggaggggcaaggggcacgatggcctttaccagggtctcagtacagccaccaaggacacctacgacgcccttcacatgcaggccctgccccctcgc

SEQ ID NO: 3817 - DNA, 1500 bp, synthetic construct
  source 1..1500: mol_type = other DNA
atggccttaccagtgaccgccttgctcctgccgctggccttgctgctccacgccgccaggccggacatccagatgacacagagccctagcagcctgtctgccagcgtgggagacagagtgaccatcacctgtagagccagccaggatgtgtctacagccgtggcctggtatcagcagaagcctggaaaggcccctaagctgctgatctacagcgccagctttctgtactccggcgtgcccagcagattcagcggaagcagaagcggcaccgacttcaccctgacaatatccagcctccagcctgaggacttcgccacctactactgccagcagtacctgtaccagccttggacattcggccagggcaccaaggtggaaatcaagagaggcggaggcggaagtggaggcggaggatctggcggcggaggctctgaagttcagctggttgagtctggcggaggactggttcaacctggcggaagcctgagactgtcttgtgccgccagcggcttcaacatcgactactacggaatgcactgggtccgacaggcccctggcaaaggacttgaatgggtcgcctctctgtacggcggcagcgatagcacagattacgccgactctgtgaagggcagattcaccatcagcgccgacaccagcaagaacaccgcctacctccagatgaactccctgagagccgaagataccgccgtgtactactgctccagacagtacagcgcctacttcgactattggggccagggaaccctggtcaccgttagctctacgcgtgagcagaaactgatctcggaagaggatctggcgaagcccaccacgacgccagcgccgcgaccaccaacaccggcgcccaccatcgcgtcgcagcccctgtccctgcgcccagaggcgtgccggccagcggcggggggcgcagtgcacacgagggggctggacttcgcctgtgacatctacatctgggcgcccttggccgggacttgtggggtccttctcctgtcactggttatcaccctttactgcaaacggggcagaaagaaactcctgtatatattcaaacaaccatttatgagaccagtacaaactactcaagaggaagatggctgtagctgccgatttccagaagaagaagaaggaggatgtgaactgagagtgaagttcagcaggagcgcagacgcccccgcgtaccagcagggccagaaccagctctataacgagctgaatctaggacgaagagaggagtacgatgttttggacaagagacgtggccgggaccctgagatggggggaaagccgagaaggaagaaccctcaggaaggcctgtacaatgaactgcagaaagataagatggcggaggcctacagtgagattgggatgaaaggcgagcgccggaggggcaaggggcacgatggcctttaccagggtctcagtacagccaccaaggacacctacgacgcccttcacatgcaggccctgccccctcgctga

SEQ ID NO: 3818 - DNA, 1500 bp, synthetic construct
  source 1..1500: mol_type = other DNA
atggccttaccagtgaccgccttgctcctgccgctggccttgctgctccacgccgccaggccggaagttcagctggttgagtctggcggaggactggttcaacctggcggaagcctgagactgtcttgtgccgccagcggcttcaacatcgactactacggaatgcactgggtccgacaggcccctggcaaaggacttgaatgggtcgcctctctgtacggcggcagcgatagcacagattacgccgactctgtgaagggcagattcaccatcagcgccgacaccagcaagaacaccgcctacctccagatgaactccctgagagccgaagataccgccgtgtactactgctccagacagtacagcgcctacttcgactattggggccagggaaccctggtcaccgttagctctggcggaggcggaagtggaggcggaggatctggcggcggaggctctgacatccagatgacacagagccctagcagcctgtctgccagcgtgggagacagagtgaccatcacctgtagagccagccaggatgtgtctacagccgtggcctggtatcagcagaagcctggaaaggcccctaagctgctgatctacagcgccagctttctgtactccggcgtgcccagcagattcagcggaagcagaagcggcaccgacttcaccctgacaatatccagcctccagcctgaggacttcgccacctactactgccagcagtacctgtaccagccttggacattcggccagggcaccaaggtggaaatcaagagaacgcgtgagcagaaactgatctcggaagaggatctggcgaagcccaccacgacgccagcgccgcgaccaccaacaccggcgcccaccatcgcgtcgcagcccctgtccctgcgcccagaggcgtgccggccagcggcggggggcgcagtgcacacgagggggctggacttcgcctgtgacatctacatctgggcgcccttggccgggacttgtggggtccttctcctgtcactggttatcaccctttactgcaaacggggcagaaagaaactcctgtatatattcaaacaaccatttatgagaccagtacaaactactcaagaggaagatggctgtagctgccgatttccagaagaagaagaaggaggatgtgaactgagagtgaagttcagcaggagcgcagacgcccccgcgtaccagcagggccagaaccagctctataacgagctgaatctaggacgaagagaggagtacgatgttttggacaagagacgtggccgggaccctgagatggggggaaagccgagaaggaagaaccctcaggaaggcctgtacaatgaactgcagaaagataagatggcggaggcctacagtgagattgggatgaaaggcgagcgccggaggggcaaggggcacgatggcctttaccagggtctcagtacagccaccaaggacacctacgacgcccttcacatgcaggccctgccccctcgctga

SEQ ID NO: 3819 - DNA, 2739 bp, synthetic construct
  source 1..2739: mol_type = other DNA
atggccttaccagtgaccgccttgctcctgccgctggccttgctgctccacgccgccaggccggacatccagatgacacagagccctagcagcctgtctgccagcgtgggagacagagtgaccatcacctgtagagccagccaggatgtgtctacagccgtggcctggtatcagcagaagcctggaaaggcccctaagctgctgatctacagcgccagctttctgtactccggcgtgcccagcagattcagcggaagcagaagcggcaccgacttcaccctgacaatatccagcctccagcctgaggacttcgccacctactactgccagcagtacctgtaccagccttggacattcggccagggcaccaaggtggaaatcaagagaggcggaggcggaagtggaggcggaggatctggcggcggaggctctgaagttcagctggttgagtctggcggaggactggttcaacctggcggaagcctgagactgtcttgtgccgccagcggcttcaacatcgactactacggaatgcactgggtccgacaggcccctggcaaaggacttgaatgggtcgcctctctgtacggcggcagcgatagcacagattacgccgactctgtgaagggcagattcaccatcagcgccgacaccagcaagaacaccgcctacctccagatgaactccctgagagccgaagataccgccgtgtactactgctccagacagtacagcgcctacttcgactattggggccagggaaccctggtcaccgttagctctacgcgtgagcagaaactgatctcggaagaggatctggcgaagcccaccacgacgccagcgccgcgaccaccaacaccggcgcccaccatcgcgtcgcagcccctgtccctgcgcccagaggcgtgccggccagcggcggggggcgcagtgcacacgagggggctggacttcgcctgtgacatctacatctgggcgcccttggccgggacttgtggggtccttctcctgtcactggttatcaccctttactgcgggcgcgccagagtgaagttcagcaggagcgcagacgcccccgcgtaccagcagggccagaaccagctctataacgagctgaatctaggacgaagagaggagtacgatgttttggacaagagacgtggccgggaccctgagatggggggaaagccgagaaggaagaaccctcaggaaggcctgtacaatgaactgcagaaagataagatggcggaggcctacagtgagattgggatgaaaggcgagcgccggaggggcaaggggcacgatggcctttaccagggtctcagtacagccaccaaggacacctacgacgcccttcacatgcaggccctgccccctcgctctagaggatctggagcaacaaacttctcactactcaaacaagcaggtgacgtggaggagaatcccgggcctgggatccacatggccacttacgaggttctctgtgaggtggcgcggaaactgggcacggatgacagggaagtggtattgttcctcctaaacgtgttcatacctcaacccacactggcccaattaattggagctcttagagctttaaaggaggagggcaggttaacgtttcccctgttagcggaatgtctgtttcgtgcaggtcgcagagacctcttgcgcgacctgcttcacttagacccgcgttttttagagcgccacctagcgggcacaatgagttatttcagcccttatcagctcactgttctccacgtagacggggagctgtgtgcgagggatattaggtctttgatatttttaagcaaggacactatagggtctcgcagcacaccacagacattcttacactgggtgtactgtatggaaaacttagacctactgggtcccactgacgtggatgccctaatgtcaatgcttagatctttgtcaagagtagacctacagcgccaagtgcaaaccctaatgggccttcacctttccggcccatcacactcccaacactatcgccatacaccactcgagaccgatttctacgactacaaggacgacgatgacaagactagtggctccggcgagggcagaggaagtctactaacctgcggagatgtggaagaaaatcctggcccacatatgaccgagtacaagcccacggtgcgcctcgccacccgcgacgacgtccccagggccgtacgcaccctcgccgccgcgttcgccgactaccccgccacgcgccacaccgtcgatccggaccgccacatcgagcgggtcaccgagctgcaagaactcttcctcacgcgcgtcgggctcgacatcggcaaggtgtgggtcgcggacgacggcgccgcggtggcggtctggaccacgccggagagcgtcgaagcgggggcggtgttcgccgagatcggcccgcgcatggccgagttgagcggttcccggctggccgcgcagcaacagatggaaggcctcctggcgccgcaccggcccaaggagcccgcgtggttcctggccaccgtcggcgtctcgcccgaccaccagggcaagggtctgggcagcgccgtcgtgctccccggagtggaggcggccgagcgcgccggggtgcccgccttcctggagacctccgcgccccgcaacctccccttctacgagcggctcggcttcaccgtcaccgccgacgtcgaggtgcccgaaggaccgcgcacctggtgcatgacccgcaagcccggtgcctga

SEQ ID NO: 3820 - DNA, 2559 bp, synthetic construct
  source 1..2559: mol_type = other DNA
atggccttaccagtgaccgccttgctcctgccgctggccttgctgctccacgccgccaggccggacatccagatgacacagagccctagcagcctgtctgccagcgtgggagacagagtgaccatcacctgtagagccagccaggatgtgtctacagccgtggcctggtatcagcagaagcctggaaaggcccctaagctgctgatctacagcgccagctttctgtactccggcgtgcccagcagattcagcggaagcagaagcggcaccgacttcaccctgacaatatccagcctccagcctgaggacttcgccacctactactgccagcagtacctgtaccagccttggacattcggccagggcaccaaggtggaaatcaagagactcgagatccagaaccctgatcctgccgtgtaccagctgcgggatagcaagagcagcgacaagagcgtgtgtctgttcaccgacttcgacagccagaccaacgtgtcccagagcaaggactccgacgtgtacatcaccgataagtgcgtgctggacatgcggagcatggacttcaagagcaactccgccgtggcctggtccaacaagtccgatttcgcctgcgccaacgccttcaacaacagcattatccccgaggacacattcttcccaagcagcgacgtgccctgcgacgtgaagctggtggaaaagagcttcgagacagacaccaacctgaacttccagaacctgagcgtgatcggcttcagaatcctgctgctgaaagtggccggctttaacctgctgatgaccctgcggctgtggtccagccgcgccaagagaagcggatctggcgtgaagcagaccctgaatttcgacctgctgaagctggctggcgacgtggaatccaacccaggccctactagtatggactggatttggcgcatccttttccttgtcggcgctgctaccggcgcgcattccttcgaagaagttcagctggttgagtctggcggaggactggttcaacctggcggaagcctgagactgtcttgtgccgccagcggcttcaacatcgactactacggaatgcactgggtccgacaggcccctggcaaaggacttgaatgggtcgcctctctgtacggcggcagcgatagcacagattacgccgactctgtgaagggcagattcaccatcagcgccgacaccagcaagaacaccgcctacctccagatgaactccctgagagccgaagataccgccgtgtactactgctccagacagtacagcgcctacttcgactattggggccagggaaccctggtcaccgttagctctacgcgtgaggacctgaagaacgtgttcccacctgaggtggccgtgttcgagcctagcaaggccgagatcgcccacacccagaaagccaccctcgtgtgcctggctaccggcttctaccccgaccatgtggaactgtcttggtgggtcaacggcaaagaggtgcacagcggcgtgtgtaccgacccccagccactgaaagaacagcccgccctgaacgacagccggtactgcctgagcagcagactgagagtgtccgccaccttctggcagaacccccggaaccacttcagatgccaggtgcagttctacggcctgagcgagaacgacgagtggacccaggacagagccaagcccgtgacccagatcgtgtctgccgaagcctggggcagagccgattgcggcatcaccagcgccagctaccaccagggcgtgctgagcgccaccatcctgtacgagatcctgctgggcaaggccaccctgtacgccgtgctggtgtctgccctggtgctgatggctatggtcaagcggaaggacagccggggaagggccaagcgatctggatctggagcaacaaacttctcactactcaaacaagcaggtgacgtggaggagaatcccgggccttctagaggccatatgaccgagtacaagcccacggtgcgcctcgccacccgcgacgacgtccccagggccgtacgcaccctcgccgccgcgttcgccgactaccccgccacgcgccacaccgtcgatccggaccgccacatcgagcgggtcaccgagctgcaagaactcttcctcacgcgcgtcgggctcgacatcggcaaggtgtgggtcgcggacgacggcgccgcggtggcggtctggaccacgccggagagcgtcgaagcgggggcggtgttcgccgagatcggcccgcgcatggccgagttgagcggttcccggctggccgcgcagcaacagatggaaggcctcctggcgccgcaccggcccaaggagcccgcgtggttcctggccaccgtcggcgtctcgcccgaccaccagggcaagggtctgggcagcgccgtcgtgctccccggagtggaggcggccgagcgcgccggggtgcccgccttcctggagacctccgcgccccgcaacctccccttctacgagcggctcggcttcaccgtcaccgccgacgtcgaggtgcccgaaggaccgcgcacctggtgcatgacccgcaagcccggtgcctga

SEQ ID NO: 3821 - DNA, 2556 bp, synthetic construct
  source 1..2556: mol_type = other DNA
atggccttaccagtgaccgccttgctcctgccgctggccttgctgctccacgccgccaggccggacatccagatgacacagagccctagcagcctgtctgccagcgtgggagacagagtgaccatcacctgtagagccagccaggatgtgtctacagccgtggcctggtatcagcagaagcctggaaaggcccctaagctgctgatctacagcgccagctttctgtactccggcgtgcccagcagattcagcggaagcagaagcggcaccgacttcaccctgacaatatccagcctccagcctgaggacttcgccacctactactgccagcagtacctgtaccagccttggacattcggccagggcaccaaggtggaaatcaagagactcgaggacctgaagaacgtgttcccacctgaggtggccgtgttcgagcctagcaaggccgagatcgcccacacccagaaagccaccctcgtgtgcctggctaccggcttctaccccgaccatgtggaactgtcttggtgggtcaacggcaaagaggtgcacagcggcgtgtgtaccgacccccagccactgaaagaacagcccgccctgaacgacagccggtactgcctgagcagcagactgagagtgtccgccaccttctggcagaacccccggaaccacttcagatgccaggtgcagttctacggcctgagcgagaacgacgagtggacccaggacagagccaagcccgtgacccagatcgtgtctgccgaagcctggggcagagccgattgcggcatcaccagcgccagctaccaccagggcgtgctgagcgccaccatcctgtacgagatcctgctgggcaaggccaccctgtacgccgtgctggtgtctgccctggtgctgatggctatggtcaagcggaaggacagccggggaagggccaagcgatctggatctggagcaacaaacttctcactactcaaacaagcaggtgacgtggaggagaatcccgggcctactagtatggactggatttggcgcatccttttccttgtcggcgctgctaccggcgcgcattccttcgaagaagttcagctggttgagtctggcggaggactggttcaacctggcggaagcctgagactgtcttgtgccgccagcggcttcaacatcgactactacggaatgcactgggtccgacaggcccctggcaaaggacttgaatgggtcgcctctctgtacggcggcagcgatagcacagattacgccgactctgtgaagggcagattcaccatcagcgccgacaccagcaagaacaccgcctacctccagatgaactccctgagagccgaagataccgccgtgtactactgctccagacagtacagcgcctacttcgactattggggccagggaaccctggtcaccgttagctctacgcgtatccagaaccctgatcctgccgtgtaccagctgcgggatagcaagagcagcgacaagagcgtgtgtctgttcaccgacttcgacagccagaccaacgtgtcccagagcaaggactccgacgtgtacatcaccgataagtgcgtgctggacatgcggagcatggacttcaagagcaactccgccgtggcctggtccaacaagtccgatttcgcctgcgccaacgccttcaacaacagcattatccccgaggacacattcttcccaagcagcgacgtgccctgcgacgtgaagctggtggaaaagagcttcgagacagacaccaacctgaacttccagaacctgagcgtgatcggcttcagaatcctgctgctgaaagtggccggctttaacctgctgatgaccctgcggctgtggtccagccgcgccaagagaagcggatctggcgtgaagcagaccctgaatttcgacctgctgaagctggctggcgacgtggaatccaacccaggcccttctagaggccatatgaccgagtacaagcccacggtgcgcctcgccacccgcgacgacgtccccagggccgtacgcaccctcgccgccgcgttcgccgactaccccgccacgcgccacaccgtcgatccggaccgccacatcgagcgggtcaccgagctgcaagaactcttcctcacgcgcgtcgggctcgacatcggcaaggtgtgggtcgcggacgacggcgccgcggtggcggtctggaccacgccggagagcgtcgaagcgggggcggtgttcgccgagatcggcccgcgcatggccgagttgagcggttcccggctggccgcgcagcaacagatggaaggcctcctggcgccgcaccggcccaaggagcccgcgtggttcctggccaccgtcggcgtctcgcccgaccaccagggcaagggtctgggcagcgccgtcgtgctccccggagtggaggcggccgagcgcgccggggtgcccgccttcctggagacctccgcgccccgcaacctccccttctacgagcggctcggcttcaccgtcaccgccgacgtcgaggtgcccgaaggaccgcgcacctggtgcatgacccgcaagcccggtgcctga

SEQ ID NO: 3822 - DNA, 1854 bp, synthetic construct
  source 1..1854: mol_type = other DNA
atggccttaccagtgaccgccttgctcctgccgctggccttgctgctccacgccgccaggccggacatccagatgacacagagccctagcagcctgtctgccagcgtgggagacagagtgaccatcacctgtagagccagccaggatgtgtctacagccgtggcctggtatcagcagaagcctggaaaggcccctaagctgctgatctacagcgccagctttctgtactccggcgtgcccagcagattcagcggaagcagaagcggcaccgacttcaccctgacaatatccagcctccagcctgaggacttcgccacctactactgccagcagtacctgtaccagccttggacattcggccagggcaccaaggtggaaatcaagagactcgaggacctgaagaacgtgttcccacctgaggtggccgtgttcgagcctagcgaggccgagatcagccacacccagaaagccaccctcgtgtgcctggctaccggcttctaccccgaccatgtggaactgtcttggtgggtcaacggcaaagaggtgcacagcggcgtgtgtaccgacccccagccactgaaagaacagcccgccctgaacgacagccggtactgcctgagcagcagactgagagtgtccgccaccttctggcagaacccccggaaccacttcagatgccaggtgcagttctacggcctgagcgagaacgacgagtggacccaggacagagccaagcccgtgacccagatcgtgtctgccgaagcctggggcagagccgattgcggctttaccagcgagagctaccagcagggcgtgctgagcgccaccatcctgtacgagatcctgctgggcaaggccaccctgtacgccgtgctggtgtctgccctggtgctgatggctatggtcaagcggaaggacagccggggaagggccaagcgatctggatctggagcaacaaacttctcactactcaaacaagcaggtgacgtggaggagaatcccgggcctactagtatggactggatttggcgcatccttttccttgtcggcgctgctaccggcgcgcattccttcgaagaagttcagctggttgagtctggcggaggactggttcaacctggcggaagcctgagactgtcttgtgccgccagcggcttcaacatcgactactacggaatgcactgggtccgacaggcccctggcaaaggacttgaatgggtcgcctctctgtacggcggcagcgatagcacagattacgccgactctgtgaagggcagattcaccatcagcgccgacaccagcaagaacaccgcctacctccagatgaactccctgagagccgaagataccgccgtgtactactgctccagacagtacagcgcctacttcgactattggggccagggaaccctggtcaccgttagctctacgcgtatccagaaccctgatcctgccgtgtaccagctgcgggatagcaagagcagcgacaagagcgtgtgtctgttcaccgacttcgacagccagaccaacgtgtcccagagcaaggactccgacgtgtacatcaccgataagtgcgtgctggacatgcggagcatggacttcaagagcaactccgccgtggcctggtccaacaagtccgatttcgcctgcgccaacgccttcaacaacagcattatccccgaggacacattcttcccaagccccgagagcagctgcgacgtgaagctggtggaaaagagcttcgagacagacaccaacctgaacttccagaacctgagcgtgatcggcttcagaatcctgctgctgaaagtggccggctttaacctgctgatgaccctgcggctgtggtccagc

SEQ ID NO: 3823 - DNA, 2529 bp, synthetic construct
  source 1..2529: mol_type = other DNA
atggccttaccagtgaccgccttgctcctgccgctggccttgctgctccacgccgccaggccggacatccagatgacacagagccctagcagcctgtctgccagcgtgggagacagagtgaccatcacctgtagagccagccaggatgtgtctacagccgtggcctggtatcagcagaagcctggaaaggcccctaagctgctgatctacagcgccagctttctgtactccggcgtgcccagcagattcagcggaagcagaagcggcaccgacttcaccctgacaatatccagcctccagcctgaggacttcgccacctactactgccagcagtacctgtaccagccttggacattcggccagggcaccaaggtggaaatcaagagactcgaggacctgaagaacgtgttcccacctgaggtggccgtgttcgagcctagcgaggccgagatcagccacacccagaaagccaccctcgtgtgcctggctaccggcttctaccccgaccatgtggaactgtcttggtgggtcaacggcaaagaggtgcacagcggcgtgtgtaccgacccccagccactgaaagaacagcccgccctgaacgacagccggtactgcctgagcagcagactgagagtgtccgccaccttctggcagaacccccggaaccacttcagatgccaggtgcagttctacggcctgagcgagaacgacgagtggacccaggacagagccaagcccgtgacccagatcgtgtctgccgaagcctggggcagagccgattgcggctttaccagcgagagctaccagcagggcgtgctgagcgccaccatcctgtacgagatcctgctgggcaaggccaccctgtacgccgtgctggtgtctgccctggtgctgatggctatggtcaagcggaaggacagccggggaagggccaagcgatctggatctggagcaacaaacttctcactactcaaacaagcaggtgacgtggaggagaatcccgggcctactagtatggactggatttggcgcatccttttccttgtcggcgctgctaccggcgcgcattccttcgaagaagttcagctggttgagtctggcggaggactggttcaacctggcggaagcctgagactgtcttgtgccgccagcggcttcaacatcgactactacggaatgcactgggtccgacaggcccctggcaaaggacttgaatgggtcgcctctctgtacggcggcagcgatagcacagattacgccgactctgtgaagggcagattcaccatcagcgccgacaccagcaagaacaccgcctacctccagatgaactccctgagagccgaagataccgccgtgtactactgctccagacagtacagcgcctacttcgactattggggccagggaaccctggtcaccgttagctctacgcgtatccagaaccctgatcctgccgtgtaccagctgcgggatagcaagagcagcgacaagagcgtgtgtctgttcaccgacttcgacagccagaccaacgtgtcccagagcaaggactccgacgtgtacatcaccgataagtgcgtgctggacatgcggagcatggacttcaagagcaactccgccgtggcctggtccaacaagtccgatttcgcctgcgccaacgccttcaacaacagcattatccccgaggacacattcttcccaagccccgagagcagctgcgacgtgaagctggtggaaaagagcttcgagacagacaccaacctgaacttccagaacctgagcgtgatcggcttcagaatcctgctgctgaaagtggccggctttaacctgctgatgaccctgcggctgtggtccagccgcgccaagagaagcggatctggcgtgaagcagaccctgaatttcgacctgctgaagctggctggcgacgtggaatccaacccaggcccttctagaggcgggatccacaccatggctacctacgaggtgctgtgcgaggtggcaagaaagctgggcaccgacgacagagaagtggtgctgttcctgctgaacgtgttcatccctcagcctacactggcccagctgatcggtgcactgagagccctgaaagaggaaggccggctgacctttcctctgctggccgaatgcctgttcagagccggaagaagggatctgctgcgggacctgctgcatctggaccccagatttctggaaagacacctggccggcaccatgagctacttcagcccttaccagctgaccgtgctgcacgttgacggcgaactgtgcgccagagatattcggagcctgatcttcctgagcaaggacaccatcggcagccggtctacccctcagacatttctgcactgggtgtactgcatggaaaacctggacctgctcggccccacagatgtggatgccctgatgtccatgctgagaagcctgagcagagtggacctccagagacaggtgcagacactgatgggactgcacctgagcggacctagccacagccagcactacagacacacccct

SEQ ID NO: 3824 - DNA, 1866 bp, synthetic construct
  source 1..1866: mol_type = other DNA
atggccttaccagtgaccgccttgctcctgccgctggccttgctgctccacgccgccaggccggacatccagatgacacagagccctagcagcctgtctgccagcgtgggagacagagtgaccatcacctgtagagccagccaggatgtgtctacagccgtggcctggtatcagcagaagcctggaaaggcccctaagctgctgatctacagcgccagctttctgtactccggcgtgcccagcagattcagcggaagcagaagcggcaccgacttcaccctgacaatatccagcctccagcctgaggacttcgccacctactactgccagcagtacctgtaccagccttggacattcggccagggcaccaaggtggaaatcaagagactcgagatccagaaccctgatcctgccgtgtaccagctgcgggatagcaagagcagcgacaagagcgtgtgtctgttcaccgacttcgacagccagaccaacgtgtcccagagcaaggactccgacgtgtacatcaccgataagtgcgtgctggacatgcggagcatggacttcaagagcaactccgccgtggcctggtccaacaagtccgatttcgcctgcgccaacgccttcaacaacagcattatccccgaggacacattcttcccaagccccgagagcagctgcgacgtgaagctggtggaaaagagcttcgagacagacaccaacctgaacttccagaacctgagcgtgatcggcttcagaatcctgctgctgaaagtggccggctttaacctgctgatgaccctgcggctgtggtccagccgcgccaagagaagcggatctggcgtgaagcagaccctgaatttcgacctgctgaagctggctggcgacgtggaatccaacccaggccctactagtatggactggatttggcgcatccttttccttgtcggcgctgctaccggcgcgcattccttcgaagaagttcagctggttgagtctggcggaggactggttcaacctggcggaagcctgagactgtcttgtgccgccagcggcttcaacatcgactactacggaatgcactgggtccgacaggcccctggcaaaggacttgaatgggtcgcctctctgtacggcggcagcgatagcacagattacgccgactctgtgaagggcagattcaccatcagcgccgacaccagcaagaacaccgcctacctccagatgaactccctgagagccgaagataccgccgtgtactactgctccagacagtacagcgcctacttcgactattggggccagggaaccctggtcaccgttagctctacgcgtgaggacctgaagaacgtgttcccacctgaggtggccgtgttcgagcctagcgaggccgagatcagccacacccagaaagccaccctcgtgtgcctggctaccggcttctaccccgaccatgtggaactgtcttggtgggtcaacggcaaagaggtgcacagcggcgtgtgtaccgacccccagccactgaaagaacagcccgccctgaacgacagccggtactgcctgagcagcagactgagagtgtccgccaccttctggcagaacccccggaaccacttcagatgccaggtgcagttctacggcctgagcgagaacgacgagtggacccaggacagagccaagcccgtgacccagatcgtgtctgccgaagcctggggcagagccgattgcggctttaccagcgagagctaccagcagggcgtgctgagcgccaccatcctgtacgagatcctgctgggcaaggccaccctgtacgccgtgctggtgtctgccctggtgctgatggctatggtcaagcggaaggacagccgggga

SEQ ID NO: 3825 - DNA, 2532 bp, synthetic construct
  source 1..2532: mol_type = other DNA
atggccttaccagtgaccgccttgctcctgccgctggccttgctgctccacgccgccaggccggacatccagatgacacagagccctagcagcctgtctgccagcgtgggagacagagtgaccatcacctgtagagccagccaggatgtgtctacagccgtggcctggtatcagcagaagcctggaaaggcccctaagctgctgatctacagcgccagctttctgtactccggcgtgcccagcagattcagcggaagcagaagcggcaccgacttcaccctgacaatatccagcctccagcctgaggacttcgccacctactactgccagcagtacctgtaccagccttggacattcggccagggcaccaaggtggaaatcaagagactcgagatccagaaccctgatcctgccgtgtaccagctgcgggatagcaagagcagcgacaagagcgtgtgtctgttcaccgacttcgacagccagaccaacgtgtcccagagcaaggactccgacgtgtacatcaccgataagtgcgtgctggacatgcggagcatggacttcaagagcaactccgccgtggcctggtccaacaagtccgatttcgcctgcgccaacgccttcaacaacagcattatccccgaggacacattcttcccaagccccgagagcagctgcgacgtgaagctggtggaaaagagcttcgagacagacaccaacctgaacttccagaacctgagcgtgatcggcttcagaatcctgctgctgaaagtggccggctttaacctgctgatgaccctgcggctgtggtccagccgcgccaagagaagcggatctggcgtgaagcagaccctgaatttcgacctgctgaagctggctggcgacgtggaatccaacccaggccctactagtatggactggatttggcgcatccttttccttgtcggcgctgctaccggcgcgcattccttcgaagaagttcagctggttgagtctggcggaggactggttcaacctggcggaagcctgagactgtcttgtgccgccagcggcttcaacatcgactactacggaatgcactgggtccgacaggcccctggcaaaggacttgaatgggtcgcctctctgtacggcggcagcgatagcacagattacgccgactctgtgaagggcagattcaccatcagcgccgacaccagcaagaacaccgcctacctccagatgaactccctgagagccgaagataccgccgtgtactactgctccagacagtacagcgcctacttcgactattggggccagggaaccctggtcaccgttagctctacgcgtgaggacctgaagaacgtgttcccacctgaggtggccgtgttcgagcctagcgaggccgagatcagccacacccagaaagccaccctcgtgtgcctggctaccggcttctaccccgaccatgtggaactgtcttggtgggtcaacggcaaagaggtgcacagcggcgtgtgtaccgacccccagccactgaaagaacagcccgccctgaacgacagccggtactgcctgagcagcagactgagagtgtccgccaccttctggcagaacccccggaaccacttcagatgccaggtgcagttctacggcctgagcgagaacgacgagtggacccaggacagagccaagcccgtgacccagatcgtgtctgccgaagcctggggcagagccgattgcggctttaccagcgagagctaccagcagggcgtgctgagcgccaccatcctgtacgagatcctgctgggcaaggccaccctgtacgccgtgctggtgtctgccctggtgctgatggctatggtcaagcggaaggacagccggggaagggccaagcgatctggatctggagcaacaaacttctcactactcaaacaagcaggtgacgtggaggagaatcccgggccttctagaggcgggatccacaccatggctacctacgaggtgctgtgcgaggtggcaagaaagctgggcaccgacgacagagaagtggtgctgttcctgctgaacgtgttcatccctcagcctacactggcccagctgatcggtgcactgagagccctgaaagaggaaggccggctgacctttcctctgctggccgaatgcctgttcagagccggaagaagggatctgctgcgggacctgctgcatctggaccccagatttctggaaagacacctggccggcaccatgagctacttcagcccttaccagctgaccgtgctgcacgttgacggcgaactgtgcgccagagatattcggagcctgatcttcctgagcaaggacaccatcggcagccggtctacccctcagacatttctgcactgggtgtactgcatggaaaacctggacctgctcggccccacagatgtggatgccctgatgtccatgctgagaagcctgagcagagtggacctccagagacaggtgcagacactgatgggactgcacctgagcggacctagccacagccagcactacagacacacccct

SEQ ID NO: 3826 - DNA, 2691 bp, synthetic construct
  source 1..2691: mol_type = other DNA
atggccttaccagtgaccgccttgctcctgccgctggccttgctgctccacgccgccaggccgctcgaggggaaaccaattcccaaccctcttctgggactggattcaaccggcagcggcgaggacctgaagaacgtgttcccacctgaggtggccgtgttcgagcctagcaaggccgagatcgcccacacccagaaagccaccctcgtgtgcctggctaccggcttctaccccgaccatgtggaactgtcttggtgggtcaacggcaaagaggtgcacagcggcgtgtgtaccgacccccagccactgaaagaacagcccgccctgaacgacagccggtactgcctgagcagcagactgagagtgtccgccaccttctggcagaacccccggaaccacttcagatgccaggtgcagttctacggcctgagcgagaacgacgagtggacccaggacagagccaagcccgtgacccagatcgtgtctgccgaagcctggggcagagccgattgcggcatcaccagcgccagctaccaccagggcgtgctgagcgccaccatcctgtacgagatcctgctgggcaaggccaccctgtacgccgtgctggtgtctgccctggtgctgatggctatggtcaagcggaaggacagccggggaagggccaagcgatctggatctggagcaacaaacttctcactactcaaacaagcaggtgacgtggaggagaatcccgggcctactagcatggccttaccagtgaccgccttgctcctgccgctggccttgctgctccacgccgccaggccggacatccagatgacacagagccctagcagcctgtctgccagcgtgggagacagagtgaccatcacctgtagagccagccaggatgtgtctacagccgtggcctggtatcagcagaagcctggaaaggcccctaagctgctgatctacagcgccagctttctgtactccggcgtgcccagcagattcagcggaagcagaagcggcaccgacttcaccctgacaatatccagcctccagcctgaggacttcgccacctactactgccagcagtacctgtaccagccttggacattcggccagggcaccaaggtggaaatcaagagaggcggaggcggaagtggaggcggaggatctggcggcggaggctctgaagttcagctggttgagtctggcggaggactggttcaacctggcggaagcctgagactgtcttgtgccgccagcggcttcaacatcgactactacggaatgcactgggtccgacaggcccctggcaaaggacttgaatgggtcgcctctctgtacggcggcagcgatagcacagattacgccgactctgtgaagggcagattcaccatcagcgccgacaccagcaagaacaccgcctacctccagatgaactccctgagagccgaagataccgccgtgtactactgctccagacagtacagcgcctacttcgactattggggccagggaaccctggtcaccgttagctctacgcgtgagcagaaactgatctcggaagaggatgggagcggcatccagaaccctgatcctgccgtgtaccagctgcgggatagcaagagcagcgacaagagcgtgtgtctgttcaccgacttcgacagccagaccaacgtgtcccagagcaaggactccgacgtgtacatcaccgataagtgcgtgctggacatgcggagcatggacttcaagagcaactccgccgtggcctggtccaacaagtccgatttcgcctgcgccaacgccttcaacaacagcattatccccgaggacacattcttcccaagcagcgacgtgccctgcgacgtgaagctggtggaaaagagcttcgagacagacaccaacctgaacttccagaacctgagcgtgatcggcttcagaatcctgctgctgaaagtggccggctttaacctgctgatgaccctgcggctgtggtccagccgcgccaagagaagcggatctggcgtgaagcagaccctgaatttcgacctgctgaagctggctggcgacgtggaatccaacccaggcccttctagaggccatatgaccgagtacaagcccacggtgcgcctcgccacccgcgacgacgtccccagggccgtacgcaccctcgccgccgcgttcgccgactaccccgccacgcgccacaccgtcgatccggaccgccacatcgagcgggtcaccgagctgcaagaactcttcctcacgcgcgtcgggctcgacatcggcaaggtgtgggtcgcggacgacggcgccgcggtggcggtctggaccacgccggagagcgtcgaagcgggggcggtgttcgccgagatcggcccgcgcatggccgagttgagcggttcccggctggccgcgcagcaacagatggaaggcctcctggcgccgcaccggcccaaggagcccgcgtggttcctggccaccgtcggcgtctcgcccgaccaccagggcaagggtctgggcagcgccgtcgtgctccccggagtggaggcggccgagcgcgccggggtgcccgccttcctggagacctccgcgccccgcaacctccccttctacgagcggctcggcttcaccgtcaccgccgacgtcgaggtgcccgaaggaccgcgcacctggtgcatgacccgcaagcccggtgcctga

SEQ ID NO: 3827 - DNA, 2694 bp, synthetic construct
  source 1..2694: mol_type = other DNA
atggccttaccagtgaccgccttgctcctgccgctggccttgctgctccacgccgccaggccgctcgagcagaaactgatctcggaagaggatctgggctccggcgatcgccctgatcctgccgtgtaccagctgcgggatagcaagagcagcgacaagagcgtgtgtctgttcaccgacttcgacagccagaccaacgtgtcccagagcaaggactccgacgtgtacatcaccgataagtgcgtgctggacatgcggagcatggacttcaagagcaactccgccgtggcctggtccaacaagtccgatttcgcctgcgccaacgccttcaacaacagcattatccccgaggacacattcttcccaagccccgagagcagctgcgacgtgaagctggtggaaaagagcttcgagacagacaccaacctgaacttccagaacctgagcgtgatcggcttcagaatcctgctgctgaaagtggccggctttaacctgctgatgaccctgcggctgtggtccagctctagtcgcgccaagagaagcggatctggcgtgaagcagaccctgaatttcgacctgctgaagctggctggcgacgtggaatccaacccaggccccactagcatggccttaccagtgaccgccttgctcctgccgctggccttgctgctccacgccgccaggccggacatccagatgacacagagccctagcagcctgtctgccagcgtgggagacagagtgaccatcacctgtagagccagccaggatgtgtctacagccgtggcctggtatcagcagaagcctggaaaggcccctaagctgctgatctacagcgccagctttctgtactccggcgtgcccagcagattcagcggaagcagaagcggcaccgacttcaccctgacaatatccagcctccagcctgaggacttcgccacctactactgccagcagtacctgtaccagccttggacattcggccagggcaccaaggtggaaatcaagagaggcggaggcggaagtggaggcggaggatctggcggcggaggctctgaagttcagctggttgagtctggcggaggactggttcaacctggcggaagcctgagactgtcttgtgccgccagcggcttcaacatcgactactacggaatgcactgggtccgacaggcccctggcaaaggacttgaatgggtcgcctctctgtacggcggcagcgatagcacagattacgccgactctgtgaagggcagattcaccatcagcgccgacaccagcaagaacaccgcctacctccagatgaactccctgagagccgaagataccgccgtgtactactgctccagacagtacagcgcctacttcgactattggggccagggaaccctggtcaccgttagctctacgcgtgggaaaccaattcccaaccctcttctgggactggattcaaccggcagcggcgaggacctgaagaacgtgttcccacctgaggtggccgtgttcgagcctagcgaggccgagatcagccacacccagaaagccaccctcgtgtgcctggctaccggcttctaccccgaccatgtggaactgtcttggtgggtcaacggcaaagaggtgcacagcggcgtgtgtaccgacccccagccactgaaagaacagcccgccctgaacgacagccggtactgcctgagcagcagactgagagtgtccgccaccttctggcagaacccccggaaccacttcagatgccaggtgcagttctacggcctgagcgagaacgacgagtggacccaggacagagccaagcccgtgacccagatcgtgtctgccgaagcctggggcagagccgattgcggctttaccagcgagagctaccagcagggcgtgctgagcgccaccatcctgtacgagatcctgctgggcaaggccaccctgtacgccgtgctggtgtctgccctggtgctgatggctatggtcaagcggaaggacagccggggaagggccaagcgatctggatctggagcaacaaacttctcactactcaaacaagcaggtgacgtggaggagaatcccgggccttctagaggccatatgaccgagtacaagcccacggtgcgcctcgccacccgcgacgacgtccccagggccgtacgcaccctcgccgccgcgttcgccgactaccccgccacgcgccacaccgtcgatccggaccgccacatcgagcgggtcaccgagctgcaagaactcttcctcacgcgcgtcgggctcgacatcggcaaggtgtgggtcgcggacgacggcgccgcggtggcggtctggaccacgccggagagcgtcgaagcgggggcggtgttcgccgagatcggcccgcgcatggccgagttgagcggttcccggctggccgcgcagcaacagatggaaggcctcctggcgccgcaccggcccaaggagcccgcgtggttcctggccaccgtcggcgtctcgcccgaccaccagggcaagggtctgggcagcgccgtcgtgctccccggagtggaggcggccgagcgcgccggggtgcccgccttcctggagacctccgcgccccgcaacctccccttctacgagcggctcggcttcaccgtcaccgccgacgtcgaggtgcccgaaggaccgcgcacctggtgcatgacccgcaagcccggtgcctga

SEQ ID NO: 3828 - DNA, 2556 bp, synthetic construct
  source 1..2556: mol_type = other DNA
atggccttaccagtgaccgccttgctcctgccgctggccttgctgctccacgccgccaggccggacatccagatgacacagagccctagcagcctgtctgccagcgtgggagacagagtgaccatcacctgtagagccagccaggatgtgtctacagccgtggcctggtatcagcagaagcctggaaaggcccctaagctgctgatctacagcgccagctttctgtactccggcgtgcccagcagattcagcggaagcagaagcggcaccgacttcaccctgacaatatccagcctccagcctgaggacttcgccacctactactgccagcagtacctgtaccagccttggacattcggccagggcaccaaggtggaaatcaagagactcgaggacctgaagaacgtgttcccacctgaggtggccgtgttcgagcctagcgaggccgagatcagccacacccagaaagccaccctcgtgtgcctggctaccggcttctaccccgaccatgtggaactgtcttggtgggtcaacggcaaagaggtgcacagcggcgtgtctaccgacccccagccactgaaagaacagcccgccctgaacgacagccggtactgcctgagcagcagactgagagtgtccgccaccttctggcagaacccccggaaccacttcagatgccaggtgcagttctacggcctgagcgagaacgacgagtggacccaggacagagccaagcccgtgacccagatcgtgtctgccgaagcctggggcagagccgattgcggctttaccagcgagagctaccagcagggcgtgctgagcgccaccatcctgtacgagatcctgctgggcaaggccaccctgtacgccgtgctggtgtctgccctggtgctgatggctatggtcaagcggaaggacagccggggaagggccaagcgatctggatctggagcaacaaacttctcactactcaaacaagcaggtgacgtggaggagaatcccgggcctactagtatggactggatttggcgcatccttttccttgtcggcgctgctaccggcgcgcattccttcgaagaagttcagctggttgagtctggcggaggactggttcaacctggcggaagcctgagactgtcttgtgccgccagcggcttcaacatcgactactacggaatgcactgggtccgacaggcccctggcaaaggacttgaatgggtcgcctctctgtacggcggcagcgatagcacagattacgccgactctgtgaagggcagattcaccatcagcgccgacaccagcaagaacaccgcctacctccagatgaactccctgagagccgaagataccgccgtgtactactgctccagacagtacagcgcctacttcgactattggggccagggaaccctggtcaccgttagctctacgcgtatccagaaccctgatcctgccgtgtaccagctgcgggatagcaagagcagcgacaagagcgtgtgtctgttcaccgacttcgacagccagaccaacgtgtcccagagcaaggactccgacgtgtacatcaccgataagaccgtgctggacatgcggagcatggacttcaagagcaactccgccgtggcctggtccaacaagtccgatttcgcctgcgccaacgccttcaacaacagcattatccccgaggacacattcttcccaagccccgagagcagctgcgacgtgaagctggtggaaaagagcttcgagacagacaccaacctgaacttccagaacctgagcgtgatcggcttcagaatcctgctgctgaaagtggccggctttaacctgctgatgaccctgcggctgtggtccagccgcgccaagagaagcggatctggcgtgaagcagaccctgaatttcgacctgctgaagctggctggcgacgtggaatccaacccaggcccttctagaggccatatgaccgagtacaagcccacggtgcgcctcgccacccgcgacgacgtccccagggccgtacgcaccctcgccgccgcgttcgccgactaccccgccacgcgccacaccgtcgatccggaccgccacatcgagcgggtcaccgagctgcaagaactcttcctcacgcgcgtcgggctcgacatcggcaaggtgtgggtcgcggacgacggcgccgcggtggcggtctggaccacgccggagagcgtcgaagcgggggcggtgttcgccgagatcggcccgcgcatggccgagttgagcggttcccggctggccgcgcagcaacagatggaaggcctcctggcgccgcaccggcccaaggagcccgcgtggttcctggccaccgtcggcgtctcgcccgaccaccagggcaagggtctgggcagcgccgtcgtgctccccggagtggaggcggccgagcgcgccggggtgcccgccttcctggagacctccgcgccccgcaacctccccttctacgagcggctcggcttcaccgtcaccgccgacgtcgaggtgcccgaaggaccgcgcacctggtgcatgacccgcaagcccggtgcctga

SEQ ID NO: 3829 - DNA, 2802 bp, synthetic construct
  source 1..2802: mol_type = other DNA
atggccttaccagtgaccgccttgctcctgccgctggccttgctgctccacgccgccaggccggacatccagatgacacagagccctagcagcctgtctgccagcgtgggagacagagtgaccatcacctgtagagccagccaggatgtgtctacagccgtggcctggtatcagcagaagcctggaaaggcccctaagctgctgatctacagcgccagctttctgtactccggcgtgcccagcagattcagcggaagcagaagcggcaccgacttcaccctgacaatatccagcctccagcctgaggacttcgccacctactactgccagcagtacctgtaccagccttggacattcggccagggcaccaaggtggaaatcaagagactcgaggacctgaagaacgtgttcccacctgaggtggccgtgttcgagcctagcgaggccgagatcagccacacccagaaagccaccctcgtgtgcctggctaccggcttctaccccgaccatgtggaactgtcttggtgggtcaacggcaaagaggtgcacagcggcgtgtctaccgacccccagccactgaaagaacagcccgccctgaacgacagccggtactgcctgagcagcagactgagagtgtccgccaccttctggcagaacccccggaaccacttcagatgccaggtgcagttctacggcctgagcgagaacgacgagtggacccaggacagagccaagcccgtgacccagatcgtgtctgccgaagcctggggcagagccgattgcggctttaccagcgagagctaccagcagggcgtgctgagcgccaccatcctgtacgagatcctgctgggcaaggccaccctgtacgccgtgctggtgtctgccctggtgctgatggctatggtcaagcggaaggacagccggggaagggccaagcgatctggatctggagcaacaaacttctcactactcaaacaagcaggtgacgtggaggagaatcccgggcctactagtatggactggatttggcgcatccttttccttgtcggcgctgctaccggcgcgcattccttcgaagaagttcagctggttgagtctggcggaggactggttcaacctggcggaagcctgagactgtcttgtgccgccagcggcttcaacatcgactactacggaatgcactgggtccgacaggcccctggcaaaggacttgaatgggtcgcctctctgtacggcggcagcgatagcacagattacgccgactctgtgaagggcagattcaccatcagcgccgacaccagcaagaacaccgcctacctccagatgaactccctgagagccgaagataccgccgtgtactactgctccagacagtacagcgcctacttcgactattggggccagggaaccctggtcaccgttagctctacgcgtgagcagaaactgatctcggaagaggatgggagcggcaccccattcccttctctggcccctcccatcatgctgctggtggacggcaagcagcagatggtggtcgtgtgcctggtgctggatgtggccccacctggactggacagccccatctggtttagcgccggcaatggctctgccctggacgcctttacctacggcccaagccctgccaccgatggcacctggacaaatctggcccacctgagcctgcccagcgaggaactggcttcttgggagcctctcgtgtgccacacaggacctggcgctgagggacacagcagatccacccagcctatgcacctgtctggcgaggccagcaccgccagaacctgtcctcaggaacctctgagaggcacccctggcggagcactgtggctgggagtgctgagactgctgctgttcaagctgctgctgtttgacctgctgctgacctgctcctgtctgtgcgatcctgccggccctctgccttctcctgccaccaccacaagactgagagccctgggcagccacagactgcaccctgccacagagacaggcggcagagaggccacaagcagccctagaccccagcccagagacagaagatggggcgataccccccctggcagaaagcctggatctccagtccgcgccaagagaagcggatctggcgtgaagcagaccctgaatttcgacctgctgaagctggctggcgacgtggaatccaacccaggcccttctagaggccatatgaccgagtacaagcccacggtgcgcctcgccacccgcgacgacgtccccagggccgtacgcaccctcgccgccgcgttcgccgactaccccgccacgcgccacaccgtcgatccggaccgccacatcgagcgggtcaccgagctgcaagaactcttcctcacgcgcgtcgggctcgacatcggcaaggtgtgggtcgcggacgacggcgccgcggtggcggtctggaccacgccggagagcgtcgaagcgggggcggtgttcgccgagatcggcccgcgcatggccgagttgagcggttcccggctggccgcgcagcaacagatggaaggcctcctggcgccgcaccggcccaaggagcccgcgtggttcctggccaccgtcggcgtctcgcccgaccaccagggcaagggtctgggcagcgccgtcgtgctccccggagtggaggcggccgagcgcgccggggtgcccgccttcctggagacctccgcgccccgcaacctccccttctacgagcggctcggcttcaccgtcaccgccgacgtcgaggtgcccgaaggaccgcgcacctggtgcatgacccgcaagcccggtgcctga

SEQ ID NO: 3830 - DNA, 2856 bp, synthetic construct
  source 1..2856: mol_type = other DNA
atggccttaccagtgaccgccttgctcctgccgctggccttgctgctccacgccgccaggccgctcgaggacctgaagaacgtgttcccacctgaggtggccgtgttcgagcctagcgaggccgagatcagccacacccagaaagccaccctcgtgtgcctggctaccggcttctaccccgaccatgtggaactgtcttggtgggtcaacggcaaagaggtgcacagcggcgtgtctaccgacccccagccactgaaagaacagcccgccctgaacgacagccggtactgcctgagcagcagactgagagtgtccgccaccttctggcagaacccccggaaccacttcagatgccaggtgcagttctacggcctgagcgagaacgacgagtggacccaggacagagccaagcccgtgacccagatcgtgtctgccgaagcctggggcagagccgattgcggctttaccagcgagagctaccagcagggcgtgctgagcgccaccatcctgtacgagatcctgctgggcaaggccaccctgtacgccgtgctggtgtctgccctggtgctgatggctatggtcaagcggaaggacagccggggaagggccaagcgatctggatctggagcaacaaacttctcactactcaaacaagcaggtgacgtggaggagaatcccgggcctactagcatggccttaccagtgaccgccttgctcctgccgctggccttgctgctccacgccgccaggccggacatccagatgacacagagccctagcagcctgtctgccagcgtgggagacagagtgaccatcacctgtagagccagccaggatgtgtctacagccgtggcctggtatcagcagaagcctggaaaggcccctaagctgctgatctacagcgccagctttctgtactccggcgtgcccagcagattcagcggaagcagaagcggcaccgacttcaccctgacaatatccagcctccagcctgaggacttcgccacctactactgccagcagtacctgtaccagccttggacattcggccagggcaccaaggtggaaatcaagagaggcggaggcggaagtggaggcggaggatctggcggcggaggctctgaagttcagctggttgagtctggcggaggactggttcaacctggcggaagcctgagactgtcttgtgccgccagcggcttcaacatcgactactacggaatgcactgggtccgacaggcccctggcaaaggacttgaatgggtcgcctctctgtacggcggcagcgatagcacagattacgccgactctgtgaagggcagattcaccatcagcgccgacaccagcaagaacaccgcctacctccagatgaactccctgagagccgaagataccgccgtgtactactgctccagacagtacagcgcctacttcgactattggggccagggaaccctggtcaccgttagctctacgcgtgagcagaaactgatctcggaagaggatctggggagcggcaccccattcccttctctggcccctcccatcatgctgctggtggacggcaagcagcagatggtggtcgtgtgcctggtgctggatgtggccccacctggactggacagccccatctggtttagcgccggcaatggctctgccctggacgcctttacctacggcccaagccctgccaccgatggcacctggacaaatctggcccacctgagcctgcccagcgaggaactggcttcttgggagcctctcgtgtgccacacaggacctggcgctgagggacacagcagatccacccagcctatgcacctgtctggcgaggccagcaccgccagaacctgtcctcaggaacctctgagaggcacccctggcggagcactgtggctgggagtgctgagactgctgctgttcaagctgctgctgtttgacctgctgctgacctgctcctgtctgtgcgatcctgccggccctctgccttctcctgccaccaccacaagactgagagccctgggcagccacagactgcaccctgccacagagacaggcggcagagaggccacaagcagccctagaccccagcccagagacagaagatggggcgataccccccctggcagaaagcctggatctccagtccgcgccaagagaagcggatctggcgtgaagcagaccctgaatttcgacctgctgaagctggctggcgacgtggaatccaacccaggcccttctagatctagaggccatatgaccgagtacaagcccacggtgcgcctcgccacccgcgacgacgtccccagggccgtacgcaccctcgccgccgcgttcgccgactaccccgccacgcgccacaccgtcgatccggaccgccacatcgagcgggtcaccgagctgcaagaactcttcctcacgcgcgtcgggctcgacatcggcaaggtgtgggtcgcggacgacggcgccgcggtggcggtctggaccacgccggagagcgtcgaagcgggggcggtgttcgccgagatcggcccgcgcatggccgagttgagcggttcccggctggccgcgcagcaacagatggaaggcctcctggcgccgcaccggcccaaggagcccgcgtggttcctggccaccgtcggcgtctcgcccgaccaccagggcaagggtctgggcagcgccgtcgtgctccccggagtggaggcggccgagcgcgccggggtgcccgccttcctggagacctccgcgccccgcaacctccccttctacgagcggctcggcttcaccgtcaccgccgacgtcgaggtgcccgaaggaccgcgcacctggtgcatgacccgcaagcccggtgcctga

SEQ ID NO: 3831 - DNA, 2667 bp, synthetic construct
  source 1..2667: mol_type = other DNA
atggccttaccagtgaccgccttgctcctgccgctggccttgctgctccacgccgccaggccggacatccagatgacacagagccctagcagcctgtctgccagcgtgggagacagagtgaccatcacctgtagagccagccaggatgtgtctacagccgtggcctggtatcagcagaagcctggaaaggcccctaagctgctgatctacagcgccagctttctgtactccggcgtgcccagcagattcagcggaagcagaagcggcaccgacttcaccctgacaatatccagcctccagcctgaggacttcgccacctactactgccagcagtacctgtaccagccttggacattcggccagggcaccaaggtggaaatcaagagactcgaggggaaaccaattcccaaccctcttctgggactggattcaaccggcagcggcgacaagcagctggacgccgacgtgtcccccaagcctaccatcttcctgccctctatcgccgagacaaagctccagaaggccggcacctacctgtgcctgctggaaaagttcttcccagatgtgattaagatccactggcaggaaaagaagtccaacaccatcctgggcagccaggaaggcaacaccatgaagaccaacgacacctacatgaagttcagctggctgaccgtgcccgagaagtccctggacaaagaacacagatgcatcgtgcggcacgaaaacaacaagaacggcgtggaccaggaaatcatcttcccacccatcaagaccgatgtgattacaatggaccccaaggacaactgctccaaggacgccaacgataccctgctgctccagctgaccaacaccagcgcctactacatgtacttgttgctgctgctgaagtccgtggtgtacttcgccatcatcacatgctgcctgctgcggagaaccgccttctgctgcaacggcgagaagtctagggccaagcgatctggatctggagcaacaaacttctcactactcaaacaagcaggtgacgtggaggagaatcccgggcctactagtatggactggatttggcgcatccttttccttgtcggcgctgctaccggcgcgcattccttcgaagaagttcagctggttgagtctggcggaggactggttcaacctggcggaagcctgagactgtcttgtgccgccagcggcttcaacatcgactactacggaatgcactgggtccgacaggcccctggcaaaggacttgaatgggtcgcctctctgtacggcggcagcgatagcacagattacgccgactctgtgaagggcagattcaccatcagcgccgacaccagcaagaacaccgcctacctccagatgaactccctgagagccgaagataccgccgtgtactactgctccagacagtacagcgcctacttcgactattggggccagggaaccctggtcaccgttagctctacgcgtgagcagaaactgatctcggaagaggatgggagcggcagccagcctcacaccaagcccagcgtgttcgtgatgaagaacggcaccaacgtggcctgcctcgtgaaagagttctaccccaaggacatcaggatcaacctggtgtccagcaagaagatcaccgagttcgaccccgccatcgtgatctcccccagcggcaagtacaacgccgtgaagctggggaagtacgaggacagcaacagcgtgacctgctccgtgcagcacgacaacaagaccgtgcacagcaccgactttgaagtgaaaaccgactccaccgaccacgtgaagcccaaagagacagagaacaccaagcagcccagcaagagctgccacaagcccaaggccatcgtgcacaccgagaaagtgaacatgatgagcctgaccgtgctgggcctgcggatgctgttcgccaaaaccgtggccgtgaacttcctgctgaccgccaagctgttcttcctccgcgccaagagaagcggatctggcgtgaagcagaccctgaatttcgacctgctgaagctggctggcgacgtggaatccaacccaggcccttctagaggccatatgaccgagtacaagcccacggtgcgcctcgccacccgcgacgacgtccccagggccgtacgcaccctcgccgccgcgttcgccgactaccccgccacgcgccacaccgtcgatccggaccgccacatcgagcgggtcaccgagctgcaagaactcttcctcacgcgcgtcgggctcgacatcggcaaggtgtgggtcgcggacgacggcgccgcggtggcggtctggaccacgccggagagcgtcgaagcgggggcggtgttcgccgagatcggcccgcgcatggccgagttgagcggttcccggctggccgcgcagcaacagatggaaggcctcctggcgccgcaccggcccaaggagcccgcgtggttcctggccaccgtcggcgtctcgcccgaccaccagggcaagggtctgggcagcgccgtcgtgctccccggagtggaggcggccgagcgcgccggggtgcccgccttcctggagacctccgcgccccgcaacctccccttctacgagcggctcggcttcaccgtcaccgccgacgtcgaggtgcccgaaggaccgcgcacctggtgcatgacccgcaagcccggtgcctga

SEQ ID NO: 3832 - DNA, 1878 bp, synthetic construct
  source 1..1878: mol_type = other DNA
atggccttaccagtgaccgccttgctcctgccgctggccttgctgctccacgccgccaggccggacatccagatgacacagagccctagcagcctgtctgccagcgtgggagacagagtgaccatcacctgtagagccagccaggatgtgtctacagccgtggcctggtatcagcagaagcctggaaaggcccctaagctgctgatctacagcgccagctttctgtactccggcgtgcccagcagattcagcggaagcagaagcggcaccgacttcaccctgacaatatccagcctccagcctgaggacttcgccacctactactgccagcagtacctgtaccagccttggacattcggccagggcaccaaggtggaaatcaagagactcgagagccagcctcacaccaagcccagcgtgttcgtgatgaagaacggcaccaacgtggcctgcctcgtgaaagagttctaccccaaggacatcaggatcaacctggtgtccagcaagaagatcaccgagttcgaccccgccatcgtgatctcccccagcggcaagtacaacgccgtgaagctggggaagtacgaggacagcaacagcgtgacctgctccgtgcagcacgacaacaagaccgtgcacagcaccgactttgaagtgaaaaccgactccaccgaccacgtgaagcccaaagagacagagaacaccaagcagcccagcaagagctgccacaagcccaaggccatcgtgcacaccgagaaagtgaacatgatgagcctgaccgtgctgggcctgcggatgctgttcgccaaaaccgtggccgtgaacttcctgctgaccgccaagctgttcttcctcagggccaagcgatctggatctggagcaacaaacttctcactactcaaacaagcaggtgacgtggaggagaatcccgggcctactagtatggactggatttggcgcatccttttccttgtcggcgctgctaccggcgcgcattccttcgaagaagttcagctggttgagtctggcggaggactggttcaacctggcggaagcctgagactgtcttgtgccgccagcggcttcaacatcgactactacggaatgcactgggtccgacaggcccctggcaaaggacttgaatgggtcgcctctctgtacggcggcagcgatagcacagattacgccgactctgtgaagggcagattcaccatcagcgccgacaccagcaagaacaccgcctacctccagatgaactccctgagagccgaagataccgccgtgtactactgctccagacagtacagcgcctacttcgactattggggccagggaaccctggtcaccgttagctctacgcgtgacaagcagctggacgccgacgtgtcccccaagcctaccatcttcctgccctctatcgccgagacaaagctccagaaggccggcacctacctgtgcctgctggaaaagttcttcccagatgtgattaagatccactggcaggaaaagaagtccaacaccatcctgggcagccaggaaggcaacaccatgaagaccaacgacacctacatgaagttcagctggctgaccgtgcccgagaagtccctggacaaagaacacagatgcatcgtgcggcacgaaaacaacaagaacggcgtggaccaggaaatcatcttcccacccatcaagaccgatgtgattacaatggaccccaaggacaactgctccaaggacgccaacgataccctgctgctccagctgaccaacaccagcgcctactacatgtacttgttgctgctgctgaagtccgtggtgtacttcgccatcatcacatgctgcctgctgcggagaaccgccttctgctgcaacggcgagaagtct

SEQ ID NO: 3833 - DNA, 2712 bp, synthetic construct
  source 1..2712: mol_type = other DNA
atggccttaccagtgaccgccttgctcctgccgctggccttgctgctccacgccgccaggccgctcgaggggaaaccaattcccaaccctcttctgggactggattcaaccggcagcggcgacaagcagctggacgccgacgtgtcccccaagcctaccatcttcctgccctctatcgccgagacaaagctccagaaggccggcacctacctgtgcctgctggaaaagttcttcccagatgtgattaagatccactggcaggaaaagaagtccaacaccatcctgggcagccaggaaggcaacaccatgaagaccaacgacacctacatgaagttcagctggctgaccgtgcccgagaagtccctggacaaagaacacagatgcatcgtgcggcacgaaaacaacaagaacggcgtggaccaggaaatcatcttcccacccatcaagaccgatgtgattacaatggaccccaaggacaactgctccaaggacgccaacgataccctgctgctccagctgaccaacaccagcgcctactacatgtacttgttgctgctgctgaagtccgtggtgtacttcgccatcatcacatgctgcctgctgcggagaaccgccttctgctgcaacggcgagaagtctagggccaagcgatctggatctggagcaacaaacttctcactactcaaacaagcaggtgacgtggaggagaatcccgggcctactagcatggccttaccagtgaccgccttgctcctgccgctggccttgctgctccacgccgccaggccggacatccagatgacacagagccctagcagcctgtctgccagcgtgggagacagagtgaccatcacctgtagagccagccaggatgtgtctacagccgtggcctggtatcagcagaagcctggaaaggcccctaagctgctgatctacagcgccagctttctgtactccggcgtgcccagcagattcagcggaagcagaagcggcaccgacttcaccctgacaatatccagcctccagcctgaggacttcgccacctactactgccagcagtacctgtaccagccttggacattcggccagggcaccaaggtggaaatcaagagaggcggaggcggaagtggaggcggaggatctggcggcggaggctctgaagttcagctggttgagtctggcggaggactggttcaacctggcggaagcctgagactgtcttgtgccgccagcggcttcaacatcgactactacggaatgcactgggtccgacaggcccctggcaaaggacttgaatgggtcgcctctctgtacggcggcagcgatagcacagattacgccgactctgtgaagggcagattcaccatcagcgccgacaccagcaagaacaccgcctacctccagatgaactccctgagagccgaagataccgccgtgtactactgctccagacagtacagcgcctacttcgactattggggccagggaaccctggtcaccgttagctctacgcgtgagcagaaactgatctcggaagaggatgggagcggcagccagcctcacaccaagcccagcgtgttcgtgatgaagaacggcaccaacgtggcctgcctcgtgaaagagttctaccccaaggacatcaggatcaacctggtgtccagcaagaagatcaccgagttcgaccccgccatcgtgatctcccccagcggcaagtacaacgccgtgaagctggggaagtacgaggacagcaacagcgtgacctgctccgtgcagcacgacaacaagaccgtgcacagcaccgactttgaagtgaaaaccgactccaccgaccacgtgaagcccaaagagacagagaacaccaagcagcccagcaagagctgccacaagcccaaggccatcgtgcacaccgagaaagtgaacatgatgagcctgaccgtgctgggcctgcggatgctgttcgccaaaaccgtggccgtgaacttcctgctgaccgccaagctgttcttcctccgcgccaagagaagcggatctggcgtgaagcagaccctgaatttcgacctgctgaagctggctggcgacgtggaatccaacccaggcccttctagaggccatatgaccgagtacaagcccacggtgcgcctcgccacccgcgacgacgtccccagggccgtacgcaccctcgccgccgcgttcgccgactaccccgccacgcgccacaccgtcgatccggaccgccacatcgagcgggtcaccgagctgcaagaactcttcctcacgcgcgtcgggctcgacatcggcaaggtgtgggtcgcggacgacggcgccgcggtggcggtctggaccacgccggagagcgtcgaagcgggggcggtgttcgccgagatcggcccgcgcatggccgagttgagcggttcccggctggccgcgcagcaacagatggaaggcctcctggcgccgcaccggcccaaggagcccgcgtggttcctggccaccgtcggcgtctcgcccgaccaccagggcaagggtctgggcagcgccgtcgtgctccccggagtggaggcggccgagcgcgccggggtgcccgccttcctggagacctccgcgccccgcaacctccccttctacgagcggctcggcttcaccgtcaccgccgacgtcgaggtgcccgaaggaccgcgcacctggtgcatgacccgcaagcccggtgcctga

SEQ ID NO: 3834 - DNA, 3087 bp, synthetic construct
  source 1..3087: mol_type = other DNA
atggccttaccagtgaccgccttgctcctgccgctggccttgctgctccacgccgccaggccggacatccagatgacacagagccctagcagcctgtctgccagcgtgggagacagagtgaccatcacctgtagagccagccaggatgtgtctacagccgtggcctggtatcagcagaagcctggaaaggcccctaagctgctgatctacagcgccagctttctgtactccggcgtgcccagcagattcagcggaagcagaagcggcaccgacttcaccctgacaatatccagcctccagcctgaggacttcgccacctactactgccagcagtacctgtaccagccttggacattcggccagggcaccaaggtggaaatcaagagaggacagcctaaggccaatcctaccgtgacactgttccctccaagcagcgaagaactccaggccaacaaggccacacttgtgtgcctgatctccgacttctaccctggggctgtgacagtggcttggaaggccgatggatctcctgtgaaagccggcgtggaaaccaccaagccatccaagcagagcaacaacaaatacgccgccagctcctacctgagcctgacacctgagcagtggaagtcccacagatcctacagctgccaagtgacccacgaaggcagcaccgtggaaaagacagtggcccctacagagtgcagcggatcccagagcttcggcctgctggaccccaagctgtgctacctgctggatggcatcctgttcatctacggcgtgatcctgaccgccctgttcctgagagtgaagttcagcagaagcgccgacgcccctgcctaccagcagggacagaaccaactgtacaacgagctgaacctgggcagacgggaagagtacgacgtgctggacaagcggagaggcagggaccctgagatgggcggaaagccccagcggagaaagaacccccaggaaggactgtataacgaactccagaaagacaagatggccgaagcctacagcgagatcggcatgaagggcgagcggagaagaggcaagggccacgatggcctgtaccagggcctgagcaccgccaccaaggacacctatgacgccctgcacatgcaggccctgcctccaagaagggccaagcgatctggatctggagcaacaaacttctcactactcaaacaagcaggtgacgtggaggagaatcccgggcctactagtatggactggatttggcgcatccttttccttgtcggcgctgctaccggcgcgcattccttcgaagaagttcagctggttgagtctggcggaggactggttcaacctggcggaagcctgagactgtcttgtgccgccagcggcttcaacatcgactactacggaatgcactgggtccgacaggcccctggcaaaggacttgaatgggtcgcctctctgtacggcggcagcgatagcacagattacgccgactctgtgaagggcagattcaccatcagcgccgacaccagcaagaacaccgcctacctccagatgaactccctgagagccgaagataccgccgtgtactactgctccagacagtacagcgcctacttcgactattggggccagggaaccctggtcaccgttagctctgcctctacaaagggaccctccgtgtttcctctggctcccagcagcaagtctacaagcggaggaacagccgctctgggctgcctggtcaaggattactttcccgagcctgtgaccgtgtcctggaatagcggagcactgacaagcggcgtgcacacctttccagccgtgctgcaaagcagcggcctgtactctctgagcagcgtggtcacagtgcctagctctagcctgggcacccagacctacatctgcaatgtgaaccacaagcctagcaacaccaaggtggacaagagagtggaacccaagagctgtggtacccagagttttgggttgttggaccctaaattgtgctatctgttggacggaatcctgttcatttacggagtgatcctgaccgcattgttcctgcgggttaagttttccagatccgcagacgcacccgcttaccaacaagggcagaaccaactctacaatgaacttaatttggggcggagggaagagtacgacgttctggacaaaaggaggggacgagatcccgagatgggcggaaagcctcagcgaaggaagaatccgcaagaggggctttataacgaactccagaaagataaaatggcagaagcctatagtgagattgggatgaagggagaaaggaggaggggtaaaggtcacgatgggttgtaccaaggattgagcacagccactaaagatacctatgatgcgctccacatgcaggccctgccgccaagacgcgccaagagaagcggatctggcgtgaagcagaccctgaatttcgacctgctgaagctggctggcgacgtggaatccaacccaggcccttctagaggccatatgaccgagtacaagcccacggtgcgcctcgccacccgcgacgacgtccccagggccgtacgcaccctcgccgccgcgttcgccgactaccccgccacgcgccacaccgtcgatccggaccgccacatcgagcgggtcaccgagctgcaagaactcttcctcacgcgcgtcgggctcgacatcggcaaggtgtgggtcgcggacgacggcgccgcggtggcggtctggaccacgccggagagcgtcgaagcgggggcggtgttcgccgagatcggcccgcgcatggccgagttgagcggttcccggctggccgcgcagcaacagatggaaggcctcctggcgccgcaccggcccaaggagcccgcgtggttcctggccaccgtcggcgtctcgcccgaccaccagggcaagggtctgggcagcgccgtcgtgctccccggagtggaggcggccgagcgcgccggggtgcccgccttcctggagacctccgcgccccgcaacctccccttctacgagcggctcggcttcaccgtcaccgccgacgtcgaggtgcccgaaggaccgcgcacctggtgcatgacccgcaagcccggtgcctga

SEQ ID NO: 3835 - DNA, 2442 bp, synthetic construct
  source 1..2442: mol_type = other DNA
atggccttaccagtgaccgccttgctcctgccgctggccttgctgctccacgccgccaggccggacatccagatgacacagagccctagcagcctgtctgccagcgtgggagacagagtgaccatcacctgtagagccagccaggatgtgtctacagccgtggcctggtatcagcagaagcctggaaaggcccctaagctgctgatctacagcgccagctttctgtactccggcgtgcccagcagattcagcggaagcagaagcggcaccgacttcaccctgacaatatccagcctccagcctgaggacttcgccacctactactgccagcagtacctgtaccagccttggacattcggccagggcaccaaggtggaaatcaagagactcgaggacctgaagaacgtgttcccacctgaggtggccgtgttcgagcctagcgaggccgagatcagccacacccagaaagccaccctcgtgtgcctggctaccggcttctaccccgaccatgtggaactgtcttggtgggtcaacggcaaagaggtgcacagcggcgtgtctaccgacccccagccactgaaagaacagcccgccctgaacgacagccggtactgcctgagcagcagactgagagtgtccgccaccttctggcagaacccccggaaccacttcagatgccaggtgcagttctacggcctgagcgagaacgacgagtggacccaggacagagccaagcccgtgacccagatcgtgtctgccgaagcctggggcagagccgattgcggatcccagagcttcggcctgctggaccccaagctgtgctacctgctggatggcatcctgttcatctacggcgtgatcctgaccgccctgttcctgagagtgaagttcagcagaagcgccgacgcccctgcctaccagcagggacagaaccaactgtacaacgagctgaacctgggcagacgggaagagtacgacgtgctggacaagcggagaggcagggaccctgagatgggcggaaagccccagcggagaaagaacccccaggaaggactgtataacgaactccagaaagacaagatggccgaagcctacagcgagatcggcatgaagggcgagcggagaagaggcaagggccacgatggcctgtaccagggcctgagcaccgccaccaaggacacctatgacgccctgcacatgcaggccctgcctccaagaagggccaagcgatctggatctggagcaacaaacttctcactactcaaacaagcaggtgacgtggaggagaatcccgggcctactagtatggactggatttggcgcatccttttccttgtcggcgctgctaccggcgcgcattccttcgaagaagttcagctggttgagtctggcggaggactggttcaacctggcggaagcctgagactgtcttgtgccgccagcggcttcaacatcgactactacggaatgcactgggtccgacaggcccctggcaaaggacttgaatgggtcgcctctctgtacggcggcagcgatagcacagattacgccgactctgtgaagggcagattcaccatcagcgccgacaccagcaagaacaccgcctacctccagatgaactccctgagagccgaagataccgccgtgtactactgctccagacagtacagcgcctacttcgactattggggccagggaaccctggtcaccgttagctctacgcgtatccagaaccctgatcctgccgtgtaccagctgcgggatagcaagagcagcgacaagagcgtgtgtctgttcaccgacttcgacagccagaccaacgtgtcccagagcaaggactccgacgtgtacatcaccgataagaccgtgctggacatgcggagcatggacttcaagagcaactccgccgtggcctggtccaacaagtccgatttcgcctgcgccaacgccttcaacaacagcattatccccgaggacacattcttcccaagccccgagagcagctgcggtacccagagttttgggttgttggaccctaaattgtgctatctgttggacggaatcctgttcatttacggagtgatcctgaccgcattgttcctgcgggttaagttttccagatccgcagacgcacccgcttaccaacaagggcagaaccaactctacaatgaacttaatttggggcggagggaagagtacgacgttctggacaaaaggaggggacgagatcccgagatgggcggaaagcctcagcgaaggaagaatccgcaagaggggctttataacgaactccagaaagataaaatggcagaagcctatagtgagattgggatgaagggagaaaggaggaggggtaaaggtcacgatgggttgtaccaaggattgagcacagccactaaagatacctatgatgcgctccacatgcaggccctgccgccaaga

SEQ ID NO: 3836 - DNA, 2442 bp, synthetic construct
  source 1..2442: mol_type = other DNA
atggccttaccagtgaccgccttgctcctgccgctggccttgctgctccacgccgccaggccggacatccagatgacacagagccctagcagcctgtctgccagcgtgggagacagagtgaccatcacctgtagagccagccaggatgtgtctacagccgtggcctggtatcagcagaagcctggaaaggcccctaagctgctgatctacagcgccagctttctgtactccggcgtgcccagcagattcagcggaagcagaagcggcaccgacttcaccctgacaatatccagcctccagcctgaggacttcgccacctactactgccagcagtacctgtaccagccttggacattcggccagggcaccaaggtggaaatcaagagactcgaggacctgaagaacgtgttcccacctgaggtggccgtgttcgagcctagcaaggccgagatcgcccacacccagaaagccaccctcgtgtgcctggctaccggcttctaccccgaccatgtggaactgtcttggtgggtcaacggcaaagaggtgcacagcggcgtgtgtaccgacccccagccactgaaagaacagcccgccctgaacgacagccggtactgcctgagcagcagactgagagtgtccgccaccttctggcagaacccccggaaccacttcagatgccaggtgcagttctacggcctgagcgagaacgacgagtggacccaggacagagccaagcccgtgacccagatcgtgtctgccgaagcctggggcagagccgattgcggatcccagagcttcggcctgctggaccccaagctgtgctacctgctggatggcatcctgttcatctacggcgtgatcctgaccgccctgttcctgagagtgaagttcagcagaagcgccgacgcccctgcctaccagcagggacagaaccaactgtacaacgagctgaacctgggcagacgggaagagtacgacgtgctggacaagcggagaggcagggaccctgagatgggcggaaagccccagcggagaaagaacccccaggaaggactgtataacgaactccagaaagacaagatggccgaagcctacagcgagatcggcatgaagggcgagcggagaagaggcaagggccacgatggcctgtaccagggcctgagcaccgccaccaaggacacctatgacgccctgcacatgcaggccctgcctccaagaagggccaagcgatctggatctggagcaacaaacttctcactactcaaacaagcaggtgacgtggaggagaatcccgggcctactagtatggactggatttggcgcatccttttccttgtcggcgctgctaccggcgcgcattccttcgaagaagttcagctggttgagtctggcggaggactggttcaacctggcggaagcctgagactgtcttgtgccgccagcggcttcaacatcgactactacggaatgcactgggtccgacaggcccctggcaaaggacttgaatgggtcgcctctctgtacggcggcagcgatagcacagattacgccgactctgtgaagggcagattcaccatcagcgccgacaccagcaagaacaccgcctacctccagatgaactccctgagagccgaagataccgccgtgtactactgctccagacagtacagcgcctacttcgactattggggccagggaaccctggtcaccgttagctctacgcgtatccagaaccctgatcctgccgtgtaccagctgcgggatagcaagagcagcgacaagagcgtgtgtctgttcaccgacttcgacagccagaccaacgtgtcccagagcaaggactccgacgtgtacatcaccgataagtgcgtgctggacatgcggagcatggacttcaagagcaactccgccgtggcctggtccaacaagtccgatttcgcctgcgccaacgccttcaacaacagcattatccccgaggacacattcttcccaagcagcgacgtgccctgcggtacccagagttttgggttgttggaccctaaattgtgctatctgttggacggaatcctgttcatttacggagtgatcctgaccgcattgttcctgcgggttaagttttccagatccgcagacgcacccgcttaccaacaagggcagaaccaactctacaatgaacttaatttggggcggagggaagagtacgacgttctggacaaaaggaggggacgagatcccgagatgggcggaaagcctcagcgaaggaagaatccgcaagaggggctttataacgaactccagaaagataaaatggcagaagcctatagtgagattgggatgaagggagaaaggaggaggggtaaaggtcacgatgggttgtaccaaggattgagcacagccactaaagatacctatgatgcgctccacatgcaggccctgccgccaaga

SEQ ID NO: 3837 - DNA, 2655 bp, synthetic construct
  source 1..2655: mol_type = other DNA
atggccttaccagtgaccgccttgctcctgccgctggccttgctgctccacgccgccaggccggacatccagatgacacagagccctagcagcctgtctgccagcgtgggagacagagtgaccatcacctgtagagccagccaggatgtgtctacagccgtggcctggtatcagcagaagcctggaaaggcccctaagctgctgatctacagcgccagctttctgtactccggcgtgcccagcagattcagcggaagcagaagcggcaccgacttcaccctgacaatatccagcctccagcctgaggacttcgccacctactactgccagcagtacctgtaccagccttggacattcggccagggcaccaaggtggaaatcaagagactcgaggggaaaccaattcccaaccctcttctgggactggattcaaccggcagcggcgaggacctgaagaacgtgttcccacctgaggtggccgtgttcgagcctagcgaggccgagatcagccacacccagaaagccaccctcgtgtgcctggctaccggcttctaccccgaccatgtggaactgtcttggtgggtcaacggcaaagaggtgcacagcggcgtgtctaccgacccccagccactgaaagaacagcccgccctgaacgacagccggtactgcctgagcagcagactgagagtgtccgccaccttctggcagaacccccggaaccacttcagatgccaggtgcagttctacggcctgagcgagaacgacgagtggacccaggacagagccaagcccgtgacccagatcgtgtctgccgaagcctggggcagagccgattgcggatcccagagcttcggcctgctggaccccaagctgtgctacctgctggatggcatcctgttcatctacggcgtgatcctgaccgccctgttcctgagagtgaagttcagcagaagcgccgacgcccctgcctaccagcagggacagaaccaactgtacaacgagctgaacctgggcagacgggaagagtacgacgtgctggacaagcggagaggcagggaccctgagatgggcggaaagccccagcggagaaagaacccccaggaaggactgtataacgaactccagaaagacaagatggccgaagcctacagcgagatcggcatgaagggcgagcggagaagaggcaagggccacgatggcctgtaccagggcctgagcaccgccaccaaggacacctatgacgccctgcacatgcaggccctgcctccaagaagggccaagcgatctggatctggagcaacaaacttctcactactcaaacaagcaggtgacgtggaggagaatcccgggcctactagtatggactggatttggcgcatccttttccttgtcggcgctgctaccggcgcgcattccttcgaagaagttcagctggttgagtctggcggaggactggttcaacctggcggaagcctgagactgtcttgtgccgccagcggcttcaacatcgactactacggaatgcactgggtccgacaggcccctggcaaaggacttgaatgggtcgcctctctgtacggcggcagcgatagcacagattacgccgactctgtgaagggcagattcaccatcagcgccgacaccagcaagaacaccgcctacctccagatgaactccctgagagccgaagataccgccgtgtactactgctccagacagtacagcgcctacttcgactattggggccagggaaccctggtcaccgttagctctacgcgtgagcagaaactgatctcggaagaggatgggagcggcatccagaaccctgatcctgccgtgtaccagctgcgggatagcaagagcagcgacaagagcgtgtgtctgttcaccgacttcgacagccagaccaacgtgtcccagagcaaggactccgacgtgtacatcaccgataagaccgtgctggacatgcggagcatggacttcaagagcaactccgccgtggcctggtccaacaagtccgatttcgcctgcgccaacgccttcaacaacagcattatccccgaggacacattcttcccaagccccgagagcagctgcggtacccagagttttgggttgttggaccctaaattgtgctatctgttggacggaatcctgttcatttacggagtgatcctgaccgcattgttcctgaggagcaagcggtcacggctgctccacagcgattacatgaatatgacaccacgaagaccgggtcctactcgcaaacactaccaaccctacgcacctccccgcgactttgcagcgtaccgatctcgggttaagttttccagatccgcagacgcacccgcttaccaacaagggcagaaccaactctacaatgaacttaatttggggcggagggaagagtacgacgttctggacaaaaggaggggacgagatcccgagatgggcggaaagcctcagcgaaggaagaatccgcaagaggggctttataacgaactccagaaagataaaatggcagaagcctatagtgagattgggatgaagggagaaaggaggaggggtaaaggtcacgatgggttgtaccaaggattgagcacagccactaaagatacctatgatgcgctccacatgcaggccctgccgccaaga

SEQ ID NO: 3838 - DNA, 2778 bp, synthetic construct
  source 1..2778: mol_type = other DNA
atggccttaccagtgaccgccttgctcctgccgctggccttgctgctccacgccgccaggccggacatccagatgacacagagccctagcagcctgtctgccagcgtgggagacagagtgaccatcacctgtagagccagccaggatgtgtctacagccgtggcctggtatcagcagaagcctggaaaggcccctaagctgctgatctacagcgccagctttctgtactccggcgtgcccagcagattcagcggaagcagaagcggcaccgacttcaccctgacaatatccagcctccagcctgaggacttcgccacctactactgccagcagtacctgtaccagccttggacattcggccagggcaccaaggtggaaatcaagagactcgaggggaaaccaattcccaaccctcttctgggactggattcaaccggcagcggcgaggacctgaagaacgtgttcccacctgaggtggccgtgttcgagcctagcgaggccgagatcagccacacccagaaagccaccctcgtgtgcctggctaccggcttctaccccgaccatgtggaactgtcttggtgggtcaacggcaaagaggtgcacagcggcgtgtctaccgacccccagccactgaaagaacagcccgccctgaacgacagccggtactgcctgagcagcagactgagagtgtccgccaccttctggcagaacccccggaaccacttcagatgccaggtgcagttctacggcctgagcgagaacgacgagtggacccaggacagagccaagcccgtgacccagatcgtgtctgccgaagcctggggcagagccgattgcggatcccagagcttcggcctgctggaccccaagctgtgctacctgctggatggcatcctgttcatctacggcgtgatcctgaccgccctgttcctgaggagtaagaggagcaggctcctgcacagtgactacatgaacatgactccacgccgccccggacccacccgcaagcattaccagccctatgccccaccacgcgacttcgcagcctatcgctccagagtgaagttcagcagaagcgccgacgcccctgcctaccagcagggacagaaccaactgtacaacgagctgaacctgggcagacgggaagagtacgacgtgctggacaagcggagaggcagggaccctgagatgggcggaaagccccagcggagaaagaacccccaggaaggactgtataacgaactccagaaagacaagatggccgaagcctacagcgagatcggcatgaagggcgagcggagaagaggcaagggccacgatggcctgtaccagggcctgagcaccgccaccaaggacacctatgacgccctgcacatgcaggccctgcctccaagaagggccaagcgatctggatctggagcaacaaacttctcactactcaaacaagcaggtgacgtggaggagaatcccgggcctactagtatggactggatttggcgcatccttttccttgtcggcgctgctaccggcgcgcattccttcgaagaagttcagctggttgagtctggcggaggactggttcaacctggcggaagcctgagactgtcttgtgccgccagcggcttcaacatcgactactacggaatgcactgggtccgacaggcccctggcaaaggacttgaatgggtcgcctctctgtacggcggcagcgatagcacagattacgccgactctgtgaagggcagattcaccatcagcgccgacaccagcaagaacaccgcctacctccagatgaactccctgagagccgaagataccgccgtgtactactgctccagacagtacagcgcctacttcgactattggggccagggaaccctggtcaccgttagctctacgcgtgagcagaaactgatctcggaagaggatgggagcggcatccagaaccctgatcctgccgtgtaccagctgcgggatagcaagagcagcgacaagagcgtgtgtctgttcaccgacttcgacagccagaccaacgtgtcccagagcaaggactccgacgtgtacatcaccgataagaccgtgctggacatgcggagcatggacttcaagagcaactccgccgtggcctggtccaacaagtccgatttcgcctgcgccaacgccttcaacaacagcattatccccgaggacacattcttcccaagccccgagagcagctgcggtacccagagttttgggttgttggaccctaaattgtgctatctgttggacggaatcctgttcatttacggagtgatcctgaccgcattgttcctgaggagcaagcggtcacggctgctccacagcgattacatgaatatgacaccacgaagaccgggtcctactcgcaaacactaccaaccctacgcacctccccgcgactttgcagcgtaccgatctcgggttaagttttccagatccgcagacgcacccgcttaccaacaagggcagaaccaactctacaatgaacttaatttggggcggagggaagagtacgacgttctggacaaaaggaggggacgagatcccgagatgggcggaaagcctcagcgaaggaagaatccgcaagaggggctttataacgaactccagaaagataaaatggcagaagcctatagtgagattgggatgaagggagaaaggaggaggggtaaaggtcacgatgggttgtaccaaggattgagcacagccactaaagatacctatgatgcgctccacatgcaggccctgccgccaaga

SEQ ID NO: 3839 - DNA, 2661 bp, synthetic construct
  source 1..2661: mol_type = other DNA
atggccttaccagtgaccgccttgctcctgccgctggccttgctgctccacgccgccaggccggacatccagatgacacagagccctagcagcctgtctgccagcgtgggagacagagtgaccatcacctgtagagccagccaggatgtgtctacagccgtggcctggtatcagcagaagcctggaaaggcccctaagctgctgatctacagcgccagctttctgtactccggcgtgcccagcagattcagcggaagcagaagcggcaccgacttcaccctgacaatatccagcctccagcctgaggacttcgccacctactactgccagcagtacctgtaccagccttggacattcggccagggcaccaaggtggaaatcaagagactcgaggggaaaccaattcccaaccctcttctgggactggattcaaccggcagcggcgaggacctgaagaacgtgttcccacctgaggtggccgtgttcgagcctagcgaggccgagatcagccacacccagaaagccaccctcgtgtgcctggctaccggcttctaccccgaccatgtggaactgtcttggtgggtcaacggcaaagaggtgcacagcggcgtgtctaccgacccccagccactgaaagaacagcccgccctgaacgacagccggtactgcctgagcagcagactgagagtgtccgccaccttctggcagaacccccggaaccacttcagatgccaggtgcagttctacggcctgagcgagaacgacgagtggacccaggacagagccaagcccgtgacccagatcgtgtctgccgaagcctggggcagagccgattgcggatcccagagcttcggcctgctggaccccaagctgtgctacctgctggatggcatcctgttcatctacggcgtgatcctgaccgccctgttcctgagagtgaagttcagcagaagcgccgacgcccctgcctaccagcagggacagaaccaactgtacaacgagctgaacctgggcagacgggaagagtacgacgtgctggacaagcggagaggcagggaccctgagatgggcggaaagccccagcggagaaagaacccccaggaaggactgtataacgaactccagaaagacaagatggccgaagcctacagcgagatcggcatgaagggcgagcggagaagaggcaagggccacgatggcctgtaccagggcctgagcaccgccaccaaggacacctatgacgccctgcacatgcaggccctgcctccaagaagggccaagcgatctggatctggagcaacaaacttctcactactcaaacaagcaggtgacgtggaggagaatcccgggcctactagtatggactggatttggcgcatccttttccttgtcggcgctgctaccggcgcgcattccttcgaagaagttcagctggttgagtctggcggaggactggttcaacctggcggaagcctgagactgtcttgtgccgccagcggcttcaacatcgactactacggaatgcactgggtccgacaggcccctggcaaaggacttgaatgggtcgcctctctgtacggcggcagcgatagcacagattacgccgactctgtgaagggcagattcaccatcagcgccgacaccagcaagaacaccgcctacctccagatgaactccctgagagccgaagataccgccgtgtactactgctccagacagtacagcgcctacttcgactattggggccagggaaccctggtcaccgttagctctacgcgtgagcagaaactgatctcggaagaggatctggggagcggcatccagaaccctgatcctgccgtgtaccagctgcgggatagcaagagcagcgacaagagcgtgtgtctgttcaccgacttcgacagccagaccaacgtgtcccagagcaaggactccgacgtgtacatcaccgataagaccgtgctggacatgcggagcatggacttcaagagcaactccgccgtggcctggtccaacaagtccgatttcgcctgcgccaacgccttcaacaacagcattatccccgaggacacattcttcccaagccccgagagcagctgcggtacccagagttttgggttgttggaccctaaattgtgctatctgttggacggaatcctgttcatttacggagtgatcctgaccgcattgttcctgaagagaggccggaagaagctgctgtacatcttcaagcagcctttcatgcggcccgtgcagaccacccaggaagaggacggctgctcctgccggttccccgaggaagaagaaggcggctgcgagctgcgggttaagttttccagatccgcagacgcacccgcttaccaacaagggcagaaccaactctacaatgaacttaatttggggcggagggaagagtacgacgttctggacaaaaggaggggacgagatcccgagatgggcggaaagcctcagcgaaggaagaatccgcaagaggggctttataacgaactccagaaagataaaatggcagaagcctatagtgagattgggatgaagggagaaaggaggaggggtaaaggtcacgatgggttgtaccaaggattgagcacagccactaaagatacctatgatgcgctccacatgcaggccctgccgccaaga

SEQ ID NO: 3840 - DNA, 2787 bp, synthetic construct
  source 1..2787: mol_type = other DNA
atggccttaccagtgaccgccttgctcctgccgctggccttgctgctccacgccgccaggccggacatccagatgacacagagccctagcagcctgtctgccagcgtgggagacagagtgaccatcacctgtagagccagccaggatgtgtctacagccgtggcctggtatcagcagaagcctggaaaggcccctaagctgctgatctacagcgccagctttctgtactccggcgtgcccagcagattcagcggaagcagaagcggcaccgacttcaccctgacaatatccagcctccagcctgaggacttcgccacctactactgccagcagtacctgtaccagccttggacattcggccagggcaccaaggtggaaatcaagagactcgaggggaaaccaattcccaaccctcttctgggactggattcaaccggcagcggcgaggacctgaagaacgtgttcccacctgaggtggccgtgttcgagcctagcgaggccgagatcagccacacccagaaagccaccctcgtgtgcctggctaccggcttctaccccgaccatgtggaactgtcttggtgggtcaacggcaaagaggtgcacagcggcgtgtctaccgacccccagccactgaaagaacagcccgccctgaacgacagccggtactgcctgagcagcagactgagagtgtccgccaccttctggcagaacccccggaaccacttcagatgccaggtgcagttctacggcctgagcgagaacgacgagtggacccaggacagagccaagcccgtgacccagatcgtgtctgccgaagcctggggcagagccgattgcggatcccagagcttcggcctgctggaccccaagctgtgctacctgctggatggcatcctgttcatctacggcgtgatcctgaccgccctgttcctgaaacggggcagaaagaaactcctgtatatattcaaacaaccatttatgagaccagtacaaactactcaagaggaagatggctgtagctgccgatttccagaagaagaagaaggaggatgtgaactgagagtgaagttcagcagaagcgccgacgcccctgcctaccagcagggacagaaccaactgtacaacgagctgaacctgggcagacgggaagagtacgacgtgctggacaagcggagaggcagggaccctgagatgggcggaaagccccagcggagaaagaacccccaggaaggactgtataacgaactccagaaagacaagatggccgaagcctacagcgagatcggcatgaagggcgagcggagaagaggcaagggccacgatggcctgtaccagggcctgagcaccgccaccaaggacacctatgacgccctgcacatgcaggccctgcctccaagaagggccaagcgatctggatctggagcaacaaacttctcactactcaaacaagcaggtgacgtggaggagaatcccgggcctactagtatggactggatttggcgcatccttttccttgtcggcgctgctaccggcgcgcattccttcgaagaagttcagctggttgagtctggcggaggactggttcaacctggcggaagcctgagactgtcttgtgccgccagcggcttcaacatcgactactacggaatgcactgggtccgacaggcccctggcaaaggacttgaatgggtcgcctctctgtacggcggcagcgatagcacagattacgccgactctgtgaagggcagattcaccatcagcgccgacaccagcaagaacaccgcctacctccagatgaactccctgagagccgaagataccgccgtgtactactgctccagacagtacagcgcctacttcgactattggggccagggaaccctggtcaccgttagctctacgcgtgagcagaaactgatctcggaagaggatctggggagcggcatccagaaccctgatcctgccgtgtaccagctgcgggatagcaagagcagcgacaagagcgtgtgtctgttcaccgacttcgacagccagaccaacgtgtcccagagcaaggactccgacgtgtacatcaccgataagaccgtgctggacatgcggagcatggacttcaagagcaactccgccgtggcctggtccaacaagtccgatttcgcctgcgccaacgccttcaacaacagcattatccccgaggacacattcttcccaagccccgagagcagctgcggtacccagagttttgggttgttggaccctaaattgtgctatctgttggacggaatcctgttcatttacggagtgatcctgaccgcattgttcctgaagagaggccggaagaagctgctgtacatcttcaagcagcctttcatgcggcccgtgcagaccacccaggaagaggacggctgctcctgccggttccccgaggaagaagaaggcggctgcgagctgcgggttaagttttccagatccgcagacgcacccgcttaccaacaagggcagaaccaactctacaatgaacttaatttggggcggagggaagagtacgacgttctggacaaaaggaggggacgagatcccgagatgggcggaaagcctcagcgaaggaagaatccgcaagaggggctttataacgaactccagaaagataaaatggcagaagcctatagtgagattgggatgaagggagaaaggaggaggggtaaaggtcacgatgggttgtaccaaggattgagcacagccactaaagatacctatgatgcgctccacatgcaggccctgccgccaaga

SEQ ID NO: 3841 - DNA, 2460 bp, synthetic construct
  source 1..2460: mol_type = other DNA
atggccttaccagtgaccgccttgctcctgccgctggccttgctgctccacgccgccaggccggacatccagatgacacagagccctagcagcctgtctgccagcgtgggagacagagtgaccatcacctgtagagccagccaggatgtgtctacagccgtggcctggtatcagcagaagcctggaaaggcccctaagctgctgatctacagcgccagctttctgtactccggcgtgcccagcagattcagcggaagcagaagcggcaccgacttcaccctgacaatatccagcctccagcctgaggacttcgccacctactactgccagcagtacctgtaccagccttggacattcggccagggcaccaaggtggaaatcaagagactcgagcagagcttcggcctgctggaccccaagctgtgctacctgctggatggcatcctgttcatctacggcgtgatcctgaccgccctgttcctgagagtgaagttcagcagaagcgccgacgcccctgcctaccagcagggacagaaccaactgtacaacgagctgaacctgggcagacgggaagagtacgacgtgctggacaagcggagaggcagggaccctgagatgggcggaaagccccagcggagaaagaacccccaggaaggactgtataacgaactccagaaagacaagatggccgaagcctacagcgagatcggcatgaagggcgagcggagaagaggcaagggccacgatggcctgtaccagggcctgagcaccgccaccaaggacacctatgacgccctgcacatgcaggccctgcctccaagaagggccaagcgatctggatctggagcaacaaacttctcactactcaaacaagcaggtgacgtggaggagaatcccgggcctactagtatggactggatttggcgcatccttttccttgtcggcgctgctaccggcgcgcattccttcgaagaagttcagctggttgagtctggcggaggactggttcaacctggcggaagcctgagactgtcttgtgccgccagcggcttcaacatcgactactacggaatgcactgggtccgacaggcccctggcaaaggacttgaatgggtcgcctctctgtacggcggcagcgatagcacagattacgccgactctgtgaagggcagattcaccatcagcgccgacaccagcaagaacaccgcctacctccagatgaactccctgagagccgaagataccgccgtgtactactgctccagacagtacagcgcctacttcgactattggggccagggaaccctggtcaccgttagctctacgcgtcagagttttgggttgttggaccctaaattgtgctatctgttggacggaatcctgttcatttacggagtgatcctgaccgcattgttcctgcgggttaagttttccagatccgcagacgcacccgcttaccaacaagggcagaaccaactctacaatgaacttaatttggggcggagggaagagtacgacgttctggacaaaaggaggggacgagatcccgagatgggcggaaagcctcagcgaaggaagaatccgcaagaggggctttataacgaactccagaaagataaaatggcagaagcctatagtgagattgggatgaagggagaaaggaggaggggtaaaggtcacgatgggttgtaccaaggattgagcacagccactaaagatacctatgatgcgctccacatgcaggccctgccgccaagacgcgccaagagaagcggatctggcgtgaagcagaccctgaatttcgacctgctgaagctggctggcgacgtggaatccaacccaggcccttctagaggccatatgaccgagtacaagcccacggtgcgcctcgccacccgcgacgacgtccccagggccgtacgcaccctcgccgccgcgttcgccgactaccccgccacgcgccacaccgtcgatccggaccgccacatcgagcgggtcaccgagctgcaagaactcttcctcacgcgcgtcgggctcgacatcggcaaggtgtgggtcgcggacgacggcgccgcggtggcggtctggaccacgccggagagcgtcgaagcgggggcggtgttcgccgagatcggcccgcgcatggccgagttgagcggttcccggctggccgcgcagcaacagatggaaggcctcctggcgccgcaccggcccaaggagcccgcgtggttcctggccaccgtcggcgtctcgcccgaccaccagggcaagggtctgggcagcgccgtcgtgctccccggagtggaggcggccgagcgcgccggggtgcccgccttcctggagacctccgcgccccgcaacctccccttctacgagcggctcggcttcaccgtcaccgccgacgtcgaggtgcccgaaggaccgcgcacctggtgcatgacccgcaagcccggtgcctga

SEQ ID NO: 3842 - DNA, 1932 bp, synthetic construct
  source 1..1932: mol_type = other DNA
atggccttaccagtgaccgccttgctcctgccgctggccttgctgctccacgccgccaggccggacatccagatgacacagagccctagcagcctgtctgccagcgtgggagacagagtgaccatcacctgtagagccagccaggatgtgtctacagccgtggcctggtatcagcagaagcctggaaaggcccctaagctgctgatctacagcgccagctttctgtactccggcgtgcccagcagattcagcggaagcagaagcggcaccgacttcaccctgacaatatccagcctccagcctgaggacttcgccacctactactgccagcagtacctgtaccagccttggacattcggccagggcaccaaggtggaaatcaagagactcgagggacagcctaaggccaatcctaccgtgacactgttccctccaagcagcgaagaactccaggccaacaaggccacacttgtgtgcctgatctccgacttctaccctggggctgtgacagtggcttggaaggccgatggatctcctgtgaaagccggcgtggaaaccaccaagccatccaagcagagcaacaacaaatacgccgccagctcctacctgagcctgacacctgagcagtggaagtcccacagatcctacagctgccaagtgacccacgaaggcagcaccgtggaaaagacagtggcccctacagagtgcagccccatcaagaccgatgtgattacaatggaccccaaggacaactgctccaaggacgccaacgataccctgctgctccagctgaccaacaccagcgcctactacatgtacttgttgctgctgctgaagtccgtggtgtacttcgccatcatcacatgctgcctgctgcggagaaccgccttctgctgcaacggcgagaagtctagggccaagcgatctggatctggagcaacaaacttctcactactcaaacaagcaggtgacgtggaggagaatcccgggcctactagtatggactggatttggcgcatccttttccttgtcggcgctgctaccggcgcgcattccttcgaagaagttcagctggttgagtctggcggaggactggttcaacctggcggaagcctgagactgtcttgtgccgccagcggcttcaacatcgactactacggaatgcactgggtccgacaggcccctggcaaaggacttgaatgggtcgcctctctgtacggcggcagcgatagcacagattacgccgactctgtgaagggcagattcaccatcagcgccgacaccagcaagaacaccgcctacctccagatgaactccctgagagccgaagataccgccgtgtactactgctccagacagtacagcgcctacttcgactattggggccagggaaccctggtcaccgttagctctacgcgtgcctctacaaagggaccctccgtgtttcctctggctcccagcagcaagtctacaagcggaggaacagccgctctgggctgcctggtcaaggattactttcccgagcctgtgaccgtgtcctggaatagcggagcactgacaagcggcgtgcacacctttccagccgtgctgcaaagcagcggcctgtactctctgagcagcgtggtcacagtgcctagctctagcctgggcacccagacctacatctgcaatgtgaaccacaagcctagcaacaccaaggtggacaagagagtggaacccaagagctgtgaagtgaaaaccgactccaccgaccacgtgaagcccaaagagacagagaacaccaagcagcccagcaagagctgccacaagcccaaggccatcgtgcacaccgagaaagtgaacatgatgagcctgaccgtgctgggcctgcggatgctgttcgccaaaaccgtggccgtgaacttcctgctgaccgccaagctgttcttcctc

SEQ ID NO: 3843 - DNA, 1866 bp, synthetic construct
  source 1..1866: mol_type = other DNA
atggccttaccagtgaccgccttgctcctgccgctggccttgctgctccacgccgccaggccggacatccagatgacacagagccctagcagcctgtctgccagcgtgggagacagagtgaccatcacctgtagagccagccaggatgtgtctacagccgtggcctggtatcagcagaagcctggaaaggcccctaagctgctgatctacagcgccagctttctgtactccggcgtgcccagcagattcagcggaagcagaagcggcaccgacttcaccctgacaatatccagcctccagcctgaggacttcgccacctactactgccagcagtacctgtaccagccttggacattcggccagggcaccaaggtggaaatcaagagactcgagggacagcctaaggccaatcctaccgtgacactgttccctccaagcagcgaagaactccaggccaacaaggccacacttgtgtgcctgatctccgacttctaccctggggctgtgacagtggcttggaaggccgatggatctcctgtgaaagccggcgtggaaaccaccaagccatccaagcagagcaacaacaaatacgccgccagctcctacctgagcctgacacctgagcagtggaagtcccacagatcctacagctgccaagtgacccacgaaggcagcaccgtggaaaagacagtggcccctacagagtgcagcggcagagccgattgcggcatcaccagcgccagctaccaccagggcgtgctgagcgccaccatcctgtacgagatcctgctgggcaaggccaccctgtacgccgtgctggtgtctgccctggtgctgatggctatggtcaagcggaaggacagccggggaagggccaagcgatctggatctggagcaacaaacttctcactactcaaacaagcaggtgacgtggaggagaatcccgggcctactagtatggactggatttggcgcatccttttccttgtcggcgctgctaccggcgcgcattccttcgaagaagttcagctggttgagtctggcggaggactggttcaacctggcggaagcctgagactgtcttgtgccgccagcggcttcaacatcgactactacggaatgcactgggtccgacaggcccctggcaaaggacttgaatgggtcgcctctctgtacggcggcagcgatagcacagattacgccgactctgtgaagggcagattcaccatcagcgccgacaccagcaagaacaccgcctacctccagatgaactccctgagagccgaagataccgccgtgtactactgctccagacagtacagcgcctacttcgactattggggccagggaaccctggtcaccgttagctctacgcgtgcctctacaaagggaccctccgtgtttcctctggctcccagcagcaagtctacaagcggaggaacagccgctctgggctgcctggtcaaggattactttcccgagcctgtgaccgtgtcctggaatagcggagcactgacaagcggcgtgcacacctttccagccgtgctgcaaagcagcggcctgtactctctgagcagcgtggtcacagtgcctagctctagcctgggcacccagacctacatctgcaatgtgaaccacaagcctagcaacaccaaggtggacaagagagtggaacccaagagctgtatccccgaggacacattcttcccaagcagcgacgtgccctgcgacgtgaagctggtggaaaagagcttcgagacagacaccaacctgaacttccagaacctgagcgtgatcggcttcagaatcctgctgctgaaagtggccggctttaacctgctgatgaccctgcggctgtggtccagc

SEQ ID NO: 3844 - DNA, 1866 bp, synthetic construct
  source 1..1866: mol_type = other DNA
atggccttaccagtgaccgccttgctcctgccgctggccttgctgctccacgccgccaggccggacatccagatgacacagagccctagcagcctgtctgccagcgtgggagacagagtgaccatcacctgtagagccagccaggatgtgtctacagccgtggcctggtatcagcagaagcctggaaaggcccctaagctgctgatctacagcgccagctttctgtactccggcgtgcccagcagattcagcggaagcagaagcggcaccgacttcaccctgacaatatccagcctccagcctgaggacttcgccacctactactgccagcagtacctgtaccagccttggacattcggccagggcaccaaggtggaaatcaagagactcgagggacagcctaaggccaatcctaccgtgacactgttccctccaagcagcgaagaactccaggccaacaaggccacacttgtgtgcctgatctccgacttctaccctggggctgtgacagtggcttggaaggccgatggatctcctgtgaaagccggcgtggaaaccaccaagccatccaagcagagcaacaacaaatacgccgccagctcctacctgagcctgacacctgagcagtggaagtcccacagatcctacagctgccaagtgacccacgaaggcagcaccgtggaaaagacagtggcccctacagagtgcagcggcagagccgattgcggctttaccagcgagagctaccagcagggcgtgctgagcgccaccatcctgtacgagatcctgctgggcaaggccaccctgtacgccgtgctggtgtctgccctggtgctgatggctatggtcaagcggaaggacagccggggaagggccaagcgatctggatctggagcaacaaacttctcactactcaaacaagcaggtgacgtggaggagaatcccgggcctactagtatggactggatttggcgcatccttttccttgtcggcgctgctaccggcgcgcattccttcgaagaagttcagctggttgagtctggcggaggactggttcaacctggcggaagcctgagactgtcttgtgccgccagcggcttcaacatcgactactacggaatgcactgggtccgacaggcccctggcaaaggacttgaatgggtcgcctctctgtacggcggcagcgatagcacagattacgccgactctgtgaagggcagattcaccatcagcgccgacaccagcaagaacaccgcctacctccagatgaactccctgagagccgaagataccgccgtgtactactgctccagacagtacagcgcctacttcgactattggggccagggaaccctggtcaccgttagctctacgcgtgcctctacaaagggaccctccgtgtttcctctggctcccagcagcaagtctacaagcggaggaacagccgctctgggctgcctggtcaaggattactttcccgagcctgtgaccgtgtcctggaatagcggagcactgacaagcggcgtgcacacctttccagccgtgctgcaaagcagcggcctgtactctctgagcagcgtggtcacagtgcctagctctagcctgggcacccagacctacatctgcaatgtgaaccacaagcctagcaacaccaaggtggacaagagagtggaacccaagagctgtatccccgaggacacattcttcccaagccccgagagcagctgcgacgtgaagctggtggaaaagagcttcgagacagacaccaacctgaacttccagaacctgagcgtgatcggcttcagaatcctgctgctgaaagtggccggctttaacctgctgatgaccctgcggctgtggtccagc

SEQ ID NO: 3845 - DNA, 1344 bp, synthetic construct
  source 1..1344: mol_type = other DNA
atggccttaccagtgaccgccttgctcctgccgctggccttgctgctccacgccgccaggccggacatccagatgacacagagccctagcagcctgtctgccagcgtgggagacagagtgaccatcacctgtagagccagccaggatgtgtctacagccgtggcctggtatcagcagaagcctggaaaggcccctaagctgctgatctacagcgccagctttctgtactccggcgtgcccagcagattcagcggaagcagaagcggcaccgacttcaccctgacaatatccagcctccagcctgaggacttcgccacctactactgccagcagtacctgtaccagccttggacattcggccagggcaccaaggtggaaatcaagagaggcggaggcggaagtggaggcggaggatctggcggcggaggctctgaagttcagctggttgagtctggcggaggactggttcaacctggcggaagcctgagactgtcttgtgccgccagcggcttcaacatcgactactacggaatgcactgggtccgacaggcccctggcaaaggacttgaatgggtcgcctctctgtacggcggcagcgatagcacagattacgccgactctgtgaagggcagattcaccatcagcgccgacaccagcaagaacaccgcctacctccagatgaactccctgagagccgaagataccgccgtgtactactgctccagacagtacagcgcctacttcgactattggggccagggaaccctggtcaccgttagctctacgcgtgacggtaacgaggagatgggaggaatcactcaaaccccttacaaagtctcaatttcaggaacaactgttatccttacatgtccccagtatcctggcagcgagatcctttggcagcataacgacaagaatatagggggagatgaagacgataagaatatcggatctgacgaggatcacttgagcctgaaagagttctccgagcttgaacaaagcggatattatgtgtgctatccgcgcgggtcaaagccggaagacgctaacttttacctttatctccgagccagagtgtgcgaaaattgcatggaaatggacgttatgtccgttgctacaatagttatcgtagatatatgcatcacgggtggactgcttctgctggtttattattggtccaagaatagaaaggccaaagctaaacccgtgaccagaggcgctggcgcaggcggaaggcaaaggggacaaaacaaagaacggccaccaccagtgccaaatccagattatgagcctattcggaaaggacagagggacctgtactctggcctgaatcagagaagaatc

SEQ ID NO: 3846 - DNA, 1239 bp, synthetic construct
  source 1..1239: mol_type = other DNA
atggccttaccagtgaccgccttgctcctgccgctggccttgctgctccacgccgccaggccggacatccagatgacacagagccctagcagcctgtctgccagcgtgggagacagagtgaccatcacctgtagagccagccaggatgtgtctacagccgtggcctggtatcagcagaagcctggaaaggcccctaagctgctgatctacagcgccagctttctgtactccggcgtgcccagcagattcagcggaagcagaagcggcaccgacttcaccctgacaatatccagcctccagcctgaggacttcgccacctactactgccagcagtacctgtaccagccttggacattcggccagggcaccaaggtggaaatcaagagaggcggaggcggaagtggaggcggaggatctggcggcggaggctctgaagttcagctggttgagtctggcggaggactggttcaacctggcggaagcctgagactgtcttgtgccgccagcggcttcaacatcgactactacggaatgcactgggtccgacaggcccctggcaaaggacttgaatgggtcgcctctctgtacggcggcagcgatagcacagattacgccgactctgtgaagggcagattcaccatcagcgccgacaccagcaagaacaccgcctacctccagatgaactccctgagagccgaagataccgccgtgtactactgctccagacagtacagcgcctacttcgactattggggccagggaaccctggtcaccgttagctctacgcgtttcaagatccccatcgaggaactggaagatcgggtgttcgtgaactgcaacacctctatcacctgggtggaaggcaccgtgggaacactgctgagcgacatcaccagactggacctcggcaagcggattctggaccctcggggcatctacagatgcaacggcaccgacatctacaaggacaaagaaagcaccgtgcaggtccactacagaatgtgccagtcctgcgtggaactggaccctgctacagtggccggcatcatcgtgaccgatgtgatcgctactctgctgctggctctgggagtgttctgcttcgccggacacgaaacaggcagactgtctggcgctgccgatacacaggccctgctgagaaacgaccaagtgtatcagcccctgcgcgacagagatgatgcccagtattctcacctcggcggcaactgggctagaaacaag

SEQ ID NO: 3847 - DNA, 1269 bp, synthetic construct
  source 1..1269: mol_type = other DNA
atggccttaccagtgaccgccttgctcctgccgctggccttgctgctccacgccgccaggccggacatccagatgacacagagccctagcagcctgtctgccagcgtgggagacagagtgaccatcacctgtagagccagccaggatgtgtctacagccgtggcctggtatcagcagaagcctggaaaggcccctaagctgctgatctacagcgccagctttctgtactccggcgtgcccagcagattcagcggaagcagaagcggcaccgacttcaccctgacaatatccagcctccagcctgaggacttcgccacctactactgccagcagtacctgtaccagccttggacattcggccagggcaccaaggtggaaatcaagagaggcggaggcggaagtggaggcggaggatctggcggcggaggctctgaagttcagctggttgagtctggcggaggactggttcaacctggcggaagcctgagactgtcttgtgccgccagcggcttcaacatcgactactacggaatgcactgggtccgacaggcccctggcaaaggacttgaatgggtcgcctctctgtacggcggcagcgatagcacagattacgccgactctgtgaagggcagattcaccatcagcgccgacaccagcaagaacaccgcctacctccagatgaactccctgagagccgaagataccgccgtgtactactgctccagacagtacagcgcctacttcgactattggggccagggaaccctggtcaccgttagctctacgcgtcagagcatcaagggcaaccacctggtcaaggtgtacgactaccaagaggacggcagcgtgctgctgacatgtgatgccgaggccaagaacatcacctggtttaaggacggcaagatgatcggcttcctgaccgaggacaagaagaagtggaacctgggcagcaacgctaaggaccccagaggcatgtatcagtgcaagggcagccagaacaagagcaagcccctccaggtgtactaccggatgtgccagaactgcatcgagctgaacgccgctaccatcagcggctttctgttcgccgagatcgtgtccatcttcgtgctggccgtgggcgtgtactttatcgctggacaggatggcgtgcggcagagcagagcttccgataagcaaaccctgctgcctaacgaccagctgtaccagcctctgaaggacagagaggacgaccagtacagccacctccagggcaatcagctgagaagaaac

SEQ ID NO: 3848 - DNA, 1218 bp, synthetic construct
  source 1..1218: mol_type = other DNA
atggccttaccagtgaccgccttgctcctgccgctggccttgctgctccacgccgccaggccggacatccagatgacacagagccctagcagcctgtctgccagcgtgggagacagagtgaccatcacctgtagagccagccaggatgtgtctacagccgtggcctggtatcagcagaagcctggaaaggcccctaagctgctgatctacagcgccagctttctgtactccggcgtgcccagcagattcagcggaagcagaagcggcaccgacttcaccctgacaatatccagcctccagcctgaggacttcgccacctactactgccagcagtacctgtaccagccttggacattcggccagggcaccaaggtggaaatcaagagaggcggaggcggaagtggaggcggaggatctggcggcggaggctctgaagttcagctggttgagtctggcggaggactggttcaacctggcggaagcctgagactgtcttgtgccgccagcggcttcaacatcgactactacggaatgcactgggtccgacaggcccctggcaaaggacttgaatgggtcgcctctctgtacggcggcagcgatagcacagattacgccgactctgtgaagggcagattcaccatcagcgccgacaccagcaagaacaccgcctacctccagatgaactccctgagagccgaagataccgccgtgtactactgctccagacagtacagcgcctacttcgactattggggccagggaaccctggtcaccgttagctctacgcgtcagagttttgggttgttggaccctaaattgtgctatctgttggacggaatcctgttcatttacggagtgatcctgaccgcattgttcctgcgggttaagttttccagatccgcagacgcacccgcttaccaacaagggcagaaccaactctacaatgaacttaatttggggcggagggaagagtacgacgttctggacaaaaggaggggacgagatcccgagatgggcggaaagcctcagcgaaggaagaatccgcaagaggggctttataacgaactccagaaagataaaatggcagaagcctatagtgagattgggatgaagggagaaaggaggaggggtaaaggtcacgatgggttgtaccaaggattgagcacagccactaaagatacctatgatgcgctccacatgcaggccctgccgccaaga

SEQ ID NO: 3849 - DNA, 1344 bp, synthetic construct
  source 1..1344: mol_type = other DNA
atggccttaccagtgaccgccttgctcctgccgctggccttgctgctccacgccgccaggccggaagttcagctggttgagtctggcggaggactggttcaacctggcggaagcctgagactgtcttgtgccgccagcggcttcaacatcgactactacggaatgcactgggtccgacaggcccctggcaaaggacttgaatgggtcgcctctctgtacggcggcagcgatagcacagattacgccgactctgtgaagggcagattcaccatcagcgccgacaccagcaagaacaccgcctacctccagatgaactccctgagagccgaagataccgccgtgtactactgctccagacagtacagcgcctacttcgactattggggccagggaaccctggtcaccgttagctctggcggaggcggaagtggaggcggaggatctggcggcggaggctctgacatccagatgacacagagccctagcagcctgtctgccagcgtgggagacagagtgaccatcacctgtagagccagccaggatgtgtctacagccgtggcctggtatcagcagaagcctggaaaggcccctaagctgctgatctacagcgccagctttctgtactccggcgtgcccagcagattcagcggaagcagaagcggcaccgacttcaccctgacaatatccagcctccagcctgaggacttcgccacctactactgccagcagtacctgtaccagccttggacattcggccagggcaccaaggtggaaatcaagagaacgcgtgacggtaacgaggagatgggaggaatcactcaaaccccttacaaagtctcaatttcaggaacaactgttatccttacatgtccccagtatcctggcagcgagatcctttggcagcataacgacaagaatatagggggagatgaagacgataagaatatcggatctgacgaggatcacttgagcctgaaagagttctccgagcttgaacaaagcggatattatgtgtgctatccgcgcgggtcaaagccggaagacgctaacttttacctttatctccgagccagagtgtgcgaaaattgcatggaaatggacgttatgtccgttgctacaatagttatcgtagatatatgcatcacgggtggactgcttctgctggtttattattggtccaagaatagaaaggccaaagctaaacccgtgaccagaggcgctggcgcaggcggaaggcaaaggggacaaaacaaagaacggccaccaccagtgccaaatccagattatgagcctattcggaaaggacagagggacctgtactctggcctgaatcagagaagaatc

SEQ ID NO: 3850 - DNA, 1239 bp, synthetic construct
  source 1..1239: mol_type = other DNA
atggccttaccagtgaccgccttgctcctgccgctggccttgctgctccacgccgccaggccggaagttcagctggttgagtctggcggaggactggttcaacctggcggaagcctgagactgtcttgtgccgccagcggcttcaacatcgactactacggaatgcactgggtccgacaggcccctggcaaaggacttgaatgggtcgcctctctgtacggcggcagcgatagcacagattacgccgactctgtgaagggcagattcaccatcagcgccgacaccagcaagaacaccgcctacctccagatgaactccctgagagccgaagataccgccgtgtactactgctccagacagtacagcgcctacttcgactattggggccagggaaccctggtcaccgttagctctggcggaggcggaagtggaggcggaggatctggcggcggaggctctgacatccagatgacacagagccctagcagcctgtctgccagcgtgggagacagagtgaccatcacctgtagagccagccaggatgtgtctacagccgtggcctggtatcagcagaagcctggaaaggcccctaagctgctgatctacagcgccagctttctgtactccggcgtgcccagcagattcagcggaagcagaagcggcaccgacttcaccctgacaatatccagcctccagcctgaggacttcgccacctactactgccagcagtacctgtaccagccttggacattcggccagggcaccaaggtggaaatcaagagaacgcgtttcaagatccccatcgaggaactggaagatcgggtgttcgtgaactgcaacacctctatcacctgggtggaaggcaccgtgggaacactgctgagcgacatcaccagactggacctcggcaagcggattctggaccctcggggcatctacagatgcaacggcaccgacatctacaaggacaaagaaagcaccgtgcaggtccactacagaatgtgccagtcctgcgtggaactggaccctgctacagtggccggcatcatcgtgaccgatgtgatcgctactctgctgctggctctgggagtgttctgcttcgccggacacgaaacaggcagactgtctggcgctgccgatacacaggccctgctgagaaacgaccaagtgtatcagcccctgcgcgacagagatgatgcccagtattctcacctcggcggcaactgggctagaaacaag

SEQ ID NO: 3851 - DNA, 1269 bp, synthetic construct
  source 1..1269: mol_type = other DNA
atggccttaccagtgaccgccttgctcctgccgctggccttgctgctccacgccgccaggccggaagttcagctggttgagtctggcggaggactggttcaacctggcggaagcctgagactgtcttgtgccgccagcggcttcaacatcgactactacggaatgcactgggtccgacaggcccctggcaaaggacttgaatgggtcgcctctctgtacggcggcagcgatagcacagattacgccgactctgtgaagggcagattcaccatcagcgccgacaccagcaagaacaccgcctacctccagatgaactccctgagagccgaagataccgccgtgtactactgctccagacagtacagcgcctacttcgactattggggccagggaaccctggtcaccgttagctctggcggaggcggaagtggaggcggaggatctggcggcggaggctctgacatccagatgacacagagccctagcagcctgtctgccagcgtgggagacagagtgaccatcacctgtagagccagccaggatgtgtctacagccgtggcctggtatcagcagaagcctggaaaggcccctaagctgctgatctacagcgccagctttctgtactccggcgtgcccagcagattcagcggaagcagaagcggcaccgacttcaccctgacaatatccagcctccagcctgaggacttcgccacctactactgccagcagtacctgtaccagccttggacattcggccagggcaccaaggtggaaatcaagagaacgcgtcagagcatcaagggcaaccacctggtcaaggtgtacgactaccaagaggacggcagcgtgctgctgacatgtgatgccgaggccaagaacatcacctggtttaaggacggcaagatgatcggcttcctgaccgaggacaagaagaagtggaacctgggcagcaacgctaaggaccccagaggcatgtatcagtgcaagggcagccagaacaagagcaagcccctccaggtgtactaccggatgtgccagaactgcatcgagctgaacgccgctaccatcagcggctttctgttcgccgagatcgtgtccatcttcgtgctggccgtgggcgtgtactttatcgctggacaggatggcgtgcggcagagcagagcttccgataagcaaaccctgctgcctaacgaccagctgtaccagcctctgaaggacagagaggacgaccagtacagccacctccagggcaatcagctgagaagaaac

SEQ ID NO: 3852 - DNA, 1218 bp, synthetic construct
  source 1..1218: mol_type = other DNA
atggccttaccagtgaccgccttgctcctgccgctggccttgctgctccacgccgccaggccggaagttcagctggttgagtctggcggaggactggttcaacctggcggaagcctgagactgtcttgtgccgccagcggcttcaacatcgactactacggaatgcactgggtccgacaggcccctggcaaaggacttgaatgggtcgcctctctgtacggcggcagcgatagcacagattacgccgactctgtgaagggcagattcaccatcagcgccgacaccagcaagaacaccgcctacctccagatgaactccctgagagccgaagataccgccgtgtactactgctccagacagtacagcgcctacttcgactattggggccagggaaccctggtcaccgttagctctggcggaggcggaagtggaggcggaggatctggcggcggaggctctgacatccagatgacacagagccctagcagcctgtctgccagcgtgggagacagagtgaccatcacctgtagagccagccaggatgtgtctacagccgtggcctggtatcagcagaagcctggaaaggcccctaagctgctgatctacagcgccagctttctgtactccggcgtgcccagcagattcagcggaagcagaagcggcaccgacttcaccctgacaatatccagcctccagcctgaggacttcgccacctactactgccagcagtacctgtaccagccttggacattcggccagggcaccaaggtggaaatcaagagaacgcgtcagagttttgggttgttggaccctaaattgtgctatctgttggacggaatcctgttcatttacggagtgatcctgaccgcattgttcctgcgggttaagttttccagatccgcagacgcacccgcttaccaacaagggcagaaccaactctacaatgaacttaatttggggcggagggaagagtacgacgttctggacaaaaggaggggacgagatcccgagatgggcggaaagcctcagcgaaggaagaatccgcaagaggggctttataacgaactccagaaagataaaatggcagaagcctatagtgagattgggatgaagggagaaaggaggaggggtaaaggtcacgatgggttgtaccaaggattgagcacagccactaaagatacctatgatgcgctccacatgcaggccctgccgccaaga

SEQ ID NO: 3853 - DNA, 1503 bp, synthetic construct
  source 1..1503: mol_type = other DNA
atggccttaccagtgaccgccttgctcctgccgctggccttgctgctccacgccgccaggccggacatccagatgacacagagccctagcagcctgtctgccagcgtgggagacagagtgaccatcacctgtagagccagccaggatgtgtctacagccgtggcctggtatcagcagaagcctggaaaggcccctaagctgctgatctacagcgccagctttctgtactccggcgtgcccagcagattcagcggaagcagaagcggcaccgacttcaccctgacaatatccagcctccagcctgaggacttcgccacctactactgccagcagtacctgtaccagccttggacattcggccagggcaccaaggtggaaatcaagagaggcggaggcggaagtggaggcggaggatctggcggcggaggctctgaagttcagctggttgagtctggcggaggactggttcaacctggcggaagcctgagactgtcttgtgccgccagcggcttcaacatcgactactacggaatgcactgggtccgacaggcccctggcaaaggacttgaatgggtcgcctctctgtacggcggcagcgatagcacagattacgccgactctgtgaagggcagattcaccatcagcgccgacaccagcaagaacaccgcctacctccagatgaactccctgagagccgaagataccgccgtgtactactgctccagacagtacagcgcctacttcgactattggggccagggaaccctggtcaccgttagctctacgcgtggaatgaggactgaggatcttcccaaagctgtcgtctttctcgaaccccaatggtatcgggtgctcgaaaaagactctgtgacactgaaatgccaaggggcctactctcccgaggacaactccacacagtggtttcataatgagtccctcatcagctctcaggccagctcttatttcattgatgccgctacagtggacgactccggcgagtatcggtgtcagaccaatctgtctacactgtctgaccccgtgcagcttgaggtccacattggatggttgctcttgcaagccccacgctgggttttcaaagaggaagatccaatccatctgcggtgccacagctggaaaaacaccgctctccacaaagtcacatacctgcaaaatggcaaaggacgcaaatacttccatcacaattccgatttttacattccgaaggctaccctgaaagacagcggcagctatttctgccggggactcgtcggctccaagaatgtgtcctccgaaaccgtgaatatcacgattacccaaggactggctgtgcctacaatctctagcttctttccgcctggataccaagtctccttctgtcttgtgatggtcctcctgtttgctgtggacacaggactgtacttttccgtgaaaacgaacatccgcagctccacacgcgattggaaagatcacaagtttaaatggcgcaaagatccccaggacaag

SEQ ID NO: 3854 - DNA, 2352 bp, synthetic construct
  source 1..2352: mol_type = other DNA
atggccttaccagtgaccgccttgctcctgccgctggccttgctgctccacgccgccaggccggacatccagatgacacagagccctagcagcctgtctgccagcgtgggagacagagtgaccatcacctgtagagccagccaggatgtgtctacagccgtggcctggtatcagcagaagcctggaaaggcccctaagctgctgatctacagcgccagctttctgtactccggcgtgcccagcagattcagcggaagcagaagcggcaccgacttcaccctgacaatatccagcctccagcctgaggacttcgccacctactactgccagcagtacctgtaccagccttggacattcggccagggcaccaaggtggaaatcaagagaggcggaggcggaagtggaggcggaggatctggcggcggaggctctgaagttcagctggttgagtctggcggaggactggttcaacctggcggaagcctgagactgtcttgtgccgccagcggcttcaacatcgactactacggaatgcactgggtccgacaggcccctggcaaaggacttgaatgggtcgcctctctgtacggcggcagcgatagcacagattacgccgactctgtgaagggcagattcaccatcagcgccgacaccagcaagaacaccgcctacctccagatgaactccctgagagccgaagataccgccgtgtactactgctccagacagtacagcgcctacttcgactattggggccagggaaccctggtcaccgttagctctacgcgtggaggctctggacaacaacagaccctgcctaaaccattcatctgggctgaaccccactttatggttccgaaagagaaacaagtcacgatttgttgccaagggaattacggggccgtcgagtatcagctccactttgagggctccctgtttgctgtggatcggcccaagccacctgaaagaatcaacaaagtccaattctatattcctgatatgaactcccgcatggcaggccagtattcatgtatctaccgcgtgggagaactttggagtgaaccctctaacctgctggacctcgtcgtgacagagatgtatgatacacccacactgtctgtgcaccctgggccagaagttatcagcggagaaaaagttaccttttattgccgcctcgataccgctacctctatgttcctcttgctgaaagagggccgcagctctcacgtgcagcgaggctacggaaaggtccaagctgagtttcctctcggccccgtgaccaccgctcacaggggcacatatagatgttttggctcttataacaatcatgcctggtcattcccatccgagcctgtgaaactgctggtcacaggcgatattgagaatacctctctggccccagaagatcctacattccccgccgacacatggggaacatatctgctgacaaccgaaaccgggctgcaaaaggaccatgctctgtgggatcataccgctcagaatctgcttcggatggggcttgcattcctggtcctggtggctcttgtctggtttctggtcgaggactggctgtcccggaagagaaccagagaaagagcttccagggccagcacctgggaaggcagacgcagactgaatactcagaccctgcgcgccaagagaagcggatctggcgtgaagcagaccctgaatttcgacctgctgaagctggctggcgacgtggaatccaacccaggcccttctagaggccatatgaccgagtacaagcccacggtgcgcctcgccacccgcgacgacgtccccagggccgtacgcaccctcgccgccgcgttcgccgactaccccgccacgcgccacaccgtcgatccggaccgccacatcgagcgggtcaccgagctgcaagaactcttcctcacgcgcgtcgggctcgacatcggcaaggtgtgggtcgcggacgacggcgccgcggtggcggtctggaccacgccggagagcgtcgaagcgggggcggtgttcgccgagatcggcccgcgcatggccgagttgagcggttcccggctggccgcgcagcaacagatggaaggcctcctggcgccgcaccggcccaaggagcccgcgtggttcctggccaccgtcggcgtctcgcccgaccaccagggcaagggtctgggcagcgccgtcgtgctccccggagtggaggcggccgagcgcgccggggtgcccgccttcctggagacctccgcgccccgcaacctccccttctacgagcggctcggcttcaccgtcaccgccgacgtcgaggtgcccgaaggaccgcgcacctggtgcatgacccgcaagcccggtgcctga

SEQ ID NO: 3855 - DNA, 1851 bp, synthetic construct
  source 1..1851: mol_type = other DNA
atggccttaccagtgaccgccttgctcctgccgctggccttgctgctccacgccgccaggccggacatccagatgacacagagccctagcagcctgtctgccagcgtgggagacagagtgaccatcacctgtagagccagccaggatgtgtctacagccgtggcctggtatcagcagaagcctggaaaggcccctaagctgctgatctacagcgccagctttctgtactccggcgtgcccagcagattcagcggaagcagaagcggcaccgacttcaccctgacaatatccagcctccagcctgaggacttcgccacctactactgccagcagtacctgtaccagccttggacattcggccagggcaccaaggtggaaatcaagagaggcggaggcggaagtggaggcggaggatctggcggcggaggctctgaagttcagctggttgagtctggcggaggactggttcaacctggcggaagcctgagactgtcttgtgccgccagcggcttcaacatcgactactacggaatgcactgggtccgacaggcccctggcaaaggacttgaatgggtcgcctctctgtacggcggcagcgatagcacagattacgccgactctgtgaagggcagattcaccatcagcgccgacaccagcaagaacaccgcctacctccagatgaactccctgagagccgaagataccgccgtgtactactgctccagacagtacagcgcctacttcgactattggggccagggaaccctggtcaccgttagctctacgcgtaaaattgaagttatgtatcctcctccttacctagacaatgagaagagcaatggaaccattatccatgtgaaaggggcgcgtggcgatattgagaatacctctctggccccagaagatcctacattccccgccgacacatggggaacatatctgctgacaaccgaaaccgggctgcaaaaggaccatgctctgtgggatcataccgctcagaatctgcttcggatggggcttgcattcctggtcctggtggctcttgtctggtttctggtcgaggactggctgtcccggaagagaaccagagaaagagcttccagggccagcacctgggaaggcagacgcagactgaatactcagaccctgcgcgccaagagaagcggatctggcgtgaagcagaccctgaatttcgacctgctgaagctggctggcgacgtggaatccaacccaggcccttctagaggccatatgaccgagtacaagcccacggtgcgcctcgccacccgcgacgacgtccccagggccgtacgcaccctcgccgccgcgttcgccgactaccccgccacgcgccacaccgtcgatccggaccgccacatcgagcgggtcaccgagctgcaagaactcttcctcacgcgcgtcgggctcgacatcggcaaggtgtgggtcgcggacgacggcgccgcggtggcggtctggaccacgccggagagcgtcgaagcgggggcggtgttcgccgagatcggcccgcgcatggccgagttgagcggttcccggctggccgcgcagcaacagatggaaggcctcctggcgccgcaccggcccaaggagcccgcgtggttcctggccaccgtcggcgtctcgcccgaccaccagggcaagggtctgggcagcgccgtcgtgctccccggagtggaggcggccgagcgcgccggggtgcccgccttcctggagacctccgcgccccgcaacctccccttctacgagcggctcggcttcaccgtcaccgccgacgtcgaggtgcccgaaggaccgcgcacctggtgcatgacccgcaagcccggtgcctga

SEQ ID NO: 3856 - DNA, 2112 bp, synthetic construct
  source 1..2112: mol_type = other DNA
atggccttaccagtgaccgccttgctcctgccgctggccttgctgctccacgccgccaggccggacatccagatgacacagagccctagcagcctgtctgccagcgtgggagacagagtgaccatcacctgtagagccagccaggatgtgtctacagccgtggcctggtatcagcagaagcctggaaaggcccctaagctgctgatctacagcgccagctttctgtactccggcgtgcccagcagattcagcggaagcagaagcggcaccgacttcaccctgacaatatccagcctccagcctgaggacttcgccacctactactgccagcagtacctgtaccagccttggacattcggccagggcaccaaggtggaaatcaagagaggcggaggcggaagtggaggcggaggatctggcggcggaggctctgaagttcagctggttgagtctggcggaggactggttcaacctggcggaagcctgagactgtcttgtgccgccagcggcttcaacatcgactactacggaatgcactgggtccgacaggcccctggcaaaggacttgaatgggtcgcctctctgtacggcggcagcgatagcacagattacgccgactctgtgaagggcagattcaccatcagcgccgacaccagcaagaacaccgcctacctccagatgaactccctgagagccgaagataccgccgtgtactactgctccagacagtacagcgcctacttcgactattggggccagggaaccctggtcaccgttagctctacgcgtctgtgggtgtcccagccacctgaaattcggacactggaaggctcctccgcctttctgccctgtagctttaacgccagccaggggagactcgccatcggctctgtgacatggttccgggatgaagtcgtccctggaaaagaagttcgcaacggaacaccagagttcagaggcagactcgccccactggcaagctccagattcctgcatgaccatcaggctgaactgcacattagggacgtgcggggccacgatgcctccatctatgtgtgtcgggtcgaagtgcttggactcggcgtcggaactggaaacggcactaggctggtggtcgagaaagaacatccacagcttggcgctggcaccgtcctgttgcttagagccggattctatgccgtcagcttcctgtccgtggctgtggggtctacagtgtattaccagggaaaatgtctcacctggaaaggccccagacgccagcttccagctgttgttcctgctccactgccaccaccttgtggctcctctgctcacttgcttccaccagtgcctggcggacgcgccaagagaagcggatctggcgtgaagcagaccctgaatttcgacctgctgaagctggctggcgacgtggaatccaacccaggcccttctagaatgtaccggatgcagctgctgagctgtatcgccctgtctctggccctggtcacaaatagcgcccctaccagcagcagcaccaagaaaacccagctgcaactggaacacctcctgctggacctccagatgatcctgaacggcatcaacaactacaagaaccccaagctgaccgagatgctgaccgccaagttctacatgcccaagaaggccaccgagctgaagcacctccagtgcctggaagaggaactgaagcccctggaagaagtgctgaatctggcccagagcaagaacttccacctgaggccaagggacctgatctccaacatcaacgtgatcgtgctggaactgaaaggcagcgagacaaccttcatgtgcgagtacgccgacgagacagctaccatcgtggaatttctgaatcggtggatcaccttctgccagagcatcatcagcaccctgacaaagatcgaagtgatgtaccctcctccttacctggacaacgagaagtccaacggcaccatcatccacgtgaagggcaagcacctgtgtccttctccactgttccccggacctagcaagcctttctgggtgctcgttgttgttggcggcgtgctggcctgttacagcctgctggttaccgtggccttcatcatcttttgggtccgaagcaagcggagctaa

SEQ ID NO: 3857 - DNA, 2040 bp, synthetic construct
  source 1..2040: mol_type = other DNA
atggccttaccagtgaccgccttgctcctgccgctggccttgctgctccacgccgccaggccggacatccagatgacacagagccctagcagcctgtctgccagcgtgggagacagagtgaccatcacctgtagagccagccaggatgtgtctacagccgtggcctggtatcagcagaagcctggaaaggcccctaagctgctgatctacagcgccagctttctgtactccggcgtgcccagcagattcagcggaagcagaagcggcaccgacttcaccctgacaatatccagcctccagcctgaggacttcgccacctactactgccagcagtacctgtaccagccttggacattcggccagggcaccaaggtggaaatcaagagaggcggaggcggaagtggaggcggaggatctggcggcggaggctctgaagttcagctggttgagtctggcggaggactggttcaacctggcggaagcctgagactgtcttgtgccgccagcggcttcaacatcgactactacggaatgcactgggtccgacaggcccctggcaaaggacttgaatgggtcgcctctctgtacggcggcagcgatagcacagattacgccgactctgtgaagggcagattcaccatcagcgccgacaccagcaagaacaccgcctacctccagatgaactccctgagagccgaagataccgccgtgtactactgctccagacagtacagcgcctacttcgactattggggccagggaaccctggtcaccgttagctctacgcgtctgtgggtgtcccagccacctgaaattcggacactggaaggctcctccgcctttctgccctgtagctttaacgccagccaggggagactcgccatcggctctgtgacatggttccgggatgaagtcgtccctggaaaagaagttcgcaacggaacaccagagttcagaggcagactcgccccactggcaagctccagattcctgcatgaccatcaggctgaactgcacattagggacgtgcggggccacgatgcctccatctatgtgtgtcgggtcgaagtgcttggactcggcgtcggaactggaaacggcactaggctggtggtcgagaaagaacatccacagcttggcgctggcaccgtcctgttgcttagagccggattctatgccgtcagcttcctgtccgtggctgtggggtctacagtgtattaccagggaaaatgtctcacctggaaaggccccagacgccagcttccagctgttgttcctgctccactgccaccaccttgtggctcctctgctcacttgcttccaccagtgcctggcggacgcgccaagagaagcggatctggcgtgaagcagaccctgaatttcgacctgctgaagctggctggcgacgtggaatccaacccaggcccttctagaggccatatgaccgagtacaagcccacggtgcgcctcgccacccgcgacgacgtccccagggccgtacgcaccctcgccgccgcgttcgccgactaccccgccacgcgccacaccgtcgatccggaccgccacatcgagcgggtcaccgagctgcaagaactcttcctcacgcgcgtcgggctcgacatcggcaaggtgtgggtcgcggacgacggcgccgcggtggcggtctggaccacgccggagagcgtcgaagcgggggcggtgttcgccgagatcggcccgcgcatggccgagttgagcggttcccggctggccgcgcagcaacagatggaaggcctcctggcgccgcaccggcccaaggagcccgcgtggttcctggccaccgtcggcgtctcgcccgaccaccagggcaagggtctgggcagcgccgtcgtgctccccggagtggaggcggccgagcgcgccggggtgcccgccttcctggagacctccgcgccccgcaacctccccttctacgagcggctcggcttcaccgtcaccgccgacgtcgaggtgcccgaaggaccgcgcacctggtgcatgacccgcaagcccggtgcctga

SEQ ID NO: 3858 - DNA, 1065 bp, synthetic construct
  source 1..1065: mol_type = other DNA
atggccttaccagtgaccgccttgctcctgccgctggccttgctgctccacgccgccaggccggacatccagatgacacagagccctagcagcctgtctgccagcgtgggagacagagtgaccatcacctgtagagccagccaggatgtgtctacagccgtggcctggtatcagcagaagcctggaaaggcccctaagctgctgatctacagcgccagctttctgtactccggcgtgcccagcagattcagcggaagcagaagcggcaccgacttcaccctgacaatatccagcctccagcctgaggacttcgccacctactactgccagcagtacctgtaccagccttggacattcggccagggcaccaaggtggaaatcaagagaggcggaggcggaagtggaggcggaggatctggcggcggaggctctgaagttcagctggttgagtctggcggaggactggttcaacctggcggaagcctgagactgtcttgtgccgccagcggcttcaacatcgactactacggaatgcactgggtccgacaggcccctggcaaaggacttgaatgggtcgcctctctgtacggcggcagcgatagcacagattacgccgactctgtgaagggcagattcaccatcagcgccgacaccagcaagaacaccgcctacctccagatgaactccctgagagccgaagataccgccgtgtactactgctccagacagtacagcgcctacttcgactattggggccagggaaccctggtcaccgttagctctacgcgtaaaattgaagttatgtatcctcctccttacctagacaatgagaagagcaatggaaccattatccatgtgaaaggggcgcgtatcacccagggcctggccgtgtctaccatcagcagctttttcccacccggctaccaggtgtccttctgcctcgtgatggtgctgctgttcgccgtggacaccggcctgtacttcagcgtgaaaacaaacatccggtccagcaccagagactggaaggaccacaagttcaagtggcggaaggacccccaggacaag

SEQ ID NO: 3859 - DNA, 1065 bp, synthetic construct
  source 1..1065: mol_type = other DNA
atggccttaccagtgaccgccttgctcctgccgctggccttgctgctccacgccgccaggccggacatccagatgacacagagccctagcagcctgtctgccagcgtgggagacagagtgaccatcacctgtagagccagccaggatgtgtctacagccgtggcctggtatcagcagaagcctggaaaggcccctaagctgctgatctacagcgccagctttctgtactccggcgtgcccagcagattcagcggaagcagaagcggcaccgacttcaccctgacaatatccagcctccagcctgaggacttcgccacctactactgccagcagtacctgtaccagccttggacattcggccagggcaccaaggtggaaatcaagagaggcggaggcggaagtggaggcggaggatctggcggcggaggctctgaagttcagctggttgagtctggcggaggactggttcaacctggcggaagcctgagactgtcttgtgccgccagcggcttcaacatcgactactacggaatgcactgggtccgacaggcccctggcaaaggacttgaatgggtcgcctctctgtacggcggcagcgatagcacagattacgccgactctgtgaagggcagattcaccatcagcgccgacaccagcaagaacaccgcctacctccagatgaactccctgagagccgaagataccgccgtgtactactgctccagacagtacagcgcctacttcgactattggggccagggaaccctggtcaccgttagctctacgcgtaaaattgaagttatgtatcctcctccttacctagacaatgagaagagcaatggaaccattatccatgtgaaaggggcgcgtattacccaaggactggctgtgcctacaatctctagcttctttccgcctggataccaagtctccttctgtcttgtgatggtcctcctgtttgctgtggacacaggactgtacttttccgtgaaaacgaacatccgcagctccacacgcgattggaaagatcacaagtttaaatggcgcaaagatccccaggacaag

SEQ ID NO: 3860 - DNA, 1002 bp, synthetic construct
  source 1..1002: mol_type = other DNA
atggccttaccagtgaccgccttgctcctgccgctggccttgctgctccacgccgccaggccggacatccagatgacacagagccctagcagcctgtctgccagcgtgggagacagagtgaccatcacctgtagagccagccaggatgtgtctacagccgtggcctggtatcagcagaagcctggaaaggcccctaagctgctgatctacagcgccagctttctgtactccggcgtgcccagcagattcagcggaagcagaagcggcaccgacttcaccctgacaatatccagcctccagcctgaggacttcgccacctactactgccagcagtacctgtaccagccttggacattcggccagggcaccaaggtggaaatcaagagaggcggaggcggaagtggaggcggaggatctggcggcggaggctctgaagttcagctggttgagtctggcggaggactggttcaacctggcggaagcctgagactgtcttgtgccgccagcggcttcaacatcgactactacggaatgcactgggtccgacaggcccctggcaaaggacttgaatgggtcgcctctctgtacggcggcagcgatagcacagattacgccgactctgtgaagggcagattcaccatcagcgccgacaccagcaagaacaccgcctacctccagatgaactccctgagagccgaagataccgccgtgtactactgctccagacagtacagcgcctacttcgactattggggccagggaaccctggtcaccgttagctctacgcgtaaaattgaagttatgtatcctcctccttacctagacaatgagaagagcaatggaaccattatccatgtgaaaggggcgcgtattacccaaggactggctgtgtctacaatctctagcttctctccgcctggataccaagtctccttctgtcttgtgatggtcctcctgtttgctgtggacacaggactgtacttttccgtgaaaacgaacatc

SEQ ID NO: 3861 - DNA, 1095 bp, synthetic construct
  source 1..1095: mol_type = other DNA
atggccttaccagtgaccgccttgctcctgccgctggccttgctgctccacgccgccaggccggacatccagatgacacagagccctagcagcctgtctgccagcgtgggagacagagtgaccatcacctgtagagccagccaggatgtgtctacagccgtggcctggtatcagcagaagcctggaaaggcccctaagctgctgatctacagcgccagctttctgtactccggcgtgcccagcagattcagcggaagcagaagcggcaccgacttcaccctgacaatatccagcctccagcctgaggacttcgccacctactactgccagcagtacctgtaccagccttggacattcggccagggcaccaaggtggaaatcaagagaggcggaggcggaagtggaggcggaggatctggcggcggaggctctgaagttcagctggttgagtctggcggaggactggttcaacctggcggaagcctgagactgtcttgtgccgccagcggcttcaacatcgactactacggaatgcactgggtccgacaggcccctggcaaaggacttgaatgggtcgcctctctgtacggcggcagcgatagcacagattacgccgactctgtgaagggcagattcaccatcagcgccgacaccagcaagaacaccgcctacctccagatgaactccctgagagccgaagataccgccgtgtactactgctccagacagtacagcgcctacttcgactattggggccagggaaccctggtcaccgttagctctacgcgtaaaattgaagttatgtatcctcctccttacctagacaatgagaagagcaatggaaccattatccatgtgaaaggggcgcgtgtcgagaaagaacatccacagcttggcgctggcaccgtcctgttgcttagagccggattctatgccgtcagcttcctgtccgtggctgtggggtctacagtgtattaccagggaaaatgtctcacctggaaaggccccagacgccagcttccagctgttgttcctgctccactgccaccaccttgtggctcctctgctcacttgcttccaccagtgcctggcgga

SEQ ID NO: 3862 - DNA, 1338 bp, synthetic construct
  source 1..1338: mol_type = other DNA
atggccttaccagtgaccgccttgctcctgccgctggccttgctgctccacgccgccaggccggacatccagatgacacagagccctagcagcctgtctgccagcgtgggagacagagtgaccatcacctgtagagccagccaggatgtgtctacagccgtggcctggtatcagcagaagcctggaaaggcccctaagctgctgatctacagcgccagctttctgtactccggcgtgcccagcagattcagcggaagcagaagcggcaccgacttcaccctgacaatatccagcctccagcctgaggacttcgccacctactactgccagcagtacctgtaccagccttggacattcggccagggcaccaaggtggaaatcaagagaggcggaggcggaagtggaggcggaggatctggcggcggaggctctgaagttcagctggttgagtctggcggaggactggttcaacctggcggaagcctgagactgtcttgtgccgccagcggcttcaacatcgactactacggaatgcactgggtccgacaggcccctggcaaaggacttgaatgggtcgcctctctgtacggcggcagcgatagcacagattacgccgactctgtgaagggcagattcaccatcagcgccgacaccagcaagaacaccgcctacctccagatgaactccctgagagccgaagataccgccgtgtactactgctccagacagtacagcgcctacttcgactattggggccagggaaccctggtcaccgttagctctacgcgtaaaattgaagttatgtatcctcctccttacctagacaatgagaagagcaatggaaccattatccatgtgaaaggggcgcgtaagtctgtgcgcttttacctggtcgtcagccctgccagtgcctccactcagacatcttggaccccaagggaccttgtgtcctctcagacacagacacagtcctgcgtgccaccaactgctggcgcaagacaggctccagagtctcccagcacaatccccgtcccttctcagccccagaactccacacttaggccaggaccagctgctccaatcgcactggtcccagtgttctgcggactgctggttgccaagtctctggtgctgagcgcactcctcgtttggtggggcgatatttggtggaaaacgatgatggaattgagatccctcgatacgcagaaagccacatgccaccttcagcaagtcacagacttgccttggaccagcgtcagctctcccgtggaacgggaaattctgtatcatacagtggcccgcaccaagatttccgacgatgacgacgagcacacactg

SEQ ID NO: 3863 - DNA, 1149 bp, synthetic construct
  source 1..1149: mol_type = other DNA
atggccttaccagtgaccgccttgctcctgccgctggccttgctgctccacgccgccaggccggacatccagatgacacagagccctagcagcctgtctgccagcgtgggagacagagtgaccatcacctgtagagccagccaggatgtgtctacagccgtggcctggtatcagcagaagcctggaaaggcccctaagctgctgatctacagcgccagctttctgtactccggcgtgcccagcagattcagcggaagcagaagcggcaccgacttcaccctgacaatatccagcctccagcctgaggacttcgccacctactactgccagcagtacctgtaccagccttggacattcggccagggcaccaaggtggaaatcaagagaggcggaggcggaagtggaggcggaggatctggcggcggaggctctgaagttcagctggttgagtctggcggaggactggttcaacctggcggaagcctgagactgtcttgtgccgccagcggcttcaacatcgactactacggaatgcactgggtccgacaggcccctggcaaaggacttgaatgggtcgcctctctgtacggcggcagcgatagcacagattacgccgactctgtgaagggcagattcaccatcagcgccgacaccagcaagaacaccgcctacctccagatgaactccctgagagccgaagataccgccgtgtactactgctccagacagtacagcgcctacttcgactattggggccagggaaccctggtcaccgttagctctacgcgtaaaattgaagttatgtatcctcctccttacctagacaatgagaagagcaatggaaccattatccatgtgaaaggggcgcgtggcgatattgagaatacctctctggccccagaagatcctacattccccgccgacacatggggaacatatctgctgacaaccgaaaccgggctgcaaaaggaccatgctctgtgggatcataccgctcagaatctgcttcggatggggcttgcattcctggtcctggtggctcttgtctggtttctggtcgaggactggctgtcccggaagagaaccagagaaagagcttccagggccagcacctgggaaggcagacgcagactgaatactcagaccctg

SEQ ID NO: 3864 - DNA, 2940 bp, synthetic construct
  source 1..2940: mol_type = other DNA
atggccttaccagtgaccgccttgctcctgccgctggccttgctgctccacgccgccaggccggacatccagatgacacagagccctagcagcctgtctgccagcgtgggagacagagtgaccatcacctgtagagccagccaggatgtgtctacagccgtggcctggtatcagcagaagcctggaaaggcccctaagctgctgatctacagcgccagctttctgtactccggcgtgcccagcagattcagcggaagcagaagcggcaccgacttcaccctgacaatatccagcctccagcctgaggacttcgccacctactactgccagcagtacctgtaccagccttggacattcggccagggcaccaaggtggaaatcaagagactcgagggacagcctaaggccaatcctaccgtgacactgttccctccaagcagcgaagaactccaggccaacaaggccacacttgtgtgcctgatctccgacttctaccctggggctgtgacagtggcttggaaggccgatggatctcctgtgaaagccggcgtggaaaccaccaagccatccaagcagagcaacaacaaatacgccgccagctcctacctgagcctgacacctgagcagtggaagtcccacagatcctacagctgccaagtgacccacgaaggcagcaccgtggaaaagacagtggcccctacagagtgcagcggatcccagagcttcggcctgctggaccccaagctgtgctacctgctggatggcatcctgttcatctacggcgtgatcctgaccgccctgttcctgagagtgaagttcagcagaagcgccgacgcccctgcctaccagcagggacagaaccaactgtacaacgagctgaacctgggcagacgggaagagtacgacgtgctggacaagcggagaggcagggaccctgagatgggcggaaagccccagcggagaaagaacccccaggaaggactgtataacgaactccagaaagacaagatggccgaagcctacagcgagatcggcatgaagggcgagcggagaagaggcaagggccacgatggcctgtaccagggcctgagcaccgccaccaaggacacctatgacgccctgcacatgcaggccctgcctccaagaagggccaagcgatctggatctggagcaacaaacttctcactactcaaacaagcaggtgacgtggaggagaatcccgggcctactagtatggactggatttggcgcatccttttccttgtcggcgctgctaccggcgcgcattccttcgaagaagttcagctggttgagtctggcggaggactggttcaacctggcggaagcctgagactgtcttgtgccgccagcggcttcaacatcgactactacggaatgcactgggtccgacaggcccctggcaaaggacttgaatgggtcgcctctctgtacggcggcagcgatagcacagattacgccgactctgtgaagggcagattcaccatcagcgccgacaccagcaagaacaccgcctacctccagatgaactccctgagagccgaagataccgccgtgtactactgctccagacagtacagcgcctacttcgactattggggccagggaaccctggtcaccgttagctctacgcgtgcctctacaaagggaccctccgtgtttcctctggctcccagcagcaagtctacaagcggaggaacagccgctctgggctgcctggtcaaggattactttcccgagcctgtgaccgtgtcctggaatagcggagcactgacaagcggcgtgcacacctttccagccgtgctgcaaagcagcggcctgtactctctgagcagcgtggtcacagtgcctagctctagcctgggcacccagacctacatctgcaatgtgaaccacaagcctagcaacaccaaggtggacaagagagtggaacccaagagctgtggtaccggcgacatcgagaacaccagtctggcccctgaggaccctacctttcctgccgatacctggggcacctacctgctgaccacagagacaggactccagaaagatcacgccctgtgggaccacacagcccagaacctgctgagaatgggcctcgcctttctggtgctggttgccctcgtgtggttcctggtggaagattggctgagccggaagcggacaagagagagagccagcagagcctctacctgggagggaagaagaaggctgaacacccagacacttagggccaagcgatctggatctggagcaacaaacttctcactactcaaacaagcaggtgacgtggaggagaatcccgggccttctagaggccatatgaccgagtacaagcccacggtgcgcctcgccacccgcgacgacgtccccagggccgtacgcaccctcgccgccgcgttcgccgactaccccgccacgcgccacaccgtcgatccggaccgccacatcgagcgggtcaccgagctgcaagaactcttcctcacgcgcgtcgggctcgacatcggcaaggtgtgggtcgcggacgacggcgccgcggtggcggtctggaccacgccggagagcgtcgaagcgggggcggtgttcgccgagatcggcccgcgcatggccgagttgagcggttcccggctggccgcgcagcaacagatggaaggcctcctggcgccgcaccggcccaaggagcccgcgtggttcctggccaccgtcggcgtctcgcccgaccaccagggcaagggtctgggcagcgccgtcgtgctccccggagtggaggcggccgagcgcgccggggtgcccgccttcctggagacctccgcgccccgcaacctccccttctacgagcggctcggcttcaccgtcaccgccgacgtcgaggtgcccgaaggaccgcgcacctggtgcatgacccgcaagcccggtgcctga

SEQ ID NO: 3865 - DNA, 3138 bp, synthetic construct
  source 1..3138: mol_type = other DNA
atggccttaccagtgaccgccttgctcctgccgctggccttgctgctccacgccgccaggccggacatccagatgacacagagccctagcagcctgtctgccagcgtgggagacagagtgaccatcacctgtagagccagccaggatgtgtctacagccgtggcctggtatcagcagaagcctggaaaggcccctaagctgctgatctacagcgccagctttctgtactccggcgtgcccagcagattcagcggaagcagaagcggcaccgacttcaccctgacaatatccagcctccagcctgaggacttcgccacctactactgccagcagtacctgtaccagccttggacattcggccagggcaccaaggtggaaatcaagagactcgagggacagcctaaggccaatcctaccgtgacactgttccctccaagcagcgaagaactccaggccaacaaggccacacttgtgtgcctgatctccgacttctaccctggggctgtgacagtggcttggaaggccgatggatctcctgtgaaagccggcgtggaaaccaccaagccatccaagcagagcaacaacaaatacgccgccagctcctacctgagcctgacacctgagcagtggaagtcccacagatcctacagctgccaagtgacccacgaaggcagcaccgtggaaaagacagtggcccctacagagtgcagcggatcccagagcttcggcctgctggaccccaagctgtgctacctgctggatggcatcctgttcatctacggcgtgatcctgaccgccctgttcctgagagtgaagttcagcagaagcgccgacgcccctgcctaccagcagggacagaaccaactgtacaacgagctgaacctgggcagacgggaagagtacgacgtgctggacaagcggagaggcagggaccctgagatgggcggaaagccccagcggagaaagaacccccaggaaggactgtataacgaactccagaaagacaagatggccgaagcctacagcgagatcggcatgaagggcgagcggagaagaggcaagggccacgatggcctgtaccagggcctgagcaccgccaccaaggacacctatgacgccctgcacatgcaggccctgcctccaagaagggccaagcgatctggatctggagcaacaaacttctcactactcaaacaagcaggtgacgtggaggagaatcccgggcctactagtatggactggatttggcgcatccttttccttgtcggcgctgctaccggcgcgcattccttcgaagaagttcagctggttgagtctggcggaggactggttcaacctggcggaagcctgagactgtcttgtgccgccagcggcttcaacatcgactactacggaatgcactgggtccgacaggcccctggcaaaggacttgaatgggtcgcctctctgtacggcggcagcgatagcacagattacgccgactctgtgaagggcagattcaccatcagcgccgacaccagcaagaacaccgcctacctccagatgaactccctgagagccgaagataccgccgtgtactactgctccagacagtacagcgcctacttcgactattggggccagggaaccctggtcaccgttagctctacgcgtgcctctacaaagggaccctccgtgtttcctctggctcccagcagcaagtctacaagcggaggaacagccgctctgggctgcctggtcaaggattactttcccgagcctgtgaccgtgtcctggaatagcggagcactgacaagcggcgtgcacacctttccagccgtgctgcaaagcagcggcctgtactctctgagcagcgtggtcacagtgcctagctctagcctgggcacccagacctacatctgcaatgtgaaccacaagcctagcaacaccaaggtggacaagagagtggaacccaagagctgtggtaccaagtctgtgcgcttttacctggtcgtcagccctgccagtgcctccactcagacatcttggaccccaagggaccttgtgtcctctcagacacagacacagtcctgcgtgccaccaactgctggcgcaagacaggctccagagtctcccagcacaatccccgtcccttctcagccccagaactccacacttaggccaggaccagctgctccaatcgcactggtcccagtgttctgcggactgctggttgccaagtctctggtgctgagcgcactcctcgtttggtggggcgatatttggtggaaaacgatgatggaattgagatccctcgatacgcagaaagccacatgccaccttcagcaagtcacagacttgccttggaccagcgtcagctctcccgtggaacgggaaattctgtatcatacagtggcccgcaccaagatttccgacgatgacgacgagcacacactgcgcgccaagagaagcggatctggcgtgaagcagaccctgaatttcgacctgctgaagctggctggcgacgtggaatccaacccaggcccttctagaggccatatgaccgagtacaagcccacggtgcgcctcgccacccgcgacgacgtccccagggccgtacgcaccctcgccgccgcgttcgccgactaccccgccacgcgccacaccgtcgatccggaccgccacatcgagcgggtcaccgagctgcaagaactcttcctcacgcgcgtcgggctcgacatcggcaaggtgtgggtcgcggacgacggcgccgcggtggcggtctggaccacgccggagagcgtcgaagcgggggcggtgttcgccgagatcggcccgcgcatggccgagttgagcggttcccggctggccgcgcagcaacagatggaaggcctcctggcgccgcaccggcccaaggagcccgcgtggttcctggccaccgtcggcgtctcgcccgaccaccagggcaagggtctgggcagcgccgtcgtgctccccggagtggaggcggccgagcgcgccggggtgcccgccttcctggagacctccgcgccccgcaacctccccttctacgagcggctcggcttcaccgtcaccgccgacgtcgaggtgcccgaaggaccgcgcacctggtgcatgacccgcaagcccggtgcctga

SEQ ID NO: 3866 - DNA, 2898 bp, synthetic construct
  source 1..2898: mol_type = other DNA
atggccttaccagtgaccgccttgctcctgccgctggccttgctgctccacgccgccaggccggacatccagatgacacagagccctagcagcctgtctgccagcgtgggagacagagtgaccatcacctgtagagccagccaggatgtgtctacagccgtggcctggtatcagcagaagcctggaaaggcccctaagctgctgatctacagcgccagctttctgtactccggcgtgcccagcagattcagcggaagcagaagcggcaccgacttcaccctgacaatatccagcctccagcctgaggacttcgccacctactactgccagcagtacctgtaccagccttggacattcggccagggcaccaaggtggaaatcaagagactcgagggacagcctaaggccaatcctaccgtgacactgttccctccaagcagcgaagaactccaggccaacaaggccacacttgtgtgcctgatctccgacttctaccctggggctgtgacagtggcttggaaggccgatggatctcctgtgaaagccggcgtggaaaccaccaagccatccaagcagagcaacaacaaatacgccgccagctcctacctgagcctgacacctgagcagtggaagtcccacagatcctacagctgccaagtgacccacgaaggcagcaccgtggaaaagacagtggcccctacagagtgcagcggatcccagagcttcggcctgctggaccccaagctgtgctacctgctggatggcatcctgttcatctacggcgtgatcctgaccgccctgttcctgagagtgaagttcagcagaagcgccgacgcccctgcctaccagcagggacagaaccaactgtacaacgagctgaacctgggcagacgggaagagtacgacgtgctggacaagcggagaggcagggaccctgagatgggcggaaagccccagcggagaaagaacccccaggaaggactgtataacgaactccagaaagacaagatggccgaagcctacagcgagatcggcatgaagggcgagcggagaagaggcaagggccacgatggcctgtaccagggcctgagcaccgccaccaaggacacctatgacgccctgcacatgcaggccctgcctccaagaagggccaagcgatctggatctggagcaacaaacttctcactactcaaacaagcaggtgacgtggaggagaatcccgggcctactagtatggactggatttggcgcatccttttccttgtcggcgctgctaccggcgcgcattccttcgaagaagttcagctggttgagtctggcggaggactggttcaacctggcggaagcctgagactgtcttgtgccgccagcggcttcaacatcgactactacggaatgcactgggtccgacaggcccctggcaaaggacttgaatgggtcgcctctctgtacggcggcagcgatagcacagattacgccgactctgtgaagggcagattcaccatcagcgccgacaccagcaagaacaccgcctacctccagatgaactccctgagagccgaagataccgccgtgtactactgctccagacagtacagcgcctacttcgactattggggccagggaaccctggtcaccgttagctctacgcgtgcctctacaaagggaccctccgtgtttcctctggctcccagcagcaagtctacaagcggaggaacagccgctctgggctgcctggtcaaggattactttcccgagcctgtgaccgtgtcctggaatagcggagcactgacaagcggcgtgcacacctttccagccgtgctgcaaagcagcggcctgtactctctgagcagcgtggtcacagtgcctagctctagcctgggcacccagacctacatctgcaatgtgaaccacaagcctagcaacaccaaggtggacaagagagtggaacccaagagctgtggtaccgtggtcgagaaagaacatccacagcttggcgctggcaccgtcctgttgcttagagccggattctatgccgtcagcttcctgtccgtggctgtggggtctacagtgtattaccagggaaaatgtctcacctggaaaggccccagacgccagcttccagctgttgttcctgctccactgccaccaccttgtggctcctctgctcacttgcttccaccagtgcctggcggacgcgccaagagaagcggatctggcgtgaagcagaccctgaatttcgacctgctgaagctggctggcgacgtggaatccaacccaggcccttctagaggccatatgaccgagtacaagcccacggtgcgcctcgccacccgcgacgacgtccccagggccgtacgcaccctcgccgccgcgttcgccgactaccccgccacgcgccacaccgtcgatccggaccgccacatcgagcgggtcaccgagctgcaagaactcttcctcacgcgcgtcgggctcgacatcggcaaggtgtgggtcgcggacgacggcgccgcggtggcggtctggaccacgccggagagcgtcgaagcgggggcggtgttcgccgagatcggcccgcgcatggccgagttgagcggttcccggctggccgcgcagcaacagatggaaggcctcctggcgccgcaccggcccaaggagcccgcgtggttcctggccaccgtcggcgtctcgcccgaccaccagggcaagggtctgggcagcgccgtcgtgctccccggagtggaggcggccgagcgcgccggggtgcccgccttcctggagacctccgcgccccgcaacctccccttctacgagcggctcggcttcaccgtcaccgccgacgtcgaggtgcccgaaggaccgcgcacctggtgcatgacccgcaagcccggtgcctga

SEQ ID NO: 3867 - DNA, 2985 bp, synthetic construct
  source 1..2985: mol_type = other DNA
atggccttaccagtgaccgccttgctcctgccgctggccttgctgctccacgccgccaggccggacatccagatgacacagagccctagcagcctgtctgccagcgtgggagacagagtgaccatcacctgtagagccagccaggatgtgtctacagccgtggcctggtatcagcagaagcctggaaaggcccctaagctgctgatctacagcgccagctttctgtactccggcgtgcccagcagattcagcggaagcagaagcggcaccgacttcaccctgacaatatccagcctccagcctgaggacttcgccacctactactgccagcagtacctgtaccagccttggacattcggccagggcaccaaggtggaaatcaagagactcgaggacctgaagaacgtgttcccacctgaggtggccgtgttcgagcctagcgaggccgagatcagccacacccagaaagccaccctcgtgtgcctggctaccggcttctaccccgaccatgtggaactgtcttggtgggtcaacggcaaagaggtgcacagcggcgtgtctaccgacccccagccactgaaagaacagcccgccctgaacgacagccggtactgcctgagcagcagactgagagtgtccgccaccttctggcagaacccccggaaccacttcagatgccaggtgcagttctacggcctgagcgagaacgacgagtggacccaggacagagccaagcccgtgacccagatcgtgtctgccgaagcctggggcagagccgattgcggatcccagagcttcggcctgctggaccccaagctgtgctacctgctggatggcatcctgttcatctacggcgtgatcctgaccgccctgttcctgagagtgaagttcagcagaagcgccgacgcccctgcctaccagcagggacagaaccaactgtacaacgagctgaacctgggcagacgggaagagtacgacgtgctggacaagcggagaggcagggaccctgagatgggcggaaagccccagcggagaaagaacccccaggaaggactgtataacgaactccagaaagacaagatggccgaagcctacagcgagatcggcatgaagggcgagcggagaagaggcaagggccacgatggcctgtaccagggcctgagcaccgccaccaaggacacctatgacgccctgcacatgcaggccctgcctccaagaagggccaagcgatctggatctggagcaacaaacttctcactactcaaacaagcaggtgacgtggaggagaatcccgggcctactagtatggactggatttggcgcatccttttccttgtcggcgctgctaccggcgcgcattccttcgaagaagttcagctggttgagtctggcggaggactggttcaacctggcggaagcctgagactgtcttgtgccgccagcggcttcaacatcgactactacggaatgcactgggtccgacaggcccctggcaaaggacttgaatgggtcgcctctctgtacggcggcagcgatagcacagattacgccgactctgtgaagggcagattcaccatcagcgccgacaccagcaagaacaccgcctacctccagatgaactccctgagagccgaagataccgccgtgtactactgctccagacagtacagcgcctacttcgactattggggccagggaaccctggtcaccgttagctctacgcgtatccagaaccctgatcctgccgtgtaccagctgcgggatagcaagagcagcgacaagagcgtgtgtctgttcaccgacttcgacagccagaccaacgtgtcccagagcaaggactccgacgtgtacatcaccgataagaccgtgctggacatgcggagcatggacttcaagagcaactccgccgtggcctggtccaacaagtccgatttcgcctgcgccaacgccttcaacaacagcattatccccgaggacacattcttcccaagccccgagagcagctgcggtaccggcgacatcgagaacaccagtctggcccctgaggaccctacctttcctgccgatacctggggcacctacctgctgaccacagagacaggactccagaaagatcacgccctgtgggaccacacagcccagaacctgctgagaatgggcctcgcctttctggtgctggttgccctcgtgtggttcctggtggaagattggctgagccggaagcggacaagagagagagccagcagagcctctacctgggagggaagaagaaggctgaacacccagacacttagggccaagcgatctggatctggagcaacaaacttctcactactcaaacaagcaggtgacgtggaggagaatcccgggccttctagaggccatatgaccgagtacaagcccacggtgcgcctcgccacccgcgacgacgtccccagggccgtacgcaccctcgccgccgcgttcgccgactaccccgccacgcgccacaccgtcgatccggaccgccacatcgagcgggtcaccgagctgcaagaactcttcctcacgcgcgtcgggctcgacatcggcaaggtgtgggtcgcggacgacggcgccgcggtggcggtctggaccacgccggagagcgtcgaagcgggggcggtgttcgccgagatcggcccgcgcatggccgagttgagcggttcccggctggccgcgcagcaacagatggaaggcctcctggcgccgcaccggcccaaggagcccgcgtggttcctggccaccgtcggcgtctcgcccgaccaccagggcaagggtctgggcagcgccgtcgtgctccccggagtggaggcggccgagcgcgccggggtgcccgccttcctggagacctccgcgccccgcaacctccccttctacgagcggctcggcttcaccgtcaccgccgacgtcgaggtgcccgaaggaccgcgcacctggtgcatgacccgcaagcccggtgcctga

SEQ ID NO: 3868 - DNA, 3183 bp, synthetic construct
  source 1..3183: mol_type = other DNA
atggccttaccagtgaccgccttgctcctgccgctggccttgctgctccacgccgccaggccggacatccagatgacacagagccctagcagcctgtctgccagcgtgggagacagagtgaccatcacctgtagagccagccaggatgtgtctacagccgtggcctggtatcagcagaagcctggaaaggcccctaagctgctgatctacagcgccagctttctgtactccggcgtgcccagcagattcagcggaagcagaagcggcaccgacttcaccctgacaatatccagcctccagcctgaggacttcgccacctactactgccagcagtacctgtaccagccttggacattcggccagggcaccaaggtggaaatcaagagactcgaggacctgaagaacgtgttcccacctgaggtggccgtgttcgagcctagcgaggccgagatcagccacacccagaaagccaccctcgtgtgcctggctaccggcttctaccccgaccatgtggaactgtcttggtgggtcaacggcaaagaggtgcacagcggcgtgtctaccgacccccagccactgaaagaacagcccgccctgaacgacagccggtactgcctgagcagcagactgagagtgtccgccaccttctggcagaacccccggaaccacttcagatgccaggtgcagttctacggcctgagcgagaacgacgagtggacccaggacagagccaagcccgtgacccagatcgtgtctgccgaagcctggggcagagccgattgcggatcccagagcttcggcctgctggaccccaagctgtgctacctgctggatggcatcctgttcatctacggcgtgatcctgaccgccctgttcctgagagtgaagttcagcagaagcgccgacgcccctgcctaccagcagggacagaaccaactgtacaacgagctgaacctgggcagacgggaagagtacgacgtgctggacaagcggagaggcagggaccctgagatgggcggaaagccccagcggagaaagaacccccaggaaggactgtataacgaactccagaaagacaagatggccgaagcctacagcgagatcggcatgaagggcgagcggagaagaggcaagggccacgatggcctgtaccagggcctgagcaccgccaccaaggacacctatgacgccctgcacatgcaggccctgcctccaagaagggccaagcgatctggatctggagcaacaaacttctcactactcaaacaagcaggtgacgtggaggagaatcccgggcctactagtatggactggatttggcgcatccttttccttgtcggcgctgctaccggcgcgcattccttcgaagaagttcagctggttgagtctggcggaggactggttcaacctggcggaagcctgagactgtcttgtgccgccagcggcttcaacatcgactactacggaatgcactgggtccgacaggcccctggcaaaggacttgaatgggtcgcctctctgtacggcggcagcgatagcacagattacgccgactctgtgaagggcagattcaccatcagcgccgacaccagcaagaacaccgcctacctccagatgaactccctgagagccgaagataccgccgtgtactactgctccagacagtacagcgcctacttcgactattggggccagggaaccctggtcaccgttagctctacgcgtatccagaaccctgatcctgccgtgtaccagctgcgggatagcaagagcagcgacaagagcgtgtgtctgttcaccgacttcgacagccagaccaacgtgtcccagagcaaggactccgacgtgtacatcaccgataagaccgtgctggacatgcggagcatggacttcaagagcaactccgccgtggcctggtccaacaagtccgatttcgcctgcgccaacgccttcaacaacagcattatccccgaggacacattcttcccaagccccgagagcagctgcggtaccaagtctgtgcgcttttacctggtcgtcagccctgccagtgcctccactcagacatcttggaccccaagggaccttgtgtcctctcagacacagacacagtcctgcgtgccaccaactgctggcgcaagacaggctccagagtctcccagcacaatccccgtcccttctcagccccagaactccacacttaggccaggaccagctgctccaatcgcactggtcccagtgttctgcggactgctggttgccaagtctctggtgctgagcgcactcctcgtttggtggggcgatatttggtggaaaacgatgatggaattgagatccctcgatacgcagaaagccacatgccaccttcagcaagtcacagacttgccttggaccagcgtcagctctcccgtggaacgggaaattctgtatcatacagtggcccgcaccaagatttccgacgatgacgacgagcacacactgcgcgccaagagaagcggatctggcgtgaagcagaccctgaatttcgacctgctgaagctggctggcgacgtggaatccaacccaggcccttctagaggccatatgaccgagtacaagcccacggtgcgcctcgccacccgcgacgacgtccccagggccgtacgcaccctcgccgccgcgttcgccgactaccccgccacgcgccacaccgtcgatccggaccgccacatcgagcgggtcaccgagctgcaagaactcttcctcacgcgcgtcgggctcgacatcggcaaggtgtgggtcgcggacgacggcgccgcggtggcggtctggaccacgccggagagcgtcgaagcgggggcggtgttcgccgagatcggcccgcgcatggccgagttgagcggttcccggctggccgcgcagcaacagatggaaggcctcctggcgccgcaccggcccaaggagcccgcgtggttcctggccaccgtcggcgtctcgcccgaccaccagggcaagggtctgggcagcgccgtcgtgctccccggagtggaggcggccgagcgcgccggggtgcccgccttcctggagacctccgcgccccgcaacctccccttctacgagcggctcggcttcaccgtcaccgccgacgtcgaggtgcccgaaggaccgcgcacctggtgcatgacccgcaagcccggtgcctga

SEQ ID NO: 3869 - DNA, 2943 bp, synthetic construct
  source 1..2943: mol_type = other DNA
atggccttaccagtgaccgccttgctcctgccgctggccttgctgctccacgccgccaggccggacatccagatgacacagagccctagcagcctgtctgccagcgtgggagacagagtgaccatcacctgtagagccagccaggatgtgtctacagccgtggcctggtatcagcagaagcctggaaaggcccctaagctgctgatctacagcgccagctttctgtactccggcgtgcccagcagattcagcggaagcagaagcggcaccgacttcaccctgacaatatccagcctccagcctgaggacttcgccacctactactgccagcagtacctgtaccagccttggacattcggccagggcaccaaggtggaaatcaagagactcgaggacctgaagaacgtgttcccacctgaggtggccgtgttcgagcctagcgaggccgagatcagccacacccagaaagccaccctcgtgtgcctggctaccggcttctaccccgaccatgtggaactgtcttggtgggtcaacggcaaagaggtgcacagcggcgtgtctaccgacccccagccactgaaagaacagcccgccctgaacgacagccggtactgcctgagcagcagactgagagtgtccgccaccttctggcagaacccccggaaccacttcagatgccaggtgcagttctacggcctgagcgagaacgacgagtggacccaggacagagccaagcccgtgacccagatcgtgtctgccgaagcctggggcagagccgattgcggatcccagagcttcggcctgctggaccccaagctgtgctacctgctggatggcatcctgttcatctacggcgtgatcctgaccgccctgttcctgagagtgaagttcagcagaagcgccgacgcccctgcctaccagcagggacagaaccaactgtacaacgagctgaacctgggcagacgggaagagtacgacgtgctggacaagcggagaggcagggaccctgagatgggcggaaagccccagcggagaaagaacccccaggaaggactgtataacgaactccagaaagacaagatggccgaagcctacagcgagatcggcatgaagggcgagcggagaagaggcaagggccacgatggcctgtaccagggcctgagcaccgccaccaaggacacctatgacgccctgcacatgcaggccctgcctccaagaagggccaagcgatctggatctggagcaacaaacttctcactactcaaacaagcaggtgacgtggaggagaatcccgggcctactagtatggactggatttggcgcatccttttccttgtcggcgctgctaccggcgcgcattccttcgaagaagttcagctggttgagtctggcggaggactggttcaacctggcggaagcctgagactgtcttgtgccgccagcggcttcaacatcgactactacggaatgcactgggtccgacaggcccctggcaaaggacttgaatgggtcgcctctctgtacggcggcagcgatagcacagattacgccgactctgtgaagggcagattcaccatcagcgccgacaccagcaagaacaccgcctacctccagatgaactccctgagagccgaagataccgccgtgtactactgctccagacagtacagcgcctacttcgactattggggccagggaaccctggtcaccgttagctctacgcgtatccagaaccctgatcctgccgtgtaccagctgcgggatagcaagagcagcgacaagagcgtgtgtctgttcaccgacttcgacagccagaccaacgtgtcccagagcaaggactccgacgtgtacatcaccgataagaccgtgctggacatgcggagcatggacttcaagagcaactccgccgtggcctggtccaacaagtccgatttcgcctgcgccaacgccttcaacaacagcattatccccgaggacacattcttcccaagccccgagagcagctgcggtaccgtggtcgagaaagaacatccacagcttggcgctggcaccgtcctgttgcttagagccggattctatgccgtcagcttcctgtccgtggctgtggggtctacagtgtattaccagggaaaatgtctcacctggaaaggccccagacgccagcttccagctgttgttcctgctccactgccaccaccttgtggctcctctgctcacttgcttccaccagtgcctggcggacgcgccaagagaagcggatctggcgtgaagcagaccctgaatttcgacctgctgaagctggctggcgacgtggaatccaacccaggcccttctagaggccatatgaccgagtacaagcccacggtgcgcctcgccacccgcgacgacgtccccagggccgtacgcaccctcgccgccgcgttcgccgactaccccgccacgcgccacaccgtcgatccggaccgccacatcgagcgggtcaccgagctgcaagaactcttcctcacgcgcgtcgggctcgacatcggcaaggtgtgggtcgcggacgacggcgccgcggtggcggtctggaccacgccggagagcgtcgaagcgggggcggtgttcgccgagatcggcccgcgcatggccgagttgagcggttcccggctggccgcgcagcaacagatggaaggcctcctggcgccgcaccggcccaaggagcccgcgtggttcctggccaccgtcggcgtctcgcccgaccaccagggcaagggtctgggcagcgccgtcgtgctccccggagtggaggcggccgagcgcgccggggtgcccgccttcctggagacctccgcgccccgcaacctccccttctacgagcggctcggcttcaccgtcaccgccgacgtcgaggtgcccgaaggaccgcgcacctggtgcatgacccgcaagcccggtgcctga

SEQ ID NO: 3870 - DNA, 2856 bp, synthetic construct
  source 1..2856: mol_type = other DNA
atggccttaccagtgaccgccttgctcctgccgctggccttgctgctccacgccgccaggccggacatccagatgacacagagccctagcagcctgtctgccagcgtgggagacagagtgaccatcacctgtagagccagccaggatgtgtctacagccgtggcctggtatcagcagaagcctggaaaggcccctaagctgctgatctacagcgccagctttctgtactccggcgtgcccagcagattcagcggaagcagaagcggcaccgacttcaccctgacaatatccagcctccagcctgaggacttcgccacctactactgccagcagtacctgtaccagccttggacattcggccagggcaccaaggtggaaatcaagagactcgagggacagcctaaggccaatcctaccgtgacactgttccctccaagcagcgaagaactccaggccaacaaggccacacttgtgtgcctgatctccgacttctaccctggggctgtgacagtggcttggaaggccgatggatctcctgtgaaagccggcgtggaaaccaccaagccatccaagcagagcaacaacaaatacgccgccagctcctacctgagcctgacacctgagcagtggaagtcccacagatcctacagctgccaagtgacccacgaaggcagcaccgtggaaaagacagtggcccctacagagtgcagcggatcccagagcttcggcctgctggaccccaagctgtgctacctgctggatggcatcctgttcatctacggcgtgatcctgaccgccctgttcctgagagtgaagttcagcagaagcgccgacgcccctgcctaccagcagggacagaaccaactgtacaacgagctgaacctgggcagacgggaagagtacgacgtgctggacaagcggagaggcagggaccctgagatgggcggaaagccccagcggagaaagaacccccaggaaggactgtataacgaactccagaaagacaagatggccgaagcctacagcgagatcggcatgaagggcgagcggagaagaggcaagggccacgatggcctgtaccagggcctgagcaccgccaccaaggacacctatgacgccctgcacatgcaggccctgcctccaagaagggccaagcgatctggatctggagcaacaaacttctcactactcaaacaagcaggtgacgtggaggagaatcccgggcctactagtatggactggatttggcgcatccttttccttgtcggcgctgctaccggcgcgcattccttcgaagaagttcagctggttgagtctggcggaggactggttcaacctggcggaagcctgagactgtcttgtgccgccagcggcttcaacatcgactactacggaatgcactgggtccgacaggcccctggcaaaggacttgaatgggtcgcctctctgtacggcggcagcgatagcacagattacgccgactctgtgaagggcagattcaccatcagcgccgacaccagcaagaacaccgcctacctccagatgaactccctgagagccgaagataccgccgtgtactactgctccagacagtacagcgcctacttcgactattggggccagggaaccctggtcaccgttagctctacgcgtgcctctacaaagggaccctccgtgtttcctctggctcccagcagcaagtctacaagcggaggaacagccgctctgggctgcctggtcaaggattactttcccgagcctgtgaccgtgtcctggaatagcggagcactgacaagcggcgtgcacacctttccagccgtgctgcaaagcagcggcctgtactctctgagcagcgtggtcacagtgcctagctctagcctgggcacccagacctacatctgcaatgtgaaccacaagcctagcaacaccaaggtggacaagagagtggaacccaagagctgtggtaccatcactcaaggtttggcagtgtcaaccatctcatcattctttccacctggctaccaagtgtccttctgcctggtcatggtgctgctgttcgccgtggataccggcctgtacttcagcgtcaagaccaacatccggtccagcaccagagactggaaggaccacaagttcaagtggcggaaggaccctcaggacaagagggccaagcgatctggatctggagcaacaaacttctcactactcaaacaagcaggtgacgtggaggagaatcccgggccttctagaggccatatgaccgagtacaagcccacggtgcgcctcgccacccgcgacgacgtccccagggccgtacgcaccctcgccgccgcgttcgccgactaccccgccacgcgccacaccgtcgatccggaccgccacatcgagcgggtcaccgagctgcaagaactcttcctcacgcgcgtcgggctcgacatcggcaaggtgtgggtcgcggacgacggcgccgcggtggcggtctggaccacgccggagagcgtcgaagcgggggcggtgttcgccgagatcggcccgcgcatggccgagttgagcggttcccggctggccgcgcagcaacagatggaaggcctcctggcgccgcaccggcccaaggagcccgcgtggttcctggccaccgtcggcgtctcgcccgaccaccagggcaagggtctgggcagcgccgtcgtgctccccggagtggaggcggccgagcgcgccggggtgcccgccttcctggagacctccgcgccccgcaacctccccttctacgagcggctcggcttcaccgtcaccgccgacgtcgaggtgcccgaaggaccgcgcacctggtgcatgacccgcaagcccggtgcctga

SEQ ID NO: 3871 - DNA, 2901 bp, synthetic construct
  source 1..2901: mol_type = other DNA
atggccttaccagtgaccgccttgctcctgccgctggccttgctgctccacgccgccaggccggacatccagatgacacagagccctagcagcctgtctgccagcgtgggagacagagtgaccatcacctgtagagccagccaggatgtgtctacagccgtggcctggtatcagcagaagcctggaaaggcccctaagctgctgatctacagcgccagctttctgtactccggcgtgcccagcagattcagcggaagcagaagcggcaccgacttcaccctgacaatatccagcctccagcctgaggacttcgccacctactactgccagcagtacctgtaccagccttggacattcggccagggcaccaaggtggaaatcaagagactcgaggacctgaagaacgtgttcccacctgaggtggccgtgttcgagcctagcgaggccgagatcagccacacccagaaagccaccctcgtgtgcctggctaccggcttctaccccgaccatgtggaactgtcttggtgggtcaacggcaaagaggtgcacagcggcgtgtctaccgacccccagccactgaaagaacagcccgccctgaacgacagccggtactgcctgagcagcagactgagagtgtccgccaccttctggcagaacccccggaaccacttcagatgccaggtgcagttctacggcctgagcgagaacgacgagtggacccaggacagagccaagcccgtgacccagatcgtgtctgccgaagcctggggcagagccgattgcggatcccagagcttcggcctgctggaccccaagctgtgctacctgctggatggcatcctgttcatctacggcgtgatcctgaccgccctgttcctgagagtgaagttcagcagaagcgccgacgcccctgcctaccagcagggacagaaccaactgtacaacgagctgaacctgggcagacgggaagagtacgacgtgctggacaagcggagaggcagggaccctgagatgggcggaaagccccagcggagaaagaacccccaggaaggactgtataacgaactccagaaagacaagatggccgaagcctacagcgagatcggcatgaagggcgagcggagaagaggcaagggccacgatggcctgtaccagggcctgagcaccgccaccaaggacacctatgacgccctgcacatgcaggccctgcctccaagaagggccaagcgatctggatctggagcaacaaacttctcactactcaaacaagcaggtgacgtggaggagaatcccgggcctactagtatggactggatttggcgcatccttttccttgtcggcgctgctaccggcgcgcattccttcgaagaagttcagctggttgagtctggcggaggactggttcaacctggcggaagcctgagactgtcttgtgccgccagcggcttcaacatcgactactacggaatgcactgggtccgacaggcccctggcaaaggacttgaatgggtcgcctctctgtacggcggcagcgatagcacagattacgccgactctgtgaagggcagattcaccatcagcgccgacaccagcaagaacaccgcctacctccagatgaactccctgagagccgaagataccgccgtgtactactgctccagacagtacagcgcctacttcgactattggggccagggaaccctggtcaccgttagctctacgcgtatccagaaccctgatcctgccgtgtaccagctgcgggatagcaagagcagcgacaagagcgtgtgtctgttcaccgacttcgacagccagaccaacgtgtcccagagcaaggactccgacgtgtacatcaccgataagaccgtgctggacatgcggagcatggacttcaagagcaactccgccgtggcctggtccaacaagtccgatttcgcctgcgccaacgccttcaacaacagcattatccccgaggacacattcttcccaagccccgagagcagctgcggtaccatcactcaaggtttggcagtgtcaaccatctcatcattctttccacctggctaccaagtgtccttctgcctggtcatggtgctgctgttcgccgtggataccggcctgtacttcagcgtcaagaccaacatccggtccagcaccagagactggaaggaccacaagttcaagtggcggaaggaccctcaggacaagagggccaagcgatctggatctggagcaacaaacttctcactactcaaacaagcaggtgacgtggaggagaatcccgggccttctagaggccatatgaccgagtacaagcccacggtgcgcctcgccacccgcgacgacgtccccagggccgtacgcaccctcgccgccgcgttcgccgactaccccgccacgcgccacaccgtcgatccggaccgccacatcgagcgggtcaccgagctgcaagaactcttcctcacgcgcgtcgggctcgacatcggcaaggtgtgggtcgcggacgacggcgccgcggtggcggtctggaccacgccggagagcgtcgaagcgggggcggtgttcgccgagatcggcccgcgcatggccgagttgagcggttcccggctggccgcgcagcaacagatggaaggcctcctggcgccgcaccggcccaaggagcccgcgtggttcctggccaccgtcggcgtctcgcccgaccaccagggcaagggtctgggcagcgccgtcgtgctccccggagtggaggcggccgagcgcgccggggtgcccgccttcctggagacctccgcgccccgcaacctccccttctacgagcggctcggcttcaccgtcaccgccgacgtcgaggtgcccgaaggaccgcgcacctggtgcatgacccgcaagcccggtgcctga

SEQ ID NO: 3872 - DNA, 1950 bp, synthetic construct
  source 1..1950: mol_type = other DNA
atggccttaccagtgaccgccttgctcctgccgctggccttgctgctccacgccgccaggccggacatccagatgacacagagccctagcagcctgtctgccagcgtgggagacagagtgaccatcacctgtagagccagccaggatgtgtctacagccgtggcctggtatcagcagaagcctggaaaggcccctaagctgctgatctacagcgccagctttctgtactccggcgtgcccagcagattcagcggaagcagaagcggcaccgacttcaccctgacaatatccagcctccagcctgaggacttcgccacctactactgccagcagtacctgtaccagccttggacattcggccagggcaccaaggtggaaatcaagagactcgagggacagcctaaggccaatcctaccgtgacactgttccctccaagcagcgaagaactccaggccaacaaggccacacttgtgtgcctgatctccgacttctaccctggggctgtgacagtggcttggaaggccgatggatctcctgtgaaagccggcgtggaaaccaccaagccatccaagcagagcaacaacaaatacgccgccagctcctacctgagcctgacacctgagcagtggaagtcccacagatcctacagctgccaagtgacccacgaaggcagcaccgtggaaaagacagtggcccctacagagtgcagcggatccctgggagagcctcagctgtgctatatcctggacgccatcctgtttctgtacggcatcgtgctgaccctgctgtactgccggctgaagatccaagtgcggaaggccgccatcaccagctacgagaaatccgacggcgtgtacaccggcctgagcaccagaaatcaagagacatacgagacactgaagcacgaaaagcctccacaaagggccaagcgatctggatctggagcaacaaacttctcactactcaaacaagcaggtgacgtggaggagaatcccgggcctactagtatggactggatttggcgcatccttttccttgtcggcgctgctaccggcgcgcattccttcgaagaagttcagctggttgagtctggcggaggactggttcaacctggcggaagcctgagactgtcttgtgccgccagcggcttcaacatcgactactacggaatgcactgggtccgacaggcccctggcaaaggacttgaatgggtcgcctctctgtacggcggcagcgatagcacagattacgccgactctgtgaagggcagattcaccatcagcgccgacaccagcaagaacaccgcctacctccagatgaactccctgagagccgaagataccgccgtgtactactgctccagacagtacagcgcctacttcgactattggggccagggaaccctggtcaccgttagctctacgcgtgcctctacaaagggaccctccgtgtttcctctggctcccagcagcaagtctacaagcggaggaacagccgctctgggctgcctggtcaaggattactttcccgagcctgtgaccgtgtcctggaatagcggagcactgacaagcggcgtgcacacctttccagccgtgctgcaaagcagcggcctgtactctctgagcagcgtggtcacagtgcctagctctagcctgggcacccagacctacatctgcaatgtgaaccacaagcctagcaacaccaaggtggacaagagagtggaacccaagagctgtggtaccctcggagaaccacagctctgttacattctggatgctatcctgttcctctatgggatcgtcctgacactcctgtattgcagactcaaaattcaagttcgcaaagccgccattacctcttacgagaagagtgatggggtgtacacaggactgtctacccggaatcaagaaacctacgaaaccctcaaacatgagaagccacctcagtaa

SEQ ID NO: 3873 - DNA, 1500 bp, synthetic construct
  source 1..1500: mol_type = other DNA
atggccttaccagtgaccgccttgctcctgccgctggccttgctgctccacgccgccaggccggatattgtgatgacacagagccccgacagcctggccgtgtctcttggagaaagagccaccatcaactgcaagagcagccagagcctgctgtactccagcaacagcaagaactacctggcctggtatcagcagaagcccggccagcctcctaagctgctgatctactgggccagcaccagagaaagcggcgtgcccgatagattttctggctctggcagcggcaccgacttcaccctgacaatttctagcctgcaagccgaggacgtggccgtgtattactgccagcagccttacagctaccctctgagctttggagccggcaccaagctggaactgaaaggcggaggcggaagtggaggcggaggatctggcggcggaggctctcaggttcagctggttcagtctggggccgaagtgaagaaacctggggcctctgtgaaggtgtcctgcaaggcttccggctacacctttaccgaccacgccatccactgggtccgacaggctccaggacaacggcttgagtggatgggctacttcagccccggcaacgacgacttcaagtacagccagaaattccagggcagagtgaccatcaccgccgatacaagcgccagcaccgcctacatggaactgagcagtctgagaagcgaggataccgccgtgtacttctgcacacggtccctgaacatggcctattggggccagggaaccctggtcacagtgtctagcggaagcacatctacgcgtgagcagaaactgatctcggaagaggatctgaaaattgaagttatgtatcctcctccttacctagacaatgagaagagcaatggaaccattatccatgtgaaagggaaacacctttgtccaagtcccctatttcccggaccttctaagcccttttgggtgctggtggtggttgggggagtcctggcttgctatagcttgctagtaacagtggcctttattattttctgggtgaggagtaagaggagcaggctcctgcacagtgactacatgaacatgactccacgccgccccggacccacccgcaagcattaccagccctatgccccaccacgcgacttcgcagcctatcgctccagagtgaagttcagcaggagcgcagacgcccccgcgtaccagcagggccagaaccagctctataacgagctcaatctaggacgaagagaggagtacgatgttttggacaagagacgtggccgggaccctgagatggggggaaagccgagaaggaagaaccctcaggaaggcctgtacaatgaactgcagaaagataagatggcggaggcctacagtgagattgggatgaaaggcgagcgccggaggggcaaggggcacgatggcctttaccagggtctcagtacagccaccaaggacacctacgacgcccttcacatgcaggccctgccccctcgc

SEQ ID NO: 3874 - DNA, 1521 bp, synthetic construct
  source 1..1521: mol_type = other DNA
atggccttaccagtgaccgccttgctcctgccgctggccttgctgctccacgccgccaggccggatattgtgatgacacagagccccgacagcctggccgtgtctcttggagaaagagccaccatcaactgcaagagcagccagagcctgctgtactccagcaacagcaagaactacctggcctggtatcagcagaagcccggccagcctcctaagctgctgatctactgggccagcaccagagaaagcggcgtgcccgatagattttctggctctggcagcggcaccgacttcaccctgacaatttctagcctgcaagccgaggacgtggccgtgtattactgccagcagccttacagctaccctctgagctttggagccggcaccaagctggaactgaaaggcggaggcggaagtggaggcggaggatctggcggcggaggctctcaggttcagctggttcagtctggggccgaagtgaagaaacctggggcctctgtgaaggtgtcctgcaaggcttccggctacacctttaccgaccacgccatccactgggtccgacaggctccaggacaacggcttgagtggatgggctacttcagccccggcaacgacgacttcaagtacagccagaaattccagggcagagtgaccatcaccgccgatacaagcgccagcaccgcctacatggaactgagcagtctgagaagcgaggataccgccgtgtacttctgcacacggtccctgaacatggcctattggggccagggaaccctggtcacagtgtctagcggaagcacatctacgcgtgagcagaaactgatctcggaagaggatctggcgaagcccaccacgacgccagcgccgcgaccaccaacaccggcgcccaccatcgcgtcgcagcccctgtccctgcgcccagaggcgtgccggccagcggcggggggcgcagtgcacacgagggggctggacttcgcctgtgacatctacatctgggcgcccttggccgggacttgtggggtccttctcctgtcactggttatcaccctttactgcaaacggggcagaaagaaactcctgtatatattcaaacaaccatttatgagaccagtacaaactactcaagaggaagatggctgtagctgccgatttccagaagaagaagaaggaggatgtgaactgagagtgaagttcagcaggagcgcagacgcccccgcgtaccagcagggccagaaccagctctataacgagctgaatctaggacgaagagaggagtacgatgttttggacaagagacgtggccgggaccctgagatggggggaaagccgagaaggaagaaccctcaggaaggcctgtacaatgaactgcagaaagataagatggcggaggcctacagtgagattgggatgaaaggcgagcgccggaggggcaaggggcacgatggcctttaccagggtctcagtacagccaccaaggacacctacgacgcccttcacatgcaggccctgccccctcgctga

SEQ ID NO: 3875 - DNA, 1521 bp, synthetic construct
  source 1..1521: mol_type = other DNA
atggccttaccagtgaccgccttgctcctgccgctggccttgctgctccacgccgccaggccgcaggttcagctggttcagtctggggccgaagtgaagaaacctggggcctctgtgaaggtgtcctgcaaggcttccggctacacctttaccgaccacgccatccactgggtccgacaggctccaggacaacggcttgagtggatgggctacttcagccccggcaacgacgacttcaagtacagccagaaattccagggcagagtgaccatcaccgccgatacaagcgccagcaccgcctacatggaactgagcagtctgagaagcgaggataccgccgtgtacttctgcacacggtccctgaacatggcctattggggccagggaaccctggtcacagtgtctagcggaagcacatctggcggaggcggaagtggaggcggaggatctggcggcggaggctctgatattgtgatgacacagagccccgacagcctggccgtgtctcttggagaaagagccaccatcaactgcaagagcagccagagcctgctgtactccagcaacagcaagaactacctggcctggtatcagcagaagcccggccagcctcctaagctgctgatctactgggccagcaccagagaaagcggcgtgcccgatagattttctggctctggcagcggcaccgacttcaccctgacaatttctagcctgcaagccgaggacgtggccgtgtattactgccagcagccttacagctaccctctgagctttggagccggcaccaagctggaactgaaaacgcgtgagcagaaactgatctcggaagaggatctggcgaagcccaccacgacgccagcgccgcgaccaccaacaccggcgcccaccatcgcgtcgcagcccctgtccctgcgcccagaggcgtgccggccagcggcggggggcgcagtgcacacgagggggctggacttcgcctgtgacatctacatctgggcgcccttggccgggacttgtggggtccttctcctgtcactggttatcaccctttactgcaaacggggcagaaagaaactcctgtatatattcaaacaaccatttatgagaccagtacaaactactcaagaggaagatggctgtagctgccgatttccagaagaagaagaaggaggatgtgaactgagagtgaagttcagcaggagcgcagacgcccccgcgtaccagcagggccagaaccagctctataacgagctgaatctaggacgaagagaggagtacgatgttttggacaagagacgtggccgggaccctgagatggggggaaagccgagaaggaagaaccctcaggaaggcctgtacaatgaactgcagaaagataagatggcggaggcctacagtgagattgggatgaaaggcgagcgccggaggggcaaggggcacgatggcctttaccagggtctcagtacagccaccaaggacacctacgacgcccttcacatgcaggccctgccccctcgctga

SEQ ID NO: 3876 - DNA, 2760 bp, synthetic construct
  source 1..2760: mol_type = other DNA
atggccttaccagtgaccgccttgctcctgccgctggccttgctgctccacgccgccaggccggatattgtgatgacacagagccccgacagcctggccgtgtctcttggagaaagagccaccatcaactgcaagagcagccagagcctgctgtactccagcaacagcaagaactacctggcctggtatcagcagaagcccggccagcctcctaagctgctgatctactgggccagcaccagagaaagcggcgtgcccgatagattttctggctctggcagcggcaccgacttcaccctgacaatttctagcctgcaagccgaggacgtggccgtgtattactgccagcagccttacagctaccctctgagctttggagccggcaccaagctggaactgaaaggcggaggcggaagtggaggcggaggatctggcggcggaggctctcaggttcagctggttcagtctggggccgaagtgaagaaacctggggcctctgtgaaggtgtcctgcaaggcttccggctacacctttaccgaccacgccatccactgggtccgacaggctccaggacaacggcttgagtggatgggctacttcagccccggcaacgacgacttcaagtacagccagaaattccagggcagagtgaccatcaccgccgatacaagcgccagcaccgcctacatggaactgagcagtctgagaagcgaggataccgccgtgtacttctgcacacggtccctgaacatggcctattggggccagggaaccctggtcacagtgtctagcggaagcacatctacgcgtgagcagaaactgatctcggaagaggatctggcgaagcccaccacgacgccagcgccgcgaccaccaacaccggcgcccaccatcgcgtcgcagcccctgtccctgcgcccagaggcgtgccggccagcggcggggggcgcagtgcacacgagggggctggacttcgcctgtgacatctacatctgggcgcccttggccgggacttgtggggtccttctcctgtcactggttatcaccctttactgcgggcgcgccagagtgaagttcagcaggagcgcagacgcccccgcgtaccagcagggccagaaccagctctataacgagctgaatctaggacgaagagaggagtacgatgttttggacaagagacgtggccgggaccctgagatggggggaaagccgagaaggaagaaccctcaggaaggcctgtacaatgaactgcagaaagataagatggcggaggcctacagtgagattgggatgaaaggcgagcgccggaggggcaaggggcacgatggcctttaccagggtctcagtacagccaccaaggacacctacgacgcccttcacatgcaggccctgccccctcgctctagaggatctggagcaacaaacttctcactactcaaacaagcaggtgacgtggaggagaatcccgggcctgggatccacatggccacttacgaggttctctgtgaggtggcgcggaaactgggcacggatgacagggaagtggtattgttcctcctaaacgtgttcatacctcaacccacactggcccaattaattggagctcttagagctttaaaggaggagggcaggttaacgtttcccctgttagcggaatgtctgtttcgtgcaggtcgcagagacctcttgcgcgacctgcttcacttagacccgcgttttttagagcgccacctagcgggcacaatgagttatttcagcccttatcagctcactgttctccacgtagacggggagctgtgtgcgagggatattaggtctttgatatttttaagcaaggacactatagggtctcgcagcacaccacagacattcttacactgggtgtactgtatggaaaacttagacctactgggtcccactgacgtggatgccctaatgtcaatgcttagatctttgtcaagagtagacctacagcgccaagtgcaaaccctaatgggccttcacctttccggcccatcacactcccaacactatcgccatacaccactcgagaccgatttctacgactacaaggacgacgatgacaagactagtggctccggcgagggcagaggaagtctactaacctgcggagatgtggaagaaaatcctggcccacatatgaccgagtacaagcccacggtgcgcctcgccacccgcgacgacgtccccagggccgtacgcaccctcgccgccgcgttcgccgactaccccgccacgcgccacaccgtcgatccggaccgccacatcgagcgggtcaccgagctgcaagaactcttcctcacgcgcgtcgggctcgacatcggcaaggtgtgggtcgcggacgacggcgccgcggtggcggtctggaccacgccggagagcgtcgaagcgggggcggtgttcgccgagatcggcccgcgcatggccgagttgagcggttcccggctggccgcgcagcaacagatggaaggcctcctggcgccgcaccggcccaaggagcccgcgtggttcctggccaccgtcggcgtctcgcccgaccaccagggcaagggtctgggcagcgccgtcgtgctccccggagtggaggcggccgagcgcgccggggtgcccgccttcctggagacctccgcgccccgcaacctccccttctacgagcggctcggcttcaccgtcaccgccgacgtcgaggtgcccgaaggaccgcgcacctggtgcatgacccgcaagcccggtgcctga

SEQ ID NO: 3877 - DNA, 2580 bp, synthetic construct
  source 1..2580: mol_type = other DNA
atggccttaccagtgaccgccttgctcctgccgctggccttgctgctccacgccgccaggccggatattgtgatgacacagagccccgacagcctggccgtgtctcttggagaaagagccaccatcaactgcaagagcagccagagcctgctgtactccagcaacagcaagaactacctggcctggtatcagcagaagcccggccagcctcctaagctgctgatctactgggccagcaccagagaaagcggcgtgcccgatagattttctggctctggcagcggcaccgacttcaccctgacaatttctagcctgcaagccgaggacgtggccgtgtattactgccagcagccttacagctaccctctgagctttggagccggcaccaagctggaactgaaactcgagatccagaaccctgatcctgccgtgtaccagctgcgggatagcaagagcagcgacaagagcgtgtgtctgttcaccgacttcgacagccagaccaacgtgtcccagagcaaggactccgacgtgtacatcaccgataagtgcgtgctggacatgcggagcatggacttcaagagcaactccgccgtggcctggtccaacaagtccgatttcgcctgcgccaacgccttcaacaacagcattatccccgaggacacattcttcccaagcagcgacgtgccctgcgacgtgaagctggtggaaaagagcttcgagacagacaccaacctgaacttccagaacctgagcgtgatcggcttcagaatcctgctgctgaaagtggccggctttaacctgctgatgaccctgcggctgtggtccagccgcgccaagagaagcggatctggcgtgaagcagaccctgaatttcgacctgctgaagctggctggcgacgtggaatccaacccaggccctactagtatggactggatttggcgcatccttttccttgtcggcgctgctaccggcgcgcattccttcgaacaggttcagctggttcagtctggggccgaagtgaagaaacctggggcctctgtgaaggtgtcctgcaaggcttccggctacacctttaccgaccacgccatccactgggtccgacaggctccaggacaacggcttgagtggatgggctacttcagccccggcaacgacgacttcaagtacagccagaaattccagggcagagtgaccatcaccgccgatacaagcgccagcaccgcctacatggaactgagcagtctgagaagcgaggataccgccgtgtacttctgcacacggtccctgaacatggcctattggggccagggaaccctggtcacagtgtctagcggaagcacatctacgcgtgaggacctgaagaacgtgttcccacctgaggtggccgtgttcgagcctagcaaggccgagatcgcccacacccagaaagccaccctcgtgtgcctggctaccggcttctaccccgaccatgtggaactgtcttggtgggtcaacggcaaagaggtgcacagcggcgtgtgtaccgacccccagccactgaaagaacagcccgccctgaacgacagccggtactgcctgagcagcagactgagagtgtccgccaccttctggcagaacccccggaaccacttcagatgccaggtgcagttctacggcctgagcgagaacgacgagtggacccaggacagagccaagcccgtgacccagatcgtgtctgccgaagcctggggcagagccgattgcggcatcaccagcgccagctaccaccagggcgtgctgagcgccaccatcctgtacgagatcctgctgggcaaggccaccctgtacgccgtgctggtgtctgccctggtgctgatggctatggtcaagcggaaggacagccggggaagggccaagcgatctggatctggagcaacaaacttctcactactcaaacaagcaggtgacgtggaggagaatcccgggccttctagaggccatatgaccgagtacaagcccacggtgcgcctcgccacccgcgacgacgtccccagggccgtacgcaccctcgccgccgcgttcgccgactaccccgccacgcgccacaccgtcgatccggaccgccacatcgagcgggtcaccgagctgcaagaactcttcctcacgcgcgtcgggctcgacatcggcaaggtgtgggtcgcggacgacggcgccgcggtggcggtctggaccacgccggagagcgtcgaagcgggggcggtgttcgccgagatcggcccgcgcatggccgagttgagcggttcccggctggccgcgcagcaacagatggaaggcctcctggcgccgcaccggcccaaggagcccgcgtggttcctggccaccgtcggcgtctcgcccgaccaccagggcaagggtctgggcagcgccgtcgtgctccccggagtggaggcggccgagcgcgccggggtgcccgccttcctggagacctccgcgccccgcaacctccccttctacgagcggctcggcttcaccgtcaccgccgacgtcgaggtgcccgaaggaccgcgcacctggtgcatgacccgcaagcccggtgcctga

SEQ ID NO: 3878 - DNA, 2577 bp, synthetic construct
  source 1..2577: mol_type = other DNA
atggccttaccagtgaccgccttgctcctgccgctggccttgctgctccacgccgccaggccggatattgtgatgacacagagccccgacagcctggccgtgtctcttggagaaagagccaccatcaactgcaagagcagccagagcctgctgtactccagcaacagcaagaactacctggcctggtatcagcagaagcccggccagcctcctaagctgctgatctactgggccagcaccagagaaagcggcgtgcccgatagattttctggctctggcagcggcaccgacttcaccctgacaatttctagcctgcaagccgaggacgtggccgtgtattactgccagcagccttacagctaccctctgagctttggagccggcaccaagctggaactgaaactcgaggacctgaagaacgtgttcccacctgaggtggccgtgttcgagcctagcaaggccgagatcgcccacacccagaaagccaccctcgtgtgcctggctaccggcttctaccccgaccatgtggaactgtcttggtgggtcaacggcaaagaggtgcacagcggcgtgtgtaccgacccccagccactgaaagaacagcccgccctgaacgacagccggtactgcctgagcagcagactgagagtgtccgccaccttctggcagaacccccggaaccacttcagatgccaggtgcagttctacggcctgagcgagaacgacgagtggacccaggacagagccaagcccgtgacccagatcgtgtctgccgaagcctggggcagagccgattgcggcatcaccagcgccagctaccaccagggcgtgctgagcgccaccatcctgtacgagatcctgctgggcaaggccaccctgtacgccgtgctggtgtctgccctggtgctgatggctatggtcaagcggaaggacagccggggaagggccaagcgatctggatctggagcaacaaacttctcactactcaaacaagcaggtgacgtggaggagaatcccgggcctactagtatggactggatttggcgcatccttttccttgtcggcgctgctaccggcgcgcattccttcgaacaggttcagctggttcagtctggggccgaagtgaagaaacctggggcctctgtgaaggtgtcctgcaaggcttccggctacacctttaccgaccacgccatccactgggtccgacaggctccaggacaacggcttgagtggatgggctacttcagccccggcaacgacgacttcaagtacagccagaaattccagggcagagtgaccatcaccgccgatacaagcgccagcaccgcctacatggaactgagcagtctgagaagcgaggataccgccgtgtacttctgcacacggtccctgaacatggcctattggggccagggaaccctggtcacagtgtctagcggaagcacatctacgcgtatccagaaccctgatcctgccgtgtaccagctgcgggatagcaagagcagcgacaagagcgtgtgtctgttcaccgacttcgacagccagaccaacgtgtcccagagcaaggactccgacgtgtacatcaccgataagtgcgtgctggacatgcggagcatggacttcaagagcaactccgccgtggcctggtccaacaagtccgatttcgcctgcgccaacgccttcaacaacagcattatccccgaggacacattcttcccaagcagcgacgtgccctgcgacgtgaagctggtggaaaagagcttcgagacagacaccaacctgaacttccagaacctgagcgtgatcggcttcagaatcctgctgctgaaagtggccggctttaacctgctgatgaccctgcggctgtggtccagccgcgccaagagaagcggatctggcgtgaagcagaccctgaatttcgacctgctgaagctggctggcgacgtggaatccaacccaggcccttctagaggccatatgaccgagtacaagcccacggtgcgcctcgccacccgcgacgacgtccccagggccgtacgcaccctcgccgccgcgttcgccgactaccccgccacgcgccacaccgtcgatccggaccgccacatcgagcgggtcaccgagctgcaagaactcttcctcacgcgcgtcgggctcgacatcggcaaggtgtgggtcgcggacgacggcgccgcggtggcggtctggaccacgccggagagcgtcgaagcgggggcggtgttcgccgagatcggcccgcgcatggccgagttgagcggttcccggctggccgcgcagcaacagatggaaggcctcctggcgccgcaccggcccaaggagcccgcgtggttcctggccaccgtcggcgtctcgcccgaccaccagggcaagggtctgggcagcgccgtcgtgctccccggagtggaggcggccgagcgcgccggggtgcccgccttcctggagacctccgcgccccgcaacctccccttctacgagcggctcggcttcaccgtcaccgccgacgtcgaggtgcccgaaggaccgcgcacctggtgcatgacccgcaagcccggtgcctga

SEQ ID NO: 3879 - DNA, 1875 bp, synthetic construct
  source 1..1875: mol_type = other DNA
atggccttaccagtgaccgccttgctcctgccgctggccttgctgctccacgccgccaggccggatattgtgatgacacagagccccgacagcctggccgtgtctcttggagaaagagccaccatcaactgcaagagcagccagagcctgctgtactccagcaacagcaagaactacctggcctggtatcagcagaagcccggccagcctcctaagctgctgatctactgggccagcaccagagaaagcggcgtgcccgatagattttctggctctggcagcggcaccgacttcaccctgacaatttctagcctgcaagccgaggacgtggccgtgtattactgccagcagccttacagctaccctctgagctttggagccggcaccaagctggaactgaaactcgaggacctgaagaacgtgttcccacctgaggtggccgtgttcgagcctagcgaggccgagatcagccacacccagaaagccaccctcgtgtgcctggctaccggcttctaccccgaccatgtggaactgtcttggtgggtcaacggcaaagaggtgcacagcggcgtgtgtaccgacccccagccactgaaagaacagcccgccctgaacgacagccggtactgcctgagcagcagactgagagtgtccgccaccttctggcagaacccccggaaccacttcagatgccaggtgcagttctacggcctgagcgagaacgacgagtggacccaggacagagccaagcccgtgacccagatcgtgtctgccgaagcctggggcagagccgattgcggctttaccagcgagagctaccagcagggcgtgctgagcgccaccatcctgtacgagatcctgctgggcaaggccaccctgtacgccgtgctggtgtctgccctggtgctgatggctatggtcaagcggaaggacagccggggaagggccaagcgatctggatctggagcaacaaacttctcactactcaaacaagcaggtgacgtggaggagaatcccgggcctactagtatggactggatttggcgcatccttttccttgtcggcgctgctaccggcgcgcattccttcgaacaggttcagctggttcagtctggggccgaagtgaagaaacctggggcctctgtgaaggtgtcctgcaaggcttccggctacacctttaccgaccacgccatccactgggtccgacaggctccaggacaacggcttgagtggatgggctacttcagccccggcaacgacgacttcaagtacagccagaaattccagggcagagtgaccatcaccgccgatacaagcgccagcaccgcctacatggaactgagcagtctgagaagcgaggataccgccgtgtacttctgcacacggtccctgaacatggcctattggggccagggaaccctggtcacagtgtctagcggaagcacatctacgcgtatccagaaccctgatcctgccgtgtaccagctgcgggatagcaagagcagcgacaagagcgtgtgtctgttcaccgacttcgacagccagaccaacgtgtcccagagcaaggactccgacgtgtacatcaccgataagtgcgtgctggacatgcggagcatggacttcaagagcaactccgccgtggcctggtccaacaagtccgatttcgcctgcgccaacgccttcaacaacagcattatccccgaggacacattcttcccaagccccgagagcagctgcgacgtgaagctggtggaaaagagcttcgagacagacaccaacctgaacttccagaacctgagcgtgatcggcttcagaatcctgctgctgaaagtggccggctttaacctgctgatgaccctgcggctgtggtccagc

SEQ ID NO: 3880 - DNA, 2550 bp, synthetic construct
  source 1..2550: mol_type = other DNA
atggccttaccagtgaccgccttgctcctgccgctggccttgctgctccacgccgccaggccggatattgtgatgacacagagccccgacagcctggccgtgtctcttggagaaagagccaccatcaactgcaagagcagccagagcctgctgtactccagcaacagcaagaactacctggcctggtatcagcagaagcccggccagcctcctaagctgctgatctactgggccagcaccagagaaagcggcgtgcccgatagattttctggctctggcagcggcaccgacttcaccctgacaatttctagcctgcaagccgaggacgtggccgtgtattactgccagcagccttacagctaccctctgagctttggagccggcaccaagctggaactgaaactcgaggacctgaagaacgtgttcccacctgaggtggccgtgttcgagcctagcgaggccgagatcagccacacccagaaagccaccctcgtgtgcctggctaccggcttctaccccgaccatgtggaactgtcttggtgggtcaacggcaaagaggtgcacagcggcgtgtgtaccgacccccagccactgaaagaacagcccgccctgaacgacagccggtactgcctgagcagcagactgagagtgtccgccaccttctggcagaacccccggaaccacttcagatgccaggtgcagttctacggcctgagcgagaacgacgagtggacccaggacagagccaagcccgtgacccagatcgtgtctgccgaagcctggggcagagccgattgcggctttaccagcgagagctaccagcagggcgtgctgagcgccaccatcctgtacgagatcctgctgggcaaggccaccctgtacgccgtgctggtgtctgccctggtgctgatggctatggtcaagcggaaggacagccggggaagggccaagcgatctggatctggagcaacaaacttctcactactcaaacaagcaggtgacgtggaggagaatcccgggcctactagtatggactggatttggcgcatccttttccttgtcggcgctgctaccggcgcgcattccttcgaacaggttcagctggttcagtctggggccgaagtgaagaaacctggggcctctgtgaaggtgtcctgcaaggcttccggctacacctttaccgaccacgccatccactgggtccgacaggctccaggacaacggcttgagtggatgggctacttcagccccggcaacgacgacttcaagtacagccagaaattccagggcagagtgaccatcaccgccgatacaagcgccagcaccgcctacatggaactgagcagtctgagaagcgaggataccgccgtgtacttctgcacacggtccctgaacatggcctattggggccagggaaccctggtcacagtgtctagcggaagcacatctacgcgtatccagaaccctgatcctgccgtgtaccagctgcgggatagcaagagcagcgacaagagcgtgtgtctgttcaccgacttcgacagccagaccaacgtgtcccagagcaaggactccgacgtgtacatcaccgataagtgcgtgctggacatgcggagcatggacttcaagagcaactccgccgtggcctggtccaacaagtccgatttcgcctgcgccaacgccttcaacaacagcattatccccgaggacacattcttcccaagccccgagagcagctgcgacgtgaagctggtggaaaagagcttcgagacagacaccaacctgaacttccagaacctgagcgtgatcggcttcagaatcctgctgctgaaagtggccggctttaacctgctgatgaccctgcggctgtggtccagccgcgccaagagaagcggatctggcgtgaagcagaccctgaatttcgacctgctgaagctggctggcgacgtggaatccaacccaggcccttctagaggcgggatccacaccatggctacctacgaggtgctgtgcgaggtggcaagaaagctgggcaccgacgacagagaagtggtgctgttcctgctgaacgtgttcatccctcagcctacactggcccagctgatcggtgcactgagagccctgaaagaggaaggccggctgacctttcctctgctggccgaatgcctgttcagagccggaagaagggatctgctgcgggacctgctgcatctggaccccagatttctggaaagacacctggccggcaccatgagctacttcagcccttaccagctgaccgtgctgcacgttgacggcgaactgtgcgccagagatattcggagcctgatcttcctgagcaaggacaccatcggcagccggtctacccctcagacatttctgcactgggtgtactgcatggaaaacctggacctgctcggccccacagatgtggatgccctgatgtccatgctgagaagcctgagcagagtggacctccagagacaggtgcagacactgatgggactgcacctgagcggacctagccacagccagcactacagacacacccct

SEQ ID NO: 3881 - DNA, 1887 bp, synthetic construct
  source 1..1887: mol_type = other DNA
atggccttaccagtgaccgccttgctcctgccgctggccttgctgctccacgccgccaggccggatattgtgatgacacagagccccgacagcctggccgtgtctcttggagaaagagccaccatcaactgcaagagcagccagagcctgctgtactccagcaacagcaagaactacctggcctggtatcagcagaagcccggccagcctcctaagctgctgatctactgggccagcaccagagaaagcggcgtgcccgatagattttctggctctggcagcggcaccgacttcaccctgacaatttctagcctgcaagccgaggacgtggccgtgtattactgccagcagccttacagctaccctctgagctttggagccggcaccaagctggaactgaaactcgagatccagaaccctgatcctgccgtgtaccagctgcgggatagcaagagcagcgacaagagcgtgtgtctgttcaccgacttcgacagccagaccaacgtgtcccagagcaaggactccgacgtgtacatcaccgataagtgcgtgctggacatgcggagcatggacttcaagagcaactccgccgtggcctggtccaacaagtccgatttcgcctgcgccaacgccttcaacaacagcattatccccgaggacacattcttcccaagccccgagagcagctgcgacgtgaagctggtggaaaagagcttcgagacagacaccaacctgaacttccagaacctgagcgtgatcggcttcagaatcctgctgctgaaagtggccggctttaacctgctgatgaccctgcggctgtggtccagccgcgccaagagaagcggatctggcgtgaagcagaccctgaatttcgacctgctgaagctggctggcgacgtggaatccaacccaggccctactagtatggactggatttggcgcatccttttccttgtcggcgctgctaccggcgcgcattccttcgaacaggttcagctggttcagtctggggccgaagtgaagaaacctggggcctctgtgaaggtgtcctgcaaggcttccggctacacctttaccgaccacgccatccactgggtccgacaggctccaggacaacggcttgagtggatgggctacttcagccccggcaacgacgacttcaagtacagccagaaattccagggcagagtgaccatcaccgccgatacaagcgccagcaccgcctacatggaactgagcagtctgagaagcgaggataccgccgtgtacttctgcacacggtccctgaacatggcctattggggccagggaaccctggtcacagtgtctagcggaagcacatctacgcgtgaggacctgaagaacgtgttcccacctgaggtggccgtgttcgagcctagcgaggccgagatcagccacacccagaaagccaccctcgtgtgcctggctaccggcttctaccccgaccatgtggaactgtcttggtgggtcaacggcaaagaggtgcacagcggcgtgtgtaccgacccccagccactgaaagaacagcccgccctgaacgacagccggtactgcctgagcagcagactgagagtgtccgccaccttctggcagaacccccggaaccacttcagatgccaggtgcagttctacggcctgagcgagaacgacgagtggacccaggacagagccaagcccgtgacccagatcgtgtctgccgaagcctggggcagagccgattgcggctttaccagcgagagctaccagcagggcgtgctgagcgccaccatcctgtacgagatcctgctgggcaaggccaccctgtacgccgtgctggtgtctgccctggtgctgatggctatggtcaagcggaaggacagccgggga

SEQ ID NO: 3882 - DNA, 2553 bp, synthetic construct
  source 1..2553: mol_type = other DNA
atggccttaccagtgaccgccttgctcctgccgctggccttgctgctccacgccgccaggccggatattgtgatgacacagagccccgacagcctggccgtgtctcttggagaaagagccaccatcaactgcaagagcagccagagcctgctgtactccagcaacagcaagaactacctggcctggtatcagcagaagcccggccagcctcctaagctgctgatctactgggccagcaccagagaaagcggcgtgcccgatagattttctggctctggcagcggcaccgacttcaccctgacaatttctagcctgcaagccgaggacgtggccgtgtattactgccagcagccttacagctaccctctgagctttggagccggcaccaagctggaactgaaactcgagatccagaaccctgatcctgccgtgtaccagctgcgggatagcaagagcagcgacaagagcgtgtgtctgttcaccgacttcgacagccagaccaacgtgtcccagagcaaggactccgacgtgtacatcaccgataagtgcgtgctggacatgcggagcatggacttcaagagcaactccgccgtggcctggtccaacaagtccgatttcgcctgcgccaacgccttcaacaacagcattatccccgaggacacattcttcccaagccccgagagcagctgcgacgtgaagctggtggaaaagagcttcgagacagacaccaacctgaacttccagaacctgagcgtgatcggcttcagaatcctgctgctgaaagtggccggctttaacctgctgatgaccctgcggctgtggtccagccgcgccaagagaagcggatctggcgtgaagcagaccctgaatttcgacctgctgaagctggctggcgacgtggaatccaacccaggccctactagtatggactggatttggcgcatccttttccttgtcggcgctgctaccggcgcgcattccttcgaacaggttcagctggttcagtctggggccgaagtgaagaaacctggggcctctgtgaaggtgtcctgcaaggcttccggctacacctttaccgaccacgccatccactgggtccgacaggctccaggacaacggcttgagtggatgggctacttcagccccggcaacgacgacttcaagtacagccagaaattccagggcagagtgaccatcaccgccgatacaagcgccagcaccgcctacatggaactgagcagtctgagaagcgaggataccgccgtgtacttctgcacacggtccctgaacatggcctattggggccagggaaccctggtcacagtgtctagcggaagcacatctacgcgtgaggacctgaagaacgtgttcccacctgaggtggccgtgttcgagcctagcgaggccgagatcagccacacccagaaagccaccctcgtgtgcctggctaccggcttctaccccgaccatgtggaactgtcttggtgggtcaacggcaaagaggtgcacagcggcgtgtgtaccgacccccagccactgaaagaacagcccgccctgaacgacagccggtactgcctgagcagcagactgagagtgtccgccaccttctggcagaacccccggaaccacttcagatgccaggtgcagttctacggcctgagcgagaacgacgagtggacccaggacagagccaagcccgtgacccagatcgtgtctgccgaagcctggggcagagccgattgcggctttaccagcgagagctaccagcagggcgtgctgagcgccaccatcctgtacgagatcctgctgggcaaggccaccctgtacgccgtgctggtgtctgccctggtgctgatggctatggtcaagcggaaggacagccggggaagggccaagcgatctggatctggagcaacaaacttctcactactcaaacaagcaggtgacgtggaggagaatcccgggccttctagaggcgggatccacaccatggctacctacgaggtgctgtgcgaggtggcaagaaagctgggcaccgacgacagagaagtggtgctgttcctgctgaacgtgttcatccctcagcctacactggcccagctgatcggtgcactgagagccctgaaagaggaaggccggctgacctttcctctgctggccgaatgcctgttcagagccggaagaagggatctgctgcgggacctgctgcatctggaccccagatttctggaaagacacctggccggcaccatgagctacttcagcccttaccagctgaccgtgctgcacgttgacggcgaactgtgcgccagagatattcggagcctgatcttcctgagcaaggacaccatcggcagccggtctacccctcagacatttctgcactgggtgtactgcatggaaaacctggacctgctcggccccacagatgtggatgccctgatgtccatgctgagaagcctgagcagagtggacctccagagacaggtgcagacactgatgggactgcacctgagcggacctagccacagccagcactacagacacacccct

SEQ ID NO: 3883 - DNA, 2712 bp, synthetic construct
  source 1..2712: mol_type = other DNA
atggccttaccagtgaccgccttgctcctgccgctggccttgctgctccacgccgccaggccgctcgaggggaaaccaattcccaaccctcttctgggactggattcaaccggcagcggcgaggacctgaagaacgtgttcccacctgaggtggccgtgttcgagcctagcaaggccgagatcgcccacacccagaaagccaccctcgtgtgcctggctaccggcttctaccccgaccatgtggaactgtcttggtgggtcaacggcaaagaggtgcacagcggcgtgtgtaccgacccccagccactgaaagaacagcccgccctgaacgacagccggtactgcctgagcagcagactgagagtgtccgccaccttctggcagaacccccggaaccacttcagatgccaggtgcagttctacggcctgagcgagaacgacgagtggacccaggacagagccaagcccgtgacccagatcgtgtctgccgaagcctggggcagagccgattgcggcatcaccagcgccagctaccaccagggcgtgctgagcgccaccatcctgtacgagatcctgctgggcaaggccaccctgtacgccgtgctggtgtctgccctggtgctgatggctatggtcaagcggaaggacagccggggaagggccaagcgatctggatctggagcaacaaacttctcactactcaaacaagcaggtgacgtggaggagaatcccgggcctactagcatggccttaccagtgaccgccttgctcctgccgctggccttgctgctccacgccgccaggccggatattgtgatgacacagagccccgacagcctggccgtgtctcttggagaaagagccaccatcaactgcaagagcagccagagcctgctgtactccagcaacagcaagaactacctggcctggtatcagcagaagcccggccagcctcctaagctgctgatctactgggccagcaccagagaaagcggcgtgcccgatagattttctggctctggcagcggcaccgacttcaccctgacaatttctagcctgcaagccgaggacgtggccgtgtattactgccagcagccttacagctaccctctgagctttggagccggcaccaagctggaactgaaaggcggaggcggaagtggaggcggaggatctggcggcggaggctctcaggttcagctggttcagtctggggccgaagtgaagaaacctggggcctctgtgaaggtgtcctgcaaggcttccggctacacctttaccgaccacgccatccactgggtccgacaggctccaggacaacggcttgagtggatgggctacttcagccccggcaacgacgacttcaagtacagccagaaattccagggcagagtgaccatcaccgccgatacaagcgccagcaccgcctacatggaactgagcagtctgagaagcgaggataccgccgtgtacttctgcacacggtccctgaacatggcctattggggccagggaaccctggtcacagtgtctagcggaagcacatctacgcgtgagcagaaactgatctcggaagaggatgggagcggcatccagaaccctgatcctgccgtgtaccagctgcgggatagcaagagcagcgacaagagcgtgtgtctgttcaccgacttcgacagccagaccaacgtgtcccagagcaaggactccgacgtgtacatcaccgataagtgcgtgctggacatgcggagcatggacttcaagagcaactccgccgtggcctggtccaacaagtccgatttcgcctgcgccaacgccttcaacaacagcattatccccgaggacacattcttcccaagcagcgacgtgccctgcgacgtgaagctggtggaaaagagcttcgagacagacaccaacctgaacttccagaacctgagcgtgatcggcttcagaatcctgctgctgaaagtggccggctttaacctgctgatgaccctgcggctgtggtccagccgcgccaagagaagcggatctggcgtgaagcagaccctgaatttcgacctgctgaagctggctggcgacgtggaatccaacccaggcccttctagaggccatatgaccgagtacaagcccacggtgcgcctcgccacccgcgacgacgtccccagggccgtacgcaccctcgccgccgcgttcgccgactaccccgccacgcgccacaccgtcgatccggaccgccacatcgagcgggtcaccgagctgcaagaactcttcctcacgcgcgtcgggctcgacatcggcaaggtgtgggtcgcggacgacggcgccgcggtggcggtctggaccacgccggagagcgtcgaagcgggggcggtgttcgccgagatcggcccgcgcatggccgagttgagcggttcccggctggccgcgcagcaacagatggaaggcctcctggcgccgcaccggcccaaggagcccgcgtggttcctggccaccgtcggcgtctcgcccgaccaccagggcaagggtctgggcagcgccgtcgtgctccccggagtggaggcggccgagcgcgccggggtgcccgccttcctggagacctccgcgccccgcaacctccccttctacgagcggctcggcttcaccgtcaccgccgacgtcgaggtgcccgaaggaccgcgcacctggtgcatgacccgcaagcccggtgcctga

SEQ ID NO: 3884 - DNA, 2715 bp, synthetic construct
  source 1..2715: mol_type = other DNA
atggccttaccagtgaccgccttgctcctgccgctggccttgctgctccacgccgccaggccgctcgagcagaaactgatctcggaagaggatctgggctccggcgatcgccctgatcctgccgtgtaccagctgcgggatagcaagagcagcgacaagagcgtgtgtctgttcaccgacttcgacagccagaccaacgtgtcccagagcaaggactccgacgtgtacatcaccgataagtgcgtgctggacatgcggagcatggacttcaagagcaactccgccgtggcctggtccaacaagtccgatttcgcctgcgccaacgccttcaacaacagcattatccccgaggacacattcttcccaagccccgagagcagctgcgacgtgaagctggtggaaaagagcttcgagacagacaccaacctgaacttccagaacctgagcgtgatcggcttcagaatcctgctgctgaaagtggccggctttaacctgctgatgaccctgcggctgtggtccagctctagtcgcgccaagagaagcggatctggcgtgaagcagaccctgaatttcgacctgctgaagctggctggcgacgtggaatccaacccaggccccactagcatggccttaccagtgaccgccttgctcctgccgctggccttgctgctccacgccgccaggccggatattgtgatgacacagagccccgacagcctggccgtgtctcttggagaaagagccaccatcaactgcaagagcagccagagcctgctgtactccagcaacagcaagaactacctggcctggtatcagcagaagcccggccagcctcctaagctgctgatctactgggccagcaccagagaaagcggcgtgcccgatagattttctggctctggcagcggcaccgacttcaccctgacaatttctagcctgcaagccgaggacgtggccgtgtattactgccagcagccttacagctaccctctgagctttggagccggcaccaagctggaactgaaaggcggaggcggaagtggaggcggaggatctggcggcggaggctctcaggttcagctggttcagtctggggccgaagtgaagaaacctggggcctctgtgaaggtgtcctgcaaggcttccggctacacctttaccgaccacgccatccactgggtccgacaggctccaggacaacggcttgagtggatgggctacttcagccccggcaacgacgacttcaagtacagccagaaattccagggcagagtgaccatcaccgccgatacaagcgccagcaccgcctacatggaactgagcagtctgagaagcgaggataccgccgtgtacttctgcacacggtccctgaacatggcctattggggccagggaaccctggtcacagtgtctagcggaagcacatctacgcgtgggaaaccaattcccaaccctcttctgggactggattcaaccggcagcggcgaggacctgaagaacgtgttcccacctgaggtggccgtgttcgagcctagcgaggccgagatcagccacacccagaaagccaccctcgtgtgcctggctaccggcttctaccccgaccatgtggaactgtcttggtgggtcaacggcaaagaggtgcacagcggcgtgtgtaccgacccccagccactgaaagaacagcccgccctgaacgacagccggtactgcctgagcagcagactgagagtgtccgccaccttctggcagaacccccggaaccacttcagatgccaggtgcagttctacggcctgagcgagaacgacgagtggacccaggacagagccaagcccgtgacccagatcgtgtctgccgaagcctggggcagagccgattgcggctttaccagcgagagctaccagcagggcgtgctgagcgccaccatcctgtacgagatcctgctgggcaaggccaccctgtacgccgtgctggtgtctgccctggtgctgatggctatggtcaagcggaaggacagccggggaagggccaagcgatctggatctggagcaacaaacttctcactactcaaacaagcaggtgacgtggaggagaatcccgggccttctagaggccatatgaccgagtacaagcccacggtgcgcctcgccacccgcgacgacgtccccagggccgtacgcaccctcgccgccgcgttcgccgactaccccgccacgcgccacaccgtcgatccggaccgccacatcgagcgggtcaccgagctgcaagaactcttcctcacgcgcgtcgggctcgacatcggcaaggtgtgggtcgcggacgacggcgccgcggtggcggtctggaccacgccggagagcgtcgaagcgggggcggtgttcgccgagatcggcccgcgcatggccgagttgagcggttcccggctggccgcgcagcaacagatggaaggcctcctggcgccgcaccggcccaaggagcccgcgtggttcctggccaccgtcggcgtctcgcccgaccaccagggcaagggtctgggcagcgccgtcgtgctccccggagtggaggcggccgagcgcgccggggtgcccgccttcctggagacctccgcgccccgcaacctccccttctacgagcggctcggcttcaccgtcaccgccgacgtcgaggtgcccgaaggaccgcgcacctggtgcatgacccgcaagcccggtgcctga

SEQ ID NO: 3885 - DNA, 2577 bp, synthetic construct
  source 1..2577: mol_type = other DNA
atggccttaccagtgaccgccttgctcctgccgctggccttgctgctccacgccgccaggccggatattgtgatgacacagagccccgacagcctggccgtgtctcttggagaaagagccaccatcaactgcaagagcagccagagcctgctgtactccagcaacagcaagaactacctggcctggtatcagcagaagcccggccagcctcctaagctgctgatctactgggccagcaccagagaaagcggcgtgcccgatagattttctggctctggcagcggcaccgacttcaccctgacaatttctagcctgcaagccgaggacgtggccgtgtattactgccagcagccttacagctaccctctgagctttggagccggcaccaagctggaactgaaactcgaggacctgaagaacgtgttcccacctgaggtggccgtgttcgagcctagcgaggccgagatcagccacacccagaaagccaccctcgtgtgcctggctaccggcttctaccccgaccatgtggaactgtcttggtgggtcaacggcaaagaggtgcacagcggcgtgtctaccgacccccagccactgaaagaacagcccgccctgaacgacagccggtactgcctgagcagcagactgagagtgtccgccaccttctggcagaacccccggaaccacttcagatgccaggtgcagttctacggcctgagcgagaacgacgagtggacccaggacagagccaagcccgtgacccagatcgtgtctgccgaagcctggggcagagccgattgcggctttaccagcgagagctaccagcagggcgtgctgagcgccaccatcctgtacgagatcctgctgggcaaggccaccctgtacgccgtgctggtgtctgccctggtgctgatggctatggtcaagcggaaggacagccggggaagggccaagcgatctggatctggagcaacaaacttctcactactcaaacaagcaggtgacgtggaggagaatcccgggcctactagtatggactggatttggcgcatccttttccttgtcggcgctgctaccggcgcgcattccttcgaacaggttcagctggttcagtctggggccgaagtgaagaaacctggggcctctgtgaaggtgtcctgcaaggcttccggctacacctttaccgaccacgccatccactgggtccgacaggctccaggacaacggcttgagtggatgggctacttcagccccggcaacgacgacttcaagtacagccagaaattccagggcagagtgaccatcaccgccgatacaagcgccagcaccgcctacatggaactgagcagtctgagaagcgaggataccgccgtgtacttctgcacacggtccctgaacatggcctattggggccagggaaccctggtcacagtgtctagcggaagcacatctacgcgtatccagaaccctgatcctgccgtgtaccagctgcgggatagcaagagcagcgacaagagcgtgtgtctgttcaccgacttcgacagccagaccaacgtgtcccagagcaaggactccgacgtgtacatcaccgataagaccgtgctggacatgcggagcatggacttcaagagcaactccgccgtggcctggtccaacaagtccgatttcgcctgcgccaacgccttcaacaacagcattatccccgaggacacattcttcccaagccccgagagcagctgcgacgtgaagctggtggaaaagagcttcgagacagacaccaacctgaacttccagaacctgagcgtgatcggcttcagaatcctgctgctgaaagtggccggctttaacctgctgatgaccctgcggctgtggtccagccgcgccaagagaagcggatctggcgtgaagcagaccctgaatttcgacctgctgaagctggctggcgacgtggaatccaacccaggcccttctagaggccatatgaccgagtacaagcccacggtgcgcctcgccacccgcgacgacgtccccagggccgtacgcaccctcgccgccgcgttcgccgactaccccgccacgcgccacaccgtcgatccggaccgccacatcgagcgggtcaccgagctgcaagaactcttcctcacgcgcgtcgggctcgacatcggcaaggtgtgggtcgcggacgacggcgccgcggtggcggtctggaccacgccggagagcgtcgaagcgggggcggtgttcgccgagatcggcccgcgcatggccgagttgagcggttcccggctggccgcgcagcaacagatggaaggcctcctggcgccgcaccggcccaaggagcccgcgtggttcctggccaccgtcggcgtctcgcccgaccaccagggcaagggtctgggcagcgccgtcgtgctccccggagtggaggcggccgagcgcgccggggtgcccgccttcctggagacctccgcgccccgcaacctccccttctacgagcggctcggcttcaccgtcaccgccgacgtcgaggtgcccgaaggaccgcgcacctggtgcatgacccgcaagcccggtgcctga

SEQ ID NO: 3886 - DNA, 2823 bp, synthetic construct
  source 1..2823: mol_type = other DNA
atggccttaccagtgaccgccttgctcctgccgctggccttgctgctccacgccgccaggccggatattgtgatgacacagagccccgacagcctggccgtgtctcttggagaaagagccaccatcaactgcaagagcagccagagcctgctgtactccagcaacagcaagaactacctggcctggtatcagcagaagcccggccagcctcctaagctgctgatctactgggccagcaccagagaaagcggcgtgcccgatagattttctggctctggcagcggcaccgacttcaccctgacaatttctagcctgcaagccgaggacgtggccgtgtattactgccagcagccttacagctaccctctgagctttggagccggcaccaagctggaactgaaactcgaggacctgaagaacgtgttcccacctgaggtggccgtgttcgagcctagcgaggccgagatcagccacacccagaaagccaccctcgtgtgcctggctaccggcttctaccccgaccatgtggaactgtcttggtgggtcaacggcaaagaggtgcacagcggcgtgtctaccgacccccagccactgaaagaacagcccgccctgaacgacagccggtactgcctgagcagcagactgagagtgtccgccaccttctggcagaacccccggaaccacttcagatgccaggtgcagttctacggcctgagcgagaacgacgagtggacccaggacagagccaagcccgtgacccagatcgtgtctgccgaagcctggggcagagccgattgcggctttaccagcgagagctaccagcagggcgtgctgagcgccaccatcctgtacgagatcctgctgggcaaggccaccctgtacgccgtgctggtgtctgccctggtgctgatggctatggtcaagcggaaggacagccggggaagggccaagcgatctggatctggagcaacaaacttctcactactcaaacaagcaggtgacgtggaggagaatcccgggcctactagtatggactggatttggcgcatccttttccttgtcggcgctgctaccggcgcgcattccttcgaacaggttcagctggttcagtctggggccgaagtgaagaaacctggggcctctgtgaaggtgtcctgcaaggcttccggctacacctttaccgaccacgccatccactgggtccgacaggctccaggacaacggcttgagtggatgggctacttcagccccggcaacgacgacttcaagtacagccagaaattccagggcagagtgaccatcaccgccgatacaagcgccagcaccgcctacatggaactgagcagtctgagaagcgaggataccgccgtgtacttctgcacacggtccctgaacatggcctattggggccagggaaccctggtcacagtgtctagcggaagcacatctacgcgtgagcagaaactgatctcggaagaggatgggagcggcaccccattcccttctctggcccctcccatcatgctgctggtggacggcaagcagcagatggtggtcgtgtgcctggtgctggatgtggccccacctggactggacagccccatctggtttagcgccggcaatggctctgccctggacgcctttacctacggcccaagccctgccaccgatggcacctggacaaatctggcccacctgagcctgcccagcgaggaactggcttcttgggagcctctcgtgtgccacacaggacctggcgctgagggacacagcagatccacccagcctatgcacctgtctggcgaggccagcaccgccagaacctgtcctcaggaacctctgagaggcacccctggcggagcactgtggctgggagtgctgagactgctgctgttcaagctgctgctgtttgacctgctgctgacctgctcctgtctgtgcgatcctgccggccctctgccttctcctgccaccaccacaagactgagagccctgggcagccacagactgcaccctgccacagagacaggcggcagagaggccacaagcagccctagaccccagcccagagacagaagatggggcgataccccccctggcagaaagcctggatctccagtccgcgccaagagaagcggatctggcgtgaagcagaccctgaatttcgacctgctgaagctggctggcgacgtggaatccaacccaggcccttctagaggccatatgaccgagtacaagcccacggtgcgcctcgccacccgcgacgacgtccccagggccgtacgcaccctcgccgccgcgttcgccgactaccccgccacgcgccacaccgtcgatccggaccgccacatcgagcgggtcaccgagctgcaagaactcttcctcacgcgcgtcgggctcgacatcggcaaggtgtgggtcgcggacgacggcgccgcggtggcggtctggaccacgccggagagcgtcgaagcgggggcggtgttcgccgagatcggcccgcgcatggccgagttgagcggttcccggctggccgcgcagcaacagatggaaggcctcctggcgccgcaccggcccaaggagcccgcgtggttcctggccaccgtcggcgtctcgcccgaccaccagggcaagggtctgggcagcgccgtcgtgctccccggagtggaggcggccgagcgcgccggggtgcccgccttcctggagacctccgcgccccgcaacctccccttctacgagcggctcggcttcaccgtcaccgccgacgtcgaggtgcccgaaggaccgcgcacctggtgcatgacccgcaagcccggtgcctga

SEQ ID NO: 3887 - DNA, 2877 bp, synthetic construct
  source 1..2877: mol_type = other DNA
atggccttaccagtgaccgccttgctcctgccgctggccttgctgctccacgccgccaggccgctcgaggacctgaagaacgtgttcccacctgaggtggccgtgttcgagcctagcgaggccgagatcagccacacccagaaagccaccctcgtgtgcctggctaccggcttctaccccgaccatgtggaactgtcttggtgggtcaacggcaaagaggtgcacagcggcgtgtctaccgacccccagccactgaaagaacagcccgccctgaacgacagccggtactgcctgagcagcagactgagagtgtccgccaccttctggcagaacccccggaaccacttcagatgccaggtgcagttctacggcctgagcgagaacgacgagtggacccaggacagagccaagcccgtgacccagatcgtgtctgccgaagcctggggcagagccgattgcggctttaccagcgagagctaccagcagggcgtgctgagcgccaccatcctgtacgagatcctgctgggcaaggccaccctgtacgccgtgctggtgtctgccctggtgctgatggctatggtcaagcggaaggacagccggggaagggccaagcgatctggatctggagcaacaaacttctcactactcaaacaagcaggtgacgtggaggagaatcccgggcctactagcatggccttaccagtgaccgccttgctcctgccgctggccttgctgctccacgccgccaggccggatattgtgatgacacagagccccgacagcctggccgtgtctcttggagaaagagccaccatcaactgcaagagcagccagagcctgctgtactccagcaacagcaagaactacctggcctggtatcagcagaagcccggccagcctcctaagctgctgatctactgggccagcaccagagaaagcggcgtgcccgatagattttctggctctggcagcggcaccgacttcaccctgacaatttctagcctgcaagccgaggacgtggccgtgtattactgccagcagccttacagctaccctctgagctttggagccggcaccaagctggaactgaaaggcggaggcggaagtggaggcggaggatctggcggcggaggctctcaggttcagctggttcagtctggggccgaagtgaagaaacctggggcctctgtgaaggtgtcctgcaaggcttccggctacacctttaccgaccacgccatccactgggtccgacaggctccaggacaacggcttgagtggatgggctacttcagccccggcaacgacgacttcaagtacagccagaaattccagggcagagtgaccatcaccgccgatacaagcgccagcaccgcctacatggaactgagcagtctgagaagcgaggataccgccgtgtacttctgcacacggtccctgaacatggcctattggggccagggaaccctggtcacagtgtctagcggaagcacatctacgcgtgagcagaaactgatctcggaagaggatctggggagcggcaccccattcccttctctggcccctcccatcatgctgctggtggacggcaagcagcagatggtggtcgtgtgcctggtgctggatgtggccccacctggactggacagccccatctggtttagcgccggcaatggctctgccctggacgcctttacctacggcccaagccctgccaccgatggcacctggacaaatctggcccacctgagcctgcccagcgaggaactggcttcttgggagcctctcgtgtgccacacaggacctggcgctgagggacacagcagatccacccagcctatgcacctgtctggcgaggccagcaccgccagaacctgtcctcaggaacctctgagaggcacccctggcggagcactgtggctgggagtgctgagactgctgctgttcaagctgctgctgtttgacctgctgctgacctgctcctgtctgtgcgatcctgccggccctctgccttctcctgccaccaccacaagactgagagccctgggcagccacagactgcaccctgccacagagacaggcggcagagaggccacaagcagccctagaccccagcccagagacagaagatggggcgataccccccctggcagaaagcctggatctccagtccgcgccaagagaagcggatctggcgtgaagcagaccctgaatttcgacctgctgaagctggctggcgacgtggaatccaacccaggcccttctagatctagaggccatatgaccgagtacaagcccacggtgcgcctcgccacccgcgacgacgtccccagggccgtacgcaccctcgccgccgcgttcgccgactaccccgccacgcgccacaccgtcgatccggaccgccacatcgagcgggtcaccgagctgcaagaactcttcctcacgcgcgtcgggctcgacatcggcaaggtgtgggtcgcggacgacggcgccgcggtggcggtctggaccacgccggagagcgtcgaagcgggggcggtgttcgccgagatcggcccgcgcatggccgagttgagcggttcccggctggccgcgcagcaacagatggaaggcctcctggcgccgcaccggcccaaggagcccgcgtggttcctggccaccgtcggcgtctcgcccgaccaccagggcaagggtctgggcagcgccgtcgtgctccccggagtggaggcggccgagcgcgccggggtgcccgccttcctggagacctccgcgccccgcaacctccccttctacgagcggctcggcttcaccgtcaccgccgacgtcgaggtgcccgaaggaccgcgcacctggtgcatgacccgcaagcccggtgcctga

SEQ ID NO: 3888 - DNA, 2688 bp, synthetic construct
  source 1..2688: mol_type = other DNA
atggccttaccagtgaccgccttgctcctgccgctggccttgctgctccacgccgccaggccggatattgtgatgacacagagccccgacagcctggccgtgtctcttggagaaagagccaccatcaactgcaagagcagccagagcctgctgtactccagcaacagcaagaactacctggcctggtatcagcagaagcccggccagcctcctaagctgctgatctactgggccagcaccagagaaagcggcgtgcccgatagattttctggctctggcagcggcaccgacttcaccctgacaatttctagcctgcaagccgaggacgtggccgtgtattactgccagcagccttacagctaccctctgagctttggagccggcaccaagctggaactgaaactcgaggggaaaccaattcccaaccctcttctgggactggattcaaccggcagcggcgacaagcagctggacgccgacgtgtcccccaagcctaccatcttcctgccctctatcgccgagacaaagctccagaaggccggcacctacctgtgcctgctggaaaagttcttcccagatgtgattaagatccactggcaggaaaagaagtccaacaccatcctgggcagccaggaaggcaacaccatgaagaccaacgacacctacatgaagttcagctggctgaccgtgcccgagaagtccctggacaaagaacacagatgcatcgtgcggcacgaaaacaacaagaacggcgtggaccaggaaatcatcttcccacccatcaagaccgatgtgattacaatggaccccaaggacaactgctccaaggacgccaacgataccctgctgctccagctgaccaacaccagcgcctactacatgtacttgttgctgctgctgaagtccgtggtgtacttcgccatcatcacatgctgcctgctgcggagaaccgccttctgctgcaacggcgagaagtctagggccaagcgatctggatctggagcaacaaacttctcactactcaaacaagcaggtgacgtggaggagaatcccgggcctactagtatggactggatttggcgcatccttttccttgtcggcgctgctaccggcgcgcattccttcgaacaggttcagctggttcagtctggggccgaagtgaagaaacctggggcctctgtgaaggtgtcctgcaaggcttccggctacacctttaccgaccacgccatccactgggtccgacaggctccaggacaacggcttgagtggatgggctacttcagccccggcaacgacgacttcaagtacagccagaaattccagggcagagtgaccatcaccgccgatacaagcgccagcaccgcctacatggaactgagcagtctgagaagcgaggataccgccgtgtacttctgcacacggtccctgaacatggcctattggggccagggaaccctggtcacagtgtctagcggaagcacatctacgcgtgagcagaaactgatctcggaagaggatgggagcggcagccagcctcacaccaagcccagcgtgttcgtgatgaagaacggcaccaacgtggcctgcctcgtgaaagagttctaccccaaggacatcaggatcaacctggtgtccagcaagaagatcaccgagttcgaccccgccatcgtgatctcccccagcggcaagtacaacgccgtgaagctggggaagtacgaggacagcaacagcgtgacctgctccgtgcagcacgacaacaagaccgtgcacagcaccgactttgaagtgaaaaccgactccaccgaccacgtgaagcccaaagagacagagaacaccaagcagcccagcaagagctgccacaagcccaaggccatcgtgcacaccgagaaagtgaacatgatgagcctgaccgtgctgggcctgcggatgctgttcgccaaaaccgtggccgtgaacttcctgctgaccgccaagctgttcttcctccgcgccaagagaagcggatctggcgtgaagcagaccctgaatttcgacctgctgaagctggctggcgacgtggaatccaacccaggcccttctagaggccatatgaccgagtacaagcccacggtgcgcctcgccacccgcgacgacgtccccagggccgtacgcaccctcgccgccgcgttcgccgactaccccgccacgcgccacaccgtcgatccggaccgccacatcgagcgggtcaccgagctgcaagaactcttcctcacgcgcgtcgggctcgacatcggcaaggtgtgggtcgcggacgacggcgccgcggtggcggtctggaccacgccggagagcgtcgaagcgggggcggtgttcgccgagatcggcccgcgcatggccgagttgagcggttcccggctggccgcgcagcaacagatggaaggcctcctggcgccgcaccggcccaaggagcccgcgtggttcctggccaccgtcggcgtctcgcccgaccaccagggcaagggtctgggcagcgccgtcgtgctccccggagtggaggcggccgagcgcgccggggtgcccgccttcctggagacctccgcgccccgcaacctccccttctacgagcggctcggcttcaccgtcaccgccgacgtcgaggtgcccgaaggaccgcgcacctggtgcatgacccgcaagcccggtgcctga

SEQ ID NO: 3889 - DNA, 1899 bp, synthetic construct
  source 1..1899: mol_type = other DNA
atggccttaccagtgaccgccttgctcctgccgctggccttgctgctccacgccgccaggccggatattgtgatgacacagagccccgacagcctggccgtgtctcttggagaaagagccaccatcaactgcaagagcagccagagcctgctgtactccagcaacagcaagaactacctggcctggtatcagcagaagcccggccagcctcctaagctgctgatctactgggccagcaccagagaaagcggcgtgcccgatagattttctggctctggcagcggcaccgacttcaccctgacaatttctagcctgcaagccgaggacgtggccgtgtattactgccagcagccttacagctaccctctgagctttggagccggcaccaagctggaactgaaactcgagagccagcctcacaccaagcccagcgtgttcgtgatgaagaacggcaccaacgtggcctgcctcgtgaaagagttctaccccaaggacatcaggatcaacctggtgtccagcaagaagatcaccgagttcgaccccgccatcgtgatctcccccagcggcaagtacaacgccgtgaagctggggaagtacgaggacagcaacagcgtgacctgctccgtgcagcacgacaacaagaccgtgcacagcaccgactttgaagtgaaaaccgactccaccgaccacgtgaagcccaaagagacagagaacaccaagcagcccagcaagagctgccacaagcccaaggccatcgtgcacaccgagaaagtgaacatgatgagcctgaccgtgctgggcctgcggatgctgttcgccaaaaccgtggccgtgaacttcctgctgaccgccaagctgttcttcctcagggccaagcgatctggatctggagcaacaaacttctcactactcaaacaagcaggtgacgtggaggagaatcccgggcctactagtatggactggatttggcgcatccttttccttgtcggcgctgctaccggcgcgcattccttcgaacaggttcagctggttcagtctggggccgaagtgaagaaacctggggcctctgtgaaggtgtcctgcaaggcttccggctacacctttaccgaccacgccatccactgggtccgacaggctccaggacaacggcttgagtggatgggctacttcagccccggcaacgacgacttcaagtacagccagaaattccagggcagagtgaccatcaccgccgatacaagcgccagcaccgcctacatggaactgagcagtctgagaagcgaggataccgccgtgtacttctgcacacggtccctgaacatggcctattggggccagggaaccctggtcacagtgtctagcggaagcacatctacgcgtgacaagcagctggacgccgacgtgtcccccaagcctaccatcttcctgccctctatcgccgagacaaagctccagaaggccggcacctacctgtgcctgctggaaaagttcttcccagatgtgattaagatccactggcaggaaaagaagtccaacaccatcctgggcagccaggaaggcaacaccatgaagaccaacgacacctacatgaagttcagctggctgaccgtgcccgagaagtccctggacaaagaacacagatgcatcgtgcggcacgaaaacaacaagaacggcgtggaccaggaaatcatcttcccacccatcaagaccgatgtgattacaatggaccccaaggacaactgctccaaggacgccaacgataccctgctgctccagctgaccaacaccagcgcctactacatgtacttgttgctgctgctgaagtccgtggtgtacttcgccatcatcacatgctgcctgctgcggagaaccgccttctgctgcaacggcgagaagtct

SEQ ID NO: 3890 - DNA, 2733 bp, synthetic construct
  source 1..2733: mol_type = other DNA
atggccttaccagtgaccgccttgctcctgccgctggccttgctgctccacgccgccaggccgctcgaggggaaaccaattcccaaccctcttctgggactggattcaaccggcagcggcgacaagcagctggacgccgacgtgtcccccaagcctaccatcttcctgccctctatcgccgagacaaagctccagaaggccggcacctacctgtgcctgctggaaaagttcttcccagatgtgattaagatccactggcaggaaaagaagtccaacaccatcctgggcagccaggaaggcaacaccatgaagaccaacgacacctacatgaagttcagctggctgaccgtgcccgagaagtccctggacaaagaacacagatgcatcgtgcggcacgaaaacaacaagaacggcgtggaccaggaaatcatcttcccacccatcaagaccgatgtgattacaatggaccccaaggacaactgctccaaggacgccaacgataccctgctgctccagctgaccaacaccagcgcctactacatgtacttgttgctgctgctgaagtccgtggtgtacttcgccatcatcacatgctgcctgctgcggagaaccgccttctgctgcaacggcgagaagtctagggccaagcgatctggatctggagcaacaaacttctcactactcaaacaagcaggtgacgtggaggagaatcccgggcctactagcatggccttaccagtgaccgccttgctcctgccgctggccttgctgctccacgccgccaggccggatattgtgatgacacagagccccgacagcctggccgtgtctcttggagaaagagccaccatcaactgcaagagcagccagagcctgctgtactccagcaacagcaagaactacctggcctggtatcagcagaagcccggccagcctcctaagctgctgatctactgggccagcaccagagaaagcggcgtgcccgatagattttctggctctggcagcggcaccgacttcaccctgacaatttctagcctgcaagccgaggacgtggccgtgtattactgccagcagccttacagctaccctctgagctttggagccggcaccaagctggaactgaaaggcggaggcggaagtggaggcggaggatctggcggcggaggctctcaggttcagctggttcagtctggggccgaagtgaagaaacctggggcctctgtgaaggtgtcctgcaaggcttccggctacacctttaccgaccacgccatccactgggtccgacaggctccaggacaacggcttgagtggatgggctacttcagccccggcaacgacgacttcaagtacagccagaaattccagggcagagtgaccatcaccgccgatacaagcgccagcaccgcctacatggaactgagcagtctgagaagcgaggataccgccgtgtacttctgcacacggtccctgaacatggcctattggggccagggaaccctggtcacagtgtctagcggaagcacatctacgcgtgagcagaaactgatctcggaagaggatgggagcggcagccagcctcacaccaagcccagcgtgttcgtgatgaagaacggcaccaacgtggcctgcctcgtgaaagagttctaccccaaggacatcaggatcaacctggtgtccagcaagaagatcaccgagttcgaccccgccatcgtgatctcccccagcggcaagtacaacgccgtgaagctggggaagtacgaggacagcaacagcgtgacctgctccgtgcagcacgacaacaagaccgtgcacagcaccgactttgaagtgaaaaccgactccaccgaccacgtgaagcccaaagagacagagaacaccaagcagcccagcaagagctgccacaagcccaaggccatcgtgcacaccgagaaagtgaacatgatgagcctgaccgtgctgggcctgcggatgctgttcgccaaaaccgtggccgtgaacttcctgctgaccgccaagctgttcttcctccgcgccaagagaagcggatctggcgtgaagcagaccctgaatttcgacctgctgaagctggctggcgacgtggaatccaacccaggcccttctagaggccatatgaccgagtacaagcccacggtgcgcctcgccacccgcgacgacgtccccagggccgtacgcaccctcgccgccgcgttcgccgactaccccgccacgcgccacaccgtcgatccggaccgccacatcgagcgggtcaccgagctgcaagaactcttcctcacgcgcgtcgggctcgacatcggcaaggtgtgggtcgcggacgacggcgccgcggtggcggtctggaccacgccggagagcgtcgaagcgggggcggtgttcgccgagatcggcccgcgcatggccgagttgagcggttcccggctggccgcgcagcaacagatggaaggcctcctggcgccgcaccggcccaaggagcccgcgtggttcctggccaccgtcggcgtctcgcccgaccaccagggcaagggtctgggcagcgccgtcgtgctccccggagtggaggcggccgagcgcgccggggtgcccgccttcctggagacctccgcgccccgcaacctccccttctacgagcggctcggcttcaccgtcaccgccgacgtcgaggtgcccgaaggaccgcgcacctggtgcatgacccgcaagcccggtgcctga

SEQ ID NO: 3891 - DNA, 3108 bp, synthetic construct
  source 1..3108: mol_type = other DNA
atggccttaccagtgaccgccttgctcctgccgctggccttgctgctccacgccgccaggccggatattgtgatgacacagagccccgacagcctggccgtgtctcttggagaaagagccaccatcaactgcaagagcagccagagcctgctgtactccagcaacagcaagaactacctggcctggtatcagcagaagcccggccagcctcctaagctgctgatctactgggccagcaccagagaaagcggcgtgcccgatagattttctggctctggcagcggcaccgacttcaccctgacaatttctagcctgcaagccgaggacgtggccgtgtattactgccagcagccttacagctaccctctgagctttggagccggcaccaagctggaactgaaaggacagcctaaggccaatcctaccgtgacactgttccctccaagcagcgaagaactccaggccaacaaggccacacttgtgtgcctgatctccgacttctaccctggggctgtgacagtggcttggaaggccgatggatctcctgtgaaagccggcgtggaaaccaccaagccatccaagcagagcaacaacaaatacgccgccagctcctacctgagcctgacacctgagcagtggaagtcccacagatcctacagctgccaagtgacccacgaaggcagcaccgtggaaaagacagtggcccctacagagtgcagcggatcccagagcttcggcctgctggaccccaagctgtgctacctgctggatggcatcctgttcatctacggcgtgatcctgaccgccctgttcctgagagtgaagttcagcagaagcgccgacgcccctgcctaccagcagggacagaaccaactgtacaacgagctgaacctgggcagacgggaagagtacgacgtgctggacaagcggagaggcagggaccctgagatgggcggaaagccccagcggagaaagaacccccaggaaggactgtataacgaactccagaaagacaagatggccgaagcctacagcgagatcggcatgaagggcgagcggagaagaggcaagggccacgatggcctgtaccagggcctgagcaccgccaccaaggacacctatgacgccctgcacatgcaggccctgcctccaagaagggccaagcgatctggatctggagcaacaaacttctcactactcaaacaagcaggtgacgtggaggagaatcccgggcctactagtatggactggatttggcgcatccttttccttgtcggcgctgctaccggcgcgcattccttcgaacaggttcagctggttcagtctggggccgaagtgaagaaacctggggcctctgtgaaggtgtcctgcaaggcttccggctacacctttaccgaccacgccatccactgggtccgacaggctccaggacaacggcttgagtggatgggctacttcagccccggcaacgacgacttcaagtacagccagaaattccagggcagagtgaccatcaccgccgatacaagcgccagcaccgcctacatggaactgagcagtctgagaagcgaggataccgccgtgtacttctgcacacggtccctgaacatggcctattggggccagggaaccctggtcacagtgtctagcggaagcacatctgcctctacaaagggaccctccgtgtttcctctggctcccagcagcaagtctacaagcggaggaacagccgctctgggctgcctggtcaaggattactttcccgagcctgtgaccgtgtcctggaatagcggagcactgacaagcggcgtgcacacctttccagccgtgctgcaaagcagcggcctgtactctctgagcagcgtggtcacagtgcctagctctagcctgggcacccagacctacatctgcaatgtgaaccacaagcctagcaacaccaaggtggacaagagagtggaacccaagagctgtggtacccagagttttgggttgttggaccctaaattgtgctatctgttggacggaatcctgttcatttacggagtgatcctgaccgcattgttcctgcgggttaagttttccagatccgcagacgcacccgcttaccaacaagggcagaaccaactctacaatgaacttaatttggggcggagggaagagtacgacgttctggacaaaaggaggggacgagatcccgagatgggcggaaagcctcagcgaaggaagaatccgcaagaggggctttataacgaactccagaaagataaaatggcagaagcctatagtgagattgggatgaagggagaaaggaggaggggtaaaggtcacgatgggttgtaccaaggattgagcacagccactaaagatacctatgatgcgctccacatgcaggccctgccgccaagacgcgccaagagaagcggatctggcgtgaagcagaccctgaatttcgacctgctgaagctggctggcgacgtggaatccaacccaggcccttctagaggccatatgaccgagtacaagcccacggtgcgcctcgccacccgcgacgacgtccccagggccgtacgcaccctcgccgccgcgttcgccgactaccccgccacgcgccacaccgtcgatccggaccgccacatcgagcgggtcaccgagctgcaagaactcttcctcacgcgcgtcgggctcgacatcggcaaggtgtgggtcgcggacgacggcgccgcggtggcggtctggaccacgccggagagcgtcgaagcgggggcggtgttcgccgagatcggcccgcgcatggccgagttgagcggttcccggctggccgcgcagcaacagatggaaggcctcctggcgccgcaccggcccaaggagcccgcgtggttcctggccaccgtcggcgtctcgcccgaccaccagggcaagggtctgggcagcgccgtcgtgctccccggagtggaggcggccgagcgcgccggggtgcccgccttcctggagacctccgcgccccgcaacctccccttctacgagcggctcggcttcaccgtcaccgccgacgtcgaggtgcccgaaggaccgcgcacctggtgcatgacccgcaagcccggtgcctga

SEQ ID NO: 3892 - DNA, 2463 bp, synthetic construct
  source 1..2463: mol_type = other DNA
atggccttaccagtgaccgccttgctcctgccgctggccttgctgctccacgccgccaggccggatattgtgatgacacagagccccgacagcctggccgtgtctcttggagaaagagccaccatcaactgcaagagcagccagagcctgctgtactccagcaacagcaagaactacctggcctggtatcagcagaagcccggccagcctcctaagctgctgatctactgggccagcaccagagaaagcggcgtgcccgatagattttctggctctggcagcggcaccgacttcaccctgacaatttctagcctgcaagccgaggacgtggccgtgtattactgccagcagccttacagctaccctctgagctttggagccggcaccaagctggaactgaaactcgaggacctgaagaacgtgttcccacctgaggtggccgtgttcgagcctagcgaggccgagatcagccacacccagaaagccaccctcgtgtgcctggctaccggcttctaccccgaccatgtggaactgtcttggtgggtcaacggcaaagaggtgcacagcggcgtgtctaccgacccccagccactgaaagaacagcccgccctgaacgacagccggtactgcctgagcagcagactgagagtgtccgccaccttctggcagaacccccggaaccacttcagatgccaggtgcagttctacggcctgagcgagaacgacgagtggacccaggacagagccaagcccgtgacccagatcgtgtctgccgaagcctggggcagagccgattgcggatcccagagcttcggcctgctggaccccaagctgtgctacctgctggatggcatcctgttcatctacggcgtgatcctgaccgccctgttcctgagagtgaagttcagcagaagcgccgacgcccctgcctaccagcagggacagaaccaactgtacaacgagctgaacctgggcagacgggaagagtacgacgtgctggacaagcggagaggcagggaccctgagatgggcggaaagccccagcggagaaagaacccccaggaaggactgtataacgaactccagaaagacaagatggccgaagcctacagcgagatcggcatgaagggcgagcggagaagaggcaagggccacgatggcctgtaccagggcctgagcaccgccaccaaggacacctatgacgccctgcacatgcaggccctgcctccaagaagggccaagcgatctggatctggagcaacaaacttctcactactcaaacaagcaggtgacgtggaggagaatcccgggcctactagtatggactggatttggcgcatccttttccttgtcggcgctgctaccggcgcgcattccttcgaacaggttcagctggttcagtctggggccgaagtgaagaaacctggggcctctgtgaaggtgtcctgcaaggcttccggctacacctttaccgaccacgccatccactgggtccgacaggctccaggacaacggcttgagtggatgggctacttcagccccggcaacgacgacttcaagtacagccagaaattccagggcagagtgaccatcaccgccgatacaagcgccagcaccgcctacatggaactgagcagtctgagaagcgaggataccgccgtgtacttctgcacacggtccctgaacatggcctattggggccagggaaccctggtcacagtgtctagcggaagcacatctacgcgtatccagaaccctgatcctgccgtgtaccagctgcgggatagcaagagcagcgacaagagcgtgtgtctgttcaccgacttcgacagccagaccaacgtgtcccagagcaaggactccgacgtgtacatcaccgataagaccgtgctggacatgcggagcatggacttcaagagcaactccgccgtggcctggtccaacaagtccgatttcgcctgcgccaacgccttcaacaacagcattatccccgaggacacattcttcccaagccccgagagcagctgcggtacccagagttttgggttgttggaccctaaattgtgctatctgttggacggaatcctgttcatttacggagtgatcctgaccgcattgttcctgcgggttaagttttccagatccgcagacgcacccgcttaccaacaagggcagaaccaactctacaatgaacttaatttggggcggagggaagagtacgacgttctggacaaaaggaggggacgagatcccgagatgggcggaaagcctcagcgaaggaagaatccgcaagaggggctttataacgaactccagaaagataaaatggcagaagcctatagtgagattgggatgaagggagaaaggaggaggggtaaaggtcacgatgggttgtaccaaggattgagcacagccactaaagatacctatgatgcgctccacatgcaggccctgccgccaaga

SEQ ID NO: 3893 - DNA, 2463 bp, synthetic construct
  source 1..2463: mol_type = other DNA
atggccttaccagtgaccgccttgctcctgccgctggccttgctgctccacgccgccaggccggatattgtgatgacacagagccccgacagcctggccgtgtctcttggagaaagagccaccatcaactgcaagagcagccagagcctgctgtactccagcaacagcaagaactacctggcctggtatcagcagaagcccggccagcctcctaagctgctgatctactgggccagcaccagagaaagcggcgtgcccgatagattttctggctctggcagcggcaccgacttcaccctgacaatttctagcctgcaagccgaggacgtggccgtgtattactgccagcagccttacagctaccctctgagctttggagccggcaccaagctggaactgaaactcgaggacctgaagaacgtgttcccacctgaggtggccgtgttcgagcctagcaaggccgagatcgcccacacccagaaagccaccctcgtgtgcctggctaccggcttctaccccgaccatgtggaactgtcttggtgggtcaacggcaaagaggtgcacagcggcgtgtgtaccgacccccagccactgaaagaacagcccgccctgaacgacagccggtactgcctgagcagcagactgagagtgtccgccaccttctggcagaacccccggaaccacttcagatgccaggtgcagttctacggcctgagcgagaacgacgagtggacccaggacagagccaagcccgtgacccagatcgtgtctgccgaagcctggggcagagccgattgcggatcccagagcttcggcctgctggaccccaagctgtgctacctgctggatggcatcctgttcatctacggcgtgatcctgaccgccctgttcctgagagtgaagttcagcagaagcgccgacgcccctgcctaccagcagggacagaaccaactgtacaacgagctgaacctgggcagacgggaagagtacgacgtgctggacaagcggagaggcagggaccctgagatgggcggaaagccccagcggagaaagaacccccaggaaggactgtataacgaactccagaaagacaagatggccgaagcctacagcgagatcggcatgaagggcgagcggagaagaggcaagggccacgatggcctgtaccagggcctgagcaccgccaccaaggacacctatgacgccctgcacatgcaggccctgcctccaagaagggccaagcgatctggatctggagcaacaaacttctcactactcaaacaagcaggtgacgtggaggagaatcccgggcctactagtatggactggatttggcgcatccttttccttgtcggcgctgctaccggcgcgcattccttcgaacaggttcagctggttcagtctggggccgaagtgaagaaacctggggcctctgtgaaggtgtcctgcaaggcttccggctacacctttaccgaccacgccatccactgggtccgacaggctccaggacaacggcttgagtggatgggctacttcagccccggcaacgacgacttcaagtacagccagaaattccagggcagagtgaccatcaccgccgatacaagcgccagcaccgcctacatggaactgagcagtctgagaagcgaggataccgccgtgtacttctgcacacggtccctgaacatggcctattggggccagggaaccctggtcacagtgtctagcggaagcacatctacgcgtatccagaaccctgatcctgccgtgtaccagctgcgggatagcaagagcagcgacaagagcgtgtgtctgttcaccgacttcgacagccagaccaacgtgtcccagagcaaggactccgacgtgtacatcaccgataagtgcgtgctggacatgcggagcatggacttcaagagcaactccgccgtggcctggtccaacaagtccgatttcgcctgcgccaacgccttcaacaacagcattatccccgaggacacattcttcccaagcagcgacgtgccctgcggtacccagagttttgggttgttggaccctaaattgtgctatctgttggacggaatcctgttcatttacggagtgatcctgaccgcattgttcctgcgggttaagttttccagatccgcagacgcacccgcttaccaacaagggcagaaccaactctacaatgaacttaatttggggcggagggaagagtacgacgttctggacaaaaggaggggacgagatcccgagatgggcggaaagcctcagcgaaggaagaatccgcaagaggggctttataacgaactccagaaagataaaatggcagaagcctatagtgagattgggatgaagggagaaaggaggaggggtaaaggtcacgatgggttgtaccaaggattgagcacagccactaaagatacctatgatgcgctccacatgcaggccctgccgccaaga

SEQ ID NO: 3894 - DNA, 2676 bp, synthetic construct
  source 1..2676: mol_type = other DNA
atggccttaccagtgaccgccttgctcctgccgctggccttgctgctccacgccgccaggccggatattgtgatgacacagagccccgacagcctggccgtgtctcttggagaaagagccaccatcaactgcaagagcagccagagcctgctgtactccagcaacagcaagaactacctggcctggtatcagcagaagcccggccagcctcctaagctgctgatctactgggccagcaccagagaaagcggcgtgcccgatagattttctggctctggcagcggcaccgacttcaccctgacaatttctagcctgcaagccgaggacgtggccgtgtattactgccagcagccttacagctaccctctgagctttggagccggcaccaagctggaactgaaactcgaggggaaaccaattcccaaccctcttctgggactggattcaaccggcagcggcgaggacctgaagaacgtgttcccacctgaggtggccgtgttcgagcctagcgaggccgagatcagccacacccagaaagccaccctcgtgtgcctggctaccggcttctaccccgaccatgtggaactgtcttggtgggtcaacggcaaagaggtgcacagcggcgtgtctaccgacccccagccactgaaagaacagcccgccctgaacgacagccggtactgcctgagcagcagactgagagtgtccgccaccttctggcagaacccccggaaccacttcagatgccaggtgcagttctacggcctgagcgagaacgacgagtggacccaggacagagccaagcccgtgacccagatcgtgtctgccgaagcctggggcagagccgattgcggatcccagagcttcggcctgctggaccccaagctgtgctacctgctggatggcatcctgttcatctacggcgtgatcctgaccgccctgttcctgagagtgaagttcagcagaagcgccgacgcccctgcctaccagcagggacagaaccaactgtacaacgagctgaacctgggcagacgggaagagtacgacgtgctggacaagcggagaggcagggaccctgagatgggcggaaagccccagcggagaaagaacccccaggaaggactgtataacgaactccagaaagacaagatggccgaagcctacagcgagatcggcatgaagggcgagcggagaagaggcaagggccacgatggcctgtaccagggcctgagcaccgccaccaaggacacctatgacgccctgcacatgcaggccctgcctccaagaagggccaagcgatctggatctggagcaacaaacttctcactactcaaacaagcaggtgacgtggaggagaatcccgggcctactagtatggactggatttggcgcatccttttccttgtcggcgctgctaccggcgcgcattccttcgaacaggttcagctggttcagtctggggccgaagtgaagaaacctggggcctctgtgaaggtgtcctgcaaggcttccggctacacctttaccgaccacgccatccactgggtccgacaggctccaggacaacggcttgagtggatgggctacttcagccccggcaacgacgacttcaagtacagccagaaattccagggcagagtgaccatcaccgccgatacaagcgccagcaccgcctacatggaactgagcagtctgagaagcgaggataccgccgtgtacttctgcacacggtccctgaacatggcctattggggccagggaaccctggtcacagtgtctagcggaagcacatctacgcgtgagcagaaactgatctcggaagaggatgggagcggcatccagaaccctgatcctgccgtgtaccagctgcgggatagcaagagcagcgacaagagcgtgtgtctgttcaccgacttcgacagccagaccaacgtgtcccagagcaaggactccgacgtgtacatcaccgataagaccgtgctggacatgcggagcatggacttcaagagcaactccgccgtggcctggtccaacaagtccgatttcgcctgcgccaacgccttcaacaacagcattatccccgaggacacattcttcccaagccccgagagcagctgcggtacccagagttttgggttgttggaccctaaattgtgctatctgttggacggaatcctgttcatttacggagtgatcctgaccgcattgttcctgaggagcaagcggtcacggctgctccacagcgattacatgaatatgacaccacgaagaccgggtcctactcgcaaacactaccaaccctacgcacctccccgcgactttgcagcgtaccgatctcgggttaagttttccagatccgcagacgcacccgcttaccaacaagggcagaaccaactctacaatgaacttaatttggggcggagggaagagtacgacgttctggacaaaaggaggggacgagatcccgagatgggcggaaagcctcagcgaaggaagaatccgcaagaggggctttataacgaactccagaaagataaaatggcagaagcctatagtgagattgggatgaagggagaaaggaggaggggtaaaggtcacgatgggttgtaccaaggattgagcacagccactaaagatacctatgatgcgctccacatgcaggccctgccgccaaga

SEQ ID NO: 3895 - DNA, 2799 bp, synthetic construct
  source 1..2799: mol_type = other DNA
atggccttaccagtgaccgccttgctcctgccgctggccttgctgctccacgccgccaggccggatattgtgatgacacagagccccgacagcctggccgtgtctcttggagaaagagccaccatcaactgcaagagcagccagagcctgctgtactccagcaacagcaagaactacctggcctggtatcagcagaagcccggccagcctcctaagctgctgatctactgggccagcaccagagaaagcggcgtgcccgatagattttctggctctggcagcggcaccgacttcaccctgacaatttctagcctgcaagccgaggacgtggccgtgtattactgccagcagccttacagctaccctctgagctttggagccggcaccaagctggaactgaaactcgaggggaaaccaattcccaaccctcttctgggactggattcaaccggcagcggcgaggacctgaagaacgtgttcccacctgaggtggccgtgttcgagcctagcgaggccgagatcagccacacccagaaagccaccctcgtgtgcctggctaccggcttctaccccgaccatgtggaactgtcttggtgggtcaacggcaaagaggtgcacagcggcgtgtctaccgacccccagccactgaaagaacagcccgccctgaacgacagccggtactgcctgagcagcagactgagagtgtccgccaccttctggcagaacccccggaaccacttcagatgccaggtgcagttctacggcctgagcgagaacgacgagtggacccaggacagagccaagcccgtgacccagatcgtgtctgccgaagcctggggcagagccgattgcggatcccagagcttcggcctgctggaccccaagctgtgctacctgctggatggcatcctgttcatctacggcgtgatcctgaccgccctgttcctgaggagtaagaggagcaggctcctgcacagtgactacatgaacatgactccacgccgccccggacccacccgcaagcattaccagccctatgccccaccacgcgacttcgcagcctatcgctccagagtgaagttcagcagaagcgccgacgcccctgcctaccagcagggacagaaccaactgtacaacgagctgaacctgggcagacgggaagagtacgacgtgctggacaagcggagaggcagggaccctgagatgggcggaaagccccagcggagaaagaacccccaggaaggactgtataacgaactccagaaagacaagatggccgaagcctacagcgagatcggcatgaagggcgagcggagaagaggcaagggccacgatggcctgtaccagggcctgagcaccgccaccaaggacacctatgacgccctgcacatgcaggccctgcctccaagaagggccaagcgatctggatctggagcaacaaacttctcactactcaaacaagcaggtgacgtggaggagaatcccgggcctactagtatggactggatttggcgcatccttttccttgtcggcgctgctaccggcgcgcattccttcgaacaggttcagctggttcagtctggggccgaagtgaagaaacctggggcctctgtgaaggtgtcctgcaaggcttccggctacacctttaccgaccacgccatccactgggtccgacaggctccaggacaacggcttgagtggatgggctacttcagccccggcaacgacgacttcaagtacagccagaaattccagggcagagtgaccatcaccgccgatacaagcgccagcaccgcctacatggaactgagcagtctgagaagcgaggataccgccgtgtacttctgcacacggtccctgaacatggcctattggggccagggaaccctggtcacagtgtctagcggaagcacatctacgcgtgagcagaaactgatctcggaagaggatgggagcggcatccagaaccctgatcctgccgtgtaccagctgcgggatagcaagagcagcgacaagagcgtgtgtctgttcaccgacttcgacagccagaccaacgtgtcccagagcaaggactccgacgtgtacatcaccgataagaccgtgctggacatgcggagcatggacttcaagagcaactccgccgtggcctggtccaacaagtccgatttcgcctgcgccaacgccttcaacaacagcattatccccgaggacacattcttcccaagccccgagagcagctgcggtacccagagttttgggttgttggaccctaaattgtgctatctgttggacggaatcctgttcatttacggagtgatcctgaccgcattgttcctgaggagcaagcggtcacggctgctccacagcgattacatgaatatgacaccacgaagaccgggtcctactcgcaaacactaccaaccctacgcacctccccgcgactttgcagcgtaccgatctcgggttaagttttccagatccgcagacgcacccgcttaccaacaagggcagaaccaactctacaatgaacttaatttggggcggagggaagagtacgacgttctggacaaaaggaggggacgagatcccgagatgggcggaaagcctcagcgaaggaagaatccgcaagaggggctttataacgaactccagaaagataaaatggcagaagcctatagtgagattgggatgaagggagaaaggaggaggggtaaaggtcacgatgggttgtaccaaggattgagcacagccactaaagatacctatgatgcgctccacatgcaggccctgccgccaaga

SEQ ID NO: 3896 - DNA, 2682 bp, synthetic construct
  source 1..2682: mol_type = other DNA
atggccttaccagtgaccgccttgctcctgccgctggccttgctgctccacgccgccaggccggatattgtgatgacacagagccccgacagcctggccgtgtctcttggagaaagagccaccatcaactgcaagagcagccagagcctgctgtactccagcaacagcaagaactacctggcctggtatcagcagaagcccggccagcctcctaagctgctgatctactgggccagcaccagagaaagcggcgtgcccgatagattttctggctctggcagcggcaccgacttcaccctgacaatttctagcctgcaagccgaggacgtggccgtgtattactgccagcagccttacagctaccctctgagctttggagccggcaccaagctggaactgaaactcgaggggaaaccaattcccaaccctcttctgggactggattcaaccggcagcggcgaggacctgaagaacgtgttcccacctgaggtggccgtgttcgagcctagcgaggccgagatcagccacacccagaaagccaccctcgtgtgcctggctaccggcttctaccccgaccatgtggaactgtcttggtgggtcaacggcaaagaggtgcacagcggcgtgtctaccgacccccagccactgaaagaacagcccgccctgaacgacagccggtactgcctgagcagcagactgagagtgtccgccaccttctggcagaacccccggaaccacttcagatgccaggtgcagttctacggcctgagcgagaacgacgagtggacccaggacagagccaagcccgtgacccagatcgtgtctgccgaagcctggggcagagccgattgcggatcccagagcttcggcctgctggaccccaagctgtgctacctgctggatggcatcctgttcatctacggcgtgatcctgaccgccctgttcctgagagtgaagttcagcagaagcgccgacgcccctgcctaccagcagggacagaaccaactgtacaacgagctgaacctgggcagacgggaagagtacgacgtgctggacaagcggagaggcagggaccctgagatgggcggaaagccccagcggagaaagaacccccaggaaggactgtataacgaactccagaaagacaagatggccgaagcctacagcgagatcggcatgaagggcgagcggagaagaggcaagggccacgatggcctgtaccagggcctgagcaccgccaccaaggacacctatgacgccctgcacatgcaggccctgcctccaagaagggccaagcgatctggatctggagcaacaaacttctcactactcaaacaagcaggtgacgtggaggagaatcccgggcctactagtatggactggatttggcgcatccttttccttgtcggcgctgctaccggcgcgcattccttcgaacaggttcagctggttcagtctggggccgaagtgaagaaacctggggcctctgtgaaggtgtcctgcaaggcttccggctacacctttaccgaccacgccatccactgggtccgacaggctccaggacaacggcttgagtggatgggctacttcagccccggcaacgacgacttcaagtacagccagaaattccagggcagagtgaccatcaccgccgatacaagcgccagcaccgcctacatggaactgagcagtctgagaagcgaggataccgccgtgtacttctgcacacggtccctgaacatggcctattggggccagggaaccctggtcacagtgtctagcggaagcacatctacgcgtgagcagaaactgatctcggaagaggatctggggagcggcatccagaaccctgatcctgccgtgtaccagctgcgggatagcaagagcagcgacaagagcgtgtgtctgttcaccgacttcgacagccagaccaacgtgtcccagagcaaggactccgacgtgtacatcaccgataagaccgtgctggacatgcggagcatggacttcaagagcaactccgccgtggcctggtccaacaagtccgatttcgcctgcgccaacgccttcaacaacagcattatccccgaggacacattcttcccaagccccgagagcagctgcggtacccagagttttgggttgttggaccctaaattgtgctatctgttggacggaatcctgttcatttacggagtgatcctgaccgcattgttcctgaagagaggccggaagaagctgctgtacatcttcaagcagcctttcatgcggcccgtgcagaccacccaggaagaggacggctgctcctgccggttccccgaggaagaagaaggcggctgcgagctgcgggttaagttttccagatccgcagacgcacccgcttaccaacaagggcagaaccaactctacaatgaacttaatttggggcggagggaagagtacgacgttctggacaaaaggaggggacgagatcccgagatgggcggaaagcctcagcgaaggaagaatccgcaagaggggctttataacgaactccagaaagataaaatggcagaagcctatagtgagattgggatgaagggagaaaggaggaggggtaaaggtcacgatgggttgtaccaaggattgagcacagccactaaagatacctatgatgcgctccacatgcaggccctgccgccaaga

SEQ ID NO: 3897 - DNA, 2808 bp, synthetic construct
  source 1..2808: mol_type = other DNA
atggccttaccagtgaccgccttgctcctgccgctggccttgctgctccacgccgccaggccggatattgtgatgacacagagccccgacagcctggccgtgtctcttggagaaagagccaccatcaactgcaagagcagccagagcctgctgtactccagcaacagcaagaactacctggcctggtatcagcagaagcccggccagcctcctaagctgctgatctactgggccagcaccagagaaagcggcgtgcccgatagattttctggctctggcagcggcaccgacttcaccctgacaatttctagcctgcaagccgaggacgtggccgtgtattactgccagcagccttacagctaccctctgagctttggagccggcaccaagctggaactgaaactcgaggggaaaccaattcccaaccctcttctgggactggattcaaccggcagcggcgaggacctgaagaacgtgttcccacctgaggtggccgtgttcgagcctagcgaggccgagatcagccacacccagaaagccaccctcgtgtgcctggctaccggcttctaccccgaccatgtggaactgtcttggtgggtcaacggcaaagaggtgcacagcggcgtgtctaccgacccccagccactgaaagaacagcccgccctgaacgacagccggtactgcctgagcagcagactgagagtgtccgccaccttctggcagaacccccggaaccacttcagatgccaggtgcagttctacggcctgagcgagaacgacgagtggacccaggacagagccaagcccgtgacccagatcgtgtctgccgaagcctggggcagagccgattgcggatcccagagcttcggcctgctggaccccaagctgtgctacctgctggatggcatcctgttcatctacggcgtgatcctgaccgccctgttcctgaaacggggcagaaagaaactcctgtatatattcaaacaaccatttatgagaccagtacaaactactcaagaggaagatggctgtagctgccgatttccagaagaagaagaaggaggatgtgaactgagagtgaagttcagcagaagcgccgacgcccctgcctaccagcagggacagaaccaactgtacaacgagctgaacctgggcagacgggaagagtacgacgtgctggacaagcggagaggcagggaccctgagatgggcggaaagccccagcggagaaagaacccccaggaaggactgtataacgaactccagaaagacaagatggccgaagcctacagcgagatcggcatgaagggcgagcggagaagaggcaagggccacgatggcctgtaccagggcctgagcaccgccaccaaggacacctatgacgccctgcacatgcaggccctgcctccaagaagggccaagcgatctggatctggagcaacaaacttctcactactcaaacaagcaggtgacgtggaggagaatcccgggcctactagtatggactggatttggcgcatccttttccttgtcggcgctgctaccggcgcgcattccttcgaacaggttcagctggttcagtctggggccgaagtgaagaaacctggggcctctgtgaaggtgtcctgcaaggcttccggctacacctttaccgaccacgccatccactgggtccgacaggctccaggacaacggcttgagtggatgggctacttcagccccggcaacgacgacttcaagtacagccagaaattccagggcagagtgaccatcaccgccgatacaagcgccagcaccgcctacatggaactgagcagtctgagaagcgaggataccgccgtgtacttctgcacacggtccctgaacatggcctattggggccagggaaccctggtcacagtgtctagcggaagcacatctacgcgtgagcagaaactgatctcggaagaggatctggggagcggcatccagaaccctgatcctgccgtgtaccagctgcgggatagcaagagcagcgacaagagcgtgtgtctgttcaccgacttcgacagccagaccaacgtgtcccagagcaaggactccgacgtgtacatcaccgataagaccgtgctggacatgcggagcatggacttcaagagcaactccgccgtggcctggtccaacaagtccgatttcgcctgcgccaacgccttcaacaacagcattatccccgaggacacattcttcccaagccccgagagcagctgcggtacccagagttttgggttgttggaccctaaattgtgctatctgttggacggaatcctgttcatttacggagtgatcctgaccgcattgttcctgaagagaggccggaagaagctgctgtacatcttcaagcagcctttcatgcggcccgtgcagaccacccaggaagaggacggctgctcctgccggttccccgaggaagaagaaggcggctgcgagctgcgggttaagttttccagatccgcagacgcacccgcttaccaacaagggcagaaccaactctacaatgaacttaatttggggcggagggaagagtacgacgttctggacaaaaggaggggacgagatcccgagatgggcggaaagcctcagcgaaggaagaatccgcaagaggggctttataacgaactccagaaagataaaatggcagaagcctatagtgagattgggatgaagggagaaaggaggaggggtaaaggtcacgatgggttgtaccaaggattgagcacagccactaaagatacctatgatgcgctccacatgcaggccctgccgccaaga

SEQ ID NO: 3898 - DNA, 2481 bp, synthetic construct
  source 1..2481: mol_type = other DNA
atggccttaccagtgaccgccttgctcctgccgctggccttgctgctccacgccgccaggccggatattgtgatgacacagagccccgacagcctggccgtgtctcttggagaaagagccaccatcaactgcaagagcagccagagcctgctgtactccagcaacagcaagaactacctggcctggtatcagcagaagcccggccagcctcctaagctgctgatctactgggccagcaccagagaaagcggcgtgcccgatagattttctggctctggcagcggcaccgacttcaccctgacaatttctagcctgcaagccgaggacgtggccgtgtattactgccagcagccttacagctaccctctgagctttggagccggcaccaagctggaactgaaactcgagcagagcttcggcctgctggaccccaagctgtgctacctgctggatggcatcctgttcatctacggcgtgatcctgaccgccctgttcctgagagtgaagttcagcagaagcgccgacgcccctgcctaccagcagggacagaaccaactgtacaacgagctgaacctgggcagacgggaagagtacgacgtgctggacaagcggagaggcagggaccctgagatgggcggaaagccccagcggagaaagaacccccaggaaggactgtataacgaactccagaaagacaagatggccgaagcctacagcgagatcggcatgaagggcgagcggagaagaggcaagggccacgatggcctgtaccagggcctgagcaccgccaccaaggacacctatgacgccctgcacatgcaggccctgcctccaagaagggccaagcgatctggatctggagcaacaaacttctcactactcaaacaagcaggtgacgtggaggagaatcccgggcctactagtatggactggatttggcgcatccttttccttgtcggcgctgctaccggcgcgcattccttcgaacaggttcagctggttcagtctggggccgaagtgaagaaacctggggcctctgtgaaggtgtcctgcaaggcttccggctacacctttaccgaccacgccatccactgggtccgacaggctccaggacaacggcttgagtggatgggctacttcagccccggcaacgacgacttcaagtacagccagaaattccagggcagagtgaccatcaccgccgatacaagcgccagcaccgcctacatggaactgagcagtctgagaagcgaggataccgccgtgtacttctgcacacggtccctgaacatggcctattggggccagggaaccctggtcacagtgtctagcggaagcacatctacgcgtcagagttttgggttgttggaccctaaattgtgctatctgttggacggaatcctgttcatttacggagtgatcctgaccgcattgttcctgcgggttaagttttccagatccgcagacgcacccgcttaccaacaagggcagaaccaactctacaatgaacttaatttggggcggagggaagagtacgacgttctggacaaaaggaggggacgagatcccgagatgggcggaaagcctcagcgaaggaagaatccgcaagaggggctttataacgaactccagaaagataaaatggcagaagcctatagtgagattgggatgaagggagaaaggaggaggggtaaaggtcacgatgggttgtaccaaggattgagcacagccactaaagatacctatgatgcgctccacatgcaggccctgccgccaagacgcgccaagagaagcggatctggcgtgaagcagaccctgaatttcgacctgctgaagctggctggcgacgtggaatccaacccaggcccttctagaggccatatgaccgagtacaagcccacggtgcgcctcgccacccgcgacgacgtccccagggccgtacgcaccctcgccgccgcgttcgccgactaccccgccacgcgccacaccgtcgatccggaccgccacatcgagcgggtcaccgagctgcaagaactcttcctcacgcgcgtcgggctcgacatcggcaaggtgtgggtcgcggacgacggcgccgcggtggcggtctggaccacgccggagagcgtcgaagcgggggcggtgttcgccgagatcggcccgcgcatggccgagttgagcggttcccggctggccgcgcagcaacagatggaaggcctcctggcgccgcaccggcccaaggagcccgcgtggttcctggccaccgtcggcgtctcgcccgaccaccagggcaagggtctgggcagcgccgtcgtgctccccggagtggaggcggccgagcgcgccggggtgcccgccttcctggagacctccgcgccccgcaacctccccttctacgagcggctcggcttcaccgtcaccgccgacgtcgaggtgcccgaaggaccgcgcacctggtgcatgacccgcaagcccggtgcctga

SEQ ID NO: 3899 - DNA, 1953 bp, synthetic construct
  source 1..1953: mol_type = other DNA
atggccttaccagtgaccgccttgctcctgccgctggccttgctgctccacgccgccaggccggatattgtgatgacacagagccccgacagcctggccgtgtctcttggagaaagagccaccatcaactgcaagagcagccagagcctgctgtactccagcaacagcaagaactacctggcctggtatcagcagaagcccggccagcctcctaagctgctgatctactgggccagcaccagagaaagcggcgtgcccgatagattttctggctctggcagcggcaccgacttcaccctgacaatttctagcctgcaagccgaggacgtggccgtgtattactgccagcagccttacagctaccctctgagctttggagccggcaccaagctggaactgaaactcgagggacagcctaaggccaatcctaccgtgacactgttccctccaagcagcgaagaactccaggccaacaaggccacacttgtgtgcctgatctccgacttctaccctggggctgtgacagtggcttggaaggccgatggatctcctgtgaaagccggcgtggaaaccaccaagccatccaagcagagcaacaacaaatacgccgccagctcctacctgagcctgacacctgagcagtggaagtcccacagatcctacagctgccaagtgacccacgaaggcagcaccgtggaaaagacagtggcccctacagagtgcagccccatcaagaccgatgtgattacaatggaccccaaggacaactgctccaaggacgccaacgataccctgctgctccagctgaccaacaccagcgcctactacatgtacttgttgctgctgctgaagtccgtggtgtacttcgccatcatcacatgctgcctgctgcggagaaccgccttctgctgcaacggcgagaagtctagggccaagcgatctggatctggagcaacaaacttctcactactcaaacaagcaggtgacgtggaggagaatcccgggcctactagtatggactggatttggcgcatccttttccttgtcggcgctgctaccggcgcgcattccttcgaacaggttcagctggttcagtctggggccgaagtgaagaaacctggggcctctgtgaaggtgtcctgcaaggcttccggctacacctttaccgaccacgccatccactgggtccgacaggctccaggacaacggcttgagtggatgggctacttcagccccggcaacgacgacttcaagtacagccagaaattccagggcagagtgaccatcaccgccgatacaagcgccagcaccgcctacatggaactgagcagtctgagaagcgaggataccgccgtgtacttctgcacacggtccctgaacatggcctattggggccagggaaccctggtcacagtgtctagcggaagcacatctacgcgtgcctctacaaagggaccctccgtgtttcctctggctcccagcagcaagtctacaagcggaggaacagccgctctgggctgcctggtcaaggattactttcccgagcctgtgaccgtgtcctggaatagcggagcactgacaagcggcgtgcacacctttccagccgtgctgcaaagcagcggcctgtactctctgagcagcgtggtcacagtgcctagctctagcctgggcacccagacctacatctgcaatgtgaaccacaagcctagcaacaccaaggtggacaagagagtggaacccaagagctgtgaagtgaaaaccgactccaccgaccacgtgaagcccaaagagacagagaacaccaagcagcccagcaagagctgccacaagcccaaggccatcgtgcacaccgagaaagtgaacatgatgagcctgaccgtgctgggcctgcggatgctgttcgccaaaaccgtggccgtgaacttcctgctgaccgccaagctgttcttcctc

SEQ ID NO: 3900 - DNA, 1887 bp, synthetic construct
  source 1..1887: mol_type = other DNA
atggccttaccagtgaccgccttgctcctgccgctggccttgctgctccacgccgccaggccggatattgtgatgacacagagccccgacagcctggccgtgtctcttggagaaagagccaccatcaactgcaagagcagccagagcctgctgtactccagcaacagcaagaactacctggcctggtatcagcagaagcccggccagcctcctaagctgctgatctactgggccagcaccagagaaagcggcgtgcccgatagattttctggctctggcagcggcaccgacttcaccctgacaatttctagcctgcaagccgaggacgtggccgtgtattactgccagcagccttacagctaccctctgagctttggagccggcaccaagctggaactgaaactcgagggacagcctaaggccaatcctaccgtgacactgttccctccaagcagcgaagaactccaggccaacaaggccacacttgtgtgcctgatctccgacttctaccctggggctgtgacagtggcttggaaggccgatggatctcctgtgaaagccggcgtggaaaccaccaagccatccaagcagagcaacaacaaatacgccgccagctcctacctgagcctgacacctgagcagtggaagtcccacagatcctacagctgccaagtgacccacgaaggcagcaccgtggaaaagacagtggcccctacagagtgcagcggcagagccgattgcggcatcaccagcgccagctaccaccagggcgtgctgagcgccaccatcctgtacgagatcctgctgggcaaggccaccctgtacgccgtgctggtgtctgccctggtgctgatggctatggtcaagcggaaggacagccggggaagggccaagcgatctggatctggagcaacaaacttctcactactcaaacaagcaggtgacgtggaggagaatcccgggcctactagtatggactggatttggcgcatccttttccttgtcggcgctgctaccggcgcgcattccttcgaacaggttcagctggttcagtctggggccgaagtgaagaaacctggggcctctgtgaaggtgtcctgcaaggcttccggctacacctttaccgaccacgccatccactgggtccgacaggctccaggacaacggcttgagtggatgggctacttcagccccggcaacgacgacttcaagtacagccagaaattccagggcagagtgaccatcaccgccgatacaagcgccagcaccgcctacatggaactgagcagtctgagaagcgaggataccgccgtgtacttctgcacacggtccctgaacatggcctattggggccagggaaccctggtcacagtgtctagcggaagcacatctacgcgtgcctctacaaagggaccctccgtgtttcctctggctcccagcagcaagtctacaagcggaggaacagccgctctgggctgcctggtcaaggattactttcccgagcctgtgaccgtgtcctggaatagcggagcactgacaagcggcgtgcacacctttccagccgtgctgcaaagcagcggcctgtactctctgagcagcgtggtcacagtgcctagctctagcctgggcacccagacctacatctgcaatgtgaaccacaagcctagcaacaccaaggtggacaagagagtggaacccaagagctgtatccccgaggacacattcttcccaagcagcgacgtgccctgcgacgtgaagctggtggaaaagagcttcgagacagacaccaacctgaacttccagaacctgagcgtgatcggcttcagaatcctgctgctgaaagtggccggctttaacctgctgatgaccctgcggctgtggtccagc

SEQ ID NO: 3901 - DNA, 1887 bp, synthetic construct
  source 1..1887: mol_type = other DNA
atggccttaccagtgaccgccttgctcctgccgctggccttgctgctccacgccgccaggccggatattgtgatgacacagagccccgacagcctggccgtgtctcttggagaaagagccaccatcaactgcaagagcagccagagcctgctgtactccagcaacagcaagaactacctggcctggtatcagcagaagcccggccagcctcctaagctgctgatctactgggccagcaccagagaaagcggcgtgcccgatagattttctggctctggcagcggcaccgacttcaccctgacaatttctagcctgcaagccgaggacgtggccgtgtattactgccagcagccttacagctaccctctgagctttggagccggcaccaagctggaactgaaactcgagggacagcctaaggccaatcctaccgtgacactgttccctccaagcagcgaagaactccaggccaacaaggccacacttgtgtgcctgatctccgacttctaccctggggctgtgacagtggcttggaaggccgatggatctcctgtgaaagccggcgtggaaaccaccaagccatccaagcagagcaacaacaaatacgccgccagctcctacctgagcctgacacctgagcagtggaagtcccacagatcctacagctgccaagtgacccacgaaggcagcaccgtggaaaagacagtggcccctacagagtgcagcggcagagccgattgcggctttaccagcgagagctaccagcagggcgtgctgagcgccaccatcctgtacgagatcctgctgggcaaggccaccctgtacgccgtgctggtgtctgccctggtgctgatggctatggtcaagcggaaggacagccggggaagggccaagcgatctggatctggagcaacaaacttctcactactcaaacaagcaggtgacgtggaggagaatcccgggcctactagtatggactggatttggcgcatccttttccttgtcggcgctgctaccggcgcgcattccttcgaacaggttcagctggttcagtctggggccgaagtgaagaaacctggggcctctgtgaaggtgtcctgcaaggcttccggctacacctttaccgaccacgccatccactgggtccgacaggctccaggacaacggcttgagtggatgggctacttcagccccggcaacgacgacttcaagtacagccagaaattccagggcagagtgaccatcaccgccgatacaagcgccagcaccgcctacatggaactgagcagtctgagaagcgaggataccgccgtgtacttctgcacacggtccctgaacatggcctattggggccagggaaccctggtcacagtgtctagcggaagcacatctacgcgtgcctctacaaagggaccctccgtgtttcctctggctcccagcagcaagtctacaagcggaggaacagccgctctgggctgcctggtcaaggattactttcccgagcctgtgaccgtgtcctggaatagcggagcactgacaagcggcgtgcacacctttccagccgtgctgcaaagcagcggcctgtactctctgagcagcgtggtcacagtgcctagctctagcctgggcacccagacctacatctgcaatgtgaaccacaagcctagcaacaccaaggtggacaagagagtggaacccaagagctgtatccccgaggacacattcttcccaagccccgagagcagctgcgacgtgaagctggtggaaaagagcttcgagacagacaccaacctgaacttccagaacctgagcgtgatcggcttcagaatcctgctgctgaaagtggccggctttaacctgctgatgaccctgcggctgtggtccagc

SEQ ID NO: 3902 - DNA, 1365 bp, synthetic construct
  source 1..1365: mol_type = other DNA
atggccttaccagtgaccgccttgctcctgccgctggccttgctgctccacgccgccaggccggatattgtgatgacacagagccccgacagcctggccgtgtctcttggagaaagagccaccatcaactgcaagagcagccagagcctgctgtactccagcaacagcaagaactacctggcctggtatcagcagaagcccggccagcctcctaagctgctgatctactgggccagcaccagagaaagcggcgtgcccgatagattttctggctctggcagcggcaccgacttcaccctgacaatttctagcctgcaagccgaggacgtggccgtgtattactgccagcagccttacagctaccctctgagctttggagccggcaccaagctggaactgaaaggcggaggcggaagtggaggcggaggatctggcggcggaggctctcaggttcagctggttcagtctggggccgaagtgaagaaacctggggcctctgtgaaggtgtcctgcaaggcttccggctacacctttaccgaccacgccatccactgggtccgacaggctccaggacaacggcttgagtggatgggctacttcagccccggcaacgacgacttcaagtacagccagaaattccagggcagagtgaccatcaccgccgatacaagcgccagcaccgcctacatggaactgagcagtctgagaagcgaggataccgccgtgtacttctgcacacggtccctgaacatggcctattggggccagggaaccctggtcacagtgtctagcggaagcacatctacgcgtgacggtaacgaggagatgggaggaatcactcaaaccccttacaaagtctcaatttcaggaacaactgttatccttacatgtccccagtatcctggcagcgagatcctttggcagcataacgacaagaatatagggggagatgaagacgataagaatatcggatctgacgaggatcacttgagcctgaaagagttctccgagcttgaacaaagcggatattatgtgtgctatccgcgcgggtcaaagccggaagacgctaacttttacctttatctccgagccagagtgtgcgaaaattgcatggaaatggacgttatgtccgttgctacaatagttatcgtagatatatgcatcacgggtggactgcttctgctggtttattattggtccaagaatagaaaggccaaagctaaacccgtgaccagaggcgctggcgcaggcggaaggcaaaggggacaaaacaaagaacggccaccaccagtgccaaatccagattatgagcctattcggaaaggacagagggacctgtactctggcctgaatcagagaagaatc

SEQ ID NO: 3903 - DNA, 1260 bp, synthetic construct
  source 1..1260: mol_type = other DNA
atggccttaccagtgaccgccttgctcctgccgctggccttgctgctccacgccgccaggccggatattgtgatgacacagagccccgacagcctggccgtgtctcttggagaaagagccaccatcaactgcaagagcagccagagcctgctgtactccagcaacagcaagaactacctggcctggtatcagcagaagcccggccagcctcctaagctgctgatctactgggccagcaccagagaaagcggcgtgcccgatagattttctggctctggcagcggcaccgacttcaccctgacaatttctagcctgcaagccgaggacgtggccgtgtattactgccagcagccttacagctaccctctgagctttggagccggcaccaagctggaactgaaaggcggaggcggaagtggaggcggaggatctggcggcggaggctctcaggttcagctggttcagtctggggccgaagtgaagaaacctggggcctctgtgaaggtgtcctgcaaggcttccggctacacctttaccgaccacgccatccactgggtccgacaggctccaggacaacggcttgagtggatgggctacttcagccccggcaacgacgacttcaagtacagccagaaattccagggcagagtgaccatcaccgccgatacaagcgccagcaccgcctacatggaactgagcagtctgagaagcgaggataccgccgtgtacttctgcacacggtccctgaacatggcctattggggccagggaaccctggtcacagtgtctagcggaagcacatctacgcgtttcaagatccccatcgaggaactggaagatcgggtgttcgtgaactgcaacacctctatcacctgggtggaaggcaccgtgggaacactgctgagcgacatcaccagactggacctcggcaagcggattctggaccctcggggcatctacagatgcaacggcaccgacatctacaaggacaaagaaagcaccgtgcaggtccactacagaatgtgccagtcctgcgtggaactggaccctgctacagtggccggcatcatcgtgaccgatgtgatcgctactctgctgctggctctgggagtgttctgcttcgccggacacgaaacaggcagactgtctggcgctgccgatacacaggccctgctgagaaacgaccaagtgtatcagcccctgcgcgacagagatgatgcccagtattctcacctcggcggcaactgggctagaaacaag

SEQ ID NO: 3904 - DNA, 1290 bp, synthetic construct
  source 1..1290: mol_type = other DNA
atggccttaccagtgaccgccttgctcctgccgctggccttgctgctccacgccgccaggccggatattgtgatgacacagagccccgacagcctggccgtgtctcttggagaaagagccaccatcaactgcaagagcagccagagcctgctgtactccagcaacagcaagaactacctggcctggtatcagcagaagcccggccagcctcctaagctgctgatctactgggccagcaccagagaaagcggcgtgcccgatagattttctggctctggcagcggcaccgacttcaccctgacaatttctagcctgcaagccgaggacgtggccgtgtattactgccagcagccttacagctaccctctgagctttggagccggcaccaagctggaactgaaaggcggaggcggaagtggaggcggaggatctggcggcggaggctctcaggttcagctggttcagtctggggccgaagtgaagaaacctggggcctctgtgaaggtgtcctgcaaggcttccggctacacctttaccgaccacgccatccactgggtccgacaggctccaggacaacggcttgagtggatgggctacttcagccccggcaacgacgacttcaagtacagccagaaattccagggcagagtgaccatcaccgccgatacaagcgccagcaccgcctacatggaactgagcagtctgagaagcgaggataccgccgtgtacttctgcacacggtccctgaacatggcctattggggccagggaaccctggtcacagtgtctagcggaagcacatctacgcgtcagagcatcaagggcaaccacctggtcaaggtgtacgactaccaagaggacggcagcgtgctgctgacatgtgatgccgaggccaagaacatcacctggtttaaggacggcaagatgatcggcttcctgaccgaggacaagaagaagtggaacctgggcagcaacgctaaggaccccagaggcatgtatcagtgcaagggcagccagaacaagagcaagcccctccaggtgtactaccggatgtgccagaactgcatcgagctgaacgccgctaccatcagcggctttctgttcgccgagatcgtgtccatcttcgtgctggccgtgggcgtgtactttatcgctggacaggatggcgtgcggcagagcagagcttccgataagcaaaccctgctgcctaacgaccagctgtaccagcctctgaaggacagagaggacgaccagtacagccacctccagggcaatcagctgagaagaaac

SEQ ID NO: 3905 - DNA, 1239 bp, synthetic construct
  source 1..1239: mol_type = other DNA
atggccttaccagtgaccgccttgctcctgccgctggccttgctgctccacgccgccaggccggatattgtgatgacacagagccccgacagcctggccgtgtctcttggagaaagagccaccatcaactgcaagagcagccagagcctgctgtactccagcaacagcaagaactacctggcctggtatcagcagaagcccggccagcctcctaagctgctgatctactgggccagcaccagagaaagcggcgtgcccgatagattttctggctctggcagcggcaccgacttcaccctgacaatttctagcctgcaagccgaggacgtggccgtgtattactgccagcagccttacagctaccctctgagctttggagccggcaccaagctggaactgaaaggcggaggcggaagtggaggcggaggatctggcggcggaggctctcaggttcagctggttcagtctggggccgaagtgaagaaacctggggcctctgtgaaggtgtcctgcaaggcttccggctacacctttaccgaccacgccatccactgggtccgacaggctccaggacaacggcttgagtggatgggctacttcagccccggcaacgacgacttcaagtacagccagaaattccagggcagagtgaccatcaccgccgatacaagcgccagcaccgcctacatggaactgagcagtctgagaagcgaggataccgccgtgtacttctgcacacggtccctgaacatggcctattggggccagggaaccctggtcacagtgtctagcggaagcacatctacgcgtcagagttttgggttgttggaccctaaattgtgctatctgttggacggaatcctgttcatttacggagtgatcctgaccgcattgttcctgcgggttaagttttccagatccgcagacgcacccgcttaccaacaagggcagaaccaactctacaatgaacttaatttggggcggagggaagagtacgacgttctggacaaaaggaggggacgagatcccgagatgggcggaaagcctcagcgaaggaagaatccgcaagaggggctttataacgaactccagaaagataaaatggcagaagcctatagtgagattgggatgaagggagaaaggaggaggggtaaaggtcacgatgggttgtaccaaggattgagcacagccactaaagatacctatgatgcgctccacatgcaggccctgccgccaaga

SEQ ID NO: 3906 - DNA, 1365 bp, synthetic construct
  source 1..1365: mol_type = other DNA
atggccttaccagtgaccgccttgctcctgccgctggccttgctgctccacgccgccaggccgcaggttcagctggttcagtctggggccgaagtgaagaaacctggggcctctgtgaaggtgtcctgcaaggcttccggctacacctttaccgaccacgccatccactgggtccgacaggctccaggacaacggcttgagtggatgggctacttcagccccggcaacgacgacttcaagtacagccagaaattccagggcagagtgaccatcaccgccgatacaagcgccagcaccgcctacatggaactgagcagtctgagaagcgaggataccgccgtgtacttctgcacacggtccctgaacatggcctattggggccagggaaccctggtcacagtgtctagcggaagcacatctggcggaggcggaagtggaggcggaggatctggcggcggaggctctgatattgtgatgacacagagccccgacagcctggccgtgtctcttggagaaagagccaccatcaactgcaagagcagccagagcctgctgtactccagcaacagcaagaactacctggcctggtatcagcagaagcccggccagcctcctaagctgctgatctactgggccagcaccagagaaagcggcgtgcccgatagattttctggctctggcagcggcaccgacttcaccctgacaatttctagcctgcaagccgaggacgtggccgtgtattactgccagcagccttacagctaccctctgagctttggagccggcaccaagctggaactgaaaacgcgtgacggtaacgaggagatgggaggaatcactcaaaccccttacaaagtctcaatttcaggaacaactgttatccttacatgtccccagtatcctggcagcgagatcctttggcagcataacgacaagaatatagggggagatgaagacgataagaatatcggatctgacgaggatcacttgagcctgaaagagttctccgagcttgaacaaagcggatattatgtgtgctatccgcgcgggtcaaagccggaagacgctaacttttacctttatctccgagccagagtgtgcgaaaattgcatggaaatggacgttatgtccgttgctacaatagttatcgtagatatatgcatcacgggtggactgcttctgctggtttattattggtccaagaatagaaaggccaaagctaaacccgtgaccagaggcgctggcgcaggcggaaggcaaaggggacaaaacaaagaacggccaccaccagtgccaaatccagattatgagcctattcggaaaggacagagggacctgtactctggcctgaatcagagaagaatc

SEQ ID NO: 3907 - DNA, 1260 bp, synthetic construct
  source 1..1260: mol_type = other DNA
atggccttaccagtgaccgccttgctcctgccgctggccttgctgctccacgccgccaggccgcaggttcagctggttcagtctggggccgaagtgaagaaacctggggcctctgtgaaggtgtcctgcaaggcttccggctacacctttaccgaccacgccatccactgggtccgacaggctccaggacaacggcttgagtggatgggctacttcagccccggcaacgacgacttcaagtacagccagaaattccagggcagagtgaccatcaccgccgatacaagcgccagcaccgcctacatggaactgagcagtctgagaagcgaggataccgccgtgtacttctgcacacggtccctgaacatggcctattggggccagggaaccctggtcacagtgtctagcggaagcacatctggcggaggcggaagtggaggcggaggatctggcggcggaggctctgatattgtgatgacacagagccccgacagcctggccgtgtctcttggagaaagagccaccatcaactgcaagagcagccagagcctgctgtactccagcaacagcaagaactacctggcctggtatcagcagaagcccggccagcctcctaagctgctgatctactgggccagcaccagagaaagcggcgtgcccgatagattttctggctctggcagcggcaccgacttcaccctgacaatttctagcctgcaagccgaggacgtggccgtgtattactgccagcagccttacagctaccctctgagctttggagccggcaccaagctggaactgaaaacgcgtttcaagatccccatcgaggaactggaagatcgggtgttcgtgaactgcaacacctctatcacctgggtggaaggcaccgtgggaacactgctgagcgacatcaccagactggacctcggcaagcggattctggaccctcggggcatctacagatgcaacggcaccgacatctacaaggacaaagaaagcaccgtgcaggtccactacagaatgtgccagtcctgcgtggaactggaccctgctacagtggccggcatcatcgtgaccgatgtgatcgctactctgctgctggctctgggagtgttctgcttcgccggacacgaaacaggcagactgtctggcgctgccgatacacaggccctgctgagaaacgaccaagtgtatcagcccctgcgcgacagagatgatgcccagtattctcacctcggcggcaactgggctagaaacaag

SEQ ID NO: 3908 - DNA, 1290 bp, synthetic construct
  source 1..1290: mol_type = other DNA
atggccttaccagtgaccgccttgctcctgccgctggccttgctgctccacgccgccaggccgcaggttcagctggttcagtctggggccgaagtgaagaaacctggggcctctgtgaaggtgtcctgcaaggcttccggctacacctttaccgaccacgccatccactgggtccgacaggctccaggacaacggcttgagtggatgggctacttcagccccggcaacgacgacttcaagtacagccagaaattccagggcagagtgaccatcaccgccgatacaagcgccagcaccgcctacatggaactgagcagtctgagaagcgaggataccgccgtgtacttctgcacacggtccctgaacatggcctattggggccagggaaccctggtcacagtgtctagcggaagcacatctggcggaggcggaagtggaggcggaggatctggcggcggaggctctgatattgtgatgacacagagccccgacagcctggccgtgtctcttggagaaagagccaccatcaactgcaagagcagccagagcctgctgtactccagcaacagcaagaactacctggcctggtatcagcagaagcccggccagcctcctaagctgctgatctactgggccagcaccagagaaagcggcgtgcccgatagattttctggctctggcagcggcaccgacttcaccctgacaatttctagcctgcaagccgaggacgtggccgtgtattactgccagcagccttacagctaccctctgagctttggagccggcaccaagctggaactgaaaacgcgtcagagcatcaagggcaaccacctggtcaaggtgtacgactaccaagaggacggcagcgtgctgctgacatgtgatgccgaggccaagaacatcacctggtttaaggacggcaagatgatcggcttcctgaccgaggacaagaagaagtggaacctgggcagcaacgctaaggaccccagaggcatgtatcagtgcaagggcagccagaacaagagcaagcccctccaggtgtactaccggatgtgccagaactgcatcgagctgaacgccgctaccatcagcggctttctgttcgccgagatcgtgtccatcttcgtgctggccgtgggcgtgtactttatcgctggacaggatggcgtgcggcagagcagagcttccgataagcaaaccctgctgcctaacgaccagctgtaccagcctctgaaggacagagaggacgaccagtacagccacctccagggcaatcagctgagaagaaac

SEQ ID NO: 3909 - DNA, 1239 bp, synthetic construct
  source 1..1239: mol_type = other DNA
atggccttaccagtgaccgccttgctcctgccgctggccttgctgctccacgccgccaggccgcaggttcagctggttcagtctggggccgaagtgaagaaacctggggcctctgtgaaggtgtcctgcaaggcttccggctacacctttaccgaccacgccatccactgggtccgacaggctccaggacaacggcttgagtggatgggctacttcagccccggcaacgacgacttcaagtacagccagaaattccagggcagagtgaccatcaccgccgatacaagcgccagcaccgcctacatggaactgagcagtctgagaagcgaggataccgccgtgtacttctgcacacggtccctgaacatggcctattggggccagggaaccctggtcacagtgtctagcggaagcacatctggcggaggcggaagtggaggcggaggatctggcggcggaggctctgatattgtgatgacacagagccccgacagcctggccgtgtctcttggagaaagagccaccatcaactgcaagagcagccagagcctgctgtactccagcaacagcaagaactacctggcctggtatcagcagaagcccggccagcctcctaagctgctgatctactgggccagcaccagagaaagcggcgtgcccgatagattttctggctctggcagcggcaccgacttcaccctgacaatttctagcctgcaagccgaggacgtggccgtgtattactgccagcagccttacagctaccctctgagctttggagccggcaccaagctggaactgaaaacgcgtcagagttttgggttgttggaccctaaattgtgctatctgttggacggaatcctgttcatttacggagtgatcctgaccgcattgttcctgcgggttaagttttccagatccgcagacgcacccgcttaccaacaagggcagaaccaactctacaatgaacttaatttggggcggagggaagagtacgacgttctggacaaaaggaggggacgagatcccgagatgggcggaaagcctcagcgaaggaagaatccgcaagaggggctttataacgaactccagaaagataaaatggcagaagcctatagtgagattgggatgaagggagaaaggaggaggggtaaaggtcacgatgggttgtaccaaggattgagcacagccactaaagatacctatgatgcgctccacatgcaggccctgccgccaaga
